United States Patent Application Publication US 2005/0244851 A1 - sequence listing, part 40

SEQ ID NO: 1547206 - DNA, 25 bp, Homo sapien
tggtcgtggacgctgtgggcgatga

SEQ ID NO: 1547207 - DNA, 25 bp, Homo sapien
agcgaggcctggtggtcgtggacgc

SEQ ID NO: 1547208 - DNA, 25 bp, Homo sapien
tgaggtctctcaggcacttgaagtt

SEQ ID NO: 1547209 - DNA, 25 bp, Homo sapien
aggtcccccaaccctgccccatctg

SEQ ID NO: 1547210 - DNA, 25 bp, Homo sapien
tggcggtggctgcgagtggctcctg

SEQ ID NO: 1547211 - DNA, 25 bp, Homo sapien
ctagaccagtacaactgctgctggg

SEQ ID NO: 1547212 - DNA, 25 bp, Homo sapien
ggaggccccttcactctagaccagt

SEQ ID NO: 1547213 - DNA, 25 bp, Homo sapien
ccttcactctagaccagtacaactg

SEQ ID NO: 1547214 - DNA, 25 bp, Homo sapien
tcactctagaccagtacaactgctg

SEQ ID NO: 1547215 - DNA, 25 bp, Homo sapien
tgccgccaaagagcaggttatgtgt

SEQ ID NO: 1547216 - DNA, 25 bp, Homo sapien
ggtgccgccaaagagcaggttatgt

SEQ ID NO: 1547217 - DNA, 25 bp, Homo sapien
aaagagcaggttatgtgtggtcatc

SEQ ID NO: 1547218 - DNA, 25 bp, Homo sapien
cgccaaagagcaggttatgtgtggt

SEQ ID NO: 1547219 - DNA, 25 bp, Homo sapien
cttttgggtacttcatgagtgccag

SEQ ID NO: 1547220 - DNA, 25 bp, Homo sapien
gaaggcgtggtgcagcgtggtgctc

SEQ ID NO: 1547221 - DNA, 25 bp, Homo sapien
ttgaacttttgggtacttcatgagt

SEQ ID NO: 1547222 - DNA, 25 bp, Homo sapien
ccaggaaggcgtggtgcagcgtggt

SEQ ID NO: 1547223 - DNA, 25 bp, Homo sapien
atcagcgggcgcgacagggcaacca

SEQ ID NO: 1547224 - DNA, 25 bp, Homo sapien
agaggaagcgggaagcggggtcgag

SEQ ID NO: 1547225 - DNA, 25 bp, Homo sapien
ggaagcggggtcgagggtatcagcg

SEQ ID NO: 1547226 - DNA, 25 bp, Homo sapien
tcgagggtatcagcgggcgcgacag

SEQ ID NO: 1547227 - DNA, 25 bp, Homo sapien
cttgggtatcaggaagccgcgaaag

SEQ ID NO: 1547228 - DNA, 25 bp, Homo sapien
ctagtgacgcggtgcggcaagttca

SEQ ID NO: 1547229 - DNA, 25 bp, Homo sapien
gcgaaaggccgtgtccctagtgacg

SEQ ID NO: 1547230 - DNA, 25 bp, Homo sapien
tcaccgcgtctgtgtaaggcatggc

SEQ ID NO: 1547231 - DNA, 25 bp, Homo sapien
tgagaatagcgtttaggcccagggg

SEQ ID NO: 1547232 - DNA, 25 bp, Homo sapien
ctgagaatagcgtttaggcccaggg

SEQ ID NO: 1547233 - DNA, 25 bp, Homo sapien
aggaggtggacttagcagtgtagga

SEQ ID NO: 1547234 - DNA, 25 bp, Homo sapien
gggtgaggaggtggacttagcagtg

SEQ ID NO: 1547235 - DNA, 25 bp, Homo sapien
gaggtggacttagcagtgtaggagg

SEQ ID NO: 1547236 - DNA, 25 bp, Homo sapien
tgaggaggtggacttagcagtgtag

SEQ ID NO: 1547237 - DNA, 25 bp, Homo sapien
ggttgaactcctggggcgtcaggaa

SEQ ID NO: 1547238 - DNA, 25 bp, Homo sapien
gctggggtcgtagtggacggtgtta

SEQ ID NO: 1547239 - DNA, 25 bp, Homo sapien
ttgaactcctggggcgtcaggaact

SEQ ID NO: 1547240 - DNA, 25 bp, Homo sapien
agtggacggtgttaaggagggtgat

SEQ ID NO: 1547241 - DNA, 25 bp, Homo sapien
ggagtgagaggatttggcaagtgga

SEQ ID NO: 1547242 - DNA, 25 bp, Homo sapien
gagtgagaggatttggcaagtggaa

SEQ ID NO: 1547243 - DNA, 25 bp, Homo sapien
gaaggagtgagaggatttggcaagt

SEQ ID NO: 1547244 - DNA, 25 bp, Homo sapien
aaggagtgagaggatttggcaagtg

SEQ ID NO: 1547245 - DNA, 25 bp, Homo sapien
ggaatgaatgtctctgtgcatccaa

SEQ ID NO: 1547246 - DNA, 25 bp, Homo sapien
agagttgagaggaggaatgaatgtc

SEQ ID NO: 1547247 - DNA, 25 bp, Homo sapien
ctataggagcagagttgagaggagg

SEQ ID NO: 1547248 - DNA, 25 bp, Homo sapien
gaatgaatgtctctgtgcatccaaa

SEQ ID NO: 1547249 - DNA, 25 bp, Homo sapien
agataagatgaggttagaggctgca

SEQ ID NO: 1547250 - DNA, 25 bp, Homo sapien
taagatgaggttagaggctgcaacc

SEQ ID NO: 1547251 - DNA, 25 bp, Homo sapien
agatgaggttagaggctgcaacccc

SEQ ID NO: 1547252 - DNA, 25 bp, Homo sapien
gataagatgaggttagaggctgcaa

SEQ ID NO: 1547253 - DNA, 25 bp, Homo sapien
ctgcagcgaaaagctctgcaggatg

SEQ ID NO: 1547254 - DNA, 25 bp, Homo sapien
ccagcggctgcagcgaaaagctctg

SEQ ID NO: 1547255 - DNA, 25 bp, Homo sapien
gaaagagctccatgcgcgccagcga

SEQ ID NO: 1547256 - DNA, 25 bp, Homo sapien
tcaggtcgatgtcctcgggcgcacc

SEQ ID NO: 1547257 - DNA, 25 bp, Homo sapien
aaaggccgcggcaaattgccaagac

SEQ ID NO: 1547258 - DNA, 25 bp, Homo sapien
gaaaggccgcggcaaattgccaaga

SEQ ID NO: 1547259 - DNA, 25 bp, Homo sapien
tggaaaggccgcggcaaattgccaa

SEQ ID NO: 1547260 - DNA, 25 bp, Homo sapien
ctggaaaggccgcggcaaattgcca

SEQ ID NO: 1547261 - DNA, 25 bp, Homo sapien
caggcgaatctggaagggccggggc

SEQ ID NO: 1547262 - DNA, 25 bp, Homo sapien
aggcgaatctggaagggccggggcg

SEQ ID NO: 1547263 - DNA, 25 bp, Homo sapien
cacaggcgaatctggaagggccggg

SEQ ID NO: 1547264 - DNA, 25 bp, Homo sapien
tcacaggcgaatctggaagggccgg

SEQ ID NO: 1547265 - DNA, 25 bp, Homo sapien
caagactggtttgaatctattacaa

SEQ ID NO: 1547266 - DNA, 25 bp, Homo sapien
aagactggtttgaatctattacaat

SEQ ID NO: 1547267 - DNA, 25 bp, Homo sapien
ccaagactggtttgaatctattaca

SEQ ID NO: 1547268 - DNA, 25 bp, Homo sapien
agactggtttgaatctattacaatg

SEQ ID NO: 1547269 - DNA, 25 bp, Homo sapien
cagaagccacaacagcagcgcagcg

SEQ ID NO: 1547270 - DNA, 25 bp, Homo sapien
agccacaacagcagcgcagcgatac

SEQ ID NO: 1547271 - DNA, 25 bp, Homo sapien
gaagccacaacagcagcgcagcgat

SEQ ID NO: 1547272 - DNA, 25 bp, Homo sapien
aacagcagcgcagcgatacccgcga

SEQ ID NO: 1547273 - DNA, 25 bp, Homo sapien
tgcaagttccccagcaatgggagca

SEQ ID NO: 1547274 - DNA, 25 bp, Homo sapien
ctgcaagttccccagcaatgggagc

SEQ ID NO: 1547275 - DNA, 25 bp, Homo sapien
gcaagttccccagcaatgggagcag

SEQ ID NO: 1547276 - DNA, 25 bp, Homo sapien
caagttccccagcaatgggagcagc

SEQ ID NO: 1547277 - DNA, 25 bp, Homo sapien
gtcgggaatggagcgcgcggtccag

SEQ ID NO: 1547278 - DNA, 25 bp, Homo sapien
cgcggtccaggcctccggactgcag

SEQ ID NO: 1547279 - DNA, 25 bp, Homo sapien
cgcgcggtccaggcctccggactgc

SEQ ID NO: 1547280 - DNA, 25 bp, Homo sapien
ctgtcgggaatggagcgcgcggtcc

SEQ ID NO: 1547281 - DNA, 25 bp, Homo sapien
cgaatccagaattccgttcccccat

SEQ ID NO: 1547282 - DNA, 25 bp, Homo sapien
tgaacacccggccccagcggccgga

SEQ ID NO: 1547283 - DNA, 25 bp, Homo sapien
tgtgaacacccggccccagcggccg

SEQ ID NO: 1547284 - DNA, 25 bp, Homo sapien
acacccggccccagcggccggagag

SEQ ID NO: 1547285 - DNA, 25 bp, Homo sapien
ctgtgaacacccggccccagcggcc

SEQ ID NO: 1547286 - DNA, 25 bp, Homo sapien
tcccgcagcgctgcgtagccgcaca

SEQ ID NO: 1547287 - DNA, 25 bp, Homo sapien
ttcgaagactgccatggacccgcgg

SEQ ID NO: 1547288 - DNA, 25 bp, Homo sapien
tgtttccgcgtgtgaagcgttcgaa

SEQ ID NO: 1547289 - DNA, 25 bp, Homo sapien
gcatccgcctgtagcactaacgcgt

SEQ ID NO: 1547290 - DNA, 25 bp, Homo sapien
tggagcgtccggaccggcaagtcca

SEQ ID NO: 1547291 - DNA, 25 bp, Homo sapien
cctggagcgtccggaccggcaagtc

SEQ ID NO: 1547292 - DNA, 25 bp, Homo sapien
ccagcctggagcgtccggaccggca

SEQ ID NO: 1547293 - DNA, 25 bp, Homo sapien
tccggaccggcaagtccagcgccgg

SEQ ID NO: 1547294 - DNA, 25 bp, Homo sapien
aaaattgcgcagtgtccaccagcac

SEQ ID NO: 1547295 - DNA, 25 bp, Homo sapien
ggccgaagcaatggtggcttgaaat

SEQ ID NO: 1547296 - DNA, 25 bp, Homo sapien
aattcgtctagcagacaagccgcct

SEQ ID NO: 1547297 - DNA, 25 bp, Homo sapien
ccagcacggccggttagaaaacaag

SEQ ID NO: 1547298 - DNA, 25 bp, Homo sapien
aacaggacggtggtcataacgcgtg

SEQ ID NO: 1547299 - DNA, 25 bp, Homo sapien
cccatgggcttactggctttcttcc

SEQ ID NO: 1547300 - DNA, 25 bp, Homo sapien
cgtcttggcagtgcaagggactctc

SEQ ID NO: 1547301 - DNA, 25 bp, Homo sapien
gtaggaacaggacggtggtcataac

SEQ ID NO: 1547302 - DNA, 25 bp, Homo sapien
atagcggttcccgaagacaagaaca

SEQ ID NO: 1547303 - DNA, 25 bp, Homo sapien
ccagtagccgcacggggtcaaacgg

SEQ ID NO: 1547304 - DNA, 25 bp, Homo sapien
tagcggttcccgaagacaagaacag

SEQ ID NO: 1547305 - DNA, 25 bp, Homo sapien
ttggaactcatgatgcggaagttgt

SEQ ID NO: 1547306 - DNA, 25 bp, Homo sapien
gcggaagttgtcacttaggaggttc

SEQ ID NO: 1547307 - DNA, 25 bp, Homo sapien
actcatgatgcggaagttgtcactt

SEQ ID NO: 1547308 - DNA, 25 bp, Homo sapien
agttgtcacttaggaggttcaggac

SEQ ID NO: 1547309 - DNA, 25 bp, Homo sapien
gtctgtgtactcgggatttggcata

SEQ ID NO: 1547310 - DNA, 25 bp, Homo sapien
tgtgtactcgggatttggcataagg

SEQ ID NO: 1547311 - DNA, 25 bp, Homo sapien
tgtactcgggatttggcataaggct

SEQ ID NO: 1547312 - DNA, 25 bp, Homo sapien
ctgtgtactcgggatttggcataag

SEQ ID NO: 1547313 - DNA, 25 bp, Homo sapien
tttgctcagagatgaagacctgcag

SEQ ID NO: 1547314 - DNA, 25 bp, Homo sapien
tgtgccagtgttgttggatttgctc

SEQ ID NO: 1547315 - DNA, 25 bp, Homo sapien
atgtgccagtgttgttggatttgct

SEQ ID NO: 1547316 - DNA, 25 bp, Homo sapien
gctcagagatgaagacctgcagctc

SEQ ID NO: 1547317 - DNA, 25 bp, Homo sapien
ctaccacagggtccagctcctgccc

SEQ ID NO: 1547318 - DNA, 25 bp, Homo sapien
tgccctaccacagggtccagctcct

SEQ ID NO: 1547319 - DNA, 25 bp, Homo sapien
ccctaccacagggtccagctcctgc

SEQ ID NO: 1547320 - DNA, 25 bp, Homo sapien
ctgccctaccacagggtccagctcc

SEQ ID NO: 1547321 - DNA, 25 bp, Homo sapien
cattgcacgtggtcgtccgggcttg

SEQ ID NO: 1547322 - DNA, 25 bp, Homo sapien
tggtgtagggccattgcacgtggtc

SEQ ID NO: 1547323 - DNA, 25 bp, Homo sapien
tagggccattgcacgtggtcgtccg

SEQ ID NO: 1547324 - DNA, 25 bp, Homo sapien
gagggtgcgcggcaccacgctgatg

SEQ ID NO: 1547325 - DNA, 25 bp, Homo sapien
atattttgagatatccaagccctgg

SEQ ID NO: 1547326 - DNA, 25 bp, Homo sapien
ttttgagatatccaagccctgggcc

SEQ ID NO: 1547327 - DNA, 25 bp, Homo sapien
ttgagatatccaagccctgggccat

SEQ ID NO: 1547328 - DNA, 25 bp, Homo sapien
ctgttgtcagctgatattttgagat

SEQ ID NO: 1547329 - DNA, 25 bp, Homo sapien
gcgttcaggcggaagcaaggcttgg

SEQ ID NO: 1547330 - DNA, 25 bp, Homo sapien
gtctgggtcagcgttcaggcggaag

SEQ ID NO: 1547331 - DNA, 25 bp, Homo sapien
tcagcgttcaggcggaagcaaggct

SEQ ID NO: 1547332 - DNA, 25 bp, Homo sapien
tgggtcagcgttcaggcggaagcaa

SEQ ID NO: 1547333 - DNA, 25 bp, Homo sapien
gccaggatcagcgtggagtcagtag

SEQ ID NO: 1547334 - DNA, 25 bp, Homo sapien
tcagtagcttggatgggtggtccag

SEQ ID NO: 1547335 - DNA, 25 bp, Homo sapien
caggatcagcgtggagtcagtagct

SEQ ID NO: 1547336 - DNA, 25 bp, Homo sapien
tcagcgtggagtcagtagcttggat

SEQ ID NO: 1547337 - DNA, 25 bp, Homo sapien
tggctaacacggtgaaacccgtctc

SEQ ID NO: 1547338 - DNA, 25 bp, Homo sapien
ggcgtgaaccccgagaggtggagct

SEQ ID NO: 1547339 - DNA, 25 bp, Homo sapien
gaatggcgtgaaccccgagaggtgg

SEQ ID NO: 1547340 - DNA, 25 bp, Homo sapien
ccgaggcgggcggatggagaccatc

SEQ ID NO: 1547341 - DNA, 25 bp, Homo sapien
gagccgcttgtacgagacgaagcta

SEQ ID NO: 1547342 - DNA, 25 bp, Homo sapien
catggcgagccgcttgtacgagacg

SEQ ID NO: 1547343 - DNA, 25 bp, Homo sapien
tcagcaactccatggcgagccgctt

SEQ ID NO: 1547344 - DNA, 25 bp, Homo sapien
tgtacgagacgaagctacacacctc

SEQ ID NO: 1547345 - DNA, 25 bp, Homo sapien
cttggtgcggatgtgcgtccccatc

SEQ ID NO: 1547346 - DNA, 25 bp, Homo sapien
tggtgcggatgtgcgtccccatcct

SEQ ID NO: 1547347 - DNA, 25 bp, Homo sapien
tgcggatgtgcgtccccatcctttt

SEQ ID NO: 1547348 - DNA, 25 bp, Homo sapien
agctccttccgcttcctcttggtgc

SEQ ID NO: 1547349 - DNA, 25 bp, Homo sapien
cagctttcctcatggtggccagcac

SEQ ID NO: 1547350 - DNA, 25 bp, Homo sapien
ctaggcagcagctttcctcatggtg

SEQ ID NO: 1547351 - DNA, 25 bp, Homo sapien
cagcagctttcctcatggtggccag

SEQ ID NO: 1547352 - DNA, 25 bp, Homo sapien
gcagcagctttcctcatggtggcca

SEQ ID NO: 1547353 - DNA, 25 bp, Homo sapien
tgtgcgtgcgtgtatggggtgtctt

SEQ ID NO: 1547354 - DNA, 25 bp, Homo sapien
cgtgtatggggtgtctttgagtcaa

SEQ ID NO: 1547355 - DNA, 25 bp, Homo sapien
ctcattgttcggatgtgggttcctg

SEQ ID NO: 1547356 - DNA, 25 bp, Homo sapien
ctcgctcattgttcggatgtgggtt

SEQ ID NO: 1547357 - DNA, 25 bp, Homo sapien
ctcctctcccaggcgctccgcgcgg

SEQ ID NO: 1547358 - DNA, 25 bp, Homo sapien
tcctctcccaggcgctccgcgcggc

SEQ ID NO: 1547359 - DNA, 25 bp, Homo sapien
tctcctctcccaggcgctccgcgcg

SEQ ID NO: 1547360 - DNA, 25 bp, Homo sapien
ttctcctctcccaggcgctccgcgc

SEQ ID NO: 1547361 - DNA, 25 bp, Homo sapien
tggtcccggacagcgccagcgtcag

SEQ ID NO: 1547362 - DNA, 25 bp, Homo sapien
cccggacagcgccagcgtcagcagc

SEQ ID NO: 1547363 - DNA, 25 bp, Homo sapien
cagcgcccaggtgccggtcgcctcc

SEQ ID NO: 1547364 - DNA, 25 bp, Homo sapien
agcagcgcccaggtgccggtcgcct

SEQ ID NO: 1547365 - DNA, 25 bp, Homo sapien
ggtttcccagcagtggtagcggcgt

SEQ ID NO: 1547366 - DNA, 25 bp, Homo sapien
tttcccagcagtggtagcggcgtgg

SEQ ID NO: 1547367 - DNA, 25 bp, Homo sapien
gaggtttcccagcagtggtagcggc

SEQ ID NO: 1547368 - DNA, 25 bp, Homo sapien
ttcccagcagtggtagcggcgtggg

SEQ ID NO: 1547369 - DNA, 25 bp, Homo sapien
ctgaatacagcgccccgggccgtag

SEQ ID NO: 1547370 - DNA, 25 bp, Homo sapien
ccgcatgagccctgaatacagcgcc

SEQ ID NO: 1547371 - DNA, 25 bp, Homo sapien
tgagccctgaatacagcgccccggg

SEQ ID NO: 1547372 - DNA, 25 bp, Homo sapien
catgagccctgaatacagcgccccg

SEQ ID NO: 1547373 - DNA, 25 bp, Homo sapien
tcccaggtagatggtgaacaccggt

SEQ ID NO: 1547374 - DNA, 25 bp, Homo sapien
acaccggtccgtacttcttactcag

SEQ ID NO: 1547375 - DNA, 25 bp, Homo sapien
gtcccttccagcatcgctacggttc

SEQ ID NO: 1547376 - DNA, 25 bp, Homo sapien
cacaggccgccacggtcccaggtag

SEQ ID NO: 1547377 - DNA, 25 bp, Homo sapien
caagcatggtaaacttcctcagctg

SEQ ID NO: 1547378 - DNA, 25 bp, Homo sapien
cccgcagagcaagcatggtaaactt

SEQ ID NO: 1547379 - DNA, 25 bp, Homo sapien
tcctcgccttctcgcttccccatgc

SEQ ID NO: 1547380 - DNA, 25 bp, Homo sapien
ccgggcctccgcctggatcagctcc

SEQ ID NO: 1547381 - DNA, 25 bp, Homo sapien
gcctggaactccttatcctcatagg

SEQ ID NO: 1547382 - DNA, 25 bp, Homo sapien
cagactacgttggaggtggcctggg

SEQ ID NO: 1547383 - DNA, 25 bp, Homo sapien
cagcagggagggatcgaatgggcgt

SEQ ID NO: 1547384 - DNA, 25 bp, Homo sapien
ccagctgcccggaccacggcctgga

SEQ ID NO: 1547385 - DNA, 25 bp, Homo sapien
agcaggaaggcatcgacaaggtcac

SEQ ID NO: 1547386 - DNA, 25 bp, Homo sapien
caaggtgctgacgtggtggaggagc

SEQ ID NO: 1547387 - DNA, 25 bp, Homo sapien
ctgcacctgccggactgtgaaggca

SEQ ID NO: 1547388 - DNA, 25 bp, Homo sapien
tgcggggcccgaagcatccaggttc

SEQ ID NO: 1547389 - DNA, 25 bp, Homo sapien
tttggacatgagggtatttcatcag

SEQ ID NO: 1547390 - DNA, 25 bp, Homo sapien
cgaccgtggtgctgaccgtcatcgt

SEQ ID NO: 1547391 - DNA, 25 bp, Homo sapien
gagcaggagggtatagccgaccgtg

SEQ ID NO: 1547392 - DNA, 25 bp, Homo sapien
tgaccgtcatcgtcccagcaaacag

SEQ ID NO: 1547393 - DNA, 25 bp, Homo sapien
gtgcggggtattcccatgggcacca

SEQ ID NO: 1547394 - DNA, 25 bp, Homo sapien
cctcggaagcgggtggtccgcatga

SEQ ID NO: 1547395 - DNA, 25 bp, Homo sapien
tacggtcccctaggcttggtgcctg

SEQ ID NO: 1547396 - DNA, 25 bp, Homo sapien
agcagccgctgcgcctcatgcagaa

SEQ ID NO: 1547397 - DNA, 25 bp, Homo sapien
ctcattcgattgtcccaaccacctt

SEQ ID NO: 1547398 - DNA, 25 bp, Homo sapien
attcgattgtcccaaccaccttgga

SEQ ID NO: 1547399 - DNA, 25 bp, Homo sapien
caaccaccttggaaggaggtagaat

SEQ ID NO: 1547400 - DNA, 25 bp, Homo sapien
cgattgtcccaaccaccttggaagg

SEQ ID NO: 1547401 - DNA, 25 bp, Homo sapien
tgcatcggagctgctctccagtgaa

SEQ ID NO: 1547402 - DNA, 25 bp, Homo sapien
gggagctgcttgcataaactgctgg

SEQ ID NO: 1547403 - DNA, 25 bp, Homo sapien
ccccttttggttctgcatcggagct

SEQ ID NO: 1547404 - DNA, 25 bp, Homo sapien
gccataggtttgattctgcagtgaa

SEQ ID NO: 1547405 - DNA, 25 bp, Homo sapien
atgcttcctgaaccgtccatctgca

SEQ ID NO: 1547406 - DNA, 25 bp, Homo sapien
catctgcatccaggaaacggtctgg

SEQ ID NO: 1547407 - DNA, 25 bp, Homo sapien
aacggtctgggttgaactcttctgg

SEQ ID NO: 1547408 - DNA, 25 bp, Homo sapien
gagaagggcaggaacgcctcatgct

SEQ ID NO: 1547409 - DNA, 25 bp, Homo sapien
agccaacagtaagcccagggtgcag

SEQ ID NO: 1547410 - DNA, 25 bp, Homo sapien
agcacctgcttgtgatacccagggc

SEQ ID NO: 1547411 - DNA, 25 bp, Homo sapien
ctggagttcgccagcacctgcttgt

SEQ ID NO: 1547412 - DNA, 25 bp, Homo sapien
aggagccaacagtaagcccagggtg

SEQ ID NO: 1547413 - DNA, 25 bp, Homo sapien
agggctgagtcagtattcctcacac

SEQ ID NO: 1547414 - DNA, 25 bp, Homo sapien
agagagagggctgagtcagtattcc

SEQ ID NO: 1547415 - DNA, 25 bp, Homo sapien
gagagggctgagtcagtattcctca

SEQ ID NO: 1547416 - DNA, 25 bp, Homo sapien
gagggctgagtcagtattcctcaca

SEQ ID NO: 1547417 - DNA, 25 bp, Homo sapien
aagagctccgcttttgccaggccct

SEQ ID NO: 1547418 - DNA, 25 bp, Homo sapien
aggctcagggtgtccggcgggcacg

SEQ ID NO: 1547419 - DNA, 25 bp, Homo sapien
agaggaagagctccgcttttgccag

SEQ ID NO: 1547420 - DNA, 25 bp, Homo sapien
ggctcagggtgtccggcgggcacgg

SEQ ID NO: 1547421 - DNA, 25 bp, Homo sapien
ctgggggaatgttgaaaaggccact

SEQ ID NO: 1547422 - DNA, 25 bp, Homo sapien
tgggggaatgttgaaaaggccactg

SEQ ID NO: 1547423 - DNA, 25 bp, Homo sapien
cgtggtggagtgaaggtcagtggga

SEQ ID NO: 1547424 - DNA, 25 bp, Homo sapien
tcatctggtctgcgtggtggagtga

SEQ ID NO: 1547425 - DNA, 25 bp, Homo sapien
ctggtctgcgtggtggagtgaaggt

SEQ ID NO: 1547426 - DNA, 25 bp, Homo sapien
catctggtctgcgtggtggagtgaa

SEQ ID NO: 1547427 - DNA, 25 bp, Homo sapien
aggcaccgtcctgggcacccaccac

SEQ ID NO: 1547428 - DNA, 25 bp, Homo sapien
tgggcacccaccacttccaagttgc

SEQ ID NO: 1547429 - DNA, 25 bp, Homo sapien
ctggaggcaccgtcctgggcaccca

SEQ ID NO: 1547430 - DNA, 25 bp, Homo sapien
gggcacccaccacttccaagttgcc

SEQ ID NO: 1547431 - DNA, 25 bp, Homo sapien
caactgcaggcgtgtaaatgtggct

SEQ ID NO: 1547432 - DNA, 25 bp, Homo sapien
tcttagcagcatgagtcaagtgagc

SEQ ID NO: 1547433 - DNA, 25 bp, Homo sapien
tatgtctgtggaaagctaacccagc

SEQ ID NO: 1547434 - DNA, 25 bp, Homo sapien
tacactctggagacattaaccctgt

SEQ ID NO: 1547435 - DNA, 25 bp, Homo sapien
gtggcatgaccccggagggggcatg

SEQ ID NO: 1547436 - DNA, 25 bp, Homo sapien
tgggtggcatgaccccggagggggc

SEQ ID NO: 1547437 - DNA, 25 bp, Homo sapien
ctgggtggcatgaccccggaggggg

SEQ ID NO: 1547438 - DNA, 25 bp, Homo sapien
catgaccccggagggggcatgctgt

SEQ ID NO: 1547439 - DNA, 25 bp, Homo sapien
ggagcatgagttggggccatagaca

SEQ ID NO: 1547440 - DNA, 25 bp, Homo sapien
ttggggccatagacagcgacagtct

SEQ ID NO: 1547441 - DNA, 25 bp, Homo sapien
gagagtggtgtagccaagagaggga

SEQ ID NO: 1547442 - DNA, 25 bp, Homo sapien
ggctgggagagtggtgtagccaaga

SEQ ID NO: 1547443 - DNA, 25 bp, Homo sapien
tgtccaaagtctctgtgcataatcg

SEQ ID NO: 1547444 - DNA, 25 bp, Homo sapien
cccagatgtgtttgcatttggtaga

SEQ ID NO: 1547445 - DNA, 25 bp, Homo sapien
cgtggttacataagcacgtgttggg

SEQ ID NO: 1547446 - DNA, 25 bp, Homo sapien
cggtctgagggtcctcgtatgtcca

SEQ ID NO: 1547447 - DNA, 25 bp, Homo sapien
tccctgacagggtgaattggaaact

SEQ ID NO: 1547448 - DNA, 25 bp, Homo sapien
caagccggacccttaagtcacaagg

SEQ ID NO: 1547449 - DNA, 25 bp, Homo sapien
caaggaacgtcagatccggctcact

SEQ ID NO: 1547450 - DNA, 25 bp, Homo sapien
ctgacagggtgaattggaaactggc

SEQ ID NO: 1547451 - DNA, 25 bp, Homo sapien
acagatcttcagacacgccaaaacc

SEQ ID NO: 1547452 - DNA, 25 bp, Homo sapien
agatcttcagacacgccaaaacctg

SEQ ID NO: 1547453 - DNA, 25 bp, Homo sapien
cagatcttcagacacgccaaaacct

SEQ ID NO: 1547454 - DNA, 25 bp, Homo sapien
ctgagccagtgaggccgtgtctctc

SEQ ID NO: 1547455 - DNA, 25 bp, Homo sapien
ctctatccgggctctgggcgctgtc

SEQ ID NO: 1547456 - DNA, 25 bp, Homo sapien
tctctatccgggctctgggcgctgt

SEQ ID NO: 1547457 - DNA, 25 bp, Homo sapien
gtctctctatccgggctctgggcgc

SEQ ID NO: 1547458 - DNA, 25 bp, Homo sapien
cagacttgggcaaccctttctccgc

SEQ ID NO: 1547459 - DNA, 25 bp, Homo sapien
ggctccccggatttggcactgcctg

SEQ ID NO: 1547460 - DNA, 25 bp, Homo sapien
caatcaggggttaactcaagagagg

SEQ ID NO: 1547461 - DNA, 25 bp, Homo sapien
agcggcaggggaggcccttgccacc

SEQ ID NO: 1547462 - DNA, 25 bp, Homo sapien
agcgccaagcaccaggccagcggga

SEQ ID NO: 1547463 - DNA, 25 bp, Homo sapien
catgcacgcccagccgcacagcgcc

SEQ ID NO: 1547464 - DNA, 25 bp, Homo sapien
ccagcgggaccctgcccatcctggg

SEQ ID NO: 1547465 - DNA, 25 bp, Homo sapien
gccagcgggaccctgcccatcctgg

SEQ ID NO: 1547466 - DNA, 25 bp, Homo sapien
gagctggctgaccactatccagtca

SEQ ID NO: 1547467 - DNA, 25 bp, Homo sapien
gaacctggagctgacaccgaagggt

SEQ ID NO: 1547468 - DNA, 25 bp, Homo sapien
gatattccctgggttgcccacgaag

SEQ ID NO: 1547469 - DNA, 25 bp, Homo sapien
ggatctgtccatcccgaagccaatg

SEQ ID NO: 1547470 - DNA, 25 bp, Homo sapien
tggtactgtcccgtgtcggaaagct

SEQ ID NO: 1547471 - DNA, 25 bp, Homo sapien
tactgtcccgtgtcggaaagctgca

SEQ ID NO: 1547472 - DNA, 25 bp, Homo sapien
tccagcccaacatagccaggctggg

SEQ ID NO: 1547473 - DNA, 25 bp, Homo sapien
gggacacgaaggtctgatgtcccag

SEQ ID NO: 1547474 - DNA, 25 bp, Homo sapien
tgaagggggtgttggcggccacagt

SEQ ID NO: 1547475 - DNA, 25 bp, Homo sapien
ggagccagagtaggtccacgggctc

SEQ ID NO: 1547476 - DNA, 25 bp, Homo sapien
gcttggcagctcaggttgaaggggg

SEQ ID NO: 1547477 - DNA, 25 bp, Homo sapien
ccagagtaggtccacgggctctggg

SEQ ID NO: 1547478 - DNA, 25 bp, Homo sapien
gggtcccgttccgaccgcagcattc

SEQ ID NO: 1547479 - DNA, 25 bp, Homo sapien
ccgcgtgagtcaccgggggcacctc

SEQ ID NO: 1547480 - DNA, 25 bp, Homo sapien
cccagcgcttccggccggcttcggg

SEQ ID NO: 1547481 - DNA, 25 bp, Homo sapien
ccgccagggtcagcgcgcgggagct

SEQ ID NO: 1547482 - DNA, 25 bp, Homo sapien
cgttatgggcttcgcaggagaaaga

SEQ ID NO: 1547483 - DNA, 25 bp, Homo sapien
caggagaaagaggatgtcttgttca

SEQ ID NO: 1547484 - DNA, 25 bp, Homo sapien
ccccttggcgttatgggcttcgcag

SEQ ID NO: 1547485 - DNA, 25 bp, Homo sapien
tgtggtgacccccttggcgttatgg

SEQ ID NO: 1547486 - DNA, 25 bp, Homo sapien
ccgtgggttggcgggagaccaggtg

SEQ ID NO: 1547487 - DNA, 25 bp, Homo sapien
agaccaggtggaggttacggggctg

SEQ ID NO: 1547488 - DNA, 25 bp, Homo sapien
ctccgtgggttggcgggagaccagg

SEQ ID NO: 1547489 - DNA, 25 bp, Homo sapien
ccaggtggaggttacggggctgctg

SEQ ID NO: 1547490 - DNA, 25 bp, Homo sapien
cagggggtagatgccgctcaggcct

SEQ ID NO: 1547491 - DNA, 25 bp, Homo sapien
tgggtcagggggtagatgccgctca

SEQ ID NO: 1547492 - DNA, 25 bp, Homo sapien
cagtgggtcagggggtagatgccgc

SEQ ID NO: 1547493 - DNA, 25 bp, Homo sapien
ggtagatgccgctcaggcctggagt

SEQ ID NO: 1547494 - DNA, 25 bp, Homo sapien
gcctggatgcccatcccatcgtttg

SEQ ID NO: 1547495 - DNA, 25 bp, Homo sapien
atgcccatcccatcgtttgacagca

SEQ ID NO: 1547496 - DNA, 25 bp, Homo sapien
gggtctggttctcccgcctggatgc

SEQ ID NO: 1547497 - DNA, 25 bp, Homo sapien
ctggatgcccatcccatcgtttgac

SEQ ID NO: 1547498 - DNA, 25 bp, Homo sapien
tccctccggcgtctccacaggaagc

SEQ ID NO: 1547499 - DNA, 25 bp, Homo sapien
ctggtgcatgccacgcggatgtgat

SEQ ID NO: 1547500 - DNA, 25 bp, Homo sapien
cctagccgaagctgatgggggggca

SEQ ID NO: 1547501 - DNA, 25 bp, Homo sapien
tgtgaggatggaggctgcctagccg

SEQ ID NO: 1547502 - DNA, 25 bp, Homo sapien
taacagggtaccctgcaggggcgcc

SEQ ID NO: 1547503 - DNA, 25 bp, Homo sapien
ggctcttgccaatgcacgaaggcct

SEQ ID NO: 1547504 - DNA, 25 bp, Homo sapien
ctggccttgatacgccagccggtac

SEQ ID NO: 1547505 - DNA, 25 bp, Homo sapien
tcccattccgcgtagcactaatgtt

SEQ ID NO: 1547506 - DNA, 25 bp, Homo sapien
gcctccaggggtactgggaggctcc

SEQ ID NO: 1547507 - DNA, 25 bp, Homo sapien
gccttagccctatgtccattagcac

SEQ ID NO: 1547508 - DNA, 25 bp, Homo sapien
cttgccttagccctatgtccattag

SEQ ID NO: 1547509 - DNA, 25 bp, Homo sapien
cctcttgccttagccctatgtccat

SEQ ID NO: 1547510 - DNA, 25 bp, Homo sapien
gacagagaggagatgtgctcagaga

SEQ ID NO: 1547511 - DNA, 25 bp, Homo sapien
aggacagagaggagatgtgctcaga

SEQ ID NO: 1547512 - DNA, 25 bp, Homo sapien
aaaggacagagaggagatgtgctca

SEQ ID NO: 1547513 - DNA, 25 bp, Homo sapien
agaaaggacagagaggagatgtgct

SEQ ID NO: 1547514 - DNA, 25 bp, Homo sapien
agctggtggactggctgtgcttgcc

SEQ ID NO: 1547515 - DNA, 25 bp, Homo sapien
ccagctggtggactggctgtgcttg

SEQ ID NO: 1547516 - DNA, 25 bp, Homo sapien
cagctggtggactggctgtgcttgc

SEQ ID NO: 1547517 - DNA, 25 bp, Homo sapien
caggtcatggatgaagccttggatc

SEQ ID NO: 1547518 - DNA, 25 bp, Homo sapien
gtcatggatgaagccttggatccag

SEQ ID NO: 1547519 - DNA, 25 bp, Homo sapien
ggaacaggtcatggatgaagccttg

SEQ ID NO: 1547520 - DNA, 25 bp, Homo sapien
tgaggaacaggtcatggatgaagcc

SEQ ID NO: 1547521 - DNA, 25 bp, Homo sapien
gcggccacgactgctcctagcagta

SEQ ID NO: 1547522 - DNA, 25 bp, Homo sapien
tctttcgccggtggacaaggaagag

SEQ ID NO: 1547523 - DNA, 25 bp, Homo sapien
cataacgggtctccttctttcgccg

SEQ ID NO: 1547524 - DNA, 25 bp, Homo sapien
gcagtacataccaccagggccacga

SEQ ID NO: 1547525 - DNA, 25 bp, Homo sapien
ggtacctgactaccagttcacctct

SEQ ID NO: 1547526 - DNA, 25 bp, Homo sapien
tttccactgttggttcaaacacttc

SEQ ID NO: 1547527 - DNA, 25 bp, Homo sapien
aggtagcttcagtggtccgacgact

SEQ ID NO: 1547528 - DNA, 25 bp, Homo sapien
tccgacgactgtaggacttgcgcac

SEQ ID NO: 1547529 - DNA, 25 bp, Homo sapien
ggttccacaaatctgttatttctag

SEQ ID NO: 1547530 - DNA, 25 bp, Homo sapien
cttgaaagttctttgtggttccaca

SEQ ID NO: 1547531 - DNA, 25 bp, Homo sapien
ctgtgtctaagattctattccttga

SEQ ID NO: 1547532 - DNA, 25 bp, Homo sapien
tatttctagggtctgtggttctgac

SEQ ID NO: 1547533 - DNA, 25 bp, Homo sapien
aatatacaagcacaaggtccatcag

SEQ ID NO: 1547534 - DNA, 25 bp, Homo sapien
tatacaagcacaaggtccatcagct

SEQ ID NO: 1547535 - DNA, 25 bp, Homo sapien
agaatatacaagcacaaggtccatc

SEQ ID NO: 1547536 - DNA, 25 bp, Homo sapien
tacaagcacaaggtccatcagctgt

SEQ ID NO: 1547537 - DNA, 25 bp, Homo sapien
aggtgacattcacccaccagtaggg

SEQ ID NO: 1547538 - DNA, 25 bp, Homo sapien
tgacattcacccaccagtagggata

SEQ ID NO: 1547539 - DNA, 25 bp, Homo sapien
ttcaggtgacattcacccaccagta

SEQ ID NO: 1547540 - DNA, 25 bp, Homo sapien
gggtggacagagtcatggagcaggg

SEQ ID NO: 1547541 - DNA, 25 bp, Homo sapien
cttcagctcttcactgatgcccagg

SEQ ID NO: 1547542 - DNA, 25 bp, Homo sapien
cttgtgccggtccaccatcacatcc

SEQ ID NO: 1547543 - DNA, 25 bp, Homo sapien
tctcccagagtcttccccagggcca

SEQ ID NO: 1547544 - DNA, 25 bp, Homo sapien
caccttgtgccggtccaccatcaca

SEQ ID NO: 1547545 - DNA, 25 bp, Homo sapien
gaagtgcaggatctcagaagttcag

SEQ ID NO: 1547546 - DNA, 25 bp, Homo sapien
gactgtatttcctatagttgggtgg

SEQ ID NO: 1547547 - DNA, 25 bp, Homo sapien
agacactgacctcagagggcccgtg

SEQ ID NO: 1547548 - DNA, 25 bp, Homo sapien
agaaggatgtgtgtatgctgccggg

SEQ ID NO: 1547549 - DNA, 25 bp, Homo sapien
tggagtcgtcctggttgagctggcc

SEQ ID NO: 1547550 - DNA, 25 bp, Homo sapien
agtcgtcctggttgagctggccttc

SEQ ID NO: 1547551 - DNA, 25 bp, Homo sapien
cttgaggatggagtcgtcctggttg

SEQ ID NO: 1547552 - DNA, 25 bp, Homo sapien
gaggatggagtcgtcctggttgagc

SEQ ID NO: 1547553 - DNA, 25 bp, Homo sapien
gcagcctctaactctgtgataccag

SEQ ID NO: 1547554 - DNA, 25 bp, Homo sapien
cacctttgtactaatctccccatat

SEQ ID NO: 1547555 - DNA, 25 bp, Homo sapien
tagctgtggattctggtaacaccac

SEQ ID NO: 1547556 - DNA, 25 bp, Homo sapien
tgcctggtgtccctagctgtggatt

SEQ ID NO: 1547557 - DNA, 25 bp, Homo sapien
tgagtgcaatggcgcaatcttggct

SEQ ID NO: 1547558 - DNA, 25 bp, Homo sapien
tttcgcccttgtcccccaggcttga

SEQ ID NO: 1547559 - DNA, 25 bp, Homo sapien
ccccagttcaagagattctcgtacc

SEQ ID NO: 1547560 - DNA, 25 bp, Homo sapien
ctccccagttcaagagattctcgta

SEQ ID NO: 1547561 - DNA, 25 bp, Homo sapien
ttgggatggtcaaattccttcatgc

SEQ ID NO: 1547562 - DNA, 25 bp, Homo sapien
agctctgacctcgtgcagatggcaa

SEQ ID NO: 1547563 - DNA, 25 bp, Homo sapien
ccagctctgacctcgtgcagatggc

SEQ ID NO: 1547564 - DNA, 25 bp, Homo sapien
catgcagaccgcttcactcaggaaa

SEQ ID NO: 1547565 - DNA, 25 bp, Homo sapien
ctctcgttcagaaccctggaaacag

SEQ ID NO: 1547566 - DNA, 25 bp, Homo sapien
tccatgtttcatgaaaggtaagatg

SEQ ID NO: 1547567 - DNA, 25 bp, Homo sapien
aggaagctgtgtaggtctccatgtt

SEQ ID NO: 1547568 - DNA, 25 bp, Homo sapien
tgctgggaagctctctcgttcagaa

SEQ ID NO: 1547569 - DNA, 25 bp, Homo sapien
tggccgccaggtcccggtgtatgaa

SEQ ID NO: 1547570 - DNA, 25 bp, Homo sapien
tcagatactccatgccactggcgat

SEQ ID NO: 1547571 - DNA, 25 bp, Homo sapien
catgccactggcgatgtctgccatg

SEQ ID NO: 1547572 - DNA, 25 bp, Homo sapien
aatctcttggtactcagatactcca

SEQ ID NO: 1547573 - DNA, 25 bp, Homo sapien
ttttcttatccagtgtggccgcttc

SEQ ID NO: 1547574 - DNA, 25 bp, Homo sapien
aagcaattctcgtgttgggattaca

SEQ ID NO: 1547575 - DNA, 25 bp, Homo sapien
agtgtggccgcttccaaagggcagc

SEQ ID NO: 1547576 - DNA, 25 bp, Homo sapien
cactgcaccccatctggcatatttt

SEQ ID NO: 1547577 - DNA, 25 bp, Homo sapien
ggcggtagtagtccccattgtagat

SEQ ID NO: 1547578 - DNA, 25 bp, Homo sapien
atcttggcgatacgtccctggcggt

SEQ ID NO: 1547579 - DNA, 25 bp, Homo sapien
tcgctcttgctggtgtagacacggt

SEQ ID NO: 1547580 - DNA, 25 bp, Homo sapien
tgtagatcttcttggagagcccgaa

SEQ ID NO: 1547581 - DNA, 25 bp, Homo sapien
ggcagagggaattagacagtctctc

SEQ ID NO: 1547582 - DNA, 25 bp, Homo sapien
tgaggggcagagggaattagacagt

SEQ ID NO: 1547583 - DNA, 25 bp, Homo sapien
ggggcagagggaattagacagtctc

SEQ ID NO: 1547584 - DNA, 25 bp, Homo sapien
gaggggcagagggaattagacagtc

SEQ ID NO: 1547585 - DNA, 25 bp, Homo sapien
cagacagtccgcaggctgcttcagg

SEQ ID NO: 1547586 - DNA, 25 bp, Homo sapien
cgctgttctccacgcccggatatgg

SEQ ID NO: 1547587 - DNA, 25 bp, Homo sapien
ggtttggcctcttgtggcaatctcc

SEQ ID NO: 1547588 - DNA, 25 bp, Homo sapien
tccctggcgcagatagtcataaatc

SEQ ID NO: 1547589 - DNA, 25 bp, Homo sapien
tattcactacccaaggatacctggc

SEQ ID NO: 1547590 - DNA, 25 bp, Homo sapien
cagggccgccaggtaagactgtgct

SEQ ID NO: 1547591 - DNA, 25 bp, Homo sapien
tagctaaatgtcacggccttctccg

SEQ ID NO: 1547592 - DNA, 25 bp, Homo sapien
gatggccctactcagagcattggtg

SEQ ID NO: 1547593 - DNA, 25 bp, Homo sapien
catagaggatttcgtcaggctcctg

SEQ ID NO: 1547594 - DNA, 25 bp, Homo sapien
ccagcaccgcgacatcaaggcatac

SEQ ID NO: 1547595 - DNA, 25 bp, Homo sapien
ggatttagctcccagcaccgcgaca

SEQ ID NO: 1547596 - DNA, 25 bp, Homo sapien
atgttgacatagaggatttcgtcag

SEQ ID NO: 1547597 - DNA, 25 bp, Homo sapien
tgaggcagctacaggaatccttagg

SEQ ID NO: 1547598 - DNA, 25 bp, Homo sapien
acaggaatccttagggtctggctgg

SEQ ID NO: 1547599 - DNA, 25 bp, Homo sapien
ggcagctacaggaatccttagggtc

SEQ ID NO: 1547600 - DNA, 25 bp, Homo sapien
gctacaggaatccttagggtctggc

SEQ ID NO: 1547601 - DNA, 25 bp, Homo sapien
gagcccctatcagcaggctgagcgg

SEQ ID NO: 1547602 - DNA, 25 bp, Homo sapien
gggagcccctatcagcaggctgagc

SEQ ID NO: 1547603 - DNA, 25 bp, Homo sapien
taggggttgtggaagggcagaggac

SEQ ID NO: 1547604 - DNA, 25 bp, Homo sapien
gcagaggacatagcgtccagcagga

SEQ ID NO: 1547605 - DNA, 25 bp, Homo sapien
gaatgttaacacctgggagggcttc

SEQ ID NO: 1547606 - DNA, 25 bp, Homo sapien
tccccagtggcagtgcttagcttgg

SEQ ID NO: 1547607 - DNA, 25 bp, Homo sapien
ggtccttagaaccaaagactcacag

SEQ ID NO: 1547608 - DNA, 25 bp, Homo sapien
gagggcttcagatattgcaatccaa

SEQ ID NO: 1547609 - DNA, 25 bp, Homo sapien
acatctagactcatagagccttagc

SEQ ID NO: 1547610 - DNA, 25 bp, Homo sapien
tgtcagagctttagaacagtaggtc

SEQ ID NO: 1547611 - DNA, 25 bp, Homo sapien
cattttaaggactctgaactctaga

SEQ ID NO: 1547612 - DNA, 25 bp, Homo sapien
acagtaggtcttaaggttgagtgca

SEQ ID NO: 1547613 - DNA, 25 bp, Homo sapien
tgcagattctagagctttcgaccct

SEQ ID NO: 1547614 - DNA, 25 bp, Homo sapien
ttatgatctagagccttacagccag

SEQ ID NO: 1547615 - DNA, 25 bp, Homo sapien
gaatatcacatcttagaacaccgga

SEQ ID NO: 1547616 - DNA, 25 bp, Homo sapien
gaatcttggagcatctgatctagaa

SEQ ID NO: 1547617 - DNA, 25 bp, Homo sapien
taaccatggtcctagagaggcagaa

SEQ ID NO: 1547618 - DNA, 25 bp, Homo sapien
taatgcattgcacaggcttgaaggg

SEQ ID NO: 1547619 - DNA, 25 bp, Homo sapien
ttatgtgacctgagcccctctggag

SEQ ID NO: 1547620 - DNA, 25 bp, Homo sapien
tataacttagatgcttaggatccgg

SEQ ID NO: 1547621 - DNA, 25 bp, Homo sapien
tggtcttcgctggaggccctttgtg

SEQ ID NO: 1547622 - DNA, 25 bp, Homo sapien
tgatgatcggaggtgttctgtgcct

SEQ ID NO: 1547623 - DNA, 25 bp, Homo sapien
gccctttgtgggtccgtgatgatcg

SEQ ID NO: 1547624 - DNA, 25 bp, Homo sapien
ctcgcgagtgcgtgccagacacggt

SEQ ID NO: 1547625 - DNA, 25 bp, Homo sapien
tttgtggcccggattgaactgtccc

SEQ ID NO: 1547626 - DNA, 25 bp, Homo sapien
cggattgaactgtccccggttctca

SEQ ID NO: 1547627 - DNA, 25 bp, Homo sapien
gaactgtccccggttctcaggagcc

SEQ ID NO: 1547628 - DNA, 25 bp, Homo sapien
tgtggcccggattgaactgtccccg

SEQ ID NO: 1547629 - DNA, 25 bp, Homo sapien
ccctcgcccacgtccgacttcctct

SEQ ID NO: 1547630 - DNA, 25 bp, Homo sapien
gcccacgtccgacttcctctctctc

SEQ ID NO: 1547631 - DNA, 25 bp, Homo sapien
tgggcccagaggttccagtccagac

SEQ ID NO: 1547632 - DNA, 25 bp, Homo sapien
agaggttccagtccagacaccccgc

SEQ ID NO: 1547633 - DNA, 25 bp, Homo sapien
gatctgctttgggtaaggcaccccg

SEQ ID NO: 1547634 - DNA, 25 bp, Homo sapien
taaggcaccccgctgcagtgtagat

SEQ ID NO: 1547635 - DNA, 25 bp, Homo sapien
gtagatgtgcccactacggtccgca

SEQ ID NO: 1547636 - DNA, 25 bp, Homo sapien
ggccccaattccgatctgctttggg

SEQ ID NO: 1547637 - DNA, 25 bp, Homo sapien
cctagccaatcagagcgccgttttc

SEQ ID NO: 1547638 - DNA, 25 bp, Homo sapien
ccacgagaaggcctaggagctactg

SEQ ID NO: 1547639 - DNA, 25 bp, Homo sapien
cgatgttacatgagtgccaattggt

SEQ ID NO: 1547640 - DNA, 25 bp, Homo sapien
cactcgtgcctcgtccgatgttaca

SEQ ID NO: 1547641 - DNA, 25 bp, Homo sapien
agccgctcagcaagctcggccttga

SEQ ID NO: 1547642 - DNA, 25 bp, Homo sapien
agcaagctcggccttgaggcctcga

SEQ ID NO: 1547643 - DNA, 25 bp, Homo sapien
ttgaggcctcgagtgtccaggccgc

SEQ ID NO: 1547644 - DNA, 25 bp, Homo sapien
cggccttgaggcctcgagtgtccag

SEQ ID NO: 1547645 - DNA, 25 bp, Homo sapien
tcgtcggcgtcgagctcccgctcgt

SEQ ID NO: 1547646 - DNA, 25 bp, Homo sapien
tcgagctcccgctcgtcgtcaggct

SEQ ID NO: 1547647 - DNA, 25 bp, Homo sapien
tcgttgatgtgcccgggtcgccccg

SEQ ID NO: 1547648 - DNA, 25 bp, Homo sapien
tcccgctcgtcgtcaggctcctcgg

SEQ ID NO: 1547649 - DNA, 25 bp, Homo sapien
gctcggagcccccctcggtctcgac

SEQ ID NO: 1547650 - DNA, 25 bp, Homo sapien
cgcggtcccctccagctcggagccc

SEQ ID NO: 1547651 - DNA, 25 bp, Homo sapien
agctcggagcccccctcggtctcga

SEQ ID NO: 1547652 - DNA, 25 bp, Homo sapien
ctgcgcggtcccctccagctcggag

SEQ ID NO: 1547653 - DNA, 25 bp, Homo sapien
gccccgagtagccgccgggctccgc

SEQ ID NO: 1547654 - DNA, 25 bp, Homo sapien
aggcgctggactcccgcgtcccaca

SEQ ID NO: 1547655 - DNA, 25 bp, Homo sapien
caggcgctggactcccgcgtcccac

SEQ ID NO: 1547656 - DNA, 25 bp, Homo sapien
gcgctggactcccgcgtcccacagc

SEQ ID NO: 1547657 - DNA, 25 bp, Homo sapien
tcaggcgctggactcccgcgtccca

SEQ ID NO: 1547658 - DNA, 25 bp, Homo sapien
ttgttcttccgactctcttcggctc

SEQ ID NO: 1547659 - DNA, 25 bp, Homo sapien
ttcttccgactctcttcggctccag

SEQ ID NO: 1547660 - DNA, 25 bp, Homo sapien
ttccgactctcttcggctccagaaa

SEQ ID NO: 1547661 - DNA, 25 bp, Homo sapien
tccgactctcttcggctccagaaag

SEQ ID NO: 1547662 - DNA, 25 bp, Homo sapien
ccaaataggagaacgcccaggatcg

SEQ ID NO: 1547663 - DNA, 25 bp, Homo sapien
tccagcggcatattccaggatcctc

SEQ ID NO: 1547664 - DNA, 25 bp, Homo sapien
ccacggagctccgtaccctaggatc

SEQ ID NO: 1547665 - DNA, 25 bp, Homo sapien
taggatccccattttcgagaccctc

SEQ ID NO: 1547666 - DNA, 25 bp, Homo sapien
cacctaattcgctttcctctcagag

SEQ ID NO: 1547667 - DNA, 25 bp, Homo sapien
taccctttcttgctaggcattcctg

SEQ ID NO: 1547668 - DNA, 25 bp, Homo sapien
agaccaccaggtcactactaaccca

SEQ ID NO: 1547669 - DNA, 25 bp, Homo sapien
acgatccctcctgctctagacacac

SEQ ID NO: 1547670 - DNA, 25 bp, Homo sapien
attagaggggcggttcatgaagaac

SEQ ID NO: 1547671 - DNA, 25 bp, Homo sapien
aatggccaattagaggggcggttca

SEQ ID NO: 1547672 - DNA, 25 bp, Homo sapien
ccaggagctcaactaagagtggtaa

SEQ ID NO: 1547673 - DNA, 25 bp, Homo sapien
caactaagagtggtaagaataataa

SEQ ID NO: 1547674 - DNA, 25 bp, Homo sapien
ttggttctgcctggtaatattgtcc

SEQ ID NO: 1547675 - DNA, 25 bp, Homo sapien
atgacttgggtatcgtagaattggt

SEQ ID NO: 1547676 - DNA, 25 bp, Homo sapien
ttgatgacttgggtatcgtagaatt

SEQ ID NO: 1547677 - DNA, 25 bp, Homo sapien
ggttctgcctggtaatattgtccat

SEQ ID NO: 1547678 - DNA, 25 bp, Homo sapien
tccatttccagtggtctcctctcgt

SEQ ID NO: 1547679 - DNA, 25 bp, Homo sapien
atttccagtggtctcctctcgtagc

SEQ ID NO: 1547680 - DNA, 25 bp, Homo sapien
ccatttccagtggtctcctctcgta

SEQ ID NO: 1547681 - DNA, 25 bp, Homo sapien
catttccagtggtctcctctcgtag

SEQ ID NO: 1547682 - DNA, 25 bp, Homo sapien
agacacatttggctaaggaaccctt

SEQ ID NO: 1547683 - DNA, 25 bp, Homo sapien
tccaagagacgatatagcacatgct

SEQ ID NO: 1547684 - DNA, 25 bp, Homo sapien
gagaatcccctaataatatcccctg

SEQ ID NO: 1547685 - DNA, 25 bp, Homo sapien
tccagggtgcttatactaacatctt

SEQ ID NO: 1547686 - DNA, 25 bp, Homo sapien
ctcctatcctctcggtgctcaaagt

SEQ ID NO: 1547687 - DNA, 25 bp, Homo sapien
tggcttgagttgagaagcttcaggc

SEQ ID NO: 1547688 - DNA, 25 bp, Homo sapien
gcctctttcgactctggaattgctg

SEQ ID NO: 1547689 - DNA, 25 bp, Homo sapien
tatcctctcggtgctcaaagtaccc

SEQ ID NO: 1547690 - DNA, 25 bp, Homo sapien
gggtgactgctgcctcatacaccca

SEQ ID NO: 1547691 - DNA, 25 bp, Homo sapien
aagggtgactgctgcctcatacacc

SEQ ID NO: 1547692 - DNA, 25 bp, Homo sapien
agggtgactgctgcctcatacaccc

SEQ ID NO: 1547693 - DNA, 25 bp, Homo sapien
caagcacgaggctatggatatagaa

SEQ ID NO: 1547694 - DNA, 25 bp, Homo sapien
gtccccagcaagcacgaggctatgg

SEQ ID NO: 1547695 - DNA, 25 bp, Homo sapien
tctaggttagtgcaaatgtccccag

SEQ ID NO: 1547696 - DNA, 25 bp, Homo sapien
tcagcccctctaggttagtgcaaat

SEQ ID NO: 1547697 - DNA, 25 bp, Homo sapien
ctcagaggttgtggcttactagtgt

SEQ ID NO: 1547698 - DNA, 25 bp, Homo sapien
gtggcttactagtgtatgtgtctga

SEQ ID NO: 1547699 - DNA, 25 bp, Homo sapien
cagaggttgtggcttactagtgtat

SEQ ID NO: 1547700 - DNA, 25 bp, Homo sapien
gttgtggcttactagtgtatgtgtc

SEQ ID NO: 1547701 - DNA, 25 bp, Homo sapien
tagcaacaagggtatcatcaaagtc

SEQ ID NO: 1547702 - DNA, 25 bp, Homo sapien
tcaatagcaacaagggtatcatcaa

SEQ ID NO: 1547703 - DNA, 25 bp, Homo sapien
aggtgtcaatagcaacaagggtatc

SEQ ID NO: 1547704 - DNA, 25 bp, Homo sapien
caacaagggtatcatcaaagtcatc

SEQ ID NO: 1547705 - DNA, 25 bp, Homo sapien
tcgaagcatacacggccccttctga

SEQ ID NO: 1547706 - DNA, 25 bp, Homo sapien
tgtgagcggatagccactactccga

SEQ ID NO: 1547707 - DNA, 25 bp, Homo sapien
ctggcacgggctcctgaccacaggt

SEQ ID NO: 1547708 - DNA, 25 bp, Homo sapien
caggtatgcaaagccctcaattgtg

SEQ ID NO: 1547709 - DNA, 25 bp, Homo sapien
gctctgaccaaggtggctggtatca

SEQ ID NO: 1547710 - DNA, 25 bp, Homo sapien
cagaggctggcctaagctggcagtt

SEQ ID NO: 1547711 - DNA, 25 bp, Homo sapien
taacttgacatggaactgtggagag

SEQ ID NO: 1547712 - DNA, 25 bp, Homo sapien
gcttggacatggtattgcacaatcc

SEQ ID NO: 1547713 - DNA, 25 bp, Homo sapien
actcctgaccttgtgatccacctgc

SEQ ID NO: 1547714 - DNA, 25 bp, Homo sapien
attacaggcaaaagccaccacacct

SEQ ID NO: 1547715 - DNA, 25 bp, Homo sapien
gccttggcctcccaaaagtgctggg

SEQ ID NO: 1547716 - DNA, 25 bp, Homo sapien
caccatcttggccagtttggtattg

SEQ ID NO: 1547717 - DNA, 25 bp, Homo sapien
aaaatatgatgcaacagttaaaaag

SEQ ID NO: 1547718 - DNA, 25 bp, Homo sapien
acaaaatatgatgcaacagttaaaa

SEQ ID NO: 1547719 - DNA, 25 bp, Homo sapien
caaaatatgatgcaacagttaaaaa

SEQ ID NO: 1547720 - DNA, 25 bp, Homo sapien
gaccagccgatacggaccacgtggg

SEQ ID NO: 1547721 - DNA, 25 bp, Homo sapien
tcaggctctgtagacggaaggtgct

SEQ ID NO: 1547722 - DNA, 25 bp, Homo sapien
gacggaaggtgcttcacggagattt

SEQ ID NO: 1547723 - DNA, 25 bp, Homo sapien
agtccagggaccagccgatacggac

SEQ ID NO: 1547724 - DNA, 25 bp, Homo sapien
tcataaacggaaggcaggaggtgtc

SEQ ID NO: 1547725 - DNA, 25 bp, Homo sapien
taatcagtcacttgggaccagaagg

SEQ ID NO: 1547726 - DNA, 25 bp, Homo sapien
aaacctttcaataggcagcccctgc

SEQ ID NO: 1547727 - DNA, 25 bp, Homo sapien
caaagtagtcctagtgtgatccagt

SEQ ID NO: 1547728 - DNA, 25 bp, Homo sapien
aagattagtcttaagtggtcaggca

SEQ ID NO: 1547729 - DNA, 25 bp, Homo sapien
gtcaagcttttagggtgttcatcac

SEQ ID NO: 1547730 - DNA, 25 bp, Homo sapien
ccaggataatggctcaagtgttaaa

SEQ ID NO: 1547731 - DNA, 25 bp, Homo sapien
gtcaggcaattatggaccaggataa

SEQ ID NO: 1547732 - DNA, 25 bp, Homo sapien
cttaatgatgtagaacttggagggc

SEQ ID NO: 1547733 - DNA, 25 bp, Homo sapien
tgtccagtctgggagtaggagctca

SEQ ID NO: 1547734 - DNA, 25 bp, Homo sapien
gcttgatgggtttcattgtccagtc

SEQ ID NO: 1547735 - DNA, 25 bp, Homo sapien
gggtgaaaggaagcccttaatgatg

SEQ ID NO: 1547736 - DNA, 25 bp, Homo sapien
gaagaaataggcaaaggcaggttaa

SEQ ID NO: 1547737 - DNA, 25 bp, Homo sapien
tgacggaagaaataggcaaaggcag

SEQ ID NO: 1547738 - DNA, 25 bp, Homo sapien
ctgacggaagaaataggcaaaggca

SEQ ID NO: 1547739 - DNA, 25 bp, Homo sapien
acggaagaaataggcaaaggcaggt

SEQ ID NO: 1547740 - DNA, 25 bp, Homo sapien
ttcaaaccggctattggtggacttc

SEQ ID NO: 1547741 - DNA, 25 bp, Homo sapien
tctctgcaaacttgtctccgtagtt

SEQ ID NO: 1547742 - DNA, 25 bp, Homo sapien
cggctattggtggacttcttcccag

SEQ ID NO: 1547743 - DNA, 25 bp, Homo sapien
aatcacatcgttctctgcaaacttg

SEQ ID NO: 1547744 - DNA, 25 bp, Homo sapien
acaaagaagtatggcgagagtggct

SEQ ID NO: 1547745 - DNA, 25 bp, Homo sapien
caagaccagaggagatggaatgaca

SEQ ID NO: 1547746 - DNA, 25 bp, Homo sapien
tatcctgaaaaagaagtctgtagcc

SEQ ID NO: 1547747 - DNA, 25 bp, Homo sapien
ggaaggctatgcacacctgaagtcc

SEQ ID NO: 1547748 - DNA, 25 bp, Homo sapien
tagcaatgaaagataagaaattcct

SEQ ID NO: 1547749 - DNA, 25 bp, Homo sapien
caatgaaagataagaaattcctagg

SEQ ID NO: 1547750 - DNA, 25 bp, Homo sapien
tcctagcaatgaaagataagaaatt

SEQ ID NO: 1547751 - DNA, 25 bp, Homo sapien
atgaaagataagaaattcctaggtt

SEQ ID NO: 1547752 - DNA, 25 bp, Homo sapien
gctcaggagtttggcgaaaccccat

SEQ ID NO: 1547753 - DNA, 25 bp, Homo sapien
tggcgcaagtatgtaatcccaggta

SEQ ID NO: 1547754 - DNA, 25 bp, Homo sapien
tccctgcaaagttcaagggtcagcc

SEQ ID NO: 1547755 - DNA, 25 bp, Homo sapien
aactatacgtggatttttgaccgca

SEQ ID NO: 1547756 - DNA, 25 bp, Homo sapien
cagcccattgtttagggacaaataa

SEQ ID NO: 1547757 - DNA, 25 bp, Homo sapien
aactcatggggttcttggtggcatt

SEQ ID NO: 1547758 - DNA, 25 bp, Homo sapien
tctggattcggaaagcaatgcccat

SEQ ID NO: 1547759 - DNA, 25 bp, Homo sapien
aaagacagttccacgtcatttccac

SEQ ID NO: 1547760 - DNA, 25 bp, Homo sapien
ggacagaacagtagggctctgctct

SEQ ID NO: 1547761 - DNA, 25 bp, Homo sapien
tctgctctctgtccgaagttgaact

SEQ ID NO: 1547762 - DNA, 25 bp, Homo sapien
gcatgtttgatggcccatgtggtct

SEQ ID NO: 1547763 - DNA, 25 bp, Homo sapien
catcttatccatgatggcattggta

SEQ ID NO: 1547764 - DNA, 25 bp, Homo sapien
ccgcatcttatccatgatggcattg

SEQ ID NO: 1547765 - DNA, 25 bp, Homo sapien
tgtacttcttggaagggttggaggc

SEQ ID NO: 1547766 - DNA, 25 bp, Homo sapien
ctgatctaggatatagttgcgtttc

SEQ ID NO: 1547767 - DNA, 25 bp, Homo sapien
ggatcaggacatcccagcggccagc

SEQ ID NO: 1547768 - DNA, 25 bp, Homo sapien
agcatagttccgctgccggcgtagg

SEQ ID NO: 1547769 - DNA, 25 bp, Homo sapien
tttcttgcgggcagcaatctggatg

SEQ ID NO: 1547770 - DNA, 25 bp, Homo sapien
aatgtcaataggcaatgacgttgca

SEQ ID NO: 1547771 - DNA, 25 bp, Homo sapien
aatgacgttgcataggcaataacca

SEQ ID NO: 1547772 - DNA, 25 bp, Homo sapien
acgttgcataggcaataaccatgtg

SEQ ID NO: 1547773 - DNA, 25 bp, Homo sapien
caataaccatgtggaactcattact

SEQ ID NO: 1547774 - DNA, 25 bp, Homo sapien
atccaggaactgcagggattttgcc

SEQ ID NO: 1547775 - DNA, 25 bp, Homo sapien
gattttgcctgtagtatgggtttcc

SEQ ID NO: 1547776 - DNA, 25 bp, Homo sapien
accagtaaaggcaaaagatggttct

SEQ ID NO: 1547777 - DNA, 25 bp, Homo sapien
aaaagatggttctgggctgagatcc

SEQ ID NO: 1547778 - DNA, 25 bp, Homo sapien
ttttcgtctctgggctgacccataa

SEQ ID NO: 1547779 - DNA, 25 bp, Homo sapien
tctgggctgacccataaacatttgt

SEQ ID NO: 1547780 - DNA, 25 bp, Homo sapien
ttcgtctctgggctgacccataaac

SEQ ID NO: 1547781 - DNA, 25 bp, Homo sapien
cgtctctgggctgacccataaacat

SEQ ID NO: 1547782 - DNA, 25 bp, Homo sapien
ctcgtcggttcgctttattgttcgg

SEQ ID NO: 1547783 - DNA, 25 bp, Homo sapien
tcggtcttttaggtcctcgtcagtg

SEQ ID NO: 1547784 - DNA, 25 bp, Homo sapien
gcatgatctgggacatccttccctt

SEQ ID NO: 1547785 - DNA, 25 bp, Homo sapien
tcatttctaagaccgcatgatctgg

SEQ ID NO: 1547786 - DNA, 25 bp, Homo sapien
tagacacagtgcacagctccctcag

SEQ ID NO: 1547787 - DNA, 25 bp, Homo sapien
gaagaggtggctaagacccacctag

SEQ ID NO: 1547788 - DNA, 25 bp, Homo sapien
actcctccgttttctgaagaggtgg

SEQ ID NO: 1547789 - DNA, 25 bp, Homo sapien
tggcatcaccatccctatatttaca

SEQ ID NO: 1547790 - DNA, 25 bp, Homo sapien
actggaatagtgaataagaaagaca

SEQ ID NO: 1547791 - DNA, 25 bp, Homo sapien
ccacccagaagagtggccttccaga

SEQ ID NO: 1547792 - DNA, 25 bp, Homo sapien
tcagtaccttctgaagtctggtccc

SEQ ID NO: 1547793 - DNA, 25 bp, Homo sapien
gaaagacatagacagaagggcgggc

SEQ ID NO: 1547794 - DNA, 25 bp, Homo sapien
cccgctgcagctcaatgaacagaac

SEQ ID NO: 1547795 - DNA, 25 bp, Homo sapien
tcatccaggaagtccccaacatctg

SEQ ID NO: 1547796 - DNA, 25 bp, Homo sapien
ccaacatctggcaacgtgaagttgg

SEQ ID NO: 1547797 - DNA, 25 bp, Homo sapien
gctgcagctcaatgaacagaacctc

SEQ ID NO: 1547798 - DNA, 25 bp, Homo sapien
ctcggttctggaagccgccacggtt

SEQ ID NO: 1547799 - DNA, 25 bp, Homo sapien
ccttgcggccttcctcgttgtactg

SEQ ID NO: 1547800 - DNA, 25 bp, Homo sapien
ttttcatagcgctggaagccaccac

SEQ ID NO: 1547801 - DNA, 25 bp, Homo sapien
tcggttgtcaaagcgcttttcaggg

SEQ ID NO: 1547802 - DNA, 25 bp, Homo sapien
cccagcggttctggctatagccacc

SEQ ID NO: 1547803 - DNA, 25 bp, Homo sapien
cagcggttctggctatagccaccac

SEQ ID NO: 1547804 - DNA, 25 bp, Homo sapien
gttctggctatagccaccacctccg

SEQ ID NO: 1547805 - DNA, 25 bp, Homo sapien
gcggttctggctatagccaccacct

SEQ ID NO: 1547806 - DNA, 25 bp, Homo sapien
gctgttgctggggagcccggttgta

SEQ ID NO: 1547807 - DNA, 25 bp, Homo sapien
gggagcccggttgtagctgcctctg

SEQ ID NO: 1547808 - DNA, 25 bp, Homo sapien
tagctgcctctgttgttggagttgt

SEQ ID NO: 1547809 - DNA, 25 bp, Homo sapien
ttgtagctgcctctgttgttggagt

SEQ ID NO: 1547810 - DNA, 25 bp, Homo sapien
tgctggtattggcgcttgagccagg

SEQ ID NO: 1547811 - DNA, 25 bp, Homo sapien
ctggtattggcgcttgagccaggga

SEQ ID NO: 1547812 - DNA, 25 bp, Homo sapien
tggtattggcgcttgagccagggat

SEQ ID NO: 1547813 - DNA, 25 bp, Homo sapien
gtattggcgcttgagccagggatgt

SEQ ID NO: 1547814 - DNA, 25 bp, Homo sapien
taaaccactgggtactcaacaggtg

SEQ ID NO: 1547815 - DNA, 25 bp, Homo sapien
tgccctgggtatccaataagcttgt

SEQ ID NO: 1547816 - DNA, 25 bp, Homo sapien
gggagcaaggtacacggcacttctt

SEQ ID NO: 1547817 - DNA, 25 bp, Homo sapien
ccagagacgggaagctatttgtcca

SEQ ID NO: 1547818 - DNA, 25 bp, Homo sapien
gttgtaaccgccgtagctcccatag

SEQ ID NO: 1547819 - DNA, 25 bp, Homo sapien
gttgtagggtggctggctgtaactc

SEQ ID NO: 1547820 - DNA, 25 bp, Homo sapien
accgccgtagctcccatagttgtag

SEQ ID NO: 1547821 - DNA, 25 bp, Homo sapien
tagctcccatagttgtaggcaggtg

SEQ ID NO: 1547822 - DNA, 25 bp, Homo sapien
ttcccgtagtatggcggccactggc

SEQ ID NO: 1547823 - DNA, 25 bp, Homo sapien
ccgtagtcgtagttcccgtagtatg

SEQ ID NO: 1547824 - DNA, 25 bp, Homo sapien
tcccggagtagctcccgtagtcgta

SEQ ID NO: 1547825 - DNA, 25 bp, Homo sapien
gagtagctcccgtagtcgtagttcc

SEQ ID NO: 1547826 - DNA, 25 bp, Homo sapien
taaaaggtcattgttgcctgtttga

SEQ ID NO: 1547827 - DNA, 25 bp, Homo sapien
cactgtagcctcactgtatgatcaa

SEQ ID NO: 1547828 - DNA, 25 bp, Homo sapien
ggagaatttacaaccaactgcatga

SEQ ID NO: 1547829 - DNA, 25 bp, Homo sapien
tcctgaaaagtagacagtaaaacag

SEQ ID NO: 1547830 - DNA, 25 bp, Homo sapien
aaggtttcaagttcaatagtcactc

SEQ ID NO: 1547831 - DNA, 25 bp, Homo sapien
tgaatcccaccagaaactaccaaga

SEQ ID NO: 1547832 - DNA, 25 bp, Homo sapien
ttacaattcaactgaacacagaagc

SEQ ID NO: 1547833 - DNA, 25 bp, Homo sapien
tgatgaaatatcaacagcccaccca

SEQ ID NO: 1547834 - DNA, 25 bp, Homo sapien
taggaaaagcttttgggtctggcac

SEQ ID NO: 1547835 - DNA, 25 bp, Homo sapien
catgttaaaacatatgagtcaaggg

SEQ ID NO: 1547836 - DNA, 25 bp, Homo sapien
gctaggaggtgccatgtcatttatt

SEQ ID NO: 1547837 - DNA, 25 bp, Homo sapien
taaagggtatcactgtaggaaaagc

SEQ ID NO: 1547838 - DNA, 25 bp, Homo sapien
cacttcagggtttcaaccctgcttc

SEQ ID NO: 1547839 - DNA, 25 bp, Homo sapien
caactgcagtaacacttcagggttt

SEQ ID NO: 1547840 - DNA, 25 bp, Homo sapien
ccaattaacggccaactgcagtaac

SEQ ID NO: 1547841 - DNA, 25 bp, Homo sapien
taacggccaactgcagtaacacttc

SEQ ID NO: 1547842 - DNA, 25 bp, Homo sapien
tcgcctgagaatgttccgggtccgg

SEQ ID NO: 1547843 - DNA, 25 bp, Homo sapien
tgattctctcggacttttcaaccgc

SEQ ID NO: 1547844 - DNA, 25 bp, Homo sapien
ctaaggcagacgttgcattgcgcat

SEQ ID NO: 1547845 - DNA, 25 bp, Homo sapien
cacgcaagagacactttcgcctgag

SEQ ID NO: 1547846 - DNA, 25 bp, Homo sapien
ccgtcgccgtcgccacggcctccat

SEQ ID NO: 1547847 - DNA, 25 bp, Homo sapien
cgcctgcgcgtgaccaagatctcac

SEQ ID NO: 1547848 - DNA, 25 bp, Homo sapien
ccgcctgcgcgtgaccaagatctca

SEQ ID NO: 1547849 - DNA, 25 bp, Homo sapien
acccgccgcctgcgcgtgaccaaga

SEQ ID NO: 1547850 - DNA, 25 bp, Homo sapien
cgccgcctgcgcgtgaccaagatct

SEQ ID NO: 1547851 - DNA, 25 bp, Homo sapien
cacccgacgtcggattactttgaag

SEQ ID NO: 1547852 - DNA, 25 bp, Homo sapien
taatttgagagttagcctggtaagg

SEQ ID NO: 1547853 - DNA, 25 bp, Homo sapien
taggaggattcgtctagagagcaag

SEQ ID NO: 1547854 - DNA, 25 bp, Homo sapien
aattaccaattcttggccagtggtg

SEQ ID NO: 1547855 - DNA, 25 bp, Homo sapien
tagaaagtacaacgacaattctccc

SEQ ID NO: 1547856 - DNA, 25 bp, Homo sapien
aagtagaaagtacaacgacaattct

SEQ ID NO: 1547857 - DNA, 25 bp, Homo sapien
gtagaaagtacaacgacaattctcc

SEQ ID NO: 1547858 - DNA, 25 bp, Homo sapien
caaaagtagaaagtacaacgacaat

SEQ ID NO: 1547859 - DNA, 25 bp, Homo sapien
tttcagccccggaggtgtcactgtc

SEQ ID NO: 1547860 - DNA, 25 bp, Homo sapien
tccactttgtcctggggtttagatg

SEQ ID NO: 1547861 - DNA, 25 bp, Homo sapien
ggactggtgtccggctcagctcacc

SEQ ID NO: 1547862 - DNA, 25 bp, Homo sapien
cagggccactggtgttgcctcagct

SEQ ID NO: 1547863 - DNA, 25 bp, Homo sapien
gctctgtcaagtcgggttcaccctg

SEQ ID NO: 1547864 - DNA, 25 bp, Homo sapien
cagtagaagtctgcacggtggtcgc

SEQ ID NO: 1547865 - DNA, 25 bp, Homo sapien
accagtggcttctcgtggtacagct

SEQ ID NO: 1547866 - DNA, 25 bp, Homo sapien
aagcaggccagatgctcctcacgga

SEQ ID NO: 1547867 - DNA, 25 bp, Homo sapien
atcaccggcttgagtgactgtgccc

SEQ ID NO: 1547868 - DNA, 25 bp, Homo sapien
ggatcaccggcttgagtgactgtgc

SEQ ID NO: 1547869 - DNA, 25 bp, Homo sapien
gctgggatcaccggcttgagtgact

SEQ ID NO: 1547870 - DNA, 25 bp, Homo sapien
tgggatcaccggcttgagtgactgt

SEQ ID NO: 1547871 - DNA, 25 bp, Homo sapien
tgtttgtggcatcctctagcagact

SEQ ID NO: 1547872 - DNA, 25 bp, Homo sapien
tgtgatctcgattaactctaactgc

SEQ ID NO: 1547873 - DNA, 25 bp, Homo sapien
ctctgcagcaccataggctgtgact

SEQ ID NO: 1547874 - DNA, 25 bp, Homo sapien
caatcttacccccagctgtttgtgg

SEQ ID NO: 1547875 - DNA, 25 bp, Homo sapien
tcctcgtaggactggagcagcaagt

SEQ ID NO: 1547876 - DNA, 25 bp, Homo sapien
tgctcatcactgaagtactcgcccc

SEQ ID NO: 1547877 - DNA, 25 bp, Homo sapien
cagcaagttggagagcgggcaagca

SEQ ID NO: 1547878 - DNA, 25 bp, Homo sapien
tcctcctgggtgagatactgcccga

SEQ ID NO: 1547879 - DNA, 25 bp, Homo sapien
tcttcctccaagcaggcctcctcct

SEQ ID NO: 1547880 - DNA, 25 bp, Homo sapien
tcctcctcctgctgttggagcagac

SEQ ID NO: 1547881 - DNA, 25 bp, Homo sapien
ttcctcttcctccaagcaggcctcc

SEQ ID NO: 1547882 - DNA, 25 bp, Homo sapien
ttcctccaagcaggcctcctcctcc

SEQ ID NO: 1547883 - DNA, 25 bp, Homo sapien
tctcctccgagtcgggaacccaggc

SEQ ID NO: 1547884 - DNA, 25 bp, Homo sapien
ctggtgcatgcggctggtgaactcc

SEQ ID NO: 1547885 - DNA, 25 bp, Homo sapien
ccgtccttgccatctaggaagcgct

SEQ ID NO: 1547886 - DNA, 25 bp, Homo sapien
gtgaactcctctcgcaggatcagcc

SEQ ID NO: 1547887 - DNA, 25 bp, Homo sapien
ttgtagctccacaaagggagacccc

SEQ ID NO: 1547888 - DNA, 25 bp, Homo sapien
tggacaaggctagtccgaggtcacc

SEQ ID NO: 1547889 - DNA, 25 bp, Homo sapien
tactgagctatatgtcatccctgtc

SEQ ID NO: 1547890 - DNA, 25 bp, Homo sapien
cagggtttcattgatactgagctat

SEQ ID NO: 1547891 - DNA, 25 bp, Homo sapien
ctggggcaccctgatgtcaaaggcc

SEQ ID NO: 1547892 - DNA, 25 bp, Homo sapien
cctggggcaccctgatgtcaaaggc

SEQ ID NO: 1547893 - DNA, 25 bp, Homo sapien
tggggcaccctgatgtcaaaggcca

SEQ ID NO: 1547894 - DNA, 25 bp, Homo sapien
cctcggatgcccaggtcaaaggcct

SEQ ID NO: 1547895 - DNA, 25 bp, Homo sapien
tcctcatcaaagtacctctcctcct

SEQ ID NO: 1547896 - DNA, 25 bp, Homo sapien
tcatcccgtgccacgatgtcgaggt

SEQ ID NO: 1547897 - DNA, 25 bp, Homo sapien
tcgaagtcggggttgtcgtctactg

SEQ ID NO: 1547898 - DNA, 25 bp, Homo sapien
ctgggctgggcgcatcctcaggttc

SEQ ID NO: 1547899 - DNA, 25 bp, Homo sapien
gagagatgggaacctaacagaagca

SEQ ID NO: 1547900 - DNA, 25 bp, Homo sapien
gacacagcgcagacataaacagaga

SEQ ID NO: 1547901 - DNA, 25 bp, Homo sapien
gatgagactagacccagtgagatgg

SEQ ID NO: 1547902 - DNA, 25 bp, Homo sapien
gtacaagtagaaagaagaggcccag

SEQ ID NO: 1547903 - DNA, 25 bp, Homo sapien
gatgacctgatcctgtctgtgtgcg

SEQ ID NO: 1547904 - DNA, 25 bp, Homo sapien
tagtacctagggcatagcactgctg

SEQ ID NO: 1547905 - DNA, 25 bp, Homo sapien
aaatgtgcctatcaccaagggctga

SEQ ID NO: 1547906 - DNA, 25 bp, Homo sapien
ttctgagagatatgaccccaaggtc

SEQ ID NO: 1547907 - DNA, 25 bp, Homo sapien
cagtgcatgtgtcgctggtattctg

SEQ ID NO: 1547908 - DNA, 25 bp, Homo sapien
ctgggttgcactgtgatcagtgcat

SEQ ID NO: 1547909 - DNA, 25 bp, Homo sapien
cactgtgatcagtgcatgtgtcgct

SEQ ID NO: 1547910 - DNA, 25 bp, Homo sapien
tgtttgtctacgtggtgtgcatcca

SEQ ID NO: 1547911 - DNA, 25 bp, Homo sapien
tcggacctgtcacagtcccaccaga

SEQ ID NO: 1547912 - DNA, 25 bp, Homo sapien
cacagtcggacctgtcacagtccca

SEQ ID NO: 1547913 - DNA, 25 bp, Homo sapien
gtccacagtcggacctgtcacagtc

SEQ ID NO: 1547914 - DNA, 25 bp, Homo sapien
agtcggacctgtcacagtcccacca

SEQ ID NO: 1547915 - DNA, 25 bp, Homo sapien
catcagagcccggacaggaaatgga

SEQ ID NO: 1547916 - DNA, 25 bp, Homo sapien
tcctccatgggttcacagtcacaaa

SEQ ID NO: 1547917 - DNA, 25 bp, Homo sapien
atcagagcccggacaggaaatggat

SEQ ID NO: 1547918 - DNA, 25 bp, Homo sapien
aggcttcggcacattgtaggagcct

SEQ ID NO: 1547919 - DNA, 25 bp, Homo sapien
gcctagaaaacatcattcactcatt

SEQ ID NO: 1547920 - DNA, 25 bp, Homo sapien
gcttcggcacattgtaggagcctag

SEQ ID NO: 1547921 - DNA, 25 bp, Homo sapien
ggcacattgtaggagcctagaaaac

SEQ ID NO: 1547922 - DNA, 25 bp, Homo sapien
gaggattacttgtgtgtcccacccc

SEQ ID NO: 1547923 - DNA, 25 bp, Homo sapien
gcaacaattcctggcgatacctcag

SEQ ID NO: 1547924 - DNA, 25 bp, Homo sapien
ggtcgtgacaccatctacccactgt

SEQ ID NO: 1547925 - DNA, 25 bp, Homo sapien
ttgatgtcaccggagttgtgcggca

SEQ ID NO: 1547926 - DNA, 25 bp, Homo sapien
tagtctttctgtccacgcatgggtc

SEQ ID NO: 1547927 - DNA, 25 bp, Homo sapien
tagaggttcctttaacactgacacc

SEQ ID NO: 1547928 - DNA, 25 bp, Homo sapien
tgcacatgtgtctcgtctcgcacgt

SEQ ID NO: 1547929 - DNA, 25 bp, Homo sapien
cgtggcttcaccttcgttgtagagg

SEQ ID NO: 1547930 - DNA, 25 bp, Homo sapien
gaagcggaagcgcatcgaggccatc

SEQ ID NO: 1547931 - DNA, 25 bp, Homo sapien
gcgggactatccacctgcaagacta

SEQ ID NO: 1547932 - DNA, 25 bp, Homo sapien
tgcaagactatcgacatggagctgg

SEQ ID NO: 1547933 - DNA, 25 bp, Homo sapien
tgctgtggctactggtgctgacgcc

SEQ ID NO: 1547934 - DNA, 25 bp, Homo sapien
ccctacacggcgtccctcaggcgcc

SEQ ID NO: 1547935 - DNA, 25 bp, Homo sapien
attccggaccagccctcgggagtcg

SEQ ID NO: 1547936 - DNA, 25 bp, Homo sapien
gctgccccgcgaggaggcaggactt

SEQ ID NO: 1547937 - DNA, 25 bp, Homo sapien
tgagacttttccgttgccgctggga

SEQ ID NO: 1547938 - DNA, 25 bp, Homo sapien
tgtgtctcatcccccggattaagcc

SEQ ID NO: 1547939 - DNA, 25 bp, Homo sapien
tttctctggtgacccacaccgcccg

SEQ ID NO: 1547940 - DNA, 25 bp, Homo sapien
cggattaagccttctccgcctggtc

SEQ ID NO: 1547941 - DNA, 25 bp, Homo sapien
cctgactctccttccgttctgggtc

SEQ ID NO: 1547942 - DNA, 25 bp, Homo sapien
tggagatcggcctgctgctccgcaa

SEQ ID NO: 1547943 - DNA, 25 bp, Homo sapien
ctggagatcggcctgctgctccgca

SEQ ID NO: 1547944 - DNA, 25 bp, Homo sapien
cgcccgcggagaaaagaagcagtca

SEQ ID NO: 1547945 - DNA, 25 bp, Homo sapien
atatctcgcagccaggcgggtcctg

SEQ ID NO: 1547946 - DNA, 25 bp, Homo sapien
ggcgcgagccaggcctggtcggcgc

SEQ ID NO: 1547947 - DNA, 25 bp, Homo sapien
ggtcctgggagaggcgcgagccagg

SEQ ID NO: 1547948 - DNA, 25 bp, Homo sapien
cctgatgactggcttgatgtgggaa

SEQ ID NO: 1547949 - DNA, 25 bp, Homo sapien
agacccttttaaggagccttgatgg

SEQ ID NO: 1547950 - DNA, 25 bp, Homo sapien
tagctccgagaaggaagttggactt

SEQ ID NO: 1547951 - DNA, 25 bp, Homo sapien
taacagtgaacttggtagtagctcc

SEQ ID NO: 1547952 - DNA, 25 bp, Homo sapien
attaagaatgaccaagcagtgccag

SEQ ID NO: 1547953 - DNA, 25 bp, Homo sapien
tagcctgagtcacgtagcatgcagt

SEQ ID NO: 1547954 - DNA, 25 bp, Homo sapien
tcagaacattactcctaggccgggt

SEQ ID NO: 1547955 - DNA, 25 bp, Homo sapien
ggcctggccaactttcgataatgtg

SEQ ID NO: 1547956 - DNA, 25 bp, Homo sapien
ctgtgtgccatacttggcttaaaag

SEQ ID NO: 1547957 - DNA, 25 bp, Homo sapien
gccgggatggccaggcgcggccata

SEQ ID NO: 1547958 - DNA, 25 bp, Homo sapien
tggccaggcgcggccatacatggca

SEQ ID NO: 1547959 - DNA, 25 bp, Homo sapien
ccgggaccgccggctgtgtgccata

SEQ ID NO: 1547960 - DNA, 25 bp, Homo sapien
tccaggagtggctgtgatagccact

SEQ ID NO: 1547961 - DNA, 25 bp, Homo sapien
aggcgggagccactgagaccaccct

SEQ ID NO: 1547962 - DNA, 25 bp, Homo sapien
gcatgctatgacctggatgaccctt

SEQ ID NO: 1547963 - DNA, 25 bp, Homo sapien
taagaggacaaatactgtaggattc

SEQ ID NO: 1547964 - DNA, 25 bp, Homo sapien
tcatggagccttgtataggcctccc

SEQ ID NO: 1547965 - DNA, 25 bp, Homo sapien
gagggatgccctgttactttctatc

SEQ ID NO: 1547966 - DNA, 25 bp, Homo sapien
gattgttttactcaggagggatgcc

SEQ ID NO: 1547967 - DNA, 25 bp, Homo sapien
cagtttctggcagacgacagaagca

SEQ ID NO: 1547968 - DNA, 25 bp, Homo sapien
tattgtcctgtttcacgcgggagga

SEQ ID NO: 1547969 - DNA, 25 bp, Homo sapien
cgacgtcagcgtccaggaacgggtt

SEQ ID NO: 1547970 - DNA, 25 bp, Homo sapien
gaccgtgcgccctgttctaagtgct

SEQ ID NO: 1547971 - DNA, 25 bp, Homo sapien
catcattggttcattgagggcagac

SEQ ID NO: 1547972 - DNA, 25 bp, Homo sapien
tcttcttctcgtcctacgatccccc

SEQ ID NO: 1547973 - DNA, 25 bp, Homo sapien
ctcgtcctacgatccccctggaagg

SEQ ID NO: 1547974 - DNA, 25 bp, Homo sapien
tcttctcgtcctacgatccccctgg

SEQ ID NO: 1547975 - DNA, 25 bp, Homo sapien
ttctcgtcctacgatccccctggaa

SEQ ID NO: 1547976 - DNA, 25 bp, Homo sapien
ccaattgactccgtgcacaacccta

SEQ ID NO: 1547977 - DNA, 25 bp, Homo sapien
tttatcccaattgactccgtgcaca

SEQ ID NO: 1547978 - DNA, 25 bp, Homo sapien
tatcccaattgactccgtgcacaac

SEQ ID NO: 1547979 - DNA, 25 bp, Homo sapien
aattgactccgtgcacaaccctact

SEQ ID NO: 1547980 - DNA, 25 bp, Homo sapien
cccccaatatccatcccaggttcat

SEQ ID NO: 1547981 - DNA, 25 bp, Homo sapien
acaaacacccccaatatccatccca

SEQ ID NO: 1547982 - DNA, 25 bp, Homo sapien
cacaaacacccccaatatccatccc

SEQ ID NO: 1547983 - DNA, 25 bp, Homo sapien
aacacccccaatatccatcccaggt

SEQ ID NO: 1547984 - DNA, 25 bp, Homo sapien
caccactgcagatccgctagagtgc

SEQ ID NO: 1547985 - DNA, 25 bp, Homo sapien
cactgcagatccgctagagtgcagt

SEQ ID NO: 1547986 - DNA, 25 bp, Homo sapien
actgcagatccgctagagtgcagtg

SEQ ID NO: 1547987 - DNA, 25 bp, Homo sapien
accactgcagatccgctagagtgca

SEQ ID NO: 1547988 - DNA, 25 bp, Homo sapien
ggctgttgaagctcacgaagactag

SEQ ID NO: 1547989 - DNA, 25 bp, Homo sapien
gggactcggcaaaggctatctctct

SEQ ID NO: 1547990 - DNA, 25 bp, Homo sapien
tcagggactcggcaaaggctatctc

SEQ ID NO: 1547991 - DNA, 25 bp, Homo sapien
aagctcacgaagactagggctgtcc

SEQ ID NO: 1547992 - DNA, 25 bp, Homo sapien
cagcgctcacggagggaagaggcgg

SEQ ID NO: 1547993 - DNA, 25 bp, Homo sapien
ccagcgctcacggagggaagaggcg

SEQ ID NO: 1547994 - DNA, 25 bp, Homo sapien
ggccagcgctcacggagggaagagg

SEQ ID NO: 1547995 - DNA, 25 bp, Homo sapien
aggccagcgctcacggagggaagag

SEQ ID NO: 1547996 - DNA, 25 bp, Homo sapien
aacgggccagaaacaacacagcatg

SEQ ID NO: 1547997 - DNA, 25 bp, Homo sapien
tagacagaaggcagcgatgccaacg

SEQ ID NO: 1547998 - DNA, 25 bp, Homo sapien
agcatggagaagacagccaagccga

SEQ ID NO: 1547999 - DNA, 25 bp, Homo sapien
tagaaatggtgaaagacggctgcct

SEQ ID NO: 1548000 - DNA, 25 bp, Homo sapien
gccactattctaactcatttgattc

SEQ ID NO: 1548001 - DNA, 25 bp, Homo sapien
gacccagaggtagcaattattccca

SEQ ID NO: 1548002 - DNA, 25 bp, Homo sapien
tcttgcagagagtggcagactcagg

SEQ ID NO: 1548003 - DNA, 25 bp, Homo sapien
catttgattctcacattgacccaga

SEQ ID NO: 1548004 - DNA, 25 bp, Homo sapien
cacctactataggtcaggcactggg

SEQ ID NO: 1548005 - DNA, 25 bp, Homo sapien
tacgtagcacctactataggtcagg

SEQ ID NO: 1548006 - DNA, 25 bp, Homo sapien
gcagatacgtagcacctactatagg

SEQ ID NO: 1548007 - DNA, 25 bp, Homo sapien
aaagcagatacgtagcacctactat

SEQ ID NO: 1548008 - DNA, 25 bp, Homo sapien
ctcagtcccagacccttcccctggt

SEQ ID NO: 1548009 - DNA, 25 bp, Homo sapien
gtgacccaggcatcccctcagtccc

SEQ ID NO: 1548010 - DNA, 25 bp, Homo sapien
agcagtgacccaggcatcccctcag

SEQ ID NO: 1548011 - DNA, 25 bp, Homo sapien
aggcatcccctcagtcccagaccct

SEQ ID NO: 1548012 - DNA, 25 bp, Homo sapien
gcatacgtgcacacgcccagcccga

SEQ ID NO: 1548013 - DNA, 25 bp, Homo sapien
cgtgcacacgcccagcccgacggcg

SEQ ID NO: 1548014 - DNA, 25 bp, Homo sapien
tgcacacgcccagcccgacggcgag

SEQ ID NO: 1548015 - DNA, 25 bp, Homo sapien
agggcagccgcatacgtgcacacgc

SEQ ID NO: 1548016 - DNA, 25 bp, Homo sapien
caagggtgtctggtgtttaatctca

SEQ ID NO: 1548017 - DNA, 25 bp, Homo sapien
tctgcccacagatttgctgggctgc

SEQ ID NO: 1548018 - DNA, 25 bp, Homo sapien
ctcgctcccgtttctagatgctcct

SEQ ID NO: 1548019 - DNA, 25 bp, Homo sapien
tttaatctcaggttgctgccgcccg

SEQ ID NO: 1548020 - DNA, 25 bp, Homo sapien
cagcctgaggtgtgcagaaagtccc

SEQ ID NO: 1548021 - DNA, 25 bp, Homo sapien
gaacatcctgctgtttagaaaccac

SEQ ID NO: 1548022 - DNA, 25 bp, Homo sapien
taacaggtagaggagtaaggacttg

SEQ ID NO: 1548023 - DNA, 25 bp, Homo sapien
tctctgctaaccacccatattggga

SEQ ID NO: 1548024 - DNA, 25 bp, Homo sapien
cacaggcaaaaagaggatgagctca

SEQ ID NO: 1548025 - DNA, 25 bp, Homo sapien
agggaagcccaatttataacacagg

SEQ ID NO: 1548026 - DNA, 25 bp, Homo sapien
ttgtggacccagaaacctttgcgga

SEQ ID NO: 1548027 - DNA, 25 bp, Homo sapien
tcagacactgaggtaccagcatggg

SEQ ID NO: 1548028 - DNA, 25 bp, Homo sapien
cagaccctcgctgcagcgatcgcta

SEQ ID NO: 1548029 - DNA, 25 bp, Homo sapien
agcctggctcaaaccacggtttagc

SEQ ID NO: 1548030 - DNA, 25 bp, Homo sapien
tcgctgcagcgatcgctaccgccat

SEQ ID NO: 1548031 - DNA, 25 bp, Homo sapien
tcaaaccacggtttagccgccagac

SEQ ID NO: 1548032 - DNA, 25 bp, Homo sapien
tctttgcccagaagaaagtccctcc

SEQ ID NO: 1548033 - DNA, 25 bp, Homo sapien
aatacaaggccctatgcagcctgtg

SEQ ID NO: 1548034 - DNA, 25 bp, Homo sapien
aaaccctgagggagaaggtcttgcg

SEQ ID NO: 1548035 - DNA, 25 bp, Homo sapien
aaggagcctcccctgaataccagtg

SEQ ID NO: 1548036 - DNA, 25 bp, Homo sapien
aaacaataactcttaagataataca

SEQ ID NO: 1548037 - DNA, 25 bp, Homo sapien
agcaagaggaaaggtaatcaagaga

SEQ ID NO: 1548038 - DNA, 25 bp, Homo sapien
caagacttgaatctaagctccatcc

SEQ ID NO: 1548039 - DNA, 25 bp, Homo sapien
aactgggttttggagtccagagctc

SEQ ID NO: 1548040 - DNA, 25 bp, Homo sapien
tccagagctccaagttcagacctca

SEQ ID NO: 1548041 - DNA, 25 bp, Homo sapien
agccaatactggactaagaagaatg

SEQ ID NO: 1548042 - DNA, 25 bp, Homo sapien
gtagatggggattccagagatgacg

SEQ ID NO: 1548043 - DNA, 25 bp, Homo sapien
atgacgttgggctggatgaattcca

SEQ ID NO: 1548044 - DNA, 25 bp, Homo sapien
gggctggatgaattccaacttatct

SEQ ID NO: 1548045 - DNA, 25 bp, Homo sapien
ttatctataaactccgccgaggccc

SEQ ID NO: 1548046 - DNA, 25 bp, Homo sapien
tgatgatctggccttgccggtccat

SEQ ID NO: 1548047 - DNA, 25 bp, Homo sapien
acagatagacgtggggcagttggga

SEQ ID NO: 1548048 - DNA, 25 bp, Homo sapien
gaggcacagatagacgtggggcagt

SEQ ID NO: 1548049 - DNA, 25 bp, Homo sapien
tggaggcacagatagacgtggggca

SEQ ID NO: 1548050 - DNA, 25 bp, Homo sapien
ggcacagatagacgtggggcagttg

SEQ ID NO: 1548051 - DNA, 25 bp, Homo sapien
gactcatagaggatgcggtccatgg

SEQ ID NO: 1548052 - DNA, 25 bp, Homo sapien
ctgccgctgagactcatagaggatg

SEQ ID NO: 1548053 - DNA, 25 bp, Homo sapien
cggtccatggtgttaagcagtgtca

SEQ ID NO: 1548054 - DNA, 25 bp, Homo sapien
cagtgtcatgctcttgtagagcttc

SEQ ID NO: 1548055 - DNA, 25 bp, Homo sapien
ctgcctcccggtactggccaaacac

SEQ ID NO: 1548056 - DNA, 25 bp, Homo sapien
tgttgtccagggcggcggcactccc

SEQ ID NO: 1548057 - DNA, 25 bp, Homo sapien
ctcaccatagttggtcatgtagaag

SEQ ID NO: 1548058 - DNA, 25 bp, Homo sapien
tggccaaacaccaggtccgtgttgt

SEQ ID NO: 1548059 - DNA, 25 bp, Homo sapien
ctcctgctccccgaaggatacagca

SEQ ID NO: 1548060 - DNA, 25 bp, Homo sapien
tcctgctccccgaaggatacagcac

SEQ ID NO: 1548061 - DNA, 25 bp, Homo sapien
gctcctgctccccgaaggatacagc

SEQ ID NO: 1548062 - DNA, 25 bp, Homo sapien
cctcagtgctggacagtcattcttg

SEQ ID NO: 1548063 - DNA, 25 bp, Homo sapien
gcccagacacttctgctgaccctca

SEQ ID NO: 1548064 - DNA, 25 bp, Homo sapien
ctggacagtcattcttgcagaggcg

SEQ ID NO: 1548065 - DNA, 25 bp, Homo sapien
gcatgagtcccatttgcagctgccc

SEQ ID NO: 1548066 - DNA, 25 bp, Homo sapien
aggtccagtgggaactgctgctctt

SEQ ID NO: 1548067 - DNA, 25 bp, Homo sapien
tccaggtccagtgggaactgctgct

SEQ ID NO: 1548068 - DNA, 25 bp, Homo sapien
caggtccagtgggaactgctgctct

SEQ ID NO: 1548069 - DNA, 25 bp, Homo sapien
ctccaggtccagtgggaactgctgc

SEQ ID NO: 1548070 - DNA, 25 bp, Homo sapien
cactgggccatgaatagttccaggg

SEQ ID NO: 1548071 - DNA, 25 bp, Homo sapien
gcccaagtcactgatgttgccatag

SEQ ID NO: 1548072 - DNA, 25 bp, Homo sapien
ccttgcagccgtagtggacaggcat

SEQ ID NO: 1548073 - DNA, 25 bp, Homo sapien
tgacgaagtggcgttccttgcagcc

SEQ ID NO: 1548074 - DNA, 25 bp, Homo sapien
gcattggcccgcttggctgcgtacg

SEQ ID NO: 1548075 - DNA, 25 bp, Homo sapien
atgacgaccctgttggcattggccc

SEQ ID NO: 1548076 - DNA, 25 bp, Homo sapien
cccctcgccgaagtaacagatgacg

SEQ ID NO: 1548077 - DNA, 25 bp, Homo sapien
agttgaagccggcatgggcgtcccc

SEQ ID NO: 1548078 - DNA, 25 bp, Homo sapien
catcgccgcgatactgctcagaggt

SEQ ID NO: 1548079 - DNA, 25 bp, Homo sapien
tgccatcgccgcgatactgctcaga

SEQ ID NO: 1548080 - DNA, 25 bp, Homo sapien
ccattgttccggcagaagaagatga

SEQ ID NO: 1548081 - DNA, 25 bp, Homo sapien
tgggcgtggagatggcgtagccatt

SEQ ID NO: 1548082 - DNA, 25 bp, Homo sapien
ggattgacatgatgccatacccggg

SEQ ID NO: 1548083 - DNA, 25 bp, Homo sapien
ccatccacgcggattgacatgatgc

SEQ ID NO: 1548084 - DNA, 25 bp, Homo sapien
catcattaccatccacgcggattga

SEQ ID NO: 1548085 - DNA, 25 bp, Homo sapien
cgttgtatacggcaaacacatcatt

SEQ ID NO: 1548086 - DNA, 25 bp, Homo sapien
agcccgccgtcgggcctcctttgtg

SEQ ID NO: 1548087 - DNA, 25 bp, Homo sapien
ccacagcccgccgtcgggcctcctt

SEQ ID NO: 1548088 - DNA, 25 bp, Homo sapien
tgccacagcccgccgtcgggcctcc

SEQ ID NO: 1548089 - DNA, 25 bp, Homo sapien
acagcccgccgtcgggcctcctttg

SEQ ID NO: 1548090 - DNA, 25 bp, Homo sapien
ctgcacaggggcaaggggccccagg

SEQ ID NO: 1548091 - DNA, 25 bp, Homo sapien
ggggccccaggtcagtgtgggctcc

SEQ ID NO: 1548092 - DNA, 25 bp, Homo sapien
gcacaggggcaaggggccccaggtc

SEQ ID NO: 1548093 - DNA, 25 bp, Homo sapien
aaggggccccaggtcagtgtgggct

SEQ ID NO: 1548094 - DNA, 25 bp, Homo sapien
tacgctgaactgtcgtcactggtgc

SEQ ID NO: 1548095 - DNA, 25 bp, Homo sapien
taattgacctcatccaccgagcggt

SEQ ID NO: 1548096 - DNA, 25 bp, Homo sapien
gagatggggtggtcctgtttatccc

SEQ ID NO: 1548097 - DNA, 25 bp, Homo sapien
ggctcagcagatagtgccgcagccg

SEQ ID NO: 1548098 - DNA, 25 bp, Homo sapien
ttccgctcggcctgctcaaaggcct

SEQ ID NO: 1548099 - DNA, 25 bp, Homo sapien
ctgagaagagtaggttggggttggg

SEQ ID NO: 1548100 - DNA, 25 bp, Homo sapien
tgggcttccgctcggcctgctcaaa

SEQ ID NO: 1548101 - DNA, 25 bp, Homo sapien
ggcttccgctcggcctgctcaaagg

SEQ ID NO: 1548102 - DNA, 25 bp, Homo sapien
cagtgggtagtgctccccgtaggtc

SEQ ID NO: 1548103 - DNA, 25 bp, Homo sapien
agctgggcgggcatctcctgataca

SEQ ID NO: 1548104 - DNA, 25 bp, Homo sapien
tcacttatcgaagtgatccagtggg

SEQ ID NO: 1548105 - DNA, 25 bp, Homo sapien
gaagtgatccagtgggtagtgctcc

SEQ ID NO: 1548106 - DNA, 25 bp, Homo sapien
gagaaggcactgtaacaacaggtga

SEQ ID NO: 1548107 - DNA, 25 bp, Homo sapien
tgacggagcctcagcaactgctgca

SEQ ID NO: 1548108 - DNA, 25 bp, Homo sapien
cgccctggccgctgagtattttaga

SEQ ID NO: 1548109 - DNA, 25 bp, Homo sapien
atgcagtttattcgtgacctctgct

SEQ ID NO: 1548110 - DNA, 25 bp, Homo sapien
gaaatcagcttgctccaggtgaaca

SEQ ID NO: 1548111 - DNA, 25 bp, Homo sapien
ggacctaggcgggagcagcttttac

SEQ ID NO: 1548112 - DNA, 25 bp, Homo sapien
caggtgaacaggtgccagctaggac

SEQ ID NO: 1548113 - DNA, 25 bp, Homo sapien
catgggttaccttgtgcagctggac

SEQ ID NO: 1548114 - DNA, 25 bp, Homo sapien
aactgaagcacgtgccttgggaccc

SEQ ID NO: 1548115 - DNA, 25 bp, Homo sapien
tctggacgccgcagtgcatgtggct

SEQ ID NO: 1548116 - DNA, 25 bp, Homo sapien
cacaagtgcctgtggttgacggaga

SEQ ID NO: 1548117 - DNA, 25 bp, Homo sapien
tcagaagttgcgtaggagacacagc

SEQ ID NO: 1548118 - DNA, 25 bp, Homo sapien
acatgctgtccttacactggcttac

SEQ ID NO: 1548119 - DNA, 25 bp, Homo sapien
tgtcctgtacctccctacacacacg

SEQ ID NO: 1548120 - DNA, 25 bp, Homo sapien
cacgctgtccttatactggcttatc

SEQ ID NO: 1548121 - DNA, 25 bp, Homo sapien
cacacactgtcctgtaaggttgaaa

SEQ ID NO: 1548122 - DNA, 25 bp, Homo sapien
gactatcgcaggcacctccagtgtc

SEQ ID NO: 1548123 - DNA, 25 bp, Homo sapien
ccacagcagactatcgcaggcacct

SEQ ID NO: 1548124 - DNA, 25 bp, Homo sapien
agcagactatcgcaggcacctccag

SEQ ID NO: 1548125 - DNA, 25 bp, Homo sapien
ctatcgcaggcacctccagtgtctg

SEQ ID NO: 1548126 - DNA, 25 bp, Homo sapien
taggaaggggacgtcacagggatgc

SEQ ID NO: 1548127 - DNA, 25 bp, Homo sapien
agtaggaaggggacgtcacagggat

SEQ ID NO: 1548128 - DNA, 25 bp, Homo sapien
tgccagtaggaaggggacgtcacag

SEQ ID NO: 1548129 - DNA, 25 bp, Homo sapien
ccagtaggaaggggacgtcacaggg

SEQ ID NO: 1548130 - DNA, 25 bp, Homo sapien
agctggacatccactcggcgcaggt

SEQ ID NO: 1548131 - DNA, 25 bp, Homo sapien
cagctggacatccactcggcgcagg

SEQ ID NO: 1548132 - DNA, 25 bp, Homo sapien
taaataaccatgtgtgtccggtggc

SEQ ID NO: 1548133 - DNA, 25 bp, Homo sapien
cacctgaggctcatctgcgaaagca

SEQ ID NO: 1548134 - DNA, 25 bp, Homo sapien
tactggacagcgttgatctgaaatc

SEQ ID NO: 1548135 - DNA, 25 bp, Homo sapien
gaaagcacctgcaacttctctacaa

SEQ ID NO: 1548136 - DNA, 25 bp, Homo sapien
gacgccctctataaggacctgcttc

SEQ ID NO: 1548137 - DNA, 25 bp, Homo sapien
ctcaaaggacctcatagtcgggtcc

SEQ ID NO: 1548138 - DNA, 25 bp, Homo sapien
tcaacgacgccctctataaggacct

SEQ ID NO: 1548139 - DNA, 25 bp, Homo sapien
catagtcgggtcctgcccctcagtg

SEQ ID NO: 1548140 - DNA, 25 bp, Homo sapien
ttcacagggaaccaaatatgttacg

SEQ ID NO: 1548141 - DNA, 25 bp, Homo sapien
ggctgatggtgatcgagtaagcccc

SEQ ID NO: 1548142 - DNA, 25 bp, Homo sapien
tatgttacgactccaatttccttgg

SEQ ID NO: 1548143 - DNA, 25 bp, Homo sapien
caagcctagctagatgcctggaatt

SEQ ID NO: 1548144 - DNA, 25 bp, Homo sapien
gctagagctccggttcctgcctcct

SEQ ID NO: 1548145 - DNA, 25 bp, Homo sapien
cctccgatcggcgttgcagcctcct

SEQ ID NO: 1548146 - DNA, 25 bp, Homo sapien
ttcctgcctcctccgatcggcgttg

SEQ ID NO: 1548147 - DNA, 25 bp, Homo sapien
cacccagctactgctagagctccgg

SEQ ID NO: 1548148 - DNA, 25 bp, Homo sapien
ctcaacttctcgctggaggcgctca

SEQ ID NO: 1548149 - DNA, 25 bp, Homo sapien
cctcagcctgttcccgggcccacct

SEQ ID NO: 1548150 - DNA, 25 bp, Homo sapien
tcttgcgcttcaccgcctcgatggt

SEQ ID NO: 1548151 - DNA, 25 bp, Homo sapien
cagaacctggatcttgcgcttcacc

SEQ ID NO: 1548152 - DNA, 25 bp, Homo sapien
cacggtccagctcctcttcaaccag

SEQ ID NO: 1548153 - DNA, 25 bp, Homo sapien
ctgagcacggtccagctcctcttca

SEQ ID NO: 1548154 - DNA, 25 bp, Homo sapien
tgagcacggtccagctcctcttcaa

SEQ ID NO: 1548155 - DNA, 25 bp, Homo sapien
agcacggtccagctcctcttcaacc

SEQ ID NO: 1548156 - DNA, 25 bp, Homo sapien
ttttgcagggcagtagccaggtgct

SEQ ID NO: 1548157 - DNA, 25 bp, Homo sapien
tttgcagggcagtagccaggtgctc

SEQ ID NO: 1548158 - DNA, 25 bp, Homo sapien
cttttgcagggcagtagccaggtgc

SEQ ID NO: 1548159 - DNA, 25 bp, Homo sapien
cagcagctttttccgcttcttccag

SEQ ID NO: 1548160 - DNA, 25 bp, Homo sapien
tctcatcagcagctttttccgcttc

SEQ ID NO: 1548161 - DNA, 25 bp, Homo sapien
catcagcagctttttccgcttcttc

SEQ ID NO: 1548162 - DNA, 25 bp, Homo sapien
tcagcagctttttccgcttcttcca

SEQ ID NO: 1548163 - DNA, 25 bp, Homo sapien
tccatcttttcttcatcttttaagg

SEQ ID NO: 1548164 - DNA, 25 bp, Homo sapien
catcttttcttcatcttttaaggcc

SEQ ID NO: 1548165 - DNA, 25 bp, Homo sapien
gagttccatcttttcttcatctttt

SEQ ID NO: 1548166 - DNA, 25 bp, Homo sapien
gttccatcttttcttcatcttttaa

SEQ ID NO: 1548167 - DNA, 25 bp, Homo sapien
ccatctctcggcaaagggattctgc

SEQ ID NO: 1548168 - DNA, 25 bp, Homo sapien
catctctcggcaaagggattctgcc

SEQ ID NO: 1548169 - DNA, 25 bp, Homo sapien
gcatgggtctccgcctcctttattt

SEQ ID NO: 1548170 - DNA, 25 bp, Homo sapien
caagaaaagcaattaagtgctcacc

SEQ ID NO: 1548171 - DNA, 25 bp, Homo sapien
aagaaaagcaattaagtgctcacct

SEQ ID NO: 1548172 - DNA, 25 bp, Homo sapien
caagaatggaattaatcattcctgg

SEQ ID NO: 1548173 - DNA, 25 bp, Homo sapien
cattcagcagacaacacaagaatgg

SEQ ID NO: 1548174 - DNA, 25 bp, Homo sapien
cagcagacaacacaagaatggaatt

SEQ ID NO: 1548175 - DNA, 25 bp, Homo sapien
ttcagcagacaacacaagaatggaa

SEQ ID NO: 1548176 - DNA, 25 bp, Homo sapien
gatggcagtttgtgaaattaaaggt

SEQ ID NO: 1548177 - DNA, 25 bp, Homo sapien
cgctgtcccggcctctaagggccgc

SEQ ID NO: 1548178 - DNA, 25 bp, Homo sapien
aaagcggcttcgtgccggcggaggg

SEQ ID NO: 1548179 - DNA, 25 bp, Homo sapien
cgccacgtccctgcggcgcgcgcag

SEQ ID NO: 1548180 - DNA, 25 bp, Homo sapien
cgaggaagaggcagcgccggggcgc

SEQ ID NO: 1548181 - DNA, 25 bp, Homo sapien
gcgagcacgagaccggtcgcggtcg

SEQ ID NO: 1548182 - DNA, 25 bp, Homo sapien
agaccggtcgcggtcgcagtcgcat

SEQ ID NO: 1548183 - DNA, 25 bp, Homo sapien
cgggccgcggaagcgcgagcacgag

SEQ ID NO: 1548184 - DNA, 25 bp, Homo sapien
aggtctggaggctttctattttcat

SEQ ID NO: 1548185 - DNA, 25 bp, Homo sapien
ggtctggaggctttctattttcatc

SEQ ID NO: 1548186 - DNA, 25 bp, Homo sapien
ccaggtctggaggctttctattttc

SEQ ID NO: 1548187 - DNA, 25 bp, Homo sapien
caggtctggaggctttctattttca

SEQ ID NO: 1548188 - DNA, 25 bp, Homo sapien
aactgtgattgtggtttgaggactt

SEQ ID NO: 1548189 - DNA, 25 bp, Homo sapien
ttttgtcagttctgcgtgactggat

SEQ ID NO: 1548190 - DNA, 25 bp, Homo sapien
tcagttctgcgtgactggattgtcc

SEQ ID NO: 1548191 - DNA, 25 bp, Homo sapien
tgtcagttctgcgtgactggattgt

SEQ ID NO: 1548192 - DNA, 25 bp, Homo sapien
ttctgcgtgactggattgtccggga

SEQ ID NO: 1548193 - DNA, 25 bp, Homo sapien
gcacactcacgacgttctgcaagga

SEQ ID NO: 1548194 - DNA, 25 bp, Homo sapien
tgtgaagagtccttctggtgattgc

SEQ ID NO: 1548195 - DNA, 25 bp, Homo sapien
ctgagagcacactcacgacgttctg

SEQ ID NO: 1548196 - DNA, 25 bp, Homo sapien
cacgacgttctgcaaggattctctg

SEQ ID NO: 1548197 - DNA, 25 bp, Homo sapien
tagtcatgactacttggcctaagcc

SEQ ID NO: 1548198 - DNA, 25 bp, Homo sapien
tctgccttgcagaagattttcggtt

SEQ ID NO: 1548199 - DNA, 25 bp, Homo sapien
tgagttagccctttagaagtcactt

SEQ ID NO: 1548200 - DNA, 25 bp, Homo sapien
gtgactactgtttcctatactgtgg

SEQ ID NO: 1548201 - DNA, 25 bp, Homo sapien
ccaatgcaatctgaactatttgatc

SEQ ID NO: 1548202 - DNA, 25 bp, Homo sapien
tctgaactatttgatctaaaaacat

SEQ ID NO: 1548203 - DNA, 25 bp, Homo sapien
acaacagcagattaaaaaccaatgc

SEQ ID NO: 1548204 - DNA, 25 bp, Homo sapien
agcatatgttaatccaacaacagca

SEQ ID NO: 1548205 - DNA, 25 bp, Homo sapien
tgtctcccgtaggtctcagtccagg

SEQ ID NO: 1548206 - DNA, 25 bp, Homo sapien
gtctcccgtaggtctcagtccaggt

SEQ ID NO: 1548207 - DNA, 25 bp, Homo sapien
tctcccgtaggtctcagtccaggtt

SEQ ID NO: 1548208 - DNA, 25 bp, Homo sapien
ctcccgtaggtctcagtccaggttc

SEQ ID NO: 1548209 - DNA, 25 bp, Homo sapien
tatgatcggagctatttgatgaaag

SEQ ID NO: 1548210 - DNA, 25 bp, Homo sapien
catgacaaaatcagccgcagtatct

SEQ ID NO: 1548211 - DNA, 25 bp, Homo sapien
cacggatttttccattgcactcatc

SEQ ID NO: 1548212 - DNA, 25 bp, Homo sapien
aaaatttcttatctcacgcatgaca

SEQ ID NO: 1548213 - DNA, 25 bp, Homo sapien
ccagagtttttttaggcacaggata

SEQ ID NO: 1548214 - DNA, 25 bp, Homo sapien
cctgtcctcatctaggtccaggggc

SEQ ID NO: 1548215 - DNA, 25 bp, Homo sapien
gcctgtcctcatctaggtccagggg

SEQ ID NO: 1548216 - DNA, 25 bp, Homo sapien
tcccagagtttttttaggcacagga

SEQ ID NO: 1548217 - DNA, 25 bp, Homo sapien
ggtgcctgttggtggattcctctca

SEQ ID NO: 1548218 - DNA, 25 bp, Homo sapien
cagcgtcgagagtttttccctctca

SEQ ID NO: 1548219 - DNA, 25 bp, Homo sapien
gaagtcgggttattcagcggcccag

SEQ ID NO: 1548220 - DNA, 25 bp, Homo sapien
tatgtcaatccattggtcggtggcc

SEQ ID NO: 1548221 - DNA, 25 bp, Homo sapien
tgccatctataggtggctttgtggt

SEQ ID NO: 1548222 - DNA, 25 bp, Homo sapien
tcaattagacccattccttaaccca

SEQ ID NO: 1548223 - DNA, 25 bp, Homo sapien
gctttctgtatcccgcggttgttac

SEQ ID NO: 1548224 - DNA, 25 bp, Homo sapien
gcttctttagtactccgctgctcaa

SEQ ID NO: 1548225 - DNA, 25 bp, Homo sapien
gaatcaggtcacacgtggacgtgga

SEQ ID NO: 1548226 - DNA, 25 bp, Homo sapien
taggcaacttgtggtaactagctca

SEQ ID NO: 1548227 - DNA, 25 bp, Homo sapien
taggaacattgtcatcaggtcagca

SEQ ID NO: 1548228 - DNA, 25 bp, Homo sapien
gagtcatgatgaaaattacccagca

SEQ ID NO: 1548229 - DNA, 25 bp, Homo sapien
cagtgatctgtaataattctatttt

SEQ ID NO: 1548230 - DNA, 25 bp, Homo sapien
taaatccataacatacagtgatctg

SEQ ID NO: 1548231 - DNA, 25 bp, Homo sapien
tttgaagaactccaggaacagccat

SEQ ID NO: 1548232 - DNA, 25 bp, Homo sapien
ttgaagaactccaggaacagccatg

SEQ ID NO: 1548233 - DNA, 25 bp, Homo sapien
aaacactctgatacaaggccttaat

SEQ ID NO: 1548234 - DNA, 25 bp, Homo sapien
catgtatcagaatagcagggttttc

SEQ ID NO: 1548235 - DNA, 25 bp, Homo sapien
ccttaatttgggttcatgtatcaga

SEQ ID NO: 1548236 - DNA, 25 bp, Homo sapien
agttttgcagttctaaaaagttatg

SEQ ID NO: 1548237 - DNA, 25 bp, Homo sapien
aaaattgagggatgtgaacatgttg

SEQ ID NO: 1548238 - DNA, 25 bp, Homo sapien
tgcctggagcttcagactccagaca

SEQ ID NO: 1548239 - DNA, 25 bp, Homo sapien
ggagcttcagactccagacaggtgg

SEQ ID NO: 1548240 - DNA, 25 bp, Homo sapien
tgaacatgttggagaatgtcgtgcc

SEQ ID NO: 1548241 - DNA, 25 bp, Homo sapien
ctgctaccaccgaggaagaagcgca

SEQ ID NO: 1548242 - DNA, 25 bp, Homo sapien
tttaggtgcaagaaatcatagaggg

SEQ ID NO: 1548243 - DNA, 25 bp, Homo sapien
caacagaagttagggcacaagggac

SEQ ID NO: 1548244 - DNA, 25 bp, Homo sapien
gcaccagatgaaggtgtcaacagaa

SEQ ID NO: 1548245 - DNA, 25 bp, Homo sapien
ctgtgtcctgcaggactcagtccaa

SEQ ID NO: 1548246 - DNA, 25 bp, Homo sapien
ggagctattcgatccaaagaagtaa

SEQ ID NO: 1548247 - DNA, 25 bp, Homo sapien
cagggcaatagagggaaaccctctt

SEQ ID NO: 1548248 - DNA, 25 bp, Homo sapien
taagaattcaacgacaatggactgt

SEQ ID NO: 1548249 - DNA, 25 bp, Homo sapien
aatttgttatgttccctatgagagg

SEQ ID NO: 1548250 - DNA, 25 bp, Homo sapien
gtttagtacaatcatcaacagttgg

SEQ ID NO: 1548251 - DNA, 25 bp, Homo sapien
tcaagttaatcattgtcattatgct

SEQ ID NO: 1548252 - DNA, 25 bp, Homo sapien
ttttgtttagtacaatcatcaacag

SEQ ID NO: 1548253 - DNA, 25 bp, Homo sapien
ttctcatcgcactcgtcattaattg

SEQ ID NO: 1548254 - DNA, 25 bp, Homo sapien
ccgcattggtcgagctggatttgag

SEQ ID NO: 1548255 - DNA, 25 bp, Homo sapien
tacgtgattttttccattgaggaga

SEQ ID NO: 1548256 - DNA, 25 bp, Homo sapien
ttccgttgagaagagatacttgtac

SEQ ID NO: 1548257 - DNA, 25 bp, Homo sapien
attcacgcatccacaaactgggttc

SEQ ID NO: 1548258 - DNA, 25 bp, Homo sapien
aggtctagagatgaaacgagtcccg

SEQ ID NO: 1548259 - DNA, 25 bp, Homo sapien
tgctcagtccatcatacgaaataaa

SEQ ID NO: 1548260 - DNA, 25 bp, Homo sapien
gagtcccgatgtaaattgccccatg

SEQ ID NO: 1548261 - DNA, 25 bp, Homo sapien
tgccccatgggcattgctgagatca

SEQ ID NO: 1548262 - DNA, 25 bp, Homo sapien
atacaaagttcactgggcattgtgg

SEQ ID NO: 1548263 - DNA, 25 bp, Homo sapien
caacatgtgtagcaaatcaccctgg

SEQ ID NO: 1548264 - DNA, 25 bp, Homo sapien
aaatcaccctggaaacaatcatggc

SEQ ID NO: 1548265 - DNA, 25 bp, Homo sapien
caatcatggctgaacgtggtagccc

SEQ ID NO: 1548266 - DNA, 25 bp, Homo sapien
tttcatactgttcctggtttgattt

SEQ ID NO: 1548267 - DNA, 25 bp, Homo sapien
tcatactgttcctggtttgattttt

SEQ ID NO: 1548268 - DNA, 25 bp, Homo sapien
ttcatactgttcctggtttgatttt

SEQ ID NO: 1548269 - DNA, 25 bp, Homo sapien
tcagggaacaccgtcttcaaggagg

SEQ ID NO: 1548270 - DNA, 25 bp, Homo sapien
gggaacaccgtcttcaaggaggcca

SEQ ID NO: 1548271 - DNA, 25 bp, Homo sapien
taggtactcagggaacaccgtcttc

SEQ ID NO: 1548272 - DNA, 25 bp, Homo sapien
tactcagggaacaccgtcttcaagg

SEQ ID NO: 1548273 - DNA, 25 bp, Homo sapien
cttatatcctgtgaacacagtccct

SEQ ID NO: 1548274 - DNA, 25 bp, Homo sapien
tatatcctgtgaacacagtccctgt

SEQ ID NO: 1548275 - DNA, 25 bp, Homo sapien
acagtccctgtacagggttactgat

SEQ ID NO: 1548276 - DNA, 25 bp, Homo sapien
tatcctgtgaacacagtccctgtac

SEQ ID NO: 1548277 - DNA, 25 bp, Homo sapien
ttaaagaattgctttaagttggata

SEQ ID NO: 1548278 - DNA, 25 bp, Homo sapien
taaagaattgctttaagttggataa

SEQ ID NO: 1548279 - DNA, 25 bp, Homo sapien
cctagtaaagaagcctaagagtctc

SEQ ID NO: 1548280 - DNA, 25 bp, Homo sapien
gagatggagcaaacagttgtggtgg

SEQ ID NO: 1548281 - DNA, 25 bp, Homo sapien
ttagagctcagctgtcctagtaaag

SEQ ID NO: 1548282 - DNA, 25 bp, Homo sapien
ctctaaagctcttatgagaagatgg

SEQ ID NO: 1548283 - DNA, 25 bp, Homo sapien
ttatttgtagatactgggttggata

SEQ ID NO: 1548284 - DNA, 25 bp, Homo sapien
tatttgtagatactgggttggatac

SEQ ID NO: 1548285 - DNA, 25 bp, Homo sapien
atgtttcatgaaaggagtagatgag

SEQ ID NO: 1548286 - DNA, 25 bp, Homo sapien
caatgtttcatgaaaggagtagatg

SEQ ID NO: 1548287 - DNA, 25 bp, Homo sapien
ttcatgaaaggagtagatgagtgaa

SEQ ID NO: 1548288 - DNA, 25 bp, Homo sapien
tgaaaggagtagatgagtgaagcat

SEQ ID NO: 1548289 - DNA, 25 bp, Homo sapien
tttcaaagatctagatgccctgcct

SEQ ID NO: 1548290 - DNA, 25 bp, Homo sapien
tgagtgcaacggctgctgggtcact

SEQ ID NO: 1548291 - DNA, 25 bp, Homo sapien
aaaagtgggctgattgttgctgtgc

SEQ ID NO: 1548292 - DNA, 25 bp, Homo sapien
gagagacacgtcctttgtgagtgca

SEQ ID NO: 1548293 - DNA, 25 bp, Homo sapien
cattattggttgatagggctactca

SEQ ID NO: 1548294 - DNA, 25 bp, Homo sapien
tgcagcatcacatccagcctctttt

SEQ ID NO: 1548295 - DNA, 25 bp, Homo sapien
tgagatgcaacgttgttcacaggcc

SEQ ID NO: 1548296 - DNA, 25 bp, Homo sapien
tttcctgcctgacccagttctggtt

SEQ ID NO: 1548297 - DNA, 25 bp, Homo sapien
taggggatcctctctgaccgcctca

SEQ ID NO: 1548298 - DNA, 25 bp, Homo sapien
tcttctgcatgtgcgaccttgcgca

SEQ ID NO: 1548299 - DNA, 25 bp, Homo sapien
cacgcggaattttccgtccttgcaa

SEQ ID NO: 1548300 - DNA, 25 bp, Homo sapien
tcaaagtccgcctttcacgcggaat

SEQ ID NO: 1548301 - DNA, 25 bp, Homo sapien
ccgagggtgttagcgccaagtgatc

SEQ ID NO: 1548302 - DNA, 25 bp, Homo sapien
caactgtgtcattccgacggagcgc

SEQ ID NO: 1548303 - DNA, 25 bp, Homo sapien
tgtccagcgctctgaatatccaagt

SEQ ID NO: 1548304 - DNA, 25 bp, Homo sapien
gaaaccgtgactctctcaagggagc

SEQ ID NO: 1548305 - DNA, 25 bp, Homo sapien
tcggtccggttattcctcaccgctc

SEQ ID NO: 1548306 - DNA, 25 bp, Homo sapien
gctcggctccagtgggcgcgcgggc

SEQ ID NO: 1548307 - DNA, 25 bp, Homo sapien
attcctcaccgctcggctccagtgg

SEQ ID NO: 1548308 - DNA, 25 bp, Homo sapien
tcagttcctgcgctgcagtccctcc

SEQ ID NO: 1548309 - DNA, 25 bp, Homo sapien
cctgcaccactatcaggtgctgagc

SEQ ID NO: 1548310 - DNA, 25 bp, Homo sapien
gccccatctgccttcaccagattga

SEQ ID NO: 1548311 - DNA, 25 bp, Homo sapien
tgcaccactatcaggtgctgagcaa

SEQ ID NO: 1548312 - DNA, 25 bp, Homo sapien
caccactatcaggtgctgagcaact

SEQ ID NO: 1548313 - DNA, 25 bp, Homo sapien
gtaagaggccccgagtattccatgt

SEQ ID NO: 1548314 - DNA, 25 bp, Homo sapien
tggctccccaactgaggattcctct

SEQ ID NO: 1548315 - DNA, 25 bp, Homo sapien
gctgctgtggactggaggaaggtaa

SEQ ID NO: 1548316 - DNA, 25 bp, Homo sapien
catgttcttactggctccccaactg

SEQ ID NO: 1548317 - DNA, 25 bp, Homo sapien
ctccaggaacgctctagacagggtt

SEQ ID NO: 1548318 - DNA, 25 bp, Homo sapien
ggaacgctctagacagggttactgt

SEQ ID NO: 1548319 - DNA, 25 bp, Homo sapien
gctctagacagggttactgtgactg

SEQ ID NO: 1548320 - DNA, 25 bp, Homo sapien
agacagggttactgtgactgttgtc

SEQ ID NO: 1548321 - DNA, 25 bp, Homo sapien
tgtggggacaagctgaggggggccc

SEQ ID NO: 1548322 - DNA, 25 bp, Homo sapien
cctgccaggggatgcattctctgtg

SEQ ID NO: 1548323 - DNA, 25 bp, Homo sapien
ctgtgagcaagagcccctgccaggg

SEQ ID NO: 1548324 - DNA, 25 bp, Homo sapien
ggatgcattctctgtggggacaagc

SEQ ID NO: 1548325 - DNA, 25 bp, Homo sapien
ctgatgcaataaagagccaggcagt

SEQ ID NO: 1548326 - DNA, 25 bp, Homo sapien
gatgcaataaagagccaggcagtgg

SEQ ID NO: 1548327 - DNA, 25 bp, Homo sapien
tgatgcaataaagagccaggcagtg

SEQ ID NO: 1548328 - DNA, 25 bp, Homo sapien
tagtatcccgtgtcctctagggtga

SEQ ID NO: 1548329 - DNA, 25 bp, Homo sapien
tatacacggagatggtgagatgcct

SEQ ID NO: 1548330 - DNA, 25 bp, Homo sapien
ccctggagtcctaacgtgagtgtct

SEQ ID NO: 1548331 - DNA, 25 bp, Homo sapien
tgcgattagctggttgggctccacc

SEQ ID NO: 1548332 - DNA, 25 bp, Homo sapien
cggtggtggccacgaccagattctg

SEQ ID NO: 1548333 - DNA, 25 bp, Homo sapien
gtccacagatgccccacggtggtgg

SEQ ID NO: 1548334 - DNA, 25 bp, Homo sapien
cacggtggtggccacgaccagattc

SEQ ID NO: 1548335 - DNA, 25 bp, Homo sapien
agatgccccacggtggtggccacga

SEQ ID NO: 1548336 - DNA, 25 bp, Homo sapien
gagatctcagagtcaaatttagaac

SEQ ID NO: 1548337 - DNA, 25 bp, Homo sapien
gctgcatcctcagagatctcagagt

SEQ ID NO: 1548338 - DNA, 25 bp, Homo sapien
tcagagatctcagagtcaaatttag

SEQ ID NO: 1548339 - DNA, 25 bp, Homo sapien
tctcagagtcaaatttagaacattc

SEQ ID NO: 1548340 - DNA, 25 bp, Homo sapien
tgaccaacagaaagtgtcttggggc

SEQ ID NO: 1548341 - DNA, 25 bp, Homo sapien
ccaacagaaagtgtcttggggccat

SEQ ID NO: 1548342 - DNA, 25 bp, Homo sapien
ctgtggatagagtgaccaacagaaa

SEQ ID NO: 1548343 - DNA, 25 bp, Homo sapien
tgtggatagagtgaccaacagaaag

SEQ ID NO: 1548344 - DNA, 25 bp, Homo sapien
cttctctgtgactgtggtgctgctg

SEQ ID NO: 1548345 - DNA, 25 bp, Homo sapien
tcaggaccacggagcccttctctgt

SEQ ID NO: 1548346 - DNA, 25 bp, Homo sapien
ggagcccttctctgtgactgtggtg

SEQ ID NO: 1548347 - DNA, 25 bp, Homo sapien
ttggatggagggctgagccactgac

SEQ ID NO: 1548348 - DNA, 25 bp, Homo sapien
tatggttaaaccaggacagcttcat

SEQ ID NO: 1548349 - DNA, 25 bp, Homo sapien
tgcagacgctggttgttgaaaatcc

SEQ ID NO: 1548350 - DNA, 25 bp, Homo sapien
gcttcatcctcttcgtgacctgcag

SEQ ID NO: 1548351 - DNA, 25 bp, Homo sapien
gagctgactgggttggagacctcac

SEQ ID NO: 1548352 - DNA, 25 bp, Homo sapien
ccccgatcaggatgcctagagtgtt

SEQ ID NO: 1548353 - DNA, 25 bp, Homo sapien
cgatcaggatgcctagagtgttgtc

SEQ ID NO: 1548354 - DNA, 25 bp, Homo sapien
gaccccgatcaggatgcctagagtg

SEQ ID NO: 1548355 - DNA, 25 bp, Homo sapien
caggaccccgatcaggatgcctaga

SEQ ID NO: 1548356 - DNA, 25 bp, Homo sapien
tgccagtttttcggaggagcaggaa

SEQ ID NO: 1548357 - DNA, 25 bp, Homo sapien
agtgcagccaccagaagactcccaa

SEQ ID NO: 1548358 - DNA, 25 bp, Homo sapien
gagcaggaaacacacaagtgcagcc

SEQ ID NO: 1548359 - DNA, 25 bp, Homo sapien
ctgccagtttttcggaggagcagga

SEQ ID NO: 1548360 - DNA, 25 bp, Homo sapien
gctccctgaagtcactctgatcgct

SEQ ID NO: 1548361 - DNA, 25 bp, Homo sapien
ccctgaagtcactctgatcgctggc

SEQ ID NO: 1548362 - DNA, 25 bp, Homo sapien
cctgaagtcactctgatcgctggcc

SEQ ID NO: 1548363 - DNA, 25 bp, Homo sapien
tccctgaagtcactctgatcgctgg

SEQ ID NO: 1548364 - DNA, 25 bp, Homo sapien
agatggagctgtcagagggtccatg

SEQ ID NO: 1548365 - DNA, 25 bp, Homo sapien
agctgccctggtgctgggtagggga

SEQ ID NO: 1548366 - DNA, 25 bp, Homo sapien
catagatgagagcagctgccctggt

SEQ ID NO: 1548367 - DNA, 25 bp, Homo sapien
ctcatagatgagagcagctgccctg

SEQ ID NO: 1548368 - DNA, 25 bp, Homo sapien
ctgccctggtgctgggtaggggaat

SEQ ID NO: 1548369 - DNA, 25 bp, Homo sapien
agagaagaggtcttgacccctgagg

SEQ ID NO: 1548370 - DNA, 25 bp, Homo sapien
gagaagaggtcttgacccctgaggc

SEQ ID NO: 1548371 - DNA, 25 bp, Homo sapien
cttcctgtggtgatgggaagccttc

SEQ ID NO: 1548372 - DNA, 25 bp, Homo sapien
ctgtggtgatgggaagccttcgcct

SEQ ID NO: 1548373 - DNA, 25 bp, Homo sapien
gggcagtctgttgaggtctctatat

SEQ ID NO: 1548374 - DNA, 25 bp, Homo sapien
tctatatattcagcagggaccccca

SEQ ID NO: 1548375 - DNA, 25 bp, Homo sapien
ggatgttaccactgtttgcagttgg

SEQ ID NO: 1548376 - DNA, 25 bp, Homo sapien
tattgtaaatcccaggaatctaatc

SEQ ID NO: 1548377 - DNA, 25 bp, Homo sapien
ctaatcatgcgtaaaataaggtgtc

SEQ ID NO: 1548378 - DNA, 25 bp, Homo sapien
ttatctcacttgtcgttttacgcca

SEQ ID NO: 1548379 - DNA, 25 bp, Homo sapien
gattgtgggtgagtggaagaatctc

SEQ ID NO: 1548380 - DNA, 25 bp, Homo sapien
attgtgggtgagtggaagaatctcc

SEQ ID NO: 1548381 - DNA, 25 bp, Homo sapien
ttgtgggtgagtggaagaatctcct

SEQ ID NO: 1548382 - DNA, 25 bp, Homo sapien
tgtgtacgtgaaactggccagttac

SEQ ID NO: 1548383 - DNA, 25 bp, Homo sapien
gacatcactgtgtacgtgaaactgg

SEQ ID NO: 1548384 - DNA, 25 bp, Homo sapien
tcactgtgtacgtgaaactggccag

SEQ ID NO: 1548385 - DNA, 25 bp, Homo sapien
catgagacatcactgtgtacgtgaa

SEQ ID NO: 1548386 - DNA, 25 bp, Homo sapien
tcatgtgaaggacgaggctttgccc

SEQ ID NO: 1548387 - DNA, 25 bp, Homo sapien
aaggacgaggctttgcccttgccca

SEQ ID NO: 1548388 - DNA, 25 bp, Homo sapien
cataccaagtctcatgtgaaggacg

SEQ ID NO: 1548389 - DNA, 25 bp, Homo sapien
ccaagtctcatgtgaaggacgaggc

SEQ ID NO: 1548390 - DNA, 25 bp, Homo sapien
aaggaaccgcctgaatacaccgtct

SEQ ID NO: 1548391 - DNA, 25 bp, Homo sapien
tttgcctccaacagagtgttccctg

SEQ ID NO: 1548392 - DNA, 25 bp, Homo sapien
gagtagccacttcactcaaacctgg

SEQ ID NO: 1548393 - DNA, 25 bp, Homo sapien
cacgatcacctgacctaaaggttgg

SEQ ID NO: 1548394 - DNA, 25 bp, Homo sapien
ctgtgtttcccgatgtgttggtgtc

SEQ ID NO: 1548395 - DNA, 25 bp, Homo sapien
tgtgtttcccgatgtgttggtgtca

SEQ ID NO: 1548396 - DNA, 25 bp, Homo sapien
tggggagaataccacgcctcagtgg

SEQ ID NO: 1548397 - DNA, 25 bp, Homo sapien
ctgtttcacaatcactggttcagct

SEQ ID NO: 1548398 - DNA, 25 bp, Homo sapien
gaatgatgctgtttcacaatcactg

SEQ ID NO: 1548399 - DNA, 25 bp, Homo sapien
tcttagggtttcacagctcggtggg

SEQ ID NO: 1548400 - DNA, 25 bp, Homo sapien
tgacaaaacgggaagcagcattaat

SEQ ID NO: 1548401 - DNA, 25 bp, Homo sapien
tgggtggaggcctcacactgatact

SEQ ID NO: 1548402 - DNA, 25 bp, Homo sapien
gggtaagccctactgccaataaaga

SEQ ID NO: 1548403 - DNA, 25 bp, Homo sapien
cctgtggacaatcagtggaggtgct

SEQ ID NO: 1548404 - DNA, 25 bp, Homo sapien
ttcttcttggtgacatgcttagttg

SEQ ID NO: 1548405 - DNA, 25 bp, Homo sapien
caccttcttcttggtgacatgctta

SEQ ID NO: 1548406 - DNA, 25 bp, Homo sapien
ccttcttcttggtgacatgcttagt

SEQ ID NO: 1548407 - DNA, 25 bp, Homo sapien
tccaccttcttcttggtgacatgct

SEQ ID NO: 1548408 - DNA, 25 bp, Homo sapien
ccaacaatcacaatgaaagttctaa

SEQ ID NO: 1548409 - DNA, 25 bp, Homo sapien
agctgcaccaacaatcacaatgaaa

SEQ ID NO: 1548410 - DNA, 25 bp, Homo sapien
tcctccttcggttgctgccactaat

SEQ ID NO: 1548411 - DNA, 25 bp, Homo sapien
tctttcctccttcggttgctgccac

SEQ ID NO: 1548412 - DNA, 25 bp, Homo sapien
ctgacctgggactaaagtgcagacc

SEQ ID NO: 1548413 - DNA, 25 bp, Homo sapien
tcttgccctcagatggaaacactga

SEQ ID NO: 1548414 - DNA, 25 bp, Homo sapien
ctccaaccgggaaacttccatacag

SEQ ID NO: 1548415 - DNA, 25 bp, Homo sapien
ggcctgagccatccccagagatcag

SEQ ID NO: 1548416 - DNA, 25 bp, Homo sapien
cagaccagagcacacagtagtgagg

SEQ ID NO: 1548417 - DNA, 25 bp, Homo sapien
gaccaatactaatggcctggcagct

SEQ ID NO: 1548418 - DNA, 25 bp, Homo sapien
ggtcttgctttcttagaccaatact

SEQ ID NO: 1548419 - DNA, 25 bp, Homo sapien
tcagctgcccgtcctggtcttgctt

SEQ ID NO: 1548420 - DNA, 25 bp, Homo sapien
tctggctgttcctgctgtcgggtaa

SEQ ID NO: 1548421 - DNA, 25 bp, Homo sapien
gaatgttgtacgtcatgaatattgc

SEQ ID NO: 1548422 - DNA, 25 bp, Homo sapien
tattgctcaagattccaaatccaga

SEQ ID NO: 1548423 - DNA, 25 bp, Homo sapien
cagaaacatatgaagagggcgagtc

SEQ ID NO: 1548424 - DNA, 25 bp, Homo sapien
cctaaaaacatgagagtccaggctg

SEQ ID NO: 1548425 - DNA, 25 bp, Homo sapien
aatggagccagtcatgctaaatgcc

SEQ ID NO: 1548426 - DNA, 25 bp, Homo sapien
gctaaatgccatatactcacactga

SEQ ID NO: 1548427 - DNA, 25 bp, Homo sapien
aactctcatttaggtgacagcctgg

SEQ ID NO: 1548428 - DNA, 25 bp, Homo sapien
caaatagggagattcagccaccggg

SEQ ID NO: 1548429 - DNA, 25 bp, Homo sapien
ccggctgtatgacgctgtggacaca

SEQ ID NO: 1548430 - DNA, 25 bp, Homo sapien
tcaccggctgtatgacgctgtggac

SEQ ID NO: 1548431 - DNA, 25 bp, Homo sapien
atagggagattcagccaccgggact

SEQ ID NO: 1548432 - DNA, 25 bp, Homo sapien
ttgtgttcttttgcctaattcatga

SEQ ID NO: 1548433 - DNA, 25 bp, Homo sapien
ttgcctaattcatgagctacaagga

SEQ ID NO: 1548434 - DNA, 25 bp, Homo sapien
gggttctctcggtcatcaatacgtc

SEQ ID NO: 1548435 - DNA, 25 bp, Homo sapien
caatacgtccctttttgtcacctct

SEQ ID NO: 1548436 - DNA, 25 bp, Homo sapien
caccaagtcacaacttctgcgggca

SEQ ID NO: 1548437 - DNA, 25 bp, Homo sapien
ttgcagtccagtggccgtccaccaa

SEQ ID NO: 1548438 - DNA, 25 bp, Homo sapien
aagtcacaacttctgcgggcagctc

SEQ ID NO: 1548439 - DNA, 25 bp, Homo sapien
gtggccgtccaccaagtcacaactt

SEQ ID NO: 1548440 - DNA, 25 bp, Homo sapien
agcgtccgctgacgtccttcagctg

SEQ ID NO: 1548441 - DNA, 25 bp, Homo sapien
gctgacgtccttcagctggactaga

SEQ ID NO: 1548442 - DNA, 25 bp, Homo sapien
cagctggactagagtcccccagggt

SEQ ID NO: 1548443 - DNA, 25 bp, Homo sapien
tccgctgacgtccttcagctggact

SEQ ID NO: 1548444 - DNA, 25 bp, Homo sapien
aatgggtcctgggttatcagggtat

SEQ ID NO: 1548445 - DNA, 25 bp, Homo sapien
tattgggtggatgcagccgggccag

SEQ ID NO: 1548446 - DNA, 25 bp, Homo sapien
gaagtaatgggtcctgggttatcag

SEQ ID NO: 1548447 - DNA, 25 bp, Homo sapien
tatcagggtattgggtggatgcagc

SEQ ID NO: 1548448 - DNA, 25 bp, Homo sapien
tggtcggcttccggatgttccttca

SEQ ID NO: 1548449 - DNA, 25 bp, Homo sapien
tgtggtcggcttccggatgttcctt

SEQ ID NO: 1548450 - DNA, 25 bp, Homo sapien
atgtggtcggcttccggatgttcct

SEQ ID NO: 1548451 - DNA, 25 bp, Homo sapien
gtcggcttccggatgttccttcaag

SEQ ID NO: 1548452 - DNA, 25 bp, Homo sapien
ggtgtgatccctgagcccgcgctag

SEQ ID NO: 1548453 - DNA, 25 bp, Homo sapien
tcctcacaatgcctaatggtcagat

SEQ ID NO: 1548454 - DNA, 25 bp, Homo sapien
ctcctcacaatgcctaatggtcaga

SEQ ID NO: 1548455 - DNA, 25 bp, Homo sapien
tgagcccgcgctagagtcctcctca

SEQ ID NO: 1548456 - DNA, 25 bp, Homo sapien
gttctgagacttgagccctgagccc

SEQ ID NO: 1548457 - DNA, 25 bp, Homo sapien
ccatttgttctgagacttgagccct

SEQ ID NO: 1548458 - DNA, 25 bp, Homo sapien
ccctggatcattgccctgtcaccat

SEQ ID NO: 1548459 - DNA, 25 bp, Homo sapien
gcagctgcccctggatcattgccct

SEQ ID NO: 1548460 - DNA, 25 bp, Homo sapien
gagatgtcttcacacttagtcccat

SEQ ID NO: 1548461 - DNA, 25 bp, Homo sapien
tcttcacacttagtcccatcctggg

SEQ ID NO: 1548462 - DNA, 25 bp, Homo sapien
ctgctgagatgtcttcacacttagt

SEQ ID NO: 1548463 - DNA, 25 bp, Homo sapien
acacttagtcccatcctgggctgca

SEQ ID NO: 1548464 - DNA, 25 bp, Homo sapien
ggcggccgacaagcctcaggtgggc

SEQ ID NO: 1548465 - DNA, 25 bp, Homo sapien
tcaagtgggcggccgacaagcctca

SEQ ID NO: 1548466 - DNA, 25 bp, Homo sapien
tgggcggccgataggctgcagggag

SEQ ID NO: 1548467 - DNA, 25 bp, Homo sapien
cagagtccgtgtgaggagctcggag

SEQ ID NO: 1548468 - DNA, 25 bp, Homo sapien
aacagggtcctcataggacccagaa

SEQ ID NO: 1548469 - DNA, 25 bp, Homo sapien
ccaggagggagtctggagttgcaca

SEQ ID NO: 1548470 - DNA, 25 bp, Homo sapien
agggtcctcataggacccagaaagg

SEQ ID NO: 1548471 - DNA, 25 bp, Homo sapien
caggagggagtctggagttgcacag

SEQ ID NO: 1548472 - DNA, 25 bp, Homo sapien
ccaggaacgttttgtcaaggctgct

SEQ ID NO: 1548473 - DNA, 25 bp, Homo sapien
tccaggaacgttttgtcaaggctgc

SEQ ID NO: 1548474 - DNA, 25 bp, Homo sapien
tgagttccaggaacgttttgtcaag

SEQ ID NO: 1548475 - DNA, 25 bp, Homo sapien
ttccaggaacgttttgtcaaggctg

SEQ ID NO: 1548476 - DNA, 25 bp, Homo sapien
ctgccaggggatgcaccatctgtgg

SEQ ID NO: 1548477 - DNA, 25 bp, Homo sapien
ctctgccaggggatgcaccatctgt

SEQ ID NO: 1548478 - DNA, 25 bp, Homo sapien
tggggaggggccgagggagactcca

SEQ ID NO: 1548479 - DNA, 25 bp, Homo sapien
aggagcctctgccaggggatgcacc

SEQ ID NO: 1548480 - DNA, 25 bp, Homo sapien
cagagagcatcggtcaatattggga

SEQ ID NO: 1548481 - DNA, 25 bp, Homo sapien
gagagcagagagcatcggtcaatat

SEQ ID NO: 1548482 - DNA, 25 bp, Homo sapien
gagcagagagcatcggtcaatattg

SEQ ID NO: 1548483 - DNA, 25 bp, Homo sapien
agagagcagagagcatcggtcaata

SEQ ID NO: 1548484 - DNA, 25 bp, Homo sapien
tatacccggaactggccagttgctt

SEQ ID NO: 1548485 - DNA, 25 bp, Homo sapien
ggtatacccggaactggccagttgc

SEQ ID NO: 1548486 - DNA, 25 bp, Homo sapien
gtatacccggaactggccagttgct

SEQ ID NO: 1548487 - DNA, 25 bp, Homo sapien
cagaccagaatctccgcttctgagc

SEQ ID NO: 1548488 - DNA, 25 bp, Homo sapien
ccagaccagaatctccgcttctgag

SEQ ID NO: 1548489 - DNA, 25 bp, Homo sapien
ccagaatctccgcttctgagctgtg

SEQ ID NO: 1548490 - DNA, 25 bp, Homo sapien
gaatctccgcttctgagctgtggat

SEQ ID NO: 1548491 - DNA, 25 bp, Homo sapien
agcttgctgtgtcatttcttgtgac

SEQ ID NO: 1548492 - DNA, 25 bp, Homo sapien
tagcttgctgtgtcatttcttgtga

SEQ ID NO: 1548493 - DNA, 25 bp, Homo sapien
tcaggatgactgaatcactgcgcct

SEQ ID NO: 1548494 - DNA, 25 bp, Homo sapien
gactgaatcactgcgcctggcactc

SEQ ID NO: 1548495 - DNA, 25 bp, Homo sapien
gacattcaggatgactgaatcactg

SEQ ID NO: 1548496 - DNA, 25 bp, Homo sapien
gaggacattcaggatgactgaatca

SEQ ID NO: 1548497 - DNA, 25 bp, Homo sapien
tcaagacttggtctgcccaggtttt

SEQ ID NO: 1548498 - DNA, 25 bp, Homo sapien
agggtctgtgtacttgaacctgaga

SEQ ID NO: 1548499 - DNA, 25 bp, Homo sapien
caagacttggtctgcccaggttttt

SEQ ID NO: 1548500 - DNA, 25 bp, Homo sapien
tctggatgtccagggttgagggtct

SEQ ID NO: 1548501 - DNA, 25 bp, Homo sapien
aacaaaataaagccacaggtgatat

SEQ ID NO: 1548502 - DNA, 25 bp, Homo sapien
ataaagccacaggtgatattgtcag

SEQ ID NO: 1548503 - DNA, 25 bp, Homo sapien
gtgatattgtcagagggaagtggaa

SEQ ID NO: 1548504 - DNA, 25 bp, Homo sapien
caaaataaagccacaggtgatattg

SEQ ID NO: 1548505 - DNA, 25 bp, Homo sapien
gtaagatgtgtttagaggggaaatg

SEQ ID NO: 1548506 - DNA, 25 bp, Homo sapien
tgtaagatgtgtttagaggggaaat

SEQ ID NO: 1548507 - DNA, 25 bp, Homo sapien
ctgtaagatgtgtttagaggggaaa

SEQ ID NO: 1548508 - DNA, 25 bp, Homo sapien
cgtggcaggagaggttcagattttc

SEQ ID NO: 1548509 - DNA, 25 bp, Homo sapien
ctgcgtggcaggagaggttcagatt

SEQ ID NO: 1548510 - DNA, 25 bp, Homo sapien
tgcgtggcaggagaggttcagattt

SEQ ID NO: 1548511 - DNA, 25 bp, Homo sapien
gcgtggcaggagaggttcagatttt

SEQ ID NO: 1548512 - DNA, 25 bp, Homo sapien
tcctattgaggccagtgtctgagtt

SEQ ID NO: 1548513 - DNA, 25 bp, Homo sapien
catagactgtgatcgtcgtgactgt

SEQ ID NO: 1548514 - DNA, 25 bp, Homo sapien
ctgagttatgggcttggcacgtata

SEQ ID NO: 1548515 - DNA, 25 bp, Homo sapien
tcttgggtggattgctggaaagtcc

SEQ ID NO: 1548516 - DNA, 25 bp, Homo sapien
caggttaaggctacagcatcctcat

SEQ ID NO: 1548517 - DNA, 25 bp, Homo sapien
tgttctggattccacactcataggg

SEQ ID NO: 1548518 - DNA, 25 bp, Homo sapien
cgctgtggtcaacacttaatttgtt

SEQ ID NO: 1548519 - DNA, 25 bp, Homo sapien
caggatgactgggtcgctgtggtca

SEQ ID NO: 1548520 - DNA, 25 bp, Homo sapien
cacccctggacggtaataggtgtat

SEQ ID NO: 1548521 - DNA, 25 bp, Homo sapien
ccctggacggtaataggtgtatgag

SEQ ID NO: 1548522 - DNA, 25 bp, Homo sapien
tgaggttcacccctggacggtaata

SEQ ID NO: 1548523 - DNA, 25 bp, Homo sapien
gagaggctgaggttcacccctggac

SEQ ID NO: 1548524 - DNA, 25 bp, Homo sapien
cactggctgagttattggcctggca

SEQ ID NO: 1548525 - DNA, 25 bp, Homo sapien
tcttctcagtgatgttggagataaa

SEQ ID NO: 1548526 - DNA, 25 bp, Homo sapien
ttgtcttgactgtagtcctgctgtg

SEQ ID NO: 1548527 - DNA, 25 bp, Homo sapien
tatagagtccgctgttcttctcagt

SEQ ID NO: 1548528 - DNA, 25 bp, Homo sapien
tacataggctcttgcgtcatttctt

SEQ ID NO: 1548529 - DNA, 25 bp, Homo sapien
taggctcttgcgtcatttcttgtga

SEQ ID NO: 1548530 - DNA, 25 bp, Homo sapien
catacataggctcttgcgtcatttc

SEQ ID NO: 1548531 - DNA, 25 bp, Homo sapien
acataggctcttgcgtcatttcttg

SEQ ID NO: 1548532 - DNA, 25 bp, Homo sapien
gactgggtcactgcggtttgcactc

SEQ ID NO: 1548533 - DNA, 25 bp, Homo sapien
ggtgactgggtcactgcggtttgca

SEQ ID NO: 1548534 - DNA, 25 bp, Homo sapien
agggtgactgggtcactgcggtttg

SEQ ID NO: 1548535 - DNA, 25 bp, Homo sapien
aggacatccagggtgactgggtcac

SEQ ID NO: 1548536 - DNA, 25 bp, Homo sapien
ctctttggacctgaggagaactgag

SEQ ID NO: 1548537 - DNA, 25 bp, Homo sapien
ggctgaggttgcccaaattttcctg

SEQ ID NO: 1548538 - DNA, 25 bp, Homo sapien
tggacctgaggagaactgagagtcc

SEQ ID NO: 1548539 - DNA, 25 bp, Homo sapien
ctttggacctgaggagaactgagag

SEQ ID NO: 1548540 - DNA, 25 bp, Homo sapien
caaagagaacaaagccacaggtgat

SEQ ID NO: 1548541 - DNA, 25 bp, Homo sapien
ctggaacaaagagaacaaagccaca

SEQ ID NO: 1548542 - DNA, 25 bp, Homo sapien
ccacaggtgatgtcatcagaggaaa

SEQ ID NO: 1548543 - DNA, 25 bp, Homo sapien
aacaaagccacaggtgatgtcatca

SEQ ID NO: 1548544 - DNA, 25 bp, Homo sapien
ggaaatgatgggggtgtccggccca

SEQ ID NO: 1548545 - DNA, 25 bp, Homo sapien
gaaatgatgggggtgtccggcccat

SEQ ID NO: 1548546 - DNA, 25 bp, Homo sapien
gagaggttgaggttcgctcccgaaa

SEQ ID NO: 1548547 - DNA, 25 bp, Homo sapien
gacaaaacaggcataggtcccgtta

SEQ ID NO: 1548548 - DNA, 25 bp, Homo sapien
tatggaattattgcggccagtagcc

SEQ ID NO: 1548549 - DNA, 25 bp, Homo sapien
attgatacgccaagaatactgcggg

SEQ ID NO: 1548550 - DNA, 25 bp, Homo sapien
tccttgtgcccatggaacacagact

SEQ ID NO: 1548551 - DNA, 25 bp, Homo sapien
gaggagcaactcgaccttaaggacc

SEQ ID NO: 1548552 - DNA, 25 bp, Homo sapien
gacccttctttcttctggactatga

SEQ ID NO: 1548553 - DNA, 25 bp, Homo sapien
tcagccgtgagatatcagagaagcc

SEQ ID NO: 1548554 - DNA, 25 bp, Homo sapien
tatatcagagcaaccccaaccagca

SEQ ID NO: 1548555 - DNA, 25 bp, Homo sapien
ctatatcagagcaaccccaaccagc

SEQ ID NO: 1548556 - DNA, 25 bp, Homo sapien
caaccccaaccagcactccaatcat

SEQ ID NO: 1548557 - DNA, 25 bp, Homo sapien
ccccaaccagcactccaatcatgat

SEQ ID NO: 1548558 - DNA, 25 bp, Homo sapien
aaatgaagaaactacaccagggctg

SEQ ID NO: 1548559 - DNA, 25 bp, Homo sapien
ttcctgaaatgaagaaactacacca

SEQ ID NO: 1548560 - DNA, 25 bp, Homo sapien
ctgaaatgaagaaactacaccaggg

SEQ ID NO: 1548561 - DNA, 25 bp, Homo sapien
cagtcttcctgaaatgaagaaacta

SEQ ID NO: 1548562 - DNA, 25 bp, Homo sapien
aactccatgggcaattctaatcctc

SEQ ID NO: 1548563 - DNA, 25 bp, Homo sapien
gtcatgggtttagccccaagtccta

SEQ ID NO: 1548564 - DNA, 25 bp, Homo sapien
tttatcggtgggacttaagtatcca

SEQ ID NO: 1548565 - DNA, 25 bp, Homo sapien
taatcctcctagctgaaagtcatgg

SEQ ID NO: 1548566 - DNA, 25 bp, Homo sapien
ctttaaggaagaagcaaaacaactg

SEQ ID NO: 1548567 - DNA, 25 bp, Homo sapien
ttgtattcaagagtacaggtcagag

SEQ ID NO: 1548568 - DNA, 25 bp, Homo sapien
ttctcagacagtgcagtggtatcag

SEQ ID NO: 1548569 - DNA, 25 bp, Homo sapien
gaagctgtcagttagttcattaaag

SEQ ID NO: 1548570 - DNA, 25 bp, Homo sapien
tctctggtcagagtcttttctgtaa

SEQ ID NO: 1548571 - DNA, 25 bp, Homo sapien
ctggagcgaccacatagggagaaaa

SEQ ID NO: 1548572 - DNA, 25 bp, Homo sapien
tgaatagtttcccaagtctggagcg

SEQ ID NO: 1548573 - DNA, 25 bp, Homo sapien
gaacttgtgcaataactatattacc

SEQ ID NO: 1548574 - DNA, 25 bp, Homo sapien
caaattgctgtaagctgtggatagc

SEQ ID NO: 1548575 - DNA, 25 bp, Homo sapien
agtacctgtgggtttattacctatg

SEQ ID NO: 1548576 - DNA, 25 bp, Homo sapien
cctcaaatacgacattctagtcaaa

SEQ ID NO: 1548577 - DNA, 25 bp, Homo sapien
tatatcctcaaatacgacattctag

SEQ ID NO: 1548578 - DNA, 25 bp, Homo sapien
tatcctcaaatacgacattctagtc

SEQ ID NO: 1548579 - DNA, 25 bp, Homo sapien
agaagtttaattgacactaggaagc

SEQ ID NO: 1548580 - DNA, 25 bp, Homo sapien
gaagtttaattgacactaggaagcc

SEQ ID NO: 1548581 - DNA, 25 bp, Homo sapien
tcataactgcagcaagagtagtgac

SEQ ID NO: 1548582 - DNA, 25 bp, Homo sapien
cccaatcaggagatttttggccttc

SEQ ID NO: 1548583 - DNA, 25 bp, Homo sapien
caggagatttttggccttccattcc

SEQ ID NO: 1548584 - DNA, 25 bp, Homo sapien
tttcccaatcaggagatttttggcc

SEQ ID NO: 1548585 - DNA, 25 bp, Homo sapien
aatcaggagatttttggccttccat

SEQ ID NO: 1548586 - DNA, 25 bp, Homo sapien
aagaggacgctcagagtgaagtggg

SEQ ID NO: 1548587 - DNA, 25 bp, Homo sapien
acgtggtgagctccgataggaaaga

SEQ ID NO: 1548588 - DNA, 25 bp, Homo sapien
cctgagcaccctggattaactggga

SEQ ID NO: 1548589 - DNA, 25 bp, Homo sapien
ttaactgggaggacatgccgggtac

SEQ ID NO: 1548590 - DNA, 25 bp, Homo sapien
cagcaaggaggtcacagagatgttt

SEQ ID NO: 1548591 - DNA, 25 bp, Homo sapien
ctccagcaaggaggtcacagagatg

SEQ ID NO: 1548592 - DNA, 25 bp, Homo sapien
caaggaggtcacagagatgtttggg

SEQ ID NO: 1548593 - DNA, 25 bp, Homo sapien
tccagcaaggaggtcacagagatgt

SEQ ID NO: 1548594 - DNA, 25 bp, Homo sapien
gaagcatttcccagggtcacgtggg

SEQ ID NO: 1548595 - DNA, 25 bp, Homo sapien
cacctctttgtagaggagcttgagc

SEQ ID NO: 1548596 - DNA, 25 bp, Homo sapien
tctttgtagaggagcttgagctcca

SEQ ID NO: 1548597 - DNA, 25 bp, Homo sapien
agggatagaagcatttcccagggtc

SEQ ID NO: 1548598 - DNA, 25 bp, Homo sapien
tccaggggacatgcaatctgcaggg

SEQ ID NO: 1548599 - DNA, 25 bp, Homo sapien
acattgaacggcgtggattcaatag

SEQ ID NO: 1548600 - DNA, 25 bp, Homo sapien
cgtggattcaatagtgagcttggca

SEQ ID NO: 1548601 - DNA, 25 bp, Homo sapien
gaacggcgtggattcaatagtgagc

SEQ ID NO: 1548602 - DNA, 25 bp, Homo sapien
gcgacattgaacggcgtggattcaa

SEQ ID NO: 1548603 - DNA, 25 bp, Homo sapien
acatatcctacaattagactgttgc

SEQ ID NO: 1548604 - DNA, 25 bp, Homo sapien
tacatatcctacaattagactgttg

SEQ ID NO: 1548605 - DNA, 25 bp, Homo sapien
cccagaggtcatgtggaaatactca

SEQ ID NO: 1548606 - DNA, 25 bp, Homo sapien
caacacccagaggtcatgtggaaat

SEQ ID NO: 1548607 - DNA, 25 bp, Homo sapien
cccaacacccagaggtcatgtggaa

SEQ ID NO: 1548608 - DNA, 25 bp, Homo sapien
cacccagaggtcatgtggaaatact

SEQ ID NO: 1548609 - DNA, 25 bp, Homo sapien
gatagagcagaattcagagaatgat

SEQ ID NO: 1548610 - DNA, 25 bp, Homo sapien
agatagagcagaattcagagaatga

SEQ ID NO: 1548611 - DNA, 25 bp, Homo sapien
taggatcctgcatcgttccttttga

SEQ ID NO: 1548612 - DNA, 25 bp, Homo sapien
acattcataggatcctgcatcgttc

SEQ ID NO: 1548613 - DNA, 25 bp, Homo sapien
gatcctgcatcgttccttttgacgc

SEQ ID NO: 1548614 - DNA, 25 bp, Homo sapien
tcataggatcctgcatcgttccttt

SEQ ID NO: 1548615 - DNA, 25 bp, Homo sapien
tcagagggaagcataagttcctggt

SEQ ID NO: 1548616 - DNA, 25 bp, Homo sapien
ggaaagagaataaagccacaggtga

SEQ ID NO: 1548617 - DNA, 25 bp, Homo sapien
aataaagccacaggtgatgttgtca

SEQ ID NO: 1548618 - DNA, 25 bp, Homo sapien
tgatgttgtcagagggaagcataag

SEQ ID NO: 1548619 - DNA, 25 bp, Homo sapien
cgtggcaggagaggttcagattttc

SEQ ID NO: 1548620 - DNA, 25 bp, Homo sapien
tcttgtgtggattgctggaacgtcc

SEQ ID NO: 1548621 - DNA, 25 bp, Homo sapien
tgggcttggcacatataggatccgc

SEQ ID NO: 1548622 - DNA, 25 bp, Homo sapien
ccctggacggtaattggcctttgag

SEQ ID NO: 1548623 - DNA, 25 bp, Homo sapien
aatgtgatgctagtgcttcatggat

SEQ ID NO: 1548624 - DNA, 25 bp, Homo sapien
aaatgtgatgctagtgcttcatgga

SEQ ID NO: 1548625 - DNA, 25 bp, Homo sapien
tgtgatgctagtgcttcatggatcc

SEQ ID NO: 1548626 - DNA, 25 bp, Homo sapien
gaaaatgtgatgctagtgcttcatg

SEQ ID NO: 1548627 - DNA, 25 bp, Homo sapien
gagtctgagctgctcctccatcacc

SEQ ID NO: 1548628 - DNA, 25 bp, Homo sapien
tgggagcagagatgggggcagagtc

SEQ ID NO: 1548629 - DNA, 25 bp, Homo sapien
ctccatcacccaaggggcttcctct

SEQ ID NO: 1548630 - DNA, 25 bp, Homo sapien
cagagatgggggcagagtctgagct

SEQ ID NO: 1548631 - DNA, 25 bp, Homo sapien
gtgcccacagtcttatacagccagt

SEQ ID NO: 1548632 - DNA, 25 bp, Homo sapien
gaatctccctatgtctccaagtgtg

SEQ ID NO: 1548633 - DNA, 25 bp, Homo sapien
gacggatgcacaacgatctgagggc

SEQ ID NO: 1548634 - DNA, 25 bp, Homo sapien
taatactacggacctgcacacgtgg

SEQ ID NO: 1548635 - DNA, 25 bp, Homo sapien
gtattttaagtcctagctggagaaa

SEQ ID NO: 1548636 - DNA, 25 bp, Homo sapien
gagggatactcaatggagaaagact

SEQ ID NO: 1548637 - DNA, 25 bp, Homo sapien
tgtagaaaactctacagggttggag

SEQ ID NO: 1548638 - DNA, 25 bp, Homo sapien
tgggcagctccgctgtgcagaaaac

SEQ ID NO: 1548639 - DNA, 25 bp, Homo sapien
cttagggtgatgagaaaacttatcc

SEQ ID NO: 1548640 - DNA, 25 bp, Homo sapien
catgtcctagataccaggccctgtg

SEQ ID NO: 1548641 - DNA, 25 bp, Homo sapien
ggcattttgctgaaggcttaatcaa

SEQ ID NO: 1548642 - DNA, 25 bp, Homo sapien
gactctaggactacctgactttaag

SEQ ID NO: 1548643 - DNA, 25 bp, Homo sapien
aatcgtgatgccgacggtggccaca

SEQ ID NO: 1548644 - DNA, 25 bp, Homo sapien
ccaatcgtgatgccgacggtggcca

SEQ ID NO: 1548645 - DNA, 25 bp, Homo sapien
tcgtgatgccgacggtggccacagc

SEQ ID NO: 1548646 - DNA, 25 bp, Homo sapien
gtgatgccgacggtggccacagctg

SEQ ID NO: 1548647 - DNA, 25 bp, Homo sapien
aaatatcgaaaatacaccagggctg

SEQ ID NO: 1548648 - DNA, 25 bp, Homo sapien
ctgaaatatcgaaaatacaccaggg

SEQ ID NO: 1548649 - DNA, 25 bp, Homo sapien
tcctgaaatatcgaaaatacaccag

SEQ ID NO: 1548650 - DNA, 25 bp, Homo sapien
gaaatatcgaaaatacaccagggct

SEQ ID NO: 1548651 - DNA, 25 bp, Homo sapien
gttggactacgcaccttaggcaaga

SEQ ID NO: 1548652 - DNA, 25 bp, Homo sapien
tggctcaatgcgctcacctaggtga

SEQ ID NO: 1548653 - DNA, 25 bp, Homo sapien
gctagaagaattcagggtctggtcc

SEQ ID NO: 1548654 - DNA, 25 bp, Homo sapien
tcactgggtgcactaaaggatctct

SEQ ID NO: 1548655 - DNA, 25 bp, Homo sapien
tctacaagtacagtgatagctcccc

SEQ ID NO: 1548656 - DNA, 25 bp, Homo sapien
gggacttctgtattatgctaactca

SEQ ID NO: 1548657 - DNA, 25 bp, Homo sapien
ttaaagcagcaccactctacaagta

SEQ ID NO: 1548658 - DNA, 25 bp, Homo sapien
ccctgggcaatacaatacaagaaca

SEQ ID NO: 1548659 - DNA, 25 bp, Homo sapien
ctaactggtagggtagactgtgtaa

SEQ ID NO: 1548660 - DNA, 25 bp, Homo sapien
ctggtagggtagactgtgtaagttg

SEQ ID NO: 1548661 - DNA, 25 bp, Homo sapien
taactggtagggtagactgtgtaag

SEQ ID NO: 1548662 - DNA, 25 bp, Homo sapien
aactggtagggtagactgtgtaagt

SEQ ID NO: 1548663 - DNA, 25 bp, Homo sapien
aatacgtggagtgaatgtggcttct

SEQ ID NO: 1548664 - DNA, 25 bp, Homo sapien
tgtggcttctgtggtaattatcgtc

SEQ ID NO: 1548665 - DNA, 25 bp, Homo sapien
gaagtgcacatataaattaacaggg

SEQ ID NO: 1548666 - DNA, 25 bp, Homo sapien
cgtctaagagtgtgttgtaggctca

SEQ ID NO: 1548667 - DNA, 25 bp, Homo sapien
gctactgtgacttaggctctgctgt

SEQ ID NO: 1548668 - DNA, 25 bp, Homo sapien
ggctccaggaatgctgtagtcaggg

SEQ ID NO: 1548669 - DNA, 25 bp, Homo sapien
gtcatgggtgaagctctgcccaggt

SEQ ID NO: 1548670 - DNA, 25 bp, Homo sapien
tcagggctactgtgacttaggctct

SEQ ID NO: 1548671 - DNA, 25 bp, Homo sapien
gcccctgccaggggatgcattctct

SEQ ID NO: 1548672 - DNA, 25 bp, Homo sapien
cctgccaggggatgcattctctgtg

SEQ ID NO: 1548673 - DNA, 25 bp, Homo sapien
ctgtgagcagaagcccctgccaggg

SEQ ID NO: 1548674 - DNA, 25 bp, Homo sapien
aagcccctgccaggggatgcattct

SEQ ID NO: 1548675 - DNA, 25 bp, Homo sapien
tcatctctgcaagagtgtaagctct

SEQ ID NO: 1548676 - DNA, 25 bp, Homo sapien
tccagggctcttgtcaacacctgaa

SEQ ID NO: 1548677 - DNA, 25 bp, Homo sapien
gaactcacattctagatctctttgg

SEQ ID NO: 1548678 - DNA, 25 bp, Homo sapien
gatctctttgggtgtctatcttcat

SEQ ID NO: 1548679 - DNA, 25 bp, Homo sapien
tattgggacccatgtattgggatgg

SEQ ID NO: 1548680 - DNA, 25 bp, Homo sapien
tgggacccatgtattgggatggaaa

SEQ ID NO: 1548681 - DNA, 25 bp, Homo sapien
aatattgggacccatgtattgggat

SEQ ID NO: 1548682 - DNA, 25 bp, Homo sapien
gacccatgtattgggatggaaagat

SEQ ID NO: 1548683 - DNA, 25 bp, Homo sapien
acactgagcggcatggattcaatag

SEQ ID NO: 1548684 - DNA, 25 bp, Homo sapien
cgacactgagcggcatggattcaat

SEQ ID NO: 1548685 - DNA, 25 bp, Homo sapien
gacactgagcggcatggattcaata

SEQ ID NO: 1548686 - DNA, 25 bp, Homo sapien
gcgacactgagcggcatggattcaa

SEQ ID NO: 1548687 - DNA, 25 bp, Homo sapien
caacacccagaggtcatgtggaaat

SEQ ID NO: 1548688 - DNA, 25 bp, Homo sapien
cccaacacccagaggtcatgtggaa

SEQ ID NO: 1548689 - DNA, 25 bp, Homo sapien
cacccagaggtcatgtggaaatact

SEQ ID NO: 1548690 - DNA, 25 bp, Homo sapien
cccagaggtcatgtggaaatactca

SEQ ID NO: 1548691 - DNA, 25 bp, Homo sapien
tgggcattcagcgtgactgggtcac

SEQ ID NO: 1548692 - DNA, 25 bp, Homo sapien
gctgtttcaggctgggcattcagcg

SEQ ID NO: 1548693 - DNA, 25 bp, Homo sapien
tcaggctgggcattcagcgtgactg

SEQ ID NO: 1548694 - DNA, 25 bp, Homo sapien
gacactgagtagagtgagggtcctc

SEQ ID NO: 1548695 - DNA, 25 bp, Homo sapien
tacaggcaggttgtgctgtgaatct

SEQ ID NO: 1548696 - DNA, 25 bp, Homo sapien
ctgtgaatctcaggttcacaggtga

SEQ ID NO: 1548697 - DNA, 25 bp, Homo sapien
ggttgtgctgtgaatctcaggttca

SEQ ID NO: 1548698 - DNA, 25 bp, Homo sapien
caggttgtgctgtgaatctcaggtt

SEQ ID NO: 1548699 - DNA, 25 bp, Homo sapien
ccgggaggctctgaccatttaccca

SEQ ID NO: 1548700 - DNA, 25 bp, Homo sapien
tcctcttgtcattggacagctgcag

SEQ ID NO: 1548701 - DNA, 25 bp, Homo sapien
ggttcggtatttcacactcataggg

SEQ ID NO: 1548702 - DNA, 25 bp, Homo sapien
cactgagtagagtgagggtcctctt

SEQ ID NO: 1548703 - DNA, 25 bp, Homo sapien
tcattccttgtgacactgagtagag

SEQ ID NO: 1548704 - DNA, 25 bp, Homo sapien
ggtctgcccaggtttgcttgggaca

SEQ ID NO: 1548705 - DNA, 25 bp, Homo sapien
ctgcccaggtttgcttgggacagga

SEQ ID NO: 1548706 - DNA, 25 bp, Homo sapien
tcccctcctattcttggtcaaggct

SEQ ID NO: 1548707 - DNA, 25 bp, Homo sapien
gggtctgcccaggtttgcttgggac

SEQ ID NO: 1548708 - DNA, 25 bp, Homo sapien
tccactgacaaaccaggagtactgt

SEQ ID NO: 1548709 - DNA, 25 bp, Homo sapien
cactcttatccactgcgatgttggg

SEQ ID NO: 1548710 - DNA, 25 bp, Homo sapien
tatgggcgaggcaagcataggatcc

SEQ ID NO: 1548711 - DNA, 25 bp, Homo sapien
aatggtgggaatgcccggtccatct

SEQ ID NO: 1548712 - DNA, 25 bp, Homo sapien
cagcgccactccgaccaggaccccg

SEQ ID NO: 1548713 - DNA, 25 bp, Homo sapien
ggccaccagcgccactccgaccagg

SEQ ID NO: 1548714 - DNA, 25 bp, Homo sapien
gagcaggaaacacaccagcgcggcc

SEQ ID NO: 1548715 - DNA, 25 bp, Homo sapien
gaccaggaccccggtcacgatgccg

SEQ ID NO: 1548716 - DNA, 25 bp, Homo sapien
gagggtgccaggttaaaagccacaa

SEQ ID NO: 1548717 - DNA, 25 bp, Homo sapien
gaaacagaccacgagggtttgcctg

SEQ ID NO: 1548718 - DNA, 25 bp, Homo sapien
cattttcaaggatgggcatggagac

SEQ ID NO: 1548719 - DNA, 25 bp, Homo sapien
tgcctgagaggaagggtcaagtccc

SEQ ID NO: 1548720 - DNA, 25 bp, Homo sapien
ctccttgaggtcacgctggatgctg

SEQ ID NO: 1548721 - DNA, 25 bp, Homo sapien
gctccttgaggtcacgctggatgct

SEQ ID NO: 1548722 - DNA, 25 bp, Homo sapien
cttgaggtcacgctggatgctggtt

SEQ ID NO: 1548723 - DNA, 25 bp, Homo sapien
gctgctccttgaggtcacgctggat

SEQ ID NO: 1548724 - DNA, 25 bp, Homo sapien
aggcagagctgtgggagggaccacg

SEQ ID NO: 1548725 - DNA, 25 bp, Homo sapien
gcagagctgtgggagggaccacggc

SEQ ID NO: 1548726 - DNA, 25 bp, Homo sapien
agaaggcagagctgtgggagggacc

SEQ ID NO: 1548727 - DNA, 25 bp, Homo sapien
cgagaaggcagagctgtgggaggga

SEQ ID NO: 1548728 - DNA, 25 bp, Homo sapien
aggggtcagcacagggcgtgggtgg

SEQ ID NO: 1548729 - DNA, 25 bp, Homo sapien
tctcctcaggtgatggagggtcccg

SEQ ID NO: 1548730 - DNA, 25 bp, Homo sapien
ctgactgatggtcccagtgtccact

SEQ ID NO: 1548731 - DNA, 25 bp, Homo sapien
cctgcacccttgttaatgtgggccc

SEQ ID NO: 1548732 - DNA, 25 bp, Homo sapien
agctgctgtcctggggttgggtagg

SEQ ID NO: 1548733 - DNA, 25 bp, Homo sapien
gaagctgctgtcctggggttgggta

SEQ ID NO: 1548734 - DNA, 25 bp, Homo sapien
ctgctgtcctggggttgggtagggg

SEQ ID NO: 1548735 - DNA, 25 bp, Homo sapien
catagatggaagctgctgtcctggg

SEQ ID NO: 1548736 - DNA, 25 bp, Homo sapien
tggacccctctagtctcctcagaac

SEQ ID NO: 1548737 - DNA, 25 bp, Homo sapien
agctcagccgatgccagtaggggaa

SEQ ID NO: 1548738 - DNA, 25 bp, Homo sapien
ccgatgccagtaggggaagatcctg

SEQ ID NO: 1548739 - DNA, 25 bp, Homo sapien
cagaacagggtgtggcgtctcccag

SEQ ID NO: 1548740 - DNA, 25 bp, Homo sapien
taaatgtttgtgtcatgttttagca

SEQ ID NO: 1548741 - DNA, 25 bp, Homo sapien
tgtttgtgtcatgttttagcaattc

SEQ ID NO: 1548742 - DNA, 25 bp, Homo sapien
tgctttgtggtccatccggcagtaa

SEQ ID NO: 1548743 - DNA, 25 bp, Homo sapien
ccatccggcagtaaatgtttgtgtc

SEQ ID NO: 1548744 - DNA, 25 bp, Homo sapien
gatatggagtttcaggcgaattttt

SEQ ID NO: 1548745 - DNA, 25 bp, Homo sapien
ccagtgtcttctcaggacttatagc

SEQ ID NO: 1548746 - DNA, 25 bp, Homo sapien
gctaagttcccactagcagaaaaac

SEQ ID NO: 1548747 - DNA, 25 bp, Homo sapien
ttctcaggacttatagctggttctc

SEQ ID NO: 1548748 - DNA, 25 bp, Homo sapien
agagaaccgccggcccaggtatgtg

SEQ ID NO: 1548749 - DNA, 25 bp, Homo sapien
ggagggacagagaaccgccggccca

SEQ ID NO: 1548750 - DNA, 25 bp, Homo sapien
agaaccgccggcccaggtatgtggt

SEQ ID NO: 1548751 - DNA, 25 bp, Homo sapien
gacagagaaccgccggcccaggtat

SEQ ID NO: 1548752 - DNA, 25 bp, Homo sapien
aggctcttcgggacactctgactta

SEQ ID NO: 1548753 - DNA, 25 bp, Homo sapien
tgtgcggcctagcattcatggcgca

SEQ ID NO: 1548754 - DNA, 25 bp, Homo sapien
gctgttcaggctcttcgggacactc

SEQ ID NO: 1548755 - DNA, 25 bp, Homo sapien
ttgtgcggcctagcattcatggcgc

SEQ ID NO: 1548756 - DNA, 25 bp, Homo sapien
ataatcttacccacggagtcacggt

SEQ ID NO: 1548757 - DNA, 25 bp, Homo sapien
taatcttacccacggagtcacggtc

SEQ ID NO: 1548758 - DNA, 25 bp, Homo sapien
atgataatcttacccacggagtcac

SEQ ID NO: 1548759 - DNA, 25 bp, Homo sapien
gataatcttacccacggagtcacgg

SEQ ID NO: 1548760 - DNA, 25 bp, Homo sapien
aaatttccagaactgctttgatctc

SEQ ID NO: 1548761 - DNA, 25 bp, Homo sapien
aatttccagaactgctttgatctct

SEQ ID NO: 1548762 - DNA, 25 bp, Homo sapien
ttccagaactgctttgatctctttg

SEQ ID NO: 1548763 - DNA, 25 bp, Homo sapien
cagaactgctttgatctctttggct

SEQ ID NO: 1548764 - DNA, 25 bp, Homo sapien
caccaaaaccacctccatgaccacc

SEQ ID NO: 1548765 - DNA, 25 bp, Homo sapien
tccaccaacaacatggctgccacca

SEQ ID NO: 1548766 - DNA, 25 bp, Homo sapien
ccaccaacaacatggctgccaccaa

SEQ ID NO: 1548767 - DNA, 25 bp, Homo sapien
ttcccaccaaaaccacctccatgac

SEQ ID NO: 1548768 - DNA, 25 bp, Homo sapien
tggtttcgtggtttggcaaatattg

SEQ ID NO: 1548769 - DNA, 25 bp, Homo sapien
gtagcttccactacgtccaaagttg

SEQ ID NO: 1548770 - DNA, 25 bp, Homo sapien
gtttcgtggtttggcaaatattggc

SEQ ID NO: 1548771 - DNA, 25 bp, Homo sapien
attgtagcttccactacgtccaaag

SEQ ID NO: 1548772 - DNA, 25 bp, Homo sapien
catgtgtgtctgaggcattgcaggc

SEQ ID NO: 1548773 - DNA, 25 bp, Homo sapien
taaaggccagctaaagaggttgaac

SEQ ID NO: 1548774 - DNA, 25 bp, Homo sapien
gacgtgacctctagctggactgctg

SEQ ID NO: 1548775 - DNA, 25 bp, Homo sapien
tactcagcttgttaggtccaggtcc

SEQ ID NO: 1548776 - DNA, 25 bp, Homo sapien
tgtgtcggttgtgattttcctaatc

SEQ ID NO: 1548777 - DNA, 25 bp, Homo sapien
tttccttttctctcggacgctctcc

SEQ ID NO: 1548778 - DNA, 25 bp, Homo sapien
tccttcctcagattgcacccctttc

SEQ ID NO: 1548779 - DNA, 25 bp, Homo sapien
ggacccattttctcccgtgcttcat

SEQ ID NO: 1548780 - DNA, 25 bp, Homo sapien
tcacaaagaccaatgaacttcaagc

SEQ ID NO: 1548781 - DNA, 25 bp, Homo sapien
gtctcacaaagaccaatgaacttca

SEQ ID NO: 1548782 - DNA, 25 bp, Homo sapien
gaccaatgaacttcaagcatcgcct

SEQ ID NO: 1548783 - DNA, 25 bp, Homo sapien
aatgaacttcaagcatcgcctctct

SEQ ID NO: 1548784 - DNA, 25 bp, Homo sapien
gaggaaccgccaagctcgcgctgct

SEQ ID NO: 1548785 - DNA, 25 bp, Homo sapien
cagaggaaccgccaagctcgcgctg

SEQ ID NO: 1548786 - DNA, 25 bp, Homo sapien
gaaccgccaagctcgcgctgctttt

SEQ ID NO: 1548787 - DNA, 25 bp, Homo sapien
gccaagctcgcgctgcttttcttac

SEQ ID NO: 1548788 - DNA, 25 bp, Homo sapien
tcagtcaagaagacgcccaaagaca

SEQ ID NO: 1548789 - DNA, 25 bp, Homo sapien
cacagcctccaatggagtcagattc

SEQ ID NO: 1548790 - DNA, 25 bp, Homo sapien
ccaatggagtcagattcagtcaaga

SEQ ID NO: 1548791 - DNA, 25 bp, Homo sapien
gtcagattcagtcaagaagacgccc

SEQ ID NO: 1548792 - DNA, 25 bp, Homo sapien
gtgttcgtgcagctagttcacggtt

SEQ ID NO: 1548793 - DNA, 25 bp, Homo sapien
gttcgtgcagctagttcacggttac

SEQ ID NO: 1548794 - DNA, 25 bp, Homo sapien
tgttcgtgcagctagttcacggtta

SEQ ID NO: 1548795 - DNA, 25 bp, Homo sapien
cgtgttcgtgcagctagttcacggt

SEQ ID NO: 1548796 - DNA, 25 bp, Homo sapien
taaggggcagtggtagccagcaggc

SEQ ID NO: 1548797 - DNA, 25 bp, Homo sapien
aggggcagtggtagccagcaggcat

SEQ ID NO: 1548798 - DNA, 25 bp, Homo sapien
aaggggcagtggtagccagcaggca

SEQ ID NO: 1548799 - DNA, 25 bp, Homo sapien
ctaaggggcagtggtagccagcagg

SEQ ID NO: 1548800 - DNA, 25 bp, Homo sapien
cagcgggcgcaggttggagagcggc

SEQ ID NO: 1548801 - DNA, 25 bp, Homo sapien
ccttgagatgggcggtgacaccatg

SEQ ID NO: 1548802 - DNA, 25 bp, Homo sapien
gtggcccttgagatgggcggtgaca

SEQ ID NO: 1548803 - DNA, 25 bp, Homo sapien
atggttgcggcagcgggcgcaggtt

SEQ ID NO: 1548804 - DNA, 25 bp, Homo sapien
cctttctgaagtggttgggagcttt

SEQ ID NO: 1548805 - DNA, 25 bp, Homo sapien
gagctttgggagaggcttcccctct

SEQ ID NO: 1548806 - DNA, 25 bp, Homo sapien
ggtgcttctttagctgcgcctcctg

SEQ ID NO: 1548807 - DNA, 25 bp, Homo sapien
tgctgcctacgcaaggccacctggg

SEQ ID NO: 1548808 - DNA, 25 bp, Homo sapien
ttcccggggggtgtcggtgccagca

SEQ ID NO: 1548809 - DNA, 25 bp, Homo sapien
cccggggggtgtcggtgccagcagg

SEQ ID NO: 1548810 - DNA, 25 bp, Homo sapien
cggggggtgtcggtgccagcaggac

SEQ ID NO: 1548811 - DNA, 25 bp, Homo sapien
gggggtgtcggtgccagcaggactg

SEQ ID NO: 1548812 - DNA, 25 bp, Homo sapien
ggcacaggctggagttgggtacaag

SEQ ID NO: 1548813 - DNA, 25 bp, Homo sapien
gcacaggctggagttgggtacaagg

SEQ ID NO: 1548814 - DNA, 25 bp, Homo sapien
agagggcacaggctggagttgggta

SEQ ID NO: 1548815 - DNA, 25 bp, Homo sapien
agggcacaggctggagttgggtaca

SEQ ID NO: 1548816 - DNA, 25 bp, Homo sapien
ggagtccaggacaagggcgaggctt

SEQ ID NO: 1548817 - DNA, 25 bp, Homo sapien
cagcaggcggcacaccactggtggt

SEQ ID NO: 1548818 - DNA, 25 bp, Homo sapien
gttcttggtacagcaggcggcacac

SEQ ID NO: 1548819 - DNA, 25 bp, Homo sapien
gagagacagcaggttcttggtacag

SEQ ID NO: 1548820 - DNA, 25 bp, Homo sapien
gtcagtactgggtgagatcctgggc

SEQ ID NO: 1548821 - DNA, 25 bp, Homo sapien
tcagtactgggtgagatcctgggca

SEQ ID NO: 1548822 - DNA, 25 bp, Homo sapien
gctgtcagtactgggtgagatcctg

SEQ ID NO: 1548823 - DNA, 25 bp, Homo sapien
tgtcagtactgggtgagatcctggg

SEQ ID NO: 1548824 - DNA, 25 bp, Homo sapien
catcaaatctgtctaagcagatata

SEQ ID NO: 1548825 - DNA, 25 bp, Homo sapien
gcaatcttaccccatcaaatctgtc

SEQ ID NO: 1548826 - DNA, 25 bp, Homo sapien
aaatctgtctaagcagatataacag

SEQ ID NO: 1548827 - DNA, 25 bp, Homo sapien
catatcagcaggcaatcttacccca

SEQ ID NO: 1548828 - DNA, 25 bp, Homo sapien
agatgccagggtggttaaacagatg

SEQ ID NO: 1548829 - DNA, 25 bp, Homo sapien
ccagggtggttaaacagatgaacag

SEQ ID NO: 1548830 - DNA, 25 bp, Homo sapien
tgccagggtggttaaacagatgaac

SEQ ID NO: 1548831 - DNA, 25 bp, Homo sapien
agagaagatgccagggtggttaaac

SEQ ID NO: 1548832 - DNA, 25 bp, Homo sapien
tgccacagggctggagtatcagagt

SEQ ID NO: 1548833 - DNA, 25 bp, Homo sapien
tgaagagggtctggggtgccacagg

SEQ ID NO: 1548834 - DNA, 25 bp, Homo sapien
ctgtggctgtagctgaagagggtct

SEQ ID NO: 1548835 - DNA, 25 bp, Homo sapien
cagggctggagtatcagagttgagt

SEQ ID NO: 1548836 - DNA, 25 bp, Homo sapien
gccctagatcccacttctttcccag

SEQ ID NO: 1548837 - DNA, 25 bp, Homo sapien
tcccagggccctagatcccacttct

SEQ ID NO: 1548838 - DNA, 25 bp, Homo sapien
cctcccagggccctagatcccactt

SEQ ID NO: 1548839 - DNA, 25 bp, Homo sapien
cagggccctagatcccacttctttc

SEQ ID NO: 1548840 - DNA, 25 bp, Homo sapien
ctgcccaccctctaagtgttcctca

SEQ ID NO: 1548841 - DNA, 25 bp, Homo sapien
cttctgcccaccctctaagtgttcc

SEQ ID NO: 1548842 - DNA, 25 bp, Homo sapien
agcagactgggaacccccgcttctg

SEQ ID NO: 1548843 - DNA, 25 bp, Homo sapien
gacaagcagactgggaacccccgct

SEQ ID NO: 1548844 - DNA, 25 bp, Homo sapien
gatgtccgggccaggcacgaggctc

SEQ ID NO: 1548845 - DNA, 25 bp, Homo sapien
accagatgtccgggccaggcacgag

SEQ ID NO: 1548846 - DNA, 25 bp, Homo sapien
cagatgtccgggccaggcacgaggc

SEQ ID NO: 1548847 - DNA, 25 bp, Homo sapien
gggaccagatgtccgggccaggcac

SEQ ID NO: 1548848 - DNA, 25 bp, Homo sapien
gagcctgggatgaatctttcagccc

SEQ ID NO: 1548849 - DNA, 25 bp, Homo sapien
acagaaggggtcacacgaggagcct

SEQ ID NO: 1548850 - DNA, 25 bp, Homo sapien
ttggggggcacagaaggggtcacac

SEQ ID NO: 1548851 - DNA, 25 bp, Homo sapien
ggagcctgggatgaatctttcagcc

SEQ ID NO: 1548852 - DNA, 25 bp, Homo sapien
tgcttagttcagaaacgttccctgg

SEQ ID NO: 1548853 - DNA, 25 bp, Homo sapien
gacaagagaattcgcagctttccct

SEQ ID NO: 1548854 - DNA, 25 bp, Homo sapien
caagaaatttgctgtcgagtgccaa

SEQ ID NO: 1548855 - DNA, 25 bp, Homo sapien
tgttctagacacctaagcctggcat

SEQ ID NO: 1548856 - DNA, 25 bp, Homo sapien
gagatggaccccagacggccaatat

SEQ ID NO: 1548857 - DNA, 25 bp, Homo sapien
ggccaatatgcagagcaacagaggg

SEQ ID NO: 1548858 - DNA, 25 bp, Homo sapien
cccagacggccaatatgcagagcaa

SEQ ID NO: 1548859 - DNA, 25 bp, Homo sapien
atggaccccagacggccaatatgca

SEQ ID NO: 1548860 - DNA, 25 bp, Homo sapien
gaaatgcccacactaccaaaggaac

SEQ ID NO: 1548861 - DNA, 25 bp, Homo sapien
ctaaatatacagtgccagcaggctg

SEQ ID NO: 1548862 - DNA, 25 bp, Homo sapien
ggatttcaagagatcccaggaccca

SEQ ID NO: 1548863 - DNA, 25 bp, Homo sapien
tgggatgtaaactcatgcaaacacg

SEQ ID NO: 1548864 - DNA, 25 bp, Homo sapien
agaaaactgagccaacatttgaaaa

SEQ ID NO: 1548865 - DNA, 25 bp, Homo sapien
tatttatgcaaacgtgtcagggctg

SEQ ID NO: 1548866 - DNA, 25 bp, Homo sapien
caggatcttgtgaaggcccatgcag

SEQ ID NO: 1548867 - DNA, 25 bp, Homo sapien
ccttgggaacatagggaactctgcc

SEQ ID NO: 1548868 - DNA, 25 bp, Homo sapien
gaatgaggcctatgtggacgaagca

SEQ ID NO: 1548869 - DNA, 25 bp, Homo sapien
gctgttccctggccggaagtgggag

SEQ ID NO: 1548870 - DNA, 25 bp, Homo sapien
agctggcgccccacggcggaacaac

SEQ ID NO: 1548871 - DNA, 25 bp, Homo sapien
agtgggagtagtaagggcggaactg

SEQ ID NO: 1548872 - DNA, 25 bp, Homo sapien
taagggcggaactgtgacagggaac

SEQ ID NO: 1548873 - DNA, 25 bp, Homo sapien
gatagagagctcctgttcggagctg

SEQ ID NO: 1548874 - DNA, 25 bp, Homo sapien
gagaatactatgatggcgaaagtac

SEQ ID NO: 1548875 - DNA, 25 bp, Homo sapien
tctcccggagtgtaatagagagagg

SEQ ID NO: 1548876 - DNA, 25 bp, Homo sapien
tcgtttgcgtcgttcgtggctggaa

SEQ ID NO: 1548877 - DNA, 25 bp, Homo sapien
ctcgcgagagcgagggtagacgctg

SEQ ID NO: 1548878 - DNA, 25 bp, Homo sapien
tccgcctctctcagggcgaaagttc

SEQ ID NO: 1548879 - DNA, 25 bp, Homo sapien
ggtagacgctgaggctccgcctctc

SEQ ID NO: 1548880 - DNA, 25 bp, Homo sapien
tctcagggcgaaagttcgtccccgc

SEQ ID NO: 1548881 - DNA, 25 bp, Homo sapien
tcgggcgtagggtctcgcgagagtt

SEQ ID NO: 1548882 - DNA, 25 bp, Homo sapien
tagggtctcgcgagagttccgaaag

SEQ ID NO: 1548883 - DNA, 25 bp, Homo sapien
acaagtcgggcgtagggtctcgcga

SEQ ID NO: 1548884 - DNA, 25 bp, Homo sapien
ttcccgggcgcacaagtcgggcgta

SEQ ID NO: 1548885 - DNA, 25 bp, Homo sapien
gcacgcgctctgaggcttcggcgtc

SEQ ID NO: 1548886 - DNA, 25 bp, Homo sapien
ctgccgctcgcacgtggccgcggct

SEQ ID NO: 1548887 - DNA, 25 bp, Homo sapien
ctcaggcacgcgctctgaggcttcg

SEQ ID NO: 1548888 - DNA, 25 bp, Homo sapien
aggcttcggcgtccggccctgccac

SEQ ID NO: 1548889 - DNA, 25 bp, Homo sapien
cgctcggttcccggacggcgctgac

SEQ ID NO: 1548890 - DNA, 25 bp, Homo sapien
cacgctcggttcccggacggcgctg

SEQ ID NO: 1548891 - DNA, 25 bp, Homo sapien
acgctcggttcccggacggcgctga

SEQ ID NO: 1548892 - DNA, 25 bp, Homo sapien
ccacgctcggttcccggacggcgct

SEQ ID NO: 1548893 - DNA, 25 bp, Homo sapien
tgcgtgtgaggatcctgcgcgaccc

SEQ ID NO: 1548894 - DNA, 25 bp, Homo sapien
agcccggcccctgcgtgtgaggatc

SEQ ID NO: 1548895 - DNA, 25 bp, Homo sapien
ggcctctctggatcgcactaacaga

SEQ ID NO: 1548896 - DNA, 25 bp, Homo sapien
tgcgggtctgaaggagctcaccgac

SEQ ID NO: 1548897 - DNA, 25 bp, Homo sapien
tcctgctggttcacgtcttttacag

SEQ ID NO: 1548898 - DNA, 25 bp, Homo sapien
tgacgaactcctgctggttcacgtc

SEQ ID NO: 1548899 - DNA, 25 bp, Homo sapien
actcctgctggttcacgtcttttac

SEQ ID NO: 1548900 - DNA, 25 bp, Homo sapien
tgctggttcacgtcttttacagtaa

SEQ ID NO: 1548901 - DNA, 25 bp, Homo sapien
cagcttgacggtatccacccattcg

SEQ ID NO: 1548902 - DNA, 25 bp, Homo sapien
ttggccagcttgacggtatccaccc

SEQ ID NO: 1548903 - DNA, 25 bp, Homo sapien
gccagcttgacggtatccacccatt

SEQ ID NO: 1548904 - DNA, 25 bp, Homo sapien
gcttgacggtatccacccattcggg

SEQ ID NO: 1548905 - DNA, 25 bp, Homo sapien
ccagttctcatcgtagggagcaagc

SEQ ID NO: 1548906 - DNA, 25 bp, Homo sapien
ttctcatcgtagggagcaagctctt

SEQ ID NO: 1548907 - DNA, 25 bp, Homo sapien
tcgcgtgtagaaccagttctcatcg

SEQ ID NO: 1548908 - DNA, 25 bp, Homo sapien
tgtagaaccagttctcatcgtaggg

SEQ ID NO: 1548909 - DNA, 25 bp, Homo sapien
gagtctgcctccgtgtatatagaaa

SEQ ID NO: 1548910 - DNA, 25 bp, Homo sapien
acccagggagtctgcctccgtgtat

SEQ ID NO: 1548911 - DNA, 25 bp, Homo sapien
tctgcctccgtgtatatagaaagga

SEQ ID NO: 1548912 - DNA, 25 bp, Homo sapien
cagggagtctgcctccgtgtatata

SEQ ID NO: 1548913 - DNA, 25 bp, Homo sapien
tagtgaaggtcggtgctaaggctgt

SEQ ID NO: 1548914 - DNA, 25 bp, Homo sapien
ggctgtcaccttgacataacacggc

SEQ ID NO: 1548915 - DNA, 25 bp, Homo sapien
gaaggtcggtgctaaggctgtcacc

SEQ ID NO: 1548916 - DNA, 25 bp, Homo sapien
gtcaccttgacataacacggcactg

SEQ ID NO: 1548917 - DNA, 25 bp, Homo sapien
tcctatgccgctaggacagctgggc

SEQ ID NO: 1548918 - DNA, 25 bp, Homo sapien
tggtctaccacacaaccatcctatg

SEQ ID NO: 1548919 - DNA, 25 bp, Homo sapien
caggcagaagatgcacatcctgctt

SEQ ID NO: 1548920 - DNA, 25 bp, Homo sapien
tgcaactaggtttattatccaaggt

SEQ ID NO: 1548921 - DNA, 25 bp, Homo sapien
actccagcctggtgacagtgcaact

SEQ ID NO: 1548922 - DNA, 25 bp, Homo sapien
tgcagttagccgagacggcaccagt

SEQ ID NO: 1548923 - DNA, 25 bp, Homo sapien
tactccagcctggtgacagtgcaac

SEQ ID NO: 1548924 - DNA, 25 bp, Homo sapien
agttagccgagacggcaccagtgta

SEQ ID NO: 1548925 - DNA, 25 bp, Homo sapien
gcacaccaggacaccaaactggact

SEQ ID NO: 1548926 - DNA, 25 bp, Homo sapien
agacgcacaccaggacaccaaactg

SEQ ID NO: 1548927 - DNA, 25 bp, Homo sapien
ccaaactggactcccacatctccat

SEQ ID NO: 1548928 - DNA, 25 bp, Homo sapien
aggacaccaaactggactcccacat

SEQ ID NO: 1548929 - DNA, 25 bp, Homo sapien
tgtgttcctgctagaccgagaggga

SEQ ID NO: 1548930 - DNA, 25 bp, Homo sapien
tctgccgaacttgtaagaaaccact

SEQ ID NO: 1548931 - DNA, 25 bp, Homo sapien
tacaagaagtgtttccagacatccc

SEQ ID NO: 1548932 - DNA, 25 bp, Homo sapien
tactatcatagcacaagtgggtgcc

SEQ ID NO: 1548933 - DNA, 25 bp, Homo sapien
cgccgtagctggtactcatgagggc

SEQ ID NO: 1548934 - DNA, 25 bp, Homo sapien
ggccaattgcgagcaagttgctgtc

SEQ ID NO: 1548935 - DNA, 25 bp, Homo sapien
tggtactcatgagggccaattgcga

SEQ ID NO: 1548936 - DNA, 25 bp, Homo sapien
tccatgctagaggccttctgctcct

SEQ ID NO: 1548937 - DNA, 25 bp, Homo sapien
gatgtggagctgcacaaatgcagac

SEQ ID NO: 1548938 - DNA, 25 bp, Homo sapien
accaaggttccagccccagcttttg

SEQ ID NO: 1548939 - DNA, 25 bp, Homo sapien
tggagaccaaggttccagccccagc

SEQ ID NO: 1548940 - DNA, 25 bp, Homo sapien
ccagcttttgatgtggagctgcaca

SEQ ID NO: 1548941 - DNA, 25 bp, Homo sapien
cccttgctatcccagttcatgctaa

SEQ ID NO: 1548942 - DNA, 25 bp, Homo sapien
gctaagagttgaaataccgcgttct

SEQ ID NO: 1548943 - DNA, 25 bp, Homo sapien
tggtcagatattacaagctcctccc

SEQ ID NO: 1548944 - DNA, 25 bp, Homo sapien
ccttttggcatggagaaccttggtc

SEQ ID NO: 1548945 - DNA, 25 bp, Homo sapien
cgcagagatgcccaaagcggctgta

SEQ ID NO: 1548946 - DNA, 25 bp, Homo sapien
gcacacactcctaagcgcagagatg

SEQ ID NO: 1548947 - DNA, 25 bp, Homo sapien
tcttgttgggttgggactagcgccc

SEQ ID NO: 1548948 - DNA, 25 bp, Homo sapien
gaaatgggacactcaacctcagtct

SEQ ID NO: 1548949 - DNA, 25 bp, Homo sapien
tttatagtaagggtgagcatctgtg

SEQ ID NO: 1548950 - DNA, 25 bp, Homo sapien
cctggccccgatattacaccatttt

SEQ ID NO: 1548951 - DNA, 25 bp, Homo sapien
gcccctggccccgatattacaccat

SEQ ID NO: 1548952 - DNA, 25 bp, Homo sapien
attttatagtaagggtgagcatctg

SEQ ID NO: 1548953 - DNA, 25 bp, Homo sapien
tgacaaacagccctgcaccctgggt

SEQ ID NO: 1548954 - DNA, 25 bp, Homo sapien
cacccccccggctagctcttccttg

SEQ ID NO: 1548955 - DNA, 25 bp, Homo sapien
ccccccggctagctcttccttgaca

SEQ ID NO: 1548956 - DNA, 25 bp, Homo sapien
gagccaaccccagcgccaccccgga

SEQ ID NO: 1548957 - DNA, 25 bp, Homo sapien
agcgccaccccggaggtacaggtgc

SEQ ID NO: 1548958 - DNA, 25 bp, Homo sapien
ccagcgccaccccggaggtacaggt

SEQ ID NO: 1548959 - DNA, 25 bp, Homo sapien
ccccagcgccaccccggaggtacag

SEQ ID NO: 1548960 - DNA, 25 bp, Homo sapien
atgacgccgtttctctgacgtcccc

SEQ ID NO: 1548961 - DNA, 25 bp, Homo sapien
tcaaggctactccatcaatgcagcc

SEQ ID NO: 1548962 - DNA, 25 bp, Homo sapien
cagactatgcaggaccattcgttgg

SEQ ID NO: 1548963 - DNA, 25 bp, Homo sapien
tgatgaccgggcctcaaggctactc

SEQ ID NO: 1548964 - DNA, 25 bp, Homo sapien
cattcgttggggaattgatgaccgg

SEQ ID NO: 1548965 - DNA, 25 bp, Homo sapien
gtcaggtgcattctaacgagctggg

SEQ ID NO: 1548966 - DNA, 25 bp, Homo sapien
gcaagcatttagatcaaaagccccg

SEQ ID NO: 1548967 - DNA, 25 bp, Homo sapien
tgggaaaagttaacgagcaggctaa

SEQ ID NO: 1548968 - DNA, 25 bp, Homo sapien
gatagtcgctaaattaccctcctgg

SEQ ID NO: 1548969 - DNA, 25 bp, Homo sapien
ctgtccggcgattctgtccagatct

SEQ ID NO: 1548970 - DNA, 25 bp, Homo sapien
tccctgaggtgtcagtttgcggccg

SEQ ID NO: 1548971 - DNA, 25 bp, Homo sapien
tccggcgattctgtccagatctctt

SEQ ID NO: 1548972 - DNA, 25 bp, Homo sapien
tccagatctctttgtccctgaggtg

SEQ ID NO: 1548973 - DNA, 25 bp, Homo sapien
gggagtcatctacgggtacagctat

SEQ ID NO: 1548974 - DNA, 25 bp, Homo sapien
tacagaattgagctcatgccaggcc

SEQ ID NO: 1548975 - DNA, 25 bp, Homo sapien
catgtgatgctcagtacgcatgagg

SEQ ID NO: 1548976 - DNA, 25 bp, Homo sapien
ctaccatgcttgaggtggccaaggg

SEQ ID NO: 1548977 - DNA, 25 bp, Homo sapien
aaatgctccaaggctcctaggaggc

SEQ ID NO: 1548978 - DNA, 25 bp, Homo sapien
taaatgctccaaggctcctaggagg

SEQ ID NO: 1548979 - DNA, 25 bp, Homo sapien
gggcactttgtaacagctacctaac

SEQ ID NO: 1548980 - DNA, 25 bp, Homo sapien
gctacctaactacccaccacaggtg

SEQ ID NO: 1548981 - DNA, 25 bp, Homo sapien
gacgtggaaactgggtctcaaggga

SEQ ID NO: 1548982 - DNA, 25 bp, Homo sapien
tgggcaccccgatttgtggtttcaa

SEQ ID NO: 1548983 - DNA, 25 bp, Homo sapien
ctaatgcttcttgttggcagctgcc

SEQ ID NO: 1548984 - DNA, 25 bp, Homo sapien
aatgcttcttgttggcagctgccac

SEQ ID NO: 1548985 - DNA, 25 bp, Homo sapien
taatgcttcttgttggcagctgcca

SEQ ID NO: 1548986 - DNA, 25 bp, Homo sapien
ccaggcccaggaaagttagtgtgta

SEQ ID NO: 1548987 - DNA, 25 bp, Homo sapien
cgctcagatgcagagtgaaggctca

SEQ ID NO: 1548988 - DNA, 25 bp, Homo sapien
ggccgccctggtaattcaacttctg

SEQ ID NO: 1548989 - DNA, 25 bp, Homo sapien
ttagcaggcttacacacgaggagac

SEQ ID NO: 1548990 - DNA, 25 bp, Homo sapien
tgcaattgctcgatctcaacccact

SEQ ID NO: 1548991 - DNA, 25 bp, Homo sapien
ttgcaattgctcgatctcaacccac

SEQ ID NO: 1548992 - DNA, 25 bp, Homo sapien
aatggagtctcgctctgttgcccag

SEQ ID NO: 1548993 - DNA, 25 bp, Homo sapien
ttattgattctttttttgaaatgga

SEQ ID NO: 1548994 - DNA, 25 bp, Homo sapien
catgactggcaaggtaggccatccc

SEQ ID NO: 1548995 - DNA, 25 bp, Homo sapien
tttatattgacctgccatgactggc

SEQ ID NO: 1548996 - DNA, 25 bp, Homo sapien
gaggttgtcacttgcgggtgtcata

SEQ ID NO: 1548997 - DNA, 25 bp, Homo sapien
cttgcgggtgtcatacagtctaggg

SEQ ID NO: 1548998 - DNA, 25 bp, Homo sapien
gtggccctcgctactgggccctttg

SEQ ID NO: 1548999 - DNA, 25 bp, Homo sapien
ctgccgggtatgcttcaggctgtga

SEQ ID NO: 1549000 - DNA, 25 bp, Homo sapien
gttagtttgagttgcagcagtccca

SEQ ID NO: 1549001 - DNA, 25 bp, Homo sapien
tctcccagtgggttggttagtttga

SEQ ID NO: 1549002 - DNA, 25 bp, Homo sapien
agagcttggaggactcctggacccc

SEQ ID NO: 1549003 - DNA, 25 bp, Homo sapien
ggaggactcctggacccccaggcat

SEQ ID NO: 1549004 - DNA, 25 bp, Homo sapien
gcagagcttggaggactcctggacc

SEQ ID NO: 1549005 - DNA, 25 bp, Homo sapien
caggtagacagcagacagcaggaag

SEQ ID NO: 1549006 - DNA, 25 bp, Homo sapien
ccttgacagacgctgaatgctgcta

SEQ ID NO: 1549007 - DNA, 25 bp, Homo sapien
agacgctgaatgctgctacccctaa

SEQ ID NO: 1549008 - DNA, 25 bp, Homo sapien
gacagacgctgaatgctgctacccc

SEQ ID NO: 1549009 - DNA, 25 bp, Homo sapien
gctgaatgctgctacccctaagtcc

SEQ ID NO: 1549010 - DNA, 25 bp, Homo sapien
ctggaggaccgctgtccagacagct

SEQ ID NO: 1549011 - DNA, 25 bp, Homo sapien
gattttggatgtttgttccaggcac

SEQ ID NO: 1549012 - DNA, 25 bp, Homo sapien
catacgcactttgtactctggccct

SEQ ID NO: 1549013 - DNA, 25 bp, Homo sapien
ttccagaagcagtgcaggcgtcccc

SEQ ID NO: 1549014 - DNA, 25 bp, Homo sapien
gacgttggcgttgttgctgctattg

SEQ ID NO: 1549015 - DNA, 25 bp, Homo sapien
ccacgtgtagttgccatggaggacg

SEQ ID NO: 1549016 - DNA, 25 bp, Homo sapien
catcaatgatgctgggaccttgtgc

SEQ ID NO: 1549017 - DNA, 25 bp, Homo sapien
gaccttgtgcatccacagggcctgg

SEQ ID NO: 1549018 - DNA, 25 bp, Homo sapien
ttcacattctggatgatcagcgtac

SEQ ID NO: 1549019 - DNA, 25 bp, Homo sapien
cttgttcacattctggatgatcagc

SEQ ID NO: 1549020 - DNA, 25 bp, Homo sapien
ttgttcacattctggatgatcagcg

SEQ ID NO: 1549021 - DNA, 25 bp, Homo sapien
tgttcacattctggatgatcagcgt

SEQ ID NO: 1549022 - DNA, 25 bp, Homo sapien
tggtatgactcgttgccctcctgga

SEQ ID NO: 1549023 - DNA, 25 bp, Homo sapien
tgccgcaggactgctggtatgactc

SEQ ID NO: 1549024 - DNA, 25 bp, Homo sapien
tcctggacccggcacacgtatatgc

SEQ ID NO: 1549025 - DNA, 25 bp, Homo sapien
ggcgcacgcggaggtaggtgccgca

SEQ ID NO: 1549026 - DNA, 25 bp, Homo sapien
gaaggtactggctctatccccactt

SEQ ID NO: 1549027 - DNA, 25 bp, Homo sapien
caaggaggtagtatggctcagagcc

SEQ ID NO: 1549028 - DNA, 25 bp, Homo sapien
tctgcagaggagaatgtccgtccct

SEQ ID NO: 1549029 - DNA, 25 bp, Homo sapien
taaaccgagtgtccccagcgggaca

SEQ ID NO: 1549030 - DNA, 25 bp, Homo sapien
ccctcggctgtgatgattcggttct

SEQ ID NO: 1549031 - DNA, 25 bp, Homo sapien
gaacaggaggatgatcccctcggct

SEQ ID NO: 1549032 - DNA, 25 bp, Homo sapien
gcaccaccgcgcagaacaggaggat

SEQ ID NO: 1549033 - DNA, 25 bp, Homo sapien
tgtgatgattcggttcttggtgccc

SEQ ID NO: 1549034 - DNA, 25 bp, Homo sapien
cccggctgactcagaggtccgaggg

SEQ ID NO: 1549035 - DNA, 25 bp, Homo sapien
ggcatccaacccgagcttctcgttc

SEQ ID NO: 1549036 - DNA, 25 bp, Homo sapien
atccccggcatccaacccgagcttc

SEQ ID NO: 1549037 - DNA, 25 bp, Homo sapien
atattcatccccggcatccaacccg

SEQ ID NO: 1549038 - DNA, 25 bp, Homo sapien
atccaacccgagcttctcgttctgc

SEQ ID NO: 1549039 - DNA, 25 bp, Homo sapien
catacatggagcagtcgtccaggtt

SEQ ID NO: 1549040 - DNA, 25 bp, Homo sapien
cctcatacatggagcagtcgtccag

SEQ ID NO: 1549041 - DNA, 25 bp, Homo sapien
tcatacatggagcagtcgtccaggt

SEQ ID NO: 1549042 - DNA, 25 bp, Homo sapien
tacatggagcagtcgtccaggttca

SEQ ID NO: 1549043 - DNA, 25 bp, Homo sapien
taggtgccctggaggccccgggaga

SEQ ID NO: 1549044 - DNA, 25 bp, Homo sapien
aggtgccctggaggccccgggagat

SEQ ID NO: 1549045 - DNA, 25 bp, Homo sapien
atcctggtaggtgccctggaggccc

SEQ ID NO: 1549046 - DNA, 25 bp, Homo sapien
ctggtaggtgccctggaggccccgg

SEQ ID NO: 1549047 - DNA, 25 bp, Homo sapien
gctggacatctcctatgttgaggct

SEQ ID NO: 1549048 - DNA, 25 bp, Homo sapien
tggacatctcctatgttgaggctgc

SEQ ID NO: 1549049 - DNA, 25 bp, Homo sapien
gacatctcctatgttgaggctgccc

SEQ ID NO: 1549050 - DNA, 25 bp, Homo sapien
agctggacatctcctatgttgaggc

SEQ ID NO: 1549051 - DNA, 25 bp, Homo sapien
cactgggggaatatgactaaggaag

SEQ ID NO: 1549052 - DNA, 25 bp, Homo sapien
aagggctgaaaggagaatgtcccag

SEQ ID NO: 1549053 - DNA, 25 bp, Homo sapien
ctgggggaatatgactaaggaagcc

SEQ ID NO: 1549054 - DNA, 25 bp, Homo sapien
agaagggctgaaaggagaatgtccc

SEQ ID NO: 1549055 - DNA, 25 bp, Homo sapien
ctacaatcagctcccctagaggcag

SEQ ID NO: 1549056 - DNA, 25 bp, Homo sapien
gattaagggctcattacccgctggg

SEQ ID NO: 1549057 - DNA, 25 bp, Homo sapien
gggtgacactaacgaggctgctaca

SEQ ID NO: 1549058 - DNA, 25 bp, Homo sapien
gcagtttagagggaagaagagtggg

SEQ ID NO: 1549059 - DNA, 25 bp, Homo sapien
cgaggtcgggctcggcgatcccggg

SEQ ID NO: 1549060 - DNA, 25 bp, Homo sapien
tgtccgcgcggaggtgaccggcggg

SEQ ID NO: 1549061 - DNA, 25 bp, Homo sapien
ccgaggtcgggctcggcgatcccgg

SEQ ID NO: 1549062 - DNA, 25 bp, Homo sapien
ctggtgtccgcgcggaggtgaccgg

SEQ ID NO: 1549063 - DNA, 25 bp, Homo sapien
gccaccggaaccgaagcctccgcgc

SEQ ID NO: 1549064 - DNA, 25 bp, Homo sapien
ccgcgtcgctctagccgccctgagt

SEQ ID NO: 1549065 - DNA, 25 bp, Homo sapien
ctgagtccacctttgcgcccagctc

SEQ ID NO: 1549066 - DNA, 25 bp, Homo sapien
tgccagccgctctagcccggctcct

SEQ ID NO: 1549067 - DNA, 25 bp, Homo sapien
tgctccaggtggaaagagaagccat

SEQ ID NO: 1549068 - DNA, 25 bp, Homo sapien
ctgctccaggtggaaagagaagcca

SEQ ID NO: 1549069 - DNA, 25 bp, Homo sapien
taatgccacggagcccgtgtcaggt

SEQ ID NO: 1549070 - DNA, 25 bp, Homo sapien
agtctttccaccgacatcttctgtg

SEQ ID NO: 1549071 - DNA, 25 bp, Homo sapien
tctgtgtccttaattagtctgacta

SEQ ID NO: 1549072 - DNA, 25 bp, Homo sapien
tctctgagtctttccaccgacatct

SEQ ID NO: 1549073 - DNA, 25 bp, Homo sapien
gctgtctgtcccttgaatctgtctc

SEQ ID NO: 1549074 - DNA, 25 bp, Homo sapien
gtgcgccttggtctgtccgcagcca

SEQ ID NO: 1549075 - DNA, 25 bp, Homo sapien
tgtctgtcccttgaatctgtctcat

SEQ ID NO: 1549076 - DNA, 25 bp, Homo sapien
ccttggctgtctgtcccttgaatct

SEQ ID NO: 1549077 - DNA, 25 bp, Homo sapien
ctgacgggaaccaggccaggccggg

SEQ ID NO: 1549078 - DNA, 25 bp, Homo sapien
tgacgggaaccaggccaggccggga

SEQ ID NO: 1549079 - DNA, 25 bp, Homo sapien
caggccaggccgggaggggcctggg

SEQ ID NO: 1549080 - DNA, 25 bp, Homo sapien
accaggccaggccgggaggggcctg

SEQ ID NO: 1549081 - DNA, 25 bp, Homo sapien
tgtctccagctcgttctcaaaatcc

SEQ ID NO: 1549082 - DNA, 25 bp, Homo sapien
tctccagctcgttctcaaaatcctc

SEQ ID NO: 1549083 - DNA, 25 bp, Homo sapien
agctcgttctcaaaatcctcatcct

SEQ ID NO: 1549084 - DNA, 25 bp, Homo sapien
gctcgttctcaaaatcctcatcctc

SEQ ID NO: 1549085 - DNA, 25 bp, Homo sapien
gggctgggcgccgcttcacctgctc

SEQ ID NO: 1549086 - DNA, 25 bp, Homo sapien
actgcagggccacgtgctgcaggag

SEQ ID NO: 1549087 - DNA, 25 bp, Homo sapien
tgtaagcctgttgaggtcacgtggc

SEQ ID NO: 1549088 - DNA, 25 bp, Homo sapien
taattcgctaaaagctgtgcctgtc

SEQ ID NO: 1549089 - DNA, 25 bp, Homo sapien
gagttcacggaaaggtgctgccaca

SEQ ID NO: 1549090 - DNA, 25 bp, Homo sapien
gcactgagatctaccctgggcactt

SEQ ID NO: 1549091 - DNA, 25 bp, Homo sapien
tccggaggcttctggatccacaatt

SEQ ID NO: 1549092 - DNA, 25 bp, Homo sapien
caattgtgtggtctgccttgtgagc

SEQ ID NO: 1549093 - DNA, 25 bp, Homo sapien
caaccgtgaatgactgcgtgctggc

SEQ ID NO: 1549094 - DNA, 25 bp, Homo sapien
gttttcttgtttccagatcagggcc

SEQ ID NO: 1549095 - DNA, 25 bp, Homo sapien
tgctgggttttctagactctgcggg

SEQ ID NO: 1549096 - DNA, 25 bp, Homo sapien
tggtagtcagcacgatccctgggct

SEQ ID NO: 1549097 - DNA, 25 bp, Homo sapien
tgagggagctatgcgagaataaacc

SEQ ID NO: 1549098 - DNA, 25 bp, Homo sapien
catatctgatggtttggcgtccgga

SEQ ID NO: 1549099 - DNA, 25 bp, Homo sapien
ggttgatccatctgtgtcccagatg

SEQ ID NO: 1549100 - DNA, 25 bp, Homo sapien
gtgcatactgagggcttggaaagaa

SEQ ID NO: 1549101 - DNA, 25 bp, Homo sapien
tctgtcattcgtcaagcatttcctg

SEQ ID NO: 1549102 - DNA, 25 bp, Homo sapien
agtggcaaagttaggattcgaatcc

SEQ ID NO: 1549103 - DNA, 25 bp, Homo sapien
gcctccttggggcccagtgagccca

SEQ ID NO: 1549104 - DNA, 25 bp, Homo sapien
agctgtggtagaagtccaggaaggc

SEQ ID NO: 1549105 - DNA, 25 bp, Homo sapien
caagttcaaaggcgacgttgggagg

SEQ ID NO: 1549106 - DNA, 25 bp, Homo sapien
ctccaacagccacacgtcctgaggc

SEQ ID NO: 1549107 - DNA, 25 bp, Homo sapien
ccaacagccacacgtcctgaggccg

SEQ ID NO: 1549108 - DNA, 25 bp, Homo sapien
gactccaacagccacacgtcctgag

SEQ ID NO: 1549109 - DNA, 25 bp, Homo sapien
actccaacagccacacgtcctgagg

SEQ ID NO: 1549110 - DNA, 25 bp, Homo sapien
ggcgtcatgcccatgagccgcttgg

SEQ ID NO: 1549111 - DNA, 25 bp, Homo sapien
tcccgggcctcgtagctggctcggt

SEQ ID NO: 1549112 - DNA, 25 bp, Homo sapien
agccgcttggaacggaagtcctcca

SEQ ID NO: 1549113 - DNA, 25 bp, Homo sapien
tcggagatgaggtcagccctagtgc

SEQ ID NO: 1549114 - DNA, 25 bp, Homo sapien
tcttttcttcgtcggtagagatggt

SEQ ID NO: 1549115 - DNA, 25 bp, Homo sapien
ttcttcgtcggtagagatggtatgt

SEQ ID NO: 1549116 - DNA, 25 bp, Homo sapien
ctcttttcttcgtcggtagagatgg

SEQ ID NO: 1549117 - DNA, 25 bp, Homo sapien
ttttcttcgtcggtagagatggtat

SEQ ID NO: 1549118 - DNA, 25 bp, Homo sapien
gtacaggccaatggcgttgaccacg

SEQ ID NO: 1549119 - DNA, 25 bp, Homo sapien
gcaccccaaggtggcgcatgtacag

SEQ ID NO: 1549120 - DNA, 25 bp, Homo sapien
gccaatggcgttgaccacggcagca

SEQ ID NO: 1549121 - DNA, 25 bp, Homo sapien
tggcgcatgtacaggccaatggcgt

SEQ ID NO: 1549122 - DNA, 25 bp, Homo sapien
tccagcgggcggcatccaggatgct

SEQ ID NO: 1549123 - DNA, 25 bp, Homo sapien
tggcaggctcgtccgaccgccggtt

SEQ ID NO: 1549124 - DNA, 25 bp, Homo sapien
tccccggttccagcgggcggcatcc

SEQ ID NO: 1549125 - DNA, 25 bp, Homo sapien
cttggtcttggcaggctcgtccgac

SEQ ID NO: 1549126 - DNA, 25 bp, Homo sapien
ctgctttgaggtgtcgaaaatctgg

SEQ ID NO: 1549127 - DNA, 25 bp, Homo sapien
tgctttgaggtgtcgaaaatctgga

SEQ ID NO: 1549128 - DNA, 25 bp, Homo sapien
gcccaggagccccgatattccggtc

SEQ ID NO: 1549129 - DNA, 25 bp, Homo sapien
gagccccgatattccggtcccgaga

SEQ ID NO: 1549130 - DNA, 25 bp, Homo sapien
ttccggtcccgagagggcatcccca

SEQ ID NO: 1549131 - DNA, 25 bp, Homo sapien
agagggcatccccacgcctcccttc

SEQ ID NO: 1549132 - DNA, 25 bp, Homo sapien
tcggtactctctgggggcgccaagg

SEQ ID NO: 1549133 - DNA, 25 bp, Homo sapien
tcggccccctcgtcggtactctctg

SEQ ID NO: 1549134 - DNA, 25 bp, Homo sapien
ggcgccaaggactccaggctcattg

SEQ ID NO: 1549135 - DNA, 25 bp, Homo sapien
tcattgggccctgcggggatgagtc

SEQ ID NO: 1549136 - DNA, 25 bp, Homo sapien
atggggagcaagagcctgggacagg

SEQ ID NO: 1549137 - DNA, 25 bp, Homo sapien
agggagaggaatggccagacccaga

SEQ ID NO: 1549138 - DNA, 25 bp, Homo sapien
acccacccaccagcgcccagtaagc

SEQ ID NO: 1549139 - DNA, 25 bp, Homo sapien
cagaggagcatggggagcaagagcc

SEQ ID NO: 1549140 - DNA, 25 bp, Homo sapien
caaagggtccccaaagcagcggcac

SEQ ID NO: 1549141 - DNA, 25 bp, Homo sapien
ccaaagcagcggcacaaggacgggc

SEQ ID NO: 1549142 - DNA, 25 bp, Homo sapien
gcggcacaaggacgggcaggaggca

SEQ ID NO: 1549143 - DNA, 25 bp, Homo sapien
ggcccagatggaacctgacccacct

SEQ ID NO: 1549144 - DNA, 25 bp, Homo sapien
caaacatgcaacagaagagaggaga

SEQ ID NO: 1549145 - DNA, 25 bp, Homo sapien
aagacaagaacagagacgaagagaa

SEQ ID NO: 1549146 - DNA, 25 bp, Homo sapien
gaccaggacagggatcaaacatgca

SEQ ID NO: 1549147 - DNA, 25 bp, Homo sapien
ggaacccaggatggagcataggact

SEQ ID NO: 1549148 - DNA, 25 bp, Homo sapien
tcgggcagggccaagcactgccgtg

SEQ ID NO: 1549149 - DNA, 25 bp, Homo sapien
aggccggcggcggtcactcacccgc

SEQ ID NO: 1549150 - DNA, 25 bp, Homo sapien
atgtccacgtcgctccgggagcggc

SEQ ID NO: 1549151 - DNA, 25 bp, Homo sapien
gcaggctctctgagcgccccagacg

SEQ ID NO: 1549152 - DNA, 25 bp, Homo sapien
gagttcccagatctctagaagcatt

SEQ ID NO: 1549153 - DNA, 25 bp, Homo sapien
gaccaggtctctagatcggaccaca

SEQ ID NO: 1549154 - DNA, 25 bp, Homo sapien
cttggcattcgatgcccgcagggtg

SEQ ID NO: 1549155 - DNA, 25 bp, Homo sapien
tctgtgactctgacaacaatccctc

SEQ ID NO: 1549156 - DNA, 25 bp, Homo sapien
ctcttagagcgttcaaccccggtca

SEQ ID NO: 1549157 - DNA, 25 bp, Homo sapien
cagaggccttgttagggccccagct

SEQ ID NO: 1549158 - DNA, 25 bp, Homo sapien
ttagagcgttcaaccccggtcagtg

SEQ ID NO: 1549159 - DNA, 25 bp, Homo sapien
cttcagcctcttagagcgttcaacc

SEQ ID NO: 1549160 - DNA, 25 bp, Homo sapien
gagttcccgccagccgggaggctct

SEQ ID NO: 1549161 - DNA, 25 bp, Homo sapien
tcttctggttcaagctccagtcccg

SEQ ID NO: 1549162 - DNA, 25 bp, Homo sapien
gacgagttcccgccagccgggaggc

SEQ ID NO: 1549163 - DNA, 25 bp, Homo sapien
ttctggttcaagctccagtcccgac

SEQ ID NO: 1549164 - DNA, 25 bp, Homo sapien
cctcctgccgcttcacctggctctt

SEQ ID NO: 1549165 - DNA, 25 bp, Homo sapien
gacctcctgccgcttcacctggctc

SEQ ID NO: 1549166 - DNA, 25 bp, Homo sapien
ctcctgccgcttcacctggctcttg

SEQ ID NO: 1549167 - DNA, 25 bp, Homo sapien
atgacctcctgccgcttcacctggc

SEQ ID NO: 1549168 - DNA, 25 bp, Homo sapien
cagcatgcgcacgtgggccgcctct

SEQ ID NO: 1549169 - DNA, 25 bp, Homo sapien
gaagaagaggtcgtgcagcacccgc

SEQ ID NO: 1549170 - DNA, 25 bp, Homo sapien
agcacccgcagcatgcgcacgtggg

SEQ ID NO: 1549171 - DNA, 25 bp, Homo sapien
gggaagaacaggcattctgccatgg

SEQ ID NO: 1549172 - DNA, 25 bp, Homo sapien
agcacgtctccgatctcctcgatga

SEQ ID NO: 1549173 - DNA, 25 bp, Homo sapien
ttcatcaggcgatcgaggaacaggg

SEQ ID NO: 1549174 - DNA, 25 bp, Homo sapien
tgcctccgcttcatcaggcgatcga

SEQ ID NO: 1549175 - DNA, 25 bp, Homo sapien
gatctcctcgatgaggtagccactc

SEQ ID NO: 1549176 - DNA, 25 bp, Homo sapien
gctttgagctgctctaaggcaaatg

SEQ ID NO: 1549177 - DNA, 25 bp, Homo sapien
ggcacagaaccgagggtccttgcgt

SEQ ID NO: 1549178 - DNA, 25 bp, Homo sapien
gaaccgagggtccttgcgttgcttg

SEQ ID NO: 1549179 - DNA, 25 bp, Homo sapien
aggcaaatgactggcggctgcagaa

SEQ ID NO: 1549180 - DNA, 25 bp, Homo sapien
ctgtgttctgcccgatgctctgcag

SEQ ID NO: 1549181 - DNA, 25 bp, Homo sapien
gttctgcccgatgctctgcaggagc

SEQ ID NO: 1549182 - DNA, 25 bp, Homo sapien
gcaggagcagggggtacttggtcag

SEQ ID NO: 1549183 - DNA, 25 bp, Homo sapien
tgttctgcccgatgctctgcaggag

SEQ ID NO: 1549184 - DNA, 25 bp, Homo sapien
agaatttcccggcagcactcggctg

SEQ ID NO: 1549185 - DNA, 25 bp, Homo sapien
cactttctcccgttctgtgggctct

SEQ ID NO: 1549186 - DNA, 25 bp, Homo sapien
tggttgacgtggtgtagaatttccc

SEQ ID NO: 1549187 - DNA, 25 bp, Homo sapien
tcctccatgtcacgcacggcttggt

SEQ ID NO: 1549188 - DNA, 25 bp, Homo sapien
gcattatggggacaagctaagtgct

SEQ ID NO: 1549189 - DNA, 25 bp, Homo sapien
ggcagagacgggagcattatgggga

SEQ ID NO: 1549190 - DNA, 25 bp, Homo sapien
cagagacgggagcattatggggaca

SEQ ID NO: 1549191 - DNA, 25 bp, Homo sapien
acgggagcattatggggacaagcta

SEQ ID NO: 1549192 - DNA, 25 bp, Homo sapien
tccaggcgccgctgatagtccttga

SEQ ID NO: 1549193 - DNA, 25 bp, Homo sapien
ttgaactcgctcagcatagggtcgc

SEQ ID NO: 1549194 - DNA, 25 bp, Homo sapien
aactcgctcagcatagggtcgctgc

SEQ ID NO: 1549195 - DNA, 25 bp, Homo sapien
gctcagcatagggtcgctgctctgc

SEQ ID NO: 1549196 - DNA, 25 bp, Homo sapien
agggcagtggccggggatgaccaca

SEQ ID NO: 1549197 - DNA, 25 bp, Homo sapien
ggcagtggccggggatgaccacagg

SEQ ID NO: 1549198 - DNA, 25 bp, Homo sapien
tgtgcaggttggcagggggtgattg

SEQ ID NO: 1549199 - DNA, 25 bp, Homo sapien
tgcaggttggcagggggtgattggg

SEQ ID NO: 1549200 - DNA, 25 bp, Homo sapien
ccactgccttgtccttagtcacccg

SEQ ID NO: 1549201 - DNA, 25 bp, Homo sapien
ttagtcacccgccacgtcagtgggc

SEQ ID NO: 1549202 - DNA, 25 bp, Homo sapien
cgtcagtgggccctcgtggaccaat

SEQ ID NO: 1549203 - DNA, 25 bp, Homo sapien
tgggccctcgtggaccaatttcttc

SEQ ID NO: 1549204 - DNA, 25 bp, Homo sapien
gggccgcagcatggtcttgccatcg

SEQ ID NO: 1549205 - DNA, 25 bp, Homo sapien
gtcagtgtccggctatgggacttga

SEQ ID NO: 1549206 - DNA, 25 bp, Homo sapien
gtccggctatgggacttgagcagca

SEQ ID NO: 1549207 - DNA, 25 bp, Homo sapien
ttgccatcgggcgtgggcgtcagtg

SEQ ID NO: 1549208 - DNA, 25 bp, Homo sapien
tttttccgctccgacacagtctgtg

SEQ ID NO: 1549209 - DNA, 25 bp, Homo sapien
ttttccgctccgacacagtctgtgc

SEQ ID NO: 1549210 - DNA, 25 bp, Homo sapien
cagctcgtatatctgggcctcctgg

SEQ ID NO: 1549211 - DNA, 25 bp, Homo sapien
gtgccaccagctcgtatatctgggc

SEQ ID NO: 1549212 - DNA, 25 bp, Homo sapien
gactttcagggatccggcagtctca

SEQ ID NO: 1549213 - DNA, 25 bp, Homo sapien
atccggcagtctcagtgatgagagc

SEQ ID NO: 1549214 - DNA, 25 bp, Homo sapien
tcagggatccggcagtctcagtgat

SEQ ID NO: 1549215 - DNA, 25 bp, Homo sapien
cagggactttcagggatccggcagt

SEQ ID NO: 1549216 - DNA, 25 bp, Homo sapien
cagtggtggggtcggcacatgcgca

SEQ ID NO: 1549217 - DNA, 25 bp, Homo sapien
tggtggggtcggcacatgcgcacac

SEQ ID NO: 1549218 - DNA, 25 bp, Homo sapien
agtggtggggtcggcacatgcgcac

SEQ ID NO: 1549219 - DNA, 25 bp, Homo sapien
gcagtggtggggtcggcacatgcgc

SEQ ID NO: 1549220 - DNA, 25 bp, Homo sapien
cagagaggcccagacaatggaagac

SEQ ID NO: 1549221 - DNA, 25 bp, Homo sapien
ggcagggaggtccggagacagagac

SEQ ID NO: 1549222 - DNA, 25 bp, Homo sapien
aggcagggaggtccggagacagaga

SEQ ID NO: 1549223 - DNA, 25 bp, Homo sapien
acagagaggcccagacaatggaaga

SEQ ID NO: 1549224 - DNA, 25 bp, Homo sapien
catcagctggagacgtctctcggcc

SEQ ID NO: 1549225 - DNA, 25 bp, Homo sapien
tggagacgtctctcggccaccattg

SEQ ID NO: 1549226 - DNA, 25 bp, Homo sapien
cattgccgttctcagagctgctgag

SEQ ID NO: 1549227 - DNA, 25 bp, Homo sapien
tcggccaccattgccgttctcagag

SEQ ID NO: 1549228 - DNA, 25 bp, Homo sapien
cagaagggcaggaggtcactgagga

SEQ ID NO: 1549229 - DNA, 25 bp, Homo sapien
tcactgaggattctctcggtccggg

SEQ ID NO: 1549230 - DNA, 25 bp, Homo sapien
ggcaggaggtcactgaggattctct

SEQ ID NO: 1549231 - DNA, 25 bp, Homo sapien
gaagggccgtggcagcgagctggcc

SEQ ID NO: 1549232 - DNA, 25 bp, Homo sapien
taaggaaatttttgacgtggagagc

SEQ ID NO: 1549233 - DNA, 25 bp, Homo sapien
ctgagcagatggggttcggggatcc

SEQ ID NO: 1549234 - DNA, 25 bp, Homo sapien
gcagatggggttcggggatccaaag

SEQ ID NO: 1549235 - DNA, 25 bp, Homo sapien
aggctgagcagatggggttcgggga

SEQ ID NO: 1549236 - DNA, 25 bp, Homo sapien
tcggggatccaaagggaggtgaaga

SEQ ID NO: 1549237 - DNA, 25 bp, Homo sapien
cattgtcttcctccgccggaaacag

SEQ ID NO: 1549238 - DNA, 25 bp, Homo sapien
ttcctccgccggaaacagaagctgc

SEQ ID NO: 1549239 - DNA, 25 bp, Homo sapien
tttcctgggtccgtgctgggctcag

SEQ ID NO: 1549240 - DNA, 25 bp, Homo sapien
ccatccccatctcgaggaggccccg

SEQ ID NO: 1549241 - DNA, 25 bp, Homo sapien
tcagggcacccctggcccgtcccgc

SEQ ID NO: 1549242 - DNA, 25 bp, Homo sapien
ctcagggcacccctggcccgtcccg

SEQ ID NO: 1549243 - DNA, 25 bp, Homo sapien
gaggggtctcaggcggcaaaattcc

SEQ ID NO: 1549244 - DNA, 25 bp, Homo sapien
tcaggcggcaaaattcctcctccaa

SEQ ID NO: 1549245 - DNA, 25 bp, Homo sapien
agagttccccccaagctgagacagg

SEQ ID NO: 1549246 - DNA, 25 bp, Homo sapien
gtctcaggcggcaaaattcctcctc

SEQ ID NO: 1549247 - DNA, 25 bp, Homo sapien
taggagaagaggggagacggggaga

SEQ ID NO: 1549248 - DNA, 25 bp, Homo sapien
ggggatgtaggagaagaggggagac

SEQ ID NO: 1549249 - DNA, 25 bp, Homo sapien
gagaagaggggagacggggagagat

SEQ ID NO: 1549250 - DNA, 25 bp, Homo sapien
gggatgtaggagaagaggggagacg

SEQ ID NO: 1549251 - DNA, 25 bp, Homo sapien
atggcccgggtcaccgtggtgccct

SEQ ID NO: 1549252 - DNA, 25 bp, Homo sapien
gtataaaaacagagcgaaggcactt

SEQ ID NO: 1549253 - DNA, 25 bp, Homo sapien
gtggcccccacaggcaatactgaga

SEQ ID NO: 1549254 - DNA, 25 bp, Homo sapien
tcatgcggggccagtaaccccagct

SEQ ID NO: 1549255 - DNA, 25 bp, Homo sapien
aagatgagcagaaaagaccctctct

SEQ ID NO: 1549256 - DNA, 25 bp, Homo sapien
gccggcgcagcttagagaaatcaaa

SEQ ID NO: 1549257 - DNA, 25 bp, Homo sapien
ggtctgagacaagggcacgtgtcac

SEQ ID NO: 1549258 - DNA, 25 bp, Homo sapien
tgtctcgagaggcagtcacagaagc

SEQ ID NO: 1549259 - DNA, 25 bp, Homo sapien
acaccattcggagcgctgctgtccg

SEQ ID NO: 1549260 - DNA, 25 bp, Homo sapien
tcgccacccctcaactgacaccatt

SEQ ID NO: 1549261 - DNA, 25 bp, Homo sapien
aactgacaccattcggagcgctgct

SEQ ID NO: 1549262 - DNA, 25 bp, Homo sapien
ctcaactgacaccattcggagcgct

SEQ ID NO: 1549263 - DNA, 25 bp, Homo sapien
catcatggcagttcctacctcacag

SEQ ID NO: 1549264 - DNA, 25 bp, Homo sapien
catccctgtgggactttggccaagt

SEQ ID NO: 1549265 - DNA, 25 bp, Homo sapien
tgtgaaatgggcatccatcatggca

SEQ ID NO: 1549266 - DNA, 25 bp, Homo sapien
tgcattcaagtccaggctcacctca

SEQ ID NO: 1549267 - DNA, 25 bp, Homo sapien
gtcgcgattcgacatctgttttcaa

SEQ ID NO: 1549268 - DNA, 25 bp, Homo sapien
gcctccatatatctgcgagccgagc

SEQ ID NO: 1549269 - DNA, 25 bp, Homo sapien
tctttgcgcgtctatctcgctgtct

SEQ ID NO: 1549270 - DNA, 25 bp, Homo sapien
aaattatattccatcgatcgcgccc

SEQ ID NO: 1549271 - DNA, 25 bp, Homo sapien
ccatatgtccctctgtccgtgtatc

SEQ ID NO: 1549272 - DNA, 25 bp, Homo sapien
tatctcctatccaggctgcgtgtgt

SEQ ID NO: 1549273 - DNA, 25 bp, Homo sapien
cggtccaggcttgcgtgtccagcag

SEQ ID NO: 1549274 - DNA, 25 bp, Homo sapien
cgtgtgtgcgggtccgtgttccagt

SEQ ID NO: 1549275 - DNA, 25 bp, Homo sapien
ttggtgagatccgacagagctgtcc

SEQ ID NO: 1549276 - DNA, 25 bp, Homo sapien
gaggctgaaccttctctgtcaggca

SEQ ID NO: 1549277 - DNA, 25 bp, Homo sapien
gaagttctcttctagcctctcagca

SEQ ID NO: 1549278 - DNA, 25 bp, Homo sapien
tacttggtgcagtaccagctgtgct

SEQ ID NO: 1549279 - DNA, 25 bp, Homo sapien
tcatgagtgatttgcggccgcctct

SEQ ID NO: 1549280 - DNA, 25 bp, Homo sapien
gcaaaacattcaatcaggcggatta

SEQ ID NO: 1549281 - DNA, 25 bp, Homo sapien
taatgtttcaatttgggcgaaagca

SEQ ID NO: 1549282 - DNA, 25 bp, Homo sapien
tcgtcccgtgttgtttaatgtttca

SEQ ID NO: 1549283 - DNA, 25 bp, Homo sapien
tccagctggctggttggaagtgaca

SEQ ID NO: 1549284 - DNA, 25 bp, Homo sapien
taattggagatctgtttgggaggcc

SEQ ID NO: 1549285 - DNA, 25 bp, Homo sapien
gctaggatcatacgctgcgctccag

SEQ ID NO: 1549286 - DNA, 25 bp, Homo sapien
cagcttgggtcaaaaaatgaggtcc

SEQ ID NO: 1549287 - DNA, 25 bp, Homo sapien
tacattctctatctgcgcaccttgg

SEQ ID NO: 1549288 - DNA, 25 bp, Homo sapien
ttcggcgcctgttacattctctatc

SEQ ID NO: 1549289 - DNA, 25 bp, Homo sapien
tctggctgtctttttcggcgcctgt

SEQ ID NO: 1549290 - DNA, 25 bp, Homo sapien
cattctctatctgcgcaccttggag

SEQ ID NO: 1549291 - DNA, 25 bp, Homo sapien
cagcgcctcgtacgcaacgtggagt

SEQ ID NO: 1549292 - DNA, 25 bp, Homo sapien
tatgtgttcgtgttcctgggcctca

SEQ ID NO: 1549293 - DNA, 25 bp, Homo sapien
ggagcaccttcgtggaccagcagcg

SEQ ID NO: 1549294 - DNA, 25 bp, Homo sapien
caacgtggagtactaccagagcaac

SEQ ID NO: 1549295 - DNA, 25 bp, Homo sapien
catggaaaatggcaaggagctgcag

SEQ ID NO: 1549296 - DNA, 25 bp, Homo sapien
gaggcggccacagcgagacaggcat

SEQ ID NO: 1549297 - DNA, 25 bp, Homo sapien
caaggagctgcagaggcggccacag

SEQ ID NO: 1549298 - DNA, 25 bp, Homo sapien
cagggagaggcggacagcatggaaa

SEQ ID NO: 1549299 - DNA, 25 bp, Homo sapien
ctatctagcggcaaccacagtcagc

SEQ ID NO: 1549300 - DNA, 25 bp, Homo sapien
agcataacctccacgagggctggga

SEQ ID NO: 1549301 - DNA, 25 bp, Homo sapien
cagaagatgggaaatcaggaaggaa

SEQ ID NO: 1549302 - DNA, 25 bp, Homo sapien
tgcacacttgagcataacctccacg

SEQ ID NO: 1549303 - DNA, 25 bp, Homo sapien
gccttgcaataatgaacgcatggat

SEQ ID NO: 1549304 - DNA, 25 bp, Homo sapien
tccatgctgctagtaaaggtgccct

SEQ ID NO: 1549305 - DNA, 25 bp, Homo sapien
tgcagcttcaggagaacaaccggct

SEQ ID NO: 1549306 - DNA, 25 bp, Homo sapien
cagctttgtaggtgagtcggtgcca

SEQ ID NO: 1549307 - DNA, 25 bp, Homo sapien
tcgagctaaaggtcagttcccgcgt

SEQ ID NO: 1549308 - DNA, 25 bp, Homo sapien
cagaagacagaatgcgacagtcggc

SEQ ID NO: 1549309 - DNA, 25 bp, Homo sapien
taatgcagctggtgcaagggtcttg

SEQ ID NO: 1549310 - DNA, 25 bp, Homo sapien
gacagtcggcgcctgcttagaatga

SEQ ID NO: 1549311 - DNA, 25 bp, Homo sapien
tcgagtggagttgctgtcagagaca

SEQ ID NO: 1549312 - DNA, 25 bp, Homo sapien
tagaattcaaagagtacaaggcagg

SEQ ID NO: 1549313 - DNA, 25 bp, Homo sapien
caccatcctcccagaaatgtctatg

SEQ ID NO: 1549314 - DNA, 25 bp, Homo sapien
gcacatcgttgctctttctttaaca

SEQ ID NO: 1549315 - DNA, 25 bp, Homo sapien
catatacaagcacatcgttgctctt

SEQ ID NO: 1549316 - DNA, 25 bp, Homo sapien
cgtcctggtcccagactggctcttt

SEQ ID NO: 1549317 - DNA, 25 bp, Homo sapien
ggatatgtctttccgcttttgagcc

SEQ ID NO: 1549318 - DNA, 25 bp, Homo sapien
gtccagtctctatctcctggatatg

SEQ ID NO: 1549319 - DNA, 25 bp, Homo sapien
tgctgttagcccaggttgctctcgg

SEQ ID NO: 1549320 - DNA, 25 bp, Homo sapien
ccccatatctgaggagtgctttctg

SEQ ID NO: 1549321 - DNA, 25 bp, Homo sapien
cacttctctggacagtcttgacggc

SEQ ID NO: 1549322 - DNA, 25 bp, Homo sapien
ggtaccctggtgtctgtaggcctcc

SEQ ID NO: 1549323 - DNA, 25 bp, Homo sapien
cattactgccccttgtctccgaggt

SEQ ID NO: 1549324 - DNA, 25 bp, Homo sapien
tgccgttcggccaatcgacgttcat

SEQ ID NO: 1549325 - DNA, 25 bp, Homo sapien
aatcattgcccgctcgggccctgcc

SEQ ID NO: 1549326 - DNA, 25 bp, Homo sapien
acggacggccggacgcaaccaatca

SEQ ID NO: 1549327 - DNA, 25 bp, Homo sapien
acggccggacgcaaccaatcattgc

SEQ ID NO: 1549328 - DNA, 25 bp, Homo sapien
tgcttccgccgtctcgcacgccccg

SEQ ID NO: 1549329 - DNA, 25 bp, Homo sapien
cttgcacggccaccctaacgctgcg

SEQ ID NO: 1549330 - DNA, 25 bp, Homo sapien
ctctcgcctgctccgtagcctcgct

SEQ ID NO: 1549331 - DNA, 25 bp, Homo sapien
cgctctagctctcgccgtcgcctct

SEQ ID NO: 1549332 - DNA, 25 bp, Homo sapien
ctccagcccggcccccgcccggctg

SEQ ID NO: 1549333 - DNA, 25 bp, Homo sapien
tccagcccggcccccgcccggctgc

SEQ ID NO: 1549334 - DNA, 25 bp, Homo sapien
ttctcccaggttctcagacttcttt

SEQ ID NO: 1549335 - DNA, 25 bp, Homo sapien
gacttctttttacactcagaccact

SEQ ID NO: 1549336 - DNA, 25 bp, Homo sapien
tttacactcagaccactcaaactgc

SEQ ID NO: 1549337 - DNA, 25 bp, Homo sapien
tctttttacactcagaccactcaaa

SEQ ID NO: 1549338 - DNA, 25 bp, Homo sapien
agtgatccatacagctggttgcact

SEQ ID NO: 1549339 - DNA, 25 bp, Homo sapien
gatccatacagctggttgcactcag

SEQ ID NO: 1549340 - DNA, 25 bp, Homo sapien
cggtgctcaatgtacaggactgtct

SEQ ID NO: 1549341 - DNA, 25 bp, Homo sapien
tcagagcagacatagcggtgctcaa

SEQ ID NO: 1549342 - DNA, 25 bp, Homo sapien
cacaggaggccctagaacaactggg

SEQ ID NO: 1549343 - DNA, 25 bp, Homo sapien
ggctctcctgcacaagggtctgata

SEQ ID NO: 1549344 - DNA, 25 bp, Homo sapien
tgatagaggcccgtgcctgaagctg

SEQ ID NO: 1549345 - DNA, 25 bp, Homo sapien
tctgcctttcggtatgagtgctcca

SEQ ID NO: 1549346 - DNA, 25 bp, Homo sapien
tgggagcactcagagcacttgtaga

SEQ ID NO: 1549347 - DNA, 25 bp, Homo sapien
gagcacttgtagaggagcagctcca

SEQ ID NO: 1549348 - DNA, 25 bp, Homo sapien
ctgggagcactcagagcacttgtag

SEQ ID NO: 1549349 - DNA, 25 bp, Homo sapien
gcacttgtagaggagcagctccacc

SEQ ID NO: 1549350 - DNA, 25 bp, Homo sapien
taaggcaggctcctgagactcgggt

SEQ ID NO: 1549351 - DNA, 25 bp, Homo sapien
tctgcaggtgacgaggcctgcacct

SEQ ID NO: 1549352 - DNA, 25 bp, Homo sapien
aatggcttcaccattgcgcagctcg

SEQ ID NO: 1549353 - DNA, 25 bp, Homo sapien
gcagctcgtaactgtggtcagaagc

SEQ ID NO: 1549354 - DNA, 25 bp, Homo sapien
aagggctagggaagacacgactgca

SEQ ID NO: 1549355 - DNA, 25 bp, Homo sapien
tacacacaggaagtgtgactcgctg

SEQ ID NO: 1549356 - DNA, 25 bp, Homo sapien
aggagggcctctgtgccgaaggcca

SEQ ID NO: 1549357 - DNA, 25 bp, Homo sapien
tccaaggtgctggtccagactggaa

SEQ ID NO: 1549358 - DNA, 25 bp, Homo sapien
catgagtacgccggtgataaaggaa

SEQ ID NO: 1549359 - DNA, 25 bp, Homo sapien
cccatgagtacgccggtgataaagg

SEQ ID NO: 1549360 - DNA, 25 bp, Homo sapien
tgagtacgccggtgataaaggaact

SEQ ID NO: 1549361 - DNA, 25 bp, Homo sapien
agtacgccggtgataaaggaacttg

SEQ ID NO: 1549362 - DNA, 25 bp, Homo sapien
ctctggtgggactggtgttgtgggc

SEQ ID NO: 1549363 - DNA, 25 bp, Homo sapien
tcagggaaaccaatgacaggttcct

SEQ ID NO: 1549364 - DNA, 25 bp, Homo sapien
atgacaggttcctctggtgggactg

SEQ ID NO: 1549365 - DNA, 25 bp, Homo sapien
gctcagggaaaccaatgacaggttc

SEQ ID NO: 1549366 - DNA, 25 bp, Homo sapien
caggtggttacgcacgtgagacttc

SEQ ID NO: 1549367 - DNA, 25 bp, Homo sapien
cctcagtgtggagctttgcgtgaaa

SEQ ID NO: 1549368 - DNA, 25 bp, Homo sapien
ggtgaaaacgcaccccacattcctg

SEQ ID NO: 1549369 - DNA, 25 bp, Homo sapien
acaaaacgttggtgccgggtcagct

SEQ ID NO: 1549370 - DNA, 25 bp, Homo sapien
ccacaggatgggcagcggtggggct

SEQ ID NO: 1549371 - DNA, 25 bp, Homo sapien
tggggctggcgcccggcatggacca

SEQ ID NO: 1549372 - DNA, 25 bp, Homo sapien
aaggcagccccacaggatgggcagc

SEQ ID NO: 1549373 - DNA, 25 bp, Homo sapien
cccggagccgcagtgaggaggggaa

SEQ ID NO: 1549374 - DNA, 25 bp, Homo sapien
aggtgccacactcaaagcgccgtgg

SEQ ID NO: 1549375 - DNA, 25 bp, Homo sapien
tactctgacggaacgctttgccaca

SEQ ID NO: 1549376 - DNA, 25 bp, Homo sapien
gcctcggccagagggtagatctcaa

SEQ ID NO: 1549377 - DNA, 25 bp, Homo sapien
gaaggagcggtagctcttgccacag

SEQ ID NO: 1549378 - DNA, 25 bp, Homo sapien
gcacccccctcacgagagaataaat

SEQ ID NO: 1549379 - DNA, 25 bp, Homo sapien
cctttatgtgtgtcaaggaccccag

SEQ ID NO: 1549380 - DNA, 25 bp, Homo sapien
aggaagggacacagtatgtacagat

SEQ ID NO: 1549381 - DNA, 25 bp, Homo sapien
gaggtgccaaagaggaagtcgggca

SEQ ID NO: 1549382 - DNA, 25 bp, Homo sapien
atttttggggtcaccagtgctaaga

SEQ ID NO: 1549383 - DNA, 25 bp, Homo sapien
tggcaactcagtctttattgatggt

SEQ ID NO: 1549384 - DNA, 25 bp, Homo sapien
tcatttttggggtcaccagtgctaa

SEQ ID NO: 1549385 - DNA, 25 bp, Homo sapien
cagtctttattgatggtttcatttt

SEQ ID NO: 1549386 - DNA, 25 bp, Homo sapien
cagagccatgggacctctagtggca

SEQ ID NO: 1549387 - DNA, 25 bp, Homo sapien
tccatctagcagtgaagtgaaggcc

SEQ ID NO: 1549388 - DNA, 25 bp, Homo sapien
tatgagagccatgcccatgaacacc

SEQ ID NO: 1549389 - DNA, 25 bp, Homo sapien
tctagtggcaagagagccatgctac

SEQ ID NO: 1549390 - DNA, 25 bp, Homo sapien
tcccaagctttaactacagctgtga

SEQ ID NO: 1549391 - DNA, 25 bp, Homo sapien
accaaatcccaagctttaactacag

SEQ ID NO: 1549392 - DNA, 25 bp, Homo sapien
ctttaactacagctgtgaaaccaaa

SEQ ID NO: 1549393 - DNA, 25 bp, Homo sapien
tccaaccctcacacctaggaaaaga

SEQ ID NO: 1549394 - DNA, 25 bp, Homo sapien
cacgagccattgaaatcagggtggg

SEQ ID NO: 1549395 - DNA, 25 bp, Homo sapien
tgttgcagtgaaggacacgagccat

SEQ ID NO: 1549396 - DNA, 25 bp, Homo sapien
gcagtgaaggacacgagccattgaa

SEQ ID NO: 1549397 - DNA, 25 bp, Homo sapien
ctcaaaccaaagtgttgcagtgaag

SEQ ID NO: 1549398 - DNA, 25 bp, Homo sapien
gaaggcctgcggacaacttttcatc

SEQ ID NO: 1549399 - DNA, 25 bp, Homo sapien
ggtgggctaggccattttgccaagt

SEQ ID NO: 1549400 - DNA, 25 bp, Homo sapien
gttctagctctcacaagtccctcct

SEQ ID NO: 1549401 - DNA, 25 bp, Homo sapien
agttcaagggaaggcctgcggacaa

SEQ ID NO: 1549402 - DNA, 25 bp, Homo sapien
gcagccgtaggagtcggctcttcca

SEQ ID NO: 1549403 - DNA, 25 bp, Homo sapien
gagtcggctcttccagcctgcttat

SEQ ID NO: 1549404 - DNA, 25 bp, Homo sapien
caggcacctcttggatcgcagccgt

SEQ ID NO: 1549405 - DNA, 25 bp, Homo sapien
tcttggatcgcagccgtaggagtcg

SEQ ID NO: 1549406 - DNA, 25 bp, Homo sapien
ctgttccagacttgtttgcctccat

SEQ ID NO: 1549407 - DNA, 25 bp, Homo sapien
cccattccctgttccagacttgttt

SEQ ID NO: 1549408 - DNA, 25 bp, Homo sapien
cattccctgttccagacttgtttgc

SEQ ID NO: 1549409 - DNA, 25 bp, Homo sapien
tccctgttccagacttgtttgcctc

SEQ ID NO: 1549410 - DNA, 25 bp, Homo sapien
gccgcggcgtgcttttaagcttcaa

SEQ ID NO: 1549411 - DNA, 25 bp, Homo sapien
gcctttgggaaagctactgctcacc

SEQ ID NO: 1549412 - DNA, 25 bp, Homo sapien
cagataggcgcagggcttgcttgat

SEQ ID NO: 1549413 - DNA, 25 bp, Homo sapien
ttgcttgatcttccctgccgcggcg

SEQ ID NO: 1549414 - DNA, 25 bp, Homo sapien
cacggggcgcaggatgtcctgcggg

SEQ ID NO: 1549415 - DNA, 25 bp, Homo sapien
ccacggggcgcaggatgtcctgcgg

SEQ ID NO: 1549416 - DNA, 25 bp, Homo sapien
gccacggggcgcaggatgtcctgcg

SEQ ID NO: 1549417 - DNA, 25 bp, Homo sapien
gggcgcaggatgtcctgcggggccc

SEQ ID NO: 1549418 - DNA, 25 bp, Homo sapien
gaaatggcctttacgatacgggatg

SEQ ID NO: 1549419 - DNA, 25 bp, Homo sapien
gaccctcatgtatagaaatcctgtg

SEQ ID NO: 1549420 - DNA, 25 bp, Homo sapien
gggaaacggtcacctctcgtgtgca

SEQ ID NO: 1549421 - DNA, 25 bp, Homo sapien
aatgtcgctttgagacaaggctcca

SEQ ID NO: 1549422 - DNA, 25 bp, Homo sapien
ctgcctccctcagcatggctcgagg

SEQ ID NO: 1549423 - DNA, 25 bp, Homo sapien
tgcctccctcagcatggctcgaggc

SEQ ID NO: 1549424 - DNA, 25 bp, Homo sapien
aaggatggggagcatttcacgcctc

SEQ ID NO: 1549425 - DNA, 25 bp, Homo sapien
gatggggagcatttcacgcctccaa

SEQ ID NO: 1549426 - DNA, 25 bp, Homo sapien
gggagcatttcacgcctccaagaag

SEQ ID NO: 1549427 - DNA, 25 bp, Homo sapien
tgaaggatggggagcatttcacgcc

SEQ ID NO: 1549428 - DNA, 25 bp, Homo sapien
tcaggagtccagtgcattgccgaat

SEQ ID NO: 1549429 - DNA, 25 bp, Homo sapien
ctgtgggcgttggactgtgagctgc

SEQ ID NO: 1549430 - DNA, 25 bp, Homo sapien
tgcattgccgaatatcaagaaactg

SEQ ID NO: 1549431 - DNA, 25 bp, Homo sapien
aaactgactcgaaggctgtgggcgt

SEQ ID NO: 1549432 - DNA, 25 bp, Homo sapien
ttttagatctagctcacctctgggt

SEQ ID NO: 1549433 - DNA, 25 bp, Homo sapien
cctctcagactgttagctccttgag

SEQ ID NO: 1549434 - DNA, 25 bp, Homo sapien
cttgaggtcagattttagatctagc

SEQ ID NO: 1549435 - DNA, 25 bp, Homo sapien
gcttggcactgagggacatgaggaa

SEQ ID NO: 1549436 - DNA, 25 bp, Homo sapien
gctccctgcgctgggatgacagcgg

SEQ ID NO: 1549437 - DNA, 25 bp, Homo sapien
cctgcagagttggtgctgcgcccag

SEQ ID NO: 1549438 - DNA, 25 bp, Homo sapien
tgagcctgcagagttggtgctgcgc

SEQ ID NO: 1549439 - DNA, 25 bp, Homo sapien
tgcgctgggatgacagcggcggcct

SEQ ID NO: 1549440 - DNA, 25 bp, Homo sapien
gatcagcatcgtccatcaccaagac

SEQ ID NO: 1549441 - DNA, 25 bp, Homo sapien
cgcaggatcagcatcgtccatcacc

SEQ ID NO: 1549442 - DNA, 25 bp, Homo sapien
gcaggatcagcatcgtccatcacca

SEQ ID NO: 1549443 - DNA, 25 bp, Homo sapien
aggatcagcatcgtccatcaccaag

SEQ ID NO: 1549444 - DNA, 25 bp, Homo sapien
tcagaggcctgggtaaggggtacat

SEQ ID NO: 1549445 - DNA, 25 bp, Homo sapien
cccctctcccggctgtccaagctct

SEQ ID NO: 1549446 - DNA, 25 bp, Homo sapien
tctcccggctgtccaagctctcagc

SEQ ID NO: 1549447 - DNA, 25 bp, Homo sapien
tcccggctgtccaagctctcagcct

SEQ ID NO: 1549448 - DNA, 25 bp, Homo sapien
tgttagaaatcttgatgcgcgcccc

SEQ ID NO: 1549449 - DNA, 25 bp, Homo sapien
gactgggctcctactcactattggg

SEQ ID NO: 1549450 - DNA, 25 bp, Homo sapien
caacggccttcaatgtggagcggtc

SEQ ID NO: 1549451 - DNA, 25 bp, Homo sapien
catgaggaggatgtttagccgcaca

SEQ ID NO: 1549452 - DNA, 25 bp, Homo sapien
taattgttttgactgggaatcggca

SEQ ID NO: 1549453 - DNA, 25 bp, Homo sapien
ttaatgccgtgtcgccaccgtgttc

SEQ ID NO: 1549454 - DNA, 25 bp, Homo sapien
gtgttcaacactcagcgcggctaat

SEQ ID NO: 1549455 - DNA, 25 bp, Homo sapien
ccatcacttacaccaatattgacgg

SEQ ID NO: 1549456 - DNA, 25 bp, Homo sapien
cttcaggtgatctgcccgccacggc

SEQ ID NO: 1549457 - DNA, 25 bp, Homo sapien
cgcacgccaccatgcctacctaatt

SEQ ID NO: 1549458 - DNA, 25 bp, Homo sapien
ttcaggtgatctgcccgccacggcc

SEQ ID NO: 1549459 - DNA, 25 bp, Homo sapien
aggcgcacgccaccatgcctaccta

SEQ ID NO: 1549460 - DNA, 25 bp, Homo sapien
ggcatgggccgagggtcatacaaca

SEQ ID NO: 1549461 - DNA, 25 bp, Homo sapien
cagggtacatcggaatcccttgagg

SEQ ID NO: 1549462 - DNA, 25 bp, Homo sapien
ctactgtggccagcggtcattgaag

SEQ ID NO: 1549463 - DNA, 25 bp, Homo sapien
tcattgaagaatgacagcctgagca

SEQ ID NO: 1549464 - DNA, 25 bp, Homo sapien
tgggccccttctaggatgatggaga

SEQ ID NO: 1549465 - DNA, 25 bp, Homo sapien
gtctctgggccccttctaggatgat

SEQ ID NO: 1549466 - DNA, 25 bp, Homo sapien
tctgtctgtgcctccgggtccctgt

SEQ ID NO: 1549467 - DNA, 25 bp, Homo sapien
ctgtgcctccgggtccctgtctctg

SEQ ID NO: 1549468 - DNA, 25 bp, Homo sapien
aatccaggttggagggattcactgg

SEQ ID NO: 1549469 - DNA, 25 bp, Homo sapien
cacatggaatccaggttggagggat

SEQ ID NO: 1549470 - DNA, 25 bp, Homo sapien
cacaaactcttggagatgtgggcag

SEQ ID NO: 1549471 - DNA, 25 bp, Homo sapien
gggcccacaaactcttggagatgtg

SEQ ID NO: 1549472 - DNA, 25 bp, Homo sapien
gccgctcttgacacagaccctcggc

SEQ ID NO: 1549473 - DNA, 25 bp, Homo sapien
ccctcggctccaggcgtgtgggacc

SEQ ID NO: 1549474 - DNA, 25 bp, Homo sapien
ccctgccgctcttgacacagaccct

SEQ ID NO: 1549475 - DNA, 25 bp, Homo sapien
tcggctccaggcgtgtgggacccct

SEQ ID NO: 1549476 - DNA, 25 bp, Homo sapien
ggtctgattcattgtggaggctcca

SEQ ID NO: 1549477 - DNA, 25 bp, Homo sapien
cttctacgtatgtgggctcaacccc

SEQ ID NO: 1549478 - DNA, 25 bp, Homo sapien
gctccagtcagcaacaaaacctctg

SEQ ID NO: 1549479 - DNA, 25 bp, Homo sapien
tcactgttcctcactggactgagag

SEQ ID NO: 1549480 - DNA, 25 bp, Homo sapien
agtcttccgtgatcccatgtctctg

SEQ ID NO: 1549481 - DNA, 25 bp, Homo sapien
tctgcttcagtcttccgtgatccca

SEQ ID NO: 1549482 - DNA, 25 bp, Homo sapien
ggaagtcttaatccactgtttctgc

SEQ ID NO: 1549483 - DNA, 25 bp, Homo sapien
cagctatcgctcaggaagtcttaat

SEQ ID NO: 1549484 - DNA, 25 bp, Homo sapien
ccagtgtgttatagaggctgccaca

SEQ ID NO: 1549485 - DNA, 25 bp, Homo sapien
tgtgttggcatctcggccacctcag

SEQ ID NO: 1549486 - DNA, 25 bp, Homo sapien
ctgccacactcagagcacatgaact

SEQ ID NO: 1549487 - DNA, 25 bp, Homo sapien
tcatctctgccgacataggtgttga

SEQ ID NO: 1549488 - DNA, 25 bp, Homo sapien
tcagctaccgtagcagaaaggtgct

SEQ ID NO: 1549489 - DNA, 25 bp, Homo sapien
tctggtttgcagactctcggaggtg

SEQ ID NO: 1549490 - DNA, 25 bp, Homo sapien
catagggctccatcttgacttcgga

SEQ ID NO: 1549491 - DNA, 25 bp, Homo sapien
tgggtgccctgatgctccaagaact

SEQ ID NO: 1549492 - DNA, 25 bp, Homo sapien
ttcttcatcctcctcatcgtcctct

SEQ ID NO: 1549493 - DNA, 25 bp, Homo sapien
tcatcctcctcatcgtcctcttcct

SEQ ID NO: 1549494 - DNA, 25 bp, Homo sapien
ctgccatggcctcctcatcctccat

SEQ ID NO: 1549495 - DNA, 25 bp, Homo sapien
catcctccatctcttcatcatcttc

SEQ ID NO: 1549496 - DNA, 25 bp, Homo sapien
ggtgttgccggcgagcccctgctga

SEQ ID NO: 1549497 - DNA, 25 bp, Homo sapien
ctgtgagccgtccgccggtgttgcc

SEQ ID NO: 1549498 - DNA, 25 bp, Homo sapien
gcagatgccgggctgtgagccgtcc

SEQ ID NO: 1549499 - DNA, 25 bp, Homo sapien
gtggactcgtcacctcccacagcat

SEQ ID NO: 1549500 - DNA, 25 bp, Homo sapien
tctacacagaggtagcgggcttccc

SEQ ID NO: 1549501 - DNA, 25 bp, Homo sapien
gtcttgccgcaacgacagcgatgca

SEQ ID NO: 1549502 - DNA, 25 bp, Homo sapien
ggtgagccaccaacgtgagttctgt

SEQ ID NO: 1549503 - DNA, 25 bp, Homo sapien
caagtgctgctcaagcgatgctgct

SEQ ID NO: 1549504 - DNA, 25 bp, Homo sapien
tccaggcattggtagggacgtgcac

SEQ ID NO: 1549505 - DNA, 25 bp, Homo sapien
cgtgcacccgtatgggtcagctggt

SEQ ID NO: 1549506 - DNA, 25 bp, Homo sapien
caggtggttgcgcacgtggatcagc

SEQ ID NO: 1549507 - DNA, 25 bp, Homo sapien
ggtggcggctgaggttggccaaaga

SEQ ID NO: 1549508 - DNA, 25 bp, Homo sapien
gcatggacccgctgatgcagtcgca

SEQ ID NO: 1549509 - DNA, 25 bp, Homo sapien
gagctctgtgtgaagcgcttgccac

SEQ ID NO: 1549510 - DNA, 25 bp, Homo sapien
agggtgtcctcaagcgccagtggct

SEQ ID NO: 1549511 - DNA, 25 bp, Homo sapien
tgtagcgtcaaagtccgagctcggg

SEQ ID NO: 1549512 - DNA, 25 bp, Homo sapien
ggaggctttaggacacacaggctga

SEQ ID NO: 1549513 - DNA, 25 bp, Homo sapien
tgatgcagtgcaaagggccttggcc

SEQ ID NO: 1549514 - DNA, 25 bp, Homo sapien
aaggttacctgatgttgctgggcac

SEQ ID NO: 1549515 - DNA, 25 bp, Homo sapien
gagaaatcaagtaccctccaccagg

SEQ ID NO: 1549516 - DNA, 25 bp, Homo sapien
catgctcggccaatcatttttattt

SEQ ID NO: 1549517 - DNA, 25 bp, Homo sapien
ccatgctcggccaatcatttttatt

SEQ ID NO: 1549518 - DNA, 25 bp, Homo sapien
tcaatctccctcatatcaagcaatc

SEQ ID NO: 1549519 - DNA, 25 bp, Homo sapien
agcctcaatctccctcatatcaagc

SEQ ID NO: 1549520 - DNA, 25 bp, Homo sapien
cagttactatcgtggccctttagca

SEQ ID NO: 1549521 - DNA, 25 bp, Homo sapien
tactgacagtagacagtgggcgccc

SEQ ID NO: 1549522 - DNA, 25 bp, Homo sapien
tcccttgtaaatagaaccagcccag

SEQ ID NO: 1549523 - DNA, 25 bp, Homo sapien
gagaaataacgtctggcctgaacac

SEQ ID NO: 1549524 - DNA, 25 bp, Homo sapien
gataacaggagtatgccagtgtcca

SEQ ID NO: 1549525 - DNA, 25 bp, Homo sapien
tgttcaaatctcgaacgccgccaga

SEQ ID NO: 1549526 - DNA, 25 bp, Homo sapien
gatgaactgcgatgtctgggaaccc

SEQ ID NO: 1549527 - DNA, 25 bp, Homo sapien
aaccagtcataacttgccgcaggca

SEQ ID NO: 1549528 - DNA, 25 bp, Homo sapien
gcgcggacgacagccggactgcatc

SEQ ID NO: 1549529 - DNA, 25 bp, Homo sapien
agcccaagccagagcggcgcggcct

SEQ ID NO: 1549530 - DNA, 25 bp, Homo sapien
gtgccacgcggctctctgtgcgggc

SEQ ID NO: 1549531 - DNA, 25 bp, Homo sapien
cgagggcggtgacggcggcgcggac

SEQ ID NO: 1549532 - DNA, 25 bp, Homo sapien
tagtgttctgagaaaccgccgggaa

SEQ ID NO: 1549533 - DNA, 25 bp, Homo sapien
tacctggaaagaggagcgcgtaaac

SEQ ID NO: 1549534 - DNA, 25 bp, Homo sapien
gaaaagctagactgtatccgaagac

SEQ ID NO: 1549535 - DNA, 25 bp, Homo sapien
tacagtcggctgacagattaccctg

SEQ ID NO: 1549536 - DNA, 25 bp, Homo sapien
gggaatttatatttgaattgaggct

SEQ ID NO: 1549537 - DNA, 25 bp, Homo sapien
agttaagggggtcacctccattctg

SEQ ID NO: 1549538 - DNA, 25 bp, Homo sapien
tttctattacaatcgcttaggaagt

SEQ ID NO: 1549539 - DNA, 25 bp, Homo sapien
gaggctttggccttaacacccagga

SEQ ID NO: 1549540 - DNA, 25 bp, Homo sapien
tttaggacagcgcagtttgacagcc

SEQ ID NO: 1549541 - DNA, 25 bp, Homo sapien
tggccgggactacgaccaattgacg

SEQ ID NO: 1549542 - DNA, 25 bp, Homo sapien
tgacggtctcgaaaagtctggcgcg

SEQ ID NO: 1549543 - DNA, 25 bp, Homo sapien
cacgtggttgttgctgccggtagac

SEQ ID NO: 1549544 - DNA, 25 bp, Homo sapien
gacgctcgcggcgaccaattgggcc

SEQ ID NO: 1549545 - DNA, 25 bp, Homo sapien
aattgggcccatcgggcagcgctag

SEQ ID NO: 1549546 - DNA, 25 bp, Homo sapien
tctcgacgacgagcgacgctcgcgg

SEQ ID NO: 1549547 - DNA, 25 bp, Homo sapien
gcctagaccaatagatatccgcaga

SEQ ID NO: 1549548 - DNA, 25 bp, Homo sapien
ttcctgaacagtcattactgcccgc

SEQ ID NO: 1549549 - DNA, 25 bp, Homo sapien
attactgcccgccccctttcgagct

SEQ ID NO: 1549550 - DNA, 25 bp, Homo sapien
ccacttcctgaacagtcattactgc

SEQ ID NO: 1549551 - DNA, 25 bp, Homo sapien
cattactgcccgccccctttcgagc

SEQ ID NO: 1549552 - DNA, 25 bp, Homo sapien
cctagggctgccaggtacagccatc

SEQ ID NO: 1549553 - DNA, 25 bp, Homo sapien
ctccccagatcctggcagggagcag

SEQ ID NO: 1549554 - DNA, 25 bp, Homo sapien
caggtacagccatctccccagatcc

SEQ ID NO: 1549555 - DNA, 25 bp, Homo sapien
gctgccaggtacagccatctcccca

SEQ ID NO: 1549556 - DNA, 25 bp, Homo sapien
ttgaacgtggctgtcttgcggctga

SEQ ID NO: 1549557 - DNA, 25 bp, Homo sapien
tcatagaaagtcagggctcggtcac

SEQ ID NO: 1549558 - DNA, 25 bp, Homo sapien
agccggcaggaaaaggccatcacca

SEQ ID NO: 1549559 - DNA, 25 bp, Homo sapien
tcttcttgggcgctcgagacttgaa

SEQ ID NO: 1549560 - DNA, 25 bp, Homo sapien
ctgagacggaccttgtaggcagctg

SEQ ID NO: 1549561 - DNA, 25 bp, Homo sapien
tgccaccaaagctgatcttagagac

SEQ ID NO: 1549562 - DNA, 25 bp, Homo sapien
tcttagagacctcagcatcctcggg

SEQ ID NO: 1549563 - DNA, 25 bp, Homo sapien
agtgagtacccaggttgccaccaaa

SEQ ID NO: 1549564 - DNA, 25 bp, Homo sapien
tggagggtgcttctcctcgccctcc

SEQ ID NO: 1549565 - DNA, 25 bp, Homo sapien
agggctggagggtgcttctcctcgc

SEQ ID NO: 1549566 - DNA, 25 bp, Homo sapien
ccagggctggagggtgcttctcctc

SEQ ID NO: 1549567 - DNA, 25 bp, Homo sapien
gctggagggtgcttctcctcgccct

SEQ ID NO: 1549568 - DNA, 25 bp, Homo sapien
gtacttctgctgggcggctgtcagt

SEQ ID NO: 1549569 - DNA, 25 bp, Homo sapien
gggctgccggtgctgtccccttttc

SEQ ID NO: 1549570 - DNA, 25 bp, Homo sapien
cgggctgccggtgctgtcccctttt

SEQ ID NO: 1549571 - DNA, 25 bp, Homo sapien
tgtcagtggcgtgcgggcccgggct

SEQ ID NO: 1549572 - DNA, 25 bp, Homo sapien
tcatgcagccatctcgtgagcacag

SEQ ID NO: 1549573 - DNA, 25 bp, Homo sapien
catctctttggttcgcatggacagg

SEQ ID NO: 1549574 - DNA, 25 bp, Homo sapien
tgaacttctttcgtattccgctggg

SEQ ID NO: 1549575 - DNA, 25 bp, Homo sapien
ggcgccactgcttgccgttgaactt

SEQ ID NO: 1549576 - DNA, 25 bp, Homo sapien
ctgccacggccgcgggccggcccgc

SEQ ID NO: 1549577 - DNA, 25 bp, Homo sapien
tgccacggccgcgggccggcccgcc

SEQ ID NO: 1549578 - DNA, 25 bp, Homo sapien
cacatcagggttgcggacaataaca

SEQ ID NO: 1549579 - DNA, 25 bp, Homo sapien
gaactcaaagcgtgacaagtcagca

SEQ ID NO: 1549580 - DNA, 25 bp, Homo sapien
cctggatgcggcaacagctctgtct

SEQ ID NO: 1549581 - DNA, 25 bp, Homo sapien
caataacaggtgagtcccgctgcac

SEQ ID NO: 1549582 - DNA, 25 bp, Homo sapien
tactggacacagtggtaaagatgag

SEQ ID NO: 1549583 - DNA, 25 bp, Homo sapien
cgctgccttccatggccgtgcctgt

SEQ ID NO: 1549584 - DNA, 25 bp, Homo sapien
ggaaggacctgttagagcctccatc

SEQ ID NO: 1549585 - DNA, 25 bp, Homo sapien
tgtgatgtttactggacacagtggt

SEQ ID NO: 1549586 - DNA, 25 bp, Homo sapien
tggggagaaggctccaagctgccta

SEQ ID NO: 1549587 - DNA, 25 bp, Homo sapien
cggtctgccctatctgggccccatg

SEQ ID NO: 1549588 - DNA, 25 bp, Homo sapien
acacggtctgccctatctgggcccc

SEQ ID NO: 1549589 - DNA, 25 bp, Homo sapien
gccccatggggagaaggctccaagc

SEQ ID NO: 1549590 - DNA, 25 bp, Homo sapien
tggggctgagacatctggcctcctg

SEQ ID NO: 1549591 - DNA, 25 bp, Homo sapien
ggctgagacatctggcctcctggac

SEQ ID NO: 1549592 - DNA, 25 bp, Homo sapien
gaatggggctgagacatctggcctc

SEQ ID NO: 1549593 - DNA, 25 bp, Homo sapien
gggctgagacatctggcctcctgga

SEQ ID NO: 1549594 - DNA, 25 bp, Homo sapien
cgagcccaggattgggctggcgcgg

SEQ ID NO: 1549595 - DNA, 25 bp, Homo sapien
gctggcgcggctcggcaaggatggg

SEQ ID NO: 1549596 - DNA, 25 bp, Homo sapien
gagcccaggattgggctggcgcggc

SEQ ID NO: 1549597 - DNA, 25 bp, Homo sapien
cccaggattgggctggcgcggctcg

SEQ ID NO: 1549598 - DNA, 25 bp, Homo sapien
gatgtggagcccatctggcagagac

SEQ ID NO: 1549599 - DNA, 25 bp, Homo sapien
tagacaatgatacagagccacgtgg

SEQ ID NO: 1549600 - DNA, 25 bp, Homo sapien
agtcaagatgtaccagcccagagct

SEQ ID NO: 1549601 - DNA, 25 bp, Homo sapien
taaactgtggcaagatcatgcagtc

SEQ ID NO: 1549602 - DNA, 25 bp, Homo sapien
gggctcgcacctcctcagcggccga

SEQ ID NO: 1549603 - DNA, 25 bp, Homo sapien
tcctcagcggccgacgccgctccgc

SEQ ID NO: 1549604 - DNA, 25 bp, Homo sapien
tcgcacctcctcagcggccgacgcc

SEQ ID NO: 1549605 - DNA, 25 bp, Homo sapien
aggggctcgcacctcctcagcggcc

SEQ ID NO: 1549606 - DNA, 25 bp, Homo sapien
ggaggccgcgctggacgcgggcatc

SEQ ID NO: 1549607 - DNA, 25 bp, Homo sapien
gcgctggacgcgggcatcaggggcc

SEQ ID NO: 1549608 - DNA, 25 bp, Homo sapien
ggccgcgctggacgcgggcatcagg

SEQ ID NO: 1549609 - DNA, 25 bp, Homo sapien
cgcgctggacgcgggcatcaggggc

SEQ ID NO: 1549610 - DNA, 25 bp, Homo sapien
cgggcctaggataccagtgggcttc

SEQ ID NO: 1549611 - DNA, 25 bp, Homo sapien
aacaagtctctacccagagagggca

SEQ ID NO: 1549612 - DNA, 25 bp, Homo sapien
taggctgggacctacccctggctgg

SEQ ID NO: 1549613 - DNA, 25 bp, Homo sapien
tgtttccttgaggatatgcacagga

SEQ ID NO: 1549614 - DNA, 25 bp, Homo sapien
ctaaggagtgccaagggaacacagc

SEQ ID NO: 1549615 - DNA, 25 bp, Homo sapien
ccacagagcgaggttccacattcgt

SEQ ID NO: 1549616 - DNA, 25 bp, Homo sapien
gagcgaggttccacattcgtccaca

SEQ ID NO: 1549617 - DNA, 25 bp, Homo sapien
aaggagtgccaagggaacacagcca

SEQ ID NO: 1549618 - DNA, 25 bp, Homo sapien
gctgggcctcgctcggctgcacgga

SEQ ID NO: 1549619 - DNA, 25 bp, Homo sapien
tgctgggcctcgctcggctgcacgg

SEQ ID NO: 1549620 - DNA, 25 bp, Homo sapien
ctggtggccgttcatgagcaacagc

SEQ ID NO: 1549621 - DNA, 25 bp, Homo sapien
tgagcaacagctgccgactcagcag

SEQ ID NO: 1549622 - DNA, 25 bp, Homo sapien
gcaacagctgccgactcagcaggtt

SEQ ID NO: 1549623 - DNA, 25 bp, Homo sapien
tggtggccgttcatgagcaacagct

SEQ ID NO: 1549624 - DNA, 25 bp, Homo sapien
tcctcctccgtggtgggaggcggac

SEQ ID NO: 1549625 - DNA, 25 bp, Homo sapien
tggtgggaggcggacccttaccaga

SEQ ID NO: 1549626 - DNA, 25 bp, Homo sapien
tcctgggctctcagggcatgtggct

SEQ ID NO: 1549627 - DNA, 25 bp, Homo sapien
gaggcggacccttaccagattccac

SEQ ID NO: 1549628 - DNA, 25 bp, Homo sapien
cactgagggactgggtccgacgttt

SEQ ID NO: 1549629 - DNA, 25 bp, Homo sapien
tgagtcccgttccttgggtagggca

SEQ ID NO: 1549630 - DNA, 25 bp, Homo sapien
aagatgagtcccgttccttgggtag

SEQ ID NO: 1549631 - DNA, 25 bp, Homo sapien
tcccgttccttgggtagggcactga

SEQ ID NO: 1549632 - DNA, 25 bp, Homo sapien
gacgctggtggaccagggcccggtg

SEQ ID NO: 1549633 - DNA, 25 bp, Homo sapien
cctggttgggatgacgctggtggac

SEQ ID NO: 1549634 - DNA, 25 bp, Homo sapien
tggttgggatgacgctggtggacca

SEQ ID NO: 1549635 - DNA, 25 bp, Homo sapien
gggatgacgctggtggaccagggcc

SEQ ID NO: 1549636 - DNA, 25 bp, Homo sapien
tcggtccttgttgcaccacttccaa

SEQ ID NO: 1549637 - DNA, 25 bp, Homo sapien
cagccccaggctcgtgggcttggcc

SEQ ID NO: 1549638 - DNA, 25 bp, Homo sapien
gacatgctccgctcccgcgtctcct

SEQ ID NO: 1549639 - DNA, 25 bp, Homo sapien
gtctccgacatgctccgctcccgcg

SEQ ID NO: 1549640 - DNA, 25 bp, Homo sapien
ctgcaacggacaggagctcagagga

SEQ ID NO: 1549641 - DNA, 25 bp, Homo sapien
tgcaacggacaggagctcagaggac

SEQ ID NO: 1549642 - DNA, 25 bp, Homo sapien
gcaacggacaggagctcagaggaca

SEQ ID NO: 1549643 - DNA, 25 bp, Homo sapien
gcgtcagttcctgtagcgcctgact

SEQ ID NO: 1549644 - DNA, 25 bp, Homo sapien
ccccaactgtgtgtagccgttctgc

SEQ ID NO: 1549645 - DNA, 25 bp, Homo sapien
tccccggagccttggtgtctgagct

SEQ ID NO: 1549646 - DNA, 25 bp, Homo sapien
tagcgcctgactgtctacttctccg

SEQ ID NO: 1549647 - DNA, 25 bp, Homo sapien
tggccgccaaggcacctccctcacc

SEQ ID NO: 1549648 - DNA, 25 bp, Homo sapien
accatgcgctcctcatcactcgtca

SEQ ID NO: 1549649 - DNA, 25 bp, Homo sapien
ctggccgcacgctgagaacgagaag

SEQ ID NO: 1549650 - DNA, 25 bp, Homo sapien
ctcactggccgcacgctgagaacga

SEQ ID NO: 1549651 - DNA, 25 bp, Homo sapien
ccgctccttgcacttgagatcaatg

SEQ ID NO: 1549652 - DNA, 25 bp, Homo sapien
ctcgctgtcggtcacccgctccttg

SEQ ID NO: 1549653 - DNA, 25 bp, Homo sapien
gagatcaatgtcagtggtgccgaag

SEQ ID NO: 1549654 - DNA, 25 bp, Homo sapien
tcagtggtgccgaagccatcgtcag

SEQ ID NO: 1549655 - DNA, 25 bp, Homo sapien
caccagtaggttagtgacagtggca

SEQ ID NO: 1549656 - DNA, 25 bp, Homo sapien
cactttcgggtctcttgcgccggaa

SEQ ID NO: 1549657 - DNA, 25 bp, Homo sapien
gaatacactaagctgacacccagcg

SEQ ID NO: 1549658 - DNA, 25 bp, Homo sapien
tgtgtcatttggagacgcctcagcc

SEQ ID NO: 1549659 - DNA, 25 bp, Homo sapien
tccaccccgcactgacatgctaggg

SEQ ID NO: 1549660 - DNA, 25 bp, Homo sapien
cactgacatgctaggggcggccaga

SEQ ID NO: 1549661 - DNA, 25 bp, Homo sapien
ggccagaggcactaggaccttccca

SEQ ID NO: 1549662 - DNA, 25 bp, Homo sapien
ggcggccagaggcactaggaccttc

SEQ ID NO: 1549663 - DNA, 25 bp, Homo sapien
ttctgcacaggtactgagaagggcg

SEQ ID NO: 1549664 - DNA, 25 bp, Homo sapien
ggctgggcaccattctgcacaggta

SEQ ID NO: 1549665 - DNA, 25 bp, Homo sapien
ggggggctgggcaccattctgcaca

SEQ ID NO: 1549666 - DNA, 25 bp, Homo sapien
caggtactgagaagggcgggctcac

SEQ ID NO: 1549667 - DNA, 25 bp, Homo sapien
aggagggcaacaggaccttctgagg

SEQ ID NO: 1549668 - DNA, 25 bp, Homo sapien
ccgctgggtgtgctcacaggcaccg

SEQ ID NO: 1549669 - DNA, 25 bp, Homo sapien
ggggcggcaccaggccgctgggtgt

SEQ ID NO: 1549670 - DNA, 25 bp, Homo sapien
agggcaacaggaccttctgaggctg

SEQ ID NO: 1549671 - DNA, 25 bp, Homo sapien
gagctacagagctcgtgggcccgta

SEQ ID NO: 1549672 - DNA, 25 bp, Homo sapien
ccccagcgaggtgaagcctagagct

SEQ ID NO: 1549673 - DNA, 25 bp, Homo sapien
tgggcccgtacgaggtgactgttcc

SEQ ID NO: 1549674 - DNA, 25 bp, Homo sapien
gactgttccagcctggctggacgca

SEQ ID NO: 1549675 - DNA, 25 bp, Homo sapien
tgttatgacaggacctccgggggct

SEQ ID NO: 1549676 - DNA, 25 bp, Homo sapien
aggtgacacgcccacctgaccggga

SEQ ID NO: 1549677 - DNA, 25 bp, Homo sapien
gccagagtaaaatgctgttatgaca

SEQ ID NO: 1549678 - DNA, 25 bp, Homo sapien
gggctgccagagtaaaatgctgtta

SEQ ID NO: 1549679 - DNA, 25 bp, Homo sapien
tggccacagtgtagaccaggcttgg

SEQ ID NO: 1549680 - DNA, 25 bp, Homo sapien
cagtgtagaccaggcttgggggggc

SEQ ID NO: 1549681 - DNA, 25 bp, Homo sapien
ctggtggccacagtgtagaccaggc

SEQ ID NO: 1549682 - DNA, 25 bp, Homo sapien
ctggcgggcccttgggcagaatggt

SEQ ID NO: 1549683 - DNA, 25 bp, Homo sapien
ggggagaaaattgtttgctgagcca

SEQ ID NO: 1549684 - DNA, 25 bp, Homo sapien
tttgctgagccaggcctgactggag

SEQ ID NO: 1549685 - DNA, 25 bp, Homo sapien
tgctctgggttgatctgacacctac

SEQ ID NO: 1549686 - DNA, 25 bp, Homo sapien
ctagtggggagaaaattgtttgctg

SEQ ID NO: 1549687 - DNA, 25 bp, Homo sapien
tcaaaggaccccacgggaatgctgg

SEQ ID NO: 1549688 - DNA, 25 bp, Homo sapien
ggccttcgggctgggccgctgggcc

SEQ ID NO: 1549689 - DNA, 25 bp, Homo sapien
ggcagttggctctcggactgggcca

SEQ ID NO: 1549690 - DNA, 25 bp, Homo sapien
ggccactaagctgtaggtcatggaa

SEQ ID NO: 1549691 - DNA, 25 bp, Homo sapien
tggtccgctcctcagcaggtggggg

SEQ ID NO: 1549692 - DNA, 25 bp, Homo sapien
ctggtccgctcctcagcaggtgggg

SEQ ID NO: 1549693 - DNA, 25 bp, Homo sapien
agatggcgaacactgagctcagact

SEQ ID NO: 1549694 - DNA, 25 bp, Homo sapien
cagggagatggcgaacactgagctc

SEQ ID NO: 1549695 - DNA, 25 bp, Homo sapien
ggagatggcgaacactgagctcaga

SEQ ID NO: 1549696 - DNA, 25 bp, Homo sapien
ggcagggagatggcgaacactgagc

SEQ ID NO: 1549697 - DNA, 25 bp, Homo sapien
tgcccagggacgcgccagtctgaag

SEQ ID NO: 1549698 - DNA, 25 bp, Homo sapien
cccagggacgcgccagtctgaagat

SEQ ID NO: 1549699 - DNA, 25 bp, Homo sapien
gcccagggacgcgccagtctgaaga

SEQ ID NO: 1549700 - DNA, 25 bp, Homo sapien
ttcttgccagtaccagccgcctcct

SEQ ID NO: 1549701 - DNA, 25 bp, Homo sapien
cacagagtcaaaggtcttcttcagg

SEQ ID NO: 1549702 - DNA, 25 bp, Homo sapien
taccagccgcctccttgcgctccgg

SEQ ID NO: 1549703 - DNA, 25 bp, Homo sapien
ttgtccacagagtcaaaggtcttct

SEQ ID NO: 1549704 - DNA, 25 bp, Homo sapien
ttcgaagtccacttctgacaggacc

SEQ ID NO: 1549705 - DNA, 25 bp, Homo sapien
tcagcaaagcgctcttcgaagtcca

SEQ ID NO: 1549706 - DNA, 25 bp, Homo sapien
tcttgcggtaagagcccaggatggc

SEQ ID NO: 1549707 - DNA, 25 bp, Homo sapien
tcctcaggccgaaactcaggcaact

SEQ ID NO: 1549708 - DNA, 25 bp, Homo sapien
ctggagcgtcttctcatcttgcgct

SEQ ID NO: 1549709 - DNA, 25 bp, Homo sapien
tcatcttgcgcttgggcgaggtggg

SEQ ID NO: 1549710 - DNA, 25 bp, Homo sapien
gtgaagatgtccccctcgcacttgg

SEQ ID NO: 1549711 - DNA, 25 bp, Homo sapien
cgcacttggcactcttgggggtgtt

SEQ ID NO: 1549712 - DNA, 25 bp, Homo sapien
gccctcactgcattctatttcacag

SEQ ID NO: 1549713 - DNA, 25 bp, Homo sapien
gggccttcctgccaccgtctgagtg

SEQ ID NO: 1549714 - DNA, 25 bp, Homo sapien
caggcagcatggcaaggctgcagca

SEQ ID NO: 1549715 - DNA, 25 bp, Homo sapien
cctcactgcattctatttcacaggg

SEQ ID NO: 1549716 - DNA, 25 bp, Homo sapien
tgacgggaagaagccatggtcctga

SEQ ID NO: 1549717 - DNA, 25 bp, Homo sapien
cgccgcagggaggagtatggcacct

SEQ ID NO: 1549718 - DNA, 25 bp, Homo sapien
tcctgaaagagctgcatgaccaggg

SEQ ID NO: 1549719 - DNA, 25 bp, Homo sapien
tatggcaccttgtcatactctagct

SEQ ID NO: 1549720 - DNA, 25 bp, Homo sapien
agatgtctgcatagcgggcctggaa

SEQ ID NO: 1549721 - DNA, 25 bp, Homo sapien
gacaaaccttggagggaaagatgtc

SEQ ID NO: 1549722 - DNA, 25 bp, Homo sapien
gatgtctgcatagcgggcctggaag

SEQ ID NO: 1549723 - DNA, 25 bp, Homo sapien
ctgcatagcgggcctggaaggcggc

SEQ ID NO: 1549724 - DNA, 25 bp, Homo sapien
gctccgtgggagtggcagcctgcat

SEQ ID NO: 1549725 - DNA, 25 bp, Homo sapien
gctgctccgtgggagtggcagcctg

SEQ ID NO: 1549726 - DNA, 25 bp, Homo sapien
ggagtggcagcctgcatgatcttct

SEQ ID NO: 1549727 - DNA, 25 bp, Homo sapien
tgggagtggcagcctgcatgatctt

SEQ ID NO: 1549728 - DNA, 25 bp, Homo sapien
ggccgtgccagagtccgagctgggt

SEQ ID NO: 1549729 - DNA, 25 bp, Homo sapien
ctgggccgtgccagagtccgagctg

SEQ ID NO: 1549730 - DNA, 25 bp, Homo sapien
ccgtgccagagtccgagctgggtga

SEQ ID NO: 1549731 - DNA, 25 bp, Homo sapien
gccagagtccgagctgggtgaggtg

SEQ ID NO: 1549732 - DNA, 25 bp, Homo sapien
cagccaggctgtccaggccccgact

SEQ ID NO: 1549733 - DNA, 25 bp, Homo sapien
ctcccagccaggctgtccaggcccc

SEQ ID NO: 1549734 - DNA, 25 bp, Homo sapien
gctggggagccccctcccagccagg

SEQ ID NO: 1549735 - DNA, 25 bp, Homo sapien
cccagccaggctgtccaggccccga

SEQ ID NO: 1549736 - DNA, 25 bp, Homo sapien
ctgcctgtggcagctgtggagggac

SEQ ID NO: 1549737 - DNA, 25 bp, Homo sapien
tggagaggacgaaatggctttaccc

SEQ ID NO: 1549738 - DNA, 25 bp, Homo sapien
ggtatttacaagaggagcaggcctc

SEQ ID NO: 1549739 - DNA, 25 bp, Homo sapien
tacaagaggagcaggcctcattccg

SEQ ID NO: 1549740 - DNA, 25 bp, Homo sapien
ggaggagataaccttcctgccccca

SEQ ID NO: 1549741 - DNA, 25 bp, Homo sapien
aagctctgaaggtcacacgctccag

SEQ ID NO: 1549742 - DNA, 25 bp, Homo sapien
tctgaaggtcacacgctccaggtta

SEQ ID NO: 1549743 - DNA, 25 bp, Homo sapien
cacacgctccaggttatgtacaggg

SEQ ID NO: 1549744 - DNA, 25 bp, Homo sapien
gaaggtcacacgctccaggttatgt

SEQ ID NO: 1549745 - DNA, 25 bp, Homo sapien
agaaatattgcacatgatcaacatg

SEQ ID NO: 1549746 - DNA, 25 bp, Homo sapien
ttgcacatgatcaacatgttttgtt

SEQ ID NO: 1549747 - DNA, 25 bp, Homo sapien
gtaagaaatattgcacatgatcaac

SEQ ID NO: 1549748 - DNA, 25 bp, Homo sapien
tattgcacatgatcaacatgttttg

SEQ ID NO: 1549749 - DNA, 25 bp, Homo sapien
gccagcaggcattgaggctcccgga

SEQ ID NO: 1549750 - DNA, 25 bp, Homo sapien
tgaggctcccggagcgcacaggctc

SEQ ID NO: 1549751 - DNA, 25 bp, Homo sapien
ggccagcaggcattgaggctcccgg

SEQ ID NO: 1549752 - DNA, 25 bp, Homo sapien
ccagcaggcattgaggctcccggag

SEQ ID NO: 1549753 - DNA, 25 bp, Homo sapien
gacctgtttcctgagtacgaatgac

SEQ ID NO: 1549754 - DNA, 25 bp, Homo sapien
tccccaaactcacgcagtccaatgg

SEQ ID NO: 1549755 - DNA, 25 bp, Homo sapien
cagagccagtgagggtaaaccatcc

SEQ ID NO: 1549756 - DNA, 25 bp, Homo sapien
ctgagtacgaatgaccccagagcca

SEQ ID NO: 1549757 - DNA, 25 bp, Homo sapien
tcccacctgggatattgaggagtcc

SEQ ID NO: 1549758 - DNA, 25 bp, Homo sapien
ggatgtccctggtgagcgttcccac

SEQ ID NO: 1549759 - DNA, 25 bp, Homo sapien
ctacctgattgggaaactgagggca

SEQ ID NO: 1549760 - DNA, 25 bp, Homo sapien
gaacggctggttcgtgccactctca

SEQ ID NO: 1549761 - DNA, 25 bp, Homo sapien
gctgtggggcgcaatggcttctttt

SEQ ID NO: 1549762 - DNA, 25 bp, Homo sapien
caatggcttcttttccgcggtgacc

SEQ ID NO: 1549763 - DNA, 25 bp, Homo sapien
cccttcccacttcacgtagctgtgg

SEQ ID NO: 1549764 - DNA, 25 bp, Homo sapien
gcggtgaccccagctctcgaagtca

SEQ ID NO: 1549765 - DNA, 25 bp, Homo sapien
gaatataaagatagggtggccatca

SEQ ID NO: 1549766 - DNA, 25 bp, Homo sapien
catcagcatgcagataagtcaaggg

SEQ ID NO: 1549767 - DNA, 25 bp, Homo sapien
gggaatactatttagaatgaccaga

SEQ ID NO: 1549768 - DNA, 25 bp, Homo sapien
tcacttaggccaggtcactttagac

SEQ ID NO: 1549769 - DNA, 25 bp, Homo sapien
tcacctcgtggttgaagagaccccg

SEQ ID NO: 1549770 - DNA, 25 bp, Homo sapien
tatgaccacgagcttggaggcagta

SEQ ID NO: 1549771 - DNA, 25 bp, Homo sapien
gacggacacgaccaggtttctcagg

SEQ ID NO: 1549772 - DNA, 25 bp, Homo sapien
tgacaggcctgcaaggtgtgcacga

SEQ ID NO: 1549773 - DNA, 25 bp, Homo sapien
catagaggctagctgagctagagcc

SEQ ID NO: 1549774 - DNA, 25 bp, Homo sapien
tgagctagagccgacaaaggaaagg

SEQ ID NO: 1549775 - DNA, 25 bp, Homo sapien
ggctagctgagctagagccgacaaa

SEQ ID NO: 1549776 - DNA, 25 bp, Homo sapien
ggaaagaagcatagaggctagctga

SEQ ID NO: 1549777 - DNA, 25 bp, Homo sapien
ctctgggacttgatcagggctatta

SEQ ID NO: 1549778 - DNA, 25 bp, Homo sapien
tccccctgtgcgcagtgggcatgct

SEQ ID NO: 1549779 - DNA, 25 bp, Homo sapien
tgggcatgctggaggtgtagggcat

SEQ ID NO: 1549780 - DNA, 25 bp, Homo sapien
ttggcggtgccagactccccctgtg

SEQ ID NO: 1549781 - DNA, 25 bp, Homo sapien
cagatggcgaagacagtgagggaaa

SEQ ID NO: 1549782 - DNA, 25 bp, Homo sapien
ccaggctgttccagatggcgaagac

SEQ ID NO: 1549783 - DNA, 25 bp, Homo sapien
gctgttccagatggcgaagacagtg

SEQ ID NO: 1549784 - DNA, 25 bp, Homo sapien
cagtgagggaaagtatggtggccag

SEQ ID NO: 1549785 - DNA, 25 bp, Homo sapien
tctgggctactacccaggagaggct

SEQ ID NO: 1549786 - DNA, 25 bp, Homo sapien
tcagtacagtctcatgggtggaaaa

SEQ ID NO: 1549787 - DNA, 25 bp, Homo sapien
gctaccagccagatgctttttaaca

SEQ ID NO: 1549788 - DNA, 25 bp, Homo sapien
tggaaaagaccaggcttccggactg

SEQ ID NO: 1549789 - DNA, 25 bp, Homo sapien
agtactttattgaggtcactgggag

SEQ ID NO: 1549790 - DNA, 25 bp, Homo sapien
cactgggagtacaagatatctgtcc

SEQ ID NO: 1549791 - DNA, 25 bp, Homo sapien
ctttattgaggtcactgggagtaca

SEQ ID NO: 1549792 - DNA, 25 bp, Homo sapien
tgaaaagtactttattgaggtcact

SEQ ID NO: 1549793 - DNA, 25 bp, Homo sapien
ttttcctgatcagactccaacaaac

SEQ ID NO: 1549794 - DNA, 25 bp, Homo sapien
cttgattttcctgatcagactccaa

SEQ ID NO: 1549795 - DNA, 25 bp, Homo sapien
gattttcctgatcagactccaacaa

SEQ ID NO: 1549796 - DNA, 25 bp, Homo sapien
tgattttcctgatcagactccaaca

SEQ ID NO: 1549797 - DNA, 25 bp, Homo sapien
cccggctccgctccggctcccgcac

SEQ ID NO: 1549798 - DNA, 25 bp, Homo sapien
cgcccgctccggccccggctccgct

SEQ ID NO: 1549799 - DNA, 25 bp, Homo sapien
ccggctccgctccggctcccgcact

SEQ ID NO: 1549800 - DNA, 25 bp, Homo sapien
cgctccggccccggctccgctccgg

SEQ ID NO: 1549801 - DNA, 25 bp, Homo sapien
actgaggttgccccgcacgtacttg

SEQ ID NO: 1549802 - DNA, 25 bp, Homo sapien
ggaactgaggttgccccgcacgtac

SEQ ID NO: 1549803 - DNA, 25 bp, Homo sapien
ggcgcgggggggcagtgacagcagc

SEQ ID NO: 1549804 - DNA, 25 bp, Homo sapien
gaggttgccccgcacgtacttggcc

SEQ ID NO: 1549805 - DNA, 25 bp, Homo sapien
aaaatcttgtcaggaacacccagtc

SEQ ID NO: 1549806 - DNA, 25 bp, Homo sapien
tcagggtagcggaaacggaagtcca

SEQ ID NO: 1549807 - DNA, 25 bp, Homo sapien
tccagtcggccgtaatccgagagga

SEQ ID NO: 1549808 - DNA, 25 bp, Homo sapien
tagcggaaacggaagtccagtcggc

SEQ ID NO: 1549809 - DNA, 25 bp, Homo sapien
ttgtcccctgccttgtacacggctg

SEQ ID NO: 1549810 - DNA, 25 bp, Homo sapien
tgtcccctgccttgtacacggctgg

SEQ ID NO: 1549811 - DNA, 25 bp, Homo sapien
ttgtacacggctggccactgggatg

SEQ ID NO: 1549812 - DNA, 25 bp, Homo sapien
ctgccttgtacacggctggccactg

SEQ ID NO: 1549813 - DNA, 25 bp, Homo sapien
atgacctggttgttctccggccgga

SEQ ID NO: 1549814 - DNA, 25 bp, Homo sapien
acctggttgttctccggccggatca

SEQ ID NO: 1549815 - DNA, 25 bp, Homo sapien
tctccggccggatcactgactcctt

SEQ ID NO: 1549816 - DNA, 25 bp, Homo sapien
gaggttgatgacctggttgttctcc

SEQ ID NO: 1549817 - DNA, 25 bp, Homo sapien
tagcgggttccctcctctgatacca

SEQ ID NO: 1549818 - DNA, 25 bp, Homo sapien
actggagcagctcaggtagcgggtt

SEQ ID NO: 1549819 - DNA, 25 bp, Homo sapien
ctcaggtagcgggttccctcctctg

SEQ ID NO: 1549820 - DNA, 25 bp, Homo sapien
tgagcggaagctgcggccactggag

SEQ ID NO: 1549821 - DNA, 25 bp, Homo sapien
cccacacttgctgagcgcaatatac

SEQ ID NO: 1549822 - DNA, 25 bp, Homo sapien
acttgctgagcgcaatataccacca

SEQ ID NO: 1549823 - DNA, 25 bp, Homo sapien
tgagcgcaatataccaccaccgttc

SEQ ID NO: 1549824 - DNA, 25 bp, Homo sapien
ttgctgagcgcaatataccaccacc

SEQ ID NO: 1549825 - DNA, 25 bp, Homo sapien
ccctgggcaagttgggggttggcag

SEQ ID NO: 1549826 - DNA, 25 bp, Homo sapien
tccaggtggccaccccagcccctta

SEQ ID NO: 1549827 - DNA, 25 bp, Homo sapien
ggggttggcaggaaggcaaagagaa

SEQ ID NO: 1549828 - DNA, 25 bp, Homo sapien
gcaaagagaaggtggtccaggtggc

SEQ ID NO: 1549829 - DNA, 25 bp, Homo sapien
aagtgtcgtgtccagaaggacttgc

SEQ ID NO: 1549830 - DNA, 25 bp, Homo sapien
gaaggacttgccattggtgaggacc

SEQ ID NO: 1549831 - DNA, 25 bp, Homo sapien
gacttgccattggtgaggaccatct

SEQ ID NO: 1549832 - DNA, 25 bp, Homo sapien
atcagcggagaagtgtcgtgtccag

SEQ ID NO: 1549833 - DNA, 25 bp, Homo sapien
gaggaaggtcacatctgtctccagg

SEQ ID NO: 1549834 - DNA, 25 bp, Homo sapien
aagatgaggaggaaggtcacatctg

SEQ ID NO: 1549835 - DNA, 25 bp, Homo sapien
atccaaagtaacaagagaggaagaa

SEQ ID NO: 1549836 - DNA, 25 bp, Homo sapien
aaggtcacatctgtctccaggatcc

SEQ ID NO: 1549837 - DNA, 25 bp, Homo sapien
cctgctgcggccatgaacattttat

SEQ ID NO: 1549838 - DNA, 25 bp, Homo sapien
tgctgcggccatgaacattttataa

SEQ ID NO: 1549839 - DNA, 25 bp, Homo sapien
gagcaactgacgacctttcagcaaa

SEQ ID NO: 1549840 - DNA, 25 bp, Homo sapien
cattttataagttgtgtggagcaac

SEQ ID NO: 1549841 - DNA, 25 bp, Homo sapien
tctcgttgccaatgccatcggtggc

SEQ ID NO: 1549842 - DNA, 25 bp, Homo sapien
ttgaccccagtagatgcagaaaaat

SEQ ID NO: 1549843 - DNA, 25 bp, Homo sapien
tgccatcggtggcatattgacccca

SEQ ID NO: 1549844 - DNA, 25 bp, Homo sapien
caagatcttcacactctcgttgcca

SEQ ID NO: 1549845 - DNA, 25 bp, Homo sapien
cccaggaggataagcatcagcagga

SEQ ID NO: 1549846 - DNA, 25 bp, Homo sapien
gaggataagcatcagcaggaagatg

SEQ ID NO: 1549847 - DNA, 25 bp, Homo sapien
caggaggataagcatcagcaggaag

SEQ ID NO: 1549848 - DNA, 25 bp, Homo sapien
ccccaggaggataagcatcagcagg

SEQ ID NO: 1549849 - DNA, 25 bp, Homo sapien
ccacgagcacgccctgcccgggcac

SEQ ID NO: 1549850 - DNA, 25 bp, Homo sapien
tacagggtcatgtagacagacaact

SEQ ID NO: 1549851 - DNA, 25 bp, Homo sapien
acaacttcacggagcccgcgtggct

SEQ ID NO: 1549852 - DNA, 25 bp, Homo sapien
catgggtgagcgtgtacagggtcat

SEQ ID NO: 1549853 - DNA, 25 bp, Homo sapien
agacagacaacttcacggagcccgc

SEQ ID NO: 1549854 - DNA, 25 bp, Homo sapien
ggccggcgactcatacgtgtacagt

SEQ ID NO: 1549855 - DNA, 25 bp, Homo sapien
agcatagcagaaccacacgtaggcc

SEQ ID NO: 1549856 - DNA, 25 bp, Homo sapien
tgtacagtacctggcctgggtcaaa

SEQ ID NO: 1549857 - DNA, 25 bp, Homo sapien
gcttctcaggaaagtgtcgcagtga

SEQ ID NO: 1549858 - DNA, 25 bp, Homo sapien
cagaaacacgccatgggcgtacaag

SEQ ID NO: 1549859 - DNA, 25 bp, Homo sapien
gatgccgaaattggcaatcagggcc

SEQ ID NO: 1549860 - DNA, 25 bp, Homo sapien
ggcgtacaagtggatccccagctgg

SEQ ID NO: 1549861 - DNA, 25 bp, Homo sapien
ccagctggatgccattgacaatctt

SEQ ID NO: 1549862 - DNA, 25 bp, Homo sapien
gaatgtcagataggatgtgaaccag

SEQ ID NO: 1549863 - DNA, 25 bp, Homo sapien
ggatgtgaaccagggcaaagaatag

SEQ ID NO: 1549864 - DNA, 25 bp, Homo sapien
tgaaccagggcaaagaatagacgtg

SEQ ID NO: 1549865 - DNA, 25 bp, Homo sapien
tcaccaagaatgtcagataggatgt

SEQ ID NO: 1549866 - DNA, 25 bp, Homo sapien
aaggccttgtcagcggattggctcc

SEQ ID NO: 1549867 - DNA, 25 bp, Homo sapien
gctgaagcgatctgcgacgtgcgca

SEQ ID NO: 1549868 - DNA, 25 bp, Homo sapien
ggcaccgagtcgctgataaacgtca

SEQ ID NO: 1549869 - DNA, 25 bp, Homo sapien
tcccatagacgtgctgcgggaaggc

SEQ ID NO: 1549870 - DNA, 25 bp, Homo sapien
gctcctcgggcgctggggccgcggg

SEQ ID NO: 1549871 - DNA, 25 bp, Homo sapien
agcagctcctcgggcgctggggccg

SEQ ID NO: 1549872 - DNA, 25 bp, Homo sapien
ccaggggcggcgccagcagctcctc

SEQ ID NO: 1549873 - DNA, 25 bp, Homo sapien
tccaggggcggcgccagcagctcct

SEQ ID NO: 1549874 - DNA, 25 bp, Homo sapien
ggccaggtactcaaagggcggcgtc

SEQ ID NO: 1549875 - DNA, 25 bp, Homo sapien
gggtgtgcgcaacagcgccagaacc

SEQ ID NO: 1549876 - DNA, 25 bp, Homo sapien
gcggggagtgcgaaaggcaggagga

SEQ ID NO: 1549877 - DNA, 25 bp, Homo sapien
ggagagccgcggaaggcgggcggtg

SEQ ID NO: 1549878 - DNA, 25 bp, Homo sapien
cggctcggccatggtcaccacgcgg

SEQ ID NO: 1549879 - DNA, 25 bp, Homo sapien
gcacgagcggctggtagggcggcgt

SEQ ID NO: 1549880 - DNA, 25 bp, Homo sapien
cccggccgtgtgcatgctgaagtat

SEQ ID NO: 1549881 - DNA, 25 bp, Homo sapien
tgaagccggtgtgcggcgctgccgt

SEQ ID NO: 1549882 - DNA, 25 bp, Homo sapien
tcacggaacagcgggagcccagaat

SEQ ID NO: 1549883 - DNA, 25 bp, Homo sapien
cagggggccggaggtcacggaacag

SEQ ID NO: 1549884 - DNA, 25 bp, Homo sapien
gtcacggaacagcgggagcccagaa

SEQ ID NO: 1549885 - DNA, 25 bp, Homo sapien
aggtcacggaacagcgggagcccag

SEQ ID NO: 1549886 - DNA, 25 bp, Homo sapien
cacgggtgttccggagtccagcggg

SEQ ID NO: 1549887 - DNA, 25 bp, Homo sapien
gtcgcagagtcctggagagtcacag

SEQ ID NO: 1549888 - DNA, 25 bp, Homo sapien
gatgcggcagatggagtacgggtcc

SEQ ID NO: 1549889 - DNA, 25 bp, Homo sapien
gggtcgagaccagcatcgcaatatc

SEQ ID NO: 1549890 - DNA, 25 bp, Homo sapien
acgggtccgaggtcacagatccgag

SEQ ID NO: 1549891 - DNA, 25 bp, Homo sapien
agaagttacagagcggccggtcaga

SEQ ID NO: 1549892 - DNA, 25 bp, Homo sapien
gggagggacggcgaagaggaggcga

SEQ ID NO: 1549893 - DNA, 25 bp, Homo sapien
atttgttcccaaccgcatgcgcagc

SEQ ID NO: 1549894 - DNA, 25 bp, Homo sapien
gcatgcgcagcagcgtcctcctgga

SEQ ID NO: 1549895 - DNA, 25 bp, Homo sapien
cagagcggccgcgggaagacccgct

SEQ ID NO: 1549896 - DNA, 25 bp, Homo sapien
acgaggggacgcttgggccagagcg

SEQ ID NO: 1549897 - DNA, 25 bp, Homo sapien
tcgcctccctccgaagccggatggg

SEQ ID NO: 1549898 - DNA, 25 bp, Homo sapien
ccgaagccggatgggccagatcaga

SEQ ID NO: 1549899 - DNA, 25 bp, Homo sapien
tgtagatcgaagaggtcccggagac

SEQ ID NO: 1549900 - DNA, 25 bp, Homo sapien
cctatagagcgatggaaggccctgt

SEQ ID NO: 1549901 - DNA, 25 bp, Homo sapien
taggagtcccctatagacacagggc

SEQ ID NO: 1549902 - DNA, 25 bp, Homo sapien
cagtgcccagcattacggactcagg

SEQ ID NO: 1549903 - DNA, 25 bp, Homo sapien
attgacgctgtagttgcccgcacca

SEQ ID NO: 1549904 - DNA, 25 bp, Homo sapien
ctcgatgagccactcgcagttgcca

SEQ ID NO: 1549905 - DNA, 25 bp, Homo sapien
gcaccatccgtcacgaagcctggcg

SEQ ID NO: 1549906 - DNA, 25 bp, Homo sapien
agcacggccaaggccaaaaccagtg

SEQ ID NO: 1549907 - DNA, 25 bp, Homo sapien
acttagactggcaagcagcggccct

SEQ ID NO: 1549908 - DNA, 25 bp, Homo sapien
catacgtgcactctgtgtccaggaa

SEQ ID NO: 1549909 - DNA, 25 bp, Homo sapien
ggagtcaccgtcatacacgaacagg

SEQ ID NO: 1549910 - DNA, 25 bp, Homo sapien
cttgcctgaggaagcttcgatgggc

SEQ ID NO: 1549911 - DNA, 25 bp, Homo sapien
tttccctcggtgtatctgccacggc

SEQ ID NO: 1549912 - DNA, 25 bp, Homo sapien
ttccatttccctcggtgtatctgcc

SEQ ID NO: 1549913 - DNA, 25 bp, Homo sapien
tcttcttccatttccctcggtgtat

SEQ ID NO: 1549914 - DNA, 25 bp, Homo sapien
catttccctcggtgtatctgccacg

SEQ ID NO: 1549915 - DNA, 25 bp, Homo sapien
gaagcggaatgaggcgttaaagccc

SEQ ID NO: 1549916 - DNA, 25 bp, Homo sapien
cggaatgaggcgttaaagcccagca

SEQ ID NO: 1549917 - DNA, 25 bp, Homo sapien
ggcgttaaagcccagcaggttgtag

SEQ ID NO: 1549918 - DNA, 25 bp, Homo sapien
cccgggcacagggagaagcggaatg

SEQ ID NO: 1549919 - DNA, 25 bp, Homo sapien
gtgcaggtcacaggcacgtcccaag

SEQ ID NO: 1549920 - DNA, 25 bp, Homo sapien
tcacaggcacgtcccaagaagccag

SEQ ID NO: 1549921 - DNA, 25 bp, Homo sapien
ccccaatacgggcagagaaggcagg

SEQ ID NO: 1549922 - DNA, 25 bp, Homo sapien
tggcactcacgttgtgccaccaccc

SEQ ID NO: 1549923 - DNA, 25 bp, Homo sapien
ttgtataggacgaggtcacccaggg

SEQ ID NO: 1549924 - DNA, 25 bp, Homo sapien
gagaagttgtataggacgaggtcac

SEQ ID NO: 1549925 - DNA, 25 bp, Homo sapien
actcccaggtgttggcggagaagtt

SEQ ID NO: 1549926 - DNA, 25 bp, Homo sapien
gggcaggactcaggtcccaagactc

SEQ ID NO: 1549927 - DNA, 25 bp, Homo sapien
tgtcaaggcggaaacggaagaggcc

SEQ ID NO: 1549928 - DNA, 25 bp, Homo sapien
aaggcccacacgtcgttggtgagcg

SEQ ID NO: 1549929 - DNA, 25 bp, Homo sapien
gggtgcggcctccagacacatatag

SEQ ID NO: 1549930 - DNA, 25 bp, Homo sapien
ggtgagcgagccgtcagccagctca

SEQ ID NO: 1549931 - DNA, 25 bp, Homo sapien
aaaagctcagtggagttcactcgca

SEQ ID NO: 1549932 - DNA, 25 bp, Homo sapien
ttcagcgtcgtccacacatgccgat

SEQ ID NO: 1549933 - DNA, 25 bp, Homo sapien
tgccgatccacgtggaaaagctcag

SEQ ID NO: 1549934 - DNA, 25 bp, Homo sapien
ctgtgtggaaggctcgctcccttgg

SEQ ID NO: 1549935 - DNA, 25 bp, Homo sapien
tggtaatgggtgtgcacattgcccc

SEQ ID NO: 1549936 - DNA, 25 bp, Homo sapien
tcctcctggtaatgggtgtgcacat

SEQ ID NO: 1549937 - DNA, 25 bp, Homo sapien
aagaagatgccatcttcgtagcact

SEQ ID NO: 1549938 - DNA, 25 bp, Homo sapien
gatgccatcttcgtagcacttttcc

SEQ ID NO: 1549939 - DNA, 25 bp, Homo sapien
aacagatgcgactctgggaagccca

SEQ ID NO: 1549940 - DNA, 25 bp, Homo sapien
gtgaaaggtttctccatatctcctc

SEQ ID NO: 1549941 - DNA, 25 bp, Homo sapien
tacgcccaacttgcaggtataagca

SEQ ID NO: 1549942 - DNA, 25 bp, Homo sapien
tgtggctttcatccgatttcaaagc

SEQ ID NO: 1549943 - DNA, 25 bp, Homo sapien
aagcaccgcagctacatgtgagtac

SEQ ID NO: 1549944 - DNA, 25 bp, Homo sapien
ttgtacgccatcaagtccccacggg

SEQ ID NO: 1549945 - DNA, 25 bp, Homo sapien
tgagtaccgaccactgggaggcgct

SEQ ID NO: 1549946 - DNA, 25 bp, Homo sapien
gggcaccttgtacgccatcaagtcc

SEQ ID NO: 1549947 - DNA, 25 bp, Homo sapien
gcagacgctgtggtctgtgtacatg

SEQ ID NO: 1549948 - DNA, 25 bp, Homo sapien
cgctgtggtctgtgtacatggagca

SEQ ID NO: 1549949 - DNA, 25 bp, Homo sapien
tggtctgtgtacatggagcagtagt

SEQ ID NO: 1549950 - DNA, 25 bp, Homo sapien
tggcaccaactgcattccgggtccc

SEQ ID NO: 1549951 - DNA, 25 bp, Homo sapien
cattgtgcacgcaccagcccagggt

SEQ ID NO: 1549952 - DNA, 25 bp, Homo sapien
caggcctagggaggcagctctcatt

SEQ ID NO: 1549953 - DNA, 25 bp, Homo sapien
ggaggcagctctcattgtgcacgca

SEQ ID NO: 1549954 - DNA, 25 bp, Homo sapien
gcagctctcattgtgcacgcaccag

SEQ ID NO: 1549955 - DNA, 25 bp, Homo sapien
gaagctctgggtgacgcaggcctcc

SEQ ID NO: 1549956 - DNA, 25 bp, Homo sapien
ggctgggaggtattgggcggctgct

SEQ ID NO: 1549957 - DNA, 25 bp, Homo sapien
acgtgacgaagacaggcgcaggccc

SEQ ID NO: 1549958 - DNA, 25 bp, Homo sapien
caggcctccagggacgtgacgaaga

SEQ ID NO: 1549959 - DNA, 25 bp, Homo sapien
gacacatctgtctctgcgctgggtg

SEQ ID NO: 1549960 - DNA, 25 bp, Homo sapien
gcagcattgggtagatgaagccacg

SEQ ID NO: 1549961 - DNA, 25 bp, Homo sapien
atccgggccaggacgtgtaggcgct

SEQ ID NO: 1549962 - DNA, 25 bp, Homo sapien
gccacggtagaccagggacacatct

SEQ ID NO: 1549963 - DNA, 25 bp, Homo sapien
ggcctttcaagtctgactcagacct

SEQ ID NO: 1549964 - DNA, 25 bp, Homo sapien
tgactcagaccttcctcacctgctt

SEQ ID NO: 1549965 - DNA, 25 bp, Homo sapien
tcaagtctgactcagaccttcctca

SEQ ID NO: 1549966 - DNA, 25 bp, Homo sapien
ttcaggggcctttcaagtctgactc

SEQ ID NO: 1549967 - DNA, 25 bp, Homo sapien
gatcccacagcagagttagctcgct

SEQ ID NO: 1549968 - DNA, 25 bp, Homo sapien
tggccctggatctctactgcatact

SEQ ID NO: 1549969 - DNA, 25 bp, Homo sapien
catacttgtggtcccgcccaggcag

SEQ ID NO: 1549970 - DNA, 25 bp, Homo sapien
ctgccgagccattgagctggccctg

SEQ ID NO: 1549971 - DNA, 25 bp, Homo sapien
cgatgctcctcgcagagtgggcaga

SEQ ID NO: 1549972 - DNA, 25 bp, Homo sapien
caatgggctccgccctggcgcaggt

SEQ ID NO: 1549973 - DNA, 25 bp, Homo sapien
tgcaggacgacgagcggtagggctc

SEQ ID NO: 1549974 - DNA, 25 bp, Homo sapien
tgcaggcgtggcagtcccgatgctc

SEQ ID NO: 1549975 - DNA, 25 bp, Homo sapien
gctgtggctccctccaccttgtgac

SEQ ID NO: 1549976 - DNA, 25 bp, Homo sapien
gactgcccattgcctgctgtggctc

SEQ ID NO: 1549977 - DNA, 25 bp, Homo sapien
tgctgtggctccctccaccttgtga

SEQ ID NO: 1549978 - DNA, 25 bp, Homo sapien
caggggttcccttgactgcccattg

SEQ ID NO: 1549979 - DNA, 25 bp, Homo sapien
agagcgggggacactcctctggact

SEQ ID NO: 1549980 - DNA, 25 bp, Homo sapien
gcgggggacactcctctggactctt

SEQ ID NO: 1549981 - DNA, 25 bp, Homo sapien
gctgcatgccgcgtcccctttgcgg

SEQ ID NO: 1549982 - DNA, 25 bp, Homo sapien
ccctttgcggctggtgctctgatgc

SEQ ID NO: 1549983 - DNA, 25 bp, Homo sapien
ggtaccgggccaagtaggcagcaaa

SEQ ID NO: 1549984 - DNA, 25 bp, Homo sapien
ggtgtgggtggactggcaccaggcg

SEQ ID NO: 1549985 - DNA, 25 bp, Homo sapien
gccaagtaggcagcaaacaggaagc

SEQ ID NO: 1549986 - DNA, 25 bp, Homo sapien
gcaccaggcgcactggctagagttg

SEQ ID NO: 1549987 - DNA, 25 bp, Homo sapien
cagtgtggggttgtcctcattgcca

SEQ ID NO: 1549988 - DNA, 25 bp, Homo sapien
ctctgcagacactcatggcaggtca

SEQ ID NO: 1549989 - DNA, 25 bp, Homo sapien
tcccagtgtggggttgtcctcattg

SEQ ID NO: 1549990 - DNA, 25 bp, Homo sapien
ctgcagacactcatggcaggtcagg

SEQ ID NO: 1549991 - DNA, 25 bp, Homo sapien
tgtgagatgccatcaccctggtagc

SEQ ID NO: 1549992 - DNA, 25 bp, Homo sapien
atccacgtcaggacagcgggcgtat

SEQ ID NO: 1549993 - DNA, 25 bp, Homo sapien
gtgttcaggcaggtcgcccgcgggt

SEQ ID NO: 1549994 - DNA, 25 bp, Homo sapien
gctggcagtgacactcgtagctgag

SEQ ID NO: 1549995 - DNA, 25 bp, Homo sapien
agggccccgcttgcggcagtggctg

SEQ ID NO: 1549996 - DNA, 25 bp, Homo sapien
aggtctgatgtccagcctaggtcac

SEQ ID NO: 1549997 - DNA, 25 bp, Homo sapien
cctggcactcgtcgcagaagccagg

SEQ ID NO: 1549998 - DNA, 25 bp, Homo sapien
gtcacacacgcaggtaaagtccggg

SEQ ID NO: 1549999 - DNA, 25 bp, Homo sapien
cactgaggttgtcgcagtggccacg

SEQ ID NO: 1550000 - DNA, 25 bp, Homo sapien
gggccggcatcgttcgcagtgctcc

SEQ ID NO: 1550001 - DNA, 25 bp, Homo sapien
agcctgtggcgttgccgaagctgcc

SEQ ID NO: 1550002 - DNA, 25 bp, Homo sapien
accctcggtgtggtcctggcagaag

SEQ ID NO: 1550003 - DNA, 25 bp, Homo sapien
gacccggcgtgagcccagtgccact

SEQ ID NO: 1550004 - DNA, 25 bp, Homo sapien
acacgttggtgaggagggcgcgacc

SEQ ID NO: 1550005 - DNA, 25 bp, Homo sapien
tagctcctcagtggccgagacaacc

SEQ ID NO: 1550006 - DNA, 25 bp, Homo sapien
agtgccactgaggacacgttggtga

SEQ ID NO: 1550007 - DNA, 25 bp, Homo sapien
tatgaggctgcggtccgactggaca

SEQ ID NO: 1550008 - DNA, 25 bp, Homo sapien
caggaagcgtgggaatccatcaaac

SEQ ID NO: 1550009 - DNA, 25 bp, Homo sapien
catcaaacgccaggacgtagctcag

SEQ ID NO: 1550010 - DNA, 25 bp, Homo sapien
gacaacaccagtgtccaggaagcgt

SEQ ID NO: 1550011 - DNA, 25 bp, Homo sapien
ttggcctcccagtgcagcacgagca

SEQ ID NO: 1550012 - DNA, 25 bp, Homo sapien
ccaggatgaggagccattggcctcc

SEQ ID NO: 1550013 - DNA, 25 bp, Homo sapien
gatgaggagccattggcctcccagt

SEQ ID NO: 1550014 - DNA, 25 bp, Homo sapien
cgaagcattgaagccccaggatgag

SEQ ID NO: 1550015 - DNA, 25 bp, Homo sapien
cccctgacccacagcgggcagagcc

SEQ ID NO: 1550016 - DNA, 25 bp, Homo sapien
ggccccctgacccacagcgggcaga

SEQ ID NO: 1550017 - DNA, 25 bp, Homo sapien
ccctgacccacagcgggcagagccc

SEQ ID NO: 1550018 - DNA, 25 bp, Homo sapien
gccccctgacccacagcgggcagag

SEQ ID NO: 1550019 - DNA, 25 bp, Homo sapien
attgcagttctcaggacacagagcc

SEQ ID NO: 1550020 - DNA, 25 bp, Homo sapien
agccctgaggacatcggcagagccc

SEQ ID NO: 1550021 - DNA, 25 bp, Homo sapien
acacagagccatgcggcagtgtggg

SEQ ID NO: 1550022 - DNA, 25 bp, Homo sapien
ctggttacaagttcctgccccagtg

SEQ ID NO: 1550023 - DNA, 25 bp, Homo sapien
ctgagaggcggctgtccatgagggt

SEQ ID NO: 1550024 - DNA, 25 bp, Homo sapien
gagaggcggctgtccatgagggtct

SEQ ID NO: 1550025 - DNA, 25 bp, Homo sapien
tgagaggcggctgtccatgagggtc

SEQ ID NO: 1550026 - DNA, 25 bp, Homo sapien
acaaggtggcatcgggtccatccac

SEQ ID NO: 1550027 - DNA, 25 bp, Homo sapien
catccacaaggtggcatcgggtcca

SEQ ID NO: 1550028 - DNA, 25 bp, Homo sapien
aggtggcatcgggtccatccaccat

SEQ ID NO: 1550029 - DNA, 25 bp, Homo sapien
cccaaacatccacaaggtggcatcg

SEQ ID NO: 1550030 - DNA, 25 bp, Homo sapien
agatacatggcaccacggccagcgg

SEQ ID NO: 1550031 - DNA, 25 bp, Homo sapien
tcctgccgccattgcagggtggtga

SEQ ID NO: 1550032 - DNA, 25 bp, Homo sapien
gggtgacgcctccagcggtaagtcc

SEQ ID NO: 1550033 - DNA, 25 bp, Homo sapien
tgaggacccagaaatcacgggtgac

SEQ ID NO: 1550034 - DNA, 25 bp, Homo sapien
ggcgggcagtaagggtgtgaccagc

SEQ ID NO: 1550035 - DNA, 25 bp, Homo sapien
ggcctcggcgggcagtaagggtgtg

SEQ ID NO: 1550036 - DNA, 25 bp, Homo sapien
gggagtaaccgcccaccaggagcag

SEQ ID NO: 1550037 - DNA, 25 bp, Homo sapien
gcaacggctggcagctccacggtct

SEQ ID NO: 1550038 - DNA, 25 bp, Homo sapien
tgacacccaggtgccggttgccagc

SEQ ID NO: 1550039 - DNA, 25 bp, Homo sapien
ccaggtgccggttgccagctggtac

SEQ ID NO: 1550040 - DNA, 25 bp, Homo sapien
acccaggtgccggttgccagctggt

SEQ ID NO: 1550041 - DNA, 25 bp, Homo sapien
ctcctgacacccaggtgccggttgc

SEQ ID NO: 1550042 - DNA, 25 bp, Homo sapien
ccagcagactccaggtgcggtcagg

SEQ ID NO: 1550043 - DNA, 25 bp, Homo sapien
tagacagcagagtgaccatagagac

SEQ ID NO: 1550044 - DNA, 25 bp, Homo sapien
gagtcggtggcctcgtggtagacag

SEQ ID NO: 1550045 - DNA, 25 bp, Homo sapien
cccaaacacgtagagggagtcggtg

SEQ ID NO: 1550046 - DNA, 25 bp, Homo sapien
gagccacgcacattcctcatacgat

SEQ ID NO: 1550047 - DNA, 25 bp, Homo sapien
aggaaacctcctgtaccagcaagag

SEQ ID NO: 1550048 - DNA, 25 bp, Homo sapien
ctccttcaggtgaggtgagatttcc

SEQ ID NO: 1550049 - DNA, 25 bp, Homo sapien
aggaacttggcccagaccccgagat

SEQ ID NO: 1550050 - DNA, 25 bp, Homo sapien
ggtagagcagaacgtcgctgctgaa

SEQ ID NO: 1550051 - DNA, 25 bp, Homo sapien
tgcagttgacctggtagagcagaac

SEQ ID NO: 1550052 - DNA, 25 bp, Homo sapien
cgctgctgaactcgtcagggtccga

SEQ ID NO: 1550053 - DNA, 25 bp, Homo sapien
catggtgtcccctaacagggctgag

SEQ ID NO: 1550054 - DNA, 25 bp, Homo sapien
tgtgggcctgatccccggacaagca

SEQ ID NO: 1550055 - DNA, 25 bp, Homo sapien
ggtgcaggccccagactggttacaa

SEQ ID NO: 1550056 - DNA, 25 bp, Homo sapien
atgggccacagactcctccattggg

SEQ ID NO: 1550057 - DNA, 25 bp, Homo sapien
ccagagatatacaggcggctcccga

SEQ ID NO: 1550058 - DNA, 25 bp, Homo sapien
caggtccggagacgtcgacattcct

SEQ ID NO: 1550059 - DNA, 25 bp, Homo sapien
ccggagacgtcgacattcctccggg

SEQ ID NO: 1550060 - DNA, 25 bp, Homo sapien
ctgcaggtccggagacgtcgacatt

SEQ ID NO: 1550061 - DNA, 25 bp, Homo sapien
ggtccggagacgtcgacattcctcc

SEQ ID NO: 1550062 - DNA, 25 bp, Homo sapien
tgcagggtccgaggatggcgggcca

SEQ ID NO: 1550063 - DNA, 25 bp, Homo sapien
gttgcagggtccgaggatggcgggc

SEQ ID NO: 1550064 - DNA, 25 bp, Homo sapien
caggttgcagggtccgaggatggcg

SEQ ID NO: 1550065 - DNA, 25 bp, Homo sapien
cagggtccgaggatggcgggccagg

SEQ ID NO: 1550066 - DNA, 25 bp, Homo sapien
gatccgacagtcattctcagaggtg

SEQ ID NO: 1550067 - DNA, 25 bp, Homo sapien
attgcgtccaatgcaagcaccttcg

SEQ ID NO: 1550068 - DNA, 25 bp, Homo sapien
gacctctcgctggttgatccgacag

SEQ ID NO: 1550069 - DNA, 25 bp, Homo sapien
cgcgtgcactgctcgcagtcagcag

SEQ ID NO: 1550070 - DNA, 25 bp, Homo sapien
cacgtccagtcataggtgggctgca

SEQ ID NO: 1550071 - DNA, 25 bp, Homo sapien
tgcacggagaggatgcggcgggtct

SEQ ID NO: 1550072 - DNA, 25 bp, Homo sapien
tccaggcaggaggtacagttgggta

SEQ ID NO: 1550073 - DNA, 25 bp, Homo sapien
agcagagagtggctgaagcacgtcc

SEQ ID NO: 1550074 - DNA, 25 bp, Homo sapien
cagggaccctcatgaggcaacgagg

SEQ ID NO: 1550075 - DNA, 25 bp, Homo sapien
tggcacgagaaggaagcacgactgc

SEQ ID NO: 1550076 - DNA, 25 bp, Homo sapien
gaggagaccatgataccatggacaa

SEQ ID NO: 1550077 - DNA, 25 bp, Homo sapien
cacacagaagcatggctggaggaca

SEQ ID NO: 1550078 - DNA, 25 bp, Homo sapien
actgagacttgctgaactgccagag

SEQ ID NO: 1550079 - DNA, 25 bp, Homo sapien
taaatttagggcacttgttggcaga

SEQ ID NO: 1550080 - DNA, 25 bp, Homo sapien
tctgctgtaatctccctagtgacca

SEQ ID NO: 1550081 - DNA, 25 bp, Homo sapien
aatttgggccggctgcctgaaagca

SEQ ID NO: 1550082 - DNA, 25 bp, Homo sapien
gctgagtccaccctccatgcagcgg

SEQ ID NO: 1550083 - DNA, 25 bp, Homo sapien
ccgcaggcacaaggcgcactgagtt

SEQ ID NO: 1550084 - DNA, 25 bp, Homo sapien
ccaggcacaccagccgcaatggggg

SEQ ID NO: 1550085 - DNA, 25 bp, Homo sapien
cagcctccggccatacatcgcaggg

SEQ ID NO: 1550086 - DNA, 25 bp, Homo sapien
gtttgcacactcgtcctcagggggg

SEQ ID NO: 1550087 - DNA, 25 bp, Homo sapien
gcaattctgcgtctcgttgcagtcg

SEQ ID NO: 1550088 - DNA, 25 bp, Homo sapien
ttgcagctgcactcatagccgtggg

SEQ ID NO: 1550089 - DNA, 25 bp, Homo sapien
ttgtccatggtatagccggtcttgc

SEQ ID NO: 1550090 - DNA, 25 bp, Homo sapien
actgtggcggttgcagcggcattcc

SEQ ID NO: 1550091 - DNA, 25 bp, Homo sapien
cacagggcggcacagccctgtcatg

SEQ ID NO: 1550092 - DNA, 25 bp, Homo sapien
gcattccgtggagcagttgcggccc

SEQ ID NO: 1550093 - DNA, 25 bp, Homo sapien
gcagtggtcgggctccacacatgag

SEQ ID NO: 1550094 - DNA, 25 bp, Homo sapien
ggaggcactgctcacagtggctgcc

SEQ ID NO: 1550095 - DNA, 25 bp, Homo sapien
agcgggaggcactgctcacagtggc

SEQ ID NO: 1550096 - DNA, 25 bp, Homo sapien
aaacagcgggaggcactgctcacag

SEQ ID NO: 1550097 - DNA, 25 bp, Homo sapien
gcgggaggcactgctcacagtggct

SEQ ID NO: 1550098 - DNA, 25 bp, Homo sapien
tccacgacaaaaggcgtggcagggc

SEQ ID NO: 1550099 - DNA, 25 bp, Homo sapien
cagatgtggctatttccacgacaaa

SEQ ID NO: 1550100 - DNA, 25 bp, Homo sapien
tcctggagatgcagatgtggctatt

SEQ ID NO: 1550101 - DNA, 25 bp, Homo sapien
tggctatttccacgacaaaaggcgt

SEQ ID NO: 1550102 - DNA, 25 bp, Homo sapien
ggtgcacttcccgtccaggaggaag

SEQ ID NO: 1550103 - DNA, 25 bp, Homo sapien
aggcagctctcgcatttctccccat

SEQ ID NO: 1550104 - DNA, 25 bp, Homo sapien
gcacacggcctcgtcttcactagga

SEQ ID NO: 1550105 - DNA, 25 bp, Homo sapien
cccatagctgttattctggcagttc

SEQ ID NO: 1550106 - DNA, 25 bp, Homo sapien
tgtccgcgtggccattacactggca

SEQ ID NO: 1550107 - DNA, 25 bp, Homo sapien
tggcatgtgcccgtctctgtgttat

SEQ ID NO: 1550108 - DNA, 25 bp, Homo sapien
cgtcccatcctgctcgttacatgtg

SEQ ID NO: 1550109 - DNA, 25 bp, Homo sapien
tattctgacatggacagcccgtccc

SEQ ID NO: 1550110 - DNA, 25 bp, Homo sapien
tgggctgcacgccaaagaggacagt

SEQ ID NO: 1550111 - DNA, 25 bp, Homo sapien
cggactcccgtgaaatgattcccgg

SEQ ID NO: 1550112 - DNA, 25 bp, Homo sapien
tcaggcggatgtccacgttggtgaa

SEQ ID NO: 1550113 - DNA, 25 bp, Homo sapien
cacggaccacgaaggtgtcatagga

SEQ ID NO: 1550114 - DNA, 25 bp, Homo sapien
ggcgcccggcccactgctggcccct

SEQ ID NO: 1550115 - DNA, 25 bp, Homo sapien
gcccggcccactgctggcccctgct

SEQ ID NO: 1550116 - DNA, 25 bp, Homo sapien
ctcccgtacccgtggctctgctggg

SEQ ID NO: 1550117 - DNA, 25 bp, Homo sapien
tcccgtacccgtggctctgctgggg

SEQ ID NO: 1550118 - DNA, 25 bp, Homo sapien
cgtaggtaatcaggccccgcggcca

SEQ ID NO: 1550119 - DNA, 25 bp, Homo sapien
gacggctccgtcaccgtcacgtagg

SEQ ID NO: 1550120 - DNA, 25 bp, Homo sapien
tagaagcggctcgacttgagggcat

SEQ ID NO: 1550121 - DNA, 25 bp, Homo sapien
gtaggtgatgaccagccggtcccgc

SEQ ID NO: 1550122 - DNA, 25 bp, Homo sapien
tgagccgttggcgccgggcccactt

SEQ ID NO: 1550123 - DNA, 25 bp, Homo sapien
caaacaggtcaatgtgggcctggtc

SEQ ID NO: 1550124 - DNA, 25 bp, Homo sapien
gaagagcaggccctgcgagtcggct

SEQ ID NO: 1550125 - DNA, 25 bp, Homo sapien
gaagcaggagaagaagacggagaag

SEQ ID NO: 1550126 - DNA, 25 bp, Homo sapien
tgctggtgaggttgtcctggctcaa

SEQ ID NO: 1550127 - DNA, 25 bp, Homo sapien
ctgccgctggtccagagcctgcttg

SEQ ID NO: 1550128 - DNA, 25 bp, Homo sapien
cgcagtgtgacgagggctgacccca

SEQ ID NO: 1550129 - DNA, 25 bp, Homo sapien
ttggtcatctcctgcaagtgccggc

SEQ ID NO: 1550130 - DNA, 25 bp, Homo sapien
cagtctagcttctttgaatgcccag

SEQ ID NO: 1550131 - DNA, 25 bp, Homo sapien
tgaagggcatctcatgtcaagaacc

SEQ ID NO: 1550132 - DNA, 25 bp, Homo sapien
tcttctcaggcgttctcagtctagc

SEQ ID NO: 1550133 - DNA, 25 bp, Homo sapien
tccctagttggacctgagtgaagag

SEQ ID NO: 1550134 - DNA, 25 bp, Homo sapien
ggaagatgcaaagtccagtccctcc

SEQ ID NO: 1550135 - DNA, 25 bp, Homo sapien
actgaggctccacgcgaagggaaga

SEQ ID NO: 1550136 - DNA, 25 bp, Homo sapien
gacatgcacgcattggctagggcct

SEQ ID NO: 1550137 - DNA, 25 bp, Homo sapien
gctgtgcactgacggtaccggcatt

SEQ ID NO: 1550138 - DNA, 25 bp, Homo sapien
cctcttcttctgatgtggtccccac

SEQ ID NO: 1550139 - DNA, 25 bp, Homo sapien
tcttcttctgatgtggtccccacca

SEQ ID NO: 1550140 - DNA, 25 bp, Homo sapien
tcacccccctcttcttctgatgtgg

SEQ ID NO: 1550141 - DNA, 25 bp, Homo sapien
cccctcttcttctgatgtggtcccc

SEQ ID NO: 1550142 - DNA, 25 bp, Homo sapien
tcacacacatgcagcaatataatca

SEQ ID NO: 1550143 - DNA, 25 bp, Homo sapien
cacacacatgcagcaatataatcac

SEQ ID NO: 1550144 - DNA, 25 bp, Homo sapien
cagactcggagaacccgttccctcg

SEQ ID NO: 1550145 - DNA, 25 bp, Homo sapien
ctcagtagcttggaccataggcatg

SEQ ID NO: 1550146 - DNA, 25 bp, Homo sapien
cctcctcagtagcttggaccatagg

SEQ ID NO: 1550147 - DNA, 25 bp, Homo sapien
tcctcagtagcttggaccataggca

SEQ ID NO: 1550148 - DNA, 25 bp, Homo sapien
ccaagcctgtctaattttttgcatt

SEQ ID NO: 1550149 - DNA, 25 bp, Homo sapien
tgcacgccaccgctgccttttgctg

SEQ ID NO: 1550150 - DNA, 25 bp, Homo sapien
tgctgctgcggcgaccgccgcaggg

SEQ ID NO: 1550151 - DNA, 25 bp, Homo sapien
accggtcaccgagacggctggacct

SEQ ID NO: 1550152 - DNA, 25 bp, Homo sapien
ggctggacctgcacgccaccgctgc

SEQ ID NO: 1550153 - DNA, 25 bp, Homo sapien
gcctgccacccgaagcctttgagat

SEQ ID NO: 1550154 - DNA, 25 bp, Homo sapien
ttgagatgccactgactgccgaccc

SEQ ID NO: 1550155 - DNA, 25 bp, Homo sapien
tctggaacatcaccgagatggaagt

SEQ ID NO: 1550156 - DNA, 25 bp, Homo sapien
catggcatcggccaccgtgagggta

SEQ ID NO: 1550157 - DNA, 25 bp, Homo sapien
tgagtttgagcggatcacacagaac

SEQ ID NO: 1550158 - DNA, 25 bp, Homo sapien
gtttgagcggatcacacagaacctg

SEQ ID NO: 1550159 - DNA, 25 bp, Homo sapien
acctggacgtgcacttctggaaagc

SEQ ID NO: 1550160 - DNA, 25 bp, Homo sapien
tcacacagaacctggacgtgcactt

SEQ ID NO: 1550161 - DNA, 25 bp, Homo sapien
gtgagtcccagccaggttctactcg

SEQ ID NO: 1550162 - DNA, 25 bp, Homo sapien
ttctgacccctaggtgtggccgcca

SEQ ID NO: 1550163 - DNA, 25 bp, Homo sapien
gttctactcgcagcctactctcttg

SEQ ID NO: 1550164 - DNA, 25 bp, Homo sapien
aaacgcaacgagacaggcctcagtg

SEQ ID NO: 1550165 - DNA, 25 bp, Homo sapien
tccttgtcatgatactgcgcgtggc

SEQ ID NO: 1550166 - DNA, 25 bp, Homo sapien
ggtccgtgaaccagccgagagctat

SEQ ID NO: 1550167 - DNA, 25 bp, Homo sapien
catccctctcttgagcggtgggtga

SEQ ID NO: 1550168 - DNA, 25 bp, Homo sapien
tgaatgaatgtgtcttccccgcaca

SEQ ID NO: 1550169 - DNA, 25 bp, Homo sapien
actactctctattgtcctacatgca

SEQ ID NO: 1550170 - DNA, 25 bp, Homo sapien
ggtcatatctgctaggtggtaagaa

SEQ ID NO: 1550171 - DNA, 25 bp, Homo sapien
taagaaatgcaacttgcagagcttt

SEQ ID NO: 1550172 - DNA, 25 bp, Homo sapien
ttcaccaggatatccactactctct

SEQ ID NO: 1550173 - DNA, 25 bp, Homo sapien
taacaggactaccagttgagctgag

SEQ ID NO: 1550174 - DNA, 25 bp, Homo sapien
tggactcctgggttctaaggcagag

SEQ ID NO: 1550175 - DNA, 25 bp, Homo sapien
cgggagctgagatcactgggccttt

SEQ ID NO: 1550176 - DNA, 25 bp, Homo sapien
tctgtttacagcacgtggtcctcac

SEQ ID NO: 1550177 - DNA, 25 bp, Homo sapien
tgtgtgctaaaaagatcctgtggct

SEQ ID NO: 1550178 - DNA, 25 bp, Homo sapien
cagtatggagaaagacccgaggctt

SEQ ID NO: 1550179 - DNA, 25 bp, Homo sapien
cctgtggctgctatgtggacaacaa

SEQ ID NO: 1550180 - DNA, 25 bp, Homo sapien
taaagatctgtcatagtcacccagg

SEQ ID NO: 1550181 - DNA, 25 bp, Homo sapien
tcattatcgggagcatggattaggg

SEQ ID NO: 1550182 - DNA, 25 bp, Homo sapien
ccaggaaaagcgcaataggagaact

SEQ ID NO: 1550183 - DNA, 25 bp, Homo sapien
tgcctttttgttggccgcgagccct

SEQ ID NO: 1550184 - DNA, 25 bp, Homo sapien
cagcacgtgggaagatcgggacttc

SEQ ID NO: 1550185 - DNA, 25 bp, Homo sapien
gtgcgtgtgagcaagcctcgagcct

SEQ ID NO: 1550186 - DNA, 25 bp, Homo sapien
gaggttgcctttcaggcggtccaga

SEQ ID NO: 1550187 - DNA, 25 bp, Homo sapien
ggatagaaagctgtttctccaggcc

SEQ ID NO: 1550188 - DNA, 25 bp, Homo sapien
gagtaacgcgtttctcagcgccggg

SEQ ID NO: 1550189 - DNA, 25 bp, Homo sapien
tacttgttgaagtcccctgatgtgg

SEQ ID NO: 1550190 - DNA, 25 bp, Homo sapien
gagccgccaaggtctcaggcaaggt

SEQ ID NO: 1550191 - DNA, 25 bp, Homo sapien
ttgtgttctcagcaaggaggagccg

SEQ ID NO: 1550192 - DNA, 25 bp, Homo sapien
agcagcatcagaggataacgggccc

SEQ ID NO: 1550193 - DNA, 25 bp, Homo sapien
ctaggcagaacattggggcatcaac

SEQ ID NO: 1550194 - DNA, 25 bp, Homo sapien
ccttctggagtttccaggcaggcta

SEQ ID NO: 1550195 - DNA, 25 bp, Homo sapien
tccaggcaggctaggcagaacattg

SEQ ID NO: 1550196 - DNA, 25 bp, Homo sapien
gagtttccaggcaggctaggcagaa

SEQ ID NO: 1550197 - DNA, 25 bp, Homo sapien
gagcgcccactcttccaattaaaca

SEQ ID NO: 1550198 - DNA, 25 bp, Homo sapien
tgcctttgtaggagctctgagcgcc

SEQ ID NO: 1550199 - DNA, 25 bp, Homo sapien
gccaaacaagcattccagagcctgc

SEQ ID NO: 1550200 - DNA, 25 bp, Homo sapien
ggcttaattacctgaaagattccag

SEQ ID NO: 1550201 - DNA, 25 bp, Homo sapien
ggaatcaaggatcatagaagccaag

SEQ ID NO: 1550202 - DNA, 25 bp, Homo sapien
agtgacagagccagtagctgacccc

SEQ ID NO: 1550203 - DNA, 25 bp, Homo sapien
ctctgcaaggaggattttaccaccc

SEQ ID NO: 1550204 - DNA, 25 bp, Homo sapien
gaccccaggcctatgtggatataaa

SEQ ID NO: 1550205 - DNA, 25 bp, Homo sapien
gcaccgacagttgcgatgaaagttc

SEQ ID NO: 1550206 - DNA, 25 bp, Homo sapien
ccgacagttgcgatgaaagttctaa

SEQ ID NO: 1550207 - DNA, 25 bp, Homo sapien
gctgcaccgacagttgcgatgaaag

SEQ ID NO: 1550208 - DNA, 25 bp, Homo sapien
tgcaccgacagttgcgatgaaagtt

SEQ ID NO: 1550209 - DNA, 25 bp, Homo sapien
ccattatgaggctgttagtagagaa

SEQ ID NO: 1550210 - DNA, 25 bp, Homo sapien
ctggaggttagaggaatcagtaaga

SEQ ID NO: 1550211 - DNA, 25 bp, Homo sapien
tggctccattatgaggctgttagta

SEQ ID NO: 1550212 - DNA, 25 bp, Homo sapien
cagtaagagatttagatggctccat

SEQ ID NO: 1550213 - DNA, 25 bp, Homo sapien
tagtgcttacacaaggtcctctgat

SEQ ID NO: 1550214 - DNA, 25 bp, Homo sapien
ggtcctctgattcccccaggatcta

SEQ ID NO: 1550215 - DNA, 25 bp, Homo sapien
tttcctcacatagtgcttacacaag

SEQ ID NO: 1550216 - DNA, 25 bp, Homo sapien
ccaggatctaggaggactgggtaaa

SEQ ID NO: 1550217 - DNA, 25 bp, Homo sapien
cctgccccacaagcctgcagattct

SEQ ID NO: 1550218 - DNA, 25 bp, Homo sapien
ccccacaagcctgcagattctgaga

SEQ ID NO: 1550219 - DNA, 25 bp, Homo sapien
tgccccacaagcctgcagattctga

SEQ ID NO: 1550220 - DNA, 25 bp, Homo sapien
ccacaagcctgcagattctgagatg

SEQ ID NO: 1550221 - DNA, 25 bp, Homo sapien
ggcaagctgagggataattgcagtt

SEQ ID NO: 1550222 - DNA, 25 bp, Homo sapien
tgtgcttgaggccatgctgttgtat

SEQ ID NO: 1550223 - DNA, 25 bp, Homo sapien
gataattgcagttgccacctccacc

SEQ ID NO: 1550224 - DNA, 25 bp, Homo sapien
catgctgttgtatctggagagatga

SEQ ID NO: 1550225 - DNA, 25 bp, Homo sapien
ccaggagccctgaccaaatgggtaa

SEQ ID NO: 1550226 - DNA, 25 bp, Homo sapien
gaaaagtgattcttgagcaactggc

SEQ ID NO: 1550227 - DNA, 25 bp, Homo sapien
gaagggagccctttcctatggccac

SEQ ID NO: 1550228 - DNA, 25 bp, Homo sapien
tgttccccaggtagcttatccagga

SEQ ID NO: 1550229 - DNA, 25 bp, Homo sapien
tggctacaataataccactgcgcac

SEQ ID NO: 1550230 - DNA, 25 bp, Homo sapien
gctacaataataccactgcgcacaa

SEQ ID NO: 1550231 - DNA, 25 bp, Homo sapien
ggctacaataataccactgcgcaca

SEQ ID NO: 1550232 - DNA, 25 bp, Homo sapien
tacaataataccactgcgcacaacc

SEQ ID NO: 1550233 - DNA, 25 bp, Homo sapien
aaattacttcttgtgaagagactga

SEQ ID NO: 1550234 - DNA, 25 bp, Homo sapien
taaattacttcttgtgaagagactg

SEQ ID NO: 1550235 - DNA, 25 bp, Homo sapien
attacttcttgtgaagagactgaaa

SEQ ID NO: 1550236 - DNA, 25 bp, Homo sapien
ataaattacttcttgtgaagagact

SEQ ID NO: 1550237 - DNA, 25 bp, Homo sapien
aaaatcagaaaagagaatccagttg

SEQ ID NO: 1550238 - DNA, 25 bp, Homo sapien
aatcagaaaagagaatccagttgtt

SEQ ID NO: 1550239 - DNA, 25 bp, Homo sapien
tcagaaaagagaatccagttgttgt

SEQ ID NO: 1550240 - DNA, 25 bp, Homo sapien
agaaaagagaatccagttgttgtgg

SEQ ID NO: 1550241 - DNA, 25 bp, Homo sapien
gtttgactgccgatgtggaaatttg

SEQ ID NO: 1550242 - DNA, 25 bp, Homo sapien
tgactgccgatgtggaaatttgttt

SEQ ID NO: 1550243 - DNA, 25 bp, Homo sapien
aggtttgactgccgatgtggaaatt

SEQ ID NO: 1550244 - DNA, 25 bp, Homo sapien
ttgactgccgatgtggaaatttgtt

SEQ ID NO: 1550245 - DNA, 25 bp, Homo sapien
aaagctcctgaattgcccaaaccaa

SEQ ID NO: 1550246 - DNA, 25 bp, Homo sapien
tttttcagcccagtacttctcagag

SEQ ID NO: 1550247 - DNA, 25 bp, Homo sapien
agctcctgaattgcccaaaccaaag

SEQ ID NO: 1550248 - DNA, 25 bp, Homo sapien
ctcctgaattgcccaaaccaaagaa

SEQ ID NO: 1550249 - DNA, 25 bp, Homo sapien
ttttatggaaatcctaggacaaatg

SEQ ID NO: 1550250 - DNA, 25 bp, Homo sapien
atggaatgtgttcagtttgctacaa

SEQ ID NO: 1550251 - DNA, 25 bp, Homo sapien
gaaatcctaggacaaatggaatgtg

SEQ ID NO: 1550252 - DNA, 25 bp, Homo sapien
atgtgttcagtttgctacaaagaac

SEQ ID NO: 1550253 - DNA, 25 bp, Homo sapien
tgatgaatatgttctgaagattgat

SEQ ID NO: 1550254 - DNA, 25 bp, Homo sapien
gaataggcaagttcacagaaacaaa

SEQ ID NO: 1550255 - DNA, 25 bp, Homo sapien
atattgagaataggcaagttcacag

SEQ ID NO: 1550256 - DNA, 25 bp, Homo sapien
aaggagcaattactaatgggtatgg

SEQ ID NO: 1550257 - DNA, 25 bp, Homo sapien
tacagtggatggatctttgcccctc

SEQ ID NO: 1550258 - DNA, 25 bp, Homo sapien
cgcccaaaccaagatacagatggaa

SEQ ID NO: 1550259 - DNA, 25 bp, Homo sapien
tgtaaccatgctagaagacactccc

SEQ ID NO: 1550260 - DNA, 25 bp, Homo sapien
tgcccctctgcaacccttaggatta

SEQ ID NO: 1550261 - DNA, 25 bp, Homo sapien
tactaacatatagccaggatggagc

SEQ ID NO: 1550262 - DNA, 25 bp, Homo sapien
cagacactactaacatatagccagg

SEQ ID NO: 1550263 - DNA, 25 bp, Homo sapien
tttaagccttcccagacactactaa

SEQ ID NO: 1550264 - DNA, 25 bp, Homo sapien
ttcccagacactactaacatatagc

SEQ ID NO: 1550265 - DNA, 25 bp, Homo sapien
catggatcgctaactcttcttttgc

SEQ ID NO: 1550266 - DNA, 25 bp, Homo sapien
ttccatggatcgctaactcttcttt

SEQ ID NO: 1550267 - DNA, 25 bp, Homo sapien
tgcatttccatggatcgctaactct

SEQ ID NO: 1550268 - DNA, 25 bp, Homo sapien
catttccatggatcgctaactcttc

SEQ ID NO: 1550269 - DNA, 25 bp, Homo sapien
ctactaaaaatacaaaattagccag

SEQ ID NO: 1550270 - DNA, 25 bp, Homo sapien
accaggatggagaaaccccgtctct

SEQ ID NO: 1550271 - DNA, 25 bp, Homo sapien
aggtcgggagttcaagaccagcctg

SEQ ID NO: 1550272 - DNA, 25 bp, Homo sapien
ggaggttgaggcaggcgggtcacct

SEQ ID NO: 1550273 - DNA, 25 bp, Homo sapien
tatatataagttagtgtattctgca

SEQ ID NO: 1550274 - DNA, 25 bp, Homo sapien
tcctgccactttgctaaatttatta

SEQ ID NO: 1550275 - DNA, 25 bp, Homo sapien
gtattttcagggtacaaatctttca

SEQ ID NO: 1550276 - DNA, 25 bp, Homo sapien
tgtggaatctctagggttttctata

SEQ ID NO: 1550277 - DNA, 25 bp, Homo sapien
ctatttctttttgccagtaccatac

SEQ ID NO: 1550278 - DNA, 25 bp, Homo sapien
ctttctgggctctatattttattcc

SEQ ID NO: 1550279 - DNA, 25 bp, Homo sapien
attactgtagcttttggattttgtt

SEQ ID NO: 1550280 - DNA, 25 bp, Homo sapien
ctatattttattccactggtttcta

SEQ ID NO: 1550281 - DNA, 25 bp, Homo sapien
cttcttctttcgttgcctatgcttt

SEQ ID NO: 1550282 - DNA, 25 bp, Homo sapien
ctctacttcttctttcgttgcctat

SEQ ID NO: 1550283 - DNA, 25 bp, Homo sapien
tggtgttacataaaggttcaatttc

SEQ ID NO: 1550284 - DNA, 25 bp, Homo sapien
ttttatatatggtgttacataaagg

SEQ ID NO: 1550285 - DNA, 25 bp, Homo sapien
agagcctcccggtcagtcccaggct

SEQ ID NO: 1550286 - DNA, 25 bp, Homo sapien
ctctactcagtgtcacaaggaatga

SEQ ID NO: 1550287 - DNA, 25 bp, Homo sapien
aacaggaccctcactctactcagtg

SEQ ID NO: 1550288 - DNA, 25 bp, Homo sapien
tcactctactcagtgtcacaaggaa

SEQ ID NO: 1550289 - DNA, 25 bp, Homo sapien
tatcaaggtcacacagaccgtaact

SEQ ID NO: 1550290 - DNA, 25 bp, Homo sapien
gatcagttacaggagatttgtcttc

SEQ ID NO: 1550291 - DNA, 25 bp, Homo sapien
gcatctgtggaccccaataccagag

SEQ ID NO: 1550292 - DNA, 25 bp, Homo sapien
ttcttaggcatctgcagcccagagg

SEQ ID NO: 1550293 - DNA, 25 bp, Homo sapien
tgtgctgctgacagacccatagcca

SEQ ID NO: 1550294 - DNA, 25 bp, Homo sapien
ctgtcaccttcctgctgggtgtctt

SEQ ID NO: 1550295 - DNA, 25 bp, Homo sapien
ggcagctcactgtgttgcaaagaaa

SEQ ID NO: 1550296 - DNA, 25 bp, Homo sapien
tcctgctgggtgtcttcctaccttc

SEQ ID NO: 1550297 - DNA, 25 bp, Homo sapien
cctgaccaacataataagatcagtc

SEQ ID NO: 1550298 - DNA, 25 bp, Homo sapien
ctgaccaacataataagatcagtct

SEQ ID NO: 1550299 - DNA, 25 bp, Homo sapien
agcagaggacgggtggaatcccctg

SEQ ID NO: 1550300 - DNA, 25 bp, Homo sapien
agtggtggtgctggagaaaggggaa

SEQ ID NO: 1550301 - DNA, 25 bp, Homo sapien
cagaggacgggtggaatcccctgtg

SEQ ID NO: 1550302 - DNA, 25 bp, Homo sapien
catcagcagaggacgggtggaatcc

SEQ ID NO: 1550303 - DNA, 25 bp, Homo sapien
cccacaccactggaacactacattt

SEQ ID NO: 1550304 - DNA, 25 bp, Homo sapien
ctgaaagaggcattgggccaggtgc

SEQ ID NO: 1550305 - DNA, 25 bp, Homo sapien
tgtgaggccagctcaagttccaccc

SEQ ID NO: 1550306 - DNA, 25 bp, Homo sapien
tctgccactttgagagattactgca

SEQ ID NO: 1550307 - DNA, 25 bp, Homo sapien
caaagagctccaaagagtgcctctc

SEQ ID NO: 1550308 - DNA, 25 bp, Homo sapien
taacaggttacgaaacgatcattcc

SEQ ID NO: 1550309 - DNA, 25 bp, Homo sapien
ttatctgaggaaggctttactgagt

SEQ ID NO: 1550310 - DNA, 25 bp, Homo sapien
tagaaaatgggtagcaaatgtatac

SEQ ID NO: 1550311 - DNA, 25 bp, Homo sapien
taaacatgggaccagtaaaactcac

SEQ ID NO: 1550312 - DNA, 25 bp, Homo sapien
tcaaggtgttttaagacatttctac

SEQ ID NO: 1550313 - DNA, 25 bp, Homo sapien
aagttagctgcttctaatagaaatg

SEQ ID NO: 1550314 - DNA, 25 bp, Homo sapien
tcacgtttcactccacaccattata

SEQ ID NO: 1550315 - DNA, 25 bp, Homo sapien
ggaggcagggtaccaccatgtgggc

SEQ ID NO: 1550316 - DNA, 25 bp, Homo sapien
ttaataagcatactaaattggcttt

SEQ ID NO: 1550317 - DNA, 25 bp, Homo sapien
ggtagtccaaggttgaggtgtcagc

SEQ ID NO: 1550318 - DNA, 25 bp, Homo sapien
tgggtagtccaaggttgaggtgtca

SEQ ID NO: 1550319 - DNA, 25 bp, Homo sapien
gctgggtagtccaaggttgaggtgt

SEQ ID NO: 1550320 - DNA, 25 bp, Homo sapien
aagctgggtagtccaaggttgaggt

SEQ ID NO: 1550321 - DNA, 25 bp, Homo sapien
gctgctattaaaaacaccgtagcct

SEQ ID NO: 1550322 - DNA, 25 bp, Homo sapien
ggctgctattaaaaacaccgtagcc

SEQ ID NO: 1550323 - DNA, 25 bp, Homo sapien
tgctattaaaaacaccgtagccttg

SEQ ID NO: 1550324 - DNA, 25 bp, Homo sapien
ctgctattaaaaacaccgtagcctt

SEQ ID NO: 1550325 - DNA, 25 bp, Homo sapien
acaggagctgccagctaagttgatg

SEQ ID NO: 1550326 - DNA, 25 bp, Homo sapien
tctgacactgaggctgccgcatggg

SEQ ID NO: 1550327 - DNA, 25 bp, Homo sapien
ctctgacactgaggctgccgcatgg

SEQ ID NO: 1550328 - DNA, 25 bp, Homo sapien
agtttccactgctgtacccggtcca

SEQ ID NO: 1550329 - DNA, 25 bp, Homo sapien
caaatggctccagtcggtggccaca

SEQ ID NO: 1550330 - DNA, 25 bp, Homo sapien
tctgtggctgcaagtacgctgtcct

SEQ ID NO: 1550331 - DNA, 25 bp, Homo sapien
tgatgtctgcgactgagcactgggt

SEQ ID NO: 1550332 - DNA, 25 bp, Homo sapien
gggcaggagcatttctcaggctcat

SEQ ID NO: 1550333 - DNA, 25 bp, Homo sapien
aacatgccatctgcagggaggagct

SEQ ID NO: 1550334 - DNA, 25 bp, Homo sapien
ggagctgaggaaatcaccatggtct

SEQ ID NO: 1550335 - DNA, 25 bp, Homo sapien
cctttgtggagatgagcatgggatc

SEQ ID NO: 1550336 - DNA, 25 bp, Homo sapien
agtagaacaacttcctgcccctctg

SEQ ID NO: 1550337 - DNA, 25 bp, Homo sapien
gatgataaacaagtagaacaacttc

SEQ ID NO: 1550338 - DNA, 25 bp, Homo sapien
tggttggcagccacttggtcccctt

SEQ ID NO: 1550339 - DNA, 25 bp, Homo sapien
ggtagttacttaagtgtcgattaca

SEQ ID NO: 1550340 - DNA, 25 bp, Homo sapien
cacgttatggatcagcaggcatgca

SEQ ID NO: 1550341 - DNA, 25 bp, Homo sapien
tcattttgggtcacgttatggatca

SEQ ID NO: 1550342 - DNA, 25 bp, Homo sapien
ttataacttcaagggtgtagaatcc

SEQ ID NO: 1550343 - DNA, 25 bp, Homo sapien
catagaagtttatcgtctcctgatc

SEQ ID NO: 1550344 - DNA, 25 bp, Homo sapien
taacagaagattgccctgcgtggca

SEQ ID NO: 1550345 - DNA, 25 bp, Homo sapien
ggcacctttgattcccccatgggca

SEQ ID NO: 1550346 - DNA, 25 bp, Homo sapien
gtgcagataacagaagattgccctg

SEQ ID NO: 1550347 - DNA, 25 bp, Homo sapien
catgggcatctttcaatcagagttg

SEQ ID NO: 1550348 - DNA, 25 bp, Homo sapien
cacaggtaggttgtgccctgggtct

SEQ ID NO: 1550349 - DNA, 25 bp, Homo sapien
tgggtctcaggttcacaagttaagg

SEQ ID NO: 1550350 - DNA, 25 bp, Homo sapien
aagttaaggccacagcatccttgtc

SEQ ID NO: 1550351 - DNA, 25 bp, Homo sapien
ggtgacggagggcttggacagctct

SEQ ID NO: 1550352 - DNA, 25 bp, Homo sapien
tgtaattccttgtgacattgagtac

SEQ ID NO: 1550353 - DNA, 25 bp, Homo sapien
ccagggtgacagggtaactgtgact

SEQ ID NO: 1550354 - DNA, 25 bp, Homo sapien
ggtgacagggtaactgtgactgaca

SEQ ID NO: 1550355 - DNA, 25 bp, Homo sapien
tgacagggtaactgtgactgacact

SEQ ID NO: 1550356 - DNA, 25 bp, Homo sapien
cagggtaactgtgactgacactcac

SEQ ID NO: 1550357 - DNA, 25 bp, Homo sapien
agtcatggacagctttgatatccag

SEQ ID NO: 1550358 - DNA, 25 bp, Homo sapien
tggccatgtcaatttgggttggcag

SEQ ID NO: 1550359 - DNA, 25 bp, Homo sapien
gcagtcatggacagctttgatatcc

SEQ ID NO: 1550360 - DNA, 25 bp, Homo sapien
aggcctggattctggccatgtcaat

SEQ ID NO: 1550361 - DNA, 25 bp, Homo sapien
tattcttggttaaggctgggcctac

SEQ ID NO: 1550362 - DNA, 25 bp, Homo sapien
ttattcttggttaaggctgggccta

SEQ ID NO: 1550363 - DNA, 25 bp, Homo sapien
ggctgagttacggacaaaacaagca

SEQ ID NO: 1550364 - DNA, 25 bp, Homo sapien
gacaaaacaagcatagaccccgcta

SEQ ID NO: 1550365 - DNA, 25 bp, Homo sapien
tagaccccgctattctttgcagtga

SEQ ID NO: 1550366 - DNA, 25 bp, Homo sapien
cttttcattgataagccaagaatac

SEQ ID NO: 1550367 - DNA, 25 bp, Homo sapien
caccctgttctcacaccaggtggag

SEQ ID NO: 1550368 - DNA, 25 bp, Homo sapien
ttctgctggcagctagatttagcca

SEQ ID NO: 1550369 - DNA, 25 bp, Homo sapien
tagatttagccagattcgggacagg

SEQ ID NO: 1550370 - DNA, 25 bp, Homo sapien
cagattcgggacaggccacccaggc

SEQ ID NO: 1550371 - DNA, 25 bp, Homo sapien
gacagtggccttagttgggaggaca

SEQ ID NO: 1550372 - DNA, 25 bp, Homo sapien
ctgacagtggccttagttgggagga

SEQ ID NO: 1550373 - DNA, 25 bp, Homo sapien
gctgacagtggccttagttgggagg

SEQ ID NO: 1550374 - DNA, 25 bp, Homo sapien
tgacagtggccttagttgggaggac

SEQ ID NO: 1550375 - DNA, 25 bp, Homo sapien
atccttcttagccaccgtgactcct

SEQ ID NO: 1550376 - DNA, 25 bp, Homo sapien
ccttcttagccaccgtgactccttc

SEQ ID NO: 1550377 - DNA, 25 bp, Homo sapien
tccttcttagccaccgtgactcctt

SEQ ID NO: 1550378 - DNA, 25 bp, Homo sapien
gtagaaatgtctccaggcaaactgt

SEQ ID NO: 1550379 - DNA, 25 bp, Homo sapien
cttcattggtaaggtaccagtagaa

SEQ ID NO: 1550380 - DNA, 25 bp, Homo sapien
cagtagaaatgtctccaggcaaact

SEQ ID NO: 1550381 - DNA, 25 bp, Homo sapien
accagtagaaatgtctccaggcaaa

SEQ ID NO: 1550382 - DNA, 25 bp, Homo sapien
agataatcacggagatactggatgc

SEQ ID NO: 1550383 - DNA, 25 bp, Homo sapien
ctgccagtctctggacggttgtggc

SEQ ID NO: 1550384 - DNA, 25 bp, Homo sapien
aagataatcacggagatactggatg

SEQ ID NO: 1550385 - DNA, 25 bp, Homo sapien
ccagtctctggacggttgtggcgta

SEQ ID NO: 1550386 - DNA, 25 bp, Homo sapien
tctcttttgagtcttgcaggtggct

SEQ ID NO: 1550387 - DNA, 25 bp, Homo sapien
ctctgtcggtttcctctcttttgag

SEQ ID NO: 1550388 - DNA, 25 bp, Homo sapien
tctgtcggtttcctctcttttgagt

SEQ ID NO: 1550389 - DNA, 25 bp, Homo sapien
tcctctcttttgagtcttgcaggtg

SEQ ID NO: 1550390 - DNA, 25 bp, Homo sapien
cgtccacatccaaatccgcctctaa

SEQ ID NO: 1550391 - DNA, 25 bp, Homo sapien
cacgtccacatccaaatccgcctct

SEQ ID NO: 1550392 - DNA, 25 bp, Homo sapien
acgtccacatccaaatccgcctcta

SEQ ID NO: 1550393 - DNA, 25 bp, Homo sapien
gtccacatccaaatccgcctctaaa

SEQ ID NO: 1550394 - DNA, 25 bp, Homo sapien
ttctttttggctgtaggtttattca

SEQ ID NO: 1550395 - DNA, 25 bp, Homo sapien
ctccaatttttctgaggtggttgac

SEQ ID NO: 1550396 - DNA, 25 bp, Homo sapien
cctctccaatttttctgaggtggtt

SEQ ID NO: 1550397 - DNA, 25 bp, Homo sapien
ctttttggctgtaggtttattcaat

SEQ ID NO: 1550398 - DNA, 25 bp, Homo sapien
gaacacatcaaagagtgagccagaa

SEQ ID NO: 1550399 - DNA, 25 bp, Homo sapien
catcaaagagtgagccagaagagcc

SEQ ID NO: 1550400 - DNA, 25 bp, Homo sapien
ctaaaatagaacacatcaaagagtg

SEQ ID NO: 1550401 - DNA, 25 bp, Homo sapien
aatagaacacatcaaagagtgagcc

SEQ ID NO: 1550402 - DNA, 25 bp, Homo sapien
gaagtgttgcacattatggttccca

SEQ ID NO: 1550403 - DNA, 25 bp, Homo sapien
gagctcagtggtccagttggtaaac

SEQ ID NO: 1550404 - DNA, 25 bp, Homo sapien
gacctgggattcagtgaaatccttg

SEQ ID NO: 1550405 - DNA, 25 bp, Homo sapien
aattgcaaagactttgtcatccctc

SEQ ID NO: 1550406 - DNA, 25 bp, Homo sapien
ccactgcaatgggtaccagtgcagt

SEQ ID NO: 1550407 - DNA, 25 bp, Homo sapien
ctgcaatgggtaccagtgcagtcca

SEQ ID NO: 1550408 - DNA, 25 bp, Homo sapien
cactgcaatgggtaccagtgcagtc

SEQ ID NO: 1550409 - DNA, 25 bp, Homo sapien
tgcaatgggtaccagtgcagtccat

SEQ ID NO: 1550410 - DNA, 25 bp, Homo sapien
cagccccatgatcattatcagcagc

SEQ ID NO: 1550411 - DNA, 25 bp, Homo sapien
cctgcagccccatgatcattatcag

SEQ ID NO: 1550412 - DNA, 25 bp, Homo sapien
tgcagccccatgatcattatcagca

SEQ ID NO: 1550413 - DNA, 25 bp, Homo sapien
gcagccccatgatcattatcagcag

SEQ ID NO: 1550414 - DNA, 25 bp, Homo sapien
aggcacacggccgtatccctggtgc

SEQ ID NO: 1550415 - DNA, 25 bp, Homo sapien
acctttagggacacaggcacacggc

SEQ ID NO: 1550416 - DNA, 25 bp, Homo sapien
gtgagggtgccctctagaggacacc

SEQ ID NO: 1550417 - DNA, 25 bp, Homo sapien
tcacacgaaggtcgtgagtgacagg

SEQ ID NO: 1550418 - DNA, 25 bp, Homo sapien
caaaggttctaaactccattaagag

SEQ ID NO: 1550419 - DNA, 25 bp, Homo sapien
gagcttgagggcataccctggaaaa

SEQ ID NO: 1550420 - DNA, 25 bp, Homo sapien
taaccaaattgagtgcctgattcaa

SEQ ID NO: 1550421 - DNA, 25 bp, Homo sapien
caagttgtagaaaccctctatggct

SEQ ID NO: 1550422 - DNA, 25 bp, Homo sapien
catttgcttttgctccctaagtgcc

SEQ ID NO: 1550423 - DNA, 25 bp, Homo sapien
ttgctccctaagtgccccagaattg

SEQ ID NO: 1550424 - DNA, 25 bp, Homo sapien
tttgctccctaagtgccccagaatt

SEQ ID NO: 1550425 - DNA, 25 bp, Homo sapien
ttgcttttgctccctaagtgcccca

SEQ ID NO: 1550426 - DNA, 25 bp, Homo sapien
aggacatcttcctggccttaatcca

SEQ ID NO: 1550427 - DNA, 25 bp, Homo sapien
tggccttaatccattatagcagccg

SEQ ID NO: 1550428 - DNA, 25 bp, Homo sapien
tccattatagcagccgtgatgtcat

SEQ ID NO: 1550429 - DNA, 25 bp, Homo sapien
ttatagcagccgtgatgtcatttct

SEQ ID NO: 1550430 - DNA, 25 bp, Homo sapien
tctacttgtcctgcttcgcggactc

SEQ ID NO: 1550431 - DNA, 25 bp, Homo sapien
tactacaaagcatagcgggctctat

SEQ ID NO: 1550432 - DNA, 25 bp, Homo sapien
gaatattcttggacaattaatggga

SEQ ID NO: 1550433 - DNA, 25 bp, Homo sapien
tcattcacctattaccattcaggag

SEQ ID NO: 1550434 - DNA, 25 bp, Homo sapien
gatatggtggcatccgcagttaccc

SEQ ID NO: 1550435 - DNA, 25 bp, Homo sapien
aaatacaggaccgatatggtggcat

SEQ ID NO: 1550436 - DNA, 25 bp, Homo sapien
gaccgatatggtggcatccgcagtt

SEQ ID NO: 1550437 - DNA, 25 bp, Homo sapien
ggtggcatccgcagttacccagtca

SEQ ID NO: 1550438 - DNA, 25 bp, Homo sapien
tgtgacacacgcaccagctattggc

SEQ ID NO: 1550439 - DNA, 25 bp, Homo sapien
gccaactctgattgaaggatgccag

SEQ ID NO: 1550440 - DNA, 25 bp, Homo sapien
tcaactgattatggagggactggga

SEQ ID NO: 1550441 - DNA, 25 bp, Homo sapien
tccaggtaaggaacccagggtgagc

SEQ ID NO: 1550442 - DNA, 25 bp, Homo sapien
gtgaaatacggaacccagtgagtgc

SEQ ID NO: 1550443 - DNA, 25 bp, Homo sapien
tgaaatacggaacccagtgagtgcc

SEQ ID NO: 1550444 - DNA, 25 bp, Homo sapien
tgtacaggagatctctagaacctcc

SEQ ID NO: 1550445 - DNA, 25 bp, Homo sapien
tgctggaattcacggcacacctaaa

SEQ ID NO: 1550446 - DNA, 25 bp, Homo sapien
tacaaattgagcatcggaaatccag

SEQ ID NO: 1550447 - DNA, 25 bp, Homo sapien
taacgggactctctctacttaagga

SEQ ID NO: 1550448 - DNA, 25 bp, Homo sapien
aacaggatcctcattctacccagtg

SEQ ID NO: 1550449 - DNA, 25 bp, Homo sapien
taaagcgacccattgaaaacaggat

SEQ ID NO: 1550450 - DNA, 25 bp, Homo sapien
catttggtggctaaatggtcagagc

SEQ ID NO: 1550451 - DNA, 25 bp, Homo sapien
tgaacctaagagtgagaactacacc

SEQ ID NO: 1550452 - DNA, 25 bp, Homo sapien
ctaaaaaataagtactgctgattgt

SEQ ID NO: 1550453 - DNA, 25 bp, Homo sapien
gatcaggggttagagatattcaagg

SEQ ID NO: 1550454 - DNA, 25 bp, Homo sapien
gtagtttcaggagcacaggactaaa

SEQ ID NO: 1550455 - DNA, 25 bp, Homo sapien
agatattcaagggtagtttcaggag

SEQ ID NO: 1550456 - DNA, 25 bp, Homo sapien
catccactcataattgccaggcaag

SEQ ID NO: 1550457 - DNA, 25 bp, Homo sapien
ccccaggtcactaagagaatgagct

SEQ ID NO: 1550458 - DNA, 25 bp, Homo sapien
caatgggacagggataggcagttcc

SEQ ID NO: 1550459 - DNA, 25 bp, Homo sapien
gacctgtggacaagacaatgggaca

SEQ ID NO: 1550460 - DNA, 25 bp, Homo sapien
cttcattctgactggcaagccctgt

SEQ ID NO: 1550461 - DNA, 25 bp, Homo sapien
cattctgactggcaagccctgtcct

SEQ ID NO: 1550462 - DNA, 25 bp, Homo sapien
ctcccacttcattctgactggcaag

SEQ ID NO: 1550463 - DNA, 25 bp, Homo sapien
cacttcattctgactggcaagccct

SEQ ID NO: 1550464 - DNA, 25 bp, Homo sapien
tcactgtcatgagaggatcaaggag

SEQ ID NO: 1550465 - DNA, 25 bp, Homo sapien
tcatgagaggatcaaggagaggacc

SEQ ID NO: 1550466 - DNA, 25 bp, Homo sapien
tgtcatgagaggatcaaggagagga

SEQ ID NO: 1550467 - DNA, 25 bp, Homo sapien
actgtcatgagaggatcaaggagag

SEQ ID NO: 1550468 - DNA, 25 bp, Homo sapien
cagatagcatgaaaagccactgtcc

SEQ ID NO: 1550469 - DNA, 25 bp, Homo sapien
gccactgtccatttgccatttagct

SEQ ID NO: 1550470 - DNA, 25 bp, Homo sapien
gcttatctgattgacagaaaactga

SEQ ID NO: 1550471 - DNA, 25 bp, Homo sapien
tgaggtgtgtccgcagccacaggct

SEQ ID NO: 1550472 - DNA, 25 bp, Homo sapien
gatcagtctcagacaagcacctcat

SEQ ID NO: 1550473 - DNA, 25 bp, Homo sapien
gactcagcaggaggagatcagtctc

SEQ ID NO: 1550474 - DNA, 25 bp, Homo sapien
gagatactctcagagaagctcagcc

SEQ ID NO: 1550475 - DNA, 25 bp, Homo sapien
cagaggagacaaatttcaacagatc

SEQ ID NO: 1550476 - DNA, 25 bp, Homo sapien
agcaagtcctgtgtgacttacaaag

SEQ ID NO: 1550477 - DNA, 25 bp, Homo sapien
caattcacaagaagacctaactatc

SEQ ID NO: 1550478 - DNA, 25 bp, Homo sapien
ggatcaattcacaagaagacctaac

SEQ ID NO: 1550479 - DNA, 25 bp, Homo sapien
gatcaattcacaagaagacctaact

SEQ ID NO: 1550480 - DNA, 25 bp, Homo sapien
aggaacaactggtaccagacactgc

SEQ ID NO: 1550481 - DNA, 25 bp, Homo sapien
aaaggaacaactggtaccagacact

SEQ ID NO: 1550482 - DNA, 25 bp, Homo sapien
ggaacaactggtaccagacactgca

SEQ ID NO: 1550483 - DNA, 25 bp, Homo sapien
aaggaacaactggtaccagacactg

SEQ ID NO: 1550484 - DNA, 25 bp, Homo sapien
caattgtgaaacattggcctcccca

SEQ ID NO: 1550485 - DNA, 25 bp, Homo sapien
gattctcccaaacttccccatgaag

SEQ ID NO: 1550486 - DNA, 25 bp, Homo sapien
tctcaccatgtgagcaagagcttcc

SEQ ID NO: 1550487 - DNA, 25 bp, Homo sapien
gggtctcacaattcttccacaagag

SEQ ID NO: 1550488 - DNA, 25 bp, Homo sapien
ttcagccaatgggaagtccttaaaa

SEQ ID NO: 1550489 - DNA, 25 bp, Homo sapien
catttgccagccttcagccaatggg

SEQ ID NO: 1550490 - DNA, 25 bp, Homo sapien
actccatttgccagccttcagccaa

SEQ ID NO: 1550491 - DNA, 25 bp, Homo sapien
tgccagccttcagccaatgggaagt

SEQ ID NO: 1550492 - DNA, 25 bp, Homo sapien
tctggactgaacacagcttccggca

SEQ ID NO: 1550493 - DNA, 25 bp, Homo sapien
tggccaggaaacaccctgatgttat

SEQ ID NO: 1550494 - DNA, 25 bp, Homo sapien
catccagatgttggtaatgggtctc

SEQ ID NO: 1550495 - DNA, 25 bp, Homo sapien
tggagaacctcaccatcacatgacg

SEQ ID NO: 1550496 - DNA, 25 bp, Homo sapien
gagatcagtaaaacccaccagttta

SEQ ID NO: 1550497 - DNA, 25 bp, Homo sapien
tatgtaccagatgcaaagcccaaga

SEQ ID NO: 1550498 - DNA, 25 bp, Homo sapien
gccaacagacctaggcaaaaacgta

SEQ ID NO: 1550499 - DNA, 25 bp, Homo sapien
ttaaaaagagatgccaaggtaacac

SEQ ID NO: 1550500 - DNA, 25 bp, Homo sapien
gacttctgtgcatgttttggtgcca

SEQ ID NO: 1550501 - DNA, 25 bp, Homo sapien
ctgtgcatgttttggtgccaaatga

SEQ ID NO: 1550502 - DNA, 25 bp, Homo sapien
gatttggacttctgtgcatgttttg

SEQ ID NO: 1550503 - DNA, 25 bp, Homo sapien
gcagcaggatttggacttctgtgca

SEQ ID NO: 1550504 - DNA, 25 bp, Homo sapien
aatcatgtagtagttgtctttttga

SEQ ID NO: 1550505 - DNA, 25 bp, Homo sapien
catgtagtagttgtctttttgagtc

SEQ ID NO: 1550506 - DNA, 25 bp, Homo sapien
tggaatcatgtagtagttgtctttt

SEQ ID NO: 1550507 - DNA, 25 bp, Homo sapien
ggaatcatgtagtagttgtcttttt

SEQ ID NO: 1550508 - DNA, 25 bp, Homo sapien
agctcccaagtccccgggatgcact

SEQ ID NO: 1550509 - DNA, 25 bp, Homo sapien
ctcccaagtccccgggatgcactcc

SEQ ID NO: 1550510 - DNA, 25 bp, Homo sapien
agagctcccaagtccccgggatgca

SEQ ID NO: 1550511 - DNA, 25 bp, Homo sapien
gagctcccaagtccccgggatgcac

SEQ ID NO: 1550512 - DNA, 25 bp, Homo sapien
tgatctttttcaggcctcctccggc

SEQ ID NO: 1550513 - DNA, 25 bp, Homo sapien
cctgtggcctccacccaagtttgca

SEQ ID NO: 1550514 - DNA, 25 bp, Homo sapien
tggcctccacccaagtttgcatcac

SEQ ID NO: 1550515 - DNA, 25 bp, Homo sapien
ctgtggcctccacccaagtttgcat

SEQ ID NO: 1550516 - DNA, 25 bp, Homo sapien
gtggcctccacccaagtttgcatca

SEQ ID NO: 1550517 - DNA, 25 bp, Homo sapien
ttgcccctttatgtcctgtggtcac

SEQ ID NO: 1550518 - DNA, 25 bp, Homo sapien
gcccctttatgtcctgtggtcactc

SEQ ID NO: 1550519 - DNA, 25 bp, Homo sapien
ccctttatgtcctgtggtcactcct

SEQ ID NO: 1550520 - DNA, 25 bp, Homo sapien
tgcccctttatgtcctgtggtcact

SEQ ID NO: 1550521 - DNA, 25 bp, Homo sapien
gaatgttctgccttcgcaaggagga

SEQ ID NO: 1550522 - DNA, 25 bp, Homo sapien
tccaagccggattcatgagggccct

SEQ ID NO: 1550523 - DNA, 25 bp, Homo sapien
cgtgaaagactcagggtcccgaaca

SEQ ID NO: 1550524 - DNA, 25 bp, Homo sapien
gcagtagccagaagatcttgaccgg

SEQ ID NO: 1550525 - DNA, 25 bp, Homo sapien
tattgcaacatatgacttcctcggg

SEQ ID NO: 1550526 - DNA, 25 bp, Homo sapien
tccacactctacacgtgctctgagg

SEQ ID NO: 1550527 - DNA, 25 bp, Homo sapien
gcatcttcaatggtctggatacgtt

SEQ ID NO: 1550528 - DNA, 25 bp, Homo sapien
agactgagctttaactctgaccaca

SEQ ID NO: 1550529 - DNA, 25 bp, Homo sapien
gaacgtccagttctgcacggtgaat

SEQ ID NO: 1550530 - DNA, 25 bp, Homo sapien
taaagcccttggtgtcctatggtca

SEQ ID NO: 1550531 - DNA, 25 bp, Homo sapien
ggagtctgattcacccattgggtca

SEQ ID NO: 1550532 - DNA, 25 bp, Homo sapien
gatgtcaccaggacacgatgtgcca

SEQ ID NO: 1550533 - DNA, 25 bp, Homo sapien
gagatttcaagtgtgtggtttgacc

SEQ ID NO: 1550534 - DNA, 25 bp, Homo sapien
ccaccagcacttaagaagggagcct

SEQ ID NO: 1550535 - DNA, 25 bp, Homo sapien
ttcccttaaagtgggctgtctgcat

SEQ ID NO: 1550536 - DNA, 25 bp, Homo sapien
taaaacagggccaaacaggtgatga

SEQ ID NO: 1550537 - DNA, 25 bp, Homo sapien
caacttcagtaaggatctgctctct

SEQ ID NO: 1550538 - DNA, 25 bp, Homo sapien
tgccgcacttaggtaaaaagtctgg

SEQ ID NO: 1550539 - DNA, 25 bp, Homo sapien
catttgaaaacatcggttatattac

SEQ ID NO: 1550540 - DNA, 25 bp, Homo sapien
tgctctctttataacaggacacatt

SEQ ID NO: 1550541 - DNA, 25 bp, Homo sapien
taggaagtgcacctcaacagtacct

SEQ ID NO: 1550542 - DNA, 25 bp, Homo sapien
tagccatatgacaccaggaaagatt

SEQ ID NO: 1550543 - DNA, 25 bp, Homo sapien
ctaagtgcaaagaatcaagcctggt

SEQ ID NO: 1550544 - DNA, 25 bp, Homo sapien
ggaaagattttacaccacgctaagc

SEQ ID NO: 1550545 - DNA, 25 bp, Homo sapien
tcacccactagcagagcattcttgg

SEQ ID NO: 1550546 - DNA, 25 bp, Homo sapien
ccactagcagagcattcttggctga

SEQ ID NO: 1550547 - DNA, 25 bp, Homo sapien
cccactagcagagcattcttggctg

SEQ ID NO: 1550548 - DNA, 25 bp, Homo sapien
cacccactagcagagcattcttggc

SEQ ID NO: 1550549 - DNA, 25 bp, Homo sapien
gtgaaatacggaacccagtgagtgc

SEQ ID NO: 1550550 - DNA, 25 bp, Homo sapien
tgaaatacggaacccagtgagtgcc

SEQ ID NO: 1550551 - DNA, 25 bp, Homo sapien
tgctcactgccatggtgtctctgcc

SEQ ID NO: 1550552 - DNA, 25 bp, Homo sapien
tcactgccatggtgtctctgcctct

SEQ ID NO: 1550553 - DNA, 25 bp, Homo sapien
ctcactgccatggtgtctctgcctc

SEQ ID NO: 1550554 - DNA, 25 bp, Homo sapien
gcagtgacccagtcaccctgaatgt

SEQ ID NO: 1550555 - DNA, 25 bp, Homo sapien
cgcagtgacccagtcaccctgaatg

SEQ ID NO: 1550556 - DNA, 25 bp, Homo sapien
cccagtcaccctgaatgtcctctgt

SEQ ID NO: 1550557 - DNA, 25 bp, Homo sapien
atccgcagtgacccagtcaccctga

SEQ ID NO: 1550558 - DNA, 25 bp, Homo sapien
aacaggatcctcattctacccagtg

SEQ ID NO: 1550559 - DNA, 25 bp, Homo sapien
taaagcgacccattgaaaacaggat

SEQ ID NO: 1550560 - DNA, 25 bp, Homo sapien
catttggtggctaaatggtcagagc

SEQ ID NO: 1550561 - DNA, 25 bp, Homo sapien
tgaacctaagagtgagaactacacc

SEQ ID NO: 1550562 - DNA, 25 bp, Homo sapien
aacctctttagagattggatcttgg

SEQ ID NO: 1550563 - DNA, 25 bp, Homo sapien
cctctttagagattggatcttggat

SEQ ID NO: 1550564 - DNA, 25 bp, Homo sapien
ctttagagattggatcttggatgca

SEQ ID NO: 1550565 - DNA, 25 bp, Homo sapien
aaacctctttagagattggatcttg

SEQ ID NO: 1550566 - DNA, 25 bp, Homo sapien
gatggtaatttaacacggtgtatgc

SEQ ID NO: 1550567 - DNA, 25 bp, Homo sapien
ttcaatcaagttagctggaagctcc

SEQ ID NO: 1550568 - DNA, 25 bp, Homo sapien
ctcctgtccccaagagaaccagagg

SEQ ID NO: 1550569 - DNA, 25 bp, Homo sapien
ggagctgaagcctatgaatacatca

SEQ ID NO: 1550570 - DNA, 25 bp, Homo sapien
gaggtcacagcgtttcccatgagct

SEQ ID NO: 1550571 - DNA, 25 bp, Homo sapien
tcctctgtaagaggtcacagcgttt

SEQ ID NO: 1550572 - DNA, 25 bp, Homo sapien
catatatatggcgaagggagaaaca

SEQ ID NO: 1550573 - DNA, 25 bp, Homo sapien
tagataagcaacaggagtttattgt

SEQ ID NO: 1550574 - DNA, 25 bp, Homo sapien
ccctatgtggtagaagaggcttcac

SEQ ID NO: 1550575 - DNA, 25 bp, Homo sapien
gctttatcagccctgagccctatgt

SEQ ID NO: 1550576 - DNA, 25 bp, Homo sapien
cttgtgtctggcctgagaaaggtag

SEQ ID NO: 1550577 - DNA, 25 bp, Homo sapien
tcaagatcaagttgcttctcgctgt

SEQ ID NO: 1550578 - DNA, 25 bp, Homo sapien
gacttcagtgttgcaacttggctca

SEQ ID NO: 1550579 - DNA, 25 bp, Homo sapien
caaaccagagtaggcctaggcttga

SEQ ID NO: 1550580 - DNA, 25 bp, Homo sapien
cacagcttgtgatggaagaaacagg

SEQ ID NO: 1550581 - DNA, 25 bp, Homo sapien
gaaacaggtgaatgtctcaggctcc

SEQ ID NO: 1550582 - DNA, 25 bp, Homo sapien
gaaggtgattctgcatgttagaatc

SEQ ID NO: 1550583 - DNA, 25 bp, Homo sapien
ctggcagcaggacttggacttctgt

SEQ ID NO: 1550584 - DNA, 25 bp, Homo sapien
gacttctgtgcctgttttggtgcca

SEQ ID NO: 1550585 - DNA, 25 bp, Homo sapien
tgtgcctgttttggtgccaaatgat

SEQ ID NO: 1550586 - DNA, 25 bp, Homo sapien
caggacttggacttctgtgcctgtt

SEQ ID NO: 1550587 - DNA, 25 bp, Homo sapien
tgatctttttcaggcctcctccggc

SEQ ID NO: 1550588 - DNA, 25 bp, Homo sapien
gaagacatgactttgtgactgtatg

SEQ ID NO: 1550589 - DNA, 25 bp, Homo sapien
tcttaagaagtcatgccccgtggaa

SEQ ID NO: 1550590 - DNA, 25 bp, Homo sapien
catctgatcctacatcactaggaag

SEQ ID NO: 1550591 - DNA, 25 bp, Homo sapien
gcccctcaattcctcaaaagctttc

SEQ ID NO: 1550592 - DNA, 25 bp, Homo sapien
ggcgaggaaagctccacatccttga

SEQ ID NO: 1550593 - DNA, 25 bp, Homo sapien
gattactccaaagcataatgggctc

SEQ ID NO: 1550594 - DNA, 25 bp, Homo sapien
tctgctcgtaactcagccactggcg

SEQ ID NO: 1550595 - DNA, 25 bp, Homo sapien
ggacaaaagctctttatccctcaga

SEQ ID NO: 1550596 - DNA, 25 bp, Homo sapien
cagtagatgctgaaatctgaaagtg

SEQ ID NO: 1550597 - DNA, 25 bp, Homo sapien
acttgactgacagagggccctggtc

SEQ ID NO: 1550598 - DNA, 25 bp, Homo sapien
ttctatgactttagaacttttcacc

SEQ ID NO: 1550599 - DNA, 25 bp, Homo sapien
ttgcagtagatgctgaaatctgaaa

SEQ ID NO: 1550600 - DNA, 25 bp, Homo sapien
ttgcaaggctgatgaggaatcctcc

SEQ ID NO: 1550601 - DNA, 25 bp, Homo sapien
cacagaccactatgcagagctgatt

SEQ ID NO: 1550602 - DNA, 25 bp, Homo sapien
gaaagaagttttaggtaccaatgca

SEQ ID NO: 1550603 - DNA, 25 bp, Homo sapien
catgaaggtagtatgggagaaccca

SEQ ID NO: 1550604 - DNA, 25 bp, Homo sapien
catttgccagccttcagccaatggg

SEQ ID NO: 1550605 - DNA, 25 bp, Homo sapien
ttcagccaatgggaagtccttaaaa

SEQ ID NO: 1550606 - DNA, 25 bp, Homo sapien
tgccagccttcagccaatgggaagt

SEQ ID NO: 1550607 - DNA, 25 bp, Homo sapien
actccatttgccagccttcagccaa

SEQ ID NO: 1550608 - DNA, 25 bp, Homo sapien
gaaggtgattctgcatgttagaatc

SEQ ID NO: 1550609 - DNA, 25 bp, Homo sapien
ctggcagcaggacttggacttctgt

SEQ ID NO: 1550610 - DNA, 25 bp, Homo sapien
tgtgcctgttttggtgccaaatgat

SEQ ID NO: 1550611 - DNA, 25 bp, Homo sapien
caggacttggacttctgtgcctgtt

SEQ ID NO: 1550612 - DNA, 25 bp, Homo sapien
gacttctgtgcctgttttggtgcca

SEQ ID NO: 1550613 - DNA, 25 bp, Homo sapien
aaaggtccgagtcccagagttgaag

SEQ ID NO: 1550614 - DNA, 25 bp, Homo sapien
agtctgtgttcaaaggtccgagtcc

SEQ ID NO: 1550615 - DNA, 25 bp, Homo sapien
cgtattcgtcaaggttctctagagt

SEQ ID NO: 1550616 - DNA, 25 bp, Homo sapien
ataaaaatgcataaccgtattcgtc

SEQ ID NO: 1550617 - DNA, 25 bp, Homo sapien
accagcatccgagccagcttcttct

SEQ ID NO: 1550618 - DNA, 25 bp, Homo sapien
atgatctttttcaggcctcctctgg

SEQ ID NO: 1550619 - DNA, 25 bp, Homo sapien
ccagcttcttctctgtgtcagagat

SEQ ID NO: 1550620 - DNA, 25 bp, Homo sapien
agatgatctttttcaggcctcctct

SEQ ID NO: 1550621 - DNA, 25 bp, Homo sapien
ttcatggagagtctaaagtcaattt

SEQ ID NO: 1550622 - DNA, 25 bp, Homo sapien
cattattcatggagagtctaaagtc

SEQ ID NO: 1550623 - DNA, 25 bp, Homo sapien
cacattattcatggagagtctaaag

SEQ ID NO: 1550624 - DNA, 25 bp, Homo sapien
tattcatggagagtctaaagtcaat

SEQ ID NO: 1550625 - DNA, 25 bp, Homo sapien
tcctcgacacatactctattccaag

SEQ ID NO: 1550626 - DNA, 25 bp, Homo sapien
ttcctcgacacatactctattccaa

SEQ ID NO: 1550627 - DNA, 25 bp, Homo sapien
agaaaaataaccagctaacatcatc

SEQ ID NO: 1550628 - DNA, 25 bp, Homo sapien
aaaaataaccagctaacatcatcat

SEQ ID NO: 1550629 - DNA, 25 bp, Homo sapien
tgagaaaaataaccagctaacatca

SEQ ID NO: 1550630 - DNA, 25 bp, Homo sapien
atgagaaaaataaccagctaacatc

SEQ ID NO: 1550631 - DNA, 25 bp, Homo sapien
catataaggtggaggtggacaactc

SEQ ID NO: 1550632 - DNA, 25 bp, Homo sapien
tcattaagaacaagagcggctctgt

SEQ ID NO: 1550633 - DNA, 25 bp, Homo sapien
ggtgagactcaacctattttgcaag

SEQ ID NO: 1550634 - DNA, 25 bp, Homo sapien
tgccgcacttaggtaaaaaatctgg

SEQ ID NO: 1550635 - DNA, 25 bp, Homo sapien
aaaactcaatgttattggactaaat

SEQ ID NO: 1550636 - DNA, 25 bp, Homo sapien
tcagtcatgactgcaacaactgaga

SEQ ID NO: 1550637 - DNA, 25 bp, Homo sapien
tctgaatgccccagaattgtgaaac

SEQ ID NO: 1550638 - DNA, 25 bp, Homo sapien
aaagaacaggctgataccttcatga

SEQ ID NO: 1550639 - DNA, 25 bp, Homo sapien
caatataaattttaggacagatttt

SEQ ID NO: 1550640 - DNA, 25 bp, Homo sapien
gtagcactgttctcctaacaatatt

SEQ ID NO: 1550641 - DNA, 25 bp, Homo sapien
tgcagtcactttgggtagcactgtt

SEQ ID NO: 1550642 - DNA, 25 bp, Homo sapien
cactgagaatctgataggaattgta

SEQ ID NO: 1550643 - DNA, 25 bp, Homo sapien
gttcttcgacatataaaagctttga

SEQ ID NO: 1550644 - DNA, 25 bp, Homo sapien
tgttacaaccaagaaatcattggga

SEQ ID NO: 1550645 - DNA, 25 bp, Homo sapien
gcctatgcttttgttgttacaacca

SEQ ID NO: 1550646 - DNA, 25 bp, Homo sapien
agatctttgatctattgtgggttaa

SEQ ID NO: 1550647 - DNA, 25 bp, Homo sapien
ggtgggactagcgtgtgtgtagaaa

SEQ ID NO: 1550648 - DNA, 25 bp, Homo sapien
gctgccagttgaagccaagcctccc

SEQ ID NO: 1550649 - DNA, 25 bp, Homo sapien
tgtgtgtagaaagggccctggtggc

SEQ ID NO: 1550650 - DNA, 25 bp, Homo sapien
ctagcgtgtgtgtagaaagggccct

SEQ ID NO: 1550651 - DNA, 25 bp, Homo sapien
tacatttggtggctaaacggtcaga

SEQ ID NO: 1550652 - DNA, 25 bp, Homo sapien
gacccattgaaaacaggatactcat

SEQ ID NO: 1550653 - DNA, 25 bp, Homo sapien
cctacatttggtggctaaacggtca

SEQ ID NO: 1550654 - DNA, 25 bp, Homo sapien
aaagcgacccattgaaaacaggata

SEQ ID NO: 1550655 - DNA, 25 bp, Homo sapien
gctctcacataatgaatgaagaact

SEQ ID NO: 1550656 - DNA, 25 bp, Homo sapien
gtgcagtcactgaaccagagtcaca

SEQ ID NO: 1550657 - DNA, 25 bp, Homo sapien
agtcactgaaccagagtcacacaaa

SEQ ID NO: 1550658 - DNA, 25 bp, Homo sapien
caggagctctcacataatgaatgaa

SEQ ID NO: 1550659 - DNA, 25 bp, Homo sapien
cactttcactgaataagtaaaggcc

SEQ ID NO: 1550660 - DNA, 25 bp, Homo sapien
tgaataagtaaaggcctttcctaca

SEQ ID NO: 1550661 - DNA, 25 bp, Homo sapien
agtctaaatagacactttcactgaa

SEQ ID NO: 1550662 - DNA, 25 bp, Homo sapien
gtctaaatagacactttcactgaat

SEQ ID NO: 1550663 - DNA, 25 bp, Homo sapien
cactgtgcggtgtatcttggaaacc

SEQ ID NO: 1550664 - DNA, 25 bp, Homo sapien
tattcattcacggacggatggacac

SEQ ID NO: 1550665 - DNA, 25 bp, Homo sapien
taatgtaagaggtagcacaccgtgc

SEQ ID NO: 1550666 - DNA, 25 bp, Homo sapien
tctctatggataaacgtcagggtcg

SEQ ID NO: 1550667 - DNA, 25 bp, Homo sapien
gggacaccagtatccgagccagcat

SEQ ID NO: 1550668 - DNA, 25 bp, Homo sapien
ccacgggggacaccagtatccgagc

SEQ ID NO: 1550669 - DNA, 25 bp, Homo sapien
acgggggacaccagtatccgagcca

SEQ ID NO: 1550670 - DNA, 25 bp, Homo sapien
acaccagtatccgagccagcatctt

SEQ ID NO: 1550671 - DNA, 25 bp, Homo sapien
gcccctttacgtccagtgatcactc

SEQ ID NO: 1550672 - DNA, 25 bp, Homo sapien
tccttgcccctttacgtccagtgat

SEQ ID NO: 1550673 - DNA, 25 bp, Homo sapien
tgcccctttacgtccagtgatcact

SEQ ID NO: 1550674 - DNA, 25 bp, Homo sapien
cttgcccctttacgtccagtgatca

SEQ ID NO: 1550675 - DNA, 25 bp, Homo sapien
cttgggacgggcgtctgcaccggga

SEQ ID NO: 1550676 - DNA, 25 bp, Homo sapien
gaactctcctggtggaacacggtcc

SEQ ID NO: 1550677 - DNA, 25 bp, Homo sapien
gtctgcaccgggacatccctccagg

SEQ ID NO: 1550678 - DNA, 25 bp, Homo sapien
actctcctggtggaacacggtccat

SEQ ID NO: 1550679 - DNA, 25 bp, Homo sapien
tctaacattgcttgtactgagatca

SEQ ID NO: 1550680 - DNA, 25 bp, Homo sapien
taacattgcttgtactgagatcagc

SEQ ID NO: 1550681 - DNA, 25 bp, Homo sapien
tctctaacattgcttgtactgagat

SEQ ID NO: 1550682 - DNA, 25 bp, Homo sapien
ctttattgctaaacctgccaggaac

SEQ ID NO: 1550683 - DNA, 25 bp, Homo sapien
tgactgcagagggacgttgtgggtg

SEQ ID NO: 1550684 - DNA, 25 bp, Homo sapien
gactgcagagggacgttgtgggtgt

SEQ ID NO: 1550685 - DNA, 25 bp, Homo sapien
gtacaaatcagctgtaacacactgg

SEQ ID NO: 1550686 - DNA, 25 bp, Homo sapien
tcagctgtaacacactggggtggcg

SEQ ID NO: 1550687 - DNA, 25 bp, Homo sapien
gacccgtctgtggctggtaatctct

SEQ ID NO: 1550688 - DNA, 25 bp, Homo sapien
agggccagcagtaataccgcgctca

SEQ ID NO: 1550689 - DNA, 25 bp, Homo sapien
gggccagcagtaataccgcgctcat

SEQ ID NO: 1550690 - DNA, 25 bp, Homo sapien
ggagggccagcagtaataccgcgct

SEQ ID NO: 1550691 - DNA, 25 bp, Homo sapien
aggagggccagcagtaataccgcgc

SEQ ID NO: 1550692 - DNA, 25 bp, Homo sapien
tctcaatgagcatcaacgtgtcctg

SEQ ID NO: 1550693 - DNA, 25 bp, Homo sapien
gcaggtcggacaccttccacacatg

SEQ ID NO: 1550694 - DNA, 25 bp, Homo sapien
ttcttaggggtccattgccggggca

SEQ ID NO: 1550695 - DNA, 25 bp, Homo sapien
ctggcaccccaagccgctgtcgcag

SEQ ID NO: 1550696 - DNA, 25 bp, Homo sapien
ttggagagcaccaggctcacttggg

SEQ ID NO: 1550697 - DNA, 25 bp, Homo sapien
tgtaggagatcagggagaggccggg

SEQ ID NO: 1550698 - DNA, 25 bp, Homo sapien
cccatccggtgctcagtgacgcggg

SEQ ID NO: 1550699 - DNA, 25 bp, Homo sapien
gttaacgaggttgttgcagaagtcc

SEQ ID NO: 1550700 - DNA, 25 bp, Homo sapien
aaagtgacagacagagtgagggggc

SEQ ID NO: 1550701 - DNA, 25 bp, Homo sapien
ggcctcaagagtcaacctgctcagc

SEQ ID NO: 1550702 - DNA, 25 bp, Homo sapien
tcaagagtcaacctgctcagccttc

SEQ ID NO: 1550703 - DNA, 25 bp, Homo sapien
gatttgatcagataccttctctgca

SEQ ID NO: 1550704 - DNA, 25 bp, Homo sapien
cctgaggaggccatcataacagtgt

SEQ ID NO: 1550705 - DNA, 25 bp, Homo sapien
ccttggggcagatctcttctgttgt

SEQ ID NO: 1550706 - DNA, 25 bp, Homo sapien
aggccatcataacagtgtgtggtcc

SEQ ID NO: 1550707 - DNA, 25 bp, Homo sapien
tcccctccagacagccttccataga

SEQ ID NO: 1550708 - DNA, 25 bp, Homo sapien
ctttcatatcgcagttctcagtcat

SEQ ID NO: 1550709 - DNA, 25 bp, Homo sapien
atacccacgggcccaatttcctgtg

SEQ ID NO: 1550710 - DNA, 25 bp, Homo sapien
tcccattgagcaggttgcaaactgg

SEQ ID NO: 1550711 - DNA, 25 bp, Homo sapien
ttcctgtgtcccattgagcaggttg

SEQ ID NO: 1550712 - DNA, 25 bp, Homo sapien
caagtttccgtgtgtcataatggtg

SEQ ID NO: 1550713 - DNA, 25 bp, Homo sapien
tccgtgtgtcataatggtggtcccc

SEQ ID NO: 1550714 - DNA, 25 bp, Homo sapien
tcttgagccaagtttccgtgtgtca

SEQ ID NO: 1550715 - DNA, 25 bp, Homo sapien
aatcagtgggttcttgagccaagtt

SEQ ID NO: 1550716 - DNA, 25 bp, Homo sapien
ctacatctaggagcagcagcgtctc

SEQ ID NO: 1550717 - DNA, 25 bp, Homo sapien
gcagcgtctcctgacacacctgccc

SEQ ID NO: 1550718 - DNA, 25 bp, Homo sapien
gcgtctcctgacacacctgccccac

SEQ ID NO: 1550719 - DNA, 25 bp, Homo sapien
agcagcgtctcctgacacacctgcc

SEQ ID NO: 1550720 - DNA, 25 bp, Homo sapien
aattttgagccccaacagcgctgca

SEQ ID NO: 1550721 - DNA, 25 bp, Homo sapien
cagcgctgcagctttaggtcgccac

SEQ ID NO: 1550722 - DNA, 25 bp, Homo sapien
ttctgggaattttgagccccaacag

SEQ ID NO: 1550723 - DNA, 25 bp, Homo sapien
tttaggtcgccaccagggttgatgt

SEQ ID NO: 1550724 - DNA, 25 bp, Homo sapien
cactattgcacaggtccgaggagca

SEQ ID NO: 1550725 - DNA, 25 bp, Homo sapien
ttgcacaggtccgaggagcagaagt

SEQ ID NO: 1550726 - DNA, 25 bp, Homo sapien
ggagggagttcagcagaacgctgct

SEQ ID NO: 1550727 - DNA, 25 bp, Homo sapien
ctgctggcactattgcacaggtccg

SEQ ID NO: 1550728 - DNA, 25 bp, Homo sapien
gcaggtcattcggggggagccactt

SEQ ID NO: 1550729 - DNA, 25 bp, Homo sapien
aggtcattcggggggagccacttga

SEQ ID NO: 1550730 - DNA, 25 bp, Homo sapien
ctggggcaggtcattcggggggagc

SEQ ID NO: 1550731 - DNA, 25 bp, Homo sapien
ataacaatgagtggcgcccctgggg

SEQ ID NO: 1550732 - DNA, 25 bp, Homo sapien
gtctggtgtggttcaacaagaagct

SEQ ID NO: 1550733 - DNA, 25 bp, Homo sapien
gcgcagagaagatcccgatttgtct

SEQ ID NO: 1550734 - DNA, 25 bp, Homo sapien
aatgctcattttggtggacagccca

SEQ ID NO: 1550735 - DNA, 25 bp, Homo sapien
acaagaagctggaaggttgggccac

SEQ ID NO: 1550736 - DNA, 25 bp, Homo sapien
aggaggctgcacatcacgcttctca

SEQ ID NO: 1550737 - DNA, 25 bp, Homo sapien
ggaggctgcacatcacgcttctcac

SEQ ID NO: 1550738 - DNA, 25 bp, Homo sapien
accccccaagtgagagactccaggc

SEQ ID NO: 1550739 - DNA, 25 bp, Homo sapien
ttagcaggaagggcaaaccactccc

SEQ ID NO: 1550740 - DNA, 25 bp, Homo sapien
agcaggaagggcaaaccactcccca

SEQ ID NO: 1550741 - DNA, 25 bp, Homo sapien
ccaagtgagagactccaggccctca

SEQ ID NO: 1550742 - DNA, 25 bp, Homo sapien
gacgtgaaccagaccaatgaagggc

SEQ ID NO: 1550743 - DNA, 25 bp, Homo sapien
gggaaagaatctggtgtccaaggcc

SEQ ID NO: 1550744 - DNA, 25 bp, Homo sapien
ccccagtgttgctgttaggtgagta

SEQ ID NO: 1550745 - DNA, 25 bp, Homo sapien
tcccatagggcaagtccggatgctc

SEQ ID NO: 1550746 - DNA, 25 bp, Homo sapien
ccaaatacgtttggctggagcaccc

SEQ ID NO: 1550747 - DNA, 25 bp, Homo sapien
gtttggctggagcaccctgaagtct

SEQ ID NO: 1550748 - DNA, 25 bp, Homo sapien
catggtgatgcccaaatacgtttgg

SEQ ID NO: 1550749 - DNA, 25 bp, Homo sapien
ttcccctcccaggtcatggtgatgc

SEQ ID NO: 1550750 - DNA, 25 bp, Homo sapien
catcctgggtgtgtattgggctgta

SEQ ID NO: 1550751 - DNA, 25 bp, Homo sapien
taggagcagtcgactctagcgtcca

SEQ ID NO: 1550752 - DNA, 25 bp, Homo sapien
tatcccacgatacgcagatgctaca

SEQ ID NO: 1550753 - DNA, 25 bp, Homo sapien
catagcaacgtttgggtcagcgacg

SEQ ID NO: 1550754 - DNA, 25 bp, Homo sapien
tggcctctagggggttcagtcaatg

SEQ ID NO: 1550755 - DNA, 25 bp, Homo sapien
ctagacgtgttctgtttccttctcc

SEQ ID NO: 1550756 - DNA, 25 bp, Homo sapien
gagtgaacggtactagacgtgttct

SEQ ID NO: 1550757 - DNA, 25 bp, Homo sapien
caagggagtgaacggtactagacgt

SEQ ID NO: 1550758 - DNA, 25 bp, Homo sapien
tcactctgcagtcgggggaatggca

SEQ ID NO: 1550759 - DNA, 25 bp, Homo sapien
aatagcaacactggggagagcctgg

SEQ ID NO: 1550760 - DNA, 25 bp, Homo sapien
ctaatagcaacactggggagagcct

SEQ ID NO: 1550761 - DNA, 25 bp, Homo sapien
ggagagcctggagcagccggacttg

SEQ ID NO: 1550762 - DNA, 25 bp, Homo sapien
agagcctggagcagccggacttgcc

SEQ ID NO: 1550763 - DNA, 25 bp, Homo sapien
tgtctccataagaagggctccaaag

SEQ ID NO: 1550764 - DNA, 25 bp, Homo sapien
agggaatgtctccataagaagggct

SEQ ID NO: 1550765 - DNA, 25 bp, Homo sapien
tgggggtcttataggaatcccagct

SEQ ID NO: 1550766 - DNA, 25 bp, Homo sapien
gaatgtctccataagaagggctcca

SEQ ID NO: 1550767 - DNA, 25 bp, Homo sapien
ctattctgttgcgtttggttcaaga

SEQ ID NO: 1550768 - DNA, 25 bp, Homo sapien
ccttttctattctgttgcgtttggt

SEQ ID NO: 1550769 - DNA, 25 bp, Homo sapien
tgttgcgtttggttcaagaagttct

SEQ ID NO: 1550770 - DNA, 25 bp, Homo sapien
cattaactgggttatcctgcattcc

SEQ ID NO: 1550771 - DNA, 25 bp, Homo sapien
aaagacaacacagtgcagttcatgc

SEQ ID NO: 1550772 - DNA, 25 bp, Homo sapien
tctctttcataaagacaacacagtg

SEQ ID NO: 1550773 - DNA, 25 bp, Homo sapien
tttccttctgtcacagtgaattggg

SEQ ID NO: 1550774 - DNA, 25 bp, Homo sapien
gttcatgcttgaccccggatgttct

SEQ ID NO: 1550775 - DNA, 25 bp, Homo sapien
tccagatacacggtgactcgttccc

SEQ ID NO: 1550776 - DNA, 25 bp, Homo sapien
cacggtgactcgttcccagttgaga

SEQ ID NO: 1550777 - DNA, 25 bp, Homo sapien
gatacacggtgactcgttcccagtt

SEQ ID NO: 1550778 - DNA, 25 bp, Homo sapien
atggtctccagatacacggtgactc

SEQ ID NO: 1550779 - DNA, 25 bp, Homo sapien
tggcccaaagttctcttcttattct

SEQ ID NO: 1550780 - DNA, 25 bp, Homo sapien
gaagcatgttgcatatttccctgat

SEQ ID NO: 1550781 - DNA, 25 bp, Homo sapien
ctggcccaaagttctcttcttattc

SEQ ID NO: 1550782 - DNA, 25 bp, Homo sapien
atatttccctgatgggatggatggt

SEQ ID NO: 1550783 - DNA, 25 bp, Homo sapien
aatcacaagtcgtcaatacccacag

SEQ ID NO: 1550784 - DNA, 25 bp, Homo sapien
gaaatcacaagtcgtcaatacccac

SEQ ID NO: 1550785 - DNA, 25 bp, Homo sapien
atcacaagtcgtcaatacccacagc

SEQ ID NO: 1550786 - DNA, 25 bp, Homo sapien
agaaatcacaagtcgtcaataccca

SEQ ID NO: 1550787 - DNA, 25 bp, Homo sapien
ccttgatccgggcttcattgaattc

SEQ ID NO: 1550788 - DNA, 25 bp, Homo sapien
gctcttttaagagggtcacggttgc

SEQ ID NO: 1550789 - DNA, 25 bp, Homo sapien
agagggtcacggttgctcctgccct

SEQ ID NO: 1550790 - DNA, 25 bp, Homo sapien
tgatccgggcttcattgaattcctt

SEQ ID NO: 1550791 - DNA, 25 bp, Homo sapien
aatagcgtctatccattcgcgcgcg

SEQ ID NO: 1550792 - DNA, 25 bp, Homo sapien
gagggttcttctctcccgcaggttc

SEQ ID NO: 1550793 - DNA, 25 bp, Homo sapien
ctgtggtgtcgctggatgctatgta

SEQ ID NO: 1550794 - DNA, 25 bp, Homo sapien
cgcctttcaatcaggctcagagggt

SEQ ID NO: 1550795 - DNA, 25 bp, Homo sapien
gctcccttcggacatctgcgttcag

SEQ ID NO: 1550796 - DNA, 25 bp, Homo sapien
gcttggctaaggcttggcgccagaa

SEQ ID NO: 1550797 - DNA, 25 bp, Homo sapien
tgcgttcagacgtgtgtcccagtct

SEQ ID NO: 1550798 - DNA, 25 bp, Homo sapien
gaggccctgctttcaccgtctgaac

SEQ ID NO: 1550799 - DNA, 25 bp, Homo sapien
ggagggctaactttcaacagatccc

SEQ ID NO: 1550800 - DNA, 25 bp, Homo sapien
tcctctagggatggtttagcgccag

SEQ ID NO: 1550801 - DNA, 25 bp, Homo sapien
ccactgccggtttcccaagacaatg

SEQ ID NO: 1550802 - DNA, 25 bp, Homo sapien
caagacaatgagctctccgcatggg

SEQ ID NO: 1550803 - DNA, 25 bp, Homo sapien
ccacccccggaagcgcatgttcctt

SEQ ID NO: 1550804 - DNA, 25 bp, Homo sapien
atgttccttgcagccctcggaaagc

SEQ ID NO: 1550805 - DNA, 25 bp, Homo sapien
ccccggaagcgcatgttccttgcag

SEQ ID NO: 1550806 - DNA, 25 bp, Homo sapien
tctccacccccggaagcgcatgttc

SEQ ID NO: 1550807 - DNA, 25 bp, Homo sapien
acagccacccctcgaataggggcca

SEQ ID NO: 1550808 - DNA, 25 bp, Homo sapien
cgccaccgctacctcctggcccaca

SEQ ID NO: 1550809 - DNA, 25 bp, Homo sapien
ccgggccaccctccgacgtgccttg

SEQ ID NO: 1550810 - DNA, 25 bp, Homo sapien
gacgtgccttgttcgctccccgaac

SEQ ID NO: 1550811 - DNA, 25 bp, Homo sapien
caggcagacgcctcacaagaatctc

SEQ ID NO: 1550812 - DNA, 25 bp, Homo sapien
tcacgacgccaaagttgaggcccgg

SEQ ID NO: 1550813 - DNA, 25 bp, Homo sapien
tccaggaatctgagtccctagcctt

SEQ ID NO: 1550814 - DNA, 25 bp, Homo sapien
gaagcaaaattgctgccggcttcca

SEQ ID NO: 1550815 - DNA, 25 bp, Homo sapien
aggtctgggaggagctggtctggat

SEQ ID NO: 1550816 - DNA, 25 bp, Homo sapien
ggcttcttctggagaggtctgggag

SEQ ID NO: 1550817 - DNA, 25 bp, Homo sapien
ttcttctggagaggtctgggaggag

SEQ ID NO: 1550818 - DNA, 25 bp, Homo sapien
gaggtctgggaggagctggtctgga

SEQ ID NO: 1550819 - DNA, 25 bp, Homo sapien
aatgctggatacgaggggttcccat

SEQ ID NO: 1550820 - DNA, 25 bp, Homo sapien
caaatgctggatacgaggggttccc

SEQ ID NO: 1550821 - DNA, 25 bp, Homo sapien
gatcagcaaatgctggatacgaggg

SEQ ID NO: 1550822 - DNA, 25 bp, Homo sapien
gaggatcagcaaatgctggatacga

SEQ ID NO: 1550823 - DNA, 25 bp, Homo sapien
tcctctgtggtccagttaaacatat

SEQ ID NO: 1550824 - DNA, 25 bp, Homo sapien
cacagtcatggacagacccttttga

SEQ ID NO: 1550825 - DNA, 25 bp, Homo sapien
ttttgacaatacagctctaggcccg

SEQ ID NO: 1550826 - DNA, 25 bp, Homo sapien
gcaaagtgcccctttgtcacaagtc

SEQ ID NO: 1550827 - DNA, 25 bp, Homo sapien
ctttgtcattacagaaggaatcctc

SEQ ID NO: 1550828 - DNA, 25 bp, Homo sapien
tgcagcccttcgtggccaaaatggc

SEQ ID NO: 1550829 - DNA, 25 bp, Homo sapien
ggaatcctcacagtagttactgtag

SEQ ID NO: 1550830 - DNA, 25 bp, Homo sapien
tactgtaggaggtcacgatcaggcc

SEQ ID NO: 1550831 - DNA, 25 bp, Homo sapien
agccacacaggttggacaatggagg

SEQ ID NO: 1550832 - DNA, 25 bp, Homo sapien
gccacacaggttggacaatggaggg

SEQ ID NO: 1550833 - DNA, 25 bp, Homo sapien
ccacacaggttggacaatggagggt

SEQ ID NO: 1550834 - DNA, 25 bp, Homo sapien
cgagttgtaccattgggacagggaa

SEQ ID NO: 1550835 - DNA, 25 bp, Homo sapien
gcatcgagttgtaccattgggacag

SEQ ID NO: 1550836 - DNA, 25 bp, Homo sapien
tagcatcgagttgtaccattgggac

SEQ ID NO: 1550837 - DNA, 25 bp, Homo sapien
catcgagttgtaccattgggacagg

SEQ ID NO: 1550838 - DNA, 25 bp, Homo sapien
aaacatgggtcctactgctaagatt

SEQ ID NO: 1550839 - DNA, 25 bp, Homo sapien
tgggtcctactgctaagattccaga

SEQ ID NO: 1550840 - DNA, 25 bp, Homo sapien
ttgacctccacagacgactcaatgc

SEQ ID NO: 1550841 - DNA, 25 bp, Homo sapien
tttgacctccacagacgactcaatg

SEQ ID NO: 1550842 - DNA, 25 bp, Homo sapien
cattttcagtctttcgaggttgagt

SEQ ID NO: 1550843 - DNA, 25 bp, Homo sapien
cagtctttcgaggttgagtgagcag

SEQ ID NO: 1550844 - DNA, 25 bp, Homo sapien
agctgatgtgggcacgcttccctca

SEQ ID NO: 1550845 - DNA, 25 bp, Homo sapien
ctttcgaggttgagtgagcagctga

SEQ ID NO: 1550846 - DNA, 25 bp, Homo sapien
cagcaatggcagcagtagctgtaac

SEQ ID NO: 1550847 - DNA, 25 bp, Homo sapien
aaagtgaataaatgatggcagcagc

SEQ ID NO: 1550848 - DNA, 25 bp, Homo sapien
gcagcaatggcagcagtagctgtaa

SEQ ID NO: 1550849 - DNA, 25 bp, Homo sapien
ttaggaaaagtgaataaatgatggc

SEQ ID NO: 1550850 - DNA, 25 bp, Homo sapien
aattcccatctactcctcagcttgt

SEQ ID NO: 1550851 - DNA, 25 bp, Homo sapien
tattagtaacgcctactgcatacaa

SEQ ID NO: 1550852 - DNA, 25 bp, Homo sapien
tgtcaaatacgttcatagtatctct

SEQ ID NO: 1550853 - DNA, 25 bp, Homo sapien
gttgaacctcaacagtaagaaggct

SEQ ID NO: 1550854 - DNA, 25 bp, Homo sapien
gctatttggcgaatgcacttgcacc

SEQ ID NO: 1550855 - DNA, 25 bp, Homo sapien
ggactctcggaaagtactactgcta

SEQ ID NO: 1550856 - DNA, 25 bp, Homo sapien
gaacatgccttgtgtccggaactgg

SEQ ID NO: 1550857 - DNA, 25 bp, Homo sapien
ccaggagcgggatcttaaataacaa

SEQ ID NO: 1550858 - DNA, 25 bp, Homo sapien
tttgagctctgtcatcccatccctg

SEQ ID NO: 1550859 - DNA, 25 bp, Homo sapien
tcttccagccttagttcagttggca

SEQ ID NO: 1550860 - DNA, 25 bp, Homo sapien
ggaagccctcactgactttcctggc

SEQ ID NO: 1550861 - DNA, 25 bp, Homo sapien
cctgggtcatcatgggcgatggatc

SEQ ID NO: 1550862 - DNA, 25 bp, Homo sapien
ccaaagtgtcgcgattaggcgagcc

SEQ ID NO: 1550863 - DNA, 25 bp, Homo sapien
ctcccaaagtgtcgcgattaggcga

SEQ ID NO: 1550864 - DNA, 25 bp, Homo sapien
aagtgtcgcgattaggcgagccacc

SEQ ID NO: 1550865 - DNA, 25 bp, Homo sapien
gtgtcgcgattaggcgagccaccgt

SEQ ID NO: 1550866 - DNA, 25 bp, Homo sapien
ccaggtcccttagaatcagagagtc

SEQ ID NO: 1550867 - DNA, 25 bp, Homo sapien
tctgggtggacacaaggaattggca

SEQ ID NO: 1550868 - DNA, 25 bp, Homo sapien
gaacatcttagctgccacagggtgg

SEQ ID NO: 1550869 - DNA, 25 bp, Homo sapien
cacagggtggccgaatcagaaagtt

SEQ ID NO: 1550870 - DNA, 25 bp, Homo sapien
acaggcatgagccactgcgcccagg

SEQ ID NO: 1550871 - DNA, 25 bp, Homo sapien
tctcaggtgatccgcgcgccctggc

SEQ ID NO: 1550872 - DNA, 25 bp, Homo sapien
ctatctcagcttagcgcaacctcag

SEQ ID NO: 1550873 - DNA, 25 bp, Homo sapien
cctggcctcccaaagtgttgggatt

SEQ ID NO: 1550874 - DNA, 25 bp, Homo sapien
gtttccggccagaattgcaaccagg

SEQ ID NO: 1550875 - DNA, 25 bp, Homo sapien
gagacccagtcctgtcttgcggaaa

SEQ ID NO: 1550876 - DNA, 25 bp, Homo sapien
atggagactccatccgcttcgggcg

SEQ ID NO: 1550877 - DNA, 25 bp, Homo sapien
tgccgttgcctcacactgggaagtc

SEQ ID NO: 1550878 - DNA, 25 bp, Homo sapien
gaccaaactcatggatcccagcggg

SEQ ID NO: 1550879 - DNA, 25 bp, Homo sapien
cgttctgatcgacccagtcctggaa

SEQ ID NO: 1550880 - DNA, 25 bp, Homo sapien
tcgggatgcccagctgatcaaggag

SEQ ID NO: 1550881 - DNA, 25 bp, Homo sapien
agtcctggaaacagcgcctcgggat

SEQ ID NO: 1550882 - DNA, 25 bp, Homo sapien
tgcgcaacagagtgataccccgtat

SEQ ID NO: 1550883 - DNA, 25 bp, Homo sapien
cctgcgcaacagagtgataccccgt

SEQ ID NO: 1550884 - DNA, 25 bp, Homo sapien
ggagttcatgtctgcaatgagctat

SEQ ID NO: 1550885 - DNA, 25 bp, Homo sapien
ccaggagttcatgtctgcaatgagc

SEQ ID NO: 1550886 - DNA, 25 bp, Homo sapien
agcctgggtggtcccgaggtgccct

SEQ ID NO: 1550887 - DNA, 25 bp, Homo sapien
gtggtcccgaggtgccctggcccat

SEQ ID NO: 1550888 - DNA, 25 bp, Homo sapien
ccatgctcttggtgccaggcctggg

SEQ ID NO: 1550889 - DNA, 25 bp, Homo sapien
ctgggtggtcccgaggtgccctggc

SEQ ID NO: 1550890 - DNA, 25 bp, Homo sapien
ttttcgagaattccgctgagttcca

SEQ ID NO: 1550891 - DNA, 25 bp, Homo sapien
tcttttcgagaattccgctgagttc

SEQ ID NO: 1550892 - DNA, 25 bp, Homo sapien
tcttcttttcgagaattccgctgag

SEQ ID NO: 1550893 - DNA, 25 bp, Homo sapien
ccctcttcttttcgagaattccgct

SEQ ID NO: 1550894 - DNA, 25 bp, Homo sapien
tcagaaagcatgcgcagtgcgggct

SEQ ID NO: 1550895 - DNA, 25 bp, Homo sapien
ggctgggtgcgccagccaggcaggc

SEQ ID NO: 1550896 - DNA, 25 bp, Homo sapien
caggcaagttcgtgagcaagcgcga

SEQ ID NO: 1550897 - DNA, 25 bp, Homo sapien
ccacgctggaccaaagggggcgtca

SEQ ID NO: 1550898 - DNA, 25 bp, Homo sapien
cttccggctcctcccgccacggcca

SEQ ID NO: 1550899 - DNA, 25 bp, Homo sapien
acggccacggccgcagccgctgtcg

SEQ ID NO: 1550900 - DNA, 25 bp, Homo sapien
gcggggcttccggctcctcccgcca

SEQ ID NO: 1550901 - DNA, 25 bp, Homo sapien
ccacggccacggccgcagccgctgt

SEQ ID NO: 1550902 - DNA, 25 bp, Homo sapien
ggcttttgacttagtctcagttcat

SEQ ID NO: 1550903 - DNA, 25 bp, Homo sapien
gtcaactgcgcccttcttgccgtta

SEQ ID NO: 1550904 - DNA, 25 bp, Homo sapien
gtctcagttcattgacgccgcgtca

SEQ ID NO: 1550905 - DNA, 25 bp, Homo sapien
tcttgccgttaaatttcatccctgg

SEQ ID NO: 1550906 - DNA, 25 bp, Homo sapien
ggtgacgccggtgatgaccaggctg

SEQ ID NO: 1550907 - DNA, 25 bp, Homo sapien
ggggtgacgccggtgatgaccaggc

SEQ ID NO: 1550908 - DNA, 25 bp, Homo sapien
ggggcgggggtgacgccggtgatga

SEQ ID NO: 1550909 - DNA, 25 bp, Homo sapien
tgacgccggtgatgaccaggctgat

SEQ ID NO: 1550910 - DNA, 25 bp, Homo sapien
gactaggatcggtagccccggccgc

SEQ ID NO: 1550911 - DNA, 25 bp, Homo sapien
cagtgggactaggatcggtagcccc

SEQ ID NO: 1550912 - DNA, 25 bp, Homo sapien
cttgccagtgggactaggatcggta

SEQ ID NO: 1550913 - DNA, 25 bp, Homo sapien
actaggatcggtagccccggccgcg

SEQ ID NO: 1550914 - DNA, 25 bp, Homo sapien
ggcgagcccgcggacgcggtgggcc

SEQ ID NO: 1550915 - DNA, 25 bp, Homo sapien
cccgcggacgcggtgggccctggag

SEQ ID NO: 1550916 - DNA, 25 bp, Homo sapien
gccggggaggcgagcccgcggacgc

SEQ ID NO: 1550917 - DNA, 25 bp, Homo sapien
cgcggacgcggtgggccctggagct

SEQ ID NO: 1550918 - DNA, 25 bp, Homo sapien
catgggtggggtcgggcgcctccgt

SEQ ID NO: 1550919 - DNA, 25 bp, Homo sapien
gggcgcctccgtgtgctaagcggtg

SEQ ID NO: 1550920 - DNA, 25 bp, Homo sapien
cgcctccgtgtgctaagcggtgcgt

SEQ ID NO: 1550921 - DNA, 25 bp, Homo sapien
tccgtgtgctaagcggtgcgtggcc

SEQ ID NO: 1550922 - DNA, 25 bp, Homo sapien
cttggaggggtaggagaaggccttg

SEQ ID NO: 1550923 - DNA, 25 bp, Homo sapien
agcatcggtgccaggcagtcgcctg

SEQ ID NO: 1550924 - DNA, 25 bp, Homo sapien
tgaaggagcagtaagcgtctctggc

SEQ ID NO: 1550925 - DNA, 25 bp, Homo sapien
tggccaaaggacttcgggcagtgtg

SEQ ID NO: 1550926 - DNA, 25 bp, Homo sapien
gccgccagcttggaagggtagcaga

SEQ ID NO: 1550927 - DNA, 25 bp, Homo sapien
caaagagttcctcgggcttctgagc

SEQ ID NO: 1550928 - DNA, 25 bp, Homo sapien
tgagctcgagcccagtataaatggc

SEQ ID NO: 1550929 - DNA, 25 bp, Homo sapien
tcatatggccaaagtggagacacca

SEQ ID NO: 1550930 - DNA, 25 bp, Homo sapien
gaagaggcgagctcatacagtcggt

SEQ ID NO: 1550931 - DNA, 25 bp, Homo sapien
cctgggtacccatgaggcttgtctc

SEQ ID NO: 1550932 - DNA, 25 bp, Homo sapien
ctccagggttttcagaagtagctgt

SEQ ID NO: 1550933 - DNA, 25 bp, Homo sapien
aggccagggatagtgcctttcctcc

SEQ ID NO: 1550934 - DNA, 25 bp, Homo sapien
caaggctccaccacatttaagtggg

SEQ ID NO: 1550935 - DNA, 25 bp, Homo sapien
cttgcgggaccttagaaggtgacag

SEQ ID NO: 1550936 - DNA, 25 bp, Homo sapien
ttgcgggaccttagaaggtgacagt

SEQ ID NO: 1550937 - DNA, 25 bp, Homo sapien
acagtgaccaagcttggccagttcc

SEQ ID NO: 1550938 - DNA, 25 bp, Homo sapien
agcttggccagttccgtgtgaagga

SEQ ID NO: 1550939 - DNA, 25 bp, Homo sapien
tgcgggcccagatcacagagatgag

SEQ ID NO: 1550940 - DNA, 25 bp, Homo sapien
taatacttagtgcagctcgcctgac

SEQ ID NO: 1550941 - DNA, 25 bp, Homo sapien
gttccttaggacatgtagcccgctg

SEQ ID NO: 1550942 - DNA, 25 bp, Homo sapien
tactgaatattctctgccgggaaag

SEQ ID NO: 1550943 - DNA, 25 bp, Homo sapien
gaacactctgtggatagtgctaggg

SEQ ID NO: 1550944 - DNA, 25 bp, Homo sapien
tgtgctcccataatatgccatgaga

SEQ ID NO: 1550945 - DNA, 25 bp, Homo sapien
aatttcagcacatctaacttcagca

SEQ ID NO: 1550946 - DNA, 25 bp, Homo sapien
catttgccaggttactgctaatccc

SEQ ID NO: 1550947 - DNA, 25 bp, Homo sapien
aaaggccagcagaaaggtctctggt

SEQ ID NO: 1550948 - DNA, 25 bp, Homo sapien
caaaggccagcagaaaggtctctgg

SEQ ID NO: 1550949 - DNA, 25 bp, Homo sapien
gtggtgtggtcttcggaccacgact

SEQ ID NO: 1550950 - DNA, 25 bp, Homo sapien
cgactttgacttaggacttttgtgt

SEQ ID NO: 1550951 - DNA, 25 bp, Homo sapien
tgcagtgtagacagagggcgaggct

SEQ ID NO: 1550952 - DNA, 25 bp, Homo sapien
gcgaggctgtagtcatgggtggtgt

SEQ ID NO: 1550953 - DNA, 25 bp, Homo sapien
tgcaggtcttcatttggccatggca

SEQ ID NO: 1550954 - DNA, 25 bp, Homo sapien
catatttcgcagtgtagtgggcacc

SEQ ID NO: 1550955 - DNA, 25 bp, Homo sapien
tgctgcaggtcttcatttggccatg

SEQ ID NO: 1550956 - DNA, 25 bp, Homo sapien
ccgccgccgtacatatttcgcagtg

SEQ ID NO: 1550957 - DNA, 25 bp, Homo sapien
tggatgtggtcccttccaccccacc

SEQ ID NO: 1550958 - DNA, 25 bp, Homo sapien
gcctgctggatgtggtcccttccac

SEQ ID NO: 1550959 - DNA, 25 bp, Homo sapien
ctcagcctgctggatgtggtccctt

SEQ ID NO: 1550960 - DNA, 25 bp, Homo sapien
cagcctgctggatgtggtcccttcc

SEQ ID NO: 1550961 - DNA, 25 bp, Homo sapien
actgcaacctccacctcccgagtag

SEQ ID NO: 1550962 - DNA, 25 bp, Homo sapien
tttagacggagttgcccaggctgga

SEQ ID NO: 1550963 - DNA, 25 bp, Homo sapien
cactgcaacctccacctcccgagta

SEQ ID NO: 1550964 - DNA, 25 bp, Homo sapien
tttttagacggagttgcccaggctg

SEQ ID NO: 1550965 - DNA, 25 bp, Homo sapien
tgcctcaaggtcttgcctaacccta

SEQ ID NO: 1550966 - DNA, 25 bp, Homo sapien
gacagtgctggctgaccactccctg

SEQ ID NO: 1550967 - DNA, 25 bp, Homo sapien
cccctgcctcaaggtcttgcctaac

SEQ ID NO: 1550968 - DNA, 25 bp, Homo sapien
caaggtcttgcctaaccctaggcct

SEQ ID NO: 1550969 - DNA, 25 bp, Homo sapien
tataacgccggagtagcagtcctgg

SEQ ID NO: 1550970 - DNA, 25 bp, Homo sapien
gaaggagctggttaccatgtggtcc

SEQ ID NO: 1550971 - DNA, 25 bp, Homo sapien
agtcctgggacctgatgcagccctt

SEQ ID NO: 1550972 - DNA, 25 bp, Homo sapien
gcagcccttgtaggtgtgcaccaac

SEQ ID NO: 1550973 - DNA, 25 bp, Homo sapien
agtgtaaggtgaatagggatgttta

SEQ ID NO: 1550974 - DNA, 25 bp, Homo sapien
cgggaaacaccagggttgctaatag

SEQ ID NO: 1550975 - DNA, 25 bp, Homo sapien
tgaatagggatgtttaagccgttcc

SEQ ID NO: 1550976 - DNA, 25 bp, Homo sapien
aacaccagggttgctaatagacact

SEQ ID NO: 1550977 - DNA, 25 bp, Homo sapien
gcacatcaggccattctcagtaaga

SEQ ID NO: 1550978 - DNA, 25 bp, Homo sapien
cagataaggagacgcagtggttttc

SEQ ID NO: 1550979 - DNA, 25 bp, Homo sapien
atttgtccctgaagctcgcagtgca

SEQ ID NO: 1550980 - DNA, 25 bp, Homo sapien
cagcctgcacgtgtccagataagga

SEQ ID NO: 1550981 - DNA, 25 bp, Homo sapien
tagaagtttggacctctagttctgt

SEQ ID NO: 1550982 - DNA, 25 bp, Homo sapien
tctcctcccatcgaacctagaagtt

SEQ ID NO: 1550983 - DNA, 25 bp, Homo sapien
tttccagagattcaggcaccactca

SEQ ID NO: 1550984 - DNA, 25 bp, Homo sapien
agggagatttcagactggaatcagg

SEQ ID NO: 1550985 - DNA, 25 bp, Homo sapien
gagtgcactctatatgatggaggaa

SEQ ID NO: 1550986 - DNA, 25 bp, Homo sapien
accaggcttggtaaagcacatactc

SEQ ID NO: 1550987 - DNA, 25 bp, Homo sapien
aagcacatactctctgtagcacagc

SEQ ID NO: 1550988 - DNA, 25 bp, Homo sapien
gagtgagtgcactctatatgatgga

SEQ ID NO: 1550989 - DNA, 25 bp, Homo sapien
tatgactatgacgaggaaaacaccc

SEQ ID NO: 1550990 - DNA, 25 bp, Homo sapien
tatagcatggaaaacacagcacagg

SEQ ID NO: 1550991 - DNA, 25 bp, Homo sapien
tgtgctcccgtgatgtgccatgaga

SEQ ID NO: 1550992 - DNA, 25 bp, Homo sapien
gatttgaaatgaggattgagacccc

SEQ ID NO: 1550993 - DNA, 25 bp, Homo sapien
agacataaggttgttggcaggcatc

SEQ ID NO: 1550994 - DNA, 25 bp, Homo sapien
gactcccttgtagacagatcactgg

SEQ ID NO: 1550995 - DNA, 25 bp, Homo sapien
ggaaacctagactccagcgtctggg

SEQ ID NO: 1550996 - DNA, 25 bp, Homo sapien
gagtgcgggcagacttactgtttaa

SEQ ID NO: 1550997 - DNA, 25 bp, Homo sapien
tggtcctgtctgacatcactgctat

SEQ ID NO: 1550998 - DNA, 25 bp, Homo sapien
gaccctgtctctgatttggtcctgt

SEQ ID NO: 1550999 - DNA, 25 bp, Homo sapien
actttgaccctgtctctgatttggt

SEQ ID NO: 1551000 - DNA, 25 bp, Homo sapien
tctgatttggtcctgtctgacatca

SEQ ID NO: 1551001 - DNA, 25 bp, Homo sapien
tgttgaccaagttgctgggttgttt

SEQ ID NO: 1551002 - DNA, 25 bp, Homo sapien
ggagaagtagattcacatatccaag

SEQ ID NO: 1551003 - DNA, 25 bp, Homo sapien
gatgcaggtctggttatgttgacca

SEQ ID NO: 1551004 - DNA, 25 bp, Homo sapien
tagttggagaagtagattcacatat

SEQ ID NO: 1551005 - DNA, 25 bp, Homo sapien
gagccactgcacccgtcctaatttt

SEQ ID NO: 1551006 - DNA, 25 bp, Homo sapien
gcgtgagccactgcacccgtcctaa

SEQ ID NO: 1551007 - DNA, 25 bp, Homo sapien
gtgagccactgcacccgtcctaatt

SEQ ID NO: 1551008 - DNA, 25 bp, Homo sapien
ccactgcacccgtcctaatttttgt

SEQ ID NO: 1551009 - DNA, 25 bp, Homo sapien
tggacacctcgggtatccccaagag

SEQ ID NO: 1551010 - DNA, 25 bp, Homo sapien
ggcccaccaaatgggtggtcaggca

SEQ ID NO: 1551011 - DNA, 25 bp, Homo sapien
tgtacatagagggtgctgcattgag

SEQ ID NO: 1551012 - DNA, 25 bp, Homo sapien
ttatggccttggtgttttgtgcacc

SEQ ID NO: 1551013 - DNA, 25 bp, Homo sapien
gcttggattggatcctggcgaccca

SEQ ID NO: 1551014 - DNA, 25 bp, Homo sapien
tcccaagggcgagagcttaaagaac

SEQ ID NO: 1551015 - DNA, 25 bp, Homo sapien
gaatgtggtgctctggaccgtgcct

SEQ ID NO: 1551016 - DNA, 25 bp, Homo sapien
gactcccagggctatgcgaatggct

SEQ ID NO: 1551017 - DNA, 25 bp, Homo sapien
gccatccggcagtagtatagtcgca

SEQ ID NO: 1551018 - DNA, 25 bp, Homo sapien
agtgggatagggaccactcagtctc

SEQ ID NO: 1551019 - DNA, 25 bp, Homo sapien
ggtttccgcgcccttttgccagatg

SEQ ID NO: 1551020 - DNA, 25 bp, Homo sapien
tctcggagccgagatcccggatttg

SEQ ID NO: 1551021 - DNA, 25 bp, Homo sapien
caagcgctgcctacaggttcctgct

SEQ ID NO: 1551022 - DNA, 25 bp, Homo sapien
tgtgatttttgttccgcccagagcc

SEQ ID NO: 1551023 - DNA, 25 bp, Homo sapien
tcccacgcgcgcttgcagctgctat

SEQ ID NO: 1551024 - DNA, 25 bp, Homo sapien
gcgcttgcagctgctatcccgctac

SEQ ID NO: 1551025 - DNA, 25 bp, Homo sapien
tctcttcagggttcgggtcctccat

SEQ ID NO: 1551026 - DNA, 25 bp, Homo sapien
ttctcttcagggttcgggtcctcca

SEQ ID NO: 1551027 - DNA, 25 bp, Homo sapien
gagggtgagtactctggccacataa

SEQ ID NO: 1551028 - DNA, 25 bp, Homo sapien
tgccacagagatcttagcatcagct

SEQ ID NO: 1551029 - DNA, 25 bp, Homo sapien
ccttggacaccgaagtgccacagag

SEQ ID NO: 1551030 - DNA, 25 bp, Homo sapien
gcaaaactctgtggcgccttggaca

SEQ ID NO: 1551031 - DNA, 25 bp, Homo sapien
aaggtgatgaggcagcgggtgcact

SEQ ID NO: 1551032 - DNA, 25 bp, Homo sapien
ggtgatgaggcagcgggtgcacttc

SEQ ID NO: 1551033 - DNA, 25 bp, Homo sapien
cgaaggtgatgaggcagcgggtgca

SEQ ID NO: 1551034 - DNA, 25 bp, Homo sapien
ctgcgaaggtgatgaggcagcgggt

SEQ ID NO: 1551035 - DNA, 25 bp, Homo sapien
acgaagtccgctgggtgctcccgct

SEQ ID NO: 1551036 - DNA, 25 bp, Homo sapien
agcttctgggccacgaagtccgctg

SEQ ID NO: 1551037 - DNA, 25 bp, Homo sapien
tggcggtgccgcctcagagaaacag

SEQ ID NO: 1551038 - DNA, 25 bp, Homo sapien
cgcttcatgtgacgctcctggaact

SEQ ID NO: 1551039 - DNA, 25 bp, Homo sapien
catgccgaatgtagtgttgatgcag

SEQ ID NO: 1551040 - DNA, 25 bp, Homo sapien
ccgaatgtagtgttgatgcagccct

SEQ ID NO: 1551041 - DNA, 25 bp, Homo sapien
ccgggcatgccgaatgtagtgttga

SEQ ID NO: 1551042 - DNA, 25 bp, Homo sapien
tccccccgggcatgccgaatgtagt

SEQ ID NO: 1551043 - DNA, 25 bp, Homo sapien
cacccgtcaccgtggagaggcttaa

SEQ ID NO: 1551044 - DNA, 25 bp, Homo sapien
gtcaccgtggagaggcttaagctgc

SEQ ID NO: 1551045 - DNA, 25 bp, Homo sapien
agagccacccgtcaccgtggagagg

SEQ ID NO: 1551046 - DNA, 25 bp, Homo sapien
acagagccacccgtcaccgtggaga

SEQ ID NO: 1551047 - DNA, 25 bp, Homo sapien
acaaaccatttctctcccgcactcc

SEQ ID NO: 1551048 - DNA, 25 bp, Homo sapien
caatctgcagctaggtatttaactg

SEQ ID NO: 1551049 - DNA, 25 bp, Homo sapien
gaatgaagggtgatggcacaatctg

SEQ ID NO: 1551050 - DNA, 25 bp, Homo sapien
tttaactgggaataagggagacaca

SEQ ID NO: 1551051 - DNA, 25 bp, Homo sapien
cattcaggcaaaggtccagggcaat

SEQ ID NO: 1551052 - DNA, 25 bp, Homo sapien
cagggcaatttgctcccatagccca

SEQ ID NO: 1551053 - DNA, 25 bp, Homo sapien
tcaggcaaaggtccagggcaatttg

SEQ ID NO: 1551054 - DNA, 25 bp, Homo sapien
ccattcaggcaaaggtccagggcaa

SEQ ID NO: 1551055 - DNA, 25 bp, Homo sapien
gtttttagatactattcctgttagc

SEQ ID NO: 1551056 - DNA, 25 bp, Homo sapien
agcttattcataccatttcacctac

SEQ ID NO: 1551057 - DNA, 25 bp, Homo sapien
tatttcaggactagaatgatataca

SEQ ID NO: 1551058 - DNA, 25 bp, Homo sapien
aaattatcgggggactagtgccatc

SEQ ID NO: 1551059 - DNA, 25 bp, Homo sapien
gcaaggcatcgaccattgtctgcag

SEQ ID NO: 1551060 - DNA, 25 bp, Homo sapien
gacaatgtcagcctaggttgggcct

SEQ ID NO: 1551061 - DNA, 25 bp, Homo sapien
ggaaattcccactcaaaagccagag

SEQ ID NO: 1551062 - DNA, 25 bp, Homo sapien
atctccagttgagggtgacacccac

SEQ ID NO: 1551063 - DNA, 25 bp, Homo sapien
gagttggccatagtttgcagacccc

SEQ ID NO: 1551064 - DNA, 25 bp, Homo sapien
gctccttgaaattgacgagagaccc

SEQ ID NO: 1551065 - DNA, 25 bp, Homo sapien
gagatggctggataccatttccgta

SEQ ID NO: 1551066 - DNA, 25 bp, Homo sapien
ttctgttgcatgtgacagagaccca

SEQ ID NO: 1551067 - DNA, 25 bp, Homo sapien
ggtgtacttgggcaggctgctatct

SEQ ID NO: 1551068 - DNA, 25 bp, Homo sapien
cagtttactaacatgatggcaatgg

SEQ ID NO: 1551069 - DNA, 25 bp, Homo sapien
gcaggagtcctgttgacccatttta

SEQ ID NO: 1551070 - DNA, 25 bp, Homo sapien
caagtggttatatcttatgtctggg

SEQ ID NO: 1551071 - DNA, 25 bp, Homo sapien
tcttgctttgctgcggactcgggac

SEQ ID NO: 1551072 - DNA, 25 bp, Homo sapien
tctagattggctgtgactttgcggc

SEQ ID NO: 1551073 - DNA, 25 bp, Homo sapien
ccatgagttcttatcctgccaggag

SEQ ID NO: 1551074 - DNA, 25 bp, Homo sapien
tcatgactgagttacgggatgtcgc

SEQ ID NO: 1551075 - DNA, 25 bp, Homo sapien
ggcttctccatcgtctgcgatctct

SEQ ID NO: 1551076 - DNA, 25 bp, Homo sapien
gcttctagattgtctgcgctgtctc

SEQ ID NO: 1551077 - DNA, 25 bp, Homo sapien
tggggcttctccatcgtctgcgatc

SEQ ID NO: 1551078 - DNA, 25 bp, Homo sapien
gctggagcttctagattgtctgcac

SEQ ID NO: 1551079 - DNA, 25 bp, Homo sapien
ggcttgactgtcatcctggcttagg

SEQ ID NO: 1551080 - DNA, 25 bp, Homo sapien
tggaggctctaggtcgactgtaacc

SEQ ID NO: 1551081 - DNA, 25 bp, Homo sapien
tctagatcggctatgagctttctcc

SEQ ID NO: 1551082 - DNA, 25 bp, Homo sapien
tattagagaacttgtggccggaggt

SEQ ID NO: 1551083 - DNA, 25 bp, Homo sapien
gggccttgtgtgacgtgggcttgga

SEQ ID NO: 1551084 - DNA, 25 bp, Homo sapien
tggaaaagtgtaggctgatgggcat

SEQ ID NO: 1551085 - DNA, 25 bp, Homo sapien
tgacgtctggaatactctggaaggg

SEQ ID NO: 1551086 - DNA, 25 bp, Homo sapien
ccttgtgtgacgtgggcttggaaaa

SEQ ID NO: 1551087 - DNA, 25 bp, Homo sapien
ggaagaactgccacaacgaattgtg

SEQ ID NO: 1551088 - DNA, 25 bp, Homo sapien
gctataggcctaaggcatcctggga

SEQ ID NO: 1551089 - DNA, 25 bp, Homo sapien
tagtggaaggttttgccctggtctc

SEQ ID NO: 1551090 - DNA, 25 bp, Homo sapien
tggccgttattgtcccgtagtggaa

SEQ ID NO: 1551091 - DNA, 25 bp, Homo sapien
cagatccttgtcgagaccggttcct

SEQ ID NO: 1551092 - DNA, 25 bp, Homo sapien
cgctccgccttgaagcgctgtggga

SEQ ID NO: 1551093 - DNA, 25 bp, Homo sapien
ccgctagtcgtaggcctggtgcatc

SEQ ID NO: 1551094 - DNA, 25 bp, Homo sapien
gaaagagtgtcccagatccttgtcg

SEQ ID NO: 1551095 - DNA, 25 bp, Homo sapien
ttctccccctacgcgtttgtgccgc

SEQ ID NO: 1551096 - DNA, 25 bp, Homo sapien
ccgtcaccggggagccggcggtctg

SEQ ID NO: 1551097 - DNA, 25 bp, Homo sapien
ctggggccgtggtgacccgagggct

SEQ ID NO: 1551098 - DNA, 25 bp, Homo sapien
gagccggcggtctggggccgtggtg

SEQ ID NO: 1551099 - DNA, 25 bp, Homo sapien
ggaagcgggcgctacggccccgctg

SEQ ID NO: 1551100 - DNA, 25 bp, Homo sapien
ccgggcaggggtgcgcgaggcatgc

SEQ ID NO: 1551101 - DNA, 25 bp, Homo sapien
gcgccggtgagtgtcccgggcaggg

SEQ ID NO: 1551102 - DNA, 25 bp, Homo sapien
atgccgggaagcgggcgctacggcc

SEQ ID NO: 1551103 - DNA, 25 bp, Homo sapien
gatgcaaactgatcccctacgaaga

SEQ ID NO: 1551104 - DNA, 25 bp, Homo sapien
tggcttaaggatcaccacctcctgg

SEQ ID NO: 1551105 - DNA, 25 bp, Homo sapien
tagttggctcctattcgtacttggc

SEQ ID NO: 1551106 - DNA, 25 bp, Homo sapien
tacaggagtatggttcactgcagaa

SEQ ID NO: 1551107 - DNA, 25 bp, Homo sapien
agaggcccgagctggtaaagagttt

SEQ ID NO: 1551108 - DNA, 25 bp, Homo sapien
ggtcagaaagataagcacggccaga

SEQ ID NO: 1551109 - DNA, 25 bp, Homo sapien
ataagcacggccagaccaggtgtat

SEQ ID NO: 1551110 - DNA, 25 bp, Homo sapien
cggagggaacggcaagagcagaggc

SEQ ID NO: 1551111 - DNA, 25 bp, Homo sapien
gctctaagcattgagaacccaaagt

SEQ ID NO: 1551112 - DNA, 25 bp, Homo sapien
ttacgatgtgccaggtgctgctcaa

SEQ ID NO: 1551113 - DNA, 25 bp, Homo sapien
ttaaagacagcgctacactaatctg

SEQ ID NO: 1551114 - DNA, 25 bp, Homo sapien
aaacccacaggagtagacaggacaa

SEQ ID NO: 1551115 - DNA, 25 bp, Homo sapien
gcactttcggtgagcttttggagtc

SEQ ID NO: 1551116 - DNA, 25 bp, Homo sapien
gcaaggaaatacctccaagagaaag

SEQ ID NO: 1551117 - DNA, 25 bp, Homo sapien
taattgctgaattcgctgggagcag

SEQ ID NO: 1551118 - DNA, 25 bp, Homo sapien
tcctatctgacccacgaagccagtg

SEQ ID NO: 1551119 - DNA, 25 bp, Homo sapien
caatggagctttcttgcagagccct

SEQ ID NO: 1551120 - DNA, 25 bp, Homo sapien
tttagagtagggagcagatttcctc

SEQ ID NO: 1551121 - DNA, 25 bp, Homo sapien
tgtcctggactctagcctgcaggaa

SEQ ID NO: 1551122 - DNA, 25 bp, Homo sapien
tctactaaatcttgactgcagctct

SEQ ID NO: 1551123 - DNA, 25 bp, Homo sapien
aagtccagaactaggagttgagggc

SEQ ID NO: 1551124 - DNA, 25 bp, Homo sapien
acctcaaacagtggctgaaataccc

SEQ ID NO: 1551125 - DNA, 25 bp, Homo sapien
gggcaaggattggacatgttaagct

SEQ ID NO: 1551126 - DNA, 25 bp, Homo sapien
tattccaggaggtgctagaaaaacc

SEQ ID NO: 1551127 - DNA, 25 bp, Homo sapien
tggggtgcatttgcgccattttaaa

SEQ ID NO: 1551128 - DNA, 25 bp, Homo sapien
ccagccagcaggaatcgggggagat

SEQ ID NO: 1551129 - DNA, 25 bp, Homo sapien
gcatttgcgccattttaaaaacatg

SEQ ID NO: 1551130 - DNA, 25 bp, Homo sapien
gagatggggtgcatttgcgccattt

SEQ ID NO: 1551131 - DNA, 25 bp, Homo sapien
aatcttgatgtcttggagttcctgg

SEQ ID NO: 1551132 - DNA, 25 bp, Homo sapien
caggctcatagaatcctggaactaa

SEQ ID NO: 1551133 - DNA, 25 bp, Homo sapien
tttttaggctaaacaccaggctcat

SEQ ID NO: 1551134 - DNA, 25 bp, Homo sapien
gcatgctagcatcttgacgtcttaa

SEQ ID NO: 1551135 - DNA, 25 bp, Homo sapien
ctgacaaatgggcatgagagaggtc

SEQ ID NO: 1551136 - DNA, 25 bp, Homo sapien
gagagaggtcgaggccttctttcca

SEQ ID NO: 1551137 - DNA, 25 bp, Homo sapien
cataggtaatgatcccgcatcaggt

SEQ ID NO: 1551138 - DNA, 25 bp, Homo sapien
ggacctcagtttgcctgacaaatgg

SEQ ID NO: 1551139 - DNA, 25 bp, Homo sapien
tattcagcgatggttaaatggaaca

SEQ ID NO: 1551140 - DNA, 25 bp, Homo sapien
ttgtttcacaccactacgttctggg

SEQ ID NO: 1551141 - DNA, 25 bp, Homo sapien
ttataattgccagggagggtaaggc

SEQ ID NO: 1551142 - DNA, 25 bp, Homo sapien
catttttggctccagttcatcatga

SEQ ID NO: 1551143 - DNA, 25 bp, Homo sapien
cctggatgtccagtaccgcagtggg

SEQ ID NO: 1551144 - DNA, 25 bp, Homo sapien
tgaaccacattgatgtctcctgctg

SEQ ID NO: 1551145 - DNA, 25 bp, Homo sapien
agtggctgtaaccacccagacctgg

SEQ ID NO: 1551146 - DNA, 25 bp, Homo sapien
catcaccctgctaatgactgccaga

SEQ ID NO: 1551147 - DNA, 25 bp, Homo sapien
gtcccgtggagggtgacacatgcag

SEQ ID NO: 1551148 - DNA, 25 bp, Homo sapien
cccgtggagggtgacacatgcagtc

SEQ ID NO: 1551149 - DNA, 25 bp, Homo sapien
aggtcccgtggagggtgacacatgc

SEQ ID NO: 1551150 - DNA, 25 bp, Homo sapien
caggtcccgtggagggtgacacatg

SEQ ID NO: 1551151 - DNA, 25 bp, Homo sapien
gcagttgcattcaggcttagcggtg

SEQ ID NO: 1551152 - DNA, 25 bp, Homo sapien
tgcagacctctggtgtagcacagcc

SEQ ID NO: 1551153 - DNA, 25 bp, Homo sapien
gcattctcatgtaagttgcagacct

SEQ ID NO: 1551154 - DNA, 25 bp, Homo sapien
tcaggcttagcggtgagatgaaatc

SEQ ID NO: 1551155 - DNA, 25 bp, Homo sapien
tgtgatgcctgccatctgaaggcag

SEQ ID NO: 1551156 - DNA, 25 bp, Homo sapien
gtgatgcctgccatctgaaggcagt

SEQ ID NO: 1551157 - DNA, 25 bp, Homo sapien
ccaacaccataggtcagggcataga

SEQ ID NO: 1551158 - DNA, 25 bp, Homo sapien
gagacagggttaccttcgccaaagc

SEQ ID NO: 1551159 - DNA, 25 bp, Homo sapien
tggaggtcacgcagaaaccgtttct

SEQ ID NO: 1551160 - DNA, 25 bp, Homo sapien
caggtggtgttgacgcagaagccaa

SEQ ID NO: 1551161 - DNA, 25 bp, Homo sapien
gccacccatctgactgctttctggt

SEQ ID NO: 1551162 - DNA, 25 bp, Homo sapien
cacccatctgactgctttctggtga

SEQ ID NO: 1551163 - DNA, 25 bp, Homo sapien
cccatctgactgctttctggtgaca

SEQ ID NO: 1551164 - DNA, 25 bp, Homo sapien
ttggccacccatctgactgctttct

SEQ ID NO: 1551165 - DNA, 25 bp, Homo sapien
ctgcatgtagaaggaggaattgcag

SEQ ID NO: 1551166 - DNA, 25 bp, Homo sapien
acaatatctcactcagggtgtgtga

SEQ ID NO: 1551167 - DNA, 25 bp, Homo sapien
ttcttcagacgttaggtccagctgg

SEQ ID NO: 1551168 - DNA, 25 bp, Homo sapien
cccaggacatgtaggacacaatatc

SEQ ID NO: 1551169 - DNA, 25 bp, Homo sapien
cccgagcggcagtgggactctagga

SEQ ID NO: 1551170 - DNA, 25 bp, Homo sapien
tgggactctaggacggcgcggcggt

SEQ ID NO: 1551171 - DNA, 25 bp, Homo sapien
gcagccgcgtacgttcacgttccgg

SEQ ID NO: 1551172 - DNA, 25 bp, Homo sapien
agtggctcgacagccagtgtcttgg

SEQ ID NO: 1551173 - DNA, 25 bp, Homo sapien
ttagcacagcgtcgcggttgccagg

SEQ ID NO: 1551174 - DNA, 25 bp, Homo sapien
agcgtcgcggttgccaggactacca

SEQ ID NO: 1551175 - DNA, 25 bp, Homo sapien
acagcgtcgcggttgccaggactac

SEQ ID NO: 1551176 - DNA, 25 bp, Homo sapien
gcacagcgtcgcggttgccaggact

SEQ ID NO: 1551177 - DNA, 25 bp, Homo sapien
ctagcgacgtgccgaacaagcaggt

SEQ ID NO: 1551178 - DNA, 25 bp, Homo sapien
gcgacgtgccgaacaagcaggtgga

SEQ ID NO: 1551179 - DNA, 25 bp, Homo sapien
gacgtgccgaacaagcaggtggagg

SEQ ID NO: 1551180 - DNA, 25 bp, Homo sapien
tagcgacgtgccgaacaagcaggtg

SEQ ID NO: 1551181 - DNA, 25 bp, Homo sapien
tccaggtctccgcattgccccagca

SEQ ID NO: 1551182 - DNA, 25 bp, Homo sapien
ccaggtctccgcattgccccagcag

SEQ ID NO: 1551183 - DNA, 25 bp, Homo sapien
caggtctccgcattgccccagcaga

SEQ ID NO: 1551184 - DNA, 25 bp, Homo sapien
aggtctccgcattgccccagcagag

SEQ ID NO: 1551185 - DNA, 25 bp, Homo sapien
tccccactgataggatctccttccc

SEQ ID NO: 1551186 - DNA, 25 bp, Homo sapien
cccactgataggatctccttccctc

SEQ ID NO: 1551187 - DNA, 25 bp, Homo sapien
ccccactgataggatctccttccct

SEQ ID NO: 1551188 - DNA, 25 bp, Homo sapien
ccactgataggatctccttccctct

SEQ ID NO: 1551189 - DNA, 25 bp, Homo sapien
agccattcacacctcctgggccttg

SEQ ID NO: 1551190 - DNA, 25 bp, Homo sapien
cagataccacggatgtgaagggagt

SEQ ID NO: 1551191 - DNA, 25 bp, Homo sapien
gcagggagagacagataccacggat

SEQ ID NO: 1551192 - DNA, 25 bp, Homo sapien
ccacggatgtgaagggagtcgccct

SEQ ID NO: 1551193 - DNA, 25 bp, Homo sapien
ggagagtcacaggatgcgtgatcct

SEQ ID NO: 1551194 - DNA, 25 bp, Homo sapien
tcacaggatgcgtgatcctcagcgc

SEQ ID NO: 1551195 - DNA, 25 bp, Homo sapien
gagtcacaggatgcgtgatcctcag

SEQ ID NO: 1551196 - DNA, 25 bp, Homo sapien
ggccagtggttcagagggtggcggg

SEQ ID NO: 1551197 - DNA, 25 bp, Homo sapien
ccacgggcaactttgaagtagccat

SEQ ID NO: 1551198 - DNA, 25 bp, Homo sapien
aggatggtgttttcctcctccccag

SEQ ID NO: 1551199 - DNA, 25 bp, Homo sapien
aggcaccacgggcaactttgaagta

SEQ ID NO: 1551200 - DNA, 25 bp, Homo sapien
tccccaggcaccacgggcaactttg

SEQ ID NO: 1551201 - DNA, 25 bp, Homo sapien
tttaggtacttgtcagccgggcagc

SEQ ID NO: 1551202 - DNA, 25 bp, Homo sapien
acaccagcgtgggaaagtcgtagcg

SEQ ID NO: 1551203 - DNA, 25 bp, Homo sapien
tgagcaacgcatcatcgtaggcggc

SEQ ID NO: 1551204 - DNA, 25 bp, Homo sapien
gaggtcacccgactcaaaggctgtg

SEQ ID NO: 1551205 - DNA, 25 bp, Homo sapien
cccttttccacgccattgtcactgg

SEQ ID NO: 1551206 - DNA, 25 bp, Homo sapien
ccttttccacgccattgtcactggc

SEQ ID NO: 1551207 - DNA, 25 bp, Homo sapien
cccccttttccacgccattgtcact

SEQ ID NO: 1551208 - DNA, 25 bp, Homo sapien
gccccccttttccacgccattgtca

SEQ ID NO: 1551209 - DNA, 25 bp, Homo sapien
tcttctgagtcgtgtttcttccagc

SEQ ID NO: 1551210 - DNA, 25 bp, Homo sapien
ctgcaggttgagagtggggcttcct

SEQ ID NO: 1551211 - DNA, 25 bp, Homo sapien
cttctgagtcgtgtttcttccagct

SEQ ID NO: 1551212 - DNA, 25 bp, Homo sapien
ttctgagtcgtgtttcttccagctg

SEQ ID NO: 1551213 - DNA, 25 bp, Homo sapien
ttgttaagacttagtttgtgggtga

SEQ ID NO: 1551214 - DNA, 25 bp, Homo sapien
taagacttagtttgtgggtgaggca

SEQ ID NO: 1551215 - DNA, 25 bp, Homo sapien
ttaagacttagtttgtgggtgaggc

SEQ ID NO: 1551216 - DNA, 25 bp, Homo sapien
agacttagtttgtgggtgaggcagg

SEQ ID NO: 1551217 - DNA, 25 bp, Homo sapien
gctggcctcctcgtgaaagggcaat

SEQ ID NO: 1551218 - DNA, 25 bp, Homo sapien
tgataatgccgcaaaggatgctgct

SEQ ID NO: 1551219 - DNA, 25 bp, Homo sapien
caaggttaacctctgcggaagctag

SEQ ID NO: 1551220 - DNA, 25 bp, Homo sapien
tatgtacgggacttactggatgcca

SEQ ID NO: 1551221 - DNA, 25 bp, Homo sapien
actgttgacagccatccaggatctg

SEQ ID NO: 1551222 - DNA, 25 bp, Homo sapien
gctactgttgacagccatccaggat

SEQ ID NO: 1551223 - DNA, 25 bp, Homo sapien
ccagctactgttgacagccatccag

SEQ ID NO: 1551224 - DNA, 25 bp, Homo sapien
ctgttgacagccatccaggatctgg

SEQ ID NO: 1551225 - DNA, 25 bp, Homo sapien
ctcgttgaggcagtttgacagagga

SEQ ID NO: 1551226 - DNA, 25 bp, Homo sapien
aaatgaggcactctggaaatccggc

SEQ ID NO: 1551227 - DNA, 25 bp, Homo sapien
cagaggagtcaaactggcagtagcc

SEQ ID NO: 1551228 - DNA, 25 bp, Homo sapien
ggtctgaatcagcacactcttggtg

SEQ ID NO: 1551229 - DNA, 25 bp, Homo sapien
tcagggctgagattgttgattggat

SEQ ID NO: 1551230 - DNA, 25 bp, Homo sapien
ggctgagattgttgattggattcac

SEQ ID NO: 1551231 - DNA, 25 bp, Homo sapien
agggctgagattgttgattggattc

SEQ ID NO: 1551232 - DNA, 25 bp, Homo sapien
cagggctgagattgttgattggatt

SEQ ID NO: 1551233 - DNA, 25 bp, Homo sapien
gcatcccatacagccctggtgtttc

SEQ ID NO: 1551234 - DNA, 25 bp, Homo sapien
tgccgcccgtggcacatatttgtct

SEQ ID NO: 1551235 - DNA, 25 bp, Homo sapien
tcctgctttcaagcatcccatacag

SEQ ID NO: 1551236 - DNA, 25 bp, Homo sapien
cagtccagctggctgagtctgttca

SEQ ID NO: 1551237 - DNA, 25 bp, Homo sapien
cctgacatgggccacagatgaaaag

SEQ ID NO: 1551238 - DNA, 25 bp, Homo sapien
ctcacatgctcagctcacagggtca

SEQ ID NO: 1551239 - DNA, 25 bp, Homo sapien
gttaaggagtgtgcctaaagccaca

SEQ ID NO: 1551240 - DNA, 25 bp, Homo sapien
gactggcggagtctctgcccttcaa

SEQ ID NO: 1551241 - DNA, 25 bp, Homo sapien
caatcagcagccgcgttaggtaagg

SEQ ID NO: 1551242 - DNA, 25 bp, Homo sapien
ttaggggctgcaacccggacgccga

SEQ ID NO: 1551243 - DNA, 25 bp, Homo sapien
ccattgaaaggtcgctgggacgtcc

SEQ ID NO: 1551244 - DNA, 25 bp, Homo sapien
atttgcaggcgggtggcttgggtca

SEQ ID NO: 1551245 - DNA, 25 bp, Homo sapien
ctggccgagctgaagaactgggtat

SEQ ID NO: 1551246 - DNA, 25 bp, Homo sapien
gcgccccctggtgggacaacaaaga

SEQ ID NO: 1551247 - DNA, 25 bp, Homo sapien
ttcagttaccgctggccgagctgaa

SEQ ID NO: 1551248 - DNA, 25 bp, Homo sapien
agaagtgtaactcaccagcctctgc

SEQ ID NO: 1551249 - DNA, 25 bp, Homo sapien
cagcatccccggggagggcaaaaca

SEQ ID NO: 1551250 - DNA, 25 bp, Homo sapien
gcatccccggggagggcaaaacagc

SEQ ID NO: 1551251 - DNA, 25 bp, Homo sapien
agcatccccggggagggcaaaacag

SEQ ID NO: 1551252 - DNA, 25 bp, Homo sapien
gtctgagcatccacatgtgtctgcc

SEQ ID NO: 1551253 - DNA, 25 bp, Homo sapien
tttctcttgattcactgctgcagca

SEQ ID NO: 1551254 - DNA, 25 bp, Homo sapien
gattcactgctgcagcaacatccct

SEQ ID NO: 1551255 - DNA, 25 bp, Homo sapien
tggaaacttgtttctcttgattcac

SEQ ID NO: 1551256 - DNA, 25 bp, Homo sapien
acttgtttctcttgattcactgctg

SEQ ID NO: 1551257 - DNA, 25 bp, Homo sapien
gccgcgtgtgatggaccgtccgtgg

SEQ ID NO: 1551258 - DNA, 25 bp, Homo sapien
gaccgtccgtggtggtgacagacat

SEQ ID NO: 1551259 - DNA, 25 bp, Homo sapien
gggcaaaacgaggtcaggcgtctcc

SEQ ID NO: 1551260 - DNA, 25 bp, Homo sapien
aggcgtctccctggccgcgtgtgat

SEQ ID NO: 1551261 - DNA, 25 bp, Homo sapien
aatgaggcgaatgcgagcagccgaa

SEQ ID NO: 1551262 - DNA, 25 bp, Homo sapien
tagtttcggaaggagacatcgaagc

SEQ ID NO: 1551263 - DNA, 25 bp, Homo sapien
tcactgggccgaatgagcgtgcgct

SEQ ID NO: 1551264 - DNA, 25 bp, Homo sapien
tccgctttgcgcatcccagtgattc

SEQ ID NO: 1551265 - DNA, 25 bp, Homo sapien
tcggagcacaggttacaacttccag

SEQ ID NO: 1551266 - DNA, 25 bp, Homo sapien
cttgggacgcgccgtcccaaacttg

SEQ ID NO: 1551267 - DNA, 25 bp, Homo sapien
aaacttgggtttctggcgtctcctg

SEQ ID NO: 1551268 - DNA, 25 bp, Homo sapien
gggtttctggcgtctcctgcgtttc

SEQ ID NO: 1551269 - DNA, 25 bp, Homo sapien
tctttctggtcactgatatcacctc

SEQ ID NO: 1551270 - DNA, 25 bp, Homo sapien
gggctctttctggtcactgatatca

SEQ ID NO: 1551271 - DNA, 25 bp, Homo sapien
gctctttctggtcactgatatcacc

SEQ ID NO: 1551272 - DNA, 25 bp, Homo sapien
ttctggtcactgatatcacctctct

SEQ ID NO: 1551273 - DNA, 25 bp, Homo sapien
tgactgagagcgaattaaaaggttc

SEQ ID NO: 1551274 - DNA, 25 bp, Homo sapien
ttcgctaaggaacgcattctggagt

SEQ ID NO: 1551275 - DNA, 25 bp, Homo sapien
tcaaaggcgcttttttcgaagacgc

SEQ ID NO: 1551276 - DNA, 25 bp, Homo sapien
gaagacgcccgggagctcttgcttt

SEQ ID NO: 1551277 - DNA, 25 bp, Homo sapien
caagagcctggaaatgctcgcaggc

SEQ ID NO: 1551278 - DNA, 25 bp, Homo sapien
tgtggttagtttggacccagaggct

SEQ ID NO: 1551279 - DNA, 25 bp, Homo sapien
gctgatgggaaacaagagcctggaa

SEQ ID NO: 1551280 - DNA, 25 bp, Homo sapien
tggaaatgctcgcaggctgggagag

SEQ ID NO: 1551281 - DNA, 25 bp, Homo sapien
tgcagagtccaagaaccttaaggac

SEQ ID NO: 1551282 - DNA, 25 bp, Homo sapien
cagagtccaagaaccttaaggacac

SEQ ID NO: 1551283 - DNA, 25 bp, Homo sapien
catgcagagtccaagaaccttaagg

SEQ ID NO: 1551284 - DNA, 25 bp, Homo sapien
gcagagtccaagaaccttaaggaca

SEQ ID NO: 1551285 - DNA, 25 bp, Homo sapien
ttaattgtggcaggcccgaagacag

SEQ ID NO: 1551286 - DNA, 25 bp, Homo sapien
catccttcttgcttgaaacgttcat

SEQ ID NO: 1551287 - DNA, 25 bp, Homo sapien
agacttctttcttgcggtcatttaa

SEQ ID NO: 1551288 - DNA, 25 bp, Homo sapien
tcttgcttgaaacgttcattatggg

SEQ ID NO: 1551289 - DNA, 25 bp, Homo sapien
gacaagatcctgtcccgcggacact

SEQ ID NO: 1551290 - DNA, 25 bp, Homo sapien
caggtcttgacaagatcctgtcccg

SEQ ID NO: 1551291 - DNA, 25 bp, Homo sapien
ccatcaggtcttgacaagatcctgt

SEQ ID NO: 1551292 - DNA, 25 bp, Homo sapien
tcttgacaagatcctgtcccgcgga

SEQ ID NO: 1551293 - DNA, 25 bp, Homo sapien
ccaaagagctcctagaggcccctct

SEQ ID NO: 1551294 - DNA, 25 bp, Homo sapien
caccaaagagctcctagaggcccct

SEQ ID NO: 1551295 - DNA, 25 bp, Homo sapien
aaagagctcctagaggcccctcttc

SEQ ID NO: 1551296 - DNA, 25 bp, Homo sapien
agagctcctagaggcccctcttcta

SEQ ID NO: 1551297 - DNA, 25 bp, Homo sapien
ttagaaatctggcaacctggcagca

SEQ ID NO: 1551298 - DNA, 25 bp, Homo sapien
accttgatttctaaacatgcaaaaa

SEQ ID NO: 1551299 - DNA, 25 bp, Homo sapien
ccttgatttctaaacatgcaaaaat

SEQ ID NO: 1551300 - DNA, 25 bp, Homo sapien
gacttcctgtcgtaaggctgggcac

SEQ ID NO: 1551301 - DNA, 25 bp, Homo sapien
caagaagacctcaggttaagacttc

SEQ ID NO: 1551302 - DNA, 25 bp, Homo sapien
ttaagacttcctgtcgtaaggctgg

SEQ ID NO: 1551303 - DNA, 25 bp, Homo sapien
ctggaagctcgtcaatggaacaaga

SEQ ID NO: 1551304 - DNA, 25 bp, Homo sapien
ctgttattcaatgtaatgagacaca

SEQ ID NO: 1551305 - DNA, 25 bp, Homo sapien
gctctcgaacatcctgtagctgtta

SEQ ID NO: 1551306 - DNA, 25 bp, Homo sapien
cagctctcgaacatcctgtagctgt

SEQ ID NO: 1551307 - DNA, 25 bp, Homo sapien
gaacatcctgtagctgttattcaat

SEQ ID NO: 1551308 - DNA, 25 bp, Homo sapien
ctctcaggaatacctgtcatggtcc

SEQ ID NO: 1551309 - DNA, 25 bp, Homo sapien
tgtcatggtccaagctagaacgtcc

SEQ ID NO: 1551310 - DNA, 25 bp, Homo sapien
catggtccaagctagaacgtccttc

SEQ ID NO: 1551311 - DNA, 25 bp, Homo sapien
aatacctgtcatggtccaagctaga

SEQ ID NO: 1551312 - DNA, 25 bp, Homo sapien
cctctattggtgaagcacagaatcc

SEQ ID NO: 1551313 - DNA, 25 bp, Homo sapien
gggattcctctattggtgaagcaca

SEQ ID NO: 1551314 - DNA, 25 bp, Homo sapien
actaattaatgctccatgggattcc

SEQ ID NO: 1551315 - DNA, 25 bp, Homo sapien
ggttctggaattgcaagaactaatt

SEQ ID NO: 1551316 - DNA, 25 bp, Homo sapien
tccaacattacatccacgtacaagt

SEQ ID NO: 1551317 - DNA, 25 bp, Homo sapien
ttacatccacgtacaagtccctctg

SEQ ID NO: 1551318 - DNA, 25 bp, Homo sapien
attacatccacgtacaagtccctct

SEQ ID NO: 1551319 - DNA, 25 bp, Homo sapien
ccaacattacatccacgtacaagtc

SEQ ID NO: 1551320 - DNA, 25 bp, Homo sapien
caaagtaaactgcacgaaaatgggc

SEQ ID NO: 1551321 - DNA, 25 bp, Homo sapien
tataatgcaaatccagccccttggc

SEQ ID NO: 1551322 - DNA, 25 bp, Homo sapien
ttcaagaaagcgttccccgactgtc

SEQ ID NO: 1551323 - DNA, 25 bp, Homo sapien
ggcccgagaatggtgtaaagctcac

SEQ ID NO: 1551324 - DNA, 25 bp, Homo sapien
aagggcaactgcacaaggaggaagc

SEQ ID NO: 1551325 - DNA, 25 bp, Homo sapien
ctgtgcccagttccacaatatttaa

SEQ ID NO: 1551326 - DNA, 25 bp, Homo sapien
cctccccacaaaatagttgtggaag

SEQ ID NO: 1551327 - DNA, 25 bp, Homo sapien
cagttgctgggactaaaggagcgca

SEQ ID NO: 1551328 - DNA, 25 bp, Homo sapien
caaagccacagtatttaagctgacc

SEQ ID NO: 1551329 - DNA, 25 bp, Homo sapien
ccttgcctgttgatgactgtataac

SEQ ID NO: 1551330 - DNA, 25 bp, Homo sapien
gaaaatctagcctctcatggtacat

SEQ ID NO: 1551331 - DNA, 25 bp, Homo sapien
tccaactgaatatggaggtgaccaa

SEQ ID NO: 1551332 - DNA, 25 bp, Homo sapien
tattgctatttaaggatcactttaa

SEQ ID NO: 1551333 - DNA, 25 bp, Homo sapien
atttacttagatttattagccagaa

SEQ ID NO: 1551334 - DNA, 25 bp, Homo sapien
tatgtgactctatagattttacctt

SEQ ID NO: 1551335 - DNA, 25 bp, Homo sapien
cagagttttccaacccctgagataa

SEQ ID NO: 1551336 - DNA, 25 bp, Homo sapien
gtctcatacgtttttgactccaaat

SEQ ID NO: 1551337 - DNA, 25 bp, Homo sapien
ggtctcatacgtttttgactccaaa

SEQ ID NO: 1551338 - DNA, 25 bp, Homo sapien
ttttggtctcatacgtttttgactc

SEQ ID NO: 1551339 - DNA, 25 bp, Homo sapien
ttggtctcatacgtttttgactcca

SEQ ID NO: 1551340 - DNA, 25 bp, Homo sapien
tagtccctcgaatatgcttttgcac

SEQ ID NO: 1551341 - DNA, 25 bp, Homo sapien
catagctgattatcatttgactgaa

SEQ ID NO: 1551342 - DNA, 25 bp, Homo sapien
ctgaagatggatgcctcaaggccaa

SEQ ID NO: 1551343 - DNA, 25 bp, Homo sapien
tcatttgactgaagtatccctcttg

SEQ ID NO: 1551344 - DNA, 25 bp, Homo sapien
ggcttgatccccagctaaaggtctt

SEQ ID NO: 1551345 - DNA, 25 bp, Homo sapien
tggactctctcatgcttaactaggc

SEQ ID NO: 1551346 - DNA, 25 bp, Homo sapien
tcatgaacaagttttgagccacaag

SEQ ID NO: 1551347 - DNA, 25 bp, Homo sapien
caagttttgagccatgactgcaagc

SEQ ID NO: 1551348 - DNA, 25 bp, Homo sapien
gaaatgaatggcttttgcacaaccc

SEQ ID NO: 1551349 - DNA, 25 bp, Homo sapien
tgcacaacccttacattcacaaggt

SEQ ID NO: 1551350 - DNA, 25 bp, Homo sapien
gatatccaataagactgtacagaag

SEQ ID NO: 1551351 - DNA, 25 bp, Homo sapien
ttgctggatagcaagataattgccc

SEQ ID NO: 1551352 - DNA, 25 bp, Homo sapien
tactctctaggatgaacttactgaa

SEQ ID NO: 1551353 - DNA, 25 bp, Homo sapien
ggtgatgacagtatggtatttgcca

SEQ ID NO: 1551354 - DNA, 25 bp, Homo sapien
caccatcctacaggtagtatggagg

SEQ ID NO: 1551355 - DNA, 25 bp, Homo sapien
tctgctattctaatcagagaggtgc

SEQ ID NO: 1551356 - DNA, 25 bp, Homo sapien
gttaacaggcaaatgtggcacccag

SEQ ID NO: 1551357 - DNA, 25 bp, Homo sapien
cactaaatcatgacaggcacctggt

SEQ ID NO: 1551358 - DNA, 25 bp, Homo sapien
ttcagaaatgttgggataaggcacc

SEQ ID NO: 1551359 - DNA, 25 bp, Homo sapien
cacccagagggagtggcataatagc

SEQ ID NO: 1551360 - DNA, 25 bp, Homo sapien
aatgccactatattacctatgagag

SEQ ID NO: 1551361 - DNA, 25 bp, Homo sapien
caaataggcagcaatcagaaaatgg

SEQ ID NO: 1551362 - DNA, 25 bp, Homo sapien
cagatgtgtatccatgaccacaccc

SEQ ID NO: 1551363 - DNA, 25 bp, Homo sapien
gctggtgagagtataagacggttca

SEQ ID NO: 1551364 - DNA, 25 bp, Homo sapien
tcagaaaaggtatggactcagggct

SEQ ID NO: 1551365 - DNA, 25 bp, Homo sapien
cacagtgctacgacatggttatgct

SEQ ID NO: 1551366 - DNA, 25 bp, Homo sapien
ccacttatagtcttggcaagccaga

SEQ ID NO: 1551367 - DNA, 25 bp, Homo sapien
tatacagaacttacaggcagtgcct

SEQ ID NO: 1551368 - DNA, 25 bp, Homo sapien
gatttcctgcaaataggcagtccca

SEQ ID NO: 1551369 - DNA, 25 bp, Homo sapien
ggaccttagtcagtaatgtgagtga

SEQ ID NO: 1551370 - DNA, 25 bp, Homo sapien
taacagaccagtatgagtctgtggc

SEQ ID NO: 1551371 - DNA, 25 bp, Homo sapien
ggaatgcacaacctagaactcttgc

SEQ ID NO: 1551372 - DNA, 25 bp, Homo sapien
tcttcttgtgcattggctctaccag

SEQ ID NO: 1551373 - DNA, 25 bp, Homo sapien
gtgtgtattctgcacccattgggca

SEQ ID NO: 1551374 - DNA, 25 bp, Homo sapien
agagagtagagtgtggaagtcccaa

SEQ ID NO: 1551375 - DNA, 25 bp, Homo sapien
tcatctatggtgcagttgaaatcca

SEQ ID NO: 1551376 - DNA, 25 bp, Homo sapien
ccacagtggccatacaagtttacat

SEQ ID NO: 1551377 - DNA, 25 bp, Homo sapien
taataaccatcctaagtgggatgag

SEQ ID NO: 1551378 - DNA, 25 bp, Homo sapien
tgtctcttggatatacggatatcct

SEQ ID NO: 1551379 - DNA, 25 bp, Homo sapien
tacctgatgataaggctgggaattt

SEQ ID NO: 1551380 - DNA, 25 bp, Homo sapien
tacagtttgaggaacttaacttagc

SEQ ID NO: 1551381 - DNA, 25 bp, Homo sapien
tcttggagtgaacgtctgctggtga

SEQ ID NO: 1551382 - DNA, 25 bp, Homo sapien
cacagatgttatatagcacactaca

SEQ ID NO: 1551383 - DNA, 25 bp, Homo sapien
cagtgctacacccagttgcttaaag

SEQ ID NO: 1551384 - DNA, 25 bp, Homo sapien
tcttaatgtaatgagagggaaagcc

SEQ ID NO: 1551385 - DNA, 25 bp, Homo sapien
gaaggcctttcgttctatctcaggt

SEQ ID NO: 1551386 - DNA, 25 bp, Homo sapien
taaggcctttaatcgcagtgatcga

SEQ ID NO: 1551387 - DNA, 25 bp, Homo sapien
cagtgatcgacttactcaacatgag

SEQ ID NO: 1551388 - DNA, 25 bp, Homo sapien
cctatgaatgcaatggatgtgagaa

SEQ ID NO: 1551389 - DNA, 25 bp, Homo sapien
tattagacatcgaaaaatccacact

SEQ ID NO: 1551390 - DNA, 25 bp, Homo sapien
tgaacatctgagagaccatactggt

SEQ ID NO: 1551391 - DNA, 25 bp, Homo sapien
ccatactggtgtgataccctatgaa

SEQ ID NO: 1551392 - DNA, 25 bp, Homo sapien
cagatgttaggtggccccatgattc

SEQ ID NO: 1551393 - DNA, 25 bp, Homo sapien
gagctgcagtgtatcctcacattgg

SEQ ID NO: 1551394 - DNA, 25 bp, Homo sapien
tgtgccactgccaagaatacatgcc

SEQ ID NO: 1551395 - DNA, 25 bp, Homo sapien
cattgatatcatgcacccttggaca

SEQ ID NO: 1551396 - DNA, 25 bp, Homo sapien
gacatacctaagtagatgggccttc

SEQ ID NO: 1551397 - DNA, 25 bp, Homo sapien
taggttatggcctgaaacactggaa

SEQ ID NO: 1551398 - DNA, 25 bp, Homo sapien
tgttgcacaacacacagaagctagc

SEQ ID NO: 1551399 - DNA, 25 bp, Homo sapien
gaagctagctgtgatcctgagccaa

SEQ ID NO: 1551400 - DNA, 25 bp, Homo sapien
taataagtgaagttttgtgactggc

SEQ ID NO: 1551401 - DNA, 25 bp, Homo sapien
ccactagcactcactctgcattttc

SEQ ID NO: 1551402 - DNA, 25 bp, Homo sapien
catcaccactgtcaacatgagaaaa

SEQ ID NO: 1551403 - DNA, 25 bp, Homo sapien
cttagcctagcgttttcaaaatcca

SEQ ID NO: 1551404 - DNA, 25 bp, Homo sapien
tatcgcctcacagacacttgggatg

SEQ ID NO: 1551405 - DNA, 25 bp, Homo sapien
tgtgtgcgttagacaaatgaacagt

SEQ ID NO: 1551406 - DNA, 25 bp, Homo sapien
ctgtgtgaattgtcactgtgactcc

SEQ ID NO: 1551407 - DNA, 25 bp, Homo sapien
tttcaggcctgtctgcttgagcagc

SEQ ID NO: 1551408 - DNA, 25 bp, Homo sapien
gatcgtctccacagaaatcagcgga

SEQ ID NO: 1551409 - DNA, 25 bp, Homo sapien
tctttttccggtgtccgagctgctg

SEQ ID NO: 1551410 - DNA, 25 bp, Homo sapien
gaaatcagcggaggcttccacagtc

SEQ ID NO: 1551411 - DNA, 25 bp, Homo sapien
tagcccctacgtggtgagtagatcg

SEQ ID NO: 1551412 - DNA, 25 bp, Homo sapien
gcaagtcaaccaacggtacagatgg

SEQ ID NO: 1551413 - DNA, 25 bp, Homo sapien
taatagagcaagtcaaccaacggta

SEQ ID NO: 1551414 - DNA, 25 bp, Homo sapien
acggtacagatggtcaagctcttgc

SEQ ID NO: 1551415 - DNA, 25 bp, Homo sapien
gaaatcatagcccttaatagagcaa

SEQ ID NO: 1551416 - DNA, 25 bp, Homo sapien
tccagccgagactcaagattccact

SEQ ID NO: 1551417 - DNA, 25 bp, Homo sapien
tctcacacgcaggtttgaggctttg

SEQ ID NO: 1551418 - DNA, 25 bp, Homo sapien
ttgaggtctgcatgcccgtgctctg

SEQ ID NO: 1551419 - DNA, 25 bp, Homo sapien
gtggaccatacgctggagctcgcca

SEQ ID NO: 1551420 - DNA, 25 bp, Homo sapien
tcctggagctactataggtgctggc

SEQ ID NO: 1551421 - DNA, 25 bp, Homo sapien
tactataggtgctggcgctacctgg

SEQ ID NO: 1551422 - DNA, 25 bp, Homo sapien
cgctacctgggagcgcgaaaaacaa

SEQ ID NO: 1551423 - DNA, 25 bp, Homo sapien
ctggcgctacctgggagcgcgaaaa

SEQ ID NO: 1551424 - DNA, 25 bp, Homo sapien
tatcaatttatacactcgccagtag

SEQ ID NO: 1551425 - DNA, 25 bp, Homo sapien
taagtaggccatagtagtatttacc

SEQ ID NO: 1551426 - DNA, 25 bp, Homo sapien
tactttgcccattcagcctaatgga

SEQ ID NO: 1551427 - DNA, 25 bp, Homo sapien
tttctgtgggctctcggtactttgc

SEQ ID NO: 1551428 - DNA, 25 bp, Homo sapien
tctgggtcatttctactgttctgtc

SEQ ID NO: 1551429 - DNA, 25 bp, Homo sapien
tcctagtgtaggcatctattgagtc

SEQ ID NO: 1551430 - DNA, 25 bp, Homo sapien
ttctgctgctgagtacatccaatga

SEQ ID NO: 1551431 - DNA, 25 bp, Homo sapien
tcatctatcaattgtcagcagagta

SEQ ID NO: 1551432 - DNA, 25 bp, Homo sapien
aattccatgaaagtgtgaggctccc

SEQ ID NO: 1551433 - DNA, 25 bp, Homo sapien
gaacctagtagcattactggacgta

SEQ ID NO: 1551434 - DNA, 25 bp, Homo sapien
tggcctgtgatcttcagacgcagtt

SEQ ID NO: 1551435 - DNA, 25 bp, Homo sapien
cttaggtaagacaggaaggcgagtt

SEQ ID NO: 1551436 - DNA, 25 bp, Homo sapien
tcattggcaatggtaggtccctgtg

SEQ ID NO: 1551437 - DNA, 25 bp, Homo sapien
gacaaggacaaatctaatctgcagt

SEQ ID NO: 1551438 - DNA, 25 bp, Homo sapien
catgaggagccaatagaatgggaca

SEQ ID NO: 1551439 - DNA, 25 bp, Homo sapien
tgtgtgccgtcattcatcagagttt

SEQ ID NO: 1551440 - DNA, 25 bp, Homo sapien
cccagcattgttggagttttatctc

SEQ ID NO: 1551441 - DNA, 25 bp, Homo sapien
attgttggacaatgggactggcgct

SEQ ID NO: 1551442 - DNA, 25 bp, Homo sapien
tacccaggttgggacgcctgctggc

SEQ ID NO: 1551443 - DNA, 25 bp, Homo sapien
tctcttggatgacatgttctgttac

SEQ ID NO: 1551444 - DNA, 25 bp, Homo sapien
taatgtcttgaaaccagatactgtg

SEQ ID NO: 1551445 - DNA, 25 bp, Homo sapien
tacatgtatgggtctttttctggcc

SEQ ID NO: 1551446 - DNA, 25 bp, Homo sapien
aattctttcagtattgccatggcac

SEQ ID NO: 1551447 - DNA, 25 bp, Homo sapien
gaatctttatataagggaggtccac

SEQ ID NO: 1551448 - DNA, 25 bp, Homo sapien
gcagtaacatgcacaagtctcaagt

SEQ ID NO: 1551449 - DNA, 25 bp, Homo sapien
tattgaggtgtaatctgcatgcagt

SEQ ID NO: 1551450 - DNA, 25 bp, Homo sapien
agatagtctatagttctagtacccc

SEQ ID NO: 1551451 - DNA, 25 bp, Homo sapien
cctccagtgccaagtattatgattt

SEQ ID NO: 1551452 - DNA, 25 bp, Homo sapien
gaagccttaggctatgggcccgagt

SEQ ID NO: 1551453 - DNA, 25 bp, Homo sapien
aaaatgtgataatgccttccgtcgg

SEQ ID NO: 1551454 - DNA, 25 bp, Homo sapien
tcagagagtccacagtagagcaaaa

SEQ ID NO: 1551455 - DNA, 25 bp, Homo sapien
taaggtacctgcctcatgaagagct

SEQ ID NO: 1551456 - DNA, 25 bp, Homo sapien
gatggcctaccacagttagagagag

SEQ ID NO: 1551457 - DNA, 25 bp, Homo sapien
gatgtcctgaagacgatgaaatgag

SEQ ID NO: 1551458 - DNA, 25 bp, Homo sapien
gaaaatgtcagagcacttggcaata

SEQ ID NO: 1551459 - DNA, 25 bp, Homo sapien
catctccagttagtgggtcctgata

SEQ ID NO: 1551460 - DNA, 25 bp, Homo sapien
gtctaatgaggccactcttactggt

SEQ ID NO: 1551461 - DNA, 25 bp, Homo sapien
cactcttactggttcgcagaagctg

SEQ ID NO: 1551462 - DNA, 25 bp, Homo sapien
ttactggttcgcagaagctgttgtc

SEQ ID NO: 1551463 - DNA, 25 bp, Homo sapien
gaggccactcttactggttcgcaga

SEQ ID NO: 1551464 - DNA, 25 bp, Homo sapien
taagggacacattctgtgggttctg

SEQ ID NO: 1551465 - DNA, 25 bp, Homo sapien
gaagagcagagagtactttcctaag

SEQ ID NO: 1551466 - DNA, 25 bp, Homo sapien
gatgactctgatcttgcccaaggac

SEQ ID NO: 1551467 - DNA, 25 bp, Homo sapien
gactcatgtcgtcgctgactttgaa

SEQ ID NO: 1551468 - DNA, 25 bp, Homo sapien
tcccgggcacttccgcggcaagagg

SEQ ID NO: 1551469 - DNA, 25 bp, Homo sapien
caagaggttgagagcgcggccttca

SEQ ID NO: 1551470 - DNA, 25 bp, Homo sapien
acttccgcggcaagaggttgagagc

SEQ ID NO: 1551471 - DNA, 25 bp, Homo sapien
aagaggttgagagcgcggccttcat

SEQ ID NO: 1551472 - DNA, 25 bp, Homo sapien
tatttgaggacgagaacacgaagcc

SEQ ID NO: 1551473 - DNA, 25 bp, Homo sapien
tgctcagtgggttcggtggtacttc

SEQ ID NO: 1551474 - DNA, 25 bp, Homo sapien
cggtggtacttcgactatttgagga

SEQ ID NO: 1551475 - DNA, 25 bp, Homo sapien
ttcgactatttgaggacgagaacac

SEQ ID NO: 1551476 - DNA, 25 bp, Homo sapien
agacgcagaacagctcaaaatatca

SEQ ID NO: 1551477 - DNA, 25 bp, Homo sapien
gtaactcccgcagccgtagctcccg

SEQ ID NO: 1551478 - DNA, 25 bp, Homo sapien
aagggtaactcccgcagccgtagct

SEQ ID NO: 1551479 - DNA, 25 bp, Homo sapien
gcgagacgcagaacagctcaaaata

SEQ ID NO: 1551480 - DNA, 25 bp, Homo sapien
tatcgctagctcgttgagggttccg

SEQ ID NO: 1551481 - DNA, 25 bp, Homo sapien
tgctttccgacggtgcttcctttcc

SEQ ID NO: 1551482 - DNA, 25 bp, Homo sapien
ctttcctctaaatctatcgctagct

SEQ ID NO: 1551483 - DNA, 25 bp, Homo sapien
gagggttccgagagtaggtccagga

SEQ ID NO: 1551484 - DNA, 25 bp, Homo sapien
tttttgctcccatatataattgtag

SEQ ID NO: 1551485 - DNA, 25 bp, Homo sapien
tatataattgtaggctgtttgaagc

SEQ ID NO: 1551486 - DNA, 25 bp, Homo sapien
caggtaccctaagttatcactctta

SEQ ID NO: 1551487 - DNA, 25 bp, Homo sapien
ttttgccaggtaccctaagttatca

SEQ ID NO: 1551488 - DNA, 25 bp, Homo sapien
agcagttcaagtgaaggtgaaatca

SEQ ID NO: 1551489 - DNA, 25 bp, Homo sapien
tgaagcagttcaagtgaaggtgaaa

SEQ ID NO: 1551490 - DNA, 25 bp, Homo sapien
tgaatgaagcagttcaagtgaaggt

SEQ ID NO: 1551491 - DNA, 25 bp, Homo sapien
aatgaagcagttcaagtgaaggtga

SEQ ID NO: 1551492 - DNA, 25 bp, Homo sapien
tccttctacttcagggaatttgcag

SEQ ID NO: 1551493 - DNA, 25 bp, Homo sapien
catttttccttctacttcagggaat

SEQ ID NO: 1551494 - DNA, 25 bp, Homo sapien
tctacttcagggaatttgcagagtc

SEQ ID NO: 1551495 - DNA, 25 bp, Homo sapien
tttccttctacttcagggaatttgc

SEQ ID NO: 1551496 - DNA, 25 bp, Homo sapien
tactgagagcaggttcctgaagttc

SEQ ID NO: 1551497 - DNA, 25 bp, Homo sapien
tgagagcaggttcctgaagttctct

SEQ ID NO: 1551498 - DNA, 25 bp, Homo sapien
catctcggtacagcttcctctgggc

SEQ ID NO: 1551499 - DNA, 25 bp, Homo sapien
gcaggttcctgaagttctctagcat

SEQ ID NO: 1551500 - DNA, 25 bp, Homo sapien
ctaagaagtggaaagtatcttggtg

SEQ ID NO: 1551501 - DNA, 25 bp, Homo sapien
tctctttggcttgttgtcttcatct

SEQ ID NO: 1551502 - DNA, 25 bp, Homo sapien
tgaattcccttctctttggcttgtt

SEQ ID NO: 1551503 - DNA, 25 bp, Homo sapien
aattcccttctctttggcttgttgt

SEQ ID NO: 1551504 - DNA, 25 bp, Homo sapien
tcccttctctttggcttgttgtctt

SEQ ID NO: 1551505 - DNA, 25 bp, Homo sapien
taagtgctgatctactatggaagcc

SEQ ID NO: 1551506 - DNA, 25 bp, Homo sapien
cggtaaggtttctgttgcacgtgac

SEQ ID NO: 1551507 - DNA, 25 bp, Homo sapien
caaaaatctcgcctacaaatgaagc

SEQ ID NO: 1551508 - DNA, 25 bp, Homo sapien
tctctgatgggaagatcgtcgtgaa

SEQ ID NO: 1551509 - DNA, 25 bp, Homo sapien
tggcttttctcccacatagacttac

SEQ ID NO: 1551510 - DNA, 25 bp, Homo sapien
tatatggcttttctcccacatagac

SEQ ID NO: 1551511 - DNA, 25 bp, Homo sapien
tatggcttttctcccacatagactt

SEQ ID NO: 1551512 - DNA, 25 bp, Homo sapien
ttatatggcttttctcccacataga

SEQ ID NO: 1551513 - DNA, 25 bp, Homo sapien
tgtggagaattgatgggtcagatga

SEQ ID NO: 1551514 - DNA, 25 bp, Homo sapien
ctgtggagaattgatgggtcagatg

SEQ ID NO: 1551515 - DNA, 25 bp, Homo sapien
tggagaattgatgggtcagatgagt

SEQ ID NO: 1551516 - DNA, 25 bp, Homo sapien
agaattgatgggtcagatgagttga

SEQ ID NO: 1551517 - DNA, 25 bp, Homo sapien
gatctatgtacaaagctcttcccac

SEQ ID NO: 1551518 - DNA, 25 bp, Homo sapien
tgatctatgtacaaagctcttccca

SEQ ID NO: 1551519 - DNA, 25 bp, Homo sapien
aaaaaaagatatgatctatgtacaa

SEQ ID NO: 1551520 - DNA, 25 bp, Homo sapien
aagatatgatctatgtacaaagctc

SEQ ID NO: 1551521 - DNA, 25 bp, Homo sapien
tgtttttaacagtcaagccactgac

SEQ ID NO: 1551522 - DNA, 25 bp, Homo sapien
ggaggtgtcaccagtgaaagctgca

SEQ ID NO: 1551523 - DNA, 25 bp, Homo sapien
ggcttacctaccttcaatcttgagg

SEQ ID NO: 1551524 - DNA, 25 bp, Homo sapien
cactgactgttagcaactgtagggc

SEQ ID NO: 1551525 - DNA, 25 bp, Homo sapien
ccaggttcagccttaggagggtgta

SEQ ID NO: 1551526 - DNA, 25 bp, Homo sapien
cacggcgtatcaatcggtcttggct

SEQ ID NO: 1551527 - DNA, 25 bp, Homo sapien
ggtcctctgctattgggtgcgtata

SEQ ID NO: 1551528 - DNA, 25 bp, Homo sapien
tgatgggtctcttaaacacggcgta

SEQ ID NO: 1551529 - DNA, 25 bp, Homo sapien
ttcacttgtctgacttgactggcca

SEQ ID NO: 1551530 - DNA, 25 bp, Homo sapien
gtctgacttgactggccagaacttc

SEQ ID NO: 1551531 - DNA, 25 bp, Homo sapien
tctctgcttgcctgtcgttggttta

SEQ ID NO: 1551532 - DNA, 25 bp, Homo sapien
ctctctgcttgcctgtcgttggttt

SEQ ID NO: 1551533 - DNA, 25 bp, Homo sapien
tgtccctatgtcctggatggtatca

SEQ ID NO: 1551534 - DNA, 25 bp, Homo sapien
ctgtccctatgtcctggatggtatc

SEQ ID NO: 1551535 - DNA, 25 bp, Homo sapien
cactttgagctgctgcaaatggctt

SEQ ID NO: 1551536 - DNA, 25 bp, Homo sapien
tagagacaggggttcgtttcgccat

SEQ ID NO: 1551537 - DNA, 25 bp, Homo sapien
tgccattgtgactgatgtgagacag

SEQ ID NO: 1551538 - DNA, 25 bp, Homo sapien
tacttttttataattgccattgtga

SEQ ID NO: 1551539 - DNA, 25 bp, Homo sapien
gtcaatgtaactacatctgccacat

SEQ ID NO: 1551540 - DNA, 25 bp, Homo sapien
acattagaaatgttactgtgggctg

SEQ ID NO: 1551541 - DNA, 25 bp, Homo sapien
tgagactgtctctattccttaaaaa

SEQ ID NO: 1551542 - DNA, 25 bp, Homo sapien
aactacatctgccacattagaaatg

SEQ ID NO: 1551543 - DNA, 25 bp, Homo sapien
cagcaaatactcattgccagggaaa

SEQ ID NO: 1551544 - DNA, 25 bp, Homo sapien
tcaatctgtatatccaggtgaccag

SEQ ID NO: 1551545 - DNA, 25 bp, Homo sapien
tatgaaggctacaataggatttccc

SEQ ID NO: 1551546 - DNA, 25 bp, Homo sapien
tagttatgaaggcagttgaccacac

SEQ ID NO: 1551547 - DNA, 25 bp, Homo sapien
tatctggtgatagtttaagaaaacc

SEQ ID NO: 1551548 - DNA, 25 bp, Homo sapien
caaatactcatgcagtctgtgagac

SEQ ID NO: 1551549 - DNA, 25 bp, Homo sapien
gaccaatttgaggacccagacacac

SEQ ID NO: 1551550 - DNA, 25 bp, Homo sapien
cacgagggtagatggaaggcctacc

SEQ ID NO: 1551551 - DNA, 25 bp, Homo sapien
gatggaacactaacccacgagagga

SEQ ID NO: 1551552 - DNA, 25 bp, Homo sapien
cactgtgggactggctaagcaactg

SEQ ID NO: 1551553 - DNA, 25 bp, Homo sapien
taactagggactgtagtctaggcat

SEQ ID NO: 1551554 - DNA, 25 bp, Homo sapien
catatggctataccccaggatggct

SEQ ID NO: 1551555 - DNA, 25 bp, Homo sapien
gagaaacttacatagcagctgggac

SEQ ID NO: 1551556 - DNA, 25 bp, Homo sapien
gaagggatagctcaataggcctaca

SEQ ID NO: 1551557 - DNA, 25 bp, Homo sapien
tacaatagccccagtggtccactag

SEQ ID NO: 1551558 - DNA, 25 bp, Homo sapien
tcaccaaggtgaaaggcccatgaat

SEQ ID NO: 1551559 - DNA, 25 bp, Homo sapien
tgccttgaaactagctaacaaaatg

SEQ ID NO: 1551560 - DNA, 25 bp, Homo sapien
gatacatcagaagagtacatcccag

SEQ ID NO: 1551561 - DNA, 25 bp, Homo sapien
cagtgctgcaatttatggacatttc

SEQ ID NO: 1551562 - DNA, 25 bp, Homo sapien
cccagaaagcaggattgaaaagtga

SEQ ID NO: 1551563 - DNA, 25 bp, Homo sapien
cctgcgcatcgaccgggcaattaga

SEQ ID NO: 1551564 - DNA, 25 bp, Homo sapien
ctactcgcgaaacgcctgcgggagc

SEQ ID NO: 1551565 - DNA, 25 bp, Homo sapien
caggcgtttcgctggtatcttggga

SEQ ID NO: 1551566 - DNA, 25 bp, Homo sapien
ggcaattagactcccgcaggcgttt

SEQ ID NO: 1551567 - DNA, 25 bp, Homo sapien
ggctcaaaccaccttgttaagtagc

SEQ ID NO: 1551568 - DNA, 25 bp, Homo sapien
tggctcaaaccaccttgttaagtag

SEQ ID NO: 1551569 - DNA, 25 bp, Homo sapien
ttggctcaaaccaccttgttaagta

SEQ ID NO: 1551570 - DNA, 25 bp, Homo sapien
gctcaaaccaccttgttaagtagca

SEQ ID NO: 1551571 - DNA, 25 bp, Homo sapien
ggttcactttcgcaaagacccgcaa

SEQ ID NO: 1551572 - DNA, 25 bp, Homo sapien
ctttcgcaaagacccgcaagacaca

SEQ ID NO: 1551573 - DNA, 25 bp, Homo sapien
cctaataactggttcactttcgcaa

SEQ ID NO: 1551574 - DNA, 25 bp, Homo sapien
taactggttcactttcgcaaagacc

SEQ ID NO: 1551575 - DNA, 25 bp, Homo sapien
ggaatcctgcctgaaacgtgccaca

SEQ ID NO: 1551576 - DNA, 25 bp, Homo sapien
tgaatgaaggaggaatcctgcctga

SEQ ID NO: 1551577 - DNA, 25 bp, Homo sapien
tttgcagactcctgggtgatgcagt

SEQ ID NO: 1551578 - DNA, 25 bp, Homo sapien
aatcctgcctgaaacgtgccacagt

SEQ ID NO: 1551579 - DNA, 25 bp, Homo sapien
aggaacctcattccgctgcgctgag

SEQ ID NO: 1551580 - DNA, 25 bp, Homo sapien
taatcagtatacttcagtgcctgga

SEQ ID NO: 1551581 - DNA, 25 bp, Homo sapien
tggttgcctgtgtacacctgagaag

SEQ ID NO: 1551582 - DNA, 25 bp, Homo sapien
caagaagtcacaccaagtagggaca

SEQ ID NO: 1551583 - DNA, 25 bp, Homo sapien
accaagagcaggttataagtattcc

SEQ ID NO: 1551584 - DNA, 25 bp, Homo sapien
tttgcttctctttatcatgaccaag

SEQ ID NO: 1551585 - DNA, 25 bp, Homo sapien
aagagcaggttataagtattcccac

SEQ ID NO: 1551586 - DNA, 25 bp, Homo sapien
gcaggttataagtattcccacagtc

SEQ ID NO: 1551587 - DNA, 25 bp, Homo sapien
atctcggtacagcttcctctgggca

SEQ ID NO: 1551588 - DNA, 25 bp, Homo sapien
ctgagagcaggttcctgaagttctc

SEQ ID NO: 1551589 - DNA, 25 bp, Homo sapien
tcacatctcggtacagcttcctctg

SEQ ID NO: 1551590 - DNA, 25 bp, Homo sapien
actgagagcaggttcctgaagttct

SEQ ID NO: 1551591 - DNA, 25 bp, Homo sapien
cactctaaggtacaaaaccactcct

SEQ ID NO: 1551592 - DNA, 25 bp, Homo sapien
agacacaaaagatgcccgtgctcac

SEQ ID NO: 1551593 - DNA, 25 bp, Homo sapien
ctctaaggtacaaaaccactcctga

SEQ ID NO: 1551594 - DNA, 25 bp, Homo sapien
cagacacaaaagatgcccgtgctca

SEQ ID NO: 1551595 - DNA, 25 bp, Homo sapien
ttcttcccttaggaagtggcaagta

SEQ ID NO: 1551596 - DNA, 25 bp, Homo sapien
tggcaagtatcttggtggaacggtt

SEQ ID NO: 1551597 - DNA, 25 bp, Homo sapien
ttaggaagtggcaagtatcttggtg

SEQ ID NO: 1551598 - DNA, 25 bp, Homo sapien
gtatcttggtggaacggttgatgcc

SEQ ID NO: 1551599 - DNA, 25 bp, Homo sapien
cctgagacctggttaagtcttttgc

SEQ ID NO: 1551600 - DNA, 25 bp, Homo sapien
tgtatgaattgtgggtagtcctgct

SEQ ID NO: 1551601 - DNA, 25 bp, Homo sapien
tcaccattttcaaagaactgagagt

SEQ ID NO: 1551602 - DNA, 25 bp, Homo sapien
gagagttatttatgatagagtcctg

SEQ ID NO: 1551603 - DNA, 25 bp, Homo sapien
cctgtgtgtaatttacgatgaacat

SEQ ID NO: 1551604 - DNA, 25 bp, Homo sapien
ctcctgtgtgtaatttacgatgaac

SEQ ID NO: 1551605 - DNA, 25 bp, Homo sapien
tcctgtgtgtaatttacgatgaaca

SEQ ID NO: 1551606 - DNA, 25 bp, Homo sapien
ggattctcttatgttccttaagctg

SEQ ID NO: 1551607 - DNA, 25 bp, Homo sapien
tatgttccttaagctgggaatcatg

SEQ ID NO: 1551608 - DNA, 25 bp, Homo sapien
tctcttatgttccttaagctgggaa

SEQ ID NO: 1551609 - DNA, 25 bp, Homo sapien
gttccttaagctgggaatcatgaat

SEQ ID NO: 1551610 - DNA, 25 bp, Homo sapien
gatgcttataaaaatctagcctacc

SEQ ID NO: 1551611 - DNA, 25 bp, Homo sapien
aatggctcttaagtcttgacctaaa

SEQ ID NO: 1551612 - DNA, 25 bp, Homo sapien
acttagtaacatagcccttcccaca

SEQ ID NO: 1551613 - DNA, 25 bp, Homo sapien
catgtatcacacctaaatggttttt

SEQ ID NO: 1551614 - DNA, 25 bp, Homo sapien
ttccccactatagtctctcggctgg

SEQ ID NO: 1551615 - DNA, 25 bp, Homo sapien
tttacggtatgtcctgtgtacaagc

SEQ ID NO: 1551616 - DNA, 25 bp, Homo sapien
tagtctctcggctggtctttacggt

SEQ ID NO: 1551617 - DNA, 25 bp, Homo sapien
ctcggctggtctttacggtatgtcc

SEQ ID NO: 1551618 - DNA, 25 bp, Homo sapien
tatatccagattcaagcgcctcttg

SEQ ID NO: 1551619 - DNA, 25 bp, Homo sapien
atccagattcaagcgcctcttgtag

SEQ ID NO: 1551620 - DNA, 25 bp, Homo sapien
atatccagattcaagcgcctcttgt

SEQ ID NO: 1551621 - DNA, 25 bp, Homo sapien
tatccagattcaagcgcctcttgta

SEQ ID NO: 1551622 - DNA, 25 bp, Homo sapien
gaaagtgccaacctgaacctactga

SEQ ID NO: 1551623 - DNA, 25 bp, Homo sapien
gaaggaatgcacttagcctgcgggc

SEQ ID NO: 1551624 - DNA, 25 bp, Homo sapien
gatgagacactgacccgtttggctg

SEQ ID NO: 1551625 - DNA, 25 bp, Homo sapien
taagggctattcagcttggcccggg

SEQ ID NO: 1551626 - DNA, 25 bp, Homo sapien
attctgtgataaattacaagataca

SEQ ID NO: 1551627 - DNA, 25 bp, Homo sapien
gctgaaacaggctttaacttaaatg

SEQ ID NO: 1551628 - DNA, 25 bp, Homo sapien
gagctatggctgaaacaggctttaa

SEQ ID NO: 1551629 - DNA, 25 bp, Homo sapien
ctgagctatggctgaaacaggcttt

SEQ ID NO: 1551630 - DNA, 25 bp, Homo sapien
tatggctgaaacaggctttaactta

SEQ ID NO: 1551631 - DNA, 25 bp, Homo sapien
tgcatttcaactcaggtgtccctga

SEQ ID NO: 1551632 - DNA, 25 bp, Homo sapien
aacttttgtttgaagccctactgca

SEQ ID NO: 1551633 - DNA, 25 bp, Homo sapien
taagaatgcaacttcggaatagagg

SEQ ID NO: 1551634 - DNA, 25 bp, Homo sapien
aatgcatgaatgaactcttaaggtc

SEQ ID NO: 1551635 - DNA, 25 bp, Homo sapien
gatgttttattgaatttattacaac

SEQ ID NO: 1551636 - DNA, 25 bp, Homo sapien
atgttttattgaatttattacaacg

SEQ ID NO: 1551637 - DNA, 25 bp, Homo sapien
taagatgttttattgaatttattac

SEQ ID NO: 1551638 - DNA, 25 bp, Homo sapien
gaatttattaagatgttttattgaa

SEQ ID NO: 1551639 - DNA, 25 bp, Homo sapien
ggaagtgctcgcgtctccacagagc

SEQ ID NO: 1551640 - DNA, 25 bp, Homo sapien
gaattccccggttcaactgcttgag

SEQ ID NO: 1551641 - DNA, 25 bp, Homo sapien
ctgcttgagccaaagggtccgccat

SEQ ID NO: 1551642 - DNA, 25 bp, Homo sapien
gggtccgccattccatgaagttgat

SEQ ID NO: 1551643 - DNA, 25 bp, Homo sapien
aggacccgccagacgcagaaatggc

SEQ ID NO: 1551644 - DNA, 25 bp, Homo sapien
cggttatgtagcaaccgcaggctca

SEQ ID NO: 1551645 - DNA, 25 bp, Homo sapien
cccaagcgaaggtgacaagttcaga

SEQ ID NO: 1551646 - DNA, 25 bp, Homo sapien
cagaaatggctcaaactacgcggtt

SEQ ID NO: 1551647 - DNA, 25 bp, Homo sapien
gctctccgccaaggcttcttttccc

SEQ ID NO: 1551648 - DNA, 25 bp, Homo sapien
ttttcccttgcttggatcatcgatc

SEQ ID NO: 1551649 - DNA, 25 bp, Homo sapien
tcttttcccttgcttggatcatcga

SEQ ID NO: 1551650 - DNA, 25 bp, Homo sapien
ttcccttgcttggatcatcgatcat

SEQ ID NO: 1551651 - DNA, 25 bp, Homo sapien
tcccagaaagcttccgtggacggga

SEQ ID NO: 1551652 - DNA, 25 bp, Homo sapien
ccacgtcacactgcgagaaagcggt

SEQ ID NO: 1551653 - DNA, 25 bp, Homo sapien
gctgagcgaggtcaaagtcctggaa

SEQ ID NO: 1551654 - DNA, 25 bp, Homo sapien
taaggacattgagtaacactccacg

SEQ ID NO: 1551655 - DNA, 25 bp, Homo sapien
ctgcatcgcggtcccccataaaagt

SEQ ID NO: 1551656 - DNA, 25 bp, Homo sapien
ccgcccttcgtggaagcggacgcaa

SEQ ID NO: 1551657 - DNA, 25 bp, Homo sapien
gctccccgcccttcgtggaagcgga

SEQ ID NO: 1551658 - DNA, 25 bp, Homo sapien
cgtggaagcggacgcaactcgcttt

SEQ ID NO: 1551659 - DNA, 25 bp, Homo sapien
ttatcaacacccattcccgaggaca

SEQ ID NO: 1551660 - DNA, 25 bp, Homo sapien
tgctttccctacgagtccagctagt

SEQ ID NO: 1551661 - DNA, 25 bp, Homo sapien
gaggacacactctcggttgggtgaa

SEQ ID NO: 1551662 - DNA, 25 bp, Homo sapien
tccaagaggtgatcaactcaggctc

SEQ ID NO: 1551663 - DNA, 25 bp, Homo sapien
gctacaacatgcacaaaccttggaa

SEQ ID NO: 1551664 - DNA, 25 bp, Homo sapien
ctctgggtaaatggatagaaaaatc

SEQ ID NO: 1551665 - DNA, 25 bp, Homo sapien
tgtattatgaatgatcacagcagca

SEQ ID NO: 1551666 - DNA, 25 bp, Homo sapien
gcagcattattcatactaaccccaa

SEQ ID NO: 1551667 - DNA, 25 bp, Homo sapien
gtcttgagtaatggagcacaaagga

SEQ ID NO: 1551668 - DNA, 25 bp, Homo sapien
cagtgtcttgagtaatggagcacaa

SEQ ID NO: 1551669 - DNA, 25 bp, Homo sapien
tcagtgtcttgagtaatggagcaca

SEQ ID NO: 1551670 - DNA, 25 bp, Homo sapien
gtgtcttgagtaatggagcacaaag

SEQ ID NO: 1551671 - DNA, 25 bp, Homo sapien
ttcaaatggtgcatcctgggctaca

SEQ ID NO: 1551672 - DNA, 25 bp, Homo sapien
gatttcaaatggtgcatcctgggct

SEQ ID NO: 1551673 - DNA, 25 bp, Homo sapien
aggatttcaaatggtgcatcctggg

SEQ ID NO: 1551674 - DNA, 25 bp, Homo sapien
tttcaaatggtgcatcctgggctac

SEQ ID NO: 1551675 - DNA, 25 bp, Homo sapien
gtgaagttctcaagcatcacgtctt

SEQ ID NO: 1551676 - DNA, 25 bp, Homo sapien
tgctgtctccatcatccaaaacttt

SEQ ID NO: 1551677 - DNA, 25 bp, Homo sapien
cttaggaagtggaaagggtggaatg

SEQ ID NO: 1551678 - DNA, 25 bp, Homo sapien
ttgggttgctgtctccatcatccaa

SEQ ID NO: 1551679 - DNA, 25 bp, Homo sapien
tggaaagggtggaatggttgatgcc

SEQ ID NO: 1551680 - DNA, 25 bp, Homo sapien
cctgcttccgcaatagtcttgccgc

SEQ ID NO: 1551681 - DNA, 25 bp, Homo sapien
gagactgggttaagtcacttgcagt

SEQ ID NO: 1551682 - DNA, 25 bp, Homo sapien
ccagatttgctggcaagggcagtct

SEQ ID NO: 1551683 - DNA, 25 bp, Homo sapien
gaagtgagaattatttatgatggag

SEQ ID NO: 1551684 - DNA, 25 bp, Homo sapien
ctgtatgaattatagatagtcctgc

SEQ ID NO: 1551685 - DNA, 25 bp, Homo sapien
atgaattatagatagtcctgcctca

SEQ ID NO: 1551686 - DNA, 25 bp, Homo sapien
ctgcctcaacctgggaggggacatc

SEQ ID NO: 1551687 - DNA, 25 bp, Homo sapien
tatagatagtcctgcctcaacctgg

SEQ ID NO: 1551688 - DNA, 25 bp, Homo sapien
ttgaagtatcgctctacatctgaag

SEQ ID NO: 1551689 - DNA, 25 bp, Homo sapien
tgcaaatctaggctatcagtgaagc

SEQ ID NO: 1551690 - DNA, 25 bp, Homo sapien
ggactctctcacgagtttgcagaca

SEQ ID NO: 1551691 - DNA, 25 bp, Homo sapien
taccacgcatgtcacacttagagag

SEQ ID NO: 1551692 - DNA, 25 bp, Homo sapien
gaccctctggtgcaagttaagacct

SEQ ID NO: 1551693 - DNA, 25 bp, Homo sapien
tggtctttacagaaagaccggtgta

SEQ ID NO: 1551694 - DNA, 25 bp, Homo sapien
cagtatggaccctctggtgcaagtt

SEQ ID NO: 1551695 - DNA, 25 bp, Homo sapien
cagaaagaccggtgtacaagcctct

SEQ ID NO: 1551696 - DNA, 25 bp, Homo sapien
tgataaaattatatccagattcaag

SEQ ID NO: 1551697 - DNA, 25 bp, Homo sapien
tatatccagattcaagcgcctcttg

SEQ ID NO: 1551698 - DNA, 25 bp, Homo sapien
cttgtagcgcttcccacagtcctca

SEQ ID NO: 1551699 - DNA, 25 bp, Homo sapien
gattcaagcgcctcttgtagcgctt

SEQ ID NO: 1551700 - DNA, 25 bp, Homo sapien
taaggtaatacactaattacatcaa

SEQ ID NO: 1551701 - DNA, 25 bp, Homo sapien
catcaatttgatcattacgtattat

SEQ ID NO: 1551702 - DNA, 25 bp, Homo sapien
tttcataccatatcccatatatatg

SEQ ID NO: 1551703 - DNA, 25 bp, Homo sapien
ttttcaaatcgctagaacaatggat

SEQ ID NO: 1551704 - DNA, 25 bp, Homo sapien
gctcttgtgtcaagcctctgaggca

SEQ ID NO: 1551705 - DNA, 25 bp, Homo sapien
taagttctgtttgcaaccctactgc

SEQ ID NO: 1551706 - DNA, 25 bp, Homo sapien
gagttctctactacgatggtcctag

SEQ ID NO: 1551707 - DNA, 25 bp, Homo sapien
tcctgaatgacaagcgtaagttctg

SEQ ID NO: 1551708 - DNA, 25 bp, Homo sapien
caaattggcatagcttctacctgag

SEQ ID NO: 1551709 - DNA, 25 bp, Homo sapien
gagattctgagtcctggtaggtaag

SEQ ID NO: 1551710 - DNA, 25 bp, Homo sapien
aatgtcactcctaccccaatcatgg

SEQ ID NO: 1551711 - DNA, 25 bp, Homo sapien
cattgccagaggaaagaatagttgt

SEQ ID NO: 1551712 - DNA, 25 bp, Homo sapien
cagagcaatctcattagaatctagc

SEQ ID NO: 1551713 - DNA, 25 bp, Homo sapien
tttcaactgataagagacatttacc

SEQ ID NO: 1551714 - DNA, 25 bp, Homo sapien
tattcagtgcacaagagtactacag

SEQ ID NO: 1551715 - DNA, 25 bp, Homo sapien
ccaggcctttagataactctttgaa

SEQ ID NO: 1551716 - DNA, 25 bp, Homo sapien
cgcaagatgtggaaatgactcaaac

SEQ ID NO: 1551717 - DNA, 25 bp, Homo sapien
gcttcttttctcctgaatcgatcat

SEQ ID NO: 1551718 - DNA, 25 bp, Homo sapien
aaggagactcgttcggaaggactcg

SEQ ID NO: 1551719 - DNA, 25 bp, Homo sapien
cctgaatcgatcattgggtggttgc

SEQ ID NO: 1551720 - DNA, 25 bp, Homo sapien
tctttcaggtcccaaaatgaatcca

SEQ ID NO: 1551721 - DNA, 25 bp, Homo sapien
caaacaaacgaaccagcaatggaag

SEQ ID NO: 1551722 - DNA, 25 bp, Homo sapien
cattaggatggtccgaaaagtcccg

SEQ ID NO: 1551723 - DNA, 25 bp, Homo sapien
gataaacggacattaagtgacactc

SEQ ID NO: 1551724 - DNA, 25 bp, Homo sapien
gtagccaagaagtcccttcctgcag

SEQ ID NO: 1551725 - DNA, 25 bp, Homo sapien
cagtagccaagaagtcccttcctgc

SEQ ID NO: 1551726 - DNA, 25 bp, Homo sapien
ctgcagctcttttagaaaggtcggg

SEQ ID NO: 1551727 - DNA, 25 bp, Homo sapien
ttcctgcagctcttttagaaaggtc

SEQ ID NO: 1551728 - DNA, 25 bp, Homo sapien
catctcggtacagcttcctctgggc

SEQ ID NO: 1551729 - DNA, 25 bp, Homo sapien
tcctcagtgaagatcacagccacat

SEQ ID NO: 1551730 - DNA, 25 bp, Homo sapien
tgagagcaggttcctgaagttctca

SEQ ID NO: 1551731 - DNA, 25 bp, Homo sapien
gcaggttcctgaagttctcaagcat

SEQ ID NO: 1551732 - DNA, 25 bp, Homo sapien
gcttgttgtccccatcacccaaaac

SEQ ID NO: 1551733 - DNA, 25 bp, Homo sapien
ccttaggaagtggaaagtatctcca

SEQ ID NO: 1551734 - DNA, 25 bp, Homo sapien
agtatctccatggaatggttgatgc

SEQ ID NO: 1551735 - DNA, 25 bp, Homo sapien
ttcccttctctttggcttgttgtcc

SEQ ID NO: 1551736 - DNA, 25 bp, Homo sapien
ctgagaggtaatctctaggatcttg

SEQ ID NO: 1551737 - DNA, 25 bp, Homo sapien
gaaagaggtcaggacgttgtcgtca

SEQ ID NO: 1551738 - DNA, 25 bp, Homo sapien
ctctttgcttgagggtaaaacctgg

SEQ ID NO: 1551739 - DNA, 25 bp, Homo sapien
aagtgtcatgcctgaggagagtctc

SEQ ID NO: 1551740 - DNA, 25 bp, Homo sapien
cctattaagacttgacctaagacag

SEQ ID NO: 1551741 - DNA, 25 bp, Homo sapien
gactcgttgatggaccaaaagatat

SEQ ID NO: 1551742 - DNA, 25 bp, Homo sapien
tgtgtgaactgtagatagtcttgct

SEQ ID NO: 1551743 - DNA, 25 bp, Homo sapien
ggtggtatcttgagacctggttaag

SEQ ID NO: 1551744 - DNA, 25 bp, Homo sapien
gcagtggagtttcttatgattcaaa

SEQ ID NO: 1551745 - DNA, 25 bp, Homo sapien
cagtggagtttcttatgattcaaaa

SEQ ID NO: 1551746 - DNA, 25 bp, Homo sapien
tgataaaattatatccagattcaag

SEQ ID NO: 1551747 - DNA, 25 bp, Homo sapien
tatatccagattcaagcgcctcttg

SEQ ID NO: 1551748 - DNA, 25 bp, Homo sapien
cttgtagcgcttcccacagtcctca

SEQ ID NO: 1551749 - DNA, 25 bp, Homo sapien
gattcaagcgcctcttgtagcgctt

SEQ ID NO: 1551750 - DNA, 25 bp, Homo sapien
ctgatttaatcagcacacattatat

SEQ ID NO: 1551751 - DNA, 25 bp, Homo sapien
cagaaatggctcaaactaccccggt

SEQ ID NO: 1551752 - DNA, 25 bp, Homo sapien
tcagactaggagaccggaagtgtcc

SEQ ID NO: 1551753 - DNA, 25 bp, Homo sapien
tcgggtggttgcgagcctcaagcaa

SEQ ID NO: 1551754 - DNA, 25 bp, Homo sapien
gttcaaaatgtcctgcaagacgcag

SEQ ID NO: 1551755 - DNA, 25 bp, Homo sapien
gagtcctgaatgacacagttccagg

SEQ ID NO: 1551756 - DNA, 25 bp, Homo sapien
tcctcctactttagggaatttgcag

SEQ ID NO: 1551757 - DNA, 25 bp, Homo sapien
gcagagtcctgaatgacacagttcc

SEQ ID NO: 1551758 - DNA, 25 bp, Homo sapien
gggaatttgcagagtcctgaatgac

SEQ ID NO: 1551759 - DNA, 25 bp, Homo sapien
cttgggtacttggaacaatgagtac

SEQ ID NO: 1551760 - DNA, 25 bp, Homo sapien
gtccttgggtacttggaacaatgag

SEQ ID NO: 1551761 - DNA, 25 bp, Homo sapien
tgggtacttggaacaatgagtacac

SEQ ID NO: 1551762 - DNA, 25 bp, Homo sapien
aatgtgtgaggtatcttgtgccata

SEQ ID NO: 1551763 - DNA, 25 bp, Homo sapien
gtattttgaaaagtctacggcacag

SEQ ID NO: 1551764 - DNA, 25 bp, Homo sapien
catttagtgtcctgatcagaagcca

SEQ ID NO: 1551765 - DNA, 25 bp, Homo sapien
ttcagggttccatagtattccaggg

SEQ ID NO: 1551766 - DNA, 25 bp, Homo sapien
tcagaagccagaatgcctcagtgca

SEQ ID NO: 1551767 - DNA, 25 bp, Homo sapien
tcagaagtccaacgacaaagaagtc

SEQ ID NO: 1551768 - DNA, 25 bp, Homo sapien
ttcagtcagtatctgcccgacctgg

SEQ ID NO: 1551769 - DNA, 25 bp, Homo sapien
ttgtcccaagcgtcatcagaagtcc

SEQ ID NO: 1551770 - DNA, 25 bp, Homo sapien
tagtcccagcgacagtgagcaattc

SEQ ID NO: 1551771 - DNA, 25 bp, Homo sapien
tcacatctcgatacagcttcctctg

SEQ ID NO: 1551772 - DNA, 25 bp, Homo sapien
ctgacagcaggttcctgaagttctc

SEQ ID NO: 1551773 - DNA, 25 bp, Homo sapien
tcgatacagcttcctctgggcaagg

SEQ ID NO: 1551774 - DNA, 25 bp, Homo sapien
ccactgacagcaggttcctgaagtt

SEQ ID NO: 1551775 - DNA, 25 bp, Homo sapien
tcccttccctttgggttgctatatc

SEQ ID NO: 1551776 - DNA, 25 bp, Homo sapien
ttccctttgggttgctatatccatc

SEQ ID NO: 1551777 - DNA, 25 bp, Homo sapien
cttccctttgggttgctatatccat

SEQ ID NO: 1551778 - DNA, 25 bp, Homo sapien
ccttccctttgggttgctatatcca

SEQ ID NO: 1551779 - DNA, 25 bp, Homo sapien
ggctgcagatgggtaaatctctcaa

SEQ ID NO: 1551780 - DNA, 25 bp, Homo sapien
tggaaagctccagggtaggtcccag

SEQ ID NO: 1551781 - DNA, 25 bp, Homo sapien
gaaggcatattactcagtgtggtca

SEQ ID NO: 1551782 - DNA, 25 bp, Homo sapien
taaatatgctccctatggaaagctc

SEQ ID NO: 1551783 - DNA, 25 bp, Homo sapien
agagaggagcgaccagccaattcca

SEQ ID NO: 1551784 - DNA, 25 bp, Homo sapien
gcattcatttgctccggttcctgca

SEQ ID NO: 1551785 - DNA, 25 bp, Homo sapien
gcgtgcataacagagcctgctctcg

SEQ ID NO: 1551786 - DNA, 25 bp, Homo sapien
catgggttgtaacatgcttggacac

SEQ ID NO: 1551787 - DNA, 25 bp, Homo sapien
ggtagagtcttgaggcctggttaaa

SEQ ID NO: 1551788 - DNA, 25 bp, Homo sapien
tcaaagatggacatatcactgaagg

SEQ ID NO: 1551789 - DNA, 25 bp, Homo sapien
gagacttctctgctgagcgtatttg

SEQ ID NO: 1551790 - DNA, 25 bp, Homo sapien
tcaccctgttcaaagaactgagagc

SEQ ID NO: 1551791 - DNA, 25 bp, Homo sapien
tccagcctacgaatgaagccttttc

SEQ ID NO: 1551792 - DNA, 25 bp, Homo sapien
cactacatatctcacatttgaatgg

SEQ ID NO: 1551793 - DNA, 25 bp, Homo sapien
gtggatcgtctgatgcttacacaaa

SEQ ID NO: 1551794 - DNA, 25 bp, Homo sapien
gacttgacctaagacggaagctcac

SEQ ID NO: 1551795 - DNA, 25 bp, Homo sapien
tggtttttttcggcaatggagtctc

SEQ ID NO: 1551796 - DNA, 25 bp, Homo sapien
ctgtgtgggctctatggtgcaagtc

SEQ ID NO: 1551797 - DNA, 25 bp, Homo sapien
ggtatgaccggtatacaagcttctt

SEQ ID NO: 1551798 - DNA, 25 bp, Homo sapien
agtcttcacatttggatggattttc

SEQ ID NO: 1551799 - DNA, 25 bp, Homo sapien
tggatggattttctccactgtggtt

SEQ ID NO: 1551800 - DNA, 25 bp, Homo sapien
tcacatttggatggattttctccac

SEQ ID NO: 1551801 - DNA, 25 bp, Homo sapien
tttggatggattttctccactgtgg

SEQ ID NO: 1551802 - DNA, 25 bp, Homo sapien
ttcaagcgcctcttgtagcgcttcc

SEQ ID NO: 1551803 - DNA, 25 bp, Homo sapien
tatcaagattcaagcgcctcttgta

SEQ ID NO: 1551804 - DNA, 25 bp, Homo sapien
agattcaagcgcctcttgtagcgct

SEQ ID NO: 1551805 - DNA, 25 bp, Homo sapien
atcaagattcaagcgcctcttgtag

SEQ ID NO: 1551806 - DNA, 25 bp, Homo sapien
taattgaggtgataaatgtgctaat

SEQ ID NO: 1551807 - DNA, 25 bp, Homo sapien
aattgaggtgataaatgtgctaatt

SEQ ID NO: 1551808 - DNA, 25 bp, Homo sapien
aggtgataaatgtgctaattacact

SEQ ID NO: 1551809 - DNA, 25 bp, Homo sapien
aaaaaagagataattgaggtgataa

SEQ ID NO: 1551810 - DNA, 25 bp, Homo sapien
tgagctatggctgaaacactaactt

SEQ ID NO: 1551811 - DNA, 25 bp, Homo sapien
actaccataggtcagtgcagcctca

SEQ ID NO: 1551812 - DNA, 25 bp, Homo sapien
cacagagagatgcttgtctagaaac

SEQ ID NO: 1551813 - DNA, 25 bp, Homo sapien
tcttagaagtagtgagaacagtggc

SEQ ID NO: 1551814 - DNA, 25 bp, Homo sapien
ggaatcctcgcacattgttggtggg

SEQ ID NO: 1551815 - DNA, 25 bp, Homo sapien
gcaccctcccctgcaatgtttattg

SEQ ID NO: 1551816 - DNA, 25 bp, Homo sapien
tgcttgtggtaacagataccccatt

SEQ ID NO: 1551817 - DNA, 25 bp, Homo sapien
ggtacaaaactatgcttagatagaa

SEQ ID NO: 1551818 - DNA, 25 bp, Homo sapien
atagatcatcagataaatacaaatc

SEQ ID NO: 1551819 - DNA, 25 bp, Homo sapien
tgctcgtcattcaacagatctcctg

SEQ ID NO: 1551820 - DNA, 25 bp, Homo sapien
gatctcctgcgctacacttccttga

SEQ ID NO: 1551821 - DNA, 25 bp, Homo sapien
agaattccccggatacgccgtcctg

SEQ ID NO: 1551822 - DNA, 25 bp, Homo sapien
cccgcgcagcgtgtgaactacattt

SEQ ID NO: 1551823 - DNA, 25 bp, Homo sapien
ttccaggtggttgcgagccagcatc

SEQ ID NO: 1551824 - DNA, 25 bp, Homo sapien
gagactccttctccccttagtcaac

SEQ ID NO: 1551825 - DNA, 25 bp, Homo sapien
ccagcatcgtaaggggacacgttta

SEQ ID NO: 1551826 - DNA, 25 bp, Homo sapien
tagaaggaccgacaagacacaggac

SEQ ID NO: 1551827 - DNA, 25 bp, Homo sapien
taaagaacagcagtgggaggtacag

SEQ ID NO: 1551828 - DNA, 25 bp, Homo sapien
accaagaaggctccgctgacaagaa

SEQ ID NO: 1551829 - DNA, 25 bp, Homo sapien
ctgacaagaacgaaaagagaggccg

SEQ ID NO: 1551830 - DNA, 25 bp, Homo sapien
cctgacaggcttcgtgggaaataaa

SEQ ID NO: 1551831 - DNA, 25 bp, Homo sapien
tctcagttatgcagttcaagagaag

SEQ ID NO: 1551832 - DNA, 25 bp, Homo sapien
gagttctcagttatgcagttcaaga

SEQ ID NO: 1551833 - DNA, 25 bp, Homo sapien
aatttgcagagttctcagttatgca

SEQ ID NO: 1551834 - DNA, 25 bp, Homo sapien
tgcagagttctcagttatgcagttc

SEQ ID NO: 1551835 - DNA, 25 bp, Homo sapien
gcatgacatctcgatacagcttcct

SEQ ID NO: 1551836 - DNA, 25 bp, Homo sapien
catctcgatacagcttcctctggga

SEQ ID NO: 1551837 - DNA, 25 bp, Homo sapien
tctgggaaacgtccagcagccccag

SEQ ID NO: 1551838 - DNA, 25 bp, Homo sapien
tgatagcaggtttctgaagttctcc

SEQ ID NO: 1551839 - DNA, 25 bp, Homo sapien
aagtatctcggtgggaaagttgatg

SEQ ID NO: 1551840 - DNA, 25 bp, Homo sapien
aaagtatctcggtgggaaagttgat

SEQ ID NO: 1551841 - DNA, 25 bp, Homo sapien
agtgaaaagtatctcggtgggaaag

SEQ ID NO: 1551842 - DNA, 25 bp, Homo sapien
ctccaactcagtttggatcttgcct

SEQ ID NO: 1551843 - DNA, 25 bp, Homo sapien
actccaactcagtttggatcttgcc

SEQ ID NO: 1551844 - DNA, 25 bp, Homo sapien
tccaactcagtttggatcttgcctc

SEQ ID NO: 1551845 - DNA, 25 bp, Homo sapien
gactccaactcagtttggatcttgc

SEQ ID NO: 1551846 - DNA, 25 bp, Homo sapien
cttatggagtcttgaggtctagtta

SEQ ID NO: 1551847 - DNA, 25 bp, Homo sapien
aactgagagctacttatggagtctt

SEQ ID NO: 1551848 - DNA, 25 bp, Homo sapien
gggacatcaccttgtgtggagaact

SEQ ID NO: 1551849 - DNA, 25 bp, Homo sapien
aattatagatagtcctgcgtcaacc

SEQ ID NO: 1551850 - DNA, 25 bp, Homo sapien
catgtatgggatatctttcctgagt

SEQ ID NO: 1551851 - DNA, 25 bp, Homo sapien
cctgtactcattacatgtatgggat

SEQ ID NO: 1551852 - DNA, 25 bp, Homo sapien
cattacatgtatgggatatctttcc

SEQ ID NO: 1551853 - DNA, 25 bp, Homo sapien
tgagctataacagaatctcttcctg

SEQ ID NO: 1551854 - DNA, 25 bp, Homo sapien
ggattctttgatgttcccgaagctg

SEQ ID NO: 1551855 - DNA, 25 bp, Homo sapien
ttcctcacaaatatgaggtttttct

SEQ ID NO: 1551856 - DNA, 25 bp, Homo sapien
gatgttcccgaagctgggaattgtg

SEQ ID NO: 1551857 - DNA, 25 bp, Homo sapien
catacattcctgatctacggctgaa

SEQ ID NO: 1551858 - DNA, 25 bp, Homo sapien
tcttgcctacaagtgaagctccttc

SEQ ID NO: 1551859 - DNA, 25 bp, Homo sapien
tgtggacccgctgatgtcttgaaag

SEQ ID NO: 1551860 - DNA, 25 bp, Homo sapien
tcttgaaagacatgaggaccacctg

SEQ ID NO: 1551861 - DNA, 25 bp, Homo sapien
tctctgatgtgaatggccctgtgaa

SEQ ID NO: 1551862 - DNA, 25 bp, Homo sapien
tataaggtctctctcccgtgtggac

SEQ ID NO: 1551863 - DNA, 25 bp, Homo sapien
aaggtctctctcccgtgtggaccct

SEQ ID NO: 1551864 - DNA, 25 bp, Homo sapien
aattataaggtctctctcccgtgtg

SEQ ID NO: 1551865 - DNA, 25 bp, Homo sapien
ttataaggtctctctcccgtgtgga

SEQ ID NO: 1551866 - DNA, 25 bp, Homo sapien
ctcttatgtctcaaaatacctgagg

SEQ ID NO: 1551867 - DNA, 25 bp, Homo sapien
tgatggaaacgaagttttgaattct

SEQ ID NO: 1551868 - DNA, 25 bp, Homo sapien
ttgatggaaacgaagttttgaattc

SEQ ID NO: 1551869 - DNA, 25 bp, Homo sapien
gagtctcttatgtctcaaaatacct

SEQ ID NO: 1551870 - DNA, 25 bp, Homo sapien
atgggttagatgagttgaggcccat

SEQ ID NO: 1551871 - DNA, 25 bp, Homo sapien
gatgggttagatgagttgaggccca

SEQ ID NO: 1551872 - DNA, 25 bp, Homo sapien
tgatgggttagatgagttgaggccc

SEQ ID NO: 1551873 - DNA, 25 bp, Homo sapien
tcacattggaatagtttttctctgc

SEQ ID NO: 1551874 - DNA, 25 bp, Homo sapien
ttttctccactgtggtcgctttgtt

SEQ ID NO: 1551875 - DNA, 25 bp, Homo sapien
tgtggtcgctttgttggtcttgaag

SEQ ID NO: 1551876 - DNA, 25 bp, Homo sapien
tcttgaaggcatgaactgtgctcac

SEQ ID NO: 1551877 - DNA, 25 bp, Homo sapien
ctctcgtagcgcttcccacagtcct

SEQ ID NO: 1551878 - DNA, 25 bp, Homo sapien
tcaagcgcctctcgtagcgcttccc

SEQ ID NO: 1551879 - DNA, 25 bp, Homo sapien
gcgcctctcgtagcgcttcccacag

SEQ ID NO: 1551880 - DNA, 25 bp, Homo sapien
ctcgtagcgcttcccacagtcctca

SEQ ID NO: 1551881 - DNA, 25 bp, Homo sapien
tcagagtttatagtggtacaaccag

SEQ ID NO: 1551882 - DNA, 25 bp, Homo sapien
tcatagaagcagcatagcattggct

SEQ ID NO: 1551883 - DNA, 25 bp, Homo sapien
caatagctaacatatggaaccaatc

SEQ ID NO: 1551884 - DNA, 25 bp, Homo sapien
tcagcattcaagtgatccagcaatc

SEQ ID NO: 1551885 - DNA, 25 bp, Homo sapien
ttcgaggctatagggcactgtaact

SEQ ID NO: 1551886 - DNA, 25 bp, Homo sapien
actgtaactgcatctgtgaataagc

SEQ ID NO: 1551887 - DNA, 25 bp, Homo sapien
aaatgctgtgcgcatggctcaggcc

SEQ ID NO: 1551888 - DNA, 25 bp, Homo sapien
ccaagtttgtggaaacagtgtacta

SEQ ID NO: 1551889 - DNA, 25 bp, Homo sapien
tcacgtttattaaggagtccatgac

SEQ ID NO: 1551890 - DNA, 25 bp, Homo sapien
cacgtttattaaggagtccatgaca

SEQ ID NO: 1551891 - DNA, 25 bp, Homo sapien
gtttattaaggagtccatgacaatg

SEQ ID NO: 1551892 - DNA, 25 bp, Homo sapien
cttcacgtttattaaggagtccatg

SEQ ID NO: 1551893 - DNA, 25 bp, Homo sapien
gagttttcatccataagcccatcac

SEQ ID NO: 1551894 - DNA, 25 bp, Homo sapien
acttcagaaatgtgatgcaccttca

SEQ ID NO: 1551895 - DNA, 25 bp, Homo sapien
cataagcccatcaccttgtcagtgt

SEQ ID NO: 1551896 - DNA, 25 bp, Homo sapien
cccattcatgagttttcatccataa

SEQ ID NO: 1551897 - DNA, 25 bp, Homo sapien
taagcaatcttggatccttcttgaa

SEQ ID NO: 1551898 - DNA, 25 bp, Homo sapien
tatagtgtgaagtgcggatctaact

SEQ ID NO: 1551899 - DNA, 25 bp, Homo sapien
tagcttgtgcatatggtgtcttatc

SEQ ID NO: 1551900 - DNA, 25 bp, Homo sapien
gagtgcaatggtacatcacgcccca

SEQ ID NO: 1551901 - DNA, 25 bp, Homo sapien
gatcaccatgttgatgtcgacttag

SEQ ID NO: 1551902 - DNA, 25 bp, Homo sapien
ccatgttgatgtcgacttagtgtgg

SEQ ID NO: 1551903 - DNA, 25 bp, Homo sapien
gggtctccctgcgttgtgcaggcag

SEQ ID NO: 1551904 - DNA, 25 bp, Homo sapien
ctccctgcgttgtgcaggcagaatt

SEQ ID NO: 1551905 - DNA, 25 bp, Homo sapien
tgttgacgactactgggaagccctt

SEQ ID NO: 1551906 - DNA, 25 bp, Homo sapien
gagggtctggactgtactcctgcag

SEQ ID NO: 1551907 - DNA, 25 bp, Homo sapien
gaaatgtggacttctaccctgagag

SEQ ID NO: 1551908 - DNA, 25 bp, Homo sapien
tgtccgcgactccaccgaatgtttg

SEQ ID NO: 1551909 - DNA, 25 bp, Homo sapien
cagaagggcctgcaacgcgcggaac

SEQ ID NO: 1551910 - DNA, 25 bp, Homo sapien
aactatcgcggaaaaactgcagcaa

SEQ ID NO: 1551911 - DNA, 25 bp, Homo sapien
cccaaactatcgcggaaaaactgca

SEQ ID NO: 1551912 - DNA, 25 bp, Homo sapien
aagggcctgcaacgcgcggaactgc

SEQ ID NO: 1551913 - DNA, 25 bp, Homo sapien
ctctactctccgacgaggccccttt

SEQ ID NO: 1551914 - DNA, 25 bp, Homo sapien
ttcccttcatgaaagtggacgcaac

SEQ ID NO: 1551915 - DNA, 25 bp, Homo sapien
gtgccacggacgagaacgcaaacag

SEQ ID NO: 1551916 - DNA, 25 bp, Homo sapien
acgttatatcgagaagaagtggcca

SEQ ID NO: 1551917 - DNA, 25 bp, Homo sapien
ggaacgagaaagctgtgaaacacct

SEQ ID NO: 1551918 - DNA, 25 bp, Homo sapien
gaggacacaacctatacactctcgg

SEQ ID NO: 1551919 - DNA, 25 bp, Homo sapien
tcagtgacaacgtatcccaagagaa

SEQ ID NO: 1551920 - DNA, 25 bp, Homo sapien
tcactagtcgggtgcctatgcgctc

SEQ ID NO: 1551921 - DNA, 25 bp, Homo sapien
tgagcatctcggtcaaagagccaag

SEQ ID NO: 1551922 - DNA, 25 bp, Homo sapien
cattacgagcttaacagttgctacc

SEQ ID NO: 1551923 - DNA, 25 bp, Homo sapien
atttccatagttaaacacataaggg

SEQ ID NO: 1551924 - DNA, 25 bp, Homo sapien
tcatggattcgtaggtaataaaaac

SEQ ID NO: 1551925 - DNA, 25 bp, Homo sapien
cacttggcaaacgtgggtaaagagt

SEQ ID NO: 1551926 - DNA, 25 bp, Homo sapien
cctggtacgtgggcttccttgctgc

SEQ ID NO: 1551927 - DNA, 25 bp, Homo sapien
aaagctataatcagctgtctctggt

SEQ ID NO: 1551928 - DNA, 25 bp, Homo sapien
gctgcagaaagctataatcagctgt

SEQ ID NO: 1551929 - DNA, 25 bp, Homo sapien
tgtctctggttacaggtatgtttct

SEQ ID NO: 1551930 - DNA, 25 bp, Homo sapien
tcaagcatagaaagacaaagggtgt

SEQ ID NO: 1551931 - DNA, 25 bp, Homo sapien
tggaccctgttatgttgcaatgaaa

SEQ ID NO: 1551932 - DNA, 25 bp, Homo sapien
gaagagacaaactgacatcacttgg

SEQ ID NO: 1551933 - DNA, 25 bp, Homo sapien
tctcggccaagtggacaaggttgag

SEQ ID NO: 1551934 - DNA, 25 bp, Homo sapien
cagagtcctgagtgatgcagttcct

SEQ ID NO: 1551935 - DNA, 25 bp, Homo sapien
gagtcctgagtgatgcagttcctgg

SEQ ID NO: 1551936 - DNA, 25 bp, Homo sapien
ctggaaacttgcagagtcctgagtg

SEQ ID NO: 1551937 - DNA, 25 bp, Homo sapien
agagtcctgagtgatgcagttcctg

SEQ ID NO: 1551938 - DNA, 25 bp, Homo sapien
ccatggaagaggtactacgacagga

SEQ ID NO: 1551939 - DNA, 25 bp, Homo sapien
ggacatcatcactcaacaggacact

SEQ ID NO: 1551940 - DNA, 25 bp, Homo sapien
ccctggtctgggcataagattctta

SEQ ID NO: 1551941 - DNA, 25 bp, Homo sapien
taattgccgtccttgggtgcctgaa

SEQ ID NO: 1551942 - DNA, 25 bp, Homo sapien
cacatctcgatacagcttcctctga

SEQ ID NO: 1551943 - DNA, 25 bp, Homo sapien
ctgagagcaggttcctgaagttctc

SEQ ID NO: 1551944 - DNA, 25 bp, Homo sapien
tctcgatacagcttcctctgagcaa

SEQ ID NO: 1551945 - DNA, 25 bp, Homo sapien
cgatacagcttcctctgagcaaggt

SEQ ID NO: 1551946 - DNA, 25 bp, Homo sapien
aggaagtggaaagtatccctgtgga

SEQ ID NO: 1551947 - DNA, 25 bp, Homo sapien
tggaaagtatccctgtggaatgctt

SEQ ID NO: 1551948 - DNA, 25 bp, Homo sapien
taggaagtggaaagtatccctgtgg

SEQ ID NO: 1551949 - DNA, 25 bp, Homo sapien
agtggaaagtatccctgtggaatgc

SEQ ID NO: 1551950 - DNA, 25 bp, Homo sapien
catggcaggaaactctcatgagtat

SEQ ID NO: 1551951 - DNA, 25 bp, Homo sapien
agatttcacttaggccatggcagga

SEQ ID NO: 1551952 - DNA, 25 bp, Homo sapien
tatacctgctactcttcctagtgaa

SEQ ID NO: 1551953 - DNA, 25 bp, Homo sapien
ggatgaggccaatttcgaactaaac

SEQ ID NO: 1551954 - DNA, 25 bp, Homo sapien
taagtgctgatctctgacgaaagct

SEQ ID NO: 1551955 - DNA, 25 bp, Homo sapien
tatcacacgtatcacatcggaatgg

SEQ ID NO: 1551956 - DNA, 25 bp, Homo sapien
tttcaaaagacacgaggcccatctg

SEQ ID NO: 1551957 - DNA, 25 bp, Homo sapien
tatgatgcgtataaagatctcgcct

SEQ ID NO: 1551958 - DNA, 25 bp, Homo sapien
gtcagacgagttgaggaccagctga

SEQ ID NO: 1551959 - DNA, 25 bp, Homo sapien
tcttgcactttagagaatgaattct

SEQ ID NO: 1551960 - DNA, 25 bp, Homo sapien
ttctgtacaatgttcttcccatgct

SEQ ID NO: 1551961 - DNA, 25 bp, Homo sapien
atgctgctcacatttgagaggtgtt

SEQ ID NO: 1551962 - DNA, 25 bp, Homo sapien
ttctgatgaagtcgaaggcttgagg

SEQ ID NO: 1551963 - DNA, 25 bp, Homo sapien
taaagcacatatcacactccctaca

SEQ ID NO: 1551964 - DNA, 25 bp, Homo sapien
ggcttgaggcctgactaaagcacat

SEQ ID NO: 1551965 - DNA, 25 bp, Homo sapien
tgcatatcaagattcaagcgcctgt

SEQ ID NO: 1551966 - DNA, 25 bp, Homo sapien
tgaagactttattgcaccatcacat

SEQ ID NO: 1551967 - DNA, 25 bp, Homo sapien
aagactttattgcaccatcacatca

SEQ ID NO: 1551968 - DNA, 25 bp, Homo sapien
ctgagtgaagactttattgcaccat

SEQ ID NO: 1551969 - DNA, 25 bp, Homo sapien
gactgagtgaagactttattgcacc

SEQ ID NO: 1551970 - DNA, 25 bp, Homo sapien
tcaccagcatggattcagagataaa

SEQ ID NO: 1551971 - DNA, 25 bp, Homo sapien
tttactgccagcaataaagaggagg

SEQ ID NO: 1551972 - DNA, 25 bp, Homo sapien
taatcaatgttaaggctgtgacgac

SEQ ID NO: 1551973 - DNA, 25 bp, Homo sapien
tttataccgtatacaagcaatggac

SEQ ID NO: 1551974 - DNA, 25 bp, Homo sapien
aaatattcatttacacagtatgtaa

SEQ ID NO: 1551975 - DNA, 25 bp, Homo sapien
catttacacagtatgtaaacactca

SEQ ID NO: 1551976 - DNA, 25 bp, Homo sapien
gagcatttggattacactcctccga

SEQ ID NO: 1551977 - DNA, 25 bp, Homo sapien
agaaatcccctgattcgcctgccgg

SEQ ID NO: 1551978 - DNA, 25 bp, Homo sapien
tcaaattgaccgagactccactgag

SEQ ID NO: 1551979 - DNA, 25 bp, Homo sapien
tgggatccacctgccggagtcaaat

SEQ ID NO: 1551980 - DNA, 25 bp, Homo sapien
cagcaacctcacagtaacggagcgg

SEQ ID NO: 1551981 - DNA, 25 bp, Homo sapien
tggcccgctactccactgagtgtct

SEQ ID NO: 1551982 - DNA, 25 bp, Homo sapien
gaactgacccaaactaccagggaca

SEQ ID NO: 1551983 - DNA, 25 bp, Homo sapien
tcagaagggtctcgcggaactgacc

SEQ ID NO: 1551984 - DNA, 25 bp, Homo sapien
tctattaggatggtcctaaactccc

SEQ ID NO: 1551985 - DNA, 25 bp, Homo sapien
gttttatcgcgaggaagtggccacg

SEQ ID NO: 1551986 - DNA, 25 bp, Homo sapien
gagattaagtaacatcccagcgttt

SEQ ID NO: 1551987 - DNA, 25 bp, Homo sapien
gaccctaaaaccaggcgagacgcga

SEQ ID NO: 1551988 - DNA, 25 bp, Homo sapien
tcctgagtgatacagtccaagggaa

SEQ ID NO: 1551989 - DNA, 25 bp, Homo sapien
cagagtcctgagtgatacagtccaa

SEQ ID NO: 1551990 - DNA, 25 bp, Homo sapien
tgagtgatacagtccaagggaaagc

SEQ ID NO: 1551991 - DNA, 25 bp, Homo sapien
attcagagtcctgagtgatacagtc

SEQ ID NO: 1551992 - DNA, 25 bp, Homo sapien
ccagcatcacttctcggtacagttt

SEQ ID NO: 1551993 - DNA, 25 bp, Homo sapien
ctgagagcaggttcctgaagttctc

SEQ ID NO: 1551994 - DNA, 25 bp, Homo sapien
tctgggcaaggtccagcagcctcag

SEQ ID NO: 1551995 - DNA, 25 bp, Homo sapien
aagaccacagccacgtccttgaagg

SEQ ID NO: 1551996 - DNA, 25 bp, Homo sapien
agtggaaagtatctctgtggagtga

SEQ ID NO: 1551997 - DNA, 25 bp, Homo sapien
gaaagtatctctgtggagtgattga

SEQ ID NO: 1551998 - DNA, 25 bp, Homo sapien
gtatctctgtggagtgattgatgcc

SEQ ID NO: 1551999 - DNA, 25 bp, Homo sapien
tggaaagtatctctgtggagtgatt

SEQ ID NO: 1552000 - DNA, 25 bp, Homo sapien
cagaaaccttcagttttgatgggaa

SEQ ID NO: 1552001 - DNA, 25 bp, Homo sapien
tgaaatagaaaaggatcagaaacct

SEQ ID NO: 1552002 - DNA, 25 bp, Homo sapien
tagaaaaggatcagaaaccttcagt

SEQ ID NO: 1552003 - DNA, 25 bp, Homo sapien
tcagttttgatgggaatctgaaagg

SEQ ID NO: 1552004 - DNA, 25 bp, Homo sapien
aggcacataccaccataactagcta

SEQ ID NO: 1552005 - DNA, 25 bp, Homo sapien
caccataactagctaatttttacac

SEQ ID NO: 1552006 - DNA, 25 bp, Homo sapien
gcacataccaccataactagctaat

SEQ ID NO: 1552007 - DNA, 25 bp, Homo sapien
ccataactagctaatttttacactt

SEQ ID NO: 1552008 - DNA, 25 bp, Homo sapien
tgaatggtttctctcgcatgtgaac

SEQ ID NO: 1552009 - DNA, 25 bp, Homo sapien
tgatgactgaacaagccttcatgtg

SEQ ID NO: 1552010 - DNA, 25 bp, Homo sapien
aacctggcagggcatatcatcttgt

SEQ ID NO: 1552011 - DNA, 25 bp, Homo sapien
tcaaggacggagacatcactaaagg

SEQ ID NO: 1552012 - DNA, 25 bp, Homo sapien
tgtggaccatgcgatgactattaag

SEQ ID NO: 1552013 - DNA, 25 bp, Homo sapien
tggaccatgcgatgactattaagtg

SEQ ID NO: 1552014 - DNA, 25 bp, Homo sapien
ctgtgtggaccatgcgatgactatt

SEQ ID NO: 1552015 - DNA, 25 bp, Homo sapien
tgtgtggaccatgcgatgactatta

SEQ ID NO: 1552016 - DNA, 25 bp, Homo sapien
cactgtggactctacgatgggtata

SEQ ID NO: 1552017 - DNA, 25 bp, Homo sapien
tcttgaaagacctgaggcccatctg

SEQ ID NO: 1552018 - DNA, 25 bp, Homo sapien
tccactgtgcgctctctggtgagaa

SEQ ID NO: 1552019 - DNA, 25 bp, Homo sapien
ccagtgtggactctgcgatgagaat

SEQ ID NO: 1552020 - DNA, 25 bp, Homo sapien
ctggtgcatgtcaagattaaactta

SEQ ID NO: 1552021 - DNA, 25 bp, Homo sapien
tggtgcatgtcaagattaaacttac

SEQ ID NO: 1552022 - DNA, 25 bp, Homo sapien
tctggtgcatgtcaagattaaactt

SEQ ID NO: 1552023 - DNA, 25 bp, Homo sapien
ctctggtgcatgtcaagattaaact

SEQ ID NO: 1552024 - DNA, 25 bp, Homo sapien
gattcaaaatacttgaggcccggct

SEQ ID NO: 1552025 - DNA, 25 bp, Homo sapien
caaaatacttgaggcccggctaaag

SEQ ID NO: 1552026 - DNA, 25 bp, Homo sapien
tggagtctcttatgattcaaaatac

SEQ ID NO: 1552027 - DNA, 25 bp, Homo sapien
tcttatgattcaaaatacttgaggc

SEQ ID NO: 1552028 - DNA, 25 bp, Homo sapien
atttgtatggcttttccccagtgtg

SEQ ID NO: 1552029 - DNA, 25 bp, Homo sapien
tttgtatggcttttccccagtgtga

SEQ ID NO: 1552030 - DNA, 25 bp, Homo sapien
tgtatggcttttccccagtgtgaac

SEQ ID NO: 1552031 - DNA, 25 bp, Homo sapien
ttgtatggcttttccccagtgtgaa

SEQ ID NO: 1552032 - DNA, 25 bp, Homo sapien
atgggttagatgagttgaggcccat

SEQ ID NO: 1552033 - DNA, 25 bp, Homo sapien
gatgggttagatgagttgaggccca

SEQ ID NO: 1552034 - DNA, 25 bp, Homo sapien
tgatgggttagatgagttgaggccc

SEQ ID NO: 1552035 - DNA, 25 bp, Homo sapien
ctttaaggcatgaactgtgcacaat

SEQ ID NO: 1552036 - DNA, 25 bp, Homo sapien
taaggcatgaactgtgcacaatgct

SEQ ID NO: 1552037 - DNA, 25 bp, Homo sapien
catgaactgtgcacaatgctcttcc

SEQ ID NO: 1552038 - DNA, 25 bp, Homo sapien
ggcatgaactgtgcacaatgctctt

SEQ ID NO: 1552039 - DNA, 25 bp, Homo sapien
gatgttttctctccactttggtctc

SEQ ID NO: 1552040 - DNA, 25 bp, Homo sapien
ttttctctccactttggtctctttg

SEQ ID NO: 1552041 - DNA, 25 bp, Homo sapien
atttagatgttttctctccactttg

SEQ ID NO: 1552042 - DNA, 25 bp, Homo sapien
tagatgttttctctccactttggtc

SEQ ID NO: 1552043 - DNA, 25 bp, Homo sapien
ttcaagcgcctcttgtagcgcttcc

SEQ ID NO: 1552044 - DNA, 25 bp, Homo sapien
cttgtagcgcttcccacagtcctca

SEQ ID NO: 1552045 - DNA, 25 bp, Homo sapien
tatcaagattcaagcgcctcttgta

SEQ ID NO: 1552046 - DNA, 25 bp, Homo sapien
agattcaagcgcctcttgtagcgct

SEQ ID NO: 1552047 - DNA, 25 bp, Homo sapien
ttatgtgtcatttaaaaataatgac

SEQ ID NO: 1552048 - DNA, 25 bp, Homo sapien
tctagtgttttacaccactacaggg

SEQ ID NO: 1552049 - DNA, 25 bp, Homo sapien
caaatagctaggacagtgaatttta

SEQ ID NO: 1552050 - DNA, 25 bp, Homo sapien
gaatagtagttcttagaggtgagga

SEQ ID NO: 1552051 - DNA, 25 bp, Homo sapien
tacacattgtatacttgcattaact

SEQ ID NO: 1552052 - DNA, 25 bp, Homo sapien
tgaggacagctgaagacactcacca

SEQ ID NO: 1552053 - DNA, 25 bp, Homo sapien
cacatgcattatgtatgaggacagc

SEQ ID NO: 1552054 - DNA, 25 bp, Homo sapien
tatgcttaaagcgagctcacatgca

SEQ ID NO: 1552055 - DNA, 25 bp, Homo sapien
ttcacgatagccaagaaataggcca

SEQ ID NO: 1552056 - DNA, 25 bp, Homo sapien
tagaatcttgatatgtaccagaggg

SEQ ID NO: 1552057 - DNA, 25 bp, Homo sapien
gagacctgttactccatgcacaaag

SEQ ID NO: 1552058 - DNA, 25 bp, Homo sapien
ggcctgagactgcaaatcttagaaa

SEQ ID NO: 1552059 - DNA, 25 bp, Homo sapien
cacggagtttgagagggttgccacc

SEQ ID NO: 1552060 - DNA, 25 bp, Homo sapien
caatcagtcccacatgttaacacca

SEQ ID NO: 1552061 - DNA, 25 bp, Homo sapien
aatattcagcgtggttgggagaaac

SEQ ID NO: 1552062 - DNA, 25 bp, Homo sapien
taacaccatgttgtaaccaagttga

SEQ ID NO: 1552063 - DNA, 25 bp, Homo sapien
tgtaaccaagttgatgatccaggac

SEQ ID NO: 1552064 - DNA, 25 bp, Homo sapien
tgtccacaaaagaaaaaggaaatca

SEQ ID NO: 1552065 - DNA, 25 bp, Homo sapien
taataagaccaacaaaggaaggtca

SEQ ID NO: 1552066 - DNA, 25 bp, Homo sapien
caagtcaaagttatattagggaact

SEQ ID NO: 1552067 - DNA, 25 bp, Homo sapien
gtaataatccccaccgattgtgaaa

SEQ ID NO: 1552068 - DNA, 25 bp, Homo sapien
ttatgttatggataataagaccaac

SEQ ID NO: 1552069 - DNA, 25 bp, Homo sapien
atgtgccgtgacaatcgccccctct

SEQ ID NO: 1552070 - DNA, 25 bp, Homo sapien
gaatgtgccgtgacaatcgccccct

SEQ ID NO: 1552071 - DNA, 25 bp, Homo sapien
tggaatgtgccgtgacaatcgcccc

SEQ ID NO: 1552072 - DNA, 25 bp, Homo sapien
cgtggaatgtgccgtgacaatcgcc

SEQ ID NO: 1552073 - DNA, 25 bp, Homo sapien
ccataaccggaccaccaggtcccag

SEQ ID NO: 1552074 - DNA, 25 bp, Homo sapien
aggtcccagcgagccccaatcttaa

SEQ ID NO: 1552075 - DNA, 25 bp, Homo sapien
tctgctctcccacgaggcttctttt

SEQ ID NO: 1552076 - DNA, 25 bp, Homo sapien
atcttaagtccctgacattaggagg

SEQ ID NO: 1552077 - DNA, 25 bp, Homo sapien
gaaggcgtccgggatcgtccagcgt

SEQ ID NO: 1552078 - DNA, 25 bp, Homo sapien
tcagaaggcgtccgggatcgtccag

SEQ ID NO: 1552079 - DNA, 25 bp, Homo sapien
aaggcgtccgggatcgtccagcgtc

SEQ ID NO: 1552080 - DNA, 25 bp, Homo sapien
cagaaggcgtccgggatcgtccagc

SEQ ID NO: 1552081 - DNA, 25 bp, Homo sapien
tcagtccgcgcagtcctttttcagg

SEQ ID NO: 1552082 - DNA, 25 bp, Homo sapien
caagaagtcagtccgcgcagtcctt

SEQ ID NO: 1552083 - DNA, 25 bp, Homo sapien
cagtagccaagaagtcagtccgcgc

SEQ ID NO: 1552084 - DNA, 25 bp, Homo sapien
agtcagtccgcgcagtcctttttca

SEQ ID NO: 1552085 - DNA, 25 bp, Homo sapien
agaaggcagaatcgtgcctggaaca

SEQ ID NO: 1552086 - DNA, 25 bp, Homo sapien
ctgggaatttgcagagtcctgagtt

SEQ ID NO: 1552087 - DNA, 25 bp, Homo sapien
agagaaggcagaatcgtgcctggaa

SEQ ID NO: 1552088 - DNA, 25 bp, Homo sapien
cagagtcctgagttatgccatttga

SEQ ID NO: 1552089 - DNA, 25 bp, Homo sapien
aaacatttagcaagtcagaaccaac

SEQ ID NO: 1552090 - DNA, 25 bp, Homo sapien
tcggtaaatattaccaattgcccca

SEQ ID NO: 1552091 - DNA, 25 bp, Homo sapien
catttagcaagtcagaaccaacata

SEQ ID NO: 1552092 - DNA, 25 bp, Homo sapien
ttagcaagtcagaaccaacatacat

SEQ ID NO: 1552093 - DNA, 25 bp, Homo sapien
cacatcttggtacagattcctctgg

SEQ ID NO: 1552094 - DNA, 25 bp, Homo sapien
ctgacagcaggttcctgaagttctc

SEQ ID NO: 1552095 - DNA, 25 bp, Homo sapien
ttcctctggacagggtccagcagcc

SEQ ID NO: 1552096 - DNA, 25 bp, Homo sapien
ccactgacagcaggttcctgaagtt

SEQ ID NO: 1552097 - DNA, 25 bp, Homo sapien
tgacattgagtgttagaaagctcat

SEQ ID NO: 1552098 - DNA, 25 bp, Homo sapien
gagactgacattgagtgttagaaag

SEQ ID NO: 1552099 - DNA, 25 bp, Homo sapien
tccaagagactgacattgagtgtta

SEQ ID NO: 1552100 - DNA, 25 bp, Homo sapien
tcactccaagagactgacattgagt

SEQ ID NO: 1552101 - DNA, 25 bp, Homo sapien
tgtctgcactcattaatcttcttaa

SEQ ID NO: 1552102 - DNA, 25 bp, Homo sapien
tgggccaaggttccgggccaagcta

SEQ ID NO: 1552103 - DNA, 25 bp, Homo sapien
caaacccctgcctcatagggggaat

SEQ ID NO: 1552104 - DNA, 25 bp, Homo sapien
aattccatttgggtccccctctctg

SEQ ID NO: 1552105 - DNA, 25 bp, Homo sapien
ccttttgtgggcataggtacagtgg

SEQ ID NO: 1552106 - DNA, 25 bp, Homo sapien
tctatatatctttacttcaacctga

SEQ ID NO: 1552107 - DNA, 25 bp, Homo sapien
ggcctggcataagaatgcctttgtc

SEQ ID NO: 1552108 - DNA, 25 bp, Homo sapien
ttcaaactgtaagtccggtctctat

SEQ ID NO: 1552109 - DNA, 25 bp, Homo sapien
acatcatgtttgaaggggtgatgcc

SEQ ID NO: 1552110 - DNA, 25 bp, Homo sapien
gatttcccttttctttgagttgctg

SEQ ID NO: 1552111 - DNA, 25 bp, Homo sapien
ttgagttgctgtcttcattatatca

SEQ ID NO: 1552112 - DNA, 25 bp, Homo sapien
tttctaaaaggaatacatcatgttt

SEQ ID NO: 1552113 - DNA, 25 bp, Homo sapien
taccaggcattagaccataccaagt

SEQ ID NO: 1552114 - DNA, 25 bp, Homo sapien
ccaattggctgctatctaccaggca

SEQ ID NO: 1552115 - DNA, 25 bp, Homo sapien
taaatcaagaggtggtccaattggc

SEQ ID NO: 1552116 - DNA, 25 bp, Homo sapien
catacttaggcgagagcatgcgatt

SEQ ID NO: 1552117 - DNA, 25 bp, Homo sapien
gaaccgagaaatacttatcatagag

SEQ ID NO: 1552118 - DNA, 25 bp, Homo sapien
atacttgattaaatcacttgcaatc

SEQ ID NO: 1552119 - DNA, 25 bp, Homo sapien
cagatttgcccccagtaaagctctt

SEQ ID NO: 1552120 - DNA, 25 bp, Homo sapien
agtaaagctcttcatgtcgtcctgc

SEQ ID NO: 1552121 - DNA, 25 bp, Homo sapien
ttattaagtgctgatctacgacgga

SEQ ID NO: 1552122 - DNA, 25 bp, Homo sapien
gatggatacgaaggtttgagctaca

SEQ ID NO: 1552123 - DNA, 25 bp, Homo sapien
gagttgtatatagtcctgccctaac

SEQ ID NO: 1552124 - DNA, 25 bp, Homo sapien
gaagcatgtatgaaggcccttccac

SEQ ID NO: 1552125 - DNA, 25 bp, Homo sapien
ggactaccagatgcacttgataatg

SEQ ID NO: 1552126 - DNA, 25 bp, Homo sapien
tatgaactctgacggaaggctttac

SEQ ID NO: 1552127 - DNA, 25 bp, Homo sapien
atctgctctacgactaaatcccttt

SEQ ID NO: 1552128 - DNA, 25 bp, Homo sapien
taaaaggtttctgtacactatgtgc

SEQ ID NO: 1552129 - DNA, 25 bp, Homo sapien
tgggttagaagatgcgaggcctgac

SEQ ID NO: 1552130 - DNA, 25 bp, Homo sapien
agatgcgaggcctgactgaagacct

SEQ ID NO: 1552131 - DNA, 25 bp, Homo sapien
gatgcgaggcctgactgaagacctt

SEQ ID NO: 1552132 - DNA, 25 bp, Homo sapien
tagaagatgcgaggcctgactgaag

SEQ ID NO: 1552133 - DNA, 25 bp, Homo sapien
gtgaactcgcctatgatactgtaat

SEQ ID NO: 1552134 - DNA, 25 bp, Homo sapien
ccagtgtgaactcgcctatgatact

SEQ ID NO: 1552135 - DNA, 25 bp, Homo sapien
cagtgtgaactcgcctatgatactg

SEQ ID NO: 1552136 - DNA, 25 bp, Homo sapien
tttgatcgccagctgaacctcttac

SEQ ID NO: 1552137 - DNA, 25 bp, Homo sapien
agatttgatcgccagctgaacctct

SEQ ID NO: 1552138 - DNA, 25 bp, Homo sapien
gatttgatcgccagctgaacctctt

SEQ ID NO: 1552139 - DNA, 25 bp, Homo sapien
aagatttgatcgccagctgaacctc

SEQ ID NO: 1552140 - DNA, 25 bp, Homo sapien
taaaatgtaccagcagcatgaattt

SEQ ID NO: 1552141 - DNA, 25 bp, Homo sapien
aatgtaccagcagcatgaattttgt

SEQ ID NO: 1552142 - DNA, 25 bp, Homo sapien
taccagcagcatgaattttgtgatg

SEQ ID NO: 1552143 - DNA, 25 bp, Homo sapien
tcataaaatgtaccagcagcatgaa

SEQ ID NO: 1552144 - DNA, 25 bp, Homo sapien
acttcctccctctgacaactctctg

SEQ ID NO: 1552145 - DNA, 25 bp, Homo sapien
tccctctgacaactctctgatgttc

SEQ ID NO: 1552146 - DNA, 25 bp, Homo sapien
ttgtagaacttcctccctctgacaa

SEQ ID NO: 1552147 - DNA, 25 bp, Homo sapien
cttgtagaacttcctccctctgaca

SEQ ID NO: 1552148 - DNA, 25 bp, Homo sapien
tgtatagattcggtagcaaagttcc

SEQ ID NO: 1552149 - DNA, 25 bp, Homo sapien
aaaagtctaggtggaaatgtggagc

SEQ ID NO: 1552150 - DNA, 25 bp, Homo sapien
cactggaccactgggatatgctgag

SEQ ID NO: 1552151 - DNA, 25 bp, Homo sapien
cacttaacaagggttctcagctgtg

SEQ ID NO: 1552152 - DNA, 25 bp, Homo sapien
gacaggctctcaataagaaccaaat

SEQ ID NO: 1552153 - DNA, 25 bp, Homo sapien
taatattgtaggctgcagtatccag

SEQ ID NO: 1552154 - DNA, 25 bp, Homo sapien
ttgggaaactagacaggctctcaat

SEQ ID NO: 1552155 - DNA, 25 bp, Homo sapien
cttacgcctgtaatttaacactggg

SEQ ID NO: 1552156 - DNA, 25 bp, Homo sapien
ccttaaacccatgttttactgccag

SEQ ID NO: 1552157 - DNA, 25 bp, Homo sapien
ggcaaaaatatggtacagcccctac

SEQ ID NO: 1552158 - DNA, 25 bp, Homo sapien
tttggtattcgcttaatgggtgtgg

SEQ ID NO: 1552159 - DNA, 25 bp, Homo sapien
tggtaaatgccaatcctgcccaaat

SEQ ID NO: 1552160 - DNA, 25 bp, Homo sapien
gagcaacttagatcctttctttaaa

SEQ ID NO: 1552161 - DNA, 25 bp, Homo sapien
tgagtaaagccctttaatccagcag

SEQ ID NO: 1552162 - DNA, 25 bp, Homo sapien
cacaaggagcgagcaacttagatcc

SEQ ID NO: 1552163 - DNA, 25 bp, Homo sapien
tttattttcacaaggagcgagcaac

SEQ ID NO: 1552164 - DNA, 25 bp, Homo sapien
tgctacgtcgtcttcctgggcggaa

SEQ ID NO: 1552165 - DNA, 25 bp, Homo sapien
tggctgctacgtcgtcttcctgggc

SEQ ID NO: 1552166 - DNA, 25 bp, Homo sapien
tacgtcgtcttcctgggcggaagtg

SEQ ID NO: 1552167 - DNA, 25 bp, Homo sapien
gaaaagatggctgctacgtcgtctt

SEQ ID NO: 1552168 - DNA, 25 bp, Homo sapien
tgctgaccacaagtgcatttcgggg

SEQ ID NO: 1552169 - DNA, 25 bp, Homo sapien
cccaaacaaaagaccgctagctgct

SEQ ID NO: 1552170 - DNA, 25 bp, Homo sapien
agaccgctagctgctgaccacaagt

SEQ ID NO: 1552171 - DNA, 25 bp, Homo sapien
cgctcttagccgctactcctttttt

SEQ ID NO: 1552172 - DNA, 25 bp, Homo sapien
caaaagaggtcagggacaatccagc

SEQ ID NO: 1552173 - DNA, 25 bp, Homo sapien
gaaaaacaggctatgaagtaaccag

SEQ ID NO: 1552174 - DNA, 25 bp, Homo sapien
tcccaggaccagttagaagcaaccc

SEQ ID NO: 1552175 - DNA, 25 bp, Homo sapien
tcatcccggatacatcacagtggca

SEQ ID NO: 1552176 - DNA, 25 bp, Homo sapien
tcctctgtgcagtgctttttgagaa

SEQ ID NO: 1552177 - DNA, 25 bp, Homo sapien
ctcctcctctgtgcagtgctttttg

SEQ ID NO: 1552178 - DNA, 25 bp, Homo sapien
ctctgtgcagtgctttttgagaagt

SEQ ID NO: 1552179 - DNA, 25 bp, Homo sapien
cctcctctgtgcagtgctttttgag

SEQ ID NO: 1552180 - DNA, 25 bp, Homo sapien
agaaggccttcggtagggctcaaga

SEQ ID NO: 1552181 - DNA, 25 bp, Homo sapien
gcagatttctgggtcctatctgcaa

SEQ ID NO: 1552182 - DNA, 25 bp, Homo sapien
gtagtgttgcactgtactcagtccc

SEQ ID NO: 1552183 - DNA, 25 bp, Homo sapien
ggtagggctcaagaatgagcctttc

SEQ ID NO: 1552184 - DNA, 25 bp, Homo sapien
tgaggaatcattctagactaaaggt

SEQ ID NO: 1552185 - DNA, 25 bp, Homo sapien
gcatacaattagactggaaactcat

SEQ ID NO: 1552186 - DNA, 25 bp, Homo sapien
gactaaaggtgactaatgaaaccaa

SEQ ID NO: 1552187 - DNA, 25 bp, Homo sapien
tactctagaaagatatcgagagcaa

SEQ ID NO: 1552188 - DNA, 25 bp, Homo sapien
tggggaagtgcagagtcctaagaag

SEQ ID NO: 1552189 - DNA, 25 bp, Homo sapien
ctggggaagtgcagagtcctaagaa

SEQ ID NO: 1552190 - DNA, 25 bp, Homo sapien
ttacaagtgtgcaccgccatacctg

SEQ ID NO: 1552191 - DNA, 25 bp, Homo sapien
ggtgcctgcaaccacgcctggctca

SEQ ID NO: 1552192 - DNA, 25 bp, Homo sapien
caggtgcctgcaaccacgcctggct

SEQ ID NO: 1552193 - DNA, 25 bp, Homo sapien
gattacaagtgtgcaccgccatacc

SEQ ID NO: 1552194 - DNA, 25 bp, Homo sapien
gcccagccgtttgtagatttcccag

SEQ ID NO: 1552195 - DNA, 25 bp, Homo sapien
tgtcttgccaatgccatacactgac

SEQ ID NO: 1552196 - DNA, 25 bp, Homo sapien
tacaaccaatgtccactagaagatg

SEQ ID NO: 1552197 - DNA, 25 bp, Homo sapien
atacactgacttaccaaaagtgctg

SEQ ID NO: 1552198 - DNA, 25 bp, Homo sapien
cagcaggttcctaaagttctccacc

SEQ ID NO: 1552199 - DNA, 25 bp, Homo sapien
cagccccaattcctcctccgtgaag

SEQ ID NO: 1552200 - DNA, 25 bp, Homo sapien
cagcagccccaattcctcctccgtg

SEQ ID NO: 1552201 - DNA, 25 bp, Homo sapien
ccaattcctcctccgtgaaggccac

SEQ ID NO: 1552202 - DNA, 25 bp, Homo sapien
aagtcagattcccacactcagggaa

SEQ ID NO: 1552203 - DNA, 25 bp, Homo sapien
gttcagaaagaccagaaacatccag

SEQ ID NO: 1552204 - DNA, 25 bp, Homo sapien
ccaagggcacaaagatattccagag

SEQ ID NO: 1552205 - DNA, 25 bp, Homo sapien
ctcagggaacaatttcaagggccac

SEQ ID NO: 1552206 - DNA, 25 bp, Homo sapien
ccagacacacatgcgtaaatacata

SEQ ID NO: 1552207 - DNA, 25 bp, Homo sapien
ctgttttccttaaatctcccattgg

SEQ ID NO: 1552208 - DNA, 25 bp, Homo sapien
caagcaattggccagagtttttgct

SEQ ID NO: 1552209 - DNA, 25 bp, Homo sapien
tttatttcatgacccagacacacat

SEQ ID NO: 1552210 - DNA, 25 bp, Homo sapien
cgggttgctgtcgtcattatccaaa

SEQ ID NO: 1552211 - DNA, 25 bp, Homo sapien
aatttccctgtcttcgggttgctgt

SEQ ID NO: 1552212 - DNA, 25 bp, Homo sapien
tgtcttcgggttgctgtcgtcatta

SEQ ID NO: 1552213 - DNA, 25 bp, Homo sapien
gtcgtcattatccaaagctgctcat

SEQ ID NO: 1552214 - DNA, 25 bp, Homo sapien
tatgctctgctacaaatgctcaaag

SEQ ID NO: 1552215 - DNA, 25 bp, Homo sapien
agcacaccgtgtaagactctgtcag

SEQ ID NO: 1552216 - DNA, 25 bp, Homo sapien
gacactataggttccccaagatatg

SEQ ID NO: 1552217 - DNA, 25 bp, Homo sapien
cagggcaagcagtacaaagggtgtt

SEQ ID NO: 1552218 - DNA, 25 bp, Homo sapien
tcatagagcaaaagagcttttacaa

SEQ ID NO: 1552219 - DNA, 25 bp, Homo sapien
gagcaaaagagcttttacaagtaag

SEQ ID NO: 1552220 - DNA, 25 bp, Homo sapien
taagtttgagccaggtcatagagca

SEQ ID NO: 1552221 - DNA, 25 bp, Homo sapien
ttaagtttgagccaggtcatagagc

SEQ ID NO: 1552222 - DNA, 25 bp, Homo sapien
tagtcactcaaggaatgtatgcata

SEQ ID NO: 1552223 - DNA, 25 bp, Homo sapien
tagtgctcacagtttacaaccacag

SEQ ID NO: 1552224 - DNA, 25 bp, Homo sapien
acagcccagaagttactgcccggca

SEQ ID NO: 1552225 - DNA, 25 bp, Homo sapien
tgcccggcagtcattcatagtcact

SEQ ID NO: 1552226 - DNA, 25 bp, Homo sapien
aagactttaatgaacctcgggatag

SEQ ID NO: 1552227 - DNA, 25 bp, Homo sapien
aagtttctggtttacatactgacag

SEQ ID NO: 1552228 - DNA, 25 bp, Homo sapien
gatagttctgctcatcttttgtgac

SEQ ID NO: 1552229 - DNA, 25 bp, Homo sapien
aaaccaagagatggtccaccaagct

SEQ ID NO: 1552230 - DNA, 25 bp, Homo sapien
ggacaaaggattcagagagatagtg

SEQ ID NO: 1552231 - DNA, 25 bp, Homo sapien
tgtaaggacaaaggattcagagaga

SEQ ID NO: 1552232 - DNA, 25 bp, Homo sapien
ctgtaaggacaaaggattcagagag

SEQ ID NO: 1552233 - DNA, 25 bp, Homo sapien
ggattcagagagatagtgaattttt

SEQ ID NO: 1552234 - DNA, 25 bp, Homo sapien
atttgccaacaagaaagctcttctt

SEQ ID NO: 1552235 - DNA, 25 bp, Homo sapien
gaaatttgaatagacagttctgtcc

SEQ ID NO: 1552236 - DNA, 25 bp, Homo sapien
ctggtaagggaaatcaccttgtttg

SEQ ID NO: 1552237 - DNA, 25 bp, Homo sapien
tcaccttgtttgtgacactgagaat

SEQ ID NO: 1552238 - DNA, 25 bp, Homo sapien
tgaatagacagttctgtccctacct

SEQ ID NO: 1552239 - DNA, 25 bp, Homo sapien
gatgtgcactccgaccgaaactctt

SEQ ID NO: 1552240 - DNA, 25 bp, Homo sapien
tgccgtgtggaccttgcaatgaaca

SEQ ID NO: 1552241 - DNA, 25 bp, Homo sapien
taaaaggtttctctatactgtgggc

SEQ ID NO: 1552242 - DNA, 25 bp, Homo sapien
cctgaagacttgaaggccgactaaa

SEQ ID NO: 1552243 - DNA, 25 bp, Homo sapien
tgaactcgctgatgagactgtagtt

SEQ ID NO: 1552244 - DNA, 25 bp, Homo sapien
gatgagactgtagttgtgaagaccg

SEQ ID NO: 1552245 - DNA, 25 bp, Homo sapien
ctcgctgatgagactgtagttgtga

SEQ ID NO: 1552246 - DNA, 25 bp, Homo sapien
cgctgatgagactgtagttgtgaag

SEQ ID NO: 1552247 - DNA, 25 bp, Homo sapien
tgtaagatttgatcgccaactgaag

SEQ ID NO: 1552248 - DNA, 25 bp, Homo sapien
tataggatttatcaccaacatggat

SEQ ID NO: 1552249 - DNA, 25 bp, Homo sapien
gatttatcaccaacatggattctgt

SEQ ID NO: 1552250 - DNA, 25 bp, Homo sapien
tggattctgtgatgaactgtaagat

SEQ ID NO: 1552251 - DNA, 25 bp, Homo sapien
tatagattttttttcctgtgtggat

SEQ ID NO: 1552252 - DNA, 25 bp, Homo sapien
cattttatagattttttttcctgtg

SEQ ID NO: 1552253 - DNA, 25 bp, Homo sapien
agattttttttcctgtgtggattct

SEQ ID NO: 1552254 - DNA, 25 bp, Homo sapien
ttatagattttttttcctgtgtgga

SEQ ID NO: 1552255 - DNA, 25 bp, Homo sapien
taggacccaacttgattagtgaggc

SEQ ID NO: 1552256 - DNA, 25 bp, Homo sapien
ctagacatctgggaagataggaccc

SEQ ID NO: 1552257 - DNA, 25 bp, Homo sapien
tctttggaccactgggacatgagga

SEQ ID NO: 1552258 - DNA, 25 bp, Homo sapien
ggttctgactaaagaagcccttgct

SEQ ID NO: 1552259 - DNA, 25 bp, Homo sapien
ggtgctcaagctaacagtgggtctg

SEQ ID NO: 1552260 - DNA, 25 bp, Homo sapien
ggcgatgtatctcctcatggtcgta

SEQ ID NO: 1552261 - DNA, 25 bp, Homo sapien
gaagggctccttctaacggcaagag

SEQ ID NO: 1552262 - DNA, 25 bp, Homo sapien
tcccattgtctgtgaagacccgagt

SEQ ID NO: 1552263 - DNA, 25 bp, Homo sapien
gcttggtggctctctatatcaggtg

SEQ ID NO: 1552264 - DNA, 25 bp, Homo sapien
taaaagtgtattgatggccctacca

SEQ ID NO: 1552265 - DNA, 25 bp, Homo sapien
gaactgagctgggaccttaaaagtg

SEQ ID NO: 1552266 - DNA, 25 bp, Homo sapien
tagcataaaagcactcctgggtaat

SEQ ID NO: 1552267 - DNA, 25 bp, Homo sapien
ttgtattatccatcttctaaccaaa

SEQ ID NO: 1552268 - DNA, 25 bp, Homo sapien
taggaatctaatgaacatggccagc

SEQ ID NO: 1552269 - DNA, 25 bp, Homo sapien
acccggccagtcctctaggaatcta

SEQ ID NO: 1552270 - DNA, 25 bp, Homo sapien
taaccaaaatgtctattgtaattgc

SEQ ID NO: 1552271 - DNA, 25 bp, Homo sapien
caaatttctgtggaagtacaactcc

SEQ ID NO: 1552272 - DNA, 25 bp, Homo sapien
taagcccaggttcatggctcgaaac

SEQ ID NO: 1552273 - DNA, 25 bp, Homo sapien
ggactgataccaccgttgttactga

SEQ ID NO: 1552274 - DNA, 25 bp, Homo sapien
tccaggtagacctagcctaagagcc

SEQ ID NO: 1552275 - DNA, 25 bp, Homo sapien
gtaatgctatcaaccacgattctgg

SEQ ID NO: 1552276 - DNA, 25 bp, Homo sapien
ttctctaaaggtatctgcaatcaga

SEQ ID NO: 1552277 - DNA, 25 bp, Homo sapien
tctgatggtcctgatgtaatgctat

SEQ ID NO: 1552278 - DNA, 25 bp, Homo sapien
aggtctctccaggatcaaagttcta

SEQ ID NO: 1552279 - DNA, 25 bp, Homo sapien
ttaatacagtgatacaaaaccagaa

SEQ ID NO: 1552280 - DNA, 25 bp, Homo sapien
ttcacctatgtttaaagcaacaagg

SEQ ID NO: 1552281 - DNA, 25 bp, Homo sapien
gcctggatatatttgtcagacaatt

SEQ ID NO: 1552282 - DNA, 25 bp, Homo sapien
tgtgtttaatcaagttgcctatagt

SEQ ID NO: 1552283 - DNA, 25 bp, Homo sapien
ctgccctggtcacaagaaatgctgg

SEQ ID NO: 1552284 - DNA, 25 bp, Homo sapien
gaggcatgtcccactactgaaatgg

SEQ ID NO: 1552285 - DNA, 25 bp, Homo sapien
tatacaagatttcacccatgggatg

SEQ ID NO: 1552286 - DNA, 25 bp, Homo sapien
ggtagtcccctttgaagaacagtgc

SEQ ID NO: 1552287 - DNA, 25 bp, Homo sapien
tatacaaatgtacaaggcttcagat

SEQ ID NO: 1552288 - DNA, 25 bp, Homo sapien
caatgttgtaaagctatcagtgctc

SEQ ID NO: 1552289 - DNA, 25 bp, Homo sapien
gagacaactctattgccataccaga

SEQ ID NO: 1552290 - DNA, 25 bp, Homo sapien
acaccaaacattggcaagcacgtgg

SEQ ID NO: 1552291 - DNA, 25 bp, Homo sapien
cagtgtactcacacaatacgtggtc

SEQ ID NO: 1552292 - DNA, 25 bp, Homo sapien
gcataacatgttgaagggtcatcca

SEQ ID NO: 1552293 - DNA, 25 bp, Homo sapien
tccatgttggtgcatgaaccagtta

SEQ ID NO: 1552294 - DNA, 25 bp, Homo sapien
tcactttctcgatggtatccactga

SEQ ID NO: 1552295 - DNA, 25 bp, Homo sapien
ttctgttgttcaagggccttgggga

SEQ ID NO: 1552296 - DNA, 25 bp, Homo sapien
tgttgttcaagggccttggggaaga

SEQ ID NO: 1552297 - DNA, 25 bp, Homo sapien
tctgttgttcaagggccttggggaa

SEQ ID NO: 1552298 - DNA, 25 bp, Homo sapien
attctgttgttcaagggccttgggg

SEQ ID NO: 1552299 - DNA, 25 bp, Homo sapien
aaaccggccatagttccgctccttg

SEQ ID NO: 1552300 - DNA, 25 bp, Homo sapien
tccttggagcggaaatacttccgag

SEQ ID NO: 1552301 - DNA, 25 bp, Homo sapien
ccggccatagttccgctccttggag

SEQ ID NO: 1552302 - DNA, 25 bp, Homo sapien
cgagtaacctgagcttccgggtatc

SEQ ID NO: 1552303 - DNA, 25 bp, Homo sapien
tctaaaagaccctgagtaggccgga

SEQ ID NO: 1552304 - DNA, 25 bp, Homo sapien
cagcctaagggagaaacagatcaga

SEQ ID NO: 1552305 - DNA, 25 bp, Homo sapien
caacaaagtaacatgcagcctaagg

SEQ ID NO: 1552306 - DNA, 25 bp, Homo sapien
gaatgggacatagttcctgcaacaa

SEQ ID NO: 1552307 - DNA, 25 bp, Homo sapien
aagatggtggcggcctcgctttccg

SEQ ID NO: 1552308 - DNA, 25 bp, Homo sapien
ccaaaagatggtggcggcctcgctt

SEQ ID NO: 1552309 - DNA, 25 bp, Homo sapien
aaaagatggtggcggcctcgctttc

SEQ ID NO: 1552310 - DNA, 25 bp, Homo sapien
gatggtggcggcctcgctttccggg

SEQ ID NO: 1552311 - DNA, 25 bp, Homo sapien
ccaagtgcgggaggagagcaaactt

SEQ ID NO: 1552312 - DNA, 25 bp, Homo sapien
gggagcgcctattcccaagcacagg

SEQ ID NO: 1552313 - DNA, 25 bp, Homo sapien
aactagcggcgctgcttgccaagtg

SEQ ID NO: 1552314 - DNA, 25 bp, Homo sapien
tctccatcccaagactgatggctgg

SEQ ID NO: 1552315 - DNA, 25 bp, Homo sapien
tggagcttccagtaaaaagggcgct

SEQ ID NO: 1552316 - DNA, 25 bp, Homo sapien
tgtatcaatagcaggagccaaccca

SEQ ID NO: 1552317 - DNA, 25 bp, Homo sapien
tacaaccctacacagtaacgactat

SEQ ID NO: 1552318 - DNA, 25 bp, Homo sapien
aacaggagcgcggatcataggtaac

SEQ ID NO: 1552319 - DNA, 25 bp, Homo sapien
tctttgcaaattcggaggcggtgaa

SEQ ID NO: 1552320 - DNA, 25 bp, Homo sapien
tctctatcccggataaacggcggta

SEQ ID NO: 1552321 - DNA, 25 bp, Homo sapien
ggcggtaaacatccccacgcattgg

SEQ ID NO: 1552322 - DNA, 25 bp, Homo sapien
tgctgtcagcacgatggagtctcta

SEQ ID NO: 1552323 - DNA, 25 bp, Homo sapien
gatgcaattgctgagaatttcacac

SEQ ID NO: 1552324 - DNA, 25 bp, Homo sapien
gacagaaatagggtaacagaatgga

SEQ ID NO: 1552325 - DNA, 25 bp, Homo sapien
gatacaagttcgcatatagaaattc

SEQ ID NO: 1552326 - DNA, 25 bp, Homo sapien
gaggcttccgtatttgtctaacagg

SEQ ID NO: 1552327 - DNA, 25 bp, Homo sapien
tctggggaaggtcatagttctgaga

SEQ ID NO: 1552328 - DNA, 25 bp, Homo sapien
acatcgccaagtcaatcctaggcca

SEQ ID NO: 1552329 - DNA, 25 bp, Homo sapien
gcccacatcgccaagtcaatcctag

SEQ ID NO: 1552330 - DNA, 25 bp, Homo sapien
cccacatcgccaagtcaatcctagg

SEQ ID NO: 1552331 - DNA, 25 bp, Homo sapien
ccctcagaaataacgccacagatct

SEQ ID NO: 1552332 - DNA, 25 bp, Homo sapien
acagccacatccttgaatgtcacag

SEQ ID NO: 1552333 - DNA, 25 bp, Homo sapien
ctggagaagaccacagccacatcct

SEQ ID NO: 1552334 - DNA, 25 bp, Homo sapien
ccacatccttgaatgtcacagcctc

SEQ ID NO: 1552335 - DNA, 25 bp, Homo sapien
gccacatccttgaatgtcacagcct

SEQ ID NO: 1552336 - DNA, 25 bp, Homo sapien
taagatcgagcagtcgcagttcctc

SEQ ID NO: 1552337 - DNA, 25 bp, Homo sapien
tcctctgggtaagatcgagcagtcg

SEQ ID NO: 1552338 - DNA, 25 bp, Homo sapien
tctgggtaagatcgagcagtcgcag

SEQ ID NO: 1552339 - DNA, 25 bp, Homo sapien
acagcttcctctgggtaagatcgag

SEQ ID NO: 1552340 - DNA, 25 bp, Homo sapien
gagattctcaagggaactgaagttc

SEQ ID NO: 1552341 - DNA, 25 bp, Homo sapien
cagggtcagagagtgcctgtcctca

SEQ ID NO: 1552342 - DNA, 25 bp, Homo sapien
tctgcttccaattgggataccatat

SEQ ID NO: 1552343 - DNA, 25 bp, Homo sapien
gtttctgtttccatcatccaaagct

SEQ ID NO: 1552344 - DNA, 25 bp, Homo sapien
gggtttctgtttccatcatccaaag

SEQ ID NO: 1552345 - DNA, 25 bp, Homo sapien
ttcttctgcttccaattgggatacc

SEQ ID NO: 1552346 - DNA, 25 bp, Homo sapien
gcttaacaaatactccaacggcggc

SEQ ID NO: 1552347 - DNA, 25 bp, Homo sapien
caatgaggagagctaattagaagcc

SEQ ID NO: 1552348 - DNA, 25 bp, Homo sapien
gaagccatggaagagaagggaactt

SEQ ID NO: 1552349 - DNA, 25 bp, Homo sapien
taaatttaaacatagaaggcctctc

SEQ ID NO: 1552350 - DNA, 25 bp, Homo sapien
actggcgcatgccactacactcagc

SEQ ID NO: 1552351 - DNA, 25 bp, Homo sapien
cgggtagcggggattactggcgcat

SEQ ID NO: 1552352 - DNA, 25 bp, Homo sapien
acactcagccaatttttgtattttt

SEQ ID NO: 1552353 - DNA, 25 bp, Homo sapien
tcctcagcctcccgggtagcgggga

SEQ ID NO: 1552354 - DNA, 25 bp, Homo sapien
aaaatcaggtagctgcagggcaaca

SEQ ID NO: 1552355 - DNA, 25 bp, Homo sapien
aacatgatccatgtagaaccgtaag

SEQ ID NO: 1552356 - DNA, 25 bp, Homo sapien
cttgataaaccaggcgaaaggtgac

SEQ ID NO: 1552357 - DNA, 25 bp, Homo sapien
catacaggtgtaaacgaagagtggg

SEQ ID NO: 1552358 - DNA, 25 bp, Homo sapien
tatgtattcccgcaagaatgctggg

SEQ ID NO: 1552359 - DNA, 25 bp, Homo sapien
gaaacctgaatagagtcaccttgta

SEQ ID NO: 1552360 - DNA, 25 bp, Homo sapien
gacacctggttaattcacttgcaac

SEQ ID NO: 1552361 - DNA, 25 bp, Homo sapien
gtttccagatttgccagcaggacag

SEQ ID NO: 1552362 - DNA, 25 bp, Homo sapien
gtatgaacattcggatgaaggggaa

SEQ ID NO: 1552363 - DNA, 25 bp, Homo sapien
gccttgggctataactgaagcccct

SEQ ID NO: 1552364 - DNA, 25 bp, Homo sapien
ctgtatgaacattcggatgaagggg

SEQ ID NO: 1552365 - DNA, 25 bp, Homo sapien
cttgggctataactgaagccccttc

SEQ ID NO: 1552366 - DNA, 25 bp, Homo sapien
gaagcaatcaccagattcatgacat

SEQ ID NO: 1552367 - DNA, 25 bp, Homo sapien
attgaagcaatcaccagattcatga

SEQ ID NO: 1552368 - DNA, 25 bp, Homo sapien
atcaccagattcatgacatctattg

SEQ ID NO: 1552369 - DNA, 25 bp, Homo sapien
ctgtatgattagattgataagaatg

SEQ ID NO: 1552370 - DNA, 25 bp, Homo sapien
cacccaggtggactcgaagatttga

SEQ ID NO: 1552371 - DNA, 25 bp, Homo sapien
tctgatgggcttcaagacgtgcact

SEQ ID NO: 1552372 - DNA, 25 bp, Homo sapien
taatggtgaattgtggctgaagccc

SEQ ID NO: 1552373 - DNA, 25 bp, Homo sapien
taatgaatgataagacccgtgctgc

SEQ ID NO: 1552374 - DNA, 25 bp, Homo sapien
taactagatcttaccaagagagcca

SEQ ID NO: 1552375 - DNA, 25 bp, Homo sapien
tacgagttctattcctgttcatggt

SEQ ID NO: 1552376 - DNA, 25 bp, Homo sapien
gcatggactagccaaaaacttgaag

SEQ ID NO: 1552377 - DNA, 25 bp, Homo sapien
gcattcagacaaaagttggtaacac

SEQ ID NO: 1552378 - DNA, 25 bp, Homo sapien
tcacactttcgcaccatcagagcaa

SEQ ID NO: 1552379 - DNA, 25 bp, Homo sapien
tgtaatctttggactctagagcaga

SEQ ID NO: 1552380 - DNA, 25 bp, Homo sapien
cagaatgcttaaactagtggaggaa

SEQ ID NO: 1552381 - DNA, 25 bp, Homo sapien
tgctgcacaccacttacagagtcct

SEQ ID NO: 1552382 - DNA, 25 bp, Homo sapien
aattaatggcatcaacgaggtcaga

SEQ ID NO: 1552383 - DNA, 25 bp, Homo sapien
gaaaagcctgagtcgaaatggagca

SEQ ID NO: 1552384 - DNA, 25 bp, Homo sapien
gattccttcctcaagtggactgcaa

SEQ ID NO: 1552385 - DNA, 25 bp, Homo sapien
aacctgattttgtggaggaactgcc

SEQ ID NO: 1552386 - DNA, 25 bp, Homo sapien
gagcaaaatgtagcaataactcctg

SEQ ID NO: 1552387 - DNA, 25 bp, Homo sapien
tgtcaggtacaattggactggaatg

SEQ ID NO: 1552388 - DNA, 25 bp, Homo sapien
cacctggtaatatgaggtctctgta

SEQ ID NO: 1552389 - DNA, 25 bp, Homo sapien
taactcctgtagttcaaacacctgg

SEQ ID NO: 1552390 - DNA, 25 bp, Homo sapien
ttcgccctcctgcagcggaagtaca

SEQ ID NO: 1552391 - DNA, 25 bp, Homo sapien
gatagatgacggctgcttcgccctc

SEQ ID NO: 1552392 - DNA, 25 bp, Homo sapien
cagaatgcccgagcggaaacaggct

SEQ ID NO: 1552393 - DNA, 25 bp, Homo sapien
tgcaacggcttctgcactacacttc

SEQ ID NO: 1552394 - DNA, 25 bp, Homo sapien
gaaagctcgccgtagatgcagaggt

SEQ ID NO: 1552395 - DNA, 25 bp, Homo sapien
tagatgcagaggttccgcgctgact

SEQ ID NO: 1552396 - DNA, 25 bp, Homo sapien
caggccaggaaagctcgccgtagat

SEQ ID NO: 1552397 - DNA, 25 bp, Homo sapien
gctcgccgtagatgcagaggttccg

SEQ ID NO: 1552398 - DNA, 25 bp, Homo sapien
gtaatctcaatcttatggccaataa

SEQ ID NO: 1552399 - DNA, 25 bp, Homo sapien
caacatcaagcagatgtaatctcaa

SEQ ID NO: 1552400 - DNA, 25 bp, Homo sapien
agcagatgtaatctcaatcttatgg

SEQ ID NO: 1552401 - DNA, 25 bp, Homo sapien
catcaagcagatgtaatctcaatct

SEQ ID NO: 1552402 - DNA, 25 bp, Homo sapien
tctgggcaaggtccagcaaccccag

SEQ ID NO: 1552403 - DNA, 25 bp, Homo sapien
ctttctctgggcaaggtccagcaac

SEQ ID NO: 1552404 - DNA, 25 bp, Homo sapien
ctgacagcaggttcctgaagttctc

SEQ ID NO: 1552405 - DNA, 25 bp, Homo sapien
actgacagcaggttcctgaagttct

SEQ ID NO: 1552406 - DNA, 25 bp, Homo sapien
acatctagtttgaagggttgatagc

SEQ ID NO: 1552407 - DNA, 25 bp, Homo sapien
ctgtctccatcatccgaagcttgtc

SEQ ID NO: 1552408 - DNA, 25 bp, Homo sapien
tctccatcatccgaagcttgtcttc

SEQ ID NO: 1552409 - DNA, 25 bp, Homo sapien
tcccaactgtaatatcacatctagt

SEQ ID NO: 1552410 - DNA, 25 bp, Homo sapien
caaagactcagagctccatggttct

SEQ ID NO: 1552411 - DNA, 25 bp, Homo sapien
ccgcaaagactcagagctccatggt

SEQ ID NO: 1552412 - DNA, 25 bp, Homo sapien
cccgcaaagactcagagctccatgg

SEQ ID NO: 1552413 - DNA, 25 bp, Homo sapien
agactcagagctccatggttctcac

SEQ ID NO: 1552414 - DNA, 25 bp, Homo sapien
aaggtcatgtgcaagctgctgcagt

SEQ ID NO: 1552415 - DNA, 25 bp, Homo sapien
caagctgctgcagtaaaccagggcg

SEQ ID NO: 1552416 - DNA, 25 bp, Homo sapien
gtaaaccagggcgatgaattctggg

SEQ ID NO: 1552417 - DNA, 25 bp, Homo sapien
ggtagaaggaggaaggtcatgtgca

SEQ ID NO: 1552418 - DNA, 25 bp, Homo sapien
tgaggtaagaacatcccaggcagac

SEQ ID NO: 1552419 - DNA, 25 bp, Homo sapien
aagaaatacatgtatgccgggcaca

SEQ ID NO: 1552420 - DNA, 25 bp, Homo sapien
acataaaggaagtaggctgggagcc

SEQ ID NO: 1552421 - DNA, 25 bp, Homo sapien
ttagtccagcatagtggcaagtgcc

SEQ ID NO: 1552422 - DNA, 25 bp, Homo sapien
tgaagggtatctatctcattttgat

SEQ ID NO: 1552423 - DNA, 25 bp, Homo sapien
cttgaagggtatctatctcattttg

SEQ ID NO: 1552424 - DNA, 25 bp, Homo sapien
aagggtatctatctcattttgattc

SEQ ID NO: 1552425 - DNA, 25 bp, Homo sapien
ttcttgaagggtatctatctcattt

SEQ ID NO: 1552426 - DNA, 25 bp, Homo sapien
gactagattctcctgtccacacctg

SEQ ID NO: 1552427 - DNA, 25 bp, Homo sapien
gctgacacctactctgataattctg

SEQ ID NO: 1552428 - DNA, 25 bp, Homo sapien
tttgccagcatataaggtcttcata

SEQ ID NO: 1552429 - DNA, 25 bp, Homo sapien
taaattgttcccatatttgccagca

SEQ ID NO: 1552430 - DNA, 25 bp, Homo sapien
tgagctgtaacctatgcccttcccg

SEQ ID NO: 1552431 - DNA, 25 bp, Homo sapien
gaagttcaagattagagccaacact

SEQ ID NO: 1552432 - DNA, 25 bp, Homo sapien
ttatgctatgctgggatgattcctt

SEQ ID NO: 1552433 - DNA, 25 bp, Homo sapien
tcaacatttacatgaggcttgtctc

SEQ ID NO: 1552434 - DNA, 25 bp, Homo sapien
tatgtcttgtctctagagtgacctc

SEQ ID NO: 1552435 - DNA, 25 bp, Homo sapien
tacctgacatctgtagaggttctct

SEQ ID NO: 1552436 - DNA, 25 bp, Homo sapien
agacaggagttctggttggagctcc

SEQ ID NO: 1552437 - DNA, 25 bp, Homo sapien
tggagctccgggcatatacctgaca

SEQ ID NO: 1552438 - DNA, 25 bp, Homo sapien
cctgaaggtgggaattacggctgaa

SEQ ID NO: 1552439 - DNA, 25 bp, Homo sapien
tcttggagatgcgaactctgactaa

SEQ ID NO: 1552440 - DNA, 25 bp, Homo sapien
tgaagatatgagttccagatgaagc

SEQ ID NO: 1552441 - DNA, 25 bp, Homo sapien
tggacttgctgatggtcttggagat

SEQ ID NO: 1552442 - DNA, 25 bp, Homo sapien
ttgaagatgtgaagtctgactgaag

SEQ ID NO: 1552443 - DNA, 25 bp, Homo sapien
atggactctctgatgggcttgaaga

SEQ ID NO: 1552444 - DNA, 25 bp, Homo sapien
tgtgaagtctgactgaagctcttac

SEQ ID NO: 1552445 - DNA, 25 bp, Homo sapien
ggactctctgatgggcttgaagatg

SEQ ID NO: 1552446 - DNA, 25 bp, Homo sapien
aatctgaagacaacgaactcttact

SEQ ID NO: 1552447 - DNA, 25 bp, Homo sapien
atctgaagacaacgaactcttacta

SEQ ID NO: 1552448 - DNA, 25 bp, Homo sapien
gaatctgaagacaacgaactcttac

SEQ ID NO: 1552449 - DNA, 25 bp, Homo sapien
gaagacaacgaactcttactaaagc

SEQ ID NO: 1552450 - DNA, 25 bp, Homo sapien
taagtcttgaagagcacccctatca

SEQ ID NO: 1552451 - DNA, 25 bp, Homo sapien
caaggtcacgatcatgcagcagtaa

SEQ ID NO: 1552452 - DNA, 25 bp, Homo sapien
tttgggctctgcttgaaactggtca

SEQ ID NO: 1552453 - DNA, 25 bp, Homo sapien
tgaaggcttcactcctgcatattgc

SEQ ID NO: 1552454 - DNA, 25 bp, Homo sapien
cagaaggttgatgcatggttcaaat

SEQ ID NO: 1552455 - DNA, 25 bp, Homo sapien
tcaaatggcaaaccataacccacag

SEQ ID NO: 1552456 - DNA, 25 bp, Homo sapien
cacattgtatgtgcacaaatcaaaa

SEQ ID NO: 1552457 - DNA, 25 bp, Homo sapien
tagctaatcaataacacagtagggc

SEQ ID NO: 1552458 - DNA, 25 bp, Homo sapien
catgtaggccgctttagaaggagct

SEQ ID NO: 1552459 - DNA, 25 bp, Homo sapien
aagctgtactgtaactctgaaagtg

SEQ ID NO: 1552460 - DNA, 25 bp, Homo sapien
tcattcaggttcaggtcaagttgct

SEQ ID NO: 1552461 - DNA, 25 bp, Homo sapien
gaatttttggacactaagctgtact

SEQ ID NO: 1552462 - DNA, 25 bp, Homo sapien
gcattgggtaattgtagggtgtggc

SEQ ID NO: 1552463 - DNA, 25 bp, Homo sapien
actggctgcttggcccaggcattcc

SEQ ID NO: 1552464 - DNA, 25 bp, Homo sapien
catggcctgcaatggtgaaggacac

SEQ ID NO: 1552465 - DNA, 25 bp, Homo sapien
cccaggcattcctgaagaaggcagc

SEQ ID NO: 1552466 - DNA, 25 bp, Homo sapien
taatggagggaaaagagtcaaacac

SEQ ID NO: 1552467 - DNA, 25 bp, Homo sapien
catgagcccttaggtaccttgagga

SEQ ID NO: 1552468 - DNA, 25 bp, Homo sapien
caacgttgtcttagattcccggcca

SEQ ID NO: 1552469 - DNA, 25 bp, Homo sapien
tacacatgcccatattacaacgttg

SEQ ID NO: 1552470 - DNA, 25 bp, Homo sapien
tcttttcagggaagacgatatttcc

SEQ ID NO: 1552471 - DNA, 25 bp, Homo sapien
agcaatgtttcgtttagcctggcgg

SEQ ID NO: 1552472 - DNA, 25 bp, Homo sapien
tttcaggaagttgagtgaggcctga

SEQ ID NO: 1552473 - DNA, 25 bp, Homo sapien
gtattccttacattcgtgcccagtt

SEQ ID NO: 1552474 - DNA, 25 bp, Homo sapien
catatatcagataacactgccaaga

SEQ ID NO: 1552475 - DNA, 25 bp, Homo sapien
ccaagagttctagatgcgtccaaaa

SEQ ID NO: 1552476 - DNA, 25 bp, Homo sapien
agaaaatccagtcaaagtaggtttg

SEQ ID NO: 1552477 - DNA, 25 bp, Homo sapien
tagtcggaagtattttcgcccaggc

SEQ ID NO: 1552478 - DNA, 25 bp, Homo sapien
agcactagcgtgctgggtattctgg

SEQ ID NO: 1552479 - DNA, 25 bp, Homo sapien
cagaatgagctgtaggaaggtggaa

SEQ ID NO: 1552480 - DNA, 25 bp, Homo sapien
tggtggagtccttgtcgtcgttccg

SEQ ID NO: 1552481 - DNA, 25 bp, Homo sapien
gctggcgcagcctggcagcggaaag

SEQ ID NO: 1552482 - DNA, 25 bp, Homo sapien
gctgctccgctctgcgaagatctga

SEQ ID NO: 1552483 - DNA, 25 bp, Homo sapien
gcggaaagggcggagcttcactcct

SEQ ID NO: 1552484 - DNA, 25 bp, Homo sapien
gcgaagatctgagtacaggcccgcc

SEQ ID NO: 1552485 - DNA, 25 bp, Homo sapien
caggaaagggaaatgtaaagttgtg

SEQ ID NO: 1552486 - DNA, 25 bp, Homo sapien
gaaatgtaaagttgtgaaattctgt

SEQ ID NO: 1552487 - DNA, 25 bp, Homo sapien
atgtaaagttgtgaaattctgttga

SEQ ID NO: 1552488 - DNA, 25 bp, Homo sapien
ggaaatgtaaagttgtgaaattctg

SEQ ID NO: 1552489 - DNA, 25 bp, Homo sapien
gttggctagtagattggccagggct

SEQ ID NO: 1552490 - DNA, 25 bp, Homo sapien
ctagtagattggccagggcttccaa

SEQ ID NO: 1552491 - DNA, 25 bp, Homo sapien
tggctagtagattggccagggcttc

SEQ ID NO: 1552492 - DNA, 25 bp, Homo sapien
ggctagtagattggccagggcttcc

SEQ ID NO: 1552493 - DNA, 25 bp, Homo sapien
tggaggttggtgtcagcatgggctc

SEQ ID NO: 1552494 - DNA, 25 bp, Homo sapien
gggcgctcaccaggaatgtggagaa

SEQ ID NO: 1552495 - DNA, 25 bp, Homo sapien
agtgtcgcccgcagggatgccgaca

SEQ ID NO: 1552496 - DNA, 25 bp, Homo sapien
agggatgccgacatgctggaggttg

SEQ ID NO: 1552497 - DNA, 25 bp, Homo sapien
ctatttacaaatgacagatctgaaa

SEQ ID NO: 1552498 - DNA, 25 bp, Homo sapien
aaatgacagatctgaaactggggct

SEQ ID NO: 1552499 - DNA, 25 bp, Homo sapien
tgacagatctgaaactggggctcac

SEQ ID NO: 1552500 - DNA, 25 bp, Homo sapien
tatttacaaatgacagatctgaaac

SEQ ID NO: 1552501 - DNA, 25 bp, Homo sapien
cgcttccaagtcgcaagacgctgta

SEQ ID NO: 1552502 - DNA, 25 bp, Homo sapien
caagtcgcaagacgctgtaagctcc

SEQ ID NO: 1552503 - DNA, 25 bp, Homo sapien
tctgaatccgcttccaagtcgcaag

SEQ ID NO: 1552504 - DNA, 25 bp, Homo sapien
tgtaagctccaagtccacgcagagc

SEQ ID NO: 1552505 - DNA, 25 bp, Homo sapien
gatggtgaatggtagccccggatcc

SEQ ID NO: 1552506 - DNA, 25 bp, Homo sapien
tggtgaatggtagccccggatccct

SEQ ID NO: 1552507 - DNA, 25 bp, Homo sapien
gtgaatggtagccccggatccctgg

SEQ ID NO: 1552508 - DNA, 25 bp, Homo sapien
atggtgaatggtagccccggatccc

SEQ ID NO: 1552509 - DNA, 25 bp, Homo sapien
ttgaactagtgagcccacaagcctg

SEQ ID NO: 1552510 - DNA, 25 bp, Homo sapien
tctgtcttggtgactcaggagacct

SEQ ID NO: 1552511 - DNA, 25 bp, Homo sapien
ctgccttcttgaactagtgagccca

SEQ ID NO: 1552512 - DNA, 25 bp, Homo sapien
tagtgagcccacaagcctggttttg

SEQ ID NO: 1552513 - DNA, 25 bp, Homo sapien
catgactaagttttcggaggcctcc

SEQ ID NO: 1552514 - DNA, 25 bp, Homo sapien
ggatcacgagggcagatttctccct

SEQ ID NO: 1552515 - DNA, 25 bp, Homo sapien
ggtgtagcccttcctcgctgtctct

SEQ ID NO: 1552516 - DNA, 25 bp, Homo sapien
cacaaatgctatttcaccctgcagg

SEQ ID NO: 1552517 - DNA, 25 bp, Homo sapien
ttctcccgcgtcctcctctggggat

SEQ ID NO: 1552518 - DNA, 25 bp, Homo sapien
gcgtcctcctctggggattctttag

SEQ ID NO: 1552519 - DNA, 25 bp, Homo sapien
aagccattgggttctcccgcgtcct

SEQ ID NO: 1552520 - DNA, 25 bp, Homo sapien
gggattctttagaatcaccacgttc

SEQ ID NO: 1552521 - DNA, 25 bp, Homo sapien
tttattttgaagcacacatctacac

SEQ ID NO: 1552522 - DNA, 25 bp, Homo sapien
ggtttattttgaagcacacatctac

SEQ ID NO: 1552523 - DNA, 25 bp, Homo sapien
gttctcactgaagagccaataatgg

SEQ ID NO: 1552524 - DNA, 25 bp, Homo sapien
gacaggtttattttgaagcacacat

SEQ ID NO: 1552525 - DNA, 25 bp, Homo sapien
ctggaacttaatcataccgtcttcc

SEQ ID NO: 1552526 - DNA, 25 bp, Homo sapien
tggaacttaatcataccgtcttcct

SEQ ID NO: 1552527 - DNA, 25 bp, Homo sapien
gggctttatccaatagtgccagctc

SEQ ID NO: 1552528 - DNA, 25 bp, Homo sapien
gccacgtccttgaatatcacccttt

SEQ ID NO: 1552529 - DNA, 25 bp, Homo sapien
ggtgaggacaacagccacgtccttg

SEQ ID NO: 1552530 - DNA, 25 bp, Homo sapien
cttccttggtgaggacaacagccac

SEQ ID NO: 1552531 - DNA, 25 bp, Homo sapien
tccagaacattggataaacattgac

SEQ ID NO: 1552532 - DNA, 25 bp, Homo sapien
acaaatagatcaaggtccttggtgg

SEQ ID NO: 1552533 - DNA, 25 bp, Homo sapien
tatccagaacattggataaacattg

SEQ ID NO: 1552534 - DNA, 25 bp, Homo sapien
tagatcaaggtccttggtggtgtgt

SEQ ID NO: 1552535 - DNA, 25 bp, Homo sapien
gctttgccatgctgtgatatcctga

SEQ ID NO: 1552536 - DNA, 25 bp, Homo sapien
tgccatgctgtgatatcctgatttt

SEQ ID NO: 1552537 - DNA, 25 bp, Homo sapien
catgctgtgatatcctgatttttga

SEQ ID NO: 1552538 - DNA, 25 bp, Homo sapien
caggctttgccatgctgtgatatcc

SEQ ID NO: 1552539 - DNA, 25 bp, Homo sapien
acattcttgggactcatgatgatca

SEQ ID NO: 1552540 - DNA, 25 bp, Homo sapien
tctggggctcggtcattatgttggc

SEQ ID NO: 1552541 - DNA, 25 bp, Homo sapien
cagggtcctctcctttacattcttg

SEQ ID NO: 1552542 - DNA, 25 bp, Homo sapien
tcctttacattcttgggactcatga

SEQ ID NO: 1552543 - DNA, 25 bp, Homo sapien
gtggtaatacatggactgcattatg

SEQ ID NO: 1552544 - DNA, 25 bp, Homo sapien
ggtaatacatggactgcattatgtt

SEQ ID NO: 1552545 - DNA, 25 bp, Homo sapien
taatacatggactgcattatgttgt

SEQ ID NO: 1552546 - DNA, 25 bp, Homo sapien
tacatggactgcattatgttgttca

SEQ ID NO: 1552547 - DNA, 25 bp, Homo sapien
ccataggccattcgtggaattcata

SEQ ID NO: 1552548 - DNA, 25 bp, Homo sapien
gccagagtgagttttacaatgaacg

SEQ ID NO: 1552549 - DNA, 25 bp, Homo sapien
gcccataggccattcgtggaattca

SEQ ID NO: 1552550 - DNA, 25 bp, Homo sapien
ccagagtgagttttacaatgaacga

SEQ ID NO: 1552551 - DNA, 25 bp, Homo sapien
catgatggttataaaggaaggagtt

SEQ ID NO: 1552552 - DNA, 25 bp, Homo sapien
gtgtggactccatgatggttataaa

SEQ ID NO: 1552553 - DNA, 25 bp, Homo sapien
ccatgatggttataaaggaaggagt

SEQ ID NO: 1552554 - DNA, 25 bp, Homo sapien
tgcatcacatttgtagggcatctcc

SEQ ID NO: 1552555 - DNA, 25 bp, Homo sapien
atgcatcacatttgtagggcatctc

SEQ ID NO: 1552556 - DNA, 25 bp, Homo sapien
cactcttcacttttatagggctttt

SEQ ID NO: 1552557 - DNA, 25 bp, Homo sapien
ggagctctgatcaaagcccttccca

SEQ ID NO: 1552558 - DNA, 25 bp, Homo sapien
gactctctgatggacaagaaggttg

SEQ ID NO: 1552559 - DNA, 25 bp, Homo sapien
ggttggagctctgatcaaagccctt

SEQ ID NO: 1552560 - DNA, 25 bp, Homo sapien
gaaacctccagtggacttgaagaac

SEQ ID NO: 1552561 - DNA, 25 bp, Homo sapien
acttgaagaacggagcttgaactaa

SEQ ID NO: 1552562 - DNA, 25 bp, Homo sapien
acctccagtggacttgaagaacgga

SEQ ID NO: 1552563 - DNA, 25 bp, Homo sapien
cggagcttgaactaaagcacttgcc

SEQ ID NO: 1552564 - DNA, 25 bp, Homo sapien
ctatacgcaaaatcctttccacaca

SEQ ID NO: 1552565 - DNA, 25 bp, Homo sapien
tatacgcaaaatcctttccacacac

SEQ ID NO: 1552566 - DNA, 25 bp, Homo sapien
ttttctcgagtgtgaactcagatga

SEQ ID NO: 1552567 - DNA, 25 bp, Homo sapien
ctcgagtgtgaactcagatgagtgt

SEQ ID NO: 1552568 - DNA, 25 bp, Homo sapien
tggtttttctcgagtgtgaactcag

SEQ ID NO: 1552569 - DNA, 25 bp, Homo sapien
tctcgagtgtgaactcagatgagtg

SEQ ID NO: 1552570 - DNA, 25 bp, Homo sapien
aaaatatgaactgtaactaaagcac

SEQ ID NO: 1552571 - DNA, 25 bp, Homo sapien
tatgaactgtaactaaagcactttc

SEQ ID NO: 1552572 - DNA, 25 bp, Homo sapien
tgaactgtaactaaagcactttcca

SEQ ID NO: 1552573 - DNA, 25 bp, Homo sapien
aatatgaactgtaactaaagcactt

SEQ ID NO: 1552574 - DNA, 25 bp, Homo sapien
cttatgtagtttttgatgagtcgga

SEQ ID NO: 1552575 - DNA, 25 bp, Homo sapien
tatgtagtttttgatgagtcggaag

SEQ ID NO: 1552576 - DNA, 25 bp, Homo sapien
gcttatgtagtttttgatgagtcgg

SEQ ID NO: 1552577 - DNA, 25 bp, Homo sapien
tgcttatgtagtttttgatgagtcg

SEQ ID NO: 1552578 - DNA, 25 bp, Homo sapien
cccgagtcggccgtgttgcagaatc

SEQ ID NO: 1552579 - DNA, 25 bp, Homo sapien
tatctgtgcgggtggcgctttagcc

SEQ ID NO: 1552580 - DNA, 25 bp, Homo sapien
caatgccgggcttatttagtggagg

SEQ ID NO: 1552581 - DNA, 25 bp, Homo sapien
ggaacacagggcacatgcattgatg

SEQ ID NO: 1552582 - DNA, 25 bp, Homo sapien
gttggctgggaagtcacctccagcc

SEQ ID NO: 1552583 - DNA, 25 bp, Homo sapien
cttctctagcatcgggtcagtggtg

SEQ ID NO: 1552584 - DNA, 25 bp, Homo sapien
tccttctctagcatcgggtcagtgg

SEQ ID NO: 1552585 - DNA, 25 bp, Homo sapien
tggctgggaagtcacctccagccgc

SEQ ID NO: 1552586 - DNA, 25 bp, Homo sapien
gagaaggtctcctcatcacacatgg

SEQ ID NO: 1552587 - DNA, 25 bp, Homo sapien
gtcttcatagacctgtacagtcgcg

SEQ ID NO: 1552588 - DNA, 25 bp, Homo sapien
aggacccctcatctcgtgttctgtc

SEQ ID NO: 1552589 - DNA, 25 bp, Homo sapien
tggagctgacgtccagaggacccct

SEQ ID NO: 1552590 - DNA, 25 bp, Homo sapien
ggtgacttggactcgtaaggagaca

SEQ ID NO: 1552591 - DNA, 25 bp, Homo sapien
tgtccctggcccgtggtgaagccgc

SEQ ID NO: 1552592 - DNA, 25 bp, Homo sapien
tcaaagctctgagtgggggtgactt

SEQ ID NO: 1552593 - DNA, 25 bp, Homo sapien
ttggactcgtaaggagacactctcc

SEQ ID NO: 1552594 - DNA, 25 bp, Homo sapien
gatctgctccgtcacactcctgtgt

SEQ ID NO: 1552595 - DNA, 25 bp, Homo sapien
gctggtttccagcacgacggtgtag

SEQ ID NO: 1552596 - DNA, 25 bp, Homo sapien
tttctaatgaccaggctgccttggg

SEQ ID NO: 1552597 - DNA, 25 bp, Homo sapien
tcataccctcagaaccaagacgtgg

SEQ ID NO: 1552598 - DNA, 25 bp, Homo sapien
tgcaaagtgtcctggtgggctcttc

SEQ ID NO: 1552599 - DNA, 25 bp, Homo sapien
cagcatgcaaagtgtcctggtgggc

SEQ ID NO: 1552600 - DNA, 25 bp, Homo sapien
caatggataaccagcatgcaaagtg

SEQ ID NO: 1552601 - DNA, 25 bp, Homo sapien
tggggagcaatggataaccagcatg

SEQ ID NO: 1552602 - DNA, 25 bp, Homo sapien
ccggccatggattgggctcttacta

SEQ ID NO: 1552603 - DNA, 25 bp, Homo sapien
cacgtgttaatccatggcttgttat

SEQ ID NO: 1552604 - DNA, 25 bp, Homo sapien
gcttgttatactgcatgcgagaccc

SEQ ID NO: 1552605 - DNA, 25 bp, Homo sapien
ccatgcccaggtgtctaaatcatta

SEQ ID NO: 1552606 - DNA, 25 bp, Homo sapien
ggaatgtcttcagtggcattagttg

SEQ ID NO: 1552607 - DNA, 25 bp, Homo sapien
tgtcttcagtggcattagttggagg

SEQ ID NO: 1552608 - DNA, 25 bp, Homo sapien
ctctggatgactccccggatagcag

SEQ ID NO: 1552609 - DNA, 25 bp, Homo sapien
tccccggatagcagctgggaatgtc

SEQ ID NO: 1552610 - DNA, 25 bp, Homo sapien
gacaaccgtcggatgaacagcttct

SEQ ID NO: 1552611 - DNA, 25 bp, Homo sapien
gcagcgagatggttacaggctcaga

SEQ ID NO: 1552612 - DNA, 25 bp, Homo sapien
caggatcacagaatagttgagctca

SEQ ID NO: 1552613 - DNA, 25 bp, Homo sapien
acaggctcagggtccattgtcacca

SEQ ID NO: 1552614 - DNA, 25 bp, Homo sapien
ggctctggatgatgatgaaacacat

SEQ ID NO: 1552615 - DNA, 25 bp, Homo sapien
ggctcccaggatcccagccgcaagg

SEQ ID NO: 1552616 - DNA, 25 bp, Homo sapien
gcaaggagcccgatggcagagcctc

SEQ ID NO: 1552617 - DNA, 25 bp, Homo sapien
gctctggatgatgatgaaacacatg

SEQ ID NO: 1552618 - DNA, 25 bp, Homo sapien
tcagatgggctcctcaggagtcgct

SEQ ID NO: 1552619 - DNA, 25 bp, Homo sapien
gggctcctcaggagtcgctatcacc

SEQ ID NO: 1552620 - DNA, 25 bp, Homo sapien
gggtgttggtttcatctctgtttcc

SEQ ID NO: 1552621 - DNA, 25 bp, Homo sapien
gagtcgctatcaccctccctgatgg

SEQ ID NO: 1552622 - DNA, 25 bp, Homo sapien
cttcagctgacaggagagttgccca

SEQ ID NO: 1552623 - DNA, 25 bp, Homo sapien
ttcagctgacaggagagttgcccac

SEQ ID NO: 1552624 - DNA, 25 bp, Homo sapien
ctgacaggagagttgcccacatttc

SEQ ID NO: 1552625 - DNA, 25 bp, Homo sapien
cagctgacaggagagttgcccacat

SEQ ID NO: 1552626 - DNA, 25 bp, Homo sapien
tccacgtggatagagaggtacaaag

SEQ ID NO: 1552627 - DNA, 25 bp, Homo sapien
gctttgcttgcacaacgtgtcacgg

SEQ ID NO: 1552628 - DNA, 25 bp, Homo sapien
cagacagggatgagcctctgatgct

SEQ ID NO: 1552629 - DNA, 25 bp, Homo sapien
tgggaccaaggatggcaccgagtca

SEQ ID NO: 1552630 - DNA, 25 bp, Homo sapien
aagctccagacaagtgactggagcg

SEQ ID NO: 1552631 - DNA, 25 bp, Homo sapien
tcaagctccagacaagtgactggag

SEQ ID NO: 1552632 - DNA, 25 bp, Homo sapien
ctccagacaagtgactggagcggag

SEQ ID NO: 1552633 - DNA, 25 bp, Homo sapien
ttcaagctccagacaagtgactgga

SEQ ID NO: 1552634 - DNA, 25 bp, Homo sapien
tcgctctgccgcggtcgctgcgagt

SEQ ID NO: 1552635 - DNA, 25 bp, Homo sapien
gcgggcgtctcctcgcttcccggcg

SEQ ID NO: 1552636 - DNA, 25 bp, Homo sapien
ggtcgctgcgagtccagctcccgga

SEQ ID NO: 1552637 - DNA, 25 bp, Homo sapien
ccgcgggcgtctcctcgcttcccgg

SEQ ID NO: 1552638 - DNA, 25 bp, Homo sapien
aggacagcaccagtagcgccaccag

SEQ ID NO: 1552639 - DNA, 25 bp, Homo sapien
acgcggcggccatggctcgggccat

SEQ ID NO: 1552640 - DNA, 25 bp, Homo sapien
ccaggacagcaccagtagcgccacc

SEQ ID NO: 1552641 - DNA, 25 bp, Homo sapien
ggccacgcggcggccatggctcggg

SEQ ID NO: 1552642 - DNA, 25 bp, Homo sapien
gcgacttgcacgctggggccctgga

SEQ ID NO: 1552643 - DNA, 25 bp, Homo sapien
gacttgcacgctggggccctggatc

SEQ ID NO: 1552644 - DNA, 25 bp, Homo sapien
ggcgcgacttgcacgctggggccct

SEQ ID NO: 1552645 - DNA, 25 bp, Homo sapien
ctggcgcgacttgcacgctggggcc

SEQ ID NO: 1552646 - DNA, 25 bp, Homo sapien
ggtgggcgcctgcacgacgacgtcc

SEQ ID NO: 1552647 - DNA, 25 bp, Homo sapien
gaagccgggcacctgggtgggcgcc

SEQ ID NO: 1552648 - DNA, 25 bp, Homo sapien
aggtagcagggcagcgtcacggagt

SEQ ID NO: 1552649 - DNA, 25 bp, Homo sapien
acggagtcgcccaagaagccgggca

SEQ ID NO: 1552650 - DNA, 25 bp, Homo sapien
cagtctggctgccacgaattccagc

SEQ ID NO: 1552651 - DNA, 25 bp, Homo sapien
acatcctcagcgaggcattccgcag

SEQ ID NO: 1552652 - DNA, 25 bp, Homo sapien
tggaagacggccatgctgccagatt

SEQ ID NO: 1552653 - DNA, 25 bp, Homo sapien
gccgtttggactccgaatagctggg

SEQ ID NO: 1552654 - DNA, 25 bp, Homo sapien
gctgccctgcgggaacgtgacgaac

SEQ ID NO: 1552655 - DNA, 25 bp, Homo sapien
cctgcgggaacgtgacgaacaggca

SEQ ID NO: 1552656 - DNA, 25 bp, Homo sapien
ctgctgccctgcgggaacgtgacga

SEQ ID NO: 1552657 - DNA, 25 bp, Homo sapien
tgccctgcgggaacgtgacgaacag

SEQ ID NO: 1552658 - DNA, 25 bp, Homo sapien
cgcccaggtctgagtgccaggtgat

SEQ ID NO: 1552659 - DNA, 25 bp, Homo sapien
tggcacctggctcgtattgggcatc

SEQ ID NO: 1552660 - DNA, 25 bp, Homo sapien
agtacacggtgaggttcacagtcag

SEQ ID NO: 1552661 - DNA, 25 bp, Homo sapien
gtccacctggcttgagggcaccaat

SEQ ID NO: 1552662 - DNA, 25 bp, Homo sapien
gcaggggttcttgccatcgctgact

SEQ ID NO: 1552663 - DNA, 25 bp, Homo sapien
agcccggcaggggttcttgccatcg

SEQ ID NO: 1552664 - DNA, 25 bp, Homo sapien
ccggcaggggttcttgccatcgctg

SEQ ID NO: 1552665 - DNA, 25 bp, Homo sapien
gggttcttgccatcgctgacttggg

SEQ ID NO: 1552666 - DNA, 25 bp, Homo sapien
cagcattgactatggcccaagtaaa

SEQ ID NO: 1552667 - DNA, 25 bp, Homo sapien
tgggtcgtgtagacaggagtcaggg

SEQ ID NO: 1552668 - DNA, 25 bp, Homo sapien
tagacaatagggacagtgttgttta

SEQ ID NO: 1552669 - DNA, 25 bp, Homo sapien
cccaagtaaactggtgtagacaata

SEQ ID NO: 1552670 - DNA, 25 bp, Homo sapien
taggggcagtgtagactgtgctcaa

SEQ ID NO: 1552671 - DNA, 25 bp, Homo sapien
ctggggaaatgggtgtaggcagttt

SEQ ID NO: 1552672 - DNA, 25 bp, Homo sapien
tgtaggcagtttaggggcagtgtag

SEQ ID NO: 1552673 - DNA, 25 bp, Homo sapien
agtgtagactgtgctcaagggagtc

SEQ ID NO: 1552674 - DNA, 25 bp, Homo sapien
tacatagacagtggtcataggagcc

SEQ ID NO: 1552675 - DNA, 25 bp, Homo sapien
cagtgtagacactatgggagacagt

SEQ ID NO: 1552676 - DNA, 25 bp, Homo sapien
cccacagctggtggccaaaataggt

SEQ ID NO: 1552677 - DNA, 25 bp, Homo sapien
taaggcagtgtagaaaatggacaag

SEQ ID NO: 1552678 - DNA, 25 bp, Homo sapien
tcattctggccaaggtaccagttgt

SEQ ID NO: 1552679 - DNA, 25 bp, Homo sapien
tggccaaggtaccagttgttatcat

SEQ ID NO: 1552680 - DNA, 25 bp, Homo sapien
tgcgagcatcgcaggtcagggtggc

SEQ ID NO: 1552681 - DNA, 25 bp, Homo sapien
ctctgggttgctgcgagcatcgcag

SEQ ID NO: 1552682 - DNA, 25 bp, Homo sapien
ttgtccacaggacggatcaggagct

SEQ ID NO: 1552683 - DNA, 25 bp, Homo sapien
cctggcgagctcctagggcattggt

SEQ ID NO: 1552684 - DNA, 25 bp, Homo sapien
aaagttgtgttgattggtttgtcca

SEQ ID NO: 1552685 - DNA, 25 bp, Homo sapien
ttgacctggacggtcagttctgcct

SEQ ID NO: 1552686 - DNA, 25 bp, Homo sapien
caggaagatgatggcgttacgggat

SEQ ID NO: 1552687 - DNA, 25 bp, Homo sapien
atagaaataaatcccgatccccagc

SEQ ID NO: 1552688 - DNA, 25 bp, Homo sapien
aagatgatggcgttacgggatatgc

SEQ ID NO: 1552689 - DNA, 25 bp, Homo sapien
aaataaatcccgatccccagcagga

SEQ ID NO: 1552690 - DNA, 25 bp, Homo sapien
gggacacagatgacagtgccaaagg

SEQ ID NO: 1552691 - DNA, 25 bp, Homo sapien
gacacagatgacagtgccaaaggac

SEQ ID NO: 1552692 - DNA, 25 bp, Homo sapien
gagggacacagatgacagtgccaaa

SEQ ID NO: 1552693 - DNA, 25 bp, Homo sapien
tcgagggacacagatgacagtgcca

SEQ ID NO: 1552694 - DNA, 25 bp, Homo sapien
accagtgaacaaggctccctggctc

SEQ ID NO: 1552695 - DNA, 25 bp, Homo sapien
tcagcacagagcccgtagtaggtgc

SEQ ID NO: 1552696 - DNA, 25 bp, Homo sapien
taggtgctcaattacggcagctctg

SEQ ID NO: 1552697 - DNA, 25 bp, Homo sapien
ccctcatcagtcaaatgggggaaac

SEQ ID NO: 1552698 - DNA, 25 bp, Homo sapien
gagctggcacacttctccagaagga

SEQ ID NO: 1552699 - DNA, 25 bp, Homo sapien
gatcagaggtgccagttcctgccac

SEQ ID NO: 1552700 - DNA, 25 bp, Homo sapien
tgaacaaggcagatggagtaaggct

SEQ ID NO: 1552701 - DNA, 25 bp, Homo sapien
tcttgaggtgtgaaagcatcagacc

SEQ ID NO: 1552702 - DNA, 25 bp, Homo sapien
tatccgcctgggttgtaagggagca

SEQ ID NO: 1552703 - DNA, 25 bp, Homo sapien
gcttcctggacgaggcagtatccgc

SEQ ID NO: 1552704 - DNA, 25 bp, Homo sapien
ggctctggagctgacacattgaatc

SEQ ID NO: 1552705 - DNA, 25 bp, Homo sapien
ccacggtgatgacccagaatgggca

SEQ ID NO: 1552706 - DNA, 25 bp, Homo sapien
cccttaatggtatacacgtgtgtca

SEQ ID NO: 1552707 - DNA, 25 bp, Homo sapien
agttctgcctctgctattacatggg

SEQ ID NO: 1552708 - DNA, 25 bp, Homo sapien
gctttctaaggatttagccatccag

SEQ ID NO: 1552709 - DNA, 25 bp, Homo sapien
gaagtcgtcaggaaggaataatgct

SEQ ID NO: 1552710 - DNA, 25 bp, Homo sapien
cccattagctgaggcgctggcatgc

SEQ ID NO: 1552711 - DNA, 25 bp, Homo sapien
ccattagctgaggcgctggcatgct

SEQ ID NO: 1552712 - DNA, 25 bp, Homo sapien
tctggtctgtagttcgtgcagaccc

SEQ ID NO: 1552713 - DNA, 25 bp, Homo sapien
gacgtctggtctgtagttcgtgcag

SEQ ID NO: 1552714 - DNA, 25 bp, Homo sapien
tctgtagttcgtgcagaccccacac

SEQ ID NO: 1552715 - DNA, 25 bp, Homo sapien
tggtctgtagttcgtgcagacccca

SEQ ID NO: 1552716 - DNA, 25 bp, Homo sapien
gatcctgggaagagctgttctctct

SEQ ID NO: 1552717 - DNA, 25 bp, Homo sapien
gctgttctctctgctcacagctgaa

SEQ ID NO: 1552718 - DNA, 25 bp, Homo sapien
caccttgtgccctctgtctgtggat

SEQ ID NO: 1552719 - DNA, 25 bp, Homo sapien
tgctcacagctgaataggagacatg

SEQ ID NO: 1552720 - DNA, 25 bp, Homo sapien
ccccgtcgttttgaggtctggcaca

SEQ ID NO: 1552721 - DNA, 25 bp, Homo sapien
tgtcgtggaacgtgtgctgtgcacc

SEQ ID NO: 1552722 - DNA, 25 bp, Homo sapien
tggagacctatgaacttgcacctgc

SEQ ID NO: 1552723 - DNA, 25 bp, Homo sapien
agccgtcgcctcatctgtcgtggaa

SEQ ID NO: 1552724 - DNA, 25 bp, Homo sapien
aaagatcgggccctttatcctcagc

SEQ ID NO: 1552725 - DNA, 25 bp, Homo sapien
ggtcttgggccacacggtattggct

SEQ ID NO: 1552726 - DNA, 25 bp, Homo sapien
tttagaagctcaaggccagaggcca

SEQ ID NO: 1552727 - DNA, 25 bp, Homo sapien
tgctatgcagtaaaggcttaacctt

SEQ ID NO: 1552728 - DNA, 25 bp, Homo sapien
cctgggtcttgggtcgcatccatct

SEQ ID NO: 1552729 - DNA, 25 bp, Homo sapien
tgcttgcggcctgaattgcagcctc

SEQ ID NO: 1552730 - DNA, 25 bp, Homo sapien
aagtggctgcagctgacaaccttct

SEQ ID NO: 1552731 - DNA, 25 bp, Homo sapien
taggagcgtgtcctgagcaactgca

SEQ ID NO: 1552732 - DNA, 25 bp, Homo sapien
caaagcaaccaatgttcctttatct

SEQ ID NO: 1552733 - DNA, 25 bp, Homo sapien
tgctgtctgccctcaagatcataga

SEQ ID NO: 1552734 - DNA, 25 bp, Homo sapien
agacaaggagcttacgtgccaccaa

SEQ ID NO: 1552735 - DNA, 25 bp, Homo sapien
tggcccaaggtcttctctccctcaa

SEQ ID NO: 1552736 - DNA, 25 bp, Homo sapien
ggttccatcccacgtggtgacagta

SEQ ID NO: 1552737 - DNA, 25 bp, Homo sapien
ctgagatggaaggatagcccgagcc

SEQ ID NO: 1552738 - DNA, 25 bp, Homo sapien
caagctgttcctaaggtgcctggga

SEQ ID NO: 1552739 - DNA, 25 bp, Homo sapien
tacagccctcccatggaatatgagg

SEQ ID NO: 1552740 - DNA, 25 bp, Homo sapien
tcctcaaggtgagatcgtatcaacc

SEQ ID NO: 1552741 - DNA, 25 bp, Homo sapien
gcacagacattttcaccccaagcaa

SEQ ID NO: 1552742 - DNA, 25 bp, Homo sapien
aaaagattcccgactcctgtgcagg

SEQ ID NO: 1552743 - DNA, 25 bp, Homo sapien
caagtctctgataaggatagtggcg

SEQ ID NO: 1552744 - DNA, 25 bp, Homo sapien
cgctggtgaatgagaccggaaaaga

SEQ ID NO: 1552745 - DNA, 25 bp, Homo sapien
gaagagtcaaggtttattgcagaac

SEQ ID NO: 1552746 - DNA, 25 bp, Homo sapien
gaggtctaggagtccatcctgtcct

SEQ ID NO: 1552747 - DNA, 25 bp, Homo sapien
ggtttctcgttcctacaaaggctca

SEQ ID NO: 1552748 - DNA, 25 bp, Homo sapien
tcaacctgacggctagggagggctt

SEQ ID NO: 1552749 - DNA, 25 bp, Homo sapien
cagtagggcacacaatcctgtaggg

SEQ ID NO: 1552750 - DNA, 25 bp, Homo sapien
ggtgcaccaggcagcataaatagca

SEQ ID NO: 1552751 - DNA, 25 bp, Homo sapien
ggcagacccctctcacacaattatg

SEQ ID NO: 1552752 - DNA, 25 bp, Homo sapien
ggctgtctgaagtaggccagctcag

SEQ ID NO: 1552753 - DNA, 25 bp, Homo sapien
ggctctggaggctccacctatactc

SEQ ID NO: 1552754 - DNA, 25 bp, Homo sapien
atgccctgtccatgggctctggagg

SEQ ID NO: 1552755 - DNA, 25 bp, Homo sapien
gatcccaggggtgccttagagacac

SEQ ID NO: 1552756 - DNA, 25 bp, Homo sapien
cttggcgtcttgtggaaatgccaag

SEQ ID NO: 1552757 - DNA, 25 bp, Homo sapien
tggcgtcttgtggaaatgccaaggg

SEQ ID NO: 1552758 - DNA, 25 bp, Homo sapien
gcgtcttgtggaaatgccaaggggc

SEQ ID NO: 1552759 - DNA, 25 bp, Homo sapien
gtcttgtggaaatgccaaggggcca

SEQ ID NO: 1552760 - DNA, 25 bp, Homo sapien
ctgagagcaggaggctctttgagaa

SEQ ID NO: 1552761 - DNA, 25 bp, Homo sapien
cctgggtccccatgggaatctccat

SEQ ID NO: 1552762 - DNA, 25 bp, Homo sapien
agagcaggaggctctttgagaagca

SEQ ID NO: 1552763 - DNA, 25 bp, Homo sapien
ttgagaagcagccctgggtccccat

SEQ ID NO: 1552764 - DNA, 25 bp, Homo sapien
gactctgagtgctgctcattggaaa

SEQ ID NO: 1552765 - DNA, 25 bp, Homo sapien
tgtggcctgcttctaaacacatgga

SEQ ID NO: 1552766 - DNA, 25 bp, Homo sapien
tcaaccaatacttataggcatatgt

SEQ ID NO: 1552767 - DNA, 25 bp, Homo sapien
ggaacacaggcatggttaccacaga

SEQ ID NO: 1552768 - DNA, 25 bp, Homo sapien
taaatagcctcgtgcctccgtacgt

SEQ ID NO: 1552769 - DNA, 25 bp, Homo sapien
tctgaggccgttgtatcccagggat

SEQ ID NO: 1552770 - DNA, 25 bp, Homo sapien
acgatgtctcgctgtcccatggcac

SEQ ID NO: 1552771 - DNA, 25 bp, Homo sapien
tcccagggatgtaggtaaatagcct

SEQ ID NO: 1552772 - DNA, 25 bp, Homo sapien
catgtgagggttaaagactatctct

SEQ ID NO: 1552773 - DNA, 25 bp, Homo sapien
ctctggggattggtacacagtagat

SEQ ID NO: 1552774 - DNA, 25 bp, Homo sapien
agatgctcaatatgtgtcaagtgaa

SEQ ID NO: 1552775 - DNA, 25 bp, Homo sapien
ctatctctggggattggtacacagt

SEQ ID NO: 1552776 - DNA, 25 bp, Homo sapien
tcacatcattctggttcgtattctt

SEQ ID NO: 1552777 - DNA, 25 bp, Homo sapien
aagtcataaccactgcgtgcctcca

SEQ ID NO: 1552778 - DNA, 25 bp, Homo sapien
tggtctctcctctaaggtcacttct

SEQ ID NO: 1552779 - DNA, 25 bp, Homo sapien
tcttgagtgaggtctccctgatgac

SEQ ID NO: 1552780 - DNA, 25 bp, Homo sapien
gatgatacctgaatcccttcagcag

SEQ ID NO: 1552781 - DNA, 25 bp, Homo sapien
tggactcaagtagttctactgcctt

SEQ ID NO: 1552782 - DNA, 25 bp, Homo sapien
ggtgtcactaaattacttaggctgg

SEQ ID NO: 1552783 - DNA, 25 bp, Homo sapien
tagaattaagaccacgcctacctgg

SEQ ID NO: 1552784 - DNA, 25 bp, Homo sapien
gtgtgtactgggcagctccttattc

SEQ ID NO: 1552785 - DNA, 25 bp, Homo sapien
agatccaatgatggtggccgccagg

SEQ ID NO: 1552786 - DNA, 25 bp, Homo sapien
ccaggagataggcaatgcagctgat

SEQ ID NO: 1552787 - DNA, 25 bp, Homo sapien
gaagggccccggcagcaagagatcc

SEQ ID NO: 1552788 - DNA, 25 bp, Homo sapien
atattctgggaactggtgagtggca

SEQ ID NO: 1552789 - DNA, 25 bp, Homo sapien
aagcattgacagtagaatatcagag

SEQ ID NO: 1552790 - DNA, 25 bp, Homo sapien
gaaaacagaatccatggcacataag

SEQ ID NO: 1552791 - DNA, 25 bp, Homo sapien
gagagcaacatccttccctatgaag

SEQ ID NO: 1552792 - DNA, 25 bp, Homo sapien
catgtgctgggcgtcactgaaggca

SEQ ID NO: 1552793 - DNA, 25 bp, Homo sapien
gggatacagccgagcacaagatgga

SEQ ID NO: 1552794 - DNA, 25 bp, Homo sapien
aagatggacagagatccctggcccc

SEQ ID NO: 1552795 - DNA, 25 bp, Homo sapien
tgtgctgggcgtcactgaaggcact

SEQ ID NO: 1552796 - DNA, 25 bp, Homo sapien
cagcatcatgagcagggcccaattc

SEQ ID NO: 1552797 - DNA, 25 bp, Homo sapien
catgagcagggcccaattctggctt

SEQ ID NO: 1552798 - DNA, 25 bp, Homo sapien
catcatgagcagggcccaattctgg

SEQ ID NO: 1552799 - DNA, 25 bp, Homo sapien
agcagggcccaattctggcttctct

SEQ ID NO: 1552800 - DNA, 25 bp, Homo sapien
agagggcatcacttcatagatgttg

SEQ ID NO: 1552801 - DNA, 25 bp, Homo sapien
ggctgggtttatggaccttgtgtca

SEQ ID NO: 1552802 - DNA, 25 bp, Homo sapien
gctgggtttatggaccttgtgtcac

SEQ ID NO: 1552803 - DNA, 25 bp, Homo sapien
tggtggttctctggctccgcctgca

SEQ ID NO: 1552804 - DNA, 25 bp, Homo sapien
gtactggtggttctctggctccgcc

SEQ ID NO: 1552805 - DNA, 25 bp, Homo sapien
ggtactggtggttctctggctccgc

SEQ ID NO: 1552806 - DNA, 25 bp, Homo sapien
actggtggttctctggctccgcctg

SEQ ID NO: 1552807 - DNA, 25 bp, Homo sapien
gagagaaacccgcagagagaatgga

SEQ ID NO: 1552808 - DNA, 25 bp, Homo sapien
gagagacagaactacagggacagac

SEQ ID NO: 1552809 - DNA, 25 bp, Homo sapien
tgggcttcttcgagagcagagaccg

SEQ ID NO: 1552810 - DNA, 25 bp, Homo sapien
tacagacatatgtaggccactgaga

SEQ ID NO: 1552811 - DNA, 25 bp, Homo sapien
agctggcagtagggggcagggtcgg

SEQ ID NO: 1552812 - DNA, 25 bp, Homo sapien
gctggcagtagggggcagggtcggg

SEQ ID NO: 1552813 - DNA, 25 bp, Homo sapien
ctggcagtagggggcagggtcgggg

SEQ ID NO: 1552814 - DNA, 25 bp, Homo sapien
cagctggcagtagggggcagggtcg

SEQ ID NO: 1552815 - DNA, 25 bp, Homo sapien
tgcattcacgggctgcacaaggacc

SEQ ID NO: 1552816 - DNA, 25 bp, Homo sapien
caagtgaccctctgggaaagcggga

SEQ ID NO: 1552817 - DNA, 25 bp, Homo sapien
tgctggtctcaggtgtgaggctccc

SEQ ID NO: 1552818 - DNA, 25 bp, Homo sapien
gtctggcatacagcaaaggctcatt

SEQ ID NO: 1552819 - DNA, 25 bp, Homo sapien
gggcagggctctaacaagggggaga

SEQ ID NO: 1552820 - DNA, 25 bp, Homo sapien
tggggcagggctctaacaaggggga

SEQ ID NO: 1552821 - DNA, 25 bp, Homo sapien
gcagggctctaacaagggggagaag

SEQ ID NO: 1552822 - DNA, 25 bp, Homo sapien
cgtggggcagggctctaacaagggg

SEQ ID NO: 1552823 - DNA, 25 bp, Homo sapien
tggggcagccgcctaaccctctttg

SEQ ID NO: 1552824 - DNA, 25 bp, Homo sapien
agccgcctaaccctctttgtgccga

SEQ ID NO: 1552825 - DNA, 25 bp, Homo sapien
gggcagccgcctaaccctctttgtg

SEQ ID NO: 1552826 - DNA, 25 bp, Homo sapien
gcctaaccctctttgtgccgagggc

SEQ ID NO: 1552827 - DNA, 25 bp, Homo sapien
agcagccagctgtacccagtcagcg

SEQ ID NO: 1552828 - DNA, 25 bp, Homo sapien
ctgaggagcagccagctgtacccag

SEQ ID NO: 1552829 - DNA, 25 bp, Homo sapien
ggagcagccagctgtacccagtcag

SEQ ID NO: 1552830 - DNA, 25 bp, Homo sapien
gaggagcagccagctgtacccagtc

SEQ ID NO: 1552831 - DNA, 25 bp, Homo sapien
catggacctgcacgtgtccgtagcc

SEQ ID NO: 1552832 - DNA, 25 bp, Homo sapien
tgtgctcacgatgtagctggccacc

SEQ ID NO: 1552833 - DNA, 25 bp, Homo sapien
tggccaccaggtatgacacgctgag

SEQ ID NO: 1552834 - DNA, 25 bp, Homo sapien
catggacgaccagcgtgacgttgtc

SEQ ID NO: 1552835 - DNA, 25 bp, Homo sapien
tgatgggctcgctgcggctgacact

SEQ ID NO: 1552836 - DNA, 25 bp, Homo sapien
gggttccacacctcacactgatagg

SEQ ID NO: 1552837 - DNA, 25 bp, Homo sapien
agtacacggtcaggttgatgggctc

SEQ ID NO: 1552838 - DNA, 25 bp, Homo sapien
cacataaggcgcagggtgtctcgac

SEQ ID NO: 1552839 - DNA, 25 bp, Homo sapien
agtcaactttgatggtgcagcctgt

SEQ ID NO: 1552840 - DNA, 25 bp, Homo sapien
ggaggatggccacacgctctgggcc

SEQ ID NO: 1552841 - DNA, 25 bp, Homo sapien
cagcctgtgcgggtggtggaatcct

SEQ ID NO: 1552842 - DNA, 25 bp, Homo sapien
agggacgtgttgaagtcaactttga

SEQ ID NO: 1552843 - DNA, 25 bp, Homo sapien
gtccacacatactcgggctctgggc

SEQ ID NO: 1552844 - DNA, 25 bp, Homo sapien
gaggcagatccagatagcagggtct

SEQ ID NO: 1552845 - DNA, 25 bp, Homo sapien
aatacatgtgtacgtcccctcctgg

SEQ ID NO: 1552846 - DNA, 25 bp, Homo sapien
gcctgcccgttgaaggtccacacat

SEQ ID NO: 1552847 - DNA, 25 bp, Homo sapien
tgggtgaaaatccaccccttggatg

SEQ ID NO: 1552848 - DNA, 25 bp, Homo sapien
gaaaatccaccccttggatgagacc

SEQ ID NO: 1552849 - DNA, 25 bp, Homo sapien
catttctgctttgggtgaaaatcca

SEQ ID NO: 1552850 - DNA, 25 bp, Homo sapien
tctggggatgccatttctgctttgg

SEQ ID NO: 1552851 - DNA, 25 bp, Homo sapien
taccaggcgtagaccagcaggtcct

SEQ ID NO: 1552852 - DNA, 25 bp, Homo sapien
tcttgagtgtgtagcggccagtgtc

SEQ ID NO: 1552853 - DNA, 25 bp, Homo sapien
cacgatcatcgtggcaactgctgca

SEQ ID NO: 1552854 - DNA, 25 bp, Homo sapien
gcttctgcaccaacagcgagcagtt

SEQ ID NO: 1552855 - DNA, 25 bp, Homo sapien
tcagatggaggatacatggaccctg

SEQ ID NO: 1552856 - DNA, 25 bp, Homo sapien
agatggaggatacatggaccctgac

SEQ ID NO: 1552857 - DNA, 25 bp, Homo sapien
cagtcagatggaggatacatggacc

SEQ ID NO: 1552858 - DNA, 25 bp, Homo sapien
gtcagatggaggatacatggaccct

SEQ ID NO: 1552859 - DNA, 25 bp, Homo sapien
cctgtggctctagctctagggtgga

SEQ ID NO: 1552860 - DNA, 25 bp, Homo sapien
gacgtctccagggtcacgctgttac

SEQ ID NO: 1552861 - DNA, 25 bp, Homo sapien
accagaggatggtgcgaagagctct

SEQ ID NO: 1552862 - DNA, 25 bp, Homo sapien
ttcccactcagagggcgaggaccag

SEQ ID NO: 1552863 - DNA, 25 bp, Homo sapien
taggggagagccatgtcccacagaa

SEQ ID NO: 1552864 - DNA, 25 bp, Homo sapien
ggactctcacatataacctggagca

SEQ ID NO: 1552865 - DNA, 25 bp, Homo sapien
ggtgatggaagacttcttgcaaaat

SEQ ID NO: 1552866 - DNA, 25 bp, Homo sapien
tcatttcctgagcacaagcagccct

SEQ ID NO: 1552867 - DNA, 25 bp, Homo sapien
tctgccccgcttgcattcatccatc

SEQ ID NO: 1552868 - DNA, 25 bp, Homo sapien
ctctgccccgcttgcattcatccat

SEQ ID NO: 1552869 - DNA, 25 bp, Homo sapien
ctgccccgcttgcattcatccatcc

SEQ ID NO: 1552870 - DNA, 25 bp, Homo sapien
tctcaatgcttataagctatcattt

SEQ ID NO: 1552871 - DNA, 25 bp, Homo sapien
ccatgtcccacaggtttgatgtata

SEQ ID NO: 1552872 - DNA, 25 bp, Homo sapien
tttttcctttagtactctcaatgct

SEQ ID NO: 1552873 - DNA, 25 bp, Homo sapien
tcttgagtagaaagcttgttttatt

SEQ ID NO: 1552874 - DNA, 25 bp, Homo sapien
gacaaagagcctgctagtctgatga

SEQ ID NO: 1552875 - DNA, 25 bp, Homo sapien
caggagtgatactttgatgtgtgag

SEQ ID NO: 1552876 - DNA, 25 bp, Homo sapien
gagatgggtagtcctagtctgatgg

SEQ ID NO: 1552877 - DNA, 25 bp, Homo sapien
atgccttctgggagagctgatgagc

SEQ ID NO: 1552878 - DNA, 25 bp, Homo sapien
gggagacaggactgtccaaatccaa

SEQ ID NO: 1552879 - DNA, 25 bp, Homo sapien
tccagtcctgtgcagcaagaacgag

SEQ ID NO: 1552880 - DNA, 25 bp, Homo sapien
gagacaggactgtccaaatccaatg

SEQ ID NO: 1552881 - DNA, 25 bp, Homo sapien
acgagtgtccagtctatatttccag

SEQ ID NO: 1552882 - DNA, 25 bp, Homo sapien
gcagcgtgagggctcgacctccggg

SEQ ID NO: 1552883 - DNA, 25 bp, Homo sapien
gcttcgcgcccggagctctctccgg

SEQ ID NO: 1552884 - DNA, 25 bp, Homo sapien
ctccctatccgcttcgcgcccggag

SEQ ID NO: 1552885 - DNA, 25 bp, Homo sapien
agctctctccggactttaaccctgg

SEQ ID NO: 1552886 - DNA, 25 bp, Homo sapien
tgtttgaaggaggtgaacaaaaggc

SEQ ID NO: 1552887 - DNA, 25 bp, Homo sapien
tcaatcggttctcgtgacctcaggt

SEQ ID NO: 1552888 - DNA, 25 bp, Homo sapien
gcttttggagaggtacagggaacca

SEQ ID NO: 1552889 - DNA, 25 bp, Homo sapien
ccaggagacggaggacagagaggac

SEQ ID NO: 1552890 - DNA, 25 bp, Homo sapien
cacattcccaggatactgaggatgg

SEQ ID NO: 1552891 - DNA, 25 bp, Homo sapien
ctccaacacattcccaggatactga

SEQ ID NO: 1552892 - DNA, 25 bp, Homo sapien
gcagggctgtctctactgcctcatc

SEQ ID NO: 1552893 - DNA, 25 bp, Homo sapien
atggggcagggctgtctctactgcc

SEQ ID NO: 1552894 - DNA, 25 bp, Homo sapien
ttgtttccaaccgtcatcccagtgt

SEQ ID NO: 1552895 - DNA, 25 bp, Homo sapien
tttccaaccgtcatcccagtgtccc

SEQ ID NO: 1552896 - DNA, 25 bp, Homo sapien
tccaaccgtcatcccagtgtcccag

SEQ ID NO: 1552897 - DNA, 25 bp, Homo sapien
cagtgtcccagtcggggccacccat

SEQ ID NO: 1552898 - DNA, 25 bp, Homo sapien
ttttgcttctcccatcggttccgtg

SEQ ID NO: 1552899 - DNA, 25 bp, Homo sapien
catcggttccgtgaagatgcatggg

SEQ ID NO: 1552900 - DNA, 25 bp, Homo sapien
ttctcccatcggttccgtgaagatg

SEQ ID NO: 1552901 - DNA, 25 bp, Homo sapien
ttgcttctcccatcggttccgtgaa

SEQ ID NO: 1552902 - DNA, 25 bp, Homo sapien
ggccgccctttgtacctgttcagat

SEQ ID NO: 1552903 - DNA, 25 bp, Homo sapien
atgcaggccgccctttgtacctgtt

SEQ ID NO: 1552904 - DNA, 25 bp, Homo sapien
ttcccctcatgcaggccgccctttg

SEQ ID NO: 1552905 - DNA, 25 bp, Homo sapien
tttgtacctgttcagatctcctccc

SEQ ID NO: 1552906 - DNA, 25 bp, Homo sapien
gtccggtgggagcttcgaagggctg

SEQ ID NO: 1552907 - DNA, 25 bp, Homo sapien
tgatgggtccggtgggagcttcgaa

SEQ ID NO: 1552908 - DNA, 25 bp, Homo sapien
gggagaagatgtgatgggtccggtg

SEQ ID NO: 1552909 - DNA, 25 bp, Homo sapien
aagatgtgatgggtccggtgggagc

SEQ ID NO: 1552910 - DNA, 25 bp, Homo sapien
aatgggaccaatggcaacccctgcc

SEQ ID NO: 1552911 - DNA, 25 bp, Homo sapien
gggtgtggagcactatcccaatgca

SEQ ID NO: 1552912 - DNA, 25 bp, Homo sapien
ccttgctcccggtgggacctcagac

SEQ ID NO: 1552913 - DNA, 25 bp, Homo sapien
gggaggaattcggttggacaggctg

SEQ ID NO: 1552914 - DNA, 25 bp, Homo sapien
gggcatcggggcatggggccgccgg

SEQ ID NO: 1552915 - DNA, 25 bp, Homo sapien
ctgcacgggagggtggtttcgccgg

SEQ ID NO: 1552916 - DNA, 25 bp, Homo sapien
gctgggctcggctgcacgggagggt

SEQ ID NO: 1552917 - DNA, 25 bp, Homo sapien
ggctcggctgcacgggagggtggtt

SEQ ID NO: 1552918 - DNA, 25 bp, Homo sapien
cgggcgcttgcggagcggcagcgcg

SEQ ID NO: 1552919 - DNA, 25 bp, Homo sapien
gcgcagcgggcgcttgcggagcggc

SEQ ID NO: 1552920 - DNA, 25 bp, Homo sapien
cttgggccgggtgcgcaggtccacg

SEQ ID NO: 1552921 - DNA, 25 bp, Homo sapien
gtgcgcaggtccacgggcccctcgt

SEQ ID NO: 1552922 - DNA, 25 bp, Homo sapien
agggggacgacaaggcccgcagcgc

SEQ ID NO: 1552923 - DNA, 25 bp, Homo sapien
gtccagggggacgacaaggcccgca

SEQ ID NO: 1552924 - DNA, 25 bp, Homo sapien
tccagggggacgacaaggcccgcag

SEQ ID NO: 1552925 - DNA, 25 bp, Homo sapien
cagagggtccagggggacgacaagg

SEQ ID NO: 1552926 - DNA, 25 bp, Homo sapien
gtggggtacaaaggcagtaaggctc

SEQ ID NO: 1552927 - DNA, 25 bp, Homo sapien
gccatggcgatgtcagcagaaaggg

SEQ ID NO: 1552928 - DNA, 25 bp, Homo sapien
acgggtggccatggcgatgtcagca

SEQ ID NO: 1552929 - DNA, 25 bp, Homo sapien
cgtcctcatctgcacgggtggccat

SEQ ID NO: 1552930 - DNA, 25 bp, Homo sapien
tgtcagcagaaagggggtgttccat

SEQ ID NO: 1552931 - DNA, 25 bp, Homo sapien
ttccagtaacaggtctgctgggcgg

SEQ ID NO: 1552932 - DNA, 25 bp, Homo sapien
tgctgggcggggctctgcttcctgc

SEQ ID NO: 1552933 - DNA, 25 bp, Homo sapien
ccagccctcggacttccagtaacag

SEQ ID NO: 1552934 - DNA, 25 bp, Homo sapien
tcggacttccagtaacaggtctgct

SEQ ID NO: 1552935 - DNA, 25 bp, Homo sapien
ggaatcacaggcattaggggttgtt

SEQ ID NO: 1552936 - DNA, 25 bp, Homo sapien
ggcattaggggttgttcacctctca

SEQ ID NO: 1552937 - DNA, 25 bp, Homo sapien
tcacaggcattaggggttgttcacc

SEQ ID NO: 1552938 - DNA, 25 bp, Homo sapien
taggggttgttcacctctcaccctc

SEQ ID NO: 1552939 - DNA, 25 bp, Homo sapien
ctgcaccacagcaatatggagaggc

SEQ ID NO: 1552940 - DNA, 25 bp, Homo sapien
ttgttgtagatgtcgagctcccggc

SEQ ID NO: 1552941 - DNA, 25 bp, Homo sapien
tggcaggttaccctgcaccacagca

SEQ ID NO: 1552942 - DNA, 25 bp, Homo sapien
aagaggttgaccagccggtgcacag

SEQ ID NO: 1552943 - DNA, 25 bp, Homo sapien
agggacctgtgtccagccctgctct

SEQ ID NO: 1552944 - DNA, 25 bp, Homo sapien
ttattcctcatcctgcagtcttccc

SEQ ID NO: 1552945 - DNA, 25 bp, Homo sapien
ttttctgaacccttattcctcatcc

SEQ ID NO: 1552946 - DNA, 25 bp, Homo sapien
gggaacagtgactgtgagggacctg

SEQ ID NO: 1552947 - DNA, 25 bp, Homo sapien
accaggagccggaccacagacggta

SEQ ID NO: 1552948 - DNA, 25 bp, Homo sapien
gtaatgtggtgatcacagccaggtg

SEQ ID NO: 1552949 - DNA, 25 bp, Homo sapien
tcgcacgccaggtgagcggccgtct

SEQ ID NO: 1552950 - DNA, 25 bp, Homo sapien
ctggccatggcggtccagcgccatg

SEQ ID NO: 1552951 - DNA, 25 bp, Homo sapien
ctctagcaagagctgcacggtttct

SEQ ID NO: 1552952 - DNA, 25 bp, Homo sapien
gagctgcacggtttcttggcactcg

SEQ ID NO: 1552953 - DNA, 25 bp, Homo sapien
actcggtgttcactgccacgtgcag

SEQ ID NO: 1552954 - DNA, 25 bp, Homo sapien
cgtcgatgtcggcaccgcgctctag

SEQ ID NO: 1552955 - DNA, 25 bp, Homo sapien
ctgcggcggggagggaaggtcttag

SEQ ID NO: 1552956 - DNA, 25 bp, Homo sapien
tgttgttttccacggcgtggatgag

SEQ ID NO: 1552957 - DNA, 25 bp, Homo sapien
gctgttgttttccacggcgtggatg

SEQ ID NO: 1552958 - DNA, 25 bp, Homo sapien
gcggggagcggccgctcttaatgtc

SEQ ID NO: 1552959 - DNA, 25 bp, Homo sapien
cggcgtggatgagcggggagcggcc

SEQ ID NO: 1552960 - DNA, 25 bp, Homo sapien
cggacgctgagtgcagggcggagct

SEQ ID NO: 1552961 - DNA, 25 bp, Homo sapien
cggagctgccggagtacatttgcgc

SEQ ID NO: 1552962 - DNA, 25 bp, Homo sapien
agcgtgcgcaccagcgggaggagcc

SEQ ID NO: 1552963 - DNA, 25 bp, Homo sapien
tgtcagcgccgctgcggaccagcgt

SEQ ID NO: 1552964 - DNA, 25 bp, Homo sapien
acacgtgtgcaaggggcatgtccac

SEQ ID NO: 1552965 - DNA, 25 bp, Homo sapien
ccagcccgcggacacacgtgtgcaa

SEQ ID NO: 1552966 - DNA, 25 bp, Homo sapien
cacgtgtgcaaggggcatgtccaca

SEQ ID NO: 1552967 - DNA, 25 bp, Homo sapien
tcacccactcccctccacgcaacgg

SEQ ID NO: 1552968 - DNA, 25 bp, Homo sapien
aacggcacagacaccctcactcctc

SEQ ID NO: 1552969 - DNA, 25 bp, Homo sapien
tcccctccacgcaacggcacagaca

SEQ ID NO: 1552970 - DNA, 25 bp, Homo sapien
agacaccctcactcctctgcgctct

SEQ ID NO: 1552971 - DNA, 25 bp, Homo sapien
ctcgggggaggtgttggcgctccgg

SEQ ID NO: 1552972 - DNA, 25 bp, Homo sapien
ggtggaagcaggccgggtggccttc

SEQ ID NO: 1552973 - DNA, 25 bp, Homo sapien
tggaagcaggccgggtggccttccc

SEQ ID NO: 1552974 - DNA, 25 bp, Homo sapien
ggaggtgttggcgctccggtcaggg

SEQ ID NO: 1552975 - DNA, 25 bp, Homo sapien
gaaggaagaaattgggaggagccat

SEQ ID NO: 1552976 - DNA, 25 bp, Homo sapien
agggcctcggaggaccccagcaaag

SEQ ID NO: 1552977 - DNA, 25 bp, Homo sapien
aaagggcaggaaggcgggtggagat

SEQ ID NO: 1552978 - DNA, 25 bp, Homo sapien
gaggatggtgatgcggagagaagac

SEQ ID NO: 1552979 - DNA, 25 bp, Homo sapien
taatttacatcgtgatccgtgcccg

SEQ ID NO: 1552980 - DNA, 25 bp, Homo sapien
aggtgcatgtgcttctgtgcaaatc

SEQ ID NO: 1552981 - DNA, 25 bp, Homo sapien
gcattccggacagggactggtgcct

SEQ ID NO: 1552982 - DNA, 25 bp, Homo sapien
tgcaaatcctggtcccgaagatggg

SEQ ID NO: 1552983 - DNA, 25 bp, Homo sapien
acgcactcggacagccagagacgat

SEQ ID NO: 1552984 - DNA, 25 bp, Homo sapien
aatcacagcatcaccccagatctca

SEQ ID NO: 1552985 - DNA, 25 bp, Homo sapien
actcggacagccagagacgattggg

SEQ ID NO: 1552986 - DNA, 25 bp, Homo sapien
tgttaggaacactcccaagcaccac

SEQ ID NO: 1552987 - DNA, 25 bp, Homo sapien
ccgctacacgcagcaggctgcgtat

SEQ ID NO: 1552988 - DNA, 25 bp, Homo sapien
cgtatactactgagggcactgctgt

SEQ ID NO: 1552989 - DNA, 25 bp, Homo sapien
catcggaaagggctatctccaaggt

SEQ ID NO: 1552990 - DNA, 25 bp, Homo sapien
aacatgaacatgcatcggaaagggc

SEQ ID NO: 1552991 - DNA, 25 bp, Homo sapien
tggggctttccaaaggcgcctcgca

SEQ ID NO: 1552992 - DNA, 25 bp, Homo sapien
ggctttccaaaggcgcctcgcatac

SEQ ID NO: 1552993 - DNA, 25 bp, Homo sapien
gggctttccaaaggcgcctcgcata

SEQ ID NO: 1552994 - DNA, 25 bp, Homo sapien
cctggggctttccaaaggcgcctcg

SEQ ID NO: 1552995 - DNA, 25 bp, Homo sapien
ttagccaatgtgaaccctggccacc

SEQ ID NO: 1552996 - DNA, 25 bp, Homo sapien
tagccaatgtgaaccctggccacca

SEQ ID NO: 1552997 - DNA, 25 bp, Homo sapien
agccaatgtgaaccctggccaccac

SEQ ID NO: 1552998 - DNA, 25 bp, Homo sapien
ccaatgtgaaccctggccaccacac

SEQ ID NO: 1552999 - DNA, 25 bp, Homo sapien
aaagtcccaccgccttgagatgtgg

SEQ ID NO: 1553000 - DNA, 25 bp, Homo sapien
aagtcccaccgccttgagatgtggg

SEQ ID NO: 1553001 - DNA, 25 bp, Homo sapien
agtcccaccgccttgagatgtgggt

SEQ ID NO: 1553002 - DNA, 25 bp, Homo sapien
tgtgccgggaaggaccggtgcggct

SEQ ID NO: 1553003 - DNA, 25 bp, Homo sapien
ggaaggaccggtgcggctgggatag

SEQ ID NO: 1553004 - DNA, 25 bp, Homo sapien
ggataggggcggcctcgcccagagt

SEQ ID NO: 1553005 - DNA, 25 bp, Homo sapien
cgcgtgtgccgggaaggaccggtgc

SEQ ID NO: 1553006 - DNA, 25 bp, Homo sapien
ttctaggcgctgcagcatcctgact

SEQ ID NO: 1553007 - DNA, 25 bp, Homo sapien
agggcgcgggcctcttcccactgtc

SEQ ID NO: 1553008 - DNA, 25 bp, Homo sapien
gggtcgacgcattgctcttctaggc

SEQ ID NO: 1553009 - DNA, 25 bp, Homo sapien
ctctcgaagcagctgcgctgtgcgg

SEQ ID NO: 1553010 - DNA, 25 bp, Homo sapien
tagaaagtccccagagccgccggga

SEQ ID NO: 1553011 - DNA, 25 bp, Homo sapien
ggccaggtagatgagtagaaagtcc

SEQ ID NO: 1553012 - DNA, 25 bp, Homo sapien
tagatgagtagaaagtccccagagc

SEQ ID NO: 1553013 - DNA, 25 bp, Homo sapien
cggccgcccgccgagaatgggccac

SEQ ID NO: 1553014 - DNA, 25 bp, Homo sapien
cgcccggaagagctcgtcgttggca

SEQ ID NO: 1553015 - DNA, 25 bp, Homo sapien
gagcccgcccggaagagctcgtcgt

SEQ ID NO: 1553016 - DNA, 25 bp, Homo sapien
ctgagtctggagcccgcccggaaga

SEQ ID NO: 1553017 - DNA, 25 bp, Homo sapien
gagctcgtcgttggcactccttcgg

SEQ ID NO: 1553018 - DNA, 25 bp, Homo sapien
gccttggtgagctggtacatgtgtc

SEQ ID NO: 1553019 - DNA, 25 bp, Homo sapien
ggaagagtgcgtgcagctctgcgtg

SEQ ID NO: 1553020 - DNA, 25 bp, Homo sapien
tacatgtgtccacagtactttcccc

SEQ ID NO: 1553021 - DNA, 25 bp, Homo sapien
gggctccgcaactttccctccagaa

SEQ ID NO: 1553022 - DNA, 25 bp, Homo sapien
agatggacacgtgcccgctgcaggt

SEQ ID NO: 1553023 - DNA, 25 bp, Homo sapien
tcgaactcgaagatggacacgtgcc

SEQ ID NO: 1553024 - DNA, 25 bp, Homo sapien
tgaggtcaatggtggtgcgcaaggc

SEQ ID NO: 1553025 - DNA, 25 bp, Homo sapien
ctgaaagagcctggtgaagacgtcg

SEQ ID NO: 1553026 - DNA, 25 bp, Homo sapien
ggcctgcagacgctcttggacctca

SEQ ID NO: 1553027 - DNA, 25 bp, Homo sapien
gctcttggacctcatcataggtgag

SEQ ID NO: 1553028 - DNA, 25 bp, Homo sapien
ggccatgtagcctgggtggttgact

SEQ ID NO: 1553029 - DNA, 25 bp, Homo sapien
agacgctcttggacctcatcatagg

SEQ ID NO: 1553030 - DNA, 25 bp, Homo sapien
gggacccaacagctcaaaactcctg

SEQ ID NO: 1553031 - DNA, 25 bp, Homo sapien
tgtaactggaagaatgctaacgcac

SEQ ID NO: 1553032 - DNA, 25 bp, Homo sapien
ttcagtctcctatgccaacaggtgg

SEQ ID NO: 1553033 - DNA, 25 bp, Homo sapien
cccttagctgcaggattatgggaca

SEQ ID NO: 1553034 - DNA, 25 bp, Homo sapien
gccatctgagctcacatagccgatg

SEQ ID NO: 1553035 - DNA, 25 bp, Homo sapien
gcgagtacagctgggccggaagatg

SEQ ID NO: 1553036 - DNA, 25 bp, Homo sapien
tgagctcacatagccgatggcccac

SEQ ID NO: 1553037 - DNA, 25 bp, Homo sapien
cactgccccaggcgagtacagctgg

SEQ ID NO: 1553038 - DNA, 25 bp, Homo sapien
ggtctgggttgtgggtctttccatc

SEQ ID NO: 1553039 - DNA, 25 bp, Homo sapien
ggttctgcctggccgagctcagtca

SEQ ID NO: 1553040 - DNA, 25 bp, Homo sapien
ctctgacacgtggatgcgctgctgg

SEQ ID NO: 1553041 - DNA, 25 bp, Homo sapien
ctgcctggccgagctcagtcaggtc

SEQ ID NO: 1553042 - DNA, 25 bp, Homo sapien
gcaggtgcccgcacggctcaatctt

SEQ ID NO: 1553043 - DNA, 25 bp, Homo sapien
tgcagagcaggtgcccgcacggctc

SEQ ID NO: 1553044 - DNA, 25 bp, Homo sapien
ccttgttgctctcagcacagatctt

SEQ ID NO: 1553045 - DNA, 25 bp, Homo sapien
cagatcttgcagagctcaaatgtgg

SEQ ID NO: 1553046 - DNA, 25 bp, Homo sapien
ccttgatctcgcagcggcagaaggg

SEQ ID NO: 1553047 - DNA, 25 bp, Homo sapien
aaggggcaggtctggctgtccgagt

SEQ ID NO: 1553048 - DNA, 25 bp, Homo sapien
ccagcccttgatctcgcagcggcag

SEQ ID NO: 1553049 - DNA, 25 bp, Homo sapien
agcccttgatctcgcagcggcagaa

SEQ ID NO: 1553050 - DNA, 25 bp, Homo sapien
ctgttccctgagtcctcagcagtag

SEQ ID NO: 1553051 - DNA, 25 bp, Homo sapien
tccctgagtcctcagcagtagcctg

SEQ ID NO: 1553052 - DNA, 25 bp, Homo sapien
tgttccctgagtcctcagcagtagc

SEQ ID NO: 1553053 - DNA, 25 bp, Homo sapien
actgctgttccctgagtcctcagca

SEQ ID NO: 1553054 - DNA, 25 bp, Homo sapien
ttcggctgggcatttctgggcttcc

SEQ ID NO: 1553055 - DNA, 25 bp, Homo sapien
cactttcggctgggcatttctgggc

SEQ ID NO: 1553056 - DNA, 25 bp, Homo sapien
cagatctggccgtgggggcaatgga

SEQ ID NO: 1553057 - DNA, 25 bp, Homo sapien
ggcaatggaggagccgaaaggggca

SEQ ID NO: 1553058 - DNA, 25 bp, Homo sapien
tgaacccgaggctcgcagtgactga

SEQ ID NO: 1553059 - DNA, 25 bp, Homo sapien
cctcctggcggaagcgataatcaag

SEQ ID NO: 1553060 - DNA, 25 bp, Homo sapien
caagggtccaatgttgccggaaagg

SEQ ID NO: 1553061 - DNA, 25 bp, Homo sapien
aaaactatctttgtcctggtggagc

SEQ ID NO: 1553062 - DNA, 25 bp, Homo sapien
ttagacctgggagtcccagaccacc

SEQ ID NO: 1553063 - DNA, 25 bp, Homo sapien
gccacagccttaattcttggcaaga

SEQ ID NO: 1553064 - DNA, 25 bp, Homo sapien
ggccacagccttaattcttggcaag

SEQ ID NO: 1553065 - DNA, 25 bp, Homo sapien
cccagcgcagctggaggggagttcc

SEQ ID NO: 1553066 - DNA, 25 bp, Homo sapien
cctggggtcccagcgcagctggagg

SEQ ID NO: 1553067 - DNA, 25 bp, Homo sapien
cagctggaggggagttcccctttag

SEQ ID NO: 1553068 - DNA, 25 bp, Homo sapien
gggtcccagcgcagctggaggggag

SEQ ID NO: 1553069 - DNA, 25 bp, Homo sapien
tggcagtttatttcggtttcacaac

SEQ ID NO: 1553070 - DNA, 25 bp, Homo sapien
gacagaccaggcttggcagtttatt

SEQ ID NO: 1553071 - DNA, 25 bp, Homo sapien
cagcccttggggctcccttgagcag

SEQ ID NO: 1553072 - DNA, 25 bp, Homo sapien
gcccttggggctcccttgagcagca

SEQ ID NO: 1553073 - DNA, 25 bp, Homo sapien
gggctgcagtatggactactgggtc

SEQ ID NO: 1553074 - DNA, 25 bp, Homo sapien
ggaggggctgcagtatggactcctg

SEQ ID NO: 1553075 - DNA, 25 bp, Homo sapien
tccatttgaagatctgagggtggag

SEQ ID NO: 1553076 - DNA, 25 bp, Homo sapien
agattccatttgaagatctgagggt

SEQ ID NO: 1553077 - DNA, 25 bp, Homo sapien
gatatctgggtctaggtccagggat

SEQ ID NO: 1553078 - DNA, 25 bp, Homo sapien
gaaatgtgtggtccttttgaccagg

SEQ ID NO: 1553079 - DNA, 25 bp, Homo sapien
gcaaggcaaggtggataaccatcag

SEQ ID NO: 1553080 - DNA, 25 bp, Homo sapien
gatgcccgattctcagaaaacttgg

SEQ ID NO: 1553081 - DNA, 25 bp, Homo sapien
taagtatcagctcagacatcgcctc

SEQ ID NO: 1553082 - DNA, 25 bp, Homo sapien
gctgagtcaggtgcccactctgggt

SEQ ID NO: 1553083 - DNA, 25 bp, Homo sapien
tctttcctctagtggaaggtgagcc

SEQ ID NO: 1553084 - DNA, 25 bp, Homo sapien
tctgggtcatcactgtctagggaca

SEQ ID NO: 1553085 - DNA, 25 bp, Homo sapien
ggttaccattgctggccagttgcca

SEQ ID NO: 1553086 - DNA, 25 bp, Homo sapien
accggttccgtggtgtcactgtggc

SEQ ID NO: 1553087 - DNA, 25 bp, Homo sapien
agcatggcctcatcagaccggttcc

SEQ ID NO: 1553088 - DNA, 25 bp, Homo sapien
tacagtgtctagtggccatcgccag

SEQ ID NO: 1553089 - DNA, 25 bp, Homo sapien
cttcagcggccatataaagtttgac

SEQ ID NO: 1553090 - DNA, 25 bp, Homo sapien
ctcccaaaatgagctagaaaaggcc

SEQ ID NO: 1553091 - DNA, 25 bp, Homo sapien
gctgaagtgaagttgcggaactccc

SEQ ID NO: 1553092 - DNA, 25 bp, Homo sapien
ccaagctggccagtgcagagactat

SEQ ID NO: 1553093 - DNA, 25 bp, Homo sapien
gcggcggagactgagcccgggctgc

SEQ ID NO: 1553094 - DNA, 25 bp, Homo sapien
cggcggagactgagcccgggctgca

SEQ ID NO: 1553095 - DNA, 25 bp, Homo sapien
ggcggagactgagcccgggctgcag

SEQ ID NO: 1553096 - DNA, 25 bp, Homo sapien
gcggagactgagcccgggctgcagc

SEQ ID NO: 1553097 - DNA, 25 bp, Homo sapien
gccagcaggactgcgagcaacagca

SEQ ID NO: 1553098 - DNA, 25 bp, Homo sapien
gcgcgcctgggccggtgcgtccggg

SEQ ID NO: 1553099 - DNA, 25 bp, Homo sapien
tgggccggtgcgtccgggggctcca

SEQ ID NO: 1553100 - DNA, 25 bp, Homo sapien
aggactgcgagcaacagcagccgcg

SEQ ID NO: 1553101 - DNA, 25 bp, Homo sapien
aacactcccatatccctcctccttg

SEQ ID NO: 1553102 - DNA, 25 bp, Homo sapien
ccaacactcccatatccctcctcct

SEQ ID NO: 1553103 - DNA, 25 bp, Homo sapien
acactcccatatccctcctccttgg

SEQ ID NO: 1553104 - DNA, 25 bp, Homo sapien
cttccaacactcccatatccctcct

SEQ ID NO: 1553105 - DNA, 25 bp, Homo sapien
catataatggtcgtgggttcccgta

SEQ ID NO: 1553106 - DNA, 25 bp, Homo sapien
ccagcgggggtacagacaagcgcac

SEQ ID NO: 1553107 - DNA, 25 bp, Homo sapien
gaatgacagactttcctcgcatcac

SEQ ID NO: 1553108 - DNA, 25 bp, Homo sapien
cccgtaggggtgcagtccagaatga

SEQ ID NO: 1553109 - DNA, 25 bp, Homo sapien
gagagaatgaacctttgctgccctg

SEQ ID NO: 1553110 - DNA, 25 bp, Homo sapien
caggccttaggcactgatgagagaa

SEQ ID NO: 1553111 - DNA, 25 bp, Homo sapien
tagacttggctgtgcctagacacgg

SEQ ID NO: 1553112 - DNA, 25 bp, Homo sapien
gcttggtggatctctacaggcctta

SEQ ID NO: 1553113 - DNA, 25 bp, Homo sapien
tagtctcgctcgtcgcccacctggg

SEQ ID NO: 1553114 - DNA, 25 bp, Homo sapien
cccgggtgtcgtgcattgtgacctg

SEQ ID NO: 1553115 - DNA, 25 bp, Homo sapien
cacgcacacgtagtctcgctcgtcg

SEQ ID NO: 1553116 - DNA, 25 bp, Homo sapien
tgcatctcagccgaggctaggcggg

SEQ ID NO: 1553117 - DNA, 25 bp, Homo sapien
cacgttgagccgcgcagtggcctca

SEQ ID NO: 1553118 - DNA, 25 bp, Homo sapien
cgcgcagtggcctcagcagtgcctg

SEQ ID NO: 1553119 - DNA, 25 bp, Homo sapien
gttgagccgcgcagtggcctcagca

SEQ ID NO: 1553120 - DNA, 25 bp, Homo sapien
caaacacgttgagccgcgcagtggc

SEQ ID NO: 1553121 - DNA, 25 bp, Homo sapien
gagtcctccatcacagacagtgtcc

SEQ ID NO: 1553122 - DNA, 25 bp, Homo sapien
cctttgttgggggagacctcagtgg

SEQ ID NO: 1553123 - DNA, 25 bp, Homo sapien
tgtccctttgttgggggagacctca

SEQ ID NO: 1553124 - DNA, 25 bp, Homo sapien
gcagagtcctccatcacagacagtg

SEQ ID NO: 1553125 - DNA, 25 bp, Homo sapien
cagacccaggagtccagggccctgt

SEQ ID NO: 1553126 - DNA, 25 bp, Homo sapien
cctggggccaaggtccacccgagag

SEQ ID NO: 1553127 - DNA, 25 bp, Homo sapien
ctcgcctggccttacccctcctcct

SEQ ID NO: 1553128 - DNA, 25 bp, Homo sapien
cctcctccaggaccctggggccaag

SEQ ID NO: 1553129 - DNA, 25 bp, Homo sapien
gtagcctctgccttctgggttcgag

SEQ ID NO: 1553130 - DNA, 25 bp, Homo sapien
ctgtagcctctgccttctgggttcg

SEQ ID NO: 1553131 - DNA, 25 bp, Homo sapien
cactgtagcctctgccttctgggtt

SEQ ID NO: 1553132 - DNA, 25 bp, Homo sapien
tcactgtagcctctgccttctgggt

SEQ ID NO: 1553133 - DNA, 25 bp, Homo sapien
gcagacacgggcatggccctgggct

SEQ ID NO: 1553134 - DNA, 25 bp, Homo sapien
agctgggactctgaagtcggggctc

SEQ ID NO: 1553135 - DNA, 25 bp, Homo sapien
ctgaggcagacacgggcatggccct

SEQ ID NO: 1553136 - DNA, 25 bp, Homo sapien
ctgaagtcggggctcctctctcagg

SEQ ID NO: 1553137 - DNA, 25 bp, Homo sapien
aggcgctgcccgttgcgataccacg

SEQ ID NO: 1553138 - DNA, 25 bp, Homo sapien
ggttcatctctacgggcacctccag

SEQ ID NO: 1553139 - DNA, 25 bp, Homo sapien
cgttgcgataccacgtgatcttggg

SEQ ID NO: 1553140 - DNA, 25 bp, Homo sapien
ctgggttcatctctacgggcacctc

SEQ ID NO: 1553141 - DNA, 25 bp, Homo sapien
ctcgggcaggctgtagtgggcggcg

SEQ ID NO: 1553142 - DNA, 25 bp, Homo sapien
tggcgtctcggtcatccttgcggag

SEQ ID NO: 1553143 - DNA, 25 bp, Homo sapien
gcgcagtggaagctggcgtctcggt

SEQ ID NO: 1553144 - DNA, 25 bp, Homo sapien
ctcccggaccgtgcggctggtcatg

SEQ ID NO: 1553145 - DNA, 25 bp, Homo sapien
gaggtcaaaggccagcacagactca

SEQ ID NO: 1553146 - DNA, 25 bp, Homo sapien
aggtcaaaggccagcacagactcac

SEQ ID NO: 1553147 - DNA, 25 bp, Homo sapien
cggaaaagcgtatactccgggctgg

SEQ ID NO: 1553148 - DNA, 25 bp, Homo sapien
gacagtgtcaccctcgcgtacccag

SEQ ID NO: 1553149 - DNA, 25 bp, Homo sapien
ctgaaggcggaaaagcgtatactcc

SEQ ID NO: 1553150 - DNA, 25 bp, Homo sapien
cctcgcgtacccagcctgctggggt

SEQ ID NO: 1553151 - DNA, 25 bp, Homo sapien
cgcgtcgtaatcctccactctgcag

SEQ ID NO: 1553152 - DNA, 25 bp, Homo sapien
agttcccctcgagattcacattcag

SEQ ID NO: 1553153 - DNA, 25 bp, Homo sapien
ggagagctgcacgtcatctgccgcg

SEQ ID NO: 1553154 - DNA, 25 bp, Homo sapien
tccagggtcaagttcccctcgagat

SEQ ID NO: 1553155 - DNA, 25 bp, Homo sapien
tgaaggcagagtgtttgggatgaca

SEQ ID NO: 1553156 - DNA, 25 bp, Homo sapien
gggttgaaggcagagtgtttgggat

SEQ ID NO: 1553157 - DNA, 25 bp, Homo sapien
cctgcccgcccgttcacccagggct

SEQ ID NO: 1553158 - DNA, 25 bp, Homo sapien
tcctgcccgcccgttcacccagggc

SEQ ID NO: 1553159 - DNA, 25 bp, Homo sapien
gggcctggatgcgaatgaactgaaa

SEQ ID NO: 1553160 - DNA, 25 bp, Homo sapien
tgtctcccctactgaaataacaggg

SEQ ID NO: 1553161 - DNA, 25 bp, Homo sapien
gatacactactgttacgaaagggct

SEQ ID NO: 1553162 - DNA, 25 bp, Homo sapien
tccctagacccaagaggtgcggaac

SEQ ID NO: 1553163 - DNA, 25 bp, Homo sapien
agttcacgactgcactgctgtttag

SEQ ID NO: 1553164 - DNA, 25 bp, Homo sapien
aaggaaagcaccttcccctcgctga

SEQ ID NO: 1553165 - DNA, 25 bp, Homo sapien
gcactgctgtttagaggtaaggaaa

SEQ ID NO: 1553166 - DNA, 25 bp, Homo sapien
aggccgtgcacggagcagttcacga

SEQ ID NO: 1553167 - DNA, 25 bp, Homo sapien
tgatagaactgagcgacagcatggg

SEQ ID NO: 1553168 - DNA, 25 bp, Homo sapien
ccattggaatcgaaggtgatagaac

SEQ ID NO: 1553169 - DNA, 25 bp, Homo sapien
cagggaggcctcacatacgtaggtg

SEQ ID NO: 1553170 - DNA, 25 bp, Homo sapien
tgaagttctgggtgcggctgaggac

SEQ ID NO: 1553171 - DNA, 25 bp, Homo sapien
ccagggactcaggaactcgtcctgt

SEQ ID NO: 1553172 - DNA, 25 bp, Homo sapien
agaagagaggcatcgagcagaagat

SEQ ID NO: 1553173 - DNA, 25 bp, Homo sapien
gactcaggaactcgtcctgtttgtc

SEQ ID NO: 1553174 - DNA, 25 bp, Homo sapien
gaggcatcgagcagaagatggagtc

SEQ ID NO: 1553175 - DNA, 25 bp, Homo sapien
tccgctgtctttagctctggcgagc

SEQ ID NO: 1553176 - DNA, 25 bp, Homo sapien
cagagcagatgagtgtgacttcgtc

SEQ ID NO: 1553177 - DNA, 25 bp, Homo sapien
gagtgtgacttcgtctccttccctc

SEQ ID NO: 1553178 - DNA, 25 bp, Homo sapien
tctgccttgggctctatttccgctg

SEQ ID NO: 1553179 - DNA, 25 bp, Homo sapien
tgccccccaattggctccagctgag

SEQ ID NO: 1553180 - DNA, 25 bp, Homo sapien
ccaattggctccagctgagtttggg

SEQ ID NO: 1553181 - DNA, 25 bp, Homo sapien
ctgccccccaattggctccagctga

SEQ ID NO: 1553182 - DNA, 25 bp, Homo sapien
cccccaattggctccagctgagttt

SEQ ID NO: 1553183 - DNA, 25 bp, Homo sapien
gatacttggatgagtgagagggggc

SEQ ID NO: 1553184 - DNA, 25 bp, Homo sapien
tgtgatacttggatgagtgagaggg

SEQ ID NO: 1553185 - DNA, 25 bp, Homo sapien
acttggatgagtgagagggggctca

SEQ ID NO: 1553186 - DNA, 25 bp, Homo sapien
gtgtgatacttggatgagtgagagg

SEQ ID NO: 1553187 - DNA, 25 bp, Homo sapien
aagacatggcgcttgttcccgtggg

SEQ ID NO: 1553188 - DNA, 25 bp, Homo sapien
ggaggcttcacaggagatgccatcg

SEQ ID NO: 1553189 - DNA, 25 bp, Homo sapien
catcgcggctcagggcgctggtcac

SEQ ID NO: 1553190 - DNA, 25 bp, Homo sapien
gcgctggtcactttcagggtcagag

SEQ ID NO: 1553191 - DNA, 25 bp, Homo sapien
aagacagcaacgacgaggagcagga

SEQ ID NO: 1553192 - DNA, 25 bp, Homo sapien
cccctttgcgtctcacgcagtagaa

SEQ ID NO: 1553193 - DNA, 25 bp, Homo sapien
gcagtagaagacagcaacgacgagg

SEQ ID NO: 1553194 - DNA, 25 bp, Homo sapien
cttctcccgccgctggcggcagcag

SEQ ID NO: 1553195 - DNA, 25 bp, Homo sapien
gaggcgtcgtgttggaggtgcacac

SEQ ID NO: 1553196 - DNA, 25 bp, Homo sapien
tgagagataggcttggaggataaat

SEQ ID NO: 1553197 - DNA, 25 bp, Homo sapien
taaattggagttaagggtgagctca

SEQ ID NO: 1553198 - DNA, 25 bp, Homo sapien
gggttaagctatggtggtcattgca

SEQ ID NO: 1553199 - DNA, 25 bp, Homo sapien
tgctctggttgctccgaccccgagt

SEQ ID NO: 1553200 - DNA, 25 bp, Homo sapien
tggttgctccgaccccgagtggctc

SEQ ID NO: 1553201 - DNA, 25 bp, Homo sapien
atgagaaggccggtctgctctggtt

SEQ ID NO: 1553202 - DNA, 25 bp, Homo sapien
ccggaggcacctcccatgagaaggc

SEQ ID NO: 1553203 - DNA, 25 bp, Homo sapien
gggggcgggcatggcgtgagcaggg

SEQ ID NO: 1553204 - DNA, 25 bp, Homo sapien
cctgccttgccggcagaggaaggaa

SEQ ID NO: 1553205 - DNA, 25 bp, Homo sapien
ggcgggggcgggcatggcgtgagca

SEQ ID NO: 1553206 - DNA, 25 bp, Homo sapien
actgtgggtccctgccttgccggca

SEQ ID NO: 1553207 - DNA, 25 bp, Homo sapien
ggaggtaaaaatagctccggccagc

SEQ ID NO: 1553208 - DNA, 25 bp, Homo sapien
gaccctcggagccttgtcccaggct

SEQ ID NO: 1553209 - DNA, 25 bp, Homo sapien
ggccagccgaccctcggagccttgt

SEQ ID NO: 1553210 - DNA, 25 bp, Homo sapien
gtaaaaatagctccggccagccgac

SEQ ID NO: 1553211 - DNA, 25 bp, Homo sapien
gggggaatccagtgtcagactctgc

SEQ ID NO: 1553212 - DNA, 25 bp, Homo sapien
actctgcagcaagacgtcaggtggg

SEQ ID NO: 1553213 - DNA, 25 bp, Homo sapien
tgtcagactctgcagcaagacgtca

SEQ ID NO: 1553214 - DNA, 25 bp, Homo sapien
tccagtgtcagactctgcagcaaga

SEQ ID NO: 1553215 - DNA, 25 bp, Homo sapien
aaacagcatttattccagactccag

SEQ ID NO: 1553216 - DNA, 25 bp, Homo sapien
aacagcatttattccagactccagt

SEQ ID NO: 1553217 - DNA, 25 bp, Homo sapien
aaagagctagctgcagctctatgcc

SEQ ID NO: 1553218 - DNA, 25 bp, Homo sapien
gactgatggccgtgaaaccatttgt

SEQ ID NO: 1553219 - DNA, 25 bp, Homo sapien
accatttgtagaaagagctagctgc

SEQ ID NO: 1553220 - DNA, 25 bp, Homo sapien
gatggccgtgaaaccatttgtagaa

SEQ ID NO: 1553221 - DNA, 25 bp, Homo sapien
ggatgtgagggtcagtatcttagaa

SEQ ID NO: 1553222 - DNA, 25 bp, Homo sapien
gaatgccagctgaagggcggctcat

SEQ ID NO: 1553223 - DNA, 25 bp, Homo sapien
tcttagaaggtccagaatgccagct

SEQ ID NO: 1553224 - DNA, 25 bp, Homo sapien
gctttgtcacagcacgggatatggg

SEQ ID NO: 1553225 - DNA, 25 bp, Homo sapien
ctctcgctcagctccggcggttcga

SEQ ID NO: 1553226 - DNA, 25 bp, Homo sapien
cggctcggcacccccggcctctcgc

SEQ ID NO: 1553227 - DNA, 25 bp, Homo sapien
gcctctcgctcagctccggcggttc

SEQ ID NO: 1553228 - DNA, 25 bp, Homo sapien
ctagcctccctgttctgctctcccg

SEQ ID NO: 1553229 - DNA, 25 bp, Homo sapien
cactctgtgggggccgatcggctgg

SEQ ID NO: 1553230 - DNA, 25 bp, Homo sapien
ctgggcggtttagtaggtgcctgtg

SEQ ID NO: 1553231 - DNA, 25 bp, Homo sapien
ggccgatcggctgggcggtttagta

SEQ ID NO: 1553232 - DNA, 25 bp, Homo sapien
tctgtgggggccgatcggctgggcg

SEQ ID NO: 1553233 - DNA, 25 bp, Homo sapien
gtcggcggcgatctcgacggcagga

SEQ ID NO: 1553234 - DNA, 25 bp, Homo sapien
ggcgtcggcggcgatctcgacggca

SEQ ID NO: 1553235 - DNA, 25 bp, Homo sapien
gcggcgtcggcggcgatctcgacgg

SEQ ID NO: 1553236 - DNA, 25 bp, Homo sapien
cggcgatctcgacggcaggagggca

SEQ ID NO: 1553237 - DNA, 25 bp, Homo sapien
gcccccacatgtcgctggccttgag

SEQ ID NO: 1553238 - DNA, 25 bp, Homo sapien
tggcccccacatgtcgctggccttg

SEQ ID NO: 1553239 - DNA, 25 bp, Homo sapien
ctgtggcccccacatgtcgctggcc

SEQ ID NO: 1553240 - DNA, 25 bp, Homo sapien
tgtggcccccacatgtcgctggcct

SEQ ID NO: 1553241 - DNA, 25 bp, Homo sapien
taaaaatgtaacagcgtcccaggca

SEQ ID NO: 1553242 - DNA, 25 bp, Homo sapien
attaaaaatgtaacagcgtcccagg

SEQ ID NO: 1553243 - DNA, 25 bp, Homo sapien
aaaatgtaacagcgtcccaggcagg

SEQ ID NO: 1553244 - DNA, 25 bp, Homo sapien
aaaaatgtaacagcgtcccaggcag

SEQ ID NO: 1553245 - DNA, 25 bp, Homo sapien
gcagagtgacctatggaaccctgga

SEQ ID NO: 1553246 - DNA, 25 bp, Homo sapien
cacagcttgagaccccgagatccag

SEQ ID NO: 1553247 - DNA, 25 bp, Homo sapien
atccagggatgggtagaccaaggca

SEQ ID NO: 1553248 - DNA, 25 bp, Homo sapien
agggtgcagagtgacctatggaacc

SEQ ID NO: 1553249 - DNA, 25 bp, Homo sapien
ctgcaggcttcctgtggtggcagag

SEQ ID NO: 1553250 - DNA, 25 bp, Homo sapien
ctgcccagggtgtagtgtgagccca

SEQ ID NO: 1553251 - DNA, 25 bp, Homo sapien
tgtggtggcagagtggaggctgccc

SEQ ID NO: 1553252 - DNA, 25 bp, Homo sapien
gcaggcttcctgtggtggcagagtg

SEQ ID NO: 1553253 - DNA, 25 bp, Homo sapien
gagctgggtccccagacacacttcc

SEQ ID NO: 1553254 - DNA, 25 bp, Homo sapien
ctgggtccccagacacacttcctct

SEQ ID NO: 1553255 - DNA, 25 bp, Homo sapien
cacttcctctccctgtggactgcac

SEQ ID NO: 1553256 - DNA, 25 bp, Homo sapien
ttcatgaagtgtgagctgggtcccc

SEQ ID NO: 1553257 - DNA, 25 bp, Homo sapien
atccaatcctccattcatcgatgga

SEQ ID NO: 1553258 - DNA, 25 bp, Homo sapien
tccaatcctccattcatcgatggac

SEQ ID NO: 1553259 - DNA, 25 bp, Homo sapien
ttatccaatcctccattcatcgatg

SEQ ID NO: 1553260 - DNA, 25 bp, Homo sapien
tatccaatcctccattcatcgatgg

SEQ ID NO: 1553261 - DNA, 25 bp, Homo sapien
catacgcatacatgtatctttgtaa

SEQ ID NO: 1553262 - DNA, 25 bp, Homo sapien
atttggattgagtccatgtctttgg

SEQ ID NO: 1553263 - DNA, 25 bp, Homo sapien
ttggattgagtccatgtctttggta

SEQ ID NO: 1553264 - DNA, 25 bp, Homo sapien
cagtgcccggcctgtacattttctt

SEQ ID NO: 1553265 - DNA, 25 bp, Homo sapien
tatttgtatgtttaaaagttgacat

SEQ ID NO: 1553266 - DNA, 25 bp, Homo sapien
ctgtatttgtatgtttaaaagttga

SEQ ID NO: 1553267 - DNA, 25 bp, Homo sapien
tgtatttgtatgtttaaaagttgac

SEQ ID NO: 1553268 - DNA, 25 bp, Homo sapien
gtatttgtatgtttaaaagttgaca

SEQ ID NO: 1553269 - DNA, 25 bp, Homo sapien
gcatgcaacgtaggcagcttcgcag

SEQ ID NO: 1553270 - DNA, 25 bp, Homo sapien
tgcaggctccgcatgcaacgtaggc

SEQ ID NO: 1553271 - DNA, 25 bp, Homo sapien
aggctccgcatgcaacgtaggcagc

SEQ ID NO: 1553272 - DNA, 25 bp, Homo sapien
tccgcatgcaacgtaggcagcttcg

SEQ ID NO: 1553273 - DNA, 25 bp, Homo sapien
gacagagagtgaagtagtcgggtgg

SEQ ID NO: 1553274 - DNA, 25 bp, Homo sapien
acagagagtgaagtagtcgggtggg

SEQ ID NO: 1553275 - DNA, 25 bp, Homo sapien
catcttagggtggaaggcggccaca

SEQ ID NO: 1553276 - DNA, 25 bp, Homo sapien
tgcatctgggcgctgccaggtcacc

SEQ ID NO: 1553277 - DNA, 25 bp, Homo sapien
tcgggtagcacttgaactcgcacat

SEQ ID NO: 1553278 - DNA, 25 bp, Homo sapien
cacattctggtggttcgcaggtgca

SEQ ID NO: 1553279 - DNA, 25 bp, Homo sapien
cttgcccagtgctctgcttggcaga

SEQ ID NO: 1553280 - DNA, 25 bp, Homo sapien
tgcccagtgctctgcttggcagaga

SEQ ID NO: 1553281 - DNA, 25 bp, Homo sapien
ttgcccagtgctctgcttggcagag

SEQ ID NO: 1553282 - DNA, 25 bp, Homo sapien
gcccagtgctctgcttggcagagac

SEQ ID NO: 1553283 - DNA, 25 bp, Homo sapien
caggtcatccctcggacggacccct

SEQ ID NO: 1553284 - DNA, 25 bp, Homo sapien
ctatgactctgagccaggtcatccc

SEQ ID NO: 1553285 - DNA, 25 bp, Homo sapien
ggaaggtggcaaactcgcaagtgta

SEQ ID NO: 1553286 - DNA, 25 bp, Homo sapien
tggcaaactcgcaagtgtagttgcc

SEQ ID NO: 1553287 - DNA, 25 bp, Homo sapien
caaaggcttcttatagtccacaagg

SEQ ID NO: 1553288 - DNA, 25 bp, Homo sapien
tactacagctcttatcctccctggg

SEQ ID NO: 1553289 - DNA, 25 bp, Homo sapien
caaggcttttgccaatctgtcccca

SEQ ID NO: 1553290 - DNA, 25 bp, Homo sapien
gactttgtagttgccttaccctgtg

SEQ ID NO: 1553291 - DNA, 25 bp, Homo sapien
cagagggccactgtcgtagggtcct

SEQ ID NO: 1553292 - DNA, 25 bp, Homo sapien
cagggctggttcctcgaagctctca

SEQ ID NO: 1553293 - DNA, 25 bp, Homo sapien
tggtgacagtgacagttccggccag

SEQ ID NO: 1553294 - DNA, 25 bp, Homo sapien
cactttgcaggtgaccgtgacacca

SEQ ID NO: 1553295 - DNA, 25 bp, Homo sapien
agtgcagaatttggcttcagggaac

SEQ ID NO: 1553296 - DNA, 25 bp, Homo sapien
tgcaggaacccagtaaagccaatgt

SEQ ID NO: 1553297 - DNA, 25 bp, Homo sapien
tagacaatggcaggaaggtagtgca

SEQ ID NO: 1553298 - DNA, 25 bp, Homo sapien
cagggaacccacgtagacaacattc

SEQ ID NO: 1553299 - DNA, 25 bp, Homo sapien
gactcagtatagatggcacctaggg

SEQ ID NO: 1553300 - DNA, 25 bp, Homo sapien
aatctgtgtaagtggaggcattgcc

SEQ ID NO: 1553301 - DNA, 25 bp, Homo sapien
gcatgattgatctaacggtccaggg

SEQ ID NO: 1553302 - DNA, 25 bp, Homo sapien
gagctgttgcacttatgggcgcacg

SEQ ID NO: 1553303 - DNA, 25 bp, Homo sapien
tacggccgaggtaccagttgtcatc

SEQ ID NO: 1553304 - DNA, 25 bp, Homo sapien
tcatagccggagatggacacttcag

SEQ ID NO: 1553305 - DNA, 25 bp, Homo sapien
ctcagggtggcatcagtacggccga

SEQ ID NO: 1553306 - DNA, 25 bp, Homo sapien
tgctgcggacgtcacagctcagggt

SEQ ID NO: 1553307 - DNA, 25 bp, Homo sapien
tccactgcgtggatgaccagctggg

SEQ ID NO: 1553308 - DNA, 25 bp, Homo sapien
tgcccacggcattggtgactgtgca

SEQ ID NO: 1553309 - DNA, 25 bp, Homo sapien
tgactgtgcagacgaaggtggtatt

SEQ ID NO: 1553310 - DNA, 25 bp, Homo sapien
tattgaacagactgtccactgcgtg

SEQ ID NO: 1553311 - DNA, 25 bp, Homo sapien
agaactccaggggagcggacccagg

SEQ ID NO: 1553312 - DNA, 25 bp, Homo sapien
gccacgaggggaaggccaaccctca

SEQ ID NO: 1553313 - DNA, 25 bp, Homo sapien
acacacggcccccaagacccactca

SEQ ID NO: 1553314 - DNA, 25 bp, Homo sapien
tgcatccctcccaggtcggcggcgc

SEQ ID NO: 1553315 - DNA, 25 bp, Homo sapien
caacctcagcaagagtgcctagcaa

SEQ ID NO: 1553316 - DNA, 25 bp, Homo sapien
gaatgagaatctccctaacggactt

SEQ ID NO: 1553317 - DNA, 25 bp, Homo sapien
ggttcctgggaagaagctcctccca

SEQ ID NO: 1553318 - DNA, 25 bp, Homo sapien
tcccctgggtgtgctactgagggca

SEQ ID NO: 1553319 - DNA, 25 bp, Homo sapien
agatagatctgtcctgtggtgcggc

SEQ ID NO: 1553320 - DNA, 25 bp, Homo sapien
taactggaccaggttgagcctatct

SEQ ID NO: 1553321 - DNA, 25 bp, Homo sapien
tagggttcaaagctctgaatcaggc

SEQ ID NO: 1553322 - DNA, 25 bp, Homo sapien
tgcggcgttcgtatcctatgttcgt

SEQ ID NO: 1553323 - DNA, 25 bp, Homo sapien
gacaaatcagatctagcaacaccaa

SEQ ID NO: 1553324 - DNA, 25 bp, Homo sapien
aaactcccatgtctggcgatcgccg

SEQ ID NO: 1553325 - DNA, 25 bp, Homo sapien
aagggagacacaagatcacgaggat

SEQ ID NO: 1553326 - DNA, 25 bp, Homo sapien
tcgctacagcctgagcaccactttg

SEQ ID NO: 1553327 - DNA, 25 bp, Homo sapien
cccacatctcggggcgaggccctgg

SEQ ID NO: 1553328 - DNA, 25 bp, Homo sapien
ccacatctcggggcgaggccctggg

SEQ ID NO: 1553329 - DNA, 25 bp, Homo sapien
gcccacatctcggggcgaggccctg

SEQ ID NO: 1553330 - DNA, 25 bp, Homo sapien
cacctgagctttcggatcgtagaat

SEQ ID NO: 1553331 - DNA, 25 bp, Homo sapien
ttcccaacacctgagctttcggatc

SEQ ID NO: 1553332 - DNA, 25 bp, Homo sapien
tgccatctggttccatgggaccagg

SEQ ID NO: 1553333 - DNA, 25 bp, Homo sapien
tgagctttcggatcgtagaatcccc

SEQ ID NO: 1553334 - DNA, 25 bp, Homo sapien
cataaactgcccgccgtgagatgag

SEQ ID NO: 1553335 - DNA, 25 bp, Homo sapien
aaactgcccgccgtgagatgaggga

SEQ ID NO: 1553336 - DNA, 25 bp, Homo sapien
cgtgagatgagggagccgtccagct

SEQ ID NO: 1553337 - DNA, 25 bp, Homo sapien
tcacacataaactgcccgccgtgag

SEQ ID NO: 1553338 - DNA, 25 bp, Homo sapien
tccactccagtgtcgtccagacgaa

SEQ ID NO: 1553339 - DNA, 25 bp, Homo sapien
tttattaactcctgagtgtcacggg

SEQ ID NO: 1553340 - DNA, 25 bp, Homo sapien
catgcagccctagagacgggagaag

SEQ ID NO: 1553341 - DNA, 25 bp, Homo sapien
gacgaacaagtccaaccagtctgga

SEQ ID NO: 1553342 - DNA, 25 bp, Homo sapien
ataaggatgcccgtggcagccacag

SEQ ID NO: 1553343 - DNA, 25 bp, Homo sapien
agtagcaatgatggcggcgatgatg

SEQ ID NO: 1553344 - DNA, 25 bp, Homo sapien
cttccgctgctgccggcagataagg

SEQ ID NO: 1553345 - DNA, 25 bp, Homo sapien
gctgctgccggcagataaggatgcc

SEQ ID NO: 1553346 - DNA, 25 bp, Homo sapien
ctcagattataccactgaactctag

SEQ ID NO: 1553347 - DNA, 25 bp, Homo sapien
agctcagattataccactgaactct

SEQ ID NO: 1553348 - DNA, 25 bp, Homo sapien
gctcagattataccactgaactcta

SEQ ID NO: 1553349 - DNA, 25 bp, Homo sapien
gcctccagcttcgcttttggggttg

SEQ ID NO: 1553350 - DNA, 25 bp, Homo sapien
cgcttttggggttggtggcttgtag

SEQ ID NO: 1553351 - DNA, 25 bp, Homo sapien
tccagcttcgcttttggggttggtg

SEQ ID NO: 1553352 - DNA, 25 bp, Homo sapien
tcgcttttggggttggtggcttgta

SEQ ID NO: 1553353 - DNA, 25 bp, Homo sapien
tcttgagtgggctgtgctccgaggc

SEQ ID NO: 1553354 - DNA, 25 bp, Homo sapien
atgaggcgccagcatcaaagtaggg

SEQ ID NO: 1553355 - DNA, 25 bp, Homo sapien
ctgctcagtgcatgaggcgccagca

SEQ ID NO: 1553356 - DNA, 25 bp, Homo sapien
ctccgaggcccccagagtgaagagc

SEQ ID NO: 1553357 - DNA, 25 bp, Homo sapien
tgctgggtagcccatgttgcccacg

SEQ ID NO: 1553358 - DNA, 25 bp, Homo sapien
ggaatcctgaacacatctcaatgca

SEQ ID NO: 1553359 - DNA, 25 bp, Homo sapien
gacacacccttgaccttgagttatg

SEQ ID NO: 1553360 - DNA, 25 bp, Homo sapien
ctcaatgcattaagcaccaaccggg

SEQ ID NO: 1553361 - DNA, 25 bp, Homo sapien
gcagctcatggtatcgaggcatttc

SEQ ID NO: 1553362 - DNA, 25 bp, Homo sapien
gtgggcagctcatggtatcgaggca

SEQ ID NO: 1553363 - DNA, 25 bp, Homo sapien
gggcagctcatggtatcgaggcatt

SEQ ID NO: 1553364 - DNA, 25 bp, Homo sapien
tgggcagctcatggtatcgaggcat

SEQ ID NO: 1553365 - DNA, 25 bp, Homo sapien
ggggaccccaggcttgtggctccag

SEQ ID NO: 1553366 - DNA, 25 bp, Homo sapien
taggacagagcatcatagatggggt

SEQ ID NO: 1553367 - DNA, 25 bp, Homo sapien
gttgatcttgtccagatactcttcc

SEQ ID NO: 1553368 - DNA, 25 bp, Homo sapien
gatggggttgatcttgtccagatac

SEQ ID NO: 1553369 - DNA, 25 bp, Homo sapien
atggcccgggacatgacaaagcctt

SEQ ID NO: 1553370 - DNA, 25 bp, Homo sapien
cccgggacatgacaaagcctttgcc

SEQ ID NO: 1553371 - DNA, 25 bp, Homo sapien
aaagcctttgccctggtaggaatca

SEQ ID NO: 1553372 - DNA, 25 bp, Homo sapien
cctttgccctggtaggaatcagagg

SEQ ID NO: 1553373 - DNA, 25 bp, Homo sapien
tcctgcctcatgagataaggttgcc

SEQ ID NO: 1553374 - DNA, 25 bp, Homo sapien
gccaggattccattatcacggtgaa

SEQ ID NO: 1553375 - DNA, 25 bp, Homo sapien
tcaacaggtgagatgtgagacgcca

SEQ ID NO: 1553376 - DNA, 25 bp, Homo sapien
tggtctaaggtcacagtctgggaga

SEQ ID NO: 1553377 - DNA, 25 bp, Homo sapien
gtgcctcgggagaattctaatctgt

SEQ ID NO: 1553378 - DNA, 25 bp, Homo sapien
ccagagtgcctcgggagaattctaa

SEQ ID NO: 1553379 - DNA, 25 bp, Homo sapien
attctaatctgttctgcgaaccctg

SEQ ID NO: 1553380 - DNA, 25 bp, Homo sapien
gagtgcctcgggagaattctaatct

SEQ ID NO: 1553381 - DNA, 25 bp, Homo sapien
accccgtgcgccacgcgcaaccgaa

SEQ ID NO: 1553382 - DNA, 25 bp, Homo sapien
cgtgcgccacgcgcaaccgaacccg

SEQ ID NO: 1553383 - DNA, 25 bp, Homo sapien
acgcgcaaccgaacccgctgccgcc

SEQ ID NO: 1553384 - DNA, 25 bp, Homo sapien
gggctccgctcccaccccgtgcgcc

SEQ ID NO: 1553385 - DNA, 25 bp, Homo sapien
ccagcaaatccgcacccggctccgg

SEQ ID NO: 1553386 - DNA, 25 bp, Homo sapien
gccccagcaaatccgcacccggctc

SEQ ID NO: 1553387 - DNA, 25 bp, Homo sapien
cagccccagcaaatccgcacccggc

SEQ ID NO: 1553388 - DNA, 25 bp, Homo sapien
agcaaatccgcacccggctccggcc

SEQ ID NO: 1553389 - DNA, 25 bp, Homo sapien
cggcagcgtgaagcccggcggcgag

SEQ ID NO: 1553390 - DNA, 25 bp, Homo sapien
gcggcagcgtgaagcccggcggcga

SEQ ID NO: 1553391 - DNA, 25 bp, Homo sapien
cggcggcagcgtgaagcccggcggc

SEQ ID NO: 1553392 - DNA, 25 bp, Homo sapien
ttccgaacttcgactcgtactggtg

SEQ ID NO: 1553393 - DNA, 25 bp, Homo sapien
aacttcgactcgtactggtgccggc

SEQ ID NO: 1553394 - DNA, 25 bp, Homo sapien
ttcgactcgtactggtgccggcgcc

SEQ ID NO: 1553395 - DNA, 25 bp, Homo sapien
ccgttccgaacttcgactcgtactg

SEQ ID NO: 1553396 - DNA, 25 bp, Homo sapien
cttgcacttccggtggcactcctcg

SEQ ID NO: 1553397 - DNA, 25 bp, Homo sapien
gcactcctcgaatgtgcccgggttg

SEQ ID NO: 1553398 - DNA, 25 bp, Homo sapien
actcctcgaatgtgcccgggttggg

SEQ ID NO: 1553399 - DNA, 25 bp, Homo sapien
tgcacttccggtggcactcctcgaa

SEQ ID NO: 1553400 - DNA, 25 bp, Homo sapien
gacaccctccatctgaatgggaaac

SEQ ID NO: 1553401 - DNA, 25 bp, Homo sapien
tgtgacgatactggacagataggct

SEQ ID NO: 1553402 - DNA, 25 bp, Homo sapien
gcgagagctgtgacgatactggaca

SEQ ID NO: 1553403 - DNA, 25 bp, Homo sapien
acgatactggacagataggcttgcc

SEQ ID NO: 1553404 - DNA, 25 bp, Homo sapien
aaggaaagcgagagctgtgacgata

SEQ ID NO: 1553405 - DNA, 25 bp, Homo sapien
gtccccacatatgtgaccccgaagt

SEQ ID NO: 1553406 - DNA, 25 bp, Homo sapien
tgtgaccccgaagtggtagttggac

SEQ ID NO: 1553407 - DNA, 25 bp, Homo sapien
gtggtagttggactccccgattgtg

SEQ ID NO: 1553408 - DNA, 25 bp, Homo sapien
ctgctttgtccccacatatgtgacc

SEQ ID NO: 1553409 - DNA, 25 bp, Homo sapien
tggatggccatcttggacctgagac

SEQ ID NO: 1553410 - DNA, 25 bp, Homo sapien
agcgttgagactgccactgttgtcc

SEQ ID NO: 1553411 - DNA, 25 bp, Homo sapien
tgtcacccaccagtacagggaacgc

SEQ ID NO: 1553412 - DNA, 25 bp, Homo sapien
ccagctggtgaatgacctgagcgtt

SEQ ID NO: 1553413 - DNA, 25 bp, Homo sapien
ctgaacccacgaggacgtctgggtt

SEQ ID NO: 1553414 - DNA, 25 bp, Homo sapien
ccagggtgacggctgctgtgaagtc

SEQ ID NO: 1553415 - DNA, 25 bp, Homo sapien
agttcacaaacttcgactgctgggt

SEQ ID NO: 1553416 - DNA, 25 bp, Homo sapien
ctgtgaagtcagagccccgatactc

SEQ ID NO: 1553417 - DNA, 25 bp, Homo sapien
tgggcaactgatttcacccctgggc

SEQ ID NO: 1553418 - DNA, 25 bp, Homo sapien
gccatgtgcccttagtggagaacct

SEQ ID NO: 1553419 - DNA, 25 bp, Homo sapien
gacaccctgggtcaagtcggagctg

SEQ ID NO: 1553420 - DNA, 25 bp, Homo sapien
caagtggtgactgtgcatgtggccc

SEQ ID NO: 1553421 - DNA, 25 bp, Homo sapien
ttgaggtgagctgacactgtgccac

SEQ ID NO: 1553422 - DNA, 25 bp, Homo sapien
acagagactgcgtctcagggcagag

SEQ ID NO: 1553423 - DNA, 25 bp, Homo sapien
agactgcgtctcagggcagaggtat

SEQ ID NO: 1553424 - DNA, 25 bp, Homo sapien
gcaacagagactgcgtctcagggca

SEQ ID NO: 1553425 - DNA, 25 bp, Homo sapien
agggccaggcaaggcgtgatgctct

SEQ ID NO: 1553426 - DNA, 25 bp, Homo sapien
tctggaggtagtgggctacgaggat

SEQ ID NO: 1553427 - DNA, 25 bp, Homo sapien
tgatgctctggaggtagtgggctac

SEQ ID NO: 1553428 - DNA, 25 bp, Homo sapien
ccagggccaggcaaggcgtgatgct

SEQ ID NO: 1553429 - DNA, 25 bp, Homo sapien
tccaggccgccggtggtagaccagc

SEQ ID NO: 1553430 - DNA, 25 bp, Homo sapien
tcctctccaggccgccggtggtaga

SEQ ID NO: 1553431 - DNA, 25 bp, Homo sapien
cgccggtggtagaccagctctccac

SEQ ID NO: 1553432 - DNA, 25 bp, Homo sapien
ggccgccggtggtagaccagctctc

SEQ ID NO: 1553433 - DNA, 25 bp, Homo sapien
gtagtatgttgcgtgcatgcccgcc

SEQ ID NO: 1553434 - DNA, 25 bp, Homo sapien
tttgtggtagtatgttgcgtgcatg

SEQ ID NO: 1553435 - DNA, 25 bp, Homo sapien
gtatgttgcgtgcatgcccgcctgg

SEQ ID NO: 1553436 - DNA, 25 bp, Homo sapien
tggtagtatgttgcgtgcatgcccg

SEQ ID NO: 1553437 - DNA, 25 bp, Homo sapien
gctggtacccgaaggagacgctggt

SEQ ID NO: 1553438 - DNA, 25 bp, Homo sapien
agctggtacccgaaggagacgctgg

SEQ ID NO: 1553439 - DNA, 25 bp, Homo sapien
tcctgcctgtttcccgcgtagggga

SEQ ID NO: 1553440 - DNA, 25 bp, Homo sapien
ttccctggtaatgtggaggcccaca

SEQ ID NO: 1553441 - DNA, 25 bp, Homo sapien
tgttccctggtaatgtggaggccca

SEQ ID NO: 1553442 - DNA, 25 bp, Homo sapien
gttccctggtaatgtggaggcccac

SEQ ID NO: 1553443 - DNA, 25 bp, Homo sapien
ccctggtaatgtggaggcccacagg

SEQ ID NO: 1553444 - DNA, 25 bp, Homo sapien
caacttcacgctggagcaaatggct

SEQ ID NO: 1553445 - DNA, 25 bp, Homo sapien
caaagtgccttctaccctggctggg

SEQ ID NO: 1553446 - DNA, 25 bp, Homo sapien
tagttgtgaccttgaaacctctgga

SEQ ID NO: 1553447 - DNA, 25 bp, Homo sapien
agactggacattgggactacgacca

SEQ ID NO: 1553448 - DNA, 25 bp, Homo sapien
ttgttcttgcggtgattcaggaagg

SEQ ID NO: 1553449 - DNA, 25 bp, Homo sapien
tgttcttgcggtgattcaggaaggc

SEQ ID NO: 1553450 - DNA, 25 bp, Homo sapien
tctgtaaaatgtcccggttcttcca

SEQ ID NO: 1553451 - DNA, 25 bp, Homo sapien
gagtaggactcaaggatcccagact

SEQ ID NO: 1553452 - DNA, 25 bp, Homo sapien
ggaaggacgtccttcacctccgctg

SEQ ID NO: 1553453 - DNA, 25 bp, Homo sapien
gctgagtaggactcaaggatcccag

SEQ ID NO: 1553454 - DNA, 25 bp, Homo sapien
gggctgagtaggactcaaggatccc

SEQ ID NO: 1553455 - DNA, 25 bp, Homo sapien
gtcccagctctttctagaggcccct

SEQ ID NO: 1553456 - DNA, 25 bp, Homo sapien
cagctctttctagaggcccctgagc

SEQ ID NO: 1553457 - DNA, 25 bp, Homo sapien
gctctttctagaggcccctgagctc

SEQ ID NO: 1553458 - DNA, 25 bp, Homo sapien
gagctcatccccgtgcccccgactg

SEQ ID NO: 1553459 - DNA, 25 bp, Homo sapien
cttccaagccttgttgcattatctg

SEQ ID NO: 1553460 - DNA, 25 bp, Homo sapien
cctggtcttctcttatctccccatc

SEQ ID NO: 1553461 - DNA, 25 bp, Homo sapien
atccccaggtcggcctccatagaaa

SEQ ID NO: 1553462 - DNA, 25 bp, Homo sapien
ttatctgcaacagcctaatcccagc

SEQ ID NO: 1553463 - DNA, 25 bp, Homo sapien
caggaatgtgaccagcaacgcagcc

SEQ ID NO: 1553464 - DNA, 25 bp, Homo sapien
ccaggaatgtgaccagcaacgcagc

SEQ ID NO: 1553465 - DNA, 25 bp, Homo sapien
gccaggaatgtgaccagcaacgcag

SEQ ID NO: 1553466 - DNA, 25 bp, Homo sapien
ctcagttcctgggtgacctgggagc

SEQ ID NO: 1553467 - DNA, 25 bp, Homo sapien
ggtaatcccaaaagcgacccagtgc

SEQ ID NO: 1553468 - DNA, 25 bp, Homo sapien
gtctccaccgcttgctccaccttgg

SEQ ID NO: 1553469 - DNA, 25 bp, Homo sapien
tgccactcggtctgctggcgcagct

SEQ ID NO: 1553470 - DNA, 25 bp, Homo sapien
ggagggtgtcgcacagtgggaggcg

SEQ ID NO: 1553471 - DNA, 25 bp, Homo sapien
gagacgaagaaggagctaggaggcc

SEQ ID NO: 1553472 - DNA, 25 bp, Homo sapien
gagagggcgggagggtgtcgcacag

SEQ ID NO: 1553473 - DNA, 25 bp, Homo sapien
gaaggaacggggcagaggccgagag

SEQ ID NO: 1553474 - DNA, 25 bp, Homo sapien
aggtcatcggcatcgcggaggagcc

SEQ ID NO: 1553475 - DNA, 25 bp, Homo sapien
tggtacactgccaggcgcttctgca

SEQ ID NO: 1553476 - DNA, 25 bp, Homo sapien
gcctgcaggcgtatctgctgggcct

SEQ ID NO: 1553477 - DNA, 25 bp, Homo sapien
tgttcctccagttccgatttgtagg

SEQ ID NO: 1553478 - DNA, 25 bp, Homo sapien
ccaggggctcgaaccagctcttgag

SEQ ID NO: 1553479 - DNA, 25 bp, Homo sapien
ggtgcccacggcagcctgcaccttc

SEQ ID NO: 1553480 - DNA, 25 bp, Homo sapien
ggcgctggtgcccacggcagcctgc

SEQ ID NO: 1553481 - DNA, 25 bp, Homo sapien
cgctggtgcccacggcagcctgcac

SEQ ID NO: 1553482 - DNA, 25 bp, Homo sapien
tcagtgattgtcgctgggcacaggg

SEQ ID NO: 1553483 - DNA, 25 bp, Homo sapien
cacggggtggcgtggggtcgcatgg

SEQ ID NO: 1553484 - DNA, 25 bp, Homo sapien
gggtggcgtggggtcgcatggctgc

SEQ ID NO: 1553485 - DNA, 25 bp, Homo sapien
ggcgtggggtcgcatggctgcaggc

SEQ ID NO: 1553486 - DNA, 25 bp, Homo sapien
gtggcgtggggtcgcatggctgcag

SEQ ID NO: 1553487 - DNA, 25 bp, Homo sapien
agggtctcccgctgcaggctgcgcg

SEQ ID NO: 1553488 - DNA, 25 bp, Homo sapien
cttggtgaatctttattaaactagg

SEQ ID NO: 1553489 - DNA, 25 bp, Homo sapien
acttggtgaatctttattaaactag

SEQ ID NO: 1553490 - DNA, 25 bp, Homo sapien
cagggtctcccgctgcaggctgcgc

SEQ ID NO: 1553491 - DNA, 25 bp, Homo sapien
attcctcagacgctgagttaaggaa

SEQ ID NO: 1553492 - DNA, 25 bp, Homo sapien
cggggaatgggcaagattcctgtct

SEQ ID NO: 1553493 - DNA, 25 bp, Homo sapien
aaaattcctcagacgctgagttaag

SEQ ID NO: 1553494 - DNA, 25 bp, Homo sapien
tattcgttcggggaatgggcaagat

SEQ ID NO: 1553495 - DNA, 25 bp, Homo sapien
gggggcggggcaggttgatgttgat

SEQ ID NO: 1553496 - DNA, 25 bp, Homo sapien
ggcggggcaggttgatgttgatctc

SEQ ID NO: 1553497 - DNA, 25 bp, Homo sapien
gggcggggcaggttgatgttgatct

SEQ ID NO: 1553498 - DNA, 25 bp, Homo sapien
gagggggcggggcaggttgatgttg

SEQ ID NO: 1553499 - DNA, 25 bp, Homo sapien
ttgggaggtcctgtcctgcccgcag

SEQ ID NO: 1553500 - DNA, 25 bp, Homo sapien
atccttgctggagggcttggttggg

SEQ ID NO: 1553501 - DNA, 25 bp, Homo sapien
ctgaatccttgctggagggcttggt

SEQ ID NO: 1553502 - DNA, 25 bp, Homo sapien
ggttgggaggtcctgtcctgcccgc

SEQ ID NO: 1553503 - DNA, 25 bp, Homo sapien
ttcaggggatcagtggcaccctcct

SEQ ID NO: 1553504 - DNA, 25 bp, Homo sapien
gttcaggggatcagtggcaccctcc

SEQ ID NO: 1553505 - DNA, 25 bp, Homo sapien
tcaggggatcagtggcaccctcctc

SEQ ID NO: 1553506 - DNA, 25 bp, Homo sapien
ggttcaggggatcagtggcaccctc

SEQ ID NO: 1553507 - DNA, 25 bp, Homo sapien
cttccaagacgatcgacagaaccac

SEQ ID NO: 1553508 - DNA, 25 bp, Homo sapien
ccaggaccgggagcgacaggaagag

SEQ ID NO: 1553509 - DNA, 25 bp, Homo sapien
acgatcgacagaaccaccaccagga

SEQ ID NO: 1553510 - DNA, 25 bp, Homo sapien
acagaaccaccaccaggaccgggag

SEQ ID NO: 1553511 - DNA, 25 bp, Homo sapien
cggttgctagtgctctcctgcgcag

SEQ ID NO: 1553512 - DNA, 25 bp, Homo sapien
ggtgtgggcctcaatacgtcatcgg

SEQ ID NO: 1553513 - DNA, 25 bp, Homo sapien
ccactttcaaggctgtcgaagcagg

SEQ ID NO: 1553514 - DNA, 25 bp, Homo sapien
aagcaggacagccaatcccagaggt

SEQ ID NO: 1553515 - DNA, 25 bp, Homo sapien
cactggagacgtctggggtcccctg

SEQ ID NO: 1553516 - DNA, 25 bp, Homo sapien
cactctgtttgatgcggctgatgag

SEQ ID NO: 1553517 - DNA, 25 bp, Homo sapien
tatccaaggcactggagacgtctgg

SEQ ID NO: 1553518 - DNA, 25 bp, Homo sapien
cccgagccttgtcctccagtgtgtt

SEQ ID NO: 1553519 - DNA, 25 bp, Homo sapien
agccaccatacctgggcaagaccat

SEQ ID NO: 1553520 - DNA, 25 bp, Homo sapien
accatacctgggcaagaccatcttg

SEQ ID NO: 1553521 - DNA, 25 bp, Homo sapien
catacctgggcaagaccatcttgtt

SEQ ID NO: 1553522 - DNA, 25 bp, Homo sapien
tacctgggcaagaccatcttgtttt

SEQ ID NO: 1553523 - DNA, 25 bp, Homo sapien
gatggaccaaagcacgttgaagtct

SEQ ID NO: 1553524 - DNA, 25 bp, Homo sapien
aaaaataccatgtgtggtgtcacac

SEQ ID NO: 1553525 - DNA, 25 bp, Homo sapien
cactgtctgtgggattaggaggacc

SEQ ID NO: 1553526 - DNA, 25 bp, Homo sapien
tgggtgggccaacttctgtgcctca

SEQ ID NO: 1553527 - DNA, 25 bp, Homo sapien
ctttctgaaatgtctctgaaaacca

SEQ ID NO: 1553528 - DNA, 25 bp, Homo sapien
tccttcactttctgaaatgtctctg

SEQ ID NO: 1553529 - DNA, 25 bp, Homo sapien
ctgaaatgtctctgaaaaccactcc

SEQ ID NO: 1553530 - DNA, 25 bp, Homo sapien
tcatgagtcaatcttgagtttctcc

SEQ ID NO: 1553531 - DNA, 25 bp, Homo sapien
tcctgggatgtcacccttcaggtcc

SEQ ID NO: 1553532 - DNA, 25 bp, Homo sapien
gtgtgggaaatttcagaggcccctc

SEQ ID NO: 1553533 - DNA, 25 bp, Homo sapien
cacatggagggagtcctcagcacag

SEQ ID NO: 1553534 - DNA, 25 bp, Homo sapien
ggcccctcctgggatgtcacccttc

SEQ ID NO: 1553535 - DNA, 25 bp, Homo sapien
ttcaggggatcagtggcaccctcct

SEQ ID NO: 1553536 - DNA, 25 bp, Homo sapien
gttcaggggatcagtggcaccctcc

SEQ ID NO: 1553537 - DNA, 25 bp, Homo sapien
tcaggggatcagtggcaccctcctc

SEQ ID NO: 1553538 - DNA, 25 bp, Homo sapien
ggttcaggggatcagtggcaccctc

SEQ ID NO: 1553539 - DNA, 25 bp, Homo sapien
cttccaagacgatcgacagaaccac

SEQ ID NO: 1553540 - DNA, 25 bp, Homo sapien
ccaggaccgggagcgacaggaagag

SEQ ID NO: 1553541 - DNA, 25 bp, Homo sapien
acgatcgacagaaccaccaccagga

SEQ ID NO: 1553542 - DNA, 25 bp, Homo sapien
acagaaccaccaccaggaccgggag

SEQ ID NO: 1553543 - DNA, 25 bp, Homo sapien
tcccaagtagccaagcgcgcaccac

SEQ ID NO: 1553544 - DNA, 25 bp, Homo sapien
tgaggcaggggtgcaaaatttggtt

SEQ ID NO: 1553545 - DNA, 25 bp, Homo sapien
aagtagccaagcgcgcaccacaacg

SEQ ID NO: 1553546 - DNA, 25 bp, Homo sapien
agccaagcgcgcaccacaacgcctg

SEQ ID NO: 1553547 - DNA, 25 bp, Homo sapien
ggagccccctaggctggggctgggc

SEQ ID NO: 1553548 - DNA, 25 bp, Homo sapien
tggagccccctaggctggggctggg

SEQ ID NO: 1553549 - DNA, 25 bp, Homo sapien
ctggagccccctaggctggggctgg

SEQ ID NO: 1553550 - DNA, 25 bp, Homo sapien
ggttgatgaattcccgagtgtagtc

SEQ ID NO: 1553551 - DNA, 25 bp, Homo sapien
ccaggccatcaaaggggttggagac

SEQ ID NO: 1553552 - DNA, 25 bp, Homo sapien
tcccgagtgtagtcctccagggtct

SEQ ID NO: 1553553 - DNA, 25 bp, Homo sapien
tgatgcggttgatgaattcccgagt

SEQ ID NO: 1553554 - DNA, 25 bp, Homo sapien
tcctccagggctccacacaaacaca

SEQ ID NO: 1553555 - DNA, 25 bp, Homo sapien
caaacacaccccagccctcccgtgc

SEQ ID NO: 1553556 - DNA, 25 bp, Homo sapien
tccagggctccacacaaacacaccc

SEQ ID NO: 1553557 - DNA, 25 bp, Homo sapien
cagccctcccgtgccctgggaaggg

SEQ ID NO: 1553558 - DNA, 25 bp, Homo sapien
ttccgaaatgtctctgaaaaccaat

SEQ ID NO: 1553559 - DNA, 25 bp, Homo sapien
tccgaaatgtctctgaaaaccaatc

SEQ ID NO: 1553560 - DNA, 25 bp, Homo sapien
tttccgaaatgtctctgaaaaccaa

SEQ ID NO: 1553561 - DNA, 25 bp, Homo sapien
ccgaaatgtctctgaaaaccaatcc

SEQ ID NO: 1553562 - DNA, 25 bp, Homo sapien
acacctgggcgtgtgaccacattgg

SEQ ID NO: 1553563 - DNA, 25 bp, Homo sapien
ccataggatttttattggtcacacc

SEQ ID NO: 1553564 - DNA, 25 bp, Homo sapien
tttttattggtcacacctgggcgtg

SEQ ID NO: 1553565 - DNA, 25 bp, Homo sapien
ctgggcgtgtgaccacattggacac

SEQ ID NO: 1553566 - DNA, 25 bp, Homo sapien
gggcgcagccacttactgacgactc

SEQ ID NO: 1553567 - DNA, 25 bp, Homo sapien
cgactcctcaaccagcaagtggtgg

SEQ ID NO: 1553568 - DNA, 25 bp, Homo sapien
ttatttgccacaaaaaccctatcag

SEQ ID NO: 1553569 - DNA, 25 bp, Homo sapien
aaccctatcaggtgggcatcttcat

SEQ ID NO: 1553570 - DNA, 25 bp, Homo sapien
gggttccgtgcctctgtccctctgt

SEQ ID NO: 1553571 - DNA, 25 bp, Homo sapien
tctgggggttccgtgcctctgtccc

SEQ ID NO: 1553572 - DNA, 25 bp, Homo sapien
ttctgggggttccgtgcctctgtcc

SEQ ID NO: 1553573 - DNA, 25 bp, Homo sapien
tgggggttccgtgcctctgtccctc

SEQ ID NO: 1553574 - DNA, 25 bp, Homo sapien
ccccaatgcaggccaggaccagcac

SEQ ID NO: 1553575 - DNA, 25 bp, Homo sapien
caatgcaggccaggaccagcacgca

SEQ ID NO: 1553576 - DNA, 25 bp, Homo sapien
gcaggccaggaccagcacgcagagg

SEQ ID NO: 1553577 - DNA, 25 bp, Homo sapien
caggccaggaccagcacgcagaggc

SEQ ID NO: 1553578 - DNA, 25 bp, Homo sapien
ggtgtgggccccacatccctccacc

SEQ ID NO: 1553579 - DNA, 25 bp, Homo sapien
caggtgtgggccccacatccctcca

SEQ ID NO: 1553580 - DNA, 25 bp, Homo sapien
tgtgggccccacatccctccaccca

SEQ ID NO: 1553581 - DNA, 25 bp, Homo sapien
catccctccacccacttcttctcac

SEQ ID NO: 1553582 - DNA, 25 bp, Homo sapien
agaaccattgccacccgtctctggt

SEQ ID NO: 1553583 - DNA, 25 bp, Homo sapien
cacccgtctctggtcctgttcacca

SEQ ID NO: 1553584 - DNA, 25 bp, Homo sapien
caggctccagcgactcatctttagc

SEQ ID NO: 1553585 - DNA, 25 bp, Homo sapien
gctccagcgactcatctttagcttt

SEQ ID NO: 1553586 - DNA, 25 bp, Homo sapien
tgtgggtcttcttcaagaggctgtc

SEQ ID NO: 1553587 - DNA, 25 bp, Homo sapien
cgtcatagtaggtctgcatgaagcc

SEQ ID NO: 1553588 - DNA, 25 bp, Homo sapien
ggtccctcaggtggtcgtcatagta

SEQ ID NO: 1553589 - DNA, 25 bp, Homo sapien
tttggattcgaggaaccaggccttg

SEQ ID NO: 1553590 - DNA, 25 bp, Homo sapien
aaccacacctggcttttatgaacat

SEQ ID NO: 1553591 - DNA, 25 bp, Homo sapien
acaaccacacctggcttttatgaac

SEQ ID NO: 1553592 - DNA, 25 bp, Homo sapien
gccacaaccacacctggcttttatg

SEQ ID NO: 1553593 - DNA, 25 bp, Homo sapien
cacaaccacacctggcttttatgaa

SEQ ID NO: 1553594 - DNA, 25 bp, Homo sapien
agatctcgctgtgttgcccaggctg

SEQ ID NO: 1553595 - DNA, 25 bp, Homo sapien
tcctgggctcaagccatcatcctac

SEQ ID NO: 1553596 - DNA, 25 bp, Homo sapien
ctcctgggctcaagccatcatccta

SEQ ID NO: 1553597 - DNA, 25 bp, Homo sapien
ccccaagagatctcgctgtgttgcc

SEQ ID NO: 1553598 - DNA, 25 bp, Homo sapien
caggtgagactttatttattggaga

SEQ ID NO: 1553599 - DNA, 25 bp, Homo sapien
tctccgcaagcccacaatagggtgt

SEQ ID NO: 1553600 - DNA, 25 bp, Homo sapien
gaattcgcctccgacagaggctggg

SEQ ID NO: 1553601 - DNA, 25 bp, Homo sapien
agacaagggcgaagctctcagtgag

SEQ ID NO: 1553602 - DNA, 25 bp, Homo sapien
tcctggccaacagaactgcggaggg

SEQ ID NO: 1553603 - DNA, 25 bp, Homo sapien
tgagagaggcacttttggtgacgaa

SEQ ID NO: 1553604 - DNA, 25 bp, Homo sapien
ttttggtgacgaagaacatgcacag

SEQ ID NO: 1553605 - DNA, 25 bp, Homo sapien
tgcacagggcacaatatcatcatcc

SEQ ID NO: 1553606 - DNA, 25 bp, Homo sapien
tcatccacacgtaggagatgaggaa

SEQ ID NO: 1553607 - DNA, 25 bp, Homo sapien
tcatgtggcaggctgactggaggcg

SEQ ID NO: 1553608 - DNA, 25 bp, Homo sapien
gggactgagatcctgctctgtgtga

SEQ ID NO: 1553609 - DNA, 25 bp, Homo sapien
aggcggctgttcctgtggtcacgcc

SEQ ID NO: 1553610 - DNA, 25 bp, Homo sapien
ctcggtgtcccagtcaagtttccca

SEQ ID NO: 1553611 - DNA, 25 bp, Homo sapien
acagagctgggaggagtcgtgtgcc

SEQ ID NO: 1553612 - DNA, 25 bp, Homo sapien
aaatcccaataccaggaggacaaga

SEQ ID NO: 1553613 - DNA, 25 bp, Homo sapien
gagctgggaggagtcgtgtgcccat

SEQ ID NO: 1553614 - DNA, 25 bp, Homo sapien
caaatcccaataccaggaggacaag

SEQ ID NO: 1553615 - DNA, 25 bp, Homo sapien
agagtgtgtcaggagagcccgtggg

SEQ ID NO: 1553616 - DNA, 25 bp, Homo sapien
gcagggggagagtgtgtcaggagag

SEQ ID NO: 1553617 - DNA, 25 bp, Homo sapien
gggagagtgtgtcaggagagcccgt

SEQ ID NO: 1553618 - DNA, 25 bp, Homo sapien
cagggggagagtgtgtcaggagagc

SEQ ID NO: 1553619 - DNA, 25 bp, Homo sapien
gtcgggctaggcatctcatcttgct

SEQ ID NO: 1553620 - DNA, 25 bp, Homo sapien
gaaggtcgggctaggcatctcatct

SEQ ID NO: 1553621 - DNA, 25 bp, Homo sapien
ctgggtgaggaaggtcgggctaggc

SEQ ID NO: 1553622 - DNA, 25 bp, Homo sapien
aggaaggtcgggctaggcatctcat

SEQ ID NO: 1553623 - DNA, 25 bp, Homo sapien
ggctgtctttgctgactcccagtaa

SEQ ID NO: 1553624 - DNA, 25 bp, Homo sapien
tacagcgggcaggtatgtcttctcg

SEQ ID NO: 1553625 - DNA, 25 bp, Homo sapien
ctgagtttctcatctacagcgggca

SEQ ID NO: 1553626 - DNA, 25 bp, Homo sapien
tatgtcttctcgtacaggttctggg

SEQ ID NO: 1553627 - DNA, 25 bp, Homo sapien
tgggtcctggatgcagtcggtggta

SEQ ID NO: 1553628 - DNA, 25 bp, Homo sapien
ggtggtatgggccagaccccatttc

SEQ ID NO: 1553629 - DNA, 25 bp, Homo sapien
gatgcagtcggtggtatgggccaga

SEQ ID NO: 1553630 - DNA, 25 bp, Homo sapien
agtcggtggtatgggccagacccca

SEQ ID NO: 1553631 - DNA, 25 bp, Homo sapien
gtgtaagtgctcatggctgctgtgc

SEQ ID NO: 1553632 - DNA, 25 bp, Homo sapien
gagtaggggactctccccttgtcca

SEQ ID NO: 1553633 - DNA, 25 bp, Homo sapien
aaagaattcaggctagagttgggag

SEQ ID NO: 1553634 - DNA, 25 bp, Homo sapien
aagaattcaggctagagttgggagg

SEQ ID NO: 1553635 - DNA, 25 bp, Homo sapien
agaattcaggctagagttgggagga

SEQ ID NO: 1553636 - DNA, 25 bp, Homo sapien
tcttggcccttgagtcctcagaaaa

SEQ ID NO: 1553637 - DNA, 25 bp, Homo sapien
gggttagagctccatacataaagta

SEQ ID NO: 1553638 - DNA, 25 bp, Homo sapien
attaaatgttggctggactgagtca

SEQ ID NO: 1553639 - DNA, 25 bp, Homo sapien
tgctttattcccatggacccatggg

SEQ ID NO: 1553640 - DNA, 25 bp, Homo sapien
gctgtgtgtcttcgtacagctctaa

SEQ ID NO: 1553641 - DNA, 25 bp, Homo sapien
gcttcacgggctctgagaattccac

SEQ ID NO: 1553642 - DNA, 25 bp, Homo sapien
cgcatccgtgggctaggcttcacgg

SEQ ID NO: 1553643 - DNA, 25 bp, Homo sapien
cattagctgtgtgtcttcgtacagc

SEQ ID NO: 1553644 - DNA, 25 bp, Homo sapien
cttttcggttatatgagcctttcgg

SEQ ID NO: 1553645 - DNA, 25 bp, Homo sapien
gttatatgagcctttcgggacatcc

SEQ ID NO: 1553646 - DNA, 25 bp, Homo sapien
tttcgggacatcctgtccgcttctc

SEQ ID NO: 1553647 - DNA, 25 bp, Homo sapien
tcggttatatgagcctttcgggaca

SEQ ID NO: 1553648 - DNA, 25 bp, Homo sapien
tgtatgctccgaactccaggacttt

SEQ ID NO: 1553649 - DNA, 25 bp, Homo sapien
aacactgtatgctccgaactccagg

SEQ ID NO: 1553650 - DNA, 25 bp, Homo sapien
actgtatgctccgaactccaggact

SEQ ID NO: 1553651 - DNA, 25 bp, Homo sapien
aaaaacactgtatgctccgaactcc

SEQ ID NO: 1553652 - DNA, 25 bp, Homo sapien
gccaccgtactcgtctttctcccag

SEQ ID NO: 1553653 - DNA, 25 bp, Homo sapien
caccgtactcgtctttctcccagcc

SEQ ID NO: 1553654 - DNA, 25 bp, Homo sapien
tggccaccgtactcgtctttctccc

SEQ ID NO: 1553655 - DNA, 25 bp, Homo sapien
ggccaccgtactcgtctttctccca

SEQ ID NO: 1553656 - DNA, 25 bp, Homo sapien
ctgcgggccccgtccgcctcctgcg

SEQ ID NO: 1553657 - DNA, 25 bp, Homo sapien
ccaggcattgggtgccggctgggcc

SEQ ID NO: 1553658 - DNA, 25 bp, Homo sapien
tgaggctgggtctccgctggcgggt

SEQ ID NO: 1553659 - DNA, 25 bp, Homo sapien
aggctgggtctccgctggcgggtcc

SEQ ID NO: 1553660 - DNA, 25 bp, Homo sapien
gaggctgggtctccgctggcgggtc

SEQ ID NO: 1553661 - DNA, 25 bp, Homo sapien
ggcggaaccaactgctgatggccca

SEQ ID NO: 1553662 - DNA, 25 bp, Homo sapien
tggcgacgcgtggagctcctccggg

SEQ ID NO: 1553663 - DNA, 25 bp, Homo sapien
ggccctcggcggaaccaactgctga

SEQ ID NO: 1553664 - DNA, 25 bp, Homo sapien
aacaggttgcggctggcgacgcgtg

SEQ ID NO: 1553665 - DNA, 25 bp, Homo sapien
tcagcaaagtgctcgtagcagccgt

SEQ ID NO: 1553666 - DNA, 25 bp, Homo sapien
tccagtcgccatacacaagatcgtg

SEQ ID NO: 1553667 - DNA, 25 bp, Homo sapien
tgtgggatatcgagctcagcaaagt

SEQ ID NO: 1553668 - DNA, 25 bp, Homo sapien
tgttcccagaagagtgccgacgtgg

SEQ ID NO: 1553669 - DNA, 25 bp, Homo sapien
cactcttggtgaagtaaacgtggat

SEQ ID NO: 1553670 - DNA, 25 bp, Homo sapien
tagatggagccgttctgctggacgc

SEQ ID NO: 1553671 - DNA, 25 bp, Homo sapien
aagccggcggtacagggccttctgc

SEQ ID NO: 1553672 - DNA, 25 bp, Homo sapien
tgtggactgtggcaagccggcggta

SEQ ID NO: 1553673 - DNA, 25 bp, Homo sapien
agagcgacctctgaaacatcgggca

SEQ ID NO: 1553674 - DNA, 25 bp, Homo sapien
caacgggatgattaggtgatcgtca

SEQ ID NO: 1553675 - DNA, 25 bp, Homo sapien
tactggcatcgatttgggtcaacgg

SEQ ID NO: 1553676 - DNA, 25 bp, Homo sapien
ttttagcccagacccctgacgtatc

SEQ ID NO: 1553677 - DNA, 25 bp, Homo sapien
tggaaaaattttaatgccttctctg

SEQ ID NO: 1553678 - DNA, 25 bp, Homo sapien
tactctttagtatttttctattgga

SEQ ID NO: 1553679 - DNA, 25 bp, Homo sapien
ccgtgcctggcctctctttaccttt

SEQ ID NO: 1553680 - DNA, 25 bp, Homo sapien
tgcctggcctctctttaccttttta

SEQ ID NO: 1553681 - DNA, 25 bp, Homo sapien
catccagaccagatggacctggctc

SEQ ID NO: 1553682 - DNA, 25 bp, Homo sapien
ggagaaaccaacactcaagggttga

SEQ ID NO: 1553683 - DNA, 25 bp, Homo sapien
catccagtatcagggttgctggcca

SEQ ID NO: 1553684 - DNA, 25 bp, Homo sapien
tttggctcaggcaaagaacacattc

SEQ ID NO: 1553685 - DNA, 25 bp, Homo sapien
ggttttctgaaatcgtctgcgcttg

SEQ ID NO: 1553686 - DNA, 25 bp, Homo sapien
tctgaaatcgtctgcgcttgtattt

SEQ ID NO: 1553687 - DNA, 25 bp, Homo sapien
aatcgtctgcgcttgtatttgttga

SEQ ID NO: 1553688 - DNA, 25 bp, Homo sapien
cttggttttctgaaatcgtctgcgc

SEQ ID NO: 1553689 - DNA, 25 bp, Homo sapien
caaccctggcagcagaatatcagcc

SEQ ID NO: 1553690 - DNA, 25 bp, Homo sapien
taggcttagagattccgccacccag

SEQ ID NO: 1553691 - DNA, 25 bp, Homo sapien
ccccacatgtagaaaaccgaggtag

SEQ ID NO: 1553692 - DNA, 25 bp, Homo sapien
gcagggctggcatcctaggccaggc

SEQ ID NO: 1553693 - DNA, 25 bp, Homo sapien
gccaatgggagatcacctccacagg

SEQ ID NO: 1553694 - DNA, 25 bp, Homo sapien
gggagggggcacactgcccttcacc

SEQ ID NO: 1553695 - DNA, 25 bp, Homo sapien
gcgtgtggtcgtccacgatgttgat

SEQ ID NO: 1553696 - DNA, 25 bp, Homo sapien
tgcccttcacccacggcgtgtggtc

SEQ ID NO: 1553697 - DNA, 25 bp, Homo sapien
ggcctcagatgtctggagagaccca

SEQ ID NO: 1553698 - DNA, 25 bp, Homo sapien
gggacatttctaggccacaccatga

SEQ ID NO: 1553699 - DNA, 25 bp, Homo sapien
agggtacccgcaggcctcagatgtc

SEQ ID NO: 1553700 - DNA, 25 bp, Homo sapien
ggagctaaagggtgccttgacctca

SEQ ID NO: 1553701 - DNA, 25 bp, Homo sapien
gaagttccagggcgacttggtgctc

SEQ ID NO: 1553702 - DNA, 25 bp, Homo sapien
tgactgctcgtacaactcatcaccc

SEQ ID NO: 1553703 - DNA, 25 bp, Homo sapien
gatgatgggatagtagtcaccgctc

SEQ ID NO: 1553704 - DNA, 25 bp, Homo sapien
atagagctgccagcgccaaagcgag

SEQ ID NO: 1553705 - DNA, 25 bp, Homo sapien
tgtgaacgatagacacgatgatggt

SEQ ID NO: 1553706 - DNA, 25 bp, Homo sapien
gaagacactgtgaacgatagacacg

SEQ ID NO: 1553707 - DNA, 25 bp, Homo sapien
acacgatgatggtgagcgccagcag

SEQ ID NO: 1553708 - DNA, 25 bp, Homo sapien
ggaactcgaagacactgtgaacgat

SEQ ID NO: 1553709 - DNA, 25 bp, Homo sapien
cacgaatgactggaaaacgccgaag

SEQ ID NO: 1553710 - DNA, 25 bp, Homo sapien
ccccaatgaagacgctgacctggac

SEQ ID NO: 1553711 - DNA, 25 bp, Homo sapien
ggactgccggctgttccagaactgg

SEQ ID NO: 1553712 - DNA, 25 bp, Homo sapien
gatgtagaggaggaccacgaatgac

SEQ ID NO: 1553713 - DNA, 25 bp, Homo sapien
ttgaaggataggcgggggaagattc

SEQ ID NO: 1553714 - DNA, 25 bp, Homo sapien
gcgggggaagattcctgccaccctg

SEQ ID NO: 1553715 - DNA, 25 bp, Homo sapien
gggaagattcctgccaccctgtgct

SEQ ID NO: 1553716 - DNA, 25 bp, Homo sapien
taggcgggggaagattcctgccacc

SEQ ID NO: 1553717 - DNA, 25 bp, Homo sapien
tcatcatacactttggtcgaggact

SEQ ID NO: 1553718 - DNA, 25 bp, Homo sapien
gaggactcgatatacgtggacttgt

SEQ ID NO: 1553719 - DNA, 25 bp, Homo sapien
ggtcgaggactcgatatacgtggac

SEQ ID NO: 1553720 - DNA, 25 bp, Homo sapien
cactttggtcgaggactcgatatac

SEQ ID NO: 1553721 - DNA, 25 bp, Homo sapien
cccagggaagcagttatggcagatg

SEQ ID NO: 1553722 - DNA, 25 bp, Homo sapien
ggactccggactcgcccagggaagc

SEQ ID NO: 1553723 - DNA, 25 bp, Homo sapien
ggtgcctcagggatacgtggtacct

SEQ ID NO: 1553724 - DNA, 25 bp, Homo sapien
taaagcatgggtccggcagacagat

SEQ ID NO: 1553725 - DNA, 25 bp, Homo sapien
ggaagccgtagagcatgctgagcac

SEQ ID NO: 1553726 - DNA, 25 bp, Homo sapien
tacagaagactgtagacggcatagc

SEQ ID NO: 1553727 - DNA, 25 bp, Homo sapien
tccaggacaggtaccggaatgccat

SEQ ID NO: 1553728 - DNA, 25 bp, Homo sapien
tgctgagcacccaggagtaccagcc

SEQ ID NO: 1553729 - DNA, 25 bp, Homo sapien
cataacgggcatcttgatgacaaag

SEQ ID NO: 1553730 - DNA, 25 bp, Homo sapien
cagacttgagcttgtagttgatgaa

SEQ ID NO: 1553731 - DNA, 25 bp, Homo sapien
gcaggcagccgatccggtacataac

SEQ ID NO: 1553732 - DNA, 25 bp, Homo sapien
gatgacaaaggcgaacaggtcgtcg

SEQ ID NO: 1553733 - DNA, 25 bp, Homo sapien
agtgtgaggtcgggctggcccgtcc

SEQ ID NO: 1553734 - DNA, 25 bp, Homo sapien
tcgggctggcccgtccacagccagg

SEQ ID NO: 1553735 - DNA, 25 bp, Homo sapien
tgaggtcgggctggcccgtccacag

SEQ ID NO: 1553736 - DNA, 25 bp, Homo sapien
tgtgaggtcgggctggcccgtccac

SEQ ID NO: 1553737 - DNA, 25 bp, Homo sapien
ttggtagaggtagatgaagaaaacc

SEQ ID NO: 1553738 - DNA, 25 bp, Homo sapien
tgccaaactcgttgactcgggtggg

SEQ ID NO: 1553739 - DNA, 25 bp, Homo sapien
ggtcgacgcggtagatccaccgttg

SEQ ID NO: 1553740 - DNA, 25 bp, Homo sapien
tcatgccaaactcgttgactcgggt

SEQ ID NO: 1553741 - DNA, 25 bp, Homo sapien
cctttttcttgtcctctgctggctt

SEQ ID NO: 1553742 - DNA, 25 bp, Homo sapien
ctaatcctttttcttgtcctctgct

SEQ ID NO: 1553743 - DNA, 25 bp, Homo sapien
cctctgctggctttggaggggcttc

SEQ ID NO: 1553744 - DNA, 25 bp, Homo sapien
ttttcttgtcctctgctggctttgg

SEQ ID NO: 1553745 - DNA, 25 bp, Homo sapien
ctgaggcgggcctcccaccgccccg

SEQ ID NO: 1553746 - DNA, 25 bp, Homo sapien
cgggacgcaggggtagtggtcgcca

SEQ ID NO: 1553747 - DNA, 25 bp, Homo sapien
gggtagtggtcgccaggagccggag

SEQ ID NO: 1553748 - DNA, 25 bp, Homo sapien
ccggcccctacatcacacgctgggc

SEQ ID NO: 1553749 - DNA, 25 bp, Homo sapien
gggctggcagggcgagatggctgga

SEQ ID NO: 1553750 - DNA, 25 bp, Homo sapien
ggacagacagcgcctccacaaacaa

SEQ ID NO: 1553751 - DNA, 25 bp, Homo sapien
gacagacagcgcctccacaaacaaa

SEQ ID NO: 1553752 - DNA, 25 bp, Homo sapien
ctggcagggcgagatggctggaaac

SEQ ID NO: 1553753 - DNA, 25 bp, Homo sapien
atgaacggccgtgggcatcccgtag

SEQ ID NO: 1553754 - DNA, 25 bp, Homo sapien
acaagatgatgaacggccgtgggca

SEQ ID NO: 1553755 - DNA, 25 bp, Homo sapien
actgtgttaaagggcggcggtctag

SEQ ID NO: 1553756 - DNA, 25 bp, Homo sapien
acgagggacaagatgatgaacggcc

SEQ ID NO: 1553757 - DNA, 25 bp, Homo sapien
tctggtggacgatcgcgggtcggac

SEQ ID NO: 1553758 - DNA, 25 bp, Homo sapien
cgggaggcacggtctggtggacgat

SEQ ID NO: 1553759 - DNA, 25 bp, Homo sapien
cacggtctggtggacgatcgcgggt

SEQ ID NO: 1553760 - DNA, 25 bp, Homo sapien
cgggtcggacgagcggcgcaagggc

SEQ ID NO: 1553761 - DNA, 25 bp, Homo sapien
agctccggcgcagccggcggtctgg

SEQ ID NO: 1553762 - DNA, 25 bp, Homo sapien
agccggcggtctggcgacgcggcga

SEQ ID NO: 1553763 - DNA, 25 bp, Homo sapien
gcgactcggcatggcccggccagtg

SEQ ID NO: 1553764 - DNA, 25 bp, Homo sapien
ggccagtggggacggacggcccaga

SEQ ID NO: 1553765 - DNA, 25 bp, Homo sapien
tgctcctggaaacggcgagcgagag

SEQ ID NO: 1553766 - DNA, 25 bp, Homo sapien
gaaacggcgagcgagagtgaggaga

SEQ ID NO: 1553767 - DNA, 25 bp, Homo sapien
cctggaaacggcgagcgagagtgag

SEQ ID NO: 1553768 - DNA, 25 bp, Homo sapien
ctgtgctcctggaaacggcgagcga

SEQ ID NO: 1553769 - DNA, 25 bp, Homo sapien
ggccgccagtgagccttagaatcac

SEQ ID NO: 1553770 - DNA, 25 bp, Homo sapien
cgtcattccatagacaggacaaggg

SEQ ID NO: 1553771 - DNA, 25 bp, Homo sapien
tagaatcacacagcaacggaaggca

SEQ ID NO: 1553772 - DNA, 25 bp, Homo sapien
tcgtggaggaatcgaaaccgacctc

SEQ ID NO: 1553773 - DNA, 25 bp, Homo sapien
caggccgaagccgttctccttgatg

SEQ ID NO: 1553774 - DNA, 25 bp, Homo sapien
ggcagcgtcttgctggcctcggtgc

SEQ ID NO: 1553775 - DNA, 25 bp, Homo sapien
tcggtgctgctctccccaaggatgc

SEQ ID NO: 1553776 - DNA, 25 bp, Homo sapien
ctccgtgatgaccaggtgcggctgc

SEQ ID NO: 1553777 - DNA, 25 bp, Homo sapien
caccctgcagatgccgtcggtgcag

SEQ ID NO: 1553778 - DNA, 25 bp, Homo sapien
agatgccgtcggtgcagtctttccc

SEQ ID NO: 1553779 - DNA, 25 bp, Homo sapien
gtcggtgcagtctttccccacgagg

SEQ ID NO: 1553780 - DNA, 25 bp, Homo sapien
gcagtctttccccacgaggctgtgg

SEQ ID NO: 1553781 - DNA, 25 bp, Homo sapien
tcttccgctcaatggcagcctcaat

SEQ ID NO: 1553782 - DNA, 25 bp, Homo sapien
caatgcccagttgaatcttccgctc

SEQ ID NO: 1553783 - DNA, 25 bp, Homo sapien
gttgtaggggtcaatgcccagttga

SEQ ID NO: 1553784 - DNA, 25 bp, Homo sapien
cagttgaatcttccgctcaatggca

SEQ ID NO: 1553785 - DNA, 25 bp, Homo sapien
gctcggaaagcacaggatccatccg

SEQ ID NO: 1553786 - DNA, 25 bp, Homo sapien
caccacattcatgtctacttcctga

SEQ ID NO: 1553787 - DNA, 25 bp, Homo sapien
tcttgtcatagacgggctcggaaag

SEQ ID NO: 1553788 - DNA, 25 bp, Homo sapien
ggtcccgatatgaggcctggaagca

SEQ ID NO: 1553789 - DNA, 25 bp, Homo sapien
cagagcaagtagagctcctcgccac

SEQ ID NO: 1553790 - DNA, 25 bp, Homo sapien
tttctgcaccttgtcgcagagcaag

SEQ ID NO: 1553791 - DNA, 25 bp, Homo sapien
gtgcacggcccgctttccttgttaa

SEQ ID NO: 1553792 - DNA, 25 bp, Homo sapien
tccttgttaattcggcaaatccgca

SEQ ID NO: 1553793 - DNA, 25 bp, Homo sapien
aaacgggggacatcagctaagccag

SEQ ID NO: 1553794 - DNA, 25 bp, Homo sapien
ccagcctcccctaaaatcaagacta

SEQ ID NO: 1553795 - DNA, 25 bp, Homo sapien
tgtgctcccaacttgcccagcctcc

SEQ ID NO: 1553796 - DNA, 25 bp, Homo sapien
caggaaacgggggacatcagctaag

SEQ ID NO: 1553797 - DNA, 25 bp, Homo sapien
gtagggcggcgtcttgaacacaatg

SEQ ID NO: 1553798 - DNA, 25 bp, Homo sapien
caatggcaatctggcggtgcacgtc

SEQ ID NO: 1553799 - DNA, 25 bp, Homo sapien
tgtcacgggctcgacaatctccagg

SEQ ID NO: 1553800 - DNA, 25 bp, Homo sapien
caggtacgtgaaaggcaatggctcg

SEQ ID NO: 1553801 - DNA, 25 bp, Homo sapien
tcagctccccaaggacgtcgggcat

SEQ ID NO: 1553802 - DNA, 25 bp, Homo sapien
gtttccgcttcttgtccacgccgta

SEQ ID NO: 1553803 - DNA, 25 bp, Homo sapien
gctgttcagctccccaaggacgtcg

SEQ ID NO: 1553804 - DNA, 25 bp, Homo sapien
cgcttcttgtccacgccgtagctgt

SEQ ID NO: 1553805 - DNA, 25 bp, Homo sapien
ggcagagatgaggacccctgttccc

SEQ ID NO: 1553806 - DNA, 25 bp, Homo sapien
caggatggccggctttttcttccgc

SEQ ID NO: 1553807 - DNA, 25 bp, Homo sapien
tgggcaggaagtggtccaggatggc

SEQ ID NO: 1553808 - DNA, 25 bp, Homo sapien
aagtggtccaggatggccggctttt

SEQ ID NO: 1553809 - DNA, 25 bp, Homo sapien
aggaagtggtccaggatggccggct

SEQ ID NO: 1553810 - DNA, 25 bp, Homo sapien
cacaacagcgctagcgtgtggcggt

SEQ ID NO: 1553811 - DNA, 25 bp, Homo sapien
caaagccatcgtccaggaggtcagg

SEQ ID NO: 1553812 - DNA, 25 bp, Homo sapien
ccgtagggtcgtaggcaaagccatc

SEQ ID NO: 1553813 - DNA, 25 bp, Homo sapien
acacggtgccagagaagaagtcagg

SEQ ID NO: 1553814 - DNA, 25 bp, Homo sapien
aacggagcttctcgccaaggctgaa

SEQ ID NO: 1553815 - DNA, 25 bp, Homo sapien
gacatcctggttgggattgcacggc

SEQ ID NO: 1553816 - DNA, 25 bp, Homo sapien
taacaagctagtgcacgggagccat

SEQ ID NO: 1553817 - DNA, 25 bp, Homo sapien
ttccgaatcctactggagaaggtgc

SEQ ID NO: 1553818 - DNA, 25 bp, Homo sapien
caccggaagcggaaatgaaaggccg

SEQ ID NO: 1553819 - DNA, 25 bp, Homo sapien
gcaccggaagcggaaatgaaaggcc

SEQ ID NO: 1553820 - DNA, 25 bp, Homo sapien
cggcccgcaccggaagcggaaatga

SEQ ID NO: 1553821 - DNA, 25 bp, Homo sapien
cccgcaccggaagcggaaatgaaag

SEQ ID NO: 1553822 - DNA, 25 bp, Homo sapien
gcagcatggggagagcctgaggaaa

SEQ ID NO: 1553823 - DNA, 25 bp, Homo sapien
agcatggggagagcctgaggaaagg

SEQ ID NO: 1553824 - DNA, 25 bp, Homo sapien
cagcatggggagagcctgaggaaag

SEQ ID NO: 1553825 - DNA, 25 bp, Homo sapien
agcagcatggggagagcctgaggaa

SEQ ID NO: 1553826 - DNA, 25 bp, Homo sapien
tggtctgtgaaacccgtatgggcag

SEQ ID NO: 1553827 - DNA, 25 bp, Homo sapien
caaaccctgagcacttaaggctgga

SEQ ID NO: 1553828 - DNA, 25 bp, Homo sapien
ggtgtcctagattccacgcgctgga

SEQ ID NO: 1553829 - DNA, 25 bp, Homo sapien
gaagaactgaaaaggctcccactag

SEQ ID NO: 1553830 - DNA, 25 bp, Homo sapien
tggtgaggccaagcctggggcctca

SEQ ID NO: 1553831 - DNA, 25 bp, Homo sapien
gtgaggccaagcctggggcctcaac

SEQ ID NO: 1553832 - DNA, 25 bp, Homo sapien
gtggtgaggccaagcctggggcctc

SEQ ID NO: 1553833 - DNA, 25 bp, Homo sapien
tgtggtgaggccaagcctggggcct

SEQ ID NO: 1553834 - DNA, 25 bp, Homo sapien
tcgaagcttccgctcatgcttccga

SEQ ID NO: 1553835 - DNA, 25 bp, Homo sapien
gaagcttccgctcatgcttccgagc

SEQ ID NO: 1553836 - DNA, 25 bp, Homo sapien
catgcctcgaagcttccgctcatgc

SEQ ID NO: 1553837 - DNA, 25 bp, Homo sapien
tgcctcgaagcttccgctcatgctt

SEQ ID NO: 1553838 - DNA, 25 bp, Homo sapien
tcttttcataatactcccgtctccg

SEQ ID NO: 1553839 - DNA, 25 bp, Homo sapien
tttcataatactcccgtctccgctc

SEQ ID NO: 1553840 - DNA, 25 bp, Homo sapien
gatcttttcataatactcccgtctc

SEQ ID NO: 1553841 - DNA, 25 bp, Homo sapien
ttttcataatactcccgtctccgct

SEQ ID NO: 1553842 - DNA, 25 bp, Homo sapien
cacatctttctgacactatcggaga

SEQ ID NO: 1553843 - DNA, 25 bp, Homo sapien
gctgtgttcctaggccacttctggg

SEQ ID NO: 1553844 - DNA, 25 bp, Homo sapien
gggtgcctgcgaaggatcaattaaa

SEQ ID NO: 1553845 - DNA, 25 bp, Homo sapien
atgagttctccctttagccccgtgg

SEQ ID NO: 1553846 - DNA, 25 bp, Homo sapien
catgataaggcgcaggtgaaaagct

SEQ ID NO: 1553847 - DNA, 25 bp, Homo sapien
cgttagctgttatcgtggcatcacc

SEQ ID NO: 1553848 - DNA, 25 bp, Homo sapien
gacacaagccaagtagttagcacag

SEQ ID NO: 1553849 - DNA, 25 bp, Homo sapien
tgactgtaagccacgtatctccgtg

SEQ ID NO: 1553850 - DNA, 25 bp, Homo sapien
gccaaagctgattgtccatgtgaca

SEQ ID NO: 1553851 - DNA, 25 bp, Homo sapien
tccctgctggatagaatgaagacat

SEQ ID NO: 1553852 - DNA, 25 bp, Homo sapien
aacagaagcggcttaggtccccgag

SEQ ID NO: 1553853 - DNA, 25 bp, Homo sapien
tagacctcgatgcaacactaggaag

SEQ ID NO: 1553854 - DNA, 25 bp, Homo sapien
taagactacttcctggtcagcaggg

SEQ ID NO: 1553855 - DNA, 25 bp, Homo sapien
tcagggcgacccaaaataaagtcta

SEQ ID NO: 1553856 - DNA, 25 bp, Homo sapien
tccaacaacatcgaaggacatgctc

SEQ ID NO: 1553857 - DNA, 25 bp, Homo sapien
taatatttactgagcgatagcgacg

SEQ ID NO: 1553858 - DNA, 25 bp, Homo sapien
gcttggcagcccagatcggaatgca

SEQ ID NO: 1553859 - DNA, 25 bp, Homo sapien
caggtcacgttcacatacagggaca

SEQ ID NO: 1553860 - DNA, 25 bp, Homo sapien
caaaggccgcttgtacaggcctgca

SEQ ID NO: 1553861 - DNA, 25 bp, Homo sapien
ctgctctcggcccaaggctgagatg

SEQ ID NO: 1553862 - DNA, 25 bp, Homo sapien
tatcagcggatcatacaatactgtc

SEQ ID NO: 1553863 - DNA, 25 bp, Homo sapien
gcataacatcttcagggctcatcga

SEQ ID NO: 1553864 - DNA, 25 bp, Homo sapien
atttagcttgcgtccacctcttggc

SEQ ID NO: 1553865 - DNA, 25 bp, Homo sapien
tattgcgttatgtgtagagaccaca

SEQ ID NO: 1553866 - DNA, 25 bp, Homo sapien
atacagaaggtttcacgaatttttg

SEQ ID NO: 1553867 - DNA, 25 bp, Homo sapien
acagaaggtttcacgaatttttgtg

SEQ ID NO: 1553868 - DNA, 25 bp, Homo sapien
gtactattcttatgcccatgttaca

SEQ ID NO: 1553869 - DNA, 25 bp, Homo sapien
cacgcccagctggtactattcttat

SEQ ID NO: 1553870 - DNA, 25 bp, Homo sapien
acgcccagctggtactattcttatg

SEQ ID NO: 1553871 - DNA, 25 bp, Homo sapien
tattcttatgcccatgttacagatg

SEQ ID NO: 1553872 - DNA, 25 bp, Homo sapien
gaatccaggtgcaccttgcaagctc

SEQ ID NO: 1553873 - DNA, 25 bp, Homo sapien
atattaacagggctctcagcggcca

SEQ ID NO: 1553874 - DNA, 25 bp, Homo sapien
tcggccatgtacctgcaggaactgg

SEQ ID NO: 1553875 - DNA, 25 bp, Homo sapien
attaacagggctctcagcggccagg

SEQ ID NO: 1553876 - DNA, 25 bp, Homo sapien
tctcagtcccttctgttgcaagcct

SEQ ID NO: 1553877 - DNA, 25 bp, Homo sapien
tcagtcccttctgttgcaagcctcc

SEQ ID NO: 1553878 - DNA, 25 bp, Homo sapien
gctctcagtcccttctgttgcaagc

SEQ ID NO: 1553879 - DNA, 25 bp, Homo sapien
aaacaggccagtcatctgactgccc

SEQ ID NO: 1553880 - DNA, 25 bp, Homo sapien
gtgggcacggacatcgaatcggtca

SEQ ID NO: 1553881 - DNA, 25 bp, Homo sapien
tcgaatcggtcaatcatgttgttgg

SEQ ID NO: 1553882 - DNA, 25 bp, Homo sapien
atgttgttggtgtccccctgccagg

SEQ ID NO: 1553883 - DNA, 25 bp, Homo sapien
gcacggacatcgaatcggtcaatca

SEQ ID NO: 1553884 - DNA, 25 bp, Homo sapien
aataggaacggctcctaggaaggtg

SEQ ID NO: 1553885 - DNA, 25 bp, Homo sapien
ctcagggcggtaccaaataggaacg

SEQ ID NO: 1553886 - DNA, 25 bp, Homo sapien
tagggaagggcgagaccttgaaatc

SEQ ID NO: 1553887 - DNA, 25 bp, Homo sapien
tgggtatgacgctgtgcctggcaac

SEQ ID NO: 1553888 - DNA, 25 bp, Homo sapien
gtcgttctgcaccaggcctctgtag

SEQ ID NO: 1553889 - DNA, 25 bp, Homo sapien
ccgttcgtccgactcctgttctggg

SEQ ID NO: 1553890 - DNA, 25 bp, Homo sapien
gctcgtagttacacttccgttcgtc

SEQ ID NO: 1553891 - DNA, 25 bp, Homo sapien
caggcctctgtagcgctcgtagtta

SEQ ID NO: 1553892 - DNA, 25 bp, Homo sapien
gtctctggaggcctccgtacaactc

SEQ ID NO: 1553893 - DNA, 25 bp, Homo sapien
ttctcatcttcgctgggtctctgga

SEQ ID NO: 1553894 - DNA, 25 bp, Homo sapien
caactcatcaatgtagatctggtac

SEQ ID NO: 1553895 - DNA, 25 bp, Homo sapien
tagatctggtacaggcactgctcct

SEQ ID NO: 1553896 - DNA, 25 bp, Homo sapien
gtaggtataaccgatggaagccttc

SEQ ID NO: 1553897 - DNA, 25 bp, Homo sapien
aggtataaccgatggaagccttctt

SEQ ID NO: 1553898 - DNA, 25 bp, Homo sapien
tcgtaggtataaccgatggaagcct

SEQ ID NO: 1553899 - DNA, 25 bp, Homo sapien
ctcgtaggtataaccgatggaagcc

SEQ ID NO: 1553900 - DNA, 25 bp, Homo sapien
gatgacctcatcttcgtccgagttg

SEQ ID NO: 1553901 - DNA, 25 bp, Homo sapien
tgacctcatcttcgtccgagttgct

SEQ ID NO: 1553902 - DNA, 25 bp, Homo sapien
tcatcttcgtccgagttgctctcct

SEQ ID NO: 1553903 - DNA, 25 bp, Homo sapien
acctcatcttcgtccgagttgctct

SEQ ID NO: 1553904 - DNA, 25 bp, Homo sapien
agacacagaaacgatgcccagggac

SEQ ID NO: 1553905 - DNA, 25 bp, Homo sapien
acacagaaacgatgcccagggactg

SEQ ID NO: 1553906 - DNA, 25 bp, Homo sapien
gacacagaaacgatgcccagggact

SEQ ID NO: 1553907 - DNA, 25 bp, Homo sapien
gggagagagacacggttcgtaagca

SEQ ID NO: 1553908 - DNA, 25 bp, Homo sapien
cgtaagcacggggtgccccacagag

SEQ ID NO: 1553909 - DNA, 25 bp, Homo sapien
agagagacacggttcgtaagcacgg

SEQ ID NO: 1553910 - DNA, 25 bp, Homo sapien
gtagggagagagacacggttcgtaa

SEQ ID NO: 1553911 - DNA, 25 bp, Homo sapien
tgccataagtcgtggcctgtttgtt

SEQ ID NO: 1553912 - DNA, 25 bp, Homo sapien
aagtcaccgtcggccatgccataag

SEQ ID NO: 1553913 - DNA, 25 bp, Homo sapien
atgccataagtcgtggcctgtttgt

SEQ ID NO: 1553914 - DNA, 25 bp, Homo sapien
caccgtcggccatgccataagtcgt

SEQ ID NO: 1553915 - DNA, 25 bp, Homo sapien
cttggcatgcttgatggcctctgcc

SEQ ID NO: 1553916 - DNA, 25 bp, Homo sapien
gccttggcatgcttgatggcctctg

SEQ ID NO: 1553917 - DNA, 25 bp, Homo sapien
ccttggcatgcttgatggcctctgc

SEQ ID NO: 1553918 - DNA, 25 bp, Homo sapien
ctgggtgggctgatcttgcgacccc

SEQ ID NO: 1553919 - DNA, 25 bp, Homo sapien
tgggctgatcttgcgacccctcagc

SEQ ID NO: 1553920 - DNA, 25 bp, Homo sapien
actctctccgctggcgtcgagagcg

SEQ ID NO: 1553921 - DNA, 25 bp, Homo sapien
ctcccgaaactctctccgctggcgt

SEQ ID NO: 1553922 - DNA, 25 bp, Homo sapien
cgcttataggggtcataggtggggc

SEQ ID NO: 1553923 - DNA, 25 bp, Homo sapien
tataggggtcataggtggggctgtc

SEQ ID NO: 1553924 - DNA, 25 bp, Homo sapien
taggggtcataggtggggctgtctc

SEQ ID NO: 1553925 - DNA, 25 bp, Homo sapien
cttataggggtcataggtggggctg

SEQ ID NO: 1553926 - DNA, 25 bp, Homo sapien
gctcccggagcctcttcgggaacag

SEQ ID NO: 1553927 - DNA, 25 bp, Homo sapien
gcagccttcgctaaataaccaggaa

SEQ ID NO: 1553928 - DNA, 25 bp, Homo sapien
aggacttgactcacaaccatgcagc

SEQ ID NO: 1553929 - DNA, 25 bp, Homo sapien
caactgctctgattttatgtggcta

SEQ ID NO: 1553930 - DNA, 25 bp, Homo sapien
ccccaaaactggtgatgaacgtgat

SEQ ID NO: 1553931 - DNA, 25 bp, Homo sapien
aactggtgatgaacgtgatcttctc

SEQ ID NO: 1553932 - DNA, 25 bp, Homo sapien
atgaacgtgatcttctcctcgcggc

SEQ ID NO: 1553933 - DNA, 25 bp, Homo sapien
ctctgagctggactccgagggtgac

SEQ ID NO: 1553934 - DNA, 25 bp, Homo sapien
ccatggtgaccggggcgtagggcgg

SEQ ID NO: 1553935 - DNA, 25 bp, Homo sapien
cccatggtgaccggggcgtagggcg

SEQ ID NO: 1553936 - DNA, 25 bp, Homo sapien
catggtgaccggggcgtagggcggg

SEQ ID NO: 1553937 - DNA, 25 bp, Homo sapien
gcgtggcggccggaacggtagtagc

SEQ ID NO: 1553938 - DNA, 25 bp, Homo sapien
agcgggaccgggagcgggcgtggcg

SEQ ID NO: 1553939 - DNA, 25 bp, Homo sapien
ccaccacggcgagagcgggagctgg

SEQ ID NO: 1553940 - DNA, 25 bp, Homo sapien
ggtagtagcccccaccacggcgaga

SEQ ID NO: 1553941 - DNA, 25 bp, Homo sapien
gcgggcgagcgggagtaccggtgtc

SEQ ID NO: 1553942 - DNA, 25 bp, Homo sapien
gagtaccggtgtccgtctcgggagc

SEQ ID NO: 1553943 - DNA, 25 bp, Homo sapien
ctgcttctgcgccggggcccgtaac

SEQ ID NO: 1553944 - DNA, 25 bp, Homo sapien
tctgcgccggggcccgtaaccacca

SEQ ID NO: 1553945 - DNA, 25 bp, Homo sapien
cacaccctgtcgtggaaaacagcgg

SEQ ID NO: 1553946 - DNA, 25 bp, Homo sapien
gagctggacggccaggtttcctccc

SEQ ID NO: 1553947 - DNA, 25 bp, Homo sapien
gaaaaccctggagcgtccatgcgct

SEQ ID NO: 1553948 - DNA, 25 bp, Homo sapien
ggacccgtcccttcaagctacagaa

SEQ ID NO: 1553949 - DNA, 25 bp, Homo sapien
atttgttgtcattattaagaaaaca

SEQ ID NO: 1553950 - DNA, 25 bp, Homo sapien
tgttgtcattattaagaaaacaagg

SEQ ID NO: 1553951 - DNA, 25 bp, Homo sapien
ttgtcattattaagaaaacaagggc

SEQ ID NO: 1553952 - DNA, 25 bp, Homo sapien
taaaaatttgttgtcattattaaga

SEQ ID NO: 1553953 - DNA, 25 bp, Homo sapien
aggaatatatgacctggaagccaat

SEQ ID NO: 1553954 - DNA, 25 bp, Homo sapien
tatatgacctggaagccaattctgg

SEQ ID NO: 1553955 - DNA, 25 bp, Homo sapien
tcaggctggcatgcaagatgtgccc

SEQ ID NO: 1553956 - DNA, 25 bp, Homo sapien
gcatgcaagatgtgcccaggtccca

SEQ ID NO: 1553957 - DNA, 25 bp, Homo sapien
tgtagcggtcccctgagtgggagcg

SEQ ID NO: 1553958 - DNA, 25 bp, Homo sapien
ccgcctgtagcggtcccctgagtgg

SEQ ID NO: 1553959 - DNA, 25 bp, Homo sapien
gcggtcccctgagtgggagcggctc

SEQ ID NO: 1553960 - DNA, 25 bp, Homo sapien
ccgccccgcctgtagcggtcccctg

SEQ ID NO: 1553961 - DNA, 25 bp, Homo sapien
tgcggctgcgagtcaggctgcgact

SEQ ID NO: 1553962 - DNA, 25 bp, Homo sapien
tgcgagtcaggctgcgactgcggga

SEQ ID NO: 1553963 - DNA, 25 bp, Homo sapien
tcaggctgcgactgcgggacgggct

SEQ ID NO: 1553964 - DNA, 25 bp, Homo sapien
atggctgcggctgcgagtcaggctg

SEQ ID NO: 1553965 - DNA, 25 bp, Homo sapien
tttttcagcttctcgcccacagcag

SEQ ID NO: 1553966 - DNA, 25 bp, Homo sapien
gacgcggccggcctggtcagcttct

SEQ ID NO: 1553967 - DNA, 25 bp, Homo sapien
cagcttctctcttgcgggtgatggc

SEQ ID NO: 1553968 - DNA, 25 bp, Homo sapien
agcttctcgcccacagcaggggacg

SEQ ID NO: 1553969 - DNA, 25 bp, Homo sapien
ctctttaccagcggcaggttcggtc

SEQ ID NO: 1553970 - DNA, 25 bp, Homo sapien
tctctttaccagcggcaggttcggt

SEQ ID NO: 1553971 - DNA, 25 bp, Homo sapien
tagacgggcgagttccaaattctta

SEQ ID NO: 1553972 - DNA, 25 bp, Homo sapien
tgctgacgggaattagacgggcgag

SEQ ID NO: 1553973 - DNA, 25 bp, Homo sapien
tgacgggaattagacgggcgagttc

SEQ ID NO: 1553974 - DNA, 25 bp, Homo sapien
attagacgggcgagttccaaattct

SEQ ID NO: 1553975 - DNA, 25 bp, Homo sapien
tggagccccagtgtacagtgaggag

SEQ ID NO: 1553976 - DNA, 25 bp, Homo sapien
agagggacatggttctcacaggggc

SEQ ID NO: 1553977 - DNA, 25 bp, Homo sapien
tcccagaggttcagtgacaggtgga

SEQ ID NO: 1553978 - DNA, 25 bp, Homo sapien
gaggctcccagaggttcagtgacag

SEQ ID NO: 1553979 - DNA, 25 bp, Homo sapien
gcttctcctgaggcgtcagcttggg

SEQ ID NO: 1553980 - DNA, 25 bp, Homo sapien
actgcctgttcagcgccttctgcat

SEQ ID NO: 1553981 - DNA, 25 bp, Homo sapien
agcttctcctgaggcgtcagcttgg

SEQ ID NO: 1553982 - DNA, 25 bp, Homo sapien
tcagcttctcctgaggcgtcagctt

SEQ ID NO: 1553983 - DNA, 25 bp, Homo sapien
tggatcatcttttcttgtgccgcct

SEQ ID NO: 1553984 - DNA, 25 bp, Homo sapien
ctgccgctcatgctcctgctggatc

SEQ ID NO: 1553985 - DNA, 25 bp, Homo sapien
gccgctcatgctcctgctggatcat

SEQ ID NO: 1553986 - DNA, 25 bp, Homo sapien
gatcatcttttcttgtgccgccttc

SEQ ID NO: 1553987 - DNA, 25 bp, Homo sapien
cagcacccacccgtcaccccagccc

SEQ ID NO: 1553988 - DNA, 25 bp, Homo sapien
caggccagcacccacccgtcacccc

SEQ ID NO: 1553989 - DNA, 25 bp, Homo sapien
ggccagcacccacccgtcaccccag

SEQ ID NO: 1553990 - DNA, 25 bp, Homo sapien
ctatgaggacgtggccaggccagca

SEQ ID NO: 1553991 - DNA, 25 bp, Homo sapien
tcttgcgggccatggctcgaagctc

SEQ ID NO: 1553992 - DNA, 25 bp, Homo sapien
atggctcgaagctcgtcttcccgct

SEQ ID NO: 1553993 - DNA, 25 bp, Homo sapien
gggccatggctcgaagctcgtcttc

SEQ ID NO: 1553994 - DNA, 25 bp, Homo sapien
ttcatgcggatcttgcgggccatgg

SEQ ID NO: 1553995 - DNA, 25 bp, Homo sapien
cacagtgagtgttgaaatggtctcc

SEQ ID NO: 1553996 - DNA, 25 bp, Homo sapien
gcaacccaatggctacgtctactgg

SEQ ID NO: 1553997 - DNA, 25 bp, Homo sapien
caccaatccccgcttggaaagggag

SEQ ID NO: 1553998 - DNA, 25 bp, Homo sapien
aatggtctccgtcacagtggccagg

SEQ ID NO: 1553999 - DNA, 25 bp, Homo sapien
tggccgggaacactggacacactga

SEQ ID NO: 1554000 - DNA, 25 bp, Homo sapien
gcatctggccgggaacactggacac

SEQ ID NO: 1554001 - DNA, 25 bp, Homo sapien
catgagcatctggccgggaacactg

SEQ ID NO: 1554002 - DNA, 25 bp, Homo sapien
atctggccgggaacactggacacac

SEQ ID NO: 1554003 - DNA, 25 bp, Homo sapien
tctgccggctgtactggcgttccca

SEQ ID NO: 1554004 - DNA, 25 bp, Homo sapien
ctctccttctctcggcgttcccgct

SEQ ID NO: 1554005 - DNA, 25 bp, Homo sapien
ctccttctctcggcgttcccgctcc

SEQ ID NO: 1554006 - DNA, 25 bp, Homo sapien
ggctctgccggctgtactggcgttc

SEQ ID NO: 1554007 - DNA, 25 bp, Homo sapien
cttcgagaagagctgtattctcgac

SEQ ID NO: 1554008 - DNA, 25 bp, Homo sapien
ccatcaaaggacaagtgttacttcc

SEQ ID NO: 1554009 - DNA, 25 bp, Homo sapien
ccctccaactggaggtgggtacagg

SEQ ID NO: 1554010 - DNA, 25 bp, Homo sapien
cacctggggccgtggatgcttcagt

SEQ ID NO: 1554011 - DNA, 25 bp, Homo sapien
gggcatacacacatcaacacacctg

SEQ ID NO: 1554012 - DNA, 25 bp, Homo sapien
ggcttcgggatcgggaccttgagcg

SEQ ID NO: 1554013 - DNA, 25 bp, Homo sapien
ctaatgtcggtaatgggggcttcgg

SEQ ID NO: 1554014 - DNA, 25 bp, Homo sapien
gcttcgggatcgggaccttgagcgc

SEQ ID NO: 1554015 - DNA, 25 bp, Homo sapien
gggcttcgggatcgggaccttgagc

SEQ ID NO: 1554016 - DNA, 25 bp, Homo sapien
tcctccccaccccccactcttctgc

SEQ ID NO: 1554017 - DNA, 25 bp, Homo sapien
gactttatttcactagagataaaac

SEQ ID NO: 1554018 - DNA, 25 bp, Homo sapien
tcactagagataaaaccagcagcat

SEQ ID NO: 1554019 - DNA, 25 bp, Homo sapien
tttcactagagataaaaccagcagc

SEQ ID NO: 1554020 - DNA, 25 bp, Homo sapien
actagagataaaaccagcagcatca

SEQ ID NO: 1554021 - DNA, 25 bp, Homo sapien
acccttccatgcagcggtggtgagg

SEQ ID NO: 1554022 - DNA, 25 bp, Homo sapien
tatgcttgcgaccagtgtccctacg

SEQ ID NO: 1554023 - DNA, 25 bp, Homo sapien
agttctgcgggaagcattttaccaa

SEQ ID NO: 1554024 - DNA, 25 bp, Homo sapien
ggagccatcaccacggaacaaagaa

SEQ ID NO: 1554025 - DNA, 25 bp, Homo sapien
gtagctaccccattattttgaggtg

SEQ ID NO: 1554026 - DNA, 25 bp, Homo sapien
tcactaccacctctttactaggtgg

SEQ ID NO: 1554027 - DNA, 25 bp, Homo sapien
ctgtagctaccccattattttgagg

SEQ ID NO: 1554028 - DNA, 25 bp, Homo sapien
cctctttactaggtggccgctaagc

SEQ ID NO: 1554029 - DNA, 25 bp, Homo sapien
atggaccacaagaagctgggctgtc

SEQ ID NO: 1554030 - DNA, 25 bp, Homo sapien
accttcccgttggaggccatcactg

SEQ ID NO: 1554031 - DNA, 25 bp, Homo sapien
ccccatcgggtgcagcctaggcgtg

SEQ ID NO: 1554032 - DNA, 25 bp, Homo sapien
tgcagtccccctctcaagttcgagg

SEQ ID NO: 1554033 - DNA, 25 bp, Homo sapien
gtccgcggctactggtgtccccact

SEQ ID NO: 1554034 - DNA, 25 bp, Homo sapien
cgaggtccgcggctactggtgtccc

SEQ ID NO: 1554035 - DNA, 25 bp, Homo sapien
aggtccgcggctactggtgtcccca

SEQ ID NO: 1554036 - DNA, 25 bp, Homo sapien
tccgcggctactggtgtccccactt

SEQ ID NO: 1554037 - DNA, 25 bp, Homo sapien
tgcactggggtgagcgtccagagct

SEQ ID NO: 1554038 - DNA, 25 bp, Homo sapien
tctttccgtcactcagggcgttgca

SEQ ID NO: 1554039 - DNA, 25 bp, Homo sapien
ctctttccgtcactcagggcgttgc

SEQ ID NO: 1554040 - DNA, 25 bp, Homo sapien
ttccgtcactcagggcgttgcactg

SEQ ID NO: 1554041 - DNA, 25 bp, Homo sapien
accgatgcttctgttatcgtggcca

SEQ ID NO: 1554042 - DNA, 25 bp, Homo sapien
caggtaaagcgggatgactgccacc

SEQ ID NO: 1554043 - DNA, 25 bp, Homo sapien
ggctcagactgagcgagcgattccg

SEQ ID NO: 1554044 - DNA, 25 bp, Homo sapien
tgggcgttcggactggaccttcttc

SEQ ID NO: 1554045 - DNA, 25 bp, Homo sapien
ggtgtggaaccagctgagttgtcaa

SEQ ID NO: 1554046 - DNA, 25 bp, Homo sapien
ggccaactcttcacaattgccaggg

SEQ ID NO: 1554047 - DNA, 25 bp, Homo sapien
agttgtcaacagagaagccgccaga

SEQ ID NO: 1554048 - DNA, 25 bp, Homo sapien
tcagctcagtggacaaacatttggc

SEQ ID NO: 1554049 - DNA, 25 bp, Homo sapien
caaagaaaagttttctagccaggtg

SEQ ID NO: 1554050 - DNA, 25 bp, Homo sapien
caaaaccttacttactgggacactg

SEQ ID NO: 1554051 - DNA, 25 bp, Homo sapien
aagaaaagttttctagccaggtgcg

SEQ ID NO: 1554052 - DNA, 25 bp, Homo sapien
taaacctagtgaggactaactgagc

SEQ ID NO: 1554053 - DNA, 25 bp, Homo sapien
catgtctgggacatatgaagcgcta

SEQ ID NO: 1554054 - DNA, 25 bp, Homo sapien
taaaacagagccctaactcacaggg

SEQ ID NO: 1554055 - DNA, 25 bp, Homo sapien
taactaacctaccatgtttggcaca

SEQ ID NO: 1554056 - DNA, 25 bp, Homo sapien
cagggattcttgagctatgggacac

SEQ ID NO: 1554057 - DNA, 25 bp, Homo sapien
ctctgcgtccatcaggggcaaagcc

SEQ ID NO: 1554058 - DNA, 25 bp, Homo sapien
agggattcttgagctatgggacact

SEQ ID NO: 1554059 - DNA, 25 bp, Homo sapien
ggctctgcgtccatcaggggcaaag

SEQ ID NO: 1554060 - DNA, 25 bp, Homo sapien
catccaggtcggtggctccaaagtg

SEQ ID NO: 1554061 - DNA, 25 bp, Homo sapien
acaccctcgtgcaacgtgaagctca

SEQ ID NO: 1554062 - DNA, 25 bp, Homo sapien
tccaaagtgggcggccacacgcaca

SEQ ID NO: 1554063 - DNA, 25 bp, Homo sapien
gtgacacgtagaagttggccacatc

SEQ ID NO: 1554064 - DNA, 25 bp, Homo sapien
tcggagcagcgcctctgcttgcaca

SEQ ID NO: 1554065 - DNA, 25 bp, Homo sapien
atcggagcagcgcctctgcttgcac

SEQ ID NO: 1554066 - DNA, 25 bp, Homo sapien
cggagcagcgcctctgcttgcacac

SEQ ID NO: 1554067 - DNA, 25 bp, Homo sapien
tatggcttgaaggtatatgaaataa

SEQ ID NO: 1554068 - DNA, 25 bp, Homo sapien
ttatggcttgaaggtatatgaaata

SEQ ID NO: 1554069 - DNA, 25 bp, Homo sapien
tggcttgaaggtatatgaaataatg

SEQ ID NO: 1554070 - DNA, 25 bp, Homo sapien
gcttgaaggtatatgaaataatgtc

SEQ ID NO: 1554071 - DNA, 25 bp, Homo sapien
gggatacagtgccttagcctcaagc

SEQ ID NO: 1554072 - DNA, 25 bp, Homo sapien
tatctggactcctgtcgtacttggc

SEQ ID NO: 1554073 - DNA, 25 bp, Homo sapien
gagtgaagttgcaccctgatcgcga

SEQ ID NO: 1554074 - DNA, 25 bp, Homo sapien
cgatgccccggtcttcaggaaatgg

SEQ ID NO: 1554075 - DNA, 25 bp, Homo sapien
tcgcgactgagacgaaacgacactc

SEQ ID NO: 1554076 - DNA, 25 bp, Homo sapien
tgaagcgcgtgatgtgaacggccac

SEQ ID NO: 1554077 - DNA, 25 bp, Homo sapien
ggaaggcttcgcttacatcctgaac

SEQ ID NO: 1554078 - DNA, 25 bp, Homo sapien
caatgcgctgaaaggttactagtga

SEQ ID NO: 1554079 - DNA, 25 bp, Homo sapien
cgagcccgccgcttactataagaag

SEQ ID NO: 1554080 - DNA, 25 bp, Homo sapien
cacactttcgctcgaggctggcgag

SEQ ID NO: 1554081 - DNA, 25 bp, Homo sapien
aaaatcgatttcagcgacttgcacg

SEQ ID NO: 1554082 - DNA, 25 bp, Homo sapien
gacttgcacgtagagttgtcccgcg

SEQ ID NO: 1554083 - DNA, 25 bp, Homo sapien
ctcttcaatgtcgccgtccgcgccc

SEQ ID NO: 1554084 - DNA, 25 bp, Homo sapien
ttcaatgtcgccgtccgcgcccggc

SEQ ID NO: 1554085 - DNA, 25 bp, Homo sapien
gcgcctcctgcggcgcgatctccat

SEQ ID NO: 1554086 - DNA, 25 bp, Homo sapien
ccgcgcccggcacgggcggcgcctc

SEQ ID NO: 1554087 - DNA, 25 bp, Homo sapien
gaatgtgacgcgcttggctgcagcc

SEQ ID NO: 1554088 - DNA, 25 bp, Homo sapien
actgctccagacacgatatcctcgt

SEQ ID NO: 1554089 - DNA, 25 bp, Homo sapien
tatcctcgtcggacgggaatgtgac

SEQ ID NO: 1554090 - DNA, 25 bp, Homo sapien
ttggctgcagccttgaggcgcccat

SEQ ID NO: 1554091 - DNA, 25 bp, Homo sapien
ccacccctgaactgaggtctgaagg

SEQ ID NO: 1554092 - DNA, 25 bp, Homo sapien
tgatggatggcggagcaaagcacac

SEQ ID NO: 1554093 - DNA, 25 bp, Homo sapien
ggctttgaggtcaatgccagccacc

SEQ ID NO: 1554094 - DNA, 25 bp, Homo sapien
cagccaagcgaggttgtcagaacca

SEQ ID NO: 1554095 - DNA, 25 bp, Homo sapien
ttgaggcaaccgctcagtaccagct

SEQ ID NO: 1554096 - DNA, 25 bp, Homo sapien
cttgaggcaaccgctcagtaccagc

SEQ ID NO: 1554097 - DNA, 25 bp, Homo sapien
cctgtagttacagtggagccctggg

SEQ ID NO: 1554098 - DNA, 25 bp, Homo sapien
gtggactttgtcctgtagttacagt

SEQ ID NO: 1554099 - DNA, 25 bp, Homo sapien
ccacgggtgtggactttgtcctgta

SEQ ID NO: 1554100 - DNA, 25 bp, Homo sapien
caggcccacgggtgtggactttgtc

SEQ ID NO: 1554101 - DNA, 25 bp, Homo sapien
tctagccagagagaagagacgggaa

SEQ ID NO: 1554102 - DNA, 25 bp, Homo sapien
tgagaagtcctgcatccgggataca

SEQ ID NO: 1554103 - DNA, 25 bp, Homo sapien
tgactatgacgacagaaccctagcc

SEQ ID NO: 1554104 - DNA, 25 bp, Homo sapien
gaaaggacctaaacgctcagcaatg

SEQ ID NO: 1554105 - DNA, 25 bp, Homo sapien
gaggcggaagttgtgatgacctgag

SEQ ID NO: 1554106 - DNA, 25 bp, Homo sapien
gaagttgtgatgacctgagatcgcg

SEQ ID NO: 1554107 - DNA, 25 bp, Homo sapien
ggcggaagttgtgatgacctgagat

SEQ ID NO: 1554108 - DNA, 25 bp, Homo sapien
cggaagttgtgatgacctgagatcg

SEQ ID NO: 1554109 - DNA, 25 bp, Homo sapien
ctgggcacctgatggtgccgaagtg

SEQ ID NO: 1554110 - DNA, 25 bp, Homo sapien
cacctgatggtgccgaagtgaagac

SEQ ID NO: 1554111 - DNA, 25 bp, Homo sapien
gggcacctgatggtgccgaagtgaa

SEQ ID NO: 1554112 - DNA, 25 bp, Homo sapien
gcacctgatggtgccgaagtgaaga

SEQ ID NO: 1554113 - DNA, 25 bp, Homo sapien
caactgcctgccgcagctgaagatc

SEQ ID NO: 1554114 - DNA, 25 bp, Homo sapien
tcccaactgcctgccgcagctgaag

SEQ ID NO: 1554115 - DNA, 25 bp, Homo sapien
ccaactgcctgccgcagctgaagat

SEQ ID NO: 1554116 - DNA, 25 bp, Homo sapien
cccaactgcctgccgcagctgaaga

SEQ ID NO: 1554117 - DNA, 25 bp, Homo sapien
gccttgtcaaaaaatctggacctct

SEQ ID NO: 1554118 - DNA, 25 bp, Homo sapien
gacctctcttgggagaatttctagg

SEQ ID NO: 1554119 - DNA, 25 bp, Homo sapien
caggcagacaggtagagtcaggtct

SEQ ID NO: 1554120 - DNA, 25 bp, Homo sapien
cacacagatgatgcgtgagagcgag

SEQ ID NO: 1554121 - DNA, 25 bp, Homo sapien
ttgtttgataaagagatactgtgcc

SEQ ID NO: 1554122 - DNA, 25 bp, Homo sapien
ttcagacccataagacaacaaatct

SEQ ID NO: 1554123 - DNA, 25 bp, Homo sapien
accacactattcaggacccttcaga

SEQ ID NO: 1554124 - DNA, 25 bp, Homo sapien
tgcctcaggcttcgaatttaggaga

SEQ ID NO: 1554125 - DNA, 25 bp, Homo sapien
cagggacaggaaggttacagagcca

SEQ ID NO: 1554126 - DNA, 25 bp, Homo sapien
ttctaggagtggataggtgccccgt

SEQ ID NO: 1554127 - DNA, 25 bp, Homo sapien
tcctgaagcctgtgcacttgcagca

SEQ ID NO: 1554128 - DNA, 25 bp, Homo sapien
cggtcctacgccctgagatggaact

SEQ ID NO: 1554129 - DNA, 25 bp, Homo sapien
gaggcttccggcagataatcagata

SEQ ID NO: 1554130 - DNA, 25 bp, Homo sapien
ggaaacaccgcaacacatggaaata

SEQ ID NO: 1554131 - DNA, 25 bp, Homo sapien
gataatcgataggacctggtcactg

SEQ ID NO: 1554132 - DNA, 25 bp, Homo sapien
gccgtgctcctggtgatgtgctgac

SEQ ID NO: 1554133 - DNA, 25 bp, Homo sapien
tagctaagctccatcagagatcctt

SEQ ID NO: 1554134 - DNA, 25 bp, Homo sapien
catacaataaactaggtgactgctt

SEQ ID NO: 1554135 - DNA, 25 bp, Homo sapien
catgtggtatttcgataaatgcata

SEQ ID NO: 1554136 - DNA, 25 bp, Homo sapien
taaatgcatacaaggattgagtcag

SEQ ID NO: 1554137 - DNA, 25 bp, Homo sapien
cagctctcgcaaacacactgactca

SEQ ID NO: 1554138 - DNA, 25 bp, Homo sapien
tccagctctcgcaaacacactgact

SEQ ID NO: 1554139 - DNA, 25 bp, Homo sapien
ccagctctcgcaaacacactgactc

SEQ ID NO: 1554140 - DNA, 25 bp, Homo sapien
gcatctcttgtctcgaagtccaaat

SEQ ID NO: 1554141 - DNA, 25 bp, Homo sapien
cctgcatctcttgtctcgaagtcca

SEQ ID NO: 1554142 - DNA, 25 bp, Homo sapien
tctcttgtctcgaagtccaaatcat

SEQ ID NO: 1554143 - DNA, 25 bp, Homo sapien
ttgtctcgaagtccaaatcatctgc

SEQ ID NO: 1554144 - DNA, 25 bp, Homo sapien
cccacattataaggtgacaggcagt

SEQ ID NO: 1554145 - DNA, 25 bp, Homo sapien
gaagccagtgttacataatgctgag

SEQ ID NO: 1554146 - DNA, 25 bp, Homo sapien
agtcttccaagcagacatctcaaag

SEQ ID NO: 1554147 - DNA, 25 bp, Homo sapien
aaagaccttacagggccagcctttg

SEQ ID NO: 1554148 - DNA, 25 bp, Homo sapien
gacgaagaaggtcctctcgcacctc

SEQ ID NO: 1554149 - DNA, 25 bp, Homo sapien
ggtctcctctggcagacgaagaagg

SEQ ID NO: 1554150 - DNA, 25 bp, Homo sapien
cacagcggtacttttgctcatctcc

SEQ ID NO: 1554151 - DNA, 25 bp, Homo sapien
agggtcccttctccacagcggtact

SEQ ID NO: 1554152 - DNA, 25 bp, Homo sapien
taggaagagtccagcctacagaagg

SEQ ID NO: 1554153 - DNA, 25 bp, Homo sapien
ataaaccacaagcatcgcccaccgt

SEQ ID NO: 1554154 - DNA, 25 bp, Homo sapien
ccaaccagggctgtagtgcgagcag

SEQ ID NO: 1554155 - DNA, 25 bp, Homo sapien
tgcgagcagggaaaaggatggcagc

SEQ ID NO: 1554156 - DNA, 25 bp, Homo sapien
taactaactcccagggtcgtgtggc

SEQ ID NO: 1554157 - DNA, 25 bp, Homo sapien
taagaacgtgaattctgggccgggc

SEQ ID NO: 1554158 - DNA, 25 bp, Homo sapien
tgagcaaagcaatgtgacccgtgcc

SEQ ID NO: 1554159 - DNA, 25 bp, Homo sapien
gatctttgtcagtcacggcttccag

SEQ ID NO: 1554160 - DNA, 25 bp, Homo sapien
tgaccacagggccagcttggaccca

SEQ ID NO: 1554161 - DNA, 25 bp, Homo sapien
gggtccaccacgtctgaccacaggg

SEQ ID NO: 1554162 - DNA, 25 bp, Homo sapien
tgatgggtccaccacgtctgaccac

SEQ ID NO: 1554163 - DNA, 25 bp, Homo sapien
gaggtgatgggtccaccacgtctga

SEQ ID NO: 1554164 - DNA, 25 bp, Homo sapien
cacatgagagatgctacccgaggca

SEQ ID NO: 1554165 - DNA, 25 bp, Homo sapien
tgtccaaagttgcagggagagcagc

SEQ ID NO: 1554166 - DNA, 25 bp, Homo sapien
gtactgagcactaaccacatgagag

SEQ ID NO: 1554167 - DNA, 25 bp, Homo sapien
gcagaggtgcgataacttgtccaaa

SEQ ID NO: 1554168 - DNA, 25 bp, Homo sapien
atccccagcacttccaatgcaaata

SEQ ID NO: 1554169 - DNA, 25 bp, Homo sapien
agcacttccaatgcaaataaacaca

SEQ ID NO: 1554170 - DNA, 25 bp, Homo sapien
gcttcaattccctgatcacttccat

SEQ ID NO: 1554171 - DNA, 25 bp, Homo sapien
cacagcttcaattccctgatcactt

SEQ ID NO: 1554172 - DNA, 25 bp, Homo sapien
gcccaagtgcttacagaagcgccgt

SEQ ID NO: 1554173 - DNA, 25 bp, Homo sapien
ggcacctacagggtctggaaccagg

SEQ ID NO: 1554174 - DNA, 25 bp, Homo sapien
tcagagaccgaggaggtcacatccg

SEQ ID NO: 1554175 - DNA, 25 bp, Homo sapien
gcagatcagagaggaagttcgcgct

SEQ ID NO: 1554176 - DNA, 25 bp, Homo sapien
cacggacttcgtgccaggcgcttca

SEQ ID NO: 1554177 - DNA, 25 bp, Homo sapien
ctgcccacggacttcgtgccaggcg

SEQ ID NO: 1554178 - DNA, 25 bp, Homo sapien
cccacggacttcgtgccaggcgctt

SEQ ID NO: 1554179 - DNA, 25 bp, Homo sapien
tgcccacggacttcgtgccaggcgc

SEQ ID NO: 1554180 - DNA, 25 bp, Homo sapien
gaaacagtgtttagcagaccttgag

SEQ ID NO: 1554181 - DNA, 25 bp, Homo sapien
ggtgcccctcttgcagacagaaagg

SEQ ID NO: 1554182 - DNA, 25 bp, Homo sapien
tcaggactggccgttagaaagatct

SEQ ID NO: 1554183 - DNA, 25 bp, Homo sapien
tcttcgggccagcagatattgggca

SEQ ID NO: 1554184 - DNA, 25 bp, Homo sapien
ctcagggtgaccagcggagcaggaa

SEQ ID NO: 1554185 - DNA, 25 bp, Homo sapien
gagggctgggctttctatctacaca

SEQ ID NO: 1554186 - DNA, 25 bp, Homo sapien
tgaatgaagggacgtagcccaaacc

SEQ ID NO: 1554187 - DNA, 25 bp, Homo sapien
aaacatcgccgtacgctattcaggg

SEQ ID NO: 1554188 - DNA, 25 bp, Homo sapien
cacacctggtatatatgcgagccgg

SEQ ID NO: 1554189 - DNA, 25 bp, Homo sapien
gcaggcacaggggacccaggcctgt

SEQ ID NO: 1554190 - DNA, 25 bp, Homo sapien
ctgcaggcacaggggacccaggcct

SEQ ID NO: 1554191 - DNA, 25 bp, Homo sapien
caggcacaggggacccaggcctgtg

SEQ ID NO: 1554192 - DNA, 25 bp, Homo sapien
aggcacaggggacccaggcctgtga

SEQ ID NO: 1554193 - DNA, 25 bp, Homo sapien
ggcctgcttgtaggcgccgatgacc

SEQ ID NO: 1554194 - DNA, 25 bp, Homo sapien
ctgcttgtaggcgccgatgacctcg

SEQ ID NO: 1554195 - DNA, 25 bp, Homo sapien
aggcctgcttgtaggcgccgatgac

SEQ ID NO: 1554196 - DNA, 25 bp, Homo sapien
cttgtaggcgccgatgacctcgtcc

SEQ ID NO: 1554197 - DNA, 25 bp, Homo sapien
ttcaggtccagacagtcgaggcggt

SEQ ID NO: 1554198 - DNA, 25 bp, Homo sapien
ggtccagacagtcgaggcggtgccc

SEQ ID NO: 1554199 - DNA, 25 bp, Homo sapien
ctttcaggtccagacagtcgaggcg

SEQ ID NO: 1554200 - DNA, 25 bp, Homo sapien
tccagacagtcgaggcggtgcccga

SEQ ID NO: 1554201 - DNA, 25 bp, Homo sapien
atcttcatccaggtttgtctgctcc

SEQ ID NO: 1554202 - DNA, 25 bp, Homo sapien
tcttcatccaggtttgtctgctcca

SEQ ID NO: 1554203 - DNA, 25 bp, Homo sapien
agctcagggagccaagtgggcggtg

SEQ ID NO: 1554204 - DNA, 25 bp, Homo sapien
cagggagccaagtgggcggtggcag

SEQ ID NO: 1554205 - DNA, 25 bp, Homo sapien
gaaggggcccgggagctcagggagc

SEQ ID NO: 1554206 - DNA, 25 bp, Homo sapien
tcagggagccaagtgggcggtggca

SEQ ID NO: 1554207 - DNA, 25 bp, Homo sapien
tcgggggctcagcctcagctctggg

SEQ ID NO: 1554208 - DNA, 25 bp, Homo sapien
ctgcgcatagagattcgggggctca

SEQ ID NO: 1554209 - DNA, 25 bp, Homo sapien
ttcgggggctcagcctcagctctgg

SEQ ID NO: 1554210 - DNA, 25 bp, Homo sapien
cgcatagagattcgggggctcagcc

SEQ ID NO: 1554211 - DNA, 25 bp, Homo sapien
ccccgggtgccgatgtgcttgttga

SEQ ID NO: 1554212 - DNA, 25 bp, Homo sapien
atcatgtcgaagagggccgaggcac

SEQ ID NO: 1554213 - DNA, 25 bp, Homo sapien
tgggtggccgactcgtagtactcga

SEQ ID NO: 1554214 - DNA, 25 bp, Homo sapien
tgccgatgtgcttgttgaaggagat

SEQ ID NO: 1554215 - DNA, 25 bp, Homo sapien
cttgcgcatcatgtgggcggccgcc

SEQ ID NO: 1554216 - DNA, 25 bp, Homo sapien
tgcgcatcatgtgggcggccgcctg

SEQ ID NO: 1554217 - DNA, 25 bp, Homo sapien
ttgcgcatcatgtgggcggccgcct

SEQ ID NO: 1554218 - DNA, 25 bp, Homo sapien
ggccgccccgacaggctggcgttct

SEQ ID NO: 1554219 - DNA, 25 bp, Homo sapien
acgaagggcgccgagtggtccagca

SEQ ID NO: 1554220 - DNA, 25 bp, Homo sapien
agcagcatgaggggccgccccgaca

SEQ ID NO: 1554221 - DNA, 25 bp, Homo sapien
tgttgcgggcgtccagatactgcag

SEQ ID NO: 1554222 - DNA, 25 bp, Homo sapien
agggggcacggtgactgggcaggcc

SEQ ID NO: 1554223 - DNA, 25 bp, Homo sapien
gagggggcacggtgactgggcaggc

SEQ ID NO: 1554224 - DNA, 25 bp, Homo sapien
ggagggggcacggtgactgggcagg

SEQ ID NO: 1554225 - DNA, 25 bp, Homo sapien
ggggcacggtgactgggcaggcccc

SEQ ID NO: 1554226 - DNA, 25 bp, Homo sapien
tagcacgtggttgttccggaggtcc

SEQ ID NO: 1554227 - DNA, 25 bp, Homo sapien
ccgagtcctgcaggccgttgagctt

SEQ ID NO: 1554228 - DNA, 25 bp, Homo sapien
tgaacttgagcaggttacccagctg

SEQ ID NO: 1554229 - DNA, 25 bp, Homo sapien
tgagcttgttgtccgccaggtacag

SEQ ID NO: 1554230 - DNA, 25 bp, Homo sapien
tgaaagcagcctctagctgaccctg

SEQ ID NO: 1554231 - DNA, 25 bp, Homo sapien
tctgacaggctggagatttcactca

SEQ ID NO: 1554232 - DNA, 25 bp, Homo sapien
tgtcactgtctagggcgggtctgtc

SEQ ID NO: 1554233 - DNA, 25 bp, Homo sapien
cctccaggatgcaacaggaacgcct

SEQ ID NO: 1554234 - DNA, 25 bp, Homo sapien
ctgctccttgaggccctcgcagatg

SEQ ID NO: 1554235 - DNA, 25 bp, Homo sapien
tctgctccttgaggccctcgcagat

SEQ ID NO: 1554236 - DNA, 25 bp, Homo sapien
tacctgagtggcttgctttaagcac

SEQ ID NO: 1554237 - DNA, 25 bp, Homo sapien
gggcctggaccttgagcgccctgaa

SEQ ID NO: 1554238 - DNA, 25 bp, Homo sapien
agtgctcgccctgagagtctctgta

SEQ ID NO: 1554239 - DNA, 25 bp, Homo sapien
gacaggagccgtcagctagaggcaa

SEQ ID NO: 1554240 - DNA, 25 bp, Homo sapien
gcccgaggcgcagcacgctgcggtt

SEQ ID NO: 1554241 - DNA, 25 bp, Homo sapien
acgctgcggttgctgatgagcccgt

SEQ ID NO: 1554242 - DNA, 25 bp, Homo sapien
gagcccgttcttgaggtgccgcaca

SEQ ID NO: 1554243 - DNA, 25 bp, Homo sapien
gccgcacaccctcgttcccgatggg

SEQ ID NO: 1554244 - DNA, 25 bp, Homo sapien
cagcccgcaccctggcccggccccg

SEQ ID NO: 1554245 - DNA, 25 bp, Homo sapien
ttcttgggttcacggtcgaggtcca

SEQ ID NO: 1554246 - DNA, 25 bp, Homo sapien
tccaggcgcagcagtgagtggttca

SEQ ID NO: 1554247 - DNA, 25 bp, Homo sapien
tgagggccaacgacagtgccatgag

SEQ ID NO: 1554248 - DNA, 25 bp, Homo sapien
gcctgtcttgatctcgttctcccga

SEQ ID NO: 1554249 - DNA, 25 bp, Homo sapien
cccagggctgcaggaccgtcccctg

SEQ ID NO: 1554250 - DNA, 25 bp, Homo sapien
ctgtggcgggagcgcctggctaggg

SEQ ID NO: 1554251 - DNA, 25 bp, Homo sapien
tggctagggctctcaggccggcccc

SEQ ID NO: 1554252 - DNA, 25 bp, Homo sapien
ggctagggctctcaggccggcccca

SEQ ID NO: 1554253 - DNA, 25 bp, Homo sapien
tggcgggagcgcctggctagggctc

SEQ ID NO: 1554254 - DNA, 25 bp, Homo sapien
gcgcttgcagccgttctggatctcg

SEQ ID NO: 1554255 - DNA, 25 bp, Homo sapien
gcgccagcaccaagttgcgcttgca

SEQ ID NO: 1554256 - DNA, 25 bp, Homo sapien
tctgcgtctcgatgaagctcttcac

SEQ ID NO: 1554257 - DNA, 25 bp, Homo sapien
cgttctggatctcggccagcagcgc

SEQ ID NO: 1554258 - DNA, 25 bp, Homo sapien
gcggcgggctcgtcgtcgggctggg

SEQ ID NO: 1554259 - DNA, 25 bp, Homo sapien
gctggggctcggtggcggtggtctc

SEQ ID NO: 1554260 - DNA, 25 bp, Homo sapien
gctcggtggcggtggtctcaggcat

SEQ ID NO: 1554261 - DNA, 25 bp, Homo sapien
ccagcggcgggctcgtcgtcgggct

SEQ ID NO: 1554262 - DNA, 25 bp, Homo sapien
tccccatccgagtccgagtctgagt

SEQ ID NO: 1554263 - DNA, 25 bp, Homo sapien
tcttcctccccatccgagtccgagt

SEQ ID NO: 1554264 - DNA, 25 bp, Homo sapien
ccgagtccgagtctgagtctgagtc

SEQ ID NO: 1554265 - DNA, 25 bp, Homo sapien
ctgagtctgagtccgggctgggtgc

SEQ ID NO: 1554266 - DNA, 25 bp, Homo sapien
tggacacggaaatccgctgctcggt

SEQ ID NO: 1554267 - DNA, 25 bp, Homo sapien
tcgggcgggctctccacccgggtca

SEQ ID NO: 1554268 - DNA, 25 bp, Homo sapien
gcccgggctggacacggaaatccgc

SEQ ID NO: 1554269 - DNA, 25 bp, Homo sapien
cacggaaatccgctgctcggtgggt

SEQ ID NO: 1554270 - DNA, 25 bp, Homo sapien
gaggaccctgtgtcccgggtgtcaa

SEQ ID NO: 1554271 - DNA, 25 bp, Homo sapien
tgaggctcagaggaccctgtgtccc

SEQ ID NO: 1554272 - DNA, 25 bp, Homo sapien
tgtgtcccgggtgtcaatggccccg

SEQ ID NO: 1554273 - DNA, 25 bp, Homo sapien
gctcagaggaccctgtgtcccgggt

SEQ ID NO: 1554274 - DNA, 25 bp, Homo sapien
ggccctgaccgaggcggctccggtg

SEQ ID NO: 1554275 - DNA, 25 bp, Homo sapien
agtggtggccctgaccgaggcggct

SEQ ID NO: 1554276 - DNA, 25 bp, Homo sapien
tggtggccctgaccgaggcggctcc

SEQ ID NO: 1554277 - DNA, 25 bp, Homo sapien
gcagtgccagggcgaactcgggctt

SEQ ID NO: 1554278 - DNA, 25 bp, Homo sapien
gatgagaactaagccccactttgct

SEQ ID NO: 1554279 - DNA, 25 bp, Homo sapien
gcccctgcgagaaccattttaaaga

SEQ ID NO: 1554280 - DNA, 25 bp, Homo sapien
aaactgaggtccacaacaggcaggg

SEQ ID NO: 1554281 - DNA, 25 bp, Homo sapien
agagtgcccagagaccgctgagatg

SEQ ID NO: 1554282 - DNA, 25 bp, Homo sapien
cttctcgttcttggagcagctcagt

SEQ ID NO: 1554283 - DNA, 25 bp, Homo sapien
ccttctcgttcttggagcagctcag

SEQ ID NO: 1554284 - DNA, 25 bp, Homo sapien
ttctcgttcttggagcagctcagtt

SEQ ID NO: 1554285 - DNA, 25 bp, Homo sapien
gagattgggggagagactgtcagag

SEQ ID NO: 1554286 - DNA, 25 bp, Homo sapien
gattgggggagagactgtcagagcc

SEQ ID NO: 1554287 - DNA, 25 bp, Homo sapien
agattgggggagagactgtcagagc

SEQ ID NO: 1554288 - DNA, 25 bp, Homo sapien
attgggggagagactgtcagagcca

SEQ ID NO: 1554289 - DNA, 25 bp, Homo sapien
gaacaggcgcctgatgtccttggag

SEQ ID NO: 1554290 - DNA, 25 bp, Homo sapien
tgaacccagccccagtttattagaa

SEQ ID NO: 1554291 - DNA, 25 bp, Homo sapien
tgaacagagttgcaccgacaggagt

SEQ ID NO: 1554292 - DNA, 25 bp, Homo sapien
tcatcgcagaccgaccggaaaaagg

SEQ ID NO: 1554293 - DNA, 25 bp, Homo sapien
gagaccctagacctgaagccaggag

SEQ ID NO: 1554294 - DNA, 25 bp, Homo sapien
gaagacgcagtaatgcctgaccagt

SEQ ID NO: 1554295 - DNA, 25 bp, Homo sapien
cagaaaggatgggtgtaaactcgcc

SEQ ID NO: 1554296 - DNA, 25 bp, Homo sapien
caggatccgcacgaagcagacgttg

SEQ ID NO: 1554297 - DNA, 25 bp, Homo sapien
cagctactgtggtacctggtgttcc

SEQ ID NO: 1554298 - DNA, 25 bp, Homo sapien
tgctctacttgtcactgggcggcca

SEQ ID NO: 1554299 - DNA, 25 bp, Homo sapien
gtgaccacgttgtgcgagggcatcc

SEQ ID NO: 1554300 - DNA, 25 bp, Homo sapien
tgtactcggtgctgggcaacaagcc

SEQ ID NO: 1554301 - DNA, 25 bp, Homo sapien
tgcgcttcaaatgtacaggccccga

SEQ ID NO: 1554302 - DNA, 25 bp, Homo sapien
tctaagacctgggttcctgcttacc

SEQ ID NO: 1554303 - DNA, 25 bp, Homo sapien
catgcatgggcagaaagcccctggt

SEQ ID NO: 1554304 - DNA, 25 bp, Homo sapien
gggacctacgtcctgcaagacaaca

SEQ ID NO: 1554305 - DNA, 25 bp, Homo sapien
ctgtgttggctgctgaaggccggat

SEQ ID NO: 1554306 - DNA, 25 bp, Homo sapien
tctcatcagccagtctgttaagcac

SEQ ID NO: 1554307 - DNA, 25 bp, Homo sapien
gatgtgaattggtcagcctgggtcc

SEQ ID NO: 1554308 - DNA, 25 bp, Homo sapien
tgtcctttgttgatgcacgttgtct

SEQ ID NO: 1554309 - DNA, 25 bp, Homo sapien
aagacagggtcagggccgggcgcgg

SEQ ID NO: 1554310 - DNA, 25 bp, Homo sapien
tggctcacgcctataatcccagcac

SEQ ID NO: 1554311 - DNA, 25 bp, Homo sapien
tttgggaggccgaggtgggtgaatc

SEQ ID NO: 1554312 - DNA, 25 bp, Homo sapien
acgaggtcaggagatcaagaccatc

SEQ ID NO: 1554313 - DNA, 25 bp, Homo sapien
cgtctcctgcagtcatcggcccctt

SEQ ID NO: 1554314 - DNA, 25 bp, Homo sapien
gggagacagtgcaacaggaagccgt

SEQ ID NO: 1554315 - DNA, 25 bp, Homo sapien
gccgtgtcgttgtcacccatgaggg

SEQ ID NO: 1554316 - DNA, 25 bp, Homo sapien
ggaagccgtgtcgttgtcacccatg

SEQ ID NO: 1554317 - DNA, 25 bp, Homo sapien
tggcattcaggcaacgtggcctgcg

SEQ ID NO: 1554318 - DNA, 25 bp, Homo sapien
gtggcctgcgttgaccctcaggttg

SEQ ID NO: 1554319 - DNA, 25 bp, Homo sapien
tccctcttggcagtcgctgtgagca

SEQ ID NO: 1554320 - DNA, 25 bp, Homo sapien
gtgaagccggccattgcacctttgc

SEQ ID NO: 1554321 - DNA, 25 bp, Homo sapien
ctcaggctcagcacagtcggggtgc

SEQ ID NO: 1554322 - DNA, 25 bp, Homo sapien
ggctcagcacagtcggggtgcttcc

SEQ ID NO: 1554323 - DNA, 25 bp, Homo sapien
cttcctaggggtgggagtgcaccct

SEQ ID NO: 1554324 - DNA, 25 bp, Homo sapien
tgtgccttcacagcccactcctgct

SEQ ID NO: 1554325 - DNA, 25 bp, Homo sapien
tcctttggaaagtggcgttcgcgac

SEQ ID NO: 1554326 - DNA, 25 bp, Homo sapien
taacgtacctaagcctcagcgtggg

SEQ ID NO: 1554327 - DNA, 25 bp, Homo sapien
taaaatgaaatatgccggctgggcg

SEQ ID NO: 1554328 - DNA, 25 bp, Homo sapien
cgcgatgattcagggtaaagcactt

SEQ ID NO: 1554329 - DNA, 25 bp, Homo sapien
gggcgcatctttaggcgtgcgagga

SEQ ID NO: 1554330 - DNA, 25 bp, Homo sapien
gcatggcggatactgtgttgtttga

SEQ ID NO: 1554331 - DNA, 25 bp, Homo sapien
gggggcatggcggatactgtgttgt

SEQ ID NO: 1554332 - DNA, 25 bp, Homo sapien
ggcgcatctttaggcgtgcgaggag

SEQ ID NO: 1554333 - DNA, 25 bp, Homo sapien
accagcgccagagtcgcagaaagga

SEQ ID NO: 1554334 - DNA, 25 bp, Homo sapien
acccggaagcacacgggcccgtgag

SEQ ID NO: 1554335 - DNA, 25 bp, Homo sapien
gatgacagtccgactggactctgct

SEQ ID NO: 1554336 - DNA, 25 bp, Homo sapien
accatgccaatctcagacccggaag

SEQ ID NO: 1554337 - DNA, 25 bp, Homo sapien
aaaggcgcaggtcctggattcccag

SEQ ID NO: 1554338 - DNA, 25 bp, Homo sapien
gagtcccaagccgaggtctttacga

SEQ ID NO: 1554339 - DNA, 25 bp, Homo sapien
tacgaatttgcctcctagtagaggc

SEQ ID NO: 1554340 - DNA, 25 bp, Homo sapien
gaagaccagctcgaacaaggatctg

SEQ ID NO: 1554341 - DNA, 25 bp, Homo sapien
gagcgctcggaatccgtctcggtcg

SEQ ID NO: 1554342 - DNA, 25 bp, Homo sapien
gagtcggtctccgcggcttccccag

SEQ ID NO: 1554343 - DNA, 25 bp, Homo sapien
ctccgccgacgaccctgggacgcca

SEQ ID NO: 1554344 - DNA, 25 bp, Homo sapien
ctcggcgcggccgtcggttccggct

SEQ ID NO: 1554345 - DNA, 25 bp, Homo sapien
ctccgccagccgaagttgcaggagc

SEQ ID NO: 1554346 - DNA, 25 bp, Homo sapien
aggcctcctccgccgattcccgctg

SEQ ID NO: 1554347 - DNA, 25 bp, Homo sapien
cagccgaagttgcaggagcgagcgc

SEQ ID NO: 1554348 - DNA, 25 bp, Homo sapien
cctcctccgccgattcccgctgcac

SEQ ID NO: 1554349 - DNA, 25 bp, Homo sapien
tgcacggcggtagacaccgctcacg

SEQ ID NO: 1554350 - DNA, 25 bp, Homo sapien
agacgctcggccagcgcacaaaggt

SEQ ID NO: 1554351 - DNA, 25 bp, Homo sapien
ggcagccagccacgatgtccagacg

SEQ ID NO: 1554352 - DNA, 25 bp, Homo sapien
agcctactagccagggcggccacgt

SEQ ID NO: 1554353 - DNA, 25 bp, Homo sapien
gtctttctcaggctcggtccctggc

SEQ ID NO: 1554354 - DNA, 25 bp, Homo sapien
cggccccgggtctttctcaggctcg

SEQ ID NO: 1554355 - DNA, 25 bp, Homo sapien
cgggtctttctcaggctcggtccct

SEQ ID NO: 1554356 - DNA, 25 bp, Homo sapien
gcggccccgggtctttctcaggctc

SEQ ID NO: 1554357 - DNA, 25 bp, Homo sapien
gtcaggttgggaagtagaatcatgg

SEQ ID NO: 1554358 - DNA, 25 bp, Homo sapien
agtcaggttgggaagtagaatcatg

SEQ ID NO: 1554359 - DNA, 25 bp, Homo sapien
ttgtgggaagaacgggaacaagctc

SEQ ID NO: 1554360 - DNA, 25 bp, Homo sapien
aacaaggacccagcctagggtgaag

SEQ ID NO: 1554361 - DNA, 25 bp, Homo sapien
tatcccacgacactgctggacttgg

SEQ ID NO: 1554362 - DNA, 25 bp, Homo sapien
aaattaaccgggcagctggacgtgg

SEQ ID NO: 1554363 - DNA, 25 bp, Homo sapien
ggaaatgccaccttggtccagggag

SEQ ID NO: 1554364 - DNA, 25 bp, Homo sapien
gaaatgccaccttggtccagggagt

SEQ ID NO: 1554365 - DNA, 25 bp, Homo sapien
tgccaccttggtccagggagttggg

SEQ ID NO: 1554366 - DNA, 25 bp, Homo sapien
aatgccaccttggtccagggagttg

SEQ ID NO: 1554367 - DNA, 25 bp, Homo sapien
cctacagagttgagagcgagcatca

SEQ ID NO: 1554368 - DNA, 25 bp, Homo sapien
ggcctacagagttgagagcgagcat

SEQ ID NO: 1554369 - DNA, 25 bp, Homo sapien
ctacagagttgagagcgagcatcat

SEQ ID NO: 1554370 - DNA, 25 bp, Homo sapien
gcctacagagttgagagcgagcatc

SEQ ID NO: 1554371 - DNA, 25 bp, Homo sapien
tctggagagtcaagaggagacgcca

SEQ ID NO: 1554372 - DNA, 25 bp, Homo sapien
ccagagctgggatcggaagaaaaca

SEQ ID NO: 1554373 - DNA, 25 bp, Homo sapien
tgaattgggcccgaagtgcctgaag

SEQ ID NO: 1554374 - DNA, 25 bp, Homo sapien
taatcagtccgccataaaaagctcc

SEQ ID NO: 1554375 - DNA, 25 bp, Homo sapien
gcatctcaatctctaggccctgcag

SEQ ID NO: 1554376 - DNA, 25 bp, Homo sapien
tccaagcctccagcgaagttggcca

SEQ ID NO: 1554377 - DNA, 25 bp, Homo sapien
cgaagttggccacaatgactcctgt

SEQ ID NO: 1554378 - DNA, 25 bp, Homo sapien
agctctgccttaatggccccaaaga

SEQ ID NO: 1554379 - DNA, 25 bp, Homo sapien
tccccaagcaggtgtggggacatac

SEQ ID NO: 1554380 - DNA, 25 bp, Homo sapien
tcagtgtgcgatgcctgcagcttgg

SEQ ID NO: 1554381 - DNA, 25 bp, Homo sapien
tgcctgcagcttggcggggctcccc

SEQ ID NO: 1554382 - DNA, 25 bp, Homo sapien
cagcttggcggggctccccaagcag

SEQ ID NO: 1554383 - DNA, 25 bp, Homo sapien
taggactctgtttcactctggcgac

SEQ ID NO: 1554384 - DNA, 25 bp, Homo sapien
ttttccaacagagggcagtaaagag

SEQ ID NO: 1554385 - DNA, 25 bp, Homo sapien
gtatattacgcgagttttccaacag

SEQ ID NO: 1554386 - DNA, 25 bp, Homo sapien
ctctggcgacattctcacagtcgag

SEQ ID NO: 1554387 - DNA, 25 bp, Homo sapien
attttgtatgtttagtagacacggg

SEQ ID NO: 1554388 - DNA, 25 bp, Homo sapien
gctaattttgtatgtttagtagaca

SEQ ID NO: 1554389 - DNA, 25 bp, Homo sapien
ttacacgcgtgtgccacaacacccg

SEQ ID NO: 1554390 - DNA, 25 bp, Homo sapien
aatcaggtgagcgaacacagtacct

SEQ ID NO: 1554391 - DNA, 25 bp, Homo sapien
gaacaaccagctgaacaactatcca

SEQ ID NO: 1554392 - DNA, 25 bp, Homo sapien
tagaagcctccagtaatcatctcct

SEQ ID NO: 1554393 - DNA, 25 bp, Homo sapien
tcaataaagagatagcaattatgag

SEQ ID NO: 1554394 - DNA, 25 bp, Homo sapien
cagtagccaggcagtacctgccatg

SEQ ID NO: 1554395 - DNA, 25 bp, Homo sapien
ttgagtgaacatcagcagtagccag

SEQ ID NO: 1554396 - DNA, 25 bp, Homo sapien
ccaggcagtacctgccatgggcctg

SEQ ID NO: 1554397 - DNA, 25 bp, Homo sapien
tgaagagggcctgggccttgagtga

SEQ ID NO: 1554398 - DNA, 25 bp, Homo sapien
tatgttgccaatatgcaaaagagca

SEQ ID NO: 1554399 - DNA, 25 bp, Homo sapien
ttgaggaatcaacaatattgtgcag

SEQ ID NO: 1554400 - DNA, 25 bp, Homo sapien
tgtgcagtccatagacatttattat

SEQ ID NO: 1554401 - DNA, 25 bp, Homo sapien
tgcccagcccgaaaatgacactttt

SEQ ID NO: 1554402 - DNA, 25 bp, Homo sapien
tctccatccccgcaaaggcaagatt

SEQ ID NO: 1554403 - DNA, 25 bp, Homo sapien
gagatgtttcccagagttccaaatt

SEQ ID NO: 1554404 - DNA, 25 bp, Homo sapien
cagtcgctcttcttggagttccaag

SEQ ID NO: 1554405 - DNA, 25 bp, Homo sapien
caagcccggagtccttggaatgttt

SEQ ID NO: 1554406 - DNA, 25 bp, Homo sapien
cgccggcctggggacgcgagctcaa

SEQ ID NO: 1554407 - DNA, 25 bp, Homo sapien
ccccgccggcctggggacgcgagct

SEQ ID NO: 1554408 - DNA, 25 bp, Homo sapien
ccggcctggggacgcgagctcaaaa

SEQ ID NO: 1554409 - DNA, 25 bp, Homo sapien
cctggggacgcgagctcaaaagctg

SEQ ID NO: 1554410 - DNA, 25 bp, Homo sapien
cgtgtccgagttccgatcgttgccc

SEQ ID NO: 1554411 - DNA, 25 bp, Homo sapien
tgtccgagttccgatcgttgcccgg

SEQ ID NO: 1554412 - DNA, 25 bp, Homo sapien
gagttccgatcgttgcccggggcca

SEQ ID NO: 1554413 - DNA, 25 bp, Homo sapien
gttccgatcgttgcccggggccagc

SEQ ID NO: 1554414 - DNA, 25 bp, Homo sapien
tgtagattgtagtgaccaaggaaca

SEQ ID NO: 1554415 - DNA, 25 bp, Homo sapien
gttctggcccatagtgatgatgcgg

SEQ ID NO: 1554416 - DNA, 25 bp, Homo sapien
caaggaacagaggtggtaggcattt

SEQ ID NO: 1554417 - DNA, 25 bp, Homo sapien
gactccaaattggagttctggccca

SEQ ID NO: 1554418 - DNA, 25 bp, Homo sapien
acacagctagggagggacagaaaca

SEQ ID NO: 1554419 - DNA, 25 bp, Homo sapien
gctgcaagctgggagtgaatctgca

SEQ ID NO: 1554420 - DNA, 25 bp, Homo sapien
gaatccacgggctgtctgactcata

SEQ ID NO: 1554421 - DNA, 25 bp, Homo sapien
ttagtcacatcacgtcgctggctcc

SEQ ID NO: 1554422 - DNA, 25 bp, Homo sapien
tgagctaccacgctgggtcatgaac

SEQ ID NO: 1554423 - DNA, 25 bp, Homo sapien
caacacccgggactgttgctaggga

SEQ ID NO: 1554424 - DNA, 25 bp, Homo sapien
gaatgactccatgttccagcagaga

SEQ ID NO: 1554425 - DNA, 25 bp, Homo sapien
gatccccaccaagataaggacctgg

SEQ ID NO: 1554426 - DNA, 25 bp, Homo sapien
ttcccaatggtcctcagcaggcggt

SEQ ID NO: 1554427 - DNA, 25 bp, Homo sapien
ccgaggagcggccactgcccaaggt

SEQ ID NO: 1554428 - DNA, 25 bp, Homo sapien
tcccgaccagtgaggatgtgccgag

SEQ ID NO: 1554429 - DNA, 25 bp, Homo sapien
atggagttccggcaacgggcaccca

SEQ ID NO: 1554430 - DNA, 25 bp, Homo sapien
gccacaagccccactggatatggtg

SEQ ID NO: 1554431 - DNA, 25 bp, Homo sapien
cacaagccccactggatatggtggc

SEQ ID NO: 1554432 - DNA, 25 bp, Homo sapien
ggacggtcaaggtgccacaagcccc

SEQ ID NO: 1554433 - DNA, 25 bp, Homo sapien
acaagccccactggatatggtggct

SEQ ID NO: 1554434 - DNA, 25 bp, Homo sapien
cagctgggttttgtcgataatcttg

SEQ ID NO: 1554435 - DNA, 25 bp, Homo sapien
gggttttgtcgataatcttgatggc

SEQ ID NO: 1554436 - DNA, 25 bp, Homo sapien
ttttgtcgataatcttgatggcaac

SEQ ID NO: 1554437 - DNA, 25 bp, Homo sapien
gattcagctgggttttgtcgataat

SEQ ID NO: 1554438 - DNA, 25 bp, Homo sapien
tcatgatgcggacttctcggaacag

SEQ ID NO: 1554439 - DNA, 25 bp, Homo sapien
tggggtggtttaggcccttcatgat

SEQ ID NO: 1554440 - DNA, 25 bp, Homo sapien
ggcccttcatgatgcggacttctcg

SEQ ID NO: 1554441 - DNA, 25 bp, Homo sapien
cttcatgatgcggacttctcggaac

SEQ ID NO: 1554442 - DNA, 25 bp, Homo sapien
ctcagtctcaatcacctcaaagagc

SEQ ID NO: 1554443 - DNA, 25 bp, Homo sapien
gtctcaatcacctcaaagagcttca

SEQ ID NO: 1554444 - DNA, 25 bp, Homo sapien
cgtactccatcaccaggtacagcgt

SEQ ID NO: 1554445 - DNA, 25 bp, Homo sapien
tcaccaggtacagcgtcttctcagt

SEQ ID NO: 1554446 - DNA, 25 bp, Homo sapien
tgcagggcagaggccgagcggggtc

SEQ ID NO: 1554447 - DNA, 25 bp, Homo sapien
gcagggcggagagggtgggcggctc

SEQ ID NO: 1554448 - DNA, 25 bp, Homo sapien
gtggcacaggggcagggcggagagg

SEQ ID NO: 1554449 - DNA, 25 bp, Homo sapien
gtcagggtcaggtgcagcggcaggg

SEQ ID NO: 1554450 - DNA, 25 bp, Homo sapien
ttcatgcggccatgcgacacgaggt

SEQ ID NO: 1554451 - DNA, 25 bp, Homo sapien
gtcggaacttggctcgagcttcctt

SEQ ID NO: 1554452 - DNA, 25 bp, Homo sapien
gacacgaggtagtcaaacacttctc

SEQ ID NO: 1554453 - DNA, 25 bp, Homo sapien
ctgtcggaacttggctcgagcttcc

SEQ ID NO: 1554454 - DNA, 25 bp, Homo sapien
tatttttctggtgacaatagtgcac

SEQ ID NO: 1554455 - DNA, 25 bp, Homo sapien
tcaggtccctgtgtacaatattttt

SEQ ID NO: 1554456 - DNA, 25 bp, Homo sapien
aggtccctgtgtacaatatttttct

SEQ ID NO: 1554457 - DNA, 25 bp, Homo sapien
caggtccctgtgtacaatatttttc

SEQ ID NO: 1554458 - DNA, 25 bp, Homo sapien
gatttgagccaaccaaacggtcagc

SEQ ID NO: 1554459 - DNA, 25 bp, Homo sapien
taaagcacttaggatgccgcctagc

SEQ ID NO: 1554460 - DNA, 25 bp, Homo sapien
ggtgctcacaaaacgacagtcaaga

SEQ ID NO: 1554461 - DNA, 25 bp, Homo sapien
cacctggtcttggagcgcgaggact

SEQ ID NO: 1554462 - DNA, 25 bp, Homo sapien
tcttgccctgaaacagctccggggc

SEQ ID NO: 1554463 - DNA, 25 bp, Homo sapien
cagcgtgaactcgttgctgaagcca

SEQ ID NO: 1554464 - DNA, 25 bp, Homo sapien
tgtccagcttcgatcccagcgtgaa

SEQ ID NO: 1554465 - DNA, 25 bp, Homo sapien
cccgcagaacgtgtccagcttcgat

SEQ ID NO: 1554466 - DNA, 25 bp, Homo sapien
tgtgcccgtcgaagggcagggagcc

SEQ ID NO: 1554467 - DNA, 25 bp, Homo sapien
agatgtccacctccggcccgtcgta

SEQ ID NO: 1554468 - DNA, 25 bp, Homo sapien
cagggagccgctgacgagggtgtac

SEQ ID NO: 1554469 - DNA, 25 bp, Homo sapien
cgagggtgtacaggatgactcccag

SEQ ID NO: 1554470 - DNA, 25 bp, Homo sapien
tgggggggataggggcctgactgtg

SEQ ID NO: 1554471 - DNA, 25 bp, Homo sapien
ttgacatgtagaaagggacccggta

SEQ ID NO: 1554472 - DNA, 25 bp, Homo sapien
cggtacttccctctgagtactcgct

SEQ ID NO: 1554473 - DNA, 25 bp, Homo sapien
cctctgagtactcgctcccgcagct

SEQ ID NO: 1554474 - DNA, 25 bp, Homo sapien
tgacatgtagaaagggacccggtac

SEQ ID NO: 1554475 - DNA, 25 bp, Homo sapien
tgggttcagcaccaaaaatctccgc

SEQ ID NO: 1554476 - DNA, 25 bp, Homo sapien
cgagagtacagcgtttagctgggtt

SEQ ID NO: 1554477 - DNA, 25 bp, Homo sapien
aatctccgcaggatgctctcacagt

SEQ ID NO: 1554478 - DNA, 25 bp, Homo sapien
ctcgagagtacagcgtttagctggg

SEQ ID NO: 1554479 - DNA, 25 bp, Homo sapien
gctctgtgtatggcttcaactcctc

SEQ ID NO: 1554480 - DNA, 25 bp, Homo sapien
ccccgaagtcctcctcgggctctgt

SEQ ID NO: 1554481 - DNA, 25 bp, Homo sapien
tcctcaccctcatagccgatgttga

SEQ ID NO: 1554482 - DNA, 25 bp, Homo sapien
caattctcttggtgtccccgaagtc

SEQ ID NO: 1554483 - DNA, 25 bp, Homo sapien
cagaaactttaacttccatccattt

SEQ ID NO: 1554484 - DNA, 25 bp, Homo sapien
ccagaaactttaacttccatccatt

SEQ ID NO: 1554485 - DNA, 25 bp, Homo sapien
cccagaaactttaacttccatccat

SEQ ID NO: 1554486 - DNA, 25 bp, Homo sapien
tcccagaaactttaacttccatcca

SEQ ID NO: 1554487 - DNA, 25 bp, Homo sapien
ggtcacttcgttgtacttctggctg

SEQ ID NO: 1554488 - DNA, 25 bp, Homo sapien
gtaggtggcggtcacttcgttgtac

SEQ ID NO: 1554489 - DNA, 25 bp, Homo sapien
ttcttcccgtgtgtagcccataccc

SEQ ID NO: 1554490 - DNA, 25 bp, Homo sapien
cccagcaggaggtaggtggcggtca

SEQ ID NO: 1554491 - DNA, 25 bp, Homo sapien
gttccgttggtggtgtcgctgggcg

SEQ ID NO: 1554492 - DNA, 25 bp, Homo sapien
cttgttccgttggtggtgtcgctgg

SEQ ID NO: 1554493 - DNA, 25 bp, Homo sapien
gcgcccgcacccgtgccagggccag

SEQ ID NO: 1554494 - DNA, 25 bp, Homo sapien
ttggtggtgtcgctgggcgcccgca

SEQ ID NO: 1554495 - DNA, 25 bp, Homo sapien
agaaatcgctatgcctgcgctggcg

SEQ ID NO: 1554496 - DNA, 25 bp, Homo sapien
aatcgctatgcctgcgctggcggtg

SEQ ID NO: 1554497 - DNA, 25 bp, Homo sapien
gtggtaggtggaagaggaactccgc

SEQ ID NO: 1554498 - DNA, 25 bp, Homo sapien
tggaagaggaactccgctgcccttt

SEQ ID NO: 1554499 - DNA, 25 bp, Homo sapien
tctgaaatcggtcatcatgatagat

SEQ ID NO: 1554500 - DNA, 25 bp, Homo sapien
catgatagatgtacaactctataaa

SEQ ID NO: 1554501 - DNA, 25 bp, Homo sapien
aaatgttctgaaatcggtcatcatg

SEQ ID NO: 1554502 - DNA, 25 bp, Homo sapien
catcatgatagatgtacaactctat

SEQ ID NO: 1554503 - DNA, 25 bp, Homo sapien
cattttcaaggatgttattgtatga

SEQ ID NO: 1554504 - DNA, 25 bp, Homo sapien
aaccgtaacagttgctgcatttgag

SEQ ID NO: 1554505 - DNA, 25 bp, Homo sapien
aaaaaccgtaacagttgctgcattt

SEQ ID NO: 1554506 - DNA, 25 bp, Homo sapien
caaaaaaccgtaacagttgctgcat

SEQ ID NO: 1554507 - DNA, 25 bp, Homo sapien
tacagtggtgtgacctcagcttgct

SEQ ID NO: 1554508 - DNA, 25 bp, Homo sapien
aagtacagtggtgtgacctcagctt

SEQ ID NO: 1554509 - DNA, 25 bp, Homo sapien
cttgctgcaaccttggcctcctagg

SEQ ID NO: 1554510 - DNA, 25 bp, Homo sapien
agcttgctgcaaccttggcctccta

SEQ ID NO: 1554511 - DNA, 25 bp, Homo sapien
gaatgatcttcatgacggactggaa

SEQ ID NO: 1554512 - DNA, 25 bp, Homo sapien
gaagcactttatgcaccagtacaga

SEQ ID NO: 1554513 - DNA, 25 bp, Homo sapien
gccccttagtagaggaatgactaga

SEQ ID NO: 1554514 - DNA, 25 bp, Homo sapien
cctggcctgtaccattagactggga

SEQ ID NO: 1554515 - DNA, 25 bp, Homo sapien
gggatcgttggaacctgagaattcc

SEQ ID NO: 1554516 - DNA, 25 bp, Homo sapien
ctctgtgtgggccattctgacaata

SEQ ID NO: 1554517 - DNA, 25 bp, Homo sapien
cacgtgggttgcaatctctgtgtgg

SEQ ID NO: 1554518 - DNA, 25 bp, Homo sapien
agctggcatcaccacggaaacccag

SEQ ID NO: 1554519 - DNA, 25 bp, Homo sapien
tgcaggggtgcaggggatgggccac

SEQ ID NO: 1554520 - DNA, 25 bp, Homo sapien
ctgcgtttggggtgcaggggtgcag

SEQ ID NO: 1554521 - DNA, 25 bp, Homo sapien
gcgtttggggtgcaggggtgcaggg

SEQ ID NO: 1554522 - DNA, 25 bp, Homo sapien
ggtgcaggggtgcaggggatgggcc

SEQ ID NO: 1554523 - DNA, 25 bp, Homo sapien
tgcagctcgccttccggcctggcag

SEQ ID NO: 1554524 - DNA, 25 bp, Homo sapien
ggggtgctcgtgctgtccttccgcc

SEQ ID NO: 1554525 - DNA, 25 bp, Homo sapien
tgctgtccttccgccgctctgggat

SEQ ID NO: 1554526 - DNA, 25 bp, Homo sapien
ttccgccgctctgggatctctgcct

SEQ ID NO: 1554527 - DNA, 25 bp, Homo sapien
gcaaacagaggcactcgataaatgt

SEQ ID NO: 1554528 - DNA, 25 bp, Homo sapien
agtggcgggaacacagctccctgta

SEQ ID NO: 1554529 - DNA, 25 bp, Homo sapien
tgcacttctttgacacagaacacta

SEQ ID NO: 1554530 - DNA, 25 bp, Homo sapien
gatggcgtctgctatgcttcttgaa

SEQ ID NO: 1554531 - DNA, 25 bp, Homo sapien
gtgtctgtgtgggtggtgacccatg

SEQ ID NO: 1554532 - DNA, 25 bp, Homo sapien
tgtctgtgtgggtggtgacccatgc

SEQ ID NO: 1554533 - DNA, 25 bp, Homo sapien
aactataagtattttgtgtctgtgt

SEQ ID NO: 1554534 - DNA, 25 bp, Homo sapien
gtctgtgtgggtggtgacccatgct

SEQ ID NO: 1554535 - DNA, 25 bp, Homo sapien
ccatgtctgactaaaaacttaattt

SEQ ID NO: 1554536 - DNA, 25 bp, Homo sapien
gggcaccaagagcactaagaagaag

SEQ ID NO: 1554537 - DNA, 25 bp, Homo sapien
gatgaatgttctcaagaacgtacga

SEQ ID NO: 1554538 - DNA, 25 bp, Homo sapien
ctcaagaacgtacgagaaaaattag

SEQ ID NO: 1554539 - DNA, 25 bp, Homo sapien
tgctttattgtacctcttctttctc

SEQ ID NO: 1554540 - DNA, 25 bp, Homo sapien
ttgttgctttattgtacctcttctt

SEQ ID NO: 1554541 - DNA, 25 bp, Homo sapien
tttggcaacagtgacgggcgctcag

SEQ ID NO: 1554542 - DNA, 25 bp, Homo sapien
cgttctgtgcaaacgtaggtgtttc

SEQ ID NO: 1554543 - DNA, 25 bp, Homo sapien
ccccgggcgttctgtgcaaacgtag

SEQ ID NO: 1554544 - DNA, 25 bp, Homo sapien
caaacgtaggtgtttctgcgggtca

SEQ ID NO: 1554545 - DNA, 25 bp, Homo sapien
catcaagcccattttaccgaggagg

SEQ ID NO: 1554546 - DNA, 25 bp, Homo sapien
gaatgaaggcctcctaagcatcaga

SEQ ID NO: 1554547 - DNA, 25 bp, Homo sapien
cccaaggcttgtaggcggagaacag

SEQ ID NO: 1554548 - DNA, 25 bp, Homo sapien
gatttacccggtcattctgctagca

SEQ ID NO: 1554549 - DNA, 25 bp, Homo sapien
taagagtatgagcactgcacatggc

SEQ ID NO: 1554550 - DNA, 25 bp, Homo sapien
gaagtgctctgtaccatctctgggt

SEQ ID NO: 1554551 - DNA, 25 bp, Homo sapien
tctgggtgacgcctttacaaagagt

SEQ ID NO: 1554552 - DNA, 25 bp, Homo sapien
aaagagttgttgcttgtcccctact

SEQ ID NO: 1554553 - DNA, 25 bp, Homo sapien
aaccacgtgccaggcggctccgctc

SEQ ID NO: 1554554 - DNA, 25 bp, Homo sapien
tgccaggcggctccgctcccctgat

SEQ ID NO: 1554555 - DNA, 25 bp, Homo sapien
tgctgcggatggtggaaccacgtgc

SEQ ID NO: 1554556 - DNA, 25 bp, Homo sapien
ctgcggatggtggaaccacgtgcca

SEQ ID NO: 1554557 - DNA, 25 bp, Homo sapien
gtgcagcctcatgggccagtgtggg

SEQ ID NO: 1554558 - DNA, 25 bp, Homo sapien
gggtgcagcctcatgggccagtgtg

SEQ ID NO: 1554559 - DNA, 25 bp, Homo sapien
ccagtgtgggagaggcagggggccc

SEQ ID NO: 1554560 - DNA, 25 bp, Homo sapien
aggcagggggcccattctgcacacc

SEQ ID NO: 1554561 - DNA, 25 bp, Homo sapien
cagtttggaggtcagcttggtgaag

SEQ ID NO: 1554562 - DNA, 25 bp, Homo sapien
ctgccgtttagagggatcgagggta

SEQ ID NO: 1554563 - DNA, 25 bp, Homo sapien
tgccgtttagagggatcgagggtaa

SEQ ID NO: 1554564 - DNA, 25 bp, Homo sapien
gagaggcgcccgaaacacagcggtt

SEQ ID NO: 1554565 - DNA, 25 bp, Homo sapien
ggcgcccgaaacacagcggttagag

SEQ ID NO: 1554566 - DNA, 25 bp, Homo sapien
aggcgcccgaaacacagcggttaga

SEQ ID NO: 1554567 - DNA, 25 bp, Homo sapien
cgcccgaaacacagcggttagagtt

SEQ ID NO: 1554568 - DNA, 25 bp, Homo sapien
taatctggacatagggaacccacct

SEQ ID NO: 1554569 - DNA, 25 bp, Homo sapien
tgggcagagacacacccttacatag

SEQ ID NO: 1554570 - DNA, 25 bp, Homo sapien
gagtcaggatttgatctccttgtcc

SEQ ID NO: 1554571 - DNA, 25 bp, Homo sapien
cataacggggctcattctgaaatgg

SEQ ID NO: 1554572 - DNA, 25 bp, Homo sapien
aggtcccccgattctctcaggttcg

SEQ ID NO: 1554573 - DNA, 25 bp, Homo sapien
ctcaggtcccccgattctctcaggt

SEQ ID NO: 1554574 - DNA, 25 bp, Homo sapien
caggtcccccgattctctcaggttc

SEQ ID NO: 1554575 - DNA, 25 bp, Homo sapien
tcaggtcccccgattctctcaggtt

SEQ ID NO: 1554576 - DNA, 25 bp, Homo sapien
gtcaggggtaggcccaagcactcac

SEQ ID NO: 1554577 - DNA, 25 bp, Homo sapien
cagtcaggggtaggcccaagcactc

SEQ ID NO: 1554578 - DNA, 25 bp, Homo sapien
gcagtcaggggtaggcccaagcact

SEQ ID NO: 1554579 - DNA, 25 bp, Homo sapien
agtcaggggtaggcccaagcactca

SEQ ID NO: 1554580 - DNA, 25 bp, Homo sapien
ccatctaatgccctggggtaagtgt

SEQ ID NO: 1554581 - DNA, 25 bp, Homo sapien
ctggggccccatctaatgccctggg

SEQ ID NO: 1554582 - DNA, 25 bp, Homo sapien
gggccccatctaatgccctggggta

SEQ ID NO: 1554583 - DNA, 25 bp, Homo sapien
gccccatctaatgccctggggtaag

SEQ ID NO: 1554584 - DNA, 25 bp, Homo sapien
cgtttgatcccaaggtagatggcaa

SEQ ID NO: 1554585 - DNA, 25 bp, Homo sapien
tttccgtttgatcccaaggtagatg

SEQ ID NO: 1554586 - DNA, 25 bp, Homo sapien
cacactccaggggaatcggagcagc

SEQ ID NO: 1554587 - DNA, 25 bp, Homo sapien
cactccaggggaatcggagcagccg

SEQ ID NO: 1554588 - DNA, 25 bp, Homo sapien
ctcaggagggcgcgagctggtcagc

SEQ ID NO: 1554589 - DNA, 25 bp, Homo sapien
tcaggagggcgcgagctggtcagct

SEQ ID NO: 1554590 - DNA, 25 bp, Homo sapien
agggcctcaggagggcgcgagctgg

SEQ ID NO: 1554591 - DNA, 25 bp, Homo sapien
gcctcaggagggcgcgagctggtca

SEQ ID NO: 1554592 - DNA, 25 bp, Homo sapien
gacctccacttcgaagtgggacagg

SEQ ID NO: 1554593 - DNA, 25 bp, Homo sapien
agatgcgggtgacgagggtgcggaa

SEQ ID NO: 1554594 - DNA, 25 bp, Homo sapien
cagagctcgaggtcgttggagatgc

SEQ ID NO: 1554595 - DNA, 25 bp, Homo sapien
gtgcccgccacacggcggaagagaa

SEQ ID NO: 1554596 - DNA, 25 bp, Homo sapien
ctcaggtgccctcttggtagggcga

SEQ ID NO: 1554597 - DNA, 25 bp, Homo sapien
ttcccctcctgtagaagtgaaggcg

SEQ ID NO: 1554598 - DNA, 25 bp, Homo sapien
tgcccaaggcctaattttgagctgt

SEQ ID NO: 1554599 - DNA, 25 bp, Homo sapien
ctgttgggaggaatggaagatttcc

SEQ ID NO: 1554600 - DNA, 25 bp, Homo sapien
aaaaaccgtaggtgacagcggcagc

SEQ ID NO: 1554601 - DNA, 25 bp, Homo sapien
cagctcctcaagagacctttgcaga

SEQ ID NO: 1554602 - DNA, 25 bp, Homo sapien
ttaaaaaccgtaggtgacagcggca

SEQ ID NO: 1554603 - DNA, 25 bp, Homo sapien
atttacaaggatttgtacaaagtgc

SEQ ID NO: 1554604 - DNA, 25 bp, Homo sapien
gtaagaagtggcttagagtccagtg

SEQ ID NO: 1554605 - DNA, 25 bp, Homo sapien
gatgaggccgagttccatcctgcct

SEQ ID NO: 1554606 - DNA, 25 bp, Homo sapien
ctccgaaaggaaaaaccactgcctg

SEQ ID NO: 1554607 - DNA, 25 bp, Homo sapien
tattgaataaatttactactggagt

SEQ ID NO: 1554608 - DNA, 25 bp, Homo sapien
tgaggaacccctactaagtgcagct

SEQ ID NO: 1554609 - DNA, 25 bp, Homo sapien
gatgcctggatcaaacctacctgaa

SEQ ID NO: 1554610 - DNA, 25 bp, Homo sapien
tgtgtgaataagctccgcccttctg

SEQ ID NO: 1554611 - DNA, 25 bp, Homo sapien
ttttggccccaaaggtgctgtgtga

SEQ ID NO: 1554612 - DNA, 25 bp, Homo sapien
caaccaggagctctagttaatggag

SEQ ID NO: 1554613 - DNA, 25 bp, Homo sapien
gagttccaaccaatgggctccatcc

SEQ ID NO: 1554614 - DNA, 25 bp, Homo sapien
tcaaccagagttccaaccaatgggc

SEQ ID NO: 1554615 - DNA, 25 bp, Homo sapien
caatgaaatatctccctggcagggt

SEQ ID NO: 1554616 - DNA, 25 bp, Homo sapien
tcaggtgcctttaggacatccaggg

SEQ ID NO: 1554617 - DNA, 25 bp, Homo sapien
cagattttggggagccgtcacaagt

SEQ ID NO: 1554618 - DNA, 25 bp, Homo sapien
cacaagtgtgggtttagacacaggg

SEQ ID NO: 1554619 - DNA, 25 bp, Homo sapien
cctggttgaggtgggacaggctgct

SEQ ID NO: 1554620 - DNA, 25 bp, Homo sapien
ccattttagagctattgaccaggca

SEQ ID NO: 1554621 - DNA, 25 bp, Homo sapien
cacaaggttcccatatgaagcagaa

SEQ ID NO: 1554622 - DNA, 25 bp, Homo sapien
gcctggattggccaactgtcagcca

SEQ ID NO: 1554623 - DNA, 25 bp, Homo sapien
gacgacaaaatgatgggccttgaac

SEQ ID NO: 1554624 - DNA, 25 bp, Homo sapien
gaccaacttggggaacataggatga

SEQ ID NO: 1554625 - DNA, 25 bp, Homo sapien
caacttggggaacataggatgaacc

SEQ ID NO: 1554626 - DNA, 25 bp, Homo sapien
acttggggaacataggatgaaccta

SEQ ID NO: 1554627 - DNA, 25 bp, Homo sapien
gagaccaacttggggaacataggat

SEQ ID NO: 1554628 - DNA, 25 bp, Homo sapien
cctagaatagtaagctggccaaagc

SEQ ID NO: 1554629 - DNA, 25 bp, Homo sapien
cagggcctcgcaaatagaaagtact

SEQ ID NO: 1554630 - DNA, 25 bp, Homo sapien
ccaggacagtacttttatcagggcc

SEQ ID NO: 1554631 - DNA, 25 bp, Homo sapien
caaagctgggaggacacgattctaa

SEQ ID NO: 1554632 - DNA, 25 bp, Homo sapien
tcgccccactgcgatcagtcgcgtc

SEQ ID NO: 1554633 - DNA, 25 bp, Homo sapien
cccgcttcgccccactgcgatcagt

SEQ ID NO: 1554634 - DNA, 25 bp, Homo sapien
actgcgatcagtcgcgtcccgcagg

SEQ ID NO: 1554635 - DNA, 25 bp, Homo sapien
gtcccgcaggccaggcacgccccgc

SEQ ID NO: 1554636 - DNA, 25 bp, Homo sapien
gcagggggcatccgggagccccaag

SEQ ID NO: 1554637 - DNA, 25 bp, Homo sapien
cccggagagccccaggacggggcag

SEQ ID NO: 1554638 - DNA, 25 bp, Homo sapien
caggcctccagatcccggagagccc

SEQ ID NO: 1554639 - DNA, 25 bp, Homo sapien
ttccccgtctcagggcgagcgggcc

SEQ ID NO: 1554640 - DNA, 25 bp, Homo sapien
ctccactgtcggaacagagagctgt

SEQ ID NO: 1554641 - DNA, 25 bp, Homo sapien
gtactcagattcagctccactgtcg

SEQ ID NO: 1554642 - DNA, 25 bp, Homo sapien
cataagcagcccagcggtttttgca

SEQ ID NO: 1554643 - DNA, 25 bp, Homo sapien
ggatgccacgttctcgcacacttca

SEQ ID NO: 1554644 - DNA, 25 bp, Homo sapien
tattcccataatggccatcaggacc

SEQ ID NO: 1554645 - DNA, 25 bp, Homo sapien
cataatggccatcaggacccctaac

SEQ ID NO: 1554646 - DNA, 25 bp, Homo sapien
ccataatggccatcaggacccctaa

SEQ ID NO: 1554647 - DNA, 25 bp, Homo sapien
ctctattcccataatggccatcagg

SEQ ID NO: 1554648 - DNA, 25 bp, Homo sapien
gcaatggtgaggggtttggggaatc

SEQ ID NO: 1554649 - DNA, 25 bp, Homo sapien
gagcaatggtgaggggtttggggaa

SEQ ID NO: 1554650 - DNA, 25 bp, Homo sapien
aatggtgaggggtttggggaatcat

SEQ ID NO: 1554651 - DNA, 25 bp, Homo sapien
ctggggagcaatggtgaggggtttg

SEQ ID NO: 1554652 - DNA, 25 bp, Homo sapien
cagcatctccaagccggctgccggg

SEQ ID NO: 1554653 - DNA, 25 bp, Homo sapien
atggcctccagcgagtggctcacca

SEQ ID NO: 1554654 - DNA, 25 bp, Homo sapien
caggagccgctacctgcacagacat

SEQ ID NO: 1554655 - DNA, 25 bp, Homo sapien
agcccctggaccacttgccgcgtct

SEQ ID NO: 1554656 - DNA, 25 bp, Homo sapien
tgggtcgtactgtcgcagctgcccc

SEQ ID NO: 1554657 - DNA, 25 bp, Homo sapien
acggactcctcgctggcccgaagcc

SEQ ID NO: 1554658 - DNA, 25 bp, Homo sapien
acatgtgccgacagggccagcagca

SEQ ID NO: 1554659 - DNA, 25 bp, Homo sapien
gctctccgccggtgggtcgtactgt

SEQ ID NO: 1554660 - DNA, 25 bp, Homo sapien
gggactgtggggctctatgaagggc

SEQ ID NO: 1554661 - DNA, 25 bp, Homo sapien
gactgtggggctctatgaagggccc

SEQ ID NO: 1554662 - DNA, 25 bp, Homo sapien
actgtggggctctatgaagggccca

SEQ ID NO: 1554663 - DNA, 25 bp, Homo sapien
gtggggctctatgaagggcccagca

SEQ ID NO: 1554664 - DNA, 25 bp, Homo sapien
ctagtgggggcgtctgtggaagttc

SEQ ID NO: 1554665 - DNA, 25 bp, Homo sapien
tcgggggcttcgtggagtagctagt

SEQ ID NO: 1554666 - DNA, 25 bp, Homo sapien
cacccagcctatctcaaggtttgag

SEQ ID NO: 1554667 - DNA, 25 bp, Homo sapien
tggtggtcacgagcgtcagaggccc

SEQ ID NO: 1554668 - DNA, 25 bp, Homo sapien
agggaggccaggctgtctcggcgag

SEQ ID NO: 1554669 - DNA, 25 bp, Homo sapien
ctcctcctcgctggggaacagggag

SEQ ID NO: 1554670 - DNA, 25 bp, Homo sapien
ggccaggctgtctcggcgaggcggg

SEQ ID NO: 1554671 - DNA, 25 bp, Homo sapien
ggaggccaggctgtctcggcgaggc

SEQ ID NO: 1554672 - DNA, 25 bp, Homo sapien
tcctccaaggcctggcggcacagag

SEQ ID NO: 1554673 - DNA, 25 bp, Homo sapien
agtggcccgagctgcgctccaggtc

SEQ ID NO: 1554674 - DNA, 25 bp, Homo sapien
tgccccgcgtactggatcacgaggt

SEQ ID NO: 1554675 - DNA, 25 bp, Homo sapien
tcacgaggttatgcagggtccgaag

SEQ ID NO: 1554676 - DNA, 25 bp, Homo sapien
tctgctcccggatctgcagggcatc

SEQ ID NO: 1554677 - DNA, 25 bp, Homo sapien
tctgcagggcatcatggagaaggtc

SEQ ID NO: 1554678 - DNA, 25 bp, Homo sapien
ggtgctcagggcccagcgtctgctc

SEQ ID NO: 1554679 - DNA, 25 bp, Homo sapien
ggcttctttgtacttgttctggtcc

SEQ ID NO: 1554680 - DNA, 25 bp, Homo sapien
gtaacgcccacgcttcccatagagg

SEQ ID NO: 1554681 - DNA, 25 bp, Homo sapien
ccaagttgttgagcgtggcggccac

SEQ ID NO: 1554682 - DNA, 25 bp, Homo sapien
tcccatagaggacagccaagttgtt

SEQ ID NO: 1554683 - DNA, 25 bp, Homo sapien
tctctcggatctccaaagcgcgctg

SEQ ID NO: 1554684 - DNA, 25 bp, Homo sapien
cccgcccagtgcctcatagatgctc

SEQ ID NO: 1554685 - DNA, 25 bp, Homo sapien
agtgccgctccacgtcctcaaactt

SEQ ID NO: 1554686 - DNA, 25 bp, Homo sapien
agggcccgggcatagtgccgctcca

SEQ ID NO: 1554687 - DNA, 25 bp, Homo sapien
gccacatctgggtggtcagcaccca

SEQ ID NO: 1554688 - DNA, 25 bp, Homo sapien
actttctaatgtgctgacctggccg

SEQ ID NO: 1554689 - DNA, 25 bp, Homo sapien
cacacgcaaagtggagcgacagctc

SEQ ID NO: 1554690 - DNA, 25 bp, Homo sapien
agtgggtttggagctcggccttact

SEQ ID NO: 1554691 - DNA, 25 bp, Homo sapien
catagggacgctataagaactagcg

SEQ ID NO: 1554692 - DNA, 25 bp, Homo sapien
tgtggaggatttctttgtacagctc

SEQ ID NO: 1554693 - DNA, 25 bp, Homo sapien
tctttgtacagctcttccgcttgtt

SEQ ID NO: 1554694 - DNA, 25 bp, Homo sapien
cttgttctgtttcaggtaggctgag

SEQ ID NO: 1554695 - DNA, 25 bp, Homo sapien
caccagctgtgcctgtgttgggggc

SEQ ID NO: 1554696 - DNA, 25 bp, Homo sapien
ctgttctgcgtcaccagctgtgcct

SEQ ID NO: 1554697 - DNA, 25 bp, Homo sapien
ccagctgtgcctgtgttgggggcac

SEQ ID NO: 1554698 - DNA, 25 bp, Homo sapien
gtcaccagctgtgcctgtgttgggg

SEQ ID NO: 1554699 - DNA, 25 bp, Homo sapien
cctcgcctgatagactcacggatct

SEQ ID NO: 1554700 - DNA, 25 bp, Homo sapien
tagactcacggatcttggagagtga

SEQ ID NO: 1554701 - DNA, 25 bp, Homo sapien
acttcctcgcctgatagactcacgg

SEQ ID NO: 1554702 - DNA, 25 bp, Homo sapien
cctgatagactcacggatcttggag

SEQ ID NO: 1554703 - DNA, 25 bp, Homo sapien
aggagcccttggagcatccacgttc

SEQ ID NO: 1554704 - DNA, 25 bp, Homo sapien
ccacgttcagtgtgttgagtgacat

SEQ ID NO: 1554705 - DNA, 25 bp, Homo sapien
gtgttgagtgacatggctctcttca

SEQ ID NO: 1554706 - DNA, 25 bp, Homo sapien
ccttggagcatccacgttcagtgtg

SEQ ID NO: 1554707 - DNA, 25 bp, Homo sapien
ctatttttgacccagatgtccccct

SEQ ID NO: 1554708 - DNA, 25 bp, Homo sapien
aggtcctgggtgctggcgctgaggg

SEQ ID NO: 1554709 - DNA, 25 bp, Homo sapien
tgcggccagcgcagttcactggacg

SEQ ID NO: 1554710 - DNA, 25 bp, Homo sapien
aggcagctatccaccaggtacccag

SEQ ID NO: 1554711 - DNA, 25 bp, Homo sapien
ctgttcccaagaagctgcggccagc

SEQ ID NO: 1554712 - DNA, 25 bp, Homo sapien
ctttaatcgcaggagaaggcagcta

SEQ ID NO: 1554713 - DNA, 25 bp, Homo sapien
ccgggatgtacagcacctgcccggg

SEQ ID NO: 1554714 - DNA, 25 bp, Homo sapien
cccttgccccgggatgtacagcacc

SEQ ID NO: 1554715 - DNA, 25 bp, Homo sapien
ctcccttgccccgggatgtacagca

SEQ ID NO: 1554716 - DNA, 25 bp, Homo sapien
ttgccccgggatgtacagcacctgc

SEQ ID NO: 1554717 - DNA, 25 bp, Homo sapien
cagagcccgcgggagagctcggagc

SEQ ID NO: 1554718 - DNA, 25 bp, Homo sapien
cccgcgggagagctcggagctagag

SEQ ID NO: 1554719 - DNA, 25 bp, Homo sapien
gcccgcgggagagctcggagctaga

SEQ ID NO: 1554720 - DNA, 25 bp, Homo sapien
gagcccgcgggagagctcggagcta

SEQ ID NO: 1554721 - DNA, 25 bp, Homo sapien
aggaagtccacaggatccttagccc

SEQ ID NO: 1554722 - DNA, 25 bp, Homo sapien
cacaggatccttagccctaaagaac

SEQ ID NO: 1554723 - DNA, 25 bp, Homo sapien
ccggttcctactgaagatgactcct

SEQ ID NO: 1554724 - DNA, 25 bp, Homo sapien
ctactgaagatgactcctccaggaa

SEQ ID NO: 1554725 - DNA, 25 bp, Homo sapien
gtaagaatactagttagtagggctg

SEQ ID NO: 1554726 - DNA, 25 bp, Homo sapien
tactagttagtagggctgtgctttc

SEQ ID NO: 1554727 - DNA, 25 bp, Homo sapien
gaatactagttagtagggctgtgct

SEQ ID NO: 1554728 - DNA, 25 bp, Homo sapien
gagacaggtaagaatactagttagt

SEQ ID NO: 1554729 - DNA, 25 bp, Homo sapien
caggacggtcgattggtctgaaatt

SEQ ID NO: 1554730 - DNA, 25 bp, Homo sapien
cttaaagagacaggacggtcgattg

SEQ ID NO: 1554731 - DNA, 25 bp, Homo sapien
agacaggacggtcgattggtctgaa

SEQ ID NO: 1554732 - DNA, 25 bp, Homo sapien
aaagagacaggacggtcgattggtc

SEQ ID NO: 1554733 - DNA, 25 bp, Homo sapien
ccaggttgcagaccacgtggatcca

SEQ ID NO: 1554734 - DNA, 25 bp, Homo sapien
taggcattgctcgactcccgatctg

SEQ ID NO: 1554735 - DNA, 25 bp, Homo sapien
tgcagagcagaaaaccgaggaagaa

SEQ ID NO: 1554736 - DNA, 25 bp, Homo sapien
aaatgtattcccgaaagccgctgat

SEQ ID NO: 1554737 - DNA, 25 bp, Homo sapien
tcctgcttgcaggtacgcctccttt

SEQ ID NO: 1554738 - DNA, 25 bp, Homo sapien
gggcgacctcaatttcaccgatcca

SEQ ID NO: 1554739 - DNA, 25 bp, Homo sapien
tcgaattcccgttcgcccactggga

SEQ ID NO: 1554740 - DNA, 25 bp, Homo sapien
gaatgcacgctcttcgcaagtcctg

SEQ ID NO: 1554741 - DNA, 25 bp, Homo sapien
gaaatggggtcgactgacacctcct

SEQ ID NO: 1554742 - DNA, 25 bp, Homo sapien
tccttgccggtccaatcttgcaggg

SEQ ID NO: 1554743 - DNA, 25 bp, Homo sapien
ggtcttaacctcgtgagcactccag

SEQ ID NO: 1554744 - DNA, 25 bp, Homo sapien
tgcagggcgcgcctatcggtccatt

SEQ ID NO: 1554745 - DNA, 25 bp, Homo sapien
agctccgtatctggacccgtcagcg

SEQ ID NO: 1554746 - DNA, 25 bp, Homo sapien
taagccacagctccgtatctggacc

SEQ ID NO: 1554747 - DNA, 25 bp, Homo sapien
ctgaataagccacagctccgtatct

SEQ ID NO: 1554748 - DNA, 25 bp, Homo sapien
ctccaaggagaaacgaggggactct

SEQ ID NO: 1554749 - DNA, 25 bp, Homo sapien
tacagaacatgttccaccaagcctg

SEQ ID NO: 1554750 - DNA, 25 bp, Homo sapien
ggtcgtggataacaccaatagcccc

SEQ ID NO: 1554751 - DNA, 25 bp, Homo sapien
caagcctgcagaatgtccaaatgtc

SEQ ID NO: 1554752 - DNA, 25 bp, Homo sapien
tacaaggttcatgcttatggcctga

SEQ ID NO: 1554753 - DNA, 25 bp, Homo sapien
tgcctgccaatttgcccttgacgat

SEQ ID NO: 1554754 - DNA, 25 bp, Homo sapien
atagcggtgccgcttgcctgccaat

SEQ ID NO: 1554755 - DNA, 25 bp, Homo sapien
tcctgcctccgttgagggggccagc

SEQ ID NO: 1554756 - DNA, 25 bp, Homo sapien
ctgctgaggactcgatagcggtgcc

SEQ ID NO: 1554757 - DNA, 25 bp, Homo sapien
ccctcaaggatccttagggtgccct

SEQ ID NO: 1554758 - DNA, 25 bp, Homo sapien
tcaaggatccttagggtgccctggg

SEQ ID NO: 1554759 - DNA, 25 bp, Homo sapien
ggtgggggacttgctgggatgggct

SEQ ID NO: 1554760 - DNA, 25 bp, Homo sapien
ccctgacagggattgctggggaccc

SEQ ID NO: 1554761 - DNA, 25 bp, Homo sapien
cttggtggtggacgggaacagcact

SEQ ID NO: 1554762 - DNA, 25 bp, Homo sapien
gtggtggacgggaacagcactccca

SEQ ID NO: 1554763 - DNA, 25 bp, Homo sapien
ccaaggctgacctaggccctgtgac

SEQ ID NO: 1554764 - DNA, 25 bp, Homo sapien
cacatccatttctggcgaccccaaa

SEQ ID NO: 1554765 - DNA, 25 bp, Homo sapien
tcttctggctcgaaggtttctttcc

SEQ ID NO: 1554766 - DNA, 25 bp, Homo sapien
gctcagtgttaatctgttcctgctt

SEQ ID NO: 1554767 - DNA, 25 bp, Homo sapien
tctagaggctcagtgttaatctgtt

SEQ ID NO: 1554768 - DNA, 25 bp, Homo sapien
actgtcttgtcttctggctcgaagg

SEQ ID NO: 1554769 - DNA, 25 bp, Homo sapien
agaggcttcatctccggctccactg

SEQ ID NO: 1554770 - DNA, 25 bp, Homo sapien
ctggctccatcattgccatctgtcc

SEQ ID NO: 1554771 - DNA, 25 bp, Homo sapien
tttcctcttcttcgtagggggcaga

SEQ ID NO: 1554772 - DNA, 25 bp, Homo sapien
tggctgttgaggcgccatggtcccc

SEQ ID NO: 1554773 - DNA, 25 bp, Homo sapien
ttcttcttggtggatgtgggagctg

SEQ ID NO: 1554774 - DNA, 25 bp, Homo sapien
aggctcaaggtcatccggcagctca

SEQ ID NO: 1554775 - DNA, 25 bp, Homo sapien
ctcaaggtcatccggcagctcaggc

SEQ ID NO: 1554776 - DNA, 25 bp, Homo sapien
cttcttcttggtggatgtgggagct

SEQ ID NO: 1554777 - DNA, 25 bp, Homo sapien
ggatcccggagttgccctggcttca

SEQ ID NO: 1554778 - DNA, 25 bp, Homo sapien
cccctggcagttcaggctctagtgg

SEQ ID NO: 1554779 - DNA, 25 bp, Homo sapien
cttggtggatcccggagttgccctg

SEQ ID NO: 1554780 - DNA, 25 bp, Homo sapien
ctcccctggcagttcaggctctagt

SEQ ID NO: 1554781 - DNA, 25 bp, Homo sapien
tgctgcttccgcttcttgtcccggc

SEQ ID NO: 1554782 - DNA, 25 bp, Homo sapien
tctgaattcagtggcggccctggca

SEQ ID NO: 1554783 - DNA, 25 bp, Homo sapien
ggcactgtctctggcatccggcttt

SEQ ID NO: 1554784 - DNA, 25 bp, Homo sapien
ttgtcccggcctgtgggagcctcct

SEQ ID NO: 1554785 - DNA, 25 bp, Homo sapien
gtaataataaatcgtcctcccaggc

SEQ ID NO: 1554786 - DNA, 25 bp, Homo sapien
attctgggggtgtcaccttctggtg

SEQ ID NO: 1554787 - DNA, 25 bp, Homo sapien
ctgatgaccccagctgccaaggaaa

SEQ ID NO: 1554788 - DNA, 25 bp, Homo sapien
ctgccaaggaaacccccagtgtaat

SEQ ID NO: 1554789 - DNA, 25 bp, Homo sapien
ctcatggagataagagtggatggat

SEQ ID NO: 1554790 - DNA, 25 bp, Homo sapien
tgcacgagcccttcttgaaagtacc

SEQ ID NO: 1554791 - DNA, 25 bp, Homo sapien
ccactctagatttacccaggaaaca

SEQ ID NO: 1554792 - DNA, 25 bp, Homo sapien
tgtttgatgtcctgcacgagccctt

SEQ ID NO: 1554793 - DNA, 25 bp, Homo sapien
ctgtgcccggttggaagctgaacat

SEQ ID NO: 1554794 - DNA, 25 bp, Homo sapien
cccggttggaagctgaacatttcat

SEQ ID NO: 1554795 - DNA, 25 bp, Homo sapien
aagctgaacatttcatgaggttggc

SEQ ID NO: 1554796 - DNA, 25 bp, Homo sapien
gctgcagcgggaaaataagcagtgt

SEQ ID NO: 1554797 - DNA, 25 bp, Homo sapien
gcctccgcttggggccgggtgagtc

SEQ ID NO: 1554798 - DNA, 25 bp, Homo sapien
tccgcttggggccgggtgagtcagc

SEQ ID NO: 1554799 - DNA, 25 bp, Homo sapien
ccgcttggggccgggtgagtcagcc

SEQ ID NO: 1554800 - DNA, 25 bp, Homo sapien
gcttggggccgggtgagtcagcccc

SEQ ID NO: 1554801 - DNA, 25 bp, Homo sapien
cctcccatccactcgtcctctcctt

SEQ ID NO: 1554802 - DNA, 25 bp, Homo sapien
catccactcgtcctctccttcaaag

SEQ ID NO: 1554803 - DNA, 25 bp, Homo sapien
tcccatccactcgtcctctccttca

SEQ ID NO: 1554804 - DNA, 25 bp, Homo sapien
cactcgtcctctccttcaaagttaa

SEQ ID NO: 1554805 - DNA, 25 bp, Homo sapien
tcaggacgacaggagattggcgatg

SEQ ID NO: 1554806 - DNA, 25 bp, Homo sapien
tgggggatgcggatgagtaccagtg

SEQ ID NO: 1554807 - DNA, 25 bp, Homo sapien
cgacaggagattggcgatgagggtg

SEQ ID NO: 1554808 - DNA, 25 bp, Homo sapien
gacgacaggagattggcgatgaggg

SEQ ID NO: 1554809 - DNA, 25 bp, Homo sapien
cagaggccaggttctcatggtacat

SEQ ID NO: 1554810 - DNA, 25 bp, Homo sapien
ctcatggtacataataggtgaggtc

SEQ ID NO: 1554811 - DNA, 25 bp, Homo sapien
ggttctcatggtacataataggtga

SEQ ID NO: 1554812 - DNA, 25 bp, Homo sapien
ggccaggttctcatggtacataata

SEQ ID NO: 1554813 - DNA, 25 bp, Homo sapien
cagatacacaagtgcaaaccacaga

SEQ ID NO: 1554814 - DNA, 25 bp, Homo sapien
tcccatacacccagatacacaagtg

SEQ ID NO: 1554815 - DNA, 25 bp, Homo sapien
attcatatctacacagtcagcaggg

SEQ ID NO: 1554816 - DNA, 25 bp, Homo sapien
catgcaagactcacaactgcacaca

SEQ ID NO: 1554817 - DNA, 25 bp, Homo sapien
ggtggctgaattccgcctgtgattc

SEQ ID NO: 1554818 - DNA, 25 bp, Homo sapien
gtttctcccagggtgactcaggctc

SEQ ID NO: 1554819 - DNA, 25 bp, Homo sapien
gatgtcagcggccaggtatgtggct

SEQ ID NO: 1554820 - DNA, 25 bp, Homo sapien
gattcagtcagcttgtctaggctgc

SEQ ID NO: 1554821 - DNA, 25 bp, Homo sapien
gagtgggtaaatcaagttcttctcc

SEQ ID NO: 1554822 - DNA, 25 bp, Homo sapien
aatcaagttcttctccataaggctc

SEQ ID NO: 1554823 - DNA, 25 bp, Homo sapien
cctgcagagcatggagtgggtaaat

SEQ ID NO: 1554824 - DNA, 25 bp, Homo sapien
agcatggagtgggtaaatcaagttc

SEQ ID NO: 1554825 - DNA, 25 bp, Homo sapien
tgcctgcactgacttgggtatttca

SEQ ID NO: 1554826 - DNA, 25 bp, Homo sapien
tgtctccgggctacacagcaagcct

SEQ ID NO: 1554827 - DNA, 25 bp, Homo sapien
cagctatttcacaaacctcagagaa

SEQ ID NO: 1554828 - DNA, 25 bp, Homo sapien
tggcagagccaaggcgatggttctt

SEQ ID NO: 1554829 - DNA, 25 bp, Homo sapien
gaatcagcttcagctacggtctcct

SEQ ID NO: 1554830 - DNA, 25 bp, Homo sapien
gggcagaaagcgctgtcccgctgta

SEQ ID NO: 1554831 - DNA, 25 bp, Homo sapien
gatgccgctgtacctcttgaaagtg

SEQ ID NO: 1554832 - DNA, 25 bp, Homo sapien
ccaagtcttggttccgcgtgtccct

SEQ ID NO: 1554833 - DNA, 25 bp, Homo sapien
gaaggagcaacgtcccgttccaaca

SEQ ID NO: 1554834 - DNA, 25 bp, Homo sapien
cgtcccgttccaacaatggcaaagt

SEQ ID NO: 1554835 - DNA, 25 bp, Homo sapien
gcaacgtcccgttccaacaatggca

SEQ ID NO: 1554836 - DNA, 25 bp, Homo sapien
caacgtcccgttccaacaatggcaa

SEQ ID NO: 1554837 - DNA, 25 bp, Homo sapien
taaggtgcaagtccggggtgagccg

SEQ ID NO: 1554838 - DNA, 25 bp, Homo sapien
gtaaggtgcaagtccggggtgagcc

SEQ ID NO: 1554839 - DNA, 25 bp, Homo sapien
caagtccggggtgagccgtgggagt

SEQ ID NO: 1554840 - DNA, 25 bp, Homo sapien
gtgcaagtccggggtgagccgtggg

SEQ ID NO: 1554841 - DNA, 25 bp, Homo sapien
tgtgaccacgctgaggtcgccggga

SEQ ID NO: 1554842 - DNA, 25 bp, Homo sapien
tgaccacgctgaggtcgccgggaag

SEQ ID NO: 1554843 - DNA, 25 bp, Homo sapien
gtgaccacgctgaggtcgccgggaa

SEQ ID NO: 1554844 - DNA, 25 bp, Homo sapien
tccaccgaagacagatattgagact

SEQ ID NO: 1554845 - DNA, 25 bp, Homo sapien
tggactgccgaaggagtccaccgaa

SEQ ID NO: 1554846 - DNA, 25 bp, Homo sapien
cagatattgagactcggcagagggt

SEQ ID NO: 1554847 - DNA, 25 bp, Homo sapien
caccgggagccggagtcgtagtctc

SEQ ID NO: 1554848 - DNA, 25 bp, Homo sapien
taggaagggaaagctgattggccaa

SEQ ID NO: 1554849 - DNA, 25 bp, Homo sapien
catacacgttgcattgagcagcgca

SEQ ID NO: 1554850 - DNA, 25 bp, Homo sapien
cagtttgcaaagtgcgctgtgagcc

SEQ ID NO: 1554851 - DNA, 25 bp, Homo sapien
cgtcagacggaggattccagcgcgt

SEQ ID NO: 1554852 - DNA, 25 bp, Homo sapien
cattgggtcgcagacaggcgctctt

SEQ ID NO: 1554853 - DNA, 25 bp, Homo sapien
caagggcctcgcagatccattgggt

SEQ ID NO: 1554854 - DNA, 25 bp, Homo sapien
tagtcctgtcttgggacacaccgga

SEQ ID NO: 1554855 - DNA, 25 bp, Homo sapien
tggctcgccgaccaatcagagtcct

SEQ ID NO: 1554856 - DNA, 25 bp, Homo sapien
tagggtgaacggacaggtagataaa

SEQ ID NO: 1554857 - DNA, 25 bp, Homo sapien
agctctctcagattgtcgcggaggg

SEQ ID NO: 1554858 - DNA, 25 bp, Homo sapien
tctcagagtgagactgacgagtgac

SEQ ID NO: 1554859 - DNA, 25 bp, Homo sapien
tcccgtaaatggactcctggaactg

SEQ ID NO: 1554860 - DNA, 25 bp, Homo sapien
caccgtgacgcagtggttaatgaga

SEQ ID NO: 1554861 - DNA, 25 bp, Homo sapien
gatttctgctcaactggcttctacc

SEQ ID NO: 1554862 - DNA, 25 bp, Homo sapien
ggttccagcgggtggtgaatcacac

SEQ ID NO: 1554863 - DNA, 25 bp, Homo sapien
cacaccccgggttggtgactcttag

SEQ ID NO: 1554864 - DNA, 25 bp, Homo sapien
caagccactggaggtcctggctggt

SEQ ID NO: 1554865 - DNA, 25 bp, Homo sapien
tgggcacgaaggaaccgggcatttc

SEQ ID NO: 1554866 - DNA, 25 bp, Homo sapien
tagctggttcccggcatgtcgtagg

SEQ ID NO: 1554867 - DNA, 25 bp, Homo sapien
tgtagccactcatgcctggtgtgga

SEQ ID NO: 1554868 - DNA, 25 bp, Homo sapien
caggcccactggtagttccgctggt

SEQ ID NO: 1554869 - DNA, 25 bp, Homo sapien
ctcggggtctcctaggccgggctcg

SEQ ID NO: 1554870 - DNA, 25 bp, Homo sapien
ggcccactggtagttccgctggtgg

SEQ ID NO: 1554871 - DNA, 25 bp, Homo sapien
ctctcggggtctcctaggccgggct

SEQ ID NO: 1554872 - DNA, 25 bp, Homo sapien
tagctgctgctagtttatttcgttc

SEQ ID NO: 1554873 - DNA, 25 bp, Homo sapien
tggagtcggtcggtcagctccctcc

SEQ ID NO: 1554874 - DNA, 25 bp, Homo sapien
cggcgcacccttcgcttctcctctt

SEQ ID NO: 1554875 - DNA, 25 bp, Homo sapien
tccctccgccggttcctgcatttag

SEQ ID NO: 1554876 - DNA, 25 bp, Homo sapien
aaatgaaggctaggagagtagtccg

SEQ ID NO: 1554877 - DNA, 25 bp, Homo sapien
gaactctcagaccaagggaggacgt

SEQ ID NO: 1554878 - DNA, 25 bp, Homo sapien
caggcatacagcagggaactctcag

SEQ ID NO: 1554879 - DNA, 25 bp, Homo sapien
tctagttctcaacccaggataaggg

SEQ ID NO: 1554880 - DNA, 25 bp, Homo sapien
gccaccagcacaaactccagacgtt

SEQ ID NO: 1554881 - DNA, 25 bp, Homo sapien
gcccctcttcgtaggggatcttgca

SEQ ID NO: 1554882 - DNA, 25 bp, Homo sapien
tgcagcccggtttgtgggccaccag

SEQ ID NO: 1554883 - DNA, 25 bp, Homo sapien
agcacaaactccagacgttccttct

SEQ ID NO: 1554884 - DNA, 25 bp, Homo sapien
cgtcttggctggtctggaagggcag

SEQ ID NO: 1554885 - DNA, 25 bp, Homo sapien
cttccttagccggtgctgagcccgg

SEQ ID NO: 1554886 - DNA, 25 bp, Homo sapien
ccatcttccttagccggtgctgagc

SEQ ID NO: 1554887 - DNA, 25 bp, Homo sapien
ggtgcgtcttggctggtctggaagg

SEQ ID NO: 1554888 - DNA, 25 bp, Homo sapien
ttgggcgccggcgaacgcggagacc

SEQ ID NO: 1554889 - DNA, 25 bp, Homo sapien
agacctccgggcaggtgaggacaaa

SEQ ID NO: 1554890 - DNA, 25 bp, Homo sapien
tcactgccgctggtgcgttgggcgc

SEQ ID NO: 1554891 - DNA, 25 bp, Homo sapien
gaggacaaacgaagaagtgtacgaa

SEQ ID NO: 1554892 - DNA, 25 bp, Homo sapien
ttctgcccagagtaaagaggatctc

SEQ ID NO: 1554893 - DNA, 25 bp, Homo sapien
aattcaacggctcgctttgagggcc

SEQ ID NO: 1554894 - DNA, 25 bp, Homo sapien
ttttcatgcagcacggatggagggc

SEQ ID NO: 1554895 - DNA, 25 bp, Homo sapien
tcaataagctaaggtcgggagtgca

SEQ ID NO: 1554896 - DNA, 25 bp, Homo sapien
aagagctttttattggcaacagtgc

SEQ ID NO: 1554897 - DNA, 25 bp, Homo sapien
tattggcaacagtgcagaaccaagg

SEQ ID NO: 1554898 - DNA, 25 bp, Homo sapien
ggcaacagtgcagaaccaaggggag

SEQ ID NO: 1554899 - DNA, 25 bp, Homo sapien
ttttattggcaacagtgcagaacca

SEQ ID NO: 1554900 - DNA, 25 bp, Homo sapien
tgcgcccagctgtagccacttactt

SEQ ID NO: 1554901 - DNA, 25 bp, Homo sapien
gtatagtttatctccttagcgtctg

SEQ ID NO: 1554902 - DNA, 25 bp, Homo sapien
gctccatcactaggacacctctgtg

SEQ ID NO: 1554903 - DNA, 25 bp, Homo sapien
gatgacgcctcattcctagcctgag

SEQ ID NO: 1554904 - DNA, 25 bp, Homo sapien
tatgcatgtagaaatcggcacctgt

SEQ ID NO: 1554905 - DNA, 25 bp, Homo sapien
tgtttaaactcaatcgggacaggat

SEQ ID NO: 1554906 - DNA, 25 bp, Homo sapien
tgtcgtcaccagcaccgagacagtt

SEQ ID NO: 1554907 - DNA, 25 bp, Homo sapien
acgtttgaatgaacgcggagctcca

SEQ ID NO: 1554908 - DNA, 25 bp, Homo sapien
ggtggggaaatgtctagcagggtaa

SEQ ID NO: 1554909 - DNA, 25 bp, Homo sapien
acatctgctatgttctcaagcactt

SEQ ID NO: 1554910 - DNA, 25 bp, Homo sapien
tctcaagcactttttaggcactaga

SEQ ID NO: 1554911 - DNA, 25 bp, Homo sapien
aagtgcatagtttcatggtgctgat

SEQ ID NO: 1554912 - DNA, 25 bp, Homo sapien
cctactaaaaataccggatgtggtg

SEQ ID NO: 1554913 - DNA, 25 bp, Homo sapien
gtgggcacctgtaagaccagctaca

SEQ ID NO: 1554914 - DNA, 25 bp, Homo sapien
acctgtaagaccagctacacgggag

SEQ ID NO: 1554915 - DNA, 25 bp, Homo sapien
ggcacctgtaagaccagctacacgg

SEQ ID NO: 1554916 - DNA, 25 bp, Homo sapien
gacggaacgtttgtcccaccagatc

SEQ ID NO: 1554917 - DNA, 25 bp, Homo sapien
tagaagacctcgtggattccctcaa

SEQ ID NO: 1554918 - DNA, 25 bp, Homo sapien
tgactcgggagcagacggaacgttt

SEQ ID NO: 1554919 - DNA, 25 bp, Homo sapien
agctgcggcacttcttcctggtaga

SEQ ID NO: 1554920 - DNA, 25 bp, Homo sapien
tctgccgtggctcgttcaccatcct

SEQ ID NO: 1554921 - DNA, 25 bp, Homo sapien
tcttgcaagcggtccagaggagacg

SEQ ID NO: 1554922 - DNA, 25 bp, Homo sapien
tcctttgacctgctctttaggcggg

SEQ ID NO: 1554923 - DNA, 25 bp, Homo sapien
ggcgggtcactagaaggaattacac

SEQ ID NO: 1554924 - DNA, 25 bp, Homo sapien
ctgtttcctgcacctacaaagcggg

SEQ ID NO: 1554925 - DNA, 25 bp, Homo sapien
gctgtcaacagagaccgaggccctt

SEQ ID NO: 1554926 - DNA, 25 bp, Homo sapien
tcaacagagaccgaggcccttcggg

SEQ ID NO: 1554927 - DNA, 25 bp, Homo sapien
cggcgctgtcaacagagaccgaggc

SEQ ID NO: 1554928 - DNA, 25 bp, Homo sapien
cggcgcggcgctgtcaacagagacc

SEQ ID NO: 1554929 - DNA, 25 bp, Homo sapien
ccaggtaacgaaagccaagtgcagt

SEQ ID NO: 1554930 - DNA, 25 bp, Homo sapien
agtgcgccaggtacagaaaccgcgg

SEQ ID NO: 1554931 - DNA, 25 bp, Homo sapien
ttgtaggtaaagtcgcccaacgctc

SEQ ID NO: 1554932 - DNA, 25 bp, Homo sapien
catggcctggcaaatggcgtgcacc

SEQ ID NO: 1554933 - DNA, 25 bp, Homo sapien
tgagtcctatcccctcctttgctag

SEQ ID NO: 1554934 - DNA, 25 bp, Homo sapien
tctgctgcaccaagccccaaaggta

SEQ ID NO: 1554935 - DNA, 25 bp, Homo sapien
ttactcttgcctctctatcaaagcc

SEQ ID NO: 1554936 - DNA, 25 bp, Homo sapien
ttcaggccacgcccttcgcttgagt

SEQ ID NO: 1554937 - DNA, 25 bp, Homo sapien
cgtgcctcaaagcatccctcaggct

SEQ ID NO: 1554938 - DNA, 25 bp, Homo sapien
agtcccttccactaactctcccgtg

SEQ ID NO: 1554939 - DNA, 25 bp, Homo sapien
ttccaccttccagcactaatcaata

SEQ ID NO: 1554940 - DNA, 25 bp, Homo sapien
ctcctacgacccagaatcgcccctt

SEQ ID NO: 1554941 - DNA, 25 bp, Homo sapien
cacttcattctacttatgcccattt

SEQ ID NO: 1554942 - DNA, 25 bp, Homo sapien
caatcctctcttactgggaccaaac

SEQ ID NO: 1554943 - DNA, 25 bp, Homo sapien
tgagagaacaatgccttttccctaa

SEQ ID NO: 1554944 - DNA, 25 bp, Homo sapien
cggtcctaggcgctcccaattgaga

SEQ ID NO: 1554945 - DNA, 25 bp, Homo sapien
ggaagcagaccaggatgcaggtcat

SEQ ID NO: 1554946 - DNA, 25 bp, Homo sapien
cctgatcgcctcctcagaaggccta

SEQ ID NO: 1554947 - DNA, 25 bp, Homo sapien
cccagggaagcagaccaggatgcag

SEQ ID NO: 1554948 - DNA, 25 bp, Homo sapien
gggctgcgtccagtgctagctccct

SEQ ID NO: 1554949 - DNA, 25 bp, Homo sapien
ccccaggaggtaaatctgggatgtc

SEQ ID NO: 1554950 - DNA, 25 bp, Homo sapien
ctgagaataaacttcagcaatgaca

SEQ ID NO: 1554951 - DNA, 25 bp, Homo sapien
gaataaacttcagcaatgacagtgg

SEQ ID NO: 1554952 - DNA, 25 bp, Homo sapien
gagaataaacttcagcaatgacagt

SEQ ID NO: 1554953 - DNA, 25 bp, Homo sapien
ataaacttcagcaatgacagtggcc

SEQ ID NO: 1554954 - DNA, 25 bp, Homo sapien
tccgcactcttctgagacctggcag

SEQ ID NO: 1554955 - DNA, 25 bp, Homo sapien
ctctccgcactcttctgagacctgg

SEQ ID NO: 1554956 - DNA, 25 bp, Homo sapien
tctccgcactcttctgagacctggc

SEQ ID NO: 1554957 - DNA, 25 bp, Homo sapien
cgcactcttctgagacctggcagat

SEQ ID NO: 1554958 - DNA, 25 bp, Homo sapien
tctgacaactagatgcagccatgcc

SEQ ID NO: 1554959 - DNA, 25 bp, Homo sapien
gagaccctgaaaggtaatgaagcca

SEQ ID NO: 1554960 - DNA, 25 bp, Homo sapien
tccgctaccttaggaggagaccctg

SEQ ID NO: 1554961 - DNA, 25 bp, Homo sapien
tcagcatgtgacctggtgtggccaa

SEQ ID NO: 1554962 - DNA, 25 bp, Homo sapien
tgtaacacaaaatgtgggagaaggt

SEQ ID NO: 1554963 - DNA, 25 bp, Homo sapien
aaggtaatgagaaattctgtcttgt

SEQ ID NO: 1554964 - DNA, 25 bp, Homo sapien
caaaatgtgggagaaggtaatgaga

SEQ ID NO: 1554965 - DNA, 25 bp, Homo sapien
cacaaaatgtgggagaaggtaatga

SEQ ID NO: 1554966 - DNA, 25 bp, Homo sapien
aggcctccatgtccaaggctgagcc

SEQ ID NO: 1554967 - DNA, 25 bp, Homo sapien
gcccaaatgcgtggggttggacttc

SEQ ID NO: 1554968 - DNA, 25 bp, Homo sapien
tcaggcctccatgtccaaggctgag

SEQ ID NO: 1554969 - DNA, 25 bp, Homo sapien
ggctgagcccaaatgcgtggggttg

SEQ ID NO: 1554970 - DNA, 25 bp, Homo sapien
ggttattggactgggttatctctca

SEQ ID NO: 1554971 - DNA, 25 bp, Homo sapien
tccttccttccgctggtacatgtag

SEQ ID NO: 1554972 - DNA, 25 bp, Homo sapien
tctgttcggctctgaatatttcaaa

SEQ ID NO: 1554973 - DNA, 25 bp, Homo sapien
tctacttcccctcaaaaacagatga

SEQ ID NO: 1554974 - DNA, 25 bp, Homo sapien
aacccgaagtagctcccctagtcat

SEQ ID NO: 1554975 - DNA, 25 bp, Homo sapien
cacttgtcagtgtgcaagatgactt

SEQ ID NO: 1554976 - DNA, 25 bp, Homo sapien
aaattacagattgcatcttgctatg

SEQ ID NO: 1554977 - DNA, 25 bp, Homo sapien
taattacagactgggcgggagaatg

SEQ ID NO: 1554978 - DNA, 25 bp, Homo sapien
tcggcttccgcgatctcgctcctct

SEQ ID NO: 1554979 - DNA, 25 bp, Homo sapien
cccaggggtgcaccctgggaatcac

SEQ ID NO: 1554980 - DNA, 25 bp, Homo sapien
aatgttgtagcccaggggtgcaccc

SEQ ID NO: 1554981 - DNA, 25 bp, Homo sapien
gctcctctccccaatgttgtagccc

SEQ ID NO: 1554982 - DNA, 25 bp, Homo sapien
gccgcttccctcaggcggtctgatg

SEQ ID NO: 1554983 - DNA, 25 bp, Homo sapien
ccggtggcggctacagtgttactct

SEQ ID NO: 1554984 - DNA, 25 bp, Homo sapien
gccccatagagtccggcttcctggg

SEQ ID NO: 1554985 - DNA, 25 bp, Homo sapien
gtctgatgagaggttcctgcagcag

SEQ ID NO: 1554986 - DNA, 25 bp, Homo sapien
ggctcgcccacgggctggctgctcc

SEQ ID NO: 1554987 - DNA, 25 bp, Homo sapien
gcgggcggctcgcccacgggctggc

SEQ ID NO: 1554988 - DNA, 25 bp, Homo sapien
gcggctcgcccacgggctggctgct

SEQ ID NO: 1554989 - DNA, 25 bp, Homo sapien
gggcggctcgcccacgggctggctg

SEQ ID NO: 1554990 - DNA, 25 bp, Homo sapien
ctctcttccaagtcccagggtatcc

SEQ ID NO: 1554991 - DNA, 25 bp, Homo sapien
cccgaagttatggagcgcggtccca

SEQ ID NO: 1554992 - DNA, 25 bp, Homo sapien
cacttggggagactttttccagcac

SEQ ID NO: 1554993 - DNA, 25 bp, Homo sapien
tccttcccggacctcgagctgaagt

SEQ ID NO: 1554994 - DNA, 25 bp, Homo sapien
gtccaggtccctggatcggttcaca

SEQ ID NO: 1554995 - DNA, 25 bp, Homo sapien
gactctggaggctgcgtccaggtcc

SEQ ID NO: 1554996 - DNA, 25 bp, Homo sapien
agactctggaggctgcgtccaggtc

SEQ ID NO: 1554997 - DNA, 25 bp, Homo sapien
aggtccctggatcggttcacaccag

SEQ ID NO: 1554998 - DNA, 25 bp, Homo sapien
cccacataaaatagatgcttgatca

SEQ ID NO: 1554999 - DNA, 25 bp, Homo sapien
tgctgtcaggcacaaaaatgcccca

SEQ ID NO: 1555000 - DNA, 25 bp, Homo sapien
cccttctgccctgagattctagacc

SEQ ID NO: 1555001 - DNA, 25 bp, Homo sapien
cagaattgctgtcaggcacaaaaat

SEQ ID NO: 1555002 - DNA, 25 bp, Homo sapien
gtttgagtttaataggcaccttgcc

SEQ ID NO: 1555003 - DNA, 25 bp, Homo sapien
gaggccacaaggttgtaatagtatc

SEQ ID NO: 1555004 - DNA, 25 bp, Homo sapien
tagtatcattgttcgaactgccatg

SEQ ID NO: 1555005 - DNA, 25 bp, Homo sapien
catctataaactgagtaccggggtg

SEQ ID NO: 1555006 - DNA, 25 bp, Homo sapien
ccagtgtgttttcccgaagtctaga

SEQ ID NO: 1555007 - DNA, 25 bp, Homo sapien
tccattggacatgagaacactttaa

SEQ ID NO: 1555008 - DNA, 25 bp, Homo sapien
cgaaaatcccatagccataaaacgg

SEQ ID NO: 1555009 - DNA, 25 bp, Homo sapien
gatggaaaggagttctgcccatttc

SEQ ID NO: 1555010 - DNA, 25 bp, Homo sapien
aacaaaaaaggtaggctaggcgcag

SEQ ID NO: 1555011 - DNA, 25 bp, Homo sapien
acaaaaaaggtaggctaggcgcagt

SEQ ID NO: 1555012 - DNA, 25 bp, Homo sapien
caagcctgtaatcccagcactttgg

SEQ ID NO: 1555013 - DNA, 25 bp, Homo sapien
ggctcaagcctgtaatcccagcact

SEQ ID NO: 1555014 - DNA, 25 bp, Homo sapien
ctgtcacccgggctgtcctcggctc

SEQ ID NO: 1555015 - DNA, 25 bp, Homo sapien
tgtcacccgggctgtcctcggctca

SEQ ID NO: 1555016 - DNA, 25 bp, Homo sapien
agccacgtggacagaaggagacggg

SEQ ID NO: 1555017 - DNA, 25 bp, Homo sapien
caggagccacgtggacagaaggaga

SEQ ID NO: 1555018 - DNA, 25 bp, Homo sapien
acacacaaacgagatgcaagagaca

SEQ ID NO: 1555019 - DNA, 25 bp, Homo sapien
agggagagtcgggttgacaaagagg

SEQ ID NO: 1555020 - DNA, 25 bp, Homo sapien
gggacccgtgccagcagggagccat

SEQ ID NO: 1555021 - DNA, 25 bp, Homo sapien
cgcttgttgccatcatcataaagca

SEQ ID NO: 1555022 - DNA, 25 bp, Homo sapien
agtggcccggctggaacagatgacc

SEQ ID NO: 1555023 - DNA, 25 bp, Homo sapien
tggcccggctggaacagatgaccgt

SEQ ID NO: 1555024 - DNA, 25 bp, Homo sapien
ccacgacgcgaaaggaattggccgt

SEQ ID NO: 1555025 - DNA, 25 bp, Homo sapien
ggttgtggtagatctggacgcggct

SEQ ID NO: 1555026 - DNA, 25 bp, Homo sapien
atcttccggcccacgacgcgaaagg

SEQ ID NO: 1555027 - DNA, 25 bp, Homo sapien
tggtcgggctgcatcttccggccca

SEQ ID NO: 1555028 - DNA, 25 bp, Homo sapien
tgacaccccggacgatggcacagtt

SEQ ID NO: 1555029 - DNA, 25 bp, Homo sapien
cccggacgatggcacagttgatgac

SEQ ID NO: 1555030 - DNA, 25 bp, Homo sapien
ctggttatacttgacaccccggacg

SEQ ID NO: 1555031 - DNA, 25 bp, Homo sapien
ttatacttgacaccccggacgatgg

SEQ ID NO: 1555032 - DNA, 25 bp, Homo sapien
cctggcgagcgtcgcgccactgatg

SEQ ID NO: 1555033 - DNA, 25 bp, Homo sapien
tccttgctgccgaagttgaggcccc

SEQ ID NO: 1555034 - DNA, 25 bp, Homo sapien
cgcatcctccttgctgccgaagttg

SEQ ID NO: 1555035 - DNA, 25 bp, Homo sapien
ctctagggcactggccatgccggcg

SEQ ID NO: 1555036 - DNA, 25 bp, Homo sapien
cccctttgcccgccgccatttctga

SEQ ID NO: 1555037 - DNA, 25 bp, Homo sapien
tcccctttgcccgccgccatttctg

SEQ ID NO: 1555038 - DNA, 25 bp, Homo sapien
ccctttgcccgccgccatttctgac

SEQ ID NO: 1555039 - DNA, 25 bp, Homo sapien
ggaccgaccaggtgggaagtgctgg

SEQ ID NO: 1555040 - DNA, 25 bp, Homo sapien
cgggaccgaccaggtgggaagtgct

SEQ ID NO: 1555041 - DNA, 25 bp, Homo sapien
gggaccgaccaggtgggaagtgctg

SEQ ID NO: 1555042 - DNA, 25 bp, Homo sapien
caagttggctgggttctgaactcta

SEQ ID NO: 1555043 - DNA, 25 bp, Homo sapien
aaactgcaagttggctgggttctga

SEQ ID NO: 1555044 - DNA, 25 bp, Homo sapien
tctaggagtcaagggttccagaaca

SEQ ID NO: 1555045 - DNA, 25 bp, Homo sapien
ggaggttctgcaactctgagtgtca

SEQ ID NO: 1555046 - DNA, 25 bp, Homo sapien
ggagacccggcgctctatgtgctcc

SEQ ID NO: 1555047 - DNA, 25 bp, Homo sapien
ctgcattggagacccggcgctctat

SEQ ID NO: 1555048 - DNA, 25 bp, Homo sapien
ggcgctctatgtgctccgacgggcc

SEQ ID NO: 1555049 - DNA, 25 bp, Homo sapien
tctatgtgctccgacgggccgggct

SEQ ID NO: 1555050 - DNA, 25 bp, Homo sapien
cctggaggagggggaggtcctggtg

SEQ ID NO: 1555051 - DNA, 25 bp, Homo sapien
cccagcggggggagcaggtgggcct

SEQ ID NO: 1555052 - DNA, 25 bp, Homo sapien
ctggaggagggggaggtcctggtgg

SEQ ID NO: 1555053 - DNA, 25 bp, Homo sapien
ccagcggggggagcaggtgggcctc

SEQ ID NO: 1555054 - DNA, 25 bp, Homo sapien
cctgctccgtgcgctgcagctggga

SEQ ID NO: 1555055 - DNA, 25 bp, Homo sapien
gctccgtgcgctgcagctgggaccc

SEQ ID NO: 1555056 - DNA, 25 bp, Homo sapien
tgctccgtgcgctgcagctgggacc

SEQ ID NO: 1555057 - DNA, 25 bp, Homo sapien
ctgctccgtgcgctgcagctgggac

SEQ ID NO: 1555058 - DNA, 25 bp, Homo sapien
ccagctcccccaccaccagggccct

SEQ ID NO: 1555059 - DNA, 25 bp, Homo sapien
gccccagctcccccaccaccagggc

SEQ ID NO: 1555060 - DNA, 25 bp, Homo sapien
gctcccccaccaccagggccctgtg

SEQ ID NO: 1555061 - DNA, 25 bp, Homo sapien
tggggccccagctcccccaccacca

SEQ ID NO: 1555062 - DNA, 25 bp, Homo sapien
accactctcagctttgggggctgtg

SEQ ID NO: 1555063 - DNA, 25 bp, Homo sapien
acctccgcttcgaccactctcagct

SEQ ID NO: 1555064 - DNA, 25 bp, Homo sapien
tccgggccagcatggcgttcatctc

SEQ ID NO: 1555065 - DNA, 25 bp, Homo sapien
gccagcatggcgttcatctcttcca

SEQ ID NO: 1555066 - DNA, 25 bp, Homo sapien
ggcagattcatccttgggggttttc

SEQ ID NO: 1555067 - DNA, 25 bp, Homo sapien
gcagattcatccttgggggttttct

SEQ ID NO: 1555068 - DNA, 25 bp, Homo sapien
ttctccccaacttgcgtggctttcc

SEQ ID NO: 1555069 - DNA, 25 bp, Homo sapien
ctccccaacttgcgtggctttcctt

SEQ ID NO: 1555070 - DNA, 25 bp, Homo sapien
actatccctaccctcatggtacggc

SEQ ID NO: 1555071 - DNA, 25 bp, Homo sapien
tcatggtacggcctaagagatgtag

SEQ ID NO: 1555072 - DNA, 25 bp, Homo sapien
tacggcctaagagatgtagggcaag

SEQ ID NO: 1555073 - DNA, 25 bp, Homo sapien
cctaccctcatggtacggcctaaga

SEQ ID NO: 1555074 - DNA, 25 bp, Homo sapien
ctgggccgggactctggcctctggc

SEQ ID NO: 1555075 - DNA, 25 bp, Homo sapien
tgggccgggactctggcctctggct

SEQ ID NO: 1555076 - DNA, 25 bp, Homo sapien
cctgactctcctataagggtgctta

SEQ ID NO: 1555077 - DNA, 25 bp, Homo sapien
tgatcaaagccccatctcaggagac

SEQ ID NO: 1555078 - DNA, 25 bp, Homo sapien
ggagactacaatccccagcaccatt

SEQ ID NO: 1555079 - DNA, 25 bp, Homo sapien
aaagatcagggacaaaagactgccc

SEQ ID NO: 1555080 - DNA, 25 bp, Homo sapien
cttggcaaggttgtgctgttcttct

SEQ ID NO: 1555081 - DNA, 25 bp, Homo sapien
ttggcaaggttgtgctgttcttctc

SEQ ID NO: 1555082 - DNA, 25 bp, Homo sapien
tgatggctcgctgaggcctcaactt

SEQ ID NO: 1555083 - DNA, 25 bp, Homo sapien
atgatggctcgctgaggcctcaact

SEQ ID NO: 1555084 - DNA, 25 bp, Homo sapien
gatgatggctcgctgaggcctcaac

SEQ ID NO: 1555085 - DNA, 25 bp, Homo sapien
gcctcctattccaggggtcacattg

SEQ ID NO: 1555086 - DNA, 25 bp, Homo sapien
tgagattagagagaggacctgcttc

SEQ ID NO: 1555087 - DNA, 25 bp, Homo sapien
ttccaggggtcacattgagctctgc

SEQ ID NO: 1555088 - DNA, 25 bp, Homo sapien
gtttgggacagcaatgagattagag

SEQ ID NO: 1555089 - DNA, 25 bp, Homo sapien
gggcgtgcagggttgggtctcggaa

SEQ ID NO: 1555090 - DNA, 25 bp, Homo sapien
ggtcaccgaagaagacgacttcatc

SEQ ID NO: 1555091 - DNA, 25 bp, Homo sapien
tgtttcaccctctgtaggtccgagt

SEQ ID NO: 1555092 - DNA, 25 bp, Homo sapien
ccgagtaatcactggagctgggcgt

SEQ ID NO: 1555093 - DNA, 25 bp, Homo sapien
gatcatacggcatgccagtggcagg

SEQ ID NO: 1555094 - DNA, 25 bp, Homo sapien
tctaggatcatacggcatgccagtg

SEQ ID NO: 1555095 - DNA, 25 bp, Homo sapien
tgttatctaggatcatacggcatgc

SEQ ID NO: 1555096 - DNA, 25 bp, Homo sapien
ctgagatgttatctaggatcatacg

SEQ ID NO: 1555097 - DNA, 25 bp, Homo sapien
tggagccggaaaagtactggagaac

SEQ ID NO: 1555098 - DNA, 25 bp, Homo sapien
gagaattctggatccttggagccgg

SEQ ID NO: 1555099 - DNA, 25 bp, Homo sapien
tcaatgtgcggaaagaattcaaggc

SEQ ID NO: 1555100 - DNA, 25 bp, Homo sapien
ggagaacatccagtaccaaggttgg

SEQ ID NO: 1555101 - DNA, 25 bp, Homo sapien
acttcacgtgatccgtccccatcag

SEQ ID NO: 1555102 - DNA, 25 bp, Homo sapien
cttcacgtgatccgtccccatcagc

SEQ ID NO: 1555103 - DNA, 25 bp, Homo sapien
gacttcacgtgatccgtccccatca

SEQ ID NO: 1555104 - DNA, 25 bp, Homo sapien
ttcacgtgatccgtccccatcagcc

SEQ ID NO: 1555105 - DNA, 25 bp, Homo sapien
tcaggagggggtaccgggacttgca

SEQ ID NO: 1555106 - DNA, 25 bp, Homo sapien
gcaggaatgaatcccccttctttta

SEQ ID NO: 1555107 - DNA, 25 bp, Homo sapien
tgcaggaatgaatcccccttctttt

SEQ ID NO: 1555108 - DNA, 25 bp, Homo sapien
ggggtaccgggacttgcaggaatga

SEQ ID NO: 1555109 - DNA, 25 bp, Homo sapien
tcctctttcactttctgcaattcct

SEQ ID NO: 1555110 - DNA, 25 bp, Homo sapien
caatgatttcctctttcactttctg

SEQ ID NO: 1555111 - DNA, 25 bp, Homo sapien
cttcaatgatttcctctttcacttt

SEQ ID NO: 1555112 - DNA, 25 bp, Homo sapien
ttcactttctgcaattccttcttca

SEQ ID NO: 1555113 - DNA, 25 bp, Homo sapien
tcagggagaaccccgcttcctcagc

SEQ ID NO: 1555114 - DNA, 25 bp, Homo sapien
tgcattcctgtgtagtcttcagcca

SEQ ID NO: 1555115 - DNA, 25 bp, Homo sapien
caagcccagggctatagcatttaaa

SEQ ID NO: 1555116 - DNA, 25 bp, Homo sapien
tctagaacaagggaatgtgaaattc

SEQ ID NO: 1555117 - DNA, 25 bp, Homo sapien
cattaagcgttaaagtgaatctaga

SEQ ID NO: 1555118 - DNA, 25 bp, Homo sapien
gagaaccataatgtgcgtctgcaaa

SEQ ID NO: 1555119 - DNA, 25 bp, Homo sapien
tcttaagaacgtgtctgagaaccat

SEQ ID NO: 1555120 - DNA, 25 bp, Homo sapien
tattagctaggcgtcataccaaacg

SEQ ID NO: 1555121 - DNA, 25 bp, Homo sapien
tgaggcctgaggtaagcaaatggac

SEQ ID NO: 1555122 - DNA, 25 bp, Homo sapien
tccatcttagtacctgtcattgaca

SEQ ID NO: 1555123 - DNA, 25 bp, Homo sapien
tgaatcctggactgcgttagctcca

SEQ ID NO: 1555124 - DNA, 25 bp, Homo sapien
tgagtggatcgatccaacataaccc

SEQ ID NO: 1555125 - DNA, 25 bp, Homo sapien
ggtctgttccagcaggacgtggcct

SEQ ID NO: 1555126 - DNA, 25 bp, Homo sapien
cctctcagtagccagcatgttcgtc

SEQ ID NO: 1555127 - DNA, 25 bp, Homo sapien
ggttccacgggatttagcctctcag

SEQ ID NO: 1555128 - DNA, 25 bp, Homo sapien
catgttcgtcatggccgtcttgcca

SEQ ID NO: 1555129 - DNA, 25 bp, Homo sapien
gccatcgtgggctctagcagtcact

SEQ ID NO: 1555130 - DNA, 25 bp, Homo sapien
gggctggctgatttgcaacctgagt

SEQ ID NO: 1555131 - DNA, 25 bp, Homo sapien
ctggccgatttctgaacagggatct

SEQ ID NO: 1555132 - DNA, 25 bp, Homo sapien
catcccagggaatctacttgcgctg

SEQ ID NO: 1555133 - DNA, 25 bp, Homo sapien
aatcttctggccgatttctgaacag

SEQ ID NO: 1555134 - DNA, 25 bp, Homo sapien
tacaggccagggaacataagaccgc

SEQ ID NO: 1555135 - DNA, 25 bp, Homo sapien
caagtggataaaagtctgtgactcg

SEQ ID NO: 1555136 - DNA, 25 bp, Homo sapien
gtttctagataaacagcgatctcca

SEQ ID NO: 1555137 - DNA, 25 bp, Homo sapien
aactcaagtgaagggcaatcagggc

SEQ ID NO: 1555138 - DNA, 25 bp, Homo sapien
ctagacatcaggaccttggacaggt

SEQ ID NO: 1555139 - DNA, 25 bp, Homo sapien
tctagacatcaggaccttggacagg

SEQ ID NO: 1555140 - DNA, 25 bp, Homo sapien
tatttcttgtctcagccccctagtc

SEQ ID NO: 1555141 - DNA, 25 bp, Homo sapien
ataataataatcgttcaaatactgc

SEQ ID NO: 1555142 - DNA, 25 bp, Homo sapien
tttatttcttgtctcagccccctag

SEQ ID NO: 1555143 - DNA, 25 bp, Homo sapien
tttcttgtctcagccccctagtccc

SEQ ID NO: 1555144 - DNA, 25 bp, Homo sapien
gccctcggtgggtgtctcctgccat

SEQ ID NO: 1555145 - DNA, 25 bp, Homo sapien
ttctagccctcggtgggtgtctcct

SEQ ID NO: 1555146 - DNA, 25 bp, Homo sapien
gagccctgggggtcgatagaaagtg

SEQ ID NO: 1555147 - DNA, 25 bp, Homo sapien
ccgagttaggtcagcagagccctgg

SEQ ID NO: 1555148 - DNA, 25 bp, Homo sapien
taaggggcagaacttagatcccaac

SEQ ID NO: 1555149 - DNA, 25 bp, Homo sapien
gggcagaacttagatcccaaccaga

SEQ ID NO: 1555150 - DNA, 25 bp, Homo sapien
tcaacagagcctaaggggcagaact

SEQ ID NO: 1555151 - DNA, 25 bp, Homo sapien
cagaacttagatcccaaccagagag

SEQ ID NO: 1555152 - DNA, 25 bp, Homo sapien
ggaaggggccagcagggacccaaga

SEQ ID NO: 1555153 - DNA, 25 bp, Homo sapien
cagcagggacccaagaagtgggggc

SEQ ID NO: 1555154 - DNA, 25 bp, Homo sapien
ctggaaggggccagcagggacccaa

SEQ ID NO: 1555155 - DNA, 25 bp, Homo sapien
gggccagcagggacccaagaagtgg

SEQ ID NO: 1555156 - DNA, 25 bp, Homo sapien
tagtctttcctgtccccccaccatc

SEQ ID NO: 1555157 - DNA, 25 bp, Homo sapien
catctctccatccttgggtatattt

SEQ ID NO: 1555158 - DNA, 25 bp, Homo sapien
tccatccttgggtatatttctcttc

SEQ ID NO: 1555159 - DNA, 25 bp, Homo sapien
cggcagccgaggctgctaaagttgg

SEQ ID NO: 1555160 - DNA, 25 bp, Homo sapien
gggcaggaattctattttcgggaga

SEQ ID NO: 1555161 - DNA, 25 bp, Homo sapien
gccacaagtacggtggacacagcag

SEQ ID NO: 1555162 - DNA, 25 bp, Homo sapien
gcaaggacaccagtgtgctacagtg

SEQ ID NO: 1555163 - DNA, 25 bp, Homo sapien
gaagtctctatttatccgggtggga

SEQ ID NO: 1555164 - DNA, 25 bp, Homo sapien
gtttagctacccctgctgtcagcct

SEQ ID NO: 1555165 - DNA, 25 bp, Homo sapien
aagttcacctgtttagctacccctg

SEQ ID NO: 1555166 - DNA, 25 bp, Homo sapien
atatcaacgctgtggcccgctctca

SEQ ID NO: 1555167 - DNA, 25 bp, Homo sapien
tgatgggaagttgctggcttcagct

SEQ ID NO: 1555168 - DNA, 25 bp, Homo sapien
tggccgtgggctcccacgacaactt

SEQ ID NO: 1555169 - DNA, 25 bp, Homo sapien
tgtacacggtggaccagggcggccg

SEQ ID NO: 1555170 - DNA, 25 bp, Homo sapien
tgggctcccacgacaacttggtgta

SEQ ID NO: 1555171 - DNA, 25 bp, Homo sapien
caacttggtgtacgtgtacacggtg

SEQ ID NO: 1555172 - DNA, 25 bp, Homo sapien
gtttcatctagggaactgggtgctt

SEQ ID NO: 1555173 - DNA, 25 bp, Homo sapien
ggagcccaggacgacaccgaaccat

SEQ ID NO: 1555174 - DNA, 25 bp, Homo sapien
acgacaccgaaccatcctgtcaggg

SEQ ID NO: 1555175 - DNA, 25 bp, Homo sapien
catctagggaactgggtgcttagaa

SEQ ID NO: 1555176 - DNA, 25 bp, Homo sapien
aatgatcacatgctctcggtgtggg

SEQ ID NO: 1555177 - DNA, 25 bp, Homo sapien
aaacaggcctgtgtggtgaatgcct

SEQ ID NO: 1555178 - DNA, 25 bp, Homo sapien
tctttagaatggaggcaacctgctg

SEQ ID NO: 1555179 - DNA, 25 bp, Homo sapien
ctcagtggttaggagtctgcaatca

SEQ ID NO: 1555180 - DNA, 25 bp, Homo sapien
ggcggaaggatcgctgaagtccagg

SEQ ID NO: 1555181 - DNA, 25 bp, Homo sapien
gcggaaggatcgctgaagtccagga

SEQ ID NO: 1555182 - DNA, 25 bp, Homo sapien
cagcacgttcaagggctatgtggcc

SEQ ID NO: 1555183 - DNA, 25 bp, Homo sapien
gatggctccgtgaaaatgttcctga

SEQ ID NO: 1555184 - DNA, 25 bp, Homo sapien
aatagaaaggcggtcaaggcagctc

SEQ ID NO: 1555185 - DNA, 25 bp, Homo sapien
catgatgatcccagacgagctggca

SEQ ID NO: 1555186 - DNA, 25 bp, Homo sapien
agtgtccgccgctacttgtcaccag

SEQ ID NO: 1555187 - DNA, 25 bp, Homo sapien
caactgtagcgccaaaaaggaaggg

SEQ ID NO: 1555188 - DNA, 25 bp, Homo sapien
cgtcaagccgcagaaagagataggg

SEQ ID NO: 1555189 - DNA, 25 bp, Homo sapien
gagaaatgtagtcatgccccaggcc

SEQ ID NO: 1555190 - DNA, 25 bp, Homo sapien
cagtgtgtcagctcttgaaaggcct

SEQ ID NO: 1555191 - DNA, 25 bp, Homo sapien
tctcccaagaaggaggcgacctccg

SEQ ID NO: 1555192 - DNA, 25 bp, Homo sapien
caggacgccccttaatggctcggga

SEQ ID NO: 1555193 - DNA, 25 bp, Homo sapien
cgtgggtggctatgccacgtcccca

SEQ ID NO: 1555194 - DNA, 25 bp, Homo sapien
tgcgggcatgcgaagaacagggagc

SEQ ID NO: 1555195 - DNA, 25 bp, Homo sapien
gaccggggcctggtccttatactca

SEQ ID NO: 1555196 - DNA, 25 bp, Homo sapien
tgcctcgggtatccccgttagactg

SEQ ID NO: 1555197 - DNA, 25 bp, Homo sapien
gcgcttaggcaccactgcctcgggt

SEQ ID NO: 1555198 - DNA, 25 bp, Homo sapien
gcctggtcacgtcttagtcatagca

SEQ ID NO: 1555199 - DNA, 25 bp, Homo sapien
caggaagacgagctggcggtcctaa

SEQ ID NO: 1555200 - DNA, 25 bp, Homo sapien
gatgacaatttgtcgggcacgagcg

SEQ ID NO: 1555201 - DNA, 25 bp, Homo sapien
gcatcttaaagccagagcgagaggc

SEQ ID NO: 1555202 - DNA, 25 bp, Homo sapien
agcgattcccgtctcagcctccgga

SEQ ID NO: 1555203 - DNA, 25 bp, Homo sapien
gcgattcccgtctcagcctccggag

SEQ ID NO: 1555204 - DNA, 25 bp, Homo sapien
ggtaccgtattaatgctgaactgag

SEQ ID NO: 1555205 - DNA, 25 bp, Homo sapien
tgccatagtggactacagcccaaac

SEQ ID NO: 1555206 - DNA, 25 bp, Homo sapien
cactccaaggggtaccgtattaatg

SEQ ID NO: 1555207 - DNA, 25 bp, Homo sapien
agcatgggagttttgccctattccc

SEQ ID NO: 1555208 - DNA, 25 bp, Homo sapien
cagttccaacaacactgtcaatcac

SEQ ID NO: 1555209 - DNA, 25 bp, Homo sapien
cacacattcacgcaatcaccgggtt

SEQ ID NO: 1555210 - DNA, 25 bp, Homo sapien
gtgtctcacagttccaacaacactg

SEQ ID NO: 1555211 - DNA, 25 bp, Homo sapien
aatcaccgggtttcatcacaaacac

SEQ ID NO: 1555212 - DNA, 25 bp, Homo sapien
tccccagtcctgctcctggtcactt

SEQ ID NO: 1555213 - DNA, 25 bp, Homo sapien
ccagtcctgctcctggtcacttgct

SEQ ID NO: 1555214 - DNA, 25 bp, Homo sapien
gtcctgctcctggtcacttgctcct

SEQ ID NO: 1555215 - DNA, 25 bp, Homo sapien
gctcctggtcacttgctcctgcagc

SEQ ID NO: 1555216 - DNA, 25 bp, Homo sapien
gatctcaggtcgagcctcagaagga

SEQ ID NO: 1555217 - DNA, 25 bp, Homo sapien
acagacaacggcgtcacagacacaa

SEQ ID NO: 1555218 - DNA, 25 bp, Homo sapien
aaagacggaagcagagaggatctca

SEQ ID NO: 1555219 - DNA, 25 bp, Homo sapien
gcggctccacgtagagaaagacgga

SEQ ID NO: 1555220 - DNA, 25 bp, Homo sapien
ggcggcgaagggtctggttcgtgca

SEQ ID NO: 1555221 - DNA, 25 bp, Homo sapien
ctggttcgtgcaggggcgatcaggc

SEQ ID NO: 1555222 - DNA, 25 bp, Homo sapien
ggtctggttcgtgcaggggcgatca

SEQ ID NO: 1555223 - DNA, 25 bp, Homo sapien
ggcgaagggtctggttcgtgcaggg

SEQ ID NO: 1555224 - DNA, 25 bp, Homo sapien
agcagctgcaggatcggagaggtag

SEQ ID NO: 1555225 - DNA, 25 bp, Homo sapien
gcccgcacagtgagagccgcagcag

SEQ ID NO: 1555226 - DNA, 25 bp, Homo sapien
ccgcacagtgagagccgcagcagca

SEQ ID NO: 1555227 - DNA, 25 bp, Homo sapien
gctgcaggatcggagaggtagtcat

SEQ ID NO: 1555228 - DNA, 25 bp, Homo sapien
ctggcactccctgcggtaccgttcc

SEQ ID NO: 1555229 - DNA, 25 bp, Homo sapien
ggtaccgttcccagcgctggtacag

SEQ ID NO: 1555230 - DNA, 25 bp, Homo sapien
ctgaaggcggttccgcggctgccaa

SEQ ID NO: 1555231 - DNA, 25 bp, Homo sapien
gctgccaaggtctcctggcactccc

SEQ ID NO: 1555232 - DNA, 25 bp, Homo sapien
ggtgcagcatagtcccagcagacgt

SEQ ID NO: 1555233 - DNA, 25 bp, Homo sapien
gtcccagcagacgtacatatcgaag

SEQ ID NO: 1555234 - DNA, 25 bp, Homo sapien
tcgaaggacccgttacaggcgaggc

SEQ ID NO: 1555235 - DNA, 25 bp, Homo sapien
cagtggcattgggtgcagcatagtc

SEQ ID NO: 1555236 - DNA, 25 bp, Homo sapien
gagagggaattaaggcacacagaga

SEQ ID NO: 1555237 - DNA, 25 bp, Homo sapien
gatgataaacccttatatggcatgt

SEQ ID NO: 1555238 - DNA, 25 bp, Homo sapien
ttaatattcatactagcccatggaa

SEQ ID NO: 1555239 - DNA, 25 bp, Homo sapien
actgtgagacaataacagagaggga

SEQ ID NO: 1555240 - DNA, 25 bp, Homo sapien
tcactgccacactggcggaggacga

SEQ ID NO: 1555241 - DNA, 25 bp, Homo sapien
gggttctcacattgtgtatggtctc

SEQ ID NO: 1555242 - DNA, 25 bp, Homo sapien
ggccatcactgccacactggcggag

SEQ ID NO: 1555243 - DNA, 25 bp, Homo sapien
tgggttctcacattgtgtatggtct

SEQ ID NO: 1555244 - DNA, 25 bp, Homo sapien
cagtgtacatgacctgcaaccgctc

SEQ ID NO: 1555245 - DNA, 25 bp, Homo sapien
ctgcaaccgctccaagatgagcctt

SEQ ID NO: 1555246 - DNA, 25 bp, Homo sapien
cagggagtagccgacagtgtacatg

SEQ ID NO: 1555247 - DNA, 25 bp, Homo sapien
tagccgacagtgtacatgacctgca

SEQ ID NO: 1555248 - DNA, 25 bp, Homo sapien
tgctccccatagaaccaccagtgga

SEQ ID NO: 1555249 - DNA, 25 bp, Homo sapien
cttactggacaaactgaggccgagc

SEQ ID NO: 1555250 - DNA, 25 bp, Homo sapien
gccacacagagctcctttaaccacc

SEQ ID NO: 1555251 - DNA, 25 bp, Homo sapien
tgaggccgagctcacatctctgccg

SEQ ID NO: 1555252 - DNA, 25 bp, Homo sapien
ggttccacagcgcaagggcctggtc

SEQ ID NO: 1555253 - DNA, 25 bp, Homo sapien
tagcagacggtctcggctgagaatg

SEQ ID NO: 1555254 - DNA, 25 bp, Homo sapien
atagtttctagtgcaatgtagccgc

SEQ ID NO: 1555255 - DNA, 25 bp, Homo sapien
gcagcatgaaagacgtgaacaggtt

SEQ ID NO: 1555256 - DNA, 25 bp, Homo sapien
tagttggcacccacgcagtactggg

SEQ ID NO: 1555257 - DNA, 25 bp, Homo sapien
tcccacgagcaccaggagactgtgc

SEQ ID NO: 1555258 - DNA, 25 bp, Homo sapien
aggtagtagcggaagtggccctcct

SEQ ID NO: 1555259 - DNA, 25 bp, Homo sapien
accagcagccacgtgtagttggcac

SEQ ID NO: 1555260 - DNA, 25 bp, Homo sapien
ccaagacccgcggaattcctctgtc

SEQ ID NO: 1555261 - DNA, 25 bp, Homo sapien
aagacccgcggaattcctctgtcgg

SEQ ID NO: 1555262 - DNA, 25 bp, Homo sapien
agacccgcggaattcctctgtcggg

SEQ ID NO: 1555263 - DNA, 25 bp, Homo sapien
gcccaagacccgcggaattcctctg

SEQ ID NO: 1555264 - DNA, 25 bp, Homo sapien
tgcgtgttctcgtacaggtacctga

SEQ ID NO: 1555265 - DNA, 25 bp, Homo sapien
acccagggaatgacgaaaagcgcgg

SEQ ID NO: 1555266 - DNA, 25 bp, Homo sapien
cgtacaggtacctgacgatcaccca

SEQ ID NO: 1555267 - DNA, 25 bp, Homo sapien
gtacctgacgatcacccagggaatg

SEQ ID NO: 1555268 - DNA, 25 bp, Homo sapien
gactcaccgatcaccaagctcattt

SEQ ID NO: 1555269 - DNA, 25 bp, Homo sapien
aagctcatttgctcgctaggccccg

SEQ ID NO: 1555270 - DNA, 25 bp, Homo sapien
cacacacattctctaaggtcccgcc

SEQ ID NO: 1555271 - DNA, 25 bp, Homo sapien
gatagaaaaactctagactcaccga

SEQ ID NO: 1555272 - DNA, 25 bp, Homo sapien
cgtataatccaccaaatggccttga

SEQ ID NO: 1555273 - DNA, 25 bp, Homo sapien
caccaaatggccttgacttcgttgc

SEQ ID NO: 1555274 - DNA, 25 bp, Homo sapien
gatgggggtccgtataatccaccaa

SEQ ID NO: 1555275 - DNA, 25 bp, Homo sapien
ggccttgacttcgttgcgctcccag

SEQ ID NO: 1555276 - DNA, 25 bp, Homo sapien
ccagaatgggaaatccctgagggcg

SEQ ID NO: 1555277 - DNA, 25 bp, Homo sapien
ctggtggaggcgggaccgatcctac

SEQ ID NO: 1555278 - DNA, 25 bp, Homo sapien
ggcggcctggtggaggcgggaccga

SEQ ID NO: 1555279 - DNA, 25 bp, Homo sapien
cccagaatgggaaatccctgagggc

SEQ ID NO: 1555280 - DNA, 25 bp, Homo sapien
agggctgagccagccgcgatcccat

SEQ ID NO: 1555281 - DNA, 25 bp, Homo sapien
gagataagggctgagccagccgcga

SEQ ID NO: 1555282 - DNA, 25 bp, Homo sapien
taagggctgagccagccgcgatccc

SEQ ID NO: 1555283 - DNA, 25 bp, Homo sapien
gataagggctgagccagccgcgatc

SEQ ID NO: 1555284 - DNA, 25 bp, Homo sapien
tcagccggtaatcccggcagcgcat

SEQ ID NO: 1555285 - DNA, 25 bp, Homo sapien
gtaatcccggcagcgcatttgccgt

SEQ ID NO: 1555286 - DNA, 25 bp, Homo sapien
cctcagcttggacaggagaatgcca

SEQ ID NO: 1555287 - DNA, 25 bp, Homo sapien
gccaagaatgcggataaaaatgagg

SEQ ID NO: 1555288 - DNA, 25 bp, Homo sapien
tcaaagccgagcttggcgaagcgca

SEQ ID NO: 1555289 - DNA, 25 bp, Homo sapien
accagcgtcagcgtggagcgagcca

SEQ ID NO: 1555290 - DNA, 25 bp, Homo sapien
gggagcaaacaccacctcgtggaca

SEQ ID NO: 1555291 - DNA, 25 bp, Homo sapien
tctgtcacgggagcaaacaccacct

SEQ ID NO: 1555292 - DNA, 25 bp, Homo sapien
tgcaccagagaacgactgtagcttt

SEQ ID NO: 1555293 - DNA, 25 bp, Homo sapien
tgtagctttcgtgcccctctgggga

SEQ ID NO: 1555294 - DNA, 25 bp, Homo sapien
taattaatgaacgaactaaatccca

SEQ ID NO: 1555295 - DNA, 25 bp, Homo sapien
cattcagtggctgcaccagagaacg

SEQ ID NO: 1555296 - DNA, 25 bp, Homo sapien
taggcacatctcaccatctgacatt

SEQ ID NO: 1555297 - DNA, 25 bp, Homo sapien
cctctaggcacatctcaccatctga

SEQ ID NO: 1555298 - DNA, 25 bp, Homo sapien
accatctgacattctatatgctttc

SEQ ID NO: 1555299 - DNA, 25 bp, Homo sapien
agacatgatctccctctgtggccag

SEQ ID NO: 1555300 - DNA, 25 bp, Homo sapien
agtagaggacgctgaccaggaagcc

SEQ ID NO: 1555301 - DNA, 25 bp, Homo sapien
aagcagtagaggacgctgaccagga

SEQ ID NO: 1555302 - DNA, 25 bp, Homo sapien
cagtagaggacgctgaccaggaagc

SEQ ID NO: 1555303 - DNA, 25 bp, Homo sapien
agcagtagaggacgctgaccaggaa

SEQ ID NO: 1555304 - DNA, 25 bp, Homo sapien
gggcggcggccgggtctctgcctac

SEQ ID NO: 1555305 - DNA, 25 bp, Homo sapien
gtgagacgatggcgctcagaggcgg

SEQ ID NO: 1555306 - DNA, 25 bp, Homo sapien
tgtgagacgatggcgctcagaggcg

SEQ ID NO: 1555307 - DNA, 25 bp, Homo sapien
ctgtgagacgatggcgctcagaggc

SEQ ID NO: 1555308 - DNA, 25 bp, Homo sapien
tccccgaggacaagccgcggctggt

SEQ ID NO: 1555309 - DNA, 25 bp, Homo sapien
agtggtgccagccacggcggatctc

SEQ ID NO: 1555310 - DNA, 25 bp, Homo sapien
cgctccgggagctggcgttgctcct

SEQ ID NO: 1555311 - DNA, 25 bp, Homo sapien
cagtaactttccaactcccggctgg

SEQ ID NO: 1555312 - DNA, 25 bp, Homo sapien
tcataaccattccatagcgtgtgtg

SEQ ID NO: 1555313 - DNA, 25 bp, Homo sapien
tgcctatgctatcgcttccgcctag

SEQ ID NO: 1555314 - DNA, 25 bp, Homo sapien
taaatccatgctaactgaacagaca

SEQ ID NO: 1555315 - DNA, 25 bp, Homo sapien
gatggcttaagtgtcacctccttgg

SEQ ID NO: 1555316 - DNA, 25 bp, Homo sapien
aaaatgctcgacaacacccatacgg

SEQ ID NO: 1555317 - DNA, 25 bp, Homo sapien
taaagtttcagctgcgaggcctgcc

SEQ ID NO: 1555318 - DNA, 25 bp, Homo sapien
aacattagcccatttgggccgggca

SEQ ID NO: 1555319 - DNA, 25 bp, Homo sapien
cctacagggcagacaagaaggatct

SEQ ID NO: 1555320 - DNA, 25 bp, Homo sapien
gtgtaggggaattgggcagcagggc

SEQ ID NO: 1555321 - DNA, 25 bp, Homo sapien
ttacaagagccttgccctaaggccc

SEQ ID NO: 1555322 - DNA, 25 bp, Homo sapien
agggtgtaggggaattgggcagcag

SEQ ID NO: 1555323 - DNA, 25 bp, Homo sapien
atttacaagagccttgccctaaggc

SEQ ID NO: 1555324 - DNA, 25 bp, Homo sapien
tgtctctgtcctctggatataggca

SEQ ID NO: 1555325 - DNA, 25 bp, Homo sapien
ctatgtctctgtcctctggatatag

SEQ ID NO: 1555326 - DNA, 25 bp, Homo sapien
ctgtcctctggatataggcaaacac

SEQ ID NO: 1555327 - DNA, 25 bp, Homo sapien
ctctgtcctctggatataggcaaac

SEQ ID NO: 1555328 - DNA, 25 bp, Homo sapien
gaaacctgtaccagaccacggattg

SEQ ID NO: 1555329 - DNA, 25 bp, Homo sapien
ctgaaacctgtaccagaccacggat

SEQ ID NO: 1555330 - DNA, 25 bp, Homo sapien
taccagaccacggattgagtttagg

SEQ ID NO: 1555331 - DNA, 25 bp, Homo sapien
cctgtaccagaccacggattgagtt

SEQ ID NO: 1555332 - DNA, 25 bp, Homo sapien
cagccgcaggcggggtcgcccgcgg

SEQ ID NO: 1555333 - DNA, 25 bp, Homo sapien
ccacgttcccccagccgcaggcggg

SEQ ID NO: 1555334 - DNA, 25 bp, Homo sapien
gaggccacgttcccccagccgcagg

SEQ ID NO: 1555335 - DNA, 25 bp, Homo sapien
gccgcaggcggggtcgcccgcggcc

SEQ ID NO: 1555336 - DNA, 25 bp, Homo sapien
tccaaatggtgtagaacgccgagcc

SEQ ID NO: 1555337 - DNA, 25 bp, Homo sapien
aacccgcggtagcaggcggcgcttc

SEQ ID NO: 1555338 - DNA, 25 bp, Homo sapien
agcaacagaggcaagagccgaaccc

SEQ ID NO: 1555339 - DNA, 25 bp, Homo sapien
gcttcggcggcaagagtggctccat

SEQ ID NO: 1555340 - DNA, 25 bp, Homo sapien
gggcgcagataagtgctccagagac

SEQ ID NO: 1555341 - DNA, 25 bp, Homo sapien
gcttcggggaggcttccgatcaatg

SEQ ID NO: 1555342 - DNA, 25 bp, Homo sapien
tctgacttggagatttcccgggctg

SEQ ID NO: 1555343 - DNA, 25 bp, Homo sapien
cccggggttcgcacaaccagcaggg

SEQ ID NO: 1555344 - DNA, 25 bp, Homo sapien
agagtccgattaactccagtcagag

SEQ ID NO: 1555345 - DNA, 25 bp, Homo sapien
ggatcttgaacaggattcttatttc

SEQ ID NO: 1555346 - DNA, 25 bp, Homo sapien
tagcttctttgggatcttgaacagg

SEQ ID NO: 1555347 - DNA, 25 bp, Homo sapien
cagcatggagtctagagtccgatta

SEQ ID NO: 1555348 - DNA, 25 bp, Homo sapien
tgatctcgagggatctgcctgtctc

SEQ ID NO: 1555349 - DNA, 25 bp, Homo sapien
gatctcgagggatctgcctgtctcg

SEQ ID NO: 1555350 - DNA, 25 bp, Homo sapien
cagtgtggccaccacattgccaaag

SEQ ID NO: 1555351 - DNA, 25 bp, Homo sapien
gaagagcttcgagtcataatggcag

SEQ ID NO: 1555352 - DNA, 25 bp, Homo sapien
attgccaaagtccactggccccagg

SEQ ID NO: 1555353 - DNA, 25 bp, Homo sapien
aggtgacgggcagcccttgggtcca

SEQ ID NO: 1555354 - DNA, 25 bp, Homo sapien
ccaggtcaagtgcttgggccagctc

SEQ ID NO: 1555355 - DNA, 25 bp, Homo sapien
gcacagggcacagccgaatccgtgg

SEQ ID NO: 1555356 - DNA, 25 bp, Homo sapien
ggcacagggcacagccgaatccgtg

SEQ ID NO: 1555357 - DNA, 25 bp, Homo sapien
gctcagctccaggtcaagtgcttgg

SEQ ID NO: 1555358 - DNA, 25 bp, Homo sapien
gccaggaagatatctatgaaaagca

SEQ ID NO: 1555359 - DNA, 25 bp, Homo sapien
tcccaagtagcatgccactactccc

SEQ ID NO: 1555360 - DNA, 25 bp, Homo sapien
aggcctctttgaaggggtgacattg

SEQ ID NO: 1555361 - DNA, 25 bp, Homo sapien
gggtgacattggagtggacacctga

SEQ ID NO: 1555362 - DNA, 25 bp, Homo sapien
cgctgtatcgcccaggctggcgtac

SEQ ID NO: 1555363 - DNA, 25 bp, Homo sapien
ctggcctgtgtttttcttttctgtt

SEQ ID NO: 1555364 - DNA, 25 bp, Homo sapien
tcgctgtatcgcccaggctggcgta

SEQ ID NO: 1555365 - DNA, 25 bp, Homo sapien
gcacctggcctgtgtttttcttttc

SEQ ID NO: 1555366 - DNA, 25 bp, Homo sapien
ggtggccagagccagctcaggacta

SEQ ID NO: 1555367 - DNA, 25 bp, Homo sapien
ggggtggccagagccagctcaggac

SEQ ID NO: 1555368 - DNA, 25 bp, Homo sapien
ggccagagccagctcaggactagcc

SEQ ID NO: 1555369 - DNA, 25 bp, Homo sapien
tggccagagccagctcaggactagc

SEQ ID NO: 1555370 - DNA, 25 bp, Homo sapien
gggctgtgaggtatagactccatga

SEQ ID NO: 1555371 - DNA, 25 bp, Homo sapien
aggtatagactccatgagctgggcc

SEQ ID NO: 1555372 - DNA, 25 bp, Homo sapien
ccttgggtccccactccttcagcgc

SEQ ID NO: 1555373 - DNA, 25 bp, Homo sapien
caagaagagcagttgcagggtcacc

SEQ ID NO: 1555374 - DNA, 25 bp, Homo sapien
ctcgccagaagccaggggaccctgg

SEQ ID NO: 1555375 - DNA, 25 bp, Homo sapien
ccctccctcgccagaagccagggga

SEQ ID NO: 1555376 - DNA, 25 bp, Homo sapien
tgctccctccctcgccagaagccag

SEQ ID NO: 1555377 - DNA, 25 bp, Homo sapien
tcgccagaagccaggggaccctggt

SEQ ID NO: 1555378 - DNA, 25 bp, Homo sapien
cagcggaccgtgcgagggaagtggc

SEQ ID NO: 1555379 - DNA, 25 bp, Homo sapien
agcggaccgtgcgagggaagtggct

SEQ ID NO: 1555380 - DNA, 25 bp, Homo sapien
ccagcggaccgtgcgagggaagtgg

SEQ ID NO: 1555381 - DNA, 25 bp, Homo sapien
cacagagccaaagggctccccgggt

SEQ ID NO: 1555382 - DNA, 25 bp, Homo sapien
caggttcaaacggtgcagacgcttc

SEQ ID NO: 1555383 - DNA, 25 bp, Homo sapien
ggttggaagtacatcacttcctggg

SEQ ID NO: 1555384 - DNA, 25 bp, Homo sapien
gaaggggatgtggtcgtcttccaca

SEQ ID NO: 1555385 - DNA, 25 bp, Homo sapien
tggagattgacctcggtgtccgcag

SEQ ID NO: 1555386 - DNA, 25 bp, Homo sapien
gccaggaacacagcgagaatgcggc

SEQ ID NO: 1555387 - DNA, 25 bp, Homo sapien
aatgcggcacaagttgtgtaccgtg

SEQ ID NO: 1555388 - DNA, 25 bp, Homo sapien
gagatgagatggagcacgggtaccc

SEQ ID NO: 1555389 - DNA, 25 bp, Homo sapien
ctaggcagatcctgcctgagcttca

SEQ ID NO: 1555390 - DNA, 25 bp, Homo sapien
ggtggcagcttgagacaatcaaaag

SEQ ID NO: 1555391 - DNA, 25 bp, Homo sapien
acaaaccagcacaccctaggcagat

SEQ ID NO: 1555392 - DNA, 25 bp, Homo sapien
tctccacagtcattggccaagcacg

SEQ ID NO: 1555393 - DNA, 25 bp, Homo sapien
ccctgcaaacctttggaccaagtgt

SEQ ID NO: 1555394 - DNA, 25 bp, Homo sapien
cctgcaaacctttggaccaagtgtt

SEQ ID NO: 1555395 - DNA, 25 bp, Homo sapien
tactttttcagttcgctgacttaaa

SEQ ID NO: 1555396 - DNA, 25 bp, Homo sapien
tttactttttcagttcgctgactta

SEQ ID NO: 1555397 - DNA, 25 bp, Homo sapien
ctttttcagttcgctgacttaaaga

SEQ ID NO: 1555398 - DNA, 25 bp, Homo sapien
cttttactttttcagttcgctgact

SEQ ID NO: 1555399 - DNA, 25 bp, Homo sapien
cctggttatgaggacatcctctgtg

SEQ ID NO: 1555400 - DNA, 25 bp, Homo sapien
tctggacttccaaaatatgagcttc

SEQ ID NO: 1555401 - DNA, 25 bp, Homo sapien
ctggtgcagtagcaaggctgctgtt

SEQ ID NO: 1555402 - DNA, 25 bp, Homo sapien
gagaattcatctagctgggtggcat

SEQ ID NO: 1555403 - DNA, 25 bp, Homo sapien
gtcatgcaatgtctatttacacgag

SEQ ID NO: 1555404 - DNA, 25 bp, Homo sapien
taaaaattcacatgatgcagtgagg

SEQ ID NO: 1555405 - DNA, 25 bp, Homo sapien
ccccttgtcatgcaatgtctattta

SEQ ID NO: 1555406 - DNA, 25 bp, Homo sapien
catgatgcagtgaggaaactcattt

SEQ ID NO: 1555407 - DNA, 25 bp, Homo sapien
cattcctctcatagatgctctcaga

SEQ ID NO: 1555408 - DNA, 25 bp, Homo sapien
caaagtaccttctgaggtatcctag

SEQ ID NO: 1555409 - DNA, 25 bp, Homo sapien
tactctgcggtaaatctagatctgt

SEQ ID NO: 1555410 - DNA, 25 bp, Homo sapien
gacagtgtgccctaactactctgcg

SEQ ID NO: 1555411 - DNA, 25 bp, Homo sapien
ggtgcagtggcacaatctcagctca

SEQ ID NO: 1555412 - DNA, 25 bp, Homo sapien
cgattctactgcctaggcttcccaa

SEQ ID NO: 1555413 - DNA, 25 bp, Homo sapien
tctcactgttgcctaggctacggtg

SEQ ID NO: 1555414 - DNA, 25 bp, Homo sapien
tcactgttgcctaggctacggtgca

SEQ ID NO: 1555415 - DNA, 25 bp, Homo sapien
tggagctgttatttcccaagaagcc

SEQ ID NO: 1555416 - DNA, 25 bp, Homo sapien
gcagggagcagacggcagctaattt

SEQ ID NO: 1555417 - DNA, 25 bp, Homo sapien
caaggttggcacctctcctaacctg

SEQ ID NO: 1555418 - DNA, 25 bp, Homo sapien
aagaagccgcatcgcccaaggttgg

SEQ ID NO: 1555419 - DNA, 25 bp, Homo sapien
gggagctcccggagagacagaagca

SEQ ID NO: 1555420 - DNA, 25 bp, Homo sapien
agagcccgagagtaccagtcctgga

SEQ ID NO: 1555421 - DNA, 25 bp, Homo sapien
caaagagcccgagagtaccagtcct

SEQ ID NO: 1555422 - DNA, 25 bp, Homo sapien
gcccgagagtaccagtcctggaggt

SEQ ID NO: 1555423 - DNA, 25 bp, Homo sapien
cgcttaaggggcaccttggagtttg

SEQ ID NO: 1555424 - DNA, 25 bp, Homo sapien
tggagtttgggttcgtttgtaatgc

SEQ ID NO: 1555425 - DNA, 25 bp, Homo sapien
tgtaatgcggaaggttcggttgtgt

SEQ ID NO: 1555426 - DNA, 25 bp, Homo sapien
ggttctctcgcgcttaaggggcacc

SEQ ID NO: 1555427 - DNA, 25 bp, Homo sapien
tcgcgcgcatgcgtgtgggctgcag

SEQ ID NO: 1555428 - DNA, 25 bp, Homo sapien
tgagggctctttgggggcgtgtgta

SEQ ID NO: 1555429 - DNA, 25 bp, Homo sapien
ggcgtgtgtaggtttcgagggtcac

SEQ ID NO: 1555430 - DNA, 25 bp, Homo sapien
ctttcgcgcgcatgcgtgtgggctg

SEQ ID NO: 1555431 - DNA, 25 bp, Homo sapien
tgtcaacaaaagggcggagggaagc

SEQ ID NO: 1555432 - DNA, 25 bp, Homo sapien
tagttgctagtctgcccgcgcggtg

SEQ ID NO: 1555433 - DNA, 25 bp, Homo sapien
cgtcacgcgcgcgtctgtcaacaaa

SEQ ID NO: 1555434 - DNA, 25 bp, Homo sapien
gagggaagctagttgctagtctgcc

SEQ ID NO: 1555435 - DNA, 25 bp, Homo sapien
tgcccaccagggtgcactggggtat

SEQ ID NO: 1555436 - DNA, 25 bp, Homo sapien
gtgcccaccagggtgcactggggta

SEQ ID NO: 1555437 - DNA, 25 bp, Homo sapien
ccaccagggtgcactggggtattgc

SEQ ID NO: 1555438 - DNA, 25 bp, Homo sapien
gcccaccagggtgcactggggtatt

SEQ ID NO: 1555439 - DNA, 25 bp, Homo sapien
gggtcctgagtattctatgtatgcc

SEQ ID NO: 1555440 - DNA, 25 bp, Homo sapien
gtcctgagtattctatgtatgccag

SEQ ID NO: 1555441 - DNA, 25 bp, Homo sapien
tcctgagtattctatgtatgccaga

SEQ ID NO: 1555442 - DNA, 25 bp, Homo sapien
ggtcctgagtattctatgtatgcca

SEQ ID NO: 1555443 - DNA, 25 bp, Homo sapien
gcaagtatgcgagcatttgtgctca

SEQ ID NO: 1555444 - DNA, 25 bp, Homo sapien
gtcataatggtagggcagttctgca

SEQ ID NO: 1555445 - DNA, 25 bp, Homo sapien
cttgctgttgtcataatggtagggc

SEQ ID NO: 1555446 - DNA, 25 bp, Homo sapien
tagggcagttctgcaagtatgcgag

SEQ ID NO: 1555447 - DNA, 25 bp, Homo sapien
agagaaggcagtagagaggaaccaa

SEQ ID NO: 1555448 - DNA, 25 bp, Homo sapien
caagagggaagatgtcaggctgtct

SEQ ID NO: 1555449 - DNA, 25 bp, Homo sapien
agagggaagatgtcaggctgtctcc

SEQ ID NO: 1555450 - DNA, 25 bp, Homo sapien
tagagaggaaccaagagggaagatg

SEQ ID NO: 1555451 - DNA, 25 bp, Homo sapien
caatacttatggaagggctcagtac

SEQ ID NO: 1555452 - DNA, 25 bp, Homo sapien
tccaatacttatggaagggctcagt

SEQ ID NO: 1555453 - DNA, 25 bp, Homo sapien
ccaatacttatggaagggctcagta

SEQ ID NO: 1555454 - DNA, 25 bp, Homo sapien
agaaatcagtggtaggatagagtgt

SEQ ID NO: 1555455 - DNA, 25 bp, Homo sapien
caggcgaacggtggacgcaatgggt

SEQ ID NO: 1555456 - DNA, 25 bp, Homo sapien
gatagagtgtgggtttaggctccag

SEQ ID NO: 1555457 - DNA, 25 bp, Homo sapien
ggcaggaaggcaagttgaggaggta

SEQ ID NO: 1555458 - DNA, 25 bp, Homo sapien
tagtccgtggctgcccggacttcaa

SEQ ID NO: 1555459 - DNA, 25 bp, Homo sapien
tccaagcttgaccgtgctgccttct

SEQ ID NO: 1555460 - DNA, 25 bp, Homo sapien
gatgtagtccgtggctgcccggact

SEQ ID NO: 1555461 - DNA, 25 bp, Homo sapien
gggatgtagtccgtggctgcccgga

SEQ ID NO: 1555462 - DNA, 25 bp, Homo sapien
tctagggagcccgatcagacagcgt

SEQ ID NO: 1555463 - DNA, 25 bp, Homo sapien
gagcaagagtgcgttcctgaggcca

SEQ ID NO: 1555464 - DNA, 25 bp, Homo sapien
cagttccagccaagatgtgctgggc

SEQ ID NO: 1555465 - DNA, 25 bp, Homo sapien
tgtcgtcttgcacagcgtgagctcg

SEQ ID NO: 1555466 - DNA, 25 bp, Homo sapien
aaaaagaatgattagtgacctctgg

SEQ ID NO: 1555467 - DNA, 25 bp, Homo sapien
gaatgattagtgacctctgggattg

SEQ ID NO: 1555468 - DNA, 25 bp, Homo sapien
aaagaatgattagtgacctctggga

SEQ ID NO: 1555469 - DNA, 25 bp, Homo sapien
aatgattagtgacctctgggattgc

SEQ ID NO: 1555470 - DNA, 25 bp, Homo sapien
ccagtgaattagctctgggctgttc

SEQ ID NO: 1555471 - DNA, 25 bp, Homo sapien
acccaagtatctgctggaaccaaac

SEQ ID NO: 1555472 - DNA, 25 bp, Homo sapien
gggacccagtgaattagctctgggc

SEQ ID NO: 1555473 - DNA, 25 bp, Homo sapien
ccaagtatctgctggaaccaaacat

SEQ ID NO: 1555474 - DNA, 25 bp, Homo sapien
agttttcctttgagcaaccatttct

SEQ ID NO: 1555475 - DNA, 25 bp, Homo sapien
ttcctttgagcaaccatttctcctc

SEQ ID NO: 1555476 - DNA, 25 bp, Homo sapien
cattctcagtccatgtggttcggag

SEQ ID NO: 1555477 - DNA, 25 bp, Homo sapien
cttccactagggagcacaaaaccaa

SEQ ID NO: 1555478 - DNA, 25 bp, Homo sapien
ggagcttgttttggttcctctgatt

SEQ ID NO: 1555479 - DNA, 25 bp, Homo sapien
caggagcttgttttggttcctctga

SEQ ID NO: 1555480 - DNA, 25 bp, Homo sapien
tcttgtttggggacaggagcttgtt

SEQ ID NO: 1555481 - DNA, 25 bp, Homo sapien
ggacaggagcttgttttggttcctc

SEQ ID NO: 1555482 - DNA, 25 bp, Homo sapien
cagtgccaactcttgcagcttgcta

SEQ ID NO: 1555483 - DNA, 25 bp, Homo sapien
ccgtcttcagggctatgggcagcag

SEQ ID NO: 1555484 - DNA, 25 bp, Homo sapien
tttgtgagcttcttggtccccgtct

SEQ ID NO: 1555485 - DNA, 25 bp, Homo sapien
ttgcagcttgctagtgtggtttttc

SEQ ID NO: 1555486 - DNA, 25 bp, Homo sapien
gagcatgtcccacggccccgggatg

SEQ ID NO: 1555487 - DNA, 25 bp, Homo sapien
ctggactgagcatgtcccacggccc

SEQ ID NO: 1555488 - DNA, 25 bp, Homo sapien
tggcgcggagcactggactgagcat

SEQ ID NO: 1555489 - DNA, 25 bp, Homo sapien
agctcctgctatggcgcggagcact

SEQ ID NO: 1555490 - DNA, 25 bp, Homo sapien
ccaagtctctaacacaggagaggca

SEQ ID NO: 1555491 - DNA, 25 bp, Homo sapien
ggaaggacactctgaatcaaagctg

SEQ ID NO: 1555492 - DNA, 25 bp, Homo sapien
tctgaatcaaagctgcaccccaagt

SEQ ID NO: 1555493 - DNA, 25 bp, Homo sapien
ccccaagtctctaacacaggagagg

SEQ ID NO: 1555494 - DNA, 25 bp, Homo sapien
ctctggaggtactgaatgtactgca

SEQ ID NO: 1555495 - DNA, 25 bp, Homo sapien
gcaggacatgcaccagaatctcctt

SEQ ID NO: 1555496 - DNA, 25 bp, Homo sapien
tttgaacaaggccttggcggcatcg

SEQ ID NO: 1555497 - DNA, 25 bp, Homo sapien
ggcatcgatgtttctctggaggtac

SEQ ID NO: 1555498 - DNA, 25 bp, Homo sapien
agagtgtctcctccgcctggctggg

SEQ ID NO: 1555499 - DNA, 25 bp, Homo sapien
aggcttctggcacgccccctggaga

SEQ ID NO: 1555500 - DNA, 25 bp, Homo sapien
acttctgagagcttggggagctgga

SEQ ID NO: 1555501 - DNA, 25 bp, Homo sapien
tcttccgaggcttctggcacgcccc

SEQ ID NO: 1555502 - DNA, 25 bp, Homo sapien
agcttctcaggcttgttcagggcca

SEQ ID NO: 1555503 - DNA, 25 bp, Homo sapien
ggccaccagcttctcaggcttgttc

SEQ ID NO: 1555504 - DNA, 25 bp, Homo sapien
ggtgtcctcggccagatccaacagc

SEQ ID NO: 1555505 - DNA, 25 bp, Homo sapien
agatccaacagcgtcagctgggact

SEQ ID NO: 1555506 - DNA, 25 bp, Homo sapien
aaggtgcgtcatcctggacactgcc

SEQ ID NO: 1555507 - DNA, 25 bp, Homo sapien
agggaaaggtgcgtcatcctggaca

SEQ ID NO: 1555508 - DNA, 25 bp, Homo sapien
tggatcctcgccacatcttcctgag

SEQ ID NO: 1555509 - DNA, 25 bp, Homo sapien
tgttgagaaaatggatcctcgccac

SEQ ID NO: 1555510 - DNA, 25 bp, Homo sapien
tcctcgctggaatcatagaacacca

SEQ ID NO: 1555511 - DNA, 25 bp, Homo sapien
agccaagggtcagcgtctagggacc

SEQ ID NO: 1555512 - DNA, 25 bp, Homo sapien
catcctcgctggaatcatagaacac

SEQ ID NO: 1555513 - DNA, 25 bp, Homo sapien
gtctagggaccctttgtccacatcc

SEQ ID NO: 1555514 - DNA, 25 bp, Homo sapien
cacttgggtggcctgttccactcca

SEQ ID NO: 1555515 - DNA, 25 bp, Homo sapien
agcccgaggatctcacttgggtggc

SEQ ID NO: 1555516 - DNA, 25 bp, Homo sapien
gttccactccagacatcaatctggg

SEQ ID NO: 1555517 - DNA, 25 bp, Homo sapien
ggctgagcccgaggatctcacttgg

SEQ ID NO: 1555518 - DNA, 25 bp, Homo sapien
tccatgtcatcctccaagatctcgt

SEQ ID NO: 1555519 - DNA, 25 bp, Homo sapien
caagatctcgtctggcagcagtttc

SEQ ID NO: 1555520 - DNA, 25 bp, Homo sapien
cttgggtcaggtactccatgtcatc

SEQ ID NO: 1555521 - DNA, 25 bp, Homo sapien
ttgggtcaggtactccatgtcatcc

SEQ ID NO: 1555522 - DNA, 25 bp, Homo sapien
ggctgaaggtgaagactccagatct

SEQ ID NO: 1555523 - DNA, 25 bp, Homo sapien
gaaggtgaagactccagatctaagc

SEQ ID NO: 1555524 - DNA, 25 bp, Homo sapien
gactccagatctaagcacacttctt

SEQ ID NO: 1555525 - DNA, 25 bp, Homo sapien
cctcctgcgtgtaggctgaaggtga

SEQ ID NO: 1555526 - DNA, 25 bp, Homo sapien
ttccacaggggctccgagtcgctgt

SEQ ID NO: 1555527 - DNA, 25 bp, Homo sapien
tcccgctcagcgagaggtagcagtg

SEQ ID NO: 1555528 - DNA, 25 bp, Homo sapien
gaggaccggtgcaggctgtgggact

SEQ ID NO: 1555529 - DNA, 25 bp, Homo sapien
tccagcgagactgaggaccggtgca

SEQ ID NO: 1555530 - DNA, 25 bp, Homo sapien
gggtccatgtggtgtcttcgtcctc

SEQ ID NO: 1555531 - DNA, 25 bp, Homo sapien
gccctggctacttggcccttcgtgg

SEQ ID NO: 1555532 - DNA, 25 bp, Homo sapien
tggagcccggcgtgcccacagggtt

SEQ ID NO: 1555533 - DNA, 25 bp, Homo sapien
tgcccacagggttggcctgcatatc

SEQ ID NO: 1555534 - DNA, 25 bp, Homo sapien
tcctgcagaacatgatgaagccgtt

SEQ ID NO: 1555535 - DNA, 25 bp, Homo sapien
gatgaagccgttgacacacttcttc

SEQ ID NO: 1555536 - DNA, 25 bp, Homo sapien
actgcttccggttcatcctgcagaa

SEQ ID NO: 1555537 - DNA, 25 bp, Homo sapien
cggatgtactgcttccggttcatcc

SEQ ID NO: 1555538 - DNA, 25 bp, Homo sapien
ggcagctgtggaagcggttccaggg

SEQ ID NO: 1555539 - DNA, 25 bp, Homo sapien
gcagctgtggaagcggttccagggc

SEQ ID NO: 1555540 - DNA, 25 bp, Homo sapien
tgtggaagcggttccagggcaggat

SEQ ID NO: 1555541 - DNA, 25 bp, Homo sapien
agctgtggaagcggttccagggcag

SEQ ID NO: 1555542 - DNA, 25 bp, Homo sapien
tgtaccactcccaatcctgtgtccc

SEQ ID NO: 1555543 - DNA, 25 bp, Homo sapien
tggcttcctcactcgcctcccgggc

SEQ ID NO: 1555544 - DNA, 25 bp, Homo sapien
ccgttttagcctctattgggcgagc

SEQ ID NO: 1555545 - DNA, 25 bp, Homo sapien
gcctgggccaccgttttagcctcta

SEQ ID NO: 1555546 - DNA, 25 bp, Homo sapien
tggtagaagggctttggcgtctccc

SEQ ID NO: 1555547 - DNA, 25 bp, Homo sapien
tggagccgtcctgcttcacgatgcg

SEQ ID NO: 1555548 - DNA, 25 bp, Homo sapien
tcctgcttcacgatgcggttgtgct

SEQ ID NO: 1555549 - DNA, 25 bp, Homo sapien
ctggcggctgaacctgcgagccttg

SEQ ID NO: 1555550 - DNA, 25 bp, Homo sapien
acaagttcatcgatgggtcctggct

SEQ ID NO: 1555551 - DNA, 25 bp, Homo sapien
agtcccatgggacctgcattctcag

SEQ ID NO: 1555552 - DNA, 25 bp, Homo sapien
tccgacaccccgcatttcattttgg

SEQ ID NO: 1555553 - DNA, 25 bp, Homo sapien
acagggttgcaaccgagtggctctg

SEQ ID NO: 1555554 - DNA, 25 bp, Homo sapien
tctcccgacattggtgctgaagacg

SEQ ID NO: 1555555 - DNA, 25 bp, Homo sapien
ttggaactgtgacccagtgtggccc

SEQ ID NO: 1555556 - DNA, 25 bp, Homo sapien
atctccgtgcctgagggaggcctcc

SEQ ID NO: 1555557 - DNA, 25 bp, Homo sapien
ggctggaactaagcgcaggaacaga

SEQ ID NO: 1555558 - DNA, 25 bp, Homo sapien
tatcgactgcgcaagaagttcccgc

SEQ ID NO: 1555559 - DNA, 25 bp, Homo sapien
caactggttcaagaaccggcgacag

SEQ ID NO: 1555560 - DNA, 25 bp, Homo sapien
aggagacagtctactgcttcaagga

SEQ ID NO: 1555561 - DNA, 25 bp, Homo sapien
gtcgctcacgcaggtcagcaactgg

SEQ ID NO: 1555562 - DNA, 25 bp, Homo sapien
ctacgtggcagcgacccggtgttgc

SEQ ID NO: 1555563 - DNA, 25 bp, Homo sapien
tcttgcagactttgcaggcggccga

SEQ ID NO: 1555564 - DNA, 25 bp, Homo sapien
cgagtacgccgagctctaccggcta

SEQ ID NO: 1555565 - DNA, 25 bp, Homo sapien
cttctcgcccgagcaggtggcgtgc

SEQ ID NO: 1555566 - DNA, 25 bp, Homo sapien
agacccgagtggagagctggatctc

SEQ ID NO: 1555567 - DNA, 25 bp, Homo sapien
ccgagtggagagctggatctcgcct

SEQ ID NO: 1555568 - DNA, 25 bp, Homo sapien
ctggatctcgccttcccggcgtggg

SEQ ID NO: 1555569 - DNA, 25 bp, Homo sapien
gaaagaagatcgagaagagcgggga

SEQ ID NO: 1555570 - DNA, 25 bp, Homo sapien
actccacagtgtccgcggtttgcgt

SEQ ID NO: 1555571 - DNA, 25 bp, Homo sapien
ctgtgccaccgagcgtcgagaagag

SEQ ID NO: 1555572 - DNA, 25 bp, Homo sapien
tcgcgaataaaaggccctccatctg

SEQ ID NO: 1555573 - DNA, 25 bp, Homo sapien
ggtttgcgttgtgggccggaggctc

SEQ ID NO: 1555574 - DNA, 25 bp, Homo sapien
ctgcttactcgggaaatttgctttt

SEQ ID NO: 1555575 - DNA, 25 bp, Homo sapien
gcctgcttactcgggaaatttgctt

SEQ ID NO: 1555576 - DNA, 25 bp, Homo sapien
gcttactcgggaaatttgcttttgc

SEQ ID NO: 1555577 - DNA, 25 bp, Homo sapien
tgcttactcgggaaatttgcttttg

SEQ ID NO: 1555578 - DNA, 25 bp, Homo sapien
cacctatcgttggttcgcaaagtgc

SEQ ID NO: 1555579 - DNA, 25 bp, Homo sapien
aagggtccttgtagccgggaatgct

SEQ ID NO: 1555580 - DNA, 25 bp, Homo sapien
ccctgacgtggatgggcaaactgca

SEQ ID NO: 1555581 - DNA, 25 bp, Homo sapien
ccccgttggaagactgagtgcccgg

SEQ ID NO: 1555582 - DNA, 25 bp, Homo sapien
agggcggatcttcgggcagccaatc

SEQ ID NO: 1555583 - DNA, 25 bp, Homo sapien
cacccgcttagctgcgcatttgcgg

SEQ ID NO: 1555584 - DNA, 25 bp, Homo sapien
ggcccacggcaggagggcggatctt

SEQ ID NO: 1555585 - DNA, 25 bp, Homo sapien
ctccctgccagggtacgtccggctg

SEQ ID NO: 1555586 - DNA, 25 bp, Homo sapien
ccagatatagggctcaccctacgtc

SEQ ID NO: 1555587 - DNA, 25 bp, Homo sapien
tacgtctttgcgactttagagggca

SEQ ID NO: 1555588 - DNA, 25 bp, Homo sapien
ggatctccctagataacctccccaa

SEQ ID NO: 1555589 - DNA, 25 bp, Homo sapien
gggcagaagccctttattcagcccc

SEQ ID NO: 1555590 - DNA, 25 bp, Homo sapien
tgctccgcggggcgtgtatagacac

SEQ ID NO: 1555591 - DNA, 25 bp, Homo sapien
gagccacaggtgagtccctcatgtg

SEQ ID NO: 1555592 - DNA, 25 bp, Homo sapien
aggtgggccgtctgctccgcggggc

SEQ ID NO: 1555593 - DNA, 25 bp, Homo sapien
ggtgagtccctcatgtgtccccttc

SEQ ID NO: 1555594 - DNA, 25 bp, Homo sapien
cccacagtcaactacgcgaggcaga

SEQ ID NO: 1555595 - DNA, 25 bp, Homo sapien
gctcggaaccgggacctagaggcac

SEQ ID NO: 1555596 - DNA, 25 bp, Homo sapien
actacgcgaggcagaggctcggaac

SEQ ID NO: 1555597 - DNA, 25 bp, Homo sapien
gcacacgtccggcagttgcaggagc

SEQ ID NO: 1555598 - DNA, 25 bp, Homo sapien
tgtgttagtgtttgagcaccagccc

SEQ ID NO: 1555599 - DNA, 25 bp, Homo sapien
tgaagtggcagttccagcggctgtc

SEQ ID NO: 1555600 - DNA, 25 bp, Homo sapien
gcaaggccttttgtcgtgagggcat

SEQ ID NO: 1555601 - DNA, 25 bp, Homo sapien
gacaaccagaacttcgccaggtcgg

SEQ ID NO: 1555602 - DNA, 25 bp, Homo sapien
ggtgccaagtggtcaggcgagagcc

SEQ ID NO: 1555603 - DNA, 25 bp, Homo sapien
tgagctgagcgctggtgaaggagaa

SEQ ID NO: 1555604 - DNA, 25 bp, Homo sapien
gaaggagaaacaagccatggaagga

SEQ ID NO: 1555605 - DNA, 25 bp, Homo sapien
tctgagaagtcgatctttgagctga

SEQ ID NO: 1555606 - DNA, 25 bp, Homo sapien
cagcttgattctgaaccgctgcggg

SEQ ID NO: 1555607 - DNA, 25 bp, Homo sapien
gcgcatgtccaggatagctaggtcc

SEQ ID NO: 1555608 - DNA, 25 bp, Homo sapien
tctattagaacccaggcgcatgtcc

SEQ ID NO: 1555609 - DNA, 25 bp, Homo sapien
agctaggtcctgagccgtgttccca

SEQ ID NO: 1555610 - DNA, 25 bp, Homo sapien
caggttcaagccgtcctcctgcctc

SEQ ID NO: 1555611 - DNA, 25 bp, Homo sapien
tggagtttagtggtgcgatctcaac

SEQ ID NO: 1555612 - DNA, 25 bp, Homo sapien
gatggagtcttattttgttgcctag

SEQ ID NO: 1555613 - DNA, 25 bp, Homo sapien
tcaactcactgcatcctccgcctcc

SEQ ID NO: 1555614 - DNA, 25 bp, Homo sapien
cgcgtggttcctgttgtgtagtaaa

SEQ ID NO: 1555615 - DNA, 25 bp, Homo sapien
gttaggtaactagatactcgagtga

SEQ ID NO: 1555616 - DNA, 25 bp, Homo sapien
gtgtagtaaatgctactggctgtca

SEQ ID NO: 1555617 - DNA, 25 bp, Homo sapien
gattgtcaagcatttcgcgtggttc

SEQ ID NO: 1555618 - DNA, 25 bp, Homo sapien
catatactgctacgttaatcattcc

SEQ ID NO: 1555619 - DNA, 25 bp, Homo sapien
tgcctgatattcctcagagctgtgt

SEQ ID NO: 1555620 - DNA, 25 bp, Homo sapien
gactgtgatggatgcctgaaagccc

SEQ ID NO: 1555621 - DNA, 25 bp, Homo sapien
tactatgtgccggactctgtgcctg

SEQ ID NO: 1555622 - DNA, 25 bp, Homo sapien
gctgggactaccaggcacgccacca

SEQ ID NO: 1555623 - DNA, 25 bp, Homo sapien
aggctgctctccgactcctaggctc

SEQ ID NO: 1555624 - DNA, 25 bp, Homo sapien
tctgccttcacctccctgagtagct

SEQ ID NO: 1555625 - DNA, 25 bp, Homo sapien
tttgagtcaagttctcactctgctg

SEQ ID NO: 1555626 - DNA, 25 bp, Homo sapien
tcccacctagacctaccaaaatgct

SEQ ID NO: 1555627 - DNA, 25 bp, Homo sapien
ggtttacaattgtgagccactatac

SEQ ID NO: 1555628 - DNA, 25 bp, Homo sapien
agtttttaggcctaggctagtcctg

SEQ ID NO: 1555629 - DNA, 25 bp, Homo sapien
agccactatacccgtcctatttttg

SEQ ID NO: 1555630 - DNA, 25 bp, Homo sapien
cgcagcgacgctgcagataccaagg

SEQ ID NO: 1555631 - DNA, 25 bp, Homo sapien
tctggagcctttctacctcaggggg

SEQ ID NO: 1555632 - DNA, 25 bp, Homo sapien
agggggcttcatcatctcggcagga

SEQ ID NO: 1555633 - DNA, 25 bp, Homo sapien
ggccccgaggtcagaactctggagc

SEQ ID NO: 1555634 - DNA, 25 bp, Homo sapien
aggcggccacgctttatagccggga

SEQ ID NO: 1555635 - DNA, 25 bp, Homo sapien
gctctggatctctcagcgggcacgg

SEQ ID NO: 1555636 - DNA, 25 bp, Homo sapien
gggaacggagcgctctggatctctc

SEQ ID NO: 1555637 - DNA, 25 bp, Homo sapien
gggtacggctgtcccgagcgccgcg

SEQ ID NO: 1555638 - DNA, 25 bp, Homo sapien
gccaggtcatgggcctccatcttca

SEQ ID NO: 1555639 - DNA, 25 bp, Homo sapien
agtagctccactcggccaggtcatg

SEQ ID NO: 1555640 - DNA, 25 bp, Homo sapien
gcctccgggtagtagctccactcgg

SEQ ID NO: 1555641 - DNA, 25 bp, Homo sapien
gggtagtagctccactcggccaggt

SEQ ID NO: 1555642 - DNA, 25 bp, Homo sapien
tgcccccaacttcccgctccgccat

SEQ ID NO: 1555643 - DNA, 25 bp, Homo sapien
gcccccaacttcccgctccgccatc

SEQ ID NO: 1555644 - DNA, 25 bp, Homo sapien
ccagcttgaagcgtttctggcggcg

SEQ ID NO: 1555645 - DNA, 25 bp, Homo sapien
gatccactggtagatttcactcaag

SEQ ID NO: 1555646 - DNA, 25 bp, Homo sapien
tcgttgaaagacagcgagtggcgaa

SEQ ID NO: 1555647 - DNA, 25 bp, Homo sapien
gcgctgctgattctcccggtagtaa

SEQ ID NO: 1555648 - DNA, 25 bp, Homo sapien
cattaagcaaagagcgggaatagag

SEQ ID NO: 1555649 - DNA, 25 bp, Homo sapien
ctaggatgcattaagcaaagagcgg

SEQ ID NO: 1555650 - DNA, 25 bp, Homo sapien
gatgcattaagcaaagagcgggaat

SEQ ID NO: 1555651 - DNA, 25 bp, Homo sapien
gccctggtagtagactccaggctcc

SEQ ID NO: 1555652 - DNA, 25 bp, Homo sapien
tggtggccatcaaaccatgcagtgg

SEQ ID NO: 1555653 - DNA, 25 bp, Homo sapien
aatggtgacgacatggccaacacgg

SEQ ID NO: 1555654 - DNA, 25 bp, Homo sapien
ggtggttatcacagtaccccgtgga

SEQ ID NO: 1555655 - DNA, 25 bp, Homo sapien
gatgtccatcaaagcacccaatggg

SEQ ID NO: 1555656 - DNA, 25 bp, Homo sapien
ttcaaatgactgaatggctggctgg

SEQ ID NO: 1555657 - DNA, 25 bp, Homo sapien
cacacacgtggattagacaaagtct

SEQ ID NO: 1555658 - DNA, 25 bp, Homo sapien
gaaagacacgtcacactggtgtgca

SEQ ID NO: 1555659 - DNA, 25 bp, Homo sapien
taaatgaatgagcaaccagagagcc

SEQ ID NO: 1555660 - DNA, 25 bp, Homo sapien
cctgggcgatgagtaacacatgcat

SEQ ID NO: 1555661 - DNA, 25 bp, Homo sapien
ggcctgggcgatgagtaacacatgc

SEQ ID NO: 1555662 - DNA, 25 bp, Homo sapien
gcctgggcgatgagtaacacatgca

SEQ ID NO: 1555663 - DNA, 25 bp, Homo sapien
tggggcacactgtctgcagggctct

SEQ ID NO: 1555664 - DNA, 25 bp, Homo sapien
tcagggcccatttccagtctggggc

SEQ ID NO: 1555665 - DNA, 25 bp, Homo sapien
tccagtctggggcacactgtctgca

SEQ ID NO: 1555666 - DNA, 25 bp, Homo sapien
gggctctggtccagcccagaacagg

SEQ ID NO: 1555667 - DNA, 25 bp, Homo sapien
actatctatgatcctgcctgcaacc

SEQ ID NO: 1555668 - DNA, 25 bp, Homo sapien
gtgaaatctactatctatgatcctg

SEQ ID NO: 1555669 - DNA, 25 bp, Homo sapien
ccgtgaaatctactatctatgatcc

SEQ ID NO: 1555670 - DNA, 25 bp, Homo sapien
tctccccagcttggcgcagtcgagg

SEQ ID NO: 1555671 - DNA, 25 bp, Homo sapien
cccctagagcccctagagcgcctcc

SEQ ID NO: 1555672 - DNA, 25 bp, Homo sapien
ctagagcccctagagcgcctcctct

SEQ ID NO: 1555673 - DNA, 25 bp, Homo sapien
atcggtcttacagacgccccgttgc

SEQ ID NO: 1555674 - DNA, 25 bp, Homo sapien
tagagcccctagagcgcctcctctg

SEQ ID NO: 1555675 - DNA, 25 bp, Homo sapien
ttgtctccttgtgatacgggacccc

SEQ ID NO: 1555676 - DNA, 25 bp, Homo sapien
gcagaccctgatccctaatatttga

SEQ ID NO: 1555677 - DNA, 25 bp, Homo sapien
tatttgatcgttccagctcttccag

SEQ ID NO: 1555678 - DNA, 25 bp, Homo sapien
tgagtgacccgtggcccgactcggt

SEQ ID NO: 1555679 - DNA, 25 bp, Homo sapien
cgcatgcgcgcgatggagtttttgc

SEQ ID NO: 1555680 - DNA, 25 bp, Homo sapien
ctcggcggagcgcagttctgcgcct

SEQ ID NO: 1555681 - DNA, 25 bp, Homo sapien
tttttgcgcgtgcgccgttgtggcc

SEQ ID NO: 1555682 - DNA, 25 bp, Homo sapien
cgggtacaacccgaggcacgcgcat

SEQ ID NO: 1555683 - DNA, 25 bp, Homo sapien
aattgtcgaatgaccttgaggactc

SEQ ID NO: 1555684 - DNA, 25 bp, Homo sapien
tgtaccaggaactgtgtaagtgctc

SEQ ID NO: 1555685 - DNA, 25 bp, Homo sapien
tgaatgaagcaccaattgtcgaatg

SEQ ID NO: 1555686 - DNA, 25 bp, Homo sapien
tatttattgagtcgatgaatgaagc

SEQ ID NO: 1555687 - DNA, 25 bp, Homo sapien
ggagaacgggatcgcgatacccaag

SEQ ID NO: 1555688 - DNA, 25 bp, Homo sapien
caaaagtattaacaagagtggcgat

SEQ ID NO: 1555689 - DNA, 25 bp, Homo sapien
tttcaggaccgggattagaggctgt

SEQ ID NO: 1555690 - DNA, 25 bp, Homo sapien
tggaaaccgggctcgctgtcctgaa

SEQ ID NO: 1555691 - DNA, 25 bp, Homo sapien
ggcattgcaaaagtgtggacatgga

SEQ ID NO: 1555692 - DNA, 25 bp, Homo sapien
acttccttggaactgagccgctctg

SEQ ID NO: 1555693 - DNA, 25 bp, Homo sapien
tggacatggagctaaattgggtccc

SEQ ID NO: 1555694 - DNA, 25 bp, Homo sapien
aggaggtccctaagaggcattgcaa

SEQ ID NO: 1555695 - DNA, 25 bp, Homo sapien
ctgtgaacataagggagcaggtact

SEQ ID NO: 1555696 - DNA, 25 bp, Homo sapien
gtcactttggtgatatcatgggaag

SEQ ID NO: 1555697 - DNA, 25 bp, Homo sapien
catgggaaggtgtacttccggtgat

SEQ ID NO: 1555698 - DNA, 25 bp, Homo sapien
cttcctgtgatgtctcaatgagttc

SEQ ID NO: 1555699 - DNA, 25 bp, Homo sapien
cagttctagatctgagggaagccat

SEQ ID NO: 1555700 - DNA, 25 bp, Homo sapien
ggatgccagctctgggattgggcca

SEQ ID NO: 1555701 - DNA, 25 bp, Homo sapien
tcactcttttgttgtcaggttgtat

SEQ ID NO: 1555702 - DNA, 25 bp, Homo sapien
tggagctgtccctcctaggtgggaa

SEQ ID NO: 1555703 - DNA, 25 bp, Homo sapien
tcagcacggcgcttaacacgctggc

SEQ ID NO: 1555704 - DNA, 25 bp, Homo sapien
gccttctcaggcaccgacctgctgg

SEQ ID NO: 1555705 - DNA, 25 bp, Homo sapien
tgctggccatcagcacggcgcttaa

SEQ ID NO: 1555706 - DNA, 25 bp, Homo sapien
ggcaagttacggctacaacaccaac

SEQ ID NO: 1555707 - DNA, 25 bp, Homo sapien
actgggttgctgtaaagctgttgac

SEQ ID NO: 1555708 - DNA, 25 bp, Homo sapien
tgtgaggttcaatgggacaaagctg

SEQ ID NO: 1555709 - DNA, 25 bp, Homo sapien
tctaatagaatagaaaggactccag

SEQ ID NO: 1555710 - DNA, 25 bp, Homo sapien
tatcaccggaagtgacctcagtgac

SEQ ID NO: 1555711 - DNA, 25 bp, Homo sapien
gacctctcaggatcaggtgatgctc

SEQ ID NO: 1555712 - DNA, 25 bp, Homo sapien
tccacccacttcatcctctcaaggt

SEQ ID NO: 1555713 - DNA, 25 bp, Homo sapien
cagccacatccctcattctttgttt

SEQ ID NO: 1555714 - DNA, 25 bp, Homo sapien
acccacttcatcctctcaaggtgct

SEQ ID NO: 1555715 - DNA, 25 bp, Homo sapien
tatgtctgaatgtcagatgaacttc

SEQ ID NO: 1555716 - DNA, 25 bp, Homo sapien
tcgcaagattggtttgggacaagtt

SEQ ID NO: 1555717 - DNA, 25 bp, Homo sapien
tccaaagagagaagagtcggccatg

SEQ ID NO: 1555718 - DNA, 25 bp, Homo sapien
caggatgaatgtcccatcaactggg

SEQ ID NO: 1555719 - DNA, 25 bp, Homo sapien
caacccatgacgtcaccaccccatc

SEQ ID NO: 1555720 - DNA, 25 bp, Homo sapien
ccccatccctgcgagcactgtgcgg

SEQ ID NO: 1555721 - DNA, 25 bp, Homo sapien
ccatccctgcgagcactgtgcggct

SEQ ID NO: 1555722 - DNA, 25 bp, Homo sapien
accaccccatccctgcgagcactgt

SEQ ID NO: 1555723 - DNA, 25 bp, Homo sapien
ggcaatggcgtaggccctagacctc

SEQ ID NO: 1555724 - DNA, 25 bp, Homo sapien
tcataagtccaggttaataatctcg

SEQ ID NO: 1555725 - DNA, 25 bp, Homo sapien
tagagtccttgagcctttgagaatc

SEQ ID NO: 1555726 - DNA, 25 bp, Homo sapien
gatgatccttgaaactccaggtaag

SEQ ID NO: 1555727 - DNA, 25 bp, Homo sapien
atgctccacaccccggaagacgtag

SEQ ID NO: 1555728 - DNA, 25 bp, Homo sapien
aaccatcacccgcacggcatgctcc

SEQ ID NO: 1555729 - DNA, 25 bp, Homo sapien
agccagcatcgaactcgccccgcca

SEQ ID NO: 1555730 - DNA, 25 bp, Homo sapien
cgccactggtcagccgtcatccggt

SEQ ID NO: 1555731 - DNA, 25 bp, Homo sapien
ctgactccagcatatgacagaagat

SEQ ID NO: 1555732 - DNA, 25 bp, Homo sapien
gttgaactgtttgaagttccctgtc

SEQ ID NO: 1555733 - DNA, 25 bp, Homo sapien
cagaagatgttgaactgtttgaagt

SEQ ID NO: 1555734 - DNA, 25 bp, Homo sapien
ggctgactccagcatatgacagaag

SEQ ID NO: 1555735 - DNA, 25 bp, Homo sapien
ccacggagtagatgaggatcaggta

SEQ ID NO: 1555736 - DNA, 25 bp, Homo sapien
atcaggtagcgcttggagttgagct

SEQ ID NO: 1555737 - DNA, 25 bp, Homo sapien
tcaaactccacggagtagatgagga

SEQ ID NO: 1555738 - DNA, 25 bp, Homo sapien
agtagatgaggatcaggtagcgctt

SEQ ID NO: 1555739 - DNA, 25 bp, Homo sapien
gccagatctcattctcccgggtgtc

SEQ ID NO: 1555740 - DNA, 25 bp, Homo sapien
ttcagtgaccggatgatgccctgca

SEQ ID NO: 1555741 - DNA, 25 bp, Homo sapien
tctggcttgccctggtacgggaggg

SEQ ID NO: 1555742 - DNA, 25 bp, Homo sapien
gtgtcccgagtgttctggccatcca

SEQ ID NO: 1555743 - DNA, 25 bp, Homo sapien
gcgcctcctcgcgcgatcggcccag

SEQ ID NO: 1555744 - DNA, 25 bp, Homo sapien
ctcgcgcgatcggcccagctgcgcc

SEQ ID NO: 1555745 - DNA, 25 bp, Homo sapien
ggcctcctggcgtgccgcgcgcccg

SEQ ID NO: 1555746 - DNA, 25 bp, Homo sapien
cagctcccgcttctcggacgccagg

SEQ ID NO: 1555747 - DNA, 25 bp, Homo sapien
ggcagtcctggccgcgacggccggc

SEQ ID NO: 1555748 - DNA, 25 bp, Homo sapien
gcagtcctggccgcgacggccggcc

SEQ ID NO: 1555749 - DNA, 25 bp, Homo sapien
gccgaggtccgcgcctcgctggccg

SEQ ID NO: 1555750 - DNA, 25 bp, Homo sapien
ctgaggccgaggtccgcgcctcgct

SEQ ID NO: 1555751 - DNA, 25 bp, Homo sapien
tgaggccgaggtccgcgcctcgctg

SEQ ID NO: 1555752 - DNA, 25 bp, Homo sapien
aggccgaggtccgcgcctcgctggc

SEQ ID NO: 1555753 - DNA, 25 bp, Homo sapien
ctgccgggaggggagaggggcgcgg

SEQ ID NO: 1555754 - DNA, 25 bp, Homo sapien
gaggggagaggggcgcggaggtcca

SEQ ID NO: 1555755 - DNA, 25 bp, Homo sapien
tgccgggaggggagaggggcgcgga

SEQ ID NO: 1555756 - DNA, 25 bp, Homo sapien
aggggagaggggcgcggaggtccag

SEQ ID NO: 1555757 - DNA, 25 bp, Homo sapien
gccagctcgctggtcagcgtcttca

SEQ ID NO: 1555758 - DNA, 25 bp, Homo sapien
aggctccgctccgatgccttcgcct

SEQ ID NO: 1555759 - DNA, 25 bp, Homo sapien
ctggtcagcgtcttcagccgggcgc

SEQ ID NO: 1555760 - DNA, 25 bp, Homo sapien
cttgtacaatgccagctcgctggtc

SEQ ID NO: 1555761 - DNA, 25 bp, Homo sapien
cggctgcaccggcggagtccgcctc

SEQ ID NO: 1555762 - DNA, 25 bp, Homo sapien
gcgccgcggcctcgcgacgcggagc

SEQ ID NO: 1555763 - DNA, 25 bp, Homo sapien
ccgggatgaggagcgcgcggcgccg

SEQ ID NO: 1555764 - DNA, 25 bp, Homo sapien
cccgggatgaggagcgcgcggcgcc

SEQ ID NO: 1555765 - DNA, 25 bp, Homo sapien
acgcggagcgctcccgggacgatga

SEQ ID NO: 1555766 - DNA, 25 bp, Homo sapien
cgagggcgaggggcgcgcagggcgg

SEQ ID NO: 1555767 - DNA, 25 bp, Homo sapien
cgtgggagaggaggcggctaggtcc

SEQ ID NO: 1555768 - DNA, 25 bp, Homo sapien
aggaggcggctaggtccggagacgg

SEQ ID NO: 1555769 - DNA, 25 bp, Homo sapien
gaggcggctaggtccggagacgggc

SEQ ID NO: 1555770 - DNA, 25 bp, Homo sapien
gagaggaggcggctaggtccggaga

SEQ ID NO: 1555771 - DNA, 25 bp, Homo sapien
ccgtggggtcgaagcggagcgcgcg

SEQ ID NO: 1555772 - DNA, 25 bp, Homo sapien
tggggtcgaagcggagcgcgcgacc

SEQ ID NO: 1555773 - DNA, 25 bp, Homo sapien
cgtggggtcgaagcggagcgcgcga

SEQ ID NO: 1555774 - DNA, 25 bp, Homo sapien
gggtcgaagcggagcgcgcgaccac

SEQ ID NO: 1555775 - DNA, 25 bp, Homo sapien
taggggcgtcccctcggccagtcaa

SEQ ID NO: 1555776 - DNA, 25 bp, Homo sapien
ccccactgcctaagcggttccgctg

SEQ ID NO: 1555777 - DNA, 25 bp, Homo sapien
tgaggagctgcggtttcgggagcgg

SEQ ID NO: 1555778 - DNA, 25 bp, Homo sapien
ggtctggcgagaccaggagacggac

SEQ ID NO: 1555779 - DNA, 25 bp, Homo sapien
caggagctggcagacgagcagcggc

SEQ ID NO: 1555780 - DNA, 25 bp, Homo sapien
aggagctggcagacgagcagcggct

SEQ ID NO: 1555781 - DNA, 25 bp, Homo sapien
agaaatcctccaaatcgctgcagga

SEQ ID NO: 1555782 - DNA, 25 bp, Homo sapien
ggagctggcagacgagcagcggctg

SEQ ID NO: 1555783 - DNA, 25 bp, Homo sapien
catattggacccactccagggcgtt

SEQ ID NO: 1555784 - DNA, 25 bp, Homo sapien
attggacccactccagggcgttggg

SEQ ID NO: 1555785 - DNA, 25 bp, Homo sapien
tggacccactccagggcgttgggct

SEQ ID NO: 1555786 - DNA, 25 bp, Homo sapien
tattggacccactccagggcgttgg

SEQ ID NO: 1555787 - DNA, 25 bp, Homo sapien
ttggccagagatttctgatggtggc

SEQ ID NO: 1555788 - DNA, 25 bp, Homo sapien
agcccccggagttggccagagattt

SEQ ID NO: 1555789 - DNA, 25 bp, Homo sapien
tggtggctgcgttccacggggggag

SEQ ID NO: 1555790 - DNA, 25 bp, Homo sapien
ccggagttggccagagatttctgat

SEQ ID NO: 1555791 - DNA, 25 bp, Homo sapien
ttcaggcgtgcgtctatttcggcca

SEQ ID NO: 1555792 - DNA, 25 bp, Homo sapien
atgtcagccgcctggtgctccgagc

SEQ ID NO: 1555793 - DNA, 25 bp, Homo sapien
ggttcatgtactcctgcaaggcctt

SEQ ID NO: 1555794 - DNA, 25 bp, Homo sapien
tatgaccgcatgtccagtcggttca

SEQ ID NO: 1555795 - DNA, 25 bp, Homo sapien
ccagcaagtgggtgggggatggagg

SEQ ID NO: 1555796 - DNA, 25 bp, Homo sapien
cagcaagtgggtgggggatggaggg

SEQ ID NO: 1555797 - DNA, 25 bp, Homo sapien
cagggtcagggcctcacacacctga

SEQ ID NO: 1555798 - DNA, 25 bp, Homo sapien
cccagggcaaatatgtttatttaca

SEQ ID NO: 1555799 - DNA, 25 bp, Homo sapien
gtcagggcctcacacacctgagacc

SEQ ID NO: 1555800 - DNA, 25 bp, Homo sapien
tttacaaaatgcacacatcctccct

SEQ ID NO: 1555801 - DNA, 25 bp, Homo sapien
tcaggcgctctgatcctaagtgttc

SEQ ID NO: 1555802 - DNA, 25 bp, Homo sapien
tgttcccatgaggtcacgaaggccc

SEQ ID NO: 1555803 - DNA, 25 bp, Homo sapien
acatcaccacatacagaagcagccg

SEQ ID NO: 1555804 - DNA, 25 bp, Homo sapien
ggccctcagcttttaggattccgaa

SEQ ID NO: 1555805 - DNA, 25 bp, Homo sapien
cagcttctttcctcgaggtcaccga

SEQ ID NO: 1555806 - DNA, 25 bp, Homo sapien
cacagctacgcacaaaacttatgga

SEQ ID NO: 1555807 - DNA, 25 bp, Homo sapien
tgtgccacaaggatagcaagctcac

SEQ ID NO: 1555808 - DNA, 25 bp, Homo sapien
aacttatggactatacgagccgctc

SEQ ID NO: 1555809 - DNA, 25 bp, Homo sapien
gaagttgcagtaaacgctcacaagg

SEQ ID NO: 1555810 - DNA, 25 bp, Homo sapien
cagtctctcaggattaaaggcaaca

SEQ ID NO: 1555811 - DNA, 25 bp, Homo sapien
agatacacaataggcccagtgcagt

SEQ ID NO: 1555812 - DNA, 25 bp, Homo sapien
caattttaggccaacaagatacaca

SEQ ID NO: 1555813 - DNA, 25 bp, Homo sapien
cccacagtgggaacatcttacataa

SEQ ID NO: 1555814 - DNA, 25 bp, Homo sapien
taccactatagtggcaggcacacac

SEQ ID NO: 1555815 - DNA, 25 bp, Homo sapien
gcatggtacatacagtcccacgtaa

SEQ ID NO: 1555816 - DNA, 25 bp, Homo sapien
tacagactcacaggaaattgcatgg

SEQ ID NO: 1555817 - DNA, 25 bp, Homo sapien
gctacaggtgcttggcagtctcgga

SEQ ID NO: 1555818 - DNA, 25 bp, Homo sapien
ccctgctgtgcatgaagagagctca

SEQ ID NO: 1555819 - DNA, 25 bp, Homo sapien
gaatgagcagttcctatgccatgaa

SEQ ID NO: 1555820 - DNA, 25 bp, Homo sapien
tcctgccgtgtggtcatgggcctct

SEQ ID NO: 1555821 - DNA, 25 bp, Homo sapien
taaaactacttctgttaattcagcc

SEQ ID NO: 1555822 - DNA, 25 bp, Homo sapien
gcctggcctattacccaccttctta

SEQ ID NO: 1555823 - DNA, 25 bp, Homo sapien
ttaattcagccatctcggtctcagc

SEQ ID NO: 1555824 - DNA, 25 bp, Homo sapien
tctgtggggtcttttttgctgatgt

SEQ ID NO: 1555825 - DNA, 25 bp, Homo sapien
tgatacagagtagcaagcatttcca

SEQ ID NO: 1555826 - DNA, 25 bp, Homo sapien
ctagggaataaaacatgtaatgtac

SEQ ID NO: 1555827 - DNA, 25 bp, Homo sapien
ttttcaattcccactacttcgagcc

SEQ ID NO: 1555828 - DNA, 25 bp, Homo sapien
gagccctgggatgtttgctgataca

SEQ ID NO: 1555829 - DNA, 25 bp, Homo sapien
tttccaaactcctagcaactggttc

SEQ ID NO: 1555830 - DNA, 25 bp, Homo sapien
caaactcctagcaactggttcctgg

SEQ ID NO: 1555831 - DNA, 25 bp, Homo sapien
tgcttcatggccgttttgacattca

SEQ ID NO: 1555832 - DNA, 25 bp, Homo sapien
catggccgttttgacattcaaaccc

SEQ ID NO: 1555833 - DNA, 25 bp, Homo sapien
ctgagcctgagcacacgtggatgag

SEQ ID NO: 1555834 - DNA, 25 bp, Homo sapien
tcactctgagcctgagcacacgtgg

SEQ ID NO: 1555835 - DNA, 25 bp, Homo sapien
cacgtggatgaggatgcagacaagc

SEQ ID NO: 1555836 - DNA, 25 bp, Homo sapien
ctgaaactcactctgagcctgagca

SEQ ID NO: 1555837 - DNA, 25 bp, Homo sapien
cccatcctgcaaccccacaaattcc

SEQ ID NO: 1555838 - DNA, 25 bp, Homo sapien
ccccatcctgcaaccccacaaattc

SEQ ID NO: 1555839 - DNA, 25 bp, Homo sapien
catcctgcaaccccacaaattcctc

SEQ ID NO: 1555840 - DNA, 25 bp, Homo sapien
ccatcctgcaaccccacaaattcct

SEQ ID NO: 1555841 - DNA, 25 bp, Homo sapien
atgggcttatccatggagcagttct

SEQ ID NO: 1555842 - DNA, 25 bp, Homo sapien
tcatgggcttatccatggagcagtt

SEQ ID NO: 1555843 - DNA, 25 bp, Homo sapien
tgggcttatccatggagcagttctc

SEQ ID NO: 1555844 - DNA, 25 bp, Homo sapien
catgggcttatccatggagcagttc

SEQ ID NO: 1555845 - DNA, 25 bp, Homo sapien
gtgcccatggcagcgcacctggttt

SEQ ID NO: 1555846 - DNA, 25 bp, Homo sapien
tcttccacggggatttgagccagcg

SEQ ID NO: 1555847 - DNA, 25 bp, Homo sapien
gggatttgagccagcgtgcaccccc

SEQ ID NO: 1555848 - DNA, 25 bp, Homo sapien
gaaaatggagcccagtgagtcgtgc

SEQ ID NO: 1555849 - DNA, 25 bp, Homo sapien
gacgctctggacacttggaacgctc

SEQ ID NO: 1555850 - DNA, 25 bp, Homo sapien
gaatgatactaggatccccgcctct

SEQ ID NO: 1555851 - DNA, 25 bp, Homo sapien
tggaacgctcctgagtttgcggctg

SEQ ID NO: 1555852 - DNA, 25 bp, Homo sapien
tttttcaatgtcaggcggtccaagt

SEQ ID NO: 1555853 - DNA, 25 bp, Homo sapien
ttactgcgacgaaaacatggcggcc

SEQ ID NO: 1555854 - DNA, 25 bp, Homo sapien
tgtttagggctcaaggagagacgcc

SEQ ID NO: 1555855 - DNA, 25 bp, Homo sapien
taaagtgacccgcttaggctgcaaa

SEQ ID NO: 1555856 - DNA, 25 bp, Homo sapien
tacaggcgacgtacaggcgtttcca

SEQ ID NO: 1555857 - DNA, 25 bp, Homo sapien
tcagaggtttagtatgcactgaact

SEQ ID NO: 1555858 - DNA, 25 bp, Homo sapien
gcactgaactaggaaaccagccaag

SEQ ID NO: 1555859 - DNA, 25 bp, Homo sapien
gttctccccttatacttgtagacag

SEQ ID NO: 1555860 - DNA, 25 bp, Homo sapien
tctcttcagtggcacacaagcaagt

SEQ ID NO: 1555861 - DNA, 25 bp, Homo sapien
gccggaatgagtaaagacttttcag

SEQ ID NO: 1555862 - DNA, 25 bp, Homo sapien
ttttgcaacgtgaaaaggacacgag

SEQ ID NO: 1555863 - DNA, 25 bp, Homo sapien
ttgactgagttgatgccggaatgag

SEQ ID NO: 1555864 - DNA, 25 bp, Homo sapien
tcccttttggagagcgacccaatag

SEQ ID NO: 1555865 - DNA, 25 bp, Homo sapien
cactatcccagttgggagggcacaa

SEQ ID NO: 1555866 - DNA, 25 bp, Homo sapien
tagttctagatctacacagccacag

SEQ ID NO: 1555867 - DNA, 25 bp, Homo sapien
gaggtcctacctccctcactgaagg

SEQ ID NO: 1555868 - DNA, 25 bp, Homo sapien
tcagatcaaaggtctcacgaacttg

SEQ ID NO: 1555869 - DNA, 25 bp, Homo sapien
tgaaacaagctctgtgaagtttgtg

SEQ ID NO: 1555870 - DNA, 25 bp, Homo sapien
gtttgtgatgggcatcaaaaacttc

SEQ ID NO: 1555871 - DNA, 25 bp, Homo sapien
ctgccgtgggcccaagatttctgaa

SEQ ID NO: 1555872 - DNA, 25 bp, Homo sapien
cgtgggcccaagatttctgaaacaa

SEQ ID NO: 1555873 - DNA, 25 bp, Homo sapien
gcccgccacaagcttctcagataaa

SEQ ID NO: 1555874 - DNA, 25 bp, Homo sapien
tcaacgcccgccacaagcttctcag

SEQ ID NO: 1555875 - DNA, 25 bp, Homo sapien
aacgcccgccacaagcttctcagat

SEQ ID NO: 1555876 - DNA, 25 bp, Homo sapien
gtaactggttcatcaacgcccgcca

SEQ ID NO: 1555877 - DNA, 25 bp, Homo sapien
atgaggaagaagaagcattggtctt

SEQ ID NO: 1555878 - DNA, 25 bp, Homo sapien
tcttcacactgatgagggtgatgag

SEQ ID NO: 1555879 - DNA, 25 bp, Homo sapien
aagaagaagcattggtcttgctgtc

SEQ ID NO: 1555880 - DNA, 25 bp, Homo sapien
cttgtcttcacactgatgagggtga

SEQ ID NO: 1555881 - DNA, 25 bp, Homo sapien
gagcttcagagcagctgatgggaca

SEQ ID NO: 1555882 - DNA, 25 bp, Homo sapien
ggagcttcagagcagctgatgggac

SEQ ID NO: 1555883 - DNA, 25 bp, Homo sapien
ttcagagcagctgatgggacagcag

SEQ ID NO: 1555884 - DNA, 25 bp, Homo sapien
gcttcagagcagctgatgggacagc

SEQ ID NO: 1555885 - DNA, 25 bp, Homo sapien
tgaacctcatgatttcctggcgctg

SEQ ID NO: 1555886 - DNA, 25 bp, Homo sapien
ggaactccaggcaatagtgcctggg

SEQ ID NO: 1555887 - DNA, 25 bp, Homo sapien
catcacagtcccaacagattgcaga

SEQ ID NO: 1555888 - DNA, 25 bp, Homo sapien
cagatctagtctccactcctgagtg

SEQ ID NO: 1555889 - DNA, 25 bp, Homo sapien
gcacactcctggggtagtcggtcct

SEQ ID NO: 1555890 - DNA, 25 bp, Homo sapien
cagcacactcctggggtagtcggtc

SEQ ID NO: 1555891 - DNA, 25 bp, Homo sapien
cacactcctggggtagtcggtcctc

SEQ ID NO: 1555892 - DNA, 25 bp, Homo sapien
agcacactcctggggtagtcggtcc

SEQ ID NO: 1555893 - DNA, 25 bp, Homo sapien
tgtggccactaggttgatctcaggg

SEQ ID NO: 1555894 - DNA, 25 bp, Homo sapien
caggcaggtgaaaacatgtacaggc

SEQ ID NO: 1555895 - DNA, 25 bp, Homo sapien
gaatgcagccaagtcctactccatg

SEQ ID NO: 1555896 - DNA, 25 bp, Homo sapien
ttgaaagcatgtacaggcaggtgac

SEQ ID NO: 1555897 - DNA, 25 bp, Homo sapien
ggagacagactgacacataagcagg

SEQ ID NO: 1555898 - DNA, 25 bp, Homo sapien
agacagactgacacataagcaggag

SEQ ID NO: 1555899 - DNA, 25 bp, Homo sapien
gaggagacagactgacacataagca

SEQ ID NO: 1555900 - DNA, 25 bp, Homo sapien
atgacttcccttggacacaagagga

SEQ ID NO: 1555901 - DNA, 25 bp, Homo sapien
caaaatcgtttgtgaggccaaagga

SEQ ID NO: 1555902 - DNA, 25 bp, Homo sapien
acattggcgggtctcgctcagggac

SEQ ID NO: 1555903 - DNA, 25 bp, Homo sapien
gctcagggacacgatggcgtcattg

SEQ ID NO: 1555904 - DNA, 25 bp, Homo sapien
gctggcacagccatggttctgagcc

SEQ ID NO: 1555905 - DNA, 25 bp, Homo sapien
ttctctactggtacacatattacct

SEQ ID NO: 1555906 - DNA, 25 bp, Homo sapien
accttagcctatgtttctgagatgc

SEQ ID NO: 1555907 - DNA, 25 bp, Homo sapien
catacaatggcttggagctgcatca

SEQ ID NO: 1555908 - DNA, 25 bp, Homo sapien
tctgagatgccttagtgaaagttga

SEQ ID NO: 1555909 - DNA, 25 bp, Homo sapien
agtgtactcgcattttctccttgag

SEQ ID NO: 1555910 - DNA, 25 bp, Homo sapien
tcaagaagggagttatcaaaagata

SEQ ID NO: 1555911 - DNA, 25 bp, Homo sapien
gagaggttgggtaagtcaacaatag

SEQ ID NO: 1555912 - DNA, 25 bp, Homo sapien
catctaggccattcaacagggtgag

SEQ ID NO: 1555913 - DNA, 25 bp, Homo sapien
tctttcccacctgatattttattcc

SEQ ID NO: 1555914 - DNA, 25 bp, Homo sapien
tcccacctgatattttattcctcct

SEQ ID NO: 1555915 - DNA, 25 bp, Homo sapien
cctcctccctctatgtagtttttgt

SEQ ID NO: 1555916 - DNA, 25 bp, Homo sapien
atgattgggaaactttcagctatgc

SEQ ID NO: 1555917 - DNA, 25 bp, Homo sapien
gtcactagggaaaattgaggacgag

SEQ ID NO: 1555918 - DNA, 25 bp, Homo sapien
tagggaaaattgaggacgagtcctc

SEQ ID NO: 1555919 - DNA, 25 bp, Homo sapien
ggacgagtcctcaatgttttcccac

SEQ ID NO: 1555920 - DNA, 25 bp, Homo sapien
tgaggacgagtcctcaatgttttcc

SEQ ID NO: 1555921 - DNA, 25 bp, Homo sapien
ttcagccttggaccagagaggatgg

SEQ ID NO: 1555922 - DNA, 25 bp, Homo sapien
tggtccggtcacatcgcagtctcaa

SEQ ID NO: 1555923 - DNA, 25 bp, Homo sapien
ggttgagggtttctcccagagtcaa

SEQ ID NO: 1555924 - DNA, 25 bp, Homo sapien
gcttagaagagcttggactcccctt

SEQ ID NO: 1555925 - DNA, 25 bp, Homo sapien
taagctatctctaaagacttgaagt

SEQ ID NO: 1555926 - DNA, 25 bp, Homo sapien
tgagttggtcaggttacagcttggt

SEQ ID NO: 1555927 - DNA, 25 bp, Homo sapien
cattggttcagcctgaaaatgcagg

SEQ ID NO: 1555928 - DNA, 25 bp, Homo sapien
gaaagtaatgcttgcgttcagataa

SEQ ID NO: 1555929 - DNA, 25 bp, Homo sapien
tgcaagttgaactataagttaaatt

SEQ ID NO: 1555930 - DNA, 25 bp, Homo sapien
ctgcaagttgaactataagttaaat

SEQ ID NO: 1555931 - DNA, 25 bp, Homo sapien
tctgcaagttgaactataagttaaa

SEQ ID NO: 1555932 - DNA, 25 bp, Homo sapien
gcaagttgaactataagttaaattc

SEQ ID NO: 1555933 - DNA, 25 bp, Homo sapien
ctttatccagtagagggaagagccc

SEQ ID NO: 1555934 - DNA, 25 bp, Homo sapien
gacttggcagctgctatctggattt

SEQ ID NO: 1555935 - DNA, 25 bp, Homo sapien
ggaagagcccaggttccttgacttg

SEQ ID NO: 1555936 - DNA, 25 bp, Homo sapien
gagcccaggttccttgacttggcag

SEQ ID NO: 1555937 - DNA, 25 bp, Homo sapien
agcccggccccagtagggagtcttg

SEQ ID NO: 1555938 - DNA, 25 bp, Homo sapien
cctgatccacggccgtttcctggtg

SEQ ID NO: 1555939 - DNA, 25 bp, Homo sapien
ctggtgccccttggacggagtttct

SEQ ID NO: 1555940 - DNA, 25 bp, Homo sapien
gggctgccggcacgcaatcagcccg

SEQ ID NO: 1555941 - DNA, 25 bp, Homo sapien
catctctgatcaggtagcacgtagc

SEQ ID NO: 1555942 - DNA, 25 bp, Homo sapien
ggtagcacgtagcacacaccagcag

SEQ ID NO: 1555943 - DNA, 25 bp, Homo sapien
gatcaggtagcacgtagcacacacc

SEQ ID NO: 1555944 - DNA, 25 bp, Homo sapien
tcaggtttaaacgggttaatgctca

SEQ ID NO: 1555945 - DNA, 25 bp, Homo sapien
tctgggggctggaccaaggaccgat

SEQ ID NO: 1555946 - DNA, 25 bp, Homo sapien
ttctgggggctggaccaaggaccga

SEQ ID NO: 1555947 - DNA, 25 bp, Homo sapien
tgtggggatggtgcatactgagggg

SEQ ID NO: 1555948 - DNA, 25 bp, Homo sapien
gtggggatggtgcatactgaggggc

SEQ ID NO: 1555949 - DNA, 25 bp, Homo sapien
cactttgaggtccagtccattgaga

SEQ ID NO: 1555950 - DNA, 25 bp, Homo sapien
ctttgaggtccagtccattgagaaa

SEQ ID NO: 1555951 - DNA, 25 bp, Homo sapien
ccccactttgaggtccagtccattg

SEQ ID NO: 1555952 - DNA, 25 bp, Homo sapien
tgaggtccagtccattgagaaatgc

SEQ ID NO: 1555953 - DNA, 25 bp, Homo sapien
ctcaggttgaggccaaacttgaatc

SEQ ID NO: 1555954 - DNA, 25 bp, Homo sapien
caggttgaggccaaacttgaatctg

SEQ ID NO: 1555955 - DNA, 25 bp, Homo sapien
tcaggttgaggccaaacttgaatct

SEQ ID NO: 1555956 - DNA, 25 bp, Homo sapien
gggtgaggtgggaggataacttgaa

SEQ ID NO: 1555957 - DNA, 25 bp, Homo sapien
tcagctgagatcatgccactgcact

SEQ ID NO: 1555958 - DNA, 25 bp, Homo sapien
agggtgaggtgggaggataacttga

SEQ ID NO: 1555959 - DNA, 25 bp, Homo sapien
cagctgagatcatgccactgcactc

SEQ ID NO: 1555960 - DNA, 25 bp, Homo sapien
ggctcctatactcctagaggagctg

SEQ ID NO: 1555961 - DNA, 25 bp, Homo sapien
agctccttggctcctatactcctag

SEQ ID NO: 1555962 - DNA, 25 bp, Homo sapien
tggtgatatcgtgggatgccctgcc

SEQ ID NO: 1555963 - DNA, 25 bp, Homo sapien
ctagaggagctggtgatatcgtggg

SEQ ID NO: 1555964 - DNA, 25 bp, Homo sapien
tgaggatgcagagagacgccaagac

SEQ ID NO: 1555965 - DNA, 25 bp, Homo sapien
ctgaggatgcagagagacgccaaga

SEQ ID NO: 1555966 - DNA, 25 bp, Homo sapien
gaggatgcagagagacgccaagaca

SEQ ID NO: 1555967 - DNA, 25 bp, Homo sapien
tgggggctccacatgatcagagaag

SEQ ID NO: 1555968 - DNA, 25 bp, Homo sapien
ctgggggctccacatgatcagagaa

SEQ ID NO: 1555969 - DNA, 25 bp, Homo sapien
gggggctccacatgatcagagaagg

SEQ ID NO: 1555970 - DNA, 25 bp, Homo sapien
tcacagaacgtgtccccacatcttg

SEQ ID NO: 1555971 - DNA, 25 bp, Homo sapien
ggtcccatccgagggcaggatggca

SEQ ID NO: 1555972 - DNA, 25 bp, Homo sapien
gcacagcatcagataagcacccatg

SEQ ID NO: 1555973 - DNA, 25 bp, Homo sapien
cagtgctgcagagggtcacagaacg

SEQ ID NO: 1555974 - DNA, 25 bp, Homo sapien
gcctacagcagagtgcactggattt

SEQ ID NO: 1555975 - DNA, 25 bp, Homo sapien
tgcactggattttatagacgggttt

SEQ ID NO: 1555976 - DNA, 25 bp, Homo sapien
cagcctacagcagagtgcactggat

SEQ ID NO: 1555977 - DNA, 25 bp, Homo sapien
cactggattttatagacgggtttga

SEQ ID NO: 1555978 - DNA, 25 bp, Homo sapien
ggtagcctcagtatcatgccagtca

SEQ ID NO: 1555979 - DNA, 25 bp, Homo sapien
tgagccccgggagaccagtttgaat

SEQ ID NO: 1555980 - DNA, 25 bp, Homo sapien
gacagacaggttgagtgagacacac

SEQ ID NO: 1555981 - DNA, 25 bp, Homo sapien
catagttctgcacgccaaggtggcc

SEQ ID NO: 1555982 - DNA, 25 bp, Homo sapien
caggatagttaagaccaaaggacca

SEQ ID NO: 1555983 - DNA, 25 bp, Homo sapien
gaaccagagcagaatatttaccacc

SEQ ID NO: 1555984 - DNA, 25 bp, Homo sapien
caaatacattatggcccaggatagt

SEQ ID NO: 1555985 - DNA, 25 bp, Homo sapien
tgtgtgtaacccagtaataatgtca

SEQ ID NO: 1555986 - DNA, 25 bp, Homo sapien
agcggggtgagagaacaggcagggc

SEQ ID NO: 1555987 - DNA, 25 bp, Homo sapien
tgtcttgcttggatccaggaagcgg

SEQ ID NO: 1555988 - DNA, 25 bp, Homo sapien
ctcagcccgtgtcttgcttggatcc

SEQ ID NO: 1555989 - DNA, 25 bp, Homo sapien
cccgtgtcttgcttggatccaggaa

SEQ ID NO: 1555990 - DNA, 25 bp, Homo sapien
tgtggggtagagtgttgttttccag

SEQ ID NO: 1555991 - DNA, 25 bp, Homo sapien
gctgtggggtagagtgttgttttcc

SEQ ID NO: 1555992 - DNA, 25 bp, Homo sapien
ctgtggggtagagtgttgttttcca

SEQ ID NO: 1555993 - DNA, 25 bp, Homo sapien
ccctgtcttctccattggcctccat

SEQ ID NO: 1555994 - DNA, 25 bp, Homo sapien
tccctgtcttctccattggcctcca

SEQ ID NO: 1555995 - DNA, 25 bp, Homo sapien
ctccctgtcttctccattggcctcc

SEQ ID NO: 1555996 - DNA, 25 bp, Homo sapien
ccaggggaagagcagaccctgcttc

SEQ ID NO: 1555997 - DNA, 25 bp, Homo sapien
aggggaagagcagaccctgcttcca

SEQ ID NO: 1555998 - DNA, 25 bp, Homo sapien
cttccccaggggaagagcagaccct

SEQ ID NO: 1555999 - DNA, 25 bp, Homo sapien
ccccaggggaagagcagaccctgct

SEQ ID NO: 1556000 - DNA, 25 bp, Homo sapien
caggctttgtgtcagacactggtga

SEQ ID NO: 1556001 - DNA, 25 bp, Homo sapien
ggtcatttatccaggagaggtccac

SEQ ID NO: 1556002 - DNA, 25 bp, Homo sapien
tggcgggacccctgggactcacact

SEQ ID NO: 1556003 - DNA, 25 bp, Homo sapien
gagactgtgcgactcaggcacctga

SEQ ID NO: 1556004 - DNA, 25 bp, Homo sapien
tcagccactccttgtatcccatatt

SEQ ID NO: 1556005 - DNA, 25 bp, Homo sapien
cagcggagtgagctggtgatcagcc

SEQ ID NO: 1556006 - DNA, 25 bp, Homo sapien
ttgtatcccatattcctagaggagc

SEQ ID NO: 1556007 - DNA, 25 bp, Homo sapien
tgatgtcacggcatgtctggccctc

SEQ ID NO: 1556008 - DNA, 25 bp, Homo sapien
agagtcacaaacagaaagcggccaa

SEQ ID NO: 1556009 - DNA, 25 bp, Homo sapien
gagagtcacaaacagaaagcggcca

SEQ ID NO: 1556010 - DNA, 25 bp, Homo sapien
gagtcacaaacagaaagcggccaag

SEQ ID NO: 1556011 - DNA, 25 bp, Homo sapien
gtcacaaacagaaagcggccaagac

SEQ ID NO: 1556012 - DNA, 25 bp, Homo sapien
gatgtgcatcttccgtggggccgtc

SEQ ID NO: 1556013 - DNA, 25 bp, Homo sapien
tccagatgtgcatcttccgtggggc

SEQ ID NO: 1556014 - DNA, 25 bp, Homo sapien
tttccgtttaaatgaccaaatgaga

SEQ ID NO: 1556015 - DNA, 25 bp, Homo sapien
cctgctctcctagagtcacttaaaa

SEQ ID NO: 1556016 - DNA, 25 bp, Homo sapien
tgagcaaggccactcggcgcacgcg

SEQ ID NO: 1556017 - DNA, 25 bp, Homo sapien
gccactcggcgcacgcgcggtgcct

SEQ ID NO: 1556018 - DNA, 25 bp, Homo sapien
actcggcgcacgcgcggtgccttga

SEQ ID NO: 1556019 - DNA, 25 bp, Homo sapien
ggcgcacgcgcggtgccttgagcgc

SEQ ID NO: 1556020 - DNA, 25 bp, Homo sapien
aggtggaggatctggaccagtggtg

SEQ ID NO: 1556021 - DNA, 25 bp, Homo sapien
gaggatctggaccagtggtgtagga

SEQ ID NO: 1556022 - DNA, 25 bp, Homo sapien
agacacatgaggattccgggtttca

SEQ ID NO: 1556023 - DNA, 25 bp, Homo sapien
tgaggattccgggtttcagaaggac

SEQ ID NO: 1556024 - DNA, 25 bp, Homo sapien
actctgggcttgttgaactcaggtc

SEQ ID NO: 1556025 - DNA, 25 bp, Homo sapien
catcactttaggcaatagcactttc

SEQ ID NO: 1556026 - DNA, 25 bp, Homo sapien
tgccatttaaatcgacctggtgatt

SEQ ID NO: 1556027 - DNA, 25 bp, Homo sapien
tgtccaccagacaggaccgatacat

SEQ ID NO: 1556028 - DNA, 25 bp, Homo sapien
gaagactggttcattccctctggtg

SEQ ID NO: 1556029 - DNA, 25 bp, Homo sapien
agaagactggttcattccctctggt

SEQ ID NO: 1556030 - DNA, 25 bp, Homo sapien
agactggttcattccctctggtggc

SEQ ID NO: 1556031 - DNA, 25 bp, Homo sapien
aagactggttcattccctctggtgg

SEQ ID NO: 1556032 - DNA, 25 bp, Homo sapien
tcacctcagtgactgttcttcatcc

SEQ ID NO: 1556033 - DNA, 25 bp, Homo sapien
gtgatgaggtccgaccatgcagcgc

SEQ ID NO: 1556034 - DNA, 25 bp, Homo sapien
tgggaggtggccggtgacttggtac

SEQ ID NO: 1556035 - DNA, 25 bp, Homo sapien
tgtgaggaccggatgagaggatccc

SEQ ID NO: 1556036 - DNA, 25 bp, Homo sapien
ccatgcagcgctgctgtgaggaccg

SEQ ID NO: 1556037 - DNA, 25 bp, Homo sapien
ttcaggccctggacggctcatggag

SEQ ID NO: 1556038 - DNA, 25 bp, Homo sapien
tcaggccctggacggctcatggagg

SEQ ID NO: 1556039 - DNA, 25 bp, Homo sapien
tcgaaggcccaaggcctggatgatg

SEQ ID NO: 1556040 - DNA, 25 bp, Homo sapien
aggtcgaaggcccaaggcctggatg

SEQ ID NO: 1556041 - DNA, 25 bp, Homo sapien
ttattcttactacataagatccact

SEQ ID NO: 1556042 - DNA, 25 bp, Homo sapien
aattttattcttactacataagatc

SEQ ID NO: 1556043 - DNA, 25 bp, Homo sapien
attttattcttactacataagatcc

SEQ ID NO: 1556044 - DNA, 25 bp, Homo sapien
ttcttactacataagatccactcca

SEQ ID NO: 1556045 - DNA, 25 bp, Homo sapien
tgacggtggctattcaggaacaaag

SEQ ID NO: 1556046 - DNA, 25 bp, Homo sapien
cacagcaagatcacagtcaggataa

SEQ ID NO: 1556047 - DNA, 25 bp, Homo sapien
tttaatcaagtgactcctaggaggg

SEQ ID NO: 1556048 - DNA, 25 bp, Homo sapien
caaggcactttgtgctgaggacacg

SEQ ID NO: 1556049 - DNA, 25 bp, Homo sapien
tggtttatccatggccaattcctcc

SEQ ID NO: 1556050 - DNA, 25 bp, Homo sapien
gtgttaatcccccaggactgccata

SEQ ID NO: 1556051 - DNA, 25 bp, Homo sapien
ccagtcagcttggattaggtcctgc

SEQ ID NO: 1556052 - DNA, 25 bp, Homo sapien
aagtgttggcaggatggttttttct

SEQ ID NO: 1556053 - DNA, 25 bp, Homo sapien
ttagaaggctacattgcaggaagtc

SEQ ID NO: 1556054 - DNA, 25 bp, Homo sapien
aacccacggctgacttcttggaatt

SEQ ID NO: 1556055 - DNA, 25 bp, Homo sapien
catttgcataggatgtaactccact

SEQ ID NO: 1556056 - DNA, 25 bp, Homo sapien
tatgtctagggcaatatcattccca

SEQ ID NO: 1556057 - DNA, 25 bp, Homo sapien
ccaaagattttctagcatccagttc

SEQ ID NO: 1556058 - DNA, 25 bp, Homo sapien
agccaaagattttctagcatccagt

SEQ ID NO: 1556059 - DNA, 25 bp, Homo sapien
gccaaagattttctagcatccagtt

SEQ ID NO: 1556060 - DNA, 25 bp, Homo sapien
gtggaggcggctggtgtcagatgaa

SEQ ID NO: 1556061 - DNA, 25 bp, Homo sapien
tggaggcggctggtgtcagatgaac

SEQ ID NO: 1556062 - DNA, 25 bp, Homo sapien
ggtggaggcggctggtgtcagatga

SEQ ID NO: 1556063 - DNA, 25 bp, Homo sapien
cctattgccttgtcaatgtcattac

SEQ ID NO: 1556064 - DNA, 25 bp, Homo sapien
tgaaaagtgatattcctactgcgtt

SEQ ID NO: 1556065 - DNA, 25 bp, Homo sapien
tactgtaatcctacggcccttccag

SEQ ID NO: 1556066 - DNA, 25 bp, Homo sapien
cacctattgccttgtcaatgtcatt

SEQ ID NO: 1556067 - DNA, 25 bp, Homo sapien
atctggctaaagattggtgccgcat

SEQ ID NO: 1556068 - DNA, 25 bp, Homo sapien
ttatctggctaaagattggtgccgc

SEQ ID NO: 1556069 - DNA, 25 bp, Homo sapien
ggtgccgcatctgtcgagcaatgtc

SEQ ID NO: 1556070 - DNA, 25 bp, Homo sapien
gccgcatctgtcgagcaatgtcaac

SEQ ID NO: 1556071 - DNA, 25 bp, Homo sapien
agggttagataagctattttctagc

SEQ ID NO: 1556072 - DNA, 25 bp, Homo sapien
ttttctcaaagggttagataagcta

SEQ ID NO: 1556073 - DNA, 25 bp, Homo sapien
tcaaagggttagataagctattttc

SEQ ID NO: 1556074 - DNA, 25 bp, Homo sapien
ttagataagctattttctagcagcc

SEQ ID NO: 1556075 - DNA, 25 bp, Homo sapien
caaggagaagcacattcctcagggc

SEQ ID NO: 1556076 - DNA, 25 bp, Homo sapien
ggcattcagcctgctaaaaagaggg

SEQ ID NO: 1556077 - DNA, 25 bp, Homo sapien
gaatttaggtctggagaccagccag

SEQ ID NO: 1556078 - DNA, 25 bp, Homo sapien
tgagcttttcctagtgagtcacagc

SEQ ID NO: 1556079 - DNA, 25 bp, Homo sapien
tcagaatgcaccatcctaagaaagg

SEQ ID NO: 1556080 - DNA, 25 bp, Homo sapien
actgcctgaaagtgcccgggcttcg

SEQ ID NO: 1556081 - DNA, 25 bp, Homo sapien
gggtctcctgtaacactagcccagg

SEQ ID NO: 1556082 - DNA, 25 bp, Homo sapien
gggaccagtgagtcatgcagcctag

SEQ ID NO: 1556083 - DNA, 25 bp, Homo sapien
catgccctcaccacagttctttgtg

SEQ ID NO: 1556084 - DNA, 25 bp, Homo sapien
cctgatagcactgtggttgtcatct

SEQ ID NO: 1556085 - DNA, 25 bp, Homo sapien
tgccatgccctcaccacagttcttt

SEQ ID NO: 1556086 - DNA, 25 bp, Homo sapien
gtggttgtcatctgccatgccctca

SEQ ID NO: 1556087 - DNA, 25 bp, Homo sapien
ctccctgtctgctcccttggcctct

SEQ ID NO: 1556088 - DNA, 25 bp, Homo sapien
ctgctgtggggtacagcagtgtttt

SEQ ID NO: 1556089 - DNA, 25 bp, Homo sapien
tccttgctgctgtggggtacagcag

SEQ ID NO: 1556090 - DNA, 25 bp, Homo sapien
ccttggcctctgttccttgctgctg

SEQ ID NO: 1556091 - DNA, 25 bp, Homo sapien
cttctccctcgacagagcagaccct

SEQ ID NO: 1556092 - DNA, 25 bp, Homo sapien
ttctctgtgctatgtgccccaatcg

SEQ ID NO: 1556093 - DNA, 25 bp, Homo sapien
agagaagcggtacaccctccacctt

SEQ ID NO: 1556094 - DNA, 25 bp, Homo sapien
atcaggagagaagcggtacaccctc

SEQ ID NO: 1556095 - DNA, 25 bp, Homo sapien
gtaatcaggagagaagcggtacacc

SEQ ID NO: 1556096 - DNA, 25 bp, Homo sapien
ctacgatgcagcctcggggagccat

SEQ ID NO: 1556097 - DNA, 25 bp, Homo sapien
ggggctccgtgtgagcagaggagcc

SEQ ID NO: 1556098 - DNA, 25 bp, Homo sapien
gggctccgtgtgagcagaggagcct

SEQ ID NO: 1556099 - DNA, 25 bp, Homo sapien
ctggaaggtgtacccctcctccagc

SEQ ID NO: 1556100 - DNA, 25 bp, Homo sapien
gagatccaggaggtagtggcaggtg

SEQ ID NO: 1556101 - DNA, 25 bp, Homo sapien
ctggtgagatccaggaggtagtggc

SEQ ID NO: 1556102 - DNA, 25 bp, Homo sapien
tggaaggtgtacccctcctccagct

SEQ ID NO: 1556103 - DNA, 25 bp, Homo sapien
ggcacagcatcaggtaaggagtcat

SEQ ID NO: 1556104 - DNA, 25 bp, Homo sapien
ctggcacagcatcaggtaaggagtc

SEQ ID NO: 1556105 - DNA, 25 bp, Homo sapien
acagcatcaggtaaggagtcatggg

SEQ ID NO: 1556106 - DNA, 25 bp, Homo sapien
gcacagcatcaggtaaggagtcatg

SEQ ID NO: 1556107 - DNA, 25 bp, Homo sapien
acaaagcctgtcatccgaggtccgg

SEQ ID NO: 1556108 - DNA, 25 bp, Homo sapien
ggtcgtagaacttgtccccacatct

SEQ ID NO: 1556109 - DNA, 25 bp, Homo sapien
tttccacacgtctgggtcctggcca

SEQ ID NO: 1556110 - DNA, 25 bp, Homo sapien
agggcacgacggcatcatcatagca

SEQ ID NO: 1556111 - DNA, 25 bp, Homo sapien
ggtgggcctcagacaggtcacagaa

SEQ ID NO: 1556112 - DNA, 25 bp, Homo sapien
tcatgctgtccagaattctagaagg

SEQ ID NO: 1556113 - DNA, 25 bp, Homo sapien
gatgatggaaaatctcacagaaggg

SEQ ID NO: 1556114 - DNA, 25 bp, Homo sapien
tattatgatcctgtgctttgctcct

SEQ ID NO: 1556115 - DNA, 25 bp, Homo sapien
gatgttgtgactgggttcagggagc

SEQ ID NO: 1556116 - DNA, 25 bp, Homo sapien
ttgtgactgggttcagggagccatg

SEQ ID NO: 1556117 - DNA, 25 bp, Homo sapien
cccgatgttgtgactgggttcaggg

SEQ ID NO: 1556118 - DNA, 25 bp, Homo sapien
tgttgtgactgggttcagggagcca

SEQ ID NO: 1556119 - DNA, 25 bp, Homo sapien
ggcgatgatggaaccctttgagtca

SEQ ID NO: 1556120 - DNA, 25 bp, Homo sapien
ccctgagctagggttaggcctgtga

SEQ ID NO: 1556121 - DNA, 25 bp, Homo sapien
cattgggtgtgctcccactgatagg

SEQ ID NO: 1556122 - DNA, 25 bp, Homo sapien
tgatgtgccgggtccagagttcccg

SEQ ID NO: 1556123 - DNA, 25 bp, Homo sapien
aggtgccttctgtgcgcacacgtgg

SEQ ID NO: 1556124 - DNA, 25 bp, Homo sapien
ctgtgcgcacacgtggcatttgggc

SEQ ID NO: 1556125 - DNA, 25 bp, Homo sapien
caaggagggattcactacattggtg

SEQ ID NO: 1556126 - DNA, 25 bp, Homo sapien
tctgggcttgttggactgagatcca

SEQ ID NO: 1556127 - DNA, 25 bp, Homo sapien
tggagaccagatctgcaatctcttg

SEQ ID NO: 1556128 - DNA, 25 bp, Homo sapien
tctgtggtcctaactgcacttctgg

SEQ ID NO: 1556129 - DNA, 25 bp, Homo sapien
tgtggttgtgccagttgacactcca

SEQ ID NO: 1556130 - DNA, 25 bp, Homo sapien
gctctcagcaccaggcagtagtgag

SEQ ID NO: 1556131 - DNA, 25 bp, Homo sapien
tctcgtaggtgagatccggtcctct

SEQ ID NO: 1556132 - DNA, 25 bp, Homo sapien
gtgaagacgaaaggccagaagtgct

SEQ ID NO: 1556133 - DNA, 25 bp, Homo sapien
tcagtgtcgcttcgagcagtgctgc

SEQ ID NO: 1556134 - DNA, 25 bp, Homo sapien
tcccaggcgtccctcatggtgaaga

SEQ ID NO: 1556135 - DNA, 25 bp, Homo sapien
tgtcctgggccctcgcactgattca

SEQ ID NO: 1556136 - DNA, 25 bp, Homo sapien
gctgtcctgggccctcgcactgatt

SEQ ID NO: 1556137 - DNA, 25 bp, Homo sapien
acaggatggcctcacacctcttctg

SEQ ID NO: 1556138 - DNA, 25 bp, Homo sapien
tcacaggatggcctcacacctcttc

SEQ ID NO: 1556139 - DNA, 25 bp, Homo sapien
cttgcgcgctgcagccccagcgcca

SEQ ID NO: 1556140 - DNA, 25 bp, Homo sapien
ttgcgcgctgcagccccagcgccat

SEQ ID NO: 1556141 - DNA, 25 bp, Homo sapien
tgggaacatggccagataaaacccc

SEQ ID NO: 1556142 - DNA, 25 bp, Homo sapien
ggtcccatgggaacatggccagata

SEQ ID NO: 1556143 - DNA, 25 bp, Homo sapien
ctgaggacctagaacattttccagg

SEQ ID NO: 1556144 - DNA, 25 bp, Homo sapien
ggaaagctgaggacctagaacattt

SEQ ID NO: 1556145 - DNA, 25 bp, Homo sapien
tgcaggaggggatgcggtgcagcca

SEQ ID NO: 1556146 - DNA, 25 bp, Homo sapien
caggcccccgttggctgaagggcca

SEQ ID NO: 1556147 - DNA, 25 bp, Homo sapien
gagtgggtgcgcacggcggtgagat

SEQ ID NO: 1556148 - DNA, 25 bp, Homo sapien
ccaggacccgggtgcgagttacgag

SEQ ID NO: 1556149 - DNA, 25 bp, Homo sapien
ccaccagggacttcccaagagcatc

SEQ ID NO: 1556150 - DNA, 25 bp, Homo sapien
cagggacttcccaagagcatccttg

SEQ ID NO: 1556151 - DNA, 25 bp, Homo sapien
accagggacttcccaagagcatcct

SEQ ID NO: 1556152 - DNA, 25 bp, Homo sapien
ccagggacttcccaagagcatcctt

SEQ ID NO: 1556153 - DNA, 25 bp, Homo sapien
gggcactctgggctgcaagccgtac

SEQ ID NO: 1556154 - DNA, 25 bp, Homo sapien
ctcactgggcactctgggctgcaag

SEQ ID NO: 1556155 - DNA, 25 bp, Homo sapien
actgggcactctgggctgcaagccg

SEQ ID NO: 1556156 - DNA, 25 bp, Homo sapien
tcactgggcactctgggctgcaagc

SEQ ID NO: 1556157 - DNA, 25 bp, Homo sapien
cctcactactggctcctcatcttga

SEQ ID NO: 1556158 - DNA, 25 bp, Homo sapien
tggcgcctcgctcctctctgtggcg

SEQ ID NO: 1556159 - DNA, 25 bp, Homo sapien
ggtgcctctggcgcctcgctcctct

SEQ ID NO: 1556160 - DNA, 25 bp, Homo sapien
tgcctctggcgcctcgctcctctct

SEQ ID NO: 1556161 - DNA, 25 bp, Homo sapien
ctctggcgcctcgctcctctctgtg

SEQ ID NO: 1556162 - DNA, 25 bp, Homo sapien
ggacttttccttgcgcagctccgtg

SEQ ID NO: 1556163 - DNA, 25 bp, Homo sapien
gggacttttccttgcgcagctccgt

SEQ ID NO: 1556164 - DNA, 25 bp, Homo sapien
ttccttgcgcagctccgtggtcgac

SEQ ID NO: 1556165 - DNA, 25 bp, Homo sapien
cttttccttgcgcagctccgtggtc

SEQ ID NO: 1556166 - DNA, 25 bp, Homo sapien
ggtgggcgctgacgccgcgggcgaa

SEQ ID NO: 1556167 - DNA, 25 bp, Homo sapien
gccttgtccaggtgggcgctgacgc

SEQ ID NO: 1556168 - DNA, 25 bp, Homo sapien
agcgtgtgagccagctggtacagca

SEQ ID NO: 1556169 - DNA, 25 bp, Homo sapien
agggcagcgtgtgagccagctggta

SEQ ID NO: 1556170 - DNA, 25 bp, Homo sapien
gcaggtagctgatggtgaggcgcat

SEQ ID NO: 1556171 - DNA, 25 bp, Homo sapien
gcggtgcatgcgcaggtagctgatg

SEQ ID NO: 1556172 - DNA, 25 bp, Homo sapien
catgcgcaggtagctgatggtgagg

SEQ ID NO: 1556173 - DNA, 25 bp, Homo sapien
cggcgcagaggcggtgcatgcgcag

SEQ ID NO: 1556174 - DNA, 25 bp, Homo sapien
aagtgggggtacatcctagtggcct

SEQ ID NO: 1556175 - DNA, 25 bp, Homo sapien
ggtacatcctagtggcctggattcc

SEQ ID NO: 1556176 - DNA, 25 bp, Homo sapien
ccaaggaagtgggggtacatcctag

SEQ ID NO: 1556177 - DNA, 25 bp, Homo sapien
ggggtacatcctagtggcctggatt

SEQ ID NO: 1556178 - DNA, 25 bp, Homo sapien
ccatgtctccctcggcggtgagcac

SEQ ID NO: 1556179 - DNA, 25 bp, Homo sapien
gacattctccgacaggtaagccatg

SEQ ID NO: 1556180 - DNA, 25 bp, Homo sapien
ttgctgacattctccgacaggtaag

SEQ ID NO: 1556181 - DNA, 25 bp, Homo sapien
cttcaggtagcaggcatccagtggt

SEQ ID NO: 1556182 - DNA, 25 bp, Homo sapien
ggcagagaaaaggaacagataccaa

SEQ ID NO: 1556183 - DNA, 25 bp, Homo sapien
ggtaacgaggcagagaaaaggaaca

SEQ ID NO: 1556184 - DNA, 25 bp, Homo sapien
aggagtggggtaacgaggcagagaa

SEQ ID NO: 1556185 - DNA, 25 bp, Homo sapien
taccaggagtggggtaacgaggcag

SEQ ID NO: 1556186 - DNA, 25 bp, Homo sapien
gtcacaggggtggatgaaatcaaag

SEQ ID NO: 1556187 - DNA, 25 bp, Homo sapien
agatgctgtgtccaatgagctccag

SEQ ID NO: 1556188 - DNA, 25 bp, Homo sapien
cacaggggtggatgaaatcaaagat

SEQ ID NO: 1556189 - DNA, 25 bp, Homo sapien
caaagatgctgtgtccaatgagctc

SEQ ID NO: 1556190 - DNA, 25 bp, Homo sapien
ctggggggtcagggcgtcctgaagc

SEQ ID NO: 1556191 - DNA, 25 bp, Homo sapien
ggggggtcagggcgtcctgaagctc

SEQ ID NO: 1556192 - DNA, 25 bp, Homo sapien
gctggggggtcagggcgtcctgaag

SEQ ID NO: 1556193 - DNA, 25 bp, Homo sapien
tggggggtcagggcgtcctgaagct

SEQ ID NO: 1556194 - DNA, 25 bp, Homo sapien
cgcaaggagaagcaccgctccgtgg

SEQ ID NO: 1556195 - DNA, 25 bp, Homo sapien
aggagaagcaccgctccgtgggggc

SEQ ID NO: 1556196 - DNA, 25 bp, Homo sapien
agaagcaccgctccgtgggggcctc

SEQ ID NO: 1556197 - DNA, 25 bp, Homo sapien
gcgcaaggagaagcaccgctccgtg

SEQ ID NO: 1556198 - DNA, 25 bp, Homo sapien
ccaggtggccgccttgaggttgagg

SEQ ID NO: 1556199 - DNA, 25 bp, Homo sapien
cgcccgcggctggtgagtgtactct

SEQ ID NO: 1556200 - DNA, 25 bp, Homo sapien
cgcggctggtgagtgtactcttcat

SEQ ID NO: 1556201 - DNA, 25 bp, Homo sapien
ttgaggttgagggtgcgcccgcggc

SEQ ID NO: 1556202 - DNA, 25 bp, Homo sapien
gggatggcttcgcagatgagcacca

SEQ ID NO: 1556203 - DNA, 25 bp, Homo sapien
ctcatatgtccagagcagttcagca

SEQ ID NO: 1556204 - DNA, 25 bp, Homo sapien
cttgtaggccctcatatgtccagag

SEQ ID NO: 1556205 - DNA, 25 bp, Homo sapien
tgaggaaggcccctcggcccagtgg

SEQ ID NO: 1556206 - DNA, 25 bp, Homo sapien
tgaacttcatgtccaggctgtggcg

SEQ ID NO: 1556207 - DNA, 25 bp, Homo sapien
ctgtcgtcacagtaggtgaacttca

SEQ ID NO: 1556208 - DNA, 25 bp, Homo sapien
cacagtaggtgaacttcatgtccag

SEQ ID NO: 1556209 - DNA, 25 bp, Homo sapien
agtaggtgaacttcatgtccaggct

SEQ ID NO: 1556210 - DNA, 25 bp, Homo sapien
catcggagtccagcgcgtggatgta

SEQ ID NO: 1556211 - DNA, 25 bp, Homo sapien
ggaacagccgatcaggtcatcggga

SEQ ID NO: 1556212 - DNA, 25 bp, Homo sapien
tactcgtaggcggaacagccgatca

SEQ ID NO: 1556213 - DNA, 25 bp, Homo sapien
tcatcgggactatagccagccactt

SEQ ID NO: 1556214 - DNA, 25 bp, Homo sapien
cctggtgtcagctgggggccatgtg

SEQ ID NO: 1556215 - DNA, 25 bp, Homo sapien
gggccatgtggcagctggcttcgca

SEQ ID NO: 1556216 - DNA, 25 bp, Homo sapien
ctggggggtcctggtgtcagctggg

SEQ ID NO: 1556217 - DNA, 25 bp, Homo sapien
ggccatgtggcagctggcttcgcac

SEQ ID NO: 1556218 - DNA, 25 bp, Homo sapien
gggagagaaatatctggggactggg

SEQ ID NO: 1556219 - DNA, 25 bp, Homo sapien
aatatctggggactgggtatgaggg

SEQ ID NO: 1556220 - DNA, 25 bp, Homo sapien
aggtggggaggcagtgcatcctggg

SEQ ID NO: 1556221 - DNA, 25 bp, Homo sapien
gggcaaggaaggagacagttccttg

SEQ ID NO: 1556222 - DNA, 25 bp, Homo sapien
acacagacgatactctccgactggg

SEQ ID NO: 1556223 - DNA, 25 bp, Homo sapien
ccgggccaggaagcgatactgccct

SEQ ID NO: 1556224 - DNA, 25 bp, Homo sapien
aggaagcgatactgccctgttactg

SEQ ID NO: 1556225 - DNA, 25 bp, Homo sapien
taaaaaatggacacagacgatactc

SEQ ID NO: 1556226 - DNA, 25 bp, Homo sapien
cacttaagcagaggttcacgcaaaa

SEQ ID NO: 1556227 - DNA, 25 bp, Homo sapien
cacacaccggcatttacatggtgac

SEQ ID NO: 1556228 - DNA, 25 bp, Homo sapien
gatacacatgcatgctcatacgcac

SEQ ID NO: 1556229 - DNA, 25 bp, Homo sapien
tgtccacacatgcagatcaggccca

SEQ ID NO: 1556230 - DNA, 25 bp, Homo sapien
aaccatctatctttgcgtgtgtgtg

SEQ ID NO: 1556231 - DNA, 25 bp, Homo sapien
caactgcatgcgtgtgtcaaaaatt

SEQ ID NO: 1556232 - DNA, 25 bp, Homo sapien
tgagaatgggtcctaaccactttgc

SEQ ID NO: 1556233 - DNA, 25 bp, Homo sapien
agctggattgtgatagtggttacac

SEQ ID NO: 1556234 - DNA, 25 bp, Homo sapien
aatcctagctgtttacccaagagaa

SEQ ID NO: 1556235 - DNA, 25 bp, Homo sapien
tataacccatccattccaatcctag

SEQ ID NO: 1556236 - DNA, 25 bp, Homo sapien
gcggttgagtcttaaccactttgcc

SEQ ID NO: 1556237 - DNA, 25 bp, Homo sapien
taaaccacaacatgggccgggtgca

SEQ ID NO: 1556238 - DNA, 25 bp, Homo sapien
tgagtgacaagggcaaaactctgtc

SEQ ID NO: 1556239 - DNA, 25 bp, Homo sapien
ctgagtgacaagggcaaaactctgt

SEQ ID NO: 1556240 - DNA, 25 bp, Homo sapien
acaagggcaaaactctgtctcaaaa

SEQ ID NO: 1556241 - DNA, 25 bp, Homo sapien
ttgcagaaaataattgcccacattt

SEQ ID NO: 1556242 - DNA, 25 bp, Homo sapien
ggtgatgtcctattacagaaggcaa

SEQ ID NO: 1556243 - DNA, 25 bp, Homo sapien
tgatgtcctattacagaaggcaatg

SEQ ID NO: 1556244 - DNA, 25 bp, Homo sapien
ttatttgtctcctataagggtttca

SEQ ID NO: 1556245 - DNA, 25 bp, Homo sapien
aatgggtctgcgagagtgttgctcc

SEQ ID NO: 1556246 - DNA, 25 bp, Homo sapien
agggacagcaccactccggtctctt

SEQ ID NO: 1556247 - DNA, 25 bp, Homo sapien
tgtccttctgagagggggcgccccg

SEQ ID NO: 1556248 - DNA, 25 bp, Homo sapien
ttgctccgtttgctccagggacagc

SEQ ID NO: 1556249 - DNA, 25 bp, Homo sapien
gggtgcaggaaggcaaggatccggg

SEQ ID NO: 1556250 - DNA, 25 bp, Homo sapien
agggctgcagaaacggcgggggtca

SEQ ID NO: 1556251 - DNA, 25 bp, Homo sapien
gtcccaggaggcgacggaggtcagg

SEQ ID NO: 1556252 - DNA, 25 bp, Homo sapien
ggctgctactgaagccccatccagg

SEQ ID NO: 1556253 - DNA, 25 bp, Homo sapien
gggaaaaactgcccacatttggtca

SEQ ID NO: 1556254 - DNA, 25 bp, Homo sapien
cgattgttgcattattaggagagca

SEQ ID NO: 1556255 - DNA, 25 bp, Homo sapien
ttcttctgtgttgacgattgttgca

SEQ ID NO: 1556256 - DNA, 25 bp, Homo sapien
tagatgatgccggaattgaattgga

SEQ ID NO: 1556257 - DNA, 25 bp, Homo sapien
cctcagtgtctttcccggaggtgaa

SEQ ID NO: 1556258 - DNA, 25 bp, Homo sapien
ggtgaagagtctgtgcacattctcg

SEQ ID NO: 1556259 - DNA, 25 bp, Homo sapien
cggtgcccacaggtagttcatctgg

SEQ ID NO: 1556260 - DNA, 25 bp, Homo sapien
cacattctcggtgcccacaggtagt

SEQ ID NO: 1556261 - DNA, 25 bp, Homo sapien
caacctcatgtgtgtgagcttggaa

SEQ ID NO: 1556262 - DNA, 25 bp, Homo sapien
tttgccttagggaagccaactgcca

SEQ ID NO: 1556263 - DNA, 25 bp, Homo sapien
caaagcaaagtgagggattgaggcc

SEQ ID NO: 1556264 - DNA, 25 bp, Homo sapien
gactgtagccctgactgagagtttg

SEQ ID NO: 1556265 - DNA, 25 bp, Homo sapien
catggaagctccgagcacggggccg

SEQ ID NO: 1556266 - DNA, 25 bp, Homo sapien
gtggtaggccctgggtagctgctcg

SEQ ID NO: 1556267 - DNA, 25 bp, Homo sapien
cagcccccagaggtctgtggtaggc

SEQ ID NO: 1556268 - DNA, 25 bp, Homo sapien
tagctgctcgctggcgttgagctgg

SEQ ID NO: 1556269 - DNA, 25 bp, Homo sapien
cagcagctccactccctcgtcctcg

SEQ ID NO: 1556270 - DNA, 25 bp, Homo sapien
tcccagcagctccactccctcgtcc

SEQ ID NO: 1556271 - DNA, 25 bp, Homo sapien
ctcgtcctcgtcctctgagctctgg

SEQ ID NO: 1556272 - DNA, 25 bp, Homo sapien
cagctccactccctcgtcctcgtcc

SEQ ID NO: 1556273 - DNA, 25 bp, Homo sapien
cagaaagttttcgtgttctgggctg

SEQ ID NO: 1556274 - DNA, 25 bp, Homo sapien
agcagaaagttttcgtgttctgggc

SEQ ID NO: 1556275 - DNA, 25 bp, Homo sapien
gagcagaaagttttcgtgttctggg

SEQ ID NO: 1556276 - DNA, 25 bp, Homo sapien
gcagaaagttttcgtgttctgggct

SEQ ID NO: 1556277 - DNA, 25 bp, Homo sapien
taggtaatgagggccagagaatccc

SEQ ID NO: 1556278 - DNA, 25 bp, Homo sapien
taagccagctaggtaatgagggcca

SEQ ID NO: 1556279 - DNA, 25 bp, Homo sapien
cagtaggtttaagccagctaggtaa

SEQ ID NO: 1556280 - DNA, 25 bp, Homo sapien
tataaaacagtaggtttaagccagc

SEQ ID NO: 1556281 - DNA, 25 bp, Homo sapien
caggctttagtctcagctggcccac

SEQ ID NO: 1556282 - DNA, 25 bp, Homo sapien
tgactttctgtatgaccctcaacca

SEQ ID NO: 1556283 - DNA, 25 bp, Homo sapien
gactttctgtatgaccctcaaccag

SEQ ID NO: 1556284 - DNA, 25 bp, Homo sapien
agatcaggctttagtctcagctggc

SEQ ID NO: 1556285 - DNA, 25 bp, Homo sapien
tgtgttcctccagggcctcatcccc

SEQ ID NO: 1556286 - DNA, 25 bp, Homo sapien
ccttctccttcttccttcgcccgag

SEQ ID NO: 1556287 - DNA, 25 bp, Homo sapien
ttgtgttcctccagggcctcatccc

SEQ ID NO: 1556288 - DNA, 25 bp, Homo sapien
tctccttcttccttcgcccgaggac

SEQ ID NO: 1556289 - DNA, 25 bp, Homo sapien
gggctggtcctcctgtcagaaggaa

SEQ ID NO: 1556290 - DNA, 25 bp, Homo sapien
cctggggctggtcctcctgtcagaa

SEQ ID NO: 1556291 - DNA, 25 bp, Homo sapien
ctggggctggtcctcctgtcagaag

SEQ ID NO: 1556292 - DNA, 25 bp, Homo sapien
ctggtcctcctgtcagaaggaaact

SEQ ID NO: 1556293 - DNA, 25 bp, Homo sapien
ccaggggctcattcaggttcaggag

SEQ ID NO: 1556294 - DNA, 25 bp, Homo sapien
cattcaggttcaggagtggggtgct

SEQ ID NO: 1556295 - DNA, 25 bp, Homo sapien
gggctcattcaggttcaggagtggg

SEQ ID NO: 1556296 - DNA, 25 bp, Homo sapien
ctcattcaggttcaggagtggggtg

SEQ ID NO: 1556297 - DNA, 25 bp, Homo sapien
tgaaaccaccctgatcatactgttt

SEQ ID NO: 1556298 - DNA, 25 bp, Homo sapien
accttctcaatgaaaccaccctgat

SEQ ID NO: 1556299 - DNA, 25 bp, Homo sapien
catgcattatttccccgttacactt

SEQ ID NO: 1556300 - DNA, 25 bp, Homo sapien
tgcatgcattatttccccgttacac

SEQ ID NO: 1556301 - DNA, 25 bp, Homo sapien
gaagcgccaattggatcaggtgcat

SEQ ID NO: 1556302 - DNA, 25 bp, Homo sapien
ttagccagacgtaatgaagcgcact

SEQ ID NO: 1556303 - DNA, 25 bp, Homo sapien
gagaacttcctctgtgcttagccac

SEQ ID NO: 1556304 - DNA, 25 bp, Homo sapien
tatgggaccgacactccagtgagaa

SEQ ID NO: 1556305 - DNA, 25 bp, Homo sapien
tgcactccagactgggtgacaaagt

SEQ ID NO: 1556306 - DNA, 25 bp, Homo sapien
ctgcggtgagctgtgtttgtgccac

SEQ ID NO: 1556307 - DNA, 25 bp, Homo sapien
gtcgaggctgcggtgagctgtgttt

SEQ ID NO: 1556308 - DNA, 25 bp, Homo sapien
ccagactgggtgacaaagtgaaaac

SEQ ID NO: 1556309 - DNA, 25 bp, Homo sapien
catatttactgtcgggcgtggtggt

SEQ ID NO: 1556310 - DNA, 25 bp, Homo sapien
ttcaaaacatatttactgtcgggcg

SEQ ID NO: 1556311 - DNA, 25 bp, Homo sapien
caaaacatatttactgtcgggcgtg

SEQ ID NO: 1556312 - DNA, 25 bp, Homo sapien
aacatatttactgtcgggcgtggtg

SEQ ID NO: 1556313 - DNA, 25 bp, Homo sapien
aaacggcagtgacgtcttgggcacg

SEQ ID NO: 1556314 - DNA, 25 bp, Homo sapien
caggcattgctatttacttgctgtg

SEQ ID NO: 1556315 - DNA, 25 bp, Homo sapien
cctgggtggtgaggcaagcctgtct

SEQ ID NO: 1556316 - DNA, 25 bp, Homo sapien
ggtgaagaacccgagtccagagtca

SEQ ID NO: 1556317 - DNA, 25 bp, Homo sapien
tcctcgtctgagtacggagagagca

SEQ ID NO: 1556318 - DNA, 25 bp, Homo sapien
gtctgagtacggagagagcagtgag

SEQ ID NO: 1556319 - DNA, 25 bp, Homo sapien
ctcgtctgagtacggagagagcagt

SEQ ID NO: 1556320 - DNA, 25 bp, Homo sapien
gtcctcgtctgagtacggagagagc

SEQ ID NO: 1556321 - DNA, 25 bp, Homo sapien
gaaatgtgatcacgttgacccgtgg

SEQ ID NO: 1556322 - DNA, 25 bp, Homo sapien
tccccaaaataaagccaagagaggc

SEQ ID NO: 1556323 - DNA, 25 bp, Homo sapien
ccaagtattgagaaccccaagagaa

SEQ ID NO: 1556324 - DNA, 25 bp, Homo sapien
cccagaggtcactgagctgagacca

SEQ ID NO: 1556325 - DNA, 25 bp, Homo sapien
gcccagagcgcaaggggcagtcaga

SEQ ID NO: 1556326 - DNA, 25 bp, Homo sapien
tttggcctcaatcggaagtcactgg

SEQ ID NO: 1556327 - DNA, 25 bp, Homo sapien
tcagtgtccaggcaaagctgggggc

SEQ ID NO: 1556328 - DNA, 25 bp, Homo sapien
ggtctttggcctcaatcggaagtca

SEQ ID NO: 1556329 - DNA, 25 bp, Homo sapien
tggtgaggcccagaactagaaagag

SEQ ID NO: 1556330 - DNA, 25 bp, Homo sapien
tagaggcccagaaccagacaatttt

SEQ ID NO: 1556331 - DNA, 25 bp, Homo sapien
tgtggtctagaaccagtgcaggtca

SEQ ID NO: 1556332 - DNA, 25 bp, Homo sapien
agaaagtgagttctagccgggtgca

SEQ ID NO: 1556333 - DNA, 25 bp, Homo sapien
tattaccgatcaggagaactggaac

SEQ ID NO: 1556334 - DNA, 25 bp, Homo sapien
cactgaatataagatctggaaccgg

SEQ ID NO: 1556335 - DNA, 25 bp, Homo sapien
tataagataaggacagggtcgggca

SEQ ID NO: 1556336 - DNA, 25 bp, Homo sapien
caagggaacttacggaatgaggtct

SEQ ID NO: 1556337 - DNA, 25 bp, Homo sapien
ggaagcccagaatagatttaggagg

SEQ ID NO: 1556338 - DNA, 25 bp, Homo sapien
gggaagcccagaatagatttaggag

SEQ ID NO: 1556339 - DNA, 25 bp, Homo sapien
cccagaatagatttaggaggctggg

SEQ ID NO: 1556340 - DNA, 25 bp, Homo sapien
aagcccagaatagatttaggaggct

SEQ ID NO: 1556341 - DNA, 25 bp, Homo sapien
aagaaggaattgggtaagttcagtg

SEQ ID NO: 1556342 - DNA, 25 bp, Homo sapien
tagaatgggaaaacttaagactgaa

SEQ ID NO: 1556343 - DNA, 25 bp, Homo sapien
agtcaaggtaagtgcatgtctggag

SEQ ID NO: 1556344 - DNA, 25 bp, Homo sapien
gccccaggtgccccaaacatgtggg

SEQ ID NO: 1556345 - DNA, 25 bp, Homo sapien
ggcacatagatggtggcagacagct

SEQ ID NO: 1556346 - DNA, 25 bp, Homo sapien
tgggagaccaagagtagcaccatct

SEQ ID NO: 1556347 - DNA, 25 bp, Homo sapien
tgacaaaacagagcgagcagtgcct

SEQ ID NO: 1556348 - DNA, 25 bp, Homo sapien
tagcaccaatctggataggccactc

SEQ ID NO: 1556349 - DNA, 25 bp, Homo sapien
tgccgcacaagtgtcgtaaagcgcg

SEQ ID NO: 1556350 - DNA, 25 bp, Homo sapien
acaagtgtcgtaaagcgcgggccct

SEQ ID NO: 1556351 - DNA, 25 bp, Homo sapien
gccgctgccgcacaagtgtcgtaaa

SEQ ID NO: 1556352 - DNA, 25 bp, Homo sapien
gcgggccctgaaggcgcccttcacg

SEQ ID NO: 1556353 - DNA, 25 bp, Homo sapien
gccgcaaagcgacccctaccctggc

SEQ ID NO: 1556354 - DNA, 25 bp, Homo sapien
ctaccctggcaacggccgccagcgg

SEQ ID NO: 1556355 - DNA, 25 bp, Homo sapien
cccctaccctggcaacggccgccag

SEQ ID NO: 1556356 - DNA, 25 bp, Homo sapien
caaagcgacccctaccctggcaacg

SEQ ID NO: 1556357 - DNA, 25 bp, Homo sapien
gcacactcagtcctctcgccctccg

SEQ ID NO: 1556358 - DNA, 25 bp, Homo sapien
agagctccatcagccgggggttcgt

SEQ ID NO: 1556359 - DNA, 25 bp, Homo sapien
tcagagctccatcagccgggggttc

SEQ ID NO: 1556360 - DNA, 25 bp, Homo sapien
agctccatcagccgggggttcgtcc

SEQ ID NO: 1556361 - DNA, 25 bp, Homo sapien
gcagcccggcggtaataacccttga

SEQ ID NO: 1556362 - DNA, 25 bp, Homo sapien
gccaggctgcggttgccatagtaga

SEQ ID NO: 1556363 - DNA, 25 bp, Homo sapien
gaacttgatggcgttctcgtagtcc

SEQ ID NO: 1556364 - DNA, 25 bp, Homo sapien
atagcactcagtgcgcaggtaggcc

SEQ ID NO: 1556365 - DNA, 25 bp, Homo sapien
aggcctggcccactccccagctcac

SEQ ID NO: 1556366 - DNA, 25 bp, Homo sapien
gactgcagactcgtgcttctcagcc

SEQ ID NO: 1556367 - DNA, 25 bp, Homo sapien
caggccagcggccaacagccaggac

SEQ ID NO: 1556368 - DNA, 25 bp, Homo sapien
tctcagccccgcgaccaactgcaga

SEQ ID NO: 1556369 - DNA, 25 bp, Homo sapien
cgcgaccaactgcagactcgcggct

SEQ ID NO: 1556370 - DNA, 25 bp, Homo sapien
atccggaggcggccactcctcttgt

SEQ ID NO: 1556371 - DNA, 25 bp, Homo sapien
gcagctcgtgacctttactcaacca

SEQ ID NO: 1556372 - DNA, 25 bp, Homo sapien
tgagccctgcagctcgtgaccttta

SEQ ID NO: 1556373 - DNA, 25 bp, Homo sapien
gactgtccttggttactcattactg

SEQ ID NO: 1556374 - DNA, 25 bp, Homo sapien
ctagcatccagcaagcaggaggtag

SEQ ID NO: 1556375 - DNA, 25 bp, Homo sapien
cccagggcacatggagcctgaagaa

SEQ ID NO: 1556376 - DNA, 25 bp, Homo sapien
aagcaggaggtagagtcttgggaag

SEQ ID NO: 1556377 - DNA, 25 bp, Homo sapien
ttgggaagatgaactgccccagggc

SEQ ID NO: 1556378 - DNA, 25 bp, Homo sapien
tcctggctgcaatctcataagagat

SEQ ID NO: 1556379 - DNA, 25 bp, Homo sapien
gcatctggccgaatgtttactatct

SEQ ID NO: 1556380 - DNA, 25 bp, Homo sapien
aaaaggcaggatttagaaccagaca

SEQ ID NO: 1556381 - DNA, 25 bp, Homo sapien
aaatcgaatggagacctacttccta

SEQ ID NO: 1556382 - DNA, 25 bp, Homo sapien
tgaaaggaaactccacgtgggcgcc

SEQ ID NO: 1556383 - DNA, 25 bp, Homo sapien
tcagctttgggacatagcaagttcc

SEQ ID NO: 1556384 - DNA, 25 bp, Homo sapien
cctctggtggaaagcctggcagcgt

SEQ ID NO: 1556385 - DNA, 25 bp, Homo sapien
gcaagttcccagtgaaaggagccct

SEQ ID NO: 1556386 - DNA, 25 bp, Homo sapien
catcaatcttagctatgagcgcgct

SEQ ID NO: 1556387 - DNA, 25 bp, Homo sapien
gatggtgcaaccctagacgtattta

SEQ ID NO: 1556388 - DNA, 25 bp, Homo sapien
gacgtatttaactgccgagccttgg

SEQ ID NO: 1556389 - DNA, 25 bp, Homo sapien
gcacagcaaagctgcccgcatgggt

SEQ ID NO: 1556390 - DNA, 25 bp, Homo sapien
agtccaccacggagcgcttgtgctc

SEQ ID NO: 1556391 - DNA, 25 bp, Homo sapien
tcctggtatttcattttggcatcct

SEQ ID NO: 1556392 - DNA, 25 bp, Homo sapien
gttgcactcctggtatttcattttg

SEQ ID NO: 1556393 - DNA, 25 bp, Homo sapien
tcgatgtccagcgagtccaccacgg

SEQ ID NO: 1556394 - DNA, 25 bp, Homo sapien
cccagctttgggctgtggatggagc

SEQ ID NO: 1556395 - DNA, 25 bp, Homo sapien
aggcccagctttgggctgtggatgg

SEQ ID NO: 1556396 - DNA, 25 bp, Homo sapien
tgggaagcgtgaggcccagctttgg

SEQ ID NO: 1556397 - DNA, 25 bp, Homo sapien
agctttgggctgtggatggagcgcc

SEQ ID NO: 1556398 - DNA, 25 bp, Homo sapien
gaaactgattgtcactttgccgtct

SEQ ID NO: 1556399 - DNA, 25 bp, Homo sapien
catgaaactgattgtcactttgccg

SEQ ID NO: 1556400 - DNA, 25 bp, Homo sapien
gcatgagctccttcatgaaactgat

SEQ ID NO: 1556401 - DNA, 25 bp, Homo sapien
ctgattgtcactttgccgtcttcaa

SEQ ID NO: 1556402 - DNA, 25 bp, Homo sapien
gtgatatctgctcagttctcccaag

SEQ ID NO: 1556403 - DNA, 25 bp, Homo sapien
cactgcggatataatggatgcctaa

SEQ ID NO: 1556404 - DNA, 25 bp, Homo sapien
actgccccaggccataagattctta

SEQ ID NO: 1556405 - DNA, 25 bp, Homo sapien
tccgggaaatgattaagccccacaa

SEQ ID NO: 1556406 - DNA, 25 bp, Homo sapien
ggcatgataccagatagaaactcac

SEQ ID NO: 1556407 - DNA, 25 bp, Homo sapien
ttttcaggcagaccaaagctgagag

SEQ ID NO: 1556408 - DNA, 25 bp, Homo sapien
gcagacgtgcactgtaagaaatgct

SEQ ID NO: 1556409 - DNA, 25 bp, Homo sapien
gagaattagtctacagcagacgtgc

SEQ ID NO: 1556410 - DNA, 25 bp, Homo sapien
taagaaaatgcaggcggcatccact

SEQ ID NO: 1556411 - DNA, 25 bp, Homo sapien
gctggcaatgcaaagggacctaaat

SEQ ID NO: 1556412 - DNA, 25 bp, Homo sapien
gactggcgtgacagatgaggactcc

SEQ ID NO: 1556413 - DNA, 25 bp, Homo sapien
gactgtctcgccctaaagatgaaaa

SEQ ID NO: 1556414 - DNA, 25 bp, Homo sapien
tgtgcagtgccgaagcattgcgatt

SEQ ID NO: 1556415 - DNA, 25 bp, Homo sapien
cactggtgctttcaacggacgctga

SEQ ID NO: 1556416 - DNA, 25 bp, Homo sapien
cagattttccggatggcctgtggac

SEQ ID NO: 1556417 - DNA, 25 bp, Homo sapien
tggactgcccatgagacgctgctgg

SEQ ID NO: 1556418 - DNA, 25 bp, Homo sapien
tctttgagtgtggtttccacgagcg

SEQ ID NO: 1556419 - DNA, 25 bp, Homo sapien
ggacctctttgacctgtaccagaat

SEQ ID NO: 1556420 - DNA, 25 bp, Homo sapien
aggacctctttgacctgtaccagaa

SEQ ID NO: 1556421 - DNA, 25 bp, Homo sapien
tggtttccacgagcgtgctcagctt

SEQ ID NO: 1556422 - DNA, 25 bp, Homo sapien
gaggtggatccgtgagttcctgagc

SEQ ID NO: 1556423 - DNA, 25 bp, Homo sapien
gaagggtaagagttcacagtagacc

SEQ ID NO: 1556424 - DNA, 25 bp, Homo sapien
gagggacgggccgagagagagacgt

SEQ ID NO: 1556425 - DNA, 25 bp, Homo sapien
agcagggaacacaaacgaagaccaa

SEQ ID NO: 1556426 - DNA, 25 bp, Homo sapien
gggtaaaccgttgagctcgaatatg

SEQ ID NO: 1556427 - DNA, 25 bp, Homo sapien
ggtcatagaactggccatgggtgtc

SEQ ID NO: 1556428 - DNA, 25 bp, Homo sapien
gctcgaatatgttgaggaggtcata

SEQ ID NO: 1556429 - DNA, 25 bp, Homo sapien
tctccgagggtaaaccgttgagctc

SEQ ID NO: 1556430 - DNA, 25 bp, Homo sapien
caaggtcacgtcttttcctggcaag

SEQ ID NO: 1556431 - DNA, 25 bp, Homo sapien
ccaaggtcacgtcttttcctggcaa

SEQ ID NO: 1556432 - DNA, 25 bp, Homo sapien
ctctcctttccaaggtcacgtcttt

SEQ ID NO: 1556433 - DNA, 25 bp, Homo sapien
agtagtatggcactgaggaccctgc

SEQ ID NO: 1556434 - DNA, 25 bp, Homo sapien
agagcttggccgctgagcctcagta

SEQ ID NO: 1556435 - DNA, 25 bp, Homo sapien
tcaacaatgcataggcctagtggcc

SEQ ID NO: 1556436 - DNA, 25 bp, Homo sapien
ggctcaagggatctgggtttctaat

SEQ ID NO: 1556437 - DNA, 25 bp, Homo sapien
gggtgaggatcacttctacagagaa

SEQ ID NO: 1556438 - DNA, 25 bp, Homo sapien
caggagcttgaagccgaaaagggtg

SEQ ID NO: 1556439 - DNA, 25 bp, Homo sapien
gagcctcggtccacaaagtcaccat

SEQ ID NO: 1556440 - DNA, 25 bp, Homo sapien
aaagtgatctgggtacaggagcttg

SEQ ID NO: 1556441 - DNA, 25 bp, Homo sapien
cttccactttggccacccaagaagc

SEQ ID NO: 1556442 - DNA, 25 bp, Homo sapien
tccactttggccacccaagaagctg

SEQ ID NO: 1556443 - DNA, 25 bp, Homo sapien
actacgggtgcacggtgccaccatg

SEQ ID NO: 1556444 - DNA, 25 bp, Homo sapien
cactttggccacccaagaagctggg

SEQ ID NO: 1556445 - DNA, 25 bp, Homo sapien
tcgaacacctcgctaaagagctcgt

SEQ ID NO: 1556446 - DNA, 25 bp, Homo sapien
ctcaccctcgaaaccgtagatctgg

SEQ ID NO: 1556447 - DNA, 25 bp, Homo sapien
gagctcgtacatctgggctgtgtac

SEQ ID NO: 1556448 - DNA, 25 bp, Homo sapien
gggccaacgggagccactcgaacac

SEQ ID NO: 1556449 - DNA, 25 bp, Homo sapien
tcaattttccggatgtcatccaggg

SEQ ID NO: 1556450 - DNA, 25 bp, Homo sapien
catccagggtgacaccgtcttcact

SEQ ID NO: 1556451 - DNA, 25 bp, Homo sapien
cactgaacaggcctccgtgcatgat

SEQ ID NO: 1556452 - DNA, 25 bp, Homo sapien
gggttgtcgattccgctcaattttc

SEQ ID NO: 1556453 - DNA, 25 bp, Homo sapien
gctcagacccgctgtttcttgccaa

SEQ ID NO: 1556454 - DNA, 25 bp, Homo sapien
cgtgtgcacctgtgggtgaactctc

SEQ ID NO: 1556455 - DNA, 25 bp, Homo sapien
tggcccaagtcgcaggtgaggaaac

SEQ ID NO: 1556456 - DNA, 25 bp, Homo sapien
tgaagtgtgcccgtcactagcacag

SEQ ID NO: 1556457 - DNA, 25 bp, Homo sapien
gctgtggatctgaccagagcaggtc

SEQ ID NO: 1556458 - DNA, 25 bp, Homo sapien
ctgtggatctgaccagagcaggtca

SEQ ID NO: 1556459 - DNA, 25 bp, Homo sapien
tgtggatctgaccagagcaggtcac

SEQ ID NO: 1556460 - DNA, 25 bp, Homo sapien
agagaagacggtgacacagcggcct

SEQ ID NO: 1556461 - DNA, 25 bp, Homo sapien
ggatgatatagtccaggttgttctc

SEQ ID NO: 1556462 - DNA, 25 bp, Homo sapien
ttgacttcgtggctgcggatgatat

SEQ ID NO: 1556463 - DNA, 25 bp, Homo sapien
ttggtgacgtcaggcccaaactgac

SEQ ID NO: 1556464 - DNA, 25 bp, Homo sapien
ggtggaactgaggccgtaggtcaga

SEQ ID NO: 1556465 - DNA, 25 bp, Homo sapien
ctggaggtggatgtaggaggctttg

SEQ ID NO: 1556466 - DNA, 25 bp, Homo sapien
aggtggatgtaggaggctttgttcc

SEQ ID NO: 1556467 - DNA, 25 bp, Homo sapien
aactgaggccgtaggtcagagccct

SEQ ID NO: 1556468 - DNA, 25 bp, Homo sapien
gcaggggccctgaggggtgactcac

SEQ ID NO: 1556469 - DNA, 25 bp, Homo sapien
gggtctcagcctccttgtccccagg

SEQ ID NO: 1556470 - DNA, 25 bp, Homo sapien
ccttgtccccaggccgggatggaag

SEQ ID NO: 1556471 - DNA, 25 bp, Homo sapien
cagggtctcagcctccttgtcccca

SEQ ID NO: 1556472 - DNA, 25 bp, Homo sapien
cctgagcacccaccggcagaaccta

SEQ ID NO: 1556473 - DNA, 25 bp, Homo sapien
gtcagaacagagcccctgagcaccc

SEQ ID NO: 1556474 - DNA, 25 bp, Homo sapien
cacccaccggcagaacctacccctg

SEQ ID NO: 1556475 - DNA, 25 bp, Homo sapien
agagcccctgagcacccaccggcag

SEQ ID NO: 1556476 - DNA, 25 bp, Homo sapien
cagcagcgtgttggcataggccatg

SEQ ID NO: 1556477 - DNA, 25 bp, Homo sapien
tggcataggccatgggcttgacgtt

SEQ ID NO: 1556478 - DNA, 25 bp, Homo sapien
tcacatcattcctagctgcagcagc

SEQ ID NO: 1556479 - DNA, 25 bp, Homo sapien
ccatgggcttgacgttgggatgagg

SEQ ID NO: 1556480 - DNA, 25 bp, Homo sapien
ccaacattgccctggggcggggcct

SEQ ID NO: 1556481 - DNA, 25 bp, Homo sapien
gtccaacattgccctggggcggggc

SEQ ID NO: 1556482 - DNA, 25 bp, Homo sapien
tccaacattgccctggggcggggcc

SEQ ID NO: 1556483 - DNA, 25 bp, Homo sapien
cgaggacggcctccccacagaatgc

SEQ ID NO: 1556484 - DNA, 25 bp, Homo sapien
gtcttcctatggcggggccctattg

SEQ ID NO: 1556485 - DNA, 25 bp, Homo sapien
cttgagtgggggaggagccatgcaa

SEQ ID NO: 1556486 - DNA, 25 bp, Homo sapien
cctatggcggggccctattgcttga

SEQ ID NO: 1556487 - DNA, 25 bp, Homo sapien
tagccccaccatggggctataggag

SEQ ID NO: 1556488 - DNA, 25 bp, Homo sapien
ccagcctagccccaccatggggcta

SEQ ID NO: 1556489 - DNA, 25 bp, Homo sapien
gcctagccccaccatggggctatag

SEQ ID NO: 1556490 - DNA, 25 bp, Homo sapien
ctagccccaccatggggctatagga

SEQ ID NO: 1556491 - DNA, 25 bp, Homo sapien
taattacagacataaaatagctggg

SEQ ID NO: 1556492 - DNA, 25 bp, Homo sapien
atttaattacagacataaaatagct

SEQ ID NO: 1556493 - DNA, 25 bp, Homo sapien
taacatatttaattacagacataaa

SEQ ID NO: 1556494 - DNA, 25 bp, Homo sapien
tttaacatatttaattacagacata

SEQ ID NO: 1556495 - DNA, 25 bp, Homo sapien
caactgggagtgagacaagggtcct

SEQ ID NO: 1556496 - DNA, 25 bp, Homo sapien
gagatgcgcgcctcatcgtgtgatg

SEQ ID NO: 1556497 - DNA, 25 bp, Homo sapien
tctggtctccctggatgacgggaga

SEQ ID NO: 1556498 - DNA, 25 bp, Homo sapien
ctgtgactaagagccaactgggagt

SEQ ID NO: 1556499 - DNA, 25 bp, Homo sapien
tcatcacaaacgtccatgtcaaaga

SEQ ID NO: 1556500 - DNA, 25 bp, Homo sapien
gcgggaggaacgtgatcatcacaaa

SEQ ID NO: 1556501 - DNA, 25 bp, Homo sapien
taaacttgtactgtggcaacaaacc

SEQ ID NO: 1556502 - DNA, 25 bp, Homo sapien
tctgcaacatacatcacgagcatgg

SEQ ID NO: 1556503 - DNA, 25 bp, Homo sapien
cagcaaaagagttccagactaatag

SEQ ID NO: 1556504 - DNA, 25 bp, Homo sapien
gattccttacataagctccagacag

SEQ ID NO: 1556505 - DNA, 25 bp, Homo sapien
gctcaccaccacataattctagatg

SEQ ID NO: 1556506 - DNA, 25 bp, Homo sapien
tctggttttagcagtgctcaccacc

SEQ ID NO: 1556507 - DNA, 25 bp, Homo sapien
cagggtccctgagataatggtttcc

SEQ ID NO: 1556508 - DNA, 25 bp, Homo sapien
tcgtagccgtccacaaagatgtaat

SEQ ID NO: 1556509 - DNA, 25 bp, Homo sapien
tggtttccaaactgtatcgtagccg

SEQ ID NO: 1556510 - DNA, 25 bp, Homo sapien
tattagaccagaccaccatgtgtca

SEQ ID NO: 1556511 - DNA, 25 bp, Homo sapien
gcacctgtaatcctcgctgagatcg

SEQ ID NO: 1556512 - DNA, 25 bp, Homo sapien
ctgtaatcctcgctgagatcgcacc

SEQ ID NO: 1556513 - DNA, 25 bp, Homo sapien
cacctgtaatcctcgctgagatcgc

SEQ ID NO: 1556514 - DNA, 25 bp, Homo sapien
acctgtaatcctcgctgagatcgca

SEQ ID NO: 1556515 - DNA, 25 bp, Homo sapien
ctggacctgcgtcaacgtctcctgg

SEQ ID NO: 1556516 - DNA, 25 bp, Homo sapien
ggacctgcgtcaacgtctcctggga

SEQ ID NO: 1556517 - DNA, 25 bp, Homo sapien
tacacattctcgggcccaccctaga

SEQ ID NO: 1556518 - DNA, 25 bp, Homo sapien
aggtcctggacctgcgtcaacgtct

SEQ ID NO: 1556519 - DNA, 25 bp, Homo sapien
gagcagccgcgtaaaggccttgaga

SEQ ID NO: 1556520 - DNA, 25 bp, Homo sapien
tccgcgcagtccatgagatttatcc

SEQ ID NO: 1556521 - DNA, 25 bp, Homo sapien
atttatccagggctggcgcgtccca

SEQ ID NO: 1556522 - DNA, 25 bp, Homo sapien
ttcttggtgcaggaaacaggaccct

SEQ ID NO: 1556523 - DNA, 25 bp, Homo sapien
tcagggacacccagatgtagaagct

SEQ ID NO: 1556524 - DNA, 25 bp, Homo sapien
gactgtcccagtcctatgtcaggga

SEQ ID NO: 1556525 - DNA, 25 bp, Homo sapien
gaccaggctgggtgtaccttgagct

SEQ ID NO: 1556526 - DNA, 25 bp, Homo sapien
tggacagtgacccacccactgagga

SEQ ID NO: 1556527 - DNA, 25 bp, Homo sapien
gaatgaggccagtatcccgagtaag

SEQ ID NO: 1556528 - DNA, 25 bp, Homo sapien
gtgatgccggtaccctctggaagga

SEQ ID NO: 1556529 - DNA, 25 bp, Homo sapien
ctttgatgaacgagaaggcccaggc

SEQ ID NO: 1556530 - DNA, 25 bp, Homo sapien
taagtcctggtcctacgctgcaagg

SEQ ID NO: 1556531 - DNA, 25 bp, Homo sapien
ggattacaaaagtgcccatctcata

SEQ ID NO: 1556532 - DNA, 25 bp, Homo sapien
gctgatgctcttgtggcgtcccagg

SEQ ID NO: 1556533 - DNA, 25 bp, Homo sapien
tgcccatctcatagctgagcccttg

SEQ ID NO: 1556534 - DNA, 25 bp, Homo sapien
gaactgaatttaatcctccttgagt

SEQ ID NO: 1556535 - DNA, 25 bp, Homo sapien
tcaagcccttcatgtgttgcagccc

SEQ ID NO: 1556536 - DNA, 25 bp, Homo sapien
ggcctgggccttcttatccatcaag

SEQ ID NO: 1556537 - DNA, 25 bp, Homo sapien
aggacggcttcaacatccacctgct

SEQ ID NO: 1556538 - DNA, 25 bp, Homo sapien
tgttgcagcccgaacgtgcccaggg

SEQ ID NO: 1556539 - DNA, 25 bp, Homo sapien
ctcaggaacctcgtgtcctgtgcat

SEQ ID NO: 1556540 - DNA, 25 bp, Homo sapien
caggaacctcgtgtcctgtgcatgg

SEQ ID NO: 1556541 - DNA, 25 bp, Homo sapien
cacggcctgcatgggcccatcatcc

SEQ ID NO: 1556542 - DNA, 25 bp, Homo sapien
ggaacctcgtgtcctgtgcatggtc

SEQ ID NO: 1556543 - DNA, 25 bp, Homo sapien
atcttgatgtccaagctctcctggg

SEQ ID NO: 1556544 - DNA, 25 bp, Homo sapien
tgcctcctcgatcttgatgtccaag

SEQ ID NO: 1556545 - DNA, 25 bp, Homo sapien
ctcatctgcctcctcgatcttgatg

SEQ ID NO: 1556546 - DNA, 25 bp, Homo sapien
tcctcgatcttgatgtccaagctct

SEQ ID NO: 1556547 - DNA, 25 bp, Homo sapien
tgcctggagcgctgtgtacagcctg

SEQ ID NO: 1556548 - DNA, 25 bp, Homo sapien
tgctgcctggagcgctgtgtacagc

SEQ ID NO: 1556549 - DNA, 25 bp, Homo sapien
gctgctgcctggagcgctgtgtaca

SEQ ID NO: 1556550 - DNA, 25 bp, Homo sapien
ctgcctggagcgctgtgtacagcct

SEQ ID NO: 1556551 - DNA, 25 bp, Homo sapien
aggctttccgcgggaccacagtgtc

SEQ ID NO: 1556552 - DNA, 25 bp, Homo sapien
caggctttccgcgggaccacagtgt

SEQ ID NO: 1556553 - DNA, 25 bp, Homo sapien
tcaggctttccgcgggaccacagtg

SEQ ID NO: 1556554 - DNA, 25 bp, Homo sapien
caacttgcgacttgcattggtctgt

SEQ ID NO: 1556555 - DNA, 25 bp, Homo sapien
cattggtctgtgttgtatgagtggc

SEQ ID NO: 1556556 - DNA, 25 bp, Homo sapien
tggtctgtgttgtatgagtggccat

SEQ ID NO: 1556557 - DNA, 25 bp, Homo sapien
cccaaagaggcaacttgcgacttgc

SEQ ID NO: 1556558 - DNA, 25 bp, Homo sapien
gcagcaggaagtagccagaatacat

SEQ ID NO: 1556559 - DNA, 25 bp, Homo sapien
gattttttaaaagcagcaggaagta

SEQ ID NO: 1556560 - DNA, 25 bp, Homo sapien
agcagcaggaagtagccagaataca

SEQ ID NO: 1556561 - DNA, 25 bp, Homo sapien
tttttaaaagcagcaggaagtagcc

SEQ ID NO: 1556562 - DNA, 25 bp, Homo sapien
gctggcaaagcacaagaagatgcgg

SEQ ID NO: 1556563 - DNA, 25 bp, Homo sapien
tggcaaagcacaagaagatgcggct

SEQ ID NO: 1556564 - DNA, 25 bp, Homo sapien
gcaaagcacaagaagatgcggctgt

SEQ ID NO: 1556565 - DNA, 25 bp, Homo sapien
gtggctggcaaagcacaagaagatg

SEQ ID NO: 1556566 - DNA, 25 bp, Homo sapien
ctggtgactaggctcccggttccaa

SEQ ID NO: 1556567 - DNA, 25 bp, Homo sapien
taggctcccggttccaacaaatcca

SEQ ID NO: 1556568 - DNA, 25 bp, Homo sapien
tcccggttccaacaaatccattgac

SEQ ID NO: 1556569 - DNA, 25 bp, Homo sapien
ggtgactaggctcccggttccaaca

SEQ ID NO: 1556570 - DNA, 25 bp, Homo sapien
cacctcgaaaatggtgatgggattt

SEQ ID NO: 1556571 - DNA, 25 bp, Homo sapien
tctcgcacctcgaaaatggtgatgg

SEQ ID NO: 1556572 - DNA, 25 bp, Homo sapien
gggtctcgcacctcgaaaatggtga

SEQ ID NO: 1556573 - DNA, 25 bp, Homo sapien
tttggaggggtctcgcacctcgaaa

SEQ ID NO: 1556574 - DNA, 25 bp, Homo sapien
tgtcatacttctcgtggttcatgcc

SEQ ID NO: 1556575 - DNA, 25 bp, Homo sapien
gatgatcttgaagctgttgtcatac

SEQ ID NO: 1556576 - DNA, 25 bp, Homo sapien
ttggctggggcactaagcagttggt

SEQ ID NO: 1556577 - DNA, 25 bp, Homo sapien
gttgtcatacttctcgtggttcatg

SEQ ID NO: 1556578 - DNA, 25 bp, Homo sapien
agtcagaggagacgacctggtgctc

SEQ ID NO: 1556579 - DNA, 25 bp, Homo sapien
ctgtcgaagtcagaggagacgacct

SEQ ID NO: 1556580 - DNA, 25 bp, Homo sapien
tcgaagtcagaggagacgacctggt

SEQ ID NO: 1556581 - DNA, 25 bp, Homo sapien
gtcagaggagacgacctggtgctca

SEQ ID NO: 1556582 - DNA, 25 bp, Homo sapien
gcttcacaaagtggttgttgagggc

SEQ ID NO: 1556583 - DNA, 25 bp, Homo sapien
ccatgaggtccaccatactgttgct

SEQ ID NO: 1556584 - DNA, 25 bp, Homo sapien
atgaggtccaccatactgttgctgt

SEQ ID NO: 1556585 - DNA, 25 bp, Homo sapien
gggccatgaggtccaccatactgtt

SEQ ID NO: 1556586 - DNA, 25 bp, Homo sapien
ttgttccaattatctttccaaggac

SEQ ID NO: 1556587 - DNA, 25 bp, Homo sapien
cttttgttccaattatctttccaag

SEQ ID NO: 1556588 - DNA, 25 bp, Homo sapien
ctcttttgttccaattatctttcca

SEQ ID NO: 1556589 - DNA, 25 bp, Homo sapien
aagcctcttttgttccaattatctt

SEQ ID NO: 1556590 - DNA, 25 bp, Homo sapien
ctacgggcccgcgaatctctcgtcc

SEQ ID NO: 1556591 - DNA, 25 bp, Homo sapien
tacgggcccgcgaatctctcgtccc

SEQ ID NO: 1556592 - DNA, 25 bp, Homo sapien
cgggcccgcgaatctctcgtcccca

SEQ ID NO: 1556593 - DNA, 25 bp, Homo sapien
gcccgcgaatctctcgtccccaccc

SEQ ID NO: 1556594 - DNA, 25 bp, Homo sapien
acggtccctcaacggccgccgcgcg

SEQ ID NO: 1556595 - DNA, 25 bp, Homo sapien
caacggtccctcaacggccgccgcg

SEQ ID NO: 1556596 - DNA, 25 bp, Homo sapien
gcggctcccacggatccctccgcgc

SEQ ID NO: 1556597 - DNA, 25 bp, Homo sapien
gccgcactgcggctcccacggatcc

SEQ ID NO: 1556598 - DNA, 25 bp, Homo sapien
gagcacggggatcaaggttcctccg

SEQ ID NO: 1556599 - DNA, 25 bp, Homo sapien
gctccgccgcgcgtccgcgcctcca

SEQ ID NO: 1556600 - DNA, 25 bp, Homo sapien
gtgtccggagcacggggatcaaggt

SEQ ID NO: 1556601 - DNA, 25 bp, Homo sapien
cgaggcccggggtgtccggagcacg

SEQ ID NO: 1556602 - DNA, 25 bp, Homo sapien
ccacctccacgaccctgatccttct

SEQ ID NO: 1556603 - DNA, 25 bp, Homo sapien
tgatccttctccgtcccggaagcct

SEQ ID NO: 1556604 - DNA, 25 bp, Homo sapien
ccctgatccttctccgtcccggaag

SEQ ID NO: 1556605 - DNA, 25 bp, Homo sapien
tttcaccacctccacgaccctgatc

SEQ ID NO: 1556606 - DNA, 25 bp, Homo sapien
actgccccggtgtcttccacccagc

SEQ ID NO: 1556607 - DNA, 25 bp, Homo sapien
tcccactgccccggtgtcttccacc

SEQ ID NO: 1556608 - DNA, 25 bp, Homo sapien
tgccccggtgtcttccacccagccg

SEQ ID NO: 1556609 - DNA, 25 bp, Homo sapien
ccccggtgtcttccacccagccgcg

SEQ ID NO: 1556610 - DNA, 25 bp, Homo sapien
cagagtccacccaagtggcaaaaat

SEQ ID NO: 1556611 - DNA, 25 bp, Homo sapien
accggcggcccgagttgctcaagca

SEQ ID NO: 1556612 - DNA, 25 bp, Homo sapien
gcggcccgagttgctcaagcaccta

SEQ ID NO: 1556613 - DNA, 25 bp, Homo sapien
gagtccacccaagtggcaaaaattc

SEQ ID NO: 1556614 - DNA, 25 bp, Homo sapien
aatctgctcctcagtcagctggtca

SEQ ID NO: 1556615 - DNA, 25 bp, Homo sapien
gcaatctgctcctcagtcagctggt

SEQ ID NO: 1556616 - DNA, 25 bp, Homo sapien
ctgcaatctgctcctcagtcagctg

SEQ ID NO: 1556617 - DNA, 25 bp, Homo sapien
tctgctcctcagtcagctggtcagc

SEQ ID NO: 1556618 - DNA, 25 bp, Homo sapien
tagttcctgtagctgacccttctgg

SEQ ID NO: 1556619 - DNA, 25 bp, Homo sapien
tggcccctggctatggagataaacc

SEQ ID NO: 1556620 - DNA, 25 bp, Homo sapien
tacgttctaggcaggcattaaggct

SEQ ID NO: 1556621 - DNA, 25 bp, Homo sapien
cattaaggctatagcagggaccaac

SEQ ID NO: 1556622 - DNA, 25 bp, Homo sapien
cagaacatggctgacggacagtgcg

SEQ ID NO: 1556623 - DNA, 25 bp, Homo sapien
agtcagaggtcacaaggtccacagg

SEQ ID NO: 1556624 - DNA, 25 bp, Homo sapien
tgggtgctaccagcttccaaaggag

SEQ ID NO: 1556625 - DNA, 25 bp, Homo sapien
ccttacctctggatgctggatgcct

SEQ ID NO: 1556626 - DNA, 25 bp, Homo sapien
catccacctcattgatcatatcctg

SEQ ID NO: 1556627 - DNA, 25 bp, Homo sapien
ttgtcaaagagggagaaggcctcct

SEQ ID NO: 1556628 - DNA, 25 bp, Homo sapien
gctctgcttcagtggggttctgtcc

SEQ ID NO: 1556629 - DNA, 25 bp, Homo sapien
ggtgatagtgccatctccatccttg

SEQ ID NO: 1556630 - DNA, 25 bp, Homo sapien
ggaaaggatggagaatgctcttggc

SEQ ID NO: 1556631 - DNA, 25 bp, Homo sapien
ggggaaaggatggagaatgctcttg

SEQ ID NO: 1556632 - DNA, 25 bp, Homo sapien
gggaaaggatggagaatgctcttgg

SEQ ID NO: 1556633 - DNA, 25 bp, Homo sapien
catcatggtcaggaactccgggaag

SEQ ID NO: 1556634 - DNA, 25 bp, Homo sapien
caggaactccgggaagtcaatggtc

SEQ ID NO: 1556635 - DNA, 25 bp, Homo sapien
aaagacacggaacgcctctcggatc

SEQ ID NO: 1556636 - DNA, 25 bp, Homo sapien
gtcaaagacacggaacgcctctcgg

SEQ ID NO: 1556637 - DNA, 25 bp, Homo sapien
tggtagctccgtggctccagttccg

SEQ ID NO: 1556638 - DNA, 25 bp, Homo sapien
cccggacctcctggaagtggtagct

SEQ ID NO: 1556639 - DNA, 25 bp, Homo sapien
ccagttccgcctgtctgcctgaagg

SEQ ID NO: 1556640 - DNA, 25 bp, Homo sapien
agtgagcacagtgagggaggctgcc

SEQ ID NO: 1556641 - DNA, 25 bp, Homo sapien
gggataaagcctttcactgggcact

SEQ ID NO: 1556642 - DNA, 25 bp, Homo sapien
ttggggataaagcctttcactgggc

SEQ ID NO: 1556643 - DNA, 25 bp, Homo sapien
tggggataaagcctttcactgggca

SEQ ID NO: 1556644 - DNA, 25 bp, Homo sapien
ggataaagcctttcactgggcactt

SEQ ID NO: 1556645 - DNA, 25 bp, Homo sapien
gcggcgctgatgtagccattcccat

SEQ ID NO: 1556646 - DNA, 25 bp, Homo sapien
gtcattacgtgacgcagctctgcgg

SEQ ID NO: 1556647 - DNA, 25 bp, Homo sapien
tctcccccaggttcgtcattacgtg

SEQ ID NO: 1556648 - DNA, 25 bp, Homo sapien
agctctgcggcgctgatgtagccat

SEQ ID NO: 1556649 - DNA, 25 bp, Homo sapien
cataattgacctggccatctccatc

SEQ ID NO: 1556650 - DNA, 25 bp, Homo sapien
aattgacctggccatctccatcgat

SEQ ID NO: 1556651 - DNA, 25 bp, Homo sapien
attgacctggccatctccatcgatg

SEQ ID NO: 1556652 - DNA, 25 bp, Homo sapien
cttcataattgacctggccatctcc

SEQ ID NO: 1556653 - DNA, 25 bp, Homo sapien
cactttgcagtcatcatctgtacaa

SEQ ID NO: 1556654 - DNA, 25 bp, Homo sapien
tcactttgcagtcatcatctgtaca

SEQ ID NO: 1556655 - DNA, 25 bp, Homo sapien
actttgcagtcatcatctgtacaaa

SEQ ID NO: 1556656 - DNA, 25 bp, Homo sapien
tcaagagaacgggcatcgccagctg

SEQ ID NO: 1556657 - DNA, 25 bp, Homo sapien
aagagaacgggcatcgccagctgcc

SEQ ID NO: 1556658 - DNA, 25 bp, Homo sapien
agatcaagagaacgggcatcgccag

SEQ ID NO: 1556659 - DNA, 25 bp, Homo sapien
gagaacgggcatcgccagctgcccg

SEQ ID NO: 1556660 - DNA, 25 bp, Homo sapien
tgtttgctagaaccggggtacgcag

SEQ ID NO: 1556661 - DNA, 25 bp, Homo sapien
tacgcaggggagtgttgaagagaga

SEQ ID NO: 1556662 - DNA, 25 bp, Homo sapien
cagtcaatcaattggtgtttgctag

SEQ ID NO: 1556663 - DNA, 25 bp, Homo sapien
tcaattggtgtttgctagaaccggg

SEQ ID NO: 1556664 - DNA, 25 bp, Homo sapien
gcagcttgggacaaatcttttgttg

SEQ ID NO: 1556665 - DNA, 25 bp, Homo sapien
tgcagcttgggacaaatcttttgtt

SEQ ID NO: 1556666 - DNA, 25 bp, Homo sapien
ggaagacatggatggaagaggcgag

SEQ ID NO: 1556667 - DNA, 25 bp, Homo sapien
tatgaatgcatcaggccttggaaga

SEQ ID NO: 1556668 - DNA, 25 bp, Homo sapien
ttatgaatgcatcaggccttggaag

SEQ ID NO: 1556669 - DNA, 25 bp, Homo sapien
catggatggaagaggcgagggcaaa

SEQ ID NO: 1556670 - DNA, 25 bp, Homo sapien
gaggctccccaaggggatctgggga

SEQ ID NO: 1556671 - DNA, 25 bp, Homo sapien
cagaggctccccaaggggatctggg

SEQ ID NO: 1556672 - DNA, 25 bp, Homo sapien
ggcagaggctccccaaggggatctg

SEQ ID NO: 1556673 - DNA, 25 bp, Homo sapien
aggctccccaaggggatctggggag

SEQ ID NO: 1556674 - DNA, 25 bp, Homo sapien
cacagggctggttgcatgcaacggc

SEQ ID NO: 1556675 - DNA, 25 bp, Homo sapien
agtcaacgccacaattcctcaacgc

SEQ ID NO: 1556676 - DNA, 25 bp, Homo sapien
gctgggatctgcacgtggaatcaca

SEQ ID NO: 1556677 - DNA, 25 bp, Homo sapien
tggaatgcctctcttggcacccctg

SEQ ID NO: 1556678 - DNA, 25 bp, Homo sapien
tcagatggtttcagaacagcagcca

SEQ ID NO: 1556679 - DNA, 25 bp, Homo sapien
tagcaccaggtatttacagaacagc

SEQ ID NO: 1556680 - DNA, 25 bp, Homo sapien
ggcaagtccaatttgcagagtggcc

SEQ ID NO: 1556681 - DNA, 25 bp, Homo sapien
agcgcttcaggaacgcgggcaagtc

SEQ ID NO: 1556682 - DNA, 25 bp, Homo sapien
tattgcaggtgcgttctcttgagag

SEQ ID NO: 1556683 - DNA, 25 bp, Homo sapien
caccctttagctagcccagcatggt

SEQ ID NO: 1556684 - DNA, 25 bp, Homo sapien
cgccaagtcaccacggagaagcggg

SEQ ID NO: 1556685 - DNA, 25 bp, Homo sapien
gcagctggccgacaagactgtttta

SEQ ID NO: 1556686 - DNA, 25 bp, Homo sapien
gcaagggcacggatcatgctctccg

SEQ ID NO: 1556687 - DNA, 25 bp, Homo sapien
cagaagcaagggcacggatcatgct

SEQ ID NO: 1556688 - DNA, 25 bp, Homo sapien
agtcagaagcaagggcacggatcat

SEQ ID NO: 1556689 - DNA, 25 bp, Homo sapien
gaagcaagggcacggatcatgctct

SEQ ID NO: 1556690 - DNA, 25 bp, Homo sapien
tgaacacaatattgcccggtttaaa

SEQ ID NO: 1556691 - DNA, 25 bp, Homo sapien
ctgggtctcccactatgccccatcc

SEQ ID NO: 1556692 - DNA, 25 bp, Homo sapien
gaaaatgtccacagcctcacgccta

SEQ ID NO: 1556693 - DNA, 25 bp, Homo sapien
ttcacagcttgaactgaacacaata

SEQ ID NO: 1556694 - DNA, 25 bp, Homo sapien
tgtatgtgtgttggaggggggcagg

SEQ ID NO: 1556695 - DNA, 25 bp, Homo sapien
tgtgttggaggggggcaggccagaa

SEQ ID NO: 1556696 - DNA, 25 bp, Homo sapien
tatgtgtgttggaggggggcaggcc

SEQ ID NO: 1556697 - DNA, 25 bp, Homo sapien
tgtgtgttggaggggggcaggccag

SEQ ID NO: 1556698 - DNA, 25 bp, Homo sapien
ggttcagaggcgtccactgggctgc

SEQ ID NO: 1556699 - DNA, 25 bp, Homo sapien
ctgtggttcagaggcgtccactggg

SEQ ID NO: 1556700 - DNA, 25 bp, Homo sapien
tcagaggcgtccactgggctgcact

SEQ ID NO: 1556701 - DNA, 25 bp, Homo sapien
tggttcagaggcgtccactgggctg

SEQ ID NO: 1556702 - DNA, 25 bp, Homo sapien
tgacactcaggagtggccccagagc

SEQ ID NO: 1556703 - DNA, 25 bp, Homo sapien
tggtcacactgggagtgacactcag

SEQ ID NO: 1556704 - DNA, 25 bp, Homo sapien
ggagtgacactcaggagtggcccca

SEQ ID NO: 1556705 - DNA, 25 bp, Homo sapien
ttgggagcccgaggatcccaggcgg

SEQ ID NO: 1556706 - DNA, 25 bp, Homo sapien
tttttcggctgcacgatggcactgg

SEQ ID NO: 1556707 - DNA, 25 bp, Homo sapien
gaactttttcggctgcacgatggca

SEQ ID NO: 1556708 - DNA, 25 bp, Homo sapien
ttcggctgcacgatggcactggcca

SEQ ID NO: 1556709 - DNA, 25 bp, Homo sapien
tcagaactttttcggctgcacgatg

SEQ ID NO: 1556710 - DNA, 25 bp, Homo sapien
ggacaccatgagtgtgtactgccat

SEQ ID NO: 1556711 - DNA, 25 bp, Homo sapien
tgtgactccaggagatctgtgagtg

SEQ ID NO: 1556712 - DNA, 25 bp, Homo sapien
acactgggaaatggcgtgtgacacc

SEQ ID NO: 1556713 - DNA, 25 bp, Homo sapien
tgagatggtgtacgacgccaggaaa

SEQ ID NO: 1556714 - DNA, 25 bp, Homo sapien
tattatgacgatggtgactccccag

SEQ ID NO: 1556715 - DNA, 25 bp, Homo sapien
cctggacaattatggaggattcgga

SEQ ID NO: 1556716 - DNA, 25 bp, Homo sapien
ttaagatatccccttggcaccctgg

SEQ ID NO: 1556717 - DNA, 25 bp, Homo sapien
tgtaacatatgtggtggactctcac

SEQ ID NO: 1556718 - DNA, 25 bp, Homo sapien
agagcgaatcgagcgccagcgaggg

SEQ ID NO: 1556719 - DNA, 25 bp, Homo sapien
gccgtggacgcatggccgaggcttc

SEQ ID NO: 1556720 - DNA, 25 bp, Homo sapien
gctccactgcggagatcgacgctgc

SEQ ID NO: 1556721 - DNA, 25 bp, Homo sapien
tctgctttacggctgcgcgggcagc

SEQ ID NO: 1556722 - DNA, 25 bp, Homo sapien
ccaaggtgacacagccaggctccaa

SEQ ID NO: 1556723 - DNA, 25 bp, Homo sapien
gaaacaatttcatcggaggacgtcc

SEQ ID NO: 1556724 - DNA, 25 bp, Homo sapien
agtggattccaagccggtgaagccg

SEQ ID NO: 1556725 - DNA, 25 bp, Homo sapien
caagaccggctacatatttggccta

SEQ ID NO: 1556726 - DNA, 25 bp, Homo sapien
gcaggaagccttggaaacgaatgtc

SEQ ID NO: 1556727 - DNA, 25 bp, Homo sapien
tatcgccactatcaatttctctcca

SEQ ID NO: 1556728 - DNA, 25 bp, Homo sapien
caggctcggcgtagtgatacagatt

SEQ ID NO: 1556729 - DNA, 25 bp, Homo sapien
ggagactttgctgtctatcgccact

SEQ ID NO: 1556730 - DNA, 25 bp, Homo sapien
gaatattagagctaggtcttggaag

SEQ ID NO: 1556731 - DNA, 25 bp, Homo sapien
ggaagacactgctccaagtacctaa

SEQ ID NO: 1556732 - DNA, 25 bp, Homo sapien
ctgtggctcttaatccatggaagac

SEQ ID NO: 1556733 - DNA, 25 bp, Homo sapien
cagaacaactgtatgaggcagccag

SEQ ID NO: 1556734 - DNA, 25 bp, Homo sapien
ggcagccagtattatgatcccgtga

SEQ ID NO: 1556735 - DNA, 25 bp, Homo sapien
tgggcccttgaggactctaatctat

SEQ ID NO: 1556736 - DNA, 25 bp, Homo sapien
ggattctactcctattgggcccttg

SEQ ID NO: 1556737 - DNA, 25 bp, Homo sapien
gaactcagatgggatggaccctaca

SEQ ID NO: 1556738 - DNA, 25 bp, Homo sapien
tagtcctccggaaaagacatcgcag

SEQ ID NO: 1556739 - DNA, 25 bp, Homo sapien
ccgatcctgaatgctaatttgaggg

SEQ ID NO: 1556740 - DNA, 25 bp, Homo sapien
cattctaatcccatacatagatgat

SEQ ID NO: 1556741 - DNA, 25 bp, Homo sapien
tcccatacatagatgatgtcctgtc

SEQ ID NO: 1556742 - DNA, 25 bp, Homo sapien
cacactccacacgtgccccaagttt

SEQ ID NO: 1556743 - DNA, 25 bp, Homo sapien
actcaacctcaaaacctaatgttga

SEQ ID NO: 1556744 - DNA, 25 bp, Homo sapien
tgatagagacacttgtatatactgt

SEQ ID NO: 1556745 - DNA, 25 bp, Homo sapien
gggttgaacgatcctccacctctca

SEQ ID NO: 1556746 - DNA, 25 bp, Homo sapien
tcctggggttgaacgatcctccacc

SEQ ID NO: 1556747 - DNA, 25 bp, Homo sapien
caaagacctatctgaaagctgggca

SEQ ID NO: 1556748 - DNA, 25 bp, Homo sapien
aagacctatctgaaagctgggcatg

SEQ ID NO: 1556749 - DNA, 25 bp, Homo sapien
aaagacctatctgaaagctgggcat

SEQ ID NO: 1556750 - DNA, 25 bp, Homo sapien
ggtgactgagacagccaaggactgc

SEQ ID NO: 1556751 - DNA, 25 bp, Homo sapien
ttatgttgatgtgatgacttctcta

SEQ ID NO: 1556752 - DNA, 25 bp, Homo sapien
tgatgtgatgacttctctatctatg

SEQ ID NO: 1556753 - DNA, 25 bp, Homo sapien
ctgccctgccagtagagagacatac

SEQ ID NO: 1556754 - DNA, 25 bp, Homo sapien
tgtgccaggcattgactgttccagc

SEQ ID NO: 1556755 - DNA, 25 bp, Homo sapien
tagctcattgagtggtccgcgaagg

SEQ ID NO: 1556756 - DNA, 25 bp, Homo sapien
ggttgctcggtgcaggacaagacaa

SEQ ID NO: 1556757 - DNA, 25 bp, Homo sapien
accattgattcaacatgttgagtgc

SEQ ID NO: 1556758 - DNA, 25 bp, Homo sapien
caggtgcctaggacaggactggctc

SEQ ID NO: 1556759 - DNA, 25 bp, Homo sapien
acttcacttgctaggcgcttccctg

SEQ ID NO: 1556760 - DNA, 25 bp, Homo sapien
acagttcacacaggcgctggagggt

SEQ ID NO: 1556761 - DNA, 25 bp, Homo sapien
gactggctcagatcaggcacttcct

SEQ ID NO: 1556762 - DNA, 25 bp, Homo sapien
tagaacaagcaggatcacctctccc

SEQ ID NO: 1556763 - DNA, 25 bp, Homo sapien
gacccacctagaacaagcaggatca

SEQ ID NO: 1556764 - DNA, 25 bp, Homo sapien
ctgattgaatgagacccacctagaa

SEQ ID NO: 1556765 - DNA, 25 bp, Homo sapien
tatggattttcatcacatccagaaa

SEQ ID NO: 1556766 - DNA, 25 bp, Homo sapien
tgcagtagttagaagggggaaaaga

SEQ ID NO: 1556767 - DNA, 25 bp, Homo sapien
gaaaagaggagaagaaggagttgga

SEQ ID NO: 1556768 - DNA, 25 bp, Homo sapien
gagttggatctgtaactgactgtgt

SEQ ID NO: 1556769 - DNA, 25 bp, Homo sapien
caagtgcagtagttagaagggggaa

SEQ ID NO: 1556770 - DNA, 25 bp, Homo sapien
ggattgcccaacactcctagggcag

SEQ ID NO: 1556771 - DNA, 25 bp, Homo sapien
tcgcccatgggtagagacggctttc

SEQ ID NO: 1556772 - DNA, 25 bp, Homo sapien
tgctttccagacactaaccaaggct

SEQ ID NO: 1556773 - DNA, 25 bp, Homo sapien
taacgggattttcatggcgccgccc

SEQ ID NO: 1556774 - DNA, 25 bp, Homo sapien
cagtaactcaccatgtttggaccag

SEQ ID NO: 1556775 - DNA, 25 bp, Homo sapien
atcacagtaactcaccatgtttgga

SEQ ID NO: 1556776 - DNA, 25 bp, Homo sapien
gagaaggcagatctgtaagtaggtc

SEQ ID NO: 1556777 - DNA, 25 bp, Homo sapien
tctgtaatcaactgtgaatcatcac

SEQ ID NO: 1556778 - DNA, 25 bp, Homo sapien
tttatccagcacgagtgggcgcgct

SEQ ID NO: 1556779 - DNA, 25 bp, Homo sapien
tccagcacgagtgggcgcgcttcga

SEQ ID NO: 1556780 - DNA, 25 bp, Homo sapien
actttatccagcacgagtgggcgcg

SEQ ID NO: 1556781 - DNA, 25 bp, Homo sapien
cctgcactttatccagcacgagtgg

SEQ ID NO: 1556782 - DNA, 25 bp, Homo sapien
gggtcctttctacctgaatgctagg

SEQ ID NO: 1556783 - DNA, 25 bp, Homo sapien
cataaccacaaaggtggaagcgagg

SEQ ID NO: 1556784 - DNA, 25 bp, Homo sapien
taaaagtaattgtccaggagagtgg

SEQ ID NO: 1556785 - DNA, 25 bp, Homo sapien
ttaccatgacaaccaacctggccgg

SEQ ID NO: 1556786 - DNA, 25 bp, Homo sapien
gaggaaggtccaggccctgtaacca

SEQ ID NO: 1556787 - DNA, 25 bp, Homo sapien
aggccctgtaaccatagcaactgcc

SEQ ID NO: 1556788 - DNA, 25 bp, Homo sapien
aaggtccaggccctgtaaccatagc

SEQ ID NO: 1556789 - DNA, 25 bp, Homo sapien
tccaggccctgtaaccatagcaact

SEQ ID NO: 1556790 - DNA, 25 bp, Homo sapien
ccgagattgggccattgcatcccag

SEQ ID NO: 1556791 - DNA, 25 bp, Homo sapien
catcccagcctgggcaacaagagtt

SEQ ID NO: 1556792 - DNA, 25 bp, Homo sapien
tgcatcccagcctgggcaacaagag

SEQ ID NO: 1556793 - DNA, 25 bp, Homo sapien
agccgagattgggccattgcatccc

SEQ ID NO: 1556794 - DNA, 25 bp, Homo sapien
catccctctagcatgaatgtgtcca

SEQ ID NO: 1556795 - DNA, 25 bp, Homo sapien
cattcttaaaacatcccctggccgg

SEQ ID NO: 1556796 - DNA, 25 bp, Homo sapien
tcttgaagtcctataatctcgggca

SEQ ID NO: 1556797 - DNA, 25 bp, Homo sapien
tccagaaaaggtagggctagaagcc

SEQ ID NO: 1556798 - DNA, 25 bp, Homo sapien
agttccagcccagctgagctgcgct

SEQ ID NO: 1556799 - DNA, 25 bp, Homo sapien
ctcctaggttgtaggctgggggagt

SEQ ID NO: 1556800 - DNA, 25 bp, Homo sapien
taggttgtaggctgggggagttcca

SEQ ID NO: 1556801 - DNA, 25 bp, Homo sapien
gggagttccaggagggcagttccag

SEQ ID NO: 1556802 - DNA, 25 bp, Homo sapien
gttactctgagagtttacttgtctc

SEQ ID NO: 1556803 - DNA, 25 bp, Homo sapien
gggacagttactctgagagtttact

SEQ ID NO: 1556804 - DNA, 25 bp, Homo sapien
tgagttgcgatttggcctgagcctc

SEQ ID NO: 1556805 - DNA, 25 bp, Homo sapien
ggttcactgggtctgagttgcgatt

SEQ ID NO: 1556806 - DNA, 25 bp, Homo sapien
gggcgcaagagtagaaacagggggc

SEQ ID NO: 1556807 - DNA, 25 bp, Homo sapien
gcgcaagagtagaaacagggggctt

SEQ ID NO: 1556808 - DNA, 25 bp, Homo sapien
cagcagggggcgcaagagtagaaac

SEQ ID NO: 1556809 - DNA, 25 bp, Homo sapien
cagggggcgcaagagtagaaacagg

SEQ ID NO: 1556810 - DNA, 25 bp, Homo sapien
cacacaatgtgaagtagtggaccca

SEQ ID NO: 1556811 - DNA, 25 bp, Homo sapien
ccaagaagctggctacagagtcgta

SEQ ID NO: 1556812 - DNA, 25 bp, Homo sapien
gctttcaaagcttggctatggcaca

SEQ ID NO: 1556813 - DNA, 25 bp, Homo sapien
tcagcccatctttagtgagccttcc

SEQ ID NO: 1556814 - DNA, 25 bp, Homo sapien
gatctgcctgccttggcctccagaa

SEQ ID NO: 1556815 - DNA, 25 bp, Homo sapien
actggctcactgcaaccaccgcctc

SEQ ID NO: 1556816 - DNA, 25 bp, Homo sapien
ggagtgcggtggtgcgactggctca

SEQ ID NO: 1556817 - DNA, 25 bp, Homo sapien
ctgcctgccttggcctccagaaatg

SEQ ID NO: 1556818 - DNA, 25 bp, Homo sapien
gaagatttggctggccggtctccag

SEQ ID NO: 1556819 - DNA, 25 bp, Homo sapien
tccttgtccccaccgagactgaaga

SEQ ID NO: 1556820 - DNA, 25 bp, Homo sapien
caggtggtatagctctgggttccaa

SEQ ID NO: 1556821 - DNA, 25 bp, Homo sapien
gggttccaagcagatgatcaaataa

SEQ ID NO: 1556822 - DNA, 25 bp, Homo sapien
cccagaggtttgttggcacaacagt

SEQ ID NO: 1556823 - DNA, 25 bp, Homo sapien
taagtggggtgctgaaaaatataaa

SEQ ID NO: 1556824 - DNA, 25 bp, Homo sapien
gttggcacaacagtatgaatgcatt

SEQ ID NO: 1556825 - DNA, 25 bp, Homo sapien
gggagttgtttgataagtacagagt

SEQ ID NO: 1556826 - DNA, 25 bp, Homo sapien
gccgaagtctggggctagctgggcc

SEQ ID NO: 1556827 - DNA, 25 bp, Homo sapien
ggggccgaagtctggggctagctgg

SEQ ID NO: 1556828 - DNA, 25 bp, Homo sapien
gggccgaagtctggggctagctggg

SEQ ID NO: 1556829 - DNA, 25 bp, Homo sapien
cgaagtctggggctagctgggcctc

SEQ ID NO: 1556830 - DNA, 25 bp, Homo sapien
tggtgctgcagccacgagacataga

SEQ ID NO: 1556831 - DNA, 25 bp, Homo sapien
cacaaactcggtggccacgtaggtc

SEQ ID NO: 1556832 - DNA, 25 bp, Homo sapien
ttgtcaaatgcctcgaactcccgca

SEQ ID NO: 1556833 - DNA, 25 bp, Homo sapien
catcaggtactagggccacaaactc

SEQ ID NO: 1556834 - DNA, 25 bp, Homo sapien
gcacctggcagggttggccgtggca

SEQ ID NO: 1556835 - DNA, 25 bp, Homo sapien
ctgacgttcagggccaggcacctgg

SEQ ID NO: 1556836 - DNA, 25 bp, Homo sapien
aggcacctggcagggttggccgtgg

SEQ ID NO: 1556837 - DNA, 25 bp, Homo sapien
acctggcagggttggccgtggcaac

SEQ ID NO: 1556838 - DNA, 25 bp, Homo sapien
gaagggcggtctgcagaaagaggct

SEQ ID NO: 1556839 - DNA, 25 bp, Homo sapien
aggttgaagaggtcgcgggcgcgca

SEQ ID NO: 1556840 - DNA, 25 bp, Homo sapien
aggagcaccacagcatctccgtcca

SEQ ID NO: 1556841 - DNA, 25 bp, Homo sapien
atagcgggcggtccactctcgcagg

SEQ ID NO: 1556842 - DNA, 25 bp, Homo sapien
cgcgccgcggcgaaggtcaagtcca

SEQ ID NO: 1556843 - DNA, 25 bp, Homo sapien
gggctggcgcgccgcggcgaaggtc

SEQ ID NO: 1556844 - DNA, 25 bp, Homo sapien
cgccgcggcgaaggtcaagtccagc

SEQ ID NO: 1556845 - DNA, 25 bp, Homo sapien
tggcgcgccgcggcgaaggtcaagt

SEQ ID NO: 1556846 - DNA, 25 bp, Homo sapien
tccacgtcgtagtcccatgggatga

SEQ ID NO: 1556847 - DNA, 25 bp, Homo sapien
gctgcaggaagtgctcgggaaactc

SEQ ID NO: 1556848 - DNA, 25 bp, Homo sapien
tccttggtcatgacgccattgcggg

SEQ ID NO: 1556849 - DNA, 25 bp, Homo sapien
gtactgcacgcggaaaaagtcgccc

SEQ ID NO: 1556850 - DNA, 25 bp, Homo sapien
tgataaatctggaggtcgcttccca

SEQ ID NO: 1556851 - DNA, 25 bp, Homo sapien
gcatcctggaagcaactgaggcaca

SEQ ID NO: 1556852 - DNA, 25 bp, Homo sapien
tgactgagatgacccaggatgtccc

SEQ ID NO: 1556853 - DNA, 25 bp, Homo sapien
cagggctctcggaatcttgggcaga

SEQ ID NO: 1556854 - DNA, 25 bp, Homo sapien
ctttattactaacatacagataata

SEQ ID NO: 1556855 - DNA, 25 bp, Homo sapien
gctttattactaacatacagataat

SEQ ID NO: 1556856 - DNA, 25 bp, Homo sapien
tttattactaacatacagataatag

SEQ ID NO: 1556857 - DNA, 25 bp, Homo sapien
caaaagtcattgggatgaggcaaga

SEQ ID NO: 1556858 - DNA, 25 bp, Homo sapien
tgcaaaagtcattgggatgaggcaa

SEQ ID NO: 1556859 - DNA, 25 bp, Homo sapien
gcaaaagtcattgggatgaggcaag

SEQ ID NO: 1556860 - DNA, 25 bp, Homo sapien
tagtagcatgagaagggactaaaac

SEQ ID NO: 1556861 - DNA, 25 bp, Homo sapien
cttaaaggatcctccaattttggct

SEQ ID NO: 1556862 - DNA, 25 bp, Homo sapien
cttggccttaaaggatcctccaatt

SEQ ID NO: 1556863 - DNA, 25 bp, Homo sapien
attagtagcatgagaagggactaaa

SEQ ID NO: 1556864 - DNA, 25 bp, Homo sapien
ggcagtgaccgtttatgaatgagta

SEQ ID NO: 1556865 - DNA, 25 bp, Homo sapien
caacatccgggatatgggtccctct

SEQ ID NO: 1556866 - DNA, 25 bp, Homo sapien
agtcatcagtccatccaacatccgg

SEQ ID NO: 1556867 - DNA, 25 bp, Homo sapien
tttgctgtcttaaccactggcgtgg

SEQ ID NO: 1556868 - DNA, 25 bp, Homo sapien
gagccaccacgtccggcccagttct

SEQ ID NO: 1556869 - DNA, 25 bp, Homo sapien
agccaccacgtccggcccagttctt

SEQ ID NO: 1556870 - DNA, 25 bp, Homo sapien
tggaatctggaacccaccaatgtgg

SEQ ID NO: 1556871 - DNA, 25 bp, Homo sapien
tgggctccagtcacatacagaacaa

SEQ ID NO: 1556872 - DNA, 25 bp, Homo sapien
gagcttgagcactttgggttccatg

SEQ ID NO: 1556873 - DNA, 25 bp, Homo sapien
cctgacgggcggtgatacattaaga

SEQ ID NO: 1556874 - DNA, 25 bp, Homo sapien
catacggaggacctgtactggcgcc

SEQ ID NO: 1556875 - DNA, 25 bp, Homo sapien
aggacctgtactggcgccagcctct

SEQ ID NO: 1556876 - DNA, 25 bp, Homo sapien
gaggttttgtcctagctcagaatag

SEQ ID NO: 1556877 - DNA, 25 bp, Homo sapien
agggaggttttgtcctagctcagaa

SEQ ID NO: 1556878 - DNA, 25 bp, Homo sapien
catgctggttattttggcggctgta

SEQ ID NO: 1556879 - DNA, 25 bp, Homo sapien
tgtccccatggtacgtcccaccctg

SEQ ID NO: 1556880 - DNA, 25 bp, Homo sapien
gaggctgaggacaaatacctgctgt

SEQ ID NO: 1556881 - DNA, 25 bp, Homo sapien
caacaccatgctggttattttggcg

SEQ ID NO: 1556882 - DNA, 25 bp, Homo sapien
gttctgctgcgtccccaccgtgacc

SEQ ID NO: 1556883 - DNA, 25 bp, Homo sapien
tgcgtccccaccgtgacctgcctgg

SEQ ID NO: 1556884 - DNA, 25 bp, Homo sapien
caggtcaccatggggaattctagcc

SEQ ID NO: 1556885 - DNA, 25 bp, Homo sapien
atggggaattctagcccccactggg

SEQ ID NO: 1556886 - DNA, 25 bp, Homo sapien
gaatcagtcatgtaaaccccgggag

SEQ ID NO: 1556887 - DNA, 25 bp, Homo sapien
accgtacggagtcgagaagcacaga

SEQ ID NO: 1556888 - DNA, 25 bp, Homo sapien
cacggtcgcctctgagaaggaatca

SEQ ID NO: 1556889 - DNA, 25 bp, Homo sapien
tacaagtgaagagtgagctgcccct

SEQ ID NO: 1556890 - DNA, 25 bp, Homo sapien
ggtttactctttgcccgccttggca

SEQ ID NO: 1556891 - DNA, 25 bp, Homo sapien
tgcctgctgggtcacgccatccatg

SEQ ID NO: 1556892 - DNA, 25 bp, Homo sapien
tcacgccatccatgggctcctggta

SEQ ID NO: 1556893 - DNA, 25 bp, Homo sapien
cgccttggcaagtacattctgtgct

SEQ ID NO: 1556894 - DNA, 25 bp, Homo sapien
caatgaggccaccatggttctggtc

SEQ ID NO: 1556895 - DNA, 25 bp, Homo sapien
tgcttatccgcttcttcaactcctt

SEQ ID NO: 1556896 - DNA, 25 bp, Homo sapien
tagtgtttgccatcgtctttggtgt

SEQ ID NO: 1556897 - DNA, 25 bp, Homo sapien
gatgaacatcctgggcttggtagtg

SEQ ID NO: 1556898 - DNA, 25 bp, Homo sapien
gctgtgactataacacacctggcta

SEQ ID NO: 1556899 - DNA, 25 bp, Homo sapien
aaatgtgaccctatctctgcagtac

SEQ ID NO: 1556900 - DNA, 25 bp, Homo sapien
tcaacctgctcaaactggcagccag

SEQ ID NO: 1556901 - DNA, 25 bp, Homo sapien
cgtgctccgcccgaggatcttttca

SEQ ID NO: 1556902 - DNA, 25 bp, Homo sapien
tcatcttgccgctggtggtgtgcag

SEQ ID NO: 1556903 - DNA, 25 bp, Homo sapien
tgctgcgtctgctgcggatgatcat

SEQ ID NO: 1556904 - DNA, 25 bp, Homo sapien
gcccggagcgcttgagcgccttcgt

SEQ ID NO: 1556905 - DNA, 25 bp, Homo sapien
tggtgtgcagcttgatcggcggcgc

SEQ ID NO: 1556906 - DNA, 25 bp, Homo sapien
tggtggccgatcctcctcgagactc

SEQ ID NO: 1556907 - DNA, 25 bp, Homo sapien
agcggcggagcccaccgccaacggg

SEQ ID NO: 1556908 - DNA, 25 bp, Homo sapien
tcgagactccaaggggctcgcagcg

SEQ ID NO: 1556909 - DNA, 25 bp, Homo sapien
atcatggtggccgatcctcctcgag

SEQ ID NO: 1556910 - DNA, 25 bp, Homo sapien
taaggagccctccaaagttccagtc

SEQ ID NO: 1556911 - DNA, 25 bp, Homo sapien
gaggaccaccggagctttctagcga

SEQ ID NO: 1556912 - DNA, 25 bp, Homo sapien
tcaactcagtcctaggaacgtcggg

SEQ ID NO: 1556913 - DNA, 25 bp, Homo sapien
agctttcggacatctggcacacggg

SEQ ID NO: 1556914 - DNA, 25 bp, Homo sapien
taaatattggccagatgagtcatca

SEQ ID NO: 1556915 - DNA, 25 bp, Homo sapien
gatgcctagctgaagagtggttttc

SEQ ID NO: 1556916 - DNA, 25 bp, Homo sapien
gggcatccgtctccttctatttgat

SEQ ID NO: 1556917 - DNA, 25 bp, Homo sapien
aatcaccaagcggacagatgcctag

SEQ ID NO: 1556918 - DNA, 25 bp, Homo sapien
cgtgcctggcccacttttgcaaaaa

SEQ ID NO: 1556919 - DNA, 25 bp, Homo sapien
gaaaaattataacagtaagctaagc

SEQ ID NO: 1556920 - DNA, 25 bp, Homo sapien
aaaattataacagtaagctaagcta

SEQ ID NO: 1556921 - DNA, 25 bp, Homo sapien
gcctggcccacttttgcaaaaatta

SEQ ID NO: 1556922 - DNA, 25 bp, Homo sapien
ccacgtgttcgatggcagggccaat

SEQ ID NO: 1556923 - DNA, 25 bp, Homo sapien
cttggcacccatgtgctctaggcca

SEQ ID NO: 1556924 - DNA, 25 bp, Homo sapien
ccaggcccatgcacgtgaggctctt

SEQ ID NO: 1556925 - DNA, 25 bp, Homo sapien
catgttcaggcccacgtgttcgatg

SEQ ID NO: 1556926 - DNA, 25 bp, Homo sapien
aaaggtggcaccgccactgccacac

SEQ ID NO: 1556927 - DNA, 25 bp, Homo sapien
gtcaaaggtggcaccgccactgcca

SEQ ID NO: 1556928 - DNA, 25 bp, Homo sapien
cgatggcatggtcaaaggtggcacc

SEQ ID NO: 1556929 - DNA, 25 bp, Homo sapien
atggtcaaaggtggcaccgccactg

SEQ ID NO: 1556930 - DNA, 25 bp, Homo sapien
cttccaaagttgccacactccatac

SEQ ID NO: 1556931 - DNA, 25 bp, Homo sapien
ctgctccaccaagggaacctgcaaa

SEQ ID NO: 1556932 - DNA, 25 bp, Homo sapien
caggagcatggtctcctgctccacc

SEQ ID NO: 1556933 - DNA, 25 bp, Homo sapien
tgcccaggagcatggtctcctgctc

SEQ ID NO: 1556934 - DNA, 25 bp, Homo sapien
gcatggtctcctgctccaccaaggg

SEQ ID NO: 1556935 - DNA, 25 bp, Homo sapien
ttcccgttctccatttcgatgtcag

SEQ ID NO: 1556936 - DNA, 25 bp, Homo sapien
gggacgtaaacttaaccacactgca

SEQ ID NO: 1556937 - DNA, 25 bp, Homo sapien
gcatgttgttcattatccggcagac

SEQ ID NO: 1556938 - DNA, 25 bp, Homo sapien
cagcatgtggccatactcgttgaat

SEQ ID NO: 1556939 - DNA, 25 bp, Homo sapien
tattgaatgatccattataggaaac

SEQ ID NO: 1556940 - DNA, 25 bp, Homo sapien
aaaaggccggatattgaatgatcca

SEQ ID NO: 1556941 - DNA, 25 bp, Homo sapien
agggagatgatagctaaagggtact

SEQ ID NO: 1556942 - DNA, 25 bp, Homo sapien
aaatgatgacgggttgtcagaaccc

SEQ ID NO: 1556943 - DNA, 25 bp, Homo sapien
tggttacattcgtcccacctggata

SEQ ID NO: 1556944 - DNA, 25 bp, Homo sapien
gacaacacatctacaggttccggag

SEQ ID NO: 1556945 - DNA, 25 bp, Homo sapien
tctggaccatctaggagagaatcct

SEQ ID NO: 1556946 - DNA, 25 bp, Homo sapien
tcaagacccggactgtaatcacaac

SEQ ID NO: 1556947 - DNA, 25 bp, Homo sapien
catctctgtgcgtgtgtggctctct

SEQ ID NO: 1556948 - DNA, 25 bp, Homo sapien
tgtctgtgaactggacctggtgttc

SEQ ID NO: 1556949 - DNA, 25 bp, Homo sapien
caggtcttaaacgaatatttccaca

SEQ ID NO: 1556950 - DNA, 25 bp, Homo sapien
ggtgttcaacttctacaaggtaggc

SEQ ID NO: 1556951 - DNA, 25 bp, Homo sapien
cctggcatgtttgttcacggtgtgt

SEQ ID NO: 1556952 - DNA, 25 bp, Homo sapien
tggccaaagacattgtactttgcaa

SEQ ID NO: 1556953 - DNA, 25 bp, Homo sapien
ctttgcaacccagtatgcatatata

SEQ ID NO: 1556954 - DNA, 25 bp, Homo sapien
tgtctttgtctacttaacacgcgca

SEQ ID NO: 1556955 - DNA, 25 bp, Homo sapien
tacttagggcgttccagggatagca

SEQ ID NO: 1556956 - DNA, 25 bp, Homo sapien
ggatggcattgctgaaaaggtgaca

SEQ ID NO: 1556957 - DNA, 25 bp, Homo sapien
ccaagggaacagcaagtgtaaagtc

SEQ ID NO: 1556958 - DNA, 25 bp, Homo sapien
gaggaacatttcaagccaagggaac

SEQ ID NO: 1556959 - DNA, 25 bp, Homo sapien
ttttctgaaatggagtctgtctcag

SEQ ID NO: 1556960 - DNA, 25 bp, Homo sapien
tttttctgaaatggagtctgtctca

SEQ ID NO: 1556961 - DNA, 25 bp, Homo sapien
ttctgaaatggagtctgtctcagtc

SEQ ID NO: 1556962 - DNA, 25 bp, Homo sapien
ctgaaatggagtctgtctcagtcac

SEQ ID NO: 1556963 - DNA, 25 bp, Homo sapien
tcttctgcccagcactctgccccat

SEQ ID NO: 1556964 - DNA, 25 bp, Homo sapien
gtgttcttctgcccagcactctgcc

SEQ ID NO: 1556965 - DNA, 25 bp, Homo sapien
ctgtgttcttctgcccagcactctg

SEQ ID NO: 1556966 - DNA, 25 bp, Homo sapien
gttcttctgcccagcactctgcccc

SEQ ID NO: 1556967 - DNA, 25 bp, Homo sapien
gcagagcggtggactcttcagccat

SEQ ID NO: 1556968 - DNA, 25 bp, Homo sapien
tggcagagcggtggactcttcagcc

SEQ ID NO: 1556969 - DNA, 25 bp, Homo sapien
gctggcagagcggtggactcttcag

SEQ ID NO: 1556970 - DNA, 25 bp, Homo sapien
gctgcagctggaggattgccgcggg

SEQ ID NO: 1556971 - DNA, 25 bp, Homo sapien
cgcgcgcgtccatgcaacttgtttt

SEQ ID NO: 1556972 - DNA, 25 bp, Homo sapien
gcaattcgtcgtcccggaagaagag

SEQ ID NO: 1556973 - DNA, 25 bp, Homo sapien
tgtgaacgactgatccccaggagag

SEQ ID NO: 1556974 - DNA, 25 bp, Homo sapien
acaaatcgaatgtcaattagggcgc

SEQ ID NO: 1556975 - DNA, 25 bp, Homo sapien
aggccagaaggagcgacgtaacgtg

SEQ ID NO: 1556976 - DNA, 25 bp, Homo sapien
ggtgggtttgccgcgcgagccgcag

SEQ ID NO: 1556977 - DNA, 25 bp, Homo sapien
ccgcagccgccgggataacggagga

SEQ ID NO: 1556978 - DNA, 25 bp, Homo sapien
gaggtgggtttgccgcgcgagccgc

SEQ ID NO: 1556979 - DNA, 25 bp, Homo sapien
ggcgaagggcgcgatcccgctcgcg

SEQ ID NO: 1556980 - DNA, 25 bp, Homo sapien
cgcgatcccgctcgcgcgggacctg

SEQ ID NO: 1556981 - DNA, 25 bp, Homo sapien
ggagagaggcatggcccggttttgg

SEQ ID NO: 1556982 - DNA, 25 bp, Homo sapien
ctggagaaagccgaaggagagaggc

SEQ ID NO: 1556983 - DNA, 25 bp, Homo sapien
cgaggcgacttgcaaacgagcagag

SEQ ID NO: 1556984 - DNA, 25 bp, Homo sapien
cgcgtctcaagcagccgatctactg

SEQ ID NO: 1556985 - DNA, 25 bp, Homo sapien
cggagggagtggtccgcaggagctg

SEQ ID NO: 1556986 - DNA, 25 bp, Homo sapien
aaaatgccgctattgcggcggccgc

SEQ ID NO: 1556987 - DNA, 25 bp, Homo sapien
tcagaaagccagccgaggggcatcc

SEQ ID NO: 1556988 - DNA, 25 bp, Homo sapien
ggggcatcccggggtgcagcaggct

SEQ ID NO: 1556989 - DNA, 25 bp, Homo sapien
aggggcatcccggggtgcagcaggc

SEQ ID NO: 1556990 - DNA, 25 bp, Homo sapien
ccgaggggcatcccggggtgcagca

SEQ ID NO: 1556991 - DNA, 25 bp, Homo sapien
gagtccaacagatcttaccatgaat

SEQ ID NO: 1556992 - DNA, 25 bp, Homo sapien
agggtgaatgccttaccttcaaagg

SEQ ID NO: 1556993 - DNA, 25 bp, Homo sapien
tgtgcactttcccacgtcaagtatt

SEQ ID NO: 1556994 - DNA, 25 bp, Homo sapien
tttaaaataactggactcatgctgt

SEQ ID NO: 1556995 - DNA, 25 bp, Homo sapien
tgagatcacactgggcgaaagcatt

SEQ ID NO: 1556996 - DNA, 25 bp, Homo sapien
taaagtcggccagagaagtcaacag

SEQ ID NO: 1556997 - DNA, 25 bp, Homo sapien
tccaccatggagtagacttgaattc

SEQ ID NO: 1556998 - DNA, 25 bp, Homo sapien
taagggttcagctctatctatccac

SEQ ID NO: 1556999 - DNA, 25 bp, Homo sapien
tggtctcttaaagccaagtccagcc

SEQ ID NO: 1557000 - DNA, 25 bp, Homo sapien
gaactaatcccacactatctctgag

SEQ ID NO: 1557001 - DNA, 25 bp, Homo sapien
tcctaccactatattctttagctgg

SEQ ID NO: 1557002 - DNA, 25 bp, Homo sapien
aaagggaggcttgagtctagagttc

SEQ ID NO: 1557003 - DNA, 25 bp, Homo sapien
tttggagcaccacggttttatcatt

SEQ ID NO: 1557004 - DNA, 25 bp, Homo sapien
ggagcaccacggttttatcattttc

SEQ ID NO: 1557005 - DNA, 25 bp, Homo sapien
tcatcagtttccatatatgctcccc

SEQ ID NO: 1557006 - DNA, 25 bp, Homo sapien
atcagtttccatatatgctccccca

SEQ ID NO: 1557007 - DNA, 25 bp, Homo sapien
aaacaacctacacattatcttttat

SEQ ID NO: 1557008 - DNA, 25 bp, Homo sapien
taaacaacctacacattatctttta

SEQ ID NO: 1557009 - DNA, 25 bp, Homo sapien
aacaacctacacattatcttttatg

SEQ ID NO: 1557010 - DNA, 25 bp, Homo sapien
tataccacctaaggcggtgcacatt

SEQ ID NO: 1557011 - DNA, 25 bp, Homo sapien
gcaggagccatgtctgatagtgcta

SEQ ID NO: 1557012 - DNA, 25 bp, Homo sapien
tagtgctatgtataccacctaaggc

SEQ ID NO: 1557013 - DNA, 25 bp, Homo sapien
cctgattcatgtggttgagccacag

SEQ ID NO: 1557014 - DNA, 25 bp, Homo sapien
gaaaatagaatggacttacacaaaa

SEQ ID NO: 1557015 - DNA, 25 bp, Homo sapien
taatcttttggcagttaagaatccc

SEQ ID NO: 1557016 - DNA, 25 bp, Homo sapien
cttttggcagttaagaatccctttg

SEQ ID NO: 1557017 - DNA, 25 bp, Homo sapien
cctggccagttaaccaattcttaat

SEQ ID NO: 1557018 - DNA, 25 bp, Homo sapien
gtctctgaatgaaagccactggaag

SEQ ID NO: 1557019 - DNA, 25 bp, Homo sapien
gctccctcacgtcacagatgcggaa

SEQ ID NO: 1557020 - DNA, 25 bp, Homo sapien
gatgaacatgatctgctgtctctga

SEQ ID NO: 1557021 - DNA, 25 bp, Homo sapien
aaggcaggccaagctgggaatgctg

SEQ ID NO: 1557022 - DNA, 25 bp, Homo sapien
cacactaaatacagcaagtagccca

SEQ ID NO: 1557023 - DNA, 25 bp, Homo sapien
acactaaatacagcaagtagcccat

SEQ ID NO: 1557024 - DNA, 25 bp, Homo sapien
gcccacactaaatacagcaagtagc

SEQ ID NO: 1557025 - DNA, 25 bp, Homo sapien
ccacactaaatacagcaagtagccc

SEQ ID NO: 1557026 - DNA, 25 bp, Homo sapien
tcctggtattctggagaggcctgca

SEQ ID NO: 1557027 - DNA, 25 bp, Homo sapien
tacattggatctcgctgaggtctcc

SEQ ID NO: 1557028 - DNA, 25 bp, Homo sapien
tatggtccaagtgaaactcgtcagc

SEQ ID NO: 1557029 - DNA, 25 bp, Homo sapien
ttagtcaggaccaccactatgggct

SEQ ID NO: 1557030 - DNA, 25 bp, Homo sapien
gtttcagaataagggcatcacgctc

SEQ ID NO: 1557031 - DNA, 25 bp, Homo sapien
tggactaaatgattatcccgccggc

SEQ ID NO: 1557032 - DNA, 25 bp, Homo sapien
taagtgggcctcgtatagctgctct

SEQ ID NO: 1557033 - DNA, 25 bp, Homo sapien
tgctctgcagggacggtatccatta

SEQ ID NO: 1557034 - DNA, 25 bp, Homo sapien
caaagaaaggcacgtaacatagcca

SEQ ID NO: 1557035 - DNA, 25 bp, Homo sapien
tcacaaagaaaggcacgtaacatag

SEQ ID NO: 1557036 - DNA, 25 bp, Homo sapien
ggcacgtaacatagccaaagaggcc

SEQ ID NO: 1557037 - DNA, 25 bp, Homo sapien
aaaggcacgtaacatagccaaagag

SEQ ID NO: 1557038 - DNA, 25 bp, Homo sapien
attgtccaggacatctacagcgcca

SEQ ID NO: 1557039 - DNA, 25 bp, Homo sapien
gggatgcttgtgaaccttccgtcaa

SEQ ID NO: 1557040 - DNA, 25 bp, Homo sapien
tacagcgccatcagtgagtgctaca

SEQ ID NO: 1557041 - DNA, 25 bp, Homo sapien
caggcctcggcagcattatcgtaca

SEQ ID NO: 1557042 - DNA, 25 bp, Homo sapien
gaaacaggctgtaagatggctcgat

SEQ ID NO: 1557043 - DNA, 25 bp, Homo sapien
agcatccatgggttcagcatagtca

SEQ ID NO: 1557044 - DNA, 25 bp, Homo sapien
agtgatgtgtcttctcgaaacaggc

SEQ ID NO: 1557045 - DNA, 25 bp, Homo sapien
agttgcagagcggtgatcctgcccg

SEQ ID NO: 1557046 - DNA, 25 bp, Homo sapien
agccgggtgcatctcgtcctgtaca

SEQ ID NO: 1557047 - DNA, 25 bp, Homo sapien
cactggcttgctcacgatggaaacc

SEQ ID NO: 1557048 - DNA, 25 bp, Homo sapien
gaagctggtccggtaactagcaaac

SEQ ID NO: 1557049 - DNA, 25 bp, Homo sapien
tagtgttcctccttaggctgcgaag

SEQ ID NO: 1557050 - DNA, 25 bp, Homo sapien
caaagactcgtcactgatttgtgtg

SEQ ID NO: 1557051 - DNA, 25 bp, Homo sapien
ttatgtactcaaagactcgtcactg

SEQ ID NO: 1557052 - DNA, 25 bp, Homo sapien
tccaatccttcaccaatctcaaatg

SEQ ID NO: 1557053 - DNA, 25 bp, Homo sapien
ccttcaccaatctcaaatgcagcaa

SEQ ID NO: 1557054 - DNA, 25 bp, Homo sapien
aaaacatcacctcattaagactggg

SEQ ID NO: 1557055 - DNA, 25 bp, Homo sapien
tccagagcagccacgctaagcttct

SEQ ID NO: 1557056 - DNA, 25 bp, Homo sapien
ctcagtggctacactcacttgggca

SEQ ID NO: 1557057 - DNA, 25 bp, Homo sapien
tgaaaatgcctgacacgtacctggc

SEQ ID NO: 1557058 - DNA, 25 bp, Homo sapien
gaacaaatcgactggactgattgag

SEQ ID NO: 1557059 - DNA, 25 bp, Homo sapien
gaagctagaaacaaacagcaccgtg

SEQ ID NO: 1557060 - DNA, 25 bp, Homo sapien
taaactgagaatcgagtgacaccag

SEQ ID NO: 1557061 - DNA, 25 bp, Homo sapien
tactcaactaggctctgaagctaga

SEQ ID NO: 1557062 - DNA, 25 bp, Homo sapien
ggccagtgtgatctggagccaaaca

SEQ ID NO: 1557063 - DNA, 25 bp, Homo sapien
gagaagacaactcgtggccagtgtg

SEQ ID NO: 1557064 - DNA, 25 bp, Homo sapien
gaggagggcccactagttccaggta

SEQ ID NO: 1557065 - DNA, 25 bp, Homo sapien
gcccagcgcagaccatagctttttg

SEQ ID NO: 1557066 - DNA, 25 bp, Homo sapien
catcggaactcggttttctagttgg

SEQ ID NO: 1557067 - DNA, 25 bp, Homo sapien
ccaggcatcggaactcggttttcta

SEQ ID NO: 1557068 - DNA, 25 bp, Homo sapien
aggcatcggaactcggttttctagt

SEQ ID NO: 1557069 - DNA, 25 bp, Homo sapien
accaggcatcggaactcggttttct

SEQ ID NO: 1557070 - DNA, 25 bp, Homo sapien
tcacgacagttgttaagggcacccc

SEQ ID NO: 1557071 - DNA, 25 bp, Homo sapien
caaaatagttactctcccaggttgc

SEQ ID NO: 1557072 - DNA, 25 bp, Homo sapien
ctgtggcttcaatgtactcaataca

SEQ ID NO: 1557073 - DNA, 25 bp, Homo sapien
caggttgcctttgtgatggatggcc

SEQ ID NO: 1557074 - DNA, 25 bp, Homo sapien
accactatgcctggcatgcatgcat

SEQ ID NO: 1557075 - DNA, 25 bp, Homo sapien
atcagagctcagtgcagccttggaa

SEQ ID NO: 1557076 - DNA, 25 bp, Homo sapien
cagagctcagtgcagccttggaact

SEQ ID NO: 1557077 - DNA, 25 bp, Homo sapien
actatgcctggcatgcatgcatgct

SEQ ID NO: 1557078 - DNA, 25 bp, Homo sapien
cacggcaaggttttggtctcgctca

SEQ ID NO: 1557079 - DNA, 25 bp, Homo sapien
gttcaagtcccgatttatcaatggc

SEQ ID NO: 1557080 - DNA, 25 bp, Homo sapien
taatgggcttgaatgctactcctgc

SEQ ID NO: 1557081 - DNA, 25 bp, Homo sapien
tatttttagagtgatgggatagttc

SEQ ID NO: 1557082 - DNA, 25 bp, Homo sapien
gaggtggaattcagaagtgacgccc

SEQ ID NO: 1557083 - DNA, 25 bp, Homo sapien
gaagtgacgcccaagatatcatgtt

SEQ ID NO: 1557084 - DNA, 25 bp, Homo sapien
gaattcagaagtgacgcccaagata

SEQ ID NO: 1557085 - DNA, 25 bp, Homo sapien
ctcctcacatcaaaaaccaaaatcc

SEQ ID NO: 1557086 - DNA, 25 bp, Homo sapien
caagggtaaatgaactggtcagaaa

SEQ ID NO: 1557087 - DNA, 25 bp, Homo sapien
ccaatttccctcacaatgtaggagc

SEQ ID NO: 1557088 - DNA, 25 bp, Homo sapien
tttcagaagtatgaacaagggtaaa

SEQ ID NO: 1557089 - DNA, 25 bp, Homo sapien
gacaggtgcaaatcagaaccaattt

SEQ ID NO: 1557090 - DNA, 25 bp, Homo sapien
ccagcctttccatgtaaccggagct

SEQ ID NO: 1557091 - DNA, 25 bp, Homo sapien
tgtggcagtgacatgccctcatcca

SEQ ID NO: 1557092 - DNA, 25 bp, Homo sapien
gctgagagagtgaaagtcgaatatc

SEQ ID NO: 1557093 - DNA, 25 bp, Homo sapien
gcctttccatgtaaccggagctgag

SEQ ID NO: 1557094 - DNA, 25 bp, Homo sapien
tataagcaagtgtttccctaagttc

SEQ ID NO: 1557095 - DNA, 25 bp, Homo sapien
agggcatggaagctgcacgaccttc

SEQ ID NO: 1557096 - DNA, 25 bp, Homo sapien
ttccaactgtgagtcttaagaccct

SEQ ID NO: 1557097 - DNA, 25 bp, Homo sapien
ccaagggcaggtatcgggaaacaca

SEQ ID NO: 1557098 - DNA, 25 bp, Homo sapien
tctagaaagggaaccgcggttcatg

SEQ ID NO: 1557099 - DNA, 25 bp, Homo sapien
tatggaatacttccaccacccacaa

SEQ ID NO: 1557100 - DNA, 25 bp, Homo sapien
cagcttccaggctaccactggttgg

SEQ ID NO: 1557101 - DNA, 25 bp, Homo sapien
gcgcctggcccgataattttgaaat

SEQ ID NO: 1557102 - DNA, 25 bp, Homo sapien
gatggagacaaactggtccacagct

SEQ ID NO: 1557103 - DNA, 25 bp, Homo sapien
tggtccacagctgccgggctccaca

SEQ ID NO: 1557104 - DNA, 25 bp, Homo sapien
acagctgccgggctccacattcgcc

SEQ ID NO: 1557105 - DNA, 25 bp, Homo sapien
atgatggagacaaactggtccacag

SEQ ID NO: 1557106 - DNA, 25 bp, Homo sapien
tatgagtaaaaacggccaaatgctg

SEQ ID NO: 1557107 - DNA, 25 bp, Homo sapien
tagtctgggcagtgaagtaaaacct

SEQ ID NO: 1557108 - DNA, 25 bp, Homo sapien
tcccatctggtgtgcaggatcatac

SEQ ID NO: 1557109 - DNA, 25 bp, Homo sapien
ggagaatcacacaaaagcaaccagg

SEQ ID NO: 1557110 - DNA, 25 bp, Homo sapien
ttaaatggcacaaaaggagcagttt

SEQ ID NO: 1557111 - DNA, 25 bp, Homo sapien
gccacaatgcatggctaactaaaaa

SEQ ID NO: 1557112 - DNA, 25 bp, Homo sapien
atagacatgtgccacaatgcatggc

SEQ ID NO: 1557113 - DNA, 25 bp, Homo sapien
gtgccacaatgcatggctaactaaa

SEQ ID NO: 1557114 - DNA, 25 bp, Homo sapien
actatagacatgtgccacaatgcat

SEQ ID NO: 1557115 - DNA, 25 bp, Homo sapien
gtgggaggggggtattcacagaagc

SEQ ID NO: 1557116 - DNA, 25 bp, Homo sapien
gggaggggggtattcacagaagcat

SEQ ID NO: 1557117 - DNA, 25 bp, Homo sapien
caggtgggaggggggtattcacaga

SEQ ID NO: 1557118 - DNA, 25 bp, Homo sapien
gcaggtgggaggggggtattcacag

SEQ ID NO: 1557119 - DNA, 25 bp, Homo sapien
tcctgcagccgagagtgggtactgc

SEQ ID NO: 1557120 - DNA, 25 bp, Homo sapien
accaagggcccgagaaggtcctgca

SEQ ID NO: 1557121 - DNA, 25 bp, Homo sapien
ttgggaccactctcacaggacagcc

SEQ ID NO: 1557122 - DNA, 25 bp, Homo sapien
gcctgctgtaccgtcctgtttgtac

SEQ ID NO: 1557123 - DNA, 25 bp, Homo sapien
ttatagaggcatggggatttgctgg

SEQ ID NO: 1557124 - DNA, 25 bp, Homo sapien
tctattacgatgacttgactgggtg

SEQ ID NO: 1557125 - DNA, 25 bp, Homo sapien
tatacattcccgatgccagcgatgc

SEQ ID NO: 1557126 - DNA, 25 bp, Homo sapien
tgcgcacacggccatgtcataaatc

SEQ ID NO: 1557127 - DNA, 25 bp, Homo sapien
taattcccctgtcagtcaagacctg

SEQ ID NO: 1557128 - DNA, 25 bp, Homo sapien
taaggcaggctaaactgcaaggccg

SEQ ID NO: 1557129 - DNA, 25 bp, Homo sapien
gagatcgtctatgcacagtccactg

SEQ ID NO: 1557130 - DNA, 25 bp, Homo sapien
gagcgtggccaaaacaagacagttt

SEQ ID NO: 1557131 - DNA, 25 bp, Homo sapien
catgacctattctgagagcgtggcc

SEQ ID NO: 1557132 - DNA, 25 bp, Homo sapien
cctttcctggtatcctgattttctg

SEQ ID NO: 1557133 - DNA, 25 bp, Homo sapien
tccaaacaggttttgatcctggacc

SEQ ID NO: 1557134 - DNA, 25 bp, Homo sapien
ggcaggcccttcttagcagcagtgc

SEQ ID NO: 1557135 - DNA, 25 bp, Homo sapien
gccagcgtcaggcttcgcctctgct

SEQ ID NO: 1557136 - DNA, 25 bp, Homo sapien
ctaccagaaatctccaaagacccat

SEQ ID NO: 1557137 - DNA, 25 bp, Homo sapien
acgaggccgtaccagagcatcaatt

SEQ ID NO: 1557138 - DNA, 25 bp, Homo sapien
ctggaaagcacgaggccgtaccaga

SEQ ID NO: 1557139 - DNA, 25 bp, Homo sapien
tcaacttagtacttcctgtcatctg

SEQ ID NO: 1557140 - DNA, 25 bp, Homo sapien
gcatcaattaatcatcaacttagta

SEQ ID NO: 1557141 - DNA, 25 bp, Homo sapien
gaaacttcactagatggatcgtcac

SEQ ID NO: 1557142 - DNA, 25 bp, Homo sapien
caggagacgaactgcaaattagcga

SEQ ID NO: 1557143 - DNA, 25 bp, Homo sapien
cgatctggcaattatcagtggtgtg

SEQ ID NO: 1557144 - DNA, 25 bp, Homo sapien
tagatggatcgtcacacaaatggaa

SEQ ID NO: 1557145 - DNA, 25 bp, Homo sapien
gcgggactgaggactgctctgcatt

SEQ ID NO: 1557146 - DNA, 25 bp, Homo sapien
tcagcgggactgaggactgctctgc

SEQ ID NO: 1557147 - DNA, 25 bp, Homo sapien
cttcagcgggactgaggactgctct

SEQ ID NO: 1557148 - DNA, 25 bp, Homo sapien
ggactgaggactgctctgcattgcc

SEQ ID NO: 1557149 - DNA, 25 bp, Homo sapien
tatttcacatatgagcaagccttgg

SEQ ID NO: 1557150 - DNA, 25 bp, Homo sapien
aatagcaccagtctcaagagtccgg

SEQ ID NO: 1557151 - DNA, 25 bp, Homo sapien
cagcttttgagatggcacacccgta

SEQ ID NO: 1557152 - DNA, 25 bp, Homo sapien
taatgcagcaatgtcaccgttcctg

SEQ ID NO: 1557153 - DNA, 25 bp, Homo sapien
cttgatcaaactgtctctgcagact

SEQ ID NO: 1557154 - DNA, 25 bp, Homo sapien
gacccggtagatgccttccgtgctc

SEQ ID NO: 1557155 - DNA, 25 bp, Homo sapien
catctcagacttgttcccgctgacc

SEQ ID NO: 1557156 - DNA, 25 bp, Homo sapien
gatcaaactgtctctgcagactctc

SEQ ID NO: 1557157 - DNA, 25 bp, Homo sapien
ggctcgctttccaggtaggtcacaa

SEQ ID NO: 1557158 - DNA, 25 bp, Homo sapien
ggtaagctggtacaggatctcccat

SEQ ID NO: 1557159 - DNA, 25 bp, Homo sapien
gtctcccacagattagcaggcgttt

SEQ ID NO: 1557160 - DNA, 25 bp, Homo sapien
gatggtgcttcggttcactgacagg

SEQ ID NO: 1557161 - DNA, 25 bp, Homo sapien
tgtgtgcttccaccaagtcgatctg

SEQ ID NO: 1557162 - DNA, 25 bp, Homo sapien
gagaaaaagctcttcatggcaccag

SEQ ID NO: 1557163 - DNA, 25 bp, Homo sapien
gcaccagccacggtattcaccgtaa

SEQ ID NO: 1557164 - DNA, 25 bp, Homo sapien
gatctgcatgttatacgggaccagg

SEQ ID NO: 1557165 - DNA, 25 bp, Homo sapien
ccaacactgggctgccggtactcac

SEQ ID NO: 1557166 - DNA, 25 bp, Homo sapien
gagggcaggacctattcttccagtg

SEQ ID NO: 1557167 - DNA, 25 bp, Homo sapien
atctggttaattcccttgccctctg

SEQ ID NO: 1557168 - DNA, 25 bp, Homo sapien
tctaacagccagcatccattctgag

SEQ ID NO: 1557169 - DNA, 25 bp, Homo sapien
taaccctcagataagcacctaaggt

SEQ ID NO: 1557170 - DNA, 25 bp, Homo sapien
ttgggggaaacctgcaactctcttg

SEQ ID NO: 1557171 - DNA, 25 bp, Homo sapien
tggtgtaaccctcagataagcacct

SEQ ID NO: 1557172 - DNA, 25 bp, Homo sapien
ggaaacctgcaactctcttggtgta

SEQ ID NO: 1557173 - DNA, 25 bp, Homo sapien
agaaggctcgcccatctggacaaac

SEQ ID NO: 1557174 - DNA, 25 bp, Homo sapien
ggcatcctctgtggtactacacaaa

SEQ ID NO: 1557175 - DNA, 25 bp, Homo sapien
ggccagtgagaaggctcgcccatct

SEQ ID NO: 1557176 - DNA, 25 bp, Homo sapien
gtggtactacacaaagtccagggaa

SEQ ID NO: 1557177 - DNA, 25 bp, Homo sapien
tgatctctgggcagctagcagagac

SEQ ID NO: 1557178 - DNA, 25 bp, Homo sapien
ctctggttgctggatcacaggtggc

SEQ ID NO: 1557179 - DNA, 25 bp, Homo sapien
gcagctagcagagacactcccttct

SEQ ID NO: 1557180 - DNA, 25 bp, Homo sapien
atcacaggtggctgtgatctctggg

SEQ ID NO: 1557181 - DNA, 25 bp, Homo sapien
tgtgcttgtttaaagctccctcttt

SEQ ID NO: 1557182 - DNA, 25 bp, Homo sapien
gactaatgtcttgcccctgaggaac

SEQ ID NO: 1557183 - DNA, 25 bp, Homo sapien
taaagctccctctttagaggtgggc

SEQ ID NO: 1557184 - DNA, 25 bp, Homo sapien
tgggcagtgacaagatgagactaat

SEQ ID NO: 1557185 - DNA, 25 bp, Homo sapien
gacagtgcctccttcattcggtgac

SEQ ID NO: 1557186 - DNA, 25 bp, Homo sapien
gaatgccaatgacgggcacgctgag

SEQ ID NO: 1557187 - DNA, 25 bp, Homo sapien
cttgggcaagtgacaccttagggtg

SEQ ID NO: 1557188 - DNA, 25 bp, Homo sapien
gatcctgactcagatggccctggta

SEQ ID NO: 1557189 - DNA, 25 bp, Homo sapien
atgatggtgccagaccgtctcggcc

SEQ ID NO: 1557190 - DNA, 25 bp, Homo sapien
gccagaccgtctcggccggagacat

SEQ ID NO: 1557191 - DNA, 25 bp, Homo sapien
tctcggccggagacatatgtgtgcc

SEQ ID NO: 1557192 - DNA, 25 bp, Homo sapien
agatgatggtgccagaccgtctcgg

SEQ ID NO: 1557193 - DNA, 25 bp, Homo sapien
atgtttccttcgtggactccagggc

SEQ ID NO: 1557194 - DNA, 25 bp, Homo sapien
ctcacgaaggagatggcagcgacct

SEQ ID NO: 1557195 - DNA, 25 bp, Homo sapien
cgcagatgattgctaatgggcccgg

SEQ ID NO: 1557196 - DNA, 25 bp, Homo sapien
gaagagaggcctgttaaagcgcaga

SEQ ID NO: 1557197 - DNA, 25 bp, Homo sapien
aggaactcgtcaccccattttgagg

SEQ ID NO: 1557198 - DNA, 25 bp, Homo sapien
gagtcagtcggtcatgagaccaagg

SEQ ID NO: 1557199 - DNA, 25 bp, Homo sapien
cacaatcgtgtgaggcaggaactcg

SEQ ID NO: 1557200 - DNA, 25 bp, Homo sapien
tatgcacttcaccaaaggaactacg

SEQ ID NO: 1557201 - DNA, 25 bp, Homo sapien
gcccccgctgaagggcggcactgtg

SEQ ID NO: 1557202 - DNA, 25 bp, Homo sapien
ccaggcccccgctgaagggcggcac

SEQ ID NO: 1557203 - DNA, 25 bp, Homo sapien
aggcccccgctgaagggcggcactg

SEQ ID NO: 1557204 - DNA, 25 bp, Homo sapien
ccccgctgaagggcggcactgtgtg

SEQ ID NO: 1557205 - DNA, 25 bp, Homo sapien
gccttgcctttcatggccgaggctg

SEQ ID NO: 1557206 - DNA, 25 bp, Homo sapien
cttgcctttcatggccgaggctggt

SEQ ID NO: 1557207 - DNA, 25 bp, Homo sapien
tgtgcccaaggctggcacacctggc

SEQ ID NO: 1557208 - DNA, 25 bp, Homo sapien
aagccttgcctttcatggccgaggc

SEQ ID NO: 1557209 - DNA, 25 bp, Homo sapien
gacatacttgaagacttcgtggttt

SEQ ID NO: 1557210 - DNA, 25 bp, Homo sapien
gtttaggtgagagatgacatacttg

SEQ ID NO: 1557211 - DNA, 25 bp, Homo sapien
taatacctccttaagggcatgcaac

SEQ ID NO: 1557212 - DNA, 25 bp, Homo sapien
gcaacttctgctcccggtcgttgat

SEQ ID NO: 1557213 - DNA, 25 bp, Homo sapien
actcaatggtcagaactgtgcaggg

SEQ ID NO: 1557214 - DNA, 25 bp, Homo sapien
caccaaactcaatggtcagaactgt

SEQ ID NO: 1557215 - DNA, 25 bp, Homo sapien
gacaccaaactcaatggtcagaact

SEQ ID NO: 1557216 - DNA, 25 bp, Homo sapien
caaactcaatggtcagaactgtgca

SEQ ID NO: 1557217 - DNA, 25 bp, Homo sapien
ctgtgagggcgtccatagtgctgaa

SEQ ID NO: 1557218 - DNA, 25 bp, Homo sapien
atggagaggttctcgctggtcatga

SEQ ID NO: 1557219 - DNA, 25 bp, Homo sapien
tgatgggccgattgtagaagaagaa

SEQ ID NO: 1557220 - DNA, 25 bp, Homo sapien
tcaatgattgtctggtaggtgcgcg

SEQ ID NO: 1557221 - DNA, 25 bp, Homo sapien
agcagtggctgcattggggactggg

SEQ ID NO: 1557222 - DNA, 25 bp, Homo sapien
aagcagtggctgcattggggactgg

SEQ ID NO: 1557223 - DNA, 25 bp, Homo sapien
ggcgactgtgggggcgacggctgac

SEQ ID NO: 1557224 - DNA, 25 bp, Homo sapien
agcgtgtgttcggcttgaagctggg

SEQ ID NO: 1557225 - DNA, 25 bp, Homo sapien
gcgtgtgttcggcttgaagctggga

SEQ ID NO: 1557226 - DNA, 25 bp, Homo sapien
ggagccattgcctgcctagttcagt

SEQ ID NO: 1557227 - DNA, 25 bp, Homo sapien
gcagcccagccgatggtaccattgg

SEQ ID NO: 1557228 - DNA, 25 bp, Homo sapien
agagaggaccggttctcctgtcgcc

SEQ ID NO: 1557229 - DNA, 25 bp, Homo sapien
cccactgaggtcttgagaaggtaat

SEQ ID NO: 1557230 - DNA, 25 bp, Homo sapien
tgagcagctacgtggggtggtggtc

SEQ ID NO: 1557231 - DNA, 25 bp, Homo sapien
gagcagctacgtggggtggtggtcc

SEQ ID NO: 1557232 - DNA, 25 bp, Homo sapien
ggctggtgtgagcagctacgtgggg

SEQ ID NO: 1557233 - DNA, 25 bp, Homo sapien
ggtgtgagcagctacgtggggtggt

SEQ ID NO: 1557234 - DNA, 25 bp, Homo sapien
caggcacaaagctatcctccgttgt

SEQ ID NO: 1557235 - DNA, 25 bp, Homo sapien
cgtggcctacacgttcccaaggagg

SEQ ID NO: 1557236 - DNA, 25 bp, Homo sapien
cactgtcccgaccatgggctctgta

SEQ ID NO: 1557237 - DNA, 25 bp, Homo sapien
cctcagcaggtacctagtggtggca

SEQ ID NO: 1557238 - DNA, 25 bp, Homo sapien
gaaggctgtggagtgggacggtggg

SEQ ID NO: 1557239 - DNA, 25 bp, Homo sapien
ccagggaatgtttcgggaaggctgt

SEQ ID NO: 1557240 - DNA, 25 bp, Homo sapien
agtgttcctttgtttgccagggaat

SEQ ID NO: 1557241 - DNA, 25 bp, Homo sapien
tagtgttcctttgtttgccagggaa

SEQ ID NO: 1557242 - DNA, 25 bp, Homo sapien
cagagtggaatcttgaggtctgtag

SEQ ID NO: 1557243 - DNA, 25 bp, Homo sapien
ctatcgtaatggactgtgttctggg

SEQ ID NO: 1557244 - DNA, 25 bp, Homo sapien
tagcgactagacctaagtgggtgag

SEQ ID NO: 1557245 - DNA, 25 bp, Homo sapien
tgccacaaagacgagggtcagctcc

SEQ ID NO: 1557246 - DNA, 25 bp, Homo sapien
ccaccccacgcacatgctcaattag

SEQ ID NO: 1557247 - DNA, 25 bp, Homo sapien
ccccaccccacgcacatgctcaatt

SEQ ID NO: 1557248 - DNA, 25 bp, Homo sapien
accccacgcacatgctcaattagtg

SEQ ID NO: 1557249 - DNA, 25 bp, Homo sapien
ccccacgcacatgctcaattagtgt

SEQ ID NO: 1557250 - DNA, 25 bp, Homo sapien
gatgaaacgattccacttcaacacc

SEQ ID NO: 1557251 - DNA, 25 bp, Homo sapien
gggatgaaacgattccacttcaaca

SEQ ID NO: 1557252 - DNA, 25 bp, Homo sapien
ggctgggatgaaacgattccacttc

SEQ ID NO: 1557253 - DNA, 25 bp, Homo sapien
gaaacgattccacttcaacacccaa

SEQ ID NO: 1557254 - DNA, 25 bp, Homo sapien
cagcagaccgccattccttcaaagt

SEQ ID NO: 1557255 - DNA, 25 bp, Homo sapien
attccttcaaagtgccccacctcgc

SEQ ID NO: 1557256 - DNA, 25 bp, Homo sapien
ccaggaaggatgccccttcgagggc

SEQ ID NO: 1557257 - DNA, 25 bp, Homo sapien
cttcgagggcaccagcagaccgcca

SEQ ID NO: 1557258 - DNA, 25 bp, Homo sapien
atgatatgcaggcacagcgcctctg

SEQ ID NO: 1557259 - DNA, 25 bp, Homo sapien
caattacgtgaggagctgaccaggt

SEQ ID NO: 1557260 - DNA, 25 bp, Homo sapien
tatttcttaaagtgcaacgagcccc

SEQ ID NO: 1557261 - DNA, 25 bp, Homo sapien
taacttaggcctgtagcatcgctgc

SEQ ID NO: 1557262 - DNA, 25 bp, Homo sapien
tccagcaggaagcaaaaccaaggcg

SEQ ID NO: 1557263 - DNA, 25 bp, Homo sapien
ctgcgaaacagaattttgggcacac

SEQ ID NO: 1557264 - DNA, 25 bp, Homo sapien
cagaattttgggcacacagccagac

SEQ ID NO: 1557265 - DNA, 25 bp, Homo sapien
aaacagaattttgggcacacagcca

SEQ ID NO: 1557266 - DNA, 25 bp, Homo sapien
gcacacagccagactactaacacat

SEQ ID NO: 1557267 - DNA, 25 bp, Homo sapien
gatacagatcacataaggccttttg

SEQ ID NO: 1557268 - DNA, 25 bp, Homo sapien
taacaccagctagacgatgttccgg

SEQ ID NO: 1557269 - DNA, 25 bp, Homo sapien
acaccattcccattgagacaagtac

SEQ ID NO: 1557270 - DNA, 25 bp, Homo sapien
tcattgagggctgaccatgcactaa

SEQ ID NO: 1557271 - DNA, 25 bp, Homo sapien
gtgctgtcctggatgacggtggtga

SEQ ID NO: 1557272 - DNA, 25 bp, Homo sapien
aacagggtaggatctgatgggcagg

SEQ ID NO: 1557273 - DNA, 25 bp, Homo sapien
ggagtgacataaacccccagcaggt

SEQ ID NO: 1557274 - DNA, 25 bp, Homo sapien
ctttgaagaacagggtaggatctga

SEQ ID NO: 1557275 - DNA, 25 bp, Homo sapien
gagtgacataaacccccagcaggta

SEQ ID NO: 1557276 - DNA, 25 bp, Homo sapien
gagggcagatgtcttggtgagatca

SEQ ID NO: 1557277 - DNA, 25 bp, Homo sapien
gggagtgggtgagcatggagggcag

SEQ ID NO: 1557278 - DNA, 25 bp, Homo sapien
agatgtcttggtgagatcagacagg

SEQ ID NO: 1557279 - DNA, 25 bp, Homo sapien
gagtgggtgagcatggagggcagat

SEQ ID NO: 1557280 - DNA, 25 bp, Homo sapien
ggcttcctctaagggcattggagat

SEQ ID NO: 1557281 - DNA, 25 bp, Homo sapien
caggcttcctctaagggcattggag

SEQ ID NO: 1557282 - DNA, 25 bp, Homo sapien
cttcctctaagggcattggagatcc

SEQ ID NO: 1557283 - DNA, 25 bp, Homo sapien
tcaggcttcctctaagggcattgga

SEQ ID NO: 1557284 - DNA, 25 bp, Homo sapien
tgaataacacaccgagaaaagtact

SEQ ID NO: 1557285 - DNA, 25 bp, Homo sapien
gtgtgccccagcctgaatgaataac

SEQ ID NO: 1557286 - DNA, 25 bp, Homo sapien
gtgccccagcctgaatgaataacac

SEQ ID NO: 1557287 - DNA, 25 bp, Homo sapien
aatgaataacacaccgagaaaagta

SEQ ID NO: 1557288 - DNA, 25 bp, Homo sapien
ctttctactcttcccgggatggcca

SEQ ID NO: 1557289 - DNA, 25 bp, Homo sapien
cgccatccgggctttctactcttcc

SEQ ID NO: 1557290 - DNA, 25 bp, Homo sapien
aaagccgccatccgggctttctact

SEQ ID NO: 1557291 - DNA, 25 bp, Homo sapien
cgggctttctactcttcccgggatg

SEQ ID NO: 1557292 - DNA, 25 bp, Homo sapien
gcttctccttctaatccggccttac

SEQ ID NO: 1557293 - DNA, 25 bp, Homo sapien
tcctgggacacttcgcttccagccc

SEQ ID NO: 1557294 - DNA, 25 bp, Homo sapien
gctgcttctccttctaatccggcct

SEQ ID NO: 1557295 - DNA, 25 bp, Homo sapien
tgcttctccttctaatccggcctta

SEQ ID NO: 1557296 - DNA, 25 bp, Homo sapien
gaccgccagtccgattacttggccg

SEQ ID NO: 1557297 - DNA, 25 bp, Homo sapien
cgcaggaccgccagtccgattactt

SEQ ID NO: 1557298 - DNA, 25 bp, Homo sapien
gtccgattacttggccgcagagcag

SEQ ID NO: 1557299 - DNA, 25 bp, Homo sapien
gccagtccgattacttggccgcaga

SEQ ID NO: 1557300 - DNA, 25 bp, Homo sapien
gcacgcggcgcgcatacggatcgaa

SEQ ID NO: 1557301 - DNA, 25 bp, Homo sapien
ctggcgctccgggtgaggacgtgcc

SEQ ID NO: 1557302 - DNA, 25 bp, Homo sapien
ggcccgcgcgctgcgtgccaagcat

SEQ ID NO: 1557303 - DNA, 25 bp, Homo sapien
gggccggctcccgcataccaatggg

SEQ ID NO: 1557304 - DNA, 25 bp, Homo sapien
gggaaactgagatccgtgcagggct

SEQ ID NO: 1557305 - DNA, 25 bp, Homo sapien
aaactgagatccgtgcagggctcag

SEQ ID NO: 1557306 - DNA, 25 bp, Homo sapien
gcaacgcttagtgccctcgggagac

SEQ ID NO: 1557307 - DNA, 25 bp, Homo sapien
ggccaggggcaacgcttagtgccct

SEQ ID NO: 1557308 - DNA, 25 bp, Homo sapien
ccggggggctcgctcaggcgggctc

SEQ ID NO: 1557309 - DNA, 25 bp, Homo sapien
catcagcccgggtagaaagtcccag

SEQ ID NO: 1557310 - DNA, 25 bp, Homo sapien
ggtccggacggcgccttgaccatca

SEQ ID NO: 1557311 - DNA, 25 bp, Homo sapien
gcgccgcggcctcccacgcatttga

SEQ ID NO: 1557312 - DNA, 25 bp, Homo sapien
acgcatttgacctcgcttccgccgc

SEQ ID NO: 1557313 - DNA, 25 bp, Homo sapien
cgttccgggacttctccttgcgctg

SEQ ID NO: 1557314 - DNA, 25 bp, Homo sapien
ccggcgcaggcggaggtaggtgacg

SEQ ID NO: 1557315 - DNA, 25 bp, Homo sapien
gaggcgcacgatggaagccttgtcc

SEQ ID NO: 1557316 - DNA, 25 bp, Homo sapien
ttggccagctcgaagaactccaggt

SEQ ID NO: 1557317 - DNA, 25 bp, Homo sapien
gcacatgttgttcgcggtaatgaca

SEQ ID NO: 1557318 - DNA, 25 bp, Homo sapien
atgacagtaatcagcggcgctaatg

SEQ ID NO: 1557319 - DNA, 25 bp, Homo sapien
tccgcgccagtcaattcgcctaatt

SEQ ID NO: 1557320 - DNA, 25 bp, Homo sapien
ctaattaccgcctgggaagccggat

SEQ ID NO: 1557321 - DNA, 25 bp, Homo sapien
ggcaagcaccatggggtggggcagt

SEQ ID NO: 1557322 - DNA, 25 bp, Homo sapien
gggggcaagcaccatggggtggggc

SEQ ID NO: 1557323 - DNA, 25 bp, Homo sapien
tggggtggggcagtgccgggtcacc

SEQ ID NO: 1557324 - DNA, 25 bp, Homo sapien
ggcagtgccgggtcacctttgcctt

SEQ ID NO: 1557325 - DNA, 25 bp, Homo sapien
ccatcgtcaaagcgccgcaggcctg

SEQ ID NO: 1557326 - DNA, 25 bp, Homo sapien
atgccccatcgtcaaagcgccgcag

SEQ ID NO: 1557327 - DNA, 25 bp, Homo sapien
gccccatcgtcaaagcgccgcaggc

SEQ ID NO: 1557328 - DNA, 25 bp, Homo sapien
cccatcgtcaaagcgccgcaggcct

SEQ ID NO: 1557329 - DNA, 25 bp, Homo sapien
tgctcgaagacttcggagaccagcg

SEQ ID NO: 1557330 - DNA, 25 bp, Homo sapien
ccaggtgctgctcgaagacttcgga

SEQ ID NO: 1557331 - DNA, 25 bp, Homo sapien
caggtgctgctcgaagacttcggag

SEQ ID NO: 1557332 - DNA, 25 bp, Homo sapien
gcaagatgtgacctcccaggtgctg

SEQ ID NO: 1557333 - DNA, 25 bp, Homo sapien
tctctgagatgtagaggaattttcc

SEQ ID NO: 1557334 - DNA, 25 bp, Homo sapien
tgagagacccagatagatggagact

SEQ ID NO: 1557335 - DNA, 25 bp, Homo sapien
tggttcaaggcgaacacaaagccat

SEQ ID NO: 1557336 - DNA, 25 bp, Homo sapien
gagatgtagaggaattttccttcct

SEQ ID NO: 1557337 - DNA, 25 bp, Homo sapien
tgaggtgcgcgcgcagtaactcgct

SEQ ID NO: 1557338 - DNA, 25 bp, Homo sapien
ggtgcgcgcgcagtaactcgctcgc

SEQ ID NO: 1557339 - DNA, 25 bp, Homo sapien
gggcgggtgaggtgcgcgcgcagta

SEQ ID NO: 1557340 - DNA, 25 bp, Homo sapien
ggcgggtgaggtgcgcgcgcagtaa

SEQ ID NO: 1557341 - DNA, 25 bp, Homo sapien
tcgaagacgctgctgcccgtcatct

SEQ ID NO: 1557342 - DNA, 25 bp, Homo sapien
ggtgaatgtagtcgaagacgctgct

SEQ ID NO: 1557343 - DNA, 25 bp, Homo sapien
aatgtagtcgaagacgctgctgccc

SEQ ID NO: 1557344 - DNA, 25 bp, Homo sapien
ctgagtggtccccagggtgaatgta

SEQ ID NO: 1557345 - DNA, 25 bp, Homo sapien
cgatctcgggggtatctgcaagcga

SEQ ID NO: 1557346 - DNA, 25 bp, Homo sapien
tctcgggggtatctgcaagcgaaga

SEQ ID NO: 1557347 - DNA, 25 bp, Homo sapien
ccgggcgtcggcgtccgcagcccca

SEQ ID NO: 1557348 - DNA, 25 bp, Homo sapien
gtcggcgtccgcagccccagttgct

SEQ ID NO: 1557349 - DNA, 25 bp, Homo sapien
aggaggggggcaccttggtgaggct

SEQ ID NO: 1557350 - DNA, 25 bp, Homo sapien
cagggaggaggggggcaccttggtg

SEQ ID NO: 1557351 - DNA, 25 bp, Homo sapien
aggggggcaccttggtgaggctggc

SEQ ID NO: 1557352 - DNA, 25 bp, Homo sapien
gaggaggggggcaccttggtgaggc

SEQ ID NO: 1557353 - DNA, 25 bp, Homo sapien
acgtgcagccccctcttggtgagcg

SEQ ID NO: 1557354 - DNA, 25 bp, Homo sapien
tgagcgtggatttcatgcggacaaa

SEQ ID NO: 1557355 - DNA, 25 bp, Homo sapien
tcatgcggacaaagaaggagcgctc

SEQ ID NO: 1557356 - DNA, 25 bp, Homo sapien
cttgtaccctgaggccttgacgtgc

SEQ ID NO: 1557357 - DNA, 25 bp, Homo sapien
gaagacgatcatgtgtccatggagt

SEQ ID NO: 1557358 - DNA, 25 bp, Homo sapien
tgtccatggagtggcagctcagcca

SEQ ID NO: 1557359 - DNA, 25 bp, Homo sapien
gctgagacggaagacgatcatgtgt

SEQ ID NO: 1557360 - DNA, 25 bp, Homo sapien
tgggcccgaaggcgcccagtcacgt

SEQ ID NO: 1557361 - DNA, 25 bp, Homo sapien
gccccaggtccatgtggtcgctgac

SEQ ID NO: 1557362 - DNA, 25 bp, Homo sapien
ccccaggtccatgtggtcgctgact

SEQ ID NO: 1557363 - DNA, 25 bp, Homo sapien
gtccgtggacaaactggtagcagct

SEQ ID NO: 1557364 - DNA, 25 bp, Homo sapien
tgtccgtggacaaactggtagcagc

SEQ ID NO: 1557365 - DNA, 25 bp, Homo sapien
ctgtccgtggacaaactggtagcag

SEQ ID NO: 1557366 - DNA, 25 bp, Homo sapien
ggctctggcggatcctcgtggcgtc

SEQ ID NO: 1557367 - DNA, 25 bp, Homo sapien
ccacgtggctctggcggatcctcgt

SEQ ID NO: 1557368 - DNA, 25 bp, Homo sapien
agtccacgtggctctggcggatcct

SEQ ID NO: 1557369 - DNA, 25 bp, Homo sapien
tggctctggcggatcctcgtggcgt

SEQ ID NO: 1557370 - DNA, 25 bp, Homo sapien
cagggagtgggatgctcgggtctgg

SEQ ID NO: 1557371 - DNA, 25 bp, Homo sapien
agtccctggagctgtaggtgcagca

SEQ ID NO: 1557372 - DNA, 25 bp, Homo sapien
gctgctcttccaatgctaaacggag

SEQ ID NO: 1557373 - DNA, 25 bp, Homo sapien
tgaagaaggacttccagggaccagg

SEQ ID NO: 1557374 - DNA, 25 bp, Homo sapien
gacaggggcaagacagagagccagg

SEQ ID NO: 1557375 - DNA, 25 bp, Homo sapien
gagagccaggtagacaggaggagac

SEQ ID NO: 1557376 - DNA, 25 bp, Homo sapien
gaaaaaggtgaaagcacagagaggc

SEQ ID NO: 1557377 - DNA, 25 bp, Homo sapien
tgggcagggagacggtggggagaag

SEQ ID NO: 1557378 - DNA, 25 bp, Homo sapien
gccaacggtagtaaccagtcatcac

SEQ ID NO: 1557379 - DNA, 25 bp, Homo sapien
gtaaccagtcatcacctgacccttg

SEQ ID NO: 1557380 - DNA, 25 bp, Homo sapien
cggtagtaaccagtcatcacctgac

SEQ ID NO: 1557381 - DNA, 25 bp, Homo sapien
ctgcagccaacggtagtaaccagtc

SEQ ID NO: 1557382 - DNA, 25 bp, Homo sapien
caaagcacatggtgctccccggggc

SEQ ID NO: 1557383 - DNA, 25 bp, Homo sapien
aaagcacatggtgctccccggggct

SEQ ID NO: 1557384 - DNA, 25 bp, Homo sapien
aggagtttggccaccctcggcttgg

SEQ ID NO: 1557385 - DNA, 25 bp, Homo sapien
atccaaaggagtttggccaccctcg

SEQ ID NO: 1557386 - DNA, 25 bp, Homo sapien
cctcctcacaggccacgctggctgg

SEQ ID NO: 1557387 - DNA, 25 bp, Homo sapien
ggcatccaaaggagtttggccaccc

SEQ ID NO: 1557388 - DNA, 25 bp, Homo sapien
gctggagggatcctcgtcgccactg

SEQ ID NO: 1557389 - DNA, 25 bp, Homo sapien
atggccgcaccggatcctgcttcag

SEQ ID NO: 1557390 - DNA, 25 bp, Homo sapien
cactttgatgcgtttgccctgggtc

SEQ ID NO: 1557391 - DNA, 25 bp, Homo sapien
gtcgccactgtcctcggagcctttg

SEQ ID NO: 1557392 - DNA, 25 bp, Homo sapien
aattctcagggctacgggcagagcc

SEQ ID NO: 1557393 - DNA, 25 bp, Homo sapien
gggagagccggcgtttaattctcag

SEQ ID NO: 1557394 - DNA, 25 bp, Homo sapien
gcagagccgggcctactgtcctggg

SEQ ID NO: 1557395 - DNA, 25 bp, Homo sapien
ccggttgtcgcagggtccggcgccg

SEQ ID NO: 1557396 - DNA, 25 bp, Homo sapien
gtcacctcactaggccaggaccggg

SEQ ID NO: 1557397 - DNA, 25 bp, Homo sapien
taggtgtgagtcacctcactaggcc

SEQ ID NO: 1557398 - DNA, 25 bp, Homo sapien
tgggctgtttgtaaaggacgtgaat

SEQ ID NO: 1557399 - DNA, 25 bp, Homo sapien
caggaccgggcatctagatataggg

SEQ ID NO: 1557400 - DNA, 25 bp, Homo sapien
ccaagccaagccatcgcatcacctg

SEQ ID NO: 1557401 - DNA, 25 bp, Homo sapien
tcacctgtgacttgcacgtatacat

SEQ ID NO: 1557402 - DNA, 25 bp, Homo sapien
gcatcacctgtgacttgcacgtata

SEQ ID NO: 1557403 - DNA, 25 bp, Homo sapien
aagccaagccatcgcatcacctgtg

SEQ ID NO: 1557404 - DNA, 25 bp, Homo sapien
tgtcttccagaaacgtcacctgcct

SEQ ID NO: 1557405 - DNA, 25 bp, Homo sapien
gatgaaatagaagctggagccctcc

SEQ ID NO: 1557406 - DNA, 25 bp, Homo sapien
gccatcaggccgagcttttaaagaa

SEQ ID NO: 1557407 - DNA, 25 bp, Homo sapien
tgttggccttgaagcagagggcaca

SEQ ID NO: 1557408 - DNA, 25 bp, Homo sapien
ggtattgaacgctcctcaccctgtg

SEQ ID NO: 1557409 - DNA, 25 bp, Homo sapien
gaagcaggtccaggcgtttctagaa

SEQ ID NO: 1557410 - DNA, 25 bp, Homo sapien
gaaccctagggtgcaccatcactgt

SEQ ID NO: 1557411 - DNA, 25 bp, Homo sapien
tgcaggctgtaacaacccactcagg

SEQ ID NO: 1557412 - DNA, 25 bp, Homo sapien
cagggcttcgaggtttggacacggt

SEQ ID NO: 1557413 - DNA, 25 bp, Homo sapien
ctctttgagaagtgaagcggcactc

SEQ ID NO: 1557414 - DNA, 25 bp, Homo sapien
cgtgtagatagaggagttggctcct

SEQ ID NO: 1557415 - DNA, 25 bp, Homo sapien
cctcgctcagttgcatcttggtgga

SEQ ID NO: 1557416 - DNA, 25 bp, Homo sapien
acctgatatatagttctgtgagttg

SEQ ID NO: 1557417 - DNA, 25 bp, Homo sapien
cctgatatatagttctgtgagttgt

SEQ ID NO: 1557418 - DNA, 25 bp, Homo sapien
gcaagacgccatctccaagaaagac

SEQ ID NO: 1557419 - DNA, 25 bp, Homo sapien
tacacaaagacgaggcaaggattgt

SEQ ID NO: 1557420 - DNA, 25 bp, Homo sapien
ccccattatgcattagagaaaatag

SEQ ID NO: 1557421 - DNA, 25 bp, Homo sapien
ttgaaactcatcctggcatcagttg

SEQ ID NO: 1557422 - DNA, 25 bp, Homo sapien
cttcgtccgagccagcgagtggcat

SEQ ID NO: 1557423 - DNA, 25 bp, Homo sapien
taagtggcatcgctgaaacctggtt

SEQ ID NO: 1557424 - DNA, 25 bp, Homo sapien
ggttgctgttttgttgagaccgcct

SEQ ID NO: 1557425 - DNA, 25 bp, Homo sapien
cctttgtgccgtcgcgctggtggcc

SEQ ID NO: 1557426 - DNA, 25 bp, Homo sapien
cacgggattcccatttggctcgact

SEQ ID NO: 1557427 - DNA, 25 bp, Homo sapien
tccccggcagtgtgcagtaggcatc

SEQ ID NO: 1557428 - DNA, 25 bp, Homo sapien
caattagagtccgagtcagtgctgt

SEQ ID NO: 1557429 - DNA, 25 bp, Homo sapien
ggccaaactggtctgcataaaggat

SEQ ID NO: 1557430 - DNA, 25 bp, Homo sapien
tgtgaataggtgactcagtgccctg

SEQ ID NO: 1557431 - DNA, 25 bp, Homo sapien
tctttgctgcagaacgcttttgctt

SEQ ID NO: 1557432 - DNA, 25 bp, Homo sapien
gagggactcctctccgaataacatg

SEQ ID NO: 1557433 - DNA, 25 bp, Homo sapien
cagatcagagactgtaggagcagcc

SEQ ID NO: 1557434 - DNA, 25 bp, Homo sapien
ttcactggtgatgtaatgaggtgcg

SEQ ID NO: 1557435 - DNA, 25 bp, Homo sapien
gacatacttagagaaccctggccct

SEQ ID NO: 1557436 - DNA, 25 bp, Homo sapien
gaaatgtctgaagcacgaaccgaac

SEQ ID NO: 1557437 - DNA, 25 bp, Homo sapien
tcagttacgggaggaagaaatctcc

SEQ ID NO: 1557438 - DNA, 25 bp, Homo sapien
tatgttcacaactgccgtagagtgg

SEQ ID NO: 1557439 - DNA, 25 bp, Homo sapien
gcagcccgactccagttcaaggaaa

SEQ ID NO: 1557440 - DNA, 25 bp, Homo sapien
caaaggtctgttcgctaagccctcg

SEQ ID NO: 1557441 - DNA, 25 bp, Homo sapien
aatgtatcgtcctgggaatcgcagc

SEQ ID NO: 1557442 - DNA, 25 bp, Homo sapien
cctgttgagcccttttagacttgca

SEQ ID NO: 1557443 - DNA, 25 bp, Homo sapien
tcctcgctcctgctcagctcctttc

SEQ ID NO: 1557444 - DNA, 25 bp, Homo sapien
cgctcctgctcagctcctttcggct

SEQ ID NO: 1557445 - DNA, 25 bp, Homo sapien
ttctggctctcccccgtcgcctcct

SEQ ID NO: 1557446 - DNA, 25 bp, Homo sapien
ctttctggctctcccccgtcgcctc

SEQ ID NO: 1557447 - DNA, 25 bp, Homo sapien
ccacccggacaccgctttcggctct

SEQ ID NO: 1557448 - DNA, 25 bp, Homo sapien
cggacaccgctttcggctctttccg

SEQ ID NO: 1557449 - DNA, 25 bp, Homo sapien
cacccggacaccgctttcggctctt

SEQ ID NO: 1557450 - DNA, 25 bp, Homo sapien
ctccggcgaattcctgaaagtcgtt

SEQ ID NO: 1557451 - DNA, 25 bp, Homo sapien
gccccgcccgttcagctcattctct

SEQ ID NO: 1557452 - DNA, 25 bp, Homo sapien
ctccccttcagccccgcccgttcag

SEQ ID NO: 1557453 - DNA, 25 bp, Homo sapien
ctctccggcgaattcctgaaagtcg

SEQ ID NO: 1557454 - DNA, 25 bp, Homo sapien
ctaagtggtctttgctttgtcaggg

SEQ ID NO: 1557455 - DNA, 25 bp, Homo sapien
taagtggtctttgctttgtcagggc

SEQ ID NO: 1557456 - DNA, 25 bp, Homo sapien
cgttggtgccaaatggtagtgcttc

SEQ ID NO: 1557457 - DNA, 25 bp, Homo sapien
tggaggaacttctctgtgaatgcct

SEQ ID NO: 1557458 - DNA, 25 bp, Homo sapien
tggtcagcaggttccaacaaaatgg

SEQ ID NO: 1557459 - DNA, 25 bp, Homo sapien
cagtgtaaataaccctccctagagc

SEQ ID NO: 1557460 - DNA, 25 bp, Homo sapien
gaatctgcgattggattagcaagga

SEQ ID NO: 1557461 - DNA, 25 bp, Homo sapien
tgcgattggattagcaaggaagaaa

SEQ ID NO: 1557462 - DNA, 25 bp, Homo sapien
cctcaatgaatctgcgattggatta

SEQ ID NO: 1557463 - DNA, 25 bp, Homo sapien
caatgaatctgcgattggattagca

SEQ ID NO: 1557464 - DNA, 25 bp, Homo sapien
gaacatcttggcatgtctggtcctt

SEQ ID NO: 1557465 - DNA, 25 bp, Homo sapien
gagaaccaggtagaccaatcactcc

SEQ ID NO: 1557466 - DNA, 25 bp, Homo sapien
gcaacattatcccttgagaaccagg

SEQ ID NO: 1557467 - DNA, 25 bp, Homo sapien
ggtccttgtcctctaatcccagtaa

SEQ ID NO: 1557468 - DNA, 25 bp, Homo sapien
ccggcagcacgcccggagtgcttct

SEQ ID NO: 1557469 - DNA, 25 bp, Homo sapien
ccgccggcagcacgcccggagtgct

SEQ ID NO: 1557470 - DNA, 25 bp, Homo sapien
cggcagcacgcccggagtgcttctg

SEQ ID NO: 1557471 - DNA, 25 bp, Homo sapien
gccggcagcacgcccggagtgcttc

SEQ ID NO: 1557472 - DNA, 25 bp, Homo sapien
cgctcaagccaaccgcccgccggac

SEQ ID NO: 1557473 - DNA, 25 bp, Homo sapien
gctccggtcccgctcaagccaaccg

SEQ ID NO: 1557474 - DNA, 25 bp, Homo sapien
ggtcccgctcaagccaaccgcccgc

SEQ ID NO: 1557475 - DNA, 25 bp, Homo sapien
tccggtcccgctcaagccaaccgcc

SEQ ID NO: 1557476 - DNA, 25 bp, Homo sapien
taatgccgccgccagcctcctcctt

SEQ ID NO: 1557477 - DNA, 25 bp, Homo sapien
cgccgccagcctcctccttctccac

SEQ ID NO: 1557478 - DNA, 25 bp, Homo sapien
cgccagcctcctccttctccaccat

SEQ ID NO: 1557479 - DNA, 25 bp, Homo sapien
ctaatgccgccgccagcctcctcct

SEQ ID NO: 1557480 - DNA, 25 bp, Homo sapien
caggcggatctgccggtcatactgt

SEQ ID NO: 1557481 - DNA, 25 bp, Homo sapien
gcggatctgccggtcatactgtgcc

SEQ ID NO: 1557482 - DNA, 25 bp, Homo sapien
ggatctgccggtcatactgtgccgc

SEQ ID NO: 1557483 - DNA, 25 bp, Homo sapien
atctgccggtcatactgtgccgcct

SEQ ID NO: 1557484 - DNA, 25 bp, Homo sapien
gcaaacgcctcagaatagacgcccc

SEQ ID NO: 1557485 - DNA, 25 bp, Homo sapien
tccagaccctagcggcctcaagccg

SEQ ID NO: 1557486 - DNA, 25 bp, Homo sapien
gaccctagcggcctcaagccgcgcc

SEQ ID NO: 1557487 - DNA, 25 bp, Homo sapien
tagcggcctcaagccgcgccggccc

SEQ ID NO: 1557488 - DNA, 25 bp, Homo sapien
ctctagtctgcgcgacagagagacc

SEQ ID NO: 1557489 - DNA, 25 bp, Homo sapien
actctagtctgcgcgacagagagac

SEQ ID NO: 1557490 - DNA, 25 bp, Homo sapien
tctagtctgcgcgacagagagaccc

SEQ ID NO: 1557491 - DNA, 25 bp, Homo sapien
cgacaagaagcacccgagaggcccg

SEQ ID NO: 1557492 - DNA, 25 bp, Homo sapien
acaagaagcacccgagaggcccgca

SEQ ID NO: 1557493 - DNA, 25 bp, Homo sapien
gacaagaagcacccgagaggcccgc

SEQ ID NO: 1557494 - DNA, 25 bp, Homo sapien
atgagattcttggcaatttcagccc

SEQ ID NO: 1557495 - DNA, 25 bp, Homo sapien
tgagattcttggcaatttcagcccc

SEQ ID NO: 1557496 - DNA, 25 bp, Homo sapien
gatgagattcttggcaatttcagcc

SEQ ID NO: 1557497 - DNA, 25 bp, Homo sapien
atggtcagtcctttcactcctgcca

SEQ ID NO: 1557498 - DNA, 25 bp, Homo sapien
gagctccgggatcttctggagttac

SEQ ID NO: 1557499 - DNA, 25 bp, Homo sapien
agaatgcagccacccaaggaaaaat

SEQ ID NO: 1557500 - DNA, 25 bp, Homo sapien
gagaaatgtgttcctttggtgtttc

SEQ ID NO: 1557501 - DNA, 25 bp, Homo sapien
gcagccacccaaggaaaaatcccat

SEQ ID NO: 1557502 - DNA, 25 bp, Homo sapien
ttggtgtttcaaagaatgcagccac

SEQ ID NO: 1557503 - DNA, 25 bp, Homo sapien
ctcctagattggcaaatgtgtatcc

SEQ ID NO: 1557504 - DNA, 25 bp, Homo sapien
tctcctagattggcaaatgtgtatc

SEQ ID NO: 1557505 - DNA, 25 bp, Homo sapien
tcctagattggcaaatgtgtatcca

SEQ ID NO: 1557506 - DNA, 25 bp, Homo sapien
gctctcttggtgtcgggcccatctt

SEQ ID NO: 1557507 - DNA, 25 bp, Homo sapien
tgctctcttggtgtcgggcccatct

SEQ ID NO: 1557508 - DNA, 25 bp, Homo sapien
tcggaggtcgtgcgcttcagagcag

SEQ ID NO: 1557509 - DNA, 25 bp, Homo sapien
ggaggtcgtgcgcttcagagcagcc

SEQ ID NO: 1557510 - DNA, 25 bp, Homo sapien
gtcggaggtcgtgcgcttcagagca

SEQ ID NO: 1557511 - DNA, 25 bp, Homo sapien
gaggtcgtgcgcttcagagcagcct

SEQ ID NO: 1557512 - DNA, 25 bp, Homo sapien
ggacactaagacaccagaatcgctt

SEQ ID NO: 1557513 - DNA, 25 bp, Homo sapien
gaacccagagctcaatggtagacct

SEQ ID NO: 1557514 - DNA, 25 bp, Homo sapien
gaactagccaatgaagaatgccacc

SEQ ID NO: 1557515 - DNA, 25 bp, Homo sapien
aaggagaagtcattagaacccagag

SEQ ID NO: 1557516 - DNA, 25 bp, Homo sapien
aacaaccccacctttcataagcgtg

SEQ ID NO: 1557517 - DNA, 25 bp, Homo sapien
taagtagttcattaatagcaagagg

SEQ ID NO: 1557518 - DNA, 25 bp, Homo sapien
cctttcataagcgtgaggatggttt

SEQ ID NO: 1557519 - DNA, 25 bp, Homo sapien
gcaaagatggactgataagtagttc

SEQ ID NO: 1557520 - DNA, 25 bp, Homo sapien
aaaagtgccaggtttgccaggcgcg

SEQ ID NO: 1557521 - DNA, 25 bp, Homo sapien
tggtgcccgcctgtatttcagctac

SEQ ID NO: 1557522 - DNA, 25 bp, Homo sapien
agagagtgagcccaacctggccaac

SEQ ID NO: 1557523 - DNA, 25 bp, Homo sapien
acgaggtcaagagagtgagcccaac

SEQ ID NO: 1557524 - DNA, 25 bp, Homo sapien
gatgacggtacatccaaaggaatat

SEQ ID NO: 1557525 - DNA, 25 bp, Homo sapien
ggaaaataagcatgcctttcaagat

SEQ ID NO: 1557526 - DNA, 25 bp, Homo sapien
gcatgcctttcaagatgagactggt

SEQ ID NO: 1557527 - DNA, 25 bp, Homo sapien
tgagactggtcatagatgacggtac

SEQ ID NO: 1557528 - DNA, 25 bp, Homo sapien
taggaattcctaaggcatcgtcagt

SEQ ID NO: 1557529 - DNA, 25 bp, Homo sapien
cttgtccccactaggaattcctaag

SEQ ID NO: 1557530 - DNA, 25 bp, Homo sapien
tcagtcacattagtcatgttcctag

SEQ ID NO: 1557531 - DNA, 25 bp, Homo sapien
tcctaaggcatcgtcagtcacatta

SEQ ID NO: 1557532 - DNA, 25 bp, Homo sapien
atattcttaggtatgcatcccagcc

SEQ ID NO: 1557533 - DNA, 25 bp, Homo sapien
ttctttgtgagatattcttaggtat

SEQ ID NO: 1557534 - DNA, 25 bp, Homo sapien
gtttctttgtgagatattcttaggt

SEQ ID NO: 1557535 - DNA, 25 bp, Homo sapien
ttcttaggtatgcatcccagccaag

SEQ ID NO: 1557536 - DNA, 25 bp, Homo sapien
tatgtgcgccattaggcaatagtga

SEQ ID NO: 1557537 - DNA, 25 bp, Homo sapien
gcacctactatgtgcgccattaggc

SEQ ID NO: 1557538 - DNA, 25 bp, Homo sapien
gtgcgccattaggcaatagtgaaac

SEQ ID NO: 1557539 - DNA, 25 bp, Homo sapien
cacctactatgtgcgccattaggca

SEQ ID NO: 1557540 - DNA, 25 bp, Homo sapien
tctcaagacagtggaaaaatgcagc

SEQ ID NO: 1557541 - DNA, 25 bp, Homo sapien
cttttgctcacagatggcgaggcca

SEQ ID NO: 1557542 - DNA, 25 bp, Homo sapien
cacatgcatgcggacagcaggtggc

SEQ ID NO: 1557543 - DNA, 25 bp, Homo sapien
ttttttgccacaggaaaccagctca

SEQ ID NO: 1557544 - DNA, 25 bp, Homo sapien
cccaaagatggtcagaccttcagtt

SEQ ID NO: 1557545 - DNA, 25 bp, Homo sapien
ctgttccgagaaatacagctcagat

SEQ ID NO: 1557546 - DNA, 25 bp, Homo sapien
tctgtcaagacttcacaactcccca

SEQ ID NO: 1557547 - DNA, 25 bp, Homo sapien
cgagaaatacagctcagatctcccc

SEQ ID NO: 1557548 - DNA, 25 bp, Homo sapien
tttagtgaggaaaggtattaacatc

SEQ ID NO: 1557549 - DNA, 25 bp, Homo sapien
tgggcataaaccctctcaacaattc

SEQ ID NO: 1557550 - DNA, 25 bp, Homo sapien
tattaacatcttggcatgagtgcgt

SEQ ID NO: 1557551 - DNA, 25 bp, Homo sapien
catgagtgcgttcagtgcttctggg

SEQ ID NO: 1557552 - DNA, 25 bp, Homo sapien
gatggctgcctatggcctgctttgc

SEQ ID NO: 1557553 - DNA, 25 bp, Homo sapien
tcattactggacaccaaaaacccac

SEQ ID NO: 1557554 - DNA, 25 bp, Homo sapien
gtttttgtcattactggacaccaaa

SEQ ID NO: 1557555 - DNA, 25 bp, Homo sapien
gggaatgtcatacccaaatagcgat

SEQ ID NO: 1557556 - DNA, 25 bp, Homo sapien
atgagccgggtgttgtggcaggcac

SEQ ID NO: 1557557 - DNA, 25 bp, Homo sapien
gctgtggtgagctgacattgcacca

SEQ ID NO: 1557558 - DNA, 25 bp, Homo sapien
agaggctgtggtgagctgacattgc

SEQ ID NO: 1557559 - DNA, 25 bp, Homo sapien
aatgagccgggtgttgtggcaggca

SEQ ID NO: 1557560 - DNA, 25 bp, Homo sapien
ggctggaatgagcagcacaatctca

SEQ ID NO: 1557561 - DNA, 25 bp, Homo sapien
ctgcctggacctcctgaactcaagt

SEQ ID NO: 1557562 - DNA, 25 bp, Homo sapien
atctcagctcattgctgcctggacc

SEQ ID NO: 1557563 - DNA, 25 bp, Homo sapien
ccatgcctggtggttcattttttat

SEQ ID NO: 1557564 - DNA, 25 bp, Homo sapien
ttagcgctataacgggaatctggac

SEQ ID NO: 1557565 - DNA, 25 bp, Homo sapien
tccctgcagctgaacgtagactcct

SEQ ID NO: 1557566 - DNA, 25 bp, Homo sapien
tagtgtctcggcttaggttcaggac

SEQ ID NO: 1557567 - DNA, 25 bp, Homo sapien
tcagttcataacatcaggttagcgc

SEQ ID NO: 1557568 - DNA, 25 bp, Homo sapien
gcatttttccagatgggcctcgcct

SEQ ID NO: 1557569 - DNA, 25 bp, Homo sapien
ggtcactgtaactcccaagtactgg

SEQ ID NO: 1557570 - DNA, 25 bp, Homo sapien
gagtaaaccagcttcctcttaggaa

SEQ ID NO: 1557571 - DNA, 25 bp, Homo sapien
tctttctcgaaggtcagactccagt

SEQ ID NO: 1557572 - DNA, 25 bp, Homo sapien
ctaactgcccactacaccttgtcca

SEQ ID NO: 1557573 - DNA, 25 bp, Homo sapien
tctaactgcccactacaccttgtcc

SEQ ID NO: 1557574 - DNA, 25 bp, Homo sapien
cttcctcatatgtatcagaactggg

SEQ ID NO: 1557575 - DNA, 25 bp, Homo sapien
ttgagaaggagtctccctctcgctc

SEQ ID NO: 1557576 - DNA, 25 bp, Homo sapien
accaccacacctggctaattttttg

SEQ ID NO: 1557577 - DNA, 25 bp, Homo sapien
caccaccacacctggctaatttttt

SEQ ID NO: 1557578 - DNA, 25 bp, Homo sapien
gagaaggagtctccctctcgctctg

SEQ ID NO: 1557579 - DNA, 25 bp, Homo sapien
ccgtgagtgtgcagccaagtgacta

SEQ ID NO: 1557580 - DNA, 25 bp, Homo sapien
caagtgactacttgggcattcaaag

SEQ ID NO: 1557581 - DNA, 25 bp, Homo sapien
gcatcaccggccagcagagttgaag

SEQ ID NO: 1557582 - DNA, 25 bp, Homo sapien
cattcaaagtgatgaacggtctggc

SEQ ID NO: 1557583 - DNA, 25 bp, Homo sapien
ctggggccatctcggagaagcagta

SEQ ID NO: 1557584 - DNA, 25 bp, Homo sapien
atccctccaaccaccgcacacactg

SEQ ID NO: 1557585 - DNA, 25 bp, Homo sapien
tcctgtgccaaaatccctccaacca

SEQ ID NO: 1557586 - DNA, 25 bp, Homo sapien
acacactggggccatctcggagaag

SEQ ID NO: 1557587 - DNA, 25 bp, Homo sapien
cggagtccacgaaggcagccaagaa

SEQ ID NO: 1557588 - DNA, 25 bp, Homo sapien
ggagtccacgaaggcagccaagaac

SEQ ID NO: 1557589 - DNA, 25 bp, Homo sapien
catagagtcgctaggcttccacagg

SEQ ID NO: 1557590 - DNA, 25 bp, Homo sapien
tatagtctcagtgcctcaggaagct

SEQ ID NO: 1557591 - DNA, 25 bp, Homo sapien
taacactgtgttgcaccaccattgg

SEQ ID NO: 1557592 - DNA, 25 bp, Homo sapien
caaggaacacactgatgcagaagcg

SEQ ID NO: 1557593 - DNA, 25 bp, Homo sapien
ggtttagctcaagtgctttaagagg

SEQ ID NO: 1557594 - DNA, 25 bp, Homo sapien
attctaaaagcagtctagggcagtg

SEQ ID NO: 1557595 - DNA, 25 bp, Homo sapien
gtgctttaagaggaatagagggaaa

SEQ ID NO: 1557596 - DNA, 25 bp, Homo sapien
tcttaactggggtcgattttgctcc

SEQ ID NO: 1557597 - DNA, 25 bp, Homo sapien
gccatcgaagaagaagaagttgttg

SEQ ID NO: 1557598 - DNA, 25 bp, Homo sapien
tgccatcgaagaagaagaagttgtt

SEQ ID NO: 1557599 - DNA, 25 bp, Homo sapien
ttcatgccatcgaagaagaagaagt

SEQ ID NO: 1557600 - DNA, 25 bp, Homo sapien
atgccatcgaagaagaagaagttgt

SEQ ID NO: 1557601 - DNA, 25 bp, Homo sapien
tgttttgtatcgggccaatgacttc

SEQ ID NO: 1557602 - DNA, 25 bp, Homo sapien
gttttgtatcgggccaatgacttca

SEQ ID NO: 1557603 - DNA, 25 bp, Homo sapien
aatgttttgtatcgggccaatgact

SEQ ID NO: 1557604 - DNA, 25 bp, Homo sapien
gaaatgttttgtatcgggccaatga

SEQ ID NO: 1557605 - DNA, 25 bp, Homo sapien
aagaggctcccgagcaacagagctt

SEQ ID NO: 1557606 - DNA, 25 bp, Homo sapien
tgacaggcagcctgaacagtgctgg

SEQ ID NO: 1557607 - DNA, 25 bp, Homo sapien
ctgcgccccttgtcgagcagctgct

SEQ ID NO: 1557608 - DNA, 25 bp, Homo sapien
ccgagcaacagagcttgctcattcc

SEQ ID NO: 1557609 - DNA, 25 bp, Homo sapien
ctataaggtatcaggtggggaataa

SEQ ID NO: 1557610 - DNA, 25 bp, Homo sapien
tcaggtggggaataagtccaagaag

SEQ ID NO: 1557611 - DNA, 25 bp, Homo sapien
taaggtatcaggtggggaataagtc

SEQ ID NO: 1557612 - DNA, 25 bp, Homo sapien
tggggaataagtccaagaaggtgac

SEQ ID NO: 1557613 - DNA, 25 bp, Homo sapien
tcaactaatcctaaacgaaaactca

SEQ ID NO: 1557614 - DNA, 25 bp, Homo sapien
caccagatgccacctgttgtttgtc

SEQ ID NO: 1557615 - DNA, 25 bp, Homo sapien
atcctaaacgaaaactcaagaacag

SEQ ID NO: 1557616 - DNA, 25 bp, Homo sapien
caacttgcagggtctcgccctaaca

SEQ ID NO: 1557617 - DNA, 25 bp, Homo sapien
acatccaagacttggtagcatctcc

SEQ ID NO: 1557618 - DNA, 25 bp, Homo sapien
cagggtctcgccctaacatccaaga

SEQ ID NO: 1557619 - DNA, 25 bp, Homo sapien
cgccctaacatccaagacttggtag

SEQ ID NO: 1557620 - DNA, 25 bp, Homo sapien
cctcctagccctgaagccccaggaa

SEQ ID NO: 1557621 - DNA, 25 bp, Homo sapien
cgcatgtgactggggttctgttaaa

SEQ ID NO: 1557622 - DNA, 25 bp, Homo sapien
ttgagccgcatgtgactggggttct

SEQ ID NO: 1557623 - DNA, 25 bp, Homo sapien
gagccgcatgtgactggggttctgt

SEQ ID NO: 1557624 - DNA, 25 bp, Homo sapien
gccgcatgtgactggggttctgtta

SEQ ID NO: 1557625 - DNA, 25 bp, Homo sapien
caaaggaccaacatagccctgaaat

SEQ ID NO: 1557626 - DNA, 25 bp, Homo sapien
cagctgtggtttaggaggtaaacaa

SEQ ID NO: 1557627 - DNA, 25 bp, Homo sapien
tgaaatgcaacagcctctgagtgac

SEQ ID NO: 1557628 - DNA, 25 bp, Homo sapien
tatgtgaaacacaaacagctgtggt

SEQ ID NO: 1557629 - DNA, 25 bp, Homo sapien
gaaaaggcaactggtaggatcatcc

SEQ ID NO: 1557630 - DNA, 25 bp, Homo sapien
ggaacgcactttggctgcatcaagg

SEQ ID NO: 1557631 - DNA, 25 bp, Homo sapien
ttagacaactggagccagaagcttc

SEQ ID NO: 1557632 - DNA, 25 bp, Homo sapien
gaatctcttgagttagagcctcagg

SEQ ID NO: 1557633 - DNA, 25 bp, Homo sapien
caggctggtcataagcggctgtgtt

SEQ ID NO: 1557634 - DNA, 25 bp, Homo sapien
agggttgctcctactgccatcttct

SEQ ID NO: 1557635 - DNA, 25 bp, Homo sapien
gttgagtaaatgtagaaagggttgc

SEQ ID NO: 1557636 - DNA, 25 bp, Homo sapien
cataagcggctgtgttgagtaaatg

SEQ ID NO: 1557637 - DNA, 25 bp, Homo sapien
gtgaccactggcattcatttggggg

SEQ ID NO: 1557638 - DNA, 25 bp, Homo sapien
gagagagcacgtgtgaccactggca

SEQ ID NO: 1557639 - DNA, 25 bp, Homo sapien
cagccttagtccccagggccaagcg

SEQ ID NO: 1557640 - DNA, 25 bp, Homo sapien
gattttggctgaagccgccccagcc

SEQ ID NO: 1557641 - DNA, 25 bp, Homo sapien
agaactgccaagactgtgggcaccc

SEQ ID NO: 1557642 - DNA, 25 bp, Homo sapien
ctgccaagactgtgggcaccctgct

SEQ ID NO: 1557643 - DNA, 25 bp, Homo sapien
agactgtgggcaccctgctcctttc

SEQ ID NO: 1557644 - DNA, 25 bp, Homo sapien
ctagaactgccaagactgtgggcac

SEQ ID NO: 1557645 - DNA, 25 bp, Homo sapien
ggaaatcacaaacatcatgcgccca

SEQ ID NO: 1557646 - DNA, 25 bp, Homo sapien
taaaacaaatattcgaagcccacag

SEQ ID NO: 1557647 - DNA, 25 bp, Homo sapien
ttgaacattacacccgcattgcttg

SEQ ID NO: 1557648 - DNA, 25 bp, Homo sapien
caaaaccgcagaaacgcatgtggtg

SEQ ID NO: 1557649 - DNA, 25 bp, Homo sapien
gctcctcctcccgtgtcccgcaggc

SEQ ID NO: 1557650 - DNA, 25 bp, Homo sapien
tcctcctcccgtgtcccgcaggccc

SEQ ID NO: 1557651 - DNA, 25 bp, Homo sapien
ctcctcctcccgtgtcccgcaggcc

SEQ ID NO: 1557652 - DNA, 25 bp, Homo sapien
tgctcctcctcccgtgtcccgcagg

SEQ ID NO: 1557653 - DNA, 25 bp, Homo sapien
ttcagatgttctaccggccgtgggc

SEQ ID NO: 1557654 - DNA, 25 bp, Homo sapien
actgggcactgacgcctggaagcct

SEQ ID NO: 1557655 - DNA, 25 bp, Homo sapien
ctatcagtagatgccaagcactggg

SEQ ID NO: 1557656 - DNA, 25 bp, Homo sapien
cccctcgtgccaatgaaaccttaga

SEQ ID NO: 1557657 - DNA, 25 bp, Homo sapien
tgcaccacgtgaggaagggaaataa

SEQ ID NO: 1557658 - DNA, 25 bp, Homo sapien
gcaccacgtgaggaagggaaataaa

SEQ ID NO: 1557659 - DNA, 25 bp, Homo sapien
ctgcaccacgtgaggaagggaaata

SEQ ID NO: 1557660 - DNA, 25 bp, Homo sapien
gctccgtcggcctctgcgaccgcag

SEQ ID NO: 1557661 - DNA, 25 bp, Homo sapien
gcggcgtccgcgactccggctccgt

SEQ ID NO: 1557662 - DNA, 25 bp, Homo sapien
gcgactccggctccgtcggcctctg

SEQ ID NO: 1557663 - DNA, 25 bp, Homo sapien
actccggctccgtcggcctctgcga

SEQ ID NO: 1557664 - DNA, 25 bp, Homo sapien
caatcccacgctcaaagaaagtccg

SEQ ID NO: 1557665 - DNA, 25 bp, Homo sapien
caggcgaatattctagctccaccag

SEQ ID NO: 1557666 - DNA, 25 bp, Homo sapien
ggtgcctctcatatccaggcgaata

SEQ ID NO: 1557667 - DNA, 25 bp, Homo sapien
ggaactggcgttttgccccactgaa

SEQ ID NO: 1557668 - DNA, 25 bp, Homo sapien
tcactctccctcctttcaactgcca

SEQ ID NO: 1557669 - DNA, 25 bp, Homo sapien
tctttgtggactcacccagttccca

SEQ ID NO: 1557670 - DNA, 25 bp, Homo sapien
tgatctttgtggactcacccagttc

SEQ ID NO: 1557671 - DNA, 25 bp, Homo sapien
ttcatgatctttgtggactcaccca

SEQ ID NO: 1557672 - DNA, 25 bp, Homo sapien
tcaccctctaacatactgcgggatc

SEQ ID NO: 1557673 - DNA, 25 bp, Homo sapien
tacttcaccctctaacatactgcgg

SEQ ID NO: 1557674 - DNA, 25 bp, Homo sapien
acatactgcgggatcctcacagcca

SEQ ID NO: 1557675 - DNA, 25 bp, Homo sapien
ctctaacatactgcgggatcctcac

SEQ ID NO: 1557676 - DNA, 25 bp, Homo sapien
tgcagaatctagacgcagcactgag

SEQ ID NO: 1557677 - DNA, 25 bp, Homo sapien
cctgcagaatctagacgcagcactg

SEQ ID NO: 1557678 - DNA, 25 bp, Homo sapien
cagaatctagacgcagcactgaggg

SEQ ID NO: 1557679 - DNA, 25 bp, Homo sapien
ccctgcagaatctagacgcagcact

SEQ ID NO: 1557680 - DNA, 25 bp, Homo sapien
gctggctgcgtggagccaaggtccc

SEQ ID NO: 1557681 - DNA, 25 bp, Homo sapien
ctttgatttcaaatcgagtgtggct

SEQ ID NO: 1557682 - DNA, 25 bp, Homo sapien
cctttgatttcaaatcgagtgtggc

SEQ ID NO: 1557683 - DNA, 25 bp, Homo sapien
aagagcctcgatcctcttgtccaac

SEQ ID NO: 1557684 - DNA, 25 bp, Homo sapien
attcttccgccgaagagcctcgatc

SEQ ID NO: 1557685 - DNA, 25 bp, Homo sapien
agagcctcgatcctcttgtccaact

SEQ ID NO: 1557686 - DNA, 25 bp, Homo sapien
gggcctcattcttccgccgaagagc

SEQ ID NO: 1557687 - DNA, 25 bp, Homo sapien
gcgactccctcaagttcagctttct

SEQ ID NO: 1557688 - DNA, 25 bp, Homo sapien
gactgcgactccctcaagttcagct

SEQ ID NO: 1557689 - DNA, 25 bp, Homo sapien
cactgagcggccctttcggggagct

SEQ ID NO: 1557690 - DNA, 25 bp, Homo sapien
gggagctgtgactgcgactccctca

SEQ ID NO: 1557691 - DNA, 25 bp, Homo sapien
gtcccacaccccagtgacgagctca

SEQ ID NO: 1557692 - DNA, 25 bp, Homo sapien
cctcagggtcccacaccccagtgac

SEQ ID NO: 1557693 - DNA, 25 bp, Homo sapien
cagggtcccacaccccagtgacgag

SEQ ID NO: 1557694 - DNA, 25 bp, Homo sapien
ctgggtcccaggcctcaaccctctg

SEQ ID NO: 1557695 - DNA, 25 bp, Homo sapien
cttggatttacggtcagagattgag

SEQ ID NO: 1557696 - DNA, 25 bp, Homo sapien
ctgcgcgatgctcggcccatgccgg

SEQ ID NO: 1557697 - DNA, 25 bp, Homo sapien
tgctgtggaggagtccggcccccct

SEQ ID NO: 1557698 - DNA, 25 bp, Homo sapien
caggagacctccgggaaggacccag

SEQ ID NO: 1557699 - DNA, 25 bp, Homo sapien
tcaacccatgtccacggtgggctgt

SEQ ID NO: 1557700 - DNA, 25 bp, Homo sapien
gggctgtaagccactcagctagaca

SEQ ID NO: 1557701 - DNA, 25 bp, Homo sapien
ttattcccgtgtaagtgctagaacc

SEQ ID NO: 1557702 - DNA, 25 bp, Homo sapien
cacaagcacaccagatagagagagc

SEQ ID NO: 1557703 - DNA, 25 bp, Homo sapien
ttctcaatgttctgcctgcgccgct

SEQ ID NO: 1557704 - DNA, 25 bp, Homo sapien
tgcgctcatactcggcgatcttctc

SEQ ID NO: 1557705 - DNA, 25 bp, Homo sapien
ccgctggttgcgctcatactcggcg

SEQ ID NO: 1557706 - DNA, 25 bp, Homo sapien
tcatactcggcgatcttctccatct

SEQ ID NO: 1557707 - DNA, 25 bp, Homo sapien
tccgcactgggttgggttcaagaac

SEQ ID NO: 1557708 - DNA, 25 bp, Homo sapien
acagcgcacccgctcgaagtcgggg

SEQ ID NO: 1557709 - DNA, 25 bp, Homo sapien
aaggccacagcgcacccgctcgaag

SEQ ID NO: 1557710 - DNA, 25 bp, Homo sapien
ccggcggtcccgctcagactcctcc

SEQ ID NO: 1557711 - DNA, 25 bp, Homo sapien
cgctcccggcccgtcatggacaacg

SEQ ID NO: 1557712 - DNA, 25 bp, Homo sapien
tcccggcccgtcatggacaacgtca

SEQ ID NO: 1557713 - DNA, 25 bp, Homo sapien
gctcccggcccgtcatggacaacgt

SEQ ID NO: 1557714 - DNA, 25 bp, Homo sapien
tggacaacgtcatgtctccagcact

SEQ ID NO: 1557715 - DNA, 25 bp, Homo sapien
ggcttgcggtgcctctgcagccgct

SEQ ID NO: 1557716 - DNA, 25 bp, Homo sapien
atcccatcggtcttctcggcatccc

SEQ ID NO: 1557717 - DNA, 25 bp, Homo sapien
ggccagtgggcttgcggtgcctctg

SEQ ID NO: 1557718 - DNA, 25 bp, Homo sapien
ggtcttctcggcatcccactcgcgc

SEQ ID NO: 1557719 - DNA, 25 bp, Homo sapien
ggaaagataacgggtgagcgggcag

SEQ ID NO: 1557720 - DNA, 25 bp, Homo sapien
gggaaagataacgggtgagcgggca

SEQ ID NO: 1557721 - DNA, 25 bp, Homo sapien
ctgggggaaagataacgggtgagcg

SEQ ID NO: 1557722 - DNA, 25 bp, Homo sapien
catagcggtgggatggttcatgggc

SEQ ID NO: 1557723 - DNA, 25 bp, Homo sapien
agcggtgggatggttcatgggcagg

SEQ ID NO: 1557724 - DNA, 25 bp, Homo sapien
atagcggtgggatggttcatgggca

SEQ ID NO: 1557725 - DNA, 25 bp, Homo sapien
tagcggtgggatggttcatgggcag

SEQ ID NO: 1557726 - DNA, 25 bp, Homo sapien
tgactcccagaccgagcctcagctc

SEQ ID NO: 1557727 - DNA, 25 bp, Homo sapien
gactcccagaccgagcctcagctca

SEQ ID NO: 1557728 - DNA, 25 bp, Homo sapien
ttgtgctgggacaggaactccccaa

SEQ ID NO: 1557729 - DNA, 25 bp, Homo sapien
tctttctccttctgcggctgctggc

SEQ ID NO: 1557730 - DNA, 25 bp, Homo sapien
ggctgctggcctcagctttgtgctg

SEQ ID NO: 1557731 - DNA, 25 bp, Homo sapien
taggccctgggcgctgccttggcct

SEQ ID NO: 1557732 - DNA, 25 bp, Homo sapien
gggaagtaggctgtggagtctcagg

SEQ ID NO: 1557733 - DNA, 25 bp, Homo sapien
ggaagtaggctgtggagtctcaggg

SEQ ID NO: 1557734 - DNA, 25 bp, Homo sapien
ttttgtctcccagcggtcatcatgg

SEQ ID NO: 1557735 - DNA, 25 bp, Homo sapien
ttcttttgtctcccagcggtcatca

SEQ ID NO: 1557736 - DNA, 25 bp, Homo sapien
tcctcacttatgtcctcccattctt

SEQ ID NO: 1557737 - DNA, 25 bp, Homo sapien
catcctcacttatgtcctcccattc

SEQ ID NO: 1557738 - DNA, 25 bp, Homo sapien
cctcatcctcacttatgtcctccca

SEQ ID NO: 1557739 - DNA, 25 bp, Homo sapien
tcatcctcacttatgtcctcccatt

SEQ ID NO: 1557740 - DNA, 25 bp, Homo sapien
ctccggactgaaggggactccgtgg

SEQ ID NO: 1557741 - DNA, 25 bp, Homo sapien
ggctcctccggactgaaggggactc

SEQ ID NO: 1557742 - DNA, 25 bp, Homo sapien
ctcctccggactgaaggggactccg

SEQ ID NO: 1557743 - DNA, 25 bp, Homo sapien
gcaggggctcctccggactgaaggg

SEQ ID NO: 1557744 - DNA, 25 bp, Homo sapien
acctcttcaccccaatcggacacag

SEQ ID NO: 1557745 - DNA, 25 bp, Homo sapien
tcaccccaatcggacacaggctggt

SEQ ID NO: 1557746 - DNA, 25 bp, Homo sapien
ccccaatcggacacaggctggtggc

SEQ ID NO: 1557747 - DNA, 25 bp, Homo sapien
cagccaggtgagtggtccggggaga

SEQ ID NO: 1557748 - DNA, 25 bp, Homo sapien
tacactctcaaaaggccaggcctca

SEQ ID NO: 1557749 - DNA, 25 bp, Homo sapien
catacactctcaaaaggccaggcct

SEQ ID NO: 1557750 - DNA, 25 bp, Homo sapien
acactctcaaaaggccaggcctcac

SEQ ID NO: 1557751 - DNA, 25 bp, Homo sapien
tcatacactctcaaaaggccaggcc

SEQ ID NO: 1557752 - DNA, 25 bp, Homo sapien
gccacacccctctagcgcgcgcgcg

SEQ ID NO: 1557753 - DNA, 25 bp, Homo sapien
ggggcacactgggtcccagggccca

SEQ ID NO: 1557754 - DNA, 25 bp, Homo sapien
accagccacacccctctagcgcgcg

SEQ ID NO: 1557755 - DNA, 25 bp, Homo sapien
tgtggggcacactgggtcccagggc

SEQ ID NO: 1557756 - DNA, 25 bp, Homo sapien
gcatgggctgcgctaccccctcagc

SEQ ID NO: 1557757 - DNA, 25 bp, Homo sapien
gagcatgggctgcgctaccccctca

SEQ ID NO: 1557758 - DNA, 25 bp, Homo sapien
tgggctgcgctaccccctcagctga

SEQ ID NO: 1557759 - DNA, 25 bp, Homo sapien
atgggctgcgctaccccctcagctg

SEQ ID NO: 1557760 - DNA, 25 bp, Homo sapien
agtggacattccagagacgggcatg

SEQ ID NO: 1557761 - DNA, 25 bp, Homo sapien
tggacattccagagacgggcatgac

SEQ ID NO: 1557762 - DNA, 25 bp, Homo sapien
gacattccagagacgggcatgacag

SEQ ID NO: 1557763 - DNA, 25 bp, Homo sapien
acattccagagacgggcatgacagt

SEQ ID NO: 1557764 - DNA, 25 bp, Homo sapien
ctggagttgcctcagacccttcctc

SEQ ID NO: 1557765 - DNA, 25 bp, Homo sapien
tggaagtcggtgatctccgccgtct

SEQ ID NO: 1557766 - DNA, 25 bp, Homo sapien
ggaagtcggtgatctccgccgtctc

SEQ ID NO: 1557767 - DNA, 25 bp, Homo sapien
gcccccggcagcggaggggccgcca

SEQ ID NO: 1557768 - DNA, 25 bp, Homo sapien
tcagcgagcggcccccggcagcgga

SEQ ID NO: 1557769 - DNA, 25 bp, Homo sapien
ccggcagcggaggggccgccaccac

SEQ ID NO: 1557770 - DNA, 25 bp, Homo sapien
agcgagcggcccccggcagcggagg

SEQ ID NO: 1557771 - DNA, 25 bp, Homo sapien
tggctcccacactctagttccggaa

SEQ ID NO: 1557772 - DNA, 25 bp, Homo sapien
agtgctcgagccctgcccgctacgg

SEQ ID NO: 1557773 - DNA, 25 bp, Homo sapien
ctgtcggactgctctactccagtgc

SEQ ID NO: 1557774 - DNA, 25 bp, Homo sapien
ggactgctctactccagtgctcgag

SEQ ID NO: 1557775 - DNA, 25 bp, Homo sapien
cagaccgccccgctctctaaaccgc

SEQ ID NO: 1557776 - DNA, 25 bp, Homo sapien
tgccgcctccgcatcctaggcccac

SEQ ID NO: 1557777 - DNA, 25 bp, Homo sapien
ctccgcgccgcagaccgcacaggcc

SEQ ID NO: 1557778 - DNA, 25 bp, Homo sapien
ccagcatggtcacgcccccacgcga

SEQ ID NO: 1557779 - DNA, 25 bp, Homo sapien
agtaggcgcataccggagccaagcg

SEQ ID NO: 1557780 - DNA, 25 bp, Homo sapien
gaagtaggcgcataccggagccaag

SEQ ID NO: 1557781 - DNA, 25 bp, Homo sapien
aggcgcataccggagccaagcgcag

SEQ ID NO: 1557782 - DNA, 25 bp, Homo sapien
aggaagtaggcgcataccggagcca

SEQ ID NO: 1557783 - DNA, 25 bp, Homo sapien
ccagatgagaccgtagtacacggcg

SEQ ID NO: 1557784 - DNA, 25 bp, Homo sapien
agaccgtagtacacggcgagcagca

SEQ ID NO: 1557785 - DNA, 25 bp, Homo sapien
tagtacacggcgagcagcacggcag

SEQ ID NO: 1557786 - DNA, 25 bp, Homo sapien
gatgagaccgtagtacacggcgagc

SEQ ID NO: 1557787 - DNA, 25 bp, Homo sapien
ggtgccgcgggagaccgcgtgggta

SEQ ID NO: 1557788 - DNA, 25 bp, Homo sapien
tgggccggcgggtgccgcgggagac

SEQ ID NO: 1557789 - DNA, 25 bp, Homo sapien
gcgggtgccgcgggagaccgcgtgg

SEQ ID NO: 1557790 - DNA, 25 bp, Homo sapien
gtgccgcgggagaccgcgtgggtac

SEQ ID NO: 1557791 - DNA, 25 bp, Homo sapien
cgggcgggcagcacacggaggggac

SEQ ID NO: 1557792 - DNA, 25 bp, Homo sapien
gccgggacaggcggcacgcccgggc

SEQ ID NO: 1557793 - DNA, 25 bp, Homo sapien
aggcggcacgcccgggcgggcagca

SEQ ID NO: 1557794 - DNA, 25 bp, Homo sapien
ggacaggcggcacgcccgggcgggc

SEQ ID NO: 1557795 - DNA, 25 bp, Homo sapien
gtgtctggcggctcggacggcggtc

SEQ ID NO: 1557796 - DNA, 25 bp, Homo sapien
ggcggtcagggtcgctgtagcggcg

SEQ ID NO: 1557797 - DNA, 25 bp, Homo sapien
cctccgcggcctctggcgtctctct

SEQ ID NO: 1557798 - DNA, 25 bp, Homo sapien
ctctctgggtgtctggcggctcgga

SEQ ID NO: 1557799 - DNA, 25 bp, Homo sapien
ccaatccagagacggtgcatcctcg

SEQ ID NO: 1557800 - DNA, 25 bp, Homo sapien
gagacgctgagcgatgtcattagga

SEQ ID NO: 1557801 - DNA, 25 bp, Homo sapien
cttcctgatggtggaggacccggcc

SEQ ID NO: 1557802 - DNA, 25 bp, Homo sapien
tattgcagatggacacggattcagg

SEQ ID NO: 1557803 - DNA, 25 bp, Homo sapien
gagctccttaaggaaggggaacagc

SEQ ID NO: 1557804 - DNA, 25 bp, Homo sapien
tctccctactccaagaaaagaagag

SEQ ID NO: 1557805 - DNA, 25 bp, Homo sapien
ctccctactccaagaaaagaagagc

SEQ ID NO: 1557806 - DNA, 25 bp, Homo sapien
caaggcagcacagcgctttggtcat

SEQ ID NO: 1557807 - DNA, 25 bp, Homo sapien
gagacatttgtcctttgctccaagc

SEQ ID NO: 1557808 - DNA, 25 bp, Homo sapien
gctgtaacacgagggcagacactct

SEQ ID NO: 1557809 - DNA, 25 bp, Homo sapien
gagatccctgggtgattcagcctct

SEQ ID NO: 1557810 - DNA, 25 bp, Homo sapien
gggtaaaggggaggtgagcagagca

SEQ ID NO: 1557811 - DNA, 25 bp, Homo sapien
ggaggtgagcagagcagctgacctt

SEQ ID NO: 1557812 - DNA, 25 bp, Homo sapien
agcagagcagctgaccttcctaacc

SEQ ID NO: 1557813 - DNA, 25 bp, Homo sapien
ccaccctctggggagtggtggtggg

SEQ ID NO: 1557814 - DNA, 25 bp, Homo sapien
aaagaaacagaggccgggtgtggtg

SEQ ID NO: 1557815 - DNA, 25 bp, Homo sapien
gaattttgggaggcccaagtgggca

SEQ ID NO: 1557816 - DNA, 25 bp, Homo sapien
aggcgtggtggcaggggccttaatc

SEQ ID NO: 1557817 - DNA, 25 bp, Homo sapien
ggcccaagtgggcaaatcacgaggt

SEQ ID NO: 1557818 - DNA, 25 bp, Homo sapien
tctatgaagaagtaccattagcatc

SEQ ID NO: 1557819 - DNA, 25 bp, Homo sapien
aagtctatgaagaagtaccattagc

SEQ ID NO: 1557820 - DNA, 25 bp, Homo sapien
tatgaagaagtaccattagcatctt

SEQ ID NO: 1557821 - DNA, 25 bp, Homo sapien
ttcctcagagcaagtctatgaagaa

SEQ ID NO: 1557822 - DNA, 25 bp, Homo sapien
ccagggctttggactgacttgctat

SEQ ID NO: 1557823 - DNA, 25 bp, Homo sapien
tgacttgctatccccagaggatccc

SEQ ID NO: 1557824 - DNA, 25 bp, Homo sapien
gacttgctatccccagaggatccca

SEQ ID NO: 1557825 - DNA, 25 bp, Homo sapien
ggcctccagatgatttaacagtcct

SEQ ID NO: 1557826 - DNA, 25 bp, Homo sapien
ctttagaatagggacacacttgtca

SEQ ID NO: 1557827 - DNA, 25 bp, Homo sapien
acctcgcctggcctccagatgattt

SEQ ID NO: 1557828 - DNA, 25 bp, Homo sapien
gtcctctttagaatagggacacact

SEQ ID NO: 1557829 - DNA, 25 bp, Homo sapien
cgcctggccataaactaccatagtc

SEQ ID NO: 1557830 - DNA, 25 bp, Homo sapien
gttattggtagagactagatttcac

SEQ ID NO: 1557831 - DNA, 25 bp, Homo sapien
taccatagtcttaagaagcagtgaa

SEQ ID NO: 1557832 - DNA, 25 bp, Homo sapien
tggttgttattggtagagactagat

SEQ ID NO: 1557833 - DNA, 25 bp, Homo sapien
aggcctgacaccatctactcggaag

SEQ ID NO: 1557834 - DNA, 25 bp, Homo sapien
gaggcctgacaccatctactcggaa

SEQ ID NO: 1557835 - DNA, 25 bp, Homo sapien
agaggcctgacaccatctactcgga

SEQ ID NO: 1557836 - DNA, 25 bp, Homo sapien
cccagaggccgcaataagcaccggg

SEQ ID NO: 1557837 - DNA, 25 bp, Homo sapien
cagaaactctagcaccacggggggt

SEQ ID NO: 1557838 - DNA, 25 bp, Homo sapien
gtaaggcccagaggccgcaataagc

SEQ ID NO: 1557839 - DNA, 25 bp, Homo sapien
gggtctgagtaaggcccagaggccg

SEQ ID NO: 1557840 - DNA, 25 bp, Homo sapien
ttatctggtaaccacagctcagagc

SEQ ID NO: 1557841 - DNA, 25 bp, Homo sapien
ctgagaatcttgtattttatctggt

SEQ ID NO: 1557842 - DNA, 25 bp, Homo sapien
attttatctggtaaccacagctcag

SEQ ID NO: 1557843 - DNA, 25 bp, Homo sapien
gtaaccacagctcagagccctccct

SEQ ID NO: 1557844 - DNA, 25 bp, Homo sapien
gctccccgaggatcgaaggtccctc

SEQ ID NO: 1557845 - DNA, 25 bp, Homo sapien
ccccgaggatcgaaggtccctcctg

SEQ ID NO: 1557846 - DNA, 25 bp, Homo sapien
cccgaggatcgaaggtccctcctgc

SEQ ID NO: 1557847 - DNA, 25 bp, Homo sapien
aatccatggcataacctgcttctgc

SEQ ID NO: 1557848 - DNA, 25 bp, Homo sapien
agaatccatggcataacctgcttct

SEQ ID NO: 1557849 - DNA, 25 bp, Homo sapien
tgcttctgccaccaaccatggaggg

SEQ ID NO: 1557850 - DNA, 25 bp, Homo sapien
ttctgccaccaaccatggagggtcc

SEQ ID NO: 1557851 - DNA, 25 bp, Homo sapien
acagcagaaacgaaaggtcagcatg

SEQ ID NO: 1557852 - DNA, 25 bp, Homo sapien
aaagaatgtggctggacgccaggcg

SEQ ID NO: 1557853 - DNA, 25 bp, Homo sapien
tgcacagcagaaacgaaaggtcagc

SEQ ID NO: 1557854 - DNA, 25 bp, Homo sapien
gcagaaacgaaaggtcagcatggct

SEQ ID NO: 1557855 - DNA, 25 bp, Homo sapien
tgtcagtatctgctaatgagtgaat

SEQ ID NO: 1557856 - DNA, 25 bp, Homo sapien
ggtggaatcatatccatgagtaaat

SEQ ID NO: 1557857 - DNA, 25 bp, Homo sapien
ttttctagttcccttacattgcacc

SEQ ID NO: 1557858 - DNA, 25 bp, Homo sapien
gcagtgggcatttactggtggaatc

SEQ ID NO: 1557859 - DNA, 25 bp, Homo sapien
ggaagtcggctaccgccaagttgag

SEQ ID NO: 1557860 - DNA, 25 bp, Homo sapien
gacgactgcaaagatgaccaaggcc

SEQ ID NO: 1557861 - DNA, 25 bp, Homo sapien
tacaatggacgtgaacaagatgggc

SEQ ID NO: 1557862 - DNA, 25 bp, Homo sapien
ccaggatgtctggaacacgcagcgt

SEQ ID NO: 1557863 - DNA, 25 bp, Homo sapien
ccaggagcaggatgctggcgtacat

SEQ ID NO: 1557864 - DNA, 25 bp, Homo sapien
ccagatgggtttaaacaccagcaga

SEQ ID NO: 1557865 - DNA, 25 bp, Homo sapien
aagcggtcggcgctgatggtggcca

SEQ ID NO: 1557866 - DNA, 25 bp, Homo sapien
ggccaggagcaggatgctggcgtac

SEQ ID NO: 1557867 - DNA, 25 bp, Homo sapien
tccacgtccggagcaggatgaaagt

SEQ ID NO: 1557868 - DNA, 25 bp, Homo sapien
gctcccgccgtttgtcgtggctgta

SEQ ID NO: 1557869 - DNA, 25 bp, Homo sapien
aaatcgtgagcgtgagtagaggcca

SEQ ID NO: 1557870 - DNA, 25 bp, Homo sapien
accttgagtgtcttggtggaccgcg

SEQ ID NO: 1557871 - DNA, 25 bp, Homo sapien
tccaggaaggacatcattatccccg

SEQ ID NO: 1557872 - DNA, 25 bp, Homo sapien
tcagtcaacacgttccggaggaggc

SEQ ID NO: 1557873 - DNA, 25 bp, Homo sapien
gcgtgaatgacttgctctccctaac

SEQ ID NO: 1557874 - DNA, 25 bp, Homo sapien
tgtccactgtggagcgcgtgaatga

SEQ ID NO: 1557875 - DNA, 25 bp, Homo sapien
tggaaatatcccagatacacgggtt

SEQ ID NO: 1557876 - DNA, 25 bp, Homo sapien
tctgggaaagacaggcaacatggag

SEQ ID NO: 1557877 - DNA, 25 bp, Homo sapien
ttagctaaggtaacaccatcccacg

SEQ ID NO: 1557878 - DNA, 25 bp, Homo sapien
gatgagaagagtcccgctggaaaag

SEQ ID NO: 1557879 - DNA, 25 bp, Homo sapien
ctctggttttgggagtccttgagga

SEQ ID NO: 1557880 - DNA, 25 bp, Homo sapien
ttaagatttgtccagcacgtggcac

SEQ ID NO: 1557881 - DNA, 25 bp, Homo sapien
ggagttaagatttgtccagcacgtg

SEQ ID NO: 1557882 - DNA, 25 bp, Homo sapien
tccttgaggagttaagatttgtcca

SEQ ID NO: 1557883 - DNA, 25 bp, Homo sapien
gaaaccggatggcagtcaccgcatt

SEQ ID NO: 1557884 - DNA, 25 bp, Homo sapien
cagaggtcggcactgagagctgcca

SEQ ID NO: 1557885 - DNA, 25 bp, Homo sapien
tccgagaggtcgctgtaatccccat

SEQ ID NO: 1557886 - DNA, 25 bp, Homo sapien
gcaggacgctggcatacatggtcag

SEQ ID NO: 1557887 - DNA, 25 bp, Homo sapien
ccttgcacatagcaagtgcatgatg

SEQ ID NO: 1557888 - DNA, 25 bp, Homo sapien
tgagataagaagatacacacccaca

SEQ ID NO: 1557889 - DNA, 25 bp, Homo sapien
gccagtcttgtgaaatgagataaga

SEQ ID NO: 1557890 - DNA, 25 bp, Homo sapien
tctagtgcctaaaaaggccttgcac

SEQ ID NO: 1557891 - DNA, 25 bp, Homo sapien
tcgaatttgaatagccacagatggc

SEQ ID NO: 1557892 - DNA, 25 bp, Homo sapien
gaagcgtgaatatagcccgaagggt

SEQ ID NO: 1557893 - DNA, 25 bp, Homo sapien
taaaaggaccctcgtgactccattg

SEQ ID NO: 1557894 - DNA, 25 bp, Homo sapien
ttgaatgccgagctaaggagcctgg

SEQ ID NO: 1557895 - DNA, 25 bp, Homo sapien
tccctgggctgttgtgagaatgacc

SEQ ID NO: 1557896 - DNA, 25 bp, Homo sapien
ttatttagcggcagggtcccgctcc

SEQ ID NO: 1557897 - DNA, 25 bp, Homo sapien
tctggagtaatgaccgcagacacag

SEQ ID NO: 1557898 - DNA, 25 bp, Homo sapien
cccaggacctcagcttataaaatga

SEQ ID NO: 1557899 - DNA, 25 bp, Homo sapien
gaaaattcccgtgaaatgtattcca

SEQ ID NO: 1557900 - DNA, 25 bp, Homo sapien
aaaagaagggctaatgatctacaaa

SEQ ID NO: 1557901 - DNA, 25 bp, Homo sapien
ttatcaaagaatgctcctaagtggc

SEQ ID NO: 1557902 - DNA, 25 bp, Homo sapien
caactggtcccaatagattaatggg

SEQ ID NO: 1557903 - DNA, 25 bp, Homo sapien
gaaagccacagtctatcaaccatag

SEQ ID NO: 1557904 - DNA, 25 bp, Homo sapien
gaaaattggaggaaatgaacaacaa

SEQ ID NO: 1557905 - DNA, 25 bp, Homo sapien
gcttgagactagttcttagagaaat

SEQ ID NO: 1557906 - DNA, 25 bp, Homo sapien
tcaaccataggattgtatagcaagc

SEQ ID NO: 1557907 - DNA, 25 bp, Homo sapien
ttccggtcccaagagcgctagtctt

SEQ ID NO: 1557908 - DNA, 25 bp, Homo sapien
cacacgccgcgaacgccttaacttc

SEQ ID NO: 1557909 - DNA, 25 bp, Homo sapien
tcccaagagcgctagtcttgcgcct

SEQ ID NO: 1557910 - DNA, 25 bp, Homo sapien
aagagcgctagtcttgcgcctgcgc

SEQ ID NO: 1557911 - DNA, 25 bp, Homo sapien
aagttcatgggcgaccacgcctctc

SEQ ID NO: 1557912 - DNA, 25 bp, Homo sapien
ggcctcgtgggctctaagactctcg

SEQ ID NO: 1557913 - DNA, 25 bp, Homo sapien
ggttctcccagggacgctcaggtgc

SEQ ID NO: 1557914 - DNA, 25 bp, Homo sapien
tgccatctctgtccgcgtttgccgg

SEQ ID NO: 1557915 - DNA, 25 bp, Homo sapien
cagcttttgtggggttcttcctatt

SEQ ID NO: 1557916 - DNA, 25 bp, Homo sapien
tctccagcttttgtggggttcttcc

SEQ ID NO: 1557917 - DNA, 25 bp, Homo sapien
tccagcttttgtggggttcttccta

SEQ ID NO: 1557918 - DNA, 25 bp, Homo sapien
atctccagcttttgtggggttcttc

SEQ ID NO: 1557919 - DNA, 25 bp, Homo sapien
aataggagagaggtgtgatataatg

SEQ ID NO: 1557920 - DNA, 25 bp, Homo sapien
aggtcacatggccaaccaacagcag

SEQ ID NO: 1557921 - DNA, 25 bp, Homo sapien
ccacaggcagtaataggagagaggt

SEQ ID NO: 1557922 - DNA, 25 bp, Homo sapien
agaaccttgtctccacaggcagtaa

SEQ ID NO: 1557923 - DNA, 25 bp, Homo sapien
aaaaggaggtaatgaatatgactac

SEQ ID NO: 1557924 - DNA, 25 bp, Homo sapien
gagaacagaagacattaattctctt

SEQ ID NO: 1557925 - DNA, 25 bp, Homo sapien
agacattaattctcttttgggaaca

SEQ ID NO: 1557926 - DNA, 25 bp, Homo sapien
ttaagagagagaacagaagacatta

SEQ ID NO: 1557927 - DNA, 25 bp, Homo sapien
ttaattctcttttgggaacattgct

SEQ ID NO: 1557928 - DNA, 25 bp, Homo sapien
tgagctggtgacacaaagggtacct

SEQ ID NO: 1557929 - DNA, 25 bp, Homo sapien
tctgggatggacacaagttcattct

SEQ ID NO: 1557930 - DNA, 25 bp, Homo sapien
agctaatttttcctcctggtcacgg

SEQ ID NO: 1557931 - DNA, 25 bp, Homo sapien
taatccacaataggagtctcagttc

SEQ ID NO: 1557932 - DNA, 25 bp, Homo sapien
cacacgcttggccagtgagatgcag

SEQ ID NO: 1557933 - DNA, 25 bp, Homo sapien
agtccaggtagtgcaacagggctcg

SEQ ID NO: 1557934 - DNA, 25 bp, Homo sapien
tctgcaggcgttcaaagaaggtcca

SEQ ID NO: 1557935 - DNA, 25 bp, Homo sapien
tgggtgcacgccacatgactgaagc

SEQ ID NO: 1557936 - DNA, 25 bp, Homo sapien
gaatacaatcttggtggccgccgaa

SEQ ID NO: 1557937 - DNA, 25 bp, Homo sapien
gaaatcgttgtggagatgccgctca

SEQ ID NO: 1557938 - DNA, 25 bp, Homo sapien
ctggatttgtcgcaggagcagcccc

SEQ ID NO: 1557939 - DNA, 25 bp, Homo sapien
tctcaaagcggatctggtagccgac

SEQ ID NO: 1557940 - DNA, 25 bp, Homo sapien
tgatggggaacagcctcccaggcac

SEQ ID NO: 1557941 - DNA, 25 bp, Homo sapien
gtgatggggaacagcctcccaggca

SEQ ID NO: 1557942 - DNA, 25 bp, Homo sapien
cgtgatggggaacagcctcccaggc

SEQ ID NO: 1557943 - DNA, 25 bp, Homo sapien
gctgtgcagtggcagtaccacccag

SEQ ID NO: 1557944 - DNA, 25 bp, Homo sapien
aaggccgcgggtccagcttctctga

SEQ ID NO: 1557945 - DNA, 25 bp, Homo sapien
tctgacttggacgtggtcggctccg

SEQ ID NO: 1557946 - DNA, 25 bp, Homo sapien
tcggccacagacagggcgctgtgca

SEQ ID NO: 1557947 - DNA, 25 bp, Homo sapien
gtggagaggatgcatttccggactc

SEQ ID NO: 1557948 - DNA, 25 bp, Homo sapien
ccgtcaatggtgactgaggtctcag

SEQ ID NO: 1557949 - DNA, 25 bp, Homo sapien
cggaatctactacgaagcggatccc

SEQ ID NO: 1557950 - DNA, 25 bp, Homo sapien
gaggatgcatttccggactccaggg

SEQ ID NO: 1557951 - DNA, 25 bp, Homo sapien
tgtacttcccaatccaagctggtgc

SEQ ID NO: 1557952 - DNA, 25 bp, Homo sapien
taacgtgaccctccaatgaaatgct

SEQ ID NO: 1557953 - DNA, 25 bp, Homo sapien
ggaccccatgctcctaagtccttgg

SEQ ID NO: 1557954 - DNA, 25 bp, Homo sapien
gaaatgttttcagcactaacgtgac

SEQ ID NO: 1557955 - DNA, 25 bp, Homo sapien
ttattctgttaatgctaactgaggg

SEQ ID NO: 1557956 - DNA, 25 bp, Homo sapien
tctgttaatgctaactgagggctta

SEQ ID NO: 1557957 - DNA, 25 bp, Homo sapien
tgttaatgctaactgagggcttatt

SEQ ID NO: 1557958 - DNA, 25 bp, Homo sapien
agggcttattctgggcccaactctg

SEQ ID NO: 1557959 - DNA, 25 bp, Homo sapien
attcggcatagaggcggaagcagac

SEQ ID NO: 1557960 - DNA, 25 bp, Homo sapien
tggcctgactaatccagaactcctg

SEQ ID NO: 1557961 - DNA, 25 bp, Homo sapien
gcagcttggcctgcggatcgtagct

SEQ ID NO: 1557962 - DNA, 25 bp, Homo sapien
aaggcatcatagtccgattcggcat

SEQ ID NO: 1557963 - DNA, 25 bp, Homo sapien
ccacgagactgaggactgaccagga

SEQ ID NO: 1557964 - DNA, 25 bp, Homo sapien
gaaaatagtgtgcacctcctgcagg

SEQ ID NO: 1557965 - DNA, 25 bp, Homo sapien
ggtttgtgctacacccgcacgtgag

SEQ ID NO: 1557966 - DNA, 25 bp, Homo sapien
gagccacaagagtgaaggaccctgg

SEQ ID NO: 1557967 - DNA, 25 bp, Homo sapien
agcagggacccaatgggtgtgaggg

SEQ ID NO: 1557968 - DNA, 25 bp, Homo sapien
gcagggacccaatgggtgtgagggc

SEQ ID NO: 1557969 - DNA, 25 bp, Homo sapien
gaggtagaggatggcggtttccagg

SEQ ID NO: 1557970 - DNA, 25 bp, Homo sapien
cccctggtcccggaggtagaggatg

SEQ ID NO: 1557971 - DNA, 25 bp, Homo sapien
tcccagcagtttgaaaggccgaagt

SEQ ID NO: 1557972 - DNA, 25 bp, Homo sapien
agcagtttgaaaggccgaagtgggc

SEQ ID NO: 1557973 - DNA, 25 bp, Homo sapien
aaaaacaaatattggccgggcgcag

SEQ ID NO: 1557974 - DNA, 25 bp, Homo sapien
agcacggccgacatggtgaaacctt

SEQ ID NO: 1557975 - DNA, 25 bp, Homo sapien
actggacgctaagtgcggctgcgat

SEQ ID NO: 1557976 - DNA, 25 bp, Homo sapien
tgaagggcgactggacgctaagtgc

SEQ ID NO: 1557977 - DNA, 25 bp, Homo sapien
cggctgcgatggtgagcacaggctc

SEQ ID NO: 1557978 - DNA, 25 bp, Homo sapien
tgggcgctgcgggtgaagggcgact

SEQ ID NO: 1557979 - DNA, 25 bp, Homo sapien
cgttgaagacgttgaagagcgtgaa

SEQ ID NO: 1557980 - DNA, 25 bp, Homo sapien
ccaggcgttgaagacgttgaagagc

SEQ ID NO: 1557981 - DNA, 25 bp, Homo sapien
ctgcacccaggcgttgaagacgttg

SEQ ID NO: 1557982 - DNA, 25 bp, Homo sapien
gaaggggtcaccctggtcgctctcc

SEQ ID NO: 1557983 - DNA, 25 bp, Homo sapien
aaggttggccatttcgtacagtcga

SEQ ID NO: 1557984 - DNA, 25 bp, Homo sapien
gtacagtcgatgctcctctatgccc

SEQ ID NO: 1557985 - DNA, 25 bp, Homo sapien
gcggcggcaccacttgcgagagttt

SEQ ID NO: 1557986 - DNA, 25 bp, Homo sapien
cttgaactggcgccgaaggttggcc

SEQ ID NO: 1557987 - DNA, 25 bp, Homo sapien
aggtgggtaggggtgagggcctcag

SEQ ID NO: 1557988 - DNA, 25 bp, Homo sapien
tgggtaggggtgagggcctcagggc

SEQ ID NO: 1557989 - DNA, 25 bp, Homo sapien
cctcagggcagactcagtgggctct

SEQ ID NO: 1557990 - DNA, 25 bp, Homo sapien
gtgagggcctcagggcagactcagt

SEQ ID NO: 1557991 - DNA, 25 bp, Homo sapien
gccctgtcctcgtcactggagccgc

SEQ ID NO: 1557992 - DNA, 25 bp, Homo sapien
tgcaaccgactgtagctgtccccta

SEQ ID NO: 1557993 - DNA, 25 bp, Homo sapien
agcagcccgtggtcctccaacagct

SEQ ID NO: 1557994 - DNA, 25 bp, Homo sapien
gcgccctcctcgtgctggcgtttca

SEQ ID NO: 1557995 - DNA, 25 bp, Homo sapien
ccacaccccacagcccatggcgccc

SEQ ID NO: 1557996 - DNA, 25 bp, Homo sapien
acaccccacagcccatggcgcccac

SEQ ID NO: 1557997 - DNA, 25 bp, Homo sapien
cccccacaccccacagcccatggcg

SEQ ID NO: 1557998 - DNA, 25 bp, Homo sapien
cccacaccccacagcccatggcgcc

SEQ ID NO: 1557999 - DNA, 25 bp, Homo sapien
gctgcgccaggtcatgccgaagctt

SEQ ID NO: 1558000 - DNA, 25 bp, Homo sapien
ccaggtcatgccgaagcttgaactt

SEQ ID NO: 1558001 - DNA, 25 bp, Homo sapien
ctgttgaaggcgtcggggacggcca

SEQ ID NO: 1558002 - DNA, 25 bp, Homo sapien
gcgccaggtcatgccgaagcttgaa

SEQ ID NO: 1558003 - DNA, 25 bp, Homo sapien
ggctcctatagtgctctggactccc

SEQ ID NO: 1558004 - DNA, 25 bp, Homo sapien
gcacaggacaggcactcagggttcg

SEQ ID NO: 1558005 - DNA, 25 bp, Homo sapien
gacaggcactcagggttcgtgtgtt

SEQ ID NO: 1558006 - DNA, 25 bp, Homo sapien
ccctgtgggctcctatagtgctctg

SEQ ID NO: 1558007 - DNA, 25 bp, Homo sapien
tgccagcgaagacgcaggtggggtg

SEQ ID NO: 1558008 - DNA, 25 bp, Homo sapien
ggcttccgtcgcagttgctggcctc

SEQ ID NO: 1558009 - DNA, 25 bp, Homo sapien
ctcggcttccgtcgcagttgctggc

SEQ ID NO: 1558010 - DNA, 25 bp, Homo sapien
ccagcgaagacgcaggtggggtgca

SEQ ID NO: 1558011 - DNA, 25 bp, Homo sapien
gcttaggttgactatcaccaccatg

SEQ ID NO: 1558012 - DNA, 25 bp, Homo sapien
agcctgggccggtgtgggagcccca

SEQ ID NO: 1558013 - DNA, 25 bp, Homo sapien
tgggagttcacggtatccctgcccc

SEQ ID NO: 1558014 - DNA, 25 bp, Homo sapien
gggtgagtcacccaaggctacccag

SEQ ID NO: 1558015 - DNA, 25 bp, Homo sapien
ggagctcacagagtccataggacag

SEQ ID NO: 1558016 - DNA, 25 bp, Homo sapien
tcacagagtccataggacaggcccc

SEQ ID NO: 1558017 - DNA, 25 bp, Homo sapien
ctgggagctcacagagtccatagga

SEQ ID NO: 1558018 - DNA, 25 bp, Homo sapien
gctcacagagtccataggacaggcc

SEQ ID NO: 1558019 - DNA, 25 bp, Homo sapien
tgcagcgagacacccttccatgcac

SEQ ID NO: 1558020 - DNA, 25 bp, Homo sapien
gcgagacacccttccatgcacacgg

SEQ ID NO: 1558021 - DNA, 25 bp, Homo sapien
cagcgagacacccttccatgcacac

SEQ ID NO: 1558022 - DNA, 25 bp, Homo sapien
ctgcagcgagacacccttccatgca

SEQ ID NO: 1558023 - DNA, 25 bp, Homo sapien
gacaagaaggtcagccaaatctgaa

SEQ ID NO: 1558024 - DNA, 25 bp, Homo sapien
gaaggtcagccaaatctgaatgtga

SEQ ID NO: 1558025 - DNA, 25 bp, Homo sapien
tcagacaagaaggtcagccaaatct

SEQ ID NO: 1558026 - DNA, 25 bp, Homo sapien
tcagccaaatctgaatgtgactccc

SEQ ID NO: 1558027 - DNA, 25 bp, Homo sapien
tgtcccacccggtcaaagtacacat

SEQ ID NO: 1558028 - DNA, 25 bp, Homo sapien
ctgaaaggttgaggaggaccgctca

SEQ ID NO: 1558029 - DNA, 25 bp, Homo sapien
caaagtacacatcgatagaaagagt

SEQ ID NO: 1558030 - DNA, 25 bp, Homo sapien
acatcgatagaaagagtatgcttac

SEQ ID NO: 1558031 - DNA, 25 bp, Homo sapien
ggatgcggacgcagttcaccaggta

SEQ ID NO: 1558032 - DNA, 25 bp, Homo sapien
ccaggtacggcttgttggtctccag

SEQ ID NO: 1558033 - DNA, 25 bp, Homo sapien
gcggacgcagttcaccaggtacggc

SEQ ID NO: 1558034 - DNA, 25 bp, Homo sapien
gcagggatgcggacgcagttcacca

SEQ ID NO: 1558035 - DNA, 25 bp, Homo sapien
gatgccgtgaattgcaggagttcct

SEQ ID NO: 1558036 - DNA, 25 bp, Homo sapien
ccaggcgggagcagtcaccattggt

SEQ ID NO: 1558037 - DNA, 25 bp, Homo sapien
gtccagggcactttcccagcgggca

SEQ ID NO: 1558038 - DNA, 25 bp, Homo sapien
ccaggagtcggatggcactttcact

SEQ ID NO: 1558039 - DNA, 25 bp, Homo sapien
tgagccgccggaggctgtaaggaat

SEQ ID NO: 1558040 - DNA, 25 bp, Homo sapien
cccacatacatgttctggacttcta

SEQ ID NO: 1558041 - DNA, 25 bp, Homo sapien
ggacttctagccctgtgagccgccg

SEQ ID NO: 1558042 - DNA, 25 bp, Homo sapien
cacatacatgttctggacttctagc

SEQ ID NO: 1558043 - DNA, 25 bp, Homo sapien
ggaagtcagtgactgcgtagccccc

SEQ ID NO: 1558044 - DNA, 25 bp, Homo sapien
tcagggaaggagggttcatgcttac

SEQ ID NO: 1558045 - DNA, 25 bp, Homo sapien
ttcagggaaggagggttcatgctta

SEQ ID NO: 1558046 - DNA, 25 bp, Homo sapien
cttcagggaaggagggttcatgctt

SEQ ID NO: 1558047 - DNA, 25 bp, Homo sapien
ccacgggccccacttgggaactatg

SEQ ID NO: 1558048 - DNA, 25 bp, Homo sapien
tgggaactatgtccctggactaagg

SEQ ID NO: 1558049 - DNA, 25 bp, Homo sapien
ccagaagccctcagggccacgggcc

SEQ ID NO: 1558050 - DNA, 25 bp, Homo sapien
gccccacttgggaactatgtccctg

SEQ ID NO: 1558051 - DNA, 25 bp, Homo sapien
caggtgttctcatgggcgatgcgct

SEQ ID NO: 1558052 - DNA, 25 bp, Homo sapien
gttcggagacagtcgctgtacaggt

SEQ ID NO: 1558053 - DNA, 25 bp, Homo sapien
aggtgttctcatgggcgatgcgctc

SEQ ID NO: 1558054 - DNA, 25 bp, Homo sapien
acagtcgctgtacaggtctgtgtca

SEQ ID NO: 1558055 - DNA, 25 bp, Homo sapien
gctcacacgcacaggagaccatcat

SEQ ID NO: 1558056 - DNA, 25 bp, Homo sapien
gtcagtcctcgaagctctagcaagt

SEQ ID NO: 1558057 - DNA, 25 bp, Homo sapien
gtggaggtcgtcagtcctcgaagct

SEQ ID NO: 1558058 - DNA, 25 bp, Homo sapien
gaagctctagcaagtgctcacacgc

SEQ ID NO: 1558059 - DNA, 25 bp, Homo sapien
tctacccgcacccaaatgccaggca

SEQ ID NO: 1558060 - DNA, 25 bp, Homo sapien
tgtgaggggcgtgttccagtgcaca

SEQ ID NO: 1558061 - DNA, 25 bp, Homo sapien
aggaggctgtgaggggcgtgttcca

SEQ ID NO: 1558062 - DNA, 25 bp, Homo sapien
gttccagtgcacaggtctacccgca

SEQ ID NO: 1558063 - DNA, 25 bp, Homo sapien
aagaggaagtccttcccgcaggcct

SEQ ID NO: 1558064 - DNA, 25 bp, Homo sapien
ttccggtggcgcagcacctctgtgg

SEQ ID NO: 1558065 - DNA, 25 bp, Homo sapien
tggtagggcctctgcaggacagatg

SEQ ID NO: 1558066 - DNA, 25 bp, Homo sapien
agatgtcttctggagggtttcgagg

SEQ ID NO: 1558067 - DNA, 25 bp, Homo sapien
agcatgtgcggctttattcacaatc

SEQ ID NO: 1558068 - DNA, 25 bp, Homo sapien
gagtcctgcccctagtcctgggctg

SEQ ID NO: 1558069 - DNA, 25 bp, Homo sapien
aggcaagagtcctgcccctagtcct

SEQ ID NO: 1558070 - DNA, 25 bp, Homo sapien
tttattcacaatccgtgctccaggc

SEQ ID NO: 1558071 - DNA, 25 bp, Homo sapien
tggggaggactaacaaggcagctgc

SEQ ID NO: 1558072 - DNA, 25 bp, Homo sapien
gaccctggggaggactaacaaggca

SEQ ID NO: 1558073 - DNA, 25 bp, Homo sapien
cctggggaggactaacaaggcagct

SEQ ID NO: 1558074 - DNA, 25 bp, Homo sapien
accctggggaggactaacaaggcag

SEQ ID NO: 1558075 - DNA, 25 bp, Homo sapien
gaggtccctgctggctctaacgccc

SEQ ID NO: 1558076 - DNA, 25 bp, Homo sapien
ctgctggctctaacgcccctcctac

SEQ ID NO: 1558077 - DNA, 25 bp, Homo sapien
gggaggtccctgctggctctaacgc

SEQ ID NO: 1558078 - DNA, 25 bp, Homo sapien
gtccctgctggctctaacgcccctc

SEQ ID NO: 1558079 - DNA, 25 bp, Homo sapien
tgtggtcccacgtgaacaccagtgc

SEQ ID NO: 1558080 - DNA, 25 bp, Homo sapien
actgaggatggactcaagagagagc

SEQ ID NO: 1558081 - DNA, 25 bp, Homo sapien
aagtgacccaggtggatgggcaaat

SEQ ID NO: 1558082 - DNA, 25 bp, Homo sapien
ggtcttatggtgcagcctgtggtcc

SEQ ID NO: 1558083 - DNA, 25 bp, Homo sapien
tttttattacgggagtgagcaacca

SEQ ID NO: 1558084 - DNA, 25 bp, Homo sapien
tttattacgggagtgagcaaccatg

SEQ ID NO: 1558085 - DNA, 25 bp, Homo sapien
ttattacgggagtgagcaaccatgc

SEQ ID NO: 1558086 - DNA, 25 bp, Homo sapien
tatttttttattacgggagtgagca

SEQ ID NO: 1558087 - DNA, 25 bp, Homo sapien
tttggtagacgtcaccagggagccc

SEQ ID NO: 1558088 - DNA, 25 bp, Homo sapien
gtcctcccctatgctgtggccaagt

SEQ ID NO: 1558089 - DNA, 25 bp, Homo sapien
tagaataagccccagttggccatga

SEQ ID NO: 1558090 - DNA, 25 bp, Homo sapien
catttccttaatagagttgttccgg

SEQ ID NO: 1558091 - DNA, 25 bp, Homo sapien
gctagacacagacagcacattcttg

SEQ ID NO: 1558092 - DNA, 25 bp, Homo sapien
tggccagcactagaggacagattaa

SEQ ID NO: 1558093 - DNA, 25 bp, Homo sapien
gaatgaatgaaccaagcccatgcaa

SEQ ID NO: 1558094 - DNA, 25 bp, Homo sapien
gattaagaatgttggtcacggccgg

SEQ ID NO: 1558095 - DNA, 25 bp, Homo sapien
acacccagcacgtcccctctgatgg

SEQ ID NO: 1558096 - DNA, 25 bp, Homo sapien
ccagcacgtcccctctgatggggcc

SEQ ID NO: 1558097 - DNA, 25 bp, Homo sapien
acccagcacgtcccctctgatgggg

SEQ ID NO: 1558098 - DNA, 25 bp, Homo sapien
cacccagcacgtcccctctgatggg

SEQ ID NO: 1558099 - DNA, 25 bp, Homo sapien
tttgtacctggaaccaagcctgtgc

SEQ ID NO: 1558100 - DNA, 25 bp, Homo sapien
taaccctggatacatacaggacaga

SEQ ID NO: 1558101 - DNA, 25 bp, Homo sapien
tataatcacgtcctataaccctgga

SEQ ID NO: 1558102 - DNA, 25 bp, Homo sapien
tccaggtactgtgtgctcctagtaa

SEQ ID NO: 1558103 - DNA, 25 bp, Homo sapien
cagcactgctgtagtgtctgtcagt

SEQ ID NO: 1558104 - DNA, 25 bp, Homo sapien
tgaacctcctaacagtgattgccgg

SEQ ID NO: 1558105 - DNA, 25 bp, Homo sapien
gaatcacgctacactgccctttgtg

SEQ ID NO: 1558106 - DNA, 25 bp, Homo sapien
cagtagcatgtcttccagctgcagc

SEQ ID NO: 1558107 - DNA, 25 bp, Homo sapien
tctgattccttcaacgaggacatcg

SEQ ID NO: 1558108 - DNA, 25 bp, Homo sapien
attccttcaacgaggacatcgctgc

SEQ ID NO: 1558109 - DNA, 25 bp, Homo sapien
ctctgattccttcaacgaggacatc

SEQ ID NO: 1558110 - DNA, 25 bp, Homo sapien
tgattccttcaacgaggacatcgct

SEQ ID NO: 1558111 - DNA, 25 bp, Homo sapien
ttccgggtaggctgtgaggaccgct

SEQ ID NO: 1558112 - DNA, 25 bp, Homo sapien
ttcccttcgctctacttttgttcca

SEQ ID NO: 1558113 - DNA, 25 bp, Homo sapien
gatgggaacggggatagaagacagg

SEQ ID NO: 1558114 - DNA, 25 bp, Homo sapien
tcgctctacttttgttccaagccgc

SEQ ID NO: 1558115 - DNA, 25 bp, Homo sapien
ttaggccttgatgagaacaggtttg

SEQ ID NO: 1558116 - DNA, 25 bp, Homo sapien
tgtggaaggtgtaggggcagacggt

SEQ ID NO: 1558117 - DNA, 25 bp, Homo sapien
tttgtggaaggtgtaggggcagacg

SEQ ID NO: 1558118 - DNA, 25 bp, Homo sapien
aggccttgatgagaacaggtttgtg

SEQ ID NO: 1558119 - DNA, 25 bp, Homo sapien
aagagagacgttcatttgcctgagc

SEQ ID NO: 1558120 - DNA, 25 bp, Homo sapien
ccatgcatgagccacaaactgtttc

SEQ ID NO: 1558121 - DNA, 25 bp, Homo sapien
tatcagtcgtgcttcagccacgcct

SEQ ID NO: 1558122 - DNA, 25 bp, Homo sapien
tcatcagcctagctcttccactaat

SEQ ID NO: 1558123 - DNA, 25 bp, Homo sapien
gctgagatcacactactgccttggt

SEQ ID NO: 1558124 - DNA, 25 bp, Homo sapien
taagctgagatcacactactgcctt

SEQ ID NO: 1558125 - DNA, 25 bp, Homo sapien
tgattccagctactcagtagactga

SEQ ID NO: 1558126 - DNA, 25 bp, Homo sapien
gtgattccagctactcagtagactg

SEQ ID NO: 1558127 - DNA, 25 bp, Homo sapien
tgacaacggtgaccctatcatgtct

SEQ ID NO: 1558128 - DNA, 25 bp, Homo sapien
acaacggtgaccctatcatgtcttt

SEQ ID NO: 1558129 - DNA, 25 bp, Homo sapien
caacggtgaccctatcatgtctttt

SEQ ID NO: 1558130 - DNA, 25 bp, Homo sapien
acggtgaccctatcatgtctttttt

SEQ ID NO: 1558131 - DNA, 25 bp, Homo sapien
gaagaattcctgactcccggctggc

SEQ ID NO: 1558132 - DNA, 25 bp, Homo sapien
gggctgctaattagacgtatcatta

SEQ ID NO: 1558133 - DNA, 25 bp, Homo sapien
tatgcctaagttgttgctaattagg

SEQ ID NO: 1558134 - DNA, 25 bp, Homo sapien
cctggtgggtttgtaattatgccta

SEQ ID NO: 1558135 - DNA, 25 bp, Homo sapien
ccattttgaggtgatgggagcgcct

SEQ ID NO: 1558136 - DNA, 25 bp, Homo sapien
tgaaggacgggtcttacctggcacg

SEQ ID NO: 1558137 - DNA, 25 bp, Homo sapien
cctaagaggcacgtgaggcagaaca

SEQ ID NO: 1558138 - DNA, 25 bp, Homo sapien
tcttctgatcaaggacctaagaggc

SEQ ID NO: 1558139 - DNA, 25 bp, Homo sapien
aacgccggcagcttccgtacgtcat

SEQ ID NO: 1558140 - DNA, 25 bp, Homo sapien
acacagcatacagcgagaggccgtg

SEQ ID NO: 1558141 - DNA, 25 bp, Homo sapien
tgatgatgatgattcgaccttccac

SEQ ID NO: 1558142 - DNA, 25 bp, Homo sapien
ggcacataagggcaatattaagttt

SEQ ID NO: 1558143 - DNA, 25 bp, Homo sapien
tgctgctgcgcatcaagaagaccat

SEQ ID NO: 1558144 - DNA, 25 bp, Homo sapien
gctctaaagcacatgtagccgctga

SEQ ID NO: 1558145 - DNA, 25 bp, Homo sapien
gatgtgcccagcatagtcaagacag

SEQ ID NO: 1558146 - DNA, 25 bp, Homo sapien
gaaggaatacgactccatctcccgg

SEQ ID NO: 1558147 - DNA, 25 bp, Homo sapien
cctccagggccgattcacgattgcg

SEQ ID NO: 1558148 - DNA, 25 bp, Homo sapien
ccgattcacgattgcggccaagcac

SEQ ID NO: 1558149 - DNA, 25 bp, Homo sapien
acgattgcggccaagcaccacatct

SEQ ID NO: 1558150 - DNA, 25 bp, Homo sapien
ggtcatgagtcgcaggcagcccctt

SEQ ID NO: 1558151 - DNA, 25 bp, Homo sapien
ttcacacctcaggtcttcttcatac

SEQ ID NO: 1558152 - DNA, 25 bp, Homo sapien
cactccagcgtaggcgacaaaacaa

SEQ ID NO: 1558153 - DNA, 25 bp, Homo sapien
tccagcgtaggcgacaaaacaagac

SEQ ID NO: 1558154 - DNA, 25 bp, Homo sapien
ctgcactccagcgtaggcgacaaaa

SEQ ID NO: 1558155 - DNA, 25 bp, Homo sapien
ccagcgtaggcgacaaaacaagacc

SEQ ID NO: 1558156 - DNA, 25 bp, Homo sapien
ttaaaacaccgtgggagtctggcca

SEQ ID NO: 1558157 - DNA, 25 bp, Homo sapien
ttattctgcggccaaaccacttggg

SEQ ID NO: 1558158 - DNA, 25 bp, Homo sapien
ctacacagacatggtaagggctgct

SEQ ID NO: 1558159 - DNA, 25 bp, Homo sapien
ccccttgagagtgtgtggcagcgct

SEQ ID NO: 1558160 - DNA, 25 bp, Homo sapien
taaaagcctgtccttcccaagagaa

SEQ ID NO: 1558161 - DNA, 25 bp, Homo sapien
tacagcctaaagatacgcacgccag

SEQ ID NO: 1558162 - DNA, 25 bp, Homo sapien
agatgatgcagtcatgcccagcgcg

SEQ ID NO: 1558163 - DNA, 25 bp, Homo sapien
cacattggcatcaagggcagtggct

SEQ ID NO: 1558164 - DNA, 25 bp, Homo sapien
cctgaggcagagtgagcgttgactt

SEQ ID NO: 1558165 - DNA, 25 bp, Homo sapien
gcgttgactttagaactggctctct

SEQ ID NO: 1558166 - DNA, 25 bp, Homo sapien
tggtgtcggtgcagctgatcacccc

SEQ ID NO: 1558167 - DNA, 25 bp, Homo sapien
tatctaccgtgtcggtggtgtcggt

SEQ ID NO: 1558168 - DNA, 25 bp, Homo sapien
gctgcctcccaaacgtcagttagga

SEQ ID NO: 1558169 - DNA, 25 bp, Homo sapien
gcagaatggcttgggacccacagaa

SEQ ID NO: 1558170 - DNA, 25 bp, Homo sapien
tggatgaggcttcaggcacggtctc

SEQ ID NO: 1558171 - DNA, 25 bp, Homo sapien
gcccatgggcactggtctgcatgta

SEQ ID NO: 1558172 - DNA, 25 bp, Homo sapien
tcagtggactagcagggctggtggc

SEQ ID NO: 1558173 - DNA, 25 bp, Homo sapien
tactctgcttggtcaggcaaggccc

SEQ ID NO: 1558174 - DNA, 25 bp, Homo sapien
ggtggtttcccgcttccaggtgata

SEQ ID NO: 1558175 - DNA, 25 bp, Homo sapien
atactggtggcggtgccttcaggat

SEQ ID NO: 1558176 - DNA, 25 bp, Homo sapien
tgggcacgagcttccagatttctct

SEQ ID NO: 1558177 - DNA, 25 bp, Homo sapien
tctgcagagcgtgcagaaaccccgg

SEQ ID NO: 1558178 - DNA, 25 bp, Homo sapien
actggtgtgggcacgagcttccaga

SEQ ID NO: 1558179 - DNA, 25 bp, Homo sapien
ctgtaggcaataacggcgggaccct

SEQ ID NO: 1558180 - DNA, 25 bp, Homo sapien
caggttctgaatggcggctctgttc

SEQ ID NO: 1558181 - DNA, 25 bp, Homo sapien
tcctggggaatccagagtgcctgct

SEQ ID NO: 1558182 - DNA, 25 bp, Homo sapien
gcctgctgtgccgtttggggatcct

SEQ ID NO: 1558183 - DNA, 25 bp, Homo sapien
gccgtttggggatcctgcaggttct

SEQ ID NO: 1558184 - DNA, 25 bp, Homo sapien
tagggggctttgatgcaccagcagc

SEQ ID NO: 1558185 - DNA, 25 bp, Homo sapien
tgtcgcctgccttggtgctcagatg

SEQ ID NO: 1558186 - DNA, 25 bp, Homo sapien
cagatgccacccttgctcttcatta

SEQ ID NO: 1558187 - DNA, 25 bp, Homo sapien
atttctgggctgccagacgctaggg

SEQ ID NO: 1558188 - DNA, 25 bp, Homo sapien
aagggggctgacaccaggcagaggg

SEQ ID NO: 1558189 - DNA, 25 bp, Homo sapien
tggagcagtggatttgcgtgggccc

SEQ ID NO: 1558190 - DNA, 25 bp, Homo sapien
agggggctgacaccaggcagagggg

SEQ ID NO: 1558191 - DNA, 25 bp, Homo sapien
agcagtggatttgcgtgggccctgg

SEQ ID NO: 1558192 - DNA, 25 bp, Homo sapien
cgccgttcgccggtatgtgcgcatg

SEQ ID NO: 1558193 - DNA, 25 bp, Homo sapien
gtctgcggtcagctgactgtgccag

SEQ ID NO: 1558194 - DNA, 25 bp, Homo sapien
ttgaggtctcttgacgccgattggg

SEQ ID NO: 1558195 - DNA, 25 bp, Homo sapien
ggccccgagctgtcacgtgagtgtc

SEQ ID NO: 1558196 - DNA, 25 bp, Homo sapien
ctcgtgatcctcccacctcagcctc

SEQ ID NO: 1558197 - DNA, 25 bp, Homo sapien
ttcttctgtctcagctgggactaca

SEQ ID NO: 1558198 - DNA, 25 bp, Homo sapien
tcttctgtctcagctgggactacag

SEQ ID NO: 1558199 - DNA, 25 bp, Homo sapien
tcgtgatcctcccacctcagcctcc

SEQ ID NO: 1558200 - DNA, 25 bp, Homo sapien
ggcatgatcccaccagtgattaaca

SEQ ID NO: 1558201 - DNA, 25 bp, Homo sapien
gatcccaccagtgattaacacagga

SEQ ID NO: 1558202 - DNA, 25 bp, Homo sapien
cgctctcaggaggccaccaaactga

SEQ ID NO: 1558203 - DNA, 25 bp, Homo sapien
aaacttagcgtggaccctgcattgg

SEQ ID NO: 1558204 - DNA, 25 bp, Homo sapien
tagctggtctccgtcgagccacggc

SEQ ID NO: 1558205 - DNA, 25 bp, Homo sapien
tggccgcgctgatgggattcccaga

SEQ ID NO: 1558206 - DNA, 25 bp, Homo sapien
gccgtaaacgccctgctggcgggac

SEQ ID NO: 1558207 - DNA, 25 bp, Homo sapien
caggacgccgcggtggtgtcgggtc

SEQ ID NO: 1558208 - DNA, 25 bp, Homo sapien
tagcgggagtcgaggatgaaggaaa

SEQ ID NO: 1558209 - DNA, 25 bp, Homo sapien
ggagcgccgcaggtccgaaaagata

SEQ ID NO: 1558210 - DNA, 25 bp, Homo sapien
gtcgtccggcgggaggacgcgtcca

SEQ ID NO: 1558211 - DNA, 25 bp, Homo sapien
tcccctgaggcggaggacggtcgtc

SEQ ID NO: 1558212 - DNA, 25 bp, Homo sapien
cggtcagcgcactgcctgatcgcat

SEQ ID NO: 1558213 - DNA, 25 bp, Homo sapien
cctgatgtttgagcagccgtcggcg

SEQ ID NO: 1558214 - DNA, 25 bp, Homo sapien
cgggccggtcagcgcactgcctgat

SEQ ID NO: 1558215 - DNA, 25 bp, Homo sapien
gacggccccgcacgggctgcaaagg

SEQ ID NO: 1558216 - DNA, 25 bp, Homo sapien
gcagcagcggaataaagctccctag

SEQ ID NO: 1558217 - DNA, 25 bp, Homo sapien
cgtgtaatgtacttagcagcagcgg

SEQ ID NO: 1558218 - DNA, 25 bp, Homo sapien
actgtggccagcgtgtaatgtactt

SEQ ID NO: 1558219 - DNA, 25 bp, Homo sapien
gctccctagtttgatattgttatta

SEQ ID NO: 1558220 - DNA, 25 bp, Homo sapien
tatatatacactgtccacgaaagag

SEQ ID NO: 1558221 - DNA, 25 bp, Homo sapien
tcaccgcgcacgttctagggagaga

SEQ ID NO: 1558222 - DNA, 25 bp, Homo sapien
cacacaaaagtaggagatcaccgcg

SEQ ID NO: 1558223 - DNA, 25 bp, Homo sapien
gggacagagcgaaacagcgagaccc

SEQ ID NO: 1558224 - DNA, 25 bp, Homo sapien
cattcaacaagcatctacagagcac

SEQ ID NO: 1558225 - DNA, 25 bp, Homo sapien
tgggacatgcctgtcatccacccat

SEQ ID NO: 1558226 - DNA, 25 bp, Homo sapien
cacaggaactccaaagacagggtct

SEQ ID NO: 1558227 - DNA, 25 bp, Homo sapien
ccagtgggacactttttgagaaaca

SEQ ID NO: 1558228 - DNA, 25 bp, Homo sapien
tcaggacaagcaatggccgtagaca

SEQ ID NO: 1558229 - DNA, 25 bp, Homo sapien
ccagggtcaggacaagcaatggccg

SEQ ID NO: 1558230 - DNA, 25 bp, Homo sapien
acagagatcgagtggggctccaaga

SEQ ID NO: 1558231 - DNA, 25 bp, Homo sapien
caatggccgtagacagagatcgagt

SEQ ID NO: 1558232 - DNA, 25 bp, Homo sapien
tgaggatttgaagtgaactgtacta

SEQ ID NO: 1558233 - DNA, 25 bp, Homo sapien
tcatgaggatttgaagtgaactgta

SEQ ID NO: 1558234 - DNA, 25 bp, Homo sapien
gaggatttgaagtgaactgtactac

SEQ ID NO: 1558235 - DNA, 25 bp, Homo sapien
catgaggatttgaagtgaactgtac

SEQ ID NO: 1558236 - DNA, 25 bp, Homo sapien
gaatcttattttgaccctggcatcc

SEQ ID NO: 1558237 - DNA, 25 bp, Homo sapien
ccccaggaactggtgtgcaagtcta

SEQ ID NO: 1558238 - DNA, 25 bp, Homo sapien
cacagacctggctgcaaattggcaa

SEQ ID NO: 1558239 - DNA, 25 bp, Homo sapien
gactcagaactcacgtggtaacagg

SEQ ID NO: 1558240 - DNA, 25 bp, Homo sapien
gaacactgacaactatgatacatgg

SEQ ID NO: 1558241 - DNA, 25 bp, Homo sapien
tggaatacttaatattgcaaggaaa

SEQ ID NO: 1558242 - DNA, 25 bp, Homo sapien
acatggatgcaagaaattacagaag

SEQ ID NO: 1558243 - DNA, 25 bp, Homo sapien
tggattggaatacttaatattgcaa

SEQ ID NO: 1558244 - DNA, 25 bp, Homo sapien
tcgtacaggcatgttcaagcagcat

SEQ ID NO: 1558245 - DNA, 25 bp, Homo sapien
taggtccacacaaagactcgtacag

SEQ ID NO: 1558246 - DNA, 25 bp, Homo sapien
ggcatattgccagcaaaagaaggaa

SEQ ID NO: 1558247 - DNA, 25 bp, Homo sapien
ggaatgaactactggtacacataac

SEQ ID NO: 1558248 - DNA, 25 bp, Homo sapien
gcaaacagcccataaatcaatgcaa

SEQ ID NO: 1558249 - DNA, 25 bp, Homo sapien
atattactacatacccgttagaacg

SEQ ID NO: 1558250 - DNA, 25 bp, Homo sapien
ttaaaactacaaccataatgagata

SEQ ID NO: 1558251 - DNA, 25 bp, Homo sapien
ttagaacgtctgacattataaagac

SEQ ID NO: 1558252 - DNA, 25 bp, Homo sapien
cactcactgtcggtaggactgtaaa

SEQ ID NO: 1558253 - DNA, 25 bp, Homo sapien
tgtggcggaacacgaatgctcactc

SEQ ID NO: 1558254 - DNA, 25 bp, Homo sapien
gttaaacatagagttgccacgtggc

SEQ ID NO: 1558255 - DNA, 25 bp, Homo sapien
tacttatagacccaagagagtcgaa

SEQ ID NO: 1558256 - DNA, 25 bp, Homo sapien
tctattaataatagcaagacggtag

SEQ ID NO: 1558257 - DNA, 25 bp, Homo sapien
ccctggccttacagttatgtttcta

SEQ ID NO: 1558258 - DNA, 25 bp, Homo sapien
ccatgccctggccttacagttatgt

SEQ ID NO: 1558259 - DNA, 25 bp, Homo sapien
caagacggtagcaggtgtctttagt

SEQ ID NO: 1558260 - DNA, 25 bp, Homo sapien
aaggacacttgtttatagtaagaga

SEQ ID NO: 1558261 - DNA, 25 bp, Homo sapien
tggagatgtgtgcaccaggtgactc

SEQ ID NO: 1558262 - DNA, 25 bp, Homo sapien
tattctgtgagtgtccataaatgat

SEQ ID NO: 1558263 - DNA, 25 bp, Homo sapien
cagggtgtggcgttgcttgactgca

SEQ ID NO: 1558264 - DNA, 25 bp, Homo sapien
gacttaacatgctatgacgcctaga

SEQ ID NO: 1558265 - DNA, 25 bp, Homo sapien
tagttgtcctgaaatgcctcgaatg

SEQ ID NO: 1558266 - DNA, 25 bp, Homo sapien
taagcccgtgggaactacatgatga

SEQ ID NO: 1558267 - DNA, 25 bp, Homo sapien
gagtcattcccgtgaaccttggtca

SEQ ID NO: 1558268 - DNA, 25 bp, Homo sapien
gaaggaggggcgtgtccactccagg

SEQ ID NO: 1558269 - DNA, 25 bp, Homo sapien
ctgcgctacaaacgaatcatgaagg

SEQ ID NO: 1558270 - DNA, 25 bp, Homo sapien
ctacaaacgaatcatgaagggaagg

SEQ ID NO: 1558271 - DNA, 25 bp, Homo sapien
cgctacaaacgaatcatgaagggaa

SEQ ID NO: 1558272 - DNA, 25 bp, Homo sapien
ttcctccccctgtgtcaccaggtcc

SEQ ID NO: 1558273 - DNA, 25 bp, Homo sapien
caggcttcctccccctgtgtcacca

SEQ ID NO: 1558274 - DNA, 25 bp, Homo sapien
cctccccctgtgtcaccaggtccat

SEQ ID NO: 1558275 - DNA, 25 bp, Homo sapien
agccccaccaggcttcctccccctg

SEQ ID NO: 1558276 - DNA, 25 bp, Homo sapien
ctcccatcctcatcatccatcgcca

SEQ ID NO: 1558277 - DNA, 25 bp, Homo sapien
tctcggatccatgcaagaagtcatt

SEQ ID NO: 1558278 - DNA, 25 bp, Homo sapien
cttctcggatccatgcaagaagtca

SEQ ID NO: 1558279 - DNA, 25 bp, Homo sapien
cggatccatgcaagaagtcattgag

SEQ ID NO: 1558280 - DNA, 25 bp, Homo sapien
atccatgcaagaagtcattgagggc

SEQ ID NO: 1558281 - DNA, 25 bp, Homo sapien
cacctgacaagccatgcggtgccat

SEQ ID NO: 1558282 - DNA, 25 bp, Homo sapien
tgcctggcacacctaccatccgggc

SEQ ID NO: 1558283 - DNA, 25 bp, Homo sapien
gggcacctgacaagccatgcggtgc

SEQ ID NO: 1558284 - DNA, 25 bp, Homo sapien
gcacacctaccatccgggcacctga

SEQ ID NO: 1558285 - DNA, 25 bp, Homo sapien
atagaaggcactttgggcctccccg

SEQ ID NO: 1558286 - DNA, 25 bp, Homo sapien
ttcatagaaggcactttgggcctcc

SEQ ID NO: 1558287 - DNA, 25 bp, Homo sapien
tcatagaaggcactttgggcctccc

SEQ ID NO: 1558288 - DNA, 25 bp, Homo sapien
catagaaggcactttgggcctcccc

SEQ ID NO: 1558289 - DNA, 25 bp, Homo sapien
aaaaaactactgttcaaggccacag

SEQ ID NO: 1558290 - DNA, 25 bp, Homo sapien
gctgtgtaacctagggcgtgcttga

SEQ ID NO: 1558291 - DNA, 25 bp, Homo sapien
cagctctgccaaggcttagctgtgt

SEQ ID NO: 1558292 - DNA, 25 bp, Homo sapien
aaaactactgttcaaggccacagtg

SEQ ID NO: 1558293 - DNA, 25 bp, Homo sapien
gggctacgcttaggccacagctgcc

SEQ ID NO: 1558294 - DNA, 25 bp, Homo sapien
gttagcaaggggctacgcttaggcc

SEQ ID NO: 1558295 - DNA, 25 bp, Homo sapien
gcttaggccacagctgccgcaaaga

SEQ ID NO: 1558296 - DNA, 25 bp, Homo sapien
agcaaggggctacgcttaggccaca

SEQ ID NO: 1558297 - DNA, 25 bp, Homo sapien
ccaggaagtctaggtccacactggg

SEQ ID NO: 1558298 - DNA, 25 bp, Homo sapien
gctctgggttcaggtggttgccgga

SEQ ID NO: 1558299 - DNA, 25 bp, Homo sapien
agcccaggatgtcatcttccaggaa

SEQ ID NO: 1558300 - DNA, 25 bp, Homo sapien
gccgccgccccctgtcgcaggagag

SEQ ID NO: 1558301 - DNA, 25 bp, Homo sapien
ggcctccagcgtctgctccgtgatg

SEQ ID NO: 1558302 - DNA, 25 bp, Homo sapien
cgtctgctccgtgatgttggcctct

SEQ ID NO: 1558303 - DNA, 25 bp, Homo sapien
cccgccatccgcaggctgcagggtg

SEQ ID NO: 1558304 - DNA, 25 bp, Homo sapien
gatgttggcctcttggaggctctgc

SEQ ID NO: 1558305 - DNA, 25 bp, Homo sapien
gatgggctgcagtgtcacattgccc

SEQ ID NO: 1558306 - DNA, 25 bp, Homo sapien
agggccttgttgaccacgtcctggg

SEQ ID NO: 1558307 - DNA, 25 bp, Homo sapien
tggtgggtcagcacggtaggcgggc

SEQ ID NO: 1558308 - DNA, 25 bp, Homo sapien
tgggcaggccttggaggcccgggat

SEQ ID NO: 1558309 - DNA, 25 bp, Homo sapien
ccgccgccatgaacgtcaggttctg

SEQ ID NO: 1558310 - DNA, 25 bp, Homo sapien
ttgagcgccatgacgggctggccca

SEQ ID NO: 1558311 - DNA, 25 bp, Homo sapien
acagcggccgagaggttcttctgga

SEQ ID NO: 1558312 - DNA, 25 bp, Homo sapien
gaacacagagttcccattgagcgtg

SEQ ID NO: 1558313 - DNA, 25 bp, Homo sapien
gttcgcttgcagcgcaggcgcgggg

SEQ ID NO: 1558314 - DNA, 25 bp, Homo sapien
caggcgcggggaagcccgacagcac

SEQ ID NO: 1558315 - DNA, 25 bp, Homo sapien
gcttgcagcgcaggcgcggggaagc

SEQ ID NO: 1558316 - DNA, 25 bp, Homo sapien
tcgcttgcagcgcaggcgcggggaa

SEQ ID NO: 1558317 - DNA, 25 bp, Homo sapien
tgctgccttggttcaggaggtggac

SEQ ID NO: 1558318 - DNA, 25 bp, Homo sapien
ctgctgccttggttcaggaggtgga

SEQ ID NO: 1558319 - DNA, 25 bp, Homo sapien
gtggtggtggccggtggctgcttga

SEQ ID NO: 1558320 - DNA, 25 bp, Homo sapien
ggtggtggccggtggctgcttgaag

SEQ ID NO: 1558321 - DNA, 25 bp, Homo sapien
ccgccggggcgccaggcagtaggaa

SEQ ID NO: 1558322 - DNA, 25 bp, Homo sapien
gccggggcgccaggcagtaggaact

SEQ ID NO: 1558323 - DNA, 25 bp, Homo sapien
ctggaccgccggggcgccaggcagt

SEQ ID NO: 1558324 - DNA, 25 bp, Homo sapien
gggcgccaggcagtaggaactggtt

SEQ ID NO: 1558325 - DNA, 25 bp, Homo sapien
ccgccaggatctgcccgcccacgtt

SEQ ID NO: 1558326 - DNA, 25 bp, Homo sapien
cggagaggatgtgcgcgctgtgggc

SEQ ID NO: 1558327 - DNA, 25 bp, Homo sapien
cccgccaggttctggtttgtgagga

SEQ ID NO: 1558328 - DNA, 25 bp, Homo sapien
tggggttcgcgatgagctgtccacc

SEQ ID NO: 1558329 - DNA, 25 bp, Homo sapien
cgccgccagcgacacgggcatctgg

SEQ ID NO: 1558330 - DNA, 25 bp, Homo sapien
gcatctggaagagcgcaggctggcc

SEQ ID NO: 1558331 - DNA, 25 bp, Homo sapien
tctggaagagcgcaggctggcccac

SEQ ID NO: 1558332 - DNA, 25 bp, Homo sapien
gccgccagcgacacgggcatctgga

SEQ ID NO: 1558333 - DNA, 25 bp, Homo sapien
atcttctccgggctagacgccaggc

SEQ ID NO: 1558334 - DNA, 25 bp, Homo sapien
aggctgcaccgtgaggacaggcgcg

SEQ ID NO: 1558335 - DNA, 25 bp, Homo sapien
ggtgttgagcatggccacggcgctg

SEQ ID NO: 1558336 - DNA, 25 bp, Homo sapien
ctgccccaggacgatcttctccggg

SEQ ID NO: 1558337 - DNA, 25 bp, Homo sapien
gggcgctgactatgaccgaggcagg

SEQ ID NO: 1558338 - DNA, 25 bp, Homo sapien
tgactatgaccgaggcaggcacgga

SEQ ID NO: 1558339 - DNA, 25 bp, Homo sapien
gccagctcctttggcgacgggggtg

SEQ ID NO: 1558340 - DNA, 25 bp, Homo sapien
cgctgactatgaccgaggcaggcac

SEQ ID NO: 1558341 - DNA, 25 bp, Homo sapien
ccatgatcactaggagacacttggg

SEQ ID NO: 1558342 - DNA, 25 bp, Homo sapien
catccatgatcactaggagacactt

SEQ ID NO: 1558343 - DNA, 25 bp, Homo sapien
ggcatccatgatcactaggagacac

SEQ ID NO: 1558344 - DNA, 25 bp, Homo sapien
tcaggcatccatgatcactaggaga

SEQ ID NO: 1558345 - DNA, 25 bp, Homo sapien
agttccccagacaaaggcgagccct

SEQ ID NO: 1558346 - DNA, 25 bp, Homo sapien
gcagttccccagacaaaggcgagcc

SEQ ID NO: 1558347 - DNA, 25 bp, Homo sapien
tcgcagttccccagacaaaggcgag

SEQ ID NO: 1558348 - DNA, 25 bp, Homo sapien
ccctcgcagttccccagacaaaggc

SEQ ID NO: 1558349 - DNA, 25 bp, Homo sapien
gctctgagggagggcgggacacact

SEQ ID NO: 1558350 - DNA, 25 bp, Homo sapien
cctggtgaggtagtgacggggacga

SEQ ID NO: 1558351 - DNA, 25 bp, Homo sapien
agtgacggggacgaagaggggcctg

SEQ ID NO: 1558352 - DNA, 25 bp, Homo sapien
acacactctgtggccgggagggtgg

SEQ ID NO: 1558353 - DNA, 25 bp, Homo sapien
ctggttttggatgacaaagatgcca

SEQ ID NO: 1558354 - DNA, 25 bp, Homo sapien
ctggcaggcgggggaacgcctagct

SEQ ID NO: 1558355 - DNA, 25 bp, Homo sapien
gctggttttggatgacaaagatgcc

SEQ ID NO: 1558356 - DNA, 25 bp, Homo sapien
caggcgggggaacgcctagctggtt

SEQ ID NO: 1558357 - DNA, 25 bp, Homo sapien
tgggggcggagaggcggctgcggcg

SEQ ID NO: 1558358 - DNA, 25 bp, Homo sapien
gcggctgcggcgggcctggggcagt

SEQ ID NO: 1558359 - DNA, 25 bp, Homo sapien
gcggagaggcggctgcggcgggcct

SEQ ID NO: 1558360 - DNA, 25 bp, Homo sapien
ctgcggcgggcctggggcagtaggg

SEQ ID NO: 1558361 - DNA, 25 bp, Homo sapien
gggcagcggtccctcaggcggctgg

SEQ ID NO: 1558362 - DNA, 25 bp, Homo sapien
ggcagcggtccctcaggcggctggg

SEQ ID NO: 1558363 - DNA, 25 bp, Homo sapien
gcagcggtccctcaggcggctggga

SEQ ID NO: 1558364 - DNA, 25 bp, Homo sapien
ctggaagtcggatggcgtaggggct

SEQ ID NO: 1558365 - DNA, 25 bp, Homo sapien
tggaagtcggatggcgtaggggctg

SEQ ID NO: 1558366 - DNA, 25 bp, Homo sapien
gaagtcggatggcgtaggggctggc

SEQ ID NO: 1558367 - DNA, 25 bp, Homo sapien
ggaagtcggatggcgtaggggctgg

SEQ ID NO: 1558368 - DNA, 25 bp, Homo sapien
gaaatctctcgagaagagccttcgg

SEQ ID NO: 1558369 - DNA, 25 bp, Homo sapien
tctggaggatgattccggacggcac

SEQ ID NO: 1558370 - DNA, 25 bp, Homo sapien
agtgggggtcccagatggggcctgc

SEQ ID NO: 1558371 - DNA, 25 bp, Homo sapien
ctgtggcggccatgggtgccggggc

SEQ ID NO: 1558372 - DNA, 25 bp, Homo sapien
tgggggtcccagatggggcctgccc

SEQ ID NO: 1558373 - DNA, 25 bp, Homo sapien
gcagtgggggtcccagatggggcct

SEQ ID NO: 1558374 - DNA, 25 bp, Homo sapien
ttgctggcaaaagccttgttctcgg

SEQ ID NO: 1558375 - DNA, 25 bp, Homo sapien
aggttgctggcaaaagccttgttct

SEQ ID NO: 1558376 - DNA, 25 bp, Homo sapien
gccacattcagggtcgggaggttgc

SEQ ID NO: 1558377 - DNA, 25 bp, Homo sapien
ccacattcagggtcgggaggttgct

SEQ ID NO: 1558378 - DNA, 25 bp, Homo sapien
aagcgtggggggcttcttcaggcca

SEQ ID NO: 1558379 - DNA, 25 bp, Homo sapien
cttgctgggctgaagcgtggggggc

SEQ ID NO: 1558380 - DNA, 25 bp, Homo sapien
aggcttccttgctgggctgaagcgt

SEQ ID NO: 1558381 - DNA, 25 bp, Homo sapien
tcaggccactcagtttgctctcata

SEQ ID NO: 1558382 - DNA, 25 bp, Homo sapien
gggagggcgccctggtagacatggt

SEQ ID NO: 1558383 - DNA, 25 bp, Homo sapien
ccctggtagacatggtagggcagga

SEQ ID NO: 1558384 - DNA, 25 bp, Homo sapien
cggagccctggtgtttgtgcaaatg

SEQ ID NO: 1558385 - DNA, 25 bp, Homo sapien
aggaggcgatgcagggcgtcctcaa

SEQ ID NO: 1558386 - DNA, 25 bp, Homo sapien
catggcctgggtgcgtttcagcagc

SEQ ID NO: 1558387 - DNA, 25 bp, Homo sapien
cgtggagaccgtctcaaactcctcg

SEQ ID NO: 1558388 - DNA, 25 bp, Homo sapien
gagcaggagccgatatttattgagc

SEQ ID NO: 1558389 - DNA, 25 bp, Homo sapien
tgcgtttcagcagctgcgtggagac

SEQ ID NO: 1558390 - DNA, 25 bp, Homo sapien
agctgtttatccaaggcaagggtgg

SEQ ID NO: 1558391 - DNA, 25 bp, Homo sapien
cgatcattaccatctccgctgaggg

SEQ ID NO: 1558392 - DNA, 25 bp, Homo sapien
aatgaacattcggtcgatcattacc

SEQ ID NO: 1558393 - DNA, 25 bp, Homo sapien
ctgtttatccaaggcaagggtggtc

SEQ ID NO: 1558394 - DNA, 25 bp, Homo sapien
caaaattaaggtccagagctcgacg

SEQ ID NO: 1558395 - DNA, 25 bp, Homo sapien
taaggtccagagctcgacgtaaaaa

SEQ ID NO: 1558396 - DNA, 25 bp, Homo sapien
ttcaaaattaaggtccagagctcga

SEQ ID NO: 1558397 - DNA, 25 bp, Homo sapien
agagctcgacgtaaaaagcctgcgc

SEQ ID NO: 1558398 - DNA, 25 bp, Homo sapien
gatgaccctcggaagaggctgcgat

SEQ ID NO: 1558399 - DNA, 25 bp, Homo sapien
gctgaagacgacagggggccgtggc

SEQ ID NO: 1558400 - DNA, 25 bp, Homo sapien
tgccggatcacaagcttggtgggca

SEQ ID NO: 1558401 - DNA, 25 bp, Homo sapien
ccgtggccgggaagccgatgaccct

SEQ ID NO: 1558402 - DNA, 25 bp, Homo sapien
ctcgtcggcgtccaaggaggaggcg

SEQ ID NO: 1558403 - DNA, 25 bp, Homo sapien
gaggaggacgcccgggcccaggtga

SEQ ID NO: 1558404 - DNA, 25 bp, Homo sapien
ggaggcggcagaggaggaggaggaa

SEQ ID NO: 1558405 - DNA, 25 bp, Homo sapien
gaggaggacagggaggaggacgccc

SEQ ID NO: 1558406 - DNA, 25 bp, Homo sapien
tcttgagcttgagcccgatgcggct

SEQ ID NO: 1558407 - DNA, 25 bp, Homo sapien
ctgagcccggcttcctgcttgatct

SEQ ID NO: 1558408 - DNA, 25 bp, Homo sapien
cggctccgggcctcgtaggtcttga

SEQ ID NO: 1558409 - DNA, 25 bp, Homo sapien
gttgtgcacgaccttgctgagcccg

SEQ ID NO: 1558410 - DNA, 25 bp, Homo sapien
tcatctggcccgtgggcggcggtgg

SEQ ID NO: 1558411 - DNA, 25 bp, Homo sapien
ctccccgtgccctgcctgcgggcgt

SEQ ID NO: 1558412 - DNA, 25 bp, Homo sapien
cacgttctcgcggtaggtcttgcgc

SEQ ID NO: 1558413 - DNA, 25 bp, Homo sapien
gtggtccaccgtgccgttcatctgg

SEQ ID NO: 1558414 - DNA, 25 bp, Homo sapien
tgtcgatggcgctctgcaggtgctc

SEQ ID NO: 1558415 - DNA, 25 bp, Homo sapien
tgctcggtgagcgtgtcatcctgcg

SEQ ID NO: 1558416 - DNA, 25 bp, Homo sapien
tcatcctgcgggctgtcgctggaga

SEQ ID NO: 1558417 - DNA, 25 bp, Homo sapien
tcagcatacgctggtacagctcgtc

SEQ ID NO: 1558418 - DNA, 25 bp, Homo sapien
tctggtcaacgtcctggcgccgagg

SEQ ID NO: 1558419 - DNA, 25 bp, Homo sapien
ttatctggtcaacgtcctggcgccg

SEQ ID NO: 1558420 - DNA, 25 bp, Homo sapien
tatctggtcaacgtcctggcgccga

SEQ ID NO: 1558421 - DNA, 25 bp, Homo sapien
atctggtcaacgtcctggcgccgag

SEQ ID NO: 1558422 - DNA, 25 bp, Homo sapien
ggaactgacacagcactttgcccct

SEQ ID NO: 1558423 - DNA, 25 bp, Homo sapien
gggtgggcgttcgaaatctctcact

SEQ ID NO: 1558424 - DNA, 25 bp, Homo sapien
tacagtactagttttgtctccgaga

SEQ ID NO: 1558425 - DNA, 25 bp, Homo sapien
gagcgttggcatcaacccggtggcc

SEQ ID NO: 1558426 - DNA, 25 bp, Homo sapien
ttggaaacagagtctcacactcttt

SEQ ID NO: 1558427 - DNA, 25 bp, Homo sapien
gaaacagagtctcacactctttccc

SEQ ID NO: 1558428 - DNA, 25 bp, Homo sapien
ggaccacaggtgcctaccaacaagc

SEQ ID NO: 1558429 - DNA, 25 bp, Homo sapien
gaccacaggtgcctaccaacaagcc

SEQ ID NO: 1558430 - DNA, 25 bp, Homo sapien
gttaatgttgttactgctaggagac

SEQ ID NO: 1558431 - DNA, 25 bp, Homo sapien
atgttgttactgctaggagacaggc

SEQ ID NO: 1558432 - DNA, 25 bp, Homo sapien
taatgttgttactgctaggagacag

SEQ ID NO: 1558433 - DNA, 25 bp, Homo sapien
gttgttactgctaggagacaggccc

SEQ ID NO: 1558434 - DNA, 25 bp, Homo sapien
ctgtgctcgcggtcccgtccggagc

SEQ ID NO: 1558435 - DNA, 25 bp, Homo sapien
tccggagccgtctgagccgggtggg

SEQ ID NO: 1558436 - DNA, 25 bp, Homo sapien
ccgcggagcggcctgtgctcgcggt

SEQ ID NO: 1558437 - DNA, 25 bp, Homo sapien
gggtcccgcgaggatccgaagcgcc

SEQ ID NO: 1558438 - DNA, 25 bp, Homo sapien
gctggcggctgcagcgggctgggca

SEQ ID NO: 1558439 - DNA, 25 bp, Homo sapien
tggcggctgcagcgggctgggcagg

SEQ ID NO: 1558440 - DNA, 25 bp, Homo sapien
gcgctggcggctgcagcgggctggg

SEQ ID NO: 1558441 - DNA, 25 bp, Homo sapien
cgacggggcgcgctggcggctgcag

SEQ ID NO: 1558442 - DNA, 25 bp, Homo sapien
gggttcacggagagacgtgcagatg

SEQ ID NO: 1558443 - DNA, 25 bp, Homo sapien
gttcacggagagacgtgcagatgga

SEQ ID NO: 1558444 - DNA, 25 bp, Homo sapien
cggggttcacggagagacgtgcaga

SEQ ID NO: 1558445 - DNA, 25 bp, Homo sapien
tcacggggttcacggagagacgtgc

SEQ ID NO: 1558446 - DNA, 25 bp, Homo sapien
ctccttgagggccgaggtcaccgtg

SEQ ID NO: 1558447 - DNA, 25 bp, Homo sapien
gccgaggtcaccgtgcggatggcct

SEQ ID NO: 1558448 - DNA, 25 bp, Homo sapien
tgagggccgaggtcaccgtgcggat

SEQ ID NO: 1558449 - DNA, 25 bp, Homo sapien
tccttgagggccgaggtcaccgtgc

SEQ ID NO: 1558450 - DNA, 25 bp, Homo sapien
tgccgtcgaagtctgcgtcctccag

SEQ ID NO: 1558451 - DNA, 25 bp, Homo sapien
tggaaggccccaaagcggtagtgct

SEQ ID NO: 1558452 - DNA, 25 bp, Homo sapien
catgacggccacaaagcagtcggtg

SEQ ID NO: 1558453 - DNA, 25 bp, Homo sapien
gtgccctcagtgtccccgtgcatga

SEQ ID NO: 1558454 - DNA, 25 bp, Homo sapien
tacccggggtgtcgatgatgctgat

SEQ ID NO: 1558455 - DNA, 25 bp, Homo sapien
gacctgattagggagctgggcacac

SEQ ID NO: 1558456 - DNA, 25 bp, Homo sapien
tctctgcttggcacccgacaggata

SEQ ID NO: 1558457 - DNA, 25 bp, Homo sapien
gctgatgctctccaggacctgatta

SEQ ID NO: 1558458 - DNA, 25 bp, Homo sapien
tctcagtagtatcccattctcttgc

SEQ ID NO: 1558459 - DNA, 25 bp, Homo sapien
cattctcagtagtatcccattctct

SEQ ID NO: 1558460 - DNA, 25 bp, Homo sapien
agacaggggcgcaaggggcagaaat

SEQ ID NO: 1558461 - DNA, 25 bp, Homo sapien
cagccattctcagtagtatcccatt

SEQ ID NO: 1558462 - DNA, 25 bp, Homo sapien
gcgctccgcgaaccagcgcagcacg

SEQ ID NO: 1558463 - DNA, 25 bp, Homo sapien
ctccgcgaaccagcgcagcacggcc

SEQ ID NO: 1558464 - DNA, 25 bp, Homo sapien
cgaaccagcgcagcacggccgggaa

SEQ ID NO: 1558465 - DNA, 25 bp, Homo sapien
accagcgcagcacggccgggaagtc

SEQ ID NO: 1558466 - DNA, 25 bp, Homo sapien
caaagagcaggatgatgaggtccac

SEQ ID NO: 1558467 - DNA, 25 bp, Homo sapien
cttgtgcgcatcaaagagcaggatg

SEQ ID NO: 1558468 - DNA, 25 bp, Homo sapien
atcaaagagcaggatgatgaggtcc

SEQ ID NO: 1558469 - DNA, 25 bp, Homo sapien
gcatcaaagagcaggatgatgaggt

SEQ ID NO: 1558470 - DNA, 25 bp, Homo sapien
atgtcggccttgttgagcaccacgc

SEQ ID NO: 1558471 - DNA, 25 bp, Homo sapien
tctgagaactcgtccgagatctcca

SEQ ID NO: 1558472 - DNA, 25 bp, Homo sapien
gcgtctccaccatgtcggccttgtt

SEQ ID NO: 1558473 - DNA, 25 bp, Homo sapien
gcaacgcgccgatggcctctgagaa

SEQ ID NO: 1558474 - DNA, 25 bp, Homo sapien
ttgagcttgcgcaaggctgcgtgcc

SEQ ID NO: 1558475 - DNA, 25 bp, Homo sapien
ccctggatgtcgcggaagaggtcct

SEQ ID NO: 1558476 - DNA, 25 bp, Homo sapien
cgggccctcttcaccaggtcgttga

SEQ ID NO: 1558477 - DNA, 25 bp, Homo sapien
tgagcgcgccgtagacgcgcatcag

SEQ ID NO: 1558478 - DNA, 25 bp, Homo sapien
cctcctccaagaatgcgcgcccagc

SEQ ID NO: 1558479 - DNA, 25 bp, Homo sapien
tcctccaagaatgcgcgcccagccc

SEQ ID NO: 1558480 - DNA, 25 bp, Homo sapien
aagaatgcgcgcccagccctcagga

SEQ ID NO: 1558481 - DNA, 25 bp, Homo sapien
ctccaagaatgcgcgcccagccctc

SEQ ID NO: 1558482 - DNA, 25 bp, Homo sapien
ctccctccgaaggaggattcctggg

SEQ ID NO: 1558483 - DNA, 25 bp, Homo sapien
acccactctcgctgctccttaaacc

SEQ ID NO: 1558484 - DNA, 25 bp, Homo sapien
ctctgactcacccactctcgctgct

SEQ ID NO: 1558485 - DNA, 25 bp, Homo sapien
ctggtccacagtgggccgctccctc

SEQ ID NO: 1558486 - DNA, 25 bp, Homo sapien
taccacatgcgatcggcaactgctg

SEQ ID NO: 1558487 - DNA, 25 bp, Homo sapien
gatcttggccttacgtatcacagca

SEQ ID NO: 1558488 - DNA, 25 bp, Homo sapien
gaatcagaccctcccaagatcttgg

SEQ ID NO: 1558489 - DNA, 25 bp, Homo sapien
caaaggacttagagccagaggattc

SEQ ID NO: 1558490 - DNA, 25 bp, Homo sapien
cccagctactcggaaagctgaggca

SEQ ID NO: 1558491 - DNA, 25 bp, Homo sapien
caggtgtggtggcacctgcctggag

SEQ ID NO: 1558492 - DNA, 25 bp, Homo sapien
tcactttaacctgggaggcagaggt

SEQ ID NO: 1558493 - DNA, 25 bp, Homo sapien
tactcggaaagctgaggcacaagaa

SEQ ID NO: 1558494 - DNA, 25 bp, Homo sapien
tattttataggaagctcacaaatta

SEQ ID NO: 1558495 - DNA, 25 bp, Homo sapien
attttataggaagctcacaaattaa

SEQ ID NO: 1558496 - DNA, 25 bp, Homo sapien
ttttataggaagctcacaaattaaa

SEQ ID NO: 1558497 - DNA, 25 bp, Homo sapien
tatattttataggaagctcacaaat

SEQ ID NO: 1558498 - DNA, 25 bp, Homo sapien
gctgaatcttcgcaaagatgacggg

SEQ ID NO: 1558499 - DNA, 25 bp, Homo sapien
tgatgttccagctgaatcttcgcaa

SEQ ID NO: 1558500 - DNA, 25 bp, Homo sapien
tcttcgcaaagatgacgggcagttt

SEQ ID NO: 1558501 - DNA, 25 bp, Homo sapien
atgacgggcagtttgaggatcagct

SEQ ID NO: 1558502 - DNA, 25 bp, Homo sapien
tgtcgtgcgtcagcatctcgtccag

SEQ ID NO: 1558503 - DNA, 25 bp, Homo sapien
tcggcttcagcgagtgaaacttggt

SEQ ID NO: 1558504 - DNA, 25 bp, Homo sapien
gtgcctctagcagcttcggcttcag

SEQ ID NO: 1558505 - DNA, 25 bp, Homo sapien
gaaacttggtgaagtcgtgcgccat

SEQ ID NO: 1558506 - DNA, 25 bp, Homo sapien
aaacgggcccatgtgggtgccctca

SEQ ID NO: 1558507 - DNA, 25 bp, Homo sapien
ggcccatgtgggtgccctcaaaagc

SEQ ID NO: 1558508 - DNA, 25 bp, Homo sapien
atgtgggtgccctcaaaagcgcccc

SEQ ID NO: 1558509 - DNA, 25 bp, Homo sapien
cccatgtgggtgccctcaaaagcgc

SEQ ID NO: 1558510 - DNA, 25 bp, Homo sapien
ctcggcctcgtcgtccgagccctcc

SEQ ID NO: 1558511 - DNA, 25 bp, Homo sapien
tcggcctcgtcgtccgagccctcct

SEQ ID NO: 1558512 - DNA, 25 bp, Homo sapien
tggcgtcgcttggagggtggcacca

SEQ ID NO: 1558513 - DNA, 25 bp, Homo sapien
tccagcttggcctcgatgaggtggc

SEQ ID NO: 1558514 - DNA, 25 bp, Homo sapien
tggagccgctcagcttgccgtcggc

SEQ ID NO: 1558515 - DNA, 25 bp, Homo sapien
gaagatctcgtcgtatttggacttg

SEQ ID NO: 1558516 - DNA, 25 bp, Homo sapien
ggcaggcagggcgtgtgtgagccgg

SEQ ID NO: 1558517 - DNA, 25 bp, Homo sapien
gtgcgtgcagccgactggagctggg

SEQ ID NO: 1558518 - DNA, 25 bp, Homo sapien
gagcaggggtgtgcgtgcagccgac

SEQ ID NO: 1558519 - DNA, 25 bp, Homo sapien
cagggcgtgtgtgagccggagcagg

SEQ ID NO: 1558520 - DNA, 25 bp, Homo sapien
caccttccatgagggcagatgtatt

SEQ ID NO: 1558521 - DNA, 25 bp, Homo sapien
tgtgatgtgcctaagtgaacgtgag

SEQ ID NO: 1558522 - DNA, 25 bp, Homo sapien
ttgttctctatggtaatgcccagtg

SEQ ID NO: 1558523 - DNA, 25 bp, Homo sapien
aagggcggacagagaagccttgtcc

SEQ ID NO: 1558524 - DNA, 25 bp, Homo sapien
gaggatgtgatggagccggttgagg

SEQ ID NO: 1558525 - DNA, 25 bp, Homo sapien
gatggagccggttgagggtgttgcc

SEQ ID NO: 1558526 - DNA, 25 bp, Homo sapien
catggtcccgagacctgaggatgtg

SEQ ID NO: 1558527 - DNA, 25 bp, Homo sapien
ggtctgtttatctgctagtcatttc

SEQ ID NO: 1558528 - DNA, 25 bp, Homo sapien
taaatatggaatggtggtaggcaga

SEQ ID NO: 1558529 - DNA, 25 bp, Homo sapien
gcttttctgcctgctacgggatcct

SEQ ID NO: 1558530 - DNA, 25 bp, Homo sapien
ggcggtggcccagcaatccttaagt

SEQ ID NO: 1558531 - DNA, 25 bp, Homo sapien
tccttaagtccagattaccagctgt

SEQ ID NO: 1558532 - DNA, 25 bp, Homo sapien
ctgccagggtcaagcactaatatgt

SEQ ID NO: 1558533 - DNA, 25 bp, Homo sapien
tgtggtgaaggcagcaaacagcgtc

SEQ ID NO: 1558534 - DNA, 25 bp, Homo sapien
caagcactaatatgtggtgaaggca

SEQ ID NO: 1558535 - DNA, 25 bp, Homo sapien
aaggcagcaaacagcgtcggcgtcc

SEQ ID NO: 1558536 - DNA, 25 bp, Homo sapien
gcatcctggagggtgcgtcgtctcc

SEQ ID NO: 1558537 - DNA, 25 bp, Homo sapien
agggtgcgtcgtctccatgtatttt

SEQ ID NO: 1558538 - DNA, 25 bp, Homo sapien
cgtgggaatcccagcgagcatcctg

SEQ ID NO: 1558539 - DNA, 25 bp, Homo sapien
gaatcccagcgagcatcctggaggg

SEQ ID NO: 1558540 - DNA, 25 bp, Homo sapien
aagaagccttggctttattcgctct

SEQ ID NO: 1558541 - DNA, 25 bp, Homo sapien
ctgtggggacactgttccgttcaga

SEQ ID NO: 1558542 - DNA, 25 bp, Homo sapien
gccttggctttattcgctctgtggg

SEQ ID NO: 1558543 - DNA, 25 bp, Homo sapien
gaagccttggctttattcgctctgt

SEQ ID NO: 1558544 - DNA, 25 bp, Homo sapien
tagaaagtcagaaccgtcagtggca

SEQ ID NO: 1558545 - DNA, 25 bp, Homo sapien
gcttaaggctgcgtctggcatctga

SEQ ID NO: 1558546 - DNA, 25 bp, Homo sapien
tttaggaccctagaagtgcagactc

SEQ ID NO: 1558547 - DNA, 25 bp, Homo sapien
gaatcattcatcttgagcgggctac

SEQ ID NO: 1558548 - DNA, 25 bp, Homo sapien
atcgcttttcgagctgcgcttccca

SEQ ID NO: 1558549 - DNA, 25 bp, Homo sapien
caggaaaccagaatcggcatcgctt

SEQ ID NO: 1558550 - DNA, 25 bp, Homo sapien
ctcagcgctgggtccaccgaagtgg

SEQ ID NO: 1558551 - DNA, 25 bp, Homo sapien
tgggtccaccgaagtgggccgcagc

SEQ ID NO: 1558552 - DNA, 25 bp, Homo sapien
cttcttatttcttgggcctcgccgc

SEQ ID NO: 1558553 - DNA, 25 bp, Homo sapien
cctgtagccgcacgtcttccaggaa

SEQ ID NO: 1558554 - DNA, 25 bp, Homo sapien
tagccgcacgtcttccaggaactgg

SEQ ID NO: 1558555 - DNA, 25 bp, Homo sapien
gtagccgcacgtcttccaggaactg

SEQ ID NO: 1558556 - DNA, 25 bp, Homo sapien
ctggactacagagaaagactccgtc

SEQ ID NO: 1558557 - DNA, 25 bp, Homo sapien
aaaagaaaaatagccgagcgtggtg

SEQ ID NO: 1558558 - DNA, 25 bp, Homo sapien
tgtaatcttagcaccttagggggcc

SEQ ID NO: 1558559 - DNA, 25 bp, Homo sapien
aagaaaagaaaaatagccgagcgtg

SEQ ID NO: 1558560 - DNA, 25 bp, Homo sapien
cttggagccagtgtccacgaagaag

SEQ ID NO: 1558561 - DNA, 25 bp, Homo sapien
gagccagtgtccacgaagaagagtt

SEQ ID NO: 1558562 - DNA, 25 bp, Homo sapien
atttggggcctctgacaacaagcca

SEQ ID NO: 1558563 - DNA, 25 bp, Homo sapien
gagtttttcatttggggcctctgac

SEQ ID NO: 1558564 - DNA, 25 bp, Homo sapien
cttgagaagcagtgacttcttctgg

SEQ ID NO: 1558565 - DNA, 25 bp, Homo sapien
gcagtgacttcttctggactttggt

SEQ ID NO: 1558566 - DNA, 25 bp, Homo sapien
agcagtgacttcttctggactttgg

SEQ ID NO: 1558567 - DNA, 25 bp, Homo sapien
agaagcagtgacttcttctggactt

SEQ ID NO: 1558568 - DNA, 25 bp, Homo sapien
tctcgaggatgaggtcaacccgaag

SEQ ID NO: 1558569 - DNA, 25 bp, Homo sapien
ctcgaggatgaggtcaacccgaagg

SEQ ID NO: 1558570 - DNA, 25 bp, Homo sapien
cccttgttgcagaagggttgaggag

SEQ ID NO: 1558571 - DNA, 25 bp, Homo sapien
cccagaggtcgtagaagggccgctc

SEQ ID NO: 1558572 - DNA, 25 bp, Homo sapien
gcccgggcttggcccttgttgcaga

SEQ ID NO: 1558573 - DNA, 25 bp, Homo sapien
agaagggccgctctacggtgtcctg

SEQ ID NO: 1558574 - DNA, 25 bp, Homo sapien
gtcaccaaagcacccacaaagcact

SEQ ID NO: 1558575 - DNA, 25 bp, Homo sapien
aaagcactccctttcacactgtact

SEQ ID NO: 1558576 - DNA, 25 bp, Homo sapien
tactctcgtgcagtgcacaacacac

SEQ ID NO: 1558577 - DNA, 25 bp, Homo sapien
acatggccgtcctgtccccattcat

SEQ ID NO: 1558578 - DNA, 25 bp, Homo sapien
tggccaaccaacggcctgtccaggg

SEQ ID NO: 1558579 - DNA, 25 bp, Homo sapien
cctggccaaccaacggcctgtccag

SEQ ID NO: 1558580 - DNA, 25 bp, Homo sapien
ctggccaaccaacggcctgtccagg

SEQ ID NO: 1558581 - DNA, 25 bp, Homo sapien
tcctggccaaccaacggcctgtcca

SEQ ID NO: 1558582 - DNA, 25 bp, Homo sapien
acggcttggtgtgcaggcgtgctgg

SEQ ID NO: 1558583 - DNA, 25 bp, Homo sapien
ggacggcttggtgtgcaggcgtgct

SEQ ID NO: 1558584 - DNA, 25 bp, Homo sapien
gcttggtgtgcaggcgtgctggccg

SEQ ID NO: 1558585 - DNA, 25 bp, Homo sapien
ctgggacggcttggtgtgcaggcgt

SEQ ID NO: 1558586 - DNA, 25 bp, Homo sapien
ggtcttcaaaggatggattgtagga

SEQ ID NO: 1558587 - DNA, 25 bp, Homo sapien
gtggtcttcaaaggatggattgtag

SEQ ID NO: 1558588 - DNA, 25 bp, Homo sapien
aaaggatggattgtaggaagctccg

SEQ ID NO: 1558589 - DNA, 25 bp, Homo sapien
cttcaaaggatggattgtaggaagc

SEQ ID NO: 1558590 - DNA, 25 bp, Homo sapien
tgggaacaggtctcttgcactggac

SEQ ID NO: 1558591 - DNA, 25 bp, Homo sapien
gaccacacgagacagggaattgcgg

SEQ ID NO: 1558592 - DNA, 25 bp, Homo sapien
tagactttcccatcgctgagctagc

SEQ ID NO: 1558593 - DNA, 25 bp, Homo sapien
cagatgcccgctaaatgcacagtgg

SEQ ID NO: 1558594 - DNA, 25 bp, Homo sapien
aactccacctcgtgggccgctgaga

SEQ ID NO: 1558595 - DNA, 25 bp, Homo sapien
gcaactccacctcgtgggccgctga

SEQ ID NO: 1558596 - DNA, 25 bp, Homo sapien
actccacctcgtgggccgctgagag

SEQ ID NO: 1558597 - DNA, 25 bp, Homo sapien
tgcaactccacctcgtgggccgctg

SEQ ID NO: 1558598 - DNA, 25 bp, Homo sapien
ggaggcggggtgcagtgtcaggggt

SEQ ID NO: 1558599 - DNA, 25 bp, Homo sapien
agcagcccctcgcacagctcctgga

SEQ ID NO: 1558600 - DNA, 25 bp, Homo sapien
cagcccctcgcacagctcctggaat

SEQ ID NO: 1558601 - DNA, 25 bp, Homo sapien
agcccctcgcacagctcctggaatg

SEQ ID NO: 1558602 - DNA, 25 bp, Homo sapien
gcccctcgcacagctcctggaatgt

SEQ ID NO: 1558603 - DNA, 25 bp, Homo sapien
cctccggcccctcgccctggcctgg

SEQ ID NO: 1558604 - DNA, 25 bp, Homo sapien
gcctccggcccctcgccctggcctg

SEQ ID NO: 1558605 - DNA, 25 bp, Homo sapien
gccgccgctgctgctccgtcttctt

SEQ ID NO: 1558606 - DNA, 25 bp, Homo sapien
acagctcctggtgccggagccgggc

SEQ ID NO: 1558607 - DNA, 25 bp, Homo sapien
ctctgccgccgcgccagctccgcca

SEQ ID NO: 1558608 - DNA, 25 bp, Homo sapien
cgcgccagctccgccagcctcaggg

SEQ ID NO: 1558609 - DNA, 25 bp, Homo sapien
ccgccgcgccagctccgccagcctc

SEQ ID NO: 1558610 - DNA, 25 bp, Homo sapien
gccgcgccagctccgccagcctcag

SEQ ID NO: 1558611 - DNA, 25 bp, Homo sapien
ttgagccgccccagccttcggggct

SEQ ID NO: 1558612 - DNA, 25 bp, Homo sapien
gcctctgagaatgtggggttttgtg

SEQ ID NO: 1558613 - DNA, 25 bp, Homo sapien
tgggggaagaggtggtctcccgatg

SEQ ID NO: 1558614 - DNA, 25 bp, Homo sapien
gaagaaggggcctctgagaatgtgg

SEQ ID NO: 1558615 - DNA, 25 bp, Homo sapien
tgtgggggaagaggtggtctcccga

SEQ ID NO: 1558616 - DNA, 25 bp, Homo sapien
gcccaggacacccagtccaaagccc

SEQ ID NO: 1558617 - DNA, 25 bp, Homo sapien
gggcccaggacacccagtccaaagc

SEQ ID NO: 1558618 - DNA, 25 bp, Homo sapien
cgcggggcccaggacacccagtcca

SEQ ID NO: 1558619 - DNA, 25 bp, Homo sapien
caggacacccagtccaaagccccct

SEQ ID NO: 1558620 - DNA, 25 bp, Homo sapien
aacagggcgggtgttcagaaatatc

SEQ ID NO: 1558621 - DNA, 25 bp, Homo sapien
gaacagggcgggtgttcagaaatat

SEQ ID NO: 1558622 - DNA, 25 bp, Homo sapien
ctgcagaacagggcgggtgttcaga

SEQ ID NO: 1558623 - DNA, 25 bp, Homo sapien
cagaacagggcgggtgttcagaaat

SEQ ID NO: 1558624 - DNA, 25 bp, Homo sapien
tcagctgcacgtcgatgtcaggtgc

SEQ ID NO: 1558625 - DNA, 25 bp, Homo sapien
ctcagctgcacgtcgatgtcaggtg

SEQ ID NO: 1558626 - DNA, 25 bp, Homo sapien
gctcagctgcacgtcgatgtcaggt

SEQ ID NO: 1558627 - DNA, 25 bp, Homo sapien
agcaaggatggtgtcatcactgggc

SEQ ID NO: 1558628 - DNA, 25 bp, Homo sapien
gctccacggcaggacacagtgagca

SEQ ID NO: 1558629 - DNA, 25 bp, Homo sapien
catggtgtcgcccatagcccctggg

SEQ ID NO: 1558630 - DNA, 25 bp, Homo sapien
gggcagccatggtgtcgcccatagc

SEQ ID NO: 1558631 - DNA, 25 bp, Homo sapien
tgggatctcatcccagcatcccgtg

SEQ ID NO: 1558632 - DNA, 25 bp, Homo sapien
tcatcccagcatcccgtgccctcag

SEQ ID NO: 1558633 - DNA, 25 bp, Homo sapien
atctcatcccagcatcccgtgccct

SEQ ID NO: 1558634 - DNA, 25 bp, Homo sapien
ggatctcatcccagcatcccgtgcc

SEQ ID NO: 1558635 - DNA, 25 bp, Homo sapien
agaaggcacagtccgctcatgagca

SEQ ID NO: 1558636 - DNA, 25 bp, Homo sapien
ctcatgagcacaactggctggagcc

SEQ ID NO: 1558637 - DNA, 25 bp, Homo sapien
gtcctaaaggtgaccgggactgcaa

SEQ ID NO: 1558638 - DNA, 25 bp, Homo sapien
tgggatgacagccaccaacctatgg

SEQ ID NO: 1558639 - DNA, 25 bp, Homo sapien
cgaggctcgatcatattcctcctct

SEQ ID NO: 1558640 - DNA, 25 bp, Homo sapien
ttggctctctctcgaggctcgatca

SEQ ID NO: 1558641 - DNA, 25 bp, Homo sapien
tggaagctcttgaaccggtctcgaa

SEQ ID NO: 1558642 - DNA, 25 bp, Homo sapien
cggtctcgaaggatgttgccctcgg

SEQ ID NO: 1558643 - DNA, 25 bp, Homo sapien
cagcttcaccttgtacttgcgtttg

SEQ ID NO: 1558644 - DNA, 25 bp, Homo sapien
agcttcaccttgtacttgcgtttga

SEQ ID NO: 1558645 - DNA, 25 bp, Homo sapien
cttcaccttgtacttgcgtttgaac

SEQ ID NO: 1558646 - DNA, 25 bp, Homo sapien
accagcttcaccttgtacttgcgtt

SEQ ID NO: 1558647 - DNA, 25 bp, Homo sapien
agaagagattttttattgaagggcg

SEQ ID NO: 1558648 - DNA, 25 bp, Homo sapien
gaagagattttttattgaagggcga

SEQ ID NO: 1558649 - DNA, 25 bp, Homo sapien
tagaagagattttttattgaagggc

SEQ ID NO: 1558650 - DNA, 25 bp, Homo sapien
ctagaagagattttttattgaaggg

SEQ ID NO: 1558651 - DNA, 25 bp, Homo sapien
ggacacgcagagtctgcacccggga

SEQ ID NO: 1558652 - DNA, 25 bp, Homo sapien
gctctggcggtgagttctggcacct

SEQ ID NO: 1558653 - DNA, 25 bp, Homo sapien
cctacatgcttgtgcgccacggggg

SEQ ID NO: 1558654 - DNA, 25 bp, Homo sapien
cagccgcccgcaggaggcacacaag

SEQ ID NO: 1558655 - DNA, 25 bp, Homo sapien
tcaaaataggcacagaagggaggaa

SEQ ID NO: 1558656 - DNA, 25 bp, Homo sapien
gaatccacctgcttaaacccgatag

SEQ ID NO: 1558657 - DNA, 25 bp, Homo sapien
gctgcatcccaccataactggcgaa

SEQ ID NO: 1558658 - DNA, 25 bp, Homo sapien
taagtacagccctcattggttaggc

SEQ ID NO: 1558659 - DNA, 25 bp, Homo sapien
agaaaccagtgggattttgccatgg

SEQ ID NO: 1558660 - DNA, 25 bp, Homo sapien
gctgaaaggcagtagattttggctc

SEQ ID NO: 1558661 - DNA, 25 bp, Homo sapien
tgtacttttaggcttctgacataaa

SEQ ID NO: 1558662 - DNA, 25 bp, Homo sapien
cataaaattcggatgtgaaatgtca

SEQ ID NO: 1558663 - DNA, 25 bp, Homo sapien
gagaagggtgcaattcaggctgact

SEQ ID NO: 1558664 - DNA, 25 bp, Homo sapien
gcccaaggctgatgtgccaacaaga

SEQ ID NO: 1558665 - DNA, 25 bp, Homo sapien
tcaaggtttggatggactcccgcca

SEQ ID NO: 1558666 - DNA, 25 bp, Homo sapien
tgggaataatcggactgagaagact

SEQ ID NO: 1558667 - DNA, 25 bp, Homo sapien
taaaaccacaaggcgaggctgaggc

SEQ ID NO: 1558668 - DNA, 25 bp, Homo sapien
aatgaatacaatttcgaacattatt

SEQ ID NO: 1558669 - DNA, 25 bp, Homo sapien
gaatacaatttcgaacattattcat

SEQ ID NO: 1558670 - DNA, 25 bp, Homo sapien
atacaatttcgaacattattcattt

SEQ ID NO: 1558671 - DNA, 25 bp, Homo sapien
tcttcctcatggccctcgtcacctc

SEQ ID NO: 1558672 - DNA, 25 bp, Homo sapien
gtgacctcccctgacatcctattta

SEQ ID NO: 1558673 - DNA, 25 bp, Homo sapien
tgtatcttaccaataatgattttgg

SEQ ID NO: 1558674 - DNA, 25 bp, Homo sapien
ctggagtgctggacaacaaggctgg

SEQ ID NO: 1558675 - DNA, 25 bp, Homo sapien
cacctggacgcgctaggtctgcgcg

SEQ ID NO: 1558676 - DNA, 25 bp, Homo sapien
aaaggatggagcctcggcttcccct

SEQ ID NO: 1558677 - DNA, 25 bp, Homo sapien
ctggcgccaaccaatgccagggagg

SEQ ID NO: 1558678 - DNA, 25 bp, Homo sapien
gcgccaaggcggaggataaggaacc

SEQ ID NO: 1558679 - DNA, 25 bp, Homo sapien
caataaacgactcggacggcgagag

SEQ ID NO: 1558680 - DNA, 25 bp, Homo sapien
taaacgactcggacggcgagagcca

SEQ ID NO: 1558681 - DNA, 25 bp, Homo sapien
aaacgactcggacggcgagagccat

SEQ ID NO: 1558682 - DNA, 25 bp, Homo sapien
ataaacgactcggacggcgagagcc

SEQ ID NO: 1558683 - DNA, 25 bp, Homo sapien
cggctccgagaatcgggtcccggcg

SEQ ID NO: 1558684 - DNA, 25 bp, Homo sapien
cttttcccatacaagggctcccatg

SEQ ID NO: 1558685 - DNA, 25 bp, Homo sapien
ccttttcccatacaagggctcccat

SEQ ID NO: 1558686 - DNA, 25 bp, Homo sapien
cgtgatcaacggcacctggcctaaa

SEQ ID NO: 1558687 - DNA, 25 bp, Homo sapien
tgagacattctcgaaccttctgggc

SEQ ID NO: 1558688 - DNA, 25 bp, Homo sapien
tgttcggtattgacacagagcctcc

SEQ ID NO: 1558689 - DNA, 25 bp, Homo sapien
tttataacccgagatgcccagcgtg

SEQ ID NO: 1558690 - DNA, 25 bp, Homo sapien
ttccgccttccgggctccagtgatc

SEQ ID NO: 1558691 - DNA, 25 bp, Homo sapien
gtaacatagaactaaaattcctctc

SEQ ID NO: 1558692 - DNA, 25 bp, Homo sapien
aacttccgccttccgggctccagtg

SEQ ID NO: 1558693 - DNA, 25 bp, Homo sapien
ctgtaacatagaactaaaattcctc

SEQ ID NO: 1558694 - DNA, 25 bp, Homo sapien
cctggtaggcgtctcaaaatgtcac

SEQ ID NO: 1558695 - DNA, 25 bp, Homo sapien
gagacgttggaaagctgccgacaaa

SEQ ID NO: 1558696 - DNA, 25 bp, Homo sapien
gtccccagggtgaaatacaggctca

SEQ ID NO: 1558697 - DNA, 25 bp, Homo sapien
cacagcaggctatttcgggactgga

SEQ ID NO: 1558698 - DNA, 25 bp, Homo sapien
cttggacttgtagcctcaagcgcca

SEQ ID NO: 1558699 - DNA, 25 bp, Homo sapien
gaaaacgcggtgagaggtcacagca

SEQ ID NO: 1558700 - DNA, 25 bp, Homo sapien
tgaaaacgcggtgagaggtcacagc

SEQ ID NO: 1558701 - DNA, 25 bp, Homo sapien
aaaacgcggtgagaggtcacagcag

SEQ ID NO: 1558702 - DNA, 25 bp, Homo sapien
aaacgcggtgagaggtcacagcagg

SEQ ID NO: 1558703 - DNA, 25 bp, Homo sapien
gtccaggcggccggggaactcatct

SEQ ID NO: 1558704 - DNA, 25 bp, Homo sapien
atgtccaggcggccggggaactcat

SEQ ID NO: 1558705 - DNA, 25 bp, Homo sapien
ccaggcggccggggaactcatcttc

SEQ ID NO: 1558706 - DNA, 25 bp, Homo sapien
tccaggcggccggggaactcatctt

SEQ ID NO: 1558707 - DNA, 25 bp, Homo sapien
aggcctaacggaccgacacagtggc

SEQ ID NO: 1558708 - DNA, 25 bp, Homo sapien
gtgccatccaggcctaacggaccga

SEQ ID NO: 1558709 - DNA, 25 bp, Homo sapien
atccaggcctaacggaccgacacag

SEQ ID NO: 1558710 - DNA, 25 bp, Homo sapien
taacggaccgacacagtggctgtgc

SEQ ID NO: 1558711 - DNA, 25 bp, Homo sapien
aacttcccggctaccatcacttcaa

SEQ ID NO: 1558712 - DNA, 25 bp, Homo sapien
tcccggctaccatcacttcaaagaa

SEQ ID NO: 1558713 - DNA, 25 bp, Homo sapien
ttcccggctaccatcacttcaaaga

SEQ ID NO: 1558714 - DNA, 25 bp, Homo sapien
tcaacttcccggctaccatcacttc

SEQ ID NO: 1558715 - DNA, 25 bp, Homo sapien
caacttcagaaacttgctttctgtg

SEQ ID NO: 1558716 - DNA, 25 bp, Homo sapien
gaaacttgctttctgtgtccacgta

SEQ ID NO: 1558717 - DNA, 25 bp, Homo sapien
aacttgctttctgtgtccacgtagc

SEQ ID NO: 1558718 - DNA, 25 bp, Homo sapien
tcagaaacttgctttctgtgtccac

SEQ ID NO: 1558719 - DNA, 25 bp, Homo sapien
ttagccctgagccaaggcggctttg

SEQ ID NO: 1558720 - DNA, 25 bp, Homo sapien
ccaaggcggctttgatggcggccac

SEQ ID NO: 1558721 - DNA, 25 bp, Homo sapien
agccaaggcggctttgatggcggcc

SEQ ID NO: 1558722 - DNA, 25 bp, Homo sapien
gccctgagccaaggcggctttgatg

SEQ ID NO: 1558723 - DNA, 25 bp, Homo sapien
aacttggccggacgctgtcacatga

SEQ ID NO: 1558724 - DNA, 25 bp, Homo sapien
gacaaagacctagagttccggattc

SEQ ID NO: 1558725 - DNA, 25 bp, Homo sapien
cacatgacctgctgggttgggaact

SEQ ID NO: 1558726 - DNA, 25 bp, Homo sapien
aactaattctcaggttcagagcccg

SEQ ID NO: 1558727 - DNA, 25 bp, Homo sapien
tttcagtccttcctatcatgaagcg

SEQ ID NO: 1558728 - DNA, 25 bp, Homo sapien
tatcatgaagcgtctgctgagaggg

SEQ ID NO: 1558729 - DNA, 25 bp, Homo sapien
agaccgggggcgtcaatctctgccc

SEQ ID NO: 1558730 - DNA, 25 bp, Homo sapien
cagcagccacgagaacatcagggaa

SEQ ID NO: 1558731 - DNA, 25 bp, Homo sapien
ctgaggcgggatgtccccccaaact

SEQ ID NO: 1558732 - DNA, 25 bp, Homo sapien
ggcttccccttgagaaggatgcctg

SEQ ID NO: 1558733 - DNA, 25 bp, Homo sapien
tgcaaacgttgccacaatcagaaac

SEQ ID NO: 1558734 - DNA, 25 bp, Homo sapien
gacatggggtatgcaaagagatatg

SEQ ID NO: 1558735 - DNA, 25 bp, Homo sapien
caatatttattgaatcgtgaacggt

SEQ ID NO: 1558736 - DNA, 25 bp, Homo sapien
tagaaaggaattcacggtgtctccc

SEQ ID NO: 1558737 - DNA, 25 bp, Homo sapien
agtgattcctggtcttccgcggtga

SEQ ID NO: 1558738 - DNA, 25 bp, Homo sapien
tgattacgccaaaatccgatgctgg

SEQ ID NO: 1558739 - DNA, 25 bp, Homo sapien
cacatgctgtcgctgttagaaagga

SEQ ID NO: 1558740 - DNA, 25 bp, Homo sapien
tattggtggatgatgtcaaaaccct

SEQ ID NO: 1558741 - DNA, 25 bp, Homo sapien
aatcctcttagagcccggtgaggcg

SEQ ID NO: 1558742 - DNA, 25 bp, Homo sapien
aaaacccttctcaagcccgtgctgg

SEQ ID NO: 1558743 - DNA, 25 bp, Homo sapien
aatctcagccgggtcacagaagagt

SEQ ID NO: 1558744 - DNA, 25 bp, Homo sapien
agctgtcctatgtgctctaatatcc

SEQ ID NO: 1558745 - DNA, 25 bp, Homo sapien
gtcctttgaggttggcagcctgtaa

SEQ ID NO: 1558746 - DNA, 25 bp, Homo sapien
cagcagctgtcctatgtgctctaat

SEQ ID NO: 1558747 - DNA, 25 bp, Homo sapien
tacaaaaggtcctttgaggttggca

SEQ ID NO: 1558748 - DNA, 25 bp, Homo sapien
agacacatcaggacgagaaaaggca

SEQ ID NO: 1558749 - DNA, 25 bp, Homo sapien
tgactctaggaatttggccattgcc

SEQ ID NO: 1558750 - DNA, 25 bp, Homo sapien
caaccctgaagacacatcaggacga

SEQ ID NO: 1558751 - DNA, 25 bp, Homo sapien
ctgactctaggaatttggccattgc

SEQ ID NO: 1558752 - DNA, 25 bp, Homo sapien
cctcagcagagcagaattagatccg

SEQ ID NO: 1558753 - DNA, 25 bp, Homo sapien
tcagcagagcagaattagatccgat

SEQ ID NO: 1558754 - DNA, 25 bp, Homo sapien
agcagagcagaattagatccgattt

SEQ ID NO: 1558755 - DNA, 25 bp, Homo sapien
gcctcagcagagcagaattagatcc

SEQ ID NO: 1558756 - DNA, 25 bp, Homo sapien
attcccagctcaggaaacctcaggt

SEQ ID NO: 1558757 - DNA, 25 bp, Homo sapien
ggtcgttgatcagacacctccagac

SEQ ID NO: 1558758 - DNA, 25 bp, Homo sapien
ggtcatctctgaggtcgttgatcag

SEQ ID NO: 1558759 - DNA, 25 bp, Homo sapien
accccaggactctgcaaagattcct

SEQ ID NO: 1558760 - DNA, 25 bp, Homo sapien
tggtagtgggtgcatccactcagct

SEQ ID NO: 1558761 - DNA, 25 bp, Homo sapien
ccttgtcctcactggacagaggagc

SEQ ID NO: 1558762 - DNA, 25 bp, Homo sapien
cctggtagtgggtgcatccactcag

SEQ ID NO: 1558763 - DNA, 25 bp, Homo sapien
atgaatccctgcttctaccaggtcc

SEQ ID NO: 1558764 - DNA, 25 bp, Homo sapien
tgaagagccagggatgacagcaaga

SEQ ID NO: 1558765 - DNA, 25 bp, Homo sapien
cgaccagtccagaggctcctgatgg

SEQ ID NO: 1558766 - DNA, 25 bp, Homo sapien
acaggtctcattagcttgaagagcc

SEQ ID NO: 1558767 - DNA, 25 bp, Homo sapien
ggaaggaaggtcagctgtacaggga

SEQ ID NO: 1558768 - DNA, 25 bp, Homo sapien
tgtgtctccctgtctatcttgctct

SEQ ID NO: 1558769 - DNA, 25 bp, Homo sapien
gcattatccccttggtctctcttat

SEQ ID NO: 1558770 - DNA, 25 bp, Homo sapien
tcctgtgggccttaggctgtggcat

SEQ ID NO: 1558771 - DNA, 25 bp, Homo sapien
tctccgtccctgtctctgttgataa

SEQ ID NO: 1558772 - DNA, 25 bp, Homo sapien
tattttcgtagagatggagtcgctc

SEQ ID NO: 1558773 - DNA, 25 bp, Homo sapien
acgatgcccagctaatttttttatt

SEQ ID NO: 1558774 - DNA, 25 bp, Homo sapien
ggcgtgagccaacaaacccagcact

SEQ ID NO: 1558775 - DNA, 25 bp, Homo sapien
tagctgagactttacaggcacatac

SEQ ID NO: 1558776 - DNA, 25 bp, Homo sapien
catcccctcacatggggagatttta

SEQ ID NO: 1558777 - DNA, 25 bp, Homo sapien
tgatgtcatttgtcatggcctggaa

SEQ ID NO: 1558778 - DNA, 25 bp, Homo sapien
tgtcatttgtcatggcctggaactc

SEQ ID NO: 1558779 - DNA, 25 bp, Homo sapien
gaaacacatcccctcacatggggag

SEQ ID NO: 1558780 - DNA, 25 bp, Homo sapien
ttcagaaaggagggacggggctctc

SEQ ID NO: 1558781 - DNA, 25 bp, Homo sapien
tcagaaaggagggacggggctctcc

SEQ ID NO: 1558782 - DNA, 25 bp, Homo sapien
cttcagaaaggagggacggggctct

SEQ ID NO: 1558783 - DNA, 25 bp, Homo sapien
aatcaatcgaaagaggacctgtctc

SEQ ID NO: 1558784 - DNA, 25 bp, Homo sapien
caatcaatcgaaagaggacctgtct

SEQ ID NO: 1558785 - DNA, 25 bp, Homo sapien
tcaatcaatcgaaagaggacctgtc

SEQ ID NO: 1558786 - DNA, 25 bp, Homo sapien
catccaagatcccttctttcttgac

SEQ ID NO: 1558787 - DNA, 25 bp, Homo sapien
ccaagatcccttctttcttgaccat

SEQ ID NO: 1558788 - DNA, 25 bp, Homo sapien
tccaagatcccttctttcttgacca

SEQ ID NO: 1558789 - DNA, 25 bp, Homo sapien
cctcatccaagatcccttctttctt

SEQ ID NO: 1558790 - DNA, 25 bp, Homo sapien
tcggggacactgaggcccaagtcag

SEQ ID NO: 1558791 - DNA, 25 bp, Homo sapien
gacactgaggcccaagtcagggggc

SEQ ID NO: 1558792 - DNA, 25 bp, Homo sapien
gggacactgaggcccaagtcagggg

SEQ ID NO: 1558793 - DNA, 25 bp, Homo sapien
cttcggggacactgaggcccaagtc

SEQ ID NO: 1558794 - DNA, 25 bp, Homo sapien
agggccaaggcgttgacagaatagt

SEQ ID NO: 1558795 - DNA, 25 bp, Homo sapien
gccccgggttcatatacgccatcat

SEQ ID NO: 1558796 - DNA, 25 bp, Homo sapien
gccacttagggccaaggcgttgaca

SEQ ID NO: 1558797 - DNA, 25 bp, Homo sapien
gggccccgggttcatatacgccatc

SEQ ID NO: 1558798 - DNA, 25 bp, Homo sapien
agctcctccagttggctccgggtga

SEQ ID NO: 1558799 - DNA, 25 bp, Homo sapien
cgtctgggtactgggtcttggcaaa

SEQ ID NO: 1558800 - DNA, 25 bp, Homo sapien
atagacgtctgggtactgggtcttg

SEQ ID NO: 1558801 - DNA, 25 bp, Homo sapien
ttggctccgggtgaaggtggtgcgc

SEQ ID NO: 1558802 - DNA, 25 bp, Homo sapien
tggactcaggcagattgatcttcag

SEQ ID NO: 1558803 - DNA, 25 bp, Homo sapien
tcaggcagattgatcttcagagcca

SEQ ID NO: 1558804 - DNA, 25 bp, Homo sapien
gactcaggcagattgatcttcagag

SEQ ID NO: 1558805 - DNA, 25 bp, Homo sapien
cctggactcaggcagattgatcttc

SEQ ID NO: 1558806 - DNA, 25 bp, Homo sapien
tgcctgcatttagccctccggttct

SEQ ID NO: 1558807 - DNA, 25 bp, Homo sapien
tgctgcctgcatttagccctccggt

SEQ ID NO: 1558808 - DNA, 25 bp, Homo sapien
gctgcctgcatttagccctccggtt

SEQ ID NO: 1558809 - DNA, 25 bp, Homo sapien
cctgcatttagccctccggttcttg

SEQ ID NO: 1558810 - DNA, 25 bp, Homo sapien
gctccagatggacacagtggccact

SEQ ID NO: 1558811 - DNA, 25 bp, Homo sapien
gacacacatctgtggagggtcttgg

SEQ ID NO: 1558812 - DNA, 25 bp, Homo sapien
gggactgtaggaatctgagatgccc

SEQ ID NO: 1558813 - DNA, 25 bp, Homo sapien
ccagagggtctggacacacatctgt

SEQ ID NO: 1558814 - DNA, 25 bp, Homo sapien
ggtctaggccgctgaaataggagct

SEQ ID NO: 1558815 - DNA, 25 bp, Homo sapien
gctgaaataggagctcggagaccca

SEQ ID NO: 1558816 - DNA, 25 bp, Homo sapien
ataggagctcggagacccataggcg

SEQ ID NO: 1558817 - DNA, 25 bp, Homo sapien
taggccgctgaaataggagctcgga

SEQ ID NO: 1558818 - DNA, 25 bp, Homo sapien
cagagagggggctaagagccgggcc

SEQ ID NO: 1558819 - DNA, 25 bp, Homo sapien
ccagagagggggctaagagccgggc

SEQ ID NO: 1558820 - DNA, 25 bp, Homo sapien
gccagagagggggctaagagccggg

SEQ ID NO: 1558821 - DNA, 25 bp, Homo sapien
tatccacggggctgtaggcgccata

SEQ ID NO: 1558822 - DNA, 25 bp, Homo sapien
taggtgaatttccaggtgcccgtgg

SEQ ID NO: 1558823 - DNA, 25 bp, Homo sapien
ccttgaattccaagctatccacggg

SEQ ID NO: 1558824 - DNA, 25 bp, Homo sapien
gatccttgtagtccagagggtccat

SEQ ID NO: 1558825 - DNA, 25 bp, Homo sapien
tacaagatctgaaacttccaggcac

SEQ ID NO: 1558826 - DNA, 25 bp, Homo sapien
caatcgtgccagacggtgttagggt

SEQ ID NO: 1558827 - DNA, 25 bp, Homo sapien
gtacttcagcggtcacaatcgtgcc

SEQ ID NO: 1558828 - DNA, 25 bp, Homo sapien
tggtctctgtaagctgaacaccgag

SEQ ID NO: 1558829 - DNA, 25 bp, Homo sapien
tctcaggaatgccatcccgggatct

SEQ ID NO: 1558830 - DNA, 25 bp, Homo sapien
taaacctaccatgtaagcctgacat

SEQ ID NO: 1558831 - DNA, 25 bp, Homo sapien
cattcccaatgtgctaatgagcgaa

SEQ ID NO: 1558832 - DNA, 25 bp, Homo sapien
taaagaagtgtccacgtgtagggcc

SEQ ID NO: 1558833 - DNA, 25 bp, Homo sapien
atcattggcctaaggtttcccgacg

SEQ ID NO: 1558834 - DNA, 25 bp, Homo sapien
caagtgcttgccagtgtcaccataa

SEQ ID NO: 1558835 - DNA, 25 bp, Homo sapien
tcaagaaataatggtgccaccccag

SEQ ID NO: 1558836 - DNA, 25 bp, Homo sapien
aaggagaactcggactgagaaggca

SEQ ID NO: 1558837 - DNA, 25 bp, Homo sapien
tgtgaactccaccaatgaagggctc

SEQ ID NO: 1558838 - DNA, 25 bp, Homo sapien
ggatcaggctctctcgaagtcttac

SEQ ID NO: 1558839 - DNA, 25 bp, Homo sapien
cgtagaacgtttgaaatcccctgtg

SEQ ID NO: 1558840 - DNA, 25 bp, Homo sapien
gattctggtcccaacgtttgcacag

SEQ ID NO: 1558841 - DNA, 25 bp, Homo sapien
gaagattctcttccacgcctgagtc

SEQ ID NO: 1558842 - DNA, 25 bp, Homo sapien
agagtagttcctgtttctacctgcc

SEQ ID NO: 1558843 - DNA, 25 bp, Homo sapien
ccagcccctgatccttcataaattg

SEQ ID NO: 1558844 - DNA, 25 bp, Homo sapien
acagaaggaacagagtagttcctgt

SEQ ID NO: 1558845 - DNA, 25 bp, Homo sapien
acagagtagttcctgtttctacctg

SEQ ID NO: 1558846 - DNA, 25 bp, Homo sapien
gtcatgcgtctgaacctaatcctcg

SEQ ID NO: 1558847 - DNA, 25 bp, Homo sapien
taatcctcgctaattcccctgccat

SEQ ID NO: 1558848 - DNA, 25 bp, Homo sapien
cgtctgaacctaatcctcgctaatt

SEQ ID NO: 1558849 - DNA, 25 bp, Homo sapien
gggtcatgcgtctgaacctaatcct

SEQ ID NO: 1558850 - DNA, 25 bp, Homo sapien
agtcattgtctttcccagcgcccca

SEQ ID NO: 1558851 - DNA, 25 bp, Homo sapien
ccccaggtgcatgtcaggagctgga

SEQ ID NO: 1558852 - DNA, 25 bp, Homo sapien
caggtgcatgtcaggagctggattc

SEQ ID NO: 1558853 - DNA, 25 bp, Homo sapien
agcgccccaggtgcatgtcaggagc

SEQ ID NO: 1558854 - DNA, 25 bp, Homo sapien
cttggagatgaccagggtcttgcat

SEQ ID NO: 1558855 - DNA, 25 bp, Homo sapien
tagttcgggtactggtccttctgaa

SEQ ID NO: 1558856 - DNA, 25 bp, Homo sapien
agtgtagaccgtgcgctcctgccgc

SEQ ID NO: 1558857 - DNA, 25 bp, Homo sapien
tctgctggctttcagtgtagaccgt

SEQ ID NO: 1558858 - DNA, 25 bp, Homo sapien
cagattcagtcgctggtcgtagttc

SEQ ID NO: 1558859 - DNA, 25 bp, Homo sapien
cgctcccgagctagtttggcgcggc

SEQ ID NO: 1558860 - DNA, 25 bp, Homo sapien
ctcccgagctagtttggcgcggcga

SEQ ID NO: 1558861 - DNA, 25 bp, Homo sapien
ccgagctagtttggcgcggcgattc

SEQ ID NO: 1558862 - DNA, 25 bp, Homo sapien
gccgctcccgagctagtttggcgcg

SEQ ID NO: 1558863 - DNA, 25 bp, Homo sapien
ggcgacaagttggaggcataggggc

SEQ ID NO: 1558864 - DNA, 25 bp, Homo sapien
gcgacaagttggaggcataggggct

SEQ ID NO: 1558865 - DNA, 25 bp, Homo sapien
tggcgacaagttggaggcatagggg

SEQ ID NO: 1558866 - DNA, 25 bp, Homo sapien
ctggcgacaagttggaggcataggg

SEQ ID NO: 1558867 - DNA, 25 bp, Homo sapien
tcctcgaaccggtctaggagcggga

SEQ ID NO: 1558868 - DNA, 25 bp, Homo sapien
gagtgatttttgtccacgaagccat

SEQ ID NO: 1558869 - DNA, 25 bp, Homo sapien
tggagagtgaggattcctcgaaccg

SEQ ID NO: 1558870 - DNA, 25 bp, Homo sapien
ttggtgaagtcagggtataactggg

SEQ ID NO: 1558871 - DNA, 25 bp, Homo sapien
gagttgagtcatgggatcccagact

SEQ ID NO: 1558872 - DNA, 25 bp, Homo sapien
aaagaaagaagtgactagggttcag

SEQ ID NO: 1558873 - DNA, 25 bp, Homo sapien
caatgtttcccgtttacagaatgct

SEQ ID NO: 1558874 - DNA, 25 bp, Homo sapien
tagggttcagagaaccagggttcaa

SEQ ID NO: 1558875 - DNA, 25 bp, Homo sapien
cagaatcagaagtccccgtgtgagt

SEQ ID NO: 1558876 - DNA, 25 bp, Homo sapien
tgagagagcagcgttccaaggagaa

SEQ ID NO: 1558877 - DNA, 25 bp, Homo sapien
cctcgctgagaaacttgaattggaa

SEQ ID NO: 1558878 - DNA, 25 bp, Homo sapien
taggcaagtcatgggccaatctgag

SEQ ID NO: 1558879 - DNA, 25 bp, Homo sapien
taacttatctatattagggatacat

SEQ ID NO: 1558880 - DNA, 25 bp, Homo sapien
tctatattagggatacataccatac

SEQ ID NO: 1558881 - DNA, 25 bp, Homo sapien
taccatacacatacaccacagaaag

SEQ ID NO: 1558882 - DNA, 25 bp, Homo sapien
ttagggatacataccatacacatac

SEQ ID NO: 1558883 - DNA, 25 bp, Homo sapien
ctttgtgcaatagaactgatgaaca

SEQ ID NO: 1558884 - DNA, 25 bp, Homo sapien
tgggatttgagtaccgttgttggac

SEQ ID NO: 1558885 - DNA, 25 bp, Homo sapien
atagggaaggcccacgtagctctgg

SEQ ID NO: 1558886 - DNA, 25 bp, Homo sapien
gatgaacatcaactaatagggaagg

SEQ ID NO: 1558887 - DNA, 25 bp, Homo sapien
aggctcccccctgtcgtcacccagt

SEQ ID NO: 1558888 - DNA, 25 bp, Homo sapien
gctcccccctgtcgtcacccagtcc

SEQ ID NO: 1558889 - DNA, 25 bp, Homo sapien
cagaggctcccccctgtcgtcaccc

SEQ ID NO: 1558890 - DNA, 25 bp, Homo sapien
agaggctcccccctgtcgtcaccca

SEQ ID NO: 1558891 - DNA, 25 bp, Homo sapien
gaggaaggggaactgtatctgagag

SEQ ID NO: 1558892 - DNA, 25 bp, Homo sapien
gcataggagatcagatggtgcctag

SEQ ID NO: 1558893 - DNA, 25 bp, Homo sapien
tgagagttcagtatctgacaataag

SEQ ID NO: 1558894 - DNA, 25 bp, Homo sapien
ttcagtatctgacaataaggaaaag

SEQ ID NO: 1558895 - DNA, 25 bp, Homo sapien
ggccagtgagggccctgcgttccat

SEQ ID NO: 1558896 - DNA, 25 bp, Homo sapien
cctgacgtcacccagtccccagggc

SEQ ID NO: 1558897 - DNA, 25 bp, Homo sapien
ccagggccagtgagggccctgcgtt

SEQ ID NO: 1558898 - DNA, 25 bp, Homo sapien
cagggccagtgagggccctgcgttc

SEQ ID NO: 1558899 - DNA, 25 bp, Homo sapien
ctttaggccctttgatcttacgcag

SEQ ID NO: 1558900 - DNA, 25 bp, Homo sapien
cctttgatcttacgcagggtgaggg

SEQ ID NO: 1558901 - DNA, 25 bp, Homo sapien
tgagggagccaatcaccagaggctc

SEQ ID NO: 1558902 - DNA, 25 bp, Homo sapien
gagggagccaatcaccagaggctca

SEQ ID NO: 1558903 - DNA, 25 bp, Homo sapien
gctcccccctgtcgtcacccagtcc

SEQ ID NO: 1558904 - DNA, 25 bp, Homo sapien
aggctcccccctgtcgtcacccagt

SEQ ID NO: 1558905 - DNA, 25 bp, Homo sapien
cagaggctcccccctgtcgtcaccc

SEQ ID NO: 1558906 - DNA, 25 bp, Homo sapien
agaggctcccccctgtcgtcaccca

SEQ ID NO: 1558907 - DNA, 25 bp, Homo sapien
tgcagtggtgcacatctgcggcccc

SEQ ID NO: 1558908 - DNA, 25 bp, Homo sapien
agactctggctccacaaaaatgtta

SEQ ID NO: 1558909 - DNA, 25 bp, Homo sapien
ctagaacttgagaactacttttgtg

SEQ ID NO: 1558910 - DNA, 25 bp, Homo sapien
cagagtttctaatgtccgttttata

SEQ ID NO: 1558911 - DNA, 25 bp, Homo sapien
gctcccccctgtcgtcacccagtcc

SEQ ID NO: 1558912 - DNA, 25 bp, Homo sapien
agaggctcccccctgtcgtcaccca

SEQ ID NO: 1558913 - DNA, 25 bp, Homo sapien
cagaggctcccccctgtcgtcaccc

SEQ ID NO: 1558914 - DNA, 25 bp, Homo sapien
aggctcccccctgtcgtcacccagt

SEQ ID NO: 1558915 - DNA, 25 bp, Homo sapien
tgacctcccaaagtgctgtgattac

SEQ ID NO: 1558916 - DNA, 25 bp, Homo sapien
ttgacctcccaaagtgctgtgatta

SEQ ID NO: 1558917 - DNA, 25 bp, Homo sapien
agagctggggtttctctctgttggt

SEQ ID NO: 1558918 - DNA, 25 bp, Homo sapien
tagagctggggtttctctctgttgg

SEQ ID NO: 1558919 - DNA, 25 bp, Homo sapien
ggccagtgagggccctgcgttccat

SEQ ID NO: 1558920 - DNA, 25 bp, Homo sapien
cctgacgtcacccagtccccagggc

SEQ ID NO: 1558921 - DNA, 25 bp, Homo sapien
ccagggccagtgagggccctgcgtt

SEQ ID NO: 1558922 - DNA, 25 bp, Homo sapien
cagggccagtgagggccctgcgttc

SEQ ID NO: 1558923 - DNA, 25 bp, Homo sapien
ggccctttgatcttacgcacggtga

SEQ ID NO: 1558924 - DNA, 25 bp, Homo sapien
ccctttgatcttacgcacggtgagg

SEQ ID NO: 1558925 - DNA, 25 bp, Homo sapien
ttaggccctttgatcttacgcacgg

SEQ ID NO: 1558926 - DNA, 25 bp, Homo sapien
ctttaggccctttgatcttacgcac

SEQ ID NO: 1558927 - DNA, 25 bp, Homo sapien
aggctcccccctgtcgtcacccagt

SEQ ID NO: 1558928 - DNA, 25 bp, Homo sapien
agaggctcccccctgtcgtcaccca

SEQ ID NO: 1558929 - DNA, 25 bp, Homo sapien
gctcccccctgtcgtcacccagtcc

SEQ ID NO: 1558930 - DNA, 25 bp, Homo sapien
cagaggctcccccctgtcgtcaccc

SEQ ID NO: 1558931 - DNA, 25 bp, Homo sapien
agactctggctccacaaaaatgtta

SEQ ID NO: 1558932 - DNA, 25 bp, Homo sapien
tgcagtggtgcacatctgcggcccc

SEQ ID NO: 1558933 - DNA, 25 bp, Homo sapien
ctagaacttgagaactacttttgtg

SEQ ID NO: 1558934 - DNA, 25 bp, Homo sapien
cagagtttctaatgtccgttttata

SEQ ID NO: 1558935 - DNA, 25 bp, Homo sapien
aggagatcagatggtgcctagtgtt

SEQ ID NO: 1558936 - DNA, 25 bp, Homo sapien
gcataggagatcagatggtgcctag

SEQ ID NO: 1558937 - DNA, 25 bp, Homo sapien
taggagatcagatggtgcctagtgt

SEQ ID NO: 1558938 - DNA, 25 bp, Homo sapien
cataggagatcagatggtgcctagt

SEQ ID NO: 1558939 - DNA, 25 bp, Homo sapien
gggatgaaggggaactgtatctgag

SEQ ID NO: 1558940 - DNA, 25 bp, Homo sapien
tgaaggggaactgtatctgagagtt

SEQ ID NO: 1558941 - DNA, 25 bp, Homo sapien
cagtgagggccctgcgttccatggc

SEQ ID NO: 1558942 - DNA, 25 bp, Homo sapien
ccatggcgccccctggagggatgaa

SEQ ID NO: 1558943 - DNA, 25 bp, Homo sapien
tgagggagccaatcaccagaggctc

SEQ ID NO: 1558944 - DNA, 25 bp, Homo sapien
ctttaggccctttgatcttacgcag

SEQ ID NO: 1558945 - DNA, 25 bp, Homo sapien
gagggagccaatcaccagaggctca

SEQ ID NO: 1558946 - DNA, 25 bp, Homo sapien
cctttgatcttacgcagggtgaggg

SEQ ID NO: 1558947 - DNA, 25 bp, Homo sapien
gctcccccctgtcgtcacccagtcc

SEQ ID NO: 1558948 - DNA, 25 bp, Homo sapien
aggctcccccctgtcgtcacccagt

SEQ ID NO: 1558949 - DNA, 25 bp, Homo sapien
cagaggctcccccctgtcgtcaccc

SEQ ID NO: 1558950 - DNA, 25 bp, Homo sapien
agaggctcccccctgtcgtcaccca

SEQ ID NO: 1558951 - DNA, 25 bp, Homo sapien
ggccagtgagggccctgcgttccat

SEQ ID NO: 1558952 - DNA, 25 bp, Homo sapien
cagggccagtgagggccctgcgttc

SEQ ID NO: 1558953 - DNA, 25 bp, Homo sapien
cctgacgtcacccagtccccagggc

SEQ ID NO: 1558954 - DNA, 25 bp, Homo sapien
ccagggccagtgagggccctgcgtt

SEQ ID NO: 1558955 - DNA, 25 bp, Homo sapien
cctttgatcttacgcagggtgaggg

SEQ ID NO: 1558956 - DNA, 25 bp, Homo sapien
tgagggagccaatcaccagaggctc

SEQ ID NO: 1558957 - DNA, 25 bp, Homo sapien
ctttaggccctttgatcttacgcag

SEQ ID NO: 1558958 - DNA, 25 bp, Homo sapien
gagggagccaatcaccagaggctca

SEQ ID NO: 1558959 - DNA, 25 bp, Homo sapien
ttgacctcccaaagtgctgtgatta

SEQ ID NO: 1558960 - DNA, 25 bp, Homo sapien
tgacctcccaaagtgctgtgattac

SEQ ID NO: 1558961 - DNA, 25 bp, Homo sapien
agagctggggtttctctctgttggt

SEQ ID NO: 1558962 - DNA, 25 bp, Homo sapien
tagagctggggtttctctctgttgg

SEQ ID NO: 1558963 - DNA, 25 bp, Homo sapien
ggaaggggaactgtatctgagagtt

SEQ ID NO: 1558964 - DNA, 25 bp, Homo sapien
ggaggaaggggaactgtatctgaga

SEQ ID NO: 1558965 - DNA, 25 bp, Homo sapien
gaggaaggggaactgtatctgagag

SEQ ID NO: 1558966 - DNA, 25 bp, Homo sapien
aggaaggggaactgtatctgagagt

SEQ ID NO: 1558967 - DNA, 25 bp, Homo sapien
ggccagtgagggccctgcgttccat

SEQ ID NO: 1558968 - DNA, 25 bp, Homo sapien
cctgacgtcacccagtccccagggc

SEQ ID NO: 1558969 - DNA, 25 bp, Homo sapien
ccagggccagtgagggccctgcgtt

SEQ ID NO: 1558970 - DNA, 25 bp, Homo sapien
cagggccagtgagggccctgcgttc

SEQ ID NO: 1558971 - DNA, 25 bp, Homo sapien
tacaatgatgatgaagcggagaatg

SEQ ID NO: 1558972 - DNA, 25 bp, Homo sapien
atgatgaagcggagaatgggcttct

SEQ ID NO: 1558973 - DNA, 25 bp, Homo sapien
tgttacaatgatgatgaagcggaga

SEQ ID NO: 1558974 - DNA, 25 bp, Homo sapien
cattgtgttacaatgatgatgaagc

SEQ ID NO: 1558975 - DNA, 25 bp, Homo sapien
cttgcttttaggactacacttggga

SEQ ID NO: 1558976 - DNA, 25 bp, Homo sapien
taaggtgcgccataaccccttgctt

SEQ ID NO: 1558977 - DNA, 25 bp, Homo sapien
tgaattagtgaataccgagctggtg

SEQ ID NO: 1558978 - DNA, 25 bp, Homo sapien
tgaactcaagaccaacagggctgaa

SEQ ID NO: 1558979 - DNA, 25 bp, Homo sapien
tatccaggctgcatcattgatgaag

SEQ ID NO: 1558980 - DNA, 25 bp, Homo sapien
tggcagaggacgtttattttctaaa

SEQ ID NO: 1558981 - DNA, 25 bp, Homo sapien
taaacacctatgagctttgtgagct

SEQ ID NO: 1558982 - DNA, 25 bp, Homo sapien
aggatatgtttgctatccaggctgc

SEQ ID NO: 1558983 - DNA, 25 bp, Homo sapien
gacaaaacatgatcgatgcatccag

SEQ ID NO: 1558984 - DNA, 25 bp, Homo sapien
ctggcagagaatgagcaggaaatgt

SEQ ID NO: 1558985 - DNA, 25 bp, Homo sapien
tctttgggttaggtttgcttgcatc

SEQ ID NO: 1558986 - DNA, 25 bp, Homo sapien
gctggctatcagatacagacaaaac

SEQ ID NO: 1558987 - DNA, 25 bp, Homo sapien
cagaggtatagaagtcactctgaac

SEQ ID NO: 1558988 - DNA, 25 bp, Homo sapien
agagcctgctcattttaccaccatg

SEQ ID NO: 1558989 - DNA, 25 bp, Homo sapien
cagcactaaatgtgtctactcttta

SEQ ID NO: 1558990 - DNA, 25 bp, Homo sapien
agaaaatatagaatggatcccagga

SEQ ID NO: 1558991 - DNA, 25 bp, Homo sapien
ggctctctccacgatctctctttaa

SEQ ID NO: 1558992 - DNA, 25 bp, Homo sapien
tttgagagagttcttctgggccctg

SEQ ID NO: 1558993 - DNA, 25 bp, Homo sapien
tatctggggattggttgaatggctt

SEQ ID NO: 1558994 - DNA, 25 bp, Homo sapien
ccaagagctctggattatctgggga

SEQ ID NO: 1558995 - DNA, 25 bp, Homo sapien
tccacttgactcataggaatagaga

SEQ ID NO: 1558996 - DNA, 25 bp, Homo sapien
tcccaacaggtaactggaccatcgg

SEQ ID NO: 1558997 - DNA, 25 bp, Homo sapien
cacttgactcataggaatagagaag

SEQ ID NO: 1558998 - DNA, 25 bp, Homo sapien
catcccaacaggtaactggaccatc

SEQ ID NO: 1558999 - DNA, 25 bp, Homo sapien
tcactctggcagtacttccactggc

SEQ ID NO: 1559000 - DNA, 25 bp, Homo sapien
tacacggctctggtggcacaccaag

SEQ ID NO: 1559001 - DNA, 25 bp, Homo sapien
ttccactggccgttgtacacggctc

SEQ ID NO: 1559002 - DNA, 25 bp, Homo sapien
ggtgcaagtgaagtaaacagatccc

SEQ ID NO: 1559003 - DNA, 25 bp, Homo sapien
tgagcaccacagactgcctaagaag

SEQ ID NO: 1559004 - DNA, 25 bp, Homo sapien
gtttctcatcgaagacagaggtgac

SEQ ID NO: 1559005 - DNA, 25 bp, Homo sapien
taagcctttcctcgatagatgaaag

SEQ ID NO: 1559006 - DNA, 25 bp, Homo sapien
gggagatgcagctgttataagcctt

SEQ ID NO: 1559007 - DNA, 25 bp, Homo sapien
tcctccatgcaatcagagaccacat

SEQ ID NO: 1559008 - DNA, 25 bp, Homo sapien
tggtgtcggcacagaaactccactt

SEQ ID NO: 1559009 - DNA, 25 bp, Homo sapien
tctgtggttgggcaccagagcttgt

SEQ ID NO: 1559010 - DNA, 25 bp, Homo sapien
ttccatccttatccatgttctctgt

SEQ ID NO: 1559011 - DNA, 25 bp, Homo sapien
gaagaagggcagagtggaagcacag

SEQ ID NO: 1559012 - DNA, 25 bp, Homo sapien
ctggaatagggaagaagggcagagt

SEQ ID NO: 1559013 - DNA, 25 bp, Homo sapien
gggaagaagggcagagtggaagcac

SEQ ID NO: 1559014 - DNA, 25 bp, Homo sapien
aatagggaagaagggcagagtggaa

SEQ ID NO: 1559015 - DNA, 25 bp, Homo sapien
caagagtgtaggacatgagaaaggc

SEQ ID NO: 1559016 - DNA, 25 bp, Homo sapien
tcaagagtgtaggacatgagaaagg

SEQ ID NO: 1559017 - DNA, 25 bp, Homo sapien
aagagtgtaggacatgagaaaggct

SEQ ID NO: 1559018 - DNA, 25 bp, Homo sapien
gcaatacacccaggtgtggtcttgg

SEQ ID NO: 1559019 - DNA, 25 bp, Homo sapien
tatagttgaacggaaagtgacaagg

SEQ ID NO: 1559020 - DNA, 25 bp, Homo sapien
tcctttgatccttcgttagtgcagt

SEQ ID NO: 1559021 - DNA, 25 bp, Homo sapien
tggtcttggtcgtagttgtaagaag

SEQ ID NO: 1559022 - DNA, 25 bp, Homo sapien
tgaaatgaccactgttggtccctgc

SEQ ID NO: 1559023 - DNA, 25 bp, Homo sapien
ctctgcatccgtgaaatgaccactg

SEQ ID NO: 1559024 - DNA, 25 bp, Homo sapien
gcatccgtgaaatgaccactgttgg

SEQ ID NO: 1559025 - DNA, 25 bp, Homo sapien
aatgaccactgttggtccctgctct

SEQ ID NO: 1559026 - DNA, 25 bp, Homo sapien
caatgaacaatgagctcctcaatct

SEQ ID NO: 1559027 - DNA, 25 bp, Homo sapien
caatgagctcctcaatctcacctct

SEQ ID NO: 1559028 - DNA, 25 bp, Homo sapien
tcaatgaacaatgagctcctcaatc

SEQ ID NO: 1559029 - DNA, 25 bp, Homo sapien
tgagctcctcaatctcacctctatg

SEQ ID NO: 1559030 - DNA, 25 bp, Homo sapien
actcctttattggtggttatgccgc

SEQ ID NO: 1559031 - DNA, 25 bp, Homo sapien
tctacgttcttcacaaaggaccagc

SEQ ID NO: 1559032 - DNA, 25 bp, Homo sapien
caggtggtgcagagggtatttctaa

SEQ ID NO: 1559033 - DNA, 25 bp, Homo sapien
tcagcctcagtatggcggcagtctt

SEQ ID NO: 1559034 - DNA, 25 bp, Homo sapien
ggaactcacatcaaggcaacctttg

SEQ ID NO: 1559035 - DNA, 25 bp, Homo sapien
ccatggaagttatcacagcagacct

SEQ ID NO: 1559036 - DNA, 25 bp, Homo sapien
aacctccgttcctaggcatcagatg

SEQ ID NO: 1559037 - DNA, 25 bp, Homo sapien
taagttctggcacaaacttggtgcc

SEQ ID NO: 1559038 - DNA, 25 bp, Homo sapien
aatccaaaattctggccgggctcag

SEQ ID NO: 1559039 - DNA, 25 bp, Homo sapien
gcacctatctgctgcttatggacaa

SEQ ID NO: 1559040 - DNA, 25 bp, Homo sapien
tctaattgtgacattctttggttca

SEQ ID NO: 1559041 - DNA, 25 bp, Homo sapien
ttagctaggagtgacagtgcacgcc

SEQ ID NO: 1559042 - DNA, 25 bp, Homo sapien
gctgtcacagctctaagacaccggg

SEQ ID NO: 1559043 - DNA, 25 bp, Homo sapien
atcttgagactggtgccctgcgagc

SEQ ID NO: 1559044 - DNA, 25 bp, Homo sapien
gataaggaggctgagctccgacagg

SEQ ID NO: 1559045 - DNA, 25 bp, Homo sapien
gacaccgggaccgaaggagaagcca

SEQ ID NO: 1559046 - DNA, 25 bp, Homo sapien
gatccaatgtgcgtaacttctgtgc

SEQ ID NO: 1559047 - DNA, 25 bp, Homo sapien
ttgggctaacgatggctccaccagg

SEQ ID NO: 1559048 - DNA, 25 bp, Homo sapien
tgtgcatgtcggtttcctcagctgt

SEQ ID NO: 1559049 - DNA, 25 bp, Homo sapien
cctcagctgtaaaattgggctaacg

SEQ ID NO: 1559050 - DNA, 25 bp, Homo sapien
tagtacatattgcaccttcccagtg

SEQ ID NO: 1559051 - DNA, 25 bp, Homo sapien
cttagtacatattgcaccttcccag

SEQ ID NO: 1559052 - DNA, 25 bp, Homo sapien
ttagtacatattgcaccttcccagt

SEQ ID NO: 1559053 - DNA, 25 bp, Homo sapien
ccagccccgagcgcgtgtcttcctg

SEQ ID NO: 1559054 - DNA, 25 bp, Homo sapien
tctccagccccgagcgcgtgtcttc

SEQ ID NO: 1559055 - DNA, 25 bp, Homo sapien
gtctccagccccgagcgcgtgtctt

SEQ ID NO: 1559056 - DNA, 25 bp, Homo sapien
ctccagccccgagcgcgtgtcttcc

SEQ ID NO: 1559057 - DNA, 25 bp, Homo sapien
ctgcctgcccattcataccagtttg

SEQ ID NO: 1559058 - DNA, 25 bp, Homo sapien
ggtcggccacatccaacgaacttct

SEQ ID NO: 1559059 - DNA, 25 bp, Homo sapien
tcttcctggcagatgactctccccg

SEQ ID NO: 1559060 - DNA, 25 bp, Homo sapien
cagtttgaactgcaacagcctagct

SEQ ID NO: 1559061 - DNA, 25 bp, Homo sapien
ggaagcgggcaatggggaggtgctg

SEQ ID NO: 1559062 - DNA, 25 bp, Homo sapien
gggaagcgggcaatggggaggtgct

SEQ ID NO: 1559063 - DNA, 25 bp, Homo sapien
ttcgacttcagtgccggagatcctt

SEQ ID NO: 1559064 - DNA, 25 bp, Homo sapien
actttgcggaggaactgaggacgcg

SEQ ID NO: 1559065 - DNA, 25 bp, Homo sapien
ttcgaggtaatcgagaagggctttg

SEQ ID NO: 1559066 - DNA, 25 bp, Homo sapien
gctgcggcgaagctgactttgcgga

SEQ ID NO: 1559067 - DNA, 25 bp, Homo sapien
tcttgctttcagtccccagaagcag

SEQ ID NO: 1559068 - DNA, 25 bp, Homo sapien
ggtggcatccgggacaagataatga

SEQ ID NO: 1559069 - DNA, 25 bp, Homo sapien
tgctgcccccgacgcgggaggttca

SEQ ID NO: 1559070 - DNA, 25 bp, Homo sapien
acaagataatgagcagccggaagca

SEQ ID NO: 1559071 - DNA, 25 bp, Homo sapien
tcttgtcagacttaagctctgggtg

SEQ ID NO: 1559072 - DNA, 25 bp, Homo sapien
ttgtcagacttaagctctgggtgga

SEQ ID NO: 1559073 - DNA, 25 bp, Homo sapien
taaatgattcttgtcagacttaagc

SEQ ID NO: 1559074 - DNA, 25 bp, Homo sapien
gattcttgtcagacttaagctctgg

SEQ ID NO: 1559075 - DNA, 25 bp, Homo sapien
cccctttccagtaactgatgaaggc

SEQ ID NO: 1559076 - DNA, 25 bp, Homo sapien
actgatgaaggctccaggtagcaag

SEQ ID NO: 1559077 - DNA, 25 bp, Homo sapien
tccagtaactgatgaaggctccagg

SEQ ID NO: 1559078 - DNA, 25 bp, Homo sapien
taactgatgaaggctccaggtagca

SEQ ID NO: 1559079 - DNA, 25 bp, Homo sapien
taacagacttgctttcgctttgcac

SEQ ID NO: 1559080 - DNA, 25 bp, Homo sapien
tgtggagtaacgattctttcacccc

SEQ ID NO: 1559081 - DNA, 25 bp, Homo sapien
actttccgtaacaccctactctgtg

SEQ ID NO: 1559082 - DNA, 25 bp, Homo sapien
gtgcccggccaaaatagagtaatta

SEQ ID NO: 1559083 - DNA, 25 bp, Homo sapien
tcttcttagaagagcactagtcatt

SEQ ID NO: 1559084 - DNA, 25 bp, Homo sapien
cctcgtatggtctttgctccatgtg

SEQ ID NO: 1559085 - DNA, 25 bp, Homo sapien
catgtgtgtctctgttctaatcccc

SEQ ID NO: 1559086 - DNA, 25 bp, Homo sapien
ccttctcatatcctcgtatggtctt

SEQ ID NO: 1559087 - DNA, 25 bp, Homo sapien
tctgtccttgcgtgtgaatgggctg

SEQ ID NO: 1559088 - DNA, 25 bp, Homo sapien
tgtacaaacacggtgagaagaccct

SEQ ID NO: 1559089 - DNA, 25 bp, Homo sapien
aaacaggcatttgcgcttcaaagtg

SEQ ID NO: 1559090 - DNA, 25 bp, Homo sapien
gtctcggcttctttccctaggctca

SEQ ID NO: 1559091 - DNA, 25 bp, Homo sapien
aggtctcccttgtatctaaatgatc

SEQ ID NO: 1559092 - DNA, 25 bp, Homo sapien
ttcctcagtgcacacgcattcttgg

SEQ ID NO: 1559093 - DNA, 25 bp, Homo sapien
tacaaggtctcccttgtatctaaat

SEQ ID NO: 1559094 - DNA, 25 bp, Homo sapien
ccttgtatctaaatgatctgagtga

SEQ ID NO: 1559095 - DNA, 25 bp, Homo sapien
tgtctacaatttaaagagggagccg

SEQ ID NO: 1559096 - DNA, 25 bp, Homo sapien
ggtgtactctcttcagactctagat

SEQ ID NO: 1559097 - DNA, 25 bp, Homo sapien
tatctctgttggatgaaatcagtct

SEQ ID NO: 1559098 - DNA, 25 bp, Homo sapien
tgtgatgacccggtgtccaggcaca

SEQ ID NO: 1559099 - DNA, 25 bp, Homo sapien
gactcctgaatagctgggattacag

SEQ ID NO: 1559100 - DNA, 25 bp, Homo sapien
ctgccaccacacctggctaattttt

SEQ ID NO: 1559101 - DNA, 25 bp, Homo sapien
gcaactgccaccacacctggctaat

SEQ ID NO: 1559102 - DNA, 25 bp, Homo sapien
tattctcctgccccagactcctgaa

SEQ ID NO: 1559103 - DNA, 25 bp, Homo sapien
gaatacaagtgataagagtgggcat

SEQ ID NO: 1559104 - DNA, 25 bp, Homo sapien
aattacactggacttgtagattgct

SEQ ID NO: 1559105 - DNA, 25 bp, Homo sapien
tacactggacttgtagattgctttt

SEQ ID NO: 1559106 - DNA, 25 bp, Homo sapien
gttgaatacaagtgataagagtggg

SEQ ID NO: 1559107 - DNA, 25 bp, Homo sapien
tacatgttcaggtgcacttttcaca

SEQ ID NO: 1559108 - DNA, 25 bp, Homo sapien
tcagcctctatgataaagtattgca

SEQ ID NO: 1559109 - DNA, 25 bp, Homo sapien
gcaggtggatagaatacagcccttt

SEQ ID NO: 1559110 - DNA, 25 bp, Homo sapien
cattaatccgtgtaggactgtctca

SEQ ID NO: 1559111 - DNA, 25 bp, Homo sapien
ggtgtattacaaaagatgggccagg

SEQ ID NO: 1559112 - DNA, 25 bp, Homo sapien
gagttgcaattacctagccgctggt

SEQ ID NO: 1559113 - DNA, 25 bp, Homo sapien
tgctcccacttcagacacgagttgc

SEQ ID NO: 1559114 - DNA, 25 bp, Homo sapien
caataatttactggaatagctcaca

SEQ ID NO: 1559115 - DNA, 25 bp, Homo sapien
aacaggctgggatagaaagatgtca

SEQ ID NO: 1559116 - DNA, 25 bp, Homo sapien
tggcctcatcatcacaatgtggctg

SEQ ID NO: 1559117 - DNA, 25 bp, Homo sapien
tagctacaaatagtggtggctcaca

SEQ ID NO: 1559118 - DNA, 25 bp, Homo sapien
tgttgctcatcactttgctccatgg

SEQ ID NO: 1559119 - DNA, 25 bp, Homo sapien
cctcctacgacgaggacagtgagga

SEQ ID NO: 1559120 - DNA, 25 bp, Homo sapien
gagctgcaggccatatgcaaggtcc

SEQ ID NO: 1559121 - DNA, 25 bp, Homo sapien
ggcctcctacgacgaggacagtgag

SEQ ID NO: 1559122 - DNA, 25 bp, Homo sapien
tgcaggccatatgcaaggtcctggg

SEQ ID NO: 1559123 - DNA, 25 bp, Homo sapien
tctctgtcctgagggaaagacggcg

SEQ ID NO: 1559124 - DNA, 25 bp, Homo sapien
tctcaggaaatagcactgttgtgcc

SEQ ID NO: 1559125 - DNA, 25 bp, Homo sapien
ttctgaacgaatgggaaaatgctct

SEQ ID NO: 1559126 - DNA, 25 bp, Homo sapien
gcacttagtgaacgtttctgaacga

SEQ ID NO: 1559127 - DNA, 25 bp, Homo sapien
tgagagccgttaacgatccagcacc

SEQ ID NO: 1559128 - DNA, 25 bp, Homo sapien
ccaggtgcaggtgtgtttgtacgcc

SEQ ID NO: 1559129 - DNA, 25 bp, Homo sapien
tagatgaatgctgtcggcctcaggc

SEQ ID NO: 1559130 - DNA, 25 bp, Homo sapien
cacattggcgtgaggtggatcttcc

SEQ ID NO: 1559131 - DNA, 25 bp, Homo sapien
gctgggagtagattctgttgttatc

SEQ ID NO: 1559132 - DNA, 25 bp, Homo sapien
ggctttccctgacgcaatgctccaa

SEQ ID NO: 1559133 - DNA, 25 bp, Homo sapien
aggcactcagcaacgggctttccct

SEQ ID NO: 1559134 - DNA, 25 bp, Homo sapien
ctgggagtagattctgttgttatcc

SEQ ID NO: 1559135 - DNA, 25 bp, Homo sapien
tgatggtgttagcagcgtggacttc

SEQ ID NO: 1559136 - DNA, 25 bp, Homo sapien
caatgtgatggtgttagcagcgtgg

SEQ ID NO: 1559137 - DNA, 25 bp, Homo sapien
cagcgtggacttcatcccctcttga

SEQ ID NO: 1559138 - DNA, 25 bp, Homo sapien
gtgttagcagcgtggacttcatccc

SEQ ID NO: 1559139 - DNA, 25 bp, Homo sapien
tgtccaggtctggaaaggttcttcg

SEQ ID NO: 1559140 - DNA, 25 bp, Homo sapien
gaaagtcggccttgtctctaccagc

SEQ ID NO: 1559141 - DNA, 25 bp, Homo sapien
aaagagtttgcatcaccgtctgagc

SEQ ID NO: 1559142 - DNA, 25 bp, Homo sapien
ggcctgagatgctgcgaagaccctt

SEQ ID NO: 1559143 - DNA, 25 bp, Homo sapien
gcacagtttgggctcactgcagtct

SEQ ID NO: 1559144 - DNA, 25 bp, Homo sapien
ccacctcccaggctcaagcgattct

SEQ ID NO: 1559145 - DNA, 25 bp, Homo sapien
tcctgagctcacatgatctgcccac

SEQ ID NO: 1559146 - DNA, 25 bp, Homo sapien
tctcccacctcagcttcccgagtag

SEQ ID NO: 1559147 - DNA, 25 bp, Homo sapien
gctcatccagggcgagggaaagcgc

SEQ ID NO: 1559148 - DNA, 25 bp, Homo sapien
ccgctcatccagggcgagggaaagc

SEQ ID NO: 1559149 - DNA, 25 bp, Homo sapien
cgctcatccagggcgagggaaagcg

SEQ ID NO: 1559150 - DNA, 25 bp, Homo sapien
tagttctcctcggaagtgtcaccag

SEQ ID NO: 1559151 - DNA, 25 bp, Homo sapien
agttatccacgcttcgcctacaggt

SEQ ID NO: 1559152 - DNA, 25 bp, Homo sapien
gattatgaccctatggctcgccaca

SEQ ID NO: 1559153 - DNA, 25 bp, Homo sapien
tgcatcttcgttctagacatggccc

SEQ ID NO: 1559154 - DNA, 25 bp, Homo sapien
tgcctctatcgaggtgggtagcccg

SEQ ID NO: 1559155 - DNA, 25 bp, Homo sapien
caggtggatatcagacccattccca

SEQ ID NO: 1559156 - DNA, 25 bp, Homo sapien
tccgcagatgtgacccttaggtaca

SEQ ID NO: 1559157 - DNA, 25 bp, Homo sapien
ttatccctggttcacttggagcctg

SEQ ID NO: 1559158 - DNA, 25 bp, Homo sapien
aagcggctgaactcggcccacgaga

SEQ ID NO: 1559159 - DNA, 25 bp, Homo sapien
tcggcccacgagaagaaggcccgct

SEQ ID NO: 1559160 - DNA, 25 bp, Homo sapien
gacgaagaagagcgccagccgctgc

SEQ ID NO: 1559161 - DNA, 25 bp, Homo sapien
gctgctggcaccacgcgtcgaagaa

SEQ ID NO: 1559162 - DNA, 25 bp, Homo sapien
cacaagccgcacgtagctgtacttg

SEQ ID NO: 1559163 - DNA, 25 bp, Homo sapien
tgtacttgagcacgtcgatgagcgt

SEQ ID NO: 1559164 - DNA, 25 bp, Homo sapien
gtccttgcacacaagccgcacgtag

SEQ ID NO: 1559165 - DNA, 25 bp, Homo sapien
ggctgggcgcacgcacgtccttgca

SEQ ID NO: 1559166 - DNA, 25 bp, Homo sapien
aggacagcggctcaggttcacgcac

SEQ ID NO: 1559167 - DNA, 25 bp, Homo sapien
gcaggacagcggctcaggttcacgc

SEQ ID NO: 1559168 - DNA, 25 bp, Homo sapien
cccagcaggacagcggctcaggttc

SEQ ID NO: 1559169 - DNA, 25 bp, Homo sapien
ttccccccagcaggacagcggctca

SEQ ID NO: 1559170 - DNA, 25 bp, Homo sapien
cccgcctctctgcaaggtgtatttg

SEQ ID NO: 1559171 - DNA, 25 bp, Homo sapien
tggggtgttctctgcccgtctccca

SEQ ID NO: 1559172 - DNA, 25 bp, Homo sapien
tctctgcaaggtgtatttggctgcc

SEQ ID NO: 1559173 - DNA, 25 bp, Homo sapien
gcaaggtgtatttggctgcctcagt

SEQ ID NO: 1559174 - DNA, 25 bp, Homo sapien
tgtctcccagtctttgtcacgtgta

SEQ ID NO: 1559175 - DNA, 25 bp, Homo sapien
tttatcctgcggcttctctgcagtt

SEQ ID NO: 1559176 - DNA, 25 bp, Homo sapien
cctggccccttattcactgaataga

SEQ ID NO: 1559177 - DNA, 25 bp, Homo sapien
gttttacgctctgcctctcgaagtc

SEQ ID NO: 1559178 - DNA, 25 bp, Homo sapien
aacgtcaatctttctgtccagtcag

SEQ ID NO: 1559179 - DNA, 25 bp, Homo sapien
tctttgcacagttgtagggaactac

SEQ ID NO: 1559180 - DNA, 25 bp, Homo sapien
tagggaactacctgtgagcttgttc

SEQ ID NO: 1559181 - DNA, 25 bp, Homo sapien
tcttttaacgtcaatctttctgtcc

SEQ ID NO: 1559182 - DNA, 25 bp, Homo sapien
gtgggcagatcacctcagcctcctt

SEQ ID NO: 1559183 - DNA, 25 bp, Homo sapien
tgcactccagtgtggatggcagagc

SEQ ID NO: 1559184 - DNA, 25 bp, Homo sapien
acctcagcctccttgaggtcaggag

SEQ ID NO: 1559185 - DNA, 25 bp, Homo sapien
aataaaattggggtcaatttggctg

SEQ ID NO: 1559186 - DNA, 25 bp, Homo sapien
gaagtcgtggagcatgtctcaggca

SEQ ID NO: 1559187 - DNA, 25 bp, Homo sapien
ccatgaggcgggtatcgtgataacc

SEQ ID NO: 1559188 - DNA, 25 bp, Homo sapien
aaataactaccggtgaaagagctgt

SEQ ID NO: 1559189 - DNA, 25 bp, Homo sapien
ccaatggaaacatgggctcacctct

SEQ ID NO: 1559190 - DNA, 25 bp, Homo sapien
tcagtctcggattctaaacgtccag

SEQ ID NO: 1559191 - DNA, 25 bp, Homo sapien
catttgttacattggaactgggttc

SEQ ID NO: 1559192 - DNA, 25 bp, Homo sapien
tgaactgttcaagagccgagatcag

SEQ ID NO: 1559193 - DNA, 25 bp, Homo sapien
tcttgcaagctctaacgttctaggt

SEQ ID NO: 1559194 - DNA, 25 bp, Homo sapien
tagacatgacggctccaagatatcg

SEQ ID NO: 1559195 - DNA, 25 bp, Homo sapien
tatcgttcctgaaccggctcatcaa

SEQ ID NO: 1559196 - DNA, 25 bp, Homo sapien
tcgagagagtgagggagctagacat

SEQ ID NO: 1559197 - DNA, 25 bp, Homo sapien
tctgctttgagcagctcgagagagt

SEQ ID NO: 1559198 - DNA, 25 bp, Homo sapien
acggctctgccatctatgatggtgt

SEQ ID NO: 1559199 - DNA, 25 bp, Homo sapien
actgctgccgaatgttccactccac

SEQ ID NO: 1559200 - DNA, 25 bp, Homo sapien
tgctgccgaatgttccactccacgg

SEQ ID NO: 1559201 - DNA, 25 bp, Homo sapien
ggctctgccatctatgatggtgttt

SEQ ID NO: 1559202 - DNA, 25 bp, Homo sapien
gcgggctcagcttgacgatgatgaa

SEQ ID NO: 1559203 - DNA, 25 bp, Homo sapien
aagtagtaggcgaactccagcgggc

SEQ ID NO: 1559204 - DNA, 25 bp, Homo sapien
atcttgttggtggtgcgcaccggca

SEQ ID NO: 1559205 - DNA, 25 bp, Homo sapien
gggccacgaactgcttggagatctt

SEQ ID NO: 1559206 - DNA, 25 bp, Homo sapien
caaaataaagacgaactgagggctg

SEQ ID NO: 1559207 - DNA, 25 bp, Homo sapien
gagaaccggtagcaaagtcctcaaa

SEQ ID NO: 1559208 - DNA, 25 bp, Homo sapien
taaaaacccatgaatcctaagccag

SEQ ID NO: 1559209 - DNA, 25 bp, Homo sapien
caattgagggatgctgagaaccggt

SEQ ID NO: 1559210 - DNA, 25 bp, Homo sapien
catggtcctaaagtcaaataatgta

SEQ ID NO: 1559211 - DNA, 25 bp, Homo sapien
tgtaaagcgatacataaaaggtctt

SEQ ID NO: 1559212 - DNA, 25 bp, Homo sapien
gtcaaataatgtaaagcgatacata

SEQ ID NO: 1559213 - DNA, 25 bp, Homo sapien
tgcaaacatccacatggtcctaaag

SEQ ID NO: 1559214 - DNA, 25 bp, Homo sapien
gctgaaactaagctgcaggaggcct

SEQ ID NO: 1559215 - DNA, 25 bp, Homo sapien
aacacgagccccatattcagacagg

SEQ ID NO: 1559216 - DNA, 25 bp, Homo sapien
ggtaattacgttgggctgaatgccc

SEQ ID NO: 1559217 - DNA, 25 bp, Homo sapien
tgcggcatcgcatccaaggagaagc

SEQ ID NO: 1559218 - DNA, 25 bp, Homo sapien
aggcacagttccaacagctaatctt

SEQ ID NO: 1559219 - DNA, 25 bp, Homo sapien
tgtgcaaagcacacatgaagtagtt

SEQ ID NO: 1559220 - DNA, 25 bp, Homo sapien
caccactgagtgagaggagacagcc

SEQ ID NO: 1559221 - DNA, 25 bp, Homo sapien
tgagacacaccactgagtgagagga

SEQ ID NO: 1559222 - DNA, 25 bp, Homo sapien
tcctgcgccttgctgaagagcgtct

SEQ ID NO: 1559223 - DNA, 25 bp, Homo sapien
tcccagttgcgctcgaagtagtcca

SEQ ID NO: 1559224 - DNA, 25 bp, Homo sapien
tggtgcgcgacgtcaggaagaacac

SEQ ID NO: 1559225 - DNA, 25 bp, Homo sapien
gtccaccagcagcatgcgagggaag

SEQ ID NO: 1559226 - DNA, 25 bp, Homo sapien
cctccagccaaggccccccgccatc

SEQ ID NO: 1559227 - DNA, 25 bp, Homo sapien
tcctccagccaaggccccccgccat

SEQ ID NO: 1559228 - DNA, 25 bp, Homo sapien
ctccagccaaggccccccgccatcg

SEQ ID NO: 1559229 - DNA, 25 bp, Homo sapien
ctccccagtcgcctgtctccaggcc

SEQ ID NO: 1559230 - DNA, 25 bp, Homo sapien
gtctctggtttccagtgcccttgcc

SEQ ID NO: 1559231 - DNA, 25 bp, Homo sapien
ttcgaactgagccccgccccagtct

SEQ ID NO: 1559232 - DNA, 25 bp, Homo sapien
tctgggctcccctccaaatacttcc

SEQ ID NO: 1559233 - DNA, 25 bp, Homo sapien
gtatacccttccaatcctcttagcg

SEQ ID NO: 1559234 - DNA, 25 bp, Homo sapien
tttctctaacttcgaccctctcaag

SEQ ID NO: 1559235 - DNA, 25 bp, Homo sapien
cctcaggtcggtggtactcctgcga

SEQ ID NO: 1559236 - DNA, 25 bp, Homo sapien
taatctctggccctctcaggtgccc

SEQ ID NO: 1559237 - DNA, 25 bp, Homo sapien
tgccctttcatcgtgcagctgcgcc

SEQ ID NO: 1559238 - DNA, 25 bp, Homo sapien
ttctctacttctgactgtggcccct

SEQ ID NO: 1559239 - DNA, 25 bp, Homo sapien
tggaccagaactatatcctccaggc

SEQ ID NO: 1559240 - DNA, 25 bp, Homo sapien
agtccccctgccctttcatcgtgca

SEQ ID NO: 1559241 - DNA, 25 bp, Homo sapien
tgggctgccttccaatacagtcccc

SEQ ID NO: 1559242 - DNA, 25 bp, Homo sapien
tgcagccaggtgttcactcctcgcc

SEQ ID NO: 1559243 - DNA, 25 bp, Homo sapien
gggtgccagacacgactccattccc

SEQ ID NO: 1559244 - DNA, 25 bp, Homo sapien
actccatccctcgtccggctcggct

SEQ ID NO: 1559245 - DNA, 25 bp, Homo sapien
tgctcggaatttggccaggggttcc

SEQ ID NO: 1559246 - DNA, 25 bp, Homo sapien
ctgctcggaatttggccaggggttc

SEQ ID NO: 1559247 - DNA, 25 bp, Homo sapien
ccccagtgaggaggcgcgctgcaaa

SEQ ID NO: 1559248 - DNA, 25 bp, Homo sapien
tgagcaggtccatgtggaataaggc

SEQ ID NO: 1559249 - DNA, 25 bp, Homo sapien
tccaggaagaagtccgaggtgccgt

SEQ ID NO: 1559250 - DNA, 25 bp, Homo sapien
gaggtgccgtccttaagggcaaagc

SEQ ID NO: 1559251 - DNA, 25 bp, Homo sapien
tatctttgggatcgaagaatgccct

SEQ ID NO: 1559252 - DNA, 25 bp, Homo sapien
ttggcctcagccctattatctttgg

SEQ ID NO: 1559253 - DNA, 25 bp, Homo sapien
cagagaggcaaactgccatgaggag

SEQ ID NO: 1559254 - DNA, 25 bp, Homo sapien
agcttgcccttggacccagagaggc

SEQ ID NO: 1559255 - DNA, 25 bp, Homo sapien
tgtcttctgtactttctccctttcc

SEQ ID NO: 1559256 - DNA, 25 bp, Homo sapien
tcatctgtcttctgtactttctccc

SEQ ID NO: 1559257 - DNA, 25 bp, Homo sapien
tctgtcttctgtactttctcccttt

SEQ ID NO: 1559258 - DNA, 25 bp, Homo sapien
catctgtcttctgtactttctccct

SEQ ID NO: 1559259 - DNA, 25 bp, Homo sapien
tgtctcatctccgatttttcttccc

SEQ ID NO: 1559260 - DNA, 25 bp, Homo sapien
gggtcgatgtctccaggtcttggag

SEQ ID NO: 1559261 - DNA, 25 bp, Homo sapien
tccaatcctgaagaacaatagtcca

SEQ ID NO: 1559262 - DNA, 25 bp, Homo sapien
ctctcttcagaaggcgatgggggtc

SEQ ID NO: 1559263 - DNA, 25 bp, Homo sapien
gactcacgtccacgctaaagtttga

SEQ ID NO: 1559264 - DNA, 25 bp, Homo sapien
aatgctgagctacttcaacctggac

SEQ ID NO: 1559265 - DNA, 25 bp, Homo sapien
tattttaagaaggtgcccacgtgac

SEQ ID NO: 1559266 - DNA, 25 bp, Homo sapien
gagcttgctagaatgttgggcccta

SEQ ID NO: 1559267 - DNA, 25 bp, Homo sapien
tcagcgggtaaagagctcctcccca

SEQ ID NO: 1559268 - DNA, 25 bp, Homo sapien
ctgggcccgcgggttctactgcgca

SEQ ID NO: 1559269 - DNA, 25 bp, Homo sapien
ctctcccgccagcagacgaaggaaa

SEQ ID NO: 1559270 - DNA, 25 bp, Homo sapien
cacactcagcaaagggacttggacg

SEQ ID NO: 1559271 - DNA, 25 bp, Homo sapien
aaaacaagcaaacaattgtatatgg

SEQ ID NO: 1559272 - DNA, 25 bp, Homo sapien
tacggtaggcgcttcctgaaatgtg

SEQ ID NO: 1559273 - DNA, 25 bp, Homo sapien
gactcattgggactgctctagatct

SEQ ID NO: 1559274 - DNA, 25 bp, Homo sapien
taaaaatcctagaacaactggctgg

SEQ ID NO: 1559275 - DNA, 25 bp, Homo sapien
gatcttcactatccaatacggtagg

SEQ ID NO: 1559276 - DNA, 25 bp, Homo sapien
tcctctgatagacgttttttagttc

SEQ ID NO: 1559277 - DNA, 25 bp, Homo sapien
ccacttaaagtggaatctaggcact

SEQ ID NO: 1559278 - DNA, 25 bp, Homo sapien
ctcagtcagccagtttgttatgtct

SEQ ID NO: 1559279 - DNA, 25 bp, Homo sapien
cttttagagtggttctgataggtac

SEQ ID NO: 1559280 - DNA, 25 bp, Homo sapien
ggtaaatcaactccacagaaccacc

SEQ ID NO: 1559281 - DNA, 25 bp, Homo sapien
tcccactggtgtgtagcctgctaca

SEQ ID NO: 1559282 - DNA, 25 bp, Homo sapien
tattctgagacagacattcctggca

SEQ ID NO: 1559283 - DNA, 25 bp, Homo sapien
taaatgttcatggtcaactccaagg

SEQ ID NO: 1559284 - DNA, 25 bp, Homo sapien
gctgtgcagacgctgggctctccgc

SEQ ID NO: 1559285 - DNA, 25 bp, Homo sapien
aaaagggcagatggttgggtagcat

SEQ ID NO: 1559286 - DNA, 25 bp, Homo sapien
gcaggaggatggtatgggtggctct

SEQ ID NO: 1559287 - DNA, 25 bp, Homo sapien
agcacacaaagcaaccaagcagcag

SEQ ID NO: 1559288 - DNA, 25 bp, Homo sapien
gccctagtgtacaggaaggagaaac

SEQ ID NO: 1559289 - DNA, 25 bp, Homo sapien
gtttcaggagccctagtgtacagga

SEQ ID NO: 1559290 - DNA, 25 bp, Homo sapien
tgttcctcttagtcagcaaggaagg

SEQ ID NO: 1559291 - DNA, 25 bp, Homo sapien
ttgttggtaggacaccgccaggctg

SEQ ID NO: 1559292 - DNA, 25 bp, Homo sapien
cacgattaggctgaggtcatgcatg

SEQ ID NO: 1559293 - DNA, 25 bp, Homo sapien
tgtgttcagtcaatatgccccatcc

SEQ ID NO: 1559294 - DNA, 25 bp, Homo sapien
aaaagggttacacacattctcggca

SEQ ID NO: 1559295 - DNA, 25 bp, Homo sapien
gacacttttgctgagcatggccaat

SEQ ID NO: 1559296 - DNA, 25 bp, Homo sapien
atagaagaccacctaaacaggcttt

SEQ ID NO: 1559297 - DNA, 25 bp, Homo sapien
tatagaagaccacctaaacaggctt

SEQ ID NO: 1559298 - DNA, 25 bp, Homo sapien
tccttgcgggctccggagactccgg

SEQ ID NO: 1559299 - DNA, 25 bp, Homo sapien
ctgggaagcgcgctctctgcgcagc

SEQ ID NO: 1559300 - DNA, 25 bp, Homo sapien
ggcttcctgcatttcccaaggaaag

SEQ ID NO: 1559301 - DNA, 25 bp, Homo sapien
gccaccgttcctaggctctccagct

SEQ ID NO: 1559302 - DNA, 25 bp, Homo sapien
cagatgtctctgtcggtggcgcagc

SEQ ID NO: 1559303 - DNA, 25 bp, Homo sapien
cgcagcccaggagcgtctcggagct

SEQ ID NO: 1559304 - DNA, 25 bp, Homo sapien
tggcgcagcccaaaagcgcgcgcag

SEQ ID NO: 1559305 - DNA, 25 bp, Homo sapien
tcttccactagctccggcttccaga

SEQ ID NO: 1559306 - DNA, 25 bp, Homo sapien
cagaaactaccccaccaatgttagc

SEQ ID NO: 1559307 - DNA, 25 bp, Homo sapien
ctaccccaccaatgttagcttgact

SEQ ID NO: 1559308 - DNA, 25 bp, Homo sapien
tgttagcttgacttgtacagggaca

SEQ ID NO: 1559309 - DNA, 25 bp, Homo sapien
agcttgacttgtacagggacaaaca

SEQ ID NO: 1559310 - DNA, 25 bp, Homo sapien
cttcaaggaggcaggtgaggcagag

SEQ ID NO: 1559311 - DNA, 25 bp, Homo sapien
tttgtcaccaacgtgacggccagtc

SEQ ID NO: 1559312 - DNA, 25 bp, Homo sapien
tgtcaccaacgtgacggccagtcct

SEQ ID NO: 1559313 - DNA, 25 bp, Homo sapien
tcaccaacgtgacggccagtcctgg

SEQ ID NO: 1559314 - DNA, 25 bp, Homo sapien
atttgtcaccaacgtgacggccagt

SEQ ID NO: 1559315 - DNA, 25 bp, Homo sapien
ccgtgagtgtgggcgggtgcctgta

SEQ ID NO: 1559316 - DNA, 25 bp, Homo sapien
gaggttgcaataagctatgatcctc

SEQ ID NO: 1559317 - DNA, 25 bp, Homo sapien
ggttgcaataagctatgatcctccc

SEQ ID NO: 1559318 - DNA, 25 bp, Homo sapien
caataagctatgatcctcccactgc

SEQ ID NO: 1559319 - DNA, 25 bp, Homo sapien
agccacgtctgcgaaggtcaccgag

SEQ ID NO: 1559320 - DNA, 25 bp, Homo sapien
cagccacgtctgcgaaggtcaccga

SEQ ID NO: 1559321 - DNA, 25 bp, Homo sapien
ccacgtctgcgaaggtcaccgagtc

SEQ ID NO: 1559322 - DNA, 25 bp, Homo sapien
gccacgtctgcgaaggtcaccgagt

SEQ ID NO: 1559323 - DNA, 25 bp, Homo sapien
ctatgaatgccaagttcctagaatt

SEQ ID NO: 1559324 - DNA, 25 bp, Homo sapien
gccaagttcctagaattttccagca

SEQ ID NO: 1559325 - DNA, 25 bp, Homo sapien
gaatgccaagttcctagaattttcc

SEQ ID NO: 1559326 - DNA, 25 bp, Homo sapien
tgccaagttcctagaattttccagc

SEQ ID NO: 1559327 - DNA, 25 bp, Homo sapien
catcacggactaagtgcaggaaggg

SEQ ID NO: 1559328 - DNA, 25 bp, Homo sapien
agcactggtcccatcacggactaag

SEQ ID NO: 1559329 - DNA, 25 bp, Homo sapien
ggttccaaaccagcactggtcccat

SEQ ID NO: 1559330 - DNA, 25 bp, Homo sapien
ctggtcccatcacggactaagtgca

SEQ ID NO: 1559331 - DNA, 25 bp, Homo sapien
agaatatccggctgaggggttgcgt

SEQ ID NO: 1559332 - DNA, 25 bp, Homo sapien
tttaggaagaatatccggctgaggg

SEQ ID NO: 1559333 - DNA, 25 bp, Homo sapien
ttttaggaagaatatccggctgagg

SEQ ID NO: 1559334 - DNA, 25 bp, Homo sapien
atatccggctgaggggttgcgtctt

SEQ ID NO: 1559335 - DNA, 25 bp, Homo sapien
ctgggaactgatgctcgtgagacac

SEQ ID NO: 1559336 - DNA, 25 bp, Homo sapien
gagtgctgggaactgatgctcgtga

SEQ ID NO: 1559337 - DNA, 25 bp, Homo sapien
gtgtggttcctctgttttggggcat

SEQ ID NO: 1559338 - DNA, 25 bp, Homo sapien
tgatgctcgtgagacacactctgtt

SEQ ID NO: 1559339 - DNA, 25 bp, Homo sapien
ctgcaggtaggtttagagtggttcc

SEQ ID NO: 1559340 - DNA, 25 bp, Homo sapien
cttatggaatctccctgtgaaggca

SEQ ID NO: 1559341 - DNA, 25 bp, Homo sapien
gagtcacgtgttaggatacattgtc

SEQ ID NO: 1559342 - DNA, 25 bp, Homo sapien
ctatcgtttaagacaggattatact

SEQ ID NO: 1559343 - DNA, 25 bp, Homo sapien
tccaaatggattccgctggtgcctg

SEQ ID NO: 1559344 - DNA, 25 bp, Homo sapien
cgaccatgagtgttgtgtgccctaa

SEQ ID NO: 1559345 - DNA, 25 bp, Homo sapien
gcaatgactcttgtgtgaaccggaa

SEQ ID NO: 1559346 - DNA, 25 bp, Homo sapien
aaccggaatttggagcgttggcaga

SEQ ID NO: 1559347 - DNA, 25 bp, Homo sapien
tcctcctcacatgtttggtacagtc

SEQ ID NO: 1559348 - DNA, 25 bp, Homo sapien
ctcacatgtttggtacagtcagaaa

SEQ ID NO: 1559349 - DNA, 25 bp, Homo sapien
cttgagctcccttccaatatgtcct

SEQ ID NO: 1559350 - DNA, 25 bp, Homo sapien
tcactcatgctaaccccttgagctc

SEQ ID NO: 1559351 - DNA, 25 bp, Homo sapien
tatttccgtaaggagtctctgcagt

SEQ ID NO: 1559352 - DNA, 25 bp, Homo sapien
ttcttgtatgaaccatgaatttgag

SEQ ID NO: 1559353 - DNA, 25 bp, Homo sapien
gaatttgagaccacgctgaaggctt

SEQ ID NO: 1559354 - DNA, 25 bp, Homo sapien
tattccttttagattcgcagtttct

SEQ ID NO: 1559355 - DNA, 25 bp, Homo sapien
gcatgagccaccgcggccggcaggt

SEQ ID NO: 1559356 - DNA, 25 bp, Homo sapien
catgagccaccgcggccggcaggtc

SEQ ID NO: 1559357 - DNA, 25 bp, Homo sapien
gcaacatgagtggtaagtgtttaaa

SEQ ID NO: 1559358 - DNA, 25 bp, Homo sapien
gtggattcacatgcaacatgagtgg

SEQ ID NO: 1559359 - DNA, 25 bp, Homo sapien
cagttgtagcctcccttcaggatgt

SEQ ID NO: 1559360 - DNA, 25 bp, Homo sapien
tttattccagttgtagcctcccttc

SEQ ID NO: 1559361 - DNA, 25 bp, Homo sapien
gaaatcaaagggtgcccttgaagac

SEQ ID NO: 1559362 - DNA, 25 bp, Homo sapien
agacaggagtcatttgaacgctggg

SEQ ID NO: 1559363 - DNA, 25 bp, Homo sapien
gagggagtggtgagaagggaaatca

SEQ ID NO: 1559364 - DNA, 25 bp, Homo sapien
agctgaagacaggagtcatttgaac

SEQ ID NO: 1559365 - DNA, 25 bp, Homo sapien
gagctggagtcggagtcttgtccct

SEQ ID NO: 1559366 - DNA, 25 bp, Homo sapien
ggagtcttgtccctcgctcgggcct

SEQ ID NO: 1559367 - DNA, 25 bp, Homo sapien
cgagagccgcgaaaaaagtcagagc

SEQ ID NO: 1559368 - DNA, 25 bp, Homo sapien
gagccgcgaaaaaagtcagagctgg

SEQ ID NO: 1559369 - DNA, 25 bp, Homo sapien
catcttctggaggaaatggatagga

SEQ ID NO: 1559370 - DNA, 25 bp, Homo sapien
gacatcttctggaggaaatggatag

SEQ ID NO: 1559371 - DNA, 25 bp, Homo sapien
acatcttctggaggaaatggatagg

SEQ ID NO: 1559372 - DNA, 25 bp, Homo sapien
aagcagtataagaatgaggatgtga

SEQ ID NO: 1559373 - DNA, 25 bp, Homo sapien
cacgaaaagcagtataagaatgagg

SEQ ID NO: 1559374 - DNA, 25 bp, Homo sapien
gtccaaagtggccacgaaaagcagt

SEQ ID NO: 1559375 - DNA, 25 bp, Homo sapien
tggccacgaaaagcagtataagaat

SEQ ID NO: 1559376 - DNA, 25 bp, Homo sapien
cagagattcagggactctttcccag

SEQ ID NO: 1559377 - DNA, 25 bp, Homo sapien
gagattcagggactctttcccaggg

SEQ ID NO: 1559378 - DNA, 25 bp, Homo sapien
ggactctttcccagggagagtccac

SEQ ID NO: 1559379 - DNA, 25 bp, Homo sapien
ctttcccagggagagtccaccagga

SEQ ID NO: 1559380 - DNA, 25 bp, Homo sapien
caggcccatgttttggtgtcgttgt

SEQ ID NO: 1559381 - DNA, 25 bp, Homo sapien
ctgacattactgcaggcccatgttt

SEQ ID NO: 1559382 - DNA, 25 bp, Homo sapien
tgtcgttgttccacgtgcagtcgta

SEQ ID NO: 1559383 - DNA, 25 bp, Homo sapien
ttttggtgtcgttgttccacgtgca

SEQ ID NO: 1559384 - DNA, 25 bp, Homo sapien
ctttgaagaccagtcccgccgccct

SEQ ID NO: 1559385 - DNA, 25 bp, Homo sapien
gaagaccagtcccgccgccctcacc

SEQ ID NO: 1559386 - DNA, 25 bp, Homo sapien
ccagtcccgccgccctcacccctca

SEQ ID NO: 1559387 - DNA, 25 bp, Homo sapien
cagtcccgccgccctcacccctcac

SEQ ID NO: 1559388 - DNA, 25 bp, Homo sapien
ggcgggacatgcattagccctaggc

SEQ ID NO: 1559389 - DNA, 25 bp, Homo sapien
tcccatgaggacacgaagggtttac

SEQ ID NO: 1559390 - DNA, 25 bp, Homo sapien
aattctcagtcccatgaggacacga

SEQ ID NO: 1559391 - DNA, 25 bp, Homo sapien
gggacatgcattagccctaggcact

SEQ ID NO: 1559392 - DNA, 25 bp, Homo sapien
catcaccgtgggtccagagttccag

SEQ ID NO: 1559393 - DNA, 25 bp, Homo sapien
agagggggacatcaccgtgggtcca

SEQ ID NO: 1559394 - DNA, 25 bp, Homo sapien
agggggacatcaccgtgggtccaga

SEQ ID NO: 1559395 - DNA, 25 bp, Homo sapien
gggacatcaccgtgggtccagagtt

SEQ ID NO: 1559396 - DNA, 25 bp, Homo sapien
ggccggtggcatagaagagacctcc

SEQ ID NO: 1559397 - DNA, 25 bp, Homo sapien
gagacctcctcgtcgcatggtgtag

SEQ ID NO: 1559398 - DNA, 25 bp, Homo sapien
tcgtcgcatggtgtagagctggaac

SEQ ID NO: 1559399 - DNA, 25 bp, Homo sapien
aggccggtggcatagaagagacctc

SEQ ID NO: 1559400 - DNA, 25 bp, Homo sapien
gcgaagcagtatccgaagctgcccc

SEQ ID NO: 1559401 - DNA, 25 bp, Homo sapien
aggccagggcgaagcagtatccgaa

SEQ ID NO: 1559402 - DNA, 25 bp, Homo sapien
gatcaaggcgccagtaaacaccgcc

SEQ ID NO: 1559403 - DNA, 25 bp, Homo sapien
ccaggatctcctcggcgtgaatggc

SEQ ID NO: 1559404 - DNA, 25 bp, Homo sapien
gcttccgtaggtggatgtagatgat

SEQ ID NO: 1559405 - DNA, 25 bp, Homo sapien
cccgcttccgtaggtggatgtagat

SEQ ID NO: 1559406 - DNA, 25 bp, Homo sapien
ccgcttccgtaggtggatgtagatg

SEQ ID NO: 1559407 - DNA, 25 bp, Homo sapien
tccgtaggtggatgtagatgatgcc

SEQ ID NO: 1559408 - DNA, 25 bp, Homo sapien
ttattttttggaggacgcgcggcga

SEQ ID NO: 1559409 - DNA, 25 bp, Homo sapien
ggcgggggcagccgagcgaggcggg

SEQ ID NO: 1559410 - DNA, 25 bp, Homo sapien
gggggcagccgagcgaggcggggcg

SEQ ID NO: 1559411 - DNA, 25 bp, Homo sapien
aggggcgggggcagccgagcgaggc

SEQ ID NO: 1559412 - DNA, 25 bp, Homo sapien
acaggcgtgtgtcagtacgcctggc

SEQ ID NO: 1559413 - DNA, 25 bp, Homo sapien
tcagtcccccgaatagccaggatta

SEQ ID NO: 1559414 - DNA, 25 bp, Homo sapien
ttgtgcctcagtcccccgaatagcc

SEQ ID NO: 1559415 - DNA, 25 bp, Homo sapien
gcgtgtgtcagtacgcctggctaat

SEQ ID NO: 1559416 - DNA, 25 bp, Homo sapien
tggaatggcagtgctgaggtttggg

SEQ ID NO: 1559417 - DNA, 25 bp, Homo sapien
tcttagaatcgcggtctccccttta

SEQ ID NO: 1559418 - DNA, 25 bp, Homo sapien
tctggagggccaatctgcgtcacct

SEQ ID NO: 1559419 - DNA, 25 bp, Homo sapien
ctcctggtccctagcgccacctcag

SEQ ID NO: 1559420 - DNA, 25 bp, Homo sapien
gtgggagccagggtgctgggcgctg

SEQ ID NO: 1559421 - DNA, 25 bp, Homo sapien
gcagctgttttcctttggggccact

SEQ ID NO: 1559422 - DNA, 25 bp, Homo sapien
aggtgggagccagggtgctgggcgc

SEQ ID NO: 1559423 - DNA, 25 bp, Homo sapien
tgggcactgccgtccgggggcttca

SEQ ID NO: 1559424 - DNA, 25 bp, Homo sapien
tgcacggcttcgctgttggccagct

SEQ ID NO: 1559425 - DNA, 25 bp, Homo sapien
cgtgatggtcttgggccttctcaga

SEQ ID NO: 1559426 - DNA, 25 bp, Homo sapien
tctcagaaactgcacggcttcgctg

SEQ ID NO: 1559427 - DNA, 25 bp, Homo sapien
tcgaagacccgcgtgatggtcttgg

SEQ ID NO: 1559428 - DNA, 25 bp, Homo sapien
cacacccagcctgtactgtctaata

SEQ ID NO: 1559429 - DNA, 25 bp, Homo sapien
gtgcaaagtgaggtagccacatgtg

SEQ ID NO: 1559430 - DNA, 25 bp, Homo sapien
ggctgtggctaccccactggacatc

SEQ ID NO: 1559431 - DNA, 25 bp, Homo sapien
tgtctaatatgagagtccccagcca

SEQ ID NO: 1559432 - DNA, 25 bp, Homo sapien
gtcccagccctgaagcctggccttg

SEQ ID NO: 1559433 - DNA, 25 bp, Homo sapien
gccctgaagcctggccttggaggcc

SEQ ID NO: 1559434 - DNA, 25 bp, Homo sapien
gctccccagtgcctcaggactgagt

SEQ ID NO: 1559435 - DNA, 25 bp, Homo sapien
agtgcctcaggactgagtcccagcc

SEQ ID NO: 1559436 - DNA, 25 bp, Homo sapien
cttgttctggtagccgtcggtcagc

SEQ ID NO: 1559437 - DNA, 25 bp, Homo sapien
atcttgttctggtagccgtcggtca

SEQ ID NO: 1559438 - DNA, 25 bp, Homo sapien
gttctggtagccgtcggtcagcagg

SEQ ID NO: 1559439 - DNA, 25 bp, Homo sapien
tctggtagccgtcggtcagcaggga

SEQ ID NO: 1559440 - DNA, 25 bp, Homo sapien
ctgtcttgaagcgggtgccggcaat

SEQ ID NO: 1559441 - DNA, 25 bp, Homo sapien
agccggctcccacggcaaagctgca

SEQ ID NO: 1559442 - DNA, 25 bp, Homo sapien
ccggcaatgcgggtctcctgtgtgt

SEQ ID NO: 1559443 - DNA, 25 bp, Homo sapien
ctgtgtgtccaggacgaggaaggcc

SEQ ID NO: 1559444 - DNA, 25 bp, Homo sapien
gaagcagaaacccatgaaccagaca

SEQ ID NO: 1559445 - DNA, 25 bp, Homo sapien
ctttgggcggcgaatgctgccattg

SEQ ID NO: 1559446 - DNA, 25 bp, Homo sapien
aggaactctttgggcggcgaatgct

SEQ ID NO: 1559447 - DNA, 25 bp, Homo sapien
aagcagaaacccatgaaccagacaa

SEQ ID NO: 1559448 - DNA, 25 bp, Homo sapien
gagagggactgggctggggactggc

SEQ ID NO: 1559449 - DNA, 25 bp, Homo sapien
ggtcaggagagggactgggctgggg

SEQ ID NO: 1559450 - DNA, 25 bp, Homo sapien
tcaggagagggactgggctggggac

SEQ ID NO: 1559451 - DNA, 25 bp, Homo sapien
aggagagggactgggctggggactg

SEQ ID NO: 1559452 - DNA, 25 bp, Homo sapien
agcatcatttcggaggtcctggaat

SEQ ID NO: 1559453 - DNA, 25 bp, Homo sapien
aagcgcttgtaagggactggagcat

SEQ ID NO: 1559454 - DNA, 25 bp, Homo sapien
aggaagcgcttgtaagggactggag

SEQ ID NO: 1559455 - DNA, 25 bp, Homo sapien
ttcggaggtcctggaatgccaggta

SEQ ID NO: 1559456 - DNA, 25 bp, Homo sapien
agggcaaggggagggtggtcagcac

SEQ ID NO: 1559457 - DNA, 25 bp, Homo sapien
aaggggagggtggtcagcaccatgc

SEQ ID NO: 1559458 - DNA, 25 bp, Homo sapien
gagggcaaggggagggtggtcagca

SEQ ID NO: 1559459 - DNA, 25 bp, Homo sapien
gggagggtggtcagcaccatgccac

SEQ ID NO: 1559460 - DNA, 25 bp, Homo sapien
ggggggactttggagcggtcagaca

SEQ ID NO: 1559461 - DNA, 25 bp, Homo sapien
gagctagcataactcaggctgttgg

SEQ ID NO: 1559462 - DNA, 25 bp, Homo sapien
tttggagcggtcagacagggggaca

SEQ ID NO: 1559463 - DNA, 25 bp, Homo sapien
gcatcatagcaagccggggggactt

SEQ ID NO: 1559464 - DNA, 25 bp, Homo sapien
ctctttattgatttggataaggata

SEQ ID NO: 1559465 - DNA, 25 bp, Homo sapien
tctctctttattgatttggataagg

SEQ ID NO: 1559466 - DNA, 25 bp, Homo sapien
gattctctctttattgatttggata

SEQ ID NO: 1559467 - DNA, 25 bp, Homo sapien
aacccttctggagggaggattctct

SEQ ID NO: 1559468 - DNA, 25 bp, Homo sapien
tgaaacctggcgagtccaaactgag

SEQ ID NO: 1559469 - DNA, 25 bp, Homo sapien
tatgtgtgactgtcaagcccctgaa

SEQ ID NO: 1559470 - DNA, 25 bp, Homo sapien
gctgcactgtctggtagggtagcca

SEQ ID NO: 1559471 - DNA, 25 bp, Homo sapien
gaatggatgtccaaactgtcgtaga

SEQ ID NO: 1559472 - DNA, 25 bp, Homo sapien
tgagtttgccggcatagccccggtc

SEQ ID NO: 1559473 - DNA, 25 bp, Homo sapien
gccccactggttgccaaacactaaa

SEQ ID NO: 1559474 - DNA, 25 bp, Homo sapien
agatgaagagctttcccatccaggg

SEQ ID NO: 1559475 - DNA, 25 bp, Homo sapien
cacaccatgtttttgtacagaactg

SEQ ID NO: 1559476 - DNA, 25 bp, Homo sapien
ttccagcgtctgtgtctatctgtct

SEQ ID NO: 1559477 - DNA, 25 bp, Homo sapien
gtcacctctgaagctagtggctggt

SEQ ID NO: 1559478 - DNA, 25 bp, Homo sapien
aactgcttgccccttcctcgcttgg

SEQ ID NO: 1559479 - DNA, 25 bp, Homo sapien
tgtgaggagcgggagattgcctgct

SEQ ID NO: 1559480 - DNA, 25 bp, Homo sapien
gctctggaagttgggccccggacat

SEQ ID NO: 1559481 - DNA, 25 bp, Homo sapien
aaggttgcggccacctggactaggc

SEQ ID NO: 1559482 - DNA, 25 bp, Homo sapien
actaggcgaggacgtggctacacat

SEQ ID NO: 1559483 - DNA, 25 bp, Homo sapien
agcgaccccaagattccgaggaggg

SEQ ID NO: 1559484 - DNA, 25 bp, Homo sapien
tagggctaaagtccccaacactcat

SEQ ID NO: 1559485 - DNA, 25 bp, Homo sapien
catagggctaaagtccccaacactc

SEQ ID NO: 1559486 - DNA, 25 bp, Homo sapien
tgcatagggctaaagtccccaacac

SEQ ID NO: 1559487 - DNA, 25 bp, Homo sapien
atctgcatagggctaaagtccccaa

SEQ ID NO: 1559488 - DNA, 25 bp, Homo sapien
tgagcgcccgggccgggagagacgg

SEQ ID NO: 1559489 - DNA, 25 bp, Homo sapien
gagagacggggaggagagggaggca

SEQ ID NO: 1559490 - DNA, 25 bp, Homo sapien
cgggagagacggggaggagagggag

SEQ ID NO: 1559491 - DNA, 25 bp, Homo sapien
ctgagcgcccgggccgggagagacg

SEQ ID NO: 1559492 - DNA, 25 bp, Homo sapien
gaacacgagcgccacgttgagcggc

SEQ ID NO: 1559493 - DNA, 25 bp, Homo sapien
cagcagcatcttagcggggccccga

SEQ ID NO: 1559494 - DNA, 25 bp, Homo sapien
ctcctccgggaacgggctggcgcag

SEQ ID NO: 1559495 - DNA, 25 bp, Homo sapien
tacgcgggccccgagaacacgagcg

SEQ ID NO: 1559496 - DNA, 25 bp, Homo sapien
ccacggccgggcccaggcgtgccgc

SEQ ID NO: 1559497 - DNA, 25 bp, Homo sapien
cgccgccacggccgggcccaggcgt

SEQ ID NO: 1559498 - DNA, 25 bp, Homo sapien
gccacggccgggcccaggcgtgccg

SEQ ID NO: 1559499 - DNA, 25 bp, Homo sapien
ccgccacggccgggcccaggcgtgc

SEQ ID NO: 1559500 - DNA, 25 bp, Homo sapien
cgggtccgagccgttgagcaccagc

SEQ ID NO: 1559501 - DNA, 25 bp, Homo sapien
ggaagtcgaggatgggcgcgacggc

SEQ ID NO: 1559502 - DNA, 25 bp, Homo sapien
atgggcagcgaggtctgcgccgaca

SEQ ID NO: 1559503 - DNA, 25 bp, Homo sapien
gtcgtcttcgaagaccacgccgtgc

SEQ ID NO: 1559504 - DNA, 25 bp, Homo sapien
tgctcggtggaagagcccagctgca

SEQ ID NO: 1559505 - DNA, 25 bp, Homo sapien
ttgctcggtggaagagcccagctgc

SEQ ID NO: 1559506 - DNA, 25 bp, Homo sapien
gttgctcggtggaagagcccagctg

SEQ ID NO: 1559507 - DNA, 25 bp, Homo sapien
cggctacaaaggacgtccagtcata

SEQ ID NO: 1559508 - DNA, 25 bp, Homo sapien
gacgtagccagatccagtgaggcca

SEQ ID NO: 1559509 - DNA, 25 bp, Homo sapien
atctgcgcgctgacactgcggagct

SEQ ID NO: 1559510 - DNA, 25 bp, Homo sapien
cgtcagtcagcacctcaatgtagga

SEQ ID NO: 1559511 - DNA, 25 bp, Homo sapien
ctgcaaacagcccggcaggcagggg

SEQ ID NO: 1559512 - DNA, 25 bp, Homo sapien
aaacagcccggcaggcaggggggcg

SEQ ID NO: 1559513 - DNA, 25 bp, Homo sapien
caaacagcccggcaggcaggggggc

SEQ ID NO: 1559514 - DNA, 25 bp, Homo sapien
agcccggcaggcaggggggcgcctc

SEQ ID NO: 1559515 - DNA, 25 bp, Homo sapien
tgggcgcgacagtcgtggccgagct

SEQ ID NO: 1559516 - DNA, 25 bp, Homo sapien
tatgcagactctcgccgcggtgggt

SEQ ID NO: 1559517 - DNA, 25 bp, Homo sapien
tcgtggccgagctcaggaaggaaac

SEQ ID NO: 1559518 - DNA, 25 bp, Homo sapien
ggaaggaaaccataatcacgcagca

SEQ ID NO: 1559519 - DNA, 25 bp, Homo sapien
cggggttttgctgtgtcggccagga

SEQ ID NO: 1559520 - DNA, 25 bp, Homo sapien
gacggggttttgctgtgtcggccag

SEQ ID NO: 1559521 - DNA, 25 bp, Homo sapien
ggggttttgctgtgtcggccaggat

SEQ ID NO: 1559522 - DNA, 25 bp, Homo sapien
acggggttttgctgtgtcggccagg

SEQ ID NO: 1559523 - DNA, 25 bp, Homo sapien
atcccacgtgatgttcatgaagtac

SEQ ID NO: 1559524 - DNA, 25 bp, Homo sapien
gagtaatcccggttatcccacgtga

SEQ ID NO: 1559525 - DNA, 25 bp, Homo sapien
gggttcactaggaagccgtcctcat

SEQ ID NO: 1559526 - DNA, 25 bp, Homo sapien
tcctcattgaaggagtaatcccggt

SEQ ID NO: 1559527 - DNA, 25 bp, Homo sapien
atagcgggaccacagcgggtacttg

SEQ ID NO: 1559528 - DNA, 25 bp, Homo sapien
ggtctgcaggctccacgatgacaaa

SEQ ID NO: 1559529 - DNA, 25 bp, Homo sapien
actggctgcaggaagcgaccatagc

SEQ ID NO: 1559530 - DNA, 25 bp, Homo sapien
tgacaaacggcctttcctccagcgt

SEQ ID NO: 1559531 - DNA, 25 bp, Homo sapien
cttgcagcagcgcttttccgggcgg

SEQ ID NO: 1559532 - DNA, 25 bp, Homo sapien
cagaatgtcgatgcagaaacccttg

SEQ ID NO: 1559533 - DNA, 25 bp, Homo sapien
tgccgttccagacgccatcgatctt

SEQ ID NO: 1559534 - DNA, 25 bp, Homo sapien
tagctgaagccgatggtatgcgcca

SEQ ID NO: 1559535 - DNA, 25 bp, Homo sapien
ggacggagaagtccacgatctcgga

SEQ ID NO: 1559536 - DNA, 25 bp, Homo sapien
gccaccatgacgctgatgccggtct

SEQ ID NO: 1559537 - DNA, 25 bp, Homo sapien
gggacaccgtgccattgctgcgcgc

SEQ ID NO: 1559538 - DNA, 25 bp, Homo sapien
atggccatgtctgcgcgctggtaga

SEQ ID NO: 1559539 - DNA, 25 bp, Homo sapien
tgaggtactcgaagatgaaaacagt

SEQ ID NO: 1559540 - DNA, 25 bp, Homo sapien
ttgtaaccaacaggactgaggtact

SEQ ID NO: 1559541 - DNA, 25 bp, Homo sapien
agtgacggcgaccacagtgaggcac

SEQ ID NO: 1559542 - DNA, 25 bp, Homo sapien
agatgaaaacagtgacggcgaccac

SEQ ID NO: 1559543 - DNA, 25 bp, Homo sapien
ctgtctctgtggttcgggatctccg

SEQ ID NO: 1559544 - DNA, 25 bp, Homo sapien
gtctctgtggttcgggatctccgag

SEQ ID NO: 1559545 - DNA, 25 bp, Homo sapien
ctgtggttcgggatctccgaggcgg

SEQ ID NO: 1559546 - DNA, 25 bp, Homo sapien
ctctgtggttcgggatctccgaggc

SEQ ID NO: 1559547 - DNA, 25 bp, Homo sapien
caggacgtggacatggaccccaaat

SEQ ID NO: 1559548 - DNA, 25 bp, Homo sapien
ggacgtggacatggaccccaaatcc

SEQ ID NO: 1559549 - DNA, 25 bp, Homo sapien
ctgcagggggccaggacgtggacat

SEQ ID NO: 1559550 - DNA, 25 bp, Homo sapien
gccaggacgtggacatggaccccaa

SEQ ID NO: 1559551 - DNA, 25 bp, Homo sapien
gttctccacgggcaccgaattattg

SEQ ID NO: 1559552 - DNA, 25 bp, Homo sapien
tgagcccagacacagtatccacgta

SEQ ID NO: 1559553 - DNA, 25 bp, Homo sapien
cccaatggtgaaggttgaaccgcca

SEQ ID NO: 1559554 - DNA, 25 bp, Homo sapien
cgaattattgaacaccagggcccag

SEQ ID NO: 1559555 - DNA, 25 bp, Homo sapien
tagctgtgcatgtcgggatagttgc

SEQ ID NO: 1559556 - DNA, 25 bp, Homo sapien
tcttctccgtggagccgttgggcac

SEQ ID NO: 1559557 - DNA, 25 bp, Homo sapien
caaacttcaggggcgggtactgctc

SEQ ID NO: 1559558 - DNA, 25 bp, Homo sapien
tgagtgagcgcttcctctacgcggg

SEQ ID NO: 1559559 - DNA, 25 bp, Homo sapien
tgccggagccgatggtgacaagctt

SEQ ID NO: 1559560 - DNA, 25 bp, Homo sapien
cgatgccatagcctgtcgtggcgaa

SEQ ID NO: 1559561 - DNA, 25 bp, Homo sapien
cttccagcgggagcccttgtgcagg

SEQ ID NO: 1559562 - DNA, 25 bp, Homo sapien
ccttgcgggccatgtaattgagcac

SEQ ID NO: 1559563 - DNA, 25 bp, Homo sapien
caggaagtccatgcggtgggtgggc

SEQ ID NO: 1559564 - DNA, 25 bp, Homo sapien
gccgcaggcgccagtacaccaggtg

SEQ ID NO: 1559565 - DNA, 25 bp, Homo sapien
gcaggcgccagtacaccaggtgctc

SEQ ID NO: 1559566 - DNA, 25 bp, Homo sapien
gctcatcacctcgattttgtcattg

SEQ ID NO: 1559567 - DNA, 25 bp, Homo sapien
agcggtccactgaggcgcgctcgcg

SEQ ID NO: 1559568 - DNA, 25 bp, Homo sapien
tcgcggggcacgaaaggtgcgggcc

SEQ ID NO: 1559569 - DNA, 25 bp, Homo sapien
cgtagtagcggtggaagccgtcggc

SEQ ID NO: 1559570 - DNA, 25 bp, Homo sapien
ggcctaggccctgcggctcgatggg

SEQ ID NO: 1559571 - DNA, 25 bp, Homo sapien
atggcgaaataggagggcggcggct

SEQ ID NO: 1559572 - DNA, 25 bp, Homo sapien
gatggcgaaataggagggcggcggc

SEQ ID NO: 1559573 - DNA, 25 bp, Homo sapien
agtggcggcccgacggcggtggccg

SEQ ID NO: 1559574 - DNA, 25 bp, Homo sapien
ggctcggctggctccttgtcgcgta

SEQ ID NO: 1559575 - DNA, 25 bp, Homo sapien
cgggctctcgtcctcgaaggccaag

SEQ ID NO: 1559576 - DNA, 25 bp, Homo sapien
gccaagcggcagagtggcggcccga

SEQ ID NO: 1559577 - DNA, 25 bp, Homo sapien
ggttggctctcggggtccgagcgcg

SEQ ID NO: 1559578 - DNA, 25 bp, Homo sapien
gcgcggcacgggggcggagcggccg

SEQ ID NO: 1559579 - DNA, 25 bp, Homo sapien
ctcgagatcgaggtaagggcacggg

SEQ ID NO: 1559580 - DNA, 25 bp, Homo sapien
ctggccccagcaggggttggctctc

SEQ ID NO: 1559581 - DNA, 25 bp, Homo sapien
ccgagtcctccgagtccgacggcga

SEQ ID NO: 1559582 - DNA, 25 bp, Homo sapien
cgagtcctccgagtccgacggcgac

SEQ ID NO: 1559583 - DNA, 25 bp, Homo sapien
tccgagtcctccgagtccgacggcg

SEQ ID NO: 1559584 - DNA, 25 bp, Homo sapien
ggaagtcggcgaaccaccagggctc

SEQ ID NO: 1559585 - DNA, 25 bp, Homo sapien
aggccatcgtgcgagcagctgagat

SEQ ID NO: 1559586 - DNA, 25 bp, Homo sapien
ggcgctcggcatacgggtaagggaa

SEQ ID NO: 1559587 - DNA, 25 bp, Homo sapien
ttgtcgaccgaccagtagcggccgg

SEQ ID NO: 1559588 - DNA, 25 bp, Homo sapien
ggcgggcgtgcggtgcgaggcccgc

SEQ ID NO: 1559589 - DNA, 25 bp, Homo sapien
gtgcgggtgcgaccgcgggcacccg

SEQ ID NO: 1559590 - DNA, 25 bp, Homo sapien
cgggcggtgcgggtgcgaccgcggg

SEQ ID NO: 1559591 - DNA, 25 bp, Homo sapien
tgcgaggcccgcgggcggtgcgggt

SEQ ID NO: 1559592 - DNA, 25 bp, Homo sapien
ccagcccccagcggcgcgccggtgc

SEQ ID NO: 1559593 - DNA, 25 bp, Homo sapien
gcggcgcgagggcacgagctgaggt

SEQ ID NO: 1559594 - DNA, 25 bp, Homo sapien
tcgagcgagcgcgaggtgggcgcgg

SEQ ID NO: 1559595 - DNA, 25 bp, Homo sapien
taagcctgcgcgcaggggcggcgcg

SEQ ID NO: 1559596 - DNA, 25 bp, Homo sapien
tggcgggagggcccggtaagcctgc

SEQ ID NO: 1559597 - DNA, 25 bp, Homo sapien
ctcggactcgaggctagagaagtgc

SEQ ID NO: 1559598 - DNA, 25 bp, Homo sapien
actcgaggctagagaagtgcgccga

SEQ ID NO: 1559599 - DNA, 25 bp, Homo sapien
ggactcgaggctagagaagtgcgcc

SEQ ID NO: 1559600 - DNA, 25 bp, Homo sapien
tcggactcgaggctagagaagtgcg

SEQ ID NO: 1559601 - DNA, 25 bp, Homo sapien
ccattttaggagtcggatgtcacag

SEQ ID NO: 1559602 - DNA, 25 bp, Homo sapien
tcactgaagggtcgcaaataagggt

SEQ ID NO: 1559603 - DNA, 25 bp, Homo sapien
cgccccatctggtgacgttaaaaag

SEQ ID NO: 1559604 - DNA, 25 bp, Homo sapien
cacagtttggcgaacgcgtctcaca

SEQ ID NO: 1559605 - DNA, 25 bp, Homo sapien
tgcggaaacgctggaggagaactca

SEQ ID NO: 1559606 - DNA, 25 bp, Homo sapien
gaaactcctgggaccgctaatcgga

SEQ ID NO: 1559607 - DNA, 25 bp, Homo sapien
cgccagcgaaagaagcctgcggata

SEQ ID NO: 1559608 - DNA, 25 bp, Homo sapien
gaactcaggtaatggcgccagcgaa

SEQ ID NO: 1559609 - DNA, 25 bp, Homo sapien
tgctgacacccggtaagagcgtcac

SEQ ID NO: 1559610 - DNA, 25 bp, Homo sapien
tgagatccgccctactgcgcggtta

SEQ ID NO: 1559611 - DNA, 25 bp, Homo sapien
gggtttcgctttccgcctaatgaga

SEQ ID NO: 1559612 - DNA, 25 bp, Homo sapien
gacacccggtaagagcgtcacttcc

SEQ ID NO: 1559613 - DNA, 25 bp, Homo sapien
ggccctcggaacttgtgtcgccgga

SEQ ID NO: 1559614 - DNA, 25 bp, Homo sapien
gccggactcggcttccatgggttcc

SEQ ID NO: 1559615 - DNA, 25 bp, Homo sapien
cggtggtagagcacataggcctcct

SEQ ID NO: 1559616 - DNA, 25 bp, Homo sapien
catgggttccccggtttcacacgtg

SEQ ID NO: 1559617 - DNA, 25 bp, Homo sapien
ccctggagtccggactcagccctac

SEQ ID NO: 1559618 - DNA, 25 bp, Homo sapien
tcaggttaaaggctcgggatcagcc

SEQ ID NO: 1559619 - DNA, 25 bp, Homo sapien
ttaaaggctcgggatcagccacctc

SEQ ID NO: 1559620 - DNA, 25 bp, Homo sapien
aaaggctcgggatcagccacctcag

SEQ ID NO: 1559621 - DNA, 25 bp, Homo sapien
gtctcccaggtgatcccggactatg

SEQ ID NO: 1559622 - DNA, 25 bp, Homo sapien
aagctctgtccggttgtctcccagg

SEQ ID NO: 1559623 - DNA, 25 bp, Homo sapien
tcccggactatgtcaaagctgagac

SEQ ID NO: 1559624 - DNA, 25 bp, Homo sapien
gcacacaagtaaagtgtaagaggaa

SEQ ID NO: 1559625 - DNA, 25 bp, Homo sapien
attgtgcatccgaagcatcatcagt

SEQ ID NO: 1559626 - DNA, 25 bp, Homo sapien
tgccctctgagggtgggggctttgt

SEQ ID NO: 1559627 - DNA, 25 bp, Homo sapien
ctctgagggtgggggctttgtccca

SEQ ID NO: 1559628 - DNA, 25 bp, Homo sapien
gagggtgggggctttgtcccatgca

SEQ ID NO: 1559629 - DNA, 25 bp, Homo sapien
gccctctgagggtgggggctttgtc

SEQ ID NO: 1559630 - DNA, 25 bp, Homo sapien
ctgaggtttccgctcttcttcatcc

SEQ ID NO: 1559631 - DNA, 25 bp, Homo sapien
ggccagctccagctgaggtttccgc

SEQ ID NO: 1559632 - DNA, 25 bp, Homo sapien
cagctccagctgaggtttccgctct

SEQ ID NO: 1559633 - DNA, 25 bp, Homo sapien
ccagctgaggtttccgctcttcttc

SEQ ID NO: 1559634 - DNA, 25 bp, Homo sapien
ccgaactcggttgatgccaccatag

SEQ ID NO: 1559635 - DNA, 25 bp, Homo sapien
gagttgaggctgcaattcccaccag

SEQ ID NO: 1559636 - DNA, 25 bp, Homo sapien
cagtccagccacgaggtttccaata

SEQ ID NO: 1559637 - DNA, 25 bp, Homo sapien
gtctcggtaaccctctaaatgctag

SEQ ID NO: 1559638 - DNA, 25 bp, Homo sapien
taaatgctagaaggccacaagactc

SEQ ID NO: 1559639 - DNA, 25 bp, Homo sapien
tggcccttctctgaccacaccccag

SEQ ID NO: 1559640 - DNA, 25 bp, Homo sapien
acaggctcttcacccagccatgaca

SEQ ID NO: 1559641 - DNA, 25 bp, Homo sapien
gccacaggctcttcacccagccatg

SEQ ID NO: 1559642 - DNA, 25 bp, Homo sapien
tccacctggcccttctctgaccaca

SEQ ID NO: 1559643 - DNA, 25 bp, Homo sapien
ctgcagaagccgccgcagcgcaaac

SEQ ID NO: 1559644 - DNA, 25 bp, Homo sapien
tgcagaagccgccgcagcgcaaaca

SEQ ID NO: 1559645 - DNA, 25 bp, Homo sapien
gcagaagccgccgcagcgcaaacac

SEQ ID NO: 1559646 - DNA, 25 bp, Homo sapien
cttcatttgggcctgctcatcccgg

SEQ ID NO: 1559647 - DNA, 25 bp, Homo sapien
ctcgcccatgtgtccagcgaaggag

SEQ ID NO: 1559648 - DNA, 25 bp, Homo sapien
agtcaagggcaaagccctcgcccat

SEQ ID NO: 1559649 - DNA, 25 bp, Homo sapien
tttgggcctgctcatcccggaggaa

SEQ ID NO: 1559650 - DNA, 25 bp, Homo sapien
gttcttttgacagtcaccggtcagc

SEQ ID NO: 1559651 - DNA, 25 bp, Homo sapien
ggtccacgtgccaggagccgccgtc

SEQ ID NO: 1559652 - DNA, 25 bp, Homo sapien
tcttttgacagtcaccggtcagcag

SEQ ID NO: 1559653 - DNA, 25 bp, Homo sapien
ccgccgtccgtaggtgtccagaggt

SEQ ID NO: 1559654 - DNA, 25 bp, Homo sapien
cgtgttctcagtcggtgaccactgc

SEQ ID NO: 1559655 - DNA, 25 bp, Homo sapien
ttctcagtcggtgaccactgcaggt

SEQ ID NO: 1559656 - DNA, 25 bp, Homo sapien
tcagtcggtgaccactgcaggtcct

SEQ ID NO: 1559657 - DNA, 25 bp, Homo sapien
tgttctcagtcggtgaccactgcag

SEQ ID NO: 1559658 - DNA, 25 bp, Homo sapien
gaggcgtcagctgagcaggaggcaa

SEQ ID NO: 1559659 - DNA, 25 bp, Homo sapien
atggaggcgtcagctgagcaggagg

SEQ ID NO: 1559660 - DNA, 25 bp, Homo sapien
cgtcagctgagcaggaggcaaacac

SEQ ID NO: 1559661 - DNA, 25 bp, Homo sapien
ggcgtcagctgagcaggaggcaaac

SEQ ID NO: 1559662 - DNA, 25 bp, Homo sapien
ggggctgcccggatgtcccagatgc

SEQ ID NO: 1559663 - DNA, 25 bp, Homo sapien
gggggctgcccggatgtcccagatg

SEQ ID NO: 1559664 - DNA, 25 bp, Homo sapien
ctgggggctgcccggatgtcccaga

SEQ ID NO: 1559665 - DNA, 25 bp, Homo sapien
tgggggctgcccggatgtcccagat

SEQ ID NO: 1559666 - DNA, 25 bp, Homo sapien
ttgacgtccccatcatgggcggtgg

SEQ ID NO: 1559667 - DNA, 25 bp, Homo sapien
cgtccccatcatgggcggtggctgt

SEQ ID NO: 1559668 - DNA, 25 bp, Homo sapien
tgacattgacgtccccatcatgggc

SEQ ID NO: 1559669 - DNA, 25 bp, Homo sapien
gctgatgacattgacgtccccatca

SEQ ID NO: 1559670 - DNA, 25 bp, Homo sapien
gaactgccgaaggtcccagatcttg

SEQ ID NO: 1559671 - DNA, 25 bp, Homo sapien
tgccgaaggtcccagatcttgaggg

SEQ ID NO: 1559672 - DNA, 25 bp, Homo sapien
ggtcccagatcttgagggccccatc

SEQ ID NO: 1559673 - DNA, 25 bp, Homo sapien
gaaggtcccagatcttgagggcccc

SEQ ID NO: 1559674 - DNA, 25 bp, Homo sapien
gaagatggtgaagcctgacagcgcc

SEQ ID NO: 1559675 - DNA, 25 bp, Homo sapien
ccctggtgcacgaacagcagctgct

SEQ ID NO: 1559676 - DNA, 25 bp, Homo sapien
tggtctgcacccgaggctgcaaaga

SEQ ID NO: 1559677 - DNA, 25 bp, Homo sapien
tgacagcgccgtgctgaccaggagc

SEQ ID NO: 1559678 - DNA, 25 bp, Homo sapien
gacaggaaggaatccgacacacagg

SEQ ID NO: 1559679 - DNA, 25 bp, Homo sapien
gggagcccaattcgacttcagtttc

SEQ ID NO: 1559680 - DNA, 25 bp, Homo sapien
gagccaggccttctagagaacaata

SEQ ID NO: 1559681 - DNA, 25 bp, Homo sapien
gtcaaacagaatccatcacggcagc

SEQ ID NO: 1559682 - DNA, 25 bp, Homo sapien
cctttattgctgctcaggagccctg

SEQ ID NO: 1559683 - DNA, 25 bp, Homo sapien
tgggaaccagcagccaaaactgggt

SEQ ID NO: 1559684 - DNA, 25 bp, Homo sapien
cctccaatttggtgcagccactgta

SEQ ID NO: 1559685 - DNA, 25 bp, Homo sapien
cagcaccagcctctaaagtcaggga

SEQ ID NO: 1559686 - DNA, 25 bp, Homo sapien
ttgcatggaggcacgtacctgttgg

SEQ ID NO: 1559687 - DNA, 25 bp, Homo sapien
ttctctgaaaggatggaagccagtg

SEQ ID NO: 1559688 - DNA, 25 bp, Homo sapien
gatacagggcttaaggtgcttcaac

SEQ ID NO: 1559689 - DNA, 25 bp, Homo sapien
gatgaggcccctttcactaagccag

SEQ ID NO: 1559690 - DNA, 25 bp, Homo sapien
tgacaaccctgcatgttagagactg

SEQ ID NO: 1559691 - DNA, 25 bp, Homo sapien
cattcgcgagggttcattaggccca

SEQ ID NO: 1559692 - DNA, 25 bp, Homo sapien
taccaaacgcttggccctgtggtgg

SEQ ID NO: 1559693 - DNA, 25 bp, Homo sapien
agaaatggagggaatcgcagcagcc

SEQ ID NO: 1559694 - DNA, 25 bp, Homo sapien
gatgtgggctagtgccaaataaccc

SEQ ID NO: 1559695 - DNA, 25 bp, Homo sapien
gtgggctagtgccaaataacccaat

SEQ ID NO: 1559696 - DNA, 25 bp, Homo sapien
cacgatgtgggctagtgccaaataa

SEQ ID NO: 1559697 - DNA, 25 bp, Homo sapien
tttcacgatgtgggctagtgccaaa

SEQ ID NO: 1559698 - DNA, 25 bp, Homo sapien
aacctctgcctcccaggttcaagtg

SEQ ID NO: 1559699 - DNA, 25 bp, Homo sapien
gctcaccgcaacctcagctcactgc

SEQ ID NO: 1559700 - DNA, 25 bp, Homo sapien
catctgtcaaataggtggaacgata

SEQ ID NO: 1559701 - DNA, 25 bp, Homo sapien
aataggtggaacgatacgcattttt

SEQ ID NO: 1559702 - DNA, 25 bp, Homo sapien
caggaatggatgagctcatcggcca

SEQ ID NO: 1559703 - DNA, 25 bp, Homo sapien
tcggccaagcatgctttctggtggg

SEQ ID NO: 1559704 - DNA, 25 bp, Homo sapien
tggcctagtggggggcaggcgcccc

SEQ ID NO: 1559705 - DNA, 25 bp, Homo sapien
cctccacttggcctagtggggggca

SEQ ID NO: 1559706 - DNA, 25 bp, Homo sapien
tccacttggcctagtggggggcagg

SEQ ID NO: 1559707 - DNA, 25 bp, Homo sapien
acttggcctagtggggggcaggcgc

SEQ ID NO: 1559708 - DNA, 25 bp, Homo sapien
tcccgaatccagggcgccgctgagg

SEQ ID NO: 1559709 - DNA, 25 bp, Homo sapien
gttgcagtgcccgtctttcttgacg

SEQ ID NO: 1559710 - DNA, 25 bp, Homo sapien
acgggtgactgcaccggtgccggcg

SEQ ID NO: 1559711 - DNA, 25 bp, Homo sapien
tttcttgacgaagcgaccgcggcgc

SEQ ID NO: 1559712 - DNA, 25 bp, Homo sapien
tggccacccaggtttacgaaacgca

SEQ ID NO: 1559713 - DNA, 25 bp, Homo sapien
tgaagaccagcgtctcgttgcgctt

SEQ ID NO: 1559714 - DNA, 25 bp, Homo sapien
acgacggcgttctcgctgaagacca

SEQ ID NO: 1559715 - DNA, 25 bp, Homo sapien
catgtggtgaacaggtcgctcaggt

SEQ ID NO: 1559716 - DNA, 25 bp, Homo sapien
cagcgcacgtccacgcatgtggtga

SEQ ID NO: 1559717 - DNA, 25 bp, Homo sapien
gtccccgcctctcctcccgggcgca

SEQ ID NO: 1559718 - DNA, 25 bp, Homo sapien
tccccgcctctcctcccgggcgcac

SEQ ID NO: 1559719 - DNA, 25 bp, Homo sapien
tactgggagccacgctggaagagaa

SEQ ID NO: 1559720 - DNA, 25 bp, Homo sapien
cgatagtcgacctcatactgggagc

SEQ ID NO: 1559721 - DNA, 25 bp, Homo sapien
gagaactggctcaaaacgatggccc

SEQ ID NO: 1559722 - DNA, 25 bp, Homo sapien
gatacgatcggtgcctccatcaaag

SEQ ID NO: 1559723 - DNA, 25 bp, Homo sapien
gtgagaactcgggggctagcagccc

SEQ ID NO: 1559724 - DNA, 25 bp, Homo sapien
ggttggtgtgagaactcgggggcta

SEQ ID NO: 1559725 - DNA, 25 bp, Homo sapien
tggtgtgagaactcgggggctagca

SEQ ID NO: 1559726 - DNA, 25 bp, Homo sapien
ggtgtgagaactcgggggctagcag

SEQ ID NO: 1559727 - DNA, 25 bp, Homo sapien
taaagggttctcaggagggagcaca

SEQ ID NO: 1559728 - DNA, 25 bp, Homo sapien
tccaggtcaggccagaaatgttgct

SEQ ID NO: 1559729 - DNA, 25 bp, Homo sapien
gtcatttacccagcaggcctgtcgg

SEQ ID NO: 1559730 - DNA, 25 bp, Homo sapien
ccagtatgtccatggtgggtcacca

SEQ ID NO: 1559731 - DNA, 25 bp, Homo sapien
tgtgattcagacacccgagttcaga

SEQ ID NO: 1559732 - DNA, 25 bp, Homo sapien
tctaagcctgttgtagggaccaagg

SEQ ID NO: 1559733 - DNA, 25 bp, Homo sapien
ggaaggccgtatgatccagcactgg

SEQ ID NO: 1559734 - DNA, 25 bp, Homo sapien
ccacccttggtgtagtgaggactca

SEQ ID NO: 1559735 - DNA, 25 bp, Homo sapien
caaaaagccggtgtaggtatgtccg

SEQ ID NO: 1559736 - DNA, 25 bp, Homo sapien
ccaaaggatcgttctccagggccaa

SEQ ID NO: 1559737 - DNA, 25 bp, Homo sapien
ccagggccaacagtcgtacaaaaag

SEQ ID NO: 1559738 - DNA, 25 bp, Homo sapien
tatgtccggccagaggtagacggcc

SEQ ID NO: 1559739 - DNA, 25 bp, Homo sapien
gcggtcccgccagtcgggcctggat

SEQ ID NO: 1559740 - DNA, 25 bp, Homo sapien
cgccagtcctcagcgctgaaaagac

SEQ ID NO: 1559741 - DNA, 25 bp, Homo sapien
tggatccgcgttggcccgcgggctc

SEQ ID NO: 1559742 - DNA, 25 bp, Homo sapien
cgggctcgggtgagcccgctcaaac

SEQ ID NO: 1559743 - DNA, 25 bp, Homo sapien
cagccgggggaactgatgacagctc

SEQ ID NO: 1559744 - DNA, 25 bp, Homo sapien
catgaaaagtcactacagccggggg

SEQ ID NO: 1559745 - DNA, 25 bp, Homo sapien
gactccattactggcgaggtagctg

SEQ ID NO: 1559746 - DNA, 25 bp, Homo sapien
tatccggactactgggtccatgaaa

SEQ ID NO: 1559747 - DNA, 25 bp, Homo sapien
cgcaggcgctgaatctccaccagca

SEQ ID NO: 1559748 - DNA, 25 bp, Homo sapien
tgcttccgccgccggatgttctcca

SEQ ID NO: 1559749 - DNA, 25 bp, Homo sapien
ccatccgctcctccggagtcaggtc

SEQ ID NO: 1559750 - DNA, 25 bp, Homo sapien
ccgctcctccggagtcaggtctggg

SEQ ID NO: 1559751 - DNA, 25 bp, Homo sapien
atcttccggttccgttgcaaggtct

SEQ ID NO: 1559752 - DNA, 25 bp, Homo sapien
ctgcccattgccatcttccggttcc

SEQ ID NO: 1559753 - DNA, 25 bp, Homo sapien
cctgcccattgccatcttccggttc

SEQ ID NO: 1559754 - DNA, 25 bp, Homo sapien
catcttccggttccgttgcaaggtc

SEQ ID NO: 1559755 - DNA, 25 bp, Homo sapien
ttgttcagcccctcgcccttgtaca

SEQ ID NO: 1559756 - DNA, 25 bp, Homo sapien
ctcctcgggtgtgttctgcagcagt

SEQ ID NO: 1559757 - DNA, 25 bp, Homo sapien
ccctcgcccttgtacaggaagcggg

SEQ ID NO: 1559758 - DNA, 25 bp, Homo sapien
tgcagcagttcattctccaccaaga

SEQ ID NO: 1559759 - DNA, 25 bp, Homo sapien
ggaatatctggcttgggaaccctgc

SEQ ID NO: 1559760 - DNA, 25 bp, Homo sapien
tgattcccagacgtccacagatggc

SEQ ID NO: 1559761 - DNA, 25 bp, Homo sapien
cactgccgagggtgaagtttcctgc

SEQ ID NO: 1559762 - DNA, 25 bp, Homo sapien
tacagttgggagaaatgccgcaaac

SEQ ID NO: 1559763 - DNA, 25 bp, Homo sapien
ggtcggtgaactcatgcagatccac

SEQ ID NO: 1559764 - DNA, 25 bp, Homo sapien
caccagattgaggtcggtgaactca

SEQ ID NO: 1559765 - DNA, 25 bp, Homo sapien
gatccacaaaagcatggagcactgc

SEQ ID NO: 1559766 - DNA, 25 bp, Homo sapien
cagatccacaaaagcatggagcact

SEQ ID NO: 1559767 - DNA, 25 bp, Homo sapien
gctaagttcgctagacaggtctggg

SEQ ID NO: 1559768 - DNA, 25 bp, Homo sapien
cctgaaggaggccataaccctgaac

SEQ ID NO: 1559769 - DNA, 25 bp, Homo sapien
tgacacagtggcaaatacaagaggc

SEQ ID NO: 1559770 - DNA, 25 bp, Homo sapien
cacttgtaactaggaaggccctgac

SEQ ID NO: 1559771 - DNA, 25 bp, Homo sapien
taggaactggtccacgaggaatccc

SEQ ID NO: 1559772 - DNA, 25 bp, Homo sapien
tgtttcaggtatggtcacatgatcc

SEQ ID NO: 1559773 - DNA, 25 bp, Homo sapien
ttggccacgggagtgttgtgaatcc

SEQ ID NO: 1559774 - DNA, 25 bp, Homo sapien
cgaccttccggcctcagcagttgtt

SEQ ID NO: 1559775 - DNA, 25 bp, Homo sapien
tgcacaggcagtatcgctgggcgaa

SEQ ID NO: 1559776 - DNA, 25 bp, Homo sapien
ctccgggtaggcgaaagctccatag

SEQ ID NO: 1559777 - DNA, 25 bp, Homo sapien
cgggtaggcgaaagctccatagaaa

SEQ ID NO: 1559778 - DNA, 25 bp, Homo sapien
ttgcacaggcagtatcgctgggcga

SEQ ID NO: 1559779 - DNA, 25 bp, Homo sapien
accggacagggcaggtggtgacgac

SEQ ID NO: 1559780 - DNA, 25 bp, Homo sapien
gggcaggtggtgacgacccaggcat

SEQ ID NO: 1559781 - DNA, 25 bp, Homo sapien
ctgcaccggacagggcaggtggtga

SEQ ID NO: 1559782 - DNA, 25 bp, Homo sapien
ggacagggcaggtggtgacgaccca

SEQ ID NO: 1559783 - DNA, 25 bp, Homo sapien
catgatgacggcgaaggacagcaca

SEQ ID NO: 1559784 - DNA, 25 bp, Homo sapien
tgacggcgaaggacagcacatagca

SEQ ID NO: 1559785 - DNA, 25 bp, Homo sapien
tgatgacggcgaaggacagcacata

SEQ ID NO: 1559786 - DNA, 25 bp, Homo sapien
atgacggcgaaggacagcacatagc

SEQ ID NO: 1559787 - DNA, 25 bp, Homo sapien
ttgatgccccggttcatggccacaa

SEQ ID NO: 1559788 - DNA, 25 bp, Homo sapien
ttcatggccacaaagcgctccaggc

SEQ ID NO: 1559789 - DNA, 25 bp, Homo sapien
caggtccccgccctcgttgatgccc

SEQ ID NO: 1559790 - DNA, 25 bp, Homo sapien
cttgtcccggacattgggattgtgg

SEQ ID NO: 1559791 - DNA, 25 bp, Homo sapien
aaaggctgcattagccattcgagcc

SEQ ID NO: 1559792 - DNA, 25 bp, Homo sapien
gaggagtaaaggctgcattagccat

SEQ ID NO: 1559793 - DNA, 25 bp, Homo sapien
gagtaaaggctgcattagccattcg

SEQ ID NO: 1559794 - DNA, 25 bp, Homo sapien
gtaaaggctgcattagccattcgag

SEQ ID NO: 1559795 - DNA, 25 bp, Homo sapien
cattcccgtcatcctcaggaatctt

SEQ ID NO: 1559796 - DNA, 25 bp, Homo sapien
aatcttgaagggctcatttcggatg

SEQ ID NO: 1559797 - DNA, 25 bp, Homo sapien
ggtcaggtcattcccgtcatcctca

SEQ ID NO: 1559798 - DNA, 25 bp, Homo sapien
catttcggatgctgtcgtacaggtt

SEQ ID NO: 1559799 - DNA, 25 bp, Homo sapien
taaacgatgactgatggcccttctg

SEQ ID NO: 1559800 - DNA, 25 bp, Homo sapien
caccggagttttcgagttgcccagg

SEQ ID NO: 1559801 - DNA, 25 bp, Homo sapien
caaatctcatgtacagccagggctg

SEQ ID NO: 1559802 - DNA, 25 bp, Homo sapien
tgactatgcattgggagcacccgag

SEQ ID NO: 1559803 - DNA, 25 bp, Homo sapien
cctcccctcgtctagtgatgggaga

SEQ ID NO: 1559804 - DNA, 25 bp, Homo sapien
gggcctagacaaagccgctgcgttg

SEQ ID NO: 1559805 - DNA, 25 bp, Homo sapien
cattttctgagtctgtcagtcccag

SEQ ID NO: 1559806 - DNA, 25 bp, Homo sapien
gacaggtcgtgtacctacctcctgg

SEQ ID NO: 1559807 - DNA, 25 bp, Homo sapien
gaggcagttgtctgtgaggataaac

SEQ ID NO: 1559808 - DNA, 25 bp, Homo sapien
cagttgtctgtgaggataaaccagc

SEQ ID NO: 1559809 - DNA, 25 bp, Homo sapien
tctgtgaggataaaccagcgccgct

SEQ ID NO: 1559810 - DNA, 25 bp, Homo sapien
tgaggataaaccagcgccgcttcca

SEQ ID NO: 1559811 - DNA, 25 bp, Homo sapien
ggggatgattcctcggggctccttg

SEQ ID NO: 1559812 - DNA, 25 bp, Homo sapien
tcagattctccagggggatgattcc

SEQ ID NO: 1559813 - DNA, 25 bp, Homo sapien
tccacctctcggatgctcagattct

SEQ ID NO: 1559814 - DNA, 25 bp, Homo sapien
gtccacctctcggatgctcagattc

SEQ ID NO: 1559815 - DNA, 25 bp, Homo sapien
aagggcgcaggtaagaaccagccct

SEQ ID NO: 1559816 - DNA, 25 bp, Homo sapien
agaggaagggcgcaggtaagaacca

SEQ ID NO: 1559817 - DNA, 25 bp, Homo sapien
aggaagggcgcaggtaagaaccagc

SEQ ID NO: 1559818 - DNA, 25 bp, Homo sapien
gaagggcgcaggtaagaaccagccc

SEQ ID NO: 1559819 - DNA, 25 bp, Homo sapien
gctttgatgagctgccccttgttgt

SEQ ID NO: 1559820 - DNA, 25 bp, Homo sapien
tcggccgtccgcctcagttttgcag

SEQ ID NO: 1559821 - DNA, 25 bp, Homo sapien
tccggtacaccatgtggtttccctc

SEQ ID NO: 1559822 - DNA, 25 bp, Homo sapien
tgttggggatgtaaagttcaaagca

SEQ ID NO: 1559823 - DNA, 25 bp, Homo sapien
aaatccgcttctttctcgctgccag

SEQ ID NO: 1559824 - DNA, 25 bp, Homo sapien
gcttcttcttgactgaaatccgctt

SEQ ID NO: 1559825 - DNA, 25 bp, Homo sapien
gcatctcatagaaggggtccacact

SEQ ID NO: 1559826 - DNA, 25 bp, Homo sapien
atagaaggggtccacactcacagcc

SEQ ID NO: 1559827 - DNA, 25 bp, Homo sapien
gggcagctccgtaataaataatgga

SEQ ID NO: 1559828 - DNA, 25 bp, Homo sapien
caacagcgtgttaattacaaagaac

SEQ ID NO: 1559829 - DNA, 25 bp, Homo sapien
ggcggggcagctccgtaataaataa

SEQ ID NO: 1559830 - DNA, 25 bp, Homo sapien
ttaataagattaccaacagcgtgtt

SEQ ID NO: 1559831 - DNA, 25 bp, Homo sapien
gagagctcaaaagcgaacacagcgg

SEQ ID NO: 1559832 - DNA, 25 bp, Homo sapien
taatttggtcaaaacggaatgcctg

SEQ ID NO: 1559833 - DNA, 25 bp, Homo sapien
gatcaaagcccgaaattccgaagcg

SEQ ID NO: 1559834 - DNA, 25 bp, Homo sapien
tctttcaagactcctagcgtggccc

SEQ ID NO: 1559835 - DNA, 25 bp, Homo sapien
gacaaacgatatccaaaccattgcc

SEQ ID NO: 1559836 - DNA, 25 bp, Homo sapien
caatttgatccgtgctgagtccatt

SEQ ID NO: 1559837 - DNA, 25 bp, Homo sapien
taaggcaggcattaatctatccatg

SEQ ID NO: 1559838 - DNA, 25 bp, Homo sapien
catgaattttagtgaggacaaacga

SEQ ID NO: 1559839 - DNA, 25 bp, Homo sapien
caaaaactgaaggtctcccagtgct

SEQ ID NO: 1559840 - DNA, 25 bp, Homo sapien
cttctgagggtgtgccggcagcttt

SEQ ID NO: 1559841 - DNA, 25 bp, Homo sapien
tcggtttgtagaggcgtcaccccaa

SEQ ID NO: 1559842 - DNA, 25 bp, Homo sapien
ttttataagacacacatcctattgg

SEQ ID NO: 1559843 - DNA, 25 bp, Homo sapien
gctgtagtgtagactctggcctcgg

SEQ ID NO: 1559844 - DNA, 25 bp, Homo sapien
accgggtttgtctttgtggctctga

SEQ ID NO: 1559845 - DNA, 25 bp, Homo sapien
tgatggcggcattagggtcacatgt

SEQ ID NO: 1559846 - DNA, 25 bp, Homo sapien
tatttgcgggatgtagtctggatgc

SEQ ID NO: 1559847 - DNA, 25 bp, Homo sapien
ttcatctgggtactcataactccag

SEQ ID NO: 1559848 - DNA, 25 bp, Homo sapien
accttcatctgggtactcataactc

SEQ ID NO: 1559849 - DNA, 25 bp, Homo sapien
aggttgtcaacctgaccttcatctg

SEQ ID NO: 1559850 - DNA, 25 bp, Homo sapien
ttaaaggttgtcaacctgaccttca

SEQ ID NO: 1559851 - DNA, 25 bp, Homo sapien
ctacgaggcgctgtccacgcccagc

SEQ ID NO: 1559852 - DNA, 25 bp, Homo sapien
tatcagaacagttgtaaaggtgggc

SEQ ID NO: 1559853 - DNA, 25 bp, Homo sapien
gaaagggtgtgttcgcagagacccc

SEQ ID NO: 1559854 - DNA, 25 bp, Homo sapien
cctactgcctacaggacacatctgg

SEQ ID NO: 1559855 - DNA, 25 bp, Homo sapien
cacattgggttttggcactccctca

SEQ ID NO: 1559856 - DNA, 25 bp, Homo sapien
gaagctatggcaagatctggagcct

SEQ ID NO: 1559857 - DNA, 25 bp, Homo sapien
ggcagtaaatccgagagcaccttcc

SEQ ID NO: 1559858 - DNA, 25 bp, Homo sapien
tgcccacagatggattcgccctggg

SEQ ID NO: 1559859 - DNA, 25 bp, Homo sapien
atgtcggcttcaaggtgaggtgcat

SEQ ID NO: 1559860 - DNA, 25 bp, Homo sapien
gcgtgatggagcgtccctgtaatcc

SEQ ID NO: 1559861 - DNA, 25 bp, Homo sapien
cgtgatggagcgtccctgtaatccc

SEQ ID NO: 1559862 - DNA, 25 bp, Homo sapien
agccaggcgtgatggagcgtccctg

SEQ ID NO: 1559863 - DNA, 25 bp, Homo sapien
caggcgtgatggagcgtccctgtaa

SEQ ID NO: 1559864 - DNA, 25 bp, Homo sapien
acttgttcagaaccaatgcatcgaa

SEQ ID NO: 1559865 - DNA, 25 bp, Homo sapien
gctaagtgactggtggctaccttat

SEQ ID NO: 1559866 - DNA, 25 bp, Homo sapien
gacattagggctctaagggcactgt

SEQ ID NO: 1559867 - DNA, 25 bp, Homo sapien
tctactggtgtcatgcaaaaagctc

SEQ ID NO: 1559868 - DNA, 25 bp, Homo sapien
gacgcaacagagatacacggagggc

SEQ ID NO: 1559869 - DNA, 25 bp, Homo sapien
gccagagaccttgagagacgcaaca

SEQ ID NO: 1559870 - DNA, 25 bp, Homo sapien
agaaacttgccctcacgggctgacg

SEQ ID NO: 1559871 - DNA, 25 bp, Homo sapien
gacccagcagcgatatacagagggc

SEQ ID NO: 1559872 - DNA, 25 bp, Homo sapien
ggtgcctactccgtgcccggcccaa

SEQ ID NO: 1559873 - DNA, 25 bp, Homo sapien
ccaggtgtgcgcagcgacagcgtct

SEQ ID NO: 1559874 - DNA, 25 bp, Homo sapien
gcagcgacagcgtctgccacctggg

SEQ ID NO: 1559875 - DNA, 25 bp, Homo sapien
tgtgcgcagcgacagcgtctgccac

SEQ ID NO: 1559876 - DNA, 25 bp, Homo sapien
ccacaagcccgggatctggggctcg

SEQ ID NO: 1559877 - DNA, 25 bp, Homo sapien
ggatctggggctcggcgggcccgtc

SEQ ID NO: 1559878 - DNA, 25 bp, Homo sapien
tctggggctcggcgggcccgtccat

SEQ ID NO: 1559879 - DNA, 25 bp, Homo sapien
cgggatctggggctcggcgggcccg

SEQ ID NO: 1559880 - DNA, 25 bp, Homo sapien
ctgatttccgagatgtcatcttcat

SEQ ID NO: 1559881 - DNA, 25 bp, Homo sapien
aagtaatagagtagataggccgggc

SEQ ID NO: 1559882 - DNA, 25 bp, Homo sapien
cgtggccagggaattcaaagtaata

SEQ ID NO: 1559883 - DNA, 25 bp, Homo sapien
tgcaaggagccagataagcaaagag

SEQ ID NO: 1559884 - DNA, 25 bp, Homo sapien
tcggaggctagaacctcagagcgcc

SEQ ID NO: 1559885 - DNA, 25 bp, Homo sapien
cctatgggctcacggtatatatcta

SEQ ID NO: 1559886 - DNA, 25 bp, Homo sapien
gctgttgtgaagactcagtgagctc

SEQ ID NO: 1559887 - DNA, 25 bp, Homo sapien
gctcagcagcggtctcagaactggg

SEQ ID NO: 1559888 - DNA, 25 bp, Homo sapien
aaatgggcattgtaacactgggacc

SEQ ID NO: 1559889 - DNA, 25 bp, Homo sapien
tcttctgtaaagtggtgacactgtc

SEQ ID NO: 1559890 - DNA, 25 bp, Homo sapien
ttctcagggtggcgacactcggacc

SEQ ID NO: 1559891 - DNA, 25 bp, Homo sapien
gttctcagggtggcgacactcggac

SEQ ID NO: 1559892 - DNA, 25 bp, Homo sapien
tctcagggtggcgacactcggaccc

SEQ ID NO: 1559893 - DNA, 25 bp, Homo sapien
tgtggaaaggtgggggagacgccat

SEQ ID NO: 1559894 - DNA, 25 bp, Homo sapien
ctgtggaaaggtgggggagacgcca

SEQ ID NO: 1559895 - DNA, 25 bp, Homo sapien
tgataaagatgtcgtcgtcccgcac

SEQ ID NO: 1559896 - DNA, 25 bp, Homo sapien
tgctctcgagcgagtacaggccgac

SEQ ID NO: 1559897 - DNA, 25 bp, Homo sapien
cacatcttgggtgttctccgccaag

SEQ ID NO: 1559898 - DNA, 25 bp, Homo sapien
gacgcccttgtaccggaagtattca

SEQ ID NO: 1559899 - DNA, 25 bp, Homo sapien
gatgatctcgatcatccaggtcgtg

SEQ ID NO: 1559900 - DNA, 25 bp, Homo sapien
tgaaggcacccacaatggtctcaca

SEQ ID NO: 1559901 - DNA, 25 bp, Homo sapien
tccttcaggattaagcagatgatct

SEQ ID NO: 1559902 - DNA, 25 bp, Homo sapien
ctcccagatgggcacggagcggatc

SEQ ID NO: 1559903 - DNA, 25 bp, Homo sapien
tacacgttcctagagccttagccca

SEQ ID NO: 1559904 - DNA, 25 bp, Homo sapien
acaggcaaggtcttacacgttccta

SEQ ID NO: 1559905 - DNA, 25 bp, Homo sapien
tctggaaattgcttgagggaatgac

SEQ ID NO: 1559906 - DNA, 25 bp, Homo sapien
caaaggcataaagggagggaggctg

SEQ ID NO: 1559907 - DNA, 25 bp, Homo sapien
taactgcccggcgatcttggagtaa

SEQ ID NO: 1559908 - DNA, 25 bp, Homo sapien
cttggagtaatgatagagggagacc

SEQ ID NO: 1559909 - DNA, 25 bp, Homo sapien
cctcaggaactggtcgggtgtgccc

SEQ ID NO: 1559910 - DNA, 25 bp, Homo sapien
atagagggagaccacaacgtcccgg

SEQ ID NO: 1559911 - DNA, 25 bp, Homo sapien
gctcctcgtaggtgataaataggaa

SEQ ID NO: 1559912 - DNA, 25 bp, Homo sapien
tggtcgaaccaggagccaaactgca

SEQ ID NO: 1559913 - DNA, 25 bp, Homo sapien
tcatccgaagccagcccttaatgtg

SEQ ID NO: 1559914 - DNA, 25 bp, Homo sapien
cttaatgtggtcgaaccaggagcca

SEQ ID NO: 1559915 - DNA, 25 bp, Homo sapien
aggaacccacagatgcgctccacgg

SEQ ID NO: 1559916 - DNA, 25 bp, Homo sapien
aaggccccgcgacggtggtccagca

SEQ ID NO: 1559917 - DNA, 25 bp, Homo sapien
gttgagtgtgccacgacggagccca

SEQ ID NO: 1559918 - DNA, 25 bp, Homo sapien
tggtgttggccttcatggcgctgaa

SEQ ID NO: 1559919 - DNA, 25 bp, Homo sapien
tgggccaccgtgaagtggttcttcc

SEQ ID NO: 1559920 - DNA, 25 bp, Homo sapien
cttgcggtaggcacgatcgaaggct

SEQ ID NO: 1559921 - DNA, 25 bp, Homo sapien
gggaaggtcggcatcccccgcatct

SEQ ID NO: 1559922 - DNA, 25 bp, Homo sapien
gatcgaaggcttcgctctgggccac

SEQ ID NO: 1559923 - DNA, 25 bp, Homo sapien
ggctcaggatctgggctgccgtcct

SEQ ID NO: 1559924 - DNA, 25 bp, Homo sapien
tgccgtcctcctccgggtcttcatc

SEQ ID NO: 1559925 - DNA, 25 bp, Homo sapien
tgggcttgggctcaggctcagggct

SEQ ID NO: 1559926 - DNA, 25 bp, Homo sapien
ctggtgttgggctcaaggctgggct

SEQ ID NO: 1559927 - DNA, 25 bp, Homo sapien
cagaggcctggccggggctggggct

SEQ ID NO: 1559928 - DNA, 25 bp, Homo sapien
gaggcctggccggggctggggctgg

SEQ ID NO: 1559929 - DNA, 25 bp, Homo sapien
gcggggtctcagaggcctggccggg

SEQ ID NO: 1559930 - DNA, 25 bp, Homo sapien
gggctggagttgggtctgggctcac

SEQ ID NO: 1559931 - DNA, 25 bp, Homo sapien
cagactgggccccccgggcaggact

SEQ ID NO: 1559932 - DNA, 25 bp, Homo sapien
tcagactgggccccccgggcaggac

SEQ ID NO: 1559933 - DNA, 25 bp, Homo sapien
atcccggctggcagatgccggcgct

SEQ ID NO: 1559934 - DNA, 25 bp, Homo sapien
aaatatttgatcccggctggcagat

SEQ ID NO: 1559935 - DNA, 25 bp, Homo sapien
atttgatcccggctggcagatgccg

SEQ ID NO: 1559936 - DNA, 25 bp, Homo sapien
gcagatgccggcgcttccggttcct

SEQ ID NO: 1559937 - DNA, 25 bp, Homo sapien
ccctccgtcccaggcaaggaaggct

SEQ ID NO: 1559938 - DNA, 25 bp, Homo sapien
atctccctccgtcccaggcaaggaa

SEQ ID NO: 1559939 - DNA, 25 bp, Homo sapien
ctccctccgtcccaggcaaggaagg

SEQ ID NO: 1559940 - DNA, 25 bp, Homo sapien
cctccgtcccaggcaaggaaggctc

SEQ ID NO: 1559941 - DNA, 25 bp, Homo sapien
ttgagttccggacgctgtacgcggc

SEQ ID NO: 1559942 - DNA, 25 bp, Homo sapien
cagaaaccctcggtcataggtggcc

SEQ ID NO: 1559943 - DNA, 25 bp, Homo sapien
ctgactggtgaaattgttgacgcct

SEQ ID NO: 1559944 - DNA, 25 bp, Homo sapien
tcacgtggagtgacgcacgcctgca

SEQ ID NO: 1559945 - DNA, 25 bp, Homo sapien
gtggctgctgcccaacaagagtctg

SEQ ID NO: 1559946 - DNA, 25 bp, Homo sapien
cagggtcagcgcctggagtgtcctc

SEQ ID NO: 1559947 - DNA, 25 bp, Homo sapien
tcttgcccacgggactttggccctg

SEQ ID NO: 1559948 - DNA, 25 bp, Homo sapien
ccggaaccgctgaatgaaggacctc

SEQ ID NO: 1559949 - DNA, 25 bp, Homo sapien
gccacagtgcatgtaggtaccagga

SEQ ID NO: 1559950 - DNA, 25 bp, Homo sapien
tgagctcacagaagacgcagtcctt

SEQ ID NO: 1559951 - DNA, 25 bp, Homo sapien
ctttgttgatgaccggaccagtgcc

SEQ ID NO: 1559952 - DNA, 25 bp, Homo sapien
cactgcatggagtcggtgagctcac

SEQ ID NO: 1559953 - DNA, 25 bp, Homo sapien
tcctggtggacagccttagaaggga

SEQ ID NO: 1559954 - DNA, 25 bp, Homo sapien
gactctaaagtgctaccaatggaga

SEQ ID NO: 1559955 - DNA, 25 bp, Homo sapien
gagtaatacaatcaaacccacgggc

SEQ ID NO: 1559956 - DNA, 25 bp, Homo sapien
gagaagctctgcgtcttagaaccag

SEQ ID NO: 1559957 - DNA, 25 bp, Homo sapien
tacaacttgccccagaagaagcttg

SEQ ID NO: 1559958 - DNA, 25 bp, Homo sapien
ttcatcttccggatcttagggtggg

SEQ ID NO: 1559959 - DNA, 25 bp, Homo sapien
tggtgtttacattcagccccgcttg

SEQ ID NO: 1559960 - DNA, 25 bp, Homo sapien
agcaagggtctgatgggtctgccca

SEQ ID NO: 1559961 - DNA, 25 bp, Homo sapien
aagactgaggatggaccagcacagc

SEQ ID NO: 1559962 - DNA, 25 bp, Homo sapien
gggccagcactaacagtttacaact

SEQ ID NO: 1559963 - DNA, 25 bp, Homo sapien
ttgttttcccggccaggaagcttca

SEQ ID NO: 1559964 - DNA, 25 bp, Homo sapien
tgaagcttcctggccgggaaaacaa

SEQ ID NO: 1559965 - DNA, 25 bp, Homo sapien
ggtcccctgggcaagcttcttctgg

SEQ ID NO: 1559966 - DNA, 25 bp, Homo sapien
caccagaacaacttacgacgtacat

SEQ ID NO: 1559967 - DNA, 25 bp, Homo sapien
gaccataactgatgatgtgcgggtt

SEQ ID NO: 1559968 - DNA, 25 bp, Homo sapien
taaactgttagtgctggcccctaga

SEQ ID NO: 1559969 - DNA, 25 bp, Homo sapien
tgtgctgtgctggtccatcctcagt

SEQ ID NO: 1559970 - DNA, 25 bp, Homo sapien
cccaccctaagatccggaagatgaa

SEQ ID NO: 1559971 - DNA, 25 bp, Homo sapien
gcgcgacgcatcgtgctagctacac

SEQ ID NO: 1559972 - DNA, 25 bp, Homo sapien
ccttccctcttggacgttgcgcttg

SEQ ID NO: 1559973 - DNA, 25 bp, Homo sapien
agctatcgagaacacggcctgggta

SEQ ID NO: 1559974 - DNA, 25 bp, Homo sapien
tgttcctgcgctctatgctctctgc

SEQ ID NO: 1559975 - DNA, 25 bp, Homo sapien
ctacgaagtgcagcgcgagatcagg

SEQ ID NO: 1559976 - DNA, 25 bp, Homo sapien
cctgataaggaaacgcccgaagcgt

SEQ ID NO: 1559977 - DNA, 25 bp, Homo sapien
taagtaggacttcccaagcagcggc

SEQ ID NO: 1559978 - DNA, 25 bp, Homo sapien
aaatttccagatgccccgactagcc

SEQ ID NO: 1559979 - DNA, 25 bp, Homo sapien
gaggcccttccaggctcaatgtgcc

SEQ ID NO: 1559980 - DNA, 25 bp, Homo sapien
aatttggttatagccttgcaaggcc

SEQ ID NO: 1559981 - DNA, 25 bp, Homo sapien
cccattagtaactagcagagccagg

SEQ ID NO: 1559982 - DNA, 25 bp, Homo sapien
tgtgccaggcctgttgtcatcccct

SEQ ID NO: 1559983 - DNA, 25 bp, Homo sapien
gctggtcctctgctctgttacatca

SEQ ID NO: 1559984 - DNA, 25 bp, Homo sapien
tctgttacatcaacgggaccctggc

SEQ ID NO: 1559985 - DNA, 25 bp, Homo sapien
catagtaggctggtaggagcaagga

SEQ ID NO: 1559986 - DNA, 25 bp, Homo sapien
aggagtcaggtctcactgtcctggc

SEQ ID NO: 1559987 - DNA, 25 bp, Homo sapien
gtcctgctgctcctctgcttcaagg

SEQ ID NO: 1559988 - DNA, 25 bp, Homo sapien
gctgctcctctgcttcaaggtgtcc

SEQ ID NO: 1559989 - DNA, 25 bp, Homo sapien
tgctcctctgcttcaaggtgtccat

SEQ ID NO: 1559990 - DNA, 25 bp, Homo sapien
tggtcctgctgctcctctgcttcaa

SEQ ID NO: 1559991 - DNA, 25 bp, Homo sapien
ggatcttggcttttagatggtccct

SEQ ID NO: 1559992 - DNA, 25 bp, Homo sapien
tcttggcttttagatggtcccttac

SEQ ID NO: 1559993 - DNA, 25 bp, Homo sapien
gtctttccacagtatgaggatcttg

SEQ ID NO: 1559994 - DNA, 25 bp, Homo sapien
cacagtatgaggatcttggctttta

SEQ ID NO: 1559995 - DNA, 25 bp, Homo sapien
gggcctcgcgcttcgggagactggc

SEQ ID NO: 1559996 - DNA, 25 bp, Homo sapien
cagtcagctcgcgagcttggtgcag

SEQ ID NO: 1559997 - DNA, 25 bp, Homo sapien
ccgcgggagaggccgagagctgggc

SEQ ID NO: 1559998 - DNA, 25 bp, Homo sapien
gtggagccagtcagctcgcgagctt

SEQ ID NO: 1559999 - DNA, 25 bp, Homo sapien
cggtcccgcaagtcagcaccaacag

SEQ ID NO: 1560000 - DNA, 25 bp, Homo sapien
ccaggcggtcccgcaagtcagcacc

SEQ ID NO: 1560001 - DNA, 25 bp, Homo sapien
aggcggtcccgcaagtcagcaccaa

SEQ ID NO: 1560002 - DNA, 25 bp, Homo sapien
gtcccgcaagtcagcaccaacagcc

SEQ ID NO: 1560003 - DNA, 25 bp, Homo sapien
gccatccgcactcttatttccagaa

SEQ ID NO: 1560004 - DNA, 25 bp, Homo sapien
caatccataggcctgcgtgtctggc

SEQ ID NO: 1560005 - DNA, 25 bp, Homo sapien
tagatgtcctccagtcttgggcctg

SEQ ID NO: 1560006 - DNA, 25 bp, Homo sapien
tctcgggtccaggacgtctgcttca

SEQ ID NO: 1560007 - DNA, 25 bp, Homo sapien
ctctgcccggattctgcctcctcct

SEQ ID NO: 1560008 - DNA, 25 bp, Homo sapien
gccctctgcccggattctgcctcct

SEQ ID NO: 1560009 - DNA, 25 bp, Homo sapien
ccctctgcccggattctgcctcctc

SEQ ID NO: 1560010 - DNA, 25 bp, Homo sapien
cctctgcccggattctgcctcctcc

SEQ ID NO: 1560011 - DNA, 25 bp, Homo sapien
aggagacaaacagggtcaatgaggt

SEQ ID NO: 1560012 - DNA, 25 bp, Homo sapien
tccgagaggagccacatgcgagcgc

SEQ ID NO: 1560013 - DNA, 25 bp, Homo sapien
ggtcaatgaggtgaaactcaggcga

SEQ ID NO: 1560014 - DNA, 25 bp, Homo sapien
actcaggcgatgaaagatacttaag

SEQ ID NO: 1560015 - DNA, 25 bp, Homo sapien
atagggtctgagagccagagaaaca

SEQ ID NO: 1560016 - DNA, 25 bp, Homo sapien
caccccccatacggtgcagtgggta

SEQ ID NO: 1560017 - DNA, 25 bp, Homo sapien
agatagggtctgagagccagagaaa

SEQ ID NO: 1560018 - DNA, 25 bp, Homo sapien
caatcacaaacgcaatagagatagg

SEQ ID NO: 1560019 - DNA, 25 bp, Homo sapien
tatgtgccaatcacggtgctaggcc

SEQ ID NO: 1560020 - DNA, 25 bp, Homo sapien
agacccgggcatgcaaacatccaat

SEQ ID NO: 1560021 - DNA, 25 bp, Homo sapien
tgctaggcctagcaaacacagcagg

SEQ ID NO: 1560022 - DNA, 25 bp, Homo sapien
ggtgagaattcaggaccccatggca

SEQ ID NO: 1560023 - DNA, 25 bp, Homo sapien
tagccctgaccagggtgctcctagg

SEQ ID NO: 1560024 - DNA, 25 bp, Homo sapien
accagggtgctcctaggcccgtggc

SEQ ID NO: 1560025 - DNA, 25 bp, Homo sapien
cttagccctgaccagggtgctccta

SEQ ID NO: 1560026 - DNA, 25 bp, Homo sapien
ctgaccagggtgctcctaggcccgt

SEQ ID NO: 1560027 - DNA, 25 bp, Homo sapien
taggagccaaactcgccatggagga

SEQ ID NO: 1560028 - DNA, 25 bp, Homo sapien
agccaaactcgccatggaggagcgg

SEQ ID NO: 1560029 - DNA, 25 bp, Homo sapien
ggctgggtaggagccaaactcgcca

SEQ ID NO: 1560030 - DNA, 25 bp, Homo sapien
cctcgggctgggtaggagccaaact

SEQ ID NO: 1560031 - DNA, 25 bp, Homo sapien
ctgcggcttcgcagggtgcagcagc

SEQ ID NO: 1560032 - DNA, 25 bp, Homo sapien
gagacctcggccaacgggaccaggc

SEQ ID NO: 1560033 - DNA, 25 bp, Homo sapien
agcctgagacctcggccaacgggac

SEQ ID NO: 1560034 - DNA, 25 bp, Homo sapien
gcagcctgagacctcggccaacggg

SEQ ID NO: 1560035 - DNA, 25 bp, Homo sapien
agaagtaggccgctgagtctgaggg

SEQ ID NO: 1560036 - DNA, 25 bp, Homo sapien
gagtggctctgcgccgggccccgcg

SEQ ID NO: 1560037 - DNA, 25 bp, Homo sapien
ggccccgagggtaggtgtagatgca

SEQ ID NO: 1560038 - DNA, 25 bp, Homo sapien
ccggccccgagggtaggtgtagatg

SEQ ID NO: 1560039 - DNA, 25 bp, Homo sapien
ttctcttcgtaggtggcggccccat

SEQ ID NO: 1560040 - DNA, 25 bp, Homo sapien
cagcgctgggcctcggcacggttct

SEQ ID NO: 1560041 - DNA, 25 bp, Homo sapien
atccccgggcagtggcagtcctcgg

SEQ ID NO: 1560042 - DNA, 25 bp, Homo sapien
tcggcacggttctcttcgtaggtgg

SEQ ID NO: 1560043 - DNA, 25 bp, Homo sapien
cacagctgcctatggaggaaattct

SEQ ID NO: 1560044 - DNA, 25 bp, Homo sapien
gttccttctgtagcccatccctgtg

SEQ ID NO: 1560045 - DNA, 25 bp, Homo sapien
cagagagatacatcacccagacaca

SEQ ID NO: 1560046 - DNA, 25 bp, Homo sapien
tgtgtatcactcctaacggatccag

SEQ ID NO: 1560047 - DNA, 25 bp, Homo sapien
ttcatcagcccccaacggaattggt

SEQ ID NO: 1560048 - DNA, 25 bp, Homo sapien
tgtggagagaggttagggtctgcag

SEQ ID NO: 1560049 - DNA, 25 bp, Homo sapien
agtcccttcatcagcccccaacgga

SEQ ID NO: 1560050 - DNA, 25 bp, Homo sapien
cagcccccaacggaattggtggagg

SEQ ID NO: 1560051 - DNA, 25 bp, Homo sapien
cccaaagggattgaccaatagaagc

SEQ ID NO: 1560052 - DNA, 25 bp, Homo sapien
caatagaagcaaccggggcggccga

SEQ ID NO: 1560053 - DNA, 25 bp, Homo sapien
catgggaagcacgtggttcttacac

SEQ ID NO: 1560054 - DNA, 25 bp, Homo sapien
gggcggccgaggtagcaggtcaggg

SEQ ID NO: 1560055 - DNA, 25 bp, Homo sapien
atgaggttgaaggacagcccagctt

SEQ ID NO: 1560056 - DNA, 25 bp, Homo sapien
ctgtctggatgaggttgaaggacag

SEQ ID NO: 1560057 - DNA, 25 bp, Homo sapien
ctggatgaggttgaaggacagccca

SEQ ID NO: 1560058 - DNA, 25 bp, Homo sapien
tgaggttgaaggacagcccagcttc

SEQ ID NO: 1560059 - DNA, 25 bp, Homo sapien
tctcccgagaccgtgacgatgccat

SEQ ID NO: 1560060 - DNA, 25 bp, Homo sapien
gcccgtctcccgagaccgtgacgat

SEQ ID NO: 1560061 - DNA, 25 bp, Homo sapien
gagaccgtgacgatgccatcccact

SEQ ID NO: 1560062 - DNA, 25 bp, Homo sapien
atggagcagcccgtctcccgagacc

SEQ ID NO: 1560063 - DNA, 25 bp, Homo sapien
ttcctcccagtcagggcgatctagg

SEQ ID NO: 1560064 - DNA, 25 bp, Homo sapien
ccccgtgctggttcactgctccggc

SEQ ID NO: 1560065 - DNA, 25 bp, Homo sapien
ggcgatctaggagcccgttcagcac

SEQ ID NO: 1560066 - DNA, 25 bp, Homo sapien
tggttcactgctccggccagcgcgt

SEQ ID NO: 1560067 - DNA, 25 bp, Homo sapien
agtgggagatataggggtccctatc

SEQ ID NO: 1560068 - DNA, 25 bp, Homo sapien
cctcccttcgtggtatcctcaacct

SEQ ID NO: 1560069 - DNA, 25 bp, Homo sapien
tcccttcgtggtatcctcaacctac

SEQ ID NO: 1560070 - DNA, 25 bp, Homo sapien
tataggggtccctatcaccccagga

SEQ ID NO: 1560071 - DNA, 25 bp, Homo sapien
tgagcatcccacaggcaggctgatt

SEQ ID NO: 1560072 - DNA, 25 bp, Homo sapien
caggcaggcaaaaatgtccaggagc

SEQ ID NO: 1560073 - DNA, 25 bp, Homo sapien
aggcagagttctgggcgctcgggat

SEQ ID NO: 1560074 - DNA, 25 bp, Homo sapien
agttctgggcgctcgggatacagct

SEQ ID NO: 1560075 - DNA, 25 bp, Homo sapien
cccgaggccagcgtcacggagagca

SEQ ID NO: 1560076 - DNA, 25 bp, Homo sapien
cagtgagcagttgagcaacaggtcg

SEQ ID NO: 1560077 - DNA, 25 bp, Homo sapien
accccggcacagcaacagtgagcag

SEQ ID NO: 1560078 - DNA, 25 bp, Homo sapien
aagcgctcgctctggatatccacat

SEQ ID NO: 1560079 - DNA, 25 bp, Homo sapien
cgtgcccagtgtgaagcgggcactg

SEQ ID NO: 1560080 - DNA, 25 bp, Homo sapien
cagtgtgaagcgggcactgcccaag

SEQ ID NO: 1560081 - DNA, 25 bp, Homo sapien
gcccagtgtgaagcgggcactgccc

SEQ ID NO: 1560082 - DNA, 25 bp, Homo sapien
tgcccagtgtgaagcgggcactgcc

SEQ ID NO: 1560083 - DNA, 25 bp, Homo sapien
gtaggtgtgcagtgtggcgaggccc

SEQ ID NO: 1560084 - DNA, 25 bp, Homo sapien
ggaggtaggagaggcgtccgcggta

SEQ ID NO: 1560085 - DNA, 25 bp, Homo sapien
gaggcgtccgcggtaggtgtgcagt

SEQ ID NO: 1560086 - DNA, 25 bp, Homo sapien
caggttccacagtggcggggaggta

SEQ ID NO: 1560087 - DNA, 25 bp, Homo sapien
cccccaccgttgagggacaggatgg

SEQ ID NO: 1560088 - DNA, 25 bp, Homo sapien
agacagcagtgggtccggggacagc

SEQ ID NO: 1560089 - DNA, 25 bp, Homo sapien
gtcagacacagaacgatgcaggggt

SEQ ID NO: 1560090 - DNA, 25 bp, Homo sapien
tggggttagggtcagctccgacttg

SEQ ID NO: 1560091 - DNA, 25 bp, Homo sapien
gccccttcggagacgggtgagtgta

SEQ ID NO: 1560092 - DNA, 25 bp, Homo sapien
cttcggagacgggtgagtgtagagc

SEQ ID NO: 1560093 - DNA, 25 bp, Homo sapien
tcggagacgggtgagtgtagagctg

SEQ ID NO: 1560094 - DNA, 25 bp, Homo sapien
ccccttcggagacgggtgagtgtag

SEQ ID NO: 1560095 - DNA, 25 bp, Homo sapien
gcaggtggtcgggcgggccgcaggt

SEQ ID NO: 1560096 - DNA, 25 bp, Homo sapien
agatggccaacatgagcacaaagtc

SEQ ID NO: 1560097 - DNA, 25 bp, Homo sapien
gcagcggggtgcccagcggaggcag

SEQ ID NO: 1560098 - DNA, 25 bp, Homo sapien
tggccaacatgagcacaaagtcccc

SEQ ID NO: 1560099 - DNA, 25 bp, Homo sapien
tggccaagaaaaggcgcagcagcgc

SEQ ID NO: 1560100 - DNA, 25 bp, Homo sapien
acaggtgcaccaggccgtcgtcgaa

SEQ ID NO: 1560101 - DNA, 25 bp, Homo sapien
gtccactgtgagcacgccgcgtggt

SEQ ID NO: 1560102 - DNA, 25 bp, Homo sapien
tggctaccacgctccatggccaaga

SEQ ID NO: 1560103 - DNA, 25 bp, Homo sapien
cagtgtaccgatgccagggtgcatc

SEQ ID NO: 1560104 - DNA, 25 bp, Homo sapien
cagtgagcagtgtaccgatgccagg

SEQ ID NO: 1560105 - DNA, 25 bp, Homo sapien
gcatctgtgcctgtagcggcccata

SEQ ID NO: 1560106 - DNA, 25 bp, Homo sapien
gaggcccagtgagcagtgtaccgat

SEQ ID NO: 1560107 - DNA, 25 bp, Homo sapien
tcattgatcaggcactaccctcggg

SEQ ID NO: 1560108 - DNA, 25 bp, Homo sapien
tgggcgacgcgtaaaatagactccg

SEQ ID NO: 1560109 - DNA, 25 bp, Homo sapien
tgaaagcgagcgcaatcctgagacg

SEQ ID NO: 1560110 - DNA, 25 bp, Homo sapien
cattagtgcaaatcctagcgccggc

SEQ ID NO: 1560111 - DNA, 25 bp, Homo sapien
ctgtcgtccatagagggcaggcgct

SEQ ID NO: 1560112 - DNA, 25 bp, Homo sapien
tcctgaataaatcttgagaacccca

SEQ ID NO: 1560113 - DNA, 25 bp, Homo sapien
gcctccgttaacacgatcctgaata

SEQ ID NO: 1560114 - DNA, 25 bp, Homo sapien
agggcagctccctggcatactggct

SEQ ID NO: 1560115 - DNA, 25 bp, Homo sapien
cgctgcttgggttgcggagccttct

SEQ ID NO: 1560116 - DNA, 25 bp, Homo sapien
cttagttcacaagagtgtaggcccc

SEQ ID NO: 1560117 - DNA, 25 bp, Homo sapien
tcaattactcaggtgtttaggcccc

SEQ ID NO: 1560118 - DNA, 25 bp, Homo sapien
caaagagccggccagctgtgagttc

SEQ ID NO: 1560119 - DNA, 25 bp, Homo sapien
gaggattgcacccgcccgtcctaag

SEQ ID NO: 1560120 - DNA, 25 bp, Homo sapien
atggtcgctgagactccccttcgag

SEQ ID NO: 1560121 - DNA, 25 bp, Homo sapien
agtggatggtgtcccccatggtcgc

SEQ ID NO: 1560122 - DNA, 25 bp, Homo sapien
gagactccccttcgaggattgcacc

SEQ ID NO: 1560123 - DNA, 25 bp, Homo sapien
gagctgaagagggttctttatgacc

SEQ ID NO: 1560124 - DNA, 25 bp, Homo sapien
tggagctgaagagggttctttatga

SEQ ID NO: 1560125 - DNA, 25 bp, Homo sapien
ctggtgaatgcagcgtggagtctgt

SEQ ID NO: 1560126 - DNA, 25 bp, Homo sapien
ctgaagagggttctttatgacccct

SEQ ID NO: 1560127 - DNA, 25 bp, Homo sapien
agaggaggaggtggggagagcacga

SEQ ID NO: 1560128 - DNA, 25 bp, Homo sapien
gaggaggaggtggggagagcacgaa

SEQ ID NO: 1560129 - DNA, 25 bp, Homo sapien
gagaggaggaggtggggagagcacg

SEQ ID NO: 1560130 - DNA, 25 bp, Homo sapien
aggaggaggtggggagagcacgaag

SEQ ID NO: 1560131 - DNA, 25 bp, Homo sapien
cacggcctcgcgctgccatggaggc

SEQ ID NO: 1560132 - DNA, 25 bp, Homo sapien
gcccggcccctgaagcggctgcagc

SEQ ID NO: 1560133 - DNA, 25 bp, Homo sapien
acgcgcctcatcctcgaccgccacg

SEQ ID NO: 1560134 - DNA, 25 bp, Homo sapien
ggcgtgcgggcacccacacccagtc

SEQ ID NO: 1560135 - DNA, 25 bp, Homo sapien
catgttcttcggcttacagagtttc

SEQ ID NO: 1560136 - DNA, 25 bp, Homo sapien
tttccccatgttcttcggcttacag

SEQ ID NO: 1560137 - DNA, 25 bp, Homo sapien
tgttcttcggcttacagagtttcat

SEQ ID NO: 1560138 - DNA, 25 bp, Homo sapien
ttcttcggcttacagagtttcatca

SEQ ID NO: 1560139 - DNA, 25 bp, Homo sapien
tttcacagatgttcaggaggttcat

SEQ ID NO: 1560140 - DNA, 25 bp, Homo sapien
tctttagaggcccagtttcacagat

SEQ ID NO: 1560141 - DNA, 25 bp, Homo sapien
gcccagtttcacagatgttcaggag

SEQ ID NO: 1560142 - DNA, 25 bp, Homo sapien
ccagtttcacagatgttcaggaggt

SEQ ID NO: 1560143 - DNA, 25 bp, Homo sapien
caccgttgcgggtggcctggctggc

SEQ ID NO: 1560144 - DNA, 25 bp, Homo sapien
acggcactcacgtcccacaccgttg

SEQ ID NO: 1560145 - DNA, 25 bp, Homo sapien
tgtcctgctgctggaccgccggggg

SEQ ID NO: 1560146 - DNA, 25 bp, Homo sapien
ccgccgggggcaacggcactcacgt

SEQ ID NO: 1560147 - DNA, 25 bp, Homo sapien
aggctcggtgaacccacagctgaca

SEQ ID NO: 1560148 - DNA, 25 bp, Homo sapien
caacagcgattgtctcccaaaggtc

SEQ ID NO: 1560149 - DNA, 25 bp, Homo sapien
cagctgacaaaaggttccagagagg

SEQ ID NO: 1560150 - DNA, 25 bp, Homo sapien
ggcaggggctgagcaaagtttccaa

SEQ ID NO: 1560151 - DNA, 25 bp, Homo sapien
ggccgaggctgcgagggtgctggcg

SEQ ID NO: 1560152 - DNA, 25 bp, Homo sapien
tggcaaagacgaagtagaaggtgga

SEQ ID NO: 1560153 - DNA, 25 bp, Homo sapien
ggccaggaccacacgggctgagtat

SEQ ID NO: 1560154 - DNA, 25 bp, Homo sapien
ggaccacacgggctgagtatgccca

SEQ ID NO: 1560155 - DNA, 25 bp, Homo sapien
ccacacgggctgagtatgcccaggg

SEQ ID NO: 1560156 - DNA, 25 bp, Homo sapien
catcttggccagggcgtacagcgtg

SEQ ID NO: 1560157 - DNA, 25 bp, Homo sapien
ttggccagggcgtacagcgtggcgt

SEQ ID NO: 1560158 - DNA, 25 bp, Homo sapien
tctggttccccaggcggcccttgga

SEQ ID NO: 1560159 - DNA, 25 bp, Homo sapien
gcggcccttggagttgatagtgaac

SEQ ID NO: 1560160 - DNA, 25 bp, Homo sapien
gggtgaactcctggaggatctcctg

SEQ ID NO: 1560161 - DNA, 25 bp, Homo sapien
agggtgaactcctggaggatctcct

SEQ ID NO: 1560162 - DNA, 25 bp, Homo sapien
gcaggtagccggtcggccagcaccc

SEQ ID NO: 1560163 - DNA, 25 bp, Homo sapien
tgcaggtagccggtcggccagcacc

SEQ ID NO: 1560164 - DNA, 25 bp, Homo sapien
ctgcaggtagccggtcggccagcac

SEQ ID NO: 1560165 - DNA, 25 bp, Homo sapien
caggtagccggtcggccagcacccc

SEQ ID NO: 1560166 - DNA, 25 bp, Homo sapien
ctggaggccattgccagcgaacacc

SEQ ID NO: 1560167 - DNA, 25 bp, Homo sapien
ccatgtcatcgctggtgaccacaaa

SEQ ID NO: 1560168 - DNA, 25 bp, Homo sapien
tccccaagggagctgttgatgctct

SEQ ID NO: 1560169 - DNA, 25 bp, Homo sapien
tgtgagcagtgcgaagtccttggca

SEQ ID NO: 1560170 - DNA, 25 bp, Homo sapien
ccctcgggtcacaggatgaggacca

SEQ ID NO: 1560171 - DNA, 25 bp, Homo sapien
cacagaggttgagtcagttgtccaa

SEQ ID NO: 1560172 - DNA, 25 bp, Homo sapien
caaactgcatgagggaccgtgagtc

SEQ ID NO: 1560173 - DNA, 25 bp, Homo sapien
ggttgacatactaaggcacagaggt

SEQ ID NO: 1560174 - DNA, 25 bp, Homo sapien
tagttgcccagaaaatcgagttccc

SEQ ID NO: 1560175 - DNA, 25 bp, Homo sapien
tgataaggcccactaactccaaagc

SEQ ID NO: 1560176 - DNA, 25 bp, Homo sapien
gcaaaactgcgtttccattggaaag

SEQ ID NO: 1560177 - DNA, 25 bp, Homo sapien
cgtcctgggacgtgagtgcaaaata

SEQ ID NO: 1560178 - DNA, 25 bp, Homo sapien
taatccaacttgcacccgtactgag

SEQ ID NO: 1560179 - DNA, 25 bp, Homo sapien
catgatttggtcttagtggcccctg

SEQ ID NO: 1560180 - DNA, 25 bp, Homo sapien
gggaatccctcctcataggtgtgtc

SEQ ID NO: 1560181 - DNA, 25 bp, Homo sapien
tctcagagtggcattaggttctcgg

SEQ ID NO: 1560182 - DNA, 25 bp, Homo sapien
ttgcagtaaactgagattacaccat

SEQ ID NO: 1560183 - DNA, 25 bp, Homo sapien
aatgcaaaaatcagtggggcgtggt

SEQ ID NO: 1560184 - DNA, 25 bp, Homo sapien
taaaaatgcaaaaatcagtggggcg

SEQ ID NO: 1560185 - DNA, 25 bp, Homo sapien
gcagtaaactgagattacaccattg

SEQ ID NO: 1560186 - DNA, 25 bp, Homo sapien
ctcagtgttccctctgggtctctct

SEQ ID NO: 1560187 - DNA, 25 bp, Homo sapien
tcagtgttccctctgggtctctctt

SEQ ID NO: 1560188 - DNA, 25 bp, Homo sapien
cagtgttccctctgggtctctcttc

SEQ ID NO: 1560189 - DNA, 25 bp, Homo sapien
cctcagtgttccctctgggtctctc

SEQ ID NO: 1560190 - DNA, 25 bp, Homo sapien
gtgagaccagcagtttgggttccat

SEQ ID NO: 1560191 - DNA, 25 bp, Homo sapien
ccagggtggttcatagaaactgctg

SEQ ID NO: 1560192 - DNA, 25 bp, Homo sapien
cccagaacagaagcggtgattcaga

SEQ ID NO: 1560193 - DNA, 25 bp, Homo sapien
tgcgcgagccatctgcaccattact

SEQ ID NO: 1560194 - DNA, 25 bp, Homo sapien
ccactgcctcgagctcgctgtcttc

SEQ ID NO: 1560195 - DNA, 25 bp, Homo sapien
ggattcccggattcccggcattatc

SEQ ID NO: 1560196 - DNA, 25 bp, Homo sapien
gcctcgagctcgctgtcttcctgca

SEQ ID NO: 1560197 - DNA, 25 bp, Homo sapien
ggattcccggcattatcacttccac

SEQ ID NO: 1560198 - DNA, 25 bp, Homo sapien
aggaaggtggctgctgagtggccca

SEQ ID NO: 1560199 - DNA, 25 bp, Homo sapien
caggaagctgggcactgaccttgac

SEQ ID NO: 1560200 - DNA, 25 bp, Homo sapien
gctgggcactgaccttgactggagc

SEQ ID NO: 1560201 - DNA, 25 bp, Homo sapien
aagctgggcactgaccttgactgga

SEQ ID NO: 1560202 - DNA, 25 bp, Homo sapien
cgggacacgttagctgggagatgga

SEQ ID NO: 1560203 - DNA, 25 bp, Homo sapien
gctggtgaacgtggccatgcggtgg

SEQ ID NO: 1560204 - DNA, 25 bp, Homo sapien
cgctggtgaacgtggccatgcggtg

SEQ ID NO: 1560205 - DNA, 25 bp, Homo sapien
aaacgggacacgttagctgggagat

SEQ ID NO: 1560206 - DNA, 25 bp, Homo sapien
gctgctgaacgtgaaatatagtgga

SEQ ID NO: 1560207 - DNA, 25 bp, Homo sapien
ttgaatcttcgctagccgctgctga

SEQ ID NO: 1560208 - DNA, 25 bp, Homo sapien
ttcgctagccgctgctgaacgtgaa

SEQ ID NO: 1560209 - DNA, 25 bp, Homo sapien
tggcttgaatcttcgctagccgctg

SEQ ID NO: 1560210 - DNA, 25 bp, Homo sapien
ttgatgttgaggctagcactggtat

SEQ ID NO: 1560211 - DNA, 25 bp, Homo sapien
actggtatctgcaccggtaactccc

SEQ ID NO: 1560212 - DNA, 25 bp, Homo sapien
ttgaggctagcactggtatctgcac

SEQ ID NO: 1560213 - DNA, 25 bp, Homo sapien
tggtatctgcaccggtaactcccac

SEQ ID NO: 1560214 - DNA, 25 bp, Homo sapien
ccccaggcggcctattgcattgatc

SEQ ID NO: 1560215 - DNA, 25 bp, Homo sapien
cttggccagggcgtacagtgtggcg

SEQ ID NO: 1560216 - DNA, 25 bp, Homo sapien
tctggttccccaggcggcctattgc

SEQ ID NO: 1560217 - DNA, 25 bp, Homo sapien
tattgcattgatcgtccacatcccc

SEQ ID NO: 1560218 - DNA, 25 bp, Homo sapien
tagccggtgaagcggacgtactccc

SEQ ID NO: 1560219 - DNA, 25 bp, Homo sapien
agcggacgtactcccccgggatgtg

SEQ ID NO: 1560220 - DNA, 25 bp, Homo sapien
caggggtagccggtgaagcggacgt

SEQ ID NO: 1560221 - DNA, 25 bp, Homo sapien
ggtagccggtgaagcggacgtactc

SEQ ID NO: 1560222 - DNA, 25 bp, Homo sapien
gaacgtcccaatggtcatgatggtg

SEQ ID NO: 1560223 - DNA, 25 bp, Homo sapien
gaacatggacccctacaaaggtgcc

SEQ ID NO: 1560224 - DNA, 25 bp, Homo sapien
caccgtgggaggtgtcaatgttctc

SEQ ID NO: 1560225 - DNA, 25 bp, Homo sapien
gacatggacatagtcccctcggcga

SEQ ID NO: 1560226 - DNA, 25 bp, Homo sapien
catggaaccatgtgcttctcatgcc

SEQ ID NO: 1560227 - DNA, 25 bp, Homo sapien
cactgttcactgagatttctgttac

SEQ ID NO: 1560228 - DNA, 25 bp, Homo sapien
aaaggtctcaaagaatgggccagca

SEQ ID NO: 1560229 - DNA, 25 bp, Homo sapien
gcagcccaacgcatcttcacagaag

SEQ ID NO: 1560230 - DNA, 25 bp, Homo sapien
tttgcctcctatcgggtcacatggg

SEQ ID NO: 1560231 - DNA, 25 bp, Homo sapien
ggacacctggtttgatgagtagact

SEQ ID NO: 1560232 - DNA, 25 bp, Homo sapien
tgtgacaattcctacccatcggagt

SEQ ID NO: 1560233 - DNA, 25 bp, Homo sapien
gctctctgggtggacacaatgccaa

SEQ ID NO: 1560234 - DNA, 25 bp, Homo sapien
gttacaaatgtatcctctgagaggg

SEQ ID NO: 1560235 - DNA, 25 bp, Homo sapien
caatgatcatcccaggccctagaaa

SEQ ID NO: 1560236 - DNA, 25 bp, Homo sapien
aagaatgaacggaacgccctgaagt

SEQ ID NO: 1560237 - DNA, 25 bp, Homo sapien
ggatgcatgccagctacaagccaat

SEQ ID NO: 1560238 - DNA, 25 bp, Homo sapien
ccaactccatgactgtatgcacact

SEQ ID NO: 1560239 - DNA, 25 bp, Homo sapien
acccaactccatgactgtatgcaca

SEQ ID NO: 1560240 - DNA, 25 bp, Homo sapien
atacccaactccatgactgtatgca

SEQ ID NO: 1560241 - DNA, 25 bp, Homo sapien
caactccatgactgtatgcacactg

SEQ ID NO: 1560242 - DNA, 25 bp, Homo sapien
cactacgtcgtccaggccgcagtgc

SEQ ID NO: 1560243 - DNA, 25 bp, Homo sapien
tatcactacgtcgtccaggccgcag

SEQ ID NO: 1560244 - DNA, 25 bp, Homo sapien
atcactacgtcgtccaggccgcagt

SEQ ID NO: 1560245 - DNA, 25 bp, Homo sapien
atttatttataagagtcagggtatc

SEQ ID NO: 1560246 - DNA, 25 bp, Homo sapien
cttttctcccatccgcaaagtcata

SEQ ID NO: 1560247 - DNA, 25 bp, Homo sapien
ccttttctcccatccgcaaagtcat

SEQ ID NO: 1560248 - DNA, 25 bp, Homo sapien
tcccatccgcaaagtcataattgtg

SEQ ID NO: 1560249 - DNA, 25 bp, Homo sapien
ttctcccatccgcaaagtcataatt

SEQ ID NO: 1560250 - DNA, 25 bp, Homo sapien
gagttgtagttcttatcccgcgtgg

SEQ ID NO: 1560251 - DNA, 25 bp, Homo sapien
tgagaaccaataccaaacgagcgcg

SEQ ID NO: 1560252 - DNA, 25 bp, Homo sapien
gctgccagccaattatcgccatggg

SEQ ID NO: 1560253 - DNA, 25 bp, Homo sapien
cgagcgcgcgaaccttgaaatgtca

SEQ ID NO: 1560254 - DNA, 25 bp, Homo sapien
ggacatcttcgaaagcttctcctcg

SEQ ID NO: 1560255 - DNA, 25 bp, Homo sapien
aggggacatcttcgaaagcttctcc

SEQ ID NO: 1560256 - DNA, 25 bp, Homo sapien
acatcttcgaaagcttctcctcgca

SEQ ID NO: 1560257 - DNA, 25 bp, Homo sapien
gggacatcttcgaaagcttctcctc

SEQ ID NO: 1560258 - DNA, 25 bp, Homo sapien
tttccagggtccctcactcagacat

SEQ ID NO: 1560259 - DNA, 25 bp, Homo sapien
ttccagggtccctcactcagacatg

SEQ ID NO: 1560260 - DNA, 25 bp, Homo sapien
ccctcactcagacatgctgagtcag

SEQ ID NO: 1560261 - DNA, 25 bp, Homo sapien
actcagacatgctgagtcagaaagt

SEQ ID NO: 1560262 - DNA, 25 bp, Homo sapien
tcgtcttggactggctacagggagc

SEQ ID NO: 1560263 - DNA, 25 bp, Homo sapien
aatggtcccgagctgttcaaatccg

SEQ ID NO: 1560264 - DNA, 25 bp, Homo sapien
tagaaggaagccagcaccaacaatg

SEQ ID NO: 1560265 - DNA, 25 bp, Homo sapien
ctttaacacccacaggtcaaggccg

SEQ ID NO: 1560266 - DNA, 25 bp, Homo sapien
ggtcatattagacacaccacgggct

SEQ ID NO: 1560267 - DNA, 25 bp, Homo sapien
aagtagggatttgctcacggagacc

SEQ ID NO: 1560268 - DNA, 25 bp, Homo sapien
tagcagcctggattgtgaagccctt

SEQ ID NO: 1560269 - DNA, 25 bp, Homo sapien
ggattgagacctaccctgggcgtgt

SEQ ID NO: 1560270 - DNA, 25 bp, Homo sapien
agaaaccattatgggagatggtggg

SEQ ID NO: 1560271 - DNA, 25 bp, Homo sapien
atcccactggatgagaagttgacag

SEQ ID NO: 1560272 - DNA, 25 bp, Homo sapien
cttaggaagaaaccattatgggaga

SEQ ID NO: 1560273 - DNA, 25 bp, Homo sapien
atggtgggggagagatcccactgga

SEQ ID NO: 1560274 - DNA, 25 bp, Homo sapien
cactcagtggcgttgcgggtgctta

SEQ ID NO: 1560275 - DNA, 25 bp, Homo sapien
tgggaccatccaccatacaaagtgc

SEQ ID NO: 1560276 - DNA, 25 bp, Homo sapien
tacatagccggtcttcgggatgggt

SEQ ID NO: 1560277 - DNA, 25 bp, Homo sapien
gcttagagagtcctttgagatccag

SEQ ID NO: 1560278 - DNA, 25 bp, Homo sapien
cattaaggagattccattgtagaaa

SEQ ID NO: 1560279 - DNA, 25 bp, Homo sapien
agatccccgccaggcgtgcggctga

SEQ ID NO: 1560280 - DNA, 25 bp, Homo sapien
gtgcggctgactctcataatcccag

SEQ ID NO: 1560281 - DNA, 25 bp, Homo sapien
ttgtagaaagaagatccccgccagg

SEQ ID NO: 1560282 - DNA, 25 bp, Homo sapien
taggcgcgccaatgagacagtaagg

SEQ ID NO: 1560283 - DNA, 25 bp, Homo sapien
gaactgtcgcttaatgaggatgcct

SEQ ID NO: 1560284 - DNA, 25 bp, Homo sapien
tatgtgacccgtctgtcgtgctggc

SEQ ID NO: 1560285 - DNA, 25 bp, Homo sapien
atgcagattccgaggttccccgagg

SEQ ID NO: 1560286 - DNA, 25 bp, Homo sapien
gcaggtaccgtgctcattgctaacc

SEQ ID NO: 1560287 - DNA, 25 bp, Homo sapien
gcttgtgacaaactggcaggtaccg

SEQ ID NO: 1560288 - DNA, 25 bp, Homo sapien
tgagggatcactgccaaaatggtac

SEQ ID NO: 1560289 - DNA, 25 bp, Homo sapien
cgatctaaaggtaggcagaccctgg

SEQ ID NO: 1560290 - DNA, 25 bp, Homo sapien
gagcgggactctgtccaacaagccc

SEQ ID NO: 1560291 - DNA, 25 bp, Homo sapien
gaatgtgcaacctaattgtagcatc

SEQ ID NO: 1560292 - DNA, 25 bp, Homo sapien
tctctagttggccagcgtcttgctc

SEQ ID NO: 1560293 - DNA, 25 bp, Homo sapien
taatgaatgttccaccattgctgga

SEQ ID NO: 1560294 - DNA, 25 bp, Homo sapien
gcgaccgcatctgagacacaagtat

SEQ ID NO: 1560295 - DNA, 25 bp, Homo sapien
tgatcctcagcaaggcggcaattgc

SEQ ID NO: 1560296 - DNA, 25 bp, Homo sapien
tcttggaccatctatgcagatcacg

SEQ ID NO: 1560297 - DNA, 25 bp, Homo sapien
agagaaatttctgcgccccatctga

SEQ ID NO: 1560298 - DNA, 25 bp, Homo sapien
tgccagattccagttgtccaggtga

SEQ ID NO: 1560299 - DNA, 25 bp, Homo sapien
agaatttatacccagacaggcccgc

SEQ ID NO: 1560300 - DNA, 25 bp, Homo sapien
tacagaattccatcgtggcaagggc

SEQ ID NO: 1560301 - DNA, 25 bp, Homo sapien
ggtcctttcaatggagggccagact

SEQ ID NO: 1560302 - DNA, 25 bp, Homo sapien
cacagtcctgagtgctcgaacccgg

SEQ ID NO: 1560303 - DNA, 25 bp, Homo sapien
tgctcgaacccggtctcgtccgagt

SEQ ID NO: 1560304 - DNA, 25 bp, Homo sapien
gcaggctcccagcagaagaccagcc

SEQ ID NO: 1560305 - DNA, 25 bp, Homo sapien
tgagtgctcgaacccggtctcgtcc

SEQ ID NO: 1560306 - DNA, 25 bp, Homo sapien
tgtgtagaggtaccgctgccggact

SEQ ID NO: 1560307 - DNA, 25 bp, Homo sapien
agaggtaccgctgccggacttggcc

SEQ ID NO: 1560308 - DNA, 25 bp, Homo sapien
catcatctgtgtagaggtaccgctg

SEQ ID NO: 1560309 - DNA, 25 bp, Homo sapien
ctgggcatcatctgtgtagaggtac

SEQ ID NO: 1560310 - DNA, 25 bp, Homo sapien
cttgactcccaagatttgaataact

SEQ ID NO: 1560311 - DNA, 25 bp, Homo sapien
ggaacctggatgtcttgactcccaa

SEQ ID NO: 1560312 - DNA, 25 bp, Homo sapien
tcccaagatttgaataactcccggc

SEQ ID NO: 1560313 - DNA, 25 bp, Homo sapien
aagatttgaataactcccggcttca

SEQ ID NO: 1560314 - DNA, 25 bp, Homo sapien
gggacttgttccctggcaggtgcag

SEQ ID NO: 1560315 - DNA, 25 bp, Homo sapien
ccgtgggcttcggactggtaaacat

SEQ ID NO: 1560316 - DNA, 25 bp, Homo sapien
ggtaaacattgtatccgtcctcaag

SEQ ID NO: 1560317 - DNA, 25 bp, Homo sapien
ttgtatccgtcctcaagaagcagct

SEQ ID NO: 1560318 - DNA, 25 bp, Homo sapien
tcccaccatgctcagagggtccgag

SEQ ID NO: 1560319 - DNA, 25 bp, Homo sapien
gagggtccgaggagcccacatcggg

SEQ ID NO: 1560320 - DNA, 25 bp, Homo sapien
agggtccgaggagcccacatcgggg

SEQ ID NO: 1560321 - DNA, 25 bp, Homo sapien
caccatgctcagagggtccgaggag

SEQ ID NO: 1560322 - DNA, 25 bp, Homo sapien
aggagatgtcatagtaaacagcctc

SEQ ID NO: 1560323 - DNA, 25 bp, Homo sapien
agatgtcatagtaaacagcctctgg

SEQ ID NO: 1560324 - DNA, 25 bp, Homo sapien
aactctttattatctcaagtaagaa

SEQ ID NO: 1560325 - DNA, 25 bp, Homo sapien
atgtcatagtaaacagcctctggct

SEQ ID NO: 1560326 - DNA, 25 bp, Homo sapien
tgctgcatgccccagttactccagt

SEQ ID NO: 1560327 - DNA, 25 bp, Homo sapien
gctgcatgccccagttactccagtt

SEQ ID NO: 1560328 - DNA, 25 bp, Homo sapien
tgccccagttactccagttactcag

SEQ ID NO: 1560329 - DNA, 25 bp, Homo sapien
gcatgccccagttactccagttact

SEQ ID NO: 1560330 - DNA, 25 bp, Homo sapien
aaagaggccttgtgaggtcaaaggt

SEQ ID NO: 1560331 - DNA, 25 bp, Homo sapien
aagaggccttgtgaggtcaaaggtc

SEQ ID NO: 1560332 - DNA, 25 bp, Homo sapien
ggaaagaggccttgtgaggtcaaag

SEQ ID NO: 1560333 - DNA, 25 bp, Homo sapien
ctctcaacctcacgccccaacgcct

SEQ ID NO: 1560334 - DNA, 25 bp, Homo sapien
ctctctcaacctcacgccccaacgc

SEQ ID NO: 1560335 - DNA, 25 bp, Homo sapien
ctagcgacaagtgaccacgcccatt

SEQ ID NO: 1560336 - DNA, 25 bp, Homo sapien
gaccacgcccattcacgtccatctt

SEQ ID NO: 1560337 - DNA, 25 bp, Homo sapien
gatgtcgccacccaaaggcaatctg

SEQ ID NO: 1560338 - DNA, 25 bp, Homo sapien
caaggctgagcagtctagatgtcgc

SEQ ID NO: 1560339 - DNA, 25 bp, Homo sapien
ttttcatcttggctctgagggcagc

SEQ ID NO: 1560340 - DNA, 25 bp, Homo sapien
ggtgtcctatccctctgggcagaag

SEQ ID NO: 1560341 - DNA, 25 bp, Homo sapien
ggctggctgagacgatcccttctga

SEQ ID NO: 1560342 - DNA, 25 bp, Homo sapien
caagtctcagctctgggaattggac

SEQ ID NO: 1560343 - DNA, 25 bp, Homo sapien
gctttgcacctggattggaaatcga

SEQ ID NO: 1560344 - DNA, 25 bp, Homo sapien
gaggcagcgtctcatggtcaaagtg

SEQ ID NO: 1560345 - DNA, 25 bp, Homo sapien
tggaggaccctgtaatgagggaggc

SEQ ID NO: 1560346 - DNA, 25 bp, Homo sapien
tgaggtggggcaagtaattggcggg

SEQ ID NO: 1560347 - DNA, 25 bp, Homo sapien
ggagcaggtagacgcggatgaggtg

SEQ ID NO: 1560348 - DNA, 25 bp, Homo sapien
gaaaggagcacgaggctttaatggg

SEQ ID NO: 1560349 - DNA, 25 bp, Homo sapien
agttacgcgccgcacggatcatggc

SEQ ID NO: 1560350 - DNA, 25 bp, Homo sapien
ggcgtggccggaacgtctctcttcg

SEQ ID NO: 1560351 - DNA, 25 bp, Homo sapien
gcctggcagggaccgtatttcaagt

SEQ ID NO: 1560352 - DNA, 25 bp, Homo sapien
ggaggcgcacttccgggaagaccac

SEQ ID NO: 1560353 - DNA, 25 bp, Homo sapien
cctcaagtgccgtggcgacaagcgg

SEQ ID NO: 1560354 - DNA, 25 bp, Homo sapien
gggtcgtgcagcgtcttgcataaga

SEQ ID NO: 1560355 - DNA, 25 bp, Homo sapien
ttgcataagatcaacaactgggatg

SEQ ID NO: 1560356 - DNA, 25 bp, Homo sapien
gagtatctccggctgcctcaagtgc

SEQ ID NO: 1560357 - DNA, 25 bp, Homo sapien
agcgccggttcggtctgccagaagc

SEQ ID NO: 1560358 - DNA, 25 bp, Homo sapien
gttagggaggccagcgcgttcatct

SEQ ID NO: 1560359 - DNA, 25 bp, Homo sapien
agcgatcacaggtccggacggttag

SEQ ID NO: 1560360 - DNA, 25 bp, Homo sapien
tctgccagaagcgatcacaggtccg

SEQ ID NO: 1560361 - DNA, 25 bp, Homo sapien
ggttgcctctcgctcaccatacatg

SEQ ID NO: 1560362 - DNA, 25 bp, Homo sapien
tctgcaaattgacttccctgccctc

SEQ ID NO: 1560363 - DNA, 25 bp, Homo sapien
ggattgccagaggagtcctagcttc

SEQ ID NO: 1560364 - DNA, 25 bp, Homo sapien
tgccctctagggacactggttgcct

SEQ ID NO: 1560365 - DNA, 25 bp, Homo sapien
ggccttcaagaaagcacttgcaggg

SEQ ID NO: 1560366 - DNA, 25 bp, Homo sapien
cctgaacgatactcccaggacctgg

SEQ ID NO: 1560367 - DNA, 25 bp, Homo sapien
gaagacacctgtagcaggagtggaa

SEQ ID NO: 1560368 - DNA, 25 bp, Homo sapien
cactcccggtgtgatggtggataag

SEQ ID NO: 1560369 - DNA, 25 bp, Homo sapien
tcttttccaggtcgatatccccagc

SEQ ID NO: 1560370 - DNA, 25 bp, Homo sapien
ctgaagtgggccctctggtccgggt

SEQ ID NO: 1560371 - DNA, 25 bp, Homo sapien
tgaagtgggccctctggtccgggtg

SEQ ID NO: 1560372 - DNA, 25 bp, Homo sapien
gtcgatatccccagcccctgaagtg

SEQ ID NO: 1560373 - DNA, 25 bp, Homo sapien
caggtacatagatggccactcggaa

SEQ ID NO: 1560374 - DNA, 25 bp, Homo sapien
tctctccaggtacatagatggccac

SEQ ID NO: 1560375 - DNA, 25 bp, Homo sapien
tctccaggtacatagatggccactc

SEQ ID NO: 1560376 - DNA, 25 bp, Homo sapien
tccaggtacatagatggccactcgg

SEQ ID NO: 1560377 - DNA, 25 bp, Homo sapien
tctcagggtccggatcatgagtagg

SEQ ID NO: 1560378 - DNA, 25 bp, Homo sapien
ggtttctgggcgcttgagccgcctt

SEQ ID NO: 1560379 - DNA, 25 bp, Homo sapien
gagtctcagggtccggatcatgagt

SEQ ID NO: 1560380 - DNA, 25 bp, Homo sapien
cttgagccgcctttgcagtcggagg

SEQ ID NO: 1560381 - DNA, 25 bp, Homo sapien
tggagatgacatgcaaccctctgca

SEQ ID NO: 1560382 - DNA, 25 bp, Homo sapien
tgcctgtcactgtcacgggattctc

SEQ ID NO: 1560383 - DNA, 25 bp, Homo sapien
tttctaagactcaagaatctgggct

SEQ ID NO: 1560384 - DNA, 25 bp, Homo sapien
tcttacaagggattgcgtgacagcg

SEQ ID NO: 1560385 - DNA, 25 bp, Homo sapien
ggacagtgaccttctcggagaagcg

SEQ ID NO: 1560386 - DNA, 25 bp, Homo sapien
gatcccgagcaagctgctcccaggg

SEQ ID NO: 1560387 - DNA, 25 bp, Homo sapien
gggtgatgcggcgtgcgaagcggct

SEQ ID NO: 1560388 - DNA, 25 bp, Homo sapien
cagtgaccttctcggagaagcgcac

SEQ ID NO: 1560389 - DNA, 25 bp, Homo sapien
agggcagggatgggggctaaaggtg

SEQ ID NO: 1560390 - DNA, 25 bp, Homo sapien
ggaggaaggcaaggtctgggtgagg

SEQ ID NO: 1560391 - DNA, 25 bp, Homo sapien
ctaaaggtgggttcctgaggcgtgc

SEQ ID NO: 1560392 - DNA, 25 bp, Homo sapien
gaggaggaaggcaaggtctgggtga

SEQ ID NO: 1560393 - DNA, 25 bp, Homo sapien
cagcagcagacgagcgggaaggtgt

SEQ ID NO: 1560394 - DNA, 25 bp, Homo sapien
agcagcagacgagcgggaaggtgtg

SEQ ID NO: 1560395 - DNA, 25 bp, Homo sapien
acagcttggctcaagggcgtggtct

SEQ ID NO: 1560396 - DNA, 25 bp, Homo sapien
agcagacgagcgggaaggtgtggcc

SEQ ID NO: 1560397 - DNA, 25 bp, Homo sapien
ataaattataggcaaaccagttggt

SEQ ID NO: 1560398 - DNA, 25 bp, Homo sapien
aataaattataggcaaaccagttgg

SEQ ID NO: 1560399 - DNA, 25 bp, Homo sapien
tattccttatataaacccacactta

SEQ ID NO: 1560400 - DNA, 25 bp, Homo sapien
taaattataggcaaaccagttggtc

SEQ ID NO: 1560401 - DNA, 25 bp, Homo sapien
cttcaccgcagagggcgttttccag

SEQ ID NO: 1560402 - DNA, 25 bp, Homo sapien
gattggtccacgctggctctgtagc

SEQ ID NO: 1560403 - DNA, 25 bp, Homo sapien
gaagccgctcgcattttcgtgaaag

SEQ ID NO: 1560404 - DNA, 25 bp, Homo sapien
gacctccggtgcgttcttggtgact

SEQ ID NO: 1560405 - DNA, 25 bp, Homo sapien
cagcagcggcaacagaaggagggtt

SEQ ID NO: 1560406 - DNA, 25 bp, Homo sapien
gggactctcagtcgcaggggtctcc

SEQ ID NO: 1560407 - DNA, 25 bp, Homo sapien
ggcgcccctcgctccagggggacag

SEQ ID NO: 1560408 - DNA, 25 bp, Homo sapien
gactctcagtcgcaggggtctcctc

SEQ ID NO: 1560409 - DNA, 25 bp, Homo sapien
ggactctcagtcgcaggggtctcct

SEQ ID NO: 1560410 - DNA, 25 bp, Homo sapien
tgcaaacacctggctggatagcagg

SEQ ID NO: 1560411 - DNA, 25 bp, Homo sapien
cactgcaaacacctggctggatagc

SEQ ID NO: 1560412 - DNA, 25 bp, Homo sapien
actgcaaacacctggctggatagca

SEQ ID NO: 1560413 - DNA, 25 bp, Homo sapien
ctgcaaacacctggctggatagcag

SEQ ID NO: 1560414 - DNA, 25 bp, Homo sapien
tgcagcttctctcggaaatgcccat

SEQ ID NO: 1560415 - DNA, 25 bp, Homo sapien
tgatgtcctccgcattggcagcctg

SEQ ID NO: 1560416 - DNA, 25 bp, Homo sapien
tctccagtacatcgatgacctcctg

SEQ ID NO: 1560417 - DNA, 25 bp, Homo sapien
taccggtggtagtacaggcctgtgt

SEQ ID NO: 1560418 - DNA, 25 bp, Homo sapien
ggccttgagcagcatccgcagccgt

SEQ ID NO: 1560419 - DNA, 25 bp, Homo sapien
cttggtgcggacgtggtggctgaca

SEQ ID NO: 1560420 - DNA, 25 bp, Homo sapien
ctgacaaagtccagctctcggctca

SEQ ID NO: 1560421 - DNA, 25 bp, Homo sapien
cttgagcagcatccgcagccgtgac

SEQ ID NO: 1560422 - DNA, 25 bp, Homo sapien
ggtccaggtgttcaaactgtttcag

SEQ ID NO: 1560423 - DNA, 25 bp, Homo sapien
gggtccaggtgttcaaactgtttca

SEQ ID NO: 1560424 - DNA, 25 bp, Homo sapien
cgcgggcctcgaatgtatgctggtt

SEQ ID NO: 1560425 - DNA, 25 bp, Homo sapien
tccaggtcgcgggcctcgaatgtat

SEQ ID NO: 1560426 - DNA, 25 bp, Homo sapien
cagctccaggtcgcgggcctcgaat

SEQ ID NO: 1560427 - DNA, 25 bp, Homo sapien
aggtcgcgggcctcgaatgtatgct

SEQ ID NO: 1560428 - DNA, 25 bp, Homo sapien
aggaataagtaaataggaacaacat

SEQ ID NO: 1560429 - DNA, 25 bp, Homo sapien
gaggaataagtaaataggaacaaca

SEQ ID NO: 1560430 - DNA, 25 bp, Homo sapien
ggaacaacatatgtggtgaacttag

SEQ ID NO: 1560431 - DNA, 25 bp, Homo sapien
gcgcacagcctgatgtcgccctttt

SEQ ID NO: 1560432 - DNA, 25 bp, Homo sapien
acagcctgatgtcgccctttttggt

SEQ ID NO: 1560433 - DNA, 25 bp, Homo sapien
gatgtcgccctttttggtttccatg

SEQ ID NO: 1560434 - DNA, 25 bp, Homo sapien
ctcctgccccataacacactttctt

SEQ ID NO: 1560435 - DNA, 25 bp, Homo sapien
ccagtgactccagataacgccgtct

SEQ ID NO: 1560436 - DNA, 25 bp, Homo sapien
aacgccgtctctcgtgttccttaag

SEQ ID NO: 1560437 - DNA, 25 bp, Homo sapien
gctgcgtcgtactgggcaaggtccc

SEQ ID NO: 1560438 - DNA, 25 bp, Homo sapien
tagcgcttgaactcttcatgatggg

SEQ ID NO: 1560439 - DNA, 25 bp, Homo sapien
acgttgactttagggtgctcgcggt

SEQ ID NO: 1560440 - DNA, 25 bp, Homo sapien
ggtgctcgcggtgccggcgctgttg

SEQ ID NO: 1560441 - DNA, 25 bp, Homo sapien
aggcacgttgactttagggtgctcg

SEQ ID NO: 1560442 - DNA, 25 bp, Homo sapien
gcacgttgactttagggtgctcgcg

SEQ ID NO: 1560443 - DNA, 25 bp, Homo sapien
cacctccttcaactgggcttggctg

SEQ ID NO: 1560444 - DNA, 25 bp, Homo sapien
aacctgttggggtccagtccatcca

SEQ ID NO: 1560445 - DNA, 25 bp, Homo sapien
tcctcccacacctccttcaactggg

SEQ ID NO: 1560446 - DNA, 25 bp, Homo sapien
ccacacctccttcaactgggcttgg

SEQ ID NO: 1560447 - DNA, 25 bp, Homo sapien
tggcattcagtgctctggacacaga

SEQ ID NO: 1560448 - DNA, 25 bp, Homo sapien
tcactgtcatgcaggattctctggc

SEQ ID NO: 1560449 - DNA, 25 bp, Homo sapien
gctccagggttatcagggacctctg

SEQ ID NO: 1560450 - DNA, 25 bp, Homo sapien
tatcagaggacaggtaactacgggt

SEQ ID NO: 1560451 - DNA, 25 bp, Homo sapien
cttggtgaagagtgcctccagctcc

SEQ ID NO: 1560452 - DNA, 25 bp, Homo sapien
ctccttggtgaagagtgcctccagc

SEQ ID NO: 1560453 - DNA, 25 bp, Homo sapien
tccaggacaccatcactgttgatat

SEQ ID NO: 1560454 - DNA, 25 bp, Homo sapien
tgctcatccaggacaccatcactgt

SEQ ID NO: 1560455 - DNA, 25 bp, Homo sapien
ggtgcccgaggcttccaagatgctc

SEQ ID NO: 1560456 - DNA, 25 bp, Homo sapien
tgcaggaggaaacaagtggctgatt

SEQ ID NO: 1560457 - DNA, 25 bp, Homo sapien
ctgatttgggcgtccctccaggtgc

SEQ ID NO: 1560458 - DNA, 25 bp, Homo sapien
gttttcactgagctcccatccaggg

SEQ ID NO: 1560459 - DNA, 25 bp, Homo sapien
tctttgggtcgtacactttctccag

SEQ ID NO: 1560460 - DNA, 25 bp, Homo sapien
tcctcattctttgggtcgtacactt

SEQ ID NO: 1560461 - DNA, 25 bp, Homo sapien
ctcattctttgggtcgtacactttc

SEQ ID NO: 1560462 - DNA, 25 bp, Homo sapien
cattctttgggtcgtacactttctc

SEQ ID NO: 1560463 - DNA, 25 bp, Homo sapien
gctcccgcatgcgcagtcgctcctc

SEQ ID NO: 1560464 - DNA, 25 bp, Homo sapien
tcccgcatgcgcagtcgctcctcct

SEQ ID NO: 1560465 - DNA, 25 bp, Homo sapien
cgcatgcgcagtcgctcctcctcca

SEQ ID NO: 1560466 - DNA, 25 bp, Homo sapien
atgctcccgcatgcgcagtcgctcc

SEQ ID NO: 1560467 - DNA, 25 bp, Homo sapien
agccagataagggtgagtgacagag

SEQ ID NO: 1560468 - DNA, 25 bp, Homo sapien
ggagccagataagggtgagtgacag

SEQ ID NO: 1560469 - DNA, 25 bp, Homo sapien
ctggggagccagataagggtgagtg

SEQ ID NO: 1560470 - DNA, 25 bp, Homo sapien
ggggagccagataagggtgagtgac

SEQ ID NO: 1560471 - DNA, 25 bp, Homo sapien
cttcctctgagtggatgcgaggaac

SEQ ID NO: 1560472 - DNA, 25 bp, Homo sapien
actcctccagggtcacgaggcggtc

SEQ ID NO: 1560473 - DNA, 25 bp, Homo sapien
cctccagggtcacgaggcggtcctg

SEQ ID NO: 1560474 - DNA, 25 bp, Homo sapien
tgagtggatgcgaggaactcctcca

SEQ ID NO: 1560475 - DNA, 25 bp, Homo sapien
gctcctcttcaaagcgcctcagctc

SEQ ID NO: 1560476 - DNA, 25 bp, Homo sapien
cctcagctcttcctcggtgtaggca

SEQ ID NO: 1560477 - DNA, 25 bp, Homo sapien
ctcggtgtaggcagggtgcatctcc

SEQ ID NO: 1560478 - DNA, 25 bp, Homo sapien
ctgaggcgctgggccttggcattca

SEQ ID NO: 1560479 - DNA, 25 bp, Homo sapien
ggatggaagcagcttcccccgctgt

SEQ ID NO: 1560480 - DNA, 25 bp, Homo sapien
atggaagcagcttcccccgctgtca

SEQ ID NO: 1560481 - DNA, 25 bp, Homo sapien
cagtggatggaagcagcttcccccg

SEQ ID NO: 1560482 - DNA, 25 bp, Homo sapien
tggatggaagcagcttcccccgctg

SEQ ID NO: 1560483 - DNA, 25 bp, Homo sapien
ggtggaacttgagctgcccctcagg

SEQ ID NO: 1560484 - DNA, 25 bp, Homo sapien
tccgctgctccatgtgcagcacagc

SEQ ID NO: 1560485 - DNA, 25 bp, Homo sapien
tgtgtctgggtggaacttgagctgc

SEQ ID NO: 1560486 - DNA, 25 bp, Homo sapien
gcagccggggccttgtggccttgct

SEQ ID NO: 1560487 - DNA, 25 bp, Homo sapien
tccttctggtcaccggctggagctg

SEQ ID NO: 1560488 - DNA, 25 bp, Homo sapien
cttctggtcaccggctggagctggg

SEQ ID NO: 1560489 - DNA, 25 bp, Homo sapien
ttctggtcaccggctggagctggga

SEQ ID NO: 1560490 - DNA, 25 bp, Homo sapien
ccttctggtcaccggctggagctgg

SEQ ID NO: 1560491 - DNA, 25 bp, Homo sapien
gagccgctcgagaagtttcttttct

SEQ ID NO: 1560492 - DNA, 25 bp, Homo sapien
ctcaacctcagggagccgctcgaga

SEQ ID NO: 1560493 - DNA, 25 bp, Homo sapien
agggagccgctcgagaagtttcttt

SEQ ID NO: 1560494 - DNA, 25 bp, Homo sapien
ctcagggagccgctcgagaagtttc

SEQ ID NO: 1560495 - DNA, 25 bp, Homo sapien
aatgcgtgaaatgccaggccgtgcc

SEQ ID NO: 1560496 - DNA, 25 bp, Homo sapien
tcactggacacgagagaaggcaagc

SEQ ID NO: 1560497 - DNA, 25 bp, Homo sapien
taagttaagccgatcactgagcacc

SEQ ID NO: 1560498 - DNA, 25 bp, Homo sapien
catcagtcgccttggagcatcagga

SEQ ID NO: 1560499 - DNA, 25 bp, Homo sapien
ggttcaccggctatactgaggatcc

SEQ ID NO: 1560500 - DNA, 25 bp, Homo sapien
caatagcgttttggagggaccagtc

SEQ ID NO: 1560501 - DNA, 25 bp, Homo sapien
tcttcaaagatgaggactccggcag

SEQ ID NO: 1560502 - DNA, 25 bp, Homo sapien
gggaccagtccagatacacaggcat

SEQ ID NO: 1560503 - DNA, 25 bp, Homo sapien
tctatccgcctctgccttctaaagt

SEQ ID NO: 1560504 - DNA, 25 bp, Homo sapien
tgctctggtactccggttggagtgc

SEQ ID NO: 1560505 - DNA, 25 bp, Homo sapien
gatcccccctatcttggcctttcga

SEQ ID NO: 1560506 - DNA, 25 bp, Homo sapien
tggaatcttgctctggtactccggt

SEQ ID NO: 1560507 - DNA, 25 bp, Homo sapien
gcatgacacacatatagcttcccag

SEQ ID NO: 1560508 - DNA, 25 bp, Homo sapien
tatgctcattgttcaggtgcagctg

SEQ ID NO: 1560509 - DNA, 25 bp, Homo sapien
cattccaggatctgggaatatgtat

SEQ ID NO: 1560510 - DNA, 25 bp, Homo sapien
agcgttgcaatcaccgcttcccagg

SEQ ID NO: 1560511 - DNA, 25 bp, Homo sapien
tccccagactggatagggtgtttct

SEQ ID NO: 1560512 - DNA, 25 bp, Homo sapien
tcagagggcaagaatttctcgggca

SEQ ID NO: 1560513 - DNA, 25 bp, Homo sapien
gggttggactggcaaattccccaga

SEQ ID NO: 1560514 - DNA, 25 bp, Homo sapien
tggccagacgcatttatactggagc

SEQ ID NO: 1560515 - DNA, 25 bp, Homo sapien
caggcgcgaattaagtacctgacgc

SEQ ID NO: 1560516 - DNA, 25 bp, Homo sapien
gcgcgaattaagtacctgacgcccc

SEQ ID NO: 1560517 - DNA, 25 bp, Homo sapien
ctccaggcgcgaattaagtacctga

SEQ ID NO: 1560518 - DNA, 25 bp, Homo sapien
gcgaattaagtacctgacgccccgc

SEQ ID NO: 1560519 - DNA, 25 bp, Homo sapien
ggttgcgatgcggagccctcggcac

SEQ ID NO: 1560520 - DNA, 25 bp, Homo sapien
agcacggctgtgaagtcgctggaga

SEQ ID NO: 1560521 - DNA, 25 bp, Homo sapien
gacagacacgatgccccagcgcagc

SEQ ID NO: 1560522 - DNA, 25 bp, Homo sapien
tctgcagcacggctgtgaagtcgct

SEQ ID NO: 1560523 - DNA, 25 bp, Homo sapien
gccgacagacacgatgccccagcgc

SEQ ID NO: 1560524 - DNA, 25 bp, Homo sapien
ttcgcacggctcagatcgcgggccg

SEQ ID NO: 1560525 - DNA, 25 bp, Homo sapien
gtgtttctgtgcaaactccttcgca

SEQ ID NO: 1560526 - DNA, 25 bp, Homo sapien
tgtgcaaactccttcgcacggctca

SEQ ID NO: 1560527 - DNA, 25 bp, Homo sapien
gggatgtcgtgtttctgtgcaaact

SEQ ID NO: 1560528 - DNA, 25 bp, Homo sapien
gggcttctcgcacagaacggccttg

SEQ ID NO: 1560529 - DNA, 25 bp, Homo sapien
atctcgcgaacttccgccgcgttca

SEQ ID NO: 1560530 - DNA, 25 bp, Homo sapien
ttgcccgccgccaagcacagcatca

SEQ ID NO: 1560531 - DNA, 25 bp, Homo sapien
ggcctccgcgaccatctcgcgaact

SEQ ID NO: 1560532 - DNA, 25 bp, Homo sapien
gttccctgggccaaaacagacctca

SEQ ID NO: 1560533 - DNA, 25 bp, Homo sapien
gagccacccggaggtctcctagagt

SEQ ID NO: 1560534 - DNA, 25 bp, Homo sapien
aactggacacagtagatgccgatgt

SEQ ID NO: 1560535 - DNA, 25 bp, Homo sapien
gacgccttcccacgacagaaatctt

SEQ ID NO: 1560536 - DNA, 25 bp, Homo sapien
tgaaatattccaggatagatggtac

SEQ ID NO: 1560537 - DNA, 25 bp, Homo sapien
taagattcagagatgttaagtctgc

SEQ ID NO: 1560538 - DNA, 25 bp, Homo sapien
tgttcctctaggtgtctgatctaat

SEQ ID NO: 1560539 - DNA, 25 bp, Homo sapien
tctggcttcatggaaagttgttcct

SEQ ID NO: 1560540 - DNA, 25 bp, Homo sapien
cattgacttggagacttgtcctcag

SEQ ID NO: 1560541 - DNA, 25 bp, Homo sapien
catggacctcccctgggtactgcag

SEQ ID NO: 1560542 - DNA, 25 bp, Homo sapien
tgcaggagcaccgtgacagtgtcat

SEQ ID NO: 1560543 - DNA, 25 bp, Homo sapien
tgtaccatgcccttggtgccgctca

SEQ ID NO: 1560544 - DNA, 25 bp, Homo sapien
tgttggagagctgcacggtgatgct

SEQ ID NO: 1560545 - DNA, 25 bp, Homo sapien
ggcagcgggaactccttatgctccc

SEQ ID NO: 1560546 - DNA, 25 bp, Homo sapien
gtcaaaattgcagtcctttgggact

SEQ ID NO: 1560547 - DNA, 25 bp, Homo sapien
gcctgccccgttgtcaaaattgcag

SEQ ID NO: 1560548 - DNA, 25 bp, Homo sapien
aaaattgcagtcctttgggactggg

SEQ ID NO: 1560549 - DNA, 25 bp, Homo sapien
taggcactcccagacgtgcttggcc

SEQ ID NO: 1560550 - DNA, 25 bp, Homo sapien
ttgcgtaggcactcccagacgtgct

SEQ ID NO: 1560551 - DNA, 25 bp, Homo sapien
cgtaggcactcccagacgtgcttgg

SEQ ID NO: 1560552 - DNA, 25 bp, Homo sapien
ccttgcgtaggcactcccagacgtg

SEQ ID NO: 1560553 - DNA, 25 bp, Homo sapien
aggggaatcacaggactttccttca

SEQ ID NO: 1560554 - DNA, 25 bp, Homo sapien
tttccgacaggggaatcacaggact

SEQ ID NO: 1560555 - DNA, 25 bp, Homo sapien
acaggggaatcacaggactttcctt

SEQ ID NO: 1560556 - DNA, 25 bp, Homo sapien
ggaatcacaggactttccttcatac

SEQ ID NO: 1560557 - DNA, 25 bp, Homo sapien
aaggtgactccaatggccttcctca

SEQ ID NO: 1560558 - DNA, 25 bp, Homo sapien
gatgtaagatgtctttatttattcg

SEQ ID NO: 1560559 - DNA, 25 bp, Homo sapien
gatgtctttatttattcggggatac

SEQ ID NO: 1560560 - DNA, 25 bp, Homo sapien
tgtaagatgtctttatttattcggg

SEQ ID NO: 1560561 - DNA, 25 bp, Homo sapien
taagatgtctttatttattcgggga

SEQ ID NO: 1560562 - DNA, 25 bp, Homo sapien
tcagaggcccaaaatagcatgcttc

SEQ ID NO: 1560563 - DNA, 25 bp, Homo sapien
tccaggcaggacgttatagatgact

SEQ ID NO: 1560564 - DNA, 25 bp, Homo sapien
catctcccgataagtgccagcagtg

SEQ ID NO: 1560565 - DNA, 25 bp, Homo sapien
gtgagcccaagagataaccccgtct

SEQ ID NO: 1560566 - DNA, 25 bp, Homo sapien
ctctcgccgggtccgcgcgggcggc

SEQ ID NO: 1560567 - DNA, 25 bp, Homo sapien
ggcggccgcagcgcgcccgggtcac

SEQ ID NO: 1560568 - DNA, 25 bp, Homo sapien
gcctctcgccgggtccgcgcgggcg

SEQ ID NO: 1560569 - DNA, 25 bp, Homo sapien
cgccgcctctcgccgggtccgcgcg

SEQ ID NO: 1560570 - DNA, 25 bp, Homo sapien
cctctgggctgctccccggacccgt

SEQ ID NO: 1560571 - DNA, 25 bp, Homo sapien
cccgcctctgggctgctccccggac

SEQ ID NO: 1560572 - DNA, 25 bp, Homo sapien
gcctctgggctgctccccggacccg

SEQ ID NO: 1560573 - DNA, 25 bp, Homo sapien
tgggctgctccccggacccgtccat

SEQ ID NO: 1560574 - DNA, 25 bp, Homo sapien
tgggaccctagcagataaagtgacg

SEQ ID NO: 1560575 - DNA, 25 bp, Homo sapien
cagacaactgagtccctgatggaga

SEQ ID NO: 1560576 - DNA, 25 bp, Homo sapien
gatccgggagtttctgcccctcagt

SEQ ID NO: 1560577 - DNA, 25 bp, Homo sapien
gaacgctatatgcatccagacccct

SEQ ID NO: 1560578 - DNA, 25 bp, Homo sapien
atcaggagactgtggagactcacgg

SEQ ID NO: 1560579 - DNA, 25 bp, Homo sapien
ctggactcttgggttctaggggatc

SEQ ID NO: 1560580 - DNA, 25 bp, Homo sapien
actcttgggttctaggggatcagga

SEQ ID NO: 1560581 - DNA, 25 bp, Homo sapien
aggagactgtggagactcacggccc

SEQ ID NO: 1560582 - DNA, 25 bp, Homo sapien
agggcccctgtcttcatgatctgct

SEQ ID NO: 1560583 - DNA, 25 bp, Homo sapien
gtcactcctcaaatctgtgccacaa

SEQ ID NO: 1560584 - DNA, 25 bp, Homo sapien
aaatctgtgccacaataatcagacc

SEQ ID NO: 1560585 - DNA, 25 bp, Homo sapien
agtgagggtgcagaatcagaacggg

SEQ ID NO: 1560586 - DNA, 25 bp, Homo sapien
cacaataatcagacctcaaactcac

SEQ ID NO: 1560587 - DNA, 25 bp, Homo sapien
cagctcgggtgcctccccccccatt

SEQ ID NO: 1560588 - DNA, 25 bp, Homo sapien
tccccccccattcgccctgctcgat

SEQ ID NO: 1560589 - DNA, 25 bp, Homo sapien
tcagcttcttggtggacgcatcctg

SEQ ID NO: 1560590 - DNA, 25 bp, Homo sapien
gcttcttggtggacgcatcctgagg

SEQ ID NO: 1560591 - DNA, 25 bp, Homo sapien
gttactgtccagttcgtccccgatg

SEQ ID NO: 1560592 - DNA, 25 bp, Homo sapien
tgtccagttcgtccccgatgcgctt

SEQ ID NO: 1560593 - DNA, 25 bp, Homo sapien
agctccatgttactgtccagttcgt

SEQ ID NO: 1560594 - DNA, 25 bp, Homo sapien
catgttactgtccagttcgtccccg

SEQ ID NO: 1560595 - DNA, 25 bp, Homo sapien
agctgccactcggaaaaagacctct

SEQ ID NO: 1560596 - DNA, 25 bp, Homo sapien
tgaagttgccgtcagaaaacatgtc

SEQ ID NO: 1560597 - DNA, 25 bp, Homo sapien
gttgccgtcagaaaacatgtcagct

SEQ ID NO: 1560598 - DNA, 25 bp, Homo sapien
tgccactcggaaaaagacctctcgg

SEQ ID NO: 1560599 - DNA, 25 bp, Homo sapien
tgcacgtgaactccctgagagcagg

SEQ ID NO: 1560600 - DNA, 25 bp, Homo sapien
atagcaggtccagtaaatgcttgtt

SEQ ID NO: 1560601 - DNA, 25 bp, Homo sapien
tgtagcctgctttgtacagtgctgt

SEQ ID NO: 1560602 - DNA, 25 bp, Homo sapien
tagaaatctttcctgaccactctgc

SEQ ID NO: 1560603 - DNA, 25 bp, Homo sapien
cccagatcacgccatttcacgccag

SEQ ID NO: 1560604 - DNA, 25 bp, Homo sapien
agcccagatcacgccatttcacgcc

SEQ ID NO: 1560605 - DNA, 25 bp, Homo sapien
ccagatcacgccatttcacgccagc

SEQ ID NO: 1560606 - DNA, 25 bp, Homo sapien
tgagcccagatcacgccatttcacg

SEQ ID NO: 1560607 - DNA, 25 bp, Homo sapien
tcagttccggcaccttggtgcacag

SEQ ID NO: 1560608 - DNA, 25 bp, Homo sapien
cagttccggcaccttggtgcacagg

SEQ ID NO: 1560609 - DNA, 25 bp, Homo sapien
agttccggcaccttggtgcacaggg

SEQ ID NO: 1560610 - DNA, 25 bp, Homo sapien
gttccggcaccttggtgcacagggc

SEQ ID NO: 1560611 - DNA, 25 bp, Homo sapien
gtccaatgtccagcccatgatggtt

SEQ ID NO: 1560612 - DNA, 25 bp, Homo sapien
gaggaagtccaatgtccagcccatg

SEQ ID NO: 1560613 - DNA, 25 bp, Homo sapien
ccgctcccggaggaagtccaatgtc

SEQ ID NO: 1560614 - DNA, 25 bp, Homo sapien
tcccggaggaagtccaatgtccagc

SEQ ID NO: 1560615 - DNA, 25 bp, Homo sapien
ggtgggggtgaggaggcttgaggag

SEQ ID NO: 1560616 - DNA, 25 bp, Homo sapien
ggtgaggaggcttgaggagtctcac

SEQ ID NO: 1560617 - DNA, 25 bp, Homo sapien
gcggtggtgagggcgcggtggtggg

SEQ ID NO: 1560618 - DNA, 25 bp, Homo sapien
gggcggtggtgagggcgcggtggtg

SEQ ID NO: 1560619 - DNA, 25 bp, Homo sapien
aaaacgcattatagaccacatctga

SEQ ID NO: 1560620 - DNA, 25 bp, Homo sapien
aacgcattatagaccacatctgatg

SEQ ID NO: 1560621 - DNA, 25 bp, Homo sapien
aggaaaacgcattatagaccacatc

SEQ ID NO: 1560622 - DNA, 25 bp, Homo sapien
gaaaacgcattatagaccacatctg

SEQ ID NO: 1560623 - DNA, 25 bp, Homo sapien
gtcaggggtcactgggaggtcagca

SEQ ID NO: 1560624 - DNA, 25 bp, Homo sapien
ggcactaatcaagtcaaggtcacag

SEQ ID NO: 1560625 - DNA, 25 bp, Homo sapien
gcactaatcaagtcaaggtcacagt

SEQ ID NO: 1560626 - DNA, 25 bp, Homo sapien
gcagggtagatgaatcggggattga

SEQ ID NO: 1560627 - DNA, 25 bp, Homo sapien
aaagagctagggtcagagggtcatc

SEQ ID NO: 1560628 - DNA, 25 bp, Homo sapien
cagtcgcttcagtgactcggccagg

SEQ ID NO: 1560629 - DNA, 25 bp, Homo sapien
agatgaacgggcattaaagagctgg

SEQ ID NO: 1560630 - DNA, 25 bp, Homo sapien
tggagacagggacatcagtcgcttc

SEQ ID NO: 1560631 - DNA, 25 bp, Homo sapien
ccacgtgggcgtcccaaagtaggag

SEQ ID NO: 1560632 - DNA, 25 bp, Homo sapien
gccacgtgggcgtcccaaagtagga

SEQ ID NO: 1560633 - DNA, 25 bp, Homo sapien
ctgccacgtgggcgtcccaaagtag

SEQ ID NO: 1560634 - DNA, 25 bp, Homo sapien
tgccacgtgggcgtcccaaagtagg

SEQ ID NO: 1560635 - DNA, 25 bp, Homo sapien
gcggtgagcactcccgccacaaaga

SEQ ID NO: 1560636 - DNA, 25 bp, Homo sapien
agtgaggcggtgagcactcccgcca

SEQ ID NO: 1560637 - DNA, 25 bp, Homo sapien
gtgagtgaggcggtgagcactcccg

SEQ ID NO: 1560638 - DNA, 25 bp, Homo sapien
aggcggtgagcactcccgccacaaa

SEQ ID NO: 1560639 - DNA, 25 bp, Homo sapien
aaatgccataatttatggaggaaaa

SEQ ID NO: 1560640 - DNA, 25 bp, Homo sapien
aaaaacacagtccaaggcagctggg

SEQ ID NO: 1560641 - DNA, 25 bp, Homo sapien
tattaccccctcaagaccactcttc

SEQ ID NO: 1560642 - DNA, 25 bp, Homo sapien
ccacccctcccagaaaaatgccata

SEQ ID NO: 1560643 - DNA, 25 bp, Homo sapien
tctccgtggccctgaacagtgtctc

SEQ ID NO: 1560644 - DNA, 25 bp, Homo sapien
gagaagccctgcgttgtggacaaac

SEQ ID NO: 1560645 - DNA, 25 bp, Homo sapien
gaagttgccctcgtgtcttgcctga

SEQ ID NO: 1560646 - DNA, 25 bp, Homo sapien
tgtgctccttcaggcccacaaagag

SEQ ID NO: 1560647 - DNA, 25 bp, Homo sapien
tgagctttgcggtgtctctgggatt

SEQ ID NO: 1560648 - DNA, 25 bp, Homo sapien
agctttgcggtgtctctgggattgc

SEQ ID NO: 1560649 - DNA, 25 bp, Homo sapien
tttgagctttgcggtgtctctggga

SEQ ID NO: 1560650 - DNA, 25 bp, Homo sapien
gttttgagctttgcggtgtctctgg

SEQ ID NO: 1560651 - DNA, 25 bp, Homo sapien
gaagatggagtgttgcggggactgg

SEQ ID NO: 1560652 - DNA, 25 bp, Homo sapien
ctggaagatggagtgttgcggggac

SEQ ID NO: 1560653 - DNA, 25 bp, Homo sapien
tggaagatggagtgttgcggggact

SEQ ID NO: 1560654 - DNA, 25 bp, Homo sapien
agatggagtgttgcggggactggag

SEQ ID NO: 1560655 - DNA, 25 bp, Homo sapien
tgcctgaggtttgcgctgcgagata

SEQ ID NO: 1560656 - DNA, 25 bp, Homo sapien
cctgtagcgccagcgtgttgtgaaa

SEQ ID NO: 1560657 - DNA, 25 bp, Homo sapien
tctccggatccttgggaagcttgga

SEQ ID NO: 1560658 - DNA, 25 bp, Homo sapien
ttttatgggagcactaacagccctg

SEQ ID NO: 1560659 - DNA, 25 bp, Homo sapien
aactgcgaggggacgtggctagggc

SEQ ID NO: 1560660 - DNA, 25 bp, Homo sapien
gcggcttcttttatggtgcgccggc

SEQ ID NO: 1560661 - DNA, 25 bp, Homo sapien
ttcttttatggtgcgccggccctcg

SEQ ID NO: 1560662 - DNA, 25 bp, Homo sapien
agacccgcgggaccgccgaactgcg

SEQ ID NO: 1560663 - DNA, 25 bp, Homo sapien
gagagtccccggatctgttccgtcc

SEQ ID NO: 1560664 - DNA, 25 bp, Homo sapien
gatggtcccggaggttgcaagcgga

SEQ ID NO: 1560665 - DNA, 25 bp, Homo sapien
cacaaaaacggtgctggcaggtccc

SEQ ID NO: 1560666 - DNA, 25 bp, Homo sapien
atcggagggcggtcggaggctggaa

SEQ ID NO: 1560667 - DNA, 25 bp, Homo sapien
tgttgacggctgcctccacgtcggt

SEQ ID NO: 1560668 - DNA, 25 bp, Homo sapien
ctgcaggtacaaattgaccaggctg

SEQ ID NO: 1560669 - DNA, 25 bp, Homo sapien
cctccacgtcggtggaataattctg

SEQ ID NO: 1560670 - DNA, 25 bp, Homo sapien
acaaattgaccaggctgttgacggc

SEQ ID NO: 1560671 - DNA, 25 bp, Homo sapien
tctgtttacccgaccgcacaaagaa

SEQ ID NO: 1560672 - DNA, 25 bp, Homo sapien
tgcgcagctggaggaaattagggcc

SEQ ID NO: 1560673 - DNA, 25 bp, Homo sapien
aatggttagcgggaggcgaggccaa

SEQ ID NO: 1560674 - DNA, 25 bp, Homo sapien
agagatggaggcaacaatggttagc

SEQ ID NO: 1560675 - DNA, 25 bp, Homo sapien
ggccaattcgcggaagaagtggctc

SEQ ID NO: 1560676 - DNA, 25 bp, Homo sapien
cgtagccctcgcgcttctcctcggc

SEQ ID NO: 1560677 - DNA, 25 bp, Homo sapien
cacatcatcgcggtcgaaatagaag

SEQ ID NO: 1560678 - DNA, 25 bp, Homo sapien
tcctggaagagagcgcggccgccac

SEQ ID NO: 1560679 - DNA, 25 bp, Homo sapien
ctcaaatcaaggctcctcgcgcgca

SEQ ID NO: 1560680 - DNA, 25 bp, Homo sapien
aaatcaaggctcctcgcgcgcacgg

SEQ ID NO: 1560681 - DNA, 25 bp, Homo sapien
ccctcaaatcaaggctcctcgcgcg

SEQ ID NO: 1560682 - DNA, 25 bp, Homo sapien
tgggagatgtagtccattacccaca

SEQ ID NO: 1560683 - DNA, 25 bp, Homo sapien
gagggctcacaagaccgaactcaat

SEQ ID NO: 1560684 - DNA, 25 bp, Homo sapien
gctatacgtccctaagaccacgcag

SEQ ID NO: 1560685 - DNA, 25 bp, Homo sapien
tggctcagaatacacacactcggca

SEQ ID NO: 1560686 - DNA, 25 bp, Homo sapien
tatttccagcggttaagagggctca

SEQ ID NO: 1560687 - DNA, 25 bp, Homo sapien
gcagctttcatggcgtctggggttt

SEQ ID NO: 1560688 - DNA, 25 bp, Homo sapien
cagggccatggcagctttcatggcg

SEQ ID NO: 1560689 - DNA, 25 bp, Homo sapien
catggcagctttcatggcgtctggg

SEQ ID NO: 1560690 - DNA, 25 bp, Homo sapien
gctttcatggcgtctggggttttac

SEQ ID NO: 1560691 - DNA, 25 bp, Homo sapien
atgtgacaggtgtgaaatgaggctc

SEQ ID NO: 1560692 - DNA, 25 bp, Homo sapien
tgaaggaaatttgcccaaagggagc

SEQ ID NO: 1560693 - DNA, 25 bp, Homo sapien
gttgcagattaaaatgtgacaggtg

SEQ ID NO: 1560694 - DNA, 25 bp, Homo sapien
agccatggatgcagcgggtacgtac

SEQ ID NO: 1560695 - DNA, 25 bp, Homo sapien
gtggtcacccatcttcttgataagc

SEQ ID NO: 1560696 - DNA, 25 bp, Homo sapien
cacccagcctgtggaggttggtcag

SEQ ID NO: 1560697 - DNA, 25 bp, Homo sapien
tcttgataagcttcacttcctcatc

SEQ ID NO: 1560698 - DNA, 25 bp, Homo sapien
cccatcttcttgataagcttcactt

SEQ ID NO: 1560699 - DNA, 25 bp, Homo sapien
gagagtgagcctttcgaagagatac

SEQ ID NO: 1560700 - DNA, 25 bp, Homo sapien
tactttgcaaggggcccttcagaag

SEQ ID NO: 1560701 - DNA, 25 bp, Homo sapien
ttgcaaggggcccttcagaagtcgc

SEQ ID NO: 1560702 - DNA, 25 bp, Homo sapien
caaggggcccttcagaagtcgctgg

SEQ ID NO: 1560703 - DNA, 25 bp, Homo sapien
ggcccttcagaagtcgctgggctca

SEQ ID NO: 1560704 - DNA, 25 bp, Homo sapien
gagggagaggcttaggcagaagccc

SEQ ID NO: 1560705 - DNA, 25 bp, Homo sapien
tggagggagaggcttaggcagaagc

SEQ ID NO: 1560706 - DNA, 25 bp, Homo sapien
agggagaggcttaggcagaagccct

SEQ ID NO: 1560707 - DNA, 25 bp, Homo sapien
gggagaggcttaggcagaagcccta

SEQ ID NO: 1560708 - DNA, 25 bp, Homo sapien
gatagttaagaaagctgcctattgg

SEQ ID NO: 1560709 - DNA, 25 bp, Homo sapien
atagttaagaaagctgcctattggc

SEQ ID NO: 1560710 - DNA, 25 bp, Homo sapien
ggatagttaagaaagctgcctattg

SEQ ID NO: 1560711 - DNA, 25 bp, Homo sapien
aggatagttaagaaagctgcctatt

SEQ ID NO: 1560712 - DNA, 25 bp, Homo sapien
ccccacatttacctcgaggctcttc

SEQ ID NO: 1560713 - DNA, 25 bp, Homo sapien
tgtgtccggagatgagatgaaaaaa

SEQ ID NO: 1560714 - DNA, 25 bp, Homo sapien
caccgcttggtttgcagttgagagg

SEQ ID NO: 1560715 - DNA, 25 bp, Homo sapien
ggtgtgattggagtgtgtccggaga

SEQ ID NO: 1560716 - DNA, 25 bp, Homo sapien
taaaaggaagtgtagaaatgtaata

SEQ ID NO: 1560717 - DNA, 25 bp, Homo sapien
gaaatgtaataaagggccaggtgtg

SEQ ID NO: 1560718 - DNA, 25 bp, Homo sapien
ctgagtttacaagcgtgagtccctg

SEQ ID NO: 1560719 - DNA, 25 bp, Homo sapien
gctgagtttacaagcgtgagtccct

SEQ ID NO: 1560720 - DNA, 25 bp, Homo sapien
ctttttggcatgacatcattgggtc

SEQ ID NO: 1560721 - DNA, 25 bp, Homo sapien
ggcttgccatgtgtactttttggca

SEQ ID NO: 1560722 - DNA, 25 bp, Homo sapien
taatagctgacatttctggaaggct

SEQ ID NO: 1560723 - DNA, 25 bp, Homo sapien
gaaggcttgccatgtgtactttttg

SEQ ID NO: 1560724 - DNA, 25 bp, Homo sapien
ccccgaggcatgattgagacgcggt

SEQ ID NO: 1560725 - DNA, 25 bp, Homo sapien
tgaggaacagcaaactcgaaggccc

SEQ ID NO: 1560726 - DNA, 25 bp, Homo sapien
gctggagtgacatgtctcatagaga

SEQ ID NO: 1560727 - DNA, 25 bp, Homo sapien
caagccctgtgggtatctgaggaac

SEQ ID NO: 1560728 - DNA, 25 bp, Homo sapien
gggcatagacacaggacatgtgaca

SEQ ID NO: 1560729 - DNA, 25 bp, Homo sapien
gaagggtagcagttacaggaattaa

SEQ ID NO: 1560730 - DNA, 25 bp, Homo sapien
tagacacaggacatgtgacatatgt

SEQ ID NO: 1560731 - DNA, 25 bp, Homo sapien
ggcagcgagtgggagaagggtagca

SEQ ID NO: 1560732 - DNA, 25 bp, Homo sapien
tcctagcggaaacggaaacgcgcga

SEQ ID NO: 1560733 - DNA, 25 bp, Homo sapien
caaagatctcgatggttcctcataa

SEQ ID NO: 1560734 - DNA, 25 bp, Homo sapien
gagatgttctggctcctctaggcta

SEQ ID NO: 1560735 - DNA, 25 bp, Homo sapien
gttctttgagtaaccacacgtcctc

SEQ ID NO: 1560736 - DNA, 25 bp, Homo sapien
aaatggctcgaagcgcaaggtccta

SEQ ID NO: 1560737 - DNA, 25 bp, Homo sapien
tcaaactcgagactgctagctcgct

SEQ ID NO: 1560738 - DNA, 25 bp, Homo sapien
gaaccggccgttgcgccaagatgat

SEQ ID NO: 1560739 - DNA, 25 bp, Homo sapien
caatccaaggctcccaaatggctcg

SEQ ID NO: 1560740 - DNA, 25 bp, Homo sapien
tattcaggtaattgagcaggtgcca

SEQ ID NO: 1560741 - DNA, 25 bp, Homo sapien
gacgtagcccgtgtgaaatactgga

SEQ ID NO: 1560742 - DNA, 25 bp, Homo sapien
gagcatttacactgagacgtagccc

SEQ ID NO: 1560743 - DNA, 25 bp, Homo sapien
ccaaaacggtagcatgacaagatcc

SEQ ID NO: 1560744 - DNA, 25 bp, Homo sapien
gaaattgaggcacctgtaagcccag

SEQ ID NO: 1560745 - DNA, 25 bp, Homo sapien
catcatggaaattgaggcacctgta

SEQ ID NO: 1560746 - DNA, 25 bp, Homo sapien
ccagtccctaagttcaggtcacatt

SEQ ID NO: 1560747 - DNA, 25 bp, Homo sapien
gcccagcccagtccctaagttcagg

SEQ ID NO: 1560748 - DNA, 25 bp, Homo sapien
actttctccacggtagttctggtca

SEQ ID NO: 1560749 - DNA, 25 bp, Homo sapien
ccaatactttctccacggtagttct

SEQ ID NO: 1560750 - DNA, 25 bp, Homo sapien
cacggtagttctggtcatagccttc

SEQ ID NO: 1560751 - DNA, 25 bp, Homo sapien
gtagttctggtcatagccttcctct

SEQ ID NO: 1560752 - DNA, 25 bp, Homo sapien
gactgtctcctataaagactttctc

SEQ ID NO: 1560753 - DNA, 25 bp, Homo sapien
aggactgtctcctataaagactttc

SEQ ID NO: 1560754 - DNA, 25 bp, Homo sapien
aaggactgtctcctataaagacttt

SEQ ID NO: 1560755 - DNA, 25 bp, Homo sapien
ggactgtctcctataaagactttct

SEQ ID NO: 1560756 - DNA, 25 bp, Homo sapien
caggctggactgctgtggcctccac

SEQ ID NO: 1560757 - DNA, 25 bp, Homo sapien
cacttggctaattttcttctctttt

SEQ ID NO: 1560758 - DNA, 25 bp, Homo sapien
ggctggactgctgtggcctccacct

SEQ ID NO: 1560759 - DNA, 25 bp, Homo sapien
cccaggctggactgctgtggcctcc

SEQ ID NO: 1560760 - DNA, 25 bp, Homo sapien
cgattcgctcaatccttgttacatc

SEQ ID NO: 1560761 - DNA, 25 bp, Homo sapien
cgctcaatccttgttacatcacgga

SEQ ID NO: 1560762 - DNA, 25 bp, Homo sapien
aatccttgttacatcacggatctcc

SEQ ID NO: 1560763 - DNA, 25 bp, Homo sapien
acggatctccgggactttggttgtg

SEQ ID NO: 1560764 - DNA, 25 bp, Homo sapien
ccagtccccggatgtgggagtgggc

SEQ ID NO: 1560765 - DNA, 25 bp, Homo sapien
ctccaaggcatcgtccagccccagt

SEQ ID NO: 1560766 - DNA, 25 bp, Homo sapien
gccccagtccccggatgtgggagtg

SEQ ID NO: 1560767 - DNA, 25 bp, Homo sapien
aggctccaaggcatcgtccagcccc

SEQ ID NO: 1560768 - DNA, 25 bp, Homo sapien
acacctagcctaatcaattctttag

SEQ ID NO: 1560769 - DNA, 25 bp, Homo sapien
tttatgggtatgtagccaaaggtcc

SEQ ID NO: 1560770 - DNA, 25 bp, Homo sapien
acccacatgtggttgaagtttatgg

SEQ ID NO: 1560771 - DNA, 25 bp, Homo sapien
aaggtggcaaagcaattgctaccca

SEQ ID NO: 1560772 - DNA, 25 bp, Homo sapien
cgcacatgaggtgatttcctgtggg

SEQ ID NO: 1560773 - DNA, 25 bp, Homo sapien
tggggctaccatggcatttctacca

SEQ ID NO: 1560774 - DNA, 25 bp, Homo sapien
tgggaggcgcacatgaggtgatttc

SEQ ID NO: 1560775 - DNA, 25 bp, Homo sapien
ctgtggggctaccatggcatttcta

SEQ ID NO: 1560776 - DNA, 25 bp, Homo sapien
taaggactgcccgaccggcaatctt

SEQ ID NO: 1560777 - DNA, 25 bp, Homo sapien
ccggctggccagcaataaggactgc

SEQ ID NO: 1560778 - DNA, 25 bp, Homo sapien
cggcaatcttcccttcccggatcat

SEQ ID NO: 1560779 - DNA, 25 bp, Homo sapien
atggcgatggccgtcttccccgtgc

SEQ ID NO: 1560780 - DNA, 25 bp, Homo sapien
tataagcagaagcatggaggatttc

SEQ ID NO: 1560781 - DNA, 25 bp, Homo sapien
ggtcatctgttaaaggcggctcatc

SEQ ID NO: 1560782 - DNA, 25 bp, Homo sapien
gaatcctgagtgtttaagccactgc

SEQ ID NO: 1560783 - DNA, 25 bp, Homo sapien
aacatggcgtcctcttgactggaac

SEQ ID NO: 1560784 - DNA, 25 bp, Homo sapien
ccagtgctgcccagcacagggtttg

SEQ ID NO: 1560785 - DNA, 25 bp, Homo sapien
gcccagcacagggtttggcctgcag

SEQ ID NO: 1560786 - DNA, 25 bp, Homo sapien
gctgcccagcacagggtttggcctg

SEQ ID NO: 1560787 - DNA, 25 bp, Homo sapien
agtgctgcccagcacagggtttggc

SEQ ID NO: 1560788 - DNA, 25 bp, Homo sapien
atgcgaacgccgatggaccgccgga

SEQ ID NO: 1560789 - DNA, 25 bp, Homo sapien
gcgtcagcgcctcggtcttgctcat

SEQ ID NO: 1560790 - DNA, 25 bp, Homo sapien
ctgtgaatggcgtgtcagggcccag

SEQ ID NO: 1560791 - DNA, 25 bp, Homo sapien
ttcactgccggcgatggctgtgaat

SEQ ID NO: 1560792 - DNA, 25 bp, Homo sapien
tgttgctggtcgatcaatctggatc

SEQ ID NO: 1560793 - DNA, 25 bp, Homo sapien
gctggtcgatcaatctggatctcca

SEQ ID NO: 1560794 - DNA, 25 bp, Homo sapien
tccctgttgctggtcgatcaatctg

SEQ ID NO: 1560795 - DNA, 25 bp, Homo sapien
ggtcgatcaatctggatctccacca

SEQ ID NO: 1560796 - DNA, 25 bp, Homo sapien
tggtcttgagggtcagtttgcccac

SEQ ID NO: 1560797 - DNA, 25 bp, Homo sapien
tgcccaggtcgtagatggtctccat

SEQ ID NO: 1560798 - DNA, 25 bp, Homo sapien
ttggtcagggactcaatcatcttgg

SEQ ID NO: 1560799 - DNA, 25 bp, Homo sapien
ggtctccatctctgtggtcttgagg

SEQ ID NO: 1560800 - DNA, 25 bp, Homo sapien
cttggagatcttgcccgtcgccttg

SEQ ID NO: 1560801 - DNA, 25 bp, Homo sapien
ctgggagcccatagcgtcgtagtcg

SEQ ID NO: 1560802 - DNA, 25 bp, Homo sapien
tcgcgggcgcgtgtgaaggagcggc

SEQ ID NO: 1560803 - DNA, 25 bp, Homo sapien
cgccttgtcgatggtgatcacgtcc

SEQ ID NO: 1560804 - DNA, 25 bp, Homo sapien
acagtcagggtaacaggaagatcca

SEQ ID NO: 1560805 - DNA, 25 bp, Homo sapien
caggcccaggaggtagtcaggacta

SEQ ID NO: 1560806 - DNA, 25 bp, Homo sapien
tcccggaggaccttagaagccacag

SEQ ID NO: 1560807 - DNA, 25 bp, Homo sapien
gactagggacattccagagcgctga

SEQ ID NO: 1560808 - DNA, 25 bp, Homo sapien
tctcgtgcagggacacggtgtgcac

SEQ ID NO: 1560809 - DNA, 25 bp, Homo sapien
tgcgagagttgatgacgtcgatctc

SEQ ID NO: 1560810 - DNA, 25 bp, Homo sapien
tgagaagagcgccaggaagccctgg

SEQ ID NO: 1560811 - DNA, 25 bp, Homo sapien
gaagccctgggtgcgagagttgatg

SEQ ID NO: 1560812 - DNA, 25 bp, Homo sapien
gatctgctcacggacttctgacttg

SEQ ID NO: 1560813 - DNA, 25 bp, Homo sapien
gccttgccctcctcgcgccactcag

SEQ ID NO: 1560814 - DNA, 25 bp, Homo sapien
ggcattgatctgctcacggacttct

SEQ ID NO: 1560815 - DNA, 25 bp, Homo sapien
cattgatctgctcacggacttctga

SEQ ID NO: 1560816 - DNA, 25 bp, Homo sapien
ccccggccatgtcctgggtcctcac

SEQ ID NO: 1560817 - DNA, 25 bp, Homo sapien
cacccgccccggccatgtcctgggt

SEQ ID NO: 1560818 - DNA, 25 bp, Homo sapien
accacccgccccggccatgtcctgg

SEQ ID NO: 1560819 - DNA, 25 bp, Homo sapien
ccgccccggccatgtcctgggtcct

SEQ ID NO: 1560820 - DNA, 25 bp, Homo sapien
tgtgagagtcaccacccgcgtcccc

SEQ ID NO: 1560821 - DNA, 25 bp, Homo sapien
agagtcaccacccgcgtccccactt

SEQ ID NO: 1560822 - DNA, 25 bp, Homo sapien
gtgtgtgtgagagtcaccacccgcg

SEQ ID NO: 1560823 - DNA, 25 bp, Homo sapien
gtgtgtgagagtcaccacccgcgtc

SEQ ID NO: 1560824 - DNA, 25 bp, Homo sapien
cgcgtgatgccacggttggtggcca

SEQ ID NO: 1560825 - DNA, 25 bp, Homo sapien
tggccatgatcaggacaggcgccat

SEQ ID NO: 1560826 - DNA, 25 bp, Homo sapien
actctccagggcccggttgaggaag

SEQ ID NO: 1560827 - DNA, 25 bp, Homo sapien
tgtggacctcgtcgatgaacagcac

SEQ ID NO: 1560828 - DNA, 25 bp, Homo sapien
ggtggtggagacgataagcagccgg

SEQ ID NO: 1560829 - DNA, 25 bp, Homo sapien
cagcaggtctatggggatgccgtga

SEQ ID NO: 1560830 - DNA, 25 bp, Homo sapien
gtggagacgataagcagccggtcca

SEQ ID NO: 1560831 - DNA, 25 bp, Homo sapien
gctctggtagctggtgccccggatt

SEQ ID NO: 1560832 - DNA, 25 bp, Homo sapien
cggatgcggaggatctgcttcgtgt

SEQ ID NO: 1560833 - DNA, 25 bp, Homo sapien
cggaggatctgcttcgtgtctttct

SEQ ID NO: 1560834 - DNA, 25 bp, Homo sapien
gaggatctgcttcgtgtctttctcg

SEQ ID NO: 1560835 - DNA, 25 bp, Homo sapien
gatgcggaggatctgcttcgtgtct

SEQ ID NO: 1560836 - DNA, 25 bp, Homo sapien
cgggtcagcaccgtgtaggcgtcct

SEQ ID NO: 1560837 - DNA, 25 bp, Homo sapien
agtgacgtctccagcccgatgcggg

SEQ ID NO: 1560838 - DNA, 25 bp, Homo sapien
tttccggcacaccaagctggcagct

SEQ ID NO: 1560839 - DNA, 25 bp, Homo sapien
accgtgtaggcgtcctcactcatct

SEQ ID NO: 1560840 - DNA, 25 bp, Homo sapien
catgctctaggcagcagagtgtggc

SEQ ID NO: 1560841 - DNA, 25 bp, Homo sapien
taaggtggacctaacagcatctact

SEQ ID NO: 1560842 - DNA, 25 bp, Homo sapien
gttgggcccctctccgtgaggctca

SEQ ID NO: 1560843 - DNA, 25 bp, Homo sapien
tactgatacctactataggccaggc

SEQ ID NO: 1560844 - DNA, 25 bp, Homo sapien
ctcgtccaggaagagtgagtagacc

SEQ ID NO: 1560845 - DNA, 25 bp, Homo sapien
tcatgtactgcgtggagcgggactc

SEQ ID NO: 1560846 - DNA, 25 bp, Homo sapien
agcgggactcgtccaggaagagtga

SEQ ID NO: 1560847 - DNA, 25 bp, Homo sapien
tgagtagacccgcttgatgtcatcc

SEQ ID NO: 1560848 - DNA, 25 bp, Homo sapien
tgagttcgttgaagaggaaggcgtc

SEQ ID NO: 1560849 - DNA, 25 bp, Homo sapien
ttgaagaggaaggcgtcctggtact

SEQ ID NO: 1560850 - DNA, 25 bp, Homo sapien
agttcgttgaagaggaaggcgtcct

SEQ ID NO: 1560851 - DNA, 25 bp, Homo sapien
aagaggaaggcgtcctggtactcct

SEQ ID NO: 1560852 - DNA, 25 bp, Homo sapien
ggtgggtgcagcttcccaaccattt

SEQ ID NO: 1560853 - DNA, 25 bp, Homo sapien
agggtgggtgcagcttcccaaccat

SEQ ID NO: 1560854 - DNA, 25 bp, Homo sapien
tgggtgcagcttcccaaccatttta

SEQ ID NO: 1560855 - DNA, 25 bp, Homo sapien
ggtgcagcttcccaaccattttata

SEQ ID NO: 1560856 - DNA, 25 bp, Homo sapien
caccctgcgggcgtattaaataatg

SEQ ID NO: 1560857 - DNA, 25 bp, Homo sapien
gagggttgaggcttcagtccagcac

SEQ ID NO: 1560858 - DNA, 25 bp, Homo sapien
gcagcgcccctcctgttaggttgga

SEQ ID NO: 1560859 - DNA, 25 bp, Homo sapien
cagaagctaagtccgaagcagcgcc

SEQ ID NO: 1560860 - DNA, 25 bp, Homo sapien
acggccagctcaccctgatgactcg

SEQ ID NO: 1560861 - DNA, 25 bp, Homo sapien
caccctgatgactcgccggtgaagt

SEQ ID NO: 1560862 - DNA, 25 bp, Homo sapien
agctcaccctgatgactcgccggtg

SEQ ID NO: 1560863 - DNA, 25 bp, Homo sapien
gcacacggccagctcaccctgatga

SEQ ID NO: 1560864 - DNA, 25 bp, Homo sapien
acaccccagcggcagcccctccacc

SEQ ID NO: 1560865 - DNA, 25 bp, Homo sapien
cagtgccccccggtccacaccccag

SEQ ID NO: 1560866 - DNA, 25 bp, Homo sapien
gcagcccctccacctacccctgggc

SEQ ID NO: 1560867 - DNA, 25 bp, Homo sapien
cttgcactcagacacccagtgcccc

SEQ ID NO: 1560868 - DNA, 25 bp, Homo sapien
gacacaggctgtgccagtttgaatc

SEQ ID NO: 1560869 - DNA, 25 bp, Homo sapien
cagtttgaatccatcgccagtccac

SEQ ID NO: 1560870 - DNA, 25 bp, Homo sapien
agtttgaatccatcgccagtccaca

SEQ ID NO: 1560871 - DNA, 25 bp, Homo sapien
gtttgaatccatcgccagtccacac

SEQ ID NO: 1560872 - DNA, 25 bp, Homo sapien
gagtgaggggtgttggacgcggcac

SEQ ID NO: 1560873 - DNA, 25 bp, Homo sapien
gccacggaacgcagggccctcactg

SEQ ID NO: 1560874 - DNA, 25 bp, Homo sapien
acccaattggctgctctctctcaga

SEQ ID NO: 1560875 - DNA, 25 bp, Homo sapien
agtcagcggacccaattggctgctc

SEQ ID NO: 1560876 - DNA, 25 bp, Homo sapien
cttagcgggatatcttccgcaagca

SEQ ID NO: 1560877 - DNA, 25 bp, Homo sapien
tcttagcgggatatcttccgcaagc

SEQ ID NO: 1560878 - DNA, 25 bp, Homo sapien
gtctctctcttagcgggatatcttc

SEQ ID NO: 1560879 - DNA, 25 bp, Homo sapien
ctctcttagcgggatatcttccgca

SEQ ID NO: 1560880 - DNA, 25 bp, Homo sapien
ggacaaggacactgcttcacccggg

SEQ ID NO: 1560881 - DNA, 25 bp, Homo sapien
tgggacaaggacactgcttcacccg

SEQ ID NO: 1560882 - DNA, 25 bp, Homo sapien
gacaaggacactgcttcacccgggt

SEQ ID NO: 1560883 - DNA, 25 bp, Homo sapien
gggacaaggacactgcttcacccgg

SEQ ID NO: 1560884 - DNA, 25 bp, Homo sapien
tggtgttgacggtgatgcacacggg

SEQ ID NO: 1560885 - DNA, 25 bp, Homo sapien
agcggctccttggatgcccatgtcc

SEQ ID NO: 1560886 - DNA, 25 bp, Homo sapien
gccgaagcggctccttggatgccca

SEQ ID NO: 1560887 - DNA, 25 bp, Homo sapien
ggcagtagccggcacagatggtggt

SEQ ID NO: 1560888 - DNA, 25 bp, Homo sapien
gcagagtgcacattgacagctgaga

SEQ ID NO: 1560889 - DNA, 25 bp, Homo sapien
agccggatggactcgaagcgcacat

SEQ ID NO: 1560890 - DNA, 25 bp, Homo sapien
attgacagctgagagccacggcgta

SEQ ID NO: 1560891 - DNA, 25 bp, Homo sapien
gcggtagttgcacaccacctgaggc

SEQ ID NO: 1560892 - DNA, 25 bp, Homo sapien
tctgagggccccgggagtcgggatg

SEQ ID NO: 1560893 - DNA, 25 bp, Homo sapien
gggaggatcggggtgtctgagggcc

SEQ ID NO: 1560894 - DNA, 25 bp, Homo sapien
gagaagcctttattgtgggaggatc

SEQ ID NO: 1560895 - DNA, 25 bp, Homo sapien
cgggagtcgggatgggcttggaagg

SEQ ID NO: 1560896 - DNA, 25 bp, Homo sapien
ccagtgaagtattgctcacccctcg

SEQ ID NO: 1560897 - DNA, 25 bp, Homo sapien
aagtattgctcacccctcgctggct

SEQ ID NO: 1560898 - DNA, 25 bp, Homo sapien
ctgatgactcgccagtgaagtattg

SEQ ID NO: 1560899 - DNA, 25 bp, Homo sapien
gactcgccagtgaagtattgctcac

SEQ ID NO: 1560900 - DNA, 25 bp, Homo sapien
caggtgacaaagaagtgttggcaga

SEQ ID NO: 1560901 - DNA, 25 bp, Homo sapien
tgttggcagagggaactgccgccag

SEQ ID NO: 1560902 - DNA, 25 bp, Homo sapien
ttattggcctcgaagcaggtgacaa

SEQ ID NO: 1560903 - DNA, 25 bp, Homo sapien
cacctccagcacacctgagtccaca

SEQ ID NO: 1560904 - DNA, 25 bp, Homo sapien
tcagagactcagtcgtcgagtgcta

SEQ ID NO: 1560905 - DNA, 25 bp, Homo sapien
tcgagtgctagggactagtcgagcc

SEQ ID NO: 1560906 - DNA, 25 bp, Homo sapien
cgtgtacctggctttatacctcggg

SEQ ID NO: 1560907 - DNA, 25 bp, Homo sapien
gccaccaggaggttgtaggatgctg

SEQ ID NO: 1560908 - DNA, 25 bp, Homo sapien
agcggctccttggatgcccatgtcc

SEQ ID NO: 1560909 - DNA, 25 bp, Homo sapien
gccgaagcggctccttggatgccca

SEQ ID NO: 1560910 - DNA, 25 bp, Homo sapien
ggcagtagccggcacagatggtggt

SEQ ID NO: 1560911 - DNA, 25 bp, Homo sapien
tggtgttgacggtgatgcacacggg

SEQ ID NO: 1560912 - DNA, 25 bp, Homo sapien
gcagagtgcacattgacagctgaga

SEQ ID NO: 1560913 - DNA, 25 bp, Homo sapien
attgacagctgagagccacggcgta

SEQ ID NO: 1560914 - DNA, 25 bp, Homo sapien
agccggatggactcgaagcgcacat

SEQ ID NO: 1560915 - DNA, 25 bp, Homo sapien
gcggtagttgcacaccacctgaggc

SEQ ID NO: 1560916 - DNA, 25 bp, Homo sapien
cctggaagcgggggtcatcacaggt

SEQ ID NO: 1560917 - DNA, 25 bp, Homo sapien
catcacaggtcaaggggtggtcctt

SEQ ID NO: 1560918 - DNA, 25 bp, Homo sapien
tcatcacaggtcaaggggtggtcct

SEQ ID NO: 1560919 - DNA, 25 bp, Homo sapien
ggaagcgggggtcatcacaggtcaa

SEQ ID NO: 1560920 - DNA, 25 bp, Homo sapien
aggctggccgtgtgtgatgcagtca

SEQ ID NO: 1560921 - DNA, 25 bp, Homo sapien
tgcttcaccggcgagtcatcagggt

SEQ ID NO: 1560922 - DNA, 25 bp, Homo sapien
cagcgtgaggcgagcgatgcttcac

SEQ ID NO: 1560923 - DNA, 25 bp, Homo sapien
tgtcaccgcttcgaggccgataact

SEQ ID NO: 1560924 - DNA, 25 bp, Homo sapien
tgtctccggctcaggaaacctacag

SEQ ID NO: 1560925 - DNA, 25 bp, Homo sapien
gaggtctgaaactcgtccccaagga

SEQ ID NO: 1560926 - DNA, 25 bp, Homo sapien
gaatgtgcagactccttagatcccg

SEQ ID NO: 1560927 - DNA, 25 bp, Homo sapien
gcaaggactacctgacctactggag

SEQ ID NO: 1560928 - DNA, 25 bp, Homo sapien
tctcagaggacaccaccttgctggg

SEQ ID NO: 1560929 - DNA, 25 bp, Homo sapien
tagaacaggcaagcagatggccagg

SEQ ID NO: 1560930 - DNA, 25 bp, Homo sapien
taataagctaccgatcacagaggag

SEQ ID NO: 1560931 - DNA, 25 bp, Homo sapien
tctacattgggaaagaaacagacct

SEQ ID NO: 1560932 - DNA, 25 bp, Homo sapien
cttggagaggcctagtacggtggat

SEQ ID NO: 1560933 - DNA, 25 bp, Homo sapien
gggacatagaatcccagacagggtg

SEQ ID NO: 1560934 - DNA, 25 bp, Homo sapien
caaagaccgtgaaataaatggacac

SEQ ID NO: 1560935 - DNA, 25 bp, Homo sapien
cagacagagggaagatagagaccta

SEQ ID NO: 1560936 - DNA, 25 bp, Homo sapien
tgccttttcaagcttcgggaagccg

SEQ ID NO: 1560937 - DNA, 25 bp, Homo sapien
tcaaacttcaaagccagcaccatgg

SEQ ID NO: 1560938 - DNA, 25 bp, Homo sapien
tggctcatggccgttcctccgtctt

SEQ ID NO: 1560939 - DNA, 25 bp, Homo sapien
tagacgtcgaaaacagggctctgtt

SEQ ID NO: 1560940 - DNA, 25 bp, Homo sapien
aggtcagttcaacccctgctaggca

SEQ ID NO: 1560941 - DNA, 25 bp, Homo sapien
ggcaacctggtagtctcccacgcat

SEQ ID NO: 1560942 - DNA, 25 bp, Homo sapien
tggtagtctcccacgcatgggaggt

SEQ ID NO: 1560943 - DNA, 25 bp, Homo sapien
atttccagcctaggtcagttcaacc

SEQ ID NO: 1560944 - DNA, 25 bp, Homo sapien
gctttccgcgccgaaccgcctatgt

SEQ ID NO: 1560945 - DNA, 25 bp, Homo sapien
tttccgatcacacttcccggatctt

SEQ ID NO: 1560946 - DNA, 25 bp, Homo sapien
cacacttcccggatctttcgcgcat

SEQ ID NO: 1560947 - DNA, 25 bp, Homo sapien
tatgtccgcgagactctccctgatg

SEQ ID NO: 1560948 - DNA, 25 bp, Homo sapien
acgcgccgtgcggtgccaacaacaa

SEQ ID NO: 1560949 - DNA, 25 bp, Homo sapien
gcggcctccgatagcgactggagca

SEQ ID NO: 1560950 - DNA, 25 bp, Homo sapien
taagcgagcgcaccaggccgctgct

SEQ ID NO: 1560951 - DNA, 25 bp, Homo sapien
gaggtcactaccccgcctttgggca

SEQ ID NO: 1560952 - DNA, 25 bp, Homo sapien
ctctggcgtctgtccggaggctcgc

SEQ ID NO: 1560953 - DNA, 25 bp, Homo sapien
cctcgctctggcgtctgtccggagg

SEQ ID NO: 1560954 - DNA, 25 bp, Homo sapien
tcagcaacaacaactcctgcttcgg

SEQ ID NO: 1560955 - DNA, 25 bp, Homo sapien
gggcgtccacgtccgtctgattccg

SEQ ID NO: 1560956 - DNA, 25 bp, Homo sapien
cacgagggcgctgtgggaagcgggc

SEQ ID NO: 1560957 - DNA, 25 bp, Homo sapien
ggcgtgggtgcccagagatttcggg

SEQ ID NO: 1560958 - DNA, 25 bp, Homo sapien
tcggggtccgggaaagggatgcaga

SEQ ID NO: 1560959 - DNA, 25 bp, Homo sapien
tgtgggtagggaaccacgagggcgc

SEQ ID NO: 1560960 - DNA, 25 bp, Homo sapien
gaacagtcctgtgttgcggagaaaa

SEQ ID NO: 1560961 - DNA, 25 bp, Homo sapien
ccgtggagggcaaattacgagatgc

SEQ ID NO: 1560962 - DNA, 25 bp, Homo sapien
cagagtcctctgacacgagctgtgg

SEQ ID NO: 1560963 - DNA, 25 bp, Homo sapien
gagaaacataaggagcgaagcccca

SEQ ID NO: 1560964 - DNA, 25 bp, Homo sapien
tgtacggcgcaatgccacaataagg

SEQ ID NO: 1560965 - DNA, 25 bp, Homo sapien
tgtttttcatgtggcagtttctcca

SEQ ID NO: 1560966 - DNA, 25 bp, Homo sapien
ctcaaactctcgaatgtacggcgca

SEQ ID NO: 1560967 - DNA, 25 bp, Homo sapien
tggcaggtatggaatagggtcacgg

SEQ ID NO: 1560968 - DNA, 25 bp, Homo sapien
gtaacttccgactgtgtgccagctt

SEQ ID NO: 1560969 - DNA, 25 bp, Homo sapien
tgtgctctgatgcacctaagagatg

SEQ ID NO: 1560970 - DNA, 25 bp, Homo sapien
tacgaaattctgctctgcaactccc

SEQ ID NO: 1560971 - DNA, 25 bp, Homo sapien
tacctacccaatgctagaacgttct

SEQ ID NO: 1560972 - DNA, 25 bp, Homo sapien
ttagccaggtgtaaaggccgggtgc

SEQ ID NO: 1560973 - DNA, 25 bp, Homo sapien
attagccaggtgtaaaggccgggtg

SEQ ID NO: 1560974 - DNA, 25 bp, Homo sapien
tcctctccatgcgctcctctcgggt

SEQ ID NO: 1560975 - DNA, 25 bp, Homo sapien
tccatgcgctcctctcgggtttcag

SEQ ID NO: 1560976 - DNA, 25 bp, Homo sapien
ctctccatgcgctcctctcgggttt

SEQ ID NO: 1560977 - DNA, 25 bp, Homo sapien
ctccatgcgctcctctcgggtttca

SEQ ID NO: 1560978 - DNA, 25 bp, Homo sapien
gaatgcagatagaagtgccctagtg

SEQ ID NO: 1560979 - DNA, 25 bp, Homo sapien
aatgcagatagaagtgccctagtgt

SEQ ID NO: 1560980 - DNA, 25 bp, Homo sapien
gtgaatgcagatagaagtgccctag

SEQ ID NO: 1560981 - DNA, 25 bp, Homo sapien
tgaatgcagatagaagtgccctagt

SEQ ID NO: 1560982 - DNA, 25 bp, Homo sapien
acttcttgctgtcgccgctcaatct

SEQ ID NO: 1560983 - DNA, 25 bp, Homo sapien
tcttgctgtcgccgctcaatctttt

SEQ ID NO: 1560984 - DNA, 25 bp, Homo sapien
ccacttcttgctgtcgccgctcaat

SEQ ID NO: 1560985 - DNA, 25 bp, Homo sapien
ttgctgtcgccgctcaatcttttcc

SEQ ID NO: 1560986 - DNA, 25 bp, Homo sapien
cacggtcccctgctgagtgaaacac

SEQ ID NO: 1560987 - DNA, 25 bp, Homo sapien
gagtgaaacactgctatgctgcctg

SEQ ID NO: 1560988 - DNA, 25 bp, Homo sapien
tgctgagtgaaacactgctatgctg

SEQ ID NO: 1560989 - DNA, 25 bp, Homo sapien
ggatcaccatcacatccacggtccc

SEQ ID NO: 1560990 - DNA, 25 bp, Homo sapien
caccacgaccggctggattatttta

SEQ ID NO: 1560991 - DNA, 25 bp, Homo sapien
gagcagtataacgaactcccatgag

SEQ ID NO: 1560992 - DNA, 25 bp, Homo sapien
cattatcaacacgtggacggacttg

SEQ ID NO: 1560993 - DNA, 25 bp, Homo sapien
agtagttgcaattagaggcccctgc

SEQ ID NO: 1560994 - DNA, 25 bp, Homo sapien
cactacagtctatcctgtgcaacag

SEQ ID NO: 1560995 - DNA, 25 bp, Homo sapien
taaggagatcctatgatcacatcag

SEQ ID NO: 1560996 - DNA, 25 bp, Homo sapien
tagaaacgggtgactttacaaggca

SEQ ID NO: 1560997 - DNA, 25 bp, Homo sapien
tcacatcagatgacgacagagaata

SEQ ID NO: 1560998 - DNA, 25 bp, Homo sapien
gcctggaaatgctatagttgttggg

SEQ ID NO: 1560999 - DNA, 25 bp, Homo sapien
aagtaagtaattcttaagcatctac

SEQ ID NO: 1561000 - DNA, 25 bp, Homo sapien
tggggatttcgcagtaaacaagaca

SEQ ID NO: 1561001 - DNA, 25 bp, Homo sapien
aggtaattctttttattcgccgatg

SEQ ID NO: 1561002 - DNA, 25 bp, Homo sapien
cctcagcttctcaagcagctgggat

SEQ ID NO: 1561003 - DNA, 25 bp, Homo sapien
ccaggcttaaagtgcaatggcgcaa

SEQ ID NO: 1561004 - DNA, 25 bp, Homo sapien
ctccgaggttcaagcaattctcctg

SEQ ID NO: 1561005 - DNA, 25 bp, Homo sapien
aatctcgtctcactgcaacctctgc

SEQ ID NO: 1561006 - DNA, 25 bp, Homo sapien
gacactctgccggttcttccatggt

SEQ ID NO: 1561007 - DNA, 25 bp, Homo sapien
tttactgaacacgtactatggccca

SEQ ID NO: 1561008 - DNA, 25 bp, Homo sapien
tggctccagcacataatgaccctga

SEQ ID NO: 1561009 - DNA, 25 bp, Homo sapien
aatcagaccctggtgatgacccgag

SEQ ID NO: 1561010 - DNA, 25 bp, Homo sapien
cactctcgccacgaagagagtcttg

SEQ ID NO: 1561011 - DNA, 25 bp, Homo sapien
agcattgggatcattgtgagggtcc

SEQ ID NO: 1561012 - DNA, 25 bp, Homo sapien
cgccacgaagagagtcttgaaggca

SEQ ID NO: 1561013 - DNA, 25 bp, Homo sapien
catccccctgagcattgggatcatt

SEQ ID NO: 1561014 - DNA, 25 bp, Homo sapien
gtacacctcaaactctctccggagc

SEQ ID NO: 1561015 - DNA, 25 bp, Homo sapien
gagcttggattctgttgtgtcataa

SEQ ID NO: 1561016 - DNA, 25 bp, Homo sapien
tcttttgataggtccgtacacctca

SEQ ID NO: 1561017 - DNA, 25 bp, Homo sapien
gcttggattctgttgtgtcataatt

SEQ ID NO: 1561018 - DNA, 25 bp, Homo sapien
gatacagtcaggatgcataaatcca

SEQ ID NO: 1561019 - DNA, 25 bp, Homo sapien
cccggcctgacatgtataaatattt

SEQ ID NO: 1561020 - DNA, 25 bp, Homo sapien
acccggcctgacatgtataaatatt

SEQ ID NO: 1561021 - DNA, 25 bp, Homo sapien
ccggcctgacatgtataaatatttt

SEQ ID NO: 1561022 - DNA, 25 bp, Homo sapien
cacccggcctgacatgtataaatat

SEQ ID NO: 1561023 - DNA, 25 bp, Homo sapien
gaaaaagaaaggacacgtgcacagc

SEQ ID NO: 1561024 - DNA, 25 bp, Homo sapien
gggctttcctgaccgcttactgtag

SEQ ID NO: 1561025 - DNA, 25 bp, Homo sapien
gaaggcatagccacggggctttcct

SEQ ID NO: 1561026 - DNA, 25 bp, Homo sapien
gctcgtgttcgtactcgatgaaggc

SEQ ID NO: 1561027 - DNA, 25 bp, Homo sapien
gtgcatgtctcgctcgtgttcgtac

SEQ ID NO: 1561028 - DNA, 25 bp, Homo sapien
gagacatcgctaatgtcaggtgtgg

SEQ ID NO: 1561029 - DNA, 25 bp, Homo sapien
tgaggttcaacgtgtgacacttacc

SEQ ID NO: 1561030 - DNA, 25 bp, Homo sapien
tttgcccctgaggttcaacgtgtga

SEQ ID NO: 1561031 - DNA, 25 bp, Homo sapien
cacacacgttgtgggggatttggtt

SEQ ID NO: 1561032 - DNA, 25 bp, Homo sapien
ctttggaactgtaggggcaggcgct

SEQ ID NO: 1561033 - DNA, 25 bp, Homo sapien
ggcaggcgctcaacatgcctatcac

SEQ ID NO: 1561034 - DNA, 25 bp, Homo sapien
gaagcggagggtcgggtggcccagc

SEQ ID NO: 1561035 - DNA, 25 bp, Homo sapien
gggctttggaactgtaggggcaggc

SEQ ID NO: 1561036 - DNA, 25 bp, Homo sapien
acagtcaattaatacggcggcccct

SEQ ID NO: 1561037 - DNA, 25 bp, Homo sapien
gcagtgacaataagaacagtcaatt

SEQ ID NO: 1561038 - DNA, 25 bp, Homo sapien
agtcaattaatacggcggcccctgg

SEQ ID NO: 1561039 - DNA, 25 bp, Homo sapien
ctgcagtgacaataagaacagtcaa

SEQ ID NO: 1561040 - DNA, 25 bp, Homo sapien
aggggagcgtaagcatcagctgcaa

SEQ ID NO: 1561041 - DNA, 25 bp, Homo sapien
catacactgaggtgttgtaagggga

SEQ ID NO: 1561042 - DNA, 25 bp, Homo sapien
tgttgtaaggggagcgtaagcatca

SEQ ID NO: 1561043 - DNA, 25 bp, Homo sapien
tgtaaggggagcgtaagcatcagct

SEQ ID NO: 1561044 - DNA, 25 bp, Homo sapien
caaacaaggaaagggccatgggtgc

SEQ ID NO: 1561045 - DNA, 25 bp, Homo sapien
gatcaaagtcaagcgaaggaacccc

SEQ ID NO: 1561046 - DNA, 25 bp, Homo sapien
cgggaggcctcaaccacagtaagga

SEQ ID NO: 1561047 - DNA, 25 bp, Homo sapien
agtagcagccccatagaaagcacgg

SEQ ID NO: 1561048 - DNA, 25 bp, Homo sapien
cggtgctgcccgtgctctgaggagg

SEQ ID NO: 1561049 - DNA, 25 bp, Homo sapien
ggtgctgcccgtgctctgaggaggg

SEQ ID NO: 1561050 - DNA, 25 bp, Homo sapien
gtgctgcccgtgctctgaggagggg

SEQ ID NO: 1561051 - DNA, 25 bp, Homo sapien
cagaggacgtggtagaccccaaaga

SEQ ID NO: 1561052 - DNA, 25 bp, Homo sapien
gaaagccctggactatctcgtgtga

SEQ ID NO: 1561053 - DNA, 25 bp, Homo sapien
cccaaagaaatctcaaggaggcctt

SEQ ID NO: 1561054 - DNA, 25 bp, Homo sapien
gagtcacactgaactaggcacacag

SEQ ID NO: 1561055 - DNA, 25 bp, Homo sapien
tgagcacgcgcacagaccccacacc

SEQ ID NO: 1561056 - DNA, 25 bp, Homo sapien
acacccaccaccacggggtcagcta

SEQ ID NO: 1561057 - DNA, 25 bp, Homo sapien
ctgagcacgcgcacagaccccacac

SEQ ID NO: 1561058 - DNA, 25 bp, Homo sapien
cccacacccaccaccacggggtcag

SEQ ID NO: 1561059 - DNA, 25 bp, Homo sapien
gacacgggaccgcttacctggagcc

SEQ ID NO: 1561060 - DNA, 25 bp, Homo sapien
accgcttacctggagcccccaagct

SEQ ID NO: 1561061 - DNA, 25 bp, Homo sapien
gaccgcttacctggagcccccaagc

SEQ ID NO: 1561062 - DNA, 25 bp, Homo sapien
ggacacgggaccgcttacctggagc

SEQ ID NO: 1561063 - DNA, 25 bp, Homo sapien
atgccggccttgcgggtgtccaaac

SEQ ID NO: 1561064 - DNA, 25 bp, Homo sapien
cgggtgtccaaaccgagcgggatgg

SEQ ID NO: 1561065 - DNA, 25 bp, Homo sapien
ccttgcgggtgtccaaaccgagcgg

SEQ ID NO: 1561066 - DNA, 25 bp, Homo sapien
cggccttgcgggtgtccaaaccgag

SEQ ID NO: 1561067 - DNA, 25 bp, Homo sapien
accagaggaagagaaaaaggtgcca

SEQ ID NO: 1561068 - DNA, 25 bp, Homo sapien
ataacaaccagaggaagagaaaaag

SEQ ID NO: 1561069 - DNA, 25 bp, Homo sapien
gaggaagagaaaaaggtgccattta

SEQ ID NO: 1561070 - DNA, 25 bp, Homo sapien
cagaggaagagaaaaaggtgccatt

SEQ ID NO: 1561071 - DNA, 25 bp, Homo sapien
gggctgtcctcaaccaaccgtaata

SEQ ID NO: 1561072 - DNA, 25 bp, Homo sapien
ggctgtcctcaaccaaccgtaatac

SEQ ID NO: 1561073 - DNA, 25 bp, Homo sapien
gcagcgcgtagcagaaggcaagcct

SEQ ID NO: 1561074 - DNA, 25 bp, Homo sapien
gccgtgcggtgctactgaaaatccc

SEQ ID NO: 1561075 - DNA, 25 bp, Homo sapien
gaaactgaaggttaactccacgctg

SEQ ID NO: 1561076 - DNA, 25 bp, Homo sapien
cagagaggcgggttatacactccca

SEQ ID NO: 1561077 - DNA, 25 bp, Homo sapien
gaaaatccctgccttacctgagacg

SEQ ID NO: 1561078 - DNA, 25 bp, Homo sapien
gaccctcctgccatcaatcttcttg

SEQ ID NO: 1561079 - DNA, 25 bp, Homo sapien
cgtccacaaggaccctcctgccatc

SEQ ID NO: 1561080 - DNA, 25 bp, Homo sapien
cttcacggttcggcccctctccacg

SEQ ID NO: 1561081 - DNA, 25 bp, Homo sapien
cctgccatcaatcttcttgccatct

SEQ ID NO: 1561082 - DNA, 25 bp, Homo sapien
acccagaacgaggaggcaggcagct

SEQ ID NO: 1561083 - DNA, 25 bp, Homo sapien
tgctcctcacagtaacccagaacga

SEQ ID NO: 1561084 - DNA, 25 bp, Homo sapien
agaagccggagatgaggacgcgatg

SEQ ID NO: 1561085 - DNA, 25 bp, Homo sapien
ctagcaagggcggacgccagcatgt

SEQ ID NO: 1561086 - DNA, 25 bp, Homo sapien
ccagtgcaaagaggcatgggaccga

SEQ ID NO: 1561087 - DNA, 25 bp, Homo sapien
tgtgttgctcaactagaagcccggc

SEQ ID NO: 1561088 - DNA, 25 bp, Homo sapien
tggttgccccagctcttaacagcgt

SEQ ID NO: 1561089 - DNA, 25 bp, Homo sapien
gattctacatcaacagggcccttta

SEQ ID NO: 1561090 - DNA, 25 bp, Homo sapien
tacagtatttctgcgggtgcaccga

SEQ ID NO: 1561091 - DNA, 25 bp, Homo sapien
taagaacatgcctggtaagctccga

SEQ ID NO: 1561092 - DNA, 25 bp, Homo sapien
caaactcctcgtcaactggtggtag

SEQ ID NO: 1561093 - DNA, 25 bp, Homo sapien
gcttagtgttcacagggccgggtcc

SEQ ID NO: 1561094 - DNA, 25 bp, Homo sapien
tcatcgtagcgggaggtgtcatcgc

SEQ ID NO: 1561095 - DNA, 25 bp, Homo sapien
gaatgccggatgttcacatcagccc

SEQ ID NO: 1561096 - DNA, 25 bp, Homo sapien
tgtcatcgcggcctgaatgccggat

SEQ ID NO: 1561097 - DNA, 25 bp, Homo sapien
tcttctggtaccaccgaggcctcct

SEQ ID NO: 1561098 - DNA, 25 bp, Homo sapien
ctgtgcggaagcggggaggggccgg

SEQ ID NO: 1561099 - DNA, 25 bp, Homo sapien
gggagcgggagcgtcgccgttctcg

SEQ ID NO: 1561100 - DNA, 25 bp, Homo sapien
ctccttgtcgcgactccgtgagcgc

SEQ ID NO: 1561101 - DNA, 25 bp, Homo sapien
tccgctccctggagcgcctccgctc

SEQ ID NO: 1561102 - DNA, 25 bp, Homo sapien
ggcccgctcccgactccggctgctt

SEQ ID NO: 1561103 - DNA, 25 bp, Homo sapien
ggcccatcatcagggggcgcgtcac

SEQ ID NO: 1561104 - DNA, 25 bp, Homo sapien
aggcccatcatcagggggcgcgtca

SEQ ID NO: 1561105 - DNA, 25 bp, Homo sapien
cgtcagggccgtcaggcccgagctc

SEQ ID NO: 1561106 - DNA, 25 bp, Homo sapien
cgtcaggcccgagctcccctggagg

SEQ ID NO: 1561107 - DNA, 25 bp, Homo sapien
catgtctcggctgtcgttgcccaga

SEQ ID NO: 1561108 - DNA, 25 bp, Homo sapien
tcagactccatgtacatgtctcggc

SEQ ID NO: 1561109 - DNA, 25 bp, Homo sapien
ttgtgctcgcggtcacggtcacggt

SEQ ID NO: 1561110 - DNA, 25 bp, Homo sapien
atcaaatacccattctccggagcca

SEQ ID NO: 1561111 - DNA, 25 bp, Homo sapien
aggaacgcgtccaaacacagcagat

SEQ ID NO: 1561112 - DNA, 25 bp, Homo sapien
acaaactcaagtggccaaggttggg

SEQ ID NO: 1561113 - DNA, 25 bp, Homo sapien
aatgagacacctacccttggaggac

SEQ ID NO: 1561114 - DNA, 25 bp, Homo sapien
cttggaggacaaactcaagtggcca

SEQ ID NO: 1561115 - DNA, 25 bp, Homo sapien
tatagttgcagtatctgggatatct

SEQ ID NO: 1561116 - DNA, 25 bp, Homo sapien
tatctgggatatctatgaaatatag

SEQ ID NO: 1561117 - DNA, 25 bp, Homo sapien
ctagaagtcttatagttgcagtatc

SEQ ID NO: 1561118 - DNA, 25 bp, Homo sapien
gcttcttgtagccaatactagaagt

SEQ ID NO: 1561119 - DNA, 25 bp, Homo sapien
caaattaagtcctttctagcaaggc

SEQ ID NO: 1561120 - DNA, 25 bp, Homo sapien
tatggcgttactctgacattgaggc

SEQ ID NO: 1561121 - DNA, 25 bp, Homo sapien
ccagagttttcttctgactagcaga

SEQ ID NO: 1561122 - DNA, 25 bp, Homo sapien
aatagtacatgtggagactcggaac

SEQ ID NO: 1561123 - DNA, 25 bp, Homo sapien
cctgccctggcgccggcgaggaggg

SEQ ID NO: 1561124 - DNA, 25 bp, Homo sapien
gcctgccctggcgccggcgaggagg

SEQ ID NO: 1561125 - DNA, 25 bp, Homo sapien
ctgccctggcgccggcgaggagggc

SEQ ID NO: 1561126 - DNA, 25 bp, Homo sapien
tgccctggcgccggcgaggagggcg

SEQ ID NO: 1561127 - DNA, 25 bp, Homo sapien
cccagcggctccaccagcgcagcca

SEQ ID NO: 1561128 - DNA, 25 bp, Homo sapien
gctccagccccagcggctccaccag

SEQ ID NO: 1561129 - DNA, 25 bp, Homo sapien
ccagcggctccaccagcgcagccat

SEQ ID NO: 1561130 - DNA, 25 bp, Homo sapien
agccccagcggctccaccagcgcag

SEQ ID NO: 1561131 - DNA, 25 bp, Homo sapien
accccgcagagtccagggtggcgca

SEQ ID NO: 1561132 - DNA, 25 bp, Homo sapien
aggacggccgaagcctagtcggaca

SEQ ID NO: 1561133 - DNA, 25 bp, Homo sapien
agagaagcaaggagagcggcggagt

SEQ ID NO: 1561134 - DNA, 25 bp, Homo sapien
gagtgtcagagaccccgagacgcag

SEQ ID NO: 1561135 - DNA, 25 bp, Homo sapien
tctcggatagcggagcagaagcggc

SEQ ID NO: 1561136 - DNA, 25 bp, Homo sapien
tcggatagcggagcagaagcggctc

SEQ ID NO: 1561137 - DNA, 25 bp, Homo sapien
ctggagccgctcgaggagctcaacc

SEQ ID NO: 1561138 - DNA, 25 bp, Homo sapien
tcgaggagctcaaccgcccgggaca

SEQ ID NO: 1561139 - DNA, 25 bp, Homo sapien
cccgcaacagaaggccgagaaaact

SEQ ID NO: 1561140 - DNA, 25 bp, Homo sapien
actcccgaagaacccctgagctgaa

SEQ ID NO: 1561141 - DNA, 25 bp, Homo sapien
tgagctgaagcgttggcaccccaag

SEQ ID NO: 1561142 - DNA, 25 bp, Homo sapien
cagccctagacgcaggagttcaggc

SEQ ID NO: 1561143 - DNA, 25 bp, Homo sapien
gatgtccagcgtgtcataaagctgc

SEQ ID NO: 1561144 - DNA, 25 bp, Homo sapien
aaggtggcacatagatttagcaaaa

SEQ ID NO: 1561145 - DNA, 25 bp, Homo sapien
tatttactaatagtaaggtggcaca

SEQ ID NO: 1561146 - DNA, 25 bp, Homo sapien
gaaggagatattgagttcgactagg

SEQ ID NO: 1561147 - DNA, 25 bp, Homo sapien
tcgactaggcagttaaatagacacc

SEQ ID NO: 1561148 - DNA, 25 bp, Homo sapien
gaaagcgactgaagatgagggcccc

SEQ ID NO: 1561149 - DNA, 25 bp, Homo sapien
tggaccgaggacagcgatttagcct

SEQ ID NO: 1561150 - DNA, 25 bp, Homo sapien
gatttagcctgggttactatcccca

SEQ ID NO: 1561151 - DNA, 25 bp, Homo sapien
ggttactatccccaagcatgggaca

SEQ ID NO: 1561152 - DNA, 25 bp, Homo sapien
actaccctgggatgtgcgtggccct

SEQ ID NO: 1561153 - DNA, 25 bp, Homo sapien
cctaggccctcatccgtcttgggta

SEQ ID NO: 1561154 - DNA, 25 bp, Homo sapien
cccctgggatgacccgggagatgta

SEQ ID NO: 1561155 - DNA, 25 bp, Homo sapien
cccatgatgttgaagcctaggccct

SEQ ID NO: 1561156 - DNA, 25 bp, Homo sapien
gattcccatgtcagggacagccccg

SEQ ID NO: 1561157 - DNA, 25 bp, Homo sapien
attcccatgtcagggacagccccgt

SEQ ID NO: 1561158 - DNA, 25 bp, Homo sapien
agggacagccccgtgttccctcagt

SEQ ID NO: 1561159 - DNA, 25 bp, Homo sapien
gtcagggacagccccgtgttccctc

SEQ ID NO: 1561160 - DNA, 25 bp, Homo sapien
taacggacaaccagcttcaccgagc

SEQ ID NO: 1561161 - DNA, 25 bp, Homo sapien
cggtgtgtaacggacaaccagcttc

SEQ ID NO: 1561162 - DNA, 25 bp, Homo sapien
tgtgtaacggacaaccagcttcacc

SEQ ID NO: 1561163 - DNA, 25 bp, Homo sapien
tcgcggtgtgtaacggacaaccagc

SEQ ID NO: 1561164 - DNA, 25 bp, Homo sapien
gggcagagcgcatcttctcgaaccg

SEQ ID NO: 1561165 - DNA, 25 bp, Homo sapien
gcagagcgcatcttctcgaaccggg

SEQ ID NO: 1561166 - DNA, 25 bp, Homo sapien
gagcgcatcttctcgaaccgggcct

SEQ ID NO: 1561167 - DNA, 25 bp, Homo sapien
agagcgcatcttctcgaaccgggcc

SEQ ID NO: 1561168 - DNA, 25 bp, Homo sapien
gaggccccaggggtgtggtgaccca

SEQ ID NO: 1561169 - DNA, 25 bp, Homo sapien
agcccgtggaggccccaggggtgtg

SEQ ID NO: 1561170 - DNA, 25 bp, Homo sapien
ccgtggaggccccaggggtgtggtg

SEQ ID NO: 1561171 - DNA, 25 bp, Homo sapien
tggaggccccaggggtgtggtgacc

SEQ ID NO: 1561172 - DNA, 25 bp, Homo sapien
gttgcagaggcaagggcccaggtaa

SEQ ID NO: 1561173 - DNA, 25 bp, Homo sapien
taggttccgtatcttgggatggaag

SEQ ID NO: 1561174 - DNA, 25 bp, Homo sapien
cccagccacagtaggttccgtatct

SEQ ID NO: 1561175 - DNA, 25 bp, Homo sapien
ccaaactagcctggggtgagagcct

SEQ ID NO: 1561176 - DNA, 25 bp, Homo sapien
cacgtgaacgtccagatctgtggtt

SEQ ID NO: 1561177 - DNA, 25 bp, Homo sapien
ctgtacaggaagagagtgcacgtga

SEQ ID NO: 1561178 - DNA, 25 bp, Homo sapien
gagagtgcacgtgaacgtccagatc

SEQ ID NO: 1561179 - DNA, 25 bp, Homo sapien
caggaagagagtgcacgtgaacgtc

SEQ ID NO: 1561180 - DNA, 25 bp, Homo sapien
ctccgcgtctctggctccggcttgg

SEQ ID NO: 1561181 - DNA, 25 bp, Homo sapien
tctgtcgcttcggagccctggagcc

SEQ ID NO: 1561182 - DNA, 25 bp, Homo sapien
ctcgcgcgggctccgcgtctctggc

SEQ ID NO: 1561183 - DNA, 25 bp, Homo sapien
ggagccctgtctccgacgctcgcgc

SEQ ID NO: 1561184 - DNA, 25 bp, Homo sapien
tcaggaagggggatctaggctctag

SEQ ID NO: 1561185 - DNA, 25 bp, Homo sapien
tctggggagtctggcaccgccgcgg

SEQ ID NO: 1561186 - DNA, 25 bp, Homo sapien
ctggcgacgggagacggagtgcgcg

SEQ ID NO: 1561187 - DNA, 25 bp, Homo sapien
cgaagcggggacgatgcggacgcgt

SEQ ID NO: 1561188 - DNA, 25 bp, Homo sapien
cgccgagcctgcctggaccgtggga

SEQ ID NO: 1561189 - DNA, 25 bp, Homo sapien
tgtgtccagggcggccgccgagcct

SEQ ID NO: 1561190 - DNA, 25 bp, Homo sapien
gacagctccagagcgggcctgtgtc

SEQ ID NO: 1561191 - DNA, 25 bp, Homo sapien
acgcagccggctgtgcaagcccgag

SEQ ID NO: 1561192 - DNA, 25 bp, Homo sapien
tgggagctgcatccccgggtgccat

SEQ ID NO: 1561193 - DNA, 25 bp, Homo sapien
cccacggcgaccagaataggaaaat

SEQ ID NO: 1561194 - DNA, 25 bp, Homo sapien
tgtagacacggacaggcttcccgaa

SEQ ID NO: 1561195 - DNA, 25 bp, Homo sapien
taggaaaattcagaagccctggatc

SEQ ID NO: 1561196 - DNA, 25 bp, Homo sapien
gatgagacaggggtttggtagggcc

SEQ ID NO: 1561197 - DNA, 25 bp, Homo sapien
gtagggccacaggagatgtgaagtt

SEQ ID NO: 1561198 - DNA, 25 bp, Homo sapien
agttgatggggcagagtgatgaggc

SEQ ID NO: 1561199 - DNA, 25 bp, Homo sapien
tttggtagggccacaggagatgtga

SEQ ID NO: 1561200 - DNA, 25 bp, Homo sapien
ccgaccctggtatcgtatgagtgaa

SEQ ID NO: 1561201 - DNA, 25 bp, Homo sapien
cactcaaaggaaccaaagctggccg

SEQ ID NO: 1561202 - DNA, 25 bp, Homo sapien
cagtggcagcaaacctaagcctagc

SEQ ID NO: 1561203 - DNA, 25 bp, Homo sapien
tgaggtcagactccaacagacagtg

SEQ ID NO: 1561204 - DNA, 25 bp, Homo sapien
aggcgctcgcgctccgtgagcatcg

SEQ ID NO: 1561205 - DNA, 25 bp, Homo sapien
agcatcgtgaccatgaggcgctcca

SEQ ID NO: 1561206 - DNA, 25 bp, Homo sapien
tgcgctgtagccaacccgtcctgtg

SEQ ID NO: 1561207 - DNA, 25 bp, Homo sapien
tgagctggcgctgcagcgagtcctt

SEQ ID NO: 1561208 - DNA, 25 bp, Homo sapien
gctccttcgtcagagctgcaaactc

SEQ ID NO: 1561209 - DNA, 25 bp, Homo sapien
gcgtgttgttccgttccgccttcag

SEQ ID NO: 1561210 - DNA, 25 bp, Homo sapien
tgttgttccgttccgccttcagctc

SEQ ID NO: 1561211 - DNA, 25 bp, Homo sapien
gcagctgctcccgacataagttcag

SEQ ID NO: 1561212 - DNA, 25 bp, Homo sapien
ggagcaccgagacaggtcaggaaaa

SEQ ID NO: 1561213 - DNA, 25 bp, Homo sapien
aagggtgacaggtagggcggacaca

SEQ ID NO: 1561214 - DNA, 25 bp, Homo sapien
caagcacacggcatggggtcaagga

SEQ ID NO: 1561215 - DNA, 25 bp, Homo sapien
ggagccatataaaggagcaccgaga

SEQ ID NO: 1561216 - DNA, 25 bp, Homo sapien
gccttgtggtgctcgaagagagact

SEQ ID NO: 1561217 - DNA, 25 bp, Homo sapien
gagagactttagagctttgagcact

SEQ ID NO: 1561218 - DNA, 25 bp, Homo sapien
tcaccacggtcatgcgcagtgacct

SEQ ID NO: 1561219 - DNA, 25 bp, Homo sapien
ggtcatgcgcagtgacctctcgtgc

SEQ ID NO: 1561220 - DNA, 25 bp, Homo sapien
tcctcgagcactgccacgcgctcca

SEQ ID NO: 1561221 - DNA, 25 bp, Homo sapien
cctcctcgagcactgccacgcgctc

SEQ ID NO: 1561222 - DNA, 25 bp, Homo sapien
tcctcctcgagcactgccacgcgct

SEQ ID NO: 1561223 - DNA, 25 bp, Homo sapien
ctcctcctcgagcactgccacgcgc

SEQ ID NO: 1561224 - DNA, 25 bp, Homo sapien
gctccgccccgtgggcagcccctta

SEQ ID NO: 1561225 - DNA, 25 bp, Homo sapien
ccaaccggctccgccccgtgggcag

SEQ ID NO: 1561226 - DNA, 25 bp, Homo sapien
attcaaattccctgtcttggccaca

SEQ ID NO: 1561227 - DNA, 25 bp, Homo sapien
ttcaaattccctgtcttggccacac

SEQ ID NO: 1561228 - DNA, 25 bp, Homo sapien
catagcttgtctgccctagtcctgc

SEQ ID NO: 1561229 - DNA, 25 bp, Homo sapien
gtcctgccccaatagattctctctg

SEQ ID NO: 1561230 - DNA, 25 bp, Homo sapien
tccatagtccaaccccatagcttgt

SEQ ID NO: 1561231 - DNA, 25 bp, Homo sapien
ctagtcctgccccaatagattctct

SEQ ID NO: 1561232 - DNA, 25 bp, Homo sapien
tgaccgccgcctagacagctgttct

SEQ ID NO: 1561233 - DNA, 25 bp, Homo sapien
atccttgcccggctcttccagccct

SEQ ID NO: 1561234 - DNA, 25 bp, Homo sapien
gacagctgttctcgaaggttcagag

SEQ ID NO: 1561235 - DNA, 25 bp, Homo sapien
gcctagacagctgttctcgaaggtt

SEQ ID NO: 1561236 - DNA, 25 bp, Homo sapien
aggaggggacaagatcccagagtgt

SEQ ID NO: 1561237 - DNA, 25 bp, Homo sapien
agggaaggaggggacaagatcccag

SEQ ID NO: 1561238 - DNA, 25 bp, Homo sapien
gaaggaggggacaagatcccagagt

SEQ ID NO: 1561239 - DNA, 25 bp, Homo sapien
ggaaggaggggacaagatcccagag

SEQ ID NO: 1561240 - DNA, 25 bp, Homo sapien
gcgccggttggaatccccgccagga

SEQ ID NO: 1561241 - DNA, 25 bp, Homo sapien
gctgtgcgccggttggaatccccgc

SEQ ID NO: 1561242 - DNA, 25 bp, Homo sapien
tgtgcgccggttggaatccccgcca

SEQ ID NO: 1561243 - DNA, 25 bp, Homo sapien
ctgctgtgcgccggttggaatcccc

SEQ ID NO: 1561244 - DNA, 25 bp, Homo sapien
agctggctcatctgacggcacagca

SEQ ID NO: 1561245 - DNA, 25 bp, Homo sapien
tcacggtgcgcggtgcccaactcct

SEQ ID NO: 1561246 - DNA, 25 bp, Homo sapien
gcccagctcacggtgcgcggtgccc

SEQ ID NO: 1561247 - DNA, 25 bp, Homo sapien
agctggcacacctcggcgcgctgcc

SEQ ID NO: 1561248 - DNA, 25 bp, Homo sapien
tcgtgcagagacgtggcctcccgct

SEQ ID NO: 1561249 - DNA, 25 bp, Homo sapien
tgccgatacaacgactccttgctag

SEQ ID NO: 1561250 - DNA, 25 bp, Homo sapien
cagtttgtcgttggcgtcgtgcaga

SEQ ID NO: 1561251 - DNA, 25 bp, Homo sapien
tgttgtaatccgctcctccatatct

SEQ ID NO: 1561252 - DNA, 25 bp, Homo sapien
tcgggcaaggtctccgctttctgca

SEQ ID NO: 1561253 - DNA, 25 bp, Homo sapien
tcggccagctgacggctcttctctt

SEQ ID NO: 1561254 - DNA, 25 bp, Homo sapien
cagcttctgcttggcgtcgtccaac

SEQ ID NO: 1561255 - DNA, 25 bp, Homo sapien
cagctgcgcctctatctcgggcaag

SEQ ID NO: 1561256 - DNA, 25 bp, Homo sapien
caaaattcccatgacgttcctcggc

SEQ ID NO: 1561257 - DNA, 25 bp, Homo sapien
caccgtctcggacagccgcttattg

SEQ ID NO: 1561258 - DNA, 25 bp, Homo sapien
ctccttgaggtgaagctgtaagcgc

SEQ ID NO: 1561259 - DNA, 25 bp, Homo sapien
tcgttggactcgctcagcagcttgt

SEQ ID NO: 1561260 - DNA, 25 bp, Homo sapien
attgtggtcatcgttcatcttctcc

SEQ ID NO: 1561261 - DNA, 25 bp, Homo sapien
tagtcccggaattccgcgtcccgca

SEQ ID NO: 1561262 - DNA, 25 bp, Homo sapien
cccaggattccagcaagaggtagtc

SEQ ID NO: 1561263 - DNA, 25 bp, Homo sapien
cccgcagtcctgtatggggggcgca

SEQ ID NO: 1561264 - DNA, 25 bp, Homo sapien
ggattccagcaagaggtagtcccgg

SEQ ID NO: 1561265 - DNA, 25 bp, Homo sapien
tcaggatgccggggtttagggaggc

SEQ ID NO: 1561266 - DNA, 25 bp, Homo sapien
tgaaaaagcggtctgggcaatagag

SEQ ID NO: 1561267 - DNA, 25 bp, Homo sapien
gaataggtgaaaaagcggtctgggc

SEQ ID NO: 1561268 - DNA, 25 bp, Homo sapien
aggtgaaaaagcggtctgggcaata

SEQ ID NO: 1561269 - DNA, 25 bp, Homo sapien
ataggtgaaaaagcggtctgggcaa

SEQ ID NO: 1561270 - DNA, 25 bp, Homo sapien
ttcttcatgttggctatctcctcgc

SEQ ID NO: 1561271 - DNA, 25 bp, Homo sapien
tcttcatgttggctatctcctcgct

SEQ ID NO: 1561272 - DNA, 25 bp, Homo sapien
cttcatgttggctatctcctcgctc

SEQ ID NO: 1561273 - DNA, 25 bp, Homo sapien
taggaggatggtggcctcccccgca

SEQ ID NO: 1561274 - DNA, 25 bp, Homo sapien
gctccatttcggccaagagctgctc

SEQ ID NO: 1561275 - DNA, 25 bp, Homo sapien
gcagctggtcgatctccatctgcat

SEQ ID NO: 1561276 - DNA, 25 bp, Homo sapien
tgcatccgctccatttcggccaaga

SEQ ID NO: 1561277 - DNA, 25 bp, Homo sapien
tgccagccacatagggatccaggtg

SEQ ID NO: 1561278 - DNA, 25 bp, Homo sapien
ttgacccctgaccagcggcccctct

SEQ ID NO: 1561279 - DNA, 25 bp, Homo sapien
ccaggtgggcaccagaaggtaaagt

SEQ ID NO: 1561280 - DNA, 25 bp, Homo sapien
agagtaacggagctccagggcactg

SEQ ID NO: 1561281 - DNA, 25 bp, Homo sapien
tcagtccaggacccagaggcagctg

SEQ ID NO: 1561282 - DNA, 25 bp, Homo sapien
ccaggacccagaggcagctgctgac

SEQ ID NO: 1561283 - DNA, 25 bp, Homo sapien
agtccaggacccagaggcagctgct

SEQ ID NO: 1561284 - DNA, 25 bp, Homo sapien
gtccaggacccagaggcagctgctg

SEQ ID NO: 1561285 - DNA, 25 bp, Homo sapien
ggggacagagggacattaggtggct

SEQ ID NO: 1561286 - DNA, 25 bp, Homo sapien
gacagagggacattaggtggctggg

SEQ ID NO: 1561287 - DNA, 25 bp, Homo sapien
tgggtcttggctcatgatcctgact

SEQ ID NO: 1561288 - DNA, 25 bp, Homo sapien
gggccgaggttggcgctgggtcttg

SEQ ID NO: 1561289 - DNA, 25 bp, Homo sapien
cccgcaggggcagaccgctcccaat

SEQ ID NO: 1561290 - DNA, 25 bp, Homo sapien
agcccgcaggggcagaccgctccca

SEQ ID NO: 1561291 - DNA, 25 bp, Homo sapien
ccgcaggggcagaccgctcccaatc

SEQ ID NO: 1561292 - DNA, 25 bp, Homo sapien
gcccgcaggggcagaccgctcccaa

SEQ ID NO: 1561293 - DNA, 25 bp, Homo sapien
agctcggccccaaacatcccctctg

SEQ ID NO: 1561294 - DNA, 25 bp, Homo sapien
tggccagcgtctgcacgtcagcctg

SEQ ID NO: 1561295 - DNA, 25 bp, Homo sapien
ctgctcctgaagcatgatggccagc

SEQ ID NO: 1561296 - DNA, 25 bp, Homo sapien
tcctcctcatcggagccgtccagtt

SEQ ID NO: 1561297 - DNA, 25 bp, Homo sapien
cagagctggacacccgactctccag

SEQ ID NO: 1561298 - DNA, 25 bp, Homo sapien
gcggcccaacgagtccaagccagag

SEQ ID NO: 1561299 - DNA, 25 bp, Homo sapien
agccttgtcggtgccctcacgggca

SEQ ID NO: 1561300 - DNA, 25 bp, Homo sapien
gggctggcaagggtagaggtggtga

SEQ ID NO: 1561301 - DNA, 25 bp, Homo sapien
atccccctactaggctggggagact

SEQ ID NO: 1561302 - DNA, 25 bp, Homo sapien
ccatccccctactaggctggggaga

SEQ ID NO: 1561303 - DNA, 25 bp, Homo sapien
ctctccccatccccctactaggctg

SEQ ID NO: 1561304 - DNA, 25 bp, Homo sapien
ctccccatccccctactaggctggg

SEQ ID NO: 1561305 - DNA, 25 bp, Homo sapien
tattgttgctgtacactggggagcc

SEQ ID NO: 1561306 - DNA, 25 bp, Homo sapien
ctggtgtgaggggttattgttgctg

SEQ ID NO: 1561307 - DNA, 25 bp, Homo sapien
tgaggggttattgttgctgtacact

SEQ ID NO: 1561308 - DNA, 25 bp, Homo sapien
gttattgttgctgtacactggggag

SEQ ID NO: 1561309 - DNA, 25 bp, Homo sapien
tccagcttcctccttagggacatga

SEQ ID NO: 1561310 - DNA, 25 bp, Homo sapien
cagcttcctccttagggacatgatt

SEQ ID NO: 1561311 - DNA, 25 bp, Homo sapien
cctcccctcgtggagctccagcttc

SEQ ID NO: 1561312 - DNA, 25 bp, Homo sapien
cggcccctcccctcgtggagctcca

SEQ ID NO: 1561313 - DNA, 25 bp, Homo sapien
cgcctgcagtgccaaggcctgggtc

SEQ ID NO: 1561314 - DNA, 25 bp, Homo sapien
attctctcaagacgggcagagcggg

SEQ ID NO: 1561315 - DNA, 25 bp, Homo sapien
ccaaggcctgggtcattctctcaag

SEQ ID NO: 1561316 - DNA, 25 bp, Homo sapien
agggaccccgcctgcagtgccaagg

SEQ ID NO: 1561317 - DNA, 25 bp, Homo sapien
atgagagcatatgcttgctgagatg

SEQ ID NO: 1561318 - DNA, 25 bp, Homo sapien
tgcttgctgagatgccccctctcct

SEQ ID NO: 1561319 - DNA, 25 bp, Homo sapien
gagaatgagagcatatgcttgctga

SEQ ID NO: 1561320 - DNA, 25 bp, Homo sapien
gaatgagagcatatgcttgctgaga

SEQ ID NO: 1561321 - DNA, 25 bp, Homo sapien
ttgggggctttgtgcagagaatctg

SEQ ID NO: 1561322 - DNA, 25 bp, Homo sapien
tgggggctttgtgcagagaatctgg

SEQ ID NO: 1561323 - DNA, 25 bp, Homo sapien
gtgcagagaatctggggtgccctca

SEQ ID NO: 1561324 - DNA, 25 bp, Homo sapien
tttgtgcagagaatctggggtgccc

SEQ ID NO: 1561325 - DNA, 25 bp, Homo sapien
tctttcttgccaaagagacggccta

SEQ ID NO: 1561326 - DNA, 25 bp, Homo sapien
ttcttgccaaagagacggcctatgg

SEQ ID NO: 1561327 - DNA, 25 bp, Homo sapien
ccagagaagagctgtcccggcctgg

SEQ ID NO: 1561328 - DNA, 25 bp, Homo sapien
gccaaagagacggcctatggatgac

SEQ ID NO: 1561329 - DNA, 25 bp, Homo sapien
ctcctcccgcctaccttggcaagct

SEQ ID NO: 1561330 - DNA, 25 bp, Homo sapien
tcctcccgcctaccttggcaagctg

SEQ ID NO: 1561331 - DNA, 25 bp, Homo sapien
ctcccgcctaccttggcaagctgtg

SEQ ID NO: 1561332 - DNA, 25 bp, Homo sapien
cctcccgcctaccttggcaagctgt

SEQ ID NO: 1561333 - DNA, 25 bp, Homo sapien
ctggaggcagggaggggtcgaaatt

SEQ ID NO: 1561334 - DNA, 25 bp, Homo sapien
ttgttccttcggtccttgtctcctg

SEQ ID NO: 1561335 - DNA, 25 bp, Homo sapien
tcagcttggctagccccagagggtc

SEQ ID NO: 1561336 - DNA, 25 bp, Homo sapien
ctgtcagcttggctagccccagagg

SEQ ID NO: 1561337 - DNA, 25 bp, Homo sapien
cttgttccttcggtccttgtctcct

SEQ ID NO: 1561338 - DNA, 25 bp, Homo sapien
gccaggatagaagctgtcagggatg

SEQ ID NO: 1561339 - DNA, 25 bp, Homo sapien
tgaaggggccaggatagaagctgtc

SEQ ID NO: 1561340 - DNA, 25 bp, Homo sapien
caggatagaagctgtcagggatgga

SEQ ID NO: 1561341 - DNA, 25 bp, Homo sapien
ctgtaagggtgaaggggccaggata

SEQ ID NO: 1561342 - DNA, 25 bp, Homo sapien
cagcaaaaggtaggccctggcggca

SEQ ID NO: 1561343 - DNA, 25 bp, Homo sapien
gtgggcccgtcccaggcagcaaaag

SEQ ID NO: 1561344 - DNA, 25 bp, Homo sapien
cagccaggacaccacggtgggcccg

SEQ ID NO: 1561345 - DNA, 25 bp, Homo sapien
agccaggacaccacggtgggcccgt

SEQ ID NO: 1561346 - DNA, 25 bp, Homo sapien
gatctccgtgtctgacaggttggcc

SEQ ID NO: 1561347 - DNA, 25 bp, Homo sapien
tggatctccgtgtctgacaggttgg

SEQ ID NO: 1561348 - DNA, 25 bp, Homo sapien
tgtctgacaggttggccatgatggc

SEQ ID NO: 1561349 - DNA, 25 bp, Homo sapien
tccgtgtctgacaggttggccatga

SEQ ID NO: 1561350 - DNA, 25 bp, Homo sapien
catctcctggatggcgaggcgtagc

SEQ ID NO: 1561351 - DNA, 25 bp, Homo sapien
agaccatctcctggatggcgaggcg

SEQ ID NO: 1561352 - DNA, 25 bp, Homo sapien
ccatctcctggatggcgaggcgtag

SEQ ID NO: 1561353 - DNA, 25 bp, Homo sapien
ggggctgagggcgaggtgagcgaga

SEQ ID NO: 1561354 - DNA, 25 bp, Homo sapien
gaagcgaaggctggaattggccgcc

SEQ ID NO: 1561355 - DNA, 25 bp, Homo sapien
gcgaaggctggaattggccgccgga

SEQ ID NO: 1561356 - DNA, 25 bp, Homo sapien
aaggctggaattggccgccggacac

SEQ ID NO: 1561357 - DNA, 25 bp, Homo sapien
aagcgaaggctggaattggccgccg

SEQ ID NO: 1561358 - DNA, 25 bp, Homo sapien
ttggtcgtggccgtaagggactcca

SEQ ID NO: 1561359 - DNA, 25 bp, Homo sapien
tcctcgtgtgtcatccacacgtttc

SEQ ID NO: 1561360 - DNA, 25 bp, Homo sapien
tcgtggccgtaagggactccatctc

SEQ ID NO: 1561361 - DNA, 25 bp, Homo sapien
actccatctcctcgtgtgtcatcca

SEQ ID NO: 1561362 - DNA, 25 bp, Homo sapien
tgctcccagctgatctccttggtct

SEQ ID NO: 1561363 - DNA, 25 bp, Homo sapien
gctcccagctgatctccttggtctc

SEQ ID NO: 1561364 - DNA, 25 bp, Homo sapien
ctgctcccagctgatctccttggtc

SEQ ID NO: 1561365 - DNA, 25 bp, Homo sapien
gagggaagagtcaggccctctggcc

SEQ ID NO: 1561366 - DNA, 25 bp, Homo sapien
tgagggaagagtcaggccctctggc

SEQ ID NO: 1561367 - DNA, 25 bp, Homo sapien
gggcaggtgagggaagagtcaggcc

SEQ ID NO: 1561368 - DNA, 25 bp, Homo sapien
ggggccatgggcaggtgagggaaga

SEQ ID NO: 1561369 - DNA, 25 bp, Homo sapien
gatctaacattcgagcgtccaccag

SEQ ID NO: 1561370 - DNA, 25 bp, Homo sapien
ccttcttgttaaggtgatctaacat

SEQ ID NO: 1561371 - DNA, 25 bp, Homo sapien
accatcttgagttggccccggagct

SEQ ID NO: 1561372 - DNA, 25 bp, Homo sapien
ggttcatgtcgccatatgccaggat

SEQ ID NO: 1561373 - DNA, 25 bp, Homo sapien
gttgagccgtttcaggcacataatc

SEQ ID NO: 1561374 - DNA, 25 bp, Homo sapien
caggtccttccggtcatagttgagc

SEQ ID NO: 1561375 - DNA, 25 bp, Homo sapien
ctccaggtccttccggtcatagttg

SEQ ID NO: 1561376 - DNA, 25 bp, Homo sapien
tccggtcatagttgagccgtttcag

SEQ ID NO: 1561377 - DNA, 25 bp, Homo sapien
tccagggcgagcagtgccccgtgta

SEQ ID NO: 1561378 - DNA, 25 bp, Homo sapien
ccaggtcggagtagtcgaaggtctc

SEQ ID NO: 1561379 - DNA, 25 bp, Homo sapien
gtggcaaattccttcaggcccagcc

SEQ ID NO: 1561380 - DNA, 25 bp, Homo sapien
accccgctctccgtgaggttcgtgg

SEQ ID NO: 1561381 - DNA, 25 bp, Homo sapien
ctaaggagataaggttgctgaattc

SEQ ID NO: 1561382 - DNA, 25 bp, Homo sapien
taaggagataaggttgctgaattcc

SEQ ID NO: 1561383 - DNA, 25 bp, Homo sapien
gcctgtctgtgcctaaggagataag

SEQ ID NO: 1561384 - DNA, 25 bp, Homo sapien
cgcctgtctgtgcctaaggagataa

SEQ ID NO: 1561385 - DNA, 25 bp, Homo sapien
tataggagccggacagccggtgagg

SEQ ID NO: 1561386 - DNA, 25 bp, Homo sapien
aggagccggacagccggtgagggac

SEQ ID NO: 1561387 - DNA, 25 bp, Homo sapien
ctaggtataggagccggacagccgg

SEQ ID NO: 1561388 - DNA, 25 bp, Homo sapien
gtataggagccggacagccggtgag

SEQ ID NO: 1561389 - DNA, 25 bp, Homo sapien
agcggctgaaagacttggcgctgtc

SEQ ID NO: 1561390 - DNA, 25 bp, Homo sapien
ccggaacatcttccgccaggatggg

SEQ ID NO: 1561391 - DNA, 25 bp, Homo sapien
ccgctgcagccgaacgaaagttggg

SEQ ID NO: 1561392 - DNA, 25 bp, Homo sapien
cagctgagtcgggagttacgcctcg

SEQ ID NO: 1561393 - DNA, 25 bp, Homo sapien
gagtccggaacgttggagcagtcca

SEQ ID NO: 1561394 - DNA, 25 bp, Homo sapien
tcccgatgtcacaacgatcgccggg

SEQ ID NO: 1561395 - DNA, 25 bp, Homo sapien
tccagaacccggactactgaggtgg

SEQ ID NO: 1561396 - DNA, 25 bp, Homo sapien
caaggactcaaactcgcattgggcg

SEQ ID NO: 1561397 - DNA, 25 bp, Homo sapien
ctagcaggaataggtccggaccgaa

SEQ ID NO: 1561398 - DNA, 25 bp, Homo sapien
tgcccgggaactcccagaagtctgg

SEQ ID NO: 1561399 - DNA, 25 bp, Homo sapien
tagcaggaataggtccggaccgaaa

SEQ ID NO: 1561400 - DNA, 25 bp, Homo sapien
cgtctgcccgggaactcccagaagt

SEQ ID NO: 1561401 - DNA, 25 bp, Homo sapien
ggcagcgcgtggagcagtgaagatc

SEQ ID NO: 1561402 - DNA, 25 bp, Homo sapien
ccaaggtcgcccagcacggtcctca

SEQ ID NO: 1561403 - DNA, 25 bp, Homo sapien
gccgggcagcgcgtggagcagtgaa

SEQ ID NO: 1561404 - DNA, 25 bp, Homo sapien
agtgaagatccaccgtgccgccccg

SEQ ID NO: 1561405 - DNA, 25 bp, Homo sapien
tgtacagatggtccagtcctcggcg

SEQ ID NO: 1561406 - DNA, 25 bp, Homo sapien
cggcatcgtggaaagaggattctcc

SEQ ID NO: 1561407 - DNA, 25 bp, Homo sapien
ggattctcccatgcaaaccccggag

SEQ ID NO: 1561408 - DNA, 25 bp, Homo sapien
tttacccgtgatcactgagtgacgc

SEQ ID NO: 1561409 - DNA, 25 bp, Homo sapien
cacaagagtgatgaagaggacttcc

SEQ ID NO: 1561410 - DNA, 25 bp, Homo sapien
tgtccactgaacgttggcaccaggg

SEQ ID NO: 1561411 - DNA, 25 bp, Homo sapien
aactggccatggtcaaagagggtcc

SEQ ID NO: 1561412 - DNA, 25 bp, Homo sapien
gagatcacagtccagttcggccact

SEQ ID NO: 1561413 - DNA, 25 bp, Homo sapien
ccgccggctctgcttccagacccgc

SEQ ID NO: 1561414 - DNA, 25 bp, Homo sapien
tccgccggctctgcttccagacccg

SEQ ID NO: 1561415 - DNA, 25 bp, Homo sapien
cgccggctctgcttccagacccgcc

SEQ ID NO: 1561416 - DNA, 25 bp, Homo sapien
ctccgccggctctgcttccagaccc

SEQ ID NO: 1561417 - DNA, 25 bp, Homo sapien
ctgtggagtcaactatgaacgtcgt

SEQ ID NO: 1561418 - DNA, 25 bp, Homo sapien
tctgtggagtcaactatgaacgtcg

SEQ ID NO: 1561419 - DNA, 25 bp, Homo sapien
tgtggagtcaactatgaacgtcgtg

SEQ ID NO: 1561420 - DNA, 25 bp, Homo sapien
ggcccgcccgcggtaataattgcca

SEQ ID NO: 1561421 - DNA, 25 bp, Homo sapien
tttgatgcccagatgagaaacggga

SEQ ID NO: 1561422 - DNA, 25 bp, Homo sapien
tctacactgaccctgagcgggagaa

SEQ ID NO: 1561423 - DNA, 25 bp, Homo sapien
gacacgaagagacagaagcacatag

SEQ ID NO: 1561424 - DNA, 25 bp, Homo sapien
tgtcagcgtgttcatgctcctgtag

SEQ ID NO: 1561425 - DNA, 25 bp, Homo sapien
gggggctgtcgacactgagtccaca

SEQ ID NO: 1561426 - DNA, 25 bp, Homo sapien
tcctgtagagggggctgtcgacact

SEQ ID NO: 1561427 - DNA, 25 bp, Homo sapien
agactggagccgaggacggtcccct

SEQ ID NO: 1561428 - DNA, 25 bp, Homo sapien
tgccccgaaggcatcctccatggcc

SEQ ID NO: 1561429 - DNA, 25 bp, Homo sapien
gtcaccacggctgccccgaaggcat

SEQ ID NO: 1561430 - DNA, 25 bp, Homo sapien
gtgtgcatcgctgtcccacacggtc

SEQ ID NO: 1561431 - DNA, 25 bp, Homo sapien
gctctccgtaggcatcggtgggctt

SEQ ID NO: 1561432 - DNA, 25 bp, Homo sapien
gctggatccgttcggtcagagagcc

SEQ ID NO: 1561433 - DNA, 25 bp, Homo sapien
gacaccaccaggttcggggcacgga

SEQ ID NO: 1561434 - DNA, 25 bp, Homo sapien
gcacggaagccccatgtgcgtgtga

SEQ ID NO: 1561435 - DNA, 25 bp, Homo sapien
gtgaccagactataaactgcagctg

SEQ ID NO: 1561436 - DNA, 25 bp, Homo sapien
aacatgccggccgatgcccgtgtgc

SEQ ID NO: 1561437 - DNA, 25 bp, Homo sapien
atgccggccgatgcccgtgtgcaga

SEQ ID NO: 1561438 - DNA, 25 bp, Homo sapien
tgatggtcccgtacagccacaccaa

SEQ ID NO: 1561439 - DNA, 25 bp, Homo sapien
agccacaccaacatgccggccgatg

SEQ ID NO: 1561440 - DNA, 25 bp, Homo sapien
gagggtgtctctattccggaccaca

SEQ ID NO: 1561441 - DNA, 25 bp, Homo sapien
gatgagggtgtctctattccggacc

SEQ ID NO: 1561442 - DNA, 25 bp, Homo sapien
gttgatgagggtgtctctattccgg

SEQ ID NO: 1561443 - DNA, 25 bp, Homo sapien
gggttgatgagggtgtctctattcc

SEQ ID NO: 1561444 - DNA, 25 bp, Homo sapien
aaggccgagtagttgtagtccaggg

SEQ ID NO: 1561445 - DNA, 25 bp, Homo sapien
aagaaggccgagtagttgtagtcca

SEQ ID NO: 1561446 - DNA, 25 bp, Homo sapien
cgtcctccgggtcaccgcgccaccg

SEQ ID NO: 1561447 - DNA, 25 bp, Homo sapien
gccgagtagttgtagtccaggggaa

SEQ ID NO: 1561448 - DNA, 25 bp, Homo sapien
tccaggcgcaagcggaagcggttct

SEQ ID NO: 1561449 - DNA, 25 bp, Homo sapien
ggcagccgtgtgtgccgtcgtccac

SEQ ID NO: 1561450 - DNA, 25 bp, Homo sapien
caggcagccgtgtgtgccgtcgtcc

SEQ ID NO: 1561451 - DNA, 25 bp, Homo sapien
gcgcaagcggaagcggttctcgccc

SEQ ID NO: 1561452 - DNA, 25 bp, Homo sapien
tcccacgcccgtcttctgctgtgag

SEQ ID NO: 1561453 - DNA, 25 bp, Homo sapien
cccacgcccgtcttctgctgtgaga

SEQ ID NO: 1561454 - DNA, 25 bp, Homo sapien
aggacagggatgtcaattccagtcc

SEQ ID NO: 1561455 - DNA, 25 bp, Homo sapien
gcaggacagggatgtcaattccagt

SEQ ID NO: 1561456 - DNA, 25 bp, Homo sapien
agcaggacagggatgtcaattccag

SEQ ID NO: 1561457 - DNA, 25 bp, Homo sapien
caggacagggatgtcaattccagtc

SEQ ID NO: 1561458 - DNA, 25 bp, Homo sapien
ctgagccagccacgaggagacatgg

SEQ ID NO: 1561459 - DNA, 25 bp, Homo sapien
cctgattcgatctcgggcttcgcct

SEQ ID NO: 1561460 - DNA, 25 bp, Homo sapien
agaaacgcctgattcgatctcgggc

SEQ ID NO: 1561461 - DNA, 25 bp, Homo sapien
gatctcgggcttcgccttgcctggc

SEQ ID NO: 1561462 - DNA, 25 bp, Homo sapien
agaatagactgtcaggagctccttc

SEQ ID NO: 1561463 - DNA, 25 bp, Homo sapien
cccatcctcagaagaatagactgtc

SEQ ID NO: 1561464 - DNA, 25 bp, Homo sapien
ccttcaaaactatggtctcgaattc

SEQ ID NO: 1561465 - DNA, 25 bp, Homo sapien
agctccttccgggtcataatcctct

SEQ ID NO: 1561466 - DNA, 25 bp, Homo sapien
tcctgaagggcatttgtcgtgacat

SEQ ID NO: 1561467 - DNA, 25 bp, Homo sapien
tgatgacaaacgtgagtcactctga

SEQ ID NO: 1561468 - DNA, 25 bp, Homo sapien
gtaccacagaaagagataatctcat

SEQ ID NO: 1561469 - DNA, 25 bp, Homo sapien
tatgtagtggatccaaacatgtgca

SEQ ID NO: 1561470 - DNA, 25 bp, Homo sapien
gatacagttcctaccctgaagaagc

SEQ ID NO: 1561471 - DNA, 25 bp, Homo sapien
tgaggtatgttatggaccaagcagt

SEQ ID NO: 1561472 - DNA, 25 bp, Homo sapien
taactaccctcagggtgcttggtgc

SEQ ID NO: 1561473 - DNA, 25 bp, Homo sapien
ggcagacggacaatcagagatggat

SEQ ID NO: 1561474 - DNA, 25 bp, Homo sapien
caaacgcagctcatccaggtaggct

SEQ ID NO: 1561475 - DNA, 25 bp, Homo sapien
gatgtccccccgaaagagttcactc

SEQ ID NO: 1561476 - DNA, 25 bp, Homo sapien
gcggttccaagccacagccaaacgc

SEQ ID NO: 1561477 - DNA, 25 bp, Homo sapien
agagttcactctgggcaatgtccac

SEQ ID NO: 1561478 - DNA, 25 bp, Homo sapien
ggtgggatgaataggggaagagatt

SEQ ID NO: 1561479 - DNA, 25 bp, Homo sapien
gcctggtccaaaaggttgcggatga

SEQ ID NO: 1561480 - DNA, 25 bp, Homo sapien
tgggaaatgagcaagcgcacgaact

SEQ ID NO: 1561481 - DNA, 25 bp, Homo sapien
attcagcagggcgtccatgagggaa

SEQ ID NO: 1561482 - DNA, 25 bp, Homo sapien
cgcacgaactcaggccggtcattca

SEQ ID NO: 1561483 - DNA, 25 bp, Homo sapien
ggcctgggtgagggtcccaggcgcc

SEQ ID NO: 1561484 - DNA, 25 bp, Homo sapien
gctctccccgaagccctggcctggg

SEQ ID NO: 1561485 - DNA, 25 bp, Homo sapien
tccccgaagccctggcctgggtgag

SEQ ID NO: 1561486 - DNA, 25 bp, Homo sapien
gcctgggtgagggtcccaggcgccc

SEQ ID NO: 1561487 - DNA, 25 bp, Homo sapien
aggccagcatccagcgagagcggcg

SEQ ID NO: 1561488 - DNA, 25 bp, Homo sapien
cccaaagaagcaggtcgctccaggg

SEQ ID NO: 1561489 - DNA, 25 bp, Homo sapien
tggccttgtccgagagcagatacat

SEQ ID NO: 1561490 - DNA, 25 bp, Homo sapien
gcaacagtgcccaaagaagcaggtc

SEQ ID NO: 1561491 - DNA, 25 bp, Homo sapien
ggagcagcaaacaggccccaagagc

SEQ ID NO: 1561492 - DNA, 25 bp, Homo sapien
ggcgtgccatcacccggagcagcaa

SEQ ID NO: 1561493 - DNA, 25 bp, Homo sapien
cgtgctgcctcctcagcgtcaggct

SEQ ID NO: 1561494 - DNA, 25 bp, Homo sapien
ctcaaacttgaacgccaggtctttc

SEQ ID NO: 1561495 - DNA, 25 bp, Homo sapien
gatggcgcagggatatgtgaggagt

SEQ ID NO: 1561496 - DNA, 25 bp, Homo sapien
gggatggcgcagggatatgtgagga

SEQ ID NO: 1561497 - DNA, 25 bp, Homo sapien
gtgaggagtgcggagttgcacatcc

SEQ ID NO: 1561498 - DNA, 25 bp, Homo sapien
ggagttgcacatccccctctggcgg

SEQ ID NO: 1561499 - DNA, 25 bp, Homo sapien
aggcaagtggcatccccccagagcg

SEQ ID NO: 1561500 - DNA, 25 bp, Homo sapien
gcttgcatggccagctggaggcaag

SEQ ID NO: 1561501 - DNA, 25 bp, Homo sapien
aaggcacgggcgtcagcttgcatgg

SEQ ID NO: 1561502 - DNA, 25 bp, Homo sapien
agccctcacctcactgctgcgatag

SEQ ID NO: 1561503 - DNA, 25 bp, Homo sapien
gaaggattaggatccaaatctcccc

SEQ ID NO: 1561504 - DNA, 25 bp, Homo sapien
aggattaggatccaaatctccccca

SEQ ID NO: 1561505 - DNA, 25 bp, Homo sapien
tgggaaggattaggatccaaatctc

SEQ ID NO: 1561506 - DNA, 25 bp, Homo sapien
gattaggatccaaatctcccccaca

SEQ ID NO: 1561507 - DNA, 25 bp, Homo sapien
ctccccaccacttctgtgtcagcag

SEQ ID NO: 1561508 - DNA, 25 bp, Homo sapien
gcaaaagaaggcgagaaccagggcc

SEQ ID NO: 1561509 - DNA, 25 bp, Homo sapien
cccagatgggtgtagtgctggccat

SEQ ID NO: 1561510 - DNA, 25 bp, Homo sapien
gtgatgaggcgggtgtagatgagtg

SEQ ID NO: 1561511 - DNA, 25 bp, Homo sapien
ccgtgtgggctcctcttctgatttc

SEQ ID NO: 1561512 - DNA, 25 bp, Homo sapien
tcccgtgtgggctcctcttctgatt

SEQ ID NO: 1561513 - DNA, 25 bp, Homo sapien
tatccatgtcaaactctagctcctc

SEQ ID NO: 1561514 - DNA, 25 bp, Homo sapien
tccccattaatgacactatccatgt

SEQ ID NO: 1561515 - DNA, 25 bp, Homo sapien
ctctccctcgccctaccctctgtcc

SEQ ID NO: 1561516 - DNA, 25 bp, Homo sapien
ttcatttgcttaggcctgactttta

SEQ ID NO: 1561517 - DNA, 25 bp, Homo sapien
gctacagataaatattttgtatcct

SEQ ID NO: 1561518 - DNA, 25 bp, Homo sapien
tattttgtatcctctctacattgtc

SEQ ID NO: 1561519 - DNA, 25 bp, Homo sapien
ccacgttgcccatgaagatggtcac

SEQ ID NO: 1561520 - DNA, 25 bp, Homo sapien
gcagcaacccggacggcccgactgg

SEQ ID NO: 1561521 - DNA, 25 bp, Homo sapien
ggaaccagcggcgtaggcaccggcg

SEQ ID NO: 1561522 - DNA, 25 bp, Homo sapien
cagcggcgtcttctcggctgggtcc

SEQ ID NO: 1561523 - DNA, 25 bp, Homo sapien
cagttcctcgcacagcagcgtgaaa

SEQ ID NO: 1561524 - DNA, 25 bp, Homo sapien
gagccactaggtcgcactggttcca

SEQ ID NO: 1561525 - DNA, 25 bp, Homo sapien
gcgccggctggaaatccacgagcag

SEQ ID NO: 1561526 - DNA, 25 bp, Homo sapien
actggttccagctgtcggcgaggta

SEQ ID NO: 1561527 - DNA, 25 bp, Homo sapien
gaagcagccgcaccgtgaaaaccat

SEQ ID NO: 1561528 - DNA, 25 bp, Homo sapien
tgaaaaccatgaagtcgatgcagag

SEQ ID NO: 1561529 - DNA, 25 bp, Homo sapien
gctcacgatgacgatcttgggcccc

SEQ ID NO: 1561530 - DNA, 25 bp, Homo sapien
gcaccgtgaaaaccatgaagtcgat

SEQ ID NO: 1561531 - DNA, 25 bp, Homo sapien
ggaagtcactgtcccgtggcctcag

SEQ ID NO: 1561532 - DNA, 25 bp, Homo sapien
tgcaggtagggacggtagaagacgc

SEQ ID NO: 1561533 - DNA, 25 bp, Homo sapien
ctcctggggaatctgcccgaagatc

SEQ ID NO: 1561534 - DNA, 25 bp, Homo sapien
cgcggcgcaggatacttgggaagtc

SEQ ID NO: 1561535 - DNA, 25 bp, Homo sapien
caatgagcaagttgaccagcaggat

SEQ ID NO: 1561536 - DNA, 25 bp, Homo sapien
ggctccgacgagcagttgctgtgct

SEQ ID NO: 1561537 - DNA, 25 bp, Homo sapien
tgttggccacgagcaggaagatgac

SEQ ID NO: 1561538 - DNA, 25 bp, Homo sapien
gccagttggcatactgggagacgca

SEQ ID NO: 1561539 - DNA, 25 bp, Homo sapien
taacgctgcgccttccagtagagat

SEQ ID NO: 1561540 - DNA, 25 bp, Homo sapien
cagtagagatcgctgttgccctgta

SEQ ID NO: 1561541 - DNA, 25 bp, Homo sapien
cgagagtggaattcccggatgaggc

SEQ ID NO: 1561542 - DNA, 25 bp, Homo sapien
ggtcgcctgcacaattgcctgagca

SEQ ID NO: 1561543 - DNA, 25 bp, Homo sapien
ccgacaccctcagaacacgcacgct

SEQ ID NO: 1561544 - DNA, 25 bp, Homo sapien
ttccgacaccctcagaacacgcacg

SEQ ID NO: 1561545 - DNA, 25 bp, Homo sapien
ccagctgccccttccgacaccctca

SEQ ID NO: 1561546 - DNA, 25 bp, Homo sapien
cgacaccctcagaacacgcacgcta

SEQ ID NO: 1561547 - DNA, 25 bp, Homo sapien
gcttcagacgctcggagtcgctctc

SEQ ID NO: 1561548 - DNA, 25 bp, Homo sapien
gcagcttccgctcggcttccttaga

SEQ ID NO: 1561549 - DNA, 25 bp, Homo sapien
tccttatgcaccgattcccacgtta

SEQ ID NO: 1561550 - DNA, 25 bp, Homo sapien
tagcgcgtgccagcagaaagttctc

SEQ ID NO: 1561551 - DNA, 25 bp, Homo sapien
cactttcaggcgctgttcgtactcg

SEQ ID NO: 1561552 - DNA, 25 bp, Homo sapien
cgctccagcactttcaggcgctgtt

SEQ ID NO: 1561553 - DNA, 25 bp, Homo sapien
gctgttcgtactcgcggatgtgtcc

SEQ ID NO: 1561554 - DNA, 25 bp, Homo sapien
tcaggcgctgttcgtactcgcggat

SEQ ID NO: 1561555 - DNA, 25 bp, Homo sapien
cacccaccccaggacgcggctacac

SEQ ID NO: 1561556 - DNA, 25 bp, Homo sapien
cccaccccaggacgcggctacactg

SEQ ID NO: 1561557 - DNA, 25 bp, Homo sapien
gcagagcggctcagggcctcggcca

SEQ ID NO: 1561558 - DNA, 25 bp, Homo sapien
ccccaggacgcggctacactgctgg

SEQ ID NO: 1561559 - DNA, 25 bp, Homo sapien
cccaggcaggtcagggggtggcggc

SEQ ID NO: 1561560 - DNA, 25 bp, Homo sapien
aggcaggtcagggggtggcggccca

SEQ ID NO: 1561561 - DNA, 25 bp, Homo sapien
gacccaggcaggtcagggggtggcg

SEQ ID NO: 1561562 - DNA, 25 bp, Homo sapien
ctttggacccaggcaggtcaggggg

SEQ ID NO: 1561563 - DNA, 25 bp, Homo sapien
gcacaggctgatgctacacactgac

SEQ ID NO: 1561564 - DNA, 25 bp, Homo sapien
cactggaaaggtgccgagagagaaa

SEQ ID NO: 1561565 - DNA, 25 bp, Homo sapien
cgaaggcgagagtacaaaaggctca

SEQ ID NO: 1561566 - DNA, 25 bp, Homo sapien
agaccaagagagtgacccagggaca

SEQ ID NO: 1561567 - DNA, 25 bp, Homo sapien
tctgtggtccctgttaccccaagga

SEQ ID NO: 1561568 - DNA, 25 bp, Homo sapien
tgtggtttgtaaggatgacactccc

SEQ ID NO: 1561569 - DNA, 25 bp, Homo sapien
ctccagatggataacggcccgggat

SEQ ID NO: 1561570 - DNA, 25 bp, Homo sapien
ggccgaggcccagatgagccttact

SEQ ID NO: 1561571 - DNA, 25 bp, Homo sapien
tcccccaggaatcaagcctccggac

SEQ ID NO: 1561572 - DNA, 25 bp, Homo sapien
ccaggaatcaagcctccggacacga

SEQ ID NO: 1561573 - DNA, 25 bp, Homo sapien
gctcccccaggaatcaagcctccgg

SEQ ID NO: 1561574 - DNA, 25 bp, Homo sapien
ccccaggaatcaagcctccggacac

SEQ ID NO: 1561575 - DNA, 25 bp, Homo sapien
ctgggtctccggcaagaacaatggg

SEQ ID NO: 1561576 - DNA, 25 bp, Homo sapien
tcttgtcctactgaagcgagagccg

SEQ ID NO: 1561577 - DNA, 25 bp, Homo sapien
tatttgcctcaaccctgtgtgcgcc

SEQ ID NO: 1561578 - DNA, 25 bp, Homo sapien
cttccagagaagttgcagttgccac

SEQ ID NO: 1561579 - DNA, 25 bp, Homo sapien
gagacaataatagaacctaccttgt

SEQ ID NO: 1561580 - DNA, 25 bp, Homo sapien
atggagacaataatagaacctacct

SEQ ID NO: 1561581 - DNA, 25 bp, Homo sapien
ttatttgagctacttttctgtgtct

SEQ ID NO: 1561582 - DNA, 25 bp, Homo sapien
actttatttgagctacttttctgtg

SEQ ID NO: 1561583 - DNA, 25 bp, Homo sapien
gcgcagaaatagtaactgcaccgta

SEQ ID NO: 1561584 - DNA, 25 bp, Homo sapien
atagtaactgcaggctacacctgtc

SEQ ID NO: 1561585 - DNA, 25 bp, Homo sapien
gagaatacagctatcagaacctaaa

SEQ ID NO: 1561586 - DNA, 25 bp, Homo sapien
aatgatgctggttatggcatccggc

SEQ ID NO: 1561587 - DNA, 25 bp, Homo sapien
aataaataaagtgtgtggatcagga

SEQ ID NO: 1561588 - DNA, 25 bp, Homo sapien
tcttgaggaagatgatccaacaatc

SEQ ID NO: 1561589 - DNA, 25 bp, Homo sapien
aatcaataataccagacacccgcag

SEQ ID NO: 1561590 - DNA, 25 bp, Homo sapien
tagtgaggaagttacaaagtcccat

SEQ ID NO: 1561591 - DNA, 25 bp, Homo sapien
cattcccaacaatggtcagcgggca

SEQ ID NO: 1561592 - DNA, 25 bp, Homo sapien
aactcctgatctagcaccatgtcgg

SEQ ID NO: 1561593 - DNA, 25 bp, Homo sapien
tcaggactcaactgccatctggagg

SEQ ID NO: 1561594 - DNA, 25 bp, Homo sapien
tccagcggaaagaaagatgcatcat

SEQ ID NO: 1561595 - DNA, 25 bp, Homo sapien
tatggagttcatactctgtgtcaag

SEQ ID NO: 1561596 - DNA, 25 bp, Homo sapien
ggagttcatactctgtgtcaagaac

SEQ ID NO: 1561597 - DNA, 25 bp, Homo sapien
tggagttcatactctgtgtcaagaa

SEQ ID NO: 1561598 - DNA, 25 bp, Homo sapien
tttatggagttcatactctgtgtca

SEQ ID NO: 1561599 - DNA, 25 bp, Homo sapien
atcaatgccagcttcctggttcccg

SEQ ID NO: 1561600 - DNA, 25 bp, Homo sapien
aaaaaaaatcaatgccagcttcctg

SEQ ID NO: 1561601 - DNA, 25 bp, Homo sapien
aaaaaatcaatgccagcttcctggt

SEQ ID NO: 1561602 - DNA, 25 bp, Homo sapien
caatgccagcttcctggttcccgac

SEQ ID NO: 1561603 - DNA, 25 bp, Homo sapien
ccatactgctcagtgacttcctggg

SEQ ID NO: 1561604 - DNA, 25 bp, Homo sapien
ggcaaagaccccttcatccccacaa

SEQ ID NO: 1561605 - DNA, 25 bp, Homo sapien
cgtcaaacggggttaaggcagctcg

SEQ ID NO: 1561606 - DNA, 25 bp, Homo sapien
ggcatcttctagaagccatactgct

SEQ ID NO: 1561607 - DNA, 25 bp, Homo sapien
tcacagtagtcccaggaattctgct

SEQ ID NO: 1561608 - DNA, 25 bp, Homo sapien
gaatccccaacacataagtcaactg

SEQ ID NO: 1561609 - DNA, 25 bp, Homo sapien
catgggctgccaataggtagtgtag

SEQ ID NO: 1561610 - DNA, 25 bp, Homo sapien
gatccaacagttatcctcacagtag

SEQ ID NO: 1561611 - DNA, 25 bp, Homo sapien
gctggagtgcaacagtgtgctctcg

SEQ ID NO: 1561612 - DNA, 25 bp, Homo sapien
tggagtgcaacagtgtgctctcggc

SEQ ID NO: 1561613 - DNA, 25 bp, Homo sapien
aggctggagtgcaacagtgtgctct

SEQ ID NO: 1561614 - DNA, 25 bp, Homo sapien
agtgcaacagtgtgctctcggctca

SEQ ID NO: 1561615 - DNA, 25 bp, Homo sapien
tgtgggcaacctttcagatcagacc

SEQ ID NO: 1561616 - DNA, 25 bp, Homo sapien
aaggagctgagtggcaccaattcca

SEQ ID NO: 1561617 - DNA, 25 bp, Homo sapien
gacaagctaagtcggccaggtctct

SEQ ID NO: 1561618 - DNA, 25 bp, Homo sapien
cattgacagcgtgaagaaatgcctc

SEQ ID NO: 1561619 - DNA, 25 bp, Homo sapien
gagtaggcagaaccgcactccaggg

SEQ ID NO: 1561620 - DNA, 25 bp, Homo sapien
gcctcgagtaggcagaaccgcactc

SEQ ID NO: 1561621 - DNA, 25 bp, Homo sapien
gcggcctcgagtaggcagaaccgca

SEQ ID NO: 1561622 - DNA, 25 bp, Homo sapien
cagcggcctcgagtaggcagaaccg

SEQ ID NO: 1561623 - DNA, 25 bp, Homo sapien
ctttgacagtatgattctttgagtt

SEQ ID NO: 1561624 - DNA, 25 bp, Homo sapien
ttgacagtatgattctttgagtttc

SEQ ID NO: 1561625 - DNA, 25 bp, Homo sapien
tttcttgagatgtgttgtcattttc

SEQ ID NO: 1561626 - DNA, 25 bp, Homo sapien
tgagtttcttgagatgtgttgtcat

SEQ ID NO: 1561627 - DNA, 25 bp, Homo sapien
gaaaccgagtggattcattggaata

SEQ ID NO: 1561628 - DNA, 25 bp, Homo sapien
agaataagccgttgaatgaccgccc

SEQ ID NO: 1561629 - DNA, 25 bp, Homo sapien
aaaagaataagccgttgaatgaccg

SEQ ID NO: 1561630 - DNA, 25 bp, Homo sapien
gagaaaccgagtggattcattggaa

SEQ ID NO: 1561631 - DNA, 25 bp, Homo sapien
gaacacctgcattggccgatcttac

SEQ ID NO: 1561632 - DNA, 25 bp, Homo sapien
cctgcattggccgatcttacttatc

SEQ ID NO: 1561633 - DNA, 25 bp, Homo sapien
gatcttacttatcaccaccacaagc

SEQ ID NO: 1561634 - DNA, 25 bp, Homo sapien
ttggccgatcttacttatcaccacc

SEQ ID NO: 1561635 - DNA, 25 bp, Homo sapien
taatgcattgccctcccatcaggga

SEQ ID NO: 1561636 - DNA, 25 bp, Homo sapien
gatgcctgggaatatacatgtgtgc

SEQ ID NO: 1561637 - DNA, 25 bp, Homo sapien
ctggttttcaaagtggcgtaatgca

SEQ ID NO: 1561638 - DNA, 25 bp, Homo sapien
gagtagggtgtgctccccttcaatt

SEQ ID NO: 1561639 - DNA, 25 bp, Homo sapien
gatttcgctgatgagagcttcttca

SEQ ID NO: 1561640 - DNA, 25 bp, Homo sapien
gattagtttatgataagcagtgacc

SEQ ID NO: 1561641 - DNA, 25 bp, Homo sapien
gaccttctaattcatcgttccttgt

SEQ ID NO: 1561642 - DNA, 25 bp, Homo sapien
gttttagtctgttggttctcatctg

SEQ ID NO: 1561643 - DNA, 25 bp, Homo sapien
cttgagtgtcctcaccgtatggtga

SEQ ID NO: 1561644 - DNA, 25 bp, Homo sapien
ctgggagcagcttagttggatgatt

SEQ ID NO: 1561645 - DNA, 25 bp, Homo sapien
atttaactacggctggaggatccac

SEQ ID NO: 1561646 - DNA, 25 bp, Homo sapien
tggatgatttctgctcacagtgttt

SEQ ID NO: 1561647 - DNA, 25 bp, Homo sapien
gaatttgtgggcaccaaggactcat

SEQ ID NO: 1561648 - DNA, 25 bp, Homo sapien
tctccatgtctcaggcgctggggga

SEQ ID NO: 1561649 - DNA, 25 bp, Homo sapien
ggacccctgatctactggaacccac

SEQ ID NO: 1561650 - DNA, 25 bp, Homo sapien
gggatctaaagggacccctgatcta

SEQ ID NO: 1561651 - DNA, 25 bp, Homo sapien
agagaaagagagacggagagctgag

SEQ ID NO: 1561652 - DNA, 25 bp, Homo sapien
gggagacagggagaaagaaagaggc

SEQ ID NO: 1561653 - DNA, 25 bp, Homo sapien
gagagaaagagagacggagagctga

SEQ ID NO: 1561654 - DNA, 25 bp, Homo sapien
gaaagaaagaggctgagagagaaag

SEQ ID NO: 1561655 - DNA, 25 bp, Homo sapien
ggtaagcggtccactcaccacacag

SEQ ID NO: 1561656 - DNA, 25 bp, Homo sapien
gtggggtaagcggtccactcaccac

SEQ ID NO: 1561657 - DNA, 25 bp, Homo sapien
gggtaagcggtccactcaccacaca

SEQ ID NO: 1561658 - DNA, 25 bp, Homo sapien
ctagtggggtaagcggtccactcac

SEQ ID NO: 1561659 - DNA, 25 bp, Homo sapien
ttgatgaggctgaggcagctctcct

SEQ ID NO: 1561660 - DNA, 25 bp, Homo sapien
tgaggcagctctcctgggctgacat

SEQ ID NO: 1561661 - DNA, 25 bp, Homo sapien
aggctgaggcagctctcctgggctg

SEQ ID NO: 1561662 - DNA, 25 bp, Homo sapien
gctgaggcagctctcctgggctgac

SEQ ID NO: 1561663 - DNA, 25 bp, Homo sapien
agaagaagaggttgaaaacgaagag

SEQ ID NO: 1561664 - DNA, 25 bp, Homo sapien
aaaggacacgaagctggtcttgtca

SEQ ID NO: 1561665 - DNA, 25 bp, Homo sapien
atgaggatccagatgccgaagcaga

SEQ ID NO: 1561666 - DNA, 25 bp, Homo sapien
tcaatgaggatccagatgccgaagc

SEQ ID NO: 1561667 - DNA, 25 bp, Homo sapien
ggacacgaagctggtcttgtcaatg

SEQ ID NO: 1561668 - DNA, 25 bp, Homo sapien
caagtcccgacagataggaagtgct

SEQ ID NO: 1561669 - DNA, 25 bp, Homo sapien
catgaggacatgtgttcaacccagt

SEQ ID NO: 1561670 - DNA, 25 bp, Homo sapien
ttgtatgcacaaccccatttgccgg

SEQ ID NO: 1561671 - DNA, 25 bp, Homo sapien
catttgccggaagaagactcaggct

SEQ ID NO: 1561672 - DNA, 25 bp, Homo sapien
agtttcagccctatcacttgttctg

SEQ ID NO: 1561673 - DNA, 25 bp, Homo sapien
agtagtttcagccctatcacttgtt

SEQ ID NO: 1561674 - DNA, 25 bp, Homo sapien
tgtgacattggcttggctccttaaa

SEQ ID NO: 1561675 - DNA, 25 bp, Homo sapien
ccagtagtttcagccctatcacttg

SEQ ID NO: 1561676 - DNA, 25 bp, Homo sapien
gtttcccgtccctggatctctgtct

SEQ ID NO: 1561677 - DNA, 25 bp, Homo sapien
aggtgaggggagtgatgatgagctg

SEQ ID NO: 1561678 - DNA, 25 bp, Homo sapien
cctgtttcccgtccctggatctctg

SEQ ID NO: 1561679 - DNA, 25 bp, Homo sapien
ctgggcctgtttcccgtccctggat

SEQ ID NO: 1561680 - DNA, 25 bp, Homo sapien
atctgcagaggcacgaaggccaagc

SEQ ID NO: 1561681 - DNA, 25 bp, Homo sapien
accagatctgcagaggcacgaaggc

SEQ ID NO: 1561682 - DNA, 25 bp, Homo sapien
ccaggactttggaccagatctgcag

SEQ ID NO: 1561683 - DNA, 25 bp, Homo sapien
tttggaccagatctgcagaggcacg

SEQ ID NO: 1561684 - DNA, 25 bp, Homo sapien
acaggagcagcagcatcccaaaata

SEQ ID NO: 1561685 - DNA, 25 bp, Homo sapien
aaacaggagcagcagcatcccaaaa

SEQ ID NO: 1561686 - DNA, 25 bp, Homo sapien
gcaaacaggagcagcagcatcccaa

SEQ ID NO: 1561687 - DNA, 25 bp, Homo sapien
ctgtgtggcaaacaggagcagcagc

SEQ ID NO: 1561688 - DNA, 25 bp, Homo sapien
ggcccgctgagtggagatgaggatt

SEQ ID NO: 1561689 - DNA, 25 bp, Homo sapien
tgggcccgctgagtggagatgagga

SEQ ID NO: 1561690 - DNA, 25 bp, Homo sapien
ctgggcccgctgagtggagatgagg

SEQ ID NO: 1561691 - DNA, 25 bp, Homo sapien
gggcccgctgagtggagatgaggat

SEQ ID NO: 1561692 - DNA, 25 bp, Homo sapien
tatttctacggctcataagtctctg

SEQ ID NO: 1561693 - DNA, 25 bp, Homo sapien
tgaggctgggccttatcttccccgc

SEQ ID NO: 1561694 - DNA, 25 bp, Homo sapien
tcccttggtccaggtcggtgtgtct

SEQ ID NO: 1561695 - DNA, 25 bp, Homo sapien
gaatggctagctctgtgtacttcag

SEQ ID NO: 1561696 - DNA, 25 bp, Homo sapien
gccgcggtctcctcggggttggtgc

SEQ ID NO: 1561697 - DNA, 25 bp, Homo sapien
tggttttctctacgacgtcccgcaa

SEQ ID NO: 1561698 - DNA, 25 bp, Homo sapien
gatggttttctctacgacgtcccgc

SEQ ID NO: 1561699 - DNA, 25 bp, Homo sapien
tttctctacgacgtcccgcaagctt

SEQ ID NO: 1561700 - DNA, 25 bp, Homo sapien
tcgccgacaagttgtagcaggagca

SEQ ID NO: 1561701 - DNA, 25 bp, Homo sapien
gacccgttacctctcaggatgagga

SEQ ID NO: 1561702 - DNA, 25 bp, Homo sapien
gatcaccttatctaggattgtggag

SEQ ID NO: 1561703 - DNA, 25 bp, Homo sapien
gacttggaaccagtcctgcgggtag

SEQ ID NO: 1561704 - DNA, 25 bp, Homo sapien
caaatgcccactatggaaataaggt

SEQ ID NO: 1561705 - DNA, 25 bp, Homo sapien
ggttgttgtgcagccacttctggag

SEQ ID NO: 1561706 - DNA, 25 bp, Homo sapien
gcccactatggaaataaggttgttg

SEQ ID NO: 1561707 - DNA, 25 bp, Homo sapien
cgagtaggccgacgcccaggcaaat

SEQ ID NO: 1561708 - DNA, 25 bp, Homo sapien
tcgtccttcccaggcaaccgaagga

SEQ ID NO: 1561709 - DNA, 25 bp, Homo sapien
aggaggctttccctgcgtacaccca

SEQ ID NO: 1561710 - DNA, 25 bp, Homo sapien
catctagggatttagggccgatcgc

SEQ ID NO: 1561711 - DNA, 25 bp, Homo sapien
accgaaggacgcgaaatgaagggca

SEQ ID NO: 1561712 - DNA, 25 bp, Homo sapien
gtgcggctcgcatttccggcggagt

SEQ ID NO: 1561713 - DNA, 25 bp, Homo sapien
tgcgctgtagctgtacgctcagcac

SEQ ID NO: 1561714 - DNA, 25 bp, Homo sapien
catttccggcggagtgccctgcgct

SEQ ID NO: 1561715 - DNA, 25 bp, Homo sapien
cctgcgctgtagctgtacgctcagc

SEQ ID NO: 1561716 - DNA, 25 bp, Homo sapien
ccatgggcagcttgccctgcggtgc

SEQ ID NO: 1561717 - DNA, 25 bp, Homo sapien
ccgccgccgtcagcgatcaggctgg

SEQ ID NO: 1561718 - DNA, 25 bp, Homo sapien
gcagcttgccctgcggtgccttgtc

SEQ ID NO: 1561719 - DNA, 25 bp, Homo sapien
gccgtcagcgatcaggctgggcccg

SEQ ID NO: 1561720 - DNA, 25 bp, Homo sapien
agtgtcaggctggtcctcgtcttga

SEQ ID NO: 1561721 - DNA, 25 bp, Homo sapien
ttccagtgtcaggctggtcctcgtc

SEQ ID NO: 1561722 - DNA, 25 bp, Homo sapien
tgtcaggctggtcctcgtcttgaac

SEQ ID NO: 1561723 - DNA, 25 bp, Homo sapien
cagtgtcaggctggtcctcgtcttg

SEQ ID NO: 1561724 - DNA, 25 bp, Homo sapien
ttggaggctcatctgtcttccccct

SEQ ID NO: 1561725 - DNA, 25 bp, Homo sapien
cagcctctaattgtgcctcctctaa

SEQ ID NO: 1561726 - DNA, 25 bp, Homo sapien
attgtgcctcctctaattctgcgcc

SEQ ID NO: 1561727 - DNA, 25 bp, Homo sapien
cagggtcctttattttggaggctca

SEQ ID NO: 1561728 - DNA, 25 bp, Homo sapien
gctggctgatgaggcgggaatagct

SEQ ID NO: 1561729 - DNA, 25 bp, Homo sapien
ggaatagctgctacaagtgggggta

SEQ ID NO: 1561730 - DNA, 25 bp, Homo sapien
ctcgacgggaactgccgcagggctg

SEQ ID NO: 1561731 - DNA, 25 bp, Homo sapien
gggctcgacgggaactgccgcaggg

SEQ ID NO: 1561732 - DNA, 25 bp, Homo sapien
agaagtcgaaggggtgctggcgaga

SEQ ID NO: 1561733 - DNA, 25 bp, Homo sapien
ctggcgagacgggggtgatgcccac

SEQ ID NO: 1561734 - DNA, 25 bp, Homo sapien
gtcgaaggggtgctggcgagacggg

SEQ ID NO: 1561735 - DNA, 25 bp, Homo sapien
gtgctggcgagacgggggtgatgcc

SEQ ID NO: 1561736 - DNA, 25 bp, Homo sapien
gagccggttgtagacgtggtccagg

SEQ ID NO: 1561737 - DNA, 25 bp, Homo sapien
atatcgagagcgtcatgaacccgag

SEQ ID NO: 1561738 - DNA, 25 bp, Homo sapien
caggaatatcgagagcgtcatgaac

SEQ ID NO: 1561739 - DNA, 25 bp, Homo sapien
ctaacggtatcgagcgagccggttg

SEQ ID NO: 1561740 - DNA, 25 bp, Homo sapien
acaggaagctgtggacgaaagcccc

SEQ ID NO: 1561741 - DNA, 25 bp, Homo sapien
cccaggtcccgtgggagaggtgaca

SEQ ID NO: 1561742 - DNA, 25 bp, Homo sapien
cagggaagtgcccagcgcacgtgac

SEQ ID NO: 1561743 - DNA, 25 bp, Homo sapien
aatgtgaaggcggagggctccaggc

SEQ ID NO: 1561744 - DNA, 25 bp, Homo sapien
tgggtgaaaaataatcttgtgggtg

SEQ ID NO: 1561745 - DNA, 25 bp, Homo sapien
tgaaaaataatcttgtgggtggtgg

SEQ ID NO: 1561746 - DNA, 25 bp, Homo sapien
gtgaaaaataatcttgtgggtggtg

SEQ ID NO: 1561747 - DNA, 25 bp, Homo sapien
agtgagccctgagctagacggtttc

SEQ ID NO: 1561748 - DNA, 25 bp, Homo sapien
cacaagcagtgtgttgaactttcta

SEQ ID NO: 1561749 - DNA, 25 bp, Homo sapien
gatcacaaagtgaagatgaaccctt

SEQ ID NO: 1561750 - DNA, 25 bp, Homo sapien
ttgactttatctccgctgcacaagc

SEQ ID NO: 1561751 - DNA, 25 bp, Homo sapien
atgagagcctggaacacatgaccct

SEQ ID NO: 1561752 - DNA, 25 bp, Homo sapien
cagtatgagagcctggaacacatga

SEQ ID NO: 1561753 - DNA, 25 bp, Homo sapien
agagcctggaacacatgaccctcac

SEQ ID NO: 1561754 - DNA, 25 bp, Homo sapien
ccagtatgagagcctggaacacatg

SEQ ID NO: 1561755 - DNA, 25 bp, Homo sapien
acctgtggtcctagcttctgtggag

SEQ ID NO: 1561756 - DNA, 25 bp, Homo sapien
ctgaggcaggaggatcacttaagcc

SEQ ID NO: 1561757 - DNA, 25 bp, Homo sapien
tgcagtgagccaagattgtgccact

SEQ ID NO: 1561758 - DNA, 25 bp, Homo sapien
tgggaggtggaggctgcagtgagcc

SEQ ID NO: 1561759 - DNA, 25 bp, Homo sapien
gatccgctcaccttggcctctccaa

SEQ ID NO: 1561760 - DNA, 25 bp, Homo sapien
gtgatccgctcaccttggcctctcc

SEQ ID NO: 1561761 - DNA, 25 bp, Homo sapien
atgtgatccgctcaccttggcctct

SEQ ID NO: 1561762 - DNA, 25 bp, Homo sapien
catgtgatccgctcaccttggcctc

SEQ ID NO: 1561763 - DNA, 25 bp, Homo sapien
agttttggtctggaggatctgggcc

SEQ ID NO: 1561764 - DNA, 25 bp, Homo sapien
ctggaatgttccagagtgagtacta

SEQ ID NO: 1561765 - DNA, 25 bp, Homo sapien
gttccagagtgagtactatgtgtcc

SEQ ID NO: 1561766 - DNA, 25 bp, Homo sapien
cagagtgagtactatgtgtcctggc

SEQ ID NO: 1561767 - DNA, 25 bp, Homo sapien
tccgggccgtacttcctaagtcatg

SEQ ID NO: 1561768 - DNA, 25 bp, Homo sapien
gttgcgcatccatcccttggcactg

SEQ ID NO: 1561769 - DNA, 25 bp, Homo sapien
cacgggcaggctctgaacgtggtaa

SEQ ID NO: 1561770 - DNA, 25 bp, Homo sapien
cgctcactccaaactagtgccctgt

SEQ ID NO: 1561771 - DNA, 25 bp, Homo sapien
gttctcgaccttctgtgttccctgt

SEQ ID NO: 1561772 - DNA, 25 bp, Homo sapien
cttccggtctgttctcgaccttctg

SEQ ID NO: 1561773 - DNA, 25 bp, Homo sapien
tctgttctcgaccttctgtgttccc

SEQ ID NO: 1561774 - DNA, 25 bp, Homo sapien
tccggtctgttctcgaccttctgtg

SEQ ID NO: 1561775 - DNA, 25 bp, Homo sapien
tcacgagctcctttatggacatctg

SEQ ID NO: 1561776 - DNA, 25 bp, Homo sapien
agggtccgtggtgttcacgagctcc

SEQ ID NO: 1561777 - DNA, 25 bp, Homo sapien
tatggacatctgtgttcgggtgctc

SEQ ID NO: 1561778 - DNA, 25 bp, Homo sapien
gcctggatgggatgggtcccgggag

SEQ ID NO: 1561779 - DNA, 25 bp, Homo sapien
tagaagtagggtatcgccatgctgg

SEQ ID NO: 1561780 - DNA, 25 bp, Homo sapien
tgtctgttcgtgtgctctcactgtg

SEQ ID NO: 1561781 - DNA, 25 bp, Homo sapien
ttggaagggacgaatgtccgaactg

SEQ ID NO: 1561782 - DNA, 25 bp, Homo sapien
aactgtatcagcatgtctgttcgtg

SEQ ID NO: 1561783 - DNA, 25 bp, Homo sapien
cggctccaccgtccctttgtctggc

SEQ ID NO: 1561784 - DNA, 25 bp, Homo sapien
tctttgtctgctatggtcggcggga

SEQ ID NO: 1561785 - DNA, 25 bp, Homo sapien
gggaggcgggatctgactgtattgg

SEQ ID NO: 1561786 - DNA, 25 bp, Homo sapien
gaacgccgcagcgccactgggcttg

SEQ ID NO: 1561787 - DNA, 25 bp, Homo sapien
gggcatttggtccttcttacggaga

SEQ ID NO: 1561788 - DNA, 25 bp, Homo sapien
agcctcagtgaggagtgggaactct

SEQ ID NO: 1561789 - DNA, 25 bp, Homo sapien
agaaggaccccttgtgtaatctggg

SEQ ID NO: 1561790 - DNA, 25 bp, Homo sapien
aactctggccggagttagggtgcct

SEQ ID NO: 1561791 - DNA, 25 bp, Homo sapien
cgggccctaagccatcttccctcag

SEQ ID NO: 1561792 - DNA, 25 bp, Homo sapien
ggacagccgccagccgtctccagtc

SEQ ID NO: 1561793 - DNA, 25 bp, Homo sapien
gggccctaagccatcttccctcagg

SEQ ID NO: 1561794 - DNA, 25 bp, Homo sapien
tccccgtcccgggacagccgccagc

SEQ ID NO: 1561795 - DNA, 25 bp, Homo sapien
tctagagcgttggttgcgctccgcg

SEQ ID NO: 1561796 - DNA, 25 bp, Homo sapien
cacgtcagttgacctcagtcctgga

SEQ ID NO: 1561797 - DNA, 25 bp, Homo sapien
cagagccgtgagttcattccctggc

SEQ ID NO: 1561798 - DNA, 25 bp, Homo sapien
caaacagttatggtctcgagcccag

SEQ ID NO: 1561799 - DNA, 25 bp, Homo sapien
gcctttatgctagaccacagcccgg

SEQ ID NO: 1561800 - DNA, 25 bp, Homo sapien
ttatgctagaccacagcccgggtca

SEQ ID NO: 1561801 - DNA, 25 bp, Homo sapien
ctgggctccgcctttatgctagacc

SEQ ID NO: 1561802 - DNA, 25 bp, Homo sapien
gctccgcctttatgctagaccacag

SEQ ID NO: 1561803 - DNA, 25 bp, Homo sapien
ggagctctcttgggcgtcagcatca

SEQ ID NO: 1561804 - DNA, 25 bp, Homo sapien
aggaccagcagatgccgccttgcgg

SEQ ID NO: 1561805 - DNA, 25 bp, Homo sapien
gcaggaccagcagatgccgccttgc

SEQ ID NO: 1561806 - DNA, 25 bp, Homo sapien
catcatggataggagctgcagcgga

SEQ ID NO: 1561807 - DNA, 25 bp, Homo sapien
aggaaaagtcggctgaagccttgga

SEQ ID NO: 1561808 - DNA, 25 bp, Homo sapien
aaagtcggctgaagccttggagtag

SEQ ID NO: 1561809 - DNA, 25 bp, Homo sapien
tttcaggaaaagtcggctgaagcct

SEQ ID NO: 1561810 - DNA, 25 bp, Homo sapien
gaaaagtcggctgaagccttggagt

SEQ ID NO: 1561811 - DNA, 25 bp, Homo sapien
tcctctttgtggtagttcccaggga

SEQ ID NO: 1561812 - DNA, 25 bp, Homo sapien
gttctcctctttgtggtagttccca

SEQ ID NO: 1561813 - DNA, 25 bp, Homo sapien
tctcctctttgtggtagttcccagg

SEQ ID NO: 1561814 - DNA, 25 bp, Homo sapien
ctggttctcctctttgtggtagttc

SEQ ID NO: 1561815 - DNA, 25 bp, Homo sapien
tcccctccgctggttgaatggatgc

SEQ ID NO: 1561816 - DNA, 25 bp, Homo sapien
ctccgctggttgaatggatgccacc

SEQ ID NO: 1561817 - DNA, 25 bp, Homo sapien
ctcccctccgctggttgaatggatg

SEQ ID NO: 1561818 - DNA, 25 bp, Homo sapien
ccctccgctggttgaatggatgcca

SEQ ID NO: 1561819 - DNA, 25 bp, Homo sapien
gacatgcttgagcacgtcgagacca

SEQ ID NO: 1561820 - DNA, 25 bp, Homo sapien
gacacagaaggtacttatttcctta

SEQ ID NO: 1561821 - DNA, 25 bp, Homo sapien
aagttgcttgccaaaagacttggag

SEQ ID NO: 1561822 - DNA, 25 bp, Homo sapien
tggttaacgtacaaggacacagaag

SEQ ID NO: 1561823 - DNA, 25 bp, Homo sapien
tctgagctttcactggcttggtatc

SEQ ID NO: 1561824 - DNA, 25 bp, Homo sapien
tgcctgagttgctgagtctgtcaag

SEQ ID NO: 1561825 - DNA, 25 bp, Homo sapien
ccttccaggatatcttccatgtgaa

SEQ ID NO: 1561826 - DNA, 25 bp, Homo sapien
tgaaatttcattggcgaggtcttcc

SEQ ID NO: 1561827 - DNA, 25 bp, Homo sapien
gaggcatccttatctgagctttcgt

SEQ ID NO: 1561828 - DNA, 25 bp, Homo sapien
tgtcaaccttcaagtccagtgaggc

SEQ ID NO: 1561829 - DNA, 25 bp, Homo sapien
ccagtgaggcatccttatctgagct

SEQ ID NO: 1561830 - DNA, 25 bp, Homo sapien
gaactttttctttcatgcgtttgtc

SEQ ID NO: 1561831 - DNA, 25 bp, Homo sapien
caatccagtagagcgtcctcatctg

SEQ ID NO: 1561832 - DNA, 25 bp, Homo sapien
atccagtagagcgtcctcatctgag

SEQ ID NO: 1561833 - DNA, 25 bp, Homo sapien
tcaatccagtagagcgtcctcatct

SEQ ID NO: 1561834 - DNA, 25 bp, Homo sapien
ccagtagagcgtcctcatctgagct

SEQ ID NO: 1561835 - DNA, 25 bp, Homo sapien
ccttggcacatttgtcggcattcag

SEQ ID NO: 1561836 - DNA, 25 bp, Homo sapien
cactggattatctatgggaactttt

SEQ ID NO: 1561837 - DNA, 25 bp, Homo sapien
tcggcattcagatccagtggagcat

SEQ ID NO: 1561838 - DNA, 25 bp, Homo sapien
gagctttcgttggtgaggtcttcca

SEQ ID NO: 1561839 - DNA, 25 bp, Homo sapien
ctgccttttcaggctttgtctctat

SEQ ID NO: 1561840 - DNA, 25 bp, Homo sapien
tgtctccactacaggaagagtcttt

SEQ ID NO: 1561841 - DNA, 25 bp, Homo sapien
cttgagtgtctccactacaggaaga

SEQ ID NO: 1561842 - DNA, 25 bp, Homo sapien
tccactacaggaagagtctttgtca

SEQ ID NO: 1561843 - DNA, 25 bp, Homo sapien
gagctctcggtcccctcttctagga

SEQ ID NO: 1561844 - DNA, 25 bp, Homo sapien
tccgtggccttctggatgggtacca

SEQ ID NO: 1561845 - DNA, 25 bp, Homo sapien
tctcggtcccctcttctaggacgtc

SEQ ID NO: 1561846 - DNA, 25 bp, Homo sapien
cttgcggagtccatcccggatggcc

SEQ ID NO: 1561847 - DNA, 25 bp, Homo sapien
ttatttccatatggtgcttggggca

SEQ ID NO: 1561848 - DNA, 25 bp, Homo sapien
tatttccatatggtgcttggggcag

SEQ ID NO: 1561849 - DNA, 25 bp, Homo sapien
aatagtctgagatgtagtggttgtg

SEQ ID NO: 1561850 - DNA, 25 bp, Homo sapien
ggaagcgaggcccaggagatagtgg

SEQ ID NO: 1561851 - DNA, 25 bp, Homo sapien
ccaggagatagtggtccatccccat

SEQ ID NO: 1561852 - DNA, 25 bp, Homo sapien
gaaatagtctgagatgtagtggttg

SEQ ID NO: 1561853 - DNA, 25 bp, Homo sapien
aagggggaattgaactgagagactc

SEQ ID NO: 1561854 - DNA, 25 bp, Homo sapien
gctgtggccacggagtttgtctggt

SEQ ID NO: 1561855 - DNA, 25 bp, Homo sapien
tctcttccgcttcaggctttggtga

SEQ ID NO: 1561856 - DNA, 25 bp, Homo sapien
cgacgcgtgtcacgcatgcgcgctg

SEQ ID NO: 1561857 - DNA, 25 bp, Homo sapien
acaacggacatccacgaacgacgaa

SEQ ID NO: 1561858 - DNA, 25 bp, Homo sapien
tagtctcgggacacaacggacatcc

SEQ ID NO: 1561859 - DNA, 25 bp, Homo sapien
cacgaacgacgaacggcagttgagt

SEQ ID NO: 1561860 - DNA, 25 bp, Homo sapien
tggagccacgtcctagtctcgggac

SEQ ID NO: 1561861 - DNA, 25 bp, Homo sapien
tgacgcaggggtatctctcccacaa

SEQ ID NO: 1561862 - DNA, 25 bp, Homo sapien
cctgacgcaggggtatctctcccac

SEQ ID NO: 1561863 - DNA, 25 bp, Homo sapien
gcctcccaagtggtcaggatctggg

SEQ ID NO: 1561864 - DNA, 25 bp, Homo sapien
acgcaggggtatctctcccacaata

SEQ ID NO: 1561865 - DNA, 25 bp, Homo sapien
tctctgacacgagtctaggtggctc

SEQ ID NO: 1561866 - DNA, 25 bp, Homo sapien
gggtgtctttgatggacttctgtgc

SEQ ID NO: 1561867 - DNA, 25 bp, Homo sapien
cggaatctgaggtccgactgggttt

SEQ ID NO: 1561868 - DNA, 25 bp, Homo sapien
ttctgtgctctctgacggaatctga

SEQ ID NO: 1561869 - DNA, 25 bp, Homo sapien
gctttcaagggctctgacaggattt

SEQ ID NO: 1561870 - DNA, 25 bp, Homo sapien
tgactggatttctggggagtgtctg

SEQ ID NO: 1561871 - DNA, 25 bp, Homo sapien
gtgtgggccttggcgggctttcaag

SEQ ID NO: 1561872 - DNA, 25 bp, Homo sapien
atctcgggggtctgacgggactgag

SEQ ID NO: 1561873 - DNA, 25 bp, Homo sapien
cacggagtgggttcgggatggagtc

SEQ ID NO: 1561874 - DNA, 25 bp, Homo sapien
ggccctggcgcacggagtgggttcg

SEQ ID NO: 1561875 - DNA, 25 bp, Homo sapien
gcagggtgcaaaggggggcgatggc

SEQ ID NO: 1561876 - DNA, 25 bp, Homo sapien
aaggggggcgatggccttggctggg

SEQ ID NO: 1561877 - DNA, 25 bp, Homo sapien
tgctctccccaagccacgtgagccc

SEQ ID NO: 1561878 - DNA, 25 bp, Homo sapien
caagccacgtgagcccgctgccacc

SEQ ID NO: 1561879 - DNA, 25 bp, Homo sapien
gaaacacgggtctttgaagagaggc

SEQ ID NO: 1561880 - DNA, 25 bp, Homo sapien
tgccaccgttctggaaacacgggtc

SEQ ID NO: 1561881 - DNA, 25 bp, Homo sapien
tcagcaccccaaatcgcacatgatg

SEQ ID NO: 1561882 - DNA, 25 bp, Homo sapien
caaaaccttagtggccgcactctgg

SEQ ID NO: 1561883 - DNA, 25 bp, Homo sapien
gggttccaactcaggatgtacatgg

SEQ ID NO: 1561884 - DNA, 25 bp, Homo sapien
ctgctatcatcacagcgggcacggg

SEQ ID NO: 1561885 - DNA, 25 bp, Homo sapien
ctggcaaagctaccagcctccctcc

SEQ ID NO: 1561886 - DNA, 25 bp, Homo sapien
tggcaaagctaccagcctccctcct

SEQ ID NO: 1561887 - DNA, 25 bp, Homo sapien
gggccacccctgccgcggcgcagct

SEQ ID NO: 1561888 - DNA, 25 bp, Homo sapien
ggccacccctgccgcggcgcagctg

SEQ ID NO: 1561889 - DNA, 25 bp, Homo sapien
tccgcagtggggccacccaccgggc

SEQ ID NO: 1561890 - DNA, 25 bp, Homo sapien
ccaccgggccctcgggcaggtccat

SEQ ID NO: 1561891 - DNA, 25 bp, Homo sapien
cttcctctggaaaatggggttggtg

SEQ ID NO: 1561892 - DNA, 25 bp, Homo sapien
tatttgctcctccaagctgaccggc

SEQ ID NO: 1561893 - DNA, 25 bp, Homo sapien
caagcttcgaacgtggagttgagta

SEQ ID NO: 1561894 - DNA, 25 bp, Homo sapien
agttgagtatttgctcctccaagct

SEQ ID NO: 1561895 - DNA, 25 bp, Homo sapien
tcctctgagggtcacaagcttcgaa

SEQ ID NO: 1561896 - DNA, 25 bp, Homo sapien
ccaagagggggccttagcccagtct

SEQ ID NO: 1561897 - DNA, 25 bp, Homo sapien
caagagggggccttagcccagtctt

SEQ ID NO: 1561898 - DNA, 25 bp, Homo sapien
agggggccttagcccagtcttctct

SEQ ID NO: 1561899 - DNA, 25 bp, Homo sapien
cctgcccgcactggtccccagcacc

SEQ ID NO: 1561900 - DNA, 25 bp, Homo sapien
ttggccaatgtttggaggcgtgcat

SEQ ID NO: 1561901 - DNA, 25 bp, Homo sapien
caaccaggaaagtgtccaagtccac

SEQ ID NO: 1561902 - DNA, 25 bp, Homo sapien
ccaatgtttggaggcgtgcatcctg

SEQ ID NO: 1561903 - DNA, 25 bp, Homo sapien
cagcaatccagtcacgcatgacaac

SEQ ID NO: 1561904 - DNA, 25 bp, Homo sapien
aaagggatgaggcttagcgccccac

SEQ ID NO: 1561905 - DNA, 25 bp, Homo sapien
cagatggcagttgccgggaggtcag

SEQ ID NO: 1561906 - DNA, 25 bp, Homo sapien
agatggcagttgccgggaggtcagg

SEQ ID NO: 1561907 - DNA, 25 bp, Homo sapien
gcctccgaagctctccaggttggct

SEQ ID NO: 1561908 - DNA, 25 bp, Homo sapien
tccgaagctctccaggttggctggc

SEQ ID NO: 1561909 - DNA, 25 bp, Homo sapien
ttcgcctccgaagctctccaggttg

SEQ ID NO: 1561910 - DNA, 25 bp, Homo sapien
gggtcttcgcctccgaagctctcca

SEQ ID NO: 1561911 - DNA, 25 bp, Homo sapien
aaggcgtgctgacccctcctcagct

SEQ ID NO: 1561912 - DNA, 25 bp, Homo sapien
tccatgctccgctgcaatttggcat

SEQ ID NO: 1561913 - DNA, 25 bp, Homo sapien
gctgcttacgcagagccaagatctc

SEQ ID NO: 1561914 - DNA, 25 bp, Homo sapien
accagacgtcggttgctgagctcca

SEQ ID NO: 1561915 - DNA, 25 bp, Homo sapien
ggccagaaggctgcgattctgttcc

SEQ ID NO: 1561916 - DNA, 25 bp, Homo sapien
gggccagaaggctgcgattctgttc

SEQ ID NO: 1561917 - DNA, 25 bp, Homo sapien
ccagaaggctgcgattctgttcctc

SEQ ID NO: 1561918 - DNA, 25 bp, Homo sapien
ggctgcgattctgttcctccaggct

SEQ ID NO: 1561919 - DNA, 25 bp, Homo sapien
ggagaaagccaggtgacctctgccc

SEQ ID NO: 1561920 - DNA, 25 bp, Homo sapien
tagtcacactctgccgccctgactc

SEQ ID NO: 1561921 - DNA, 25 bp, Homo sapien
gccccttcctactccatagtcacac

SEQ ID NO: 1561922 - DNA, 25 bp, Homo sapien
cactctgccgccctgactccaggaa

SEQ ID NO: 1561923 - DNA, 25 bp, Homo sapien
tggcaggtaagcttgaaaaagtcta

SEQ ID NO: 1561924 - DNA, 25 bp, Homo sapien
gcttgaaaaagtctagggtgagcag

SEQ ID NO: 1561925 - DNA, 25 bp, Homo sapien
gcctgggggaatgggtctgggaagc

SEQ ID NO: 1561926 - DNA, 25 bp, Homo sapien
tgggaagccctgatggctcctgctg

SEQ ID NO: 1561927 - DNA, 25 bp, Homo sapien
atttctagcctccttgcccccatgt

SEQ ID NO: 1561928 - DNA, 25 bp, Homo sapien
agaggacaaaggtttcatttctagc

SEQ ID NO: 1561929 - DNA, 25 bp, Homo sapien
cagagagaggacaaaggtttcattt

SEQ ID NO: 1561930 - DNA, 25 bp, Homo sapien
gagagaggacaaaggtttcatttct

SEQ ID NO: 1561931 - DNA, 25 bp, Homo sapien
ctccatctcagccaccagatgctgc

SEQ ID NO: 1561932 - DNA, 25 bp, Homo sapien
cacagtgtgatataacctcagggac

SEQ ID NO: 1561933 - DNA, 25 bp, Homo sapien
tgtcaagaagaccttaaggactggg

SEQ ID NO: 1561934 - DNA, 25 bp, Homo sapien
ggcactggtccactcttatgtaggt

SEQ ID NO: 1561935 - DNA, 25 bp, Homo sapien
taaaccacggctgttctcacagtgt

SEQ ID NO: 1561936 - DNA, 25 bp, Homo sapien
ctccatcccgctcggcaagcagctt

SEQ ID NO: 1561937 - DNA, 25 bp, Homo sapien
tctttttcactccatcccgctcggc

SEQ ID NO: 1561938 - DNA, 25 bp, Homo sapien
cccgctcggcaagcagcttcccgtt

SEQ ID NO: 1561939 - DNA, 25 bp, Homo sapien
ttttcactccatcccgctcggcaag

SEQ ID NO: 1561940 - DNA, 25 bp, Homo sapien
aatgaggtgttcacactcaaagagc

SEQ ID NO: 1561941 - DNA, 25 bp, Homo sapien
gaggtgttcacactcaaagagctgc

SEQ ID NO: 1561942 - DNA, 25 bp, Homo sapien
ggtgttcacactcaaagagctgccg

SEQ ID NO: 1561943 - DNA, 25 bp, Homo sapien
ggcaaatgaggtgttcacactcaaa

SEQ ID NO: 1561944 - DNA, 25 bp, Homo sapien
tgcgtcgtcactctgtattcttcca

SEQ ID NO: 1561945 - DNA, 25 bp, Homo sapien
ctgcgtcgtcactctgtattcttcc

SEQ ID NO: 1561946 - DNA, 25 bp, Homo sapien
gcgtcgtcactctgtattcttccag

SEQ ID NO: 1561947 - DNA, 25 bp, Homo sapien
tcatcgggcccctcataggtctgac

SEQ ID NO: 1561948 - DNA, 25 bp, Homo sapien
ctccaggcgtgaaatctccagcctc

SEQ ID NO: 1561949 - DNA, 25 bp, Homo sapien
ctgctcctccaggcgtgaaatctcc

SEQ ID NO: 1561950 - DNA, 25 bp, Homo sapien
caggcgtgaaatctccagcctcagt

SEQ ID NO: 1561951 - DNA, 25 bp, Homo sapien
atgggggtagcagctcggtccagcc

SEQ ID NO: 1561952 - DNA, 25 bp, Homo sapien
atctccaagcccagcgatgggggta

SEQ ID NO: 1561953 - DNA, 25 bp, Homo sapien
cagcgatgggggtagcagctcggtc

SEQ ID NO: 1561954 - DNA, 25 bp, Homo sapien
gcgatgggggtagcagctcggtcca

SEQ ID NO: 1561955 - DNA, 25 bp, Homo sapien
tcatggatgacttcctcccactgcc

SEQ ID NO: 1561956 - DNA, 25 bp, Homo sapien
agggttggagagatcagcagttgcc

SEQ ID NO: 1561957 - DNA, 25 bp, Homo sapien
cttccttcttcagggtgcgctggct

SEQ ID NO: 1561958 - DNA, 25 bp, Homo sapien
ccttccttcttcagggtgcgctggc

SEQ ID NO: 1561959 - DNA, 25 bp, Homo sapien
tccttcttcagggtgcgctggctct

SEQ ID NO: 1561960 - DNA, 25 bp, Homo sapien
ccttcttcagggtgcgctggctctc

SEQ ID NO: 1561961 - DNA, 25 bp, Homo sapien
gccaacaaagtcactgctggcttcg

SEQ ID NO: 1561962 - DNA, 25 bp, Homo sapien
aacaaagtcactgctggcttcgtcc

SEQ ID NO: 1561963 - DNA, 25 bp, Homo sapien
gggccaacaaagtcactgctggctt

SEQ ID NO: 1561964 - DNA, 25 bp, Homo sapien
ctgagggccaacaaagtcactgctg

SEQ ID NO: 1561965 - DNA, 25 bp, Homo sapien
cgtgacctggctctctgcatcctcc

SEQ ID NO: 1561966 - DNA, 25 bp, Homo sapien
ctcctcttcctctcttctggtcaac

SEQ ID NO: 1561967 - DNA, 25 bp, Homo sapien
catcctcctcttcctctcttctggt

SEQ ID NO: 1561968 - DNA, 25 bp, Homo sapien
tcctcctcttcctctcttctggtca

SEQ ID NO: 1561969 - DNA, 25 bp, Homo sapien
tgtagccacgtctatgaggcctgcg

SEQ ID NO: 1561970 - DNA, 25 bp, Homo sapien
gccttgttatctcttggccaaatga

SEQ ID NO: 1561971 - DNA, 25 bp, Homo sapien
tttccccgtccttgcctgagaatgg

SEQ ID NO: 1561972 - DNA, 25 bp, Homo sapien
tgcgtgtgcatttatgcaatccggg

SEQ ID NO: 1561973 - DNA, 25 bp, Homo sapien
aattccaacacttcatctgaggatt

SEQ ID NO: 1561974 - DNA, 25 bp, Homo sapien
gcaaccacactaaattcactgatta

SEQ ID NO: 1561975 - DNA, 25 bp, Homo sapien
catggttgctatactgaaatatgat

SEQ ID NO: 1561976 - DNA, 25 bp, Homo sapien
gatctttcacccagcaaccacacta

SEQ ID NO: 1561977 - DNA, 25 bp, Homo sapien
tggagggttttctgggatgtctcca

SEQ ID NO: 1561978 - DNA, 25 bp, Homo sapien
ttttctgggatgtctccagggcgag

SEQ ID NO: 1561979 - DNA, 25 bp, Homo sapien
gggcgaggggctcctagagggacag

SEQ ID NO: 1561980 - DNA, 25 bp, Homo sapien
ctcctagagggacagggagatcagc

SEQ ID NO: 1561981 - DNA, 25 bp, Homo sapien
cttgctggagttcccgccgcgcagg

SEQ ID NO: 1561982 - DNA, 25 bp, Homo sapien
tgactgggaccagctttttcatcac

SEQ ID NO: 1561983 - DNA, 25 bp, Homo sapien
gactgggaccagctttttcatcaca

SEQ ID NO: 1561984 - DNA, 25 bp, Homo sapien
agggcttgctggagttcccgccgcg

SEQ ID NO: 1561985 - DNA, 25 bp, Homo sapien
aggagctgggatcagtggatgtcga

SEQ ID NO: 1561986 - DNA, 25 bp, Homo sapien
gctgggatcagtggatgtcgagtga

SEQ ID NO: 1561987 - DNA, 25 bp, Homo sapien
gagctgggatcagtggatgtcgagt

SEQ ID NO: 1561988 - DNA, 25 bp, Homo sapien
tgggatcagtggatgtcgagtgact

SEQ ID NO: 1561989 - DNA, 25 bp, Homo sapien
tccgtttcccgcagatgtgatgtag

SEQ ID NO: 1561990 - DNA, 25 bp, Homo sapien
caaccgagacttagctgtgtgccca

SEQ ID NO: 1561991 - DNA, 25 bp, Homo sapien
tatctagggtaagcctgcgcaacag

SEQ ID NO: 1561992 - DNA, 25 bp, Homo sapien
gaagctacaactgccaactcctgag

SEQ ID NO: 1561993 - DNA, 25 bp, Homo sapien
cagctcatttagagcagtggcgtca

SEQ ID NO: 1561994 - DNA, 25 bp, Homo sapien
tccagggaaaccgtatgaggtagct

SEQ ID NO: 1561995 - DNA, 25 bp, Homo sapien
attttcagaagcacccttcagaggg

SEQ ID NO: 1561996 - DNA, 25 bp, Homo sapien
gaaattctgggttaaggcgatctcg

SEQ ID NO: 1561997 - DNA, 25 bp, Homo sapien
gtgttgactccctcacctcggctgt

SEQ ID NO: 1561998 - DNA, 25 bp, Homo sapien
ggacgttggactccttagggccaga

SEQ ID NO: 1561999 - DNA, 25 bp, Homo sapien
gggacctgcaatccgggctgaggga

SEQ ID NO: 1562000 - DNA, 25 bp, Homo sapien
ttcactcgctccaccacgatgatgg

SEQ ID NO: 1562001 - DNA, 25 bp, Homo sapien
acgtggtcgccccaccagagtcacg

SEQ ID NO: 1562002 - DNA, 25 bp, Homo sapien
cggtccccgcgaagaacaggcagag

SEQ ID NO: 1562003 - DNA, 25 bp, Homo sapien
tcagcagcgcggtccccgcgaagaa

SEQ ID NO: 1562004 - DNA, 25 bp, Homo sapien
gcagcacaaagatgccgatcagcag

SEQ ID NO: 1562005 - DNA, 25 bp, Homo sapien
cggttcatctccgtcgtccggaagc

SEQ ID NO: 1562006 - DNA, 25 bp, Homo sapien
gtctagctgcccggcggtaaagaca

SEQ ID NO: 1562007 - DNA, 25 bp, Homo sapien
tccgtcgtccggaagccggtgatgt

SEQ ID NO: 1562008 - DNA, 25 bp, Homo sapien
ccggtgatgtgcgaagggccgctgt

SEQ ID NO: 1562009 - DNA, 25 bp, Homo sapien
tcattgaccttgggtgggggacctg

SEQ ID NO: 1562010 - DNA, 25 bp, Homo sapien
gacctgtgcttttttggctggcgcc

SEQ ID NO: 1562011 - DNA, 25 bp, Homo sapien
cattgaccttgggtgggggacctgt

SEQ ID NO: 1562012 - DNA, 25 bp, Homo sapien
tgggggacctgtgcttttttggctg

SEQ ID NO: 1562013 - DNA, 25 bp, Homo sapien
agggcctccagacgctgcgggcgac

SEQ ID NO: 1562014 - DNA, 25 bp, Homo sapien
tccggagcataaaagtagaggtcgt

SEQ ID NO: 1562015 - DNA, 25 bp, Homo sapien
ttggtggcgatgtgggaagggaccc

SEQ ID NO: 1562016 - DNA, 25 bp, Homo sapien
gaagggacccaggtatccggagcat

SEQ ID NO: 1562017 - DNA, 25 bp, Homo sapien
atgtgcaggtccggcagaactcggt

SEQ ID NO: 1562018 - DNA, 25 bp, Homo sapien
tgcaggtccggcagaactcggtggg

SEQ ID NO: 1562019 - DNA, 25 bp, Homo sapien
ggatgtgcaggtccggcagaactcg

SEQ ID NO: 1562020 - DNA, 25 bp, Homo sapien
gggatgtgcaggtccggcagaactc

SEQ ID NO: 1562021 - DNA, 25 bp, Homo sapien
cagggactctcaggctaacctttga

SEQ ID NO: 1562022 - DNA, 25 bp, Homo sapien
gattgattctcaccagcgtttctga

SEQ ID NO: 1562023 - DNA, 25 bp, Homo sapien
tggccatttgttgtgtccctcaggg

SEQ ID NO: 1562024 - DNA, 25 bp, Homo sapien
taaatagtggctgctccagtccatg

SEQ ID NO: 1562025 - DNA, 25 bp, Homo sapien
tgcctccctggtgcactatggaggt

SEQ ID NO: 1562026 - DNA, 25 bp, Homo sapien
ctatggaggtgtcatcttctacggg

SEQ ID NO: 1562027 - DNA, 25 bp, Homo sapien
ctcgggaggagtggcagtacgtgtt

SEQ ID NO: 1562028 - DNA, 25 bp, Homo sapien
cctggtgcactatggaggtgtcatc

SEQ ID NO: 1562029 - DNA, 25 bp, Homo sapien
tcgggcatggtgtgccccatcatcg

SEQ ID NO: 1562030 - DNA, 25 bp, Homo sapien
atctccaacggcgtgggcacactgt

SEQ ID NO: 1562031 - DNA, 25 bp, Homo sapien
cactgtcgggcatggtgtgccccat

SEQ ID NO: 1562032 - DNA, 25 bp, Homo sapien
atcctcatgggcatctccaacggcg

SEQ ID NO: 1562033 - DNA, 25 bp, Homo sapien
cttcggcatggaagccacgctgctg

SEQ ID NO: 1562034 - DNA, 25 bp, Homo sapien
atctccttcctggtcctagccgtgg

SEQ ID NO: 1562035 - DNA, 25 bp, Homo sapien
ctgctgttggtggtcggctactcgc

SEQ ID NO: 1562036 - DNA, 25 bp, Homo sapien
actcgcactccaagggcgtggccat

SEQ ID NO: 1562037 - DNA, 25 bp, Homo sapien
tggtcatgaccatcatcgtgcccat

SEQ ID NO: 1562038 - DNA, 25 bp, Homo sapien
agatcgcggacttcctgcggagccg

SEQ ID NO: 1562039 - DNA, 25 bp, Homo sapien
tgtccaccaccaacgtgcgcaagtt

SEQ ID NO: 1562040 - DNA, 25 bp, Homo sapien
ccatcggcggccagatcgcggactt

SEQ ID NO: 1562041 - DNA, 25 bp, Homo sapien
tatgccagtctatgccatcatcgtg

SEQ ID NO: 1562042 - DNA, 25 bp, Homo sapien
gctggacgttctacctgctgctcat

SEQ ID NO: 1562043 - DNA, 25 bp, Homo sapien
tggcggcgcttcttcacgtctatgc

SEQ ID NO: 1562044 - DNA, 25 bp, Homo sapien
gaagtgttcggcttcgagatcagca

SEQ ID NO: 1562045 - DNA, 25 bp, Homo sapien
gcagcttcgggatcttctggtacct

SEQ ID NO: 1562046 - DNA, 25 bp, Homo sapien
ccatcggagagagcgcgaaactcat

SEQ ID NO: 1562047 - DNA, 25 bp, Homo sapien
aagtacatcgaggacgccatcggag

SEQ ID NO: 1562048 - DNA, 25 bp, Homo sapien
tgttctggctgctcgtctcctacga

SEQ ID NO: 1562049 - DNA, 25 bp, Homo sapien
ccttgtgcagtactcaggatggagc

SEQ ID NO: 1562050 - DNA, 25 bp, Homo sapien
ctggggcggtggtcgcgatgcccct

SEQ ID NO: 1562051 - DNA, 25 bp, Homo sapien
gggcggtggtcgcgatgcccctcgc

SEQ ID NO: 1562052 - DNA, 25 bp, Homo sapien
tgcccctcgccggggtccttgtgca

SEQ ID NO: 1562053 - DNA, 25 bp, Homo sapien
atgggatctggagcaaatgggcccc

SEQ ID NO: 1562054 - DNA, 25 bp, Homo sapien
tcgcctggcgacgacagccttttgt

SEQ ID NO: 1562055 - DNA, 25 bp, Homo sapien
gggatctggagcaaatgggccccac

SEQ ID NO: 1562056 - DNA, 25 bp, Homo sapien
ccacccttagaacggagtcgcctgg

SEQ ID NO: 1562057 - DNA, 25 bp, Homo sapien
ttgctattgtggcaacatccactct

SEQ ID NO: 1562058 - DNA, 25 bp, Homo sapien
tgctgatcccctcagctgcccgcgt

SEQ ID NO: 1562059 - DNA, 25 bp, Homo sapien
tcatcttcgtgaggatcctgcaggg

SEQ ID NO: 1562060 - DNA, 25 bp, Homo sapien
cccgcgtccactatggctgtgtcat

SEQ ID NO: 1562061 - DNA, 25 bp, Homo sapien
tttttctggggctacattgtcactc

SEQ ID NO: 1562062 - DNA, 25 bp, Homo sapien
gcctcatacacggctcctttttctg

SEQ ID NO: 1562063 - DNA, 25 bp, Homo sapien
gctgggatccagagactgtcggcct

SEQ ID NO: 1562064 - DNA, 25 bp, Homo sapien
tctgtcaaaaatttgcagccaacag

SEQ ID NO: 1562065 - DNA, 25 bp, Homo sapien
tgggcgtggccatcgtctccatggt

SEQ ID NO: 1562066 - DNA, 25 bp, Homo sapien
tacattatcgccatcatgagtggtc

SEQ ID NO: 1562067 - DNA, 25 bp, Homo sapien
tttggcatccgctgcaacctgggcg

SEQ ID NO: 1562068 - DNA, 25 bp, Homo sapien
tggtcaataacagcacgacccaccg

SEQ ID NO: 1562069 - DNA, 25 bp, Homo sapien
cagactgacagatgaacgggcgata

SEQ ID NO: 1562070 - DNA, 25 bp, Homo sapien
tttcggaagctagcgggtcgtgctc

SEQ ID NO: 1562071 - DNA, 25 bp, Homo sapien
ggtcgagccttgtccattatcctgt

SEQ ID NO: 1562072 - DNA, 25 bp, Homo sapien
taattcccacctgggcgcagactga

SEQ ID NO: 1562073 - DNA, 25 bp, Homo sapien
gaaaacaaagaactccctggatgag

SEQ ID NO: 1562074 - DNA, 25 bp, Homo sapien
gacgacaggtggatcgaagtaggcg

SEQ ID NO: 1562075 - DNA, 25 bp, Homo sapien
gatggaaactaaggaggagatggag

SEQ ID NO: 1562076 - DNA, 25 bp, Homo sapien
gctggaggagtatgggattcaaagg

SEQ ID NO: 1562077 - DNA, 25 bp, Homo sapien
ggaaccttgaggtccgaagagcgac

SEQ ID NO: 1562078 - DNA, 25 bp, Homo sapien
gaagagcgacacctccggttccagc

SEQ ID NO: 1562079 - DNA, 25 bp, Homo sapien
gcgctctgtgttaaggggaaccttg

SEQ ID NO: 1562080 - DNA, 25 bp, Homo sapien
gaacgctttccgcgaagactgcggg

SEQ ID NO: 1562081 - DNA, 25 bp, Homo sapien
cgaggtgaagatctcgcgggcgcgg

SEQ ID NO: 1562082 - DNA, 25 bp, Homo sapien
cagtgcgcatgcgtggctctccggc

SEQ ID NO: 1562083 - DNA, 25 bp, Homo sapien
gcatgcgtggctctccggcaccggt

SEQ ID NO: 1562084 - DNA, 25 bp, Homo sapien
cggtccgtactccagcgaggtgaag

SEQ ID NO: 1562085 - DNA, 25 bp, Homo sapien
cctacagggcgcgatcctattgggc

SEQ ID NO: 1562086 - DNA, 25 bp, Homo sapien
ccgcggaaacactacgaggagttca

SEQ ID NO: 1562087 - DNA, 25 bp, Homo sapien
cacatgaaccccacgagtattgagg

SEQ ID NO: 1562088 - DNA, 25 bp, Homo sapien
ccctgaggaatcacgagagcgtcta

SEQ ID NO: 1562089 - DNA, 25 bp, Homo sapien
tggtatgatcactgcacctcccagg

SEQ ID NO: 1562090 - DNA, 25 bp, Homo sapien
gtgtgctgccatcctcggctaatct

SEQ ID NO: 1562091 - DNA, 25 bp, Homo sapien
tgctgccatcctcggctaatctttt

SEQ ID NO: 1562092 - DNA, 25 bp, Homo sapien
tgtgctgccatcctcggctaatctt

SEQ ID NO: 1562093 - DNA, 25 bp, Homo sapien
cagttcaacccctacccagaatcct

SEQ ID NO: 1562094 - DNA, 25 bp, Homo sapien
agagcatttcaaagtgtatagttca

SEQ ID NO: 1562095 - DNA, 25 bp, Homo sapien
ccagaatcctctaggaggggacgtc

SEQ ID NO: 1562096 - DNA, 25 bp, Homo sapien
cagcagtttagtggcattctgtgca

SEQ ID NO: 1562097 - DNA, 25 bp, Homo sapien
catagtggcccaagcaccggtcctg

SEQ ID NO: 1562098 - DNA, 25 bp, Homo sapien
tcctggcaaggcactgaatttctgt

SEQ ID NO: 1562099 - DNA, 25 bp, Homo sapien
tctgtgttcaggctttaaccacttc

SEQ ID NO: 1562100 - DNA, 25 bp, Homo sapien
gtgttcaggctttaaccacttccca

SEQ ID NO: 1562101 - DNA, 25 bp, Homo sapien
tgcagccacatcctcggcctgtgcc

SEQ ID NO: 1562102 - DNA, 25 bp, Homo sapien
gcactccagcccttaaatgccatcc

SEQ ID NO: 1562103 - DNA, 25 bp, Homo sapien
gacgacgccggggtgcgcactccag

SEQ ID NO: 1562104 - DNA, 25 bp, Homo sapien
cagccacatcctcggcctgtgcctg

SEQ ID NO: 1562105 - DNA, 25 bp, Homo sapien
tgggccagctggacgtccccgtctc

SEQ ID NO: 1562106 - DNA, 25 bp, Homo sapien
gcctggattgcatggtagtggagca

SEQ ID NO: 1562107 - DNA, 25 bp, Homo sapien
gtctcgaacctctcgaacagcccgc

SEQ ID NO: 1562108 - DNA, 25 bp, Homo sapien
acagcccgcccagtcaccagggatt

SEQ ID NO: 1562109 - DNA, 25 bp, Homo sapien
gcaaatcctccacatcatctcaagg

SEQ ID NO: 1562110 - DNA, 25 bp, Homo sapien
agggcaaatcctccacatcatctca

SEQ ID NO: 1562111 - DNA, 25 bp, Homo sapien
aatcctccacatcatctcaaggaag

SEQ ID NO: 1562112 - DNA, 25 bp, Homo sapien
gcagggcaaatcctccacatcatct

SEQ ID NO: 1562113 - DNA, 25 bp, Homo sapien
cagaaggccaccttccggattccag

SEQ ID NO: 1562114 - DNA, 25 bp, Homo sapien
ctccggggctccgcagaaggccacc

SEQ ID NO: 1562115 - DNA, 25 bp, Homo sapien
agccgcaggaggagccttgcggccc

SEQ ID NO: 1562116 - DNA, 25 bp, Homo sapien
ccagccgcgttccgccacgacccct

SEQ ID NO: 1562117 - DNA, 25 bp, Homo sapien
gccgcgttccgccacgacccctgtc

SEQ ID NO: 1562118 - DNA, 25 bp, Homo sapien
cagccgcaggaggagccttgcggcc

SEQ ID NO: 1562119 - DNA, 25 bp, Homo sapien
gtcggaccaggcggcgtccacgaca

SEQ ID NO: 1562120 - DNA, 25 bp, Homo sapien
agcagcagcgactccgtccccagcg

SEQ ID NO: 1562121 - DNA, 25 bp, Homo sapien
acggccgagtctacgtccgccgtgt

SEQ ID NO: 1562122 - DNA, 25 bp, Homo sapien
aggctccgtcgaagggcacgccctt

SEQ ID NO: 1562123 - DNA, 25 bp, Homo sapien
cagccctcggccactccgaagccgc

SEQ ID NO: 1562124 - DNA, 25 bp, Homo sapien
ctggaccaggtcacatgcggcagcc

SEQ ID NO: 1562125 - DNA, 25 bp, Homo sapien
gaagccgccccatccgctcctgcag

SEQ ID NO: 1562126 - DNA, 25 bp, Homo sapien
catgtccacggccccatccagccct

SEQ ID NO: 1562127 - DNA, 25 bp, Homo sapien
gttccgaaggcacatcaccagcctg

SEQ ID NO: 1562128 - DNA, 25 bp, Homo sapien
aatgggcgttccgaaggcacatcac

SEQ ID NO: 1562129 - DNA, 25 bp, Homo sapien
aaggcacatcaccagcctggaacac

SEQ ID NO: 1562130 - DNA, 25 bp, Homo sapien
gatagaatgggcgttccgaaggcac

SEQ ID NO: 1562131 - DNA, 25 bp, Homo sapien
caccaacagtgcctccttggctgtg

SEQ ID NO: 1562132 - DNA, 25 bp, Homo sapien
accaacagtgcctccttggctgtgc

SEQ ID NO: 1562133 - DNA, 25 bp, Homo sapien
ggcgtcccgttggccaccaacagtg

SEQ ID NO: 1562134 - DNA, 25 bp, Homo sapien
gtcccgttggccaccaacagtgcct

SEQ ID NO: 1562135 - DNA, 25 bp, Homo sapien
ccgtgggcgttgatccagacagtgc

SEQ ID NO: 1562136 - DNA, 25 bp, Homo sapien
ctctgaggccgtgggcgttgatcca

SEQ ID NO: 1562137 - DNA, 25 bp, Homo sapien
tgggcgttgatccagacagtgccca

SEQ ID NO: 1562138 - DNA, 25 bp, Homo sapien
ccgtgccaggaacacccactctcct

SEQ ID NO: 1562139 - DNA, 25 bp, Homo sapien
tgagggccgcagatactcatacagc

SEQ ID NO: 1562140 - DNA, 25 bp, Homo sapien
tgggccctatttcaggcccagccgg

SEQ ID NO: 1562141 - DNA, 25 bp, Homo sapien
atagttcaggttcttggagaggcag

SEQ ID NO: 1562142 - DNA, 25 bp, Homo sapien
gaacagcgaggccaaaggtgtcata

SEQ ID NO: 1562143 - DNA, 25 bp, Homo sapien
acgaagagcccataggggggtgctg

SEQ ID NO: 1562144 - DNA, 25 bp, Homo sapien
caacgaagagcccataggggggtgc

SEQ ID NO: 1562145 - DNA, 25 bp, Homo sapien
ccaacgaagagcccataggggggtg

SEQ ID NO: 1562146 - DNA, 25 bp, Homo sapien
gaagagcccataggggggtgctggg

SEQ ID NO: 1562147 - DNA, 25 bp, Homo sapien
ggaaagcctggtgagcggcctccac

SEQ ID NO: 1562148 - DNA, 25 bp, Homo sapien
ggaggttgccagacgaatcccggat

SEQ ID NO: 1562149 - DNA, 25 bp, Homo sapien
gatgggcctggagcttcgggcccca

SEQ ID NO: 1562150 - DNA, 25 bp, Homo sapien
cagccacgtagccatggaggttgcc

SEQ ID NO: 1562151 - DNA, 25 bp, Homo sapien
ttccggcgctccagtgcagccgcca

SEQ ID NO: 1562152 - DNA, 25 bp, Homo sapien
gccagggtagacttccggcgctcca

SEQ ID NO: 1562153 - DNA, 25 bp, Homo sapien
aggccagggtagacttccggcgctc

SEQ ID NO: 1562154 - DNA, 25 bp, Homo sapien
cagggtagacttccggcgctccagt

SEQ ID NO: 1562155 - DNA, 25 bp, Homo sapien
ccccacgcccgaagtcgtcttgcgc

SEQ ID NO: 1562156 - DNA, 25 bp, Homo sapien
cacgcccgaagtcgtcttgcgctca

SEQ ID NO: 1562157 - DNA, 25 bp, Homo sapien
cgaagtcgtcttgcgctcagctcca

SEQ ID NO: 1562158 - DNA, 25 bp, Homo sapien
gcccgaagtcgtcttgcgctcagct

SEQ ID NO: 1562159 - DNA, 25 bp, Homo sapien
gggagggaacttagagggcaggtca

SEQ ID NO: 1562160 - DNA, 25 bp, Homo sapien
gaacttagagggcaggtcaataggt

SEQ ID NO: 1562161 - DNA, 25 bp, Homo sapien
agggaacttagagggcaggtcaata

SEQ ID NO: 1562162 - DNA, 25 bp, Homo sapien
actgcgcctggtctattttcttttg

SEQ ID NO: 1562163 - DNA, 25 bp, Homo sapien
ccgcccgcagtaaatgagagatcca

SEQ ID NO: 1562164 - DNA, 25 bp, Homo sapien
gccccgcccgcagtaaatgagagat

SEQ ID NO: 1562165 - DNA, 25 bp, Homo sapien
gagccccgcccgcagtaaatgagag

SEQ ID NO: 1562166 - DNA, 25 bp, Homo sapien
ccgcagtaaatgagagatccagttc

SEQ ID NO: 1562167 - DNA, 25 bp, Homo sapien
tgaccacagtgttgccgtaggccag

SEQ ID NO: 1562168 - DNA, 25 bp, Homo sapien
aagcaggggccactcgtccggacac

SEQ ID NO: 1562169 - DNA, 25 bp, Homo sapien
gggcaccatgaccacagtgttgccg

SEQ ID NO: 1562170 - DNA, 25 bp, Homo sapien
catgaccacagtgttgccgtaggcc

SEQ ID NO: 1562171 - DNA, 25 bp, Homo sapien
agatggtcccggtctcctgtcacca

SEQ ID NO: 1562172 - DNA, 25 bp, Homo sapien
gggctgatccgaaataccacatggc

SEQ ID NO: 1562173 - DNA, 25 bp, Homo sapien
ctgggctgatccgaaataccacatg

SEQ ID NO: 1562174 - DNA, 25 bp, Homo sapien
gccaggcagcgggtcagatggtccc

SEQ ID NO: 1562175 - DNA, 25 bp, Homo sapien
aacaaagcgtagactgtgggcctcc

SEQ ID NO: 1562176 - DNA, 25 bp, Homo sapien
caaatctagggtgtggtccttagca

SEQ ID NO: 1562177 - DNA, 25 bp, Homo sapien
taccaacaggagttctaagagggcg

SEQ ID NO: 1562178 - DNA, 25 bp, Homo sapien
tcaggcccctgttgctaaggacagc

SEQ ID NO: 1562179 - DNA, 25 bp, Homo sapien
aggtttcctgccgaggcccactcga

SEQ ID NO: 1562180 - DNA, 25 bp, Homo sapien
tgccgaggcccactcgacaaactgg

SEQ ID NO: 1562181 - DNA, 25 bp, Homo sapien
ttgaggtttcctgccgaggcccact

SEQ ID NO: 1562182 - DNA, 25 bp, Homo sapien
gaggcccactcgacaaactgggaac

SEQ ID NO: 1562183 - DNA, 25 bp, Homo sapien
agggccttggtccgcgccactcgca

SEQ ID NO: 1562184 - DNA, 25 bp, Homo sapien
cagggccttggtccgcgccactcgc

SEQ ID NO: 1562185 - DNA, 25 bp, Homo sapien
acagggccttggtccgcgccactcg

SEQ ID NO: 1562186 - DNA, 25 bp, Homo sapien
ccttggtgtgaggtgtccaaaatgc

SEQ ID NO: 1562187 - DNA, 25 bp, Homo sapien
tgtccaaaatgcagtaggtggcgct

SEQ ID NO: 1562188 - DNA, 25 bp, Homo sapien
tagggttggtcagagagtttattgg

SEQ ID NO: 1562189 - DNA, 25 bp, Homo sapien
gtgcatctccccttggtgtgaggtg

SEQ ID NO: 1562190 - DNA, 25 bp, Homo sapien
agagaaaaccagagagcaagagcca

SEQ ID NO: 1562191 - DNA, 25 bp, Homo sapien
tcctttactgcatatggattctggg

SEQ ID NO: 1562192 - DNA, 25 bp, Homo sapien
agaaaaccagagagcaagagccacc

SEQ ID NO: 1562193 - DNA, 25 bp, Homo sapien
agagttcctttactgcatatggatt

SEQ ID NO: 1562194 - DNA, 25 bp, Homo sapien
cctgtaccttgaaatccggcacggt

SEQ ID NO: 1562195 - DNA, 25 bp, Homo sapien
atccggcacggtgggagcatttaca

SEQ ID NO: 1562196 - DNA, 25 bp, Homo sapien
cttgaaatccggcacggtgggagca

SEQ ID NO: 1562197 - DNA, 25 bp, Homo sapien
tgtaccttgaaatccggcacggtgg

SEQ ID NO: 1562198 - DNA, 25 bp, Homo sapien
ccatctgatccgtggcagactgtcc

SEQ ID NO: 1562199 - DNA, 25 bp, Homo sapien
ccagcaggaggattcgaggtcccat

SEQ ID NO: 1562200 - DNA, 25 bp, Homo sapien
gatccgtggcagactgtcctgaaac

SEQ ID NO: 1562201 - DNA, 25 bp, Homo sapien
ccccagcaggaggattcgaggtccc

SEQ ID NO: 1562202 - DNA, 25 bp, Homo sapien
gtgtggaaggggccaagccgggtga

SEQ ID NO: 1562203 - DNA, 25 bp, Homo sapien
gcttgccccagttgggtgtggaagg

SEQ ID NO: 1562204 - DNA, 25 bp, Homo sapien
caggcttgccccagttgggtgtgga

SEQ ID NO: 1562205 - DNA, 25 bp, Homo sapien
ggccaagccgggtgacagccagaga

SEQ ID NO: 1562206 - DNA, 25 bp, Homo sapien
gggacagaagaacaagtctcggacc

SEQ ID NO: 1562207 - DNA, 25 bp, Homo sapien
aagggacagaagaacaagtctcgga

SEQ ID NO: 1562208 - DNA, 25 bp, Homo sapien
cttggaagggacagaagaacaagtc

SEQ ID NO: 1562209 - DNA, 25 bp, Homo sapien
ggaagggacagaagaacaagtctcg

SEQ ID NO: 1562210 - DNA, 25 bp, Homo sapien
ttcggccgggggcccctcatgcctc

SEQ ID NO: 1562211 - DNA, 25 bp, Homo sapien
gccgggggcccctcatgcctcctgt

SEQ ID NO: 1562212 - DNA, 25 bp, Homo sapien
ggcccctcatgcctcctgtcgccgg

SEQ ID NO: 1562213 - DNA, 25 bp, Homo sapien
cccctcatgcctcctgtcgccgggt

SEQ ID NO: 1562214 - DNA, 25 bp, Homo sapien
ggctccaggctggcgccagcactgt

SEQ ID NO: 1562215 - DNA, 25 bp, Homo sapien
tccaggctggcgccagcactgtcat

SEQ ID NO: 1562216 - DNA, 25 bp, Homo sapien
ctccaggctggcgccagcactgtca

SEQ ID NO: 1562217 - DNA, 25 bp, Homo sapien
tgggctccaggctggcgccagcact

SEQ ID NO: 1562218 - DNA, 25 bp, Homo sapien
tgggtcccactgagtcccgagctca

SEQ ID NO: 1562219 - DNA, 25 bp, Homo sapien
cctgggtcccactgagtcccgagct

SEQ ID NO: 1562220 - DNA, 25 bp, Homo sapien
gggtcccactgagtcccgagctcag

SEQ ID NO: 1562221 - DNA, 25 bp, Homo sapien
gtcctgggtcccactgagtcccgag

SEQ ID NO: 1562222 - DNA, 25 bp, Homo sapien
cgggagaaaacaggatcaggcctgg

SEQ ID NO: 1562223 - DNA, 25 bp, Homo sapien
gcgggagaaaacaggatcaggcctg

SEQ ID NO: 1562224 - DNA, 25 bp, Homo sapien
acggtgactgggtaatcttgaagca

SEQ ID NO: 1562225 - DNA, 25 bp, Homo sapien
cacggtgactgggtaatcttgaagc

SEQ ID NO: 1562226 - DNA, 25 bp, Homo sapien
tgtgccaggaccagccgccagaggc

SEQ ID NO: 1562227 - DNA, 25 bp, Homo sapien
agcgctgtgccaggaccagccgcca

SEQ ID NO: 1562228 - DNA, 25 bp, Homo sapien
cgctgtgccaggaccagccgccaga

SEQ ID NO: 1562229 - DNA, 25 bp, Homo sapien
ccagcgctgtgccaggaccagccgc

SEQ ID NO: 1562230 - DNA, 25 bp, Homo sapien
aagccttgcatcttggacccagcga

SEQ ID NO: 1562231 - DNA, 25 bp, Homo sapien
gacccagcgacagtcttgagccgct

SEQ ID NO: 1562232 - DNA, 25 bp, Homo sapien
gtgttcacgcgctccagcaagcctt

SEQ ID NO: 1562233 - DNA, 25 bp, Homo sapien
ttggtgacaaagtgtatctccgtgt

SEQ ID NO: 1562234 - DNA, 25 bp, Homo sapien
cgggagatgttggtctggacgaagc

SEQ ID NO: 1562235 - DNA, 25 bp, Homo sapien
atgttggtctggacgaagcgaagac

SEQ ID NO: 1562236 - DNA, 25 bp, Homo sapien
ggaggcgggagatgttggtctggac

SEQ ID NO: 1562237 - DNA, 25 bp, Homo sapien
tggtctggacgaagcgaagacagct

SEQ ID NO: 1562238 - DNA, 25 bp, Homo sapien
tgatccagggcttcagcgccaccag

SEQ ID NO: 1562239 - DNA, 25 bp, Homo sapien
gcgagtgatccagggcttcagcgcc

SEQ ID NO: 1562240 - DNA, 25 bp, Homo sapien
aagttctggcgagtgatccagggct

SEQ ID NO: 1562241 - DNA, 25 bp, Homo sapien
tccaggcaccgggagaagttctggc

SEQ ID NO: 1562242 - DNA, 25 bp, Homo sapien
ctccaggggccggggactccatggg

SEQ ID NO: 1562243 - DNA, 25 bp, Homo sapien
cctccaggggccggggactccatgg

SEQ ID NO: 1562244 - DNA, 25 bp, Homo sapien
gcctccaggggccggggactccatg

SEQ ID NO: 1562245 - DNA, 25 bp, Homo sapien
cgccgcgtcctctgccagtgcaggc

SEQ ID NO: 1562246 - DNA, 25 bp, Homo sapien
gccgcgtcctctgccagtgcaggca

SEQ ID NO: 1562247 - DNA, 25 bp, Homo sapien
ccgcgtcctctgccagtgcaggcac

SEQ ID NO: 1562248 - DNA, 25 bp, Homo sapien
agtgctccacaagcagcaggtcctg

SEQ ID NO: 1562249 - DNA, 25 bp, Homo sapien
gtgctccacaagcagcaggtcctgg

SEQ ID NO: 1562250 - DNA, 25 bp, Homo sapien
gctccacaagcagcaggtcctgggg

SEQ ID NO: 1562251 - DNA, 25 bp, Homo sapien
ccacaagcagcaggtcctggggact

SEQ ID NO: 1562252 - DNA, 25 bp, Homo sapien
taatggcacgaacttctcaaggaag

SEQ ID NO: 1562253 - DNA, 25 bp, Homo sapien
caaatcttggttgtcacccttgagc

SEQ ID NO: 1562254 - DNA, 25 bp, Homo sapien
aattatttacctctctatgccttgg

SEQ ID NO: 1562255 - DNA, 25 bp, Homo sapien
tatgccttgggatcataatggcacg

SEQ ID NO: 1562256 - DNA, 25 bp, Homo sapien
cattcccagcaagcgcttactatgt

SEQ ID NO: 1562257 - DNA, 25 bp, Homo sapien
actatgtgctagggcattgctgtcc

SEQ ID NO: 1562258 - DNA, 25 bp, Homo sapien
gggcgggccacagatttatgcccaa

SEQ ID NO: 1562259 - DNA, 25 bp, Homo sapien
gctgtccaagagaacgtggccatga

SEQ ID NO: 1562260 - DNA, 25 bp, Homo sapien
gtctgtctcactgcgttgtttaagg

SEQ ID NO: 1562261 - DNA, 25 bp, Homo sapien
gatgtctgtctcactgcgttgttta

SEQ ID NO: 1562262 - DNA, 25 bp, Homo sapien
taaaatgggatgatagatgtctgtc

SEQ ID NO: 1562263 - DNA, 25 bp, Homo sapien
ggatgatagatgtctgtctcactgc

SEQ ID NO: 1562264 - DNA, 25 bp, Homo sapien
gattctggcgttgcctccattctgg

SEQ ID NO: 1562265 - DNA, 25 bp, Homo sapien
tgtgtccaggctatgcatcctctgg

SEQ ID NO: 1562266 - DNA, 25 bp, Homo sapien
tgtcttctcgtccatagccaaggag

SEQ ID NO: 1562267 - DNA, 25 bp, Homo sapien
ccatccatagacagacctggccaga

SEQ ID NO: 1562268 - DNA, 25 bp, Homo sapien
cggcagccgcttggaaaaggaggag

SEQ ID NO: 1562269 - DNA, 25 bp, Homo sapien
tggaaaaggaggaggttttgtcgca

SEQ ID NO: 1562270 - DNA, 25 bp, Homo sapien
cttcggcagccgcttggaaaaggag

SEQ ID NO: 1562271 - DNA, 25 bp, Homo sapien
cagccgcttggaaaaggaggaggtt

SEQ ID NO: 1562272 - DNA, 25 bp, Homo sapien
gaaaacgagttcattccagagtgcc

SEQ ID NO: 1562273 - DNA, 25 bp, Homo sapien
tgaaatcaaagtagcccgcgcactg

SEQ ID NO: 1562274 - DNA, 25 bp, Homo sapien
gaattaaaagaaccggagctgcagg

SEQ ID NO: 1562275 - DNA, 25 bp, Homo sapien
gagagccgcggcatttcctacagat

SEQ ID NO: 1562276 - DNA, 25 bp, Homo sapien
aaaccgaatttcaggtgggatgaga

SEQ ID NO: 1562277 - DNA, 25 bp, Homo sapien
agccactgtggccaatcaattgtag

SEQ ID NO: 1562278 - DNA, 25 bp, Homo sapien
taggctgctcttgtactcctcgctt

SEQ ID NO: 1562279 - DNA, 25 bp, Homo sapien
cgcttcaagtgaaccgtgtgcctcg

SEQ ID NO: 1562280 - DNA, 25 bp, Homo sapien
tttagccacgatggccgccaggcgg

SEQ ID NO: 1562281 - DNA, 25 bp, Homo sapien
gagatggcctcgaccatcaagcacc

SEQ ID NO: 1562282 - DNA, 25 bp, Homo sapien
tggcctcgaccatcaagcaccagga

SEQ ID NO: 1562283 - DNA, 25 bp, Homo sapien
ctgtttagccacgatggccgccagg

SEQ ID NO: 1562284 - DNA, 25 bp, Homo sapien
agaggggccacgagcagcgacttac

SEQ ID NO: 1562285 - DNA, 25 bp, Homo sapien
acagaggggccacgagcagcgactt

SEQ ID NO: 1562286 - DNA, 25 bp, Homo sapien
cagaggggccacgagcagcgactta

SEQ ID NO: 1562287 - DNA, 25 bp, Homo sapien
tggtgaatgttgctcatcactgacc

SEQ ID NO: 1562288 - DNA, 25 bp, Homo sapien
atggtgaatgttgctcatcactgac

SEQ ID NO: 1562289 - DNA, 25 bp, Homo sapien
ccccaaccctggggaagagtggctg

SEQ ID NO: 1562290 - DNA, 25 bp, Homo sapien
ttgagcctggagtccccaaccctgg

SEQ ID NO: 1562291 - DNA, 25 bp, Homo sapien
ttcttgagcctggagtccccaaccc

SEQ ID NO: 1562292 - DNA, 25 bp, Homo sapien
ccaaccctggggaagagtggctggc

SEQ ID NO: 1562293 - DNA, 25 bp, Homo sapien
tgaaaaactagcctaatacataatt

SEQ ID NO: 1562294 - DNA, 25 bp, Homo sapien
gaaaaactagcctaatacataatta

SEQ ID NO: 1562295 - DNA, 25 bp, Homo sapien
atgaaaaactagcctaatacataat

SEQ ID NO: 1562296 - DNA, 25 bp, Homo sapien
cctccagacacagcgcagtacttgc

SEQ ID NO: 1562297 - DNA, 25 bp, Homo sapien
tgagggtcccaccactgcctatgca

SEQ ID NO: 1562298 - DNA, 25 bp, Homo sapien
ggaaaggcttagcagggccgagccg

SEQ ID NO: 1562299 - DNA, 25 bp, Homo sapien
tgcctatgcagtcaccctccagaca

SEQ ID NO: 1562300 - DNA, 25 bp, Homo sapien
ccttcacagcgtacgaccaccacct

SEQ ID NO: 1562301 - DNA, 25 bp, Homo sapien
aatgttgatgccttcacagcgtacg

SEQ ID NO: 1562302 - DNA, 25 bp, Homo sapien
tgccttcacagcgtacgaccaccac

SEQ ID NO: 1562303 - DNA, 25 bp, Homo sapien
ttgatgccttcacagcgtacgacca

SEQ ID NO: 1562304 - DNA, 25 bp, Homo sapien
ggccttctcagaaaccccaagtagc

SEQ ID NO: 1562305 - DNA, 25 bp, Homo sapien
agtgctcctcccaggtcctaactta

SEQ ID NO: 1562306 - DNA, 25 bp, Homo sapien
tcccaacacggctgcaattgctttc

SEQ ID NO: 1562307 - DNA, 25 bp, Homo sapien
gagtgtgaggcctgcccagtctacc

SEQ ID NO: 1562308 - DNA, 25 bp, Homo sapien
cttgcggaggaaagccaggtacttc

SEQ ID NO: 1562309 - DNA, 25 bp, Homo sapien
gcttgcggaggaaagccaggtactt

SEQ ID NO: 1562310 - DNA, 25 bp, Homo sapien
ttgcggaggaaagccaggtacttca

SEQ ID NO: 1562311 - DNA, 25 bp, Homo sapien
ccgcttgcggaggaaagccaggtac

SEQ ID NO: 1562312 - DNA, 25 bp, Homo sapien
ctcgcacggtccgccagaagatgcg

SEQ ID NO: 1562313 - DNA, 25 bp, Homo sapien
tgcggctgggggcccggaagtggta

SEQ ID NO: 1562314 - DNA, 25 bp, Homo sapien
gaagatgcggctgggggcccggaag

SEQ ID NO: 1562315 - DNA, 25 bp, Homo sapien
tcgcacggtccgccagaagatgcgg

SEQ ID NO: 1562316 - DNA, 25 bp, Homo sapien
gatggtagtgcatgtggagtcatct

SEQ ID NO: 1562317 - DNA, 25 bp, Homo sapien
cctcagatggtagtgcatgtggagt

SEQ ID NO: 1562318 - DNA, 25 bp, Homo sapien
tcagatggtagtgcatgtggagtca

SEQ ID NO: 1562319 - DNA, 25 bp, Homo sapien
atggtcgggaaactcgaatgtgagt

SEQ ID NO: 1562320 - DNA, 25 bp, Homo sapien
aggcccagtcagagggcctcataag

SEQ ID NO: 1562321 - DNA, 25 bp, Homo sapien
gggcctcataaggatgcccacccac

SEQ ID NO: 1562322 - DNA, 25 bp, Homo sapien
gagggcctcataaggatgcccaccc

SEQ ID NO: 1562323 - DNA, 25 bp, Homo sapien
gcctcataaggatgcccacccaccc

SEQ ID NO: 1562324 - DNA, 25 bp, Homo sapien
gtcaaacaccttgagacggtccaga

SEQ ID NO: 1562325 - DNA, 25 bp, Homo sapien
aacaccttgagacggtccagagcgg

SEQ ID NO: 1562326 - DNA, 25 bp, Homo sapien
caaacaccttgagacggtccagagc

SEQ ID NO: 1562327 - DNA, 25 bp, Homo sapien
gcggcctggcctcgcttggttttgt

SEQ ID NO: 1562328 - DNA, 25 bp, Homo sapien
aggtaaggccgctgcctgtggggtt

SEQ ID NO: 1562329 - DNA, 25 bp, Homo sapien
ccacaggtaaggccgctgcctgtgg

SEQ ID NO: 1562330 - DNA, 25 bp, Homo sapien
aggtagttgcggaacatcatggacg

SEQ ID NO: 1562331 - DNA, 25 bp, Homo sapien
ctttcatgaggatcaaacaatgtag

SEQ ID NO: 1562332 - DNA, 25 bp, Homo sapien
gatcaaacaatgtaggtagttgcgg

SEQ ID NO: 1562333 - DNA, 25 bp, Homo sapien
caatgtaggtagttgcggaacatca

SEQ ID NO: 1562334 - DNA, 25 bp, Homo sapien
agggaaggaggtcggctggactggc

SEQ ID NO: 1562335 - DNA, 25 bp, Homo sapien
tgagggcagcaggaaccaccatccg

SEQ ID NO: 1562336 - DNA, 25 bp, Homo sapien
ttgagggcagcaggaaccaccatcc

SEQ ID NO: 1562337 - DNA, 25 bp, Homo sapien
ccttgagggcagcaggaaccaccat

SEQ ID NO: 1562338 - DNA, 25 bp, Homo sapien
accttgagggcagcaggaaccacca

SEQ ID NO: 1562339 - DNA, 25 bp, Homo sapien
tggtgcagcgtaagctgggactcac

SEQ ID NO: 1562340 - DNA, 25 bp, Homo sapien
cccaagtagatggtgcagcgtaagc

SEQ ID NO: 1562341 - DNA, 25 bp, Homo sapien
ctcccaagtagatggtgcagcgtaa

SEQ ID NO: 1562342 - DNA, 25 bp, Homo sapien
caagtagatggtgcagcgtaagctg

SEQ ID NO: 1562343 - DNA, 25 bp, Homo sapien
catcagctaagccattggcattgtc

SEQ ID NO: 1562344 - DNA, 25 bp, Homo sapien
tggcattgtcgccattcccacaggg

SEQ ID NO: 1562345 - DNA, 25 bp, Homo sapien
gaccatcgtgagataaggacatcat

SEQ ID NO: 1562346 - DNA, 25 bp, Homo sapien
agggacatccgcagaccatcgtgag

SEQ ID NO: 1562347 - DNA, 25 bp, Homo sapien
gaagttgtaaggatatctaagcccc

SEQ ID NO: 1562348 - DNA, 25 bp, Homo sapien
ctgggaggtgactgacagctgggca

SEQ ID NO: 1562349 - DNA, 25 bp, Homo sapien
gcaggcctgttagaaaagcacccac

SEQ ID NO: 1562350 - DNA, 25 bp, Homo sapien
gctgggcatatcataatgcaactgt

SEQ ID NO: 1562351 - DNA, 25 bp, Homo sapien
agccaacctcgtgagccaggcgccc

SEQ ID NO: 1562352 - DNA, 25 bp, Homo sapien
aacctcgtgagccaggcgccccaga

SEQ ID NO: 1562353 - DNA, 25 bp, Homo sapien
cctcgtgagccaggcgccccagata

SEQ ID NO: 1562354 - DNA, 25 bp, Homo sapien
tccagccaacctcgtgagccaggcg

SEQ ID NO: 1562355 - DNA, 25 bp, Homo sapien
catgagctgtttcttcttccggtag

SEQ ID NO: 1562356 - DNA, 25 bp, Homo sapien
cttcttccggtagtggatcttggct

SEQ ID NO: 1562357 - DNA, 25 bp, Homo sapien
tttcttcttccggtagtggatcttg

SEQ ID NO: 1562358 - DNA, 25 bp, Homo sapien
agctgtttcttcttccggtagtgga

SEQ ID NO: 1562359 - DNA, 25 bp, Homo sapien
cctttgccagttaagagtactctgt

SEQ ID NO: 1562360 - DNA, 25 bp, Homo sapien
ggttgcattgccctcattacatgga

SEQ ID NO: 1562361 - DNA, 25 bp, Homo sapien
ccaagaataagtgcaggtggtggtg

SEQ ID NO: 1562362 - DNA, 25 bp, Homo sapien
tgccctcattacatggactgcatcc

SEQ ID NO: 1562363 - DNA, 25 bp, Homo sapien
cacgttcttctcggcctgtttccgt

SEQ ID NO: 1562364 - DNA, 25 bp, Homo sapien
gttcttctcggcctgtttccgtagc

SEQ ID NO: 1562365 - DNA, 25 bp, Homo sapien
ttctccacgttcttctcggcctgtt

SEQ ID NO: 1562366 - DNA, 25 bp, Homo sapien
tccacgttcttctcggcctgtttcc

SEQ ID NO: 1562367 - DNA, 25 bp, Homo sapien
ttctccgagtgctttcaagcaactt

SEQ ID NO: 1562368 - DNA, 25 bp, Homo sapien
tagggccctccaatcagtcttctgg

SEQ ID NO: 1562369 - DNA, 25 bp, Homo sapien
gcaacttcgggaggcagtgactaag

SEQ ID NO: 1562370 - DNA, 25 bp, Homo sapien
gatagggccctccaatcagtcttct

SEQ ID NO: 1562371 - DNA, 25 bp, Homo sapien
atttatttctgattacaaaatacag

SEQ ID NO: 1562372 - DNA, 25 bp, Homo sapien
caatttatttctgattacaaaatac

SEQ ID NO: 1562373 - DNA, 25 bp, Homo sapien
tatttctgattacaaaatacaggtg

SEQ ID NO: 1562374 - DNA, 25 bp, Homo sapien
tttctgattacaaaatacaggtgag

SEQ ID NO: 1562375 - DNA, 25 bp, Homo sapien
atcgataaggaaacccggacgctgc

SEQ ID NO: 1562376 - DNA, 25 bp, Homo sapien
taaggaaacccggacgctgctgccc

SEQ ID NO: 1562377 - DNA, 25 bp, Homo sapien
tgcgtaatcgataaggaaacccgga

SEQ ID NO: 1562378 - DNA, 25 bp, Homo sapien
caaggccgtgctgcgtttctcctta

SEQ ID NO: 1562379 - DNA, 25 bp, Homo sapien
tccagcccctgcgtaatcgataagg

SEQ ID NO: 1562380 - DNA, 25 bp, Homo sapien
tgcgtttctccttacgtcacttcct

SEQ ID NO: 1562381 - DNA, 25 bp, Homo sapien
gggcagcagcgtccgggtttcctta

SEQ ID NO: 1562382 - DNA, 25 bp, Homo sapien
gcagcgtccgggtttccttatcgat

SEQ ID NO: 1562383 - DNA, 25 bp, Homo sapien
tgacgtaaggagaaacgcagcacgg

SEQ ID NO: 1562384 - DNA, 25 bp, Homo sapien
aggaagtgacgtaaggagaaacgca

SEQ ID NO: 1562385 - DNA, 25 bp, Homo sapien
taaggagaaacgcagcacggccttg

SEQ ID NO: 1562386 - DNA, 25 bp, Homo sapien
cgggtttccttatcgattacgcagg

SEQ ID NO: 1562387 - DNA, 25 bp, Homo sapien
tctgtggaaacggactcctaagggc

SEQ ID NO: 1562388 - DNA, 25 bp, Homo sapien
gggagcctgccgtctggtatttaat

SEQ ID NO: 1562389 - DNA, 25 bp, Homo sapien
gaatgatcctcgctgaaaggtgtcc

SEQ ID NO: 1562390 - DNA, 25 bp, Homo sapien
tgaattttgcaatccctgagaggcc

SEQ ID NO: 1562391 - DNA, 25 bp, Homo sapien
gacgccggcgctttgcaagtaaatg

SEQ ID NO: 1562392 - DNA, 25 bp, Homo sapien
tccgggcgtccgtgattattttcta

SEQ ID NO: 1562393 - DNA, 25 bp, Homo sapien
tacatttacttgcaaagcgccggcg

SEQ ID NO: 1562394 - DNA, 25 bp, Homo sapien
gcctctcagggattgcaaaattcat

SEQ ID NO: 1562395 - DNA, 25 bp, Homo sapien
aattaaataccagacggcaggctcc

SEQ ID NO: 1562396 - DNA, 25 bp, Homo sapien
cagaattacccctgaagaccggaga

SEQ ID NO: 1562397 - DNA, 25 bp, Homo sapien
tgagctgctaagtttgaagccggca

SEQ ID NO: 1562398 - DNA, 25 bp, Homo sapien
tagaaaataatcacggacgcccgga

SEQ ID NO: 1562399 - DNA, 25 bp, Homo sapien
aaactggcaaggagaagctcccgcg

SEQ ID NO: 1562400 - DNA, 25 bp, Homo sapien
gtgcctaccaaaagcagccgaccat

SEQ ID NO: 1562401 - DNA, 25 bp, Homo sapien
actgagcgtgcctaccaaaagcagc

SEQ ID NO: 1562402 - DNA, 25 bp, Homo sapien
tcctgctgggagaaactggcaagga

SEQ ID NO: 1562403 - DNA, 25 bp, Homo sapien
gcagccgaccatctttcaaaacaag

SEQ ID NO: 1562404 - DNA, 25 bp, Homo sapien
tcaaaacaagaagagggtcctgctg

SEQ ID NO: 1562405 - DNA, 25 bp, Homo sapien
cgcgggagcttctccttgccagttt

SEQ ID NO: 1562406 - DNA, 25 bp, Homo sapien
tccttgccagtttctcccagcagga

SEQ ID NO: 1562407 - DNA, 25 bp, Homo sapien
cagcaggaccctcttcttgttttga

SEQ ID NO: 1562408 - DNA, 25 bp, Homo sapien
ttgttttgaaagatggtcggctgct

SEQ ID NO: 1562409 - DNA, 25 bp, Homo sapien
gctgcttttggtaggcacgctcagt

SEQ ID NO: 1562410 - DNA, 25 bp, Homo sapien
cggctgcttttggtaggcacgctca

SEQ ID NO: 1562411 - DNA, 25 bp, Homo sapien
tactacaagaacatcggtctgggct

SEQ ID NO: 1562412 - DNA, 25 bp, Homo sapien
ctacaagaacatcggtctgggcttc

SEQ ID NO: 1562413 - DNA, 25 bp, Homo sapien
catcggtctgggcttcaagacaccc

SEQ ID NO: 1562414 - DNA, 25 bp, Homo sapien
actacaagaacatcggtctgggctt

SEQ ID NO: 1562415 - DNA, 25 bp, Homo sapien
tctgggcttcaagacacccaaggag

SEQ ID NO: 1562416 - DNA, 25 bp, Homo sapien
gtactacaagaacatcggtctgggc

SEQ ID NO: 1562417 - DNA, 25 bp, Homo sapien
aagcccagaccgatgttcttgtagt

SEQ ID NO: 1562418 - DNA, 25 bp, Homo sapien
gaagcccagaccgatgttcttgtag

SEQ ID NO: 1562419 - DNA, 25 bp, Homo sapien
gggtgtcttgaagcccagaccgatg

SEQ ID NO: 1562420 - DNA, 25 bp, Homo sapien
ctccttgggtgtcttgaagcccaga

SEQ ID NO: 1562421 - DNA, 25 bp, Homo sapien
agcccagaccgatgttcttgtagta

SEQ ID NO: 1562422 - DNA, 25 bp, Homo sapien
gcccagaccgatgttcttgtagtac

SEQ ID NO: 1562423 - DNA, 25 bp, Homo sapien
cctcagaagaaagaaggggaacctg

SEQ ID NO: 1562424 - DNA, 25 bp, Homo sapien
ctcagaagaaagaaggggaacctgg

SEQ ID NO: 1562425 - DNA, 25 bp, Homo sapien
tcagaagaaagaaggggaacctggc

SEQ ID NO: 1562426 - DNA, 25 bp, Homo sapien
cagaagaaagaaggggaacctggcg

SEQ ID NO: 1562427 - DNA, 25 bp, Homo sapien
caggttccccttctttcttctgagg

SEQ ID NO: 1562428 - DNA, 25 bp, Homo sapien
ccaggttccccttctttcttctgag

SEQ ID NO: 1562429 - DNA, 25 bp, Homo sapien
cgccaggttccccttctttcttctg

SEQ ID NO: 1562430 - DNA, 25 bp, Homo sapien
gccaggttccccttctttcttctga

SEQ ID NO: 1562431 - DNA, 25 bp, Homo sapien
caaggctcactcctttatctttcct

SEQ ID NO: 1562432 - DNA, 25 bp, Homo sapien
tgggaattgtagttgcttccctgag

SEQ ID NO: 1562433 - DNA, 25 bp, Homo sapien
gtgtgcccacgacgagttgccctgc

SEQ ID NO: 1562434 - DNA, 25 bp, Homo sapien
ggctcactcctttatctttcctatc

SEQ ID NO: 1562435 - DNA, 25 bp, Homo sapien
agttgccctgcctgcatctaagtgg

SEQ ID NO: 1562436 - DNA, 25 bp, Homo sapien
gcacgtgtgcccacgacgagttgcc

SEQ ID NO: 1562437 - DNA, 25 bp, Homo sapien
gataggaaagataaaggagtgagcc

SEQ ID NO: 1562438 - DNA, 25 bp, Homo sapien
gcagggcaactcgtcgtgggcacac

SEQ ID NO: 1562439 - DNA, 25 bp, Homo sapien
ggagtgagccttgggcgggcggttc

SEQ ID NO: 1562440 - DNA, 25 bp, Homo sapien
ccacttagatgcaggcagggcaact

SEQ ID NO: 1562441 - DNA, 25 bp, Homo sapien
ggcaactcgtcgtgggcacacgtgc

SEQ ID NO: 1562442 - DNA, 25 bp, Homo sapien
ctcagggaagcaactacaattccca

SEQ ID NO: 1562443 - DNA, 25 bp, Homo sapien
gctattgagggcacctacattgaca

SEQ ID NO: 1562444 - DNA, 25 bp, Homo sapien
taatgtgtccattcgagggcggatc

SEQ ID NO: 1562445 - DNA, 25 bp, Homo sapien
gtgtccattcgagggcggatcctct

SEQ ID NO: 1562446 - DNA, 25 bp, Homo sapien
cctacattgacaagaaatgcccctt

SEQ ID NO: 1562447 - DNA, 25 bp, Homo sapien
aatgccccttcactggtaatgtgtc

SEQ ID NO: 1562448 - DNA, 25 bp, Homo sapien
aatgtgtccattcgagggcggatcc

SEQ ID NO: 1562449 - DNA, 25 bp, Homo sapien
agaggatccgccctcgaatggacac

SEQ ID NO: 1562450 - DNA, 25 bp, Homo sapien
gaatggacacattaccagtgaaggg

SEQ ID NO: 1562451 - DNA, 25 bp, Homo sapien
ttcttgtcaatgtaggtgccctcaa

SEQ ID NO: 1562452 - DNA, 25 bp, Homo sapien
gatccgccctcgaatggacacatta

SEQ ID NO: 1562453 - DNA, 25 bp, Homo sapien
tgtcaatgtaggtgccctcaatagc

SEQ ID NO: 1562454 - DNA, 25 bp, Homo sapien
gaggatccgccctcgaatggacaca

SEQ ID NO: 1562455 - DNA, 25 bp, Homo sapien
tgcgggagttactggtgtctggggc

SEQ ID NO: 1562456 - DNA, 25 bp, Homo sapien
agtgcgggagttactggtgtctggg

SEQ ID NO: 1562457 - DNA, 25 bp, Homo sapien
gtaagtgcgggagttactggtgtct

SEQ ID NO: 1562458 - DNA, 25 bp, Homo sapien
gcgggagttactggtgtctggggcc

SEQ ID NO: 1562459 - DNA, 25 bp, Homo sapien
aagtgcgggagttactggtgtctgg

SEQ ID NO: 1562460 - DNA, 25 bp, Homo sapien
taagtgcgggagttactggtgtctg

SEQ ID NO: 1562461 - DNA, 25 bp, Homo sapien
agacaccagtaactcccgcacttac

SEQ ID NO: 1562462 - DNA, 25 bp, Homo sapien
cccagacaccagtaactcccgcact

SEQ ID NO: 1562463 - DNA, 25 bp, Homo sapien
gccccagacaccagtaactcccgca

SEQ ID NO: 1562464 - DNA, 25 bp, Homo sapien
cagacaccagtaactcccgcactta

SEQ ID NO: 1562465 - DNA, 25 bp, Homo sapien
ccagacaccagtaactcccgcactt

SEQ ID NO: 1562466 - DNA, 25 bp, Homo sapien
ggccccagacaccagtaactcccgc

SEQ ID NO: 1562467 - DNA, 25 bp, Homo sapien
tgaaatactgaaagaagggtcttgg

SEQ ID NO: 1562468 - DNA, 25 bp, Homo sapien
ggcctgaaatactgaaagaagggtc

SEQ ID NO: 1562469 - DNA, 25 bp, Homo sapien
ggtggttaggaatgcaaacttgtag

SEQ ID NO: 1562470 - DNA, 25 bp, Homo sapien
agttactggtgtctggggcctgaaa

SEQ ID NO: 1562471 - DNA, 25 bp, Homo sapien
ccagactcctgggtcctgggtgaga

SEQ ID NO: 1562472 - DNA, 25 bp, Homo sapien
taagtgcgggagttactggtgtctg

SEQ ID NO: 1562473 - DNA, 25 bp, Homo sapien
gacccaggagtctgggccccaagac

SEQ ID NO: 1562474 - DNA, 25 bp, Homo sapien
caagacccttctttcagtatttcag

SEQ ID NO: 1562475 - DNA, 25 bp, Homo sapien
cagacaccagtaactcccgcactta

SEQ ID NO: 1562476 - DNA, 25 bp, Homo sapien
ttcagtatttcaggccccagacacc

SEQ ID NO: 1562477 - DNA, 25 bp, Homo sapien
tctcacccaggacccaggagtctgg

SEQ ID NO: 1562478 - DNA, 25 bp, Homo sapien
tacaagtttgcattcctaaccaccc

SEQ ID NO: 1562479 - DNA, 25 bp, Homo sapien
agcatgccctgggttacctatggcc

SEQ ID NO: 1562480 - DNA, 25 bp, Homo sapien
tggtaaaactgatgccggaaatggg

SEQ ID NO: 1562481 - DNA, 25 bp, Homo sapien
gagaaagccacttggtaaaactgat

SEQ ID NO: 1562482 - DNA, 25 bp, Homo sapien
ttttcacgatggtcttcagatgccc

SEQ ID NO: 1562483 - DNA, 25 bp, Homo sapien
catgggacctgacctatgatcggcc

SEQ ID NO: 1562484 - DNA, 25 bp, Homo sapien
tcttcagatgcccacgtgggcactg

SEQ ID NO: 1562485 - DNA, 25 bp, Homo sapien
atcagttttaccaagtggctttctc

SEQ ID NO: 1562486 - DNA, 25 bp, Homo sapien
cgatcataggtcaggtcccatggga

SEQ ID NO: 1562487 - DNA, 25 bp, Homo sapien
tctgaagaccatcgtgaaaacaaac

SEQ ID NO: 1562488 - DNA, 25 bp, Homo sapien
cagtgcccacgtgggcatctgaaga

SEQ ID NO: 1562489 - DNA, 25 bp, Homo sapien
cccatttccggcatcagttttacca

SEQ ID NO: 1562490 - DNA, 25 bp, Homo sapien
agagggccataggtaacccagggca

SEQ ID NO: 1562491 - DNA, 25 bp, Homo sapien
caagtacaaccgcttcgagaagcgc

SEQ ID NO: 1562492 - DNA, 25 bp, Homo sapien
gactatctgcactacatccgcaagt

SEQ ID NO: 1562493 - DNA, 25 bp, Homo sapien
ggaccattgtcatccgccgagacta

SEQ ID NO: 1562494 - DNA, 25 bp, Homo sapien
ttcgagaagcgccacaagaacatgt

SEQ ID NO: 1562495 - DNA, 25 bp, Homo sapien
tccgccgagactatctgcactacat

SEQ ID NO: 1562496 - DNA, 25 bp, Homo sapien
aagaacatgtctgtacacctgtccc

SEQ ID NO: 1562497 - DNA, 25 bp, Homo sapien
acatgttcttgtggcgcttctcgaa

SEQ ID NO: 1562498 - DNA, 25 bp, Homo sapien
tgcagatagtctcggcggatgacaa

SEQ ID NO: 1562499 - DNA, 25 bp, Homo sapien
tacttgcggatgtagtgcagatagt

SEQ ID NO: 1562500 - DNA, 25 bp, Homo sapien
tagtctcggcggatgacaatggtcc

SEQ ID NO: 1562501 - DNA, 25 bp, Homo sapien
cggatgtagtgcagatagtctcggc

SEQ ID NO: 1562502 - DNA, 25 bp, Homo sapien
ttctcgaagcggttgtacttgcgga

SEQ ID NO: 1562503 - DNA, 25 bp, Homo sapien
tatgttcttcagaatcaaagcgttc

SEQ ID NO: 1562504 - DNA, 25 bp, Homo sapien
caatttaaggccaactgagggaggg

SEQ ID NO: 1562505 - DNA, 25 bp, Homo sapien
gccccagaatctcaggatttgtata

SEQ ID NO: 1562506 - DNA, 25 bp, Homo sapien
caaagcgttctacagggtgaatatc

SEQ ID NO: 1562507 - DNA, 25 bp, Homo sapien
gccttcagattccagatcggaccaa

SEQ ID NO: 1562508 - DNA, 25 bp, Homo sapien
cagtggcccatcaggttgctcaggc

SEQ ID NO: 1562509 - DNA, 25 bp, Homo sapien
gaacgctttgattctgaagaacata

SEQ ID NO: 1562510 - DNA, 25 bp, Homo sapien
gcctgagcaacctgatgggccactg

SEQ ID NO: 1562511 - DNA, 25 bp, Homo sapien
ggccttaaattggtccgatctggaa

SEQ ID NO: 1562512 - DNA, 25 bp, Homo sapien
cctccctcagttggccttaaattgg

SEQ ID NO: 1562513 - DNA, 25 bp, Homo sapien
gatattcaccctgtagaacgctttg

SEQ ID NO: 1562514 - DNA, 25 bp, Homo sapien
tggtccgatctggaatctgaaggct

SEQ ID NO: 1562515 - DNA, 25 bp, Homo sapien
cagtgtgggtgccagatgacagcca

SEQ ID NO: 1562516 - DNA, 25 bp, Homo sapien
gcagctgatattggtggccctctgg

SEQ ID NO: 1562517 - DNA, 25 bp, Homo sapien
tgacagccaagtataaccagaatgg

SEQ ID NO: 1562518 - DNA, 25 bp, Homo sapien
tgtcataccagatgggaacctcaga

SEQ ID NO: 1562519 - DNA, 25 bp, Homo sapien
tgatgctgagcgataagggacctgt

SEQ ID NO: 1562520 - DNA, 25 bp, Homo sapien
tagttagagcttatcacgtaccagg

SEQ ID NO: 1562521 - DNA, 25 bp, Homo sapien
tctgaggttcccatctggtatgaca

SEQ ID NO: 1562522 - DNA, 25 bp, Homo sapien
acaggtcccttatcgctcagcatca

SEQ ID NO: 1562523 - DNA, 25 bp, Homo sapien
cacctggtacgtgataagctctaac

SEQ ID NO: 1562524 - DNA, 25 bp, Homo sapien
cagagggccaccaatatcagctgcc

SEQ ID NO: 1562525 - DNA, 25 bp, Homo sapien
tacttggctgtcatctggcacccac

SEQ ID NO: 1562526 - DNA, 25 bp, Homo sapien
gaaacttcttcaataccagcgtgac

SEQ ID NO: 1562527 - DNA, 25 bp, Homo sapien
acaggttgaattggcgagtagagct

SEQ ID NO: 1562528 - DNA, 25 bp, Homo sapien
ggtggcccctcctgaggacatggcc

SEQ ID NO: 1562529 - DNA, 25 bp, Homo sapien
gcagagagcctttagcctggtgaag

SEQ ID NO: 1562530 - DNA, 25 bp, Homo sapien
tacagcgttgagcttggtgcttggc

SEQ ID NO: 1562531 - DNA, 25 bp, Homo sapien
tggcacaaaacttgtacgaaaggag

SEQ ID NO: 1562532 - DNA, 25 bp, Homo sapien
ggtgcttggcacaaaacttgtacga

SEQ ID NO: 1562533 - DNA, 25 bp, Homo sapien
ccttcaccaggctaaaggctctctg

SEQ ID NO: 1562534 - DNA, 25 bp, Homo sapien
tcgtacaagttttgtgccaagcacc

SEQ ID NO: 1562535 - DNA, 25 bp, Homo sapien
tgccaagcaccaagctcaacgctgt

SEQ ID NO: 1562536 - DNA, 25 bp, Homo sapien
gcaccaagctcaacgctgtacacag

SEQ ID NO: 1562537 - DNA, 25 bp, Homo sapien
agctctactcgccaattcaacctgt

SEQ ID NO: 1562538 - DNA, 25 bp, Homo sapien
ccaggctaaaggctctctgcttcgg

SEQ ID NO: 1562539 - DNA, 25 bp, Homo sapien
aagacagtgcgcttcaacgtgctca

SEQ ID NO: 1562540 - DNA, 25 bp, Homo sapien
caaggctgccggcaccaagaagcag

SEQ ID NO: 1562541 - DNA, 25 bp, Homo sapien
tcggtgacatcgtcacagtgggcga

SEQ ID NO: 1562542 - DNA, 25 bp, Homo sapien
ggacgtccagatcggtgacatcgtc

SEQ ID NO: 1562543 - DNA, 25 bp, Homo sapien
cagtgcgcttcaacgtgctcaaggt

SEQ ID NO: 1562544 - DNA, 25 bp, Homo sapien
agtgccggcctctgagcaagacagt

SEQ ID NO: 1562545 - DNA, 25 bp, Homo sapien
actgtcttgctcagaggccggcact

SEQ ID NO: 1562546 - DNA, 25 bp, Homo sapien
tcgcccactgtgacgatgtcaccga

SEQ ID NO: 1562547 - DNA, 25 bp, Homo sapien
accttgagcacgttgaagcgcactg

SEQ ID NO: 1562548 - DNA, 25 bp, Homo sapien
tcttggtgccggcagccttggtgac

SEQ ID NO: 1562549 - DNA, 25 bp, Homo sapien
tgagcacgttgaagcgcactgtctt

SEQ ID NO: 1562550 - DNA, 25 bp, Homo sapien
gacgatgtcaccgatctggacgtcc

SEQ ID NO: 1562551 - DNA, 25 bp, Homo sapien
ccgctccccacaatgaaataaagtt

SEQ ID NO: 1562552 - DNA, 25 bp, Homo sapien
cgctccccacaatgaaataaagtta

SEQ ID NO: 1562553 - DNA, 25 bp, Homo sapien
ctccccacaatgaaataaagttatt

SEQ ID NO: 1562554 - DNA, 25 bp, Homo sapien
gctccccacaatgaaataaagttat

SEQ ID NO: 1562555 - DNA, 25 bp, Homo sapien
aactttatttcattgtggggagcgg

SEQ ID NO: 1562556 - DNA, 25 bp, Homo sapien
ataactttatttcattgtggggagc

SEQ ID NO: 1562557 - DNA, 25 bp, Homo sapien
aataactttatttcattgtggggag

SEQ ID NO: 1562558 - DNA, 25 bp, Homo sapien
taactttatttcattgtggggagcg

SEQ ID NO: 1562559 - DNA, 25 bp, Homo sapien
tgtgtttacaacaacagcccggctc

SEQ ID NO: 1562560 - DNA, 25 bp, Homo sapien
ggagagacgcataaaagccgcagca

SEQ ID NO: 1562561 - DNA, 25 bp, Homo sapien
caccagaggatatgtgggacccgaa

SEQ ID NO: 1562562 - DNA, 25 bp, Homo sapien
taaaggtcttggctttagcctgggc

SEQ ID NO: 1562563 - DNA, 25 bp, Homo sapien
taaggctgattacctggcgttgcgc

SEQ ID NO: 1562564 - DNA, 25 bp, Homo sapien
tactttgcgcatcacacagaggtgg

SEQ ID NO: 1562565 - DNA, 25 bp, Homo sapien
ccaatgctctggtaaaggcgcggaa

SEQ ID NO: 1562566 - DNA, 25 bp, Homo sapien
tttctgcgactcagggtggcgtccc

SEQ ID NO: 1562567 - DNA, 25 bp, Homo sapien
gagacgccccaacaatcagggagga

SEQ ID NO: 1562568 - DNA, 25 bp, Homo sapien
cctggtgcccaactaggcgtgtgtg

SEQ ID NO: 1562569 - DNA, 25 bp, Homo sapien
tcaaataacctgtgggcagggtgca

SEQ ID NO: 1562570 - DNA, 25 bp, Homo sapien
ttacacttcacagccagacaacagg

SEQ ID NO: 1562571 - DNA, 25 bp, Homo sapien
aggaggctgcagcaatgatggccat

SEQ ID NO: 1562572 - DNA, 25 bp, Homo sapien
tgtctgccgctcagggaattcttga

SEQ ID NO: 1562573 - DNA, 25 bp, Homo sapien
ctagcgctcgctgttaatcaaaatc

SEQ ID NO: 1562574 - DNA, 25 bp, Homo sapien
tgcctccggagtccacaacttggag

SEQ ID NO: 1562575 - DNA, 25 bp, Homo sapien
tttttactttgagggtgtctgccgc

SEQ ID NO: 1562576 - DNA, 25 bp, Homo sapien
ttcccttcagcctcgctcccttcct

SEQ ID NO: 1562577 - DNA, 25 bp, Homo sapien
tcccttcagcctcgctcccttcctg

SEQ ID NO: 1562578 - DNA, 25 bp, Homo sapien
cccttcagcctcgctcccttcctgc

SEQ ID NO: 1562579 - DNA, 25 bp, Homo sapien
gttcccttcagcctcgctcccttcc

SEQ ID NO: 1562580 - DNA, 25 bp, Homo sapien
cacccctgaactggatctcagttgg

SEQ ID NO: 1562581 - DNA, 25 bp, Homo sapien
gaactttcacccctgaactggatct

SEQ ID NO: 1562582 - DNA, 25 bp, Homo sapien
cctgaactggatctcagttggttaa

SEQ ID NO: 1562583 - DNA, 25 bp, Homo sapien
ctgaagaactttcacccctgaactg

SEQ ID NO: 1562584 - DNA, 25 bp, Homo sapien
ggtccagactgacaacaatgccctc

SEQ ID NO: 1562585 - DNA, 25 bp, Homo sapien
tcggtccagactgacaacaatgccc

SEQ ID NO: 1562586 - DNA, 25 bp, Homo sapien
gactgacaacaatgccctcctcgta

SEQ ID NO: 1562587 - DNA, 25 bp, Homo sapien
aggaggggctctgcgggctcggtcc

SEQ ID NO: 1562588 - DNA, 25 bp, Homo sapien
cagcgcccagggctgaggccgcggg

SEQ ID NO: 1562589 - DNA, 25 bp, Homo sapien
agaaagagcaggagccccagcgccc

SEQ ID NO: 1562590 - DNA, 25 bp, Homo sapien
gcccagggctgaggccgcgggaccc

SEQ ID NO: 1562591 - DNA, 25 bp, Homo sapien
gcgcccagggctgaggccgcgggac

SEQ ID NO: 1562592 - DNA, 25 bp, Homo sapien
aggcccagcaggagacgttgagaaa

SEQ ID NO: 1562593 - DNA, 25 bp, Homo sapien
aacagacacaagaggcgacaggtgg

SEQ ID NO: 1562594 - DNA, 25 bp, Homo sapien
ggaactagactgcagtgggacagat

SEQ ID NO: 1562595 - DNA, 25 bp, Homo sapien
ttaattgagcggagaaggcagcgcc

SEQ ID NO: 1562596 - DNA, 25 bp, Homo sapien
tcgccccgcaggctattgtagctca

SEQ ID NO: 1562597 - DNA, 25 bp, Homo sapien
gcaggcgaggacaccgcggtaaggt

SEQ ID NO: 1562598 - DNA, 25 bp, Homo sapien
agccagccggacacccagaaggcag

SEQ ID NO: 1562599 - DNA, 25 bp, Homo sapien
gacaccgcggtaaggtggtacagga

SEQ ID NO: 1562600 - DNA, 25 bp, Homo sapien
tctccttgatcctcagatctgtggt

SEQ ID NO: 1562601 - DNA, 25 bp, Homo sapien
ttctccttgatcctcagatctgtgg

SEQ ID NO: 1562602 - DNA, 25 bp, Homo sapien
caggtaagcggggccccggagcatg

SEQ ID NO: 1562603 - DNA, 25 bp, Homo sapien
ccggagcatggacccggccccttgc

SEQ ID NO: 1562604 - DNA, 25 bp, Homo sapien
ctggggcgcccaaacacaggtaagc

SEQ ID NO: 1562605 - DNA, 25 bp, Homo sapien
cacaggtaagcggggccccggagca

SEQ ID NO: 1562606 - DNA, 25 bp, Homo sapien
ggcaccgaggtgttgtcagggccca

SEQ ID NO: 1562607 - DNA, 25 bp, Homo sapien
tcatgaactcctcgccgttcagggc

SEQ ID NO: 1562608 - DNA, 25 bp, Homo sapien
gcttgaggtcgaaattcatgaactc

SEQ ID NO: 1562609 - DNA, 25 bp, Homo sapien
tgccaccgctgactgatagccaggg

SEQ ID NO: 1562610 - DNA, 25 bp, Homo sapien
caggtgccctgcttgaggtcgaaat

SEQ ID NO: 1562611 - DNA, 25 bp, Homo sapien
cactccaggtttccgcggcccctct

SEQ ID NO: 1562612 - DNA, 25 bp, Homo sapien
tgggcaacatagtgagacaccgtgt

SEQ ID NO: 1562613 - DNA, 25 bp, Homo sapien
agaatcgctggagcctaggagttca

SEQ ID NO: 1562614 - DNA, 25 bp, Homo sapien
ggagaatcgctggagcctaggagtt

SEQ ID NO: 1562615 - DNA, 25 bp, Homo sapien
agaccagcctgggcaacatagtgag

SEQ ID NO: 1562616 - DNA, 25 bp, Homo sapien
aatgaatatctgtgcacatccccag

SEQ ID NO: 1562617 - DNA, 25 bp, Homo sapien
ctggtatctatctttgtccagcagc

SEQ ID NO: 1562618 - DNA, 25 bp, Homo sapien
cacttggaatgaatatctgtgcaca

SEQ ID NO: 1562619 - DNA, 25 bp, Homo sapien
ccccagctggtatctatctttgtcc

SEQ ID NO: 1562620 - DNA, 25 bp, Homo sapien
gatgtgcgtgaaattcaaaaaacca

SEQ ID NO: 1562621 - DNA, 25 bp, Homo sapien
ttaccaaagcttgatgtgaagtggg

SEQ ID NO: 1562622 - DNA, 25 bp, Homo sapien
tctcagtgatgggatgctcgcttcc

SEQ ID NO: 1562623 - DNA, 25 bp, Homo sapien
cactgtgatgtctgagatttaccaa

SEQ ID NO: 1562624 - DNA, 25 bp, Homo sapien
taaatgcccttacctagtagagtta

SEQ ID NO: 1562625 - DNA, 25 bp, Homo sapien
tgggaacaaaaactggacatctgat

SEQ ID NO: 1562626 - DNA, 25 bp, Homo sapien
ggcacggtgactcccgcactttggg

SEQ ID NO: 1562627 - DNA, 25 bp, Homo sapien
gacttatcaacaaaacagtctggct

SEQ ID NO: 1562628 - DNA, 25 bp, Homo sapien
gccataaaaattgaaccagaatctg

SEQ ID NO: 1562629 - DNA, 25 bp, Homo sapien
ttgccataaaaattgaaccagaatc

SEQ ID NO: 1562630 - DNA, 25 bp, Homo sapien
accaagcttctagatggagctgctc

SEQ ID NO: 1562631 - DNA, 25 bp, Homo sapien
gaaccagaatctgaccaagcttcta

SEQ ID NO: 1562632 - DNA, 25 bp, Homo sapien
gatttcagcaactgcctaggactgg

SEQ ID NO: 1562633 - DNA, 25 bp, Homo sapien
gcctctctggcaagtcggcagaatt

SEQ ID NO: 1562634 - DNA, 25 bp, Homo sapien
caatcgtgggtcttggctgggatct

SEQ ID NO: 1562635 - DNA, 25 bp, Homo sapien
gagtccaaggctacatggcgctatg

SEQ ID NO: 1562636 - DNA, 25 bp, Homo sapien
gctgcagtgaactctaatcccgcta

SEQ ID NO: 1562637 - DNA, 25 bp, Homo sapien
agtgaactctaatcccgctactgca

SEQ ID NO: 1562638 - DNA, 25 bp, Homo sapien
gcagtgaactctaatcccgctactg

SEQ ID NO: 1562639 - DNA, 25 bp, Homo sapien
tgcagtgaactctaatcccgctact

SEQ ID NO: 1562640 - DNA, 25 bp, Homo sapien
aattgaagtcgataaactgaacttc

SEQ ID NO: 1562641 - DNA, 25 bp, Homo sapien
ataaattgaagtcgataaactgaac

SEQ ID NO: 1562642 - DNA, 25 bp, Homo sapien
ttatgatcacacctgggtatagcca

SEQ ID NO: 1562643 - DNA, 25 bp, Homo sapien
gttatgatcacacctgggtatagcc

SEQ ID NO: 1562644 - DNA, 25 bp, Homo sapien
ttcagaactcttaaacataatatta

SEQ ID NO: 1562645 - DNA, 25 bp, Homo sapien
cgaaggtgtcccctcaagatgtcac

SEQ ID NO: 1562646 - DNA, 25 bp, Homo sapien
gaaagaggcctccatgtttgcactg

SEQ ID NO: 1562647 - DNA, 25 bp, Homo sapien
aggcagacaggcctaagtcgcgagc

SEQ ID NO: 1562648 - DNA, 25 bp, Homo sapien
gtgctaaccgcagataatacagtgg

SEQ ID NO: 1562649 - DNA, 25 bp, Homo sapien
cacaatgcagcagtagtggtgctca

SEQ ID NO: 1562650 - DNA, 25 bp, Homo sapien
cattccgcaggaaccgaagttgcag

SEQ ID NO: 1562651 - DNA, 25 bp, Homo sapien
aaggcgctgcaggtaagcacggaaa

SEQ ID NO: 1562652 - DNA, 25 bp, Homo sapien
cttttgactgttagtgacgacgagg

SEQ ID NO: 1562653 - DNA, 25 bp, Homo sapien
tggccatggtagttaacagctcttc

SEQ ID NO: 1562654 - DNA, 25 bp, Homo sapien
agtgagacaaggcaacgggaaacca

SEQ ID NO: 1562655 - DNA, 25 bp, Homo sapien
tcaaggcagtcagattcaaggaggt

SEQ ID NO: 1562656 - DNA, 25 bp, Homo sapien
cgggcatagcagacaacgaatggtc

SEQ ID NO: 1562657 - DNA, 25 bp, Homo sapien
gatctgggcagactgcccccaggtt

SEQ ID NO: 1562658 - DNA, 25 bp, Homo sapien
cccaggttggacgtaagaaccagct

SEQ ID NO: 1562659 - DNA, 25 bp, Homo sapien
ccggcaatggatcagcagcggcaag

SEQ ID NO: 1562660 - DNA, 25 bp, Homo sapien
ggccgcggtcacaccggcaatggat

SEQ ID NO: 1562661 - DNA, 25 bp, Homo sapien
agcctcggagattccagcaccaagt

SEQ ID NO: 1562662 - DNA, 25 bp, Homo sapien
tgcagccagagaacgctgtgagatg

SEQ ID NO: 1562663 - DNA, 25 bp, Homo sapien
ctccaccccacccagtcaggacaca

SEQ ID NO: 1562664 - DNA, 25 bp, Homo sapien
tcaggacacagaactggggcgctcc

SEQ ID NO: 1562665 - DNA, 25 bp, Homo sapien
agcacggaggacttggctggagatt

SEQ ID NO: 1562666 - DNA, 25 bp, Homo sapien
cgagcacggaggacttggctggaga

SEQ ID NO: 1562667 - DNA, 25 bp, Homo sapien
gagcacggaggacttggctggagat

SEQ ID NO: 1562668 - DNA, 25 bp, Homo sapien
cacgagcacggaggacttggctgga

SEQ ID NO: 1562669 - DNA, 25 bp, Homo sapien
ccgtgagtagcaagacaccgatgac

SEQ ID NO: 1562670 - DNA, 25 bp, Homo sapien
acagccgctgccgtgagtagcaaga

SEQ ID NO: 1562671 - DNA, 25 bp, Homo sapien
gctgccgtgagtagcaagacaccga

SEQ ID NO: 1562672 - DNA, 25 bp, Homo sapien
tccacaacagagctcctcctacagc

SEQ ID NO: 1562673 - DNA, 25 bp, Homo sapien
tctgactggcgtcccccatttgtgt

SEQ ID NO: 1562674 - DNA, 25 bp, Homo sapien
cagaatctctgaggcgctctgggtc

SEQ ID NO: 1562675 - DNA, 25 bp, Homo sapien
ggtctgactggcgtcccccatttgt

SEQ ID NO: 1562676 - DNA, 25 bp, Homo sapien
tgggtctgactggcgtcccccattt

SEQ ID NO: 1562677 - DNA, 25 bp, Homo sapien
tgtcgtctccacgaagggagatcca

SEQ ID NO: 1562678 - DNA, 25 bp, Homo sapien
cgtctccacgaagggagatccaagg

SEQ ID NO: 1562679 - DNA, 25 bp, Homo sapien
cccggtgtcgtctccacgaagggag

SEQ ID NO: 1562680 - DNA, 25 bp, Homo sapien
ggtgtcgtctccacgaagggagatc

SEQ ID NO: 1562681 - DNA, 25 bp, Homo sapien
aaatcagcatcctgggcctcccctg

SEQ ID NO: 1562682 - DNA, 25 bp, Homo sapien
agcatcctgggcctcccctggggtg

SEQ ID NO: 1562683 - DNA, 25 bp, Homo sapien
ttcaaatcagcatcctgggcctccc

SEQ ID NO: 1562684 - DNA, 25 bp, Homo sapien
aatcagcatcctgggcctcccctgg

SEQ ID NO: 1562685 - DNA, 25 bp, Homo sapien
caggcggtggctggaatcacattta

SEQ ID NO: 1562686 - DNA, 25 bp, Homo sapien
tcaggcggtggctggaatcacattt

SEQ ID NO: 1562687 - DNA, 25 bp, Homo sapien
aggcggtggctggaatcacatttac

SEQ ID NO: 1562688 - DNA, 25 bp, Homo sapien
caggaggtctcacagcatgaaaggg

SEQ ID NO: 1562689 - DNA, 25 bp, Homo sapien
gcttttagcagtcggaatggcggat

SEQ ID NO: 1562690 - DNA, 25 bp, Homo sapien
ctccagagggaggacaactaggccc

SEQ ID NO: 1562691 - DNA, 25 bp, Homo sapien
gattcgggcccaaactcgtgttata

SEQ ID NO: 1562692 - DNA, 25 bp, Homo sapien
gcaaatgtgcccaattcggccgctc

SEQ ID NO: 1562693 - DNA, 25 bp, Homo sapien
aatgagctcgcacgagcgtctcacg

SEQ ID NO: 1562694 - DNA, 25 bp, Homo sapien
gttctagtcacaacgcctcacggga

SEQ ID NO: 1562695 - DNA, 25 bp, Homo sapien
taagaaagaggtgtacgttccaaca

SEQ ID NO: 1562696 - DNA, 25 bp, Homo sapien
caagctttcgggctcaaaaagggcg

SEQ ID NO: 1562697 - DNA, 25 bp, Homo sapien
gctgcaagctttcgggctcaaaaag

SEQ ID NO: 1562698 - DNA, 25 bp, Homo sapien
cgggctcaaaaagggcgggcgatgg

SEQ ID NO: 1562699 - DNA, 25 bp, Homo sapien
ttggctgcaagctttcgggctcaaa

SEQ ID NO: 1562700 - DNA, 25 bp, Homo sapien
cgtcatcatggggagcgtcgctcag

SEQ ID NO: 1562701 - DNA, 25 bp, Homo sapien
ctggaagttcccgtgggcgtcatca

SEQ ID NO: 1562702 - DNA, 25 bp, Homo sapien
agcctcatggtcgtactggaagttc

SEQ ID NO: 1562703 - DNA, 25 bp, Homo sapien
ggtgagttggtcgaattccttggcc

SEQ ID NO: 1562704 - DNA, 25 bp, Homo sapien
tagtggccataggtggcgttgcgca

SEQ ID NO: 1562705 - DNA, 25 bp, Homo sapien
gcggtccgtgtcgtacgtgtcccag

SEQ ID NO: 1562706 - DNA, 25 bp, Homo sapien
tcaccgagtcccgtatgtgccgctg

SEQ ID NO: 1562707 - DNA, 25 bp, Homo sapien
cgctgctgcgtgtgcgcgatccacg

SEQ ID NO: 1562708 - DNA, 25 bp, Homo sapien
ctcctctcgagtggccatcgagtcc

SEQ ID NO: 1562709 - DNA, 25 bp, Homo sapien
atcgagtccccatcctggtcggcca

SEQ ID NO: 1562710 - DNA, 25 bp, Homo sapien
ggaaacgccgctcgtcccgagccag

SEQ ID NO: 1562711 - DNA, 25 bp, Homo sapien
gtcccgcatgtgagggaactcctcg

SEQ ID NO: 1562712 - DNA, 25 bp, Homo sapien
ggagaaccaggtgactgcctgcccc

SEQ ID NO: 1562713 - DNA, 25 bp, Homo sapien
caggtcggtgctgggaagcaggacc

SEQ ID NO: 1562714 - DNA, 25 bp, Homo sapien
tggcttccccggcaagatgctggag

SEQ ID NO: 1562715 - DNA, 25 bp, Homo sapien
tgtgtttgcggcctggcttccccgg

SEQ ID NO: 1562716 - DNA, 25 bp, Homo sapien
cctggacatagccatctttgtttct

SEQ ID NO: 1562717 - DNA, 25 bp, Homo sapien
acctggacatagccatctttgtttc

SEQ ID NO: 1562718 - DNA, 25 bp, Homo sapien
cacctggacatagccatctttgttt

SEQ ID NO: 1562719 - DNA, 25 bp, Homo sapien
gcagagagccgataccacgccaccg

SEQ ID NO: 1562720 - DNA, 25 bp, Homo sapien
agagagccgataccacgccaccgcg

SEQ ID NO: 1562721 - DNA, 25 bp, Homo sapien
agagccgataccacgccaccgcgct

SEQ ID NO: 1562722 - DNA, 25 bp, Homo sapien
tgcagagagccgataccacgccacc

SEQ ID NO: 1562723 - DNA, 25 bp, Homo sapien
cgatggaattagtaacaaaacctga

SEQ ID NO: 1562724 - DNA, 25 bp, Homo sapien
ctgtttcgatggaattagtaacaaa

SEQ ID NO: 1562725 - DNA, 25 bp, Homo sapien
tcctcttctgtttcgatggaattag

SEQ ID NO: 1562726 - DNA, 25 bp, Homo sapien
gagcaactcactaccctctctctcg

SEQ ID NO: 1562727 - DNA, 25 bp, Homo sapien
ggaagtcccggaactgctgcctctc

SEQ ID NO: 1562728 - DNA, 25 bp, Homo sapien
tgtcgctctcgtgcagcaggtggtt

SEQ ID NO: 1562729 - DNA, 25 bp, Homo sapien
tccgtgtcgctctcgtgcagcaggt

SEQ ID NO: 1562730 - DNA, 25 bp, Homo sapien
gcagcacccagtggcccacctcact

SEQ ID NO: 1562731 - DNA, 25 bp, Homo sapien
aatctgtccccgtcttggtccctgt

SEQ ID NO: 1562732 - DNA, 25 bp, Homo sapien
ggcccaggtcttgctcctttctgga

SEQ ID NO: 1562733 - DNA, 25 bp, Homo sapien
ctcgctcctgccgaggccccgtcac

SEQ ID NO: 1562734 - DNA, 25 bp, Homo sapien
tttctggagtctggcccgcaatgcc

SEQ ID NO: 1562735 - DNA, 25 bp, Homo sapien
aggatttccgctttgctcagccgcc

SEQ ID NO: 1562736 - DNA, 25 bp, Homo sapien
tacccaggatttccgctttgctcag

SEQ ID NO: 1562737 - DNA, 25 bp, Homo sapien
ccaattacccaggatttccgctttg

SEQ ID NO: 1562738 - DNA, 25 bp, Homo sapien
atgttccaattacccaggatttccg

SEQ ID NO: 1562739 - DNA, 25 bp, Homo sapien
acagctcatcgtggtgccgggtcag

SEQ ID NO: 1562740 - DNA, 25 bp, Homo sapien
tcctcgccatagttggtggcctgac

SEQ ID NO: 1562741 - DNA, 25 bp, Homo sapien
ggtcaggtcctcgccatagttggtg

SEQ ID NO: 1562742 - DNA, 25 bp, Homo sapien
gccatagttggtggcctgactgccc

SEQ ID NO: 1562743 - DNA, 25 bp, Homo sapien
tcctccggtcattgtgcgggcctct

SEQ ID NO: 1562744 - DNA, 25 bp, Homo sapien
gctggcttttattgcctcctggcag

SEQ ID NO: 1562745 - DNA, 25 bp, Homo sapien
tatcctctgggactatgacagcccc

SEQ ID NO: 1562746 - DNA, 25 bp, Homo sapien
tttcagtctatgtggtggaggctca

SEQ ID NO: 1562747 - DNA, 25 bp, Homo sapien
tttctataaactctactcaagtatc

SEQ ID NO: 1562748 - DNA, 25 bp, Homo sapien
agagagggtacctggaatggtttct

SEQ ID NO: 1562749 - DNA, 25 bp, Homo sapien
tataaactctactcaagtatctttt

SEQ ID NO: 1562750 - DNA, 25 bp, Homo sapien
ctggagagagggtacctggaatggt

SEQ ID NO: 1562751 - DNA, 25 bp, Homo sapien
caccagagggaaatccagtcttcct

SEQ ID NO: 1562752 - DNA, 25 bp, Homo sapien
tcctagcttgaagaactacagcaaa

SEQ ID NO: 1562753 - DNA, 25 bp, Homo sapien
ccagtcttcctagcttgaagaacta

SEQ ID NO: 1562754 - DNA, 25 bp, Homo sapien
tgggggtgagttctagttcatacca

SEQ ID NO: 1562755 - DNA, 25 bp, Homo sapien
gtaaacattgctgcactcagcccag

SEQ ID NO: 1562756 - DNA, 25 bp, Homo sapien
taaacattgctgcactcagcccagc

SEQ ID NO: 1562757 - DNA, 25 bp, Homo sapien
aaacattgctgcactcagcccagcc

SEQ ID NO: 1562758 - DNA, 25 bp, Homo sapien
aacattgctgcactcagcccagcct

SEQ ID NO: 1562759 - DNA, 25 bp, Homo sapien
ggagaacctaactgatcccggagag

SEQ ID NO: 1562760 - DNA, 25 bp, Homo sapien
gactcactagctgcataacctaggg

SEQ ID NO: 1562761 - DNA, 25 bp, Homo sapien
tagctcagggcacggtcaagtgcaa

SEQ ID NO: 1562762 - DNA, 25 bp, Homo sapien
tactctggagccgaaataccgaggg

SEQ ID NO: 1562763 - DNA, 25 bp, Homo sapien
tatcaggtgggctaaaactgggttg

SEQ ID NO: 1562764 - DNA, 25 bp, Homo sapien
gaaaatagcgtgagtgttccgatga

SEQ ID NO: 1562765 - DNA, 25 bp, Homo sapien
tgagaaaatcagaaacggaaaacaa

SEQ ID NO: 1562766 - DNA, 25 bp, Homo sapien
tcaacttagttttggcttggaagca

SEQ ID NO: 1562767 - DNA, 25 bp, Homo sapien
agccaggcgaggcacttccgcaact

SEQ ID NO: 1562768 - DNA, 25 bp, Homo sapien
caagccaggcgaggcacttccgcaa

SEQ ID NO: 1562769 - DNA, 25 bp, Homo sapien
ccaggcgaggcacttccgcaactag

SEQ ID NO: 1562770 - DNA, 25 bp, Homo sapien
aggcgaggcacttccgcaactaggg

SEQ ID NO: 1562771 - DNA, 25 bp, Homo sapien
cctctttaatcgagaactccttggc

SEQ ID NO: 1562772 - DNA, 25 bp, Homo sapien
ccttcctctttaatcgagaactcct

SEQ ID NO: 1562773 - DNA, 25 bp, Homo sapien
tctttaatcgagaactccttggcca

SEQ ID NO: 1562774 - DNA, 25 bp, Homo sapien
ttcctctttaatcgagaactccttg

SEQ ID NO: 1562775 - DNA, 25 bp, Homo sapien
ccaggtttgttacagctgacaaggg

SEQ ID NO: 1562776 - DNA, 25 bp, Homo sapien
tacagctgacaagggccttagtccc

SEQ ID NO: 1562777 - DNA, 25 bp, Homo sapien
ctagaaccaggtttgttacagctga

SEQ ID NO: 1562778 - DNA, 25 bp, Homo sapien
gttacagctgacaagggccttagtc

SEQ ID NO: 1562779 - DNA, 25 bp, Homo sapien
ctcactgggtgaagtatccaggcag

SEQ ID NO: 1562780 - DNA, 25 bp, Homo sapien
gtggttaatgccatatatagcagca

SEQ ID NO: 1562781 - DNA, 25 bp, Homo sapien
aggtggttaatgccatatatagcag

SEQ ID NO: 1562782 - DNA, 25 bp, Homo sapien
gttaatgccatatatagcagcagca

SEQ ID NO: 1562783 - DNA, 25 bp, Homo sapien
ggaggccaacgccaagtgtctggat

SEQ ID NO: 1562784 - DNA, 25 bp, Homo sapien
caacgccaagtgtctggatgccact

SEQ ID NO: 1562785 - DNA, 25 bp, Homo sapien
attcctgagtcagggggaggccaac

SEQ ID NO: 1562786 - DNA, 25 bp, Homo sapien
ctagaaacattcctgagtcaggggg

SEQ ID NO: 1562787 - DNA, 25 bp, Homo sapien
agggctggagtcatagggggatgga

SEQ ID NO: 1562788 - DNA, 25 bp, Homo sapien
ggctggagtcatagggggatggaaa

SEQ ID NO: 1562789 - DNA, 25 bp, Homo sapien
ctagggctggagtcatagggggatg

SEQ ID NO: 1562790 - DNA, 25 bp, Homo sapien
ccctagggctggagtcataggggga

SEQ ID NO: 1562791 - DNA, 25 bp, Homo sapien
agacactcccgttccaggttccctg

SEQ ID NO: 1562792 - DNA, 25 bp, Homo sapien
aggtcccagtggttggctcttggaa

SEQ ID NO: 1562793 - DNA, 25 bp, Homo sapien
cgtgagagtgttgtcctcaaaatac

SEQ ID NO: 1562794 - DNA, 25 bp, Homo sapien
aggttccctggtgtgagcagctcca

SEQ ID NO: 1562795 - DNA, 25 bp, Homo sapien
tgtagatgtagctctcccaaaagcg

SEQ ID NO: 1562796 - DNA, 25 bp, Homo sapien
cattgtagatgtagctctcccaaaa

SEQ ID NO: 1562797 - DNA, 25 bp, Homo sapien
gccattgtagatgtagctctcccaa

SEQ ID NO: 1562798 - DNA, 25 bp, Homo sapien
tagatgtagctctcccaaaagcgct

SEQ ID NO: 1562799 - DNA, 25 bp, Homo sapien
aggctggccacatccactcgtccac

SEQ ID NO: 1562800 - DNA, 25 bp, Homo sapien
tggcctcggtgctgtcgccagcgca

SEQ ID NO: 1562801 - DNA, 25 bp, Homo sapien
agcgcagataccaaaaggctcccag

SEQ ID NO: 1562802 - DNA, 25 bp, Homo sapien
ggtgctgtcgccagcgcagatacca

SEQ ID NO: 1562803 - DNA, 25 bp, Homo sapien
caggggcgtcggtgggcccagaggg

SEQ ID NO: 1562804 - DNA, 25 bp, Homo sapien
aaaggactcagagggctaatgagcc

SEQ ID NO: 1562805 - DNA, 25 bp, Homo sapien
actcagagggctaatgagcccggcc

SEQ ID NO: 1562806 - DNA, 25 bp, Homo sapien
gcccagagggttcaaaggactcaga

SEQ ID NO: 1562807 - DNA, 25 bp, Homo sapien
taggggggtggaggtgcgtcgtgta

SEQ ID NO: 1562808 - DNA, 25 bp, Homo sapien
gtgcgtcgtgtaccccagaggctgc

SEQ ID NO: 1562809 - DNA, 25 bp, Homo sapien
gggtggaggtgcgtcgtgtacccca

SEQ ID NO: 1562810 - DNA, 25 bp, Homo sapien
aggtgcgtcgtgtaccccagaggct

SEQ ID NO: 1562811 - DNA, 25 bp, Homo sapien
ttccggaatccggtatgaatcaggg

SEQ ID NO: 1562812 - DNA, 25 bp, Homo sapien
caagtccagcttcggcgtctatgag

SEQ ID NO: 1562813 - DNA, 25 bp, Homo sapien
gagagccgggtctcgaaagcagctc

SEQ ID NO: 1562814 - DNA, 25 bp, Homo sapien
tctatgaggcctagcggcttccgga

SEQ ID NO: 1562815 - DNA, 25 bp, Homo sapien
aaacgcgtgtgccagggcaggcctc

SEQ ID NO: 1562816 - DNA, 25 bp, Homo sapien
catgtgtatatccatacgcggcgga

SEQ ID NO: 1562817 - DNA, 25 bp, Homo sapien
agtgccctcacggtcaggagagtgt

SEQ ID NO: 1562818 - DNA, 25 bp, Homo sapien
caggacacgggaacacgttgccgaa

SEQ ID NO: 1562819 - DNA, 25 bp, Homo sapien
ctgcctaccacgggggcggaactga

SEQ ID NO: 1562820 - DNA, 25 bp, Homo sapien
gggctgtcaggtcatatctgcccat

SEQ ID NO: 1562821 - DNA, 25 bp, Homo sapien
gtcaggtcatatctgcccatacaca

SEQ ID NO: 1562822 - DNA, 25 bp, Homo sapien
gtcatatctgcccatacacaagatg

SEQ ID NO: 1562823 - DNA, 25 bp, Homo sapien
ccatacacaagatggcacagccggg

SEQ ID NO: 1562824 - DNA, 25 bp, Homo sapien
tacgaagtgcccctgtaccgcacgg

SEQ ID NO: 1562825 - DNA, 25 bp, Homo sapien
accgagcgcgcttgcaaatatgccc

SEQ ID NO: 1562826 - DNA, 25 bp, Homo sapien
gagtgcacgaagacacgcgtgtgca

SEQ ID NO: 1562827 - DNA, 25 bp, Homo sapien
agctccctgggtgcaatgcgagcct

SEQ ID NO: 1562828 - DNA, 25 bp, Homo sapien
ttattattttttgcattatttctgc

SEQ ID NO: 1562829 - DNA, 25 bp, Homo sapien
gagcgggtccccgaagccggcgctg

SEQ ID NO: 1562830 - DNA, 25 bp, Homo sapien
tcgtaactccatcccgccccggcgc

SEQ ID NO: 1562831 - DNA, 25 bp, Homo sapien
ctctcgtaactccatcccgccccgg

SEQ ID NO: 1562832 - DNA, 25 bp, Homo sapien
agcgggtccccgaagccggcgctgg

SEQ ID NO: 1562833 - DNA, 25 bp, Homo sapien
gggcaaacgctccactccttgcgat

SEQ ID NO: 1562834 - DNA, 25 bp, Homo sapien
cagtccgtggccagactcaagaggg

SEQ ID NO: 1562835 - DNA, 25 bp, Homo sapien
gaaacatccgactcttcccatgcaa

SEQ ID NO: 1562836 - DNA, 25 bp, Homo sapien
cttgcgatcaactaggattctctgc

SEQ ID NO: 1562837 - DNA, 25 bp, Homo sapien
tggttggtggcatagctttgcagtg

SEQ ID NO: 1562838 - DNA, 25 bp, Homo sapien
ctggcggtgtaagatgtccgtctcg

SEQ ID NO: 1562839 - DNA, 25 bp, Homo sapien
gtggcatagctttgcagtgggtggg

SEQ ID NO: 1562840 - DNA, 25 bp, Homo sapien
ccgcataggcctggcggtgtaagat

SEQ ID NO: 1562841 - DNA, 25 bp, Homo sapien
catgacggaggcgtcgggccctgct

SEQ ID NO: 1562842 - DNA, 25 bp, Homo sapien
tgacggaggcgtcgggccctgctga

SEQ ID NO: 1562843 - DNA, 25 bp, Homo sapien
aggccagtgtcgaagagtccagaga

SEQ ID NO: 1562844 - DNA, 25 bp, Homo sapien
ttccagggccgagataaggttcatg

SEQ ID NO: 1562845 - DNA, 25 bp, Homo sapien
ctgtttgccaggaaggactgcggaa

SEQ ID NO: 1562846 - DNA, 25 bp, Homo sapien
cgggtgttggtaagccgacagggca

SEQ ID NO: 1562847 - DNA, 25 bp, Homo sapien
gctgccgaaggaagccgggtgttgg

SEQ ID NO: 1562848 - DNA, 25 bp, Homo sapien
tggaacccggcagggcacccgagat

SEQ ID NO: 1562849 - DNA, 25 bp, Homo sapien
tgaggacggaaaggtgctggaaccc

SEQ ID NO: 1562850 - DNA, 25 bp, Homo sapien
gggcagcacccgagaagttatagag

SEQ ID NO: 1562851 - DNA, 25 bp, Homo sapien
ggacaggagcccgttagctggaggg

SEQ ID NO: 1562852 - DNA, 25 bp, Homo sapien
caggcgctcgaagcccagtgaagag

SEQ ID NO: 1562853 - DNA, 25 bp, Homo sapien
gggcttcaggtgcagcacgtcatga

SEQ ID NO: 1562854 - DNA, 25 bp, Homo sapien
cagctcagatagtgctggagcgcat

SEQ ID NO: 1562855 - DNA, 25 bp, Homo sapien
ttgtacccaggcgactgaatgatgg

SEQ ID NO: 1562856 - DNA, 25 bp, Homo sapien
ctggccgctggtagtgcttgatgac

SEQ ID NO: 1562857 - DNA, 25 bp, Homo sapien
cataaccacctttgcccgtcttgta

SEQ ID NO: 1562858 - DNA, 25 bp, Homo sapien
ttcccagtggcataggcggctgctg

SEQ ID NO: 1562859 - DNA, 25 bp, Homo sapien
gggagtagctctgacatgtggccag

SEQ ID NO: 1562860 - DNA, 25 bp, Homo sapien
gcggtgactggagcggacgaatgat

SEQ ID NO: 1562861 - DNA, 25 bp, Homo sapien
aatggccggtactgtagctgagcga

SEQ ID NO: 1562862 - DNA, 25 bp, Homo sapien
atcctctgtgcgctccgcaggaggc

SEQ ID NO: 1562863 - DNA, 25 bp, Homo sapien
gaggtgctggataaggaactcctca

SEQ ID NO: 1562864 - DNA, 25 bp, Homo sapien
tgctggataaggaactcctcatcct

SEQ ID NO: 1562865 - DNA, 25 bp, Homo sapien
gcaagaggtgctggataaggaactc

SEQ ID NO: 1562866 - DNA, 25 bp, Homo sapien
gcactggtgcggatgacactctgca

SEQ ID NO: 1562867 - DNA, 25 bp, Homo sapien
ggctcttttgcaagaaggcccccag

SEQ ID NO: 1562868 - DNA, 25 bp, Homo sapien
cctgccccgtagtggacaacagagg

SEQ ID NO: 1562869 - DNA, 25 bp, Homo sapien
tcttccttggccaactcgtagggtg

SEQ ID NO: 1562870 - DNA, 25 bp, Homo sapien
cccatcgcgggtggctggctcaagg

SEQ ID NO: 1562871 - DNA, 25 bp, Homo sapien
ccccatcgcgggtggctggctcaag

SEQ ID NO: 1562872 - DNA, 25 bp, Homo sapien
gccccatcgcgggtggctggctcaa

SEQ ID NO: 1562873 - DNA, 25 bp, Homo sapien
ccatcgcgggtggctggctcaagga

SEQ ID NO: 1562874 - DNA, 25 bp, Homo sapien
caattcctgcatggcgcctggcgga

SEQ ID NO: 1562875 - DNA, 25 bp, Homo sapien
cctgcatggcgcctggcggatccag

SEQ ID NO: 1562876 - DNA, 25 bp, Homo sapien
aggctctcctcgggtcgcaggcggg

SEQ ID NO: 1562877 - DNA, 25 bp, Homo sapien
ccgagcaattcctgcatggcgcctg

SEQ ID NO: 1562878 - DNA, 25 bp, Homo sapien
gaagaagctgcgctcctcgtcttgg

SEQ ID NO: 1562879 - DNA, 25 bp, Homo sapien
gtggcccggccttgccgtagtcgtc

SEQ ID NO: 1562880 - DNA, 25 bp, Homo sapien
ggatccttgccctccgagtttggtg

SEQ ID NO: 1562881 - DNA, 25 bp, Homo sapien
agggcccatagggatcataagcagg

SEQ ID NO: 1562882 - DNA, 25 bp, Homo sapien
cgggggtggtggcgccgcctggtgg

SEQ ID NO: 1562883 - DNA, 25 bp, Homo sapien
ggtggtggcgccgcctggtgggggc

SEQ ID NO: 1562884 - DNA, 25 bp, Homo sapien
gcgggggtggtggcgccgcctggtg

SEQ ID NO: 1562885 - DNA, 25 bp, Homo sapien
cagaagatgggcgaggtgaggccac

SEQ ID NO: 1562886 - DNA, 25 bp, Homo sapien
agaagatgggcgaggtgaggccacc

SEQ ID NO: 1562887 - DNA, 25 bp, Homo sapien
gcagaagatgggcgaggtgaggcca

SEQ ID NO: 1562888 - DNA, 25 bp, Homo sapien
agcagaagatgggcgaggtgaggcc

SEQ ID NO: 1562889 - DNA, 25 bp, Homo sapien
agaagtcgatgtcccccagtggcga

SEQ ID NO: 1562890 - DNA, 25 bp, Homo sapien
tttcgccttcgtgggcttgcggcca

SEQ ID NO: 1562891 - DNA, 25 bp, Homo sapien
tgtcggcgggaacatcggccttgtc

SEQ ID NO: 1562892 - DNA, 25 bp, Homo sapien
gggtggcccatcacgtttcgccttc

SEQ ID NO: 1562893 - DNA, 25 bp, Homo sapien
tgaaacccgacttcatctccggctg

SEQ ID NO: 1562894 - DNA, 25 bp, Homo sapien
ggcatcacccgatgaggttcccaga

SEQ ID NO: 1562895 - DNA, 25 bp, Homo sapien
catcaagccgcttgcagggtgaagg

SEQ ID NO: 1562896 - DNA, 25 bp, Homo sapien
gatcttctcccgagtcaggctcgag

SEQ ID NO: 1562897 - DNA, 25 bp, Homo sapien
ctgggcgtgggggccaccagcgggg

SEQ ID NO: 1562898 - DNA, 25 bp, Homo sapien
cttgagggaagggatgtcctcagca

SEQ ID NO: 1562899 - DNA, 25 bp, Homo sapien
ccgttcccggaagatgccctctccg

SEQ ID NO: 1562900 - DNA, 25 bp, Homo sapien
gaagggatgtcctcagcacggatga

SEQ ID NO: 1562901 - DNA, 25 bp, Homo sapien
gggatgtcctcagcacggatgacga

SEQ ID NO: 1562902 - DNA, 25 bp, Homo sapien
taaatattgaagctatggccagcca

SEQ ID NO: 1562903 - DNA, 25 bp, Homo sapien
caagctcctgcggtagacaaactgg

SEQ ID NO: 1562904 - DNA, 25 bp, Homo sapien
ccataaatggcaaagcagcccgcct

SEQ ID NO: 1562905 - DNA, 25 bp, Homo sapien
taaactagaagctccctagggccag

SEQ ID NO: 1562906 - DNA, 25 bp, Homo sapien
gtgggcaccaccatgtctggttaag

SEQ ID NO: 1562907 - DNA, 25 bp, Homo sapien
tcactacaacatcaacttcctgggc

SEQ ID NO: 1562908 - DNA, 25 bp, Homo sapien
caccatgtctggttaagtttttttg

SEQ ID NO: 1562909 - DNA, 25 bp, Homo sapien
tcatggctcactacaacatcaactt

SEQ ID NO: 1562910 - DNA, 25 bp, Homo sapien
gccgtccttgatctccggagtgaat

SEQ ID NO: 1562911 - DNA, 25 bp, Homo sapien
gaagggccttctggactcgccagat

SEQ ID NO: 1562912 - DNA, 25 bp, Homo sapien
tccggagtgaatttctgcagaaggg

SEQ ID NO: 1562913 - DNA, 25 bp, Homo sapien
gttcacgccccgtctgcaacgccag

SEQ ID NO: 1562914 - DNA, 25 bp, Homo sapien
ttttccaggaactttacatagaggc

SEQ ID NO: 1562915 - DNA, 25 bp, Homo sapien
tacatagaggcgctggtaccgattt

SEQ ID NO: 1562916 - DNA, 25 bp, Homo sapien
tggtaccgattttttgcatccccaa

SEQ ID NO: 1562917 - DNA, 25 bp, Homo sapien
ttgcatccccaaaataccccaaata

SEQ ID NO: 1562918 - DNA, 25 bp, Homo sapien
gggccgatgccagggtttccgagca

SEQ ID NO: 1562919 - DNA, 25 bp, Homo sapien
atgccagggtttccgagcacagacc

SEQ ID NO: 1562920 - DNA, 25 bp, Homo sapien
agggtttccgagcacagaccctcac

SEQ ID NO: 1562921 - DNA, 25 bp, Homo sapien
ccgatgccagggtttccgagcacag

SEQ ID NO: 1562922 - DNA, 25 bp, Homo sapien
ctctgtagccttctgtgagtctctg

SEQ ID NO: 1562923 - DNA, 25 bp, Homo sapien
accccaggtctctgtagccttctgt

SEQ ID NO: 1562924 - DNA, 25 bp, Homo sapien
ggtctctgtagccttctgtgagtct

SEQ ID NO: 1562925 - DNA, 25 bp, Homo sapien
tgggtctctatccccctctttctgg

SEQ ID NO: 1562926 - DNA, 25 bp, Homo sapien
tctgggactctgaccccctccctct

SEQ ID NO: 1562927 - DNA, 25 bp, Homo sapien
ctgaccccctccctctctgggactc

SEQ ID NO: 1562928 - DNA, 25 bp, Homo sapien
tctctgaccccctccctctctgggt

SEQ ID NO: 1562929 - DNA, 25 bp, Homo sapien
tctctgggactctgaccccctccct

SEQ ID NO: 1562930 - DNA, 25 bp, Homo sapien
acagagaagggactgtagtcagcag

SEQ ID NO: 1562931 - DNA, 25 bp, Homo sapien
gggaacagagaagggactgtagtca

SEQ ID NO: 1562932 - DNA, 25 bp, Homo sapien
gaacagagaagggactgtagtcagc

SEQ ID NO: 1562933 - DNA, 25 bp, Homo sapien
agggaacagagaagggactgtagtc

SEQ ID NO: 1562934 - DNA, 25 bp, Homo sapien
gatacggggttcttggcctgcccag

SEQ ID NO: 1562935 - DNA, 25 bp, Homo sapien
agcagatacggggttcttggcctgc

SEQ ID NO: 1562936 - DNA, 25 bp, Homo sapien
cagatacggggttcttggcctgccc

SEQ ID NO: 1562937 - DNA, 25 bp, Homo sapien
cccagcagatacggggttcttggcc

SEQ ID NO: 1562938 - DNA, 25 bp, Homo sapien
tggccgtctcaggagtctgctctgg

SEQ ID NO: 1562939 - DNA, 25 bp, Homo sapien
gcaatggccgctctccacgtgtcac

SEQ ID NO: 1562940 - DNA, 25 bp, Homo sapien
tggtggcccgctcaccccgcaatgg

SEQ ID NO: 1562941 - DNA, 25 bp, Homo sapien
ctcagatgtcgtcttttcaggggtc

SEQ ID NO: 1562942 - DNA, 25 bp, Homo sapien
ttgtcccgtggcgagactccgctct

SEQ ID NO: 1562943 - DNA, 25 bp, Homo sapien
cgtggcgagactccgctctggccgt

SEQ ID NO: 1562944 - DNA, 25 bp, Homo sapien
gcaggttgtcccgtggcgagactcc

SEQ ID NO: 1562945 - DNA, 25 bp, Homo sapien
gagactccgctctggccgtgtctgc

SEQ ID NO: 1562946 - DNA, 25 bp, Homo sapien
ccccgcctgctgtagcgttgccgcc

SEQ ID NO: 1562947 - DNA, 25 bp, Homo sapien
cctgctgtagcgttgccgcctgcct

SEQ ID NO: 1562948 - DNA, 25 bp, Homo sapien
caggggaggactccgagtccgagga

SEQ ID NO: 1562949 - DNA, 25 bp, Homo sapien
tgctgtagcgttgccgcctgcctcc

SEQ ID NO: 1562950 - DNA, 25 bp, Homo sapien
tcccgcatcgccctggttttgagca

SEQ ID NO: 1562951 - DNA, 25 bp, Homo sapien
ggttttgagcagacgcccaggtact

SEQ ID NO: 1562952 - DNA, 25 bp, Homo sapien
atctccacgtagctccggtacatct

SEQ ID NO: 1562953 - DNA, 25 bp, Homo sapien
tcatgtctgggtcaagtgctgtgct

SEQ ID NO: 1562954 - DNA, 25 bp, Homo sapien
gacatggtatcaggaaggccacagc

SEQ ID NO: 1562955 - DNA, 25 bp, Homo sapien
atggacgaggacatggtatcaggaa

SEQ ID NO: 1562956 - DNA, 25 bp, Homo sapien
acgaggacatggtatcaggaaggcc

SEQ ID NO: 1562957 - DNA, 25 bp, Homo sapien
ctgatggacgaggacatggtatcag

SEQ ID NO: 1562958 - DNA, 25 bp, Homo sapien
tgggcttagcgacagccgcttcagg

SEQ ID NO: 1562959 - DNA, 25 bp, Homo sapien
caggactttcttcttgtgctcattc

SEQ ID NO: 1562960 - DNA, 25 bp, Homo sapien
agcaggccgtctatcttccgcatgg

SEQ ID NO: 1562961 - DNA, 25 bp, Homo sapien
gctcattcagcaggccgtctatctt

SEQ ID NO: 1562962 - DNA, 25 bp, Homo sapien
acgatctccttccaaggatcacccc

SEQ ID NO: 1562963 - DNA, 25 bp, Homo sapien
agcggccgacacgtacatgtcttct

SEQ ID NO: 1562964 - DNA, 25 bp, Homo sapien
caacagcggccgacacgtacatgtc

SEQ ID NO: 1562965 - DNA, 25 bp, Homo sapien
ccgacacgtacatgtcttctccatg

SEQ ID NO: 1562966 - DNA, 25 bp, Homo sapien
gtgccagcctaacaatccatctcag

SEQ ID NO: 1562967 - DNA, 25 bp, Homo sapien
agacctactctaatatcctacactg

SEQ ID NO: 1562968 - DNA, 25 bp, Homo sapien
ctgggattatctaccctagtgtaac

SEQ ID NO: 1562969 - DNA, 25 bp, Homo sapien
tagtgtaacatctcacccacaatcc

SEQ ID NO: 1562970 - DNA, 25 bp, Homo sapien
gagcgtcttgcggttgtagggttcc

SEQ ID NO: 1562971 - DNA, 25 bp, Homo sapien
tcttgcggttgtagggttccccagc

SEQ ID NO: 1562972 - DNA, 25 bp, Homo sapien
acttgcagctgtgggaacgtgtgca

SEQ ID NO: 1562973 - DNA, 25 bp, Homo sapien
ctccacttgcagctgtgggaacgtg

SEQ ID NO: 1562974 - DNA, 25 bp, Homo sapien
ctctgaccacgctcctcttgagctt

SEQ ID NO: 1562975 - DNA, 25 bp, Homo sapien
gggctctgaccacgctcctcttgag

SEQ ID NO: 1562976 - DNA, 25 bp, Homo sapien
ggctctgaccacgctcctcttgagc

SEQ ID NO: 1562977 - DNA, 25 bp, Homo sapien
gctctgaccacgctcctcttgagct

SEQ ID NO: 1562978 - DNA, 25 bp, Homo sapien
tagtatcccgacttttccagctcaa

SEQ ID NO: 1562979 - DNA, 25 bp, Homo sapien
tttatagtggtggagcgaatggtag

SEQ ID NO: 1562980 - DNA, 25 bp, Homo sapien
agcgaatggtagagtgtatagtatc

SEQ ID NO: 1562981 - DNA, 25 bp, Homo sapien
gtatagtatcccgacttttccagct

SEQ ID NO: 1562982 - DNA, 25 bp, Homo sapien
agccacggctggttccgcatgcact

SEQ ID NO: 1562983 - DNA, 25 bp, Homo sapien
cggctggttccgcatgcactgctgg

SEQ ID NO: 1562984 - DNA, 25 bp, Homo sapien
gctggttccgcatgcactgctggac

SEQ ID NO: 1562985 - DNA, 25 bp, Homo sapien
ggttccgcatgcactgctggaccac

SEQ ID NO: 1562986 - DNA, 25 bp, Homo sapien
aattctcggttcatggaggaggcgc

SEQ ID NO: 1562987 - DNA, 25 bp, Homo sapien
ccctgcggagggaatggcctttagc

SEQ ID NO: 1562988 - DNA, 25 bp, Homo sapien
tctctgtacaccgaacagtgggagg

SEQ ID NO: 1562989 - DNA, 25 bp, Homo sapien
caaatcgccgtagaaaaggagtggg

SEQ ID NO: 1562990 - DNA, 25 bp, Homo sapien
taaaaaatagaaccacatccagaca

SEQ ID NO: 1562991 - DNA, 25 bp, Homo sapien
gcaagagacaaagggtagtgggagc

SEQ ID NO: 1562992 - DNA, 25 bp, Homo sapien
cacagtgtatacaagttgagttgta

SEQ ID NO: 1562993 - DNA, 25 bp, Homo sapien
tccagacaacaatgggggatgggca

SEQ ID NO: 1562994 - DNA, 25 bp, Homo sapien
ccgtaatgccaactacttgagactg

SEQ ID NO: 1562995 - DNA, 25 bp, Homo sapien
tgcacccgtaatgccaactacttga

SEQ ID NO: 1562996 - DNA, 25 bp, Homo sapien
cccgtaatgccaactacttgagact

SEQ ID NO: 1562997 - DNA, 25 bp, Homo sapien
cacccgtaatgccaactacttgaga

SEQ ID NO: 1562998 - DNA, 25 bp, Homo sapien
tttagaaccagacgggatgcagtgg

SEQ ID NO: 1562999 - DNA, 25 bp, Homo sapien
gcctagaagttagaagccagcctag

SEQ ID NO: 1563000 - DNA, 25 bp, Homo sapien
gatgcagtggcgcacaccgtagtcc

SEQ ID NO: 1563001 - DNA, 25 bp, Homo sapien
gcacaccgtagtcccactcgggaga

SEQ ID NO: 1563002 - DNA, 25 bp, Homo sapien
gggttcgtgagcaaaggaggagaga

SEQ ID NO: 1563003 - DNA, 25 bp, Homo sapien
ggttcgtgagcaaaggaggagagag

SEQ ID NO: 1563004 - DNA, 25 bp, Homo sapien
ggagctaaagcgccgccgagcttgc

SEQ ID NO: 1563005 - DNA, 25 bp, Homo sapien
aggagagaggcggagctaaagcgcc

SEQ ID NO: 1563006 - DNA, 25 bp, Homo sapien
ccccatgactgtcaaatctgctact

SEQ ID NO: 1563007 - DNA, 25 bp, Homo sapien
aacaggtggatgtcttgattagggc

SEQ ID NO: 1563008 - DNA, 25 bp, Homo sapien
gcttccccatgactgtcaaatctgc

SEQ ID NO: 1563009 - DNA, 25 bp, Homo sapien
caggtggatgtcttgattagggctt

SEQ ID NO: 1563010 - DNA, 25 bp, Homo sapien
aagtagaggatagacatgaagacct

SEQ ID NO: 1563011 - DNA, 25 bp, Homo sapien
tggaggtcccgggagaaaggatgga

SEQ ID NO: 1563012 - DNA, 25 bp, Homo sapien
gtgggcgctggacccagcacagaca

SEQ ID NO: 1563013 - DNA, 25 bp, Homo sapien
tgaagacctcaagggccccacacta

SEQ ID NO: 1563014 - DNA, 25 bp, Homo sapien
cctctgtcttccctcgagactcatc

SEQ ID NO: 1563015 - DNA, 25 bp, Homo sapien
gtcttccctcgagactcatcttctt

SEQ ID NO: 1563016 - DNA, 25 bp, Homo sapien
gggtctctgtctggcggaccatcgc

SEQ ID NO: 1563017 - DNA, 25 bp, Homo sapien
tggggtctctgtctggcggaccatc

SEQ ID NO: 1563018 - DNA, 25 bp, Homo sapien
ctttatcattgggcaggtccccctg

SEQ ID NO: 1563019 - DNA, 25 bp, Homo sapien
tttatcattgggcaggtccccctgc

SEQ ID NO: 1563020 - DNA, 25 bp, Homo sapien
ccatcgaaggccatgacaccgagag

SEQ ID NO: 1563021 - DNA, 25 bp, Homo sapien
cgaaggccatgacaccgagagccat

SEQ ID NO: 1563022 - DNA, 25 bp, Homo sapien
ggctctgaccgtggactccggcagc

SEQ ID NO: 1563023 - DNA, 25 bp, Homo sapien
tgattcctgggaacggggctctgac

SEQ ID NO: 1563024 - DNA, 25 bp, Homo sapien
agccctgcgaggaagctgtccgtgg

SEQ ID NO: 1563025 - DNA, 25 bp, Homo sapien
cagccctgcgaggaagctgtccgtg

SEQ ID NO: 1563026 - DNA, 25 bp, Homo sapien
tatccgggggatccaggacactcac

SEQ ID NO: 1563027 - DNA, 25 bp, Homo sapien
ggtatccgggggatccaggacactc

SEQ ID NO: 1563028 - DNA, 25 bp, Homo sapien
aggtatccgggggatccaggacact

SEQ ID NO: 1563029 - DNA, 25 bp, Homo sapien
ccaggtatccgggggatccaggaca

SEQ ID NO: 1563030 - DNA, 25 bp, Homo sapien
tgggatctctgtccccgattcggac

SEQ ID NO: 1563031 - DNA, 25 bp, Homo sapien
agagggatgggatctctgtccccga

SEQ ID NO: 1563032 - DNA, 25 bp, Homo sapien
gatgggatctctgtccccgattcgg

SEQ ID NO: 1563033 - DNA, 25 bp, Homo sapien
gggatgggatctctgtccccgattc

SEQ ID NO: 1563034 - DNA, 25 bp, Homo sapien
aaaatactctccacagactagagcg

SEQ ID NO: 1563035 - DNA, 25 bp, Homo sapien
ttcccagcaccttaagcacaaaata

SEQ ID NO: 1563036 - DNA, 25 bp, Homo sapien
agagcgctctgcaaacacgcgagat

SEQ ID NO: 1563037 - DNA, 25 bp, Homo sapien
tttctgtatgggacaggattatggg

SEQ ID NO: 1563038 - DNA, 25 bp, Homo sapien
cccgtgcccaaggtgaggtgacggg

SEQ ID NO: 1563039 - DNA, 25 bp, Homo sapien
ccgtgcccaaggtgaggtgacgggc

SEQ ID NO: 1563040 - DNA, 25 bp, Homo sapien
gggcctagaggagttcgactgtgga

SEQ ID NO: 1563041 - DNA, 25 bp, Homo sapien
ctagaggagttcgactgtggagaaa

SEQ ID NO: 1563042 - DNA, 25 bp, Homo sapien
gagcaggcggtggagagtaggcctc

SEQ ID NO: 1563043 - DNA, 25 bp, Homo sapien
tcatagatatcgaatcggggggcag

SEQ ID NO: 1563044 - DNA, 25 bp, Homo sapien
cggtggagagtaggcctcgtcggtg

SEQ ID NO: 1563045 - DNA, 25 bp, Homo sapien
agggtcgtacttttgctccggagca

SEQ ID NO: 1563046 - DNA, 25 bp, Homo sapien
tgtcatcgtagatgcccgccagggt

SEQ ID NO: 1563047 - DNA, 25 bp, Homo sapien
gtagatgcccgccagggtctccgag

SEQ ID NO: 1563048 - DNA, 25 bp, Homo sapien
ccgccagggtctccgagatgcggct

SEQ ID NO: 1563049 - DNA, 25 bp, Homo sapien
ttgtcatcgtagatgcccgccaggg

SEQ ID NO: 1563050 - DNA, 25 bp, Homo sapien
ggcgcatggctccatcagcccgggt

SEQ ID NO: 1563051 - DNA, 25 bp, Homo sapien
gacccgccggcgcatggctccatca

SEQ ID NO: 1563052 - DNA, 25 bp, Homo sapien
cgcatggctccatcagcccgggtgg

SEQ ID NO: 1563053 - DNA, 25 bp, Homo sapien
catggctccatcagcccgggtggag

SEQ ID NO: 1563054 - DNA, 25 bp, Homo sapien
ccagcggtcaccacctccaccgaga

SEQ ID NO: 1563055 - DNA, 25 bp, Homo sapien
gggagggcggctccaccagcggtca

SEQ ID NO: 1563056 - DNA, 25 bp, Homo sapien
tcgatctccgagtcgccgggcggca

SEQ ID NO: 1563057 - DNA, 25 bp, Homo sapien
gagaccttgccttcccgacaagcct

SEQ ID NO: 1563058 - DNA, 25 bp, Homo sapien
tggccgaggcggccggtgtaggccg

SEQ ID NO: 1563059 - DNA, 25 bp, Homo sapien
gccgccggggcggaagagggacagc

SEQ ID NO: 1563060 - DNA, 25 bp, Homo sapien
ccgccggggcggaagagggacagcg

SEQ ID NO: 1563061 - DNA, 25 bp, Homo sapien
cgccgtccgactccgcatgcaggga

SEQ ID NO: 1563062 - DNA, 25 bp, Homo sapien
ccgtccgactccgcatgcagggaca

SEQ ID NO: 1563063 - DNA, 25 bp, Homo sapien
gtccgactccgcatgcagggacaag

SEQ ID NO: 1563064 - DNA, 25 bp, Homo sapien
cgtccgactccgcatgcagggacaa

SEQ ID NO: 1563065 - DNA, 25 bp, Homo sapien
ccagcgcgagtcggcggcgggcggc

SEQ ID NO: 1563066 - DNA, 25 bp, Homo sapien
cagcgcgagtcggcggcgggcggcg

SEQ ID NO: 1563067 - DNA, 25 bp, Homo sapien
gcgggagccggctcccctaggtcca

SEQ ID NO: 1563068 - DNA, 25 bp, Homo sapien
ggcggcgcgggagccggctccccta

SEQ ID NO: 1563069 - DNA, 25 bp, Homo sapien
cccgccgttgggtcaggatcttgcg

SEQ ID NO: 1563070 - DNA, 25 bp, Homo sapien
gctcccgccgttgggtcaggatctt

SEQ ID NO: 1563071 - DNA, 25 bp, Homo sapien
atcttgcggcgcaggtccaggccgc

SEQ ID NO: 1563072 - DNA, 25 bp, Homo sapien
agcgctcccgccgttgggtcaggat

SEQ ID NO: 1563073 - DNA, 25 bp, Homo sapien
tgcgcttgcgttcccgcctggactt

SEQ ID NO: 1563074 - DNA, 25 bp, Homo sapien
ctgggtgcccgacgaggacgaggcg

SEQ ID NO: 1563075 - DNA, 25 bp, Homo sapien
ttggcctcgccgctgcgcttgcgtt

SEQ ID NO: 1563076 - DNA, 25 bp, Homo sapien
cgagcggtgcttcttggagtcccag

SEQ ID NO: 1563077 - DNA, 25 bp, Homo sapien
cgcgagcggcggcgggtggagcggg

SEQ ID NO: 1563078 - DNA, 25 bp, Homo sapien
tgcgcgagcggcggcgggtggagcg

SEQ ID NO: 1563079 - DNA, 25 bp, Homo sapien
gagcggcggcgggtggagcgggagc

SEQ ID NO: 1563080 - DNA, 25 bp, Homo sapien
ctgcgcgagcggcggcgggtggagc

SEQ ID NO: 1563081 - DNA, 25 bp, Homo sapien
gtgtttcccgcggtgccgctcgcgc

SEQ ID NO: 1563082 - DNA, 25 bp, Homo sapien
gacgatgaggaagtggccgggggcg

SEQ ID NO: 1563083 - DNA, 25 bp, Homo sapien
ctcgcgcctcgaggacgacgatgag

SEQ ID NO: 1563084 - DNA, 25 bp, Homo sapien
tgccgctcgcgcctcgaggacgacg

SEQ ID NO: 1563085 - DNA, 25 bp, Homo sapien
tcaccacacgaggtggagccagagg

SEQ ID NO: 1563086 - DNA, 25 bp, Homo sapien
cggtcaccacacgaggtggagccag

SEQ ID NO: 1563087 - DNA, 25 bp, Homo sapien
gggccttctcgctgccatccccaga

SEQ ID NO: 1563088 - DNA, 25 bp, Homo sapien
gtcaccacacgaggtggagccagag

SEQ ID NO: 1563089 - DNA, 25 bp, Homo sapien
ctggatggagggtggcacggccccc

SEQ ID NO: 1563090 - DNA, 25 bp, Homo sapien
tggatggagggtggcacggcccccc

SEQ ID NO: 1563091 - DNA, 25 bp, Homo sapien
cgaagaggtcgtggtccgtgaggtc

SEQ ID NO: 1563092 - DNA, 25 bp, Homo sapien
cttgatggcgaagaggtcgtggtcc

SEQ ID NO: 1563093 - DNA, 25 bp, Homo sapien
tggtccgcttgatggcgaagaggtc

SEQ ID NO: 1563094 - DNA, 25 bp, Homo sapien
cgtgatggtccgcttgatggcgaag

SEQ ID NO: 1563095 - DNA, 25 bp, Homo sapien
cgctcagtccctcggagtcgtacag

SEQ ID NO: 1563096 - DNA, 25 bp, Homo sapien
gagcggcgccgatccttctggctgc

SEQ ID NO: 1563097 - DNA, 25 bp, Homo sapien
acctcccgcttaggtgaggaggccg

SEQ ID NO: 1563098 - DNA, 25 bp, Homo sapien
aggccggagcaggagagggtcctcg

SEQ ID NO: 1563099 - DNA, 25 bp, Homo sapien
tctgtccctgtcccgatcccggtca

SEQ ID NO: 1563100 - DNA, 25 bp, Homo sapien
ctgtccctgtcccgatcccggtcac

SEQ ID NO: 1563101 - DNA, 25 bp, Homo sapien
ccttcttggatgacctgtccctgtc

SEQ ID NO: 1563102 - DNA, 25 bp, Homo sapien
ggccttcttggatgacctgtccctg

SEQ ID NO: 1563103 - DNA, 25 bp, Homo sapien
acgaggatgaagagcctgagccgct

SEQ ID NO: 1563104 - DNA, 25 bp, Homo sapien
gacgaggatgaagagcctgagccgc

SEQ ID NO: 1563105 - DNA, 25 bp, Homo sapien
cgacgaggatgaagagcctgagccg

SEQ ID NO: 1563106 - DNA, 25 bp, Homo sapien
gaatttgacgccaatggagcccagg

SEQ ID NO: 1563107 - DNA, 25 bp, Homo sapien
tgtccacggtctgcgagtccggagt

SEQ ID NO: 1563108 - DNA, 25 bp, Homo sapien
tggctgcagctatccgccttggact

SEQ ID NO: 1563109 - DNA, 25 bp, Homo sapien
ttggacttcttcagcgacacctggc

SEQ ID NO: 1563110 - DNA, 25 bp, Homo sapien
ctggtggtgcagtccacaccagctg

SEQ ID NO: 1563111 - DNA, 25 bp, Homo sapien
tgcagtccacaccagctggcagatt

SEQ ID NO: 1563112 - DNA, 25 bp, Homo sapien
agtcaccggctgtggaccccgcgct

SEQ ID NO: 1563113 - DNA, 25 bp, Homo sapien
gtggtgcagtccacaccagctggca

SEQ ID NO: 1563114 - DNA, 25 bp, Homo sapien
cttcgctcggctcgccaggttggct

SEQ ID NO: 1563115 - DNA, 25 bp, Homo sapien
gccttcgctcggctcgccaggttgg

SEQ ID NO: 1563116 - DNA, 25 bp, Homo sapien
gctcggctcgccaggttggcttctt

SEQ ID NO: 1563117 - DNA, 25 bp, Homo sapien
cctgggccttcgctcggctcgccag

SEQ ID NO: 1563118 - DNA, 25 bp, Homo sapien
tctctcttgtcagacgtggcagcca

SEQ ID NO: 1563119 - DNA, 25 bp, Homo sapien
ctctctcttgtcagacgtggcagcc

SEQ ID NO: 1563120 - DNA, 25 bp, Homo sapien
gacagcacctatgggcagtactaca

SEQ ID NO: 1563121 - DNA, 25 bp, Homo sapien
tgtcgcctgccctcacaaagttcag

SEQ ID NO: 1563122 - DNA, 25 bp, Homo sapien
gagcccatttgtatcagaagcctgg

SEQ ID NO: 1563123 - DNA, 25 bp, Homo sapien
tactacagcgacacacatggaggac

SEQ ID NO: 1563124 - DNA, 25 bp, Homo sapien
ctgatagtatggcttgatggccagc

SEQ ID NO: 1563125 - DNA, 25 bp, Homo sapien
cttctgatagtatggcttgatggcc

SEQ ID NO: 1563126 - DNA, 25 bp, Homo sapien
tgtccttcttctgatagtatggctt

SEQ ID NO: 1563127 - DNA, 25 bp, Homo sapien
ccttcttctgatagtatggcttgat

SEQ ID NO: 1563128 - DNA, 25 bp, Homo sapien
caccaggttgctcaccttcactggg

SEQ ID NO: 1563129 - DNA, 25 bp, Homo sapien
ttgcgaccgtgcttgcggaagtagc

SEQ ID NO: 1563130 - DNA, 25 bp, Homo sapien
caccttcactgggttgatttcccca

SEQ ID NO: 1563131 - DNA, 25 bp, Homo sapien
tagcgctggacgtaggcccgcacca

SEQ ID NO: 1563132 - DNA, 25 bp, Homo sapien
gggaggtggagccataaatacgtcc

SEQ ID NO: 1563133 - DNA, 25 bp, Homo sapien
ggagccataaatacgtccagagttt

SEQ ID NO: 1563134 - DNA, 25 bp, Homo sapien
cataaatacgtccagagtttcaaag

SEQ ID NO: 1563135 - DNA, 25 bp, Homo sapien
ggtggagccataaatacgtccagag

SEQ ID NO: 1563136 - DNA, 25 bp, Homo sapien
taggcctatggttcagttacagcag

SEQ ID NO: 1563137 - DNA, 25 bp, Homo sapien
ccctggagaatactgtggacctgca

SEQ ID NO: 1563138 - DNA, 25 bp, Homo sapien
gagttgtagtcctccaagccctgac

SEQ ID NO: 1563139 - DNA, 25 bp, Homo sapien
tacaaggcctacctgcaggacttgg

SEQ ID NO: 1563140 - DNA, 25 bp, Homo sapien
catcgtaggtaacgcggaagagccc

SEQ ID NO: 1563141 - DNA, 25 bp, Homo sapien
tggaggtcggctgcagaaaaactag

SEQ ID NO: 1563142 - DNA, 25 bp, Homo sapien
tctgcactgaaataactagggaaag

SEQ ID NO: 1563143 - DNA, 25 bp, Homo sapien
tacacgtgaatcgattctgcactga

SEQ ID NO: 1563144 - DNA, 25 bp, Homo sapien
tgcgcagcctcgagtttgagagcta

SEQ ID NO: 1563145 - DNA, 25 bp, Homo sapien
gctctagagctcagctgacgggaaa

SEQ ID NO: 1563146 - DNA, 25 bp, Homo sapien
aaaagaaagccccagcgctctagag

SEQ ID NO: 1563147 - DNA, 25 bp, Homo sapien
gggtctgttacccaaagaatgataa

SEQ ID NO: 1563148 - DNA, 25 bp, Homo sapien
aacttgcggtctcctccactgaact

SEQ ID NO: 1563149 - DNA, 25 bp, Homo sapien
tattagttcaactttcccgcgcctg

SEQ ID NO: 1563150 - DNA, 25 bp, Homo sapien
gaacgctgggtgcacgctcaatttg

SEQ ID NO: 1563151 - DNA, 25 bp, Homo sapien
tcaatttgcatgtgacgctcccagc

SEQ ID NO: 1563152 - DNA, 25 bp, Homo sapien
cacgcctaaggaaggcagctaggac

SEQ ID NO: 1563153 - DNA, 25 bp, Homo sapien
ctaaggaaggcagctaggaccctca

SEQ ID NO: 1563154 - DNA, 25 bp, Homo sapien
ggaccctcagcgtgtcttcccggag

SEQ ID NO: 1563155 - DNA, 25 bp, Homo sapien
aaggcagctaggaccctcagcgtgt

SEQ ID NO: 1563156 - DNA, 25 bp, Homo sapien
gttggaacaggagacccggcagcct

SEQ ID NO: 1563157 - DNA, 25 bp, Homo sapien
gtggagttggaacaggagacccggc

SEQ ID NO: 1563158 - DNA, 25 bp, Homo sapien
ctaggtggagttggaacaggagacc

SEQ ID NO: 1563159 - DNA, 25 bp, Homo sapien
gagttggaacaggagacccggcagc

SEQ ID NO: 1563160 - DNA, 25 bp, Homo sapien
gacatcttcgaaggcggctcaggaa

SEQ ID NO: 1563161 - DNA, 25 bp, Homo sapien
agcagggaagacatcttcgaaggcg

SEQ ID NO: 1563162 - DNA, 25 bp, Homo sapien
cttcgaaggcggctcaggaagtctg

SEQ ID NO: 1563163 - DNA, 25 bp, Homo sapien
ggaagacatcttcgaaggcggctca

SEQ ID NO: 1563164 - DNA, 25 bp, Homo sapien
agctgctcttggaccagctgttcca

SEQ ID NO: 1563165 - DNA, 25 bp, Homo sapien
ccaaagcatagaagtctggagtagc

SEQ ID NO: 1563166 - DNA, 25 bp, Homo sapien
tgttccagccgctgggccaccaaag

SEQ ID NO: 1563167 - DNA, 25 bp, Homo sapien
ggctgggcggagatttcagctgctc

SEQ ID NO: 1563168 - DNA, 25 bp, Homo sapien
cttccttctctgtcgatgggggacc

SEQ ID NO: 1563169 - DNA, 25 bp, Homo sapien
gcttccttctctgtcgatgggggac

SEQ ID NO: 1563170 - DNA, 25 bp, Homo sapien
caccaggcgggcgaaagagtcggag

SEQ ID NO: 1563171 - DNA, 25 bp, Homo sapien
agtcggaggacaggcggaccagctt

SEQ ID NO: 1563172 - DNA, 25 bp, Homo sapien
ggaccagcttgctgcgcagggcggg

SEQ ID NO: 1563173 - DNA, 25 bp, Homo sapien
tgtcatcccggctacagaacagctc

SEQ ID NO: 1563174 - DNA, 25 bp, Homo sapien
gggagagtgccgctcagggagactg

SEQ ID NO: 1563175 - DNA, 25 bp, Homo sapien
gaccagtggggagagtgccgctcag

SEQ ID NO: 1563176 - DNA, 25 bp, Homo sapien
tgcgacagtcgccaagccacagggc

SEQ ID NO: 1563177 - DNA, 25 bp, Homo sapien
cgctcagggagactgcgacagtcgc

SEQ ID NO: 1563178 - DNA, 25 bp, Homo sapien
ttgaaatccctagcagaggacctgg

SEQ ID NO: 1563179 - DNA, 25 bp, Homo sapien
taagagccccatgaggttgtagtgg

SEQ ID NO: 1563180 - DNA, 25 bp, Homo sapien
cacaagacgaggacaataagagccc

SEQ ID NO: 1563181 - DNA, 25 bp, Homo sapien
cagcgtccacatcagccctgtgaga

SEQ ID NO: 1563182 - DNA, 25 bp, Homo sapien
cacgggtgaaacagccaggatgccc

SEQ ID NO: 1563183 - DNA, 25 bp, Homo sapien
tcaagtccacgggtgaaacagccag

SEQ ID NO: 1563184 - DNA, 25 bp, Homo sapien
caatggcaagttcaagtccacgggt

SEQ ID NO: 1563185 - DNA, 25 bp, Homo sapien
tcagtccaatggcaagttcaagtcc

SEQ ID NO: 1563186 - DNA, 25 bp, Homo sapien
ttggcaaaaacaggtagggcaacca

SEQ ID NO: 1563187 - DNA, 25 bp, Homo sapien
cagggacatgaggtgtcatcttgta

SEQ ID NO: 1563188 - DNA, 25 bp, Homo sapien
acatgaggtgtcatcttgtagcagc

SEQ ID NO: 1563189 - DNA, 25 bp, Homo sapien
gcaaaaacaggtagggcaaccacca

SEQ ID NO: 1563190 - DNA, 25 bp, Homo sapien
caatcccggaatgagctcgctcttt

SEQ ID NO: 1563191 - DNA, 25 bp, Homo sapien
tgccgctggcaaacgcctgagactt

SEQ ID NO: 1563192 - DNA, 25 bp, Homo sapien
gctatactctctggcgtgccgctgg

SEQ ID NO: 1563193 - DNA, 25 bp, Homo sapien
tggtttctgggcctccgcgcaggct

SEQ ID NO: 1563194 - DNA, 25 bp, Homo sapien
ctagttgaatgaagctgaatgcaaa

SEQ ID NO: 1563195 - DNA, 25 bp, Homo sapien
ggccgaatgcgtgggtcctgcccct

SEQ ID NO: 1563196 - DNA, 25 bp, Homo sapien
tcctctccccgatccctctacttcc

SEQ ID NO: 1563197 - DNA, 25 bp, Homo sapien
gctgaatgcaaagggccgaatgcgt

SEQ ID NO: 1563198 - DNA, 25 bp, Homo sapien
gcttctaaacgtgaatcagagcaca

SEQ ID NO: 1563199 - DNA, 25 bp, Homo sapien
ctttgtctggtcagcttctaaacgt

SEQ ID NO: 1563200 - DNA, 25 bp, Homo sapien
agagcacagcttaggcaccacttcc

SEQ ID NO: 1563201 - DNA, 25 bp, Homo sapien
aatcagagcacagcttaggcaccac

SEQ ID NO: 1563202 - DNA, 25 bp, Homo sapien
tcattggcaatggaggcggcccgtc

SEQ ID NO: 1563203 - DNA, 25 bp, Homo sapien
ctgagaataccgtctagtaattggc

SEQ ID NO: 1563204 - DNA, 25 bp, Homo sapien
tggctagagaatacgtccatcatag

SEQ ID NO: 1563205 - DNA, 25 bp, Homo sapien
cgcgaccccgctggaagatttcatt

SEQ ID NO: 1563206 - DNA, 25 bp, Homo sapien
ggaccgccttataccagagggtcca

SEQ ID NO: 1563207 - DNA, 25 bp, Homo sapien
tcacccgcacctactcctcctccgg

SEQ ID NO: 1563208 - DNA, 25 bp, Homo sapien
cgccttataccagagggtccacggc

SEQ ID NO: 1563209 - DNA, 25 bp, Homo sapien
accgccttataccagagggtccacg

SEQ ID NO: 1563210 - DNA, 25 bp, Homo sapien
gcagttcgcggcctcggctgccgcc

SEQ ID NO: 1563211 - DNA, 25 bp, Homo sapien
agttcgcggcctcggctgccgccat

SEQ ID NO: 1563212 - DNA, 25 bp, Homo sapien
gttcgcggcctcggctgccgccatc

SEQ ID NO: 1563213 - DNA, 25 bp, Homo sapien
gatgcagttcgcggcctcggctgcc

SEQ ID NO: 1563214 - DNA, 25 bp, Homo sapien
aaaggattagctactgggagtggct

SEQ ID NO: 1563215 - DNA, 25 bp, Homo sapien
aaaaggattagctactgggagtggc

SEQ ID NO: 1563216 - DNA, 25 bp, Homo sapien
aggattagctactgggagtggctgt

SEQ ID NO: 1563217 - DNA, 25 bp, Homo sapien
gaaaaaggattagctactgggagtg

SEQ ID NO: 1563218 - DNA, 25 bp, Homo sapien
gctcatcccattagccaaggtggct

SEQ ID NO: 1563219 - DNA, 25 bp, Homo sapien
ttcttcaagaggcggctggaggctc

SEQ ID NO: 1563220 - DNA, 25 bp, Homo sapien
ttcaagaggcggctggaggctcatc

SEQ ID NO: 1563221 - DNA, 25 bp, Homo sapien
gctggaggctcatcccattagccaa

SEQ ID NO: 1563222 - DNA, 25 bp, Homo sapien
accccgtctctagctcagcccacag

SEQ ID NO: 1563223 - DNA, 25 bp, Homo sapien
ccccgtctctagctcagcccacagc

SEQ ID NO: 1563224 - DNA, 25 bp, Homo sapien
gaccccgtctctagctcagcccaca

SEQ ID NO: 1563225 - DNA, 25 bp, Homo sapien
caccatccaggggagcaccccgata

SEQ ID NO: 1563226 - DNA, 25 bp, Homo sapien
accatccaggggagcaccccgatac

SEQ ID NO: 1563227 - DNA, 25 bp, Homo sapien
atgccaaagtgtgcgtaggagtcaa

SEQ ID NO: 1563228 - DNA, 25 bp, Homo sapien
tcagcgttgggcttctcactgcttt

SEQ ID NO: 1563229 - DNA, 25 bp, Homo sapien
ctcgtggatgccaaagtgtgcgtag

SEQ ID NO: 1563230 - DNA, 25 bp, Homo sapien
tctttggatgtcatgtcctcagcgt

SEQ ID NO: 1563231 - DNA, 25 bp, Homo sapien
acatgcagaggatgccggtgcccga

SEQ ID NO: 1563232 - DNA, 25 bp, Homo sapien
gaaacatggagttgcggtaagtgag

SEQ ID NO: 1563233 - DNA, 25 bp, Homo sapien
gaagaggtgccggttatgaaacatg

SEQ ID NO: 1563234 - DNA, 25 bp, Homo sapien
ggtgcccgagccgacgtccagcacc

SEQ ID NO: 1563235 - DNA, 25 bp, Homo sapien
aatcagagatactggaacactcgat

SEQ ID NO: 1563236 - DNA, 25 bp, Homo sapien
cgtggtctaacttgttggctttgac

SEQ ID NO: 1563237 - DNA, 25 bp, Homo sapien
tcttcaccgcataatcagagatact

SEQ ID NO: 1563238 - DNA, 25 bp, Homo sapien
ttgttggctttgacgatcttcaccg

SEQ ID NO: 1563239 - DNA, 25 bp, Homo sapien
aattttatgtggactgggtatcagg

SEQ ID NO: 1563240 - DNA, 25 bp, Homo sapien
gggaccccacttcagttcagagaac

SEQ ID NO: 1563241 - DNA, 25 bp, Homo sapien
agaagccatgaacccttctaacagt

SEQ ID NO: 1563242 - DNA, 25 bp, Homo sapien
tcagagaactgcgtgagcagaagcc

SEQ ID NO: 1563243 - DNA, 25 bp, Homo sapien
gttgagcatggactcgtagaagagg

SEQ ID NO: 1563244 - DNA, 25 bp, Homo sapien
tgagcatggactcgtagaagaggca

SEQ ID NO: 1563245 - DNA, 25 bp, Homo sapien
ttgagcatggactcgtagaagaggc

SEQ ID NO: 1563246 - DNA, 25 bp, Homo sapien
cttgtagtctttgtactgccggtcc

SEQ ID NO: 1563247 - DNA, 25 bp, Homo sapien
ttgtagtctttgtactgccggtcct

SEQ ID NO: 1563248 - DNA, 25 bp, Homo sapien
gtagtctttgtactgccggtcctcg

SEQ ID NO: 1563249 - DNA, 25 bp, Homo sapien
tgtagtctttgtactgccggtcctc

SEQ ID NO: 1563250 - DNA, 25 bp, Homo sapien
agcagcccacccgaggccccgcccg

SEQ ID NO: 1563251 - DNA, 25 bp, Homo sapien
agggggtgagcccgcagcagcccac

SEQ ID NO: 1563252 - DNA, 25 bp, Homo sapien
ggtgagcccgcagcagcccacccga

SEQ ID NO: 1563253 - DNA, 25 bp, Homo sapien
ccgccagctcccgggccgcgctcac

SEQ ID NO: 1563254 - DNA, 25 bp, Homo sapien
catgtcgaagccatacacgttctcc

SEQ ID NO: 1563255 - DNA, 25 bp, Homo sapien
gatgcaagacatgtcgaagccatac

SEQ ID NO: 1563256 - DNA, 25 bp, Homo sapien
caagacatgtcgaagccatacacgt

SEQ ID NO: 1563257 - DNA, 25 bp, Homo sapien
agacatgtcgaagccatacacgttc

SEQ ID NO: 1563258 - DNA, 25 bp, Homo sapien
cacgacatccactaggggctcctta

SEQ ID NO: 1563259 - DNA, 25 bp, Homo sapien
tggggtccacgacatccactagggg

SEQ ID NO: 1563260 - DNA, 25 bp, Homo sapien
cactaggggctccttaatggccaca

SEQ ID NO: 1563261 - DNA, 25 bp, Homo sapien
atccactaggggctccttaatggcc

SEQ ID NO: 1563262 - DNA, 25 bp, Homo sapien
tgagacctcaggccaacattctggg

SEQ ID NO: 1563263 - DNA, 25 bp, Homo sapien
gacgaagtgtctttcctgggcctct

SEQ ID NO: 1563264 - DNA, 25 bp, Homo sapien
gctgccagctttgggtgtttcctcc

SEQ ID NO: 1563265 - DNA, 25 bp, Homo sapien
tgtttcctccgccagaagccaagtg

SEQ ID NO: 1563266 - DNA, 25 bp, Homo sapien
gtgctcttctgcagtggcccgcgtg

SEQ ID NO: 1563267 - DNA, 25 bp, Homo sapien
aggtcttccaccttgacggtataga

SEQ ID NO: 1563268 - DNA, 25 bp, Homo sapien
aaggtcaggtcttccaccttgacgg

SEQ ID NO: 1563269 - DNA, 25 bp, Homo sapien
cttccaccttgacggtatagatgtc

SEQ ID NO: 1563270 - DNA, 25 bp, Homo sapien
ccttgacggtatagatgtccacctc

SEQ ID NO: 1563271 - DNA, 25 bp, Homo sapien
tcctcttgtggcagcgtgtgaactc

SEQ ID NO: 1563272 - DNA, 25 bp, Homo sapien
tcttgtggcagcgtgtgaactcgat

SEQ ID NO: 1563273 - DNA, 25 bp, Homo sapien
cctcttgtggcagcgtgtgaactcg

SEQ ID NO: 1563274 - DNA, 25 bp, Homo sapien
gtcctcttgtggcagcgtgtgaact

SEQ ID NO: 1563275 - DNA, 25 bp, Homo sapien
cacccttgcgttccctctgtcggaa

SEQ ID NO: 1563276 - DNA, 25 bp, Homo sapien
tgcgttccctctgtcggaatgccca

SEQ ID NO: 1563277 - DNA, 25 bp, Homo sapien
gatgggactgctatccgcgagtcac

SEQ ID NO: 1563278 - DNA, 25 bp, Homo sapien
tgggactgctatccgcgagtcacct

SEQ ID NO: 1563279 - DNA, 25 bp, Homo sapien
gtagtcctccatgtagaacaccgtc

SEQ ID NO: 1563280 - DNA, 25 bp, Homo sapien
tagaacaccgtctgcttccagtgcg

SEQ ID NO: 1563281 - DNA, 25 bp, Homo sapien
ttcttggcgttgggccgcatgccga

SEQ ID NO: 1563282 - DNA, 25 bp, Homo sapien
cgcatgccgatggtgccgaagatct

SEQ ID NO: 1563283 - DNA, 25 bp, Homo sapien
taccctgagtgccacccaccctcgc

SEQ ID NO: 1563284 - DNA, 25 bp, Homo sapien
aaaactgcccagttgacaactgctg

SEQ ID NO: 1563285 - DNA, 25 bp, Homo sapien
tgctgtcacaggctcgtgggtgtcc

SEQ ID NO: 1563286 - DNA, 25 bp, Homo sapien
tccacattccatgactaccctgagt

SEQ ID NO: 1563287 - DNA, 25 bp, Homo sapien
tccacagacggtggcaaacgtcctg

SEQ ID NO: 1563288 - DNA, 25 bp, Homo sapien
gaagatgagacaaagtcaccaacgc

SEQ ID NO: 1563289 - DNA, 25 bp, Homo sapien
gtgaaacacaatggtccagcctgct

SEQ ID NO: 1563290 - DNA, 25 bp, Homo sapien
tcctcctcaggcaaacgttccagtg

SEQ ID NO: 1563291 - DNA, 25 bp, Homo sapien
tgccctgaccctgccaagggacagc

SEQ ID NO: 1563292 - DNA, 25 bp, Homo sapien
aagggacagcaccacatggacaccc

SEQ ID NO: 1563293 - DNA, 25 bp, Homo sapien
atgagggcggaacccaccaggaggt

SEQ ID NO: 1563294 - DNA, 25 bp, Homo sapien
caggcaggctatgcgacgatgagcc

SEQ ID NO: 1563295 - DNA, 25 bp, Homo sapien
tggcccttgaagtccaggtcgatgg

SEQ ID NO: 1563296 - DNA, 25 bp, Homo sapien
gcccttgaagtccaggtcgatggtg

SEQ ID NO: 1563297 - DNA, 25 bp, Homo sapien
gacagctcgcacagctggcccttga

SEQ ID NO: 1563298 - DNA, 25 bp, Homo sapien
ggacagctcgcacagctggcccttg

SEQ ID NO: 1563299 - DNA, 25 bp, Homo sapien
ccgaaaccgcctaggaacgctcagc

SEQ ID NO: 1563300 - DNA, 25 bp, Homo sapien
tgaggatttattggcgtaaatgcaa

SEQ ID NO: 1563301 - DNA, 25 bp, Homo sapien
ggcgtaaatgcaaccatataaaaac

SEQ ID NO: 1563302 - DNA, 25 bp, Homo sapien
tgaaaaacacagtcacgatgtgccc

SEQ ID NO: 1563303 - DNA, 25 bp, Homo sapien
cccatgagaaattctatccttgcaa

SEQ ID NO: 1563304 - DNA, 25 bp, Homo sapien
agccctaagccccaagccattctag

SEQ ID NO: 1563305 - DNA, 25 bp, Homo sapien
tcccctactaggcaggacacgggta

SEQ ID NO: 1563306 - DNA, 25 bp, Homo sapien
acagccagagaggaacaatgtcgag

SEQ ID NO: 1563307 - DNA, 25 bp, Homo sapien
tgtagccagggctgttcaacgagga

SEQ ID NO: 1563308 - DNA, 25 bp, Homo sapien
caggtagctaagcagcgggattcca

SEQ ID NO: 1563309 - DNA, 25 bp, Homo sapien
tctggttgtagatgcgacctcaccc

SEQ ID NO: 1563310 - DNA, 25 bp, Homo sapien
tcacctctgtaagatgggtaggccc

SEQ ID NO: 1563311 - DNA, 25 bp, Homo sapien
cccaggtagcagacgtgcccgcggt

SEQ ID NO: 1563312 - DNA, 25 bp, Homo sapien
aatccagtatatgatctccgccagg

SEQ ID NO: 1563313 - DNA, 25 bp, Homo sapien
tgggtccggcatacgcccaggtagc

SEQ ID NO: 1563314 - DNA, 25 bp, Homo sapien
ggctccttggtggagacagcgaatc

SEQ ID NO: 1563315 - DNA, 25 bp, Homo sapien
accgagccgggcttccgcctcgcgc

SEQ ID NO: 1563316 - DNA, 25 bp, Homo sapien
gagccgggcttccgcctcgcgccac

SEQ ID NO: 1563317 - DNA, 25 bp, Homo sapien
gaaccgagccgggcttccgcctcgc

SEQ ID NO: 1563318 - DNA, 25 bp, Homo sapien
cgagccgggcttccgcctcgcgcca

SEQ ID NO: 1563319 - DNA, 25 bp, Homo sapien
gaagctccaacatacagataggcaa

SEQ ID NO: 1563320 - DNA, 25 bp, Homo sapien
gcgtcagtgttcttcgcccagcctg

SEQ ID NO: 1563321 - DNA, 25 bp, Homo sapien
aactcttgtttattcggctctgggc

SEQ ID NO: 1563322 - DNA, 25 bp, Homo sapien
gtcccgtgtgcttctaggtccaacc

SEQ ID NO: 1563323 - DNA, 25 bp, Homo sapien
cacgttgaatcaagggtccgctgat

SEQ ID NO: 1563324 - DNA, 25 bp, Homo sapien
caaatctcccgcttgcatatgtcca

SEQ ID NO: 1563325 - DNA, 25 bp, Homo sapien
caagggtccgctgatcggatcctgg

SEQ ID NO: 1563326 - DNA, 25 bp, Homo sapien
tgcaaggagtccaccaccgggtcga

SEQ ID NO: 1563327 - DNA, 25 bp, Homo sapien
gacattgacgctgtccaccccattg

SEQ ID NO: 1563328 - DNA, 25 bp, Homo sapien
gcattagttttagacccatatgaaa

SEQ ID NO: 1563329 - DNA, 25 bp, Homo sapien
aaagcattagttttagacccatatg

SEQ ID NO: 1563330 - DNA, 25 bp, Homo sapien
tgaaacaaacacctgttagacattg

SEQ ID NO: 1563331 - DNA, 25 bp, Homo sapien
cagtacaggattctcaagattcggg

SEQ ID NO: 1563332 - DNA, 25 bp, Homo sapien
tccccccagtacaggattctcaaga

SEQ ID NO: 1563333 - DNA, 25 bp, Homo sapien
gggaaactggtccaggctgagttgc

SEQ ID NO: 1563334 - DNA, 25 bp, Homo sapien
gaaactggtccaggctgagttgcgg

SEQ ID NO: 1563335 - DNA, 25 bp, Homo sapien
agagggatagctcgcgttaacccct

SEQ ID NO: 1563336 - DNA, 25 bp, Homo sapien
gccagagggatagctcgcgttaacc

SEQ ID NO: 1563337 - DNA, 25 bp, Homo sapien
aggccagagggatagctcgcgttaa

SEQ ID NO: 1563338 - DNA, 25 bp, Homo sapien
tgggaacgcatagagaggccagagg

SEQ ID NO: 1563339 - DNA, 25 bp, Homo sapien
tcttgagggtcctggtttgtagacc

SEQ ID NO: 1563340 - DNA, 25 bp, Homo sapien
tgagggaaggacgtcaattcgggac

SEQ ID NO: 1563341 - DNA, 25 bp, Homo sapien
ggtcttgagggtcctggtttgtaga

SEQ ID NO: 1563342 - DNA, 25 bp, Homo sapien
ttgagggaaggacgtcaattcggga

SEQ ID NO: 1563343 - DNA, 25 bp, Homo sapien
ctgagtcgggcagagtcatacttca

SEQ ID NO: 1563344 - DNA, 25 bp, Homo sapien
tttgcgccgacccaggactacataa

SEQ ID NO: 1563345 - DNA, 25 bp, Homo sapien
acccgggatctcacgctttcagctg

SEQ ID NO: 1563346 - DNA, 25 bp, Homo sapien
actacataacctagctcatccttct

SEQ ID NO: 1563347 - DNA, 25 bp, Homo sapien
ttcagccccgtccgaggtcagcgag

SEQ ID NO: 1563348 - DNA, 25 bp, Homo sapien
gagagatgccttttccaggagcgca

SEQ ID NO: 1563349 - DNA, 25 bp, Homo sapien
aggtcagcgagggtcggaagcccac

SEQ ID NO: 1563350 - DNA, 25 bp, Homo sapien
aagcccacggcctggtgcgcttcag

SEQ ID NO: 1563351 - DNA, 25 bp, Homo sapien
cccaggagttcagggatgaagtgag

SEQ ID NO: 1563352 - DNA, 25 bp, Homo sapien
ggagttcagggatgaagtgagctgt

SEQ ID NO: 1563353 - DNA, 25 bp, Homo sapien
gcccaggagttcagggatgaagtga

SEQ ID NO: 1563354 - DNA, 25 bp, Homo sapien
caggagttcagggatgaagtgagct

SEQ ID NO: 1563355 - DNA, 25 bp, Homo sapien
ctgaagaggaaaagccaactgaggg

SEQ ID NO: 1563356 - DNA, 25 bp, Homo sapien
gcaggaaacacaccggtgagaaagt

SEQ ID NO: 1563357 - DNA, 25 bp, Homo sapien
ggaaacacaccggtgagaaagtcat

SEQ ID NO: 1563358 - DNA, 25 bp, Homo sapien
aaaagccaactgagggggctggcag

SEQ ID NO: 1563359 - DNA, 25 bp, Homo sapien
ggaaggatccagctggaggaaccag

SEQ ID NO: 1563360 - DNA, 25 bp, Homo sapien
gaaggatccagctggaggaaccagg

SEQ ID NO: 1563361 - DNA, 25 bp, Homo sapien
tgacagaggaacttactgggtgaag

SEQ ID NO: 1563362 - DNA, 25 bp, Homo sapien
tgcctttattaatctgacccaatgt

SEQ ID NO: 1563363 - DNA, 25 bp, Homo sapien
attaatctgacccaatgtaagtctc

SEQ ID NO: 1563364 - DNA, 25 bp, Homo sapien
ttagcaggtacaccacaatgacaga

SEQ ID NO: 1563365 - DNA, 25 bp, Homo sapien
acgaggcaaacagcgcggctgccag

SEQ ID NO: 1563366 - DNA, 25 bp, Homo sapien
gacatggctccgtggggctcaagaa

SEQ ID NO: 1563367 - DNA, 25 bp, Homo sapien
tgcagtgtgaagatcagggctcccc

SEQ ID NO: 1563368 - DNA, 25 bp, Homo sapien
agccagccgtggtaggacagaagca

SEQ ID NO: 1563369 - DNA, 25 bp, Homo sapien
actgaacagcatcgggtggcggcca

SEQ ID NO: 1563370 - DNA, 25 bp, Homo sapien
agggagcgctggtaactgaacagca

SEQ ID NO: 1563371 - DNA, 25 bp, Homo sapien
agagggcacgggctggcgtggcagg

SEQ ID NO: 1563372 - DNA, 25 bp, Homo sapien
cttgcgcacggtgtcctgcacagag

SEQ ID NO: 1563373 - DNA, 25 bp, Homo sapien
gcctcaggaattcctgcgccaggac

SEQ ID NO: 1563374 - DNA, 25 bp, Homo sapien
gccaggaccgcggtccagtcgaagt

SEQ ID NO: 1563375 - DNA, 25 bp, Homo sapien
cagtcgaagtcctcgtcggagagga

SEQ ID NO: 1563376 - DNA, 25 bp, Homo sapien
aggatgggccggaccgactccaggt

SEQ ID NO: 1563377 - DNA, 25 bp, Homo sapien
cggatttcgggagcgcaggtacaca

SEQ ID NO: 1563378 - DNA, 25 bp, Homo sapien
ccatcagcggatttcgggagcgcag

SEQ ID NO: 1563379 - DNA, 25 bp, Homo sapien
gctgttcaccatcagcggatttcgg

SEQ ID NO: 1563380 - DNA, 25 bp, Homo sapien
gagcgcaggtacacaaattcctccc

SEQ ID NO: 1563381 - DNA, 25 bp, Homo sapien
gcagaggcgtgggtgtgacatacag

SEQ ID NO: 1563382 - DNA, 25 bp, Homo sapien
gcgtgggtgtgacatacaggaagtc

SEQ ID NO: 1563383 - DNA, 25 bp, Homo sapien
ctgcagaggcgtgggtgtgacatac

SEQ ID NO: 1563384 - DNA, 25 bp, Homo sapien
gaggcgtgggtgtgacatacaggaa

SEQ ID NO: 1563385 - DNA, 25 bp, Homo sapien
gggcatggacggcattcccagcgcg

SEQ ID NO: 1563386 - DNA, 25 bp, Homo sapien
caggcggtggcggtacaggaggagg

SEQ ID NO: 1563387 - DNA, 25 bp, Homo sapien
aggaggagggcatggacggcattcc

SEQ ID NO: 1563388 - DNA, 25 bp, Homo sapien
gggtatctcctggcggttcaggcgg

SEQ ID NO: 1563389 - DNA, 25 bp, Homo sapien
ctgcaggaaaccgtgggctgtgagc

SEQ ID NO: 1563390 - DNA, 25 bp, Homo sapien
catccctaacccactggggccctct

SEQ ID NO: 1563391 - DNA, 25 bp, Homo sapien
tccgcgtggtgttgaagatcttctc

SEQ ID NO: 1563392 - DNA, 25 bp, Homo sapien
tctcgtactgggcagagcataaggg

SEQ ID NO: 1563393 - DNA, 25 bp, Homo sapien
ttggacccctggaatccgcgtggtg

SEQ ID NO: 1563394 - DNA, 25 bp, Homo sapien
cataaggggcgcattcccatcagca

SEQ ID NO: 1563395 - DNA, 25 bp, Homo sapien
gagtgggtccccatgcggaagaatc

SEQ ID NO: 1563396 - DNA, 25 bp, Homo sapien
caggattctctgaaactgctgctcc

SEQ ID NO: 1563397 - DNA, 25 bp, Homo sapien
agcaggctgtttcgggagtgggtcc

SEQ ID NO: 1563398 - DNA, 25 bp, Homo sapien
cggtgagggatcatccaggattctc

SEQ ID NO: 1563399 - DNA, 25 bp, Homo sapien
ggcccgggatgtgcctgagtccatc

SEQ ID NO: 1563400 - DNA, 25 bp, Homo sapien
tgagtccatcctgcccagccgccac

SEQ ID NO: 1563401 - DNA, 25 bp, Homo sapien
cccgggatgtgcctgagtccatcct

SEQ ID NO: 1563402 - DNA, 25 bp, Homo sapien
ccgggatgtgcctgagtccatcctg

SEQ ID NO: 1563403 - DNA, 25 bp, Homo sapien
agtgacacaaagaaagcggcccctt

SEQ ID NO: 1563404 - DNA, 25 bp, Homo sapien
gcatccagtgacacaaagaaagcgg

SEQ ID NO: 1563405 - DNA, 25 bp, Homo sapien
gacgctgccgggtcctccctggtga

SEQ ID NO: 1563406 - DNA, 25 bp, Homo sapien
agagcatgggcgtaggcatccaacg

SEQ ID NO: 1563407 - DNA, 25 bp, Homo sapien
agtcggcccaggagtgctccacgct

SEQ ID NO: 1563408 - DNA, 25 bp, Homo sapien
aagacgattagggtgaaggatttgt

SEQ ID NO: 1563409 - DNA, 25 bp, Homo sapien
cccagcttcccgttagagaagacga

SEQ ID NO: 1563410 - DNA, 25 bp, Homo sapien
ccgttagagaagacgattagggtga

SEQ ID NO: 1563411 - DNA, 25 bp, Homo sapien
tctgttgagtagcccagctgaaagc

SEQ ID NO: 1563412 - DNA, 25 bp, Homo sapien
ggccgtctgttgagtagcccagctg

SEQ ID NO: 1563413 - DNA, 25 bp, Homo sapien
gtggcagcgtcggatgaagctcttg

SEQ ID NO: 1563414 - DNA, 25 bp, Homo sapien
gagaatggaacgacatggcagtcga

SEQ ID NO: 1563415 - DNA, 25 bp, Homo sapien
caaggcgatctggatgaagctgtct

SEQ ID NO: 1563416 - DNA, 25 bp, Homo sapien
gcagtcgacattttcagacaagatc

SEQ ID NO: 1563417 - DNA, 25 bp, Homo sapien
taagtcaggcagaattgacccctgt

SEQ ID NO: 1563418 - DNA, 25 bp, Homo sapien
caggaataagcgagtcatggccgac

SEQ ID NO: 1563419 - DNA, 25 bp, Homo sapien
gtcatggccgactcataagtcaggc

SEQ ID NO: 1563420 - DNA, 25 bp, Homo sapien
tccctcgtgcaagaccgcaccgtct

SEQ ID NO: 1563421 - DNA, 25 bp, Homo sapien
ggcctcaactgagtttgccacatcc

SEQ ID NO: 1563422 - DNA, 25 bp, Homo sapien
gagccaggcgggttcctaggtgtgt

SEQ ID NO: 1563423 - DNA, 25 bp, Homo sapien
acaggaagtcgacttagggctgggc

SEQ ID NO: 1563424 - DNA, 25 bp, Homo sapien
cctgcaaggtgggaatatcaacccc

SEQ ID NO: 1563425 - DNA, 25 bp, Homo sapien
tggaggaatcgggacacgatgtaca

SEQ ID NO: 1563426 - DNA, 25 bp, Homo sapien
ttgtccactgccacgcggaacaggg

SEQ ID NO: 1563427 - DNA, 25 bp, Homo sapien
gacacgatgtacagcgcaaacaggt

SEQ ID NO: 1563428 - DNA, 25 bp, Homo sapien
gcgcaaacaggtggcggtcaactcc

SEQ ID NO: 1563429 - DNA, 25 bp, Homo sapien
tctcccttcttccatggtctcccac

SEQ ID NO: 1563430 - DNA, 25 bp, Homo sapien
tcttccatggtctcccacttccctc

SEQ ID NO: 1563431 - DNA, 25 bp, Homo sapien
cccttcttccatggtctcccacttc

SEQ ID NO: 1563432 - DNA, 25 bp, Homo sapien
tccctctctaaccctttccctgtgc

SEQ ID NO: 1563433 - DNA, 25 bp, Homo sapien
agggattctattgcctcagccctcc

SEQ ID NO: 1563434 - DNA, 25 bp, Homo sapien
ttacaggtgcctgtcaccataccca

SEQ ID NO: 1563435 - DNA, 25 bp, Homo sapien
attacaggtgcctgtcaccataccc

SEQ ID NO: 1563436 - DNA, 25 bp, Homo sapien
caagggattctattgcctcagccct

SEQ ID NO: 1563437 - DNA, 25 bp, Homo sapien
gcagttccggcccttggctccactt

SEQ ID NO: 1563438 - DNA, 25 bp, Homo sapien
gaccacgccctatctggccacgccc

SEQ ID NO: 1563439 - DNA, 25 bp, Homo sapien
gacagagatctgcagttccggccct

SEQ ID NO: 1563440 - DNA, 25 bp, Homo sapien
acaggagcccatcacatgtgcagga

SEQ ID NO: 1563441 - DNA, 25 bp, Homo sapien
cctgaggaaacatagtccgggtaat

SEQ ID NO: 1563442 - DNA, 25 bp, Homo sapien
tccgggtaattgtggacgtcaaaca

SEQ ID NO: 1563443 - DNA, 25 bp, Homo sapien
aggcccgaatccaccgcctgaggaa

SEQ ID NO: 1563444 - DNA, 25 bp, Homo sapien
tttgctgaacagggatctggctggt

SEQ ID NO: 1563445 - DNA, 25 bp, Homo sapien
cctctttcctctgggggccagcgcg

SEQ ID NO: 1563446 - DNA, 25 bp, Homo sapien
tcctctgggggccagcgcgcccagc

SEQ ID NO: 1563447 - DNA, 25 bp, Homo sapien
ctttcctctgggggccagcgcgccc

SEQ ID NO: 1563448 - DNA, 25 bp, Homo sapien
ccctctttcctctgggggccagcgc

SEQ ID NO: 1563449 - DNA, 25 bp, Homo sapien
gaaacaccataaccatggtcatcag

SEQ ID NO: 1563450 - DNA, 25 bp, Homo sapien
tggagatgtggaaggtgatcatgcc

SEQ ID NO: 1563451 - DNA, 25 bp, Homo sapien
cccccatgaagatataagaaacacc

SEQ ID NO: 1563452 - DNA, 25 bp, Homo sapien
tgccatcccccatgaagatataaga

SEQ ID NO: 1563453 - DNA, 25 bp, Homo sapien
aggggaagctgggagatgggatcct

SEQ ID NO: 1563454 - DNA, 25 bp, Homo sapien
ccaggggaagctgggagatgggatc

SEQ ID NO: 1563455 - DNA, 25 bp, Homo sapien
gggaagctgggagatgggatcctgg

SEQ ID NO: 1563456 - DNA, 25 bp, Homo sapien
ctggaaggagaacaggtcagagcca

SEQ ID NO: 1563457 - DNA, 25 bp, Homo sapien
gtgcgtcctcaatgtgctgccccag

SEQ ID NO: 1563458 - DNA, 25 bp, Homo sapien
cggcgcttaaaatgctgtcccgcct

SEQ ID NO: 1563459 - DNA, 25 bp, Homo sapien
agcagtgcgtcctcaatgtgctgcc

SEQ ID NO: 1563460 - DNA, 25 bp, Homo sapien
cgcttaaaatgctgtcccgcctgga

SEQ ID NO: 1563461 - DNA, 25 bp, Homo sapien
cagaagtcggtggatgtcattgagg

SEQ ID NO: 1563462 - DNA, 25 bp, Homo sapien
agaagtcggtggatgtcattgaggc

SEQ ID NO: 1563463 - DNA, 25 bp, Homo sapien
tcagaagtcggtggatgtcattgag

SEQ ID NO: 1563464 - DNA, 25 bp, Homo sapien
gctcacacatctttattggcctgga

SEQ ID NO: 1563465 - DNA, 25 bp, Homo sapien
accagttgcccctgtcctgtgtcag

SEQ ID NO: 1563466 - DNA, 25 bp, Homo sapien
tgccaaaccagttgcccctgtcctg

SEQ ID NO: 1563467 - DNA, 25 bp, Homo sapien
gctgtggcaatttcacccttattcc

SEQ ID NO: 1563468 - DNA, 25 bp, Homo sapien
tagtggtgcaccaagcgtagctatg

SEQ ID NO: 1563469 - DNA, 25 bp, Homo sapien
aggagaacaggttcttttcactcaa

SEQ ID NO: 1563470 - DNA, 25 bp, Homo sapien
caacgctggtgtatggaggctgcaa

SEQ ID NO: 1563471 - DNA, 25 bp, Homo sapien
gacggtttagcgtatgctctgctag

SEQ ID NO: 1563472 - DNA, 25 bp, Homo sapien
cggtggtgtcggctccaggcctggc

SEQ ID NO: 1563473 - DNA, 25 bp, Homo sapien
gcccgcggtccggagctctgagccg

SEQ ID NO: 1563474 - DNA, 25 bp, Homo sapien
aaggaccccaggcagcgccaaggag

SEQ ID NO: 1563475 - DNA, 25 bp, Homo sapien
ctggcaggccgtggcaccgccccct

SEQ ID NO: 1563476 - DNA, 25 bp, Homo sapien
tgtcggagatgaacaccgcgagccc

SEQ ID NO: 1563477 - DNA, 25 bp, Homo sapien
tccggatgtcggagatgaacaccgc

SEQ ID NO: 1563478 - DNA, 25 bp, Homo sapien
agttccggatgtcggagatgaacac

SEQ ID NO: 1563479 - DNA, 25 bp, Homo sapien
cggatgtcggagatgaacaccgcga

SEQ ID NO: 1563480 - DNA, 25 bp, Homo sapien
gttccctgtcacaggttctcccaag

SEQ ID NO: 1563481 - DNA, 25 bp, Homo sapien
tccatgtcttctaggcaatctccca

SEQ ID NO: 1563482 - DNA, 25 bp, Homo sapien
agaccttacaccgacagctcttttc

SEQ ID NO: 1563483 - DNA, 25 bp, Homo sapien
gaggtctgggcgctccttcttctac

SEQ ID NO: 1563484 - DNA, 25 bp, Homo sapien
tgtggcagcatgtagcaggacgtca

SEQ ID NO: 1563485 - DNA, 25 bp, Homo sapien
gaatcatacaacacgtggcctcctg

SEQ ID NO: 1563486 - DNA, 25 bp, Homo sapien
tctccatggatctgcctattcaaga

SEQ ID NO: 1563487 - DNA, 25 bp, Homo sapien
aaaagaacctatgcattcatgagca

SEQ ID NO: 1563488 - DNA, 25 bp, Homo sapien
cactatgtggcccgggctggattcg

SEQ ID NO: 1563489 - DNA, 25 bp, Homo sapien
gtggcccgggctggattcgaactcc

SEQ ID NO: 1563490 - DNA, 25 bp, Homo sapien
atgtggcccgggctggattcgaact

SEQ ID NO: 1563491 - DNA, 25 bp, Homo sapien
ttcactatgtggcccgggctggatt

SEQ ID NO: 1563492 - DNA, 25 bp, Homo sapien
acatatgcataccataaatatagta

SEQ ID NO: 1563493 - DNA, 25 bp, Homo sapien
catatgcataccataaatatagtat

SEQ ID NO: 1563494 - DNA, 25 bp, Homo sapien
tggttttgtcataaatacgtatata

SEQ ID NO: 1563495 - DNA, 25 bp, Homo sapien
cttaatttccgcctctttgctctta

SEQ ID NO: 1563496 - DNA, 25 bp, Homo sapien
tcttaatttccgcctctttgctctt

SEQ ID NO: 1563497 - DNA, 25 bp, Homo sapien
ctcttaatttccgcctctttgctct

SEQ ID NO: 1563498 - DNA, 25 bp, Homo sapien
ttaatttccgcctctttgctcttac

SEQ ID NO: 1563499 - DNA, 25 bp, Homo sapien
ttttttcttactgtagccatccaag

SEQ ID NO: 1563500 - DNA, 25 bp, Homo sapien
tttcttactgtagccatccaaggct

SEQ ID NO: 1563501 - DNA, 25 bp, Homo sapien
ttactgtagccatccaaggctttgt

SEQ ID NO: 1563502 - DNA, 25 bp, Homo sapien
tcttactgtagccatccaaggcttt

SEQ ID NO: 1563503 - DNA, 25 bp, Homo sapien
tttattggaactcaacagattcaca

SEQ ID NO: 1563504 - DNA, 25 bp, Homo sapien
caatgtcatggccaagcaggaagat

SEQ ID NO: 1563505 - DNA, 25 bp, Homo sapien
tgcttctctgtgtatttattggaac

SEQ ID NO: 1563506 - DNA, 25 bp, Homo sapien
gtgcccaaagtcaatgtcatggcca

SEQ ID NO: 1563507 - DNA, 25 bp, Homo sapien
gagttcgagttcaccagcacagaaa

SEQ ID NO: 1563508 - DNA, 25 bp, Homo sapien
gatgcgggggatgtcagcggcaaag

SEQ ID NO: 1563509 - DNA, 25 bp, Homo sapien
ccagcacagaaatgaacaggtaacc

SEQ ID NO: 1563510 - DNA, 25 bp, Homo sapien
cggccaccaggatgcgggggatgtc

SEQ ID NO: 1563511 - DNA, 25 bp, Homo sapien
gtgacagagagagactgcctcaaaa

SEQ ID NO: 1563512 - DNA, 25 bp, Homo sapien
ggtgacagagagagactgcctcaaa

SEQ ID NO: 1563513 - DNA, 25 bp, Homo sapien
agcaggtgtaccacacgcgccgtcc

SEQ ID NO: 1563514 - DNA, 25 bp, Homo sapien
cttgtacagtcgaaggaggcacagg

SEQ ID NO: 1563515 - DNA, 25 bp, Homo sapien
gtccactcgcccatgggcaccaggt

SEQ ID NO: 1563516 - DNA, 25 bp, Homo sapien
accaggtcaggcgaggccttgtaca

SEQ ID NO: 1563517 - DNA, 25 bp, Homo sapien
aggtgatgaggctgacggcggccgt

SEQ ID NO: 1563518 - DNA, 25 bp, Homo sapien
gagacgcacgtcttgaagtcatctg

SEQ ID NO: 1563519 - DNA, 25 bp, Homo sapien
cggctcaggcgcgacacagccagag

SEQ ID NO: 1563520 - DNA, 25 bp, Homo sapien
gacacagccagagagacgcacgtct

SEQ ID NO: 1563521 - DNA, 25 bp, Homo sapien
agcttcaccgagagccagggtgctg

SEQ ID NO: 1563522 - DNA, 25 bp, Homo sapien
tagtcctggaggtcggtggaggcag

SEQ ID NO: 1563523 - DNA, 25 bp, Homo sapien
agcagccgcaggagcttcaccgaga

SEQ ID NO: 1563524 - DNA, 25 bp, Homo sapien
taggtgtagtcctggaggtcggtgg

SEQ ID NO: 1563525 - DNA, 25 bp, Homo sapien
gttggggagtgcacggcgttcatta

SEQ ID NO: 1563526 - DNA, 25 bp, Homo sapien
ggttggggagtgcacggcgttcatt

SEQ ID NO: 1563527 - DNA, 25 bp, Homo sapien
ttggggagtgcacggcgttcattac

SEQ ID NO: 1563528 - DNA, 25 bp, Homo sapien
gggtgtaccccagaattaccagctg

SEQ ID NO: 1563529 - DNA, 25 bp, Homo sapien
catttgctgaaaaggaggtgacaca

SEQ ID NO: 1563530 - DNA, 25 bp, Homo sapien
cacagggtccgaagaaactgctcca

SEQ ID NO: 1563531 - DNA, 25 bp, Homo sapien
ttggtggtgtacatcagccctggcc

SEQ ID NO: 1563532 - DNA, 25 bp, Homo sapien
agcgttccagcaaaaaatggttccg

SEQ ID NO: 1563533 - DNA, 25 bp, Homo sapien
gacgtgttttcaagtgtatgcaaga

SEQ ID NO: 1563534 - DNA, 25 bp, Homo sapien
tatgcaagagctgtcaagcgttcca

SEQ ID NO: 1563535 - DNA, 25 bp, Homo sapien
caatcaccacgtttcctagaatgtg

SEQ ID NO: 1563536 - DNA, 25 bp, Homo sapien
aagaggccactgcaggcacactcgg

SEQ ID NO: 1563537 - DNA, 25 bp, Homo sapien
agaggccactgcaggcacactcggt

SEQ ID NO: 1563538 - DNA, 25 bp, Homo sapien
agccgccccttcacagccgcatcct

SEQ ID NO: 1563539 - DNA, 25 bp, Homo sapien
cgttcttggcgttggaatgctgcac

SEQ ID NO: 1563540 - DNA, 25 bp, Homo sapien
cagtctccagacattccaccagccg

SEQ ID NO: 1563541 - DNA, 25 bp, Homo sapien
gagcacagtctccagacattccacc

SEQ ID NO: 1563542 - DNA, 25 bp, Homo sapien
aggggccacaagagagggatggtga

SEQ ID NO: 1563543 - DNA, 25 bp, Homo sapien
agcaggggccacaagagagggatgg

SEQ ID NO: 1563544 - DNA, 25 bp, Homo sapien
caggggccacaagagagggatggtg

SEQ ID NO: 1563545 - DNA, 25 bp, Homo sapien
gcaggggccacaagagagggatggt

SEQ ID NO: 1563546 - DNA, 25 bp, Homo sapien
ccagctggttgcaggcccgaaccag

SEQ ID NO: 1563547 - DNA, 25 bp, Homo sapien
ttgatgacggtgtcaatgtgcgtct

SEQ ID NO: 1563548 - DNA, 25 bp, Homo sapien
caatgtgcgtcttgacggcttcatg

SEQ ID NO: 1563549 - DNA, 25 bp, Homo sapien
cggcttcatgggagaactcggagct

SEQ ID NO: 1563550 - DNA, 25 bp, Homo sapien
catctccgacacgatctgcttggca

SEQ ID NO: 1563551 - DNA, 25 bp, Homo sapien
ggatggcgtagtctgccgtctccag

SEQ ID NO: 1563552 - DNA, 25 bp, Homo sapien
tgcttggcattgctccggtcacaca

SEQ ID NO: 1563553 - DNA, 25 bp, Homo sapien
gatctcctcgcggatggcgtagtct

SEQ ID NO: 1563554 - DNA, 25 bp, Homo sapien
tagtcgcccgcaatgcggatgaggt

SEQ ID NO: 1563555 - DNA, 25 bp, Homo sapien
cgtaccagctgtagtccacggcgta

SEQ ID NO: 1563556 - DNA, 25 bp, Homo sapien
tcaaagacggtcttggcggcatagc

SEQ ID NO: 1563557 - DNA, 25 bp, Homo sapien
gacgatctgtagcacacggtaccac

SEQ ID NO: 1563558 - DNA, 25 bp, Homo sapien
tccccaaggatgtagccgccaacct

SEQ ID NO: 1563559 - DNA, 25 bp, Homo sapien
cttcaccatgttctcgtgacaggca

SEQ ID NO: 1563560 - DNA, 25 bp, Homo sapien
ttcaccatgttctcgtgacaggcag

SEQ ID NO: 1563561 - DNA, 25 bp, Homo sapien
tgtagccgccaaccttcaccatgtt

SEQ ID NO: 1563562 - DNA, 25 bp, Homo sapien
ctgcacagatggaacttggagtgga

SEQ ID NO: 1563563 - DNA, 25 bp, Homo sapien
gatggaacttggagtggagcaggga

SEQ ID NO: 1563564 - DNA, 25 bp, Homo sapien
gtggagcagggagaactgcactggg

SEQ ID NO: 1563565 - DNA, 25 bp, Homo sapien
agtggagcagggagaactgcactgg

SEQ ID NO: 1563566 - DNA, 25 bp, Homo sapien
gctccacgtcagcattgcgcagctg

SEQ ID NO: 1563567 - DNA, 25 bp, Homo sapien
tgcagctccacgtcagcattgcgca

SEQ ID NO: 1563568 - DNA, 25 bp, Homo sapien
cacgtcagcattgcgcagctgggag

SEQ ID NO: 1563569 - DNA, 25 bp, Homo sapien
tccacgtcagcattgcgcagctggg

SEQ ID NO: 1563570 - DNA, 25 bp, Homo sapien
tggggaaggtcagttcgggtcagga

SEQ ID NO: 1563571 - DNA, 25 bp, Homo sapien
ggaaggtcagttcgggtcaggagga

SEQ ID NO: 1563572 - DNA, 25 bp, Homo sapien
aggtcagttcgggtcaggaggaggg

SEQ ID NO: 1563573 - DNA, 25 bp, Homo sapien
agggcgggaagggggtgtgcaagag

SEQ ID NO: 1563574 - DNA, 25 bp, Homo sapien
ggatggacgactcgcgctcggggaa

SEQ ID NO: 1563575 - DNA, 25 bp, Homo sapien
ccccgttgatgtcgttgctgctggg

SEQ ID NO: 1563576 - DNA, 25 bp, Homo sapien
cttcttgcgtttcagcttggccagg

SEQ ID NO: 1563577 - DNA, 25 bp, Homo sapien
ggtccctccggccatcgtccagggc

SEQ ID NO: 1563578 - DNA, 25 bp, Homo sapien
cgggccatcgaagacgtccaccaga

SEQ ID NO: 1563579 - DNA, 25 bp, Homo sapien
gcggccgggccatcgaagacgtcca

SEQ ID NO: 1563580 - DNA, 25 bp, Homo sapien
tcgaagacgtccaccagaaggttcc

SEQ ID NO: 1563581 - DNA, 25 bp, Homo sapien
catcgaagacgtccaccagaaggtt

SEQ ID NO: 1563582 - DNA, 25 bp, Homo sapien
tcggcggagtccagagtggcagagg

SEQ ID NO: 1563583 - DNA, 25 bp, Homo sapien
ttccacataggcagcgagagggcag

SEQ ID NO: 1563584 - DNA, 25 bp, Homo sapien
agacaacgaagggtggccagggtcg

SEQ ID NO: 1563585 - DNA, 25 bp, Homo sapien
aagagcaggctgagaaacggtgaca

SEQ ID NO: 1563586 - DNA, 25 bp, Homo sapien
ggggctctcgggggcaggcggctcc

SEQ ID NO: 1563587 - DNA, 25 bp, Homo sapien
cccagagcgattgagtgcgagaaca

SEQ ID NO: 1563588 - DNA, 25 bp, Homo sapien
agtggcctccaatgggaatagaacc

SEQ ID NO: 1563589 - DNA, 25 bp, Homo sapien
catcaggaacccgttgacgagggct

SEQ ID NO: 1563590 - DNA, 25 bp, Homo sapien
gcatcggcagacaccaagtttccct

SEQ ID NO: 1563591 - DNA, 25 bp, Homo sapien
actcatcggcttccggaatgggagg

SEQ ID NO: 1563592 - DNA, 25 bp, Homo sapien
ggagggccgatgtcctcaggacctg

SEQ ID NO: 1563593 - DNA, 25 bp, Homo sapien
ttattcagcaactcatcggcttccg

SEQ ID NO: 1563594 - DNA, 25 bp, Homo sapien
tccggaatgggagggccgatgtcct

SEQ ID NO: 1563595 - DNA, 25 bp, Homo sapien
ctgggctccgcacctgtcccgttcc

SEQ ID NO: 1563596 - DNA, 25 bp, Homo sapien
gggcagggggcgcaagatgacgggg

SEQ ID NO: 1563597 - DNA, 25 bp, Homo sapien
atgacgggggtgcctgtctgcacct

SEQ ID NO: 1563598 - DNA, 25 bp, Homo sapien
tgggctccgcacctgtcccgttccc

SEQ ID NO: 1563599 - DNA, 25 bp, Homo sapien
caggttctgtcggaactctgacttg

SEQ ID NO: 1563600 - DNA, 25 bp, Homo sapien
cagcagctggttctcgaacaggacc

SEQ ID NO: 1563601 - DNA, 25 bp, Homo sapien
acttgactccgatctgcagcagctg

SEQ ID NO: 1563602 - DNA, 25 bp, Homo sapien
caggaccccgttgttcttacacaca

SEQ ID NO: 1563603 - DNA, 25 bp, Homo sapien
ctccctccgacccattcccacagtc

SEQ ID NO: 1563604 - DNA, 25 bp, Homo sapien
tgagtccctctgaccccttccccaa

SEQ ID NO: 1563605 - DNA, 25 bp, Homo sapien
gttgccatagaagagatacatgcgg

SEQ ID NO: 1563606 - DNA, 25 bp, Homo sapien
ttgccatagaagagatacatgcggc

SEQ ID NO: 1563607 - DNA, 25 bp, Homo sapien
gtcttgttgccatagaagagataca

SEQ ID NO: 1563608 - DNA, 25 bp, Homo sapien
ttgttgccatagaagagatacatgc

SEQ ID NO: 1563609 - DNA, 25 bp, Homo sapien
acagtgggtgagaaattctggaact

SEQ ID NO: 1563610 - DNA, 25 bp, Homo sapien
agtgggtgagaaattctggaactgc

SEQ ID NO: 1563611 - DNA, 25 bp, Homo sapien
cacagtgggtgagaaattctggaac

SEQ ID NO: 1563612 - DNA, 25 bp, Homo sapien
tgggtgagaaattctggaactgcac

SEQ ID NO: 1563613 - DNA, 25 bp, Homo sapien
gagtctggaggtctcccgggtgaac

SEQ ID NO: 1563614 - DNA, 25 bp, Homo sapien
taattgcgtgcccaagagaggctga

SEQ ID NO: 1563615 - DNA, 25 bp, Homo sapien
gagggtctacatacacttcacagcg

SEQ ID NO: 1563616 - DNA, 25 bp, Homo sapien
gcatcatgacatggagcccagtgga

SEQ ID NO: 1563617 - DNA, 25 bp, Homo sapien
tcatgaatgtggcaatggaggccca

SEQ ID NO: 1563618 - DNA, 25 bp, Homo sapien
catactatggaaacctctgaggcgc

SEQ ID NO: 1563619 - DNA, 25 bp, Homo sapien
caagtacttgtctgtgtgcccggca

SEQ ID NO: 1563620 - DNA, 25 bp, Homo sapien
tgatgaaataatccagccgggtgtg

SEQ ID NO: 1563621 - DNA, 25 bp, Homo sapien
cacctgagtggctgtgggcaaccac

SEQ ID NO: 1563622 - DNA, 25 bp, Homo sapien
agtcccgcaggcactcgatattgag

SEQ ID NO: 1563623 - DNA, 25 bp, Homo sapien
aggaagtcccgcaggcactcgatat

SEQ ID NO: 1563624 - DNA, 25 bp, Homo sapien
cgcaggcactcgatattgagcacct

SEQ ID NO: 1563625 - DNA, 25 bp, Homo sapien
aggcactcgatattgagcacctgct

SEQ ID NO: 1563626 - DNA, 25 bp, Homo sapien
ggaagaaatcctgggccgccatctc

SEQ ID NO: 1563627 - DNA, 25 bp, Homo sapien
aggctcagctgcttccagcgctgga

SEQ ID NO: 1563628 - DNA, 25 bp, Homo sapien
gctcagctgcttccagcgctggaag

SEQ ID NO: 1563629 - DNA, 25 bp, Homo sapien
ctggaagaaatcctgggccgccatc

SEQ ID NO: 1563630 - DNA, 25 bp, Homo sapien
cttggccttagtaacttctgcgtcc

SEQ ID NO: 1563631 - DNA, 25 bp, Homo sapien
ggccttagtaacttctgcgtccatg

SEQ ID NO: 1563632 - DNA, 25 bp, Homo sapien
agtaacttctgcgtccatggggtgg

SEQ ID NO: 1563633 - DNA, 25 bp, Homo sapien
taacttctgcgtccatggggtggtt

SEQ ID NO: 1563634 - DNA, 25 bp, Homo sapien
gtccacattgtccaggagagcagag

SEQ ID NO: 1563635 - DNA, 25 bp, Homo sapien
ggggtccacattgtccaggagagca

SEQ ID NO: 1563636 - DNA, 25 bp, Homo sapien
ggagagcagagccaaaccccagaag

SEQ ID NO: 1563637 - DNA, 25 bp, Homo sapien
gttggggtccacattgtccaggaga

SEQ ID NO: 1563638 - DNA, 25 bp, Homo sapien
ccacctgcagggctttagtctggat

SEQ ID NO: 1563639 - DNA, 25 bp, Homo sapien
tgcagggctttagtctggatgatcc

SEQ ID NO: 1563640 - DNA, 25 bp, Homo sapien
gctccagccgaagcagacagcccac

SEQ ID NO: 1563641 - DNA, 25 bp, Homo sapien
agggctttagtctggatgatccccg

SEQ ID NO: 1563642 - DNA, 25 bp, Homo sapien
gaagtcgggacccaagggagataga

SEQ ID NO: 1563643 - DNA, 25 bp, Homo sapien
ggccagaaaggtgatacaagacaca

SEQ ID NO: 1563644 - DNA, 25 bp, Homo sapien
gaaaggtgatacaagacacaggaga

SEQ ID NO: 1563645 - DNA, 25 bp, Homo sapien
cagaaaggtgatacaagacacagga

SEQ ID NO: 1563646 - DNA, 25 bp, Homo sapien
acaggtgacgggagacgggctcctt

SEQ ID NO: 1563647 - DNA, 25 bp, Homo sapien
agctcacacaggtgacgggagacgg

SEQ ID NO: 1563648 - DNA, 25 bp, Homo sapien
agacgggctccttgctggtgcgcag

SEQ ID NO: 1563649 - DNA, 25 bp, Homo sapien
tggtgcgcagggtcagccggtacat

SEQ ID NO: 1563650 - DNA, 25 bp, Homo sapien
ggccacatcccccggggcagagtcc

SEQ ID NO: 1563651 - DNA, 25 bp, Homo sapien
catcccccggggcagagtccagggc

SEQ ID NO: 1563652 - DNA, 25 bp, Homo sapien
aaaactgcctcagtccaaggggctg

SEQ ID NO: 1563653 - DNA, 25 bp, Homo sapien
ccaaaactgcctcagtccaaggggc

SEQ ID NO: 1563654 - DNA, 25 bp, Homo sapien
cccagaatgtaaacagcagcagatg

SEQ ID NO: 1563655 - DNA, 25 bp, Homo sapien
caataatacacagcccctggatggg

SEQ ID NO: 1563656 - DNA, 25 bp, Homo sapien
ggaggggaggagacatccacttccc

SEQ ID NO: 1563657 - DNA, 25 bp, Homo sapien
aaggccggaggaaagtcccaggcat

SEQ ID NO: 1563658 - DNA, 25 bp, Homo sapien
ccgccaagatcggccgctcccgcct

SEQ ID NO: 1563659 - DNA, 25 bp, Homo sapien
gcctctattcttccaggcctcgccc

SEQ ID NO: 1563660 - DNA, 25 bp, Homo sapien
ccaagatcggccgctcccgcctctg

SEQ ID NO: 1563661 - DNA, 25 bp, Homo sapien
tgcctctattcttccaggcctcgcc

SEQ ID NO: 1563662 - DNA, 25 bp, Homo sapien
tacgttgctaatggtgcctactcgg

SEQ ID NO: 1563663 - DNA, 25 bp, Homo sapien
tgagacgtaggagcatggccactgc

SEQ ID NO: 1563664 - DNA, 25 bp, Homo sapien
taacaggcctggatgaacggtagct

SEQ ID NO: 1563665 - DNA, 25 bp, Homo sapien
ttattagcttcagtttgcccgccca

SEQ ID NO: 1563666 - DNA, 25 bp, Homo sapien
accagaagaaccctactatatccag

SEQ ID NO: 1563667 - DNA, 25 bp, Homo sapien
gccaccagaagaaccctactatatc

SEQ ID NO: 1563668 - DNA, 25 bp, Homo sapien
cagaagaaccctactatatccagag

SEQ ID NO: 1563669 - DNA, 25 bp, Homo sapien
cggccaccagaagaaccctactata

SEQ ID NO: 1563670 - DNA, 25 bp, Homo sapien
ggtgctcggacttcgacgtgccgcc

SEQ ID NO: 1563671 - DNA, 25 bp, Homo sapien
tatcaggctgaatggtggttgcttg

SEQ ID NO: 1563672 - DNA, 25 bp, Homo sapien
gatggtgtttttctcgatttcgccc

SEQ ID NO: 1563673 - DNA, 25 bp, Homo sapien
gacgtgccgccatctttgagcaggg

SEQ ID NO: 1563674 - DNA, 25 bp, Homo sapien
gagaaagagtttcaccctgtgggcc

SEQ ID NO: 1563675 - DNA, 25 bp, Homo sapien
cgccgggcccgctgcccttgttttg

SEQ ID NO: 1563676 - DNA, 25 bp, Homo sapien
gtagagaaagagtttcaccctgtgg

SEQ ID NO: 1563677 - DNA, 25 bp, Homo sapien
gaaagagtttcaccctgtgggccag

SEQ ID NO: 1563678 - DNA, 25 bp, Homo sapien
cgctgaggcttcgttctagctccat

SEQ ID NO: 1563679 - DNA, 25 bp, Homo sapien
ccccaccgcgtggaagactcagaaa

SEQ ID NO: 1563680 - DNA, 25 bp, Homo sapien
aagggcatagttagcccttctaggg

SEQ ID NO: 1563681 - DNA, 25 bp, Homo sapien
tgaggcttcgttctagctccatcct

SEQ ID NO: 1563682 - DNA, 25 bp, Homo sapien
gccgacgccgcggaatgagcagaaa

SEQ ID NO: 1563683 - DNA, 25 bp, Homo sapien
cgcgcgctcgcgtcgggcggtttag

SEQ ID NO: 1563684 - DNA, 25 bp, Homo sapien
tcgcgtcgggcggtttagggctgct

SEQ ID NO: 1563685 - DNA, 25 bp, Homo sapien
agccgcagccgacgccgcggaatga

SEQ ID NO: 1563686 - DNA, 25 bp, Homo sapien
agcaggtagtgcttgcggagcccct

SEQ ID NO: 1563687 - DNA, 25 bp, Homo sapien
ttggccgtaccctcaatcacaaaca

SEQ ID NO: 1563688 - DNA, 25 bp, Homo sapien
atcacaaacaccacgtcggccacca

SEQ ID NO: 1563689 - DNA, 25 bp, Homo sapien
tgcggagcccctcgaagtagggtcc

SEQ ID NO: 1563690 - DNA, 25 bp, Homo sapien
aggaagtgaaaggtcggagtcaggc

SEQ ID NO: 1563691 - DNA, 25 bp, Homo sapien
gtaggaagtgaaaggtcggagtcag

SEQ ID NO: 1563692 - DNA, 25 bp, Homo sapien
taggaagtgaaaggtcggagtcagg

SEQ ID NO: 1563693 - DNA, 25 bp, Homo sapien
ggtaggaagtgaaaggtcggagtca

SEQ ID NO: 1563694 - DNA, 25 bp, Homo sapien
aagtccgtctcagcaggaggaccac

SEQ ID NO: 1563695 - DNA, 25 bp, Homo sapien
ccccgaagtccgtctcagcaggagg

SEQ ID NO: 1563696 - DNA, 25 bp, Homo sapien
gaagtccgtctcagcaggaggacca

SEQ ID NO: 1563697 - DNA, 25 bp, Homo sapien
ccgaagtccgtctcagcaggaggac

SEQ ID NO: 1563698 - DNA, 25 bp, Homo sapien
caggaatccgggccccagcgcctcc

SEQ ID NO: 1563699 - DNA, 25 bp, Homo sapien
ggaatccgggccccagcgcctccac

SEQ ID NO: 1563700 - DNA, 25 bp, Homo sapien
aggaatccgggccccagcgcctcca

SEQ ID NO: 1563701 - DNA, 25 bp, Homo sapien
ggagcgtgacattgtacgtaggact

SEQ ID NO: 1563702 - DNA, 25 bp, Homo sapien
gactcgggagcgcagtccactgtgt

SEQ ID NO: 1563703 - DNA, 25 bp, Homo sapien
agtccactgtgttgaacaccacgag

SEQ ID NO: 1563704 - DNA, 25 bp, Homo sapien
ttgaacaccacgaggctgtactggg

SEQ ID NO: 1563705 - DNA, 25 bp, Homo sapien
gccatcgagccaggtgacaaactca

SEQ ID NO: 1563706 - DNA, 25 bp, Homo sapien
atgccatcgagccaggtgacaaact

SEQ ID NO: 1563707 - DNA, 25 bp, Homo sapien
taatgccatcgagccaggtgacaaa

SEQ ID NO: 1563708 - DNA, 25 bp, Homo sapien
ttaatgccatcgagccaggtgacaa

SEQ ID NO: 1563709 - DNA, 25 bp, Homo sapien
tcacaagtgagatactaggcacaga

SEQ ID NO: 1563710 - DNA, 25 bp, Homo sapien
cgacctcctgactattgccttgtga

SEQ ID NO: 1563711 - DNA, 25 bp, Homo sapien
ctgtggagaggtcttgtggccaaca

SEQ ID NO: 1563712 - DNA, 25 bp, Homo sapien
cagactcgccaccttgggaacggat

SEQ ID NO: 1563713 - DNA, 25 bp, Homo sapien
tgcccagctaaggcctgtaatttca

SEQ ID NO: 1563714 - DNA, 25 bp, Homo sapien
ccaaatgcagtatggcagaagtgga

SEQ ID NO: 1563715 - DNA, 25 bp, Homo sapien
agtggacttggcaccgcagctcagg

SEQ ID NO: 1563716 - DNA, 25 bp, Homo sapien
aatgcagtatggcagaagtggactt

SEQ ID NO: 1563717 - DNA, 25 bp, Homo sapien
gtggacttggcaccgcagctcaggc

SEQ ID NO: 1563718 - DNA, 25 bp, Homo sapien
tcactagggccaaggatgagaaacc

SEQ ID NO: 1563719 - DNA, 25 bp, Homo sapien
ctacgaattccagctaccgcgaagg

SEQ ID NO: 1563720 - DNA, 25 bp, Homo sapien
tatatgtcctgcacccagcacttgc

SEQ ID NO: 1563721 - DNA, 25 bp, Homo sapien
taacggccgctacgaacaggtgttg

SEQ ID NO: 1563722 - DNA, 25 bp, Homo sapien
tcccagggtataagacacctgagct

SEQ ID NO: 1563723 - DNA, 25 bp, Homo sapien
tgcaagaatcgggaaggtttcccag

SEQ ID NO: 1563724 - DNA, 25 bp, Homo sapien
gcaaatggcagaagcacccagggac

SEQ ID NO: 1563725 - DNA, 25 bp, Homo sapien
catctggctgcaagaatcgggaagg

SEQ ID NO: 1563726 - DNA, 25 bp, Homo sapien
tgctgagtccttccgcgatgaggct

SEQ ID NO: 1563727 - DNA, 25 bp, Homo sapien
tgctcgcgcatcttcttgaagtcat

SEQ ID NO: 1563728 - DNA, 25 bp, Homo sapien
gctgtgctgagtccttccgcgatga

SEQ ID NO: 1563729 - DNA, 25 bp, Homo sapien
atctgctcgcgcatcttcttgaagt

SEQ ID NO: 1563730 - DNA, 25 bp, Homo sapien
agcctcctggctcagcgtgcttggg

SEQ ID NO: 1563731 - DNA, 25 bp, Homo sapien
tgaggctggaggtagaaccactcga

SEQ ID NO: 1563732 - DNA, 25 bp, Homo sapien
ggtagaaccactcgacaggcaaagt

SEQ ID NO: 1563733 - DNA, 25 bp, Homo sapien
actcgacaggcaaagtggttccagg

SEQ ID NO: 1563734 - DNA, 25 bp, Homo sapien
gagaagacatggagccagcagcaac

SEQ ID NO: 1563735 - DNA, 25 bp, Homo sapien
acatggagccagcagcaacagaggc

SEQ ID NO: 1563736 - DNA, 25 bp, Homo sapien
gaaagagagaagacatggagccagc

SEQ ID NO: 1563737 - DNA, 25 bp, Homo sapien
gagagaagacatggagccagcagca

SEQ ID NO: 1563738 - DNA, 25 bp, Homo sapien
tatgggggtgagttgcagatgagga

SEQ ID NO: 1563739 - DNA, 25 bp, Homo sapien
gctctcaacagcaggcaacaagtat

SEQ ID NO: 1563740 - DNA, 25 bp, Homo sapien
tggtgctctcaacagcaggcaacaa

SEQ ID NO: 1563741 - DNA, 25 bp, Homo sapien
ctcaacagcaggcaacaagtatggg

SEQ ID NO: 1563742 - DNA, 25 bp, Homo sapien
attctcagttgtgcatccagagtac

SEQ ID NO: 1563743 - DNA, 25 bp, Homo sapien
agattctcagttgtgcatccagagt

SEQ ID NO: 1563744 - DNA, 25 bp, Homo sapien
aagattctcagttgtgcatccagag

SEQ ID NO: 1563745 - DNA, 25 bp, Homo sapien
gattctcagttgtgcatccagagta

SEQ ID NO: 1563746 - DNA, 25 bp, Homo sapien
tgtgtggctggacggcaccagccct

SEQ ID NO: 1563747 - DNA, 25 bp, Homo sapien
tggctggacggcaccagccctacaa

SEQ ID NO: 1563748 - DNA, 25 bp, Homo sapien
gccctacaaccacaattcccattgg

SEQ ID NO: 1563749 - DNA, 25 bp, Homo sapien
tgctgtgtggctggacggcaccagc

SEQ ID NO: 1563750 - DNA, 25 bp, Homo sapien
gaggggccgagcagtcatgacgggc

SEQ ID NO: 1563751 - DNA, 25 bp, Homo sapien
tgtaggagaggggccgagcagtcat

SEQ ID NO: 1563752 - DNA, 25 bp, Homo sapien
gccgagcagtcatgacgggccccct

SEQ ID NO: 1563753 - DNA, 25 bp, Homo sapien
gagcagtcatgacgggccccctcca

SEQ ID NO: 1563754 - DNA, 25 bp, Homo sapien
gaaccagcaccatgtgcctcgggtc

SEQ ID NO: 1563755 - DNA, 25 bp, Homo sapien
tcacatctgtcggaggctgcagcgg

SEQ ID NO: 1563756 - DNA, 25 bp, Homo sapien
gcttccggggagacacaatggagaa

SEQ ID NO: 1563757 - DNA, 25 bp, Homo sapien
aagccgaagcgcaggcagcttccgg

SEQ ID NO: 1563758 - DNA, 25 bp, Homo sapien
gggggactggctgctttgactggag

SEQ ID NO: 1563759 - DNA, 25 bp, Homo sapien
cagggggactggctgctttgactgg

SEQ ID NO: 1563760 - DNA, 25 bp, Homo sapien
ctgagggtgcggcgggaggcagggg

SEQ ID NO: 1563761 - DNA, 25 bp, Homo sapien
gggactggctgctttgactggaggg

SEQ ID NO: 1563762 - DNA, 25 bp, Homo sapien
gctgctggggggctgctgagagagt

SEQ ID NO: 1563763 - DNA, 25 bp, Homo sapien
gggggacggggggcagaggctgctg

SEQ ID NO: 1563764 - DNA, 25 bp, Homo sapien
gctggggggctgctgagagagtggc

SEQ ID NO: 1563765 - DNA, 25 bp, Homo sapien
tggggggctgctgagagagtggcac

SEQ ID NO: 1563766 - DNA, 25 bp, Homo sapien
gcattctgcgcggccacctgagctg

SEQ ID NO: 1563767 - DNA, 25 bp, Homo sapien
tgagctgcactcaggttcccgggaa

SEQ ID NO: 1563768 - DNA, 25 bp, Homo sapien
cagcctccactgcattctgcgcggc

SEQ ID NO: 1563769 - DNA, 25 bp, Homo sapien
gagctgcactcaggttcccgggaac

SEQ ID NO: 1563770 - DNA, 25 bp, Homo sapien
gcagcttgttggagaggggtgatgg

SEQ ID NO: 1563771 - DNA, 25 bp, Homo sapien
ggagcagcttgttggagaggggtga

SEQ ID NO: 1563772 - DNA, 25 bp, Homo sapien
ctccgggagcagcttgttggagagg

SEQ ID NO: 1563773 - DNA, 25 bp, Homo sapien
tgttggagaggggtgatgggcgaga

SEQ ID NO: 1563774 - DNA, 25 bp, Homo sapien
ctgggctgggaagcaggtggtggct

SEQ ID NO: 1563775 - DNA, 25 bp, Homo sapien
ggctgggaagcaggtggtggcttgg

SEQ ID NO: 1563776 - DNA, 25 bp, Homo sapien
aggtggtggcttgggggcgccaggg

SEQ ID NO: 1563777 - DNA, 25 bp, Homo sapien
agcaggtggtggcttgggggcgcca

SEQ ID NO: 1563778 - DNA, 25 bp, Homo sapien
catggacggtgccccgggctgtgcc

SEQ ID NO: 1563779 - DNA, 25 bp, Homo sapien
ccccgggctgtgccgtgggagccag

SEQ ID NO: 1563780 - DNA, 25 bp, Homo sapien
caaagccccagaaccacgagagcca

SEQ ID NO: 1563781 - DNA, 25 bp, Homo sapien
aaagccccagaaccacgagagccac

SEQ ID NO: 1563782 - DNA, 25 bp, Homo sapien
aagccccagaaccacgagagccaca

SEQ ID NO: 1563783 - DNA, 25 bp, Homo sapien
ccaaagccccagaaccacgagagcc

SEQ ID NO: 1563784 - DNA, 25 bp, Homo sapien
agcttattggagactgactgctgcc

SEQ ID NO: 1563785 - DNA, 25 bp, Homo sapien
tgactgctgcccaccgagggctggg

SEQ ID NO: 1563786 - DNA, 25 bp, Homo sapien
cttattggagactgactgctgccca

SEQ ID NO: 1563787 - DNA, 25 bp, Homo sapien
gaagcttattggagactgactgctg

SEQ ID NO: 1563788 - DNA, 25 bp, Homo sapien
ttggtgttggcatccactgaggcag

SEQ ID NO: 1563789 - DNA, 25 bp, Homo sapien
gcagtgaccgcgtcagcttggtgtt

SEQ ID NO: 1563790 - DNA, 25 bp, Homo sapien
aggttctcgccatgattcacgtaga

SEQ ID NO: 1563791 - DNA, 25 bp, Homo sapien
catgattcacgtagacctggcaggg

SEQ ID NO: 1563792 - DNA, 25 bp, Homo sapien
tgggggatgagctgcatgatcagct

SEQ ID NO: 1563793 - DNA, 25 bp, Homo sapien
agctgcatgatcagcttctggggcc

SEQ ID NO: 1563794 - DNA, 25 bp, Homo sapien
atgagctgcatgatcagcttctggg

SEQ ID NO: 1563795 - DNA, 25 bp, Homo sapien
gggatgagctgcatgatcagcttct

SEQ ID NO: 1563796 - DNA, 25 bp, Homo sapien
ctgcgggagacacagaagtcggctg

SEQ ID NO: 1563797 - DNA, 25 bp, Homo sapien
cgggagacacagaagtcggctggca

SEQ ID NO: 1563798 - DNA, 25 bp, Homo sapien
tgcgggagacacagaagtcggctgg

SEQ ID NO: 1563799 - DNA, 25 bp, Homo sapien
ggagacacagaagtcggctggcatg

SEQ ID NO: 1563800 - DNA, 25 bp, Homo sapien
accatccttgagttccggaacaaag

SEQ ID NO: 1563801 - DNA, 25 bp, Homo sapien
ccttgttggtgaaatggaactggac

SEQ ID NO: 1563802 - DNA, 25 bp, Homo sapien
catccttgagttccggaacaaaggg

SEQ ID NO: 1563803 - DNA, 25 bp, Homo sapien
cccatgatgcggtagaggcctttga

SEQ ID NO: 1563804 - DNA, 25 bp, Homo sapien
caaagtgtgaactgtgactcccaga

SEQ ID NO: 1563805 - DNA, 25 bp, Homo sapien
catctgatggcaaccccgtgagagt

SEQ ID NO: 1563806 - DNA, 25 bp, Homo sapien
tatgaaaccaatcccaatagctggc

SEQ ID NO: 1563807 - DNA, 25 bp, Homo sapien
gcctggtgcacggaagtaactgatc

SEQ ID NO: 1563808 - DNA, 25 bp, Homo sapien
acaacagctcttcagaaccattcag

SEQ ID NO: 1563809 - DNA, 25 bp, Homo sapien
gggtggacaacagctcttcagaacc

SEQ ID NO: 1563810 - DNA, 25 bp, Homo sapien
tgggtggacaacagctcttcagaac

SEQ ID NO: 1563811 - DNA, 25 bp, Homo sapien
acagctcttcagaaccattcaggcc

SEQ ID NO: 1563812 - DNA, 25 bp, Homo sapien
ctcacagggcgccgtgtgggggaag

SEQ ID NO: 1563813 - DNA, 25 bp, Homo sapien
cctcacagggcgccgtgtgggggaa

SEQ ID NO: 1563814 - DNA, 25 bp, Homo sapien
acctcacagggcgccgtgtggggga

SEQ ID NO: 1563815 - DNA, 25 bp, Homo sapien
cggatgccgttgacgaagccgctct

SEQ ID NO: 1563816 - DNA, 25 bp, Homo sapien
tgacctgccggatgccgttgacgaa

SEQ ID NO: 1563817 - DNA, 25 bp, Homo sapien
ttggtgatgacctgccggatgccgt

SEQ ID NO: 1563818 - DNA, 25 bp, Homo sapien
tcttcttggacgagtacaggagcat

SEQ ID NO: 1563819 - DNA, 25 bp, Homo sapien
ctgctgctccagcttctgctgctgg

SEQ ID NO: 1563820 - DNA, 25 bp, Homo sapien
gctgctccagcttctgctgctggac

SEQ ID NO: 1563821 - DNA, 25 bp, Homo sapien
tgctgctccagcttctgctgctgga

SEQ ID NO: 1563822 - DNA, 25 bp, Homo sapien
gctgctgctccagcttctgctgctg

SEQ ID NO: 1563823 - DNA, 25 bp, Homo sapien
gcctggcttggtcctccagaatggg

SEQ ID NO: 1563824 - DNA, 25 bp, Homo sapien
tggcttggtcctccagaatgggccc

SEQ ID NO: 1563825 - DNA, 25 bp, Homo sapien
gcttggtcctccagaatgggcccca

SEQ ID NO: 1563826 - DNA, 25 bp, Homo sapien
ttggtcctccagaatgggccccagc

SEQ ID NO: 1563827 - DNA, 25 bp, Homo sapien
cagaggcccctacggtaccctgagg

SEQ ID NO: 1563828 - DNA, 25 bp, Homo sapien
ccagaggcccctacggtaccctgag

SEQ ID NO: 1563829 - DNA, 25 bp, Homo sapien
agggccttgaggggcacctggcggg

SEQ ID NO: 1563830 - DNA, 25 bp, Homo sapien
tccaggagggccttgaggggcacct

SEQ ID NO: 1563831 - DNA, 25 bp, Homo sapien
gagggggtgggccagaagctgctcc

SEQ ID NO: 1563832 - DNA, 25 bp, Homo sapien
ctggggccgaaggatgggtccagga

SEQ ID NO: 1563833 - DNA, 25 bp, Homo sapien
ggcttcgcagctgagggttggcccc

SEQ ID NO: 1563834 - DNA, 25 bp, Homo sapien
gaggcttcgcagctgagggttggcc

SEQ ID NO: 1563835 - DNA, 25 bp, Homo sapien
cttcgcagctgagggttggccccag

SEQ ID NO: 1563836 - DNA, 25 bp, Homo sapien
aggaggcttcgcagctgagggttgg

SEQ ID NO: 1563837 - DNA, 25 bp, Homo sapien
gcagcagcgcaggagcccctggtgg

SEQ ID NO: 1563838 - DNA, 25 bp, Homo sapien
ggcggaggcagcagcgcaggagccc

SEQ ID NO: 1563839 - DNA, 25 bp, Homo sapien
gaggcagcagcgcaggagcccctgg

SEQ ID NO: 1563840 - DNA, 25 bp, Homo sapien
ctggtgcggcggaggcagcagcgca

SEQ ID NO: 1563841 - DNA, 25 bp, Homo sapien
gatgcaggagtgggggccccaactg

SEQ ID NO: 1563842 - DNA, 25 bp, Homo sapien
atgcaggagtgggggccccaactgg

SEQ ID NO: 1563843 - DNA, 25 bp, Homo sapien
tgcaggagtgggggccccaactggg

SEQ ID NO: 1563844 - DNA, 25 bp, Homo sapien
gagggggaagttgtgcgggccagga

SEQ ID NO: 1563845 - DNA, 25 bp, Homo sapien
cgagggggaagttgtgcgggccagg

SEQ ID NO: 1563846 - DNA, 25 bp, Homo sapien
ccgagggggaagttgtgcgggccag

SEQ ID NO: 1563847 - DNA, 25 bp, Homo sapien
tcttggtgctctagcccaggagctg

SEQ ID NO: 1563848 - DNA, 25 bp, Homo sapien
ttacttcccaggagcactcggtctt

SEQ ID NO: 1563849 - DNA, 25 bp, Homo sapien
gacactcagtccagacctctgccct

SEQ ID NO: 1563850 - DNA, 25 bp, Homo sapien
cactcggtcttggtgctctagccca

SEQ ID NO: 1563851 - DNA, 25 bp, Homo sapien
accctcattcttggatcctatgtct

SEQ ID NO: 1563852 - DNA, 25 bp, Homo sapien
gaggatcatgggaaacgctcttaac

SEQ ID NO: 1563853 - DNA, 25 bp, Homo sapien
gctcttaacccactaggtccttgga

SEQ ID NO: 1563854 - DNA, 25 bp, Homo sapien
gggcccagaggcactaagttttcta

SEQ ID NO: 1563855 - DNA, 25 bp, Homo sapien
caggagcacacacaggaggatcatg

SEQ ID NO: 1563856 - DNA, 25 bp, Homo sapien
tggggaagggactgcatctcccagt

SEQ ID NO: 1563857 - DNA, 25 bp, Homo sapien
cagtggggaagggactgcatctccc

SEQ ID NO: 1563858 - DNA, 25 bp, Homo sapien
gggaagggactgcatctcccagtag

SEQ ID NO: 1563859 - DNA, 25 bp, Homo sapien
aagggactgcatctcccagtaggcc

SEQ ID NO: 1563860 - DNA, 25 bp, Homo sapien
gggacccccgctcagcagcatctga

SEQ ID NO: 1563861 - DNA, 25 bp, Homo sapien
cccggggacccccgctcagcagcat

SEQ ID NO: 1563862 - DNA, 25 bp, Homo sapien
cggggacccccgctcagcagcatct

SEQ ID NO: 1563863 - DNA, 25 bp, Homo sapien
ccccggggacccccgctcagcagca

SEQ ID NO: 1563864 - DNA, 25 bp, Homo sapien
ggatgtcgtcctccatgacgctggg

SEQ ID NO: 1563865 - DNA, 25 bp, Homo sapien
gaggatgtcgtcctccatgacgctg

SEQ ID NO: 1563866 - DNA, 25 bp, Homo sapien
catgaggatgtcgtcctccatgacg

SEQ ID NO: 1563867 - DNA, 25 bp, Homo sapien
tcagatgagatccatgaggatgtcg

SEQ ID NO: 1563868 - DNA, 25 bp, Homo sapien
gccccagcgtcattcacccagggcc

SEQ ID NO: 1563869 - DNA, 25 bp, Homo sapien
aggccccagcgtcattcacccaggg

SEQ ID NO: 1563870 - DNA, 25 bp, Homo sapien
ggccccagcgtcattcacccagggc

SEQ ID NO: 1563871 - DNA, 25 bp, Homo sapien
tcatagtggcgtttcaggttgtatt

SEQ ID NO: 1563872 - DNA, 25 bp, Homo sapien
catagtggcgtttcaggttgtattc

SEQ ID NO: 1563873 - DNA, 25 bp, Homo sapien
cacaaagaaataggctcgctcccat

SEQ ID NO: 1563874 - DNA, 25 bp, Homo sapien
gctcccatttttctcgaaacacacg

SEQ ID NO: 1563875 - DNA, 25 bp, Homo sapien
tggtcgtagctcttactatgctttg

SEQ ID NO: 1563876 - DNA, 25 bp, Homo sapien
ggtcgtagctcttactatgctttga

SEQ ID NO: 1563877 - DNA, 25 bp, Homo sapien
gtcgtagctcttactatgctttgat

SEQ ID NO: 1563878 - DNA, 25 bp, Homo sapien
acgtaggtgaatacagtccgggcca

SEQ ID NO: 1563879 - DNA, 25 bp, Homo sapien
tcctgatgatggatgcaacgaccca

SEQ ID NO: 1563880 - DNA, 25 bp, Homo sapien
tgttcacaagcgtgggtactcccaa

SEQ ID NO: 1563881 - DNA, 25 bp, Homo sapien
ttctcacgtgattccggaacggcgt

SEQ ID NO: 1563882 - DNA, 25 bp, Homo sapien
catggatgttactggagtttatatt

SEQ ID NO: 1563883 - DNA, 25 bp, Homo sapien
tacaaacatggatgttactggagtt

SEQ ID NO: 1563884 - DNA, 25 bp, Homo sapien
ttactcaactatggtgaatgcatgg

SEQ ID NO: 1563885 - DNA, 25 bp, Homo sapien
aaagtcgacggccagaaatatcatc

SEQ ID NO: 1563886 - DNA, 25 bp, Homo sapien
gggaagactgcttgacccctctagg

SEQ ID NO: 1563887 - DNA, 25 bp, Homo sapien
ccagctactcgacaagtggaggtgg

SEQ ID NO: 1563888 - DNA, 25 bp, Homo sapien
tgagacccctggcaataatagtagt

SEQ ID NO: 1563889 - DNA, 25 bp, Homo sapien
ctgcttgacccctctaggcagaggc

SEQ ID NO: 1563890 - DNA, 25 bp, Homo sapien
tggtcctacgtacaagagatgtctg

SEQ ID NO: 1563891 - DNA, 25 bp, Homo sapien
tgaccccatttagcttgagtgcggc

SEQ ID NO: 1563892 - DNA, 25 bp, Homo sapien
aatgtcgtgtgctaactaggagacc

SEQ ID NO: 1563893 - DNA, 25 bp, Homo sapien
gagtgcggccatgtgattaattttg

SEQ ID NO: 1563894 - DNA, 25 bp, Homo sapien
aggagaccgcgccaaaatacatcag

SEQ ID NO: 1563895 - DNA, 25 bp, Homo sapien
tgagggtacggattgcacccgagcc

SEQ ID NO: 1563896 - DNA, 25 bp, Homo sapien
ggaacccactgagggtacggattgc

SEQ ID NO: 1563897 - DNA, 25 bp, Homo sapien
gcctggggacaaaggaacccactga

SEQ ID NO: 1563898 - DNA, 25 bp, Homo sapien
tggcagaagaacgaaggcgacacca

SEQ ID NO: 1563899 - DNA, 25 bp, Homo sapien
aagaacgaaggcgacaccaagctgg

SEQ ID NO: 1563900 - DNA, 25 bp, Homo sapien
aacgaaggcgacaccaagctggccc

SEQ ID NO: 1563901 - DNA, 25 bp, Homo sapien
gggtggcagaagaacgaaggcgaca

SEQ ID NO: 1563902 - DNA, 25 bp, Homo sapien
gaagacgcgcgagccacaacttcag

SEQ ID NO: 1563903 - DNA, 25 bp, Homo sapien
gtcctgggaagacgcgcgagccaca

SEQ ID NO: 1563904 - DNA, 25 bp, Homo sapien
ggagtgtgggctcggcggtcctgcg

SEQ ID NO: 1563905 - DNA, 25 bp, Homo sapien
gcccgggcgggagcggagtgtgggc

SEQ ID NO: 1563906 - DNA, 25 bp, Homo sapien
gcgcgtccgagggggcgtggccgga

SEQ ID NO: 1563907 - DNA, 25 bp, Homo sapien
cgtccgagggggcgtggccggagcg

SEQ ID NO: 1563908 - DNA, 25 bp, Homo sapien
caagcgcgtccgagggggcgtggcc

SEQ ID NO: 1563909 - DNA, 25 bp, Homo sapien
tccgagggggcgtggccggagcgta

SEQ ID NO: 1563910 - DNA, 25 bp, Homo sapien
cggccgaaccactgaggcgagcggg

SEQ ID NO: 1563911 - DNA, 25 bp, Homo sapien
ctgagccgtaccaagctcgggggac

SEQ ID NO: 1563912 - DNA, 25 bp, Homo sapien
gtcgccgcggccgaaccactgaggc

SEQ ID NO: 1563913 - DNA, 25 bp, Homo sapien
acgcgccgccggagtggggtcgccg

SEQ ID NO: 1563914 - DNA, 25 bp, Homo sapien
ccgcgggccacaaggggggctgcgg

SEQ ID NO: 1563915 - DNA, 25 bp, Homo sapien
gcgggccacaaggggggctgcgggc

SEQ ID NO: 1563916 - DNA, 25 bp, Homo sapien
cgggccacaaggggggctgcgggct

SEQ ID NO: 1563917 - DNA, 25 bp, Homo sapien
gcgggcccggatccgcggaggctgc

SEQ ID NO: 1563918 - DNA, 25 bp, Homo sapien
gcgcgcaccacgaggggccgcggag

SEQ ID NO: 1563919 - DNA, 25 bp, Homo sapien
gagcgcgagcggacggcgcgcacca

SEQ ID NO: 1563920 - DNA, 25 bp, Homo sapien
cgagcgggcccggatccgcggaggc

SEQ ID NO: 1563921 - DNA, 25 bp, Homo sapien
gcgctggtacaaagcgcgggcccct

SEQ ID NO: 1563922 - DNA, 25 bp, Homo sapien
aaagcatcccacatgtgggcgcggg

SEQ ID NO: 1563923 - DNA, 25 bp, Homo sapien
taggtgcgcactccacgggcacgga

SEQ ID NO: 1563924 - DNA, 25 bp, Homo sapien
ggagaacgcccacgggtgcgacatc

SEQ ID NO: 1563925 - DNA, 25 bp, Homo sapien
gagaagcgtgtgcagcccaaagtac

SEQ ID NO: 1563926 - DNA, 25 bp, Homo sapien
cggagaagcgtgtgcagcccaaagt

SEQ ID NO: 1563927 - DNA, 25 bp, Homo sapien
tttgggtccggagaagcgtgtgcag

SEQ ID NO: 1563928 - DNA, 25 bp, Homo sapien
gtccggagaagcgtgtgcagcccaa

SEQ ID NO: 1563929 - DNA, 25 bp, Homo sapien
cggtatccatgtttatgaccccagg

SEQ ID NO: 1563930 - DNA, 25 bp, Homo sapien
tgggaggtgatctaagtctcggtat

SEQ ID NO: 1563931 - DNA, 25 bp, Homo sapien
ccaggaagcctgtttaaggtttcag

SEQ ID NO: 1563932 - DNA, 25 bp, Homo sapien
tttaaggtttcagtagggctgccac

SEQ ID NO: 1563933 - DNA, 25 bp, Homo sapien
ttttgggcagtcgtcagaagatcag

SEQ ID NO: 1563934 - DNA, 25 bp, Homo sapien
tcttcacccacgcaggtgattctga

SEQ ID NO: 1563935 - DNA, 25 bp, Homo sapien
cagcaggaaacccacgagagtttcc

SEQ ID NO: 1563936 - DNA, 25 bp, Homo sapien
tctatgaagcacaaggagatctttc

SEQ ID NO: 1563937 - DNA, 25 bp, Homo sapien
tgctgagccggtgctcgctcacggc

SEQ ID NO: 1563938 - DNA, 25 bp, Homo sapien
tgagccggtgctcgctcacggccag

SEQ ID NO: 1563939 - DNA, 25 bp, Homo sapien
tgttgctgagccggtgctcgctcac

SEQ ID NO: 1563940 - DNA, 25 bp, Homo sapien
ggtgaggagggaccgatgggaccca

SEQ ID NO: 1563941 - DNA, 25 bp, Homo sapien
caggaggggcgtcactgtgcacagc

SEQ ID NO: 1563942 - DNA, 25 bp, Homo sapien
gcaggaggggcgtcactgtgcacag

SEQ ID NO: 1563943 - DNA, 25 bp, Homo sapien
actgtgcacagcctagatgccctgg

SEQ ID NO: 1563944 - DNA, 25 bp, Homo sapien
gcttcagctttgcagtggagtcaga

SEQ ID NO: 1563945 - DNA, 25 bp, Homo sapien
ccgcttcagctttgcagtggagtca

SEQ ID NO: 1563946 - DNA, 25 bp, Homo sapien
agggtccgcttcagctttgcagtgg

SEQ ID NO: 1563947 - DNA, 25 bp, Homo sapien
ggtccgcttcagctttgcagtggag

SEQ ID NO: 1563948 - DNA, 25 bp, Homo sapien
gaaggagctggtcagaaagggctgc

SEQ ID NO: 1563949 - DNA, 25 bp, Homo sapien
gctggtcagaaagggctgccctgat

SEQ ID NO: 1563950 - DNA, 25 bp, Homo sapien
gaaagggctgccctgatccccacgg

SEQ ID NO: 1563951 - DNA, 25 bp, Homo sapien
cgccctggctgccacgccccggcac

SEQ ID NO: 1563952 - DNA, 25 bp, Homo sapien
agctgcatgatcagcttctgcggcc

SEQ ID NO: 1563953 - DNA, 25 bp, Homo sapien
gcttctgcggccactggtcggtctc

SEQ ID NO: 1563954 - DNA, 25 bp, Homo sapien
atcagcttctgcggccactggtcgg

SEQ ID NO: 1563955 - DNA, 25 bp, Homo sapien
gctgctgagggatcagctgcatgat

SEQ ID NO: 1563956 - DNA, 25 bp, Homo sapien
gggcgacaggacagacagctgggtc

SEQ ID NO: 1563957 - DNA, 25 bp, Homo sapien
catgggggtgctcagagtggatggg

SEQ ID NO: 1563958 - DNA, 25 bp, Homo sapien
acaggacagacagctgggtcagcca

SEQ ID NO: 1563959 - DNA, 25 bp, Homo sapien
ctgggggcgacaggacagacagctg

SEQ ID NO: 1563960 - DNA, 25 bp, Homo sapien
tgccaactgggagttccggaacagg

SEQ ID NO: 1563961 - DNA, 25 bp, Homo sapien
gtggaactgtgccaactgggagttc

SEQ ID NO: 1563962 - DNA, 25 bp, Homo sapien
gcagagccccttgagcgagtcgcag

SEQ ID NO: 1563963 - DNA, 25 bp, Homo sapien
ttgagcgagtcgcagtctctgttgg

SEQ ID NO: 1563964 - DNA, 25 bp, Homo sapien
accacagtgctacaagggagcccgc

SEQ ID NO: 1563965 - DNA, 25 bp, Homo sapien
ccctgtgctctacggagggtgcctg

SEQ ID NO: 1563966 - DNA, 25 bp, Homo sapien
ccagctgtacttgtcaccacagtgc

SEQ ID NO: 1563967 - DNA, 25 bp, Homo sapien
acccccgcctggactgtgtgagcag

SEQ ID NO: 1563968 - DNA, 25 bp, Homo sapien
cagccactggctggatacctgggtc

SEQ ID NO: 1563969 - DNA, 25 bp, Homo sapien
tggagtgctgcggaagccgctctca

SEQ ID NO: 1563970 - DNA, 25 bp, Homo sapien
ctcccggtggccctaggaagcacgg

SEQ ID NO: 1563971 - DNA, 25 bp, Homo sapien
tgtcctccctacctcagaaaatgtc

SEQ ID NO: 1563972 - DNA, 25 bp, Homo sapien
gcgcatgggagaactaagcctgaca

SEQ ID NO: 1563973 - DNA, 25 bp, Homo sapien
tggcaggccctcaacaaacggtgct

SEQ ID NO: 1563974 - DNA, 25 bp, Homo sapien
tagaggcagactgtcccaacaggga

SEQ ID NO: 1563975 - DNA, 25 bp, Homo sapien
taaaaccgggtaatagtgcacacag

SEQ ID NO: 1563976 - DNA, 25 bp, Homo sapien
cacgcgcacctcacagggggagatg

SEQ ID NO: 1563977 - DNA, 25 bp, Homo sapien
tcttcttggacgagtacaggagcat

SEQ ID NO: 1563978 - DNA, 25 bp, Homo sapien
acgagtacaggagcatgagcacgcg

SEQ ID NO: 1563979 - DNA, 25 bp, Homo sapien
ctgccggatggcactgacgaagccg

SEQ ID NO: 1563980 - DNA, 25 bp, Homo sapien
ggcagtggggtctaatccccctctg

SEQ ID NO: 1563981 - DNA, 25 bp, Homo sapien
cttgctccagccatcgcatcacact

SEQ ID NO: 1563982 - DNA, 25 bp, Homo sapien
gcccggcatcctccgggctcccctg

SEQ ID NO: 1563983 - DNA, 25 bp, Homo sapien
cactccgcccacaccaagtctggct

SEQ ID NO: 1563984 - DNA, 25 bp, Homo sapien
ttgttgttgacgatctggactgggc

SEQ ID NO: 1563985 - DNA, 25 bp, Homo sapien
tgttgttgacgatctggactgggcc

SEQ ID NO: 1563986 - DNA, 25 bp, Homo sapien
acttgttgttgacgatctggactgg

SEQ ID NO: 1563987 - DNA, 25 bp, Homo sapien
aacttgttgttgacgatctggactg

SEQ ID NO: 1563988 - DNA, 25 bp, Homo sapien
atggcagccacctcttggaccgact

SEQ ID NO: 1563989 - DNA, 25 bp, Homo sapien
tcttggaccgactgttgggctcagg

SEQ ID NO: 1563990 - DNA, 25 bp, Homo sapien
tcacgtagacgtgggatggcagcca

SEQ ID NO: 1563991 - DNA, 25 bp, Homo sapien
aggatctccccctggttcacgtaga

SEQ ID NO: 1563992 - DNA, 25 bp, Homo sapien
gggacgagggtcaggaagccccagc

SEQ ID NO: 1563993 - DNA, 25 bp, Homo sapien
agggacgagggtcaggaagccccag

SEQ ID NO: 1563994 - DNA, 25 bp, Homo sapien
gggcacaaagggacgagggtcagga

SEQ ID NO: 1563995 - DNA, 25 bp, Homo sapien
tgtggggcacaaagggacgagggtc

SEQ ID NO: 1563996 - DNA, 25 bp, Homo sapien
gtacagcttccttggccactgctcg

SEQ ID NO: 1563997 - DNA, 25 bp, Homo sapien
cgggatgagctgcatgtacagcttc

SEQ ID NO: 1563998 - DNA, 25 bp, Homo sapien
catgtacagcttccttggccactgc

SEQ ID NO: 1563999 - DNA, 25 bp, Homo sapien
ctgctgcgggatgagctgcatgtac

SEQ ID NO: 1564000 - DNA, 25 bp, Homo sapien
gaagccaagcctgaggagctaccca

SEQ ID NO: 1564001 - DNA, 25 bp, Homo sapien
tggaagagctactgcgtgcaggctc

SEQ ID NO: 1564002 - DNA, 25 bp, Homo sapien
aagccaagcctgaggagctacccac

SEQ ID NO: 1564003 - DNA, 25 bp, Homo sapien
ccctctggaagagctactgcgtgca

SEQ ID NO: 1564004 - DNA, 25 bp, Homo sapien
cggcacaggctcttcagtgtctcca

SEQ ID NO: 1564005 - DNA, 25 bp, Homo sapien
tggaactggaccaggcgcgagttcc

SEQ ID NO: 1564006 - DNA, 25 bp, Homo sapien
agttccggaacagcggcactagggt

SEQ ID NO: 1564007 - DNA, 25 bp, Homo sapien
aagccattgtccatgatccggcaca

SEQ ID NO: 1564008 - DNA, 25 bp, Homo sapien
atgtccgcccccgtgagcggtccgg

SEQ ID NO: 1564009 - DNA, 25 bp, Homo sapien
aggagcaggcccccgcagaaccagg

SEQ ID NO: 1564010 - DNA, 25 bp, Homo sapien
agaagtcacgcccacactagccacc

SEQ ID NO: 1564011 - DNA, 25 bp, Homo sapien
catccagtgccgtggggacagcaca

SEQ ID NO: 1564012 - DNA, 25 bp, Homo sapien
ccccagataagacaatcgccaaata

SEQ ID NO: 1564013 - DNA, 25 bp, Homo sapien
aggagtgacaagggcgcctgtccct

SEQ ID NO: 1564014 - DNA, 25 bp, Homo sapien
gccaaatattctgggaccttgctgg

SEQ ID NO: 1564015 - DNA, 25 bp, Homo sapien
ggatgtggcacaagctcccgggaaa

SEQ ID NO: 1564016 - DNA, 25 bp, Homo sapien
ggacatcggggggagggctcagaaa

SEQ ID NO: 1564017 - DNA, 25 bp, Homo sapien
gtccaaccttctccacctcacagat

SEQ ID NO: 1564018 - DNA, 25 bp, Homo sapien
ggctcagaaacaccaaagtccaacc

SEQ ID NO: 1564019 - DNA, 25 bp, Homo sapien
cagaaacaccaaagtccaaccttct

SEQ ID NO: 1564020 - DNA, 25 bp, Homo sapien
atgtaaaagcacctacacccaggcc

SEQ ID NO: 1564021 - DNA, 25 bp, Homo sapien
cgaacagcttcgtggacagtttact

SEQ ID NO: 1564022 - DNA, 25 bp, Homo sapien
cagactgagtcgaaggtaattttaa

SEQ ID NO: 1564023 - DNA, 25 bp, Homo sapien
cccctgagggaatgcttgaaattgc

SEQ ID NO: 1564024 - DNA, 25 bp, Homo sapien
accagacagcaccacagggaccagc

SEQ ID NO: 1564025 - DNA, 25 bp, Homo sapien
tggcaggcacagggcgtggtgtcac

SEQ ID NO: 1564026 - DNA, 25 bp, Homo sapien
gcacagggcgtggtgtcaccagaca

SEQ ID NO: 1564027 - DNA, 25 bp, Homo sapien
tcaccagacagcaccacagggacca

SEQ ID NO: 1564028 - DNA, 25 bp, Homo sapien
cataagcacgcggatctcacacgat

SEQ ID NO: 1564029 - DNA, 25 bp, Homo sapien
cacgcggatctcacacgatgctttg

SEQ ID NO: 1564030 - DNA, 25 bp, Homo sapien
taagcacgcggatctcacacgatgc

SEQ ID NO: 1564031 - DNA, 25 bp, Homo sapien
gatctcacacgatgctttgtaggaa

SEQ ID NO: 1564032 - DNA, 25 bp, Homo sapien
ctggtcatgggggatgaggccaatg

SEQ ID NO: 1564033 - DNA, 25 bp, Homo sapien
ctgctggttggcaatgacacgccgg

SEQ ID NO: 1564034 - DNA, 25 bp, Homo sapien
gccggatgccgttgacaaagttgcc

SEQ ID NO: 1564035 - DNA, 25 bp, Homo sapien
gacacgccggatgccgttgacaaag

SEQ ID NO: 1564036 - DNA, 25 bp, Homo sapien
ttggcaatgacacgccggatgccgt

SEQ ID NO: 1564037 - DNA, 25 bp, Homo sapien
cagccctggaggccggccacctcac

SEQ ID NO: 1564038 - DNA, 25 bp, Homo sapien
gcagccctggaggccggccacctca

SEQ ID NO: 1564039 - DNA, 25 bp, Homo sapien
tgtgactcctggaggggcccagccc

SEQ ID NO: 1564040 - DNA, 25 bp, Homo sapien
gtgactcctggaggggcccagcccg

SEQ ID NO: 1564041 - DNA, 25 bp, Homo sapien
tgactcctggaggggcccagcccgg

SEQ ID NO: 1564042 - DNA, 25 bp, Homo sapien
ctgtgactcctggaggggcccagcc

SEQ ID NO: 1564043 - DNA, 25 bp, Homo sapien
ctgcagtttcccgacagcctaggac

SEQ ID NO: 1564044 - DNA, 25 bp, Homo sapien
aggcctggataccacctcccatggc

SEQ ID NO: 1564045 - DNA, 25 bp, Homo sapien
ctgtacatgacagggtcaccactca

SEQ ID NO: 1564046 - DNA, 25 bp, Homo sapien
agcctaggaccgctgggactgctgc

SEQ ID NO: 1564047 - DNA, 25 bp, Homo sapien
gctgctggccacaggctcccaagca

SEQ ID NO: 1564048 - DNA, 25 bp, Homo sapien
gggctgctggccacaggctcccaag

SEQ ID NO: 1564049 - DNA, 25 bp, Homo sapien
caggggtgcagtgggggctgctggc

SEQ ID NO: 1564050 - DNA, 25 bp, Homo sapien
tgggggctgctggccacaggctccc

SEQ ID NO: 1564051 - DNA, 25 bp, Homo sapien
gacaccatcctccatgttgctgggc

SEQ ID NO: 1564052 - DNA, 25 bp, Homo sapien
gaggcctcaggacaccatcctccat

SEQ ID NO: 1564053 - DNA, 25 bp, Homo sapien
gggcccctgctcagaagcgtgtcac

SEQ ID NO: 1564054 - DNA, 25 bp, Homo sapien
tgttgctgggcagttgaagtcccca

SEQ ID NO: 1564055 - DNA, 25 bp, Homo sapien
gatttagggaggatgttcactgcgc

SEQ ID NO: 1564056 - DNA, 25 bp, Homo sapien
gaacaatccagagggacgcttggct

SEQ ID NO: 1564057 - DNA, 25 bp, Homo sapien
ccccgaagtcggaaggtgctctcta

SEQ ID NO: 1564058 - DNA, 25 bp, Homo sapien
tgctcaggccatcgggaaatccaga

SEQ ID NO: 1564059 - DNA, 25 bp, Homo sapien
taaagggcttgaccagtctctacat

SEQ ID NO: 1564060 - DNA, 25 bp, Homo sapien
gattggctcaaatcctgtaaagggc

SEQ ID NO: 1564061 - DNA, 25 bp, Homo sapien
tgttttccgcctagcgacaagggat

SEQ ID NO: 1564062 - DNA, 25 bp, Homo sapien
gacaagggatttgctcgcacggcat

SEQ ID NO: 1564063 - DNA, 25 bp, Homo sapien
acacggccgacacaaaggcagggac

SEQ ID NO: 1564064 - DNA, 25 bp, Homo sapien
cagaagctgaagtccaccctctctt

SEQ ID NO: 1564065 - DNA, 25 bp, Homo sapien
agagtacagatggtgagtgtcccag

SEQ ID NO: 1564066 - DNA, 25 bp, Homo sapien
cttctgtgagtcagaccccgagagt

SEQ ID NO: 1564067 - DNA, 25 bp, Homo sapien
gacgctgaaggtggatccggctacg

SEQ ID NO: 1564068 - DNA, 25 bp, Homo sapien
gggcaagcacgccttgaaacgccca

SEQ ID NO: 1564069 - DNA, 25 bp, Homo sapien
tctcgccacgaagtaaacaagtggg

SEQ ID NO: 1564070 - DNA, 25 bp, Homo sapien
tgggagggtctgagagctgcaccac

SEQ ID NO: 1564071 - DNA, 25 bp, Homo sapien
tggaacctcgagggtggatcggagt

SEQ ID NO: 1564072 - DNA, 25 bp, Homo sapien
ttcagaagggggttattccactgga

SEQ ID NO: 1564073 - DNA, 25 bp, Homo sapien
aacctcgagggtggatcggagtcac

SEQ ID NO: 1564074 - DNA, 25 bp, Homo sapien
tcagaagggggttattccactggaa

SEQ ID NO: 1564075 - DNA, 25 bp, Homo sapien
tagtcagcgtgttgtcacttccgga

SEQ ID NO: 1564076 - DNA, 25 bp, Homo sapien
tcctccttttcctagtcagcgtgtt

SEQ ID NO: 1564077 - DNA, 25 bp, Homo sapien
ggccggacagtggtagcggcccgac

SEQ ID NO: 1564078 - DNA, 25 bp, Homo sapien
tgtcacttccggagaaaacagttcc

SEQ ID NO: 1564079 - DNA, 25 bp, Homo sapien
agttggggggaaccagcgagggctg

SEQ ID NO: 1564080 - DNA, 25 bp, Homo sapien
gcgagggctggggcccaagcgaggg

SEQ ID NO: 1564081 - DNA, 25 bp, Homo sapien
ctgagttggggggaaccagcgaggg

SEQ ID NO: 1564082 - DNA, 25 bp, Homo sapien
ggctggggcccaagcgaggggacca

SEQ ID NO: 1564083 - DNA, 25 bp, Homo sapien
ggtcctgatacttcttagcgctggt

SEQ ID NO: 1564084 - DNA, 25 bp, Homo sapien
tgacaccagcgatgagagagtctcg

SEQ ID NO: 1564085 - DNA, 25 bp, Homo sapien
tggtgtgcaggtacactccgccctt

SEQ ID NO: 1564086 - DNA, 25 bp, Homo sapien
ttccacgacacggatgacaccagcg

SEQ ID NO: 1564087 - DNA, 25 bp, Homo sapien
gagaagaggatttgggtggaatctc

SEQ ID NO: 1564088 - DNA, 25 bp, Homo sapien
cccagtgcaggaggacgtcattgtc

SEQ ID NO: 1564089 - DNA, 25 bp, Homo sapien
gcagagtacccaagcctaaacaggg

SEQ ID NO: 1564090 - DNA, 25 bp, Homo sapien
taggtctgggattgtacgcaggtcc

SEQ ID NO: 1564091 - DNA, 25 bp, Homo sapien
tgacttacaacagcacggacctaga

SEQ ID NO: 1564092 - DNA, 25 bp, Homo sapien
tgggagtcccagctcaaatgtctgc

SEQ ID NO: 1564093 - DNA, 25 bp, Homo sapien
tgtctcgtcactagctctgtgggtg

SEQ ID NO: 1564094 - DNA, 25 bp, Homo sapien
tgtgggtgccgactgacttccggcc

SEQ ID NO: 1564095 - DNA, 25 bp, Homo sapien
tagctctgtgggtgccgactgactt

SEQ ID NO: 1564096 - DNA, 25 bp, Homo sapien
agccttccagtgtctcgtcactagc

SEQ ID NO: 1564097 - DNA, 25 bp, Homo sapien
gtggagcaaggtggagagtcatctt

SEQ ID NO: 1564098 - DNA, 25 bp, Homo sapien
ggagcaaggtggagagtcatcttca

SEQ ID NO: 1564099 - DNA, 25 bp, Homo sapien
tggagcaaggtggagagtcatcttc

SEQ ID NO: 1564100 - DNA, 25 bp, Homo sapien
agtgatgtaacgcaacttcctggtg

SEQ ID NO: 1564101 - DNA, 25 bp, Homo sapien
caacttcctggtgccttggctgtgt

SEQ ID NO: 1564102 - DNA, 25 bp, Homo sapien
ctggaaagcggaagtgatgtaacgc

SEQ ID NO: 1564103 - DNA, 25 bp, Homo sapien
taacgcaacttcctggtgccttggc

SEQ ID NO: 1564104 - DNA, 25 bp, Homo sapien
gtgctgatgacagcccagtcaggtt

SEQ ID NO: 1564105 - DNA, 25 bp, Homo sapien
tcctcctcagaagcacatgagtcac

SEQ ID NO: 1564106 - DNA, 25 bp, Homo sapien
cagtcaggttcatagtcggggtcaa

SEQ ID NO: 1564107 - DNA, 25 bp, Homo sapien
agtggcagagctgtggccgcacagt

SEQ ID NO: 1564108 - DNA, 25 bp, Homo sapien
acgtgcttctcaagggccgccacct

SEQ ID NO: 1564109 - DNA, 25 bp, Homo sapien
cgtgcttctcaagggccgccacctc

SEQ ID NO: 1564110 - DNA, 25 bp, Homo sapien
tgcttctcaagggccgccacctcag

SEQ ID NO: 1564111 - DNA, 25 bp, Homo sapien
gtgcttctcaagggccgccacctca

SEQ ID NO: 1564112 - DNA, 25 bp, Homo sapien
ctgagaaggcccaggagccctgggg

SEQ ID NO: 1564113 - DNA, 25 bp, Homo sapien
ggagccctgggggcagctgggctct

SEQ ID NO: 1564114 - DNA, 25 bp, Homo sapien
ccctgggggcagctgggctctgcac

SEQ ID NO: 1564115 - DNA, 25 bp, Homo sapien
gccctgggggcagctgggctctgca

SEQ ID NO: 1564116 - DNA, 25 bp, Homo sapien
atggactttagctcccccagactca

SEQ ID NO: 1564117 - DNA, 25 bp, Homo sapien
cttggagcggcggatggactttagc

SEQ ID NO: 1564118 - DNA, 25 bp, Homo sapien
agcggcggatggactttagctcccc

SEQ ID NO: 1564119 - DNA, 25 bp, Homo sapien
ctggcttggagcggcggatggactt

SEQ ID NO: 1564120 - DNA, 25 bp, Homo sapien
ccgcggtggaagtgcagtgcgggca

SEQ ID NO: 1564121 - DNA, 25 bp, Homo sapien
gggtcaccagaaccaggtaggccca

SEQ ID NO: 1564122 - DNA, 25 bp, Homo sapien
gtgcagtgcgggcagggaacctcca

SEQ ID NO: 1564123 - DNA, 25 bp, Homo sapien
gcaggtagcggctgaggacgcggag

SEQ ID NO: 1564124 - DNA, 25 bp, Homo sapien
aggctgtctgtgctcggccgacatc

SEQ ID NO: 1564125 - DNA, 25 bp, Homo sapien
tgacgcacaggtgatgcacaggtag

SEQ ID NO: 1564126 - DNA, 25 bp, Homo sapien
gccgacatcggttccagctgcagcg

SEQ ID NO: 1564127 - DNA, 25 bp, Homo sapien
tgggcaacccctcatttcagggaat

SEQ ID NO: 1564128 - DNA, 25 bp, Homo sapien
agacaaggtagaggcgggagtcctg

SEQ ID NO: 1564129 - DNA, 25 bp, Homo sapien
caaggtagaggcgggagtcctgcgg

SEQ ID NO: 1564130 - DNA, 25 bp, Homo sapien
ggaagacaaggtagaggcgggagtc

SEQ ID NO: 1564131 - DNA, 25 bp, Homo sapien
aaggtagaggcgggagtcctgcggg

SEQ ID NO: 1564132 - DNA, 25 bp, Homo sapien
tggggacgaggccaaagggaggtca

SEQ ID NO: 1564133 - DNA, 25 bp, Homo sapien
gacgaggccaaagggaggtcacggc

SEQ ID NO: 1564134 - DNA, 25 bp, Homo sapien
ccaggctcgggctcatcgtcgggtg

SEQ ID NO: 1564135 - DNA, 25 bp, Homo sapien
ctcgggctcatcgtcgggtggcggg

SEQ ID NO: 1564136 - DNA, 25 bp, Homo sapien
gcaccccggaagaagttggtcactc

SEQ ID NO: 1564137 - DNA, 25 bp, Homo sapien
caccccggaagaagttggtcactcg

SEQ ID NO: 1564138 - DNA, 25 bp, Homo sapien
ccccgagaagatccggttcttcagc

SEQ ID NO: 1564139 - DNA, 25 bp, Homo sapien
aggcgaccttcagggcccacgtggc

SEQ ID NO: 1564140 - DNA, 25 bp, Homo sapien
gaagatccggttcttcagctcaggg

SEQ ID NO: 1564141 - DNA, 25 bp, Homo sapien
tgctgcaggcgaccttcagggccca

SEQ ID NO: 1564142 - DNA, 25 bp, Homo sapien
ttttcttgcgtatgtgggccttgtg

SEQ ID NO: 1564143 - DNA, 25 bp, Homo sapien
taggaggaacttccaggcctcgcgc

SEQ ID NO: 1564144 - DNA, 25 bp, Homo sapien
tcccagctgaggtaccctaggagga

SEQ ID NO: 1564145 - DNA, 25 bp, Homo sapien
tgaggtaccctaggaggaacttcca

SEQ ID NO: 1564146 - DNA, 25 bp, Homo sapien
aagtgagtttctccgctcctgctca

SEQ ID NO: 1564147 - DNA, 25 bp, Homo sapien
gatgaggctgcggtatccatgcaga

SEQ ID NO: 1564148 - DNA, 25 bp, Homo sapien
catgcagaagtgagtttctccgctc

SEQ ID NO: 1564149 - DNA, 25 bp, Homo sapien
gctgcggtatccatgcagaagtgag

SEQ ID NO: 1564150 - DNA, 25 bp, Homo sapien
aggaggatatcgttcagcaggccca

SEQ ID NO: 1564151 - DNA, 25 bp, Homo sapien
cgaggtcgaagtgatacatgcagta

SEQ ID NO: 1564152 - DNA, 25 bp, Homo sapien
ctcgggaccctcgtagaacttgttg

SEQ ID NO: 1564153 - DNA, 25 bp, Homo sapien
aacttgttggtcctgtcagtgcggc

SEQ ID NO: 1564154 - DNA, 25 bp, Homo sapien
gccaagcccgcagcgctcccctgga

SEQ ID NO: 1564155 - DNA, 25 bp, Homo sapien
cagccaagcccgcagcgctcccctg

SEQ ID NO: 1564156 - DNA, 25 bp, Homo sapien
agcccgcagcgctcccctggacagc

SEQ ID NO: 1564157 - DNA, 25 bp, Homo sapien
cggccacgcccgtccccaggcctgg

SEQ ID NO: 1564158 - DNA, 25 bp, Homo sapien
gggagagaagatcactcatgccctg

SEQ ID NO: 1564159 - DNA, 25 bp, Homo sapien
accagaaagcatccacctcgttctg

SEQ ID NO: 1564160 - DNA, 25 bp, Homo sapien
ccacctcgttctgaatgacgtagag

SEQ ID NO: 1564161 - DNA, 25 bp, Homo sapien
cgttctgaatgacgtagaggatcgg

SEQ ID NO: 1564162 - DNA, 25 bp, Homo sapien
agcagtcgcccgagttgccgcttca

SEQ ID NO: 1564163 - DNA, 25 bp, Homo sapien
ctcctggctctcttcaaagttccct

SEQ ID NO: 1564164 - DNA, 25 bp, Homo sapien
cgagttgccgcttcatggtctcctg

SEQ ID NO: 1564165 - DNA, 25 bp, Homo sapien
gtcgcccgagttgccgcttcatggt

SEQ ID NO: 1564166 - DNA, 25 bp, Homo sapien
cagagaatctggcaaggtctatggc

SEQ ID NO: 1564167 - DNA, 25 bp, Homo sapien
tttggatcaggacccaatgtccagg

SEQ ID NO: 1564168 - DNA, 25 bp, Homo sapien
tgtggggatgtttctcttgtttgga

SEQ ID NO: 1564169 - DNA, 25 bp, Homo sapien
ccaatgtccaggatgccactgtggc

SEQ ID NO: 1564170 - DNA, 25 bp, Homo sapien
ccactgtgcctggtcgaagaataaa

SEQ ID NO: 1564171 - DNA, 25 bp, Homo sapien
tgttaaagctgggatgcagcacccc

SEQ ID NO: 1564172 - DNA, 25 bp, Homo sapien
tcctgcagtttttacattgaccaag

SEQ ID NO: 1564173 - DNA, 25 bp, Homo sapien
ccagggcccagagaaccagtctctg

SEQ ID NO: 1564174 - DNA, 25 bp, Homo sapien
caatgccgcgcagtcaagaaaagtg

SEQ ID NO: 1564175 - DNA, 25 bp, Homo sapien
tgcaaaggacccgaatctccagcag

SEQ ID NO: 1564176 - DNA, 25 bp, Homo sapien
gactatgcaccgtgatgaaaaactg

SEQ ID NO: 1564177 - DNA, 25 bp, Homo sapien
tcttgcaggtggacacaatgccgcg

SEQ ID NO: 1564178 - DNA, 25 bp, Homo sapien
gagtctgagcattctaacctttgag

SEQ ID NO: 1564179 - DNA, 25 bp, Homo sapien
gaactgacactcctagatacgctgt

SEQ ID NO: 1564180 - DNA, 25 bp, Homo sapien
tgaggaaagtaacaacggaggacaa

SEQ ID NO: 1564181 - DNA, 25 bp, Homo sapien
ctggtgagcgctaagggaactgaca

SEQ ID NO: 1564182 - DNA, 25 bp, Homo sapien
acatggagcccactcagccttgccc

SEQ ID NO: 1564183 - DNA, 25 bp, Homo sapien
ctgggggatgacatggagcccactc

SEQ ID NO: 1564184 - DNA, 25 bp, Homo sapien
atggagcccactcagccttgcccag

SEQ ID NO: 1564185 - DNA, 25 bp, Homo sapien
tgggggatgacatggagcccactca

SEQ ID NO: 1564186 - DNA, 25 bp, Homo sapien
agatgagcagccaccggaaacagaa

SEQ ID NO: 1564187 - DNA, 25 bp, Homo sapien
acagccgaaggacatccgggaaggg

SEQ ID NO: 1564188 - DNA, 25 bp, Homo sapien
cccacagccgaaggacatccgggaa

SEQ ID NO: 1564189 - DNA, 25 bp, Homo sapien
gatgagcagccaccggaaacagaag

SEQ ID NO: 1564190 - DNA, 25 bp, Homo sapien
cagggtctgtccctctccgcccaac

SEQ ID NO: 1564191 - DNA, 25 bp, Homo sapien
ggtctgtccctctccgcccaacctc

SEQ ID NO: 1564192 - DNA, 25 bp, Homo sapien
aggcctctcgcccaaactggctggc

SEQ ID NO: 1564193 - DNA, 25 bp, Homo sapien
caccagggtctgtccctctccgccc

SEQ ID NO: 1564194 - DNA, 25 bp, Homo sapien
attggagccgaagccggacagcatg

SEQ ID NO: 1564195 - DNA, 25 bp, Homo sapien
gatctcattggagccgaagccggac

SEQ ID NO: 1564196 - DNA, 25 bp, Homo sapien
gaggatctcattggagccgaagccg

SEQ ID NO: 1564197 - DNA, 25 bp, Homo sapien
ccatgtccaggatggcgcaggccac

SEQ ID NO: 1564198 - DNA, 25 bp, Homo sapien
gggtgggtcaggcgccagtcggcac

SEQ ID NO: 1564199 - DNA, 25 bp, Homo sapien
ccacctccgcccgagcgcccactct

SEQ ID NO: 1564200 - DNA, 25 bp, Homo sapien
ggtcaggcgccagtcggcactcaac

SEQ ID NO: 1564201 - DNA, 25 bp, Homo sapien
ggcactcaaccacctccgcccgagc

SEQ ID NO: 1564202 - DNA, 25 bp, Homo sapien
gcttcatagtcagctcgttgatgtg

SEQ ID NO: 1564203 - DNA, 25 bp, Homo sapien
cctccacgctcagcttcatagtcag

SEQ ID NO: 1564204 - DNA, 25 bp, Homo sapien
ggtgcagggcctcggcgcgggtcag

SEQ ID NO: 1564205 - DNA, 25 bp, Homo sapien
gggcaggcggttagctggcggtgca

SEQ ID NO: 1564206 - DNA, 25 bp, Homo sapien
caggatctcctgcacgttgtggggc

SEQ ID NO: 1564207 - DNA, 25 bp, Homo sapien
taggagtcggcgccctcgtcctcct

SEQ ID NO: 1564208 - DNA, 25 bp, Homo sapien
ttaggagtcggcgccctcgtcctcc

SEQ ID NO: 1564209 - DNA, 25 bp, Homo sapien
ggctaaagtgcctgtgcagaacgag

SEQ ID NO: 1564210 - DNA, 25 bp, Homo sapien
gctaaagtgcctgtgcagaacgagg

SEQ ID NO: 1564211 - DNA, 25 bp, Homo sapien
cttatcagcagggcggcggagcaca

SEQ ID NO: 1564212 - DNA, 25 bp, Homo sapien
gcttatcagcagggcggcggagcac

SEQ ID NO: 1564213 - DNA, 25 bp, Homo sapien
cagaagctagcggttgtatcccaag

SEQ ID NO: 1564214 - DNA, 25 bp, Homo sapien
tgaagcccagtgtaacgtcagtcca

SEQ ID NO: 1564215 - DNA, 25 bp, Homo sapien
gaagtgctgatggtcttggtcccag

SEQ ID NO: 1564216 - DNA, 25 bp, Homo sapien
gacttggctcggaacttagtggcac

SEQ ID NO: 1564217 - DNA, 25 bp, Homo sapien
caaccctccggtttcaacattggct

SEQ ID NO: 1564218 - DNA, 25 bp, Homo sapien
ggcccagcctctttgcgtcaatagc

SEQ ID NO: 1564219 - DNA, 25 bp, Homo sapien
ggctcagcagggaattcagcccagc

SEQ ID NO: 1564220 - DNA, 25 bp, Homo sapien
tgggacacagggcttcagcttaaag

SEQ ID NO: 1564221 - DNA, 25 bp, Homo sapien
tacaggcgggttcacgtttggcact

SEQ ID NO: 1564222 - DNA, 25 bp, Homo sapien
ttctcattcactggtggaagcacgg

SEQ ID NO: 1564223 - DNA, 25 bp, Homo sapien
taatgccatatcgagcaccgtcacc

SEQ ID NO: 1564224 - DNA, 25 bp, Homo sapien
tcacttttggaacagcgactcttgc

SEQ ID NO: 1564225 - DNA, 25 bp, Homo sapien
cacttgtaagagccgcagacgttgg

SEQ ID NO: 1564226 - DNA, 25 bp, Homo sapien
gacgttggactgtccaacacctgct

SEQ ID NO: 1564227 - DNA, 25 bp, Homo sapien
gagccgcagacgttggactgtccaa

SEQ ID NO: 1564228 - DNA, 25 bp, Homo sapien
taagagccgcagacgttggactgtc

SEQ ID NO: 1564229 - DNA, 25 bp, Homo sapien
aagacgatgtctggcaagccttatg

SEQ ID NO: 1564230 - DNA, 25 bp, Homo sapien
gcaagccttatgcacagagctcaac

SEQ ID NO: 1564231 - DNA, 25 bp, Homo sapien
catacattcctgttcaactgttttt

SEQ ID NO: 1564232 - DNA, 25 bp, Homo sapien
ctggtgggtttatgagactcaaata

SEQ ID NO: 1564233 - DNA, 25 bp, Homo sapien
gattttgaggatccagcctcattct

SEQ ID NO: 1564234 - DNA, 25 bp, Homo sapien
tgattttgaggatccagcctcattc

SEQ ID NO: 1564235 - DNA, 25 bp, Homo sapien
gtgattttgaggatccagcctcatt

SEQ ID NO: 1564236 - DNA, 25 bp, Homo sapien
tgtggctccggggtctggtttcctc

SEQ ID NO: 1564237 - DNA, 25 bp, Homo sapien
aagagactgtgatccgaggacaggg

SEQ ID NO: 1564238 - DNA, 25 bp, Homo sapien
gagactgtgatccgaggacagggaa

SEQ ID NO: 1564239 - DNA, 25 bp, Homo sapien
agagactgtgatccgaggacaggga

SEQ ID NO: 1564240 - DNA, 25 bp, Homo sapien
gagagcgcaggcgtggtgagcgcgg

SEQ ID NO: 1564241 - DNA, 25 bp, Homo sapien
cacaaaggggtcgaggctacagagc

SEQ ID NO: 1564242 - DNA, 25 bp, Homo sapien
atggccggggctacgcaggcagagg

SEQ ID NO: 1564243 - DNA, 25 bp, Homo sapien
gtggtgagcgcggagacgggccggg

SEQ ID NO: 1564244 - DNA, 25 bp, Homo sapien
tcagcaatgttatccactcaaatcc

SEQ ID NO: 1564245 - DNA, 25 bp, Homo sapien
ctcagaatatttcgcctcaaggaaa

SEQ ID NO: 1564246 - DNA, 25 bp, Homo sapien
cgcagcccttcagcaatgttatcca

SEQ ID NO: 1564247 - DNA, 25 bp, Homo sapien
ctcaaggaaaaactcaatcccaggg

SEQ ID NO: 1564248 - DNA, 25 bp, Homo sapien
gaggatgctcaggtgggcgaagaca

SEQ ID NO: 1564249 - DNA, 25 bp, Homo sapien
aggcaccaaggcgaaagtggaagac

SEQ ID NO: 1564250 - DNA, 25 bp, Homo sapien
ggcgaagacaggcaccaaggcgaaa

SEQ ID NO: 1564251 - DNA, 25 bp, Homo sapien
ctcaggtgggcgaagacaggcacca

SEQ ID NO: 1564252 - DNA, 25 bp, Homo sapien
ggagtttcccatagtctacgagcca

SEQ ID NO: 1564253 - DNA, 25 bp, Homo sapien
cagcccactagctgggagcagggcc

SEQ ID NO: 1564254 - DNA, 25 bp, Homo sapien
gtttcccatagtctacgagccatcc

SEQ ID NO: 1564255 - DNA, 25 bp, Homo sapien
ggggagtttcccatagtctacgagc

SEQ ID NO: 1564256 - DNA, 25 bp, Homo sapien
atttattgaatacatggatgagttc

SEQ ID NO: 1564257 - DNA, 25 bp, Homo sapien
cagctccaccttccacctgccctta

SEQ ID NO: 1564258 - DNA, 25 bp, Homo sapien
atatttattgaatacatggatgagt

SEQ ID NO: 1564259 - DNA, 25 bp, Homo sapien
atggatgagttcttcctcccccatc

SEQ ID NO: 1564260 - DNA, 25 bp, Homo sapien
cagtcaacatgttacctacttggag

SEQ ID NO: 1564261 - DNA, 25 bp, Homo sapien
tctctggtctactccccacagtgtg

SEQ ID NO: 1564262 - DNA, 25 bp, Homo sapien
aactaaaatgctcttcccttgggtg

SEQ ID NO: 1564263 - DNA, 25 bp, Homo sapien
ttcttgttcccagccgtatcctcag

SEQ ID NO: 1564264 - DNA, 25 bp, Homo sapien
cagtcatccagtcagagaagccatc

SEQ ID NO: 1564265 - DNA, 25 bp, Homo sapien
ctcagtcatccagtcagagaagcca

SEQ ID NO: 1564266 - DNA, 25 bp, Homo sapien
tcgctcagtcatccagtcagagaag

SEQ ID NO: 1564267 - DNA, 25 bp, Homo sapien
gtcatccagtcagagaagccatcac

SEQ ID NO: 1564268 - DNA, 25 bp, Homo sapien
ggcggggcatctaggaagaagtctt

SEQ ID NO: 1564269 - DNA, 25 bp, Homo sapien
ccttcttgaggagggaggccatagc

SEQ ID NO: 1564270 - DNA, 25 bp, Homo sapien
gctccttcttgaggagggaggccat

SEQ ID NO: 1564271 - DNA, 25 bp, Homo sapien
cttgaggagggaggccatagcttcc

SEQ ID NO: 1564272 - DNA, 25 bp, Homo sapien
ggccagcaagtccagagtatccaag

SEQ ID NO: 1564273 - DNA, 25 bp, Homo sapien
tcgttgcggcagtagatggccagca

SEQ ID NO: 1564274 - DNA, 25 bp, Homo sapien
cgttccttcagctcgcgattccgtg

SEQ ID NO: 1564275 - DNA, 25 bp, Homo sapien
ggtccttgacgtactggatctcgcg

SEQ ID NO: 1564276 - DNA, 25 bp, Homo sapien
agcagctacgggtcctctggctccg

SEQ ID NO: 1564277 - DNA, 25 bp, Homo sapien
tagcagctacgggtcctctggctcc

SEQ ID NO: 1564278 - DNA, 25 bp, Homo sapien
ctagcagctacgggtcctctggctc

SEQ ID NO: 1564279 - DNA, 25 bp, Homo sapien
cagctacgggtcctctggctccggg

SEQ ID NO: 1564280 - DNA, 25 bp, Homo sapien
cttagcgtagtgtcccaaggtcacc

SEQ ID NO: 1564281 - DNA, 25 bp, Homo sapien
cctcggctgttatgtgacgggcata

SEQ ID NO: 1564282 - DNA, 25 bp, Homo sapien
gcctgtaggatatgggtccccttct

SEQ ID NO: 1564283 - DNA, 25 bp, Homo sapien
ttagagctaaaatgaacacccagtc

SEQ ID NO: 1564284 - DNA, 25 bp, Homo sapien
gcctgagaggattttcttataaaag

SEQ ID NO: 1564285 - DNA, 25 bp, Homo sapien
cccagcctgagaggattttcttata

SEQ ID NO: 1564286 - DNA, 25 bp, Homo sapien
cagcctgagaggattttcttataaa

SEQ ID NO: 1564287 - DNA, 25 bp, Homo sapien
cgcacccagcctgagaggattttct

SEQ ID NO: 1564288 - DNA, 25 bp, Homo sapien
gaaattgatcgggatactcaggctg

SEQ ID NO: 1564289 - DNA, 25 bp, Homo sapien
gggtcagactcagggcatgctagct

SEQ ID NO: 1564290 - DNA, 25 bp, Homo sapien
taaacccttggtgtgcctagctgct

SEQ ID NO: 1564291 - DNA, 25 bp, Homo sapien
catttgcatagctcaagcacggcca

SEQ ID NO: 1564292 - DNA, 25 bp, Homo sapien
gcagcagcagcatctctgggctctg

SEQ ID NO: 1564293 - DNA, 25 bp, Homo sapien
gggctgggcctgtcccgggaccatc

SEQ ID NO: 1564294 - DNA, 25 bp, Homo sapien
agcagcagcatctctgggctctggg

SEQ ID NO: 1564295 - DNA, 25 bp, Homo sapien
ctctggggctgggcctgtcccggga

SEQ ID NO: 1564296 - DNA, 25 bp, Homo sapien
tagccataagcagcagtagactcgt

SEQ ID NO: 1564297 - DNA, 25 bp, Homo sapien
caggagcacccgtctttgggctggt

SEQ ID NO: 1564298 - DNA, 25 bp, Homo sapien
ttgcaagacacgatgacacacaggc

SEQ ID NO: 1564299 - DNA, 25 bp, Homo sapien
cacttgaagactgtaactgggatcc

SEQ ID NO: 1564300 - DNA, 25 bp, Homo sapien
tcctctctccacccgaaagaagtac

SEQ ID NO: 1564301 - DNA, 25 bp, Homo sapien
ttcctctctccacccgaaagaagta

SEQ ID NO: 1564302 - DNA, 25 bp, Homo sapien
ggcttcctctctccacccgaaagaa

SEQ ID NO: 1564303 - DNA, 25 bp, Homo sapien
gcttcctctctccacccgaaagaag

SEQ ID NO: 1564304 - DNA, 25 bp, Homo sapien
ttagaacaaattgttcacgaaacta

SEQ ID NO: 1564305 - DNA, 25 bp, Homo sapien
caaattgttcacgaaactatgtctc

SEQ ID NO: 1564306 - DNA, 25 bp, Homo sapien
aacaaattgttcacgaaactatgtc

SEQ ID NO: 1564307 - DNA, 25 bp, Homo sapien
aattgttcacgaaactatgtctcac

SEQ ID NO: 1564308 - DNA, 25 bp, Homo sapien
ctgcaggggtccctgaaagccctct

SEQ ID NO: 1564309 - DNA, 25 bp, Homo sapien
gcaggggtccctgaaagccctctct

SEQ ID NO: 1564310 - DNA, 25 bp, Homo sapien
tgcaggggtccctgaaagccctctc

SEQ ID NO: 1564311 - DNA, 25 bp, Homo sapien
ccagggtctcggggatgtagacatc

SEQ ID NO: 1564312 - DNA, 25 bp, Homo sapien
aagtgggaggtgcttggtctggttc

SEQ ID NO: 1564313 - DNA, 25 bp, Homo sapien
tctggttcttctaggggagagggca

SEQ ID NO: 1564314 - DNA, 25 bp, Homo sapien
aaagaaggggctggacatttcttga

SEQ ID NO: 1564315 - DNA, 25 bp, Homo sapien
aaggggctggacatttcttgaaagc

SEQ ID NO: 1564316 - DNA, 25 bp, Homo sapien
cacggagtcggacggtcctctgtgc

SEQ ID NO: 1564317 - DNA, 25 bp, Homo sapien
cacacggagtcggacggtcctctgt

SEQ ID NO: 1564318 - DNA, 25 bp, Homo sapien
aggccacacggagtcggacggtcct

SEQ ID NO: 1564319 - DNA, 25 bp, Homo sapien
gagtcggacggtcctctgtgcgctc

SEQ ID NO: 1564320 - DNA, 25 bp, Homo sapien
gggctgtctgcacgccccaccctcc

SEQ ID NO: 1564321 - DNA, 25 bp, Homo sapien
cggggctgtctgcacgccccaccct

SEQ ID NO: 1564322 - DNA, 25 bp, Homo sapien
cgccccaccctcccaggccacactc

SEQ ID NO: 1564323 - DNA, 25 bp, Homo sapien
ccccaccctcccaggccacactcac

SEQ ID NO: 1564324 - DNA, 25 bp, Homo sapien
gcctgttctccgctcggcaggtgta

SEQ ID NO: 1564325 - DNA, 25 bp, Homo sapien
gagccaagcctgttctccgctcggc

SEQ ID NO: 1564326 - DNA, 25 bp, Homo sapien
gctcggcaggtgtagcgccctgaat

SEQ ID NO: 1564327 - DNA, 25 bp, Homo sapien
tcggcaggtgtagcgccctgaatcc

SEQ ID NO: 1564328 - DNA, 25 bp, Homo sapien
ctgtcctgtttgcttgggaaaccat

SEQ ID NO: 1564329 - DNA, 25 bp, Homo sapien
tgtcctgtttgcttgggaaaccatc

SEQ ID NO: 1564330 - DNA, 25 bp, Homo sapien
ggaaaccatcactctcaggttctct

SEQ ID NO: 1564331 - DNA, 25 bp, Homo sapien
aaccatcactctcaggttctctgga

SEQ ID NO: 1564332 - DNA, 25 bp, Homo sapien
gtggcaggtgaactctccttcgtgc

SEQ ID NO: 1564333 - DNA, 25 bp, Homo sapien
agaaccacccccgtcatgggccctg

SEQ ID NO: 1564334 - DNA, 25 bp, Homo sapien
ccacccccgtcatgggccctgattt

SEQ ID NO: 1564335 - DNA, 25 bp, Homo sapien
aagcaggatcttcatagccacctcc

SEQ ID NO: 1564336 - DNA, 25 bp, Homo sapien
ggcagagaagcaggatcttcatagc

SEQ ID NO: 1564337 - DNA, 25 bp, Homo sapien
ttagtccgtgacagcgtctgcagcc

SEQ ID NO: 1564338 - DNA, 25 bp, Homo sapien
ggagattagtccgtgacagcgtctg

SEQ ID NO: 1564339 - DNA, 25 bp, Homo sapien
ctggagattagtccgtgacagcgtc

SEQ ID NO: 1564340 - DNA, 25 bp, Homo sapien
gattagtccgtgacagcgtctgcag

SEQ ID NO: 1564341 - DNA, 25 bp, Homo sapien
ggaggcatctggaagcagtctggag

SEQ ID NO: 1564342 - DNA, 25 bp, Homo sapien
ggaactggctcatcttgcacgtggt

SEQ ID NO: 1564343 - DNA, 25 bp, Homo sapien
cctaatgcacgttccatggatggag

SEQ ID NO: 1564344 - DNA, 25 bp, Homo sapien
tgcacgtggtgcgtgtggttcctcc

SEQ ID NO: 1564345 - DNA, 25 bp, Homo sapien
aagttggatgtgaccaccgcaaaca

SEQ ID NO: 1564346 - DNA, 25 bp, Homo sapien
ctcctggttcaaatgattcttctgc

SEQ ID NO: 1564347 - DNA, 25 bp, Homo sapien
cctcctggttcaaatgattcttctg

SEQ ID NO: 1564348 - DNA, 25 bp, Homo sapien
tatcaacaccgggttccatcctctg

SEQ ID NO: 1564349 - DNA, 25 bp, Homo sapien
agggtcctggcaaccgctgtgtcct

SEQ ID NO: 1564350 - DNA, 25 bp, Homo sapien
tgccccaaaatggaaccgtggctta

SEQ ID NO: 1564351 - DNA, 25 bp, Homo sapien
cagacgggtcagcatcacaatatca

SEQ ID NO: 1564352 - DNA, 25 bp, Homo sapien
cttttccgaagagcaagcggtaggt

SEQ ID NO: 1564353 - DNA, 25 bp, Homo sapien
tgttaaccttttccgaagagcaagc

SEQ ID NO: 1564354 - DNA, 25 bp, Homo sapien
accttttccgaagagcaagcggtag

SEQ ID NO: 1564355 - DNA, 25 bp, Homo sapien
tttccgaagagcaagcggtaggttg

SEQ ID NO: 1564356 - DNA, 25 bp, Homo sapien
ggcagcgccaggactctatttccca

SEQ ID NO: 1564357 - DNA, 25 bp, Homo sapien
ttcctgtgcgcgagaagcttctctg

SEQ ID NO: 1564358 - DNA, 25 bp, Homo sapien
ttctctgagcggctgcacccaggat

SEQ ID NO: 1564359 - DNA, 25 bp, Homo sapien
gctgtgcgggcgacttctttcgcct

SEQ ID NO: 1564360 - DNA, 25 bp, Homo sapien
tagtcggccgcgtcaacagacgcaa

SEQ ID NO: 1564361 - DNA, 25 bp, Homo sapien
ccccagcctcaagggagcgggagat

SEQ ID NO: 1564362 - DNA, 25 bp, Homo sapien
agacgcaaccccagcctcaagggag

SEQ ID NO: 1564363 - DNA, 25 bp, Homo sapien
ctcgggattgtagtcggccgcgtca

SEQ ID NO: 1564364 - DNA, 25 bp, Homo sapien
ttccacccatggctgactcgctgtc

SEQ ID NO: 1564365 - DNA, 25 bp, Homo sapien
aggacaagtcccaatgtgagtctcc

SEQ ID NO: 1564366 - DNA, 25 bp, Homo sapien
ccatgctgacgagcccccaaaatgt

SEQ ID NO: 1564367 - DNA, 25 bp, Homo sapien
aggaggacaagtcccaatgtgagtc

SEQ ID NO: 1564368 - DNA, 25 bp, Homo sapien
ggttcagtagcctcttttaagctcc

SEQ ID NO: 1564369 - DNA, 25 bp, Homo sapien
gttcagtagcctcttttaagctcct

SEQ ID NO: 1564370 - DNA, 25 bp, Homo sapien
gggttcagtagcctcttttaagctc

SEQ ID NO: 1564371 - DNA, 25 bp, Homo sapien
catgccgacatccttgagggtcaca

SEQ ID NO: 1564372 - DNA, 25 bp, Homo sapien
ccgacatccttgagggtcacaaatt

SEQ ID NO: 1564373 - DNA, 25 bp, Homo sapien
gaagtccatgccgacatccttgagg

SEQ ID NO: 1564374 - DNA, 25 bp, Homo sapien
tccatgccgacatccttgagggtca

SEQ ID NO: 1564375 - DNA, 25 bp, Homo sapien
gcaattgtccaacgctgtgtcccag

SEQ ID NO: 1564376 - DNA, 25 bp, Homo sapien
cctggcaattgtccaacgctgtgtc

SEQ ID NO: 1564377 - DNA, 25 bp, Homo sapien
aattgtccaacgctgtgtcccagaa

SEQ ID NO: 1564378 - DNA, 25 bp, Homo sapien
tggcaattgtccaacgctgtgtccc

SEQ ID NO: 1564379 - DNA, 25 bp, Homo sapien
ttagctggagtctgggccctgctgc

SEQ ID NO: 1564380 - DNA, 25 bp, Homo sapien
tgtctcactgtgtgacactggtgtg

SEQ ID NO: 1564381 - DNA, 25 bp, Homo sapien
tcactgtgtgacactggtgtgcaga

SEQ ID NO: 1564382 - DNA, 25 bp, Homo sapien
ggtgtgcagaagagggcgacacagc

SEQ ID NO: 1564383 - DNA, 25 bp, Homo sapien
ctgggtgggaggtcaggttgggtct

SEQ ID NO: 1564384 - DNA, 25 bp, Homo sapien
cagaggctccagatcttcactgcca

SEQ ID NO: 1564385 - DNA, 25 bp, Homo sapien
tgagtctggaaggaaagaggaggag

SEQ ID NO: 1564386 - DNA, 25 bp, Homo sapien
tgttgagtctggaaggaaagaggag

SEQ ID NO: 1564387 - DNA, 25 bp, Homo sapien
ccttgttgagtctggaaggaaagag

SEQ ID NO: 1564388 - DNA, 25 bp, Homo sapien
ttgagtctggaaggaaagaggagga

SEQ ID NO: 1564389 - DNA, 25 bp, Homo sapien
gaaagagcaagtgcaaatgtctcct

SEQ ID NO: 1564390 - DNA, 25 bp, Homo sapien
ctgaaagagcaagtgcaaatgtctc

SEQ ID NO: 1564391 - DNA, 25 bp, Homo sapien
agagcaagtgcaaatgtctcctgtt

SEQ ID NO: 1564392 - DNA, 25 bp, Homo sapien
aaagagcaagtgcaaatgtctcctg

SEQ ID NO: 1564393 - DNA, 25 bp, Homo sapien
gaagactttctggatcgcctagcaa

SEQ ID NO: 1564394 - DNA, 25 bp, Homo sapien
tcttctcccgtggaaacggtggaca

SEQ ID NO: 1564395 - DNA, 25 bp, Homo sapien
tctatacaggcttctccgaaattgg

SEQ ID NO: 1564396 - DNA, 25 bp, Homo sapien
tagcaaactatctaaccaggtgtcc

SEQ ID NO: 1564397 - DNA, 25 bp, Homo sapien
ttgtagcccgtgtgagttttcggat

SEQ ID NO: 1564398 - DNA, 25 bp, Homo sapien
gagttttcggatacacagaaaggga

SEQ ID NO: 1564399 - DNA, 25 bp, Homo sapien
ggaagcattccggtcaaaaccttgc

SEQ ID NO: 1564400 - DNA, 25 bp, Homo sapien
ttccggtcaaaaccttgctcacact

SEQ ID NO: 1564401 - DNA, 25 bp, Homo sapien
gagttttctgatgctcaccaggctg

SEQ ID NO: 1564402 - DNA, 25 bp, Homo sapien
gtactctgactaaaagttgtcccat

SEQ ID NO: 1564403 - DNA, 25 bp, Homo sapien
gggtgggtggtcactatcttgactc

SEQ ID NO: 1564404 - DNA, 25 bp, Homo sapien
tgatgccacaggtatgtactctgac

SEQ ID NO: 1564405 - DNA, 25 bp, Homo sapien
tgttcaatgagcagcgaactgtgcc

SEQ ID NO: 1564406 - DNA, 25 bp, Homo sapien
ggcacttggaacactcatagcgttt

SEQ ID NO: 1564407 - DNA, 25 bp, Homo sapien
tggaagatccgggtaaaagccttgc

SEQ ID NO: 1564408 - DNA, 25 bp, Homo sapien
tttctcaagttgaaggtcgcctggc

SEQ ID NO: 1564409 - DNA, 25 bp, Homo sapien
gtagagttatgcctgaaggatttcc

SEQ ID NO: 1564410 - DNA, 25 bp, Homo sapien
tctgtagcctgtatgaattcgccga

SEQ ID NO: 1564411 - DNA, 25 bp, Homo sapien
tggatctttagggtagagttatgcc

SEQ ID NO: 1564412 - DNA, 25 bp, Homo sapien
tgttcattaaggtgagtgtgccggt

SEQ ID NO: 1564413 - DNA, 25 bp, Homo sapien
tgatgtcgcatcagatgtgagggcc

SEQ ID NO: 1564414 - DNA, 25 bp, Homo sapien
cttttctgcggtgtgaatggcctga

SEQ ID NO: 1564415 - DNA, 25 bp, Homo sapien
ttgcattcagcacagctatagggct

SEQ ID NO: 1564416 - DNA, 25 bp, Homo sapien
ggccggctgaaactcctgacgcatt

SEQ ID NO: 1564417 - DNA, 25 bp, Homo sapien
ggttgagccgcaaatgaagcgttct

SEQ ID NO: 1564418 - DNA, 25 bp, Homo sapien
gccgcaaatgaagcgttctccgcac

SEQ ID NO: 1564419 - DNA, 25 bp, Homo sapien
tcagggttgagccgcaaatgaagcg

SEQ ID NO: 1564420 - DNA, 25 bp, Homo sapien
gagccgcaaatgaagcgttctccgc

SEQ ID NO: 1564421 - DNA, 25 bp, Homo sapien
tgggttctgatccaagatcttccca

SEQ ID NO: 1564422 - DNA, 25 bp, Homo sapien
tcacatttgttacacttaaagcact

SEQ ID NO: 1564423 - DNA, 25 bp, Homo sapien
tctggcgtgaacactctcgtggcac

SEQ ID NO: 1564424 - DNA, 25 bp, Homo sapien
cttcccactcacaaaaaatccttgt

SEQ ID NO: 1564425 - DNA, 25 bp, Homo sapien
cctctcgtgctgagttaggtatttg

SEQ ID NO: 1564426 - DNA, 25 bp, Homo sapien
gaatcctctcgtgctgagttaggta

SEQ ID NO: 1564427 - DNA, 25 bp, Homo sapien
gtgaatcctctcgtgctgagttagg

SEQ ID NO: 1564428 - DNA, 25 bp, Homo sapien
aatcctctcgtgctgagttaggtat

SEQ ID NO: 1564429 - DNA, 25 bp, Homo sapien
tgaatgagccgagtactttggccaa

SEQ ID NO: 1564430 - DNA, 25 bp, Homo sapien
tgagccgagtactttggccaaaggc

SEQ ID NO: 1564431 - DNA, 25 bp, Homo sapien
gatggtgaatgagccgagtactttg

SEQ ID NO: 1564432 - DNA, 25 bp, Homo sapien
ggtgaatgagccgagtactttggcc

SEQ ID NO: 1564433 - DNA, 25 bp, Homo sapien
gaagtttgataagggaggcactgct

SEQ ID NO: 1564434 - DNA, 25 bp, Homo sapien
ggaaggactgaagtttgataaggga

SEQ ID NO: 1564435 - DNA, 25 bp, Homo sapien
ccttgctcaccccatttatacagcc

SEQ ID NO: 1564436 - DNA, 25 bp, Homo sapien
ttgctcaccccatttatacagcctc

SEQ ID NO: 1564437 - DNA, 25 bp, Homo sapien
gaattaactgatgttttgagaggtg

SEQ ID NO: 1564438 - DNA, 25 bp, Homo sapien
cttactacatttaaagggattctct

SEQ ID NO: 1564439 - DNA, 25 bp, Homo sapien
tttgagaggtgtgcactgtggctga

SEQ ID NO: 1564440 - DNA, 25 bp, Homo sapien
tctttctggcatgagttcgctcatg

SEQ ID NO: 1564441 - DNA, 25 bp, Homo sapien
tgaactctccggtgaatagaaaggc

SEQ ID NO: 1564442 - DNA, 25 bp, Homo sapien
tgagctctgacggaacgttttcccg

SEQ ID NO: 1564443 - DNA, 25 bp, Homo sapien
gaattctctggtggcggacaagctc

SEQ ID NO: 1564444 - DNA, 25 bp, Homo sapien
cattacaggagtaaggcttctcccc

SEQ ID NO: 1564445 - DNA, 25 bp, Homo sapien
tctggcaacgttgacactgataaag

SEQ ID NO: 1564446 - DNA, 25 bp, Homo sapien
tcgagtggcaccgaaaggctttctg

SEQ ID NO: 1564447 - DNA, 25 bp, Homo sapien
taaagtgtctcctgggtgtgaactc

SEQ ID NO: 1564448 - DNA, 25 bp, Homo sapien
cttgttgtgtacacgctgatggcgg

SEQ ID NO: 1564449 - DNA, 25 bp, Homo sapien
ctttagatgcatttatttggagaga

SEQ ID NO: 1564450 - DNA, 25 bp, Homo sapien
tttcaacatccgagtaacggtctca

SEQ ID NO: 1564451 - DNA, 25 bp, Homo sapien
aacttgcaatgggatagtttccaac

SEQ ID NO: 1564452 - DNA, 25 bp, Homo sapien
cggtctcatattctgggactctgct

SEQ ID NO: 1564453 - DNA, 25 bp, Homo sapien
tagcaaattgcctggtgagcggcca

SEQ ID NO: 1564454 - DNA, 25 bp, Homo sapien
caaatatgcacacacggagggcgtt

SEQ ID NO: 1564455 - DNA, 25 bp, Homo sapien
tgacaagacactggtagggaactgg

SEQ ID NO: 1564456 - DNA, 25 bp, Homo sapien
tgaaaaacagtgtaaggccccaatg

SEQ ID NO: 1564457 - DNA, 25 bp, Homo sapien
catcagcctcagaggtgttgggttt

SEQ ID NO: 1564458 - DNA, 25 bp, Homo sapien
caagcttcgcgtgggaggccgatcc

SEQ ID NO: 1564459 - DNA, 25 bp, Homo sapien
tttggcctgaaaagtggccccgagc

SEQ ID NO: 1564460 - DNA, 25 bp, Homo sapien
ccattttgggcccattttggcctga

SEQ ID NO: 1564461 - DNA, 25 bp, Homo sapien
tgagggccccactgtctagtgacat

SEQ ID NO: 1564462 - DNA, 25 bp, Homo sapien
tgatccacaggaaatagacgcagct

SEQ ID NO: 1564463 - DNA, 25 bp, Homo sapien
cgagctcccgcggtactctgggaag

SEQ ID NO: 1564464 - DNA, 25 bp, Homo sapien
gccagaataagccacgacttcgtgt

SEQ ID NO: 1564465 - DNA, 25 bp, Homo sapien
agggccgcctgacgccagagtttct

SEQ ID NO: 1564466 - DNA, 25 bp, Homo sapien
gtttccagagttgacggttgccgtg

SEQ ID NO: 1564467 - DNA, 25 bp, Homo sapien
ctgcggcgtagacagttgccatgga

SEQ ID NO: 1564468 - DNA, 25 bp, Homo sapien
ccatggagaaagacaggcgtttcca

SEQ ID NO: 1564469 - DNA, 25 bp, Homo sapien
ttgccgtggagacaaaagccgcccg

SEQ ID NO: 1564470 - DNA, 25 bp, Homo sapien
ggctccggtaatgggcagctccagc

SEQ ID NO: 1564471 - DNA, 25 bp, Homo sapien
gggctccggtaatgggcagctccag

SEQ ID NO: 1564472 - DNA, 25 bp, Homo sapien
tacgacccgatcacgctgtttgtcc

SEQ ID NO: 1564473 - DNA, 25 bp, Homo sapien
ttacgacccgatcacgctgtttgtc

SEQ ID NO: 1564474 - DNA, 25 bp, Homo sapien
acgacccgatcacgctgtttgtcca

SEQ ID NO: 1564475 - DNA, 25 bp, Homo sapien
ggcttatctcctatcaccttagaaa

SEQ ID NO: 1564476 - DNA, 25 bp, Homo sapien
ccccatggtggcaaggtgaccacga

SEQ ID NO: 1564477 - DNA, 25 bp, Homo sapien
taagagacatgtcagtaatctggtc

SEQ ID NO: 1564478 - DNA, 25 bp, Homo sapien
gatggatccaggtgtttaagagaca

SEQ ID NO: 1564479 - DNA, 25 bp, Homo sapien
cctcaaagtaaaattcccacagtgg

SEQ ID NO: 1564480 - DNA, 25 bp, Homo sapien
tataatgaacatgtccgtgctcact

SEQ ID NO: 1564481 - DNA, 25 bp, Homo sapien
gcagagaccgtttttgccgtcatta

SEQ ID NO: 1564482 - DNA, 25 bp, Homo sapien
tgaacttaacctacctgccatggct

SEQ ID NO: 1564483 - DNA, 25 bp, Homo sapien
cagcctagtacatcttgacccgtgg

SEQ ID NO: 1564484 - DNA, 25 bp, Homo sapien
cccaggagtttagttcccagagact

SEQ ID NO: 1564485 - DNA, 25 bp, Homo sapien
gacccgtggtcttgagcatatggaa

SEQ ID NO: 1564486 - DNA, 25 bp, Homo sapien
ggaagaacatcttacccagcacctg

SEQ ID NO: 1564487 - DNA, 25 bp, Homo sapien
cacccactggtttggcgattttccg

SEQ ID NO: 1564488 - DNA, 25 bp, Homo sapien
gattttccggaaggagtcacatgac

SEQ ID NO: 1564489 - DNA, 25 bp, Homo sapien
cagtaggaactaacaaaggcaagag

SEQ ID NO: 1564490 - DNA, 25 bp, Homo sapien
acacatgtatgaggtgtctccaccc

SEQ ID NO: 1564491 - DNA, 25 bp, Homo sapien
tcattaggcgctcagtgcgtgcacc

SEQ ID NO: 1564492 - DNA, 25 bp, Homo sapien
cacagacgcggagccttaaacagct

SEQ ID NO: 1564493 - DNA, 25 bp, Homo sapien
aaatccgacgtgatctcccgtgtgg

SEQ ID NO: 1564494 - DNA, 25 bp, Homo sapien
agttaactcgaacagcacagacgcg

SEQ ID NO: 1564495 - DNA, 25 bp, Homo sapien
tctttctctgatagtcctttgctgc

SEQ ID NO: 1564496 - DNA, 25 bp, Homo sapien
ttctctgatagtcctttgctgcctt

SEQ ID NO: 1564497 - DNA, 25 bp, Homo sapien
tctctgatagtcctttgctgccttt

SEQ ID NO: 1564498 - DNA, 25 bp, Homo sapien
tctctttctctgatagtcctttgct

SEQ ID NO: 1564499 - DNA, 25 bp, Homo sapien
gaacagctggatctaaccatgcctg

SEQ ID NO: 1564500 - DNA, 25 bp, Homo sapien
gcctgaagtccctctgtgttcaatg

SEQ ID NO: 1564501 - DNA, 25 bp, Homo sapien
gtgttcaatgtgttcataggctttc

SEQ ID NO: 1564502 - DNA, 25 bp, Homo sapien
gaaagcagaagtgagagtcccttga

SEQ ID NO: 1564503 - DNA, 25 bp, Homo sapien
aagaagcaaagtggacggccgggcg

SEQ ID NO: 1564504 - DNA, 25 bp, Homo sapien
tctcccataaacgaggtactgcagg

SEQ ID NO: 1564505 - DNA, 25 bp, Homo sapien
aaaagcgaagtgcatctcccataaa

SEQ ID NO: 1564506 - DNA, 25 bp, Homo sapien
aatgagacccgagtacacacatgca

SEQ ID NO: 1564507 - DNA, 25 bp, Homo sapien
aagaagcaaagtggacggccgggcg

SEQ ID NO: 1564508 - DNA, 25 bp, Homo sapien
aatgagacccgagtacacacatgca

SEQ ID NO: 1564509 - DNA, 25 bp, Homo sapien
tctcccataaacgaggtactgcagg

SEQ ID NO: 1564510 - DNA, 25 bp, Homo sapien
aaaagcgaagtgcatctcccataaa

SEQ ID NO: 1564511 - DNA, 25 bp, Homo sapien
tttatcaaaatgaatctcacctgtt

SEQ ID NO: 1564512 - DNA, 25 bp, Homo sapien
cacagggcctctgtactggctgttc

SEQ ID NO: 1564513 - DNA, 25 bp, Homo sapien
aaccaagatttccaagacgtcgtat

SEQ ID NO: 1564514 - DNA, 25 bp, Homo sapien
ggttaaatcagctattttatcaaaa

SEQ ID NO: 1564515 - DNA, 25 bp, Homo sapien
tgaaagagaagggagagccgtcctt

SEQ ID NO: 1564516 - DNA, 25 bp, Homo sapien
tgcgcccggcttcttgaattagttt

SEQ ID NO: 1564517 - DNA, 25 bp, Homo sapien
gggctcgcctgtgctgcatcagctt

SEQ ID NO: 1564518 - DNA, 25 bp, Homo sapien
gaattagtttctaggagaagccaag

SEQ ID NO: 1564519 - DNA, 25 bp, Homo sapien
tttatcaaaatgaatctcacctgtt

SEQ ID NO: 1564520 - DNA, 25 bp, Homo sapien
cacagggcctctgtactggctgttc

SEQ ID NO: 1564521 - DNA, 25 bp, Homo sapien
aaccaagatttccaagacgtcgtat

SEQ ID NO: 1564522 - DNA, 25 bp, Homo sapien
ggttaaatcagctattttatcaaaa

SEQ ID NO: 1564523 - DNA, 25 bp, Homo sapien
tgaaagagaagggagagccgtcctt

SEQ ID NO: 1564524 - DNA, 25 bp, Homo sapien
gggctcgcctgtgctgcatcagctt

SEQ ID NO: 1564525 - DNA, 25 bp, Homo sapien
tgcgcccggcttcttgaattagttt

SEQ ID NO: 1564526 - DNA, 25 bp, Homo sapien
gaattagtttctaggagaagccaag

SEQ ID NO: 1564527 - DNA, 25 bp, Homo sapien
tttatcaaaatgaatctcacctgtt

SEQ ID NO: 1564528 - DNA, 25 bp, Homo sapien
cacagggcctctgtactggctgttc

SEQ ID NO: 1564529 - DNA, 25 bp, Homo sapien
aaccaagatttccaagacgtcgtat

SEQ ID NO: 1564530 - DNA, 25 bp, Homo sapien
ggttaaatcagctattttatcaaaa

SEQ ID NO: 1564531 - DNA, 25 bp, Homo sapien
tgaaagagaagggagagccgtcctt

SEQ ID NO: 1564532 - DNA, 25 bp, Homo sapien
tgcgcccggcttcttgaattagttt

SEQ ID NO: 1564533 - DNA, 25 bp, Homo sapien
gggctcgcctgtgctgcatcagctt

SEQ ID NO: 1564534 - DNA, 25 bp, Homo sapien
gaattagtttctaggagaagccaag

SEQ ID NO: 1564535 - DNA, 25 bp, Homo sapien
aagaagcaaagtggacggccgggcg

SEQ ID NO: 1564536 - DNA, 25 bp, Homo sapien
aatgagacccgagtacacacatgca

SEQ ID NO: 1564537 - DNA, 25 bp, Homo sapien
tctcccataaacgaggtactgcagg

SEQ ID NO: 1564538 - DNA, 25 bp, Homo sapien
aaaagcgaagtgcatctcccataaa

SEQ ID NO: 1564539 - DNA, 25 bp, Homo sapien
aagaagcaaagtggacggccgggcg

SEQ ID NO: 1564540 - DNA, 25 bp, Homo sapien
aatgagacccgagtacacacatgca

SEQ ID NO: 1564541 - DNA, 25 bp, Homo sapien
tctcccataaacgaggtactgcagg

SEQ ID NO: 1564542 - DNA, 25 bp, Homo sapien
aaaagcgaagtgcatctcccataaa

SEQ ID NO: 1564543 - DNA, 25 bp, Homo sapien
ggagacagatgtagttcctgccctc

SEQ ID NO: 1564544 - DNA, 25 bp, Homo sapien
gaacagtggaatgggagacagatgt

SEQ ID NO: 1564545 - DNA, 25 bp, Homo sapien
tacgatgtcccaaactgaggaacag

SEQ ID NO: 1564546 - DNA, 25 bp, Homo sapien
aaatattttgagcaccctacgatgt

SEQ ID NO: 1564547 - DNA, 25 bp, Homo sapien
tccacatctatctatccgggttgaa

SEQ ID NO: 1564548 - DNA, 25 bp, Homo sapien
ccgggttgaatagtcatgctggatc

SEQ ID NO: 1564549 - DNA, 25 bp, Homo sapien
taagtagccacaatgtcgttcccac

SEQ ID NO: 1564550 - DNA, 25 bp, Homo sapien
caatgtcaaataattccaggtccca

SEQ ID NO: 1564551 - DNA, 25 bp, Homo sapien
actgtccttacagggaccgcaggtc

SEQ ID NO: 1564552 - DNA, 25 bp, Homo sapien
tgtccttacagggaccgcaggtcag

SEQ ID NO: 1564553 - DNA, 25 bp, Homo sapien
tccttacagggaccgcaggtcagat

SEQ ID NO: 1564554 - DNA, 25 bp, Homo sapien
tacagggaccgcaggtcagatgagc

SEQ ID NO: 1564555 - DNA, 25 bp, Homo sapien
cagcgttggtttgcctcgggttctt

SEQ ID NO: 1564556 - DNA, 25 bp, Homo sapien
tctttggagcctggcatagcggctg

SEQ ID NO: 1564557 - DNA, 25 bp, Homo sapien
ctggcatagcggctggtgtccctcg

SEQ ID NO: 1564558 - DNA, 25 bp, Homo sapien
tgtcggtctccctcactgggccggg

SEQ ID NO: 1564559 - DNA, 25 bp, Homo sapien
tacaaggacataccccaggatgacc

SEQ ID NO: 1564560 - DNA, 25 bp, Homo sapien
ttgaactggttggtcccttctccgc

SEQ ID NO: 1564561 - DNA, 25 bp, Homo sapien
gacatgctgctagagcttcaagacc

SEQ ID NO: 1564562 - DNA, 25 bp, Homo sapien
tccagcgatcccacttccaagtagg

SEQ ID NO: 1564563 - DNA, 25 bp, Homo sapien
cttccagggccgtcccgaggcttcg

SEQ ID NO: 1564564 - DNA, 25 bp, Homo sapien
gcttccagggccgtcccgaggcttc

SEQ ID NO: 1564565 - DNA, 25 bp, Homo sapien
tccagggccgtcccgaggcttcggc

SEQ ID NO: 1564566 - DNA, 25 bp, Homo sapien
cggcttccagggccgtcccgaggct

SEQ ID NO: 1564567 - DNA, 25 bp, Homo sapien
ttcaggtgcagcgacctccgcggtc

SEQ ID NO: 1564568 - DNA, 25 bp, Homo sapien
gccccgtcgcgtcacagggcgggag

SEQ ID NO: 1564569 - DNA, 25 bp, Homo sapien
gggaatccccgttctcttcaggtgc

SEQ ID NO: 1564570 - DNA, 25 bp, Homo sapien
ggagcccggctctgatgtcacccag

SEQ ID NO: 1564571 - DNA, 25 bp, Homo sapien
agccaggcccgccacccgcgctggg

SEQ ID NO: 1564572 - DNA, 25 bp, Homo sapien
gggcgtgaacaggaacggctgggcc

SEQ ID NO: 1564573 - DNA, 25 bp, Homo sapien
acaggaacggctgggccgcctcggg

SEQ ID NO: 1564574 - DNA, 25 bp, Homo sapien
ccgcggggcgtgaacaggaacggct

SEQ ID NO: 1564575 - DNA, 25 bp, Homo sapien
cctcggccttgctgaacttgggcgg

SEQ ID NO: 1564576 - DNA, 25 bp, Homo sapien
tagatgaggccggagtagtaccgct

SEQ ID NO: 1564577 - DNA, 25 bp, Homo sapien
tcgaacccgtgaagctccgaaggca

SEQ ID NO: 1564578 - DNA, 25 bp, Homo sapien
ctcgttgaggcaggtcagctcggcc

SEQ ID NO: 1564579 - DNA, 25 bp, Homo sapien
ccctcggtcactgcgtacacgtggg

SEQ ID NO: 1564580 - DNA, 25 bp, Homo sapien
gaagctgcttgtacgggttgatgac

SEQ ID NO: 1564581 - DNA, 25 bp, Homo sapien
gtggcgcttcttgccccggtacatc

SEQ ID NO: 1564582 - DNA, 25 bp, Homo sapien
ccacacagaaaaggccggagtacgt

SEQ ID NO: 1564583 - DNA, 25 bp, Homo sapien
gcagagaatggactggtcctcacga

SEQ ID NO: 1564584 - DNA, 25 bp, Homo sapien
cagagaatggactggtcctcacgat

SEQ ID NO: 1564585 - DNA, 25 bp, Homo sapien
gtgcagagaatggactggtcctcac

SEQ ID NO: 1564586 - DNA, 25 bp, Homo sapien
tgcagagaatggactggtcctcacg

SEQ ID NO: 1564587 - DNA, 25 bp, Homo sapien
cctttggagacgacgccacgtgggc

SEQ ID NO: 1564588 - DNA, 25 bp, Homo sapien
tgccctttggagacgacgccacgtg

SEQ ID NO: 1564589 - DNA, 25 bp, Homo sapien
gccacgtgggcgaggtactggatga

SEQ ID NO: 1564590 - DNA, 25 bp, Homo sapien
cacgtgggcgaggtactggatgacc

SEQ ID NO: 1564591 - DNA, 25 bp, Homo sapien
ctgaggaagtcacgggacacgagac

SEQ ID NO: 1564592 - DNA, 25 bp, Homo sapien
ggacacgagacacggaccaggacac

SEQ ID NO: 1564593 - DNA, 25 bp, Homo sapien
agacacggaccaggacacagcacat

SEQ ID NO: 1564594 - DNA, 25 bp, Homo sapien
aggaagtcacgggacacgagacacg

SEQ ID NO: 1564595 - DNA, 25 bp, Homo sapien
tgccaaaggcctctaggatggggtt

SEQ ID NO: 1564596 - DNA, 25 bp, Homo sapien
ggcaacatcaaagttgatgcggatg

SEQ ID NO: 1564597 - DNA, 25 bp, Homo sapien
gtacccggcaacatcaaagttgatg

SEQ ID NO: 1564598 - DNA, 25 bp, Homo sapien
cggcaacatcaaagttgatgcggat

SEQ ID NO: 1564599 - DNA, 25 bp, Homo sapien
gatgtacccggcaacatcaaagttg

SEQ ID NO: 1564600 - DNA, 25 bp, Homo sapien
tggcggatggcccgcgacttctcca

SEQ ID NO: 1564601 - DNA, 25 bp, Homo sapien
tccttggcctggcggatggcccgcg

SEQ ID NO: 1564602 - DNA, 25 bp, Homo sapien
tggcctggcggatggcccgcgactt

SEQ ID NO: 1564603 - DNA, 25 bp, Homo sapien
gcctggcggatggcccgcgacttct

SEQ ID NO: 1564604 - DNA, 25 bp, Homo sapien
gcgtctcctggaagagttcccgctc

SEQ ID NO: 1564605 - DNA, 25 bp, Homo sapien
ggtcaggaaccggtagtgggagcag

SEQ ID NO: 1564606 - DNA, 25 bp, Homo sapien
atttcctcgtggctgaatcccagga

SEQ ID NO: 1564607 - DNA, 25 bp, Homo sapien
gggagcagggctcgaggaggaggtc

SEQ ID NO: 1564608 - DNA, 25 bp, Homo sapien
catggtggcttgatcggtgttccgt

SEQ ID NO: 1564609 - DNA, 25 bp, Homo sapien
cttcaaggcaatgttgccaaactgg

SEQ ID NO: 1564610 - DNA, 25 bp, Homo sapien
aaactggagaactgctgagaccatc

SEQ ID NO: 1564611 - DNA, 25 bp, Homo sapien
cggtgttccgttctctcttcaaggc

SEQ ID NO: 1564612 - DNA, 25 bp, Homo sapien
caaggctcgggagaaatccgtcacc

SEQ ID NO: 1564613 - DNA, 25 bp, Homo sapien
catagtctcggccaactttgatgcg

SEQ ID NO: 1564614 - DNA, 25 bp, Homo sapien
aagaggcggcagagcttctgtgcag

SEQ ID NO: 1564615 - DNA, 25 bp, Homo sapien
ggtgagcaaggctcgggagaaatcc

SEQ ID NO: 1564616 - DNA, 25 bp, Homo sapien
gaagaggcgctcgtaggtggccttg

SEQ ID NO: 1564617 - DNA, 25 bp, Homo sapien
gggctgcggtccaaggcccggttga

SEQ ID NO: 1564618 - DNA, 25 bp, Homo sapien
ctcaaagcccgcgatgtccaggatg

SEQ ID NO: 1564619 - DNA, 25 bp, Homo sapien
aaggcccggttgaggcgcagaacca

SEQ ID NO: 1564620 - DNA, 25 bp, Homo sapien
gaggccaaagtcgaggaaggtccag

SEQ ID NO: 1564621 - DNA, 25 bp, Homo sapien
aggggatgccctcacgctggtactc

SEQ ID NO: 1564622 - DNA, 25 bp, Homo sapien
gaaggtccaggggatgccctcacgc

SEQ ID NO: 1564623 - DNA, 25 bp, Homo sapien
aggccaaagtcgaggaaggtccagg

SEQ ID NO: 1564624 - DNA, 25 bp, Homo sapien
tgctcctgggctaccttctccacaa

SEQ ID NO: 1564625 - DNA, 25 bp, Homo sapien
gagaacactgaagtcggcctgatcc

SEQ ID NO: 1564626 - DNA, 25 bp, Homo sapien
tgggctaccttctccacaaacgact

SEQ ID NO: 1564627 - DNA, 25 bp, Homo sapien
agtcggcctgatcccgcaggtgcct

SEQ ID NO: 1564628 - DNA, 25 bp, Homo sapien
agatctctgccgtcagccggtctgt

SEQ ID NO: 1564629 - DNA, 25 bp, Homo sapien
ccgtcagccggtctgtgctctggtg

SEQ ID NO: 1564630 - DNA, 25 bp, Homo sapien
tggagcaaggctgcgacgttgtcat

SEQ ID NO: 1564631 - DNA, 25 bp, Homo sapien
tcattcagagggtccatgtttttca

SEQ ID NO: 1564632 - DNA, 25 bp, Homo sapien
gaaatagcagagctgcacctctctg

SEQ ID NO: 1564633 - DNA, 25 bp, Homo sapien
aatagcagagctgcacctctctgca

SEQ ID NO: 1564634 - DNA, 25 bp, Homo sapien
tgggggcgacggtgggaaggagcca

SEQ ID NO: 1564635 - DNA, 25 bp, Homo sapien
gagaaatagcagagctgcacctctc

SEQ ID NO: 1564636 - DNA, 25 bp, Homo sapien
ccatgaggcggctcagggactcctt

SEQ ID NO: 1564637 - DNA, 25 bp, Homo sapien
cactgtccggaacataccccgacgg

SEQ ID NO: 1564638 - DNA, 25 bp, Homo sapien
tcacctgttccagccccacgatgcc

SEQ ID NO: 1564639 - DNA, 25 bp, Homo sapien
gacaatgcagcggacaaaactgggg

SEQ ID NO: 1564640 - DNA, 25 bp, Homo sapien
gaccccgttgcagcgaagctggtcc

SEQ ID NO: 1564641 - DNA, 25 bp, Homo sapien
ggaccccgttgcagcgaagctggtc

SEQ ID NO: 1564642 - DNA, 25 bp, Homo sapien
gcccttggggatggcattgggtgtc

SEQ ID NO: 1564643 - DNA, 25 bp, Homo sapien
catcttttcacaggcctgcttccca

SEQ ID NO: 1564644 - DNA, 25 bp, Homo sapien
ccatgaagcccttggggatggcatt

SEQ ID NO: 1564645 - DNA, 25 bp, Homo sapien
ggcattgggtgtcaggatctcgtat

SEQ ID NO: 1564646 - DNA, 25 bp, Homo sapien
ctgcctggaaggagacgatgatgtc

SEQ ID NO: 1564647 - DNA, 25 bp, Homo sapien
tgctctgtcccacgcggtagaggtt

SEQ ID NO: 1564648 - DNA, 25 bp, Homo sapien
aaggagacgatgatgtcggtgacct

SEQ ID NO: 1564649 - DNA, 25 bp, Homo sapien
ctgcgagccaggtatccccgggcag

SEQ ID NO: 1564650 - DNA, 25 bp, Homo sapien
tctcggccaacaggaccccgggaga

SEQ ID NO: 1564651 - DNA, 25 bp, Homo sapien
cagtctcggccaacaggaccccggg

SEQ ID NO: 1564652 - DNA, 25 bp, Homo sapien
ggaccccgggagacagcgtggctgc

SEQ ID NO: 1564653 - DNA, 25 bp, Homo sapien
ccccgggagacagcgtggctgccca

SEQ ID NO: 1564654 - DNA, 25 bp, Homo sapien
gttccgctgcatcaccctcagggcg

SEQ ID NO: 1564655 - DNA, 25 bp, Homo sapien
gcatcaccctcagggcgctctgctg

SEQ ID NO: 1564656 - DNA, 25 bp, Homo sapien
tccgctgcatcaccctcagggcgct

SEQ ID NO: 1564657 - DNA, 25 bp, Homo sapien
gctgcatcaccctcagggcgctctg

SEQ ID NO: 1564658 - DNA, 25 bp, Homo sapien
gcagcacctcatcctgccgcgtcac

SEQ ID NO: 1564659 - DNA, 25 bp, Homo sapien
cttcgcgggcgctctgctgctgtag

SEQ ID NO: 1564660 - DNA, 25 bp, Homo sapien
tgccactcggccctggagctcccca

SEQ ID NO: 1564661 - DNA, 25 bp, Homo sapien
tggagctccccaacttcgcgggcgc

SEQ ID NO: 1564662 - DNA, 25 bp, Homo sapien
tgcagcctcttcttctcggtttgca

SEQ ID NO: 1564663 - DNA, 25 bp, Homo sapien
gtttgcatttgacggctgcactcct

SEQ ID NO: 1564664 - DNA, 25 bp, Homo sapien
tctgctcgcaattgctctgccaggc

SEQ ID NO: 1564665 - DNA, 25 bp, Homo sapien
gtctcctcggcctctgcacacagtt

SEQ ID NO: 1564666 - DNA, 25 bp, Homo sapien
gcttctgccgcgcaccctcctcagc

SEQ ID NO: 1564667 - DNA, 25 bp, Homo sapien
cagcctcaaggtgggcctctagctc

SEQ ID NO: 1564668 - DNA, 25 bp, Homo sapien
ttctgccgcgcaccctcctcagcct

SEQ ID NO: 1564669 - DNA, 25 bp, Homo sapien
tcctcagcctcaaggtgggcctcta

SEQ ID NO: 1564670 - DNA, 25 bp, Homo sapien
cttggaattctggtcttccaggagc

SEQ ID NO: 1564671 - DNA, 25 bp, Homo sapien
gagcagcaggtcctcttcaaatttc

SEQ ID NO: 1564672 - DNA, 25 bp, Homo sapien
cagcttggaattctggtcttccagg

SEQ ID NO: 1564673 - DNA, 25 bp, Homo sapien
ttggaattctggtcttccaggagca

SEQ ID NO: 1564674 - DNA, 25 bp, Homo sapien
agaactcggccagacgatcttccag

SEQ ID NO: 1564675 - DNA, 25 bp, Homo sapien
agctgcctgggatgagaactcggcc

SEQ ID NO: 1564676 - DNA, 25 bp, Homo sapien
tatttgagccgtagcttattgaggc

SEQ ID NO: 1564677 - DNA, 25 bp, Homo sapien
tccatgtctgcgattgtggcctcat

SEQ ID NO: 1564678 - DNA, 25 bp, Homo sapien
tctgcccgctgttgctgctccacca

SEQ ID NO: 1564679 - DNA, 25 bp, Homo sapien
ctgcccgctgttgctgctccaccat

SEQ ID NO: 1564680 - DNA, 25 bp, Homo sapien
tctcagagtgctggattatggcgtg

SEQ ID NO: 1564681 - DNA, 25 bp, Homo sapien
gctgcttgagcctcccgcagggatt

SEQ ID NO: 1564682 - DNA, 25 bp, Homo sapien
cgttggtggagtccagcgtgtcctc

SEQ ID NO: 1564683 - DNA, 25 bp, Homo sapien
cctcgcccaggtcccggcgctgctt

SEQ ID NO: 1564684 - DNA, 25 bp, Homo sapien
gagctcctgctgtgcgttggtggag

SEQ ID NO: 1564685 - DNA, 25 bp, Homo sapien
gccgcctcgtggatgcgagtctcct

SEQ ID NO: 1564686 - DNA, 25 bp, Homo sapien
gtggatgcgagtctcctcctccaga

SEQ ID NO: 1564687 - DNA, 25 bp, Homo sapien
tgccgcctcgtggatgcgagtctcc

SEQ ID NO: 1564688 - DNA, 25 bp, Homo sapien
ctcgtggatgcgagtctcctcctcc

SEQ ID NO: 1564689 - DNA, 25 bp, Homo sapien
gcctggccgtggcgctgcctcagct

SEQ ID NO: 1564690 - DNA, 25 bp, Homo sapien
ggcctggccgtggcgctgcctcagc

SEQ ID NO: 1564691 - DNA, 25 bp, Homo sapien
cctggccgtggcgctgcctcagctc

SEQ ID NO: 1564692 - DNA, 25 bp, Homo sapien
gggcctggccgtggcgctgcctcag

SEQ ID NO: 1564693 - DNA, 25 bp, Homo sapien
ctgctcagttctgcccgcagctcgg

SEQ ID NO: 1564694 - DNA, 25 bp, Homo sapien
tgctcaccctcctgacgtgcagtct

SEQ ID NO: 1564695 - DNA, 25 bp, Homo sapien
ctcctgacgtgcagtctgcaggctg

SEQ ID NO: 1564696 - DNA, 25 bp, Homo sapien
ctcctgcagctgtaactccaggcgg

SEQ ID NO: 1564697 - DNA, 25 bp, Homo sapien
ctcgttcagcgccccagacacattc

SEQ ID NO: 1564698 - DNA, 25 bp, Homo sapien
tgggcatcgtgcagctgggcttctg

SEQ ID NO: 1564699 - DNA, 25 bp, Homo sapien
gctcagctccttgctaagacggatg

SEQ ID NO: 1564700 - DNA, 25 bp, Homo sapien
tcagctccttgctaagacggatggt

SEQ ID NO: 1564701 - DNA, 25 bp, Homo sapien
tccttgctaagacggatggttttgg

SEQ ID NO: 1564702 - DNA, 25 bp, Homo sapien
gctcgcacccgggaccccaaggcca

SEQ ID NO: 1564703 - DNA, 25 bp, Homo sapien
cagcctccatggctcgcacccggga

SEQ ID NO: 1564704 - DNA, 25 bp, Homo sapien
caaggccaatttcgccctggtctcc

SEQ ID NO: 1564705 - DNA, 25 bp, Homo sapien
gtctgcagttcacggcccgcccgtt

SEQ ID NO: 1564706 - DNA, 25 bp, Homo sapien
gctccagccgatccacggtctctgt

SEQ ID NO: 1564707 - DNA, 25 bp, Homo sapien
tgtcttttctgccaggcgctgggtc

SEQ ID NO: 1564708 - DNA, 25 bp, Homo sapien
tccagccgatccacggtctctgtct

SEQ ID NO: 1564709 - DNA, 25 bp, Homo sapien
cccgctccagccgatccacggtctc

SEQ ID NO: 1564710 - DNA, 25 bp, Homo sapien
ttctccagggtgctcacaagctgcc

SEQ ID NO: 1564711 - DNA, 25 bp, Homo sapien
tctccagggtgctcacaagctgccg

SEQ ID NO: 1564712 - DNA, 25 bp, Homo sapien
aacgaccatgggaagcgtagatgga

SEQ ID NO: 1564713 - DNA, 25 bp, Homo sapien
ccatgggaagcgtagatggacttgc

SEQ ID NO: 1564714 - DNA, 25 bp, Homo sapien
gatggacttgctgattccccggctg

SEQ ID NO: 1564715 - DNA, 25 bp, Homo sapien
cccggctgggtgaactgaggtgccc

SEQ ID NO: 1564716 - DNA, 25 bp, Homo sapien
tacatattagaacgtgcacacaagg

SEQ ID NO: 1564717 - DNA, 25 bp, Homo sapien
gattaaagttgcaaccgtgtcccaa

SEQ ID NO: 1564718 - DNA, 25 bp, Homo sapien
tcagaacgagacagatacaatgggt

SEQ ID NO: 1564719 - DNA, 25 bp, Homo sapien
tagtagcagactggacacatcagga

SEQ ID NO: 1564720 - DNA, 25 bp, Homo sapien
tccagtttgagggagatggggtagg

SEQ ID NO: 1564721 - DNA, 25 bp, Homo sapien
cttccagtttgagggagatggggta

SEQ ID NO: 1564722 - DNA, 25 bp, Homo sapien
cagtttgagggagatggggtagggg

SEQ ID NO: 1564723 - DNA, 25 bp, Homo sapien
ccagtttgagggagatggggtaggg

SEQ ID NO: 1564724 - DNA, 25 bp, Homo sapien
actgcccgaagtacagctgccttct

SEQ ID NO: 1564725 - DNA, 25 bp, Homo sapien
tcggcccgctcacgttcctccactg

SEQ ID NO: 1564726 - DNA, 25 bp, Homo sapien
agggcccgagcctcacgctcccggc

SEQ ID NO: 1564727 - DNA, 25 bp, Homo sapien
tgcccgtgtcagtgacagggcccga

SEQ ID NO: 1564728 - DNA, 25 bp, Homo sapien
tgccgacgtcatccttgctgctcag

SEQ ID NO: 1564729 - DNA, 25 bp, Homo sapien
cgtcatccttgctgctcagcagtgc

SEQ ID NO: 1564730 - DNA, 25 bp, Homo sapien
gctcttgccgacgtcatccttgctg

SEQ ID NO: 1564731 - DNA, 25 bp, Homo sapien
acgtcatccttgctgctcagcagtg

SEQ ID NO: 1564732 - DNA, 25 bp, Homo sapien
tgcaggtcacgctcatgctgagtct

SEQ ID NO: 1564733 - DNA, 25 bp, Homo sapien
agacgcagcttggcatcctcggccg

SEQ ID NO: 1564734 - DNA, 25 bp, Homo sapien
tgcctgttctgctacccggcaggct

SEQ ID NO: 1564735 - DNA, 25 bp, Homo sapien
ggcaggctcgttccagctcatgcac

SEQ ID NO: 1564736 - DNA, 25 bp, Homo sapien
agctggactggcaccctgtggcctt

SEQ ID NO: 1564737 - DNA, 25 bp, Homo sapien
cctgtggccttctgtgtgacaatac

SEQ ID NO: 1564738 - DNA, 25 bp, Homo sapien
ggactggcaccctgtggccttctgt

SEQ ID NO: 1564739 - DNA, 25 bp, Homo sapien
ggcaccctgtggccttctgtgtgac

SEQ ID NO: 1564740 - DNA, 25 bp, Homo sapien
ccctggccggcagaggccatctgag

SEQ ID NO: 1564741 - DNA, 25 bp, Homo sapien
ctgcatcttgcgaagctgcttcacc

SEQ ID NO: 1564742 - DNA, 25 bp, Homo sapien
cagcttcttgcgggcagccacggcc

SEQ ID NO: 1564743 - DNA, 25 bp, Homo sapien
tgcatcttgcgaagctgcttcaccg

SEQ ID NO: 1564744 - DNA, 25 bp, Homo sapien
tccaggcccttgaggcgcttttcac

SEQ ID NO: 1564745 - DNA, 25 bp, Homo sapien
tcccgccatagctccttcatctggg

SEQ ID NO: 1564746 - DNA, 25 bp, Homo sapien
tctgggagaagatctcctcccggga

SEQ ID NO: 1564747 - DNA, 25 bp, Homo sapien
ttcactttcccgattctgggagaag

SEQ ID NO: 1564748 - DNA, 25 bp, Homo sapien
taaggttaccattggccacctcatc

SEQ ID NO: 1564749 - DNA, 25 bp, Homo sapien
gtcctgctgggcctgccgccgagca

SEQ ID NO: 1564750 - DNA, 25 bp, Homo sapien
gagcacggtccgaggcggccagttc

SEQ ID NO: 1564751 - DNA, 25 bp, Homo sapien
ttgctaaggttaccattggccacct

SEQ ID NO: 1564752 - DNA, 25 bp, Homo sapien
cagcttgcggtagcggtcattgagc

SEQ ID NO: 1564753 - DNA, 25 bp, Homo sapien
agcttgcggtagcggtcattgagca

SEQ ID NO: 1564754 - DNA, 25 bp, Homo sapien
gcagcttgcggtagcggtcattgag

SEQ ID NO: 1564755 - DNA, 25 bp, Homo sapien
gcttgcggtagcggtcattgagcag

SEQ ID NO: 1564756 - DNA, 25 bp, Homo sapien
cactgcgcctggcttaaactatttt

SEQ ID NO: 1564757 - DNA, 25 bp, Homo sapien
tgcgcctggcttaaactatttttta

SEQ ID NO: 1564758 - DNA, 25 bp, Homo sapien
acataatttatcacttttctttttg

SEQ ID NO: 1564759 - DNA, 25 bp, Homo sapien
gccactgcgcctggcttaaactatt

SEQ ID NO: 1564760 - DNA, 25 bp, Homo sapien
ttcccggatccaggcaatcctccta

SEQ ID NO: 1564761 - DNA, 25 bp, Homo sapien
ctctgcttcccggatccaggcaatc

SEQ ID NO: 1564762 - DNA, 25 bp, Homo sapien
tgcttcccggatccaggcaatcctc

SEQ ID NO: 1564763 - DNA, 25 bp, Homo sapien
ggccgcaggcgtgcccgccatcgca

SEQ ID NO: 1564764 - DNA, 25 bp, Homo sapien
caagggaatttgtacctgtgatatt

SEQ ID NO: 1564765 - DNA, 25 bp, Homo sapien
ttgtacctgtgatattgctttgcgt

SEQ ID NO: 1564766 - DNA, 25 bp, Homo sapien
atttgtacctgtgatattgctttgc

SEQ ID NO: 1564767 - DNA, 25 bp, Homo sapien
gggaatttgtacctgtgatattgct

SEQ ID NO: 1564768 - DNA, 25 bp, Homo sapien
tcacccaggcgtccccgtagctcct

SEQ ID NO: 1564769 - DNA, 25 bp, Homo sapien
gctcctggatctgccgttccagctg

SEQ ID NO: 1564770 - DNA, 25 bp, Homo sapien
tggctgagaaactgcgctcagctga

SEQ ID NO: 1564771 - DNA, 25 bp, Homo sapien
ggctgagaaactgcgctcagctgac

SEQ ID NO: 1564772 - DNA, 25 bp, Homo sapien
ctggtctcttgctctagctgctcct

SEQ ID NO: 1564773 - DNA, 25 bp, Homo sapien
tggtctcttgctctagctgctcctc

SEQ ID NO: 1564774 - DNA, 25 bp, Homo sapien
gctcctcagcctgggccaacttaga

SEQ ID NO: 1564775 - DNA, 25 bp, Homo sapien
gctgctcctcagcctgggccaactt

SEQ ID NO: 1564776 - DNA, 25 bp, Homo sapien
cagctttccagagaggatgcgctct

SEQ ID NO: 1564777 - DNA, 25 bp, Homo sapien
caccagctttccagagaggatgcgc

SEQ ID NO: 1564778 - DNA, 25 bp, Homo sapien
ccacctggagcaccacctctttaag

SEQ ID NO: 1564779 - DNA, 25 bp, Homo sapien
tttaagccgcttctcagctctgcgc

SEQ ID NO: 1564780 - DNA, 25 bp, Homo sapien
gctgcttgactcgaaggtttccctt

SEQ ID NO: 1564781 - DNA, 25 bp, Homo sapien
ttcagctgcttgactcgaaggtttc

SEQ ID NO: 1564782 - DNA, 25 bp, Homo sapien
tggactcggccgactctgtgacatc

SEQ ID NO: 1564783 - DNA, 25 bp, Homo sapien
cctcagtgtggtcacttcacggttc

SEQ ID NO: 1564784 - DNA, 25 bp, Homo sapien
aggcctgtacgtgggatgaccatac

SEQ ID NO: 1564785 - DNA, 25 bp, Homo sapien
ccgtcaggcctgtacgtgggatgac

SEQ ID NO: 1564786 - DNA, 25 bp, Homo sapien
tcaggcctgtacgtgggatgaccat

SEQ ID NO: 1564787 - DNA, 25 bp, Homo sapien
cgtcaggcctgtacgtgggatgacc

SEQ ID NO: 1564788 - DNA, 25 bp, Homo sapien
tagtcggaagacctggcgcaccgtg

SEQ ID NO: 1564789 - DNA, 25 bp, Homo sapien
tcaggctccggggatggcccagacc

SEQ ID NO: 1564790 - DNA, 25 bp, Homo sapien
ttcctctgcctcctcgtcggatgcc

SEQ ID NO: 1564791 - DNA, 25 bp, Homo sapien
ggatgccacgccctcctctagtcgg

SEQ ID NO: 1564792 - DNA, 25 bp, Homo sapien
gatggtggaggagccgtctcactcc

SEQ ID NO: 1564793 - DNA, 25 bp, Homo sapien
ggctgggccccatctgttagtgcat

SEQ ID NO: 1564794 - DNA, 25 bp, Homo sapien
ccaacaagcaaggtagctccagtca

SEQ ID NO: 1564795 - DNA, 25 bp, Homo sapien
tgataaatgccagagtgctgcacca

SEQ ID NO: 1564796 - DNA, 25 bp, Homo sapien
aagaaagatggtgagagggtaggga

SEQ ID NO: 1564797 - DNA, 25 bp, Homo sapien
gaaagatggtgagagggtagggaag

SEQ ID NO: 1564798 - DNA, 25 bp, Homo sapien
ccaagaaagatggtgagagggtagg

SEQ ID NO: 1564799 - DNA, 25 bp, Homo sapien
gccaagaaagatggtgagagggtag

SEQ ID NO: 1564800 - DNA, 25 bp, Homo sapien
gagtgagagcgagattcctaaaaag

SEQ ID NO: 1564801 - DNA, 25 bp, Homo sapien
ccagagggaagctccgaaccctcag

SEQ ID NO: 1564802 - DNA, 25 bp, Homo sapien
gagtggctacgtagagagtgagagc

SEQ ID NO: 1564803 - DNA, 25 bp, Homo sapien
tgcccctttgcaagggttcaaggct

SEQ ID NO: 1564804 - DNA, 25 bp, Homo sapien
ttgaggcagtatgaggacaaacact

SEQ ID NO: 1564805 - DNA, 25 bp, Homo sapien
gaacttccaagataggcgcaacctg

SEQ ID NO: 1564806 - DNA, 25 bp, Homo sapien
ttttgtacagaagccgataagtgca

SEQ ID NO: 1564807 - DNA, 25 bp, Homo sapien
ccctgagatggtgccccaaaggtac

SEQ ID NO: 1564808 - DNA, 25 bp, Homo sapien
ctccatctctagttcccgccccatg

SEQ ID NO: 1564809 - DNA, 25 bp, Homo sapien
tgttcttcccgtgtcctctttcagt

SEQ ID NO: 1564810 - DNA, 25 bp, Homo sapien
ccttgcgcgggaaagtcctccatct

SEQ ID NO: 1564811 - DNA, 25 bp, Homo sapien
tttgttcttcccgtgtcctctttca

SEQ ID NO: 1564812 - DNA, 25 bp, Homo sapien
tgaagcatgcaagggccaccatccg

SEQ ID NO: 1564813 - DNA, 25 bp, Homo sapien
gggaaatagtctccaacatcatgaa

SEQ ID NO: 1564814 - DNA, 25 bp, Homo sapien
tagtctccaacatcatgaactgaag

SEQ ID NO: 1564815 - DNA, 25 bp, Homo sapien
tcatgaactgaagcatgcaagggcc

SEQ ID NO: 1564816 - DNA, 25 bp, Homo sapien
gtctttagttgccaattcccgccat

SEQ ID NO: 1564817 - DNA, 25 bp, Homo sapien
agggtaggaggacagtctttagttg

SEQ ID NO: 1564818 - DNA, 25 bp, Homo sapien
tttagttgccaattcccgccatcct

SEQ ID NO: 1564819 - DNA, 25 bp, Homo sapien
ctccatccctggcagtagctgcatg

SEQ ID NO: 1564820 - DNA, 25 bp, Homo sapien
ttgttggcgaacatcaaagaacccg

SEQ ID NO: 1564821 - DNA, 25 bp, Homo sapien
aatggccgtccttgtggccgcgaca

SEQ ID NO: 1564822 - DNA, 25 bp, Homo sapien
tgcagactactcgaaatggcgtccg

SEQ ID NO: 1564823 - DNA, 25 bp, Homo sapien
cagttgtcgtcttgttgccttgcag

SEQ ID NO: 1564824 - DNA, 25 bp, Homo sapien
cactcacctgctaggaagttcagta

SEQ ID NO: 1564825 - DNA, 25 bp, Homo sapien
gcagttctaccaaccacctagcaga

SEQ ID NO: 1564826 - DNA, 25 bp, Homo sapien
tcagtattatgctcagaagtcccac

SEQ ID NO: 1564827 - DNA, 25 bp, Homo sapien
tcaggaagtctaacacctctctaga

SEQ ID NO: 1564828 - DNA, 25 bp, Homo sapien
tatcaacagcatcgtcatgacctgg

SEQ ID NO: 1564829 - DNA, 25 bp, Homo sapien
cgcacatggtgcttgttaacctgct

SEQ ID NO: 1564830 - DNA, 25 bp, Homo sapien
gcaggaacgaagatattaccgcaca

SEQ ID NO: 1564831 - DNA, 25 bp, Homo sapien
cttcaaggagtgactaaaggcagga

SEQ ID NO: 1564832 - DNA, 25 bp, Homo sapien
gaacccatttcctcgcttcttggga

SEQ ID NO: 1564833 - DNA, 25 bp, Homo sapien
taccgggtagatctactgggacttg

SEQ ID NO: 1564834 - DNA, 25 bp, Homo sapien
gacttggcagaagagttccgaaccc

SEQ ID NO: 1564835 - DNA, 25 bp, Homo sapien
tgccccgcacggaagttggaaactc

SEQ ID NO: 1564836 - DNA, 25 bp, Homo sapien
gtctccccactctcgggtgcaccta

SEQ ID NO: 1564837 - DNA, 25 bp, Homo sapien
cgcgaattaccgaggggaggaaatg

SEQ ID NO: 1564838 - DNA, 25 bp, Homo sapien
agccgcgggaggcgcgaattaccga

SEQ ID NO: 1564839 - DNA, 25 bp, Homo sapien
cagagcggagtacgcggggagcgcc

SEQ ID NO: 1564840 - DNA, 25 bp, Homo sapien
gggtctcgtggacggcctctcgcgg

SEQ ID NO: 1564841 - DNA, 25 bp, Homo sapien
cctctccaagcaacagcggggggcg

SEQ ID NO: 1564842 - DNA, 25 bp, Homo sapien
tcgcggagtgaactactcctgttgc

SEQ ID NO: 1564843 - DNA, 25 bp, Homo sapien
tggacggcctctcgcggagtgaact

SEQ ID NO: 1564844 - DNA, 25 bp, Homo sapien
tccatctctccaaagaccctactct

SEQ ID NO: 1564845 - DNA, 25 bp, Homo sapien
taggttaggtcagttacaggtcctg

SEQ ID NO: 1564846 - DNA, 25 bp, Homo sapien
aaagaccctactctcagccacaacc

SEQ ID NO: 1564847 - DNA, 25 bp, Homo sapien
ttacaggtcctgacagggctttccc

SEQ ID NO: 1564848 - DNA, 25 bp, Homo sapien
ctgtagaatacaggggattgagagc

SEQ ID NO: 1564849 - DNA, 25 bp, Homo sapien
tgtagaatacaggggattgagagcc

SEQ ID NO: 1564850 - DNA, 25 bp, Homo sapien
caggggggtatccagggaactcgtg

SEQ ID NO: 1564851 - DNA, 25 bp, Homo sapien
tgagctggcctcatcagtgcctggg

SEQ ID NO: 1564852 - DNA, 25 bp, Homo sapien
tgcaggctgagctggcctcatcagt

SEQ ID NO: 1564853 - DNA, 25 bp, Homo sapien
tgcctgggacatcagggtccggacc

SEQ ID NO: 1564854 - DNA, 25 bp, Homo sapien
cctcctcctttacagtgggtgaaga

SEQ ID NO: 1564855 - DNA, 25 bp, Homo sapien
tagaggccatgagaaagccacaagg

SEQ ID NO: 1564856 - DNA, 25 bp, Homo sapien
gtaggtagaggccatgagaaagcca

SEQ ID NO: 1564857 - DNA, 25 bp, Homo sapien
ggtagaggccatgagaaagccacaa

SEQ ID NO: 1564858 - DNA, 25 bp, Homo sapien
ggccatgagaaagccacaaggagaa

SEQ ID NO: 1564859 - DNA, 25 bp, Homo sapien
ggttcctcttcgggatctgggatga

SEQ ID NO: 1564860 - DNA, 25 bp, Homo sapien
cttgcgctctggttcctcttcggga

SEQ ID NO: 1564861 - DNA, 25 bp, Homo sapien
tgcgctctggttcctcttcgggatc

SEQ ID NO: 1564862 - DNA, 25 bp, Homo sapien
tggttcctcttcgggatctgggatg

SEQ ID NO: 1564863 - DNA, 25 bp, Homo sapien
cgcagctgagcacgttgtagtggaa

SEQ ID NO: 1564864 - DNA, 25 bp, Homo sapien
agacacggcaaagctcgtggcccag

SEQ ID NO: 1564865 - DNA, 25 bp, Homo sapien
ccacagacacggcaaagctcgtggc

SEQ ID NO: 1564866 - DNA, 25 bp, Homo sapien
tgcagccttcgcagctgagcacgtt

SEQ ID NO: 1564867 - DNA, 25 bp, Homo sapien
accccggcaggcatagcgcctggcc

SEQ ID NO: 1564868 - DNA, 25 bp, Homo sapien
tgcgccgcatgaaagcgtccatctg

SEQ ID NO: 1564869 - DNA, 25 bp, Homo sapien
ttgcacttgcgcagccggcactgct

SEQ ID NO: 1564870 - DNA, 25 bp, Homo sapien
aaagcgtccatctggcaggttccgc

SEQ ID NO: 1564871 - DNA, 25 bp, Homo sapien
cagcagaaccccagggctaggcggg

SEQ ID NO: 1564872 - DNA, 25 bp, Homo sapien
agcagaaccccagggctaggcgggg

SEQ ID NO: 1564873 - DNA, 25 bp, Homo sapien
tcagcagaaccccagggctaggcgg

SEQ ID NO: 1564874 - DNA, 25 bp, Homo sapien
gcggccccacaggtgactgcgactg

SEQ ID NO: 1564875 - DNA, 25 bp, Homo sapien
acaggtgactgcgactgtgactgtg

SEQ ID NO: 1564876 - DNA, 25 bp, Homo sapien
cttcttcttccggatctgttcttca

SEQ ID NO: 1564877 - DNA, 25 bp, Homo sapien
gctgtttccgaatcttcttcttccg

SEQ ID NO: 1564878 - DNA, 25 bp, Homo sapien
gagaaggagcgtttgttgcactgca

SEQ ID NO: 1564879 - DNA, 25 bp, Homo sapien
gatcattagttcttgagccgctgtt

SEQ ID NO: 1564880 - DNA, 25 bp, Homo sapien
cagttgggccgccaccaactgctgg

SEQ ID NO: 1564881 - DNA, 25 bp, Homo sapien
gctgttagctggacaccctcgcctt

SEQ ID NO: 1564882 - DNA, 25 bp, Homo sapien
caaagcgttgctggcgggcatctcg

SEQ ID NO: 1564883 - DNA, 25 bp, Homo sapien
ttgcttagcgaagtccacgatctcc

SEQ ID NO: 1564884 - DNA, 25 bp, Homo sapien
tagcgaagtccacgatctcctggac

SEQ ID NO: 1564885 - DNA, 25 bp, Homo sapien
ggcacttgcttagcgaagtccacga

SEQ ID NO: 1564886 - DNA, 25 bp, Homo sapien
gatagtggatgccttcaggagggcg

SEQ ID NO: 1564887 - DNA, 25 bp, Homo sapien
ctcgatagtggatgccttcaggagg

SEQ ID NO: 1564888 - DNA, 25 bp, Homo sapien
atagtggatgccttcaggagggcga

SEQ ID NO: 1564889 - DNA, 25 bp, Homo sapien
tcgatagtggatgccttcaggaggg

SEQ ID NO: 1564890 - DNA, 25 bp, Homo sapien
tcgtccttgctgtaggtgaagtcct

SEQ ID NO: 1564891 - DNA, 25 bp, Homo sapien
ctcgtggttgtagcgcctggctgtc

SEQ ID NO: 1564892 - DNA, 25 bp, Homo sapien
aggtgatacactctgtctcgtggtt

SEQ ID NO: 1564893 - DNA, 25 bp, Homo sapien
tccttgctgtaggtgaagtccttca

SEQ ID NO: 1564894 - DNA, 25 bp, Homo sapien
gcagcgcctccacgtagggctgctg

SEQ ID NO: 1564895 - DNA, 25 bp, Homo sapien
cttgatgcgcgtgtaggacagcagc

SEQ ID NO: 1564896 - DNA, 25 bp, Homo sapien
agggcgtactcagcgtcgtccaggc

SEQ ID NO: 1564897 - DNA, 25 bp, Homo sapien
gccggtcggccgagaagatgttgat

SEQ ID NO: 1564898 - DNA, 25 bp, Homo sapien
tctgtgcttggactagacctggctc

SEQ ID NO: 1564899 - DNA, 25 bp, Homo sapien
agcctgaacggaccacgtgggccgc

SEQ ID NO: 1564900 - DNA, 25 bp, Homo sapien
cctggctcccagtcgagcagggtgg

SEQ ID NO: 1564901 - DNA, 25 bp, Homo sapien
cgggacgtagttggctctgcgcaga

SEQ ID NO: 1564902 - DNA, 25 bp, Homo sapien
cttcatgagcatgcgcgggaagcgc

SEQ ID NO: 1564903 - DNA, 25 bp, Homo sapien
ggacgtcccagatctccgacagcag

SEQ ID NO: 1564904 - DNA, 25 bp, Homo sapien
aaggcgaagacctgctccgagtgca

SEQ ID NO: 1564905 - DNA, 25 bp, Homo sapien
tcgtggacgtcccagatctccgaca

SEQ ID NO: 1564906 - DNA, 25 bp, Homo sapien
ccctctgttcaaggtgcactgcgtg

SEQ ID NO: 1564907 - DNA, 25 bp, Homo sapien
ccttctggaagactcgctgggcagg

SEQ ID NO: 1564908 - DNA, 25 bp, Homo sapien
gataggtctacaggctcggcccagg

SEQ ID NO: 1564909 - DNA, 25 bp, Homo sapien
tatcccaagggatgagagccgatag

SEQ ID NO: 1564910 - DNA, 25 bp, Homo sapien
tgtcactgaggtccctagaagcccg

SEQ ID NO: 1564911 - DNA, 25 bp, Homo sapien
catctctagaatggccaacccagtg

SEQ ID NO: 1564912 - DNA, 25 bp, Homo sapien
caaacacttgttgttcggacagaag

SEQ ID NO: 1564913 - DNA, 25 bp, Homo sapien
gaggcctctgtcctgaactttcaca

SEQ ID NO: 1564914 - DNA, 25 bp, Homo sapien
cgccacagcctacgccgccgtgacc

SEQ ID NO: 1564915 - DNA, 25 bp, Homo sapien
gcgtttcccgccacagcctacgccg

SEQ ID NO: 1564916 - DNA, 25 bp, Homo sapien
tcaaacagcgtttcccgccacagcc

SEQ ID NO: 1564917 - DNA, 25 bp, Homo sapien
gcctacgccgccgtgacccctgact

SEQ ID NO: 1564918 - DNA, 25 bp, Homo sapien
tctggcttcgggttgtgcaagtagc

SEQ ID NO: 1564919 - DNA, 25 bp, Homo sapien
agtgatgatctgcgaggagagaccc

SEQ ID NO: 1564920 - DNA, 25 bp, Homo sapien
caagcgtcgttagcggctctggctt

SEQ ID NO: 1564921 - DNA, 25 bp, Homo sapien
gaagaagcaagcgtcgttagcggct

SEQ ID NO: 1564922 - DNA, 25 bp, Homo sapien
gggctccttggtacaacagcttaga

SEQ ID NO: 1564923 - DNA, 25 bp, Homo sapien
ggctccttggtacaacagcttagac

SEQ ID NO: 1564924 - DNA, 25 bp, Homo sapien
cgttatgtggagaaatcaatttgta

SEQ ID NO: 1564925 - DNA, 25 bp, Homo sapien
ctatcttccaaagcgttatgtggag

SEQ ID NO: 1564926 - DNA, 25 bp, Homo sapien
ctgtacccagctgggcaccgtggct

SEQ ID NO: 1564927 - DNA, 25 bp, Homo sapien
tgggcaccgtggctcgcacctataa

SEQ ID NO: 1564928 - DNA, 25 bp, Homo sapien
ttgtttgagaccagccttatcaaca

SEQ ID NO: 1564929 - DNA, 25 bp, Homo sapien
gtcagttgtttgagaccagccttat

SEQ ID NO: 1564930 - DNA, 25 bp, Homo sapien
accacgagccttttcctactctgga

SEQ ID NO: 1564931 - DNA, 25 bp, Homo sapien
tgtctccatggcatcccatgcaccc

SEQ ID NO: 1564932 - DNA, 25 bp, Homo sapien
atggcatcccatgcacccaccatga

SEQ ID NO: 1564933 - DNA, 25 bp, Homo sapien
caccatgaccacgagccttttccta

SEQ ID NO: 1564934 - DNA, 25 bp, Homo sapien
cagaggcccccacgggcccgctttg

SEQ ID NO: 1564935 - DNA, 25 bp, Homo sapien
ggcctggccgccgcttgccatccat

SEQ ID NO: 1564936 - DNA, 25 bp, Homo sapien
gatggccgaggtgcatcatcatcat

SEQ ID NO: 1564937 - DNA, 25 bp, Homo sapien
ctcgaattgggatggccgaggtgca

SEQ ID NO: 1564938 - DNA, 25 bp, Homo sapien
gtctgcaaccccctccaggactgac

SEQ ID NO: 1564939 - DNA, 25 bp, Homo sapien
tgcagcctgtgttctgcctccatct

SEQ ID NO: 1564940 - DNA, 25 bp, Homo sapien
cctgcagcctgtgttctgcctccat

SEQ ID NO: 1564941 - DNA, 25 bp, Homo sapien
ctcctgcagcctgtgttctgcctcc

SEQ ID NO: 1564942 - DNA, 25 bp, Homo sapien
ccacataatggtcaatctccaactg

SEQ ID NO: 1564943 - DNA, 25 bp, Homo sapien
tgggccgaagccagcgaggatctat

SEQ ID NO: 1564944 - DNA, 25 bp, Homo sapien
ctggtggtgtgggccgaagccagcg

SEQ ID NO: 1564945 - DNA, 25 bp, Homo sapien
cacataatggtcaatctccaactgt

SEQ ID NO: 1564946 - DNA, 25 bp, Homo sapien
gggagcgaagccgtggatgtggcag

SEQ ID NO: 1564947 - DNA, 25 bp, Homo sapien
tgtagaagtagggagcgaagccgtg

SEQ ID NO: 1564948 - DNA, 25 bp, Homo sapien
atcggtgaccccgaaggcgcggagc

SEQ ID NO: 1564949 - DNA, 25 bp, Homo sapien
gacagagaacccctcatcggtgacc

SEQ ID NO: 1564950 - DNA, 25 bp, Homo sapien
ttgcaggtcacccatgtgctcgggc

SEQ ID NO: 1564951 - DNA, 25 bp, Homo sapien
gctcccgttgcaggtcacccatgtg

SEQ ID NO: 1564952 - DNA, 25 bp, Homo sapien
tctctcgggagcacagttccacagc

SEQ ID NO: 1564953 - DNA, 25 bp, Homo sapien
tgatggccaagttcagctcccgttg

SEQ ID NO: 1564954 - DNA, 25 bp, Homo sapien
cagcgccacggtgatgcgcaggaac

SEQ ID NO: 1564955 - DNA, 25 bp, Homo sapien
aggcctgccacacggatgccctgtt

SEQ ID NO: 1564956 - DNA, 25 bp, Homo sapien
caaagtcgacgttggcctcgtaggg

SEQ ID NO: 1564957 - DNA, 25 bp, Homo sapien
gccgtgcccgtggtacccaaacatg

SEQ ID NO: 1564958 - DNA, 25 bp, Homo sapien
ttgcagccgacgatgtccgtgtcca

SEQ ID NO: 1564959 - DNA, 25 bp, Homo sapien
tccttcagcctcagggcgtatttcc

SEQ ID NO: 1564960 - DNA, 25 bp, Homo sapien
gacgatgtccgtgtccaccatgaac

SEQ ID NO: 1564961 - DNA, 25 bp, Homo sapien
ccagccagttgcagccgacgatgtc

SEQ ID NO: 1564962 - DNA, 25 bp, Homo sapien
ggcgcaatgcgctgccatggccctt

SEQ ID NO: 1564963 - DNA, 25 bp, Homo sapien
tcgatatcgaagctgagcacgcgca

SEQ ID NO: 1564964 - DNA, 25 bp, Homo sapien
tggcccttccggtgggtgactgacc

SEQ ID NO: 1564965 - DNA, 25 bp, Homo sapien
ttgcggccggcgcactcgatatcga

SEQ ID NO: 1564966 - DNA, 25 bp, Homo sapien
tccttctcgtagctctgcaccttgg

SEQ ID NO: 1564967 - DNA, 25 bp, Homo sapien
cagatctggatgacagggtcccgct

SEQ ID NO: 1564968 - DNA, 25 bp, Homo sapien
tgagcgccaggcgtaggaagggctc

SEQ ID NO: 1564969 - DNA, 25 bp, Homo sapien
cagcgcaggcccagcgagcagatct

SEQ ID NO: 1564970 - DNA, 25 bp, Homo sapien
tacggaaggtcgaagttctggatgt

SEQ ID NO: 1564971 - DNA, 25 bp, Homo sapien
tccatgatacggatgaaggtggacc

SEQ ID NO: 1564972 - DNA, 25 bp, Homo sapien
taaccggtgatcacgtcggggtcca

SEQ ID NO: 1564973 - DNA, 25 bp, Homo sapien
tctgggcccgagagatgaggtacgg

SEQ ID NO: 1564974 - DNA, 25 bp, Homo sapien
atgttggagcaaaggccggccacac

SEQ ID NO: 1564975 - DNA, 25 bp, Homo sapien
aagagtcccggatgttggagcaaag

SEQ ID NO: 1564976 - DNA, 25 bp, Homo sapien
ggcccgtctgcttggactggaatga

SEQ ID NO: 1564977 - DNA, 25 bp, Homo sapien
ctgacaaccttggtgtcccgccggc

SEQ ID NO: 1564978 - DNA, 25 bp, Homo sapien
acgtcctccttctgctcgcccagga

SEQ ID NO: 1564979 - DNA, 25 bp, Homo sapien
gaagtggaagctcacggcattgagc

SEQ ID NO: 1564980 - DNA, 25 bp, Homo sapien
agcggagcttgtactcccgcagcag

SEQ ID NO: 1564981 - DNA, 25 bp, Homo sapien
ctcacggcattgagcgtgtaggagc

SEQ ID NO: 1564982 - DNA, 25 bp, Homo sapien
aggcagtacacagccaggcggcggc

SEQ ID NO: 1564983 - DNA, 25 bp, Homo sapien
tcaggcagtacacagccaggcggcg

SEQ ID NO: 1564984 - DNA, 25 bp, Homo sapien
cttcaggcagtacacagccaggcgg

SEQ ID NO: 1564985 - DNA, 25 bp, Homo sapien
gcagtacacagccaggcggcggcgg

SEQ ID NO: 1564986 - DNA, 25 bp, Homo sapien
ctgccgcaacagctgggatacgacc

SEQ ID NO: 1564987 - DNA, 25 bp, Homo sapien
tgaccctcgccatctccacggcgtt

SEQ ID NO: 1564988 - DNA, 25 bp, Homo sapien
tgaggggcacgccagtgaccctcgc

SEQ ID NO: 1564989 - DNA, 25 bp, Homo sapien
gctgggatacgaccttgacctgctg

SEQ ID NO: 1564990 - DNA, 25 bp, Homo sapien
agtggctcccgtgtagtcctcgccg

SEQ ID NO: 1564991 - DNA, 25 bp, Homo sapien
ggctcgatgacagtggctcccgtgt

SEQ ID NO: 1564992 - DNA, 25 bp, Homo sapien
gatgacagtggctcccgtgtagtcc

SEQ ID NO: 1564993 - DNA, 25 bp, Homo sapien
gccgccctctgacttcaccacgggc

SEQ ID NO: 1564994 - DNA, 25 bp, Homo sapien
cccccgccctgtcttgtggcctcac

SEQ ID NO: 1564995 - DNA, 25 bp, Homo sapien
agtcagggctaggagttcccatgcc

SEQ ID NO: 1564996 - DNA, 25 bp, Homo sapien
agggctaggagttcccatgccgccc

SEQ ID NO: 1564997 - DNA, 25 bp, Homo sapien
tcagggctaggagttcccatgccgc

SEQ ID NO: 1564998 - DNA, 25 bp, Homo sapien
catgatggacgggtacagcgaggag

SEQ ID NO: 1564999 - DNA, 25 bp, Homo sapien
acgggtacagcgaggagaagtccag

SEQ ID NO: 1565000 - DNA, 25 bp, Homo sapien
aacacaggttgtgggccatcatgat

SEQ ID NO: 1565001 - DNA, 25 bp, Homo sapien
gccgaaggagcgtggtgtaacacag

SEQ ID NO: 1565002 - DNA, 25 bp, Homo sapien
ctcgtccccggtgggggtcctgatg

SEQ ID NO: 1565003 - DNA, 25 bp, Homo sapien
agccccttccgcactgaggtcttca

SEQ ID NO: 1565004 - DNA, 25 bp, Homo sapien
cagcagccccttccgcactgaggtc

SEQ ID NO: 1565005 - DNA, 25 bp, Homo sapien
tgaggtcttcacaaactcgtccccg

SEQ ID NO: 1565006 - DNA, 25 bp, Homo sapien
agcgccagctgccgtccatccagga

SEQ ID NO: 1565007 - DNA, 25 bp, Homo sapien
gcgccagctgccgtccatccaggac

SEQ ID NO: 1565008 - DNA, 25 bp, Homo sapien
cctggcgccggagggggtctgtctc

SEQ ID NO: 1565009 - DNA, 25 bp, Homo sapien
ccatccaggacctggcgccggaggg

SEQ ID NO: 1565010 - DNA, 25 bp, Homo sapien
cagtgaagccgtatacggagttggc

SEQ ID NO: 1565011 - DNA, 25 bp, Homo sapien
tccaggcacggcaacttgcccacct

SEQ ID NO: 1565012 - DNA, 25 bp, Homo sapien
agccgtatacggagttggcgctcac

SEQ ID NO: 1565013 - DNA, 25 bp, Homo sapien
ggcgccagtgaagccgtatacggag

SEQ ID NO: 1565014 - DNA, 25 bp, Homo sapien
gcttggttttctcgatcatctgacg

SEQ ID NO: 1565015 - DNA, 25 bp, Homo sapien
atcatctgacgtccgaaccccgtga

SEQ ID NO: 1565016 - DNA, 25 bp, Homo sapien
cactggtgctgtagccattctccac

SEQ ID NO: 1565017 - DNA, 25 bp, Homo sapien
ctgtgtacttagactccaccagctg

SEQ ID NO: 1565018 - DNA, 25 bp, Homo sapien
gggaagtgacctgacacccagtccg

SEQ ID NO: 1565019 - DNA, 25 bp, Homo sapien
ttctcaaactccagccggatgggcg

SEQ ID NO: 1565020 - DNA, 25 bp, Homo sapien
gacggagtcagtgtcaccatacacc

SEQ ID NO: 1565021 - DNA, 25 bp, Homo sapien
gccgaatcggcacatgacggagtca

SEQ ID NO: 1565022 - DNA, 25 bp, Homo sapien
gcagtgaccaggttggccacgaggg

SEQ ID NO: 1565023 - DNA, 25 bp, Homo sapien
gagcaggcccgcgtagcgcttcttg

SEQ ID NO: 1565024 - DNA, 25 bp, Homo sapien
gcgtcgggccgggaggagaagagca

SEQ ID NO: 1565025 - DNA, 25 bp, Homo sapien
ccttgcagtccatgcggtcgtgggc

SEQ ID NO: 1565026 - DNA, 25 bp, Homo sapien
tatcgatgcggttgcacagcaggtc

SEQ ID NO: 1565027 - DNA, 25 bp, Homo sapien
ccagctgggagatatcgatgcggtt

SEQ ID NO: 1565028 - DNA, 25 bp, Homo sapien
ctgcttgccggcatagtcggaggcc

SEQ ID NO: 1565029 - DNA, 25 bp, Homo sapien
aggtccgagatgacgtcctgtgcgt

SEQ ID NO: 1565030 - DNA, 25 bp, Homo sapien
atcacgtaggggacgcggtcgccca

SEQ ID NO: 1565031 - DNA, 25 bp, Homo sapien
ctccgacttcatgtaggcggccaca

SEQ ID NO: 1565032 - DNA, 25 bp, Homo sapien
ggccacacccttggcggcactgatg

SEQ ID NO: 1565033 - DNA, 25 bp, Homo sapien
cactgatgatcacgtaggggacgcg

SEQ ID NO: 1565034 - DNA, 25 bp, Homo sapien
gaggattatgaatccaagggaaccc

SEQ ID NO: 1565035 - DNA, 25 bp, Homo sapien
gccacagagtctgtagggctctcag

SEQ ID NO: 1565036 - DNA, 25 bp, Homo sapien
tctcaggtcaccacggaagggtcag

SEQ ID NO: 1565037 - DNA, 25 bp, Homo sapien
aggtcacggagtctctgggccacag

SEQ ID NO: 1565038 - DNA, 25 bp, Homo sapien
aggtagtactgcgtgtcaatgggca

SEQ ID NO: 1565039 - DNA, 25 bp, Homo sapien
caggatgggctcgaagatgcgcagg

SEQ ID NO: 1565040 - DNA, 25 bp, Homo sapien
agtagcacagcctcggcacggccct

SEQ ID NO: 1565041 - DNA, 25 bp, Homo sapien
tactgcgtgtcaatgggcaggctgt

SEQ ID NO: 1565042 - DNA, 25 bp, Homo sapien
caggtggtgggccggtgatctcctc

SEQ ID NO: 1565043 - DNA, 25 bp, Homo sapien
aggtggtgggccggtgatctcctct

SEQ ID NO: 1565044 - DNA, 25 bp, Homo sapien
tgcagcagttgcggcgtttggcgaa

SEQ ID NO: 1565045 - DNA, 25 bp, Homo sapien
caccgtcttgcagcgcgtgtggtcc

SEQ ID NO: 1565046 - DNA, 25 bp, Homo sapien
gcaccgtcttgcagcgcgtgtggtc

SEQ ID NO: 1565047 - DNA, 25 bp, Homo sapien
cagttgcggcgtttggcgaaggcca

SEQ ID NO: 1565048 - DNA, 25 bp, Homo sapien
caggaactgggccaccccatccctg

SEQ ID NO: 1565049 - DNA, 25 bp, Homo sapien
ctgatacagctcagactcccggggc

SEQ ID NO: 1565050 - DNA, 25 bp, Homo sapien
ctggtgcagatgacgtcctcgtgca

SEQ ID NO: 1565051 - DNA, 25 bp, Homo sapien
tggcagcgctggcactgcgtccaga

SEQ ID NO: 1565052 - DNA, 25 bp, Homo sapien
gtccagaggcgcgagaagcgctcct

SEQ ID NO: 1565053 - DNA, 25 bp, Homo sapien
tgacgtcctcgtgcaggctgccctg

SEQ ID NO: 1565054 - DNA, 25 bp, Homo sapien
cccaggactttggtccccgcctgct

SEQ ID NO: 1565055 - DNA, 25 bp, Homo sapien
tcccaggactttggtccccgcctgc

SEQ ID NO: 1565056 - DNA, 25 bp, Homo sapien
gggagccgataacagcgggtgcctg

SEQ ID NO: 1565057 - DNA, 25 bp, Homo sapien
ggggggagccgataacagcgggtgc

SEQ ID NO: 1565058 - DNA, 25 bp, Homo sapien
ggtccagggggtccgaagcgccgca

SEQ ID NO: 1565059 - DNA, 25 bp, Homo sapien
tccagggggtccgaagcgccgcagg

SEQ ID NO: 1565060 - DNA, 25 bp, Homo sapien
cgcatgtagaagatggggcagtccc

SEQ ID NO: 1565061 - DNA, 25 bp, Homo sapien
accttcttgcgcatgtagaagatgg

SEQ ID NO: 1565062 - DNA, 25 bp, Homo sapien
ccccgccccatgggatgcttgcaag

SEQ ID NO: 1565063 - DNA, 25 bp, Homo sapien
cccgccccatgggatgcttgcaagg

SEQ ID NO: 1565064 - DNA, 25 bp, Homo sapien
tgaggctgcctccagccacctgaat

SEQ ID NO: 1565065 - DNA, 25 bp, Homo sapien
ctgaggctgcctccagccacctgaa

SEQ ID NO: 1565066 - DNA, 25 bp, Homo sapien
gctgaggctgcctccagccacctga

SEQ ID NO: 1565067 - DNA, 25 bp, Homo sapien
tggagggggagagacacaggggcat

SEQ ID NO: 1565068 - DNA, 25 bp, Homo sapien
ctggagggggagagacacaggggca

SEQ ID NO: 1565069 - DNA, 25 bp, Homo sapien
cagacagctgaagtgtggcccgtcg

SEQ ID NO: 1565070 - DNA, 25 bp, Homo sapien
acagctgaagtgtggcccgtcgagc

SEQ ID NO: 1565071 - DNA, 25 bp, Homo sapien
agacagctgaagtgtggcccgtcga

SEQ ID NO: 1565072 - DNA, 25 bp, Homo sapien
gacagctgaagtgtggcccgtcgag

SEQ ID NO: 1565073 - DNA, 25 bp, Homo sapien
cccctctgaatcagggtagctggaa

SEQ ID NO: 1565074 - DNA, 25 bp, Homo sapien
tagctggaatgcttgcagctgtcca

SEQ ID NO: 1565075 - DNA, 25 bp, Homo sapien
ggtcatagaagacgccatctgggta

SEQ ID NO: 1565076 - DNA, 25 bp, Homo sapien
tgtccaggtcatagaagacgccatc

SEQ ID NO: 1565077 - DNA, 25 bp, Homo sapien
gacaggtggggccacagtccagtcc

SEQ ID NO: 1565078 - DNA, 25 bp, Homo sapien
gggacaggtggggccacagtccagt

SEQ ID NO: 1565079 - DNA, 25 bp, Homo sapien
gtggggccacagtccagtcccacag

SEQ ID NO: 1565080 - DNA, 25 bp, Homo sapien
aggtggggccacagtccagtcccac

SEQ ID NO: 1565081 - DNA, 25 bp, Homo sapien
gggtggctaaaagcggctgctgccg

SEQ ID NO: 1565082 - DNA, 25 bp, Homo sapien
tagcgaagttctccgtggggtatgc

SEQ ID NO: 1565083 - DNA, 25 bp, Homo sapien
ggtggggggttcgtagcagagctgg

SEQ ID NO: 1565084 - DNA, 25 bp, Homo sapien
tgctgccgggtcgaaggcttcatag

SEQ ID NO: 1565085 - DNA, 25 bp, Homo sapien
cagggctggggtacggggcatatgc

SEQ ID NO: 1565086 - DNA, 25 bp, Homo sapien
ggcagggctgtccaacggtaagtct

SEQ ID NO: 1565087 - DNA, 25 bp, Homo sapien
agccacgagggcctcatccgactcg

SEQ ID NO: 1565088 - DNA, 25 bp, Homo sapien
tgtccaacggtaagtcttcctcctc

SEQ ID NO: 1565089 - DNA, 25 bp, Homo sapien
cctcaggagggtagacactatcacc

SEQ ID NO: 1565090 - DNA, 25 bp, Homo sapien
tggcactgctgtcccatttacactt

SEQ ID NO: 1565091 - DNA, 25 bp, Homo sapien
gaggttgacttattgaagtgctcac

SEQ ID NO: 1565092 - DNA, 25 bp, Homo sapien
cataaaggatgttgggcacacgggc

SEQ ID NO: 1565093 - DNA, 25 bp, Homo sapien
gaactggtacaggcgcagcttcttg

SEQ ID NO: 1565094 - DNA, 25 bp, Homo sapien
tggtacaggcgcagcttcttgcgag

SEQ ID NO: 1565095 - DNA, 25 bp, Homo sapien
ggtacaggcgcagcttcttgcgagt

SEQ ID NO: 1565096 - DNA, 25 bp, Homo sapien
accttgcggatctcgccggtcttgg

SEQ ID NO: 1565097 - DNA, 25 bp, Homo sapien
cagcagcgcgctgtcgaactggtag

SEQ ID NO: 1565098 - DNA, 25 bp, Homo sapien
gagttccttgtgcttggaggagaac

SEQ ID NO: 1565099 - DNA, 25 bp, Homo sapien
gcttctggtaggtcatgcgcttgcg

SEQ ID NO: 1565100 - DNA, 25 bp, Homo sapien
gatcccagggagtctgtacatgaca

SEQ ID NO: 1565101 - DNA, 25 bp, Homo sapien
gagattcagggtttacagacacaca

SEQ ID NO: 1565102 - DNA, 25 bp, Homo sapien
gcctccccgagtatagtggtccata

SEQ ID NO: 1565103 - DNA, 25 bp, Homo sapien
tcacccaaaacatgaggatcccagg

SEQ ID NO: 1565104 - DNA, 25 bp, Homo sapien
tatcagatggagagcctaggaggtc

SEQ ID NO: 1565105 - DNA, 25 bp, Homo sapien
tttcaggcggtgtcaaaggctcaac

SEQ ID NO: 1565106 - DNA, 25 bp, Homo sapien
aaaatcagtcgcgtggccagagtgg

SEQ ID NO: 1565107 - DNA, 25 bp, Homo sapien
tatacagtggtctaaagccaacagg

SEQ ID NO: 1565108 - DNA, 25 bp, Homo sapien
tcacggtgtctctgagagccagcgg

SEQ ID NO: 1565109 - DNA, 25 bp, Homo sapien
gattgcagtccctgacaaaaggtcc

SEQ ID NO: 1565110 - DNA, 25 bp, Homo sapien
tctctttgaactcctctcatcatca

SEQ ID NO: 1565111 - DNA, 25 bp, Homo sapien
tcatcatcacccgtgatgtcacggt

SEQ ID NO: 1565112 - DNA, 25 bp, Homo sapien
gggggacctcctcctgctcctctga

SEQ ID NO: 1565113 - DNA, 25 bp, Homo sapien
gtcgggggacctcctcctgctcctc

SEQ ID NO: 1565114 - DNA, 25 bp, Homo sapien
ggacctcctcctgctcctctgaccg

SEQ ID NO: 1565115 - DNA, 25 bp, Homo sapien
gggacctcctcctgctcctctgacc

SEQ ID NO: 1565116 - DNA, 25 bp, Homo sapien
gtcatagttgagcatgcggtctgca

SEQ ID NO: 1565117 - DNA, 25 bp, Homo sapien
ttgagcatgcggtctgcacacccat

SEQ ID NO: 1565118 - DNA, 25 bp, Homo sapien
catagttgagcatgcggtctgcaca

SEQ ID NO: 1565119 - DNA, 25 bp, Homo sapien
tgtaaggtaggggacagtcatagtt

SEQ ID NO: 1565120 - DNA, 25 bp, Homo sapien
agcctccttagggggagcctccttg

SEQ ID NO: 1565121 - DNA, 25 bp, Homo sapien
caggagcctccttagggggagcctc

SEQ ID NO: 1565122 - DNA, 25 bp, Homo sapien
ggaaaacgccggtgggctcctctgc

SEQ ID NO: 1565123 - DNA, 25 bp, Homo sapien
gacggagtccggcttcttcaggaaa

SEQ ID NO: 1565124 - DNA, 25 bp, Homo sapien
tcctctgcagtcggggactggtcct

SEQ ID NO: 1565125 - DNA, 25 bp, Homo sapien
cactgagacggagtccggcttcttc

SEQ ID NO: 1565126 - DNA, 25 bp, Homo sapien
actccttgaaggagaagcgggcgcc

SEQ ID NO: 1565127 - DNA, 25 bp, Homo sapien
tggcggagttgtgggactccttgaa

SEQ ID NO: 1565128 - DNA, 25 bp, Homo sapien
cacttccccttgaaccacttgatgg

SEQ ID NO: 1565129 - DNA, 25 bp, Homo sapien
gtcggtttgtctgggagctccttcc

SEQ ID NO: 1565130 - DNA, 25 bp, Homo sapien
caccttcccaatgtgcagctccacg

SEQ ID NO: 1565131 - DNA, 25 bp, Homo sapien
gctttgacctcgaggcggtaatacc

SEQ ID NO: 1565132 - DNA, 25 bp, Homo sapien
cctccacatcgatgttgaagccaca

SEQ ID NO: 1565133 - DNA, 25 bp, Homo sapien
ccttggctttgacctcgaggcggta

SEQ ID NO: 1565134 - DNA, 25 bp, Homo sapien
gtacgcttgaagctttctagactct

SEQ ID NO: 1565135 - DNA, 25 bp, Homo sapien
ctgcagtatccgacttcttttcact

SEQ ID NO: 1565136 - DNA, 25 bp, Homo sapien
tgcagtatccgacttcttttcactc

SEQ ID NO: 1565137 - DNA, 25 bp, Homo sapien
ttcttcaacaggccactgaaatcca

SEQ ID NO: 1565138 - DNA, 25 bp, Homo sapien
cttcttcaacaggccactgaaatcc

SEQ ID NO: 1565139 - DNA, 25 bp, Homo sapien
tcttcaacaggccactgaaatccag

SEQ ID NO: 1565140 - DNA, 25 bp, Homo sapien
tcttcttcaacaggccactgaaatc

SEQ ID NO: 1565141 - DNA, 25 bp, Homo sapien
aaggcgattttctcgtactcgctct

SEQ ID NO: 1565142 - DNA, 25 bp, Homo sapien
gatgcctaggtcatcgtcatctttc

SEQ ID NO: 1565143 - DNA, 25 bp, Homo sapien
gcactcttcttgacctcgaccttag

SEQ ID NO: 1565144 - DNA, 25 bp, Homo sapien
ttagcctttttcagccgcttcagca

SEQ ID NO: 1565145 - DNA, 25 bp, Homo sapien
tcaggtctgggtcgctgatctctac

SEQ ID NO: 1565146 - DNA, 25 bp, Homo sapien
tctgggtcgctgatctctaccatca

SEQ ID NO: 1565147 - DNA, 25 bp, Homo sapien
gctgatctctaccatcaacttgatc

SEQ ID NO: 1565148 - DNA, 25 bp, Homo sapien
tctcctggccgttcttgaaccactt

SEQ ID NO: 1565149 - DNA, 25 bp, Homo sapien
gaagagctcggtgaaacacttctca

SEQ ID NO: 1565150 - DNA, 25 bp, Homo sapien
tacttcataggcagcgtcatccgcc

SEQ ID NO: 1565151 - DNA, 25 bp, Homo sapien
catccgccagcgtgcacttgttgat

SEQ ID NO: 1565152 - DNA, 25 bp, Homo sapien
gaattcgcttcttaccaacgttctc

SEQ ID NO: 1565153 - DNA, 25 bp, Homo sapien
acctccactgccatttccacccggt

SEQ ID NO: 1565154 - DNA, 25 bp, Homo sapien
caagaggtgtgacaattaggactgg

SEQ ID NO: 1565155 - DNA, 25 bp, Homo sapien
ctgacacctccactgccatttccac

SEQ ID NO: 1565156 - DNA, 25 bp, Homo sapien
ggtcctcaagaggtgtgacaattag

SEQ ID NO: 1565157 - DNA, 25 bp, Homo sapien
cctggaccacgtctgagaagatgag

SEQ ID NO: 1565158 - DNA, 25 bp, Homo sapien
gaatcctcccgagtcagttccacac

SEQ ID NO: 1565159 - DNA, 25 bp, Homo sapien
tcttgaagcggtaccgggccttgaa

SEQ ID NO: 1565160 - DNA, 25 bp, Homo sapien
ttatgacctgatagcgacccctgtc

SEQ ID NO: 1565161 - DNA, 25 bp, Homo sapien
cgtcagatccgcgatgtcctgcagg

SEQ ID NO: 1565162 - DNA, 25 bp, Homo sapien
gtgatcctcttgctgggccgcacct

SEQ ID NO: 1565163 - DNA, 25 bp, Homo sapien
cctacatgggaaatggtgatcctct

SEQ ID NO: 1565164 - DNA, 25 bp, Homo sapien
attcttataccacttgcccgtcact

SEQ ID NO: 1565165 - DNA, 25 bp, Homo sapien
aaacgtgtagtctccctcatcctcg

SEQ ID NO: 1565166 - DNA, 25 bp, Homo sapien
gaagttgagcttggccgagagcgac

SEQ ID NO: 1565167 - DNA, 25 bp, Homo sapien
cgacagggcgtagccgtcaggcaca

SEQ ID NO: 1565168 - DNA, 25 bp, Homo sapien
cgtcatcgatcaccagcttgtggaa

SEQ ID NO: 1565169 - DNA, 25 bp, Homo sapien
gcttgggaacgtactccaccttgat

SEQ ID NO: 1565170 - DNA, 25 bp, Homo sapien
tgcttgggaacgtactccaccttga

SEQ ID NO: 1565171 - DNA, 25 bp, Homo sapien
cttgggaacgtactccaccttgatt

SEQ ID NO: 1565172 - DNA, 25 bp, Homo sapien
ttgcttgggaacgtactccaccttg

SEQ ID NO: 1565173 - DNA, 25 bp, Homo sapien
ccgctcccagcgcagcccgtggtgc

SEQ ID NO: 1565174 - DNA, 25 bp, Homo sapien
gctcccagcgcagcccgtggtgctc

SEQ ID NO: 1565175 - DNA, 25 bp, Homo sapien
cgctcccagcgcagcccgtggtgct

SEQ ID NO: 1565176 - DNA, 25 bp, Homo sapien
tcccagcgcagcccgtggtgctcac

SEQ ID NO: 1565177 - DNA, 25 bp, Homo sapien
ttccccgagcaatccaagtggatct

SEQ ID NO: 1565178 - DNA, 25 bp, Homo sapien
tcttccccgagcaatccaagtggat

SEQ ID NO: 1565179 - DNA, 25 bp, Homo sapien
gaggtcttccccgagcaatccaagt

SEQ ID NO: 1565180 - DNA, 25 bp, Homo sapien
ggtcttccccgagcaatccaagtgg

SEQ ID NO: 1565181 - DNA, 25 bp, Homo sapien
gggagggggctcccctgtgatggac

SEQ ID NO: 1565182 - DNA, 25 bp, Homo sapien
ggagggggctcccctgtgatggaca

SEQ ID NO: 1565183 - DNA, 25 bp, Homo sapien
gagggggctcccctgtgatggacac

SEQ ID NO: 1565184 - DNA, 25 bp, Homo sapien
ctcatctcccttcagccaggtagcg

SEQ ID NO: 1565185 - DNA, 25 bp, Homo sapien
tcatctcccttcagccaggtagcga

SEQ ID NO: 1565186 - DNA, 25 bp, Homo sapien
catctcccttcagccaggtagcgac

SEQ ID NO: 1565187 - DNA, 25 bp, Homo sapien
atcgtgtccccaagcaaacccaggc

SEQ ID NO: 1565188 - DNA, 25 bp, Homo sapien
tcattaaaagcaccagactggacgg

SEQ ID NO: 1565189 - DNA, 25 bp, Homo sapien
tccaaatgccgtccttcattaaaag

SEQ ID NO: 1565190 - DNA, 25 bp, Homo sapien
agatggccttgcaccccatcgtgtc

SEQ ID NO: 1565191 - DNA, 25 bp, Homo sapien
gctgcgcactctcaatcacaaagct

SEQ ID NO: 1565192 - DNA, 25 bp, Homo sapien
gcaggaagatggaagccacgtcctc

SEQ ID NO: 1565193 - DNA, 25 bp, Homo sapien
ctcgatgcgggtcctgccctcggtg

SEQ ID NO: 1565194 - DNA, 25 bp, Homo sapien
atggtgtagcggccctcgtcttccc

SEQ ID NO: 1565195 - DNA, 25 bp, Homo sapien
tcccagacaaggatggcccaatcct

SEQ ID NO: 1565196 - DNA, 25 bp, Homo sapien
acaaggatggcccaatcctctccaa

SEQ ID NO: 1565197 - DNA, 25 bp, Homo sapien
tcgtacattggtggctcccagacaa

SEQ ID NO: 1565198 - DNA, 25 bp, Homo sapien
tctccaaccgaggtgatgcgcacag

SEQ ID NO: 1565199 - DNA, 25 bp, Homo sapien
catgaatcttaggtggatctcaggg

SEQ ID NO: 1565200 - DNA, 25 bp, Homo sapien
agtgagggccacatccagaggatcg

SEQ ID NO: 1565201 - DNA, 25 bp, Homo sapien
agggcggtccgaggccatgaatctt

SEQ ID NO: 1565202 - DNA, 25 bp, Homo sapien
acagagcattcagaggccaccagtc

SEQ ID NO: 1565203 - DNA, 25 bp, Homo sapien
aagttcagcttcatccagcgctgag

SEQ ID NO: 1565204 - DNA, 25 bp, Homo sapien
cattgacggcgaagacacgcatctc

SEQ ID NO: 1565205 - DNA, 25 bp, Homo sapien
tcttggtggactcataggtggtctc

SEQ ID NO: 1565206 - DNA, 25 bp, Homo sapien
tgggagacccctatagcattgacgg

SEQ ID NO: 1565207 - DNA, 25 bp, Homo sapien
acatcctccactatcaggtgcaggg

SEQ ID NO: 1565208 - DNA, 25 bp, Homo sapien
cacctgccccgatcctgttcggagg

SEQ ID NO: 1565209 - DNA, 25 bp, Homo sapien
aggcagtactccaccaggtacccat

SEQ ID NO: 1565210 - DNA, 25 bp, Homo sapien
tgttcggaggcctccacttgagtgt

SEQ ID NO: 1565211 - DNA, 25 bp, Homo sapien
actactcggaagaggattctggctc

SEQ ID NO: 1565212 - DNA, 25 bp, Homo sapien
ggagattcttgacggtgaagccaca

SEQ ID NO: 1565213 - DNA, 25 bp, Homo sapien
tctccctgatggtgaccggctgggc

SEQ ID NO: 1565214 - DNA, 25 bp, Homo sapien
cacagcgctccacgggctcggtgtt

SEQ ID NO: 1565215 - DNA, 25 bp, Homo sapien
gccaatggtgataaggctctctggg

SEQ ID NO: 1565216 - DNA, 25 bp, Homo sapien
aggggccaatggtgataaggctctc

SEQ ID NO: 1565217 - DNA, 25 bp, Homo sapien
cggggcgcattccaggggccaatgg

SEQ ID NO: 1565218 - DNA, 25 bp, Homo sapien
agggcgcaaacacagggagggggct

SEQ ID NO: 1565219 - DNA, 25 bp, Homo sapien
gagctgctcgcccactttgcggatg

SEQ ID NO: 1565220 - DNA, 25 bp, Homo sapien
gacaaggttgagctgctcgcccact

SEQ ID NO: 1565221 - DNA, 25 bp, Homo sapien
ccactttgcggatgtaggtctggcg

SEQ ID NO: 1565222 - DNA, 25 bp, Homo sapien
ggacgacaaggttgagctgctcgcc

SEQ ID NO: 1565223 - DNA, 25 bp, Homo sapien
tcagctcgtactccccggagtcgga

SEQ ID NO: 1565224 - DNA, 25 bp, Homo sapien
ggcggtgtccttcatgttctcgatc

SEQ ID NO: 1565225 - DNA, 25 bp, Homo sapien
gcctggcgcacgaagaacacggtgt

SEQ ID NO: 1565226 - DNA, 25 bp, Homo sapien
gttctcgatctgcacgctcagctcg

SEQ ID NO: 1565227 - DNA, 25 bp, Homo sapien
caggggccctccccagcgcgcgcac

SEQ ID NO: 1565228 - DNA, 25 bp, Homo sapien
ctcctcccccatcgctgcccatccc

SEQ ID NO: 1565229 - DNA, 25 bp, Homo sapien
cggcctccaggggccctccccagcg

SEQ ID NO: 1565230 - DNA, 25 bp, Homo sapien
cctcccccatcgctgcccatccctg

SEQ ID NO: 1565231 - DNA, 25 bp, Homo sapien
tctgctttctggacgaaatacccca

SEQ ID NO: 1565232 - DNA, 25 bp, Homo sapien
catcacgtttatggggggcccagcc

SEQ ID NO: 1565233 - DNA, 25 bp, Homo sapien
tgccactccaccagcgcgttcgtgc

SEQ ID NO: 1565234 - DNA, 25 bp, Homo sapien
accagcgcgttcgtgccccacacct

SEQ ID NO: 1565235 - DNA, 25 bp, Homo sapien
gatgttctcggtgtaaactcggaaa

SEQ ID NO: 1565236 - DNA, 25 bp, Homo sapien
taaggtcggacacagtacagctagt

SEQ ID NO: 1565237 - DNA, 25 bp, Homo sapien
tagtgtgcctgttacgttcatagac

SEQ ID NO: 1565238 - DNA, 25 bp, Homo sapien
tattcattgcccacgataaggtcgg

SEQ ID NO: 1565239 - DNA, 25 bp, Homo sapien
catgctccttatactcgaacggttt

SEQ ID NO: 1565240 - DNA, 25 bp, Homo sapien
ttgagggctgccgagtacccagcca

SEQ ID NO: 1565241 - DNA, 25 bp, Homo sapien
tggcctctgacagcacagttgaggg

SEQ ID NO: 1565242 - DNA, 25 bp, Homo sapien
cacgaccacgcggtctatgagaggt

SEQ ID NO: 1565243 - DNA, 25 bp, Homo sapien
ttgccagatgttcttggacgagtca

SEQ ID NO: 1565244 - DNA, 25 bp, Homo sapien
gttgagagtcaagggagaggaggcc

SEQ ID NO: 1565245 - DNA, 25 bp, Homo sapien
caggaagccgatctgggttctaggc

SEQ ID NO: 1565246 - DNA, 25 bp, Homo sapien
aatcccacttcacagggtaacggtg

SEQ ID NO: 1565247 - DNA, 25 bp, Homo sapien
gactccttggtaattggttatcagg

SEQ ID NO: 1565248 - DNA, 25 bp, Homo sapien
ttgacggcccggcaggtgtaagtcc

SEQ ID NO: 1565249 - DNA, 25 bp, Homo sapien
tcaggaacttgggatcttcacggat

SEQ ID NO: 1565250 - DNA, 25 bp, Homo sapien
gatgttcagcgtcaggactccttgg

SEQ ID NO: 1565251 - DNA, 25 bp, Homo sapien
cagccagtgttggggatggccacgc

SEQ ID NO: 1565252 - DNA, 25 bp, Homo sapien
gccagtgttggggatggccacgccc

SEQ ID NO: 1565253 - DNA, 25 bp, Homo sapien
cagtgttggggatggccacgccctc

SEQ ID NO: 1565254 - DNA, 25 bp, Homo sapien
tcagccagtgttggggatggccacg

SEQ ID NO: 1565255 - DNA, 25 bp, Homo sapien
aggactccaccaccaattgtcttgg

SEQ ID NO: 1565256 - DNA, 25 bp, Homo sapien
accaccaattgtcttggcaggtagg

SEQ ID NO: 1565257 - DNA, 25 bp, Homo sapien
tctcagcgaaaactccagaaagaac

SEQ ID NO: 1565258 - DNA, 25 bp, Homo sapien
gcgaaaactccagaaagaacacagt

SEQ ID NO: 1565259 - DNA, 25 bp, Homo sapien
ctggagctcccggacctattgcttc

SEQ ID NO: 1565260 - DNA, 25 bp, Homo sapien
gacatctatcctgccccgacctctg

SEQ ID NO: 1565261 - DNA, 25 bp, Homo sapien
gacctattgcttctggccggccctg

SEQ ID NO: 1565262 - DNA, 25 bp, Homo sapien
ctggccccaggtgactcggttggga

SEQ ID NO: 1565263 - DNA, 25 bp, Homo sapien
gcggcgaattcgaccagtttcggga

SEQ ID NO: 1565264 - DNA, 25 bp, Homo sapien
ggccgtcccagacggctccaacgct

SEQ ID NO: 1565265 - DNA, 25 bp, Homo sapien
cagtttcgggacttccccatctttg

SEQ ID NO: 1565266 - DNA, 25 bp, Homo sapien
tccaacgctacctccagagcggcga

SEQ ID NO: 1565267 - DNA, 25 bp, Homo sapien
cgctccgcatcatgacgtcacagtg

SEQ ID NO: 1565268 - DNA, 25 bp, Homo sapien
tgacgtcataaagcccgctccgcat

SEQ ID NO: 1565269 - DNA, 25 bp, Homo sapien
gagcccgctcttgtgtgacgtcata

SEQ ID NO: 1565270 - DNA, 25 bp, Homo sapien
tccagggacgtcatcacaaatcagg

SEQ ID NO: 1565271 - DNA, 25 bp, Homo sapien
ccccgggctcgactgggcgctgcta

SEQ ID NO: 1565272 - DNA, 25 bp, Homo sapien
ctaccgccatcagcaagagcaggag

SEQ ID NO: 1565273 - DNA, 25 bp, Homo sapien
ctcgactgggcgctgctaccgccat

SEQ ID NO: 1565274 - DNA, 25 bp, Homo sapien
gctgctaccgccatcagcaagagca

SEQ ID NO: 1565275 - DNA, 25 bp, Homo sapien
ccgcgcccgctatgcacagctaaag

SEQ ID NO: 1565276 - DNA, 25 bp, Homo sapien
agaccgcgcccgctatgcacagcta

SEQ ID NO: 1565277 - DNA, 25 bp, Homo sapien
gacatccgtagaccgcgcccgctat

SEQ ID NO: 1565278 - DNA, 25 bp, Homo sapien
ctgcgacatccgtagaccgcgcccg

SEQ ID NO: 1565279 - DNA, 25 bp, Homo sapien
gcctctttcatttcaaccgcccgga

SEQ ID NO: 1565280 - DNA, 25 bp, Homo sapien
ttgcctctttcatttcaaccgcccg

SEQ ID NO: 1565281 - DNA, 25 bp, Homo sapien
tgcctctttcatttcaaccgcccgg

SEQ ID NO: 1565282 - DNA, 25 bp, Homo sapien
cttgcctctttcatttcaaccgccc

SEQ ID NO: 1565283 - DNA, 25 bp, Homo sapien
caggcctcgccctctcgaccttccg

SEQ ID NO: 1565284 - DNA, 25 bp, Homo sapien
tcgccctctcgaccttccgccccag

SEQ ID NO: 1565285 - DNA, 25 bp, Homo sapien
cgtgccacaggcctcgccctctcga

SEQ ID NO: 1565286 - DNA, 25 bp, Homo sapien
gcagcagccccaccgtgccacaggc

SEQ ID NO: 1565287 - DNA, 25 bp, Homo sapien
cgctgtgacagggacaaggtaccat

SEQ ID NO: 1565288 - DNA, 25 bp, Homo sapien
ctgccgctgtgacagggacaaggta

SEQ ID NO: 1565289 - DNA, 25 bp, Homo sapien
cccgcttccggaagttggcactgtc

SEQ ID NO: 1565290 - DNA, 25 bp, Homo sapien
gtgagccccgcttccggaagttggc

SEQ ID NO: 1565291 - DNA, 25 bp, Homo sapien
cagggacaaaggaggagacatagcc

SEQ ID NO: 1565292 - DNA, 25 bp, Homo sapien
acccggtacaggccattcagggctg

SEQ ID NO: 1565293 - DNA, 25 bp, Homo sapien
gacccggtacaggccattcagggct

SEQ ID NO: 1565294 - DNA, 25 bp, Homo sapien
tgcagggtcagctggtccgacaggt

SEQ ID NO: 1565295 - DNA, 25 bp, Homo sapien
tgcaccgaggtgttgaacagctcca

SEQ ID NO: 1565296 - DNA, 25 bp, Homo sapien
acgttgccggccacatccacgtgca

SEQ ID NO: 1565297 - DNA, 25 bp, Homo sapien
ccgacaggtgcgactccaccaggga

SEQ ID NO: 1565298 - DNA, 25 bp, Homo sapien
ccaggcgctcaatgaaggccgccgt

SEQ ID NO: 1565299 - DNA, 25 bp, Homo sapien
tatttggcgaagaaggacttctgct

SEQ ID NO: 1565300 - DNA, 25 bp, Homo sapien
gtatttggcgaagaaggacttctgc

SEQ ID NO: 1565301 - DNA, 25 bp, Homo sapien
catctccaggcgctcaatgaaggcc

SEQ ID NO: 1565302 - DNA, 25 bp, Homo sapien
tcaggcctcctgtggcggtggcgcg

SEQ ID NO: 1565303 - DNA, 25 bp, Homo sapien
cacggccccccccaggatgatgtgc

SEQ ID NO: 1565304 - DNA, 25 bp, Homo sapien
tgtgagcaacacggccccccccagg

SEQ ID NO: 1565305 - DNA, 25 bp, Homo sapien
cagcaggacgcagggctgtgagcaa

SEQ ID NO: 1565306 - DNA, 25 bp, Homo sapien
caggacgacgggaatgatgtacatc

SEQ ID NO: 1565307 - DNA, 25 bp, Homo sapien
aacaggacgacgggaatgatgtaca

SEQ ID NO: 1565308 - DNA, 25 bp, Homo sapien
tcatgaggaacaggacgacgggaat

SEQ ID NO: 1565309 - DNA, 25 bp, Homo sapien
ggacgacgggaatgatgtacatcca

SEQ ID NO: 1565310 - DNA, 25 bp, Homo sapien
tggcccccggtgtctggcgctcctg

SEQ ID NO: 1565311 - DNA, 25 bp, Homo sapien
cctggcccccggtgtctggcgctcc

SEQ ID NO: 1565312 - DNA, 25 bp, Homo sapien
ccaccctggcccccggtgtctggcg

SEQ ID NO: 1565313 - DNA, 25 bp, Homo sapien
cccccggtgtctggcgctcctgaca

SEQ ID NO: 1565314 - DNA, 25 bp, Homo sapien
gaggctgcatcctagtccagtgtca

SEQ ID NO: 1565315 - DNA, 25 bp, Homo sapien
agaaggcggcatgttcccagactgc

SEQ ID NO: 1565316 - DNA, 25 bp, Homo sapien
catagtggccaggatctcgggctct

SEQ ID NO: 1565317 - DNA, 25 bp, Homo sapien
gagggcctgtcaccttaaaggcaag

SEQ ID NO: 1565318 - DNA, 25 bp, Homo sapien
cagggagggtggcacacagcaaagg

SEQ ID NO: 1565319 - DNA, 25 bp, Homo sapien
gggagggtggcacacagcaaaggcc

SEQ ID NO: 1565320 - DNA, 25 bp, Homo sapien
ttacagggagggtggcacacagcaa

SEQ ID NO: 1565321 - DNA, 25 bp, Homo sapien
tacagggagggtggcacacagcaaa

SEQ ID NO: 1565322 - DNA, 25 bp, Homo sapien
gtttaataaactgccacacaacaca

SEQ ID NO: 1565323 - DNA, 25 bp, Homo sapien
gagcagtgaatttcaatcaagcttg

SEQ ID NO: 1565324 - DNA, 25 bp, Homo sapien
tcaagcttgtacatcaggaccgtct

SEQ ID NO: 1565325 - DNA, 25 bp, Homo sapien
gaataacgtatcaagtgagcagtga

SEQ ID NO: 1565326 - DNA, 25 bp, Homo sapien
taaccatacaatgcaggaggctagc

SEQ ID NO: 1565327 - DNA, 25 bp, Homo sapien
tccattttagtcatgcatcccgaga

SEQ ID NO: 1565328 - DNA, 25 bp, Homo sapien
aacgcgtttccgatctgccatcgta

SEQ ID NO: 1565329 - DNA, 25 bp, Homo sapien
cacccaagagagactggacgacagc

SEQ ID NO: 1565330 - DNA, 25 bp, Homo sapien
tgccccagctatgtcaaaagaaggt

SEQ ID NO: 1565331 - DNA, 25 bp, Homo sapien
tgccagcctgaaagcaaccgagact

SEQ ID NO: 1565332 - DNA, 25 bp, Homo sapien
cagctcaggaagcatcgaactctgg

SEQ ID NO: 1565333 - DNA, 25 bp, Homo sapien
ggagcccagagtgagcatacagttt

SEQ ID NO: 1565334 - DNA, 25 bp, Homo sapien
gaaggctttcgcaatgccacgcagc

SEQ ID NO: 1565335 - DNA, 25 bp, Homo sapien
taaatgcccacatgaaaccctaggc

SEQ ID NO: 1565336 - DNA, 25 bp, Homo sapien
gcaactatgtactgggagcacctaa

SEQ ID NO: 1565337 - DNA, 25 bp, Homo sapien
gaccagaagtcacgaggctaggatg

SEQ ID NO: 1565338 - DNA, 25 bp, Homo sapien
aaatgcaactgggactgcacatggg

SEQ ID NO: 1565339 - DNA, 25 bp, Homo sapien
gaagaggcaccagtaattagcccct

SEQ ID NO: 1565340 - DNA, 25 bp, Homo sapien
aaataaaggaggatggactgacagc

SEQ ID NO: 1565341 - DNA, 25 bp, Homo sapien
tctctgatgggttaaagaagcctac

SEQ ID NO: 1565342 - DNA, 25 bp, Homo sapien
tctctgttccgttttctctcccacc

SEQ ID NO: 1565343 - DNA, 25 bp, Homo sapien
tctcccttctagcagattctctggc

SEQ ID NO: 1565344 - DNA, 25 bp, Homo sapien
tcctgttctctttttctcgctgtcc

SEQ ID NO: 1565345 - DNA, 25 bp, Homo sapien
tcacttctgctctccctgtccggct

SEQ ID NO: 1565346 - DNA, 25 bp, Homo sapien
tccctgggagaaaggacgtgacgct

SEQ ID NO: 1565347 - DNA, 25 bp, Homo sapien
ttgatgcttttaagggccggccacg

SEQ ID NO: 1565348 - DNA, 25 bp, Homo sapien
gagcacaggcgtttcgtactctgcg

SEQ ID NO: 1565349 - DNA, 25 bp, Homo sapien
tattattaacatagtgagcacaggc

SEQ ID NO: 1565350 - DNA, 25 bp, Homo sapien
ctcaccttcactcgctctttcctct

SEQ ID NO: 1565351 - DNA, 25 bp, Homo sapien
atctctgtttctctcaacgtctctg

SEQ ID NO: 1565352 - DNA, 25 bp, Homo sapien
gtctctgctcccaccggctcgtctg

SEQ ID NO: 1565353 - DNA, 25 bp, Homo sapien
tctgccagtcattgtccttgaccct

SEQ ID NO: 1565354 - DNA, 25 bp, Homo sapien
ccccacttctatctctgactctccc

SEQ ID NO: 1565355 - DNA, 25 bp, Homo sapien
ctcccccacttctatctctgtctct

SEQ ID NO: 1565356 - DNA, 25 bp, Homo sapien
gtctctcccccacttctatctctga

SEQ ID NO: 1565357 - DNA, 25 bp, Homo sapien
cttctctgtctctcccccacttcta

SEQ ID NO: 1565358 - DNA, 25 bp, Homo sapien
ttacaggccagacaccctggtgtgt

SEQ ID NO: 1565359 - DNA, 25 bp, Homo sapien
caggccagacaccctggtgtgtggg

SEQ ID NO: 1565360 - DNA, 25 bp, Homo sapien
gccagacaccctggtgtgtggggcc

SEQ ID NO: 1565361 - DNA, 25 bp, Homo sapien
cttacaggccagacaccctggtgtg

SEQ ID NO: 1565362 - DNA, 25 bp, Homo sapien
tcctcttcactattcacaatgtcca

SEQ ID NO: 1565363 - DNA, 25 bp, Homo sapien
tctccactcccgtgagcccttctgt

SEQ ID NO: 1565364 - DNA, 25 bp, Homo sapien
tcccgtgagcccttctgtgcggcct

SEQ ID NO: 1565365 - DNA, 25 bp, Homo sapien
accagactctccactcccgtgagcc

SEQ ID NO: 1565366 - DNA, 25 bp, Homo sapien
catctcttatctgggccctgtcaca

SEQ ID NO: 1565367 - DNA, 25 bp, Homo sapien
cagccagacctcaatccagtggttc

SEQ ID NO: 1565368 - DNA, 25 bp, Homo sapien
cacttgcctaagctagacgctggga

SEQ ID NO: 1565369 - DNA, 25 bp, Homo sapien
gagatctgcaagaggtgaccgtcac

SEQ ID NO: 1565370 - DNA, 25 bp, Homo sapien
cgggagggacggacgtgggagcgag

SEQ ID NO: 1565371 - DNA, 25 bp, Homo sapien
acgtgggagcgagaacgtcacactg

SEQ ID NO: 1565372 - DNA, 25 bp, Homo sapien
cttctcctgggctgacgcgagctgg

SEQ ID NO: 1565373 - DNA, 25 bp, Homo sapien
gctggggctcatgttgggggcactt

SEQ ID NO: 1565374 - DNA, 25 bp, Homo sapien
aattcctcccttatcagcagcggca

SEQ ID NO: 1565375 - DNA, 25 bp, Homo sapien
acttccgtgaggtgcctggcccctg

SEQ ID NO: 1565376 - DNA, 25 bp, Homo sapien
agcagcggcagcctttgggtgccac

SEQ ID NO: 1565377 - DNA, 25 bp, Homo sapien
tgtaccccgtacacggcagctatgg

SEQ ID NO: 1565378 - DNA, 25 bp, Homo sapien
tggctggtggctgtatcacatcacc

SEQ ID NO: 1565379 - DNA, 25 bp, Homo sapien
tataacaaaggaaatctatcgtccc

SEQ ID NO: 1565380 - DNA, 25 bp, Homo sapien
aggctggagagccagcctcgcagct

SEQ ID NO: 1565381 - DNA, 25 bp, Homo sapien
ctccgggtggtcttaggcccctcag

SEQ ID NO: 1565382 - DNA, 25 bp, Homo sapien
tccacgaacctctgctcttcaagag

SEQ ID NO: 1565383 - DNA, 25 bp, Homo sapien
ttcaagagcggctccaaggagaacg

SEQ ID NO: 1565384 - DNA, 25 bp, Homo sapien
aacgtgcaagagacgcagatctgag

SEQ ID NO: 1565385 - DNA, 25 bp, Homo sapien
ttcaaggcgcactacagcagcaacc

SEQ ID NO: 1565386 - DNA, 25 bp, Homo sapien
atggctgccgagctcaaatgccgca

SEQ ID NO: 1565387 - DNA, 25 bp, Homo sapien
tgctatgcgcccgtcatcgtggagc

SEQ ID NO: 1565388 - DNA, 25 bp, Homo sapien
gacctcaacgtcaccgagggcatgg

SEQ ID NO: 1565389 - DNA, 25 bp, Homo sapien
gagctggaccagtcgcatttcacct

SEQ ID NO: 1565390 - DNA, 25 bp, Homo sapien
gctcaagcggctggaatacatctcg

SEQ ID NO: 1565391 - DNA, 25 bp, Homo sapien
cagctgagcaagaacctggtgcgca

SEQ ID NO: 1565392 - DNA, 25 bp, Homo sapien
gctacctcaacctgggcatgtgcaa

SEQ ID NO: 1565393 - DNA, 25 bp, Homo sapien
gctttttgacaaccggctgaccacg

SEQ ID NO: 1565394 - DNA, 25 bp, Homo sapien
gacttttgaaggcattgaagctgct

SEQ ID NO: 1565395 - DNA, 25 bp, Homo sapien
acagtagagaatcagccctcaccga

SEQ ID NO: 1565396 - DNA, 25 bp, Homo sapien
tgcactcggccataaaattgttaat

SEQ ID NO: 1565397 - DNA, 25 bp, Homo sapien
caccacggccaacaagtctagactt

SEQ ID NO: 1565398 - DNA, 25 bp, Homo sapien
gggctccctgaagatactctgtctc

SEQ ID NO: 1565399 - DNA, 25 bp, Homo sapien
tttgatgccttgctggcgatacagc

SEQ ID NO: 1565400 - DNA, 25 bp, Homo sapien
cctttttgatgccttgctggcgata

SEQ ID NO: 1565401 - DNA, 25 bp, Homo sapien
tatgacctatatcaaaactcctctt

SEQ ID NO: 1565402 - DNA, 25 bp, Homo sapien
tggctaccccgagttgcaaagcggt

SEQ ID NO: 1565403 - DNA, 25 bp, Homo sapien
tctaaatcaggcagtgtagaccggg

SEQ ID NO: 1565404 - DNA, 25 bp, Homo sapien
tctctcttgccagaacccggctgtg

SEQ ID NO: 1565405 - DNA, 25 bp, Homo sapien
gcaaagcggtctgggtagtgaacat

SEQ ID NO: 1565406 - DNA, 25 bp, Homo sapien
gccccagccaggaactggttagaaa

SEQ ID NO: 1565407 - DNA, 25 bp, Homo sapien
ctgccccagccaggaactggttaga

SEQ ID NO: 1565408 - DNA, 25 bp, Homo sapien
cccagccaggaactggttagaaaca

SEQ ID NO: 1565409 - DNA, 25 bp, Homo sapien
ccctgccccagccaggaactggtta

SEQ ID NO: 1565410 - DNA, 25 bp, Homo sapien
ggtagaattacagaggaactggaag

SEQ ID NO: 1565411 - DNA, 25 bp, Homo sapien
tgaagccccggggtagaattacaga

SEQ ID NO: 1565412 - DNA, 25 bp, Homo sapien
ctgcccatggcagggaagcacacgg

SEQ ID NO: 1565413 - DNA, 25 bp, Homo sapien
ccatggcagggaagcacacgggctc

SEQ ID NO: 1565414 - DNA, 25 bp, Homo sapien
gagaacccagtgtcagctgccctga

SEQ ID NO: 1565415 - DNA, 25 bp, Homo sapien
agagaacccagtgtcagctgccctg

SEQ ID NO: 1565416 - DNA, 25 bp, Homo sapien
agaacccagtgtcagctgccctgag

SEQ ID NO: 1565417 - DNA, 25 bp, Homo sapien
gaacccagtgtcagctgccctgagc

SEQ ID NO: 1565418 - DNA, 25 bp, Homo sapien
gggtctccaggtccataaggagggc

SEQ ID NO: 1565419 - DNA, 25 bp, Homo sapien
ggtctccaggtccataaggagggct

SEQ ID NO: 1565420 - DNA, 25 bp, Homo sapien
gtctccaggtccataaggagggctc

SEQ ID NO: 1565421 - DNA, 25 bp, Homo sapien
cgggagttctcggtccagtgcctcg

SEQ ID NO: 1565422 - DNA, 25 bp, Homo sapien
gagttctcggtccagtgcctcgtac

SEQ ID NO: 1565423 - DNA, 25 bp, Homo sapien
acttccggatgcacgggagttctcg

SEQ ID NO: 1565424 - DNA, 25 bp, Homo sapien
ggaacttccggatgcacgggagttc

SEQ ID NO: 1565425 - DNA, 25 bp, Homo sapien
ccacagatgacgttcatgttctcaa

SEQ ID NO: 1565426 - DNA, 25 bp, Homo sapien
ctccatggcccctggtaactgggcc

SEQ ID NO: 1565427 - DNA, 25 bp, Homo sapien
tcaaagcggatgctgctcacgcgcc

SEQ ID NO: 1565428 - DNA, 25 bp, Homo sapien
cgttcatgttctcaaagcggatgct

SEQ ID NO: 1565429 - DNA, 25 bp, Homo sapien
tatcccggtcactactgggtcactc

SEQ ID NO: 1565430 - DNA, 25 bp, Homo sapien
acctctatcccggtcactactgggt

SEQ ID NO: 1565431 - DNA, 25 bp, Homo sapien
tccaggctcagacctctatcccggt

SEQ ID NO: 1565432 - DNA, 25 bp, Homo sapien
ggctcagacctctatcccggtcact

SEQ ID NO: 1565433 - DNA, 25 bp, Homo sapien
ctggaagtccgtgaccgcgatgagc

SEQ ID NO: 1565434 - DNA, 25 bp, Homo sapien
caagcgcgagcgcgtctggaagtcc

SEQ ID NO: 1565435 - DNA, 25 bp, Homo sapien
actgagcccggagcgcagcaagcgc

SEQ ID NO: 1565436 - DNA, 25 bp, Homo sapien
tggcgcacgatctggtgcgcaagcc

SEQ ID NO: 1565437 - DNA, 25 bp, Homo sapien
taattaaactcacagtatccacccc

SEQ ID NO: 1565438 - DNA, 25 bp, Homo sapien
gcccgcggggcggtgcgcaagcgct

SEQ ID NO: 1565439 - DNA, 25 bp, Homo sapien
ctgggaaggcaacgccccctgtcct

SEQ ID NO: 1565440 - DNA, 25 bp, Homo sapien
ggtgcgcaagcgctgccggggcccg

SEQ ID NO: 1565441 - DNA, 25 bp, Homo sapien
aactccacagggctcatagtctagg

SEQ ID NO: 1565442 - DNA, 25 bp, Homo sapien
tctttcactctgctacgactggcca

SEQ ID NO: 1565443 - DNA, 25 bp, Homo sapien
gaaggtctctcatgtaacaggcaag

SEQ ID NO: 1565444 - DNA, 25 bp, Homo sapien
tttggtgccatataaccgggctctg

SEQ ID NO: 1565445 - DNA, 25 bp, Homo sapien
ccagccgcctcccaggcccccatcg

SEQ ID NO: 1565446 - DNA, 25 bp, Homo sapien
cgcctcccaggcccccatcgccccg

SEQ ID NO: 1565447 - DNA, 25 bp, Homo sapien
gccgcctcccaggcccccatcgccc

SEQ ID NO: 1565448 - DNA, 25 bp, Homo sapien
agccgcctcccaggcccccatcgcc

SEQ ID NO: 1565449 - DNA, 25 bp, Homo sapien
cctggagtatgtgcagctcgggaca

SEQ ID NO: 1565450 - DNA, 25 bp, Homo sapien
tcaatggcgtatgtgactccacgta

SEQ ID NO: 1565451 - DNA, 25 bp, Homo sapien
tatattttcactggacgtcgctgct

SEQ ID NO: 1565452 - DNA, 25 bp, Homo sapien
caattaccatgactcggattcggga

SEQ ID NO: 1565453 - DNA, 25 bp, Homo sapien
gcagggtgacacatgtgaagagcac

SEQ ID NO: 1565454 - DNA, 25 bp, Homo sapien
cacatgtgaagagcacgcgtgtgac

SEQ ID NO: 1565455 - DNA, 25 bp, Homo sapien
catgtgaagagcacgcgtgtgactg

SEQ ID NO: 1565456 - DNA, 25 bp, Homo sapien
ggtgacacatgtgaagagcacgcgt

SEQ ID NO: 1565457 - DNA, 25 bp, Homo sapien
ctcttggcacccaaagttccagatg

SEQ ID NO: 1565458 - DNA, 25 bp, Homo sapien
ctctgggaactgccgagtgcccctg

SEQ ID NO: 1565459 - DNA, 25 bp, Homo sapien
tcctcgtctctgtccggtccgttgg

SEQ ID NO: 1565460 - DNA, 25 bp, Homo sapien
caggttcccgattctcccagcttct

SEQ ID NO: 1565461 - DNA, 25 bp, Homo sapien
tgctccccgagccccatggccaaag

SEQ ID NO: 1565462 - DNA, 25 bp, Homo sapien
caagagctgggggaccaccaaagcc

SEQ ID NO: 1565463 - DNA, 25 bp, Homo sapien
cccgagccccatggccaaagcccaa

SEQ ID NO: 1565464 - DNA, 25 bp, Homo sapien
cccatggccaaagcccaagagctgg

SEQ ID NO: 1565465 - DNA, 25 bp, Homo sapien
cctgccaccaagatgccccattcac

SEQ ID NO: 1565466 - DNA, 25 bp, Homo sapien
agcctgccaccaagatgccccattc

SEQ ID NO: 1565467 - DNA, 25 bp, Homo sapien
gcctgccaccaagatgccccattca

SEQ ID NO: 1565468 - DNA, 25 bp, Homo sapien
gatggggttggcgttgcttcctcct

SEQ ID NO: 1565469 - DNA, 25 bp, Homo sapien
ggatggggttggcgttgcttcctcc

SEQ ID NO: 1565470 - DNA, 25 bp, Homo sapien
ttttccctcaacagttccggcagga

SEQ ID NO: 1565471 - DNA, 25 bp, Homo sapien
ctcttttccctcaacagttccggca

SEQ ID NO: 1565472 - DNA, 25 bp, Homo sapien
tgtaagtgacgatgtcctcaggggt

SEQ ID NO: 1565473 - DNA, 25 bp, Homo sapien
ggatgtaagtgacgatgtcctcagg

SEQ ID NO: 1565474 - DNA, 25 bp, Homo sapien
taagtgacgatgtcctcaggggtgg

SEQ ID NO: 1565475 - DNA, 25 bp, Homo sapien
agtgacgatgtcctcaggggtggga

SEQ ID NO: 1565476 - DNA, 25 bp, Homo sapien
cctgggtcagctcgaccacgcgggt

SEQ ID NO: 1565477 - DNA, 25 bp, Homo sapien
cttgcacggcatcgcgggtgtcgcc

SEQ ID NO: 1565478 - DNA, 25 bp, Homo sapien
aacgcgtgcagacggacgtgcagct

SEQ ID NO: 1565479 - DNA, 25 bp, Homo sapien
tcgaccacgcgggtgtccaacgcgt

SEQ ID NO: 1565480 - DNA, 25 bp, Homo sapien
aggaagcacttgtggcccaggcgca

SEQ ID NO: 1565481 - DNA, 25 bp, Homo sapien
tcgaagtcgcgcgagagcaggaagc

SEQ ID NO: 1565482 - DNA, 25 bp, Homo sapien
cttcgaagtcgcgcgagagcaggaa

SEQ ID NO: 1565483 - DNA, 25 bp, Homo sapien
ttcgaagtcgcgcgagagcaggaag

SEQ ID NO: 1565484 - DNA, 25 bp, Homo sapien
catctgctggcggtctgccggctgc

SEQ ID NO: 1565485 - DNA, 25 bp, Homo sapien
ggtaccgagtgagcgcctccatctg

SEQ ID NO: 1565486 - DNA, 25 bp, Homo sapien
ctggccgttttcgaagaggtagagg

SEQ ID NO: 1565487 - DNA, 25 bp, Homo sapien
gccaggcgaagaaggacacgcgctg

SEQ ID NO: 1565488 - DNA, 25 bp, Homo sapien
cagttctcgagcgtgccaccgttgg

SEQ ID NO: 1565489 - DNA, 25 bp, Homo sapien
gggaactcgcagacgtagtagagac

SEQ ID NO: 1565490 - DNA, 25 bp, Homo sapien
cgtcagaggcctgcgccacgcagtt

SEQ ID NO: 1565491 - DNA, 25 bp, Homo sapien
ggcagtcgtggtcccaccaggagcc

SEQ ID NO: 1565492 - DNA, 25 bp, Homo sapien
cacggcgcagggaaaggccgggtgg

SEQ ID NO: 1565493 - DNA, 25 bp, Homo sapien
gggagattccggaggagggtgggca

SEQ ID NO: 1565494 - DNA, 25 bp, Homo sapien
gatttattggcaccggacctagcct

SEQ ID NO: 1565495 - DNA, 25 bp, Homo sapien
gaggagtgccggcaccgcaagagcc

SEQ ID NO: 1565496 - DNA, 25 bp, Homo sapien
tactgcggaaaaacgtggtgctggt

SEQ ID NO: 1565497 - DNA, 25 bp, Homo sapien
catccggttactgcggaaaaacgtg

SEQ ID NO: 1565498 - DNA, 25 bp, Homo sapien
ggctttatcgccctgcaagcccgtg

SEQ ID NO: 1565499 - DNA, 25 bp, Homo sapien
tggtgctggtaaggcggtgatgcgc

SEQ ID NO: 1565500 - DNA, 25 bp, Homo sapien
caaataattttgtatttatggtaga

SEQ ID NO: 1565501 - DNA, 25 bp, Homo sapien
aggcatgcacaaccacacccaaata

SEQ ID NO: 1565502 - DNA, 25 bp, Homo sapien
catgcacaaccacacccaaataatt

SEQ ID NO: 1565503 - DNA, 25 bp, Homo sapien
gcacaaccacacccaaataattttg

SEQ ID NO: 1565504 - DNA, 25 bp, Homo sapien
tgcttaaccatgagctcaccgactg

SEQ ID NO: 1565505 - DNA, 25 bp, Homo sapien
aacaggcagtgcgtcagatttggcc

SEQ ID NO: 1565506 - DNA, 25 bp, Homo sapien
tgaaacccaagtagacgtcaacctg

SEQ ID NO: 1565507 - DNA, 25 bp, Homo sapien
acatcattttcgtgtgtcgtgaaca

SEQ ID NO: 1565508 - DNA, 25 bp, Homo sapien
gacaatatagtacacgaggatgggc

SEQ ID NO: 1565509 - DNA, 25 bp, Homo sapien
gtagagtttgcaggcccactctcca

SEQ ID NO: 1565510 - DNA, 25 bp, Homo sapien
tccaagttgaactgtaagtagcact

SEQ ID NO: 1565511 - DNA, 25 bp, Homo sapien
tgaggaacacaaaaccggtgtagag

SEQ ID NO: 1565512 - DNA, 25 bp, Homo sapien
gggaaccagcagataaagcgctcac

SEQ ID NO: 1565513 - DNA, 25 bp, Homo sapien
tgggaaccagcagataaagcgctca

SEQ ID NO: 1565514 - DNA, 25 bp, Homo sapien
ctgccaacgaagacgtagaggaacg

SEQ ID NO: 1565515 - DNA, 25 bp, Homo sapien
tgccaacgaagacgtagaggaacgg

SEQ ID NO: 1565516 - DNA, 25 bp, Homo sapien
tctgccaacgaagacgtagaggaac

SEQ ID NO: 1565517 - DNA, 25 bp, Homo sapien
ggcgttgccacggggacgggatgac

SEQ ID NO: 1565518 - DNA, 25 bp, Homo sapien
gggcgttgccacggggacgggatga

SEQ ID NO: 1565519 - DNA, 25 bp, Homo sapien
tctgctccgtcgtcagtcccaggca

SEQ ID NO: 1565520 - DNA, 25 bp, Homo sapien
atgaaagcaagatgagggggctttc

SEQ ID NO: 1565521 - DNA, 25 bp, Homo sapien
ctgctccgtcgtcagtcccaggcaa

SEQ ID NO: 1565522 - DNA, 25 bp, Homo sapien
gatgaaagcaagatgagggggcttt

SEQ ID NO: 1565523 - DNA, 25 bp, Homo sapien
gtagtatagttgagacgcaccccag

SEQ ID NO: 1565524 - DNA, 25 bp, Homo sapien
ccagagtgatgctttgaaagcccaa

SEQ ID NO: 1565525 - DNA, 25 bp, Homo sapien
agtctaggcggcaaggcgaaaccct

SEQ ID NO: 1565526 - DNA, 25 bp, Homo sapien
caaaccttgtaaccccagcgctgtg

SEQ ID NO: 1565527 - DNA, 25 bp, Homo sapien
ggaccctgtgagtcatagtgcagac

SEQ ID NO: 1565528 - DNA, 25 bp, Homo sapien
gagataacaaagtagtgaggcacat

SEQ ID NO: 1565529 - DNA, 25 bp, Homo sapien
ggaagagcccttcaggcagaaccag

SEQ ID NO: 1565530 - DNA, 25 bp, Homo sapien
tgaggcacatacgtatctggaggaa

SEQ ID NO: 1565531 - DNA, 25 bp, Homo sapien
ttcttttagagacagcgtcatgctc

SEQ ID NO: 1565532 - DNA, 25 bp, Homo sapien
cataatttttatggaatgcttatta

SEQ ID NO: 1565533 - DNA, 25 bp, Homo sapien
tctccattccataatttttatggaa

SEQ ID NO: 1565534 - DNA, 25 bp, Homo sapien
agtgcaaaggtacaatcacagatca

SEQ ID NO: 1565535 - DNA, 25 bp, Homo sapien
atcacgtgtcaggaccccaggttgc

SEQ ID NO: 1565536 - DNA, 25 bp, Homo sapien
acaagagcgatcacgtgtcaggacc

SEQ ID NO: 1565537 - DNA, 25 bp, Homo sapien
agagcgatcacgtgtcaggacccca

SEQ ID NO: 1565538 - DNA, 25 bp, Homo sapien
tggaacaagagcgatcacgtgtcag

SEQ ID NO: 1565539 - DNA, 25 bp, Homo sapien
ttgtcagagttgaacgccaagtagc

SEQ ID NO: 1565540 - DNA, 25 bp, Homo sapien
gacaatggacgcagacaggataacc

SEQ ID NO: 1565541 - DNA, 25 bp, Homo sapien
cgtgcgtgccatacggaagacagtc

SEQ ID NO: 1565542 - DNA, 25 bp, Homo sapien
gacaggcatccggaagagttcatct

SEQ ID NO: 1565543 - DNA, 25 bp, Homo sapien
ggtggtagatttccttgagcatcac

SEQ ID NO: 1565544 - DNA, 25 bp, Homo sapien
tctgccaacgaagacgtagaggaag

SEQ ID NO: 1565545 - DNA, 25 bp, Homo sapien
agcatcacccgtcgccacagatgga

SEQ ID NO: 1565546 - DNA, 25 bp, Homo sapien
tggaccaacagcaccacgttaaacg

SEQ ID NO: 1565547 - DNA, 25 bp, Homo sapien
tcaaaaagcaagtcacgagcctggc

SEQ ID NO: 1565548 - DNA, 25 bp, Homo sapien
ggaggctcagaactctgcacaaggt

SEQ ID NO: 1565549 - DNA, 25 bp, Homo sapien
cactcaagctactggtcaaaaagca

SEQ ID NO: 1565550 - DNA, 25 bp, Homo sapien
tgcacaaggtgactagcactcaagc

SEQ ID NO: 1565551 - DNA, 25 bp, Homo sapien
aattcaaagcaactcatcagtaggg

SEQ ID NO: 1565552 - DNA, 25 bp, Homo sapien
tgaaagtgcttatgcactgggagcg

SEQ ID NO: 1565553 - DNA, 25 bp, Homo sapien
gatatcttatgtattgccgtcccaa

SEQ ID NO: 1565554 - DNA, 25 bp, Homo sapien
tagggaacactacttccgtgcacag

SEQ ID NO: 1565555 - DNA, 25 bp, Homo sapien
gacagggcctggtacttaggtcacg

SEQ ID NO: 1565556 - DNA, 25 bp, Homo sapien
tgtttagaaagctctggacagggcc

SEQ ID NO: 1565557 - DNA, 25 bp, Homo sapien
cctgcttggcagagtataatccgga

SEQ ID NO: 1565558 - DNA, 25 bp, Homo sapien
cacgatcaatacctgtgagctgtca

SEQ ID NO: 1565559 - DNA, 25 bp, Homo sapien
tattgacaacaaagctggtctttgc

SEQ ID NO: 1565560 - DNA, 25 bp, Homo sapien
cactaacgaatattgacaacaaagc

SEQ ID NO: 1565561 - DNA, 25 bp, Homo sapien
ccaccaccactaacgaatattgaca

SEQ ID NO: 1565562 - DNA, 25 bp, Homo sapien
cgaatattgacaacaaagctggtct

SEQ ID NO: 1565563 - DNA, 25 bp, Homo sapien
cgaagatagtcccaaatgcagcacc

SEQ ID NO: 1565564 - DNA, 25 bp, Homo sapien
tgtattcttggccacggcgaactcg

SEQ ID NO: 1565565 - DNA, 25 bp, Homo sapien
gcagcaccacgcgtttgcactgctg

SEQ ID NO: 1565566 - DNA, 25 bp, Homo sapien
cacgcgtttgcactgctgggtccca

SEQ ID NO: 1565567 - DNA, 25 bp, Homo sapien
cagagccacgaacaccaggggtcct

SEQ ID NO: 1565568 - DNA, 25 bp, Homo sapien
gagccacgaacaccaggggtccttc

SEQ ID NO: 1565569 - DNA, 25 bp, Homo sapien
cagcagggtggccccaaaaccccag

SEQ ID NO: 1565570 - DNA, 25 bp, Homo sapien
agcagcaggagaggtccagcagggt

SEQ ID NO: 1565571 - DNA, 25 bp, Homo sapien
gggacaggactggtcagggctagcc

SEQ ID NO: 1565572 - DNA, 25 bp, Homo sapien
ctgggggagctaagggcaggccggg

SEQ ID NO: 1565573 - DNA, 25 bp, Homo sapien
ccctgggggagctaagggcaggccg

SEQ ID NO: 1565574 - DNA, 25 bp, Homo sapien
caggactggtcagggctagccctgg

SEQ ID NO: 1565575 - DNA, 25 bp, Homo sapien
gggcccggtcgccatggcggaatac

SEQ ID NO: 1565576 - DNA, 25 bp, Homo sapien
agcggggcccggtcgccatggcgga

SEQ ID NO: 1565577 - DNA, 25 bp, Homo sapien
aggccacctccttgtgtgggtccat

SEQ ID NO: 1565578 - DNA, 25 bp, Homo sapien
ccacctccttgtgtgggtccatggg

SEQ ID NO: 1565579 - DNA, 25 bp, Homo sapien
ctcgtagcggctcctcaggaagcgg

SEQ ID NO: 1565580 - DNA, 25 bp, Homo sapien
acgggcaccgtgtgcaccgggatcg

SEQ ID NO: 1565581 - DNA, 25 bp, Homo sapien
gcagcctcgggaaacagcccggcaa

SEQ ID NO: 1565582 - DNA, 25 bp, Homo sapien
tccagcgtgcggtcaaagtccgtgc

SEQ ID NO: 1565583 - DNA, 25 bp, Homo sapien
ggatcggcctccagcgggcctcggg

SEQ ID NO: 1565584 - DNA, 25 bp, Homo sapien
cagctcgaggacagtcttgcttctc

SEQ ID NO: 1565585 - DNA, 25 bp, Homo sapien
cttgcttctcggagccagctcaggc

SEQ ID NO: 1565586 - DNA, 25 bp, Homo sapien
tcgaggacagtcttgcttctcggag

SEQ ID NO: 1565587 - DNA, 25 bp, Homo sapien
gacagtcttgcttctcggagccagc

SEQ ID NO: 1565588 - DNA, 25 bp, Homo sapien
tcggggacagctgcgcatggggaac

SEQ ID NO: 1565589 - DNA, 25 bp, Homo sapien
tatcggggacagctgcgcatgggga

SEQ ID NO: 1565590 - DNA, 25 bp, Homo sapien
ctcgtggtatcggggacagctgcgc

SEQ ID NO: 1565591 - DNA, 25 bp, Homo sapien
tggtatcggggacagctgcgcatgg

SEQ ID NO: 1565592 - DNA, 25 bp, Homo sapien
tggtactcggcggcctcggtggcct

SEQ ID NO: 1565593 - DNA, 25 bp, Homo sapien
ctggtactcggcggcctcggtggcc

SEQ ID NO: 1565594 - DNA, 25 bp, Homo sapien
gcgacagtcccgtgaagttctccag

SEQ ID NO: 1565595 - DNA, 25 bp, Homo sapien
agtggctctccaaccagcgacagtc

SEQ ID NO: 1565596 - DNA, 25 bp, Homo sapien
tgaagttctccaggcgactcaggaa

SEQ ID NO: 1565597 - DNA, 25 bp, Homo sapien
tggcacatgagggtgtccagaacct

SEQ ID NO: 1565598 - DNA, 25 bp, Homo sapien
gggctccaatatccaaagccgagat

SEQ ID NO: 1565599 - DNA, 25 bp, Homo sapien
aagccgagatctgggcaagagtccg

SEQ ID NO: 1565600 - DNA, 25 bp, Homo sapien
tatccaaagccgagatctgggcaag

SEQ ID NO: 1565601 - DNA, 25 bp, Homo sapien
gctggtagtggaagaccgtgggctt

SEQ ID NO: 1565602 - DNA, 25 bp, Homo sapien
acatgaccatcttgaggggcagccc

SEQ ID NO: 1565603 - DNA, 25 bp, Homo sapien
gccccaggcgctggacccgggagaa

SEQ ID NO: 1565604 - DNA, 25 bp, Homo sapien
atgaccatcttgaggggcagcccca

SEQ ID NO: 1565605 - DNA, 25 bp, Homo sapien
gaagtttgcaaggatagcattcagc

SEQ ID NO: 1565606 - DNA, 25 bp, Homo sapien
catctttggcgggattccccaggtg

SEQ ID NO: 1565607 - DNA, 25 bp, Homo sapien
catatggcggggtgtgtccatcata

SEQ ID NO: 1565608 - DNA, 25 bp, Homo sapien
ggtgcttccggaactcaaagccgag

SEQ ID NO: 1565609 - DNA, 25 bp, Homo sapien
cggggtgtgtccatcatagaggccc

SEQ ID NO: 1565610 - DNA, 25 bp, Homo sapien
gcaggagaccccatgggcgggaggc

SEQ ID NO: 1565611 - DNA, 25 bp, Homo sapien
gcaggtgggcggagtcattgcggta

SEQ ID NO: 1565612 - DNA, 25 bp, Homo sapien
gggccggggcagtcagctggtagaa

SEQ ID NO: 1565613 - DNA, 25 bp, Homo sapien
ggtagaagcggcctagtggacaggg

SEQ ID NO: 1565614 - DNA, 25 bp, Homo sapien
agtgccaggacttggcaaccctcca

SEQ ID NO: 1565615 - DNA, 25 bp, Homo sapien
ggagaacacgcggggggtgagtgcc

SEQ ID NO: 1565616 - DNA, 25 bp, Homo sapien
gtgagtgccaggacttggcaaccct

SEQ ID NO: 1565617 - DNA, 25 bp, Homo sapien
agaacacgcggggggtgagtgccag

SEQ ID NO: 1565618 - DNA, 25 bp, Homo sapien
gccccaagctgagtgccaccagcac

SEQ ID NO: 1565619 - DNA, 25 bp, Homo sapien
agccccaagctgagtgccaccagca

SEQ ID NO: 1565620 - DNA, 25 bp, Homo sapien
cagcacagctacagctccggccagc

SEQ ID NO: 1565621 - DNA, 25 bp, Homo sapien
ctgagcatacatgttggggtccagt

SEQ ID NO: 1565622 - DNA, 25 bp, Homo sapien
actgagcatacatgttggggtccag

SEQ ID NO: 1565623 - DNA, 25 bp, Homo sapien
caggccttgtgagtggacactgacc

SEQ ID NO: 1565624 - DNA, 25 bp, Homo sapien
tgttcggtgtccgtcgagctagcca

SEQ ID NO: 1565625 - DNA, 25 bp, Homo sapien
tgtcactggccagatgtcatgaggg

SEQ ID NO: 1565626 - DNA, 25 bp, Homo sapien
caccatgttcaagggtaccggaaga

SEQ ID NO: 1565627 - DNA, 25 bp, Homo sapien
tggtcaagggcatgacagtgctgga

SEQ ID NO: 1565628 - DNA, 25 bp, Homo sapien
ctagctggtcaagggcatgacagtg

SEQ ID NO: 1565629 - DNA, 25 bp, Homo sapien
gtgctggaggccgtcttggagatcc

SEQ ID NO: 1565630 - DNA, 25 bp, Homo sapien
gagatccaggccatcactggcagca

SEQ ID NO: 1565631 - DNA, 25 bp, Homo sapien
atgtgcagatgtaggcagtgctaaa

SEQ ID NO: 1565632 - DNA, 25 bp, Homo sapien
tgtgcagatgtaggcagtgctaaag

SEQ ID NO: 1565633 - DNA, 25 bp, Homo sapien
tccaacccgtccatgctggatttct

SEQ ID NO: 1565634 - DNA, 25 bp, Homo sapien
ctttgcatagccctaataagcacca

SEQ ID NO: 1565635 - DNA, 25 bp, Homo sapien
ctttaccggctccaacccgtccatg

SEQ ID NO: 1565636 - DNA, 25 bp, Homo sapien
tctgcctttgcatagccctaataag

SEQ ID NO: 1565637 - DNA, 25 bp, Homo sapien
tacaattcccgggtcagtatccaag

SEQ ID NO: 1565638 - DNA, 25 bp, Homo sapien
gtcagtatccaagaccctacaccag

SEQ ID NO: 1565639 - DNA, 25 bp, Homo sapien
gtcagtatccaagaccccttgccaa

SEQ ID NO: 1565640 - DNA, 25 bp, Homo sapien
cagccagcagcaatcgcctggtcag

SEQ ID NO: 1565641 - DNA, 25 bp, Homo sapien
aactgaagacaaagtcggccatgtt

SEQ ID NO: 1565642 - DNA, 25 bp, Homo sapien
tgaagacaaagtcggccatgttcag

SEQ ID NO: 1565643 - DNA, 25 bp, Homo sapien
tcggccatgttcaggcggaggacca

SEQ ID NO: 1565644 - DNA, 25 bp, Homo sapien
caaagtcggccatgttcaggcggag

SEQ ID NO: 1565645 - DNA, 25 bp, Homo sapien
aagggaaacagagagtgggggagag

SEQ ID NO: 1565646 - DNA, 25 bp, Homo sapien
ggaaacagagagtgggggagagaga

SEQ ID NO: 1565647 - DNA, 25 bp, Homo sapien
agggaaacagagagtgggggagaga

SEQ ID NO: 1565648 - DNA, 25 bp, Homo sapien
aaaagagcgtcaggctgaagagaaa

SEQ ID NO: 1565649 - DNA, 25 bp, Homo sapien
gacttgggtgcaccgccttgccgtt

SEQ ID NO: 1565650 - DNA, 25 bp, Homo sapien
cggagtgcagcatcaagtcgctggc

SEQ ID NO: 1565651 - DNA, 25 bp, Homo sapien
tcgctggcgtcccagcacaggtagg

SEQ ID NO: 1565652 - DNA, 25 bp, Homo sapien
gaggtcaccaggtaggacaccaccg

SEQ ID NO: 1565653 - DNA, 25 bp, Homo sapien
tcagccgccgcgcattcaagggctg

SEQ ID NO: 1565654 - DNA, 25 bp, Homo sapien
tctgcttcacatgcccactgggctt

SEQ ID NO: 1565655 - DNA, 25 bp, Homo sapien
ctgcacggcccacccgcggtagctc

SEQ ID NO: 1565656 - DNA, 25 bp, Homo sapien
actgggcttaggtaggacacggctc

SEQ ID NO: 1565657 - DNA, 25 bp, Homo sapien
gagttccgctgtttggatgtccgcc

SEQ ID NO: 1565658 - DNA, 25 bp, Homo sapien
cctcgagggtgtatgaaatgggaag

SEQ ID NO: 1565659 - DNA, 25 bp, Homo sapien
cggagtcagcgtctgagttccgctg

SEQ ID NO: 1565660 - DNA, 25 bp, Homo sapien
ctgtttggatgtccgcctcgctgcg

SEQ ID NO: 1565661 - DNA, 25 bp, Homo sapien
caaagccgcaaagggcgggccctag

SEQ ID NO: 1565662 - DNA, 25 bp, Homo sapien
ggtgtcctgaagacctcgggtgcta

SEQ ID NO: 1565663 - DNA, 25 bp, Homo sapien
aggtcgaatatccagggcgtggcca

SEQ ID NO: 1565664 - DNA, 25 bp, Homo sapien
tcgggtgctattccttggaggtgct

SEQ ID NO: 1565665 - DNA, 25 bp, Homo sapien
tctgcagaagggtggagttgcacca

SEQ ID NO: 1565666 - DNA, 25 bp, Homo sapien
aactccgggaaagaagttccatgca

SEQ ID NO: 1565667 - DNA, 25 bp, Homo sapien
ggatgttattgcaagccatgccttc

SEQ ID NO: 1565668 - DNA, 25 bp, Homo sapien
gacatcggagctgaggccggaactc

SEQ ID NO: 1565669 - DNA, 25 bp, Homo sapien
ccacgacaaggaacacggtcctggg

SEQ ID NO: 1565670 - DNA, 25 bp, Homo sapien
tgagtcctggggcaaccgcttcctt

SEQ ID NO: 1565671 - DNA, 25 bp, Homo sapien
tgtgtgtccttgagggaactgcttc

SEQ ID NO: 1565672 - DNA, 25 bp, Homo sapien
gctgctctggagtcgctatgttgcc

SEQ ID NO: 1565673 - DNA, 25 bp, Homo sapien
gaaggctctggctgaacagtgttgg

SEQ ID NO: 1565674 - DNA, 25 bp, Homo sapien
tctccatggttctgtcacgtatctg

SEQ ID NO: 1565675 - DNA, 25 bp, Homo sapien
tggaacgttgagactgtcctgcaga

SEQ ID NO: 1565676 - DNA, 25 bp, Homo sapien
ctgcagacaagggtggaaggctctg

SEQ ID NO: 1565677 - DNA, 25 bp, Homo sapien
cacagctctccgggtgcaggtggta

SEQ ID NO: 1565678 - DNA, 25 bp, Homo sapien
acagctctccgggtgcaggtggtaa

SEQ ID NO: 1565679 - DNA, 25 bp, Homo sapien
caatccacgtcacggacagggtgag

SEQ ID NO: 1565680 - DNA, 25 bp, Homo sapien
atccacgtcacggacagggtgagga

SEQ ID NO: 1565681 - DNA, 25 bp, Homo sapien
aatccacgtcacggacagggtgagg

SEQ ID NO: 1565682 - DNA, 25 bp, Homo sapien
tccacgtcacggacagggtgaggaa

SEQ ID NO: 1565683 - DNA, 25 bp, Homo sapien
gggaaagagcctcagcttgacagtc

SEQ ID NO: 1565684 - DNA, 25 bp, Homo sapien
gtgaggactgttgcaatatggaggg

SEQ ID NO: 1565685 - DNA, 25 bp, Homo sapien
ggtgtgggagtgaggactgttgcaa

SEQ ID NO: 1565686 - DNA, 25 bp, Homo sapien
gcctcagcttgacagtcagggctgg

SEQ ID NO: 1565687 - DNA, 25 bp, Homo sapien
tggaggttttgagccccacaaagag

SEQ ID NO: 1565688 - DNA, 25 bp, Homo sapien
gaggtggaccagtgatacggtccaa

SEQ ID NO: 1565689 - DNA, 25 bp, Homo sapien
aatggcattgagagaggtccttgga

SEQ ID NO: 1565690 - DNA, 25 bp, Homo sapien
tacggtccaaggaaccaatggcatt

SEQ ID NO: 1565691 - DNA, 25 bp, Homo sapien
atcagggtaggagacacaagacagc

SEQ ID NO: 1565692 - DNA, 25 bp, Homo sapien
ggagcagagttgaacccagggatca

SEQ ID NO: 1565693 - DNA, 25 bp, Homo sapien
gggaggccaagcatcaaggtctctg

SEQ ID NO: 1565694 - DNA, 25 bp, Homo sapien
gacagcgcccagaccatatcttgag

SEQ ID NO: 1565695 - DNA, 25 bp, Homo sapien
ccagggttgggaatgcttctcgcac

SEQ ID NO: 1565696 - DNA, 25 bp, Homo sapien
ggttgggaatgcttctcgcactccc

SEQ ID NO: 1565697 - DNA, 25 bp, Homo sapien
gcctcccacaatccgagacaggatg

SEQ ID NO: 1565698 - DNA, 25 bp, Homo sapien
tgcaccagaacaccgccgcagactg

SEQ ID NO: 1565699 - DNA, 25 bp, Homo sapien
gagacacactggctagagagggacc

SEQ ID NO: 1565700 - DNA, 25 bp, Homo sapien
ccatgcgtgtgctcagtagggagaa

SEQ ID NO: 1565701 - DNA, 25 bp, Homo sapien
ggagagacacaaccgaagccagtta

SEQ ID NO: 1565702 - DNA, 25 bp, Homo sapien
caaggctggccttagaggttatcct

SEQ ID NO: 1565703 - DNA, 25 bp, Homo sapien
tcttcaggaggctcatatcgtagag

SEQ ID NO: 1565704 - DNA, 25 bp, Homo sapien
ccgacccagcaagatcacgcttttg

SEQ ID NO: 1565705 - DNA, 25 bp, Homo sapien
gaaacaggctgtgccgacccagcaa

SEQ ID NO: 1565706 - DNA, 25 bp, Homo sapien
ctgaggaatcgattcttcaggaggc

SEQ ID NO: 1565707 - DNA, 25 bp, Homo sapien
ctgacaggcggagcagcatgaggtc

SEQ ID NO: 1565708 - DNA, 25 bp, Homo sapien
gacaggcggagcagcatgaggtcgt

SEQ ID NO: 1565709 - DNA, 25 bp, Homo sapien
tgacaggcggagcagcatgaggtcg

SEQ ID NO: 1565710 - DNA, 25 bp, Homo sapien
caggcggagcagcatgaggtcgtgg

SEQ ID NO: 1565711 - DNA, 25 bp, Homo sapien
tcacagcatccgtgagctcggcagg

SEQ ID NO: 1565712 - DNA, 25 bp, Homo sapien
cacagcatccgtgagctcggcaggc

SEQ ID NO: 1565713 - DNA, 25 bp, Homo sapien
acagcatccgtgagctcggcaggct

SEQ ID NO: 1565714 - DNA, 25 bp, Homo sapien
ctacgggccaggcaaaaacactgtt

SEQ ID NO: 1565715 - DNA, 25 bp, Homo sapien
cctcagacctaggagtcctgtcccc

SEQ ID NO: 1565716 - DNA, 25 bp, Homo sapien
taacatggaggtccacacactgaag

SEQ ID NO: 1565717 - DNA, 25 bp, Homo sapien
gaacttgcgcacacacgtcattgga

SEQ ID NO: 1565718 - DNA, 25 bp, Homo sapien
cattggaaataacatggaggtccac

SEQ ID NO: 1565719 - DNA, 25 bp, Homo sapien
gcacacagcatgaacttggtcacct

SEQ ID NO: 1565720 - DNA, 25 bp, Homo sapien
gatcttgggagtagggatgactcac

SEQ ID NO: 1565721 - DNA, 25 bp, Homo sapien
cccctcaagatcttgggagtaggga

SEQ ID NO: 1565722 - DNA, 25 bp, Homo sapien
cctcaagatcttgggagtagggatg

SEQ ID NO: 1565723 - DNA, 25 bp, Homo sapien
ctttcccctcaagatcttgggagta

SEQ ID NO: 1565724 - DNA, 25 bp, Homo sapien
taaccgtgtgctgaacgcaggaaca

SEQ ID NO: 1565725 - DNA, 25 bp, Homo sapien
ggcagacgccttgttggcttctaga

SEQ ID NO: 1565726 - DNA, 25 bp, Homo sapien
tagaccccagcccagaattaaggtc

SEQ ID NO: 1565727 - DNA, 25 bp, Homo sapien
tcactgctatgtcccaggctctagg

SEQ ID NO: 1565728 - DNA, 25 bp, Homo sapien
aggaaaagcagtgtcctcctgtggc

SEQ ID NO: 1565729 - DNA, 25 bp, Homo sapien
ctctgctcccccaggtgccgcaggg

SEQ ID NO: 1565730 - DNA, 25 bp, Homo sapien
tctgctcccccaggtgccgcagggc

SEQ ID NO: 1565731 - DNA, 25 bp, Homo sapien
aaaagcagtgtcctcctgtggccca

SEQ ID NO: 1565732 - DNA, 25 bp, Homo sapien
aaatgtctccagagccgacttccag

SEQ ID NO: 1565733 - DNA, 25 bp, Homo sapien
tccttgtagacaggtcggtgggaca

SEQ ID NO: 1565734 - DNA, 25 bp, Homo sapien
gggcaatcctatctttcagacctgg

SEQ ID NO: 1565735 - DNA, 25 bp, Homo sapien
gcagataacagatagcagttcccag

SEQ ID NO: 1565736 - DNA, 25 bp, Homo sapien
gcacaccattacagacaagtgggcc

SEQ ID NO: 1565737 - DNA, 25 bp, Homo sapien
agcacaccattacagacaagtgggc

SEQ ID NO: 1565738 - DNA, 25 bp, Homo sapien
aggcctttcgggcagggcacatggt

SEQ ID NO: 1565739 - DNA, 25 bp, Homo sapien
ggttcactgccccatgacgtgatac

SEQ ID NO: 1565740 - DNA, 25 bp, Homo sapien
gcctttcgggcagggcacatggttc

SEQ ID NO: 1565741 - DNA, 25 bp, Homo sapien
gcacatggttcactgccccatgacg

SEQ ID NO: 1565742 - DNA, 25 bp, Homo sapien
gctcagtgcttcatggacagtgtcc

SEQ ID NO: 1565743 - DNA, 25 bp, Homo sapien
tgagtcttggcctggtcatttccaa

SEQ ID NO: 1565744 - DNA, 25 bp, Homo sapien
gagtgatatgtctccaggcatggcc

SEQ ID NO: 1565745 - DNA, 25 bp, Homo sapien
gacacagagaggacaaaattacacc

SEQ ID NO: 1565746 - DNA, 25 bp, Homo sapien
ttctgtgagttctactaggaaatca

SEQ ID NO: 1565747 - DNA, 25 bp, Homo sapien
ccccatagtgaatcagcttccaggg

SEQ ID NO: 1565748 - DNA, 25 bp, Homo sapien
tgtctggaggacttcaatacacctc

SEQ ID NO: 1565749 - DNA, 25 bp, Homo sapien
gaaatcatcaaatctgagggttgtc

SEQ ID NO: 1565750 - DNA, 25 bp, Homo sapien
cacaacaccccactgggagaaaaca

SEQ ID NO: 1565751 - DNA, 25 bp, Homo sapien
tccacaacaccccactgggagaaaa

SEQ ID NO: 1565752 - DNA, 25 bp, Homo sapien
ttcatacacaaggtcacacatcact

SEQ ID NO: 1565753 - DNA, 25 bp, Homo sapien
ttggaaatacttcatacacaaggtc

SEQ ID NO: 1565754 - DNA, 25 bp, Homo sapien
aagccaatcgtgagcgcaattccca

SEQ ID NO: 1565755 - DNA, 25 bp, Homo sapien
tcttcaagccaatcgtgagcgcaat

SEQ ID NO: 1565756 - DNA, 25 bp, Homo sapien
cttcttcaagccaatcgtgagcgca

SEQ ID NO: 1565757 - DNA, 25 bp, Homo sapien
attctgcctggtgtacagtgtcctc

SEQ ID NO: 1565758 - DNA, 25 bp, Homo sapien
cgtaatgggttttattccctgccag

SEQ ID NO: 1565759 - DNA, 25 bp, Homo sapien
cccatgggaatcagagttcaccctg

SEQ ID NO: 1565760 - DNA, 25 bp, Homo sapien
cctaaagggtctcaaaggcttctat

SEQ ID NO: 1565761 - DNA, 25 bp, Homo sapien
tgcctcagtacttgtaccctaaagg

SEQ ID NO: 1565762 - DNA, 25 bp, Homo sapien
tagtcgcagctacatgacgtcatgg

SEQ ID NO: 1565763 - DNA, 25 bp, Homo sapien
taggatctttatcggacaccaggcc

SEQ ID NO: 1565764 - DNA, 25 bp, Homo sapien
gcctcgcccgcatagtgcagatgct

SEQ ID NO: 1565765 - DNA, 25 bp, Homo sapien
tgcagatgctgaatgatgagtggat

SEQ ID NO: 1565766 - DNA, 25 bp, Homo sapien
attgggcagggcctatggatcatgg

SEQ ID NO: 1565767 - DNA, 25 bp, Homo sapien
gcagggcctatggatcatggagatg

SEQ ID NO: 1565768 - DNA, 25 bp, Homo sapien
ggtgtgaggtcagattgggcagggc

SEQ ID NO: 1565769 - DNA, 25 bp, Homo sapien
tggaggcattcccacggtgtgaggt

SEQ ID NO: 1565770 - DNA, 25 bp, Homo sapien
acacaggtgtccacggccaggtggt

SEQ ID NO: 1565771 - DNA, 25 bp, Homo sapien
gctgacacaggtgtccacggccagg

SEQ ID NO: 1565772 - DNA, 25 bp, Homo sapien
cacaggtgtccacggccaggtggtg

SEQ ID NO: 1565773 - DNA, 25 bp, Homo sapien
tgacacaggtgtccacggccaggtg

SEQ ID NO: 1565774 - DNA, 25 bp, Homo sapien
ccccacagacaaggcgatggagaga

SEQ ID NO: 1565775 - DNA, 25 bp, Homo sapien
cacagacaaggcgatggagagaacc

SEQ ID NO: 1565776 - DNA, 25 bp, Homo sapien
cagacaaggcgatggagagaaccag

SEQ ID NO: 1565777 - DNA, 25 bp, Homo sapien
aaggcgatggagagaaccaggtccc

SEQ ID NO: 1565778 - DNA, 25 bp, Homo sapien
atggagagaggtccttgaaaggttt

SEQ ID NO: 1565779 - DNA, 25 bp, Homo sapien
gcatgaggactattgcaatgtggaa

SEQ ID NO: 1565780 - DNA, 25 bp, Homo sapien
gaggcagcccagtgatagggtccaa

SEQ ID NO: 1565781 - DNA, 25 bp, Homo sapien
ttcagcataagagtcagaacccgcc

SEQ ID NO: 1565782 - DNA, 25 bp, Homo sapien
cagaaaccaaggataagtgcccagt

SEQ ID NO: 1565783 - DNA, 25 bp, Homo sapien
ttgtctcaggccagatagcctcggg

SEQ ID NO: 1565784 - DNA, 25 bp, Homo sapien
gacagggttgaatgctcacagctga

SEQ ID NO: 1565785 - DNA, 25 bp, Homo sapien
tagggaatcagagaactggccgttg

SEQ ID NO: 1565786 - DNA, 25 bp, Homo sapien
ttctttaggcaatgggcagctgtga

SEQ ID NO: 1565787 - DNA, 25 bp, Homo sapien
gcctcccacaatccgagactggatg

SEQ ID NO: 1565788 - DNA, 25 bp, Homo sapien
cctcccacaatccgagactggatga

SEQ ID NO: 1565789 - DNA, 25 bp, Homo sapien
ctcccacaatccgagactggatgag

SEQ ID NO: 1565790 - DNA, 25 bp, Homo sapien
cctgtgggacacagccattccctcc

SEQ ID NO: 1565791 - DNA, 25 bp, Homo sapien
ggaagcatcccgctgttattcctgt

SEQ ID NO: 1565792 - DNA, 25 bp, Homo sapien
aagcatcccgctgttattcctgtgg

SEQ ID NO: 1565793 - DNA, 25 bp, Homo sapien
atcccgctgttattcctgtgggaca

SEQ ID NO: 1565794 - DNA, 25 bp, Homo sapien
accctcacggggtgtgttcagtagt

SEQ ID NO: 1565795 - DNA, 25 bp, Homo sapien
ctgcctccgggtgcgacctgggcca

SEQ ID NO: 1565796 - DNA, 25 bp, Homo sapien
tgagacacacggtgacagagatggc

SEQ ID NO: 1565797 - DNA, 25 bp, Homo sapien
acatagagaccaaaacacagtcata

SEQ ID NO: 1565798 - DNA, 25 bp, Homo sapien
gaaaacaggagtgtgatcatgtgag

SEQ ID NO: 1565799 - DNA, 25 bp, Homo sapien
tagtcgtggtgaaatacagacagtg

SEQ ID NO: 1565800 - DNA, 25 bp, Homo sapien
taggatgagcaaagaagagacagag

SEQ ID NO: 1565801 - DNA, 25 bp, Homo sapien
gagaacagtgagaattaggatgagc

SEQ ID NO: 1565802 - DNA, 25 bp, Homo sapien
gctcaaacaggttgtgccgacccag

SEQ ID NO: 1565803 - DNA, 25 bp, Homo sapien
gtcttcaggctcaaacaggttgtgc

SEQ ID NO: 1565804 - DNA, 25 bp, Homo sapien
aggttgtgccgacccagccagacct

SEQ ID NO: 1565805 - DNA, 25 bp, Homo sapien
tgtgtcttcaggctcaaacaggttg

SEQ ID NO: 1565806 - DNA, 25 bp, Homo sapien
ctggtctaaggctttgatgcttcag

SEQ ID NO: 1565807 - DNA, 25 bp, Homo sapien
tgaggtcatggctggagtcttcatc

SEQ ID NO: 1565808 - DNA, 25 bp, Homo sapien
ggtctaaggctttgatgcttcagaa

SEQ ID NO: 1565809 - DNA, 25 bp, Homo sapien
gtcatggctggagtcttcatctggt

SEQ ID NO: 1565810 - DNA, 25 bp, Homo sapien
catctgggctcccagctacaccatc

SEQ ID NO: 1565811 - DNA, 25 bp, Homo sapien
ggcatctgggctcccagctacacca

SEQ ID NO: 1565812 - DNA, 25 bp, Homo sapien
atctgggctcccagctacaccatct

SEQ ID NO: 1565813 - DNA, 25 bp, Homo sapien
caggcatctgggctcccagctacac

SEQ ID NO: 1565814 - DNA, 25 bp, Homo sapien
ctatgggtcagagaaaaactgggct

SEQ ID NO: 1565815 - DNA, 25 bp, Homo sapien
actgggctgtggccggaccccacct

SEQ ID NO: 1565816 - DNA, 25 bp, Homo sapien
ctgtggccggaccccacctggttct

SEQ ID NO: 1565817 - DNA, 25 bp, Homo sapien
tgggctgtggccggaccccacctgg

SEQ ID NO: 1565818 - DNA, 25 bp, Homo sapien
agtaagctctagcacacatgtcatt

SEQ ID NO: 1565819 - DNA, 25 bp, Homo sapien
gagatggaggctcacacactgaaga

SEQ ID NO: 1565820 - DNA, 25 bp, Homo sapien
agagtaagctctagcacacatgtca

SEQ ID NO: 1565821 - DNA, 25 bp, Homo sapien
agatggaggctcacacactgaagac

SEQ ID NO: 1565822 - DNA, 25 bp, Homo sapien
ccctccagatgttgggagtagggat

SEQ ID NO: 1565823 - DNA, 25 bp, Homo sapien
ctttcccctccagatgttgggagta

SEQ ID NO: 1565824 - DNA, 25 bp, Homo sapien
ttcccctccagatgttgggagtagg

SEQ ID NO: 1565825 - DNA, 25 bp, Homo sapien
tcccctccagatgttgggagtaggg

SEQ ID NO: 1565826 - DNA, 25 bp, Homo sapien
tgctggtcacgtagcaggtgcccag

SEQ ID NO: 1565827 - DNA, 25 bp, Homo sapien
cagggtctacggcaatgctggtcac

SEQ ID NO: 1565828 - DNA, 25 bp, Homo sapien
tacggcaatgctggtcacgtagcag

SEQ ID NO: 1565829 - DNA, 25 bp, Homo sapien
cttcccagggtctacggcaatgctg

SEQ ID NO: 1565830 - DNA, 25 bp, Homo sapien
ctctgctcccccaggtgccgcaggg

SEQ ID NO: 1565831 - DNA, 25 bp, Homo sapien
aggaaaagcagtgtcctcctgtggc

SEQ ID NO: 1565832 - DNA, 25 bp, Homo sapien
tctgctcccccaggtgccgcagggc

SEQ ID NO: 1565833 - DNA, 25 bp, Homo sapien
aaaagcagtgtcctcctgtggccca

SEQ ID NO: 1565834 - DNA, 25 bp, Homo sapien
ccaggccctgtccttcttctgtcca

SEQ ID NO: 1565835 - DNA, 25 bp, Homo sapien
ttctgtccagcaccatccacagctc

SEQ ID NO: 1565836 - DNA, 25 bp, Homo sapien
tgagccaggccctgtccttcttctg

SEQ ID NO: 1565837 - DNA, 25 bp, Homo sapien
cttcttctgtccagcaccatccaca

SEQ ID NO: 1565838 - DNA, 25 bp, Homo sapien
taggcaactccatctctcagaaccg

SEQ ID NO: 1565839 - DNA, 25 bp, Homo sapien
tcaggactactctctgactagatgt

SEQ ID NO: 1565840 - DNA, 25 bp, Homo sapien
acccactgaggccagatggaggatg

SEQ ID NO: 1565841 - DNA, 25 bp, Homo sapien
gaacaaggctccagtcttggcctat

SEQ ID NO: 1565842 - DNA, 25 bp, Homo sapien
agcacaccattacagacaagtggac

SEQ ID NO: 1565843 - DNA, 25 bp, Homo sapien
gcacaccattacagacaagtggacc

SEQ ID NO: 1565844 - DNA, 25 bp, Homo sapien
ccattacagacaagtggacccccag

SEQ ID NO: 1565845 - DNA, 25 bp, Homo sapien
acaccattacagacaagtggacccc

SEQ ID NO: 1565846 - DNA, 25 bp, Homo sapien
agcaggcttttcaggcagggcacat

SEQ ID NO: 1565847 - DNA, 25 bp, Homo sapien
cagcaggcttttcaggcagggcaca

SEQ ID NO: 1565848 - DNA, 25 bp, Homo sapien
acagcaggcttttcaggcagggcac

SEQ ID NO: 1565849 - DNA, 25 bp, Homo sapien
gcaggcttttcaggcagggcacatg

SEQ ID NO: 1565850 - DNA, 25 bp, Homo sapien
gagttccaagcttcaggtgtccagc

SEQ ID NO: 1565851 - DNA, 25 bp, Homo sapien
gaaggagaggacgaaattataccca

SEQ ID NO: 1565852 - DNA, 25 bp, Homo sapien
ggactccacaccagaaagcacaggt

SEQ ID NO: 1565853 - DNA, 25 bp, Homo sapien
ccaagtgatgccagaacgtgaggtg

SEQ ID NO: 1565854 - DNA, 25 bp, Homo sapien
accccacaaacaacatggtcaccca

SEQ ID NO: 1565855 - DNA, 25 bp, Homo sapien
tgtccaccttgtgtcactgtccact

SEQ ID NO: 1565856 - DNA, 25 bp, Homo sapien
tcccatctctgcaccccacaaacaa

SEQ ID NO: 1565857 - DNA, 25 bp, Homo sapien
ctgtagagagtgtccaccttgtgtc

SEQ ID NO: 1565858 - DNA, 25 bp, Homo sapien
tgtggctccagcttatcctcagtga

SEQ ID NO: 1565859 - DNA, 25 bp, Homo sapien
gaaatcatcaaatctgacggtggtt

SEQ ID NO: 1565860 - DNA, 25 bp, Homo sapien
tctttctgctcacggccttatctag

SEQ ID NO: 1565861 - DNA, 25 bp, Homo sapien
cagcgtgggctatgtttacagcgtc

SEQ ID NO: 1565862 - DNA, 25 bp, Homo sapien
tgtttgaactctagggaacctcagg

SEQ ID NO: 1565863 - DNA, 25 bp, Homo sapien
gacactaaggatcaggtgagcttcc

SEQ ID NO: 1565864 - DNA, 25 bp, Homo sapien
caataaaaggttgactcagcagccc

SEQ ID NO: 1565865 - DNA, 25 bp, Homo sapien
ccagtatctgtaaccaggagtgcca

SEQ ID NO: 1565866 - DNA, 25 bp, Homo sapien
tcacaggaccggatatgacagtcaa

SEQ ID NO: 1565867 - DNA, 25 bp, Homo sapien
gatatggacccactagagcagatgc

SEQ ID NO: 1565868 - DNA, 25 bp, Homo sapien
ttcaaagttgcaggcgcagtcccag

SEQ ID NO: 1565869 - DNA, 25 bp, Homo sapien
ggtagtacccagacacacggttggc

SEQ ID NO: 1565870 - DNA, 25 bp, Homo sapien
agaacagagacttcttcctatgtgg

SEQ ID NO: 1565871 - DNA, 25 bp, Homo sapien
tgagcctctgcggaaaggaatagag

SEQ ID NO: 1565872 - DNA, 25 bp, Homo sapien
cccacaatttatccggaagtctttg

SEQ ID NO: 1565873 - DNA, 25 bp, Homo sapien
tctgcggaaaggaatagaggatccc

SEQ ID NO: 1565874 - DNA, 25 bp, Homo sapien
gagaggtgccactcttattctccag

SEQ ID NO: 1565875 - DNA, 25 bp, Homo sapien
cttgagaggtgccactcttattctc

SEQ ID NO: 1565876 - DNA, 25 bp, Homo sapien
gaggtgccactcttattctccaggc

SEQ ID NO: 1565877 - DNA, 25 bp, Homo sapien
tgagaggtgccactcttattctcca

SEQ ID NO: 1565878 - DNA, 25 bp, Homo sapien
tctggaggctgctagactcctatct

SEQ ID NO: 1565879 - DNA, 25 bp, Homo sapien
gatggtggcccgtccttgtggttcc

SEQ ID NO: 1565880 - DNA, 25 bp, Homo sapien
gaattctatagtgcctgggtctcag

SEQ ID NO: 1565881 - DNA, 25 bp, Homo sapien
tctcagcgcagtgccgatggtggcc

SEQ ID NO: 1565882 - DNA, 25 bp, Homo sapien
gctgcttactgtcggtgtccccttg

SEQ ID NO: 1565883 - DNA, 25 bp, Homo sapien
ggaaaatcccttctaggcatctcct

SEQ ID NO: 1565884 - DNA, 25 bp, Homo sapien
cccaccactaagagaatacaggaaa

SEQ ID NO: 1565885 - DNA, 25 bp, Homo sapien
tggaatcccagctccgctgcttact

SEQ ID NO: 1565886 - DNA, 25 bp, Homo sapien
ggctgtgatccaccctgactatgat

SEQ ID NO: 1565887 - DNA, 25 bp, Homo sapien
cctgactatgatgccgccagccatg

SEQ ID NO: 1565888 - DNA, 25 bp, Homo sapien
cttcggcaaagggagagttcccagg

SEQ ID NO: 1565889 - DNA, 25 bp, Homo sapien
gacatcatgctgttgcgcctggcac

SEQ ID NO: 1565890 - DNA, 25 bp, Homo sapien
ctcaaacactggaactggacgttcg

SEQ ID NO: 1565891 - DNA, 25 bp, Homo sapien
gacacttggtcaacgtacaccgaga

SEQ ID NO: 1565892 - DNA, 25 bp, Homo sapien
tgaggacgccgatgacctatgaagt

SEQ ID NO: 1565893 - DNA, 25 bp, Homo sapien
tatttaaaccaacctcatgccctgt

SEQ ID NO: 1565894 - DNA, 25 bp, Homo sapien
tatttcatgaactgcgaagaagtgg

SEQ ID NO: 1565895 - DNA, 25 bp, Homo sapien
cagataatgttagaatcctggagtt

SEQ ID NO: 1565896 - DNA, 25 bp, Homo sapien
gaggaggaaagatcccattagatcc

SEQ ID NO: 1565897 - DNA, 25 bp, Homo sapien
gaatctggaatgttagaatcttgga

SEQ ID NO: 1565898 - DNA, 25 bp, Homo sapien
ctttgggcaagccaagtgccctctc

SEQ ID NO: 1565899 - DNA, 25 bp, Homo sapien
ccacacctctaaacatctcccctct

SEQ ID NO: 1565900 - DNA, 25 bp, Homo sapien
ccttgtctgcactgttcaaacctct

SEQ ID NO: 1565901 - DNA, 25 bp, Homo sapien
cctccacacctctaaacatctcccc

SEQ ID NO: 1565902 - DNA, 25 bp, Homo sapien
ttgtctgcactgttcaaacctctgc

SEQ ID NO: 1565903 - DNA, 25 bp, Homo sapien
agagatttgaggatggcggtctctc

SEQ ID NO: 1565904 - DNA, 25 bp, Homo sapien
cagttggtgctgtcccagactgaga

SEQ ID NO: 1565905 - DNA, 25 bp, Homo sapien
agatttgaggatggcggtctctccc

SEQ ID NO: 1565906 - DNA, 25 bp, Homo sapien
tccagttggtgctgtcccagactga

SEQ ID NO: 1565907 - DNA, 25 bp, Homo sapien
tgggtcctcacagcggctcactgca

SEQ ID NO: 1565908 - DNA, 25 bp, Homo sapien
gggtgtccttattgaccacaggtgg

SEQ ID NO: 1565909 - DNA, 25 bp, Homo sapien
ggtgggcgaagggaggactatggga

SEQ ID NO: 1565910 - DNA, 25 bp, Homo sapien
aggactatgggaaggcaagcgctgg

SEQ ID NO: 1565911 - DNA, 25 bp, Homo sapien
taaattccacatcagtaaacctgat

SEQ ID NO: 1565912 - DNA, 25 bp, Homo sapien
ggaaagctcttaacagccagcagga

SEQ ID NO: 1565913 - DNA, 25 bp, Homo sapien
cgtgtgacgtgtgtcctttccagag

SEQ ID NO: 1565914 - DNA, 25 bp, Homo sapien
aggctttgtagggaccagcgttatc

SEQ ID NO: 1565915 - DNA, 25 bp, Homo sapien
aacatgtaacagcttgagaggtgac

SEQ ID NO: 1565916 - DNA, 25 bp, Homo sapien
gacacaatggacaaggtaaatcaac

SEQ ID NO: 1565917 - DNA, 25 bp, Homo sapien
tgcagtctgtactattgacttaaga

SEQ ID NO: 1565918 - DNA, 25 bp, Homo sapien
gacttaagattgacatattgaccca

SEQ ID NO: 1565919 - DNA, 25 bp, Homo sapien
taaaatgatcctgtgctcaccgaca

SEQ ID NO: 1565920 - DNA, 25 bp, Homo sapien
aaaccatattagcaccatcctgaga

SEQ ID NO: 1565921 - DNA, 25 bp, Homo sapien
tcagcgtctgagtgtgcgatttaac

SEQ ID NO: 1565922 - DNA, 25 bp, Homo sapien
tgggttggaccacctgaaattgctg

SEQ ID NO: 1565923 - DNA, 25 bp, Homo sapien
tctgggtgcgctcagcatggtcctg

SEQ ID NO: 1565924 - DNA, 25 bp, Homo sapien
taagcggagcgtgacttgatggaca

SEQ ID NO: 1565925 - DNA, 25 bp, Homo sapien
tggtaaatggccctaagacacccag

SEQ ID NO: 1565926 - DNA, 25 bp, Homo sapien
tccaaagctctcgaatatcacaggt

SEQ ID NO: 1565927 - DNA, 25 bp, Homo sapien
cgcgctcctggacggcctgaaccgc

SEQ ID NO: 1565928 - DNA, 25 bp, Homo sapien
ctgcgcgctcctggacggcctgaac

SEQ ID NO: 1565929 - DNA, 25 bp, Homo sapien
aggcctgcgcgctcctggacggcct

SEQ ID NO: 1565930 - DNA, 25 bp, Homo sapien
tgctcccgctgtggggcgctggcca

SEQ ID NO: 1565931 - DNA, 25 bp, Homo sapien
cctctaagggtctttgtgattacct

SEQ ID NO: 1565932 - DNA, 25 bp, Homo sapien
tgattaccttgagcgcacctggata

SEQ ID NO: 1565933 - DNA, 25 bp, Homo sapien
gattagcagccccaattcaacttgc

SEQ ID NO: 1565934 - DNA, 25 bp, Homo sapien
tggctgcccactatgttcaaaggtc

SEQ ID NO: 1565935 - DNA, 25 bp, Homo sapien
tggagtagtagctccaggtgaggcc

SEQ ID NO: 1565936 - DNA, 25 bp, Homo sapien
ctggagtagtagctccaggtgaggc

SEQ ID NO: 1565937 - DNA, 25 bp, Homo sapien
ggagtagtagctccaggtgaggcca

SEQ ID NO: 1565938 - DNA, 25 bp, Homo sapien
gagtagtagctccaggtgaggccat

SEQ ID NO: 1565939 - DNA, 25 bp, Homo sapien
actgcgggctcaagacttagaggag

SEQ ID NO: 1565940 - DNA, 25 bp, Homo sapien
aggaactgcgggctcaagacttaga

SEQ ID NO: 1565941 - DNA, 25 bp, Homo sapien
ctcaggaactgcgggctcaagactt

SEQ ID NO: 1565942 - DNA, 25 bp, Homo sapien
gaactgcgggctcaagacttagagg

SEQ ID NO: 1565943 - DNA, 25 bp, Homo sapien
acttgtctgtccttccgccctctcc

SEQ ID NO: 1565944 - DNA, 25 bp, Homo sapien
tttacttgtctgtccttccgccctc

SEQ ID NO: 1565945 - DNA, 25 bp, Homo sapien
tacttgtctgtccttccgccctctc

SEQ ID NO: 1565946 - DNA, 25 bp, Homo sapien
ttacttgtctgtccttccgccctct

SEQ ID NO: 1565947 - DNA, 25 bp, Homo sapien
ctggtctgtattggccccttcccgg

SEQ ID NO: 1565948 - DNA, 25 bp, Homo sapien
cagggtaaatccagccatgcgaggg

SEQ ID NO: 1565949 - DNA, 25 bp, Homo sapien
gagagccggtgatgtttataattcc

SEQ ID NO: 1565950 - DNA, 25 bp, Homo sapien
aaagaagtatctccccgcatcactt

SEQ ID NO: 1565951 - DNA, 25 bp, Homo sapien
tgagggtgagcaccgaggagcgggt

SEQ ID NO: 1565952 - DNA, 25 bp, Homo sapien
tgggggcagccggactccagggtgc

SEQ ID NO: 1565953 - DNA, 25 bp, Homo sapien
gggacacggaggtccctatccagga

SEQ ID NO: 1565954 - DNA, 25 bp, Homo sapien
ccaggagatcatagggggtgtcccc

SEQ ID NO: 1565955 - DNA, 25 bp, Homo sapien
cacgttgagatggacggtcttgttc

SEQ ID NO: 1565956 - DNA, 25 bp, Homo sapien
aggacacgttgagatggacggtctt

SEQ ID NO: 1565957 - DNA, 25 bp, Homo sapien
cggtcttgttcgtggtcacgctggc

SEQ ID NO: 1565958 - DNA, 25 bp, Homo sapien
gatggacggtcttgttcgtggtcac

SEQ ID NO: 1565959 - DNA, 25 bp, Homo sapien
caccagcccagattccgggacccag

SEQ ID NO: 1565960 - DNA, 25 bp, Homo sapien
ccagtgtccaggcttgacgctcacc

SEQ ID NO: 1565961 - DNA, 25 bp, Homo sapien
ccagattccgggacccagcacccag

SEQ ID NO: 1565962 - DNA, 25 bp, Homo sapien
caggcttgacgctcaccccatcagg

SEQ ID NO: 1565963 - DNA, 25 bp, Homo sapien
tggaagacagtcatggtcaagttct

SEQ ID NO: 1565964 - DNA, 25 bp, Homo sapien
gtcatggtcaagttctgaggcgggt

SEQ ID NO: 1565965 - DNA, 25 bp, Homo sapien
ctccttggaagacagtcatggtcaa

SEQ ID NO: 1565966 - DNA, 25 bp, Homo sapien
gccgtctccttggaagacagtcatg

SEQ ID NO: 1565967 - DNA, 25 bp, Homo sapien
agatgagccatttcccaagactgtg

SEQ ID NO: 1565968 - DNA, 25 bp, Homo sapien
gagccatttcccaagactgtggata

SEQ ID NO: 1565969 - DNA, 25 bp, Homo sapien
gatgagccatttcccaagactgtgg

SEQ ID NO: 1565970 - DNA, 25 bp, Homo sapien
ctgggagtgacagagatgagccatt

SEQ ID NO: 1565971 - DNA, 25 bp, Homo sapien
acagaccaggcgcagagactggccc

SEQ ID NO: 1565972 - DNA, 25 bp, Homo sapien
cgttcaggtagacctgctgagagcc

SEQ ID NO: 1565973 - DNA, 25 bp, Homo sapien
ctgctgagagccgagagggttctga

SEQ ID NO: 1565974 - DNA, 25 bp, Homo sapien
caggtagacctgctgagagccgaga

SEQ ID NO: 1565975 - DNA, 25 bp, Homo sapien
agggagacgttcaggtagacctgct

SEQ ID NO: 1565976 - DNA, 25 bp, Homo sapien
ctgagtcactcctgatgtggctttg

SEQ ID NO: 1565977 - DNA, 25 bp, Homo sapien
tgagtcactcctgatgtggctttgc

SEQ ID NO: 1565978 - DNA, 25 bp, Homo sapien
gcagaccaggtacccccatgtgttt

SEQ ID NO: 1565979 - DNA, 25 bp, Homo sapien
gtgggcagaccaggtacccccatgt

SEQ ID NO: 1565980 - DNA, 25 bp, Homo sapien
gggcagaccaggtacccccatgtgt

SEQ ID NO: 1565981 - DNA, 25 bp, Homo sapien
cagaccaggtacccccatgtgtttc

SEQ ID NO: 1565982 - DNA, 25 bp, Homo sapien
ctggccttgccgatttcttcctgca

SEQ ID NO: 1565983 - DNA, 25 bp, Homo sapien
ctgctggccttgccgatttcttcct

SEQ ID NO: 1565984 - DNA, 25 bp, Homo sapien
gctggccttgccgatttcttcctgc

SEQ ID NO: 1565985 - DNA, 25 bp, Homo sapien
tgctggccttgccgatttcttcctg

SEQ ID NO: 1565986 - DNA, 25 bp, Homo sapien
acagatagtatttgctggcttctgc

SEQ ID NO: 1565987 - DNA, 25 bp, Homo sapien
cgaaaatagtttctatctgtccctg

SEQ ID NO: 1565988 - DNA, 25 bp, Homo sapien
tggcttctgctctaaacggtattga

SEQ ID NO: 1565989 - DNA, 25 bp, Homo sapien
tgtgtggcccatgaagccgaaaata

SEQ ID NO: 1565990 - DNA, 25 bp, Homo sapien
gactgtcttctgcccaaggttcagt

SEQ ID NO: 1565991 - DNA, 25 bp, Homo sapien
gggactgtcttctgcccaaggttca

SEQ ID NO: 1565992 - DNA, 25 bp, Homo sapien
tgtcttctgcccaaggttcagtcag

SEQ ID NO: 1565993 - DNA, 25 bp, Homo sapien
ggaggctggtctgggggactgtctt

SEQ ID NO: 1565994 - DNA, 25 bp, Homo sapien
tgtccccgcgagtcccaaggcttca

SEQ ID NO: 1565995 - DNA, 25 bp, Homo sapien
cccgcgagtcccaaggcttcaccat

SEQ ID NO: 1565996 - DNA, 25 bp, Homo sapien
agtcccaaggcttcaccatctggaa

SEQ ID NO: 1565997 - DNA, 25 bp, Homo sapien
cgagtcccaaggcttcaccatctgg

SEQ ID NO: 1565998 - DNA, 25 bp, Homo sapien
tgccaggagctctaacgggatgtga

SEQ ID NO: 1565999 - DNA, 25 bp, Homo sapien
tagttgccaccagaatcaggagagg

SEQ ID NO: 1566000 - DNA, 25 bp, Homo sapien
tggtgaccacaaccttgcaagtagg

SEQ ID NO: 1566001 - DNA, 25 bp, Homo sapien
tatcatagctcatcacgttgagggc

SEQ ID NO: 1566002 - DNA, 25 bp, Homo sapien
gagaaacagctcaacactcgttttt

SEQ ID NO: 1566003 - DNA, 25 bp, Homo sapien
tattatgccgttacatggaaacatg

SEQ ID NO: 1566004 - DNA, 25 bp, Homo sapien
tcaaacagcacagttgtacaaacat

SEQ ID NO: 1566005 - DNA, 25 bp, Homo sapien
aggtttatgattcgcttcaggctaa

SEQ ID NO: 1566006 - DNA, 25 bp, Homo sapien
tagactattcctaggactggctggg

SEQ ID NO: 1566007 - DNA, 25 bp, Homo sapien
catagattttatttgcgtgattcaa

SEQ ID NO: 1566008 - DNA, 25 bp, Homo sapien
tcaatgtgttttgattcataaccac

SEQ ID NO: 1566009 - DNA, 25 bp, Homo sapien
cataaccacataattactatcccag

SEQ ID NO: 1566010 - DNA, 25 bp, Homo sapien
agcgttgttgccagtggacccggaa

SEQ ID NO: 1566011 - DNA, 25 bp, Homo sapien
caagcagatttgcaagacccacggc

SEQ ID NO: 1566012 - DNA, 25 bp, Homo sapien
gctttgtcagcaacccctattggag

SEQ ID NO: 1566013 - DNA, 25 bp, Homo sapien
caggtccctgtagttagagcatgca

SEQ ID NO: 1566014 - DNA, 25 bp, Homo sapien
ccatgagcgccccttgattaggtga

SEQ ID NO: 1566015 - DNA, 25 bp, Homo sapien
gccccttgattaggtgagaaccagg

SEQ ID NO: 1566016 - DNA, 25 bp, Homo sapien
cagtgcccatgagcgccccttgatt

SEQ ID NO: 1566017 - DNA, 25 bp, Homo sapien
tgagcgccccttgattaggtgagaa

SEQ ID NO: 1566018 - DNA, 25 bp, Homo sapien
ttggaggtgccagggccgcgaggga

SEQ ID NO: 1566019 - DNA, 25 bp, Homo sapien
ccagggccgcgagggaacgtctgtt

SEQ ID NO: 1566020 - DNA, 25 bp, Homo sapien
ccgcgagggaacgtctgttcctcag

SEQ ID NO: 1566021 - DNA, 25 bp, Homo sapien
ggaggtgccagggccgcgagggaac

SEQ ID NO: 1566022 - DNA, 25 bp, Homo sapien
ctcttgcacggtcacggaactctgc

SEQ ID NO: 1566023 - DNA, 25 bp, Homo sapien
gagccttccagcttatatcattccc

SEQ ID NO: 1566024 - DNA, 25 bp, Homo sapien
aaagaagtatctccccgcatcactc

SEQ ID NO: 1566025 - DNA, 25 bp, Homo sapien
cgtcagcgagtaatccttccggtta

SEQ ID NO: 1566026 - DNA, 25 bp, Homo sapien
cagggtaccggggataaggatgttg

SEQ ID NO: 1566027 - DNA, 25 bp, Homo sapien
cagactccagggtaccggggataag

SEQ ID NO: 1566028 - DNA, 25 bp, Homo sapien
agccagactccagggtaccggggat

SEQ ID NO: 1566029 - DNA, 25 bp, Homo sapien
accggggataaggatgttgggcctg

SEQ ID NO: 1566030 - DNA, 25 bp, Homo sapien
ggtgaggctggtgccgtggtgctgg

SEQ ID NO: 1566031 - DNA, 25 bp, Homo sapien
acaggtgaggctggtgccgtggtgc

SEQ ID NO: 1566032 - DNA, 25 bp, Homo sapien
caggtgaggctggtgccgtggtgct

SEQ ID NO: 1566033 - DNA, 25 bp, Homo sapien
tgacaggtgaggctggtgccgtggt

SEQ ID NO: 1566034 - DNA, 25 bp, Homo sapien
tggtcctgttcgtggtcacgccggc

SEQ ID NO: 1566035 - DNA, 25 bp, Homo sapien
ttggatggtcctgttcgtggtcacg

SEQ ID NO: 1566036 - DNA, 25 bp, Homo sapien
ggatggtcctgttcgtggtcacgcc

SEQ ID NO: 1566037 - DNA, 25 bp, Homo sapien
gatggtcctgttcgtggtcacgccg

SEQ ID NO: 1566038 - DNA, 25 bp, Homo sapien
gacagtcacagtcaagttctgagga

SEQ ID NO: 1566039 - DNA, 25 bp, Homo sapien
agacagtcacagtcaagttctgagg

SEQ ID NO: 1566040 - DNA, 25 bp, Homo sapien
ttctccttggaagacagtcacagtc

SEQ ID NO: 1566041 - DNA, 25 bp, Homo sapien
gccttctccttggaagacagtcaca

SEQ ID NO: 1566042 - DNA, 25 bp, Homo sapien
ctgaaagagatgagctgttccccag

SEQ ID NO: 1566043 - DNA, 25 bp, Homo sapien
gaggttcagggaaacgtgctgggaa

SEQ ID NO: 1566044 - DNA, 25 bp, Homo sapien
actcctgatacaggcctcattttgc

SEQ ID NO: 1566045 - DNA, 25 bp, Homo sapien
agcaacactcctgatacaggcctca

SEQ ID NO: 1566046 - DNA, 25 bp, Homo sapien
gaccgcccccagcaacactcctgat

SEQ ID NO: 1566047 - DNA, 25 bp, Homo sapien
caatgaagatgacacagaaggagag

SEQ ID NO: 1566048 - DNA, 25 bp, Homo sapien
ccccagtgttgaaaacagaggctcc

SEQ ID NO: 1566049 - DNA, 25 bp, Homo sapien
cctttcagtgtggtcagatcggggt

SEQ ID NO: 1566050 - DNA, 25 bp, Homo sapien
ggttcaccacagatgtggagcccca

SEQ ID NO: 1566051 - DNA, 25 bp, Homo sapien
cagagaccccagtgttgaaaacaga

SEQ ID NO: 1566052 - DNA, 25 bp, Homo sapien
ctggccttgccgatttcttcctgca

SEQ ID NO: 1566053 - DNA, 25 bp, Homo sapien
ctgctggccttgccgatttcttcct

SEQ ID NO: 1566054 - DNA, 25 bp, Homo sapien
gctggccttgccgatttcttcctgc

SEQ ID NO: 1566055 - DNA, 25 bp, Homo sapien
tgctggccttgccgatttcttcctg

SEQ ID NO: 1566056 - DNA, 25 bp, Homo sapien
gtgtcgggggttatcatctgcccag

SEQ ID NO: 1566057 - DNA, 25 bp, Homo sapien
atggtgtcgggggttatcatctgcc

SEQ ID NO: 1566058 - DNA, 25 bp, Homo sapien
tcgggggttatcatctgcccaggac

SEQ ID NO: 1566059 - DNA, 25 bp, Homo sapien
gggttatcatctgcccaggactcag

SEQ ID NO: 1566060 - DNA, 25 bp, Homo sapien
tcttgatctctgagtactcattgtt

SEQ ID NO: 1566061 - DNA, 25 bp, Homo sapien
ctctgagtactcattgttggtggct

SEQ ID NO: 1566062 - DNA, 25 bp, Homo sapien
cccttatgaaagctgaggggtgcat

SEQ ID NO: 1566063 - DNA, 25 bp, Homo sapien
ctgagtactcattgttggtggcttc

SEQ ID NO: 1566064 - DNA, 25 bp, Homo sapien
cattgagggctgctaattctactgg

SEQ ID NO: 1566065 - DNA, 25 bp, Homo sapien
ccttagagaagtacagaggagaatg

SEQ ID NO: 1566066 - DNA, 25 bp, Homo sapien
tcaaacaagcccgagcctctgcatt

SEQ ID NO: 1566067 - DNA, 25 bp, Homo sapien
cacgttacaatctcactatattcgg

SEQ ID NO: 1566068 - DNA, 25 bp, Homo sapien
tcagtacattactctgtcattggaa

SEQ ID NO: 1566069 - DNA, 25 bp, Homo sapien
cattactctgtcattggaaacaaca

SEQ ID NO: 1566070 - DNA, 25 bp, Homo sapien
aacaacacagatgaacttagaggat

SEQ ID NO: 1566071 - DNA, 25 bp, Homo sapien
cttagaggatgttatgttgagtgaa

SEQ ID NO: 1566072 - DNA, 25 bp, Homo sapien
tcctgggcttcctgtgtgagcagag

SEQ ID NO: 1566073 - DNA, 25 bp, Homo sapien
ctgtggggaggagcatgagatcttg

SEQ ID NO: 1566074 - DNA, 25 bp, Homo sapien
tgtgagcagagaagagggctgtggg

SEQ ID NO: 1566075 - DNA, 25 bp, Homo sapien
gcttcctgtgtgagcagagaagagg

SEQ ID NO: 1566076 - DNA, 25 bp, Homo sapien
tagaagaccgaacagtgcacaaaga

SEQ ID NO: 1566077 - DNA, 25 bp, Homo sapien
cagccatactcgaggtagaagaccg

SEQ ID NO: 1566078 - DNA, 25 bp, Homo sapien
tccagccggaatcttgcatcctgag

SEQ ID NO: 1566079 - DNA, 25 bp, Homo sapien
tcccggaaccagtggccataagcag

SEQ ID NO: 1566080 - DNA, 25 bp, Homo sapien
actggagtctcctggtctacactga

SEQ ID NO: 1566081 - DNA, 25 bp, Homo sapien
tttgagttgagttgtttgtggccac

SEQ ID NO: 1566082 - DNA, 25 bp, Homo sapien
ccttgagggatcaccgaggaggtgg

SEQ ID NO: 1566083 - DNA, 25 bp, Homo sapien
tcttcctctcgccacccaaaagaag

SEQ ID NO: 1566084 - DNA, 25 bp, Homo sapien
cagactttaggaactccgggatgag

SEQ ID NO: 1566085 - DNA, 25 bp, Homo sapien
gccagactttaggaactccgggatg

SEQ ID NO: 1566086 - DNA, 25 bp, Homo sapien
gactttaggaactccgggatgagga

SEQ ID NO: 1566087 - DNA, 25 bp, Homo sapien
actttaggaactccgggatgaggat

SEQ ID NO: 1566088 - DNA, 25 bp, Homo sapien
tccgtggtcacaccagctccgggga

SEQ ID NO: 1566089 - DNA, 25 bp, Homo sapien
cactgagctggatggttctctccgt

SEQ ID NO: 1566090 - DNA, 25 bp, Homo sapien
tgaggccgtgggatgatcgtgagca

SEQ ID NO: 1566091 - DNA, 25 bp, Homo sapien
ggaacgtcacctgacagatgaggtt

SEQ ID NO: 1566092 - DNA, 25 bp, Homo sapien
ctgaggatgatgaggcaaaggcaga

SEQ ID NO: 1566093 - DNA, 25 bp, Homo sapien
ccacctcttccacggttcctgattt

SEQ ID NO: 1566094 - DNA, 25 bp, Homo sapien
acaaccacctcttccacggttcctg

SEQ ID NO: 1566095 - DNA, 25 bp, Homo sapien
gaagcaggatcttcacagccactac

SEQ ID NO: 1566096 - DNA, 25 bp, Homo sapien
tccttggtcttcaggcagtgcttac

SEQ ID NO: 1566097 - DNA, 25 bp, Homo sapien
gattctgggattcagcatcatgtcc

SEQ ID NO: 1566098 - DNA, 25 bp, Homo sapien
ccctccccatgcctgtccttggtct

SEQ ID NO: 1566099 - DNA, 25 bp, Homo sapien
catacccccaggattgagattctgg

SEQ ID NO: 1566100 - DNA, 25 bp, Homo sapien
tgacattgagtgaagagacaaggac

SEQ ID NO: 1566101 - DNA, 25 bp, Homo sapien
ctgacattgagtgaagagacaagga

SEQ ID NO: 1566102 - DNA, 25 bp, Homo sapien
cctcaccgccttcttcttgtggaaa

SEQ ID NO: 1566103 - DNA, 25 bp, Homo sapien
taacccatgacagcatatacattct

SEQ ID NO: 1566104 - DNA, 25 bp, Homo sapien
ctgagagattaacccatgacagcat

SEQ ID NO: 1566105 - DNA, 25 bp, Homo sapien
gacagcatatacattctcctcaacc

SEQ ID NO: 1566106 - DNA, 25 bp, Homo sapien
gacaacctgaaggatgataaggacc

SEQ ID NO: 1566107 - DNA, 25 bp, Homo sapien
gcagaagacagatcgtgaaaggcct

SEQ ID NO: 1566108 - DNA, 25 bp, Homo sapien
cttctgcacatacggaaatgctggc

SEQ ID NO: 1566109 - DNA, 25 bp, Homo sapien
taatgaacaaatgccacatctccgc

SEQ ID NO: 1566110 - DNA, 25 bp, Homo sapien
cttccttctctggaggtctccaacc

SEQ ID NO: 1566111 - DNA, 25 bp, Homo sapien
tttccagagagacggaatcggccct

SEQ ID NO: 1566112 - DNA, 25 bp, Homo sapien
cttggggagagttagtcaaggcaac

SEQ ID NO: 1566113 - DNA, 25 bp, Homo sapien
cgttttgggttgttcgtagccattg

SEQ ID NO: 1566114 - DNA, 25 bp, Homo sapien
tagccattggagcatcctgggctgt

SEQ ID NO: 1566115 - DNA, 25 bp, Homo sapien
cctctctccatgcgaaagaaaatga

SEQ ID NO: 1566116 - DNA, 25 bp, Homo sapien
ctctctccatgcgaaagaaaatgac

SEQ ID NO: 1566117 - DNA, 25 bp, Homo sapien
atggtccccagggaggagatattgg

SEQ ID NO: 1566118 - DNA, 25 bp, Homo sapien
agagcaggtcaggtttcccgggcgg

SEQ ID NO: 1566119 - DNA, 25 bp, Homo sapien
gagcaggtcaggtttcccgggcggc

SEQ ID NO: 1566120 - DNA, 25 bp, Homo sapien
ggtccccagggaggagatattgggc

SEQ ID NO: 1566121 - DNA, 25 bp, Homo sapien
tggtgcggcccgggaaggacacgga

SEQ ID NO: 1566122 - DNA, 25 bp, Homo sapien
ctgtggtgcggcccgggaaggacac

SEQ ID NO: 1566123 - DNA, 25 bp, Homo sapien
acggaggtccccatccaggagatgg

SEQ ID NO: 1566124 - DNA, 25 bp, Homo sapien
catccaggagatggtaggggtatcc

SEQ ID NO: 1566125 - DNA, 25 bp, Homo sapien
ctggggctttgggatgagggtgagc

SEQ ID NO: 1566126 - DNA, 25 bp, Homo sapien
gggctttgggatgagggtgagcact

SEQ ID NO: 1566127 - DNA, 25 bp, Homo sapien
tgggatgagggtgagcactgaggag

SEQ ID NO: 1566128 - DNA, 25 bp, Homo sapien
atgagggtgagcactgaggagcggg

SEQ ID NO: 1566129 - DNA, 25 bp, Homo sapien
tgacaggtgaggttggtgccatggt

SEQ ID NO: 1566130 - DNA, 25 bp, Homo sapien
ctgacaggtgaggttggtgccatgg

SEQ ID NO: 1566131 - DNA, 25 bp, Homo sapien
gacaggtgaggttggtgccatggtc

SEQ ID NO: 1566132 - DNA, 25 bp, Homo sapien
aggacgcattgaattggacagtcct

SEQ ID NO: 1566133 - DNA, 25 bp, Homo sapien
caaggtcacaccagcctcaggcagg

SEQ ID NO: 1566134 - DNA, 25 bp, Homo sapien
gacgcattgaattggacagtcctgg

SEQ ID NO: 1566135 - DNA, 25 bp, Homo sapien
ggacgcattgaattggacagtcctg

SEQ ID NO: 1566136 - DNA, 25 bp, Homo sapien
gccgtctgcttggaagatagccaca

SEQ ID NO: 1566137 - DNA, 25 bp, Homo sapien
tgtgccgtctgcttggaagatagcc

SEQ ID NO: 1566138 - DNA, 25 bp, Homo sapien
tgccgtctgcttggaagatagccac

SEQ ID NO: 1566139 - DNA, 25 bp, Homo sapien
ccgtctgcttggaagatagccacag

SEQ ID NO: 1566140 - DNA, 25 bp, Homo sapien
gagagggatgagctgttccccaagg

SEQ ID NO: 1566141 - DNA, 25 bp, Homo sapien
agggatgagctgttccccaaggctg

SEQ ID NO: 1566142 - DNA, 25 bp, Homo sapien
atcctccatgcccatatccctgatg

SEQ ID NO: 1566143 - DNA, 25 bp, Homo sapien
tccatgcccatatccctgatgcccg

SEQ ID NO: 1566144 - DNA, 25 bp, Homo sapien
catatccctgatgcccgctgctggc

SEQ ID NO: 1566145 - DNA, 25 bp, Homo sapien
atgcccatatccctgatgcccgctg

SEQ ID NO: 1566146 - DNA, 25 bp, Homo sapien
tccaagtattcactgtccatggcct

SEQ ID NO: 1566147 - DNA, 25 bp, Homo sapien
gaggcctgaccttatggaagctgag

SEQ ID NO: 1566148 - DNA, 25 bp, Homo sapien
ctgtccctgcgcgttctgaggcctg

SEQ ID NO: 1566149 - DNA, 25 bp, Homo sapien
tgcgcgttctgaggcctgaccttat

SEQ ID NO: 1566150 - DNA, 25 bp, Homo sapien
ggcctgggtagagccggccctcttg

SEQ ID NO: 1566151 - DNA, 25 bp, Homo sapien
ggtagagccggccctcttgagagtc

SEQ ID NO: 1566152 - DNA, 25 bp, Homo sapien
gctcaatgctggtggcggaagacct

SEQ ID NO: 1566153 - DNA, 25 bp, Homo sapien
agaccttccgcttgctggcctgcat

SEQ ID NO: 1566154 - DNA, 25 bp, Homo sapien
ttccccacgtgcacagagagctggt

SEQ ID NO: 1566155 - DNA, 25 bp, Homo sapien
accctgtacaagtgcgtccctgcat

SEQ ID NO: 1566156 - DNA, 25 bp, Homo sapien
tatatcttgcataagccctctctcc

SEQ ID NO: 1566157 - DNA, 25 bp, Homo sapien
ggtctccactgaggtggaatcggcc

SEQ ID NO: 1566158 - DNA, 25 bp, Homo sapien
tcgtcctgcaggatataggtttctg

SEQ ID NO: 1566159 - DNA, 25 bp, Homo sapien
ggtttctgtagggttcatgtaagtg

SEQ ID NO: 1566160 - DNA, 25 bp, Homo sapien
tggcccgagtcacggcctcttcttg

SEQ ID NO: 1566161 - DNA, 25 bp, Homo sapien
ttcttgacctgtggggtggttcgtc

SEQ ID NO: 1566162 - DNA, 25 bp, Homo sapien
ctccacacagattgaccctcatggg

SEQ ID NO: 1566163 - DNA, 25 bp, Homo sapien
gagatgccagagactcgcccagaga

SEQ ID NO: 1566164 - DNA, 25 bp, Homo sapien
cacagattgaccctcatgggccaga

SEQ ID NO: 1566165 - DNA, 25 bp, Homo sapien
atgccagagactcgcccagagatgg

SEQ ID NO: 1566166 - DNA, 25 bp, Homo sapien
ctgaggcagaggcttcccgggcttc

SEQ ID NO: 1566167 - DNA, 25 bp, Homo sapien
tagcagcagtggcatgtctgaggca

SEQ ID NO: 1566168 - DNA, 25 bp, Homo sapien
gcagcagtggcatgtctgaggcaga

SEQ ID NO: 1566169 - DNA, 25 bp, Homo sapien
gcagtagcagcagtggcatgtctga

SEQ ID NO: 1566170 - DNA, 25 bp, Homo sapien
cacttgcagccggatttttggatcc

SEQ ID NO: 1566171 - DNA, 25 bp, Homo sapien
cagccggatttttggatccatagcc

SEQ ID NO: 1566172 - DNA, 25 bp, Homo sapien
tcctgcacttgcagccggatttttg

SEQ ID NO: 1566173 - DNA, 25 bp, Homo sapien
tgcagccggatttttggatccatag

SEQ ID NO: 1566174 - DNA, 25 bp, Homo sapien
caatggctccttcccggaaccagta

SEQ ID NO: 1566175 - DNA, 25 bp, Homo sapien
gccactggagagtccctggatacaa

SEQ ID NO: 1566176 - DNA, 25 bp, Homo sapien
cctggatacaatggctccttcccgg

SEQ ID NO: 1566177 - DNA, 25 bp, Homo sapien
ttgatctagcttgtttgtggccact

SEQ ID NO: 1566178 - DNA, 25 bp, Homo sapien
ctcctcctggcgtctacgatgctca

SEQ ID NO: 1566179 - DNA, 25 bp, Homo sapien
cctcctggcgtctacgatgctcagg

SEQ ID NO: 1566180 - DNA, 25 bp, Homo sapien
tcctcctggcgtctacgatgctcag

SEQ ID NO: 1566181 - DNA, 25 bp, Homo sapien
ccctcctcctggcgtctacgatgct

SEQ ID NO: 1566182 - DNA, 25 bp, Homo sapien
ccagattccagggtcctcgggatga

SEQ ID NO: 1566183 - DNA, 25 bp, Homo sapien
gccatgggatgatcgtgagcactga

SEQ ID NO: 1566184 - DNA, 25 bp, Homo sapien
gggtggccagattccagggtcctcg

SEQ ID NO: 1566185 - DNA, 25 bp, Homo sapien
gattccagggtcctcgggatgaaga

SEQ ID NO: 1566186 - DNA, 25 bp, Homo sapien
tccggggaacgtcactcgacaggtg

SEQ ID NO: 1566187 - DNA, 25 bp, Homo sapien
ctccggggaacgtcactcgacaggt

SEQ ID NO: 1566188 - DNA, 25 bp, Homo sapien
gctccggggaacgtcactcgacagg

SEQ ID NO: 1566189 - DNA, 25 bp, Homo sapien
cacaccagctccggggaacgtcact

SEQ ID NO: 1566190 - DNA, 25 bp, Homo sapien
ccaggcgtcctggcccagcactcac

SEQ ID NO: 1566191 - DNA, 25 bp, Homo sapien
cccaggcgtcctggcccagcactca

SEQ ID NO: 1566192 - DNA, 25 bp, Homo sapien
cctcagggacccaggcgtcctggcc

SEQ ID NO: 1566193 - DNA, 25 bp, Homo sapien
cagggacccaggcgtcctggcccag

SEQ ID NO: 1566194 - DNA, 25 bp, Homo sapien
cactattaggctatacatcttttaa

SEQ ID NO: 1566195 - DNA, 25 bp, Homo sapien
actcactattaggctatacatcttt

SEQ ID NO: 1566196 - DNA, 25 bp, Homo sapien
cactcactattaggctatacatctt

SEQ ID NO: 1566197 - DNA, 25 bp, Homo sapien
tgcctccccaatggccacaagaacc

SEQ ID NO: 1566198 - DNA, 25 bp, Homo sapien
ccaatggccacaagaaccacctttg

SEQ ID NO: 1566199 - DNA, 25 bp, Homo sapien
gcagagaagcaggatcttcacagct

SEQ ID NO: 1566200 - DNA, 25 bp, Homo sapien
acctttgtcacaggccttgatttcc

SEQ ID NO: 1566201 - DNA, 25 bp, Homo sapien
gcaaggatgtttccgtacatgcaaa

SEQ ID NO: 1566202 - DNA, 25 bp, Homo sapien
caaaaggcgcccacattggaaaaga

SEQ ID NO: 1566203 - DNA, 25 bp, Homo sapien
ccagtatgaccgtgatatcaaaacc

SEQ ID NO: 1566204 - DNA, 25 bp, Homo sapien
aattcgtcacgatcaagtaggcttt

SEQ ID NO: 1566205 - DNA, 25 bp, Homo sapien
caggctgtgcaagaaatgtggtgct

SEQ ID NO: 1566206 - DNA, 25 bp, Homo sapien
tagttcattcttggcttgctataga

SEQ ID NO: 1566207 - DNA, 25 bp, Homo sapien
gatctttagtatgttttcatgagcc

SEQ ID NO: 1566208 - DNA, 25 bp, Homo sapien
tgaggtggctgataaaacctttggc

SEQ ID NO: 1566209 - DNA, 25 bp, Homo sapien
taattgctgactcgtaactcactgt

SEQ ID NO: 1566210 - DNA, 25 bp, Homo sapien
taccatttgaggagcattcagattg

SEQ ID NO: 1566211 - DNA, 25 bp, Homo sapien
gaagagtgtcattaaccaaacgttc

SEQ ID NO: 1566212 - DNA, 25 bp, Homo sapien
cctctgaggttcaatcatgtggttg

SEQ ID NO: 1566213 - DNA, 25 bp, Homo sapien
atgtctaaagtccttccactctgag

SEQ ID NO: 1566214 - DNA, 25 bp, Homo sapien
catgcgaaccccatgtctaaagtcc

SEQ ID NO: 1566215 - DNA, 25 bp, Homo sapien
gggccatctgagacatgcgaacccc

SEQ ID NO: 1566216 - DNA, 25 bp, Homo sapien
catctgagacatgcgaaccccatgt

SEQ ID NO: 1566217 - DNA, 25 bp, Homo sapien
ctgaggaagcagcttccagggcttc

SEQ ID NO: 1566218 - DNA, 25 bp, Homo sapien
gtctgaggaagcagcttccagggct

SEQ ID NO: 1566219 - DNA, 25 bp, Homo sapien
tctgaggaagcagcttccagggctt

SEQ ID NO: 1566220 - DNA, 25 bp, Homo sapien
ctgcccacagcaggggcagcagtag

SEQ ID NO: 1566221 - DNA, 25 bp, Homo sapien
cccacagcaggggcagcagtagcag

SEQ ID NO: 1566222 - DNA, 25 bp, Homo sapien
ccacagcaggggcagcagtagcagc

SEQ ID NO: 1566223 - DNA, 25 bp, Homo sapien
ggggcagcagtagcagcagcggcat

SEQ ID NO: 1566224 - DNA, 25 bp, Homo sapien
gtcagctcggcccagcccgacaacc

SEQ ID NO: 1566225 - DNA, 25 bp, Homo sapien
cgagggtcagctcggcccagcccga

SEQ ID NO: 1566226 - DNA, 25 bp, Homo sapien
agggtcagctcggcccagcccgaca

SEQ ID NO: 1566227 - DNA, 25 bp, Homo sapien
gggtcagctcggcccagcccgacaa

SEQ ID NO: 1566228 - DNA, 25 bp, Homo sapien
cctcctgtacttcttgatctagctt

SEQ ID NO: 1566229 - DNA, 25 bp, Homo sapien
tcctcctgtacttcttgatctagct

SEQ ID NO: 1566230 - DNA, 25 bp, Homo sapien
agctggggagatttgtaactgtatt

SEQ ID NO: 1566231 - DNA, 25 bp, Homo sapien
gaggcggaatctgccctgagtctcc

SEQ ID NO: 1566232 - DNA, 25 bp, Homo sapien
tggagtggccgggttctagagtgcc

SEQ ID NO: 1566233 - DNA, 25 bp, Homo sapien
tgagcaccgaggagtgagtagtcct

SEQ ID NO: 1566234 - DNA, 25 bp, Homo sapien
tctagagtgccagggatgaggattt

SEQ ID NO: 1566235 - DNA, 25 bp, Homo sapien
tccagcgaacttcacctgacaggtc

SEQ ID NO: 1566236 - DNA, 25 bp, Homo sapien
taccagttgttgggttctgtggaac

SEQ ID NO: 1566237 - DNA, 25 bp, Homo sapien
accagttgttgggttctgtggaaca

SEQ ID NO: 1566238 - DNA, 25 bp, Homo sapien
ccagttgttgggttctgtggaacat

SEQ ID NO: 1566239 - DNA, 25 bp, Homo sapien
taatagtacataaagtgagtccagg

SEQ ID NO: 1566240 - DNA, 25 bp, Homo sapien
cgtgggggccacgaagtccagcgga

SEQ ID NO: 1566241 - DNA, 25 bp, Homo sapien
gatccaacactaggccgtgggggcc

SEQ ID NO: 1566242 - DNA, 25 bp, Homo sapien
ttaatagtacataaagtgagtccag

SEQ ID NO: 1566243 - DNA, 25 bp, Homo sapien
aaagagcgagcagggctgtaacacc

SEQ ID NO: 1566244 - DNA, 25 bp, Homo sapien
caaagagcgagcagggctgtaacac

SEQ ID NO: 1566245 - DNA, 25 bp, Homo sapien
cagctcctccaatggccccatgaac

SEQ ID NO: 1566246 - DNA, 25 bp, Homo sapien
agacaaagagcgagcagggctgtaa

SEQ ID NO: 1566247 - DNA, 25 bp, Homo sapien
gctgtggggccattgttatgagcct

SEQ ID NO: 1566248 - DNA, 25 bp, Homo sapien
ggccattgttatgagcctggaatga

SEQ ID NO: 1566249 - DNA, 25 bp, Homo sapien
ccagggtctttgagcctggttttct

SEQ ID NO: 1566250 - DNA, 25 bp, Homo sapien
gacaccagggtctttgagcctggtt

SEQ ID NO: 1566251 - DNA, 25 bp, Homo sapien
gaggctgaccctgtggtagggtggg

SEQ ID NO: 1566252 - DNA, 25 bp, Homo sapien
gtagggtgggtgtcattcctgccca

SEQ ID NO: 1566253 - DNA, 25 bp, Homo sapien
tgtggtagggtgggtgtcattcctg

SEQ ID NO: 1566254 - DNA, 25 bp, Homo sapien
tggtagggtgggtgtcattcctgcc

SEQ ID NO: 1566255 - DNA, 25 bp, Homo sapien
tactgacccttgagagactgccttt

SEQ ID NO: 1566256 - DNA, 25 bp, Homo sapien
tagttcaagtggtgcaaagccctac

SEQ ID NO: 1566257 - DNA, 25 bp, Homo sapien
gacacttatcgagcagagcccgtga

SEQ ID NO: 1566258 - DNA, 25 bp, Homo sapien
tgtggacccacctatgacatctgag

SEQ ID NO: 1566259 - DNA, 25 bp, Homo sapien
ttcagtggggccatgtaacttggac

SEQ ID NO: 1566260 - DNA, 25 bp, Homo sapien
catcccatgaaagttgagggaagca

SEQ ID NO: 1566261 - DNA, 25 bp, Homo sapien
catctccacagtaggggcggcacct

SEQ ID NO: 1566262 - DNA, 25 bp, Homo sapien
tctgagtattcggtggaggtgtcct

SEQ ID NO: 1566263 - DNA, 25 bp, Homo sapien
tggatcttctagctgagcctgatgc

SEQ ID NO: 1566264 - DNA, 25 bp, Homo sapien
ggatcttctagctgagcctgatgct

SEQ ID NO: 1566265 - DNA, 25 bp, Homo sapien
tgtgacatcatacacttagcaaatg

SEQ ID NO: 1566266 - DNA, 25 bp, Homo sapien
ccaagaatcagcctttggtccccga

SEQ ID NO: 1566267 - DNA, 25 bp, Homo sapien
tgattccacgactctctgcttgcaa

SEQ ID NO: 1566268 - DNA, 25 bp, Homo sapien
cacagcatccctatgagataggact

SEQ ID NO: 1566269 - DNA, 25 bp, Homo sapien
agtggttcaaacagtggcctcttag

SEQ ID NO: 1566270 - DNA, 25 bp, Homo sapien
tggttcaaacagtggcctcttagag

SEQ ID NO: 1566271 - DNA, 25 bp, Homo sapien
aagtggttcaaacagtggcctctta

SEQ ID NO: 1566272 - DNA, 25 bp, Homo sapien
ggttcaaacagtggcctcttagagg

SEQ ID NO: 1566273 - DNA, 25 bp, Homo sapien
gatatgcattgcaggaatgtaccag

SEQ ID NO: 1566274 - DNA, 25 bp, Homo sapien
gaacaactcggtggcattcagtaca

SEQ ID NO: 1566275 - DNA, 25 bp, Homo sapien
gctttcgaagttcatacacgttgta

SEQ ID NO: 1566276 - DNA, 25 bp, Homo sapien
aggaaagcatgtactcactaagcag

SEQ ID NO: 1566277 - DNA, 25 bp, Homo sapien
tatccttgcgcaaagccccatggat

SEQ ID NO: 1566278 - DNA, 25 bp, Homo sapien
ttgtatccttgcgcaaagccccatg

SEQ ID NO: 1566279 - DNA, 25 bp, Homo sapien
tgtatccttgcgcaaagccccatgg

SEQ ID NO: 1566280 - DNA, 25 bp, Homo sapien
gtatccttgcgcaaagccccatgga

SEQ ID NO: 1566281 - DNA, 25 bp, Homo sapien
cttcttggtagatggatgtcgcccc

SEQ ID NO: 1566282 - DNA, 25 bp, Homo sapien
aaggatccgctgactgacgctgact

SEQ ID NO: 1566283 - DNA, 25 bp, Homo sapien
tcagtcggctgcacagagatagcgg

SEQ ID NO: 1566284 - DNA, 25 bp, Homo sapien
gactatgcttaatctcaccgcctga

SEQ ID NO: 1566285 - DNA, 25 bp, Homo sapien
tcatggtggatcttagcatccagct

SEQ ID NO: 1566286 - DNA, 25 bp, Homo sapien
gactatctggtattgcttccactct

SEQ ID NO: 1566287 - DNA, 25 bp, Homo sapien
tccagtgtttttattgggcctccat

SEQ ID NO: 1566288 - DNA, 25 bp, Homo sapien
tcgtgtaacatggtgacttccctca

SEQ ID NO: 1566289 - DNA, 25 bp, Homo sapien
gtgatgcgtaactgaaagaggatgt

SEQ ID NO: 1566290 - DNA, 25 bp, Homo sapien
ctctggtcatcgtgaaggcctgttc

SEQ ID NO: 1566291 - DNA, 25 bp, Homo sapien
tttagccaagtcaggggcttctgtc

SEQ ID NO: 1566292 - DNA, 25 bp, Homo sapien
aaggagtgaggtgatgcgtaactga

SEQ ID NO: 1566293 - DNA, 25 bp, Homo sapien
cctctatggctgtcctctgaattgt

SEQ ID NO: 1566294 - DNA, 25 bp, Homo sapien
gggactctcatgtacggacccctct

SEQ ID NO: 1566295 - DNA, 25 bp, Homo sapien
tccacctggcaaagtgtgcccacag

SEQ ID NO: 1566296 - DNA, 25 bp, Homo sapien
taatgtctgaaacagctcctagtgc

SEQ ID NO: 1566297 - DNA, 25 bp, Homo sapien
gtggaagtcacttggaggctgccat

SEQ ID NO: 1566298 - DNA, 25 bp, Homo sapien
catggaaggaacagctgcactgcag

SEQ ID NO: 1566299 - DNA, 25 bp, Homo sapien
gatgctcaaagcatgggttccgttt

SEQ ID NO: 1566300 - DNA, 25 bp, Homo sapien
gcaagaggagttgagcagcttagca

SEQ ID NO: 1566301 - DNA, 25 bp, Homo sapien
gcaattacaattcccgcatagatag

SEQ ID NO: 1566302 - DNA, 25 bp, Homo sapien
agaggaagagcagcgcaattacaat

SEQ ID NO: 1566303 - DNA, 25 bp, Homo sapien
tagatagcaccctggatcagccctt

SEQ ID NO: 1566304 - DNA, 25 bp, Homo sapien
cctggatcagccctttcacgaaggc

SEQ ID NO: 1566305 - DNA, 25 bp, Homo sapien
tctgatcgctgcagctttcttcgcc

SEQ ID NO: 1566306 - DNA, 25 bp, Homo sapien
catctcaagttcttggcttgctctg

SEQ ID NO: 1566307 - DNA, 25 bp, Homo sapien
ctctcagaaaatgtggcgactacgg

SEQ ID NO: 1566308 - DNA, 25 bp, Homo sapien
tcttttttgctctgatcgctgcagc

SEQ ID NO: 1566309 - DNA, 25 bp, Homo sapien
tgggcttggcctaatctctaaccac

SEQ ID NO: 1566310 - DNA, 25 bp, Homo sapien
tctaaccacttcaggctgacttggc

SEQ ID NO: 1566311 - DNA, 25 bp, Homo sapien
gccggccatacactcagaggccaaa

SEQ ID NO: 1566312 - DNA, 25 bp, Homo sapien
tctacaccaagctgactgctgccgg

SEQ ID NO: 1566313 - DNA, 25 bp, Homo sapien
ttagctggctcgtttatcttgcttt

SEQ ID NO: 1566314 - DNA, 25 bp, Homo sapien
taattccagggataatggcgactcc

SEQ ID NO: 1566315 - DNA, 25 bp, Homo sapien
taaggtcctacaagataaagctcca

SEQ ID NO: 1566316 - DNA, 25 bp, Homo sapien
gactccaggtatgaggcatgttcca

SEQ ID NO: 1566317 - DNA, 25 bp, Homo sapien
ccagggtggcacagatttcttctca

SEQ ID NO: 1566318 - DNA, 25 bp, Homo sapien
tgaactgactgacacgtggaataac

SEQ ID NO: 1566319 - DNA, 25 bp, Homo sapien
tcaatgactccggatgcgcccgatg

SEQ ID NO: 1566320 - DNA, 25 bp, Homo sapien
cgtggaataaccgtgtacacaaaca

SEQ ID NO: 1566321 - DNA, 25 bp, Homo sapien
tgtacacaaacacggagtgcctcac

SEQ ID NO: 1566322 - DNA, 25 bp, Homo sapien
tagtgagctgtggtcacaacactgt

SEQ ID NO: 1566323 - DNA, 25 bp, Homo sapien
aggctgtagtgagctgtggtcacaa

SEQ ID NO: 1566324 - DNA, 25 bp, Homo sapien
tgtagtgagctgtggtcacaacact

SEQ ID NO: 1566325 - DNA, 25 bp, Homo sapien
gctgtagtgagctgtggtcacaaca

SEQ ID NO: 1566326 - DNA, 25 bp, Homo sapien
aaatgcacaagggattgtagtgcac

SEQ ID NO: 1566327 - DNA, 25 bp, Homo sapien
ggtttatttgtagctaccagggagc

SEQ ID NO: 1566328 - DNA, 25 bp, Homo sapien
tgcacagcccctcttccactggtat

SEQ ID NO: 1566329 - DNA, 25 bp, Homo sapien
gccagtagtgcatgatcatggaatt

SEQ ID NO: 1566330 - DNA, 25 bp, Homo sapien
tttttgttctcctagatctgcgtag

SEQ ID NO: 1566331 - DNA, 25 bp, Homo sapien
tagggtacagtcttcttcatcaaga

SEQ ID NO: 1566332 - DNA, 25 bp, Homo sapien
ttcatcaagattcccagtcatgtaa

SEQ ID NO: 1566333 - DNA, 25 bp, Homo sapien
tccctttgagtatatcgtggatgag

SEQ ID NO: 1566334 - DNA, 25 bp, Homo sapien
tctttccaaaccacttatcggatga

SEQ ID NO: 1566335 - DNA, 25 bp, Homo sapien
ccacttatcggatgatattgaacat

SEQ ID NO: 1566336 - DNA, 25 bp, Homo sapien
ccaaaccacttatcggatgatattg

SEQ ID NO: 1566337 - DNA, 25 bp, Homo sapien
aaccacttatcggatgatattgaac

SEQ ID NO: 1566338 - DNA, 25 bp, Homo sapien
gtcacgttggctagggataagttca

SEQ ID NO: 1566339 - DNA, 25 bp, Homo sapien
gataagttcaagtgacatccaaggg

SEQ ID NO: 1566340 - DNA, 25 bp, Homo sapien
ctttgagggtacagttcaaggtcac

SEQ ID NO: 1566341 - DNA, 25 bp, Homo sapien
caagggtgttgccatggtcctcagg

SEQ ID NO: 1566342 - DNA, 25 bp, Homo sapien
ttctggctccccaatgaggctgatg

SEQ ID NO: 1566343 - DNA, 25 bp, Homo sapien
ctaggtccctggatactcagttggt

SEQ ID NO: 1566344 - DNA, 25 bp, Homo sapien
caagaggaattgaacaacctggcag

SEQ ID NO: 1566345 - DNA, 25 bp, Homo sapien
gaagtcacccggaggatgttatcca

SEQ ID NO: 1566346 - DNA, 25 bp, Homo sapien
cctttcacgaacacactggaaactg

SEQ ID NO: 1566347 - DNA, 25 bp, Homo sapien
tatacaatgccctggattaatcctt

SEQ ID NO: 1566348 - DNA, 25 bp, Homo sapien
ttaatcctttcacgaacacactgga

SEQ ID NO: 1566349 - DNA, 25 bp, Homo sapien
agagcaatgagaatgcaatggctcc

SEQ ID NO: 1566350 - DNA, 25 bp, Homo sapien
tcttaaggggcaagccttctttggc

SEQ ID NO: 1566351 - DNA, 25 bp, Homo sapien
tggggtgtcagcttcaggcattttg

SEQ ID NO: 1566352 - DNA, 25 bp, Homo sapien
cagcttcaggcattttgggtacttc

SEQ ID NO: 1566353 - DNA, 25 bp, Homo sapien
aggggcaagccttctttggccttgg

SEQ ID NO: 1566354 - DNA, 25 bp, Homo sapien
ttcacactgaaatcgagatctctgg

SEQ ID NO: 1566355 - DNA, 25 bp, Homo sapien
tagctgtagtctccccgtgttcctg

SEQ ID NO: 1566356 - DNA, 25 bp, Homo sapien
agggagttccgccactgtgagccgc

SEQ ID NO: 1566357 - DNA, 25 bp, Homo sapien
cactagagtctcataaagtcaggag

SEQ ID NO: 1566358 - DNA, 25 bp, Homo sapien
ctcggctgatgacggccaagccggc

SEQ ID NO: 1566359 - DNA, 25 bp, Homo sapien
gctgatgacggccaagccggccagg

SEQ ID NO: 1566360 - DNA, 25 bp, Homo sapien
tgatgacggccaagccggccagggc

SEQ ID NO: 1566361 - DNA, 25 bp, Homo sapien
cggctgatgacggccaagccggcca

SEQ ID NO: 1566362 - DNA, 25 bp, Homo sapien
cagcccagacgaagagctaattaat

SEQ ID NO: 1566363 - DNA, 25 bp, Homo sapien
tcatctctctgtagaccgtggccag

SEQ ID NO: 1566364 - DNA, 25 bp, Homo sapien
taatgaattaatggcccgtgctgcc

SEQ ID NO: 1566365 - DNA, 25 bp, Homo sapien
cactgtgtgctcaagtttgccaggg

SEQ ID NO: 1566366 - DNA, 25 bp, Homo sapien
acagactcagatgggtaggtgtcca

SEQ ID NO: 1566367 - DNA, 25 bp, Homo sapien
cagagatgcagagacaatcgtagca

SEQ ID NO: 1566368 - DNA, 25 bp, Homo sapien
aattacatagatacggccaggtgcg

SEQ ID NO: 1566369 - DNA, 25 bp, Homo sapien
gatacagagtacagcgacacacata

SEQ ID NO: 1566370 - DNA, 25 bp, Homo sapien
cacacactgtgtagttgtcggcagg

SEQ ID NO: 1566371 - DNA, 25 bp, Homo sapien
tgtcggcaggagagttgaactccag

SEQ ID NO: 1566372 - DNA, 25 bp, Homo sapien
tgagggtggcgttgtcaccttcaca

SEQ ID NO: 1566373 - DNA, 25 bp, Homo sapien
ctgagggtggcgttgtcaccttcac

SEQ ID NO: 1566374 - DNA, 25 bp, Homo sapien
gtcgctggtccagcggtcattgccg

SEQ ID NO: 1566375 - DNA, 25 bp, Homo sapien
tggtccagcggtcattgccggcata

SEQ ID NO: 1566376 - DNA, 25 bp, Homo sapien
ccagcggtcattgccggcatacagg

SEQ ID NO: 1566377 - DNA, 25 bp, Homo sapien
ccgcgggtcgctggtccagcggtca

SEQ ID NO: 1566378 - DNA, 25 bp, Homo sapien
agccaggccccggccaagggctcac

SEQ ID NO: 1566379 - DNA, 25 bp, Homo sapien
cacccagccaggccccggccaaggg

SEQ ID NO: 1566380 - DNA, 25 bp, Homo sapien
gctctcaacccctccacccagccag

SEQ ID NO: 1566381 - DNA, 25 bp, Homo sapien
cccagccaggccccggccaagggct

SEQ ID NO: 1566382 - DNA, 25 bp, Homo sapien
accgtcacaggcgacgagatgttca

SEQ ID NO: 1566383 - DNA, 25 bp, Homo sapien
gacgagatgttcacaatgcgggcag

SEQ ID NO: 1566384 - DNA, 25 bp, Homo sapien
tcattcaccgtcacaggcgacgaga

SEQ ID NO: 1566385 - DNA, 25 bp, Homo sapien
caggcaaagcaggttcacattgccc

SEQ ID NO: 1566386 - DNA, 25 bp, Homo sapien
cgcggcggctgtcgggcgccgagtt

SEQ ID NO: 1566387 - DNA, 25 bp, Homo sapien
ttgtgagtcacgcactcatactccc

SEQ ID NO: 1566388 - DNA, 25 bp, Homo sapien
tgactgtgaccagcacgcggcggct

SEQ ID NO: 1566389 - DNA, 25 bp, Homo sapien
ccccgttgtgagtcacgcactcata

SEQ ID NO: 1566390 - DNA, 25 bp, Homo sapien
gtcacgtccgtgatggtcggaggat

SEQ ID NO: 1566391 - DNA, 25 bp, Homo sapien
cgctggtcacgtccgtgatggtcgg

SEQ ID NO: 1566392 - DNA, 25 bp, Homo sapien
cggtgcgggcgctggtcacgtccgt

SEQ ID NO: 1566393 - DNA, 25 bp, Homo sapien
gcgggcgctggtcacgtccgtgatg

SEQ ID NO: 1566394 - DNA, 25 bp, Homo sapien
gagccgcatggaggcgctggacgct

SEQ ID NO: 1566395 - DNA, 25 bp, Homo sapien
cgtatagttgccgtaatgccgggcg

SEQ ID NO: 1566396 - DNA, 25 bp, Homo sapien
acacgtatagttgccgtaatgccgg

SEQ ID NO: 1566397 - DNA, 25 bp, Homo sapien
tagttgccgtaatgccgggcgctca

SEQ ID NO: 1566398 - DNA, 25 bp, Homo sapien
ttctgagcccactctttagcgtcct

SEQ ID NO: 1566399 - DNA, 25 bp, Homo sapien
ggaaccccatgtgtgtctctccagg

SEQ ID NO: 1566400 - DNA, 25 bp, Homo sapien
gggaaccccatgtgtgtctctccag

SEQ ID NO: 1566401 - DNA, 25 bp, Homo sapien
gcccactctttagcgtcctttctgg

SEQ ID NO: 1566402 - DNA, 25 bp, Homo sapien
tctgacagttggatggaagcaccga

SEQ ID NO: 1566403 - DNA, 25 bp, Homo sapien
ttgcgttatccctcacagtgatggg

SEQ ID NO: 1566404 - DNA, 25 bp, Homo sapien
cttgacaggtgagtgcgatgcccct

SEQ ID NO: 1566405 - DNA, 25 bp, Homo sapien
ccagggtggagtgttcctacagtca

SEQ ID NO: 1566406 - DNA, 25 bp, Homo sapien
gccagcaaggaggagcagcataccg

SEQ ID NO: 1566407 - DNA, 25 bp, Homo sapien
tcaaccttacagtggcgggtgagag

SEQ ID NO: 1566408 - DNA, 25 bp, Homo sapien
cggagacacctaggataagaggcgg

SEQ ID NO: 1566409 - DNA, 25 bp, Homo sapien
agaaggagctgggatacccgtggtg

SEQ ID NO: 1566410 - DNA, 25 bp, Homo sapien
tatgccggcctagatgcagatcctg

SEQ ID NO: 1566411 - DNA, 25 bp, Homo sapien
tacagaaagtggcatatgccggcct

SEQ ID NO: 1566412 - DNA, 25 bp, Homo sapien
tgctgatcctcgcagtgtggcggct

SEQ ID NO: 1566413 - DNA, 25 bp, Homo sapien
cacagggccacttccacgtcttggt

SEQ ID NO: 1566414 - DNA, 25 bp, Homo sapien
tatggttgactattaaggccctgag

SEQ ID NO: 1566415 - DNA, 25 bp, Homo sapien
caagggatacccagatttacaagtg

SEQ ID NO: 1566416 - DNA, 25 bp, Homo sapien
tctgcggtgcctagaatgtcaaggg

SEQ ID NO: 1566417 - DNA, 25 bp, Homo sapien
ttaaggagcactgaaactttggccg

SEQ ID NO: 1566418 - DNA, 25 bp, Homo sapien
cagaggtcaagttttcctgggcctt

SEQ ID NO: 1566419 - DNA, 25 bp, Homo sapien
tgggctgtggtaccgtcaccttata

SEQ ID NO: 1566420 - DNA, 25 bp, Homo sapien
cctgctcgtagatgaggtgttgcca

SEQ ID NO: 1566421 - DNA, 25 bp, Homo sapien
ccatatcaccgtttcacagaggtca

SEQ ID NO: 1566422 - DNA, 25 bp, Homo sapien
tttgagatggaatctccctctgttt

SEQ ID NO: 1566423 - DNA, 25 bp, Homo sapien
ttttttgagatggaatctccctctg

SEQ ID NO: 1566424 - DNA, 25 bp, Homo sapien
tttttgagatggaatctccctctgt

SEQ ID NO: 1566425 - DNA, 25 bp, Homo sapien
tgagatggaatctccctctgtttcc

SEQ ID NO: 1566426 - DNA, 25 bp, Homo sapien
aagaatctcccaccacggtctctgt

SEQ ID NO: 1566427 - DNA, 25 bp, Homo sapien
tgtgtgtttaactgggcctttgagg

SEQ ID NO: 1566428 - DNA, 25 bp, Homo sapien
ccggtgacggtcatctgtgtgttta

SEQ ID NO: 1566429 - DNA, 25 bp, Homo sapien
atgtctacatccccgagaccctgga

SEQ ID NO: 1566430 - DNA, 25 bp, Homo sapien
gattctggatacgagtgcaggagtc

SEQ ID NO: 1566431 - DNA, 25 bp, Homo sapien
tgccggagggcctgtgcatctctgt

SEQ ID NO: 1566432 - DNA, 25 bp, Homo sapien
cctcctatgcggagatgctactgcc

SEQ ID NO: 1566433 - DNA, 25 bp, Homo sapien
actcacagcacgaccagagaacagg

SEQ ID NO: 1566434 - DNA, 25 bp, Homo sapien
gcagcatttcggacatacttatacc

SEQ ID NO: 1566435 - DNA, 25 bp, Homo sapien
tgcattttacctgacaagaccagcc

SEQ ID NO: 1566436 - DNA, 25 bp, Homo sapien
ctgtgaaagctttaaccaggcatcc

SEQ ID NO: 1566437 - DNA, 25 bp, Homo sapien
cagtggcccagataagggtagctca

SEQ ID NO: 1566438 - DNA, 25 bp, Homo sapien
tgcaggttgtttgtttgatatggtt

SEQ ID NO: 1566439 - DNA, 25 bp, Homo sapien
cctgtatggcgggtctgtacttatt

SEQ ID NO: 1566440 - DNA, 25 bp, Homo sapien
tgcccaacctgtatggcgggtctgt

SEQ ID NO: 1566441 - DNA, 25 bp, Homo sapien
tattgcaggttgtttgtttgatatg

SEQ ID NO: 1566442 - DNA, 25 bp, Homo sapien
gggaccatggaaaagacctgtgcca

SEQ ID NO: 1566443 - DNA, 25 bp, Homo sapien
cttggggaccatggaaaagacctgt

SEQ ID NO: 1566444 - DNA, 25 bp, Homo sapien
cacttggggaccatggaaaagacct

SEQ ID NO: 1566445 - DNA, 25 bp, Homo sapien
ttggggaccatggaaaagacctgtg

SEQ ID NO: 1566446 - DNA, 25 bp, Homo sapien
ctgtcaggtgaagtttctcagagct

SEQ ID NO: 1566447 - DNA, 25 bp, Homo sapien
aggtgaagtttctcagagctggtgt

SEQ ID NO: 1566448 - DNA, 25 bp, Homo sapien
tgtcaggtgaagtttctcagagctg

SEQ ID NO: 1566449 - DNA, 25 bp, Homo sapien
tcaggtgaagtttctcagagctggt

SEQ ID NO: 1566450 - DNA, 25 bp, Homo sapien
ccttttgatcctgcatgccccccat

SEQ ID NO: 1566451 - DNA, 25 bp, Homo sapien
ccatgaggaagaccctcctccacag

SEQ ID NO: 1566452 - DNA, 25 bp, Homo sapien
ggctccatctgggtctggaaaggtc

SEQ ID NO: 1566453 - DNA, 25 bp, Homo sapien
tccatctgggtctggaaaggtccat

SEQ ID NO: 1566454 - DNA, 25 bp, Homo sapien
ctccacaggctccatctgggtctgg

SEQ ID NO: 1566455 - DNA, 25 bp, Homo sapien
tagtttcccgtgtcatttaatgcag

SEQ ID NO: 1566456 - DNA, 25 bp, Homo sapien
gataatcatgtttcctgcgctgtcg

SEQ ID NO: 1566457 - DNA, 25 bp, Homo sapien
aatgcagtcggcctgatcaacaggc

SEQ ID NO: 1566458 - DNA, 25 bp, Homo sapien
catcctcagggaccttatccagggc

SEQ ID NO: 1566459 - DNA, 25 bp, Homo sapien
tggcattgacggagatgcccagatt

SEQ ID NO: 1566460 - DNA, 25 bp, Homo sapien
attgacggagatgcccagattgctt

SEQ ID NO: 1566461 - DNA, 25 bp, Homo sapien
agctggcattgacggagatgcccag

SEQ ID NO: 1566462 - DNA, 25 bp, Homo sapien
gcattgacggagatgcccagattgc

SEQ ID NO: 1566463 - DNA, 25 bp, Homo sapien
tgtcatccggtcactactagaggta

SEQ ID NO: 1566464 - DNA, 25 bp, Homo sapien
aattgttctgtcatagcggctgacc

SEQ ID NO: 1566465 - DNA, 25 bp, Homo sapien
gggaaactctctatcatgcactgaa

SEQ ID NO: 1566466 - DNA, 25 bp, Homo sapien
gccacagtcagagagatgcgttcac

SEQ ID NO: 1566467 - DNA, 25 bp, Homo sapien
tcacaatgccgttgaaatcatcagg

SEQ ID NO: 1566468 - DNA, 25 bp, Homo sapien
gctcctcagcagcacatagtcgggc

SEQ ID NO: 1566469 - DNA, 25 bp, Homo sapien
tcaggagggagccattgtggatcca

SEQ ID NO: 1566470 - DNA, 25 bp, Homo sapien
acttgggagccgatctcagctgtca

SEQ ID NO: 1566471 - DNA, 25 bp, Homo sapien
gtgcatcggtaacggcccatctgct

SEQ ID NO: 1566472 - DNA, 25 bp, Homo sapien
gggcctggatcctgacgtccatgta

SEQ ID NO: 1566473 - DNA, 25 bp, Homo sapien
tctccacagtgcatcggtaacggcc

SEQ ID NO: 1566474 - DNA, 25 bp, Homo sapien
catgtacatgatcagctgtgtcacg

SEQ ID NO: 1566475 - DNA, 25 bp, Homo sapien
gggagatgtgcaaagcatgagcctg

SEQ ID NO: 1566476 - DNA, 25 bp, Homo sapien
ggagatgtgcaaagcatgagcctgg

SEQ ID NO: 1566477 - DNA, 25 bp, Homo sapien
gagatgtgcaaagcatgagcctgga

SEQ ID NO: 1566478 - DNA, 25 bp, Homo sapien
tctcggaacgatggagctgcttgtc

SEQ ID NO: 1566479 - DNA, 25 bp, Homo sapien
caagccaagtttctgacgccatggc

SEQ ID NO: 1566480 - DNA, 25 bp, Homo sapien
tgtagagcccctgcatttacctgct

SEQ ID NO: 1566481 - DNA, 25 bp, Homo sapien
ggttgctaagaagatgctttcccca

SEQ ID NO: 1566482 - DNA, 25 bp, Homo sapien
atgtaaacgccacccagcactgtca

SEQ ID NO: 1566483 - DNA, 25 bp, Homo sapien
gagcatggatcaggactccacagat

SEQ ID NO: 1566484 - DNA, 25 bp, Homo sapien
ggagaaatctctgtggacaacaggt

SEQ ID NO: 1566485 - DNA, 25 bp, Homo sapien
tgatgaggaacatcaccatggatcc

SEQ ID NO: 1566486 - DNA, 25 bp, Homo sapien
ccaggctttccatggactttttata

SEQ ID NO: 1566487 - DNA, 25 bp, Homo sapien
aattgtattcatcttcattgctgag

SEQ ID NO: 1566488 - DNA, 25 bp, Homo sapien
gctttccatggactttttatattaa

SEQ ID NO: 1566489 - DNA, 25 bp, Homo sapien
cgcgcccaggctttccatggacttt

SEQ ID NO: 1566490 - DNA, 25 bp, Homo sapien
aaagaagtatgacccctcagggagc

SEQ ID NO: 1566491 - DNA, 25 bp, Homo sapien
gcatcacatgcatggacaactggtt

SEQ ID NO: 1566492 - DNA, 25 bp, Homo sapien
cctaaccaatagctgtgaagtgggt

SEQ ID NO: 1566493 - DNA, 25 bp, Homo sapien
tcggtccctggaaagttgcaactgt

SEQ ID NO: 1566494 - DNA, 25 bp, Homo sapien
gatgttactgttcgtggtcacacca

SEQ ID NO: 1566495 - DNA, 25 bp, Homo sapien
catccaggtgattgtcggaggcatc

SEQ ID NO: 1566496 - DNA, 25 bp, Homo sapien
ttattgggatgaagatgtcgggcct

SEQ ID NO: 1566497 - DNA, 25 bp, Homo sapien
accagccctcggtaaagtcacctga

SEQ ID NO: 1566498 - DNA, 25 bp, Homo sapien
gttgttttagaaagcctactcaatg

SEQ ID NO: 1566499 - DNA, 25 bp, Homo sapien
tgttgttttagaaagcctactcaat

SEQ ID NO: 1566500 - DNA, 25 bp, Homo sapien
aaagatgtctttgatggcttaagag

SEQ ID NO: 1566501 - DNA, 25 bp, Homo sapien
aagcctactcaatgaaaacacattt

SEQ ID NO: 1566502 - DNA, 25 bp, Homo sapien
caatgtaccacaaaccgagtgacat

SEQ ID NO: 1566503 - DNA, 25 bp, Homo sapien
agtgtattggttactagggctgcca

SEQ ID NO: 1566504 - DNA, 25 bp, Homo sapien
tgttagaggtctgagaacaaggtgt

SEQ ID NO: 1566505 - DNA, 25 bp, Homo sapien
caaggtgttatcagggttggtccct

SEQ ID NO: 1566506 - DNA, 25 bp, Homo sapien
cagacaggcatagtttcagaccacc

SEQ ID NO: 1566507 - DNA, 25 bp, Homo sapien
gatgagcaggagctccactacgctg

SEQ ID NO: 1566508 - DNA, 25 bp, Homo sapien
ggccccatctcagaagatgagcagg

SEQ ID NO: 1566509 - DNA, 25 bp, Homo sapien
tgtcctacacttccacaaggtgcaa

SEQ ID NO: 1566510 - DNA, 25 bp, Homo sapien
gagagttttgtgtctaatcccatac

SEQ ID NO: 1566511 - DNA, 25 bp, Homo sapien
aatcccatacgtcttcctgcagctg

SEQ ID NO: 1566512 - DNA, 25 bp, Homo sapien
tttaaggattcagggcggtacagct

SEQ ID NO: 1566513 - DNA, 25 bp, Homo sapien
gaggcactctcttttaccgactaag

SEQ ID NO: 1566514 - DNA, 25 bp, Homo sapien
gctgctccatctagagtaggcttgc

SEQ ID NO: 1566515 - DNA, 25 bp, Homo sapien
gtattccttgaacagtaggccctag

SEQ ID NO: 1566516 - DNA, 25 bp, Homo sapien
tgctccatctagagtaggcttgcaa

SEQ ID NO: 1566517 - DNA, 25 bp, Homo sapien
acagtaggccctagatgtcccagaa

SEQ ID NO: 1566518 - DNA, 25 bp, Homo sapien
caaaatcccatttagggtagagagg

SEQ ID NO: 1566519 - DNA, 25 bp, Homo sapien
gaaaaggtgaacctagccagcacaa

SEQ ID NO: 1566520 - DNA, 25 bp, Homo sapien
cgtcccagttacataaagatgccaa

SEQ ID NO: 1566521 - DNA, 25 bp, Homo sapien
aaataccagtgggtgtgaacagcca

SEQ ID NO: 1566522 - DNA, 25 bp, Homo sapien
acggattatgatattggaggccgcc

SEQ ID NO: 1566523 - DNA, 25 bp, Homo sapien
cggattatgatattggaggccgcca

SEQ ID NO: 1566524 - DNA, 25 bp, Homo sapien
ggattatgatattggaggccgccat

SEQ ID NO: 1566525 - DNA, 25 bp, Homo sapien
tattcccaatcacttcagcgtccag

SEQ ID NO: 1566526 - DNA, 25 bp, Homo sapien
gcgacataggcttagatccacttaa

SEQ ID NO: 1566527 - DNA, 25 bp, Homo sapien
gaagctaaatggtcgctctaggcca

SEQ ID NO: 1566528 - DNA, 25 bp, Homo sapien
cgtcttcagccgagaaatcccttta

SEQ ID NO: 1566529 - DNA, 25 bp, Homo sapien
gaagcttgtcaagtcctcagtgcct

SEQ ID NO: 1566530 - DNA, 25 bp, Homo sapien
cctgcctggcacgtgataaatatga

SEQ ID NO: 1566531 - DNA, 25 bp, Homo sapien
tgggaaacttaaccaagatgaagct

SEQ ID NO: 1566532 - DNA, 25 bp, Homo sapien
gaaaagcaatgagtacatggtcact

SEQ ID NO: 1566533 - DNA, 25 bp, Homo sapien
ctccactctgggcttctactctcgg

SEQ ID NO: 1566534 - DNA, 25 bp, Homo sapien
tgtttggattttccaaccagggaca

SEQ ID NO: 1566535 - DNA, 25 bp, Homo sapien
ttctactctcggtctctcttgctga

SEQ ID NO: 1566536 - DNA, 25 bp, Homo sapien
tcgtactgggctatgaagagagatc

SEQ ID NO: 1566537 - DNA, 25 bp, Homo sapien
gaggcttctgggataaattcacatc

SEQ ID NO: 1566538 - DNA, 25 bp, Homo sapien
gttctggagaactatccccagggct

SEQ ID NO: 1566539 - DNA, 25 bp, Homo sapien
tttgccgcaccttatgagaacagag

SEQ ID NO: 1566540 - DNA, 25 bp, Homo sapien
tatctgtgggcaatctggaaacact

SEQ ID NO: 1566541 - DNA, 25 bp, Homo sapien
ccccatggaccaagcaaggaatttg

SEQ ID NO: 1566542 - DNA, 25 bp, Homo sapien
gcttctgatcagaccagggactaca

SEQ ID NO: 1566543 - DNA, 25 bp, Homo sapien
tgacgctcaggatcgtctcaaactc

SEQ ID NO: 1566544 - DNA, 25 bp, Homo sapien
cattgtcctgtaaacctctcaggtc

SEQ ID NO: 1566545 - DNA, 25 bp, Homo sapien
gtctccctatgacgctcaggatcgt

SEQ ID NO: 1566546 - DNA, 25 bp, Homo sapien
gtgtttctgaaggagtatctcattg

SEQ ID NO: 1566547 - DNA, 25 bp, Homo sapien
ccactgcgaagagatggctatagag

SEQ ID NO: 1566548 - DNA, 25 bp, Homo sapien
cgaagagatggctatagagctccag

SEQ ID NO: 1566549 - DNA, 25 bp, Homo sapien
ctgcgaagagatggctatagagctc

SEQ ID NO: 1566550 - DNA, 25 bp, Homo sapien
cactgcgaagagatggctatagagc

SEQ ID NO: 1566551 - DNA, 25 bp, Homo sapien
ctccacacgcggctccttttctttt

SEQ ID NO: 1566552 - DNA, 25 bp, Homo sapien
cttttagcattctgaagatgacctc

SEQ ID NO: 1566553 - DNA, 25 bp, Homo sapien
aagatgacctctgggttgggaatgt

SEQ ID NO: 1566554 - DNA, 25 bp, Homo sapien
tgatgtgagacttcagcctcctcca

SEQ ID NO: 1566555 - DNA, 25 bp, Homo sapien
gcaattttacccatatacaggtggt

SEQ ID NO: 1566556 - DNA, 25 bp, Homo sapien
tacaggtggtcatttattctggcaa

SEQ ID NO: 1566557 - DNA, 25 bp, Homo sapien
cactagtaatacacaaggattccag

SEQ ID NO: 1566558 - DNA, 25 bp, Homo sapien
tgtaaagggatatcacccagtggtt

SEQ ID NO: 1566559 - DNA, 25 bp, Homo sapien
tccttttgtgggatttcaagcccaa

SEQ ID NO: 1566560 - DNA, 25 bp, Homo sapien
ttgaaatgaagctttcttagaaatc

SEQ ID NO: 1566561 - DNA, 25 bp, Homo sapien
atctccttttgtgggatttcaagcc

SEQ ID NO: 1566562 - DNA, 25 bp, Homo sapien
ctccttttgtgggatttcaagccca

SEQ ID NO: 1566563 - DNA, 25 bp, Homo sapien
gaaagcactgtgactcatgggttga

SEQ ID NO: 1566564 - DNA, 25 bp, Homo sapien
tcatctttctttgtgcggtcagcat

SEQ ID NO: 1566565 - DNA, 25 bp, Homo sapien
ggcctcgtgcgaatcattttcccag

SEQ ID NO: 1566566 - DNA, 25 bp, Homo sapien
ccagggtccttatattcacaattgc

SEQ ID NO: 1566567 - DNA, 25 bp, Homo sapien
tgctttcattctgaccgttcacttc

SEQ ID NO: 1566568 - DNA, 25 bp, Homo sapien
tcattctgaccgttcacttctaggt

SEQ ID NO: 1566569 - DNA, 25 bp, Homo sapien
cagacccaacaacgtcatcaagctg

SEQ ID NO: 1566570 - DNA, 25 bp, Homo sapien
catcaagctgttctgtgtcattgct

SEQ ID NO: 1566571 - DNA, 25 bp, Homo sapien
ggtgcgtaagcaattctgatctctg

SEQ ID NO: 1566572 - DNA, 25 bp, Homo sapien
ctgttgggcaaagaggtgtgacttc

SEQ ID NO: 1566573 - DNA, 25 bp, Homo sapien
tgagtgactgtttatggccacagac

SEQ ID NO: 1566574 - DNA, 25 bp, Homo sapien
ccacattccttgcatatacagggta

SEQ ID NO: 1566575 - DNA, 25 bp, Homo sapien
tcccacagttgtggcactgataagg

SEQ ID NO: 1566576 - DNA, 25 bp, Homo sapien
ttgatggacaatcaggtgtgccttc

SEQ ID NO: 1566577 - DNA, 25 bp, Homo sapien
cgatgatgtatatcaagctgtgact

SEQ ID NO: 1566578 - DNA, 25 bp, Homo sapien
gcccgcattcgatacacacatagga

SEQ ID NO: 1566579 - DNA, 25 bp, Homo sapien
cgctgatgcaccttgagttgtggtt

SEQ ID NO: 1566580 - DNA, 25 bp, Homo sapien
ggtaaagcctttcacagaataactg

SEQ ID NO: 1566581 - DNA, 25 bp, Homo sapien
gaacgatttcccacagtcaaggcat

SEQ ID NO: 1566582 - DNA, 25 bp, Homo sapien
ttgtaacagacaaaaggcctctctc

SEQ ID NO: 1566583 - DNA, 25 bp, Homo sapien
taaataatcgagtaacaacctgtct

SEQ ID NO: 1566584 - DNA, 25 bp, Homo sapien
caatgcgttagtcagggtttcttcc

SEQ ID NO: 1566585 - DNA, 25 bp, Homo sapien
tgctgaccagaccatatacatatgt

SEQ ID NO: 1566586 - DNA, 25 bp, Homo sapien
tgtgttcacacatgcagtgcatccc

SEQ ID NO: 1566587 - DNA, 25 bp, Homo sapien
tttgttgactcctggtgtaaaaata

SEQ ID NO: 1566588 - DNA, 25 bp, Homo sapien
taaaaatatgaacgagactaatggt

SEQ ID NO: 1566589 - DNA, 25 bp, Homo sapien
gaacgagactaatggttggcactaa

SEQ ID NO: 1566590 - DNA, 25 bp, Homo sapien
ggcactaattatggagaggctcact

SEQ ID NO: 1566591 - DNA, 25 bp, Homo sapien
tgcaaaggagccacaaggcgagatc

SEQ ID NO: 1566592 - DNA, 25 bp, Homo sapien
ttgcttgccaccaaactagcgaggg

SEQ ID NO: 1566593 - DNA, 25 bp, Homo sapien
gaaaactttagatagctccctggga

SEQ ID NO: 1566594 - DNA, 25 bp, Homo sapien
tatcccacaggcattgagtacagac

SEQ ID NO: 1566595 - DNA, 25 bp, Homo sapien
taaatggcttctccaacgtgtagtg

SEQ ID NO: 1566596 - DNA, 25 bp, Homo sapien
ccaacgtgtagtggggttgggatga

SEQ ID NO: 1566597 - DNA, 25 bp, Homo sapien
aatggcttctccaacgtgtagtggg

SEQ ID NO: 1566598 - DNA, 25 bp, Homo sapien
ctccaacgtgtagtggggttgggat

SEQ ID NO: 1566599 - DNA, 25 bp, Homo sapien
acgaggagcgggcggaaggactacg

SEQ ID NO: 1566600 - DNA, 25 bp, Homo sapien
gccaacctccaaagaaacgaggagc

SEQ ID NO: 1566601 - DNA, 25 bp, Homo sapien
cgaggagcgggcggaaggactacga

SEQ ID NO: 1566602 - DNA, 25 bp, Homo sapien
ccaacctccaaagaaacgaggagcg

SEQ ID NO: 1566603 - DNA, 25 bp, Homo sapien
catggacggcggagggaggcgcatg

SEQ ID NO: 1566604 - DNA, 25 bp, Homo sapien
gaggcgcatgccacgtggcaggagg

SEQ ID NO: 1566605 - DNA, 25 bp, Homo sapien
agcacttggcccgagcatggacggc

SEQ ID NO: 1566606 - DNA, 25 bp, Homo sapien
gtgcagaagcaggaaccgcacagca

SEQ ID NO: 1566607 - DNA, 25 bp, Homo sapien
cccaggcccggtgccagcgtgcgca

SEQ ID NO: 1566608 - DNA, 25 bp, Homo sapien
agccatgagctgcagtaagatgccc

SEQ ID NO: 1566609 - DNA, 25 bp, Homo sapien
aggcccggtgccagcgtgcgcagca

SEQ ID NO: 1566610 - DNA, 25 bp, Homo sapien
ctgcagtaagatgcccaggcccggt

SEQ ID NO: 1566611 - DNA, 25 bp, Homo sapien
gctaagccacgcccgatgcccttgt

SEQ ID NO: 1566612 - DNA, 25 bp, Homo sapien
cccgctaagccacgcccgatgccct

SEQ ID NO: 1566613 - DNA, 25 bp, Homo sapien
agccacgcccgatgcccttgtctac

SEQ ID NO: 1566614 - DNA, 25 bp, Homo sapien
taagccacgcccgatgcccttgtct

SEQ ID NO: 1566615 - DNA, 25 bp, Homo sapien
tgtgactttcgatgagagacacctc

SEQ ID NO: 1566616 - DNA, 25 bp, Homo sapien
aattttccgtagtagcactcgtcag

SEQ ID NO: 1566617 - DNA, 25 bp, Homo sapien
caatgtgtgtaccaatgtgtccaga

SEQ ID NO: 1566618 - DNA, 25 bp, Homo sapien
gaatcgttttaacctggcacacgga

SEQ ID NO: 1566619 - DNA, 25 bp, Homo sapien
gagagacgggagagggtgaggtgcg

SEQ ID NO: 1566620 - DNA, 25 bp, Homo sapien
ggagagacgggagagggtgaggtgc

SEQ ID NO: 1566621 - DNA, 25 bp, Homo sapien
cgcaggaagttcatgagcacggtgt

SEQ ID NO: 1566622 - DNA, 25 bp, Homo sapien
ggaagttcatgagcacggtgtccac

SEQ ID NO: 1566623 - DNA, 25 bp, Homo sapien
gccccgcaggaagttcatgagcacg

SEQ ID NO: 1566624 - DNA, 25 bp, Homo sapien
cagccgccccgcaggaagttcatga

SEQ ID NO: 1566625 - DNA, 25 bp, Homo sapien
gggcggcagcgcggaagggcacccc

SEQ ID NO: 1566626 - DNA, 25 bp, Homo sapien
gaggcgaactgcagcgggcggcagc

SEQ ID NO: 1566627 - DNA, 25 bp, Homo sapien
cagcgggcggcagcgcggaagggca

SEQ ID NO: 1566628 - DNA, 25 bp, Homo sapien
ctgcgaggcgaactgcagcgggcgg

SEQ ID NO: 1566629 - DNA, 25 bp, Homo sapien
gctcctctcttctgagaagtagtcg

SEQ ID NO: 1566630 - DNA, 25 bp, Homo sapien
tcccgggcgctcctctcttctgaga

SEQ ID NO: 1566631 - DNA, 25 bp, Homo sapien
cccgggcgctcctctcttctgagaa

SEQ ID NO: 1566632 - DNA, 25 bp, Homo sapien
cctctcttctgagaagtagtcgagg

SEQ ID NO: 1566633 - DNA, 25 bp, Homo sapien
ccagcgccaggcgttcggccgagtg

SEQ ID NO: 1566634 - DNA, 25 bp, Homo sapien
gcgcggctggccagcgccccacagc

SEQ ID NO: 1566635 - DNA, 25 bp, Homo sapien
aggccagcgccaggcgttcggccga

SEQ ID NO: 1566636 - DNA, 25 bp, Homo sapien
gcgccaggcgttcggccgagtgcac

SEQ ID NO: 1566637 - DNA, 25 bp, Homo sapien
cggcccttgccgatggccaggcggg

SEQ ID NO: 1566638 - DNA, 25 bp, Homo sapien
ccccggcggcccttgccgatggcca

SEQ ID NO: 1566639 - DNA, 25 bp, Homo sapien
ggcggcccttgccgatggccaggcg

SEQ ID NO: 1566640 - DNA, 25 bp, Homo sapien
ccggcggcccttgccgatggccagg

SEQ ID NO: 1566641 - DNA, 25 bp, Homo sapien
ttattcacagtgtcatttacaggca

SEQ ID NO: 1566642 - DNA, 25 bp, Homo sapien
aaatgagggtgcagcacgcgctgca

SEQ ID NO: 1566643 - DNA, 25 bp, Homo sapien
ccccaggtcagttactgcggctcag

SEQ ID NO: 1566644 - DNA, 25 bp, Homo sapien
cggcaagggagattcaggtggtgat

SEQ ID NO: 1566645 - DNA, 25 bp, Homo sapien
gctcaggctactgccagtgaggccg

SEQ ID NO: 1566646 - DNA, 25 bp, Homo sapien
tgacgatggaggcattgtgtctgca

SEQ ID NO: 1566647 - DNA, 25 bp, Homo sapien
gcactgtgcgatggaactttcatga

SEQ ID NO: 1566648 - DNA, 25 bp, Homo sapien
tgttcaatatggtggtaaggagcac

SEQ ID NO: 1566649 - DNA, 25 bp, Homo sapien
taaatcggctcatgtggctagggct

SEQ ID NO: 1566650 - DNA, 25 bp, Homo sapien
ccaggatacctaggatgtgaatgtc

SEQ ID NO: 1566651 - DNA, 25 bp, Homo sapien
caggatacctaggatgtgaatgtca

SEQ ID NO: 1566652 - DNA, 25 bp, Homo sapien
acccagattccaggatacctaggat

SEQ ID NO: 1566653 - DNA, 25 bp, Homo sapien
ccagattccaggatacctaggatgt

SEQ ID NO: 1566654 - DNA, 25 bp, Homo sapien
atagccacgaactggatctgggtcc

SEQ ID NO: 1566655 - DNA, 25 bp, Homo sapien
atccaggtgaggatggcccccttcc

SEQ ID NO: 1566656 - DNA, 25 bp, Homo sapien
ttccagaaccaatagccacgaactg

SEQ ID NO: 1566657 - DNA, 25 bp, Homo sapien
ccttccagaaccaatagccacgaac

SEQ ID NO: 1566658 - DNA, 25 bp, Homo sapien
ccagaatggaggacacgggaagcta

SEQ ID NO: 1566659 - DNA, 25 bp, Homo sapien
tcacctgtcagatgaaacgccaagg

SEQ ID NO: 1566660 - DNA, 25 bp, Homo sapien
tgaccacggagagaactgtccagct

SEQ ID NO: 1566661 - DNA, 25 bp, Homo sapien
tccaggatcctgtgaagcgggacca

SEQ ID NO: 1566662 - DNA, 25 bp, Homo sapien
taatttccctaagtgcatgtagcaa

SEQ ID NO: 1566663 - DNA, 25 bp, Homo sapien
gccatgtgaggataccacgaaaaga

SEQ ID NO: 1566664 - DNA, 25 bp, Homo sapien
ttaacccataatggtgccatccttc

SEQ ID NO: 1566665 - DNA, 25 bp, Homo sapien
catgtagcaaagagagtgcaatatt

SEQ ID NO: 1566666 - DNA, 25 bp, Homo sapien
gttaaaactctacctcattgtgatt

SEQ ID NO: 1566667 - DNA, 25 bp, Homo sapien
ttaaaactctacctcattgtgatta

SEQ ID NO: 1566668 - DNA, 25 bp, Homo sapien
taaaactctacctcattgtgattat

SEQ ID NO: 1566669 - DNA, 25 bp, Homo sapien
agtgcccctgaatcaaacctctgca

SEQ ID NO: 1566670 - DNA, 25 bp, Homo sapien
gtttggtaggtccagtgcccctgaa

SEQ ID NO: 1566671 - DNA, 25 bp, Homo sapien
tctcaagggagcttgacctctgctg

SEQ ID NO: 1566672 - DNA, 25 bp, Homo sapien
gagagacatccgatatcttttgttt

SEQ ID NO: 1566673 - DNA, 25 bp, Homo sapien
ttaatggctcagtgcatctgttttc

SEQ ID NO: 1566674 - DNA, 25 bp, Homo sapien
tcccaggaattacacagtcgagtcc

SEQ ID NO: 1566675 - DNA, 25 bp, Homo sapien
ttcccaggaattacacagtcgagtc

SEQ ID NO: 1566676 - DNA, 25 bp, Homo sapien
ttttcccaggaattacacagtcgag

SEQ ID NO: 1566677 - DNA, 25 bp, Homo sapien
gggaggcacatcttatacacgagcc

SEQ ID NO: 1566678 - DNA, 25 bp, Homo sapien
tcttatacacgagcctgaaaaccca

SEQ ID NO: 1566679 - DNA, 25 bp, Homo sapien
gcacatcttatacacgagcctgaaa

SEQ ID NO: 1566680 - DNA, 25 bp, Homo sapien
tatacacgagcctgaaaacccagtc

SEQ ID NO: 1566681 - DNA, 25 bp, Homo sapien
gcatgatacactgtgcccggataat

SEQ ID NO: 1566682 - DNA, 25 bp, Homo sapien
atgatacactgtgcccggataattt

SEQ ID NO: 1566683 - DNA, 25 bp, Homo sapien
tacactgtgcccggataatttctgt

SEQ ID NO: 1566684 - DNA, 25 bp, Homo sapien
cactgtgcccggataatttctgttg

SEQ ID NO: 1566685 - DNA, 25 bp, Homo sapien
aatttaaaacttagcagggcatggt

SEQ ID NO: 1566686 - DNA, 25 bp, Homo sapien
tagtgggattcccatctctacaata

SEQ ID NO: 1566687 - DNA, 25 bp, Homo sapien
atagtgggattcccatctctacaat

SEQ ID NO: 1566688 - DNA, 25 bp, Homo sapien
cagggcatggtgatgcatgcttctt

SEQ ID NO: 1566689 - DNA, 25 bp, Homo sapien
gtgtgcggcgaaggccccgcaaggt

SEQ ID NO: 1566690 - DNA, 25 bp, Homo sapien
ccacagacacgagcttgtgtgcggc

SEQ ID NO: 1566691 - DNA, 25 bp, Homo sapien
cagacacgagcttgtgtgcggcgaa

SEQ ID NO: 1566692 - DNA, 25 bp, Homo sapien
tgtgtgcggcgaaggccccgcaagg

SEQ ID NO: 1566693 - DNA, 25 bp, Homo sapien
gtgtcctcctcaactatacaacctc

SEQ ID NO: 1566694 - DNA, 25 bp, Homo sapien
gggaaagctaggaggccgtatagtg

SEQ ID NO: 1566695 - DNA, 25 bp, Homo sapien
gaggccgtatagtgatctccttggg

SEQ ID NO: 1566696 - DNA, 25 bp, Homo sapien
cgtatagtgatctccttgggtgtcc

SEQ ID NO: 1566697 - DNA, 25 bp, Homo sapien
atgtcctcacaggttaaagggtctc

SEQ ID NO: 1566698 - DNA, 25 bp, Homo sapien
gtcctcacaggttaaagggtctcag

SEQ ID NO: 1566699 - DNA, 25 bp, Homo sapien
ggtctcagggacctagagactggca

SEQ ID NO: 1566700 - DNA, 25 bp, Homo sapien
agggtctcagggacctagagactgg

SEQ ID NO: 1566701 - DNA, 25 bp, Homo sapien
cctttatgaagtcaccacagggcgg

SEQ ID NO: 1566702 - DNA, 25 bp, Homo sapien
ttcagttggtggtcaaatgtcatgc

SEQ ID NO: 1566703 - DNA, 25 bp, Homo sapien
caggccagcaattccccaggtgtgt

SEQ ID NO: 1566704 - DNA, 25 bp, Homo sapien
gaagtcaggccagcaattccccagg

SEQ ID NO: 1566705 - DNA, 25 bp, Homo sapien
cagggcagacgggacggcactggcc

SEQ ID NO: 1566706 - DNA, 25 bp, Homo sapien
cagcagggcagacgggacggcactg

SEQ ID NO: 1566707 - DNA, 25 bp, Homo sapien
ggccagcagggcagacgggacggca

SEQ ID NO: 1566708 - DNA, 25 bp, Homo sapien
ccagcagggcagacgggacggcact

SEQ ID NO: 1566709 - DNA, 25 bp, Homo sapien
tggcagatgcggaggcgctcagagt

SEQ ID NO: 1566710 - DNA, 25 bp, Homo sapien
ggcgctcagagtaggttgtgaagca

SEQ ID NO: 1566711 - DNA, 25 bp, Homo sapien
tgatttcggtgtcagagaggccctg

SEQ ID NO: 1566712 - DNA, 25 bp, Homo sapien
aagcttggggctccgcatcccaaca

SEQ ID NO: 1566713 - DNA, 25 bp, Homo sapien
ttcaagcttggggctccgcatccca

SEQ ID NO: 1566714 - DNA, 25 bp, Homo sapien
actcttcaagcttggggctccgcat

SEQ ID NO: 1566715 - DNA, 25 bp, Homo sapien
gagtctccatctttccgagtctcca

SEQ ID NO: 1566716 - DNA, 25 bp, Homo sapien
cacagtcgctatgcttcctgagtcc

SEQ ID NO: 1566717 - DNA, 25 bp, Homo sapien
cactgatgaagtgtggatggtctcc

SEQ ID NO: 1566718 - DNA, 25 bp, Homo sapien
catgtccctaatgcgaacattctgt

SEQ ID NO: 1566719 - DNA, 25 bp, Homo sapien
ctgcagggcatgggtcatctgggtg

SEQ ID NO: 1566720 - DNA, 25 bp, Homo sapien
cctgcagggcatgggtcatctgggt

SEQ ID NO: 1566721 - DNA, 25 bp, Homo sapien
tgcagggcatgggtcatctgggtga

SEQ ID NO: 1566722 - DNA, 25 bp, Homo sapien
tcagggaaggcaacctcaaaggatc

SEQ ID NO: 1566723 - DNA, 25 bp, Homo sapien
gcatcagggaaggcaacctcaaagg

SEQ ID NO: 1566724 - DNA, 25 bp, Homo sapien
catcagggaaggcaacctcaaagga

SEQ ID NO: 1566725 - DNA, 25 bp, Homo sapien
atcagggaaggcaacctcaaaggat

SEQ ID NO: 1566726 - DNA, 25 bp, Homo sapien
ttgcccgatgctcccctagctaatg

SEQ ID NO: 1566727 - DNA, 25 bp, Homo sapien
gggcggggccaagctttcgtcataa

SEQ ID NO: 1566728 - DNA, 25 bp, Homo sapien
aaggcccgaagcattgctccgaggg

SEQ ID NO: 1566729 - DNA, 25 bp, Homo sapien
tcatgggaagaacccttgcccgatg

SEQ ID NO: 1566730 - DNA, 25 bp, Homo sapien
ggaagaggaaacatcactaccttac

SEQ ID NO: 1566731 - DNA, 25 bp, Homo sapien
gaggaagaggaaacatcactacctt

SEQ ID NO: 1566732 - DNA, 25 bp, Homo sapien
tggaggaagaggaaacatcactacc

SEQ ID NO: 1566733 - DNA, 25 bp, Homo sapien
ctgtggaggaagaggaaacatcact

SEQ ID NO: 1566734 - DNA, 25 bp, Homo sapien
gctttcccacacttgatgtcgtacg

SEQ ID NO: 1566735 - DNA, 25 bp, Homo sapien
cttctgaggatttagagcaatactt

SEQ ID NO: 1566736 - DNA, 25 bp, Homo sapien
ttctccagggatcttattggcttcc

SEQ ID NO: 1566737 - DNA, 25 bp, Homo sapien
tgatgtcgtacgtttcgtccccgac

SEQ ID NO: 1566738 - DNA, 25 bp, Homo sapien
ggaacgctgggtctaggcgccacct

SEQ ID NO: 1566739 - DNA, 25 bp, Homo sapien
ggtccatcggccaggtggcatcttg

SEQ ID NO: 1566740 - DNA, 25 bp, Homo sapien
tcctattggtttgcttcggctctca

SEQ ID NO: 1566741 - DNA, 25 bp, Homo sapien
ttggcccatttgagatccatgcagc

SEQ ID NO: 1566742 - DNA, 25 bp, Homo sapien
ggtcgcagaccctagagtagcaccc

SEQ ID NO: 1566743 - DNA, 25 bp, Homo sapien
agtagcacccgctgcagaggaaacg

SEQ ID NO: 1566744 - DNA, 25 bp, Homo sapien
ctgcagaggaaacgccgggcgaact

SEQ ID NO: 1566745 - DNA, 25 bp, Homo sapien
agtccagcgggaggtcgcagaccct

SEQ ID NO: 1566746 - DNA, 25 bp, Homo sapien
ctgaagacggagcagggttcactcg

SEQ ID NO: 1566747 - DNA, 25 bp, Homo sapien
tgggccccgaccacgtctggcctcg

SEQ ID NO: 1566748 - DNA, 25 bp, Homo sapien
gtctggcctcgccaccagcttatgc

SEQ ID NO: 1566749 - DNA, 25 bp, Homo sapien
gggttcactcgctgggccccgacca

SEQ ID NO: 1566750 - DNA, 25 bp, Homo sapien
tccaggaataggtgatctcctcctt

SEQ ID NO: 1566751 - DNA, 25 bp, Homo sapien
cctttggcagctggaagtttacgat

SEQ ID NO: 1566752 - DNA, 25 bp, Homo sapien
tgcaagaaaacatagcctggtcgcc

SEQ ID NO: 1566753 - DNA, 25 bp, Homo sapien
tggtcgccccgagtcactgtcacat

SEQ ID NO: 1566754 - DNA, 25 bp, Homo sapien
tttaaacgcctcaactccggcttgc

SEQ ID NO: 1566755 - DNA, 25 bp, Homo sapien
gcgaccctcctcttgctgatgcttg

SEQ ID NO: 1566756 - DNA, 25 bp, Homo sapien
tctgatcttcgagctctcccctaaa

SEQ ID NO: 1566757 - DNA, 25 bp, Homo sapien
tctagacggagattcccggagtccc

SEQ ID NO: 1566758 - DNA, 25 bp, Homo sapien
cttgatcacgcaggagaacgtcccg

SEQ ID NO: 1566759 - DNA, 25 bp, Homo sapien
ggcgctggtcttgcttgatcacgca

SEQ ID NO: 1566760 - DNA, 25 bp, Homo sapien
ttcggcccgcggcatatctcggaaa

SEQ ID NO: 1566761 - DNA, 25 bp, Homo sapien
ggatccgcgccaggtatccttcggc

SEQ ID NO: 1566762 - DNA, 25 bp, Homo sapien
gggcgcgcacgtcagccaggcacga

SEQ ID NO: 1566763 - DNA, 25 bp, Homo sapien
ctcccgaccccgctcactcacgcgg

SEQ ID NO: 1566764 - DNA, 25 bp, Homo sapien
gcacgtcagccaggcacgagcccca

SEQ ID NO: 1566765 - DNA, 25 bp, Homo sapien
tgcgggggcgcgcacgtcagccagg

SEQ ID NO: 1566766 - DNA, 25 bp, Homo sapien
gcagcacttcccggaacgaggcctg

SEQ ID NO: 1566767 - DNA, 25 bp, Homo sapien
ctccagggctcgatcagctcggcat

SEQ ID NO: 1566768 - DNA, 25 bp, Homo sapien
agggctcgatcagctcggcatcccg

SEQ ID NO: 1566769 - DNA, 25 bp, Homo sapien
gaacagattgctgggcgtcagagcc

SEQ ID NO: 1566770 - DNA, 25 bp, Homo sapien
gcactcgctgatgcgagggccccga

SEQ ID NO: 1566771 - DNA, 25 bp, Homo sapien
gtcgcactcgctgatgcgagggccc

SEQ ID NO: 1566772 - DNA, 25 bp, Homo sapien
actgtcgcactcgctgatgcgaggg

SEQ ID NO: 1566773 - DNA, 25 bp, Homo sapien
tgtcgcactcgctgatgcgagggcc

SEQ ID NO: 1566774 - DNA, 25 bp, Homo sapien
cttctcggtgggatctgagacagcg

SEQ ID NO: 1566775 - DNA, 25 bp, Homo sapien
ggggctccggagtccccagaactca

SEQ ID NO: 1566776 - DNA, 25 bp, Homo sapien
gaacccagacttctcggtgggatct

SEQ ID NO: 1566777 - DNA, 25 bp, Homo sapien
ccagacttctcggtgggatctgaga

SEQ ID NO: 1566778 - DNA, 25 bp, Homo sapien
caaagaggtatgtgtgttacaggag

SEQ ID NO: 1566779 - DNA, 25 bp, Homo sapien
caccagggtcaaaaaggtgtacagg

SEQ ID NO: 1566780 - DNA, 25 bp, Homo sapien
tgactagaaacttaggtcccggagc

SEQ ID NO: 1566781 - DNA, 25 bp, Homo sapien
gcctgggcttttgggtctgaaggaa

SEQ ID NO: 1566782 - DNA, 25 bp, Homo sapien
gttagttgccactgcagtaccatcg

SEQ ID NO: 1566783 - DNA, 25 bp, Homo sapien
aaagatacctttgttagttgccact

SEQ ID NO: 1566784 - DNA, 25 bp, Homo sapien
cactgcagtaccatcgaaagaacat

SEQ ID NO: 1566785 - DNA, 25 bp, Homo sapien
ttttcaggatggaaataggataggg

SEQ ID NO: 1566786 - DNA, 25 bp, Homo sapien
tcctacctgagttagtagtgaccac

SEQ ID NO: 1566787 - DNA, 25 bp, Homo sapien
tatgcgggccatattcatctgggca

SEQ ID NO: 1566788 - DNA, 25 bp, Homo sapien
cttgcactgggatagctatgcctat

SEQ ID NO: 1566789 - DNA, 25 bp, Homo sapien
ggcatgtgtgggcttgctgcacctc

SEQ ID NO: 1566790 - DNA, 25 bp, Homo sapien
catggcagagggtttgactgcacag

SEQ ID NO: 1566791 - DNA, 25 bp, Homo sapien
tttcacatgcttcacggccacacgt

SEQ ID NO: 1566792 - DNA, 25 bp, Homo sapien
cggtgcagatctagaatatttccaa

SEQ ID NO: 1566793 - DNA, 25 bp, Homo sapien
acacgtggctggtgctgcgctactg

SEQ ID NO: 1566794 - DNA, 25 bp, Homo sapien
tgctggtccccatatcaggtggtgg

SEQ ID NO: 1566795 - DNA, 25 bp, Homo sapien
tcaccttgagttaggctgagccaca

SEQ ID NO: 1566796 - DNA, 25 bp, Homo sapien
cagaatccgtgagttattgcaaggc

SEQ ID NO: 1566797 - DNA, 25 bp, Homo sapien
tattgcagtggatgtgacaagtgcc

SEQ ID NO: 1566798 - DNA, 25 bp, Homo sapien
cggggtcctgggcaacgggcttgtg

SEQ ID NO: 1566799 - DNA, 25 bp, Homo sapien
ctcggggtcctgggcaacgggcttg

SEQ ID NO: 1566800 - DNA, 25 bp, Homo sapien
gggtcctgggcaacgggcttgtgat

SEQ ID NO: 1566801 - DNA, 25 bp, Homo sapien
ggggtcctgggcaacgggcttgtga

SEQ ID NO: 1566802 - DNA, 25 bp, Homo sapien
tcaagggtcaaggaatctgaatgtc

SEQ ID NO: 1566803 - DNA, 25 bp, Homo sapien
tctaagggctttcgcggagactact

SEQ ID NO: 1566804 - DNA, 25 bp, Homo sapien
caccttgggtatgttgtcagcggac

SEQ ID NO: 1566805 - DNA, 25 bp, Homo sapien
tgtggagcaacaccggctctaaggg

SEQ ID NO: 1566806 - DNA, 25 bp, Homo sapien
ggatgcttatgacctcaaggctgca

SEQ ID NO: 1566807 - DNA, 25 bp, Homo sapien
gcatttgaagctcaattggccaccg

SEQ ID NO: 1566808 - DNA, 25 bp, Homo sapien
gacatttcaaacctaacgtggctca

SEQ ID NO: 1566809 - DNA, 25 bp, Homo sapien
caaatgcagtgggtgcaaatccata

SEQ ID NO: 1566810 - DNA, 25 bp, Homo sapien
aacattccaacaatggccatttctc

SEQ ID NO: 1566811 - DNA, 25 bp, Homo sapien
ctgaaacattccaacaatggccatt

SEQ ID NO: 1566812 - DNA, 25 bp, Homo sapien
cattccaacaatggccatttctcag

SEQ ID NO: 1566813 - DNA, 25 bp, Homo sapien
gaaacattccaacaatggccatttc

SEQ ID NO: 1566814 - DNA, 25 bp, Homo sapien
gaagacacttccaaagaggttgatg

SEQ ID NO: 1566815 - DNA, 25 bp, Homo sapien
gaggatccgcagaacagtgtagcca

SEQ ID NO: 1566816 - DNA, 25 bp, Homo sapien
gaattaacttacacaggaaccagcc

SEQ ID NO: 1566817 - DNA, 25 bp, Homo sapien
tagccagcagactcataggacactt

SEQ ID NO: 1566818 - DNA, 25 bp, Homo sapien
gaaaactggcaaggtaaggactaga

SEQ ID NO: 1566819 - DNA, 25 bp, Homo sapien
gctgtcagcatggtaatggccacct

SEQ ID NO: 1566820 - DNA, 25 bp, Homo sapien
tagttactgtagtcaaaaagaggaa

SEQ ID NO: 1566821 - DNA, 25 bp, Homo sapien
cccatttggaatagttactgtagtc

SEQ ID NO: 1566822 - DNA, 25 bp, Homo sapien
gccagggagctcgttgggttaacca

SEQ ID NO: 1566823 - DNA, 25 bp, Homo sapien
gtgaagcagaattggcagccgtgtc

SEQ ID NO: 1566824 - DNA, 25 bp, Homo sapien
gctaaagccaatgacaaaccggata

SEQ ID NO: 1566825 - DNA, 25 bp, Homo sapien
tggcaacaatggacatcggcaagct

SEQ ID NO: 1566826 - DNA, 25 bp, Homo sapien
ccagggtataggcagaagtcaaaaa

SEQ ID NO: 1566827 - DNA, 25 bp, Homo sapien
gaataaatacttgagctgtgcatcc

SEQ ID NO: 1566828 - DNA, 25 bp, Homo sapien
ctcaagggtagatgaagctggaact

SEQ ID NO: 1566829 - DNA, 25 bp, Homo sapien
tgaatgcctcaatatgactcaaggg

SEQ ID NO: 1566830 - DNA, 25 bp, Homo sapien
aagaaatctgagagtccaggccctt

SEQ ID NO: 1566831 - DNA, 25 bp, Homo sapien
tgttcatgcccactgaaactggcct

SEQ ID NO: 1566832 - DNA, 25 bp, Homo sapien
taggtcagtccaaaccacttacttg

SEQ ID NO: 1566833 - DNA, 25 bp, Homo sapien
ccattcccagaagacaccttggaga

SEQ ID NO: 1566834 - DNA, 25 bp, Homo sapien
caccagcttagatccttttcctgtg

SEQ ID NO: 1566835 - DNA, 25 bp, Homo sapien
gagcaactcaggctctaagtacttg

SEQ ID NO: 1566836 - DNA, 25 bp, Homo sapien
ggctttggttataaagatggaatca

SEQ ID NO: 1566837 - DNA, 25 bp, Homo sapien
aaaagatgaagttatatgtttggtt

SEQ ID NO: 1566838 - DNA, 25 bp, Homo sapien
aatagaatagacatggactggaggc

SEQ ID NO: 1566839 - DNA, 25 bp, Homo sapien
tctgatcttatctctgacacctcga

SEQ ID NO: 1566840 - DNA, 25 bp, Homo sapien
gtaacagtgtaaagagtaccaggct

SEQ ID NO: 1566841 - DNA, 25 bp, Homo sapien
gccagtagcaactccccattcagga

SEQ ID NO: 1566842 - DNA, 25 bp, Homo sapien
gtgcggcttcaatgaggcgacgaca

SEQ ID NO: 1566843 - DNA, 25 bp, Homo sapien
ggtgtggcgcacttcaagttcaggg

SEQ ID NO: 1566844 - DNA, 25 bp, Homo sapien
ggcagcctcacatcgtgggttggat

SEQ ID NO: 1566845 - DNA, 25 bp, Homo sapien
cgacagtgttaaagttcgagaggtt

SEQ ID NO: 1566846 - DNA, 25 bp, Homo sapien
gagatgtggtgtcgataatcacgct

SEQ ID NO: 1566847 - DNA, 25 bp, Homo sapien
gctgtttcaacttctattgggccgt

SEQ ID NO: 1566848 - DNA, 25 bp, Homo sapien
tatgactgggaaatttaggcgacgc

SEQ ID NO: 1566849 - DNA, 25 bp, Homo sapien
ggcctcatttgatcaagccaatttg

SEQ ID NO: 1566850 - DNA, 25 bp, Homo sapien
aaagtggtttttaggccgagtgcag

SEQ ID NO: 1566851 - DNA, 25 bp, Homo sapien
ggctcatgcctgtaatccctgcact

SEQ ID NO: 1566852 - DNA, 25 bp, Homo sapien
aagtggtttttaggccgagtgcagt

SEQ ID NO: 1566853 - DNA, 25 bp, Homo sapien
catgcctgtaatccctgcactttgg

SEQ ID NO: 1566854 - DNA, 25 bp, Homo sapien
gggtttcgccatgtatcctagactg

SEQ ID NO: 1566855 - DNA, 25 bp, Homo sapien
tttcgccatgtatcctagactggtt

SEQ ID NO: 1566856 - DNA, 25 bp, Homo sapien
ggtttcgccatgtatcctagactgg

SEQ ID NO: 1566857 - DNA, 25 bp, Homo sapien
cgccatgtatcctagactggtttca

SEQ ID NO: 1566858 - DNA, 25 bp, Homo sapien
aagatccacagaacggtgtggccag

SEQ ID NO: 1566859 - DNA, 25 bp, Homo sapien
gactagcaatgagaagatccacaga

SEQ ID NO: 1566860 - DNA, 25 bp, Homo sapien
ggtgactccgtggactagcaatgag

SEQ ID NO: 1566861 - DNA, 25 bp, Homo sapien
ccccgaagacaaaggtgactccgtg

SEQ ID NO: 1566862 - DNA, 25 bp, Homo sapien
gagccaaaaggccatttttctctca

SEQ ID NO: 1566863 - DNA, 25 bp, Homo sapien
agccaaaaggccatttttctctcat

SEQ ID NO: 1566864 - DNA, 25 bp, Homo sapien
ttggccagactcatggtgcgatggt

SEQ ID NO: 1566865 - DNA, 25 bp, Homo sapien
tgatggtgatcaggtagacactgac

SEQ ID NO: 1566866 - DNA, 25 bp, Homo sapien
actcatggtgcgatggttctgggcc

SEQ ID NO: 1566867 - DNA, 25 bp, Homo sapien
caaacaggttgatgtctatcataac

SEQ ID NO: 1566868 - DNA, 25 bp, Homo sapien
tgtgaattttggcagcgatgatccc

SEQ ID NO: 1566869 - DNA, 25 bp, Homo sapien
cagcgaagacacgtaagggacggct

SEQ ID NO: 1566870 - DNA, 25 bp, Homo sapien
gatgatcccatagcagactgtgatg

SEQ ID NO: 1566871 - DNA, 25 bp, Homo sapien
caaactagtgggcaaagagcgaatc

SEQ ID NO: 1566872 - DNA, 25 bp, Homo sapien
tagtgggaaccctgattgaagctgg

SEQ ID NO: 1566873 - DNA, 25 bp, Homo sapien
gacttgtgtctcaactggaggagca

SEQ ID NO: 1566874 - DNA, 25 bp, Homo sapien
gaggatcccatcctatacactggag

SEQ ID NO: 1566875 - DNA, 25 bp, Homo sapien
gagacagagcccaaaaatatccccg

SEQ ID NO: 1566876 - DNA, 25 bp, Homo sapien
atgagcaagcgtggtttatttcata

SEQ ID NO: 1566877 - DNA, 25 bp, Homo sapien
tctgtgagacagattataaatgttc

SEQ ID NO: 1566878 - DNA, 25 bp, Homo sapien
atgtaaaagctaacaaggacagtag

SEQ ID NO: 1566879 - DNA, 25 bp, Homo sapien
taaaagctaacaaggacagtagaga

SEQ ID NO: 1566880 - DNA, 25 bp, Homo sapien
aagtgaaataacagagccatctcta

SEQ ID NO: 1566881 - DNA, 25 bp, Homo sapien
tcctcagcgtcgagtggaagtcggt

SEQ ID NO: 1566882 - DNA, 25 bp, Homo sapien
ggagcatcctcagcgtcgagtggaa

SEQ ID NO: 1566883 - DNA, 25 bp, Homo sapien
gattggagcatcctcagcgtcgagt

SEQ ID NO: 1566884 - DNA, 25 bp, Homo sapien
gagggcttctgtggtctggattgga

SEQ ID NO: 1566885 - DNA, 25 bp, Homo sapien
gagaatgcacaacgctgctggtagc

SEQ ID NO: 1566886 - DNA, 25 bp, Homo sapien
caggtgagaacgctgaatgttgttc

SEQ ID NO: 1566887 - DNA, 25 bp, Homo sapien
acagtagaagatcagctgcattgcc

SEQ ID NO: 1566888 - DNA, 25 bp, Homo sapien
gaatttagtcgccagaaaatggcca

SEQ ID NO: 1566889 - DNA, 25 bp, Homo sapien
tgtggtttagaagaacgaggcagcg

SEQ ID NO: 1566890 - DNA, 25 bp, Homo sapien
tcgtgtggtttagaagaacgaggca

SEQ ID NO: 1566891 - DNA, 25 bp, Homo sapien
ctttcgtgtggtttagaagaacgag

SEQ ID NO: 1566892 - DNA, 25 bp, Homo sapien
tggtttagaagaacgaggcagcgtg

SEQ ID NO: 1566893 - DNA, 25 bp, Homo sapien
ttcgtccagatccagttctaggtct

SEQ ID NO: 1566894 - DNA, 25 bp, Homo sapien
cacctctgttcgtccagatccagtt

SEQ ID NO: 1566895 - DNA, 25 bp, Homo sapien
ccataccacctctgttcgtccagat

SEQ ID NO: 1566896 - DNA, 25 bp, Homo sapien
cagttctaggtctcctaatctccat

SEQ ID NO: 1566897 - DNA, 25 bp, Homo sapien
tcagggaatggtctttgagagcata

SEQ ID NO: 1566898 - DNA, 25 bp, Homo sapien
tttgagagcataggctgctggcttg

SEQ ID NO: 1566899 - DNA, 25 bp, Homo sapien
agctttcagggaatggtctttgaga

SEQ ID NO: 1566900 - DNA, 25 bp, Homo sapien
aatggtctttgagagcataggctgc

SEQ ID NO: 1566901 - DNA, 25 bp, Homo sapien
tcagaatctgggactcctggtcgtt

SEQ ID NO: 1566902 - DNA, 25 bp, Homo sapien
tccaaagagcaggaagctaaaggct

SEQ ID NO: 1566903 - DNA, 25 bp, Homo sapien
tttctactgagtctgcgcaatagcc

SEQ ID NO: 1566904 - DNA, 25 bp, Homo sapien
ggactcctggtcgttccagtttcta

SEQ ID NO: 1566905 - DNA, 25 bp, Homo sapien
agaggcagcccattagcccaaaaga

SEQ ID NO: 1566906 - DNA, 25 bp, Homo sapien
tcagaggcagcccattagcccaaaa

SEQ ID NO: 1566907 - DNA, 25 bp, Homo sapien
caaaagaatggccagcacgctgtct

SEQ ID NO: 1566908 - DNA, 25 bp, Homo sapien
ggccagcacgctgtctggtggcact

SEQ ID NO: 1566909 - DNA, 25 bp, Homo sapien
tttgtccgatgttcagaatcagaaa

SEQ ID NO: 1566910 - DNA, 25 bp, Homo sapien
gcctctctctgacatgtcttctttt

SEQ ID NO: 1566911 - DNA, 25 bp, Homo sapien
attgtcacaattctaaaagctgggc

SEQ ID NO: 1566912 - DNA, 25 bp, Homo sapien
ggagggaaattgagtaattgtcaca

SEQ ID NO: 1566913 - DNA, 25 bp, Homo sapien
ggaggtcttcgttgcacagtagcgc

SEQ ID NO: 1566914 - DNA, 25 bp, Homo sapien
ggttttcaggttcattgcgacccaa

SEQ ID NO: 1566915 - DNA, 25 bp, Homo sapien
ttcgcagtcgtgttggagttcccag

SEQ ID NO: 1566916 - DNA, 25 bp, Homo sapien
ggtctccgcattggaaccagtgctt

SEQ ID NO: 1566917 - DNA, 25 bp, Homo sapien
cttggaactgatccctattcatttc

SEQ ID NO: 1566918 - DNA, 25 bp, Homo sapien
tggaactgatccctattcatttctt

SEQ ID NO: 1566919 - DNA, 25 bp, Homo sapien
tcttcttgcttggattttcacatct

SEQ ID NO: 1566920 - DNA, 25 bp, Homo sapien
gatgttgagttgcttcccctaagtt

SEQ ID NO: 1566921 - DNA, 25 bp, Homo sapien
gcccggagggaatgtgtcaccaaat

SEQ ID NO: 1566922 - DNA, 25 bp, Homo sapien
gacacctgacaaagggatgcttaga

SEQ ID NO: 1566923 - DNA, 25 bp, Homo sapien
tagccaaaatttagggaggatccag

SEQ ID NO: 1566924 - DNA, 25 bp, Homo sapien
gaaaccaaagacgaagcatcccagt

SEQ ID NO: 1566925 - DNA, 25 bp, Homo sapien
cgcgggacggtgaagaactccatat

SEQ ID NO: 1566926 - DNA, 25 bp, Homo sapien
ctttgaatcctgcacgtacggaagg

SEQ ID NO: 1566927 - DNA, 25 bp, Homo sapien
tattttcagagggtcgagcttagcc

SEQ ID NO: 1566928 - DNA, 25 bp, Homo sapien
caagtattcagggatagcgcgggac

SEQ ID NO: 1566929 - DNA, 25 bp, Homo sapien
tcgtcacggatactggaggcagcca

SEQ ID NO: 1566930 - DNA, 25 bp, Homo sapien
ctgaagttgcaggtgtacggagcac

SEQ ID NO: 1566931 - DNA, 25 bp, Homo sapien
acggagcacggacgactgggaggta

SEQ ID NO: 1566932 - DNA, 25 bp, Homo sapien
ctgggaggtagtaagttcgcgtcct

SEQ ID NO: 1566933 - DNA, 25 bp, Homo sapien
acctgcactttcctgaattattcca

SEQ ID NO: 1566934 - DNA, 25 bp, Homo sapien
tcctgaattattccacttctgggcc

SEQ ID NO: 1566935 - DNA, 25 bp, Homo sapien
cgagacttcccagaacctgcacttt

SEQ ID NO: 1566936 - DNA, 25 bp, Homo sapien
gcactttcctgaattattccacttc

SEQ ID NO: 1566937 - DNA, 25 bp, Homo sapien
tgatcacggacttccaagtgttgct

SEQ ID NO: 1566938 - DNA, 25 bp, Homo sapien
ctcaatcaccgagccctacagagtg

SEQ ID NO: 1566939 - DNA, 25 bp, Homo sapien
aaaggcaccaaaccctgatcacgga

SEQ ID NO: 1566940 - DNA, 25 bp, Homo sapien
cccgaatccgaagcagacacagttt

SEQ ID NO: 1566941 - DNA, 25 bp, Homo sapien
tgggaaaatcacctgagccccggga

SEQ ID NO: 1566942 - DNA, 25 bp, Homo sapien
ggaaaatcacctgagccccgggaga

SEQ ID NO: 1566943 - DNA, 25 bp, Homo sapien
aaatcacctgagccccgggagatgg

SEQ ID NO: 1566944 - DNA, 25 bp, Homo sapien
cgggaaagctgaggtgggaaaatca

SEQ ID NO: 1566945 - DNA, 25 bp, Homo sapien
agatagatagatagcgtggtggcgc

SEQ ID NO: 1566946 - DNA, 25 bp, Homo sapien
atagatagatagcgtggtggcgctc

SEQ ID NO: 1566947 - DNA, 25 bp, Homo sapien
gatagatagatagcgtggtggcgct

SEQ ID NO: 1566948 - DNA, 25 bp, Homo sapien
cattttagatttgattaatctttga

SEQ ID NO: 1566949 - DNA, 25 bp, Homo sapien
tagatttgattaatctttgatcttc

SEQ ID NO: 1566950 - DNA, 25 bp, Homo sapien
gattaatctttgatcttccccaaag

SEQ ID NO: 1566951 - DNA, 25 bp, Homo sapien
taatctttgatcttccccaaagctt

SEQ ID NO: 1566952 - DNA, 25 bp, Homo sapien
acaaagcaatattttacaagatgga

SEQ ID NO: 1566953 - DNA, 25 bp, Homo sapien
ttttacaagatggataaatgtggct

SEQ ID NO: 1566954 - DNA, 25 bp, Homo sapien
ttgaaatgcaccaaaaaacaaagca

SEQ ID NO: 1566955 - DNA, 25 bp, Homo sapien
tacaagatggataaatgtggctggg

SEQ ID NO: 1566956 - DNA, 25 bp, Homo sapien
gaaatagccagtaagtaggatgctg

SEQ ID NO: 1566957 - DNA, 25 bp, Homo sapien
gctagaaatcttggtctctggtgaa

SEQ ID NO: 1566958 - DNA, 25 bp, Homo sapien
cctgcaaaggatggtatccaggtcc

SEQ ID NO: 1566959 - DNA, 25 bp, Homo sapien
ctggtgaattacatccctgcaaagg

SEQ ID NO: 1566960 - DNA, 25 bp, Homo sapien
gaaggtgacagctactataacccac

SEQ ID NO: 1566961 - DNA, 25 bp, Homo sapien
gcatatcctgtgaccaaggactctc

SEQ ID NO: 1566962 - DNA, 25 bp, Homo sapien
tatcctgtgaccaaggactctctgg

SEQ ID NO: 1566963 - DNA, 25 bp, Homo sapien
tataacccacaggatgctccggtca

SEQ ID NO: 1566964 - DNA, 25 bp, Homo sapien
gtcctgcttaatatgaagtatttct

SEQ ID NO: 1566965 - DNA, 25 bp, Homo sapien
tgtaataagagagtcctgcttaata

SEQ ID NO: 1566966 - DNA, 25 bp, Homo sapien
agagagtcctgcttaatatgaagta

SEQ ID NO: 1566967 - DNA, 25 bp, Homo sapien
taagagagtcctgcttaatatgaag

SEQ ID NO: 1566968 - DNA, 25 bp, Homo sapien
tcccaagtgaactccacagccacat

SEQ ID NO: 1566969 - DNA, 25 bp, Homo sapien
cacgtctcggtacaggtccttctga

SEQ ID NO: 1566970 - DNA, 25 bp, Homo sapien
tccttctgagcagggccgaggagct

SEQ ID NO: 1566971 - DNA, 25 bp, Homo sapien
gaggagctgccactcctcccaagtg

SEQ ID NO: 1566972 - DNA, 25 bp, Homo sapien
cgaggttgctatagttctccaacat

SEQ ID NO: 1566973 - DNA, 25 bp, Homo sapien
cactgacacgaggttgctatagttc

SEQ ID NO: 1566974 - DNA, 25 bp, Homo sapien
ccactgacacgaggttgctatagtt

SEQ ID NO: 1566975 - DNA, 25 bp, Homo sapien
acacgaggttgctatagttctccaa

SEQ ID NO: 1566976 - DNA, 25 bp, Homo sapien
aggccctccagagcttttgaaagct

SEQ ID NO: 1566977 - DNA, 25 bp, Homo sapien
accacaggccctccagagcttttga

SEQ ID NO: 1566978 - DNA, 25 bp, Homo sapien
tttgactgggtactctctgagtgac

SEQ ID NO: 1566979 - DNA, 25 bp, Homo sapien
agcaaaggcctttgactgggtactc

SEQ ID NO: 1566980 - DNA, 25 bp, Homo sapien
tcattttctactgtccatggctctc

SEQ ID NO: 1566981 - DNA, 25 bp, Homo sapien
tttatggcattgttccactctcttc

SEQ ID NO: 1566982 - DNA, 25 bp, Homo sapien
gtagatgattgtcaactttcttgat

SEQ ID NO: 1566983 - DNA, 25 bp, Homo sapien
ttatgtttatggcattgttccactc

SEQ ID NO: 1566984 - DNA, 25 bp, Homo sapien
tgtttatggcattgttccactctct

SEQ ID NO: 1566985 - DNA, 25 bp, Homo sapien
tacgtcgatgaataaggaggttgcc

SEQ ID NO: 1566986 - DNA, 25 bp, Homo sapien
cagtgagcccggactttctggagaa

SEQ ID NO: 1566987 - DNA, 25 bp, Homo sapien
cagtgagcctggaccttttggagaa

SEQ ID NO: 1566988 - DNA, 25 bp, Homo sapien
ctgatgattaatgagccgagacttc

SEQ ID NO: 1566989 - DNA, 25 bp, Homo sapien
gagactgaacttctggcaacaggct

SEQ ID NO: 1566990 - DNA, 25 bp, Homo sapien
tctggcaacaggctggctcacaatg

SEQ ID NO: 1566991 - DNA, 25 bp, Homo sapien
gaacttctggcaacaggctggctca

SEQ ID NO: 1566992 - DNA, 25 bp, Homo sapien
tggctcacaatggctactttgctct

SEQ ID NO: 1566993 - DNA, 25 bp, Homo sapien
tgatgtgtaacactgacaacccctt

SEQ ID NO: 1566994 - DNA, 25 bp, Homo sapien
tctaccaactataagctcactgaag

SEQ ID NO: 1566995 - DNA, 25 bp, Homo sapien
ggcgtactgtttctgaacaaggact

SEQ ID NO: 1566996 - DNA, 25 bp, Homo sapien
tgatcactgaaagcactaccacatt

SEQ ID NO: 1566997 - DNA, 25 bp, Homo sapien
atacaatctgttgggagtttagggc

SEQ ID NO: 1566998 - DNA, 25 bp, Homo sapien
gagtatttctgagggcctcttcagg

SEQ ID NO: 1566999 - DNA, 25 bp, Homo sapien
ccaacaaggtgtgccaaaggcgaag

SEQ ID NO: 1567000 - DNA, 25 bp, Homo sapien
gaagaagcatcgtggctgcagttca

SEQ ID NO: 1567001 - DNA, 25 bp, Homo sapien
tattgtgacgtatcatggccacgcc

SEQ ID NO: 1567002 - DNA, 25 bp, Homo sapien
cgttgctagggacttcgagggccct

SEQ ID NO: 1567003 - DNA, 25 bp, Homo sapien
gcgtctgaccgcgaaaccagccgtt

SEQ ID NO: 1567004 - DNA, 25 bp, Homo sapien
gccgttcccagacgacagaattcct

SEQ ID NO: 1567005 - DNA, 25 bp, Homo sapien
tctcttaattactgaccgccaggcg

SEQ ID NO: 1567006 - DNA, 25 bp, Homo sapien
cacaggcctttcacttggagccaca

SEQ ID NO: 1567007 - DNA, 25 bp, Homo sapien
tgagcctgcgtccaaaacgacttac

SEQ ID NO: 1567008 - DNA, 25 bp, Homo sapien
tgcaaacccggaatggacaccaagt

SEQ ID NO: 1567009 - DNA, 25 bp, Homo sapien
caaccttctgatgtgatactgccat

SEQ ID NO: 1567010 - DNA, 25 bp, Homo sapien
taatgtgactccatttactaagcca

SEQ ID NO: 1567011 - DNA, 25 bp, Homo sapien
gccacttaagaataaatgtaaccat

SEQ ID NO: 1567012 - DNA, 25 bp, Homo sapien
gaacttgagtaattggagtatcaga

SEQ ID NO: 1567013 - DNA, 25 bp, Homo sapien
tcacagatcaacaggataagaattt

SEQ ID NO: 1567014 - DNA, 25 bp, Homo sapien
acagatcaacaggataagaattttt

SEQ ID NO: 1567015 - DNA, 25 bp, Homo sapien
ggtcacagatcaacaggataagaat

SEQ ID NO: 1567016 - DNA, 25 bp, Homo sapien
cagatcaacaggataagaatttttc

SEQ ID NO: 1567017 - DNA, 25 bp, Homo sapien
ttccttagccccacttaagagttgc

SEQ ID NO: 1567018 - DNA, 25 bp, Homo sapien
agacaaaactgagaggcatcccaga

SEQ ID NO: 1567019 - DNA, 25 bp, Homo sapien
cccagaatgctgtctgaagaagtga

SEQ ID NO: 1567020 - DNA, 25 bp, Homo sapien
gccccacttaagagttgcaatttta

SEQ ID NO: 1567021 - DNA, 25 bp, Homo sapien
ttagattaccctgtgatcagcctcc

SEQ ID NO: 1567022 - DNA, 25 bp, Homo sapien
tcctagggcgatagagactctactg

SEQ ID NO: 1567023 - DNA, 25 bp, Homo sapien
gtttactgtgaatccgtccagtgtt

SEQ ID NO: 1567024 - DNA, 25 bp, Homo sapien
cctgaccttctagcttttacaggta

SEQ ID NO: 1567025 - DNA, 25 bp, Homo sapien
ggaaatttgccttgtggctaggtca

SEQ ID NO: 1567026 - DNA, 25 bp, Homo sapien
aattcaacagaaatcctgggttact

SEQ ID NO: 1567027 - DNA, 25 bp, Homo sapien
agttacagtaagtgctgctcatagg

SEQ ID NO: 1567028 - DNA, 25 bp, Homo sapien
catatggatacactgtccaagttac

SEQ ID NO: 1567029 - DNA, 25 bp, Homo sapien
ggaaatctcattgtacaccagcgaa

SEQ ID NO: 1567030 - DNA, 25 bp, Homo sapien
gatcaccaggtaatgcatacaggag

SEQ ID NO: 1567031 - DNA, 25 bp, Homo sapien
gaacatcagcgaactcatacaggag

SEQ ID NO: 1567032 - DNA, 25 bp, Homo sapien
gaaatcacggctcaacatacatcag

SEQ ID NO: 1567033 - DNA, 25 bp, Homo sapien
ggtgcagtggaagtaggggtcagct

SEQ ID NO: 1567034 - DNA, 25 bp, Homo sapien
ggcaggagcaatggtgagtttgctc

SEQ ID NO: 1567035 - DNA, 25 bp, Homo sapien
cggcaggagcaatggtgagtttgct

SEQ ID NO: 1567036 - DNA, 25 bp, Homo sapien
gcgtgcttggagtccctgttctggt

SEQ ID NO: 1567037 - DNA, 25 bp, Homo sapien
ctagttgggcgtgcttggagtccct

SEQ ID NO: 1567038 - DNA, 25 bp, Homo sapien
ttgtaacctgcacggacctaggtgg

SEQ ID NO: 1567039 - DNA, 25 bp, Homo sapien
ccttgaagtcccatgtttggatgct

SEQ ID NO: 1567040 - DNA, 25 bp, Homo sapien
tcccttgttaccctgagtcagaaaa

SEQ ID NO: 1567041 - DNA, 25 bp, Homo sapien
tctggtgggtagatctaatcctgca

SEQ ID NO: 1567042 - DNA, 25 bp, Homo sapien
ggtttgtctcccctaactaatgtga

SEQ ID NO: 1567043 - DNA, 25 bp, Homo sapien
tgttatggcgagtacagagtcctgc

SEQ ID NO: 1567044 - DNA, 25 bp, Homo sapien
taatcggagtcagtcattcctagga

SEQ ID NO: 1567045 - DNA, 25 bp, Homo sapien
tcggctgctcagttcagagtaggct

SEQ ID NO: 1567046 - DNA, 25 bp, Homo sapien
ggtcagggagcaccttacctctagt

SEQ ID NO: 1567047 - DNA, 25 bp, Homo sapien
accttatgttggcaggagcagtcct

SEQ ID NO: 1567048 - DNA, 25 bp, Homo sapien
gatgtcgcagtagataacctcggtg

SEQ ID NO: 1567049 - DNA, 25 bp, Homo sapien
agccaccacgcaggactggaatgtt

SEQ ID NO: 1567050 - DNA, 25 bp, Homo sapien
taccaattgtatgtggccttccatt

SEQ ID NO: 1567051 - DNA, 25 bp, Homo sapien
tttattttacctattctattgtgtg

SEQ ID NO: 1567052 - DNA, 25 bp, Homo sapien
ctattgtgtgtgtattggtatgaat

SEQ ID NO: 1567053 - DNA, 25 bp, Homo sapien
gatgtaggcccttaagatatctgca

SEQ ID NO: 1567054 - DNA, 25 bp, Homo sapien
catcgtgtgctaggaaataatgcag

SEQ ID NO: 1567055 - DNA, 25 bp, Homo sapien
atttgggaacaggatagcttgagcc

SEQ ID NO: 1567056 - DNA, 25 bp, Homo sapien
gaaaaatcctatgaatgtggcagac

SEQ ID NO: 1567057 - DNA, 25 bp, Homo sapien
tgatgaacacgtgtaggctccctgg

SEQ ID NO: 1567058 - DNA, 25 bp, Homo sapien
tccaggtgtgagacaatgagaagtt

SEQ ID NO: 1567059 - DNA, 25 bp, Homo sapien
aacagtaagtgttaggagttggcac

SEQ ID NO: 1567060 - DNA, 25 bp, Homo sapien
ggctccctggatgaagagtgttcca

SEQ ID NO: 1567061 - DNA, 25 bp, Homo sapien
tccagcgtatcctcttggatatttc

SEQ ID NO: 1567062 - DNA, 25 bp, Homo sapien
agtttccagcgtatcctcttggata

SEQ ID NO: 1567063 - DNA, 25 bp, Homo sapien
cagcgtatcctcttggatatttctt

SEQ ID NO: 1567064 - DNA, 25 bp, Homo sapien
ctgcaagtttccagcgtatcctctt

SEQ ID NO: 1567065 - DNA, 25 bp, Homo sapien
gatagtcgccgtcaggcactgagga

SEQ ID NO: 1567066 - DNA, 25 bp, Homo sapien
taagttcagtcactgggtggtcgct

SEQ ID NO: 1567067 - DNA, 25 bp, Homo sapien
caggagcttagcgtgggtccgattc

SEQ ID NO: 1567068 - DNA, 25 bp, Homo sapien
tgcatctgcgcaaacgctgggaacg

SEQ ID NO: 1567069 - DNA, 25 bp, Homo sapien
caccgcgcccatcttttttcttatt

SEQ ID NO: 1567070 - DNA, 25 bp, Homo sapien
ccaccgcgcccatcttttttcttat

SEQ ID NO: 1567071 - DNA, 25 bp, Homo sapien
acttggatggcagattaggtgaccc

SEQ ID NO: 1567072 - DNA, 25 bp, Homo sapien
gatctctaagagacaagcaagcctt

SEQ ID NO: 1567073 - DNA, 25 bp, Homo sapien
tacacagtcaacaagaggctagtct

SEQ ID NO: 1567074 - DNA, 25 bp, Homo sapien
ttagtaacaattgggactgctgggc

SEQ ID NO: 1567075 - DNA, 25 bp, Homo sapien
gcttacctggctactttgattcaca

SEQ ID NO: 1567076 - DNA, 25 bp, Homo sapien
aatgaggtagtttagttgaggtcct

SEQ ID NO: 1567077 - DNA, 25 bp, Homo sapien
tactccaaaaggtagtgacttgaaa

SEQ ID NO: 1567078 - DNA, 25 bp, Homo sapien
gctcaggaataagggcatggcttac

SEQ ID NO: 1567079 - DNA, 25 bp, Homo sapien
aactcaagaggaggcagtcttgtag

SEQ ID NO: 1567080 - DNA, 25 bp, Homo sapien
tcttgtaggattgaacccttaaatc

SEQ ID NO: 1567081 - DNA, 25 bp, Homo sapien
acttcccagatggcggcggtggtgt

SEQ ID NO: 1567082 - DNA, 25 bp, Homo sapien
acttcccagacgttgcgggggccag

SEQ ID NO: 1567083 - DNA, 25 bp, Homo sapien
attgcttttgggagtagaggtgggg

SEQ ID NO: 1567084 - DNA, 25 bp, Homo sapien
ctgattggggctgtatttgaacgca

SEQ ID NO: 1567085 - DNA, 25 bp, Homo sapien
tttgaacgcagtcgctgaggaagcg

SEQ ID NO: 1567086 - DNA, 25 bp, Homo sapien
ctgtgggtctgtgtaccgatggtgc

SEQ ID NO: 1567087 - DNA, 25 bp, Homo sapien
ccgatggtgcgtggagcgtcctgat

SEQ ID NO: 1567088 - DNA, 25 bp, Homo sapien
gatgcggcgttttgtcgctgccagt

SEQ ID NO: 1567089 - DNA, 25 bp, Homo sapien
ggtctttaccgctcagcttcccgga

SEQ ID NO: 1567090 - DNA, 25 bp, Homo sapien
cattatggccgctcctgtcagaaac

SEQ ID NO: 1567091 - DNA, 25 bp, Homo sapien
tgtcagaaacgctgcgatgggcgca

SEQ ID NO: 1567092 - DNA, 25 bp, Homo sapien
ggcttcgtccattcagtcagagtct

SEQ ID NO: 1567093 - DNA, 25 bp, Homo sapien
tgagtgtcccttgcaacgaagagag

SEQ ID NO: 1567094 - DNA, 25 bp, Homo sapien
gctgaatagaatgccactgcgccgt

SEQ ID NO: 1567095 - DNA, 25 bp, Homo sapien
gttttggcaactctgtgaccgcttc

SEQ ID NO: 1567096 - DNA, 25 bp, Homo sapien
aacatggcattctctacctatgaac

SEQ ID NO: 1567097 - DNA, 25 bp, Homo sapien
taaatgtcttgtttaaccaatcaca

SEQ ID NO: 1567098 - DNA, 25 bp, Homo sapien
gatatatactcttacagttcagcag

SEQ ID NO: 1567099 - DNA, 25 bp, Homo sapien
aaaatatatactatcctgcagatca

SEQ ID NO: 1567100 - DNA, 25 bp, Homo sapien
tacgtcacgtactcaaagatggccg

SEQ ID NO: 1567101 - DNA, 25 bp, Homo sapien
taaccgctaagaagggatgccgcgc

SEQ ID NO: 1567102 - DNA, 25 bp, Homo sapien
gaaatcggacagtttaagaggcctc

SEQ ID NO: 1567103 - DNA, 25 bp, Homo sapien
tcagcttttaagaggtcgcggcgat

SEQ ID NO: 1567104 - DNA, 25 bp, Homo sapien
tatacggcttctaaaacgcttcgca

SEQ ID NO: 1567105 - DNA, 25 bp, Homo sapien
gttccaccgcaagcttctcagagag

SEQ ID NO: 1567106 - DNA, 25 bp, Homo sapien
aagggctctggctccgttacctgca

SEQ ID NO: 1567107 - DNA, 25 bp, Homo sapien
gagaatatgttctgccgtacggaca

SEQ ID NO: 1567108 - DNA, 25 bp, Homo sapien
cattagtgtcatcatatcatagcca

SEQ ID NO: 1567109 - DNA, 25 bp, Homo sapien
tagccagatctacaaccccagagta

SEQ ID NO: 1567110 - DNA, 25 bp, Homo sapien
ccccagagtaattcccatggttatg

SEQ ID NO: 1567111 - DNA, 25 bp, Homo sapien
gaaaccatcataagacataacttgt

SEQ ID NO: 1567112 - DNA, 25 bp, Homo sapien
tgatgtgcacgagcacaaacatttc

SEQ ID NO: 1567113 - DNA, 25 bp, Homo sapien
tctgcatatggaggacctgcgcagc

SEQ ID NO: 1567114 - DNA, 25 bp, Homo sapien
gcacaaacatttcggtgcaataaag

SEQ ID NO: 1567115 - DNA, 25 bp, Homo sapien
ctggcgctctgcatatggaggacct

SEQ ID NO: 1567116 - DNA, 25 bp, Homo sapien
tgtggtggctggtaccggtcgttcc

SEQ ID NO: 1567117 - DNA, 25 bp, Homo sapien
cctagcatctatggtctttataatt

SEQ ID NO: 1567118 - DNA, 25 bp, Homo sapien
ctgatgggtcctgactctatccaat

SEQ ID NO: 1567119 - DNA, 25 bp, Homo sapien
cacactgatgggtcctgactctatc

SEQ ID NO: 1567120 - DNA, 25 bp, Homo sapien
cacttcaagctccacctctcgggtt

SEQ ID NO: 1567121 - DNA, 25 bp, Homo sapien
cttcaagctccacctctcgggttct

SEQ ID NO: 1567122 - DNA, 25 bp, Homo sapien
tcacttcaagctccacctctcgggt

SEQ ID NO: 1567123 - DNA, 25 bp, Homo sapien
tcaagctccacctctcgggttcttg

SEQ ID NO: 1567124 - DNA, 25 bp, Homo sapien
aagactgcccattgttccaggctgg

SEQ ID NO: 1567125 - DNA, 25 bp, Homo sapien
tcctgtgcatatgggatttctgacc

SEQ ID NO: 1567126 - DNA, 25 bp, Homo sapien
tggaataggtggagagttgcccata

SEQ ID NO: 1567127 - DNA, 25 bp, Homo sapien
gatttccatggttgaggatgtagcc

SEQ ID NO: 1567128 - DNA, 25 bp, Homo sapien
taaccagttctgacactgcttagtt

SEQ ID NO: 1567129 - DNA, 25 bp, Homo sapien
aagtactaaccagttctgacactgc

SEQ ID NO: 1567130 - DNA, 25 bp, Homo sapien
caagtactaaccagttctgacactg

SEQ ID NO: 1567131 - DNA, 25 bp, Homo sapien
agttctgacactgcttagtttctga

SEQ ID NO: 1567132 - DNA, 25 bp, Homo sapien
gccaagtcgagtcctcattcgggat

SEQ ID NO: 1567133 - DNA, 25 bp, Homo sapien
tgtagacaaccccattcaggtagtg

SEQ ID NO: 1567134 - DNA, 25 bp, Homo sapien
cacgtcctgggattctgcagaccct

SEQ ID NO: 1567135 - DNA, 25 bp, Homo sapien
ggatgtggactagcgcccttcgcga

SEQ ID NO: 1567136 - DNA, 25 bp, Homo sapien
tggattaaacgtttgcttctcttcg

SEQ ID NO: 1567137 - DNA, 25 bp, Homo sapien
aacgtttgcttctcttcgtctacct

SEQ ID NO: 1567138 - DNA, 25 bp, Homo sapien
gtgcacttcgcagtcctcggttctc

SEQ ID NO: 1567139 - DNA, 25 bp, Homo sapien
tctaccttgattaaacgtgcacttc

SEQ ID NO: 1567140 - DNA, 25 bp, Homo sapien
gtcccttgtatgtcaacccaaggat

SEQ ID NO: 1567141 - DNA, 25 bp, Homo sapien
ctataggttcttcgtcccttgtatg

SEQ ID NO: 1567142 - DNA, 25 bp, Homo sapien
taggttcttcgtcccttgtatgtca

SEQ ID NO: 1567143 - DNA, 25 bp, Homo sapien
tcttcgtcccttgtatgtcaaccca

SEQ ID NO: 1567144 - DNA, 25 bp, Homo sapien
tgagttcctaatgacgtcaccacaa

SEQ ID NO: 1567145 - DNA, 25 bp, Homo sapien
tttgttcccactgcgaattcctggg

SEQ ID NO: 1567146 - DNA, 25 bp, Homo sapien
catgcctgaagtccgcgtgggtgtt

SEQ ID NO: 1567147 - DNA, 25 bp, Homo sapien
gaaaatggcagtcttcctagataat

SEQ ID NO: 1567148 - DNA, 25 bp, Homo sapien
tgcagcgtcaaaaagtggtcctccc

SEQ ID NO: 1567149 - DNA, 25 bp, Homo sapien
taggagatacttgaacacaaacacg

SEQ ID NO: 1567150 - DNA, 25 bp, Homo sapien
taacaacgctaactgagatgactac

SEQ ID NO: 1567151 - DNA, 25 bp, Homo sapien
tgtggctacaccgtataaagggatg

SEQ ID NO: 1567152 - DNA, 25 bp, Homo sapien
tggattctatgaaggaacaatactt

SEQ ID NO: 1567153 - DNA, 25 bp, Homo sapien
cacacgttgtgttgccgccgtggct

SEQ ID NO: 1567154 - DNA, 25 bp, Homo sapien
acacgttgtgttgccgccgtggctc

SEQ ID NO: 1567155 - DNA, 25 bp, Homo sapien
ggattctatgaaggaacaatactta

SEQ ID NO: 1567156 - DNA, 25 bp, Homo sapien
ttgtgttgccgccgtggctctaagg

SEQ ID NO: 1567157 - DNA, 25 bp, Homo sapien
cgttgtgttgccgccgtggctctaa

SEQ ID NO: 1567158 - DNA, 25 bp, Homo sapien
aagtattgttccttcatagaatcca

SEQ ID NO: 1567159 - DNA, 25 bp, Homo sapien
taagtattgttccttcatagaatcc

SEQ ID NO: 1567160 - DNA, 25 bp, Homo sapien
ccttagagccacggcggcaacacaa

SEQ ID NO: 1567161 - DNA, 25 bp, Homo sapien
agccacggcggcaacacaacgtgtg

SEQ ID NO: 1567162 - DNA, 25 bp, Homo sapien
ttagagccacggcggcaacacaacg

SEQ ID NO: 1567163 - DNA, 25 bp, Homo sapien
gagccacggcggcaacacaacgtgt

SEQ ID NO: 1567164 - DNA, 25 bp, Homo sapien
gaatgtctatgattagtcatgcaat

SEQ ID NO: 1567165 - DNA, 25 bp, Homo sapien
tatgattagtcatgcaataaatgtt

SEQ ID NO: 1567166 - DNA, 25 bp, Homo sapien
tgattagtcatgcaataaatgttct

SEQ ID NO: 1567167 - DNA, 25 bp, Homo sapien
aatgtctatgattagtcatgcaata

SEQ ID NO: 1567168 - DNA, 25 bp, Homo sapien
tctatgattagtcatgcaataaatg

SEQ ID NO: 1567169 - DNA, 25 bp, Homo sapien
tgtctatgattagtcatgcaataaa

SEQ ID NO: 1567170 - DNA, 25 bp, Homo sapien
attgcatgactaatcatagacattc

SEQ ID NO: 1567171 - DNA, 25 bp, Homo sapien
aacatttattgcatgactaatcata

SEQ ID NO: 1567172 - DNA, 25 bp, Homo sapien
tttattgcatgactaatcatagaca

SEQ ID NO: 1567173 - DNA, 25 bp, Homo sapien
catttattgcatgactaatcataga

SEQ ID NO: 1567174 - DNA, 25 bp, Homo sapien
agaacatttattgcatgactaatca

SEQ ID NO: 1567175 - DNA, 25 bp, Homo sapien
tattgcatgactaatcatagacatt

SEQ ID NO: 1567176 - DNA, 25 bp, Homo sapien
taagttgcagagcatcgggcagaac

SEQ ID NO: 1567177 - DNA, 25 bp, Homo sapien
gaaagagctacgagaggtgaagtaa

SEQ ID NO: 1567178 - DNA, 25 bp, Homo sapien
gaccccatccagatgagcgatgagt

SEQ ID NO: 1567179 - DNA, 25 bp, Homo sapien
cagagtagagggagaaccacagcag

SEQ ID NO: 1567180 - DNA, 25 bp, Homo sapien
tctgcttcggccctgcgccaagtcg

SEQ ID NO: 1567181 - DNA, 25 bp, Homo sapien
ctctgcttcggccctgcgccaagtc

SEQ ID NO: 1567182 - DNA, 25 bp, Homo sapien
caaaagagatagcaagagcggtggg

SEQ ID NO: 1567183 - DNA, 25 bp, Homo sapien
cctgaggccgggatgtcaatgctgt

SEQ ID NO: 1567184 - DNA, 25 bp, Homo sapien
taatatagtctccagcggaacgctg

SEQ ID NO: 1567185 - DNA, 25 bp, Homo sapien
tttcggctcccaacaggtgtggcgg

SEQ ID NO: 1567186 - DNA, 25 bp, Homo sapien
tgcggccagcgctgtgctgaaacgt

SEQ ID NO: 1567187 - DNA, 25 bp, Homo sapien
agactgcggccagcgctgtgctgaa

SEQ ID NO: 1567188 - DNA, 25 bp, Homo sapien
ctgtcagactgcggccagcgctgtg

SEQ ID NO: 1567189 - DNA, 25 bp, Homo sapien
tcagactgcggccagcgctgtgctg

SEQ ID NO: 1567190 - DNA, 25 bp, Homo sapien
cattgcggagttcgtctatgagcac

SEQ ID NO: 1567191 - DNA, 25 bp, Homo sapien
gtcctcattgcggagttcgtctatg

SEQ ID NO: 1567192 - DNA, 25 bp, Homo sapien
gttcgtctatgagcaccgcgatggg

SEQ ID NO: 1567193 - DNA, 25 bp, Homo sapien
gtacagcgagtcgtcgccgtcggcc

SEQ ID NO: 1567194 - DNA, 25 bp, Homo sapien
cagcgaacgctgagtcttctccgcg

SEQ ID NO: 1567195 - DNA, 25 bp, Homo sapien
acgctgagtcttctccgcgagggcc

SEQ ID NO: 1567196 - DNA, 25 bp, Homo sapien
ttccgccactcccagcgaacgctga

SEQ ID NO: 1567197 - DNA, 25 bp, Homo sapien
actcccagcgaacgctgagtcttct

SEQ ID NO: 1567198 - DNA, 25 bp, Homo sapien
ccaaagcggtgaagtaatttgcaca

SEQ ID NO: 1567199 - DNA, 25 bp, Homo sapien
caagaccaggactacaattagccca

SEQ ID NO: 1567200 - DNA, 25 bp, Homo sapien
cataattcgttcagtccctcacaag

SEQ ID NO: 1567201 - DNA, 25 bp, Homo sapien
ccaggaatgttcatccgggctgggc

SEQ ID NO: 1567202 - DNA, 25 bp, Homo sapien
caggacagactgtgaaactctcccc

SEQ ID NO: 1567203 - DNA, 25 bp, Homo sapien
gcaggacagactgtgaaactctccc

SEQ ID NO: 1567204 - DNA, 25 bp, Homo sapien
gacagactgtgaaactctcccctca

SEQ ID NO: 1567205 - DNA, 25 bp, Homo sapien
ggacagactgtgaaactctcccctc

SEQ ID NO: 1567206 - DNA, 25 bp, Homo sapien
tagccttgaatccagtgacgtgcac

SEQ ID NO: 1567207 - DNA, 25 bp, Homo sapien
aagttatgtcccagtgacgtgcacg

SEQ ID NO: 1567208 - DNA, 25 bp, Homo sapien
tcagggtcagacagctaagatcaca

SEQ ID NO: 1567209 - DNA, 25 bp, Homo sapien
tatcatcctaaacggagggttagcc

SEQ ID NO: 1567210 - DNA, 25 bp, Homo sapien
cgatggtggacagcttcttgatgct

SEQ ID NO: 1567211 - DNA, 25 bp, Homo sapien
gccaaggcgatggtggacagcttct

SEQ ID NO: 1567212 - DNA, 25 bp, Homo sapien
cccaagggccaaggcgatggtggac

SEQ ID NO: 1567213 - DNA, 25 bp, Homo sapien
gcttcttgatgctgttgaggcgaag

SEQ ID NO: 1567214 - DNA, 25 bp, Homo sapien
ggccaggaggacctcatcttcatca

SEQ ID NO: 1567215 - DNA, 25 bp, Homo sapien
tgggcctcccaccagggtagtgaag

SEQ ID NO: 1567216 - DNA, 25 bp, Homo sapien
agtgcacgtactctgggcctcccac

SEQ ID NO: 1567217 - DNA, 25 bp, Homo sapien
ctctgggcctcccaccagggtagtg

SEQ ID NO: 1567218 - DNA, 25 bp, Homo sapien
gtgcacgtactctgggcctcccacc

SEQ ID NO: 1567219 - DNA, 25 bp, Homo sapien
acaacgctgcttgttgggatctggc

SEQ ID NO: 1567220 - DNA, 25 bp, Homo sapien
tcaaacaacgctgcttgttgggatc

SEQ ID NO: 1567221 - DNA, 25 bp, Homo sapien
cttgttgggatctggcccatctttg

SEQ ID NO: 1567222 - DNA, 25 bp, Homo sapien
ctgcttgttgggatctggcccatct

SEQ ID NO: 1567223 - DNA, 25 bp, Homo sapien
aacacaaagtcactggacagctccc

SEQ ID NO: 1567224 - DNA, 25 bp, Homo sapien
tgagatggcccgtaaggactccact

SEQ ID NO: 1567225 - DNA, 25 bp, Homo sapien
aggtgcgggaggtgaaccagtcgcc

SEQ ID NO: 1567226 - DNA, 25 bp, Homo sapien
agcggcacaaagtgcgcctccaggt

SEQ ID NO: 1567227 - DNA, 25 bp, Homo sapien
cagccgcttcactagcggcacaaag

SEQ ID NO: 1567228 - DNA, 25 bp, Homo sapien
ctcgggggtagcagacggagaagag

SEQ ID NO: 1567229 - DNA, 25 bp, Homo sapien
acagcactggacactcgggggtagc

SEQ ID NO: 1567230 - DNA, 25 bp, Homo sapien
ggacactcgggggtagcagacggag

SEQ ID NO: 1567231 - DNA, 25 bp, Homo sapien
cagcactggacactcgggggtagca

SEQ ID NO: 1567232 - DNA, 25 bp, Homo sapien
tgggtaaactgacacgtggccgtgt

SEQ ID NO: 1567233 - DNA, 25 bp, Homo sapien
tcaaacccgggcttgacggtcaatc

SEQ ID NO: 1567234 - DNA, 25 bp, Homo sapien
gggacaggctggagataccatcaga

SEQ ID NO: 1567235 - DNA, 25 bp, Homo sapien
aattgcttcgatcaaaggcggtggg

SEQ ID NO: 1567236 - DNA, 25 bp, Homo sapien
ggcccgccgcaccatgggggtgtca

SEQ ID NO: 1567237 - DNA, 25 bp, Homo sapien
tctcactcttgacgttgtccagctc

SEQ ID NO: 1567238 - DNA, 25 bp, Homo sapien
ccgccgcaccatgggggtgtcatct

SEQ ID NO: 1567239 - DNA, 25 bp, Homo sapien
gatctcactcttgacgttgtccagc

SEQ ID NO: 1567240 - DNA, 25 bp, Homo sapien
gctgagctctgggattctctttcat

SEQ ID NO: 1567241 - DNA, 25 bp, Homo sapien
ccttgctgagctctgggattctctt

SEQ ID NO: 1567242 - DNA, 25 bp, Homo sapien
ctgagctctgggattctctttcatg

SEQ ID NO: 1567243 - DNA, 25 bp, Homo sapien
ttgctgagctctgggattctctttc

SEQ ID NO: 1567244 - DNA, 25 bp, Homo sapien
cagaagctgggcgatgttcacgcac

SEQ ID NO: 1567245 - DNA, 25 bp, Homo sapien
aggacttgtcttcagcggcctggcg

SEQ ID NO: 1567246 - DNA, 25 bp, Homo sapien
tgggcgatgttcacgcacgcctcca

SEQ ID NO: 1567247 - DNA, 25 bp, Homo sapien
agccaccatgtagcggacgcgccag

SEQ ID NO: 1567248 - DNA, 25 bp, Homo sapien
tcttggtgatctcaggccccactgc

SEQ ID NO: 1567249 - DNA, 25 bp, Homo sapien
cttggtgatctcaggccccactgct

SEQ ID NO: 1567250 - DNA, 25 bp, Homo sapien
gtcttggtgatctcaggccccactg

SEQ ID NO: 1567251 - DNA, 25 bp, Homo sapien
ttggtgatctcaggccccactgctt

SEQ ID NO: 1567252 - DNA, 25 bp, Homo sapien
ccttgtgggaggctgcggccctcac

SEQ ID NO: 1567253 - DNA, 25 bp, Homo sapien
ttgaccttgtgggaggctgcggccc

SEQ ID NO: 1567254 - DNA, 25 bp, Homo sapien
tgaccttgtgggaggctgcggccct

SEQ ID NO: 1567255 - DNA, 25 bp, Homo sapien
ctttgaccttgtgggaggctgcggc

SEQ ID NO: 1567256 - DNA, 25 bp, Homo sapien
ccacttgctgtgttccggctgccag

SEQ ID NO: 1567257 - DNA, 25 bp, Homo sapien
cacttgctgtgttccggctgccagc

SEQ ID NO: 1567258 - DNA, 25 bp, Homo sapien
cttgctgtgttccggctgccagcac

SEQ ID NO: 1567259 - DNA, 25 bp, Homo sapien
ccgacagtcagctgagaggttttca

SEQ ID NO: 1567260 - DNA, 25 bp, Homo sapien
agatctgggacatgatcacattctc

SEQ ID NO: 1567261 - DNA, 25 bp, Homo sapien
acattctcccgacagtcagctgaga

SEQ ID NO: 1567262 - DNA, 25 bp, Homo sapien
gcaagatctgggacatgatcacatt

SEQ ID NO: 1567263 - DNA, 25 bp, Homo sapien
gttggttggcatcggacaccagctc

SEQ ID NO: 1567264 - DNA, 25 bp, Homo sapien
gatgggagagagacccatgatgact

SEQ ID NO: 1567265 - DNA, 25 bp, Homo sapien
gatggtgttgtctttgcccaagatg

SEQ ID NO: 1567266 - DNA, 25 bp, Homo sapien
gccagggcagacttgacatgttggt

SEQ ID NO: 1567267 - DNA, 25 bp, Homo sapien
cgttcacacagtccaggttagagat

SEQ ID NO: 1567268 - DNA, 25 bp, Homo sapien
tgatgttcagccgtacctcagggca

SEQ ID NO: 1567269 - DNA, 25 bp, Homo sapien
ggacagctgccggatgccaatcacc

SEQ ID NO: 1567270 - DNA, 25 bp, Homo sapien
ccaggaggggcatgtactcaatgat

SEQ ID NO: 1567271 - DNA, 25 bp, Homo sapien
gccatgcacaaggagttaagtttct

SEQ ID NO: 1567272 - DNA, 25 bp, Homo sapien
tgcacaaggagttaagtttctcatc

SEQ ID NO: 1567273 - DNA, 25 bp, Homo sapien
catgcacaaggagttaagtttctca

SEQ ID NO: 1567274 - DNA, 25 bp, Homo sapien
ggccatgcacaaggagttaagtttc

SEQ ID NO: 1567275 - DNA, 25 bp, Homo sapien
cagaagagcgtagtcatgcggtgca

SEQ ID NO: 1567276 - DNA, 25 bp, Homo sapien
cttcttcaggttgctggtggctgcc

SEQ ID NO: 1567277 - DNA, 25 bp, Homo sapien
gtctccggacatggccaagaccttg

SEQ ID NO: 1567278 - DNA, 25 bp, Homo sapien
gtggctgcctcgcggatggcatata

SEQ ID NO: 1567279 - DNA, 25 bp, Homo sapien
tgtagcataactgttctaagccctg

SEQ ID NO: 1567280 - DNA, 25 bp, Homo sapien
taagccctgtgcgtgtataacctga

SEQ ID NO: 1567281 - DNA, 25 bp, Homo sapien
taggtctgacctagagcccatacac

SEQ ID NO: 1567282 - DNA, 25 bp, Homo sapien
gattaatcttcacgctcaccaggct

SEQ ID NO: 1567283 - DNA, 25 bp, Homo sapien
atgcgcagaaccgtgggtagcatgt

SEQ ID NO: 1567284 - DNA, 25 bp, Homo sapien
cacattgaagcggacattggcaacc

SEQ ID NO: 1567285 - DNA, 25 bp, Homo sapien
tctgcagagacttggccacattgaa

SEQ ID NO: 1567286 - DNA, 25 bp, Homo sapien
ggatgggccctatcttctgcagaga

SEQ ID NO: 1567287 - DNA, 25 bp, Homo sapien
acaggaattagaaatctctgatcac

SEQ ID NO: 1567288 - DNA, 25 bp, Homo sapien
acagacacggatacaccaaacccaa

SEQ ID NO: 1567289 - DNA, 25 bp, Homo sapien
aagagagtgtacacagacacggata

SEQ ID NO: 1567290 - DNA, 25 bp, Homo sapien
tgcacaggcgggtgaccatagttaa

SEQ ID NO: 1567291 - DNA, 25 bp, Homo sapien
ctcctgggcaaagtatttgacgtcc

SEQ ID NO: 1567292 - DNA, 25 bp, Homo sapien
ggatgggcttgacttcactctgcaa

SEQ ID NO: 1567293 - DNA, 25 bp, Homo sapien
aagtatttgacgtccacatcctggt

SEQ ID NO: 1567294 - DNA, 25 bp, Homo sapien
cagcttctctaggatgggcttgact

SEQ ID NO: 1567295 - DNA, 25 bp, Homo sapien
gggctccgtgctttctaggtcttac

SEQ ID NO: 1567296 - DNA, 25 bp, Homo sapien
aagaatcagaaccagagccctctct

SEQ ID NO: 1567297 - DNA, 25 bp, Homo sapien
tgctagggctccgtgctttctaggt

SEQ ID NO: 1567298 - DNA, 25 bp, Homo sapien
tcctgctagggctccgtgctttcta

SEQ ID NO: 1567299 - DNA, 25 bp, Homo sapien
gtggacaccagaggccagtgtttgc

SEQ ID NO: 1567300 - DNA, 25 bp, Homo sapien
gaggtggacagtgagacatcttccc

SEQ ID NO: 1567301 - DNA, 25 bp, Homo sapien
tcagaccatgcacagggagtgacag

SEQ ID NO: 1567302 - DNA, 25 bp, Homo sapien
tgtctccccaaagagggacttgtgg

SEQ ID NO: 1567303 - DNA, 25 bp, Homo sapien
aaaaacggcacagttgacacacaaa

SEQ ID NO: 1567304 - DNA, 25 bp, Homo sapien
taaaaacggcacagttgacacacaa

SEQ ID NO: 1567305 - DNA, 25 bp, Homo sapien
cacgtctattaactgaaggagccac

SEQ ID NO: 1567306 - DNA, 25 bp, Homo sapien
cagtttaattctcccaggtgacagt

SEQ ID NO: 1567307 - DNA, 25 bp, Homo sapien
gaatctgaactgcactacaggacac

SEQ ID NO: 1567308 - DNA, 25 bp, Homo sapien
cagagtattctttcgggacataggg

SEQ ID NO: 1567309 - DNA, 25 bp, Homo sapien
ccagtgtgactgctgggatttaggc

SEQ ID NO: 1567310 - DNA, 25 bp, Homo sapien
ttagagatggccagtgtgactgctg

SEQ ID NO: 1567311 - DNA, 25 bp, Homo sapien
atggccagtgtgactgctgggattt

SEQ ID NO: 1567312 - DNA, 25 bp, Homo sapien
tggccagtgtgactgctgggattta

SEQ ID NO: 1567313 - DNA, 25 bp, Homo sapien
aagaagtgcagtcatcacaaaagga

SEQ ID NO: 1567314 - DNA, 25 bp, Homo sapien
ggagacaaaatttgtgtgtgggctc

SEQ ID NO: 1567315 - DNA, 25 bp, Homo sapien
aaggagacaaaatttgtgtgtgggc

SEQ ID NO: 1567316 - DNA, 25 bp, Homo sapien
agtgcagtcatcacaaaaggagaca

SEQ ID NO: 1567317 - DNA, 25 bp, Homo sapien
aaaggcaacaagtgactcgacctca

SEQ ID NO: 1567318 - DNA, 25 bp, Homo sapien
aacaagtgactcgacctcatccaca

SEQ ID NO: 1567319 - DNA, 25 bp, Homo sapien
ccaaaggcaacaagtgactcgacct

SEQ ID NO: 1567320 - DNA, 25 bp, Homo sapien
gcaacaagtgactcgacctcatcca

SEQ ID NO: 1567321 - DNA, 25 bp, Homo sapien
taaatttatgcctcatgccaccagc

SEQ ID NO: 1567322 - DNA, 25 bp, Homo sapien
aattctcctctagcgacaaccacag

SEQ ID NO: 1567323 - DNA, 25 bp, Homo sapien
gcttgggtagatgaacctggcctcc

SEQ ID NO: 1567324 - DNA, 25 bp, Homo sapien
ggcatggtgattctagagctctact

SEQ ID NO: 1567325 - DNA, 25 bp, Homo sapien
acttgtgggcatatagttgtggata

SEQ ID NO: 1567326 - DNA, 25 bp, Homo sapien
catcttccatgtctgattgactctt

SEQ ID NO: 1567327 - DNA, 25 bp, Homo sapien
catgattcagtcttagcaggtttta

SEQ ID NO: 1567328 - DNA, 25 bp, Homo sapien
aatttgttttcctcaattctgcatt

SEQ ID NO: 1567329 - DNA, 25 bp, Homo sapien
cttcatgttctctgcaggatcttct

SEQ ID NO: 1567330 - DNA, 25 bp, Homo sapien
catgttctctgcaggatcttctggc

SEQ ID NO: 1567331 - DNA, 25 bp, Homo sapien
ctacacttcatgttctctgcaggat

SEQ ID NO: 1567332 - DNA, 25 bp, Homo sapien
cacttcatgttctctgcaggatctt

SEQ ID NO: 1567333 - DNA, 25 bp, Homo sapien
aagtggctataatcaggtgtttctg

SEQ ID NO: 1567334 - DNA, 25 bp, Homo sapien
gaagtggctataatcaggtgtttct

SEQ ID NO: 1567335 - DNA, 25 bp, Homo sapien
caagaagtggctataatcaggtgtt

SEQ ID NO: 1567336 - DNA, 25 bp, Homo sapien
tgagcaagaagtggctataatcagg

SEQ ID NO: 1567337 - DNA, 25 bp, Homo sapien
cgcagttgcgccatatctccacgcc

SEQ ID NO: 1567338 - DNA, 25 bp, Homo sapien
gccgcagttgcgccatatctccacg

SEQ ID NO: 1567339 - DNA, 25 bp, Homo sapien
ccgcagttgcgccatatctccacgc

SEQ ID NO: 1567340 - DNA, 25 bp, Homo sapien
gcgccgcagttgcgccatatctcca

SEQ ID NO: 1567341 - DNA, 25 bp, Homo sapien
gagacagaaccagccctagggcgat

SEQ ID NO: 1567342 - DNA, 25 bp, Homo sapien
gattttaacactctgacgggacgca

SEQ ID NO: 1567343 - DNA, 25 bp, Homo sapien
ctacggcagaacgaccggagacaga

SEQ ID NO: 1567344 - DNA, 25 bp, Homo sapien
ttaagcaggaaaacggcgcgaaagc

SEQ ID NO: 1567345 - DNA, 25 bp, Homo sapien
gagcacagtttccaatgggaggaat

SEQ ID NO: 1567346 - DNA, 25 bp, Homo sapien
ccggagaagccgtgactgcgaaaag

SEQ ID NO: 1567347 - DNA, 25 bp, Homo sapien
tcccccaacacaggatccggagaag

SEQ ID NO: 1567348 - DNA, 25 bp, Homo sapien
caatgggaggaatttgggacggaag

SEQ ID NO: 1567349 - DNA, 25 bp, Homo sapien
cacttcacattcacagggaggggac

SEQ ID NO: 1567350 - DNA, 25 bp, Homo sapien
tgcgttgccgtcttgttatggatct

SEQ ID NO: 1567351 - DNA, 25 bp, Homo sapien
gccgtcttgttatggatcttcctca

SEQ ID NO: 1567352 - DNA, 25 bp, Homo sapien
cctccctctgcgttgccgtcttgtt

SEQ ID NO: 1567353 - DNA, 25 bp, Homo sapien
ctctgcgttgccgtcttgttatgga

SEQ ID NO: 1567354 - DNA, 25 bp, Homo sapien
ctgctacttcctggggtgcttcttt

SEQ ID NO: 1567355 - DNA, 25 bp, Homo sapien
cctgctacttcctggggtgcttctt

SEQ ID NO: 1567356 - DNA, 25 bp, Homo sapien
ccctgctacttcctggggtgcttct

SEQ ID NO: 1567357 - DNA, 25 bp, Homo sapien
taagagattctcaatgtcatcctcc

SEQ ID NO: 1567358 - DNA, 25 bp, Homo sapien
ctaagagattctcaatgtcatcctc

SEQ ID NO: 1567359 - DNA, 25 bp, Homo sapien
agagattctcaatgtcatcctcctc

SEQ ID NO: 1567360 - DNA, 25 bp, Homo sapien
ctctaagagattctcaatgtcatcc

SEQ ID NO: 1567361 - DNA, 25 bp, Homo sapien
tcctgtatcagttccaatgactcct

SEQ ID NO: 1567362 - DNA, 25 bp, Homo sapien
tccaatgactcctcattaacccatt

SEQ ID NO: 1567363 - DNA, 25 bp, Homo sapien
tcctcattaacccattcctcatgaa

SEQ ID NO: 1567364 - DNA, 25 bp, Homo sapien
gttcctgtatcagttccaatgactc

SEQ ID NO: 1567365 - DNA, 25 bp, Homo sapien
tctagaggcgtcactcctttcagaa

SEQ ID NO: 1567366 - DNA, 25 bp, Homo sapien
ggtttctcccagacgcctcctgaag

SEQ ID NO: 1567367 - DNA, 25 bp, Homo sapien
agaggcgtcactcctttcagaaata

SEQ ID NO: 1567368 - DNA, 25 bp, Homo sapien
tggtttctcccagacgcctcctgaa

SEQ ID NO: 1567369 - DNA, 25 bp, Homo sapien
tgcccactgcatcagagttgatgcc

SEQ ID NO: 1567370 - DNA, 25 bp, Homo sapien
cctgtggaaatacggtcctctgctg

SEQ ID NO: 1567371 - DNA, 25 bp, Homo sapien
tgtggaaatacggtcctctgctgcc

SEQ ID NO: 1567372 - DNA, 25 bp, Homo sapien
tgatgccgggacaataaactcctac

SEQ ID NO: 1567373 - DNA, 25 bp, Homo sapien
tctccttcacataacatgacttttt

SEQ ID NO: 1567374 - DNA, 25 bp, Homo sapien
ttctccttcacataacatgactttt

SEQ ID NO: 1567375 - DNA, 25 bp, Homo sapien
ctccttcacataacatgactttttt

SEQ ID NO: 1567376 - DNA, 25 bp, Homo sapien
acatccctgtataaagccttctgca

SEQ ID NO: 1567377 - DNA, 25 bp, Homo sapien
cacatccctgtataaagccttctgc

SEQ ID NO: 1567378 - DNA, 25 bp, Homo sapien
atccctgtataaagccttctgcaca

SEQ ID NO: 1567379 - DNA, 25 bp, Homo sapien
catcacatccctgtataaagccttc

SEQ ID NO: 1567380 - DNA, 25 bp, Homo sapien
ctaagggcagaccccaacttctgga

SEQ ID NO: 1567381 - DNA, 25 bp, Homo sapien
aacttctggaggggcattatcctta

SEQ ID NO: 1567382 - DNA, 25 bp, Homo sapien
acttctggaggggcattatccttac

SEQ ID NO: 1567383 - DNA, 25 bp, Homo sapien
agggcagaccccaacttctggaggg

SEQ ID NO: 1567384 - DNA, 25 bp, Homo sapien
gatatctttgataccttcccaccta

SEQ ID NO: 1567385 - DNA, 25 bp, Homo sapien
gttgatatctttgataccttcccac

SEQ ID NO: 1567386 - DNA, 25 bp, Homo sapien
gataccttcccacctatctggattt

SEQ ID NO: 1567387 - DNA, 25 bp, Homo sapien
tatctttgataccttcccacctatc

SEQ ID NO: 1567388 - DNA, 25 bp, Homo sapien
cagaatccctcccttggtatccagg

SEQ ID NO: 1567389 - DNA, 25 bp, Homo sapien
tgccctaaggcaggactctaacttt

SEQ ID NO: 1567390 - DNA, 25 bp, Homo sapien
gattgcgggtcttaagacctcccca

SEQ ID NO: 1567391 - DNA, 25 bp, Homo sapien
taatgttgggttagaccttctctgc

SEQ ID NO: 1567392 - DNA, 25 bp, Homo sapien
tgaaaggttaatccaagttgatttg

SEQ ID NO: 1567393 - DNA, 25 bp, Homo sapien
ctttgaagtggcgaaactgaagaac

SEQ ID NO: 1567394 - DNA, 25 bp, Homo sapien
tgaccccagagtaaattctttgaag

SEQ ID NO: 1567395 - DNA, 25 bp, Homo sapien
aactgtggctgatgaacttttgaac

SEQ ID NO: 1567396 - DNA, 25 bp, Homo sapien
aatgttctgcgaggcctgacttgtc

SEQ ID NO: 1567397 - DNA, 25 bp, Homo sapien
tttctcgtgtcgtgcaaggtatgca

SEQ ID NO: 1567398 - DNA, 25 bp, Homo sapien
tcagggagaacttgtgcctaaaagc

SEQ ID NO: 1567399 - DNA, 25 bp, Homo sapien
caaggtatgtaattcgactgaagac

SEQ ID NO: 1567400 - DNA, 25 bp, Homo sapien
gacacatgccaagggcctggcttat

SEQ ID NO: 1567401 - DNA, 25 bp, Homo sapien
ttctctgatgctgtacaaaccatga

SEQ ID NO: 1567402 - DNA, 25 bp, Homo sapien
tattttgacttgttggccttggcac

SEQ ID NO: 1567403 - DNA, 25 bp, Homo sapien
gatctccaggcatcaagtgaccctc

SEQ ID NO: 1567404 - DNA, 25 bp, Homo sapien
gctattcaatggagacggtggccac

SEQ ID NO: 1567405 - DNA, 25 bp, Homo sapien
ggaaactggatagaaacgctcctca

SEQ ID NO: 1567406 - DNA, 25 bp, Homo sapien
caacagttgcaaattatgccagcag

SEQ ID NO: 1567407 - DNA, 25 bp, Homo sapien
gatgactgccatcacggttttgtta

SEQ ID NO: 1567408 - DNA, 25 bp, Homo sapien
aattgttgtggatgcttcaacctta

SEQ ID NO: 1567409 - DNA, 25 bp, Homo sapien
aaaattgttgtggatgcttcaacct

SEQ ID NO: 1567410 - DNA, 25 bp, Homo sapien
caaaattgttgtggatgcttcaacc

SEQ ID NO: 1567411 - DNA, 25 bp, Homo sapien
cacaaaattgttgtggatgcttcaa

SEQ ID NO: 1567412 - DNA, 25 bp, Homo sapien
cacaaaagcatcttagggcagagta

SEQ ID NO: 1567413 - DNA, 25 bp, Homo sapien
tgaaagttcaaaccacaagtgggca

SEQ ID NO: 1567414 - DNA, 25 bp, Homo sapien
catatgatgatgaagctgcactgtt

SEQ ID NO: 1567415 - DNA, 25 bp, Homo sapien
ttatgtcactgagcgctacgaggtc

SEQ ID NO: 1567416 - DNA, 25 bp, Homo sapien
gataaagggttggaatcacttcacg

SEQ ID NO: 1567417 - DNA, 25 bp, Homo sapien
aaagatagagcagcatgctcccggg

SEQ ID NO: 1567418 - DNA, 25 bp, Homo sapien
tattaagcatagcatctggccgggc

SEQ ID NO: 1567419 - DNA, 25 bp, Homo sapien
tatcaaggcacttcgtagatactga

SEQ ID NO: 1567420 - DNA, 25 bp, Homo sapien
ggcgtgaccttcactccacgcgatc

SEQ ID NO: 1567421 - DNA, 25 bp, Homo sapien
gcgccgcggcgtgaccttcactcca

SEQ ID NO: 1567422 - DNA, 25 bp, Homo sapien
cgtgaccttcactccacgcgatccg

SEQ ID NO: 1567423 - DNA, 25 bp, Homo sapien
cgcggcgtgaccttcactccacgcg

SEQ ID NO: 1567424 - DNA, 25 bp, Homo sapien
tgctaggagggttcttccatcgggc

SEQ ID NO: 1567425 - DNA, 25 bp, Homo sapien
agcacgtgaagtagcggcagccttg

SEQ ID NO: 1567426 - DNA, 25 bp, Homo sapien
tgactgaaattacggatcacccagg

SEQ ID NO: 1567427 - DNA, 25 bp, Homo sapien
tctgagcaaagggtcaagggaatct

SEQ ID NO: 1567428 - DNA, 25 bp, Homo sapien
ccttctcttctgggctttttcatca

SEQ ID NO: 1567429 - DNA, 25 bp, Homo sapien
ttctgggctttttcatcacacagca

SEQ ID NO: 1567430 - DNA, 25 bp, Homo sapien
tctcttctgggctttttcatcacac

SEQ ID NO: 1567431 - DNA, 25 bp, Homo sapien
tcttctgggctttttcatcacacag

SEQ ID NO: 1567432 - DNA, 25 bp, Homo sapien
taggtgcttgtgcataatacatgac

SEQ ID NO: 1567433 - DNA, 25 bp, Homo sapien
aggtgcttgtgcataatacatgact

SEQ ID NO: 1567434 - DNA, 25 bp, Homo sapien
gtgcttgtgcataatacatgacttc

SEQ ID NO: 1567435 - DNA, 25 bp, Homo sapien
ggtgcttgtgcataatacatgactt

SEQ ID NO: 1567436 - DNA, 25 bp, Homo sapien
atttccactccgcctgagagaattc

SEQ ID NO: 1567437 - DNA, 25 bp, Homo sapien
catcacatccttgtataaagccctc

SEQ ID NO: 1567438 - DNA, 25 bp, Homo sapien
agccctctgtgcagggtccaggcat

SEQ ID NO: 1567439 - DNA, 25 bp, Homo sapien
gccacgtccctgaatgttaagtgtc

SEQ ID NO: 1567440 - DNA, 25 bp, Homo sapien
caagggcagatcccggcttctgcag

SEQ ID NO: 1567441 - DNA, 25 bp, Homo sapien
accaagggcagatcccggcttctgc

SEQ ID NO: 1567442 - DNA, 25 bp, Homo sapien
aagggcagatcccggcttctgcagg

SEQ ID NO: 1567443 - DNA, 25 bp, Homo sapien
ccaagggcagatcccggcttctgca

SEQ ID NO: 1567444 - DNA, 25 bp, Homo sapien
atattcaggtcaggaagagagattc

SEQ ID NO: 1567445 - DNA, 25 bp, Homo sapien
ttaatattcaggtcaggaagagaga

SEQ ID NO: 1567446 - DNA, 25 bp, Homo sapien
gagttaatattcaggtcaggaagag

SEQ ID NO: 1567447 - DNA, 25 bp, Homo sapien
ggagttaatattcaggtcaggaaga

SEQ ID NO: 1567448 - DNA, 25 bp, Homo sapien
tgctattttcacttcactctcacca

SEQ ID NO: 1567449 - DNA, 25 bp, Homo sapien
tattttcacttcactctcaccagac

SEQ ID NO: 1567450 - DNA, 25 bp, Homo sapien
ttcactctcaccagaccagggctcc

SEQ ID NO: 1567451 - DNA, 25 bp, Homo sapien
gttcacacctttgatgcactccctc

SEQ ID NO: 1567452 - DNA, 25 bp, Homo sapien
cactttgtacatcacgctggttgtg

SEQ ID NO: 1567453 - DNA, 25 bp, Homo sapien
acatcacgctggttgtgctgaaaat

SEQ ID NO: 1567454 - DNA, 25 bp, Homo sapien
gaaatatcagcacactttgtacatc

SEQ ID NO: 1567455 - DNA, 25 bp, Homo sapien
aatagaaaagggtaaggtgatgcac

SEQ ID NO: 1567456 - DNA, 25 bp, Homo sapien
aatagctccagttcagacagatgta

SEQ ID NO: 1567457 - DNA, 25 bp, Homo sapien
cagatgtaagtgaaaggatactcca

SEQ ID NO: 1567458 - DNA, 25 bp, Homo sapien
acagatgtaagtgaaaggatactcc

SEQ ID NO: 1567459 - DNA, 25 bp, Homo sapien
caacttgattacatccatttattac

SEQ ID NO: 1567460 - DNA, 25 bp, Homo sapien
tttgacactggaagacatttcttga

SEQ ID NO: 1567461 - DNA, 25 bp, Homo sapien
gatgtcgtgcaaagtttgaattgta

SEQ ID NO: 1567462 - DNA, 25 bp, Homo sapien
tgatgtttagtaaggctggaagata

SEQ ID NO: 1567463 - DNA, 25 bp, Homo sapien
gtaaggctggaagatactctaaaga

SEQ ID NO: 1567464 - DNA, 25 bp, Homo sapien
cagtgtggattacaagatgggctga

SEQ ID NO: 1567465 - DNA, 25 bp, Homo sapien
tttctgatgtcgtacaaggagcgca

SEQ ID NO: 1567466 - DNA, 25 bp, Homo sapien
tccaatgttgtgctaggtgcgaatt

SEQ ID NO: 1567467 - DNA, 25 bp, Homo sapien
ggctgaaaggcctgaatactcacta

SEQ ID NO: 1567468 - DNA, 25 bp, Homo sapien
ctaggtatgaaatgcgactaaaggc

SEQ ID NO: 1567469 - DNA, 25 bp, Homo sapien
tgtgctaggtatgaaatgcgactaa

SEQ ID NO: 1567470 - DNA, 25 bp, Homo sapien
tcccatatgaattgtccaatgttgt

SEQ ID NO: 1567471 - DNA, 25 bp, Homo sapien
ctatcccatatgaattgtccaatgt

SEQ ID NO: 1567472 - DNA, 25 bp, Homo sapien
tagtaaggcttgagtgcacactaaa

SEQ ID NO: 1567473 - DNA, 25 bp, Homo sapien
ctaaagcctgcttgataatgttgga

SEQ ID NO: 1567474 - DNA, 25 bp, Homo sapien
tatattcgtcaggagtaccagcctg

SEQ ID NO: 1567475 - DNA, 25 bp, Homo sapien
tcaactataaatctgtctggtccag

SEQ ID NO: 1567476 - DNA, 25 bp, Homo sapien
tcacttaggataagagcctcagctc

SEQ ID NO: 1567477 - DNA, 25 bp, Homo sapien
tctttgagaaatcgctgcagtgctt

SEQ ID NO: 1567478 - DNA, 25 bp, Homo sapien
ggttcatagcttggacattactggt

SEQ ID NO: 1567479 - DNA, 25 bp, Homo sapien
tatctggtctactgctgatgggcat

SEQ ID NO: 1567480 - DNA, 25 bp, Homo sapien
gagagagcgagaaaggcagggtgat

SEQ ID NO: 1567481 - DNA, 25 bp, Homo sapien
tcaaggagcccggtgcaagggagac

SEQ ID NO: 1567482 - DNA, 25 bp, Homo sapien
caagggagacatgtccctcagcaaa

SEQ ID NO: 1567483 - DNA, 25 bp, Homo sapien
agcgagaaaggcagggtgattgtca

SEQ ID NO: 1567484 - DNA, 25 bp, Homo sapien
tggcggtcgcttccctgtgtgttaa

SEQ ID NO: 1567485 - DNA, 25 bp, Homo sapien
ctgtgtgttaaaaacgctacaggca

SEQ ID NO: 1567486 - DNA, 25 bp, Homo sapien
caaggcagaacgaacggggcatctc

SEQ ID NO: 1567487 - DNA, 25 bp, Homo sapien
gcatctccgtgagagtctggcggtc

SEQ ID NO: 1567488 - DNA, 25 bp, Homo sapien
tgactctcagatcccgggtacagaa

SEQ ID NO: 1567489 - DNA, 25 bp, Homo sapien
tcacggagacgcctgaatttacacg

SEQ ID NO: 1567490 - DNA, 25 bp, Homo sapien
gctgggaagcccagattgaatctaa

SEQ ID NO: 1567491 - DNA, 25 bp, Homo sapien
gccgagcgattttaacacacaggga

SEQ ID NO: 1567492 - DNA, 25 bp, Homo sapien
ttattagaagtgtggggtctcaagg

SEQ ID NO: 1567493 - DNA, 25 bp, Homo sapien
taagcggaaaggagtctcgaaaatc

SEQ ID NO: 1567494 - DNA, 25 bp, Homo sapien
caggacccagtacaggacgcggcct

SEQ ID NO: 1567495 - DNA, 25 bp, Homo sapien
caggacgttgggtcagtaaagagtt

SEQ ID NO: 1567496 - DNA, 25 bp, Homo sapien
gaagaatcctgaatgtcctaagaca

SEQ ID NO: 1567497 - DNA, 25 bp, Homo sapien
ctccgccaagagcacatttttagtg

SEQ ID NO: 1567498 - DNA, 25 bp, Homo sapien
gatggaatttgggacgaagaatcct

SEQ ID NO: 1567499 - DNA, 25 bp, Homo sapien
gggagtacaataaggtgcccacctc

SEQ ID NO: 1567500 - DNA, 25 bp, Homo sapien
tcctctttgtgtccaatttttgatt

SEQ ID NO: 1567501 - DNA, 25 bp, Homo sapien
tttgtgtccaatttttgattgtccc

SEQ ID NO: 1567502 - DNA, 25 bp, Homo sapien
ttgattgtccccaatttccattctg

SEQ ID NO: 1567503 - DNA, 25 bp, Homo sapien
tccctgctacactctcttgtcccca

SEQ ID NO: 1567504 - DNA, 25 bp, Homo sapien
acttattcgtccattcctcatgaac

SEQ ID NO: 1567505 - DNA, 25 bp, Homo sapien
cagttccaaccacttattcgtccat

SEQ ID NO: 1567506 - DNA, 25 bp, Homo sapien
cagctatgtgttctcatatcagttc

SEQ ID NO: 1567507 - DNA, 25 bp, Homo sapien
accacttattcgtccattcctcatg

SEQ ID NO: 1567508 - DNA, 25 bp, Homo sapien
cagggtggggaccatcaatgtcact

SEQ ID NO: 1567509 - DNA, 25 bp, Homo sapien
gctgtcatctgggataacaatgact

SEQ ID NO: 1567510 - DNA, 25 bp, Homo sapien
ctgtcatctgggataacaatgactt

SEQ ID NO: 1567511 - DNA, 25 bp, Homo sapien
gggtggggaccatcaatgtcactgt

SEQ ID NO: 1567512 - DNA, 25 bp, Homo sapien
tggacaacatggcaacactcctgtg

SEQ ID NO: 1567513 - DNA, 25 bp, Homo sapien
gtttggagaacgaggcaggcagact

SEQ ID NO: 1567514 - DNA, 25 bp, Homo sapien
aggcagactgcttgactccagaatt

SEQ ID NO: 1567515 - DNA, 25 bp, Homo sapien
ctgcttgactccagaatttcgagac

SEQ ID NO: 1567516 - DNA, 25 bp, Homo sapien
cgacataactgtgtactactgtaga

SEQ ID NO: 1567517 - DNA, 25 bp, Homo sapien
gtgaccgaatgtgatggcctacgac

SEQ ID NO: 1567518 - DNA, 25 bp, Homo sapien
tgagtgtgtggtgaccgaatgtgat

SEQ ID NO: 1567519 - DNA, 25 bp, Homo sapien
tgtgatggcctacgacataactgtg

SEQ ID NO: 1567520 - DNA, 25 bp, Homo sapien
aacatgtctcgacatagaaaaggta

SEQ ID NO: 1567521 - DNA, 25 bp, Homo sapien
gtatagcctattgctaaaaacctgt

SEQ ID NO: 1567522 - DNA, 25 bp, Homo sapien
aactgtgacacaatggtatgtactt

SEQ ID NO: 1567523 - DNA, 25 bp, Homo sapien
catttcattacagactgcacttaca

SEQ ID NO: 1567524 - DNA, 25 bp, Homo sapien
ctgaggaagagccatccctgactcc

SEQ ID NO: 1567525 - DNA, 25 bp, Homo sapien
cttctgggcttcttcatcacatagc

SEQ ID NO: 1567526 - DNA, 25 bp, Homo sapien
tctgggcttcttcatcacatagcat

SEQ ID NO: 1567527 - DNA, 25 bp, Homo sapien
agagccatccctgactcctttgctt

SEQ ID NO: 1567528 - DNA, 25 bp, Homo sapien
caacagtaaacgtgggatgcatttc

SEQ ID NO: 1567529 - DNA, 25 bp, Homo sapien
tgttagaactaacgaatgacaggat

SEQ ID NO: 1567530 - DNA, 25 bp, Homo sapien
gatgcatttcctctaatttaaggcc

SEQ ID NO: 1567531 - DNA, 25 bp, Homo sapien
gccaattaccactgcacaggatgcc

SEQ ID NO: 1567532 - DNA, 25 bp, Homo sapien
ccacgtccatgaatgtcaagcgtcc

SEQ ID NO: 1567533 - DNA, 25 bp, Homo sapien
tgagagaattcgatggccacgtcca

SEQ ID NO: 1567534 - DNA, 25 bp, Homo sapien
tggccacgtccatgaatgtcaagcg

SEQ ID NO: 1567535 - DNA, 25 bp, Homo sapien
cgatggccacgtccatgaatgtcaa

SEQ ID NO: 1567536 - DNA, 25 bp, Homo sapien
acgtccctgtataaagccctctgtc

SEQ ID NO: 1567537 - DNA, 25 bp, Homo sapien
ccaacatcacgtccctgtataaagc

SEQ ID NO: 1567538 - DNA, 25 bp, Homo sapien
gtataaagccctctgtccagggtcc

SEQ ID NO: 1567539 - DNA, 25 bp, Homo sapien
gccctctgtccagggtccagggatt

SEQ ID NO: 1567540 - DNA, 25 bp, Homo sapien
acagattagagcagatcccggcttc

SEQ ID NO: 1567541 - DNA, 25 bp, Homo sapien
ctcagttaagcaatttaggggctcc

SEQ ID NO: 1567542 - DNA, 25 bp, Homo sapien
agcagatcccggcttctggagggaa

SEQ ID NO: 1567543 - DNA, 25 bp, Homo sapien
ccaagaggcacgcaagagaaaatgc

SEQ ID NO: 1567544 - DNA, 25 bp, Homo sapien
tacatctgaagaaaggacgcatttc

SEQ ID NO: 1567545 - DNA, 25 bp, Homo sapien
taatatctcacaagttcacccacag

SEQ ID NO: 1567546 - DNA, 25 bp, Homo sapien
cagagaactggttatccggtgccac

SEQ ID NO: 1567547 - DNA, 25 bp, Homo sapien
ccggtgccacccaatgatgtattat

SEQ ID NO: 1567548 - DNA, 25 bp, Homo sapien
ctgtgttcacgcttctgacacattc

SEQ ID NO: 1567549 - DNA, 25 bp, Homo sapien
gcagaatcaagggctctctcctttg

SEQ ID NO: 1567550 - DNA, 25 bp, Homo sapien
tgtgttcacgcttctgacacattcc

SEQ ID NO: 1567551 - DNA, 25 bp, Homo sapien
cagaatcaagggctctctcctttgc

SEQ ID NO: 1567552 - DNA, 25 bp, Homo sapien
tatcggcatactttgcatgtcacat

SEQ ID NO: 1567553 - DNA, 25 bp, Homo sapien
acactggaagaagtatcggcatact

SEQ ID NO: 1567554 - DNA, 25 bp, Homo sapien
gaagtatcggcatactttgcatgtc

SEQ ID NO: 1567555 - DNA, 25 bp, Homo sapien
tggaagaagtatcggcatactttgc

SEQ ID NO: 1567556 - DNA, 25 bp, Homo sapien
cagctgcaattcagacagatgtgcc

SEQ ID NO: 1567557 - DNA, 25 bp, Homo sapien
ttccttccggcttgaaacagctgca

SEQ ID NO: 1567558 - DNA, 25 bp, Homo sapien
cagatgtgcctcaagggttaatcca

SEQ ID NO: 1567559 - DNA, 25 bp, Homo sapien
ctgaggaacgatggtttgtaaactt

SEQ ID NO: 1567560 - DNA, 25 bp, Homo sapien
tgggagtaatgggaaatcaataaga

SEQ ID NO: 1567561 - DNA, 25 bp, Homo sapien
gggaaatcaataagatcatttctat

SEQ ID NO: 1567562 - DNA, 25 bp, Homo sapien
gagtaatgggaaatcaataagatca

SEQ ID NO: 1567563 - DNA, 25 bp, Homo sapien
cttgtgggagtaatgggaaatcaat

SEQ ID NO: 1567564 - DNA, 25 bp, Homo sapien
caagatgggtagtaagtcccgaaca

SEQ ID NO: 1567565 - DNA, 25 bp, Homo sapien
tgccgtgcaaggtatgaaagcagac

SEQ ID NO: 1567566 - DNA, 25 bp, Homo sapien
ggcccggacgcttgtgaaatgctct

SEQ ID NO: 1567567 - DNA, 25 bp, Homo sapien
tagtaaggcttgcacggactctaaa

SEQ ID NO: 1567568 - DNA, 25 bp, Homo sapien
ttccgatgtcgtgaaaggtgtggat

SEQ ID NO: 1567569 - DNA, 25 bp, Homo sapien
taaggtacgcagtgaattctctcca

SEQ ID NO: 1567570 - DNA, 25 bp, Homo sapien
tccgatgtcgtgaaaggtgtggatt

SEQ ID NO: 1567571 - DNA, 25 bp, Homo sapien
ccatctgtaaggtacgcagtgaatt

SEQ ID NO: 1567572 - DNA, 25 bp, Homo sapien
gagaagtatgtacattctaaatcaa

SEQ ID NO: 1567573 - DNA, 25 bp, Homo sapien
cctactcaagaatatgctatactgg

SEQ ID NO: 1567574 - DNA, 25 bp, Homo sapien
gagttacaaattacggtgccagcag

SEQ ID NO: 1567575 - DNA, 25 bp, Homo sapien
gatgaggcttcaatgcaaactaaat

SEQ ID NO: 1567576 - DNA, 25 bp, Homo sapien
taagtatattgcacccagaagcgta

SEQ ID NO: 1567577 - DNA, 25 bp, Homo sapien
gaaacacaatacagggcatactctt

SEQ ID NO: 1567578 - DNA, 25 bp, Homo sapien
cacatttgagggtgtacaaggctga

SEQ ID NO: 1567579 - DNA, 25 bp, Homo sapien
ccaggcccggccatgttacagtatt

SEQ ID NO: 1567580 - DNA, 25 bp, Homo sapien
tatggacatactcaggtcacaactt

SEQ ID NO: 1567581 - DNA, 25 bp, Homo sapien
tcaccagagcaaaacagggaagaaa

SEQ ID NO: 1567582 - DNA, 25 bp, Homo sapien
caccagagcaaaacagggaagaaat

SEQ ID NO: 1567583 - DNA, 25 bp, Homo sapien
ccattgtcttatggacatactcagg

SEQ ID NO: 1567584 - DNA, 25 bp, Homo sapien
cgtcactccacgtaatctgcttccg

SEQ ID NO: 1567585 - DNA, 25 bp, Homo sapien
ctccacgtaatctgcttccgggtct

SEQ ID NO: 1567586 - DNA, 25 bp, Homo sapien
ccgtcactccacgtaatctgcttcc

SEQ ID NO: 1567587 - DNA, 25 bp, Homo sapien
actccacgtaatctgcttccgggtc

SEQ ID NO: 1567588 - DNA, 25 bp, Homo sapien
ccacgtccctgaatgccaagtgtcc

SEQ ID NO: 1567589 - DNA, 25 bp, Homo sapien
acttccctgtataaagtcctctgag

SEQ ID NO: 1567590 - DNA, 25 bp, Homo sapien
atggccacgtccctgaatgccaagt

SEQ ID NO: 1567591 - DNA, 25 bp, Homo sapien
tttccactcctcctgagggaattct

SEQ ID NO: 1567592 - DNA, 25 bp, Homo sapien
gaccaggttcctgtagttctccacc

SEQ ID NO: 1567593 - DNA, 25 bp, Homo sapien
ccaggttcctgtagttctccaccat

SEQ ID NO: 1567594 - DNA, 25 bp, Homo sapien
aagaccaggttcctgtagttctcca

SEQ ID NO: 1567595 - DNA, 25 bp, Homo sapien
ccagaaagaccaggttcctgtagtt

SEQ ID NO: 1567596 - DNA, 25 bp, Homo sapien
gcagatcttgacttctgaagggaca

SEQ ID NO: 1567597 - DNA, 25 bp, Homo sapien
cagggcagatcttgacttctgaagg

SEQ ID NO: 1567598 - DNA, 25 bp, Homo sapien
ttgacttctgaagggacattatcct

SEQ ID NO: 1567599 - DNA, 25 bp, Homo sapien
gggcagatcttgacttctgaaggga

SEQ ID NO: 1567600 - DNA, 25 bp, Homo sapien
gagataacactcaggtcaggaagac

SEQ ID NO: 1567601 - DNA, 25 bp, Homo sapien
ggagataacactcaggtcaggaaga

SEQ ID NO: 1567602 - DNA, 25 bp, Homo sapien
gataacactcaggtcaggaagacag

SEQ ID NO: 1567603 - DNA, 25 bp, Homo sapien
taacactcaggtcaggaagacagat

SEQ ID NO: 1567604 - DNA, 25 bp, Homo sapien
ctctgcagattccggggatctctcc

SEQ ID NO: 1567605 - DNA, 25 bp, Homo sapien
tctgcagattccggggatctctcct

SEQ ID NO: 1567606 - DNA, 25 bp, Homo sapien
ctgcagattccggggatctctcctt

SEQ ID NO: 1567607 - DNA, 25 bp, Homo sapien
tgcagattccggggatctctccttt

SEQ ID NO: 1567608 - DNA, 25 bp, Homo sapien
cacacctttgatgcactccctgcca

SEQ ID NO: 1567609 - DNA, 25 bp, Homo sapien
ctgcgttcacacctttgatgcactc

SEQ ID NO: 1567610 - DNA, 25 bp, Homo sapien
acacctttgatgcactccctgccac

SEQ ID NO: 1567611 - DNA, 25 bp, Homo sapien
cgttcacacctttgatgcactccct

SEQ ID NO: 1567612 - DNA, 25 bp, Homo sapien
ccactctggccatccaagctcttac

SEQ ID NO: 1567613 - DNA, 25 bp, Homo sapien
tccactctggccatccaagctctta

SEQ ID NO: 1567614 - DNA, 25 bp, Homo sapien
aaaaattatggggcctccactctgg

SEQ ID NO: 1567615 - DNA, 25 bp, Homo sapien
aattatggggcctccactctggcca

SEQ ID NO: 1567616 - DNA, 25 bp, Homo sapien
ctgatgattgccactctacgacagc

SEQ ID NO: 1567617 - DNA, 25 bp, Homo sapien
gccactgatgattgccactctacga

SEQ ID NO: 1567618 - DNA, 25 bp, Homo sapien
actgatgattgccactctacgacag

SEQ ID NO: 1567619 - DNA, 25 bp, Homo sapien
ccactgatgattgccactctacgac

SEQ ID NO: 1567620 - DNA, 25 bp, Homo sapien
accactttcggaagcagaggaagga

SEQ ID NO: 1567621 - DNA, 25 bp, Homo sapien
ccactttcggaagcagaggaaggag

SEQ ID NO: 1567622 - DNA, 25 bp, Homo sapien
aaagaattctctcacttgcagagag

SEQ ID NO: 1567623 - DNA, 25 bp, Homo sapien
ttgcagagagctcccaaacagaaac

SEQ ID NO: 1567624 - DNA, 25 bp, Homo sapien
taatggtgcaaagaagtatgggcca

SEQ ID NO: 1567625 - DNA, 25 bp, Homo sapien
gattgtataccacactctatcctgg

SEQ ID NO: 1567626 - DNA, 25 bp, Homo sapien
tattaaaaatatcagagccgggtac

SEQ ID NO: 1567627 - DNA, 25 bp, Homo sapien
gatgcagcgacctaaaactgcacca

SEQ ID NO: 1567628 - DNA, 25 bp, Homo sapien
tatataaacaccaagtgtcagagct

SEQ ID NO: 1567629 - DNA, 25 bp, Homo sapien
tgtcagagctcctaagtacagaatg

SEQ ID NO: 1567630 - DNA, 25 bp, Homo sapien
taaaactccaaagagaaatagctcc

SEQ ID NO: 1567631 - DNA, 25 bp, Homo sapien
aaagacgattctggttgggagcagt

SEQ ID NO: 1567632 - DNA, 25 bp, Homo sapien
aaaatgtgggatttgacactagaat

SEQ ID NO: 1567633 - DNA, 25 bp, Homo sapien
ggtttttcgacatgtttacatccag

SEQ ID NO: 1567634 - DNA, 25 bp, Homo sapien
tttaagagacttgtttccggcattg

SEQ ID NO: 1567635 - DNA, 25 bp, Homo sapien
agagacttgtttccggcattgcttc

SEQ ID NO: 1567636 - DNA, 25 bp, Homo sapien
tatctgcagtgtggattacttgatt

SEQ ID NO: 1567637 - DNA, 25 bp, Homo sapien
cagtgtggattacttgattgttagc

SEQ ID NO: 1567638 - DNA, 25 bp, Homo sapien
tacttgattgttagcaagtcttgaa

SEQ ID NO: 1567639 - DNA, 25 bp, Homo sapien
tgttagcaagtcttgaagacactct

SEQ ID NO: 1567640 - DNA, 25 bp, Homo sapien
tgatgtcgtgcaaggagtgaaattc

SEQ ID NO: 1567641 - DNA, 25 bp, Homo sapien
caaggagtgaaattcgattgaagag

SEQ ID NO: 1567642 - DNA, 25 bp, Homo sapien
gttagacaaaacttgtgcctgaaga

SEQ ID NO: 1567643 - DNA, 25 bp, Homo sapien
gtaaggttgctctcccgtgtgcatt

SEQ ID NO: 1567644 - DNA, 25 bp, Homo sapien
gaattacaagatgagcagtaaggcc

SEQ ID NO: 1567645 - DNA, 25 bp, Homo sapien
ggtaaggtgtgcatttcgattgaag

SEQ ID NO: 1567646 - DNA, 25 bp, Homo sapien
ttgaatttcgagtgaagtccttgcc

SEQ ID NO: 1567647 - DNA, 25 bp, Homo sapien
cagtaaggcctgaacagtctctaaa

SEQ ID NO: 1567648 - DNA, 25 bp, Homo sapien
gggcagtaaggcctgaacagtctct

SEQ ID NO: 1567649 - DNA, 25 bp, Homo sapien
aattgtgactaaagactttgtgaca

SEQ ID NO: 1567650 - DNA, 25 bp, Homo sapien
gtttgaatttcgagtgaagtcctta

SEQ ID NO: 1567651 - DNA, 25 bp, Homo sapien
tttgaatttcgagtgaagtccttac

SEQ ID NO: 1567652 - DNA, 25 bp, Homo sapien
ggcctcaagagacctgattcacata

SEQ ID NO: 1567653 - DNA, 25 bp, Homo sapien
tatctagtcatttggcaggcctcaa

SEQ ID NO: 1567654 - DNA, 25 bp, Homo sapien
gcccttggaccttcgacatgcatcg

SEQ ID NO: 1567655 - DNA, 25 bp, Homo sapien
tgcatcgcgtcatgagattcaacgt

SEQ ID NO: 1567656 - DNA, 25 bp, Homo sapien
gaccacagtgaaaggtctgtaaaga

SEQ ID NO: 1567657 - DNA, 25 bp, Homo sapien
gattcaagagaccacagtgaaaggt

SEQ ID NO: 1567658 - DNA, 25 bp, Homo sapien
aagaagtcacatgaagtgatttcag

SEQ ID NO: 1567659 - DNA, 25 bp, Homo sapien
ccagcatcctactgattcaagagac

SEQ ID NO: 1567660 - DNA, 25 bp, Homo sapien
ttcctcggcaaactgatagaaatga

SEQ ID NO: 1567661 - DNA, 25 bp, Homo sapien
gattgctatgcagtcctagtgccca

SEQ ID NO: 1567662 - DNA, 25 bp, Homo sapien
tcttgcctaaacagtgattgctatg

SEQ ID NO: 1567663 - DNA, 25 bp, Homo sapien
aaaacgcagtgtccttcttcctcgg

SEQ ID NO: 1567664 - DNA, 25 bp, Homo sapien
ctactcgcctagtgcagccgtgaga

SEQ ID NO: 1567665 - DNA, 25 bp, Homo sapien
gagaaaagggccaccctcctataga

SEQ ID NO: 1567666 - DNA, 25 bp, Homo sapien
tgggttccctgcaagaccactggaa

SEQ ID NO: 1567667 - DNA, 25 bp, Homo sapien
cactggaaccaacctcttgcataag

SEQ ID NO: 1567668 - DNA, 25 bp, Homo sapien
ggttgttgaatggttctgaccaaaa

SEQ ID NO: 1567669 - DNA, 25 bp, Homo sapien
tggagcttcctagaaaatggttgtt

SEQ ID NO: 1567670 - DNA, 25 bp, Homo sapien
tacagtaaattggtaatggtataga

SEQ ID NO: 1567671 - DNA, 25 bp, Homo sapien
taaattggtaatggtatagagtggg

SEQ ID NO: 1567672 - DNA, 25 bp, Homo sapien
tcgcacccagctgccgtctgtttat

SEQ ID NO: 1567673 - DNA, 25 bp, Homo sapien
attcatagggaggggactgcagtca

SEQ ID NO: 1567674 - DNA, 25 bp, Homo sapien
ccagctgccgtctgtttatgggtct

SEQ ID NO: 1567675 - DNA, 25 bp, Homo sapien
cacccagctgccgtctgtttatggg

SEQ ID NO: 1567676 - DNA, 25 bp, Homo sapien
cacattttgatgaccggagatgagg

SEQ ID NO: 1567677 - DNA, 25 bp, Homo sapien
ccgtctggcagaataaggacagcaa

SEQ ID NO: 1567678 - DNA, 25 bp, Homo sapien
gaggcattctgtgttgagcattcac

SEQ ID NO: 1567679 - DNA, 25 bp, Homo sapien
tagcttgttggtgggaagtaatccc

SEQ ID NO: 1567680 - DNA, 25 bp, Homo sapien
tcgaagcaagaatctgtcccagaaa

SEQ ID NO: 1567681 - DNA, 25 bp, Homo sapien
tggaagactccatgtaaagcaatat

SEQ ID NO: 1567682 - DNA, 25 bp, Homo sapien
tatacaaatctgacacatagggtta

SEQ ID NO: 1567683 - DNA, 25 bp, Homo sapien
ttctgcagatactaacaaggttagc

SEQ ID NO: 1567684 - DNA, 25 bp, Homo sapien
tgcaatcggcttccgggtctaccgg

SEQ ID NO: 1567685 - DNA, 25 bp, Homo sapien
cttccgggtttgcacgaaattgcgc

SEQ ID NO: 1567686 - DNA, 25 bp, Homo sapien
aaattgcgcgcgcatcctagaggcc

SEQ ID NO: 1567687 - DNA, 25 bp, Homo sapien
ggaaactgcgctctaggcgttcgcc

SEQ ID NO: 1567688 - DNA, 25 bp, Homo sapien
tcctctgcctcgttcccatctcttt

SEQ ID NO: 1567689 - DNA, 25 bp, Homo sapien
aataagatgcccacttccggaagag

SEQ ID NO: 1567690 - DNA, 25 bp, Homo sapien
tcaggagaaccggtggctggaaaag

SEQ ID NO: 1567691 - DNA, 25 bp, Homo sapien
tgccttctgttaatgggtctctcat

SEQ ID NO: 1567692 - DNA, 25 bp, Homo sapien
cacctgttctgatccatttttacaa

SEQ ID NO: 1567693 - DNA, 25 bp, Homo sapien
catcttcgatattacacacccctgt

SEQ ID NO: 1567694 - DNA, 25 bp, Homo sapien
tccctgttaaattccatcttcgata

SEQ ID NO: 1567695 - DNA, 25 bp, Homo sapien
aatctttcattgtccctaatctcca

SEQ ID NO: 1567696 - DNA, 25 bp, Homo sapien
ctcgtctgttgagtggattccttct

SEQ ID NO: 1567697 - DNA, 25 bp, Homo sapien
gtggattccttctgagatttttttc

SEQ ID NO: 1567698 - DNA, 25 bp, Homo sapien
gtctgttgagtggattccttctgag

SEQ ID NO: 1567699 - DNA, 25 bp, Homo sapien
gttgagtggattccttctgagattt

SEQ ID NO: 1567700 - DNA, 25 bp, Homo sapien
tagggcttagaatcaacatacctcc

SEQ ID NO: 1567701 - DNA, 25 bp, Homo sapien
gctgcttagggcttagaatcaacat

SEQ ID NO: 1567702 - DNA, 25 bp, Homo sapien
gcttagggcttagaatcaacatacc

SEQ ID NO: 1567703 - DNA, 25 bp, Homo sapien
tgcttagggcttagaatcaacatac

SEQ ID NO: 1567704 - DNA, 25 bp, Homo sapien
ttgcttccttgcataatatgtctct

SEQ ID NO: 1567705 - DNA, 25 bp, Homo sapien
tgcttccttgcataatatgtctctt

SEQ ID NO: 1567706 - DNA, 25 bp, Homo sapien
gtggaaaaatcctttgaatcaggga

SEQ ID NO: 1567707 - DNA, 25 bp, Homo sapien
agaaaatccacatttcagcaacaag

SEQ ID NO: 1567708 - DNA, 25 bp, Homo sapien
tttcagcaacaaggtatgcacacag

SEQ ID NO: 1567709 - DNA, 25 bp, Homo sapien
gaaagaaaatccacatttcagcaac

SEQ ID NO: 1567710 - DNA, 25 bp, Homo sapien
tcagcaacaaggtatgcacacagta

SEQ ID NO: 1567711 - DNA, 25 bp, Homo sapien
catcacgtccctgtataaagtcctc

SEQ ID NO: 1567712 - DNA, 25 bp, Homo sapien
ctcttcctgagagaactctatggcc

SEQ ID NO: 1567713 - DNA, 25 bp, Homo sapien
tggccacatccatgaatttcaaggg

SEQ ID NO: 1567714 - DNA, 25 bp, Homo sapien
tataaagtcctctgcgcagggtcca

SEQ ID NO: 1567715 - DNA, 25 bp, Homo sapien
cagggcagatcccggcttctgaggg

SEQ ID NO: 1567716 - DNA, 25 bp, Homo sapien
gcagatcccggcttctgaggggaca

SEQ ID NO: 1567717 - DNA, 25 bp, Homo sapien
cccggcttctgaggggacattatcc

SEQ ID NO: 1567718 - DNA, 25 bp, Homo sapien
gatcccggcttctgaggggacatta

SEQ ID NO: 1567719 - DNA, 25 bp, Homo sapien
acatggaggtaacactcaggtcagg

SEQ ID NO: 1567720 - DNA, 25 bp, Homo sapien
aacatggaggtaacactcaggtcag

SEQ ID NO: 1567721 - DNA, 25 bp, Homo sapien
catggaggtaacactcaggtcagga

SEQ ID NO: 1567722 - DNA, 25 bp, Homo sapien
atggaggtaacactcaggtcaggaa

SEQ ID NO: 1567723 - DNA, 25 bp, Homo sapien
gccgtctggatcgtttgctattttc

SEQ ID NO: 1567724 - DNA, 25 bp, Homo sapien
cactccctgccgtctggatcgtttg

SEQ ID NO: 1567725 - DNA, 25 bp, Homo sapien
tccctgccgtctggatcgtttgcta

SEQ ID NO: 1567726 - DNA, 25 bp, Homo sapien
cctgccgtctggatcgtttgctatt

SEQ ID NO: 1567727 - DNA, 25 bp, Homo sapien
gagagtttcccaaacgctatgtaat

SEQ ID NO: 1567728 - DNA, 25 bp, Homo sapien
acgctatgtaatagtgtggctttgc

SEQ ID NO: 1567729 - DNA, 25 bp, Homo sapien
cagggagatcccttaagtccaggaa

SEQ ID NO: 1567730 - DNA, 25 bp, Homo sapien
caacactttggaagagcgagccagg

SEQ ID NO: 1567731 - DNA, 25 bp, Homo sapien
ttaaaagacacaatcaggccaggta

SEQ ID NO: 1567732 - DNA, 25 bp, Homo sapien
aatgaaagcactctggacggtatct

SEQ ID NO: 1567733 - DNA, 25 bp, Homo sapien
tagtattctagacctgtccaagaag

SEQ ID NO: 1567734 - DNA, 25 bp, Homo sapien
gcagacatcttcaggctagaaagca

SEQ ID NO: 1567735 - DNA, 25 bp, Homo sapien
tagttgggcgtggtgtctgtaaccc

SEQ ID NO: 1567736 - DNA, 25 bp, Homo sapien
tcagtagcagaaatagagaccccag

SEQ ID NO: 1567737 - DNA, 25 bp, Homo sapien
catatagagaagtgagttagcccct

SEQ ID NO: 1567738 - DNA, 25 bp, Homo sapien
tgctctaaagtactgcgaacgggaa

SEQ ID NO: 1567739 - DNA, 25 bp, Homo sapien
tagttaacgatggagtacagagccc

SEQ ID NO: 1567740 - DNA, 25 bp, Homo sapien
actccgaggatgtcggacaagtggc

SEQ ID NO: 1567741 - DNA, 25 bp, Homo sapien
aacataggactttgaggacgtgaac

SEQ ID NO: 1567742 - DNA, 25 bp, Homo sapien
ggacaagtggcctccgaacatagga

SEQ ID NO: 1567743 - DNA, 25 bp, Homo sapien
tgaggacgtgaacaaagaaggttct

SEQ ID NO: 1567744 - DNA, 25 bp, Homo sapien
tacaaagggctctaaagctcagggc

SEQ ID NO: 1567745 - DNA, 25 bp, Homo sapien
tgtgaccagctcaacattccactgg

SEQ ID NO: 1567746 - DNA, 25 bp, Homo sapien
tgcgcctgacaccagaaggtttgct

SEQ ID NO: 1567747 - DNA, 25 bp, Homo sapien
tgcaaacctgttgtaaatcaagccg

SEQ ID NO: 1567748 - DNA, 25 bp, Homo sapien
gagtatcagggtattgtgtgtatca

SEQ ID NO: 1567749 - DNA, 25 bp, Homo sapien
ctgactcagacattggtaggagtat

SEQ ID NO: 1567750 - DNA, 25 bp, Homo sapien
gtgtgtatcatgctggcagtgcaga

SEQ ID NO: 1567751 - DNA, 25 bp, Homo sapien
aacacaaggaactgaggtgatgcat

SEQ ID NO: 1567752 - DNA, 25 bp, Homo sapien
tttagtgtctgacagagggtctaga

SEQ ID NO: 1567753 - DNA, 25 bp, Homo sapien
ctttagtgtctgacagagggtctag

SEQ ID NO: 1567754 - DNA, 25 bp, Homo sapien
tagatcactcagatgtaactgaaaa

SEQ ID NO: 1567755 - DNA, 25 bp, Homo sapien
tcactgacgggtttttcaaaatgct

SEQ ID NO: 1567756 - DNA, 25 bp, Homo sapien
ctggaagaaattttttcaagcggtg

SEQ ID NO: 1567757 - DNA, 25 bp, Homo sapien
tcaaaatgcttacacccagaaattt

SEQ ID NO: 1567758 - DNA, 25 bp, Homo sapien
tctgcgttatggattacttggttag

SEQ ID NO: 1567759 - DNA, 25 bp, Homo sapien
tgcagatgctctaaagacttggccg

SEQ ID NO: 1567760 - DNA, 25 bp, Homo sapien
tgtatcacaagctttgaactgcaac

SEQ ID NO: 1567761 - DNA, 25 bp, Homo sapien
actgcatttgtaaggattatctgcg

SEQ ID NO: 1567762 - DNA, 25 bp, Homo sapien
taaggcctgaacaccctcgaaatgc

SEQ ID NO: 1567763 - DNA, 25 bp, Homo sapien
gaactgcttcgaaagaccttgtcac

SEQ ID NO: 1567764 - DNA, 25 bp, Homo sapien
tcaggaaacacttgcgcccaaagac

SEQ ID NO: 1567765 - DNA, 25 bp, Homo sapien
gaaaactctctaaacgctgtgccac

SEQ ID NO: 1567766 - DNA, 25 bp, Homo sapien
gatgctgtgcaaggtcagaattgtg

SEQ ID NO: 1567767 - DNA, 25 bp, Homo sapien
atgctgtgcaaggtcagaattgtga

SEQ ID NO: 1567768 - DNA, 25 bp, Homo sapien
tgctgtgcaaggtcagaattgtgac

SEQ ID NO: 1567769 - DNA, 25 bp, Homo sapien
tcgaagtcacaaagagtaaagtagc

SEQ ID NO: 1567770 - DNA, 25 bp, Homo sapien
aaaaaagaatatgctgatccggtca

SEQ ID NO: 1567771 - DNA, 25 bp, Homo sapien
taatcctcagctaatgaagtcagcc

SEQ ID NO: 1567772 - DNA, 25 bp, Homo sapien
tacttaagaatatgctgagctggcc

SEQ ID NO: 1567773 - DNA, 25 bp, Homo sapien
tcccattgtcttgtgcgcatactaa

SEQ ID NO: 1567774 - DNA, 25 bp, Homo sapien
gaatcctagttcgtacttcccattg

SEQ ID NO: 1567775 - DNA, 25 bp, Homo sapien
gaagaaacgtattagacatggaacc

SEQ ID NO: 1567776 - DNA, 25 bp, Homo sapien
ccaaattgacacatagggttaacac

SEQ ID NO: 1567777 - DNA, 25 bp, Homo sapien
caaatacgtaagatccacaagcagg

SEQ ID NO: 1567778 - DNA, 25 bp, Homo sapien
tgggatcccggactatggcactgtt

SEQ ID NO: 1567779 - DNA, 25 bp, Homo sapien
tcttgagcctagtgaaatgcaactg

SEQ ID NO: 1567780 - DNA, 25 bp, Homo sapien
caagcaggactattggctagagaca

SEQ ID NO: 1567781 - DNA, 25 bp, Homo sapien
gagtggcggcttagacagtctttcc

SEQ ID NO: 1567782 - DNA, 25 bp, Homo sapien
cggcttagacagtctttccgcgcag

SEQ ID NO: 1567783 - DNA, 25 bp, Homo sapien
agtctttccgcgcagtcgggtgccg

SEQ ID NO: 1567784 - DNA, 25 bp, Homo sapien
ttagacagtctttccgcgcagtcgg

SEQ ID NO: 1567785 - DNA, 25 bp, Homo sapien
ttgcttccttgcataatatgtctct

SEQ ID NO: 1567786 - DNA, 25 bp, Homo sapien
tgcttccttgcataatatgtctctt

SEQ ID NO: 1567787 - DNA, 25 bp, Homo sapien
atggccacatcgctgaatgacaatt

SEQ ID NO: 1567788 - DNA, 25 bp, Homo sapien
tggccacatcgctgaatgacaattg

SEQ ID NO: 1567789 - DNA, 25 bp, Homo sapien
ccacatcgctgaatgacaattgccc

SEQ ID NO: 1567790 - DNA, 25 bp, Homo sapien
ggccacatcgctgaatgacaattgc

SEQ ID NO: 1567791 - DNA, 25 bp, Homo sapien
agcagatgcaggcttctggacggac

SEQ ID NO: 1567792 - DNA, 25 bp, Homo sapien
cagatgcaggcttctggacggacat

SEQ ID NO: 1567793 - DNA, 25 bp, Homo sapien
gcaggcttctggacggacattatcc

SEQ ID NO: 1567794 - DNA, 25 bp, Homo sapien
gatgcaggcttctggacggacatta

SEQ ID NO: 1567795 - DNA, 25 bp, Homo sapien
tgttcacacctttgatgcactccct

SEQ ID NO: 1567796 - DNA, 25 bp, Homo sapien
atggaggtaacactcaggtcaggaa

SEQ ID NO: 1567797 - DNA, 25 bp, Homo sapien
aacatggaggtaacactcaggtcag

SEQ ID NO: 1567798 - DNA, 25 bp, Homo sapien
ctgtgttcacacctttgatgcactc

SEQ ID NO: 1567799 - DNA, 25 bp, Homo sapien
gaaactgaagaattgtcactgatag

SEQ ID NO: 1567800 - DNA, 25 bp, Homo sapien
actgcttcccaatttagaactcttc

SEQ ID NO: 1567801 - DNA, 25 bp, Homo sapien
ctgccattcagtcagatgtaactga

SEQ ID NO: 1567802 - DNA, 25 bp, Homo sapien
gatttctcaacatgcttacatccat

SEQ ID NO: 1567803 - DNA, 25 bp, Homo sapien
ttgtgggagtaatgtagaaaaaaga

SEQ ID NO: 1567804 - DNA, 25 bp, Homo sapien
tgcaatgtggattacttgacggtta

SEQ ID NO: 1567805 - DNA, 25 bp, Homo sapien
caatgtggattacttgacggttagt

SEQ ID NO: 1567806 - DNA, 25 bp, Homo sapien
ctgcaatgtggattacttgacggtt

SEQ ID NO: 1567807 - DNA, 25 bp, Homo sapien
gcaatgtggattacttgacggttag

SEQ ID NO: 1567808 - DNA, 25 bp, Homo sapien
tatgtcgtgcaaggcgtgaattgcc

SEQ ID NO: 1567809 - DNA, 25 bp, Homo sapien
taaagatctcgccacagtcactaca

SEQ ID NO: 1567810 - DNA, 25 bp, Homo sapien
taggcatggtgactaaagactttcc

SEQ ID NO: 1567811 - DNA, 25 bp, Homo sapien
gaatgcaattcgactaaaccccttg

SEQ ID NO: 1567812 - DNA, 25 bp, Homo sapien
gattagaagatgggcagtgagatct

SEQ ID NO: 1567813 - DNA, 25 bp, Homo sapien
cagtatgaattctacagtgataggt

SEQ ID NO: 1567814 - DNA, 25 bp, Homo sapien
ctacagtgataggttagggaagact

SEQ ID NO: 1567815 - DNA, 25 bp, Homo sapien
cctatgtcgttgaaggtttgaattc

SEQ ID NO: 1567816 - DNA, 25 bp, Homo sapien
ctctctggtatgaatactgcaatgt

SEQ ID NO: 1567817 - DNA, 25 bp, Homo sapien
gttgtgcaaggcgtgaattccgact

SEQ ID NO: 1567818 - DNA, 25 bp, Homo sapien
tgtactaggatggaatttttactaa

SEQ ID NO: 1567819 - DNA, 25 bp, Homo sapien
tgtgcaaggcgtgaattccgactga

SEQ ID NO: 1567820 - DNA, 25 bp, Homo sapien
gcatatacaatccatctgtgtcgtt

SEQ ID NO: 1567821 - DNA, 25 bp, Homo sapien
ttctagtgatttggcaggcctcagg

SEQ ID NO: 1567822 - DNA, 25 bp, Homo sapien
tttctagtgatttggcaggcctcag

SEQ ID NO: 1567823 - DNA, 25 bp, Homo sapien
tcagcatatacaatccatctgtgtc

SEQ ID NO: 1567824 - DNA, 25 bp, Homo sapien
gctcctcagcacctccggacgcgcg

SEQ ID NO: 1567825 - DNA, 25 bp, Homo sapien
gcgtcccaggccagaagtgaaaaat

SEQ ID NO: 1567826 - DNA, 25 bp, Homo sapien
aagtttgggccggttggctcctcag

SEQ ID NO: 1567827 - DNA, 25 bp, Homo sapien
accctgaagacgcgcgcgtcccagg

SEQ ID NO: 1567828 - DNA, 25 bp, Homo sapien
ctgagagtcccgtggcctcggccct

SEQ ID NO: 1567829 - DNA, 25 bp, Homo sapien
ctctgctcaggcggccaacgctgga

SEQ ID NO: 1567830 - DNA, 25 bp, Homo sapien
caagcgaagcagaaacggaaggaaa

SEQ ID NO: 1567831 - DNA, 25 bp, Homo sapien
ttttgcatcgccaagcgaagcagaa

SEQ ID NO: 1567832 - DNA, 25 bp, Homo sapien
ctggctgggtgaaacggcgggtgtc

SEQ ID NO: 1567833 - DNA, 25 bp, Homo sapien
tgggcccgctggctgggtgaaacgg

SEQ ID NO: 1567834 - DNA, 25 bp, Homo sapien
tggtgtgtaatcacaggcactgtac

SEQ ID NO: 1567835 - DNA, 25 bp, Homo sapien
atcgtagcccgcgtgcccggagagc

SEQ ID NO: 1567836 - DNA, 25 bp, Homo sapien
taaagctagtaagtttacagaagtg

SEQ ID NO: 1567837 - DNA, 25 bp, Homo sapien
gaagacactgtttacatcaggtcac

SEQ ID NO: 1567838 - DNA, 25 bp, Homo sapien
agacactgtttacatcaggtcacca

SEQ ID NO: 1567839 - DNA, 25 bp, Homo sapien
ttaagaagacactgtttacatcagg

SEQ ID NO: 1567840 - DNA, 25 bp, Homo sapien
cgccccatgattcacttccgggttt

SEQ ID NO: 1567841 - DNA, 25 bp, Homo sapien
gaaactgcgcttgcgagttcacgcc

SEQ ID NO: 1567842 - DNA, 25 bp, Homo sapien
cgggtttccaggaaaccgcgcgcag

SEQ ID NO: 1567843 - DNA, 25 bp, Homo sapien
acgcgatcggcttccgggtcttcag

SEQ ID NO: 1567844 - DNA, 25 bp, Homo sapien
ggcttttacatgacgcgggaccgaa

SEQ ID NO: 1567845 - DNA, 25 bp, Homo sapien
cgaatccagggttgagctaaactca

SEQ ID NO: 1567846 - DNA, 25 bp, Homo sapien
gcgcttgaacctacatgcatgggaa

SEQ ID NO: 1567847 - DNA, 25 bp, Homo sapien
gaatcatgtgggacactgcgcttga

SEQ ID NO: 1567848 - DNA, 25 bp, Homo sapien
tctaggcttcttccttaggagagat

SEQ ID NO: 1567849 - DNA, 25 bp, Homo sapien
ctaggcttcttccttaggagagatg

SEQ ID NO: 1567850 - DNA, 25 bp, Homo sapien
taggcttcttccttaggagagatga

SEQ ID NO: 1567851 - DNA, 25 bp, Homo sapien
ggatacagacgaagaggcacctaca

SEQ ID NO: 1567852 - DNA, 25 bp, Homo sapien
taagactggagacgtcagatcccac

SEQ ID NO: 1567853 - DNA, 25 bp, Homo sapien
caggaaccgtcgatggaaaccaata

SEQ ID NO: 1567854 - DNA, 25 bp, Homo sapien
gatgtgtacagggaaaagctctcct

SEQ ID NO: 1567855 - DNA, 25 bp, Homo sapien
ctgtgagatggaatttaagtgacat

SEQ ID NO: 1567856 - DNA, 25 bp, Homo sapien
tggaatttaagtgacatcagagggc

SEQ ID NO: 1567857 - DNA, 25 bp, Homo sapien
gagatggaatttaagtgacatcaga

SEQ ID NO: 1567858 - DNA, 25 bp, Homo sapien
gatggaatttaagtgacatcagagg

SEQ ID NO: 1567859 - DNA, 25 bp, Homo sapien
tgtgcacattaagacttccacgagc

SEQ ID NO: 1567860 - DNA, 25 bp, Homo sapien
gaaatgccccatcctagaagaagta

SEQ ID NO: 1567861 - DNA, 25 bp, Homo sapien
tcttgataggagaggtacccctgca

SEQ ID NO: 1567862 - DNA, 25 bp, Homo sapien
cacgagcagcttccataatccagtc

SEQ ID NO: 1567863 - DNA, 25 bp, Homo sapien
tctttcgagttgtaaggttctgatg

SEQ ID NO: 1567864 - DNA, 25 bp, Homo sapien
acttctttcgagttgtaaggttctg

SEQ ID NO: 1567865 - DNA, 25 bp, Homo sapien
ttcgagttgtaaggttctgatggca

SEQ ID NO: 1567866 - DNA, 25 bp, Homo sapien
tttcgagttgtaaggttctgatggc

SEQ ID NO: 1567867 - DNA, 25 bp, Homo sapien
gagctgcttcctcatgtaacatgag

SEQ ID NO: 1567868 - DNA, 25 bp, Homo sapien
gcttcctcatgtaacatgagtcttt

SEQ ID NO: 1567869 - DNA, 25 bp, Homo sapien
ctgcttcctcatgtaacatgagtct

SEQ ID NO: 1567870 - DNA, 25 bp, Homo sapien
tcctcatgtaacatgagtctttaga

SEQ ID NO: 1567871 - DNA, 25 bp, Homo sapien
ctgggcacattaacatacgtatttc

SEQ ID NO: 1567872 - DNA, 25 bp, Homo sapien
ttaacatacgtatttcatatgcagt

SEQ ID NO: 1567873 - DNA, 25 bp, Homo sapien
gccaatgagaattctatagccacat

SEQ ID NO: 1567874 - DNA, 25 bp, Homo sapien
gaatttccactctgccaatgagaat

SEQ ID NO: 1567875 - DNA, 25 bp, Homo sapien
cgcagggttcaggaatttccactct

SEQ ID NO: 1567876 - DNA, 25 bp, Homo sapien
tgtacaaagccctctgcgcagggtt

SEQ ID NO: 1567877 - DNA, 25 bp, Homo sapien
tagttattaggagtatgtgtttcag

SEQ ID NO: 1567878 - DNA, 25 bp, Homo sapien
cggtctgtgctacccatcaactctt

SEQ ID NO: 1567879 - DNA, 25 bp, Homo sapien
atcatgtcggtctgtgctacccatc

SEQ ID NO: 1567880 - DNA, 25 bp, Homo sapien
aggagtatgtgtttcaggcctacaa

SEQ ID NO: 1567881 - DNA, 25 bp, Homo sapien
ccagataagaatggcacatgaaagc

SEQ ID NO: 1567882 - DNA, 25 bp, Homo sapien
tatcttgtgtctctcaaggtttgat

SEQ ID NO: 1567883 - DNA, 25 bp, Homo sapien
gaatcaatcaagtgattgtgagcct

SEQ ID NO: 1567884 - DNA, 25 bp, Homo sapien
tcaatcaagtgattgtgagccttac

SEQ ID NO: 1567885 - DNA, 25 bp, Homo sapien
gcaaggcttgattgatgaatcaatc

SEQ ID NO: 1567886 - DNA, 25 bp, Homo sapien
acatgcaaggcttgattgatgaatc

SEQ ID NO: 1567887 - DNA, 25 bp, Homo sapien
caccatgaatggcctgatggtaagt

SEQ ID NO: 1567888 - DNA, 25 bp, Homo sapien
ctatgtcttttaaggcgtgatctgt

SEQ ID NO: 1567889 - DNA, 25 bp, Homo sapien
gatggtaagtgttgactggtcacta

SEQ ID NO: 1567890 - DNA, 25 bp, Homo sapien
taaggcgtgatctgtgactgaaaac

SEQ ID NO: 1567891 - DNA, 25 bp, Homo sapien
cactgatgaactgcaaggtatgaac

SEQ ID NO: 1567892 - DNA, 25 bp, Homo sapien
atgatttgcaatcgttgtagcgtta

SEQ ID NO: 1567893 - DNA, 25 bp, Homo sapien
cacatttattacactcggaagatct

SEQ ID NO: 1567894 - DNA, 25 bp, Homo sapien
gattctccaatgatttgcaatcgtt

SEQ ID NO: 1567895 - DNA, 25 bp, Homo sapien
actcatcacacttgtgacatttctc

SEQ ID NO: 1567896 - DNA, 25 bp, Homo sapien
tgcattgggaacagttatctcaaaa

SEQ ID NO: 1567897 - DNA, 25 bp, Homo sapien
gcattgggaacagttatctcaaaaa

SEQ ID NO: 1567898 - DNA, 25 bp, Homo sapien
tctgatgttctgcaaggagtgacct

SEQ ID NO: 1567899 - DNA, 25 bp, Homo sapien
gatgttctgcaaggagtgacctcgg

SEQ ID NO: 1567900 - DNA, 25 bp, Homo sapien
aatgcttgatggtttgctatactca

SEQ ID NO: 1567901 - DNA, 25 bp, Homo sapien
taatgcttgatggtttgctatactc

SEQ ID NO: 1567902 - DNA, 25 bp, Homo sapien
tcaattaatgcttgatggtttgcta

SEQ ID NO: 1567903 - DNA, 25 bp, Homo sapien
attaatgcttgatggtttgctatac

SEQ ID NO: 1567904 - DNA, 25 bp, Homo sapien
cttggccatgcttgtttcaaactct

SEQ ID NO: 1567905 - DNA, 25 bp, Homo sapien
ggaaaactggctcacatctcttggc

SEQ ID NO: 1567906 - DNA, 25 bp, Homo sapien
acatctcttggccatgcttgtttca

SEQ ID NO: 1567907 - DNA, 25 bp, Homo sapien
gggaaaactggctcacatctcttgg

SEQ ID NO: 1567908 - DNA, 25 bp, Homo sapien
ggaggttgctgtgagtcaagatcgc

SEQ ID NO: 1567909 - DNA, 25 bp, Homo sapien
ttgctgtgagtcaagatcgcaccat

SEQ ID NO: 1567910 - DNA, 25 bp, Homo sapien
gaggttgctgtgagtcaagatcgca

SEQ ID NO: 1567911 - DNA, 25 bp, Homo sapien
ggttgctgtgagtcaagatcgcacc

SEQ ID NO: 1567912 - DNA, 25 bp, Homo sapien
tcacaccattgtccagcctcagccc

SEQ ID NO: 1567913 - DNA, 25 bp, Homo sapien
caggtgcccaccaccatgcccggct

SEQ ID NO: 1567914 - DNA, 25 bp, Homo sapien
aatctcctgactttgttatctgcct

SEQ ID NO: 1567915 - DNA, 25 bp, Homo sapien
ctgagtagctgagactacaggtgcc

SEQ ID NO: 1567916 - DNA, 25 bp, Homo sapien
cacggttttgattcgctgtaacctc

SEQ ID NO: 1567917 - DNA, 25 bp, Homo sapien
tgggatgagacaccccgggtttgat

SEQ ID NO: 1567918 - DNA, 25 bp, Homo sapien
tacagtggcacggttttgattcgct

SEQ ID NO: 1567919 - DNA, 25 bp, Homo sapien
tgtgggatgagacaccccgggtttg

SEQ ID NO: 1567920 - DNA, 25 bp, Homo sapien
catttcaacggtcagggacactcgg

SEQ ID NO: 1567921 - DNA, 25 bp, Homo sapien
gcccctcgtcgccaagttgcaggga

SEQ ID NO: 1567922 - DNA, 25 bp, Homo sapien
gaaggtgtctaaagtcttacatggg

SEQ ID NO: 1567923 - DNA, 25 bp, Homo sapien
aagggctaatggcaaaggttgctct

SEQ ID NO: 1567924 - DNA, 25 bp, Homo sapien
gaggcctgacacaaaggagacctca

SEQ ID NO: 1567925 - DNA, 25 bp, Homo sapien
gggcacagacctaaagttgaggaaa

SEQ ID NO: 1567926 - DNA, 25 bp, Homo sapien
tgagcaaatacagtcccccctgcgg

SEQ ID NO: 1567927 - DNA, 25 bp, Homo sapien
ttcttgtagcttttgggacaggcgg

SEQ ID NO: 1567928 - DNA, 25 bp, Homo sapien
caacagcactgacaccacaggaccc

SEQ ID NO: 1567929 - DNA, 25 bp, Homo sapien
ctgcccaacagcactgacaccacag

SEQ ID NO: 1567930 - DNA, 25 bp, Homo sapien
acaggaccctcaccctgtctccatc

SEQ ID NO: 1567931 - DNA, 25 bp, Homo sapien
cagcactgacaccacaggaccctca

SEQ ID NO: 1567932 - DNA, 25 bp, Homo sapien
tttgtgcacattcatacgcgactcc

SEQ ID NO: 1567933 - DNA, 25 bp, Homo sapien
tgtgcacattcatacgcgactccca

SEQ ID NO: 1567934 - DNA, 25 bp, Homo sapien
tgcacattcatacgcgactcccatt

SEQ ID NO: 1567935 - DNA, 25 bp, Homo sapien
cattcatacgcgactcccattggca

SEQ ID NO: 1567936 - DNA, 25 bp, Homo sapien
tgacatccagatgtggcccctgaac

SEQ ID NO: 1567937 - DNA, 25 bp, Homo sapien
tatgttgtttctctgatctggtcca

SEQ ID NO: 1567938 - DNA, 25 bp, Homo sapien
cagatatctgtgcacattaacatgt

SEQ ID NO: 1567939 - DNA, 25 bp, Homo sapien
tctgatctggtccacaaagagctga

SEQ ID NO: 1567940 - DNA, 25 bp, Homo sapien
caggaagcatccctgtgatattagg

SEQ ID NO: 1567941 - DNA, 25 bp, Homo sapien
gtaatatcacggcacaccagaaaca

SEQ ID NO: 1567942 - DNA, 25 bp, Homo sapien
cgattgtttgaaatgctaacttaaa

SEQ ID NO: 1567943 - DNA, 25 bp, Homo sapien
ctaacttaaaaagggcaggaagcat

SEQ ID NO: 1567944 - DNA, 25 bp, Homo sapien
ttaatctccgcgcgcaggacggaag

SEQ ID NO: 1567945 - DNA, 25 bp, Homo sapien
taatctccgcgcgcaggacggaagc

SEQ ID NO: 1567946 - DNA, 25 bp, Homo sapien
tccatcctcgcaacttatttaacct

SEQ ID NO: 1567947 - DNA, 25 bp, Homo sapien
tcctcgcaacttatttaacctctta

SEQ ID NO: 1567948 - DNA, 25 bp, Homo sapien
ttctgctccatcctcgcaacttatt

SEQ ID NO: 1567949 - DNA, 25 bp, Homo sapien
gctccatcctcgcaacttatttaac

SEQ ID NO: 1567950 - DNA, 25 bp, Homo sapien
ccttccacctttttcatcaagcatt

SEQ ID NO: 1567951 - DNA, 25 bp, Homo sapien
cagccttcaactccctgggtcaagt

SEQ ID NO: 1567952 - DNA, 25 bp, Homo sapien
tggtggcaaaaacagggctcactgc

SEQ ID NO: 1567953 - DNA, 25 bp, Homo sapien
gagtgtggtggcaaaaacagggctc

SEQ ID NO: 1567954 - DNA, 25 bp, Homo sapien
cgaaactgtgtctccgttggaaagg

SEQ ID NO: 1567955 - DNA, 25 bp, Homo sapien
gaaactgtgtctccgttggaaagga

SEQ ID NO: 1567956 - DNA, 25 bp, Homo sapien
tcaggttcaaacaattttcctgagt

SEQ ID NO: 1567957 - DNA, 25 bp, Homo sapien
caggttcaaacaattttcctgagta

SEQ ID NO: 1567958 - DNA, 25 bp, Homo sapien
tctcaggttcaaacaattttcctga

SEQ ID NO: 1567959 - DNA, 25 bp, Homo sapien
ctcaggttcaaacaattttcctgag

SEQ ID NO: 1567960 - DNA, 25 bp, Homo sapien
agaatacccggtgtcataggacaag

SEQ ID NO: 1567961 - DNA, 25 bp, Homo sapien
gggacctgccctacgctggttcagg

SEQ ID NO: 1567962 - DNA, 25 bp, Homo sapien
tgtcataggacaagccgctgggacc

SEQ ID NO: 1567963 - DNA, 25 bp, Homo sapien
cactctgcgggtttggggtaagaca

SEQ ID NO: 1567964 - DNA, 25 bp, Homo sapien
tgcttcctcacgtaacatgagtctt

SEQ ID NO: 1567965 - DNA, 25 bp, Homo sapien
tgaggaagagccatgcctgactcct

SEQ ID NO: 1567966 - DNA, 25 bp, Homo sapien
tcctcacgtaacatgagtctttaga

SEQ ID NO: 1567967 - DNA, 25 bp, Homo sapien
tgagctgcttcctcacgtaacatga

SEQ ID NO: 1567968 - DNA, 25 bp, Homo sapien
tgtgcagggttcaggaatttccact

SEQ ID NO: 1567969 - DNA, 25 bp, Homo sapien
gccaatgagaattctatagccacat

SEQ ID NO: 1567970 - DNA, 25 bp, Homo sapien
gaatttccactctgccaatgagaat

SEQ ID NO: 1567971 - DNA, 25 bp, Homo sapien
ttccctgtacaaagccctctgtgca

SEQ ID NO: 1567972 - DNA, 25 bp, Homo sapien
gtctgcagggacattttcctcaccc

SEQ ID NO: 1567973 - DNA, 25 bp, Homo sapien
cctcatgtctgcagggacattttcc

SEQ ID NO: 1567974 - DNA, 25 bp, Homo sapien
catgtctgcagggacattttcctca

SEQ ID NO: 1567975 - DNA, 25 bp, Homo sapien
tcctcatgtctgcagggacattttc

SEQ ID NO: 1567976 - DNA, 25 bp, Homo sapien
gccttgccctgttgacaagacctcc

SEQ ID NO: 1567977 - DNA, 25 bp, Homo sapien
tgccctgttgacaagacctccttca

SEQ ID NO: 1567978 - DNA, 25 bp, Homo sapien
gccctgttgacaagacctccttcat

SEQ ID NO: 1567979 - DNA, 25 bp, Homo sapien
cttgccctgttgacaagacctcctt

SEQ ID NO: 1567980 - DNA, 25 bp, Homo sapien
gttggtctgtgctaccagtcaactt

SEQ ID NO: 1567981 - DNA, 25 bp, Homo sapien
tatttttgtcgtgggtgcttcatgg

SEQ ID NO: 1567982 - DNA, 25 bp, Homo sapien
cagcatgcctgtgatcatgttggtc

SEQ ID NO: 1567983 - DNA, 25 bp, Homo sapien
cagatgtgaataaaagcttgatcca

SEQ ID NO: 1567984 - DNA, 25 bp, Homo sapien
gcatcactggtagacttctcaagtt

SEQ ID NO: 1567985 - DNA, 25 bp, Homo sapien
ttctcaagttgattagcaatttcac

SEQ ID NO: 1567986 - DNA, 25 bp, Homo sapien
tcactggtagacttctcaagttgat

SEQ ID NO: 1567987 - DNA, 25 bp, Homo sapien
ggaagcatcactggtagacttctca

SEQ ID NO: 1567988 - DNA, 25 bp, Homo sapien
tgggagtaatgaagaattcagggga

SEQ ID NO: 1567989 - DNA, 25 bp, Homo sapien
gtgggagtaatgaagaattcagggg

SEQ ID NO: 1567990 - DNA, 25 bp, Homo sapien
gggagtaatgaagaattcaggggat

SEQ ID NO: 1567991 - DNA, 25 bp, Homo sapien
ggagtaatgaagaattcaggggatt

SEQ ID NO: 1567992 - DNA, 25 bp, Homo sapien
atggggtatctggtgtttccttaag

SEQ ID NO: 1567993 - DNA, 25 bp, Homo sapien
tggggtatctggtgtttccttaaga

SEQ ID NO: 1567994 - DNA, 25 bp, Homo sapien
ggtattgcttgtgattaaagagctt

SEQ ID NO: 1567995 - DNA, 25 bp, Homo sapien
aggtattgcttgtgattaaagagct

SEQ ID NO: 1567996 - DNA, 25 bp, Homo sapien
gccagataggaatgacacgcaaaag

SEQ ID NO: 1567997 - DNA, 25 bp, Homo sapien
ttgccagataggaatgacacgcaaa

SEQ ID NO: 1567998 - DNA, 25 bp, Homo sapien
cagataggaatgacacgcaaaagcc

SEQ ID NO: 1567999 - DNA, 25 bp, Homo sapien
gataggaatgacacgcaaaagcctt

SEQ ID NO: 1568000 - DNA, 25 bp, Homo sapien
gtctacgatggtatacaagggatgc

SEQ ID NO: 1568001 - DNA, 25 bp, Homo sapien
ggtgacggaaggtattgccacactg

SEQ ID NO: 1568002 - DNA, 25 bp, Homo sapien
ctagagtgtgaagtctacgatggta

SEQ ID NO: 1568003 - DNA, 25 bp, Homo sapien
tatacaagggatgcccggtgacgga

SEQ ID NO: 1568004 - DNA, 25 bp, Homo sapien
tctagtatgtacagccaggactgaa

SEQ ID NO: 1568005 - DNA, 25 bp, Homo sapien
taggaacgacacacgaaagccttgt

SEQ ID NO: 1568006 - DNA, 25 bp, Homo sapien
gactgaattacgcatgaaaaccttg

SEQ ID NO: 1568007 - DNA, 25 bp, Homo sapien
ctacgatggcatagaagggttgcct

SEQ ID NO: 1568008 - DNA, 25 bp, Homo sapien
gaataagtgttgaccggtcactaaa

SEQ ID NO: 1568009 - DNA, 25 bp, Homo sapien
tgaataagtgttgaccggtcactaa

SEQ ID NO: 1568010 - DNA, 25 bp, Homo sapien
actgaagactttgtgacaatcatta

SEQ ID NO: 1568011 - DNA, 25 bp, Homo sapien
catttattacactcagaagatttct

SEQ ID NO: 1568012 - DNA, 25 bp, Homo sapien
cacatttattacactcagaagattt

SEQ ID NO: 1568013 - DNA, 25 bp, Homo sapien
tattacactcagaagatttctcttc

SEQ ID NO: 1568014 - DNA, 25 bp, Homo sapien
tttattacactcagaagatttctct

SEQ ID NO: 1568015 - DNA, 25 bp, Homo sapien
tatgaggttgccaatgaactgcaat

SEQ ID NO: 1568016 - DNA, 25 bp, Homo sapien
cagtatgaggttgccaatgaactgc

SEQ ID NO: 1568017 - DNA, 25 bp, Homo sapien
tctccagtatgaggttgccaatgaa

SEQ ID NO: 1568018 - DNA, 25 bp, Homo sapien
gaggttgccaatgaactgcaatgta

SEQ ID NO: 1568019 - DNA, 25 bp, Homo sapien
attctcctgttttgcataggatgaa

SEQ ID NO: 1568020 - DNA, 25 bp, Homo sapien
tcctgttttgcataggatgaagctt

SEQ ID NO: 1568021 - DNA, 25 bp, Homo sapien
tctcctgttttgcataggatgaagc

SEQ ID NO: 1568022 - DNA, 25 bp, Homo sapien
tgaattctcctgttttgcataggat

SEQ ID NO: 1568023 - DNA, 25 bp, Homo sapien
ctctgatgtccaacgaggtgtgaat

SEQ ID NO: 1568024 - DNA, 25 bp, Homo sapien
tgatgtccaacgaggtgtgaatgtg

SEQ ID NO: 1568025 - DNA, 25 bp, Homo sapien
tccaacgaggtgtgaatgtgaagta

SEQ ID NO: 1568026 - DNA, 25 bp, Homo sapien
tgtccaacgaggtgtgaatgtgaag

SEQ ID NO: 1568027 - DNA, 25 bp, Homo sapien
tctcatgttctgcaaggagtgacct

SEQ ID NO: 1568028 - DNA, 25 bp, Homo sapien
caaggagtgacctcggactgaagac

SEQ ID NO: 1568029 - DNA, 25 bp, Homo sapien
ttttctcatgttctgcaaggagtga

SEQ ID NO: 1568030 - DNA, 25 bp, Homo sapien
catgttctgcaaggagtgacctcgg

SEQ ID NO: 1568031 - DNA, 25 bp, Homo sapien
gctatactcactgcattgggaacag

SEQ ID NO: 1568032 - DNA, 25 bp, Homo sapien
acaaaaaacaggatggcgaaagtgg

SEQ ID NO: 1568033 - DNA, 25 bp, Homo sapien
caggatggcgaaagtggccgacatc

SEQ ID NO: 1568034 - DNA, 25 bp, Homo sapien
gatggcgaaagtggccgacatctgt

SEQ ID NO: 1568035 - DNA, 25 bp, Homo sapien
aaacaggatggcgaaagtggccgac

SEQ ID NO: 1568036 - DNA, 25 bp, Homo sapien
aaagcaaaagaatacatgggtgctt

SEQ ID NO: 1568037 - DNA, 25 bp, Homo sapien
caaagcaaaagaatacatgggtgct

SEQ ID NO: 1568038 - DNA, 25 bp, Homo sapien
gcaaaagaatacatgggtgcttttg

SEQ ID NO: 1568039 - DNA, 25 bp, Homo sapien
aaaacaaagttcagatgccgggcgc

SEQ ID NO: 1568040 - DNA, 25 bp, Homo sapien
aacaaagttcagatgccgggcgcgg

SEQ ID NO: 1568041 - DNA, 25 bp, Homo sapien
aaacaaagttcagatgccgggcgcg

SEQ ID NO: 1568042 - DNA, 25 bp, Homo sapien
cttaaagagcagtactgcctccagc

SEQ ID NO: 1568043 - DNA, 25 bp, Homo sapien
ccttaaagagcagtactgcctccag

SEQ ID NO: 1568044 - DNA, 25 bp, Homo sapien
tactaataactcatcattgtgatag

SEQ ID NO: 1568045 - DNA, 25 bp, Homo sapien
tcacccggccaatccttactaataa

SEQ ID NO: 1568046 - DNA, 25 bp, Homo sapien
catgccgttacaagcgtggtggcgt

SEQ ID NO: 1568047 - DNA, 25 bp, Homo sapien
tacataaaccatgggcttatccatc

SEQ ID NO: 1568048 - DNA, 25 bp, Homo sapien
tggccagccagtctaagctatttct

SEQ ID NO: 1568049 - DNA, 25 bp, Homo sapien
tagagcctgtagcataaaacctgca

SEQ ID NO: 1568050 - DNA, 25 bp, Homo sapien
agacaggaaaaggagcatgccatca

SEQ ID NO: 1568051 - DNA, 25 bp, Homo sapien
ctaacaggacagtgaaatgagggag

SEQ ID NO: 1568052 - DNA, 25 bp, Homo sapien
tacagttatataacagccaggcaat

SEQ ID NO: 1568053 - DNA, 25 bp, Homo sapien
gcattgcccttagttatgtagttca

SEQ ID NO: 1568054 - DNA, 25 bp, Homo sapien
actaacgacaggatgcggtggttca

SEQ ID NO: 1568055 - DNA, 25 bp, Homo sapien
tatacagccagcagacctctaaaca

SEQ ID NO: 1568056 - DNA, 25 bp, Homo sapien
tgttggccagaaaccgcttaatcct

SEQ ID NO: 1568057 - DNA, 25 bp, Homo sapien
tcattcgaatccactgggaaatcgg

SEQ ID NO: 1568058 - DNA, 25 bp, Homo sapien
tccaagtctccagatggtagtgaca

SEQ ID NO: 1568059 - DNA, 25 bp, Homo sapien
taagtaacgtgattatgatgctcac

SEQ ID NO: 1568060 - DNA, 25 bp, Homo sapien
ccatcgcaccctgcctaattttgta

SEQ ID NO: 1568061 - DNA, 25 bp, Homo sapien
agccatcgcaccctgcctaattttg

SEQ ID NO: 1568062 - DNA, 25 bp, Homo sapien
ctataggcccctgccacagcgcctg

SEQ ID NO: 1568063 - DNA, 25 bp, Homo sapien
gactataggcccctgccacagcgcc

SEQ ID NO: 1568064 - DNA, 25 bp, Homo sapien
acttgtagaagttgcgcctgcatgc

SEQ ID NO: 1568065 - DNA, 25 bp, Homo sapien
cagagaagctttcccagaaccacca

SEQ ID NO: 1568066 - DNA, 25 bp, Homo sapien
catctctgggttattatgctgaaaa

SEQ ID NO: 1568067 - DNA, 25 bp, Homo sapien
ccggactcaggttgcatgaccacgt

SEQ ID NO: 1568068 - DNA, 25 bp, Homo sapien
tctctggtgaggctcctacaatcca

SEQ ID NO: 1568069 - DNA, 25 bp, Homo sapien
cagcatggcggacaggtgccctctc

SEQ ID NO: 1568070 - DNA, 25 bp, Homo sapien
tgaggctcctacaatccaacagaaa

SEQ ID NO: 1568071 - DNA, 25 bp, Homo sapien
ggtgaggctcctacaatccaacaga

SEQ ID NO: 1568072 - DNA, 25 bp, Homo sapien
cgcttcctggtctgcgcggatgtgt

SEQ ID NO: 1568073 - DNA, 25 bp, Homo sapien
cactccacgggatccgcttcctggt

SEQ ID NO: 1568074 - DNA, 25 bp, Homo sapien
acgggatccgcttcctggtctgcgc

SEQ ID NO: 1568075 - DNA, 25 bp, Homo sapien
ggatccgcttcctggtctgcgcgga

SEQ ID NO: 1568076 - DNA, 25 bp, Homo sapien
tacagcgccctgtagcagaaagact

SEQ ID NO: 1568077 - DNA, 25 bp, Homo sapien
caacgctggctcaaggaaagtggtg

SEQ ID NO: 1568078 - DNA, 25 bp, Homo sapien
tctcgggtgaggactttgaaaagcg

SEQ ID NO: 1568079 - DNA, 25 bp, Homo sapien
ccaggcggaaatacacatctcgggt

SEQ ID NO: 1568080 - DNA, 25 bp, Homo sapien
aagtaagacgcctgcatcccagaga

SEQ ID NO: 1568081 - DNA, 25 bp, Homo sapien
atcccagagaggctcatttttcagg

SEQ ID NO: 1568082 - DNA, 25 bp, Homo sapien
cacaatcacaggagggtttgaagta

SEQ ID NO: 1568083 - DNA, 25 bp, Homo sapien
agaggctcatttttcaggggttgga

SEQ ID NO: 1568084 - DNA, 25 bp, Homo sapien
tccgcctcttatcccatctctgcat

SEQ ID NO: 1568085 - DNA, 25 bp, Homo sapien
tctccccaattcttcgatcgtcctc

SEQ ID NO: 1568086 - DNA, 25 bp, Homo sapien
tccccaattcttcgatcgtcctcaa

SEQ ID NO: 1568087 - DNA, 25 bp, Homo sapien
ttctccccaattcttcgatcgtcct

SEQ ID NO: 1568088 - DNA, 25 bp, Homo sapien
cctgatgtcgggagttcgagaccat

SEQ ID NO: 1568089 - DNA, 25 bp, Homo sapien
cttcaaaacagggaggctgagtgcg

SEQ ID NO: 1568090 - DNA, 25 bp, Homo sapien
ggctcacacctgtaatcccagcact

SEQ ID NO: 1568091 - DNA, 25 bp, Homo sapien
ttgggaggccgaggcaggcggatca

SEQ ID NO: 1568092 - DNA, 25 bp, Homo sapien
gctcagaatcaacacacctcctgcc

SEQ ID NO: 1568093 - DNA, 25 bp, Homo sapien
tgaatgttagaaatatgttgtttac

SEQ ID NO: 1568094 - DNA, 25 bp, Homo sapien
tgtttactgctcagaatcaacacac

SEQ ID NO: 1568095 - DNA, 25 bp, Homo sapien
gaaatatgttgtttactgctcagaa

SEQ ID NO: 1568096 - DNA, 25 bp, Homo sapien
cacgtaccaagtctttagaagtcaa

SEQ ID NO: 1568097 - DNA, 25 bp, Homo sapien
ttcctcacgtaccaagtctttagaa

SEQ ID NO: 1568098 - DNA, 25 bp, Homo sapien
ctcacgtaccaagtctttagaagtc

SEQ ID NO: 1568099 - DNA, 25 bp, Homo sapien
cgtaccaagtctttagaagtcaatc

SEQ ID NO: 1568100 - DNA, 25 bp, Homo sapien
cgtctctgtatagagtcctctgagc

SEQ ID NO: 1568101 - DNA, 25 bp, Homo sapien
catcacgtctctgtatagagtcctc

SEQ ID NO: 1568102 - DNA, 25 bp, Homo sapien
tcacgtctctgtatagagtcctctg

SEQ ID NO: 1568103 - DNA, 25 bp, Homo sapien
cacgtctctgtatagagtcctctga

SEQ ID NO: 1568104 - DNA, 25 bp, Homo sapien
cccacttctggagggaagttatcct

SEQ ID NO: 1568105 - DNA, 25 bp, Homo sapien
gcacatccccacttctggagggaag

SEQ ID NO: 1568106 - DNA, 25 bp, Homo sapien
acttctggagggaagttatcctcac

SEQ ID NO: 1568107 - DNA, 25 bp, Homo sapien
aagggcacatccccacttctggagg

SEQ ID NO: 1568108 - DNA, 25 bp, Homo sapien
tgatcatgtcgctctgtactactca

SEQ ID NO: 1568109 - DNA, 25 bp, Homo sapien
tagaaatacgagtttttggcctaca

SEQ ID NO: 1568110 - DNA, 25 bp, Homo sapien
aaactgagaaagcatcgttgatagc

SEQ ID NO: 1568111 - DNA, 25 bp, Homo sapien
tgtgaactaacagggctgaattgtg

SEQ ID NO: 1568112 - DNA, 25 bp, Homo sapien
agaaatacgagtttttggcctacag

SEQ ID NO: 1568113 - DNA, 25 bp, Homo sapien
gtgccaggtgtgaatcacgtctgaa

SEQ ID NO: 1568114 - DNA, 25 bp, Homo sapien
gccaggtgtgaatcacgtctgaaag

SEQ ID NO: 1568115 - DNA, 25 bp, Homo sapien
tgacatgcaaggtttgatttgtgat

SEQ ID NO: 1568116 - DNA, 25 bp, Homo sapien
gacatgcaaggtttgatttgtgatt

SEQ ID NO: 1568117 - DNA, 25 bp, Homo sapien
catgcaaggtttgactgttgcctaa

SEQ ID NO: 1568118 - DNA, 25 bp, Homo sapien
tgacatgcaaggtttgactgttgcc

SEQ ID NO: 1568119 - DNA, 25 bp, Homo sapien
gcaaggtttgactgttgcctaaaaa

SEQ ID NO: 1568120 - DNA, 25 bp, Homo sapien
gactgttgcctaaaaaccttgcaaa

SEQ ID NO: 1568121 - DNA, 25 bp, Homo sapien
tgtacagttcctttccagtgtgaat

SEQ ID NO: 1568122 - DNA, 25 bp, Homo sapien
gaccttgccacacataggacgtttg

SEQ ID NO: 1568123 - DNA, 25 bp, Homo sapien
tatacaacccacattgatggtttgg

SEQ ID NO: 1568124 - DNA, 25 bp, Homo sapien
taagatcgccaatgaactgcaagtt

SEQ ID NO: 1568125 - DNA, 25 bp, Homo sapien
ggatttgcacaatgcaatagcagca

SEQ ID NO: 1568126 - DNA, 25 bp, Homo sapien
ttggagcccaacctagacaacaagg

SEQ ID NO: 1568127 - DNA, 25 bp, Homo sapien
tgtgatccggtcaccgctcttcggc

SEQ ID NO: 1568128 - DNA, 25 bp, Homo sapien
ggctgatgctcttggatcgctttag

SEQ ID NO: 1568129 - DNA, 25 bp, Homo sapien
ttcggcctgcgcagcagagtaagac

SEQ ID NO: 1568130 - DNA, 25 bp, Homo sapien
ccaaagcaagcggatcagttaagcc

SEQ ID NO: 1568131 - DNA, 25 bp, Homo sapien
tcctggatagaggagaatcggcctc

SEQ ID NO: 1568132 - DNA, 25 bp, Homo sapien
cacggagccatgtaggtgggtcaaa

SEQ ID NO: 1568133 - DNA, 25 bp, Homo sapien
taaaatacatggtgtcaacctcagc

SEQ ID NO: 1568134 - DNA, 25 bp, Homo sapien
ccctgagataggagcaacctcagtc

SEQ ID NO: 1568135 - DNA, 25 bp, Homo sapien
gtccctgagataggagcaacctcag

SEQ ID NO: 1568136 - DNA, 25 bp, Homo sapien
ccctaaggatgaggccttgaaacat

SEQ ID NO: 1568137 - DNA, 25 bp, Homo sapien
gagcacagatccctaaggatgaggc

SEQ ID NO: 1568138 - DNA, 25 bp, Homo sapien
ccacaggaagacctacaagggtaat

SEQ ID NO: 1568139 - DNA, 25 bp, Homo sapien
acccagctgagatttagtgtttaga

SEQ ID NO: 1568140 - DNA, 25 bp, Homo sapien
cacaggaagacctacaagggtaatt

SEQ ID NO: 1568141 - DNA, 25 bp, Homo sapien
cacccagctgagatttagtgtttag

SEQ ID NO: 1568142 - DNA, 25 bp, Homo sapien
ggcatgtgaaagaacgtttctgttt

SEQ ID NO: 1568143 - DNA, 25 bp, Homo sapien
gaaaagcctgttggaagatattaat

SEQ ID NO: 1568144 - DNA, 25 bp, Homo sapien
aaggaatagaaaagcctgttggaag

SEQ ID NO: 1568145 - DNA, 25 bp, Homo sapien
aaagaaattatggccatcatggtga

SEQ ID NO: 1568146 - DNA, 25 bp, Homo sapien
tccaaagagaaatctatagccacat

SEQ ID NO: 1568147 - DNA, 25 bp, Homo sapien
taaagccctctgtgcagggttcagg

SEQ ID NO: 1568148 - DNA, 25 bp, Homo sapien
aacatcacttccctgtataaagccc

SEQ ID NO: 1568149 - DNA, 25 bp, Homo sapien
gccacatccctgaaagtctagtgtc

SEQ ID NO: 1568150 - DNA, 25 bp, Homo sapien
ttaaagagctatctaaaaaatataa

SEQ ID NO: 1568151 - DNA, 25 bp, Homo sapien
aattaagtacagatggtaggccagg

SEQ ID NO: 1568152 - DNA, 25 bp, Homo sapien
tttaaagagctatctaaaaaatata

SEQ ID NO: 1568153 - DNA, 25 bp, Homo sapien
ggtctgaaacatgtggagttcaggc

SEQ ID NO: 1568154 - DNA, 25 bp, Homo sapien
gctgatctttaataggcttgtttcc

SEQ ID NO: 1568155 - DNA, 25 bp, Homo sapien
gaatgaaagcttgatccaagctgat

SEQ ID NO: 1568156 - DNA, 25 bp, Homo sapien
tacaaattatttgggatgttgaagc

SEQ ID NO: 1568157 - DNA, 25 bp, Homo sapien
cttaaacatgagctatgattaaagg

SEQ ID NO: 1568158 - DNA, 25 bp, Homo sapien
ctccttaaacatgagctatgattaa

SEQ ID NO: 1568159 - DNA, 25 bp, Homo sapien
tgggttacgtgatgtctccttaaac

SEQ ID NO: 1568160 - DNA, 25 bp, Homo sapien
ttacgtgatgtctccttaaacatga

SEQ ID NO: 1568161 - DNA, 25 bp, Homo sapien
ttgcttctgatgaaagactttgcca

SEQ ID NO: 1568162 - DNA, 25 bp, Homo sapien
ggtgccatgcaaggtattgcttctg

SEQ ID NO: 1568163 - DNA, 25 bp, Homo sapien
gaacactatggtgccatgcaaggta

SEQ ID NO: 1568164 - DNA, 25 bp, Homo sapien
cagtatgaacactatggtgccatgc

SEQ ID NO: 1568165 - DNA, 25 bp, Homo sapien
aagttgtgatcctcaactctaaact

SEQ ID NO: 1568166 - DNA, 25 bp, Homo sapien
aaaggcatgaattatcccagaaagc

SEQ ID NO: 1568167 - DNA, 25 bp, Homo sapien
cattcgttacatgtgtaacatttct

SEQ ID NO: 1568168 - DNA, 25 bp, Homo sapien
ttcgttacatgtgtaacatttctct

SEQ ID NO: 1568169 - DNA, 25 bp, Homo sapien
tatgaagtccatgatgtgcaaggtt

SEQ ID NO: 1568170 - DNA, 25 bp, Homo sapien
aagtccatgatgtgcaaggtttgct

SEQ ID NO: 1568171 - DNA, 25 bp, Homo sapien
tccatactcgtgaaatgtgtaaggt

SEQ ID NO: 1568172 - DNA, 25 bp, Homo sapien
tcgtgaaatgtgtaaggttctctcc

SEQ ID NO: 1568173 - DNA, 25 bp, Homo sapien
caaaggtctttccatactcgtgaaa

SEQ ID NO: 1568174 - DNA, 25 bp, Homo sapien
ggtctttccatactcgtgaaatgtg

SEQ ID NO: 1568175 - DNA, 25 bp, Homo sapien
cagtatgaattgccttatgcattac

SEQ ID NO: 1568176 - DNA, 25 bp, Homo sapien
ctttccagtatgaattgccttatgc

SEQ ID NO: 1568177 - DNA, 25 bp, Homo sapien
ccagtatgaattgccttatgcatta

SEQ ID NO: 1568178 - DNA, 25 bp, Homo sapien
ttccagtatgaattgccttatgcat

SEQ ID NO: 1568179 - DNA, 25 bp, Homo sapien
tgcttttctactaaaaaccttgcca

SEQ ID NO: 1568180 - DNA, 25 bp, Homo sapien
atgacatgcaaggtgtgcttttcta

SEQ ID NO: 1568181 - DNA, 25 bp, Homo sapien
ctatgatgacatgcaaggtgtgctt

SEQ ID NO: 1568182 - DNA, 25 bp, Homo sapien
tgatgacatgcaaggtgtgcttttc

SEQ ID NO: 1568183 - DNA, 25 bp, Homo sapien
taaactgcaagatatgatcgatgtc

SEQ ID NO: 1568184 - DNA, 25 bp, Homo sapien
gacgacttcccacttaaggctttgc

SEQ ID NO: 1568185 - DNA, 25 bp, Homo sapien
aaactgcaagatatgatcgatgtct

SEQ ID NO: 1568186 - DNA, 25 bp, Homo sapien
tgataaaaaagtgacgacttcccac

SEQ ID NO: 1568187 - DNA, 25 bp, Homo sapien
tctcaagtcaatgcctatttggctc

SEQ ID NO: 1568188 - DNA, 25 bp, Homo sapien
gcctatttggctctaatgtcaatta

SEQ ID NO: 1568189 - DNA, 25 bp, Homo sapien
gtcaattaaagctttatgatcttct

SEQ ID NO: 1568190 - DNA, 25 bp, Homo sapien
actcaatctcaagtcaatgcctatt

SEQ ID NO: 1568191 - DNA, 25 bp, Homo sapien
gtaataggcagttttgcacgtcacc

SEQ ID NO: 1568192 - DNA, 25 bp, Homo sapien
cgggccctgagtttatttccatgaa

SEQ ID NO: 1568193 - DNA, 25 bp, Homo sapien
tacctgctcaaaaaaggcgctttgc

SEQ ID NO: 1568194 - DNA, 25 bp, Homo sapien
gattcagcgttcagtacaggtggcc

SEQ ID NO: 1568195 - DNA, 25 bp, Homo sapien
aaggaggacttatacctctcattta

SEQ ID NO: 1568196 - DNA, 25 bp, Homo sapien
aggaggacttatacctctcatttat

SEQ ID NO: 1568197 - DNA, 25 bp, Homo sapien
taaaggaggacttatacctctcatt

SEQ ID NO: 1568198 - DNA, 25 bp, Homo sapien
tttaaaggaggacttatacctctca

SEQ ID NO: 1568199 - DNA, 25 bp, Homo sapien
caaagcttggaaatagccacgtgga

SEQ ID NO: 1568200 - DNA, 25 bp, Homo sapien
ggaagaggacacatagttgaacagt

SEQ ID NO: 1568201 - DNA, 25 bp, Homo sapien
cagaattatctcaaagtccatagcc

SEQ ID NO: 1568202 - DNA, 25 bp, Homo sapien
gattacggatagatacacttcaagg

SEQ ID NO: 1568203 - DNA, 25 bp, Homo sapien
tgcttccctcgctaaatctgtacat

SEQ ID NO: 1568204 - DNA, 25 bp, Homo sapien
tactgtgcttccctcgctaaatctg

SEQ ID NO: 1568205 - DNA, 25 bp, Homo sapien
ctgtgcttccctcgctaaatctgta

SEQ ID NO: 1568206 - DNA, 25 bp, Homo sapien
gtgcttccctcgctaaatctgtaca

SEQ ID NO: 1568207 - DNA, 25 bp, Homo sapien
aaatgggatggaacctggtaggtca

SEQ ID NO: 1568208 - DNA, 25 bp, Homo sapien
gggctctgtgcagtatcccgggccc

SEQ ID NO: 1568209 - DNA, 25 bp, Homo sapien
gccaactatttgaacaagcagagag

SEQ ID NO: 1568210 - DNA, 25 bp, Homo sapien
aggagcagcccaggttttccgatct

SEQ ID NO: 1568211 - DNA, 25 bp, Homo sapien
ggtgatcagaactgaggcattctgt

SEQ ID NO: 1568212 - DNA, 25 bp, Homo sapien
gctaaagtgcagtgtcggaatctca

SEQ ID NO: 1568213 - DNA, 25 bp, Homo sapien
tgctcttttgccagatactcaggag

SEQ ID NO: 1568214 - DNA, 25 bp, Homo sapien
ttttggtgatcagaactgaggcatt

SEQ ID NO: 1568215 - DNA, 25 bp, Homo sapien
aaaatagtttgtgaacgaagtatct

SEQ ID NO: 1568216 - DNA, 25 bp, Homo sapien
ggcacatgccaagatgcccactaat

SEQ ID NO: 1568217 - DNA, 25 bp, Homo sapien
gcacatgccaagatgcccactaatt

SEQ ID NO: 1568218 - DNA, 25 bp, Homo sapien
atagtttgtgaacgaagtatctgag

SEQ ID NO: 1568219 - DNA, 25 bp, Homo sapien
taacaaaaagctgcccaaaatatcg

SEQ ID NO: 1568220 - DNA, 25 bp, Homo sapien
aattctgccgtgataaaagttcatc

SEQ ID NO: 1568221 - DNA, 25 bp, Homo sapien
tctgcaaacatacgtaagcaagctg

SEQ ID NO: 1568222 - DNA, 25 bp, Homo sapien
aagttcatcttatcaattgggtcac

SEQ ID NO: 1568223 - DNA, 25 bp, Homo sapien
catgattttgtcgtgagagatccac

SEQ ID NO: 1568224 - DNA, 25 bp, Homo sapien
ccggaacatcacagggtttatactg

SEQ ID NO: 1568225 - DNA, 25 bp, Homo sapien
gtgcatgcttaagcttttacccagg

SEQ ID NO: 1568226 - DNA, 25 bp, Homo sapien
ttacccaggcatcaaaaccggaaca

SEQ ID NO: 1568227 - DNA, 25 bp, Homo sapien
ccctagtaaatcactggagaattca

SEQ ID NO: 1568228 - DNA, 25 bp, Homo sapien
ccctagtaaatcactggagaatcca

SEQ ID NO: 1568229 - DNA, 25 bp, Homo sapien
tcatgccggtgagaaaccttataag

SEQ ID NO: 1568230 - DNA, 25 bp, Homo sapien
cagtcgcaattcataccttgcccaa

SEQ ID NO: 1568231 - DNA, 25 bp, Homo sapien
ccttacgaatgtaacaaatgtggca

SEQ ID NO: 1568232 - DNA, 25 bp, Homo sapien
tgttcagtcgcaattcctaccttgt

SEQ ID NO: 1568233 - DNA, 25 bp, Homo sapien
caacatcggacaattcatactggag

SEQ ID NO: 1568234 - DNA, 25 bp, Homo sapien
atttcacaccttgcacaacatcgga

SEQ ID NO: 1568235 - DNA, 25 bp, Homo sapien
aatgtagtgagcgtggcaaggcctt

SEQ ID NO: 1568236 - DNA, 25 bp, Homo sapien
caaataatccatactaaagagacgc

SEQ ID NO: 1568237 - DNA, 25 bp, Homo sapien
tgtcaacagtagttccttagtttcc

SEQ ID NO: 1568238 - DNA, 25 bp, Homo sapien
gcaaatattgggacagaacactaca

SEQ ID NO: 1568239 - DNA, 25 bp, Homo sapien
gaaaggatgatgcacaaaagcagcc

SEQ ID NO: 1568240 - DNA, 25 bp, Homo sapien
gacatgaaagccacgacatacaaga

SEQ ID NO: 1568241 - DNA, 25 bp, Homo sapien
cgagtgcgtgtgacctataaggaaa

SEQ ID NO: 1568242 - DNA, 25 bp, Homo sapien
tgaagacattataagcgagtgcgtg

SEQ ID NO: 1568243 - DNA, 25 bp, Homo sapien
cctcagcctcagaagttgctggaat

SEQ ID NO: 1568244 - DNA, 25 bp, Homo sapien
cagcctcagaagttgctggaattac

SEQ ID NO: 1568245 - DNA, 25 bp, Homo sapien
gcctcagaagttgctggaattacag

SEQ ID NO: 1568246 - DNA, 25 bp, Homo sapien
cgcctcagcctcagaagttgctgga

SEQ ID NO: 1568247 - DNA, 25 bp, Homo sapien
taaaccgatgtctgctctgtacgat

SEQ ID NO: 1568248 - DNA, 25 bp, Homo sapien
gacacttgcttatctgtaggacggc

SEQ ID NO: 1568249 - DNA, 25 bp, Homo sapien
taccgctgtctaggaaggattacca

SEQ ID NO: 1568250 - DNA, 25 bp, Homo sapien
tctgtacgatggtggacataccgct

SEQ ID NO: 1568251 - DNA, 25 bp, Homo sapien
taaggtaagattatcacctgaacct

SEQ ID NO: 1568252 - DNA, 25 bp, Homo sapien
aggtaagattatcacctgaacctgg

SEQ ID NO: 1568253 - DNA, 25 bp, Homo sapien
actagaaaggctaaggtaagattat

SEQ ID NO: 1568254 - DNA, 25 bp, Homo sapien
caggtactagaaaggctaaggtaag

SEQ ID NO: 1568255 - DNA, 25 bp, Homo sapien
agtcactgcctctgtgctcacctgc

SEQ ID NO: 1568256 - DNA, 25 bp, Homo sapien
gtcactgcctctgtgctcacctgca

SEQ ID NO: 1568257 - DNA, 25 bp, Homo sapien
tcactgcctctgtgctcacctgcat

SEQ ID NO: 1568258 - DNA, 25 bp, Homo sapien
cttttctctgtataaggagtgccat

SEQ ID NO: 1568259 - DNA, 25 bp, Homo sapien
ttggaaattggctgaataacatatg

SEQ ID NO: 1568260 - DNA, 25 bp, Homo sapien
ttgtgacttttctctgtataaggag

SEQ ID NO: 1568261 - DNA, 25 bp, Homo sapien
gaaattggctgaataacatatgggt

SEQ ID NO: 1568262 - DNA, 25 bp, Homo sapien
tcttagcacattaagctcgtggaga

SEQ ID NO: 1568263 - DNA, 25 bp, Homo sapien
cagacatgcatgatacaaggtgttt

SEQ ID NO: 1568264 - DNA, 25 bp, Homo sapien
ataatagcaggagattctttaaacc

SEQ ID NO: 1568265 - DNA, 25 bp, Homo sapien
ggtgttaagaggcttctgaaacagg

SEQ ID NO: 1568266 - DNA, 25 bp, Homo sapien
cgtattaatgtccacgaagtatgtg

SEQ ID NO: 1568267 - DNA, 25 bp, Homo sapien
tattaatgtccacgaagtatgtggt

SEQ ID NO: 1568268 - DNA, 25 bp, Homo sapien
taatgtccacgaagtatgtggtaaa

SEQ ID NO: 1568269 - DNA, 25 bp, Homo sapien
tcacgtattaatgtccacgaagtat

SEQ ID NO: 1568270 - DNA, 25 bp, Homo sapien
aaaagctacaatactcccctcacaa

SEQ ID NO: 1568271 - DNA, 25 bp, Homo sapien
taaaaattcagagtcaatgagccag

SEQ ID NO: 1568272 - DNA, 25 bp, Homo sapien
aatactcccctcacaaactggaagc

SEQ ID NO: 1568273 - DNA, 25 bp, Homo sapien
tctactccctctcatatataaattg

SEQ ID NO: 1568274 - DNA, 25 bp, Homo sapien
tgttgggagtcaatggcatcagaac

SEQ ID NO: 1568275 - DNA, 25 bp, Homo sapien
gaccggaaaagctcaacctgagtga

SEQ ID NO: 1568276 - DNA, 25 bp, Homo sapien
gtgtgataaagaccaacccttccca

SEQ ID NO: 1568277 - DNA, 25 bp, Homo sapien
caggcccacatgtaagaattcagac

SEQ ID NO: 1568278 - DNA, 25 bp, Homo sapien
tcctgagacctccacctgcctcgac

SEQ ID NO: 1568279 - DNA, 25 bp, Homo sapien
caaactcctgagacctccacctgcc

SEQ ID NO: 1568280 - DNA, 25 bp, Homo sapien
cctcgacctcccaaaaagctgcaat

SEQ ID NO: 1568281 - DNA, 25 bp, Homo sapien
gcctcgacctcccaaaaagctgcaa

SEQ ID NO: 1568282 - DNA, 25 bp, Homo sapien
gatggaaaagccagatacttgttct

SEQ ID NO: 1568283 - DNA, 25 bp, Homo sapien
ccacatactggagcatagatataca

SEQ ID NO: 1568284 - DNA, 25 bp, Homo sapien
cagctttccctgacactagtatatc

SEQ ID NO: 1568285 - DNA, 25 bp, Homo sapien
tgtccagcagtattgttgttttcac

SEQ ID NO: 1568286 - DNA, 25 bp, Homo sapien
gagtgtggtaagaccttcagtcaga

SEQ ID NO: 1568287 - DNA, 25 bp, Homo sapien
gtaatgagtgtggtaagaccttcag

SEQ ID NO: 1568288 - DNA, 25 bp, Homo sapien
tacaagtgtaatgagtgtggtaaga

SEQ ID NO: 1568289 - DNA, 25 bp, Homo sapien
gtgtaatgagtgtggtaagaccttc

SEQ ID NO: 1568290 - DNA, 25 bp, Homo sapien
tcatctgtgtgaactgcctcactcc

SEQ ID NO: 1568291 - DNA, 25 bp, Homo sapien
agaccctgcatcttcagccagtcct

SEQ ID NO: 1568292 - DNA, 25 bp, Homo sapien
cctgaggcatctccatttttgtcat

SEQ ID NO: 1568293 - DNA, 25 bp, Homo sapien
tgcacatcaccaggacccagtttgg

SEQ ID NO: 1568294 - DNA, 25 bp, Homo sapien
cactctatctttcagcctatgagtg

SEQ ID NO: 1568295 - DNA, 25 bp, Homo sapien
cagagattacagacacttaccaagc

SEQ ID NO: 1568296 - DNA, 25 bp, Homo sapien
cctatgagtgcagcctcttgatctt

SEQ ID NO: 1568297 - DNA, 25 bp, Homo sapien
ctctatctttcagcctatgagtgca

SEQ ID NO: 1568298 - DNA, 25 bp, Homo sapien
cagtgagcctccttggaacttggcg

SEQ ID NO: 1568299 - DNA, 25 bp, Homo sapien
agaattttcaatgggatgcagtgcc

SEQ ID NO: 1568300 - DNA, 25 bp, Homo sapien
tctaaagcaggtcatgtcagtccct

SEQ ID NO: 1568301 - DNA, 25 bp, Homo sapien
tgtcttccaatctgagccccagtga

SEQ ID NO: 1568302 - DNA, 25 bp, Homo sapien
tgtcaggagtcaatggcctcagaac

SEQ ID NO: 1568303 - DNA, 25 bp, Homo sapien
ggtcaatagctatgtgttcacaact

SEQ ID NO: 1568304 - DNA, 25 bp, Homo sapien
tatgtgttcacaactctgcatttta

SEQ ID NO: 1568305 - DNA, 25 bp, Homo sapien
gcttatgtcttagttgtacacctga

SEQ ID NO: 1568306 - DNA, 25 bp, Homo sapien
tattcaccatcaggcaattcatggt

SEQ ID NO: 1568307 - DNA, 25 bp, Homo sapien
gcctttggcaagcagtcaacactta

SEQ ID NO: 1568308 - DNA, 25 bp, Homo sapien
ggaacaacatactggacttcacact

SEQ ID NO: 1568309 - DNA, 25 bp, Homo sapien
ggagaatccataatgaagagagatc

SEQ ID NO: 1568310 - DNA, 25 bp, Homo sapien
accatatgtctattaaaggtacagt

SEQ ID NO: 1568311 - DNA, 25 bp, Homo sapien
aaaccatatgtctattaaaggtaca

SEQ ID NO: 1568312 - DNA, 25 bp, Homo sapien
caaaaccatatgtctattaaaggta

SEQ ID NO: 1568313 - DNA, 25 bp, Homo sapien
ggcaaaaccatatgtctattaaagg

SEQ ID NO: 1568314 - DNA, 25 bp, Homo sapien
cattgtttagttctactgtcatttc

SEQ ID NO: 1568315 - DNA, 25 bp, Homo sapien
gacacagtggctttcaacttgttca

SEQ ID NO: 1568316 - DNA, 25 bp, Homo sapien
tgaggtttccattgtttagttctac

SEQ ID NO: 1568317 - DNA, 25 bp, Homo sapien
actgtcatttccttaagacacagtg

SEQ ID NO: 1568318 - DNA, 25 bp, Homo sapien
aacccaatcgtatgttctgtttaca

SEQ ID NO: 1568319 - DNA, 25 bp, Homo sapien
cggttagtgaaagagatagccctct

SEQ ID NO: 1568320 - DNA, 25 bp, Homo sapien
ccaatcgtatgttctgtttacagag

SEQ ID NO: 1568321 - DNA, 25 bp, Homo sapien
ctgaggacggttagtgaaagagata

SEQ ID NO: 1568322 - DNA, 25 bp, Homo sapien
gggtattcttgcctgcggagctcca

SEQ ID NO: 1568323 - DNA, 25 bp, Homo sapien
aaaccgtgttgcgattgtgtgggcc

SEQ ID NO: 1568324 - DNA, 25 bp, Homo sapien
gcagtcaccgctttcattgaacctg

SEQ ID NO: 1568325 - DNA, 25 bp, Homo sapien
tgcaggcgtcttactccaaaccgtg

SEQ ID NO: 1568326 - DNA, 25 bp, Homo sapien
ggatagtgactgattgagcaagcaa

SEQ ID NO: 1568327 - DNA, 25 bp, Homo sapien
tctatgcctaacatcagcttctaaa

SEQ ID NO: 1568328 - DNA, 25 bp, Homo sapien
tgaaaggatagtgactgattgagca

SEQ ID NO: 1568329 - DNA, 25 bp, Homo sapien
tggaatctatgcctaacatcagctt

SEQ ID NO: 1568330 - DNA, 25 bp, Homo sapien
tgtgagcgcagtctcgtgatcttgg

SEQ ID NO: 1568331 - DNA, 25 bp, Homo sapien
tccaggctgtgagcgcagtctcgtg

SEQ ID NO: 1568332 - DNA, 25 bp, Homo sapien
cgtccaggctgtgagcgcagtctcg

SEQ ID NO: 1568333 - DNA, 25 bp, Homo sapien
aggctgtgagcgcagtctcgtgatc

SEQ ID NO: 1568334 - DNA, 25 bp, Homo sapien
gtgcagcattgagcatcgaagctct

SEQ ID NO: 1568335 - DNA, 25 bp, Homo sapien
tgtgtgcagcattgagcatcgaagc

SEQ ID NO: 1568336 - DNA, 25 bp, Homo sapien
ctgcagtggcgcaggtgcttgtcat

SEQ ID NO: 1568337 - DNA, 25 bp, Homo sapien
tctgtgtgcagcattgagcatcgaa

SEQ ID NO: 1568338 - DNA, 25 bp, Homo sapien
tacctctggtccacattgcctgttc

SEQ ID NO: 1568339 - DNA, 25 bp, Homo sapien
ctgttctgtgtgattatttttgctc

SEQ ID NO: 1568340 - DNA, 25 bp, Homo sapien
ctacctctggtccacattgcctgtt

SEQ ID NO: 1568341 - DNA, 25 bp, Homo sapien
atttttgctcctttgccatccactg

SEQ ID NO: 1568342 - DNA, 25 bp, Homo sapien
tgactcaactcggagcttctcagga

SEQ ID NO: 1568343 - DNA, 25 bp, Homo sapien
tggtgaagtgtctcctgctcgtaac

SEQ ID NO: 1568344 - DNA, 25 bp, Homo sapien
gaaaagctcagtcagagtgacgctg

SEQ ID NO: 1568345 - DNA, 25 bp, Homo sapien
tgctcgtaacaacagtgactcaacc

SEQ ID NO: 1568346 - DNA, 25 bp, Homo sapien
acattgtcatcttttaagacatcag

SEQ ID NO: 1568347 - DNA, 25 bp, Homo sapien
tgtcatcttttaagacatcagtcat

SEQ ID NO: 1568348 - DNA, 25 bp, Homo sapien
tgtggacattgtcatcttttaagac

SEQ ID NO: 1568349 - DNA, 25 bp, Homo sapien
cattgtcatcttttaagacatcagt

SEQ ID NO: 1568350 - DNA, 25 bp, Homo sapien
gccccgggcacaagatggcgccgcc

SEQ ID NO: 1568351 - DNA, 25 bp, Homo sapien
caccggccccgggcacaagatggcg

SEQ ID NO: 1568352 - DNA, 25 bp, Homo sapien
ccccaccggccccgggcacaagatg

SEQ ID NO: 1568353 - DNA, 25 bp, Homo sapien
ccggccccgggcacaagatggcgcc

SEQ ID NO: 1568354 - DNA, 25 bp, Homo sapien
tggagctcccaggcatggggcgcgg

SEQ ID NO: 1568355 - DNA, 25 bp, Homo sapien
tcctcagactccaggccgttcccat

SEQ ID NO: 1568356 - DNA, 25 bp, Homo sapien
tcgggctccggctccaacagcagct

SEQ ID NO: 1568357 - DNA, 25 bp, Homo sapien
gctggagcggctcctcttcgggctc

SEQ ID NO: 1568358 - DNA, 25 bp, Homo sapien
agcttcgatagcttccagccccggg

SEQ ID NO: 1568359 - DNA, 25 bp, Homo sapien
cagcttcgatagcttccagccccgg

SEQ ID NO: 1568360 - DNA, 25 bp, Homo sapien
actccagcttcgatagcttccagcc

SEQ ID NO: 1568361 - DNA, 25 bp, Homo sapien
gcttcgatagcttccagccccgggt

SEQ ID NO: 1568362 - DNA, 25 bp, Homo sapien
tctgctgttgcaccgcagtccacat

SEQ ID NO: 1568363 - DNA, 25 bp, Homo sapien
gctgttgcaccgcagtccacattgc

SEQ ID NO: 1568364 - DNA, 25 bp, Homo sapien
ttctgctgttgcaccgcagtccaca

SEQ ID NO: 1568365 - DNA, 25 bp, Homo sapien
gttgcaccgcagtccacattgccag

SEQ ID NO: 1568366 - DNA, 25 bp, Homo sapien
gtgcagcattgagcatcgaagctct

SEQ ID NO: 1568367 - DNA, 25 bp, Homo sapien
ctgcagtggcgcagttgcttgtcat

SEQ ID NO: 1568368 - DNA, 25 bp, Homo sapien
tgcagtggcgcagttgcttgtcatc

SEQ ID NO: 1568369 - DNA, 25 bp, Homo sapien
tctgtgtgcagcattgagcatcgaa

SEQ ID NO: 1568370 - DNA, 25 bp, Homo sapien
gtgcctttgtcatccactgtctgga

SEQ ID NO: 1568371 - DNA, 25 bp, Homo sapien
ttttgtgcctttgtcatccactgtc

SEQ ID NO: 1568372 - DNA, 25 bp, Homo sapien
cacctctcgtccacgttgcctgttc

SEQ ID NO: 1568373 - DNA, 25 bp, Homo sapien
ttgtgcctttgtcatccactgtctg

SEQ ID NO: 1568374 - DNA, 25 bp, Homo sapien
gttattctattctgcaaataaactg

SEQ ID NO: 1568375 - DNA, 25 bp, Homo sapien
tttttggtgctgttattctattctg

SEQ ID NO: 1568376 - DNA, 25 bp, Homo sapien
ttgcattttggctgactctttgtga

SEQ ID NO: 1568377 - DNA, 25 bp, Homo sapien
tgcattttggctgactctttgtgat

SEQ ID NO: 1568378 - DNA, 25 bp, Homo sapien
tgtaaggtttgtgatgaggctttcg

SEQ ID NO: 1568379 - DNA, 25 bp, Homo sapien
agaatgtgacaaagttttcagtcgc

SEQ ID NO: 1568380 - DNA, 25 bp, Homo sapien
ggtttgtgatgaggctttcgcatat

SEQ ID NO: 1568381 - DNA, 25 bp, Homo sapien
aagaatgtgacaaagttttcagtcg

SEQ ID NO: 1568382 - DNA, 25 bp, Homo sapien
ggtacaaacgtctcacctctttaca

SEQ ID NO: 1568383 - DNA, 25 bp, Homo sapien
tctctagcaaatggaacggttttct

SEQ ID NO: 1568384 - DNA, 25 bp, Homo sapien
gtggatttcaaggtacaaacgtctc

SEQ ID NO: 1568385 - DNA, 25 bp, Homo sapien
ccaatccatcaatatgggttctatc

SEQ ID NO: 1568386 - DNA, 25 bp, Homo sapien
cacattgatttgcttgactatgttg

SEQ ID NO: 1568387 - DNA, 25 bp, Homo sapien
tttgcttgactatgttgaaccattt

SEQ ID NO: 1568388 - DNA, 25 bp, Homo sapien
cattatgttcaagtggtatatcaca

SEQ ID NO: 1568389 - DNA, 25 bp, Homo sapien
ctccatgtattgagatgatgtggtt

SEQ ID NO: 1568390 - DNA, 25 bp, Homo sapien
ttggatttgtcggaacattctctgc

SEQ ID NO: 1568391 - DNA, 25 bp, Homo sapien
ggatttgtcggaacattctctgcaa

SEQ ID NO: 1568392 - DNA, 25 bp, Homo sapien
tttgtcggaacattctctgcaatta

SEQ ID NO: 1568393 - DNA, 25 bp, Homo sapien
gatttgtcggaacattctctgcaat

SEQ ID NO: 1568394 - DNA, 25 bp, Homo sapien
tccaccatcaaggtcaagccgtcct

SEQ ID NO: 1568395 - DNA, 25 bp, Homo sapien
tagaatgccttggtgcaatcgcagc

SEQ ID NO: 1568396 - DNA, 25 bp, Homo sapien
gacaaccctttgtattaacatctag

SEQ ID NO: 1568397 - DNA, 25 bp, Homo sapien
gccctgcaaaacttgctacttttta

SEQ ID NO: 1568398 - DNA, 25 bp, Homo sapien
ctctgtcctgcgctgattggcatag

SEQ ID NO: 1568399 - DNA, 25 bp, Homo sapien
cctctgtcctgcgctgattggcata

SEQ ID NO: 1568400 - DNA, 25 bp, Homo sapien
cactggcggctttcgcctccaaaac

SEQ ID NO: 1568401 - DNA, 25 bp, Homo sapien
tcactggcggctttcgcctccaaaa

SEQ ID NO: 1568402 - DNA, 25 bp, Homo sapien
caaagcctttcgtgcacagtcaaca

SEQ ID NO: 1568403 - DNA, 25 bp, Homo sapien
cgacaaggcttttgggcgtgattca

SEQ ID NO: 1568404 - DNA, 25 bp, Homo sapien
caaggctttcaagtgttactcacac

SEQ ID NO: 1568405 - DNA, 25 bp, Homo sapien
gcaaggtttttaggacacagtcaca

SEQ ID NO: 1568406 - DNA, 25 bp, Homo sapien
ggtcagggatttgccaagagacagc

SEQ ID NO: 1568407 - DNA, 25 bp, Homo sapien
gatggtcagggatttgccaagagac

SEQ ID NO: 1568408 - DNA, 25 bp, Homo sapien
gacagacagcaaggtagggagaggg

SEQ ID NO: 1568409 - DNA, 25 bp, Homo sapien
cagaaaggctcatgagaatgaggga

SEQ ID NO: 1568410 - DNA, 25 bp, Homo sapien
gggaggccgcgttctctgcccggtg

SEQ ID NO: 1568411 - DNA, 25 bp, Homo sapien
ggtggtgggatcctgcggaccccac

SEQ ID NO: 1568412 - DNA, 25 bp, Homo sapien
gccgcgttctctgcccggtggtggg

SEQ ID NO: 1568413 - DNA, 25 bp, Homo sapien
gtggtgggatcctgcggaccccacc

SEQ ID NO: 1568414 - DNA, 25 bp, Homo sapien
gagcaaatggagacattcccctagg

SEQ ID NO: 1568415 - DNA, 25 bp, Homo sapien
ccggcaattctgtacctgggatgtg

SEQ ID NO: 1568416 - DNA, 25 bp, Homo sapien
ttcttccttcaacaagagcaaatgg

SEQ ID NO: 1568417 - DNA, 25 bp, Homo sapien
agacattcccctaggagtccggaag

SEQ ID NO: 1568418 - DNA, 25 bp, Homo sapien
ctgtcctgtgcttgtagattcgccc

SEQ ID NO: 1568419 - DNA, 25 bp, Homo sapien
gtgcttgtagattcgcccggaccag

SEQ ID NO: 1568420 - DNA, 25 bp, Homo sapien
tgtcctgtgcttgtagattcgcccg

SEQ ID NO: 1568421 - DNA, 25 bp, Homo sapien
cctgtgcttgtagattcgcccggac

SEQ ID NO: 1568422 - DNA, 25 bp, Homo sapien
tatacacaggggtttcgtgcactgg

SEQ ID NO: 1568423 - DNA, 25 bp, Homo sapien
tctaggggatacgtaacagggacta

SEQ ID NO: 1568424 - DNA, 25 bp, Homo sapien
tttcgtgcactggtagagagaaaca

SEQ ID NO: 1568425 - DNA, 25 bp, Homo sapien
ggactacagtcccagatatatacac

SEQ ID NO: 1568426 - DNA, 25 bp, Homo sapien
tccacagcgcaaggcaatacagaag

SEQ ID NO: 1568427 - DNA, 25 bp, Homo sapien
tgatcaaaggcatgctggaaacaag

SEQ ID NO: 1568428 - DNA, 25 bp, Homo sapien
gaaaggaatggtcacgaagcaccca

SEQ ID NO: 1568429 - DNA, 25 bp, Homo sapien
tagtacagaccgacatgatcaaagg

SEQ ID NO: 1568430 - DNA, 25 bp, Homo sapien
agaaaggctgggctcgctggtattt

SEQ ID NO: 1568431 - DNA, 25 bp, Homo sapien
cactatggggcttagcgggtattca

SEQ ID NO: 1568432 - DNA, 25 bp, Homo sapien
aacttatagggtccagcactatggg

SEQ ID NO: 1568433 - DNA, 25 bp, Homo sapien
gggcttgggagacaactaccatcaa

SEQ ID NO: 1568434 - DNA, 25 bp, Homo sapien
catgaagattttcatataagggacc

SEQ ID NO: 1568435 - DNA, 25 bp, Homo sapien
tcaagcaatccatgggtgtagggaa

SEQ ID NO: 1568436 - DNA, 25 bp, Homo sapien
caaagcctttactggacagtcaaca

SEQ ID NO: 1568437 - DNA, 25 bp, Homo sapien
tgctacaaccattgcaaatcattac

SEQ ID NO: 1568438 - DNA, 25 bp, Homo sapien
tacagaatccatattgaagagagat

SEQ ID NO: 1568439 - DNA, 25 bp, Homo sapien
gtttacattcgcagatcacaccttg

SEQ ID NO: 1568440 - DNA, 25 bp, Homo sapien
caagacttttggtcgaaattcagcc

SEQ ID NO: 1568441 - DNA, 25 bp, Homo sapien
ttcatactggagagggatcatacaa

SEQ ID NO: 1568442 - DNA, 25 bp, Homo sapien
caaggttttccggagtgattcatac

SEQ ID NO: 1568443 - DNA, 25 bp, Homo sapien
tgggccccatggtgtcagtgatgtt

SEQ ID NO: 1568444 - DNA, 25 bp, Homo sapien
gtgggccccatggtgtcagtgatgt

SEQ ID NO: 1568445 - DNA, 25 bp, Homo sapien
ccgtgtcttttctcagtccctctca

SEQ ID NO: 1568446 - DNA, 25 bp, Homo sapien
cgtgtcttttctcagtccctctcat

SEQ ID NO: 1568447 - DNA, 25 bp, Homo sapien
ccggaagcggatggcgtggactgaa

SEQ ID NO: 1568448 - DNA, 25 bp, Homo sapien
tctcggggatctggcccaggtcccg

SEQ ID NO: 1568449 - DNA, 25 bp, Homo sapien
gactgaaagttgcacggcggcgtgt

SEQ ID NO: 1568450 - DNA, 25 bp, Homo sapien
ttctgtcctgcgccgattggcacag

SEQ ID NO: 1568451 - DNA, 25 bp, Homo sapien
agctgctccagcctcactggcgggt

SEQ ID NO: 1568452 - DNA, 25 bp, Homo sapien
tccagcctcactggcgggtttcacc

SEQ ID NO: 1568453 - DNA, 25 bp, Homo sapien
tatttccctgactgctgagctgctc

SEQ ID NO: 1568454 - DNA, 25 bp, Homo sapien
tcactggcgggtttcacctctaaaa

SEQ ID NO: 1568455 - DNA, 25 bp, Homo sapien
tacctttcgctcaggcaaggctttg

SEQ ID NO: 1568456 - DNA, 25 bp, Homo sapien
ttcgcattctagtttgcattcctgc

SEQ ID NO: 1568457 - DNA, 25 bp, Homo sapien
tggaccgtcagcatgaaattgtacc

SEQ ID NO: 1568458 - DNA, 25 bp, Homo sapien
gcattcctgccgtagacaacttcca

SEQ ID NO: 1568459 - DNA, 25 bp, Homo sapien
gaatccatactagacagagatctta

SEQ ID NO: 1568460 - DNA, 25 bp, Homo sapien
caaatgcaatgagtatagcaaacca

SEQ ID NO: 1568461 - DNA, 25 bp, Homo sapien
tagtctgaggtcactccttgcagga

SEQ ID NO: 1568462 - DNA, 25 bp, Homo sapien
caaaagtcatatgtgtggcaagatc

SEQ ID NO: 1568463 - DNA, 25 bp, Homo sapien
ggtcttcagtcaagcttcatcttat

SEQ ID NO: 1568464 - DNA, 25 bp, Homo sapien
gtttatcagcgaactcatactggag

SEQ ID NO: 1568465 - DNA, 25 bp, Homo sapien
tcatcttatgcaaaacacaggtgaa

SEQ ID NO: 1568466 - DNA, 25 bp, Homo sapien
ttcagacttcgttcataccttgcag

SEQ ID NO: 1568467 - DNA, 25 bp, Homo sapien
agaatgtgacaaagtttttagtcgc

SEQ ID NO: 1568468 - DNA, 25 bp, Homo sapien
gcatatcttgcaagtcatcatagac

SEQ ID NO: 1568469 - DNA, 25 bp, Homo sapien
cacaacatattgtaattcacactgg

SEQ ID NO: 1568470 - DNA, 25 bp, Homo sapien
gctttcagacgtgattcacacctgg

SEQ ID NO: 1568471 - DNA, 25 bp, Homo sapien
cccgggtctccacgctctgcacatc

SEQ ID NO: 1568472 - DNA, 25 bp, Homo sapien
agctcccgggtctccacgctctgca

SEQ ID NO: 1568473 - DNA, 25 bp, Homo sapien
gggtctccacgctctgcacatcacc

SEQ ID NO: 1568474 - DNA, 25 bp, Homo sapien
ctcccgggtctccacgctctgcaca

SEQ ID NO: 1568475 - DNA, 25 bp, Homo sapien
tccgtggtgtcagtgatgctgggca

SEQ ID NO: 1568476 - DNA, 25 bp, Homo sapien
gccacatctggatggacgtttagct

SEQ ID NO: 1568477 - DNA, 25 bp, Homo sapien
gctctttgtggaccagatcagagaa

SEQ ID NO: 1568478 - DNA, 25 bp, Homo sapien
gatggacgtttagctctttgtggac

SEQ ID NO: 1568479 - DNA, 25 bp, Homo sapien
ctcccccgtcccgaggaggccgcat

SEQ ID NO: 1568480 - DNA, 25 bp, Homo sapien
cctcgtcggtccctggagcgcagcg

SEQ ID NO: 1568481 - DNA, 25 bp, Homo sapien
gcagcgccgcctcccccgtcccgag

SEQ ID NO: 1568482 - DNA, 25 bp, Homo sapien
tcgtcggtccctggagcgcagcgcc

SEQ ID NO: 1568483 - DNA, 25 bp, Homo sapien
agagaaggctgggatcggggaagtc

SEQ ID NO: 1568484 - DNA, 25 bp, Homo sapien
gggaagtccggacgggctcagagca

SEQ ID NO: 1568485 - DNA, 25 bp, Homo sapien
ctcagagcagaggatttgcggactc

SEQ ID NO: 1568486 - DNA, 25 bp, Homo sapien
tttgcggactctgggctgtcgacgt

SEQ ID NO: 1568487 - DNA, 25 bp, Homo sapien
cacgacaggtgattggctctagtaa

SEQ ID NO: 1568488 - DNA, 25 bp, Homo sapien
tagtaaaaactgatgcagtgatgtc

SEQ ID NO: 1568489 - DNA, 25 bp, Homo sapien
gtaaaaactgatgcagtgatgtcat

SEQ ID NO: 1568490 - DNA, 25 bp, Homo sapien
ctctagtaaaaactgatgcagtgat

SEQ ID NO: 1568491 - DNA, 25 bp, Homo sapien
agatgtgcgcttcctgattatcagg

SEQ ID NO: 1568492 - DNA, 25 bp, Homo sapien
tatgtccattgtgctcactgagttc

SEQ ID NO: 1568493 - DNA, 25 bp, Homo sapien
gagttcacgagctttcactcgctgg

SEQ ID NO: 1568494 - DNA, 25 bp, Homo sapien
gacataggcattgcagtctaccccg

SEQ ID NO: 1568495 - DNA, 25 bp, Homo sapien
agtagctgcacgattaattctaagg

SEQ ID NO: 1568496 - DNA, 25 bp, Homo sapien
ctgcacgattaattctaaggatcac

SEQ ID NO: 1568497 - DNA, 25 bp, Homo sapien
gctgcacgattaattctaaggatca

SEQ ID NO: 1568498 - DNA, 25 bp, Homo sapien
tagctgcacgattaattctaaggat

SEQ ID NO: 1568499 - DNA, 25 bp, Homo sapien
cggctttttaatatgcttgcttacc

SEQ ID NO: 1568500 - DNA, 25 bp, Homo sapien
aacaaacaaatgagtcatgctccac

SEQ ID NO: 1568501 - DNA, 25 bp, Homo sapien
taatatgcttgcttacccaccagtc

SEQ ID NO: 1568502 - DNA, 25 bp, Homo sapien
agtaacaaacaaatgagtcatgctc

SEQ ID NO: 1568503 - DNA, 25 bp, Homo sapien
tttgaagtcacatgatcctgctgcc

SEQ ID NO: 1568504 - DNA, 25 bp, Homo sapien
aagtcacatgatcctgctgccagca

SEQ ID NO: 1568505 - DNA, 25 bp, Homo sapien
gtcacatgatcctgctgccagcaaa

SEQ ID NO: 1568506 - DNA, 25 bp, Homo sapien
tgaagtcacatgatcctgctgccag

SEQ ID NO: 1568507 - DNA, 25 bp, Homo sapien
tcagcaacagataacggtgctgtcg

SEQ ID NO: 1568508 - DNA, 25 bp, Homo sapien
ggcatcagcaacagataacggtgct

SEQ ID NO: 1568509 - DNA, 25 bp, Homo sapien
aacagataacggtgctgtcgtggct

SEQ ID NO: 1568510 - DNA, 25 bp, Homo sapien
tttgaggcatcagcaacagataacg

SEQ ID NO: 1568511 - DNA, 25 bp, Homo sapien
tgacacactcaggagtggtaggaac

SEQ ID NO: 1568512 - DNA, 25 bp, Homo sapien
tcatcataattaaagagcattgggt

SEQ ID NO: 1568513 - DNA, 25 bp, Homo sapien
ttgtggtcctcaatcgtggccctcg

SEQ ID NO: 1568514 - DNA, 25 bp, Homo sapien
gtggtcctcaatcgtggccctcgtg

SEQ ID NO: 1568515 - DNA, 25 bp, Homo sapien
ataattaaagagcattgggtagcag

SEQ ID NO: 1568516 - DNA, 25 bp, Homo sapien
aaccacacagcattggcctgctatg

SEQ ID NO: 1568517 - DNA, 25 bp, Homo sapien
cagcattggcctgctatgtgttttc

SEQ ID NO: 1568518 - DNA, 25 bp, Homo sapien
cacagcattggcctgctatgtgttt

SEQ ID NO: 1568519 - DNA, 25 bp, Homo sapien
ccacacagcattggcctgctatgtg

SEQ ID NO: 1568520 - DNA, 25 bp, Homo sapien
taggagctcggaaagaagagatacc

SEQ ID NO: 1568521 - DNA, 25 bp, Homo sapien
cctttatctaaaggcgtaggagctc

SEQ ID NO: 1568522 - DNA, 25 bp, Homo sapien
gagttaagcaggtaagtgcccttta

SEQ ID NO: 1568523 - DNA, 25 bp, Homo sapien
tcggaaagaagagataccctgaaca

SEQ ID NO: 1568524 - DNA, 25 bp, Homo sapien
ccgatagtaaacgagggatgcctgt

SEQ ID NO: 1568525 - DNA, 25 bp, Homo sapien
cattcttgaagagtagtcgggcgga

SEQ ID NO: 1568526 - DNA, 25 bp, Homo sapien
gaggaaccagacagctcgcttgagg

SEQ ID NO: 1568527 - DNA, 25 bp, Homo sapien
gaggcctataaatgaccatccggag

SEQ ID NO: 1568528 - DNA, 25 bp, Homo sapien
tctcttgtctctcatattcccagtg

SEQ ID NO: 1568529 - DNA, 25 bp, Homo sapien
aacgtcgggcatgggagtagttctc

SEQ ID NO: 1568530 - DNA, 25 bp, Homo sapien
gaccttggttctgcaagaagtccag

SEQ ID NO: 1568531 - DNA, 25 bp, Homo sapien
caggaagcatgtaagaacgtcgggc

SEQ ID NO: 1568532 - DNA, 25 bp, Homo sapien
tcaccactggtagcaggcagattcc

SEQ ID NO: 1568533 - DNA, 25 bp, Homo sapien
catgaaggtttgcacataagggacc

SEQ ID NO: 1568534 - DNA, 25 bp, Homo sapien
cccatgaaggctaagagtgcgatac

SEQ ID NO: 1568535 - DNA, 25 bp, Homo sapien
cctagtgtaggttgaggctgaccca

SEQ ID NO: 1568536 - DNA, 25 bp, Homo sapien
cacaagtttttactggagggcctag

SEQ ID NO: 1568537 - DNA, 25 bp, Homo sapien
caggtaaatgtgaagcgtgccccta

SEQ ID NO: 1568538 - DNA, 25 bp, Homo sapien
caaggctacgcgtttgaggccaacc

SEQ ID NO: 1568539 - DNA, 25 bp, Homo sapien
ctgggtcacaaggaggcaaggctac

SEQ ID NO: 1568540 - DNA, 25 bp, Homo sapien
ctcctcagaggtgttcttcctgtca

SEQ ID NO: 1568541 - DNA, 25 bp, Homo sapien
cttcagggcatggacaacaggtttg

SEQ ID NO: 1568542 - DNA, 25 bp, Homo sapien
gagttagcaagcgaaacctggagcg

SEQ ID NO: 1568543 - DNA, 25 bp, Homo sapien
ttgattgaaaggtggagtgagatcc

SEQ ID NO: 1568544 - DNA, 25 bp, Homo sapien
ggctgtcgaaccacttgtgtaactg

SEQ ID NO: 1568545 - DNA, 25 bp, Homo sapien
gaacagtagattttggccatgtggg

SEQ ID NO: 1568546 - DNA, 25 bp, Homo sapien
tgtaactgcgatttccaccctgctg

SEQ ID NO: 1568547 - DNA, 25 bp, Homo sapien
gcaaatatagaaccctccatgtgat

SEQ ID NO: 1568548 - DNA, 25 bp, Homo sapien
aggagcccctccgtagttgcagaat

SEQ ID NO: 1568549 - DNA, 25 bp, Homo sapien
ggctattaagtgcagctggtcccag

SEQ ID NO: 1568550 - DNA, 25 bp, Homo sapien
atgataagtgaaccctccccatggg

SEQ ID NO: 1568551 - DNA, 25 bp, Homo sapien
tgactcagcgtgcagcgtttccaag

SEQ ID NO: 1568552 - DNA, 25 bp, Homo sapien
tctggctgggccttgataagttccc

SEQ ID NO: 1568553 - DNA, 25 bp, Homo sapien
ctggctgggccttgataagttccct

SEQ ID NO: 1568554 - DNA, 25 bp, Homo sapien
tggctgggccttgataagttccctt

SEQ ID NO: 1568555 - DNA, 25 bp, Homo sapien
caaaatggtatattagggtgaatta

SEQ ID NO: 1568556 - DNA, 25 bp, Homo sapien
cttcttagtggggaatagctcctac

SEQ ID NO: 1568557 - DNA, 25 bp, Homo sapien
tgaacaaaatggtatattagggtga

SEQ ID NO: 1568558 - DNA, 25 bp, Homo sapien
agagaagtatacatgcttcttagtg

SEQ ID NO: 1568559 - DNA, 25 bp, Homo sapien
tgccatgtcatttggatctaaagtc

SEQ ID NO: 1568560 - DNA, 25 bp, Homo sapien
catgcaggggcgttactagtaagca

SEQ ID NO: 1568561 - DNA, 25 bp, Homo sapien
taagcatgtgttgggaactggtctg

SEQ ID NO: 1568562 - DNA, 25 bp, Homo sapien
ctaaagtctaacaaggaatttctgg

SEQ ID NO: 1568563 - DNA, 25 bp, Homo sapien
ttagatatactaaatcctccattgc

SEQ ID NO: 1568564 - DNA, 25 bp, Homo sapien
tgtggaggtccttcagtttatcttc

SEQ ID NO: 1568565 - DNA, 25 bp, Homo sapien
ctagtttagatatactaaatcctcc

SEQ ID NO: 1568566 - DNA, 25 bp, Homo sapien
cacaaagacctttgttaccaggagg

SEQ ID NO: 1568567 - DNA, 25 bp, Homo sapien
gcgaggtaaccaggtaaccaggtga

SEQ ID NO: 1568568 - DNA, 25 bp, Homo sapien
tacccagaggggtgtggaagtcctc

SEQ ID NO: 1568569 - DNA, 25 bp, Homo sapien
gataaccaggcgaggtaaccaggta

SEQ ID NO: 1568570 - DNA, 25 bp, Homo sapien
ggattcagtcaagagatgcgcagaa

SEQ ID NO: 1568571 - DNA, 25 bp, Homo sapien
gggtctttccataagggagttgaga

SEQ ID NO: 1568572 - DNA, 25 bp, Homo sapien
ttcccacagtttcacttgagactga

SEQ ID NO: 1568573 - DNA, 25 bp, Homo sapien
gttgagacccagatgacccatctct

SEQ ID NO: 1568574 - DNA, 25 bp, Homo sapien
gatgtatccaactggagatgccaga

SEQ ID NO: 1568575 - DNA, 25 bp, Homo sapien
cctggtgatgaagttgtggcagatc

SEQ ID NO: 1568576 - DNA, 25 bp, Homo sapien
atggtttcccgaagcaattattttg

SEQ ID NO: 1568577 - DNA, 25 bp, Homo sapien
aacagttgcttagatggtttcccga

SEQ ID NO: 1568578 - DNA, 25 bp, Homo sapien
tatattggtaagatgaggacctggt

SEQ ID NO: 1568579 - DNA, 25 bp, Homo sapien
caaaaggctgttctaggatgggtta

SEQ ID NO: 1568580 - DNA, 25 bp, Homo sapien
tatcagtgggctgcgtttctaaaga

SEQ ID NO: 1568581 - DNA, 25 bp, Homo sapien
gaagctatcagtgggctgcgtttct

SEQ ID NO: 1568582 - DNA, 25 bp, Homo sapien
ttagagaagtgctgactgtctgtgg

SEQ ID NO: 1568583 - DNA, 25 bp, Homo sapien
cctgctcgtcgcagcggagaaccat

SEQ ID NO: 1568584 - DNA, 25 bp, Homo sapien
tcctgctcgtcgcagcggagaacca

SEQ ID NO: 1568585 - DNA, 25 bp, Homo sapien
cctcctgctcgtcgcagcggagaac

SEQ ID NO: 1568586 - DNA, 25 bp, Homo sapien
ttcctcctgctcgtcgcagcggaga

SEQ ID NO: 1568587 - DNA, 25 bp, Homo sapien
ttttagacattcaggatcgacttgt

SEQ ID NO: 1568588 - DNA, 25 bp, Homo sapien
agacattcaggatcgacttgtaaag

SEQ ID NO: 1568589 - DNA, 25 bp, Homo sapien
tattttagacattcaggatcgactt

SEQ ID NO: 1568590 - DNA, 25 bp, Homo sapien
tagacattcaggatcgacttgtaaa

SEQ ID NO: 1568591 - DNA, 25 bp, Homo sapien
agcaaagagtgatgaaaaattgatc

SEQ ID NO: 1568592 - DNA, 25 bp, Homo sapien
gaaaaggtcgccctcttatgcatca

SEQ ID NO: 1568593 - DNA, 25 bp, Homo sapien
tgcatcaaagagcaatacctgttgt

SEQ ID NO: 1568594 - DNA, 25 bp, Homo sapien
ctgattgtgtggtagaaatactgca

SEQ ID NO: 1568595 - DNA, 25 bp, Homo sapien
tcataccttgcaactcatcggcgaa

SEQ ID NO: 1568596 - DNA, 25 bp, Homo sapien
tcatcacagaatgcataccggagag

SEQ ID NO: 1568597 - DNA, 25 bp, Homo sapien
gaaagccttcagtgttcgttcaagc

SEQ ID NO: 1568598 - DNA, 25 bp, Homo sapien
gaaaccttaccgatgcaatgagtgt

SEQ ID NO: 1568599 - DNA, 25 bp, Homo sapien
ttcttagtccatatgggtcagaggg

SEQ ID NO: 1568600 - DNA, 25 bp, Homo sapien
gtatttaattccatatggtgctcag

SEQ ID NO: 1568601 - DNA, 25 bp, Homo sapien
gccttagagatagaggcaaagtctt

SEQ ID NO: 1568602 - DNA, 25 bp, Homo sapien
acaccctgtcatttgaactctatgg

SEQ ID NO: 1568603 - DNA, 25 bp, Homo sapien
ctggcccagtggatgaatttttgaa

SEQ ID NO: 1568604 - DNA, 25 bp, Homo sapien
cagaaggaggcattcagtggatgat

SEQ ID NO: 1568605 - DNA, 25 bp, Homo sapien
gaatagagccttctatcagcatgta

SEQ ID NO: 1568606 - DNA, 25 bp, Homo sapien
agttgttggtggaatagagccttct

SEQ ID NO: 1568607 - DNA, 25 bp, Homo sapien
tcagcatgtaccatgtttcctgggt

SEQ ID NO: 1568608 - DNA, 25 bp, Homo sapien
tctgcctcctgagttcagctgattc

SEQ ID NO: 1568609 - DNA, 25 bp, Homo sapien
tgcctcctgagttcagctgattctt

SEQ ID NO: 1568610 - DNA, 25 bp, Homo sapien
cctctgcctcctgagttcagctgat

SEQ ID NO: 1568611 - DNA, 25 bp, Homo sapien
tcctgagttcagctgattcttctgc

SEQ ID NO: 1568612 - DNA, 25 bp, Homo sapien
agtactgctgactgggccgggcaca

SEQ ID NO: 1568613 - DNA, 25 bp, Homo sapien
acattattggcgtttaagagtactg

SEQ ID NO: 1568614 - DNA, 25 bp, Homo sapien
ttaagagtactgctgactgggccgg

SEQ ID NO: 1568615 - DNA, 25 bp, Homo sapien
tgaacattattggcgtttaagagta

SEQ ID NO: 1568616 - DNA, 25 bp, Homo sapien
aaattccttgcttaggccaaagtct

SEQ ID NO: 1568617 - DNA, 25 bp, Homo sapien
tgcatatattatgaggtcttcataa

SEQ ID NO: 1568618 - DNA, 25 bp, Homo sapien
tgcttaggccaaagtcttagaagag

SEQ ID NO: 1568619 - DNA, 25 bp, Homo sapien
tatagttggaggtcttatattaagt

SEQ ID NO: 1568620 - DNA, 25 bp, Homo sapien
ggtaactgcatttgaagccgaacaa

SEQ ID NO: 1568621 - DNA, 25 bp, Homo sapien
tggatttccgactccaaactcgtaa

SEQ ID NO: 1568622 - DNA, 25 bp, Homo sapien
catttgaagccgaacaagtgagtca

SEQ ID NO: 1568623 - DNA, 25 bp, Homo sapien
acaagtgagtcattggatttccgac

SEQ ID NO: 1568624 - DNA, 25 bp, Homo sapien
tttccacagggtgagatctgtgcgt

SEQ ID NO: 1568625 - DNA, 25 bp, Homo sapien
tccacagggtgagatctgtgcgtgt

SEQ ID NO: 1568626 - DNA, 25 bp, Homo sapien
ctttccacagggtgagatctgtgcg

SEQ ID NO: 1568627 - DNA, 25 bp, Homo sapien
cacagggtgagatctgtgcgtgtga

SEQ ID NO: 1568628 - DNA, 25 bp, Homo sapien
tcgtccccgtattccccctggtgca

SEQ ID NO: 1568629 - DNA, 25 bp, Homo sapien
cccgtattccccctggtgcagtggg

SEQ ID NO: 1568630 - DNA, 25 bp, Homo sapien
tccccgtattccccctggtgcagtg

SEQ ID NO: 1568631 - DNA, 25 bp, Homo sapien
ctgtaggagtttctcgtccccgtat

SEQ ID NO: 1568632 - DNA, 25 bp, Homo sapien
tcagcctcgctggtaggtctctcct

SEQ ID NO: 1568633 - DNA, 25 bp, Homo sapien
taattgcagaaacgttcctggatcc

SEQ ID NO: 1568634 - DNA, 25 bp, Homo sapien
gaaacgttcctggatccgaacactg

SEQ ID NO: 1568635 - DNA, 25 bp, Homo sapien
ccctgacgacctagagagatcccgg

SEQ ID NO: 1568636 - DNA, 25 bp, Homo sapien
tgaaaggcctgaatgctctcctgcc

SEQ ID NO: 1568637 - DNA, 25 bp, Homo sapien
gattttaacgtctggtgggatggtg

SEQ ID NO: 1568638 - DNA, 25 bp, Homo sapien
gctctcctgccggtgagaaaactgg

SEQ ID NO: 1568639 - DNA, 25 bp, Homo sapien
gattccgagtgtggttggacagggc

SEQ ID NO: 1568640 - DNA, 25 bp, Homo sapien
ctgcggcccaaaggcttccactggg

SEQ ID NO: 1568641 - DNA, 25 bp, Homo sapien
catctcatgactccctctgccctag

SEQ ID NO: 1568642 - DNA, 25 bp, Homo sapien
atctcatgactccctctgccctagt

SEQ ID NO: 1568643 - DNA, 25 bp, Homo sapien
cagaaaattcacactggagagaaac

SEQ ID NO: 1568644 - DNA, 25 bp, Homo sapien
tttcatctcgtaagacatcactcat

SEQ ID NO: 1568645 - DNA, 25 bp, Homo sapien
gtacacattttcatctcgtaagaca

SEQ ID NO: 1568646 - DNA, 25 bp, Homo sapien
ctgtacacattttcatctcgtaaga

SEQ ID NO: 1568647 - DNA, 25 bp, Homo sapien
ttctttaaagtcactgtacacattt

SEQ ID NO: 1568648 - DNA, 25 bp, Homo sapien
agtatggattaaacttgcgaaccgc

SEQ ID NO: 1568649 - DNA, 25 bp, Homo sapien
tatggattaaacttgcgaaccgccg

SEQ ID NO: 1568650 - DNA, 25 bp, Homo sapien
gattaaacttgcgaaccgccgtgcc

SEQ ID NO: 1568651 - DNA, 25 bp, Homo sapien
tggattaaacttgcgaaccgccgtg

SEQ ID NO: 1568652 - DNA, 25 bp, Homo sapien
tcagtcaatgtactgggatggtacg

SEQ ID NO: 1568653 - DNA, 25 bp, Homo sapien
taaatcagtagttgactgggcacag

SEQ ID NO: 1568654 - DNA, 25 bp, Homo sapien
catttcaagtgtggaacggaataac

SEQ ID NO: 1568655 - DNA, 25 bp, Homo sapien
ggtgatctaacttatcggccttaac

SEQ ID NO: 1568656 - DNA, 25 bp, Homo sapien
cctacatcgggcatgtatcctgttt

SEQ ID NO: 1568657 - DNA, 25 bp, Homo sapien
caaattgttaagtacagtggacaga

SEQ ID NO: 1568658 - DNA, 25 bp, Homo sapien
cacggaactgtcttaagctttcctt

SEQ ID NO: 1568659 - DNA, 25 bp, Homo sapien
tctttgatcccagtcctacatcggg

SEQ ID NO: 1568660 - DNA, 25 bp, Homo sapien
tcatccctgcatcttttctggtgca

SEQ ID NO: 1568661 - DNA, 25 bp, Homo sapien
catccctgcatcttttctggtgcag

SEQ ID NO: 1568662 - DNA, 25 bp, Homo sapien
ccctgcatcttttctggtgcagtgg

SEQ ID NO: 1568663 - DNA, 25 bp, Homo sapien
tctcatccctgcatcttttctggtg

SEQ ID NO: 1568664 - DNA, 25 bp, Homo sapien
ttttgcccaagattcctattcccat

SEQ ID NO: 1568665 - DNA, 25 bp, Homo sapien
cttttgcccaagattcctattccca

SEQ ID NO: 1568666 - DNA, 25 bp, Homo sapien
caacttctgtcccattcgctggcaa

SEQ ID NO: 1568667 - DNA, 25 bp, Homo sapien
acttctgtcccattcgctggcaaaa

SEQ ID NO: 1568668 - DNA, 25 bp, Homo sapien
ttcaacttctgtcccattcgctggc

SEQ ID NO: 1568669 - DNA, 25 bp, Homo sapien
ctgtcccattcgctggcaaaaatac

SEQ ID NO: 1568670 - DNA, 25 bp, Homo sapien
ttaagatctgtagggacccctccag

SEQ ID NO: 1568671 - DNA, 25 bp, Homo sapien
ggggactgcgaagcgcagatttaat

SEQ ID NO: 1568672 - DNA, 25 bp, Homo sapien
cattttaagatctgtagggacccct

SEQ ID NO: 1568673 - DNA, 25 bp, Homo sapien
gagggcgcggtgtggtcattttaag

SEQ ID NO: 1568674 - DNA, 25 bp, Homo sapien
agctggaagaagtgtgttgtcttca

SEQ ID NO: 1568675 - DNA, 25 bp, Homo sapien
gctggaagaagtgtgttgtcttcag

SEQ ID NO: 1568676 - DNA, 25 bp, Homo sapien
gagctggaagaagtgtgttgtcttc

SEQ ID NO: 1568677 - DNA, 25 bp, Homo sapien
ctggaagaagtgtgttgtcttcaga

SEQ ID NO: 1568678 - DNA, 25 bp, Homo sapien
caagaagtcatggggagagctatta

SEQ ID NO: 1568679 - DNA, 25 bp, Homo sapien
accaagaagtcatggggagagctat

SEQ ID NO: 1568680 - DNA, 25 bp, Homo sapien
ccaagaagtcatggggagagctatt

SEQ ID NO: 1568681 - DNA, 25 bp, Homo sapien
gtccctgtacaaagccctctgagca

SEQ ID NO: 1568682 - DNA, 25 bp, Homo sapien
ctgagagaattcgatggccacgtcc

SEQ ID NO: 1568683 - DNA, 25 bp, Homo sapien
acgtccctgtacaaagccctctgag

SEQ ID NO: 1568684 - DNA, 25 bp, Homo sapien
ggccacgtccctgaatgtcaacctt

SEQ ID NO: 1568685 - DNA, 25 bp, Homo sapien
agagatacagcagagcagatcccag

SEQ ID NO: 1568686 - DNA, 25 bp, Homo sapien
gaacatgcagagatacagcagagca

SEQ ID NO: 1568687 - DNA, 25 bp, Homo sapien
tgcagagatacagcagagcagatcc

SEQ ID NO: 1568688 - DNA, 25 bp, Homo sapien
agggaacatgcagagatacagcaga

SEQ ID NO: 1568689 - DNA, 25 bp, Homo sapien
atagcttcagtcttaattgagcaat

SEQ ID NO: 1568690 - DNA, 25 bp, Homo sapien
tgagaattaacatagcttcagtctt

SEQ ID NO: 1568691 - DNA, 25 bp, Homo sapien
tctgagaattaacatagcttcagtc

SEQ ID NO: 1568692 - DNA, 25 bp, Homo sapien
ctgagaattaacatagcttcagtct

SEQ ID NO: 1568693 - DNA, 25 bp, Homo sapien
agtgattctcctgccttggcctccc

SEQ ID NO: 1568694 - DNA, 25 bp, Homo sapien
ctgggattacaagcgctcggcacca

SEQ ID NO: 1568695 - DNA, 25 bp, Homo sapien
aagtgattctcctgccttggcctcc

SEQ ID NO: 1568696 - DNA, 25 bp, Homo sapien
attacaagcgctcggcaccacgcct

SEQ ID NO: 1568697 - DNA, 25 bp, Homo sapien
ttcacccactgaatgcctccttctg

SEQ ID NO: 1568698 - DNA, 25 bp, Homo sapien
gaggacattacaaatggatctagaa

SEQ ID NO: 1568699 - DNA, 25 bp, Homo sapien
aagaggacattacaaatggatctag

SEQ ID NO: 1568700 - DNA, 25 bp, Homo sapien
gtgctgtggcttttacagaatccca

SEQ ID NO: 1568701 - DNA, 25 bp, Homo sapien
cacctttgatgcattcccaaccact

SEQ ID NO: 1568702 - DNA, 25 bp, Homo sapien
acctttgatgcattcccaaccactt

SEQ ID NO: 1568703 - DNA, 25 bp, Homo sapien
gatcacaggagacctcttggacaca

SEQ ID NO: 1568704 - DNA, 25 bp, Homo sapien
cgcagtcaggtacaggagagatcac

SEQ ID NO: 1568705 - DNA, 25 bp, Homo sapien
tactacacgtcagaagagcagaggg

SEQ ID NO: 1568706 - DNA, 25 bp, Homo sapien
gaaaggtttccattgagagctcaca

SEQ ID NO: 1568707 - DNA, 25 bp, Homo sapien
gttcagccagatgcaaccaaaagct

SEQ ID NO: 1568708 - DNA, 25 bp, Homo sapien
tctgatgtcttgtaaggtgggacct

SEQ ID NO: 1568709 - DNA, 25 bp, Homo sapien
tgtctagtaaggtggaacatcctgt

SEQ ID NO: 1568710 - DNA, 25 bp, Homo sapien
aactgaggacccacgggtgacagac

SEQ ID NO: 1568711 - DNA, 25 bp, Homo sapien
ggaacatcctattgaaggtcttgcc

SEQ ID NO: 1568712 - DNA, 25 bp, Homo sapien
ctagtaaggtggaacatcctattga

SEQ ID NO: 1568713 - DNA, 25 bp, Homo sapien
ggtggaacatcctattgaaggtctt

SEQ ID NO: 1568714 - DNA, 25 bp, Homo sapien
gtaaggtggaacatcctattgaagg

SEQ ID NO: 1568715 - DNA, 25 bp, Homo sapien
ctgtccagtatggattctctgatgt

SEQ ID NO: 1568716 - DNA, 25 bp, Homo sapien
ttctgtccagtatggattctctgat

SEQ ID NO: 1568717 - DNA, 25 bp, Homo sapien
atttatatggtttctgtccagtatg

SEQ ID NO: 1568718 - DNA, 25 bp, Homo sapien
ttatatggtttctgtccagtatgga

SEQ ID NO: 1568719 - DNA, 25 bp, Homo sapien
ttgtaagttttctctccagtgtgaa

SEQ ID NO: 1568720 - DNA, 25 bp, Homo sapien
aacttgtaagttttctctccagtgt

SEQ ID NO: 1568721 - DNA, 25 bp, Homo sapien
aagttttctctccagtgtgaattct

SEQ ID NO: 1568722 - DNA, 25 bp, Homo sapien
gtaagttttctctccagtgtgaatt

SEQ ID NO: 1568723 - DNA, 25 bp, Homo sapien
aagccttgtcccactcattacattt

SEQ ID NO: 1568724 - DNA, 25 bp, Homo sapien
tctcctggtcaactggtagagcagc

SEQ ID NO: 1568725 - DNA, 25 bp, Homo sapien
ctcatgatgtctaaggtgggaccac

SEQ ID NO: 1568726 - DNA, 25 bp, Homo sapien
tgaaacctgaaaagagcctctgcca

SEQ ID NO: 1568727 - DNA, 25 bp, Homo sapien
taaaagacttagcatgggctgggcg

SEQ ID NO: 1568728 - DNA, 25 bp, Homo sapien
gcctgtcaagagagcgagactccat

SEQ ID NO: 1568729 - DNA, 25 bp, Homo sapien
cattgatatacaacagctattgctt

SEQ ID NO: 1568730 - DNA, 25 bp, Homo sapien
tgaactaccctctatgataaccatt

SEQ ID NO: 1568731 - DNA, 25 bp, Homo sapien
tcttttacttgaactaccctctatg

SEQ ID NO: 1568732 - DNA, 25 bp, Homo sapien
atcattgatatacaacagctattgc

SEQ ID NO: 1568733 - DNA, 25 bp, Homo sapien
tgtatatgtgcacatgctattctgg

SEQ ID NO: 1568734 - DNA, 25 bp, Homo sapien
gtagcaaaacataatgccagttgtg

SEQ ID NO: 1568735 - DNA, 25 bp, Homo sapien
gccagttgtgaaacgtctgtgtata

SEQ ID NO: 1568736 - DNA, 25 bp, Homo sapien
aaaacataatgccagttgtgaaacg

SEQ ID NO: 1568737 - DNA, 25 bp, Homo sapien
gaggcttgcaagaacaaacgtttat

SEQ ID NO: 1568738 - DNA, 25 bp, Homo sapien
cacaatgcgatgctgggattcaggg

SEQ ID NO: 1568739 - DNA, 25 bp, Homo sapien
gattcagggtaagattcagtctcta

SEQ ID NO: 1568740 - DNA, 25 bp, Homo sapien
tcaaagttcgtacaagtagtggaga

SEQ ID NO: 1568741 - DNA, 25 bp, Homo sapien
tatccagaaggccataaagcagcag

SEQ ID NO: 1568742 - DNA, 25 bp, Homo sapien
tccagtcctggatttagcccaaagg

SEQ ID NO: 1568743 - DNA, 25 bp, Homo sapien
caaaggcagaatgggtggttgccca

SEQ ID NO: 1568744 - DNA, 25 bp, Homo sapien
gagtggacgcttctcttgtgagcca

SEQ ID NO: 1568745 - DNA, 25 bp, Homo sapien
ggccgctggccttaccgcccactgg

SEQ ID NO: 1568746 - DNA, 25 bp, Homo sapien
aatttatttacaggagcctctcagc

SEQ ID NO: 1568747 - DNA, 25 bp, Homo sapien
caagtgtggatccagaatcatgatg

SEQ ID NO: 1568748 - DNA, 25 bp, Homo sapien
gacctatttgtggaatgcacagaca

SEQ ID NO: 1568749 - DNA, 25 bp, Homo sapien
gttaggatacacacctctgccatct

SEQ ID NO: 1568750 - DNA, 25 bp, Homo sapien
cagctagtccctttgtgttgttaaa

SEQ ID NO: 1568751 - DNA, 25 bp, Homo sapien
tagataagcttgagctgtgccttac

SEQ ID NO: 1568752 - DNA, 25 bp, Homo sapien
ttactttattgaggacagctagtcc

SEQ ID NO: 1568753 - DNA, 25 bp, Homo sapien
tatgagactaccatatagctatgcc

SEQ ID NO: 1568754 - DNA, 25 bp, Homo sapien
caaagtccatagtcgatgttggggt

SEQ ID NO: 1568755 - DNA, 25 bp, Homo sapien
tatataatagacatatatcctccat

SEQ ID NO: 1568756 - DNA, 25 bp, Homo sapien
gttcactctatgtatatgctttggg

SEQ ID NO: 1568757 - DNA, 25 bp, Homo sapien
ttgggtttgggcaaatatataatag

SEQ ID NO: 1568758 - DNA, 25 bp, Homo sapien
gagaacattaattaatctgtcacag

SEQ ID NO: 1568759 - DNA, 25 bp, Homo sapien
ggacaacttttggtggactctccca

SEQ ID NO: 1568760 - DNA, 25 bp, Homo sapien
gactctcccatggaagaggtttcct

SEQ ID NO: 1568761 - DNA, 25 bp, Homo sapien
tgtgataacccaccaataggcgatg

SEQ ID NO: 1568762 - DNA, 25 bp, Homo sapien
tgcatttgggtgtacagatttccca

SEQ ID NO: 1568763 - DNA, 25 bp, Homo sapien
tatttgtggcataagataagcatcc

SEQ ID NO: 1568764 - DNA, 25 bp, Homo sapien
gaagacagcatcttttctccattat

SEQ ID NO: 1568765 - DNA, 25 bp, Homo sapien
aaatttaccttgagtctttagtcag

SEQ ID NO: 1568766 - DNA, 25 bp, Homo sapien
gcctaaaaaagtcgctgggacgcgc

SEQ ID NO: 1568767 - DNA, 25 bp, Homo sapien
aatcgagtactgctgggcgacaaac

SEQ ID NO: 1568768 - DNA, 25 bp, Homo sapien
tataaaattgtacactccgcacagg

SEQ ID NO: 1568769 - DNA, 25 bp, Homo sapien
caaaggacaccatagagattcaagg

SEQ ID NO: 1568770 - DNA, 25 bp, Homo sapien
ggcttgctgcccacaaataggaaga

SEQ ID NO: 1568771 - DNA, 25 bp, Homo sapien
cattccaattttcaggtccacagag

SEQ ID NO: 1568772 - DNA, 25 bp, Homo sapien
ggttctgcatggcaacacgagttgt

SEQ ID NO: 1568773 - DNA, 25 bp, Homo sapien
gagttgtgggccacattttcatgga

SEQ ID NO: 1568774 - DNA, 25 bp, Homo sapien
gttcctagggttgatggtgatcacc

SEQ ID NO: 1568775 - DNA, 25 bp, Homo sapien
attggatacaaagcaggagactggt

SEQ ID NO: 1568776 - DNA, 25 bp, Homo sapien
taaccaaggagtcagctacagtcag

SEQ ID NO: 1568777 - DNA, 25 bp, Homo sapien
tacctggaatagtgtagggtccagc

SEQ ID NO: 1568778 - DNA, 25 bp, Homo sapien
ggtgctcaccaatgcaaggatgctt

SEQ ID NO: 1568779 - DNA, 25 bp, Homo sapien
accaaaacgatggagctgctggccc

SEQ ID NO: 1568780 - DNA, 25 bp, Homo sapien
gccaccaactggaattatcgaagag

SEQ ID NO: 1568781 - DNA, 25 bp, Homo sapien
gggtcacggcacatgagaacaaaag

SEQ ID NO: 1568782 - DNA, 25 bp, Homo sapien
tgggatcccgcactgctttaagaac

SEQ ID NO: 1568783 - DNA, 25 bp, Homo sapien
ccctgttccatggagagagtgttgg

SEQ ID NO: 1568784 - DNA, 25 bp, Homo sapien
ctctttgtgggatcccgcactgctt

SEQ ID NO: 1568785 - DNA, 25 bp, Homo sapien
gtgggatcccgcactgctttaagaa

SEQ ID NO: 1568786 - DNA, 25 bp, Homo sapien
cgtctctgtgaaattgtggtgggcc

SEQ ID NO: 1568787 - DNA, 25 bp, Homo sapien
gaaatcgcagaagaacctccacaga

SEQ ID NO: 1568788 - DNA, 25 bp, Homo sapien
ttatttgagacatagcgggcggtcg

SEQ ID NO: 1568789 - DNA, 25 bp, Homo sapien
cacagaggcgagaacaacccatttc

SEQ ID NO: 1568790 - DNA, 25 bp, Homo sapien
atggacggaatgacgggccatctgt

SEQ ID NO: 1568791 - DNA, 25 bp, Homo sapien
tgatgatggacggaatgacgggcca

SEQ ID NO: 1568792 - DNA, 25 bp, Homo sapien
tgatggacggaatgacgggccatct

SEQ ID NO: 1568793 - DNA, 25 bp, Homo sapien
gagcctgatgatggacggaatgacg

SEQ ID NO: 1568794 - DNA, 25 bp, Homo sapien
ctccttctccttgtgtgagcccagg

SEQ ID NO: 1568795 - DNA, 25 bp, Homo sapien
tcattcgtcgtaaagggccctggag

SEQ ID NO: 1568796 - DNA, 25 bp, Homo sapien
gggcctttgctggtttcaggttctc

SEQ ID NO: 1568797 - DNA, 25 bp, Homo sapien
tcgtaaagggtagctgggcctttgc

SEQ ID NO: 1568798 - DNA, 25 bp, Homo sapien
ctgcagaagaaatcacgttcactgt

SEQ ID NO: 1568799 - DNA, 25 bp, Homo sapien
acgttcactgtctggacccgcctga

SEQ ID NO: 1568800 - DNA, 25 bp, Homo sapien
cctgatcctccaactcacaccagtg

SEQ ID NO: 1568801 - DNA, 25 bp, Homo sapien
gaagaaatcacgttcactgtctgga

SEQ ID NO: 1568802 - DNA, 25 bp, Homo sapien
ctgcgtcggagcttcgctctgctgc

SEQ ID NO: 1568803 - DNA, 25 bp, Homo sapien
cgtcggagcttcgctctgctgctgc

SEQ ID NO: 1568804 - DNA, 25 bp, Homo sapien
tctgcgtcggagcttcgctctgctg

SEQ ID NO: 1568805 - DNA, 25 bp, Homo sapien
tgtctgcgtcggagcttcgctctgc

SEQ ID NO: 1568806 - DNA, 25 bp, Homo sapien
atgcaaaaccacatcacaacagaca

SEQ ID NO: 1568807 - DNA, 25 bp, Homo sapien
gacccgaagggcagagtaatctcat

SEQ ID NO: 1568808 - DNA, 25 bp, Homo sapien
caccatgggaggacatgtcaggcct

SEQ ID NO: 1568809 - DNA, 25 bp, Homo sapien
tagaggacactcgttgagacctggg

SEQ ID NO: 1568810 - DNA, 25 bp, Homo sapien
tcatctcgggtttgttgacaggcgg

SEQ ID NO: 1568811 - DNA, 25 bp, Homo sapien
ttggcttgttacagttctccccgtc

SEQ ID NO: 1568812 - DNA, 25 bp, Homo sapien
cgtctgagactttgggtgacccatc

SEQ ID NO: 1568813 - DNA, 25 bp, Homo sapien
ggagctgtcgctgaaactgagctgt

SEQ ID NO: 1568814 - DNA, 25 bp, Homo sapien
ctacggccatacagcacaacctcat

SEQ ID NO: 1568815 - DNA, 25 bp, Homo sapien
aatccaccgaactcctcattggcgg

SEQ ID NO: 1568816 - DNA, 25 bp, Homo sapien
tgggacttggttagaaatccaccga

SEQ ID NO: 1568817 - DNA, 25 bp, Homo sapien
gaaatcgaccgggtgcaaatccacg

SEQ ID NO: 1568818 - DNA, 25 bp, Homo sapien
tccgctctcggtgaaatgggacttg

SEQ ID NO: 1568819 - DNA, 25 bp, Homo sapien
gaatctgggaaactcaggttgcagg

SEQ ID NO: 1568820 - DNA, 25 bp, Homo sapien
acattgcgggacgtaaggaatctgg

SEQ ID NO: 1568821 - DNA, 25 bp, Homo sapien
tctttcagcgcatcaactcggacat

SEQ ID NO: 1568822 - DNA, 25 bp, Homo sapien
gagggacagctaacaggatgagctc

SEQ ID NO: 1568823 - DNA, 25 bp, Homo sapien
tggggacaagaggtgccagggtcat

SEQ ID NO: 1568824 - DNA, 25 bp, Homo sapien
gtggggacaagaggtgccagggtca

SEQ ID NO: 1568825 - DNA, 25 bp, Homo sapien
ctgtggggacaagaggtgccagggt

SEQ ID NO: 1568826 - DNA, 25 bp, Homo sapien
tgtggggacaagaggtgccagggtc

SEQ ID NO: 1568827 - DNA, 25 bp, Homo sapien
gatgtgcacgttgctaatttggccc

SEQ ID NO: 1568828 - DNA, 25 bp, Homo sapien
tagggtaaatctgcgggctcatgga

SEQ ID NO: 1568829 - DNA, 25 bp, Homo sapien
cagacagtagagtacgctgcaggtt

SEQ ID NO: 1568830 - DNA, 25 bp, Homo sapien
gatgccgttgagacagagtgcctgt

SEQ ID NO: 1568831 - DNA, 25 bp, Homo sapien
gctctattgtgattcagcctgtata

SEQ ID NO: 1568832 - DNA, 25 bp, Homo sapien
tgtgattcagcctgtatacttcttt

SEQ ID NO: 1568833 - DNA, 25 bp, Homo sapien
tattgtgattcagcctgtatacttc

SEQ ID NO: 1568834 - DNA, 25 bp, Homo sapien
gattcagcctgtatacttctttcca

SEQ ID NO: 1568835 - DNA, 25 bp, Homo sapien
cctatctggagaatagcggcggtca

SEQ ID NO: 1568836 - DNA, 25 bp, Homo sapien
acactcgcagcgtcagcacacgtat

SEQ ID NO: 1568837 - DNA, 25 bp, Homo sapien
tttgtatcttgacaccaggttccta

SEQ ID NO: 1568838 - DNA, 25 bp, Homo sapien
cgtcagcacacgtatttgtatcttg

SEQ ID NO: 1568839 - DNA, 25 bp, Homo sapien
ccctcagaactgcaattatcttttc

SEQ ID NO: 1568840 - DNA, 25 bp, Homo sapien
ctcagaactgcaattatcttttcac

SEQ ID NO: 1568841 - DNA, 25 bp, Homo sapien
ctcccctcagaactgcaattatctt

SEQ ID NO: 1568842 - DNA, 25 bp, Homo sapien
tcccctcagaactgcaattatcttt

SEQ ID NO: 1568843 - DNA, 25 bp, Homo sapien
cctttacagcggagagctaagaagt

SEQ ID NO: 1568844 - DNA, 25 bp, Homo sapien
ggactcccaccacggtctgtgataa

SEQ ID NO: 1568845 - DNA, 25 bp, Homo sapien
cactgccacataccgggaggccatt

SEQ ID NO: 1568846 - DNA, 25 bp, Homo sapien
ctaagaagttggctacaatcaggtg

SEQ ID NO: 1568847 - DNA, 25 bp, Homo sapien
cagaaaagccaacatgcttgggggc

SEQ ID NO: 1568848 - DNA, 25 bp, Homo sapien
aacatgcacacgatccagcacagga

SEQ ID NO: 1568849 - DNA, 25 bp, Homo sapien
tccagcacaggagaacagaaaagcc

SEQ ID NO: 1568850 - DNA, 25 bp, Homo sapien
cacctggatttcctggagctgaccg

SEQ ID NO: 1568851 - DNA, 25 bp, Homo sapien
gtatcccaaatcctcgttcactgtg

SEQ ID NO: 1568852 - DNA, 25 bp, Homo sapien
caacattgcacgcagtgtctgtgcg

SEQ ID NO: 1568853 - DNA, 25 bp, Homo sapien
gatgaggatgctctgcgtagctctg

SEQ ID NO: 1568854 - DNA, 25 bp, Homo sapien
ctcctatcaatgtgctggacccgct

SEQ ID NO: 1568855 - DNA, 25 bp, Homo sapien
ggcaggagagagtgtaagaagacac

SEQ ID NO: 1568856 - DNA, 25 bp, Homo sapien
gcaggagagagtgtaagaagacaca

SEQ ID NO: 1568857 - DNA, 25 bp, Homo sapien
aaggctgaagtgttcaccagtaaac

SEQ ID NO: 1568858 - DNA, 25 bp, Homo sapien
cagtaaactattgggattatccaaa

SEQ ID NO: 1568859 - DNA, 25 bp, Homo sapien
ggggtcacagctcatgagaacaaag

SEQ ID NO: 1568860 - DNA, 25 bp, Homo sapien
ctcattaaggctgaagtgttcacca

SEQ ID NO: 1568861 - DNA, 25 bp, Homo sapien
tgctacgtcatcactaccggagaac

SEQ ID NO: 1568862 - DNA, 25 bp, Homo sapien
tggacctctaatgactctactgcag

SEQ ID NO: 1568863 - DNA, 25 bp, Homo sapien
tagatgtctaacgactccactgcag

SEQ ID NO: 1568864 - DNA, 25 bp, Homo sapien
ggttgcacactcaaaaagatcccca

SEQ ID NO: 1568865 - DNA, 25 bp, Homo sapien
tgatgtctaatgaggtatgaacgtg

SEQ ID NO: 1568866 - DNA, 25 bp, Homo sapien
gccacaatcatcacgcttgtgagat

SEQ ID NO: 1568867 - DNA, 25 bp, Homo sapien
ttgagttcactgatgaactgcaatg

SEQ ID NO: 1568868 - DNA, 25 bp, Homo sapien
gatgaactgcaatgtatgaacgatg

SEQ ID NO: 1568869 - DNA, 25 bp, Homo sapien
ggaccatcactccatgcgatccgct

SEQ ID NO: 1568870 - DNA, 25 bp, Homo sapien
cgctgcggtgggaccatcactccat

SEQ ID NO: 1568871 - DNA, 25 bp, Homo sapien
tttgcgcgaatctgcgcgcgcagga

SEQ ID NO: 1568872 - DNA, 25 bp, Homo sapien
tgcgatccgcttccgggtttgcgcg

SEQ ID NO: 1568873 - DNA, 25 bp, Homo sapien
tacattgccctatagcagaaagatt

SEQ ID NO: 1568874 - DNA, 25 bp, Homo sapien
tgggaagtgtatacattgccctata

SEQ ID NO: 1568875 - DNA, 25 bp, Homo sapien
gggaagtgtatacattgccctatag

SEQ ID NO: 1568876 - DNA, 25 bp, Homo sapien
atgggaagtgtatacattgccctat

SEQ ID NO: 1568877 - DNA, 25 bp, Homo sapien
ctggggaagcatcaactttgtcatt

SEQ ID NO: 1568878 - DNA, 25 bp, Homo sapien
cctgaggaaatatggtcccctctgc

SEQ ID NO: 1568879 - DNA, 25 bp, Homo sapien
ccactgtaccagggacgataaactc

SEQ ID NO: 1568880 - DNA, 25 bp, Homo sapien
tgcccactgtaccagggacgataaa

SEQ ID NO: 1568881 - DNA, 25 bp, Homo sapien
tctgctgcccactgtaccagggacg

SEQ ID NO: 1568882 - DNA, 25 bp, Homo sapien
acttccactcttcctgagagaattc

SEQ ID NO: 1568883 - DNA, 25 bp, Homo sapien
gggtccaggcacttccactcttcct

SEQ ID NO: 1568884 - DNA, 25 bp, Homo sapien
catcacgtccctgtatagagtcctc

SEQ ID NO: 1568885 - DNA, 25 bp, Homo sapien
cgtccctgtatagagtcctctgagc

SEQ ID NO: 1568886 - DNA, 25 bp, Homo sapien
cgttcatgtctttgcaatgtccctg

SEQ ID NO: 1568887 - DNA, 25 bp, Homo sapien
tctccaatgtgatgacgttcatgtc

SEQ ID NO: 1568888 - DNA, 25 bp, Homo sapien
ctggaagcaaaaatctccaatgtga

SEQ ID NO: 1568889 - DNA, 25 bp, Homo sapien
gtccctgtgtggatcacttctgtat

SEQ ID NO: 1568890 - DNA, 25 bp, Homo sapien
ttccagcatgcctttgatcatgtcg

SEQ ID NO: 1568891 - DNA, 25 bp, Homo sapien
tccagcatgcctttgatcatgtcgg

SEQ ID NO: 1568892 - DNA, 25 bp, Homo sapien
tttccagcatgcctttgatcatgtc

SEQ ID NO: 1568893 - DNA, 25 bp, Homo sapien
ccagcatgcctttgatcatgtcggt

SEQ ID NO: 1568894 - DNA, 25 bp, Homo sapien
tgggatgttgaaaccaacgaagcac

SEQ ID NO: 1568895 - DNA, 25 bp, Homo sapien
ttttgtgtgagtaatgaagaattca

SEQ ID NO: 1568896 - DNA, 25 bp, Homo sapien
gatgttgaaaccaacgaagcactgt

SEQ ID NO: 1568897 - DNA, 25 bp, Homo sapien
gaaaccaacgaagcactgttgatag

SEQ ID NO: 1568898 - DNA, 25 bp, Homo sapien
gacatgcaagatatcgcttttgatt

SEQ ID NO: 1568899 - DNA, 25 bp, Homo sapien
acatgcaagatatcgcttttgatta

SEQ ID NO: 1568900 - DNA, 25 bp, Homo sapien
gatggcatgtaagggttaactcctg

SEQ ID NO: 1568901 - DNA, 25 bp, Homo sapien
tgacttccgactaaaggtcctgctg

SEQ ID NO: 1568902 - DNA, 25 bp, Homo sapien
ccgactaaaggtcctgctgcattca

SEQ ID NO: 1568903 - DNA, 25 bp, Homo sapien
ggtacacaaggtatgacgtttgact

SEQ ID NO: 1568904 - DNA, 25 bp, Homo sapien
ctacgatggtacacaaggtatgacg

SEQ ID NO: 1568905 - DNA, 25 bp, Homo sapien
ccagtatgaagtctacaatggcgtg

SEQ ID NO: 1568906 - DNA, 25 bp, Homo sapien
gaagtctacaatggcgtgtaaggga

SEQ ID NO: 1568907 - DNA, 25 bp, Homo sapien
tctacaatggcgtgtaagggatgac

SEQ ID NO: 1568908 - DNA, 25 bp, Homo sapien
gtatgaagtctacaatggcgtgtaa

SEQ ID NO: 1568909 - DNA, 25 bp, Homo sapien
tgcttgatggtaaataagtgctgac

SEQ ID NO: 1568910 - DNA, 25 bp, Homo sapien
ggattgcttgatggtaaataagtgc

SEQ ID NO: 1568911 - DNA, 25 bp, Homo sapien
gattgcttgatggtaaataagtgct

SEQ ID NO: 1568912 - DNA, 25 bp, Homo sapien
catggattgcttgatggtaaataag

SEQ ID NO: 1568913 - DNA, 25 bp, Homo sapien
gccacatctattacacttgtacgat

SEQ ID NO: 1568914 - DNA, 25 bp, Homo sapien
catctattacacttgtacgatctct

SEQ ID NO: 1568915 - DNA, 25 bp, Homo sapien
taaagacttggtgacaatcattaca

SEQ ID NO: 1568916 - DNA, 25 bp, Homo sapien
tggttgtagcattactaaagacttg

SEQ ID NO: 1568917 - DNA, 25 bp, Homo sapien
atttgtaaggtttctctccactatg

SEQ ID NO: 1568918 - DNA, 25 bp, Homo sapien
ttctctccactatgagttcgccaat

SEQ ID NO: 1568919 - DNA, 25 bp, Homo sapien
ctgaaagcttcatcacattcttcac

SEQ ID NO: 1568920 - DNA, 25 bp, Homo sapien
tctccactatgagttcgccaatgaa

SEQ ID NO: 1568921 - DNA, 25 bp, Homo sapien
gtatgacttccgactaaaggtcttg

SEQ ID NO: 1568922 - DNA, 25 bp, Homo sapien
tatgacttccgactaaaggtcttgc

SEQ ID NO: 1568923 - DNA, 25 bp, Homo sapien
gatgacgtgaaaggtttgcttttct

SEQ ID NO: 1568924 - DNA, 25 bp, Homo sapien
tgtgcttgttgattaaaaaccttac

SEQ ID NO: 1568925 - DNA, 25 bp, Homo sapien
ttctatgatgacatgcaaggtgtgc

SEQ ID NO: 1568926 - DNA, 25 bp, Homo sapien
actgaattgtgacggaaggttttgc

SEQ ID NO: 1568927 - DNA, 25 bp, Homo sapien
attacaaggactgaattgtgacgga

SEQ ID NO: 1568928 - DNA, 25 bp, Homo sapien
gacttctagtttgttgggccaggtg

SEQ ID NO: 1568929 - DNA, 25 bp, Homo sapien
gcccaagattcttgtcacaaactct

SEQ ID NO: 1568930 - DNA, 25 bp, Homo sapien
ccaatgatttgaaacggttgtagtg

SEQ ID NO: 1568931 - DNA, 25 bp, Homo sapien
gtgaatcacgcccaagattcttgtc

SEQ ID NO: 1568932 - DNA, 25 bp, Homo sapien
ctgcaatcatcatacttgtgaagtt

SEQ ID NO: 1568933 - DNA, 25 bp, Homo sapien
atcatcatacttgtgaagtttgtct

SEQ ID NO: 1568934 - DNA, 25 bp, Homo sapien
aatcatcatacttgtgaagtttgtc

SEQ ID NO: 1568935 - DNA, 25 bp, Homo sapien
gcaatcatcatacttgtgaagtttg

SEQ ID NO: 1568936 - DNA, 25 bp, Homo sapien
aatgcttgatggtttgctatactca

SEQ ID NO: 1568937 - DNA, 25 bp, Homo sapien
taatgcttgatggtttgctatactc

SEQ ID NO: 1568938 - DNA, 25 bp, Homo sapien
caattaatgcttgatggtttgctat

SEQ ID NO: 1568939 - DNA, 25 bp, Homo sapien
attaatgcttgatggtttgctatac

SEQ ID NO: 1568940 - DNA, 25 bp, Homo sapien
attaaggaggtgagaagcttgtacc

SEQ ID NO: 1568941 - DNA, 25 bp, Homo sapien
tgatactaataaacccactcaatgt

SEQ ID NO: 1568942 - DNA, 25 bp, Homo sapien
ctaaatagacatacaacccatattg

SEQ ID NO: 1568943 - DNA, 25 bp, Homo sapien
tcaatttgctatgaaacttaatact

SEQ ID NO: 1568944 - DNA, 25 bp, Homo sapien
cacagctgaaataaccaatgaagga

SEQ ID NO: 1568945 - DNA, 25 bp, Homo sapien
caagtgctacctattcatgggatgc

SEQ ID NO: 1568946 - DNA, 25 bp, Homo sapien
tcaaatcaatgggatacacacttgc

SEQ ID NO: 1568947 - DNA, 25 bp, Homo sapien
aaagggattgtaaacatccaagtgc

SEQ ID NO: 1568948 - DNA, 25 bp, Homo sapien
actcagtggggagcttctaagactc

SEQ ID NO: 1568949 - DNA, 25 bp, Homo sapien
atccttttactcagtggggagcttc

SEQ ID NO: 1568950 - DNA, 25 bp, Homo sapien
taatatccttttactcagtggggag

SEQ ID NO: 1568951 - DNA, 25 bp, Homo sapien
cttttactcagtggggagcttctaa

SEQ ID NO: 1568952 - DNA, 25 bp, Homo sapien
cccagacaaccggagctcagtgtgc

SEQ ID NO: 1568953 - DNA, 25 bp, Homo sapien
agtgtgcgagtacccgcaccggcgc

SEQ ID NO: 1568954 - DNA, 25 bp, Homo sapien
ggagctcagtgtgcgagtacccgca

SEQ ID NO: 1568955 - DNA, 25 bp, Homo sapien
agtgtggcagggcaacagggtgatg

SEQ ID NO: 1568956 - DNA, 25 bp, Homo sapien
cgccgctgagggaccttcactccac

SEQ ID NO: 1568957 - DNA, 25 bp, Homo sapien
gcgccgctgagggaccttcactcca

SEQ ID NO: 1568958 - DNA, 25 bp, Homo sapien
ccgctgagggaccttcactccacgc

SEQ ID NO: 1568959 - DNA, 25 bp, Homo sapien
gccgctgagggaccttcactccacg

SEQ ID NO: 1568960 - DNA, 25 bp, Homo sapien
tttcttcctcatgtaccaagagtct

SEQ ID NO: 1568961 - DNA, 25 bp, Homo sapien
tcctcatgtaccaagagtctttaga

SEQ ID NO: 1568962 - DNA, 25 bp, Homo sapien
taccaagagtctttagatgtcaatc

SEQ ID NO: 1568963 - DNA, 25 bp, Homo sapien
catgtaccaagagtctttagatgtc

SEQ ID NO: 1568964 - DNA, 25 bp, Homo sapien
cgtccctgtatagagtcctctgagc

SEQ ID NO: 1568965 - DNA, 25 bp, Homo sapien
agcatcacgtccctgtatagagtcc

SEQ ID NO: 1568966 - DNA, 25 bp, Homo sapien
catcacgtccctgtatagagtcctc

SEQ ID NO: 1568967 - DNA, 25 bp, Homo sapien
cacgtccctgtatagagtcctctga

SEQ ID NO: 1568968 - DNA, 25 bp, Homo sapien
cccacttctggagggaagttatcct

SEQ ID NO: 1568969 - DNA, 25 bp, Homo sapien
gaaaggacacatccccacttctgga

SEQ ID NO: 1568970 - DNA, 25 bp, Homo sapien
acttctggagggaagttatcctcac

SEQ ID NO: 1568971 - DNA, 25 bp, Homo sapien
tccccacttctggagggaagttatc

SEQ ID NO: 1568972 - DNA, 25 bp, Homo sapien
tatcgcttccgaataaagaccttgt

SEQ ID NO: 1568973 - DNA, 25 bp, Homo sapien
gggctgaattgtgtctgaaagcttt

SEQ ID NO: 1568974 - DNA, 25 bp, Homo sapien
cctagatgaataatctgatgtttcc

SEQ ID NO: 1568975 - DNA, 25 bp, Homo sapien
cgatgatgatatgtaagggatgaca

SEQ ID NO: 1568976 - DNA, 25 bp, Homo sapien
gggataactcctgactgaaggtctt

SEQ ID NO: 1568977 - DNA, 25 bp, Homo sapien
actatgaagtctacaatggcaggta

SEQ ID NO: 1568978 - DNA, 25 bp, Homo sapien
tctccactatgaagtctacaatggc

SEQ ID NO: 1568979 - DNA, 25 bp, Homo sapien
gcaggtaagggataactcctgactg

SEQ ID NO: 1568980 - DNA, 25 bp, Homo sapien
atgatggtatacaatggatgacgta

SEQ ID NO: 1568981 - DNA, 25 bp, Homo sapien
gatggtatacaatggatgacgtatg

SEQ ID NO: 1568982 - DNA, 25 bp, Homo sapien
acaatggatgacgtatgactgaaga

SEQ ID NO: 1568983 - DNA, 25 bp, Homo sapien
aatggatgacgtatgactgaagatc

SEQ ID NO: 1568984 - DNA, 25 bp, Homo sapien
ctatgatggcatgtaagggatgatg

SEQ ID NO: 1568985 - DNA, 25 bp, Homo sapien
tctttcaaggtttgatttgaaactg

SEQ ID NO: 1568986 - DNA, 25 bp, Homo sapien
ggtcttgccacacctattacacctg

SEQ ID NO: 1568987 - DNA, 25 bp, Homo sapien
gaaactgaaagcttcatcacattct

SEQ ID NO: 1568988 - DNA, 25 bp, Homo sapien
cgtgtaaggcatgacttctgactga

SEQ ID NO: 1568989 - DNA, 25 bp, Homo sapien
atttgatttgtatctgaaagtttca

SEQ ID NO: 1568990 - DNA, 25 bp, Homo sapien
atgatggcgtgtaaggcatgacttc

SEQ ID NO: 1568991 - DNA, 25 bp, Homo sapien
caagatttgatttgtatctgaaagt

SEQ ID NO: 1568992 - DNA, 25 bp, Homo sapien
gcttgatggtaaataagcgctgact

SEQ ID NO: 1568993 - DNA, 25 bp, Homo sapien
ggattgcttgatggtaaataagcgc

SEQ ID NO: 1568994 - DNA, 25 bp, Homo sapien
ggtaaataagcgctgactgcctatg

SEQ ID NO: 1568995 - DNA, 25 bp, Homo sapien
aataagcgctgactgcctatgaaag

SEQ ID NO: 1568996 - DNA, 25 bp, Homo sapien
gtaaggtctctctttattatggatt

SEQ ID NO: 1568997 - DNA, 25 bp, Homo sapien
tggattctccaatgatttgcaatag

SEQ ID NO: 1568998 - DNA, 25 bp, Homo sapien
ctccaatgatttgcaatagttgtag

SEQ ID NO: 1568999 - DNA, 25 bp, Homo sapien
taaggtctctctttattatggattc

SEQ ID NO: 1569000 - DNA, 25 bp, Homo sapien
ctgcaaggtatgaacgatgtctgaa

SEQ ID NO: 1569001 - DNA, 25 bp, Homo sapien
tgaacgatgtctgaaaaatttgtca

SEQ ID NO: 1569002 - DNA, 25 bp, Homo sapien
tgcaaggtatgaacgatgtctgaaa

SEQ ID NO: 1569003 - DNA, 25 bp, Homo sapien
ggtatgaacgatgtctgaaaaattt

SEQ ID NO: 1569004 - DNA, 25 bp, Homo sapien
tgatttgaatctgaaagctttatca

SEQ ID NO: 1569005 - DNA, 25 bp, Homo sapien
caaggtttgatttgaatctgaaagc

SEQ ID NO: 1569006 - DNA, 25 bp, Homo sapien
gaattctcctatgactttcaaggtt

SEQ ID NO: 1569007 - DNA, 25 bp, Homo sapien
tatgactttcaaggtttgatttgaa

SEQ ID NO: 1569008 - DNA, 25 bp, Homo sapien
acaagggccgaattttgactgaaca

SEQ ID NO: 1569009 - DNA, 25 bp, Homo sapien
caagggccgaattttgactgaacat

SEQ ID NO: 1569010 - DNA, 25 bp, Homo sapien
catgcaagctttgctttgcgattaa

SEQ ID NO: 1569011 - DNA, 25 bp, Homo sapien
gacatgcaagctttgctttgcgatt

SEQ ID NO: 1569012 - DNA, 25 bp, Homo sapien
atgcaagctttgctttgcgattaaa

SEQ ID NO: 1569013 - DNA, 25 bp, Homo sapien
tgacatgcaagctttgctttgcgat

SEQ ID NO: 1569014 - DNA, 25 bp, Homo sapien
tgacgtgcaacgtgtgcttgttgat

SEQ ID NO: 1569015 - DNA, 25 bp, Homo sapien
agtcaagtttccctacactacggat

SEQ ID NO: 1569016 - DNA, 25 bp, Homo sapien
tgaagacgttgtgagaatcattacg

SEQ ID NO: 1569017 - DNA, 25 bp, Homo sapien
caggtgtgaatcacgtccgaaagcc

SEQ ID NO: 1569018 - DNA, 25 bp, Homo sapien
catgagttcgccaatgaacggcaat

SEQ ID NO: 1569019 - DNA, 25 bp, Homo sapien
cttctccagtgatttacaatggttg

SEQ ID NO: 1569020 - DNA, 25 bp, Homo sapien
ctaatgaggtgagaatgtgaagtaa

SEQ ID NO: 1569021 - DNA, 25 bp, Homo sapien
gccacaatcatgacattgtaagatt

SEQ ID NO: 1569022 - DNA, 25 bp, Homo sapien
tgaagtcggactgaagaccttgcca

SEQ ID NO: 1569023 - DNA, 25 bp, Homo sapien
ctgatattctgcaaggagtgaagtc

SEQ ID NO: 1569024 - DNA, 25 bp, Homo sapien
gatattctgcaaggagtgaagtcgg

SEQ ID NO: 1569025 - DNA, 25 bp, Homo sapien
ttttctgatattctgcaaggagtga

SEQ ID NO: 1569026 - DNA, 25 bp, Homo sapien
tcaatcaatgcttgatggtttgcta

SEQ ID NO: 1569027 - DNA, 25 bp, Homo sapien
tattcattgcattgggaacaattac

SEQ ID NO: 1569028 - DNA, 25 bp, Homo sapien
gctatattcattgcattgggaacaa

SEQ ID NO: 1569029 - DNA, 25 bp, Homo sapien
caatgcttgatggtttgctatattc

SEQ ID NO: 1569030 - DNA, 25 bp, Homo sapien
tctagattcaatacgatacccataa

SEQ ID NO: 1569031 - DNA, 25 bp, Homo sapien
gtaatctagattcaatacgataccc

SEQ ID NO: 1569032 - DNA, 25 bp, Homo sapien
aatctagattcaatacgatacccat

SEQ ID NO: 1569033 - DNA, 25 bp, Homo sapien
atgtaatctagattcaatacgatac

SEQ ID NO: 1569034 - DNA, 25 bp, Homo sapien
atttacctcaacaatagaaagaaca

SEQ ID NO: 1569035 - DNA, 25 bp, Homo sapien
gaaatttacctcaacaatagaaaga

SEQ ID NO: 1569036 - DNA, 25 bp, Homo sapien
tttacctcaacaatagaaagaacat

SEQ ID NO: 1569037 - DNA, 25 bp, Homo sapien
acttcttgaagatcccttgtcctag

SEQ ID NO: 1569038 - DNA, 25 bp, Homo sapien
tagtagatggagaaaaagcgttcca

SEQ ID NO: 1569039 - DNA, 25 bp, Homo sapien
tttgagggcatcaaactagagcctg

SEQ ID NO: 1569040 - DNA, 25 bp, Homo sapien
cacaataactgagacggcaggcatg

SEQ ID NO: 1569041 - DNA, 25 bp, Homo sapien
cacaggggagtgggatggttttgct

SEQ ID NO: 1569042 - DNA, 25 bp, Homo sapien
acaggggagtgggatggttttgctt

SEQ ID NO: 1569043 - DNA, 25 bp, Homo sapien
caggggagtgggatggttttgcttt

SEQ ID NO: 1569044 - DNA, 25 bp, Homo sapien
caaccaatgcgtttataacaaattt

SEQ ID NO: 1569045 - DNA, 25 bp, Homo sapien
tatgaccgtgactcatgcatgagca

SEQ ID NO: 1569046 - DNA, 25 bp, Homo sapien
tatggagacaccactctcttgtatc

SEQ ID NO: 1569047 - DNA, 25 bp, Homo sapien
tatccattcatgcagcacggagttc

SEQ ID NO: 1569048 - DNA, 25 bp, Homo sapien
gagttctaagcacagttatggagac

SEQ ID NO: 1569049 - DNA, 25 bp, Homo sapien
aaaataccacttcagaccaggcgcg

SEQ ID NO: 1569050 - DNA, 25 bp, Homo sapien
ggtactgtctcccttgtattttgcc

SEQ ID NO: 1569051 - DNA, 25 bp, Homo sapien
ttgcactccatcctaaacaactaga

SEQ ID NO: 1569052 - DNA, 25 bp, Homo sapien
ctaaacaactagaggaaaactccat

SEQ ID NO: 1569053 - DNA, 25 bp, Homo sapien
cctctctggtgaggctcctacaatg

SEQ ID NO: 1569054 - DNA, 25 bp, Homo sapien
ccgcggcggtgggatagtcactcca

SEQ ID NO: 1569055 - DNA, 25 bp, Homo sapien
gatagtcactccacgccgtccgctt

SEQ ID NO: 1569056 - DNA, 25 bp, Homo sapien
cgcggcggtgggatagtcactccac

SEQ ID NO: 1569057 - DNA, 25 bp, Homo sapien
ggtgggatagtcactccacgccgtc

SEQ ID NO: 1569058 - DNA, 25 bp, Homo sapien
ttggataagacacaggagggtttgg

SEQ ID NO: 1569059 - DNA, 25 bp, Homo sapien
agggtttggagcaaaacgcctgcat

SEQ ID NO: 1569060 - DNA, 25 bp, Homo sapien
cctttagcctacacaagcaccggag

SEQ ID NO: 1569061 - DNA, 25 bp, Homo sapien
ctcagggaaagcagtgactgtggag

SEQ ID NO: 1569062 - DNA, 25 bp, Homo sapien
taccaagagtctttagaagtcaatc

SEQ ID NO: 1569063 - DNA, 25 bp, Homo sapien
cacgtccctgtatagagtcctctga

SEQ ID NO: 1569064 - DNA, 25 bp, Homo sapien
catcacgtccctgtatagagtcctc

SEQ ID NO: 1569065 - DNA, 25 bp, Homo sapien
cgtccctgtatagagtcctctgagc

SEQ ID NO: 1569066 - DNA, 25 bp, Homo sapien
agcatcacgtccctgtatagagtcc

SEQ ID NO: 1569067 - DNA, 25 bp, Homo sapien
cacatccccaggagggaagtcatcc

SEQ ID NO: 1569068 - DNA, 25 bp, Homo sapien
tccccaggagggaagtcatcctcac

SEQ ID NO: 1569069 - DNA, 25 bp, Homo sapien
ggcacatccccaggagggaagtcat

SEQ ID NO: 1569070 - DNA, 25 bp, Homo sapien
acatccccaggagggaagtcatcct

SEQ ID NO: 1569071 - DNA, 25 bp, Homo sapien
ccctgcatggaacacttctctattg

SEQ ID NO: 1569072 - DNA, 25 bp, Homo sapien
taattttgatcatatcgctctgtac

SEQ ID NO: 1569073 - DNA, 25 bp, Homo sapien
acgtatcgcttcgaattaaagacct

SEQ ID NO: 1569074 - DNA, 25 bp, Homo sapien
gatggcgtgcaacgtatcgcttcga

SEQ ID NO: 1569075 - DNA, 25 bp, Homo sapien
tgttaggtaatatgtctgactgaag

SEQ ID NO: 1569076 - DNA, 25 bp, Homo sapien
ctacgatggcatgttaggtaatatg

SEQ ID NO: 1569077 - DNA, 25 bp, Homo sapien
gcatgttaggtaatatgtctgactg

SEQ ID NO: 1569078 - DNA, 25 bp, Homo sapien
gatggcatgttaggtaatatgtctg

SEQ ID NO: 1569079 - DNA, 25 bp, Homo sapien
tttgaaatggaaagctttgtcacat

SEQ ID NO: 1569080 - DNA, 25 bp, Homo sapien
tgatttgaaatggaaagctttgtca

SEQ ID NO: 1569081 - DNA, 25 bp, Homo sapien
gatttgaaatggaaagctttgtcac

SEQ ID NO: 1569082 - DNA, 25 bp, Homo sapien
ctttgatttgaaatggaaagctttg

SEQ ID NO: 1569083 - DNA, 25 bp, Homo sapien
ctctatgatggcatgtaaaatgtga

SEQ ID NO: 1569084 - DNA, 25 bp, Homo sapien
tgtgacttccgactaaaggtcttgc

SEQ ID NO: 1569085 - DNA, 25 bp, Homo sapien
tctacgatggtatgtaagagatgac

SEQ ID NO: 1569086 - DNA, 25 bp, Homo sapien
cgatggcatgtaaggtacgacttct

SEQ ID NO: 1569087 - DNA, 25 bp, Homo sapien
tctttcaaggtttgatttgaaactg

SEQ ID NO: 1569088 - DNA, 25 bp, Homo sapien
ctgaaagcttcatcacaatcttcac

SEQ ID NO: 1569089 - DNA, 25 bp, Homo sapien
gtttgatttgaaactgaaagcttca

SEQ ID NO: 1569090 - DNA, 25 bp, Homo sapien
taaattctcctatgtctttcaaggt

SEQ ID NO: 1569091 - DNA, 25 bp, Homo sapien
gatggcatgtaagggttaactcctg

SEQ ID NO: 1569092 - DNA, 25 bp, Homo sapien
acttgtaagattctcttcagtacga

SEQ ID NO: 1569093 - DNA, 25 bp, Homo sapien
aaattgtaagctttgtcaagttctt

SEQ ID NO: 1569094 - DNA, 25 bp, Homo sapien
gaaattgtaagctttgtcaagttct

SEQ ID NO: 1569095 - DNA, 25 bp, Homo sapien
ttgaaattgtaagctttgtcaagtt

SEQ ID NO: 1569096 - DNA, 25 bp, Homo sapien
caaaagatgacgtatgactcaaggt

SEQ ID NO: 1569097 - DNA, 25 bp, Homo sapien
ggtacacaaaagatgacgtatgact

SEQ ID NO: 1569098 - DNA, 25 bp, Homo sapien
agatgacgtatgactcaaggtcttg

SEQ ID NO: 1569099 - DNA, 25 bp, Homo sapien
cacaaaagatgacgtatgactcaag

SEQ ID NO: 1569100 - DNA, 25 bp, Homo sapien
ttggatttgaaacagaaagcttctt

SEQ ID NO: 1569101 - DNA, 25 bp, Homo sapien
gttggatttgaaacagaaagcttct

SEQ ID NO: 1569102 - DNA, 25 bp, Homo sapien
tggatttgaaacagaaagcttcttc

SEQ ID NO: 1569103 - DNA, 25 bp, Homo sapien
acgatggtgcgtaaggtatgacttc

SEQ ID NO: 1569104 - DNA, 25 bp, Homo sapien
gcgtaaggtatgacttcagactaaa

SEQ ID NO: 1569105 - DNA, 25 bp, Homo sapien
atggtgcgtaaggtatgacttcaga

SEQ ID NO: 1569106 - DNA, 25 bp, Homo sapien
tgcgtaaggtatgacttcagactaa

SEQ ID NO: 1569107 - DNA, 25 bp, Homo sapien
cactcattatccttgtaaggtacct

SEQ ID NO: 1569108 - DNA, 25 bp, Homo sapien
cccatgaaaggtttttctacactca

SEQ ID NO: 1569109 - DNA, 25 bp, Homo sapien
actgcaaaggtatgaaggatgtctg

SEQ ID NO: 1569110 - DNA, 25 bp, Homo sapien
aatgctgactgcccatgaaaggttt

SEQ ID NO: 1569111 - DNA, 25 bp, Homo sapien
ccttgccacgttcattacactgcta

SEQ ID NO: 1569112 - DNA, 25 bp, Homo sapien
gtatgaattctatgactatcaaggt

SEQ ID NO: 1569113 - DNA, 25 bp, Homo sapien
tgtaaggtttctaatacgacttcac

SEQ ID NO: 1569114 - DNA, 25 bp, Homo sapien
gaattctatgactatcaaggtttga

SEQ ID NO: 1569115 - DNA, 25 bp, Homo sapien
ttgtaacgtttatctccagtatgaa

SEQ ID NO: 1569116 - DNA, 25 bp, Homo sapien
gcttcacatttgtaacgtttatctc

SEQ ID NO: 1569117 - DNA, 25 bp, Homo sapien
atgcttcacatttgtaacgtttatc

SEQ ID NO: 1569118 - DNA, 25 bp, Homo sapien
gtaacgtttatctccagtatgaatt

SEQ ID NO: 1569119 - DNA, 25 bp, Homo sapien
tgttgtgccaggtgcgaattatgcc

SEQ ID NO: 1569120 - DNA, 25 bp, Homo sapien
cgcaatggttgtagtgtaactgaag

SEQ ID NO: 1569121 - DNA, 25 bp, Homo sapien
aatgattcgcaatggttgtagtgta

SEQ ID NO: 1569122 - DNA, 25 bp, Homo sapien
attaaactagtatgatctctcttca

SEQ ID NO: 1569123 - DNA, 25 bp, Homo sapien
gaaacatagagctacaacccatact

SEQ ID NO: 1569124 - DNA, 25 bp, Homo sapien
gcatagaatgaagcttgactgagac

SEQ ID NO: 1569125 - DNA, 25 bp, Homo sapien
cattgtatttggaacaactatctcc

SEQ ID NO: 1569126 - DNA, 25 bp, Homo sapien
ctcaagtgatctaccggtgctggcc

SEQ ID NO: 1569127 - DNA, 25 bp, Homo sapien
gacttgtaccagtttaatttggtgc

SEQ ID NO: 1569128 - DNA, 25 bp, Homo sapien
ttttactttgatagagtctcttttc

SEQ ID NO: 1569129 - DNA, 25 bp, Homo sapien
tgagtgccttcaactacagcctgtt

SEQ ID NO: 1569130 - DNA, 25 bp, Homo sapien
agcagggtgtggtgacactgcatct

SEQ ID NO: 1569131 - DNA, 25 bp, Homo sapien
cactggggaatggaacggttttgct

SEQ ID NO: 1569132 - DNA, 25 bp, Homo sapien
ttaccagttttgatctgaatccact

SEQ ID NO: 1569133 - DNA, 25 bp, Homo sapien
ctgattttattaccagttttgatct

SEQ ID NO: 1569134 - DNA, 25 bp, Homo sapien
tttattaccagttttgatctgaatc

SEQ ID NO: 1569135 - DNA, 25 bp, Homo sapien
ttatagacccagcttgattcttctc

SEQ ID NO: 1569136 - DNA, 25 bp, Homo sapien
tatagacccagcttgattcttctcc

SEQ ID NO: 1569137 - DNA, 25 bp, Homo sapien
ctccaatgtctccttttaaagttgt

SEQ ID NO: 1569138 - DNA, 25 bp, Homo sapien
attcttctccaatgtctccttttaa

SEQ ID NO: 1569139 - DNA, 25 bp, Homo sapien
gtctgtcgtgaactgggttacagga

SEQ ID NO: 1569140 - DNA, 25 bp, Homo sapien
gcaatacagaaactaaggtactcta

SEQ ID NO: 1569141 - DNA, 25 bp, Homo sapien
agcaatacagaaactaaggtactct

SEQ ID NO: 1569142 - DNA, 25 bp, Homo sapien
tcgtgaactgggttacaggagacga

SEQ ID NO: 1569143 - DNA, 25 bp, Homo sapien
tcccaacgtggtgggattagcggca

SEQ ID NO: 1569144 - DNA, 25 bp, Homo sapien
ccatgccttgccaagttttgtgttt

SEQ ID NO: 1569145 - DNA, 25 bp, Homo sapien
tgagccaccgtgcccggcctctatg

SEQ ID NO: 1569146 - DNA, 25 bp, Homo sapien
ccaccatgccttgccaagttttgtg

SEQ ID NO: 1569147 - DNA, 25 bp, Homo sapien
tctgacaacaatctgaatgagctta

SEQ ID NO: 1569148 - DNA, 25 bp, Homo sapien
aagagtcgatcccatggctttgacc

SEQ ID NO: 1569149 - DNA, 25 bp, Homo sapien
tgcccccacagtctcaagagtcgat

SEQ ID NO: 1569150 - DNA, 25 bp, Homo sapien
tcccatggctttgaccttgattttg

SEQ ID NO: 1569151 - DNA, 25 bp, Homo sapien
gaaagttatcttggattatctgggt

SEQ ID NO: 1569152 - DNA, 25 bp, Homo sapien
aaagttatcttggattatctgggtg

SEQ ID NO: 1569153 - DNA, 25 bp, Homo sapien
ctgaggtcaagagttagggaccggc

SEQ ID NO: 1569154 - DNA, 25 bp, Homo sapien
tcaagagttagggaccggcctggcc

SEQ ID NO: 1569155 - DNA, 25 bp, Homo sapien
agaattgctcaaacctgcgaggcag

SEQ ID NO: 1569156 - DNA, 25 bp, Homo sapien
gaattgctcaaacctgcgaggcaga

SEQ ID NO: 1569157 - DNA, 25 bp, Homo sapien
ctgctgtcacaaccgcaatgatcat

SEQ ID NO: 1569158 - DNA, 25 bp, Homo sapien
agaatcactccggaaatgcctaaac

SEQ ID NO: 1569159 - DNA, 25 bp, Homo sapien
tcactccggaaatgcctaaacccaa

SEQ ID NO: 1569160 - DNA, 25 bp, Homo sapien
gaaatgcctaaacccaaaagctgcc

SEQ ID NO: 1569161 - DNA, 25 bp, Homo sapien
cggaaatgcctaaacccaaaagctg

SEQ ID NO: 1569162 - DNA, 25 bp, Homo sapien
tgccaatggacactcccctgacaac

SEQ ID NO: 1569163 - DNA, 25 bp, Homo sapien
gccaatggacactcccctgacaact

SEQ ID NO: 1569164 - DNA, 25 bp, Homo sapien
gaggcaggtgctgccaatggacact

SEQ ID NO: 1569165 - DNA, 25 bp, Homo sapien
tcaggaggcaggtgctgccaatgga

SEQ ID NO: 1569166 - DNA, 25 bp, Homo sapien
gctgatggtgatggcctgggagaca

SEQ ID NO: 1569167 - DNA, 25 bp, Homo sapien
tgagctcctggggctgatggtgatg

SEQ ID NO: 1569168 - DNA, 25 bp, Homo sapien
ctgagctcctggggctgatggtgat

SEQ ID NO: 1569169 - DNA, 25 bp, Homo sapien
ggggctgatggtgatggcctgggag

SEQ ID NO: 1569170 - DNA, 25 bp, Homo sapien
tgggggcgttccctttaagctctgc

SEQ ID NO: 1569171 - DNA, 25 bp, Homo sapien
gggcgttccctttaagctctgccca

SEQ ID NO: 1569172 - DNA, 25 bp, Homo sapien
gaacaatgatattgaccagggagga

SEQ ID NO: 1569173 - DNA, 25 bp, Homo sapien
aacaatgatattgaccagggaggag

SEQ ID NO: 1569174 - DNA, 25 bp, Homo sapien
gagaacaatgatattgaccagggag

SEQ ID NO: 1569175 - DNA, 25 bp, Homo sapien
agaacaatgatattgaccagggagg

SEQ ID NO: 1569176 - DNA, 25 bp, Homo sapien
gtcagcgactctctggtgccctcgt

SEQ ID NO: 1569177 - DNA, 25 bp, Homo sapien
tgccgcgtcagcgactctctggtgc

SEQ ID NO: 1569178 - DNA, 25 bp, Homo sapien
cgcgtcagcgactctctggtgccct

SEQ ID NO: 1569179 - DNA, 25 bp, Homo sapien
tcagcgactctctggtgccctcgtg

SEQ ID NO: 1569180 - DNA, 25 bp, Homo sapien
tgcaggatgcaaacgatggagctgc

SEQ ID NO: 1569181 - DNA, 25 bp, Homo sapien
ggatgcaaacgatggagctgctgcc

SEQ ID NO: 1569182 - DNA, 25 bp, Homo sapien
atgcaaacgatggagctgctgcccc

SEQ ID NO: 1569183 - DNA, 25 bp, Homo sapien
caggatgcaaacgatggagctgctg

SEQ ID NO: 1569184 - DNA, 25 bp, Homo sapien
ggaggatggttttggtagctccgga

SEQ ID NO: 1569185 - DNA, 25 bp, Homo sapien
caggaggatggttttggtagctccg

SEQ ID NO: 1569186 - DNA, 25 bp, Homo sapien
ggatggttttggtagctccggactc

SEQ ID NO: 1569187 - DNA, 25 bp, Homo sapien
aggatggttttggtagctccggact

SEQ ID NO: 1569188 - DNA, 25 bp, Homo sapien
cactcatgagaagaaagcggctgac

SEQ ID NO: 1569189 - DNA, 25 bp, Homo sapien
tgtacaaacatgtccaattcacata

SEQ ID NO: 1569190 - DNA, 25 bp, Homo sapien
aagcttggatacacaggagtctcca

SEQ ID NO: 1569191 - DNA, 25 bp, Homo sapien
cataaacattgtacaaacatgtcca

SEQ ID NO: 1569192 - DNA, 25 bp, Homo sapien
tctggatccgacaaaacatatattt

SEQ ID NO: 1569193 - DNA, 25 bp, Homo sapien
tacagcaagagcttcgcatctgcgc

SEQ ID NO: 1569194 - DNA, 25 bp, Homo sapien
gctgaaggcatgagatttctggatc

SEQ ID NO: 1569195 - DNA, 25 bp, Homo sapien
tgtgcaccgtgactttcttatatcg

SEQ ID NO: 1569196 - DNA, 25 bp, Homo sapien
cagtgtcagcttcggggactccttg

SEQ ID NO: 1569197 - DNA, 25 bp, Homo sapien
tgtcagctcaaccccatgaactcag

SEQ ID NO: 1569198 - DNA, 25 bp, Homo sapien
cacagcctgttggccgctgtcagct

SEQ ID NO: 1569199 - DNA, 25 bp, Homo sapien
tcaaccccatgaactcagtgtcagc

SEQ ID NO: 1569200 - DNA, 25 bp, Homo sapien
gatgggaggattgttggagcccggg

SEQ ID NO: 1569201 - DNA, 25 bp, Homo sapien
tgcactgagccaagttggcaccatt

SEQ ID NO: 1569202 - DNA, 25 bp, Homo sapien
ttgcactgagccaagttggcaccat

SEQ ID NO: 1569203 - DNA, 25 bp, Homo sapien
gcccggggtggggaggttgcactga

SEQ ID NO: 1569204 - DNA, 25 bp, Homo sapien
catttgtgaagacgtagctcaggta

SEQ ID NO: 1569205 - DNA, 25 bp, Homo sapien
caaccacgtgcttccttagcagaga

SEQ ID NO: 1569206 - DNA, 25 bp, Homo sapien
tctagattagcggttcccagtgttt

SEQ ID NO: 1569207 - DNA, 25 bp, Homo sapien
tccgtgggaacgattctgatgcttc

SEQ ID NO: 1569208 - DNA, 25 bp, Homo sapien
tacctctgagtatgcgtctgaagga

SEQ ID NO: 1569209 - DNA, 25 bp, Homo sapien
cacgtcagccgtatgagggtccttc

SEQ ID NO: 1569210 - DNA, 25 bp, Homo sapien
ccttcatgatgcacggataaacaca

SEQ ID NO: 1569211 - DNA, 25 bp, Homo sapien
tgttattcgcatcagccaaggcacg

SEQ ID NO: 1569212 - DNA, 25 bp, Homo sapien
tctagtgtaatcagaatggcaggca

SEQ ID NO: 1569213 - DNA, 25 bp, Homo sapien
tctacactgaacgaaggatggaggg

SEQ ID NO: 1569214 - DNA, 25 bp, Homo sapien
tgtggtttgcattcatcagtgtcag

SEQ ID NO: 1569215 - DNA, 25 bp, Homo sapien
taacagaacgctgagcaggagaact

SEQ ID NO: 1569216 - DNA, 25 bp, Homo sapien
aatgaatgggatcagcgttccctta

SEQ ID NO: 1569217 - DNA, 25 bp, Homo sapien
ccttaggtttcacacacacggaaag

SEQ ID NO: 1569218 - DNA, 25 bp, Homo sapien
tactttatcactcaatataaaggga

SEQ ID NO: 1569219 - DNA, 25 bp, Homo sapien
tcaagaccagtacatagggtgcagc

SEQ ID NO: 1569220 - DNA, 25 bp, Homo sapien
cggtggcaccgtcactccacgctat

SEQ ID NO: 1569221 - DNA, 25 bp, Homo sapien
ctcacgaggtcgtctcaatttgctc

SEQ ID NO: 1569222 - DNA, 25 bp, Homo sapien
ccaggtacagaagcgccaggaacct

SEQ ID NO: 1569223 - DNA, 25 bp, Homo sapien
gggatcccaagtcccaggtacagaa

SEQ ID NO: 1569224 - DNA, 25 bp, Homo sapien
acggcctctcacgaggtcgtctcaa

SEQ ID NO: 1569225 - DNA, 25 bp, Homo sapien
accaggcagactaccactcagctaa

SEQ ID NO: 1569226 - DNA, 25 bp, Homo sapien
tatagaagcaattgcgaccaggcag

SEQ ID NO: 1569227 - DNA, 25 bp, Homo sapien
tctccgtgttaagagcattcaatca

SEQ ID NO: 1569228 - DNA, 25 bp, Homo sapien
ccagtgctctttcatgaagaatcca

SEQ ID NO: 1569229 - DNA, 25 bp, Homo sapien
caccctctggtctctattggatctg

SEQ ID NO: 1569230 - DNA, 25 bp, Homo sapien
caggaaaatggacaagggctagtgt

SEQ ID NO: 1569231 - DNA, 25 bp, Homo sapien
caggcctaccgacagttgccaggaa

SEQ ID NO: 1569232 - DNA, 25 bp, Homo sapien
tcttcttactcccactgcaacaggg

SEQ ID NO: 1569233 - DNA, 25 bp, Homo sapien
ccttgttgcagtacatagacgagct

SEQ ID NO: 1569234 - DNA, 25 bp, Homo sapien
gaaacattggcctcagacctcatgg

SEQ ID NO: 1569235 - DNA, 25 bp, Homo sapien
taggtgtcatattgagccacgagga

SEQ ID NO: 1569236 - DNA, 25 bp, Homo sapien
tgttgggatgagaggcgcaaaccac

SEQ ID NO: 1569237 - DNA, 25 bp, Homo sapien
cagaagcaactcctgttcgggttca

SEQ ID NO: 1569238 - DNA, 25 bp, Homo sapien
ttccccaaaagtctgtacagggcat

SEQ ID NO: 1569239 - DNA, 25 bp, Homo sapien
tagctgtaaatcatgcaccagtagt

SEQ ID NO: 1569240 - DNA, 25 bp, Homo sapien
ccagtagtagcagaattaaaaccag

SEQ ID NO: 1569241 - DNA, 25 bp, Homo sapien
gaaattcctggagtataggctgagg

SEQ ID NO: 1569242 - DNA, 25 bp, Homo sapien
ggagtataggctgaggacaacccac

SEQ ID NO: 1569243 - DNA, 25 bp, Homo sapien
tcctggagtataggctgaggacaac

SEQ ID NO: 1569244 - DNA, 25 bp, Homo sapien
aaatcattatttcagttagctaaag

SEQ ID NO: 1569245 - DNA, 25 bp, Homo sapien
tccttcgagctcaggatgttgagac

SEQ ID NO: 1569246 - DNA, 25 bp, Homo sapien
caggggccaccacgttttgatatcc

SEQ ID NO: 1569247 - DNA, 25 bp, Homo sapien
aaaagtactatgtagaccaggtgtg

SEQ ID NO: 1569248 - DNA, 25 bp, Homo sapien
aggaagatccttcgagctcaggatg

SEQ ID NO: 1569249 - DNA, 25 bp, Homo sapien
aaaactaagatttatctcagccggg

SEQ ID NO: 1569250 - DNA, 25 bp, Homo sapien
ctaagatttatctcagccgggcatg

SEQ ID NO: 1569251 - DNA, 25 bp, Homo sapien
tgaaaactaagatttatctcagccg

SEQ ID NO: 1569252 - DNA, 25 bp, Homo sapien
aactaagatttatctcagccgggca

SEQ ID NO: 1569253 - DNA, 25 bp, Homo sapien
tccactcggcattgcagactcctct

SEQ ID NO: 1569254 - DNA, 25 bp, Homo sapien
gctcacactccggttcctccttcct

SEQ ID NO: 1569255 - DNA, 25 bp, Homo sapien
tcctccactcggcattgcagactcc

SEQ ID NO: 1569256 - DNA, 25 bp, Homo sapien
tccttcctccactcggcattgcaga

SEQ ID NO: 1569257 - DNA, 25 bp, Homo sapien
taccgttcacggaggccacttcagc

SEQ ID NO: 1569258 - DNA, 25 bp, Homo sapien
ctaccgttcacggaggccacttcag

SEQ ID NO: 1569259 - DNA, 25 bp, Homo sapien
agtggccaggcgctcctgagcacag

SEQ ID NO: 1569260 - DNA, 25 bp, Homo sapien
agcacagtccagctcctcttcaacc

SEQ ID NO: 1569261 - DNA, 25 bp, Homo sapien
cagctcctcttcaaccagctggatc

SEQ ID NO: 1569262 - DNA, 25 bp, Homo sapien
ggccaggcgctcctgagcacagtcc

SEQ ID NO: 1569263 - DNA, 25 bp, Homo sapien
atctctctcactctcatcagcagct

SEQ ID NO: 1569264 - DNA, 25 bp, Homo sapien
tatctctctcactctcatcagcagc

SEQ ID NO: 1569265 - DNA, 25 bp, Homo sapien
tgtatctctctcactctcatcagca

SEQ ID NO: 1569266 - DNA, 25 bp, Homo sapien
ctcttcatacttcccatctgcctca

SEQ ID NO: 1569267 - DNA, 25 bp, Homo sapien
atctgcaatgtgcttagcttctttg

SEQ ID NO: 1569268 - DNA, 25 bp, Homo sapien
catctgcctcatctgcaatgtgctt

SEQ ID NO: 1569269 - DNA, 25 bp, Homo sapien
ttcatacttcccatctgcctcatct

SEQ ID NO: 1569270 - DNA, 25 bp, Homo sapien
tgcatcccatgtctccttcaatgat

SEQ ID NO: 1569271 - DNA, 25 bp, Homo sapien
tcgttcctctgtgcatcccatgtct

SEQ ID NO: 1569272 - DNA, 25 bp, Homo sapien
tgtgcatcccatgtctccttcaatg

SEQ ID NO: 1569273 - DNA, 25 bp, Homo sapien
gctcgttcctctgtgcatcccatgt

SEQ ID NO: 1569274 - DNA, 25 bp, Homo sapien
tctcattcaggtcaagcaaagtctg

SEQ ID NO: 1569275 - DNA, 25 bp, Homo sapien
tctcagccaactcagcatgggtctc

SEQ ID NO: 1569276 - DNA, 25 bp, Homo sapien
ctctgcctccttgagattatcagta

SEQ ID NO: 1569277 - DNA, 25 bp, Homo sapien
actgatctctcagccaactcagcat

SEQ ID NO: 1569278 - DNA, 25 bp, Homo sapien
gaaggctgccctgccaaattacaac

SEQ ID NO: 1569279 - DNA, 25 bp, Homo sapien
cagagctcaggtctattgcagcctc

SEQ ID NO: 1569280 - DNA, 25 bp, Homo sapien
gggaaacatgcacttaatagctcac

SEQ ID NO: 1569281 - DNA, 25 bp, Homo sapien
agacgttccattgccaggacgagca

SEQ ID NO: 1569282 - DNA, 25 bp, Homo sapien
gaatacatgggtggctgggagcaat

SEQ ID NO: 1569283 - DNA, 25 bp, Homo sapien
cttgaaaatagcgaaagagggtcag

SEQ ID NO: 1569284 - DNA, 25 bp, Homo sapien
atcaggaatacatgggtggctggga

SEQ ID NO: 1569285 - DNA, 25 bp, Homo sapien
tagcgaaagagggtcagctgtagaa

SEQ ID NO: 1569286 - DNA, 25 bp, Homo sapien
aagatcatgagactgcactcacagc

SEQ ID NO: 1569287 - DNA, 25 bp, Homo sapien
catgagactgcactcacagcccggg

SEQ ID NO: 1569288 - DNA, 25 bp, Homo sapien
tgagactgcactcacagcccgggca

SEQ ID NO: 1569289 - DNA, 25 bp, Homo sapien
gatcatgagactgcactcacagccc

SEQ ID NO: 1569290 - DNA, 25 bp, Homo sapien
ctgggaaatatggtcccgtctgctg

SEQ ID NO: 1569291 - DNA, 25 bp, Homo sapien
cactgcaccagggatgataaactgc

SEQ ID NO: 1569292 - DNA, 25 bp, Homo sapien
cctgggaaatatggtcccgtctgct

SEQ ID NO: 1569293 - DNA, 25 bp, Homo sapien
ggatgataaactgccacaggaaaac

SEQ ID NO: 1569294 - DNA, 25 bp, Homo sapien
taccaagagtctttagaagtcaatc

SEQ ID NO: 1569295 - DNA, 25 bp, Homo sapien
tccgtatctagatgagacagagtac

SEQ ID NO: 1569296 - DNA, 25 bp, Homo sapien
cacagcaagtgacattccgtatcta

SEQ ID NO: 1569297 - DNA, 25 bp, Homo sapien
acagagtacgggtgatgtcttcaga

SEQ ID NO: 1569298 - DNA, 25 bp, Homo sapien
ggcccagaaacttttattgacacag

SEQ ID NO: 1569299 - DNA, 25 bp, Homo sapien
cacgtccctgtatagagtcctctga

SEQ ID NO: 1569300 - DNA, 25 bp, Homo sapien
caggggagaccaggttcctataatt

SEQ ID NO: 1569301 - DNA, 25 bp, Homo sapien
cgtccctgtatagagtcctctgagc

SEQ ID NO: 1569302 - DNA, 25 bp, Homo sapien
agcatcacgtccctgtatagagtcc

SEQ ID NO: 1569303 - DNA, 25 bp, Homo sapien
caagatgaatttcaacaacacagca

SEQ ID NO: 1569304 - DNA, 25 bp, Homo sapien
caggagatcaagatgaatttcaaca

SEQ ID NO: 1569305 - DNA, 25 bp, Homo sapien
tcaagatgaatttcaacaacacagc

SEQ ID NO: 1569306 - DNA, 25 bp, Homo sapien
gagctcaggagatcaagatgaattt

SEQ ID NO: 1569307 - DNA, 25 bp, Homo sapien
ataattaggtatggtggttggcacc

SEQ ID NO: 1569308 - DNA, 25 bp, Homo sapien
caagcccggccacacatatgcaaaa

SEQ ID NO: 1569309 - DNA, 25 bp, Homo sapien
ccaagcccggccacacatatgcaaa

SEQ ID NO: 1569310 - DNA, 25 bp, Homo sapien
aataattaggtatggtggttggcac

SEQ ID NO: 1569311 - DNA, 25 bp, Homo sapien
cattagacacttgagtagcaggatt

SEQ ID NO: 1569312 - DNA, 25 bp, Homo sapien
tgcattagacacttgagtagcagga

SEQ ID NO: 1569313 - DNA, 25 bp, Homo sapien
attagacacttgagtagcaggatta

SEQ ID NO: 1569314 - DNA, 25 bp, Homo sapien
gcattagacacttgagtagcaggat

SEQ ID NO: 1569315 - DNA, 25 bp, Homo sapien
ggccagcctcgtacttttgacctca

SEQ ID NO: 1569316 - DNA, 25 bp, Homo sapien
tgtgtgacattagctagtggactgt

SEQ ID NO: 1569317 - DNA, 25 bp, Homo sapien
ttgcataccacataccgaaaagcct

SEQ ID NO: 1569318 - DNA, 25 bp, Homo sapien
gactgtgtcagttatattgcatacc

SEQ ID NO: 1569319 - DNA, 25 bp, Homo sapien
caatggaaattctgtattgtcaaac

SEQ ID NO: 1569320 - DNA, 25 bp, Homo sapien
aatccacaacaagctcatgtaagga

SEQ ID NO: 1569321 - DNA, 25 bp, Homo sapien
ttgtcaaacagtcatagcactgaga

SEQ ID NO: 1569322 - DNA, 25 bp, Homo sapien
tgtaaggataaccaaaatcaatgga

SEQ ID NO: 1569323 - DNA, 25 bp, Homo sapien
tgactttgatcatatcgttctgtaa

SEQ ID NO: 1569324 - DNA, 25 bp, Homo sapien
tctttatcaacatcctggtagcaaa

SEQ ID NO: 1569325 - DNA, 25 bp, Homo sapien
aaccaaggaagcatcgtggacagac

SEQ ID NO: 1569326 - DNA, 25 bp, Homo sapien
tgcatggaacacttctctgttgcct

SEQ ID NO: 1569327 - DNA, 25 bp, Homo sapien
gaattccagaaattattcccatggt

SEQ ID NO: 1569328 - DNA, 25 bp, Homo sapien
tgtgtgagtaatgaagaattccaga

SEQ ID NO: 1569329 - DNA, 25 bp, Homo sapien
tttccttaagagtgagctgtaatta

SEQ ID NO: 1569330 - DNA, 25 bp, Homo sapien
tcccatggttattagatatatgggt

SEQ ID NO: 1569331 - DNA, 25 bp, Homo sapien
agtgtgacatctacgatggcatgct

SEQ ID NO: 1569332 - DNA, 25 bp, Homo sapien
cgatggcatgctaggtttcgcttct

SEQ ID NO: 1569333 - DNA, 25 bp, Homo sapien
catgctaggtttcgcttctgattaa

SEQ ID NO: 1569334 - DNA, 25 bp, Homo sapien
cgcttctgattaaagagcttgccac

SEQ ID NO: 1569335 - DNA, 25 bp, Homo sapien
catgtaagggatgatgtccggctaa

SEQ ID NO: 1569336 - DNA, 25 bp, Homo sapien
tcgatgatggcgtgtaaggattgac

SEQ ID NO: 1569337 - DNA, 25 bp, Homo sapien
atggcgtgtaaggattgacttctgc

SEQ ID NO: 1569338 - DNA, 25 bp, Homo sapien
gtgtaaggattgacttctgcctaaa

SEQ ID NO: 1569339 - DNA, 25 bp, Homo sapien
cactatgaagtctacgatggcgttt

SEQ ID NO: 1569340 - DNA, 25 bp, Homo sapien
tctccactatgaagtctacgatggc

SEQ ID NO: 1569341 - DNA, 25 bp, Homo sapien
tgaagtctacgatggcgtttaaggg

SEQ ID NO: 1569342 - DNA, 25 bp, Homo sapien
ctgtaagctttgtcactatcttcac

SEQ ID NO: 1569343 - DNA, 25 bp, Homo sapien
gtctacgatggcatgtaagggatga

SEQ ID NO: 1569344 - DNA, 25 bp, Homo sapien
agtctacgatggcatgtaagggatg

SEQ ID NO: 1569345 - DNA, 25 bp, Homo sapien
gaagtctacgatggcatgtaaggga

SEQ ID NO: 1569346 - DNA, 25 bp, Homo sapien
tgaagtctacgatggcatgtaaggg

SEQ ID NO: 1569347 - DNA, 25 bp, Homo sapien
tatgacttccgactaaaggtcttgc

SEQ ID NO: 1569348 - DNA, 25 bp, Homo sapien
tggtggcatataagggatgacttct

SEQ ID NO: 1569349 - DNA, 25 bp, Homo sapien
ctacgatggcatgtaaggtttgact

SEQ ID NO: 1569350 - DNA, 25 bp, Homo sapien
tatgaagtctacgatggcatgtaag

SEQ ID NO: 1569351 - DNA, 25 bp, Homo sapien
cgatggcatgtaaggtttgacttct

SEQ ID NO: 1569352 - DNA, 25 bp, Homo sapien
gaagtctacgatggcatgtaaggtt

SEQ ID NO: 1569353 - DNA, 25 bp, Homo sapien
taaacaagtgttgactgcctactaa

SEQ ID NO: 1569354 - DNA, 25 bp, Homo sapien
ttcacggtttgatgtgcgactgtaa

SEQ ID NO: 1569355 - DNA, 25 bp, Homo sapien
gccacatttattaccctagtatgat

SEQ ID NO: 1569356 - DNA, 25 bp, Homo sapien
ggtgcgaatcatgcccaaaagcctt

SEQ ID NO: 1569357 - DNA, 25 bp, Homo sapien
tctccagcgttgagttcaccgatga

SEQ ID NO: 1569358 - DNA, 25 bp, Homo sapien
ctcatgaggtgtgaagtgaaggctt

SEQ ID NO: 1569359 - DNA, 25 bp, Homo sapien
ctccagcgttgagttcaccgatgaa

SEQ ID NO: 1569360 - DNA, 25 bp, Homo sapien
gatgtctcatgaggtgtgaagtgaa

SEQ ID NO: 1569361 - DNA, 25 bp, Homo sapien
tggaactaagtaacatagtcagtgg

SEQ ID NO: 1569362 - DNA, 25 bp, Homo sapien
aacattgagctacaacccatattga

SEQ ID NO: 1569363 - DNA, 25 bp, Homo sapien
tgtaagctgatgtgcctggcccaat

SEQ ID NO: 1569364 - DNA, 25 bp, Homo sapien
tctactcattgcatatggaccaact

SEQ ID NO: 1569365 - DNA, 25 bp, Homo sapien
caatttatatgtgagagcgggagga

SEQ ID NO: 1569366 - DNA, 25 bp, Homo sapien
cagtgaccctgcgtttttatgtaaa

SEQ ID NO: 1569367 - DNA, 25 bp, Homo sapien
tgtgcagagggattggttctgtccc

SEQ ID NO: 1569368 - DNA, 25 bp, Homo sapien
gacggtgactcgtgcatgagctgta

SEQ ID NO: 1569369 - DNA, 25 bp, Homo sapien
cgctgccgtgggaccgtcactccac

SEQ ID NO: 1569370 - DNA, 25 bp, Homo sapien
gcgctgccgtgggaccgtcactcca

SEQ ID NO: 1569371 - DNA, 25 bp, Homo sapien
gctgccgtgggaccgtcactccacg

SEQ ID NO: 1569372 - DNA, 25 bp, Homo sapien
cagaacctggatcttgcgcttcact

SEQ ID NO: 1569373 - DNA, 25 bp, Homo sapien
ggatcttgcgcttcactgcctcgat

SEQ ID NO: 1569374 - DNA, 25 bp, Homo sapien
gcgcttcactgcctcgatggtggtg

SEQ ID NO: 1569375 - DNA, 25 bp, Homo sapien
tcctcatcatctgcctgcagctgca

SEQ ID NO: 1569376 - DNA, 25 bp, Homo sapien
catcagcagcttttcccgcttcttc

SEQ ID NO: 1569377 - DNA, 25 bp, Homo sapien
ctttgtatctctctcactctcatca

SEQ ID NO: 1569378 - DNA, 25 bp, Homo sapien
gtggccaggcgctcctgagcacagt

SEQ ID NO: 1569379 - DNA, 25 bp, Homo sapien
ggccaggcgctcctgagcacagtcc

SEQ ID NO: 1569380 - DNA, 25 bp, Homo sapien
gatttcctggagttccatcttcttc

SEQ ID NO: 1569381 - DNA, 25 bp, Homo sapien
ctcttcatacttcccatctgcctca

SEQ ID NO: 1569382 - DNA, 25 bp, Homo sapien
tcatctgcaatgtgcttagcttctt

SEQ ID NO: 1569383 - DNA, 25 bp, Homo sapien
ctttgagttggatttcctggagttc

SEQ ID NO: 1569384 - DNA, 25 bp, Homo sapien
gctcattcttctgtgcattccatgt

SEQ ID NO: 1569385 - DNA, 25 bp, Homo sapien
cattcttctgtgcattccatgtctc

SEQ ID NO: 1569386 - DNA, 25 bp, Homo sapien
ttctgtgcattccatgtctctttca

SEQ ID NO: 1569387 - DNA, 25 bp, Homo sapien
cttctgtgcattccatgtctctttc

SEQ ID NO: 1569388 - DNA, 25 bp, Homo sapien
gagggtacttttcttcagctgcact

SEQ ID NO: 1569389 - DNA, 25 bp, Homo sapien
gcctcctcgagattatcagtaagaa

SEQ ID NO: 1569390 - DNA, 25 bp, Homo sapien
agcatgggtctctgcctcctcgaga

SEQ ID NO: 1569391 - DNA, 25 bp, Homo sapien
atgggtctctgcctcctcgagatta

SEQ ID NO: 1569392 - DNA, 25 bp, Homo sapien
caattgaagatcagccctcaggtaa

SEQ ID NO: 1569393 - DNA, 25 bp, Homo sapien
aattgaagatcagccctcaggtaaa

SEQ ID NO: 1569394 - DNA, 25 bp, Homo sapien
gaaagcagccttccaattgaagatc

SEQ ID NO: 1569395 - DNA, 25 bp, Homo sapien
ttccaattgaagatcagccctcagg

SEQ ID NO: 1569396 - DNA, 25 bp, Homo sapien
taccaagagtctttagaagtcaatc

SEQ ID NO: 1569397 - DNA, 25 bp, Homo sapien
cacgtccctgtatagagtcctctga

SEQ ID NO: 1569398 - DNA, 25 bp, Homo sapien
cgtccctgtatagagtcctctgagc

SEQ ID NO: 1569399 - DNA, 25 bp, Homo sapien
catcacgtccctgtatagagtcctc

SEQ ID NO: 1569400 - DNA, 25 bp, Homo sapien
agcatcacgtccctgtatagagtcc

SEQ ID NO: 1569401 - DNA, 25 bp, Homo sapien
cccacttctggagggaagttatcct

SEQ ID NO: 1569402 - DNA, 25 bp, Homo sapien
gcacatccccacttctggagggaag

SEQ ID NO: 1569403 - DNA, 25 bp, Homo sapien
acttctggagggaagttatcctcac

SEQ ID NO: 1569404 - DNA, 25 bp, Homo sapien
aagggcacatccccacttctggagg

SEQ ID NO: 1569405 - DNA, 25 bp, Homo sapien
ggagatcaagaccaacttcaacaac

SEQ ID NO: 1569406 - DNA, 25 bp, Homo sapien
aggagatcaagaccaacttcaacaa

SEQ ID NO: 1569407 - DNA, 25 bp, Homo sapien
caggagatcaagaccaacttcaaca

SEQ ID NO: 1569408 - DNA, 25 bp, Homo sapien
ccaggagatcaagaccaacttcaac

SEQ ID NO: 1569409 - DNA, 25 bp, Homo sapien
agtttgagatcggccagacaaaaaa

SEQ ID NO: 1569410 - DNA, 25 bp, Homo sapien
tgagatcggccagacaaaaaaggag

SEQ ID NO: 1569411 - DNA, 25 bp, Homo sapien
ttgagatcggccagacaaaaaagga

SEQ ID NO: 1569412 - DNA, 25 bp, Homo sapien
tttgagatcggccagacaaaaaagg

SEQ ID NO: 1569413 - DNA, 25 bp, Homo sapien
ggcacactaggtttcgcttccgatt

SEQ ID NO: 1569414 - DNA, 25 bp, Homo sapien
cgatggcacactaggtttcgcttcc

SEQ ID NO: 1569415 - DNA, 25 bp, Homo sapien
cacactaggtttcgcttccgattaa

SEQ ID NO: 1569416 - DNA, 25 bp, Homo sapien
tcctgaaagcgaaagtctccagtgt

SEQ ID NO: 1569417 - DNA, 25 bp, Homo sapien
catgcaaggtgtgttttccgattaa

SEQ ID NO: 1569418 - DNA, 25 bp, Homo sapien
taagtgttgactgctcattaaggct

SEQ ID NO: 1569419 - DNA, 25 bp, Homo sapien
taagggaatacgtctgactgaaagt

SEQ ID NO: 1569420 - DNA, 25 bp, Homo sapien
ccgtatgaattacgagggctgaaat

SEQ ID NO: 1569421 - DNA, 25 bp, Homo sapien
ctgaaaaatttgccgattattacac

SEQ ID NO: 1569422 - DNA, 25 bp, Homo sapien
gccaatgaactgcaaggtatggacg

SEQ ID NO: 1569423 - DNA, 25 bp, Homo sapien
cgccaatgaactgcaaggtatggac

SEQ ID NO: 1569424 - DNA, 25 bp, Homo sapien
atatacagacatataacccatattg

SEQ ID NO: 1569425 - DNA, 25 bp, Homo sapien
agattcagtgtatctgcacagtaca

SEQ ID NO: 1569426 - DNA, 25 bp, Homo sapien
aaacatatacagacatataacccat

SEQ ID NO: 1569427 - DNA, 25 bp, Homo sapien
ataaacagattcagtgtatctgcac

SEQ ID NO: 1569428 - DNA, 25 bp, Homo sapien
tcgagctatcctcctaccacagact

SEQ ID NO: 1569429 - DNA, 25 bp, Homo sapien
agcagctggccctgcatgcatgtgc

SEQ ID NO: 1569430 - DNA, 25 bp, Homo sapien
ctggccctgcatgcatgtgctaccg

SEQ ID NO: 1569431 - DNA, 25 bp, Homo sapien
cagctggccctgcatgcatgtgcta

SEQ ID NO: 1569432 - DNA, 25 bp, Homo sapien
ttactgaacccacccaactgacgtg

SEQ ID NO: 1569433 - DNA, 25 bp, Homo sapien
tcttggccaggtattgcttaaatct

SEQ ID NO: 1569434 - DNA, 25 bp, Homo sapien
aaagtcctgtgagatctggcgagaa

SEQ ID NO: 1569435 - DNA, 25 bp, Homo sapien
gagtcaagtacacaccacgagagga

SEQ ID NO: 1569436 - DNA, 25 bp, Homo sapien
aaataaataagagacggagacaaag

SEQ ID NO: 1569437 - DNA, 25 bp, Homo sapien
tggtctgccttcctcgatcttccaa

SEQ ID NO: 1569438 - DNA, 25 bp, Homo sapien
ataaataagagacggagacaaagta

SEQ ID NO: 1569439 - DNA, 25 bp, Homo sapien
gccttcctcgatcttccaaagtgat

SEQ ID NO: 1569440 - DNA, 25 bp, Homo sapien
gcatgagcgacatttaaaaggcagc

SEQ ID NO: 1569441 - DNA, 25 bp, Homo sapien
gaacgtgatgcatgagcgacattta

SEQ ID NO: 1569442 - DNA, 25 bp, Homo sapien
gatgcatgagcgacatttaaaaggc

SEQ ID NO: 1569443 - DNA, 25 bp, Homo sapien
ctgcagggaacgtgatgcatgagcg

SEQ ID NO: 1569444 - DNA, 25 bp, Homo sapien
ccaggattccaagtacagtctgcga

SEQ ID NO: 1569445 - DNA, 25 bp, Homo sapien
taagaagatcgttcccatggccaca

SEQ ID NO: 1569446 - DNA, 25 bp, Homo sapien
cacaggctgctacttatcttcagag

SEQ ID NO: 1569447 - DNA, 25 bp, Homo sapien
tgcacccagtgatgtaaaaggacag

SEQ ID NO: 1569448 - DNA, 25 bp, Homo sapien
tcccctgacaactctgtggacacaa

SEQ ID NO: 1569449 - DNA, 25 bp, Homo sapien
tcactccggaaatgcctaaacccaa

SEQ ID NO: 1569450 - DNA, 25 bp, Homo sapien
agaatcactccggaaatgcctaaac

SEQ ID NO: 1569451 - DNA, 25 bp, Homo sapien
gaaatgcctaaacccaaaagctgcc

SEQ ID NO: 1569452 - DNA, 25 bp, Homo sapien
gggcgttccctttaagctctgccca

SEQ ID NO: 1569453 - DNA, 25 bp, Homo sapien
tgggggcgttccctttaagctctgc

SEQ ID NO: 1569454 - DNA, 25 bp, Homo sapien
gccgcgtcagcgactctctggtgtc

SEQ ID NO: 1569455 - DNA, 25 bp, Homo sapien
tgccgcgtcagcgactctctggtgt

SEQ ID NO: 1569456 - DNA, 25 bp, Homo sapien
ggaggatggttttggtagctccgga

SEQ ID NO: 1569457 - DNA, 25 bp, Homo sapien
caggaggatggttttggtagctccg

SEQ ID NO: 1569458 - DNA, 25 bp, Homo sapien
ggatggttttggtagctccggactc

SEQ ID NO: 1569459 - DNA, 25 bp, Homo sapien
aggatggttttggtagctccggact

SEQ ID NO: 1569460 - DNA, 25 bp, Homo sapien
aagagccaaacaaacttgaaaggtg

SEQ ID NO: 1569461 - DNA, 25 bp, Homo sapien
ttgtgttacttatctaagcaaagca

SEQ ID NO: 1569462 - DNA, 25 bp, Homo sapien
gccaaacaaacttgaaaggtgaaga

SEQ ID NO: 1569463 - DNA, 25 bp, Homo sapien
ccagctgactgggattattcaaaag

SEQ ID NO: 1569464 - DNA, 25 bp, Homo sapien
taacagaccctgttggtggatcaga

SEQ ID NO: 1569465 - DNA, 25 bp, Homo sapien
tcaggtgcttgcagattcagcaggc

SEQ ID NO: 1569466 - DNA, 25 bp, Homo sapien
tctagattagcggttcccagcgttt

SEQ ID NO: 1569467 - DNA, 25 bp, Homo sapien
gcagggatgactttagacacacggt

SEQ ID NO: 1569468 - DNA, 25 bp, Homo sapien
caggagcctgctgagactccggagc

SEQ ID NO: 1569469 - DNA, 25 bp, Homo sapien
tgcaggagcctgctgagactccgga

SEQ ID NO: 1569470 - DNA, 25 bp, Homo sapien
ctgcaggagcctgctgagactccgg

SEQ ID NO: 1569471 - DNA, 25 bp, Homo sapien
ggagcctgctgagactccggagcat

SEQ ID NO: 1569472 - DNA, 25 bp, Homo sapien
cagatttctcagcggctgagagggt

SEQ ID NO: 1569473 - DNA, 25 bp, Homo sapien
acagatttctcagcggctgagaggg

SEQ ID NO: 1569474 - DNA, 25 bp, Homo sapien
gacagatttctcagcggctgagagg

SEQ ID NO: 1569475 - DNA, 25 bp, Homo sapien
ggaggcaaatagctcccggctcgag

SEQ ID NO: 1569476 - DNA, 25 bp, Homo sapien
taaaaatcccgcgagcatgaagcac

SEQ ID NO: 1569477 - DNA, 25 bp, Homo sapien
cagagaagcttcgacgcagctggaa

SEQ ID NO: 1569478 - DNA, 25 bp, Homo sapien
tcaggcgcagttgggataagatcca

SEQ ID NO: 1569479 - DNA, 25 bp, Homo sapien
tagggcctccgcgtcccgagtggct

SEQ ID NO: 1569480 - DNA, 25 bp, Homo sapien
tcccgaagcctcaggccgaagcttc

SEQ ID NO: 1569481 - DNA, 25 bp, Homo sapien
gccgctcccgaagcctcaggccgaa

SEQ ID NO: 1569482 - DNA, 25 bp, Homo sapien
gcctcaggccgaagcttcttcattt

SEQ ID NO: 1569483 - DNA, 25 bp, Homo sapien
aagacaggtgacatggtcgcacaca

SEQ ID NO: 1569484 - DNA, 25 bp, Homo sapien
gcattgacctcgcacagaacggagg

SEQ ID NO: 1569485 - DNA, 25 bp, Homo sapien
caaaggcacatttcagagacacgga

SEQ ID NO: 1569486 - DNA, 25 bp, Homo sapien
aattatctcagtcactgggccacgg

SEQ ID NO: 1569487 - DNA, 25 bp, Homo sapien
cattttcacaatagcgtagagcctc

SEQ ID NO: 1569488 - DNA, 25 bp, Homo sapien
caggtaccacatggctggaaggcca

SEQ ID NO: 1569489 - DNA, 25 bp, Homo sapien
tgccatctcgtgacttgtgaagcct

SEQ ID NO: 1569490 - DNA, 25 bp, Homo sapien
tagagcctctcacgtcactttggga

SEQ ID NO: 1569491 - DNA, 25 bp, Homo sapien
taggacatataacacttcttcttcc

SEQ ID NO: 1569492 - DNA, 25 bp, Homo sapien
ttcttcctcctccgggatgcttttc

SEQ ID NO: 1569493 - DNA, 25 bp, Homo sapien
tttaggacatataacacttcttctt

SEQ ID NO: 1569494 - DNA, 25 bp, Homo sapien
ccgggatgcttttcctgaaggccag

SEQ ID NO: 1569495 - DNA, 25 bp, Homo sapien
tgaggcgggcagataacttgaaatc

SEQ ID NO: 1569496 - DNA, 25 bp, Homo sapien
aaaattgggacaaaggcagggcatg

SEQ ID NO: 1569497 - DNA, 25 bp, Homo sapien
gctgcaacccaggacgcagaggttc

SEQ ID NO: 1569498 - DNA, 25 bp, Homo sapien
gagaatcgctgcaacccaggacgca

SEQ ID NO: 1569499 - DNA, 25 bp, Homo sapien
tgataagtaccagtaggtcaaggaa

SEQ ID NO: 1569500 - DNA, 25 bp, Homo sapien
caatatgggaagattaatgaaacta

SEQ ID NO: 1569501 - DNA, 25 bp, Homo sapien
gaacaaatgacactcatagtaatga

SEQ ID NO: 1569502 - DNA, 25 bp, Homo sapien
caaacattacttctcaaggaactcg

SEQ ID NO: 1569503 - DNA, 25 bp, Homo sapien
gatgtaatccactgacgttacccag

SEQ ID NO: 1569504 - DNA, 25 bp, Homo sapien
taaaattgagagatcttgtgtacct

SEQ ID NO: 1569505 - DNA, 25 bp, Homo sapien
cctggttacctcagctggtgattgt

SEQ ID NO: 1569506 - DNA, 25 bp, Homo sapien
tagtatataataccacaaccagaag

SEQ ID NO: 1569507 - DNA, 25 bp, Homo sapien
ccggagctgctattcggtgtccctt

SEQ ID NO: 1569508 - DNA, 25 bp, Homo sapien
gctgccggagctgctattcggtgtc

SEQ ID NO: 1569509 - DNA, 25 bp, Homo sapien
tgccggagctgctattcggtgtccc

SEQ ID NO: 1569510 - DNA, 25 bp, Homo sapien
ggagctgctattcggtgtcccttgc

SEQ ID NO: 1569511 - DNA, 25 bp, Homo sapien
cacccgtgtcacagttacggggaca

SEQ ID NO: 1569512 - DNA, 25 bp, Homo sapien
gcggactggcggagatgcagcggct

SEQ ID NO: 1569513 - DNA, 25 bp, Homo sapien
cacgcaagtgcgtcacacactcggt

SEQ ID NO: 1569514 - DNA, 25 bp, Homo sapien
gtcactggtgcaaacgcgcacccag

SEQ ID NO: 1569515 - DNA, 25 bp, Homo sapien
acaggcacgggctgcgttgacccaa

SEQ ID NO: 1569516 - DNA, 25 bp, Homo sapien
agcacccccggtcaccagttatggg

SEQ ID NO: 1569517 - DNA, 25 bp, Homo sapien
gggctgcgttgacccaaagcctctg

SEQ ID NO: 1569518 - DNA, 25 bp, Homo sapien
ggacgcaccgccgaggttcacaggc

SEQ ID NO: 1569519 - DNA, 25 bp, Homo sapien
aatttccaggcgaggctcaggcgct

SEQ ID NO: 1569520 - DNA, 25 bp, Homo sapien
gagctacaagttgcactgtcacaca

SEQ ID NO: 1569521 - DNA, 25 bp, Homo sapien
acagctcactctgtcctgagacaca

SEQ ID NO: 1569522 - DNA, 25 bp, Homo sapien
gcagcagagacgctggagctacaag

SEQ ID NO: 1569523 - DNA, 25 bp, Homo sapien
cctgaagagcacgctgtggcgattg

SEQ ID NO: 1569524 - DNA, 25 bp, Homo sapien
acgctgtggcgattgagatgatgac

SEQ ID NO: 1569525 - DNA, 25 bp, Homo sapien
gattgagatgatgacgcgtggagct

SEQ ID NO: 1569526 - DNA, 25 bp, Homo sapien
aagagcacgctgtggcgattgagat

SEQ ID NO: 1569527 - DNA, 25 bp, Homo sapien
cctcctcggggatgctttttctgaa

SEQ ID NO: 1569528 - DNA, 25 bp, Homo sapien
ctcctcggggatgctttttctgaag

SEQ ID NO: 1569529 - DNA, 25 bp, Homo sapien
agatgtttaacgattcgtcttcctc

SEQ ID NO: 1569530 - DNA, 25 bp, Homo sapien
gatgtttaacgattcgtcttcctcc

SEQ ID NO: 1569531 - DNA, 25 bp, Homo sapien
ttggtcttaagtcttataaacacat

SEQ ID NO: 1569532 - DNA, 25 bp, Homo sapien
tggtcttaagtcttataaacacata

SEQ ID NO: 1569533 - DNA, 25 bp, Homo sapien
tttggtcttaagtcttataaacaca

SEQ ID NO: 1569534 - DNA, 25 bp, Homo sapien
tcttggtcatctacctttaatgttt

SEQ ID NO: 1569535 - DNA, 25 bp, Homo sapien
tcactgtgcactcccactcaggggt

SEQ ID NO: 1569536 - DNA, 25 bp, Homo sapien
ttatgcgtgttaatgcatttcaccc

SEQ ID NO: 1569537 - DNA, 25 bp, Homo sapien
gtgcgcgtctatgggttttatgcgt

SEQ ID NO: 1569538 - DNA, 25 bp, Homo sapien
ggctcaaaaagctaagaggcagaaa

SEQ ID NO: 1569539 - DNA, 25 bp, Homo sapien
atagtgcgggcccttaacaaacatc

SEQ ID NO: 1569540 - DNA, 25 bp, Homo sapien
gttagtcacgctctcattccaagta

SEQ ID NO: 1569541 - DNA, 25 bp, Homo sapien
tgttcggtgccccttgcttgctgga

SEQ ID NO: 1569542 - DNA, 25 bp, Homo sapien
caagtactaacgtcacagggtgtgg

SEQ ID NO: 1569543 - DNA, 25 bp, Homo sapien
tgcattagcaaataccctccagggc

SEQ ID NO: 1569544 - DNA, 25 bp, Homo sapien
tccatgagtggatgtgactggcgct

SEQ ID NO: 1569545 - DNA, 25 bp, Homo sapien
gattctagaacacgtgatgctcccg

SEQ ID NO: 1569546 - DNA, 25 bp, Homo sapien
caatccgaatggagaggacactggc

SEQ ID NO: 1569547 - DNA, 25 bp, Homo sapien
tgaaatagctgatgccaagcagtct

SEQ ID NO: 1569548 - DNA, 25 bp, Homo sapien
tgcaacctgctgtattgacatgctg

SEQ ID NO: 1569549 - DNA, 25 bp, Homo sapien
cctgggaggacggatttcattttca

SEQ ID NO: 1569550 - DNA, 25 bp, Homo sapien
cacacacaatggaagaacagagctc

SEQ ID NO: 1569551 - DNA, 25 bp, Homo sapien
tttgtaaggcaacaggcgtcagtga

SEQ ID NO: 1569552 - DNA, 25 bp, Homo sapien
tgttccctctcacaagcgagtaggg

SEQ ID NO: 1569553 - DNA, 25 bp, Homo sapien
tatcaaaatcctcgaatgcttcaga

SEQ ID NO: 1569554 - DNA, 25 bp, Homo sapien
gccaaactgggaacattagcaagag

SEQ ID NO: 1569555 - DNA, 25 bp, Homo sapien
cagttacgggagatagagccgccgc

SEQ ID NO: 1569556 - DNA, 25 bp, Homo sapien
gagacacagcggttgcgtcaccggt

SEQ ID NO: 1569557 - DNA, 25 bp, Homo sapien
gtgcagaagcgcaccgagcacggcc

SEQ ID NO: 1569558 - DNA, 25 bp, Homo sapien
cacgcaagtgcgtcacacagtcggt

SEQ ID NO: 1569559 - DNA, 25 bp, Homo sapien
cacagaacagagtcccggggacgca

SEQ ID NO: 1569560 - DNA, 25 bp, Homo sapien
ctcacagaacagagtcccggggacg

SEQ ID NO: 1569561 - DNA, 25 bp, Homo sapien
tcacagaacagagtcccggggacgc

SEQ ID NO: 1569562 - DNA, 25 bp, Homo sapien
agtgcaaaggcacatccgtgggcca

SEQ ID NO: 1569563 - DNA, 25 bp, Homo sapien
gcccccacatatcccccagagcgca

SEQ ID NO: 1569564 - DNA, 25 bp, Homo sapien
cgtgggccacggagacccgtcctga

SEQ ID NO: 1569565 - DNA, 25 bp, Homo sapien
acggagacccgtcctgatcgccgcc

SEQ ID NO: 1569566 - DNA, 25 bp, Homo sapien
gcacacactggcctgagacacatct

SEQ ID NO: 1569567 - DNA, 25 bp, Homo sapien
cacagcacacactggcctgagacac

SEQ ID NO: 1569568 - DNA, 25 bp, Homo sapien
acactggcctgagacacatctgcgc

SEQ ID NO: 1569569 - DNA, 25 bp, Homo sapien
tgagacacatctgcgcccctcatac

SEQ ID NO: 1569570 - DNA, 25 bp, Homo sapien
ctcagcacagagacgctggaactac

SEQ ID NO: 1569571 - DNA, 25 bp, Homo sapien
tctcagcacagagacgctggaacta

SEQ ID NO: 1569572 - DNA, 25 bp, Homo sapien
ctcaggcaggtaccgcttggttagg

SEQ ID NO: 1569573 - DNA, 25 bp, Homo sapien
ggcccttgttctcaggcaggtaccg

SEQ ID NO: 1569574 - DNA, 25 bp, Homo sapien
cgcggcccttgttctcaggcaggta

SEQ ID NO: 1569575 - DNA, 25 bp, Homo sapien
cttgttctcaggcaggtaccgcttg

SEQ ID NO: 1569576 - DNA, 25 bp, Homo sapien
taactgagatgatgaagcgtggagc

SEQ ID NO: 1569577 - DNA, 25 bp, Homo sapien
gaagagcacgctgtggtaactgaga

SEQ ID NO: 1569578 - DNA, 25 bp, Homo sapien
tgtctcccacatcagggacgtgtcc

SEQ ID NO: 1569579 - DNA, 25 bp, Homo sapien
tcctgtcactcaggcgccctgagtg

SEQ ID NO: 1569580 - DNA, 25 bp, Homo sapien
cctcctcggggatgctttttctgaa

SEQ ID NO: 1569581 - DNA, 25 bp, Homo sapien
ctcctcggggatgctttttctgaag

SEQ ID NO: 1569582 - DNA, 25 bp, Homo sapien
agatgtttaacgattcgtcttcctc

SEQ ID NO: 1569583 - DNA, 25 bp, Homo sapien
gatgtttaacgattcgtcttcctcc

SEQ ID NO: 1569584 - DNA, 25 bp, Homo sapien
atgtgtctctatatgtaggtatgta

SEQ ID NO: 1569585 - DNA, 25 bp, Homo sapien
tatgtgtctctatatgtaggtatgt

SEQ ID NO: 1569586 - DNA, 25 bp, Homo sapien
tgtctatctgtgggtgtgtatatgt

SEQ ID NO: 1569587 - DNA, 25 bp, Homo sapien
tgtgtctatctgtgggtgtgtatat

SEQ ID NO: 1569588 - DNA, 25 bp, Homo sapien
gtgtctatctgtgggtgtgtatatg

SEQ ID NO: 1569589 - DNA, 25 bp, Homo sapien
tttagcccggtgagacccacttcag

SEQ ID NO: 1569590 - DNA, 25 bp, Homo sapien
tgggcggcgtctagaagccagcaaa

SEQ ID NO: 1569591 - DNA, 25 bp, Homo sapien
ggacacagaatatctcctacagcct

SEQ ID NO: 1569592 - DNA, 25 bp, Homo sapien
tggtgtgacggaaaaaggacttgtc

SEQ ID NO: 1569593 - DNA, 25 bp, Homo sapien
ggcctgcctctcaaatgtgtgtatg

SEQ ID NO: 1569594 - DNA, 25 bp, Homo sapien
ttactgagatagtcccaaattaaaa

SEQ ID NO: 1569595 - DNA, 25 bp, Homo sapien
caaacatagttatgggggagcaggc

SEQ ID NO: 1569596 - DNA, 25 bp, Homo sapien
gagcaggcacactgtagtcattaag

SEQ ID NO: 1569597 - DNA, 25 bp, Homo sapien
ctcacagtgtcggtttcctcactgg

SEQ ID NO: 1569598 - DNA, 25 bp, Homo sapien
agtgtcggtttcctcactggtaaag

SEQ ID NO: 1569599 - DNA, 25 bp, Homo sapien
cacagtgtcggtttcctcactggta

SEQ ID NO: 1569600 - DNA, 25 bp, Homo sapien
cagtgtcggtttcctcactggtaaa

SEQ ID NO: 1569601 - DNA, 25 bp, Homo sapien
aaattatgtatagtccgggcacagt

SEQ ID NO: 1569602 - DNA, 25 bp, Homo sapien
gctgaaattaaggacacaggcttgg

SEQ ID NO: 1569603 - DNA, 25 bp, Homo sapien
ggacaataacaacccatggatctta

SEQ ID NO: 1569604 - DNA, 25 bp, Homo sapien
aaaggtacgtataatctggacagag

SEQ ID NO: 1569605 - DNA, 25 bp, Homo sapien
aagattcagattgtgcgaggcagtg

SEQ ID NO: 1569606 - DNA, 25 bp, Homo sapien
tgcatgaaccctgatcaaaaccttg

SEQ ID NO: 1569607 - DNA, 25 bp, Homo sapien
taaatcggtcacgagtaggtctaga

SEQ ID NO: 1569608 - DNA, 25 bp, Homo sapien
catccggtgtgatgcccctgggaga

SEQ ID NO: 1569609 - DNA, 25 bp, Homo sapien
ttgaggaatccccaccaagcttgca

SEQ ID NO: 1569610 - DNA, 25 bp, Homo sapien
tatgcagaccatacccatgagcctc

SEQ ID NO: 1569611 - DNA, 25 bp, Homo sapien
taggatcagacagtgggtgctcaga

SEQ ID NO: 1569612 - DNA, 25 bp, Homo sapien
tagtgaactgttgaacctgagggcg

SEQ ID NO: 1569613 - DNA, 25 bp, Homo sapien
gcgatagttggtgcctgttgtcaca

SEQ ID NO: 1569614 - DNA, 25 bp, Homo sapien
cacgcagtatcagctgacctggaca

SEQ ID NO: 1569615 - DNA, 25 bp, Homo sapien
ggtaggagcttttggtcacgcagta

SEQ ID NO: 1569616 - DNA, 25 bp, Homo sapien
tcatgtctacatgctgaggccccaa

SEQ ID NO: 1569617 - DNA, 25 bp, Homo sapien
gggtccccatagtgatgtaatatga

SEQ ID NO: 1569618 - DNA, 25 bp, Homo sapien
acacaaacacataaccgtgacatat

SEQ ID NO: 1569619 - DNA, 25 bp, Homo sapien
gtaatatgaccttttggctcctctg

SEQ ID NO: 1569620 - DNA, 25 bp, Homo sapien
gagattaaaacgaggtgcatctggg

SEQ ID NO: 1569621 - DNA, 25 bp, Homo sapien
aagaagacaaattccgagaggctag

SEQ ID NO: 1569622 - DNA, 25 bp, Homo sapien
tttagaactgaagaactgatcagtc

SEQ ID NO: 1569623 - DNA, 25 bp, Homo sapien
actgatcagtcttctcggggtttcc

SEQ ID NO: 1569624 - DNA, 25 bp, Homo sapien
tcggggtttccactgaagaagacaa

SEQ ID NO: 1569625 - DNA, 25 bp, Homo sapien
aaacagaaacccacacgtgcatgat

SEQ ID NO: 1569626 - DNA, 25 bp, Homo sapien
cccacacgtgcatgatgaaatgaaa

SEQ ID NO: 1569627 - DNA, 25 bp, Homo sapien
cacgtgcatgatgaaatgaaaggaa

SEQ ID NO: 1569628 - DNA, 25 bp, Homo sapien
gaaacccacacgtgcatgatgaaat

SEQ ID NO: 1569629 - DNA, 25 bp, Homo sapien
gcagagttcagacaggcccactcct

SEQ ID NO: 1569630 - DNA, 25 bp, Homo sapien
aaaagtctatggctacgtcggcgaa

SEQ ID NO: 1569631 - DNA, 25 bp, Homo sapien
gctacgtcggcgaacgtcaccaaac

SEQ ID NO: 1569632 - DNA, 25 bp, Homo sapien
cctgagaaaagtctatggctacgtc

SEQ ID NO: 1569633 - DNA, 25 bp, Homo sapien
agagcggatattccaggaggcagtc

SEQ ID NO: 1569634 - DNA, 25 bp, Homo sapien
taagttatctgaggcgtgcaactca

SEQ ID NO: 1569635 - DNA, 25 bp, Homo sapien
ctgaaattcacaggggagagcggat

SEQ ID NO: 1569636 - DNA, 25 bp, Homo sapien
ttccaggaggcagtctaagttatct

SEQ ID NO: 1569637 - DNA, 25 bp, Homo sapien
tcaactagtttcttgaaaggcggtc

SEQ ID NO: 1569638 - DNA, 25 bp, Homo sapien
gaagaaattcaactagtttcttgaa

SEQ ID NO: 1569639 - DNA, 25 bp, Homo sapien
tcaataaggctcaatacattccttg

SEQ ID NO: 1569640 - DNA, 25 bp, Homo sapien
caataaggctcaatacattccttgg

SEQ ID NO: 1569641 - DNA, 25 bp, Homo sapien
cattaaggaagtgagatgattacgg

SEQ ID NO: 1569642 - DNA, 25 bp, Homo sapien
ttccacggacattaaggaagtgaga

SEQ ID NO: 1569643 - DNA, 25 bp, Homo sapien
aaggtgggaaggtaaccgatggatg

SEQ ID NO: 1569644 - DNA, 25 bp, Homo sapien
cacggacattaaggaagtgagatga

SEQ ID NO: 1569645 - DNA, 25 bp, Homo sapien
ctggagcgctgtggtctttcaagcg

SEQ ID NO: 1569646 - DNA, 25 bp, Homo sapien
ttggaagcccttatttcatgaatgt

SEQ ID NO: 1569647 - DNA, 25 bp, Homo sapien
ggtaaactcttattttcatatgctg

SEQ ID NO: 1569648 - DNA, 25 bp, Homo sapien
tcacatatccagttacggccaaggg

SEQ ID NO: 1569649 - DNA, 25 bp, Homo sapien
gctgaatgaggcttgaaccacaaat

SEQ ID NO: 1569650 - DNA, 25 bp, Homo sapien
taacgaggcttgagccccatcgaaa

SEQ ID NO: 1569651 - DNA, 25 bp, Homo sapien
agtgagctcatcaccacgccgaaag

SEQ ID NO: 1569652 - DNA, 25 bp, Homo sapien
agctgattgccccaacggaaggcct

SEQ ID NO: 1569653 - DNA, 25 bp, Homo sapien
tgatgttgtgtaagctgatggccgt

SEQ ID NO: 1569654 - DNA, 25 bp, Homo sapien
tgatggccgtgactaaagctcttcc

SEQ ID NO: 1569655 - DNA, 25 bp, Homo sapien
gtaattgactcgagtaaaggccttc

SEQ ID NO: 1569656 - DNA, 25 bp, Homo sapien
tctcatgtttcacgaggctcgatcc

SEQ ID NO: 1569657 - DNA, 25 bp, Homo sapien
cttacattcgtaggatttcgcccca

SEQ ID NO: 1569658 - DNA, 25 bp, Homo sapien
ttcgtaggatttcgccccactgtgc

SEQ ID NO: 1569659 - DNA, 25 bp, Homo sapien
tacattcgtaggatttcgccccact

SEQ ID NO: 1569660 - DNA, 25 bp, Homo sapien
aggatttcgccccactgtgcgtttt

SEQ ID NO: 1569661 - DNA, 25 bp, Homo sapien
ctctgatgttctcggagatggttta

SEQ ID NO: 1569662 - DNA, 25 bp, Homo sapien
taggtggttacatgccttcccgcac

SEQ ID NO: 1569663 - DNA, 25 bp, Homo sapien
tctcggagatggtttaggtggttac

SEQ ID NO: 1569664 - DNA, 25 bp, Homo sapien
tggtttaggtggttacatgccttcc

SEQ ID NO: 1569665 - DNA, 25 bp, Homo sapien
gatacgagcgggctactgcgttcaa

SEQ ID NO: 1569666 - DNA, 25 bp, Homo sapien
gaaaccatagatacgagcgggctac

SEQ ID NO: 1569667 - DNA, 25 bp, Homo sapien
cgggctactgcgttcaaaaggctct

SEQ ID NO: 1569668 - DNA, 25 bp, Homo sapien
ctgtggaaagcgaaaccatagatac

SEQ ID NO: 1569669 - DNA, 25 bp, Homo sapien
gatgccacggagtaaagacagaatg

SEQ ID NO: 1569670 - DNA, 25 bp, Homo sapien
tacgtttgaagacccgcagtggaca

SEQ ID NO: 1569671 - DNA, 25 bp, Homo sapien
aatggatgtagtctagaggccttcc

SEQ ID NO: 1569672 - DNA, 25 bp, Homo sapien
tttggcccagtgtctcacagggagg

SEQ ID NO: 1569673 - DNA, 25 bp, Homo sapien
tgtggtgagacatctgaaatcagcc

SEQ ID NO: 1569674 - DNA, 25 bp, Homo sapien
taagaaatcattgcgtaacccacgg

SEQ ID NO: 1569675 - DNA, 25 bp, Homo sapien
tcaggtgtaccttagagcaaacatc

SEQ ID NO: 1569676 - DNA, 25 bp, Homo sapien
cagactcattgcacccacagggagt

SEQ ID NO: 1569677 - DNA, 25 bp, Homo sapien
agagccaacacctggcggttcaacc

SEQ ID NO: 1569678 - DNA, 25 bp, Homo sapien
ccataataatattgtccacttactc

SEQ ID NO: 1569679 - DNA, 25 bp, Homo sapien
ctggcggttcaaccgtaacatcata

SEQ ID NO: 1569680 - DNA, 25 bp, Homo sapien
ataatattgtccacttactctgtag

SEQ ID NO: 1569681 - DNA, 25 bp, Homo sapien
tccattttcaacctagaccatttcc

SEQ ID NO: 1569682 - DNA, 25 bp, Homo sapien
gcctccaatatgatccctcggtcct

SEQ ID NO: 1569683 - DNA, 25 bp, Homo sapien
ctccaatatgatccctcggtcctcc

SEQ ID NO: 1569684 - DNA, 25 bp, Homo sapien
tatctgcctccaatatgatccctcg

SEQ ID NO: 1569685 - DNA, 25 bp, Homo sapien
tctgcctccaatatgatccctcggt

SEQ ID NO: 1569686 - DNA, 25 bp, Homo sapien
tacgaagatcctctgagcctggcat

SEQ ID NO: 1569687 - DNA, 25 bp, Homo sapien
ctttacgaagatcctctgagcctgg

SEQ ID NO: 1569688 - DNA, 25 bp, Homo sapien
tttacgaagatcctctgagcctggc

SEQ ID NO: 1569689 - DNA, 25 bp, Homo sapien
ttacgaagatcctctgagcctggca

SEQ ID NO: 1569690 - DNA, 25 bp, Homo sapien
gttcgtttcctgtgtgaatgcatct

SEQ ID NO: 1569691 - DNA, 25 bp, Homo sapien
ctgtgtgaatgcatctggtccttgc

SEQ ID NO: 1569692 - DNA, 25 bp, Homo sapien
ggttcgtttcctgtgtgaatgcatc

SEQ ID NO: 1569693 - DNA, 25 bp, Homo sapien
ttcctgtgtgaatgcatctggtcct

SEQ ID NO: 1569694 - DNA, 25 bp, Homo sapien
tgggtatgggttctcattgaacaag

SEQ ID NO: 1569695 - DNA, 25 bp, Homo sapien
gatgttcagatcttccagttgcttc

SEQ ID NO: 1569696 - DNA, 25 bp, Homo sapien
ggtgtatgtctattttcgaggccat

SEQ ID NO: 1569697 - DNA, 25 bp, Homo sapien
tgaacaagatgttcagatcttccag

SEQ ID NO: 1569698 - DNA, 25 bp, Homo sapien
gatcgggtgagcagcgttgggcaat

SEQ ID NO: 1569699 - DNA, 25 bp, Homo sapien
gggactcgatgacccgtgtacacca

SEQ ID NO: 1569700 - DNA, 25 bp, Homo sapien
tatgcttgcatttcgctttcttgag

SEQ ID NO: 1569701 - DNA, 25 bp, Homo sapien
agaccccaccctctggtattggcgg

SEQ ID NO: 1569702 - DNA, 25 bp, Homo sapien
aatggactattctgtggccaatgaa

SEQ ID NO: 1569703 - DNA, 25 bp, Homo sapien
gtatatattaggatctcggcagcag

SEQ ID NO: 1569704 - DNA, 25 bp, Homo sapien
tatattaggatctcggcagcagcca

SEQ ID NO: 1569705 - DNA, 25 bp, Homo sapien
tggggtagaggcagtatatattagg

SEQ ID NO: 1569706 - DNA, 25 bp, Homo sapien
catctctctcgactttggttagatg

SEQ ID NO: 1569707 - DNA, 25 bp, Homo sapien
tctctctcgactttggttagatgaa

SEQ ID NO: 1569708 - DNA, 25 bp, Homo sapien
ctcgactttggttagatgaacaggc

SEQ ID NO: 1569709 - DNA, 25 bp, Homo sapien
tctctcgactttggttagatgaaca

SEQ ID NO: 1569710 - DNA, 25 bp, Homo sapien
tagtcagccgtcctatagataagat

SEQ ID NO: 1569711 - DNA, 25 bp, Homo sapien
tatggctaagcaatggctgccgccc

SEQ ID NO: 1569712 - DNA, 25 bp, Homo sapien
ggtttgtcctctttctagtcagccg

SEQ ID NO: 1569713 - DNA, 25 bp, Homo sapien
tactcagtcatagaagctgccgctg

SEQ ID NO: 1569714 - DNA, 25 bp, Homo sapien
cgatgggcgtccatagacaaggcag

SEQ ID NO: 1569715 - DNA, 25 bp, Homo sapien
cttggatgctgaatttaccctggta

SEQ ID NO: 1569716 - DNA, 25 bp, Homo sapien
gtggtatcacccgatgggcgtccat

SEQ ID NO: 1569717 - DNA, 25 bp, Homo sapien
ctgtaggatcaaaggtgtttgtggt

SEQ ID NO: 1569718 - DNA, 25 bp, Homo sapien
catactgaatgttaattatcgtagc

SEQ ID NO: 1569719 - DNA, 25 bp, Homo sapien
tcgtagctagttttaggtcaaagtg

SEQ ID NO: 1569720 - DNA, 25 bp, Homo sapien
taattatcgtagctagttttaggtc

SEQ ID NO: 1569721 - DNA, 25 bp, Homo sapien
ttaggtaatgagtcatactgaatgt

SEQ ID NO: 1569722 - DNA, 25 bp, Homo sapien
atgagcagccccgttccaggcaggc

SEQ ID NO: 1569723 - DNA, 25 bp, Homo sapien
tgcatgagcagccccgttccaggca

SEQ ID NO: 1569724 - DNA, 25 bp, Homo sapien
gggatgcatgagcagccccgttcca

SEQ ID NO: 1569725 - DNA, 25 bp, Homo sapien
gatgcatgagcagccccgttccagg

SEQ ID NO: 1569726 - DNA, 25 bp, Homo sapien
ggtccagggcgtggcggcgtcaggg

SEQ ID NO: 1569727 - DNA, 25 bp, Homo sapien
ggtcaggcgagagggcgtggagtgc

SEQ ID NO: 1569728 - DNA, 25 bp, Homo sapien
agccggcgcgcagctctagagacct

SEQ ID NO: 1569729 - DNA, 25 bp, Homo sapien
tggagacgccggcagcggaaacagg

SEQ ID NO: 1569730 - DNA, 25 bp, Homo sapien
tgagtaagccgggaatggaaccctg

SEQ ID NO: 1569731 - DNA, 25 bp, Homo sapien
tgggcacgcatttcatccgaaggta

SEQ ID NO: 1569732 - DNA, 25 bp, Homo sapien
cctggcctgccgttgtgaaaagaga

SEQ ID NO: 1569733 - DNA, 25 bp, Homo sapien
tcatggcgccaaagcaaaatacgtg

SEQ ID NO: 1569734 - DNA, 25 bp, Homo sapien
tgcgaggcccctttaacaagatgga

SEQ ID NO: 1569735 - DNA, 25 bp, Homo sapien
cactcatgaggagaatccggtggtc

SEQ ID NO: 1569736 - DNA, 25 bp, Homo sapien
tccggtggtctggagatggaagttt

SEQ ID NO: 1569737 - DNA, 25 bp, Homo sapien
aatgtccacccagggcactcatgag

SEQ ID NO: 1569738 - DNA, 25 bp, Homo sapien
gccactgatggcacgatgaacggtg

SEQ ID NO: 1569739 - DNA, 25 bp, Homo sapien
tgaacggtgcatgccagcactgact

SEQ ID NO: 1569740 - DNA, 25 bp, Homo sapien
tgaactgggttacctcggtgactgt

SEQ ID NO: 1569741 - DNA, 25 bp, Homo sapien
tgtgagccatgcattgccagatctc

SEQ ID NO: 1569742 - DNA, 25 bp, Homo sapien
ctccttttctaatgatagggtggaa

SEQ ID NO: 1569743 - DNA, 25 bp, Homo sapien
ttttctaatgatagggtggaatggc

SEQ ID NO: 1569744 - DNA, 25 bp, Homo sapien
ccttttctaatgatagggtggaatg

SEQ ID NO: 1569745 - DNA, 25 bp, Homo sapien
actccttttctaatgatagggtgga

SEQ ID NO: 1569746 - DNA, 25 bp, Homo sapien
taagacggcatcgaaacctagaaag

SEQ ID NO: 1569747 - DNA, 25 bp, Homo sapien
tcttgacagccagagactcccgttt

SEQ ID NO: 1569748 - DNA, 25 bp, Homo sapien
tggtgaccagtgactctaagacggc

SEQ ID NO: 1569749 - DNA, 25 bp, Homo sapien
gaagaagcgatgtgattcctcccag

SEQ ID NO: 1569750 - DNA, 25 bp, Homo sapien
ctctggagacgaaggtggatcactt

SEQ ID NO: 1569751 - DNA, 25 bp, Homo sapien
agctactctggagacgaaggtggat

SEQ ID NO: 1569752 - DNA, 25 bp, Homo sapien
tactctggagacgaaggtggatcac

SEQ ID NO: 1569753 - DNA, 25 bp, Homo sapien
ctactctggagacgaaggtggatca

SEQ ID NO: 1569754 - DNA, 25 bp, Homo sapien
ctgcagtggctcctggagccccccg

SEQ ID NO: 1569755 - DNA, 25 bp, Homo sapien
tgcagtggctcctggagccccccgc

SEQ ID NO: 1569756 - DNA, 25 bp, Homo sapien
gcagtggctcctggagccccccgcc

SEQ ID NO: 1569757 - DNA, 25 bp, Homo sapien
cagtggctcctggagccccccgccc

SEQ ID NO: 1569758 - DNA, 25 bp, Homo sapien
gcttctggttcaacaaggacctaac

SEQ ID NO: 1569759 - DNA, 25 bp, Homo sapien
ggccagttgcttctggttcaacaag

SEQ ID NO: 1569760 - DNA, 25 bp, Homo sapien
attttctactggtccgaaagttgca

SEQ ID NO: 1569761 - DNA, 25 bp, Homo sapien
tgcatctgtacgactggccagttgc

SEQ ID NO: 1569762 - DNA, 25 bp, Homo sapien
aagaaggagtgattggcagcaaact

SEQ ID NO: 1569763 - DNA, 25 bp, Homo sapien
gcagcaaactgatgcttcaatgcca

SEQ ID NO: 1569764 - DNA, 25 bp, Homo sapien
ctgtgaaagaatccaagtgtacatt

SEQ ID NO: 1569765 - DNA, 25 bp, Homo sapien
aaagaatccaagtgtacatttccac

SEQ ID NO: 1569766 - DNA, 25 bp, Homo sapien
tatggattatgcagacgcccagcca

SEQ ID NO: 1569767 - DNA, 25 bp, Homo sapien
tccagaaaccaaatgaagtggccct

SEQ ID NO: 1569768 - DNA, 25 bp, Homo sapien
aatgtccccagagaatgatgcctgc

SEQ ID NO: 1569769 - DNA, 25 bp, Homo sapien
ccaagggaagtgactctcagggatt

SEQ ID NO: 1569770 - DNA, 25 bp, Homo sapien
ggcatgggccaagactgcaacactg

SEQ ID NO: 1569771 - DNA, 25 bp, Homo sapien
gggcatgggccaagactgcaacact

SEQ ID NO: 1569772 - DNA, 25 bp, Homo sapien
catgggccaagactgcaacactgca

SEQ ID NO: 1569773 - DNA, 25 bp, Homo sapien
tggggcatgggccaagactgcaaca

SEQ ID NO: 1569774 - DNA, 25 bp, Homo sapien
ttttgtggagaacagggtctcactg

SEQ ID NO: 1569775 - DNA, 25 bp, Homo sapien
ctgtagtgcagggccgtgatctcag

SEQ ID NO: 1569776 - DNA, 25 bp, Homo sapien
aagctctgcctccaggtttccagca

SEQ ID NO: 1569777 - DNA, 25 bp, Homo sapien
gtctcagcctctggggtacctggga

SEQ ID NO: 1569778 - DNA, 25 bp, Homo sapien
gtgtatgggctcacttaaggtcagg

SEQ ID NO: 1569779 - DNA, 25 bp, Homo sapien
tctcaaatagtcaaagacagaaaaa

SEQ ID NO: 1569780 - DNA, 25 bp, Homo sapien
actaatgtactccatctcgggtgac

SEQ ID NO: 1569781 - DNA, 25 bp, Homo sapien
aggtctcgctctcttcttgattgtg

SEQ ID NO: 1569782 - DNA, 25 bp, Homo sapien
cccaaattcataatgggtcccatat

SEQ ID NO: 1569783 - DNA, 25 bp, Homo sapien
tatgctcacataaagcataattccc

SEQ ID NO: 1569784 - DNA, 25 bp, Homo sapien
gaggtcaggattcaagaatggcctg

SEQ ID NO: 1569785 - DNA, 25 bp, Homo sapien
ggaggcctacgtcggcaaatcacct

SEQ ID NO: 1569786 - DNA, 25 bp, Homo sapien
gaaaacagcaatgaacttagagcca

SEQ ID NO: 1569787 - DNA, 25 bp, Homo sapien
tctttgactaggttaaaatggacac

SEQ ID NO: 1569788 - DNA, 25 bp, Homo sapien
tgggagcatccaacatcgagtctac

SEQ ID NO: 1569789 - DNA, 25 bp, Homo sapien
tacctccagatggtcacatcatgag

SEQ ID NO: 1569790 - DNA, 25 bp, Homo sapien
ccaatgggagcatccaaaatggaat

SEQ ID NO: 1569791 - DNA, 25 bp, Homo sapien
gtcccaatgggagcatccaaaatgg

SEQ ID NO: 1569792 - DNA, 25 bp, Homo sapien
tgttcacttgagttccagcacaggg

SEQ ID NO: 1569793 - DNA, 25 bp, Homo sapien
aagtgttcacttgagttccagcaca

SEQ ID NO: 1569794 - DNA, 25 bp, Homo sapien
gcctgagatattcttgctcggtgca

SEQ ID NO: 1569795 - DNA, 25 bp, Homo sapien
cagcctgagatattcttgctcggtg

SEQ ID NO: 1569796 - DNA, 25 bp, Homo sapien
cctgagatattcttgctcggtgcat

SEQ ID NO: 1569797 - DNA, 25 bp, Homo sapien
agcctgagatattcttgctcggtgc

SEQ ID NO: 1569798 - DNA, 25 bp, Homo sapien
gatcagcgtcaacttcaatgctgct

SEQ ID NO: 1569799 - DNA, 25 bp, Homo sapien
catcatccacgtctgaccataagca

SEQ ID NO: 1569800 - DNA, 25 bp, Homo sapien
caagatcagcgtcaacttcaatgct

SEQ ID NO: 1569801 - DNA, 25 bp, Homo sapien
ccacgtctgaccataagcatgctct

SEQ ID NO: 1569802 - DNA, 25 bp, Homo sapien
caactctacgatgttgaattgtcaa

SEQ ID NO: 1569803 - DNA, 25 bp, Homo sapien
gggagcacccaaaatcaactctacg

SEQ ID NO: 1569804 - DNA, 25 bp, Homo sapien
aggaaaaagcaatgcctgctacaca

SEQ ID NO: 1569805 - DNA, 25 bp, Homo sapien
gaacctaaatcacaagtaccgatgg

SEQ ID NO: 1569806 - DNA, 25 bp, Homo sapien
tgggtcatcaggacaaggcggctca

SEQ ID NO: 1569807 - DNA, 25 bp, Homo sapien
tgatcagcacatggtatagcctgga

SEQ ID NO: 1569808 - DNA, 25 bp, Homo sapien
gaaagcgcttccctgtagagggaca

SEQ ID NO: 1569809 - DNA, 25 bp, Homo sapien
tatttgcacaagaggattaggctgg

SEQ ID NO: 1569810 - DNA, 25 bp, Homo sapien
cggcccgcagacagccggcacgcgc

SEQ ID NO: 1569811 - DNA, 25 bp, Homo sapien
agacagccggcacgcgccctctccg

SEQ ID NO: 1569812 - DNA, 25 bp, Homo sapien
agccgcggcccgcagacagccggca

SEQ ID NO: 1569813 - DNA, 25 bp, Homo sapien
cagacagccggcacgcgccctctcc

SEQ ID NO: 1569814 - DNA, 25 bp, Homo sapien
cctcatcgtcgtgcagaatgagcgc

SEQ ID NO: 1569815 - DNA, 25 bp, Homo sapien
tcctccgtgacggtcacctcatcgt

SEQ ID NO: 1569816 - DNA, 25 bp, Homo sapien
cgtgacggtcacctcatcgtcgtgc

SEQ ID NO: 1569817 - DNA, 25 bp, Homo sapien
cacctcatcgtcgtgcagaatgagc

SEQ ID NO: 1569818 - DNA, 25 bp, Homo sapien
agccaggtcaaaaaggttcaatatt

SEQ ID NO: 1569819 - DNA, 25 bp, Homo sapien
tgcaaacaagccaggtcaaaaaggt

SEQ ID NO: 1569820 - DNA, 25 bp, Homo sapien
ctttgcaaacaagccaggtcaaaaa

SEQ ID NO: 1569821 - DNA, 25 bp, Homo sapien
acaagccaggtcaaaaaggttcaat

SEQ ID NO: 1569822 - DNA, 25 bp, Homo sapien
ctcccgatgttgacattgaccaggc

SEQ ID NO: 1569823 - DNA, 25 bp, Homo sapien
tgtcatcatcaccgtcctcggattc

SEQ ID NO: 1569824 - DNA, 25 bp, Homo sapien
cgcatgtcatcatcaccgtcctcgg

SEQ ID NO: 1569825 - DNA, 25 bp, Homo sapien
aagcgcatgtcatcatcaccgtcct

SEQ ID NO: 1569826 - DNA, 25 bp, Homo sapien
caaagcgcatgtcatcatcaccgtc

SEQ ID NO: 1569827 - DNA, 25 bp, Homo sapien
aatggagcatacagactggtgcccc

SEQ ID NO: 1569828 - DNA, 25 bp, Homo sapien
tcatctgcaggtgaaccccgtatcc

SEQ ID NO: 1569829 - DNA, 25 bp, Homo sapien
agactgtggcattgtccgtgtagca

SEQ ID NO: 1569830 - DNA, 25 bp, Homo sapien
gcatgctgcctaccaaattcaggaa

SEQ ID NO: 1569831 - DNA, 25 bp, Homo sapien
gcagtggatccaaagcaaagctcag

SEQ ID NO: 1569832 - DNA, 25 bp, Homo sapien
cacttccaggtgatcgtggtcagca

SEQ ID NO: 1569833 - DNA, 25 bp, Homo sapien
gctatgtactatatcctggacgagg

SEQ ID NO: 1569834 - DNA, 25 bp, Homo sapien
aaggtctcgccgcacatcaagatgg

SEQ ID NO: 1569835 - DNA, 25 bp, Homo sapien
cacattggcactgttggcatttcgg

SEQ ID NO: 1569836 - DNA, 25 bp, Homo sapien
ctctgctggcatccaataccaaggg

SEQ ID NO: 1569837 - DNA, 25 bp, Homo sapien
cttctctcaggcagctatcatgggc

SEQ ID NO: 1569838 - DNA, 25 bp, Homo sapien
taccaagggatgcatttgtatccag

SEQ ID NO: 1569839 - DNA, 25 bp, Homo sapien
aacgtttgtcgtatagaatgattga

SEQ ID NO: 1569840 - DNA, 25 bp, Homo sapien
gtctaagaattgggatgactcagga

SEQ ID NO: 1569841 - DNA, 25 bp, Homo sapien
gggatgactcaggatatctgattag

SEQ ID NO: 1569842 - DNA, 25 bp, Homo sapien
aattgggatgactcaggatatctga

SEQ ID NO: 1569843 - DNA, 25 bp, Homo sapien
ccactgtgcctagccgggttttatt

SEQ ID NO: 1569844 - DNA, 25 bp, Homo sapien
gcatctggcctgtataattttctta

SEQ ID NO: 1569845 - DNA, 25 bp, Homo sapien
agtatatttatattacatgactcaa

SEQ ID NO: 1569846 - DNA, 25 bp, Homo sapien
tctcaaagctctggtattataggtg

SEQ ID NO: 1569847 - DNA, 25 bp, Homo sapien
ccacattcctgagccggattccgta

SEQ ID NO: 1569848 - DNA, 25 bp, Homo sapien
tcctgagccggattccgtagccttt

SEQ ID NO: 1569849 - DNA, 25 bp, Homo sapien
tgccacattcctgagccggattccg

SEQ ID NO: 1569850 - DNA, 25 bp, Homo sapien
gagccggattccgtagcctttccat

SEQ ID NO: 1569851 - DNA, 25 bp, Homo sapien
tgtgttattcctcgtggtggcagcg

SEQ ID NO: 1569852 - DNA, 25 bp, Homo sapien
gttattcctcgtggtggcagcggtt

SEQ ID NO: 1569853 - DNA, 25 bp, Homo sapien
ccttgtagacactagaacccctcaa

SEQ ID NO: 1569854 - DNA, 25 bp, Homo sapien
aacccctcaacagcagggttcaggg

SEQ ID NO: 1569855 - DNA, 25 bp, Homo sapien
ctctgcagtcgtcccgggcgcggcc

SEQ ID NO: 1569856 - DNA, 25 bp, Homo sapien
cctggtggcggctgcggatgctcag

SEQ ID NO: 1569857 - DNA, 25 bp, Homo sapien
cgcgctctgcagtcgtcccgggcgc

SEQ ID NO: 1569858 - DNA, 25 bp, Homo sapien
ctcagcgacgctgagctaacggggc

SEQ ID NO: 1569859 - DNA, 25 bp, Homo sapien
gctaggatctctgtctcttggagcc

SEQ ID NO: 1569860 - DNA, 25 bp, Homo sapien
tgaaaccttagacacctgggtcgca

SEQ ID NO: 1569861 - DNA, 25 bp, Homo sapien
aatgggggggctaggatctctgtct

SEQ ID NO: 1569862 - DNA, 25 bp, Homo sapien
gaaaccttagacacctgggtcgcag

SEQ ID NO: 1569863 - DNA, 25 bp, Homo sapien
tgcggctgaagcaaagacgacagcg

SEQ ID NO: 1569864 - DNA, 25 bp, Homo sapien
gactgcggctgaagcaaagacgaca

SEQ ID NO: 1569865 - DNA, 25 bp, Homo sapien
gctgaagcaaagacgacagcggcag

SEQ ID NO: 1569866 - DNA, 25 bp, Homo sapien
gcgactgcggctgaagcaaagacga

SEQ ID NO: 1569867 - DNA, 25 bp, Homo sapien
ctgcggcggacggaacccagcgaaa

SEQ ID NO: 1569868 - DNA, 25 bp, Homo sapien
gtgggcgcgtgtgtgatcttaaccc

SEQ ID NO: 1569869 - DNA, 25 bp, Homo sapien
acggaacccagcgaaagtgcacgcc

SEQ ID NO: 1569870 - DNA, 25 bp, Homo sapien
gcgtgtgtgatcttaaccccgcggg

SEQ ID NO: 1569871 - DNA, 25 bp, Homo sapien
cggagacaggaacgtggcgtggaac

SEQ ID NO: 1569872 - DNA, 25 bp, Homo sapien
caggaacgtggcgtggaacccagca

SEQ ID NO: 1569873 - DNA, 25 bp, Homo sapien
ctgcggagacaggaacgtggcgtgg

SEQ ID NO: 1569874 - DNA, 25 bp, Homo sapien
agacaggaacgtggcgtggaaccca

SEQ ID NO: 1569875 - DNA, 25 bp, Homo sapien
ttagcgtccgtttggacaggctcct

SEQ ID NO: 1569876 - DNA, 25 bp, Homo sapien
ctgagggggaggtaggccgttagcg

SEQ ID NO: 1569877 - DNA, 25 bp, Homo sapien
acaggctcctccctctagggatcga

SEQ ID NO: 1569878 - DNA, 25 bp, Homo sapien
ggctcctccctctagggatcgaacg

SEQ ID NO: 1569879 - DNA, 25 bp, Homo sapien
ctggtggtggagacggattaagcca

SEQ ID NO: 1569880 - DNA, 25 bp, Homo sapien
acacttggaacaggctgtaagagca

SEQ ID NO: 1569881 - DNA, 25 bp, Homo sapien
tggtggagacggattaagccacact

SEQ ID NO: 1569882 - DNA, 25 bp, Homo sapien
gagacggattaagccacacttggaa

SEQ ID NO: 1569883 - DNA, 25 bp, Homo sapien
gcggtcttagcagaggaatccacgg

SEQ ID NO: 1569884 - DNA, 25 bp, Homo sapien
ggtcttagcagaggaatccacggag

SEQ ID NO: 1569885 - DNA, 25 bp, Homo sapien
cagcggtcttagcagaggaatccac

SEQ ID NO: 1569886 - DNA, 25 bp, Homo sapien
cttagcagaggaatccacggagaaa

SEQ ID NO: 1569887 - DNA, 25 bp, Homo sapien
gggcagtagcacaggccttaacctc

SEQ ID NO: 1569888 - DNA, 25 bp, Homo sapien
cttaacctcttcgtggcagtcgcag

SEQ ID NO: 1569889 - DNA, 25 bp, Homo sapien
ggcagtagcacaggccttaacctct

SEQ ID NO: 1569890 - DNA, 25 bp, Homo sapien
cttcgtggcagtcgcaggacagcag

SEQ ID NO: 1569891 - DNA, 25 bp, Homo sapien
tggtgcgggttaccgtcactggcat

SEQ ID NO: 1569892 - DNA, 25 bp, Homo sapien
cccacgctagccaccagcgagaagg

SEQ ID NO: 1569893 - DNA, 25 bp, Homo sapien
acatggaccagttgcccatggaccc

SEQ ID NO: 1569894 - DNA, 25 bp, Homo sapien
ccaggcccgaagatgacgtcgtggt

SEQ ID NO: 1569895 - DNA, 25 bp, Homo sapien
tggagcccgcacagctccacgatga

SEQ ID NO: 1569896 - DNA, 25 bp, Homo sapien
acagctccacgatgaggatgatcag

SEQ ID NO: 1569897 - DNA, 25 bp, Homo sapien
tgaggatgatcagggtcacggagaa

SEQ ID NO: 1569898 - DNA, 25 bp, Homo sapien
cgcacagctccacgatgaggatgat

SEQ ID NO: 1569899 - DNA, 25 bp, Homo sapien
ggcgtaagccacacacgcgatgcag

SEQ ID NO: 1569900 - DNA, 25 bp, Homo sapien
taggatgaagcagatggcgtacacc

SEQ ID NO: 1569901 - DNA, 25 bp, Homo sapien
ggtggccatatagccagtgatctcg

SEQ ID NO: 1569902 - DNA, 25 bp, Homo sapien
gatgggtagcacgttggtgcactcc

SEQ ID NO: 1569903 - DNA, 25 bp, Homo sapien
acacacgtagtaggcatggctgcgg

SEQ ID NO: 1569904 - DNA, 25 bp, Homo sapien
ccagtaggttgatggccgtcaggat

SEQ ID NO: 1569905 - DNA, 25 bp, Homo sapien
gctgcggctgcagcttacatctctc

SEQ ID NO: 1569906 - DNA, 25 bp, Homo sapien
agcttacatctctcgagcgccgagg

SEQ ID NO: 1569907 - DNA, 25 bp, Homo sapien
gcagagtgcaccaggtcagccacat

SEQ ID NO: 1569908 - DNA, 25 bp, Homo sapien
accttgacaaaaaccaggtgggcag

SEQ ID NO: 1569909 - DNA, 25 bp, Homo sapien
tgacaaaaaccaggtgggcagagtg

SEQ ID NO: 1569910 - DNA, 25 bp, Homo sapien
caaaaaccaggtgggcagagtgcac

SEQ ID NO: 1569911 - DNA, 25 bp, Homo sapien
caagaactggttagagtgcaaggaa

SEQ ID NO: 1569912 - DNA, 25 bp, Homo sapien
gaaggaagaagatgcatccaagaac

SEQ ID NO: 1569913 - DNA, 25 bp, Homo sapien
tgggcaacaaaacaacacaggaagg

SEQ ID NO: 1569914 - DNA, 25 bp, Homo sapien
aaggcggaggaaagaagtactccat

SEQ ID NO: 1569915 - DNA, 25 bp, Homo sapien
gctgtggcatggacggctgcaaggg

SEQ ID NO: 1569916 - DNA, 25 bp, Homo sapien
ggagagaaagaagtctcagggctcc

SEQ ID NO: 1569917 - DNA, 25 bp, Homo sapien
ggcagataagaaagccgacaggcaa

SEQ ID NO: 1569918 - DNA, 25 bp, Homo sapien
ggagaaggtgcttgcaaaacaggca

SEQ ID NO: 1569919 - DNA, 25 bp, Homo sapien
atttaaaggggaagtacactgcaca

SEQ ID NO: 1569920 - DNA, 25 bp, Homo sapien
ggaagtacactgcacaccttcctcc

SEQ ID NO: 1569921 - DNA, 25 bp, Homo sapien
aggggaagtacactgcacaccttcc

SEQ ID NO: 1569922 - DNA, 25 bp, Homo sapien
gggaagtacactgcacaccttcctc

SEQ ID NO: 1569923 - DNA, 25 bp, Homo sapien
cattggaaattactgacctccaaat

SEQ ID NO: 1569924 - DNA, 25 bp, Homo sapien
gcccattggaaattactgacctcca

SEQ ID NO: 1569925 - DNA, 25 bp, Homo sapien
ctcccgcccattggaaattactgac

SEQ ID NO: 1569926 - DNA, 25 bp, Homo sapien
ccgcccattggaaattactgacctc

SEQ ID NO: 1569927 - DNA, 25 bp, Homo sapien
tgagtgccaggcggggcctagggac

SEQ ID NO: 1569928 - DNA, 25 bp, Homo sapien
agtgggtgttctgtaagcctggcaa

SEQ ID NO: 1569929 - DNA, 25 bp, Homo sapien
ttctggagccaatctctggcaaggc

SEQ ID NO: 1569930 - DNA, 25 bp, Homo sapien
agcctggcaaaaattctggagccaa

SEQ ID NO: 1569931 - DNA, 25 bp, Homo sapien
ctttttgataccacagagaatagtt

SEQ ID NO: 1569932 - DNA, 25 bp, Homo sapien
tctttttgataccacagagaatagt

SEQ ID NO: 1569933 - DNA, 25 bp, Homo sapien
cctacgggcaaaagagaacagctga

SEQ ID NO: 1569934 - DNA, 25 bp, Homo sapien
cacgttattcttaacacagagggcc

SEQ ID NO: 1569935 - DNA, 25 bp, Homo sapien
ggtcgatcttgccttgaaagcgggc

SEQ ID NO: 1569936 - DNA, 25 bp, Homo sapien
gaactgataggaaccagaagctcca

SEQ ID NO: 1569937 - DNA, 25 bp, Homo sapien
caatgcttacactcctccttcactt

SEQ ID NO: 1569938 - DNA, 25 bp, Homo sapien
ttgctgcattactaatgtaagctag

SEQ ID NO: 1569939 - DNA, 25 bp, Homo sapien
tgcttcaatgcttacactcctcctt

SEQ ID NO: 1569940 - DNA, 25 bp, Homo sapien
tttgctgcattactaatgtaagcta

SEQ ID NO: 1569941 - DNA, 25 bp, Homo sapien
ccagaaacgtagcagggaccaggat

SEQ ID NO: 1569942 - DNA, 25 bp, Homo sapien
gctggagactcgaaggatcaaagga

SEQ ID NO: 1569943 - DNA, 25 bp, Homo sapien
tgcggagcgcgccaggcagggagcg

SEQ ID NO: 1569944 - DNA, 25 bp, Homo sapien
ggccccagaaacgtagcagggacca

SEQ ID NO: 1569945 - DNA, 25 bp, Homo sapien
tcccccctctgaatcgcctacgccg

SEQ ID NO: 1569946 - DNA, 25 bp, Homo sapien
ggtcccccctctgaatcgcctacgc

SEQ ID NO: 1569947 - DNA, 25 bp, Homo sapien
ccccctctgaatcgcctacgccggg

SEQ ID NO: 1569948 - DNA, 25 bp, Homo sapien
cctctgaatcgcctacgccggggcc

SEQ ID NO: 1569949 - DNA, 25 bp, Homo sapien
aacttgtggctcttgacttcgtgga

SEQ ID NO: 1569950 - DNA, 25 bp, Homo sapien
aagcgagcggtgaacttgtggctct

SEQ ID NO: 1569951 - DNA, 25 bp, Homo sapien
ggctcttgacttcgtggaccacctt

SEQ ID NO: 1569952 - DNA, 25 bp, Homo sapien
ctgcttgaagaagcgagcggtgaac

SEQ ID NO: 1569953 - DNA, 25 bp, Homo sapien
ttgcaggccctgctttccgataccc

SEQ ID NO: 1569954 - DNA, 25 bp, Homo sapien
cattgcaggccctgctttccgatac

SEQ ID NO: 1569955 - DNA, 25 bp, Homo sapien
attgcaggccctgctttccgatacc

SEQ ID NO: 1569956 - DNA, 25 bp, Homo sapien
gacattgcaggccctgctttccgat

SEQ ID NO: 1569957 - DNA, 25 bp, Homo sapien
gtggcatcgtcgatgaaccacaaag

SEQ ID NO: 1569958 - DNA, 25 bp, Homo sapien
ggtcacaaattcgtggcatcgtcga

SEQ ID NO: 1569959 - DNA, 25 bp, Homo sapien
cactcgaaggtcacaaattcgtggc

SEQ ID NO: 1569960 - DNA, 25 bp, Homo sapien
ttcccagcgcctggacactcgaagg

SEQ ID NO: 1569961 - DNA, 25 bp, Homo sapien
aggagcatttcatgccctggtgcac

SEQ ID NO: 1569962 - DNA, 25 bp, Homo sapien
acaagcccgtagaggagggagccac

SEQ ID NO: 1569963 - DNA, 25 bp, Homo sapien
gctatgcaggcggaacttgtgtttg

SEQ ID NO: 1569964 - DNA, 25 bp, Homo sapien
tgctgtagctatgcaggcggaactt

SEQ ID NO: 1569965 - DNA, 25 bp, Homo sapien
gcacacagcgccggtgcacgttcat

SEQ ID NO: 1569966 - DNA, 25 bp, Homo sapien
gctacgcacacagcgccggtgcacg

SEQ ID NO: 1569967 - DNA, 25 bp, Homo sapien
acgcacacagcgccggtgcacgttc

SEQ ID NO: 1569968 - DNA, 25 bp, Homo sapien
tacgcacacagcgccggtgcacgtt

SEQ ID NO: 1569969 - DNA, 25 bp, Homo sapien
ctgctgtgggagcccggatctccag

SEQ ID NO: 1569970 - DNA, 25 bp, Homo sapien
gtgggagcccggatctccagctgca

SEQ ID NO: 1569971 - DNA, 25 bp, Homo sapien
gttacgtggatctcatctgctgtgg

SEQ ID NO: 1569972 - DNA, 25 bp, Homo sapien
ggcgctcggtgtggtccacaccgca

SEQ ID NO: 1569973 - DNA, 25 bp, Homo sapien
ttcacatagggatcagagagaccat

SEQ ID NO: 1569974 - DNA, 25 bp, Homo sapien
cataggaattaggttacgggcctcg

SEQ ID NO: 1569975 - DNA, 25 bp, Homo sapien
tctgtttcgtcaggttccgagggtc

SEQ ID NO: 1569976 - DNA, 25 bp, Homo sapien
tagcgtggctttcaccgttcgggtc

SEQ ID NO: 1569977 - DNA, 25 bp, Homo sapien
atccacgggcgccttgagcagctcc

SEQ ID NO: 1569978 - DNA, 25 bp, Homo sapien
tccgagacgccaaaggacatggccc

SEQ ID NO: 1569979 - DNA, 25 bp, Homo sapien
acatggcccccatgaagtcgttgcg

SEQ ID NO: 1569980 - DNA, 25 bp, Homo sapien
tgcgggaggtccggtcccagtccca

SEQ ID NO: 1569981 - DNA, 25 bp, Homo sapien
ttgtaatactcgccctcctcctggt

SEQ ID NO: 1569982 - DNA, 25 bp, Homo sapien
attgtaatactcgccctcctcctgg

SEQ ID NO: 1569983 - DNA, 25 bp, Homo sapien
gtaatactcgccctcctcctggttc

SEQ ID NO: 1569984 - DNA, 25 bp, Homo sapien
tgtaatactcgccctcctcctggtt

SEQ ID NO: 1569985 - DNA, 25 bp, Homo sapien
ctgcagttgtcagcatcggccaccg

SEQ ID NO: 1569986 - DNA, 25 bp, Homo sapien
agttgtcagcatcggccaccggcac

SEQ ID NO: 1569987 - DNA, 25 bp, Homo sapien
ggaggctgcagttgtcagcatcggc

SEQ ID NO: 1569988 - DNA, 25 bp, Homo sapien
ggctgcagttgtcagcatcggccac

SEQ ID NO: 1569989 - DNA, 25 bp, Homo sapien
catacaattccagggggtagttaca

SEQ ID NO: 1569990 - DNA, 25 bp, Homo sapien
ctcatacaattccagggggtagtta

SEQ ID NO: 1569991 - DNA, 25 bp, Homo sapien
tcatacaattccagggggtagttac

SEQ ID NO: 1569992 - DNA, 25 bp, Homo sapien
agaggaagaggggcccatccgcacc

SEQ ID NO: 1569993 - DNA, 25 bp, Homo sapien
gaggaagaggggcccatccgcaccc

SEQ ID NO: 1569994 - DNA, 25 bp, Homo sapien
gagaggaagaggggcccatccgcac

SEQ ID NO: 1569995 - DNA, 25 bp, Homo sapien
aggaagaggggcccatccgcacccg

SEQ ID NO: 1569996 - DNA, 25 bp, Homo sapien
agatgtgcaggcgtcctggactcgc

SEQ ID NO: 1569997 - DNA, 25 bp, Homo sapien
ctggactcgccccgaagaagcagcg

SEQ ID NO: 1569998 - DNA, 25 bp, Homo sapien
actgccttttcctagaaccatgagg

SEQ ID NO: 1569999 - DNA, 25 bp, Homo sapien
accatgaggaagctgaagtcggaga

SEQ ID NO: 1570000 - DNA, 25 bp, Homo sapien
ttgatggcgtagagctcatcagagc

SEQ ID NO: 1570001 - DNA, 25 bp, Homo sapien
acgtttctccaccagcgtgcagtcc

SEQ ID NO: 1570002 - DNA, 25 bp, Homo sapien
tttcaagatcttgatggcgtagagc

SEQ ID NO: 1570003 - DNA, 25 bp, Homo sapien
ggacgatcacgtcctttttcaagat

SEQ ID NO: 1570004 - DNA, 25 bp, Homo sapien
tggagtggagctgggtgaggaagtg

SEQ ID NO: 1570005 - DNA, 25 bp, Homo sapien
cggggtctggaaggtggagtggagc

SEQ ID NO: 1570006 - DNA, 25 bp, Homo sapien
aaggtggagtggagctgggtgagga

SEQ ID NO: 1570007 - DNA, 25 bp, Homo sapien
tgggtgaggaagtggggccggccgc

SEQ ID NO: 1570008 - DNA, 25 bp, Homo sapien
ttgggaggccgaagcgggtggatca

SEQ ID NO: 1570009 - DNA, 25 bp, Homo sapien
aaatcagctgagtgtggtggcggga

SEQ ID NO: 1570010 - DNA, 25 bp, Homo sapien
ggctcacgcctgtaatcccagcact

SEQ ID NO: 1570011 - DNA, 25 bp, Homo sapien
aatcaaagttgcagctgggcgtggt

SEQ ID NO: 1570012 - DNA, 25 bp, Homo sapien
ttgaatgtggtacatcaagtctccc

SEQ ID NO: 1570013 - DNA, 25 bp, Homo sapien
gggctccttaaacttgcccagctgt

SEQ ID NO: 1570014 - DNA, 25 bp, Homo sapien
gacgtactccatcacgaaatacagg

SEQ ID NO: 1570015 - DNA, 25 bp, Homo sapien
cccggtgacgtactccatcacgaaa

SEQ ID NO: 1570016 - DNA, 25 bp, Homo sapien
gaagaagaggccgatagcgatttct

SEQ ID NO: 1570017 - DNA, 25 bp, Homo sapien
gatagcgatttctgccgcgtagaac

SEQ ID NO: 1570018 - DNA, 25 bp, Homo sapien
tagatgatgccctgattgtgaagga

SEQ ID NO: 1570019 - DNA, 25 bp, Homo sapien
gaggccgatagcgatttctgccgcg

SEQ ID NO: 1570020 - DNA, 25 bp, Homo sapien
tatgtagtccggggtcccgcagaag

SEQ ID NO: 1570021 - DNA, 25 bp, Homo sapien
cggggaagacgttctccttacacat

SEQ ID NO: 1570022 - DNA, 25 bp, Homo sapien
cagcatccagcatcacattgtccag

SEQ ID NO: 1570023 - DNA, 25 bp, Homo sapien
gaagacgttctccttacacatgcca

SEQ ID NO: 1570024 - DNA, 25 bp, Homo sapien
ttcccatagggctggtaggcaatga

SEQ ID NO: 1570025 - DNA, 25 bp, Homo sapien
aaggaccaccaatcgacagacttcc

SEQ ID NO: 1570026 - DNA, 25 bp, Homo sapien
ctccaaaggaccaccaatcgacaga

SEQ ID NO: 1570027 - DNA, 25 bp, Homo sapien
tcccatagggctggtaggcaatgat

SEQ ID NO: 1570028 - DNA, 25 bp, Homo sapien
tactaccattagaacttactactta

SEQ ID NO: 1570029 - DNA, 25 bp, Homo sapien
gaatttagttggttgttagattcaa

SEQ ID NO: 1570030 - DNA, 25 bp, Homo sapien
tagaacttactacttaatgaattaa

SEQ ID NO: 1570031 - DNA, 25 bp, Homo sapien
aatatttagacaactgtatacattg

SEQ ID NO: 1570032 - DNA, 25 bp, Homo sapien
gggtaggtgacagtttgttccatga

SEQ ID NO: 1570033 - DNA, 25 bp, Homo sapien
gatggccacggcttcccgggaaagc

SEQ ID NO: 1570034 - DNA, 25 bp, Homo sapien
cagtttgttccatgatggcctgaaa

SEQ ID NO: 1570035 - DNA, 25 bp, Homo sapien
cctcgtcctccccatcgaagggagg

SEQ ID NO: 1570036 - DNA, 25 bp, Homo sapien
ggatggtaggttccccatcaggccc

SEQ ID NO: 1570037 - DNA, 25 bp, Homo sapien
agcggaaaaagccatgtgcacggat

SEQ ID NO: 1570038 - DNA, 25 bp, Homo sapien
catgtgcacggatggtaggttcccc

SEQ ID NO: 1570039 - DNA, 25 bp, Homo sapien
gcccaggcgcttccctgggtgcttg

SEQ ID NO: 1570040 - DNA, 25 bp, Homo sapien
gaggcgggatctccaatcgttccag

SEQ ID NO: 1570041 - DNA, 25 bp, Homo sapien
gaaaggaggcgggatctccaatcgt

SEQ ID NO: 1570042 - DNA, 25 bp, Homo sapien
ggtctgaaaggaggcgggatctcca

SEQ ID NO: 1570043 - DNA, 25 bp, Homo sapien
gggatctccaatcgttccagccgct

SEQ ID NO: 1570044 - DNA, 25 bp, Homo sapien
ggcgccgcccgcgtgaagaacttgt

SEQ ID NO: 1570045 - DNA, 25 bp, Homo sapien
cttgtcaaagttctcgccgctgcgg

SEQ ID NO: 1570046 - DNA, 25 bp, Homo sapien
tgctggccaggactaggcggtctgg

SEQ ID NO: 1570047 - DNA, 25 bp, Homo sapien
ggttcacgtaggtgaagccctggaa

SEQ ID NO: 1570048 - DNA, 25 bp, Homo sapien
gacgggcacaggcactgggctggtg

SEQ ID NO: 1570049 - DNA, 25 bp, Homo sapien
tggggctgcgggcatccgggtgcac

SEQ ID NO: 1570050 - DNA, 25 bp, Homo sapien
atgacgggcacaggcactgggctgg

SEQ ID NO: 1570051 - DNA, 25 bp, Homo sapien
ctggtggggctgcgggcatccgggt

SEQ ID NO: 1570052 - DNA, 25 bp, Homo sapien
gaacctgagtctggaacagccaacc

SEQ ID NO: 1570053 - DNA, 25 bp, Homo sapien
cagagtccagaacgctaaggtcagg

SEQ ID NO: 1570054 - DNA, 25 bp, Homo sapien
tggagtctcgaaccccatggagttg

SEQ ID NO: 1570055 - DNA, 25 bp, Homo sapien
tcaagtcttgaacgcgggacggctg

SEQ ID NO: 1570056 - DNA, 25 bp, Homo sapien
ccgagaccttgaggccgagaaatcc

SEQ ID NO: 1570057 - DNA, 25 bp, Homo sapien
cctaggcgcagagattctgaggcct

SEQ ID NO: 1570058 - DNA, 25 bp, Homo sapien
cacccctcaccacctaggcgcagag

SEQ ID NO: 1570059 - DNA, 25 bp, Homo sapien
gagaaagtcacgccgagaccttgag

SEQ ID NO: 1570060 - DNA, 25 bp, Homo sapien
ggccccgcagccgcatgaccggccc

SEQ ID NO: 1570061 - DNA, 25 bp, Homo sapien
gctgggcggacgctccgggccgcgg

SEQ ID NO: 1570062 - DNA, 25 bp, Homo sapien
agccgcatgaccggccccgaggctt

SEQ ID NO: 1570063 - DNA, 25 bp, Homo sapien
ccgcagccgcatgaccggccccgag

SEQ ID NO: 1570064 - DNA, 25 bp, Homo sapien
cctcagaggcagggggcgccctgcg

SEQ ID NO: 1570065 - DNA, 25 bp, Homo sapien
ctcagaggcagggggcgccctgcgg

SEQ ID NO: 1570066 - DNA, 25 bp, Homo sapien
tcagaggcagggggcgccctgcggg

SEQ ID NO: 1570067 - DNA, 25 bp, Homo sapien
cgtgcagggccatcttgacctcggt

SEQ ID NO: 1570068 - DNA, 25 bp, Homo sapien
tggtctggttctgcggtagcactgt

SEQ ID NO: 1570069 - DNA, 25 bp, Homo sapien
tagtcagtgctgaccgcgatgccta

SEQ ID NO: 1570070 - DNA, 25 bp, Homo sapien
cagactcgccagaggccggcgtgca

SEQ ID NO: 1570071 - DNA, 25 bp, Homo sapien
tgttttccgtcaccaaattgatctc

SEQ ID NO: 1570072 - DNA, 25 bp, Homo sapien
tccgtgttttccgtcaccaaattga

SEQ ID NO: 1570073 - DNA, 25 bp, Homo sapien
gaatattctccgtgttttccgtcac

SEQ ID NO: 1570074 - DNA, 25 bp, Homo sapien
gccacacagcgacctttctcccgac

SEQ ID NO: 1570075 - DNA, 25 bp, Homo sapien
ccagaatggtcctctgcgggcggat

SEQ ID NO: 1570076 - DNA, 25 bp, Homo sapien
ccgatagtatgaagaagatgccaga

SEQ ID NO: 1570077 - DNA, 25 bp, Homo sapien
ccgtgaacacgaggaagaggctgac

SEQ ID NO: 1570078 - DNA, 25 bp, Homo sapien
cgatgttgctgatgacgaaggccgt

SEQ ID NO: 1570079 - DNA, 25 bp, Homo sapien
tggaggatcccttttcaacgatttg

SEQ ID NO: 1570080 - DNA, 25 bp, Homo sapien
tagttggaggatcccttttcaacga

SEQ ID NO: 1570081 - DNA, 25 bp, Homo sapien
gaggatcccttttcaacgatttgca

SEQ ID NO: 1570082 - DNA, 25 bp, Homo sapien
gatcccttttcaacgatttgcacag

SEQ ID NO: 1570083 - DNA, 25 bp, Homo sapien
actgcaccaatgaccagacctggga

SEQ ID NO: 1570084 - DNA, 25 bp, Homo sapien
aactccaccaatgaccagacctggg

SEQ ID NO: 1570085 - DNA, 25 bp, Homo sapien
aactgcaccaatgaccagacctggg

SEQ ID NO: 1570086 - DNA, 25 bp, Homo sapien
tccaccaatgaccagacctgggaca

SEQ ID NO: 1570087 - DNA, 25 bp, Homo sapien
cagacctggggacaactccaccaat

SEQ ID NO: 1570088 - DNA, 25 bp, Homo sapien
agacctggggacaactccaccaatg

SEQ ID NO: 1570089 - DNA, 25 bp, Homo sapien
ctgatcagtttctccttgtttcttt

SEQ ID NO: 1570090 - DNA, 25 bp, Homo sapien
tgatcagtttctccttgtttctttt

SEQ ID NO: 1570091 - DNA, 25 bp, Homo sapien
ctctgatcagtttctccttgtttct

SEQ ID NO: 1570092 - DNA, 25 bp, Homo sapien
tctgatcagtttctccttgtttctt

SEQ ID NO: 1570093 - DNA, 25 bp, Homo sapien
actgggtggccaataaagctgaagg

SEQ ID NO: 1570094 - DNA, 25 bp, Homo sapien
cgctgacctcttagactgcagtata

SEQ ID NO: 1570095 - DNA, 25 bp, Homo sapien
aaggctgagcagttacaagagagac

SEQ ID NO: 1570096 - DNA, 25 bp, Homo sapien
gttttttgctacaaccacaaggctg

SEQ ID NO: 1570097 - DNA, 25 bp, Homo sapien
tgtatggcccaccagctaagaatgg

SEQ ID NO: 1570098 - DNA, 25 bp, Homo sapien
catggtccatggacgaaacccagct

SEQ ID NO: 1570099 - DNA, 25 bp, Homo sapien
taacagcgttatgcgtaatagccaa

SEQ ID NO: 1570100 - DNA, 25 bp, Homo sapien
tctacaccggtggtcggcaaaccat

SEQ ID NO: 1570101 - DNA, 25 bp, Homo sapien
ggagcagagggggtgccctcgtcca

SEQ ID NO: 1570102 - DNA, 25 bp, Homo sapien
ctaggggagcagagggggtgccctc

SEQ ID NO: 1570103 - DNA, 25 bp, Homo sapien
ggggagcagagggggtgccctcgtc

SEQ ID NO: 1570104 - DNA, 25 bp, Homo sapien
gagcagagggggtgccctcgtccat

SEQ ID NO: 1570105 - DNA, 25 bp, Homo sapien
ggagatgtaaagaaccaagcccacc

SEQ ID NO: 1570106 - DNA, 25 bp, Homo sapien
agaccacccgtagcgataatgaaaa

SEQ ID NO: 1570107 - DNA, 25 bp, Homo sapien
aggaagcggcgaaggcaaaagacca

SEQ ID NO: 1570108 - DNA, 25 bp, Homo sapien
catgacctcgtcgttgatgctggag

SEQ ID NO: 1570109 - DNA, 25 bp, Homo sapien
catttggatggacacgtcgctggag

SEQ ID NO: 1570110 - DNA, 25 bp, Homo sapien
gagggtagttctgcgtcatttggat

SEQ ID NO: 1570111 - DNA, 25 bp, Homo sapien
cgggtgtggacggtacatctcctcc

SEQ ID NO: 1570112 - DNA, 25 bp, Homo sapien
cgcttggtgaacaggtacacggaca

SEQ ID NO: 1570113 - DNA, 25 bp, Homo sapien
gtggagatgtgcaggtggtccgggt

SEQ ID NO: 1570114 - DNA, 25 bp, Homo sapien
tcagcagggcgaggtggagatgtgc

SEQ ID NO: 1570115 - DNA, 25 bp, Homo sapien
ggagatgtgcaggtggtccgggtac

SEQ ID NO: 1570116 - DNA, 25 bp, Homo sapien
aggtggagatgtgcaggtggtccgg

SEQ ID NO: 1570117 - DNA, 25 bp, Homo sapien
tctggttccgtgtacagcactgtgc

SEQ ID NO: 1570118 - DNA, 25 bp, Homo sapien
cagccggtgagaaagaatgggacct

SEQ ID NO: 1570119 - DNA, 25 bp, Homo sapien
agaagatcctttagacaagagcccc

SEQ ID NO: 1570120 - DNA, 25 bp, Homo sapien
acgtcaatgaggaggagagccagaa

SEQ ID NO: 1570121 - DNA, 25 bp, Homo sapien
caggcggagacgtgtttgaaataaa

SEQ ID NO: 1570122 - DNA, 25 bp, Homo sapien
gcctcgttaaaaatcgctgcgtaaa

SEQ ID NO: 1570123 - DNA, 25 bp, Homo sapien
tatgatacacggtaaataacagagc

SEQ ID NO: 1570124 - DNA, 25 bp, Homo sapien
tgcgtaaagtcaggttaactgcggc

SEQ ID NO: 1570125 - DNA, 25 bp, Homo sapien
cctgcatgctttacacggactgaag

SEQ ID NO: 1570126 - DNA, 25 bp, Homo sapien
gattaagtcatttaacaacgaccca

SEQ ID NO: 1570127 - DNA, 25 bp, Homo sapien
gacccatctaacgtcattctgcagt

SEQ ID NO: 1570128 - DNA, 25 bp, Homo sapien
agcgctgccgttgataatgatgatg

SEQ ID NO: 1570129 - DNA, 25 bp, Homo sapien
caagcagcccgtacgaatcacttag

SEQ ID NO: 1570130 - DNA, 25 bp, Homo sapien
agcaccaattgagcagcacggcaga

SEQ ID NO: 1570131 - DNA, 25 bp, Homo sapien
gctgaaacatgatttgccatcccga

SEQ ID NO: 1570132 - DNA, 25 bp, Homo sapien
ggaatccttctaaaccaaccagtgc

SEQ ID NO: 1570133 - DNA, 25 bp, Homo sapien
caagccttttgactttcaccaacaa

SEQ ID NO: 1570134 - DNA, 25 bp, Homo sapien
agccttttgactttcaccaacaatt

SEQ ID NO: 1570135 - DNA, 25 bp, Homo sapien
ttaacaagccttttgactttcacca

SEQ ID NO: 1570136 - DNA, 25 bp, Homo sapien
taacaagccttttgactttcaccaa

SEQ ID NO: 1570137 - DNA, 25 bp, Homo sapien
tgggggggggttcacagcgcaggca

SEQ ID NO: 1570138 - DNA, 25 bp, Homo sapien
gctgggggggggttcacagcgcagg

SEQ ID NO: 1570139 - DNA, 25 bp, Homo sapien
ggttcacagcgcaggcagaagcggg

SEQ ID NO: 1570140 - DNA, 25 bp, Homo sapien
ggggggttcacagcgcaggcagaag

SEQ ID NO: 1570141 - DNA, 25 bp, Homo sapien
agaggccccgctcttcgttccagcg

SEQ ID NO: 1570142 - DNA, 25 bp, Homo sapien
tcgccgccggccgtgaggttggtgg

SEQ ID NO: 1570143 - DNA, 25 bp, Homo sapien
tccagaggcccgagtgcgtgaggcc

SEQ ID NO: 1570144 - DNA, 25 bp, Homo sapien
aaggcgcccaccgtcgtcagcagca

SEQ ID NO: 1570145 - DNA, 25 bp, Homo sapien
gcgcgcgtgtagagccagtagtcag

SEQ ID NO: 1570146 - DNA, 25 bp, Homo sapien
gcggaaacaccccagtgcccgttga

SEQ ID NO: 1570147 - DNA, 25 bp, Homo sapien
gataaacaacatgtgctatgtacat

SEQ ID NO: 1570148 - DNA, 25 bp, Homo sapien
aaacaccccagtgcccgttgacaga

SEQ ID NO: 1570149 - DNA, 25 bp, Homo sapien
ccagtgcccgttgacagatgaaagg

SEQ ID NO: 1570150 - DNA, 25 bp, Homo sapien
ccgggaaatgattgatcttcacgca

SEQ ID NO: 1570151 - DNA, 25 bp, Homo sapien
aatgattgatcttcacgcagacgcc

SEQ ID NO: 1570152 - DNA, 25 bp, Homo sapien
cgtgtcctccgggaaatgattgatc

SEQ ID NO: 1570153 - DNA, 25 bp, Homo sapien
cctccgggaaatgattgatcttcac

SEQ ID NO: 1570154 - DNA, 25 bp, Homo sapien
gaagatgctggaggcccggacaact

SEQ ID NO: 1570155 - DNA, 25 bp, Homo sapien
tggggaagatgctggaggcccggac

SEQ ID NO: 1570156 - DNA, 25 bp, Homo sapien
gggaagatgctggaggcccggacaa

SEQ ID NO: 1570157 - DNA, 25 bp, Homo sapien
gatggggaagatgctggaggcccgg

SEQ ID NO: 1570158 - DNA, 25 bp, Homo sapien
ccacgaacaggatccctgcgcccag

SEQ ID NO: 1570159 - DNA, 25 bp, Homo sapien
tcctcttggacttgtagacgcggga

SEQ ID NO: 1570160 - DNA, 25 bp, Homo sapien
tagacgcgggaggccgccacgcaca

SEQ ID NO: 1570161 - DNA, 25 bp, Homo sapien
acgaacaggatccctgcgcccagaa

SEQ ID NO: 1570162 - DNA, 25 bp, Homo sapien
cccgcgttggcggagatgtacacga

SEQ ID NO: 1570163 - DNA, 25 bp, Homo sapien
aaggaccagccgtacgagtagtggt

SEQ ID NO: 1570164 - DNA, 25 bp, Homo sapien
gatcacgccgatgatgttgctcagg

SEQ ID NO: 1570165 - DNA, 25 bp, Homo sapien
cgacagcccgccgaagtagaaggac

SEQ ID NO: 1570166 - DNA, 25 bp, Homo sapien
cggctgcgctcgatgtagatgttga

SEQ ID NO: 1570167 - DNA, 25 bp, Homo sapien
tggcagtgcgcctcgcggctgcgct

SEQ ID NO: 1570168 - DNA, 25 bp, Homo sapien
ggctgcgctcgatgtagatgttgac

SEQ ID NO: 1570169 - DNA, 25 bp, Homo sapien
gcggctgcgctcgatgtagatgttg

SEQ ID NO: 1570170 - DNA, 25 bp, Homo sapien
cagacggaggatggccgaggggccg

SEQ ID NO: 1570171 - DNA, 25 bp, Homo sapien
agacggaggatggccgaggggccgc

SEQ ID NO: 1570172 - DNA, 25 bp, Homo sapien
gacggcgacggctcgctggagcggg

SEQ ID NO: 1570173 - DNA, 25 bp, Homo sapien
cgacggctcgctggagcgggagcta

SEQ ID NO: 1570174 - DNA, 25 bp, Homo sapien
acggctcgctggagcgggagctaga

SEQ ID NO: 1570175 - DNA, 25 bp, Homo sapien
ggcgacggctcgctggagcgggagc

SEQ ID NO: 1570176 - DNA, 25 bp, Homo sapien
atggagatgtccgtggaggcaaagc

SEQ ID NO: 1570177 - DNA, 25 bp, Homo sapien
gatgtccgtggaggcaaagcccggg

SEQ ID NO: 1570178 - DNA, 25 bp, Homo sapien
ggagatgtccgtggaggcaaagccc

SEQ ID NO: 1570179 - DNA, 25 bp, Homo sapien
agatgtccgtggaggcaaagcccgg

SEQ ID NO: 1570180 - DNA, 25 bp, Homo sapien
gttgtgcagcgtgaggaagccggac

SEQ ID NO: 1570181 - DNA, 25 bp, Homo sapien
ggcggcccggtgaccgtgaccgtga

SEQ ID NO: 1570182 - DNA, 25 bp, Homo sapien
cccttggaggggtcgcggctgagcg

SEQ ID NO: 1570183 - DNA, 25 bp, Homo sapien
gttttcctgttgagcgtgttggtgt

SEQ ID NO: 1570184 - DNA, 25 bp, Homo sapien
cacgcccctcggctcccccgccgcg

SEQ ID NO: 1570185 - DNA, 25 bp, Homo sapien
tgtgcctgttttcccgccagactgg

SEQ ID NO: 1570186 - DNA, 25 bp, Homo sapien
agaaattctgaacacccagctctga

SEQ ID NO: 1570187 - DNA, 25 bp, Homo sapien
ttccgtcaagagaagggcacgcaga

SEQ ID NO: 1570188 - DNA, 25 bp, Homo sapien
cacttgctgagcaaatatggaaggg

SEQ ID NO: 1570189 - DNA, 25 bp, Homo sapien
gagcaggcccttgtccgtctatttg

SEQ ID NO: 1570190 - DNA, 25 bp, Homo sapien
gcaggcccttgtccgtctatttgcc

SEQ ID NO: 1570191 - DNA, 25 bp, Homo sapien
ctttttggttactgaaatgatatta

SEQ ID NO: 1570192 - DNA, 25 bp, Homo sapien
ttgtccgtctatttgccaccacatc

SEQ ID NO: 1570193 - DNA, 25 bp, Homo sapien
tcatcggtgcccatcagagatgtgc

SEQ ID NO: 1570194 - DNA, 25 bp, Homo sapien
ggctatttgataccacaactcggat

SEQ ID NO: 1570195 - DNA, 25 bp, Homo sapien
tcctggtaacaatcctcatcggtgc

SEQ ID NO: 1570196 - DNA, 25 bp, Homo sapien
tgtgcgtgcccaattcagagagttc

SEQ ID NO: 1570197 - DNA, 25 bp, Homo sapien
cttgtccaagtctcagcagcccttg

SEQ ID NO: 1570198 - DNA, 25 bp, Homo sapien
tatcaagatcaccaaccctgtccat

SEQ ID NO: 1570199 - DNA, 25 bp, Homo sapien
catcagacctaatggtcactctgct

SEQ ID NO: 1570200 - DNA, 25 bp, Homo sapien
cctggcctttgtgtcagttacacac

SEQ ID NO: 1570201 - DNA, 25 bp, Homo sapien
gagtctccacgttgctttctatgcg

SEQ ID NO: 1570202 - DNA, 25 bp, Homo sapien
tgcgtttcctcaatgcccgcgtggc

SEQ ID NO: 1570203 - DNA, 25 bp, Homo sapien
tggacttttccgatggagcacgtgt

SEQ ID NO: 1570204 - DNA, 25 bp, Homo sapien
cgtgtttccccgcagtgtgattgtc

SEQ ID NO: 1570205 - DNA, 25 bp, Homo sapien
cctgagcgaggctctggtgcacgct

SEQ ID NO: 1570206 - DNA, 25 bp, Homo sapien
ctgacctgagcgaggctctggtgca

SEQ ID NO: 1570207 - DNA, 25 bp, Homo sapien
cgaggctctggtgcacgctgggcct

SEQ ID NO: 1570208 - DNA, 25 bp, Homo sapien
aggctctggtgcacgctgggcctct

SEQ ID NO: 1570209 - DNA, 25 bp, Homo sapien
agcccttctgtggacggcccaggtg

SEQ ID NO: 1570210 - DNA, 25 bp, Homo sapien
ggcggcagggcctgatcttcaaccc

SEQ ID NO: 1570211 - DNA, 25 bp, Homo sapien
ctcttcatcgagtttattagacggg

SEQ ID NO: 1570212 - DNA, 25 bp, Homo sapien
gggaccttccatgcagtttcagctc

SEQ ID NO: 1570213 - DNA, 25 bp, Homo sapien
gaatcttggatctgagaggagagga

SEQ ID NO: 1570214 - DNA, 25 bp, Homo sapien
ccagaatcttggatctgagaggaga

SEQ ID NO: 1570215 - DNA, 25 bp, Homo sapien
cagaatcttggatctgagaggagag

SEQ ID NO: 1570216 - DNA, 25 bp, Homo sapien
aatcttggatctgagaggagaggaa

SEQ ID NO: 1570217 - DNA, 25 bp, Homo sapien
ttttcctgagagatctgagcacccc

SEQ ID NO: 1570218 - DNA, 25 bp, Homo sapien
atgagaactggtgcccgctgaagct

SEQ ID NO: 1570219 - DNA, 25 bp, Homo sapien
tctaggttgccctcaagaacttggc

SEQ ID NO: 1570220 - DNA, 25 bp, Homo sapien
ccccaagagctccagaggaatgaga

SEQ ID NO: 1570221 - DNA, 25 bp, Homo sapien
cccgccgccggttctcctcttgcag

SEQ ID NO: 1570222 - DNA, 25 bp, Homo sapien
ccccgccgccggttctcctcttgca

SEQ ID NO: 1570223 - DNA, 25 bp, Homo sapien
tgcaggaagaagttggaccacatca

SEQ ID NO: 1570224 - DNA, 25 bp, Homo sapien
cctcttgcaggaagaagttggacca

SEQ ID NO: 1570225 - DNA, 25 bp, Homo sapien
gcttcgcacacggcgctgccgttgg

SEQ ID NO: 1570226 - DNA, 25 bp, Homo sapien
ttcaccttcccctcgcgctcgggcg

SEQ ID NO: 1570227 - DNA, 25 bp, Homo sapien
acagccgcttggtgcacgccttcca

SEQ ID NO: 1570228 - DNA, 25 bp, Homo sapien
aactcggtgcccacggacagcaccg

SEQ ID NO: 1570229 - DNA, 25 bp, Homo sapien
gggatccctctatctctcagcagtt

SEQ ID NO: 1570230 - DNA, 25 bp, Homo sapien
gaaagcaagctctaaggcacaggtt

SEQ ID NO: 1570231 - DNA, 25 bp, Homo sapien
cactggcgcttactgcgaggcaagc

SEQ ID NO: 1570232 - DNA, 25 bp, Homo sapien
tacagtctgtagcaggaaagcaagc

SEQ ID NO: 1570233 - DNA, 25 bp, Homo sapien
ttctctgaaagatgcgtgcattctc

SEQ ID NO: 1570234 - DNA, 25 bp, Homo sapien
cattctcccccgtggtgaagaattt

SEQ ID NO: 1570235 - DNA, 25 bp, Homo sapien
tgcgtgcattctcccccgtggtgaa

SEQ ID NO: 1570236 - DNA, 25 bp, Homo sapien
tctgaaagatgcgtgcattctcccc

SEQ ID NO: 1570237 - DNA, 25 bp, Homo sapien
agcactgctatcaccgcagctgcca

SEQ ID NO: 1570238 - DNA, 25 bp, Homo sapien
atgatacagaggcaccccaaggcca

SEQ ID NO: 1570239 - DNA, 25 bp, Homo sapien
tcggagcaggaactctgcaccttta

SEQ ID NO: 1570240 - DNA, 25 bp, Homo sapien
gagcaccatgatgatacagaggcac

SEQ ID NO: 1570241 - DNA, 25 bp, Homo sapien
aagcagacggctccaactcggagca

SEQ ID NO: 1570242 - DNA, 25 bp, Homo sapien
tgcagcagggccctcacggaatgcc

SEQ ID NO: 1570243 - DNA, 25 bp, Homo sapien
ctccaggctcaccaagagcagcagg

SEQ ID NO: 1570244 - DNA, 25 bp, Homo sapien
ccagggaccaggagtactcgtaggt

SEQ ID NO: 1570245 - DNA, 25 bp, Homo sapien
gaatgccggaacacctccaggctca

SEQ ID NO: 1570246 - DNA, 25 bp, Homo sapien
cggtgcccccgcttgggacagaggg

SEQ ID NO: 1570247 - DNA, 25 bp, Homo sapien
gcccggtgcccccgcttgggacaga

SEQ ID NO: 1570248 - DNA, 25 bp, Homo sapien
gcccccaacagcaggatcaggccgg

SEQ ID NO: 1570249 - DNA, 25 bp, Homo sapien
gccggcccccaacagcaggatcagg

SEQ ID NO: 1570250 - DNA, 25 bp, Homo sapien
tcaaagggctcggtggttgcttaga

SEQ ID NO: 1570251 - DNA, 25 bp, Homo sapien
tgtaaaaagtctctcccggcaagtg

SEQ ID NO: 1570252 - DNA, 25 bp, Homo sapien
aaatcagatcacagcgaggccagac

SEQ ID NO: 1570253 - DNA, 25 bp, Homo sapien
ggcaagtgaatcgatccagacctgg

SEQ ID NO: 1570254 - DNA, 25 bp, Homo sapien
acgaccaccagagggactgcctgag

SEQ ID NO: 1570255 - DNA, 25 bp, Homo sapien
caccagttccacggccagatctata

SEQ ID NO: 1570256 - DNA, 25 bp, Homo sapien
tgccccgcataaacttgagctttta

SEQ ID NO: 1570257 - DNA, 25 bp, Homo sapien
aaaactgccccgcataaacttgagc

SEQ ID NO: 1570258 - DNA, 25 bp, Homo sapien
cgacagcggcgaggacgcggagcac

SEQ ID NO: 1570259 - DNA, 25 bp, Homo sapien
ttgtggtccctatgcgcgagaaccc

SEQ ID NO: 1570260 - DNA, 25 bp, Homo sapien
gcaccctgggagttgtggtccctat

SEQ ID NO: 1570261 - DNA, 25 bp, Homo sapien
tgcgccctggagcacaagtagaggc

SEQ ID NO: 1570262 - DNA, 25 bp, Homo sapien
tcagtcccaggaccgcccagaggtt

SEQ ID NO: 1570263 - DNA, 25 bp, Homo sapien
ccagaggttcccagaactacccgag

SEQ ID NO: 1570264 - DNA, 25 bp, Homo sapien
ctcagtcccaggaccgcccagaggt

SEQ ID NO: 1570265 - DNA, 25 bp, Homo sapien
cagaactacccgagccccgtgcgcc

SEQ ID NO: 1570266 - DNA, 25 bp, Homo sapien
cgacgaaggacacgaccagcactgg

SEQ ID NO: 1570267 - DNA, 25 bp, Homo sapien
ccccgacgacgaaggacacgaccag

SEQ ID NO: 1570268 - DNA, 25 bp, Homo sapien
gacgacgaaggacacgaccagcact

SEQ ID NO: 1570269 - DNA, 25 bp, Homo sapien
ccttgtcccaggcattcttgaggaa

SEQ ID NO: 1570270 - DNA, 25 bp, Homo sapien
gcaagtttgcgcctggagcactcac

SEQ ID NO: 1570271 - DNA, 25 bp, Homo sapien
gggtggacgatgcaagtttgcgcct

SEQ ID NO: 1570272 - DNA, 25 bp, Homo sapien
cgatgcaagtttgcgcctggagcac

SEQ ID NO: 1570273 - DNA, 25 bp, Homo sapien
agtttgcgcctggagcactcacgca

SEQ ID NO: 1570274 - DNA, 25 bp, Homo sapien
gcgatggtggagaggttataatggg

SEQ ID NO: 1570275 - DNA, 25 bp, Homo sapien
tataatgggtatggggatagataag

SEQ ID NO: 1570276 - DNA, 25 bp, Homo sapien
tggtggagaggttataatgggtatg

SEQ ID NO: 1570277 - DNA, 25 bp, Homo sapien
agataaggggatgccgtgggggtgc

SEQ ID NO: 1570278 - DNA, 25 bp, Homo sapien
aagacacagattccccagtcccacc

SEQ ID NO: 1570279 - DNA, 25 bp, Homo sapien
cctgcaggaactccggtgctaatta

SEQ ID NO: 1570280 - DNA, 25 bp, Homo sapien
cacccaagccaactcaattcagaat

SEQ ID NO: 1570281 - DNA, 25 bp, Homo sapien
ggcacattgggatcatacggggatt

SEQ ID NO: 1570282 - DNA, 25 bp, Homo sapien
accagcagtactgacaagacctggg

SEQ ID NO: 1570283 - DNA, 25 bp, Homo sapien
gaccagcagtactgacaagacctgg

SEQ ID NO: 1570284 - DNA, 25 bp, Homo sapien
tcagtggccagttgtggctggtggc

SEQ ID NO: 1570285 - DNA, 25 bp, Homo sapien
aaatgctcagtggccagttgtggct

SEQ ID NO: 1570286 - DNA, 25 bp, Homo sapien
cagtggccagttgtggctggtggct

SEQ ID NO: 1570287 - DNA, 25 bp, Homo sapien
tgctcagtggccagttgtggctggt

SEQ ID NO: 1570288 - DNA, 25 bp, Homo sapien
cccgcgacacgcgtccgcgctccac

SEQ ID NO: 1570289 - DNA, 25 bp, Homo sapien
gtggagcgcggacgcgtgtcgcggg

SEQ ID NO: 1570290 - DNA, 25 bp, Homo sapien
tcaacaaaagattattggtagttta

SEQ ID NO: 1570291 - DNA, 25 bp, Homo sapien
gattattggtagtttacacactctg

SEQ ID NO: 1570292 - DNA, 25 bp, Homo sapien
cactctgttatactaagtttttgaa

SEQ ID NO: 1570293 - DNA, 25 bp, Homo sapien
gtttacacactctgttatactaagt

SEQ ID NO: 1570294 - DNA, 25 bp, Homo sapien
ggttggtcatggaatgagcacgttt

SEQ ID NO: 1570295 - DNA, 25 bp, Homo sapien
catggaatgagcacgtttgagtgta

SEQ ID NO: 1570296 - DNA, 25 bp, Homo sapien
ttgagtgtagggtcatcatggagca

SEQ ID NO: 1570297 - DNA, 25 bp, Homo sapien
catcatggagcatcctgggggtagt

SEQ ID NO: 1570298 - DNA, 25 bp, Homo sapien
gaagtaggggctcaatgggggcaga

SEQ ID NO: 1570299 - DNA, 25 bp, Homo sapien
aagtaggggctcaatgggggcagaa

SEQ ID NO: 1570300 - DNA, 25 bp, Homo sapien
tgaagtaggggctcaatgggggcag

SEQ ID NO: 1570301 - DNA, 25 bp, Homo sapien
cttgaagtaggggctcaatgggggc

SEQ ID NO: 1570302 - DNA, 25 bp, Homo sapien
gcgtggccttgttgatcatgacgga

SEQ ID NO: 1570303 - DNA, 25 bp, Homo sapien
gttgtagggcgtggccttgttgatc

SEQ ID NO: 1570304 - DNA, 25 bp, Homo sapien
gtagttgtagggcgtggccttgttg

SEQ ID NO: 1570305 - DNA, 25 bp, Homo sapien
agggcgtggccttgttgatcatgac

SEQ ID NO: 1570306 - DNA, 25 bp, Homo sapien
cagaatctctgataactgcttagga

SEQ ID NO: 1570307 - DNA, 25 bp, Homo sapien
taggaaagacctgcccataactgcc

SEQ ID NO: 1570308 - DNA, 25 bp, Homo sapien
gtccgggcaccactgcagaatctct

SEQ ID NO: 1570309 - DNA, 25 bp, Homo sapien
aaaacgaagcacaaacacagaatag

SEQ ID NO: 1570310 - DNA, 25 bp, Homo sapien
atagcgagggagagatcccgcgcac

SEQ ID NO: 1570311 - DNA, 25 bp, Homo sapien
tagagagctagggtcaaaagagatg

SEQ ID NO: 1570312 - DNA, 25 bp, Homo sapien
agagatcccgcgcactagagagcta

SEQ ID NO: 1570313 - DNA, 25 bp, Homo sapien
aaaccagagagatagcgagggagag

SEQ ID NO: 1570314 - DNA, 25 bp, Homo sapien
gtcagagaatcagtgatgcagaaag

SEQ ID NO: 1570315 - DNA, 25 bp, Homo sapien
gctggtctgtcgctttatgttcaga

SEQ ID NO: 1570316 - DNA, 25 bp, Homo sapien
gaagggtcagagaatcagtgatgca

SEQ ID NO: 1570317 - DNA, 25 bp, Homo sapien
gagagaagagctggtctgtcgcttt

SEQ ID NO: 1570318 - DNA, 25 bp, Homo sapien
ccactgagaccagcacgtctccagg

SEQ ID NO: 1570319 - DNA, 25 bp, Homo sapien
gggtggctgggcacgtcgggcatgt

SEQ ID NO: 1570320 - DNA, 25 bp, Homo sapien
atgttcccatcatcacggacgggca

SEQ ID NO: 1570321 - DNA, 25 bp, Homo sapien
catgttcccatcatcacggacgggc

SEQ ID NO: 1570322 - DNA, 25 bp, Homo sapien
ggcacgtcgggcatgttcccatcat

SEQ ID NO: 1570323 - DNA, 25 bp, Homo sapien
acatttttattgggagccgtgggag

SEQ ID NO: 1570324 - DNA, 25 bp, Homo sapien
cacatttttattgggagccgtggga

SEQ ID NO: 1570325 - DNA, 25 bp, Homo sapien
catttttattgggagccgtgggagg

SEQ ID NO: 1570326 - DNA, 25 bp, Homo sapien
tgacgcatgcccaataaactgaccc

SEQ ID NO: 1570327 - DNA, 25 bp, Homo sapien
cctgcagattaaggttgaggaagac

SEQ ID NO: 1570328 - DNA, 25 bp, Homo sapien
agctgatgggattttctagattccc

SEQ ID NO: 1570329 - DNA, 25 bp, Homo sapien
tctcggggtccagacaaactgctgc

SEQ ID NO: 1570330 - DNA, 25 bp, Homo sapien
ggcaatgcggagaatgagcctccag

SEQ ID NO: 1570331 - DNA, 25 bp, Homo sapien
ccggcgccagtgcaggtaaggaggg

SEQ ID NO: 1570332 - DNA, 25 bp, Homo sapien
agctggccccggtgcaggtgaggaa

SEQ ID NO: 1570333 - DNA, 25 bp, Homo sapien
atggacgccgagcaggaaatgcgct

SEQ ID NO: 1570334 - DNA, 25 bp, Homo sapien
caacatccagccgagggtgtcatgt

SEQ ID NO: 1570335 - DNA, 25 bp, Homo sapien
gtgtcatgtcgtttgcagagcagga

SEQ ID NO: 1570336 - DNA, 25 bp, Homo sapien
tgctcgaggtctcaaggctggtcaa

SEQ ID NO: 1570337 - DNA, 25 bp, Homo sapien
tcagcctcagaatggttgccttgtc

SEQ ID NO: 1570338 - DNA, 25 bp, Homo sapien
ccccgcgacacgcgtccgcgctcca

SEQ ID NO: 1570339 - DNA, 25 bp, Homo sapien
tggagcgcggacgcgtgtcgcgggg

SEQ ID NO: 1570340 - DNA, 25 bp, Homo sapien
gctggtgcagaggaggcattccatc

SEQ ID NO: 1570341 - DNA, 25 bp, Homo sapien
ctggtgcagaggaggcattccatca

SEQ ID NO: 1570342 - DNA, 25 bp, Homo sapien
tggccacaggtgagattttcactta

SEQ ID NO: 1570343 - DNA, 25 bp, Homo sapien
tgtccagcacggtagccgctggcca

SEQ ID NO: 1570344 - DNA, 25 bp, Homo sapien
gtgctgtccagcacggtagccgctg

SEQ ID NO: 1570345 - DNA, 25 bp, Homo sapien
ccacaggtgagattttcacttaagt

SEQ ID NO: 1570346 - DNA, 25 bp, Homo sapien
tgagctgtttcctatcaactaaggg

SEQ ID NO: 1570347 - DNA, 25 bp, Homo sapien
gcaagttttgtaggaatggctccac

SEQ ID NO: 1570348 - DNA, 25 bp, Homo sapien
catctcagtccttggctcaggctcg

SEQ ID NO: 1570349 - DNA, 25 bp, Homo sapien
ctaagggcagcaccaatatcatgag

SEQ ID NO: 1570350 - DNA, 25 bp, Homo sapien
caaagaggcggagaggctgcgtcct

SEQ ID NO: 1570351 - DNA, 25 bp, Homo sapien
gcggagaggctgcgtcctgcctcct

SEQ ID NO: 1570352 - DNA, 25 bp, Homo sapien
ggagaggctgcgtcctgcctcctca

SEQ ID NO: 1570353 - DNA, 25 bp, Homo sapien
ggcggagaggctgcgtcctgcctcc

SEQ ID NO: 1570354 - DNA, 25 bp, Homo sapien
cacgggatgtagaaacaagttgctg

SEQ ID NO: 1570355 - DNA, 25 bp, Homo sapien
ccaggctctggttaaggcacgggat

SEQ ID NO: 1570356 - DNA, 25 bp, Homo sapien
tctctgcaggtcgtaactaaagtcg

SEQ ID NO: 1570357 - DNA, 25 bp, Homo sapien
tccttattcaagtctgggcccacgg

SEQ ID NO: 1570358 - DNA, 25 bp, Homo sapien
gccagagccaaaacttgaactcttt

SEQ ID NO: 1570359 - DNA, 25 bp, Homo sapien
ccaagccagagccaaaacttgaact

SEQ ID NO: 1570360 - DNA, 25 bp, Homo sapien
tgtgccaagccagagccaaaacttg

SEQ ID NO: 1570361 - DNA, 25 bp, Homo sapien
tgccaagccagagccaaaacttgaa

SEQ ID NO: 1570362 - DNA, 25 bp, Homo sapien
catccaaggcaaggtgtcgacaggg

SEQ ID NO: 1570363 - DNA, 25 bp, Homo sapien
tagggtccctcaagcacagaaattc

SEQ ID NO: 1570364 - DNA, 25 bp, Homo sapien
tctggcagtcattggcacgtacaaa

SEQ ID NO: 1570365 - DNA, 25 bp, Homo sapien
cagaacttatcacaaatagggtccc

SEQ ID NO: 1570366 - DNA, 25 bp, Homo sapien
ggaagccaggactcttgcgtctggt

SEQ ID NO: 1570367 - DNA, 25 bp, Homo sapien
tgacagactaggaggttggaagcca

SEQ ID NO: 1570368 - DNA, 25 bp, Homo sapien
tgaaccctgtgggtgctgcgaaggg

SEQ ID NO: 1570369 - DNA, 25 bp, Homo sapien
tgctgcgaagggtgggttgcggact

SEQ ID NO: 1570370 - DNA, 25 bp, Homo sapien
taagcagagaatcgctgtggccgga

SEQ ID NO: 1570371 - DNA, 25 bp, Homo sapien
ttagcacctggcactaggcggagag

SEQ ID NO: 1570372 - DNA, 25 bp, Homo sapien
gctgtggaccgatcctgctaagcag

SEQ ID NO: 1570373 - DNA, 25 bp, Homo sapien
tctcgcgccgttatagaggcaaagc

SEQ ID NO: 1570374 - DNA, 25 bp, Homo sapien
caaacaaacaactggccaggcgcgg

SEQ ID NO: 1570375 - DNA, 25 bp, Homo sapien
tggatcatgcctgtaatcacagcac

SEQ ID NO: 1570376 - DNA, 25 bp, Homo sapien
aaacaaacaaacaactggccaggcg

SEQ ID NO: 1570377 - DNA, 25 bp, Homo sapien
attagtcaggggtggtggcgggcgc

SEQ ID NO: 1570378 - DNA, 25 bp, Homo sapien
cgagatcagctaagagctcatctgc

SEQ ID NO: 1570379 - DNA, 25 bp, Homo sapien
tcagctaagagctcatctgccagag

SEQ ID NO: 1570380 - DNA, 25 bp, Homo sapien
tgcacatcctcgatcgctggctcct

SEQ ID NO: 1570381 - DNA, 25 bp, Homo sapien
gcctcttcgagatcagctaagagct

SEQ ID NO: 1570382 - DNA, 25 bp, Homo sapien
ggtcttgactgaatccccggaaaga

SEQ ID NO: 1570383 - DNA, 25 bp, Homo sapien
atcttactatcccatagcttggcga

SEQ ID NO: 1570384 - DNA, 25 bp, Homo sapien
cttactatcccatagcttggcgatg

SEQ ID NO: 1570385 - DNA, 25 bp, Homo sapien
tcttgactgaatccccggaaagatc

SEQ ID NO: 1570386 - DNA, 25 bp, Homo sapien
ttgctgatatactcctcaatcttca

SEQ ID NO: 1570387 - DNA, 25 bp, Homo sapien
tgctgatatactcctcaatcttcat

SEQ ID NO: 1570388 - DNA, 25 bp, Homo sapien
gctgatatactcctcaatcttcatc

SEQ ID NO: 1570389 - DNA, 25 bp, Homo sapien
tgacgcggtattcaggcgcggcctc

SEQ ID NO: 1570390 - DNA, 25 bp, Homo sapien
tttcgatctccacggtcaggttgtt

SEQ ID NO: 1570391 - DNA, 25 bp, Homo sapien
aggttgttggcatccacgatgacgc

SEQ ID NO: 1570392 - DNA, 25 bp, Homo sapien
tcagctcgttttcgatctccacggt

SEQ ID NO: 1570393 - DNA, 25 bp, Homo sapien
aggtcaacctcgatctgagcttggg

SEQ ID NO: 1570394 - DNA, 25 bp, Homo sapien
tcatacgcgagagaacgcacttcct

SEQ ID NO: 1570395 - DNA, 25 bp, Homo sapien
tctggtctgtaaaacgtgagctgca

SEQ ID NO: 1570396 - DNA, 25 bp, Homo sapien
gagtgctcctcagactcatacgcga

SEQ ID NO: 1570397 - DNA, 25 bp, Homo sapien
gtacttatcccggatgaacttatgg

SEQ ID NO: 1570398 - DNA, 25 bp, Homo sapien
tcccggatgaacttatggatgatgt

SEQ ID NO: 1570399 - DNA, 25 bp, Homo sapien
gtaatccagtgcattggggaccaag

SEQ ID NO: 1570400 - DNA, 25 bp, Homo sapien
ccagttcagggaatctctttgagta

SEQ ID NO: 1570401 - DNA, 25 bp, Homo sapien
gaaggctcgagaacctctcttgctc

SEQ ID NO: 1570402 - DNA, 25 bp, Homo sapien
aactcaggaaggctcgagaacctct

SEQ ID NO: 1570403 - DNA, 25 bp, Homo sapien
tcaggaaggctcgagaacctctctt

SEQ ID NO: 1570404 - DNA, 25 bp, Homo sapien
agataggggaggctcgggaactcag

SEQ ID NO: 1570405 - DNA, 25 bp, Homo sapien
tgacgctgacgaccatgatggtggc

SEQ ID NO: 1570406 - DNA, 25 bp, Homo sapien
tggtggaggcggtgacgctgacgac

SEQ ID NO: 1570407 - DNA, 25 bp, Homo sapien
gctgcaggttctcattgttcttgca

SEQ ID NO: 1570408 - DNA, 25 bp, Homo sapien
ggatctgctgcaggttctcattgtt

SEQ ID NO: 1570409 - DNA, 25 bp, Homo sapien
tgcgatgaaggacatccgggactcc

SEQ ID NO: 1570410 - DNA, 25 bp, Homo sapien
ttggaggcgttcagctccagcgcca

SEQ ID NO: 1570411 - DNA, 25 bp, Homo sapien
tgccccgataatgatggacaggttg

SEQ ID NO: 1570412 - DNA, 25 bp, Homo sapien
catactcgtagatgcggtgcttgga

SEQ ID NO: 1570413 - DNA, 25 bp, Homo sapien
gagaggttggtcaggccgccggcca

SEQ ID NO: 1570414 - DNA, 25 bp, Homo sapien
tgggccccgagcagcatgatgttgc

SEQ ID NO: 1570415 - DNA, 25 bp, Homo sapien
catgatgttgcaggcgggcatcttg

SEQ ID NO: 1570416 - DNA, 25 bp, Homo sapien
gacgagaagcccgacagcgtcttgc

SEQ ID NO: 1570417 - DNA, 25 bp, Homo sapien
tgctctcgtggaaactgtccacacg

SEQ ID NO: 1570418 - DNA, 25 bp, Homo sapien
ctctcgtggaaactgtccacacggg

SEQ ID NO: 1570419 - DNA, 25 bp, Homo sapien
tgtgctctcgtggaaactgtccaca

SEQ ID NO: 1570420 - DNA, 25 bp, Homo sapien
tgtccacacgggctgccagtgtgca

SEQ ID NO: 1570421 - DNA, 25 bp, Homo sapien
ttgacccggccccaacaagaatgtc

SEQ ID NO: 1570422 - DNA, 25 bp, Homo sapien
cccgagtatccacgtgccttagtta

SEQ ID NO: 1570423 - DNA, 25 bp, Homo sapien
gctagacgcaggacagagttcacct

SEQ ID NO: 1570424 - DNA, 25 bp, Homo sapien
tgttgacttagcaccgctagacgca

SEQ ID NO: 1570425 - DNA, 25 bp, Homo sapien
gaatttgcgctcgatctcatccttc

SEQ ID NO: 1570426 - DNA, 25 bp, Homo sapien
gtcgaatttgcgctcgatctcatcc

SEQ ID NO: 1570427 - DNA, 25 bp, Homo sapien
gatctcatccttcagttcgtagccc

SEQ ID NO: 1570428 - DNA, 25 bp, Homo sapien
tgcgctcgatctcatccttcagttc

SEQ ID NO: 1570429 - DNA, 25 bp, Homo sapien
tcacctgcttcacaggcggcggctc

SEQ ID NO: 1570430 - DNA, 25 bp, Homo sapien
catgacccccatgcctaccggaccc

SEQ ID NO: 1570431 - DNA, 25 bp, Homo sapien
gctcatacggttggcctgcttccgg

SEQ ID NO: 1570432 - DNA, 25 bp, Homo sapien
ccgaagctcatacggttggcctgct

SEQ ID NO: 1570433 - DNA, 25 bp, Homo sapien
gaagctcatacggttggcctgcttc

SEQ ID NO: 1570434 - DNA, 25 bp, Homo sapien
ccagccgctccttcatcttgcggta

SEQ ID NO: 1570435 - DNA, 25 bp, Homo sapien
ggtggcctctgagttcggtcctgca

SEQ ID NO: 1570436 - DNA, 25 bp, Homo sapien
tgcagcagggcactaaggagcctct

SEQ ID NO: 1570437 - DNA, 25 bp, Homo sapien
acaggtttaataggatgaggtggcc

SEQ ID NO: 1570438 - DNA, 25 bp, Homo sapien
atgacgctgggataacagaggagac

SEQ ID NO: 1570439 - DNA, 25 bp, Homo sapien
tgtgtctgccgcacacgcccactgc

SEQ ID NO: 1570440 - DNA, 25 bp, Homo sapien
gccttggtggcctcgtttacctgtg

SEQ ID NO: 1570441 - DNA, 25 bp, Homo sapien
cccactgcccgacttgcccaggtgg

SEQ ID NO: 1570442 - DNA, 25 bp, Homo sapien
ggtggcctcgtttacctgtgtctgc

SEQ ID NO: 1570443 - DNA, 25 bp, Homo sapien
ggaggacagggaggctgcgatctgg

SEQ ID NO: 1570444 - DNA, 25 bp, Homo sapien
gcgatctgggctccccccaccttgt

SEQ ID NO: 1570445 - DNA, 25 bp, Homo sapien
caccttgtgtccctcggtccccagc

SEQ ID NO: 1570446 - DNA, 25 bp, Homo sapien
cagggaggctgcgatctgggctccc

SEQ ID NO: 1570447 - DNA, 25 bp, Homo sapien
gaggccgtgcccgaggagcggtcgc

SEQ ID NO: 1570448 - DNA, 25 bp, Homo sapien
tggacttcccgccatatacgacgct

SEQ ID NO: 1570449 - DNA, 25 bp, Homo sapien
ccgaggagcggtcgcggatggtgga

SEQ ID NO: 1570450 - DNA, 25 bp, Homo sapien
agcggtcgcggatggtggacttccc

SEQ ID NO: 1570451 - DNA, 25 bp, Homo sapien
gaactcagccatgctggagaaatac

SEQ ID NO: 1570452 - DNA, 25 bp, Homo sapien
aggaactcagccatgctggagaaat

SEQ ID NO: 1570453 - DNA, 25 bp, Homo sapien
cagccatgctggagaaatacttctg

SEQ ID NO: 1570454 - DNA, 25 bp, Homo sapien
ctcagccatgctggagaaatacttc

SEQ ID NO: 1570455 - DNA, 25 bp, Homo sapien
tcaggtggacataaggccactcttc

SEQ ID NO: 1570456 - DNA, 25 bp, Homo sapien
ccgatcctagcccttcagaaggact

SEQ ID NO: 1570457 - DNA, 25 bp, Homo sapien
cagaaggactggacctctgtgtccc

SEQ ID NO: 1570458 - DNA, 25 bp, Homo sapien
gatgaagacctgctctagcccatac

SEQ ID NO: 1570459 - DNA, 25 bp, Homo sapien
catactgggcggtgatctcggtcct

SEQ ID NO: 1570460 - DNA, 25 bp, Homo sapien
tgattcttctagttgccccggctgt

SEQ ID NO: 1570461 - DNA, 25 bp, Homo sapien
agctctgattcttctagttgccccg

SEQ ID NO: 1570462 - DNA, 25 bp, Homo sapien
tctgattcttctagttgccccggct

SEQ ID NO: 1570463 - DNA, 25 bp, Homo sapien
gattcttctagttgccccggctgtt

SEQ ID NO: 1570464 - DNA, 25 bp, Homo sapien
aagggagtgggcctagacaccgctt

SEQ ID NO: 1570465 - DNA, 25 bp, Homo sapien
tcggcctgcgctgagatctgcggct

SEQ ID NO: 1570466 - DNA, 25 bp, Homo sapien
tgggatcccatgacgagaaagtaac

SEQ ID NO: 1570467 - DNA, 25 bp, Homo sapien
gtggacagcaatcccggtcggcctg

SEQ ID NO: 1570468 - DNA, 25 bp, Homo sapien
tcacctggcaggacttttatagcaa

SEQ ID NO: 1570469 - DNA, 25 bp, Homo sapien
cacctggcaggacttttatagcaac

SEQ ID NO: 1570470 - DNA, 25 bp, Homo sapien
gctcacctggcaggacttttatagc

SEQ ID NO: 1570471 - DNA, 25 bp, Homo sapien
cctggcaggacttttatagcaacca

SEQ ID NO: 1570472 - DNA, 25 bp, Homo sapien
gtctgccgatggctccgcggaagct

SEQ ID NO: 1570473 - DNA, 25 bp, Homo sapien
tcattgctcctgctgaacgtcgctc

SEQ ID NO: 1570474 - DNA, 25 bp, Homo sapien
cgccgctgaggagcgtatcgcgaca

SEQ ID NO: 1570475 - DNA, 25 bp, Homo sapien
ccgagtcccgaatataggccagtca

SEQ ID NO: 1570476 - DNA, 25 bp, Homo sapien
gaacgtgaaagaggcgcaggaacgg

SEQ ID NO: 1570477 - DNA, 25 bp, Homo sapien
cgggaggcgctgaggaacgtgaaag

SEQ ID NO: 1570478 - DNA, 25 bp, Homo sapien
ggagccccgcgctgcagaggcggcg

SEQ ID NO: 1570479 - DNA, 25 bp, Homo sapien
cgcaggaacgggagggcgagaggga

SEQ ID NO: 1570480 - DNA, 25 bp, Homo sapien
ggacacatgcagaggcgtggacacc

SEQ ID NO: 1570481 - DNA, 25 bp, Homo sapien
cagaggcgtggacacctcaaatcca

SEQ ID NO: 1570482 - DNA, 25 bp, Homo sapien
ggcgtggacacctcaaatccagaaa

SEQ ID NO: 1570483 - DNA, 25 bp, Homo sapien
catgcagaggcgtggacacctcaaa

SEQ ID NO: 1570484 - DNA, 25 bp, Homo sapien
gagggagccgatctgcactcatgga

SEQ ID NO: 1570485 - DNA, 25 bp, Homo sapien
gaggtcatccctcagacaagtcagg

SEQ ID NO: 1570486 - DNA, 25 bp, Homo sapien
tcagggagacatagaccatcagggc

SEQ ID NO: 1570487 - DNA, 25 bp, Homo sapien
tctgagataccagcggagattgccc

SEQ ID NO: 1570488 - DNA, 25 bp, Homo sapien
cttcatactctcttggagacggacg

SEQ ID NO: 1570489 - DNA, 25 bp, Homo sapien
cttccctgccctacagacgcactct

SEQ ID NO: 1570490 - DNA, 25 bp, Homo sapien
cttggagtttgcgcttgtccgccat

SEQ ID NO: 1570491 - DNA, 25 bp, Homo sapien
cttcttgaggcagcgatcaatctca

SEQ ID NO: 1570492 - DNA, 25 bp, Homo sapien
accttcttgaggcagcgatcaatct

SEQ ID NO: 1570493 - DNA, 25 bp, Homo sapien
cgccctcggacaccttcttgaggca

SEQ ID NO: 1570494 - DNA, 25 bp, Homo sapien
tgctccacgccctcggacaccttct

SEQ ID NO: 1570495 - DNA, 25 bp, Homo sapien
gattctcttaggtcctcagcatctg

SEQ ID NO: 1570496 - DNA, 25 bp, Homo sapien
cgctggtcaacacccagaggtcctg

SEQ ID NO: 1570497 - DNA, 25 bp, Homo sapien
cttatgctagggactcgaggacccc

SEQ ID NO: 1570498 - DNA, 25 bp, Homo sapien
cagattattagggtctcagcccctg

SEQ ID NO: 1570499 - DNA, 25 bp, Homo sapien
tcttaatctccttctttaggtcagc

SEQ ID NO: 1570500 - DNA, 25 bp, Homo sapien
tctggttcgcgttggctgcattgtg

SEQ ID NO: 1570501 - DNA, 25 bp, Homo sapien
taggtcagcctcatacttttctttc

SEQ ID NO: 1570502 - DNA, 25 bp, Homo sapien
ttttctttctggttcgcgttggctg

SEQ ID NO: 1570503 - DNA, 25 bp, Homo sapien
gctacccatgtcttgatttggtccc

SEQ ID NO: 1570504 - DNA, 25 bp, Homo sapien
tgcggttgtctataagctgcctctt

SEQ ID NO: 1570505 - DNA, 25 bp, Homo sapien
tccttgatctcgttggacgctaccc

SEQ ID NO: 1570506 - DNA, 25 bp, Homo sapien
cgtctcaatgagcttgcggttgtct

SEQ ID NO: 1570507 - DNA, 25 bp, Homo sapien
tgggactcaggctctgggctcctac

SEQ ID NO: 1570508 - DNA, 25 bp, Homo sapien
ctctctgggactcaggctctgggct

SEQ ID NO: 1570509 - DNA, 25 bp, Homo sapien
ctctgggactcaggctctgggctcc

SEQ ID NO: 1570510 - DNA, 25 bp, Homo sapien
ctgggactcaggctctgggctccta

SEQ ID NO: 1570511 - DNA, 25 bp, Homo sapien
tctgggcaggatctaccttctgggc

SEQ ID NO: 1570512 - DNA, 25 bp, Homo sapien
tgtaagctttggttttggtctctcg

SEQ ID NO: 1570513 - DNA, 25 bp, Homo sapien
tggtctctcgttccacaactttgaa

SEQ ID NO: 1570514 - DNA, 25 bp, Homo sapien
ccacaactttgaaccgttccatttg

SEQ ID NO: 1570515 - DNA, 25 bp, Homo sapien
acctgcatgttgagcgtgtcgatgg

SEQ ID NO: 1570516 - DNA, 25 bp, Homo sapien
tgtcgcccttcttcttgcgtgtctg

SEQ ID NO: 1570517 - DNA, 25 bp, Homo sapien
tgcactgacagtgactccacttcac

SEQ ID NO: 1570518 - DNA, 25 bp, Homo sapien
tcttcttgcgtgtctgcactgacag

SEQ ID NO: 1570519 - DNA, 25 bp, Homo sapien
ctggcgagcccagggccaggctcag

SEQ ID NO: 1570520 - DNA, 25 bp, Homo sapien
tcaggggctgcagagcacctgcttg

SEQ ID NO: 1570521 - DNA, 25 bp, Homo sapien
gggctgcagagcacctgcttggccc

SEQ ID NO: 1570522 - DNA, 25 bp, Homo sapien
ctgcagagcacctgcttggcccctc

SEQ ID NO: 1570523 - DNA, 25 bp, Homo sapien
tccaggtcatcgtagagaaactcgt

SEQ ID NO: 1570524 - DNA, 25 bp, Homo sapien
tctagcatgcgcacgtggtagcggt

SEQ ID NO: 1570525 - DNA, 25 bp, Homo sapien
tgatcttgcggatggcgtcaacgag

SEQ ID NO: 1570526 - DNA, 25 bp, Homo sapien
tccagcatgcgcaggatggtctcta

SEQ ID NO: 1570527 - DNA, 25 bp, Homo sapien
tgtgccacgatcagccccagggcct

SEQ ID NO: 1570528 - DNA, 25 bp, Homo sapien
ggccctcacttcctgtgccacgatc

SEQ ID NO: 1570529 - DNA, 25 bp, Homo sapien
ctcacttcctgtgccacgatcagcc

SEQ ID NO: 1570530 - DNA, 25 bp, Homo sapien
tcctgtgccacgatcagccccaggg

SEQ ID NO: 1570531 - DNA, 25 bp, Homo sapien
gaggtggttgaggtgggcgtgctgc

SEQ ID NO: 1570532 - DNA, 25 bp, Homo sapien
ggctgggcgggatgggagagctgga

SEQ ID NO: 1570533 - DNA, 25 bp, Homo sapien
tgctggactggttgaagatctcatc

SEQ ID NO: 1570534 - DNA, 25 bp, Homo sapien
gatctcatcctccatgtggctgtgg

SEQ ID NO: 1570535 - DNA, 25 bp, Homo sapien
gtggaacgtcccctcttcttatcat

SEQ ID NO: 1570536 - DNA, 25 bp, Homo sapien
tgtctgtggaacgtcccctcttctt

SEQ ID NO: 1570537 - DNA, 25 bp, Homo sapien
cttcactgtctgtggaacgtcccct

SEQ ID NO: 1570538 - DNA, 25 bp, Homo sapien
tcactgtctgtggaacgtcccctct

SEQ ID NO: 1570539 - DNA, 25 bp, Homo sapien
acaggactgactacccacttctctc

SEQ ID NO: 1570540 - DNA, 25 bp, Homo sapien
aggactgactacccacttctctcct

SEQ ID NO: 1570541 - DNA, 25 bp, Homo sapien
caacaggactgactacccacttctc

SEQ ID NO: 1570542 - DNA, 25 bp, Homo sapien
aacaggactgactacccacttctct

SEQ ID NO: 1570543 - DNA, 25 bp, Homo sapien
gcttggagccgtttttggctggaga

SEQ ID NO: 1570544 - DNA, 25 bp, Homo sapien
gggaccccattgttgccaggagtgg

SEQ ID NO: 1570545 - DNA, 25 bp, Homo sapien
caggagtggtgctcaaggcagaggc

SEQ ID NO: 1570546 - DNA, 25 bp, Homo sapien
gctggttgctgtggacaggcttgga

SEQ ID NO: 1570547 - DNA, 25 bp, Homo sapien
ctccgcctccgctaggctggacgct

SEQ ID NO: 1570548 - DNA, 25 bp, Homo sapien
cccctccaccggcactgctgttact

SEQ ID NO: 1570549 - DNA, 25 bp, Homo sapien
caccggcactgctgttactactgct

SEQ ID NO: 1570550 - DNA, 25 bp, Homo sapien
ccgcctccgctaggctggacgctgg

SEQ ID NO: 1570551 - DNA, 25 bp, Homo sapien
cctctgccgggctgtctgccacaac

SEQ ID NO: 1570552 - DNA, 25 bp, Homo sapien
ctctgccgggctgtctgccacaact

SEQ ID NO: 1570553 - DNA, 25 bp, Homo sapien
ccacctctgccgggctgtctgccac

SEQ ID NO: 1570554 - DNA, 25 bp, Homo sapien
acctctgccgggctgtctgccacaa

SEQ ID NO: 1570555 - DNA, 25 bp, Homo sapien
ggtccccctgagttgttccctgagc

SEQ ID NO: 1570556 - DNA, 25 bp, Homo sapien
ttggggctgccgcactgggttcctt

SEQ ID NO: 1570557 - DNA, 25 bp, Homo sapien
cttgatttctggggcggtgctgaac

SEQ ID NO: 1570558 - DNA, 25 bp, Homo sapien
aggcccattgagcagggcaccggct

SEQ ID NO: 1570559 - DNA, 25 bp, Homo sapien
tgatggctgcccgttccgccatgga

SEQ ID NO: 1570560 - DNA, 25 bp, Homo sapien
atggctgcccgttccgccatggact

SEQ ID NO: 1570561 - DNA, 25 bp, Homo sapien
tcggtcaggtgcagcgttggcacag

SEQ ID NO: 1570562 - DNA, 25 bp, Homo sapien
agctgatggctgcccgttccgccat

SEQ ID NO: 1570563 - DNA, 25 bp, Homo sapien
gacacccagcgacagcggtatgttc

SEQ ID NO: 1570564 - DNA, 25 bp, Homo sapien
gaggccggaggtgctgatgtactgc

SEQ ID NO: 1570565 - DNA, 25 bp, Homo sapien
ccagtggacagacacccagcgacag

SEQ ID NO: 1570566 - DNA, 25 bp, Homo sapien
gcgacagcggtatgttcacctctga

SEQ ID NO: 1570567 - DNA, 25 bp, Homo sapien
cgaatacgctcagagtcagaggggt

SEQ ID NO: 1570568 - DNA, 25 bp, Homo sapien
tcagaggggtgaggcatgtggtgcc

SEQ ID NO: 1570569 - DNA, 25 bp, Homo sapien
ctcttccatggcctgctgatagagc

SEQ ID NO: 1570570 - DNA, 25 bp, Homo sapien
catggcctgctgatagagctgctcc

SEQ ID NO: 1570571 - DNA, 25 bp, Homo sapien
aagaagagtgtctcggtcgacaggc

SEQ ID NO: 1570572 - DNA, 25 bp, Homo sapien
cgacaggcgctggtagaattccaca

SEQ ID NO: 1570573 - DNA, 25 bp, Homo sapien
gaattccacagtgtccgagtgtggg

SEQ ID NO: 1570574 - DNA, 25 bp, Homo sapien
tctcggtcgacaggcgctggtagaa

SEQ ID NO: 1570575 - DNA, 25 bp, Homo sapien
gcgaagccggggggcccgaggctgc

SEQ ID NO: 1570576 - DNA, 25 bp, Homo sapien
ccgaggctgccccgggggccctgct

SEQ ID NO: 1570577 - DNA, 25 bp, Homo sapien
ggctgccccgggggccctgctgtac

SEQ ID NO: 1570578 - DNA, 25 bp, Homo sapien
gaggctgccccgggggccctgctgt

SEQ ID NO: 1570579 - DNA, 25 bp, Homo sapien
agcctcgctgtcaacccaagcagtt

SEQ ID NO: 1570580 - DNA, 25 bp, Homo sapien
tgaggtgtgcctcagtggaccagcc

SEQ ID NO: 1570581 - DNA, 25 bp, Homo sapien
acccaagcagttctaacatctctgg

SEQ ID NO: 1570582 - DNA, 25 bp, Homo sapien
gcctgagaatgtgccgatgagcaga

SEQ ID NO: 1570583 - DNA, 25 bp, Homo sapien
ggcaggacatcagggctgaaccccg

SEQ ID NO: 1570584 - DNA, 25 bp, Homo sapien
ctgggggcacagaacataccaatgc

SEQ ID NO: 1570585 - DNA, 25 bp, Homo sapien
ccacagttgggctggacaatcctct

SEQ ID NO: 1570586 - DNA, 25 bp, Homo sapien
gacaggaggtgaaaattgctttcag

SEQ ID NO: 1570587 - DNA, 25 bp, Homo sapien
catcatgtacttggtgtggaatcgc

SEQ ID NO: 1570588 - DNA, 25 bp, Homo sapien
tgctcaaactcgtcagtgatggtct

SEQ ID NO: 1570589 - DNA, 25 bp, Homo sapien
tgtggaatcgccatgactgcttctt

SEQ ID NO: 1570590 - DNA, 25 bp, Homo sapien
tctggaaccacatcatgtacttggt

SEQ ID NO: 1570591 - DNA, 25 bp, Homo sapien
ccaaccctagcagcgggaagagagg

SEQ ID NO: 1570592 - DNA, 25 bp, Homo sapien
tctaccccaaccctagcagcgggaa

SEQ ID NO: 1570593 - DNA, 25 bp, Homo sapien
cccaaccctagcagcgggaagagag

SEQ ID NO: 1570594 - DNA, 25 bp, Homo sapien
taccccaaccctagcagcgggaaga

SEQ ID NO: 1570595 - DNA, 25 bp, Homo sapien
tgggggccatcaaggtccctcggca

SEQ ID NO: 1570596 - DNA, 25 bp, Homo sapien
tagaacttgagaagcccattcaaaa

SEQ ID NO: 1570597 - DNA, 25 bp, Homo sapien
aaatagtttcggcactgagcccctg

SEQ ID NO: 1570598 - DNA, 25 bp, Homo sapien
gacatttgggctgagacctacagga

SEQ ID NO: 1570599 - DNA, 25 bp, Homo sapien
ggtactgtcacccttgttctagaga

SEQ ID NO: 1570600 - DNA, 25 bp, Homo sapien
ttatcatgccacttcagcgaggagg

SEQ ID NO: 1570601 - DNA, 25 bp, Homo sapien
tgacttgcctagagtcgcccagctg

SEQ ID NO: 1570602 - DNA, 25 bp, Homo sapien
taatcttcacaaagacctcgaggca

SEQ ID NO: 1570603 - DNA, 25 bp, Homo sapien
ggggagaaggcggtcagtgagtgga

SEQ ID NO: 1570604 - DNA, 25 bp, Homo sapien
aaggcggtcagtgagtggacgagga

SEQ ID NO: 1570605 - DNA, 25 bp, Homo sapien
gagaaggcggtcagtgagtggacga

SEQ ID NO: 1570606 - DNA, 25 bp, Homo sapien
aggcggtcagtgagtggacgaggag

SEQ ID NO: 1570607 - DNA, 25 bp, Homo sapien
ttccttcttccgctggccccacttc

SEQ ID NO: 1570608 - DNA, 25 bp, Homo sapien
ctggccccacttctcgtagtcaaag

SEQ ID NO: 1570609 - DNA, 25 bp, Homo sapien
cacttctcgtagtcaaagtagatgt

SEQ ID NO: 1570610 - DNA, 25 bp, Homo sapien
cgtagtcaaagtagatgtaggtgcc

SEQ ID NO: 1570611 - DNA, 25 bp, Homo sapien
tggaggtcccggtcctccaggtagc

SEQ ID NO: 1570612 - DNA, 25 bp, Homo sapien
ctggaggtcccggtcctccaggtag

SEQ ID NO: 1570613 - DNA, 25 bp, Homo sapien
cactggaggtcccggtcctccaggt

SEQ ID NO: 1570614 - DNA, 25 bp, Homo sapien
tcactggaggtcccggtcctccagg

SEQ ID NO: 1570615 - DNA, 25 bp, Homo sapien
gggatcagcatgcgggggaaggggg

SEQ ID NO: 1570616 - DNA, 25 bp, Homo sapien
gatcagcatgcgggggaagggggtg

SEQ ID NO: 1570617 - DNA, 25 bp, Homo sapien
cagcatgcgggggaagggggtgggt

SEQ ID NO: 1570618 - DNA, 25 bp, Homo sapien
atcagcatgcgggggaagggggtgg

SEQ ID NO: 1570619 - DNA, 25 bp, Homo sapien
atgccccgtggcttggggcctccct

SEQ ID NO: 1570620 - DNA, 25 bp, Homo sapien
actacaggagggtcagccggaagaa

SEQ ID NO: 1570621 - DNA, 25 bp, Homo sapien
cagcttcgagctgaacgtctgcgga

SEQ ID NO: 1570622 - DNA, 25 bp, Homo sapien
ggcggcggtacaactcccaattcaa

SEQ ID NO: 1570623 - DNA, 25 bp, Homo sapien
ccggaagaagacgagacggatgacc

SEQ ID NO: 1570624 - DNA, 25 bp, Homo sapien
gggtctgagaagcagcgacccaagg

SEQ ID NO: 1570625 - DNA, 25 bp, Homo sapien
tctgagaagcagcgacccaaggagt

SEQ ID NO: 1570626 - DNA, 25 bp, Homo sapien
ggtctgagaagcagcgacccaagga

SEQ ID NO: 1570627 - DNA, 25 bp, Homo sapien
gaaggcagtcgcagcagaaaggaaa

SEQ ID NO: 1570628 - DNA, 25 bp, Homo sapien
tgtagatgtagtttcccctttctca

SEQ ID NO: 1570629 - DNA, 25 bp, Homo sapien
tgccttcaatgactgtgtctccgcc

SEQ ID NO: 1570630 - DNA, 25 bp, Homo sapien
ctgcaccccagaactgtctctgaat

SEQ ID NO: 1570631 - DNA, 25 bp, Homo sapien
ctgtacttcttatgggtctttgacc

SEQ ID NO: 1570632 - DNA, 25 bp, Homo sapien
ctccatgctgggcggcagagcgaaa

SEQ ID NO: 1570633 - DNA, 25 bp, Homo sapien
ccatgctgggcggcagagcgaaact

SEQ ID NO: 1570634 - DNA, 25 bp, Homo sapien
gcactccatgctgggcggcagagcg

SEQ ID NO: 1570635 - DNA, 25 bp, Homo sapien
actccatgctgggcggcagagcgaa

SEQ ID NO: 1570636 - DNA, 25 bp, Homo sapien
tctgcctagcattaggtttctttct

SEQ ID NO: 1570637 - DNA, 25 bp, Homo sapien
gcaacgttgtgcaaatagaatcata

SEQ ID NO: 1570638 - DNA, 25 bp, Homo sapien
ctggcttcttctgcctagcattagg

SEQ ID NO: 1570639 - DNA, 25 bp, Homo sapien
aagctgtgctctgcaacgttgtgca

SEQ ID NO: 1570640 - DNA, 25 bp, Homo sapien
tggggacggccgtcccatggcttcc

SEQ ID NO: 1570641 - DNA, 25 bp, Homo sapien
ttctcatcgcttggcctatgacagg

SEQ ID NO: 1570642 - DNA, 25 bp, Homo sapien
accccagcgctcctggcgccctctt

SEQ ID NO: 1570643 - DNA, 25 bp, Homo sapien
tggcgccctcttctcatcgcttggc

SEQ ID NO: 1570644 - DNA, 25 bp, Homo sapien
tgggaacttgaggatcgtcaccctg

SEQ ID NO: 1570645 - DNA, 25 bp, Homo sapien
gtatctggcgaacctgttgactccg

SEQ ID NO: 1570646 - DNA, 25 bp, Homo sapien
tgtaaatactcatgggtatctggcg

SEQ ID NO: 1570647 - DNA, 25 bp, Homo sapien
cctttgagggcaagtcgctttcgcc

SEQ ID NO: 1570648 - DNA, 25 bp, Homo sapien
cgtcaacttcgtcatcccgccccat

SEQ ID NO: 1570649 - DNA, 25 bp, Homo sapien
gacaccctcgtcaacttcgtcatcc

SEQ ID NO: 1570650 - DNA, 25 bp, Homo sapien
cccctcatgccgacaccctcgtcaa

SEQ ID NO: 1570651 - DNA, 25 bp, Homo sapien
atgccgacaccctcgtcaacttcgt

SEQ ID NO: 1570652 - DNA, 25 bp, Homo sapien
aacagtaattcgcagtcgaggtgga

SEQ ID NO: 1570653 - DNA, 25 bp, Homo sapien
ctcataaacagtaattcgcagtcga

SEQ ID NO: 1570654 - DNA, 25 bp, Homo sapien
agtaattcgcagtcgaggtggagcc

SEQ ID NO: 1570655 - DNA, 25 bp, Homo sapien
cataaacagtaattcgcagtcgagg

SEQ ID NO: 1570656 - DNA, 25 bp, Homo sapien
tgggagcgctcagtccgcctccttg

SEQ ID NO: 1570657 - DNA, 25 bp, Homo sapien
caattgggagcgctcagtccgcctc

SEQ ID NO: 1570658 - DNA, 25 bp, Homo sapien
gtcccactgtccaccgatagaacca

SEQ ID NO: 1570659 - DNA, 25 bp, Homo sapien
tccaccgatagaaccagcgagtcac

SEQ ID NO: 1570660 - DNA, 25 bp, Homo sapien
ttgacgttcgggtgttctcggctcg

SEQ ID NO: 1570661 - DNA, 25 bp, Homo sapien
aataggttcggcgttcgggcgtcat

SEQ ID NO: 1570662 - DNA, 25 bp, Homo sapien
gtgattcggctttcggacctcctcg

SEQ ID NO: 1570663 - DNA, 25 bp, Homo sapien
ttcccgaacgccagcaatttgacgt

SEQ ID NO: 1570664 - DNA, 25 bp, Homo sapien
tcgggtgttcccgtcagcggtcaga

SEQ ID NO: 1570665 - DNA, 25 bp, Homo sapien
cagcggtcagaagctctggaggcta

SEQ ID NO: 1570666 - DNA, 25 bp, Homo sapien
aaaacaaacctccgcaagcgcggcg

SEQ ID NO: 1570667 - DNA, 25 bp, Homo sapien
aaggtccattttggcaccaccctct

SEQ ID NO: 1570668 - DNA, 25 bp, Homo sapien
tacccttgtgaccctgcggtcggca

SEQ ID NO: 1570669 - DNA, 25 bp, Homo sapien
ctctgtgcccgcactgccgtaccta

SEQ ID NO: 1570670 - DNA, 25 bp, Homo sapien
ccggagacgagacgccggagacaag

SEQ ID NO: 1570671 - DNA, 25 bp, Homo sapien
gaggcaaagcagttaccgaaacagc

SEQ ID NO: 1570672 - DNA, 25 bp, Homo sapien
cccacaccagggagcggccgttcgc

SEQ ID NO: 1570673 - DNA, 25 bp, Homo sapien
accagggagcggccgttcgccacct

SEQ ID NO: 1570674 - DNA, 25 bp, Homo sapien
gggagcggccgttcgccacctccac

SEQ ID NO: 1570675 - DNA, 25 bp, Homo sapien
ccccacaccagggagcggccgttcg

SEQ ID NO: 1570676 - DNA, 25 bp, Homo sapien
aggcccaggcgcgagttctggcggg

SEQ ID NO: 1570677 - DNA, 25 bp, Homo sapien
tcacggcgccgatctcggccaagag

SEQ ID NO: 1570678 - DNA, 25 bp, Homo sapien
aagagccgcgcctcttcgggcatca

SEQ ID NO: 1570679 - DNA, 25 bp, Homo sapien
agagtcacggcgccgatctcggcca

SEQ ID NO: 1570680 - DNA, 25 bp, Homo sapien
gtgccgagagtctggacgcggggcg

SEQ ID NO: 1570681 - DNA, 25 bp, Homo sapien
gagagtctggacgcggggcgctgac

SEQ ID NO: 1570682 - DNA, 25 bp, Homo sapien
cgagagtctggacgcggggcgctga

SEQ ID NO: 1570683 - DNA, 25 bp, Homo sapien
gccgagagtctggacgcggggcgct

SEQ ID NO: 1570684 - DNA, 25 bp, Homo sapien
cgctcccaccgaacccgagttcgag

SEQ ID NO: 1570685 - DNA, 25 bp, Homo sapien
agcacacttcgctggaacctccaag

SEQ ID NO: 1570686 - DNA, 25 bp, Homo sapien
caggaaacttgactcccaggtcccg

SEQ ID NO: 1570687 - DNA, 25 bp, Homo sapien
tgagaagcacacttcgctggaacct

SEQ ID NO: 1570688 - DNA, 25 bp, Homo sapien
gggcctcagctgccaaggcgctctg

SEQ ID NO: 1570689 - DNA, 25 bp, Homo sapien
agctgccaaggcgctctgctcctgg

SEQ ID NO: 1570690 - DNA, 25 bp, Homo sapien
tgccaaggcgctctgctcctggaag

SEQ ID NO: 1570691 - DNA, 25 bp, Homo sapien
cctggaagctctcctcttgctggcg

SEQ ID NO: 1570692 - DNA, 25 bp, Homo sapien
tgctctcccgaagcctggccatcac

SEQ ID NO: 1570693 - DNA, 25 bp, Homo sapien
agcctggctcgagccggcctcctgg

SEQ ID NO: 1570694 - DNA, 25 bp, Homo sapien
tcgagccggcctcctggcttgagct

SEQ ID NO: 1570695 - DNA, 25 bp, Homo sapien
ggccctccgtaatcttctccaggag

SEQ ID NO: 1570696 - DNA, 25 bp, Homo sapien
ctggccttgaccggtcgaggcctgg

SEQ ID NO: 1570697 - DNA, 25 bp, Homo sapien
cagctggacaaggagagcagatctg

SEQ ID NO: 1570698 - DNA, 25 bp, Homo sapien
ccttgaccggtcgaggcctggcagt

SEQ ID NO: 1570699 - DNA, 25 bp, Homo sapien
ggccttgaccggtcgaggcctggca

SEQ ID NO: 1570700 - DNA, 25 bp, Homo sapien
gatagaccaggaagtcacctccgaa

SEQ ID NO: 1570701 - DNA, 25 bp, Homo sapien
acttgccagccgcactgaggaagaa

SEQ ID NO: 1570702 - DNA, 25 bp, Homo sapien
cagtctttagactggacacgccagt

SEQ ID NO: 1570703 - DNA, 25 bp, Homo sapien
gatactgtagcgcagctcgtgggca

SEQ ID NO: 1570704 - DNA, 25 bp, Homo sapien
cactgaagcagtgaccaatggcaga

SEQ ID NO: 1570705 - DNA, 25 bp, Homo sapien
tgaccaatggcagacggctggacgc

SEQ ID NO: 1570706 - DNA, 25 bp, Homo sapien
accaatggcagacggctggacgcca

SEQ ID NO: 1570707 - DNA, 25 bp, Homo sapien
gagagaggcactgaagcagtgacca

SEQ ID NO: 1570708 - DNA, 25 bp, Homo sapien
ttctgacgctggttccaaggcgccc

SEQ ID NO: 1570709 - DNA, 25 bp, Homo sapien
cccagcagcaaccaggtcttggagt

SEQ ID NO: 1570710 - DNA, 25 bp, Homo sapien
ggcccagcactgagcgatataatgg

SEQ ID NO: 1570711 - DNA, 25 bp, Homo sapien
cttggagtgggatggtgtcctcggg

SEQ ID NO: 1570712 - DNA, 25 bp, Homo sapien
ccattgcagggaggtgtagaccacc

SEQ ID NO: 1570713 - DNA, 25 bp, Homo sapien
attgcagggaggtgtagaccacctt

SEQ ID NO: 1570714 - DNA, 25 bp, Homo sapien
tgcagggaggtgtagaccaccttac

SEQ ID NO: 1570715 - DNA, 25 bp, Homo sapien
cattgcagggaggtgtagaccacct

SEQ ID NO: 1570716 - DNA, 25 bp, Homo sapien
cagaaaggctcttgctgccgacaca

SEQ ID NO: 1570717 - DNA, 25 bp, Homo sapien
gagacctcctgagacttaaaccctg

SEQ ID NO: 1570718 - DNA, 25 bp, Homo sapien
gatgttctagactcccagagaagag

SEQ ID NO: 1570719 - DNA, 25 bp, Homo sapien
agccacatcccctaggtctctggag

SEQ ID NO: 1570720 - DNA, 25 bp, Homo sapien
tgcagatttaggagtcagaaaaacc

SEQ ID NO: 1570721 - DNA, 25 bp, Homo sapien
gcagatgagaccatccacgggttcc

SEQ ID NO: 1570722 - DNA, 25 bp, Homo sapien
cacgggttccaggactgtcgcaaac

SEQ ID NO: 1570723 - DNA, 25 bp, Homo sapien
aaggccaggcctgctatttactaag

SEQ ID NO: 1570724 - DNA, 25 bp, Homo sapien
ggaatagtggtagtgttctagtact

SEQ ID NO: 1570725 - DNA, 25 bp, Homo sapien
agtactttcttaagcaaaaacatgg

SEQ ID NO: 1570726 - DNA, 25 bp, Homo sapien
aggctcaagggatccctggctaatt

SEQ ID NO: 1570727 - DNA, 25 bp, Homo sapien
cactacccaggccatgaaaaagcag

SEQ ID NO: 1570728 - DNA, 25 bp, Homo sapien
ccacggctgcgctcttatagtaacg

SEQ ID NO: 1570729 - DNA, 25 bp, Homo sapien
gtcactgagaaagaggcgcgcaagc

SEQ ID NO: 1570730 - DNA, 25 bp, Homo sapien
ctaagcaaaccacccggtcactgag

SEQ ID NO: 1570731 - DNA, 25 bp, Homo sapien
gcacgtcagagccaatcagaagagg

SEQ ID NO: 1570732 - DNA, 25 bp, Homo sapien
tcatggaaactcggaaggcccgggc

SEQ ID NO: 1570733 - DNA, 25 bp, Homo sapien
aaacctcgcggagcccagatccgat

SEQ ID NO: 1570734 - DNA, 25 bp, Homo sapien
cagatccgatctcgcgagaataacc

SEQ ID NO: 1570735 - DNA, 25 bp, Homo sapien
ccaacgctctcatagtcagtatctg

SEQ ID NO: 1570736 - DNA, 25 bp, Homo sapien
tgagcgtaagggctccaaacggcgc

SEQ ID NO: 1570737 - DNA, 25 bp, Homo sapien
gttggctccgcttccccgtctgcgc

SEQ ID NO: 1570738 - DNA, 25 bp, Homo sapien
tcagctcttggtcgagacgagattt

SEQ ID NO: 1570739 - DNA, 25 bp, Homo sapien
gcttcagctcttggtcgagacgaga

SEQ ID NO: 1570740 - DNA, 25 bp, Homo sapien
gctcttggtcgagacgagatttctc

SEQ ID NO: 1570741 - DNA, 25 bp, Homo sapien
tcagcttcagctcttggtcgagacg

SEQ ID NO: 1570742 - DNA, 25 bp, Homo sapien
tagatagagtacatgggcaccttca

SEQ ID NO: 1570743 - DNA, 25 bp, Homo sapien
caagtgtagtcccacgtactggcac

SEQ ID NO: 1570744 - DNA, 25 bp, Homo sapien
gctttggaatcacaaaaccttccta

SEQ ID NO: 1570745 - DNA, 25 bp, Homo sapien
gtactggcacaacaactagactggc

SEQ ID NO: 1570746 - DNA, 25 bp, Homo sapien
tctcatcaagcgtcagcagttcccg

SEQ ID NO: 1570747 - DNA, 25 bp, Homo sapien
gaacagacgccgtgggtccttctca

SEQ ID NO: 1570748 - DNA, 25 bp, Homo sapien
agttcccgggcggccttgcggatct

SEQ ID NO: 1570749 - DNA, 25 bp, Homo sapien
ggatcttggccagggtaaatttgac

SEQ ID NO: 1570750 - DNA, 25 bp, Homo sapien
gaagggagaatgaacctcacaagcc

SEQ ID NO: 1570751 - DNA, 25 bp, Homo sapien
taaactgaaggtccaataactgggc

SEQ ID NO: 1570752 - DNA, 25 bp, Homo sapien
cagggcaaagactgatccagataca

SEQ ID NO: 1570753 - DNA, 25 bp, Homo sapien
tataaagatatagacgggtgcccag

SEQ ID NO: 1570754 - DNA, 25 bp, Homo sapien
tggacatgactcctacatttcttca

SEQ ID NO: 1570755 - DNA, 25 bp, Homo sapien
tattacaatgccttcatttctgatc

SEQ ID NO: 1570756 - DNA, 25 bp, Homo sapien
tgaaaaatggacatgactcctacat

SEQ ID NO: 1570757 - DNA, 25 bp, Homo sapien
tacaaggcagttaggtattacaatg

SEQ ID NO: 1570758 - DNA, 25 bp, Homo sapien
gatattcctggcactgttaccctcc

SEQ ID NO: 1570759 - DNA, 25 bp, Homo sapien
aaatggaaacttaagccacgcacag

SEQ ID NO: 1570760 - DNA, 25 bp, Homo sapien
tcccagtagggagcagttacaggta

SEQ ID NO: 1570761 - DNA, 25 bp, Homo sapien
tgggatcatttacctctttggacac

SEQ ID NO: 1570762 - DNA, 25 bp, Homo sapien
cggtgaggcacaagtagtacagcgc

SEQ ID NO: 1570763 - DNA, 25 bp, Homo sapien
caaactaccctatggttgtcaggtc

SEQ ID NO: 1570764 - DNA, 25 bp, Homo sapien
cacattccgtgccataaatagcagt

SEQ ID NO: 1570765 - DNA, 25 bp, Homo sapien
ctgtcaaaaccaccctacgggctgg

SEQ ID NO: 1570766 - DNA, 25 bp, Homo sapien
ccaatgcggaccagccgccgcagca

SEQ ID NO: 1570767 - DNA, 25 bp, Homo sapien
cggaccagccgccgcagcagggcgt

SEQ ID NO: 1570768 - DNA, 25 bp, Homo sapien
accagccgccgcagcagggcgttgc

SEQ ID NO: 1570769 - DNA, 25 bp, Homo sapien
cccaatgcggaccagccgccgcagc

SEQ ID NO: 1570770 - DNA, 25 bp, Homo sapien
ggcgtctctctaagaaatcctctat

SEQ ID NO: 1570771 - DNA, 25 bp, Homo sapien
aggcgtctctctaagaaatcctcta

SEQ ID NO: 1570772 - DNA, 25 bp, Homo sapien
cgtctctctaagaaatcctctatct

SEQ ID NO: 1570773 - DNA, 25 bp, Homo sapien
tctctctaagaaatcctctatcttc

SEQ ID NO: 1570774 - DNA, 25 bp, Homo sapien
ttcaggtgcccatccgaggtggtac

SEQ ID NO: 1570775 - DNA, 25 bp, Homo sapien
ggaggaagattcaggtgcccatccg

SEQ ID NO: 1570776 - DNA, 25 bp, Homo sapien
agcaggcttagtgagggcaaccatc

SEQ ID NO: 1570777 - DNA, 25 bp, Homo sapien
caggcttagtgagggcaaccatcag

SEQ ID NO: 1570778 - DNA, 25 bp, Homo sapien
tctgtaccctctgggtgagttcaca

SEQ ID NO: 1570779 - DNA, 25 bp, Homo sapien
ggctagagccgcagtgacccttgcg

SEQ ID NO: 1570780 - DNA, 25 bp, Homo sapien
gcagaggccttcacaaggtgtacgg

SEQ ID NO: 1570781 - DNA, 25 bp, Homo sapien
tgtgtgcaagggtgaatctgtaccc

SEQ ID NO: 1570782 - DNA, 25 bp, Homo sapien
tgaaatatcgtgaaccccacacctg

SEQ ID NO: 1570783 - DNA, 25 bp, Homo sapien
tacagaaagggcacactgagtaccc

SEQ ID NO: 1570784 - DNA, 25 bp, Homo sapien
tctgcctacggctcacagggttagt

SEQ ID NO: 1570785 - DNA, 25 bp, Homo sapien
gaatcaacttcacaagcgagccagg

SEQ ID NO: 1570786 - DNA, 25 bp, Homo sapien
ggaagaagcgacaaggtgaggtgga

SEQ ID NO: 1570787 - DNA, 25 bp, Homo sapien
tggaagaagcgacaaggtgaggtgg

SEQ ID NO: 1570788 - DNA, 25 bp, Homo sapien
ctggaagaagcgacaaggtgaggtg

SEQ ID NO: 1570789 - DNA, 25 bp, Homo sapien
gcggacaatgaaggacgggatgttc

SEQ ID NO: 1570790 - DNA, 25 bp, Homo sapien
cggccacccccgtagggagagcgca

SEQ ID NO: 1570791 - DNA, 25 bp, Homo sapien
tcttcctcttcacgcggcccgggcg

SEQ ID NO: 1570792 - DNA, 25 bp, Homo sapien
gaagtcgatgtgcttctgggaatcc

SEQ ID NO: 1570793 - DNA, 25 bp, Homo sapien
gagcgcagagagaagtcgatgtgct

SEQ ID NO: 1570794 - DNA, 25 bp, Homo sapien
aaacgagacaatccagcagcccagg

SEQ ID NO: 1570795 - DNA, 25 bp, Homo sapien
acaatccagcagcccaggagggaca

SEQ ID NO: 1570796 - DNA, 25 bp, Homo sapien
agacaatccagcagcccaggaggga

SEQ ID NO: 1570797 - DNA, 25 bp, Homo sapien
acgagacaatccagcagcccaggag

SEQ ID NO: 1570798 - DNA, 25 bp, Homo sapien
cttctgaccaaagaaggggcagccc

SEQ ID NO: 1570799 - DNA, 25 bp, Homo sapien
gacactttccttctgaccaaagaag

SEQ ID NO: 1570800 - DNA, 25 bp, Homo sapien
ctgaccaaagaaggggcagcccatc

SEQ ID NO: 1570801 - DNA, 25 bp, Homo sapien
gcagtttgacactttccttctgacc

SEQ ID NO: 1570802 - DNA, 25 bp, Homo sapien
agagacgactgccatggtaaggacc

SEQ ID NO: 1570803 - DNA, 25 bp, Homo sapien
ggctgaggatgagacaaccccatga

SEQ ID NO: 1570804 - DNA, 25 bp, Homo sapien
tgtgtccccgtcctcagtgagataa

SEQ ID NO: 1570805 - DNA, 25 bp, Homo sapien
taaggaccccgtaacgctgagctga

SEQ ID NO: 1570806 - DNA, 25 bp, Homo sapien
gtctgaccaccgtggattgaatctg

SEQ ID NO: 1570807 - DNA, 25 bp, Homo sapien
accaccgtggattgaatctgtttct

SEQ ID NO: 1570808 - DNA, 25 bp, Homo sapien
tcataaagggtttctcccacggctg

SEQ ID NO: 1570809 - DNA, 25 bp, Homo sapien
tgtcagctcaagattgtgcccagca

SEQ ID NO: 1570810 - DNA, 25 bp, Homo sapien
tgaaggggattgttgccgctgctcc

SEQ ID NO: 1570811 - DNA, 25 bp, Homo sapien
aactcagtgtcagctcaagattgtg

SEQ ID NO: 1570812 - DNA, 25 bp, Homo sapien
atatggttgtcattcctgtggggcg

SEQ ID NO: 1570813 - DNA, 25 bp, Homo sapien
ttcacgatgtctgtctaatgcattt

SEQ ID NO: 1570814 - DNA, 25 bp, Homo sapien
atggttgtcattcctgtggggcggc

SEQ ID NO: 1570815 - DNA, 25 bp, Homo sapien
tcatatggttgtcattcctgtgggg

SEQ ID NO: 1570816 - DNA, 25 bp, Homo sapien
ggctggatgtgtccataagaaccca

SEQ ID NO: 1570817 - DNA, 25 bp, Homo sapien
aggaacttggactgaactggctgga

SEQ ID NO: 1570818 - DNA, 25 bp, Homo sapien
gaacttggactgaactggctggatg

SEQ ID NO: 1570819 - DNA, 25 bp, Homo sapien
ctggctggatgtgtccataagaacc

SEQ ID NO: 1570820 - DNA, 25 bp, Homo sapien
tcttctcaaagggtcgaactgagcg

SEQ ID NO: 1570821 - DNA, 25 bp, Homo sapien
actgagcgcttgaaggaccttgaga

SEQ ID NO: 1570822 - DNA, 25 bp, Homo sapien
cttgaaggaccttgagataattgtg

SEQ ID NO: 1570823 - DNA, 25 bp, Homo sapien
ggcccaggcggtctgcactccttgt

SEQ ID NO: 1570824 - DNA, 25 bp, Homo sapien
tggtcaaggtaccacttctgccacc

SEQ ID NO: 1570825 - DNA, 25 bp, Homo sapien
aaaatctgcaaactcccgacccgtg

SEQ ID NO: 1570826 - DNA, 25 bp, Homo sapien
aatctgcaaactcccgacccgtgga

SEQ ID NO: 1570827 - DNA, 25 bp, Homo sapien
tccgccgcgaaatcctcaaggggtg

SEQ ID NO: 1570828 - DNA, 25 bp, Homo sapien
gcaaatcctcctgaccgggctggat

SEQ ID NO: 1570829 - DNA, 25 bp, Homo sapien
gagtcatctggtggccgcttgacga

SEQ ID NO: 1570830 - DNA, 25 bp, Homo sapien
ctcagatgggttctgctgggctcac

SEQ ID NO: 1570831 - DNA, 25 bp, Homo sapien
tgatgcctttgagtggaccagcgag

SEQ ID NO: 1570832 - DNA, 25 bp, Homo sapien
atcttggttgtcattcctgtgggac

SEQ ID NO: 1570833 - DNA, 25 bp, Homo sapien
tcttggttgtcattcctgtgggaca

SEQ ID NO: 1570834 - DNA, 25 bp, Homo sapien
tatcttggttgtcattcctgtggga

SEQ ID NO: 1570835 - DNA, 25 bp, Homo sapien
ttggttgtcattcctgtgggacagc

SEQ ID NO: 1570836 - DNA, 25 bp, Homo sapien
ccgagggtgggatcagggcaccaac

SEQ ID NO: 1570837 - DNA, 25 bp, Homo sapien
aacacacaagaaagtcagcttagaa

SEQ ID NO: 1570838 - DNA, 25 bp, Homo sapien
gtgggatcagggcaccaaccaaagg

SEQ ID NO: 1570839 - DNA, 25 bp, Homo sapien
cacaagaaagtcagcttagaaaaac

SEQ ID NO: 1570840 - DNA, 25 bp, Homo sapien
tggcctttgtcctgccgctcgtcct

SEQ ID NO: 1570841 - DNA, 25 bp, Homo sapien
ccaatgtcggcgtcagagcaaacac

SEQ ID NO: 1570842 - DNA, 25 bp, Homo sapien
aggacattgggtgagcagggaatgg

SEQ ID NO: 1570843 - DNA, 25 bp, Homo sapien
tcctcctccaatgtcggcgtcagag

SEQ ID NO: 1570844 - DNA, 25 bp, Homo sapien
ccagagagggtttctaccagggctg

SEQ ID NO: 1570845 - DNA, 25 bp, Homo sapien
gctgcactgggcgttaggcttgaaa

SEQ ID NO: 1570846 - DNA, 25 bp, Homo sapien
tctgtggtcaaaggctctgcatggg

SEQ ID NO: 1570847 - DNA, 25 bp, Homo sapien
tcatcacgcgcaaggtctgggaaga

SEQ ID NO: 1570848 - DNA, 25 bp, Homo sapien
gggatgcgccctagtccttagttag

SEQ ID NO: 1570849 - DNA, 25 bp, Homo sapien
tgtgtcttgtcctcgaaggaatgag

SEQ ID NO: 1570850 - DNA, 25 bp, Homo sapien
aatgttcagctactcacctcttggg

SEQ ID NO: 1570851 - DNA, 25 bp, Homo sapien
cctcttgggctattgctagacatcg

SEQ ID NO: 1570852 - DNA, 25 bp, Homo sapien
gacacaggtccaaatgttggcccct

SEQ ID NO: 1570853 - DNA, 25 bp, Homo sapien
actccaagcttttcgctaattccaa

SEQ ID NO: 1570854 - DNA, 25 bp, Homo sapien
aaatttgataaccatctgctttgcc

SEQ ID NO: 1570855 - DNA, 25 bp, Homo sapien
cttcttctgtcaggccacattataa

SEQ ID NO: 1570856 - DNA, 25 bp, Homo sapien
tctcataggtcaataaagcttctgc

SEQ ID NO: 1570857 - DNA, 25 bp, Homo sapien
aagtctcataggtcaataaagcttc

SEQ ID NO: 1570858 - DNA, 25 bp, Homo sapien
aaagtctcataggtcaataaagctt

SEQ ID NO: 1570859 - DNA, 25 bp, Homo sapien
aaatcctaactacattgagcaagag

SEQ ID NO: 1570860 - DNA, 25 bp, Homo sapien
ttcacaaactaaccccagaacaggc

SEQ ID NO: 1570861 - DNA, 25 bp, Homo sapien
gaaagagcaggcacgcatttccata

SEQ ID NO: 1570862 - DNA, 25 bp, Homo sapien
tgaacgtaagagtaatcagagaatc

SEQ ID NO: 1570863 - DNA, 25 bp, Homo sapien
tacacatcacacaatgaaattgaaa

SEQ ID NO: 1570864 - DNA, 25 bp, Homo sapien
gaagagttgctcatgaggaaaaacc

SEQ ID NO: 1570865 - DNA, 25 bp, Homo sapien
aactaggaaatgaatgacgttggct

SEQ ID NO: 1570866 - DNA, 25 bp, Homo sapien
ttggctttcgtataaggaatttaga

SEQ ID NO: 1570867 - DNA, 25 bp, Homo sapien
cagacccttcctctccgtgcggccg

SEQ ID NO: 1570868 - DNA, 25 bp, Homo sapien
acagtggcctcaggagagaacgtga

SEQ ID NO: 1570869 - DNA, 25 bp, Homo sapien
tccatccatcctcaggatctgtgtc

SEQ ID NO: 1570870 - DNA, 25 bp, Homo sapien
tcaggatctgtgtcctccctccatc

SEQ ID NO: 1570871 - DNA, 25 bp, Homo sapien
ctcaggatctgcgtcctccctccat

SEQ ID NO: 1570872 - DNA, 25 bp, Homo sapien
aggatctgcgtcctccctccatcca

SEQ ID NO: 1570873 - DNA, 25 bp, Homo sapien
tcaccctcaggatctgcgtcctccc

SEQ ID NO: 1570874 - DNA, 25 bp, Homo sapien
ggatgaatacaccaaacctcacagt

SEQ ID NO: 1570875 - DNA, 25 bp, Homo sapien
cgtccaatggaaactactacttaag

SEQ ID NO: 1570876 - DNA, 25 bp, Homo sapien
gaagcagtatgcacttgattgcacc

SEQ ID NO: 1570877 - DNA, 25 bp, Homo sapien
gaagaggagcaagagcgtgtttcac

SEQ ID NO: 1570878 - DNA, 25 bp, Homo sapien
aacttgctcatcttaggacttcaca

SEQ ID NO: 1570879 - DNA, 25 bp, Homo sapien
gtcgtacacgtacattgtgcaatga

SEQ ID NO: 1570880 - DNA, 25 bp, Homo sapien
tctgagtatccaccctacctgtagg

SEQ ID NO: 1570881 - DNA, 25 bp, Homo sapien
tgatcaggattgtacgtattcaagg

SEQ ID NO: 1570882 - DNA, 25 bp, Homo sapien
cctgggaatgactcctggacctcca

SEQ ID NO: 1570883 - DNA, 25 bp, Homo sapien
taagtctatgaaacgcacgtgacgt

SEQ ID NO: 1570884 - DNA, 25 bp, Homo sapien
tcgccagaatcagataaagcagggt

SEQ ID NO: 1570885 - DNA, 25 bp, Homo sapien
cacgtgacgtgtgtgtggtatacag

SEQ ID NO: 1570886 - DNA, 25 bp, Homo sapien
taatattcaggacaaagccaggcac

SEQ ID NO: 1570887 - DNA, 25 bp, Homo sapien
ggcacaggtcgggaatcctatgaag

SEQ ID NO: 1570888 - DNA, 25 bp, Homo sapien
gatgatcatcgtcctgaggtcttcc

SEQ ID NO: 1570889 - DNA, 25 bp, Homo sapien
gccaggctgccaaggctaatattca

SEQ ID NO: 1570890 - DNA, 25 bp, Homo sapien
tgttccgaggatctggtctctccac

SEQ ID NO: 1570891 - DNA, 25 bp, Homo sapien
cacatctatgacacccgctatgtct

SEQ ID NO: 1570892 - DNA, 25 bp, Homo sapien
ctttttcacatctatgacacccgct

SEQ ID NO: 1570893 - DNA, 25 bp, Homo sapien
ctatgacacccgctatgtcttggta

SEQ ID NO: 1570894 - DNA, 25 bp, Homo sapien
gacacccgctatgtcttggtaaacc

SEQ ID NO: 1570895 - DNA, 25 bp, Homo sapien
aaccccgacgtgtagcatttgccga

SEQ ID NO: 1570896 - DNA, 25 bp, Homo sapien
tcaggcactaattagggagtaaggc

SEQ ID NO: 1570897 - DNA, 25 bp, Homo sapien
tccctggagcatgttgacttcacgt

SEQ ID NO: 1570898 - DNA, 25 bp, Homo sapien
cagatgctggttacggtacctgagg

SEQ ID NO: 1570899 - DNA, 25 bp, Homo sapien
agcattggaacctctgggaagtggc

SEQ ID NO: 1570900 - DNA, 25 bp, Homo sapien
tcagcaaattttgcaagtgcacaga

SEQ ID NO: 1570901 - DNA, 25 bp, Homo sapien
tgctgtttgaagtacgggacgccat

SEQ ID NO: 1570902 - DNA, 25 bp, Homo sapien
tccctggtcttgttgcatcattgtg

SEQ ID NO: 1570903 - DNA, 25 bp, Homo sapien
gagtctaaatttctaagggcctgga

SEQ ID NO: 1570904 - DNA, 25 bp, Homo sapien
aaacgactcaggactttgccaaggt

SEQ ID NO: 1570905 - DNA, 25 bp, Homo sapien
ggagtccaggaaaacgtcgcagctg

SEQ ID NO: 1570906 - DNA, 25 bp, Homo sapien
cagagtcaccatcctggcttgtgca

SEQ ID NO: 1570907 - DNA, 25 bp, Homo sapien
tggactttcccttgaccagtcttgg

SEQ ID NO: 1570908 - DNA, 25 bp, Homo sapien
actttcccttgaccagtcttggcac

SEQ ID NO: 1570909 - DNA, 25 bp, Homo sapien
ggcacggcaggcgagggattgaggg

SEQ ID NO: 1570910 - DNA, 25 bp, Homo sapien
gtcttggcacggcaggcgagggatt

SEQ ID NO: 1570911 - DNA, 25 bp, Homo sapien
tacccgggaccttcactctctaaga

SEQ ID NO: 1570912 - DNA, 25 bp, Homo sapien
accttgggtttcacctgatgaccac

SEQ ID NO: 1570913 - DNA, 25 bp, Homo sapien
tcactaggacctggcggcaggtacc

SEQ ID NO: 1570914 - DNA, 25 bp, Homo sapien
cttcactctctaagaagacaccttg

SEQ ID NO: 1570915 - DNA, 25 bp, Homo sapien
ggagggagactttgattttcatgaa

SEQ ID NO: 1570916 - DNA, 25 bp, Homo sapien
ttttcatgaaggcatgtggcatgca

SEQ ID NO: 1570917 - DNA, 25 bp, Homo sapien
tccaggtaagctgctgtcagccctt

SEQ ID NO: 1570918 - DNA, 25 bp, Homo sapien
tatggaattggacttgcactttgga

SEQ ID NO: 1570919 - DNA, 25 bp, Homo sapien
cttaggatgagagcaatgtgggaac

SEQ ID NO: 1570920 - DNA, 25 bp, Homo sapien
aatgtgggaactggcgcccacaatc

SEQ ID NO: 1570921 - DNA, 25 bp, Homo sapien
gttgctgctacttaggatgagagca

SEQ ID NO: 1570922 - DNA, 25 bp, Homo sapien
ggcatcagcccgcaagttgctgcta

SEQ ID NO: 1570923 - DNA, 25 bp, Homo sapien
ctggagaagggggagaaacttggag

SEQ ID NO: 1570924 - DNA, 25 bp, Homo sapien
gcgctgagacgccagctgctgttat

SEQ ID NO: 1570925 - DNA, 25 bp, Homo sapien
tgagacgccagctgctgttatggca

SEQ ID NO: 1570926 - DNA, 25 bp, Homo sapien
gagacgccagctgctgttatggcag

SEQ ID NO: 1570927 - DNA, 25 bp, Homo sapien
gctgagacgccagctgctgttatgg

SEQ ID NO: 1570928 - DNA, 25 bp, Homo sapien
tgaaaggttctttgcagtagtttgc

SEQ ID NO: 1570929 - DNA, 25 bp, Homo sapien
tctttgcagtagtttgcagtgtagc

SEQ ID NO: 1570930 - DNA, 25 bp, Homo sapien
cccgagaggactccaaagcagttct

SEQ ID NO: 1570931 - DNA, 25 bp, Homo sapien
gggcccgagaggactccaaagcagt

SEQ ID NO: 1570932 - DNA, 25 bp, Homo sapien
agagcaaggctgaggaatcctgact

SEQ ID NO: 1570933 - DNA, 25 bp, Homo sapien
ctagagcaaggctgaggaatcctga

SEQ ID NO: 1570934 - DNA, 25 bp, Homo sapien
tagagcaaggctgaggaatcctgac

SEQ ID NO: 1570935 - DNA, 25 bp, Homo sapien
gagcaaggctgaggaatcctgactc

SEQ ID NO: 1570936 - DNA, 25 bp, Homo sapien
ctgctgcccgcgcaggtaccgcgct

SEQ ID NO: 1570937 - DNA, 25 bp, Homo sapien
tgcccgcgcaggtaccgcgctgctg

SEQ ID NO: 1570938 - DNA, 25 bp, Homo sapien
cccgcgcaggtaccgcgctgctggc

SEQ ID NO: 1570939 - DNA, 25 bp, Homo sapien
cgcaggtaccgcgctgctggcgtcg

SEQ ID NO: 1570940 - DNA, 25 bp, Homo sapien
ctgcgggagcctccggagtcgagcg

SEQ ID NO: 1570941 - DNA, 25 bp, Homo sapien
gcgggagcctccggagtcgagcggg

SEQ ID NO: 1570942 - DNA, 25 bp, Homo sapien
tgcgggagcctccggagtcgagcgg

SEQ ID NO: 1570943 - DNA, 25 bp, Homo sapien
cgcgaaaacgctgggcaccgggcgg

SEQ ID NO: 1570944 - DNA, 25 bp, Homo sapien
gcacccaagctgagggccggtagcc

SEQ ID NO: 1570945 - DNA, 25 bp, Homo sapien
tcctgctcttggggcgcgaaaacgc

SEQ ID NO: 1570946 - DNA, 25 bp, Homo sapien
ttggggcgcgaaaacgctgggcacc

SEQ ID NO: 1570947 - DNA, 25 bp, Homo sapien
ggcttcgggaggtctccgggccaga

SEQ ID NO: 1570948 - DNA, 25 bp, Homo sapien
gcgggcgtgagtctgggccgaggcc

SEQ ID NO: 1570949 - DNA, 25 bp, Homo sapien
gcggatccccgcgtgcggcttcggg

SEQ ID NO: 1570950 - DNA, 25 bp, Homo sapien
gaggtggccgttgtgtaaccgcgag

SEQ ID NO: 1570951 - DNA, 25 bp, Homo sapien
gcgagaagggcgacaatgcagctcc

SEQ ID NO: 1570952 - DNA, 25 bp, Homo sapien
aagcggatgaggtagacagcgatga

SEQ ID NO: 1570953 - DNA, 25 bp, Homo sapien
cgacaatgcagctccaggtgacgca

SEQ ID NO: 1570954 - DNA, 25 bp, Homo sapien
aagggcgacaatgcagctccaggtg

SEQ ID NO: 1570955 - DNA, 25 bp, Homo sapien
catccatcaaatgggacagtccttc

SEQ ID NO: 1570956 - DNA, 25 bp, Homo sapien
ccatccatcaaatgggacagtcctt

SEQ ID NO: 1570957 - DNA, 25 bp, Homo sapien
tccttcctgctgtgcgctgaagtgg

SEQ ID NO: 1570958 - DNA, 25 bp, Homo sapien
cgctgaagtgggcttgcaaatggca

SEQ ID NO: 1570959 - DNA, 25 bp, Homo sapien
tggcgtgcagcagcgcagagctgag

SEQ ID NO: 1570960 - DNA, 25 bp, Homo sapien
tgggacaccccatcactggtctcac

SEQ ID NO: 1570961 - DNA, 25 bp, Homo sapien
caatggtgctgagtgtgtggttggc

SEQ ID NO: 1570962 - DNA, 25 bp, Homo sapien
atagaaaccgatgccaatgccagtg

SEQ ID NO: 1570963 - DNA, 25 bp, Homo sapien
agttctgaatctgggttcctaagct

SEQ ID NO: 1570964 - DNA, 25 bp, Homo sapien
caagcctggggtcttagctctgagt

SEQ ID NO: 1570965 - DNA, 25 bp, Homo sapien
tgggttcctaagcttcaagcctggg

SEQ ID NO: 1570966 - DNA, 25 bp, Homo sapien
ggtcttagctctgagtttggatccc

SEQ ID NO: 1570967 - DNA, 25 bp, Homo sapien
ccaagaatcaggtctggggccctgg

SEQ ID NO: 1570968 - DNA, 25 bp, Homo sapien
tggtgtcgctggtgcttggtttctg

SEQ ID NO: 1570969 - DNA, 25 bp, Homo sapien
tgaggtcctcaatttgcagccaggg

SEQ ID NO: 1570970 - DNA, 25 bp, Homo sapien
tcctcaatttgcagccagggtcggg

SEQ ID NO: 1570971 - DNA, 25 bp, Homo sapien
ctggggataggacaggggctgaggt

SEQ ID NO: 1570972 - DNA, 25 bp, Homo sapien
ggacacattttcagccacctgcagg

SEQ ID NO: 1570973 - DNA, 25 bp, Homo sapien
tccagggtggtcagctctgtcctca

SEQ ID NO: 1570974 - DNA, 25 bp, Homo sapien
gctcaggggcactccctgccagaag

SEQ ID NO: 1570975 - DNA, 25 bp, Homo sapien
ctccgtgcgcggctcgagcacctcc

SEQ ID NO: 1570976 - DNA, 25 bp, Homo sapien
tgtttactgtgtctgggccacagcc

SEQ ID NO: 1570977 - DNA, 25 bp, Homo sapien
ctgtttactgtgtctgggccacagc

SEQ ID NO: 1570978 - DNA, 25 bp, Homo sapien
acttgctctgcttcgccaggcccag

SEQ ID NO: 1570979 - DNA, 25 bp, Homo sapien
gctcaggacgagaaccaggagactc

SEQ ID NO: 1570980 - DNA, 25 bp, Homo sapien
agctcaggacgagaaccaggagact

SEQ ID NO: 1570981 - DNA, 25 bp, Homo sapien
cagctcaggacgagaaccaggagac

SEQ ID NO: 1570982 - DNA, 25 bp, Homo sapien
gattggagcagaagtcactgaggcc

SEQ ID NO: 1570983 - DNA, 25 bp, Homo sapien
tgggtcaggttcagaacataagggt

SEQ ID NO: 1570984 - DNA, 25 bp, Homo sapien
gtctggattggagcagaagtcactg

SEQ ID NO: 1570985 - DNA, 25 bp, Homo sapien
gggtcaggttcagaacataagggtc

SEQ ID NO: 1570986 - DNA, 25 bp, Homo sapien
cgccagccccgcgtcccttctgctc

SEQ ID NO: 1570987 - DNA, 25 bp, Homo sapien
cttcagagacccgccagccccgcgt

SEQ ID NO: 1570988 - DNA, 25 bp, Homo sapien
ccgccagccccgcgtcccttctgct

SEQ ID NO: 1570989 - DNA, 25 bp, Homo sapien
agagacccgccagccccgcgtccct

SEQ ID NO: 1570990 - DNA, 25 bp, Homo sapien
gagacggcccggttgcagaggagat

SEQ ID NO: 1570991 - DNA, 25 bp, Homo sapien
ttggagacggcccggttgcagagga

SEQ ID NO: 1570992 - DNA, 25 bp, Homo sapien
ggagacggcccggttgcagaggaga

SEQ ID NO: 1570993 - DNA, 25 bp, Homo sapien
gggttggagacggcccggttgcaga

SEQ ID NO: 1570994 - DNA, 25 bp, Homo sapien
ggcacagcttctcgctccaggccca

SEQ ID NO: 1570995 - DNA, 25 bp, Homo sapien
tgaggcacagcttctcgctccaggc

SEQ ID NO: 1570996 - DNA, 25 bp, Homo sapien
atgttggccagagctcgctgggaca

SEQ ID NO: 1570997 - DNA, 25 bp, Homo sapien
gagctcgctgggacagagtcagcct

SEQ ID NO: 1570998 - DNA, 25 bp, Homo sapien
caggctgcggcagtgtagcagtgcc

SEQ ID NO: 1570999 - DNA, 25 bp, Homo sapien
ggctgcggcagtgtagcagtgccac

SEQ ID NO: 1571000 - DNA, 25 bp, Homo sapien
ctgcggcagtgtagcagtgccacca

SEQ ID NO: 1571001 - DNA, 25 bp, Homo sapien
tgccaccaactggtggaaatttcct

SEQ ID NO: 1571002 - DNA, 25 bp, Homo sapien
gtgtatgaacagcacaagccgcagg

SEQ ID NO: 1571003 - DNA, 25 bp, Homo sapien
tgctccagaactcactaagcggcag

SEQ ID NO: 1571004 - DNA, 25 bp, Homo sapien
gatacagagatatcctcaggcgcaa

SEQ ID NO: 1571005 - DNA, 25 bp, Homo sapien
caggtacttggtgaagctatgcaca

SEQ ID NO: 1571006 - DNA, 25 bp, Homo sapien
aggagttctgatctgccccactggg

SEQ ID NO: 1571007 - DNA, 25 bp, Homo sapien
gaaagctcagatccatgcgatggcg

SEQ ID NO: 1571008 - DNA, 25 bp, Homo sapien
tatgcaaaagatcagggcagccctg

SEQ ID NO: 1571009 - DNA, 25 bp, Homo sapien
gaaaggacaaaactgggcaactgcc

SEQ ID NO: 1571010 - DNA, 25 bp, Homo sapien
taaacaggaccgagaaggtcatctc

SEQ ID NO: 1571011 - DNA, 25 bp, Homo sapien
tcgggtaaccccactagcagggatg

SEQ ID NO: 1571012 - DNA, 25 bp, Homo sapien
catctcagaggctggtgtgcaacga

SEQ ID NO: 1571013 - DNA, 25 bp, Homo sapien
cccttgtaggtcagggcgaggaaca

SEQ ID NO: 1571014 - DNA, 25 bp, Homo sapien
gccttccagggcgtcttcgcacagg

SEQ ID NO: 1571015 - DNA, 25 bp, Homo sapien
cttccagggcgtcttcgcacaggcc

SEQ ID NO: 1571016 - DNA, 25 bp, Homo sapien
ccttccagggcgtcttcgcacaggc

SEQ ID NO: 1571017 - DNA, 25 bp, Homo sapien
ctgagggttgaaagggtcgtcatcg

SEQ ID NO: 1571018 - DNA, 25 bp, Homo sapien
ttgaaagggtcgtcatcgtctgtgt

SEQ ID NO: 1571019 - DNA, 25 bp, Homo sapien
gtcatcgtctgtgtcatcgtagtcg

SEQ ID NO: 1571020 - DNA, 25 bp, Homo sapien
atcgtctgtgtcatcgtagtcgtca

SEQ ID NO: 1571021 - DNA, 25 bp, Homo sapien
gccactgcacaaagcgcttggattc

SEQ ID NO: 1571022 - DNA, 25 bp, Homo sapien
cgaagaggggagccaggctccagtc

SEQ ID NO: 1571023 - DNA, 25 bp, Homo sapien
ccaggctccagtccagccgggagga

SEQ ID NO: 1571024 - DNA, 25 bp, Homo sapien
aggctccagtccagccgggaggagg

SEQ ID NO: 1571025 - DNA, 25 bp, Homo sapien
gagccaggctccagtccagccggga

SEQ ID NO: 1571026 - DNA, 25 bp, Homo sapien
ggcctgcccggtgcgatccacccag

SEQ ID NO: 1571027 - DNA, 25 bp, Homo sapien
cctggagcagctcggagggcgggag

SEQ ID NO: 1571028 - DNA, 25 bp, Homo sapien
tgcctggagcagctcggagggcggg

SEQ ID NO: 1571029 - DNA, 25 bp, Homo sapien
tggagcagctcggagggcgggaggg

SEQ ID NO: 1571030 - DNA, 25 bp, Homo sapien
ttagtggggtctcctccggcagcca

SEQ ID NO: 1571031 - DNA, 25 bp, Homo sapien
tagtggggtctcctccggcagccag

SEQ ID NO: 1571032 - DNA, 25 bp, Homo sapien
tgtgcaggctgtccatggccaagag

SEQ ID NO: 1571033 - DNA, 25 bp, Homo sapien
ttagtgccacgagttgagatcaggg

SEQ ID NO: 1571034 - DNA, 25 bp, Homo sapien
ccaagagtgttagtggtcagagccc

SEQ ID NO: 1571035 - DNA, 25 bp, Homo sapien
gaccggcagccagggatgaagggtg

SEQ ID NO: 1571036 - DNA, 25 bp, Homo sapien
agccctggccaggaggccgaatcaa

SEQ ID NO: 1571037 - DNA, 25 bp, Homo sapien
cctggacaggcgcagaaattcctgg

SEQ ID NO: 1571038 - DNA, 25 bp, Homo sapien
ctgagcctggacaggcgcagaaatt

SEQ ID NO: 1571039 - DNA, 25 bp, Homo sapien
ggaggccgaatcaagggagaggaga

SEQ ID NO: 1571040 - DNA, 25 bp, Homo sapien
tgtgtcaggacacgcgcattacttt

SEQ ID NO: 1571041 - DNA, 25 bp, Homo sapien
gtcttcctgtgtcaggacacgcgca

SEQ ID NO: 1571042 - DNA, 25 bp, Homo sapien
ctattctgtgccagagatgcctgtg

SEQ ID NO: 1571043 - DNA, 25 bp, Homo sapien
caggacacgcgcattacttttagaa

SEQ ID NO: 1571044 - DNA, 25 bp, Homo sapien
ctatagaagtttttggccagatgga

SEQ ID NO: 1571045 - DNA, 25 bp, Homo sapien
gatcttccacccatcttatctatag

SEQ ID NO: 1571046 - DNA, 25 bp, Homo sapien
gccagatggagagccgatatgtcac

SEQ ID NO: 1571047 - DNA, 25 bp, Homo sapien
ttacttgcatacatctagatcttcc

SEQ ID NO: 1571048 - DNA, 25 bp, Homo sapien
tctggttttatgatctcctgcttaa

SEQ ID NO: 1571049 - DNA, 25 bp, Homo sapien
actgttccccagtctgtcaatttgc

SEQ ID NO: 1571050 - DNA, 25 bp, Homo sapien
tccctacccagatacatgacatgca

SEQ ID NO: 1571051 - DNA, 25 bp, Homo sapien
tataatttgccaactaagctatctt

SEQ ID NO: 1571052 - DNA, 25 bp, Homo sapien
agaaatctggtgtcatcctaatttt

SEQ ID NO: 1571053 - DNA, 25 bp, Homo sapien
gagtatcgaattctaggttgactac

SEQ ID NO: 1571054 - DNA, 25 bp, Homo sapien
acagtttcagtgagtatcgaattct

SEQ ID NO: 1571055 - DNA, 25 bp, Homo sapien
tcagtgagtatcgaattctaggttg

SEQ ID NO: 1571056 - DNA, 25 bp, Homo sapien
ctaaatgtaaactggcgtgacagga

SEQ ID NO: 1571057 - DNA, 25 bp, Homo sapien
gagccattactgttcctaaatgtaa

SEQ ID NO: 1571058 - DNA, 25 bp, Homo sapien
caggagttccgggattgtccacagc

SEQ ID NO: 1571059 - DNA, 25 bp, Homo sapien
tcagtgggagccattactgttccta

SEQ ID NO: 1571060 - DNA, 25 bp, Homo sapien
aatgaacgccacgagctgcgcttga

SEQ ID NO: 1571061 - DNA, 25 bp, Homo sapien
ttctttggcttcgacgtcctgaccg

SEQ ID NO: 1571062 - DNA, 25 bp, Homo sapien
caagcgtggccgcattagctctttc

SEQ ID NO: 1571063 - DNA, 25 bp, Homo sapien
caaccaggatccttcgctgcaggga

SEQ ID NO: 1571064 - DNA, 25 bp, Homo sapien
cgcaggctgggcgaaggcaaaggag

SEQ ID NO: 1571065 - DNA, 25 bp, Homo sapien
gggataggaacgggagtctggagct

SEQ ID NO: 1571066 - DNA, 25 bp, Homo sapien
acgggataggaacgggagtctggag

SEQ ID NO: 1571067 - DNA, 25 bp, Homo sapien
ttgacgggataggaacgggagtctg

SEQ ID NO: 1571068 - DNA, 25 bp, Homo sapien
tgacgggataggaacgggagtctgg

SEQ ID NO: 1571069 - DNA, 25 bp, Homo sapien
tataaggggtggacctcgggagcca

SEQ ID NO: 1571070 - DNA, 25 bp, Homo sapien
ggggtggacctcgggagccagactg

SEQ ID NO: 1571071 - DNA, 25 bp, Homo sapien
aggggtggacctcgggagccagact

SEQ ID NO: 1571072 - DNA, 25 bp, Homo sapien
taaggggtggacctcgggagccaga

SEQ ID NO: 1571073 - DNA, 25 bp, Homo sapien
ggacatcaagtcacacctgttctcc

SEQ ID NO: 1571074 - DNA, 25 bp, Homo sapien
agagagaggacatcaagtcacacct

SEQ ID NO: 1571075 - DNA, 25 bp, Homo sapien
tgttctccccactgtacacaggtgg

SEQ ID NO: 1571076 - DNA, 25 bp, Homo sapien
gagaggacatcaagtcacacctgtt

SEQ ID NO: 1571077 - DNA, 25 bp, Homo sapien
atgccattctctcggcctgccccag

SEQ ID NO: 1571078 - DNA, 25 bp, Homo sapien
cgggttctcgtgcatcggcgtctcc

SEQ ID NO: 1571079 - DNA, 25 bp, Homo sapien
ccatgccattctctcggcctgcccc

SEQ ID NO: 1571080 - DNA, 25 bp, Homo sapien
tggccacaggcccattgctgctgga

SEQ ID NO: 1571081 - DNA, 25 bp, Homo sapien
gcccattgctgctggacttggcaga

SEQ ID NO: 1571082 - DNA, 25 bp, Homo sapien
ctggccagggcctgacgggccttct

SEQ ID NO: 1571083 - DNA, 25 bp, Homo sapien
cggcagctcctgacttgctgatgct

SEQ ID NO: 1571084 - DNA, 25 bp, Homo sapien
taggggtaggcatagttgtactgct

SEQ ID NO: 1571085 - DNA, 25 bp, Homo sapien
tgctggtaccactggtagtactgct

SEQ ID NO: 1571086 - DNA, 25 bp, Homo sapien
ggcatagttgtactgctggtaccac

SEQ ID NO: 1571087 - DNA, 25 bp, Homo sapien
ctggtaccactggtagtactgctgc

SEQ ID NO: 1571088 - DNA, 25 bp, Homo sapien
tgccccgccccactggctgggcact

SEQ ID NO: 1571089 - DNA, 25 bp, Homo sapien
agactccacctcgccctgccccgcc

SEQ ID NO: 1571090 - DNA, 25 bp, Homo sapien
ccctgccccgccccactggctgggc

SEQ ID NO: 1571091 - DNA, 25 bp, Homo sapien
gactccacctcgccctgccccgccc

SEQ ID NO: 1571092 - DNA, 25 bp, Homo sapien
tatgtaggaccttgtggctcatggc

SEQ ID NO: 1571093 - DNA, 25 bp, Homo sapien
gaatttacctcctgggcaagttaga

SEQ ID NO: 1571094 - DNA, 25 bp, Homo sapien
caaggaggtctctgcttcgatggcc

SEQ ID NO: 1571095 - DNA, 25 bp, Homo sapien
tcagtgtgtcaggtagaggctctct

SEQ ID NO: 1571096 - DNA, 25 bp, Homo sapien
gggagccatagctctggtacatgct

SEQ ID NO: 1571097 - DNA, 25 bp, Homo sapien
agccggccatcccatactgggaagg

SEQ ID NO: 1571098 - DNA, 25 bp, Homo sapien
ctggttcagagtcccttggtgttgg

SEQ ID NO: 1571099 - DNA, 25 bp, Homo sapien
tgttggggtgcggatggctgctggg

SEQ ID NO: 1571100 - DNA, 25 bp, Homo sapien
gggaggcagattctggggctggcga

SEQ ID NO: 1571101 - DNA, 25 bp, Homo sapien
acgggaggcagattctggggctggc

SEQ ID NO: 1571102 - DNA, 25 bp, Homo sapien
gcacgggaggcagattctggggctg

SEQ ID NO: 1571103 - DNA, 25 bp, Homo sapien
gaggcagattctggggctggcgagt

SEQ ID NO: 1571104 - DNA, 25 bp, Homo sapien
taggacatgctctcatccatgccgg

SEQ ID NO: 1571105 - DNA, 25 bp, Homo sapien
ctgagggccactgttcagcgtgtga

SEQ ID NO: 1571106 - DNA, 25 bp, Homo sapien
ggcttggcaggttcggtgtaggtgt

SEQ ID NO: 1571107 - DNA, 25 bp, Homo sapien
tgttcagcgtgtgagccccatgtgg

SEQ ID NO: 1571108 - DNA, 25 bp, Homo sapien
aaagctctgggtggtaacagcaaag

SEQ ID NO: 1571109 - DNA, 25 bp, Homo sapien
taacagcaaagggtcgcttctggat

SEQ ID NO: 1571110 - DNA, 25 bp, Homo sapien
cctctgcgttggagccaaagctctg

SEQ ID NO: 1571111 - DNA, 25 bp, Homo sapien
tgaacttgagacctccagtcccagg

SEQ ID NO: 1571112 - DNA, 25 bp, Homo sapien
gtcaatggtataggccgagccgtcc

SEQ ID NO: 1571113 - DNA, 25 bp, Homo sapien
ttgagcagcttttccgtgcggtcct

SEQ ID NO: 1571114 - DNA, 25 bp, Homo sapien
ggtgaagcagcgctccacatactct

SEQ ID NO: 1571115 - DNA, 25 bp, Homo sapien
tcctccgactcacaggcggtgaagc

SEQ ID NO: 1571116 - DNA, 25 bp, Homo sapien
gccagacactggcaggacagccgcc

SEQ ID NO: 1571117 - DNA, 25 bp, Homo sapien
cccgccagacactggcaggacagcc

SEQ ID NO: 1571118 - DNA, 25 bp, Homo sapien
cagacactggcaggacagccgccac

SEQ ID NO: 1571119 - DNA, 25 bp, Homo sapien
gacactggcaggacagccgccacca

SEQ ID NO: 1571120 - DNA, 25 bp, Homo sapien
gccaaacttggtgaagctgttgccc

SEQ ID NO: 1571121 - DNA, 25 bp, Homo sapien
gaagacgttgcggttgccaaacttg

SEQ ID NO: 1571122 - DNA, 25 bp, Homo sapien
gaagagctgttgtccttcatgaaga

SEQ ID NO: 1571123 - DNA, 25 bp, Homo sapien
gagcctgcccctctaggagggtgaa

SEQ ID NO: 1571124 - DNA, 25 bp, Homo sapien
ccacagggtgacactcattccctga

SEQ ID NO: 1571125 - DNA, 25 bp, Homo sapien
gacactcattccctgagtaggagct

SEQ ID NO: 1571126 - DNA, 25 bp, Homo sapien
tgcctcggccccgatccatatgggc

SEQ ID NO: 1571127 - DNA, 25 bp, Homo sapien
gctgtcggagtctgagtgggagtca

SEQ ID NO: 1571128 - DNA, 25 bp, Homo sapien
cttctttcgactgcgcttggtgggc

SEQ ID NO: 1571129 - DNA, 25 bp, Homo sapien
gcttcttcagctctcgctccgggtc

SEQ ID NO: 1571130 - DNA, 25 bp, Homo sapien
gggcaggtgcccacgatctgcagct

SEQ ID NO: 1571131 - DNA, 25 bp, Homo sapien
cgcaggtagtgcttggtgatgtcag

SEQ ID NO: 1571132 - DNA, 25 bp, Homo sapien
tctctttccagtggcacttgaccat

SEQ ID NO: 1571133 - DNA, 25 bp, Homo sapien
catctgctcgcaggcaaacgcgtag

SEQ ID NO: 1571134 - DNA, 25 bp, Homo sapien
cacttgaccatgcacagcgactttt

SEQ ID NO: 1571135 - DNA, 25 bp, Homo sapien
gatcctgccggatcgacttcatctg

SEQ ID NO: 1571136 - DNA, 25 bp, Homo sapien
atgggtctcgtacacctccaccgtg

SEQ ID NO: 1571137 - DNA, 25 bp, Homo sapien
gcgatccgggcatgggtctcgtaca

SEQ ID NO: 1571138 - DNA, 25 bp, Homo sapien
cttctccaaggcgatccgggcatgg

SEQ ID NO: 1571139 - DNA, 25 bp, Homo sapien
acctccaccgtgaactcggtgcgga

SEQ ID NO: 1571140 - DNA, 25 bp, Homo sapien
tgaagatgtagtagaggattcggta

SEQ ID NO: 1571141 - DNA, 25 bp, Homo sapien
tgagctgcgtctggcactggttaaa

SEQ ID NO: 1571142 - DNA, 25 bp, Homo sapien
ttctcggcgtacagcgacttgagct

SEQ ID NO: 1571143 - DNA, 25 bp, Homo sapien
gattcggtaggcagtaaactcgccc

SEQ ID NO: 1571144 - DNA, 25 bp, Homo sapien
gcaccaagacaaagagggtgaagtc

SEQ ID NO: 1571145 - DNA, 25 bp, Homo sapien
ggtgaagtcagcagggctcaaccct

SEQ ID NO: 1571146 - DNA, 25 bp, Homo sapien
ctagcaccaagacaaagagggtgaa

SEQ ID NO: 1571147 - DNA, 25 bp, Homo sapien
caaccctgggtaccatggcctctgt

SEQ ID NO: 1571148 - DNA, 25 bp, Homo sapien
gctgtccttaatgccaaggcgtggg

SEQ ID NO: 1571149 - DNA, 25 bp, Homo sapien
cgtgggccacgcaaggatctgcctt

SEQ ID NO: 1571150 - DNA, 25 bp, Homo sapien
cagttctcgtgtgaggtatgccagc

SEQ ID NO: 1571151 - DNA, 25 bp, Homo sapien
caaacttgtccacgaggtagccaga

SEQ ID NO: 1571152 - DNA, 25 bp, Homo sapien
cagaagggagcttggcaccacatac

SEQ ID NO: 1571153 - DNA, 25 bp, Homo sapien
tgcgaggcggaaggatgggaagagc

SEQ ID NO: 1571154 - DNA, 25 bp, Homo sapien
cggtgcgaggcggaaggatgggaag

SEQ ID NO: 1571155 - DNA, 25 bp, Homo sapien
aaggcagaagggagcttggcaccac

SEQ ID NO: 1571156 - DNA, 25 bp, Homo sapien
taacttcccaagctggtcatggagc

SEQ ID NO: 1571157 - DNA, 25 bp, Homo sapien
tactgactgagcatctagcacgagc

SEQ ID NO: 1571158 - DNA, 25 bp, Homo sapien
caagccaggcgcaatgtctagtgaa

SEQ ID NO: 1571159 - DNA, 25 bp, Homo sapien
tgactatgacctcacgtggacagcc

SEQ ID NO: 1571160 - DNA, 25 bp, Homo sapien
gggctctaggaaggcccggcaggcg

SEQ ID NO: 1571161 - DNA, 25 bp, Homo sapien
cagctcggcctgcaggtaggagact

SEQ ID NO: 1571162 - DNA, 25 bp, Homo sapien
gtaggagactggcagcgcagggcgg

SEQ ID NO: 1571163 - DNA, 25 bp, Homo sapien
gcggcctcgccctcgaaggccagct

SEQ ID NO: 1571164 - DNA, 25 bp, Homo sapien
ggctgaggcggcagtcgatgctgga

SEQ ID NO: 1571165 - DNA, 25 bp, Homo sapien
agctgcgccaggctgaggcggcagt

SEQ ID NO: 1571166 - DNA, 25 bp, Homo sapien
tgaggcggcagtcgatgctggagtt

SEQ ID NO: 1571167 - DNA, 25 bp, Homo sapien
gcgccaggctgaggcggcagtcgat

SEQ ID NO: 1571168 - DNA, 25 bp, Homo sapien
caagtccacggctcaaaaacagaat

SEQ ID NO: 1571169 - DNA, 25 bp, Homo sapien
cgggtaccggagtgcaagctcgaaa

SEQ ID NO: 1571170 - DNA, 25 bp, Homo sapien
ctctgtacagactccccggtgggaa

SEQ ID NO: 1571171 - DNA, 25 bp, Homo sapien
ggacgggcacagtctctaagcagct

SEQ ID NO: 1571172 - DNA, 25 bp, Homo sapien
tgtgctgaaccaagggaagaatgcg

SEQ ID NO: 1571173 - DNA, 25 bp, Homo sapien
caaatggtgctcagtgctccaagga

SEQ ID NO: 1571174 - DNA, 25 bp, Homo sapien
caacatgacgtgagctggtgatcca

SEQ ID NO: 1571175 - DNA, 25 bp, Homo sapien
gggacacggagacaactttatacaa

SEQ ID NO: 1571176 - DNA, 25 bp, Homo sapien
ctccatgctggacgcggtgctgggc

SEQ ID NO: 1571177 - DNA, 25 bp, Homo sapien
ccctccatgctggacgcggtgctgg

SEQ ID NO: 1571178 - DNA, 25 bp, Homo sapien
catgctggacgcggtgctgggcgtc

SEQ ID NO: 1571179 - DNA, 25 bp, Homo sapien
tgctggacgcggtgctgggcgtcat

SEQ ID NO: 1571180 - DNA, 25 bp, Homo sapien
acttccggcacacgctgcacgtggg

SEQ ID NO: 1571181 - DNA, 25 bp, Homo sapien
ggcgccctgtccatctccgcgccgc

SEQ ID NO: 1571182 - DNA, 25 bp, Homo sapien
gcgccgctcggcgacttccggcaca

SEQ ID NO: 1571183 - DNA, 25 bp, Homo sapien
ccaagaagcggcctgatcgcggcgc

SEQ ID NO: 1571184 - DNA, 25 bp, Homo sapien
tttggacacgtgcaaccccttggaa

SEQ ID NO: 1571185 - DNA, 25 bp, Homo sapien
gacacgtatcttgagtgccctcttg

SEQ ID NO: 1571186 - DNA, 25 bp, Homo sapien
gacattcacatgcatgcgttgttgg

SEQ ID NO: 1571187 - DNA, 25 bp, Homo sapien
caagaacgtatttcaggcatttcca

SEQ ID NO: 1571188 - DNA, 25 bp, Homo sapien
gctgcgagggttcgacgcgtatctc

SEQ ID NO: 1571189 - DNA, 25 bp, Homo sapien
cgcgtatctcgggtgccctcttgtg

SEQ ID NO: 1571190 - DNA, 25 bp, Homo sapien
ggttcgacgcgtatctcgggtgccc

SEQ ID NO: 1571191 - DNA, 25 bp, Homo sapien
cgacgcgtatctcgggtgccctctt

SEQ ID NO: 1571192 - DNA, 25 bp, Homo sapien
gaaaatcagactctccctccaaaat

SEQ ID NO: 1571193 - DNA, 25 bp, Homo sapien
gccttcatgaaaatcagactctccc

SEQ ID NO: 1571194 - DNA, 25 bp, Homo sapien
aaaatcagactctccctccaaaatg

SEQ ID NO: 1571195 - DNA, 25 bp, Homo sapien
tcatgaaaatcagactctccctcca

SEQ ID NO: 1571196 - DNA, 25 bp, Homo sapien
ctggaatgctggcgttatcgtcaga

SEQ ID NO: 1571197 - DNA, 25 bp, Homo sapien
ggaatgctggcgttatcgtcagaag

SEQ ID NO: 1571198 - DNA, 25 bp, Homo sapien
gaatgctggcgttatcgtcagaagc

SEQ ID NO: 1571199 - DNA, 25 bp, Homo sapien
atgctggcgttatcgtcagaagcat

SEQ ID NO: 1571200 - DNA, 25 bp, Homo sapien
tcatcatccatacgactggcccgaa

SEQ ID NO: 1571201 - DNA, 25 bp, Homo sapien
tctctgaccgaaacaccaaatccag

SEQ ID NO: 1571202 - DNA, 25 bp, Homo sapien
gactggcccgaacgtcatctctgac

SEQ ID NO: 1571203 - DNA, 25 bp, Homo sapien
ggaaggcaccatgaggcttagttct

SEQ ID NO: 1571204 - DNA, 25 bp, Homo sapien
gcaagctcttggtcccaacctggac

SEQ ID NO: 1571205 - DNA, 25 bp, Homo sapien
agtcgctaagctcccacagcattga

SEQ ID NO: 1571206 - DNA, 25 bp, Homo sapien
caagctcttggtcccaacctggact

SEQ ID NO: 1571207 - DNA, 25 bp, Homo sapien
ttcagtcgctaagctcccacagcat

SEQ ID NO: 1571208 - DNA, 25 bp, Homo sapien
tgaaggacggggtccacacggccca

SEQ ID NO: 1571209 - DNA, 25 bp, Homo sapien
ctgggtatgagtccggccccagatc

SEQ ID NO: 1571210 - DNA, 25 bp, Homo sapien
cacacggcccactccgtttcctctt

SEQ ID NO: 1571211 - DNA, 25 bp, Homo sapien
tagttctggagttcgatgaaggacg

SEQ ID NO: 1571212 - DNA, 25 bp, Homo sapien
ccggatgcaaccctggaaggaagac

SEQ ID NO: 1571213 - DNA, 25 bp, Homo sapien
aggaagacctcaggacgatgatcat

SEQ ID NO: 1571214 - DNA, 25 bp, Homo sapien
aaggaagacctcaggacgatgatca

SEQ ID NO: 1571215 - DNA, 25 bp, Homo sapien
atcttctggcccggatgcaaccctg

SEQ ID NO: 1571216 - DNA, 25 bp, Homo sapien
ttaaactagttacccgatgtgtcag

SEQ ID NO: 1571217 - DNA, 25 bp, Homo sapien
acccgatgtgtcagcctctttctaa

SEQ ID NO: 1571218 - DNA, 25 bp, Homo sapien
gatcagatgaccttaaactagttac

SEQ ID NO: 1571219 - DNA, 25 bp, Homo sapien
cagatgaccttaaactagttacccg

SEQ ID NO: 1571220 - DNA, 25 bp, Homo sapien
cctgcccgtggggtttccacagcaa

SEQ ID NO: 1571221 - DNA, 25 bp, Homo sapien
caagagggagagctttctgttctgt

SEQ ID NO: 1571222 - DNA, 25 bp, Homo sapien
cagcaactgcctcacacaagaggga

SEQ ID NO: 1571223 - DNA, 25 bp, Homo sapien
aagcagacaggatgtgctggccggg

SEQ ID NO: 1571224 - DNA, 25 bp, Homo sapien
gcccaggagagcagtgaggtgtgga

SEQ ID NO: 1571225 - DNA, 25 bp, Homo sapien
caggagagcagtgaggtgtggagac

SEQ ID NO: 1571226 - DNA, 25 bp, Homo sapien
ggagagcagtgaggtgtggagacat

SEQ ID NO: 1571227 - DNA, 25 bp, Homo sapien
ctaggcccaggagagcagtgaggtg

SEQ ID NO: 1571228 - DNA, 25 bp, Homo sapien
tgtggatggtctgggccaggcagag

SEQ ID NO: 1571229 - DNA, 25 bp, Homo sapien
cctcctgcgtgtggatggtctgggc

SEQ ID NO: 1571230 - DNA, 25 bp, Homo sapien
tcctgcgtgtggatggtctgggcca

SEQ ID NO: 1571231 - DNA, 25 bp, Homo sapien
tgcgtgtggatggtctgggccaggc

SEQ ID NO: 1571232 - DNA, 25 bp, Homo sapien
ctgactcagatggaccaagtcgaaa

SEQ ID NO: 1571233 - DNA, 25 bp, Homo sapien
ggaccaagtcgaaacacattataac

SEQ ID NO: 1571234 - DNA, 25 bp, Homo sapien
gtcactgtgctcagaccatccaggg

SEQ ID NO: 1571235 - DNA, 25 bp, Homo sapien
atctttgtacttggctctatcctcc

SEQ ID NO: 1571236 - DNA, 25 bp, Homo sapien
ccgggctctgtgtccggggagtccg

SEQ ID NO: 1571237 - DNA, 25 bp, Homo sapien
ctctgtgtccggggagtccgggcct

SEQ ID NO: 1571238 - DNA, 25 bp, Homo sapien
tgtccggggagtccgggcctccaga

SEQ ID NO: 1571239 - DNA, 25 bp, Homo sapien
tgtgtccggggagtccgggcctcca

SEQ ID NO: 1571240 - DNA, 25 bp, Homo sapien
tgcatcaaatccggaggcttcagtg

SEQ ID NO: 1571241 - DNA, 25 bp, Homo sapien
tggtgcatcaaatccggaggcttca

SEQ ID NO: 1571242 - DNA, 25 bp, Homo sapien
ggtgcatcaaatccggaggcttcag

SEQ ID NO: 1571243 - DNA, 25 bp, Homo sapien
atcaaatccggaggcttcagtgcct

SEQ ID NO: 1571244 - DNA, 25 bp, Homo sapien
ttcacaagacgggaggccatttctc

SEQ ID NO: 1571245 - DNA, 25 bp, Homo sapien
ttgaagttcacaagacgggaggcca

SEQ ID NO: 1571246 - DNA, 25 bp, Homo sapien
cacaagacgggaggccatttctcct

SEQ ID NO: 1571247 - DNA, 25 bp, Homo sapien
aagttcacaagacgggaggccattt

SEQ ID NO: 1571248 - DNA, 25 bp, Homo sapien
ctctggacagaagccgagaagtggt

SEQ ID NO: 1571249 - DNA, 25 bp, Homo sapien
tgggcatctctcacacgctcagcgt

SEQ ID NO: 1571250 - DNA, 25 bp, Homo sapien
agccgagaagtggtctgcagatcag

SEQ ID NO: 1571251 - DNA, 25 bp, Homo sapien
cacgctcagcgtgtctcagttccat

SEQ ID NO: 1571252 - DNA, 25 bp, Homo sapien
gagtgacagcgcaggctcacgctgg

SEQ ID NO: 1571253 - DNA, 25 bp, Homo sapien
tcacgctggctcttgcgtgcaccag

SEQ ID NO: 1571254 - DNA, 25 bp, Homo sapien
aaattcatcaaaggccagctctgag

SEQ ID NO: 1571255 - DNA, 25 bp, Homo sapien
gataaattcatcaaaggccagctct

SEQ ID NO: 1571256 - DNA, 25 bp, Homo sapien
cttgaaggagtgatccccagcctgg

SEQ ID NO: 1571257 - DNA, 25 bp, Homo sapien
tgaaggagtgatccccagcctggat

SEQ ID NO: 1571258 - DNA, 25 bp, Homo sapien
acagcacctataggcttctgcacgg

SEQ ID NO: 1571259 - DNA, 25 bp, Homo sapien
tctgcacgggcaggcgttataggac

SEQ ID NO: 1571260 - DNA, 25 bp, Homo sapien
ggcaaaatggacaaggaggaaatcc

SEQ ID NO: 1571261 - DNA, 25 bp, Homo sapien
gggcaaaatggacaaggaggaaatc

SEQ ID NO: 1571262 - DNA, 25 bp, Homo sapien
tgggcaaaatggacaaggaggaaat

SEQ ID NO: 1571263 - DNA, 25 bp, Homo sapien
ctgggcaaaatggacaaggaggaaa

SEQ ID NO: 1571264 - DNA, 25 bp, Homo sapien
agggctggaatatgtggtattctca

SEQ ID NO: 1571265 - DNA, 25 bp, Homo sapien
gcagggctggaatatgtggtattct

SEQ ID NO: 1571266 - DNA, 25 bp, Homo sapien
cacggcagggctggaatatgtggta

SEQ ID NO: 1571267 - DNA, 25 bp, Homo sapien
cggcagggctggaatatgtggtatt

SEQ ID NO: 1571268 - DNA, 25 bp, Homo sapien
tggcccattgaacccaacgcattat

SEQ ID NO: 1571269 - DNA, 25 bp, Homo sapien
tctgtgaaattgaggctttgcccag

SEQ ID NO: 1571270 - DNA, 25 bp, Homo sapien
ccaacgcattatgttcatccttcat

SEQ ID NO: 1571271 - DNA, 25 bp, Homo sapien
agatctgtgaaattgaggctttgcc

SEQ ID NO: 1571272 - DNA, 25 bp, Homo sapien
ggacgggtctcctgcgcagggtgaa

SEQ ID NO: 1571273 - DNA, 25 bp, Homo sapien
aagatctcacgagaggatgggtctc

SEQ ID NO: 1571274 - DNA, 25 bp, Homo sapien
gatctcgggagaggccggatctccc

SEQ ID NO: 1571275 - DNA, 25 bp, Homo sapien
tcttgcgagaggacgggtctccttc

SEQ ID NO: 1571276 - DNA, 25 bp, Homo sapien
gggtgaagatttcgcgagacgacgg

SEQ ID NO: 1571277 - DNA, 25 bp, Homo sapien
tgcatggggtgatgatctcgcgaga

SEQ ID NO: 1571278 - DNA, 25 bp, Homo sapien
tgaagatttcgcgagacgacgggtc

SEQ ID NO: 1571279 - DNA, 25 bp, Homo sapien
ttcgcgagacgacgggtctcctgca

SEQ ID NO: 1571280 - DNA, 25 bp, Homo sapien
tccgcgtgccttgaagatctcggga

SEQ ID NO: 1571281 - DNA, 25 bp, Homo sapien
tctcgcgataggagggaatctcatg

SEQ ID NO: 1571282 - DNA, 25 bp, Homo sapien
gagccatcgcatggaagatctcgcg

SEQ ID NO: 1571283 - DNA, 25 bp, Homo sapien
gatctcgcgagaggacgggtcttcc

SEQ ID NO: 1571284 - DNA, 25 bp, Homo sapien
aggacggtgatgagtttgggggcca

SEQ ID NO: 1571285 - DNA, 25 bp, Homo sapien
ggacggtgatgagtttgggggccat

SEQ ID NO: 1571286 - DNA, 25 bp, Homo sapien
cagatcttctggttcaggcagaatc

SEQ ID NO: 1571287 - DNA, 25 bp, Homo sapien
ccgcatgtgggcagatcttctggtt

SEQ ID NO: 1571288 - DNA, 25 bp, Homo sapien
gggcagatcttctggttcaggcaga

SEQ ID NO: 1571289 - DNA, 25 bp, Homo sapien
gcatgtgggcagatcttctggttca

SEQ ID NO: 1571290 - DNA, 25 bp, Homo sapien
ggctgacagggagaacttgtcctga

SEQ ID NO: 1571291 - DNA, 25 bp, Homo sapien
gccaggctgacagggagaacttgtc

SEQ ID NO: 1571292 - DNA, 25 bp, Homo sapien
caggctgacagggagaacttgtcct

SEQ ID NO: 1571293 - DNA, 25 bp, Homo sapien
gacagggagaacttgtcctgagcac

SEQ ID NO: 1571294 - DNA, 25 bp, Homo sapien
caaaccgaagatgggaatgacagga

SEQ ID NO: 1571295 - DNA, 25 bp, Homo sapien
cgatgatcttcagggagttgctctc

SEQ ID NO: 1571296 - DNA, 25 bp, Homo sapien
gcaactcatggcttcgggtcccagt

SEQ ID NO: 1571297 - DNA, 25 bp, Homo sapien
tctcagctgaccactttgaggcgtg

SEQ ID NO: 1571298 - DNA, 25 bp, Homo sapien
ctggcttgaaaccatatgagatgtg

SEQ ID NO: 1571299 - DNA, 25 bp, Homo sapien
ctcccggaaaatgggaattactctg

SEQ ID NO: 1571300 - DNA, 25 bp, Homo sapien
gcccgtctgcgtccttcctgtttgt

SEQ ID NO: 1571301 - DNA, 25 bp, Homo sapien
tgcgtgcatgttctctctgcgcgga

SEQ ID NO: 1571302 - DNA, 25 bp, Homo sapien
catctgtaggctcctgcatgggcag

SEQ ID NO: 1571303 - DNA, 25 bp, Homo sapien
ggaaaagacagcctcgacgtaatgg

SEQ ID NO: 1571304 - DNA, 25 bp, Homo sapien
tcgacgtaatggatcccagcctcca

SEQ ID NO: 1571305 - DNA, 25 bp, Homo sapien
gataaattcatcaaaggccagttct

SEQ ID NO: 1571306 - DNA, 25 bp, Homo sapien
ctgtgatcacaatgtccagggggtc

SEQ ID NO: 1571307 - DNA, 25 bp, Homo sapien
tgtgatcacaatgtccagggggtca

SEQ ID NO: 1571308 - DNA, 25 bp, Homo sapien
atagcatctataggtcccgccaggg

SEQ ID NO: 1571309 - DNA, 25 bp, Homo sapien
gagtcattgaaggaaccatagcatc

SEQ ID NO: 1571310 - DNA, 25 bp, Homo sapien
tgagcaaccccgtgtctgaacagat

SEQ ID NO: 1571311 - DNA, 25 bp, Homo sapien
tggtgtaaagttgcagcgggtcact

SEQ ID NO: 1571312 - DNA, 25 bp, Homo sapien
gtgaatgacagaggagtactcttag

SEQ ID NO: 1571313 - DNA, 25 bp, Homo sapien
gaatgacagaggagtactcttagtg

SEQ ID NO: 1571314 - DNA, 25 bp, Homo sapien
ctgtgaatgacagaggagtactctt

SEQ ID NO: 1571315 - DNA, 25 bp, Homo sapien
aatgacagaggagtactcttagtgt

SEQ ID NO: 1571316 - DNA, 25 bp, Homo sapien
cccagggactcagacactaggataa

SEQ ID NO: 1571317 - DNA, 25 bp, Homo sapien
ccaaagcgtctgaggctgaaaggcc

SEQ ID NO: 1571318 - DNA, 25 bp, Homo sapien
tgaaaggccttacagattcccgcac

SEQ ID NO: 1571319 - DNA, 25 bp, Homo sapien
aggcctcagtcccaaagcgtctgag

SEQ ID NO: 1571320 - DNA, 25 bp, Homo sapien
atatcgaatatggtcttttaaatcc

SEQ ID NO: 1571321 - DNA, 25 bp, Homo sapien
cagtgaatatcgaatatggtctttt

SEQ ID NO: 1571322 - DNA, 25 bp, Homo sapien
agacagacagtgaatatcgaatatg

SEQ ID NO: 1571323 - DNA, 25 bp, Homo sapien
cagacagtgaatatcgaatatggtc

SEQ ID NO: 1571324 - DNA, 25 bp, Homo sapien
ggtgggaggacttccacatgtgtgg

SEQ ID NO: 1571325 - DNA, 25 bp, Homo sapien
gaggacttccacatgtgtggacaca

SEQ ID NO: 1571326 - DNA, 25 bp, Homo sapien
cacatctcatcactctctcatccat

SEQ ID NO: 1571327 - DNA, 25 bp, Homo sapien
taggagcataccctccgtaccagga

SEQ ID NO: 1571328 - DNA, 25 bp, Homo sapien
aaattcagagaaccacccatcagca

SEQ ID NO: 1571329 - DNA, 25 bp, Homo sapien
cctgaggctgcagcgtgatccagcc

SEQ ID NO: 1571330 - DNA, 25 bp, Homo sapien
ggagcagggtttctccatcaagaac

SEQ ID NO: 1571331 - DNA, 25 bp, Homo sapien
tcagaggtggcaataccaagaccaa

SEQ ID NO: 1571332 - DNA, 25 bp, Homo sapien
cttcatccgtccgttggccttccgt

SEQ ID NO: 1571333 - DNA, 25 bp, Homo sapien
catccgtccgttggccttccgtggg

SEQ ID NO: 1571334 - DNA, 25 bp, Homo sapien
ctcttcatccgtccgttggccttcc

SEQ ID NO: 1571335 - DNA, 25 bp, Homo sapien
ttcatccgtccgttggccttccgtg

SEQ ID NO: 1571336 - DNA, 25 bp, Homo sapien
gatggtttcggctgggagaactcac

SEQ ID NO: 1571337 - DNA, 25 bp, Homo sapien
ggtgaaaagaggagcatatttagtg

SEQ ID NO: 1571338 - DNA, 25 bp, Homo sapien
tgatggtttcggctgggagaactca

SEQ ID NO: 1571339 - DNA, 25 bp, Homo sapien
ggagcatatttagtggctgaaggca

SEQ ID NO: 1571340 - DNA, 25 bp, Homo sapien
gggcatatatgatctcctgtgtctc

SEQ ID NO: 1571341 - DNA, 25 bp, Homo sapien
ggcctggtggtttaactgggcatat

SEQ ID NO: 1571342 - DNA, 25 bp, Homo sapien
gtttaactgggcatatatgatctcc

SEQ ID NO: 1571343 - DNA, 25 bp, Homo sapien
caggagggaatcctgtctgtgagag

SEQ ID NO: 1571344 - DNA, 25 bp, Homo sapien
tactaggatcctccgagaggtagtg

SEQ ID NO: 1571345 - DNA, 25 bp, Homo sapien
gacagtgatgtagatactaggatcc

SEQ ID NO: 1571346 - DNA, 25 bp, Homo sapien
gatgtagatactaggatcctccgag

SEQ ID NO: 1571347 - DNA, 25 bp, Homo sapien
gtggacagtgatgtagatactagga

SEQ ID NO: 1571348 - DNA, 25 bp, Homo sapien
aagagaactctgcttgttccccgca

SEQ ID NO: 1571349 - DNA, 25 bp, Homo sapien
taaactggctgagcatatacatcgg

SEQ ID NO: 1571350 - DNA, 25 bp, Homo sapien
agtaccttcttaaggcgggcgagcg

SEQ ID NO: 1571351 - DNA, 25 bp, Homo sapien
gcttcgaggtgtcaagatggtacca

SEQ ID NO: 1571352 - DNA, 25 bp, Homo sapien
agttgtgggggagaatattacaaag

SEQ ID NO: 1571353 - DNA, 25 bp, Homo sapien
ttgtgggggagaatattacaaagta

SEQ ID NO: 1571354 - DNA, 25 bp, Homo sapien
cttctaaagttgtgggggagaatat

SEQ ID NO: 1571355 - DNA, 25 bp, Homo sapien
taaagttgtgggggagaatattaca

SEQ ID NO: 1571356 - DNA, 25 bp, Homo sapien
cccagccttgaagtaccttcttaag

SEQ ID NO: 1571357 - DNA, 25 bp, Homo sapien
gcacccagccttgaagtaccttctt

SEQ ID NO: 1571358 - DNA, 25 bp, Homo sapien
cttctaaagttgtgggggagaatat

SEQ ID NO: 1571359 - DNA, 25 bp, Homo sapien
ccgcacccagccttgaagtaccttc

SEQ ID NO: 1571360 - DNA, 25 bp, Homo sapien
taaagacgccggctatgcaagggtt

SEQ ID NO: 1571361 - DNA, 25 bp, Homo sapien
gacagacaggtataaagacgccggc

SEQ ID NO: 1571362 - DNA, 25 bp, Homo sapien
tggatggacagacaggtataaagac

SEQ ID NO: 1571363 - DNA, 25 bp, Homo sapien
caggtataaagacgccggctatgca

SEQ ID NO: 1571364 - DNA, 25 bp, Homo sapien
tcagtgccctcgactggaggacaaa

SEQ ID NO: 1571365 - DNA, 25 bp, Homo sapien
tcgactggaggacaaacaccaaccc

SEQ ID NO: 1571366 - DNA, 25 bp, Homo sapien
tgatgggatggaagctgattggtgc

SEQ ID NO: 1571367 - DNA, 25 bp, Homo sapien
aggttgtcagtgccctcgactggag

SEQ ID NO: 1571368 - DNA, 25 bp, Homo sapien
tggccgctcctcagggtgggaaatg

SEQ ID NO: 1571369 - DNA, 25 bp, Homo sapien
tgatggtcttgagtggccgctcctc

SEQ ID NO: 1571370 - DNA, 25 bp, Homo sapien
caagtcctggtggtgataggagctc

SEQ ID NO: 1571371 - DNA, 25 bp, Homo sapien
ataggagctcggctgcatcacagtc

SEQ ID NO: 1571372 - DNA, 25 bp, Homo sapien
tgcgatcaggatgtccagggggtcc

SEQ ID NO: 1571373 - DNA, 25 bp, Homo sapien
ctgcgatcaggatgtccagggggtc

SEQ ID NO: 1571374 - DNA, 25 bp, Homo sapien
tggcatatgtctccggaaactttct

SEQ ID NO: 1571375 - DNA, 25 bp, Homo sapien
tgcgtgttgtgctttggttggcaat

SEQ ID NO: 1571376 - DNA, 25 bp, Homo sapien
aactttctgtcataagtgcaaagcc

SEQ ID NO: 1571377 - DNA, 25 bp, Homo sapien
caacaataatttcatgtccgtagaa

SEQ ID NO: 1571378 - DNA, 25 bp, Homo sapien
tgggaggaatacttcggcctgggag

SEQ ID NO: 1571379 - DNA, 25 bp, Homo sapien
catatttgttctgtcttgagagtgt

SEQ ID NO: 1571380 - DNA, 25 bp, Homo sapien
cagaggagtaatgcagggtctacca

SEQ ID NO: 1571381 - DNA, 25 bp, Homo sapien
gaaatgcagggattaactataataa

SEQ ID NO: 1571382 - DNA, 25 bp, Homo sapien
gacactcggaggctggatccttctt

SEQ ID NO: 1571383 - DNA, 25 bp, Homo sapien
caggagcctggctgtcataccttta

SEQ ID NO: 1571384 - DNA, 25 bp, Homo sapien
ccgtccatcagctcagcgttgcggg

SEQ ID NO: 1571385 - DNA, 25 bp, Homo sapien
tgttatgtgcaaccacacaggaagt

SEQ ID NO: 1571386 - DNA, 25 bp, Homo sapien
tcaggaccgtgaggatgggggtcat

SEQ ID NO: 1571387 - DNA, 25 bp, Homo sapien
atcaggaccgtgaggatgggggtca

SEQ ID NO: 1571388 - DNA, 25 bp, Homo sapien
gacagatcaggaccgtgaggatggg

SEQ ID NO: 1571389 - DNA, 25 bp, Homo sapien
cgagacagatcaggaccgtgaggat

SEQ ID NO: 1571390 - DNA, 25 bp, Homo sapien
ctgcctgcacgtgggtcctggggcc

SEQ ID NO: 1571391 - DNA, 25 bp, Homo sapien
gcctgcacgtgggtcctggggccca

SEQ ID NO: 1571392 - DNA, 25 bp, Homo sapien
tgcctgcacgtgggtcctggggccc

SEQ ID NO: 1571393 - DNA, 25 bp, Homo sapien
gatttgttttccctatatagatggt

SEQ ID NO: 1571394 - DNA, 25 bp, Homo sapien
acccaggatgctgatttgttttccc

SEQ ID NO: 1571395 - DNA, 25 bp, Homo sapien
tcttgtatccgtctaacccaggatg

SEQ ID NO: 1571396 - DNA, 25 bp, Homo sapien
gggaactggccattcttcccaggct

SEQ ID NO: 1571397 - DNA, 25 bp, Homo sapien
gattgtggctgtagtactgacagtg

SEQ ID NO: 1571398 - DNA, 25 bp, Homo sapien
ctgtagtactgacagtgataccgcc

SEQ ID NO: 1571399 - DNA, 25 bp, Homo sapien
tggctgtagtactgacagtgatacc

SEQ ID NO: 1571400 - DNA, 25 bp, Homo sapien
gagtgattgtggctgtagtactgac

SEQ ID NO: 1571401 - DNA, 25 bp, Homo sapien
tgtcaccaccagctccagggggtca

SEQ ID NO: 1571402 - DNA, 25 bp, Homo sapien
ctgtcaccaccagctccagggggtc

SEQ ID NO: 1571403 - DNA, 25 bp, Homo sapien
gatcactgggtagagaccacacata

SEQ ID NO: 1571404 - DNA, 25 bp, Homo sapien
tcactgggtagagaccacacatagg

SEQ ID NO: 1571405 - DNA, 25 bp, Homo sapien
atcactgggtagagaccacacatag

SEQ ID NO: 1571406 - DNA, 25 bp, Homo sapien
cactgggtagagaccacacataggg

SEQ ID NO: 1571407 - DNA, 25 bp, Homo sapien
ttatacagaacaaatctgtcgtagc

SEQ ID NO: 1571408 - DNA, 25 bp, Homo sapien
tgggggccgaccactcggaggagag

SEQ ID NO: 1571409 - DNA, 25 bp, Homo sapien
ccctccttatacagaacaaatctgt

SEQ ID NO: 1571410 - DNA, 25 bp, Homo sapien
gcatctgtactggcccccgtgggag

SEQ ID NO: 1571411 - DNA, 25 bp, Homo sapien
ctactgtggggaccggctgcaccga

SEQ ID NO: 1571412 - DNA, 25 bp, Homo sapien
gctactgtggggaccggctgcaccg

SEQ ID NO: 1571413 - DNA, 25 bp, Homo sapien
tcacgttctttcctggggctactgt

SEQ ID NO: 1571414 - DNA, 25 bp, Homo sapien
cagggtcacgttctttcctggggct

SEQ ID NO: 1571415 - DNA, 25 bp, Homo sapien
cccatgcggaattcagcctggttct

SEQ ID NO: 1571416 - DNA, 25 bp, Homo sapien
acccatgcggaattcagcctggttc

SEQ ID NO: 1571417 - DNA, 25 bp, Homo sapien
ccatgcggaattcagcctggttctg

SEQ ID NO: 1571418 - DNA, 25 bp, Homo sapien
gctcggagaggacaagatcagggcc

SEQ ID NO: 1571419 - DNA, 25 bp, Homo sapien
cctttgagctcggagaggacaagat

SEQ ID NO: 1571420 - DNA, 25 bp, Homo sapien
ctcggagaggacaagatcagggccc

SEQ ID NO: 1571421 - DNA, 25 bp, Homo sapien
ttgagctcggagaggacaagatcag

SEQ ID NO: 1571422 - DNA, 25 bp, Homo sapien
gtgggtgaagggcttatactcaggg

SEQ ID NO: 1571423 - DNA, 25 bp, Homo sapien
cctcatcacagtcagatcccaccga

SEQ ID NO: 1571424 - DNA, 25 bp, Homo sapien
ttctctctaaaggagcacatctggg

SEQ ID NO: 1571425 - DNA, 25 bp, Homo sapien
cagtgtgagcggcacccacagctgg

SEQ ID NO: 1571426 - DNA, 25 bp, Homo sapien
tagtcgtggagtctgtcttgttttg

SEQ ID NO: 1571427 - DNA, 25 bp, Homo sapien
gtctgtcttgttttgtgatgggctg

SEQ ID NO: 1571428 - DNA, 25 bp, Homo sapien
gtgatgggctgagggtctcagctgc

SEQ ID NO: 1571429 - DNA, 25 bp, Homo sapien
gatgggctgagggtctcagctgctt

SEQ ID NO: 1571430 - DNA, 25 bp, Homo sapien
atgagattctccactgtgtaatcct

SEQ ID NO: 1571431 - DNA, 25 bp, Homo sapien
gaccagcatacagtccagataatgt

SEQ ID NO: 1571432 - DNA, 25 bp, Homo sapien
cccagacagtttccttacactcaaa

SEQ ID NO: 1571433 - DNA, 25 bp, Homo sapien
taatgatcttctaggaatcacccca

SEQ ID NO: 1571434 - DNA, 25 bp, Homo sapien
cagtccagataatgtaggtcctaga

SEQ ID NO: 1571435 - DNA, 25 bp, Homo sapien
tctaagtggatcttctaggacagca

SEQ ID NO: 1571436 - DNA, 25 bp, Homo sapien
tgaagacagaggcaaccaggtaggt

SEQ ID NO: 1571437 - DNA, 25 bp, Homo sapien
taagaattcttccatcagccgggca

SEQ ID NO: 1571438 - DNA, 25 bp, Homo sapien
tatacacgttgaaatcctgagcccc

SEQ ID NO: 1571439 - DNA, 25 bp, Homo sapien
agcatctcgcatctggctgtgtagc

SEQ ID NO: 1571440 - DNA, 25 bp, Homo sapien
ggcagactcagatcagcagagaagc

SEQ ID NO: 1571441 - DNA, 25 bp, Homo sapien
gaagaccaaggtccatgctgcaggc

SEQ ID NO: 1571442 - DNA, 25 bp, Homo sapien
tcagggaagaccaaggtccatgctg

SEQ ID NO: 1571443 - DNA, 25 bp, Homo sapien
ctgccctgctctgcggatggatgag

SEQ ID NO: 1571444 - DNA, 25 bp, Homo sapien
tgccctgctctgcggatggatgagc

SEQ ID NO: 1571445 - DNA, 25 bp, Homo sapien
ccctgctctgcggatggatgagccc

SEQ ID NO: 1571446 - DNA, 25 bp, Homo sapien
ctgctctgcggatggatgagccctc

SEQ ID NO: 1571447 - DNA, 25 bp, Homo sapien
tcaggactgtgacgatgggggtcat

SEQ ID NO: 1571448 - DNA, 25 bp, Homo sapien
gagacagatcaggactgtgacgatg

SEQ ID NO: 1571449 - DNA, 25 bp, Homo sapien
agatcaggactgtgacgatgggggt

SEQ ID NO: 1571450 - DNA, 25 bp, Homo sapien
agacagatcaggactgtgacgatgg

SEQ ID NO: 1571451 - DNA, 25 bp, Homo sapien
ccctgtgaggaatttgcccctgaag

SEQ ID NO: 1571452 - DNA, 25 bp, Homo sapien
cctgggatctttgtgagcccctggg

SEQ ID NO: 1571453 - DNA, 25 bp, Homo sapien
tctccttagggactagaggtcggct

SEQ ID NO: 1571454 - DNA, 25 bp, Homo sapien
tgaggtccctcctaggttagaagct

SEQ ID NO: 1571455 - DNA, 25 bp, Homo sapien
ctgcctgcacgtgggtccgggggcc

SEQ ID NO: 1571456 - DNA, 25 bp, Homo sapien
cgtgggtccgggggcccagactcag

SEQ ID NO: 1571457 - DNA, 25 bp, Homo sapien
gcctgcacgtgggtccgggggccca

SEQ ID NO: 1571458 - DNA, 25 bp, Homo sapien
tgggtccgggggcccagactcagcc

SEQ ID NO: 1571459 - DNA, 25 bp, Homo sapien
ctgggtgatcacagagcctggctca

SEQ ID NO: 1571460 - DNA, 25 bp, Homo sapien
cagcccagagtgtgggcttggggag

SEQ ID NO: 1571461 - DNA, 25 bp, Homo sapien
ggctcagcccagagtgtgggcttgg

SEQ ID NO: 1571462 - DNA, 25 bp, Homo sapien
cagagtgtgggcttggggagggtcc

SEQ ID NO: 1571463 - DNA, 25 bp, Homo sapien
ctcctgtgggatccgtgtaatccag

SEQ ID NO: 1571464 - DNA, 25 bp, Homo sapien
gtggctaccgtagaaacagcgatac

SEQ ID NO: 1571465 - DNA, 25 bp, Homo sapien
gcagtgtggctaccgtagaaacagc

SEQ ID NO: 1571466 - DNA, 25 bp, Homo sapien
ggctaccgtagaaacagcgataccg

SEQ ID NO: 1571467 - DNA, 25 bp, Homo sapien
cctgcagtgtggctaccgtagaaac

SEQ ID NO: 1571468 - DNA, 25 bp, Homo sapien
tgtcaccaccagctccagggggtca

SEQ ID NO: 1571469 - DNA, 25 bp, Homo sapien
ctgtcaccaccagctccagggggtc

SEQ ID NO: 1571470 - DNA, 25 bp, Homo sapien
agacacaatggagggtcacgttccc

SEQ ID NO: 1571471 - DNA, 25 bp, Homo sapien
cctgtgagacacaatggagggtcac

SEQ ID NO: 1571472 - DNA, 25 bp, Homo sapien
gggtcacgttccctcctgaggtcac

SEQ ID NO: 1571473 - DNA, 25 bp, Homo sapien
gccacctgtgagacacaatggaggg

SEQ ID NO: 1571474 - DNA, 25 bp, Homo sapien
agttcaggcattgtgggtgttcatc

SEQ ID NO: 1571475 - DNA, 25 bp, Homo sapien
gttcaggcattgtgggtgttcatct

SEQ ID NO: 1571476 - DNA, 25 bp, Homo sapien
gagttcaggcattgtgggtgttcat

SEQ ID NO: 1571477 - DNA, 25 bp, Homo sapien
ttcaggcattgtgggtgttcatctt

SEQ ID NO: 1571478 - DNA, 25 bp, Homo sapien
tgtacgaccacctgcgactcgggct

SEQ ID NO: 1571479 - DNA, 25 bp, Homo sapien
gtacgaccacctgcgactcgggctc

SEQ ID NO: 1571480 - DNA, 25 bp, Homo sapien
acgaccacctgcgactcgggctcac

SEQ ID NO: 1571481 - DNA, 25 bp, Homo sapien
ctgtacgaccacctgcgactcgggc

SEQ ID NO: 1571482 - DNA, 25 bp, Homo sapien
ggagatcactgggtagagaccacac

SEQ ID NO: 1571483 - DNA, 25 bp, Homo sapien
ccaggagatcactgggtagagacca

SEQ ID NO: 1571484 - DNA, 25 bp, Homo sapien
caggagatcactgggtagagaccac

SEQ ID NO: 1571485 - DNA, 25 bp, Homo sapien
agatcactgggtagagaccacacat

SEQ ID NO: 1571486 - DNA, 25 bp, Homo sapien
ttatacagaacaaatctgtcgtagc

SEQ ID NO: 1571487 - DNA, 25 bp, Homo sapien
ctccttatacagaacaaatctgtcg

SEQ ID NO: 1571488 - DNA, 25 bp, Homo sapien
tccttatacagaacaaatctgtcgt

SEQ ID NO: 1571489 - DNA, 25 bp, Homo sapien
ccctccttatacagaacaaatctgt

SEQ ID NO: 1571490 - DNA, 25 bp, Homo sapien
tgggggccgaccactcggaggagag

SEQ ID NO: 1571491 - DNA, 25 bp, Homo sapien
tcgctgggggccgaccactcggagg

SEQ ID NO: 1571492 - DNA, 25 bp, Homo sapien
gcatctgtactggcccccgtaggag

SEQ ID NO: 1571493 - DNA, 25 bp, Homo sapien
tggcccccgtaggagcggctcacag

SEQ ID NO: 1571494 - DNA, 25 bp, Homo sapien
gtggggcccggatgcaccgagatga

SEQ ID NO: 1571495 - DNA, 25 bp, Homo sapien
gggcccggatgcaccgagatgaagg

SEQ ID NO: 1571496 - DNA, 25 bp, Homo sapien
ccggatgcaccgagatgaagggtct

SEQ ID NO: 1571497 - DNA, 25 bp, Homo sapien
atgcaccgagatgaagggtctgcca

SEQ ID NO: 1571498 - DNA, 25 bp, Homo sapien
cggggtggacttcaccctcatcaca

SEQ ID NO: 1571499 - DNA, 25 bp, Homo sapien
tgctcggggtggacttcaccctcat

SEQ ID NO: 1571500 - DNA, 25 bp, Homo sapien
tcatttctgctcggggtggacttca

SEQ ID NO: 1571501 - DNA, 25 bp, Homo sapien
cctcatcacagtcagatcccaccaa

SEQ ID NO: 1571502 - DNA, 25 bp, Homo sapien
cagccttggaatcggacttgttttg

SEQ ID NO: 1571503 - DNA, 25 bp, Homo sapien
ttggaatcggacttgttttgtggtg

SEQ ID NO: 1571504 - DNA, 25 bp, Homo sapien
ggtgggctgagggtctcagctgctc

SEQ ID NO: 1571505 - DNA, 25 bp, Homo sapien
ccttggaatcggacttgttttgtgg

SEQ ID NO: 1571506 - DNA, 25 bp, Homo sapien
ttagtaaattagaggagatccattg

SEQ ID NO: 1571507 - DNA, 25 bp, Homo sapien
ttcccattgtcttacggtttataca

SEQ ID NO: 1571508 - DNA, 25 bp, Homo sapien
tagtgagttagcatgaaatacaatg

SEQ ID NO: 1571509 - DNA, 25 bp, Homo sapien
gcagttagaacagagcaatttagta

SEQ ID NO: 1571510 - DNA, 25 bp, Homo sapien
cagtcttgttttgtgatgggctgag

SEQ ID NO: 1571511 - DNA, 25 bp, Homo sapien
gatgggctgagggtgttagctgctc

SEQ ID NO: 1571512 - DNA, 25 bp, Homo sapien
gtgatgggctgagggtgttagctgc

SEQ ID NO: 1571513 - DNA, 25 bp, Homo sapien
tttgtgatgggctgagggtgttagc

SEQ ID NO: 1571514 - DNA, 25 bp, Homo sapien
atgagattctccactgtgtaatcct

SEQ ID NO: 1571515 - DNA, 25 bp, Homo sapien
gtgtggacccaacgctgccatgtgg

SEQ ID NO: 1571516 - DNA, 25 bp, Homo sapien
gaggctcagtaaagcacaccaggga

SEQ ID NO: 1571517 - DNA, 25 bp, Homo sapien
gacagtccagatagcatcagcccta

SEQ ID NO: 1571518 - DNA, 25 bp, Homo sapien
caatgatctaaggagaagctgcaca

SEQ ID NO: 1571519 - DNA, 25 bp, Homo sapien
tatgcagcagggttttacatccttc

SEQ ID NO: 1571520 - DNA, 25 bp, Homo sapien
tatttgatccctcatgtttttcagg

SEQ ID NO: 1571521 - DNA, 25 bp, Homo sapien
tctggagggtagatggcaaatagct

SEQ ID NO: 1571522 - DNA, 25 bp, Homo sapien
cctttgtcctagaaagttgaggact

SEQ ID NO: 1571523 - DNA, 25 bp, Homo sapien
tattctagagggtagatggcgaatg

SEQ ID NO: 1571524 - DNA, 25 bp, Homo sapien
aatgataagatttgtttactctaga

SEQ ID NO: 1571525 - DNA, 25 bp, Homo sapien
ttctagagggtagatggcgaatgat

SEQ ID NO: 1571526 - DNA, 25 bp, Homo sapien
gaatgataagatttgtttactctag

SEQ ID NO: 1571527 - DNA, 25 bp, Homo sapien
tactcacagcaatattcccctgcat

SEQ ID NO: 1571528 - DNA, 25 bp, Homo sapien
actgaaatactcacagcaatattcc

SEQ ID NO: 1571529 - DNA, 25 bp, Homo sapien
tgccagcaggactgaaatactcaca

SEQ ID NO: 1571530 - DNA, 25 bp, Homo sapien
gcaggactgaaatactcacagcaat

SEQ ID NO: 1571531 - DNA, 25 bp, Homo sapien
ttagagatcatcacaggtagctgga

SEQ ID NO: 1571532 - DNA, 25 bp, Homo sapien
tgttggtcctatgagaaactgaatc

SEQ ID NO: 1571533 - DNA, 25 bp, Homo sapien
tgcaccctgccttgagtgatatact

SEQ ID NO: 1571534 - DNA, 25 bp, Homo sapien
ggtactttctcaatgtgaactagga

SEQ ID NO: 1571535 - DNA, 25 bp, Homo sapien
actccagaaagtagaggcgccataa

SEQ ID NO: 1571536 - DNA, 25 bp, Homo sapien
tgcccacaagggggtcactcttctt

SEQ ID NO: 1571537 - DNA, 25 bp, Homo sapien
aaagtagaggcgccataaaaccaat

SEQ ID NO: 1571538 - DNA, 25 bp, Homo sapien
ccagaaagtagaggcgccataaaac

SEQ ID NO: 1571539 - DNA, 25 bp, Homo sapien
gaggaagaagtctggtgtgttagag

SEQ ID NO: 1571540 - DNA, 25 bp, Homo sapien
tagaaatctatcataaaggctttta

SEQ ID NO: 1571541 - DNA, 25 bp, Homo sapien
ctaaatttccatgttacaggaaaca

SEQ ID NO: 1571542 - DNA, 25 bp, Homo sapien
ctcacatgagtcacctacctcagct

SEQ ID NO: 1571543 - DNA, 25 bp, Homo sapien
taaggagtacgttattcagtaaata

SEQ ID NO: 1571544 - DNA, 25 bp, Homo sapien
aggaaataaggagtacgttattcag

SEQ ID NO: 1571545 - DNA, 25 bp, Homo sapien
tatgatagagtaaaagatacctaga

SEQ ID NO: 1571546 - DNA, 25 bp, Homo sapien
gaaacaggtatctctctatggatca

SEQ ID NO: 1571547 - DNA, 25 bp, Homo sapien
tcgcatctggctgtgccgcccaggc

SEQ ID NO: 1571548 - DNA, 25 bp, Homo sapien
gacgcatctcgcatctggctgtgcc

SEQ ID NO: 1571549 - DNA, 25 bp, Homo sapien
ggaagacccaggtccatgctgcagg

SEQ ID NO: 1571550 - DNA, 25 bp, Homo sapien
cagatcagcagagacgcatctcgca

SEQ ID NO: 1571551 - DNA, 25 bp, Homo sapien
tgctctgtggatggatgagccctcg

SEQ ID NO: 1571552 - DNA, 25 bp, Homo sapien
tgccctgctctgtggatggatgagc

SEQ ID NO: 1571553 - DNA, 25 bp, Homo sapien
ctctgtggatggatgagccctcggt

SEQ ID NO: 1571554 - DNA, 25 bp, Homo sapien
cctgctctgtggatggatgagccct

SEQ ID NO: 1571555 - DNA, 25 bp, Homo sapien
tcaggaccgtgaggatgggggtcat

SEQ ID NO: 1571556 - DNA, 25 bp, Homo sapien
atcaggaccgtgaggatgggggtca

SEQ ID NO: 1571557 - DNA, 25 bp, Homo sapien
gacagatcaggaccgtgaggatggg

SEQ ID NO: 1571558 - DNA, 25 bp, Homo sapien
cgagacagatcaggaccgtgaggat

SEQ ID NO: 1571559 - DNA, 25 bp, Homo sapien
ctgcctgcacgtgggtcctggggcc

SEQ ID NO: 1571560 - DNA, 25 bp, Homo sapien
gcctgcacgtgggtcctggggccca

SEQ ID NO: 1571561 - DNA, 25 bp, Homo sapien
tgcctgcacgtgggtcctggggccc

SEQ ID NO: 1571562 - DNA, 25 bp, Homo sapien
ctgtgggatccgtgtaatccagagt

SEQ ID NO: 1571563 - DNA, 25 bp, Homo sapien
tgggatccgtgtaatccagagtgct

SEQ ID NO: 1571564 - DNA, 25 bp, Homo sapien
ggatccgtgtaatccagagtgctgt

SEQ ID NO: 1571565 - DNA, 25 bp, Homo sapien
tcctgtgggatccgtgtaatccaga

SEQ ID NO: 1571566 - DNA, 25 bp, Homo sapien
cctgcagtgtcgctaccatagtaac

SEQ ID NO: 1571567 - DNA, 25 bp, Homo sapien
tgcagtgtcgctaccatagtaacag

SEQ ID NO: 1571568 - DNA, 25 bp, Homo sapien
cgctaccatagtaacagcgataccg

SEQ ID NO: 1571569 - DNA, 25 bp, Homo sapien
agtgtcgctaccatagtaacagcga

SEQ ID NO: 1571570 - DNA, 25 bp, Homo sapien
gcaccgtgttaaatgtggctcagac

SEQ ID NO: 1571571 - DNA, 25 bp, Homo sapien
atgtggctcagaccacccgcgtcat

SEQ ID NO: 1571572 - DNA, 25 bp, Homo sapien
aaatgtggctcagaccacccgcgtc

SEQ ID NO: 1571573 - DNA, 25 bp, Homo sapien
ccgtgttaaatgtggctcagaccac

SEQ ID NO: 1571574 - DNA, 25 bp, Homo sapien
gtcacactggaggattacattccct

SEQ ID NO: 1571575 - DNA, 25 bp, Homo sapien
tcacactggaggattacattccctc

SEQ ID NO: 1571576 - DNA, 25 bp, Homo sapien
cactggaggattacattccctcctg

SEQ ID NO: 1571577 - DNA, 25 bp, Homo sapien
ggaggattacattccctcctgagtt

SEQ ID NO: 1571578 - DNA, 25 bp, Homo sapien
ctgtgcgccagcgagctgaaggaag

SEQ ID NO: 1571579 - DNA, 25 bp, Homo sapien
agcgagctgaaggaagtcacgttcc

SEQ ID NO: 1571580 - DNA, 25 bp, Homo sapien
tgcgccagcgagctgaaggaagtca

SEQ ID NO: 1571581 - DNA, 25 bp, Homo sapien
cgccagcgagctgaaggaagtcacg

SEQ ID NO: 1571582 - DNA, 25 bp, Homo sapien
tatttttgagattggtacgttgatc

SEQ ID NO: 1571583 - DNA, 25 bp, Homo sapien
cgttgatcttagacgccatgggtca

SEQ ID NO: 1571584 - DNA, 25 bp, Homo sapien
tgagattggtacgttgatcttagac

SEQ ID NO: 1571585 - DNA, 25 bp, Homo sapien
gaaggaaagtttgcatccatccctg

SEQ ID NO: 1571586 - DNA, 25 bp, Homo sapien
tcagcaggtagggtttggagctctg

SEQ ID NO: 1571587 - DNA, 25 bp, Homo sapien
cagggggtcactggggtgagtcagc

SEQ ID NO: 1571588 - DNA, 25 bp, Homo sapien
aggtagggtttggagctctgtgagc

SEQ ID NO: 1571589 - DNA, 25 bp, Homo sapien
gcaggtagggtttggagctctgtga

SEQ ID NO: 1571590 - DNA, 25 bp, Homo sapien
gaggtggggcctgttgtcggggagc

SEQ ID NO: 1571591 - DNA, 25 bp, Homo sapien
tggggcctgttgtcggggagctggg

SEQ ID NO: 1571592 - DNA, 25 bp, Homo sapien
gcctgttgtcggggagctggggccc

SEQ ID NO: 1571593 - DNA, 25 bp, Homo sapien
tgttgtcggggagctggggccccca

SEQ ID NO: 1571594 - DNA, 25 bp, Homo sapien
ggtgggggtgaggggctggtcctca

SEQ ID NO: 1571595 - DNA, 25 bp, Homo sapien
tgggggtgaggggctggtcctcagg

SEQ ID NO: 1571596 - DNA, 25 bp, Homo sapien
cactctggggatccgacccggtggg

SEQ ID NO: 1571597 - DNA, 25 bp, Homo sapien
ggggtgaggggctggtcctcagggc

SEQ ID NO: 1571598 - DNA, 25 bp, Homo sapien
ccacctccagaggagactgaaccta

SEQ ID NO: 1571599 - DNA, 25 bp, Homo sapien
tgtctatatcaccacctccagagga

SEQ ID NO: 1571600 - DNA, 25 bp, Homo sapien
aggagcctgtctatatcaccacctc

SEQ ID NO: 1571601 - DNA, 25 bp, Homo sapien
gagactgaacctaggacagaaccca

SEQ ID NO: 1571602 - DNA, 25 bp, Homo sapien
cttgagcacgatgatgtcagggatg

SEQ ID NO: 1571603 - DNA, 25 bp, Homo sapien
gtgatgtcattgaaatgagcgccta

SEQ ID NO: 1571604 - DNA, 25 bp, Homo sapien
ggggtgatgtcattgaaatgagcgc

SEQ ID NO: 1571605 - DNA, 25 bp, Homo sapien
tgggggtgatgtcattgaaatgagc

SEQ ID NO: 1571606 - DNA, 25 bp, Homo sapien
aagatgccgatcacaacccccaggt

SEQ ID NO: 1571607 - DNA, 25 bp, Homo sapien
gacggccaccaagatgccgatcaca

SEQ ID NO: 1571608 - DNA, 25 bp, Homo sapien
ccctgacgtcgatgtcggaggatga

SEQ ID NO: 1571609 - DNA, 25 bp, Homo sapien
agtgtttgccctgacgtcgatgtcg

SEQ ID NO: 1571610 - DNA, 25 bp, Homo sapien
cacacacagctcgaaggtaaggaag

SEQ ID NO: 1571611 - DNA, 25 bp, Homo sapien
ataggatggacagagcccgaaggac

SEQ ID NO: 1571612 - DNA, 25 bp, Homo sapien
tgttccaaatgcctcataggatgga

SEQ ID NO: 1571613 - DNA, 25 bp, Homo sapien
gtagatggcactgagcccgaaggac

SEQ ID NO: 1571614 - DNA, 25 bp, Homo sapien
tgcaggatgttggaaatcagccttt

SEQ ID NO: 1571615 - DNA, 25 bp, Homo sapien
gcccctgcaggatgttggaaatcag

SEQ ID NO: 1571616 - DNA, 25 bp, Homo sapien
caggatgttggaaatcagcctttct

SEQ ID NO: 1571617 - DNA, 25 bp, Homo sapien
cctgcaggatgttggaaatcagcct

SEQ ID NO: 1571618 - DNA, 25 bp, Homo sapien
ttcttcctgggcatcggcagctggg

SEQ ID NO: 1571619 - DNA, 25 bp, Homo sapien
ttttcttcctgggcatcggcagctg

SEQ ID NO: 1571620 - DNA, 25 bp, Homo sapien
gaggttttcttcctgggcatcggca

SEQ ID NO: 1571621 - DNA, 25 bp, Homo sapien
ggttttcttcctgggcatcggcagc

SEQ ID NO: 1571622 - DNA, 25 bp, Homo sapien
tgggaaggttccctgggacctctga

SEQ ID NO: 1571623 - DNA, 25 bp, Homo sapien
gcagagcaaggggtttgtctcttgg

SEQ ID NO: 1571624 - DNA, 25 bp, Homo sapien
tgtctcttgggaaggttccctggga

SEQ ID NO: 1571625 - DNA, 25 bp, Homo sapien
gttccctgggacctctgagtcctgc

SEQ ID NO: 1571626 - DNA, 25 bp, Homo sapien
tccaccccatcctcaggctgtgtgt

SEQ ID NO: 1571627 - DNA, 25 bp, Homo sapien
ctccaccccatcctcaggctgtgtg

SEQ ID NO: 1571628 - DNA, 25 bp, Homo sapien
ccgagtgtccatctccaccccatcc

SEQ ID NO: 1571629 - DNA, 25 bp, Homo sapien
accccatcctcaggctgtgtgtgct

SEQ ID NO: 1571630 - DNA, 25 bp, Homo sapien
gacaaggaggggtccaccgtgacga

SEQ ID NO: 1571631 - DNA, 25 bp, Homo sapien
ctggacaaggaggggtccaccgtga

SEQ ID NO: 1571632 - DNA, 25 bp, Homo sapien
acaaggaggggtccaccgtgacgat

SEQ ID NO: 1571633 - DNA, 25 bp, Homo sapien
ccaccgtgacgatgctgagagccgg

SEQ ID NO: 1571634 - DNA, 25 bp, Homo sapien
gttgcactcctggacgcggcacatt

SEQ ID NO: 1571635 - DNA, 25 bp, Homo sapien
cctggacgcggcacatttatttgca

SEQ ID NO: 1571636 - DNA, 25 bp, Homo sapien
tgcactcctggacgcggcacattta

SEQ ID NO: 1571637 - DNA, 25 bp, Homo sapien
ctcctggacgcggcacatttatttg

SEQ ID NO: 1571638 - DNA, 25 bp, Homo sapien
aggtctggagtgtttcacctcggca

SEQ ID NO: 1571639 - DNA, 25 bp, Homo sapien
gtctggagtgtttcacctcggcata

SEQ ID NO: 1571640 - DNA, 25 bp, Homo sapien
ggtctggagtgtttcacctcggcat

SEQ ID NO: 1571641 - DNA, 25 bp, Homo sapien
tctggagtgtttcacctcggcatac

SEQ ID NO: 1571642 - DNA, 25 bp, Homo sapien
ctgggggcctggagaggaaaggact

SEQ ID NO: 1571643 - DNA, 25 bp, Homo sapien
gagtgagagggaaggaacgtggtgg

SEQ ID NO: 1571644 - DNA, 25 bp, Homo sapien
ggggcctggagaggaaaggactcac

SEQ ID NO: 1571645 - DNA, 25 bp, Homo sapien
ctgcagcgggggagagtgagaggga

SEQ ID NO: 1571646 - DNA, 25 bp, Homo sapien
cccgtctgagggtcaagctgtgcag

SEQ ID NO: 1571647 - DNA, 25 bp, Homo sapien
cagagtggcgtagatgctgggcaca

SEQ ID NO: 1571648 - DNA, 25 bp, Homo sapien
ggcacagctggagagggcccttcct

SEQ ID NO: 1571649 - DNA, 25 bp, Homo sapien
tagtggatggccagagtggcgtaga

SEQ ID NO: 1571650 - DNA, 25 bp, Homo sapien
tgcagaattgagtgacccctaaaag

SEQ ID NO: 1571651 - DNA, 25 bp, Homo sapien
ccgtgccctgccctaaatttcttat

SEQ ID NO: 1571652 - DNA, 25 bp, Homo sapien
taattcattcattcgtggcttgtag

SEQ ID NO: 1571653 - DNA, 25 bp, Homo sapien
taggaaagccaagatcattcatttc

SEQ ID NO: 1571654 - DNA, 25 bp, Homo sapien
cattgttagttttggaaaacgtgtg

SEQ ID NO: 1571655 - DNA, 25 bp, Homo sapien
tgaacaactcctcttattattgtta

SEQ ID NO: 1571656 - DNA, 25 bp, Homo sapien
taggtttgccgcctgttccattgtt

SEQ ID NO: 1571657 - DNA, 25 bp, Homo sapien
gtacgatctgtagggctgtctgctg

SEQ ID NO: 1571658 - DNA, 25 bp, Homo sapien
gctcagatcagcagagacgcatctc

SEQ ID NO: 1571659 - DNA, 25 bp, Homo sapien
agcagagacgcatctcacatcgggc

SEQ ID NO: 1571660 - DNA, 25 bp, Homo sapien
atcagcagagacgcatctcacatcg

SEQ ID NO: 1571661 - DNA, 25 bp, Homo sapien
cagatcagcagagacgcatctcaca

SEQ ID NO: 1571662 - DNA, 25 bp, Homo sapien
ggcatccagccctggagatgcttca

SEQ ID NO: 1571663 - DNA, 25 bp, Homo sapien
gatgcttcaggaaagttgcaggtcc

SEQ ID NO: 1571664 - DNA, 25 bp, Homo sapien
gccctggagatgcttcaggaaagtt

SEQ ID NO: 1571665 - DNA, 25 bp, Homo sapien
gcttcaggaaagttgcaggtccatg

SEQ ID NO: 1571666 - DNA, 25 bp, Homo sapien
tcctgtccaagtgagagtgactggg

SEQ ID NO: 1571667 - DNA, 25 bp, Homo sapien
gtccatcaacacagcattgcgggat

SEQ ID NO: 1571668 - DNA, 25 bp, Homo sapien
cagcccgtccatcaacacagcattg

SEQ ID NO: 1571669 - DNA, 25 bp, Homo sapien
agtctgtcctgtccaagtgagagtg

SEQ ID NO: 1571670 - DNA, 25 bp, Homo sapien
tctgcgatttgcctcatctgtcctc

SEQ ID NO: 1571671 - DNA, 25 bp, Homo sapien
ctcatctcatcaagggtcaggacac

SEQ ID NO: 1571672 - DNA, 25 bp, Homo sapien
catctgtcctcatctcatcaagggt

SEQ ID NO: 1571673 - DNA, 25 bp, Homo sapien
cttttctgcgatttgcctcatctgt

SEQ ID NO: 1571674 - DNA, 25 bp, Homo sapien
aagtttcatccagcctcgtccagga

SEQ ID NO: 1571675 - DNA, 25 bp, Homo sapien
tgtagtccatgagggccaaagacat

SEQ ID NO: 1571676 - DNA, 25 bp, Homo sapien
tgcactttgtggacctaattcggag

SEQ ID NO: 1571677 - DNA, 25 bp, Homo sapien
caaagacataccatccacaagggag

SEQ ID NO: 1571678 - DNA, 25 bp, Homo sapien
gcttctcagccaatggcttgggttc

SEQ ID NO: 1571679 - DNA, 25 bp, Homo sapien
actgtgagacgcgggcatcactgac

SEQ ID NO: 1571680 - DNA, 25 bp, Homo sapien
gcagaactgtgagacgcgggcatca

SEQ ID NO: 1571681 - DNA, 25 bp, Homo sapien
cagaactgtgagacgcgggcatcac

SEQ ID NO: 1571682 - DNA, 25 bp, Homo sapien
gaactgtgagacgcgggcatcactg

SEQ ID NO: 1571683 - DNA, 25 bp, Homo sapien
ggcataatgtatgatccaacagata

SEQ ID NO: 1571684 - DNA, 25 bp, Homo sapien
tgattaaataaaggacgcaattgtc

SEQ ID NO: 1571685 - DNA, 25 bp, Homo sapien
gagggaacttagagcccagagacca

SEQ ID NO: 1571686 - DNA, 25 bp, Homo sapien
caaagtccttgcgtattaactggca

SEQ ID NO: 1571687 - DNA, 25 bp, Homo sapien
tacactgcgttcattttttgagagc

SEQ ID NO: 1571688 - DNA, 25 bp, Homo sapien
tgaggaactgacatacatctgggta

SEQ ID NO: 1571689 - DNA, 25 bp, Homo sapien
caagcctctgttaaccgtgattcta

SEQ ID NO: 1571690 - DNA, 25 bp, Homo sapien
ttcccagaaattgccgggtcatatg

SEQ ID NO: 1571691 - DNA, 25 bp, Homo sapien
tgtacatgctagactcagccatggg

SEQ ID NO: 1571692 - DNA, 25 bp, Homo sapien
gcgagggctgtgtacatgctagact

SEQ ID NO: 1571693 - DNA, 25 bp, Homo sapien
gtcctccaagtgaaggcctggtggt

SEQ ID NO: 1571694 - DNA, 25 bp, Homo sapien
tcagccatgggcaccatggactctg

SEQ ID NO: 1571695 - DNA, 25 bp, Homo sapien
ctcattccgtatccttttgggtcac

SEQ ID NO: 1571696 - DNA, 25 bp, Homo sapien
ttgggtcactctcagaatcacggga

SEQ ID NO: 1571697 - DNA, 25 bp, Homo sapien
gccaaagcttgatgcgtctgacagt

SEQ ID NO: 1571698 - DNA, 25 bp, Homo sapien
tcacgggacagtatctcatttcgag

SEQ ID NO: 1571699 - DNA, 25 bp, Homo sapien
gtctgggcctcaggaggtggacatc

SEQ ID NO: 1571700 - DNA, 25 bp, Homo sapien
agggtctgggcctcaggaggtggac

SEQ ID NO: 1571701 - DNA, 25 bp, Homo sapien
gaggtggacatctctgggaggtcac

SEQ ID NO: 1571702 - DNA, 25 bp, Homo sapien
ggaggtggacatctctgggaggtca

SEQ ID NO: 1571703 - DNA, 25 bp, Homo sapien
caagtccaaaatgggtctccctggg

SEQ ID NO: 1571704 - DNA, 25 bp, Homo sapien
gtcacaagtccaaaatgggtctccc

SEQ ID NO: 1571705 - DNA, 25 bp, Homo sapien
cacaagtccaaaatgggtctccctg

SEQ ID NO: 1571706 - DNA, 25 bp, Homo sapien
ggtcacaagtccaaaatgggtctcc

SEQ ID NO: 1571707 - DNA, 25 bp, Homo sapien
cagtgccggcaggacaaagagacac

SEQ ID NO: 1571708 - DNA, 25 bp, Homo sapien
gggttgttccatcagcagcccacag

SEQ ID NO: 1571709 - DNA, 25 bp, Homo sapien
gtgccggcaggacaaagagacacac

SEQ ID NO: 1571710 - DNA, 25 bp, Homo sapien
tgggtccttctcgtcatggggttgt

SEQ ID NO: 1571711 - DNA, 25 bp, Homo sapien
cagagcagagccgtgaaggtgggga

SEQ ID NO: 1571712 - DNA, 25 bp, Homo sapien
gcagagcagagccgtgaaggtgggg

SEQ ID NO: 1571713 - DNA, 25 bp, Homo sapien
ctgcctgcatgtgggtcctggggcc

SEQ ID NO: 1571714 - DNA, 25 bp, Homo sapien
tgggtcctggggcccagactcagcc

SEQ ID NO: 1571715 - DNA, 25 bp, Homo sapien
tgtgggtcctggggcccagactcag

SEQ ID NO: 1571716 - DNA, 25 bp, Homo sapien
gcctgcatgtgggtcctggggccca

SEQ ID NO: 1571717 - DNA, 25 bp, Homo sapien
tggctcagcccagagggtgggtttg

SEQ ID NO: 1571718 - DNA, 25 bp, Homo sapien
tcagcccagagggtgggtttgggga

SEQ ID NO: 1571719 - DNA, 25 bp, Homo sapien
ctggctcagcccagagggtgggttt

SEQ ID NO: 1571720 - DNA, 25 bp, Homo sapien
gctcagcccagagggtgggtttggg

SEQ ID NO: 1571721 - DNA, 25 bp, Homo sapien
cacagagttcccccagctgatcaca

SEQ ID NO: 1571722 - DNA, 25 bp, Homo sapien
gagttcccccagctgatcacagagc

SEQ ID NO: 1571723 - DNA, 25 bp, Homo sapien
acagagttcccccagctgatcacag

SEQ ID NO: 1571724 - DNA, 25 bp, Homo sapien
ctgacaccagatggtcacagagttc

SEQ ID NO: 1571725 - DNA, 25 bp, Homo sapien
cagcctacagggctgcgatagtaac

SEQ ID NO: 1571726 - DNA, 25 bp, Homo sapien
tccagacggtactcccgagcctcca

SEQ ID NO: 1571727 - DNA, 25 bp, Homo sapien
tgtgaccagcctacagggctgcgat

SEQ ID NO: 1571728 - DNA, 25 bp, Homo sapien
agggctgcgatagtaacagcggtat

SEQ ID NO: 1571729 - DNA, 25 bp, Homo sapien
ccccttcctgagggcagagcctggg

SEQ ID NO: 1571730 - DNA, 25 bp, Homo sapien
gctgggacccctgagtgtcctctca

SEQ ID NO: 1571731 - DNA, 25 bp, Homo sapien
ctggggctgggacccctgagtgtcc

SEQ ID NO: 1571732 - DNA, 25 bp, Homo sapien
gggctgggacccctgagtgtcctct

SEQ ID NO: 1571733 - DNA, 25 bp, Homo sapien
ctgaggtcacaagaggactcggcag

SEQ ID NO: 1571734 - DNA, 25 bp, Homo sapien
ggggtgtgacagcaggtagtgggag

SEQ ID NO: 1571735 - DNA, 25 bp, Homo sapien
ccattgggctccgtgactgacacag

SEQ ID NO: 1571736 - DNA, 25 bp, Homo sapien
tgtccattgggctccgtgactgaca

SEQ ID NO: 1571737 - DNA, 25 bp, Homo sapien
tggggtgtgacagcaggtagtggga

SEQ ID NO: 1571738 - DNA, 25 bp, Homo sapien
gttgagacggaccttgtgggtgagg

SEQ ID NO: 1571739 - DNA, 25 bp, Homo sapien
tgttgagacggaccttgtgggtgag

SEQ ID NO: 1571740 - DNA, 25 bp, Homo sapien
ctgaccctgtaggcatgaggggctg

SEQ ID NO: 1571741 - DNA, 25 bp, Homo sapien
ggatggagaccaccaagaccccgat

SEQ ID NO: 1571742 - DNA, 25 bp, Homo sapien
cctgtgttttccctgacgccagtgt

SEQ ID NO: 1571743 - DNA, 25 bp, Homo sapien
tgttttccctgacgccagtgttgga

SEQ ID NO: 1571744 - DNA, 25 bp, Homo sapien
cccgatcagtacctcccagtgcctt

SEQ ID NO: 1571745 - DNA, 25 bp, Homo sapien
ggcagcccctggaggacgttggaaa

SEQ ID NO: 1571746 - DNA, 25 bp, Homo sapien
tgtaggcccccgtccttgggctctg

SEQ ID NO: 1571747 - DNA, 25 bp, Homo sapien
gaggacgttggaaatcagcctgtct

SEQ ID NO: 1571748 - DNA, 25 bp, Homo sapien
ctggaggacgttggaaatcagcctg

SEQ ID NO: 1571749 - DNA, 25 bp, Homo sapien
tctccctggacgtcagcagctgggc

SEQ ID NO: 1571750 - DNA, 25 bp, Homo sapien
agaagttttctccctggacgtcagc

SEQ ID NO: 1571751 - DNA, 25 bp, Homo sapien
agttttctccctggacgtcagcagc

SEQ ID NO: 1571752 - DNA, 25 bp, Homo sapien
ctccctggacgtcagcagctgggct

SEQ ID NO: 1571753 - DNA, 25 bp, Homo sapien
ggctgtgtgttcttcacggcagcac

SEQ ID NO: 1571754 - DNA, 25 bp, Homo sapien
catttccaccccgtcctcaggctgt

SEQ ID NO: 1571755 - DNA, 25 bp, Homo sapien
cgagtgtccatttccaccccgtcct

SEQ ID NO: 1571756 - DNA, 25 bp, Homo sapien
ccgtcctcaggctgtgtgttcttca

SEQ ID NO: 1571757 - DNA, 25 bp, Homo sapien
gtcctgcaggattagatctggcacc

SEQ ID NO: 1571758 - DNA, 25 bp, Homo sapien
tgccggggacaggggcgggttctca

SEQ ID NO: 1571759 - DNA, 25 bp, Homo sapien
caccaggaggcctttggtgccgggg

SEQ ID NO: 1571760 - DNA, 25 bp, Homo sapien
cagagaagtcctgcaggattagatc

SEQ ID NO: 1571761 - DNA, 25 bp, Homo sapien
gggagctctctaacaaccagatggc

SEQ ID NO: 1571762 - DNA, 25 bp, Homo sapien
gactggagtggttcatttattcgtc

SEQ ID NO: 1571763 - DNA, 25 bp, Homo sapien
atttattcgtcatcctcctgaggcc

SEQ ID NO: 1571764 - DNA, 25 bp, Homo sapien
ccagatggccaaacagaggatgagg

SEQ ID NO: 1571765 - DNA, 25 bp, Homo sapien
ggaacactcactagatgaatgaatg

SEQ ID NO: 1571766 - DNA, 25 bp, Homo sapien
ggtgtccttgaatcctcctgactcc

SEQ ID NO: 1571767 - DNA, 25 bp, Homo sapien
gggtgtccttgaatcctcctgactc

SEQ ID NO: 1571768 - DNA, 25 bp, Homo sapien
caccttggcatacgtcactgcctgg

SEQ ID NO: 1571769 - DNA, 25 bp, Homo sapien
aggtctggagtgtttcaccttggca

SEQ ID NO: 1571770 - DNA, 25 bp, Homo sapien
tcctaggtctggagtgtttcacctt

SEQ ID NO: 1571771 - DNA, 25 bp, Homo sapien
tctggagtgtttcaccttggcatac

SEQ ID NO: 1571772 - DNA, 25 bp, Homo sapien
ctgggggcctggagaggaaaggact

SEQ ID NO: 1571773 - DNA, 25 bp, Homo sapien
ggggcctggagaggaaaggactcac

SEQ ID NO: 1571774 - DNA, 25 bp, Homo sapien
gagtgagagggaaggaacgtggtgg

SEQ ID NO: 1571775 - DNA, 25 bp, Homo sapien
ctgcagcgggggagagtgagaggga

SEQ ID NO: 1571776 - DNA, 25 bp, Homo sapien
gagtggcatagacactgggctcagc

SEQ ID NO: 1571777 - DNA, 25 bp, Homo sapien
aatcttctagtggtctgtgtcaggg

SEQ ID NO: 1571778 - DNA, 25 bp, Homo sapien
tatctttgcagaatcaggtgactcc

SEQ ID NO: 1571779 - DNA, 25 bp, Homo sapien
gagaggtctgctactttattttgat

SEQ ID NO: 1571780 - DNA, 25 bp, Homo sapien
tcagtgatgtctactggaggcagct

SEQ ID NO: 1571781 - DNA, 25 bp, Homo sapien
tttacatgatcattcaatttaaaac

SEQ ID NO: 1571782 - DNA, 25 bp, Homo sapien
tagaagctcccattttcccatgtca

SEQ ID NO: 1571783 - DNA, 25 bp, Homo sapien
catgtcattggtttgatgtgtaata

SEQ ID NO: 1571784 - DNA, 25 bp, Homo sapien
tgtttgtcctcattagaagctccca

SEQ ID NO: 1571785 - DNA, 25 bp, Homo sapien
tgcaagctgtatacctgataaaggg

SEQ ID NO: 1571786 - DNA, 25 bp, Homo sapien
cttcaagacgttggtccgggcaagg

SEQ ID NO: 1571787 - DNA, 25 bp, Homo sapien
agtatacacactcggctcagctgaa

SEQ ID NO: 1571788 - DNA, 25 bp, Homo sapien
tacagccaggaagacatcatggaac

SEQ ID NO: 1571789 - DNA, 25 bp, Homo sapien
gctgagagggtggatttgctgtaga

SEQ ID NO: 1571790 - DNA, 25 bp, Homo sapien
gagctgagagggtggatttgctgta

SEQ ID NO: 1571791 - DNA, 25 bp, Homo sapien
ctcctgaggtcaggacagggctggg

SEQ ID NO: 1571792 - DNA, 25 bp, Homo sapien
ctgagctgagagggtggatttgctg

SEQ ID NO: 1571793 - DNA, 25 bp, Homo sapien
tcccagccgtgaaggacataatggt

SEQ ID NO: 1571794 - DNA, 25 bp, Homo sapien
gaacctgtcaaatcccagccgtgaa

SEQ ID NO: 1571795 - DNA, 25 bp, Homo sapien
tgtcaaatcccagccgtgaaggaca

SEQ ID NO: 1571796 - DNA, 25 bp, Homo sapien
gccgtgaaggacataatggtgtcac

SEQ ID NO: 1571797 - DNA, 25 bp, Homo sapien
gtccaggagacagaatagcttgtgt

SEQ ID NO: 1571798 - DNA, 25 bp, Homo sapien
ttggaactgtccatcggactgtttt

SEQ ID NO: 1571799 - DNA, 25 bp, Homo sapien
caggagacagaatagcttgtgttca

SEQ ID NO: 1571800 - DNA, 25 bp, Homo sapien
tggaactgtccatcggactgttttt

SEQ ID NO: 1571801 - DNA, 25 bp, Homo sapien
gagagaatattttgcagccaacatc

SEQ ID NO: 1571802 - DNA, 25 bp, Homo sapien
agagagaatattttgcagccaacat

SEQ ID NO: 1571803 - DNA, 25 bp, Homo sapien
caacacaggagggtcaacctctctc

SEQ ID NO: 1571804 - DNA, 25 bp, Homo sapien
caggagggtcaacctctctccatgg

SEQ ID NO: 1571805 - DNA, 25 bp, Homo sapien
atcttgggagaacttctggccagaa

SEQ ID NO: 1571806 - DNA, 25 bp, Homo sapien
gggaagtcatcttgggagaacttct

SEQ ID NO: 1571807 - DNA, 25 bp, Homo sapien
ctaaggggaagtcatcttgggagaa

SEQ ID NO: 1571808 - DNA, 25 bp, Homo sapien
aagtcatcttgggagaacttctggc

SEQ ID NO: 1571809 - DNA, 25 bp, Homo sapien
gttgtgtccactgaacatctgtact

SEQ ID NO: 1571810 - DNA, 25 bp, Homo sapien
cgatcaggatgtccaggggggtcac

SEQ ID NO: 1571811 - DNA, 25 bp, Homo sapien
ctgcgatcaggatgtccaggggggt

SEQ ID NO: 1571812 - DNA, 25 bp, Homo sapien
caggggggtcactgggggctgacca

SEQ ID NO: 1571813 - DNA, 25 bp, Homo sapien
atgtccaggggggtcactgggggct

SEQ ID NO: 1571814 - DNA, 25 bp, Homo sapien
agtggggcctggttgcaccaagagg

SEQ ID NO: 1571815 - DNA, 25 bp, Homo sapien
cagatagaaggaaagtgtctgtcca

SEQ ID NO: 1571816 - DNA, 25 bp, Homo sapien
agggaggctgtctcacggatctgtc

SEQ ID NO: 1571817 - DNA, 25 bp, Homo sapien
gggcctggttgcaccaagagggagg

SEQ ID NO: 1571818 - DNA, 25 bp, Homo sapien
ttcttgctgggaaagcaactgccat

SEQ ID NO: 1571819 - DNA, 25 bp, Homo sapien
aaatgcagtttcttgctgggaaagc

SEQ ID NO: 1571820 - DNA, 25 bp, Homo sapien
caaatgcagtttcttgctgggaaag

SEQ ID NO: 1571821 - DNA, 25 bp, Homo sapien
cagtttcttgctgggaaagcaactg

SEQ ID NO: 1571822 - DNA, 25 bp, Homo sapien
agcaaagcaaagcaaggctgtgagg

SEQ ID NO: 1571823 - DNA, 25 bp, Homo sapien
aagcaaggctgtgagggcggcggtc

SEQ ID NO: 1571824 - DNA, 25 bp, Homo sapien
gcaaggctgtgagggcggcggtcat

SEQ ID NO: 1571825 - DNA, 25 bp, Homo sapien
agcaaagcaaggctgtgagggcggc

SEQ ID NO: 1571826 - DNA, 25 bp, Homo sapien
gcgggtcctggggcccagactcagc

SEQ ID NO: 1571827 - DNA, 25 bp, Homo sapien
cgggtcctggggcccagactcagcc

SEQ ID NO: 1571828 - DNA, 25 bp, Homo sapien
tcacagagcctggcttagcccagag

SEQ ID NO: 1571829 - DNA, 25 bp, Homo sapien
tctccagctgatcacagagcctggc

SEQ ID NO: 1571830 - DNA, 25 bp, Homo sapien
gggcttctccagctgatcacagagc

SEQ ID NO: 1571831 - DNA, 25 bp, Homo sapien
cagagcctggcttagcccagagggt

SEQ ID NO: 1571832 - DNA, 25 bp, Homo sapien
tcctggtctccagtggattcgttct

SEQ ID NO: 1571833 - DNA, 25 bp, Homo sapien
ggagtatctggccttgttcctggtc

SEQ ID NO: 1571834 - DNA, 25 bp, Homo sapien
cccgcagggctgagatagtaacact

SEQ ID NO: 1571835 - DNA, 25 bp, Homo sapien
gtaacactgatatctcactgcatgg

SEQ ID NO: 1571836 - DNA, 25 bp, Homo sapien
tgagagggagacacccctgagagcc

SEQ ID NO: 1571837 - DNA, 25 bp, Homo sapien
accatgttaaatggggctcccacct

SEQ ID NO: 1571838 - DNA, 25 bp, Homo sapien
taggagagaaggaggcaccatgtta

SEQ ID NO: 1571839 - DNA, 25 bp, Homo sapien
agggagacacccctgagagccaacc

SEQ ID NO: 1571840 - DNA, 25 bp, Homo sapien
tccttcatcagaacaaaatggtgat

SEQ ID NO: 1571841 - DNA, 25 bp, Homo sapien
tagcatgtgaacctccacctgtggc

SEQ ID NO: 1571842 - DNA, 25 bp, Homo sapien
tccgggggagctggtgttctccttc

SEQ ID NO: 1571843 - DNA, 25 bp, Homo sapien
aaatggtgatatcccttctgtgagc

SEQ ID NO: 1571844 - DNA, 25 bp, Homo sapien
ggccaggacagggggagagctctgt

SEQ ID NO: 1571845 - DNA, 25 bp, Homo sapien
gacagggggagagctctgtcctccc

SEQ ID NO: 1571846 - DNA, 25 bp, Homo sapien
ggacagggggagagctctgtcctcc

SEQ ID NO: 1571847 - DNA, 25 bp, Homo sapien
caggacagggggagagctctgtcct

SEQ ID NO: 1571848 - DNA, 25 bp, Homo sapien
ttgtgtgcgccgtagcatctgtact

SEQ ID NO: 1571849 - DNA, 25 bp, Homo sapien
cccctccttgtacagagtgaatctg

SEQ ID NO: 1571850 - DNA, 25 bp, Homo sapien
gaggaagtcacattccccctccttg

SEQ ID NO: 1571851 - DNA, 25 bp, Homo sapien
gaatctgtcgtagccgacatcagag

SEQ ID NO: 1571852 - DNA, 25 bp, Homo sapien
tgggccacaactgcaccgagaggga

SEQ ID NO: 1571853 - DNA, 25 bp, Homo sapien
ccgtactttgatctcagacacagca

SEQ ID NO: 1571854 - DNA, 25 bp, Homo sapien
ctcttgtgattgacacagcagggtc

SEQ ID NO: 1571855 - DNA, 25 bp, Homo sapien
tccgtactttgatctcagacacagc

SEQ ID NO: 1571856 - DNA, 25 bp, Homo sapien
gcatccactcttgtgattgacacag

SEQ ID NO: 1571857 - DNA, 25 bp, Homo sapien
ctggctgtgccaagcctcaaatgac

SEQ ID NO: 1571858 - DNA, 25 bp, Homo sapien
ccaagcctcaaatgacagaatcccg

SEQ ID NO: 1571859 - DNA, 25 bp, Homo sapien
tgtgccaagcctcaaatgacagaat

SEQ ID NO: 1571860 - DNA, 25 bp, Homo sapien
gctgtgccaagcctcaaatgacaga

SEQ ID NO: 1571861 - DNA, 25 bp, Homo sapien
ggcttcacgactctataaagtacat

SEQ ID NO: 1571862 - DNA, 25 bp, Homo sapien
tcctgaggcttcacgactctataaa

SEQ ID NO: 1571863 - DNA, 25 bp, Homo sapien
ctgaggcttcacgactctataaagt

SEQ ID NO: 1571864 - DNA, 25 bp, Homo sapien
gaggcttcacgactctataaagtac

SEQ ID NO: 1571865 - DNA, 25 bp, Homo sapien
aaatgccagtgtgttgattccaggt

SEQ ID NO: 1571866 - DNA, 25 bp, Homo sapien
aatgccagtgtgttgattccaggtg

SEQ ID NO: 1571867 - DNA, 25 bp, Homo sapien
agctgagaaggaaggtctcttgtag

SEQ ID NO: 1571868 - DNA, 25 bp, Homo sapien
cagggcacagttgagctgagaagga

SEQ ID NO: 1571869 - DNA, 25 bp, Homo sapien
gagaaggaaggtctcttgtagacgc

SEQ ID NO: 1571870 - DNA, 25 bp, Homo sapien
ctgagaaggaaggtctcttgtagac

SEQ ID NO: 1571871 - DNA, 25 bp, Homo sapien
gggtggacccaacatcatatctatg

SEQ ID NO: 1571872 - DNA, 25 bp, Homo sapien
tgaggtgtcccctgattgccaggga

SEQ ID NO: 1571873 - DNA, 25 bp, Homo sapien
cagatgcacggatgtggttaagtca

SEQ ID NO: 1571874 - DNA, 25 bp, Homo sapien
agggatcctttgtctgaaaacctgc

SEQ ID NO: 1571875 - DNA, 25 bp, Homo sapien
agaagaacagtgaggatggacacca

SEQ ID NO: 1571876 - DNA, 25 bp, Homo sapien
tgcttgggctttctggcccagactc

SEQ ID NO: 1571877 - DNA, 25 bp, Homo sapien
caagtgcttgggctttctggcccag

SEQ ID NO: 1571878 - DNA, 25 bp, Homo sapien
cttgggctttctggcccagactcag

SEQ ID NO: 1571879 - DNA, 25 bp, Homo sapien
ctgcaagtgcttgggctttctggcc

SEQ ID NO: 1571880 - DNA, 25 bp, Homo sapien
ctcccaggtaatcacagagcctggc

SEQ ID NO: 1571881 - DNA, 25 bp, Homo sapien
gggctctcccaggtaatcacagagc

SEQ ID NO: 1571882 - DNA, 25 bp, Homo sapien
gctctcccaggtaatcacagagcct

SEQ ID NO: 1571883 - DNA, 25 bp, Homo sapien
tctcccaggtaatcacagagcctgg

SEQ ID NO: 1571884 - DNA, 25 bp, Homo sapien
gagatagtaaccctgggtatccagg

SEQ ID NO: 1571885 - DNA, 25 bp, Homo sapien
tctgttggtaccaggtcatggggtt

SEQ ID NO: 1571886 - DNA, 25 bp, Homo sapien
ccttggtgagatagtaaccctgggt

SEQ ID NO: 1571887 - DNA, 25 bp, Homo sapien
ggtttccttccttggtgagatagta

SEQ ID NO: 1571888 - DNA, 25 bp, Homo sapien
tgtcaccaccagctccaggggctcg

SEQ ID NO: 1571889 - DNA, 25 bp, Homo sapien
ctgtcaccaccagctccaggggctc

SEQ ID NO: 1571890 - DNA, 25 bp, Homo sapien
gagagagtgggttttctgtgggctc

SEQ ID NO: 1571891 - DNA, 25 bp, Homo sapien
ctgaggtcaccacagggctcggcag

SEQ ID NO: 1571892 - DNA, 25 bp, Homo sapien
ggctcggcagggctgagagagtggg

SEQ ID NO: 1571893 - DNA, 25 bp, Homo sapien
tcaccacagggctcggcagggctga

SEQ ID NO: 1571894 - DNA, 25 bp, Homo sapien
ttcctcaatcaaaatgaacctgtga

SEQ ID NO: 1571895 - DNA, 25 bp, Homo sapien
ttgagctacactggatggtcacgtt

SEQ ID NO: 1571896 - DNA, 25 bp, Homo sapien
tgtgaaatcccacccttgagctaca

SEQ ID NO: 1571897 - DNA, 25 bp, Homo sapien
gcatccaggagagcttgttttctcc

SEQ ID NO: 1571898 - DNA, 25 bp, Homo sapien
catctgaacatccaccggtgactgg

SEQ ID NO: 1571899 - DNA, 25 bp, Homo sapien
gtgtaatgcccatagcatctgaaca

SEQ ID NO: 1571900 - DNA, 25 bp, Homo sapien
aacatccaccggtgactggcagcca

SEQ ID NO: 1571901 - DNA, 25 bp, Homo sapien
gggaagttcgtgtaatgcccatagc

SEQ ID NO: 1571902 - DNA, 25 bp, Homo sapien
cagagccctggacgaggtcatgtcc

SEQ ID NO: 1571903 - DNA, 25 bp, Homo sapien
ccacactggagggtcagattctccc

SEQ ID NO: 1571904 - DNA, 25 bp, Homo sapien
tggcccccgtgggagaccctcacag

SEQ ID NO: 1571905 - DNA, 25 bp, Homo sapien
cagagtgaatttgtcatagccgaca

SEQ ID NO: 1571906 - DNA, 25 bp, Homo sapien
tgggggccgaccactcggaggagag

SEQ ID NO: 1571907 - DNA, 25 bp, Homo sapien
ggtcactgggggccgaccactcgga

SEQ ID NO: 1571908 - DNA, 25 bp, Homo sapien
actgggggccgaccactcggaggag

SEQ ID NO: 1571909 - DNA, 25 bp, Homo sapien
tcactgggggccgaccactcggagg

SEQ ID NO: 1571910 - DNA, 25 bp, Homo sapien
aaagtgtccaactgctcccgtgact

SEQ ID NO: 1571911 - DNA, 25 bp, Homo sapien
ggaaagtgtccaactgctcccgtga

SEQ ID NO: 1571912 - DNA, 25 bp, Homo sapien
ccgagagggagggtctgccacggat

SEQ ID NO: 1571913 - DNA, 25 bp, Homo sapien
cgagagggagggtctgccacggatc

SEQ ID NO: 1571914 - DNA, 25 bp, Homo sapien
tcacaggactcatggggaattcagc

SEQ ID NO: 1571915 - DNA, 25 bp, Homo sapien
acagcaggtaggggaagaatctgcg

SEQ ID NO: 1571916 - DNA, 25 bp, Homo sapien
gaagaatctgcgtgagctgtagcac

SEQ ID NO: 1571917 - DNA, 25 bp, Homo sapien
ggaagaatctgcgtgagctgtagca

SEQ ID NO: 1571918 - DNA, 25 bp, Homo sapien
gacagcaggtaggggaagaatctgc

SEQ ID NO: 1571919 - DNA, 25 bp, Homo sapien
tgagaccacgagctccagggggtca

SEQ ID NO: 1571920 - DNA, 25 bp, Homo sapien
ctgagaccacgagctccagggggtc

SEQ ID NO: 1571921 - DNA, 25 bp, Homo sapien
ctgtcttgttttgcgatgggctgag

SEQ ID NO: 1571922 - DNA, 25 bp, Homo sapien
gatgggctgagggtctcagctgctc

SEQ ID NO: 1571923 - DNA, 25 bp, Homo sapien
gtctgtcttgttttgcgatgggctg

SEQ ID NO: 1571924 - DNA, 25 bp, Homo sapien
gagtctgtcttgttttgcgatgggc

SEQ ID NO: 1571925 - DNA, 25 bp, Homo sapien
atgagattctccactgtgtaatcct

SEQ ID NO: 1571926 - DNA, 25 bp, Homo sapien
ggtttcccgaatgatggtccagact

SEQ ID NO: 1571927 - DNA, 25 bp, Homo sapien
gaggaagcgttctctacaggcaccc

SEQ ID NO: 1571928 - DNA, 25 bp, Homo sapien
atgtatttacctccttgctgcatct

SEQ ID NO: 1571929 - DNA, 25 bp, Homo sapien
cttctcgactttctcagtagacggt

SEQ ID NO: 1571930 - DNA, 25 bp, Homo sapien
acacgccatgctgacgaccatgagc

SEQ ID NO: 1571931 - DNA, 25 bp, Homo sapien
acgccatgctgacgaccatgagcga

SEQ ID NO: 1571932 - DNA, 25 bp, Homo sapien
aacacacgccatgctgacgaccatg

SEQ ID NO: 1571933 - DNA, 25 bp, Homo sapien
ccatgctgacgaccatgagcgacat

SEQ ID NO: 1571934 - DNA, 25 bp, Homo sapien
tggccagggcccctccagcaagaag

SEQ ID NO: 1571935 - DNA, 25 bp, Homo sapien
cagggcccctccagcaagaagaacc

SEQ ID NO: 1571936 - DNA, 25 bp, Homo sapien
gccagggcccctccagcaagaagaa

SEQ ID NO: 1571937 - DNA, 25 bp, Homo sapien
acatgtggccagggcccctccagca

SEQ ID NO: 1571938 - DNA, 25 bp, Homo sapien
gtgtgggtgtgaactgcaacatctg

SEQ ID NO: 1571939 - DNA, 25 bp, Homo sapien
cagggcccatgagaaagctgttccg

SEQ ID NO: 1571940 - DNA, 25 bp, Homo sapien
gcccatgagaaagctgttccggaat

SEQ ID NO: 1571941 - DNA, 25 bp, Homo sapien
gggtgtgaactgcaacatctgtagg

SEQ ID NO: 1571942 - DNA, 25 bp, Homo sapien
caggagggaaggttttctgtggact

SEQ ID NO: 1571943 - DNA, 25 bp, Homo sapien
gccaggagggaaggttttctgtgga

SEQ ID NO: 1571944 - DNA, 25 bp, Homo sapien
actgggagccgacaactcatagggt

SEQ ID NO: 1571945 - DNA, 25 bp, Homo sapien
ttgacctgggaacccgcatcgtgga

SEQ ID NO: 1571946 - DNA, 25 bp, Homo sapien
catgggacccatggaatagttgacc

SEQ ID NO: 1571947 - DNA, 25 bp, Homo sapien
ggatgaccgtctctcccgatttcac

SEQ ID NO: 1571948 - DNA, 25 bp, Homo sapien
gggcttccagtcctagatcattcac

SEQ ID NO: 1571949 - DNA, 25 bp, Homo sapien
gcttccagtcctagatcattcactc

SEQ ID NO: 1571950 - DNA, 25 bp, Homo sapien
tccagtcctagatcattcactccat

SEQ ID NO: 1571951 - DNA, 25 bp, Homo sapien
ctggggcttccagtcctagatcatt

SEQ ID NO: 1571952 - DNA, 25 bp, Homo sapien
gccatggtgtcctgcgacgacgaca

SEQ ID NO: 1571953 - DNA, 25 bp, Homo sapien
atggtgtcctgcgacgacgacagct

SEQ ID NO: 1571954 - DNA, 25 bp, Homo sapien
gtgtcctgcgacgacgacagctcca

SEQ ID NO: 1571955 - DNA, 25 bp, Homo sapien
tggtgtcctgcgacgacgacagctc

SEQ ID NO: 1571956 - DNA, 25 bp, Homo sapien
ggtaaatgtcaaacaagctccggga

SEQ ID NO: 1571957 - DNA, 25 bp, Homo sapien
attgaccctcagcaccgcagtgagc

SEQ ID NO: 1571958 - DNA, 25 bp, Homo sapien
accgcagtgagcctaagttcaccgg

SEQ ID NO: 1571959 - DNA, 25 bp, Homo sapien
tagttccctccgtgggtcacagggc

SEQ ID NO: 1571960 - DNA, 25 bp, Homo sapien
ttcatgtcggtcactgttaatcagg

SEQ ID NO: 1571961 - DNA, 25 bp, Homo sapien
cctcccttattttcatgtcggtcac

SEQ ID NO: 1571962 - DNA, 25 bp, Homo sapien
tgtcggtcactgttaatcaggtagg

SEQ ID NO: 1571963 - DNA, 25 bp, Homo sapien
cactgttaatcaggtagggattcct

SEQ ID NO: 1571964 - DNA, 25 bp, Homo sapien
tctttttgttggcacaccagcgatg

SEQ ID NO: 1571965 - DNA, 25 bp, Homo sapien
gttccctgcaggctcttggtccatt

SEQ ID NO: 1571966 - DNA, 25 bp, Homo sapien
tccctgcaggctcttggtccattac

SEQ ID NO: 1571967 - DNA, 25 bp, Homo sapien
ttccctgcaggctcttggtccatta

SEQ ID NO: 1571968 - DNA, 25 bp, Homo sapien
tgttccctgcaggctcttggtccat

SEQ ID NO: 1571969 - DNA, 25 bp, Homo sapien
tttgggaataagactagccacgagg

SEQ ID NO: 1571970 - DNA, 25 bp, Homo sapien
aataagactagccacgaggctgggc

SEQ ID NO: 1571971 - DNA, 25 bp, Homo sapien
ttgggaataagactagccacgaggc

SEQ ID NO: 1571972 - DNA, 25 bp, Homo sapien
caactgtgcgtatgtcacctcctga

SEQ ID NO: 1571973 - DNA, 25 bp, Homo sapien
acctcctgagggtcttgttcatcag

SEQ ID NO: 1571974 - DNA, 25 bp, Homo sapien
gtcacctcctgagggtcttgttcat

SEQ ID NO: 1571975 - DNA, 25 bp, Homo sapien
actgtgcgtatgtcacctcctgagg

SEQ ID NO: 1571976 - DNA, 25 bp, Homo sapien
ggaaaggtggaatagcacgtatcta

SEQ ID NO: 1571977 - DNA, 25 bp, Homo sapien
gaggaaaggtggaatagcacgtatc

SEQ ID NO: 1571978 - DNA, 25 bp, Homo sapien
tgaggaaaggtggaatagcacgtat

SEQ ID NO: 1571979 - DNA, 25 bp, Homo sapien
aaaggtggaatagcacgtatctaag

SEQ ID NO: 1571980 - DNA, 25 bp, Homo sapien
ggtgctgtctgtgcagacaggcggc

SEQ ID NO: 1571981 - DNA, 25 bp, Homo sapien
gtgctgtctgtgcagacaggcggcc

SEQ ID NO: 1571982 - DNA, 25 bp, Homo sapien
tgctgtctgtgcagacaggcggccg

SEQ ID NO: 1571983 - DNA, 25 bp, Homo sapien
ccatgctgacgaccatgagcgacat

SEQ ID NO: 1571984 - DNA, 25 bp, Homo sapien
ggccaggccccctgcagcaagaaga

SEQ ID NO: 1571985 - DNA, 25 bp, Homo sapien
gtggccaggccccctgcagcaagaa

SEQ ID NO: 1571986 - DNA, 25 bp, Homo sapien
cctcatgtggccaggccccctgcag

SEQ ID NO: 1571987 - DNA, 25 bp, Homo sapien
catgtggccaggccccctgcagcaa

SEQ ID NO: 1571988 - DNA, 25 bp, Homo sapien
gaaccccgacatctgtatgtccctg

SEQ ID NO: 1571989 - DNA, 25 bp, Homo sapien
ggtcacagggcccatgaaaaggctg

SEQ ID NO: 1571990 - DNA, 25 bp, Homo sapien
tgtgtgtgtgaaccccgacatctgt

SEQ ID NO: 1571991 - DNA, 25 bp, Homo sapien
gttccagaatattctgttgtggagc

SEQ ID NO: 1571992 - DNA, 25 bp, Homo sapien
caggagggaaggttttctgtggact

SEQ ID NO: 1571993 - DNA, 25 bp, Homo sapien
gccaggagggaaggttttctgtgga

SEQ ID NO: 1571994 - DNA, 25 bp, Homo sapien
accaacattgcaggatgactgtctc

SEQ ID NO: 1571995 - DNA, 25 bp, Homo sapien
tgacatctgaccaacattgcaggat

SEQ ID NO: 1571996 - DNA, 25 bp, Homo sapien
tctgaccaacattgcaggatgactg

SEQ ID NO: 1571997 - DNA, 25 bp, Homo sapien
cctgacatctgaccaacattgcagg

SEQ ID NO: 1571998 - DNA, 25 bp, Homo sapien
gggagtgagtaacagaaccgtagca

SEQ ID NO: 1571999 - DNA, 25 bp, Homo sapien
catcatgggaccgatggagaagttg

SEQ ID NO: 1572000 - DNA, 25 bp, Homo sapien
gtgagtaacagaaccgtagcatctg

SEQ ID NO: 1572001 - DNA, 25 bp, Homo sapien
agtaacagaaccgtagcatctgtag

SEQ ID NO: 1572002 - DNA, 25 bp, Homo sapien
tgtgatgacgatgtccagagggtca

SEQ ID NO: 1572003 - DNA, 25 bp, Homo sapien
ctgtgatgacgatgtccagagggtc

SEQ ID NO: 1572004 - DNA, 25 bp, Homo sapien
caatgagaatgtccggacactctca

SEQ ID NO: 1572005 - DNA, 25 bp, Homo sapien
ttcactctgcatcccaatgacaatg

SEQ ID NO: 1572006 - DNA, 25 bp, Homo sapien
atgacaatgagaatgtccggacact

SEQ ID NO: 1572007 - DNA, 25 bp, Homo sapien
gggttccaagtcgtggatcattcac

SEQ ID NO: 1572008 - DNA, 25 bp, Homo sapien
tctcctgccagaaccgtggggcccg

SEQ ID NO: 1572009 - DNA, 25 bp, Homo sapien
tctctcctgccagaaccgtggggcc

SEQ ID NO: 1572010 - DNA, 25 bp, Homo sapien
ctcctgccagaaccgtggggcccgg

SEQ ID NO: 1572011 - DNA, 25 bp, Homo sapien
ctgcagagaacctacgttcatgggc

SEQ ID NO: 1572012 - DNA, 25 bp, Homo sapien
cccctccctggatagatggtacatg

SEQ ID NO: 1572013 - DNA, 25 bp, Homo sapien
ggtacatgtcataggagctccggga

SEQ ID NO: 1572014 - DNA, 25 bp, Homo sapien
gagaacctacgttcatgggcctccc

SEQ ID NO: 1572015 - DNA, 25 bp, Homo sapien
tctgtaggttcctccgtgggtggca

SEQ ID NO: 1572016 - DNA, 25 bp, Homo sapien
tggaatgttccgttgaccttgggcc

SEQ ID NO: 1572017 - DNA, 25 bp, Homo sapien
cctggaatgttccgttgaccttggg

SEQ ID NO: 1572018 - DNA, 25 bp, Homo sapien
cagaggaaagtcggcctggaatgtt

SEQ ID NO: 1572019 - DNA, 25 bp, Homo sapien
tgacagaaacaagcagtgggtcact

SEQ ID NO: 1572020 - DNA, 25 bp, Homo sapien
ctgtgacagaaacaagcagtgggtc

SEQ ID NO: 1572021 - DNA, 25 bp, Homo sapien
acagaaacaagcagtgggtcactcg

SEQ ID NO: 1572022 - DNA, 25 bp, Homo sapien
tgtgacagaaacaagcagtgggtca

SEQ ID NO: 1572023 - DNA, 25 bp, Homo sapien
tgggtgaaggccaactatttgaagg

SEQ ID NO: 1572024 - DNA, 25 bp, Homo sapien
gagcttggttcagtgggtgaaggcc

SEQ ID NO: 1572025 - DNA, 25 bp, Homo sapien
agtgggtgaaggccaactatttgaa

SEQ ID NO: 1572026 - DNA, 25 bp, Homo sapien
gtgggtgaaggccaactatttgaag

SEQ ID NO: 1572027 - DNA, 25 bp, Homo sapien
ccaggtttccaaaagcggatataag

SEQ ID NO: 1572028 - DNA, 25 bp, Homo sapien
cccaatcagaacatgcaggtgtctg

SEQ ID NO: 1572029 - DNA, 25 bp, Homo sapien
gttccctgcaggctcttggtccatt

SEQ ID NO: 1572030 - DNA, 25 bp, Homo sapien
tccctgcaggctcttggtccattac

SEQ ID NO: 1572031 - DNA, 25 bp, Homo sapien
ttccctgcaggctcttggtccatta

SEQ ID NO: 1572032 - DNA, 25 bp, Homo sapien
tgttccctgcaggctcttggtccat

SEQ ID NO: 1572033 - DNA, 25 bp, Homo sapien
gtcacctcctgagggtcttgttcat

SEQ ID NO: 1572034 - DNA, 25 bp, Homo sapien
cgtgtacacgatgatatctgttggg

SEQ ID NO: 1572035 - DNA, 25 bp, Homo sapien
ggaagttccgtgtacacgatgatat

SEQ ID NO: 1572036 - DNA, 25 bp, Homo sapien
cacctcctgagggtcttgttcatca

SEQ ID NO: 1572037 - DNA, 25 bp, Homo sapien
ctaagtgccgtgttaagagggagcc

SEQ ID NO: 1572038 - DNA, 25 bp, Homo sapien
tgagttcctcagtgtgattgcagcc

SEQ ID NO: 1572039 - DNA, 25 bp, Homo sapien
tagaagatcccctcaaggcctgact

SEQ ID NO: 1572040 - DNA, 25 bp, Homo sapien
gattgcagcctcaagtagactagga

SEQ ID NO: 1572041 - DNA, 25 bp, Homo sapien
cacgccatgctgacgaccgtgagcg

SEQ ID NO: 1572042 - DNA, 25 bp, Homo sapien
gccatgctgacgaccgtgagcgaca

SEQ ID NO: 1572043 - DNA, 25 bp, Homo sapien
acgccatgctgacgaccgtgagcga

SEQ ID NO: 1572044 - DNA, 25 bp, Homo sapien
ccatgctgacgaccgtgagcgacat

SEQ ID NO: 1572045 - DNA, 25 bp, Homo sapien
cctcatgtggccaggccccctgcag

SEQ ID NO: 1572046 - DNA, 25 bp, Homo sapien
caggccccctgcagcaagaagaacc

SEQ ID NO: 1572047 - DNA, 25 bp, Homo sapien
catgtggccaggccccctgcagcaa

SEQ ID NO: 1572048 - DNA, 25 bp, Homo sapien
ggccaggccccctgcagcaagaaga

SEQ ID NO: 1572049 - DNA, 25 bp, Homo sapien
tgtgggtgtgaaccccgacatctgt

SEQ ID NO: 1572050 - DNA, 25 bp, Homo sapien
gtgtgggtgtgaaccccgacatctg

SEQ ID NO: 1572051 - DNA, 25 bp, Homo sapien
agtgtgggtgtgaaccccgacatct

SEQ ID NO: 1572052 - DNA, 25 bp, Homo sapien
caggagggaaggttttctgtggact

SEQ ID NO: 1572053 - DNA, 25 bp, Homo sapien
gccaggagggaaggttttctgtgga

SEQ ID NO: 1572054 - DNA, 25 bp, Homo sapien
accaacattgcaggatgactgtctc

SEQ ID NO: 1572055 - DNA, 25 bp, Homo sapien
tctgaccaacattgcaggatgactg

SEQ ID NO: 1572056 - DNA, 25 bp, Homo sapien
tgacatctgaccaacattgcaggat

SEQ ID NO: 1572057 - DNA, 25 bp, Homo sapien
cctgacatctgaccaacattgcagg

SEQ ID NO: 1572058 - DNA, 25 bp, Homo sapien
cagtgaggtgcaaagtgtcgttaaa

SEQ ID NO: 1572059 - DNA, 25 bp, Homo sapien
gaagttggccttggaaaccccatca

SEQ ID NO: 1572060 - DNA, 25 bp, Homo sapien
cccatcatggtgctctccagtgagg

SEQ ID NO: 1572061 - DNA, 25 bp, Homo sapien
gaggtgcaaagtgtcgttaaacttc

SEQ ID NO: 1572062 - DNA, 25 bp, Homo sapien
tgtaggtccctgccaggtcttccat

SEQ ID NO: 1572063 - DNA, 25 bp, Homo sapien
ctgtaggtccctgccaggtcttcca

SEQ ID NO: 1572064 - DNA, 25 bp, Homo sapien
gggagtgagtaacagaaccgtagca

SEQ ID NO: 1572065 - DNA, 25 bp, Homo sapien
ggggagtgagtaacagaaccgtagc

SEQ ID NO: 1572066 - DNA, 25 bp, Homo sapien
ggagtgagtaacagaaccgtagcat

SEQ ID NO: 1572067 - DNA, 25 bp, Homo sapien
tgtgatgacgatgtccagagggtca

SEQ ID NO: 1572068 - DNA, 25 bp, Homo sapien
ctgtgatgacgatgtccagagggtc

SEQ ID NO: 1572069 - DNA, 25 bp, Homo sapien
tgtcttttctaactcccggtatggc

SEQ ID NO: 1572070 - DNA, 25 bp, Homo sapien
tgtcctctgttatgacacctggtct

SEQ ID NO: 1572071 - DNA, 25 bp, Homo sapien
tgtctctgttggtacagacctcacc

SEQ ID NO: 1572072 - DNA, 25 bp, Homo sapien
tctccataagaataccaagctcatc

SEQ ID NO: 1572073 - DNA, 25 bp, Homo sapien
ggctgagagagaaggtttctcatat

SEQ ID NO: 1572074 - DNA, 25 bp, Homo sapien
gagagagaaggtttctcatatagac

SEQ ID NO: 1572075 - DNA, 25 bp, Homo sapien
gctgagagagaaggtttctcatata

SEQ ID NO: 1572076 - DNA, 25 bp, Homo sapien
ctgggctgagagagaaggtttctca

SEQ ID NO: 1572077 - DNA, 25 bp, Homo sapien
cccctccctggatagatggtacatg

SEQ ID NO: 1572078 - DNA, 25 bp, Homo sapien
ggtacatgtcataggagctccggga

SEQ ID NO: 1572079 - DNA, 25 bp, Homo sapien
gagaacctacgttcatgggcctccc

SEQ ID NO: 1572080 - DNA, 25 bp, Homo sapien
cctgcagagaacctacgttcatggg

SEQ ID NO: 1572081 - DNA, 25 bp, Homo sapien
tctgtaggttcctccgtgggtggca

SEQ ID NO: 1572082 - DNA, 25 bp, Homo sapien
ctgtgacagaaacaagcagtgggtc

SEQ ID NO: 1572083 - DNA, 25 bp, Homo sapien
ggtcactcgagtttgaccactcgta

SEQ ID NO: 1572084 - DNA, 25 bp, Homo sapien
cactcgtagggagagtcacggaaag

SEQ ID NO: 1572085 - DNA, 25 bp, Homo sapien
acatgggacagccatgggctttcct

SEQ ID NO: 1572086 - DNA, 25 bp, Homo sapien
catgggacagccatgggctttcctc

SEQ ID NO: 1572087 - DNA, 25 bp, Homo sapien
gacatgggacagccatgggctttcc

SEQ ID NO: 1572088 - DNA, 25 bp, Homo sapien
agtgggtgaaggccaactatttgaa

SEQ ID NO: 1572089 - DNA, 25 bp, Homo sapien
gtgggtgaaggccaactatttgaag

SEQ ID NO: 1572090 - DNA, 25 bp, Homo sapien
tgggtgaaggccaactatttgaagg

SEQ ID NO: 1572091 - DNA, 25 bp, Homo sapien
gagcttggttcagtgggtgaaggcc

SEQ ID NO: 1572092 - DNA, 25 bp, Homo sapien
tcatggaaccttctcctggatgtga

SEQ ID NO: 1572093 - DNA, 25 bp, Homo sapien
ggaaccttctcctggatgtgagtgg

SEQ ID NO: 1572094 - DNA, 25 bp, Homo sapien
tggaaccttctcctggatgtgagtg

SEQ ID NO: 1572095 - DNA, 25 bp, Homo sapien
catggaaccttctcctggatgtgag

SEQ ID NO: 1572096 - DNA, 25 bp, Homo sapien
gtatctgttgggggtgtcttgggcc

SEQ ID NO: 1572097 - DNA, 25 bp, Homo sapien
acctcctgagggtcttgttcatcag

SEQ ID NO: 1572098 - DNA, 25 bp, Homo sapien
gtcacctcctgagggtcttgttcat

SEQ ID NO: 1572099 - DNA, 25 bp, Homo sapien
cacctcctgagggtcttgttcatca

SEQ ID NO: 1572100 - DNA, 25 bp, Homo sapien
aggatgttatttggcgccctgccca

SEQ ID NO: 1572101 - DNA, 25 bp, Homo sapien
ctcagcagcgcacaggatgttattt

SEQ ID NO: 1572102 - DNA, 25 bp, Homo sapien
gctcagcagcgcacaggatgttatt

SEQ ID NO: 1572103 - DNA, 25 bp, Homo sapien
acaggatgttatttggcgccctgcc

SEQ ID NO: 1572104 - DNA, 25 bp, Homo sapien
acacgccatgctgacgaccaagagc

SEQ ID NO: 1572105 - DNA, 25 bp, Homo sapien
aacacacgccatgctgacgaccaag

SEQ ID NO: 1572106 - DNA, 25 bp, Homo sapien
acgccatgctgacgaccaagagcga

SEQ ID NO: 1572107 - DNA, 25 bp, Homo sapien
ccatgctgacgaccaagagcgacat

SEQ ID NO: 1572108 - DNA, 25 bp, Homo sapien
tccaggccgatatttccaccctaag

SEQ ID NO: 1572109 - DNA, 25 bp, Homo sapien
cctaagcccatatcgccaatccagg

SEQ ID NO: 1572110 - DNA, 25 bp, Homo sapien
caagaacagggctgtcggctgtgca

SEQ ID NO: 1572111 - DNA, 25 bp, Homo sapien
ccgtatctccatcctaggcacatat

SEQ ID NO: 1572112 - DNA, 25 bp, Homo sapien
ggccaggccccctgcagcaagaaga

SEQ ID NO: 1572113 - DNA, 25 bp, Homo sapien
cctcatgtggccaggccccctgcag

SEQ ID NO: 1572114 - DNA, 25 bp, Homo sapien
catgtggccaggccccctgcagcaa

SEQ ID NO: 1572115 - DNA, 25 bp, Homo sapien
caggccccctgcagcaagaagaacc

SEQ ID NO: 1572116 - DNA, 25 bp, Homo sapien
cgaccacccactggggtagtgtggt

SEQ ID NO: 1572117 - DNA, 25 bp, Homo sapien
gttgtgaaccccgacatgtataggt

SEQ ID NO: 1572118 - DNA, 25 bp, Homo sapien
ccgacatgtataggtccctgcgtgt

SEQ ID NO: 1572119 - DNA, 25 bp, Homo sapien
ccacccactggggtagtgtggttgt

SEQ ID NO: 1572120 - DNA, 25 bp, Homo sapien
ggttgtgagtttagaaggtgtctct

SEQ ID NO: 1572121 - DNA, 25 bp, Homo sapien
aggttgtgagtttagaaggtgtctc

SEQ ID NO: 1572122 - DNA, 25 bp, Homo sapien
agaggttgtgagtttagaaggtgtc

SEQ ID NO: 1572123 - DNA, 25 bp, Homo sapien
agagaggttgtgagtttagaaggtg

SEQ ID NO: 1572124 - DNA, 25 bp, Homo sapien
caggagggaaggttttctgtggact

SEQ ID NO: 1572125 - DNA, 25 bp, Homo sapien
gccaggagggaaggttttctgtgga

SEQ ID NO: 1572126 - DNA, 25 bp, Homo sapien
gaccaacactgcaggatgactgtct

SEQ ID NO: 1572127 - DNA, 25 bp, Homo sapien
ctgtctcttctgatttcaccaggcg

SEQ ID NO: 1572128 - DNA, 25 bp, Homo sapien
aacatgacatctgaccaacactgca

SEQ ID NO: 1572129 - DNA, 25 bp, Homo sapien
aaggaagtgttcaaacatgacatct

SEQ ID NO: 1572130 - DNA, 25 bp, Homo sapien
ttctccaatgaggcgcaaagtgtcg

SEQ ID NO: 1572131 - DNA, 25 bp, Homo sapien
atgaggcgcaaagtgtcgttaaaca

SEQ ID NO: 1572132 - DNA, 25 bp, Homo sapien
gggagtgagtaacagaaccgtagca

SEQ ID NO: 1572133 - DNA, 25 bp, Homo sapien
agtaacagaaccgtagcatctgtag

SEQ ID NO: 1572134 - DNA, 25 bp, Homo sapien
gtgagtaacagaaccgtagcatctg

SEQ ID NO: 1572135 - DNA, 25 bp, Homo sapien
gagtgagtaacagaaccgtagcatc

SEQ ID NO: 1572136 - DNA, 25 bp, Homo sapien
ctatgatcacgatgtccagagggtc

SEQ ID NO: 1572137 - DNA, 25 bp, Homo sapien
tatgatcacgatgtccagagggtca

SEQ ID NO: 1572138 - DNA, 25 bp, Homo sapien
tggaatgttccgttgaccttgggcc

SEQ ID NO: 1572139 - DNA, 25 bp, Homo sapien
tgcagggagcctacgttcatgggcc

SEQ ID NO: 1572140 - DNA, 25 bp, Homo sapien
ggtacatgtcataggagctccggga

SEQ ID NO: 1572141 - DNA, 25 bp, Homo sapien
ctgtgacagaaacaagcagtgggtc

SEQ ID NO: 1572142 - DNA, 25 bp, Homo sapien
gtgggtgaaggccaactatttgaag

SEQ ID NO: 1572143 - DNA, 25 bp, Homo sapien
tgggtgaaggccaactatttgaagg

SEQ ID NO: 1572144 - DNA, 25 bp, Homo sapien
gagcttggttcagtgggtgaaggcc

SEQ ID NO: 1572145 - DNA, 25 bp, Homo sapien
agtgggtgaaggccaactatttgaa

SEQ ID NO: 1572146 - DNA, 25 bp, Homo sapien
ttggcatgctgagacggtcggatca

SEQ ID NO: 1572147 - DNA, 25 bp, Homo sapien
catgctgagacggtcggatcacttg

SEQ ID NO: 1572148 - DNA, 25 bp, Homo sapien
ggcatgctgagacggtcggatcact

SEQ ID NO: 1572149 - DNA, 25 bp, Homo sapien
tggcatgctgagacggtcggatcac

SEQ ID NO: 1572150 - DNA, 25 bp, Homo sapien
aataagaagctaatcttagcagttc

SEQ ID NO: 1572151 - DNA, 25 bp, Homo sapien
ccaataagaagctaatcttagcagt

SEQ ID NO: 1572152 - DNA, 25 bp, Homo sapien
caataagaagctaatcttagcagtt

SEQ ID NO: 1572153 - DNA, 25 bp, Homo sapien
ttgttggagcaccagcgatgaagga

SEQ ID NO: 1572154 - DNA, 25 bp, Homo sapien
gaggtcccaatcagaatgtgcaggt

SEQ ID NO: 1572155 - DNA, 25 bp, Homo sapien
ttttttgttggagcaccagcgatga

SEQ ID NO: 1572156 - DNA, 25 bp, Homo sapien
atgaccactgaggtcccaatcagaa

SEQ ID NO: 1572157 - DNA, 25 bp, Homo sapien
ctcgctattcgctgttctgtttcct

SEQ ID NO: 1572158 - DNA, 25 bp, Homo sapien
ctattcgctgttctgtttcctgcag

SEQ ID NO: 1572159 - DNA, 25 bp, Homo sapien
tcctgcagactcttggtccattacc

SEQ ID NO: 1572160 - DNA, 25 bp, Homo sapien
tttcctgcagactcttggtccatta

SEQ ID NO: 1572161 - DNA, 25 bp, Homo sapien
tcacctcctgagggtcttgttcatc

SEQ ID NO: 1572162 - DNA, 25 bp, Homo sapien
acctcctgagggtcttgttcatcag

SEQ ID NO: 1572163 - DNA, 25 bp, Homo sapien
cacctcctgagggtcttgttcatca

SEQ ID NO: 1572164 - DNA, 25 bp, Homo sapien
gtcacctcctgagggtcttgttcat

SEQ ID NO: 1572165 - DNA, 25 bp, Homo sapien
agttccgtgtacacgatgatatctg

SEQ ID NO: 1572166 - DNA, 25 bp, Homo sapien
tccgtgtacacgatgatatctgttg

SEQ ID NO: 1572167 - DNA, 25 bp, Homo sapien
cgtgtacacgatgatatctgttggg

SEQ ID NO: 1572168 - DNA, 25 bp, Homo sapien
ggaagttccgtgtacacgatgatat

SEQ ID NO: 1572169 - DNA, 25 bp, Homo sapien
tgccctaagatgcagactcacgcct

SEQ ID NO: 1572170 - DNA, 25 bp, Homo sapien
ctggtacatgggagctggcaacccg

SEQ ID NO: 1572171 - DNA, 25 bp, Homo sapien
tgagttcctcagtgtgattgcagcc

SEQ ID NO: 1572172 - DNA, 25 bp, Homo sapien
gattgcagcctcaagtagactagga

SEQ ID NO: 1572173 - DNA, 25 bp, Homo sapien
aggatgttatttggcgccctgccca

SEQ ID NO: 1572174 - DNA, 25 bp, Homo sapien
gctcagcagcgcacaggatgttatt

SEQ ID NO: 1572175 - DNA, 25 bp, Homo sapien
ggtgctgccggtgcagacaggcggc

SEQ ID NO: 1572176 - DNA, 25 bp, Homo sapien
acaggatgttatttggcgccctgcc

SEQ ID NO: 1572177 - DNA, 25 bp, Homo sapien
acacgccatgctgacgaccatgagc

SEQ ID NO: 1572178 - DNA, 25 bp, Homo sapien
acgccatgctgacgaccatgagcga

SEQ ID NO: 1572179 - DNA, 25 bp, Homo sapien
ccatgctgacgaccatgagcgacat

SEQ ID NO: 1572180 - DNA, 25 bp, Homo sapien
aacacacgccatgctgacgaccatg

SEQ ID NO: 1572181 - DNA, 25 bp, Homo sapien
gagaggaagggcttgtcctgaccac

SEQ ID NO: 1572182 - DNA, 25 bp, Homo sapien
aggcagagaggaagggcttgtcctg

SEQ ID NO: 1572183 - DNA, 25 bp, Homo sapien
ggcagagaggaagggcttgtcctga

SEQ ID NO: 1572184 - DNA, 25 bp, Homo sapien
cagagaggaagggcttgtcctgacc

SEQ ID NO: 1572185 - DNA, 25 bp, Homo sapien
aacggtgtttcggaatactctgttg

SEQ ID NO: 1572186 - DNA, 25 bp, Homo sapien
ggtgtttcggaatactctgttgtag

SEQ ID NO: 1572187 - DNA, 25 bp, Homo sapien
cagggcctatgaaaacggtgtttcg

SEQ ID NO: 1572188 - DNA, 25 bp, Homo sapien
ggtcacagggcctatgaaaacggtg

SEQ ID NO: 1572189 - DNA, 25 bp, Homo sapien
caggagggaaggttttctgtggact

SEQ ID NO: 1572190 - DNA, 25 bp, Homo sapien
gccaggagggaaggttttctgtgga

SEQ ID NO: 1572191 - DNA, 25 bp, Homo sapien
accaacattgcaggatgactgtctc

SEQ ID NO: 1572192 - DNA, 25 bp, Homo sapien
cacgatgtccagagggtcactggga

SEQ ID NO: 1572193 - DNA, 25 bp, Homo sapien
tgaggaacagaaccgtagcatctgt

SEQ ID NO: 1572194 - DNA, 25 bp, Homo sapien
gaagtgctcaaacatgacatctgac

SEQ ID NO: 1572195 - DNA, 25 bp, Homo sapien
ctcctgccttaaccatggggcgcgg

SEQ ID NO: 1572196 - DNA, 25 bp, Homo sapien
ggaacctaagttcatgagcctcccc

SEQ ID NO: 1572197 - DNA, 25 bp, Homo sapien
ctgccttaaccatggggcgcggctg

SEQ ID NO: 1572198 - DNA, 25 bp, Homo sapien
gggaacctaagttcatgagcctccc

SEQ ID NO: 1572199 - DNA, 25 bp, Homo sapien
tgacagaaacaagcagtgggtcact

SEQ ID NO: 1572200 - DNA, 25 bp, Homo sapien
ctgtgacagaaacaagcagtgggtc

SEQ ID NO: 1572201 - DNA, 25 bp, Homo sapien
gggagagtcacggaaagagccgaag

SEQ ID NO: 1572202 - DNA, 25 bp, Homo sapien
tgaccactcgtagggagagtcacgg

SEQ ID NO: 1572203 - DNA, 25 bp, Homo sapien
cctggcgaaggaatgggcctgtttc

SEQ ID NO: 1572204 - DNA, 25 bp, Homo sapien
cccctggcgaaggaatgggcctgtt

SEQ ID NO: 1572205 - DNA, 25 bp, Homo sapien
ggcccctggcgaaggaatgggcctg

SEQ ID NO: 1572206 - DNA, 25 bp, Homo sapien
tggcgaaggaatgggcctgtttcca

SEQ ID NO: 1572207 - DNA, 25 bp, Homo sapien
agccaggaagaccagaccagccaca

SEQ ID NO: 1572208 - DNA, 25 bp, Homo sapien
ggaactctccacagtatagttctgg

SEQ ID NO: 1572209 - DNA, 25 bp, Homo sapien
gtggcccctcatgtctccaccaggt

SEQ ID NO: 1572210 - DNA, 25 bp, Homo sapien
cagcattgccaaaagagccaggaag

SEQ ID NO: 1572211 - DNA, 25 bp, Homo sapien
catggccgtgttcaacccaacaatg

SEQ ID NO: 1572212 - DNA, 25 bp, Homo sapien
gacttaggattttgctgtacgccaa

SEQ ID NO: 1572213 - DNA, 25 bp, Homo sapien
ggatgtacaacatggccgtgttcaa

SEQ ID NO: 1572214 - DNA, 25 bp, Homo sapien
tacgccaaaactcagtgtccaactt

SEQ ID NO: 1572215 - DNA, 25 bp, Homo sapien
caggacgcagtgactcggctcgact

SEQ ID NO: 1572216 - DNA, 25 bp, Homo sapien
gggcccggatcgtgcagttgacaca

SEQ ID NO: 1572217 - DNA, 25 bp, Homo sapien
gacacattgaccacaacatgtgaag

SEQ ID NO: 1572218 - DNA, 25 bp, Homo sapien
ctcgactgaccggtgcagaggatgt

SEQ ID NO: 1572219 - DNA, 25 bp, Homo sapien
ccaggatgatgaccgtgggtgacat

SEQ ID NO: 1572220 - DNA, 25 bp, Homo sapien
atgccaggatgatgaccgtgggtga

SEQ ID NO: 1572221 - DNA, 25 bp, Homo sapien
caagacatgccaggatgatgaccgt

SEQ ID NO: 1572222 - DNA, 25 bp, Homo sapien
aagacatgccaggatgatgaccgtg

SEQ ID NO: 1572223 - DNA, 25 bp, Homo sapien
ccacgtgtgcccacacactctggtc

SEQ ID NO: 1572224 - DNA, 25 bp, Homo sapien
agagcagaagggcttgtcctgacca

SEQ ID NO: 1572225 - DNA, 25 bp, Homo sapien
gcagagcagaagggcttgtcctgac

SEQ ID NO: 1572226 - DNA, 25 bp, Homo sapien
gagcagaagggcttgtcctgaccac

SEQ ID NO: 1572227 - DNA, 25 bp, Homo sapien
aggcagagcagaagggcttgtcctg

SEQ ID NO: 1572228 - DNA, 25 bp, Homo sapien
cagggaccccatctttcttgtacag

SEQ ID NO: 1572229 - DNA, 25 bp, Homo sapien
ggagtgcgggtgaaaacctcgacat

SEQ ID NO: 1572230 - DNA, 25 bp, Homo sapien
tgtacagcgtgaagatgttaaaccc

SEQ ID NO: 1572231 - DNA, 25 bp, Homo sapien
ccatctttcttgtacagcgtgaaga

SEQ ID NO: 1572232 - DNA, 25 bp, Homo sapien
cgtagggagatccatggaaagagcc

SEQ ID NO: 1572233 - DNA, 25 bp, Homo sapien
ggctgtaagcgaaggtttctcatat

SEQ ID NO: 1572234 - DNA, 25 bp, Homo sapien
gccgggctgtaagcgaaggtttctc

SEQ ID NO: 1572235 - DNA, 25 bp, Homo sapien
cgggtctgaccactcgtagggagat

SEQ ID NO: 1572236 - DNA, 25 bp, Homo sapien
tttgaagcttggttcagtgggtgaa

SEQ ID NO: 1572237 - DNA, 25 bp, Homo sapien
tcagtgggtgaaggccaactactag

SEQ ID NO: 1572238 - DNA, 25 bp, Homo sapien
tgggtgaaggccaactactagaagg

SEQ ID NO: 1572239 - DNA, 25 bp, Homo sapien
cagttttgaagcttggttcagtggg

SEQ ID NO: 1572240 - DNA, 25 bp, Homo sapien
actgagtacctaatcacagcatgca

SEQ ID NO: 1572241 - DNA, 25 bp, Homo sapien
agtacctaatcacagcatgcaggtg

SEQ ID NO: 1572242 - DNA, 25 bp, Homo sapien
gccactgagtacctaatcacagcat

SEQ ID NO: 1572243 - DNA, 25 bp, Homo sapien
gatggccactgagtacctaatcaca

SEQ ID NO: 1572244 - DNA, 25 bp, Homo sapien
tgctcccatcctgcttccgcacagg

SEQ ID NO: 1572245 - DNA, 25 bp, Homo sapien
gctcccatcctgcttccgcacaggg

SEQ ID NO: 1572246 - DNA, 25 bp, Homo sapien
atcctgcttccgcacagggccctga

SEQ ID NO: 1572247 - DNA, 25 bp, Homo sapien
tgcttccgcacagggccctgagttc

SEQ ID NO: 1572248 - DNA, 25 bp, Homo sapien
catggaatcttctcctggatgtgag

SEQ ID NO: 1572249 - DNA, 25 bp, Homo sapien
tggaatcttctcctggatgtgagtg

SEQ ID NO: 1572250 - DNA, 25 bp, Homo sapien
tcatggaatcttctcctggatgtga

SEQ ID NO: 1572251 - DNA, 25 bp, Homo sapien
ggaatcttctcctggatgtgagtgg

SEQ ID NO: 1572252 - DNA, 25 bp, Homo sapien
actgttctgtgtcccgcaggctctt

SEQ ID NO: 1572253 - DNA, 25 bp, Homo sapien
ttctgtgtcccgcaggctcttggtt

SEQ ID NO: 1572254 - DNA, 25 bp, Homo sapien
gttcactgttctgtgtcccgcaggc

SEQ ID NO: 1572255 - DNA, 25 bp, Homo sapien
tccctgttcactgttctgtgtcccg

SEQ ID NO: 1572256 - DNA, 25 bp, Homo sapien
cacacgctggtatctgttgagggtc

SEQ ID NO: 1572257 - DNA, 25 bp, Homo sapien
ggtatctgttgagggtctcttgctc

SEQ ID NO: 1572258 - DNA, 25 bp, Homo sapien
tcatgggcaggagacaacgctctgg

SEQ ID NO: 1572259 - DNA, 25 bp, Homo sapien
tggaagttctatacacacgctggta

SEQ ID NO: 1572260 - DNA, 25 bp, Homo sapien
gaggagagaactacactgaaatcaa

SEQ ID NO: 1572261 - DNA, 25 bp, Homo sapien
aattttataaggtttgctgatgcca

SEQ ID NO: 1572262 - DNA, 25 bp, Homo sapien
aaatagtctgaggaaaggtggaaca

SEQ ID NO: 1572263 - DNA, 25 bp, Homo sapien
taagtgccgtgttaagagagagcct

SEQ ID NO: 1572264 - DNA, 25 bp, Homo sapien
tctgcagacgctcaagcctcttaca

SEQ ID NO: 1572265 - DNA, 25 bp, Homo sapien
cactattcgtgggtgattggtttca

SEQ ID NO: 1572266 - DNA, 25 bp, Homo sapien
tccactcagatagcacaatctgcag

SEQ ID NO: 1572267 - DNA, 25 bp, Homo sapien
tacagcctacacacagcttcatttg

SEQ ID NO: 1572268 - DNA, 25 bp, Homo sapien
ggtgctgccggtgcagacaggcggc

SEQ ID NO: 1572269 - DNA, 25 bp, Homo sapien
acacgccatgctgacgaccatgagc

SEQ ID NO: 1572270 - DNA, 25 bp, Homo sapien
ccatgctgacgaccatgagcgacat

SEQ ID NO: 1572271 - DNA, 25 bp, Homo sapien
acgccatgctgacgaccatgagcga

SEQ ID NO: 1572272 - DNA, 25 bp, Homo sapien
aacacacgccatgctgacgaccatg

SEQ ID NO: 1572273 - DNA, 25 bp, Homo sapien
tggaccggccctctggaccaagaac

SEQ ID NO: 1572274 - DNA, 25 bp, Homo sapien
tgtggaccggccctctggaccaaga

SEQ ID NO: 1572275 - DNA, 25 bp, Homo sapien
ccatgtgtggaccggccctctggac

SEQ ID NO: 1572276 - DNA, 25 bp, Homo sapien
gaccggccctctggaccaagaacaa

SEQ ID NO: 1572277 - DNA, 25 bp, Homo sapien
ttgctgggtgccgaccacccagtgg

SEQ ID NO: 1572278 - DNA, 25 bp, Homo sapien
acgtgtcctcctcgaggcaccacag

SEQ ID NO: 1572279 - DNA, 25 bp, Homo sapien
tgacaccgaagagtcacgtgtcctc

SEQ ID NO: 1572280 - DNA, 25 bp, Homo sapien
gacgatagtgacaccgaagagtcac

SEQ ID NO: 1572281 - DNA, 25 bp, Homo sapien
aaagagaagttgtgagtttagaagg

SEQ ID NO: 1572282 - DNA, 25 bp, Homo sapien
gaagttgtgagtttagaaggcatct

SEQ ID NO: 1572283 - DNA, 25 bp, Homo sapien
agttgtgagtttagaaggcatctct

SEQ ID NO: 1572284 - DNA, 25 bp, Homo sapien
ctagaaagagaagttgtgagtttag

SEQ ID NO: 1572285 - DNA, 25 bp, Homo sapien
atctgaccaacattgcaggatgact

SEQ ID NO: 1572286 - DNA, 25 bp, Homo sapien
catggatctgtccaacgaggcgtga

SEQ ID NO: 1572287 - DNA, 25 bp, Homo sapien
atggatctgtccaacgaggcgtgag

SEQ ID NO: 1572288 - DNA, 25 bp, Homo sapien
gagtaacagaaccgtagcatctgta

SEQ ID NO: 1572289 - DNA, 25 bp, Homo sapien
gtgagtaacagaaccgtagcatctg

SEQ ID NO: 1572290 - DNA, 25 bp, Homo sapien
tgagtaacagaaccgtagcatctgt

SEQ ID NO: 1572291 - DNA, 25 bp, Homo sapien
agtaacagaaccgtagcatctgtag

SEQ ID NO: 1572292 - DNA, 25 bp, Homo sapien
ctgtgaccacgatgtccaggggatc

SEQ ID NO: 1572293 - DNA, 25 bp, Homo sapien
tgtgaccacgatgtccaggggatca

SEQ ID NO: 1572294 - DNA, 25 bp, Homo sapien
ctgcagggagcctacgttcatgggc

SEQ ID NO: 1572295 - DNA, 25 bp, Homo sapien
cccctccctggatagatggtacatg

SEQ ID NO: 1572296 - DNA, 25 bp, Homo sapien
ggtacatgtcataggagctccggga

SEQ ID NO: 1572297 - DNA, 25 bp, Homo sapien
actgcagggagcctacgttcatggg

SEQ ID NO: 1572298 - DNA, 25 bp, Homo sapien
gcccagagggaaatctgcctggaat

SEQ ID NO: 1572299 - DNA, 25 bp, Homo sapien
agggcccagagggaaatctgcctgg

SEQ ID NO: 1572300 - DNA, 25 bp, Homo sapien
gcagggcccagagggaaatctgcct

SEQ ID NO: 1572301 - DNA, 25 bp, Homo sapien
ctgtaggtccctccgtgggtggcag

SEQ ID NO: 1572302 - DNA, 25 bp, Homo sapien
ggagagtgacggaaagagccgaagc

SEQ ID NO: 1572303 - DNA, 25 bp, Homo sapien
ctgaccactcgtagggagagtgacg

SEQ ID NO: 1572304 - DNA, 25 bp, Homo sapien
agagtgacggaaagagccgaagcat

SEQ ID NO: 1572305 - DNA, 25 bp, Homo sapien
agggagagtgacggaaagagccgaa

SEQ ID NO: 1572306 - DNA, 25 bp, Homo sapien
tgacagaaacaagcagtgggtcact

SEQ ID NO: 1572307 - DNA, 25 bp, Homo sapien
ctgtgacagaaacaagcagtgggtc

SEQ ID NO: 1572308 - DNA, 25 bp, Homo sapien
acagaaacaagcagtgggtcactcg

SEQ ID NO: 1572309 - DNA, 25 bp, Homo sapien
tgtgacagaaacaagcagtgggtca

SEQ ID NO: 1572310 - DNA, 25 bp, Homo sapien
tgagagagatatgggcttttctcac

SEQ ID NO: 1572311 - DNA, 25 bp, Homo sapien
tccttagctaaggatttaggatcat

SEQ ID NO: 1572312 - DNA, 25 bp, Homo sapien
aggacatgagagagatatgggcttt

SEQ ID NO: 1572313 - DNA, 25 bp, Homo sapien
aaggatttaggatcataggacatga

SEQ ID NO: 1572314 - DNA, 25 bp, Homo sapien
tttggagcttggttctgtgggtgaa

SEQ ID NO: 1572315 - DNA, 25 bp, Homo sapien
ttggttctgtgggtgaaggccaact

SEQ ID NO: 1572316 - DNA, 25 bp, Homo sapien
tgggtgaaggccaactacttgaagg

SEQ ID NO: 1572317 - DNA, 25 bp, Homo sapien
ctgtgggtgaaggccaactacttga

SEQ ID NO: 1572318 - DNA, 25 bp, Homo sapien
tcattcttctagcttgtaggaggtc

SEQ ID NO: 1572319 - DNA, 25 bp, Homo sapien
cattcttctagcttgtaggaggtct

SEQ ID NO: 1572320 - DNA, 25 bp, Homo sapien
tcttctagcttgtaggaggtctcac

SEQ ID NO: 1572321 - DNA, 25 bp, Homo sapien
ttcttctagcttgtaggaggtctca

SEQ ID NO: 1572322 - DNA, 25 bp, Homo sapien
atgaccactgaggtcccaatcagaa

SEQ ID NO: 1572323 - DNA, 25 bp, Homo sapien
gaggtcccaatcagaatgtgcaggt

SEQ ID NO: 1572324 - DNA, 25 bp, Homo sapien
tttgttggagcaccagagatgaagg

SEQ ID NO: 1572325 - DNA, 25 bp, Homo sapien
ttttttgttggagcaccagagatga

SEQ ID NO: 1572326 - DNA, 25 bp, Homo sapien
tccctgcaggctcttggtccattac

SEQ ID NO: 1572327 - DNA, 25 bp, Homo sapien
gttccctgcaggctcttggtccatt

SEQ ID NO: 1572328 - DNA, 25 bp, Homo sapien
tgttccctgcaggctcttggtccat

SEQ ID NO: 1572329 - DNA, 25 bp, Homo sapien
ttccctgcaggctcttggtccatta

SEQ ID NO: 1572330 - DNA, 25 bp, Homo sapien
gtgatccaactgtgcgtatgtcacc

SEQ ID NO: 1572331 - DNA, 25 bp, Homo sapien
agtgatccaactgtgcgtatgtcac

SEQ ID NO: 1572332 - DNA, 25 bp, Homo sapien
cacgtgggtaagtgccacgtcaaga

SEQ ID NO: 1572333 - DNA, 25 bp, Homo sapien
ccagatttgtggcgtgaggaggagc

SEQ ID NO: 1572334 - DNA, 25 bp, Homo sapien
ggtaagtgccacgtcaagagggagc

SEQ ID NO: 1572335 - DNA, 25 bp, Homo sapien
aagtgccacgtcaagagggagcctc

SEQ ID NO: 1572336 - DNA, 25 bp, Homo sapien
ggtgctgccggtgcagacaggcggc

SEQ ID NO: 1572337 - DNA, 25 bp, Homo sapien
tgccggtgcagacaggcggccgcgc

SEQ ID NO: 1572338 - DNA, 25 bp, Homo sapien
ctgccggtgcagacaggcggccgcg

SEQ ID NO: 1572339 - DNA, 25 bp, Homo sapien
tgctgccggtgcagacaggcggccg

SEQ ID NO: 1572340 - DNA, 25 bp, Homo sapien
caacacacgccatgatgatgaccat

SEQ ID NO: 1572341 - DNA, 25 bp, Homo sapien
ggccaggccccctgcagcaagaaga

SEQ ID NO: 1572342 - DNA, 25 bp, Homo sapien
tgtggccaggccccctgcagcaaga

SEQ ID NO: 1572343 - DNA, 25 bp, Homo sapien
cctcctgtggccaggccccctgcag

SEQ ID NO: 1572344 - DNA, 25 bp, Homo sapien
caggccccctgcagcaagaagaacc

SEQ ID NO: 1572345 - DNA, 25 bp, Homo sapien
agaaagcaagggcttgtcctgacca

SEQ ID NO: 1572346 - DNA, 25 bp, Homo sapien
ggtagaaagcaagggcttgtcctga

SEQ ID NO: 1572347 - DNA, 25 bp, Homo sapien
gccaggtagaaagcaagggcttgtc

SEQ ID NO: 1572348 - DNA, 25 bp, Homo sapien
gaaagcaagggcttgtcctgaccac

SEQ ID NO: 1572349 - DNA, 25 bp, Homo sapien
gttaaacccaagattagagtgacac

SEQ ID NO: 1572350 - DNA, 25 bp, Homo sapien
agttgttaaacccaagattagagtg

SEQ ID NO: 1572351 - DNA, 25 bp, Homo sapien
agactgaagttgttaaacccaagat

SEQ ID NO: 1572352 - DNA, 25 bp, Homo sapien
tgaagttgttaaacccaagattaga

SEQ ID NO: 1572353 - DNA, 25 bp, Homo sapien
caggaaggaaggttttctgtggact

SEQ ID NO: 1572354 - DNA, 25 bp, Homo sapien
gccaggaaggaaggttttctgtgga

SEQ ID NO: 1572355 - DNA, 25 bp, Homo sapien
accaacattgcaggatgactgtctc

SEQ ID NO: 1572356 - DNA, 25 bp, Homo sapien
gaccaacattgcaggatgactgtct

SEQ ID NO: 1572357 - DNA, 25 bp, Homo sapien
ggcatcatgggaccaatggagaagt

SEQ ID NO: 1572358 - DNA, 25 bp, Homo sapien
ggttcctgcaaggacaggcatcatg

SEQ ID NO: 1572359 - DNA, 25 bp, Homo sapien
ctctccaatgaggtgcaaagtgttg

SEQ ID NO: 1572360 - DNA, 25 bp, Homo sapien
aaccccatcatggtgctctccaatg

SEQ ID NO: 1572361 - DNA, 25 bp, Homo sapien
atgtccagagggtcactgggagctg

SEQ ID NO: 1572362 - DNA, 25 bp, Homo sapien
gtccagagggtcactgggagctgac

SEQ ID NO: 1572363 - DNA, 25 bp, Homo sapien
tgtccagagggtcactgggagctga

SEQ ID NO: 1572364 - DNA, 25 bp, Homo sapien
ccggctgggctgagagagaaggttt

SEQ ID NO: 1572365 - DNA, 25 bp, Homo sapien
gagagagaaggtttctcatatagac

SEQ ID NO: 1572366 - DNA, 25 bp, Homo sapien
ggcccggctgggctgagagagaagg

SEQ ID NO: 1572367 - DNA, 25 bp, Homo sapien
ctgggctgagagagaaggtttctca

SEQ ID NO: 1572368 - DNA, 25 bp, Homo sapien
gcaggacaaggtcacattctctcct

SEQ ID NO: 1572369 - DNA, 25 bp, Homo sapien
ctgcagggagcctacgttcatgggc

SEQ ID NO: 1572370 - DNA, 25 bp, Homo sapien
tgcagggagcctacgttcatgggcc

SEQ ID NO: 1572371 - DNA, 25 bp, Homo sapien
gggagcctacgttcatgggcctccc

SEQ ID NO: 1572372 - DNA, 25 bp, Homo sapien
cagggagcctacgttcatgggcctc

SEQ ID NO: 1572373 - DNA, 25 bp, Homo sapien
agaggaaagtcggcctggaatgttc

SEQ ID NO: 1572374 - DNA, 25 bp, Homo sapien
cagaggaaagtcggcctggaatgtt

SEQ ID NO: 1572375 - DNA, 25 bp, Homo sapien
gaggaaagtcggcctggaatgttcc

SEQ ID NO: 1572376 - DNA, 25 bp, Homo sapien
tgtgacggaaacaagcagtggatca

SEQ ID NO: 1572377 - DNA, 25 bp, Homo sapien
gcagtggatcactcgagtttgacca

SEQ ID NO: 1572378 - DNA, 25 bp, Homo sapien
tgaccactcgtagggagcgtcacgg

SEQ ID NO: 1572379 - DNA, 25 bp, Homo sapien
gagcgtcacggaaagagccgaagca

SEQ ID NO: 1572380 - DNA, 25 bp, Homo sapien
gagcttggttcagtgggtgaaggcc

SEQ ID NO: 1572381 - DNA, 25 bp, Homo sapien
gtgggtgaaggccaactatttgaag

SEQ ID NO: 1572382 - DNA, 25 bp, Homo sapien
tgggtgaaggccaactatttgaagg

SEQ ID NO: 1572383 - DNA, 25 bp, Homo sapien
agtgggtgaaggccaactatttgaa

SEQ ID NO: 1572384 - DNA, 25 bp, Homo sapien
tcagaacatgtaggtgtctggggtt

SEQ ID NO: 1572385 - DNA, 25 bp, Homo sapien
cagaacatgtaggtgtctggggtta

SEQ ID NO: 1572386 - DNA, 25 bp, Homo sapien
agaacatgtaggtgtctggggttac

SEQ ID NO: 1572387 - DNA, 25 bp, Homo sapien
gatggtgaaagggattttgaccact

SEQ ID NO: 1572388 - DNA, 25 bp, Homo sapien
gaaagggattttgaccactgaggtc

SEQ ID NO: 1572389 - DNA, 25 bp, Homo sapien
aggatggtgaaagggattttgacca

SEQ ID NO: 1572390 - DNA, 25 bp, Homo sapien
ggtgaaagggattttgaccactgag

SEQ ID NO: 1572391 - DNA, 25 bp, Homo sapien
tccctgcaggctcttggtccattac

SEQ ID NO: 1572392 - DNA, 25 bp, Homo sapien
gttccctgcaggctcttggtccatt

SEQ ID NO: 1572393 - DNA, 25 bp, Homo sapien
tgttccctgcaggctcttggtccat

SEQ ID NO: 1572394 - DNA, 25 bp, Homo sapien
ttccctgcaggctcttggtccatta

SEQ ID NO: 1572395 - DNA, 25 bp, Homo sapien
tttgggaataagactagccacgagg

SEQ ID NO: 1572396 - DNA, 25 bp, Homo sapien
aataagactagccacgaggctgggc

SEQ ID NO: 1572397 - DNA, 25 bp, Homo sapien
ttgggaataagactagccacgaggc

SEQ ID NO: 1572398 - DNA, 25 bp, Homo sapien
tatgcgtatgacacctcctgatggt

SEQ ID NO: 1572399 - DNA, 25 bp, Homo sapien
ttatgcgtatgacacctcctgatgg

SEQ ID NO: 1572400 - DNA, 25 bp, Homo sapien
atgcgtatgacacctcctgatggtc

SEQ ID NO: 1572401 - DNA, 25 bp, Homo sapien
tttggaagttctatgtacatgctgg

SEQ ID NO: 1572402 - DNA, 25 bp, Homo sapien
gaagttctatgtacatgctggtatc

SEQ ID NO: 1572403 - DNA, 25 bp, Homo sapien
agcatttggaagttctatgtacatg

SEQ ID NO: 1572404 - DNA, 25 bp, Homo sapien
tggaagttctatgtacatgctggta

SEQ ID NO: 1572405 - DNA, 25 bp, Homo sapien
tgagttcctcagtgtgattgcagcc

SEQ ID NO: 1572406 - DNA, 25 bp, Homo sapien
catgttcagattcgtggtgtgagga

SEQ ID NO: 1572407 - DNA, 25 bp, Homo sapien
ctggtacatgggagctggcaacccg

SEQ ID NO: 1572408 - DNA, 25 bp, Homo sapien
tgaggaagagcgatgccctaagatg

SEQ ID NO: 1572409 - DNA, 25 bp, Homo sapien
cggtgcagacaggaggccgcgcccc

SEQ ID NO: 1572410 - DNA, 25 bp, Homo sapien
ggtgctgccggtgcagacaggaggc

SEQ ID NO: 1572411 - DNA, 25 bp, Homo sapien
ctgccggtgcagacaggaggccgcg

SEQ ID NO: 1572412 - DNA, 25 bp, Homo sapien
gccggtgcagacaggaggccgcgcc

SEQ ID NO: 1572413 - DNA, 25 bp, Homo sapien
cacgccatgctgacgaccgtgagcg

SEQ ID NO: 1572414 - DNA, 25 bp, Homo sapien
gccatgctgacgaccgtgagcgaca

SEQ ID NO: 1572415 - DNA, 25 bp, Homo sapien
acgccatgctgacgaccgtgagcga

SEQ ID NO: 1572416 - DNA, 25 bp, Homo sapien
ccatgctgacgaccgtgagcgacat

SEQ ID NO: 1572417 - DNA, 25 bp, Homo sapien
ccatgagtggccaggccccctgcag

SEQ ID NO: 1572418 - DNA, 25 bp, Homo sapien
gagtggccaggccccctgcagcaag

SEQ ID NO: 1572419 - DNA, 25 bp, Homo sapien
ccaggccccctgcagcaagaagaac

SEQ ID NO: 1572420 - DNA, 25 bp, Homo sapien
caggccccctgcagcaagaagaacc

SEQ ID NO: 1572421 - DNA, 25 bp, Homo sapien
ttaaacccacgacgatagtgacact

SEQ ID NO: 1572422 - DNA, 25 bp, Homo sapien
ctgccgtggaagatgggaacgtggc

SEQ ID NO: 1572423 - DNA, 25 bp, Homo sapien
aacccacgacgatagtgacactgaa

SEQ ID NO: 1572424 - DNA, 25 bp, Homo sapien
tgccgtggaagatgggaacgtggct

SEQ ID NO: 1572425 - DNA, 25 bp, Homo sapien
accaacattgcaggatgactgtctc

SEQ ID NO: 1572426 - DNA, 25 bp, Homo sapien
catggatctgtccaacgaggcgtga

SEQ ID NO: 1572427 - DNA, 25 bp, Homo sapien
caaacatgacatctgaccaacattg

SEQ ID NO: 1572428 - DNA, 25 bp, Homo sapien
gaagtgctcaaacatgacatctgac

SEQ ID NO: 1572429 - DNA, 25 bp, Homo sapien
gagtgaggaacagaaccataacatc

SEQ ID NO: 1572430 - DNA, 25 bp, Homo sapien
ggaacagaaccataacatctgtagg

SEQ ID NO: 1572431 - DNA, 25 bp, Homo sapien
tgaggaacagaaccataacatctgt

SEQ ID NO: 1572432 - DNA, 25 bp, Homo sapien
aacagaaccataacatctgtaggtt

SEQ ID NO: 1572433 - DNA, 25 bp, Homo sapien
ctgtgatcacgatgtccagggggtc

SEQ ID NO: 1572434 - DNA, 25 bp, Homo sapien
tgtgatcacgatgtccagggggtca

SEQ ID NO: 1572435 - DNA, 25 bp, Homo sapien
ccggctgggctgagagagaaggttt

SEQ ID NO: 1572436 - DNA, 25 bp, Homo sapien
gagagagaaggtttctcatatagac

SEQ ID NO: 1572437 - DNA, 25 bp, Homo sapien
cccggctgggctgagagagaaggtt

SEQ ID NO: 1572438 - DNA, 25 bp, Homo sapien
gctgagagagaaggtttctcatata

SEQ ID NO: 1572439 - DNA, 25 bp, Homo sapien
agatggtagatgtcataggagctcc

SEQ ID NO: 1572440 - DNA, 25 bp, Homo sapien
agcctacgttcatgggcctcccctt

SEQ ID NO: 1572441 - DNA, 25 bp, Homo sapien
gcctacgttcatgggcctccccttc

SEQ ID NO: 1572442 - DNA, 25 bp, Homo sapien
ggagcctacgttcatgggcctcccc

SEQ ID NO: 1572443 - DNA, 25 bp, Homo sapien
tgagtttgaccacacgcagggcagg

SEQ ID NO: 1572444 - DNA, 25 bp, Homo sapien
ttgagtttgaccacacgcagggcag

SEQ ID NO: 1572445 - DNA, 25 bp, Homo sapien
gggtcacttgagtttgaccacacgc

SEQ ID NO: 1572446 - DNA, 25 bp, Homo sapien
tcacttgagtttgaccacacgcagg

SEQ ID NO: 1572447 - DNA, 25 bp, Homo sapien
ggatcataagacatgggacagacac

SEQ ID NO: 1572448 - DNA, 25 bp, Homo sapien
ttctccccatcatcggcaggaagct

SEQ ID NO: 1572449 - DNA, 25 bp, Homo sapien
catgggacagacacgggttttcctc

SEQ ID NO: 1572450 - DNA, 25 bp, Homo sapien
tgcttctccccatcatcggcaggaa

SEQ ID NO: 1572451 - DNA, 25 bp, Homo sapien
tttggagcttggttctgtgggtgaa

SEQ ID NO: 1572452 - DNA, 25 bp, Homo sapien
tgggtgaaggccaactacttgaagg

SEQ ID NO: 1572453 - DNA, 25 bp, Homo sapien
ctgtgggtgaaggccaactacttga

SEQ ID NO: 1572454 - DNA, 25 bp, Homo sapien
ttggttctgtgggtgaaggccaact

SEQ ID NO: 1572455 - DNA, 25 bp, Homo sapien
cccaatcagaacatgcaggtgtctg

SEQ ID NO: 1572456 - DNA, 25 bp, Homo sapien
cgcaggctcttggtccattacagca

SEQ ID NO: 1572457 - DNA, 25 bp, Homo sapien
cccgcaggctcttggtccattacag

SEQ ID NO: 1572458 - DNA, 25 bp, Homo sapien
ctgcctattcactgttctgtccccc

SEQ ID NO: 1572459 - DNA, 25 bp, Homo sapien
tattcactgttctgtcccccgcagg

SEQ ID NO: 1572460 - DNA, 25 bp, Homo sapien
gtcacctcctgagggtcttgttcat

SEQ ID NO: 1572461 - DNA, 25 bp, Homo sapien
acctcctgagggtcttgttcatcag

SEQ ID NO: 1572462 - DNA, 25 bp, Homo sapien
tcacctcctgagggtcttgttcatc

SEQ ID NO: 1572463 - DNA, 25 bp, Homo sapien
cacctcctgagggtcttgttcatca

SEQ ID NO: 1572464 - DNA, 25 bp, Homo sapien
catgttcagattcgtggtgtgagga

SEQ ID NO: 1572465 - DNA, 25 bp, Homo sapien
gagggagcctcttgtatgtttggaa

SEQ ID NO: 1572466 - DNA, 25 bp, Homo sapien
tgagttcctcagtgtgattgcagcc

SEQ ID NO: 1572467 - DNA, 25 bp, Homo sapien
taagtgccgtgttaagagggagcct

SEQ ID NO: 1572468 - DNA, 25 bp, Homo sapien
cgcaggaagtatgaggacagagccc

SEQ ID NO: 1572469 - DNA, 25 bp, Homo sapien
tacgacaataagctccgcaggaagt

SEQ ID NO: 1572470 - DNA, 25 bp, Homo sapien
agagcccctcgtcagggaatttcca

SEQ ID NO: 1572471 - DNA, 25 bp, Homo sapien
caaagtggaacagttcgttgccgaa

SEQ ID NO: 1572472 - DNA, 25 bp, Homo sapien
cacaggagggtggtctgtttggggt

SEQ ID NO: 1572473 - DNA, 25 bp, Homo sapien
caagacacaggagggtggtctgttt

SEQ ID NO: 1572474 - DNA, 25 bp, Homo sapien
agacacaggagggtggtctgtttgg

SEQ ID NO: 1572475 - DNA, 25 bp, Homo sapien
gacacaggagggtggtctgtttggg

SEQ ID NO: 1572476 - DNA, 25 bp, Homo sapien
ctgtgcctgaatcctctggcccaga

SEQ ID NO: 1572477 - DNA, 25 bp, Homo sapien
gtgcctgaatcctctggcccagaca

SEQ ID NO: 1572478 - DNA, 25 bp, Homo sapien
tcctgtgcctgaatcctctggccca

SEQ ID NO: 1572479 - DNA, 25 bp, Homo sapien
cttcctgtgcctgaatcctctggcc

SEQ ID NO: 1572480 - DNA, 25 bp, Homo sapien
caaaaatgctcgctaatatacctcc

SEQ ID NO: 1572481 - DNA, 25 bp, Homo sapien
tcatttaccggattgcagcccaaac

SEQ ID NO: 1572482 - DNA, 25 bp, Homo sapien
gccgttgtgctgaagcatcatttac

SEQ ID NO: 1572483 - DNA, 25 bp, Homo sapien
ttcaacaccaaaaatgctcgctaat

SEQ ID NO: 1572484 - DNA, 25 bp, Homo sapien
aagaaagcccagactgaggtggctc

SEQ ID NO: 1572485 - DNA, 25 bp, Homo sapien
aaagaaagcccagactgaggtggct

SEQ ID NO: 1572486 - DNA, 25 bp, Homo sapien
tatattggcactgatagcgccctgc

SEQ ID NO: 1572487 - DNA, 25 bp, Homo sapien
taagcttcacgaatggcctggcact

SEQ ID NO: 1572488 - DNA, 25 bp, Homo sapien
gatatgaaaggcatgggaaagtccc

SEQ ID NO: 1572489 - DNA, 25 bp, Homo sapien
cacaggactcgatttggcagatatg

SEQ ID NO: 1572490 - DNA, 25 bp, Homo sapien
gagaggaagggtttgccatacaagc

SEQ ID NO: 1572491 - DNA, 25 bp, Homo sapien
agagaggaagggtttgccatacaag

SEQ ID NO: 1572492 - DNA, 25 bp, Homo sapien
cagagaggaagggtttgccatacaa

SEQ ID NO: 1572493 - DNA, 25 bp, Homo sapien
gcagagaggaagggtttgccataca

SEQ ID NO: 1572494 - DNA, 25 bp, Homo sapien
ctccttggccagtgaaaatctatca

SEQ ID NO: 1572495 - DNA, 25 bp, Homo sapien
cctgagacattgaggtccacaggac

SEQ ID NO: 1572496 - DNA, 25 bp, Homo sapien
tcaaatgggatgtgtgctgagctgc

SEQ ID NO: 1572497 - DNA, 25 bp, Homo sapien
tgagctgcacgtgagggaaatattc

SEQ ID NO: 1572498 - DNA, 25 bp, Homo sapien
aaggaccacaggtaggggctcctgt

SEQ ID NO: 1572499 - DNA, 25 bp, Homo sapien
tgaccacaagctccaaggcattact

SEQ ID NO: 1572500 - DNA, 25 bp, Homo sapien
caggtaggggctcctgttgtaccaa

SEQ ID NO: 1572501 - DNA, 25 bp, Homo sapien
ccacaagctccaaggcattactggg

SEQ ID NO: 1572502 - DNA, 25 bp, Homo sapien
ggacagccaacccagacacagggct

SEQ ID NO: 1572503 - DNA, 25 bp, Homo sapien
cagggctggactgggcggtacctac

SEQ ID NO: 1572504 - DNA, 25 bp, Homo sapien
tcatattcctgcccggtggcaaggc

SEQ ID NO: 1572505 - DNA, 25 bp, Homo sapien
tgcccggtggcaaggccctggacag

SEQ ID NO: 1572506 - DNA, 25 bp, Homo sapien
tcttcacttcactctcagtgcacgt

SEQ ID NO: 1572507 - DNA, 25 bp, Homo sapien
gagcaagactctatcccggaaaata

SEQ ID NO: 1572508 - DNA, 25 bp, Homo sapien
gaagtgaaagcggaaagtgtggtgg

SEQ ID NO: 1572509 - DNA, 25 bp, Homo sapien
atgaaccctgtctggagaactctag

SEQ ID NO: 1572510 - DNA, 25 bp, Homo sapien
gtggaatcctaataagaatgtgtgc

SEQ ID NO: 1572511 - DNA, 25 bp, Homo sapien
ccagaacaaggtggaatcctaataa

SEQ ID NO: 1572512 - DNA, 25 bp, Homo sapien
tcacatctctacaacaccagaacaa

SEQ ID NO: 1572513 - DNA, 25 bp, Homo sapien
gtgaattcactaaatacctaatcac

SEQ ID NO: 1572514 - DNA, 25 bp, Homo sapien
tcctgccacggccatgcggatcaag

SEQ ID NO: 1572515 - DNA, 25 bp, Homo sapien
tctgcgtcgtgtaatcttggtggat

SEQ ID NO: 1572516 - DNA, 25 bp, Homo sapien
tcaaccagtatggccaagagagcca

SEQ ID NO: 1572517 - DNA, 25 bp, Homo sapien
gcggatcaagttctgcgtcgtgtaa

SEQ ID NO: 1572518 - DNA, 25 bp, Homo sapien
tcgtgcaaaggtcaatcctggctga

SEQ ID NO: 1572519 - DNA, 25 bp, Homo sapien
tcagtgccgtatggctgtgccaatt

SEQ ID NO: 1572520 - DNA, 25 bp, Homo sapien
ccacatctgccgaggcttccttgtt

SEQ ID NO: 1572521 - DNA, 25 bp, Homo sapien
tgttggctccagctcggttcagcca

SEQ ID NO: 1572522 - DNA, 25 bp, Homo sapien
gatcagtcctgcataagaaaacacc

SEQ ID NO: 1572523 - DNA, 25 bp, Homo sapien
ttcaagtagctttgtcggactccac

SEQ ID NO: 1572524 - DNA, 25 bp, Homo sapien
cagaaaggtgggtgcaaatcgatca

SEQ ID NO: 1572525 - DNA, 25 bp, Homo sapien
ttgaacatgcatctggccaggcgtg

SEQ ID NO: 1572526 - DNA, 25 bp, Homo sapien
cagataagatggaaaaccataactt

SEQ ID NO: 1572527 - DNA, 25 bp, Homo sapien
gacagataagatggaaaaccataac

SEQ ID NO: 1572528 - DNA, 25 bp, Homo sapien
gataagatggaaaaccataacttat

SEQ ID NO: 1572529 - DNA, 25 bp, Homo sapien
acagataagatggaaaaccataact

SEQ ID NO: 1572530 - DNA, 25 bp, Homo sapien
taaatagggtaatcctcctgtagga

SEQ ID NO: 1572531 - DNA, 25 bp, Homo sapien
tctcagtaaaggataaaagtgggcc

SEQ ID NO: 1572532 - DNA, 25 bp, Homo sapien
taaagtctgtcaagggtaaagctgt

SEQ ID NO: 1572533 - DNA, 25 bp, Homo sapien
tttcactggaagtaggacccttaca

SEQ ID NO: 1572534 - DNA, 25 bp, Homo sapien
gctcagattctgccggcctagtgct

SEQ ID NO: 1572535 - DNA, 25 bp, Homo sapien
agattctgccggcctagtgctgagc

SEQ ID NO: 1572536 - DNA, 25 bp, Homo sapien
tcagattctgccggcctagtgctga

SEQ ID NO: 1572537 - DNA, 25 bp, Homo sapien
cgctcagattctgccggcctagtgc

SEQ ID NO: 1572538 - DNA, 25 bp, Homo sapien
gagcagggcagggagtgtggaagac

SEQ ID NO: 1572539 - DNA, 25 bp, Homo sapien
cgcagagcagggcagggagtgtgga

SEQ ID NO: 1572540 - DNA, 25 bp, Homo sapien
gcagggcagggagtgtggaagacat

SEQ ID NO: 1572541 - DNA, 25 bp, Homo sapien
cagagcagggcagggagtgtggaag

SEQ ID NO: 1572542 - DNA, 25 bp, Homo sapien
gctgggcgctgatcctctgactcag

SEQ ID NO: 1572543 - DNA, 25 bp, Homo sapien
tgctgggcgctgatcctctgactca

SEQ ID NO: 1572544 - DNA, 25 bp, Homo sapien
tgggcgctgatcctctgactcagac

SEQ ID NO: 1572545 - DNA, 25 bp, Homo sapien
ctgggcgctgatcctctgactcaga

SEQ ID NO: 1572546 - DNA, 25 bp, Homo sapien
ggctcggcccagatgaacggttttg

SEQ ID NO: 1572547 - DNA, 25 bp, Homo sapien
tccccaacccgatagatgcagctgt

SEQ ID NO: 1572548 - DNA, 25 bp, Homo sapien
gtctgtccacggcaaaaaggcttcc

SEQ ID NO: 1572549 - DNA, 25 bp, Homo sapien
agctgtattgccctgccatgcggga

SEQ ID NO: 1572550 - DNA, 25 bp, Homo sapien
atcacttcgggtccaggatgaaccg

SEQ ID NO: 1572551 - DNA, 25 bp, Homo sapien
tgtctagacggcagtagaaggtcac

SEQ ID NO: 1572552 - DNA, 25 bp, Homo sapien
ggatcttccctccttgagcagtaag

SEQ ID NO: 1572553 - DNA, 25 bp, Homo sapien
cgtatccgcgctgtacgtggctgga

SEQ ID NO: 1572554 - DNA, 25 bp, Homo sapien
tggggtcttcaggtgcaaggctggt

SEQ ID NO: 1572555 - DNA, 25 bp, Homo sapien
ggggtcttcaggtgcaaggctggtg

SEQ ID NO: 1572556 - DNA, 25 bp, Homo sapien
cacgtttttagtgtcactgggaggc

SEQ ID NO: 1572557 - DNA, 25 bp, Homo sapien
tgggaggctctgatcgctcgtctga

SEQ ID NO: 1572558 - DNA, 25 bp, Homo sapien
acgcctggcctcgatgaatattttg

SEQ ID NO: 1572559 - DNA, 25 bp, Homo sapien
gctcgtctgagcttagaaggaccag

SEQ ID NO: 1572560 - DNA, 25 bp, Homo sapien
catccagcaggtaaagtggaagggt

SEQ ID NO: 1572561 - DNA, 25 bp, Homo sapien
caggtaaagtggaagggtccacaga

SEQ ID NO: 1572562 - DNA, 25 bp, Homo sapien
cagcaggtaaagtggaagggtccac

SEQ ID NO: 1572563 - DNA, 25 bp, Homo sapien
ctgcgggtcccaggagcttcatcca

SEQ ID NO: 1572564 - DNA, 25 bp, Homo sapien
tggagtcccgtctctgtggttaaaa

SEQ ID NO: 1572565 - DNA, 25 bp, Homo sapien
cgtctctgtggttaaaaggtaggtg

SEQ ID NO: 1572566 - DNA, 25 bp, Homo sapien
ctttctggagtcccgtctctgtggt

SEQ ID NO: 1572567 - DNA, 25 bp, Homo sapien
tctctgtggttaaaaggtaggtgcc

SEQ ID NO: 1572568 - DNA, 25 bp, Homo sapien
caagtggaagctctgctggctcgct

SEQ ID NO: 1572569 - DNA, 25 bp, Homo sapien
aggccaggcccatccgaaggagatt

SEQ ID NO: 1572570 - DNA, 25 bp, Homo sapien
cactagagccaccaggactagaaag

SEQ ID NO: 1572571 - DNA, 25 bp, Homo sapien
tgagccagtcttcaaccaggaacca

SEQ ID NO: 1572572 - DNA, 25 bp, Homo sapien
tagcatgtagttctcccaccctctg

SEQ ID NO: 1572573 - DNA, 25 bp, Homo sapien
catcgtccgggatgctctgacaaat

SEQ ID NO: 1572574 - DNA, 25 bp, Homo sapien
gacaaatggaatgccagtgtccctc

SEQ ID NO: 1572575 - DNA, 25 bp, Homo sapien
aaagaaatttagcatgtagttctcc

SEQ ID NO: 1572576 - DNA, 25 bp, Homo sapien
gcataggattacactcttggagagg

SEQ ID NO: 1572577 - DNA, 25 bp, Homo sapien
ctgaaaagactgagcctatgtggtt

SEQ ID NO: 1572578 - DNA, 25 bp, Homo sapien
tgcgaaatgagatcggcatcagctc

SEQ ID NO: 1572579 - DNA, 25 bp, Homo sapien
catcagctcgctgtactttgggtct

SEQ ID NO: 1572580 - DNA, 25 bp, Homo sapien
gggttctacatgcacatgaagttcc

SEQ ID NO: 1572581 - DNA, 25 bp, Homo sapien
acatgaagttcccgtgtagaatttg

SEQ ID NO: 1572582 - DNA, 25 bp, Homo sapien
ttagggttctacatgcacatgaagt

SEQ ID NO: 1572583 - DNA, 25 bp, Homo sapien
gcacatgaagttcccgtgtagaatt

SEQ ID NO: 1572584 - DNA, 25 bp, Homo sapien
acaggtgtctgtccccacgccctgc

SEQ ID NO: 1572585 - DNA, 25 bp, Homo sapien
aagtagctagcattaaaggcacaca

SEQ ID NO: 1572586 - DNA, 25 bp, Homo sapien
ggggctacaggtgtctgtccccacg

SEQ ID NO: 1572587 - DNA, 25 bp, Homo sapien
cacgccctgcctaatctttgtattt

SEQ ID NO: 1572588 - DNA, 25 bp, Homo sapien
taggaaccgtgcagatacaaatttg

SEQ ID NO: 1572589 - DNA, 25 bp, Homo sapien
caaaagtgcagtgtctagagccacg

SEQ ID NO: 1572590 - DNA, 25 bp, Homo sapien
gccatgctgactgctggcggagaca

SEQ ID NO: 1572591 - DNA, 25 bp, Homo sapien
aaaaattcgtctaatgaccctgctg

SEQ ID NO: 1572592 - DNA, 25 bp, Homo sapien
ccttcttaatatggacaccctacca

SEQ ID NO: 1572593 - DNA, 25 bp, Homo sapien
ttctaccttcttaatatggacaccc

SEQ ID NO: 1572594 - DNA, 25 bp, Homo sapien
caccctaccataatttggaggtact

SEQ ID NO: 1572595 - DNA, 25 bp, Homo sapien
tatggacaccctaccataatttgga

SEQ ID NO: 1572596 - DNA, 25 bp, Homo sapien
ctcgccggcggagatgagggctgca

SEQ ID NO: 1572597 - DNA, 25 bp, Homo sapien
tggccctactcgccggcggagatga

SEQ ID NO: 1572598 - DNA, 25 bp, Homo sapien
ataaggcttctctctcggccgcagc

SEQ ID NO: 1572599 - DNA, 25 bp, Homo sapien
cacctggccctactcgccggcggag

SEQ ID NO: 1572600 - DNA, 25 bp, Homo sapien
aagacctggaggctcgccatctcca

SEQ ID NO: 1572601 - DNA, 25 bp, Homo sapien
gaaggtcgtgatcagatacttgaac

SEQ ID NO: 1572602 - DNA, 25 bp, Homo sapien
tctctcagacagatccattcggtgc

SEQ ID NO: 1572603 - DNA, 25 bp, Homo sapien
ccacccagtagctgtcacaatgggt

SEQ ID NO: 1572604 - DNA, 25 bp, Homo sapien
aacattcaccatgtctgtgtgagcg

SEQ ID NO: 1572605 - DNA, 25 bp, Homo sapien
gtccggcgggtttcaggaacattca

SEQ ID NO: 1572606 - DNA, 25 bp, Homo sapien
gaatccttgccttgtgtcactttgt

SEQ ID NO: 1572607 - DNA, 25 bp, Homo sapien
caagaatccttgccttgtgtcactt

SEQ ID NO: 1572608 - DNA, 25 bp, Homo sapien
ttattaaaggatttcaaagctgctt

SEQ ID NO: 1572609 - DNA, 25 bp, Homo sapien
aatgatagaggcttccttttattaa

SEQ ID NO: 1572610 - DNA, 25 bp, Homo sapien
ctaatgatagaggcttccttttatt

SEQ ID NO: 1572611 - DNA, 25 bp, Homo sapien
tgatagaggcttccttttattaaag

SEQ ID NO: 1572612 - DNA, 25 bp, Homo sapien
tatttatagatttccaacaaacgcg

SEQ ID NO: 1572613 - DNA, 25 bp, Homo sapien
gatcgtgtttcagcttcccaggtct

SEQ ID NO: 1572614 - DNA, 25 bp, Homo sapien
tagatttccaacaaacgcgatcgtg

SEQ ID NO: 1572615 - DNA, 25 bp, Homo sapien
tccaacaaacgcgatcgtgtttcag

SEQ ID NO: 1572616 - DNA, 25 bp, Homo sapien
gcttctgttttgaagcgctccagca

SEQ ID NO: 1572617 - DNA, 25 bp, Homo sapien
cagcatttcgtccacgtctagaggt

SEQ ID NO: 1572618 - DNA, 25 bp, Homo sapien
aagcgctccagcatttcgtccacgt

SEQ ID NO: 1572619 - DNA, 25 bp, Homo sapien
tctagaggtggtcgttctttccgtg

SEQ ID NO: 1572620 - DNA, 25 bp, Homo sapien
gcaacgttcgttcttccctctattc

SEQ ID NO: 1572621 - DNA, 25 bp, Homo sapien
aacaggagatagcagcaagaacggg

SEQ ID NO: 1572622 - DNA, 25 bp, Homo sapien
tcctcagctgactccaacattggag

SEQ ID NO: 1572623 - DNA, 25 bp, Homo sapien
caaaaactctctgcgctgtgctcct

SEQ ID NO: 1572624 - DNA, 25 bp, Homo sapien
tgtctgagcaatgtaccataaatac

SEQ ID NO: 1572625 - DNA, 25 bp, Homo sapien
aagactcaattttctctgtaagttg

SEQ ID NO: 1572626 - DNA, 25 bp, Homo sapien
tacccaaaagactcaattttctctg

SEQ ID NO: 1572627 - DNA, 25 bp, Homo sapien
gtttatattaaagttgtctgagcaa

SEQ ID NO: 1572628 - DNA, 25 bp, Homo sapien
acttctttacccaggcagatgacat

SEQ ID NO: 1572629 - DNA, 25 bp, Homo sapien
cttctttacccaggcagatgacatt

SEQ ID NO: 1572630 - DNA, 25 bp, Homo sapien
ttctttacccaggcagatgacattt

SEQ ID NO: 1572631 - DNA, 25 bp, Homo sapien
tcagccataacctggacctctttgc

SEQ ID NO: 1572632 - DNA, 25 bp, Homo sapien
gcaccaccgtgtatgagaagggccc

SEQ ID NO: 1572633 - DNA, 25 bp, Homo sapien
tatatacctgcacctattgtctttg

SEQ ID NO: 1572634 - DNA, 25 bp, Homo sapien
gacctctttgctatctccaggccag

SEQ ID NO: 1572635 - DNA, 25 bp, Homo sapien
tgaagatggcacaacgtctactgca

SEQ ID NO: 1572636 - DNA, 25 bp, Homo sapien
tccagatcctctcggtgaagcacgg

SEQ ID NO: 1572637 - DNA, 25 bp, Homo sapien
tacaacttatgtcgcatcgcagcaa

SEQ ID NO: 1572638 - DNA, 25 bp, Homo sapien
caggtttcgacagtgcttgacgcag

SEQ ID NO: 1572639 - DNA, 25 bp, Homo sapien
ctctcaacctcggcgtctgattcag

SEQ ID NO: 1572640 - DNA, 25 bp, Homo sapien
tctccgggagattctcctttattac

SEQ ID NO: 1572641 - DNA, 25 bp, Homo sapien
gacattctccgggagattctccttt

SEQ ID NO: 1572642 - DNA, 25 bp, Homo sapien
cggcgtctgattcagacgcagtgac

SEQ ID NO: 1572643 - DNA, 25 bp, Homo sapien
tctgggcatatacccctgacaaatg

SEQ ID NO: 1572644 - DNA, 25 bp, Homo sapien
aaatgtgtgtccatcacggctgaag

SEQ ID NO: 1572645 - DNA, 25 bp, Homo sapien
ctcaacacccaagaagcatcacagg

SEQ ID NO: 1572646 - DNA, 25 bp, Homo sapien
aatgagtacaattgaaagctggacc

SEQ ID NO: 1572647 - DNA, 25 bp, Homo sapien
acaggatccttactagggaggcact

SEQ ID NO: 1572648 - DNA, 25 bp, Homo sapien
gctatcattgattgctagacccatc

SEQ ID NO: 1572649 - DNA, 25 bp, Homo sapien
aggcactgagaaagctatcattgat

SEQ ID NO: 1572650 - DNA, 25 bp, Homo sapien
caggatccttactagggaggcactg

SEQ ID NO: 1572651 - DNA, 25 bp, Homo sapien
acacaatgcgggaaacatatcatcc

SEQ ID NO: 1572652 - DNA, 25 bp, Homo sapien
gacctcacacaatgcgggaaacata

SEQ ID NO: 1572653 - DNA, 25 bp, Homo sapien
tcaagacctcacacaatgcgggaaa

SEQ ID NO: 1572654 - DNA, 25 bp, Homo sapien
cacacaatgcgggaaacatatcatc

SEQ ID NO: 1572655 - DNA, 25 bp, Homo sapien
aagcttgtggtagcttatgtttgta

SEQ ID NO: 1572656 - DNA, 25 bp, Homo sapien
ggattttaatgattaagagatatac

SEQ ID NO: 1572657 - DNA, 25 bp, Homo sapien
ggtagcttatgtttgtatgatgaag

SEQ ID NO: 1572658 - DNA, 25 bp, Homo sapien
gatgaaggattttaatgattaagag

SEQ ID NO: 1572659 - DNA, 25 bp, Homo sapien
tctcactggttgtgttataccccga

SEQ ID NO: 1572660 - DNA, 25 bp, Homo sapien
tataccccgacttgaattatctgga

SEQ ID NO: 1572661 - DNA, 25 bp, Homo sapien
tatctggagcagcagttgtcaaagg

SEQ ID NO: 1572662 - DNA, 25 bp, Homo sapien
tcttgagaatctaaccgtggaatcg

SEQ ID NO: 1572663 - DNA, 25 bp, Homo sapien
tgctgagtggtagcggaacaagaca

SEQ ID NO: 1572664 - DNA, 25 bp, Homo sapien
cagcccactgctgagtggtagcgga

SEQ ID NO: 1572665 - DNA, 25 bp, Homo sapien
cactgctgagtggtagcggaacaag

SEQ ID NO: 1572666 - DNA, 25 bp, Homo sapien
agtggtagcggaacaagacaccaac

SEQ ID NO: 1572667 - DNA, 25 bp, Homo sapien
tctgcagaaagcacttggggtgtct

SEQ ID NO: 1572668 - DNA, 25 bp, Homo sapien
ctcattgtcggagaggtttacgcac

SEQ ID NO: 1572669 - DNA, 25 bp, Homo sapien
cagaagctcattgtcggagaggttt

SEQ ID NO: 1572670 - DNA, 25 bp, Homo sapien
aacttagcaccctcatccagaagct

SEQ ID NO: 1572671 - DNA, 25 bp, Homo sapien
gaggttccatacagccaagtcaggc

SEQ ID NO: 1572672 - DNA, 25 bp, Homo sapien
tggccccagatcgaaagcacagctg

SEQ ID NO: 1572673 - DNA, 25 bp, Homo sapien
catgaccattgctcgtctgtggccc

SEQ ID NO: 1572674 - DNA, 25 bp, Homo sapien
gaacaggtgttcacatcagcgagag

SEQ ID NO: 1572675 - DNA, 25 bp, Homo sapien
aatcacaaatggcaacacggttgac

SEQ ID NO: 1572676 - DNA, 25 bp, Homo sapien
tccacaagtgccagcatccaaaagc

SEQ ID NO: 1572677 - DNA, 25 bp, Homo sapien
ccaacttcaaccttcccggctagct

SEQ ID NO: 1572678 - DNA, 25 bp, Homo sapien
acacggttgacaggtccaacttcaa

SEQ ID NO: 1572679 - DNA, 25 bp, Homo sapien
actcggggtacctcaagccctcaca

SEQ ID NO: 1572680 - DNA, 25 bp, Homo sapien
caattggcttctgtaaggtgacagt

SEQ ID NO: 1572681 - DNA, 25 bp, Homo sapien
tgcaattggcttctgtaaggtgaca

SEQ ID NO: 1572682 - DNA, 25 bp, Homo sapien
cttgcaattggcttctgtaaggtga

SEQ ID NO: 1572683 - DNA, 25 bp, Homo sapien
ggaattaagtgttctcataaccacc

SEQ ID NO: 1572684 - DNA, 25 bp, Homo sapien
gcatcatgcttggaacttttagagg

SEQ ID NO: 1572685 - DNA, 25 bp, Homo sapien
ccaggtcttaccagttgtcattagc

SEQ ID NO: 1572686 - DNA, 25 bp, Homo sapien
gggcgtgtgcatatacacccacgca

SEQ ID NO: 1572687 - DNA, 25 bp, Homo sapien
ccagactggacttcagtggtgccat

SEQ ID NO: 1572688 - DNA, 25 bp, Homo sapien
agtggtgccatctcagctcactgca

SEQ ID NO: 1572689 - DNA, 25 bp, Homo sapien
gtggtgccatctcagctcactgcaa

SEQ ID NO: 1572690 - DNA, 25 bp, Homo sapien
gactggacttcagtggtgccatctc

SEQ ID NO: 1572691 - DNA, 25 bp, Homo sapien
tggcacctgcgagcaaaagggacct

SEQ ID NO: 1572692 - DNA, 25 bp, Homo sapien
aaaaggattctcagctggcacggtg

SEQ ID NO: 1572693 - DNA, 25 bp, Homo sapien
aatcacagggatcctcataagaggg

SEQ ID NO: 1572694 - DNA, 25 bp, Homo sapien
tgaagcataccactagctgagggac

SEQ ID NO: 1572695 - DNA, 25 bp, Homo sapien
tagacacacttagagacagtggtga

SEQ ID NO: 1572696 - DNA, 25 bp, Homo sapien
cacctttgactcttgagccgtgggt

SEQ ID NO: 1572697 - DNA, 25 bp, Homo sapien
gaagaaagcaaacccgaacctgtga

SEQ ID NO: 1572698 - DNA, 25 bp, Homo sapien
ctcactgctgtgatgcacctttgac

SEQ ID NO: 1572699 - DNA, 25 bp, Homo sapien
aagctttgtgagatcgcagcagcca

SEQ ID NO: 1572700 - DNA, 25 bp, Homo sapien
ccccagatccaaacacaacaggctt

SEQ ID NO: 1572701 - DNA, 25 bp, Homo sapien
tcgcagcagccatcgctagttatgt

SEQ ID NO: 1572702 - DNA, 25 bp, Homo sapien
cttggagaagctttgtgagatcgca

SEQ ID NO: 1572703 - DNA, 25 bp, Homo sapien
cggagggatggaacatccccacaac

SEQ ID NO: 1572704 - DNA, 25 bp, Homo sapien
gcagaggtcttcacaactgaacgga

SEQ ID NO: 1572705 - DNA, 25 bp, Homo sapien
tcttcacaactgaacggagggatgg

SEQ ID NO: 1572706 - DNA, 25 bp, Homo sapien
caactgaacggagggatggaacatc

SEQ ID NO: 1572707 - DNA, 25 bp, Homo sapien
ctgacccaggtccagagtgacgagg

SEQ ID NO: 1572708 - DNA, 25 bp, Homo sapien
gggattctgacccaggtccagagtg

SEQ ID NO: 1572709 - DNA, 25 bp, Homo sapien
cactggaacatgtcaaggtttcaaa

SEQ ID NO: 1572710 - DNA, 25 bp, Homo sapien
agggtgccactggaacatgtcaagg

SEQ ID NO: 1572711 - DNA, 25 bp, Homo sapien
tgagttcatcattaaagtcatcgat

SEQ ID NO: 1572712 - DNA, 25 bp, Homo sapien
atgtttctcagtatcaataatcagt

SEQ ID NO: 1572713 - DNA, 25 bp, Homo sapien
attgagttcatcattaaagtcatcg

SEQ ID NO: 1572714 - DNA, 25 bp, Homo sapien
gtttctcagtatcaataatcagttg

SEQ ID NO: 1572715 - DNA, 25 bp, Homo sapien
cccgtgatacagatatttcatatgt

SEQ ID NO: 1572716 - DNA, 25 bp, Homo sapien
acccgtgatacagatatttcatatg

SEQ ID NO: 1572717 - DNA, 25 bp, Homo sapien
agagagaaaagacgttcccctcagc

SEQ ID NO: 1572718 - DNA, 25 bp, Homo sapien
agaaaagacgttcccctcagccact

SEQ ID NO: 1572719 - DNA, 25 bp, Homo sapien
tcagccacttcccgtcttctgattt

SEQ ID NO: 1572720 - DNA, 25 bp, Homo sapien
ttcacttcgggctgagcaggagaga

SEQ ID NO: 1572721 - DNA, 25 bp, Homo sapien
agatgtgggtgcctgggctgtgccc

SEQ ID NO: 1572722 - DNA, 25 bp, Homo sapien
tgggctgtgcccagtcactgaaatg

SEQ ID NO: 1572723 - DNA, 25 bp, Homo sapien
gctgtgcccagtcactgaaatggca

SEQ ID NO: 1572724 - DNA, 25 bp, Homo sapien
tgcagagagatgtgggtgcctgggc

SEQ ID NO: 1572725 - DNA, 25 bp, Homo sapien
ggtcaatcactttccatagtagtca

SEQ ID NO: 1572726 - DNA, 25 bp, Homo sapien
cttggtcaatcactttccatagtag

SEQ ID NO: 1572727 - DNA, 25 bp, Homo sapien
caatcactttccatagtagtcattc

SEQ ID NO: 1572728 - DNA, 25 bp, Homo sapien
cactttccatagtagtcattcaatc

SEQ ID NO: 1572729 - DNA, 25 bp, Homo sapien
tttccggtgaggaaactcagtcacg

SEQ ID NO: 1572730 - DNA, 25 bp, Homo sapien
tattaacatccacaacagtccagtg

SEQ ID NO: 1572731 - DNA, 25 bp, Homo sapien
tcgttatttgttcaggacccacagc

SEQ ID NO: 1572732 - DNA, 25 bp, Homo sapien
tgttaatagcccagaatgtgccagg

SEQ ID NO: 1572733 - DNA, 25 bp, Homo sapien
tcccaaggtggctgtgaaggaacca

SEQ ID NO: 1572734 - DNA, 25 bp, Homo sapien
tgttcggtagcggagtgtcaccctg

SEQ ID NO: 1572735 - DNA, 25 bp, Homo sapien
aaggacaaactaaagccggcagcgt

SEQ ID NO: 1572736 - DNA, 25 bp, Homo sapien
tcagaggcaacgtatttcccaaggt

SEQ ID NO: 1572737 - DNA, 25 bp, Homo sapien
ggagaagccagggaggaatggagac

SEQ ID NO: 1572738 - DNA, 25 bp, Homo sapien
gaagccagggaggaatggagacaat

SEQ ID NO: 1572739 - DNA, 25 bp, Homo sapien
ctgtggagaagccagggaggaatgg

SEQ ID NO: 1572740 - DNA, 25 bp, Homo sapien
tgtggagaagccagggaggaatgga

SEQ ID NO: 1572741 - DNA, 25 bp, Homo sapien
tcgtcagccctcttgtcttgccctc

SEQ ID NO: 1572742 - DNA, 25 bp, Homo sapien
gagccggctgccatggtgagcggcc

SEQ ID NO: 1572743 - DNA, 25 bp, Homo sapien
tgatggagccggctgccatggtgag

SEQ ID NO: 1572744 - DNA, 25 bp, Homo sapien
ctctgtgatggtagcgtccctcgtc

SEQ ID NO: 1572745 - DNA, 25 bp, Homo sapien
tggtaggcaacttccagtggacccc

SEQ ID NO: 1572746 - DNA, 25 bp, Homo sapien
ggtgcgaccacctccctttgagtgt

SEQ ID NO: 1572747 - DNA, 25 bp, Homo sapien
tgccacaccaaatggctagagggtg

SEQ ID NO: 1572748 - DNA, 25 bp, Homo sapien
gagatgtagcgactggcttctagca

SEQ ID NO: 1572749 - DNA, 25 bp, Homo sapien
tgaacaaaggcaactcatggcttta

SEQ ID NO: 1572750 - DNA, 25 bp, Homo sapien
gcatcagtttatcaccagggcaaca

SEQ ID NO: 1572751 - DNA, 25 bp, Homo sapien
catgcaaaagttcagacttggccgg

SEQ ID NO: 1572752 - DNA, 25 bp, Homo sapien
gggtgaatgcccatgagctgaacaa

SEQ ID NO: 1572753 - DNA, 25 bp, Homo sapien
gacacttggtggattcttgggtccc

SEQ ID NO: 1572754 - DNA, 25 bp, Homo sapien
gaataactgctgtctcccatgatgg

SEQ ID NO: 1572755 - DNA, 25 bp, Homo sapien
ctgggaatctaaactgggaatggcc

SEQ ID NO: 1572756 - DNA, 25 bp, Homo sapien
tctgcacggcatggagtgggaaccc

SEQ ID NO: 1572757 - DNA, 25 bp, Homo sapien
cagttcatgctttatgactagtgtt

SEQ ID NO: 1572758 - DNA, 25 bp, Homo sapien
ggcagttcatgctttatgactagtg

SEQ ID NO: 1572759 - DNA, 25 bp, Homo sapien
caggcagttcatgctttatgactag

SEQ ID NO: 1572760 - DNA, 25 bp, Homo sapien
gcagttcatgctttatgactagtgt

SEQ ID NO: 1572761 - DNA, 25 bp, Homo sapien
gagtctcaaccaggggcagttttga

SEQ ID NO: 1572762 - DNA, 25 bp, Homo sapien
gggcagttttgacccgcagttgtca

SEQ ID NO: 1572763 - DNA, 25 bp, Homo sapien
gccagtgagtctcaaccaggggcag

SEQ ID NO: 1572764 - DNA, 25 bp, Homo sapien
agttttgacccgcagttgtcaatgc

SEQ ID NO: 1572765 - DNA, 25 bp, Homo sapien
cagagctggtattcatgacgggtgt

SEQ ID NO: 1572766 - DNA, 25 bp, Homo sapien
ctggtattcatgacgggtgtgctgc

SEQ ID NO: 1572767 - DNA, 25 bp, Homo sapien
tggtgtctgtgtgttacgcgctgga

SEQ ID NO: 1572768 - DNA, 25 bp, Homo sapien
ttcatgacgggtgtgctgcaacccc

SEQ ID NO: 1572769 - DNA, 25 bp, Homo sapien
ggagaaaggtcagattccctggcaa

SEQ ID NO: 1572770 - DNA, 25 bp, Homo sapien
ggtcagattccctggcaatgggagc

SEQ ID NO: 1572771 - DNA, 25 bp, Homo sapien
cagattccctggcaatgggagctga

SEQ ID NO: 1572772 - DNA, 25 bp, Homo sapien
gaaaggtcagattccctggcaatgg

SEQ ID NO: 1572773 - DNA, 25 bp, Homo sapien
caggaacggaacagaattctcccct

SEQ ID NO: 1572774 - DNA, 25 bp, Homo sapien
tcccctggggcttgaagagctcacc

SEQ ID NO: 1572775 - DNA, 25 bp, Homo sapien
gatgtcccaggaacggaacagaatt

SEQ ID NO: 1572776 - DNA, 25 bp, Homo sapien
ctgggatgtcccaggaacggaacag

SEQ ID NO: 1572777 - DNA, 25 bp, Homo sapien
tctgtcattggcacctgttcttggg

SEQ ID NO: 1572778 - DNA, 25 bp, Homo sapien
tcccagtctgggatagctgtcttgg

SEQ ID NO: 1572779 - DNA, 25 bp, Homo sapien
ggaaatccatcaccgaagcacctct

SEQ ID NO: 1572780 - DNA, 25 bp, Homo sapien
ctcggcctggctattctgtcattgg

SEQ ID NO: 1572781 - DNA, 25 bp, Homo sapien
tctttggcttctgcaattctgtgtt

SEQ ID NO: 1572782 - DNA, 25 bp, Homo sapien
ttcatgccacaagtattttctgtgc

SEQ ID NO: 1572783 - DNA, 25 bp, Homo sapien
cacaagtattttctgtgcttgactg

SEQ ID NO: 1572784 - DNA, 25 bp, Homo sapien
tgtgttctcatcacattcatgccac

SEQ ID NO: 1572785 - DNA, 25 bp, Homo sapien
tggtcctggtgcgtgtagcagcggg

SEQ ID NO: 1572786 - DNA, 25 bp, Homo sapien
tcctggtgcgtgtagcagcgggtgg

SEQ ID NO: 1572787 - DNA, 25 bp, Homo sapien
ggtggtcctggtgcgtgtagcagcg

SEQ ID NO: 1572788 - DNA, 25 bp, Homo sapien
caggtggtcctggtgcgtgtagcag

SEQ ID NO: 1572789 - DNA, 25 bp, Homo sapien
ccaggaatcaccttgaaggatgagt

SEQ ID NO: 1572790 - DNA, 25 bp, Homo sapien
gagggcaggccaggaatcaccttga

SEQ ID NO: 1572791 - DNA, 25 bp, Homo sapien
atcaccttgaaggatgagtttgaca

SEQ ID NO: 1572792 - DNA, 25 bp, Homo sapien
gacagccagtgtcaatcctagaaga

SEQ ID NO: 1572793 - DNA, 25 bp, Homo sapien
ttagcaatggcgaggacgatggcct

SEQ ID NO: 1572794 - DNA, 25 bp, Homo sapien
aacgcaaggctggtgttagcaatgg

SEQ ID NO: 1572795 - DNA, 25 bp, Homo sapien
ggaaacgcaaggctggtgttagcaa

SEQ ID NO: 1572796 - DNA, 25 bp, Homo sapien
tggcgaggacgatggcctttcttcc

SEQ ID NO: 1572797 - DNA, 25 bp, Homo sapien
tcccagggccgtcctgcctccgcct

SEQ ID NO: 1572798 - DNA, 25 bp, Homo sapien
gctctgccctgctctccgctgtcct

SEQ ID NO: 1572799 - DNA, 25 bp, Homo sapien
ctgctctccgctgtcctttcccttc

SEQ ID NO: 1572800 - DNA, 25 bp, Homo sapien
ttcccttccaggctgccggcccctc

SEQ ID NO: 1572801 - DNA, 25 bp, Homo sapien
tcagacccattggtcaagccccggc

SEQ ID NO: 1572802 - DNA, 25 bp, Homo sapien
ccttctctcctgacccggatctcct

SEQ ID NO: 1572803 - DNA, 25 bp, Homo sapien
cccccttctctcctgacccggatct

SEQ ID NO: 1572804 - DNA, 25 bp, Homo sapien
gtccctcagacccattggtcaagcc

SEQ ID NO: 1572805 - DNA, 25 bp, Homo sapien
gccagtaggagcctctaattcctac

SEQ ID NO: 1572806 - DNA, 25 bp, Homo sapien
ggagcctctaattcctaccccagcc

SEQ ID NO: 1572807 - DNA, 25 bp, Homo sapien
taggagcctctaattcctaccccag

SEQ ID NO: 1572808 - DNA, 25 bp, Homo sapien
cagtaggagcctctaattcctaccc

SEQ ID NO: 1572809 - DNA, 25 bp, Homo sapien
gtggtagctcctgcccacctggagg

SEQ ID NO: 1572810 - DNA, 25 bp, Homo sapien
tagctcctgcccacctggaggtgcc

SEQ ID NO: 1572811 - DNA, 25 bp, Homo sapien
gtagctcctgcccacctggaggtgc

SEQ ID NO: 1572812 - DNA, 25 bp, Homo sapien
ggtgctgagtggtagctcctgccca

SEQ ID NO: 1572813 - DNA, 25 bp, Homo sapien
cttggcgcttggctttggggcagct

SEQ ID NO: 1572814 - DNA, 25 bp, Homo sapien
tagacttggcgcttggctttggggc

SEQ ID NO: 1572815 - DNA, 25 bp, Homo sapien
catagatagacttggcgcttggctt

SEQ ID NO: 1572816 - DNA, 25 bp, Homo sapien
gacttggcgcttggctttggggcag

SEQ ID NO: 1572817 - DNA, 25 bp, Homo sapien
tgactgggtactgggatacatcagc

SEQ ID NO: 1572818 - DNA, 25 bp, Homo sapien
taacaactgtggagtaacgcttcct

SEQ ID NO: 1572819 - DNA, 25 bp, Homo sapien
tgggatacatcagccataacaactg

SEQ ID NO: 1572820 - DNA, 25 bp, Homo sapien
tacatcagccataacaactgtggag

SEQ ID NO: 1572821 - DNA, 25 bp, Homo sapien
tccgtggtcccactgtccagcacaa

SEQ ID NO: 1572822 - DNA, 25 bp, Homo sapien
gatttgcctccgtggtcccactgtc

SEQ ID NO: 1572823 - DNA, 25 bp, Homo sapien
gtggtcccactgtccagcacaacag

SEQ ID NO: 1572824 - DNA, 25 bp, Homo sapien
cttgatttgcctccgtggtcccact

SEQ ID NO: 1572825 - DNA, 25 bp, Homo sapien
ggcgcctctgtggattcctctggac

SEQ ID NO: 1572826 - DNA, 25 bp, Homo sapien
caggcgcctctgtggattcctctgg

SEQ ID NO: 1572827 - DNA, 25 bp, Homo sapien
aggcgcctctgtggattcctctgga

SEQ ID NO: 1572828 - DNA, 25 bp, Homo sapien
accatggagaaagcagtgaggccca

SEQ ID NO: 1572829 - DNA, 25 bp, Homo sapien
agaaagcagtgaggcccaagatgat

SEQ ID NO: 1572830 - DNA, 25 bp, Homo sapien
tcagaatcccccagaataatcagac

SEQ ID NO: 1572831 - DNA, 25 bp, Homo sapien
tggagaaagcagtgaggcccaagat

SEQ ID NO: 1572832 - DNA, 25 bp, Homo sapien
tcacccaggcagaacgtcaccaggt

SEQ ID NO: 1572833 - DNA, 25 bp, Homo sapien
actcggccctggctatccatgacgg

SEQ ID NO: 1572834 - DNA, 25 bp, Homo sapien
cagcgtgacatggtcgggagacact

SEQ ID NO: 1572835 - DNA, 25 bp, Homo sapien
ggaggcatcctccacggtatgcacg

SEQ ID NO: 1572836 - DNA, 25 bp, Homo sapien
ccctggaagaagtgcacgtcgggct

SEQ ID NO: 1572837 - DNA, 25 bp, Homo sapien
cgcgctcgggttcctggcacacgag

SEQ ID NO: 1572838 - DNA, 25 bp, Homo sapien
gatggcgcccagtgggtacgactcc

SEQ ID NO: 1572839 - DNA, 25 bp, Homo sapien
atcaccgcgtcacagcgcacgatgg

SEQ ID NO: 1572840 - DNA, 25 bp, Homo sapien
tcatgttctatcttgaccctgggtc

SEQ ID NO: 1572841 - DNA, 25 bp, Homo sapien
cttgaccctgggtccaatctcaaac

SEQ ID NO: 1572842 - DNA, 25 bp, Homo sapien
ttgaccctgggtccaatctcaaacc

SEQ ID NO: 1572843 - DNA, 25 bp, Homo sapien
catcccaccttcatgttctatcttg

SEQ ID NO: 1572844 - DNA, 25 bp, Homo sapien
agatccttcttggccatgttctgtt

SEQ ID NO: 1572845 - DNA, 25 bp, Homo sapien
tggctgctcccccagatccttcttg

SEQ ID NO: 1572846 - DNA, 25 bp, Homo sapien
tccttcttggccatgttctgttcat

SEQ ID NO: 1572847 - DNA, 25 bp, Homo sapien
ggctgctcccccagatccttcttgg

SEQ ID NO: 1572848 - DNA, 25 bp, Homo sapien
cggcccgagcggtaattgtgcagag

SEQ ID NO: 1572849 - DNA, 25 bp, Homo sapien
gcccgagcggtaattgtgcagagcc

SEQ ID NO: 1572850 - DNA, 25 bp, Homo sapien
gccccctggatgtcctctcggatca

SEQ ID NO: 1572851 - DNA, 25 bp, Homo sapien
ccgcggcccgagcggtaattgtgca

SEQ ID NO: 1572852 - DNA, 25 bp, Homo sapien
caacgaggtagggagaaatccgata

SEQ ID NO: 1572853 - DNA, 25 bp, Homo sapien
ctctctagagtgaaactgagggcct

SEQ ID NO: 1572854 - DNA, 25 bp, Homo sapien
tccgatatacggagggatagcacct

SEQ ID NO: 1572855 - DNA, 25 bp, Homo sapien
cagctcgtctgggaggtacagacaa

SEQ ID NO: 1572856 - DNA, 25 bp, Homo sapien
cgagtcagcgttgctcgaggtcccc

SEQ ID NO: 1572857 - DNA, 25 bp, Homo sapien
gcctgcagaaccgccaggtcaggac

SEQ ID NO: 1572858 - DNA, 25 bp, Homo sapien
cggtgctgatcactgcgcggactga

SEQ ID NO: 1572859 - DNA, 25 bp, Homo sapien
ctgcctcgggaatgggcttcgcctg

SEQ ID NO: 1572860 - DNA, 25 bp, Homo sapien
gctcagggctcccgagttccaaaac

SEQ ID NO: 1572861 - DNA, 25 bp, Homo sapien
acgctcagggctcccgagttccaaa

SEQ ID NO: 1572862 - DNA, 25 bp, Homo sapien
ggacgctcagggctcccgagttcca

SEQ ID NO: 1572863 - DNA, 25 bp, Homo sapien
cagggctcccgagttccaaaaccat

SEQ ID NO: 1572864 - DNA, 25 bp, Homo sapien
tgcagcctcgatacaaagctctcta

SEQ ID NO: 1572865 - DNA, 25 bp, Homo sapien
cgtcgtcgaacacgtggttcaggat

SEQ ID NO: 1572866 - DNA, 25 bp, Homo sapien
tccgccgacttctgcagcctcgata

SEQ ID NO: 1572867 - DNA, 25 bp, Homo sapien
aaagctctctacgtcgtcgaacacg

SEQ ID NO: 1572868 - DNA, 25 bp, Homo sapien
gaagagatcgggagggggttcagat

SEQ ID NO: 1572869 - DNA, 25 bp, Homo sapien
gatcgggagggggttcagatcccac

SEQ ID NO: 1572870 - DNA, 25 bp, Homo sapien
gggagggggttcagatcccacgcca

SEQ ID NO: 1572871 - DNA, 25 bp, Homo sapien
gggttcagatcccacgccagggtgc

SEQ ID NO: 1572872 - DNA, 25 bp, Homo sapien
agagagaggtggacacccggttaag

SEQ ID NO: 1572873 - DNA, 25 bp, Homo sapien
ttaagatggcggtgaggtcagccct

SEQ ID NO: 1572874 - DNA, 25 bp, Homo sapien
tcagccctggcaagtggcgggaggg

SEQ ID NO: 1572875 - DNA, 25 bp, Homo sapien
ggtcagccctggcaagtggcgggag

SEQ ID NO: 1572876 - DNA, 25 bp, Homo sapien
ggtgtactcggcctccgagggcggc

SEQ ID NO: 1572877 - DNA, 25 bp, Homo sapien
tctgcagcacgtcggtgtactcggc

SEQ ID NO: 1572878 - DNA, 25 bp, Homo sapien
gcttggcccgcagcgtcagcaagcc

SEQ ID NO: 1572879 - DNA, 25 bp, Homo sapien
ctccgagggcggcttggcccgcagc

SEQ ID NO: 1572880 - DNA, 25 bp, Homo sapien
agggaggtggttggcgtgggtgcgg

SEQ ID NO: 1572881 - DNA, 25 bp, Homo sapien
gagggaggtggttggcgtgggtgcg

SEQ ID NO: 1572882 - DNA, 25 bp, Homo sapien
gggacaggttcgtcgtgcccgcgcc

SEQ ID NO: 1572883 - DNA, 25 bp, Homo sapien
gacgggacaggttcgtcgtgcccgc

SEQ ID NO: 1572884 - DNA, 25 bp, Homo sapien
ctccggagaggaggggtcggcgatg

SEQ ID NO: 1572885 - DNA, 25 bp, Homo sapien
aaggaagtgcaacagctccggagag

SEQ ID NO: 1572886 - DNA, 25 bp, Homo sapien
aaaaggaagtgcaacagctccggag

SEQ ID NO: 1572887 - DNA, 25 bp, Homo sapien
gtcggcgatgttgccgcgcagccgg

SEQ ID NO: 1572888 - DNA, 25 bp, Homo sapien
tggagtgacgttgtcccgcagcagc

SEQ ID NO: 1572889 - DNA, 25 bp, Homo sapien
gcatccgatgtcagatgcggccgcc

SEQ ID NO: 1572890 - DNA, 25 bp, Homo sapien
ccccagcgaggtccagagctcgttt

SEQ ID NO: 1572891 - DNA, 25 bp, Homo sapien
cagagctcgttttcacgtggagtga

SEQ ID NO: 1572892 - DNA, 25 bp, Homo sapien
cggctcccagccgctgaagaactcg

SEQ ID NO: 1572893 - DNA, 25 bp, Homo sapien
ggcgcctccgctcgtgctgtagctg

SEQ ID NO: 1572894 - DNA, 25 bp, Homo sapien
tctgcgggtcagtgaccggcggctc

SEQ ID NO: 1572895 - DNA, 25 bp, Homo sapien
tagctgtttctcaactgggtcctcc

SEQ ID NO: 1572896 - DNA, 25 bp, Homo sapien
aggaagtaagacagtcgggtcaggc

SEQ ID NO: 1572897 - DNA, 25 bp, Homo sapien
ggccctgctgtgtcgcttgggtcac

SEQ ID NO: 1572898 - DNA, 25 bp, Homo sapien
aagtaagacagtcgggtcaggcggg

SEQ ID NO: 1572899 - DNA, 25 bp, Homo sapien
agcctcggccctgctgtgtcgcttg

SEQ ID NO: 1572900 - DNA, 25 bp, Homo sapien
tgacagcgacctggggggcgctttg

SEQ ID NO: 1572901 - DNA, 25 bp, Homo sapien
ccattgacagcgacctggggggcgc

SEQ ID NO: 1572902 - DNA, 25 bp, Homo sapien
cattgacagcgacctggggggcgct

SEQ ID NO: 1572903 - DNA, 25 bp, Homo sapien
ttgacagcgacctggggggcgcttt

SEQ ID NO: 1572904 - DNA, 25 bp, Homo sapien
tctcacccacctgagaagagccagg

SEQ ID NO: 1572905 - DNA, 25 bp, Homo sapien
aaaaaagggggcggagtcagcatcg

SEQ ID NO: 1572906 - DNA, 25 bp, Homo sapien
atctcacccacctgagaagagccag

SEQ ID NO: 1572907 - DNA, 25 bp, Homo sapien
gcctcactgctttgttttcgtctcc

SEQ ID NO: 1572908 - DNA, 25 bp, Homo sapien
agggccgcggcaccccctgtgtggg

SEQ ID NO: 1572909 - DNA, 25 bp, Homo sapien
cagcctcactgctttgttttcgtct

SEQ ID NO: 1572910 - DNA, 25 bp, Homo sapien
cgcggcaccccctgtgtggggccgg

SEQ ID NO: 1572911 - DNA, 25 bp, Homo sapien
tatttgctccctccgttgcttggca

SEQ ID NO: 1572912 - DNA, 25 bp, Homo sapien
gcttggcattgtgctgtaggcatat

SEQ ID NO: 1572913 - DNA, 25 bp, Homo sapien
gggtactatcccaccatcgattcca

SEQ ID NO: 1572914 - DNA, 25 bp, Homo sapien
ataaaaacactagctaggccgggcg

SEQ ID NO: 1572915 - DNA, 25 bp, Homo sapien
aagtcataattacacaggacccatt

SEQ ID NO: 1572916 - DNA, 25 bp, Homo sapien
gaagtcataattacacaggacccat

SEQ ID NO: 1572917 - DNA, 25 bp, Homo sapien
gtcataattacacaggacccatttt

SEQ ID NO: 1572918 - DNA, 25 bp, Homo sapien
agtcataattacacaggacccattt

SEQ ID NO: 1572919 - DNA, 25 bp, Homo sapien
cgctgcttgaccgacagctcactgc

SEQ ID NO: 1572920 - DNA, 25 bp, Homo sapien
gtcccgctgcttgaccgacagctca

SEQ ID NO: 1572921 - DNA, 25 bp, Homo sapien
cccgctgcttgaccgacagctcact

SEQ ID NO: 1572922 - DNA, 25 bp, Homo sapien
tgcttgaccgacagctcactgctgt

SEQ ID NO: 1572923 - DNA, 25 bp, Homo sapien
ttgtagggcacatatccctcctgcc

SEQ ID NO: 1572924 - DNA, 25 bp, Homo sapien
tgttgtagggcacatatccctcctg

SEQ ID NO: 1572925 - DNA, 25 bp, Homo sapien
gatgttgtagggcacatatccctcc

SEQ ID NO: 1572926 - DNA, 25 bp, Homo sapien
gggtagggtgtcaggatgttgtagg

SEQ ID NO: 1572927 - DNA, 25 bp, Homo sapien
agatcccagcgtctgcgctggctca

SEQ ID NO: 1572928 - DNA, 25 bp, Homo sapien
caagatcccagcgtctgcgctggct

SEQ ID NO: 1572929 - DNA, 25 bp, Homo sapien
cctcaagatcccagcgtctgcgctg

SEQ ID NO: 1572930 - DNA, 25 bp, Homo sapien
ctcaagatcccagcgtctgcgctgg

SEQ ID NO: 1572931 - DNA, 25 bp, Homo sapien
caggatctggtcccagcctctccac

SEQ ID NO: 1572932 - DNA, 25 bp, Homo sapien
ccttgttcccaggatctggtcccag

SEQ ID NO: 1572933 - DNA, 25 bp, Homo sapien
gccccttgttcccaggatctggtcc

SEQ ID NO: 1572934 - DNA, 25 bp, Homo sapien
tgttcccaggatctggtcccagcct

SEQ ID NO: 1572935 - DNA, 25 bp, Homo sapien
gctccagcactcttgacagctgatc

SEQ ID NO: 1572936 - DNA, 25 bp, Homo sapien
ctgctccagcactcttgacagctga

SEQ ID NO: 1572937 - DNA, 25 bp, Homo sapien
ccagcactcttgacagctgatcccc

SEQ ID NO: 1572938 - DNA, 25 bp, Homo sapien
agcactcttgacagctgatccccac

SEQ ID NO: 1572939 - DNA, 25 bp, Homo sapien
gtcccagcggggccgagccagagct

SEQ ID NO: 1572940 - DNA, 25 bp, Homo sapien
ctgtcccagcggggccgagccagag

SEQ ID NO: 1572941 - DNA, 25 bp, Homo sapien
tgtcccagcggggccgagccagagc

SEQ ID NO: 1572942 - DNA, 25 bp, Homo sapien
ggtccaagccgttgaggctatcgca

SEQ ID NO: 1572943 - DNA, 25 bp, Homo sapien
ccttctcgctggggtccaagccgtt

SEQ ID NO: 1572944 - DNA, 25 bp, Homo sapien
tctcgctggggtccaagccgttgag

SEQ ID NO: 1572945 - DNA, 25 bp, Homo sapien
gggtccaagccgttgaggctatcgc

SEQ ID NO: 1572946 - DNA, 25 bp, Homo sapien
gcctgcagttcctcgttgacgatga

SEQ ID NO: 1572947 - DNA, 25 bp, Homo sapien
gcgcggacctcggaggcgtccgagc

SEQ ID NO: 1572948 - DNA, 25 bp, Homo sapien
gactgcgcggctcggtcccgagcgg

SEQ ID NO: 1572949 - DNA, 25 bp, Homo sapien
tgacgatgagcatctgggagaattt

SEQ ID NO: 1572950 - DNA, 25 bp, Homo sapien
aatcacaatgttgccacccgggggg

SEQ ID NO: 1572951 - DNA, 25 bp, Homo sapien
agaacagcattctagctctagcggg

SEQ ID NO: 1572952 - DNA, 25 bp, Homo sapien
cgtggccgcatcctgctttcaaagg

SEQ ID NO: 1572953 - DNA, 25 bp, Homo sapien
acccggcgatggtccaatcagaaca

SEQ ID NO: 1572954 - DNA, 25 bp, Homo sapien
cagcacacccagcgcgtccacggtc

SEQ ID NO: 1572955 - DNA, 25 bp, Homo sapien
tcagcacacccagcgcgtccacggt

SEQ ID NO: 1572956 - DNA, 25 bp, Homo sapien
agcgctgcacggtgacctggctgta

SEQ ID NO: 1572957 - DNA, 25 bp, Homo sapien
cggtgacctggctgtacacacgtgc

SEQ ID NO: 1572958 - DNA, 25 bp, Homo sapien
cagcagcgagcgctgcacggtgacc

SEQ ID NO: 1572959 - DNA, 25 bp, Homo sapien
gtgacctggctgtacacacgtgccc

SEQ ID NO: 1572960 - DNA, 25 bp, Homo sapien
aatcgctttgtcctggcgtccgagc

SEQ ID NO: 1572961 - DNA, 25 bp, Homo sapien
gaaatcgctttgtcctggcgtccga

SEQ ID NO: 1572962 - DNA, 25 bp, Homo sapien
ggcgtccgagccctcgtcatcccaa

SEQ ID NO: 1572963 - DNA, 25 bp, Homo sapien
ggtggaaatcgctttgtcctggcgt

SEQ ID NO: 1572964 - DNA, 25 bp, Homo sapien
tccatcactgcctccagctctgaca

SEQ ID NO: 1572965 - DNA, 25 bp, Homo sapien
aatgacctccatttccacctcgcct

SEQ ID NO: 1572966 - DNA, 25 bp, Homo sapien
tcaaatgacctccatttccacctcg

SEQ ID NO: 1572967 - DNA, 25 bp, Homo sapien
gacctccatttccacctcgccttcc

SEQ ID NO: 1572968 - DNA, 25 bp, Homo sapien
tcactctttgcgaagggcgcctggc

SEQ ID NO: 1572969 - DNA, 25 bp, Homo sapien
cagaagatcgacttccgctattggg

SEQ ID NO: 1572970 - DNA, 25 bp, Homo sapien
tctgaggagtccgttctcccacggg

SEQ ID NO: 1572971 - DNA, 25 bp, Homo sapien
gccggagcagattggccatccttca

SEQ ID NO: 1572972 - DNA, 25 bp, Homo sapien
gatcctctccggagggactgcagca

SEQ ID NO: 1572973 - DNA, 25 bp, Homo sapien
catctgctaagcacggaggctgttt

SEQ ID NO: 1572974 - DNA, 25 bp, Homo sapien
tagaggacagcagttggcacaccat

SEQ ID NO: 1572975 - DNA, 25 bp, Homo sapien
tgggccgcatattacaatgctcagg

SEQ ID NO: 1572976 - DNA, 25 bp, Homo sapien
aggctgaacaggagttcgccaggca

SEQ ID NO: 1572977 - DNA, 25 bp, Homo sapien
cctcagaggttgaacgcttgggagc

SEQ ID NO: 1572978 - DNA, 25 bp, Homo sapien
acgcaggaaggaatgaagtgagaac

SEQ ID NO: 1572979 - DNA, 25 bp, Homo sapien
ggaatggccgtttcagccagcagag

SEQ ID NO: 1572980 - DNA, 25 bp, Homo sapien
gacgtcttctattttttgctgcccc

SEQ ID NO: 1572981 - DNA, 25 bp, Homo sapien
tgtgcaatagggagggacgtcttct

SEQ ID NO: 1572982 - DNA, 25 bp, Homo sapien
ccaggtgggcctgtatatagggtcc

SEQ ID NO: 1572983 - DNA, 25 bp, Homo sapien
ctcctgagcagggatccaagaatgt

SEQ ID NO: 1572984 - DNA, 25 bp, Homo sapien
aaatgtctctggacgtggccaaatg

SEQ ID NO: 1572985 - DNA, 25 bp, Homo sapien
gacattttgggctgatcgctcttgc

SEQ ID NO: 1572986 - DNA, 25 bp, Homo sapien
caagacagatctgggcctgtgtgcg

SEQ ID NO: 1572987 - DNA, 25 bp, Homo sapien
tgggagcatccctggttgtgagaac

SEQ ID NO: 1572988 - DNA, 25 bp, Homo sapien
catgccgtcttcactcgctgggttc

SEQ ID NO: 1572989 - DNA, 25 bp, Homo sapien
tgcaccacgtgatgtcctctgagcg

SEQ ID NO: 1572990 - DNA, 25 bp, Homo sapien
tgctgcccaaggatgctctttccgg

SEQ ID NO: 1572991 - DNA, 25 bp, Homo sapien
taggatggccttctccgacggatgt

SEQ ID NO: 1572992 - DNA, 25 bp, Homo sapien
ctaaaagacaagaggtaggcagtcc

SEQ ID NO: 1572993 - DNA, 25 bp, Homo sapien
aactgaggcttctaaggccaggtgc

SEQ ID NO: 1572994 - DNA, 25 bp, Homo sapien
ccagttctggatttgacagtcctca

SEQ ID NO: 1572995 - DNA, 25 bp, Homo sapien
acctgtagtcccaagagaatcgctt

SEQ ID NO: 1572996 - DNA, 25 bp, Homo sapien
tcaggtaagactattttcgcttctt

SEQ ID NO: 1572997 - DNA, 25 bp, Homo sapien
aggaccaggcagaatatatcgtatc

SEQ ID NO: 1572998 - DNA, 25 bp, Homo sapien
tcttaaggaccaggcagaatatatc

SEQ ID NO: 1572999 - DNA, 25 bp, Homo sapien
agtaccttcttaaggaccaggcaga

SEQ ID NO: 1573000 - DNA, 25 bp, Homo sapien
ccaccatgcccagccagtctgtttc

SEQ ID NO: 1573001 - DNA, 25 bp, Homo sapien
tctcccaccttggcctcccaaagtg

SEQ ID NO: 1573002 - DNA, 25 bp, Homo sapien
ccatgcccagccagtctgtttcctt

SEQ ID NO: 1573003 - DNA, 25 bp, Homo sapien
aactcctatcctcaagcagttctcc

SEQ ID NO: 1573004 - DNA, 25 bp, Homo sapien
tgtaggatgagaacccgctgatacc

SEQ ID NO: 1573005 - DNA, 25 bp, Homo sapien
cgcacgtttctgcaagtcccaggaa

SEQ ID NO: 1573006 - DNA, 25 bp, Homo sapien
ggaatcagctctgggcaacactgtc

SEQ ID NO: 1573007 - DNA, 25 bp, Homo sapien
taagtccgctgctagagtcctcaat

SEQ ID NO: 1573008 - DNA, 25 bp, Homo sapien
tccggatttggagctgaatctcagc

SEQ ID NO: 1573009 - DNA, 25 bp, Homo sapien
gctgtgctcacaaagacccaggatc

SEQ ID NO: 1573010 - DNA, 25 bp, Homo sapien
acaagagctgctacaacggccgatt

SEQ ID NO: 1573011 - DNA, 25 bp, Homo sapien
cctctatgtggcctgtgggtaagcg

SEQ ID NO: 1573012 - DNA, 25 bp, Homo sapien
tgcggacgagcaacggccagccagt

SEQ ID NO: 1573013 - DNA, 25 bp, Homo sapien
ttcggcatcgaagcggacgacgaga

SEQ ID NO: 1573014 - DNA, 25 bp, Homo sapien
acgacgagagcctcctgcggacgag

SEQ ID NO: 1573015 - DNA, 25 bp, Homo sapien
tccttttccagcgtggggagcgcgt

SEQ ID NO: 1573016 - DNA, 25 bp, Homo sapien
acatggtcccatacaccgcaaatca

SEQ ID NO: 1573017 - DNA, 25 bp, Homo sapien
cctgtacacatggtcccatacaccg

SEQ ID NO: 1573018 - DNA, 25 bp, Homo sapien
tgtacacatggtcccatacaccgca

SEQ ID NO: 1573019 - DNA, 25 bp, Homo sapien
cacatggtcccatacaccgcaaatc

SEQ ID NO: 1573020 - DNA, 25 bp, Homo sapien
aacacccaatcatcccgcttagaaa

SEQ ID NO: 1573021 - DNA, 25 bp, Homo sapien
gaagagtaatgtgccgatgtcgtaa

SEQ ID NO: 1573022 - DNA, 25 bp, Homo sapien
caatcatcccgcttagaaactacaa

SEQ ID NO: 1573023 - DNA, 25 bp, Homo sapien
tcagaagagtaatgtgccgatgtcg

SEQ ID NO: 1573024 - DNA, 25 bp, Homo sapien
tgacaatcagccatcctcgtctgct

SEQ ID NO: 1573025 - DNA, 25 bp, Homo sapien
taagcttcctctgacggttaccctc

SEQ ID NO: 1573026 - DNA, 25 bp, Homo sapien
gcactgggcggacatgctggccaac

SEQ ID NO: 1573027 - DNA, 25 bp, Homo sapien
gatgccaatcacgacaactttccag

SEQ ID NO: 1573028 - DNA, 25 bp, Homo sapien
cctgagggacagagttaactgagac

SEQ ID NO: 1573029 - DNA, 25 bp, Homo sapien
gattcaggccccatatccagattct

SEQ ID NO: 1573030 - DNA, 25 bp, Homo sapien
ggtgttaggatgactcctctggaac

SEQ ID NO: 1573031 - DNA, 25 bp, Homo sapien
gagaaggacattctagtccaagttg

SEQ ID NO: 1573032 - DNA, 25 bp, Homo sapien
agtacaggcctacgcaagtgggaga

SEQ ID NO: 1573033 - DNA, 25 bp, Homo sapien
tattttcggcaggatattcaaggaa

SEQ ID NO: 1573034 - DNA, 25 bp, Homo sapien
catgcatctgggaaaggcgctccca

SEQ ID NO: 1573035 - DNA, 25 bp, Homo sapien
tgcacccagcaggaatattttcggc

SEQ ID NO: 1573036 - DNA, 25 bp, Homo sapien
tctcatcctcgtgggcctgctgatt

SEQ ID NO: 1573037 - DNA, 25 bp, Homo sapien
tgagcagctcagacctgcgctctga

SEQ ID NO: 1573038 - DNA, 25 bp, Homo sapien
cctgaagaggaggtgagactcagca

SEQ ID NO: 1573039 - DNA, 25 bp, Homo sapien
cattgccggagcctttgtgggcatc

SEQ ID NO: 1573040 - DNA, 25 bp, Homo sapien
caattcacaccgtgtgatgttcggg

SEQ ID NO: 1573041 - DNA, 25 bp, Homo sapien
tcctccttgtagtcttcgcgttgag

SEQ ID NO: 1573042 - DNA, 25 bp, Homo sapien
tataactggaccgacgcaattcaca

SEQ ID NO: 1573043 - DNA, 25 bp, Homo sapien
gaggaaaatccatgggtaagcgcgt

SEQ ID NO: 1573044 - DNA, 25 bp, Homo sapien
attcttataatcaagtagctaaaga

SEQ ID NO: 1573045 - DNA, 25 bp, Homo sapien
atgctgtattcttataatcaagtag

SEQ ID NO: 1573046 - DNA, 25 bp, Homo sapien
gtattcttataatcaagtagctaaa

SEQ ID NO: 1573047 - DNA, 25 bp, Homo sapien
gctgtattcttataatcaagtagct

SEQ ID NO: 1573048 - DNA, 25 bp, Homo sapien
ccttgaacaattgtcccctacacag

SEQ ID NO: 1573049 - DNA, 25 bp, Homo sapien
ccctacacagtagaaaatctgcata

SEQ ID NO: 1573050 - DNA, 25 bp, Homo sapien
ctgtgaaaatgatggatagttgacc

SEQ ID NO: 1573051 - DNA, 25 bp, Homo sapien
atctgcatataacagccgggcatgg

SEQ ID NO: 1573052 - DNA, 25 bp, Homo sapien
ctcagtgcgagcatggatctaggag

SEQ ID NO: 1573053 - DNA, 25 bp, Homo sapien
tgcgagcatggatctaggagaaccc

SEQ ID NO: 1573054 - DNA, 25 bp, Homo sapien
cagtgcgagcatggatctaggagaa

SEQ ID NO: 1573055 - DNA, 25 bp, Homo sapien
gagcatggatctaggagaaccccag

SEQ ID NO: 1573056 - DNA, 25 bp, Homo sapien
ggtaagattcgctaaagacggtggc

SEQ ID NO: 1573057 - DNA, 25 bp, Homo sapien
ttttccatgggacgctaaggacatc

SEQ ID NO: 1573058 - DNA, 25 bp, Homo sapien
tgttcccaccacgagtgctgctctg

SEQ ID NO: 1573059 - DNA, 25 bp, Homo sapien
ccatgggtgtcaacgtagggtccct

SEQ ID NO: 1573060 - DNA, 25 bp, Homo sapien
cagggctctgctaaatcacatggga

SEQ ID NO: 1573061 - DNA, 25 bp, Homo sapien
tgttttctcctcagcgccgagagag

SEQ ID NO: 1573062 - DNA, 25 bp, Homo sapien
tagaagggtttgctttccgagagga

SEQ ID NO: 1573063 - DNA, 25 bp, Homo sapien
tctgcctagcagtggaatcgctgag

SEQ ID NO: 1573064 - DNA, 25 bp, Homo sapien
taacaggagagggtgcttgttcccc

SEQ ID NO: 1573065 - DNA, 25 bp, Homo sapien
tgaagccactcgctcccagattagg

SEQ ID NO: 1573066 - DNA, 25 bp, Homo sapien
ccaacagtgctttatcagcgggcgc

SEQ ID NO: 1573067 - DNA, 25 bp, Homo sapien
cagcaagtgaaggacagactcgcct

SEQ ID NO: 1573068 - DNA, 25 bp, Homo sapien
ggccaatggatatccttcctcagtg

SEQ ID NO: 1573069 - DNA, 25 bp, Homo sapien
tgtgtgtttgggtgcccctggctct

SEQ ID NO: 1573070 - DNA, 25 bp, Homo sapien
gttgtcctggcttctaaccctgtag

SEQ ID NO: 1573071 - DNA, 25 bp, Homo sapien
actctgcttgtgagctccttccctg

SEQ ID NO: 1573072 - DNA, 25 bp, Homo sapien
caaggggtacctccccacagtcctg

SEQ ID NO: 1573073 - DNA, 25 bp, Homo sapien
tcaagtgatatgcctgcctcagcct

SEQ ID NO: 1573074 - DNA, 25 bp, Homo sapien
ctgggactataagccagcacgccca

SEQ ID NO: 1573075 - DNA, 25 bp, Homo sapien
aagtgatatgcctgcctcagcctcc

SEQ ID NO: 1573076 - DNA, 25 bp, Homo sapien
gtgtggcggagtgatgacagctttc

SEQ ID NO: 1573077 - DNA, 25 bp, Homo sapien
tttggttgccccttgtcctgtgtgg

SEQ ID NO: 1573078 - DNA, 25 bp, Homo sapien
cgggctttggttgccccttgtcctg

SEQ ID NO: 1573079 - DNA, 25 bp, Homo sapien
cccttgtcctgtgtggcggagtgat

SEQ ID NO: 1573080 - DNA, 25 bp, Homo sapien
gaactcaggcctctggccgaactgt

SEQ ID NO: 1573081 - DNA, 25 bp, Homo sapien
agggatgtctgttgagtaagcacta

SEQ ID NO: 1573082 - DNA, 25 bp, Homo sapien
gatgtctgttgagtaagcactagca

SEQ ID NO: 1573083 - DNA, 25 bp, Homo sapien
ggcctctggccgaactgtgctgtca

SEQ ID NO: 1573084 - DNA, 25 bp, Homo sapien
ggacatagtgcaaggcctgagcctg

SEQ ID NO: 1573085 - DNA, 25 bp, Homo sapien
tctgcggacgctgggacatagtgca

SEQ ID NO: 1573086 - DNA, 25 bp, Homo sapien
gacgctgggacatagtgcaaggcct

SEQ ID NO: 1573087 - DNA, 25 bp, Homo sapien
ctctgcggacgctgggacatagtgc

SEQ ID NO: 1573088 - DNA, 25 bp, Homo sapien
cttagagctgttggtggtgagggat

SEQ ID NO: 1573089 - DNA, 25 bp, Homo sapien
cagggctgagccttggcagcttcag

SEQ ID NO: 1573090 - DNA, 25 bp, Homo sapien
ttagcttagagctgttggtggtgag

SEQ ID NO: 1573091 - DNA, 25 bp, Homo sapien
ctgagccttggcagcttcagctctg

SEQ ID NO: 1573092 - DNA, 25 bp, Homo sapien
gtgacagatgaagcatgggcccacc

SEQ ID NO: 1573093 - DNA, 25 bp, Homo sapien
aagcatgggcccaccggttccctgg

SEQ ID NO: 1573094 - DNA, 25 bp, Homo sapien
catttctgggtgctcgtgggtcagc

SEQ ID NO: 1573095 - DNA, 25 bp, Homo sapien
gagcattgggacagctcaggcagct

SEQ ID NO: 1573096 - DNA, 25 bp, Homo sapien
caaattggtgtccctggttcctcct

SEQ ID NO: 1573097 - DNA, 25 bp, Homo sapien
tgggtgggtgatgccggattctgca

SEQ ID NO: 1573098 - DNA, 25 bp, Homo sapien
tcaaattggtgtccctggttcctcc

SEQ ID NO: 1573099 - DNA, 25 bp, Homo sapien
tgatgccggattctgcagccggcac

SEQ ID NO: 1573100 - DNA, 25 bp, Homo sapien
tcaggagacgatttgaatgtggatg

SEQ ID NO: 1573101 - DNA, 25 bp, Homo sapien
attccatcctctggggttggaccag

SEQ ID NO: 1573102 - DNA, 25 bp, Homo sapien
ccagtccttggccagtgtttctaga

SEQ ID NO: 1573103 - DNA, 25 bp, Homo sapien
agggctgctagctcccttgggaggg

SEQ ID NO: 1573104 - DNA, 25 bp, Homo sapien
tgcgcaccaacacagccgcgggagg

SEQ ID NO: 1573105 - DNA, 25 bp, Homo sapien
ggagggcggggcctcctgcgtcgtc

SEQ ID NO: 1573106 - DNA, 25 bp, Homo sapien
ctgcgcaccaacacagccgcgggag

SEQ ID NO: 1573107 - DNA, 25 bp, Homo sapien
gcggggcctcctgcgtcgtcctgcg

SEQ ID NO: 1573108 - DNA, 25 bp, Homo sapien
tatcgccagcagacggaaacgactg

SEQ ID NO: 1573109 - DNA, 25 bp, Homo sapien
tgctttgggcggaactggcaacacc

SEQ ID NO: 1573110 - DNA, 25 bp, Homo sapien
cgaacggatttccaaacggagcgag

SEQ ID NO: 1573111 - DNA, 25 bp, Homo sapien
tttggctggagcgaaaaccaggtct

SEQ ID NO: 1573112 - DNA, 25 bp, Homo sapien
tattctacagaggaatctcgctgcc

SEQ ID NO: 1573113 - DNA, 25 bp, Homo sapien
gagccatttgcagggtacgtcccct

SEQ ID NO: 1573114 - DNA, 25 bp, Homo sapien
ttgttacagtctaccagagtggcac

SEQ ID NO: 1573115 - DNA, 25 bp, Homo sapien
tactggagttccgtgctgggagcca

SEQ ID NO: 1573116 - DNA, 25 bp, Homo sapien
ctttctctccggcacgctgacatca

SEQ ID NO: 1573117 - DNA, 25 bp, Homo sapien
tttctctccggcacgctgacatcac

SEQ ID NO: 1573118 - DNA, 25 bp, Homo sapien
cccctgcggccgtcgccccgtctct

SEQ ID NO: 1573119 - DNA, 25 bp, Homo sapien
gggtcaggccccgggagtcagcatg

SEQ ID NO: 1573120 - DNA, 25 bp, Homo sapien
ccctgcggccgtcgccccgtctctc

SEQ ID NO: 1573121 - DNA, 25 bp, Homo sapien
tgcggccgtcgccccgtctctccgg

SEQ ID NO: 1573122 - DNA, 25 bp, Homo sapien
ctccctccttggccccggacgacat

SEQ ID NO: 1573123 - DNA, 25 bp, Homo sapien
gaggtggtaggcgggagagccccca

SEQ ID NO: 1573124 - DNA, 25 bp, Homo sapien
ccgataggggcccacatattgggcg

SEQ ID NO: 1573125 - DNA, 25 bp, Homo sapien
gtcttctccagccgataggggccca

SEQ ID NO: 1573126 - DNA, 25 bp, Homo sapien
ctccagccgataggggcccacatat

SEQ ID NO: 1573127 - DNA, 25 bp, Homo sapien
cgataggggcccacatattgggcgt

SEQ ID NO: 1573128 - DNA, 25 bp, Homo sapien
gctccaggagacgcgcctgctgcag

SEQ ID NO: 1573129 - DNA, 25 bp, Homo sapien
aggatgaacgccctttccacagccg

SEQ ID NO: 1573130 - DNA, 25 bp, Homo sapien
gccgcggccggtggccagcgttcag

SEQ ID NO: 1573131 - DNA, 25 bp, Homo sapien
cgcggccggtggccagcgttcagca

SEQ ID NO: 1573132 - DNA, 25 bp, Homo sapien
ttctgacccgtgatgcagtggaccc

SEQ ID NO: 1573133 - DNA, 25 bp, Homo sapien
atcttgatggcgaccttctgacccg

SEQ ID NO: 1573134 - DNA, 25 bp, Homo sapien
gcagtggaccccgagtttaaccagc

SEQ ID NO: 1573135 - DNA, 25 bp, Homo sapien
tcccggttcacgatcttgatggcga

SEQ ID NO: 1573136 - DNA, 25 bp, Homo sapien
tttcttgttctcgtagacgtcgtgg

SEQ ID NO: 1573137 - DNA, 25 bp, Homo sapien
tctcgtagacgtcgtggagcttgag

SEQ ID NO: 1573138 - DNA, 25 bp, Homo sapien
tagacgtcgtggagcttgaggacat

SEQ ID NO: 1573139 - DNA, 25 bp, Homo sapien
aatatttcttgttctcgtagacgtc

SEQ ID NO: 1573140 - DNA, 25 bp, Homo sapien
gcgcattccatgcagtgccacaggg

SEQ ID NO: 1573141 - DNA, 25 bp, Homo sapien
taggaggatggttgcccttggcctc

SEQ ID NO: 1573142 - DNA, 25 bp, Homo sapien
tgcttgtctagcagagcgcattcca

SEQ ID NO: 1573143 - DNA, 25 bp, Homo sapien
gcccaacacagcgtgacaacagtgg

SEQ ID NO: 1573144 - DNA, 25 bp, Homo sapien
ctgcgccagcatcgacggacctgat

SEQ ID NO: 1573145 - DNA, 25 bp, Homo sapien
gcgccagcatcgacggacctgatgt

SEQ ID NO: 1573146 - DNA, 25 bp, Homo sapien
acctgatgtcagttcatccggggga

SEQ ID NO: 1573147 - DNA, 25 bp, Homo sapien
cagcatcgacggacctgatgtcagt

SEQ ID NO: 1573148 - DNA, 25 bp, Homo sapien
agcaggtcccatgagcgccgggcag

SEQ ID NO: 1573149 - DNA, 25 bp, Homo sapien
caggtcccatgagcgccgggcagac

SEQ ID NO: 1573150 - DNA, 25 bp, Homo sapien
ccatgagcgccgggcagacagcttc

SEQ ID NO: 1573151 - DNA, 25 bp, Homo sapien
tcccatgagcgccgggcagacagct

SEQ ID NO: 1573152 - DNA, 25 bp, Homo sapien
tgcccgaagcataaactcccatggc

SEQ ID NO: 1573153 - DNA, 25 bp, Homo sapien
aagctcaatttctatgagctcttag

SEQ ID NO: 1573154 - DNA, 25 bp, Homo sapien
gaccatgcaccggtccggacaatag

SEQ ID NO: 1573155 - DNA, 25 bp, Homo sapien
ctccctacgccaagagtggagtggg

SEQ ID NO: 1573156 - DNA, 25 bp, Homo sapien
ggtggcagagaactccaattcccat

SEQ ID NO: 1573157 - DNA, 25 bp, Homo sapien
gctcctggtggcagagaactccaat

SEQ ID NO: 1573158 - DNA, 25 bp, Homo sapien
tggaggaccaaagggcctggtctcc

SEQ ID NO: 1573159 - DNA, 25 bp, Homo sapien
ctggaaggggcatgtggaggaccaa

SEQ ID NO: 1573160 - DNA, 25 bp, Homo sapien
ctaaaggatatagagggggcagagg

SEQ ID NO: 1573161 - DNA, 25 bp, Homo sapien
cagacacaatctggcggaagaactt

SEQ ID NO: 1573162 - DNA, 25 bp, Homo sapien
aggtagtcgaatagctcaccccccg

SEQ ID NO: 1573163 - DNA, 25 bp, Homo sapien
tctggcggaagaactttcgggcctc

SEQ ID NO: 1573164 - DNA, 25 bp, Homo sapien
ttcgggcctccttgggcgtcagtct

SEQ ID NO: 1573165 - DNA, 25 bp, Homo sapien
aatgcggatgttgtttttctcatcc

SEQ ID NO: 1573166 - DNA, 25 bp, Homo sapien
caatgcggatgttgtttttctcatc

SEQ ID NO: 1573167 - DNA, 25 bp, Homo sapien
gcaatgcggatgttgtttttctcat

SEQ ID NO: 1573168 - DNA, 25 bp, Homo sapien
tgcaatgcggatgttgtttttctca

SEQ ID NO: 1573169 - DNA, 25 bp, Homo sapien
agctggtctccaggaggctgtcccc

SEQ ID NO: 1573170 - DNA, 25 bp, Homo sapien
cagctggtctccaggaggctgtccc

SEQ ID NO: 1573171 - DNA, 25 bp, Homo sapien
ctggtctccaggaggctgtccccca

SEQ ID NO: 1573172 - DNA, 25 bp, Homo sapien
ccgcagctggtctccaggaggctgt

SEQ ID NO: 1573173 - DNA, 25 bp, Homo sapien
atcacctctggacacgcataatggg

SEQ ID NO: 1573174 - DNA, 25 bp, Homo sapien
ttaatcacctctggacacgcataat

SEQ ID NO: 1573175 - DNA, 25 bp, Homo sapien
cctctggacacgcataatgggggga

SEQ ID NO: 1573176 - DNA, 25 bp, Homo sapien
ctctggacacgcataatggggggac

SEQ ID NO: 1573177 - DNA, 25 bp, Homo sapien
gtgacttcatcgctcctcactgctg

SEQ ID NO: 1573178 - DNA, 25 bp, Homo sapien
ctctcccctctatccgcccctcact

SEQ ID NO: 1573179 - DNA, 25 bp, Homo sapien
agttgtgacttcatcgctcctcact

SEQ ID NO: 1573180 - DNA, 25 bp, Homo sapien
ttgtgacttcatcgctcctcactgc

SEQ ID NO: 1573181 - DNA, 25 bp, Homo sapien
gcccggcggccatcatatttttccc

SEQ ID NO: 1573182 - DNA, 25 bp, Homo sapien
ggatgactccacagctccacatgtc

SEQ ID NO: 1573183 - DNA, 25 bp, Homo sapien
tgcccggcggccatcatatttttcc

SEQ ID NO: 1573184 - DNA, 25 bp, Homo sapien
tttcgggctccacttcgatcattcc

SEQ ID NO: 1573185 - DNA, 25 bp, Homo sapien
gggcatgtggaagacgccccgtttc

SEQ ID NO: 1573186 - DNA, 25 bp, Homo sapien
tctggcaatctggaggaatgaagtg

SEQ ID NO: 1573187 - DNA, 25 bp, Homo sapien
gcagctggcggaggttgtcgtcatc

SEQ ID NO: 1573188 - DNA, 25 bp, Homo sapien
tgagtcgtagagaagcagaagtgag

SEQ ID NO: 1573189 - DNA, 25 bp, Homo sapien
tgagggtggtgagtcgtagagaagc

SEQ ID NO: 1573190 - DNA, 25 bp, Homo sapien
taggcacatgtaggcgcgcaatgaa

SEQ ID NO: 1573191 - DNA, 25 bp, Homo sapien
agcagaagtgaggtcgtaggcacat

SEQ ID NO: 1573192 - DNA, 25 bp, Homo sapien
aggtaccaaggatgtttctgaattt

SEQ ID NO: 1573193 - DNA, 25 bp, Homo sapien
cgttgcctctcaggaaccctggcat

SEQ ID NO: 1573194 - DNA, 25 bp, Homo sapien
agtcctggactcctagcttagcccc

SEQ ID NO: 1573195 - DNA, 25 bp, Homo sapien
ataagtccgagtccctagcccgttg

SEQ ID NO: 1573196 - DNA, 25 bp, Homo sapien
tgcctctgacccctagactccttct

SEQ ID NO: 1573197 - DNA, 25 bp, Homo sapien
gggctggctccaggcacgggtctgg

SEQ ID NO: 1573198 - DNA, 25 bp, Homo sapien
caggcacgggtctggctcgtgtttc

SEQ ID NO: 1573199 - DNA, 25 bp, Homo sapien
cgggtctggctcgtgtttcccgcct

SEQ ID NO: 1573200 - DNA, 25 bp, Homo sapien
ctggctccaggcacgggtctggctc

SEQ ID NO: 1573201 - DNA, 25 bp, Homo sapien
agctcgcgatgcagcctctcgcggt

SEQ ID NO: 1573202 - DNA, 25 bp, Homo sapien
catgctctctaggacgtcggggtcc

SEQ ID NO: 1573203 - DNA, 25 bp, Homo sapien
gggtccagctctccgttggatggca

SEQ ID NO: 1573204 - DNA, 25 bp, Homo sapien
gcagcccagtgatgccatgctctct

SEQ ID NO: 1573205 - DNA, 25 bp, Homo sapien
acagctgggataccgctccttccga

SEQ ID NO: 1573206 - DNA, 25 bp, Homo sapien
tggtcctcacagctgggataccgct

SEQ ID NO: 1573207 - DNA, 25 bp, Homo sapien
atccaaaagcagataatatatcatc

SEQ ID NO: 1573208 - DNA, 25 bp, Homo sapien
gctccttccgatccaaaagcagata

SEQ ID NO: 1573209 - DNA, 25 bp, Homo sapien
tggacttccgctctggtcgccgctt

SEQ ID NO: 1573210 - DNA, 25 bp, Homo sapien
tcggtgatgctcaggacttccatgg

SEQ ID NO: 1573211 - DNA, 25 bp, Homo sapien
ttcccgtgacggctcagcatgggag

SEQ ID NO: 1573212 - DNA, 25 bp, Homo sapien
gcatgggagaatccacacgcttccg

SEQ ID NO: 1573213 - DNA, 25 bp, Homo sapien
ggaggctccactgacgctacgggat

SEQ ID NO: 1573214 - DNA, 25 bp, Homo sapien
tggaggctccactgacgctacggga

SEQ ID NO: 1573215 - DNA, 25 bp, Homo sapien
aggacagacccgtggaggctccact

SEQ ID NO: 1573216 - DNA, 25 bp, Homo sapien
gtggaggctccactgacgctacggg

SEQ ID NO: 1573217 - DNA, 25 bp, Homo sapien
aaggcagcgtctgcgttttggaagt

SEQ ID NO: 1573218 - DNA, 25 bp, Homo sapien
cccccgcctcgagcctcatctccag

SEQ ID NO: 1573219 - DNA, 25 bp, Homo sapien
cagcgtctgcgttttggaagtcggg

SEQ ID NO: 1573220 - DNA, 25 bp, Homo sapien
ggcagcgtctgcgttttggaagtcg

SEQ ID NO: 1573221 - DNA, 25 bp, Homo sapien
ccaggaagctgttgcggatggagtt

SEQ ID NO: 1573222 - DNA, 25 bp, Homo sapien
tgcatcttgcgccggtgaaagcgag

SEQ ID NO: 1573223 - DNA, 25 bp, Homo sapien
ggcgtgtgcagaggcgagtgcaagg

SEQ ID NO: 1573224 - DNA, 25 bp, Homo sapien
gagttgagacgactcctccaggcgg

SEQ ID NO: 1573225 - DNA, 25 bp, Homo sapien
gactctggcgtcaagctggacatct

SEQ ID NO: 1573226 - DNA, 25 bp, Homo sapien
gggaggactctggcgtcaagctgga

SEQ ID NO: 1573227 - DNA, 25 bp, Homo sapien
tccggggaggactctggcgtcaagc

SEQ ID NO: 1573228 - DNA, 25 bp, Homo sapien
ctggacatctcctcagcggtaggga

SEQ ID NO: 1573229 - DNA, 25 bp, Homo sapien
ttcccgaaccaggagcgttttgcca

SEQ ID NO: 1573230 - DNA, 25 bp, Homo sapien
gacgatgtctgctttgatgctgctg

SEQ ID NO: 1573231 - DNA, 25 bp, Homo sapien
gctgagaggtttgtcctttagcacg

SEQ ID NO: 1573232 - DNA, 25 bp, Homo sapien
tcttctttgtccaaggagatgaagt

SEQ ID NO: 1573233 - DNA, 25 bp, Homo sapien
tgacagcacactgtgactcaggctg

SEQ ID NO: 1573234 - DNA, 25 bp, Homo sapien
agcacactgtgactcaggctgggga

SEQ ID NO: 1573235 - DNA, 25 bp, Homo sapien
gcacactgtgactcaggctggggat

SEQ ID NO: 1573236 - DNA, 25 bp, Homo sapien
ctgtgacagcacactgtgactcagg

SEQ ID NO: 1573237 - DNA, 25 bp, Homo sapien
gagggctctggaccctcagaggagc

SEQ ID NO: 1573238 - DNA, 25 bp, Homo sapien
ccacctggaagcggacgggcttttg

SEQ ID NO: 1573239 - DNA, 25 bp, Homo sapien
ggaggggccgccactggccttgtac

SEQ ID NO: 1573240 - DNA, 25 bp, Homo sapien
gctgccgtcccgtcgcggggagggc

SEQ ID NO: 1573241 - DNA, 25 bp, Homo sapien
cacggagggctggtcatgagtgctc

SEQ ID NO: 1573242 - DNA, 25 bp, Homo sapien
ggcctgcacggagggctggtcatga

SEQ ID NO: 1573243 - DNA, 25 bp, Homo sapien
gatggtctccaccactcgcttgaac

SEQ ID NO: 1573244 - DNA, 25 bp, Homo sapien
cactcgcttgaaccgacggctggga

SEQ ID NO: 1573245 - DNA, 25 bp, Homo sapien
tcatcagtcggtctcagtaaccccg

SEQ ID NO: 1573246 - DNA, 25 bp, Homo sapien
gtctcctcatcagtcggtctcagta

SEQ ID NO: 1573247 - DNA, 25 bp, Homo sapien
cggtctcagtaaccccgaggctcta

SEQ ID NO: 1573248 - DNA, 25 bp, Homo sapien
tcagtcggtctcagtaaccccgagg

SEQ ID NO: 1573249 - DNA, 25 bp, Homo sapien
gcagaggggtcccgttggtggccag

SEQ ID NO: 1573250 - DNA, 25 bp, Homo sapien
ggcagaggggtcccgttggtggcca

SEQ ID NO: 1573251 - DNA, 25 bp, Homo sapien
cagaggggtcccgttggtggccagg

SEQ ID NO: 1573252 - DNA, 25 bp, Homo sapien
tgttccttgggccttatttacagat

SEQ ID NO: 1573253 - DNA, 25 bp, Homo sapien
ccacccccagttgggcacggcctgt

SEQ ID NO: 1573254 - DNA, 25 bp, Homo sapien
cccagttgggcacggcctgtggagc

SEQ ID NO: 1573255 - DNA, 25 bp, Homo sapien
ccctcccgacatgttccttgggcct

SEQ ID NO: 1573256 - DNA, 25 bp, Homo sapien
gacagagggccctgtccggatctgc

SEQ ID NO: 1573257 - DNA, 25 bp, Homo sapien
atctgctaagccaccccaaccagct

SEQ ID NO: 1573258 - DNA, 25 bp, Homo sapien
ggccctgtccggatctgctaagcca

SEQ ID NO: 1573259 - DNA, 25 bp, Homo sapien
agagggccctgtccggatctgctaa

SEQ ID NO: 1573260 - DNA, 25 bp, Homo sapien
cggcggaatcagagacacggacgca

SEQ ID NO: 1573261 - DNA, 25 bp, Homo sapien
gcaaatccgtacagaaggtcgtggg

SEQ ID NO: 1573262 - DNA, 25 bp, Homo sapien
ggatcacgcgaaaccagaattcctt

SEQ ID NO: 1573263 - DNA, 25 bp, Homo sapien
acggacgcaggcaggatcacgcgaa

SEQ ID NO: 1573264 - DNA, 25 bp, Homo sapien
gggcagtgatcgtcctccacgcctg

SEQ ID NO: 1573265 - DNA, 25 bp, Homo sapien
tcacggtagcagtgtggcccttgac

SEQ ID NO: 1573266 - DNA, 25 bp, Homo sapien
tctgcggcctgcgagtgggtcgtgg

SEQ ID NO: 1573267 - DNA, 25 bp, Homo sapien
tcgctgcgtagcgtctctgcggcct

SEQ ID NO: 1573268 - DNA, 25 bp, Homo sapien
tgccttcatcttgggtaacgtctac

SEQ ID NO: 1573269 - DNA, 25 bp, Homo sapien
aggaaaagaaccagcggcctacgca

SEQ ID NO: 1573270 - DNA, 25 bp, Homo sapien
cattgtggccagtatccttcttgta

SEQ ID NO: 1573271 - DNA, 25 bp, Homo sapien
ttgggtaacgtctacttctggctgc

SEQ ID NO: 1573272 - DNA, 25 bp, Homo sapien
cactcattggccgaaagcgcagtct

SEQ ID NO: 1573273 - DNA, 25 bp, Homo sapien
gtcgtatatgattgcctggccttgg

SEQ ID NO: 1573274 - DNA, 25 bp, Homo sapien
ggctcgaaatcgacgcactcattgg

SEQ ID NO: 1573275 - DNA, 25 bp, Homo sapien
ttccattgggtaaggcctccgtcca

SEQ ID NO: 1573276 - DNA, 25 bp, Homo sapien
ctcctcctcaggcgcccgcgccgcc

SEQ ID NO: 1573277 - DNA, 25 bp, Homo sapien
ccgccgccaacacctcccacagcct

SEQ ID NO: 1573278 - DNA, 25 bp, Homo sapien
tcctcctcctcaggcgcccgcgccg

SEQ ID NO: 1573279 - DNA, 25 bp, Homo sapien
ccgccgccgccaacacctcccacag

SEQ ID NO: 1573280 - DNA, 25 bp, Homo sapien
tgctgacttcaccaggccgctggcg

SEQ ID NO: 1573281 - DNA, 25 bp, Homo sapien
tggaatgcaacaagtacttctgaga

SEQ ID NO: 1573282 - DNA, 25 bp, Homo sapien
gccgctggcgaagatggaatgcaac

SEQ ID NO: 1573283 - DNA, 25 bp, Homo sapien
agccatgtcagccatcgccttagct

SEQ ID NO: 1573284 - DNA, 25 bp, Homo sapien
ggacgctggtgagccccacgatctc

SEQ ID NO: 1573285 - DNA, 25 bp, Homo sapien
ctggcttggtgctgactccactccc

SEQ ID NO: 1573286 - DNA, 25 bp, Homo sapien
actccactcccacgctactcagaag

SEQ ID NO: 1573287 - DNA, 25 bp, Homo sapien
tgactccactcccacgctactcaga

SEQ ID NO: 1573288 - DNA, 25 bp, Homo sapien
tggtggccaggtcgtcgttctcgca

SEQ ID NO: 1573289 - DNA, 25 bp, Homo sapien
tcatcttatgggtgcggaaaccgag

SEQ ID NO: 1573290 - DNA, 25 bp, Homo sapien
agttctcgtgctgtcactctgtcgg

SEQ ID NO: 1573291 - DNA, 25 bp, Homo sapien
tcgtcgttctcgcacagttctcgtg

SEQ ID NO: 1573292 - DNA, 25 bp, Homo sapien
ggaggaccaggctaaggagagggcc

SEQ ID NO: 1573293 - DNA, 25 bp, Homo sapien
accaggctaaggagagggccgaggg

SEQ ID NO: 1573294 - DNA, 25 bp, Homo sapien
gccgaggggcggcagcggtgcaagg

SEQ ID NO: 1573295 - DNA, 25 bp, Homo sapien
gcagcggtgcaaggggaggggtcct

SEQ ID NO: 1573296 - DNA, 25 bp, Homo sapien
cgcgggccccggctctggaagtagc

SEQ ID NO: 1573297 - DNA, 25 bp, Homo sapien
gccgtccagcctcccagcgtcaggg

SEQ ID NO: 1573298 - DNA, 25 bp, Homo sapien
gtcagggcccggtacgcagcctcca

SEQ ID NO: 1573299 - DNA, 25 bp, Homo sapien
ttccagcgctgagcgcaggtgctgc

SEQ ID NO: 1573300 - DNA, 25 bp, Homo sapien
gcagggcaggatggtaaagccactt

SEQ ID NO: 1573301 - DNA, 25 bp, Homo sapien
cactttccggcaggaaggcacggag

SEQ ID NO: 1573302 - DNA, 25 bp, Homo sapien
ggaaggcacggaggtagcgatagac

SEQ ID NO: 1573303 - DNA, 25 bp, Homo sapien
gatggtaaagccactttccggcagg

SEQ ID NO: 1573304 - DNA, 25 bp, Homo sapien
gcacgagtggacacgatcttggccc

SEQ ID NO: 1573305 - DNA, 25 bp, Homo sapien
caagcacgagtggacacgatcttgg

SEQ ID NO: 1573306 - DNA, 25 bp, Homo sapien
gagtggacacgatcttggccccgtt

SEQ ID NO: 1573307 - DNA, 25 bp, Homo sapien
ggacacgatcttggccccgttggtc

SEQ ID NO: 1573308 - DNA, 25 bp, Homo sapien
ggctattggcgatccatcttccaga

SEQ ID NO: 1573309 - DNA, 25 bp, Homo sapien
gccagtccatgaacagagggtctct

SEQ ID NO: 1573310 - DNA, 25 bp, Homo sapien
tgcagcatgtaccagctgggaccag

SEQ ID NO: 1573311 - DNA, 25 bp, Homo sapien
gccacaaaggtcttccgggattagc

SEQ ID NO: 1573312 - DNA, 25 bp, Homo sapien
cagcagctccagcttctcattcttt

SEQ ID NO: 1573313 - DNA, 25 bp, Homo sapien
tgcaatgcagcccaccagcagctcc

SEQ ID NO: 1573314 - DNA, 25 bp, Homo sapien
ctgcaatgcagcccaccagcagctc

SEQ ID NO: 1573315 - DNA, 25 bp, Homo sapien
cagctccagcttctcattctttttc

SEQ ID NO: 1573316 - DNA, 25 bp, Homo sapien
cacagctgagcactccgcttgcggg

SEQ ID NO: 1573317 - DNA, 25 bp, Homo sapien
gagcactccgcttgcgggttgagta

SEQ ID NO: 1573318 - DNA, 25 bp, Homo sapien
ttgcgggttgagtacatgatgctga

SEQ ID NO: 1573319 - DNA, 25 bp, Homo sapien
ctccgcttgcgggttgagtacatga

SEQ ID NO: 1573320 - DNA, 25 bp, Homo sapien
agccctgcctggctctatcccgtcc

SEQ ID NO: 1573321 - DNA, 25 bp, Homo sapien
agatgagctcggcagctcagtcgca

SEQ ID NO: 1573322 - DNA, 25 bp, Homo sapien
agtcgcagaaccctcccactacacc

SEQ ID NO: 1573323 - DNA, 25 bp, Homo sapien
ggctctatcccgtcctgcccatcca

SEQ ID NO: 1573324 - DNA, 25 bp, Homo sapien
ccggccggtgtttggctctttactg

SEQ ID NO: 1573325 - DNA, 25 bp, Homo sapien
tgtttggctctttactgaccaaaaa

SEQ ID NO: 1573326 - DNA, 25 bp, Homo sapien
caccctttcttcctgcgtgccctct

SEQ ID NO: 1573327 - DNA, 25 bp, Homo sapien
cgcgcccggccggtgtttggctctt

SEQ ID NO: 1573328 - DNA, 25 bp, Homo sapien
ccctggcccggagcgtcctctcctg

SEQ ID NO: 1573329 - DNA, 25 bp, Homo sapien
tccccacacctggccgggcaccctg

SEQ ID NO: 1573330 - DNA, 25 bp, Homo sapien
cacctggccgggcaccctggcccgg

SEQ ID NO: 1573331 - DNA, 25 bp, Homo sapien
ctggcccggagcgtcctctcctgga

SEQ ID NO: 1573332 - DNA, 25 bp, Homo sapien
ggtgtggcattcacagtgctcattc

SEQ ID NO: 1573333 - DNA, 25 bp, Homo sapien
acagtgctcattcttctcgccgaag

SEQ ID NO: 1573334 - DNA, 25 bp, Homo sapien
agaagcatgtcacctcgtccccagg

SEQ ID NO: 1573335 - DNA, 25 bp, Homo sapien
gccgaagaagccctcgccgtagaag

SEQ ID NO: 1573336 - DNA, 25 bp, Homo sapien
agcaggccctgtcggctgccactgt

SEQ ID NO: 1573337 - DNA, 25 bp, Homo sapien
ccgtggtggcaacgcgggctcccta

SEQ ID NO: 1573338 - DNA, 25 bp, Homo sapien
cctaggcctggttcggaaagctcct

SEQ ID NO: 1573339 - DNA, 25 bp, Homo sapien
agcggggatgggtgcacgcaggccc

SEQ ID NO: 1573340 - DNA, 25 bp, Homo sapien
ggtgcagggagacgcgggcagcgtg

SEQ ID NO: 1573341 - DNA, 25 bp, Homo sapien
gcgtcggcgcttccggggccgcact

SEQ ID NO: 1573342 - DNA, 25 bp, Homo sapien
catcggtgcagggagacgcgggcag

SEQ ID NO: 1573343 - DNA, 25 bp, Homo sapien
ctccccatcggtgcagggagacgcg

SEQ ID NO: 1573344 - DNA, 25 bp, Homo sapien
gtaaggcagcccatagcgccgggcc

SEQ ID NO: 1573345 - DNA, 25 bp, Homo sapien
ggccaggcgacgaaggtccacacgc

SEQ ID NO: 1573346 - DNA, 25 bp, Homo sapien
cctctcctcgcaggcggcagtgggg

SEQ ID NO: 1573347 - DNA, 25 bp, Homo sapien
tgctgaggggcccagcgggcgtggg

SEQ ID NO: 1573348 - DNA, 25 bp, Homo sapien
gcgagggcctgcttcgggatcagga

SEQ ID NO: 1573349 - DNA, 25 bp, Homo sapien
catccaggtcgatggagccgtggct

SEQ ID NO: 1573350 - DNA, 25 bp, Homo sapien
accaccagccgtaggcgcttgggtg

SEQ ID NO: 1573351 - DNA, 25 bp, Homo sapien
ttcaccgccgacatccaggtcgatg

SEQ ID NO: 1573352 - DNA, 25 bp, Homo sapien
ccaacatacccctttctggtgtggg

SEQ ID NO: 1573353 - DNA, 25 bp, Homo sapien
gaacccagtcccctcgtgagggcag

SEQ ID NO: 1573354 - DNA, 25 bp, Homo sapien
tcagagctatgctggagtcaagggt

SEQ ID NO: 1573355 - DNA, 25 bp, Homo sapien
tgccccttatggctttgctccctgg

SEQ ID NO: 1573356 - DNA, 25 bp, Homo sapien
tcaggccgtgggcgactctgtgccc

SEQ ID NO: 1573357 - DNA, 25 bp, Homo sapien
cgactctgtgcccctcatctggtcg

SEQ ID NO: 1573358 - DNA, 25 bp, Homo sapien
ctctgtgcccctcatctggtcgcag

SEQ ID NO: 1573359 - DNA, 25 bp, Homo sapien
caggccgtgggcgactctgtgcccc

SEQ ID NO: 1573360 - DNA, 25 bp, Homo sapien
tctgtaaaaccccagctctggtggg

SEQ ID NO: 1573361 - DNA, 25 bp, Homo sapien
gtaatcccaaggcaggggaggccaa

SEQ ID NO: 1573362 - DNA, 25 bp, Homo sapien
ctcctgtaatcccaaggcaggggag

SEQ ID NO: 1573363 - DNA, 25 bp, Homo sapien
gcagaaggacctcttgaggccatga

SEQ ID NO: 1573364 - DNA, 25 bp, Homo sapien
ccagaggccagacgggaccccccag

SEQ ID NO: 1573365 - DNA, 25 bp, Homo sapien
tctgtggccggcctgccccgtcacc

SEQ ID NO: 1573366 - DNA, 25 bp, Homo sapien
gaccccccagggactgacagacgga

SEQ ID NO: 1573367 - DNA, 25 bp, Homo sapien
acctcacaccctgccggctcggctt

SEQ ID NO: 1573368 - DNA, 25 bp, Homo sapien
tcacctccccagacccctggggcca

SEQ ID NO: 1573369 - DNA, 25 bp, Homo sapien
gcgctgggatcccacagcccaacat

SEQ ID NO: 1573370 - DNA, 25 bp, Homo sapien
ccagcgctgggatcccacagcccaa

SEQ ID NO: 1573371 - DNA, 25 bp, Homo sapien
aggagcaggcccagcgctgggatcc

SEQ ID NO: 1573372 - DNA, 25 bp, Homo sapien
caggcccagcgctgggatcccacag

SEQ ID NO: 1573373 - DNA, 25 bp, Homo sapien
gaagaatccctggattccatttccg

SEQ ID NO: 1573374 - DNA, 25 bp, Homo sapien
aagaatccctggattccatttccgt

SEQ ID NO: 1573375 - DNA, 25 bp, Homo sapien
gggtagaagaatccctggattccat

SEQ ID NO: 1573376 - DNA, 25 bp, Homo sapien
tccatgggtagaagaatccctggat

SEQ ID NO: 1573377 - DNA, 25 bp, Homo sapien
tagcagcaccggagacgcaggcaga

SEQ ID NO: 1573378 - DNA, 25 bp, Homo sapien
agctctcccggtcccatatgtcacc

SEQ ID NO: 1573379 - DNA, 25 bp, Homo sapien
ggtggtagcagaccccattgcggta

SEQ ID NO: 1573380 - DNA, 25 bp, Homo sapien
tctggacgctggtggtagcagaccc

SEQ ID NO: 1573381 - DNA, 25 bp, Homo sapien
cgcccacatgtgcttcctccgcacg

SEQ ID NO: 1573382 - DNA, 25 bp, Homo sapien
cacatgtgcttcctccgcacgtttt

SEQ ID NO: 1573383 - DNA, 25 bp, Homo sapien
ggaggccgctgcacgtccagaccag

SEQ ID NO: 1573384 - DNA, 25 bp, Homo sapien
gaggaggccgctgcacgtccagacc

SEQ ID NO: 1573385 - DNA, 25 bp, Homo sapien
caggaaaccgggcatatgcagcacg

SEQ ID NO: 1573386 - DNA, 25 bp, Homo sapien
gactctttggacagggcgactggca

SEQ ID NO: 1573387 - DNA, 25 bp, Homo sapien
cgtggacggcgtcttcttggtccct

SEQ ID NO: 1573388 - DNA, 25 bp, Homo sapien
ggacttggacatgtcacacggaccc

SEQ ID NO: 1573389 - DNA, 25 bp, Homo sapien
accgtatctgtattgagcagtcccc

SEQ ID NO: 1573390 - DNA, 25 bp, Homo sapien
tatctgtattgagcagtcccccggg

SEQ ID NO: 1573391 - DNA, 25 bp, Homo sapien
tccaccgtatctgtattgagcagtc

SEQ ID NO: 1573392 - DNA, 25 bp, Homo sapien
cgtccaccgtatctgtattgagcag

SEQ ID NO: 1573393 - DNA, 25 bp, Homo sapien
aacatcgagatctcgcgccaggagc

SEQ ID NO: 1573394 - DNA, 25 bp, Homo sapien
tgctcatctactcgggcgcgctgct

SEQ ID NO: 1573395 - DNA, 25 bp, Homo sapien
gctggatcctctggtacaccggcaa

SEQ ID NO: 1573396 - DNA, 25 bp, Homo sapien
agctggagcgcgactacggcctgcg

SEQ ID NO: 1573397 - DNA, 25 bp, Homo sapien
agataacgctgaggtatgggtccca

SEQ ID NO: 1573398 - DNA, 25 bp, Homo sapien
cacccagggaggtcacatatggcca

SEQ ID NO: 1573399 - DNA, 25 bp, Homo sapien
tgtaaccgcaagttaaggagccctg

SEQ ID NO: 1573400 - DNA, 25 bp, Homo sapien
cgaatattcccgagcgttgagcgaa

SEQ ID NO: 1573401 - DNA, 25 bp, Homo sapien
tagtcctatggaccagacgaagccc

SEQ ID NO: 1573402 - DNA, 25 bp, Homo sapien
cagtgcagatcagacaaggccttta

SEQ ID NO: 1573403 - DNA, 25 bp, Homo sapien
tcttcgtaagccctcgcggtgatgg

SEQ ID NO: 1573404 - DNA, 25 bp, Homo sapien
ggaatccctcggctaatcctggcag

SEQ ID NO: 1573405 - DNA, 25 bp, Homo sapien
cgaaaattcgctcaacgctcgggaa

SEQ ID NO: 1573406 - DNA, 25 bp, Homo sapien
ccatatgtgacctccctgggtggca

SEQ ID NO: 1573407 - DNA, 25 bp, Homo sapien
tgaactatataagcctagccccggc

SEQ ID NO: 1573408 - DNA, 25 bp, Homo sapien
taaaggccttgtctgatctgcactg

SEQ ID NO: 1573409 - DNA, 25 bp, Homo sapien
tttccgtctcaggtcgccgctgcga

SEQ ID NO: 1573410 - DNA, 25 bp, Homo sapien
tggggaccgacaactcctgtcgtgc

SEQ ID NO: 1573411 - DNA, 25 bp, Homo sapien
tgcgtgtacggtattaaaggcgtcg

SEQ ID NO: 1573412 - DNA, 25 bp, Homo sapien
tacggtattaaaggcgtcgcctcgc

SEQ ID NO: 1573413 - DNA, 25 bp, Homo sapien
aagcggaaatgcgtgtacggtatta

SEQ ID NO: 1573414 - DNA, 25 bp, Homo sapien
cctgtcgtgcccgcccggagaggaa

SEQ ID NO: 1573415 - DNA, 25 bp, Homo sapien
cttcgcagcggcgacctgagacgga

SEQ ID NO: 1573416 - DNA, 25 bp, Homo sapien
acctgagacggaaagaggaaggcga

SEQ ID NO: 1573417 - DNA, 25 bp, Homo sapien
taataccgtacacgcatttccgctt

SEQ ID NO: 1573418 - DNA, 25 bp, Homo sapien
gcgaggcgacgcctttaataccgta

SEQ ID NO: 1573419 - DNA, 25 bp, Homo sapien
gacgcctttaataccgtacacgcat

SEQ ID NO: 1573420 - DNA, 25 bp, Homo sapien
cacgacaggagttgtcggtccccac

SEQ ID NO: 1573421 - DNA, 25 bp, Homo sapien
aagagttctaggtcgctgtctgccc

SEQ ID NO: 1573422 - DNA, 25 bp, Homo sapien
ccctccccgtgaagtcgttgtgaat

SEQ ID NO: 1573423 - DNA, 25 bp, Homo sapien
ggcccgtggcctaacgctgctttag

SEQ ID NO: 1573424 - DNA, 25 bp, Homo sapien
tcaagggtcattggcggaccccaac

SEQ ID NO: 1573425 - DNA, 25 bp, Homo sapien
tcagtcccgcctgacaagagttcta

SEQ ID NO: 1573426 - DNA, 25 bp, Homo sapien
tgtctgacgctttccctgtgcccgt

SEQ ID NO: 1573427 - DNA, 25 bp, Homo sapien
actaaagcagcgttaggccacgggc

SEQ ID NO: 1573428 - DNA, 25 bp, Homo sapien
aacttgggtgaatgggagacccctg

SEQ ID NO: 1573429 - DNA, 25 bp, Homo sapien
tgagggcagacagcgacctagaact

SEQ ID NO: 1573430 - DNA, 25 bp, Homo sapien
tagaactcttgtcaggcgggactga

SEQ ID NO: 1573431 - DNA, 25 bp, Homo sapien
tgaaaattcacaacgacttcacggg

SEQ ID NO: 1573432 - DNA, 25 bp, Homo sapien
cgaattcaggcagccgagactagct

SEQ ID NO: 1573433 - DNA, 25 bp, Homo sapien
catctgcaatggatggtcgtgcgga

SEQ ID NO: 1573434 - DNA, 25 bp, Homo sapien
gaggaataagcagacctacagcact

SEQ ID NO: 1573435 - DNA, 25 bp, Homo sapien
cgtgcggaactgctccagtttcctg

SEQ ID NO: 1573436 - DNA, 25 bp, Homo sapien
caatggatggtcgtgcggaactgct

SEQ ID NO: 1573437 - DNA, 25 bp, Homo sapien
atggatggtcgtgcggaactgctcc

SEQ ID NO: 1573438 - DNA, 25 bp, Homo sapien
cagtttcctgatcaagaggaataag

SEQ ID NO: 1573439 - DNA, 25 bp, Homo sapien
caggaaactggagcagttccgcacg

SEQ ID NO: 1573440 - DNA, 25 bp, Homo sapien
agcagttccgcacgaccatccattg

SEQ ID NO: 1573441 - DNA, 25 bp, Homo sapien
ggagcagttccgcacgaccatccat

SEQ ID NO: 1573442 - DNA, 25 bp, Homo sapien
cttattcctcttgatcaggaaactg

SEQ ID NO: 1573443 - DNA, 25 bp, Homo sapien
tccgcacgaccatccattgcagatg

SEQ ID NO: 1573444 - DNA, 25 bp, Homo sapien
agtgctgtaggtctgcttattcctc

SEQ ID NO: 1573445 - DNA, 25 bp, Homo sapien
tgaaggcccgcaattccttccgcta

SEQ ID NO: 1573446 - DNA, 25 bp, Homo sapien
aggcccgcaattccttccgctacaa

SEQ ID NO: 1573447 - DNA, 25 bp, Homo sapien
cttgaaggcccgcaattccttccgc

SEQ ID NO: 1573448 - DNA, 25 bp, Homo sapien
ttgaaggcccgcaattccttccgct

SEQ ID NO: 1573449 - DNA, 25 bp, Homo sapien
aaggcccgcaattccttccgctaca

SEQ ID NO: 1573450 - DNA, 25 bp, Homo sapien
agcggaaggaattgcgggccttcaa

SEQ ID NO: 1573451 - DNA, 25 bp, Homo sapien
ttgtagcggaaggaattgcgggcct

SEQ ID NO: 1573452 - DNA, 25 bp, Homo sapien
gcggaaggaattgcgggccttcaag

SEQ ID NO: 1573453 - DNA, 25 bp, Homo sapien
tagcggaaggaattgcgggccttca

SEQ ID NO: 1573454 - DNA, 25 bp, Homo sapien
tgtagcggaaggaattgcgggcctt

SEQ ID NO: 1573455 - DNA, 25 bp, Homo sapien
gctacaacggactgattcaccgcaa

SEQ ID NO: 1573456 - DNA, 25 bp, Homo sapien
tgaaggcccgcaattccttccgcta

SEQ ID NO: 1573457 - DNA, 25 bp, Homo sapien
cggactgattcaccgcaagactgtg

SEQ ID NO: 1573458 - DNA, 25 bp, Homo sapien
aggcccgcaattccttccgctacaa

SEQ ID NO: 1573459 - DNA, 25 bp, Homo sapien
ttgaaggcccgcaattccttccgct

SEQ ID NO: 1573460 - DNA, 25 bp, Homo sapien
aattccttccgctacaacggactga

SEQ ID NO: 1573461 - DNA, 25 bp, Homo sapien
cacagtcttgcggtgaatcagtccg

SEQ ID NO: 1573462 - DNA, 25 bp, Homo sapien
agcggaaggaattgcgggccttcaa

SEQ ID NO: 1573463 - DNA, 25 bp, Homo sapien
tgcggtgaatcagtccgttgtagcg

SEQ ID NO: 1573464 - DNA, 25 bp, Homo sapien
ttgtagcggaaggaattgcgggcct

SEQ ID NO: 1573465 - DNA, 25 bp, Homo sapien
tagcggaaggaattgcgggccttca

SEQ ID NO: 1573466 - DNA, 25 bp, Homo sapien
gaatcagtccgttgtagcggaagga

SEQ ID NO: 1573467 - DNA, 25 bp, Homo sapien
gtggtggtcattaagcggagatccg

SEQ ID NO: 1573468 - DNA, 25 bp, Homo sapien
gtgtcgtggtggtcattaagcggag

SEQ ID NO: 1573469 - DNA, 25 bp, Homo sapien
aggtgtcgtggtggtcattaagcgg

SEQ ID NO: 1573470 - DNA, 25 bp, Homo sapien
cgtggtggtcattaagcggagatcc

SEQ ID NO: 1573471 - DNA, 25 bp, Homo sapien
ggtgtcgtggtggtcattaagcgga

SEQ ID NO: 1573472 - DNA, 25 bp, Homo sapien
tcgtggtggtcattaagcggagatc

SEQ ID NO: 1573473 - DNA, 25 bp, Homo sapien
ccgcttaatgaccaccacgacacct

SEQ ID NO: 1573474 - DNA, 25 bp, Homo sapien
cggatctccgcttaatgaccaccac

SEQ ID NO: 1573475 - DNA, 25 bp, Homo sapien
gatctccgcttaatgaccaccacga

SEQ ID NO: 1573476 - DNA, 25 bp, Homo sapien
tccgcttaatgaccaccacgacacc

SEQ ID NO: 1573477 - DNA, 25 bp, Homo sapien
ggatctccgcttaatgaccaccacg

SEQ ID NO: 1573478 - DNA, 25 bp, Homo sapien
ctccgcttaatgaccaccacgacac

SEQ ID NO: 1573479 - DNA, 25 bp, Homo sapien
tctggtttgggccagagagcggccc

SEQ ID NO: 1573480 - DNA, 25 bp, Homo sapien
ttgtctggtttgggccagagagcgg

SEQ ID NO: 1573481 - DNA, 25 bp, Homo sapien
tttgtctggtttgggccagagagcg

SEQ ID NO: 1573482 - DNA, 25 bp, Homo sapien
gttttgtctggtttgggccagagag

SEQ ID NO: 1573483 - DNA, 25 bp, Homo sapien
ctggtttgggccagagagcggcccc

SEQ ID NO: 1573484 - DNA, 25 bp, Homo sapien
tgagttttgtctggtttgggccaga

SEQ ID NO: 1573485 - DNA, 25 bp, Homo sapien
tctggcccaaaccagacaaaactca

SEQ ID NO: 1573486 - DNA, 25 bp, Homo sapien
ctctctggcccaaaccagacaaaac

SEQ ID NO: 1573487 - DNA, 25 bp, Homo sapien
ccgctctctggcccaaaccagacaa

SEQ ID NO: 1573488 - DNA, 25 bp, Homo sapien
ggggccgctctctggcccaaaccag

SEQ ID NO: 1573489 - DNA, 25 bp, Homo sapien
cgctctctggcccaaaccagacaaa

SEQ ID NO: 1573490 - DNA, 25 bp, Homo sapien
gggccgctctctggcccaaaccaga

SEQ ID NO: 1573491 - DNA, 25 bp, Homo sapien
ttttgtctggtttgggccagagagc

SEQ ID NO: 1573492 - DNA, 25 bp, Homo sapien
cccgggtctgggagctgtgattttt

SEQ ID NO: 1573493 - DNA, 25 bp, Homo sapien
cctttcccgggtctgggagctgtga

SEQ ID NO: 1573494 - DNA, 25 bp, Homo sapien
tttgggccagagagcggcccctttc

SEQ ID NO: 1573495 - DNA, 25 bp, Homo sapien
gggagctgtgattttttactgtcag

SEQ ID NO: 1573496 - DNA, 25 bp, Homo sapien
tgagttttgtctggtttgggccaga

SEQ ID NO: 1573497 - DNA, 25 bp, Homo sapien
tctggcccaaaccagacaaaactca

SEQ ID NO: 1573498 - DNA, 25 bp, Homo sapien
agtaaaaaatcacagctcccagacc

SEQ ID NO: 1573499 - DNA, 25 bp, Homo sapien
atcacagctcccagacccgggaaag

SEQ ID NO: 1573500 - DNA, 25 bp, Homo sapien
ctgacagtaaaaaatcacagctccc

SEQ ID NO: 1573501 - DNA, 25 bp, Homo sapien
gctctctggcccaaaccagacaaaa

SEQ ID NO: 1573502 - DNA, 25 bp, Homo sapien
ggaaaggggccgctctctggcccaa

SEQ ID NO: 1573503 - DNA, 25 bp, Homo sapien
tccctgaatgttcgtgtgagtcggg

SEQ ID NO: 1573504 - DNA, 25 bp, Homo sapien
cacatgtgttcttgacagggctgta

SEQ ID NO: 1573505 - DNA, 25 bp, Homo sapien
tccatacattgtgctgtcaggtgca

SEQ ID NO: 1573506 - DNA, 25 bp, Homo sapien
aagagcggtaactgccatcgcggcg

SEQ ID NO: 1573507 - DNA, 25 bp, Homo sapien
gaacttcctcggtggttgttgagag

SEQ ID NO: 1573508 - DNA, 25 bp, Homo sapien
tctaatggaggagtccagcttcaca

SEQ ID NO: 1573509 - DNA, 25 bp, Homo sapien
tcagggaatccccaaaaaggcctgc

SEQ ID NO: 1573510 - DNA, 25 bp, Homo sapien
tacagccctgtcaagaacacatgtg

SEQ ID NO: 1573511 - DNA, 25 bp, Homo sapien
gaagctggactcctccattagagac

SEQ ID NO: 1573512 - DNA, 25 bp, Homo sapien
acagagctgacaagtcggccgagag

SEQ ID NO: 1573513 - DNA, 25 bp, Homo sapien
agcctgtcccctcctaagtgtggta

SEQ ID NO: 1573514 - DNA, 25 bp, Homo sapien
taactctcaacaaccaccgaggaag

SEQ ID NO: 1573515 - DNA, 25 bp, Homo sapien
tgttcatacccattgccaggagcgt

SEQ ID NO: 1573516 - DNA, 25 bp, Homo sapien
aagctttcacctcttggattgccga

SEQ ID NO: 1573517 - DNA, 25 bp, Homo sapien
caagggtccttttactcagtggcag

SEQ ID NO: 1573518 - DNA, 25 bp, Homo sapien
gaatacatgggtggcccttcctaga

SEQ ID NO: 1573519 - DNA, 25 bp, Homo sapien
gatcagatcctaactgaagcggcag

SEQ ID NO: 1573520 - DNA, 25 bp, Homo sapien
ttcctagactaagggactggcctga

SEQ ID NO: 1573521 - DNA, 25 bp, Homo sapien
tgccactgagtaaaaggacccttgg

SEQ ID NO: 1573522 - DNA, 25 bp, Homo sapien
cagaggctcactcgtcatcacggag

SEQ ID NO: 1573523 - DNA, 25 bp, Homo sapien
cacgctcctggcaatgggtatgaac

SEQ ID NO: 1573524 - DNA, 25 bp, Homo sapien
tcggcaatccaagaggtgaaagctt

SEQ ID NO: 1573525 - DNA, 25 bp, Homo sapien
tgaggcagttccaatcaaggacctg

SEQ ID NO: 1573526 - DNA, 25 bp, Homo sapien
gaagggccacccatgtattcggcaa

SEQ ID NO: 1573527 - DNA, 25 bp, Homo sapien
cctatgtgcggaccaccatcaacaa

SEQ ID NO: 1573528 - DNA, 25 bp, Homo sapien
gaagcctgccacctcctatgtgcgg

SEQ ID NO: 1573529 - DNA, 25 bp, Homo sapien
gcggaagcctgccacctcctatgtg

SEQ ID NO: 1573530 - DNA, 25 bp, Homo sapien
aagcctgccacctcctatgtgcgga

SEQ ID NO: 1573531 - DNA, 25 bp, Homo sapien
ggaagcctgccacctcctatgtgcg

SEQ ID NO: 1573532 - DNA, 25 bp, Homo sapien
tcctatgtgcggaccaccatcaaca

SEQ ID NO: 1573533 - DNA, 25 bp, Homo sapien
cacataggaggtggcaggcttccgc

SEQ ID NO: 1573534 - DNA, 25 bp, Homo sapien
tgttgatggtggtccgcacatagga

SEQ ID NO: 1573535 - DNA, 25 bp, Homo sapien
ttgttgatggtggtccgcacatagg

SEQ ID NO: 1573536 - DNA, 25 bp, Homo sapien
ccgcacataggaggtggcaggcttc

SEQ ID NO: 1573537 - DNA, 25 bp, Homo sapien
cgcacataggaggtggcaggcttcc

SEQ ID NO: 1573538 - DNA, 25 bp, Homo sapien
tccgcacataggaggtggcaggctt

SEQ ID NO: 1573539 - DNA, 25 bp, Homo sapien
tgctcgcgccacgctcagcagcatc

SEQ ID NO: 1573540 - DNA, 25 bp, Homo sapien
cgcgccacgctcagcagcatcagac

SEQ ID NO: 1573541 - DNA, 25 bp, Homo sapien
ctcgcgccacgctcagcagcatcag

SEQ ID NO: 1573542 - DNA, 25 bp, Homo sapien
gctcgcgccacgctcagcagcatca

SEQ ID NO: 1573543 - DNA, 25 bp, Homo sapien
tcgcgccacgctcagcagcatcaga

SEQ ID NO: 1573544 - DNA, 25 bp, Homo sapien
atgctcgcgccacgctcagcagcat

SEQ ID NO: 1573545 - DNA, 25 bp, Homo sapien
tctgatgctgctgagcgtggcgcga

SEQ ID NO: 1573546 - DNA, 25 bp, Homo sapien
ctgatgctgctgagcgtggcgcgag

SEQ ID NO: 1573547 - DNA, 25 bp, Homo sapien
atgctgctgagcgtggcgcgagcat

SEQ ID NO: 1573548 - DNA, 25 bp, Homo sapien
tgatgctgctgagcgtggcgcgagc

SEQ ID NO: 1573549 - DNA, 25 bp, Homo sapien
gtctgatgctgctgagcgtggcgcg

SEQ ID NO: 1573550 - DNA, 25 bp, Homo sapien
gatgctgctgagcgtggcgcgagca

SEQ ID NO: 1573551 - DNA, 25 bp, Homo sapien
gaagggcctcccactactggttgca

SEQ ID NO: 1573552 - DNA, 25 bp, Homo sapien
gcctcccactactggttgcaatatg

SEQ ID NO: 1573553 - DNA, 25 bp, Homo sapien
gggcctcccactactggttgcaata

SEQ ID NO: 1573554 - DNA, 25 bp, Homo sapien
cttgctttcagcctactccccacac

SEQ ID NO: 1573555 - DNA, 25 bp, Homo sapien
gagtgtatgggctgagccttgctct

SEQ ID NO: 1573556 - DNA, 25 bp, Homo sapien
gcggcttgtggagtgtatgggctga

SEQ ID NO: 1573557 - DNA, 25 bp, Homo sapien
ttgcaaccagtagtgggaggccctt

SEQ ID NO: 1573558 - DNA, 25 bp, Homo sapien
cccctaggccaatgctgggtgtggg

SEQ ID NO: 1573559 - DNA, 25 bp, Homo sapien
catattgcaaccagtagtgggaggc

SEQ ID NO: 1573560 - DNA, 25 bp, Homo sapien
cagagcaaggctcagcccatacact

SEQ ID NO: 1573561 - DNA, 25 bp, Homo sapien
tattgcaaccagtagtgggaggccc

SEQ ID NO: 1573562 - DNA, 25 bp, Homo sapien
gcaaccagtagtgggaggcccttcc

SEQ ID NO: 1573563 - DNA, 25 bp, Homo sapien
tcctgcgcagccagaagcctgtgat

SEQ ID NO: 1573564 - DNA, 25 bp, Homo sapien
atcctgcgcagccagaagcctgtga

SEQ ID NO: 1573565 - DNA, 25 bp, Homo sapien
cctgcgcagccagaagcctgtgatg

SEQ ID NO: 1573566 - DNA, 25 bp, Homo sapien
tgcgcagccagaagcctgtgatggt

SEQ ID NO: 1573567 - DNA, 25 bp, Homo sapien
ctgcgcagccagaagcctgtgatgg

SEQ ID NO: 1573568 - DNA, 25 bp, Homo sapien
cgcagccagaagcctgtgatggtga

SEQ ID NO: 1573569 - DNA, 25 bp, Homo sapien
catcacaggcttctggctgcgcagg

SEQ ID NO: 1573570 - DNA, 25 bp, Homo sapien
tcacaggcttctggctgcgcaggat

SEQ ID NO: 1573571 - DNA, 25 bp, Homo sapien
aggcttctggctgcgcaggatggcg

SEQ ID NO: 1573572 - DNA, 25 bp, Homo sapien
atcacaggcttctggctgcgcagga

SEQ ID NO: 1573573 - DNA, 25 bp, Homo sapien
accatcacaggcttctggctgcgca

SEQ ID NO: 1573574 - DNA, 25 bp, Homo sapien
ttctggctgcgcaggatggcgctgg

SEQ ID NO: 1573575 - DNA, 25 bp, Homo sapien
tacccgattcaaagaaggactctgc

SEQ ID NO: 1573576 - DNA, 25 bp, Homo sapien
atgtataaagcccaccggtcctgag

SEQ ID NO: 1573577 - DNA, 25 bp, Homo sapien
gctgagcaaacgtggagacaccatt

SEQ ID NO: 1573578 - DNA, 25 bp, Homo sapien
tactgtcccattgtgaggtggcctg

SEQ ID NO: 1573579 - DNA, 25 bp, Homo sapien
tggtgacttcgtacctgctcaggag

SEQ ID NO: 1573580 - DNA, 25 bp, Homo sapien
tcctatccccaagagtgatgcccgg

SEQ ID NO: 1573581 - DNA, 25 bp, Homo sapien
tctcaggaccggtgggctttataca

SEQ ID NO: 1573582 - DNA, 25 bp, Homo sapien
tatgctggtgtgctagacaaacccc

SEQ ID NO: 1573583 - DNA, 25 bp, Homo sapien
tcctgagcaggtacgaagtcaccag

SEQ ID NO: 1573584 - DNA, 25 bp, Homo sapien
gagacctaagtgacaagagccagct

SEQ ID NO: 1573585 - DNA, 25 bp, Homo sapien
catgtgaggatcaacagcaggactc

SEQ ID NO: 1573586 - DNA, 25 bp, Homo sapien
tcaggccacctcacaatgggacagt

SEQ ID NO: 1573587 - DNA, 25 bp, Homo sapien
tgtgtcttcgtaccctcatctgtaa

SEQ ID NO: 1573588 - DNA, 25 bp, Homo sapien
gctggcatctactgggtcagggctc

SEQ ID NO: 1573589 - DNA, 25 bp, Homo sapien
tgtcgatagaccctactactcaggg

SEQ ID NO: 1573590 - DNA, 25 bp, Homo sapien
gacatgctggcatctactgggtcag

SEQ ID NO: 1573591 - DNA, 25 bp, Homo sapien
ccctactactcagggttgatgagaa

SEQ ID NO: 1573592 - DNA, 25 bp, Homo sapien
tctgtaacatgcgtgtcgatagacc

SEQ ID NO: 1573593 - DNA, 25 bp, Homo sapien
cctgacccagtagatgccagcatgt

SEQ ID NO: 1573594 - DNA, 25 bp, Homo sapien
ttctcatcaaccctgagtagtaggg

SEQ ID NO: 1573595 - DNA, 25 bp, Homo sapien
tacagatgagggtacgaagacacag

SEQ ID NO: 1573596 - DNA, 25 bp, Homo sapien
ctatcgacacgcatgttacagatga

SEQ ID NO: 1573597 - DNA, 25 bp, Homo sapien
gagccctgacccagtagatgccagc

SEQ ID NO: 1573598 - DNA, 25 bp, Homo sapien
gagtagtagggtctatcgacacgca

SEQ ID NO: 1573599 - DNA, 25 bp, Homo sapien
tcctgattgtaggaataaattaatg

SEQ ID NO: 1573600 - DNA, 25 bp, Homo sapien
tgtgcccacaaatcctgattgtagg

SEQ ID NO: 1573601 - DNA, 25 bp, Homo sapien
ctgtgcccacaaatcctgattgtag

SEQ ID NO: 1573602 - DNA, 25 bp, Homo sapien
ctacaatcaggatttgtgggcacag

SEQ ID NO: 1573603 - DNA, 25 bp, Homo sapien
cctacaatcaggatttgtgggcaca

SEQ ID NO: 1573604 - DNA, 25 bp, Homo sapien
cattaatttattcctacaatcagga

SEQ ID NO: 1573605 - DNA, 25 bp, Homo sapien
ctgtgcccacaaatcctgattgtag

SEQ ID NO: 1573606 - DNA, 25 bp, Homo sapien
tcctgattgtaggaataaattaatg

SEQ ID NO: 1573607 - DNA, 25 bp, Homo sapien
gattgtaggaataaattaatgactt

SEQ ID NO: 1573608 - DNA, 25 bp, Homo sapien
cttgactgtgcccacaaatcctgat

SEQ ID NO: 1573609 - DNA, 25 bp, Homo sapien
gcccacaaatcctgattgtaggaat

SEQ ID NO: 1573610 - DNA, 25 bp, Homo sapien
tgtgcccacaaatcctgattgtagg

SEQ ID NO: 1573611 - DNA, 25 bp, Homo sapien
ctacaatcaggatttgtgggcacag

SEQ ID NO: 1573612 - DNA, 25 bp, Homo sapien
tattcctacaatcaggatttgtggg

SEQ ID NO: 1573613 - DNA, 25 bp, Homo sapien
aagtcattaatttattcctacaatc

SEQ ID NO: 1573614 - DNA, 25 bp, Homo sapien
ttcctacaatcaggatttgtgggca

SEQ ID NO: 1573615 - DNA, 25 bp, Homo sapien
cctacaatcaggatttgtgggcaca

SEQ ID NO: 1573616 - DNA, 25 bp, Homo sapien
cattaatttattcctacaatcagga

SEQ ID NO: 1573617 - DNA, 25 bp, Homo sapien
gctcgtgtttcccaagcacctggaa

SEQ ID NO: 1573618 - DNA, 25 bp, Homo sapien
ctcctgcccgtgtttgtgaatatca

SEQ ID NO: 1573619 - DNA, 25 bp, Homo sapien
tggcgctgcccaggaatggtatcaa

SEQ ID NO: 1573620 - DNA, 25 bp, Homo sapien
tcagatggactcatgatcacagatg

SEQ ID NO: 1573621 - DNA, 25 bp, Homo sapien
gatgtcttcacatgcctatgactaa

SEQ ID NO: 1573622 - DNA, 25 bp, Homo sapien
gccagatccatgtgcagtaatgcct

SEQ ID NO: 1573623 - DNA, 25 bp, Homo sapien
tattctagtaactggctacaagaga

SEQ ID NO: 1573624 - DNA, 25 bp, Homo sapien
ttccaggtgcttgggaaacacgagc

SEQ ID NO: 1573625 - DNA, 25 bp, Homo sapien
gaagacatctgtgatcatgagtcca

SEQ ID NO: 1573626 - DNA, 25 bp, Homo sapien
aggcattactgcacatggatctggc

SEQ ID NO: 1573627 - DNA, 25 bp, Homo sapien
tgatattcacaaacacgggcaggag

SEQ ID NO: 1573628 - DNA, 25 bp, Homo sapien
gaattgataccattcctgggcagcg

SEQ ID NO: 1573629 - DNA, 25 bp, Homo sapien
cggcggctgtagtgggctctcttcc

SEQ ID NO: 1573630 - DNA, 25 bp, Homo sapien
ctggcgagcgcgataagaagctggc

SEQ ID NO: 1573631 - DNA, 25 bp, Homo sapien
aaaagacggacaagaagcgggcgct

SEQ ID NO: 1573632 - DNA, 25 bp, Homo sapien
gaagctggcggccaagaaaaagacg

SEQ ID NO: 1573633 - DNA, 25 bp, Homo sapien
cacagaatgacctggctgcggtgtt

SEQ ID NO: 1573634 - DNA, 25 bp, Homo sapien
gaccagaaagggttgtcacaactcg

SEQ ID NO: 1573635 - DNA, 25 bp, Homo sapien
cagcgtacgagatggctccatgaca

SEQ ID NO: 1573636 - DNA, 25 bp, Homo sapien
tatgcattgtcaggagaccagaaag

SEQ ID NO: 1573637 - DNA, 25 bp, Homo sapien
cttacatgccgtaaaactcagttcc

SEQ ID NO: 1573638 - DNA, 25 bp, Homo sapien
gatggggtctcattagaggcttttt

SEQ ID NO: 1573639 - DNA, 25 bp, Homo sapien
ctaaagctgagcttacatgccgtaa

SEQ ID NO: 1573640 - DNA, 25 bp, Homo sapien
gctgagcttacatgccgtaaaactc

SEQ ID NO: 1573641 - DNA, 25 bp, Homo sapien
ctcgcttctgaccatagtttgcggg

SEQ ID NO: 1573642 - DNA, 25 bp, Homo sapien
agcgagcgcgtcgaaaaccaaggaa

SEQ ID NO: 1573643 - DNA, 25 bp, Homo sapien
aaccaaggaacgtgcgcgctgacgt

SEQ ID NO: 1573644 - DNA, 25 bp, Homo sapien
cgtcacggttgaggctcggagctga

SEQ ID NO: 1573645 - DNA, 25 bp, Homo sapien
tgacgtttttactgacactgagggc

SEQ ID NO: 1573646 - DNA, 25 bp, Homo sapien
aaatgtagtcggagttccagcgccc

SEQ ID NO: 1573647 - DNA, 25 bp, Homo sapien
tgatctgcacgaaactgggtcgccc

SEQ ID NO: 1573648 - DNA, 25 bp, Homo sapien
ccttagcaatacaggacgtgggtcc

SEQ ID NO: 1573649 - DNA, 25 bp, Homo sapien
tggcacacggtaagggctcattaac

SEQ ID NO: 1573650 - DNA, 25 bp, Homo sapien
agttgattcgtgcagggtcctggca

SEQ ID NO: 1573651 - DNA, 25 bp, Homo sapien
gaagtgatccgaaaaggcctctgaa

SEQ ID NO: 1573652 - DNA, 25 bp, Homo sapien
tcagtggcccagtccgtaagcatgt

SEQ ID NO: 1573653 - DNA, 25 bp, Homo sapien
gcttaagcagaagcaaaacgtgtca

SEQ ID NO: 1573654 - DNA, 25 bp, Homo sapien
gtgaaccagactcacggacatcttg

SEQ ID NO: 1573655 - DNA, 25 bp, Homo sapien
ggaccgttggacataggttagctta

SEQ ID NO: 1573656 - DNA, 25 bp, Homo sapien
aataccacaggcgtgaaccagactc

SEQ ID NO: 1573657 - DNA, 25 bp, Homo sapien
ccggcggatgttgctcttggcccct

SEQ ID NO: 1573658 - DNA, 25 bp, Homo sapien
aataagagctaccagatgtgaatac

SEQ ID NO: 1573659 - DNA, 25 bp, Homo sapien
caaggtagcaaaggtcataccccag

SEQ ID NO: 1573660 - DNA, 25 bp, Homo sapien
cgataaagtgtgtatcaaggtagca

SEQ ID NO: 1573661 - DNA, 25 bp, Homo sapien
cccagttgtggtcgcggactccagt

SEQ ID NO: 1573662 - DNA, 25 bp, Homo sapien
agggacggccagctcgagacgcggg

SEQ ID NO: 1573663 - DNA, 25 bp, Homo sapien
tcgagacgcggggtcgcaagttccc

SEQ ID NO: 1573664 - DNA, 25 bp, Homo sapien
cggactccagttgtcaggtcttggg

SEQ ID NO: 1573665 - DNA, 25 bp, Homo sapien
ctcgggcgcaggcggtgcgcggcat

SEQ ID NO: 1573666 - DNA, 25 bp, Homo sapien
tgtgcgaggcctcgtcgagctcggg

SEQ ID NO: 1573667 - DNA, 25 bp, Homo sapien
gaccctcccattggctgtgcgaggc

SEQ ID NO: 1573668 - DNA, 25 bp, Homo sapien
ggaccctcccattggctgtgcgagg

SEQ ID NO: 1573669 - DNA, 25 bp, Homo sapien
cgacgtcgccgtcggtgcgtcacaa

SEQ ID NO: 1573670 - DNA, 25 bp, Homo sapien
gtcgccgtcggtgcgtcacaacgca

SEQ ID NO: 1573671 - DNA, 25 bp, Homo sapien
cgtcggtgcgtcacaacgcacgtac

SEQ ID NO: 1573672 - DNA, 25 bp, Homo sapien
gccgtcggtgcgtcacaacgcacgt

SEQ ID NO: 1573673 - DNA, 25 bp, Homo sapien
gcgcgaggcacccaacctttatcgg

SEQ ID NO: 1573674 - DNA, 25 bp, Homo sapien
gaggcacccaacctttatcggcggc

SEQ ID NO: 1573675 - DNA, 25 bp, Homo sapien
gcgaggcacccaacctttatcggcg

SEQ ID NO: 1573676 - DNA, 25 bp, Homo sapien
caggggcgcactccctcccaacggc

SEQ ID NO: 1573677 - DNA, 25 bp, Homo sapien
ccaatcgggggaacgagggtggcag

SEQ ID NO: 1573678 - DNA, 25 bp, Homo sapien
caatcgggggaacgagggtggcagc

SEQ ID NO: 1573679 - DNA, 25 bp, Homo sapien
ctgcggccccaatcgggggaacgag

SEQ ID NO: 1573680 - DNA, 25 bp, Homo sapien
cgtcacctgtcaccccatctcagtc

SEQ ID NO: 1573681 - DNA, 25 bp, Homo sapien
tggcctccgggatacctcgctccct

SEQ ID NO: 1573682 - DNA, 25 bp, Homo sapien
tcactgccctccgtcacctgtcacc

SEQ ID NO: 1573683 - DNA, 25 bp, Homo sapien
acttgtcactgggtccgtggcccgc

SEQ ID NO: 1573684 - DNA, 25 bp, Homo sapien
ttctcctgaaacctccagcccctcc

SEQ ID NO: 1573685 - DNA, 25 bp, Homo sapien
gttcttggcaggcaaccctgtcctt

SEQ ID NO: 1573686 - DNA, 25 bp, Homo sapien
ggcaggcaaccctgtccttgatcat

SEQ ID NO: 1573687 - DNA, 25 bp, Homo sapien
ggcaaccctgtccttgatcatgcct

SEQ ID NO: 1573688 - DNA, 25 bp, Homo sapien
gtccgcgtgggagccgaccatcaca

SEQ ID NO: 1573689 - DNA, 25 bp, Homo sapien
tccgcgtgggagccgaccatcacac

SEQ ID NO: 1573690 - DNA, 25 bp, Homo sapien
caggctggacgagttcttgaaggcc

SEQ ID NO: 1573691 - DNA, 25 bp, Homo sapien
cagggccgaggagcctttgaaagcc

SEQ ID NO: 1573692 - DNA, 25 bp, Homo sapien
gcacgctacggtggatctgcagcag

SEQ ID NO: 1573693 - DNA, 25 bp, Homo sapien
ccgggacgaccaccggaatgacttg

SEQ ID NO: 1573694 - DNA, 25 bp, Homo sapien
cgcaggttggtgctctgcgtgaagc

SEQ ID NO: 1573695 - DNA, 25 bp, Homo sapien
gcaggttggtgctctgcgtgaagct

SEQ ID NO: 1573696 - DNA, 25 bp, Homo sapien
gccgcaggttggtgctctgcgtgaa

SEQ ID NO: 1573697 - DNA, 25 bp, Homo sapien
gctgccgcaggttggtgctctgcgt

SEQ ID NO: 1573698 - DNA, 25 bp, Homo sapien
gggcggcgccgtgcgtgcgctggtg

SEQ ID NO: 1573699 - DNA, 25 bp, Homo sapien
tgccgctgcaggtaggcgtcgcaca

SEQ ID NO: 1573700 - DNA, 25 bp, Homo sapien
gcaggtaggcgtcgcacacgaagac

SEQ ID NO: 1573701 - DNA, 25 bp, Homo sapien
ctgcaggtaggcgtcgcacacgaag

SEQ ID NO: 1573702 - DNA, 25 bp, Homo sapien
aggtgccgctgcaggtaggcgtcgc

SEQ ID NO: 1573703 - DNA, 25 bp, Homo sapien
gacggtggctggtcggccttgggcg

SEQ ID NO: 1573704 - DNA, 25 bp, Homo sapien
tgctcgcagccatcgcagcggtaca

SEQ ID NO: 1573705 - DNA, 25 bp, Homo sapien
agagcccagccaccgtccggaagga

SEQ ID NO: 1573706 - DNA, 25 bp, Homo sapien
agctcctcgctgctgaatccctgct

SEQ ID NO: 1573707 - DNA, 25 bp, Homo sapien
ggcaggtcacctccgcagcctcagc

SEQ ID NO: 1573708 - DNA, 25 bp, Homo sapien
gggcaggtcacctccgcagcctcag

SEQ ID NO: 1573709 - DNA, 25 bp, Homo sapien
ctccgcagaagcgggggcggacggg

SEQ ID NO: 1573710 - DNA, 25 bp, Homo sapien
ggacgggggcggcaggcgccagcgg

SEQ ID NO: 1573711 - DNA, 25 bp, Homo sapien
ggcgggacgggggcggcaggcgcca

SEQ ID NO: 1573712 - DNA, 25 bp, Homo sapien
cgggggcggcaggcgccagcggttc

SEQ ID NO: 1573713 - DNA, 25 bp, Homo sapien
gtggtactggtagtgggacgaccac

SEQ ID NO: 1573714 - DNA, 25 bp, Homo sapien
tggtactggtagtgggacgaccact

SEQ ID NO: 1573715 - DNA, 25 bp, Homo sapien
ctggtagtgggacgaccacttgaag

SEQ ID NO: 1573716 - DNA, 25 bp, Homo sapien
tactggtagtgggacgaccacttga

SEQ ID NO: 1573717 - DNA, 25 bp, Homo sapien
gcacgacgtgttgcggaaggccttg

SEQ ID NO: 1573718 - DNA, 25 bp, Homo sapien
cgcaggcacgacgtgttgcggaagg

SEQ ID NO: 1573719 - DNA, 25 bp, Homo sapien
caggcacgacgtgttgcggaaggcc

SEQ ID NO: 1573720 - DNA, 25 bp, Homo sapien
gtgtgcacgtggcggtggcgacgca

SEQ ID NO: 1573721 - DNA, 25 bp, Homo sapien
gctgccgcaggttggaggtctgcgc

SEQ ID NO: 1573722 - DNA, 25 bp, Homo sapien
gctccgccgagtgcgtgcgctggtg

SEQ ID NO: 1573723 - DNA, 25 bp, Homo sapien
cgcaggttggaggtctgcgcgaagc

SEQ ID NO: 1573724 - DNA, 25 bp, Homo sapien
tcttgccgcagacaccgcaggcgtg

SEQ ID NO: 1573725 - DNA, 25 bp, Homo sapien
gcgtgcgtcctcaggtgccgctgca

SEQ ID NO: 1573726 - DNA, 25 bp, Homo sapien
cacattctgcagaacgatgaggctc

SEQ ID NO: 1573727 - DNA, 25 bp, Homo sapien
tgccgctgcagataggcggccataa

SEQ ID NO: 1573728 - DNA, 25 bp, Homo sapien
gtttgcaccaggaggaacgtctgag

SEQ ID NO: 1573729 - DNA, 25 bp, Homo sapien
agcaggttgggtgcctcagtagcca

SEQ ID NO: 1573730 - DNA, 25 bp, Homo sapien
ccccactggaattggagagctggcc

SEQ ID NO: 1573731 - DNA, 25 bp, Homo sapien
agagtcgagtctgttcgccatcggc

SEQ ID NO: 1573732 - DNA, 25 bp, Homo sapien
gggaccacttgcaccatctgggagg

SEQ ID NO: 1573733 - DNA, 25 bp, Homo sapien
ggtctttattagcaagcccagcctg

SEQ ID NO: 1573734 - DNA, 25 bp, Homo sapien
tcgggtctttattagcaagcccagc

SEQ ID NO: 1573735 - DNA, 25 bp, Homo sapien
cggctggcagtgagtcggggtctct

SEQ ID NO: 1573736 - DNA, 25 bp, Homo sapien
ctcgggtctttattagcaagcccag

SEQ ID NO: 1573737 - DNA, 25 bp, Homo sapien
tgccggggccttcgcgggaggagcc

SEQ ID NO: 1573738 - DNA, 25 bp, Homo sapien
gattctcatccgtgccggggccttc

SEQ ID NO: 1573739 - DNA, 25 bp, Homo sapien
cggcgacgccagcgcgtggattctc

SEQ ID NO: 1573740 - DNA, 25 bp, Homo sapien
cgacgccagcgcgtggattctcatc

SEQ ID NO: 1573741 - DNA, 25 bp, Homo sapien
gggctggggaccagcgcgagctccc

SEQ ID NO: 1573742 - DNA, 25 bp, Homo sapien
agtgacgtcagaccgcgcgcggtgg

SEQ ID NO: 1573743 - DNA, 25 bp, Homo sapien
tagcaaccgttgctaagctccccgg

SEQ ID NO: 1573744 - DNA, 25 bp, Homo sapien
gctccgggccgtagcaaccgttgct

SEQ ID NO: 1573745 - DNA, 25 bp, Homo sapien
ctgggaggaaccgagctgtgaccct

SEQ ID NO: 1573746 - DNA, 25 bp, Homo sapien
tgcaccggtcgcctttggtccttcg

SEQ ID NO: 1573747 - DNA, 25 bp, Homo sapien
gcaccggtcgcctttggtccttcga

SEQ ID NO: 1573748 - DNA, 25 bp, Homo sapien
ctgcaccggtcgcctttggtccttc

SEQ ID NO: 1573749 - DNA, 25 bp, Homo sapien
cggtcgcctttggtccttcgacaag

SEQ ID NO: 1573750 - DNA, 25 bp, Homo sapien
gtcccgcgccacaagaacaaggacc

SEQ ID NO: 1573751 - DNA, 25 bp, Homo sapien
acgctcgctccaccccggtccccag

SEQ ID NO: 1573752 - DNA, 25 bp, Homo sapien
cccgtcccgcgccacaagaacaagg

SEQ ID NO: 1573753 - DNA, 25 bp, Homo sapien
ccacagtcgtccccgtcccgcgcca

SEQ ID NO: 1573754 - DNA, 25 bp, Homo sapien
ccagaagggagctggcgtcgtgcac

SEQ ID NO: 1573755 - DNA, 25 bp, Homo sapien
gcaccaggggcttctcatcttccct

SEQ ID NO: 1573756 - DNA, 25 bp, Homo sapien
ttcagcatctccagcaccaggggct

SEQ ID NO: 1573757 - DNA, 25 bp, Homo sapien
tccagcaccaggggcttctcatctt

SEQ ID NO: 1573758 - DNA, 25 bp, Homo sapien
atcttccctcatctcccgcactgac

SEQ ID NO: 1573759 - DNA, 25 bp, Homo sapien
aattcagtagcaatgccgcagtgag

SEQ ID NO: 1573760 - DNA, 25 bp, Homo sapien
cagtccgatgttcagtgtggcacac

SEQ ID NO: 1573761 - DNA, 25 bp, Homo sapien
acagccgactggagatgggagacca

SEQ ID NO: 1573762 - DNA, 25 bp, Homo sapien
tggctcagccatccgaaacgctagg

SEQ ID NO: 1573763 - DNA, 25 bp, Homo sapien
gagggccagggcgaaggaagccagg

SEQ ID NO: 1573764 - DNA, 25 bp, Homo sapien
gccacgcggttttccgtgtccttca

SEQ ID NO: 1573765 - DNA, 25 bp, Homo sapien
gtgtcaaggcatggagggccacgcg

SEQ ID NO: 1573766 - DNA, 25 bp, Homo sapien
caggacaaagcgcaggccgctgctg

SEQ ID NO: 1573767 - DNA, 25 bp, Homo sapien
acaggtctttgctgaattccctcac

SEQ ID NO: 1573768 - DNA, 25 bp, Homo sapien
tcacaggtctttgctgaattccctc

SEQ ID NO: 1573769 - DNA, 25 bp, Homo sapien
cacaggtctttgctgaattccctca

SEQ ID NO: 1573770 - DNA, 25 bp, Homo sapien
gaacccgcagacagtaggcgatcat

SEQ ID NO: 1573771 - DNA, 25 bp, Homo sapien
gggagagcaggtaaaagaacccgca

SEQ ID NO: 1573772 - DNA, 25 bp, Homo sapien
gcgatcatcaggtgctggcgcccct

SEQ ID NO: 1573773 - DNA, 25 bp, Homo sapien
cagacagtaggcgatcatcaggtgc

SEQ ID NO: 1573774 - DNA, 25 bp, Homo sapien
cggtgtaaaaaaccagacggatctg

SEQ ID NO: 1573775 - DNA, 25 bp, Homo sapien
gggtgtattctgctcggcctcctct

SEQ ID NO: 1573776 - DNA, 25 bp, Homo sapien
gcgcctcctaagcagtcaaccttgt

SEQ ID NO: 1573777 - DNA, 25 bp, Homo sapien
cggagtcgcaaaccctaactctggg

SEQ ID NO: 1573778 - DNA, 25 bp, Homo sapien
tggatctgagtgtgaagcccccagt

SEQ ID NO: 1573779 - DNA, 25 bp, Homo sapien
gatctgagtgtgaagcccccagtcc

SEQ ID NO: 1573780 - DNA, 25 bp, Homo sapien
tggtggatctgagtgtgaagccccc

SEQ ID NO: 1573781 - DNA, 25 bp, Homo sapien
ggtggatctgagtgtgaagccccca

SEQ ID NO: 1573782 - DNA, 25 bp, Homo sapien
ggagggagggaagtgcctgctggag

SEQ ID NO: 1573783 - DNA, 25 bp, Homo sapien
gggaagtgcctgctggaggcgccca

SEQ ID NO: 1573784 - DNA, 25 bp, Homo sapien
ggagggaagtgcctgctggaggcgc

SEQ ID NO: 1573785 - DNA, 25 bp, Homo sapien
aggggaaggagagcggggagagaag

SEQ ID NO: 1573786 - DNA, 25 bp, Homo sapien
caaggaggcaggccaagaccctcat

SEQ ID NO: 1573787 - DNA, 25 bp, Homo sapien
aacagcctggatccccaccagggcc

SEQ ID NO: 1573788 - DNA, 25 bp, Homo sapien
acagcctggatccccaccagggccg

SEQ ID NO: 1573789 - DNA, 25 bp, Homo sapien
caacagcctggatccccaccagggc

SEQ ID NO: 1573790 - DNA, 25 bp, Homo sapien
caaggtcacagtggaattcggatgg

SEQ ID NO: 1573791 - DNA, 25 bp, Homo sapien
agagagatgcggccagacacctggg

SEQ ID NO: 1573792 - DNA, 25 bp, Homo sapien
tctgtaggccagtggccctgctcac

SEQ ID NO: 1573793 - DNA, 25 bp, Homo sapien
cacctgggggattcccttgcggagc

SEQ ID NO: 1573794 - DNA, 25 bp, Homo sapien
agctgcccctcgttgccccggcaag

SEQ ID NO: 1573795 - DNA, 25 bp, Homo sapien
tgggccttccagccccggtggtggc

SEQ ID NO: 1573796 - DNA, 25 bp, Homo sapien
aggccacggcggcatcgcgcaggtc

SEQ ID NO: 1573797 - DNA, 25 bp, Homo sapien
gtgccccagcgcccgccatgccaga

SEQ ID NO: 1573798 - DNA, 25 bp, Homo sapien
agacttgctggggctaaggacttgg

SEQ ID NO: 1573799 - DNA, 25 bp, Homo sapien
aaggagctccccctgaaggagcagc

SEQ ID NO: 1573800 - DNA, 25 bp, Homo sapien
cctgggtcatctccaaaggagctcc

SEQ ID NO: 1573801 - DNA, 25 bp, Homo sapien
gaggttgggtgtctctgaactgctg

SEQ ID NO: 1573802 - DNA, 25 bp, Homo sapien
tccctggagttagccacacgctgac

SEQ ID NO: 1573803 - DNA, 25 bp, Homo sapien
atgttgagtcgtccctggagttagc

SEQ ID NO: 1573804 - DNA, 25 bp, Homo sapien
tccaggggagatgttgagtcgtccc

SEQ ID NO: 1573805 - DNA, 25 bp, Homo sapien
gagatgttgagtcgtccctggagtt

SEQ ID NO: 1573806 - DNA, 25 bp, Homo sapien
cctgtcgtcagcagaggggcccggg

SEQ ID NO: 1573807 - DNA, 25 bp, Homo sapien
ctgtcgtcagcagaggggcccgggt

SEQ ID NO: 1573808 - DNA, 25 bp, Homo sapien
tggcctgagatctgtccgccggcag

SEQ ID NO: 1573809 - DNA, 25 bp, Homo sapien
gtgagtccacgacctgagcgggcca

SEQ ID NO: 1573810 - DNA, 25 bp, Homo sapien
cctgagggagcggtggcctgagatc

SEQ ID NO: 1573811 - DNA, 25 bp, Homo sapien
gcagcccgtgaagaggtgagtccac

SEQ ID NO: 1573812 - DNA, 25 bp, Homo sapien
catcgtcacatacggtgccccagcg

SEQ ID NO: 1573813 - DNA, 25 bp, Homo sapien
caggctacagcagcgtcgcgcaggt

SEQ ID NO: 1573814 - DNA, 25 bp, Homo sapien
ggcagtctcggagggcctgttctcc

SEQ ID NO: 1573815 - DNA, 25 bp, Homo sapien
tggtcacagttgctccggccccagg

SEQ ID NO: 1573816 - DNA, 25 bp, Homo sapien
gaggcttaaacaaacggtcactggc

SEQ ID NO: 1573817 - DNA, 25 bp, Homo sapien
cctacagtcaatggatcgggcagtc

SEQ ID NO: 1573818 - DNA, 25 bp, Homo sapien
caggacttggctcaagcctgaggca

SEQ ID NO: 1573819 - DNA, 25 bp, Homo sapien
tagctccatcgctccttcaggaaaa

SEQ ID NO: 1573820 - DNA, 25 bp, Homo sapien
tagggaggagtctaacacacctgtc

SEQ ID NO: 1573821 - DNA, 25 bp, Homo sapien
caggcatggagcgtgggtctataca

SEQ ID NO: 1573822 - DNA, 25 bp, Homo sapien
tccaatgaactctgctccgaaggtc

SEQ ID NO: 1573823 - DNA, 25 bp, Homo sapien
taaatcagatgctggcgaagctccc

SEQ ID NO: 1573824 - DNA, 25 bp, Homo sapien
gcagaatcgtaaggccgtctcgttt

SEQ ID NO: 1573825 - DNA, 25 bp, Homo sapien
aggatgatgggtccagacccctccc

SEQ ID NO: 1573826 - DNA, 25 bp, Homo sapien
cgtcctcgcggtggtgacagtcatg

SEQ ID NO: 1573827 - DNA, 25 bp, Homo sapien
acagcggcgtctcgcaggtcccagg

SEQ ID NO: 1573828 - DNA, 25 bp, Homo sapien
gagttgttgctgtccgtgggggccg

SEQ ID NO: 1573829 - DNA, 25 bp, Homo sapien
gaggaggtgaaacgcctgccgtccc

SEQ ID NO: 1573830 - DNA, 25 bp, Homo sapien
tggagcctggctcgtcatggtggac

SEQ ID NO: 1573831 - DNA, 25 bp, Homo sapien
cggcttccggtccaggctcccaaag

SEQ ID NO: 1573832 - DNA, 25 bp, Homo sapien
cagtcgacctgagcacttgctgggc

SEQ ID NO: 1573833 - DNA, 25 bp, Homo sapien
gcagtcggacagtgaagcctcggtc

SEQ ID NO: 1573834 - DNA, 25 bp, Homo sapien
gcagttgtgctttccccagggagca

SEQ ID NO: 1573835 - DNA, 25 bp, Homo sapien
cagaccacagctgaatcccgcatgt

SEQ ID NO: 1573836 - DNA, 25 bp, Homo sapien
caggcatcccgatctctccccagtc

SEQ ID NO: 1573837 - DNA, 25 bp, Homo sapien
tcccgggagccaggcatcccgatct

SEQ ID NO: 1573838 - DNA, 25 bp, Homo sapien
gggagccaggcatcccgatctctcc

SEQ ID NO: 1573839 - DNA, 25 bp, Homo sapien
ccacttcttagtactcttaggcatt

SEQ ID NO: 1573840 - DNA, 25 bp, Homo sapien
cctggagtgtttcgtggttggcatc

SEQ ID NO: 1573841 - DNA, 25 bp, Homo sapien
cgtggtcggccttctggtaaactca

SEQ ID NO: 1573842 - DNA, 25 bp, Homo sapien
catggtcttagtggtccgttctcgg

SEQ ID NO: 1573843 - DNA, 25 bp, Homo sapien
taaactcagaggtaggtcttcggga

SEQ ID NO: 1573844 - DNA, 25 bp, Homo sapien
gccgtaatgggttttgcctactcga

SEQ ID NO: 1573845 - DNA, 25 bp, Homo sapien
cagtcgctcagtgaggcctcgcttc

SEQ ID NO: 1573846 - DNA, 25 bp, Homo sapien
gtcttcctcgtggtcacagttgtgc

SEQ ID NO: 1573847 - DNA, 25 bp, Homo sapien
ggttgggcccatcggccagacgaac

SEQ ID NO: 1573848 - DNA, 25 bp, Homo sapien
ttagagtcgaccatggtgccgtcac

SEQ ID NO: 1573849 - DNA, 25 bp, Homo sapien
ctttagagtcgaccatggtgccgtc

SEQ ID NO: 1573850 - DNA, 25 bp, Homo sapien
gtcgaccatggtgccgtcacctggc

SEQ ID NO: 1573851 - DNA, 25 bp, Homo sapien
gagtcgaccatggtgccgtcacctg

SEQ ID NO: 1573852 - DNA, 25 bp, Homo sapien
cctccccttttggaatcttctggag

SEQ ID NO: 1573853 - DNA, 25 bp, Homo sapien
tggagaaattggggtaatggttgac

SEQ ID NO: 1573854 - DNA, 25 bp, Homo sapien
aggtccaggggggataatcgtcata

SEQ ID NO: 1573855 - DNA, 25 bp, Homo sapien
ggataatcgtcatagtctgtgtagc

SEQ ID NO: 1573856 - DNA, 25 bp, Homo sapien
tgtgtccaggtacccccgctgtggt

SEQ ID NO: 1573857 - DNA, 25 bp, Homo sapien
ggagagtgtgtccaggtacccccgc

SEQ ID NO: 1573858 - DNA, 25 bp, Homo sapien
cctgatggtgtgtcccacgtccagg

SEQ ID NO: 1573859 - DNA, 25 bp, Homo sapien
tggtgtgtcccacgtccagggaagc

SEQ ID NO: 1573860 - DNA, 25 bp, Homo sapien
gttggtcctagtttgcctgcggtag

SEQ ID NO: 1573861 - DNA, 25 bp, Homo sapien
ccaagagttggtcctagtttgcctg

SEQ ID NO: 1573862 - DNA, 25 bp, Homo sapien
tggaatctgtctctttaccccagga

SEQ ID NO: 1573863 - DNA, 25 bp, Homo sapien
catgctcagccgataaccctttgtt

SEQ ID NO: 1573864 - DNA, 25 bp, Homo sapien
cacccagctaatgttcatatcttgg

SEQ ID NO: 1573865 - DNA, 25 bp, Homo sapien
aggacaaataccgtcccagtctcct

SEQ ID NO: 1573866 - DNA, 25 bp, Homo sapien
cggtggccggcgctcgggccacggt

SEQ ID NO: 1573867 - DNA, 25 bp, Homo sapien
gtcctggtcgcagcgggccgcggtg

SEQ ID NO: 1573868 - DNA, 25 bp, Homo sapien
cggcgctcgggccacggtttcctcg

SEQ ID NO: 1573869 - DNA, 25 bp, Homo sapien
gggcgctgtcctggtcgcagcgggc

SEQ ID NO: 1573870 - DNA, 25 bp, Homo sapien
tgtccggagcgtcagaggtcgcctc

SEQ ID NO: 1573871 - DNA, 25 bp, Homo sapien
tcgcctcggacgtcaaggctgagtg

SEQ ID NO: 1573872 - DNA, 25 bp, Homo sapien
agtcaggggtggacaaagcaaagtc

SEQ ID NO: 1573873 - DNA, 25 bp, Homo sapien
aaagtcagggcttgtcaagatgagg

SEQ ID NO: 1573874 - DNA, 25 bp, Homo sapien
cagaggtcagctctttgggcaaggt

SEQ ID NO: 1573875 - DNA, 25 bp, Homo sapien
ttgtgtcagattctgggacctgctc

SEQ ID NO: 1573876 - DNA, 25 bp, Homo sapien
caaggtgggtaagggcgtgggtgag

SEQ ID NO: 1573877 - DNA, 25 bp, Homo sapien
cctccgacggtgtagaagggtcaga

SEQ ID NO: 1573878 - DNA, 25 bp, Homo sapien
ggtctggggatctagaatattctga

SEQ ID NO: 1573879 - DNA, 25 bp, Homo sapien
ggggtctggggatctagaatattct

SEQ ID NO: 1573880 - DNA, 25 bp, Homo sapien
gaggggtctggggatctagaatatt

SEQ ID NO: 1573881 - DNA, 25 bp, Homo sapien
gggatctagaatattctgagactgt

SEQ ID NO: 1573882 - DNA, 25 bp, Homo sapien
gatgaggcatcgtggtgggctgcat

SEQ ID NO: 1573883 - DNA, 25 bp, Homo sapien
ccatgcttgtggctgtggaggacct

SEQ ID NO: 1573884 - DNA, 25 bp, Homo sapien
cttgactgttggtgctagagtggga

SEQ ID NO: 1573885 - DNA, 25 bp, Homo sapien
tcaggaatcatggtggagtgagtga

SEQ ID NO: 1573886 - DNA, 25 bp, Homo sapien
caaggggaggatgatccaaggggtg

SEQ ID NO: 1573887 - DNA, 25 bp, Homo sapien
ggggccacacatggaccatgggggc

SEQ ID NO: 1573888 - DNA, 25 bp, Homo sapien
ggccacacatggaccatgggggcct

SEQ ID NO: 1573889 - DNA, 25 bp, Homo sapien
tgttggggccacacatggaccatgg

SEQ ID NO: 1573890 - DNA, 25 bp, Homo sapien
ccacacatggaccatgggggcctgg

SEQ ID NO: 1573891 - DNA, 25 bp, Homo sapien
ccagggcaggtggctcacaagccat

SEQ ID NO: 1573892 - DNA, 25 bp, Homo sapien
accagggcaggtggctcacaagcca

SEQ ID NO: 1573893 - DNA, 25 bp, Homo sapien
ccgctcctgttccacgacctgggtc

SEQ ID NO: 1573894 - DNA, 25 bp, Homo sapien
ttggtgcaggcatgctggtggtcca

SEQ ID NO: 1573895 - DNA, 25 bp, Homo sapien
tgcaggcatgctggtggtccaggcc

SEQ ID NO: 1573896 - DNA, 25 bp, Homo sapien
ggttggtgcaggcatgctggtggtc

SEQ ID NO: 1573897 - DNA, 25 bp, Homo sapien
ggtgcaggcatgctggtggtccagg

SEQ ID NO: 1573898 - DNA, 25 bp, Homo sapien
gtcttaagcccctcaaatcctggag

SEQ ID NO: 1573899 - DNA, 25 bp, Homo sapien
tgtcttaagcccctcaaatcctgga

SEQ ID NO: 1573900 - DNA, 25 bp, Homo sapien
ttaagcccctcaaatcctggagagg

SEQ ID NO: 1573901 - DNA, 25 bp, Homo sapien
ggtgtcttaagcccctcaaatcctg

SEQ ID NO: 1573902 - DNA, 25 bp, Homo sapien
gtgaagtttagccaatgggtgttca

SEQ ID NO: 1573903 - DNA, 25 bp, Homo sapien
cacatctgtgaagtttagccaatgg

SEQ ID NO: 1573904 - DNA, 25 bp, Homo sapien
tctgtgaagtttagccaatgggtgt

SEQ ID NO: 1573905 - DNA, 25 bp, Homo sapien
ggccacatctgtgaagtttagccaa

SEQ ID NO: 1573906 - DNA, 25 bp, Homo sapien
gttggtcttgaactcttgacctcag

SEQ ID NO: 1573907 - DNA, 25 bp, Homo sapien
agctcactacgacctccgccttcca

SEQ ID NO: 1573908 - DNA, 25 bp, Homo sapien
tccaggttcaagcgattcccctgcc

SEQ ID NO: 1573909 - DNA, 25 bp, Homo sapien
ctcagctcactacgacctccgcctt

SEQ ID NO: 1573910 - DNA, 25 bp, Homo sapien
tcgagctggccatcgagagggtggc

SEQ ID NO: 1573911 - DNA, 25 bp, Homo sapien
aggaggcggtcgcagcgtggcctga

SEQ ID NO: 1573912 - DNA, 25 bp, Homo sapien
gtggccaaggagacggccgaaccca

SEQ ID NO: 1573913 - DNA, 25 bp, Homo sapien
tggctcaggagcacgcgggcggcga

SEQ ID NO: 1573914 - DNA, 25 bp, Homo sapien
tactcagctctcctacagatgggtg

SEQ ID NO: 1573915 - DNA, 25 bp, Homo sapien
caagctgtgggtatactcctgcaaa

SEQ ID NO: 1573916 - DNA, 25 bp, Homo sapien
cctggaattgctggctcggtaagaa

SEQ ID NO: 1573917 - DNA, 25 bp, Homo sapien
gaaaggacctgtttgctcgcactct

SEQ ID NO: 1573918 - DNA, 25 bp, Homo sapien
atgcctggctaatttttgtaccttt

SEQ ID NO: 1573919 - DNA, 25 bp, Homo sapien
ttataggcatgtgccattatgcctg

SEQ ID NO: 1573920 - DNA, 25 bp, Homo sapien
ctgcccacctgggcctcccaaagtg

SEQ ID NO: 1573921 - DNA, 25 bp, Homo sapien
taccttttgtagagatggggtttca

SEQ ID NO: 1573922 - DNA, 25 bp, Homo sapien
ggtacctacttcataaagcaaggag

SEQ ID NO: 1573923 - DNA, 25 bp, Homo sapien
tactgagactcgctaggtttggaaa

SEQ ID NO: 1573924 - DNA, 25 bp, Homo sapien
tgtaatacgctcacaagagtaagct

SEQ ID NO: 1573925 - DNA, 25 bp, Homo sapien
ctcctatctgtttgtgaagtgaaac

SEQ ID NO: 1573926 - DNA, 25 bp, Homo sapien
ggtagccgtaagtccccaagacatg

SEQ ID NO: 1573927 - DNA, 25 bp, Homo sapien
tgagcaatgggtctccacaagtacc

SEQ ID NO: 1573928 - DNA, 25 bp, Homo sapien
tgctccgagtgcgagaagctgttcc

SEQ ID NO: 1573929 - DNA, 25 bp, Homo sapien
caagaagatcttcggctgctccgag

SEQ ID NO: 1573930 - DNA, 25 bp, Homo sapien
cttggaggagcaccggcgggtcagc

SEQ ID NO: 1573931 - DNA, 25 bp, Homo sapien
gagcaccggcgggtcagccacggtg

SEQ ID NO: 1573932 - DNA, 25 bp, Homo sapien
gcgggtcagccacggtgagggcggc

SEQ ID NO: 1573933 - DNA, 25 bp, Homo sapien
accggcgggtcagccacggtgaggg

SEQ ID NO: 1573934 - DNA, 25 bp, Homo sapien
cgggcccggccacctacggctgcgg

SEQ ID NO: 1573935 - DNA, 25 bp, Homo sapien
ccactgcggggctctgtacgcggcg

SEQ ID NO: 1573936 - DNA, 25 bp, Homo sapien
gcccggccacctacggctgcggcca

SEQ ID NO: 1573937 - DNA, 25 bp, Homo sapien
ctgcggggctctgtacgcggcgctg

SEQ ID NO: 1573938 - DNA, 25 bp, Homo sapien
agtgggaaataacccagcaccacat

SEQ ID NO: 1573939 - DNA, 25 bp, Homo sapien
tgtccccagtgggaaataacccagc

SEQ ID NO: 1573940 - DNA, 25 bp, Homo sapien
tccccagtgggaaataacccagcac

SEQ ID NO: 1573941 - DNA, 25 bp, Homo sapien
cccagtgggaaataacccagcacca

SEQ ID NO: 1573942 - DNA, 25 bp, Homo sapien
gccggggctcgcgagtgtgcgcgcg

SEQ ID NO: 1573943 - DNA, 25 bp, Homo sapien
atgtcgccggggctcgcgagtgtgc

SEQ ID NO: 1573944 - DNA, 25 bp, Homo sapien
ctcatttgcatgtcgccggggctcg

SEQ ID NO: 1573945 - DNA, 25 bp, Homo sapien
tcatttgcatgtcgccggggctcgc

SEQ ID NO: 1573946 - DNA, 25 bp, Homo sapien
cattacgagggctcagtcctgggtt

SEQ ID NO: 1573947 - DNA, 25 bp, Homo sapien
catagttctacgtacttgcccagac

SEQ ID NO: 1573948 - DNA, 25 bp, Homo sapien
aaaccagggttgtcaggagaatcga

SEQ ID NO: 1573949 - DNA, 25 bp, Homo sapien
tctttactctctgcgtggccttggg

SEQ ID NO: 1573950 - DNA, 25 bp, Homo sapien
tacacaattttagctatgctggtgg

SEQ ID NO: 1573951 - DNA, 25 bp, Homo sapien
tttagctatgctggtgggtaaaaca

SEQ ID NO: 1573952 - DNA, 25 bp, Homo sapien
gggtaaaacagtgagatgatcttgt

SEQ ID NO: 1573953 - DNA, 25 bp, Homo sapien
cagatacacaattttagctatgctg

SEQ ID NO: 1573954 - DNA, 25 bp, Homo sapien
gtctcttgacaaaggtgtgtttgac

SEQ ID NO: 1573955 - DNA, 25 bp, Homo sapien
tctcttgacaaaggtgtgtttgaca

SEQ ID NO: 1573956 - DNA, 25 bp, Homo sapien
cagagtcagtgctcacagggtctag

SEQ ID NO: 1573957 - DNA, 25 bp, Homo sapien
cacagggtctagagcacccctgtgt

SEQ ID NO: 1573958 - DNA, 25 bp, Homo sapien
tcagtgctcacagggtctagagcac

SEQ ID NO: 1573959 - DNA, 25 bp, Homo sapien
tgctcacagggtctagagcacccct

SEQ ID NO: 1573960 - DNA, 25 bp, Homo sapien
tgagcagtggggggcttgggtctgg

SEQ ID NO: 1573961 - DNA, 25 bp, Homo sapien
cagtggggggcttgggtctgggcac

SEQ ID NO: 1573962 - DNA, 25 bp, Homo sapien
agcagtggggggcttgggtctgggc

SEQ ID NO: 1573963 - DNA, 25 bp, Homo sapien
agtggggggcttgggtctgggcact

SEQ ID NO: 1573964 - DNA, 25 bp, Homo sapien
agggaggccttgagtgtccgatttg

SEQ ID NO: 1573965 - DNA, 25 bp, Homo sapien
aggcgaaggcaacgggtctgggctg

SEQ ID NO: 1573966 - DNA, 25 bp, Homo sapien
gtgtccgatttgaggaggtggctcc

SEQ ID NO: 1573967 - DNA, 25 bp, Homo sapien
caaaggcgaaggcaacgggtctggg

SEQ ID NO: 1573968 - DNA, 25 bp, Homo sapien
ggtcttgccgcaaaccttgcactgg

SEQ ID NO: 1573969 - DNA, 25 bp, Homo sapien
tgttggcctctgtaaagcgcagccg

SEQ ID NO: 1573970 - DNA, 25 bp, Homo sapien
cactggtgcggcttcagctctgagt

SEQ ID NO: 1573971 - DNA, 25 bp, Homo sapien
cttcagagaccgtatagggcacacc

SEQ ID NO: 1573972 - DNA, 25 bp, Homo sapien
cctgctgtggccgggatgccctcct

SEQ ID NO: 1573973 - DNA, 25 bp, Homo sapien
gctgtggccgggatgccctcctcgt

SEQ ID NO: 1573974 - DNA, 25 bp, Homo sapien
ctgtggccgggatgccctcctcgtc

SEQ ID NO: 1573975 - DNA, 25 bp, Homo sapien
tgctgtggccgggatgccctcctcg

SEQ ID NO: 1573976 - DNA, 25 bp, Homo sapien
cagctggaccccaaagtttaggtct

SEQ ID NO: 1573977 - DNA, 25 bp, Homo sapien
cctgctctaaacctggcccagggag

SEQ ID NO: 1573978 - DNA, 25 bp, Homo sapien
ccctgcctccaagggtctgttagtc

SEQ ID NO: 1573979 - DNA, 25 bp, Homo sapien
acctgctcccacaacgggaagacca

SEQ ID NO: 1573980 - DNA, 25 bp, Homo sapien
aggaggcggaggaggcgccgccgct

SEQ ID NO: 1573981 - DNA, 25 bp, Homo sapien
gccgaggaggcggaggaggcgccgc

SEQ ID NO: 1573982 - DNA, 25 bp, Homo sapien
gtctccgccgggaggaggccgagga

SEQ ID NO: 1573983 - DNA, 25 bp, Homo sapien
gaggcggaggaggcgccgccgctcc

SEQ ID NO: 1573984 - DNA, 25 bp, Homo sapien
tgtgccgctgcgatgggggggtggc

SEQ ID NO: 1573985 - DNA, 25 bp, Homo sapien
gggcattcttaaggggaatcactgg

SEQ ID NO: 1573986 - DNA, 25 bp, Homo sapien
aggggcattcttaaggggaatcact

SEQ ID NO: 1573987 - DNA, 25 bp, Homo sapien
tgccgctgcgatgggggggtggctt

SEQ ID NO: 1573988 - DNA, 25 bp, Homo sapien
gatgtgagtgtgaaggaactctaga

SEQ ID NO: 1573989 - DNA, 25 bp, Homo sapien
tggagctaagcaggcggatatttct

SEQ ID NO: 1573990 - DNA, 25 bp, Homo sapien
gatatttctacctgaggcgggagag

SEQ ID NO: 1573991 - DNA, 25 bp, Homo sapien
caggcggatatttctacctgaggcg

SEQ ID NO: 1573992 - DNA, 25 bp, Homo sapien
caacagttgttcacgccataggaag

SEQ ID NO: 1573993 - DNA, 25 bp, Homo sapien
gaagtaatgaagacgggctgaccgc

SEQ ID NO: 1573994 - DNA, 25 bp, Homo sapien
tgcctacgagaaaagaagtcacacc

SEQ ID NO: 1573995 - DNA, 25 bp, Homo sapien
tgatcaactagactgtgagaccccg

SEQ ID NO: 1573996 - DNA, 25 bp, Homo sapien
gcggagggtgagtcggtgaagggcc

SEQ ID NO: 1573997 - DNA, 25 bp, Homo sapien
tgggcggagggtgagtcggtgaagg

SEQ ID NO: 1573998 - DNA, 25 bp, Homo sapien
ccatgaggtctgacccgcttcctgt

SEQ ID NO: 1573999 - DNA, 25 bp, Homo sapien
gaagggcccatgaggtctgacccgc

SEQ ID NO: 1574000 - DNA, 25 bp, Homo sapien
tgtgttctcaactcccacccactcc

SEQ ID NO: 1574001 - DNA, 25 bp, Homo sapien
cccggcgccgctgcccgctgggttc

SEQ ID NO: 1574002 - DNA, 25 bp, Homo sapien
ccgctgcccgctgggttcgcctcca

SEQ ID NO: 1574003 - DNA, 25 bp, Homo sapien
gcgccgctgcccgctgggttcgcct

SEQ ID NO: 1574004 - DNA, 25 bp, Homo sapien
gtcctcgcccccgatgccgctgctc

SEQ ID NO: 1574005 - DNA, 25 bp, Homo sapien
ctcgaagcgctggtggttgaggaat

SEQ ID NO: 1574006 - DNA, 25 bp, Homo sapien
cgccttggcgtgttccccatacagt

SEQ ID NO: 1574007 - DNA, 25 bp, Homo sapien
cccatacagttccatgggctcgaag

SEQ ID NO: 1574008 - DNA, 25 bp, Homo sapien
cagttccatgggctcgaagcgctgg

SEQ ID NO: 1574009 - DNA, 25 bp, Homo sapien
gcacctccgccttgggcttgaaggt

SEQ ID NO: 1574010 - DNA, 25 bp, Homo sapien
actggggcgggtagtcatactgcgg

SEQ ID NO: 1574011 - DNA, 25 bp, Homo sapien
aggacgaggagggcacctccgcctt

SEQ ID NO: 1574012 - DNA, 25 bp, Homo sapien
gggcggatcgggcttcttggcttgg

SEQ ID NO: 1574013 - DNA, 25 bp, Homo sapien
tggtgccccgagaggtccacgatgc

SEQ ID NO: 1574014 - DNA, 25 bp, Homo sapien
acgcgggccctcctcgcttcaggtt

SEQ ID NO: 1574015 - DNA, 25 bp, Homo sapien
caggttcccaaacaagtgctggtgc

SEQ ID NO: 1574016 - DNA, 25 bp, Homo sapien
aacaagtgctggtgccccgagaggt

SEQ ID NO: 1574017 - DNA, 25 bp, Homo sapien
gcgggagcgcccagcccaggcgtca

SEQ ID NO: 1574018 - DNA, 25 bp, Homo sapien
ctggggcccccgcgggagcgcccag

SEQ ID NO: 1574019 - DNA, 25 bp, Homo sapien
gcccccgcgggagcgcccagcccag

SEQ ID NO: 1574020 - DNA, 25 bp, Homo sapien
ctgcgagggggcaggaagcggccct

SEQ ID NO: 1574021 - DNA, 25 bp, Homo sapien
cagacgccgcattcgtagggcctct

SEQ ID NO: 1574022 - DNA, 25 bp, Homo sapien
cagtctccggaagtagcccttgtcg

SEQ ID NO: 1574023 - DNA, 25 bp, Homo sapien
tgcaccagcatgtgctggaccaggt

SEQ ID NO: 1574024 - DNA, 25 bp, Homo sapien
aaggacttctggcacacgccgcagg

SEQ ID NO: 1574025 - DNA, 25 bp, Homo sapien
cgcggccggtggcacgtccttgtgg

SEQ ID NO: 1574026 - DNA, 25 bp, Homo sapien
cggccggtggcacgtccttgtggca

SEQ ID NO: 1574027 - DNA, 25 bp, Homo sapien
ccggtggcacgtccttgtggcagcg

SEQ ID NO: 1574028 - DNA, 25 bp, Homo sapien
cggtggcacgtccttgtggcagcgg

SEQ ID NO: 1574029 - DNA, 25 bp, Homo sapien
gcagagtgggcaggcgaacgggcca

SEQ ID NO: 1574030 - DNA, 25 bp, Homo sapien
gggcaggcgccacgggcgtggctgg

SEQ ID NO: 1574031 - DNA, 25 bp, Homo sapien
tgggcaggcgaacgggccatcgcca

SEQ ID NO: 1574032 - DNA, 25 bp, Homo sapien
tcccgtctgcggagggggcaggcgc

SEQ ID NO: 1574033 - DNA, 25 bp, Homo sapien
tctccctgcggttgaagcttttgct

SEQ ID NO: 1574034 - DNA, 25 bp, Homo sapien
tgcggttgaagcttttgctgcacac

SEQ ID NO: 1574035 - DNA, 25 bp, Homo sapien
ttcagactctccctgcggttgaagc

SEQ ID NO: 1574036 - DNA, 25 bp, Homo sapien
ggttgaagcttttgctgcacacgga

SEQ ID NO: 1574037 - DNA, 25 bp, Homo sapien
ggcgcaggaggtcggccgagtgcgt

SEQ ID NO: 1574038 - DNA, 25 bp, Homo sapien
ctgcggagccgagtaggacttgccg

SEQ ID NO: 1574039 - DNA, 25 bp, Homo sapien
cgcagatgccgcagggcaggcgcag

SEQ ID NO: 1574040 - DNA, 25 bp, Homo sapien
ggagccgagtaggacttgccgcaca

SEQ ID NO: 1574041 - DNA, 25 bp, Homo sapien
cgccccgtccttgggcgcctccgca

SEQ ID NO: 1574042 - DNA, 25 bp, Homo sapien
gccccgtccttgggcgcctccgcag

SEQ ID NO: 1574043 - DNA, 25 bp, Homo sapien
gggacgggcacagcgccgtacacca

SEQ ID NO: 1574044 - DNA, 25 bp, Homo sapien
gagcgggacgggcacagcgccgtac

SEQ ID NO: 1574045 - DNA, 25 bp, Homo sapien
cgccgccttctcgctgtctgtggtg

SEQ ID NO: 1574046 - DNA, 25 bp, Homo sapien
cccaggagcgggacgggcacagcgc

SEQ ID NO: 1574047 - DNA, 25 bp, Homo sapien
tgcaccacgtgatgcttgctcaagt

SEQ ID NO: 1574048 - DNA, 25 bp, Homo sapien
cttgccgcagagctcgcacttgtag

SEQ ID NO: 1574049 - DNA, 25 bp, Homo sapien
ctcaagtggaaggattcgcggaagc

SEQ ID NO: 1574050 - DNA, 25 bp, Homo sapien
gctcatggcgcttcagggtctcgcg

SEQ ID NO: 1574051 - DNA, 25 bp, Homo sapien
cgcagtccgagcaggcgtagctcag

SEQ ID NO: 1574052 - DNA, 25 bp, Homo sapien
tgtgactcatgacgtgaaagagatc

SEQ ID NO: 1574053 - DNA, 25 bp, Homo sapien
cgcaggcgtcgcagccgtatggctt

SEQ ID NO: 1574054 - DNA, 25 bp, Homo sapien
aaagagatccgggaagtgctcgccg

SEQ ID NO: 1574055 - DNA, 25 bp, Homo sapien
gctcgggggcggcctggtggaccag

SEQ ID NO: 1574056 - DNA, 25 bp, Homo sapien
tggccgcatccgtgccgctggagcc

SEQ ID NO: 1574057 - DNA, 25 bp, Homo sapien
cgctcgggggcggcctggtggacca

SEQ ID NO: 1574058 - DNA, 25 bp, Homo sapien
ctggccgcatccgtgccgctggagc

SEQ ID NO: 1574059 - DNA, 25 bp, Homo sapien
acccctgccagtgccgccacggccg

SEQ ID NO: 1574060 - DNA, 25 bp, Homo sapien
acacccctgccagtgccgccacggc

SEQ ID NO: 1574061 - DNA, 25 bp, Homo sapien
ccagacacccctgccagtgccgcca

SEQ ID NO: 1574062 - DNA, 25 bp, Homo sapien
agacacccctgccagtgccgccacg

SEQ ID NO: 1574063 - DNA, 25 bp, Homo sapien
ggccgcacgtggcacagctgaagcg

SEQ ID NO: 1574064 - DNA, 25 bp, Homo sapien
ctggccgcacgtggcacagctgaag

SEQ ID NO: 1574065 - DNA, 25 bp, Homo sapien
tggccgcacgtggcacagctgaagc

SEQ ID NO: 1574066 - DNA, 25 bp, Homo sapien
agcccagggtccgtcgcaccaggtg

SEQ ID NO: 1574067 - DNA, 25 bp, Homo sapien
acgtacttgtgagtcacgaggccca

SEQ ID NO: 1574068 - DNA, 25 bp, Homo sapien
caccaggtgcacgtacttgtgagtc

SEQ ID NO: 1574069 - DNA, 25 bp, Homo sapien
ttgtgagtcacgaggcccaggaagt

SEQ ID NO: 1574070 - DNA, 25 bp, Homo sapien
ctcaggtagaagaagcccttgccgc

SEQ ID NO: 1574071 - DNA, 25 bp, Homo sapien
ttgccgcagtgctcacagcggtagg

SEQ ID NO: 1574072 - DNA, 25 bp, Homo sapien
tacggccgctgttccgtgtggcagc

SEQ ID NO: 1574073 - DNA, 25 bp, Homo sapien
acgactgcgcgaagcgcttggcgca

SEQ ID NO: 1574074 - DNA, 25 bp, Homo sapien
gggcagcggagctcgggccgcggcg

SEQ ID NO: 1574075 - DNA, 25 bp, Homo sapien
cggggcagcggagctcgggccgcgg

SEQ ID NO: 1574076 - DNA, 25 bp, Homo sapien
gcggggcagcggagctcgggccgcg

SEQ ID NO: 1574077 - DNA, 25 bp, Homo sapien
ggggcagcggagctcgggccgcggc

SEQ ID NO: 1574078 - DNA, 25 bp, Homo sapien
aggtgttggcgaagccctcgccgca

SEQ ID NO: 1574079 - DNA, 25 bp, Homo sapien
aggttctcggccttgtgcgccaggc

SEQ ID NO: 1574080 - DNA, 25 bp, Homo sapien
agccaggtgcttacggaagtagccg

SEQ ID NO: 1574081 - DNA, 25 bp, Homo sapien
tcttgaggccgtaggtgttggcgaa

SEQ ID NO: 1574082 - DNA, 25 bp, Homo sapien
tcagtcttgagcctgtcgggcgtgc

SEQ ID NO: 1574083 - DNA, 25 bp, Homo sapien
ctgatgcgggtcacaaacgagggtt

SEQ ID NO: 1574084 - DNA, 25 bp, Homo sapien
tattctccgctctgtacaagccgcg

SEQ ID NO: 1574085 - DNA, 25 bp, Homo sapien
cctgaaggtcgccagtccgtgtgaa

SEQ ID NO: 1574086 - DNA, 25 bp, Homo sapien
ttgccaccatgtgatccccactctc

SEQ ID NO: 1574087 - DNA, 25 bp, Homo sapien
tttgtgctttgccaccatgtgatcc

SEQ ID NO: 1574088 - DNA, 25 bp, Homo sapien
tttgccaccatgtgatccccactct

SEQ ID NO: 1574089 - DNA, 25 bp, Homo sapien
gtgctttgccaccatgtgatcccca

SEQ ID NO: 1574090 - DNA, 25 bp, Homo sapien
gcaaatcctcagtaagtccctgttg

SEQ ID NO: 1574091 - DNA, 25 bp, Homo sapien
acggcagccggatgggagttctctt

SEQ ID NO: 1574092 - DNA, 25 bp, Homo sapien
taagagggagctgtatcatgaccat

SEQ ID NO: 1574093 - DNA, 25 bp, Homo sapien
taccctggaggacaagtgctaagag

SEQ ID NO: 1574094 - DNA, 25 bp, Homo sapien
ttctgtactgaagtactctgggact

SEQ ID NO: 1574095 - DNA, 25 bp, Homo sapien
tgtactgaagtactctgggactgaa

SEQ ID NO: 1574096 - DNA, 25 bp, Homo sapien
tactgaagtactctgggactgaagt

SEQ ID NO: 1574097 - DNA, 25 bp, Homo sapien
ttcaagtttctgtactgaagtactc

SEQ ID NO: 1574098 - DNA, 25 bp, Homo sapien
aggcgcctgccacctgctcccacca

SEQ ID NO: 1574099 - DNA, 25 bp, Homo sapien
actacaggcgcctgccacctgctcc

SEQ ID NO: 1574100 - DNA, 25 bp, Homo sapien
tacaggcgcctgccacctgctccca

SEQ ID NO: 1574101 - DNA, 25 bp, Homo sapien
caggcgcctgccacctgctcccacc

SEQ ID NO: 1574102 - DNA, 25 bp, Homo sapien
tcagcaacatgaaataatggcgatt

SEQ ID NO: 1574103 - DNA, 25 bp, Homo sapien
aatggcgattgccaccaggtctcag

SEQ ID NO: 1574104 - DNA, 25 bp, Homo sapien
aaattggagagtgcctcttcagaag

SEQ ID NO: 1574105 - DNA, 25 bp, Homo sapien
gctcagctccggaacacagattggg

SEQ ID NO: 1574106 - DNA, 25 bp, Homo sapien
tccaacttccgcaagcaccagcgca

SEQ ID NO: 1574107 - DNA, 25 bp, Homo sapien
cgcccgcatccacactggcgagcgc

SEQ ID NO: 1574108 - DNA, 25 bp, Homo sapien
tgcgaccgcaccttcaacaactcct

SEQ ID NO: 1574109 - DNA, 25 bp, Homo sapien
tggcgagcgcccgttccgctgcacg

SEQ ID NO: 1574110 - DNA, 25 bp, Homo sapien
tgaaattatttcacacccaagagat

SEQ ID NO: 1574111 - DNA, 25 bp, Homo sapien
tacctctgcaccacttgcgataacg

SEQ ID NO: 1574112 - DNA, 25 bp, Homo sapien
taacgtaatgacgtgtcacacctgt

SEQ ID NO: 1574113 - DNA, 25 bp, Homo sapien
cccaagagattagcgaacattttaa

SEQ ID NO: 1574114 - DNA, 25 bp, Homo sapien
cagataaacggatctggacccaggt

SEQ ID NO: 1574115 - DNA, 25 bp, Homo sapien
tcttagtagagaataccaagcccag

SEQ ID NO: 1574116 - DNA, 25 bp, Homo sapien
tagaggagacattgcttgcccagag

SEQ ID NO: 1574117 - DNA, 25 bp, Homo sapien
tcaataagaaatagaccaggcgcag

SEQ ID NO: 1574118 - DNA, 25 bp, Homo sapien
gacagctgcagcgaatcattctgac

SEQ ID NO: 1574119 - DNA, 25 bp, Homo sapien
gattactcatgtccccaaacttcag

SEQ ID NO: 1574120 - DNA, 25 bp, Homo sapien
gggtctcgatgaatcctctcaacgg

SEQ ID NO: 1574121 - DNA, 25 bp, Homo sapien
tcttgggccactgtgactgattact

SEQ ID NO: 1574122 - DNA, 25 bp, Homo sapien
ccttccttctcacctggaccaccat

SEQ ID NO: 1574123 - DNA, 25 bp, Homo sapien
caagccaagttctggccccttcctt

SEQ ID NO: 1574124 - DNA, 25 bp, Homo sapien
tctccaagccaagttctggcccctt

SEQ ID NO: 1574125 - DNA, 25 bp, Homo sapien
ctccgttctccaagccaagttctgg

SEQ ID NO: 1574126 - DNA, 25 bp, Homo sapien
catagcagcttttagtgaccgtggt

SEQ ID NO: 1574127 - DNA, 25 bp, Homo sapien
ggtttcagctcacagaacacttggt

SEQ ID NO: 1574128 - DNA, 25 bp, Homo sapien
cagtgcgtcatgatcaaaaccttcc

SEQ ID NO: 1574129 - DNA, 25 bp, Homo sapien
aggagtttcagactgcagtgcgtca

SEQ ID NO: 1574130 - DNA, 25 bp, Homo sapien
catattagccacctggtctccaact

SEQ ID NO: 1574131 - DNA, 25 bp, Homo sapien
ccccagtgttggagacggggcttgg

SEQ ID NO: 1574132 - DNA, 25 bp, Homo sapien
gggcttggtgggaggcatttggatc

SEQ ID NO: 1574133 - DNA, 25 bp, Homo sapien
cacgcccagctgtattatataaaat

SEQ ID NO: 1574134 - DNA, 25 bp, Homo sapien
tatgacagtcactagccacgtggga

SEQ ID NO: 1574135 - DNA, 25 bp, Homo sapien
cagaagaggagtaactgtcacagcg

SEQ ID NO: 1574136 - DNA, 25 bp, Homo sapien
agtaactgtcacagcgagccccaag

SEQ ID NO: 1574137 - DNA, 25 bp, Homo sapien
cagctacatcctagagcactgtcca

SEQ ID NO: 1574138 - DNA, 25 bp, Homo sapien
tccggcgtcgaaagcaacgcgcggt

SEQ ID NO: 1574139 - DNA, 25 bp, Homo sapien
ctggagagctgcacacgcggcagca

SEQ ID NO: 1574140 - DNA, 25 bp, Homo sapien
cgctggctgcgcatgcgaaggactc

SEQ ID NO: 1574141 - DNA, 25 bp, Homo sapien
cactggaagcctgatgcgggctcgc

SEQ ID NO: 1574142 - DNA, 25 bp, Homo sapien
gaaggccagacgctgccagatagtt

SEQ ID NO: 1574143 - DNA, 25 bp, Homo sapien
caagggtttgtcctctttccactgg

SEQ ID NO: 1574144 - DNA, 25 bp, Homo sapien
ttccagaaggcatgtggcgacaccg

SEQ ID NO: 1574145 - DNA, 25 bp, Homo sapien
tgagcaaatgtggagaccgaggtcc

SEQ ID NO: 1574146 - DNA, 25 bp, Homo sapien
gaaccgagacttccgggcagctccg

SEQ ID NO: 1574147 - DNA, 25 bp, Homo sapien
cgaacggaacgattccgccgcttga

SEQ ID NO: 1574148 - DNA, 25 bp, Homo sapien
cgcttgacaagagatcggccaataa

SEQ ID NO: 1574149 - DNA, 25 bp, Homo sapien
ccaataaaccgagactaagcaaagt

SEQ ID NO: 1574150 - DNA, 25 bp, Homo sapien
cctttctgtgtacgtctggcatctc

SEQ ID NO: 1574151 - DNA, 25 bp, Homo sapien
aaatgccttccttctgtataccccg

SEQ ID NO: 1574152 - DNA, 25 bp, Homo sapien
tgttcctacacttagcacctcgaag

SEQ ID NO: 1574153 - DNA, 25 bp, Homo sapien
ccatatatggcggtgacatcgttac

SEQ ID NO: 1574154 - DNA, 25 bp, Homo sapien
ggagattagttaaaattgccacttc

SEQ ID NO: 1574155 - DNA, 25 bp, Homo sapien
tgactacctccctagcaaaataaaa

SEQ ID NO: 1574156 - DNA, 25 bp, Homo sapien
tgttaccctttgtgcgccactgact

SEQ ID NO: 1574157 - DNA, 25 bp, Homo sapien
aaatggaaagcatccccactatcac

SEQ ID NO: 1574158 - DNA, 25 bp, Homo sapien
gggcggtgggtccatggcctccgga

SEQ ID NO: 1574159 - DNA, 25 bp, Homo sapien
ctgcaccgtgtatgtgtaggggacc

SEQ ID NO: 1574160 - DNA, 25 bp, Homo sapien
taggggaccccattggcgtcgatga

SEQ ID NO: 1574161 - DNA, 25 bp, Homo sapien
gcgtcgatgaggaggtggcggccca

SEQ ID NO: 1574162 - DNA, 25 bp, Homo sapien
tgggggcgcctcgcgctggggcggg

SEQ ID NO: 1574163 - DNA, 25 bp, Homo sapien
ggggcgcctcgcgctggggcgggcc

SEQ ID NO: 1574164 - DNA, 25 bp, Homo sapien
gggcgcctcgcgctggggcgggccc

SEQ ID NO: 1574165 - DNA, 25 bp, Homo sapien
gcgcctcgcgctggggcgggccccg

SEQ ID NO: 1574166 - DNA, 25 bp, Homo sapien
tgcgacacgcggtggctctgcagcc

SEQ ID NO: 1574167 - DNA, 25 bp, Homo sapien
ggctggcaaagacacgggcgcactc

SEQ ID NO: 1574168 - DNA, 25 bp, Homo sapien
tagcccttgcgagggccgggctctc

SEQ ID NO: 1574169 - DNA, 25 bp, Homo sapien
gcttgaggtccgagtgcgacacgcg

SEQ ID NO: 1574170 - DNA, 25 bp, Homo sapien
gcgcgatgccgcgacaggtggctgg

SEQ ID NO: 1574171 - DNA, 25 bp, Homo sapien
ggcgtcctggaagcggcgtgggcag

SEQ ID NO: 1574172 - DNA, 25 bp, Homo sapien
gcgcgggcgcggtgcgtggcgcgat

SEQ ID NO: 1574173 - DNA, 25 bp, Homo sapien
agagcgggcaggtgtgcggcggccc

SEQ ID NO: 1574174 - DNA, 25 bp, Homo sapien
ccaaggtttagagaggtcatgtcac

SEQ ID NO: 1574175 - DNA, 25 bp, Homo sapien
tcatgtcacttgcacaggctcacac

SEQ ID NO: 1574176 - DNA, 25 bp, Homo sapien
gggcaacgactttggtctacatcac

SEQ ID NO: 1574177 - DNA, 25 bp, Homo sapien
cagaccgtgcccgtgctctttatca

SEQ ID NO: 1574178 - DNA, 25 bp, Homo sapien
gcggcgccggccgaaagagagaagc

SEQ ID NO: 1574179 - DNA, 25 bp, Homo sapien
cgggctaccctcgcagttgcaggcg

SEQ ID NO: 1574180 - DNA, 25 bp, Homo sapien
ggtgtgccccaggaactggcggcgc

SEQ ID NO: 1574181 - DNA, 25 bp, Homo sapien
tcaggtccgggcgactccaagcggc

SEQ ID NO: 1574182 - DNA, 25 bp, Homo sapien
ctgagggcagggggatggcagcacc

SEQ ID NO: 1574183 - DNA, 25 bp, Homo sapien
ggaggaaaatgccagaggctgaggg

SEQ ID NO: 1574184 - DNA, 25 bp, Homo sapien
agggcagggggatggcagcaccagc

SEQ ID NO: 1574185 - DNA, 25 bp, Homo sapien
aggaaaatgccagaggctgagggca

SEQ ID NO: 1574186 - DNA, 25 bp, Homo sapien
gaaggtccaggttctggggagcggc

SEQ ID NO: 1574187 - DNA, 25 bp, Homo sapien
tctggggagcggcaagtccgacggg

SEQ ID NO: 1574188 - DNA, 25 bp, Homo sapien
ggtccaggttctggggagcggcaag

SEQ ID NO: 1574189 - DNA, 25 bp, Homo sapien
aggttctggggagcggcaagtccga

SEQ ID NO: 1574190 - DNA, 25 bp, Homo sapien
ggacatgtactcgaagacccttgag

SEQ ID NO: 1574191 - DNA, 25 bp, Homo sapien
caccctgagtgtcaataagcaggta

SEQ ID NO: 1574192 - DNA, 25 bp, Homo sapien
atgctgtgtcgctgaaggtaggaca

SEQ ID NO: 1574193 - DNA, 25 bp, Homo sapien
actcgaagacccttgagcacacggg

SEQ ID NO: 1574194 - DNA, 25 bp, Homo sapien
agatgtcacactcgaagggctttac

SEQ ID NO: 1574195 - DNA, 25 bp, Homo sapien
ccacagatgtcacactcgaagggct

SEQ ID NO: 1574196 - DNA, 25 bp, Homo sapien
gtgaatggaatggtgccgtgccaag

SEQ ID NO: 1574197 - DNA, 25 bp, Homo sapien
tggctggcgcgcttgaatgccttcc

SEQ ID NO: 1574198 - DNA, 25 bp, Homo sapien
cccagagtgcacccggctgtgctgg

SEQ ID NO: 1574199 - DNA, 25 bp, Homo sapien
tggacactgaaacgggcgttcccca

SEQ ID NO: 1574200 - DNA, 25 bp, Homo sapien
ctgctccataaagcggcgagggcag

SEQ ID NO: 1574201 - DNA, 25 bp, Homo sapien
aagcggcgagggcagtgtggacact

SEQ ID NO: 1574202 - DNA, 25 bp, Homo sapien
gatgcttccaccgcgtgtgtttctg

SEQ ID NO: 1574203 - DNA, 25 bp, Homo sapien
atgcttccaccgcgtgtgtttctgc

SEQ ID NO: 1574204 - DNA, 25 bp, Homo sapien
tggatgcttccaccgcgtgtgtttc

SEQ ID NO: 1574205 - DNA, 25 bp, Homo sapien
atggatgcttccaccgcgtgtgttt

SEQ ID NO: 1574206 - DNA, 25 bp, Homo sapien
ctccctgcaaagtcctgtggtacct

SEQ ID NO: 1574207 - DNA, 25 bp, Homo sapien
tccctgcaaagtcctgtggtacctg

SEQ ID NO: 1574208 - DNA, 25 bp, Homo sapien
tctttaggctagaggactccattct

SEQ ID NO: 1574209 - DNA, 25 bp, Homo sapien
tctcagctccagaacacggaggacc

SEQ ID NO: 1574210 - DNA, 25 bp, Homo sapien
catggaacagctgatatctttaggc

SEQ ID NO: 1574211 - DNA, 25 bp, Homo sapien
gaagatggcgcagattcctgacgac

SEQ ID NO: 1574212 - DNA, 25 bp, Homo sapien
gagggtctgcacttgcgcgatagcc

SEQ ID NO: 1574213 - DNA, 25 bp, Homo sapien
aattcccatcctggagagctggcga

SEQ ID NO: 1574214 - DNA, 25 bp, Homo sapien
tttgagacaccgagaaagttggagc

SEQ ID NO: 1574215 - DNA, 25 bp, Homo sapien
gctcaggcagggaacatcacgaaat

SEQ ID NO: 1574216 - DNA, 25 bp, Homo sapien
gagccgagggaagcgcccacccacc

SEQ ID NO: 1574217 - DNA, 25 bp, Homo sapien
cacccgcgaacaggcggggcggcag

SEQ ID NO: 1574218 - DNA, 25 bp, Homo sapien
gagcgtctgcaaagtgtcacgggga

SEQ ID NO: 1574219 - DNA, 25 bp, Homo sapien
cccggcgccggggagcgtctgcaaa

SEQ ID NO: 1574220 - DNA, 25 bp, Homo sapien
cgctcgcggaatccggctcggggac

SEQ ID NO: 1574221 - DNA, 25 bp, Homo sapien
ctcgcggaatccggctcggggaccg

SEQ ID NO: 1574222 - DNA, 25 bp, Homo sapien
ccgctcgcggaatccggctcgggga

SEQ ID NO: 1574223 - DNA, 25 bp, Homo sapien
tcgcggaatccggctcggggaccga

SEQ ID NO: 1574224 - DNA, 25 bp, Homo sapien
tggaacgattccagcgggaacatgc

SEQ ID NO: 1574225 - DNA, 25 bp, Homo sapien
gggtcgcctgaccagggacacctag

SEQ ID NO: 1574226 - DNA, 25 bp, Homo sapien
tagcctgaaggggaaggaccctctc

SEQ ID NO: 1574227 - DNA, 25 bp, Homo sapien
gaagctgaagccctaaattgctggg

SEQ ID NO: 1574228 - DNA, 25 bp, Homo sapien
agaagtgagctggggacgtgggctc

SEQ ID NO: 1574229 - DNA, 25 bp, Homo sapien
aggactgaggcaaaacgcgcctggg

SEQ ID NO: 1574230 - DNA, 25 bp, Homo sapien
cccagccgcctaggtcctgggggag

SEQ ID NO: 1574231 - DNA, 25 bp, Homo sapien
gactgaggcaaaacgcgcctgggct

SEQ ID NO: 1574232 - DNA, 25 bp, Homo sapien
caaatggagagacgcagatggactg

SEQ ID NO: 1574233 - DNA, 25 bp, Homo sapien
agccacaaatggagagacgcagatg

SEQ ID NO: 1574234 - DNA, 25 bp, Homo sapien
ggacagaaacggcagccacaaatgg

SEQ ID NO: 1574235 - DNA, 25 bp, Homo sapien
aacggcagccacaaatggagagacg

SEQ ID NO: 1574236 - DNA, 25 bp, Homo sapien
ccagcagccgagggcctcaggggca

SEQ ID NO: 1574237 - DNA, 25 bp, Homo sapien
accccagcagccgagggcctcaggg

SEQ ID NO: 1574238 - DNA, 25 bp, Homo sapien
ctacggaccccagcagccgagggcc

SEQ ID NO: 1574239 - DNA, 25 bp, Homo sapien
gaccccagcagccgagggcctcagg

SEQ ID NO: 1574240 - DNA, 25 bp, Homo sapien
tccgcctccgactgctccggtcatt

SEQ ID NO: 1574241 - DNA, 25 bp, Homo sapien
ttgtccgcctccgactgctccggtc

SEQ ID NO: 1574242 - DNA, 25 bp, Homo sapien
gcctccgactgctccggtcattcat

SEQ ID NO: 1574243 - DNA, 25 bp, Homo sapien
cgcctccgactgctccggtcattca

SEQ ID NO: 1574244 - DNA, 25 bp, Homo sapien
gatctcgaaggtctcatcgtccttc

SEQ ID NO: 1574245 - DNA, 25 bp, Homo sapien
actgtaaaagatctgtgggtctagg

SEQ ID NO: 1574246 - DNA, 25 bp, Homo sapien
atggagatctcgaaggtctcatcgt

SEQ ID NO: 1574247 - DNA, 25 bp, Homo sapien
gtgcctcatcgaagggaatggagat

SEQ ID NO: 1574248 - DNA, 25 bp, Homo sapien
ctggcaccgcaggaagtccctctct

SEQ ID NO: 1574249 - DNA, 25 bp, Homo sapien
gaagagatgaatttgtccagctggc

SEQ ID NO: 1574250 - DNA, 25 bp, Homo sapien
tgcctccatccgagcagaagagatg

SEQ ID NO: 1574251 - DNA, 25 bp, Homo sapien
tgggtcttgacgctgttcatcagag

SEQ ID NO: 1574252 - DNA, 25 bp, Homo sapien
actggcgctgccttcttcggacgct

SEQ ID NO: 1574253 - DNA, 25 bp, Homo sapien
ttcttcggacgctccgctgagggag

SEQ ID NO: 1574254 - DNA, 25 bp, Homo sapien
gactcagggtccgaggcctcgcccc

SEQ ID NO: 1574255 - DNA, 25 bp, Homo sapien
cgcctcctctcactggcgctgcctt

SEQ ID NO: 1574256 - DNA, 25 bp, Homo sapien
tcccaaagcgcctccgactagcacc

SEQ ID NO: 1574257 - DNA, 25 bp, Homo sapien
caaagcgcctccgactagcacctcc

SEQ ID NO: 1574258 - DNA, 25 bp, Homo sapien
cgcctccgactagcacctcccttct

SEQ ID NO: 1574259 - DNA, 25 bp, Homo sapien
agcgcctccgactagcacctccctt

SEQ ID NO: 1574260 - DNA, 25 bp, Homo sapien
gaacccggtgggtctttctccagca

SEQ ID NO: 1574261 - DNA, 25 bp, Homo sapien
ccaggaccacacgtggaggagggag

SEQ ID NO: 1574262 - DNA, 25 bp, Homo sapien
acccaggaccacacgtggaggaggg

SEQ ID NO: 1574263 - DNA, 25 bp, Homo sapien
cccaggaccacacgtggaggaggga

SEQ ID NO: 1574264 - DNA, 25 bp, Homo sapien
ccatgggaagaaaggatctcggcga

SEQ ID NO: 1574265 - DNA, 25 bp, Homo sapien
gccagatcttggaccagtgggaaat

SEQ ID NO: 1574266 - DNA, 25 bp, Homo sapien
gcacgggccggtgcaggtggagacg

SEQ ID NO: 1574267 - DNA, 25 bp, Homo sapien
gtggagacggagaacaacaggcaag

SEQ ID NO: 1574268 - DNA, 25 bp, Homo sapien
tcttgagcgtctcgtcgtccagggc

SEQ ID NO: 1574269 - DNA, 25 bp, Homo sapien
caggatcttcttgtaccggcagagg

SEQ ID NO: 1574270 - DNA, 25 bp, Homo sapien
aaggcccgcgacatgctcttgagct

SEQ ID NO: 1574271 - DNA, 25 bp, Homo sapien
gagtactcgagcaggcgctccttgg

SEQ ID NO: 1574272 - DNA, 25 bp, Homo sapien
cgtcgcgcttgggggcccggctaag

SEQ ID NO: 1574273 - DNA, 25 bp, Homo sapien
gccgtcgcgcttgggggcccggcta

SEQ ID NO: 1574274 - DNA, 25 bp, Homo sapien
attctctgtctcacgcggagttggg

SEQ ID NO: 1574275 - DNA, 25 bp, Homo sapien
ataattctctgtctcacgcggagtt

SEQ ID NO: 1574276 - DNA, 25 bp, Homo sapien
tccgggaatcaggtgggcagctcct

SEQ ID NO: 1574277 - DNA, 25 bp, Homo sapien
gggtctgtacagtcccccactcgag

SEQ ID NO: 1574278 - DNA, 25 bp, Homo sapien
gaaggttgtgccagacaaaagcagc

SEQ ID NO: 1574279 - DNA, 25 bp, Homo sapien
gggacgaggtcctagttctcggcac

SEQ ID NO: 1574280 - DNA, 25 bp, Homo sapien
cggcctcgcggagggcctgagaagg

SEQ ID NO: 1574281 - DNA, 25 bp, Homo sapien
gagaacagagacgagatggatcagg

SEQ ID NO: 1574282 - DNA, 25 bp, Homo sapien
gatcagagaacttcggctccttccg

SEQ ID NO: 1574283 - DNA, 25 bp, Homo sapien
ctctccggggacagcttcgactttt

SEQ ID NO: 1574284 - DNA, 25 bp, Homo sapien
ttccgccaccgcttcgtgaaggcct

SEQ ID NO: 1574285 - DNA, 25 bp, Homo sapien
cttcgtgaaggcctcactctccggg

SEQ ID NO: 1574286 - DNA, 25 bp, Homo sapien
cgagtccgtgtttcggctctttccg

SEQ ID NO: 1574287 - DNA, 25 bp, Homo sapien
cggctctttccggagatgccacttg

SEQ ID NO: 1574288 - DNA, 25 bp, Homo sapien
gctctttccggagatgccacttgct

SEQ ID NO: 1574289 - DNA, 25 bp, Homo sapien
ctgggattaagctcgagtccgtgtt

SEQ ID NO: 1574290 - DNA, 25 bp, Homo sapien
ggtttccgtgtgtcctcgtgtgcca

SEQ ID NO: 1574291 - DNA, 25 bp, Homo sapien
tgcgagttcgggttcttccaacaat

SEQ ID NO: 1574292 - DNA, 25 bp, Homo sapien
gagattatctcctcaacgttcggag

SEQ ID NO: 1574293 - DNA, 25 bp, Homo sapien
gagatttccggatctcgccctcggg

SEQ ID NO: 1574294 - DNA, 25 bp, Homo sapien
ctgtgcagctttcgcctcgccttgc

SEQ ID NO: 1574295 - DNA, 25 bp, Homo sapien
gcttcggctacttccgccgctggct

SEQ ID NO: 1574296 - DNA, 25 bp, Homo sapien
tcctacctaatcaagcctccggcag

SEQ ID NO: 1574297 - DNA, 25 bp, Homo sapien
aagcgcctcggctatctccggatac

SEQ ID NO: 1574298 - DNA, 25 bp, Homo sapien
tgccgctcgaactcgtcgaagtccg

SEQ ID NO: 1574299 - DNA, 25 bp, Homo sapien
tattctcgttgagctgccgctcgaa

SEQ ID NO: 1574300 - DNA, 25 bp, Homo sapien
gctcgaactcgtcgaagtccgacat

SEQ ID NO: 1574301 - DNA, 25 bp, Homo sapien
cttgtttattctcgttgagctgccg

SEQ ID NO: 1574302 - DNA, 25 bp, Homo sapien
cctgaccccagggtcgtccctgaga

SEQ ID NO: 1574303 - DNA, 25 bp, Homo sapien
tgaccccagggtcgtccctgagagg

SEQ ID NO: 1574304 - DNA, 25 bp, Homo sapien
ctgaccccagggtcgtccctgagag

SEQ ID NO: 1574305 - DNA, 25 bp, Homo sapien
gcctgaccccagggtcgtccctgag

SEQ ID NO: 1574306 - DNA, 25 bp, Homo sapien
tgcgcttccgatgccggttctcctt

SEQ ID NO: 1574307 - DNA, 25 bp, Homo sapien
ccggctccgagagcggctgtggctg

SEQ ID NO: 1574308 - DNA, 25 bp, Homo sapien
gtcgtcgcctgtcccgggaggcgct

SEQ ID NO: 1574309 - DNA, 25 bp, Homo sapien
gctccggcgtttgcggtcccggctc

SEQ ID NO: 1574310 - DNA, 25 bp, Homo sapien
atcagtccaccgtgctcctctttag

SEQ ID NO: 1574311 - DNA, 25 bp, Homo sapien
cgtgctcctctttagcgcctctggt

SEQ ID NO: 1574312 - DNA, 25 bp, Homo sapien
tttagcgcctctggtcaaaggtttg

SEQ ID NO: 1574313 - DNA, 25 bp, Homo sapien
cctctttagcgcctctggtcaaagg

SEQ ID NO: 1574314 - DNA, 25 bp, Homo sapien
tgcacgggcgtgaggaaggtgaagg

SEQ ID NO: 1574315 - DNA, 25 bp, Homo sapien
ggaaatgggcgggacagggtgcacg

SEQ ID NO: 1574316 - DNA, 25 bp, Homo sapien
gtgctggtttcaaggtaagtggact

SEQ ID NO: 1574317 - DNA, 25 bp, Homo sapien
gcaaccatgtaagctccactctctc

SEQ ID NO: 1574318 - DNA, 25 bp, Homo sapien
tggcacgtcccagtatttacggacc

SEQ ID NO: 1574319 - DNA, 25 bp, Homo sapien
ccttgtactgcattggggtgatgtg

SEQ ID NO: 1574320 - DNA, 25 bp, Homo sapien
ggtggcacgtcccagtatttacgga

SEQ ID NO: 1574321 - DNA, 25 bp, Homo sapien
ttgtactgcattggggtgatgtgct

SEQ ID NO: 1574322 - DNA, 25 bp, Homo sapien
cccacgtagaggcgccgggcttgtc

SEQ ID NO: 1574323 - DNA, 25 bp, Homo sapien
ggcaccggcgttggggtcacagcca

SEQ ID NO: 1574324 - DNA, 25 bp, Homo sapien
ggtcatctggctcccgaccacgggc

SEQ ID NO: 1574325 - DNA, 25 bp, Homo sapien
gccgggcttgtctggtcatctggct

SEQ ID NO: 1574326 - DNA, 25 bp, Homo sapien
cttcgacgatggtagcaaacttttt

SEQ ID NO: 1574327 - DNA, 25 bp, Homo sapien
actttttgttgctacgagggatctc

SEQ ID NO: 1574328 - DNA, 25 bp, Homo sapien
tcgacgatggtagcaaactttttgt

SEQ ID NO: 1574329 - DNA, 25 bp, Homo sapien
tttgttgctacgagggatctcagcc

SEQ ID NO: 1574330 - DNA, 25 bp, Homo sapien
ggcagagacgagcaaaggacagaaa

SEQ ID NO: 1574331 - DNA, 25 bp, Homo sapien
ggcagagggcatgatgacaacacaa

SEQ ID NO: 1574332 - DNA, 25 bp, Homo sapien
caaagtgcaggttgagaaagtcaga

SEQ ID NO: 1574333 - DNA, 25 bp, Homo sapien
cagtagcaagagacggccaagggca

SEQ ID NO: 1574334 - DNA, 25 bp, Homo sapien
gcatctgggcgttgaagaaatccat

SEQ ID NO: 1574335 - DNA, 25 bp, Homo sapien
ccaggcgcatctgggcgttgaagaa

SEQ ID NO: 1574336 - DNA, 25 bp, Homo sapien
acagccaacactgggttgccagggg

SEQ ID NO: 1574337 - DNA, 25 bp, Homo sapien
ggcaaaattcttgtcctggttaatc

SEQ ID NO: 1574338 - DNA, 25 bp, Homo sapien
ctggaagatgatgccatcaaaggcc

SEQ ID NO: 1574339 - DNA, 25 bp, Homo sapien
cacatagacggaggggttctctgac

SEQ ID NO: 1574340 - DNA, 25 bp, Homo sapien
tgggtagtctcgtccactgagcgga

SEQ ID NO: 1574341 - DNA, 25 bp, Homo sapien
gcggatctttagtgactggccctgg

SEQ ID NO: 1574342 - DNA, 25 bp, Homo sapien
tccatggagggcacttaggacagcg

SEQ ID NO: 1574343 - DNA, 25 bp, Homo sapien
tgtgtcgtagaactgccgtccatgg

SEQ ID NO: 1574344 - DNA, 25 bp, Homo sapien
tgtgtcgtagaactgccgtgcatgg

SEQ ID NO: 1574345 - DNA, 25 bp, Homo sapien
catggagggcacttaggacagcgcc

SEQ ID NO: 1574346 - DNA, 25 bp, Homo sapien
acgacacgatgagcagccgcggctg

SEQ ID NO: 1574347 - DNA, 25 bp, Homo sapien
gggtggcacgacacgatgagcagcc

SEQ ID NO: 1574348 - DNA, 25 bp, Homo sapien
ggaagtctcagaacagcatccgcag

SEQ ID NO: 1574349 - DNA, 25 bp, Homo sapien
cagcatccgcagcattagctgctct

SEQ ID NO: 1574350 - DNA, 25 bp, Homo sapien
ctggtcatcgttcaggtagttgggt

SEQ ID NO: 1574351 - DNA, 25 bp, Homo sapien
catcgttcaggtagttgggtaagcc

SEQ ID NO: 1574352 - DNA, 25 bp, Homo sapien
gggtaagcccccgatgaacagcttg

SEQ ID NO: 1574353 - DNA, 25 bp, Homo sapien
gtaagcccccgatgaacagcttgtg

SEQ ID NO: 1574354 - DNA, 25 bp, Homo sapien
atcagggctgggatgaggtggggcg

SEQ ID NO: 1574355 - DNA, 25 bp, Homo sapien
agtagccgagagtccatcagggctg

SEQ ID NO: 1574356 - DNA, 25 bp, Homo sapien
ctgcagtagccgagagtccatcagg

SEQ ID NO: 1574357 - DNA, 25 bp, Homo sapien
gcagtagccgagagtccatcagggc

SEQ ID NO: 1574358 - DNA, 25 bp, Homo sapien
gagagccccgtggcactgtccttga

SEQ ID NO: 1574359 - DNA, 25 bp, Homo sapien
gatgtccacgtactcacagaaggcg

SEQ ID NO: 1574360 - DNA, 25 bp, Homo sapien
acagaaggcgtagcccttggagagc

SEQ ID NO: 1574361 - DNA, 25 bp, Homo sapien
tgatccgtgacgttgatgtccacgt

SEQ ID NO: 1574362 - DNA, 25 bp, Homo sapien
gcagcggccagcgaccggggactca

SEQ ID NO: 1574363 - DNA, 25 bp, Homo sapien
gaggggagaccatggcttggcaaca

SEQ ID NO: 1574364 - DNA, 25 bp, Homo sapien
agggaaggacagacgcggcagcggc

SEQ ID NO: 1574365 - DNA, 25 bp, Homo sapien
aggaggggagaccatggcttggcaa

SEQ ID NO: 1574366 - DNA, 25 bp, Homo sapien
agctgcatgccgttcagccccgcaa

SEQ ID NO: 1574367 - DNA, 25 bp, Homo sapien
tgcatgccgttcagccccgcaatgg

SEQ ID NO: 1574368 - DNA, 25 bp, Homo sapien
agcagcttcttatcccccagctgca

SEQ ID NO: 1574369 - DNA, 25 bp, Homo sapien
ttggctcccacactcgccctctgga

SEQ ID NO: 1574370 - DNA, 25 bp, Homo sapien
gacaagcccgtacttgctgcactcg

SEQ ID NO: 1574371 - DNA, 25 bp, Homo sapien
tcacaggcgtctgattgatggtgct

SEQ ID NO: 1574372 - DNA, 25 bp, Homo sapien
ggatctcgatggacttgacaagccc

SEQ ID NO: 1574373 - DNA, 25 bp, Homo sapien
caccatgttcatgaggcacaggacc

SEQ ID NO: 1574374 - DNA, 25 bp, Homo sapien
caatacggcatgcaggtcctctaac

SEQ ID NO: 1574375 - DNA, 25 bp, Homo sapien
gccccgactcaatacggcatgcagg

SEQ ID NO: 1574376 - DNA, 25 bp, Homo sapien
ttgaccttgaccaccctgaacgaac

SEQ ID NO: 1574377 - DNA, 25 bp, Homo sapien
gaacagtacacccaggaatgcggcc

SEQ ID NO: 1574378 - DNA, 25 bp, Homo sapien
ccctccaaggcctgccactcagccc

SEQ ID NO: 1574379 - DNA, 25 bp, Homo sapien
taagcggtcgttccaagacccaggc

SEQ ID NO: 1574380 - DNA, 25 bp, Homo sapien
aataagcggtcgttccaagacccag

SEQ ID NO: 1574381 - DNA, 25 bp, Homo sapien
aagcggtcgttccaagacccaggca

SEQ ID NO: 1574382 - DNA, 25 bp, Homo sapien
ctgacataccagctcaagggaaggg

SEQ ID NO: 1574383 - DNA, 25 bp, Homo sapien
tgggtgtctcagaaaccgcaaagcc

SEQ ID NO: 1574384 - DNA, 25 bp, Homo sapien
ccgggccgccgatgcaataaattta

SEQ ID NO: 1574385 - DNA, 25 bp, Homo sapien
agggcctcgacagacacctgagtgt

SEQ ID NO: 1574386 - DNA, 25 bp, Homo sapien
aagtcccggcggtgataagagtcgg

SEQ ID NO: 1574387 - DNA, 25 bp, Homo sapien
caaccactctgttggcgaacttgcg

SEQ ID NO: 1574388 - DNA, 25 bp, Homo sapien
caaacacagaggtgaactccacaaa

SEQ ID NO: 1574389 - DNA, 25 bp, Homo sapien
atggctttctggcagtcaaacacag

SEQ ID NO: 1574390 - DNA, 25 bp, Homo sapien
actgagggccggacaacaaaattca

SEQ ID NO: 1574391 - DNA, 25 bp, Homo sapien
taaacacgctatgttcctaccgtgg

SEQ ID NO: 1574392 - DNA, 25 bp, Homo sapien
ttgctgccattccagttgctgccgg

SEQ ID NO: 1574393 - DNA, 25 bp, Homo sapien
atcaactacgtaagaaacccaggag

SEQ ID NO: 1574394 - DNA, 25 bp, Homo sapien
agcaaattcgtcttagcaaatatga

SEQ ID NO: 1574395 - DNA, 25 bp, Homo sapien
taatgagcaaattcgtcttagcaaa

SEQ ID NO: 1574396 - DNA, 25 bp, Homo sapien
tgagcaaattcgtcttagcaaatat

SEQ ID NO: 1574397 - DNA, 25 bp, Homo sapien
aatgagcaaattcgtcttagcaaat

SEQ ID NO: 1574398 - DNA, 25 bp, Homo sapien
gagggtcggacatactggacacaca

SEQ ID NO: 1574399 - DNA, 25 bp, Homo sapien
gtcggacatactggacacacagccg

SEQ ID NO: 1574400 - DNA, 25 bp, Homo sapien
cggacatactggacacacagccgct

SEQ ID NO: 1574401 - DNA, 25 bp, Homo sapien
gggtcggacatactggacacacagc

SEQ ID NO: 1574402 - DNA, 25 bp, Homo sapien
caccgcgcaagcagggaaggcctcg

SEQ ID NO: 1574403 - DNA, 25 bp, Homo sapien
gcaccgcgcaagcagggaaggcctc

SEQ ID NO: 1574404 - DNA, 25 bp, Homo sapien
gggaaggcctcgaggctgccggcgc

SEQ ID NO: 1574405 - DNA, 25 bp, Homo sapien
gtgtcgcgggacgtgcgccgggcca

SEQ ID NO: 1574406 - DNA, 25 bp, Homo sapien
cgcacgcacgaacgcaaggagggcc

SEQ ID NO: 1574407 - DNA, 25 bp, Homo sapien
gctcggcctcggtgtcgcgggacgt

SEQ ID NO: 1574408 - DNA, 25 bp, Homo sapien
ccgccgaggagacgggaagcaacag

SEQ ID NO: 1574409 - DNA, 25 bp, Homo sapien
tcaaagccccgccatgatgtaagcc

SEQ ID NO: 1574410 - DNA, 25 bp, Homo sapien
taaaaagtaactctctggagtccca

SEQ ID NO: 1574411 - DNA, 25 bp, Homo sapien
cagctctgatcacccatctatgcgg

SEQ ID NO: 1574412 - DNA, 25 bp, Homo sapien
gagacctggcgctgagaaataagag

SEQ ID NO: 1574413 - DNA, 25 bp, Homo sapien
ttcaacactgcatgcaaagactggg

SEQ ID NO: 1574414 - DNA, 25 bp, Homo sapien
tttttcaacactgcatgcaaagact

SEQ ID NO: 1574415 - DNA, 25 bp, Homo sapien
tcaacactgcatgcaaagactgggc

SEQ ID NO: 1574416 - DNA, 25 bp, Homo sapien
tttcaacactgcatgcaaagactgg

SEQ ID NO: 1574417 - DNA, 25 bp, Homo sapien
gaagaccagacgtcccaaggatagc

SEQ ID NO: 1574418 - DNA, 25 bp, Homo sapien
caaggatagcggaagcccaaggctc

SEQ ID NO: 1574419 - DNA, 25 bp, Homo sapien
gagagataaggaacctaacagcccc

SEQ ID NO: 1574420 - DNA, 25 bp, Homo sapien
gctcgctcagcacaagagggacatt

SEQ ID NO: 1574421 - DNA, 25 bp, Homo sapien
cgactcccggacgaaggctgcggca

SEQ ID NO: 1574422 - DNA, 25 bp, Homo sapien
cagggccccgatgcgtggagagatg

SEQ ID NO: 1574423 - DNA, 25 bp, Homo sapien
agagatggggcgactcccggacgaa

SEQ ID NO: 1574424 - DNA, 25 bp, Homo sapien
gcacagggccccgatgcgtggagag

SEQ ID NO: 1574425 - DNA, 25 bp, Homo sapien
tcggcaatctctgacatgagggagc

SEQ ID NO: 1574426 - DNA, 25 bp, Homo sapien
gaaccttgatctccgcctctgagta

SEQ ID NO: 1574427 - DNA, 25 bp, Homo sapien
tgttcttcatctggcgcctcaagga

SEQ ID NO: 1574428 - DNA, 25 bp, Homo sapien
gggtcattgctcgtggcctctcgaa

SEQ ID NO: 1574429 - DNA, 25 bp, Homo sapien
ctgcccggggaggagagcaggatgc

SEQ ID NO: 1574430 - DNA, 25 bp, Homo sapien
ccggggaggagagcaggatgctgac

SEQ ID NO: 1574431 - DNA, 25 bp, Homo sapien
cccggggaggagagcaggatgctga

SEQ ID NO: 1574432 - DNA, 25 bp, Homo sapien
tgcccggggaggagagcaggatgct

SEQ ID NO: 1574433 - DNA, 25 bp, Homo sapien
tctgcacggcgtacatgttctcctt

SEQ ID NO: 1574434 - DNA, 25 bp, Homo sapien
tccgagccggtcttgatgaggtact

SEQ ID NO: 1574435 - DNA, 25 bp, Homo sapien
tgaggtactccatcagcgtcatggc

SEQ ID NO: 1574436 - DNA, 25 bp, Homo sapien
ttccttggtcttgagcgcgtgcgcc

SEQ ID NO: 1574437 - DNA, 25 bp, Homo sapien
cgctgctctgcggccacgcctgctc

SEQ ID NO: 1574438 - DNA, 25 bp, Homo sapien
tcttctcggctcaaactaagggcca

SEQ ID NO: 1574439 - DNA, 25 bp, Homo sapien
tctcggctcaaactaagggccagct

SEQ ID NO: 1574440 - DNA, 25 bp, Homo sapien
tcggctcaaactaagggccagctgg

SEQ ID NO: 1574441 - DNA, 25 bp, Homo sapien
ggctcaaactaagggccagctggag

SEQ ID NO: 1574442 - DNA, 25 bp, Homo sapien
cacgggcacgaccagggagacatga

SEQ ID NO: 1574443 - DNA, 25 bp, Homo sapien
agacatgagaacgtgagccacgggc

SEQ ID NO: 1574444 - DNA, 25 bp, Homo sapien
agccacgggcagatgccacctcagc

SEQ ID NO: 1574445 - DNA, 25 bp, Homo sapien
ccagggagacatgagaacgtgagcc

SEQ ID NO: 1574446 - DNA, 25 bp, Homo sapien
tgctctcctcgattgccatctgcag

SEQ ID NO: 1574447 - DNA, 25 bp, Homo sapien
cttgctctcctcgattgccatctgc

SEQ ID NO: 1574448 - DNA, 25 bp, Homo sapien
catccccgcgacggatccgctcctc

SEQ ID NO: 1574449 - DNA, 25 bp, Homo sapien
gctctcctcgattgccatctgcagc

SEQ ID NO: 1574450 - DNA, 25 bp, Homo sapien
ctggccacgcaggaatgagcgatgg

SEQ ID NO: 1574451 - DNA, 25 bp, Homo sapien
aagcctggaaacccggtgcccagct

SEQ ID NO: 1574452 - DNA, 25 bp, Homo sapien
aatgagcgatgggacggacggacac

SEQ ID NO: 1574453 - DNA, 25 bp, Homo sapien
gcaggaatgagcgatgggacggacg

SEQ ID NO: 1574454 - DNA, 25 bp, Homo sapien
attgccccactgtcaccccgcagtc

SEQ ID NO: 1574455 - DNA, 25 bp, Homo sapien
ttcccatgccgcacgcacacgcatg

SEQ ID NO: 1574456 - DNA, 25 bp, Homo sapien
tcaccccgcagtcatcgcgctgcag

SEQ ID NO: 1574457 - DNA, 25 bp, Homo sapien
cttcccacgcccattgccccactgt

SEQ ID NO: 1574458 - DNA, 25 bp, Homo sapien
gacgtcagcaaggtccatgagggac

SEQ ID NO: 1574459 - DNA, 25 bp, Homo sapien
ggccgtgaagacgtcagcaaggtcc

SEQ ID NO: 1574460 - DNA, 25 bp, Homo sapien
cgtcagcaaggtccatgagggacga

SEQ ID NO: 1574461 - DNA, 25 bp, Homo sapien
tgaagacgtcagcaaggtccatgag

SEQ ID NO: 1574462 - DNA, 25 bp, Homo sapien
tcagcagctggagggacaggggggc

SEQ ID NO: 1574463 - DNA, 25 bp, Homo sapien
agcagctggagggacaggggggccg

SEQ ID NO: 1574464 - DNA, 25 bp, Homo sapien
cagctggagggacaggggggccgcc

SEQ ID NO: 1574465 - DNA, 25 bp, Homo sapien
ctccccagggatcagcagctggagg

SEQ ID NO: 1574466 - DNA, 25 bp, Homo sapien
acttccccatggatcaggcgtgggc

SEQ ID NO: 1574467 - DNA, 25 bp, Homo sapien
ttccccatggatcaggcgtgggccc

SEQ ID NO: 1574468 - DNA, 25 bp, Homo sapien
aacttccccatggatcaggcgtggg

SEQ ID NO: 1574469 - DNA, 25 bp, Homo sapien
ccccatggatcaggcgtgggcccct

SEQ ID NO: 1574470 - DNA, 25 bp, Homo sapien
ctgcccggcgccactggctcgatct

SEQ ID NO: 1574471 - DNA, 25 bp, Homo sapien
cactgcccggcgccactggctcgat

SEQ ID NO: 1574472 - DNA, 25 bp, Homo sapien
cccggcgccactggctcgatctgtc

SEQ ID NO: 1574473 - DNA, 25 bp, Homo sapien
gcccggcgccactggctcgatctgt

SEQ ID NO: 1574474 - DNA, 25 bp, Homo sapien
gtgtccagggatcggaggctgaggg

SEQ ID NO: 1574475 - DNA, 25 bp, Homo sapien
gtccagggatcggaggctgagggcc

SEQ ID NO: 1574476 - DNA, 25 bp, Homo sapien
cggtgtccagggatcggaggctgag

SEQ ID NO: 1574477 - DNA, 25 bp, Homo sapien
tgagggcccactgaccgggacccca

SEQ ID NO: 1574478 - DNA, 25 bp, Homo sapien
actcgtcgggctccgtgtcgaatcc

SEQ ID NO: 1574479 - DNA, 25 bp, Homo sapien
cccggaggtcggcagtgccgtgcgg

SEQ ID NO: 1574480 - DNA, 25 bp, Homo sapien
aaagtcagagaactcgtcgggctcc

SEQ ID NO: 1574481 - DNA, 25 bp, Homo sapien
tgccgtgcggagtcggtcaaagtca

SEQ ID NO: 1574482 - DNA, 25 bp, Homo sapien
gaaggttgctctacgttaacctaga

SEQ ID NO: 1574483 - DNA, 25 bp, Homo sapien
cgttaacctagataatgagaggagg

SEQ ID NO: 1574484 - DNA, 25 bp, Homo sapien
agctcactccctgcaagctgccagc

SEQ ID NO: 1574485 - DNA, 25 bp, Homo sapien
aagaaggaaaactgcatgctggaag

SEQ ID NO: 1574486 - DNA, 25 bp, Homo sapien
agagatcccctgaccccactcatgt

SEQ ID NO: 1574487 - DNA, 25 bp, Homo sapien
agtccaggtcgacgagggctgcatt

SEQ ID NO: 1574488 - DNA, 25 bp, Homo sapien
aatgactccggcgtcttccgggtgg

SEQ ID NO: 1574489 - DNA, 25 bp, Homo sapien
gggcgtgggagttggtgtggctgca

SEQ ID NO: 1574490 - DNA, 25 bp, Homo sapien
agctggttcagggtgagcgtcgcgg

SEQ ID NO: 1574491 - DNA, 25 bp, Homo sapien
ggttggtgacggaagggccagtggc

SEQ ID NO: 1574492 - DNA, 25 bp, Homo sapien
cacaggactgagacggagctggttc

SEQ ID NO: 1574493 - DNA, 25 bp, Homo sapien
ttcagggtgagcgtcgcgggaggcg

SEQ ID NO: 1574494 - DNA, 25 bp, Homo sapien
cagggcccccgccaaggggagagat

SEQ ID NO: 1574495 - DNA, 25 bp, Homo sapien
agggcccccgccaaggggagagatg

SEQ ID NO: 1574496 - DNA, 25 bp, Homo sapien
cgaggaggctcaaacactgactggg

SEQ ID NO: 1574497 - DNA, 25 bp, Homo sapien
caccaaggattcaccgagggtgcgt

SEQ ID NO: 1574498 - DNA, 25 bp, Homo sapien
tgccaagcccgtgggaattgccatt

SEQ ID NO: 1574499 - DNA, 25 bp, Homo sapien
ggtgtagtgtgagtgggccccagga

SEQ ID NO: 1574500 - DNA, 25 bp, Homo sapien
tcctggtgtcccctcaacacaagag

SEQ ID NO: 1574501 - DNA, 25 bp, Homo sapien
cacctggacctgtgtgggctacagc

SEQ ID NO: 1574502 - DNA, 25 bp, Homo sapien
atggcgacggtgacctgtgttgcac

SEQ ID NO: 1574503 - DNA, 25 bp, Homo sapien
tgacccggctttccaggagtgcagg

SEQ ID NO: 1574504 - DNA, 25 bp, Homo sapien
tgggggactcctacacagcagctcc

SEQ ID NO: 1574505 - DNA, 25 bp, Homo sapien
tcatgggggactcctacacagcagc

SEQ ID NO: 1574506 - DNA, 25 bp, Homo sapien
atgggggactcctacacagcagctc

SEQ ID NO: 1574507 - DNA, 25 bp, Homo sapien
catgggggactcctacacagcagct

SEQ ID NO: 1574508 - DNA, 25 bp, Homo sapien
cgttcaaccgtgtatgtcactaagc

SEQ ID NO: 1574509 - DNA, 25 bp, Homo sapien
caaccgtgtatgtcactaagctcag

SEQ ID NO: 1574510 - DNA, 25 bp, Homo sapien
gtatgtcactaagctcaggtgcttg

SEQ ID NO: 1574511 - DNA, 25 bp, Homo sapien
tcccagcgttcaaccgtgtatgtca

SEQ ID NO: 1574512 - DNA, 25 bp, Homo sapien
tctttgtaactgctatgcagacctc

SEQ ID NO: 1574513 - DNA, 25 bp, Homo sapien
aactgctatgcagacctctggcttc

SEQ ID NO: 1574514 - DNA, 25 bp, Homo sapien
tgcacatgcagagaatctggaaaaa

SEQ ID NO: 1574515 - DNA, 25 bp, Homo sapien
caaccaatggacattctatggtccc

SEQ ID NO: 1574516 - DNA, 25 bp, Homo sapien
cactcaagactggacaagggtttcc

SEQ ID NO: 1574517 - DNA, 25 bp, Homo sapien
tttacccgaaatagagacactgtca

SEQ ID NO: 1574518 - DNA, 25 bp, Homo sapien
gctcaacatggagaacatacccctg

SEQ ID NO: 1574519 - DNA, 25 bp, Homo sapien
gaagaaccaaggagtttgccacggc

SEQ ID NO: 1574520 - DNA, 25 bp, Homo sapien
taaacaagtgctaaacgctctggaa

SEQ ID NO: 1574521 - DNA, 25 bp, Homo sapien
tgtctttagaaatcccatcctgcct

SEQ ID NO: 1574522 - DNA, 25 bp, Homo sapien
cacaatccggatacttctgacacag

SEQ ID NO: 1574523 - DNA, 25 bp, Homo sapien
gctgattgtctttgcctcggtccta

SEQ ID NO: 1574524 - DNA, 25 bp, Homo sapien
gaagcaatagatgtgccagggcata

SEQ ID NO: 1574525 - DNA, 25 bp, Homo sapien
aatcagaggcttcctatcctatagg

SEQ ID NO: 1574526 - DNA, 25 bp, Homo sapien
catcagatgaatggaagttatcctg

SEQ ID NO: 1574527 - DNA, 25 bp, Homo sapien
cagaatgtagagaggcaatactgtg

SEQ ID NO: 1574528 - DNA, 25 bp, Homo sapien
tgctgagaacatttagaagttataa

SEQ ID NO: 1574529 - DNA, 25 bp, Homo sapien
cagagattcaacgtataaagcaaga

SEQ ID NO: 1574530 - DNA, 25 bp, Homo sapien
caagaacgatagctgttgagggagt

SEQ ID NO: 1574531 - DNA, 25 bp, Homo sapien
aagccaggaggaagtcgtgtccagt

SEQ ID NO: 1574532 - DNA, 25 bp, Homo sapien
ggaaggaccttcctctatgggcaaa

SEQ ID NO: 1574533 - DNA, 25 bp, Homo sapien
ctttcaggacggacgcatatggagc

SEQ ID NO: 1574534 - DNA, 25 bp, Homo sapien
ggttgtcatcgtctttgacccaggg

SEQ ID NO: 1574535 - DNA, 25 bp, Homo sapien
tcttctgcccgcgatggaaggacct

SEQ ID NO: 1574536 - DNA, 25 bp, Homo sapien
aatggttgctttgcatgcccacaag

SEQ ID NO: 1574537 - DNA, 25 bp, Homo sapien
aaaacaccaaatctctggcagtgag

SEQ ID NO: 1574538 - DNA, 25 bp, Homo sapien
tcatcacgttgtcagtaatggttgc

SEQ ID NO: 1574539 - DNA, 25 bp, Homo sapien
cctgttgatctggtgacttggctgg

SEQ ID NO: 1574540 - DNA, 25 bp, Homo sapien
gaagatagttcgcagaagccctgtg

SEQ ID NO: 1574541 - DNA, 25 bp, Homo sapien
ggaaaagcattcacacctgaggagt

SEQ ID NO: 1574542 - DNA, 25 bp, Homo sapien
gccgtctgggtctagtcatcaatat

SEQ ID NO: 1574543 - DNA, 25 bp, Homo sapien
tgttctttgttgagttccagccagg

SEQ ID NO: 1574544 - DNA, 25 bp, Homo sapien
tgaaggcccttgtcagtacaccagc

SEQ ID NO: 1574545 - DNA, 25 bp, Homo sapien
ctgcagagtctttgaagctatgatt

SEQ ID NO: 1574546 - DNA, 25 bp, Homo sapien
gcccttgtcagtacaccagcctggg

SEQ ID NO: 1574547 - DNA, 25 bp, Homo sapien
accagcctgggttttgaaattgaag

SEQ ID NO: 1574548 - DNA, 25 bp, Homo sapien
cattctgccatcattgagattgtta

SEQ ID NO: 1574549 - DNA, 25 bp, Homo sapien
attctgccatcattgagattgttac

SEQ ID NO: 1574550 - DNA, 25 bp, Homo sapien
tcattctgccatcattgagattgtt

SEQ ID NO: 1574551 - DNA, 25 bp, Homo sapien
gggcttttataccagagggtgtctc

SEQ ID NO: 1574552 - DNA, 25 bp, Homo sapien
tgccaggggcttttataccagaggg

SEQ ID NO: 1574553 - DNA, 25 bp, Homo sapien
caggggcttttataccagagggtgt

SEQ ID NO: 1574554 - DNA, 25 bp, Homo sapien
ggcttttataccagagggtgtctcc

SEQ ID NO: 1574555 - DNA, 25 bp, Homo sapien
ggaggcagcaggcatatccacattt

SEQ ID NO: 1574556 - DNA, 25 bp, Homo sapien
tccacatttcagttgcacggcttct

SEQ ID NO: 1574557 - DNA, 25 bp, Homo sapien
gatctgtttgaagtgctcagccatg

SEQ ID NO: 1574558 - DNA, 25 bp, Homo sapien
tgatgtcatccttctgagagaccac

SEQ ID NO: 1574559 - DNA, 25 bp, Homo sapien
ttcggaaactcctcaggtcttcaga

SEQ ID NO: 1574560 - DNA, 25 bp, Homo sapien
ccacttcggaaactcctcaggtctt

SEQ ID NO: 1574561 - DNA, 25 bp, Homo sapien
tattctggctcaaatccccacttcg

SEQ ID NO: 1574562 - DNA, 25 bp, Homo sapien
ttcctattctggctcaaatccccac

SEQ ID NO: 1574563 - DNA, 25 bp, Homo sapien
cagtgtcgaacctctcagcttgctc

SEQ ID NO: 1574564 - DNA, 25 bp, Homo sapien
ggacgcacagggcagtgtcgaacct

SEQ ID NO: 1574565 - DNA, 25 bp, Homo sapien
atggcggccggaagtgaagcgaggg

SEQ ID NO: 1574566 - DNA, 25 bp, Homo sapien
cctcccagtaatggcggccggaagt

SEQ ID NO: 1574567 - DNA, 25 bp, Homo sapien
aagcacaatcttcccctgtcggttc

SEQ ID NO: 1574568 - DNA, 25 bp, Homo sapien
caatcttcccctgtcggttcacaga

SEQ ID NO: 1574569 - DNA, 25 bp, Homo sapien
gttcacagattccttgcacacgccc

SEQ ID NO: 1574570 - DNA, 25 bp, Homo sapien
aagaagccgtgttctgaagaaagca

SEQ ID NO: 1574571 - DNA, 25 bp, Homo sapien
gctggcagcaaagacctttccttct

SEQ ID NO: 1574572 - DNA, 25 bp, Homo sapien
agagaggagtcataggcacagtgct

SEQ ID NO: 1574573 - DNA, 25 bp, Homo sapien
ccagagaggagtcataggcacagtg

SEQ ID NO: 1574574 - DNA, 25 bp, Homo sapien
cacagtgctggcagcaaagaccttt

SEQ ID NO: 1574575 - DNA, 25 bp, Homo sapien
caggaatctcgatgaatgtgtagat

SEQ ID NO: 1574576 - DNA, 25 bp, Homo sapien
acaggaatctcgatgaatgtgtaga

SEQ ID NO: 1574577 - DNA, 25 bp, Homo sapien
aacaggaatctcgatgaatgtgtag

SEQ ID NO: 1574578 - DNA, 25 bp, Homo sapien
aaacaggaatctcgatgaatgtgta

SEQ ID NO: 1574579 - DNA, 25 bp, Homo sapien
cagccgggacatggatgaggtggct

SEQ ID NO: 1574580 - DNA, 25 bp, Homo sapien
tgaggtggctcagaaccaggcaggt

SEQ ID NO: 1574581 - DNA, 25 bp, Homo sapien
cgtcagtccagccgggacatggatg

SEQ ID NO: 1574582 - DNA, 25 bp, Homo sapien
aggtggctcagaaccaggcaggtca

SEQ ID NO: 1574583 - DNA, 25 bp, Homo sapien
cctgagccactgcccagcacgtggc

SEQ ID NO: 1574584 - DNA, 25 bp, Homo sapien
gccactgcccagcacgtggccccac

SEQ ID NO: 1574585 - DNA, 25 bp, Homo sapien
gagccactgcccagcacgtggcccc

SEQ ID NO: 1574586 - DNA, 25 bp, Homo sapien
tgagccactgcccagcacgtggccc

SEQ ID NO: 1574587 - DNA, 25 bp, Homo sapien
ggaggcagcaggcatatccacattt

SEQ ID NO: 1574588 - DNA, 25 bp, Homo sapien
tccacatttcagttgcacggcttct

SEQ ID NO: 1574589 - DNA, 25 bp, Homo sapien
tgatctgtttgaagtgctcagccat

SEQ ID NO: 1574590 - DNA, 25 bp, Homo sapien
gacatctaatgatctgtttgaagtg

SEQ ID NO: 1574591 - DNA, 25 bp, Homo sapien
cagatttcagcttgggctctagttc

SEQ ID NO: 1574592 - DNA, 25 bp, Homo sapien
ttgatgtcatccttctgagagacca

SEQ ID NO: 1574593 - DNA, 25 bp, Homo sapien
cattgttagaacagatttcagcttg

SEQ ID NO: 1574594 - DNA, 25 bp, Homo sapien
tgatgtcatccttctgagagaccac

SEQ ID NO: 1574595 - DNA, 25 bp, Homo sapien
tattctggctcaaatccccacttcg

SEQ ID NO: 1574596 - DNA, 25 bp, Homo sapien
ttcggaaactcctcaggtcttcaga

SEQ ID NO: 1574597 - DNA, 25 bp, Homo sapien
ccacttcggaaactcctcaggtctt

SEQ ID NO: 1574598 - DNA, 25 bp, Homo sapien
ttcctattctggctcaaatccccac

SEQ ID NO: 1574599 - DNA, 25 bp, Homo sapien
atggcggccggaagtgaagcgaggg

SEQ ID NO: 1574600 - DNA, 25 bp, Homo sapien
cagtgtcgaacctctcagcttgctc

SEQ ID NO: 1574601 - DNA, 25 bp, Homo sapien
ggacgcacagggcagtgtcgaacct

SEQ ID NO: 1574602 - DNA, 25 bp, Homo sapien
cctcccagtaatggcggccggaagt

SEQ ID NO: 1574603 - DNA, 25 bp, Homo sapien
aatcttcccctgtcggttgacagat

SEQ ID NO: 1574604 - DNA, 25 bp, Homo sapien
gaagccgtgttctgaagaaagctca

SEQ ID NO: 1574605 - DNA, 25 bp, Homo sapien
gccgtgttctgaagaaagctcaatc

SEQ ID NO: 1574606 - DNA, 25 bp, Homo sapien
caatcttcccctgtcggttgacaga

SEQ ID NO: 1574607 - DNA, 25 bp, Homo sapien
gctggcagcaaagacctttccttct

SEQ ID NO: 1574608 - DNA, 25 bp, Homo sapien
ccagagaggagtcataggcacagtg

SEQ ID NO: 1574609 - DNA, 25 bp, Homo sapien
cacagtgctggcagcaaagaccttt

SEQ ID NO: 1574610 - DNA, 25 bp, Homo sapien
agagaggagtcataggcacagtgct

SEQ ID NO: 1574611 - DNA, 25 bp, Homo sapien
aaacaggaatctcgatgaatgtgtt

SEQ ID NO: 1574612 - DNA, 25 bp, Homo sapien
gaaatactggctagaatgaaggcca

SEQ ID NO: 1574613 - DNA, 25 bp, Homo sapien
tggaaatactggctagaatgaaggc

SEQ ID NO: 1574614 - DNA, 25 bp, Homo sapien
aaatactggctagaatgaaggccat

SEQ ID NO: 1574615 - DNA, 25 bp, Homo sapien
tattggaaatactggctagaatgaa

SEQ ID NO: 1574616 - DNA, 25 bp, Homo sapien
catgaagacatcatcgcctactctt

SEQ ID NO: 1574617 - DNA, 25 bp, Homo sapien
tgaagacatcatcgcctactctttg

SEQ ID NO: 1574618 - DNA, 25 bp, Homo sapien
tcatcgcctactctttgtaaagcac

SEQ ID NO: 1574619 - DNA, 25 bp, Homo sapien
agacatcatcgcctactctttgtaa

SEQ ID NO: 1574620 - DNA, 25 bp, Homo sapien
cagtgagttcatgcatcggaggcaa

SEQ ID NO: 1574621 - DNA, 25 bp, Homo sapien
gggttttcaagataatccaggcaga

SEQ ID NO: 1574622 - DNA, 25 bp, Homo sapien
cggaggcaacagatgtatccacatt

SEQ ID NO: 1574623 - DNA, 25 bp, Homo sapien
catcgggcccctttcgcagtgagtt

SEQ ID NO: 1574624 - DNA, 25 bp, Homo sapien
ttggaactttctcatccttggattc

SEQ ID NO: 1574625 - DNA, 25 bp, Homo sapien
ccacatcggacacgcctcaggtctt

SEQ ID NO: 1574626 - DNA, 25 bp, Homo sapien
gtctgaaattcccacatcggacacg

SEQ ID NO: 1574627 - DNA, 25 bp, Homo sapien
tcccacatcggacacgcctcaggtc

SEQ ID NO: 1574628 - DNA, 25 bp, Homo sapien
tgaaattcccacatcggacacgcct

SEQ ID NO: 1574629 - DNA, 25 bp, Homo sapien
atggcggccggaagtgaagcgaggg

SEQ ID NO: 1574630 - DNA, 25 bp, Homo sapien
cagtgtcgaacctctcagcttgctc

SEQ ID NO: 1574631 - DNA, 25 bp, Homo sapien
ggacgcacagggcagtgtcgaacct

SEQ ID NO: 1574632 - DNA, 25 bp, Homo sapien
cctcccagtaatggcggccggaagt

SEQ ID NO: 1574633 - DNA, 25 bp, Homo sapien
cagaagccgagttctgaagagagta

SEQ ID NO: 1574634 - DNA, 25 bp, Homo sapien
tagtgctggcaaagtagatctgtcc

SEQ ID NO: 1574635 - DNA, 25 bp, Homo sapien
cagagacccgtcacaggcttagtgc

SEQ ID NO: 1574636 - DNA, 25 bp, Homo sapien
gatctgtccttgtctcaaacccaca

SEQ ID NO: 1574637 - DNA, 25 bp, Homo sapien
aatccccactcggtgtagacctgag

SEQ ID NO: 1574638 - DNA, 25 bp, Homo sapien
tgcatgagcaaaacatgggcgcagt

SEQ ID NO: 1574639 - DNA, 25 bp, Homo sapien
gaaatggccctcgtttttatatcca

SEQ ID NO: 1574640 - DNA, 25 bp, Homo sapien
gcgcagtggctcagtagcagaaatt

SEQ ID NO: 1574641 - DNA, 25 bp, Homo sapien
tatccgtgatcatcacgacttgtat

SEQ ID NO: 1574642 - DNA, 25 bp, Homo sapien
tcaagtatccgtgatcatcacgact

SEQ ID NO: 1574643 - DNA, 25 bp, Homo sapien
cacactcaagtatccgtgatcatca

SEQ ID NO: 1574644 - DNA, 25 bp, Homo sapien
cacacactcaagtatccgtgatcat

SEQ ID NO: 1574645 - DNA, 25 bp, Homo sapien
agagacagtgaccaggaacaataaa

SEQ ID NO: 1574646 - DNA, 25 bp, Homo sapien
ctcaaagagacagtgaccaggaaca

SEQ ID NO: 1574647 - DNA, 25 bp, Homo sapien
cagagataccaatcctcaaagagac

SEQ ID NO: 1574648 - DNA, 25 bp, Homo sapien
tctggagcagagataccaatcctca

SEQ ID NO: 1574649 - DNA, 25 bp, Homo sapien
ccagataccacataagaccaaaatc

SEQ ID NO: 1574650 - DNA, 25 bp, Homo sapien
taccacataagaccaaaatcagaga

SEQ ID NO: 1574651 - DNA, 25 bp, Homo sapien
agataccacataagaccaaaatcag

SEQ ID NO: 1574652 - DNA, 25 bp, Homo sapien
gataccacataagaccaaaatcaga

SEQ ID NO: 1574653 - DNA, 25 bp, Homo sapien
gatcaagaggtttgcaagttcttcc

SEQ ID NO: 1574654 - DNA, 25 bp, Homo sapien
cttcatagtgcttgatcaagaggtt

SEQ ID NO: 1574655 - DNA, 25 bp, Homo sapien
ttgcaagttcttcccgggatgcttt

SEQ ID NO: 1574656 - DNA, 25 bp, Homo sapien
ttgatcaagaggtttgcaagttctt

SEQ ID NO: 1574657 - DNA, 25 bp, Homo sapien
cttttgaaagattcttaaggttatg

SEQ ID NO: 1574658 - DNA, 25 bp, Homo sapien
tcatgcagagatcctttctatccat

SEQ ID NO: 1574659 - DNA, 25 bp, Homo sapien
tgttctctccctcatgaccttcatg

SEQ ID NO: 1574660 - DNA, 25 bp, Homo sapien
ctccctcatgaccttcatgcagaga

SEQ ID NO: 1574661 - DNA, 25 bp, Homo sapien
ccttcatgcagagatcctttctatc

SEQ ID NO: 1574662 - DNA, 25 bp, Homo sapien
acatagtcctcattataagaaggct

SEQ ID NO: 1574663 - DNA, 25 bp, Homo sapien
catagtcctcattataagaaggctt

SEQ ID NO: 1574664 - DNA, 25 bp, Homo sapien
agtttcattagaactcactacacca

SEQ ID NO: 1574665 - DNA, 25 bp, Homo sapien
cactacaccattcacgggtatattg

SEQ ID NO: 1574666 - DNA, 25 bp, Homo sapien
acccacaaagttaagcattcctgca

SEQ ID NO: 1574667 - DNA, 25 bp, Homo sapien
ggtatattgtctacaggagccttcc

SEQ ID NO: 1574668 - DNA, 25 bp, Homo sapien
gatcactgtacgtggctgtttccca

SEQ ID NO: 1574669 - DNA, 25 bp, Homo sapien
gcaaaaaggcggtccaaatggtcac

SEQ ID NO: 1574670 - DNA, 25 bp, Homo sapien
gaccataagcggctgaatttctgct

SEQ ID NO: 1574671 - DNA, 25 bp, Homo sapien
caaagtataggtgaatctcagtgac

SEQ ID NO: 1574672 - DNA, 25 bp, Homo sapien
tccgaatcgggttcgttcaagccgc

SEQ ID NO: 1574673 - DNA, 25 bp, Homo sapien
gaaagatcttgttgtccgaccaggc

SEQ ID NO: 1574674 - DNA, 25 bp, Homo sapien
tgtcgatgacgaacaagagtctctc

SEQ ID NO: 1574675 - DNA, 25 bp, Homo sapien
cacgatctctgttataggagcagcg

SEQ ID NO: 1574676 - DNA, 25 bp, Homo sapien
tgagatcgtcacctgatcccggagc

SEQ ID NO: 1574677 - DNA, 25 bp, Homo sapien
cacacgggtttgatagcgatgagca

SEQ ID NO: 1574678 - DNA, 25 bp, Homo sapien
ctatcactctcgttgaatccccggg

SEQ ID NO: 1574679 - DNA, 25 bp, Homo sapien
gacgaaagaggagtacacagaggta

SEQ ID NO: 1574680 - DNA, 25 bp, Homo sapien
gaggaacacgtaggagctctcacgc

SEQ ID NO: 1574681 - DNA, 25 bp, Homo sapien
cctggatacacacgtggaggaacac

SEQ ID NO: 1574682 - DNA, 25 bp, Homo sapien
ggatgtcagcgtcaacaaccccatt

SEQ ID NO: 1574683 - DNA, 25 bp, Homo sapien
catttctccggaggtcgtcttcaca

SEQ ID NO: 1574684 - DNA, 25 bp, Homo sapien
tctcttgggacagttggaagccaaa

SEQ ID NO: 1574685 - DNA, 25 bp, Homo sapien
ccaaggaatccacctgtccctgagg

SEQ ID NO: 1574686 - DNA, 25 bp, Homo sapien
gacagtaaaatatcgccaaggaatc

SEQ ID NO: 1574687 - DNA, 25 bp, Homo sapien
taagcagtaggcagaaaccaccaag

SEQ ID NO: 1574688 - DNA, 25 bp, Homo sapien
cgggctgtatgattttttagactaa

SEQ ID NO: 1574689 - DNA, 25 bp, Homo sapien
cccgggctgtatgattttttagact

SEQ ID NO: 1574690 - DNA, 25 bp, Homo sapien
cacacccgggctgtatgatttttta

SEQ ID NO: 1574691 - DNA, 25 bp, Homo sapien
cacccgggctgtatgattttttaga

SEQ ID NO: 1574692 - DNA, 25 bp, Homo sapien
gcacagagcagatgtgatgccaaca

SEQ ID NO: 1574693 - DNA, 25 bp, Homo sapien
gccaacagatgaggctgtaatccga

SEQ ID NO: 1574694 - DNA, 25 bp, Homo sapien
cagatgtgatgccaacagatgaggc

SEQ ID NO: 1574695 - DNA, 25 bp, Homo sapien
tgtgatgccaacagatgaggctgta

SEQ ID NO: 1574696 - DNA, 25 bp, Homo sapien
tggttacaccaggtcacaaaggtcg

SEQ ID NO: 1574697 - DNA, 25 bp, Homo sapien
caaaggtcgactcgctgagggtgct

SEQ ID NO: 1574698 - DNA, 25 bp, Homo sapien
tgcctcagctggttacaccaggtca

SEQ ID NO: 1574699 - DNA, 25 bp, Homo sapien
ttctgaaggcgacagctgggatgcc

SEQ ID NO: 1574700 - DNA, 25 bp, Homo sapien
caagtctggctgataaaagagcacc

SEQ ID NO: 1574701 - DNA, 25 bp, Homo sapien
gaagctcaggtatttcaagtctggc

SEQ ID NO: 1574702 - DNA, 25 bp, Homo sapien
gctagctctttgacgttgcctgctg

SEQ ID NO: 1574703 - DNA, 25 bp, Homo sapien
tagttcaaggcatcacagagggacc

SEQ ID NO: 1574704 - DNA, 25 bp, Homo sapien
tataccaggaccgtgtctgggctgc

SEQ ID NO: 1574705 - DNA, 25 bp, Homo sapien
tgttggttagaaggccagcaaggac

SEQ ID NO: 1574706 - DNA, 25 bp, Homo sapien
ggttgcaggatacattcagatacgt

SEQ ID NO: 1574707 - DNA, 25 bp, Homo sapien
cacgcctgtgtctaactggttgcag

SEQ ID NO: 1574708 - DNA, 25 bp, Homo sapien
cattgcctgatgtctgaagtcttaa

SEQ ID NO: 1574709 - DNA, 25 bp, Homo sapien
tgggaggttaagtcctgtccctgtc

SEQ ID NO: 1574710 - DNA, 25 bp, Homo sapien
ccctgtccctctattttagctcgag

SEQ ID NO: 1574711 - DNA, 25 bp, Homo sapien
cagttctatttctcacaggcagcct

SEQ ID NO: 1574712 - DNA, 25 bp, Homo sapien
tgaggtctagatagcgcacgctctt

SEQ ID NO: 1574713 - DNA, 25 bp, Homo sapien
ccaggcagcagtccggatgtttcaa

SEQ ID NO: 1574714 - DNA, 25 bp, Homo sapien
ttcagagatgtattcgcagcactgc

SEQ ID NO: 1574715 - DNA, 25 bp, Homo sapien
caaggcctcgcagagagttttcagt

SEQ ID NO: 1574716 - DNA, 25 bp, Homo sapien
caggttttgattgctgatgagagca

SEQ ID NO: 1574717 - DNA, 25 bp, Homo sapien
gtcagagcccgacacaacagctgca

SEQ ID NO: 1574718 - DNA, 25 bp, Homo sapien
cgatttcattgcacccaatttgcag

SEQ ID NO: 1574719 - DNA, 25 bp, Homo sapien
tctctaagcggcaatccgtatgcgt

SEQ ID NO: 1574720 - DNA, 25 bp, Homo sapien
gacgcgagatccttacagcaggtgc

SEQ ID NO: 1574721 - DNA, 25 bp, Homo sapien
ggtgctcgttaacccacattcttcc

SEQ ID NO: 1574722 - DNA, 25 bp, Homo sapien
caggtgagaacagacgcgagatcct

SEQ ID NO: 1574723 - DNA, 25 bp, Homo sapien
tacagcaggtgctcgttaacccaca

SEQ ID NO: 1574724 - DNA, 25 bp, Homo sapien
gcacactctgggtgtctcagggcct

SEQ ID NO: 1574725 - DNA, 25 bp, Homo sapien
tgttcaaggtcaggttgagctgctg

SEQ ID NO: 1574726 - DNA, 25 bp, Homo sapien
cacagagtacaaccacccctgtgtg

SEQ ID NO: 1574727 - DNA, 25 bp, Homo sapien
agagtacaaccacccctgtgtggtc

SEQ ID NO: 1574728 - DNA, 25 bp, Homo sapien
tgtgtcacagtcgtctgtgatggtc

SEQ ID NO: 1574729 - DNA, 25 bp, Homo sapien
ttcctcagccgtcagaagtgcctgg

SEQ ID NO: 1574730 - DNA, 25 bp, Homo sapien
gatggtcaggttaggatttctctct

SEQ ID NO: 1574731 - DNA, 25 bp, Homo sapien
ctctcttcctcagccgtcagaagtg

SEQ ID NO: 1574732 - DNA, 25 bp, Homo sapien
tttgcaggtgttcgagtcagagccc

SEQ ID NO: 1574733 - DNA, 25 bp, Homo sapien
gagaccgagagaccatgaaggcctt

SEQ ID NO: 1574734 - DNA, 25 bp, Homo sapien
cagtgtcatgtaagtaacggtccca

SEQ ID NO: 1574735 - DNA, 25 bp, Homo sapien
tgccagaaatctcacaactcagagt

SEQ ID NO: 1574736 - DNA, 25 bp, Homo sapien
gacaaccgattggaagagagaaaca

SEQ ID NO: 1574737 - DNA, 25 bp, Homo sapien
tcagtgtccacgataaagacaaccg

SEQ ID NO: 1574738 - DNA, 25 bp, Homo sapien
gcagagaacacctcagtgtccacga

SEQ ID NO: 1574739 - DNA, 25 bp, Homo sapien
cacgataaagacaaccgattggaag

SEQ ID NO: 1574740 - DNA, 25 bp, Homo sapien
gtgtcagagggtggattcacgtcac

SEQ ID NO: 1574741 - DNA, 25 bp, Homo sapien
tccagggcggaatatgagaactgtg

SEQ ID NO: 1574742 - DNA, 25 bp, Homo sapien
ccccattttcacatggggagccggg

SEQ ID NO: 1574743 - DNA, 25 bp, Homo sapien
cagagggtggattcacgtcactcat

SEQ ID NO: 1574744 - DNA, 25 bp, Homo sapien
tactgagctcagtcagtaagagctg

SEQ ID NO: 1574745 - DNA, 25 bp, Homo sapien
taagagctgcttgaaccgttgtagc

SEQ ID NO: 1574746 - DNA, 25 bp, Homo sapien
tgaaccgttgtagctcctcatggct

SEQ ID NO: 1574747 - DNA, 25 bp, Homo sapien
cctcatggctcacgtttctcatgta

SEQ ID NO: 1574748 - DNA, 25 bp, Homo sapien
gttcgaagtcacatcccaagcgcgt

SEQ ID NO: 1574749 - DNA, 25 bp, Homo sapien
tatcaagagatgaaccacctctgcc

SEQ ID NO: 1574750 - DNA, 25 bp, Homo sapien
tctctctgcggactacaacacacat

SEQ ID NO: 1574751 - DNA, 25 bp, Homo sapien
tcgtccagggaaacgctctatcaag

SEQ ID NO: 1574752 - DNA, 25 bp, Homo sapien
cccacattcaagtcctctggttcca

SEQ ID NO: 1574753 - DNA, 25 bp, Homo sapien
cctccagattcacctgtgtttctcc

SEQ ID NO: 1574754 - DNA, 25 bp, Homo sapien
gtcctctggttccaaggtaggcaga

SEQ ID NO: 1574755 - DNA, 25 bp, Homo sapien
ctctggttccaaggtaggcagaatg

SEQ ID NO: 1574756 - DNA, 25 bp, Homo sapien
tatcatgatcagtagcgtggcctct

SEQ ID NO: 1574757 - DNA, 25 bp, Homo sapien
tagaaagcacaccagcgcttgtggg

SEQ ID NO: 1574758 - DNA, 25 bp, Homo sapien
gtttccaggccaagtcgtaatgtcc

SEQ ID NO: 1574759 - DNA, 25 bp, Homo sapien
tacaccttggtagaagaagtccctc

SEQ ID NO: 1574760 - DNA, 25 bp, Homo sapien
aagtcttgccaccaacgatgcagcc

SEQ ID NO: 1574761 - DNA, 25 bp, Homo sapien
caggacttccagcttatcattcgtt

SEQ ID NO: 1574762 - DNA, 25 bp, Homo sapien
aaacactgttggtcatagtcaggac

SEQ ID NO: 1574763 - DNA, 25 bp, Homo sapien
tgcggccgcgagagccttcaaaaaa

SEQ ID NO: 1574764 - DNA, 25 bp, Homo sapien
gaattctgtggcctcacaaacgagg

SEQ ID NO: 1574765 - DNA, 25 bp, Homo sapien
ggtgcagtcccactctcagggggtt

SEQ ID NO: 1574766 - DNA, 25 bp, Homo sapien
gagggaagagcgtctccttggaata

SEQ ID NO: 1574767 - DNA, 25 bp, Homo sapien
atagggtcccgtccacagtcgtaga

SEQ ID NO: 1574768 - DNA, 25 bp, Homo sapien
actccacttccacatgttgtatttc

SEQ ID NO: 1574769 - DNA, 25 bp, Homo sapien
cagatgctggttccccgtcaaaaca

SEQ ID NO: 1574770 - DNA, 25 bp, Homo sapien
ctgcatagaagcttcacagctttgg

SEQ ID NO: 1574771 - DNA, 25 bp, Homo sapien
ctgagacactgcagacggcaccggg

SEQ ID NO: 1574772 - DNA, 25 bp, Homo sapien
aacaaaatgagaggtcatacaaatt

SEQ ID NO: 1574773 - DNA, 25 bp, Homo sapien
ctggcagatgaaaacaaaatgagag

SEQ ID NO: 1574774 - DNA, 25 bp, Homo sapien
gaaaacaaaatgagaggtcatacaa

SEQ ID NO: 1574775 - DNA, 25 bp, Homo sapien
tggcagatgaaaacaaaatgagagg

SEQ ID NO: 1574776 - DNA, 25 bp, Homo sapien
gaaatgcggagattatccaagctac

SEQ ID NO: 1574777 - DNA, 25 bp, Homo sapien
gaaaggtaatgaaatgcggagatta

SEQ ID NO: 1574778 - DNA, 25 bp, Homo sapien
tacattcaactctgttggatgtaaa

SEQ ID NO: 1574779 - DNA, 25 bp, Homo sapien
gctacattcaactctgttggatgta

SEQ ID NO: 1574780 - DNA, 25 bp, Homo sapien
cagatacaaatgctgagccatggtt

SEQ ID NO: 1574781 - DNA, 25 bp, Homo sapien
gaagccagatacaaatgctgagcca

SEQ ID NO: 1574782 - DNA, 25 bp, Homo sapien
agccagatacaaatgctgagccatg

SEQ ID NO: 1574783 - DNA, 25 bp, Homo sapien
gccagatacaaatgctgagccatgg

SEQ ID NO: 1574784 - DNA, 25 bp, Homo sapien
ctaggggtggccaagcagtcttcca

SEQ ID NO: 1574785 - DNA, 25 bp, Homo sapien
aggggtggccaagcagtcttccaac

SEQ ID NO: 1574786 - DNA, 25 bp, Homo sapien
taggggtggccaagcagtcttccaa

SEQ ID NO: 1574787 - DNA, 25 bp, Homo sapien
tgcccgttaccttgaagattattgc

SEQ ID NO: 1574788 - DNA, 25 bp, Homo sapien
agctgggccacagacaggtaatacg

SEQ ID NO: 1574789 - DNA, 25 bp, Homo sapien
cagacaggtaatacgccccacagtt

SEQ ID NO: 1574790 - DNA, 25 bp, Homo sapien
gagagtctttagatgcccgttacct

SEQ ID NO: 1574791 - DNA, 25 bp, Homo sapien
gaggcaaggctttcacaagtaagct

SEQ ID NO: 1574792 - DNA, 25 bp, Homo sapien
aagtaagctgtgtaaggttgcagtt

SEQ ID NO: 1574793 - DNA, 25 bp, Homo sapien
ctgtgtaaggttgcagttctctatc

SEQ ID NO: 1574794 - DNA, 25 bp, Homo sapien
aggaggcaaggctttcacaagtaag

SEQ ID NO: 1574795 - DNA, 25 bp, Homo sapien
tttcaaggcgttttctgccaagctc

SEQ ID NO: 1574796 - DNA, 25 bp, Homo sapien
ttggccccttcatctttcaaggcgt

SEQ ID NO: 1574797 - DNA, 25 bp, Homo sapien
cttcatctttcaaggcgttttctgc

SEQ ID NO: 1574798 - DNA, 25 bp, Homo sapien
attccaaatatgcttggccccttca

SEQ ID NO: 1574799 - DNA, 25 bp, Homo sapien
cagagcgcagagatcatatcctgac

SEQ ID NO: 1574800 - DNA, 25 bp, Homo sapien
cagcaattaaaggtcaagtcacact

SEQ ID NO: 1574801 - DNA, 25 bp, Homo sapien
tgtaatgtacagtcagggttcttca

SEQ ID NO: 1574802 - DNA, 25 bp, Homo sapien
catccttcaggctattaaaacttag

SEQ ID NO: 1574803 - DNA, 25 bp, Homo sapien
cttttggcttgagaaggcctcgcac

SEQ ID NO: 1574804 - DNA, 25 bp, Homo sapien
agaataccatagactccaatcgcat

SEQ ID NO: 1574805 - DNA, 25 bp, Homo sapien
tcagatgttggtttttgcggagcat

SEQ ID NO: 1574806 - DNA, 25 bp, Homo sapien
aatcgcattcttgctcaagtccaga

SEQ ID NO: 1574807 - DNA, 25 bp, Homo sapien
tcttgccagcatatccacttcattg

SEQ ID NO: 1574808 - DNA, 25 bp, Homo sapien
ctaagaattccagtcctgtattatc

SEQ ID NO: 1574809 - DNA, 25 bp, Homo sapien
tccttccactacagggccctccagt

SEQ ID NO: 1574810 - DNA, 25 bp, Homo sapien
gggccctccagtcttgccagcatat

SEQ ID NO: 1574811 - DNA, 25 bp, Homo sapien
ctagttattcgagtccaggcaggaa

SEQ ID NO: 1574812 - DNA, 25 bp, Homo sapien
gaagctagttattcgagtccaggca

SEQ ID NO: 1574813 - DNA, 25 bp, Homo sapien
tattcgagtccaggcaggaatacag

SEQ ID NO: 1574814 - DNA, 25 bp, Homo sapien
gggagaagctagttattcgagtcca

SEQ ID NO: 1574815 - DNA, 25 bp, Homo sapien
taaggattaatctgggataggcagt

SEQ ID NO: 1574816 - DNA, 25 bp, Homo sapien
aaggattaatctgggataggcagtc

SEQ ID NO: 1574817 - DNA, 25 bp, Homo sapien
ctaaggattaatctgggataggcag

SEQ ID NO: 1574818 - DNA, 25 bp, Homo sapien
ggattaatctgggataggcagtcac

SEQ ID NO: 1574819 - DNA, 25 bp, Homo sapien
tattaatacacacagggcatcaccg

SEQ ID NO: 1574820 - DNA, 25 bp, Homo sapien
gagtgggaactgatcaatcaagccc

SEQ ID NO: 1574821 - DNA, 25 bp, Homo sapien
gcaggttcatacattcagagctgag

SEQ ID NO: 1574822 - DNA, 25 bp, Homo sapien
tgcatacaggatgataacgcctggt

SEQ ID NO: 1574823 - DNA, 25 bp, Homo sapien
agcagctccaagttcaagtcctcct

SEQ ID NO: 1574824 - DNA, 25 bp, Homo sapien
cacgtggtgatgctgagagcagagc

SEQ ID NO: 1574825 - DNA, 25 bp, Homo sapien
gttcaagtcctcctgcaaccttcat

SEQ ID NO: 1574826 - DNA, 25 bp, Homo sapien
gcacgtggtgatgctgagagcagag

SEQ ID NO: 1574827 - DNA, 25 bp, Homo sapien
acaatatctgtttatcctattacta

SEQ ID NO: 1574828 - DNA, 25 bp, Homo sapien
tatctgtttatcctattactagaca

SEQ ID NO: 1574829 - DNA, 25 bp, Homo sapien
ttttcaattcttcatggacgaagca

SEQ ID NO: 1574830 - DNA, 25 bp, Homo sapien
tcatggacgaagcatttgttgccac

SEQ ID NO: 1574831 - DNA, 25 bp, Homo sapien
gaggagtgccagacattccacgttg

SEQ ID NO: 1574832 - DNA, 25 bp, Homo sapien
ttctccgagagggttcgcaggttca

SEQ ID NO: 1574833 - DNA, 25 bp, Homo sapien
gatgctaatggacgtagcccaggcc

SEQ ID NO: 1574834 - DNA, 25 bp, Homo sapien
tcatagagacaccattgcagcccgt

SEQ ID NO: 1574835 - DNA, 25 bp, Homo sapien
ccttggtcagtcatcgttgcttcag

SEQ ID NO: 1574836 - DNA, 25 bp, Homo sapien
tcagtcatcgttgcttcaggatctt

SEQ ID NO: 1574837 - DNA, 25 bp, Homo sapien
tgcttggtccttggtcagtcatcgt

SEQ ID NO: 1574838 - DNA, 25 bp, Homo sapien
ttggtccttggtcagtcatcgttgc

SEQ ID NO: 1574839 - DNA, 25 bp, Homo sapien
tgtaaatacgcagagcagtggctgg

SEQ ID NO: 1574840 - DNA, 25 bp, Homo sapien
tagaacctttgggattcagagcctc

SEQ ID NO: 1574841 - DNA, 25 bp, Homo sapien
taggtttcacggtcaacactggctg

SEQ ID NO: 1574842 - DNA, 25 bp, Homo sapien
caaactgaagacgatgggaagtcct

SEQ ID NO: 1574843 - DNA, 25 bp, Homo sapien
tgtggcactatcttgttgcacagct

SEQ ID NO: 1574844 - DNA, 25 bp, Homo sapien
gcagctgtggcactatcttgttgca

SEQ ID NO: 1574845 - DNA, 25 bp, Homo sapien
actatcttgttgcacagcttgtgaa

SEQ ID NO: 1574846 - DNA, 25 bp, Homo sapien
gctgtggcactatcttgttgcacag

SEQ ID NO: 1574847 - DNA, 25 bp, Homo sapien
tcttgttccatagcttgtgaaattt

SEQ ID NO: 1574848 - DNA, 25 bp, Homo sapien
ggcaccttcttgttccatagcttgt

SEQ ID NO: 1574849 - DNA, 25 bp, Homo sapien
ctgtggcaccttcttgttccatagc

SEQ ID NO: 1574850 - DNA, 25 bp, Homo sapien
ccttcttgttccatagcttgtgaaa

SEQ ID NO: 1574851 - DNA, 25 bp, Homo sapien
tcttgttccatagcttgtgaaattt

SEQ ID NO: 1574852 - DNA, 25 bp, Homo sapien
ggcaccttcttgttccatagcttgt

SEQ ID NO: 1574853 - DNA, 25 bp, Homo sapien
ctgtggcaccttcttgttccatagc

SEQ ID NO: 1574854 - DNA, 25 bp, Homo sapien
ccttcttgttccatagcttgtgaaa

SEQ ID NO: 1574855 - DNA, 25 bp, Homo sapien
aacgtttgcatttccggccagtcag

SEQ ID NO: 1574856 - DNA, 25 bp, Homo sapien
taacacgtagtacaaggcggcacag

SEQ ID NO: 1574857 - DNA, 25 bp, Homo sapien
cagcagactgcgtatgagggtgaac

SEQ ID NO: 1574858 - DNA, 25 bp, Homo sapien
aacaacagcctttctggtcgggaca

SEQ ID NO: 1574859 - DNA, 25 bp, Homo sapien
gtgggatgcctcagcttggcacaca

SEQ ID NO: 1574860 - DNA, 25 bp, Homo sapien
cagggtcttcatggcccgctctgtc

SEQ ID NO: 1574861 - DNA, 25 bp, Homo sapien
ggtgggtgccaagcatggagcagaa

SEQ ID NO: 1574862 - DNA, 25 bp, Homo sapien
tcctcaatgagggtcttatcccgca

SEQ ID NO: 1574863 - DNA, 25 bp, Homo sapien
ccaagttgagggatcttaggttacg

SEQ ID NO: 1574864 - DNA, 25 bp, Homo sapien
gccatgacgattctccagaggtgct

SEQ ID NO: 1574865 - DNA, 25 bp, Homo sapien
ggatcttaggttacggttggccatg

SEQ ID NO: 1574866 - DNA, 25 bp, Homo sapien
caccaggggtaatctgtgcatttct

SEQ ID NO: 1574867 - DNA, 25 bp, Homo sapien
taaggcttcacacgccatccttaca

SEQ ID NO: 1574868 - DNA, 25 bp, Homo sapien
ttgggtgttttaaggcttcacacgc

SEQ ID NO: 1574869 - DNA, 25 bp, Homo sapien
ggtgttttaaggcttcacacgccat

SEQ ID NO: 1574870 - DNA, 25 bp, Homo sapien
gttttaaggcttcacacgccatcct

SEQ ID NO: 1574871 - DNA, 25 bp, Homo sapien
cgcactgggagactctcaaggcatc

SEQ ID NO: 1574872 - DNA, 25 bp, Homo sapien
ggcattactccctggtctgtcacct

SEQ ID NO: 1574873 - DNA, 25 bp, Homo sapien
cttcaggtaacaggcatgggtcaat

SEQ ID NO: 1574874 - DNA, 25 bp, Homo sapien
atgggtcaatccacagcaatccagc

SEQ ID NO: 1574875 - DNA, 25 bp, Homo sapien
caagaagagagccccagagaggaca

SEQ ID NO: 1574876 - DNA, 25 bp, Homo sapien
tgcaagaagagagccccagagagga

SEQ ID NO: 1574877 - DNA, 25 bp, Homo sapien
ctgcaagaagagagccccagagagg

SEQ ID NO: 1574878 - DNA, 25 bp, Homo sapien
aagaagagagccccagagaggacat

SEQ ID NO: 1574879 - DNA, 25 bp, Homo sapien
ggaagcctcatggatcgacacagta

SEQ ID NO: 1574880 - DNA, 25 bp, Homo sapien
ctctggcaacccgtggctgtgatgc

SEQ ID NO: 1574881 - DNA, 25 bp, Homo sapien
taggcacaggtgtgtcaagctccgg

SEQ ID NO: 1574882 - DNA, 25 bp, Homo sapien
gacacagtagatttacaccttcgtt

SEQ ID NO: 1574883 - DNA, 25 bp, Homo sapien
agccagccgtgtccaggtggcactg

SEQ ID NO: 1574884 - DNA, 25 bp, Homo sapien
agttacccataagcgcaagtgcaag

SEQ ID NO: 1574885 - DNA, 25 bp, Homo sapien
taaggctcaggtgcgtcagccatga

SEQ ID NO: 1574886 - DNA, 25 bp, Homo sapien
agaaaaccacagccagccgtgtcca

SEQ ID NO: 1574887 - DNA, 25 bp, Homo sapien
atgacaagatggttctctcatgacc

SEQ ID NO: 1574888 - DNA, 25 bp, Homo sapien
tcatgacctcgcacagaagcttcac

SEQ ID NO: 1574889 - DNA, 25 bp, Homo sapien
ctctcatgacctcgcacagaagctt

SEQ ID NO: 1574890 - DNA, 25 bp, Homo sapien
tgacaagatggttctctcatgacct

SEQ ID NO: 1574891 - DNA, 25 bp, Homo sapien
gcattgtccgtgagatccaggctct

SEQ ID NO: 1574892 - DNA, 25 bp, Homo sapien
cacgcggcggtgagatgacacttta

SEQ ID NO: 1574893 - DNA, 25 bp, Homo sapien
tctgctcctcgagatcacacaggac

SEQ ID NO: 1574894 - DNA, 25 bp, Homo sapien
tcgccagaacactgttcttttgctt

SEQ ID NO: 1574895 - DNA, 25 bp, Homo sapien
catccgtctcatccataggagccga

SEQ ID NO: 1574896 - DNA, 25 bp, Homo sapien
caatcggcagttgagggttttctac

SEQ ID NO: 1574897 - DNA, 25 bp, Homo sapien
catttagcaccaggactagcacgca

SEQ ID NO: 1574898 - DNA, 25 bp, Homo sapien
taggagccgagctggaacttatacc

SEQ ID NO: 1574899 - DNA, 25 bp, Homo sapien
tgtaagttagacgtgggacaggcaa

SEQ ID NO: 1574900 - DNA, 25 bp, Homo sapien
caaaggccgaacacagcttcatcat

SEQ ID NO: 1574901 - DNA, 25 bp, Homo sapien
tagactggtcagatgccggttgcag

SEQ ID NO: 1574902 - DNA, 25 bp, Homo sapien
gaaagggccaaggagagtgcctcac

SEQ ID NO: 1574903 - DNA, 25 bp, Homo sapien
caactaccgtcaattacgactcggg

SEQ ID NO: 1574904 - DNA, 25 bp, Homo sapien
ccttatttgcacagggtactgccat

SEQ ID NO: 1574905 - DNA, 25 bp, Homo sapien
gactcggggcttgagtagctgcact

SEQ ID NO: 1574906 - DNA, 25 bp, Homo sapien
tcaaaagaatgccaactaccgtcaa

SEQ ID NO: 1574907 - DNA, 25 bp, Homo sapien
cagtaaccaacgtagagtgaacaca

SEQ ID NO: 1574908 - DNA, 25 bp, Homo sapien
tatatgctctgagatatgacggaca

SEQ ID NO: 1574909 - DNA, 25 bp, Homo sapien
tgctctgagaaaacagcgtttaaag

SEQ ID NO: 1574910 - DNA, 25 bp, Homo sapien
gaatcactaccattgagggctttgt

SEQ ID NO: 1574911 - DNA, 25 bp, Homo sapien
gatttcctgtgagccagtcgcgtcc

SEQ ID NO: 1574912 - DNA, 25 bp, Homo sapien
taacatccggctgtgtctgaagact

SEQ ID NO: 1574913 - DNA, 25 bp, Homo sapien
tggcaggtaaaagcagggacgtcac

SEQ ID NO: 1574914 - DNA, 25 bp, Homo sapien
gggacgtcactgaacaccctacagc

SEQ ID NO: 1574915 - DNA, 25 bp, Homo sapien
atagaggtaactggtaggtggtcct

SEQ ID NO: 1574916 - DNA, 25 bp, Homo sapien
tggtgggatgaaacactgcccagac

SEQ ID NO: 1574917 - DNA, 25 bp, Homo sapien
gctgcattcgccactgtgactggtg

SEQ ID NO: 1574918 - DNA, 25 bp, Homo sapien
ccacctggattcttgagaactgcag

SEQ ID NO: 1574919 - DNA, 25 bp, Homo sapien
tgcaactgggcaaggtcaatattct

SEQ ID NO: 1574920 - DNA, 25 bp, Homo sapien
tggttccaccaatgccagaactggc

SEQ ID NO: 1574921 - DNA, 25 bp, Homo sapien
tcctctggatgaggaggtaaagatg

SEQ ID NO: 1574922 - DNA, 25 bp, Homo sapien
gatgattgctcacagttggaggtag

SEQ ID NO: 1574923 - DNA, 25 bp, Homo sapien
cagctggttccaccaatgccagaac

SEQ ID NO: 1574924 - DNA, 25 bp, Homo sapien
ctgtggtctcagtgatgggtcctgt

SEQ ID NO: 1574925 - DNA, 25 bp, Homo sapien
tggtctcagtgatgggtcctgttcc

SEQ ID NO: 1574926 - DNA, 25 bp, Homo sapien
ggtctcagtgatgggtcctgttcct

SEQ ID NO: 1574927 - DNA, 25 bp, Homo sapien
ctgagtctatattctcagtgttctc

SEQ ID NO: 1574928 - DNA, 25 bp, Homo sapien
gagacttggcaaatcgtgtactgct

SEQ ID NO: 1574929 - DNA, 25 bp, Homo sapien
atcgtgtactgctcttgaagtctcc

SEQ ID NO: 1574930 - DNA, 25 bp, Homo sapien
cagggagccggaaagtaagtcctat

SEQ ID NO: 1574931 - DNA, 25 bp, Homo sapien
cagccagaagcgacacacacttctt

SEQ ID NO: 1574932 - DNA, 25 bp, Homo sapien
catactgctgtagaccaagctcgtc

SEQ ID NO: 1574933 - DNA, 25 bp, Homo sapien
gctgctctaagagaatacgtagtgt

SEQ ID NO: 1574934 - DNA, 25 bp, Homo sapien
tccagcgcgaccatgtggtgcaaga

SEQ ID NO: 1574935 - DNA, 25 bp, Homo sapien
taatatctccatgattcaagccagc

SEQ ID NO: 1574936 - DNA, 25 bp, Homo sapien
tccaagcccttcgagctcagcagtt

SEQ ID NO: 1574937 - DNA, 25 bp, Homo sapien
caagcccttcgagctcagcagtttc

SEQ ID NO: 1574938 - DNA, 25 bp, Homo sapien
ctgttggatccaagcccttcgagct

SEQ ID NO: 1574939 - DNA, 25 bp, Homo sapien
tggatccaagcccttcgagctcagc

SEQ ID NO: 1574940 - DNA, 25 bp, Homo sapien
gtgaccaggacacaccgctgtggtc

SEQ ID NO: 1574941 - DNA, 25 bp, Homo sapien
gtcatcagcactgttggacacaagc

SEQ ID NO: 1574942 - DNA, 25 bp, Homo sapien
catcagcactgttggacacaagccc

SEQ ID NO: 1574943 - DNA, 25 bp, Homo sapien
tgaccaggacacaccgctgtggtca

SEQ ID NO: 1574944 - DNA, 25 bp, Homo sapien
ccacggcaaggtgaggctaggcggc

SEQ ID NO: 1574945 - DNA, 25 bp, Homo sapien
acggcaaggtgaggctaggcggccg

SEQ ID NO: 1574946 - DNA, 25 bp, Homo sapien
ggcaaggtgaggctaggcggccgct

SEQ ID NO: 1574947 - DNA, 25 bp, Homo sapien
cacggcaaggtgaggctaggcggcc

SEQ ID NO: 1574948 - DNA, 25 bp, Homo sapien
accatggcgactggtttcctggacc

SEQ ID NO: 1574949 - DNA, 25 bp, Homo sapien
gggctcgaccatggcgactggtttc

SEQ ID NO: 1574950 - DNA, 25 bp, Homo sapien
ctcgaccatggcgactggtttcctg

SEQ ID NO: 1574951 - DNA, 25 bp, Homo sapien
atcagaagggggctcgaccatggcg

SEQ ID NO: 1574952 - DNA, 25 bp, Homo sapien
atttcaggcagtgcgcgtgcccgag

SEQ ID NO: 1574953 - DNA, 25 bp, Homo sapien
gaggatggtgcgctcagctgtctct

SEQ ID NO: 1574954 - DNA, 25 bp, Homo sapien
cctgccaggtgagcgctgttgttca

SEQ ID NO: 1574955 - DNA, 25 bp, Homo sapien
ccagccgagcgcttagggcatttca

SEQ ID NO: 1574956 - DNA, 25 bp, Homo sapien
ttagagctcgagtcgttccttcccc

SEQ ID NO: 1574957 - DNA, 25 bp, Homo sapien
ctgcgaggaatggagaaaccaggcc

SEQ ID NO: 1574958 - DNA, 25 bp, Homo sapien
aaccaggccctttagaggatcccag

SEQ ID NO: 1574959 - DNA, 25 bp, Homo sapien
ttccgggtcccatccttagagctcg

SEQ ID NO: 1574960 - DNA, 25 bp, Homo sapien
caagccgtacgtgtgtctggagtgc

SEQ ID NO: 1574961 - DNA, 25 bp, Homo sapien
cacaagaagatccacgcggtgggcg

SEQ ID NO: 1574962 - DNA, 25 bp, Homo sapien
agcgacgacgtgcaagaccaagaga

SEQ ID NO: 1574963 - DNA, 25 bp, Homo sapien
ccttcctaagttatcggcctgcgag

SEQ ID NO: 1574964 - DNA, 25 bp, Homo sapien
actggtccaagctgacgcggcacca

SEQ ID NO: 1574965 - DNA, 25 bp, Homo sapien
ctggtccaagctgacgcggcaccag

SEQ ID NO: 1574966 - DNA, 25 bp, Homo sapien
ggtccaagctgacgcggcaccagcg

SEQ ID NO: 1574967 - DNA, 25 bp, Homo sapien
ccactggtccaagctgacgcggcac

SEQ ID NO: 1574968 - DNA, 25 bp, Homo sapien
tgcgcagagaccctcacggtgtgtg

SEQ ID NO: 1574969 - DNA, 25 bp, Homo sapien
taggcgcctgttgccctgtttctgc

SEQ ID NO: 1574970 - DNA, 25 bp, Homo sapien
ctgctgtgatgggtaagtatctgcc

SEQ ID NO: 1574971 - DNA, 25 bp, Homo sapien
ggagtgtcgtgtgcagagaccctta

SEQ ID NO: 1574972 - DNA, 25 bp, Homo sapien
gatcagtggcgtgtgtagagaccct

SEQ ID NO: 1574973 - DNA, 25 bp, Homo sapien
tggtgtgcgtagagaccttcctggt

SEQ ID NO: 1574974 - DNA, 25 bp, Homo sapien
ccttcctggtgcgtggcacggatca

SEQ ID NO: 1574975 - DNA, 25 bp, Homo sapien
catgtgtagagaccctcatggtacg

SEQ ID NO: 1574976 - DNA, 25 bp, Homo sapien
tccgtaactggcagttagttgtaaa

SEQ ID NO: 1574977 - DNA, 25 bp, Homo sapien
acaaagagatccgtaactggcagtt

SEQ ID NO: 1574978 - DNA, 25 bp, Homo sapien
gagatccgtaactggcagttagttg

SEQ ID NO: 1574979 - DNA, 25 bp, Homo sapien
aagagatccgtaactggcagttagt

SEQ ID NO: 1574980 - DNA, 25 bp, Homo sapien
catgttcatggcagtttagcctgaa

SEQ ID NO: 1574981 - DNA, 25 bp, Homo sapien
ggtagagctagcctggtcgggctgc

SEQ ID NO: 1574982 - DNA, 25 bp, Homo sapien
tctgcctgtccttccgcgtgggtct

SEQ ID NO: 1574983 - DNA, 25 bp, Homo sapien
gaggtctgcctgtccttccgcgtgg

SEQ ID NO: 1574984 - DNA, 25 bp, Homo sapien
cggaacctcactgtgatggaggctg

SEQ ID NO: 1574985 - DNA, 25 bp, Homo sapien
cgtgggtctcttgagttcctcccgg

SEQ ID NO: 1574986 - DNA, 25 bp, Homo sapien
cattcggaacctcactgtgatggag

SEQ ID NO: 1574987 - DNA, 25 bp, Homo sapien
tccccggcgtgggtctcttgagttc

SEQ ID NO: 1574988 - DNA, 25 bp, Homo sapien
cttcctctacgaggagggcgtgttt

SEQ ID NO: 1574989 - DNA, 25 bp, Homo sapien
gtcctcttcctctacgaggagggcg

SEQ ID NO: 1574990 - DNA, 25 bp, Homo sapien
tcctcttcctctacgaggagggcgt

SEQ ID NO: 1574991 - DNA, 25 bp, Homo sapien
ctcttcctctacgaggagggcgtgt

SEQ ID NO: 1574992 - DNA, 25 bp, Homo sapien
taagacccggaagccttcgcataag

SEQ ID NO: 1574993 - DNA, 25 bp, Homo sapien
gccctctcggaaagtagttgagtgt

SEQ ID NO: 1574994 - DNA, 25 bp, Homo sapien
caggcaccaagtcctgcgggctgtg

SEQ ID NO: 1574995 - DNA, 25 bp, Homo sapien
gcataaggatctgaagatctgcagg

SEQ ID NO: 1574996 - DNA, 25 bp, Homo sapien
tgtctggcaggaatgaacgcggctt

SEQ ID NO: 1574997 - DNA, 25 bp, Homo sapien
ttcttcccaactgtatctcgcaatg

SEQ ID NO: 1574998 - DNA, 25 bp, Homo sapien
tgatactgtggcttccgtctcgccc

SEQ ID NO: 1574999 - DNA, 25 bp, Homo sapien
gaacgcggcttctcagaggttgata

SEQ ID NO: 1575000 - DNA, 25 bp, Homo sapien
tgcaaacccttgtcgctagcctgca

SEQ ID NO: 1575001 - DNA, 25 bp, Homo sapien
cagtcccacatgatgtgccttcaga

SEQ ID NO: 1575002 - DNA, 25 bp, Homo sapien
ccaccgaaactggtcccagagggat

SEQ ID NO: 1575003 - DNA, 25 bp, Homo sapien
aggcagatccggaggaatattccag

SEQ ID NO: 1575004 - DNA, 25 bp, Homo sapien
actcccaggaagcatcgcggcaaag

SEQ ID NO: 1575005 - DNA, 25 bp, Homo sapien
aagcatcgcggcaaaggcggctgcc

SEQ ID NO: 1575006 - DNA, 25 bp, Homo sapien
ggcaaaggcggctgccaattggccc

SEQ ID NO: 1575007 - DNA, 25 bp, Homo sapien
catcgcggcaaaggcggctgccaat

SEQ ID NO: 1575008 - DNA, 25 bp, Homo sapien
caatcccatactccgagccgctcgt

SEQ ID NO: 1575009 - DNA, 25 bp, Homo sapien
atgcgcacaaagctcgccgggactc

SEQ ID NO: 1575010 - DNA, 25 bp, Homo sapien
cgagccgctcgttcagcccaacaac

SEQ ID NO: 1575011 - DNA, 25 bp, Homo sapien
atgccccagcaggctttgcgccaaa

SEQ ID NO: 1575012 - DNA, 25 bp, Homo sapien
cccatccaacctctggtccctccct

SEQ ID NO: 1575013 - DNA, 25 bp, Homo sapien
tcttcccatccaacctctggtccct

SEQ ID NO: 1575014 - DNA, 25 bp, Homo sapien
cttcccatccaacctctggtccctc

SEQ ID NO: 1575015 - DNA, 25 bp, Homo sapien
ttcccatccaacctctggtccctcc

SEQ ID NO: 1575016 - DNA, 25 bp, Homo sapien
aataccctgtatctccatttcgttg

SEQ ID NO: 1575017 - DNA, 25 bp, Homo sapien
tctgtgtccttggacgaggtacaag

SEQ ID NO: 1575018 - DNA, 25 bp, Homo sapien
ttacctacggcacaaaggctctggg

SEQ ID NO: 1575019 - DNA, 25 bp, Homo sapien
ggcaccttttgtaataccctgtatc

SEQ ID NO: 1575020 - DNA, 25 bp, Homo sapien
tctgggactaaggaggaatttccgc

SEQ ID NO: 1575021 - DNA, 25 bp, Homo sapien
tggatgccttgaagacagccactga

SEQ ID NO: 1575022 - DNA, 25 bp, Homo sapien
gaatttccgccagagagcaatgcca

SEQ ID NO: 1575023 - DNA, 25 bp, Homo sapien
caatctcagaggtgatcacaggtca

SEQ ID NO: 1575024 - DNA, 25 bp, Homo sapien
tgtgagggggcagcgctcactcggg

SEQ ID NO: 1575025 - DNA, 25 bp, Homo sapien
ctcactcgggtggtgaggaaagggt

SEQ ID NO: 1575026 - DNA, 25 bp, Homo sapien
gatcccagggagtcaagtccaggct

SEQ ID NO: 1575027 - DNA, 25 bp, Homo sapien
tgaggaaagggtgtgcccttcctgg

SEQ ID NO: 1575028 - DNA, 25 bp, Homo sapien
aggtggaagcggcggaagcggtgcc

SEQ ID NO: 1575029 - DNA, 25 bp, Homo sapien
gtggaagcggcggaagcggtgccac

SEQ ID NO: 1575030 - DNA, 25 bp, Homo sapien
ccaggtggaagcggcggaagcggtg

SEQ ID NO: 1575031 - DNA, 25 bp, Homo sapien
tggaagcggcggaagcggtgccacg

SEQ ID NO: 1575032 - DNA, 25 bp, Homo sapien
tcatcacggtggcaagtgtcagccc

SEQ ID NO: 1575033 - DNA, 25 bp, Homo sapien
agctcctcgggccctctgtggtcat

SEQ ID NO: 1575034 - DNA, 25 bp, Homo sapien
agacttcacccagaacgtgagtcgg

SEQ ID NO: 1575035 - DNA, 25 bp, Homo sapien
cgtgagtcggcccttgcctgctgtg

SEQ ID NO: 1575036 - DNA, 25 bp, Homo sapien
aacaatgacccggaaggagggcgag

SEQ ID NO: 1575037 - DNA, 25 bp, Homo sapien
ggaaggagggcgaggatagagaagc

SEQ ID NO: 1575038 - DNA, 25 bp, Homo sapien
gagggcgaggatagagaagccagag

SEQ ID NO: 1575039 - DNA, 25 bp, Homo sapien
gaggatagagaagccagagccagca

SEQ ID NO: 1575040 - DNA, 25 bp, Homo sapien
aaccttcatggcacatgtaacaaac

SEQ ID NO: 1575041 - DNA, 25 bp, Homo sapien
gttggtatgtgcagcaaaccttcat

SEQ ID NO: 1575042 - DNA, 25 bp, Homo sapien
accttcatggcacatgtaacaaacc

SEQ ID NO: 1575043 - DNA, 25 bp, Homo sapien
ggcgaaaccccgaggctcacagatt

SEQ ID NO: 1575044 - DNA, 25 bp, Homo sapien
gaaatctacctagacagcacccatg

SEQ ID NO: 1575045 - DNA, 25 bp, Homo sapien
gattccacgttggttctgttccacc

SEQ ID NO: 1575046 - DNA, 25 bp, Homo sapien
tctgaggagtcatggaaactggaaa

SEQ ID NO: 1575047 - DNA, 25 bp, Homo sapien
tgtcagctgtctatacgccaccgtc

SEQ ID NO: 1575048 - DNA, 25 bp, Homo sapien
gatgtcagctgtctatacaccaccg

SEQ ID NO: 1575049 - DNA, 25 bp, Homo sapien
gtcagctgtctatgcgtcaccgtca

SEQ ID NO: 1575050 - DNA, 25 bp, Homo sapien
tcagctgtctatgcgtcaccgtcag

SEQ ID NO: 1575051 - DNA, 25 bp, Homo sapien
gcccccagatgtcagctgtctatac

SEQ ID NO: 1575052 - DNA, 25 bp, Homo sapien
cccccagatgtcagctgtctataca

SEQ ID NO: 1575053 - DNA, 25 bp, Homo sapien
ccccagatgtcagctgtctatacac

SEQ ID NO: 1575054 - DNA, 25 bp, Homo sapien
tgcggtggtgcagtcctggttcact

SEQ ID NO: 1575055 - DNA, 25 bp, Homo sapien
cggtggtgcagtcctggttcactgc

SEQ ID NO: 1575056 - DNA, 25 bp, Homo sapien
agtgcggtggtgcagtcctggttca

SEQ ID NO: 1575057 - DNA, 25 bp, Homo sapien
gagtgcggtggtgcagtcctggttc

SEQ ID NO: 1575058 - DNA, 25 bp, Homo sapien
tgaccctgtgtgtgactgactgagc

SEQ ID NO: 1575059 - DNA, 25 bp, Homo sapien
taacgatgggaagctttaggcctca

SEQ ID NO: 1575060 - DNA, 25 bp, Homo sapien
tatacattgggctctgtccacggct

SEQ ID NO: 1575061 - DNA, 25 bp, Homo sapien
ccttggaggcctggtagaacttaca

SEQ ID NO: 1575062 - DNA, 25 bp, Homo sapien
acaggcgcgccttgtggggccaggc

SEQ ID NO: 1575063 - DNA, 25 bp, Homo sapien
caggcgcgccttgtggggccaggca

SEQ ID NO: 1575064 - DNA, 25 bp, Homo sapien
gacaggcgcgccttgtggggccagg

SEQ ID NO: 1575065 - DNA, 25 bp, Homo sapien
tgtccacaggaagagacatccaggg

SEQ ID NO: 1575066 - DNA, 25 bp, Homo sapien
acaggaagagacatccagggcacac

SEQ ID NO: 1575067 - DNA, 25 bp, Homo sapien
tccacaggaagagacatccagggca

SEQ ID NO: 1575068 - DNA, 25 bp, Homo sapien
cacaggaagagacatccagggcaca

SEQ ID NO: 1575069 - DNA, 25 bp, Homo sapien
ggaagccgtgccagcagacggttct

SEQ ID NO: 1575070 - DNA, 25 bp, Homo sapien
cgtgccagcagacggttctcccaga

SEQ ID NO: 1575071 - DNA, 25 bp, Homo sapien
gcctgagatccacccattcctcggg

SEQ ID NO: 1575072 - DNA, 25 bp, Homo sapien
cagcagacggttctcccagagatct

SEQ ID NO: 1575073 - DNA, 25 bp, Homo sapien
catcggagagagtcagaagagcaca

SEQ ID NO: 1575074 - DNA, 25 bp, Homo sapien
tcaaaatacaagagcgtgggcctgg

SEQ ID NO: 1575075 - DNA, 25 bp, Homo sapien
gggcttggcacaacgctgactagat

SEQ ID NO: 1575076 - DNA, 25 bp, Homo sapien
gactagatcctaggtgcctcgcaac

SEQ ID NO: 1575077 - DNA, 25 bp, Homo sapien
cacagtcatgctgggcgacactgaa

SEQ ID NO: 1575078 - DNA, 25 bp, Homo sapien
gatgttactgtttacacccctgagt

SEQ ID NO: 1575079 - DNA, 25 bp, Homo sapien
cagaggagtacgtggatcacaaagc

SEQ ID NO: 1575080 - DNA, 25 bp, Homo sapien
tcttctggtgcctatgacagctaag

SEQ ID NO: 1575081 - DNA, 25 bp, Homo sapien
cagggccctgcgtcacatcctgagg

SEQ ID NO: 1575082 - DNA, 25 bp, Homo sapien
tgaggcaccctcgttgctgacgacc

SEQ ID NO: 1575083 - DNA, 25 bp, Homo sapien
tcgttgctgacgacccatcggggga

SEQ ID NO: 1575084 - DNA, 25 bp, Homo sapien
gtcacatcctgaggcaccctcgttg

SEQ ID NO: 1575085 - DNA, 25 bp, Homo sapien
tggtgccaggatcgttcactgaacc

SEQ ID NO: 1575086 - DNA, 25 bp, Homo sapien
tcctggtgccaggatcgttcactga

SEQ ID NO: 1575087 - DNA, 25 bp, Homo sapien
gctggggtccaagtctgtccttgtc

SEQ ID NO: 1575088 - DNA, 25 bp, Homo sapien
ctggggtccaagtctgtccttgtcc

SEQ ID NO: 1575089 - DNA, 25 bp, Homo sapien
ctgggaaaagaaagagagtcagcat

SEQ ID NO: 1575090 - DNA, 25 bp, Homo sapien
gtccccaggcgccggcccctcagcc

SEQ ID NO: 1575091 - DNA, 25 bp, Homo sapien
ggagtccccaggcgccggcccctca

SEQ ID NO: 1575092 - DNA, 25 bp, Homo sapien
ggcccctcagccccaggggcggtgc

SEQ ID NO: 1575093 - DNA, 25 bp, Homo sapien
cggcccctcagccccaggggcggtg

SEQ ID NO: 1575094 - DNA, 25 bp, Homo sapien
cgcgctcccgagtgcgtcttgcggt

SEQ ID NO: 1575095 - DNA, 25 bp, Homo sapien
ggcgcaccaggtgctcgcgccagta

SEQ ID NO: 1575096 - DNA, 25 bp, Homo sapien
tcgcgccagtagaaggtcttgccac

SEQ ID NO: 1575097 - DNA, 25 bp, Homo sapien
tcagggacgttttgccgcactcggg

SEQ ID NO: 1575098 - DNA, 25 bp, Homo sapien
cctccaccatccgggcccggagcta

SEQ ID NO: 1575099 - DNA, 25 bp, Homo sapien
ggcctccaccatccgggcccggagc

SEQ ID NO: 1575100 - DNA, 25 bp, Homo sapien
cagggcgggaaggggcctccaccat

SEQ ID NO: 1575101 - DNA, 25 bp, Homo sapien
ctccaccatccgggcccggagctac

SEQ ID NO: 1575102 - DNA, 25 bp, Homo sapien
tgggaagttcagacaagggaggcgc

SEQ ID NO: 1575103 - DNA, 25 bp, Homo sapien
ggagaattcctagggacaagaccca

SEQ ID NO: 1575104 - DNA, 25 bp, Homo sapien
gagagaggccgagaaatcagggaga

SEQ ID NO: 1575105 - DNA, 25 bp, Homo sapien
gacattagggagaggccccttcaca

SEQ ID NO: 1575106 - DNA, 25 bp, Homo sapien
cacagtgactttattactctatgga

SEQ ID NO: 1575107 - DNA, 25 bp, Homo sapien
atggatgctggtgaactgccctccc

SEQ ID NO: 1575108 - DNA, 25 bp, Homo sapien
gactttattactctatggatgctgg

SEQ ID NO: 1575109 - DNA, 25 bp, Homo sapien
tacacacagtgactttattactcta

SEQ ID NO: 1575110 - DNA, 25 bp, Homo sapien
ggaccttctgcggatgcacctgtgc

SEQ ID NO: 1575111 - DNA, 25 bp, Homo sapien
tgagcatgattttagaaggctgcac

SEQ ID NO: 1575112 - DNA, 25 bp, Homo sapien
tcctagtaacggacatttacgttgc

SEQ ID NO: 1575113 - DNA, 25 bp, Homo sapien
gaacagcgctatgcaggaccttctg

SEQ ID NO: 1575114 - DNA, 25 bp, Homo sapien
cacaggacgggaatctgcagtcagg

SEQ ID NO: 1575115 - DNA, 25 bp, Homo sapien
ccacaggacgggaatctgcagtcag

SEQ ID NO: 1575116 - DNA, 25 bp, Homo sapien
cgctgcagctggcagctctccgcag

SEQ ID NO: 1575117 - DNA, 25 bp, Homo sapien
cagctggcagctctccgcagctctc

SEQ ID NO: 1575118 - DNA, 25 bp, Homo sapien
cccgctgcagctggcagctctccgc

SEQ ID NO: 1575119 - DNA, 25 bp, Homo sapien
tgcagctggcagctctccgcagctc

SEQ ID NO: 1575120 - DNA, 25 bp, Homo sapien
cgaaggcaggacgacaggtgcctac

SEQ ID NO: 1575121 - DNA, 25 bp, Homo sapien
acgacaggtgcctacagctgcggaa

SEQ ID NO: 1575122 - DNA, 25 bp, Homo sapien
acaggtgcctacagctgcggaacac

SEQ ID NO: 1575123 - DNA, 25 bp, Homo sapien
ggcaggacgacaggtgcctacagct

SEQ ID NO: 1575124 - DNA, 25 bp, Homo sapien
ctgccaggctcagcaagaggacgag

SEQ ID NO: 1575125 - DNA, 25 bp, Homo sapien
tagccagcactattgagggtccagc

SEQ ID NO: 1575126 - DNA, 25 bp, Homo sapien
cgggacccagaaggtagccagcact

SEQ ID NO: 1575127 - DNA, 25 bp, Homo sapien
cagaaggtagccagcactattgagg

SEQ ID NO: 1575128 - DNA, 25 bp, Homo sapien
ctattgagggtccagcctcctcgtc

SEQ ID NO: 1575129 - DNA, 25 bp, Homo sapien
tcactatgcagcacgtggccatggg

SEQ ID NO: 1575130 - DNA, 25 bp, Homo sapien
caccacgggaatctcggtattttat

SEQ ID NO: 1575131 - DNA, 25 bp, Homo sapien
tttatggatgtaatgctcactatgc

SEQ ID NO: 1575132 - DNA, 25 bp, Homo sapien
tgggcacacctattgcccagggaag

SEQ ID NO: 1575133 - DNA, 25 bp, Homo sapien
tctttccgtcttggtcacccatttg

SEQ ID NO: 1575134 - DNA, 25 bp, Homo sapien
ctctttccgtcttggtcacccattt

SEQ ID NO: 1575135 - DNA, 25 bp, Homo sapien
tccgtcttggtcacccatttgggga

SEQ ID NO: 1575136 - DNA, 25 bp, Homo sapien
ctttccgtcttggtcacccatttgg

SEQ ID NO: 1575137 - DNA, 25 bp, Homo sapien
tggccttccacaggtctaggatctc

SEQ ID NO: 1575138 - DNA, 25 bp, Homo sapien
ggccttccacaggtctaggatctca

SEQ ID NO: 1575139 - DNA, 25 bp, Homo sapien
gccttccacaggtctaggatctcaa

SEQ ID NO: 1575140 - DNA, 25 bp, Homo sapien
tgtggagggtgggagtaggggagcc

SEQ ID NO: 1575141 - DNA, 25 bp, Homo sapien
ctgtggagggtgggagtaggggagc

SEQ ID NO: 1575142 - DNA, 25 bp, Homo sapien
tggcaaacgtctccatcacattcct

SEQ ID NO: 1575143 - DNA, 25 bp, Homo sapien
ggcaaacgtctccatcacattcctc

SEQ ID NO: 1575144 - DNA, 25 bp, Homo sapien
ccccctctcctgtcggtgtctctct

SEQ ID NO: 1575145 - DNA, 25 bp, Homo sapien
tccccctctcctgtcggtgtctctc

SEQ ID NO: 1575146 - DNA, 25 bp, Homo sapien
atcttcctccttgggaattttcatg

SEQ ID NO: 1575147 - DNA, 25 bp, Homo sapien
ggaattttcatgctgagcatgccca

SEQ ID NO: 1575148 - DNA, 25 bp, Homo sapien
tccttgggaattttcatgctgagca

SEQ ID NO: 1575149 - DNA, 25 bp, Homo sapien
ctatgacttcaggacatcttcctcc

SEQ ID NO: 1575150 - DNA, 25 bp, Homo sapien
tcaggatcttagtctcagcataggg

SEQ ID NO: 1575151 - DNA, 25 bp, Homo sapien
cagaatctcccaactagtcctcgaa

SEQ ID NO: 1575152 - DNA, 25 bp, Homo sapien
gacacagactctcagacttaagagg

SEQ ID NO: 1575153 - DNA, 25 bp, Homo sapien
cacttctcgaggagactcatgtggg

SEQ ID NO: 1575154 - DNA, 25 bp, Homo sapien
ctcaggatcactgtcatgatttcca

SEQ ID NO: 1575155 - DNA, 25 bp, Homo sapien
tcaggatcactgtcatgatttccaa

SEQ ID NO: 1575156 - DNA, 25 bp, Homo sapien
caggatcactgtcatgatttccaag

SEQ ID NO: 1575157 - DNA, 25 bp, Homo sapien
ggtcgggcctcagccacagatggca

SEQ ID NO: 1575158 - DNA, 25 bp, Homo sapien
cagcatgtccaggatctgctctttg

SEQ ID NO: 1575159 - DNA, 25 bp, Homo sapien
acagatggcacagctcagtgagttt

SEQ ID NO: 1575160 - DNA, 25 bp, Homo sapien
tggaggtcgggcctcagccacagat

SEQ ID NO: 1575161 - DNA, 25 bp, Homo sapien
gggcatggagatcatgaactgctcc

SEQ ID NO: 1575162 - DNA, 25 bp, Homo sapien
tgttatttcgtagcaggtcctccag

SEQ ID NO: 1575163 - DNA, 25 bp, Homo sapien
tctttgcagctctgcacaccgttca

SEQ ID NO: 1575164 - DNA, 25 bp, Homo sapien
gttatttcgtagcaggtcctccagg

SEQ ID NO: 1575165 - DNA, 25 bp, Homo sapien
ttcctccggacacatctggttcaca

SEQ ID NO: 1575166 - DNA, 25 bp, Homo sapien
ccttcctccggacacatctggttca

SEQ ID NO: 1575167 - DNA, 25 bp, Homo sapien
cctggccttcctccggacacatctg

SEQ ID NO: 1575168 - DNA, 25 bp, Homo sapien
ggccttcctccggacacatctggtt

SEQ ID NO: 1575169 - DNA, 25 bp, Homo sapien
tcatgacagtagtctctggcagcag

SEQ ID NO: 1575170 - DNA, 25 bp, Homo sapien
tttcatgacagtagtctctggcagc

SEQ ID NO: 1575171 - DNA, 25 bp, Homo sapien
ttcatgacagtagtctctggcagca

SEQ ID NO: 1575172 - DNA, 25 bp, Homo sapien
catgacagtagtctctggcagcagg

SEQ ID NO: 1575173 - DNA, 25 bp, Homo sapien
caaggtcggcttgggtctcagagcc

SEQ ID NO: 1575174 - DNA, 25 bp, Homo sapien
tccaggtccttctccaaggtcggct

SEQ ID NO: 1575175 - DNA, 25 bp, Homo sapien
ggatgtaagtcctgggttctcctcc

SEQ ID NO: 1575176 - DNA, 25 bp, Homo sapien
tggggatgtaagtcctgggttctcc

SEQ ID NO: 1575177 - DNA, 25 bp, Homo sapien
tctccacaacgcaggcagaaggtgt

SEQ ID NO: 1575178 - DNA, 25 bp, Homo sapien
ctctccacaacgcaggcagaaggtg

SEQ ID NO: 1575179 - DNA, 25 bp, Homo sapien
ctccacaacgcaggcagaaggtgtg

SEQ ID NO: 1575180 - DNA, 25 bp, Homo sapien
taacttgccgcgatacttaaacctc

SEQ ID NO: 1575181 - DNA, 25 bp, Homo sapien
tgtgtgatctcgtgtggacggctaa

SEQ ID NO: 1575182 - DNA, 25 bp, Homo sapien
tgtggacggctaacttgccgcgata

SEQ ID NO: 1575183 - DNA, 25 bp, Homo sapien
cttaaacctcttgccgcacacctca

SEQ ID NO: 1575184 - DNA, 25 bp, Homo sapien
cactgtgaagtggcttctcgatgtg

SEQ ID NO: 1575185 - DNA, 25 bp, Homo sapien
ctggtggcgtcttaaggtcgccggc

SEQ ID NO: 1575186 - DNA, 25 bp, Homo sapien
tggcgtcttaaggtcgccggccgac

SEQ ID NO: 1575187 - DNA, 25 bp, Homo sapien
tgaagtggcttctcgatgtgttttc

SEQ ID NO: 1575188 - DNA, 25 bp, Homo sapien
gccggcatttctgcggatccgagga

SEQ ID NO: 1575189 - DNA, 25 bp, Homo sapien
cagccggaacggcacgatctcgaag

SEQ ID NO: 1575190 - DNA, 25 bp, Homo sapien
ggcccagaagatccgcaggcgccag

SEQ ID NO: 1575191 - DNA, 25 bp, Homo sapien
aaactggccgctcggctgacaggac

SEQ ID NO: 1575192 - DNA, 25 bp, Homo sapien
tcggtgtctttgacaggcctcccat

SEQ ID NO: 1575193 - DNA, 25 bp, Homo sapien
tttgacaggcctcccattggctaca

SEQ ID NO: 1575194 - DNA, 25 bp, Homo sapien
ccggcaatacccctcggtgtctttg

SEQ ID NO: 1575195 - DNA, 25 bp, Homo sapien
ttcacagactgggagcggggctcca

SEQ ID NO: 1575196 - DNA, 25 bp, Homo sapien
tatggagaagtcgaaggactccagg

SEQ ID NO: 1575197 - DNA, 25 bp, Homo sapien
actttctcgcatctgggatgcactc

SEQ ID NO: 1575198 - DNA, 25 bp, Homo sapien
cgcatctgggatgcactctccaact

SEQ ID NO: 1575199 - DNA, 25 bp, Homo sapien
aactgcgcctatttatggagaagtc

SEQ ID NO: 1575200 - DNA, 25 bp, Homo sapien
tcattcattaatggctgattttacc

SEQ ID NO: 1575201 - DNA, 25 bp, Homo sapien
gccacagactgtggcggctctgact

SEQ ID NO: 1575202 - DNA, 25 bp, Homo sapien
tgaccccatgaggagttgcaatttg

SEQ ID NO: 1575203 - DNA, 25 bp, Homo sapien
gatggggtccgactcctctgggcag

SEQ ID NO: 1575204 - DNA, 25 bp, Homo sapien
cgactcctctgggcagctgaacatc

SEQ ID NO: 1575205 - DNA, 25 bp, Homo sapien
atggggtccgactcctctgggcagc

SEQ ID NO: 1575206 - DNA, 25 bp, Homo sapien
ctggatggggtccgactcctctggg

SEQ ID NO: 1575207 - DNA, 25 bp, Homo sapien
ggtcgggcctcagccacagatggca

SEQ ID NO: 1575208 - DNA, 25 bp, Homo sapien
acagatggcacagctcagtgagttt

SEQ ID NO: 1575209 - DNA, 25 bp, Homo sapien
tggaggtcgggcctcagccacagat

SEQ ID NO: 1575210 - DNA, 25 bp, Homo sapien
cagcatgtccaggatctgctctttg

SEQ ID NO: 1575211 - DNA, 25 bp, Homo sapien
tgttatttcgtagcaggtcctccag

SEQ ID NO: 1575212 - DNA, 25 bp, Homo sapien
gggcatggagatcatgaactgctcc

SEQ ID NO: 1575213 - DNA, 25 bp, Homo sapien
tctttgcagctctgcacaccgttca

SEQ ID NO: 1575214 - DNA, 25 bp, Homo sapien
gttatttcgtagcaggtcctccagg

SEQ ID NO: 1575215 - DNA, 25 bp, Homo sapien
atctgattcctgcataagatattcc

SEQ ID NO: 1575216 - DNA, 25 bp, Homo sapien
tctgattcctgcataagatattcct

SEQ ID NO: 1575217 - DNA, 25 bp, Homo sapien
tcatgacagtagtctctggcagcag

SEQ ID NO: 1575218 - DNA, 25 bp, Homo sapien
tttcatgacagtagtctctggcagc

SEQ ID NO: 1575219 - DNA, 25 bp, Homo sapien
ttcatgacagtagtctctggcagca

SEQ ID NO: 1575220 - DNA, 25 bp, Homo sapien
catgacagtagtctctggcagcagg

SEQ ID NO: 1575221 - DNA, 25 bp, Homo sapien
ctccacaacgcaggcagaaggtgtg

SEQ ID NO: 1575222 - DNA, 25 bp, Homo sapien
cacgtaaacctcttattgcacacgc

SEQ ID NO: 1575223 - DNA, 25 bp, Homo sapien
aacctcttattgcacacgccacatg

SEQ ID NO: 1575224 - DNA, 25 bp, Homo sapien
gccattggggtgactgactgcacct

SEQ ID NO: 1575225 - DNA, 25 bp, Homo sapien
tcaggttttcctggggattcgctgt

SEQ ID NO: 1575226 - DNA, 25 bp, Homo sapien
gattcgctggtggacgcggaggtct

SEQ ID NO: 1575227 - DNA, 25 bp, Homo sapien
gtggattcgctggtggacgcggagg

SEQ ID NO: 1575228 - DNA, 25 bp, Homo sapien
tggattcgctggtggacgcggaggt

SEQ ID NO: 1575229 - DNA, 25 bp, Homo sapien
ttcgctggtggacgcggaggtctga

SEQ ID NO: 1575230 - DNA, 25 bp, Homo sapien
cgtttcaggccgacgaaaggctctt

SEQ ID NO: 1575231 - DNA, 25 bp, Homo sapien
gaacatcctgttgaaccgtttgtga

SEQ ID NO: 1575232 - DNA, 25 bp, Homo sapien
tgctcgttcaggttcttcctgtagg

SEQ ID NO: 1575233 - DNA, 25 bp, Homo sapien
gagtggatgagcttgtgctcgttca

SEQ ID NO: 1575234 - DNA, 25 bp, Homo sapien
gaatgttctcctcctaggatagaca

SEQ ID NO: 1575235 - DNA, 25 bp, Homo sapien
atggggctgggatttgggctgaatg

SEQ ID NO: 1575236 - DNA, 25 bp, Homo sapien
ctgaatgttctcctcctaggataga

SEQ ID NO: 1575237 - DNA, 25 bp, Homo sapien
tggggctgggatttgggctgaatgt

SEQ ID NO: 1575238 - DNA, 25 bp, Homo sapien
cttcacgaggagtacaggcttctgc

SEQ ID NO: 1575239 - DNA, 25 bp, Homo sapien
cagaatcagcagcgacattttcaga

SEQ ID NO: 1575240 - DNA, 25 bp, Homo sapien
gcagaatcagcagcgacattttcag

SEQ ID NO: 1575241 - DNA, 25 bp, Homo sapien
agcagaatcagcagcgacattttca

SEQ ID NO: 1575242 - DNA, 25 bp, Homo sapien
tatgaaaatacagacttgggggttc

SEQ ID NO: 1575243 - DNA, 25 bp, Homo sapien
ctatgaaaatacagacttgggggtt

SEQ ID NO: 1575244 - DNA, 25 bp, Homo sapien
tgaaaatacagacttgggggttcca

SEQ ID NO: 1575245 - DNA, 25 bp, Homo sapien
aggaaggacaggaccgatggtagcc

SEQ ID NO: 1575246 - DNA, 25 bp, Homo sapien
ggaaggacaggaccgatggtagcca

SEQ ID NO: 1575247 - DNA, 25 bp, Homo sapien
gtggccaaggttacatgcgtggtcc

SEQ ID NO: 1575248 - DNA, 25 bp, Homo sapien
acatgcgtggtccagaatgttgtcc

SEQ ID NO: 1575249 - DNA, 25 bp, Homo sapien
aaggttacatgcgtggtccagaatg

SEQ ID NO: 1575250 - DNA, 25 bp, Homo sapien
gccaaggttacatgcgtggtccaga

SEQ ID NO: 1575251 - DNA, 25 bp, Homo sapien
gatccctgatggcagcccatccagg

SEQ ID NO: 1575252 - DNA, 25 bp, Homo sapien
tccctgatggcagcccatccaggag

SEQ ID NO: 1575253 - DNA, 25 bp, Homo sapien
gatggcagcccatccaggagagtca

SEQ ID NO: 1575254 - DNA, 25 bp, Homo sapien
ctatgatccctgatggcagcccatc

SEQ ID NO: 1575255 - DNA, 25 bp, Homo sapien
catccggtgacagtctgctcatgag

SEQ ID NO: 1575256 - DNA, 25 bp, Homo sapien
tccggtgacagtctgctcatgagac

SEQ ID NO: 1575257 - DNA, 25 bp, Homo sapien
atccggtgacagtctgctcatgaga

SEQ ID NO: 1575258 - DNA, 25 bp, Homo sapien
gacttaaggagaaagctgtacgtcc

SEQ ID NO: 1575259 - DNA, 25 bp, Homo sapien
cttcacacaaagagccttggcagaa

SEQ ID NO: 1575260 - DNA, 25 bp, Homo sapien
ggctgaccacttactcaagcggtat

SEQ ID NO: 1575261 - DNA, 25 bp, Homo sapien
tgtttatttccaccgaacagcggga

SEQ ID NO: 1575262 - DNA, 25 bp, Homo sapien
ctcagtcataggtttccgtaaaatg

SEQ ID NO: 1575263 - DNA, 25 bp, Homo sapien
ccgtaaaatgtttcccacaacacat

SEQ ID NO: 1575264 - DNA, 25 bp, Homo sapien
tacttccaggtcgatgggcaaggag

SEQ ID NO: 1575265 - DNA, 25 bp, Homo sapien
gaggagagttctacttccaggttga

SEQ ID NO: 1575266 - DNA, 25 bp, Homo sapien
catgcagtacttggaggctcagcaa

SEQ ID NO: 1575267 - DNA, 25 bp, Homo sapien
atgcagtacttggaggctcagcaag

SEQ ID NO: 1575268 - DNA, 25 bp, Homo sapien
tcctccttgcagccacttgtttctt

SEQ ID NO: 1575269 - DNA, 25 bp, Homo sapien
ttcctccttgcagccacttgtttct

SEQ ID NO: 1575270 - DNA, 25 bp, Homo sapien
cttcctccttgcagccacttgtttc

SEQ ID NO: 1575271 - DNA, 25 bp, Homo sapien
cagtatgttgggtctcctcgatgcc

SEQ ID NO: 1575272 - DNA, 25 bp, Homo sapien
ggctctgcctactttaaaacgctca

SEQ ID NO: 1575273 - DNA, 25 bp, Homo sapien
cagtggcttgcagactttggatgcc

SEQ ID NO: 1575274 - DNA, 25 bp, Homo sapien
ccatctggatcacttggtggcttgc

SEQ ID NO: 1575275 - DNA, 25 bp, Homo sapien
tcagtaatgctagaggattaaattt

SEQ ID NO: 1575276 - DNA, 25 bp, Homo sapien
cttgtcagtaatgctagaggattaa

SEQ ID NO: 1575277 - DNA, 25 bp, Homo sapien
gattaaatttgtattacgcttttca

SEQ ID NO: 1575278 - DNA, 25 bp, Homo sapien
ttttcttgtcagtaatgctagagga

SEQ ID NO: 1575279 - DNA, 25 bp, Homo sapien
tggctaggatttgcactggatagaa

SEQ ID NO: 1575280 - DNA, 25 bp, Homo sapien
gatagaacgttcagtccaatgtgaa

SEQ ID NO: 1575281 - DNA, 25 bp, Homo sapien
tggtgatagcaagaacgtctcatct

SEQ ID NO: 1575282 - DNA, 25 bp, Homo sapien
aatgtgaaatgcaagtggtgatagc

SEQ ID NO: 1575283 - DNA, 25 bp, Homo sapien
agttccacgtgttcttcctcttggg

SEQ ID NO: 1575284 - DNA, 25 bp, Homo sapien
tttcaggaagttccacgtgttcttc

SEQ ID NO: 1575285 - DNA, 25 bp, Homo sapien
cctcttggggagtggtttcctggat

SEQ ID NO: 1575286 - DNA, 25 bp, Homo sapien
aggcgcatttcaggaagttccacgt

SEQ ID NO: 1575287 - DNA, 25 bp, Homo sapien
cccctttgttgtaggatacgaagag

SEQ ID NO: 1575288 - DNA, 25 bp, Homo sapien
tgtaggatacgaagaggtaggtcat

SEQ ID NO: 1575289 - DNA, 25 bp, Homo sapien
tttgttgtaggatacgaagaggtag

SEQ ID NO: 1575290 - DNA, 25 bp, Homo sapien
tcccctttgttgtaggatacgaaga

SEQ ID NO: 1575291 - DNA, 25 bp, Homo sapien
cccttacagaattaggaccttcttg

SEQ ID NO: 1575292 - DNA, 25 bp, Homo sapien
gctcatgaagtgctaccactcggtg

SEQ ID NO: 1575293 - DNA, 25 bp, Homo sapien
gaccttcttgaaggtagctcaacca

SEQ ID NO: 1575294 - DNA, 25 bp, Homo sapien
gcaaccagcaacaggcttggtcctt

SEQ ID NO: 1575295 - DNA, 25 bp, Homo sapien
gttccaagttacagtagtggcagta

SEQ ID NO: 1575296 - DNA, 25 bp, Homo sapien
gtgggaaaagcccacttccctgcca

SEQ ID NO: 1575297 - DNA, 25 bp, Homo sapien
ggaaaagcccacttccctgccatag

SEQ ID NO: 1575298 - DNA, 25 bp, Homo sapien
caaatgccaggcagttgggatgaac

SEQ ID NO: 1575299 - DNA, 25 bp, Homo sapien
tcaaatgccaggcagttgggatgaa

SEQ ID NO: 1575300 - DNA, 25 bp, Homo sapien
gcatcctccccagtggaatctgaag

SEQ ID NO: 1575301 - DNA, 25 bp, Homo sapien
gttggttcctgaaccaaagcattgc

SEQ ID NO: 1575302 - DNA, 25 bp, Homo sapien
gaaggattgctgttggttcctgaac

SEQ ID NO: 1575303 - DNA, 25 bp, Homo sapien
cttaggtgaatcttgaggactgagg

SEQ ID NO: 1575304 - DNA, 25 bp, Homo sapien
cttcagaggttagaatgcctgggag

SEQ ID NO: 1575305 - DNA, 25 bp, Homo sapien
gaaagttcgagaacgatctggagga

SEQ ID NO: 1575306 - DNA, 25 bp, Homo sapien
ggagcaggctcactagaaagaacag

SEQ ID NO: 1575307 - DNA, 25 bp, Homo sapien
gcacccaggtgccattccttaaagg

SEQ ID NO: 1575308 - DNA, 25 bp, Homo sapien
cgaatggaataacccagccttttca

SEQ ID NO: 1575309 - DNA, 25 bp, Homo sapien
tcagtgttgggcgaatggaataacc

SEQ ID NO: 1575310 - DNA, 25 bp, Homo sapien
tccaccagcatacctgttagttttc

SEQ ID NO: 1575311 - DNA, 25 bp, Homo sapien
catacctgttagttttcagtgttgg

SEQ ID NO: 1575312 - DNA, 25 bp, Homo sapien
tgggtggtttccgtggcttttagca

SEQ ID NO: 1575313 - DNA, 25 bp, Homo sapien
ctgagtgtgtcgcggtcaccatggt

SEQ ID NO: 1575314 - DNA, 25 bp, Homo sapien
tgagtgtgtcgcggtcaccatggta

SEQ ID NO: 1575315 - DNA, 25 bp, Homo sapien
cctgactcgtttgcggctttgggac

SEQ ID NO: 1575316 - DNA, 25 bp, Homo sapien
aggtcctaccacgatgcctgactcg

SEQ ID NO: 1575317 - DNA, 25 bp, Homo sapien
ggcctcctagcagccaatgtgaatg

SEQ ID NO: 1575318 - DNA, 25 bp, Homo sapien
gaatgcgacaagttcccgatccagg

SEQ ID NO: 1575319 - DNA, 25 bp, Homo sapien
tgggggaagcaggagtgaaggagca

SEQ ID NO: 1575320 - DNA, 25 bp, Homo sapien
caggaaggcggccgcagaggcttct

SEQ ID NO: 1575321 - DNA, 25 bp, Homo sapien
gggaagcaggagtgaaggagcagga

SEQ ID NO: 1575322 - DNA, 25 bp, Homo sapien
gaaggcggccgcagaggcttctggg

SEQ ID NO: 1575323 - DNA, 25 bp, Homo sapien
aatagggtggaatctgcgagtcgcc

SEQ ID NO: 1575324 - DNA, 25 bp, Homo sapien
gaatctctaggcttcacggacgcag

SEQ ID NO: 1575325 - DNA, 25 bp, Homo sapien
gatcaatacacaaagaccctggagg

SEQ ID NO: 1575326 - DNA, 25 bp, Homo sapien
cctcccgtgggcagctatgaagtca

SEQ ID NO: 1575327 - DNA, 25 bp, Homo sapien
gaactgaataagaaccggaagcatg

SEQ ID NO: 1575328 - DNA, 25 bp, Homo sapien
tatacgcatgcttgcgtgcacgcac

SEQ ID NO: 1575329 - DNA, 25 bp, Homo sapien
caaacagtccacctaaatggcgctg

SEQ ID NO: 1575330 - DNA, 25 bp, Homo sapien
ggaatcttaccaaacgtgcagtgct

SEQ ID NO: 1575331 - DNA, 25 bp, Homo sapien
tgaactaatgggcagagaacagaat

SEQ ID NO: 1575332 - DNA, 25 bp, Homo sapien
cagaattgagatgattataagaaac

SEQ ID NO: 1575333 - DNA, 25 bp, Homo sapien
caagccctactcaggattgttgaac

SEQ ID NO: 1575334 - DNA, 25 bp, Homo sapien
ctttctaaatgtccgggcagcagag

SEQ ID NO: 1575335 - DNA, 25 bp, Homo sapien
tattgaagcagaggtgaactatggg

SEQ ID NO: 1575336 - DNA, 25 bp, Homo sapien
gcaccaccgtggatatgatttcacg

SEQ ID NO: 1575337 - DNA, 25 bp, Homo sapien
attaaggagtattcctgcaccaccg

SEQ ID NO: 1575338 - DNA, 25 bp, Homo sapien
cagaggtgaactatgggattaagga

SEQ ID NO: 1575339 - DNA, 25 bp, Homo sapien
cagtaccggatggtaacagaagccc

SEQ ID NO: 1575340 - DNA, 25 bp, Homo sapien
tgaaccttgccattgtgctgactgc

SEQ ID NO: 1575341 - DNA, 25 bp, Homo sapien
tgagcgtgccaacctgccagaaatt

SEQ ID NO: 1575342 - DNA, 25 bp, Homo sapien
gaacatttcccaatgctccagaagg

SEQ ID NO: 1575343 - DNA, 25 bp, Homo sapien
gtaaagcaacatgtacctgcacacg

SEQ ID NO: 1575344 - DNA, 25 bp, Homo sapien
agaagatgctaagcctaactagtaa

SEQ ID NO: 1575345 - DNA, 25 bp, Homo sapien
cactaaatattgaccaggatgtaaa

SEQ ID NO: 1575346 - DNA, 25 bp, Homo sapien
cacgaaatagcatattactttgcag

SEQ ID NO: 1575347 - DNA, 25 bp, Homo sapien
ccaattgctacgtgattctccttca

SEQ ID NO: 1575348 - DNA, 25 bp, Homo sapien
catggatgcatcttgctcccaattg

SEQ ID NO: 1575349 - DNA, 25 bp, Homo sapien
tccagtactgggttacatggatgca

SEQ ID NO: 1575350 - DNA, 25 bp, Homo sapien
agttatagtagcactcagggaaagg

SEQ ID NO: 1575351 - DNA, 25 bp, Homo sapien
tatgacaaatgatggcaactcctct

SEQ ID NO: 1575352 - DNA, 25 bp, Homo sapien
tttaagagacctgaattgacatggc

SEQ ID NO: 1575353 - DNA, 25 bp, Homo sapien
tttcaactctcaagcacaaagtctt

SEQ ID NO: 1575354 - DNA, 25 bp, Homo sapien
tctcctgcaagggaagactttaaga

SEQ ID NO: 1575355 - DNA, 25 bp, Homo sapien
gctctaagacaactgctaccttgca

SEQ ID NO: 1575356 - DNA, 25 bp, Homo sapien
tgcacaccactccagtagtcttcag

SEQ ID NO: 1575357 - DNA, 25 bp, Homo sapien
aaattgctgcatggcacttatattc

SEQ ID NO: 1575358 - DNA, 25 bp, Homo sapien
tcatttttgggtattcactttgcac

SEQ ID NO: 1575359 - DNA, 25 bp, Homo sapien
ttgctgaagcttcttggtagccctt

SEQ ID NO: 1575360 - DNA, 25 bp, Homo sapien
tagagcagcttctggcatttggtag

SEQ ID NO: 1575361 - DNA, 25 bp, Homo sapien
gaagagttttactactcactacctg

SEQ ID NO: 1575362 - DNA, 25 bp, Homo sapien
caatgaaaatacacttagagcagct

SEQ ID NO: 1575363 - DNA, 25 bp, Homo sapien
aatgatgcctatcacagtttcataa

SEQ ID NO: 1575364 - DNA, 25 bp, Homo sapien
acaggcagtaaggaagttggttttg

SEQ ID NO: 1575365 - DNA, 25 bp, Homo sapien
tatcttgaatttagtaacattaccg

SEQ ID NO: 1575366 - DNA, 25 bp, Homo sapien
tgtggctttaggtggtctagtccac

SEQ ID NO: 1575367 - DNA, 25 bp, Homo sapien
ttgcatagggcccaaaggattggct

SEQ ID NO: 1575368 - DNA, 25 bp, Homo sapien
gatagaccctgtgcgcaacagaaag

SEQ ID NO: 1575369 - DNA, 25 bp, Homo sapien
tattcatgtagcctgggagaaacca

SEQ ID NO: 1575370 - DNA, 25 bp, Homo sapien
gaaagacagtcccttatatctggag

SEQ ID NO: 1575371 - DNA, 25 bp, Homo sapien
tcaatccagatagatccaccagcca

SEQ ID NO: 1575372 - DNA, 25 bp, Homo sapien
tgacatcttcatcccgcaacacaat

SEQ ID NO: 1575373 - DNA, 25 bp, Homo sapien
ttgggtaagaaagtgtaatgacatc

SEQ ID NO: 1575374 - DNA, 25 bp, Homo sapien
tcttgcaaacgtctcaggtctgtaa

SEQ ID NO: 1575375 - DNA, 25 bp, Homo sapien
ggtgtgggcccttctgactctctaa

SEQ ID NO: 1575376 - DNA, 25 bp, Homo sapien
gattggacccaactaggatctccct

SEQ ID NO: 1575377 - DNA, 25 bp, Homo sapien
tctcccttggagtggatcagactga

SEQ ID NO: 1575378 - DNA, 25 bp, Homo sapien
tctatccatggtgaacgatcccagg

SEQ ID NO: 1575379 - DNA, 25 bp, Homo sapien
ccgttggcggtgttgagaacgctgc

SEQ ID NO: 1575380 - DNA, 25 bp, Homo sapien
cgcgtgcgtattgacgccccgtagg

SEQ ID NO: 1575381 - DNA, 25 bp, Homo sapien
ctgggacacaaagtacgcgtgcgta

SEQ ID NO: 1575382 - DNA, 25 bp, Homo sapien
tgactgagtacgtaggcgtgagttc

SEQ ID NO: 1575383 - DNA, 25 bp, Homo sapien
cgcgtatgcgcccgggtggtttctg

SEQ ID NO: 1575384 - DNA, 25 bp, Homo sapien
tatgcgcccgggtggtttctgggag

SEQ ID NO: 1575385 - DNA, 25 bp, Homo sapien
tgggagtaggcgaggactcgcagtg

SEQ ID NO: 1575386 - DNA, 25 bp, Homo sapien
gtatgcgcccgggtggtttctggga

SEQ ID NO: 1575387 - DNA, 25 bp, Homo sapien
agaaaggagaaacggcgacgctgcc

SEQ ID NO: 1575388 - DNA, 25 bp, Homo sapien
caagaaaggagaaacggcgacgctg

SEQ ID NO: 1575389 - DNA, 25 bp, Homo sapien
tcataatggcccagcctccgcgtgg

SEQ ID NO: 1575390 - DNA, 25 bp, Homo sapien
tccgcgtggcgctgggaaaaatact

SEQ ID NO: 1575391 - DNA, 25 bp, Homo sapien
gcactgcgctggaaccgtgtcctga

SEQ ID NO: 1575392 - DNA, 25 bp, Homo sapien
gaaccgtgtcctgaatagtgaccag

SEQ ID NO: 1575393 - DNA, 25 bp, Homo sapien
ctgagacatggctaacgcgcactgc

SEQ ID NO: 1575394 - DNA, 25 bp, Homo sapien
tggctaacgcgcactgcgctggaac

SEQ ID NO: 1575395 - DNA, 25 bp, Homo sapien
attttctatgctgcgtcctctcagt

SEQ ID NO: 1575396 - DNA, 25 bp, Homo sapien
ctatgctgcgtcctctcagtctgga

SEQ ID NO: 1575397 - DNA, 25 bp, Homo sapien
gcattttctatgctgcgtcctctca

SEQ ID NO: 1575398 - DNA, 25 bp, Homo sapien
ttctatgctgcgtcctctcagtctg

SEQ ID NO: 1575399 - DNA, 25 bp, Homo sapien
gactttgttaacctggactttcatg

SEQ ID NO: 1575400 - DNA, 25 bp, Homo sapien
tttaagctgcccaacgtcaaactgg

SEQ ID NO: 1575401 - DNA, 25 bp, Homo sapien
ggtattttccggaattccacagatg

SEQ ID NO: 1575402 - DNA, 25 bp, Homo sapien
taatgtcctagtaaatggcctgact

SEQ ID NO: 1575403 - DNA, 25 bp, Homo sapien
gtcaatggccacatcttggaatgtc

SEQ ID NO: 1575404 - DNA, 25 bp, Homo sapien
ccacatcttggaatgtcactcatcc

SEQ ID NO: 1575405 - DNA, 25 bp, Homo sapien
cacagttgtgtacaaatctctctga

SEQ ID NO: 1575406 - DNA, 25 bp, Homo sapien
tgagcagggttcaggaatccccact

SEQ ID NO: 1575407 - DNA, 25 bp, Homo sapien
tacaaatctctctgagcagggttca

SEQ ID NO: 1575408 - DNA, 25 bp, Homo sapien
cagggttcaggaatccccactcttc

SEQ ID NO: 1575409 - DNA, 25 bp, Homo sapien
cagccagaccaggttctgataattc

SEQ ID NO: 1575410 - DNA, 25 bp, Homo sapien
ccagccagaccaggttctgataatt

SEQ ID NO: 1575411 - DNA, 25 bp, Homo sapien
cagaccaggttctgataattctcca

SEQ ID NO: 1575412 - DNA, 25 bp, Homo sapien
gccagaccaggttctgataattctc

SEQ ID NO: 1575413 - DNA, 25 bp, Homo sapien
tttccttttctccaacagtgaaatc

SEQ ID NO: 1575414 - DNA, 25 bp, Homo sapien
ccaacagtgaaatcacagatttaga

SEQ ID NO: 1575415 - DNA, 25 bp, Homo sapien
tccaacagtgaaatcacagatttag

SEQ ID NO: 1575416 - DNA, 25 bp, Homo sapien
ccttttctccaacagtgaaatcaca

SEQ ID NO: 1575417 - DNA, 25 bp, Homo sapien
ctggcaatgggcctcttatctcttc

SEQ ID NO: 1575418 - DNA, 25 bp, Homo sapien
atgggcctcttatctcttcttttgc

SEQ ID NO: 1575419 - DNA, 25 bp, Homo sapien
ggcctcttatctcttcttttgccat

SEQ ID NO: 1575420 - DNA, 25 bp, Homo sapien
tggcaatgggcctcttatctcttct

SEQ ID NO: 1575421 - DNA, 25 bp, Homo sapien
cccgctagttggttcttcatactca

SEQ ID NO: 1575422 - DNA, 25 bp, Homo sapien
ccgctagttggttcttcatactcac

SEQ ID NO: 1575423 - DNA, 25 bp, Homo sapien
ccccgctagttggttcttcatactc

SEQ ID NO: 1575424 - DNA, 25 bp, Homo sapien
ggtgctttgccctctagacctggta

SEQ ID NO: 1575425 - DNA, 25 bp, Homo sapien
ggaagcttaccatagacaaagagga

SEQ ID NO: 1575426 - DNA, 25 bp, Homo sapien
tataaatggtgggtgatcagtaccc

SEQ ID NO: 1575427 - DNA, 25 bp, Homo sapien
tgatgactcctgtgacgactcctag

SEQ ID NO: 1575428 - DNA, 25 bp, Homo sapien
cttttccaaagagagttctagtctt

SEQ ID NO: 1575429 - DNA, 25 bp, Homo sapien
tccaaagagagttctagtctttgcc

SEQ ID NO: 1575430 - DNA, 25 bp, Homo sapien
tttccaaagagagttctagtctttg

SEQ ID NO: 1575431 - DNA, 25 bp, Homo sapien
ccaaagagagttctagtctttgcct

SEQ ID NO: 1575432 - DNA, 25 bp, Homo sapien
ttagccattgtgtagtaaataattt

SEQ ID NO: 1575433 - DNA, 25 bp, Homo sapien
gatgcagtgtgctaagttataccac

SEQ ID NO: 1575434 - DNA, 25 bp, Homo sapien
cattacaggaagactgatcaacagg

SEQ ID NO: 1575435 - DNA, 25 bp, Homo sapien
ttaaagagatcgctaagcaaacagg

SEQ ID NO: 1575436 - DNA, 25 bp, Homo sapien
atgtgtccagacagaaggcatctcc

SEQ ID NO: 1575437 - DNA, 25 bp, Homo sapien
gataactccttaatctctgcacctg

SEQ ID NO: 1575438 - DNA, 25 bp, Homo sapien
gtgtcaaactgcgataatacttcat

SEQ ID NO: 1575439 - DNA, 25 bp, Homo sapien
tacttcattaatagccctctttgca

SEQ ID NO: 1575440 - DNA, 25 bp, Homo sapien
cattttatcactgtgtcaaactgcg

SEQ ID NO: 1575441 - DNA, 25 bp, Homo sapien
tctcttatggagagtaagctgcata

SEQ ID NO: 1575442 - DNA, 25 bp, Homo sapien
gttgattgacgagtgaagtatttcc

SEQ ID NO: 1575443 - DNA, 25 bp, Homo sapien
tgccctctggttgaaggttttaata

SEQ ID NO: 1575444 - DNA, 25 bp, Homo sapien
ggcagtatagatttccacattcctt

SEQ ID NO: 1575445 - DNA, 25 bp, Homo sapien
cctgcattccttacatttgtaaggt

SEQ ID NO: 1575446 - DNA, 25 bp, Homo sapien
gtttctcaccagtgtgaattctctc

SEQ ID NO: 1575447 - DNA, 25 bp, Homo sapien
tctcaccagtgtgaattctctcatg

SEQ ID NO: 1575448 - DNA, 25 bp, Homo sapien
ctggctgaaggttttcctgcattcc

SEQ ID NO: 1575449 - DNA, 25 bp, Homo sapien
tgagtaacaagggaagagtgcgcac

SEQ ID NO: 1575450 - DNA, 25 bp, Homo sapien
tgaactgcatcacacgacaaaaggt

SEQ ID NO: 1575451 - DNA, 25 bp, Homo sapien
gagctgcagctaaaggacttcccgc

SEQ ID NO: 1575452 - DNA, 25 bp, Homo sapien
tctataagagctgagacacggctga

SEQ ID NO: 1575453 - DNA, 25 bp, Homo sapien
tacaaagtactggtgatgatacaga

SEQ ID NO: 1575454 - DNA, 25 bp, Homo sapien
ggagatatacctagtgataaacctc

SEQ ID NO: 1575455 - DNA, 25 bp, Homo sapien
aatacatatcaacagtcaagggaag

SEQ ID NO: 1575456 - DNA, 25 bp, Homo sapien
aaaataatctgcaaggcttcaacac

SEQ ID NO: 1575457 - DNA, 25 bp, Homo sapien
tctcataaatgcacccgaagaaaaa

SEQ ID NO: 1575458 - DNA, 25 bp, Homo sapien
tatcactgttatgtaaatgaaaagg

SEQ ID NO: 1575459 - DNA, 25 bp, Homo sapien
tgatcaaacttaaagcttttatcac

SEQ ID NO: 1575460 - DNA, 25 bp, Homo sapien
tgtaaatgaaaaggtaggttacaga

SEQ ID NO: 1575461 - DNA, 25 bp, Homo sapien
aaaagcagaactaggtcaggcacaa

SEQ ID NO: 1575462 - DNA, 25 bp, Homo sapien
ggtgccaataacaacgtaagggcga

SEQ ID NO: 1575463 - DNA, 25 bp, Homo sapien
gacaatgtggaactactgagaagac

SEQ ID NO: 1575464 - DNA, 25 bp, Homo sapien
tgcccagcctagagaaatttgttaa

SEQ ID NO: 1575465 - DNA, 25 bp, Homo sapien
gatcttctgcgcttaagtgatcctc

SEQ ID NO: 1575466 - DNA, 25 bp, Homo sapien
ttttaatccagaaaagcatcaccag

SEQ ID NO: 1575467 - DNA, 25 bp, Homo sapien
cagttaggactacagatgggtgcca

SEQ ID NO: 1575468 - DNA, 25 bp, Homo sapien
tctcattctgtcaacctggctggac

SEQ ID NO: 1575469 - DNA, 25 bp, Homo sapien
tcaattataataccgacaggctttt

SEQ ID NO: 1575470 - DNA, 25 bp, Homo sapien
tatgctaaggttacagactggaagt

SEQ ID NO: 1575471 - DNA, 25 bp, Homo sapien
ggaactgacaaggtgactctgaaca

SEQ ID NO: 1575472 - DNA, 25 bp, Homo sapien
caattctcttcaagtttgtctacag

SEQ ID NO: 1575473 - DNA, 25 bp, Homo sapien
gcaaactcatgtgctatgagccaga

SEQ ID NO: 1575474 - DNA, 25 bp, Homo sapien
gatgctaagagctatcacctggctg

SEQ ID NO: 1575475 - DNA, 25 bp, Homo sapien
tatggtaattatggccctccttgcg

SEQ ID NO: 1575476 - DNA, 25 bp, Homo sapien
ggagcaaccccttgtctcaataagt

SEQ ID NO: 1575477 - DNA, 25 bp, Homo sapien
ttagttaagtttgggccaggcacta

SEQ ID NO: 1575478 - DNA, 25 bp, Homo sapien
ggcactatgactcctgcctgtaatt

SEQ ID NO: 1575479 - DNA, 25 bp, Homo sapien
gagccaatgcaccttgccttctctg

SEQ ID NO: 1575480 - DNA, 25 bp, Homo sapien
aatgcaccttgccttctctgttttt

SEQ ID NO: 1575481 - DNA, 25 bp, Homo sapien
cctgctttataaagtctgagtgaca

SEQ ID NO: 1575482 - DNA, 25 bp, Homo sapien
cgactgctttggtttcactacagca

SEQ ID NO: 1575483 - DNA, 25 bp, Homo sapien
gactatatggccacaacacctatat

SEQ ID NO: 1575484 - DNA, 25 bp, Homo sapien
gacacattgcatttatggtctacga

SEQ ID NO: 1575485 - DNA, 25 bp, Homo sapien
tggaggcaaactttatatagaacgt

SEQ ID NO: 1575486 - DNA, 25 bp, Homo sapien
aagtcatcagtgtcatacttaaact

SEQ ID NO: 1575487 - DNA, 25 bp, Homo sapien
tactttggaggcaaactttatatag

SEQ ID NO: 1575488 - DNA, 25 bp, Homo sapien
gtcatcagtgtcatacttaaactaa

SEQ ID NO: 1575489 - DNA, 25 bp, Homo sapien
tcatttatatcatatggattaatag

SEQ ID NO: 1575490 - DNA, 25 bp, Homo sapien
gatcacatactcctgtaaagaagag

SEQ ID NO: 1575491 - DNA, 25 bp, Homo sapien
aatagtaggtggcatattttttctc

SEQ ID NO: 1575492 - DNA, 25 bp, Homo sapien
tcacatactcctgtaaagaagagct

SEQ ID NO: 1575493 - DNA, 25 bp, Homo sapien
caggtgagaggttccggagctttcc

SEQ ID NO: 1575494 - DNA, 25 bp, Homo sapien
ggcgcggccgcggtggcacttggac

SEQ ID NO: 1575495 - DNA, 25 bp, Homo sapien
tgagaagaacgcagacgtctcgcct

SEQ ID NO: 1575496 - DNA, 25 bp, Homo sapien
acttggacccgaggaggcggcaggt

SEQ ID NO: 1575497 - DNA, 25 bp, Homo sapien
cagttgtgtatccaccgctaaacgg

SEQ ID NO: 1575498 - DNA, 25 bp, Homo sapien
gtcatacattcaacgacccacgcgg

SEQ ID NO: 1575499 - DNA, 25 bp, Homo sapien
gaacgtaacggatgaggcaatcttc

SEQ ID NO: 1575500 - DNA, 25 bp, Homo sapien
gagaatcacacgcagatagcacacc

SEQ ID NO: 1575501 - DNA, 25 bp, Homo sapien
attaacaactacctacggcggtctg

SEQ ID NO: 1575502 - DNA, 25 bp, Homo sapien
tacctacggcggtctgatatttgcc

SEQ ID NO: 1575503 - DNA, 25 bp, Homo sapien
cacatttaactcaccatagatgtaa

SEQ ID NO: 1575504 - DNA, 25 bp, Homo sapien
gatatttgcccaagagatgccgccc

SEQ ID NO: 1575505 - DNA, 25 bp, Homo sapien
tgagacccagcataacaggtcctga

SEQ ID NO: 1575506 - DNA, 25 bp, Homo sapien
agagtttccgcattctgagacccag

SEQ ID NO: 1575507 - DNA, 25 bp, Homo sapien
ctggctcgggatgtgtaaagtccag

SEQ ID NO: 1575508 - DNA, 25 bp, Homo sapien
ctgaccggcatctggcactcggact

SEQ ID NO: 1575509 - DNA, 25 bp, Homo sapien
aaaagagtcactcaggactccagtc

SEQ ID NO: 1575510 - DNA, 25 bp, Homo sapien
aatcaaaagagtcactcaggactcc

SEQ ID NO: 1575511 - DNA, 25 bp, Homo sapien
ggatcaaatcaaaagagtcactcag

SEQ ID NO: 1575512 - DNA, 25 bp, Homo sapien
gatcaaatcaaaagagtcactcagg

SEQ ID NO: 1575513 - DNA, 25 bp, Homo sapien
tgcaaggctgaagcaagacgatcac

SEQ ID NO: 1575514 - DNA, 25 bp, Homo sapien
attttgcaaggctgaagcaagacga

SEQ ID NO: 1575515 - DNA, 25 bp, Homo sapien
gcaaggctgaagcaagacgatcact

SEQ ID NO: 1575516 - DNA, 25 bp, Homo sapien
tttgcaaggctgaagcaagacgatc

SEQ ID NO: 1575517 - DNA, 25 bp, Homo sapien
ttcttgtgtgtccacgtccttgatt

SEQ ID NO: 1575518 - DNA, 25 bp, Homo sapien
tccacgtccttgattcccttggcgt

SEQ ID NO: 1575519 - DNA, 25 bp, Homo sapien
ccttgattcccttggcgtgagacaa

SEQ ID NO: 1575520 - DNA, 25 bp, Homo sapien
attcccttggcgtgagacaacgaac

SEQ ID NO: 1575521 - DNA, 25 bp, Homo sapien
ggactggaagtcctacttgggagcc

SEQ ID NO: 1575522 - DNA, 25 bp, Homo sapien
gtgcccttcgccacggactggaagt

SEQ ID NO: 1575523 - DNA, 25 bp, Homo sapien
tctataaaccccgtgcccttcgcca

SEQ ID NO: 1575524 - DNA, 25 bp, Homo sapien
ccttcgccacggactggaagtccta

SEQ ID NO: 1575525 - DNA, 25 bp, Homo sapien
aaggaacatacaacatggcccggtc

SEQ ID NO: 1575526 - DNA, 25 bp, Homo sapien
ggcatgtccaacatcgcagctccat

SEQ ID NO: 1575527 - DNA, 25 bp, Homo sapien
tggcccggtcagacagggactccat

SEQ ID NO: 1575528 - DNA, 25 bp, Homo sapien
tttgtcaaccacgtgtacagcaagg

SEQ ID NO: 1575529 - DNA, 25 bp, Homo sapien
gataaaaaaccctctagcaggcaca

SEQ ID NO: 1575530 - DNA, 25 bp, Homo sapien
aaagcaagcctatagcttatctgct

SEQ ID NO: 1575531 - DNA, 25 bp, Homo sapien
tcctaaacaggtaatcagcagacgt

SEQ ID NO: 1575532 - DNA, 25 bp, Homo sapien
tgtctacctagcacacccaagttta

SEQ ID NO: 1575533 - DNA, 25 bp, Homo sapien
tcaaagtatgttatcagggagcaac

SEQ ID NO: 1575534 - DNA, 25 bp, Homo sapien
gcaacaggcagaatcagtggaagag

SEQ ID NO: 1575535 - DNA, 25 bp, Homo sapien
tcacccgaggtgtttgatgataagt

SEQ ID NO: 1575536 - DNA, 25 bp, Homo sapien
tacgttcattatttgctcggcaggg

SEQ ID NO: 1575537 - DNA, 25 bp, Homo sapien
caggtgagcagcaactgtttgggct

SEQ ID NO: 1575538 - DNA, 25 bp, Homo sapien
ttcaggtgagcagcaactgtttggg

SEQ ID NO: 1575539 - DNA, 25 bp, Homo sapien
ggtgagcagcaactgtttgggctgg

SEQ ID NO: 1575540 - DNA, 25 bp, Homo sapien
gtgagcagcaactgtttgggctggt

SEQ ID NO: 1575541 - DNA, 25 bp, Homo sapien
agggctcgatcctggccggcggccg

SEQ ID NO: 1575542 - DNA, 25 bp, Homo sapien
cccgggccagggctcgatcctggcc

SEQ ID NO: 1575543 - DNA, 25 bp, Homo sapien
tccagtgggcacctccttcggcgcg

SEQ ID NO: 1575544 - DNA, 25 bp, Homo sapien
ctccttcggcgcggtccttggaggc

SEQ ID NO: 1575545 - DNA, 25 bp, Homo sapien
gggacagtatcctgagaaagtcgag

SEQ ID NO: 1575546 - DNA, 25 bp, Homo sapien
gaatttgacagttcttctgtcctac

SEQ ID NO: 1575547 - DNA, 25 bp, Homo sapien
agaatttgacagttcttctgtccta

SEQ ID NO: 1575548 - DNA, 25 bp, Homo sapien
agggacagtatcctgagaaagtcga

SEQ ID NO: 1575549 - DNA, 25 bp, Homo sapien
ttcctcttgagagaaatttacagcc

SEQ ID NO: 1575550 - DNA, 25 bp, Homo sapien
cattcctcttgagagaaatttacag

SEQ ID NO: 1575551 - DNA, 25 bp, Homo sapien
ccattcctcttgagagaaatttaca

SEQ ID NO: 1575552 - DNA, 25 bp, Homo sapien
tcccattcctcttgagagaaattta

SEQ ID NO: 1575553 - DNA, 25 bp, Homo sapien
ctttcctgtacaaattcctctgagc

SEQ ID NO: 1575554 - DNA, 25 bp, Homo sapien
aaattcctctgagcagggttcagcc

SEQ ID NO: 1575555 - DNA, 25 bp, Homo sapien
aattcctctgagcagggttcagcca

SEQ ID NO: 1575556 - DNA, 25 bp, Homo sapien
acatcactttcctgtacaaattcct

SEQ ID NO: 1575557 - DNA, 25 bp, Homo sapien
attaggcaggtctataaataagatc

SEQ ID NO: 1575558 - DNA, 25 bp, Homo sapien
cgtcagaggtttcccaaatattaca

SEQ ID NO: 1575559 - DNA, 25 bp, Homo sapien
ggaaatttagtgaagcacgtcagag

SEQ ID NO: 1575560 - DNA, 25 bp, Homo sapien
ggagctcagtcccatgtacagattc

SEQ ID NO: 1575561 - DNA, 25 bp, Homo sapien
atgggcctcttgttccctccttctt

SEQ ID NO: 1575562 - DNA, 25 bp, Homo sapien
ccttgctccaataatgagatcacat

SEQ ID NO: 1575563 - DNA, 25 bp, Homo sapien
cagggcatgggcctcttgttccctc

SEQ ID NO: 1575564 - DNA, 25 bp, Homo sapien
tgctccaataatgagatcacatctg

SEQ ID NO: 1575565 - DNA, 25 bp, Homo sapien
tgtgacatctggatccaacaatagg

SEQ ID NO: 1575566 - DNA, 25 bp, Homo sapien
gagtctttaagaagagctacccagg

SEQ ID NO: 1575567 - DNA, 25 bp, Homo sapien
gctacccaggaaacgtcaattatga

SEQ ID NO: 1575568 - DNA, 25 bp, Homo sapien
ttgaggagctcatactaaagatgcc

SEQ ID NO: 1575569 - DNA, 25 bp, Homo sapien
gtgttatcatcttctagttacccag

SEQ ID NO: 1575570 - DNA, 25 bp, Homo sapien
ccatggaggatactgagaaagttat

SEQ ID NO: 1575571 - DNA, 25 bp, Homo sapien
tcttctaaaccagttgcatgttgca

SEQ ID NO: 1575572 - DNA, 25 bp, Homo sapien
cagcatcaggctttatctctcaaac

SEQ ID NO: 1575573 - DNA, 25 bp, Homo sapien
gtctcccaggctaaagttcagtggt

SEQ ID NO: 1575574 - DNA, 25 bp, Homo sapien
tgcaatctcagctcactgcaacctc

SEQ ID NO: 1575575 - DNA, 25 bp, Homo sapien
tcagtggtgcaatctcagctcactg

SEQ ID NO: 1575576 - DNA, 25 bp, Homo sapien
tggtgcaatctcagctcactgcaac

SEQ ID NO: 1575577 - DNA, 25 bp, Homo sapien
gctataactaagatgtcttgctccc

SEQ ID NO: 1575578 - DNA, 25 bp, Homo sapien
cccactgtcacaactttggatgatt

SEQ ID NO: 1575579 - DNA, 25 bp, Homo sapien
tgtatcctggtggaatgtttgccaa

SEQ ID NO: 1575580 - DNA, 25 bp, Homo sapien
tctcaaactgggatagtcaaggcta

SEQ ID NO: 1575581 - DNA, 25 bp, Homo sapien
caatacattcgaaaggtctctctcc

SEQ ID NO: 1575582 - DNA, 25 bp, Homo sapien
cttatgttgcgccaagtttgcactc

SEQ ID NO: 1575583 - DNA, 25 bp, Homo sapien
tgtacaattaggtatccacgatggc

SEQ ID NO: 1575584 - DNA, 25 bp, Homo sapien
tctgatgctgagcaagaaatgaacc

SEQ ID NO: 1575585 - DNA, 25 bp, Homo sapien
gttgagcaaggtgtgcatactggct

SEQ ID NO: 1575586 - DNA, 25 bp, Homo sapien
agcaaggtgtgcatactggctgaag

SEQ ID NO: 1575587 - DNA, 25 bp, Homo sapien
tgagcaaggtgtgcatactggctga

SEQ ID NO: 1575588 - DNA, 25 bp, Homo sapien
atgttgagcaaggtgtgcatactgg

SEQ ID NO: 1575589 - DNA, 25 bp, Homo sapien
aaggtatgcaatttggctgaaggct

SEQ ID NO: 1575590 - DNA, 25 bp, Homo sapien
caaggtatgcaatttggctgaaggc

SEQ ID NO: 1575591 - DNA, 25 bp, Homo sapien
gcaagtgatgaactattgctaaagg

SEQ ID NO: 1575592 - DNA, 25 bp, Homo sapien
ttgtgcaagtgatgaactattgcta

SEQ ID NO: 1575593 - DNA, 25 bp, Homo sapien
gatccactatagctaaatgctttcc

SEQ ID NO: 1575594 - DNA, 25 bp, Homo sapien
tgatgtagagtaagagatccactat

SEQ ID NO: 1575595 - DNA, 25 bp, Homo sapien
ctgaaagatttcctgcaatctttac

SEQ ID NO: 1575596 - DNA, 25 bp, Homo sapien
gctgcctgaaagatttcctgcaatc

SEQ ID NO: 1575597 - DNA, 25 bp, Homo sapien
ctgcctgaaagatttcctgcaatct

SEQ ID NO: 1575598 - DNA, 25 bp, Homo sapien
gcctgaaagatttcctgcaatcttt

SEQ ID NO: 1575599 - DNA, 25 bp, Homo sapien
tggcaactgatttgatgtggagggt

SEQ ID NO: 1575600 - DNA, 25 bp, Homo sapien
ggtcttggcaactgatttgatgtgg

SEQ ID NO: 1575601 - DNA, 25 bp, Homo sapien
aggtcttggcaactgatttgatgtg

SEQ ID NO: 1575602 - DNA, 25 bp, Homo sapien
tcttggcaactgatttgatgtggag

SEQ ID NO: 1575603 - DNA, 25 bp, Homo sapien
gctactcgagtatcccatgtcaaat

SEQ ID NO: 1575604 - DNA, 25 bp, Homo sapien
taatgtgcattggacaaggatgatg

SEQ ID NO: 1575605 - DNA, 25 bp, Homo sapien
tggaaatggattcaagaggtggatt

SEQ ID NO: 1575606 - DNA, 25 bp, Homo sapien
ggtgagtacaaggagaccaattaga

SEQ ID NO: 1575607 - DNA, 25 bp, Homo sapien
gaagtgcaaagattggaacccaggt

SEQ ID NO: 1575608 - DNA, 25 bp, Homo sapien
cagagaatgagatggatagtgacac

SEQ ID NO: 1575609 - DNA, 25 bp, Homo sapien
cacgctgctgagcaatttacatgca

SEQ ID NO: 1575610 - DNA, 25 bp, Homo sapien
aattactttatgctaggcacgctgc

SEQ ID NO: 1575611 - DNA, 25 bp, Homo sapien
tgagaactgacctacagttttggtt

SEQ ID NO: 1575612 - DNA, 25 bp, Homo sapien
tttgtgggccagtttatgagaactg

SEQ ID NO: 1575613 - DNA, 25 bp, Homo sapien
cagtttatgagaactgacctacagt

SEQ ID NO: 1575614 - DNA, 25 bp, Homo sapien
cagatttagaacaggggttcaaact

SEQ ID NO: 1575615 - DNA, 25 bp, Homo sapien
gaatgaattgttgtatagagcacga

SEQ ID NO: 1575616 - DNA, 25 bp, Homo sapien
tccatgattagagtgtgtcacagac

SEQ ID NO: 1575617 - DNA, 25 bp, Homo sapien
gattatatgccaaaagaattctggg

SEQ ID NO: 1575618 - DNA, 25 bp, Homo sapien
gtttaggaaggccagtctcattcca

SEQ ID NO: 1575619 - DNA, 25 bp, Homo sapien
ctttgactatgagctggagaaaagc

SEQ ID NO: 1575620 - DNA, 25 bp, Homo sapien
tgactatgagctggagaaaagcgtc

SEQ ID NO: 1575621 - DNA, 25 bp, Homo sapien
ctatgagctggagaaaagcgtcatt

SEQ ID NO: 1575622 - DNA, 25 bp, Homo sapien
atgagctggagaaaagcgtcatttc

SEQ ID NO: 1575623 - DNA, 25 bp, Homo sapien
tgtacataagccaactccaagcctg

SEQ ID NO: 1575624 - DNA, 25 bp, Homo sapien
ggcttttggcaagggctactgacat

SEQ ID NO: 1575625 - DNA, 25 bp, Homo sapien
gatcctttgggcagactagattcca

SEQ ID NO: 1575626 - DNA, 25 bp, Homo sapien
gaagttgacaaattgcctaccagag

SEQ ID NO: 1575627 - DNA, 25 bp, Homo sapien
tgccattccagatagtgataacttg

SEQ ID NO: 1575628 - DNA, 25 bp, Homo sapien
tacagttgcagtaaacacagacatc

SEQ ID NO: 1575629 - DNA, 25 bp, Homo sapien
tccaagtactgtggtacatcccata

SEQ ID NO: 1575630 - DNA, 25 bp, Homo sapien
aatattccaaacaatccaggcaggg

SEQ ID NO: 1575631 - DNA, 25 bp, Homo sapien
gaacaggaagagaaccctacgagaa

SEQ ID NO: 1575632 - DNA, 25 bp, Homo sapien
tggcagccccagctaatatatggag

SEQ ID NO: 1575633 - DNA, 25 bp, Homo sapien
tgctggcgacctgttctcagacttc

SEQ ID NO: 1575634 - DNA, 25 bp, Homo sapien
tacgagaacctaaccatgctggcga

SEQ ID NO: 1575635 - DNA, 25 bp, Homo sapien
caaacgactttatggcggacactcc

SEQ ID NO: 1575636 - DNA, 25 bp, Homo sapien
accccggtggattctggaggtcgca

SEQ ID NO: 1575637 - DNA, 25 bp, Homo sapien
tgtgggcctcttcgcaaaacgtgca

SEQ ID NO: 1575638 - DNA, 25 bp, Homo sapien
gctggctggaggcaataagccctca

SEQ ID NO: 1575639 - DNA, 25 bp, Homo sapien
tcacagactcacaattacgcaacgg

SEQ ID NO: 1575640 - DNA, 25 bp, Homo sapien
gcgcgatcaaaacccgggacccgca

SEQ ID NO: 1575641 - DNA, 25 bp, Homo sapien
gggacgaggccatacttcacatctt

SEQ ID NO: 1575642 - DNA, 25 bp, Homo sapien
cgcacgcccagatgaccgggacgag

SEQ ID NO: 1575643 - DNA, 25 bp, Homo sapien
tgagtggttgcccttcagcaggaac

SEQ ID NO: 1575644 - DNA, 25 bp, Homo sapien
caatttcaatggtggcgttagaggc

SEQ ID NO: 1575645 - DNA, 25 bp, Homo sapien
taattattagagctacaccctgagc

SEQ ID NO: 1575646 - DNA, 25 bp, Homo sapien
gatggtgtcaatcatcaaatggcca

SEQ ID NO: 1575647 - DNA, 25 bp, Homo sapien
cttgagttcatcctcatacgtgaag

SEQ ID NO: 1575648 - DNA, 25 bp, Homo sapien
gtttgtagctggctgctttcaatga

SEQ ID NO: 1575649 - DNA, 25 bp, Homo sapien
catcctcatacgtgaagcatattta

SEQ ID NO: 1575650 - DNA, 25 bp, Homo sapien
ctgtttgtagctggctgctttcaat

SEQ ID NO: 1575651 - DNA, 25 bp, Homo sapien
ccaagagagatcgtagcagggtcca

SEQ ID NO: 1575652 - DNA, 25 bp, Homo sapien
agttggttgttggtgatcatcagtc

SEQ ID NO: 1575653 - DNA, 25 bp, Homo sapien
taagatgcagaagtagggttgaaac

SEQ ID NO: 1575654 - DNA, 25 bp, Homo sapien
ccttatccgggaatgagttggttgt

SEQ ID NO: 1575655 - DNA, 25 bp, Homo sapien
ggtgagaatggtctcatgaaaacca

SEQ ID NO: 1575656 - DNA, 25 bp, Homo sapien
ggattcattgaatgctgctaagaaa

SEQ ID NO: 1575657 - DNA, 25 bp, Homo sapien
tgtgaatgtactttactaactgcac

SEQ ID NO: 1575658 - DNA, 25 bp, Homo sapien
catttcaacatggttaagatagcaa

SEQ ID NO: 1575659 - DNA, 25 bp, Homo sapien
tgattaggagggaataaacgagatt

SEQ ID NO: 1575660 - DNA, 25 bp, Homo sapien
ttgattaggagggaataaacgagat

SEQ ID NO: 1575661 - DNA, 25 bp, Homo sapien
ccaagatgaagtggcatcatcctgc

SEQ ID NO: 1575662 - DNA, 25 bp, Homo sapien
atccaagatgaagtggcatcatcct

SEQ ID NO: 1575663 - DNA, 25 bp, Homo sapien
aagatgaagtggcatcatcctgcac

SEQ ID NO: 1575664 - DNA, 25 bp, Homo sapien
gatgaagtggcatcatcctgcacag

SEQ ID NO: 1575665 - DNA, 25 bp, Homo sapien
catagcccataatttgccaaaggac

SEQ ID NO: 1575666 - DNA, 25 bp, Homo sapien
aaatcttgaggcattcctgggcctg

SEQ ID NO: 1575667 - DNA, 25 bp, Homo sapien
catgtggcaacaagacaggtagatc

SEQ ID NO: 1575668 - DNA, 25 bp, Homo sapien
gcaagaatgctgtgtctcatagccc

SEQ ID NO: 1575669 - DNA, 25 bp, Homo sapien
tgtagtctactgtcacgtgcccggt

SEQ ID NO: 1575670 - DNA, 25 bp, Homo sapien
tctgggctggccgactaatattaac

SEQ ID NO: 1575671 - DNA, 25 bp, Homo sapien
gctagttcctctatggtggctgtca

SEQ ID NO: 1575672 - DNA, 25 bp, Homo sapien
cacacagaactcctgaagggactct

SEQ ID NO: 1575673 - DNA, 25 bp, Homo sapien
ttagctccggtttcaggcaactcct

SEQ ID NO: 1575674 - DNA, 25 bp, Homo sapien
gaactcagtgggacttcaatgggcc

SEQ ID NO: 1575675 - DNA, 25 bp, Homo sapien
aactgggtgcagcaaggatggacac

SEQ ID NO: 1575676 - DNA, 25 bp, Homo sapien
gaaaagtctggtcaaggagaggtct

SEQ ID NO: 1575677 - DNA, 25 bp, Homo sapien
catccgaaggactccgtgagtcgac

SEQ ID NO: 1575678 - DNA, 25 bp, Homo sapien
tcgtctggcacccagacgctctcat

SEQ ID NO: 1575679 - DNA, 25 bp, Homo sapien
agacgctctcatccgaaggactccg

SEQ ID NO: 1575680 - DNA, 25 bp, Homo sapien
actccgtgagtcgacgctggaaccc

SEQ ID NO: 1575681 - DNA, 25 bp, Homo sapien
tctggtctttctcttgaagaacagt

SEQ ID NO: 1575682 - DNA, 25 bp, Homo sapien
gaagaacagtgtcttgggagggcaa

SEQ ID NO: 1575683 - DNA, 25 bp, Homo sapien
ctggtctttctcttgaagaacagtg

SEQ ID NO: 1575684 - DNA, 25 bp, Homo sapien
tctcttgaagaacagtgtcttggga

SEQ ID NO: 1575685 - DNA, 25 bp, Homo sapien
tggggcatgacttttactacttcaa

SEQ ID NO: 1575686 - DNA, 25 bp, Homo sapien
ctggggcatgacttttactacttca

SEQ ID NO: 1575687 - DNA, 25 bp, Homo sapien
caattttcttaggtctgcatcagtg

SEQ ID NO: 1575688 - DNA, 25 bp, Homo sapien
ggtagaacccacagttgcagaacaa

SEQ ID NO: 1575689 - DNA, 25 bp, Homo sapien
gatactccatgggatccaagtttta

SEQ ID NO: 1575690 - DNA, 25 bp, Homo sapien
tccgaacatagggaaatatgggtgc

SEQ ID NO: 1575691 - DNA, 25 bp, Homo sapien
gataactctgagttgatccaaagtg

SEQ ID NO: 1575692 - DNA, 25 bp, Homo sapien
caatgctcgtgtccaaagataactc

SEQ ID NO: 1575693 - DNA, 25 bp, Homo sapien
caaagtgtctctactttaggtgaga

SEQ ID NO: 1575694 - DNA, 25 bp, Homo sapien
ttcttaaccaaccaatgctcgtgtc

SEQ ID NO: 1575695 - DNA, 25 bp, Homo sapien
ccacatccttgaatgtcactaagtc

SEQ ID NO: 1575696 - DNA, 25 bp, Homo sapien
tgccacatccttgaatgtcactaag

SEQ ID NO: 1575697 - DNA, 25 bp, Homo sapien
tcttcctgggaaaaatctattgcca

SEQ ID NO: 1575698 - DNA, 25 bp, Homo sapien
tcctgggaaaaatctattgccacat

SEQ ID NO: 1575699 - DNA, 25 bp, Homo sapien
catcatactcctgtataaacgcttc

SEQ ID NO: 1575700 - DNA, 25 bp, Homo sapien
catactcctgtataaacgcttctga

SEQ ID NO: 1575701 - DNA, 25 bp, Homo sapien
tccaacatcatactcctgtataaac

SEQ ID NO: 1575702 - DNA, 25 bp, Homo sapien
actcctgtataaacgcttctgagca

SEQ ID NO: 1575703 - DNA, 25 bp, Homo sapien
ttgttgtctagtggtgatagtaatt

SEQ ID NO: 1575704 - DNA, 25 bp, Homo sapien
tgttgttgtctagtggtgatagtaa

SEQ ID NO: 1575705 - DNA, 25 bp, Homo sapien
ttgttgttgtctagtggtgatagta

SEQ ID NO: 1575706 - DNA, 25 bp, Homo sapien
cttgttgttgtctagtggtgatagt

SEQ ID NO: 1575707 - DNA, 25 bp, Homo sapien
aatgtacacacaggatatctcagaa

SEQ ID NO: 1575708 - DNA, 25 bp, Homo sapien
tcagaaacgaaactacaagaagaac

SEQ ID NO: 1575709 - DNA, 25 bp, Homo sapien
ggaaaaagtgaatcatgcccattag

SEQ ID NO: 1575710 - DNA, 25 bp, Homo sapien
gctcacactgcaataacgaagaaga

SEQ ID NO: 1575711 - DNA, 25 bp, Homo sapien
cactcgtcatctcccaaggctctct

SEQ ID NO: 1575712 - DNA, 25 bp, Homo sapien
ttcttgtcatctcactcgtcatctc

SEQ ID NO: 1575713 - DNA, 25 bp, Homo sapien
gcttcttgtcatctcactcgtcatc

SEQ ID NO: 1575714 - DNA, 25 bp, Homo sapien
gtcatctcactcgtcatctcccaag

SEQ ID NO: 1575715 - DNA, 25 bp, Homo sapien
gcatgcatcatcatacatgaactgc

SEQ ID NO: 1575716 - DNA, 25 bp, Homo sapien
aattcctgtgtcacatatatagatt

SEQ ID NO: 1575717 - DNA, 25 bp, Homo sapien
catgcatcatcatacatgaactgct

SEQ ID NO: 1575718 - DNA, 25 bp, Homo sapien
agtccatagctagtaattccctcca

SEQ ID NO: 1575719 - DNA, 25 bp, Homo sapien
tctttcttgctaaacatctcatgac

SEQ ID NO: 1575720 - DNA, 25 bp, Homo sapien
tcccatctgcttctcaaaaaggtct

SEQ ID NO: 1575721 - DNA, 25 bp, Homo sapien
aaagtggaacactcaagtccatagc

SEQ ID NO: 1575722 - DNA, 25 bp, Homo sapien
gggatgagctatgggtgaaggtttt

SEQ ID NO: 1575723 - DNA, 25 bp, Homo sapien
tttcctacatagactttcttgtgtt

SEQ ID NO: 1575724 - DNA, 25 bp, Homo sapien
ctgatgtgtgattataaatactctc

SEQ ID NO: 1575725 - DNA, 25 bp, Homo sapien
gagcaaggtgttgcctttgcttgaa

SEQ ID NO: 1575726 - DNA, 25 bp, Homo sapien
atgtcgagcaaaagacgagccatca

SEQ ID NO: 1575727 - DNA, 25 bp, Homo sapien
tctgatgtcgagcaaaagacgagcc

SEQ ID NO: 1575728 - DNA, 25 bp, Homo sapien
gacatctctgatgtcgagcaaaaga

SEQ ID NO: 1575729 - DNA, 25 bp, Homo sapien
tctctgatgtcgagcaaaagacgag

SEQ ID NO: 1575730 - DNA, 25 bp, Homo sapien
gtatgataactcctccagtgacgaa

SEQ ID NO: 1575731 - DNA, 25 bp, Homo sapien
tgatgtacagtacgggatgaacccg

SEQ ID NO: 1575732 - DNA, 25 bp, Homo sapien
aataagtcctatgtgaacactgaag

SEQ ID NO: 1575733 - DNA, 25 bp, Homo sapien
gagtgatgcatgatggctaaaatct

SEQ ID NO: 1575734 - DNA, 25 bp, Homo sapien
gttgggcaaggtgtgatctctgttt

SEQ ID NO: 1575735 - DNA, 25 bp, Homo sapien
gggcaaggtgtgatctctgtttgaa

SEQ ID NO: 1575736 - DNA, 25 bp, Homo sapien
agccagctgtgaactgattctaaaa

SEQ ID NO: 1575737 - DNA, 25 bp, Homo sapien
ccagctgtgaactgattctaaaagc

SEQ ID NO: 1575738 - DNA, 25 bp, Homo sapien
gatgctgagcacaggatgagctatc

SEQ ID NO: 1575739 - DNA, 25 bp, Homo sapien
tgctgagcacaggatgagctatcac

SEQ ID NO: 1575740 - DNA, 25 bp, Homo sapien
aagattggaagtttggctgaaggct

SEQ ID NO: 1575741 - DNA, 25 bp, Homo sapien
gcacaggatgagctatcactaaaag

SEQ ID NO: 1575742 - DNA, 25 bp, Homo sapien
tttcttctgaacgccttcccacatt

SEQ ID NO: 1575743 - DNA, 25 bp, Homo sapien
ctgaacgccttcccacattcaaaac

SEQ ID NO: 1575744 - DNA, 25 bp, Homo sapien
tctgaacgccttcccacattcaaaa

SEQ ID NO: 1575745 - DNA, 25 bp, Homo sapien
cttctgaacgccttcccacattcaa

SEQ ID NO: 1575746 - DNA, 25 bp, Homo sapien
gacttctttgatgacaaattaagga

SEQ ID NO: 1575747 - DNA, 25 bp, Homo sapien
tctttgatgacaaattaaggataac

SEQ ID NO: 1575748 - DNA, 25 bp, Homo sapien
cttctttgatgacaaattaaggata

SEQ ID NO: 1575749 - DNA, 25 bp, Homo sapien
gtatgacttctttgatgacaaatta

SEQ ID NO: 1575750 - DNA, 25 bp, Homo sapien
acttttttcaaagatgcgctgccca

SEQ ID NO: 1575751 - DNA, 25 bp, Homo sapien
tatctgcctgggtatcaccggtgga

SEQ ID NO: 1575752 - DNA, 25 bp, Homo sapien
caagctttggtaatggttggcgccc

SEQ ID NO: 1575753 - DNA, 25 bp, Homo sapien
cttaacaagggagtaagcggttctg

SEQ ID NO: 1575754 - DNA, 25 bp, Homo sapien
cccttgccggcaaggagttgtgatc

SEQ ID NO: 1575755 - DNA, 25 bp, Homo sapien
atttgtcaaactcattctctatcca

SEQ ID NO: 1575756 - DNA, 25 bp, Homo sapien
tcaatttgtcaaactcattctctat

SEQ ID NO: 1575757 - DNA, 25 bp, Homo sapien
ccttgccggcaaggagttgtgatcc

SEQ ID NO: 1575758 - DNA, 25 bp, Homo sapien
aagtcttgtatatattccccgcagg

SEQ ID NO: 1575759 - DNA, 25 bp, Homo sapien
gctgtaatgttaactcgaaagggac

SEQ ID NO: 1575760 - DNA, 25 bp, Homo sapien
ccttaatcatgagacagccgctgtg

SEQ ID NO: 1575761 - DNA, 25 bp, Homo sapien
tcacacctgcgacaatactggatat

SEQ ID NO: 1575762 - DNA, 25 bp, Homo sapien
cagtaggagtgagaccggttctttc

SEQ ID NO: 1575763 - DNA, 25 bp, Homo sapien
cggttctttcgtttgtgtgggagct

SEQ ID NO: 1575764 - DNA, 25 bp, Homo sapien
ggcagccataatgctcttaggtacc

SEQ ID NO: 1575765 - DNA, 25 bp, Homo sapien
taggtacccaactccattcatctgg

SEQ ID NO: 1575766 - DNA, 25 bp, Homo sapien
gaaagcagtggcatagactttgtct

SEQ ID NO: 1575767 - DNA, 25 bp, Homo sapien
aattatccaatctgaagcacaaagg

SEQ ID NO: 1575768 - DNA, 25 bp, Homo sapien
tcagagcaatgaacaggcagtaact

SEQ ID NO: 1575769 - DNA, 25 bp, Homo sapien
tttgtgagcctactttaaaagcagt

SEQ ID NO: 1575770 - DNA, 25 bp, Homo sapien
ggcagtctactcctgtcactgggaa

SEQ ID NO: 1575771 - DNA, 25 bp, Homo sapien
ggatgtcatatgcttaggtgtcaga

SEQ ID NO: 1575772 - DNA, 25 bp, Homo sapien
gatatctggctaagatgaagggcag

SEQ ID NO: 1575773 - DNA, 25 bp, Homo sapien
ttagtcactcaggaatagccttgtg

SEQ ID NO: 1575774 - DNA, 25 bp, Homo sapien
gctgatggatttattcttgaacatg

SEQ ID NO: 1575775 - DNA, 25 bp, Homo sapien
gaacatgtttaggaccggtctctcc

SEQ ID NO: 1575776 - DNA, 25 bp, Homo sapien
tcctgggagccaagggccttgctgg

SEQ ID NO: 1575777 - DNA, 25 bp, Homo sapien
ggaattaagatgacttctatctctg

SEQ ID NO: 1575778 - DNA, 25 bp, Homo sapien
cgccacgcccagcgaacagccccgc

SEQ ID NO: 1575779 - DNA, 25 bp, Homo sapien
cccgccacgcccagcgaacagcccc

SEQ ID NO: 1575780 - DNA, 25 bp, Homo sapien
ccacgcccagcgaacagccccgcgc

SEQ ID NO: 1575781 - DNA, 25 bp, Homo sapien
acgcccagcgaacagccccgcgcgc

SEQ ID NO: 1575782 - DNA, 25 bp, Homo sapien
cccgaggccgcgcgacgcccttccg

SEQ ID NO: 1575783 - DNA, 25 bp, Homo sapien
aggccgcgcgacgcccttccgaccg

SEQ ID NO: 1575784 - DNA, 25 bp, Homo sapien
gaggccgcgcgacgcccttccgacc

SEQ ID NO: 1575785 - DNA, 25 bp, Homo sapien
cgaggccgcgcgacgcccttccgac

SEQ ID NO: 1575786 - DNA, 25 bp, Homo sapien
agcggcgtcggctcgcggacactcg

SEQ ID NO: 1575787 - DNA, 25 bp, Homo sapien
gagcggcgtcggctcgcggacactc

SEQ ID NO: 1575788 - DNA, 25 bp, Homo sapien
ggagcggcgtcggctcgcggacact

SEQ ID NO: 1575789 - DNA, 25 bp, Homo sapien
gggagcggcgtcggctcgcggacac

SEQ ID NO: 1575790 - DNA, 25 bp, Homo sapien
tggagtccctacagtcgggcctcgg

SEQ ID NO: 1575791 - DNA, 25 bp, Homo sapien
aaggtggctggagtccctacagtcg

SEQ ID NO: 1575792 - DNA, 25 bp, Homo sapien
ctggcctttggatgcgaggccattc

SEQ ID NO: 1575793 - DNA, 25 bp, Homo sapien
gaggccattccttgagcgcggcctt

SEQ ID NO: 1575794 - DNA, 25 bp, Homo sapien
tttaggttcaattcctgtccccaca

SEQ ID NO: 1575795 - DNA, 25 bp, Homo sapien
tgtccccacagcctccagcttcttg

SEQ ID NO: 1575796 - DNA, 25 bp, Homo sapien
cagcctccagcttcttgtttctctc

SEQ ID NO: 1575797 - DNA, 25 bp, Homo sapien
ctgggacatggctttaggttcaatt

SEQ ID NO: 1575798 - DNA, 25 bp, Homo sapien
tcacagacagtcagctgtagagctg

SEQ ID NO: 1575799 - DNA, 25 bp, Homo sapien
gagctgtaatgtgcccaggatcaca

SEQ ID NO: 1575800 - DNA, 25 bp, Homo sapien
tcctcacaacgatcctaatagtcag

SEQ ID NO: 1575801 - DNA, 25 bp, Homo sapien
caacgatcctaatagtcagtactat

SEQ ID NO: 1575802 - DNA, 25 bp, Homo sapien
acttacaacacttcagacgcaattc

SEQ ID NO: 1575803 - DNA, 25 bp, Homo sapien
gcacttacaacacttcagacgcaat

SEQ ID NO: 1575804 - DNA, 25 bp, Homo sapien
gctgaaagcacttacaacacttcag

SEQ ID NO: 1575805 - DNA, 25 bp, Homo sapien
gaaagcacttacaacacttcagacg

SEQ ID NO: 1575806 - DNA, 25 bp, Homo sapien
tcagttgcaactctaatcccaggaa

SEQ ID NO: 1575807 - DNA, 25 bp, Homo sapien
cattatgaggagctatcaggagcac

SEQ ID NO: 1575808 - DNA, 25 bp, Homo sapien
tggactaccccaaaagctgaattac

SEQ ID NO: 1575809 - DNA, 25 bp, Homo sapien
gaacatgcgaaacagttggactacc

SEQ ID NO: 1575810 - DNA, 25 bp, Homo sapien
tcaaccagtgctcatgcccccacat

SEQ ID NO: 1575811 - DNA, 25 bp, Homo sapien
ttcttgctcaaccagtgctcatgcc

SEQ ID NO: 1575812 - DNA, 25 bp, Homo sapien
tgctcaaccagtgctcatgccccca

SEQ ID NO: 1575813 - DNA, 25 bp, Homo sapien
gttcttgctcaaccagtgctcatgc

SEQ ID NO: 1575814 - DNA, 25 bp, Homo sapien
aagttcctctgaatggggttcagcc

SEQ ID NO: 1575815 - DNA, 25 bp, Homo sapien
gttcctctgaatggggttcagccac

SEQ ID NO: 1575816 - DNA, 25 bp, Homo sapien
tacaagttcctctgaatggggttca

SEQ ID NO: 1575817 - DNA, 25 bp, Homo sapien
ctctgaatggggttcagccactccc

SEQ ID NO: 1575818 - DNA, 25 bp, Homo sapien
agtccccttggcttgacgcaagagg

SEQ ID NO: 1575819 - DNA, 25 bp, Homo sapien
cccttggcttgacgcaagagggcag

SEQ ID NO: 1575820 - DNA, 25 bp, Homo sapien
gtccagactgagatgcagtcccctt

SEQ ID NO: 1575821 - DNA, 25 bp, Homo sapien
tccagactgagatgcagtccccttg

SEQ ID NO: 1575822 - DNA, 25 bp, Homo sapien
cttgttccaacgaggagatcacatc

SEQ ID NO: 1575823 - DNA, 25 bp, Homo sapien
ggcaccaggctcttgtcatctttcg

SEQ ID NO: 1575824 - DNA, 25 bp, Homo sapien
ctttcgcttcactgtccaaggctct

SEQ ID NO: 1575825 - DNA, 25 bp, Homo sapien
tcacatcgggcttagaaacacaaag

SEQ ID NO: 1575826 - DNA, 25 bp, Homo sapien
cactgcctgggatagctttccttcg

SEQ ID NO: 1575827 - DNA, 25 bp, Homo sapien
gtccttcttgagaggtaactccttg

SEQ ID NO: 1575828 - DNA, 25 bp, Homo sapien
tccagattatagcttgtgagtctct

SEQ ID NO: 1575829 - DNA, 25 bp, Homo sapien
tgttcccctaacagagagtactcca

SEQ ID NO: 1575830 - DNA, 25 bp, Homo sapien
tagctgctggcggaagtcaacagcc

SEQ ID NO: 1575831 - DNA, 25 bp, Homo sapien
gatcccaggtcactgttgttctccc

SEQ ID NO: 1575832 - DNA, 25 bp, Homo sapien
ccatatcccattcttacagaaattc

SEQ ID NO: 1575833 - DNA, 25 bp, Homo sapien
gtcactgttgttctcccatatccca

SEQ ID NO: 1575834 - DNA, 25 bp, Homo sapien
aagagatgaggtttggccaatagtc

SEQ ID NO: 1575835 - DNA, 25 bp, Homo sapien
tgaggtttggccaatagtcttggca

SEQ ID NO: 1575836 - DNA, 25 bp, Homo sapien
gatgaggtttggccaatagtcttgg

SEQ ID NO: 1575837 - DNA, 25 bp, Homo sapien
gagatgaggtttggccaatagtctt

SEQ ID NO: 1575838 - DNA, 25 bp, Homo sapien
gactaaatctggcttagccacacaa

SEQ ID NO: 1575839 - DNA, 25 bp, Homo sapien
aaatctggcttagccacacaatgtc

SEQ ID NO: 1575840 - DNA, 25 bp, Homo sapien
cctgtcagctctcgcttcaccatcc

SEQ ID NO: 1575841 - DNA, 25 bp, Homo sapien
cttgctctagtaaagagactaaatc

SEQ ID NO: 1575842 - DNA, 25 bp, Homo sapien
ctgggtaaagtttcctactgtatat

SEQ ID NO: 1575843 - DNA, 25 bp, Homo sapien
tttggtaaaagctccgctctctctt

SEQ ID NO: 1575844 - DNA, 25 bp, Homo sapien
tagtgaggatgcagcctttttggta

SEQ ID NO: 1575845 - DNA, 25 bp, Homo sapien
ctttttggtaaaagctccgctctct

SEQ ID NO: 1575846 - DNA, 25 bp, Homo sapien
tggagagaagggggcaaaggaggag

SEQ ID NO: 1575847 - DNA, 25 bp, Homo sapien
gagagaagggggcaaaggaggagga

SEQ ID NO: 1575848 - DNA, 25 bp, Homo sapien
ctggagagaagggggcaaaggagga

SEQ ID NO: 1575849 - DNA, 25 bp, Homo sapien
ggatgatacacgtcccagtggccaa

SEQ ID NO: 1575850 - DNA, 25 bp, Homo sapien
gcaggtgctcatatccaggaataca

SEQ ID NO: 1575851 - DNA, 25 bp, Homo sapien
tcagctcaaaagtgcatcagggtcc

SEQ ID NO: 1575852 - DNA, 25 bp, Homo sapien
ggaatacagcaatccccaaaatgtg

SEQ ID NO: 1575853 - DNA, 25 bp, Homo sapien
tgggtctcatgtacagatcgctggc

SEQ ID NO: 1575854 - DNA, 25 bp, Homo sapien
ggttctgtctgttaccccttcagca

SEQ ID NO: 1575855 - DNA, 25 bp, Homo sapien
tctgaatcgtccaaatagaaccatc

SEQ ID NO: 1575856 - DNA, 25 bp, Homo sapien
gagtaattggctcttgcctgaattg

SEQ ID NO: 1575857 - DNA, 25 bp, Homo sapien
tcattacacttgaaaagcttttttc

SEQ ID NO: 1575858 - DNA, 25 bp, Homo sapien
cattcattacacttgaaaagctttt

SEQ ID NO: 1575859 - DNA, 25 bp, Homo sapien
tacattcattacacttgaaaagctt

SEQ ID NO: 1575860 - DNA, 25 bp, Homo sapien
cttacattcattacacttgaaaagc

SEQ ID NO: 1575861 - DNA, 25 bp, Homo sapien
gagatgagctctgggtaaaagtttt

SEQ ID NO: 1575862 - DNA, 25 bp, Homo sapien
tgtcgggcaaaggatgagccgtcac

SEQ ID NO: 1575863 - DNA, 25 bp, Homo sapien
catctctggtgtcgggcaaaggatg

SEQ ID NO: 1575864 - DNA, 25 bp, Homo sapien
tgacatctctggtgtcgggcaaagg

SEQ ID NO: 1575865 - DNA, 25 bp, Homo sapien
tgtgttctgtatgaaagctttccca

SEQ ID NO: 1575866 - DNA, 25 bp, Homo sapien
gtatgatagtatctccagtgacgga

SEQ ID NO: 1575867 - DNA, 25 bp, Homo sapien
atcgatgcaatcaaagggtttctcc

SEQ ID NO: 1575868 - DNA, 25 bp, Homo sapien
cagtgacggataagggatgtgttct

SEQ ID NO: 1575869 - DNA, 25 bp, Homo sapien
ctgaaggatttgtgacatacatcac

SEQ ID NO: 1575870 - DNA, 25 bp, Homo sapien
tgtgttgattaagccctatgtggtc

SEQ ID NO: 1575871 - DNA, 25 bp, Homo sapien
cctgtgttgattaagccctatgtgg

SEQ ID NO: 1575872 - DNA, 25 bp, Homo sapien
gaaggatttgtgacatacatcacat

SEQ ID NO: 1575873 - DNA, 25 bp, Homo sapien
tccgcactctttacacttaaaaggc

SEQ ID NO: 1575874 - DNA, 25 bp, Homo sapien
tgaatccttaaatgactggcaaggt

SEQ ID NO: 1575875 - DNA, 25 bp, Homo sapien
gcaaggtgtatattctgcctaaaag

SEQ ID NO: 1575876 - DNA, 25 bp, Homo sapien
gagtgagtgatgcatgatggctgaa

SEQ ID NO: 1575877 - DNA, 25 bp, Homo sapien
ctgaaggattttccacactccgcac

SEQ ID NO: 1575878 - DNA, 25 bp, Homo sapien
gattctctgatgagtggcaagctga

SEQ ID NO: 1575879 - DNA, 25 bp, Homo sapien
tctgatgagtggcaagctgagaact

SEQ ID NO: 1575880 - DNA, 25 bp, Homo sapien
tgatgagtggcaagctgagaactga

SEQ ID NO: 1575881 - DNA, 25 bp, Homo sapien
tctctgatgagtggcaagctgagaa

SEQ ID NO: 1575882 - DNA, 25 bp, Homo sapien
gatgttgaatgaggtgtgtggtctg

SEQ ID NO: 1575883 - DNA, 25 bp, Homo sapien
tctgggtgaacgctttactacaaac

SEQ ID NO: 1575884 - DNA, 25 bp, Homo sapien
tgttgaatgaggtgtgtggtctggc

SEQ ID NO: 1575885 - DNA, 25 bp, Homo sapien
gttgaatgaggtgtgtggtctggct

SEQ ID NO: 1575886 - DNA, 25 bp, Homo sapien
ggatgagttatcaccaaaggccttc

SEQ ID NO: 1575887 - DNA, 25 bp, Homo sapien
tgcgatgacaaataagggaggattt

SEQ ID NO: 1575888 - DNA, 25 bp, Homo sapien
caaataagggaggattttgtcttga

SEQ ID NO: 1575889 - DNA, 25 bp, Homo sapien
gatgttgagtacaggatgagttatc

SEQ ID NO: 1575890 - DNA, 25 bp, Homo sapien
ggctttgccacacacactgcattca

SEQ ID NO: 1575891 - DNA, 25 bp, Homo sapien
tcataaggtttttctccagtatgac

SEQ ID NO: 1575892 - DNA, 25 bp, Homo sapien
ttcataaggtttttctccagtatga

SEQ ID NO: 1575893 - DNA, 25 bp, Homo sapien
aaaggctttgccacacacactgcat

SEQ ID NO: 1575894 - DNA, 25 bp, Homo sapien
ttcgctgatgatgagctaagtgagc

SEQ ID NO: 1575895 - DNA, 25 bp, Homo sapien
cacaggatttgacgtggaaggtaaa

SEQ ID NO: 1575896 - DNA, 25 bp, Homo sapien
taagtgagcagtttgcctgaagact

SEQ ID NO: 1575897 - DNA, 25 bp, Homo sapien
catgttgacgactctccagtatgaa

SEQ ID NO: 1575898 - DNA, 25 bp, Homo sapien
tgtgaagaactaactaataagggac

SEQ ID NO: 1575899 - DNA, 25 bp, Homo sapien
tagtcaaacagaaatgacgtctcga

SEQ ID NO: 1575900 - DNA, 25 bp, Homo sapien
ggcaaaacctcacccactactggag

SEQ ID NO: 1575901 - DNA, 25 bp, Homo sapien
tacattcacatagggtcagatggaa

SEQ ID NO: 1575902 - DNA, 25 bp, Homo sapien
tgcgagccatatagtctgtcacagt

SEQ ID NO: 1575903 - DNA, 25 bp, Homo sapien
tgtcacagttgtctaaagcagccat

SEQ ID NO: 1575904 - DNA, 25 bp, Homo sapien
caagcagcagataggatttggtcca

SEQ ID NO: 1575905 - DNA, 25 bp, Homo sapien
tgctccatagcagggatcacacaca

SEQ ID NO: 1575906 - DNA, 25 bp, Homo sapien
taatgttgataggtcatgccatccg

SEQ ID NO: 1575907 - DNA, 25 bp, Homo sapien
aagttttagatcgttgcatagccca

SEQ ID NO: 1575908 - DNA, 25 bp, Homo sapien
tgtgcatggcaagttgttccccact

SEQ ID NO: 1575909 - DNA, 25 bp, Homo sapien
tattgtaatctaccaagagccagga

SEQ ID NO: 1575910 - DNA, 25 bp, Homo sapien
ttcaaacgaattccagcctaggagt

SEQ ID NO: 1575911 - DNA, 25 bp, Homo sapien
ggcttaggatcctgctatatcatga

SEQ ID NO: 1575912 - DNA, 25 bp, Homo sapien
ccttaggttgctgccaaaggatgac

SEQ ID NO: 1575913 - DNA, 25 bp, Homo sapien
tatccagaccctagtgcacaatggg

SEQ ID NO: 1575914 - DNA, 25 bp, Homo sapien
tatgggcttcattagcacctgtacc

SEQ ID NO: 1575915 - DNA, 25 bp, Homo sapien
tacgatgtctctcaaagttccccac

SEQ ID NO: 1575916 - DNA, 25 bp, Homo sapien
cagtgattccactgtatcggttagg

SEQ ID NO: 1575917 - DNA, 25 bp, Homo sapien
agactgtggtggacagccattacga

SEQ ID NO: 1575918 - DNA, 25 bp, Homo sapien
ctaggaagatcagagaacacaaagc

SEQ ID NO: 1575919 - DNA, 25 bp, Homo sapien
tgtttgctaataccagtgtttaagg

SEQ ID NO: 1575920 - DNA, 25 bp, Homo sapien
aagcattatcacaagtcaccttttg

SEQ ID NO: 1575921 - DNA, 25 bp, Homo sapien
tttcctgttaaacctatccagtgga

SEQ ID NO: 1575922 - DNA, 25 bp, Homo sapien
gcatcatagatactggctcaccaga

SEQ ID NO: 1575923 - DNA, 25 bp, Homo sapien
aaccctaacccctagtgtgatgacg

SEQ ID NO: 1575924 - DNA, 25 bp, Homo sapien
tgacatctagactggactctcctgg

SEQ ID NO: 1575925 - DNA, 25 bp, Homo sapien
gatgtaacccatttgcaagccaacg

SEQ ID NO: 1575926 - DNA, 25 bp, Homo sapien
gccgggccatgcacgcaggcgcaga

SEQ ID NO: 1575927 - DNA, 25 bp, Homo sapien
gctcaccacgtatgggcactcacag

SEQ ID NO: 1575928 - DNA, 25 bp, Homo sapien
accggacagtcacacaccgggccgc

SEQ ID NO: 1575929 - DNA, 25 bp, Homo sapien
gattcgcggccacgcaccggacagt

SEQ ID NO: 1575930 - DNA, 25 bp, Homo sapien
aaatgcttcagccgaggctgccccg

SEQ ID NO: 1575931 - DNA, 25 bp, Homo sapien
ccacactgggctctacgcagtcgat

SEQ ID NO: 1575932 - DNA, 25 bp, Homo sapien
tgggctctacgcagtcgatacaggg

SEQ ID NO: 1575933 - DNA, 25 bp, Homo sapien
tgctcttggccacttaaagtgcttc

SEQ ID NO: 1575934 - DNA, 25 bp, Homo sapien
cctcgccgtcctgtggacatggagc

SEQ ID NO: 1575935 - DNA, 25 bp, Homo sapien
ccatggtcttcgctcctcgccgtcc

SEQ ID NO: 1575936 - DNA, 25 bp, Homo sapien
gctcctcgccgtcctgtggacatgg

SEQ ID NO: 1575937 - DNA, 25 bp, Homo sapien
ccccatggtcttcgctcctcgccgt

SEQ ID NO: 1575938 - DNA, 25 bp, Homo sapien
ggcagtagttgaggaaactacatga

SEQ ID NO: 1575939 - DNA, 25 bp, Homo sapien
ctacatgacagccagtgactctgga

SEQ ID NO: 1575940 - DNA, 25 bp, Homo sapien
cacttgctagtgattacttatcctc

SEQ ID NO: 1575941 - DNA, 25 bp, Homo sapien
gaatcccggttcttccacttgctag

SEQ ID NO: 1575942 - DNA, 25 bp, Homo sapien
ttggagaagagctttactctgggat

SEQ ID NO: 1575943 - DNA, 25 bp, Homo sapien
aagagctttactctgggattgtaga

SEQ ID NO: 1575944 - DNA, 25 bp, Homo sapien
tacaaagtttaattcctgccacctc

SEQ ID NO: 1575945 - DNA, 25 bp, Homo sapien
caaagtttaattcctgccacctcta

SEQ ID NO: 1575946 - DNA, 25 bp, Homo sapien
ctgagcaagattcagccactcccat

SEQ ID NO: 1575947 - DNA, 25 bp, Homo sapien
tgggaaattctgataatggcataaa

SEQ ID NO: 1575948 - DNA, 25 bp, Homo sapien
actactgagtcatggggaggcaaca

SEQ ID NO: 1575949 - DNA, 25 bp, Homo sapien
taaaaattgcctatgctgtggaaaa

SEQ ID NO: 1575950 - DNA, 25 bp, Homo sapien
ctgcatgtaaaaagacatataaaaa

SEQ ID NO: 1575951 - DNA, 25 bp, Homo sapien
ggcacaggcctctgttcatccctcc

SEQ ID NO: 1575952 - DNA, 25 bp, Homo sapien
gcacaggcctctgttcatccctcct

SEQ ID NO: 1575953 - DNA, 25 bp, Homo sapien
aagtctttccattatgattgccggg

SEQ ID NO: 1575954 - DNA, 25 bp, Homo sapien
gagtgatggtctcttgcctaaaatg

SEQ ID NO: 1575955 - DNA, 25 bp, Homo sapien
caaggtcatagcttttaagtctttc

SEQ ID NO: 1575956 - DNA, 25 bp, Homo sapien
ctgtcccagatttgttagagtgatc

SEQ ID NO: 1575957 - DNA, 25 bp, Homo sapien
tttggtgaagagtaagggttgagat

SEQ ID NO: 1575958 - DNA, 25 bp, Homo sapien
tctttggtgaagagtaagggttgag

SEQ ID NO: 1575959 - DNA, 25 bp, Homo sapien
ctttggtgaagagtaagggttgaga

SEQ ID NO: 1575960 - DNA, 25 bp, Homo sapien
tggtgaagagtaagggttgagattt

SEQ ID NO: 1575961 - DNA, 25 bp, Homo sapien
atgttgagcaaggtgggcactctgg

SEQ ID NO: 1575962 - DNA, 25 bp, Homo sapien
ctgatgttgagcaaggtgggcactc

SEQ ID NO: 1575963 - DNA, 25 bp, Homo sapien
gagcaaggtgggcactctggctaaa

SEQ ID NO: 1575964 - DNA, 25 bp, Homo sapien
gttgagcaaggtgggcactctggct

SEQ ID NO: 1575965 - DNA, 25 bp, Homo sapien
taatatcgccgatgacgtataagag

SEQ ID NO: 1575966 - DNA, 25 bp, Homo sapien
cgtataagagaagcattctgcctga

SEQ ID NO: 1575967 - DNA, 25 bp, Homo sapien
tccttcgatgatgagctagggatga

SEQ ID NO: 1575968 - DNA, 25 bp, Homo sapien
agcaaggtgtgcaagctggctgaat

SEQ ID NO: 1575969 - DNA, 25 bp, Homo sapien
gatgtactgtcagagatgagccatg

SEQ ID NO: 1575970 - DNA, 25 bp, Homo sapien
tctgatgtactgtcagagatgagcc

SEQ ID NO: 1575971 - DNA, 25 bp, Homo sapien
tctctgatgtactgtcagagatgag

SEQ ID NO: 1575972 - DNA, 25 bp, Homo sapien
tactgtcagagatgagccatggcta

SEQ ID NO: 1575973 - DNA, 25 bp, Homo sapien
ctttctcacagatattgcattcata

SEQ ID NO: 1575974 - DNA, 25 bp, Homo sapien
gatattgcattcataaggtttctct

SEQ ID NO: 1575975 - DNA, 25 bp, Homo sapien
tctcacagatattgcattcataagg

SEQ ID NO: 1575976 - DNA, 25 bp, Homo sapien
atattgcattcataaggtttctctc

SEQ ID NO: 1575977 - DNA, 25 bp, Homo sapien
ttttctgatgttgcgcgaggtgtgc

SEQ ID NO: 1575978 - DNA, 25 bp, Homo sapien
tctgatgaagagtaagagacccacg

SEQ ID NO: 1575979 - DNA, 25 bp, Homo sapien
tgaagagtaagagacccacgatggc

SEQ ID NO: 1575980 - DNA, 25 bp, Homo sapien
gatgaagagtaagagacccacgatg

SEQ ID NO: 1575981 - DNA, 25 bp, Homo sapien
catctctgatgacaaatcaaggatg

SEQ ID NO: 1575982 - DNA, 25 bp, Homo sapien
gctgaacaaggtgtgcaatctgact

SEQ ID NO: 1575983 - DNA, 25 bp, Homo sapien
tgacaaatcaaggatgccctctgcc

SEQ ID NO: 1575984 - DNA, 25 bp, Homo sapien
tcatacggtcttttgccactgtgga

SEQ ID NO: 1575985 - DNA, 25 bp, Homo sapien
tcccacaaacattacattcataagg

SEQ ID NO: 1575986 - DNA, 25 bp, Homo sapien
ctttcccacaaacattacattcata

SEQ ID NO: 1575987 - DNA, 25 bp, Homo sapien
aacattacattcataaggtttctca

SEQ ID NO: 1575988 - DNA, 25 bp, Homo sapien
acattacattcataaggtttctcac

SEQ ID NO: 1575989 - DNA, 25 bp, Homo sapien
gagtaagggatttacgatggctaaa

SEQ ID NO: 1575990 - DNA, 25 bp, Homo sapien
agagtaagggatttacgatggctaa

SEQ ID NO: 1575991 - DNA, 25 bp, Homo sapien
agtaagggatttacgatggctaaag

SEQ ID NO: 1575992 - DNA, 25 bp, Homo sapien
ttctttacactcatagggcctttct

SEQ ID NO: 1575993 - DNA, 25 bp, Homo sapien
attctcttatgtagagtaagatggg

SEQ ID NO: 1575994 - DNA, 25 bp, Homo sapien
tctcttatgtagagtaagatgggca

SEQ ID NO: 1575995 - DNA, 25 bp, Homo sapien
tcttatgtagagtaagatgggcaac

SEQ ID NO: 1575996 - DNA, 25 bp, Homo sapien
catgtactctggataacggcttccc

SEQ ID NO: 1575997 - DNA, 25 bp, Homo sapien
cagtgagctaagtttcccaatgcca

SEQ ID NO: 1575998 - DNA, 25 bp, Homo sapien
tcacagagggagtgataagccacca

SEQ ID NO: 1575999 - DNA, 25 bp, Homo sapien
tatgggcctatactacaatacaggt

SEQ ID NO: 1576000 - DNA, 25 bp, Homo sapien
taatcaggcgtttgctcatcgcaca

SEQ ID NO: 1576001 - DNA, 25 bp, Homo sapien
caccatgagatgctttccagtctag

SEQ ID NO: 1576002 - DNA, 25 bp, Homo sapien
tataagtcttattcgccccatctca

SEQ ID NO: 1576003 - DNA, 25 bp, Homo sapien
gacaatgggtagtttgaggaatcac

SEQ ID NO: 1576004 - DNA, 25 bp, Homo sapien
catacaaaatcccttaggtgaattt

SEQ ID NO: 1576005 - DNA, 25 bp, Homo sapien
cctatgactttaaacaatgtaagac

SEQ ID NO: 1576006 - DNA, 25 bp, Homo sapien
cacagtgactcttgtgaataaagta

SEQ ID NO: 1576007 - DNA, 25 bp, Homo sapien
ccaagcagttagataccagtattac

SEQ ID NO: 1576008 - DNA, 25 bp, Homo sapien
tgggattagggcctcactcttatgg

SEQ ID NO: 1576009 - DNA, 25 bp, Homo sapien
catgtggagagacaaacctctggtg

SEQ ID NO: 1576010 - DNA, 25 bp, Homo sapien
cttaaaggccttatgtccaaataca

SEQ ID NO: 1576011 - DNA, 25 bp, Homo sapien
gcagcattcttgttgtgtccttaca

SEQ ID NO: 1576012 - DNA, 25 bp, Homo sapien
cacagtcctggagattaaaagtcca

SEQ ID NO: 1576013 - DNA, 25 bp, Homo sapien
ttctcacagtcctggagattaaaag

SEQ ID NO: 1576014 - DNA, 25 bp, Homo sapien
ctcacagtcctggagattaaaagtc

SEQ ID NO: 1576015 - DNA, 25 bp, Homo sapien
agtcctggagattaaaagtccaaga

SEQ ID NO: 1576016 - DNA, 25 bp, Homo sapien
tccttcagttacaacctctctacat

SEQ ID NO: 1576017 - DNA, 25 bp, Homo sapien
agttacaacctctctacatagcatt

SEQ ID NO: 1576018 - DNA, 25 bp, Homo sapien
ttcagttacaacctctctacatagc

SEQ ID NO: 1576019 - DNA, 25 bp, Homo sapien
tgctccttcagttacaacctctcta

SEQ ID NO: 1576020 - DNA, 25 bp, Homo sapien
caacgcagaagttcacataattaac

SEQ ID NO: 1576021 - DNA, 25 bp, Homo sapien
aaactcttatgtctgttttacctgt

SEQ ID NO: 1576022 - DNA, 25 bp, Homo sapien
tttccaaattagtatgtgcattcta

SEQ ID NO: 1576023 - DNA, 25 bp, Homo sapien
gaaatagtcaaagagtagattgtaa

SEQ ID NO: 1576024 - DNA, 25 bp, Homo sapien
tcattatcgagaagacagcaccgtg

SEQ ID NO: 1576025 - DNA, 25 bp, Homo sapien
agtgcctaggctgaacctataccgc

SEQ ID NO: 1576026 - DNA, 25 bp, Homo sapien
gaccaacagcccagggtaagagtcc

SEQ ID NO: 1576027 - DNA, 25 bp, Homo sapien
taagagtccagctggtacttacctg

SEQ ID NO: 1576028 - DNA, 25 bp, Homo sapien
agagtgggccccctcctcagtgatg

SEQ ID NO: 1576029 - DNA, 25 bp, Homo sapien
tgggccccctcctcagtgatgccct

SEQ ID NO: 1576030 - DNA, 25 bp, Homo sapien
tgctcagagagtgggccccctcctc

SEQ ID NO: 1576031 - DNA, 25 bp, Homo sapien
agtgggccccctcctcagtgatgcc

SEQ ID NO: 1576032 - DNA, 25 bp, Homo sapien
aactcagcatttcccgagagtcctt

SEQ ID NO: 1576033 - DNA, 25 bp, Homo sapien
ccgagagtccttgcgcaggttgttg

SEQ ID NO: 1576034 - DNA, 25 bp, Homo sapien
gcatttcccgagagtccttgcgcag

SEQ ID NO: 1576035 - DNA, 25 bp, Homo sapien
tttcccgagagtccttgcgcaggtt

SEQ ID NO: 1576036 - DNA, 25 bp, Homo sapien
cggcacaggtagagggtgggcgcga

SEQ ID NO: 1576037 - DNA, 25 bp, Homo sapien
cggcccccggcacaggtagagggtg

SEQ ID NO: 1576038 - DNA, 25 bp, Homo sapien
caggtagagggtgggcgcgaccccg

SEQ ID NO: 1576039 - DNA, 25 bp, Homo sapien
ggcctgcacgccgtctccccgaggc

SEQ ID NO: 1576040 - DNA, 25 bp, Homo sapien
gcacgccctctcctgcgcccgcacg

SEQ ID NO: 1576041 - DNA, 25 bp, Homo sapien
ctgcacgccctctcctgcgcccgca

SEQ ID NO: 1576042 - DNA, 25 bp, Homo sapien
ggcctgcacgccctctcctgcgccc

SEQ ID NO: 1576043 - DNA, 25 bp, Homo sapien
gtcccggcctgcacgccctctcctg

SEQ ID NO: 1576044 - DNA, 25 bp, Homo sapien
gagtgtgagtgctggactgaggccc

SEQ ID NO: 1576045 - DNA, 25 bp, Homo sapien
agaaccacctgtggcctctttgggc

SEQ ID NO: 1576046 - DNA, 25 bp, Homo sapien
ctgcccggatccctccttgagtgtg

SEQ ID NO: 1576047 - DNA, 25 bp, Homo sapien
ctgagggccaccggacaccctgcct

SEQ ID NO: 1576048 - DNA, 25 bp, Homo sapien
cccacggtgaataggaagacaggcc

SEQ ID NO: 1576049 - DNA, 25 bp, Homo sapien
tgctgcccacggtgaataggaagac

SEQ ID NO: 1576050 - DNA, 25 bp, Homo sapien
ctctgctgcccacggtgaataggaa

SEQ ID NO: 1576051 - DNA, 25 bp, Homo sapien
acggtgaataggaagacaggcctgc

SEQ ID NO: 1576052 - DNA, 25 bp, Homo sapien
gcctcatcagtcagcagctgagcag

SEQ ID NO: 1576053 - DNA, 25 bp, Homo sapien
cagtgcctcatcagtcagcagctga

SEQ ID NO: 1576054 - DNA, 25 bp, Homo sapien
tcatcagtcagcagctgagcagcca

SEQ ID NO: 1576055 - DNA, 25 bp, Homo sapien
catcagtcagcagctgagcagccat

SEQ ID NO: 1576056 - DNA, 25 bp, Homo sapien
aaatgagtgccaatgggtactcggc

SEQ ID NO: 1576057 - DNA, 25 bp, Homo sapien
cgcgactctatgaatgtacccaaaa

SEQ ID NO: 1576058 - DNA, 25 bp, Homo sapien
tacgtgatgtgtacctcaacaaagg

SEQ ID NO: 1576059 - DNA, 25 bp, Homo sapien
tgtggtgatggttaacgcgactcta

SEQ ID NO: 1576060 - DNA, 25 bp, Homo sapien
tacaggcgcagacctctttatggaa

SEQ ID NO: 1576061 - DNA, 25 bp, Homo sapien
gatctcccgaatatactgttacatg

SEQ ID NO: 1576062 - DNA, 25 bp, Homo sapien
gataaatcaggtcagtgaatccacc

SEQ ID NO: 1576063 - DNA, 25 bp, Homo sapien
tacacatatgtgcttatacaggcgc

SEQ ID NO: 1576064 - DNA, 25 bp, Homo sapien
cttctgggcaggctccagctgctgc

SEQ ID NO: 1576065 - DNA, 25 bp, Homo sapien
cctgtacaggtccttctgggcaggc

SEQ ID NO: 1576066 - DNA, 25 bp, Homo sapien
gtcacatccctgaacgtcactgatt

SEQ ID NO: 1576067 - DNA, 25 bp, Homo sapien
agcatgacatccctgtacaggtcct

SEQ ID NO: 1576068 - DNA, 25 bp, Homo sapien
tggaagtctcctgtaatcttactca

SEQ ID NO: 1576069 - DNA, 25 bp, Homo sapien
tatattttagactcccctccaacgc

SEQ ID NO: 1576070 - DNA, 25 bp, Homo sapien
tttgtccaagacagagtataaagga

SEQ ID NO: 1576071 - DNA, 25 bp, Homo sapien
tactcaccagagttaacagtttggt

SEQ ID NO: 1576072 - DNA, 25 bp, Homo sapien
agttcatgacatgcgggtactgagc

SEQ ID NO: 1576073 - DNA, 25 bp, Homo sapien
gggaattcccaatggctcccactct

SEQ ID NO: 1576074 - DNA, 25 bp, Homo sapien
cttggttggcaaatgccttcagttc

SEQ ID NO: 1576075 - DNA, 25 bp, Homo sapien
ggagagcttgtcttccgaaatgtca

SEQ ID NO: 1576076 - DNA, 25 bp, Homo sapien
ttttctgtggggtcgtccagccgtg

SEQ ID NO: 1576077 - DNA, 25 bp, Homo sapien
ggagaagttcttgccacgccttacg

SEQ ID NO: 1576078 - DNA, 25 bp, Homo sapien
tgccacgccttacgggtggacaggc

SEQ ID NO: 1576079 - DNA, 25 bp, Homo sapien
aagtgctggagaagttcttgccacg

SEQ ID NO: 1576080 - DNA, 25 bp, Homo sapien
ggtgtcacactcaaacggcttttct

SEQ ID NO: 1576081 - DNA, 25 bp, Homo sapien
tatcagggacgagcttcggctaaag

SEQ ID NO: 1576082 - DNA, 25 bp, Homo sapien
cactcgctgcagtcgtaggttttct

SEQ ID NO: 1576083 - DNA, 25 bp, Homo sapien
cgagcgctcgatgaagtgcttccca

SEQ ID NO: 1576084 - DNA, 25 bp, Homo sapien
cagtgaggttcatgcgctggctgaa

SEQ ID NO: 1576085 - DNA, 25 bp, Homo sapien
gaggaagtcttccggaaggccttgc

SEQ ID NO: 1576086 - DNA, 25 bp, Homo sapien
gtgcacgatgaggtgcatgttctgg

SEQ ID NO: 1576087 - DNA, 25 bp, Homo sapien
ggatccgctcgtgctgggtgagaga

SEQ ID NO: 1576088 - DNA, 25 bp, Homo sapien
tggtgctcggtcaggtgcatgttct

SEQ ID NO: 1576089 - DNA, 25 bp, Homo sapien
ggtgagcgaggagctcttgttgaag

SEQ ID NO: 1576090 - DNA, 25 bp, Homo sapien
gcagggtgagcgaggagctcttgtt

SEQ ID NO: 1576091 - DNA, 25 bp, Homo sapien
tcgccggtgtggttcctctggtgca

SEQ ID NO: 1576092 - DNA, 25 bp, Homo sapien
tgctgcgtgagcgaggagttcttgc

SEQ ID NO: 1576093 - DNA, 25 bp, Homo sapien
gacgagcgccccgtgaagtgcttct

SEQ ID NO: 1576094 - DNA, 25 bp, Homo sapien
ttcacgccgatgtggaagcgctggt

SEQ ID NO: 1576095 - DNA, 25 bp, Homo sapien
cactcgaacggcttcacgccgatgt

SEQ ID NO: 1576096 - DNA, 25 bp, Homo sapien
ggtgctcgatgaggtaggcgctctg

SEQ ID NO: 1576097 - DNA, 25 bp, Homo sapien
tgctcgatgaggtaggcgctctggc

SEQ ID NO: 1576098 - DNA, 25 bp, Homo sapien
tccgctggtgctcgatgaggtaggc

SEQ ID NO: 1576099 - DNA, 25 bp, Homo sapien
ctcgatgaggtaggcgctctggctg

SEQ ID NO: 1576100 - DNA, 25 bp, Homo sapien
cgcgtcaggttcgtgttgcggctga

SEQ ID NO: 1576101 - DNA, 25 bp, Homo sapien
agggaggagttcttgatgaaggact

SEQ ID NO: 1576102 - DNA, 25 bp, Homo sapien
aggtggcgcgtcaggttcgtgttgc

SEQ ID NO: 1576103 - DNA, 25 bp, Homo sapien
caggttcgtgttgcggctgaaggtc

SEQ ID NO: 1576104 - DNA, 25 bp, Homo sapien
tgatgtctgttaccagcggccatgg

SEQ ID NO: 1576105 - DNA, 25 bp, Homo sapien
tgacaagctgcatctggactccagg

SEQ ID NO: 1576106 - DNA, 25 bp, Homo sapien
gaaccttgaagtgtccccagatacg

SEQ ID NO: 1576107 - DNA, 25 bp, Homo sapien
tactcaagagggctagtctggaacc

SEQ ID NO: 1576108 - DNA, 25 bp, Homo sapien
cagagcttcagtcggccttaggaaa

SEQ ID NO: 1576109 - DNA, 25 bp, Homo sapien
gaagtctgccgtttacaaccacgtg

SEQ ID NO: 1576110 - DNA, 25 bp, Homo sapien
gaagccgattttgaccagacaactg

SEQ ID NO: 1576111 - DNA, 25 bp, Homo sapien
gccagaacattagcaaccagtagta

SEQ ID NO: 1576112 - DNA, 25 bp, Homo sapien
taaccgggtcatgctactgtgggag

SEQ ID NO: 1576113 - DNA, 25 bp, Homo sapien
cagcgctgggactgaacgaaagcac

SEQ ID NO: 1576114 - DNA, 25 bp, Homo sapien
gatcaagactcgctgctggaaacca

SEQ ID NO: 1576115 - DNA, 25 bp, Homo sapien
cagtgtaggcaaggagcacggacct

SEQ ID NO: 1576116 - DNA, 25 bp, Homo sapien
ttggcttgtggatggtcgaccctct

SEQ ID NO: 1576117 - DNA, 25 bp, Homo sapien
tccagcaagctagctcaagccagtg

SEQ ID NO: 1576118 - DNA, 25 bp, Homo sapien
cctcaggatgggtcagggagtaact

SEQ ID NO: 1576119 - DNA, 25 bp, Homo sapien
tcctcaacagagaagtggcaaaacc

SEQ ID NO: 1576120 - DNA, 25 bp, Homo sapien
tggaaaatctactgagcctcatggg

SEQ ID NO: 1576121 - DNA, 25 bp, Homo sapien
ggttcctacttatcagagggtgcag

SEQ ID NO: 1576122 - DNA, 25 bp, Homo sapien
gtttgttcattgctcggttcccaga

SEQ ID NO: 1576123 - DNA, 25 bp, Homo sapien
tgatcatgcccagaaattaggagtg

SEQ ID NO: 1576124 - DNA, 25 bp, Homo sapien
tcttcctgactatgatatgccatga

SEQ ID NO: 1576125 - DNA, 25 bp, Homo sapien
ggaccaggacttaacagggtgaatc

SEQ ID NO: 1576126 - DNA, 25 bp, Homo sapien
tatgccatgaatgtgatgattttcc

SEQ ID NO: 1576127 - DNA, 25 bp, Homo sapien
tctggtatgtttggtcaacctcagg

SEQ ID NO: 1576128 - DNA, 25 bp, Homo sapien
gaacaaaatagatcatcgtggatgg

SEQ ID NO: 1576129 - DNA, 25 bp, Homo sapien
tgaatgacgtgaaaacccagcaaca

SEQ ID NO: 1576130 - DNA, 25 bp, Homo sapien
gacacatcatttcatgggaggatgg

SEQ ID NO: 1576131 - DNA, 25 bp, Homo sapien
gttgcaaatctacagatgcagtctg

SEQ ID NO: 1576132 - DNA, 25 bp, Homo sapien
ggcctggctgaaccggattgaaatt

SEQ ID NO: 1576133 - DNA, 25 bp, Homo sapien
ctggctgaaccggattgaaattatt

SEQ ID NO: 1576134 - DNA, 25 bp, Homo sapien
tgaaccggattgaaattattaacat

SEQ ID NO: 1576135 - DNA, 25 bp, Homo sapien
agggcctggctgaaccggattgaaa

SEQ ID NO: 1576136 - DNA, 25 bp, Homo sapien
taagtgctgttgacatctttttggg

SEQ ID NO: 1576137 - DNA, 25 bp, Homo sapien
caggaggtaagtgctgttgacatct

SEQ ID NO: 1576138 - DNA, 25 bp, Homo sapien
ggtaagtgctgttgacatctttttg

SEQ ID NO: 1576139 - DNA, 25 bp, Homo sapien
ggaggtaagtgctgttgacatcttt

SEQ ID NO: 1576140 - DNA, 25 bp, Homo sapien
cagagctggcgccgcactgactgcg

SEQ ID NO: 1576141 - DNA, 25 bp, Homo sapien
gagctggcgccgcactgactgcggc

SEQ ID NO: 1576142 - DNA, 25 bp, Homo sapien
tgcagagctggcgccgcactgactg

SEQ ID NO: 1576143 - DNA, 25 bp, Homo sapien
gcagagctggcgccgcactgactgc

SEQ ID NO: 1576144 - DNA, 25 bp, Homo sapien
acactcgggcaggtgcgctgaacac

SEQ ID NO: 1576145 - DNA, 25 bp, Homo sapien
tcctcacgaggaggctggaattcac

SEQ ID NO: 1576146 - DNA, 25 bp, Homo sapien
tgccgccccacgagggtacacaggt

SEQ ID NO: 1576147 - DNA, 25 bp, Homo sapien
acacaacgcgaacacgcacaggtgc

SEQ ID NO: 1576148 - DNA, 25 bp, Homo sapien
tgtttgctgagagcctgcgctccca

SEQ ID NO: 1576149 - DNA, 25 bp, Homo sapien
gtttgctgagagcctgcgctcccac

SEQ ID NO: 1576150 - DNA, 25 bp, Homo sapien
ctgtttgctgagagcctgcgctccc

SEQ ID NO: 1576151 - DNA, 25 bp, Homo sapien
gaggtggagcttctgagacaagctt

SEQ ID NO: 1576152 - DNA, 25 bp, Homo sapien
gaggaggtggagcttctgagacaag

SEQ ID NO: 1576153 - DNA, 25 bp, Homo sapien
tccagggtcctctctggttctccag

SEQ ID NO: 1576154 - DNA, 25 bp, Homo sapien
tctggttctccaggcacaagattca

SEQ ID NO: 1576155 - DNA, 25 bp, Homo sapien
agcctcccagtctttggtgcaggcg

SEQ ID NO: 1576156 - DNA, 25 bp, Homo sapien
ggctctcccgaggcagcagagtctt

SEQ ID NO: 1576157 - DNA, 25 bp, Homo sapien
cccggctctcccgaggcagcagagt

SEQ ID NO: 1576158 - DNA, 25 bp, Homo sapien
gcctcccagtctttggtgcaggcgg

SEQ ID NO: 1576159 - DNA, 25 bp, Homo sapien
cctgggaaagcccagtctcttgaga

SEQ ID NO: 1576160 - DNA, 25 bp, Homo sapien
tccctgcaccacgagccaataaatc

SEQ ID NO: 1576161 - DNA, 25 bp, Homo sapien
cctgcaccacgagccaataaatcca

SEQ ID NO: 1576162 - DNA, 25 bp, Homo sapien
tcatggtttgttggccagtttgttt

SEQ ID NO: 1576163 - DNA, 25 bp, Homo sapien
tgttggccagtttgtttccctcgcc

SEQ ID NO: 1576164 - DNA, 25 bp, Homo sapien
ctgtccagaactcgcctatggctcc

SEQ ID NO: 1576165 - DNA, 25 bp, Homo sapien
gagaggagtcctgctaaaggccaaa

SEQ ID NO: 1576166 - DNA, 25 bp, Homo sapien
acctcctcggtgtgggacttagcag

SEQ ID NO: 1576167 - DNA, 25 bp, Homo sapien
aaaacacatccaacctcctcggtgt

SEQ ID NO: 1576168 - DNA, 25 bp, Homo sapien
cccagagtgattctgtaagtccccg

SEQ ID NO: 1576169 - DNA, 25 bp, Homo sapien
tgattctgtaagtccccgaacacct

SEQ ID NO: 1576170 - DNA, 25 bp, Homo sapien
tgtaagtccccgaacaccttcgatg

SEQ ID NO: 1576171 - DNA, 25 bp, Homo sapien
taagtccccgaacaccttcgatggc

SEQ ID NO: 1576172 - DNA, 25 bp, Homo sapien
tctaaactctaaccccagccacatc

SEQ ID NO: 1576173 - DNA, 25 bp, Homo sapien
cctctaaactctaaccccagccaca

SEQ ID NO: 1576174 - DNA, 25 bp, Homo sapien
ctctaaactctaaccccagccacat

SEQ ID NO: 1576175 - DNA, 25 bp, Homo sapien
tgcccctctaaactctaaccccagc

SEQ ID NO: 1576176 - DNA, 25 bp, Homo sapien
ggttccagacagcccgctcctcttt

SEQ ID NO: 1576177 - DNA, 25 bp, Homo sapien
ctggttccagacagcccgctcctct

SEQ ID NO: 1576178 - DNA, 25 bp, Homo sapien
tggttccagacagcccgctcctctt

SEQ ID NO: 1576179 - DNA, 25 bp, Homo sapien
tctggttccagacagcccgctcctc

SEQ ID NO: 1576180 - DNA, 25 bp, Homo sapien
gccatgttatgcagactgatctcga

SEQ ID NO: 1576181 - DNA, 25 bp, Homo sapien
taaaacattctgttgaagtggaatg

SEQ ID NO: 1576182 - DNA, 25 bp, Homo sapien
tgccatgttatgcagactgatctcg

SEQ ID NO: 1576183 - DNA, 25 bp, Homo sapien
ccagcttaaaacattctgttgaagt

SEQ ID NO: 1576184 - DNA, 25 bp, Homo sapien
atgtgaaacatcataggcatccccg

SEQ ID NO: 1576185 - DNA, 25 bp, Homo sapien
catcataggcatccccgttaaaacc

SEQ ID NO: 1576186 - DNA, 25 bp, Homo sapien
aaaaaagcacgcacactaccaagac

SEQ ID NO: 1576187 - DNA, 25 bp, Homo sapien
agcacgcacactaccaagactatgg

SEQ ID NO: 1576188 - DNA, 25 bp, Homo sapien
gatttttaactagcacaattcctta

SEQ ID NO: 1576189 - DNA, 25 bp, Homo sapien
ttctccgtggtatacaaaataatgt

SEQ ID NO: 1576190 - DNA, 25 bp, Homo sapien
gacatagggcatctatttcattaaa

SEQ ID NO: 1576191 - DNA, 25 bp, Homo sapien
ttccttaacatgacatagggcatct

SEQ ID NO: 1576192 - DNA, 25 bp, Homo sapien
tcaaagtcaggagatatcttccagt

SEQ ID NO: 1576193 - DNA, 25 bp, Homo sapien
gatgcaagcttaaccatgataccaa

SEQ ID NO: 1576194 - DNA, 25 bp, Homo sapien
gactggtgcaccaaaaccttaagaa

SEQ ID NO: 1576195 - DNA, 25 bp, Homo sapien
gatagcaccaatctcacatgtgaag

SEQ ID NO: 1576196 - DNA, 25 bp, Homo sapien
taagatgtggccaacgctatatcca

SEQ ID NO: 1576197 - DNA, 25 bp, Homo sapien
tatgcctcgaattacacagctgttg

SEQ ID NO: 1576198 - DNA, 25 bp, Homo sapien
tggaagcagatgtgttataggccac

SEQ ID NO: 1576199 - DNA, 25 bp, Homo sapien
taacgagtaaaccacaaacagcagt

SEQ ID NO: 1576200 - DNA, 25 bp, Homo sapien
aggggtgatgagaatttgccatgaa

SEQ ID NO: 1576201 - DNA, 25 bp, Homo sapien
gggtgatgagaatttgccatgaacc

SEQ ID NO: 1576202 - DNA, 25 bp, Homo sapien
ggggtgatgagaatttgccatgaac

SEQ ID NO: 1576203 - DNA, 25 bp, Homo sapien
gaggggtgatgagaatttgccatga

SEQ ID NO: 1576204 - DNA, 25 bp, Homo sapien
gggtgtgggcagattggtctgccgt

SEQ ID NO: 1576205 - DNA, 25 bp, Homo sapien
gcggcgccgctggaaagtgtcttgg

SEQ ID NO: 1576206 - DNA, 25 bp, Homo sapien
cggcgccgctggaaagtgtcttggg

SEQ ID NO: 1576207 - DNA, 25 bp, Homo sapien
gggcagattggtctgccgtgagcgc

SEQ ID NO: 1576208 - DNA, 25 bp, Homo sapien
cagacatggggcacagtttatcacc

SEQ ID NO: 1576209 - DNA, 25 bp, Homo sapien
ggctgcatccgccggtgagagcttc

SEQ ID NO: 1576210 - DNA, 25 bp, Homo sapien
tagtgggcatgatcggcgtccgtcc

SEQ ID NO: 1576211 - DNA, 25 bp, Homo sapien
gcagaaagagctgggtcaaacccgc

SEQ ID NO: 1576212 - DNA, 25 bp, Homo sapien
agggacttagcctgtctgaacctca

SEQ ID NO: 1576213 - DNA, 25 bp, Homo sapien
tagggacttagcctgtctgaacctc

SEQ ID NO: 1576214 - DNA, 25 bp, Homo sapien
cctgcagtagggacttagcctgtct

SEQ ID NO: 1576215 - DNA, 25 bp, Homo sapien
cagtagggacttagcctgtctgaac

SEQ ID NO: 1576216 - DNA, 25 bp, Homo sapien
ggaataggacattggtgtgtttaga

SEQ ID NO: 1576217 - DNA, 25 bp, Homo sapien
aataggacattggtgtgtttagaga

SEQ ID NO: 1576218 - DNA, 25 bp, Homo sapien
ttggaataggacattggtgtgttta

SEQ ID NO: 1576219 - DNA, 25 bp, Homo sapien
ttttggaataggacattggtgtgtt

SEQ ID NO: 1576220 - DNA, 25 bp, Homo sapien
caacagtgcaaggtgctattgatac

SEQ ID NO: 1576221 - DNA, 25 bp, Homo sapien
cagctgcattctagaggatttgcta

SEQ ID NO: 1576222 - DNA, 25 bp, Homo sapien
ggaaaacacttacctgcttcaacag

SEQ ID NO: 1576223 - DNA, 25 bp, Homo sapien
gatacagcttttagaggctcatctc

SEQ ID NO: 1576224 - DNA, 25 bp, Homo sapien
aaaaatgcagcccaaattctcagag

SEQ ID NO: 1576225 - DNA, 25 bp, Homo sapien
ttttgagtacaaactgccagtgata

SEQ ID NO: 1576226 - DNA, 25 bp, Homo sapien
ttaaaaatgcagcccaaattctcag

SEQ ID NO: 1576227 - DNA, 25 bp, Homo sapien
gtacaaactgccagtgatacagctt

SEQ ID NO: 1576228 - DNA, 25 bp, Homo sapien
tcgggggacagcagtcagagagggc

SEQ ID NO: 1576229 - DNA, 25 bp, Homo sapien
caaagcaggtgctcgggggacagca

SEQ ID NO: 1576230 - DNA, 25 bp, Homo sapien
aacaaagcaggtgctcgggggacag

SEQ ID NO: 1576231 - DNA, 25 bp, Homo sapien
ggaacaaagcaggtgctcgggggac

SEQ ID NO: 1576232 - DNA, 25 bp, Homo sapien
tcacaacaggaggggcaccactgca

SEQ ID NO: 1576233 - DNA, 25 bp, Homo sapien
ccatctctgagcatccaaggagaag

SEQ ID NO: 1576234 - DNA, 25 bp, Homo sapien
cccatctctgagcatccaaggagaa

SEQ ID NO: 1576235 - DNA, 25 bp, Homo sapien
taatttcctggtgagtcatctccaa

SEQ ID NO: 1576236 - DNA, 25 bp, Homo sapien
tctccaatctcaggggcaccgagcg

SEQ ID NO: 1576237 - DNA, 25 bp, Homo sapien
aatgaatacatagtccactgcaggc

SEQ ID NO: 1576238 - DNA, 25 bp, Homo sapien
ttgcttggcaaccaggccagctcct

SEQ ID NO: 1576239 - DNA, 25 bp, Homo sapien
cagccaatggtggggctgtactgat

SEQ ID NO: 1576240 - DNA, 25 bp, Homo sapien
gtactgattaatcaagggcttcacc

SEQ ID NO: 1576241 - DNA, 25 bp, Homo sapien
tcagccaatggtggggctgtactga

SEQ ID NO: 1576242 - DNA, 25 bp, Homo sapien
tactgattaatcaagggcttcacca

SEQ ID NO: 1576243 - DNA, 25 bp, Homo sapien
ctctgacgatagtttctttggcttg

SEQ ID NO: 1576244 - DNA, 25 bp, Homo sapien
cgatagtttctttggcttgcaaaaa

SEQ ID NO: 1576245 - DNA, 25 bp, Homo sapien
atgatagtttctttggcttgcaaaa

SEQ ID NO: 1576246 - DNA, 25 bp, Homo sapien
ttggcttgcaaaaatttcctcccat

SEQ ID NO: 1576247 - DNA, 25 bp, Homo sapien
gagcaggaaatcaggtatggatcta

SEQ ID NO: 1576248 - DNA, 25 bp, Homo sapien
tccttggtataagcagcattgagaa

SEQ ID NO: 1576249 - DNA, 25 bp, Homo sapien
cattcacagtagcaatcttctggca

SEQ ID NO: 1576250 - DNA, 25 bp, Homo sapien
tctggcacaatcagtaatgcaaacc

SEQ ID NO: 1576251 - DNA, 25 bp, Homo sapien
ggctctggtctgttcacgtaaagcc

SEQ ID NO: 1576252 - DNA, 25 bp, Homo sapien
tctcattgcatgaatcacaaagttt

SEQ ID NO: 1576253 - DNA, 25 bp, Homo sapien
cctgggctctggaatgaccgccctg

SEQ ID NO: 1576254 - DNA, 25 bp, Homo sapien
aaagccttgttctcattgcatgaat

SEQ ID NO: 1576255 - DNA, 25 bp, Homo sapien
tttgaagtgaaaataactgcacaca

SEQ ID NO: 1576256 - DNA, 25 bp, Homo sapien
ctgcacacatggctgtaccaggctg

SEQ ID NO: 1576257 - DNA, 25 bp, Homo sapien
tgtgggatcttgagccctggcatgg

SEQ ID NO: 1576258 - DNA, 25 bp, Homo sapien
ctgcctttggacagagcaatgctag

SEQ ID NO: 1576259 - DNA, 25 bp, Homo sapien
tcagttgagtgggggagccagacat

SEQ ID NO: 1576260 - DNA, 25 bp, Homo sapien
tgtcagttgagtgggggagccagac

SEQ ID NO: 1576261 - DNA, 25 bp, Homo sapien
gtcagttgagtgggggagccagaca

SEQ ID NO: 1576262 - DNA, 25 bp, Homo sapien
tgaacggatctgaaccactgtggcc

SEQ ID NO: 1576263 - DNA, 25 bp, Homo sapien
ctgccggtgccatagaacaggagca

SEQ ID NO: 1576264 - DNA, 25 bp, Homo sapien
gccttccggcggctggctgctgaac

SEQ ID NO: 1576265 - DNA, 25 bp, Homo sapien
cactgtggccaagatgcggatgtaa

SEQ ID NO: 1576266 - DNA, 25 bp, Homo sapien
agtagcgggtggtgggtcgcatgta

SEQ ID NO: 1576267 - DNA, 25 bp, Homo sapien
aagcgcccttccagcggggagtagc

SEQ ID NO: 1576268 - DNA, 25 bp, Homo sapien
cacagggctctcttcatgtcctggt

SEQ ID NO: 1576269 - DNA, 25 bp, Homo sapien
tgtagatgagcggattcagggtggg

SEQ ID NO: 1576270 - DNA, 25 bp, Homo sapien
acacactcgcacacaactgcaaagc

SEQ ID NO: 1576271 - DNA, 25 bp, Homo sapien
ccagccgagacgctcggatctcccg

SEQ ID NO: 1576272 - DNA, 25 bp, Homo sapien
acaactgcaaagctcctcgcccctt

SEQ ID NO: 1576273 - DNA, 25 bp, Homo sapien
cttccaccagccgagacgctcggat

SEQ ID NO: 1576274 - DNA, 25 bp, Homo sapien
taatcacgcgtacggacaaactcac

SEQ ID NO: 1576275 - DNA, 25 bp, Homo sapien
cacacttgatcacacgcacacactt

SEQ ID NO: 1576276 - DNA, 25 bp, Homo sapien
cacaggtttgctcacgcaacactcg

SEQ ID NO: 1576277 - DNA, 25 bp, Homo sapien
acacgcacacacttaatcacgcgta

SEQ ID NO: 1576278 - DNA, 25 bp, Homo sapien
gccagtcacggaaagaactgctgac

SEQ ID NO: 1576279 - DNA, 25 bp, Homo sapien
agacttgccagtcacggaaagaact

SEQ ID NO: 1576280 - DNA, 25 bp, Homo sapien
acttgccagtcacggaaagaactgc

SEQ ID NO: 1576281 - DNA, 25 bp, Homo sapien
ttgccagtcacggaaagaactgctg

SEQ ID NO: 1576282 - DNA, 25 bp, Homo sapien
ccagggaggtagttatattcacaag

SEQ ID NO: 1576283 - DNA, 25 bp, Homo sapien
tatgcaactagtacaagtccaggga

SEQ ID NO: 1576284 - DNA, 25 bp, Homo sapien
gagctgaggtcaaatttcaaggtcc

SEQ ID NO: 1576285 - DNA, 25 bp, Homo sapien
tattcacaagtagaagagacccttg

SEQ ID NO: 1576286 - DNA, 25 bp, Homo sapien
cactgtgtctgtcagtgctaccaga

SEQ ID NO: 1576287 - DNA, 25 bp, Homo sapien
tgtcagtgctaccagacaggactca

SEQ ID NO: 1576288 - DNA, 25 bp, Homo sapien
aattccatggtattcctctctccct

SEQ ID NO: 1576289 - DNA, 25 bp, Homo sapien
ccagacaggactcaattccatggta

SEQ ID NO: 1576290 - DNA, 25 bp, Homo sapien
caggattcagacttaggctgctggc

SEQ ID NO: 1576291 - DNA, 25 bp, Homo sapien
ttcatttcgtagaccaggagacaga

SEQ ID NO: 1576292 - DNA, 25 bp, Homo sapien
taatcaccgtgttacatgagtgcct

SEQ ID NO: 1576293 - DNA, 25 bp, Homo sapien
tgtcccagaggctaaaaacttggcc

SEQ ID NO: 1576294 - DNA, 25 bp, Homo sapien
tgacccgctctccagcggggatcag

SEQ ID NO: 1576295 - DNA, 25 bp, Homo sapien
gcctccagcttagaggttcgggcat

SEQ ID NO: 1576296 - DNA, 25 bp, Homo sapien
cagcctccagcttagaggttcgggc

SEQ ID NO: 1576297 - DNA, 25 bp, Homo sapien
tgggcctagaggactgacccgctct

SEQ ID NO: 1576298 - DNA, 25 bp, Homo sapien
tgagcaagctcaccccagttgtcca

SEQ ID NO: 1576299 - DNA, 25 bp, Homo sapien
agttgtccatgggtgagcagccaga

SEQ ID NO: 1576300 - DNA, 25 bp, Homo sapien
gccagagggtaagctttgcttggtc

SEQ ID NO: 1576301 - DNA, 25 bp, Homo sapien
tgagcagccagagggtaagctttgc

SEQ ID NO: 1576302 - DNA, 25 bp, Homo sapien
ttttggtagagcagccaaggccacc

SEQ ID NO: 1576303 - DNA, 25 bp, Homo sapien
caaaaccgatattggccattgcact

SEQ ID NO: 1576304 - DNA, 25 bp, Homo sapien
tgtctcaggtagtctcccataggta

SEQ ID NO: 1576305 - DNA, 25 bp, Homo sapien
tcttattgaggctagtgggcatcac

SEQ ID NO: 1576306 - DNA, 25 bp, Homo sapien
accacactgtcttcgacaagggtag

SEQ ID NO: 1576307 - DNA, 25 bp, Homo sapien
ccaacaaaattggaacgtgttcaca

SEQ ID NO: 1576308 - DNA, 25 bp, Homo sapien
tagccatgagatgcaatacgaactc

SEQ ID NO: 1576309 - DNA, 25 bp, Homo sapien
gcaccagcaacttaataacagcaga

SEQ ID NO: 1576310 - DNA, 25 bp, Homo sapien
ctatcccggttgttggacaccttat

SEQ ID NO: 1576311 - DNA, 25 bp, Homo sapien
gccagtaggtgggcttgccatttgt

SEQ ID NO: 1576312 - DNA, 25 bp, Homo sapien
ttcttcatccctatcccggttgttg

SEQ ID NO: 1576313 - DNA, 25 bp, Homo sapien
agccagtaggtgggcttgccatttg

SEQ ID NO: 1576314 - DNA, 25 bp, Homo sapien
ggatagcaccatacccaatttgcgg

SEQ ID NO: 1576315 - DNA, 25 bp, Homo sapien
cctgttggcgaccacagtggatagc

SEQ ID NO: 1576316 - DNA, 25 bp, Homo sapien
tgtccctgattccataagtcggagg

SEQ ID NO: 1576317 - DNA, 25 bp, Homo sapien
agcttgctaactggaaccctgttgg

SEQ ID NO: 1576318 - DNA, 25 bp, Homo sapien
tgttttcaccatccaaagagtgtgg

SEQ ID NO: 1576319 - DNA, 25 bp, Homo sapien
tccttgaaaggtcatcattctagtg

SEQ ID NO: 1576320 - DNA, 25 bp, Homo sapien
gtagaagagaaactcacccatgttt

SEQ ID NO: 1576321 - DNA, 25 bp, Homo sapien
catcttgatctgtgcactagtctgt

SEQ ID NO: 1576322 - DNA, 25 bp, Homo sapien
gattgtttaaacctatctgtggaca

SEQ ID NO: 1576323 - DNA, 25 bp, Homo sapien
tctgtggacacttaatgcaactgtt

SEQ ID NO: 1576324 - DNA, 25 bp, Homo sapien
taatcacgagttatgtagcaacgtg

SEQ ID NO: 1576325 - DNA, 25 bp, Homo sapien
gaaagcaggacacgaaagtatattt

SEQ ID NO: 1576326 - DNA, 25 bp, Homo sapien
tgcgcttcctgccttaagtgacaag

SEQ ID NO: 1576327 - DNA, 25 bp, Homo sapien
taacatggactcaggttccccagca

SEQ ID NO: 1576328 - DNA, 25 bp, Homo sapien
tactctgcagaggtaccttacctgg

SEQ ID NO: 1576329 - DNA, 25 bp, Homo sapien
ggagaggctctcatgctgtaaataa

SEQ ID NO: 1576330 - DNA, 25 bp, Homo sapien
ccatgttccacaagtagttctgagg

SEQ ID NO: 1576331 - DNA, 25 bp, Homo sapien
ggagaatctttcgtcaacccagcag

SEQ ID NO: 1576332 - DNA, 25 bp, Homo sapien
ggtaagtcctttattcatagcacag

SEQ ID NO: 1576333 - DNA, 25 bp, Homo sapien
cagagaagtcagaccgaagagagac

SEQ ID NO: 1576334 - DNA, 25 bp, Homo sapien
cacaggtccctgagtactgacggtc

SEQ ID NO: 1576335 - DNA, 25 bp, Homo sapien
gggccccaaatctgtatgagctaga

SEQ ID NO: 1576336 - DNA, 25 bp, Homo sapien
tttgttgggcctcggaagaccctga

SEQ ID NO: 1576337 - DNA, 25 bp, Homo sapien
gatgcctctggtaaggtggcctcca

SEQ ID NO: 1576338 - DNA, 25 bp, Homo sapien
ctgtctgtgctagccacagggtggc

SEQ ID NO: 1576339 - DNA, 25 bp, Homo sapien
cgcctctacggtactgtctgtgcta

SEQ ID NO: 1576340 - DNA, 25 bp, Homo sapien
ttgagtgacacctgggtcggcccca

SEQ ID NO: 1576341 - DNA, 25 bp, Homo sapien
ccgaggttgattgcgcaggcgccat

SEQ ID NO: 1576342 - DNA, 25 bp, Homo sapien
tgttttgccagtgggactggctcag

SEQ ID NO: 1576343 - DNA, 25 bp, Homo sapien
gccagtgggactggctcagtccccg

SEQ ID NO: 1576344 - DNA, 25 bp, Homo sapien
ctgttttgccagtgggactggctca

SEQ ID NO: 1576345 - DNA, 25 bp, Homo sapien
agtgggactggctcagtccccgcat

SEQ ID NO: 1576346 - DNA, 25 bp, Homo sapien
ccgcataggtgtggggttgtccaca

SEQ ID NO: 1576347 - DNA, 25 bp, Homo sapien
tgccttgcggtgatggaaagctgtg

SEQ ID NO: 1576348 - DNA, 25 bp, Homo sapien
gaaagctgtggagtgccgcgctcct

SEQ ID NO: 1576349 - DNA, 25 bp, Homo sapien
tgccatctttgatcggggcggctgc

SEQ ID NO: 1576350 - DNA, 25 bp, Homo sapien
tcctagttggttgggcgagacaagg

SEQ ID NO: 1576351 - DNA, 25 bp, Homo sapien
tgaaagtgcttgagatttgctgcgc

SEQ ID NO: 1576352 - DNA, 25 bp, Homo sapien
cgcgcaggcgttgcccggattggtt

SEQ ID NO: 1576353 - DNA, 25 bp, Homo sapien
attggttggcggcagatgcggcggg

SEQ ID NO: 1576354 - DNA, 25 bp, Homo sapien
ggcaagccagcgacccttgtggcag

SEQ ID NO: 1576355 - DNA, 25 bp, Homo sapien
gggtctccgcgcctttctgactggc

SEQ ID NO: 1576356 - DNA, 25 bp, Homo sapien
ccagcaaggtcgacaccaatgctat

SEQ ID NO: 1576357 - DNA, 25 bp, Homo sapien
gttggtgccgccatcttgcagtccg

SEQ ID NO: 1576358 - DNA, 25 bp, Homo sapien
gagagggcggtgaggctgctgattg

SEQ ID NO: 1576359 - DNA, 25 bp, Homo sapien
agaagccctgacaaggaggcgtcga

SEQ ID NO: 1576360 - DNA, 25 bp, Homo sapien
tgctgattggctagcacagaagccc

SEQ ID NO: 1576361 - DNA, 25 bp, Homo sapien
agctgcacctcggtgcagaagtctg

SEQ ID NO: 1576362 - DNA, 25 bp, Homo sapien
ttgctgtggcaaccgcagcctgatt

SEQ ID NO: 1576363 - DNA, 25 bp, Homo sapien
tgtcccaggcggaaaagtcttgtct

SEQ ID NO: 1576364 - DNA, 25 bp, Homo sapien
aatgtatgtgtttttgcggccagga

SEQ ID NO: 1576365 - DNA, 25 bp, Homo sapien
tcgatgtctttcatgtgtcccaggc

SEQ ID NO: 1576366 - DNA, 25 bp, Homo sapien
taacctaagtcagggtactaccaca

SEQ ID NO: 1576367 - DNA, 25 bp, Homo sapien
gcctaatgagagtagccagatttga

SEQ ID NO: 1576368 - DNA, 25 bp, Homo sapien
gatggtctagggagtctaaaacaca

SEQ ID NO: 1576369 - DNA, 25 bp, Homo sapien
aagtctgtgtgctccttaggtaaac

SEQ ID NO: 1576370 - DNA, 25 bp, Homo sapien
ggagcggaaaccaggaccatgtaat

SEQ ID NO: 1576371 - DNA, 25 bp, Homo sapien
tagtgactaagttctgaggcaagac

SEQ ID NO: 1576372 - DNA, 25 bp, Homo sapien
gctttgagttgcctgatagacatcc

SEQ ID NO: 1576373 - DNA, 25 bp, Homo sapien
cagcgtgtagatggcaagcagagca

SEQ ID NO: 1576374 - DNA, 25 bp, Homo sapien
aaacgtcactccacacttgcgaaag

SEQ ID NO: 1576375 - DNA, 25 bp, Homo sapien
tatcacaggtcatacagcctcaggc

SEQ ID NO: 1576376 - DNA, 25 bp, Homo sapien
ccaaaggttattgagaagaggcgca

SEQ ID NO: 1576377 - DNA, 25 bp, Homo sapien
tgaaaactgttgtagttcacagaag

SEQ ID NO: 1576378 - DNA, 25 bp, Homo sapien
gcgcctcttcgacacacagacttcc

SEQ ID NO: 1576379 - DNA, 25 bp, Homo sapien
ccgcgggctggacgctcggcctttc

SEQ ID NO: 1576380 - DNA, 25 bp, Homo sapien
cacagacttcccgtctcttggggag

SEQ ID NO: 1576381 - DNA, 25 bp, Homo sapien
gataccgccgatgtcctccagacgg

SEQ ID NO: 1576382 - DNA, 25 bp, Homo sapien
ctttcggtatagctgacggacgtcc

SEQ ID NO: 1576383 - DNA, 25 bp, Homo sapien
tcctgtttcccagtcggccgtgggc

SEQ ID NO: 1576384 - DNA, 25 bp, Homo sapien
aaccgtcctctgtgactggagctcg

SEQ ID NO: 1576385 - DNA, 25 bp, Homo sapien
acagggcgtgtgtcacttctcgcaa

SEQ ID NO: 1576386 - DNA, 25 bp, Homo sapien
ctgccaggctggaggcccttgcaag

SEQ ID NO: 1576387 - DNA, 25 bp, Homo sapien
gacgccaggggcctcttgtccttaa

SEQ ID NO: 1576388 - DNA, 25 bp, Homo sapien
tggaggcccttgcaagggccaggaa

SEQ ID NO: 1576389 - DNA, 25 bp, Homo sapien
gtccttaatccctccggctgccagg

SEQ ID NO: 1576390 - DNA, 25 bp, Homo sapien
gaatcacacgtctttttcatcgaaa

SEQ ID NO: 1576391 - DNA, 25 bp, Homo sapien
tcacaactgcaaaatcgcggaatca

SEQ ID NO: 1576392 - DNA, 25 bp, Homo sapien
catcgaaaggtgtaagtgccatccc

SEQ ID NO: 1576393 - DNA, 25 bp, Homo sapien
tttcacacacatgcgtatagcagca

SEQ ID NO: 1576394 - DNA, 25 bp, Homo sapien
ctgcaccatatttgttgtattttgt

SEQ ID NO: 1576395 - DNA, 25 bp, Homo sapien
caccatatttgttgtattttgtccc

SEQ ID NO: 1576396 - DNA, 25 bp, Homo sapien
catatttgttgtattttgtccctcg

SEQ ID NO: 1576397 - DNA, 25 bp, Homo sapien
tatttgttgtattttgtccctcgcc

SEQ ID NO: 1576398 - DNA, 25 bp, Homo sapien
gaaagtatgtgcacctcaatagcaa

SEQ ID NO: 1576399 - DNA, 25 bp, Homo sapien
agcctgctcgtggtgccctgtgaaa

SEQ ID NO: 1576400 - DNA, 25 bp, Homo sapien
taaaaagtgactggtggcatcaatg

SEQ ID NO: 1576401 - DNA, 25 bp, Homo sapien
tagcaatcgggcaaagacgtacggg

SEQ ID NO: 1576402 - DNA, 25 bp, Homo sapien
agataagaaattgtagacttctgtt

SEQ ID NO: 1576403 - DNA, 25 bp, Homo sapien
ataagaaattgtagacttctgttat

SEQ ID NO: 1576404 - DNA, 25 bp, Homo sapien
taagaaattgtagacttctgttatt

SEQ ID NO: 1576405 - DNA, 25 bp, Homo sapien
aagaaattgtagacttctgttatta

SEQ ID NO: 1576406 - DNA, 25 bp, Homo sapien
gagaatgccatattgttatatattg

SEQ ID NO: 1576407 - DNA, 25 bp, Homo sapien
tatatattggggcatgagttaccag

SEQ ID NO: 1576408 - DNA, 25 bp, Homo sapien
tattggggcatgagttaccagttct

SEQ ID NO: 1576409 - DNA, 25 bp, Homo sapien
gaatgccatattgttatatattggg

SEQ ID NO: 1576410 - DNA, 25 bp, Homo sapien
ccttagaccaatggttaactctaat

SEQ ID NO: 1576411 - DNA, 25 bp, Homo sapien
ttccttagaccaatggttaactcta

SEQ ID NO: 1576412 - DNA, 25 bp, Homo sapien
ttagaccaatggttaactctaatcc

SEQ ID NO: 1576413 - DNA, 25 bp, Homo sapien
tagaccaatggttaactctaatcct

SEQ ID NO: 1576414 - DNA, 25 bp, Homo sapien
ccctgtctccatcgtctctctcctg

SEQ ID NO: 1576415 - DNA, 25 bp, Homo sapien
ccatctatttctacactgggctcct

SEQ ID NO: 1576416 - DNA, 25 bp, Homo sapien
tctcctgtgtcctgcgaccatctat

SEQ ID NO: 1576417 - DNA, 25 bp, Homo sapien
tgcgaccatctatttctacactggg

SEQ ID NO: 1576418 - DNA, 25 bp, Homo sapien
cccatcatgattcgcaagcagtttg

SEQ ID NO: 1576419 - DNA, 25 bp, Homo sapien
cttccccatcatgattcgcaagcag

SEQ ID NO: 1576420 - DNA, 25 bp, Homo sapien
gattcgcaagcagtttgctgtgcag

SEQ ID NO: 1576421 - DNA, 25 bp, Homo sapien
aaatcacttccgtggattccctttg

SEQ ID NO: 1576422 - DNA, 25 bp, Homo sapien
tgtgtactccccactagaatggaaa

SEQ ID NO: 1576423 - DNA, 25 bp, Homo sapien
tgagccctcagtccgtattggtcga

SEQ ID NO: 1576424 - DNA, 25 bp, Homo sapien
gaaaagctgagactgacatcaccgg

SEQ ID NO: 1576425 - DNA, 25 bp, Homo sapien
ggaccgcctctcaggattcacagga

SEQ ID NO: 1576426 - DNA, 25 bp, Homo sapien
cgggaggctccaaggacaaaggcca

SEQ ID NO: 1576427 - DNA, 25 bp, Homo sapien
ggacaaaggccagctctgcctgttg

SEQ ID NO: 1576428 - DNA, 25 bp, Homo sapien
caaaggccagctctgcctgttgcca

SEQ ID NO: 1576429 - DNA, 25 bp, Homo sapien
aaaggccagctctgcctgttgccat

SEQ ID NO: 1576430 - DNA, 25 bp, Homo sapien
cctttttcatgagactgcacgcgtg

SEQ ID NO: 1576431 - DNA, 25 bp, Homo sapien
gaaacaggggcggtcacagtattcc

SEQ ID NO: 1576432 - DNA, 25 bp, Homo sapien
gaggcccaatatccgtttggaaaca

SEQ ID NO: 1576433 - DNA, 25 bp, Homo sapien
agactgcacgcgtgcgtggcagtaa

SEQ ID NO: 1576434 - DNA, 25 bp, Homo sapien
acaaactctgaaagtgtaaactgaa

SEQ ID NO: 1576435 - DNA, 25 bp, Homo sapien
caaactctgaaagtgtaaactgaaa

SEQ ID NO: 1576436 - DNA, 25 bp, Homo sapien
tagacccgatagcggccatcttccc

SEQ ID NO: 1576437 - DNA, 25 bp, Homo sapien
ctagacccgatagcggccatcttcc

SEQ ID NO: 1576438 - DNA, 25 bp, Homo sapien
gatggggccgctgtcgttaacccag

SEQ ID NO: 1576439 - DNA, 25 bp, Homo sapien
ccacttcctcatcccggctgcagtt

SEQ ID NO: 1576440 - DNA, 25 bp, Homo sapien
agagccccgaggaaggaccaagatg

SEQ ID NO: 1576441 - DNA, 25 bp, Homo sapien
gagtttgcctgggttgctaagaaac

SEQ ID NO: 1576442 - DNA, 25 bp, Homo sapien
gccctctccagtggctgcggtcagt

SEQ ID NO: 1576443 - DNA, 25 bp, Homo sapien
ttgaaggcgtctgcgcccacgtgtc

SEQ ID NO: 1576444 - DNA, 25 bp, Homo sapien
acgctcagggctgagtccttttgaa

SEQ ID NO: 1576445 - DNA, 25 bp, Homo sapien
tctccagtggctgcggtcagtgatg

SEQ ID NO: 1576446 - DNA, 25 bp, Homo sapien
gagttcctgctaaaccgcaggccac

SEQ ID NO: 1576447 - DNA, 25 bp, Homo sapien
aggccacgcagtgagtccgggatct

SEQ ID NO: 1576448 - DNA, 25 bp, Homo sapien
gatctgtgagttcctgctaacccgc

SEQ ID NO: 1576449 - DNA, 25 bp, Homo sapien
gagtccgggatggattttccaaata

SEQ ID NO: 1576450 - DNA, 25 bp, Homo sapien
ctccagattcatccaatgtctccat

SEQ ID NO: 1576451 - DNA, 25 bp, Homo sapien
tcagtggtcccaccaggtaggtgct

SEQ ID NO: 1576452 - DNA, 25 bp, Homo sapien
ccctggtgacagcccgagcccgcct

SEQ ID NO: 1576453 - DNA, 25 bp, Homo sapien
agcccgcctcagtggtcccaccagg

SEQ ID NO: 1576454 - DNA, 25 bp, Homo sapien
tccctggtgacagcccgagcccgcc

SEQ ID NO: 1576455 - DNA, 25 bp, Homo sapien
cattcctcaaccccctcgccttccg

SEQ ID NO: 1576456 - DNA, 25 bp, Homo sapien
ctcttttcattcctcaaccccctcg

SEQ ID NO: 1576457 - DNA, 25 bp, Homo sapien
tcttttcattcctcaaccccctcgc

SEQ ID NO: 1576458 - DNA, 25 bp, Homo sapien
ttcattcctcaaccccctcgccttc

SEQ ID NO: 1576459 - DNA, 25 bp, Homo sapien
cagctcgcggaagagtcagggatgg

SEQ ID NO: 1576460 - DNA, 25 bp, Homo sapien
agctcgcggaagagtcagggatgga

SEQ ID NO: 1576461 - DNA, 25 bp, Homo sapien
ttgctccttcatgtgtatggcctga

SEQ ID NO: 1576462 - DNA, 25 bp, Homo sapien
ccaggggtagccttgctccttcatg

SEQ ID NO: 1576463 - DNA, 25 bp, Homo sapien
tcctcatccaatcgcatttccatgg

SEQ ID NO: 1576464 - DNA, 25 bp, Homo sapien
ttctgaggtctgtaccaagtgagag

SEQ ID NO: 1576465 - DNA, 25 bp, Homo sapien
tgaggtctgtaccaagtgagagtgt

SEQ ID NO: 1576466 - DNA, 25 bp, Homo sapien
caatcgcatttccatggtgaccacc

SEQ ID NO: 1576467 - DNA, 25 bp, Homo sapien
gcacacatcgaaatgcgtcagcagc

SEQ ID NO: 1576468 - DNA, 25 bp, Homo sapien
agcagcagcgtctccgcaaaacgta

SEQ ID NO: 1576469 - DNA, 25 bp, Homo sapien
caaaacgtagaaaaatggcttcagg

SEQ ID NO: 1576470 - DNA, 25 bp, Homo sapien
catgtgcgtattttgcacacatcga

SEQ ID NO: 1576471 - DNA, 25 bp, Homo sapien
ttctggacaagggtcgcaatcttcc

SEQ ID NO: 1576472 - DNA, 25 bp, Homo sapien
tctggacaagggtcgcaatcttcct

SEQ ID NO: 1576473 - DNA, 25 bp, Homo sapien
aagggtcgcaatcttccttggtctc

SEQ ID NO: 1576474 - DNA, 25 bp, Homo sapien
ggacaagggtcgcaatcttccttgg

SEQ ID NO: 1576475 - DNA, 25 bp, Homo sapien
caacgtataattcacccttgctgtg

SEQ ID NO: 1576476 - DNA, 25 bp, Homo sapien
gcaagggagctgctgttgatagcct

SEQ ID NO: 1576477 - DNA, 25 bp, Homo sapien
cgtggtccttcacggaaggctacgg

SEQ ID NO: 1576478 - DNA, 25 bp, Homo sapien
agactgcttctgaccagcccgtggt

SEQ ID NO: 1576479 - DNA, 25 bp, Homo sapien
tccttggggagcagcgttcacagct

SEQ ID NO: 1576480 - DNA, 25 bp, Homo sapien
aaatactgataaaacctgcgatgac

SEQ ID NO: 1576481 - DNA, 25 bp, Homo sapien
tactgataaaacctgcgatgacatc

SEQ ID NO: 1576482 - DNA, 25 bp, Homo sapien
gcagcgttcacagctattttccctt

SEQ ID NO: 1576483 - DNA, 25 bp, Homo sapien
ttcatgacagcagggactggggcca

SEQ ID NO: 1576484 - DNA, 25 bp, Homo sapien
cagtttcatggtctcctgcttcttc

SEQ ID NO: 1576485 - DNA, 25 bp, Homo sapien
cagggactggggccaccttcttctc

SEQ ID NO: 1576486 - DNA, 25 bp, Homo sapien
agtttcatggtctcctgcttcttca

SEQ ID NO: 1576487 - DNA, 25 bp, Homo sapien
agagatttcgtgaagactctcttct

SEQ ID NO: 1576488 - DNA, 25 bp, Homo sapien
gaaagagatttcgtgaagactctct

SEQ ID NO: 1576489 - DNA, 25 bp, Homo sapien
tttagaaagagatttcgtgaagact

SEQ ID NO: 1576490 - DNA, 25 bp, Homo sapien
tagaaagagatttcgtgaagactct

SEQ ID NO: 1576491 - DNA, 25 bp, Homo sapien
ctgaagcccaaggcaaagacttcca

SEQ ID NO: 1576492 - DNA, 25 bp, Homo sapien
tctgaagcccaaggcaaagacttcc

SEQ ID NO: 1576493 - DNA, 25 bp, Homo sapien
tgaagcccaaggcaaagacttccac

SEQ ID NO: 1576494 - DNA, 25 bp, Homo sapien
tcccgagttcatcccatccaatttc

SEQ ID NO: 1576495 - DNA, 25 bp, Homo sapien
gagttcatcccatccaatttcttca

SEQ ID NO: 1576496 - DNA, 25 bp, Homo sapien
ccgagttcatcccatccaatttctt

SEQ ID NO: 1576497 - DNA, 25 bp, Homo sapien
agttcatcccatccaatttcttcat

SEQ ID NO: 1576498 - DNA, 25 bp, Homo sapien
cggcgatggcggtccatggccacca

SEQ ID NO: 1576499 - DNA, 25 bp, Homo sapien
gtccagcggcgatggcggtccatgg

SEQ ID NO: 1576500 - DNA, 25 bp, Homo sapien
cagcggcgatggcggtccatggcca

SEQ ID NO: 1576501 - DNA, 25 bp, Homo sapien
tccagcggcgatggcggtccatggc

SEQ ID NO: 1576502 - DNA, 25 bp, Homo sapien
tttgtgatcatggtcggtgctccga

SEQ ID NO: 1576503 - DNA, 25 bp, Homo sapien
gggtgcgatcctggaaggctcctca

SEQ ID NO: 1576504 - DNA, 25 bp, Homo sapien
cagcgagcgagctgatttgtgatca

SEQ ID NO: 1576505 - DNA, 25 bp, Homo sapien
tccgaagaacagacaacgaggcgtg

SEQ ID NO: 1576506 - DNA, 25 bp, Homo sapien
agtgcctggattagactccatagcg

SEQ ID NO: 1576507 - DNA, 25 bp, Homo sapien
aaagtgcctggattagactccatag

SEQ ID NO: 1576508 - DNA, 25 bp, Homo sapien
gtgcctggattagactccatagcgc

SEQ ID NO: 1576509 - DNA, 25 bp, Homo sapien
gagctgttctgggtgagtggatgat

SEQ ID NO: 1576510 - DNA, 25 bp, Homo sapien
tccatggtcacactgcaggcagagc

SEQ ID NO: 1576511 - DNA, 25 bp, Homo sapien
gaagtttaagctttggagagctgtc

SEQ ID NO: 1576512 - DNA, 25 bp, Homo sapien
agagctctgactgccacggctgtta

SEQ ID NO: 1576513 - DNA, 25 bp, Homo sapien
aagctttggagagctgtccatggtc

SEQ ID NO: 1576514 - DNA, 25 bp, Homo sapien
gttctttccgaagaaacttgagtca

SEQ ID NO: 1576515 - DNA, 25 bp, Homo sapien
gaagatgaacctcgacaagccttgt

SEQ ID NO: 1576516 - DNA, 25 bp, Homo sapien
cactgatgagtctgtaggcctggag

SEQ ID NO: 1576517 - DNA, 25 bp, Homo sapien
caacaggtgcactactgctcaaggg

SEQ ID NO: 1576518 - DNA, 25 bp, Homo sapien
tagatcgttgtatgtgaaccaggcc

SEQ ID NO: 1576519 - DNA, 25 bp, Homo sapien
ccgtcaaaacgtgaagagcaccatt

SEQ ID NO: 1576520 - DNA, 25 bp, Homo sapien
gagcaccattctaatcttgcaggga

SEQ ID NO: 1576521 - DNA, 25 bp, Homo sapien
atgcatatgcgcctgagttctggga

SEQ ID NO: 1576522 - DNA, 25 bp, Homo sapien
catcagttggtctagagagtgaccc

SEQ ID NO: 1576523 - DNA, 25 bp, Homo sapien
caactctctaatctttctggtgacc

SEQ ID NO: 1576524 - DNA, 25 bp, Homo sapien
tagagcttcatgtcaagccatccca

SEQ ID NO: 1576525 - DNA, 25 bp, Homo sapien
taagccatctcattggtataaactg

SEQ ID NO: 1576526 - DNA, 25 bp, Homo sapien
ggctgtctagggtctccaccctaag

SEQ ID NO: 1576527 - DNA, 25 bp, Homo sapien
tcagtggctggtcaagcctgctgca

SEQ ID NO: 1576528 - DNA, 25 bp, Homo sapien
cagtggctggtcaagcctgctgcag

SEQ ID NO: 1576529 - DNA, 25 bp, Homo sapien
tacttcttcaatccctgttatatca

SEQ ID NO: 1576530 - DNA, 25 bp, Homo sapien
tcttcaatccctgttatatcagttc

SEQ ID NO: 1576531 - DNA, 25 bp, Homo sapien
tactacttcttcaatccctgttata

SEQ ID NO: 1576532 - DNA, 25 bp, Homo sapien
tttggaattactacttcttcaatcc

SEQ ID NO: 1576533 - DNA, 25 bp, Homo sapien
tggatgcaagagcctgaagaacggc

SEQ ID NO: 1576534 - DNA, 25 bp, Homo sapien
gatgcaagagcctgaagaacggcta

SEQ ID NO: 1576535 - DNA, 25 bp, Homo sapien
ctgtggatgcaagagcctgaagaac

SEQ ID NO: 1576536 - DNA, 25 bp, Homo sapien
tgtggatgcaagagcctgaagaacg

SEQ ID NO: 1576537 - DNA, 25 bp, Homo sapien
cacgcaaggtacagccgtgggaacc

SEQ ID NO: 1576538 - DNA, 25 bp, Homo sapien
aatgaacgagattctgaagaggatg

SEQ ID NO: 1576539 - DNA, 25 bp, Homo sapien
atgaacttggccgtattctccccgg

SEQ ID NO: 1576540 - DNA, 25 bp, Homo sapien
taaggattatcttgaaacacgcaag

SEQ ID NO: 1576541 - DNA, 25 bp, Homo sapien
tgtctttgatctgaggttcaaagta

SEQ ID NO: 1576542 - DNA, 25 bp, Homo sapien
gtctttgatctgaggttcaaagtac

SEQ ID NO: 1576543 - DNA, 25 bp, Homo sapien
ttatgtctttgatctgaggttcaaa

SEQ ID NO: 1576544 - DNA, 25 bp, Homo sapien
tatgtctttgatctgaggttcaaag

SEQ ID NO: 1576545 - DNA, 25 bp, Homo sapien
ctgtgcaataggaatgtgcattttt

SEQ ID NO: 1576546 - DNA, 25 bp, Homo sapien
tgtgcaataggaatgtgcatttttc

SEQ ID NO: 1576547 - DNA, 25 bp, Homo sapien
gtgcaataggaatgtgcatttttcc

SEQ ID NO: 1576548 - DNA, 25 bp, Homo sapien
atttatcaccaatactgttgcttca

SEQ ID NO: 1576549 - DNA, 25 bp, Homo sapien
tttatcaccaatactgttgcttcaa

SEQ ID NO: 1576550 - DNA, 25 bp, Homo sapien
tggtattaaaagtctgtagatttgg

SEQ ID NO: 1576551 - DNA, 25 bp, Homo sapien
tttcagaatggtattaaaagtctgt

SEQ ID NO: 1576552 - DNA, 25 bp, Homo sapien
taaaagtctgtagatttggtttcac

SEQ ID NO: 1576553 - DNA, 25 bp, Homo sapien
agaatggtattaaaagtctgtagat

SEQ ID NO: 1576554 - DNA, 25 bp, Homo sapien
cacatagaatctgtaaggctggcaa

SEQ ID NO: 1576555 - DNA, 25 bp, Homo sapien
gcaagtacataaaatcttcggagac

SEQ ID NO: 1576556 - DNA, 25 bp, Homo sapien
caagcgagggttctagtctgatggc

SEQ ID NO: 1576557 - DNA, 25 bp, Homo sapien
gggtttccaggctgataaaacagct

SEQ ID NO: 1576558 - DNA, 25 bp, Homo sapien
tatgccgtttatcaggtccaatgaa

SEQ ID NO: 1576559 - DNA, 25 bp, Homo sapien
taataggaattatgccgtttatcag

SEQ ID NO: 1576560 - DNA, 25 bp, Homo sapien
aggaattatgccgtttatcaggtcc

SEQ ID NO: 1576561 - DNA, 25 bp, Homo sapien
gaattatgccgtttatcaggtccaa

SEQ ID NO: 1576562 - DNA, 25 bp, Homo sapien
aagaaggctgaaggtatcaggtcct

SEQ ID NO: 1576563 - DNA, 25 bp, Homo sapien
gaaggctgaaggtatcaggtcctca

SEQ ID NO: 1576564 - DNA, 25 bp, Homo sapien
aggctgaaggtatcaggtcctcata

SEQ ID NO: 1576565 - DNA, 25 bp, Homo sapien
gctgaaggtatcaggtcctcatacc

SEQ ID NO: 1576566 - DNA, 25 bp, Homo sapien
caggttgttgcagaaagtgtgacta

SEQ ID NO: 1576567 - DNA, 25 bp, Homo sapien
ttgagtaatcacttccagccagttg

SEQ ID NO: 1576568 - DNA, 25 bp, Homo sapien
ggttgttgcagaaagtgtgactata

SEQ ID NO: 1576569 - DNA, 25 bp, Homo sapien
tttccaaatttgagtaatcacttcc

SEQ ID NO: 1576570 - DNA, 25 bp, Homo sapien
aggctggctttcatacgtagatttg

SEQ ID NO: 1576571 - DNA, 25 bp, Homo sapien
tagctggccaattcagagcagtgtg

SEQ ID NO: 1576572 - DNA, 25 bp, Homo sapien
agacagatagctggccaattcagag

SEQ ID NO: 1576573 - DNA, 25 bp, Homo sapien
gttgagacagatagctggccaattc

SEQ ID NO: 1576574 - DNA, 25 bp, Homo sapien
cagatagctggccaattcagagcag

SEQ ID NO: 1576575 - DNA, 25 bp, Homo sapien
gattctcccagccattaaaaagagg

SEQ ID NO: 1576576 - DNA, 25 bp, Homo sapien
aggcttcctggattctcccagccat

SEQ ID NO: 1576577 - DNA, 25 bp, Homo sapien
tgagccacctctactacctcagtgg

SEQ ID NO: 1576578 - DNA, 25 bp, Homo sapien
aactcatttctagggatcttattat

SEQ ID NO: 1576579 - DNA, 25 bp, Homo sapien
ggttgattgcaaagtcagtcattac

SEQ ID NO: 1576580 - DNA, 25 bp, Homo sapien
tgattgcaaagtcagtcattactct

SEQ ID NO: 1576581 - DNA, 25 bp, Homo sapien
ttgattgcaaagtcagtcattactc

SEQ ID NO: 1576582 - DNA, 25 bp, Homo sapien
ctggttgattgcaaagtcagtcatt

SEQ ID NO: 1576583 - DNA, 25 bp, Homo sapien
tactggtcaatgcagtgaagttgcc

SEQ ID NO: 1576584 - DNA, 25 bp, Homo sapien
tgcagtgaagttgcctagggcttcc

SEQ ID NO: 1576585 - DNA, 25 bp, Homo sapien
ggtcaatgcagtgaagttgcctagg

SEQ ID NO: 1576586 - DNA, 25 bp, Homo sapien
cactgttactggtcaatgcagtgaa

SEQ ID NO: 1576587 - DNA, 25 bp, Homo sapien
agacacaaaaaagccgaatgatcat

SEQ ID NO: 1576588 - DNA, 25 bp, Homo sapien
cacatccctcctccccggatcatca

SEQ ID NO: 1576589 - DNA, 25 bp, Homo sapien
catccctcctccccggatcatcatc

SEQ ID NO: 1576590 - DNA, 25 bp, Homo sapien
gaagacacaaaaaagccgaatgatc

SEQ ID NO: 1576591 - DNA, 25 bp, Homo sapien
catgtgttcaacaacgggaggaacg

SEQ ID NO: 1576592 - DNA, 25 bp, Homo sapien
tgcagaagaaaatggcgtccgcagc

SEQ ID NO: 1576593 - DNA, 25 bp, Homo sapien
ggaggaacgcttcacggcgcaagtt

SEQ ID NO: 1576594 - DNA, 25 bp, Homo sapien
gtcctaggccgtcgttggcccagct

SEQ ID NO: 1576595 - DNA, 25 bp, Homo sapien
tgcggcggggattcctatcctactc

SEQ ID NO: 1576596 - DNA, 25 bp, Homo sapien
agcttgacggcgacccaggaacaaa

SEQ ID NO: 1576597 - DNA, 25 bp, Homo sapien
ctgactagggacctgcaaagcggcc

SEQ ID NO: 1576598 - DNA, 25 bp, Homo sapien
ggtcaggctcgtacaaaggtgcggc

SEQ ID NO: 1576599 - DNA, 25 bp, Homo sapien
ccgcctcctcggtggcaacggcgtt

SEQ ID NO: 1576600 - DNA, 25 bp, Homo sapien
gcaaccgcgttccagacccagggcg

SEQ ID NO: 1576601 - DNA, 25 bp, Homo sapien
tgtgcccgaccctggccggttgccc

SEQ ID NO: 1576602 - DNA, 25 bp, Homo sapien
aacggcgttccagacgcagggccgc

SEQ ID NO: 1576603 - DNA, 25 bp, Homo sapien
acagaggagccccgggcggcctgac

SEQ ID NO: 1576604 - DNA, 25 bp, Homo sapien
ggacagaggagccccgggcggcctg

SEQ ID NO: 1576605 - DNA, 25 bp, Homo sapien
gaggagccccgggcggcctgacgga

SEQ ID NO: 1576606 - DNA, 25 bp, Homo sapien
ctgggacagaggagccccgggcggc

SEQ ID NO: 1576607 - DNA, 25 bp, Homo sapien
ggcccggtccgtcagcaccgctgcc

SEQ ID NO: 1576608 - DNA, 25 bp, Homo sapien
cccggtccgtcagcaccgctgccgc

SEQ ID NO: 1576609 - DNA, 25 bp, Homo sapien
tgggcccggtccgtcagcaccgctg

SEQ ID NO: 1576610 - DNA, 25 bp, Homo sapien
ctgggcccggtccgtcagcaccgct

SEQ ID NO: 1576611 - DNA, 25 bp, Homo sapien
gcaaggaagcggcaaccgcgaagcc

SEQ ID NO: 1576612 - DNA, 25 bp, Homo sapien
ctcagcgctggcaaggaagcggcaa

SEQ ID NO: 1576613 - DNA, 25 bp, Homo sapien
aaggaagcggcaaccgcgaagccac

SEQ ID NO: 1576614 - DNA, 25 bp, Homo sapien
cagcgctggcaaggaagcggcaacc

SEQ ID NO: 1576615 - DNA, 25 bp, Homo sapien
gtctctgacgccaggatactttggg

SEQ ID NO: 1576616 - DNA, 25 bp, Homo sapien
taatgcaggctgtagcgatgagagt

SEQ ID NO: 1576617 - DNA, 25 bp, Homo sapien
cacgagcggccaaggataatgcagg

SEQ ID NO: 1576618 - DNA, 25 bp, Homo sapien
tgggttccgacagaacttgtctctg

SEQ ID NO: 1576619 - DNA, 25 bp, Homo sapien
gtacagggtccgctgagctaggtcc

SEQ ID NO: 1576620 - DNA, 25 bp, Homo sapien
tacagggtccgctgagctaggtcca

SEQ ID NO: 1576621 - DNA, 25 bp, Homo sapien
acagggtccgctgagctaggtccag

SEQ ID NO: 1576622 - DNA, 25 bp, Homo sapien
cctggtacagggtccgctgagctag

SEQ ID NO: 1576623 - DNA, 25 bp, Homo sapien
catggtggagggggaaggaaggcct

SEQ ID NO: 1576624 - DNA, 25 bp, Homo sapien
gcatggtggagggggaaggaaggcc

SEQ ID NO: 1576625 - DNA, 25 bp, Homo sapien
ctgcatggtggagggggaaggaagg

SEQ ID NO: 1576626 - DNA, 25 bp, Homo sapien
gagccaaagagtaccctgtctttag

SEQ ID NO: 1576627 - DNA, 25 bp, Homo sapien
gatataggagaccagataggaagag

SEQ ID NO: 1576628 - DNA, 25 bp, Homo sapien
gaggttactgtggaaaatgactaaa

SEQ ID NO: 1576629 - DNA, 25 bp, Homo sapien
ctttagcccagagatataggagacc

SEQ ID NO: 1576630 - DNA, 25 bp, Homo sapien
ctgggatttttattaatgtgtcaac

SEQ ID NO: 1576631 - DNA, 25 bp, Homo sapien
tgtgctctgggatttttattaatgt

SEQ ID NO: 1576632 - DNA, 25 bp, Homo sapien
ttgattggattgaaggatgcaacgt

SEQ ID NO: 1576633 - DNA, 25 bp, Homo sapien
attgaaggatgcaacgtattgatcc

SEQ ID NO: 1576634 - DNA, 25 bp, Homo sapien
tggatcaatacaataatacttccca

SEQ ID NO: 1576635 - DNA, 25 bp, Homo sapien
aataatacttcccaccagtaacagt

SEQ ID NO: 1576636 - DNA, 25 bp, Homo sapien
tacaataatacttcccaccagtaac

SEQ ID NO: 1576637 - DNA, 25 bp, Homo sapien
ttctggatcaatacaataatacttc

SEQ ID NO: 1576638 - DNA, 25 bp, Homo sapien
gaaggaacatacagatgcatcaggc

SEQ ID NO: 1576639 - DNA, 25 bp, Homo sapien
gcagaaatttggagaacaggcacgg

SEQ ID NO: 1576640 - DNA, 25 bp, Homo sapien
tgagctacacttgaattgagttttc

SEQ ID NO: 1576641 - DNA, 25 bp, Homo sapien
aagcagaaatttggagaacaggcac

SEQ ID NO: 1576642 - DNA, 25 bp, Homo sapien
gcccatgctctaggtggcagatcag

SEQ ID NO: 1576643 - DNA, 25 bp, Homo sapien
ctgcccatgctctaggtggcagatc

SEQ ID NO: 1576644 - DNA, 25 bp, Homo sapien
tgctctaggtggcagatcagctcag

SEQ ID NO: 1576645 - DNA, 25 bp, Homo sapien
taggtggcagatcagctcagctttg

SEQ ID NO: 1576646 - DNA, 25 bp, Homo sapien
tatggctacggactctatctcctgg

SEQ ID NO: 1576647 - DNA, 25 bp, Homo sapien
tgtccctgaagtgagattccctctg

SEQ ID NO: 1576648 - DNA, 25 bp, Homo sapien
gaaagcctggcctatgtcgaaagac

SEQ ID NO: 1576649 - DNA, 25 bp, Homo sapien
ttttctcatgtccagcaaggaggtg

SEQ ID NO: 1576650 - DNA, 25 bp, Homo sapien
ccacatctgttacactgatgggatt

SEQ ID NO: 1576651 - DNA, 25 bp, Homo sapien
aagaagttctcgaagggtaactgag

SEQ ID NO: 1576652 - DNA, 25 bp, Homo sapien
ctttggtatggttgatcagatgcag

SEQ ID NO: 1576653 - DNA, 25 bp, Homo sapien
tcgaagggtaactgaggtttgtcca

SEQ ID NO: 1576654 - DNA, 25 bp, Homo sapien
tgcagggtagcaaaacaatgtccaa

SEQ ID NO: 1576655 - DNA, 25 bp, Homo sapien
gaaggttctcctatgtgcacaataa

SEQ ID NO: 1576656 - DNA, 25 bp, Homo sapien
tgatgacgtaaaccaaaagacgggc

SEQ ID NO: 1576657 - DNA, 25 bp, Homo sapien
tataaattaagaggcctactcctgc

SEQ ID NO: 1576658 - DNA, 25 bp, Homo sapien
tattctaaggatgcaaggctggctc

SEQ ID NO: 1576659 - DNA, 25 bp, Homo sapien
tattcatagcaacacagagtctcag

SEQ ID NO: 1576660 - DNA, 25 bp, Homo sapien
taatgacatcaactggtggagaaaa

SEQ ID NO: 1576661 - DNA, 25 bp, Homo sapien
cattccatcaataggatgtagaagg

SEQ ID NO: 1576662 - DNA, 25 bp, Homo sapien
aataaaaagaagtgcagatcctgct

SEQ ID NO: 1576663 - DNA, 25 bp, Homo sapien
tatcaaaagaataagggagtgctac

SEQ ID NO: 1576664 - DNA, 25 bp, Homo sapien
tggcccaatggttgactagaggtca

SEQ ID NO: 1576665 - DNA, 25 bp, Homo sapien
gagaactccttccaattcatgttga

SEQ ID NO: 1576666 - DNA, 25 bp, Homo sapien
cattaaaacttgtgggatcaaacca

SEQ ID NO: 1576667 - DNA, 25 bp, Homo sapien
gaaacaagatagaccctatcctggg

SEQ ID NO: 1576668 - DNA, 25 bp, Homo sapien
cacccggcctatgttcaggacttca

SEQ ID NO: 1576669 - DNA, 25 bp, Homo sapien
gacatttatagaaactccacccagt

SEQ ID NO: 1576670 - DNA, 25 bp, Homo sapien
tgagcattctgaaggcaagatcggc

SEQ ID NO: 1576671 - DNA, 25 bp, Homo sapien
caagatcggctatgatgttcagcag

SEQ ID NO: 1576672 - DNA, 25 bp, Homo sapien
catggcctgagtatatgctgttcaa

SEQ ID NO: 1576673 - DNA, 25 bp, Homo sapien
tgcaggagtcactatgagaacatca

SEQ ID NO: 1576674 - DNA, 25 bp, Homo sapien
aagccctcctgtagctgtccgtgga

SEQ ID NO: 1576675 - DNA, 25 bp, Homo sapien
gccacagacgtgagaaacatccagt

SEQ ID NO: 1576676 - DNA, 25 bp, Homo sapien
actttacaatggtgcgaatgcgaca

SEQ ID NO: 1576677 - DNA, 25 bp, Homo sapien
aaaaattacatcttgtggccgggtg

SEQ ID NO: 1576678 - DNA, 25 bp, Homo sapien
gagaacgcgagcagactaggtcctt

SEQ ID NO: 1576679 - DNA, 25 bp, Homo sapien
gctgaacccctgctaaccttctgga

SEQ ID NO: 1576680 - DNA, 25 bp, Homo sapien
ttgaggatcccaagacagtcattca

SEQ ID NO: 1576681 - DNA, 25 bp, Homo sapien
taagcttcccagtggacatatagca

SEQ ID NO: 1576682 - DNA, 25 bp, Homo sapien
gtgtgtagcttgaagtggtccatat

SEQ ID NO: 1576683 - DNA, 25 bp, Homo sapien
tgtgtgtagcttgaagtggtccata

SEQ ID NO: 1576684 - DNA, 25 bp, Homo sapien
tgtgtgtgtagcttgaagtggtcca

SEQ ID NO: 1576685 - DNA, 25 bp, Homo sapien
gtgtgtgtagcttgaagtggtccat

SEQ ID NO: 1576686 - DNA, 25 bp, Homo sapien
aaagcagcaacaaaaggatgacaaa

SEQ ID NO: 1576687 - DNA, 25 bp, Homo sapien
gcaagtcgcaccacttatagccata

SEQ ID NO: 1576688 - DNA, 25 bp, Homo sapien
ggcaataacatctttacaaaggtga

SEQ ID NO: 1576689 - DNA, 25 bp, Homo sapien
aaagggagtacctgcaagtcgcacc

SEQ ID NO: 1576690 - DNA, 25 bp, Homo sapien
tttgctttgctaaattcttgaaatt

SEQ ID NO: 1576691 - DNA, 25 bp, Homo sapien
tccactgagttccaacctaagtatc

SEQ ID NO: 1576692 - DNA, 25 bp, Homo sapien
tcacatttggcttggtgcactgaca

SEQ ID NO: 1576693 - DNA, 25 bp, Homo sapien
aacctaagtatcacatttggcttgg

SEQ ID NO: 1576694 - DNA, 25 bp, Homo sapien
aatgcatctggagagcccctctttg

SEQ ID NO: 1576695 - DNA, 25 bp, Homo sapien
gagagcccctctttggcattgaccc

SEQ ID NO: 1576696 - DNA, 25 bp, Homo sapien
catctggagagcccctctttggcat

SEQ ID NO: 1576697 - DNA, 25 bp, Homo sapien
ctctttggcattgaccccctcctcc

SEQ ID NO: 1576698 - DNA, 25 bp, Homo sapien
ggctgggcactgaaagcgagggcca

SEQ ID NO: 1576699 - DNA, 25 bp, Homo sapien
gccatcggaagtgcgcccaatagaa

SEQ ID NO: 1576700 - DNA, 25 bp, Homo sapien
tagaaaggacagaaacgggagcctc

SEQ ID NO: 1576701 - DNA, 25 bp, Homo sapien
acagaaacgggagcctcagtccagg

SEQ ID NO: 1576702 - DNA, 25 bp, Homo sapien
ggctgcgcggccttcttttataccc

SEQ ID NO: 1576703 - DNA, 25 bp, Homo sapien
cctggctggctcctattggctgaaa

SEQ ID NO: 1576704 - DNA, 25 bp, Homo sapien
ggcaccaaccgctcagagaggtact

SEQ ID NO: 1576705 - DNA, 25 bp, Homo sapien
tgtctcactgctacacaggcttcgg

SEQ ID NO: 1576706 - DNA, 25 bp, Homo sapien
ggtcactttctggccggggcgcttc

SEQ ID NO: 1576707 - DNA, 25 bp, Homo sapien
tcactttctggccggggcgcttcca

SEQ ID NO: 1576708 - DNA, 25 bp, Homo sapien
tttctggccggggcgcttccaatcc

SEQ ID NO: 1576709 - DNA, 25 bp, Homo sapien
tggccggggcgcttccaatcctgct

SEQ ID NO: 1576710 - DNA, 25 bp, Homo sapien
acgccttcctgaaccctctggatgg

SEQ ID NO: 1576711 - DNA, 25 bp, Homo sapien
gagggcgcggacgccttcctgaacc

SEQ ID NO: 1576712 - DNA, 25 bp, Homo sapien
gcggacgccttcctgaaccctctgg

SEQ ID NO: 1576713 - DNA, 25 bp, Homo sapien
tggatggctgttcccgttcacaggg

SEQ ID NO: 1576714 - DNA, 25 bp, Homo sapien
ggttgagctttgcccagctgcacca

SEQ ID NO: 1576715 - DNA, 25 bp, Homo sapien
aggttgagctttgcccagctgcacc

SEQ ID NO: 1576716 - DNA, 25 bp, Homo sapien
gttgagctttgcccagctgcaccac

SEQ ID NO: 1576717 - DNA, 25 bp, Homo sapien
gctgggctgtttggtttgctgtagc

SEQ ID NO: 1576718 - DNA, 25 bp, Homo sapien
tgggctgtttggtttgctgtagcca

SEQ ID NO: 1576719 - DNA, 25 bp, Homo sapien
ctgggctgtttggtttgctgtagcc

SEQ ID NO: 1576720 - DNA, 25 bp, Homo sapien
cttgagccgagccaggtacacattc

SEQ ID NO: 1576721 - DNA, 25 bp, Homo sapien
ttgagccgagccaggtacacattcc

SEQ ID NO: 1576722 - DNA, 25 bp, Homo sapien
caaagtcatcgactgtgaggcgccg

SEQ ID NO: 1576723 - DNA, 25 bp, Homo sapien
gggacgcccgatttcaaagtcatcg

SEQ ID NO: 1576724 - DNA, 25 bp, Homo sapien
caatttcccggcgcagctggtgctc

SEQ ID NO: 1576725 - DNA, 25 bp, Homo sapien
tatctgcgacttgaagagaaccttc

SEQ ID NO: 1576726 - DNA, 25 bp, Homo sapien
tgtagatgagcctggatctcaattt

SEQ ID NO: 1576727 - DNA, 25 bp, Homo sapien
aaccttcagggccacaatgaaatgg

SEQ ID NO: 1576728 - DNA, 25 bp, Homo sapien
tacacccggcgtgcatcatggaaat

SEQ ID NO: 1576729 - DNA, 25 bp, Homo sapien
attccagaatcaggtacacccggcg

SEQ ID NO: 1576730 - DNA, 25 bp, Homo sapien
ggaaatagttatacaggcgcaggat

SEQ ID NO: 1576731 - DNA, 25 bp, Homo sapien
gcgctgttcatctaatttctcgctt

SEQ ID NO: 1576732 - DNA, 25 bp, Homo sapien
tgtcatggcagtaggtcagggcatc

SEQ ID NO: 1576733 - DNA, 25 bp, Homo sapien
tggcttaatatctctgtgaatcact

SEQ ID NO: 1576734 - DNA, 25 bp, Homo sapien
tcttgtcatggcagtaggtcagggc

SEQ ID NO: 1576735 - DNA, 25 bp, Homo sapien
actttcttgtcatggcagtaggtca

SEQ ID NO: 1576736 - DNA, 25 bp, Homo sapien
ggtgtgcacagaccagccaaaatct

SEQ ID NO: 1576737 - DNA, 25 bp, Homo sapien
tgtgcacagaccagccaaaatctgc

SEQ ID NO: 1576738 - DNA, 25 bp, Homo sapien
gggggtgtgcacagaccagccaaaa

SEQ ID NO: 1576739 - DNA, 25 bp, Homo sapien
gggagggggtgtgcacagaccagcc

SEQ ID NO: 1576740 - DNA, 25 bp, Homo sapien
tagaggaaggcagaaaagggaataa

SEQ ID NO: 1576741 - DNA, 25 bp, Homo sapien
ctagaggaaggcagaaaagggaata

SEQ ID NO: 1576742 - DNA, 25 bp, Homo sapien
agaggaaggcagaaaagggaataag

SEQ ID NO: 1576743 - DNA, 25 bp, Homo sapien
tcaaagggtggatatcccaccagca

SEQ ID NO: 1576744 - DNA, 25 bp, Homo sapien
tgtgggaggcgctctcaaagggtgg

SEQ ID NO: 1576745 - DNA, 25 bp, Homo sapien
tttcatcatatgttctcccctcaat

SEQ ID NO: 1576746 - DNA, 25 bp, Homo sapien
tggcggcaagtagtccagtgtccca

SEQ ID NO: 1576747 - DNA, 25 bp, Homo sapien
ttgaggatgcgtctgtaagtctcac

SEQ ID NO: 1576748 - DNA, 25 bp, Homo sapien
cttgaggatgcgtctgtaagtctca

SEQ ID NO: 1576749 - DNA, 25 bp, Homo sapien
ccatgaatgcccaaaggtgactgtc

SEQ ID NO: 1576750 - DNA, 25 bp, Homo sapien
gaatgcccaaaggtgactgtcccac

SEQ ID NO: 1576751 - DNA, 25 bp, Homo sapien
tcccccatgaatgcccaaaggtgac

SEQ ID NO: 1576752 - DNA, 25 bp, Homo sapien
cagctcccccatgaatgcccaaagg

SEQ ID NO: 1576753 - DNA, 25 bp, Homo sapien
ccttcgggagtgggcctgaacccag

SEQ ID NO: 1576754 - DNA, 25 bp, Homo sapien
ttgatagtggaaacctcacatctac

SEQ ID NO: 1576755 - DNA, 25 bp, Homo sapien
ggcattgatagtggaaacctcacat

SEQ ID NO: 1576756 - DNA, 25 bp, Homo sapien
gaggcattgatagtggaaacctcac

SEQ ID NO: 1576757 - DNA, 25 bp, Homo sapien
caggaagccatctgagcacagggag

SEQ ID NO: 1576758 - DNA, 25 bp, Homo sapien
gaagccatctgagcacagggaggca

SEQ ID NO: 1576759 - DNA, 25 bp, Homo sapien
tcaggaagccatctgagcacaggga

SEQ ID NO: 1576760 - DNA, 25 bp, Homo sapien
agccatctgagcacagggaggcagc

SEQ ID NO: 1576761 - DNA, 25 bp, Homo sapien
attcagcttttattaattagcatct

SEQ ID NO: 1576762 - DNA, 25 bp, Homo sapien
atgattcagcttttattaattagca

SEQ ID NO: 1576763 - DNA, 25 bp, Homo sapien
ttattaattagcatcttacatctta

SEQ ID NO: 1576764 - DNA, 25 bp, Homo sapien
tattaattagcatcttacatcttaa

SEQ ID NO: 1576765 - DNA, 25 bp, Homo sapien
tgcccagtgatgtgtttatccagca

SEQ ID NO: 1576766 - DNA, 25 bp, Homo sapien
gcccagtgatgtgtttatccagcac

SEQ ID NO: 1576767 - DNA, 25 bp, Homo sapien
tgccaaaaatgtgcccagtgatgtg

SEQ ID NO: 1576768 - DNA, 25 bp, Homo sapien
atgtgcccagtgatgtgtttatcca

SEQ ID NO: 1576769 - DNA, 25 bp, Homo sapien
ctggcaatgccttgtagttaatgta

SEQ ID NO: 1576770 - DNA, 25 bp, Homo sapien
taatgtagtttttctctacaaacca

SEQ ID NO: 1576771 - DNA, 25 bp, Homo sapien
ggcaatgccttgtagttaatgtagt

SEQ ID NO: 1576772 - DNA, 25 bp, Homo sapien
caatgccttgtagttaatgtagttt

SEQ ID NO: 1576773 - DNA, 25 bp, Homo sapien
gtacagggtccgctgagctaggtcc

SEQ ID NO: 1576774 - DNA, 25 bp, Homo sapien
acagggtccgctgagctaggtccag

SEQ ID NO: 1576775 - DNA, 25 bp, Homo sapien
tacagggtccgctgagctaggtcca

SEQ ID NO: 1576776 - DNA, 25 bp, Homo sapien
cctggtacagggtccgctgagctag

SEQ ID NO: 1576777 - DNA, 25 bp, Homo sapien
tcttatttcttgtccaaagcgatgc

SEQ ID NO: 1576778 - DNA, 25 bp, Homo sapien
ttcttgtccaaagcgatgcatggag

SEQ ID NO: 1576779 - DNA, 25 bp, Homo sapien
gagtactcttatttcttgtccaaag

SEQ ID NO: 1576780 - DNA, 25 bp, Homo sapien
caaagagtactcttatttcttgtcc

SEQ ID NO: 1576781 - DNA, 25 bp, Homo sapien
gtggtagatcagctcaggtctggga

SEQ ID NO: 1576782 - DNA, 25 bp, Homo sapien
ggtagatcagctcaggtctgggaac

SEQ ID NO: 1576783 - DNA, 25 bp, Homo sapien
ggtggtagatcagctcaggtctggg

SEQ ID NO: 1576784 - DNA, 25 bp, Homo sapien
tggtagatcagctcaggtctgggaa

SEQ ID NO: 1576785 - DNA, 25 bp, Homo sapien
ggactctaggtcctgaataactgtg

SEQ ID NO: 1576786 - DNA, 25 bp, Homo sapien
tagtggactgagtaggtgctcacca

SEQ ID NO: 1576787 - DNA, 25 bp, Homo sapien
tagatgactggctaaccagggttcc

SEQ ID NO: 1576788 - DNA, 25 bp, Homo sapien
gatgtcaggacaaccttaaagcaac

SEQ ID NO: 1576789 - DNA, 25 bp, Homo sapien
ttcagacaaggctagctcacaggtg

SEQ ID NO: 1576790 - DNA, 25 bp, Homo sapien
tgtgttagttgtccccaaaaagaga

SEQ ID NO: 1576791 - DNA, 25 bp, Homo sapien
gatccttgggttgccccaactggga

SEQ ID NO: 1576792 - DNA, 25 bp, Homo sapien
ggtctcaagcgttctccctgcattt

SEQ ID NO: 1576793 - DNA, 25 bp, Homo sapien
tttacctgatccatgtgagtcacag

SEQ ID NO: 1576794 - DNA, 25 bp, Homo sapien
gagtcacagtcatggacatcatctc

SEQ ID NO: 1576795 - DNA, 25 bp, Homo sapien
gagtgaatcctctcatgccgagcaa

SEQ ID NO: 1576796 - DNA, 25 bp, Homo sapien
tgctgcaggaggtatgtactcttgc

SEQ ID NO: 1576797 - DNA, 25 bp, Homo sapien
gtgtgacttccgattaaaagccttc

SEQ ID NO: 1576798 - DNA, 25 bp, Homo sapien
tgtgacttccgattaaaagccttcc

SEQ ID NO: 1576799 - DNA, 25 bp, Homo sapien
cattcgaagcactcgtagggattct

SEQ ID NO: 1576800 - DNA, 25 bp, Homo sapien
attcgaagcactcgtagggattctc

SEQ ID NO: 1576801 - DNA, 25 bp, Homo sapien
cacattcgaagcactcgtagggatt

SEQ ID NO: 1576802 - DNA, 25 bp, Homo sapien
cttgccacattcgaagcactcgtag

SEQ ID NO: 1576803 - DNA, 25 bp, Homo sapien
ggatgacatagtggtgaatcagcgc

SEQ ID NO: 1576804 - DNA, 25 bp, Homo sapien
tgacatagtggtgaatcagcgctgc

SEQ ID NO: 1576805 - DNA, 25 bp, Homo sapien
gtggatgacatagtggtgaatcagc

SEQ ID NO: 1576806 - DNA, 25 bp, Homo sapien
gatgacatagtggtgaatcagcgct

SEQ ID NO: 1576807 - DNA, 25 bp, Homo sapien
tgtgggcccttttatgcaagatgaa

SEQ ID NO: 1576808 - DNA, 25 bp, Homo sapien
tctttggtatgtacgatcagatgcc

SEQ ID NO: 1576809 - DNA, 25 bp, Homo sapien
agtggcgaatgaggtctgccctatt

SEQ ID NO: 1576810 - DNA, 25 bp, Homo sapien
tcctcttgcaaaagattttcctcag

SEQ ID NO: 1576811 - DNA, 25 bp, Homo sapien
taaggctctaagctgcgtgattttc

SEQ ID NO: 1576812 - DNA, 25 bp, Homo sapien
ccaggatgaattcggatggagaata

SEQ ID NO: 1576813 - DNA, 25 bp, Homo sapien
ccaagtgcgtaataaccactgggtg

SEQ ID NO: 1576814 - DNA, 25 bp, Homo sapien
caaagacattgagtaagtttccaga

SEQ ID NO: 1576815 - DNA, 25 bp, Homo sapien
caattatattaacaggcaaggtgaa

SEQ ID NO: 1576816 - DNA, 25 bp, Homo sapien
tacatcaaagtgctaaatttttcat

SEQ ID NO: 1576817 - DNA, 25 bp, Homo sapien
ccaacatggtgctcaattttgaaga

SEQ ID NO: 1576818 - DNA, 25 bp, Homo sapien
taccattaactgtaattatgttaca

SEQ ID NO: 1576819 - DNA, 25 bp, Homo sapien
taacaaggcttacagagctggagga

SEQ ID NO: 1576820 - DNA, 25 bp, Homo sapien
tgagacgtgcttaagtcaggcaacg

SEQ ID NO: 1576821 - DNA, 25 bp, Homo sapien
caaaagggacctttctgagacgtgc

SEQ ID NO: 1576822 - DNA, 25 bp, Homo sapien
gaaacgaggcttgagatccgactaa

SEQ ID NO: 1576823 - DNA, 25 bp, Homo sapien
taatgagaagtagctccgtgtgcct

SEQ ID NO: 1576824 - DNA, 25 bp, Homo sapien
tcttcgaggtcaaggtacgccatat

SEQ ID NO: 1576825 - DNA, 25 bp, Homo sapien
gcaatgggtgctcaagacgacttcc

SEQ ID NO: 1576826 - DNA, 25 bp, Homo sapien
tatgcacagctttgtggtaaacgcg

SEQ ID NO: 1576827 - DNA, 25 bp, Homo sapien
ggtttacacgtatataagccttcat

SEQ ID NO: 1576828 - DNA, 25 bp, Homo sapien
taagccttcatctcaaagctatggc

SEQ ID NO: 1576829 - DNA, 25 bp, Homo sapien
tacaatggtttacacgtatataagc

SEQ ID NO: 1576830 - DNA, 25 bp, Homo sapien
cgtatataagccttcatctcaaagc

SEQ ID NO: 1576831 - DNA, 25 bp, Homo sapien
gaggcaagatcctttctcacaagac

SEQ ID NO: 1576832 - DNA, 25 bp, Homo sapien
caactatctctgttgtagccagaag

SEQ ID NO: 1576833 - DNA, 25 bp, Homo sapien
gaaactgacatacgtgctagggaaa

SEQ ID NO: 1576834 - DNA, 25 bp, Homo sapien
catctttgccgaaataaaggccaag

SEQ ID NO: 1576835 - DNA, 25 bp, Homo sapien
tggattttgcatgcccgaggccctg

SEQ ID NO: 1576836 - DNA, 25 bp, Homo sapien
tcaagacggatttgctgtggttcaa

SEQ ID NO: 1576837 - DNA, 25 bp, Homo sapien
tgaccgtaatgggagataacaccca

SEQ ID NO: 1576838 - DNA, 25 bp, Homo sapien
taagtgtgtccctatgtgaccgtaa

SEQ ID NO: 1576839 - DNA, 25 bp, Homo sapien
tcagtcttgaactggaagtttcccc

SEQ ID NO: 1576840 - DNA, 25 bp, Homo sapien
aaagatacagtgttgagccagtgcc

SEQ ID NO: 1576841 - DNA, 25 bp, Homo sapien
cagtaacagtcctacagtggtgcca

SEQ ID NO: 1576842 - DNA, 25 bp, Homo sapien
cagtactgtagcagggtcatagctc

SEQ ID NO: 1576843 - DNA, 25 bp, Homo sapien
aggaggacactttgccaatctgatg

SEQ ID NO: 1576844 - DNA, 25 bp, Homo sapien
gaaaaaataccagacaaatgcaaat

SEQ ID NO: 1576845 - DNA, 25 bp, Homo sapien
ctactatgatgatacaaggaggaca

SEQ ID NO: 1576846 - DNA, 25 bp, Homo sapien
tgacatcacgtaacacctactatga

SEQ ID NO: 1576847 - DNA, 25 bp, Homo sapien
tcggctgactttcgcactccgagcc

SEQ ID NO: 1576848 - DNA, 25 bp, Homo sapien
gctcccgccaagacgcgaagaaggg

SEQ ID NO: 1576849 - DNA, 25 bp, Homo sapien
aaaatgcgcacaaggcccaaggcgc

SEQ ID NO: 1576850 - DNA, 25 bp, Homo sapien
aatgccgcggatcagccgaccacag

SEQ ID NO: 1576851 - DNA, 25 bp, Homo sapien
gcgccggagccatccacgccgccgc

SEQ ID NO: 1576852 - DNA, 25 bp, Homo sapien
ctgcgccggagccatccacgccgcc

SEQ ID NO: 1576853 - DNA, 25 bp, Homo sapien
ccggagccatccacgccgccgccat

SEQ ID NO: 1576854 - DNA, 25 bp, Homo sapien
gccggagccatccacgccgccgcca

SEQ ID NO: 1576855 - DNA, 25 bp, Homo sapien
gtggaataggattagaacctgtcac

SEQ ID NO: 1576856 - DNA, 25 bp, Homo sapien
ataggattagaacctgtcactccag

SEQ ID NO: 1576857 - DNA, 25 bp, Homo sapien
ctgtggaataggattagaacctgtc

SEQ ID NO: 1576858 - DNA, 25 bp, Homo sapien
aggattagaacctgtcactccagca

SEQ ID NO: 1576859 - DNA, 25 bp, Homo sapien
aagaaccagtaatgtttcctttgca

SEQ ID NO: 1576860 - DNA, 25 bp, Homo sapien
agaaccagtaatgtttcctttgcaa

SEQ ID NO: 1576861 - DNA, 25 bp, Homo sapien
ctgggtcacgtccaactgcccccac

SEQ ID NO: 1576862 - DNA, 25 bp, Homo sapien
gccacatcctcgaaggtcacagact

SEQ ID NO: 1576863 - DNA, 25 bp, Homo sapien
actcctcctgggtaaatgtcacagc

SEQ ID NO: 1576864 - DNA, 25 bp, Homo sapien
ccactcctcctgggtaaatgtcaca

SEQ ID NO: 1576865 - DNA, 25 bp, Homo sapien
gtgcgaccagaagcccacaggtctc

SEQ ID NO: 1576866 - DNA, 25 bp, Homo sapien
cagcatcacctccacgtacaaggcc

SEQ ID NO: 1576867 - DNA, 25 bp, Homo sapien
gcatcacctccacgtacaaggccct

SEQ ID NO: 1576868 - DNA, 25 bp, Homo sapien
ccagtgcgaccagaagcccacaggt

SEQ ID NO: 1576869 - DNA, 25 bp, Homo sapien
atgagaagggataggctctacggtc

SEQ ID NO: 1576870 - DNA, 25 bp, Homo sapien
taggctctacggtctcaggttttgt

SEQ ID NO: 1576871 - DNA, 25 bp, Homo sapien
ggataggctctacggtctcaggttt

SEQ ID NO: 1576872 - DNA, 25 bp, Homo sapien
aagggataggctctacggtctcagg

SEQ ID NO: 1576873 - DNA, 25 bp, Homo sapien
taactggtccatatgagtcaaatcc

SEQ ID NO: 1576874 - DNA, 25 bp, Homo sapien
catagggcttcacacgagggagaat

SEQ ID NO: 1576875 - DNA, 25 bp, Homo sapien
tcagctgtcgccaaaccttcgtgtt

SEQ ID NO: 1576876 - DNA, 25 bp, Homo sapien
cgtgtaaggtgcgacccgcgattga

SEQ ID NO: 1576877 - DNA, 25 bp, Homo sapien
acaagaaacgttcccactctggatg

SEQ ID NO: 1576878 - DNA, 25 bp, Homo sapien
actctggatgggttcgtgggacttc

SEQ ID NO: 1576879 - DNA, 25 bp, Homo sapien
tcgaatcaggtttgtggtccgacaa

SEQ ID NO: 1576880 - DNA, 25 bp, Homo sapien
ccacattggatgcatacatacggct

SEQ ID NO: 1576881 - DNA, 25 bp, Homo sapien
gaatgagcggcaattgaaggcgttt

SEQ ID NO: 1576882 - DNA, 25 bp, Homo sapien
tatgaatccgttgatgtcgagtgag

SEQ ID NO: 1576883 - DNA, 25 bp, Homo sapien
ttgaaggcgtttccatattcactgc

SEQ ID NO: 1576884 - DNA, 25 bp, Homo sapien
gtttcttccactatgaatccgttga

SEQ ID NO: 1576885 - DNA, 25 bp, Homo sapien
tgactgaagtgtacgtaaaaagtct

SEQ ID NO: 1576886 - DNA, 25 bp, Homo sapien
taaaacaggttttcccacagagatg

SEQ ID NO: 1576887 - DNA, 25 bp, Homo sapien
cacagagatgatacttatggagttt

SEQ ID NO: 1576888 - DNA, 25 bp, Homo sapien
tgccatgggcttgtcagggaagtct

SEQ ID NO: 1576889 - DNA, 25 bp, Homo sapien
aaccgtttgtctacagcactggaca

SEQ ID NO: 1576890 - DNA, 25 bp, Homo sapien
aaacaaaccgtttgtctacagcact

SEQ ID NO: 1576891 - DNA, 25 bp, Homo sapien
caaaccgtttgtctacagcactgga

SEQ ID NO: 1576892 - DNA, 25 bp, Homo sapien
ccgtttgtctacagcactggacagc

SEQ ID NO: 1576893 - DNA, 25 bp, Homo sapien
caatccatggtgacaactacctgca

SEQ ID NO: 1576894 - DNA, 25 bp, Homo sapien
tcctcaagagtggagacaatgctgt

SEQ ID NO: 1576895 - DNA, 25 bp, Homo sapien
tactacgactggactcaatccatgg

SEQ ID NO: 1576896 - DNA, 25 bp, Homo sapien
tgaagtgtgcagtaaaatgtgccca

SEQ ID NO: 1576897 - DNA, 25 bp, Homo sapien
aaagggggaactcttatatatggct

SEQ ID NO: 1576898 - DNA, 25 bp, Homo sapien
gatccactggtaatgatctatacca

SEQ ID NO: 1576899 - DNA, 25 bp, Homo sapien
tatggctggtaggaatgctaattag

SEQ ID NO: 1576900 - DNA, 25 bp, Homo sapien
tgctaattagtatagccatatggaa

SEQ ID NO: 1576901 - DNA, 25 bp, Homo sapien
aatatactacaaagtgatggtaacc

SEQ ID NO: 1576902 - DNA, 25 bp, Homo sapien
aaagaacaaaatgggagtcatcaca

SEQ ID NO: 1576903 - DNA, 25 bp, Homo sapien
gcagaagaatgaaagtagactcatc

SEQ ID NO: 1576904 - DNA, 25 bp, Homo sapien
tctatgctctcaggataatcaactc

SEQ ID NO: 1576905 - DNA, 25 bp, Homo sapien
cagctaacatcatgcataatgggaa

SEQ ID NO: 1576906 - DNA, 25 bp, Homo sapien
taaagggcatgcagatcaggaagca

SEQ ID NO: 1576907 - DNA, 25 bp, Homo sapien
taacaaagtacaaaaggtctgagac

SEQ ID NO: 1576908 - DNA, 25 bp, Homo sapien
aattatccctgtatgcacatgacag

SEQ ID NO: 1576909 - DNA, 25 bp, Homo sapien
gcattaccatgacacaagcaccaga

SEQ ID NO: 1576910 - DNA, 25 bp, Homo sapien
gagggaattattctaaactcactcc

SEQ ID NO: 1576911 - DNA, 25 bp, Homo sapien
tacaaaaatgacactgcaactgata

SEQ ID NO: 1576912 - DNA, 25 bp, Homo sapien
tacaacccatcaggattgaacctag

SEQ ID NO: 1576913 - DNA, 25 bp, Homo sapien
gattctgaatgaccaatgggtaatg

SEQ ID NO: 1576914 - DNA, 25 bp, Homo sapien
cacagtagggatgaaatcaggaaga

SEQ ID NO: 1576915 - DNA, 25 bp, Homo sapien
caaggagaggccacatgttaaacca

SEQ ID NO: 1576916 - DNA, 25 bp, Homo sapien
taatacttgtggacttcaacaccct

SEQ ID NO: 1576917 - DNA, 25 bp, Homo sapien
taaagtgtgtctcaggcaagcaaaa

SEQ ID NO: 1576918 - DNA, 25 bp, Homo sapien
tcttgcgagagatatggacattcag

SEQ ID NO: 1576919 - DNA, 25 bp, Homo sapien
gaaattaggtagaaatagccagcca

SEQ ID NO: 1576920 - DNA, 25 bp, Homo sapien
tcaagggaatgctatatcgggaaat

SEQ ID NO: 1576921 - DNA, 25 bp, Homo sapien
ggttcaggttaccaaactgcagctg

SEQ ID NO: 1576922 - DNA, 25 bp, Homo sapien
tgggctgctccctattgcccaaggc

SEQ ID NO: 1576923 - DNA, 25 bp, Homo sapien
agttgccaatgagcctgaatggttc

SEQ ID NO: 1576924 - DNA, 25 bp, Homo sapien
caccctgaagtatgggctgctgaga

SEQ ID NO: 1576925 - DNA, 25 bp, Homo sapien
tggtggcccaacatctacaagcagc

SEQ ID NO: 1576926 - DNA, 25 bp, Homo sapien
tgtgtcctgtcaccttcgactagag

SEQ ID NO: 1576927 - DNA, 25 bp, Homo sapien
tgcctcctgaggaaaggatgccttg

SEQ ID NO: 1576928 - DNA, 25 bp, Homo sapien
gtgagcaatagcataccagcagcgt

SEQ ID NO: 1576929 - DNA, 25 bp, Homo sapien
tagaaactcacaggtggcatgcgcc

SEQ ID NO: 1576930 - DNA, 25 bp, Homo sapien
tgagttctggaggtaaatacaccca

SEQ ID NO: 1576931 - DNA, 25 bp, Homo sapien
ggcaaaattctggatggcggcatcc

SEQ ID NO: 1576932 - DNA, 25 bp, Homo sapien
aaaaagatgtaggactggagctccc

SEQ ID NO: 1576933 - DNA, 25 bp, Homo sapien
cataatggacaaatctggactgaca

SEQ ID NO: 1576934 - DNA, 25 bp, Homo sapien
caagaaggcaggtataacattggtg

SEQ ID NO: 1576935 - DNA, 25 bp, Homo sapien
tactaagtaacccatgcatagagga

SEQ ID NO: 1576936 - DNA, 25 bp, Homo sapien
tacagaacagcagatatcagttgcc

SEQ ID NO: 1576937 - DNA, 25 bp, Homo sapien
tcgaatactgttcctatagcacagg

SEQ ID NO: 1576938 - DNA, 25 bp, Homo sapien
cacatccagtatacaggaggccagg

SEQ ID NO: 1576939 - DNA, 25 bp, Homo sapien
catctcactgttacaatctctaggg

SEQ ID NO: 1576940 - DNA, 25 bp, Homo sapien
ggccagggacacagtggaatgacat

SEQ ID NO: 1576941 - DNA, 25 bp, Homo sapien
gagctgaccaagaggtatttcccac

SEQ ID NO: 1576942 - DNA, 25 bp, Homo sapien
cctgatgctgcacaagttgagagct

SEQ ID NO: 1576943 - DNA, 25 bp, Homo sapien
tattaaaggtatgccagcactgact

SEQ ID NO: 1576944 - DNA, 25 bp, Homo sapien
cataagggtttactccagcatggat

SEQ ID NO: 1576945 - DNA, 25 bp, Homo sapien
ggtgctcaacgtgtgtgacatgtat

SEQ ID NO: 1576946 - DNA, 25 bp, Homo sapien
tatggcagagaatttgcttatggtg

SEQ ID NO: 1576947 - DNA, 25 bp, Homo sapien
acatgtattggatgaaggaatatac

SEQ ID NO: 1576948 - DNA, 25 bp, Homo sapien
catccattggaattggagtttttca

SEQ ID NO: 1576949 - DNA, 25 bp, Homo sapien
gggcgtcaggctcccgccaagatgc

SEQ ID NO: 1576950 - DNA, 25 bp, Homo sapien
acctcggctgactttcgcactcgga

SEQ ID NO: 1576951 - DNA, 25 bp, Homo sapien
ccaagatgcggagaaggcgcgtaac

SEQ ID NO: 1576952 - DNA, 25 bp, Homo sapien
cccagagaaaaatgcgcacaaagcg

SEQ ID NO: 1576953 - DNA, 25 bp, Homo sapien
gaggcctccagaagtagcagagcag

SEQ ID NO: 1576954 - DNA, 25 bp, Homo sapien
caaggccaaaacctcgtccactcac

SEQ ID NO: 1576955 - DNA, 25 bp, Homo sapien
agcaaggccaaaacctcgtccactc

SEQ ID NO: 1576956 - DNA, 25 bp, Homo sapien
agcagcaaggccaaaacctcgtcca

SEQ ID NO: 1576957 - DNA, 25 bp, Homo sapien
ttaaacagagatagtagtgtttccc

SEQ ID NO: 1576958 - DNA, 25 bp, Homo sapien
gacatgagaagtccgcaggtctcca

SEQ ID NO: 1576959 - DNA, 25 bp, Homo sapien
tcacctcctgatacaaggttctctg

SEQ ID NO: 1576960 - DNA, 25 bp, Homo sapien
tgatacaaggttctctgggctgcat

SEQ ID NO: 1576961 - DNA, 25 bp, Homo sapien
cagagacatgagaagtccgcaggtc

SEQ ID NO: 1576962 - DNA, 25 bp, Homo sapien
tgtctgtgatccaactggtagatca

SEQ ID NO: 1576963 - DNA, 25 bp, Homo sapien
tagccatccatagctcctgtctgtg

SEQ ID NO: 1576964 - DNA, 25 bp, Homo sapien
gtctgtgatccaactggtagatcag

SEQ ID NO: 1576965 - DNA, 25 bp, Homo sapien
tgtagccatccatagctcctgtctg

SEQ ID NO: 1576966 - DNA, 25 bp, Homo sapien
tgtcgaataaggtttgcgctccggc

SEQ ID NO: 1576967 - DNA, 25 bp, Homo sapien
tctgtgcagtcataaaaggtcttcc

SEQ ID NO: 1576968 - DNA, 25 bp, Homo sapien
tgtgacctgcggttaaaagccttcc

SEQ ID NO: 1576969 - DNA, 25 bp, Homo sapien
gggatgagccgcgattaaaagcctt

SEQ ID NO: 1576970 - DNA, 25 bp, Homo sapien
tctcaggtggagaataagactccag

SEQ ID NO: 1576971 - DNA, 25 bp, Homo sapien
tggccagatggtaagatgttccctt

SEQ ID NO: 1576972 - DNA, 25 bp, Homo sapien
tattacacgttttctcaaagagagg

SEQ ID NO: 1576973 - DNA, 25 bp, Homo sapien
actccaggctggttcaatttctaac

SEQ ID NO: 1576974 - DNA, 25 bp, Homo sapien
ccaggattactgtgggcatgaacaa

SEQ ID NO: 1576975 - DNA, 25 bp, Homo sapien
cacctcgagagtggagaacgttgca

SEQ ID NO: 1576976 - DNA, 25 bp, Homo sapien
taaatatccctgagatggccgggcg

SEQ ID NO: 1576977 - DNA, 25 bp, Homo sapien
tacatatatgcatgccggcttgcct

SEQ ID NO: 1576978 - DNA, 25 bp, Homo sapien
taaaatcagttaaagccatccatca

SEQ ID NO: 1576979 - DNA, 25 bp, Homo sapien
gatctacactgaatgctttctccca

SEQ ID NO: 1576980 - DNA, 25 bp, Homo sapien
tgtacataaaagtctacaggtatta

SEQ ID NO: 1576981 - DNA, 25 bp, Homo sapien
gcccattcacaataaaagccctcag

SEQ ID NO: 1576982 - DNA, 25 bp, Homo sapien
cctggcctagaagtgcaaggtgcct

SEQ ID NO: 1576983 - DNA, 25 bp, Homo sapien
gggaggccagtattagtcaaacacc

SEQ ID NO: 1576984 - DNA, 25 bp, Homo sapien
caaggtgccttgacagctctgtgac

SEQ ID NO: 1576985 - DNA, 25 bp, Homo sapien
cactgacagttacattgttgcccga

SEQ ID NO: 1576986 - DNA, 25 bp, Homo sapien
taacatcattaatcaacaggatcca

SEQ ID NO: 1576987 - DNA, 25 bp, Homo sapien
ggactttaacatccttcttttagca

SEQ ID NO: 1576988 - DNA, 25 bp, Homo sapien
gcatatacaccaaacaagagaacat

SEQ ID NO: 1576989 - DNA, 25 bp, Homo sapien
gataagccatgcaaacattaacttt

SEQ ID NO: 1576990 - DNA, 25 bp, Homo sapien
gcactgacgtgggacataaatatcc

SEQ ID NO: 1576991 - DNA, 25 bp, Homo sapien
tatccctagagtgcaaggactggga

SEQ ID NO: 1576992 - DNA, 25 bp, Homo sapien
gaggactgagcctggttaaccttaa

SEQ ID NO: 1576993 - DNA, 25 bp, Homo sapien
cacatgtatctttacctcagggcac

SEQ ID NO: 1576994 - DNA, 25 bp, Homo sapien
catctgacattcctttaattggtgt

SEQ ID NO: 1576995 - DNA, 25 bp, Homo sapien
ccagagattttagttcactgaggga

SEQ ID NO: 1576996 - DNA, 25 bp, Homo sapien
cactggctgccacaatttaggaaga

SEQ ID NO: 1576997 - DNA, 25 bp, Homo sapien
taggaagactaacagaaaacttcat

SEQ ID NO: 1576998 - DNA, 25 bp, Homo sapien
aacaaaagcgcgaaggaaggtcctg

SEQ ID NO: 1576999 - DNA, 25 bp, Homo sapien
tttctttgctaggttccacgagagc

SEQ ID NO: 1577000 - DNA, 25 bp, Homo sapien
gaaggtcctgcagtcttcactgtct

SEQ ID NO: 1577001 - DNA, 25 bp, Homo sapien
gaaagccgacccgatctctagaact

SEQ ID NO: 1577002 - DNA, 25 bp, Homo sapien
ccggtgtaaaaacgctcacaagact

SEQ ID NO: 1577003 - DNA, 25 bp, Homo sapien
gacgccctcgggctgagtgtagcac

SEQ ID NO: 1577004 - DNA, 25 bp, Homo sapien
ccaagtctcaatctacccggtgtaa

SEQ ID NO: 1577005 - DNA, 25 bp, Homo sapien
gaagcggatgaacagtctgtgccct

SEQ ID NO: 1577006 - DNA, 25 bp, Homo sapien
agtgtagccacaagtgcaaagttct

SEQ ID NO: 1577007 - DNA, 25 bp, Homo sapien
ctagtgtagccacaagtgcaaagtt

SEQ ID NO: 1577008 - DNA, 25 bp, Homo sapien
tagtgtagccacaagtgcaaagttc

SEQ ID NO: 1577009 - DNA, 25 bp, Homo sapien
acgctctgctcagaaggtgcctcat

SEQ ID NO: 1577010 - DNA, 25 bp, Homo sapien
gaaacgctctgctcagaaggtgcct

SEQ ID NO: 1577011 - DNA, 25 bp, Homo sapien
agaaacgctctgctcagaaggtgcc

SEQ ID NO: 1577012 - DNA, 25 bp, Homo sapien
agaaggtgcctcatgttctgcttca

SEQ ID NO: 1577013 - DNA, 25 bp, Homo sapien
tgtacagctcttcacaaatgaggcc

SEQ ID NO: 1577014 - DNA, 25 bp, Homo sapien
cagtttctgtgtaaggtgtgatccc

SEQ ID NO: 1577015 - DNA, 25 bp, Homo sapien
tctggaaaagacctgactcagcagt

SEQ ID NO: 1577016 - DNA, 25 bp, Homo sapien
taaaggatctccctaacatgtggac

SEQ ID NO: 1577017 - DNA, 25 bp, Homo sapien
ccttggtgttgcctgagactggagc

SEQ ID NO: 1577018 - DNA, 25 bp, Homo sapien
gaattctccagtgctcaataaggtg

SEQ ID NO: 1577019 - DNA, 25 bp, Homo sapien
catttgctgcacacgtaggatcttg

SEQ ID NO: 1577020 - DNA, 25 bp, Homo sapien
gctgtcaagaagagtaaaggtgtcc

SEQ ID NO: 1577021 - DNA, 25 bp, Homo sapien
tacaatttaggagagtgagccctgc

SEQ ID NO: 1577022 - DNA, 25 bp, Homo sapien
tgtggatgcccctctagaatgttcg

SEQ ID NO: 1577023 - DNA, 25 bp, Homo sapien
tgcttatcaggaatctccccagggt

SEQ ID NO: 1577024 - DNA, 25 bp, Homo sapien
gagtacgtgacagttaagggaccca

SEQ ID NO: 1577025 - DNA, 25 bp, Homo sapien
cgtcatagagcgccaaaggccggaa

SEQ ID NO: 1577026 - DNA, 25 bp, Homo sapien
gacgtcatagagcgccaaaggccgg

SEQ ID NO: 1577027 - DNA, 25 bp, Homo sapien
acgtcatagagcgccaaaggccgga

SEQ ID NO: 1577028 - DNA, 25 bp, Homo sapien
cttctcgcgcttttccgctccgtca

SEQ ID NO: 1577029 - DNA, 25 bp, Homo sapien
cgcctctgcgtacaaggaaccaagc

SEQ ID NO: 1577030 - DNA, 25 bp, Homo sapien
gcgtacaaggaaccaagccgcttct

SEQ ID NO: 1577031 - DNA, 25 bp, Homo sapien
tctgcgtacaaggaaccaagccgct

SEQ ID NO: 1577032 - DNA, 25 bp, Homo sapien
aagacaaggacaccgccgtccccag

SEQ ID NO: 1577033 - DNA, 25 bp, Homo sapien
gagcttctgccactgtcagttgtgc

SEQ ID NO: 1577034 - DNA, 25 bp, Homo sapien
ttcggcggggactccgcaagtccag

SEQ ID NO: 1577035 - DNA, 25 bp, Homo sapien
cactgtcagttgtgcctgtgtcact

SEQ ID NO: 1577036 - DNA, 25 bp, Homo sapien
ttgagacgcctgagaatcacactgg

SEQ ID NO: 1577037 - DNA, 25 bp, Homo sapien
tccatggttataccggctgctcagg

SEQ ID NO: 1577038 - DNA, 25 bp, Homo sapien
tctgaacctgagatccccgaaggga

SEQ ID NO: 1577039 - DNA, 25 bp, Homo sapien
tatctgatacggcaggaaaacctgt

SEQ ID NO: 1577040 - DNA, 25 bp, Homo sapien
gatgacgatggtcgtctttggattc

SEQ ID NO: 1577041 - DNA, 25 bp, Homo sapien
cagatgacgatggtcgtctttggat

SEQ ID NO: 1577042 - DNA, 25 bp, Homo sapien
ctggttcagatgacgatggtcgtct

SEQ ID NO: 1577043 - DNA, 25 bp, Homo sapien
ttcagatgacgatggtcgtctttgg

SEQ ID NO: 1577044 - DNA, 25 bp, Homo sapien
ccactcgttgaacttgtccacagtt

SEQ ID NO: 1577045 - DNA, 25 bp, Homo sapien
cactcgttgaacttgtccacagttt

SEQ ID NO: 1577046 - DNA, 25 bp, Homo sapien
tcatctacgaggtcgagagcagcat

SEQ ID NO: 1577047 - DNA, 25 bp, Homo sapien
acatgttctcatctacgaggtcgag

SEQ ID NO: 1577048 - DNA, 25 bp, Homo sapien
gccccgcggtgacaaatgctgacac

SEQ ID NO: 1577049 - DNA, 25 bp, Homo sapien
ccgcggtgacaaatgctgacacaaa

SEQ ID NO: 1577050 - DNA, 25 bp, Homo sapien
atgccccgcggtgacaaatgctgac

SEQ ID NO: 1577051 - DNA, 25 bp, Homo sapien
cccgcggtgacaaatgctgacacaa

SEQ ID NO: 1577052 - DNA, 25 bp, Homo sapien
gtcttatgtcatgaagcataataaa

SEQ ID NO: 1577053 - DNA, 25 bp, Homo sapien
cacttgatcgaataggagaattggg

SEQ ID NO: 1577054 - DNA, 25 bp, Homo sapien
taggagaattgggttcataaaatgg

SEQ ID NO: 1577055 - DNA, 25 bp, Homo sapien
tctgtcaaatgcacttgatcgaata

SEQ ID NO: 1577056 - DNA, 25 bp, Homo sapien
ttgggttcataaaatggattcattg

SEQ ID NO: 1577057 - DNA, 25 bp, Homo sapien
tcagcttaaaaggtgtttcttccca

SEQ ID NO: 1577058 - DNA, 25 bp, Homo sapien
tcctgagtatacaccattgtggtga

SEQ ID NO: 1577059 - DNA, 25 bp, Homo sapien
ttcctgagtatacaccattgtggtg

SEQ ID NO: 1577060 - DNA, 25 bp, Homo sapien
gacatgagacagaatgtactatttt

SEQ ID NO: 1577061 - DNA, 25 bp, Homo sapien
gtgacatgagacagaatgtactatt

SEQ ID NO: 1577062 - DNA, 25 bp, Homo sapien
tgacatgagacagaatgtactattt

SEQ ID NO: 1577063 - DNA, 25 bp, Homo sapien
gaaggtagcaattttacacaaggat

SEQ ID NO: 1577064 - DNA, 25 bp, Homo sapien
taacgtccacgtatgtgctatgaca

SEQ ID NO: 1577065 - DNA, 25 bp, Homo sapien
gctcccagttagcacaggttgtgtt

SEQ ID NO: 1577066 - DNA, 25 bp, Homo sapien
tttcacaagtacaggcatcaacagt

SEQ ID NO: 1577067 - DNA, 25 bp, Homo sapien
gattgtataaactcagctcctccga

SEQ ID NO: 1577068 - DNA, 25 bp, Homo sapien
tcttacaggcagagttggaccacca

SEQ ID NO: 1577069 - DNA, 25 bp, Homo sapien
cataggactcttaccggtgtcaaac

SEQ ID NO: 1577070 - DNA, 25 bp, Homo sapien
aaagaactgaacctgctggagcttc

SEQ ID NO: 1577071 - DNA, 25 bp, Homo sapien
cttgggagattgaggcagaactgct

SEQ ID NO: 1577072 - DNA, 25 bp, Homo sapien
ctgggtgacaacacagcaagactcc

SEQ ID NO: 1577073 - DNA, 25 bp, Homo sapien
tgaatccaggaggtgcaggttgcag

SEQ ID NO: 1577074 - DNA, 25 bp, Homo sapien
tgagccaagatcatgccactgcact

SEQ ID NO: 1577075 - DNA, 25 bp, Homo sapien
ctgccaaattgggaaagatgaatac

SEQ ID NO: 1577076 - DNA, 25 bp, Homo sapien
gccaaattgggaaagatgaatacat

SEQ ID NO: 1577077 - DNA, 25 bp, Homo sapien
tgccaaattgggaaagatgaataca

SEQ ID NO: 1577078 - DNA, 25 bp, Homo sapien
gtacagcaatctctgagcctcatcg

SEQ ID NO: 1577079 - DNA, 25 bp, Homo sapien
caaaagggccaaattctccagcatc

SEQ ID NO: 1577080 - DNA, 25 bp, Homo sapien
tctctgagcctcatcgagatgcccc

SEQ ID NO: 1577081 - DNA, 25 bp, Homo sapien
tcctgggagaaatatatggccacgt

SEQ ID NO: 1577082 - DNA, 25 bp, Homo sapien
gaaacacctggctctaaaggtgcct

SEQ ID NO: 1577083 - DNA, 25 bp, Homo sapien
cagagtggattgtctggtgacgaac

SEQ ID NO: 1577084 - DNA, 25 bp, Homo sapien
tcactgcacaagaaggtcttccctg

SEQ ID NO: 1577085 - DNA, 25 bp, Homo sapien
gatgtgctggacacgtgtacagtcc

SEQ ID NO: 1577086 - DNA, 25 bp, Homo sapien
tgcattcataaggccgttctccagt

SEQ ID NO: 1577087 - DNA, 25 bp, Homo sapien
tcataaggccgttctccagtgtgaa

SEQ ID NO: 1577088 - DNA, 25 bp, Homo sapien
gcattcataaggccgttctccagtg

SEQ ID NO: 1577089 - DNA, 25 bp, Homo sapien
attcataaggccgttctccagtgtg

SEQ ID NO: 1577090 - DNA, 25 bp, Homo sapien
tgtctgagaagtgtagagttatacc

SEQ ID NO: 1577091 - DNA, 25 bp, Homo sapien
tgaggtgggactttgtaaggaaggc

SEQ ID NO: 1577092 - DNA, 25 bp, Homo sapien
atgtctgagaagtgtagagttatac

SEQ ID NO: 1577093 - DNA, 25 bp, Homo sapien
gtctgagaagtgtagagttatacct

SEQ ID NO: 1577094 - DNA, 25 bp, Homo sapien
cacaatatgttggtgactgaaggct

SEQ ID NO: 1577095 - DNA, 25 bp, Homo sapien
tagcgactggagagctgtacctaca

SEQ ID NO: 1577096 - DNA, 25 bp, Homo sapien
aaataatgtcccgagtttgctgaac

SEQ ID NO: 1577097 - DNA, 25 bp, Homo sapien
gaattctctgatacatagcgactgg

SEQ ID NO: 1577098 - DNA, 25 bp, Homo sapien
gaagcccaataagtacaatcttgca

SEQ ID NO: 1577099 - DNA, 25 bp, Homo sapien
tttggctacattcaaggcacatacg

SEQ ID NO: 1577100 - DNA, 25 bp, Homo sapien
tactcagaagactttcactagtgtg

SEQ ID NO: 1577101 - DNA, 25 bp, Homo sapien
cactagtgtggatattctgaagccc

SEQ ID NO: 1577102 - DNA, 25 bp, Homo sapien
tagccagaggtagaagtaacccaag

SEQ ID NO: 1577103 - DNA, 25 bp, Homo sapien
tgaaaaggctcacaggatagaacat

SEQ ID NO: 1577104 - DNA, 25 bp, Homo sapien
taaaaatatggtggtcgccagggac

SEQ ID NO: 1577105 - DNA, 25 bp, Homo sapien
gaagtaccaagaatagtcagagtca

SEQ ID NO: 1577106 - DNA, 25 bp, Homo sapien
agggaataaagaagatgtctcagag

SEQ ID NO: 1577107 - DNA, 25 bp, Homo sapien
gatttcccgttcctctatagtggtg

SEQ ID NO: 1577108 - DNA, 25 bp, Homo sapien
gctagtagtcttctgaaaaggttga

SEQ ID NO: 1577109 - DNA, 25 bp, Homo sapien
cataagatagagtaaacacgtgagg

SEQ ID NO: 1577110 - DNA, 25 bp, Homo sapien
cacacagaaccaaaacgaccaccac

SEQ ID NO: 1577111 - DNA, 25 bp, Homo sapien
agttggtgaaacaccacacagaacc

SEQ ID NO: 1577112 - DNA, 25 bp, Homo sapien
caccaccaggaggacggcggaagtc

SEQ ID NO: 1577113 - DNA, 25 bp, Homo sapien
aggccgaagttggtgaaacaccaca

SEQ ID NO: 1577114 - DNA, 25 bp, Homo sapien
tctccgtggtgggaaccgagccgct

SEQ ID NO: 1577115 - DNA, 25 bp, Homo sapien
tggtgggaaccgagccgcttctcgc

SEQ ID NO: 1577116 - DNA, 25 bp, Homo sapien
gcttctcgcgcttttccgttccgtc

SEQ ID NO: 1577117 - DNA, 25 bp, Homo sapien
ccgcctctccgtggtgggaaccgag

SEQ ID NO: 1577118 - DNA, 25 bp, Homo sapien
tccccagcgcttgtcagttgactca

SEQ ID NO: 1577119 - DNA, 25 bp, Homo sapien
gcgacaaaggcaagacaaggacgcc

SEQ ID NO: 1577120 - DNA, 25 bp, Homo sapien
ggcaagacaaggacgccactgtccc

SEQ ID NO: 1577121 - DNA, 25 bp, Homo sapien
tgtccccagcgcttgtcagttgact

SEQ ID NO: 1577122 - DNA, 25 bp, Homo sapien
agcactgggaggaccggtcgggcgg

SEQ ID NO: 1577123 - DNA, 25 bp, Homo sapien
cagcactgggaggaccggtcgggcg

SEQ ID NO: 1577124 - DNA, 25 bp, Homo sapien
tcagcactgggaggaccggtcgggc

SEQ ID NO: 1577125 - DNA, 25 bp, Homo sapien
cataatgacttcactattaactgcc

SEQ ID NO: 1577126 - DNA, 25 bp, Homo sapien
taatgacttcactattaactgccta

SEQ ID NO: 1577127 - DNA, 25 bp, Homo sapien
gacttcactattaactgcctatctg

SEQ ID NO: 1577128 - DNA, 25 bp, Homo sapien
taacataatgacttcactattaact

SEQ ID NO: 1577129 - DNA, 25 bp, Homo sapien
gggtccatttctgccatcgccaggg

SEQ ID NO: 1577130 - DNA, 25 bp, Homo sapien
ctgtgtagggtccatttctgccatc

SEQ ID NO: 1577131 - DNA, 25 bp, Homo sapien
tgtagggtccatttctgccatcgcc

SEQ ID NO: 1577132 - DNA, 25 bp, Homo sapien
agggtccatttctgccatcgccagg

SEQ ID NO: 1577133 - DNA, 25 bp, Homo sapien
ggtgcacggcaaatacgctcagcat

SEQ ID NO: 1577134 - DNA, 25 bp, Homo sapien
aaccaggtggtgcacggcaaatacg

SEQ ID NO: 1577135 - DNA, 25 bp, Homo sapien
cggcaaatacgctcagcatccaatt

SEQ ID NO: 1577136 - DNA, 25 bp, Homo sapien
ttcacctcctaacaggccactctgc

SEQ ID NO: 1577137 - DNA, 25 bp, Homo sapien
ctgccaaattgggaaagatgaatac

SEQ ID NO: 1577138 - DNA, 25 bp, Homo sapien
gccaaattgggaaagatgaatacat

SEQ ID NO: 1577139 - DNA, 25 bp, Homo sapien
tgccaaattgggaaagatgaataca

SEQ ID NO: 1577140 - DNA, 25 bp, Homo sapien
ctgggagaaatatatggccacgtcc

SEQ ID NO: 1577141 - DNA, 25 bp, Homo sapien
caaaagggccaaattctccagcatc

SEQ ID NO: 1577142 - DNA, 25 bp, Homo sapien
tatatggccacgtcctcaaagacca

SEQ ID NO: 1577143 - DNA, 25 bp, Homo sapien
gtacagcaatctctgagcctcatca

SEQ ID NO: 1577144 - DNA, 25 bp, Homo sapien
ggacactgggcaagtgtgagggcct

SEQ ID NO: 1577145 - DNA, 25 bp, Homo sapien
caggacactgggcaagtgtgagggc

SEQ ID NO: 1577146 - DNA, 25 bp, Homo sapien
acactgggcaagtgtgagggcctta

SEQ ID NO: 1577147 - DNA, 25 bp, Homo sapien
cactgggcaagtgtgagggccttac

SEQ ID NO: 1577148 - DNA, 25 bp, Homo sapien
aagctgtaacctctgacactcctac

SEQ ID NO: 1577149 - DNA, 25 bp, Homo sapien
catgaggtggctggtaagtccttcc

SEQ ID NO: 1577150 - DNA, 25 bp, Homo sapien
tgtggagctgtaccgaaagaatttc

SEQ ID NO: 1577151 - DNA, 25 bp, Homo sapien
gcttccactcgctttgagggccctg

SEQ ID NO: 1577152 - DNA, 25 bp, Homo sapien
cagaatgtctttcaagggtgggcca

SEQ ID NO: 1577153 - DNA, 25 bp, Homo sapien
gattttctggtgatgaaccaggtga

SEQ ID NO: 1577154 - DNA, 25 bp, Homo sapien
taaaggccttctggcattcgctgca

SEQ ID NO: 1577155 - DNA, 25 bp, Homo sapien
taatgagcctgcagtggtacctaaa

SEQ ID NO: 1577156 - DNA, 25 bp, Homo sapien
taatgaggttggagttgtaacgaaa

SEQ ID NO: 1577157 - DNA, 25 bp, Homo sapien
tgtttaatgaggttggagttttagc

SEQ ID NO: 1577158 - DNA, 25 bp, Homo sapien
taatgaggttggagttttagctaaa

SEQ ID NO: 1577159 - DNA, 25 bp, Homo sapien
tttaatgaggttggagttttagcta

SEQ ID NO: 1577160 - DNA, 25 bp, Homo sapien
tgaggttggagttttagctaaagaa

SEQ ID NO: 1577161 - DNA, 25 bp, Homo sapien
tagcccaagtatccactaacagatg

SEQ ID NO: 1577162 - DNA, 25 bp, Homo sapien
tgggtgaaccgtgaagaccttatcc

SEQ ID NO: 1577163 - DNA, 25 bp, Homo sapien
tagaaatcctatatgatccagcacc

SEQ ID NO: 1577164 - DNA, 25 bp, Homo sapien
ggttgcttcgatccatgaatacaga

SEQ ID NO: 1577165 - DNA, 25 bp, Homo sapien
catcaaaagcccaggtaacagaagt

SEQ ID NO: 1577166 - DNA, 25 bp, Homo sapien
aaggcatagtgtttgaatataacct

SEQ ID NO: 1577167 - DNA, 25 bp, Homo sapien
agaggtccctcacataaaaaggcat

SEQ ID NO: 1577168 - DNA, 25 bp, Homo sapien
gctcaagaggtccctcacataaaaa

SEQ ID NO: 1577169 - DNA, 25 bp, Homo sapien
gacaacttaggtaaggcaagcggat

SEQ ID NO: 1577170 - DNA, 25 bp, Homo sapien
cccacagagggttgcatctgaaaca

SEQ ID NO: 1577171 - DNA, 25 bp, Homo sapien
gagagaacttgggtagggtcccaca

SEQ ID NO: 1577172 - DNA, 25 bp, Homo sapien
tggagtgtgaaagcccactagcctt

SEQ ID NO: 1577173 - DNA, 25 bp, Homo sapien
ttctctagggtgaacatgctggcac

SEQ ID NO: 1577174 - DNA, 25 bp, Homo sapien
cacgaaatgaggttatgctaatggc

SEQ ID NO: 1577175 - DNA, 25 bp, Homo sapien
tgggaaaggccccagtcaagttgaa

SEQ ID NO: 1577176 - DNA, 25 bp, Homo sapien
gactaaaatgctacacaccatggct

SEQ ID NO: 1577177 - DNA, 25 bp, Homo sapien
tagcccaatgtgtagctgggcccag

SEQ ID NO: 1577178 - DNA, 25 bp, Homo sapien
tagtctgcctagcaatgtatctgcc

SEQ ID NO: 1577179 - DNA, 25 bp, Homo sapien
tggactctacttggaactggcagct

SEQ ID NO: 1577180 - DNA, 25 bp, Homo sapien
gataaccaatactttcccctggaga

SEQ ID NO: 1577181 - DNA, 25 bp, Homo sapien
tggtcttccacgcatagcggtcagc

SEQ ID NO: 1577182 - DNA, 25 bp, Homo sapien
tcccggaaggcagtctagaacaagt

SEQ ID NO: 1577183 - DNA, 25 bp, Homo sapien
gaacatccgaaggaacatggccaac

SEQ ID NO: 1577184 - DNA, 25 bp, Homo sapien
gggcttcattggcttttaaacggca

SEQ ID NO: 1577185 - DNA, 25 bp, Homo sapien
gctttttcacctcagtctcgactca

SEQ ID NO: 1577186 - DNA, 25 bp, Homo sapien
aaggtgaacagatcccaacgcagcc

SEQ ID NO: 1577187 - DNA, 25 bp, Homo sapien
ccatattgacaaccccaggaggcgt

SEQ ID NO: 1577188 - DNA, 25 bp, Homo sapien
ctcagtctcgactcagcctgaaggt

SEQ ID NO: 1577189 - DNA, 25 bp, Homo sapien
ctgcaaccgattcaaccgagcctca

SEQ ID NO: 1577190 - DNA, 25 bp, Homo sapien
gcaaccgattcaaccgagcctcact

SEQ ID NO: 1577191 - DNA, 25 bp, Homo sapien
tgcaaccgattcaaccgagcctcac

SEQ ID NO: 1577192 - DNA, 25 bp, Homo sapien
cagtgacctggacgctgacagaggc

SEQ ID NO: 1577193 - DNA, 25 bp, Homo sapien
gggcgggagcggcagtgacctggac

SEQ ID NO: 1577194 - DNA, 25 bp, Homo sapien
agcggcagtgacctggacgctgaca

SEQ ID NO: 1577195 - DNA, 25 bp, Homo sapien
ctggacgctgacagaggcaccaacg

SEQ ID NO: 1577196 - DNA, 25 bp, Homo sapien
tcggggcttcggcactcggaggagg

SEQ ID NO: 1577197 - DNA, 25 bp, Homo sapien
tcctcggggcttcggcactcggagg

SEQ ID NO: 1577198 - DNA, 25 bp, Homo sapien
cttcggcactcggaggagggatcgg

SEQ ID NO: 1577199 - DNA, 25 bp, Homo sapien
ggcttcggcactcggaggagggatc

SEQ ID NO: 1577200 - DNA, 25 bp, Homo sapien
tctggccctgcaactagagcaaagt

SEQ ID NO: 1577201 - DNA, 25 bp, Homo sapien
gagcaaagttatctgagggtacaca

SEQ ID NO: 1577202 - DNA, 25 bp, Homo sapien
tgaacttccttaagtctcggtgccc

SEQ ID NO: 1577203 - DNA, 25 bp, Homo sapien
gcaggccatgaggattaagacagca

SEQ ID NO: 1577204 - DNA, 25 bp, Homo sapien
tgtctctgaacgtcattaagaattc

SEQ ID NO: 1577205 - DNA, 25 bp, Homo sapien
tctgaacgtcattaagaattcccca

SEQ ID NO: 1577206 - DNA, 25 bp, Homo sapien
caggtgtctctgaacgtcattaaga

SEQ ID NO: 1577207 - DNA, 25 bp, Homo sapien
acgtcattaagaattccccactcct

SEQ ID NO: 1577208 - DNA, 25 bp, Homo sapien
ctaaaacagaaatgctcatgaagtg

SEQ ID NO: 1577209 - DNA, 25 bp, Homo sapien
aaacagaaatgctcatgaagtgcat

SEQ ID NO: 1577210 - DNA, 25 bp, Homo sapien
aacacattgcttggaaggtgcctcc

SEQ ID NO: 1577211 - DNA, 25 bp, Homo sapien
tcatccttggctccatgccaacaac

SEQ ID NO: 1577212 - DNA, 25 bp, Homo sapien
ctacagaaacacattgcttggaagg

SEQ ID NO: 1577213 - DNA, 25 bp, Homo sapien
agaaacacattgcttggaaggtgcc

SEQ ID NO: 1577214 - DNA, 25 bp, Homo sapien
ctttcccacattgggtgcagctgta

SEQ ID NO: 1577215 - DNA, 25 bp, Homo sapien
tctaatgagtgtggaacggtatcta

SEQ ID NO: 1577216 - DNA, 25 bp, Homo sapien
tgtcattcacaaacgaaggcctccc

SEQ ID NO: 1577217 - DNA, 25 bp, Homo sapien
ccttttggtgcaggtaaagcttggc

SEQ ID NO: 1577218 - DNA, 25 bp, Homo sapien
gtgtgaagcaatacctaaagaattt

SEQ ID NO: 1577219 - DNA, 25 bp, Homo sapien
cagtgtgaagcaatacctaaagaat

SEQ ID NO: 1577220 - DNA, 25 bp, Homo sapien
agtgtgaagcaatacctaaagaatt

SEQ ID NO: 1577221 - DNA, 25 bp, Homo sapien
tgtatcaagtgtggagcgacatcta

SEQ ID NO: 1577222 - DNA, 25 bp, Homo sapien
tgtaagttctttccctagtgtgaac

SEQ ID NO: 1577223 - DNA, 25 bp, Homo sapien
cgaatgaggtgggaattttggctaa

SEQ ID NO: 1577224 - DNA, 25 bp, Homo sapien
tctccaaagtgatttctccgatgtc

SEQ ID NO: 1577225 - DNA, 25 bp, Homo sapien
cttatatgaggtacccggactagta

SEQ ID NO: 1577226 - DNA, 25 bp, Homo sapien
taaaattcatacagagcggtgcttg

SEQ ID NO: 1577227 - DNA, 25 bp, Homo sapien
aaggatggaaattctaatggattag

SEQ ID NO: 1577228 - DNA, 25 bp, Homo sapien
aacgtaggtcccagtgctaaatcag

SEQ ID NO: 1577229 - DNA, 25 bp, Homo sapien
tgtgccggcctagacaaatgtgtgt

SEQ ID NO: 1577230 - DNA, 25 bp, Homo sapien
aaatgacattatcctgatcctgtgc

SEQ ID NO: 1577231 - DNA, 25 bp, Homo sapien
atttaattttgtccagccgggcacg

SEQ ID NO: 1577232 - DNA, 25 bp, Homo sapien
gcacagtaacaacctaggccttcac

SEQ ID NO: 1577233 - DNA, 25 bp, Homo sapien
cacggcgcgattttggatagaagtc

SEQ ID NO: 1577234 - DNA, 25 bp, Homo sapien
ggcaggatctagacaccagctattc

SEQ ID NO: 1577235 - DNA, 25 bp, Homo sapien
taccaataatcaaattcacggcgcg

SEQ ID NO: 1577236 - DNA, 25 bp, Homo sapien
catgccccagggatataacatacct

SEQ ID NO: 1577237 - DNA, 25 bp, Homo sapien
tgagcccaggggttccaggtggcag

SEQ ID NO: 1577238 - DNA, 25 bp, Homo sapien
cagcttaggggacagagtgagatcc

SEQ ID NO: 1577239 - DNA, 25 bp, Homo sapien
caggggttccaggtggcagtgagct

SEQ ID NO: 1577240 - DNA, 25 bp, Homo sapien
cccaggggttccaggtggcagtgag

SEQ ID NO: 1577241 - DNA, 25 bp, Homo sapien
ttggacccaggatgaattaacagct

SEQ ID NO: 1577242 - DNA, 25 bp, Homo sapien
taagaggcttcagatcatgagggct

SEQ ID NO: 1577243 - DNA, 25 bp, Homo sapien
ggtggactaatgctatcatcgcaag

SEQ ID NO: 1577244 - DNA, 25 bp, Homo sapien
tggataggcagctacagggcacctt

SEQ ID NO: 1577245 - DNA, 25 bp, Homo sapien
gatcgtctaaattgaaatcgtctcc

SEQ ID NO: 1577246 - DNA, 25 bp, Homo sapien
cagtgccagcacttattggatcgtc

SEQ ID NO: 1577247 - DNA, 25 bp, Homo sapien
tcatgctgtagaaccaggcctaagg

SEQ ID NO: 1577248 - DNA, 25 bp, Homo sapien
ggaagtagccacctatcatgctgta

SEQ ID NO: 1577249 - DNA, 25 bp, Homo sapien
acagaggtcctttatgctttgctct

SEQ ID NO: 1577250 - DNA, 25 bp, Homo sapien
catgggccatagtcatcaaacaggt

SEQ ID NO: 1577251 - DNA, 25 bp, Homo sapien
acaggtatagtaaccacagaggtcc

SEQ ID NO: 1577252 - DNA, 25 bp, Homo sapien
gctcttcacaccttgtcaaatccat

SEQ ID NO: 1577253 - DNA, 25 bp, Homo sapien
agaggtcccagtgaaataacgtcta

SEQ ID NO: 1577254 - DNA, 25 bp, Homo sapien
gaggtcccagtgaaataacgtctaa

SEQ ID NO: 1577255 - DNA, 25 bp, Homo sapien
taggtagccatgctaacgcaaccat

SEQ ID NO: 1577256 - DNA, 25 bp, Homo sapien
tagccatgctaacgcaaccatgagg

SEQ ID NO: 1577257 - DNA, 25 bp, Homo sapien
ccctaggtagccatgctaacgcaac

SEQ ID NO: 1577258 - DNA, 25 bp, Homo sapien
ggtagccatgctaacgcaaccatga

SEQ ID NO: 1577259 - DNA, 25 bp, Homo sapien
tttcacctcagtcccgacccagagc

SEQ ID NO: 1577260 - DNA, 25 bp, Homo sapien
ttctcgcgtttttccgctctttcac

SEQ ID NO: 1577261 - DNA, 25 bp, Homo sapien
ctgtgtagaaggaacaccgcttctc

SEQ ID NO: 1577262 - DNA, 25 bp, Homo sapien
tgtagaaggaacaccgcttctcgcg

SEQ ID NO: 1577263 - DNA, 25 bp, Homo sapien
ggggcgcctgcagccgactcagccg

SEQ ID NO: 1577264 - DNA, 25 bp, Homo sapien
ggcgcctgcagccgactcagccgat

SEQ ID NO: 1577265 - DNA, 25 bp, Homo sapien
gactcagccgatccgcactctagcc

SEQ ID NO: 1577266 - DNA, 25 bp, Homo sapien
ccgactcagccgatccgcactctag

SEQ ID NO: 1577267 - DNA, 25 bp, Homo sapien
cggtcaggttcatcggcgcggcctc

SEQ ID NO: 1577268 - DNA, 25 bp, Homo sapien
gtcaggttcatcggcgcggcctcct

SEQ ID NO: 1577269 - DNA, 25 bp, Homo sapien
ctcggtcaggttcatcggcgcggcc

SEQ ID NO: 1577270 - DNA, 25 bp, Homo sapien
tccagtccacccagggaagagcggg

SEQ ID NO: 1577271 - DNA, 25 bp, Homo sapien
ggggcggcctgggacgctgcacgca

SEQ ID NO: 1577272 - DNA, 25 bp, Homo sapien
gggcggcctgggacgctgcacgcac

SEQ ID NO: 1577273 - DNA, 25 bp, Homo sapien
ggcggctccttgggacttcagcact

SEQ ID NO: 1577274 - DNA, 25 bp, Homo sapien
gggcggctccttgggacttcagcac

SEQ ID NO: 1577275 - DNA, 25 bp, Homo sapien
cttggagacaaagacgctcgggctc

SEQ ID NO: 1577276 - DNA, 25 bp, Homo sapien
ccaagccccagagacgtgtcggtct

SEQ ID NO: 1577277 - DNA, 25 bp, Homo sapien
aacttctaactctgggcgtgaccct

SEQ ID NO: 1577278 - DNA, 25 bp, Homo sapien
agtgccgcccgttctgcagtgcctc

SEQ ID NO: 1577279 - DNA, 25 bp, Homo sapien
taagacattctgttcctgactagct

SEQ ID NO: 1577280 - DNA, 25 bp, Homo sapien
gacctgtctgacctacacaaaatgt

SEQ ID NO: 1577281 - DNA, 25 bp, Homo sapien
cacatccctgaacctatgcctgagg

SEQ ID NO: 1577282 - DNA, 25 bp, Homo sapien
aaaaagcaaacacttgtcactgtgg

SEQ ID NO: 1577283 - DNA, 25 bp, Homo sapien
gcagggtccttatgcattgctgcca

SEQ ID NO: 1577284 - DNA, 25 bp, Homo sapien
acttgtgcctgggtcgtgactgcct

SEQ ID NO: 1577285 - DNA, 25 bp, Homo sapien
tgtggcagacttgtacagttactac

SEQ ID NO: 1577286 - DNA, 25 bp, Homo sapien
cttgagaccatcattacgagactga

SEQ ID NO: 1577287 - DNA, 25 bp, Homo sapien
atgacaaaagcgcaaagttctccaa

SEQ ID NO: 1577288 - DNA, 25 bp, Homo sapien
tctctgagcatcattaaggatcccc

SEQ ID NO: 1577289 - DNA, 25 bp, Homo sapien
caggtgtctctgagcatcattaagg

SEQ ID NO: 1577290 - DNA, 25 bp, Homo sapien
tgacaaaagcgcaaagttctccaac

SEQ ID NO: 1577291 - DNA, 25 bp, Homo sapien
tgcacgtgaactccggagggaggag

SEQ ID NO: 1577292 - DNA, 25 bp, Homo sapien
aagtgcacgtgaactccggagggag

SEQ ID NO: 1577293 - DNA, 25 bp, Homo sapien
ctggtgaagtgcacgtgaactccgg

SEQ ID NO: 1577294 - DNA, 25 bp, Homo sapien
tgaagtgcacgtgaactccggaggg

SEQ ID NO: 1577295 - DNA, 25 bp, Homo sapien
ctggctttggaattgtgacctgtaa

SEQ ID NO: 1577296 - DNA, 25 bp, Homo sapien
tggctttggaattgtgacctgtaac

SEQ ID NO: 1577297 - DNA, 25 bp, Homo sapien
gctggctttggaattgtgacctgta

SEQ ID NO: 1577298 - DNA, 25 bp, Homo sapien
aagctggctttggaattgtgacctg

SEQ ID NO: 1577299 - DNA, 25 bp, Homo sapien
atgtgtacagcccttgctcagggtg

SEQ ID NO: 1577300 - DNA, 25 bp, Homo sapien
atgtccttcagaattgagctacaca

SEQ ID NO: 1577301 - DNA, 25 bp, Homo sapien
tacagcccttgctcagggtgtgttc

SEQ ID NO: 1577302 - DNA, 25 bp, Homo sapien
tgtccttcagaattgagctacacat

SEQ ID NO: 1577303 - DNA, 25 bp, Homo sapien
cactgtttaagacctgttgctggag

SEQ ID NO: 1577304 - DNA, 25 bp, Homo sapien
tgggtatccctgtacagcttccacc

SEQ ID NO: 1577305 - DNA, 25 bp, Homo sapien
tccttttggtgcaggtcatgctctg

SEQ ID NO: 1577306 - DNA, 25 bp, Homo sapien
gtgagcactgtggttcacaaatgaa

SEQ ID NO: 1577307 - DNA, 25 bp, Homo sapien
tgttggtggcaaaagtctttcccac

SEQ ID NO: 1577308 - DNA, 25 bp, Homo sapien
tgtctaccgagtgtgaagctgtcca

SEQ ID NO: 1577309 - DNA, 25 bp, Homo sapien
tgagaatctcctgatgttcaatggg

SEQ ID NO: 1577310 - DNA, 25 bp, Homo sapien
ctctggtgcatattgagtgtggagc

SEQ ID NO: 1577311 - DNA, 25 bp, Homo sapien
cataaggtgttggtctactgagaat

SEQ ID NO: 1577312 - DNA, 25 bp, Homo sapien
gactttctaacaaaggccttctcac

SEQ ID NO: 1577313 - DNA, 25 bp, Homo sapien
ggactttctaacaaaggccttctca

SEQ ID NO: 1577314 - DNA, 25 bp, Homo sapien
cagtgtgagttttttggcgctgacc

SEQ ID NO: 1577315 - DNA, 25 bp, Homo sapien
gcggtatctaagaaacttcccacag

SEQ ID NO: 1577316 - DNA, 25 bp, Homo sapien
gactttctaacaaaggccttcgcac

SEQ ID NO: 1577317 - DNA, 25 bp, Homo sapien
cactgcatgtataaggccttggcct

SEQ ID NO: 1577318 - DNA, 25 bp, Homo sapien
catatattaataggttcttggtccg

SEQ ID NO: 1577319 - DNA, 25 bp, Homo sapien
ggtagtgatgctggcccggttccta

SEQ ID NO: 1577320 - DNA, 25 bp, Homo sapien
tcttggtccgatgtgaaccttttgg

SEQ ID NO: 1577321 - DNA, 25 bp, Homo sapien
gacaacaatgcgaatgacttaacac

SEQ ID NO: 1577322 - DNA, 25 bp, Homo sapien
tgactcaaccagaggggtcccgcaa

SEQ ID NO: 1577323 - DNA, 25 bp, Homo sapien
gcttcgttcatgttagtgccctata

SEQ ID NO: 1577324 - DNA, 25 bp, Homo sapien
tataaaggagtacttctatacaggc

SEQ ID NO: 1577325 - DNA, 25 bp, Homo sapien
agttcatgaagtaaaaacgttacag

SEQ ID NO: 1577326 - DNA, 25 bp, Homo sapien
taaaactcctagaaaataacatgaa

SEQ ID NO: 1577327 - DNA, 25 bp, Homo sapien
tataatacgtacatgttaaccactc

SEQ ID NO: 1577328 - DNA, 25 bp, Homo sapien
gacaagagcgcaaaaacttattaag

SEQ ID NO: 1577329 - DNA, 25 bp, Homo sapien
aataaagaggccagacggaagtcct

SEQ ID NO: 1577330 - DNA, 25 bp, Homo sapien
ccaaagttggatgatgtctgcaccc

SEQ ID NO: 1577331 - DNA, 25 bp, Homo sapien
cgcccgaagggatcagactcaataa

SEQ ID NO: 1577332 - DNA, 25 bp, Homo sapien
ctaagcattttaaggtgatacacac

SEQ ID NO: 1577333 - DNA, 25 bp, Homo sapien
tatagtcacgtggaaattgactggg

SEQ ID NO: 1577334 - DNA, 25 bp, Homo sapien
gcttcccgtataatcctttcaggtg

SEQ ID NO: 1577335 - DNA, 25 bp, Homo sapien
gctatgtctccttaacacaggatga

SEQ ID NO: 1577336 - DNA, 25 bp, Homo sapien
tctgtagactccagctaccttggca

SEQ ID NO: 1577337 - DNA, 25 bp, Homo sapien
taccttggcaaaccgagactcttag

SEQ ID NO: 1577338 - DNA, 25 bp, Homo sapien
tacagatatggctccttcaagagga

SEQ ID NO: 1577339 - DNA, 25 bp, Homo sapien
taactctggagcatcaggctacacg

SEQ ID NO: 1577340 - DNA, 25 bp, Homo sapien
tgagcattctctgcgtaaggaaggc

SEQ ID NO: 1577341 - DNA, 25 bp, Homo sapien
tgaggctcgccaaactaactctgga

SEQ ID NO: 1577342 - DNA, 25 bp, Homo sapien
gttgaggttacgcacgggaattcca

SEQ ID NO: 1577343 - DNA, 25 bp, Homo sapien
gagcaactagcctcctttcaattta

SEQ ID NO: 1577344 - DNA, 25 bp, Homo sapien
tgcagacttttcacctgagatcaac

SEQ ID NO: 1577345 - DNA, 25 bp, Homo sapien
gagatcaactttctttggccttgag

SEQ ID NO: 1577346 - DNA, 25 bp, Homo sapien
ccatccttcattgagccttagggct

SEQ ID NO: 1577347 - DNA, 25 bp, Homo sapien
tgtgcaatgtgcaatggcccatcct

SEQ ID NO: 1577348 - DNA, 25 bp, Homo sapien
agcttggcttccgtcttgggattga

SEQ ID NO: 1577349 - DNA, 25 bp, Homo sapien
tgagccttagggcttctgtgaagtc

SEQ ID NO: 1577350 - DNA, 25 bp, Homo sapien
tagagctgtatgtactgcatatggc

SEQ ID NO: 1577351 - DNA, 25 bp, Homo sapien
gtaagtcattcacccatcaaggagg

SEQ ID NO: 1577352 - DNA, 25 bp, Homo sapien
ccttcattagaattctgtcaggatg

SEQ ID NO: 1577353 - DNA, 25 bp, Homo sapien
tgaatctggtaaatgctcatccacc

SEQ ID NO: 1577354 - DNA, 25 bp, Homo sapien
gcctgcataacaatatggaataggc

SEQ ID NO: 1577355 - DNA, 25 bp, Homo sapien
cagcctgcataacaatatggaatag

SEQ ID NO: 1577356 - DNA, 25 bp, Homo sapien
cctgcataacaatatggaataggca

SEQ ID NO: 1577357 - DNA, 25 bp, Homo sapien
agcctgcataacaatatggaatagg

SEQ ID NO: 1577358 - DNA, 25 bp, Homo sapien
acggggcggctggcccggcagaggg

SEQ ID NO: 1577359 - DNA, 25 bp, Homo sapien
ggggcggctggcccggcagaggggc

SEQ ID NO: 1577360 - DNA, 25 bp, Homo sapien
cggctggcccggcagaggggctcct

SEQ ID NO: 1577361 - DNA, 25 bp, Homo sapien
acctcccggatggggtggctggccg

SEQ ID NO: 1577362 - DNA, 25 bp, Homo sapien
cataccacccaaatacaccattctc

SEQ ID NO: 1577363 - DNA, 25 bp, Homo sapien
ccttgaaaatattggtctggttttg

SEQ ID NO: 1577364 - DNA, 25 bp, Homo sapien
tttgccaagtccacattctacctgg

SEQ ID NO: 1577365 - DNA, 25 bp, Homo sapien
ggttttgtagaatttgccaagtcca

SEQ ID NO: 1577366 - DNA, 25 bp, Homo sapien
accagcttctcgcaggttagttcac

SEQ ID NO: 1577367 - DNA, 25 bp, Homo sapien
tagttcacctgagtcgcgaaagtga

SEQ ID NO: 1577368 - DNA, 25 bp, Homo sapien
cctctgagcggcgagaacagcgtga

SEQ ID NO: 1577369 - DNA, 25 bp, Homo sapien
ggcgctggtcgcctcagcgcacaac

SEQ ID NO: 1577370 - DNA, 25 bp, Homo sapien
ggtccctcagggcggccgccgccat

SEQ ID NO: 1577371 - DNA, 25 bp, Homo sapien
gagcggggtccctcagggcggccgc

SEQ ID NO: 1577372 - DNA, 25 bp, Homo sapien
ctgagcggggtccctcagggcggcc

SEQ ID NO: 1577373 - DNA, 25 bp, Homo sapien
gggtccctcagggcggccgccgcca

SEQ ID NO: 1577374 - DNA, 25 bp, Homo sapien
ctcctcatggtctgtaagcaagtct

SEQ ID NO: 1577375 - DNA, 25 bp, Homo sapien
tggtctgtaagcaagtctgcagcca

SEQ ID NO: 1577376 - DNA, 25 bp, Homo sapien
tcatggtctgtaagcaagtctgcag

SEQ ID NO: 1577377 - DNA, 25 bp, Homo sapien
gtctgtaagcaagtctgcagccaca

SEQ ID NO: 1577378 - DNA, 25 bp, Homo sapien
aatatatagtctggactcagggccc

SEQ ID NO: 1577379 - DNA, 25 bp, Homo sapien
gaattgcacacatatcaggacacct

SEQ ID NO: 1577380 - DNA, 25 bp, Homo sapien
gatctgaggttgtctaagcattccc

SEQ ID NO: 1577381 - DNA, 25 bp, Homo sapien
catgttggccttatacccgctgatg

SEQ ID NO: 1577382 - DNA, 25 bp, Homo sapien
tgagcgtcatcaagcaatctccatt

SEQ ID NO: 1577383 - DNA, 25 bp, Homo sapien
ctgagcgtcatcaagcaatctccat

SEQ ID NO: 1577384 - DNA, 25 bp, Homo sapien
gcgtcatcaagcaatctccattcct

SEQ ID NO: 1577385 - DNA, 25 bp, Homo sapien
gagcgtcatcaagcaatctccattc

SEQ ID NO: 1577386 - DNA, 25 bp, Homo sapien
gagtgcccacagttcagctttggga

SEQ ID NO: 1577387 - DNA, 25 bp, Homo sapien
aatgagtgcccacagttcagctttg

SEQ ID NO: 1577388 - DNA, 25 bp, Homo sapien
gaatgagtgcccacagttcagcttt

SEQ ID NO: 1577389 - DNA, 25 bp, Homo sapien
tgagtgcccacagttcagctttggg

SEQ ID NO: 1577390 - DNA, 25 bp, Homo sapien
gtcacaacttcccaagcaggcatga

SEQ ID NO: 1577391 - DNA, 25 bp, Homo sapien
actccagctgggttatttcatgggt

SEQ ID NO: 1577392 - DNA, 25 bp, Homo sapien
tccagctgggttatttcatgggtct

SEQ ID NO: 1577393 - DNA, 25 bp, Homo sapien
acttcccaagcaggcatgaagggct

SEQ ID NO: 1577394 - DNA, 25 bp, Homo sapien
gaatggccctaggtcaaacatcaga

SEQ ID NO: 1577395 - DNA, 25 bp, Homo sapien
aaatatctgggcctactggtatgat

SEQ ID NO: 1577396 - DNA, 25 bp, Homo sapien
acatcagaatagatataaatgggtg

SEQ ID NO: 1577397 - DNA, 25 bp, Homo sapien
atagaaatcagcgacaaccccttgc

SEQ ID NO: 1577398 - DNA, 25 bp, Homo sapien
gcaatctgctcaggagcctcctcag

SEQ ID NO: 1577399 - DNA, 25 bp, Homo sapien
agcctcctcagcctcggctccatgc

SEQ ID NO: 1577400 - DNA, 25 bp, Homo sapien
tcagcctcggctccatgccaacaac

SEQ ID NO: 1577401 - DNA, 25 bp, Homo sapien
tacagaagcaatctgctcaggagcc

SEQ ID NO: 1577402 - DNA, 25 bp, Homo sapien
ggagctcctatgtgacttctctcct

SEQ ID NO: 1577403 - DNA, 25 bp, Homo sapien
gcttctggtgttgctgaatgtttga

SEQ ID NO: 1577404 - DNA, 25 bp, Homo sapien
gtgtataaaaaggttggacatatct

SEQ ID NO: 1577405 - DNA, 25 bp, Homo sapien
aaggttggacatatctctaaataac

SEQ ID NO: 1577406 - DNA, 25 bp, Homo sapien
ggacatatctctaaataacttccca

SEQ ID NO: 1577407 - DNA, 25 bp, Homo sapien
taaaaaggttggacatatctctaaa

SEQ ID NO: 1577408 - DNA, 25 bp, Homo sapien
acccgtaaggcctttctccagtgtg

SEQ ID NO: 1577409 - DNA, 25 bp, Homo sapien
ctacacccgtaaggcctttctccag

SEQ ID NO: 1577410 - DNA, 25 bp, Homo sapien
acacccgtaaggcctttctccagtg

SEQ ID NO: 1577411 - DNA, 25 bp, Homo sapien
ccgtaaggcctttctccagtgtgaa

SEQ ID NO: 1577412 - DNA, 25 bp, Homo sapien
gatgtctaactagggtggaattctc

SEQ ID NO: 1577413 - DNA, 25 bp, Homo sapien
ttcgatgttgcatgagggttgagct

SEQ ID NO: 1577414 - DNA, 25 bp, Homo sapien
ctagggtggaattctctctaaagaa

SEQ ID NO: 1577415 - DNA, 25 bp, Homo sapien
accctctgatgtctaactagggtgg

SEQ ID NO: 1577416 - DNA, 25 bp, Homo sapien
tccattcgacgggtacagccaagaa

SEQ ID NO: 1577417 - DNA, 25 bp, Homo sapien
taaactgtccagtgttgaatgagac

SEQ ID NO: 1577418 - DNA, 25 bp, Homo sapien
gaggtgtggctaacggatttccatc

SEQ ID NO: 1577419 - DNA, 25 bp, Homo sapien
gaggttgaaacgctggctaaaggat

SEQ ID NO: 1577420 - DNA, 25 bp, Homo sapien
tctcttgagggcagcgaaagcaacc

SEQ ID NO: 1577421 - DNA, 25 bp, Homo sapien
tccggcaagctgagttctcttgagg

SEQ ID NO: 1577422 - DNA, 25 bp, Homo sapien
agctggtcgccgcagcgaacaacca

SEQ ID NO: 1577423 - DNA, 25 bp, Homo sapien
gaacaaccagcttccggcaagctga

SEQ ID NO: 1577424 - DNA, 25 bp, Homo sapien
tctgagctgcgagaacacagcgcgt

SEQ ID NO: 1577425 - DNA, 25 bp, Homo sapien
tcagacccgcctctgagctgcgaga

SEQ ID NO: 1577426 - DNA, 25 bp, Homo sapien
ctgtggcggtgagacaacgaccgag

SEQ ID NO: 1577427 - DNA, 25 bp, Homo sapien
cggtgagacaacgaccgaggaaagg

SEQ ID NO: 1577428 - DNA, 25 bp, Homo sapien
tgagcggggtccctcagcgtggccg

SEQ ID NO: 1577429 - DNA, 25 bp, Homo sapien
ctgagcggggtccctcagcgtggcc

SEQ ID NO: 1577430 - DNA, 25 bp, Homo sapien
cggggtccctcagcgtggccgccgc

SEQ ID NO: 1577431 - DNA, 25 bp, Homo sapien
ggtccctcagcgtggccgccgccat

SEQ ID NO: 1577432 - DNA, 25 bp, Homo sapien
tctcatggtctataactaactctga

SEQ ID NO: 1577433 - DNA, 25 bp, Homo sapien
cttctcatggtctataactaactct

SEQ ID NO: 1577434 - DNA, 25 bp, Homo sapien
catggtctataactaactctgaagt

SEQ ID NO: 1577435 - DNA, 25 bp, Homo sapien
ggtctataactaactctgaagtcac

SEQ ID NO: 1577436 - DNA, 25 bp, Homo sapien
gcgtcatcaagcaatctccattcct

SEQ ID NO: 1577437 - DNA, 25 bp, Homo sapien
gagcgtcatcaagcaatctccattc

SEQ ID NO: 1577438 - DNA, 25 bp, Homo sapien
ctgagcgtcatcaagcaatctccat

SEQ ID NO: 1577439 - DNA, 25 bp, Homo sapien
tgagcgtcatcaagcaatctccatt

SEQ ID NO: 1577440 - DNA, 25 bp, Homo sapien
actccagctgggttatttcatgggt

SEQ ID NO: 1577441 - DNA, 25 bp, Homo sapien
gtcacaacttcccaagcaggcatga

SEQ ID NO: 1577442 - DNA, 25 bp, Homo sapien
tccagctgggttatttcatgggtct

SEQ ID NO: 1577443 - DNA, 25 bp, Homo sapien
acttcccaagcaggcatgaagggct

SEQ ID NO: 1577444 - DNA, 25 bp, Homo sapien
tcctatgtgacttctctcccgtgtg

SEQ ID NO: 1577445 - DNA, 25 bp, Homo sapien
tgagctggtcagaagatccttccca

SEQ ID NO: 1577446 - DNA, 25 bp, Homo sapien
cagaagcactctgctcagcagctgc

SEQ ID NO: 1577447 - DNA, 25 bp, Homo sapien
ttgctgaacgtttgaactgggcact

SEQ ID NO: 1577448 - DNA, 25 bp, Homo sapien
ggctggaattctcactaaagaatct

SEQ ID NO: 1577449 - DNA, 25 bp, Homo sapien
gaattctcactaaagaatctcccac

SEQ ID NO: 1577450 - DNA, 25 bp, Homo sapien
tgtttaacaaggctggaattctcac

SEQ ID NO: 1577451 - DNA, 25 bp, Homo sapien
taacaaggctggaattctcactaaa

SEQ ID NO: 1577452 - DNA, 25 bp, Homo sapien
attccctgcactcataaggctttgc

SEQ ID NO: 1577453 - DNA, 25 bp, Homo sapien
tcataaggctttgctccagtgtgaa

SEQ ID NO: 1577454 - DNA, 25 bp, Homo sapien
ataaggctttgctccagtgtgaacc

SEQ ID NO: 1577455 - DNA, 25 bp, Homo sapien
tccctgcactcataaggctttgctc

SEQ ID NO: 1577456 - DNA, 25 bp, Homo sapien
cagtgtgaatccttcgatgtttaac

SEQ ID NO: 1577457 - DNA, 25 bp, Homo sapien
tccttcgatgtttaacaagactgga

SEQ ID NO: 1577458 - DNA, 25 bp, Homo sapien
caagactggagctgtggcgaaaaaa

SEQ ID NO: 1577459 - DNA, 25 bp, Homo sapien
gagctgtggcgaaaaaatttcccac

SEQ ID NO: 1577460 - DNA, 25 bp, Homo sapien
gctccaagacagagggctattttct

SEQ ID NO: 1577461 - DNA, 25 bp, Homo sapien
gagtaacatctgaatcgagaccact

SEQ ID NO: 1577462 - DNA, 25 bp, Homo sapien
tattgattcagcgacagtctaaggc

SEQ ID NO: 1577463 - DNA, 25 bp, Homo sapien
tcgactggtgcagccaatacagggc

SEQ ID NO: 1577464 - DNA, 25 bp, Homo sapien
tttgccgacctgttacgcagccaaa

SEQ ID NO: 1577465 - DNA, 25 bp, Homo sapien
aggagatttgccgacctgttacgca

SEQ ID NO: 1577466 - DNA, 25 bp, Homo sapien
gtgaggagatttgccgacctgttac

SEQ ID NO: 1577467 - DNA, 25 bp, Homo sapien
gatttgccgacctgttacgcagcca

SEQ ID NO: 1577468 - DNA, 25 bp, Homo sapien
gaccttcttcactcacgtccctgtt

SEQ ID NO: 1577469 - DNA, 25 bp, Homo sapien
cctgttcgggcgccacttgtggctg

SEQ ID NO: 1577470 - DNA, 25 bp, Homo sapien
tgttcgggcgccacttgtggctgtc

SEQ ID NO: 1577471 - DNA, 25 bp, Homo sapien
ttcttcactcacgtccctgttcggg

SEQ ID NO: 1577472 - DNA, 25 bp, Homo sapien
agttgagatccatggatttctccag

SEQ ID NO: 1577473 - DNA, 25 bp, Homo sapien
ctgggcccacagttgagatccatgg

SEQ ID NO: 1577474 - DNA, 25 bp, Homo sapien
ccatggatttctccagtctcccgtt

SEQ ID NO: 1577475 - DNA, 25 bp, Homo sapien
gagctgggcccacagttgagatcca

SEQ ID NO: 1577476 - DNA, 25 bp, Homo sapien
caggcatcacaaatcgattgggcat

SEQ ID NO: 1577477 - DNA, 25 bp, Homo sapien
gctgcaacttcaggctttgtatttg

SEQ ID NO: 1577478 - DNA, 25 bp, Homo sapien
gaatagggttaaaatgacaatgcaa

SEQ ID NO: 1577479 - DNA, 25 bp, Homo sapien
ttagtgtgactagggaaattatagc

SEQ ID NO: 1577480 - DNA, 25 bp, Homo sapien
acaaggaacactgcacgtggggtat

SEQ ID NO: 1577481 - DNA, 25 bp, Homo sapien
actgcacgtggggtatgactgccct

SEQ ID NO: 1577482 - DNA, 25 bp, Homo sapien
ggaacactgcacgtggggtatgact

SEQ ID NO: 1577483 - DNA, 25 bp, Homo sapien
aacactgcacgtggggtatgactgc

SEQ ID NO: 1577484 - DNA, 25 bp, Homo sapien
gactgacagcttgtgcaagggtttg

SEQ ID NO: 1577485 - DNA, 25 bp, Homo sapien
ccaaattagagggtgtttaggatca

SEQ ID NO: 1577486 - DNA, 25 bp, Homo sapien
tactttctgtcaaggcacttcctga

SEQ ID NO: 1577487 - DNA, 25 bp, Homo sapien
caaagcattaatgggaacaacccag

SEQ ID NO: 1577488 - DNA, 25 bp, Homo sapien
gaccttgatattaattatccttaga

SEQ ID NO: 1577489 - DNA, 25 bp, Homo sapien
tccttagatatctctatattgtggg

SEQ ID NO: 1577490 - DNA, 25 bp, Homo sapien
catgagtaattactcagagtaggac

SEQ ID NO: 1577491 - DNA, 25 bp, Homo sapien
caggaatatttttgctatacgcttg

SEQ ID NO: 1577492 - DNA, 25 bp, Homo sapien
taactgagtgcgttcctaggagctg

SEQ ID NO: 1577493 - DNA, 25 bp, Homo sapien
aatggttacacaaacatttacagga

SEQ ID NO: 1577494 - DNA, 25 bp, Homo sapien
ggtaccattaactgagtgcgttcct

SEQ ID NO: 1577495 - DNA, 25 bp, Homo sapien
ctggtacagcgtgcctcagtgtcta

SEQ ID NO: 1577496 - DNA, 25 bp, Homo sapien
gacgctcagaccgagaccaggcaag

SEQ ID NO: 1577497 - DNA, 25 bp, Homo sapien
tggcaaatcgctgggcgacgctcag

SEQ ID NO: 1577498 - DNA, 25 bp, Homo sapien
aggcaagctcctctgcgggcggaca

SEQ ID NO: 1577499 - DNA, 25 bp, Homo sapien
cggacgcgctcgcaggcagcaaaaa

SEQ ID NO: 1577500 - DNA, 25 bp, Homo sapien
cggcgtaatcactagcgctgcctcg

SEQ ID NO: 1577501 - DNA, 25 bp, Homo sapien
gcgtaatcactagcgctgcctcggc

SEQ ID NO: 1577502 - DNA, 25 bp, Homo sapien
taatcactagcgctgcctcggccat

SEQ ID NO: 1577503 - DNA, 25 bp, Homo sapien
ctgcggcgtaatcactagcgctgcc

SEQ ID NO: 1577504 - DNA, 25 bp, Homo sapien
ctgcagagacccacgcaggtgaccc

SEQ ID NO: 1577505 - DNA, 25 bp, Homo sapien
acccaggtgaggatccgaggactcc

SEQ ID NO: 1577506 - DNA, 25 bp, Homo sapien
tgaggatccgaggactccgctctca

SEQ ID NO: 1577507 - DNA, 25 bp, Homo sapien
aggtgaccccagtccggggcctcag

SEQ ID NO: 1577508 - DNA, 25 bp, Homo sapien
ctctgcgcgtgcagcccccacggta

SEQ ID NO: 1577509 - DNA, 25 bp, Homo sapien
cccacggtacgcaacgctctccctt

SEQ ID NO: 1577510 - DNA, 25 bp, Homo sapien
tcaccgcccgtcagctctgaggacc

SEQ ID NO: 1577511 - DNA, 25 bp, Homo sapien
ggtacgcaacgctctcccttcttca

SEQ ID NO: 1577512 - DNA, 25 bp, Homo sapien
ctgtgatggtttcacaaactcttct

SEQ ID NO: 1577513 - DNA, 25 bp, Homo sapien
ggtttcacaaactcttctgttacca

SEQ ID NO: 1577514 - DNA, 25 bp, Homo sapien
tgtgatggtttcacaaactcttctg

SEQ ID NO: 1577515 - DNA, 25 bp, Homo sapien
ttcacaaactcttctgttaccatgg

SEQ ID NO: 1577516 - DNA, 25 bp, Homo sapien
tgaagacctgggacttcttccactt

SEQ ID NO: 1577517 - DNA, 25 bp, Homo sapien
gaagacctgggacttcttccactta

SEQ ID NO: 1577518 - DNA, 25 bp, Homo sapien
cccatggctttagggaacagggcca

SEQ ID NO: 1577519 - DNA, 25 bp, Homo sapien
ggccagacccatggctttagggaac

SEQ ID NO: 1577520 - DNA, 25 bp, Homo sapien
gaaataatacaaggtctgctctgca

SEQ ID NO: 1577521 - DNA, 25 bp, Homo sapien
ccacggcagtgttggaatgatccta

SEQ ID NO: 1577522 - DNA, 25 bp, Homo sapien
tgaatacatatacagtcgtccccga

SEQ ID NO: 1577523 - DNA, 25 bp, Homo sapien
aatgatcctagagaccccacgaagg

SEQ ID NO: 1577524 - DNA, 25 bp, Homo sapien
ctactgaggccataagcgaaaagtt

SEQ ID NO: 1577525 - DNA, 25 bp, Homo sapien
tactgaggccataagcgaaaagttc

SEQ ID NO: 1577526 - DNA, 25 bp, Homo sapien
tgaggccataagcgaaaagttctcc

SEQ ID NO: 1577527 - DNA, 25 bp, Homo sapien
ctgaggccataagcgaaaagttctc

SEQ ID NO: 1577528 - DNA, 25 bp, Homo sapien
tccattacaaatacctgtggaacac

SEQ ID NO: 1577529 - DNA, 25 bp, Homo sapien
cagggagggacgagtccatggtttt

SEQ ID NO: 1577530 - DNA, 25 bp, Homo sapien
gcaagtgaagtatatgcagactttg

SEQ ID NO: 1577531 - DNA, 25 bp, Homo sapien
ggtagaagggaacagctccattaca

SEQ ID NO: 1577532 - DNA, 25 bp, Homo sapien
gacctagctttggagtcctggcctg

SEQ ID NO: 1577533 - DNA, 25 bp, Homo sapien
tgtgacactccttgcgcagaaagag

SEQ ID NO: 1577534 - DNA, 25 bp, Homo sapien
tgtgaattctctgctggtgcccaac

SEQ ID NO: 1577535 - DNA, 25 bp, Homo sapien
gaagtgtcccctgatgctcactgag

SEQ ID NO: 1577536 - DNA, 25 bp, Homo sapien
tacatcagcacatggtaagacagcc

SEQ ID NO: 1577537 - DNA, 25 bp, Homo sapien
tctggatgcacctttggatgggaca

SEQ ID NO: 1577538 - DNA, 25 bp, Homo sapien
tctcagcagtggcaataaacgggaa

SEQ ID NO: 1577539 - DNA, 25 bp, Homo sapien
taaacaattcatgcaggtcccagca

SEQ ID NO: 1577540 - DNA, 25 bp, Homo sapien
tatcagttgaataacaatctttcca

SEQ ID NO: 1577541 - DNA, 25 bp, Homo sapien
gaactctttcaatgtgttaaggtca

SEQ ID NO: 1577542 - DNA, 25 bp, Homo sapien
ataacagcagagaaatactgtaggc

SEQ ID NO: 1577543 - DNA, 25 bp, Homo sapien
aattaagtatgcgtaagggatggcg

SEQ ID NO: 1577544 - DNA, 25 bp, Homo sapien
tctcccataagatggacaaaagtgt

SEQ ID NO: 1577545 - DNA, 25 bp, Homo sapien
caagtatattatatgggctagtccc

SEQ ID NO: 1577546 - DNA, 25 bp, Homo sapien
catgagaaatgtaccttgcagctga

SEQ ID NO: 1577547 - DNA, 25 bp, Homo sapien
tcaatggtctactcatatgttggcc

SEQ ID NO: 1577548 - DNA, 25 bp, Homo sapien
gaggtaaaacgttttcatgttcatg

SEQ ID NO: 1577549 - DNA, 25 bp, Homo sapien
cagaggtaaaacgttttcatgttca

SEQ ID NO: 1577550 - DNA, 25 bp, Homo sapien
agcactatgctcttatgctgcttaa

SEQ ID NO: 1577551 - DNA, 25 bp, Homo sapien
ctcttatgctgcttaatctgtgaga

SEQ ID NO: 1577552 - DNA, 25 bp, Homo sapien
caagaactaggcatttggccacacc

SEQ ID NO: 1577553 - DNA, 25 bp, Homo sapien
ggctatgtgcccatggaaaagaatt

SEQ ID NO: 1577554 - DNA, 25 bp, Homo sapien
gccacacctagatgctcaggactga

SEQ ID NO: 1577555 - DNA, 25 bp, Homo sapien
catacttgacaaccacatagtcttg

SEQ ID NO: 1577556 - DNA, 25 bp, Homo sapien
gagttggtccacctgctagagcatg

SEQ ID NO: 1577557 - DNA, 25 bp, Homo sapien
tcttcagataatgtgagggcaccac

SEQ ID NO: 1577558 - DNA, 25 bp, Homo sapien
tatcaacagggcatcgggttcccaa

SEQ ID NO: 1577559 - DNA, 25 bp, Homo sapien
tacctgtgcaggtaagcagccacca

SEQ ID NO: 1577560 - DNA, 25 bp, Homo sapien
catctagtggaaagcatttggctgc

SEQ ID NO: 1577561 - DNA, 25 bp, Homo sapien
tggaatcacgcatccccaagtggtt

SEQ ID NO: 1577562 - DNA, 25 bp, Homo sapien
taaaagtctcatcagctgggtgtgg

SEQ ID NO: 1577563 - DNA, 25 bp, Homo sapien
taactcgcctgatgagaagcctgag

SEQ ID NO: 1577564 - DNA, 25 bp, Homo sapien
ggtacatgggaatgtcactgggtca

SEQ ID NO: 1577565 - DNA, 25 bp, Homo sapien
cctgcttgtagggacgttgaggcat

SEQ ID NO: 1577566 - DNA, 25 bp, Homo sapien
gaggcatccgaataataggaagttt

SEQ ID NO: 1577567 - DNA, 25 bp, Homo sapien
gtgcctgggcgagtgctcacagcct

SEQ ID NO: 1577568 - DNA, 25 bp, Homo sapien
gactgggctgatgagaccttaacaa

SEQ ID NO: 1577569 - DNA, 25 bp, Homo sapien
gctgtcccatgacgctagatttgac

SEQ ID NO: 1577570 - DNA, 25 bp, Homo sapien
ccactgcaacatggtcttgggaatt

SEQ ID NO: 1577571 - DNA, 25 bp, Homo sapien
tagctactccaacaagaagactggg

SEQ ID NO: 1577572 - DNA, 25 bp, Homo sapien
tatagagagcctttgtgaaggagcc

SEQ ID NO: 1577573 - DNA, 25 bp, Homo sapien
catactaaggcgaggcagatacacc

SEQ ID NO: 1577574 - DNA, 25 bp, Homo sapien
tcatacttctagacctcccgatggg

SEQ ID NO: 1577575 - DNA, 25 bp, Homo sapien
ccttagacctgcagggaatgtgcca

SEQ ID NO: 1577576 - DNA, 25 bp, Homo sapien
tccgactgtcgccaaacaaagcgct

SEQ ID NO: 1577577 - DNA, 25 bp, Homo sapien
cacccaagcgctgcaaaaatgaccg

SEQ ID NO: 1577578 - DNA, 25 bp, Homo sapien
aaagctctgacggtctggatgcacc

SEQ ID NO: 1577579 - DNA, 25 bp, Homo sapien
tagaacccccactgttcagcgggag

SEQ ID NO: 1577580 - DNA, 25 bp, Homo sapien
ctgagtcggggccctcagcgcggcc

SEQ ID NO: 1577581 - DNA, 25 bp, Homo sapien
cggggccctcagcgcggccgcagcc

SEQ ID NO: 1577582 - DNA, 25 bp, Homo sapien
gggccctcagcgcggccgcagccat

SEQ ID NO: 1577583 - DNA, 25 bp, Homo sapien
agtcggggccctcagcgcggccgca

SEQ ID NO: 1577584 - DNA, 25 bp, Homo sapien
cgaccgtagtgacccaagaaggcac

SEQ ID NO: 1577585 - DNA, 25 bp, Homo sapien
cactgtactggacatgaggatctcg

SEQ ID NO: 1577586 - DNA, 25 bp, Homo sapien
tgtctccaagagtttagaaacgctg

SEQ ID NO: 1577587 - DNA, 25 bp, Homo sapien
ccttggcactccaggtatgaacctt

SEQ ID NO: 1577588 - DNA, 25 bp, Homo sapien
ctttgtgaggtccatatgtgtttct

SEQ ID NO: 1577589 - DNA, 25 bp, Homo sapien
gtgaggtccatatgtgtttctggag

SEQ ID NO: 1577590 - DNA, 25 bp, Homo sapien
tgtgaggtccatatgtgtttctgga

SEQ ID NO: 1577591 - DNA, 25 bp, Homo sapien
ttgtgaggtccatatgtgtttctgg

SEQ ID NO: 1577592 - DNA, 25 bp, Homo sapien
tatcttcaagaccaggattacccac

SEQ ID NO: 1577593 - DNA, 25 bp, Homo sapien
tcctaattgtgacccatagctactc

SEQ ID NO: 1577594 - DNA, 25 bp, Homo sapien
tacatggacagctactcacctgatg

SEQ ID NO: 1577595 - DNA, 25 bp, Homo sapien
tctcagactatgataatagctaaag

SEQ ID NO: 1577596 - DNA, 25 bp, Homo sapien
tcatcaagaagtccccactcgtcct

SEQ ID NO: 1577597 - DNA, 25 bp, Homo sapien
tcaagaagtccccactcgtcctgtg

SEQ ID NO: 1577598 - DNA, 25 bp, Homo sapien
aagaagtccccactcgtcctgtgag

SEQ ID NO: 1577599 - DNA, 25 bp, Homo sapien
agaagtccccactcgtcctgtgaga

SEQ ID NO: 1577600 - DNA, 25 bp, Homo sapien
gaggctacaagggcaaagttctcca

SEQ ID NO: 1577601 - DNA, 25 bp, Homo sapien
ccagtgaggctacaagggcaaagtt

SEQ ID NO: 1577602 - DNA, 25 bp, Homo sapien
gtgaggctacaagggcaaagttctc

SEQ ID NO: 1577603 - DNA, 25 bp, Homo sapien
ggctacaagggcaaagttctccagc

SEQ ID NO: 1577604 - DNA, 25 bp, Homo sapien
tagacagaccaggacactggagttg

SEQ ID NO: 1577605 - DNA, 25 bp, Homo sapien
cactggagttggtattagggcctta

SEQ ID NO: 1577606 - DNA, 25 bp, Homo sapien
tatcccaagaaagtggagaagtcag

SEQ ID NO: 1577607 - DNA, 25 bp, Homo sapien
gaagtcagcaaaagaccatagacag

SEQ ID NO: 1577608 - DNA, 25 bp, Homo sapien
gatgaaatatacattgactatgctg

SEQ ID NO: 1577609 - DNA, 25 bp, Homo sapien
cagagaaccgctgatgaaatataca

SEQ ID NO: 1577610 - DNA, 25 bp, Homo sapien
ctgaaagcagagaaccgctgatgaa

SEQ ID NO: 1577611 - DNA, 25 bp, Homo sapien
tgaaatatacattgactatgctgag

SEQ ID NO: 1577612 - DNA, 25 bp, Homo sapien
caatgacatacagaataggcagcac

SEQ ID NO: 1577613 - DNA, 25 bp, Homo sapien
tccaacctcccatttgcgaaagggc

SEQ ID NO: 1577614 - DNA, 25 bp, Homo sapien
tctgcccagggagatcagctagatg

SEQ ID NO: 1577615 - DNA, 25 bp, Homo sapien
tcagaagccgcaacatggctggaag

SEQ ID NO: 1577616 - DNA, 25 bp, Homo sapien
ttttttgactgcgaatgtcctcccc

SEQ ID NO: 1577617 - DNA, 25 bp, Homo sapien
tcttggatggtaaacaggagtgtgt

SEQ ID NO: 1577618 - DNA, 25 bp, Homo sapien
tttccagtgtagactcttggatggt

SEQ ID NO: 1577619 - DNA, 25 bp, Homo sapien
cattcagtaattgtgccgggtttct

SEQ ID NO: 1577620 - DNA, 25 bp, Homo sapien
tattttctggtggtcaacaaggctg

SEQ ID NO: 1577621 - DNA, 25 bp, Homo sapien
gttgaatgagaccagacttttggct

SEQ ID NO: 1577622 - DNA, 25 bp, Homo sapien
gaatgagaccagacttttggctaaa

SEQ ID NO: 1577623 - DNA, 25 bp, Homo sapien
ttcttcggtgttgattaagaatggc

SEQ ID NO: 1577624 - DNA, 25 bp, Homo sapien
tggtgatgtatgaggctggagcatt

SEQ ID NO: 1577625 - DNA, 25 bp, Homo sapien
ttggtgatgtatgaggctggagcat

SEQ ID NO: 1577626 - DNA, 25 bp, Homo sapien
gactgctcaagatttcctccaaaga

SEQ ID NO: 1577627 - DNA, 25 bp, Homo sapien
cataagtgtccagcagaaccaaggc

SEQ ID NO: 1577628 - DNA, 25 bp, Homo sapien
tcttagcacataggagtgaccagtg

SEQ ID NO: 1577629 - DNA, 25 bp, Homo sapien
gaggttcaacttcaggcagatggct

SEQ ID NO: 1577630 - DNA, 25 bp, Homo sapien
tcaaagccacagtcacgggaagatt

SEQ ID NO: 1577631 - DNA, 25 bp, Homo sapien
gaaagaatagggatccaggccacaa

SEQ ID NO: 1577632 - DNA, 25 bp, Homo sapien
tctgcgtgacatcggcctatggaat

SEQ ID NO: 1577633 - DNA, 25 bp, Homo sapien
tgcttgtcataacagctggcctctc

SEQ ID NO: 1577634 - DNA, 25 bp, Homo sapien
acgatccgggcggagacaagagcaa

SEQ ID NO: 1577635 - DNA, 25 bp, Homo sapien
cggatggaactgacacaagccaaag

SEQ ID NO: 1577636 - DNA, 25 bp, Homo sapien
tgtgcagctgagaaaacgactctcc

SEQ ID NO: 1577637 - DNA, 25 bp, Homo sapien
tgtcagcacctaggtccagatccgg

SEQ ID NO: 1577638 - DNA, 25 bp, Homo sapien
gtcggggccctcagtgccgccgcca

SEQ ID NO: 1577639 - DNA, 25 bp, Homo sapien
gggtcggggccctcagtgccgccgc

SEQ ID NO: 1577640 - DNA, 25 bp, Homo sapien
ctgggtcggggccctcagtgccgcc

SEQ ID NO: 1577641 - DNA, 25 bp, Homo sapien
tcggggccctcagtgccgccgccat

SEQ ID NO: 1577642 - DNA, 25 bp, Homo sapien
cggacctgtaagtactagtggcaat

SEQ ID NO: 1577643 - DNA, 25 bp, Homo sapien
tgtagggtcttcaagtgcttcttac

SEQ ID NO: 1577644 - DNA, 25 bp, Homo sapien
aagtgcttcttacggacctgtaagt

SEQ ID NO: 1577645 - DNA, 25 bp, Homo sapien
ccttgtagggtcttcaagtgcttct

SEQ ID NO: 1577646 - DNA, 25 bp, Homo sapien
tgttcagagtccctaggctcaaggc

SEQ ID NO: 1577647 - DNA, 25 bp, Homo sapien
tatttttgttcagagtccctaggct

SEQ ID NO: 1577648 - DNA, 25 bp, Homo sapien
cctggacatatttttgttcagagtc

SEQ ID NO: 1577649 - DNA, 25 bp, Homo sapien
tggacatatttttgttcagagtccc

SEQ ID NO: 1577650 - DNA, 25 bp, Homo sapien
tagggatgccataactgcaaagttc

SEQ ID NO: 1577651 - DNA, 25 bp, Homo sapien
ggatgccataactgcaaagttctcc

SEQ ID NO: 1577652 - DNA, 25 bp, Homo sapien
gggatgccataactgcaaagttctc

SEQ ID NO: 1577653 - DNA, 25 bp, Homo sapien
agggatgccataactgcaaagttct

SEQ ID NO: 1577654 - DNA, 25 bp, Homo sapien
tgagaggctttcgtccagtgggaac

SEQ ID NO: 1577655 - DNA, 25 bp, Homo sapien
tttctgtccacagggtgaggcatgg

SEQ ID NO: 1577656 - DNA, 25 bp, Homo sapien
tcctgtgtcgaagaaagccagaact

SEQ ID NO: 1577657 - DNA, 25 bp, Homo sapien
catgagtccttgttctaccgtgtgc

SEQ ID NO: 1577658 - DNA, 25 bp, Homo sapien
cattagtgtgaacagtctggtgtcg

SEQ ID NO: 1577659 - DNA, 25 bp, Homo sapien
tgggcactcctgtgacgatagaggt

SEQ ID NO: 1577660 - DNA, 25 bp, Homo sapien
tccagtgtcgaaagaggttagtgct

SEQ ID NO: 1577661 - DNA, 25 bp, Homo sapien
taaggccttgtgctagtgtgggcac

SEQ ID NO: 1577662 - DNA, 25 bp, Homo sapien
tccagtgccgtcataccaagttaaa

SEQ ID NO: 1577663 - DNA, 25 bp, Homo sapien
tgtcacaacacaagccggacatggt

SEQ ID NO: 1577664 - DNA, 25 bp, Homo sapien
tcttctcaaaggctagcctccagtg

SEQ ID NO: 1577665 - DNA, 25 bp, Homo sapien
tttggatacatgagtcacatcagag

SEQ ID NO: 1577666 - DNA, 25 bp, Homo sapien
tcccagcgggtagtgatgaaaaggc

SEQ ID NO: 1577667 - DNA, 25 bp, Homo sapien
gaaactggcagtgacacgaatctgg

SEQ ID NO: 1577668 - DNA, 25 bp, Homo sapien
tgccagcagaactcagatcaggtcc

SEQ ID NO: 1577669 - DNA, 25 bp, Homo sapien
tatatgcactatgtagccacaggag

SEQ ID NO: 1577670 - DNA, 25 bp, Homo sapien
cgcccggccggatgaaactttatat

SEQ ID NO: 1577671 - DNA, 25 bp, Homo sapien
ttcacaggacctcattaagggattc

SEQ ID NO: 1577672 - DNA, 25 bp, Homo sapien
gaacagtccatctaatttgctgcag

SEQ ID NO: 1577673 - DNA, 25 bp, Homo sapien
tatgtttcgctccagccccatggtt

SEQ ID NO: 1577674 - DNA, 25 bp, Homo sapien
gaaatacaggtgagcaatgaaggcc

SEQ ID NO: 1577675 - DNA, 25 bp, Homo sapien
aagtaaacaggccagagaggctaca

SEQ ID NO: 1577676 - DNA, 25 bp, Homo sapien
tggatcacaaaagccgcaccaagga

SEQ ID NO: 1577677 - DNA, 25 bp, Homo sapien
aggccacgtagaggcagacctgctt

SEQ ID NO: 1577678 - DNA, 25 bp, Homo sapien
accatgccaggcctcttttcattct

SEQ ID NO: 1577679 - DNA, 25 bp, Homo sapien
caccatgccaggcctcttttcattc

SEQ ID NO: 1577680 - DNA, 25 bp, Homo sapien
cattcttgaaaacactcaataatac

SEQ ID NO: 1577681 - DNA, 25 bp, Homo sapien
ttttcattcttgaaaacactcaata

SEQ ID NO: 1577682 - DNA, 25 bp, Homo sapien
ctggcgagccactccgcagagcgaa

SEQ ID NO: 1577683 - DNA, 25 bp, Homo sapien
ggccgccgccatcacagttcgtaga

SEQ ID NO: 1577684 - DNA, 25 bp, Homo sapien
aaccccgagcttctgctccgatggt

SEQ ID NO: 1577685 - DNA, 25 bp, Homo sapien
agagcgaacagcgacttctcccgca

SEQ ID NO: 1577686 - DNA, 25 bp, Homo sapien
gcgccccgctgccttggacactggg

SEQ ID NO: 1577687 - DNA, 25 bp, Homo sapien
cagacaggcgctcctcatttggaac

SEQ ID NO: 1577688 - DNA, 25 bp, Homo sapien
cagggactcagacaggcgctcctca

SEQ ID NO: 1577689 - DNA, 25 bp, Homo sapien
tcctcatttggaacttcaggatttg

SEQ ID NO: 1577690 - DNA, 25 bp, Homo sapien
tgctgtgactagagtcatgccctct

SEQ ID NO: 1577691 - DNA, 25 bp, Homo sapien
ttacaattcaacaaccacagaggat

SEQ ID NO: 1577692 - DNA, 25 bp, Homo sapien
tcttgttacaattcaacaaccacag

SEQ ID NO: 1577693 - DNA, 25 bp, Homo sapien
tcctgctgtgactagagtcatgccc

SEQ ID NO: 1577694 - DNA, 25 bp, Homo sapien
tggaagtattaacatgtgacactgc

SEQ ID NO: 1577695 - DNA, 25 bp, Homo sapien
tgttcagaagatgactcttcatcct

SEQ ID NO: 1577696 - DNA, 25 bp, Homo sapien
cttggaagtattaacatgtgacact

SEQ ID NO: 1577697 - DNA, 25 bp, Homo sapien
ctgttcagaagatgactcttcatcc

SEQ ID NO: 1577698 - DNA, 25 bp, Homo sapien
gtttcagtccatggtgtgtaccctg

SEQ ID NO: 1577699 - DNA, 25 bp, Homo sapien
tgtcacaagggagagccgtctgtgc

SEQ ID NO: 1577700 - DNA, 25 bp, Homo sapien
ggtgtgtaccctggtgttcatccag

SEQ ID NO: 1577701 - DNA, 25 bp, Homo sapien
gagagccgtctgtgcgggcaaacct

SEQ ID NO: 1577702 - DNA, 25 bp, Homo sapien
aaagggcttctctgacggatgaggt

SEQ ID NO: 1577703 - DNA, 25 bp, Homo sapien
tttgctaactgtgcagttcttcaca

SEQ ID NO: 1577704 - DNA, 25 bp, Homo sapien
acaattgaggcctcacttttatccc

SEQ ID NO: 1577705 - DNA, 25 bp, Homo sapien
taagggttgctctatactgtaacac

SEQ ID NO: 1577706 - DNA, 25 bp, Homo sapien
tgttggcagccacccaaagtagcct

SEQ ID NO: 1577707 - DNA, 25 bp, Homo sapien
tagaaggttcccacgtacctggcac

SEQ ID NO: 1577708 - DNA, 25 bp, Homo sapien
gaaagtgcaacatatccctagaagg

SEQ ID NO: 1577709 - DNA, 25 bp, Homo sapien
caaaccagagcaacatgaggcaagt

SEQ ID NO: 1577710 - DNA, 25 bp, Homo sapien
gcctgtgccgcaaagacattaggta

SEQ ID NO: 1577711 - DNA, 25 bp, Homo sapien
aaaactacattcgttgctgcaccag

SEQ ID NO: 1577712 - DNA, 25 bp, Homo sapien
tgacctaacagtaacatggccctgg

SEQ ID NO: 1577713 - DNA, 25 bp, Homo sapien
tcctcaaggtgaaatatgggctctc

SEQ ID NO: 1577714 - DNA, 25 bp, Homo sapien
tataattagtaagatatatggtcac

SEQ ID NO: 1577715 - DNA, 25 bp, Homo sapien
ccttcaaaacctctgcttaaaaatg

SEQ ID NO: 1577716 - DNA, 25 bp, Homo sapien
ctcagctaagtgtccacataaagac

SEQ ID NO: 1577717 - DNA, 25 bp, Homo sapien
taagatatatggtcacaccttcaaa

SEQ ID NO: 1577718 - DNA, 25 bp, Homo sapien
gacccaaggtgagcatttccactgg

SEQ ID NO: 1577719 - DNA, 25 bp, Homo sapien
tgggagtgcccctgagagcaagtca

SEQ ID NO: 1577720 - DNA, 25 bp, Homo sapien
tctcatgaaaggtagcaagggcttg

SEQ ID NO: 1577721 - DNA, 25 bp, Homo sapien
tgtttccgcagccagtcccatgtat

SEQ ID NO: 1577722 - DNA, 25 bp, Homo sapien
ggtctctggacattgttggtgagat

SEQ ID NO: 1577723 - DNA, 25 bp, Homo sapien
ccaggttcttaacaccattgaaaga

SEQ ID NO: 1577724 - DNA, 25 bp, Homo sapien
tttcatctaaattgtctaagtccaa

SEQ ID NO: 1577725 - DNA, 25 bp, Homo sapien
gctctaggtataatcccatcttggg

SEQ ID NO: 1577726 - DNA, 25 bp, Homo sapien
tatttcccctcaaaaatttgatgcc

SEQ ID NO: 1577727 - DNA, 25 bp, Homo sapien
gttgtcgagttttcagttcaccaat

SEQ ID NO: 1577728 - DNA, 25 bp, Homo sapien
tttgatgccttttactattttatga

SEQ ID NO: 1577729 - DNA, 25 bp, Homo sapien
gaaattcaaaatgatcaaggctatt

SEQ ID NO: 1577730 - DNA, 25 bp, Homo sapien
gctaatctctgtggtaattgctcaa

SEQ ID NO: 1577731 - DNA, 25 bp, Homo sapien
caaatatactaggaactccattgct

SEQ ID NO: 1577732 - DNA, 25 bp, Homo sapien
tgtgcttcatcaacctaattgtttg

SEQ ID NO: 1577733 - DNA, 25 bp, Homo sapien
cctaatcttaggatttgcagactcc

SEQ ID NO: 1577734 - DNA, 25 bp, Homo sapien
gataatcctgaatacaaggactctg

SEQ ID NO: 1577735 - DNA, 25 bp, Homo sapien
gtaagttacaaatagataatcctga

SEQ ID NO: 1577736 - DNA, 25 bp, Homo sapien
ctgaagctataattgttaggcagat

SEQ ID NO: 1577737 - DNA, 25 bp, Homo sapien
tactaaagattctcagacacctgcg

SEQ ID NO: 1577738 - DNA, 25 bp, Homo sapien
acctttttatgaggaggaataagtg

SEQ ID NO: 1577739 - DNA, 25 bp, Homo sapien
aggaggaataagtgtccaaagaaca

SEQ ID NO: 1577740 - DNA, 25 bp, Homo sapien
gaggaataagtgtccaaagaacaag

SEQ ID NO: 1577741 - DNA, 25 bp, Homo sapien
ccaaagaacaagtattttacaggat

SEQ ID NO: 1577742 - DNA, 25 bp, Homo sapien
taagggtcagctgtatatcagtctc

SEQ ID NO: 1577743 - DNA, 25 bp, Homo sapien
acttcataaggcttccgggcaacag

SEQ ID NO: 1577744 - DNA, 25 bp, Homo sapien
tatccctgacccctgcgtcgtttaa

SEQ ID NO: 1577745 - DNA, 25 bp, Homo sapien
cgggcaacagttggctattagtagt

SEQ ID NO: 1577746 - DNA, 25 bp, Homo sapien
ccacacggaaatgcccctgtcttgg

SEQ ID NO: 1577747 - DNA, 25 bp, Homo sapien
agggcagccaaaatgaccgctgcga

SEQ ID NO: 1577748 - DNA, 25 bp, Homo sapien
tgaccgctgcgaagacgccacaagt

SEQ ID NO: 1577749 - DNA, 25 bp, Homo sapien
gtactgccgctcgacgcaaggcttt

SEQ ID NO: 1577750 - DNA, 25 bp, Homo sapien
tgactctcgcgccttcacggtccgt

SEQ ID NO: 1577751 - DNA, 25 bp, Homo sapien
aaagcggctgacagacagaacggac

SEQ ID NO: 1577752 - DNA, 25 bp, Homo sapien
ggtccgtcacttcgatcccgatgca

SEQ ID NO: 1577753 - DNA, 25 bp, Homo sapien
cgatgcagcgtaccaaagcggctga

SEQ ID NO: 1577754 - DNA, 25 bp, Homo sapien
cgaagccgggtccctcagtgcggtc

SEQ ID NO: 1577755 - DNA, 25 bp, Homo sapien
aagccgggtccctcagtgcggtcgc

SEQ ID NO: 1577756 - DNA, 25 bp, Homo sapien
ctcagtgcggtcgccatccgagtct

SEQ ID NO: 1577757 - DNA, 25 bp, Homo sapien
agtgcggtcgccatccgagtctgtg

SEQ ID NO: 1577758 - DNA, 25 bp, Homo sapien
ggaggcccggagatcgcagcgctca

SEQ ID NO: 1577759 - DNA, 25 bp, Homo sapien
gggggaggcccggagatcgcagcgc

SEQ ID NO: 1577760 - DNA, 25 bp, Homo sapien
gaggcccggagatcgcagcgctcac

SEQ ID NO: 1577761 - DNA, 25 bp, Homo sapien
gggaggcccggagatcgcagcgctc

SEQ ID NO: 1577762 - DNA, 25 bp, Homo sapien
tcaaatttaactcagatggtgtctc

SEQ ID NO: 1577763 - DNA, 25 bp, Homo sapien
ttgcgcaagctctctatggctccca

SEQ ID NO: 1577764 - DNA, 25 bp, Homo sapien
cagatggtgtctctcgtttgcgcaa

SEQ ID NO: 1577765 - DNA, 25 bp, Homo sapien
tgtctctcgtttgcgcaagctctct

SEQ ID NO: 1577766 - DNA, 25 bp, Homo sapien
tgtgcgcctcggtccttagtgctgc

SEQ ID NO: 1577767 - DNA, 25 bp, Homo sapien
ctctcaccagttgtgtggccttgga

SEQ ID NO: 1577768 - DNA, 25 bp, Homo sapien
tggaaaaatattcaacctccctctg

SEQ ID NO: 1577769 - DNA, 25 bp, Homo sapien
ccttagtgctgcctctcaccagttg

SEQ ID NO: 1577770 - DNA, 25 bp, Homo sapien
ctgtgtaagtttgaaaagcacctct

SEQ ID NO: 1577771 - DNA, 25 bp, Homo sapien
gaaaagcacctctgtagctatggga

SEQ ID NO: 1577772 - DNA, 25 bp, Homo sapien
aaagcacctctgtagctatgggaac

SEQ ID NO: 1577773 - DNA, 25 bp, Homo sapien
agtttgaaaagcacctctgtagcta

SEQ ID NO: 1577774 - DNA, 25 bp, Homo sapien
gcatcacatcgaagtacaggtgttt

SEQ ID NO: 1577775 - DNA, 25 bp, Homo sapien
ccaagtgccattcatgtaggccagg

SEQ ID NO: 1577776 - DNA, 25 bp, Homo sapien
acatgagaccaggatgatataagtc

SEQ ID NO: 1577777 - DNA, 25 bp, Homo sapien
aagaacagagggcacttcccctagc

SEQ ID NO: 1577778 - DNA, 25 bp, Homo sapien
tcccctagccctagttgagcaacta

SEQ ID NO: 1577779 - DNA, 25 bp, Homo sapien
taaagggtttctccgacacatggac

SEQ ID NO: 1577780 - DNA, 25 bp, Homo sapien
tctgtgtaaacgaggcagtgtccac

SEQ ID NO: 1577781 - DNA, 25 bp, Homo sapien
catggactatgcaactctgtgtaaa

SEQ ID NO: 1577782 - DNA, 25 bp, Homo sapien
gcaacatatttcacaggagtcggca

SEQ ID NO: 1577783 - DNA, 25 bp, Homo sapien
gaactctctggtggtagatcaggct

SEQ ID NO: 1577784 - DNA, 25 bp, Homo sapien
tgtgaactctgcgatgctgcatgag

SEQ ID NO: 1577785 - DNA, 25 bp, Homo sapien
ttttccactgtaaaaggccaccgca

SEQ ID NO: 1577786 - DNA, 25 bp, Homo sapien
gaatgaggttacatcttcgcgtaca

SEQ ID NO: 1577787 - DNA, 25 bp, Homo sapien
tcagtgacataaacggcaagagcca

SEQ ID NO: 1577788 - DNA, 25 bp, Homo sapien
caggtacttgtctctctcacaggtg

SEQ ID NO: 1577789 - DNA, 25 bp, Homo sapien
cacaaagctgggtcaagtccatgcc

SEQ ID NO: 1577790 - DNA, 25 bp, Homo sapien
tcacaggtggtagacatgatacggc

SEQ ID NO: 1577791 - DNA, 25 bp, Homo sapien
gatgaccttggagggacaccttgcc

SEQ ID NO: 1577792 - DNA, 25 bp, Homo sapien
ggtgcacatcccagaaaggctattg

SEQ ID NO: 1577793 - DNA, 25 bp, Homo sapien
cctcagtgggcagcaaatactggta

SEQ ID NO: 1577794 - DNA, 25 bp, Homo sapien
tgttttcctggcctatgcagcaatg

SEQ ID NO: 1577795 - DNA, 25 bp, Homo sapien
ggagatggctctatggcaacacagg

SEQ ID NO: 1577796 - DNA, 25 bp, Homo sapien
ttattgaacaaaggcctgtagacgg

SEQ ID NO: 1577797 - DNA, 25 bp, Homo sapien
ggattcctccaagtgaacccaagcg

SEQ ID NO: 1577798 - DNA, 25 bp, Homo sapien
gcgtcgtcccgggtttcagaactga

SEQ ID NO: 1577799 - DNA, 25 bp, Homo sapien
ggagtgaagggtctaattaggatct

SEQ ID NO: 1577800 - DNA, 25 bp, Homo sapien
tgaagggtctaattaggatctggga

SEQ ID NO: 1577801 - DNA, 25 bp, Homo sapien
gggtctaattaggatctgggaattc

SEQ ID NO: 1577802 - DNA, 25 bp, Homo sapien
gtctaattaggatctgggaattcac

SEQ ID NO: 1577803 - DNA, 25 bp, Homo sapien
aatcggagactggtgttggatatga

SEQ ID NO: 1577804 - DNA, 25 bp, Homo sapien
agaaatcggagactggtgttggata

SEQ ID NO: 1577805 - DNA, 25 bp, Homo sapien
gaaatcggagactggtgttggatat

SEQ ID NO: 1577806 - DNA, 25 bp, Homo sapien
aaatcggagactggtgttggatatg

SEQ ID NO: 1577807 - DNA, 25 bp, Homo sapien
tttaatggagtgcaccaagcccagg

SEQ ID NO: 1577808 - DNA, 25 bp, Homo sapien
tttaggagccctgccccatattggt

SEQ ID NO: 1577809 - DNA, 25 bp, Homo sapien
gagcattctgaggacatcccctgag

SEQ ID NO: 1577810 - DNA, 25 bp, Homo sapien
caggtcagggttacccagtggtgac

SEQ ID NO: 1577811 - DNA, 25 bp, Homo sapien
catagttgactaccttaagagtggc

SEQ ID NO: 1577812 - DNA, 25 bp, Homo sapien
gaaggccccaactgggttatgagct

SEQ ID NO: 1577813 - DNA, 25 bp, Homo sapien
cataaaggtcatgccagattaggtc

SEQ ID NO: 1577814 - DNA, 25 bp, Homo sapien
taatcccactgggatcagttctggg

SEQ ID NO: 1577815 - DNA, 25 bp, Homo sapien
ggaagtctgaccacaaactgggcag

SEQ ID NO: 1577816 - DNA, 25 bp, Homo sapien
catttattagatagaggtttcacaa

SEQ ID NO: 1577817 - DNA, 25 bp, Homo sapien
ggtatatgggtgaagtcaacttgcc

SEQ ID NO: 1577818 - DNA, 25 bp, Homo sapien
ggcctcatgcctgatgagtggagaa

SEQ ID NO: 1577819 - DNA, 25 bp, Homo sapien
taccacaatcctgatagagaaggtt

SEQ ID NO: 1577820 - DNA, 25 bp, Homo sapien
tcctaggcccagatctgaggatcac

SEQ ID NO: 1577821 - DNA, 25 bp, Homo sapien
gagaaggttctcctcaccctatgta

SEQ ID NO: 1577822 - DNA, 25 bp, Homo sapien
tgataacacgcaaaatcagttggct

SEQ ID NO: 1577823 - DNA, 25 bp, Homo sapien
tcttgctcgccgagtccaccgagcc

SEQ ID NO: 1577824 - DNA, 25 bp, Homo sapien
ccgccgccagcagcgtcctggggct

SEQ ID NO: 1577825 - DNA, 25 bp, Homo sapien
agccccgcagctgcggcatcgccgc

SEQ ID NO: 1577826 - DNA, 25 bp, Homo sapien
tcctggggctcttgctcgccgagtc

SEQ ID NO: 1577827 - DNA, 25 bp, Homo sapien
agcgtgttgtatgaaattggcacag

SEQ ID NO: 1577828 - DNA, 25 bp, Homo sapien
agaaggaaaggcgacttcgcttgcc

SEQ ID NO: 1577829 - DNA, 25 bp, Homo sapien
tacgtttgtggaccagggattccat

SEQ ID NO: 1577830 - DNA, 25 bp, Homo sapien
gcgacttcgcttgccccactgaatt

SEQ ID NO: 1577831 - DNA, 25 bp, Homo sapien
atcccaggccggtctccatgaggag

SEQ ID NO: 1577832 - DNA, 25 bp, Homo sapien
tgaaggacatcaatcccaggccggt

SEQ ID NO: 1577833 - DNA, 25 bp, Homo sapien
gaccagcacgcgtgcgcttgtcctg

SEQ ID NO: 1577834 - DNA, 25 bp, Homo sapien
cacgcgtgcgcttgtcctggaaaag

SEQ ID NO: 1577835 - DNA, 25 bp, Homo sapien
aaagccccgagtctgtacaggacct

SEQ ID NO: 1577836 - DNA, 25 bp, Homo sapien
ggaaattctccagggcgcatcgaag

SEQ ID NO: 1577837 - DNA, 25 bp, Homo sapien
tagtggagacttggacaaagccccg

SEQ ID NO: 1577838 - DNA, 25 bp, Homo sapien
tacaggacctgtaggaaccatggca

SEQ ID NO: 1577839 - DNA, 25 bp, Homo sapien
gctacaacagtcgtaaagagaagga

SEQ ID NO: 1577840 - DNA, 25 bp, Homo sapien
ggaccgcaccactccattagctaaa

SEQ ID NO: 1577841 - DNA, 25 bp, Homo sapien
tgtctttatgaacgcaaagactggg

SEQ ID NO: 1577842 - DNA, 25 bp, Homo sapien
gccagcacgcgaagcttatccaatg

SEQ ID NO: 1577843 - DNA, 25 bp, Homo sapien
tataaattactcatagaaacatgac

SEQ ID NO: 1577844 - DNA, 25 bp, Homo sapien
tataaagacaaacgttagtctcaca

SEQ ID NO: 1577845 - DNA, 25 bp, Homo sapien
gacaaacgttagtctcacaaattct

SEQ ID NO: 1577846 - DNA, 25 bp, Homo sapien
ttttcagagatttatgaattacaag

SEQ ID NO: 1577847 - DNA, 25 bp, Homo sapien
tctaatacagtgttctataccatca

SEQ ID NO: 1577848 - DNA, 25 bp, Homo sapien
gtctctaatacagtgttctatacca

SEQ ID NO: 1577849 - DNA, 25 bp, Homo sapien
ctctaatacagtgttctataccatc

SEQ ID NO: 1577850 - DNA, 25 bp, Homo sapien
taatacagtgttctataccatcact

SEQ ID NO: 1577851 - DNA, 25 bp, Homo sapien
cgtgattggataacacttgtctgtt

SEQ ID NO: 1577852 - DNA, 25 bp, Homo sapien
tgaattactgatggaatcttcatcc

SEQ ID NO: 1577853 - DNA, 25 bp, Homo sapien
tttaaagacgtgattggataacact

SEQ ID NO: 1577854 - DNA, 25 bp, Homo sapien
gattgaattactgatggaatcttca

SEQ ID NO: 1577855 - DNA, 25 bp, Homo sapien
tgactgggtaatcccgggccgaaca

SEQ ID NO: 1577856 - DNA, 25 bp, Homo sapien
ctccttggttgactgggtaatcccg

SEQ ID NO: 1577857 - DNA, 25 bp, Homo sapien
cccgggccgaacactgagctgatgt

SEQ ID NO: 1577858 - DNA, 25 bp, Homo sapien
gctgatgtgtgactagctttccaca

SEQ ID NO: 1577859 - DNA, 25 bp, Homo sapien
tgtttcaacagttggtggattcttt

SEQ ID NO: 1577860 - DNA, 25 bp, Homo sapien
gtttcaacagttggtggattcttta

SEQ ID NO: 1577861 - DNA, 25 bp, Homo sapien
gattattctcggatggttcacactg

SEQ ID NO: 1577862 - DNA, 25 bp, Homo sapien
taaactgctccaggactaatagaga

SEQ ID NO: 1577863 - DNA, 25 bp, Homo sapien
gagcaccattcttgagaactcagaa

SEQ ID NO: 1577864 - DNA, 25 bp, Homo sapien
gcagccatgagtgaaagatcctata

SEQ ID NO: 1577865 - DNA, 25 bp, Homo sapien
tcctgtccctgcatgtggacgtgga

SEQ ID NO: 1577866 - DNA, 25 bp, Homo sapien
taagggcatatcctcagaaaagaga

SEQ ID NO: 1577867 - DNA, 25 bp, Homo sapien
taaggaagtatcttgggaagtctgg

SEQ ID NO: 1577868 - DNA, 25 bp, Homo sapien
tctgggagggtgtccccatgtttgc

SEQ ID NO: 1577869 - DNA, 25 bp, Homo sapien
gactgctctggttgagagatacacc

SEQ ID NO: 1577870 - DNA, 25 bp, Homo sapien
tatggacccttcctgagatctagca

SEQ ID NO: 1577871 - DNA, 25 bp, Homo sapien
gaattatctgatgcacccgtaggtc

SEQ ID NO: 1577872 - DNA, 25 bp, Homo sapien
ctcattgctctggtgggtaagggca

SEQ ID NO: 1577873 - DNA, 25 bp, Homo sapien
gatgactggcggtagcttgtcttac

SEQ ID NO: 1577874 - DNA, 25 bp, Homo sapien
tttctcatgagtcctcatatggcgg

SEQ ID NO: 1577875 - DNA, 25 bp, Homo sapien
gcttctggtgtggagggaacacttg

SEQ ID NO: 1577876 - DNA, 25 bp, Homo sapien
cctcatatggcggtggtatgtggat

SEQ ID NO: 1577877 - DNA, 25 bp, Homo sapien
accacttggaatactttagtgaaca

SEQ ID NO: 1577878 - DNA, 25 bp, Homo sapien
tacattttaatgaagcaagacaata

SEQ ID NO: 1577879 - DNA, 25 bp, Homo sapien
ttattggttcttggaaatgttccac

SEQ ID NO: 1577880 - DNA, 25 bp, Homo sapien
caataaattgaaagcataatcagga

SEQ ID NO: 1577881 - DNA, 25 bp, Homo sapien
aagttccggcccgtcgcgctgcgcg

SEQ ID NO: 1577882 - DNA, 25 bp, Homo sapien
agaggccaaaatgaccgccacgagg

SEQ ID NO: 1577883 - DNA, 25 bp, Homo sapien
ctgcagaaactggcgggctggacaa

SEQ ID NO: 1577884 - DNA, 25 bp, Homo sapien
tgcgcgtgcgcggaagtgttgctat

SEQ ID NO: 1577885 - DNA, 25 bp, Homo sapien
gcagctcacccgaggtggtgtcgca

SEQ ID NO: 1577886 - DNA, 25 bp, Homo sapien
aggtggtgtcgcagaacctctggcc

SEQ ID NO: 1577887 - DNA, 25 bp, Homo sapien
tggcccactttcgcgacttctctgt

SEQ ID NO: 1577888 - DNA, 25 bp, Homo sapien
gggcgggcattcgaacacaacagtc

SEQ ID NO: 1577889 - DNA, 25 bp, Homo sapien
gagtccctcagcgcgactgccgcca

SEQ ID NO: 1577890 - DNA, 25 bp, Homo sapien
agtccctcagcgcgactgccgccat

SEQ ID NO: 1577891 - DNA, 25 bp, Homo sapien
gccgagtccctcagcgcgactgccg

SEQ ID NO: 1577892 - DNA, 25 bp, Homo sapien
ccgagtccctcagcgcgactgccgc

SEQ ID NO: 1577893 - DNA, 25 bp, Homo sapien
cgcagtacaggaacctctgagactc

SEQ ID NO: 1577894 - DNA, 25 bp, Homo sapien
catcgcagtacaggaacctctgaga

SEQ ID NO: 1577895 - DNA, 25 bp, Homo sapien
tcgcagtacaggaacctctgagact

SEQ ID NO: 1577896 - DNA, 25 bp, Homo sapien
atcgcagtacaggaacctctgagac

SEQ ID NO: 1577897 - DNA, 25 bp, Homo sapien
ctttgtctgctagtgatgtatgtgc

SEQ ID NO: 1577898 - DNA, 25 bp, Homo sapien
agcaggactttgtctgctagtgatg

SEQ ID NO: 1577899 - DNA, 25 bp, Homo sapien
ctagtgatgtatgtgctgtacagaa

SEQ ID NO: 1577900 - DNA, 25 bp, Homo sapien
tctgctagtgatgtatgtgctgtac

SEQ ID NO: 1577901 - DNA, 25 bp, Homo sapien
agaagctatcgcctcattctccatt

SEQ ID NO: 1577902 - DNA, 25 bp, Homo sapien
taatctcactgaggtgagttttctg

SEQ ID NO: 1577903 - DNA, 25 bp, Homo sapien
cttaatctcactgaggtgagttttc

SEQ ID NO: 1577904 - DNA, 25 bp, Homo sapien
tcttaatctcactgaggtgagtttt

SEQ ID NO: 1577905 - DNA, 25 bp, Homo sapien
gtgagttttctgggtgggtgtattg

SEQ ID NO: 1577906 - DNA, 25 bp, Homo sapien
gacttttgcacaggggatgtggttt

SEQ ID NO: 1577907 - DNA, 25 bp, Homo sapien
tgctacccaagtatgacttttgcac

SEQ ID NO: 1577908 - DNA, 25 bp, Homo sapien
catgcttgtgctacccaagtatgac

SEQ ID NO: 1577909 - DNA, 25 bp, Homo sapien
tgtggtttggtgctcagccgcaggc

SEQ ID NO: 1577910 - DNA, 25 bp, Homo sapien
tctgcagccggtcacaaatgtagcc

SEQ ID NO: 1577911 - DNA, 25 bp, Homo sapien
gcctccccacaggtgaaataattca

SEQ ID NO: 1577912 - DNA, 25 bp, Homo sapien
tgtgacgtctctggtggtgaatgaa

SEQ ID NO: 1577913 - DNA, 25 bp, Homo sapien
tactgtgtggctcctcaccactggg

SEQ ID NO: 1577914 - DNA, 25 bp, Homo sapien
tgtcgaatgagattgaagatttgtc

SEQ ID NO: 1577915 - DNA, 25 bp, Homo sapien
ctctctggtgtcgaaaaaggctaga

SEQ ID NO: 1577916 - DNA, 25 bp, Homo sapien
gtgaactcttctatgtcgaatgaga

SEQ ID NO: 1577917 - DNA, 25 bp, Homo sapien
gaatgagttccgatttgcagctaaa

SEQ ID NO: 1577918 - DNA, 25 bp, Homo sapien
ataaatttgcggctaaaggatttct

SEQ ID NO: 1577919 - DNA, 25 bp, Homo sapien
tttggtgttgaatcaggataaattt

SEQ ID NO: 1577920 - DNA, 25 bp, Homo sapien
tcagatttgcgggtaaaggattttc

SEQ ID NO: 1577921 - DNA, 25 bp, Homo sapien
cagtgtgaatgctgcggtgtcgaat

SEQ ID NO: 1577922 - DNA, 25 bp, Homo sapien
tgctgaatgaggccagagcgctgtc

SEQ ID NO: 1577923 - DNA, 25 bp, Homo sapien
agcactttggctaaaagactttcca

SEQ ID NO: 1577924 - DNA, 25 bp, Homo sapien
gctgaatgaggccagagcgctgtct

SEQ ID NO: 1577925 - DNA, 25 bp, Homo sapien
tgtgaactctccgatgtcgaatgag

SEQ ID NO: 1577926 - DNA, 25 bp, Homo sapien
ttcagtgtgaactctccgatgtcga

SEQ ID NO: 1577927 - DNA, 25 bp, Homo sapien
agtgtgaactctccgatgtcgaatg

SEQ ID NO: 1577928 - DNA, 25 bp, Homo sapien
tcttcagtgtgaactctccgatgtc

SEQ ID NO: 1577929 - DNA, 25 bp, Homo sapien
gaaattacaatgaacctcctcagag

SEQ ID NO: 1577930 - DNA, 25 bp, Homo sapien
taaatcaggctataggcctcggcag

SEQ ID NO: 1577931 - DNA, 25 bp, Homo sapien
cttatgaagaataccccactgtggg

SEQ ID NO: 1577932 - DNA, 25 bp, Homo sapien
taaatttacgaagatggctaccaca

SEQ ID NO: 1577933 - DNA, 25 bp, Homo sapien
caactgggtcaggtgtatactctaa

SEQ ID NO: 1577934 - DNA, 25 bp, Homo sapien
tacaagcatcatgtgagaccgacaa

SEQ ID NO: 1577935 - DNA, 25 bp, Homo sapien
gtaatccttagaaagctgacagcac

SEQ ID NO: 1577936 - DNA, 25 bp, Homo sapien
gcaatgtgcaccaagcagtttccag

SEQ ID NO: 1577937 - DNA, 25 bp, Homo sapien
ggcagcaggccaattagagcaatac

SEQ ID NO: 1577938 - DNA, 25 bp, Homo sapien
tggcaccaggccacaatacaggaac

SEQ ID NO: 1577939 - DNA, 25 bp, Homo sapien
gaattatgtggatctcctgtggaca

SEQ ID NO: 1577940 - DNA, 25 bp, Homo sapien
tacactgacttatatgccatggcac

SEQ ID NO: 1577941 - DNA, 25 bp, Homo sapien
aggtaaatatatgggtgacacacaa

SEQ ID NO: 1577942 - DNA, 25 bp, Homo sapien
actgacttatccatagaacagcatg

SEQ ID NO: 1577943 - DNA, 25 bp, Homo sapien
ctgtaaaggaaatcagttgaacctg

SEQ ID NO: 1577944 - DNA, 25 bp, Homo sapien
tataaatgtccctaaacacatggat

SEQ ID NO: 1577945 - DNA, 25 bp, Homo sapien
catccatttagatcaaatttggcat

SEQ ID NO: 1577946 - DNA, 25 bp, Homo sapien
actaagacattacagtttgagttat

SEQ ID NO: 1577947 - DNA, 25 bp, Homo sapien
ttgagttattaacacgaggaaaata

SEQ ID NO: 1577948 - DNA, 25 bp, Homo sapien
cattcacctacattgtaactaagac

SEQ ID NO: 1577949 - DNA, 25 bp, Homo sapien
gcacaatgtgggaagctaatggaca

SEQ ID NO: 1577950 - DNA, 25 bp, Homo sapien
gatagcaatctgtcttaaataagca

SEQ ID NO: 1577951 - DNA, 25 bp, Homo sapien
taatggacaagcagtttagcaacgt

SEQ ID NO: 1577952 - DNA, 25 bp, Homo sapien
taagcagcagttgatacaattcagt

SEQ ID NO: 1577953 - DNA, 25 bp, Homo sapien
ccaaatcaacaatgtgggaagttcg

SEQ ID NO: 1577954 - DNA, 25 bp, Homo sapien
aatcaacaatgtgggaagttcgttt

SEQ ID NO: 1577955 - DNA, 25 bp, Homo sapien
taagccaaatcaacaatgtgggaag

SEQ ID NO: 1577956 - DNA, 25 bp, Homo sapien
agccaaatcaacaatgtgggaagtt

SEQ ID NO: 1577957 - DNA, 25 bp, Homo sapien
gggtgtcagtttcctacatctgtca

SEQ ID NO: 1577958 - DNA, 25 bp, Homo sapien
atacacaaatggctccaggctgtgc

SEQ ID NO: 1577959 - DNA, 25 bp, Homo sapien
catgttgtggtagcaaaaggcacac

SEQ ID NO: 1577960 - DNA, 25 bp, Homo sapien
aacataaacctgtccacttggaaca

SEQ ID NO: 1577961 - DNA, 25 bp, Homo sapien
cataagtctgtaacctacaggttcc

SEQ ID NO: 1577962 - DNA, 25 bp, Homo sapien
tattttacttatactcccggatatc

SEQ ID NO: 1577963 - DNA, 25 bp, Homo sapien
gtcatttatgtttcatcggtcctca

SEQ ID NO: 1577964 - DNA, 25 bp, Homo sapien
ggtcctcatgtgtactagtgcgtta

SEQ ID NO: 1577965 - DNA, 25 bp, Homo sapien
cagagccttgtttgtgaagacctgc

SEQ ID NO: 1577966 - DNA, 25 bp, Homo sapien
tactgtcatgcaaacgatcccatgg

SEQ ID NO: 1577967 - DNA, 25 bp, Homo sapien
tacacacacttgtataagggctgcc

SEQ ID NO: 1577968 - DNA, 25 bp, Homo sapien
gaggaggcaccttctgacaagagca

SEQ ID NO: 1577969 - DNA, 25 bp, Homo sapien
gatttgaggatcctgtgtgccccag

SEQ ID NO: 1577970 - DNA, 25 bp, Homo sapien
cattatgcctgcctatgccaggagt

SEQ ID NO: 1577971 - DNA, 25 bp, Homo sapien
tagtggatcccaccttgattgtccc

SEQ ID NO: 1577972 - DNA, 25 bp, Homo sapien
tcatgacaagactatgggctctgct

SEQ ID NO: 1577973 - DNA, 25 bp, Homo sapien
ttattcaacctggaggataaggcca

SEQ ID NO: 1577974 - DNA, 25 bp, Homo sapien
caggtgccaatgtggtcatctgtga

SEQ ID NO: 1577975 - DNA, 25 bp, Homo sapien
cagcacggaagtggaatagggccat

SEQ ID NO: 1577976 - DNA, 25 bp, Homo sapien
cagaggcataggtgtatttgaggca

SEQ ID NO: 1577977 - DNA, 25 bp, Homo sapien
tatttgctatgatctctgagtccat

SEQ ID NO: 1577978 - DNA, 25 bp, Homo sapien
tctcttgctgcaccatatcctttgc

SEQ ID NO: 1577979 - DNA, 25 bp, Homo sapien
tagcatatgggcacgcattctttct

SEQ ID NO: 1577980 - DNA, 25 bp, Homo sapien
ttgccttaacaaaacctcacgcgag

SEQ ID NO: 1577981 - DNA, 25 bp, Homo sapien
catgattaggtaggcactctggctc

SEQ ID NO: 1577982 - DNA, 25 bp, Homo sapien
gattaggtaggcactctggctcaac

SEQ ID NO: 1577983 - DNA, 25 bp, Homo sapien
taggtaggcactctggctcaactgt

SEQ ID NO: 1577984 - DNA, 25 bp, Homo sapien
acatgattaggtaggcactctggct

SEQ ID NO: 1577985 - DNA, 25 bp, Homo sapien
tgatatagtgtgcacttgttttgtg

SEQ ID NO: 1577986 - DNA, 25 bp, Homo sapien
tctcttcttgtataataatataggc

SEQ ID NO: 1577987 - DNA, 25 bp, Homo sapien
tgtgcacttgttttgtgtgagatgg

SEQ ID NO: 1577988 - DNA, 25 bp, Homo sapien
tttgtgtgagatggaattagtttaa

SEQ ID NO: 1577989 - DNA, 25 bp, Homo sapien
gcatgcttgtgacgggcagacctct

SEQ ID NO: 1577990 - DNA, 25 bp, Homo sapien
cagccattgggagggaaccatcagt

SEQ ID NO: 1577991 - DNA, 25 bp, Homo sapien
caacagctcaccctagagtggaact

SEQ ID NO: 1577992 - DNA, 25 bp, Homo sapien
ggagattccctgtgagtgtcaagta

SEQ ID NO: 1577993 - DNA, 25 bp, Homo sapien
ttgagcacaggcgagttcacacggg

SEQ ID NO: 1577994 - DNA, 25 bp, Homo sapien
agccaggccttatgtatgcagcgaa

SEQ ID NO: 1577995 - DNA, 25 bp, Homo sapien
gagaaaggccatacgagtgcagcga

SEQ ID NO: 1577996 - DNA, 25 bp, Homo sapien
caaatctccggcctgattgagcaca

SEQ ID NO: 1577997 - DNA, 25 bp, Homo sapien
tacttcgagttttcccaagagccca

SEQ ID NO: 1577998 - DNA, 25 bp, Homo sapien
aaggatagctcagtgggaaccacac

SEQ ID NO: 1577999 - DNA, 25 bp, Homo sapien
tatacgttgcatacccaatgagggc

SEQ ID NO: 1578000 - DNA, 25 bp, Homo sapien
tgaaatcccgtactctgctaaaagt

SEQ ID NO: 1578001 - DNA, 25 bp, Homo sapien
taaccatcaccctaggcattccagg

SEQ ID NO: 1578002 - DNA, 25 bp, Homo sapien
gcagatgtcttcaggtttccaccca

SEQ ID NO: 1578003 - DNA, 25 bp, Homo sapien
tactttatgttgtagtcccaggact

SEQ ID NO: 1578004 - DNA, 25 bp, Homo sapien
aagtgctaccttgattaaccagtct

SEQ ID NO: 1578005 - DNA, 25 bp, Homo sapien
tcagcggcctgtccttaaagtgcat

SEQ ID NO: 1578006 - DNA, 25 bp, Homo sapien
catctcagcggcctgtccttaaagt

SEQ ID NO: 1578007 - DNA, 25 bp, Homo sapien
ccatctcagcggcctgtccttaaag

SEQ ID NO: 1578008 - DNA, 25 bp, Homo sapien
tctcagcggcctgtccttaaagtgc

SEQ ID NO: 1578009 - DNA, 25 bp, Homo sapien
cgcctagcgcctttaaggagctgca

SEQ ID NO: 1578010 - DNA, 25 bp, Homo sapien
ccttggtgcgggtcacgcctagcgc

SEQ ID NO: 1578011 - DNA, 25 bp, Homo sapien
cctctgtgcagtcgggacaacgtct

SEQ ID NO: 1578012 - DNA, 25 bp, Homo sapien
tctgggttcagtcacttctacacga

SEQ ID NO: 1578013 - DNA, 25 bp, Homo sapien
cctcagcgcggccgccgccatccga

SEQ ID NO: 1578014 - DNA, 25 bp, Homo sapien
gagccgggggcctcagcgcggccgc

SEQ ID NO: 1578015 - DNA, 25 bp, Homo sapien
gccgggggcctcagcgcggccgccg

SEQ ID NO: 1578016 - DNA, 25 bp, Homo sapien
ctgagccgggggcctcagcgcggcc

SEQ ID NO: 1578017 - DNA, 25 bp, Homo sapien
ctgccgtgatgatgacagatgaaac

SEQ ID NO: 1578018 - DNA, 25 bp, Homo sapien
ccgtgatgatgacagatgaaaccac

SEQ ID NO: 1578019 - DNA, 25 bp, Homo sapien
acagatgaaaccacaaacactccat

SEQ ID NO: 1578020 - DNA, 25 bp, Homo sapien
gacagatgaaaccacaaacactcca

SEQ ID NO: 1578021 - DNA, 25 bp, Homo sapien
cacgtcatgataaaggcatctctga

SEQ ID NO: 1578022 - DNA, 25 bp, Homo sapien
catctctgagcctcactaaggagac

SEQ ID NO: 1578023 - DNA, 25 bp, Homo sapien
ggagactccattcctcctgggaaaa

SEQ ID NO: 1578024 - DNA, 25 bp, Homo sapien
gagcctcactaaggagactccattc

SEQ ID NO: 1578025 - DNA, 25 bp, Homo sapien
ctagagaagatataagtgtcaggtt

SEQ ID NO: 1578026 - DNA, 25 bp, Homo sapien
gaagatataagtgtcaggttctcca

SEQ ID NO: 1578027 - DNA, 25 bp, Homo sapien
tagagaagatataagtgtcaggttc

SEQ ID NO: 1578028 - DNA, 25 bp, Homo sapien
gagaagatataagtgtcaggttctc

SEQ ID NO: 1578029 - DNA, 25 bp, Homo sapien
aagggtctgcttagaaggtgtctcg

SEQ ID NO: 1578030 - DNA, 25 bp, Homo sapien
acctgtccaatgtgtcctgagtggg

SEQ ID NO: 1578031 - DNA, 25 bp, Homo sapien
agaaggtgtctcgtcttttgctcca

SEQ ID NO: 1578032 - DNA, 25 bp, Homo sapien
ggactcctgttgtatagaaagggtc

SEQ ID NO: 1578033 - DNA, 25 bp, Homo sapien
cacacattccccagaggtggacctt

SEQ ID NO: 1578034 - DNA, 25 bp, Homo sapien
agaggtggaccttcttggtacatac

SEQ ID NO: 1578035 - DNA, 25 bp, Homo sapien
cattccccagaggtggaccttcttg

SEQ ID NO: 1578036 - DNA, 25 bp, Homo sapien
cccagaggtggaccttcttggtaca

SEQ ID NO: 1578037 - DNA, 25 bp, Homo sapien
cttctggtcttgatgatggtttgca

SEQ ID NO: 1578038 - DNA, 25 bp, Homo sapien
gcattgcttctgtacgatttctctc

SEQ ID NO: 1578039 - DNA, 25 bp, Homo sapien
tggcattgcttctgtacgatttctc

SEQ ID NO: 1578040 - DNA, 25 bp, Homo sapien
tggtttgcatcgtcatccaattttt

SEQ ID NO: 1578041 - DNA, 25 bp, Homo sapien
gaatcactgcatacataaggtcctt

SEQ ID NO: 1578042 - DNA, 25 bp, Homo sapien
tcgctgatggtcaacaagactgtgc

SEQ ID NO: 1578043 - DNA, 25 bp, Homo sapien
cacatgccgtacactcaaaaggtct

SEQ ID NO: 1578044 - DNA, 25 bp, Homo sapien
tgaggtgggccttataccaaaatga

SEQ ID NO: 1578045 - DNA, 25 bp, Homo sapien
ctgcccttttgatgaaaacatttcc

SEQ ID NO: 1578046 - DNA, 25 bp, Homo sapien
gcccttttgatgaaaacatttccca

SEQ ID NO: 1578047 - DNA, 25 bp, Homo sapien
tgcccttttgatgaaaacatttccc

SEQ ID NO: 1578048 - DNA, 25 bp, Homo sapien
ttctccacactcatgtggcctttct

SEQ ID NO: 1578049 - DNA, 25 bp, Homo sapien
cccgtgtgaactcgttgatgtttaa

SEQ ID NO: 1578050 - DNA, 25 bp, Homo sapien
ttcatgatgtctttctcccgtgtga

SEQ ID NO: 1578051 - DNA, 25 bp, Homo sapien
cttttgacgaaaacactttccacat

SEQ ID NO: 1578052 - DNA, 25 bp, Homo sapien
ccatactcataagtgctttccagtg

SEQ ID NO: 1578053 - DNA, 25 bp, Homo sapien
tccagtgtgatctcacgaatgttga

SEQ ID NO: 1578054 - DNA, 25 bp, Homo sapien
cttttggctagatgattttgcacat

SEQ ID NO: 1578055 - DNA, 25 bp, Homo sapien
gctctttttaccaacagatctgcca

SEQ ID NO: 1578056 - DNA, 25 bp, Homo sapien
ctctacactcagaaagcctttcccc

SEQ ID NO: 1578057 - DNA, 25 bp, Homo sapien
agtgtgatcttgctattgttgaatg

SEQ ID NO: 1578058 - DNA, 25 bp, Homo sapien
cagtgtgatcttgctattgttgaat

SEQ ID NO: 1578059 - DNA, 25 bp, Homo sapien
tctctagtgtgaacttgcagggcag

SEQ ID NO: 1578060 - DNA, 25 bp, Homo sapien
tcgcaaatgctctgcactcaaaagg

SEQ ID NO: 1578061 - DNA, 25 bp, Homo sapien
gaactcttacgaacatggagcgcag

SEQ ID NO: 1578062 - DNA, 25 bp, Homo sapien
tgaaagaagagtgaagccctcgcaa

SEQ ID NO: 1578063 - DNA, 25 bp, Homo sapien
taaatctggcaaggacatacgcagg

SEQ ID NO: 1578064 - DNA, 25 bp, Homo sapien
tgggccgcatgtatctcaggacagc

SEQ ID NO: 1578065 - DNA, 25 bp, Homo sapien
tgtatctaagccacacaatgcagtg

SEQ ID NO: 1578066 - DNA, 25 bp, Homo sapien
taccactgctgaatgggagacaact

SEQ ID NO: 1578067 - DNA, 25 bp, Homo sapien
tgagtttcagagtgacatcatttcc

SEQ ID NO: 1578068 - DNA, 25 bp, Homo sapien
cctgagtttcagagtgacatcattt

SEQ ID NO: 1578069 - DNA, 25 bp, Homo sapien
ctgagtttcagagtgacatcatttc

SEQ ID NO: 1578070 - DNA, 25 bp, Homo sapien
gttgcagtctgcttcactacctaga

SEQ ID NO: 1578071 - DNA, 25 bp, Homo sapien
taatcctagtgctttcaagggcgta

SEQ ID NO: 1578072 - DNA, 25 bp, Homo sapien
acctagaaatgctaattctacaaaa

SEQ ID NO: 1578073 - DNA, 25 bp, Homo sapien
ggccaggagttgaacatcagtcagg

SEQ ID NO: 1578074 - DNA, 25 bp, Homo sapien
cagacatagtgactgaatcattgtg

SEQ ID NO: 1578075 - DNA, 25 bp, Homo sapien
agacatagtgactgaatcattgtgg

SEQ ID NO: 1578076 - DNA, 25 bp, Homo sapien
gacatagtgactgaatcattgtgga

SEQ ID NO: 1578077 - DNA, 25 bp, Homo sapien
cagggatggctttttggtatgcagc

SEQ ID NO: 1578078 - DNA, 25 bp, Homo sapien
caatgacctaagctacactagattc

SEQ ID NO: 1578079 - DNA, 25 bp, Homo sapien
caaaacctttagatttagtctgaca

SEQ ID NO: 1578080 - DNA, 25 bp, Homo sapien
gcccagataggctacagaaatccac

SEQ ID NO: 1578081 - DNA, 25 bp, Homo sapien
gccagagagaaagatagtatttatt

SEQ ID NO: 1578082 - DNA, 25 bp, Homo sapien
gcaattagcctgtgtgataccaaat

SEQ ID NO: 1578083 - DNA, 25 bp, Homo sapien
attgactctcctaactctcatcacg

SEQ ID NO: 1578084 - DNA, 25 bp, Homo sapien
caaatacttatgagccaggaagatc

SEQ ID NO: 1578085 - DNA, 25 bp, Homo sapien
ggagagtactcaggtatgaaaagag

SEQ ID NO: 1578086 - DNA, 25 bp, Homo sapien
taagcagatgaattcgtatacagtg

SEQ ID NO: 1578087 - DNA, 25 bp, Homo sapien
tatgcatccctgctatgtgaaataa

SEQ ID NO: 1578088 - DNA, 25 bp, Homo sapien
gcaataacatatccataagcagatg

SEQ ID NO: 1578089 - DNA, 25 bp, Homo sapien
tcatctaccatgtgagttgggcact

SEQ ID NO: 1578090 - DNA, 25 bp, Homo sapien
gggtatacattcatctaccatgtga

SEQ ID NO: 1578091 - DNA, 25 bp, Homo sapien
ggagtctctcttggagctgtaagct

SEQ ID NO: 1578092 - DNA, 25 bp, Homo sapien
cacaccaaggcattcaaacaagaga

SEQ ID NO: 1578093 - DNA, 25 bp, Homo sapien
tgcatataaagtctgtggcattaga

SEQ ID NO: 1578094 - DNA, 25 bp, Homo sapien
tccagtgtatgaggttaggctgatc

SEQ ID NO: 1578095 - DNA, 25 bp, Homo sapien
cagtagtcagccaagcctaaaatcc

SEQ ID NO: 1578096 - DNA, 25 bp, Homo sapien
gacatccagctatgacagtagtcag

SEQ ID NO: 1578097 - DNA, 25 bp, Homo sapien
tctctgtcactcaggctggggtgca

SEQ ID NO: 1578098 - DNA, 25 bp, Homo sapien
ttttaagacatagttctctctgtca

SEQ ID NO: 1578099 - DNA, 25 bp, Homo sapien
tttttttaagacatagttctctctg

SEQ ID NO: 1578100 - DNA, 25 bp, Homo sapien
ctggggtgcagtggtgtgatcttgg

SEQ ID NO: 1578101 - DNA, 25 bp, Homo sapien
cccagacatgggcagcgcttaaggt

SEQ ID NO: 1578102 - DNA, 25 bp, Homo sapien
cacgttaccatttcgcagggcggat

SEQ ID NO: 1578103 - DNA, 25 bp, Homo sapien
ccggcaatggcacggcttctctgaa

SEQ ID NO: 1578104 - DNA, 25 bp, Homo sapien
tctgaagcttcattggctcagccac

SEQ ID NO: 1578105 - DNA, 25 bp, Homo sapien
gtcgttgtcctgtcccgggtcgcga

SEQ ID NO: 1578106 - DNA, 25 bp, Homo sapien
tcccgagctcgtccagacccagcat

SEQ ID NO: 1578107 - DNA, 25 bp, Homo sapien
tcagatccgcctgtgtgcaatggcc

SEQ ID NO: 1578108 - DNA, 25 bp, Homo sapien
cggtgttcctgtcgttgtcctgtcc

SEQ ID NO: 1578109 - DNA, 25 bp, Homo sapien
gagcaggcgccctcagagcggctgc

SEQ ID NO: 1578110 - DNA, 25 bp, Homo sapien
ctgagcaggcgccctcagagcggct

SEQ ID NO: 1578111 - DNA, 25 bp, Homo sapien
tgagcaggcgccctcagagcggctg

SEQ ID NO: 1578112 - DNA, 25 bp, Homo sapien
ctgatctcgaacccccggcctcacg

SEQ ID NO: 1578113 - DNA, 25 bp, Homo sapien
gatctcgaacccccggcctcacgtg

SEQ ID NO: 1578114 - DNA, 25 bp, Homo sapien
tgatctcgaacccccggcctcacgt

SEQ ID NO: 1578115 - DNA, 25 bp, Homo sapien
acaccataatgtggctgacatcatc

SEQ ID NO: 1578116 - DNA, 25 bp, Homo sapien
ataatgtggctgacatcatccacag

SEQ ID NO: 1578117 - DNA, 25 bp, Homo sapien
gggaggatataagtgtcaaggtctc

SEQ ID NO: 1578118 - DNA, 25 bp, Homo sapien
ggaggatataagtgtcaaggtctcc

SEQ ID NO: 1578119 - DNA, 25 bp, Homo sapien
tttctccagtgcgaacattcctgtg

SEQ ID NO: 1578120 - DNA, 25 bp, Homo sapien
gcactcataggtcttttgcccagta

SEQ ID NO: 1578121 - DNA, 25 bp, Homo sapien
tatacacgtgctctgcttagaaggt

SEQ ID NO: 1578122 - DNA, 25 bp, Homo sapien
tctctcatgaatatggagtgtaggc

SEQ ID NO: 1578123 - DNA, 25 bp, Homo sapien
gagttttcagcaaaggatctcccac

SEQ ID NO: 1578124 - DNA, 25 bp, Homo sapien
gaactctctgatggcgacggaacga

SEQ ID NO: 1578125 - DNA, 25 bp, Homo sapien
gacggaacgaagaactgtggcgaaa

SEQ ID NO: 1578126 - DNA, 25 bp, Homo sapien
tagatgtataagcaaaggacttccc

SEQ ID NO: 1578127 - DNA, 25 bp, Homo sapien
taggcgaatgatgtactgtgggcac

SEQ ID NO: 1578128 - DNA, 25 bp, Homo sapien
taacacaaatcagggcaataggtgg

SEQ ID NO: 1578129 - DNA, 25 bp, Homo sapien
aaaggcacttcttcagtgggagcac

SEQ ID NO: 1578130 - DNA, 25 bp, Homo sapien
cctgggcaggtcgaaaaatactatg

SEQ ID NO: 1578131 - DNA, 25 bp, Homo sapien
tgccctcctgcaaagactgaaggtg

SEQ ID NO: 1578132 - DNA, 25 bp, Homo sapien
ccatgccctcctgcaaagactgaag

SEQ ID NO: 1578133 - DNA, 25 bp, Homo sapien
catgccctcctgcaaagactgaagg

SEQ ID NO: 1578134 - DNA, 25 bp, Homo sapien
ttccatgccctcctgcaaagactga

SEQ ID NO: 1578135 - DNA, 25 bp, Homo sapien
ggacagtaagctctaagttctcaga

SEQ ID NO: 1578136 - DNA, 25 bp, Homo sapien
gaatggcacataaaactcagggaaa

SEQ ID NO: 1578137 - DNA, 25 bp, Homo sapien
catggctatcctgaaaacttggcta

SEQ ID NO: 1578138 - DNA, 25 bp, Homo sapien
tcctgcaggtgtggaataagaccat

SEQ ID NO: 1578139 - DNA, 25 bp, Homo sapien
ctgtattgattcagaatcactggac

SEQ ID NO: 1578140 - DNA, 25 bp, Homo sapien
gtattgattcagaatcactggacat

SEQ ID NO: 1578141 - DNA, 25 bp, Homo sapien
tgtattgattcagaatcactggaca

SEQ ID NO: 1578142 - DNA, 25 bp, Homo sapien
gatggtcccgacaagccaaaatggc

SEQ ID NO: 1578143 - DNA, 25 bp, Homo sapien
cagatccgcctgtgtgcaatgggca

SEQ ID NO: 1578144 - DNA, 25 bp, Homo sapien
tatttaagttccgagagacgcgcgg

SEQ ID NO: 1578145 - DNA, 25 bp, Homo sapien
caattcacagagacgattccgggta

SEQ ID NO: 1578146 - DNA, 25 bp, Homo sapien
actccgactcatactttgttctcag

SEQ ID NO: 1578147 - DNA, 25 bp, Homo sapien
ttctcagtggacacaagatgtccct

SEQ ID NO: 1578148 - DNA, 25 bp, Homo sapien
tgaggaaataactccgactcatact

SEQ ID NO: 1578149 - DNA, 25 bp, Homo sapien
cacaagatgtccctgtgttccgaat

SEQ ID NO: 1578150 - DNA, 25 bp, Homo sapien
tcggaatctttaactctaacacaga

SEQ ID NO: 1578151 - DNA, 25 bp, Homo sapien
catcttttcggaatctttaactcta

SEQ ID NO: 1578152 - DNA, 25 bp, Homo sapien
tgaacatcttttcggaatctttaac

SEQ ID NO: 1578153 - DNA, 25 bp, Homo sapien
tcctttgaacatcttttcggaatct

SEQ ID NO: 1578154 - DNA, 25 bp, Homo sapien
gaattagcacaaggtccaggctgag

SEQ ID NO: 1578155 - DNA, 25 bp, Homo sapien
gaatcaagaaggtgtgatagcccct

SEQ ID NO: 1578156 - DNA, 25 bp, Homo sapien
tcatctcaatatcgtggtgtggcca

SEQ ID NO: 1578157 - DNA, 25 bp, Homo sapien
ccttgaaaggatgcaactggcttgt

SEQ ID NO: 1578158 - DNA, 25 bp, Homo sapien
ggaggatataagtgtcaaggtctcc

SEQ ID NO: 1578159 - DNA, 25 bp, Homo sapien
gggaggatataagtgtcaaggtctc

SEQ ID NO: 1578160 - DNA, 25 bp, Homo sapien
tcaggtcacagttaagtatgagtac

SEQ ID NO: 1578161 - DNA, 25 bp, Homo sapien
ctcaggtcacagttaagtatgagta

SEQ ID NO: 1578162 - DNA, 25 bp, Homo sapien
ctaactcaggtcacagttaagtatg

SEQ ID NO: 1578163 - DNA, 25 bp, Homo sapien
aactcaggtcacagttaagtatgag

SEQ ID NO: 1578164 - DNA, 25 bp, Homo sapien
gcagcagagtctttattataataca

SEQ ID NO: 1578165 - DNA, 25 bp, Homo sapien
gattgaaggtgtcttaagcagcaga

SEQ ID NO: 1578166 - DNA, 25 bp, Homo sapien
gctggaaaattctatcttaagaatg

SEQ ID NO: 1578167 - DNA, 25 bp, Homo sapien
aacaattccacactgtaaatacagc

SEQ ID NO: 1578168 - DNA, 25 bp, Homo sapien
atataccgcacgataccatccaggg

SEQ ID NO: 1578169 - DNA, 25 bp, Homo sapien
ccagactccaggtaaatatgaaggt

SEQ ID NO: 1578170 - DNA, 25 bp, Homo sapien
tatcaatggtcatctggaaggcaga

SEQ ID NO: 1578171 - DNA, 25 bp, Homo sapien
gaggtaaagacgttaccagactcca

SEQ ID NO: 1578172 - DNA, 25 bp, Homo sapien
tgatcaaactactgccctcttggct

SEQ ID NO: 1578173 - DNA, 25 bp, Homo sapien
tatgatcaaactactgccctcttgg

SEQ ID NO: 1578174 - DNA, 25 bp, Homo sapien
gctatgatcaaactactgccctctt

SEQ ID NO: 1578175 - DNA, 25 bp, Homo sapien
gatcaaactactgccctcttggctg

SEQ ID NO: 1578176 - DNA, 25 bp, Homo sapien
gatgttttcccagttcttggcgtgg

SEQ ID NO: 1578177 - DNA, 25 bp, Homo sapien
tttcccagttcttggcgtggagaac

SEQ ID NO: 1578178 - DNA, 25 bp, Homo sapien
tgttttcccagttcttggcgtggag

SEQ ID NO: 1578179 - DNA, 25 bp, Homo sapien
gttttcccagttcttggcgtggaga

SEQ ID NO: 1578180 - DNA, 25 bp, Homo sapien
catgatcacataagtccagaagttt

SEQ ID NO: 1578181 - DNA, 25 bp, Homo sapien
gagccagagtcacacctgtattggt

SEQ ID NO: 1578182 - DNA, 25 bp, Homo sapien
tgtcctgggatgtatggagatttgt

SEQ ID NO: 1578183 - DNA, 25 bp, Homo sapien
cagaagtttaagacaggcttgggca

SEQ ID NO: 1578184 - DNA, 25 bp, Homo sapien
cagggttaatggtgtctccatcacc

SEQ ID NO: 1578185 - DNA, 25 bp, Homo sapien
aatcacatcagggttaatggtgtct

SEQ ID NO: 1578186 - DNA, 25 bp, Homo sapien
taatggtgtctccatcacctcaagc

SEQ ID NO: 1578187 - DNA, 25 bp, Homo sapien
atacccttttagtgattttcatatg

SEQ ID NO: 1578188 - DNA, 25 bp, Homo sapien
ccggcaggagggtgaacgcctcagg

SEQ ID NO: 1578189 - DNA, 25 bp, Homo sapien
ttcagtgtgctcctgttgcaaaact

SEQ ID NO: 1578190 - DNA, 25 bp, Homo sapien
ggtgaacgcctcaggttataaatga

SEQ ID NO: 1578191 - DNA, 25 bp, Homo sapien
caggcaatggaaaccggcaggaggg

SEQ ID NO: 1578192 - DNA, 25 bp, Homo sapien
ggtaatgcgtctaattccccacaaa

SEQ ID NO: 1578193 - DNA, 25 bp, Homo sapien
tgaggataccatcaaacagatagct

SEQ ID NO: 1578194 - DNA, 25 bp, Homo sapien
taggatctactagccagatggcgta

SEQ ID NO: 1578195 - DNA, 25 bp, Homo sapien
gagaagtgcccgataagtttaaagc

SEQ ID NO: 1578196 - DNA, 25 bp, Homo sapien
aattaaagcacgatagatttttctt

SEQ ID NO: 1578197 - DNA, 25 bp, Homo sapien
agagggtatcaaattctgtgtgtaa

SEQ ID NO: 1578198 - DNA, 25 bp, Homo sapien
catactggctaaagttaagagggta

SEQ ID NO: 1578199 - DNA, 25 bp, Homo sapien
ctggacgttaaaattaaagcacgat

SEQ ID NO: 1578200 - DNA, 25 bp, Homo sapien
caggcaggccaaaggttaagtccct

SEQ ID NO: 1578201 - DNA, 25 bp, Homo sapien
caaaaacagcaagcgcagagccaaa

SEQ ID NO: 1578202 - DNA, 25 bp, Homo sapien
tccccagccctgcggtttgtgaaaa

SEQ ID NO: 1578203 - DNA, 25 bp, Homo sapien
gacaaaggaaagaccagtagaagag

SEQ ID NO: 1578204 - DNA, 25 bp, Homo sapien
ccatcatcagagtcacaataatgaa

SEQ ID NO: 1578205 - DNA, 25 bp, Homo sapien
ctatcacctttgtattcacctggag

SEQ ID NO: 1578206 - DNA, 25 bp, Homo sapien
caaccattgatttactctgctgtat

SEQ ID NO: 1578207 - DNA, 25 bp, Homo sapien
ctatgcagacaaccattgatttact

SEQ ID NO: 1578208 - DNA, 25 bp, Homo sapien
tacagcactcgcatgtcatgaggac

SEQ ID NO: 1578209 - DNA, 25 bp, Homo sapien
taaactgtcctcaagcagaagctgc

SEQ ID NO: 1578210 - DNA, 25 bp, Homo sapien
cagtggtttccagtattagcataca

SEQ ID NO: 1578211 - DNA, 25 bp, Homo sapien
ggcctggacaaatccctctctacag

SEQ ID NO: 1578212 - DNA, 25 bp, Homo sapien
ctgtcatttttgttacctggagtgc

SEQ ID NO: 1578213 - DNA, 25 bp, Homo sapien
tctcacactgtcatttttgttacct

SEQ ID NO: 1578214 - DNA, 25 bp, Homo sapien
acactgtcatttttgttacctggag

SEQ ID NO: 1578215 - DNA, 25 bp, Homo sapien
tgtcatttttgttacctggagtgca

SEQ ID NO: 1578216 - DNA, 25 bp, Homo sapien
gaagacgtggctgtgaaatttaccc

SEQ ID NO: 1578217 - DNA, 25 bp, Homo sapien
cagagatgcctgtaccgtgatgtga

SEQ ID NO: 1578218 - DNA, 25 bp, Homo sapien
tggcacttatgtcctccctgggtaa

SEQ ID NO: 1578219 - DNA, 25 bp, Homo sapien
acattgggctttccatgacctcggc

SEQ ID NO: 1578220 - DNA, 25 bp, Homo sapien
tgagcttaccagatcctatcaggga

SEQ ID NO: 1578221 - DNA, 25 bp, Homo sapien
tagtcacacaagtcctaaagcagcg

SEQ ID NO: 1578222 - DNA, 25 bp, Homo sapien
gaacaacctgtgaggcggaactcct

SEQ ID NO: 1578223 - DNA, 25 bp, Homo sapien
gacacaaaagcgttcagggaggcct

SEQ ID NO: 1578224 - DNA, 25 bp, Homo sapien
ttagtagcgaccatttccattggcg

SEQ ID NO: 1578225 - DNA, 25 bp, Homo sapien
cattgaaggcgtttccgtgtgcgca

SEQ ID NO: 1578226 - DNA, 25 bp, Homo sapien
ccattggcgttagggagtccttgga

SEQ ID NO: 1578227 - DNA, 25 bp, Homo sapien
gtcaaatgacagcacggcagagcca

SEQ ID NO: 1578228 - DNA, 25 bp, Homo sapien
tgctctcaggttctgcgtccctcaa

SEQ ID NO: 1578229 - DNA, 25 bp, Homo sapien
ttaacactgcccgtgagggtctgcg

SEQ ID NO: 1578230 - DNA, 25 bp, Homo sapien
tcgactatctgttaatcacctggct

SEQ ID NO: 1578231 - DNA, 25 bp, Homo sapien
caggacaagccgcagggctgtattc

SEQ ID NO: 1578232 - DNA, 25 bp, Homo sapien
acgcgtatcgcagatcaacgtggcc

SEQ ID NO: 1578233 - DNA, 25 bp, Homo sapien
tgggttcattcaccgcagtcccacg

SEQ ID NO: 1578234 - DNA, 25 bp, Homo sapien
tctgtgcaccgagaacggttcctct

SEQ ID NO: 1578235 - DNA, 25 bp, Homo sapien
tcactgggcaaacacgcgtatcgca

SEQ ID NO: 1578236 - DNA, 25 bp, Homo sapien
tccaagagtctgaacctcgccaagt

SEQ ID NO: 1578237 - DNA, 25 bp, Homo sapien
gagtctgaacctcgccaagttgctc

SEQ ID NO: 1578238 - DNA, 25 bp, Homo sapien
ctccaagagtctgaacctcgccaag

SEQ ID NO: 1578239 - DNA, 25 bp, Homo sapien
aagagtctgaacctcgccaagttgc

SEQ ID NO: 1578240 - DNA, 25 bp, Homo sapien
aagaaagggttgcttagatgagtgt

SEQ ID NO: 1578241 - DNA, 25 bp, Homo sapien
cttaatttttagcaggaggtgatcc

SEQ ID NO: 1578242 - DNA, 25 bp, Homo sapien
tggagctcctaaaactggaatgaag

SEQ ID NO: 1578243 - DNA, 25 bp, Homo sapien
agaggagtgcaccttcccgaggcac

SEQ ID NO: 1578244 - DNA, 25 bp, Homo sapien
tctagccagagctgtggaaccgccg

SEQ ID NO: 1578245 - DNA, 25 bp, Homo sapien
ataaaagccaagggtctagccagag

SEQ ID NO: 1578246 - DNA, 25 bp, Homo sapien
gtctagccagagctgtggaaccgcc

SEQ ID NO: 1578247 - DNA, 25 bp, Homo sapien
taaataaaagccaagggtctagcca

SEQ ID NO: 1578248 - DNA, 25 bp, Homo sapien
ggacaactgttctccgccttctggg

SEQ ID NO: 1578249 - DNA, 25 bp, Homo sapien
tggcgccgtcacagagctccagagt

SEQ ID NO: 1578250 - DNA, 25 bp, Homo sapien
gagagggtgaccagccaggagatat

SEQ ID NO: 1578251 - DNA, 25 bp, Homo sapien
tgggcatgacggtccctatcctggc

SEQ ID NO: 1578252 - DNA, 25 bp, Homo sapien
gtgggtcacgcttggcgccgtcaca

SEQ ID NO: 1578253 - DNA, 25 bp, Homo sapien
gcagagagcctcagcgtggccacca

SEQ ID NO: 1578254 - DNA, 25 bp, Homo sapien
gagagcctcagcgtggccaccaccg

SEQ ID NO: 1578255 - DNA, 25 bp, Homo sapien
ctgagcagagagcctcagcgtggcc

SEQ ID NO: 1578256 - DNA, 25 bp, Homo sapien
gagcagagagcctcagcgtggccac

SEQ ID NO: 1578257 - DNA, 25 bp, Homo sapien
cagcagctcaaaagggctgtcctga

SEQ ID NO: 1578258 - DNA, 25 bp, Homo sapien
tctctaactcgctcaggtacagtga

SEQ ID NO: 1578259 - DNA, 25 bp, Homo sapien
tataaaagattaggccttcagcagc

SEQ ID NO: 1578260 - DNA, 25 bp, Homo sapien
gcatctgctgcctatggctctgcca

SEQ ID NO: 1578261 - DNA, 25 bp, Homo sapien
aagactgcatctaacgaggtaaggt

SEQ ID NO: 1578262 - DNA, 25 bp, Homo sapien
tatcagttctcactagaggattctg

SEQ ID NO: 1578263 - DNA, 25 bp, Homo sapien
ggattctgtgatgtaatgcccaacc

SEQ ID NO: 1578264 - DNA, 25 bp, Homo sapien
gagcacactgttccactatcagttc

SEQ ID NO: 1578265 - DNA, 25 bp, Homo sapien
gaataactagcagcagtacccaggt

SEQ ID NO: 1578266 - DNA, 25 bp, Homo sapien
gagaccccacctgcttgagaataac

SEQ ID NO: 1578267 - DNA, 25 bp, Homo sapien
gctgactgtacagggctagggcctt

SEQ ID NO: 1578268 - DNA, 25 bp, Homo sapien
gggaccttgtcttgcacctcagctg

SEQ ID NO: 1578269 - DNA, 25 bp, Homo sapien
atgaagtgtgccctccaaaatggga

SEQ ID NO: 1578270 - DNA, 25 bp, Homo sapien
gaagtgtgccctccaaaatgggacc

SEQ ID NO: 1578271 - DNA, 25 bp, Homo sapien
attatgaagtgtgccctccaaaatg

SEQ ID NO: 1578272 - DNA, 25 bp, Homo sapien
gtgtgccctccaaaatgggacccat

SEQ ID NO: 1578273 - DNA, 25 bp, Homo sapien
gagcctcactaaggagattccattc

SEQ ID NO: 1578274 - DNA, 25 bp, Homo sapien
tgccatcatgctcgagtgatttttt

SEQ ID NO: 1578275 - DNA, 25 bp, Homo sapien
catgccatcatgctcgagtgatttt

SEQ ID NO: 1578276 - DNA, 25 bp, Homo sapien
actctttagggactcactccttctg

SEQ ID NO: 1578277 - DNA, 25 bp, Homo sapien
ccttctgagcctattatgctgaggc

SEQ ID NO: 1578278 - DNA, 25 bp, Homo sapien
ggtgccgcctcatcttccactccac

SEQ ID NO: 1578279 - DNA, 25 bp, Homo sapien
tgtatataaatactctgcttagaag

SEQ ID NO: 1578280 - DNA, 25 bp, Homo sapien
aatactctgcttagaaggtgccgcc

SEQ ID NO: 1578281 - DNA, 25 bp, Homo sapien
ataaatactctgcttagaaggtgcc

SEQ ID NO: 1578282 - DNA, 25 bp, Homo sapien
cgtgaactttttgatggcgcctaag

SEQ ID NO: 1578283 - DNA, 25 bp, Homo sapien
taaggctgggcttccgactaaaaga

SEQ ID NO: 1578284 - DNA, 25 bp, Homo sapien
tgaatgcgctgatggtaactaaggc

SEQ ID NO: 1578285 - DNA, 25 bp, Homo sapien
cacataacattcttctcgagggaga

SEQ ID NO: 1578286 - DNA, 25 bp, Homo sapien
tctctcgtgaatgggagacaaccaa

SEQ ID NO: 1578287 - DNA, 25 bp, Homo sapien
taagtggcagtcacataagtctagc

SEQ ID NO: 1578288 - DNA, 25 bp, Homo sapien
taagtctagcaagataacagggcat

SEQ ID NO: 1578289 - DNA, 25 bp, Homo sapien
gaatgatgcaatgtgggtacctacc

SEQ ID NO: 1578290 - DNA, 25 bp, Homo sapien
gggaaactagcctccatagaagcaa

SEQ ID NO: 1578291 - DNA, 25 bp, Homo sapien
ggtgagcagcccaaaaggttacatg

SEQ ID NO: 1578292 - DNA, 25 bp, Homo sapien
cagtgactggataactgtggacact

SEQ ID NO: 1578293 - DNA, 25 bp, Homo sapien
cactaagactaaggtacatgccacc

SEQ ID NO: 1578294 - DNA, 25 bp, Homo sapien
aaacgaatgaacaactcatatatct

SEQ ID NO: 1578295 - DNA, 25 bp, Homo sapien
caactcatatatctacaatgacatc

SEQ ID NO: 1578296 - DNA, 25 bp, Homo sapien
agcaacataaaacgaatgaacaact

SEQ ID NO: 1578297 - DNA, 25 bp, Homo sapien
gaacaactcatatatctacaatgac

SEQ ID NO: 1578298 - DNA, 25 bp, Homo sapien
gagctaggtccctcagtgtggctgc

SEQ ID NO: 1578299 - DNA, 25 bp, Homo sapien
ctgagctaggtccctcagtgtggct

SEQ ID NO: 1578300 - DNA, 25 bp, Homo sapien
tgagctaggtccctcagtgtggctg

SEQ ID NO: 1578301 - DNA, 25 bp, Homo sapien
accttctaggttcagtcaccgcggt

SEQ ID NO: 1578302 - DNA, 25 bp, Homo sapien
cgggagcagtggtcgccgtcacggg

SEQ ID NO: 1578303 - DNA, 25 bp, Homo sapien
gccgcctctgggcaccgaggacgat

SEQ ID NO: 1578304 - DNA, 25 bp, Homo sapien
gggcaccgaggacgattcctctcca

SEQ ID NO: 1578305 - DNA, 25 bp, Homo sapien
tgggcgcctcggcacagccgctgcc

SEQ ID NO: 1578306 - DNA, 25 bp, Homo sapien
ctgagttgggcgcctcggcacagcc

SEQ ID NO: 1578307 - DNA, 25 bp, Homo sapien
agttgggcgcctcggcacagccgct

SEQ ID NO: 1578308 - DNA, 25 bp, Homo sapien
tgagttgggcgcctcggcacagccg

SEQ ID NO: 1578309 - DNA, 25 bp, Homo sapien
ctccctcgctggtttaggacctggg

SEQ ID NO: 1578310 - DNA, 25 bp, Homo sapien
taggacctgggtgacgatggggtga

SEQ ID NO: 1578311 - DNA, 25 bp, Homo sapien
gagcaggagccgctccctcgctggt

SEQ ID NO: 1578312 - DNA, 25 bp, Homo sapien
aggacctgggtgacgatggggtgac

SEQ ID NO: 1578313 - DNA, 25 bp, Homo sapien
gataaatagttacaactggccaggc

SEQ ID NO: 1578314 - DNA, 25 bp, Homo sapien
tataacggcccatgattcccttggg

SEQ ID NO: 1578315 - DNA, 25 bp, Homo sapien
aaatcatcctgtgaacgtctcctgg

SEQ ID NO: 1578316 - DNA, 25 bp, Homo sapien
ccagcccctggatttgtgaaccaaa

SEQ ID NO: 1578317 - DNA, 25 bp, Homo sapien
acggagttgaaaccacatccactgg

SEQ ID NO: 1578318 - DNA, 25 bp, Homo sapien
aaatgccatcagcaacaagaagtag

SEQ ID NO: 1578319 - DNA, 25 bp, Homo sapien
tccccaacacggagttgaaaccaca

SEQ ID NO: 1578320 - DNA, 25 bp, Homo sapien
caagaagtaggtggacaaataggta

SEQ ID NO: 1578321 - DNA, 25 bp, Homo sapien
tgagagccaggttctctagcatcac

SEQ ID NO: 1578322 - DNA, 25 bp, Homo sapien
actaagaagacaccactcctcctgg

SEQ ID NO: 1578323 - DNA, 25 bp, Homo sapien
gatatgagagccaggttctctagca

SEQ ID NO: 1578324 - DNA, 25 bp, Homo sapien
ctcactaagaagacaccactcctcc

SEQ ID NO: 1578325 - DNA, 25 bp, Homo sapien
caaactcgcggaagacaaatggctc

SEQ ID NO: 1578326 - DNA, 25 bp, Homo sapien
tcttggcacaatcctgaactgggca

SEQ ID NO: 1578327 - DNA, 25 bp, Homo sapien
taaggctgctctttcgactataaga

SEQ ID NO: 1578328 - DNA, 25 bp, Homo sapien
gaaattctctgcttacaaggtgcct

SEQ ID NO: 1578329 - DNA, 25 bp, Homo sapien
aagcagaacttctgacgaaaagatt

SEQ ID NO: 1578330 - DNA, 25 bp, Homo sapien
taaagcagaacttctgacgaaaaga

SEQ ID NO: 1578331 - DNA, 25 bp, Homo sapien
ttgaatgaggttacccttttgacca

SEQ ID NO: 1578332 - DNA, 25 bp, Homo sapien
aataaagcagaacttctgacgaaaa

SEQ ID NO: 1578333 - DNA, 25 bp, Homo sapien
tagtcacgctgtgcttattgccaaa

SEQ ID NO: 1578334 - DNA, 25 bp, Homo sapien
gtcacgctgtgcttattgccaaata

SEQ ID NO: 1578335 - DNA, 25 bp, Homo sapien
tatagtcacgctgtgcttattgcca

SEQ ID NO: 1578336 - DNA, 25 bp, Homo sapien
tgtatagtcacgctgtgcttattgc

SEQ ID NO: 1578337 - DNA, 25 bp, Homo sapien
aaggagggtagagcttcgctgaaat

SEQ ID NO: 1578338 - DNA, 25 bp, Homo sapien
cctgtgtttaatgagactggaacat

SEQ ID NO: 1578339 - DNA, 25 bp, Homo sapien
tagagcttcgctgaaatgtttttcc

SEQ ID NO: 1578340 - DNA, 25 bp, Homo sapien
gaatgaactcttttatgaacatgaa

SEQ ID NO: 1578341 - DNA, 25 bp, Homo sapien
tcagcaaacgatttcccatattcac

SEQ ID NO: 1578342 - DNA, 25 bp, Homo sapien
ttcagcaaacgatttcccatattca

SEQ ID NO: 1578343 - DNA, 25 bp, Homo sapien
acccaggaggcccaagttgcagcga

SEQ ID NO: 1578344 - DNA, 25 bp, Homo sapien
caagactgcaccactgcactccagc

SEQ ID NO: 1578345 - DNA, 25 bp, Homo sapien
aagactccatctcaacacgaagtcg

SEQ ID NO: 1578346 - DNA, 25 bp, Homo sapien
aggaggcccaagttgcagcgagcca

SEQ ID NO: 1578347 - DNA, 25 bp, Homo sapien
ccaaagcatcaggtttacaagcatg

SEQ ID NO: 1578348 - DNA, 25 bp, Homo sapien
ccatgcctggttcagcatgtcatat

SEQ ID NO: 1578349 - DNA, 25 bp, Homo sapien
tattctaagcaatacgaaaagaatg

SEQ ID NO: 1578350 - DNA, 25 bp, Homo sapien
tgaacaactgcattcaaatatagca

SEQ ID NO: 1578351 - DNA, 25 bp, Homo sapien
actttaatctatcacgtgactcagg

SEQ ID NO: 1578352 - DNA, 25 bp, Homo sapien
tgcacaccaccatattaccatagtg

SEQ ID NO: 1578353 - DNA, 25 bp, Homo sapien
ccgaaatcatgccacctaactcccg

SEQ ID NO: 1578354 - DNA, 25 bp, Homo sapien
atgccacctaactcccgcctgggtg

SEQ ID NO: 1578355 - DNA, 25 bp, Homo sapien
ttgaggtcagttcataacaagcctg

SEQ ID NO: 1578356 - DNA, 25 bp, Homo sapien
cagaaattcttggacactgatggta

SEQ ID NO: 1578357 - DNA, 25 bp, Homo sapien
catactccctcttggtaagatagaa

SEQ ID NO: 1578358 - DNA, 25 bp, Homo sapien
aagttgtacattaggccaagcacag

SEQ ID NO: 1578359 - DNA, 25 bp, Homo sapien
atgcaaaacataaaccactgactca

SEQ ID NO: 1578360 - DNA, 25 bp, Homo sapien
acataaaccactgactcaaaagtta

SEQ ID NO: 1578361 - DNA, 25 bp, Homo sapien
taaaccactgactcaaaagttataa

SEQ ID NO: 1578362 - DNA, 25 bp, Homo sapien
gcaaaacataaaccactgactcaaa

SEQ ID NO: 1578363 - DNA, 25 bp, Homo sapien
gctgagattgtgccacggtactcta

SEQ ID NO: 1578364 - DNA, 25 bp, Homo sapien
ctgagattgtgccacggtactctag

SEQ ID NO: 1578365 - DNA, 25 bp, Homo sapien
aacaagcctacaggtgaggccaggc

SEQ ID NO: 1578366 - DNA, 25 bp, Homo sapien
agaccaagcacttttggagcctagg

SEQ ID NO: 1578367 - DNA, 25 bp, Homo sapien
gagttcgcgatcagactgggcaaaa

SEQ ID NO: 1578368 - DNA, 25 bp, Homo sapien
tcacccctgtagaccaagcactttt

SEQ ID NO: 1578369 - DNA, 25 bp, Homo sapien
catgccacttcactgtagcttagga

SEQ ID NO: 1578370 - DNA, 25 bp, Homo sapien
gaaagctatggtggcatcttaactg

SEQ ID NO: 1578371 - DNA, 25 bp, Homo sapien
accaagtattcagccaggtacagtg

SEQ ID NO: 1578372 - DNA, 25 bp, Homo sapien
tatatgtattgtcactttgggacgc

SEQ ID NO: 1578373 - DNA, 25 bp, Homo sapien
gtttttggtcagccataagaggaag

SEQ ID NO: 1578374 - DNA, 25 bp, Homo sapien
ttttggtcagccataagaggaagaa

SEQ ID NO: 1578375 - DNA, 25 bp, Homo sapien
tttttggtcagccataagaggaaga

SEQ ID NO: 1578376 - DNA, 25 bp, Homo sapien
aaacacaaagtgtccactcaataac

SEQ ID NO: 1578377 - DNA, 25 bp, Homo sapien
aataactttgcttgaaactgtcttc

SEQ ID NO: 1578378 - DNA, 25 bp, Homo sapien
ccactcaataactttgcttgaaact

SEQ ID NO: 1578379 - DNA, 25 bp, Homo sapien
acacaaagtgtccactcaataactt

SEQ ID NO: 1578380 - DNA, 25 bp, Homo sapien
attaagctgacgtggtgggcgcttg

SEQ ID NO: 1578381 - DNA, 25 bp, Homo sapien
aaattaagctgacgtggtgggcgct

SEQ ID NO: 1578382 - DNA, 25 bp, Homo sapien
aattaagctgacgtggtgggcgctt

SEQ ID NO: 1578383 - DNA, 25 bp, Homo sapien
aaaattaagctgacgtggtgggcgc

SEQ ID NO: 1578384 - DNA, 25 bp, Homo sapien
gaggtagaagttgcagtgagctgag

SEQ ID NO: 1578385 - DNA, 25 bp, Homo sapien
aatcccagctaaagaggtggctgag

SEQ ID NO: 1578386 - DNA, 25 bp, Homo sapien
ctgagattgcgacacggcactccaa

SEQ ID NO: 1578387 - DNA, 25 bp, Homo sapien
ggcaaggagaagtgcttgaatccag

SEQ ID NO: 1578388 - DNA, 25 bp, Homo sapien
gattccattagcaaattaagctccc

SEQ ID NO: 1578389 - DNA, 25 bp, Homo sapien
ggaaaataacagagattccattagc

SEQ ID NO: 1578390 - DNA, 25 bp, Homo sapien
cagagattccattagcaaattaagc

SEQ ID NO: 1578391 - DNA, 25 bp, Homo sapien
ctaacttacaatcttttatccacat

SEQ ID NO: 1578392 - DNA, 25 bp, Homo sapien
atttagggataatatctaagcccat

SEQ ID NO: 1578393 - DNA, 25 bp, Homo sapien
tctaagcccatataacatgctgtta

SEQ ID NO: 1578394 - DNA, 25 bp, Homo sapien
gggataatatctaagcccatataac

SEQ ID NO: 1578395 - DNA, 25 bp, Homo sapien
atatctaagcccatataacatgctg

SEQ ID NO: 1578396 - DNA, 25 bp, Homo sapien
gatttctagggataagccgagtgcg

SEQ ID NO: 1578397 - DNA, 25 bp, Homo sapien
taggtgcctatacatcatgctatca

SEQ ID NO: 1578398 - DNA, 25 bp, Homo sapien
tattcacatttctcaagtgccatgc

SEQ ID NO: 1578399 - DNA, 25 bp, Homo sapien
gagactgttaacatctgactgtacc

SEQ ID NO: 1578400 - DNA, 25 bp, Homo sapien
tcaaagatctttccagtgagaagga

SEQ ID NO: 1578401 - DNA, 25 bp, Homo sapien
aacttctagatatcattgaaactcc

SEQ ID NO: 1578402 - DNA, 25 bp, Homo sapien
cataatttgtttgaacgagcccttt

SEQ ID NO: 1578403 - DNA, 25 bp, Homo sapien
tgtgcttatataacatgctgtaata

SEQ ID NO: 1578404 - DNA, 25 bp, Homo sapien
gcagagactaaaattgcttagtact

SEQ ID NO: 1578405 - DNA, 25 bp, Homo sapien
cagagactaaaattgcttagtactg

SEQ ID NO: 1578406 - DNA, 25 bp, Homo sapien
gagactaaaattgcttagtactgaa

SEQ ID NO: 1578407 - DNA, 25 bp, Homo sapien
agagactaaaattgcttagtactga

SEQ ID NO: 1578408 - DNA, 25 bp, Homo sapien
cccagccaggaaagttccttataga

SEQ ID NO: 1578409 - DNA, 25 bp, Homo sapien
ctagctattgaaaagagaattataa

SEQ ID NO: 1578410 - DNA, 25 bp, Homo sapien
tataagccactgtaagattcaacac

SEQ ID NO: 1578411 - DNA, 25 bp, Homo sapien
aaatatacatggactggctaaacat

SEQ ID NO: 1578412 - DNA, 25 bp, Homo sapien
tatgtgaagcataaattgagcagtt

SEQ ID NO: 1578413 - DNA, 25 bp, Homo sapien
atgcctttatgtgtaggcttgattt

SEQ ID NO: 1578414 - DNA, 25 bp, Homo sapien
attttatgtgaagcataaattgagc

SEQ ID NO: 1578415 - DNA, 25 bp, Homo sapien
attgataagcaatgtacacccctca

SEQ ID NO: 1578416 - DNA, 25 bp, Homo sapien
tagccaggcagggtgcctgtctgta

SEQ ID NO: 1578417 - DNA, 25 bp, Homo sapien
tgaaccctgggggtggtcaaggctg

SEQ ID NO: 1578418 - DNA, 25 bp, Homo sapien
gagactgtttcacggtattggcctg

SEQ ID NO: 1578419 - DNA, 25 bp, Homo sapien
gactgtttcacggtattggcctgac

SEQ ID NO: 1578420 - DNA, 25 bp, Homo sapien
tgtttcacggtattggcctgactgg

SEQ ID NO: 1578421 - DNA, 25 bp, Homo sapien
agagactgtttcacggtattggcct

SEQ ID NO: 1578422 - DNA, 25 bp, Homo sapien
cagacgagatcaggcgcgttcaggg

SEQ ID NO: 1578423 - DNA, 25 bp, Homo sapien
cgttcagggtggtatggccatagac

SEQ ID NO: 1578424 - DNA, 25 bp, Homo sapien
gttcagggtggtatggccatagacg

SEQ ID NO: 1578425 - DNA, 25 bp, Homo sapien
agatcagacgagatcaggcgcgttc

SEQ ID NO: 1578426 - DNA, 25 bp, Homo sapien
aaaataatgcggtggctctggccaa

SEQ ID NO: 1578427 - DNA, 25 bp, Homo sapien
agtagagacggtttcttcaaagttg

SEQ ID NO: 1578428 - DNA, 25 bp, Homo sapien
caagaactcagaaaatgtgactgca

SEQ ID NO: 1578429 - DNA, 25 bp, Homo sapien
acaagaactcagaaaatgtgactgc

SEQ ID NO: 1578430 - DNA, 25 bp, Homo sapien
agacaagaactcagaaaatgtgact

SEQ ID NO: 1578431 - DNA, 25 bp, Homo sapien
gacaagaactcagaaaatgtgactg

SEQ ID NO: 1578432 - DNA, 25 bp, Homo sapien
catttgataaggctttcagggtagg

SEQ ID NO: 1578433 - DNA, 25 bp, Homo sapien
cctttatgggcggtggcgacactaa

SEQ ID NO: 1578434 - DNA, 25 bp, Homo sapien
tagccttttggctacagggccccag

SEQ ID NO: 1578435 - DNA, 25 bp, Homo sapien
tcatggatggtgtccatttgataag

SEQ ID NO: 1578436 - DNA, 25 bp, Homo sapien
catcgtaaaggtgggtagtcattga

SEQ ID NO: 1578437 - DNA, 25 bp, Homo sapien
taaaggtgggtagtcattgaggaac

SEQ ID NO: 1578438 - DNA, 25 bp, Homo sapien
gtgcatcgtaaaggtgggtagtcat

SEQ ID NO: 1578439 - DNA, 25 bp, Homo sapien
ctgtgggtgcatcgtaaaggtgggt

SEQ ID NO: 1578440 - DNA, 25 bp, Homo sapien
caatgttgagttgtcctagcaggca

SEQ ID NO: 1578441 - DNA, 25 bp, Homo sapien
cctagcaggcactggatagagagca

SEQ ID NO: 1578442 - DNA, 25 bp, Homo sapien
gagcttggtagcatgtgtgttcaaa

SEQ ID NO: 1578443 - DNA, 25 bp, Homo sapien
tatcatacggggcagaccacttctc

SEQ ID NO: 1578444 - DNA, 25 bp, Homo sapien
gccttggactctctacgtcaggtga

SEQ ID NO: 1578445 - DNA, 25 bp, Homo sapien
gactctctacgtcaggtgatccatc

SEQ ID NO: 1578446 - DNA, 25 bp, Homo sapien
actctctacgtcaggtgatccatcc

SEQ ID NO: 1578447 - DNA, 25 bp, Homo sapien
tcaggccttggactctctacgtcag

SEQ ID NO: 1578448 - DNA, 25 bp, Homo sapien
gtttcctcttataatccctgggtgc

SEQ ID NO: 1578449 - DNA, 25 bp, Homo sapien
tacacagaaatcacggaaagggcag

SEQ ID NO: 1578450 - DNA, 25 bp, Homo sapien
ctcaagatacagagttctacacaga

SEQ ID NO: 1578451 - DNA, 25 bp, Homo sapien
aagaaaaatagtaccacagctcaag

SEQ ID NO: 1578452 - DNA, 25 bp, Homo sapien
ccatgtaggtgggactggaagcatg

SEQ ID NO: 1578453 - DNA, 25 bp, Homo sapien
tcccatgtaggtgggactggaagca

SEQ ID NO: 1578454 - DNA, 25 bp, Homo sapien
ctcccatgtaggtgggactggaagc

SEQ ID NO: 1578455 - DNA, 25 bp, Homo sapien
atgtaggtgggactggaagcatgtg

SEQ ID NO: 1578456 - DNA, 25 bp, Homo sapien
tagtcagtatagagttgccaaacct

SEQ ID NO: 1578457 - DNA, 25 bp, Homo sapien
cagtatagagttgccaaacctgttt

SEQ ID NO: 1578458 - DNA, 25 bp, Homo sapien
ttggtgtagtcagtatagagttgcc

SEQ ID NO: 1578459 - DNA, 25 bp, Homo sapien
gaattggtgtagtcagtatagagtt

SEQ ID NO: 1578460 - DNA, 25 bp, Homo sapien
gccaccacgtgcagcgtaatgcatg

SEQ ID NO: 1578461 - DNA, 25 bp, Homo sapien
acatcaatatttgctaccgtggagg

SEQ ID NO: 1578462 - DNA, 25 bp, Homo sapien
gatacaggaattatcaggacttcca

SEQ ID NO: 1578463 - DNA, 25 bp, Homo sapien
gaccagccagccacttaatcaggtg

SEQ ID NO: 1578464 - DNA, 25 bp, Homo sapien
gcagagcctcaccctgttgcccagg

SEQ ID NO: 1578465 - DNA, 25 bp, Homo sapien
gcacatgccaccacacccagctaat

SEQ ID NO: 1578466 - DNA, 25 bp, Homo sapien
ctggagtgcagtggcataatcttgg

SEQ ID NO: 1578467 - DNA, 25 bp, Homo sapien
ctcacggcaacctctgcctcccagg

SEQ ID NO: 1578468 - DNA, 25 bp, Homo sapien
tccaagtcatgatcctaagaacagc

SEQ ID NO: 1578469 - DNA, 25 bp, Homo sapien
cattgtacttggtacggctgaggga

SEQ ID NO: 1578470 - DNA, 25 bp, Homo sapien
cagaggcctcttacgttgacttgaa

SEQ ID NO: 1578471 - DNA, 25 bp, Homo sapien
gaatgtagctttctccacttgtgga

SEQ ID NO: 1578472 - DNA, 25 bp, Homo sapien
tgtaaccctttgagagtgccaccta

SEQ ID NO: 1578473 - DNA, 25 bp, Homo sapien
ggagcctcaaacattgacatgagaa

SEQ ID NO: 1578474 - DNA, 25 bp, Homo sapien
tcagcctttttattggagcctcaaa

SEQ ID NO: 1578475 - DNA, 25 bp, Homo sapien
gcatttttcactatacccaggtacc

SEQ ID NO: 1578476 - DNA, 25 bp, Homo sapien
tggtcacaccaccttatgagtgcag

SEQ ID NO: 1578477 - DNA, 25 bp, Homo sapien
tgggcaattttgtagccacacctct

SEQ ID NO: 1578478 - DNA, 25 bp, Homo sapien
ggatcagggccttaccagtgtgaca

SEQ ID NO: 1578479 - DNA, 25 bp, Homo sapien
gagtaaggtcttgtgattgcagcaa

SEQ ID NO: 1578480 - DNA, 25 bp, Homo sapien
ggagaaaagccatatgcttgtgaag

SEQ ID NO: 1578481 - DNA, 25 bp, Homo sapien
tctacattctgtgttcataagcgaa

SEQ ID NO: 1578482 - DNA, 25 bp, Homo sapien
taagaagaagtctcacctccttgta

SEQ ID NO: 1578483 - DNA, 25 bp, Homo sapien
taccaactcattgcacatcagagag

SEQ ID NO: 1578484 - DNA, 25 bp, Homo sapien
gaatgtgggaaatgttttagtcaca

SEQ ID NO: 1578485 - DNA, 25 bp, Homo sapien
gcgagttcacactacagaaagacct

SEQ ID NO: 1578486 - DNA, 25 bp, Homo sapien
gaatcatcagcgagttcacactaca

SEQ ID NO: 1578487 - DNA, 25 bp, Homo sapien
tgaaaaaggacaccttaggaatcat

SEQ ID NO: 1578488 - DNA, 25 bp, Homo sapien
ttaggagccatcaacgagttcacgc

SEQ ID NO: 1578489 - DNA, 25 bp, Homo sapien
tctttcagtcaaaagggcaacctcg

SEQ ID NO: 1578490 - DNA, 25 bp, Homo sapien
gttcacgccggagaaagacctttca

SEQ ID NO: 1578491 - DNA, 25 bp, Homo sapien
tctttcagtcataagcgcagccttg

SEQ ID NO: 1578492 - DNA, 25 bp, Homo sapien
tcactgggaatataaggagggttgt

SEQ ID NO: 1578493 - DNA, 25 bp, Homo sapien
gaagctgtatcagctgagatgagca

SEQ ID NO: 1578494 - DNA, 25 bp, Homo sapien
tgagcaagttgggagtaggcataat

SEQ ID NO: 1578495 - DNA, 25 bp, Homo sapien
ggagggttgttttcaccatgctcag

SEQ ID NO: 1578496 - DNA, 25 bp, Homo sapien
aatttggtgttctgggccgggtgtg

SEQ ID NO: 1578497 - DNA, 25 bp, Homo sapien
cagggagaattagggagaattgctt

SEQ ID NO: 1578498 - DNA, 25 bp, Homo sapien
gaggcagggagaattagggagaatt

SEQ ID NO: 1578499 - DNA, 25 bp, Homo sapien
ggcagggagaattagggagaattgc

SEQ ID NO: 1578500 - DNA, 25 bp, Homo sapien
ggtgtctcagtaggttgtgctcccc

SEQ ID NO: 1578501 - DNA, 25 bp, Homo sapien
cacaggacatgcctaggggttgcag

SEQ ID NO: 1578502 - DNA, 25 bp, Homo sapien
ttagctacctcaactggtgtctcag

SEQ ID NO: 1578503 - DNA, 25 bp, Homo sapien
gcaaggcttgccagatctcaagtcc

SEQ ID NO: 1578504 - DNA, 25 bp, Homo sapien
gataagccgtatctttttctgaggc

SEQ ID NO: 1578505 - DNA, 25 bp, Homo sapien
caatctccttaacctgcttccagga

SEQ ID NO: 1578506 - DNA, 25 bp, Homo sapien
gatgcaggacttcaccggcagaaaa

SEQ ID NO: 1578507 - DNA, 25 bp, Homo sapien
tttgtgcatcggcaaaagctgcaga

SEQ ID NO: 1578508 - DNA, 25 bp, Homo sapien
cattcatgccatcactcgtataggg

SEQ ID NO: 1578509 - DNA, 25 bp, Homo sapien
gctgtcatgggctgatccttttgta

SEQ ID NO: 1578510 - DNA, 25 bp, Homo sapien
tgtccccatgttggagggtctgcct

SEQ ID NO: 1578511 - DNA, 25 bp, Homo sapien
tcgtatagggagttctggctcttcc

SEQ ID NO: 1578512 - DNA, 25 bp, Homo sapien
gattactgccaaccatacttgtgtg

SEQ ID NO: 1578513 - DNA, 25 bp, Homo sapien
tcagggctggaatggttatatttta

SEQ ID NO: 1578514 - DNA, 25 bp, Homo sapien
cacaatttccccaatgccaagcgtc

SEQ ID NO: 1578515 - DNA, 25 bp, Homo sapien
tacattcgagtttgtctggtcagaa

SEQ ID NO: 1578516 - DNA, 25 bp, Homo sapien
taagaaggcccttcagtgcaatttt

SEQ ID NO: 1578517 - DNA, 25 bp, Homo sapien
ctttccaatgagtccatcagcttat

SEQ ID NO: 1578518 - DNA, 25 bp, Homo sapien
tgtaccgtgtatggttctctttcca

SEQ ID NO: 1578519 - DNA, 25 bp, Homo sapien
cagcttccgtctgaatgtaccgtgt

SEQ ID NO: 1578520 - DNA, 25 bp, Homo sapien
gggcttaaagcgagggtggcatggg

SEQ ID NO: 1578521 - DNA, 25 bp, Homo sapien
gcatgggaccggtggaggcaaagtg

SEQ ID NO: 1578522 - DNA, 25 bp, Homo sapien
gtcactggggctatgaagtctggca

SEQ ID NO: 1578523 - DNA, 25 bp, Homo sapien
caagacaagagtacatagggtgggt

SEQ ID NO: 1578524 - DNA, 25 bp, Homo sapien
ccaaattgggaaatgtcccagtcag

SEQ ID NO: 1578525 - DNA, 25 bp, Homo sapien
tcccaaattgggaaatgtcccagtc

SEQ ID NO: 1578526 - DNA, 25 bp, Homo sapien
cccaaattgggaaatgtcccagtca

SEQ ID NO: 1578527 - DNA, 25 bp, Homo sapien
ttccttacagaagagccaccgtgga

SEQ ID NO: 1578528 - DNA, 25 bp, Homo sapien
ccaccgtggaagtcatgggtaaata

SEQ ID NO: 1578529 - DNA, 25 bp, Homo sapien
gggaactcatttaactggagacata

SEQ ID NO: 1578530 - DNA, 25 bp, Homo sapien
tatgtgttgaattggtaactccctc

SEQ ID NO: 1578531 - DNA, 25 bp, Homo sapien
cccaagttgctagggacaggcatgt

SEQ ID NO: 1578532 - DNA, 25 bp, Homo sapien
gcctcccaagttgctagggacaggc

SEQ ID NO: 1578533 - DNA, 25 bp, Homo sapien
aaaatgctaagattacaggatgagc

SEQ ID NO: 1578534 - DNA, 25 bp, Homo sapien
actgtgcctggcatgcttttggttt

SEQ ID NO: 1578535 - DNA, 25 bp, Homo sapien
tttccatgggaacgactgattgacc

SEQ ID NO: 1578536 - DNA, 25 bp, Homo sapien
cagtccttcataggattggaggcct

SEQ ID NO: 1578537 - DNA, 25 bp, Homo sapien
tcttccttggcatggtcctatctgg

SEQ ID NO: 1578538 - DNA, 25 bp, Homo sapien
aacatacgcctagtgtctccaggtg

SEQ ID NO: 1578539 - DNA, 25 bp, Homo sapien
tattcctttgtgtgtataaaccaca

SEQ ID NO: 1578540 - DNA, 25 bp, Homo sapien
ttgcctcaggtgataggatttcatt

SEQ ID NO: 1578541 - DNA, 25 bp, Homo sapien
gttgcctcaggtgataggatttcat

SEQ ID NO: 1578542 - DNA, 25 bp, Homo sapien
attctgttctttgaatagtattcct

SEQ ID NO: 1578543 - DNA, 25 bp, Homo sapien
gtgggaatgtgcatgtttatgttcc

SEQ ID NO: 1578544 - DNA, 25 bp, Homo sapien
tccacatatgagtgggaatgtgcat

SEQ ID NO: 1578545 - DNA, 25 bp, Homo sapien
catatgagtgggaatgtgcatgttt

SEQ ID NO: 1578546 - DNA, 25 bp, Homo sapien
agtgggaatgtgcatgtttatgttc

SEQ ID NO: 1578547 - DNA, 25 bp, Homo sapien
catagggctgttacggactgagaag

SEQ ID NO: 1578548 - DNA, 25 bp, Homo sapien
caccgaagagttcataccggagaaa

SEQ ID NO: 1578549 - DNA, 25 bp, Homo sapien
tctagcctcgttaaacaccgaagag

SEQ ID NO: 1578550 - DNA, 25 bp, Homo sapien
tcagaacgttcacaagggataaagg

SEQ ID NO: 1578551 - DNA, 25 bp, Homo sapien
tccgggctcgatgctggaaaaatgc

SEQ ID NO: 1578552 - DNA, 25 bp, Homo sapien
catgaagttaagaagattgaccacc

SEQ ID NO: 1578553 - DNA, 25 bp, Homo sapien
cataggtaagctaaagggtatggcc

SEQ ID NO: 1578554 - DNA, 25 bp, Homo sapien
tggagcacatcctcatggagcacgt

SEQ ID NO: 1578555 - DNA, 25 bp, Homo sapien
actagtaagggagtagagctgagat

SEQ ID NO: 1578556 - DNA, 25 bp, Homo sapien
tagagctgagattggctccagagtt

SEQ ID NO: 1578557 - DNA, 25 bp, Homo sapien
cttcagtgtttctatagcagagatt

SEQ ID NO: 1578558 - DNA, 25 bp, Homo sapien
tcagtgtttctatagcagagatttg

SEQ ID NO: 1578559 - DNA, 25 bp, Homo sapien
gggcaccttgtatggcaaaagggac

SEQ ID NO: 1578560 - DNA, 25 bp, Homo sapien
ccccacaaagatatctgcatcctaa

SEQ ID NO: 1578561 - DNA, 25 bp, Homo sapien
caaaagggaccttcagatgagagta

SEQ ID NO: 1578562 - DNA, 25 bp, Homo sapien
cctggattgtctgagtggattctaa

SEQ ID NO: 1578563 - DNA, 25 bp, Homo sapien
tcccttaaacatgcagtgacggcgg

SEQ ID NO: 1578564 - DNA, 25 bp, Homo sapien
tgggtgaactctgctgcacgtcggc

SEQ ID NO: 1578565 - DNA, 25 bp, Homo sapien
gcggcggtcactgtcaagttgcaaa

SEQ ID NO: 1578566 - DNA, 25 bp, Homo sapien
ttcgacgcaggtgccagaaaggtcc

SEQ ID NO: 1578567 - DNA, 25 bp, Homo sapien
agagacttgggaacgagccctgacg

SEQ ID NO: 1578568 - DNA, 25 bp, Homo sapien
cacagagaagggtagctcgaattag

SEQ ID NO: 1578569 - DNA, 25 bp, Homo sapien
tcagccgtcgagcttcacagagaag

SEQ ID NO: 1578570 - DNA, 25 bp, Homo sapien
ggtgcgtcgctggtaacccatgctc

SEQ ID NO: 1578571 - DNA, 25 bp, Homo sapien
tctaagctgtgagctggaatttgga

SEQ ID NO: 1578572 - DNA, 25 bp, Homo sapien
cagaatgtgaggcaaggacctgatg

SEQ ID NO: 1578573 - DNA, 25 bp, Homo sapien
cctgatgtgagatcctaaaagtgcc

SEQ ID NO: 1578574 - DNA, 25 bp, Homo sapien
ctttaattacttgggaagccagtgc

SEQ ID NO: 1578575 - DNA, 25 bp, Homo sapien
tgagccaaatatggtgaccagtggc

SEQ ID NO: 1578576 - DNA, 25 bp, Homo sapien
catgacagcagagccttatgacctc

SEQ ID NO: 1578577 - DNA, 25 bp, Homo sapien
gagaattagggagatgagtcacagc

SEQ ID NO: 1578578 - DNA, 25 bp, Homo sapien
gaaacctccggagataacagactgt

SEQ ID NO: 1578579 - DNA, 25 bp, Homo sapien
cgatgatgagttcaagatggtgcct

SEQ ID NO: 1578580 - DNA, 25 bp, Homo sapien
gaaatgtactgccttacggtctgga

SEQ ID NO: 1578581 - DNA, 25 bp, Homo sapien
tactggactaagatcgaaaacccca

SEQ ID NO: 1578582 - DNA, 25 bp, Homo sapien
gattatctcctggtttggaccgtca

SEQ ID NO: 1578583 - DNA, 25 bp, Homo sapien
ctttccagtccttgttcagatgtca

SEQ ID NO: 1578584 - DNA, 25 bp, Homo sapien
tctttccagtccttgttcagatgtc

SEQ ID NO: 1578585 - DNA, 25 bp, Homo sapien
cttctttccagtccttgttcagatg

SEQ ID NO: 1578586 - DNA, 25 bp, Homo sapien
ttctttccagtccttgttcagatgt

SEQ ID NO: 1578587 - DNA, 25 bp, Homo sapien
caataggtaggatactatttttagg

SEQ ID NO: 1578588 - DNA, 25 bp, Homo sapien
tttatctgcagtgtgcaattatacc

SEQ ID NO: 1578589 - DNA, 25 bp, Homo sapien
ttcaaaagacaccacggatgaggta

SEQ ID NO: 1578590 - DNA, 25 bp, Homo sapien
gcaattataccacaattaagttgat

SEQ ID NO: 1578591 - DNA, 25 bp, Homo sapien
tctggcctggtcgtcctggattcgg

SEQ ID NO: 1578592 - DNA, 25 bp, Homo sapien
cctagagcaagtgactaaagcgggc

SEQ ID NO: 1578593 - DNA, 25 bp, Homo sapien
gcccaggcctagaggtttagatcca

SEQ ID NO: 1578594 - DNA, 25 bp, Homo sapien
ccaagatgatggtatggccctgcct

SEQ ID NO: 1578595 - DNA, 25 bp, Homo sapien
tgagatcccattgtgcggacgcacc

SEQ ID NO: 1578596 - DNA, 25 bp, Homo sapien
tgcagcccaatgaattctcacctgg

SEQ ID NO: 1578597 - DNA, 25 bp, Homo sapien
catagatcataagcgtgcagcccaa

SEQ ID NO: 1578598 - DNA, 25 bp, Homo sapien
tttgagaagcctgctgatcagcggc

SEQ ID NO: 1578599 - DNA, 25 bp, Homo sapien
ctcggtcatggcgacccctgggctg

SEQ ID NO: 1578600 - DNA, 25 bp, Homo sapien
gagcgcgcccaacgccgcgggcgga

SEQ ID NO: 1578601 - DNA, 25 bp, Homo sapien
cctgggctggcgagcgcgcccaacg

SEQ ID NO: 1578602 - DNA, 25 bp, Homo sapien
cttcgctcgggcctgggccactcgg

SEQ ID NO: 1578603 - DNA, 25 bp, Homo sapien
ccaaattctattgcggggatgggca

SEQ ID NO: 1578604 - DNA, 25 bp, Homo sapien
gccccaaattctattgcggggatgg

SEQ ID NO: 1578605 - DNA, 25 bp, Homo sapien
gcactgagatctgcagcccgagccc

SEQ ID NO: 1578606 - DNA, 25 bp, Homo sapien
agggctttgccgctgatgccggatg

SEQ ID NO: 1578607 - DNA, 25 bp, Homo sapien
gatgagagtcctggactgatgggtg

SEQ ID NO: 1578608 - DNA, 25 bp, Homo sapien
gctgatgagagtcctggactgatgg

SEQ ID NO: 1578609 - DNA, 25 bp, Homo sapien
tgatgagagtcctggactgatgggt

SEQ ID NO: 1578610 - DNA, 25 bp, Homo sapien
ctgatgagagtcctggactgatggg

SEQ ID NO: 1578611 - DNA, 25 bp, Homo sapien
gggaggggggctgtagcccctcagc

SEQ ID NO: 1578612 - DNA, 25 bp, Homo sapien
ggggctgtagcccctcagcatcctc

SEQ ID NO: 1578613 - DNA, 25 bp, Homo sapien
agggaggggggctgtagcccctcag

SEQ ID NO: 1578614 - DNA, 25 bp, Homo sapien
agccatcttcgagtcagcgtacccg

SEQ ID NO: 1578615 - DNA, 25 bp, Homo sapien
tgggaaactaccagcttggtcttcc

SEQ ID NO: 1578616 - DNA, 25 bp, Homo sapien
gccacctgcaccctgattgggaaac

SEQ ID NO: 1578617 - DNA, 25 bp, Homo sapien
agccagccatcttcgagtcagcgta

SEQ ID NO: 1578618 - DNA, 25 bp, Homo sapien
ttcatacactctgcagttctcgtgc

SEQ ID NO: 1578619 - DNA, 25 bp, Homo sapien
aaacaagacatctttaggaaggatt

SEQ ID NO: 1578620 - DNA, 25 bp, Homo sapien
gaaggatttttgaccatatgggaaa

SEQ ID NO: 1578621 - DNA, 25 bp, Homo sapien
tgaaaaggagggattccatgggatt

SEQ ID NO: 1578622 - DNA, 25 bp, Homo sapien
tccaaatggtgtcgggctcccatgt

SEQ ID NO: 1578623 - DNA, 25 bp, Homo sapien
aaatggtgtcgggctcccatgtgac

SEQ ID NO: 1578624 - DNA, 25 bp, Homo sapien
cctccaaatggtgtcgggctcccat

SEQ ID NO: 1578625 - DNA, 25 bp, Homo sapien
caaatggtgtcgggctcccatgtga

SEQ ID NO: 1578626 - DNA, 25 bp, Homo sapien
caggatgatgcgtgagtgtcataga

SEQ ID NO: 1578627 - DNA, 25 bp, Homo sapien
tgatgtacagatgacatgaggcaca

SEQ ID NO: 1578628 - DNA, 25 bp, Homo sapien
tgtgatgggagtattcaaccgtgcc

SEQ ID NO: 1578629 - DNA, 25 bp, Homo sapien
cagggaacgtgggatgcaggatgat

SEQ ID NO: 1578630 - DNA, 25 bp, Homo sapien
gacagaggggtcacatcagatggtg

SEQ ID NO: 1578631 - DNA, 25 bp, Homo sapien
ggcagggacagaggggtcacatcag

SEQ ID NO: 1578632 - DNA, 25 bp, Homo sapien
gatgcccctcggctccttacttcct

SEQ ID NO: 1578633 - DNA, 25 bp, Homo sapien
ggtcacatcagatggtggccctctg

SEQ ID NO: 1578634 - DNA, 25 bp, Homo sapien
gtcccagtggctccggacagagccg

SEQ ID NO: 1578635 - DNA, 25 bp, Homo sapien
tgtgtgtggactggatcccgagtcc

SEQ ID NO: 1578636 - DNA, 25 bp, Homo sapien
aggcggacagaatcagcaatcaggg

SEQ ID NO: 1578637 - DNA, 25 bp, Homo sapien
tggcaggcggacagaatcagcaatc

SEQ ID NO: 1578638 - DNA, 25 bp, Homo sapien
gaggcaggggctttgggccgtggaa

SEQ ID NO: 1578639 - DNA, 25 bp, Homo sapien
ggcaggggctttgggccgtggaagc

SEQ ID NO: 1578640 - DNA, 25 bp, Homo sapien
caggggctttgggccgtggaagcat

SEQ ID NO: 1578641 - DNA, 25 bp, Homo sapien
ggaggcaggggctttgggccgtgga

SEQ ID NO: 1578642 - DNA, 25 bp, Homo sapien
ggcccgctcgccacgtggtactgga

SEQ ID NO: 1578643 - DNA, 25 bp, Homo sapien
agcgcagacgctgggcttcggtgtc

SEQ ID NO: 1578644 - DNA, 25 bp, Homo sapien
agagctggcccagcgcgaggtgcgg

SEQ ID NO: 1578645 - DNA, 25 bp, Homo sapien
agggtctgcgtcctgctcactcggg

SEQ ID NO: 1578646 - DNA, 25 bp, Homo sapien
cacatctgtgtgaggtcctccacca

SEQ ID NO: 1578647 - DNA, 25 bp, Homo sapien
ccctgcagcttcgggggccctgtga

SEQ ID NO: 1578648 - DNA, 25 bp, Homo sapien
gtgactgcacccaggtccgcatctt

SEQ ID NO: 1578649 - DNA, 25 bp, Homo sapien
atcttgctgggcagcgcgcccagga

SEQ ID NO: 1578650 - DNA, 25 bp, Homo sapien
gggtgggagcgatgtgggcgggaag

SEQ ID NO: 1578651 - DNA, 25 bp, Homo sapien
caggagaggtttgctggtcgggagg

SEQ ID NO: 1578652 - DNA, 25 bp, Homo sapien
gaaggagggcagttcggtcctcgga

SEQ ID NO: 1578653 - DNA, 25 bp, Homo sapien
ttcggtcctcggagacgtcaggccc

SEQ ID NO: 1578654 - DNA, 25 bp, Homo sapien
gagggatctttaatcaccgactgag

SEQ ID NO: 1578655 - DNA, 25 bp, Homo sapien
tgagtgagaaattcgaggcagatga

SEQ ID NO: 1578656 - DNA, 25 bp, Homo sapien
taatcaccgactgagtgagaaattc

SEQ ID NO: 1578657 - DNA, 25 bp, Homo sapien
gggaaatggagggatctttaatcac

SEQ ID NO: 1578658 - DNA, 25 bp, Homo sapien
gcaaagatgcagaaggacaaagccc

SEQ ID NO: 1578659 - DNA, 25 bp, Homo sapien
agccccactcatgggactgggccct

SEQ ID NO: 1578660 - DNA, 25 bp, Homo sapien
gatggaatctcgacgtggggtcaca

SEQ ID NO: 1578661 - DNA, 25 bp, Homo sapien
tcccagtgtccaatccctgcacttt

SEQ ID NO: 1578662 - DNA, 25 bp, Homo sapien
tccagtcctggggttcgaccgagtc

SEQ ID NO: 1578663 - DNA, 25 bp, Homo sapien
ttcctcctcaccgaaactccagtcc

SEQ ID NO: 1578664 - DNA, 25 bp, Homo sapien
ctcaccgaaactccagtcctggggt

SEQ ID NO: 1578665 - DNA, 25 bp, Homo sapien
gttcgaccgagtccagagataccag

SEQ ID NO: 1578666 - DNA, 25 bp, Homo sapien
ggccgtcccagaagcggcacgcatg

SEQ ID NO: 1578667 - DNA, 25 bp, Homo sapien
atccttgaggccgtcccagaagcgg

SEQ ID NO: 1578668 - DNA, 25 bp, Homo sapien
ccagaagcggcacgcatgccctggg

SEQ ID NO: 1578669 - DNA, 25 bp, Homo sapien
cagtccttggatggggcatccttga

SEQ ID NO: 1578670 - DNA, 25 bp, Homo sapien
cctcattaagatggacgccgtgtgt

SEQ ID NO: 1578671 - DNA, 25 bp, Homo sapien
tgcggacggttgacggcagcggttg

SEQ ID NO: 1578672 - DNA, 25 bp, Homo sapien
tcctcaggcgccgtccgtgcggacg

SEQ ID NO: 1578673 - DNA, 25 bp, Homo sapien
ttcgccgtctcggtggctcctcagg

SEQ ID NO: 1578674 - DNA, 25 bp, Homo sapien
atggcgctctcgacacggtgcgaag

SEQ ID NO: 1578675 - DNA, 25 bp, Homo sapien
cacagaggtggaggtccatggcgct

SEQ ID NO: 1578676 - DNA, 25 bp, Homo sapien
acggtgcgaaggcactcgggcctca

SEQ ID NO: 1578677 - DNA, 25 bp, Homo sapien
caacagggcgcgaagagtgccagcc

SEQ ID NO: 1578678 - DNA, 25 bp, Homo sapien
ctgtacacagggccgccttcctcca

SEQ ID NO: 1578679 - DNA, 25 bp, Homo sapien
ttcttgttcttgtccttcaaggact

SEQ ID NO: 1578680 - DNA, 25 bp, Homo sapien
cttgtccttcaaggacttgagggac

SEQ ID NO: 1578681 - DNA, 25 bp, Homo sapien
cagcttcttgttcttgtccttcaag

SEQ ID NO: 1578682 - DNA, 25 bp, Homo sapien
aactcggctagctccagcttgacct

SEQ ID NO: 1578683 - DNA, 25 bp, Homo sapien
ggcacagaaccggagcaactgcctg

SEQ ID NO: 1578684 - DNA, 25 bp, Homo sapien
gctgcgatcttggtgtggatccgta

SEQ ID NO: 1578685 - DNA, 25 bp, Homo sapien
ttctccttgatggactgagtctcgg

SEQ ID NO: 1578686 - DNA, 25 bp, Homo sapien
tctgcctttatggagcgcagccgca

SEQ ID NO: 1578687 - DNA, 25 bp, Homo sapien
ctgcctttatggagcgcagccgcat

SEQ ID NO: 1578688 - DNA, 25 bp, Homo sapien
ctggcccctcaggtggttttccctg

SEQ ID NO: 1578689 - DNA, 25 bp, Homo sapien
tggcccctcaggtggttttccctga

SEQ ID NO: 1578690 - DNA, 25 bp, Homo sapien
ggtcggctggcaagagggtgtccgg

SEQ ID NO: 1578691 - DNA, 25 bp, Homo sapien
cggctggcaagagggtgtccgggag

SEQ ID NO: 1578692 - DNA, 25 bp, Homo sapien
tcggctggcaagagggtgtccggga

SEQ ID NO: 1578693 - DNA, 25 bp, Homo sapien
ctggtcggctggcaagagggtgtcc

SEQ ID NO: 1578694 - DNA, 25 bp, Homo sapien
ccacctcggccactttcacctgtgc

SEQ ID NO: 1578695 - DNA, 25 bp, Homo sapien
tcctttgccacaatctctgggagag

SEQ ID NO: 1578696 - DNA, 25 bp, Homo sapien
ctcggccactttcacctgtgcttcc

SEQ ID NO: 1578697 - DNA, 25 bp, Homo sapien
ggagagtctgcagtgtggacttgag

SEQ ID NO: 1578698 - DNA, 25 bp, Homo sapien
gcatggtcgccttctcctgcagtgt

SEQ ID NO: 1578699 - DNA, 25 bp, Homo sapien
tggtcgccttctcctgcagtgtggc

SEQ ID NO: 1578700 - DNA, 25 bp, Homo sapien
catggtcgccttctcctgcagtgtg

SEQ ID NO: 1578701 - DNA, 25 bp, Homo sapien
tgcatggtcgccttctcctgcagtg

SEQ ID NO: 1578702 - DNA, 25 bp, Homo sapien
gactgcaggacagtgtcaggcactt

SEQ ID NO: 1578703 - DNA, 25 bp, Homo sapien
caggacagtgtcaggcacttctggc

SEQ ID NO: 1578704 - DNA, 25 bp, Homo sapien
gacagtgtcaggcacttctggctgg

SEQ ID NO: 1578705 - DNA, 25 bp, Homo sapien
ctgactgcaggacagtgtcaggcac

SEQ ID NO: 1578706 - DNA, 25 bp, Homo sapien
caagccgttgatctgcccgattatc

SEQ ID NO: 1578707 - DNA, 25 bp, Homo sapien
ctggctttagatccttccatgtatt

SEQ ID NO: 1578708 - DNA, 25 bp, Homo sapien
gaggatgctgatctcctccttagtc

SEQ ID NO: 1578709 - DNA, 25 bp, Homo sapien
tgaggtggtcgacgttgaccttgcc

SEQ ID NO: 1578710 - DNA, 25 bp, Homo sapien
gcatacctgagatgccaggagatcg

SEQ ID NO: 1578711 - DNA, 25 bp, Homo sapien
taatgcatacctgagatgccaggag

SEQ ID NO: 1578712 - DNA, 25 bp, Homo sapien
tgcatacctgagatgccaggagatc

SEQ ID NO: 1578713 - DNA, 25 bp, Homo sapien
gagataatgcatacctgagatgcca

SEQ ID NO: 1578714 - DNA, 25 bp, Homo sapien
ctgtgactaatcaagggcagcagag

SEQ ID NO: 1578715 - DNA, 25 bp, Homo sapien
tgtgactaatcaagggcagcagagg

SEQ ID NO: 1578716 - DNA, 25 bp, Homo sapien
aggtctgtcttgagtgggtcttcgc

SEQ ID NO: 1578717 - DNA, 25 bp, Homo sapien
tcttcctgctctcacgttgggagta

SEQ ID NO: 1578718 - DNA, 25 bp, Homo sapien
ttctgaaatcgtaaccagaggagcc

SEQ ID NO: 1578719 - DNA, 25 bp, Homo sapien
aagaccaggagtcaagcacgcactg

SEQ ID NO: 1578720 - DNA, 25 bp, Homo sapien
gccactgcatccagaatcagctcag

SEQ ID NO: 1578721 - DNA, 25 bp, Homo sapien
tttcctcggggagtgctggggctgc

SEQ ID NO: 1578722 - DNA, 25 bp, Homo sapien
ctgctgccactgcatccagaatcag

SEQ ID NO: 1578723 - DNA, 25 bp, Homo sapien
ctgcatccagaatcagctcagacgc

SEQ ID NO: 1578724 - DNA, 25 bp, Homo sapien
ggagctgggtagtctccagccactc

SEQ ID NO: 1578725 - DNA, 25 bp, Homo sapien
ggcgcggggcgcttcggcctccgcc

SEQ ID NO: 1578726 - DNA, 25 bp, Homo sapien
ctggagctgggtagtctccagccac

SEQ ID NO: 1578727 - DNA, 25 bp, Homo sapien
tggagctgggtagtctccagccact

SEQ ID NO: 1578728 - DNA, 25 bp, Homo sapien
tgaggcccttctcgtagggtgaacg

SEQ ID NO: 1578729 - DNA, 25 bp, Homo sapien
tcgtagggtgaacgatgtacatggt

SEQ ID NO: 1578730 - DNA, 25 bp, Homo sapien
ctgggtaaccccgtgctccaacact

SEQ ID NO: 1578731 - DNA, 25 bp, Homo sapien
gactgtctgccttggctgccgttca

SEQ ID NO: 1578732 - DNA, 25 bp, Homo sapien
gaggaccccagtgactgagccaagt

SEQ ID NO: 1578733 - DNA, 25 bp, Homo sapien
tagtgagtggatggccttggcatct

SEQ ID NO: 1578734 - DNA, 25 bp, Homo sapien
ctgctcaatacggcccctgtgtcct

SEQ ID NO: 1578735 - DNA, 25 bp, Homo sapien
gggcacggaggaccccagtgactga

SEQ ID NO: 1578736 - DNA, 25 bp, Homo sapien
tggggctcgagatcacagtcccttc

SEQ ID NO: 1578737 - DNA, 25 bp, Homo sapien
agaaggtcctcaggctcgtcccaga

SEQ ID NO: 1578738 - DNA, 25 bp, Homo sapien
gcttcagaggcaagcgggcccggga

SEQ ID NO: 1578739 - DNA, 25 bp, Homo sapien
cgtcccagatactcggcttcagagg

SEQ ID NO: 1578740 - DNA, 25 bp, Homo sapien
acagcctcttgggtaccacctttgg

SEQ ID NO: 1578741 - DNA, 25 bp, Homo sapien
ccttcctcgcgatgggtcttctggt

SEQ ID NO: 1578742 - DNA, 25 bp, Homo sapien
ccgcagacgctacactggaagggtc

SEQ ID NO: 1578743 - DNA, 25 bp, Homo sapien
tggatcttgccatgctcagtgagga

SEQ ID NO: 1578744 - DNA, 25 bp, Homo sapien
cagggactcagggccgggtggccga

SEQ ID NO: 1578745 - DNA, 25 bp, Homo sapien
agggactcagggccgggtggccgag

SEQ ID NO: 1578746 - DNA, 25 bp, Homo sapien
tgcttggcttcggagcaggtgtcca

SEQ ID NO: 1578747 - DNA, 25 bp, Homo sapien
ccatcccgtgcttggcttcggagca

SEQ ID NO: 1578748 - DNA, 25 bp, Homo sapien
ggtgtccagggtcttccgagaaaca

SEQ ID NO: 1578749 - DNA, 25 bp, Homo sapien
ggtcttccgagaaacagcttgtgtc

SEQ ID NO: 1578750 - DNA, 25 bp, Homo sapien
cagaagctgccgctgagtcaggtgc

SEQ ID NO: 1578751 - DNA, 25 bp, Homo sapien
agtgaaatgaaaacccagcggcaga

SEQ ID NO: 1578752 - DNA, 25 bp, Homo sapien
gatgggacgcgaatgaaactcctct

SEQ ID NO: 1578753 - DNA, 25 bp, Homo sapien
gctaacagggagacctggacaaggc

SEQ ID NO: 1578754 - DNA, 25 bp, Homo sapien
aattaaggcataggatagagccagg

SEQ ID NO: 1578755 - DNA, 25 bp, Homo sapien
cagcaattaaggcataggatagagc

SEQ ID NO: 1578756 - DNA, 25 bp, Homo sapien
gcaattaaggcataggatagagcca

SEQ ID NO: 1578757 - DNA, 25 bp, Homo sapien
ttaaggcataggatagagccaggag

SEQ ID NO: 1578758 - DNA, 25 bp, Homo sapien
tctgtaggacctgttgtatgctggg

SEQ ID NO: 1578759 - DNA, 25 bp, Homo sapien
tcactctgtaggacctgttgtatgc

SEQ ID NO: 1578760 - DNA, 25 bp, Homo sapien
ctgggtgtggtcaagtatggcagtg

SEQ ID NO: 1578761 - DNA, 25 bp, Homo sapien
cactctgtaggacctgttgtatgct

SEQ ID NO: 1578762 - DNA, 25 bp, Homo sapien
ccctcagaggtcgagggaggcttcc

SEQ ID NO: 1578763 - DNA, 25 bp, Homo sapien
ggcttccccggctggaaactgcagc

SEQ ID NO: 1578764 - DNA, 25 bp, Homo sapien
ccacaatggtgtcccggtgtctcca

SEQ ID NO: 1578765 - DNA, 25 bp, Homo sapien
ggtgtctccacagggacttcccctc

SEQ ID NO: 1578766 - DNA, 25 bp, Homo sapien
gagactccggtcttccagagcgtga

SEQ ID NO: 1578767 - DNA, 25 bp, Homo sapien
tgtctcttgtaaccactggctgggc

SEQ ID NO: 1578768 - DNA, 25 bp, Homo sapien
tgacagcttcaaaacctggcagtgt

SEQ ID NO: 1578769 - DNA, 25 bp, Homo sapien
gcaggtgggctgcacatcagtacag

SEQ ID NO: 1578770 - DNA, 25 bp, Homo sapien
taaggaacatcacgtgcaagacact

SEQ ID NO: 1578771 - DNA, 25 bp, Homo sapien
cgctaggcctaggttcagcagcaca

SEQ ID NO: 1578772 - DNA, 25 bp, Homo sapien
tcaagcgggcttcgtttcaccagcg

SEQ ID NO: 1578773 - DNA, 25 bp, Homo sapien
tgtgccctcgctgacacgaaatgaa

SEQ ID NO: 1578774 - DNA, 25 bp, Homo sapien
caccggcagccgacactgcgccggc

SEQ ID NO: 1578775 - DNA, 25 bp, Homo sapien
tgcgccggcgcgagcctaactccat

SEQ ID NO: 1578776 - DNA, 25 bp, Homo sapien
ctgactgcgagacaaaggccgcggc

SEQ ID NO: 1578777 - DNA, 25 bp, Homo sapien
tgactgcgagacaaaggccgcggca

SEQ ID NO: 1578778 - DNA, 25 bp, Homo sapien
gcgtacccgtttaagcgcctgctgt

SEQ ID NO: 1578779 - DNA, 25 bp, Homo sapien
gcagaggcggtgctcaggtccccaa

SEQ ID NO: 1578780 - DNA, 25 bp, Homo sapien
gcggccctccgctcggagaagggca

SEQ ID NO: 1578781 - DNA, 25 bp, Homo sapien
tcccgcctgtctgagggaagctgaa

SEQ ID NO: 1578782 - DNA, 25 bp, Homo sapien
gccctggcttctggcaggaacggct

SEQ ID NO: 1578783 - DNA, 25 bp, Homo sapien
ctggcttctggcaggaacggctggc

SEQ ID NO: 1578784 - DNA, 25 bp, Homo sapien
cttctggcaggaacggctggccctg

SEQ ID NO: 1578785 - DNA, 25 bp, Homo sapien
gcttctggcaggaacggctggccct

SEQ ID NO: 1578786 - DNA, 25 bp, Homo sapien
ggtctgtggagacgcgcaccccagg

SEQ ID NO: 1578787 - DNA, 25 bp, Homo sapien
tggagacgcgcaccccaggggtcat

SEQ ID NO: 1578788 - DNA, 25 bp, Homo sapien
cgggtctgtggagacgcgcacccca

SEQ ID NO: 1578789 - DNA, 25 bp, Homo sapien
tgtggagacgcgcaccccaggggtc

SEQ ID NO: 1578790 - DNA, 25 bp, Homo sapien
acacgcgcaaggaggccgagattct

SEQ ID NO: 1578791 - DNA, 25 bp, Homo sapien
cggcgtgggcggtcctttcagaggc

SEQ ID NO: 1578792 - DNA, 25 bp, Homo sapien
ccggacacgagtagaggctagatgt

SEQ ID NO: 1578793 - DNA, 25 bp, Homo sapien
ccaggtgcgcgagtagaggccagtt

SEQ ID NO: 1578794 - DNA, 25 bp, Homo sapien
atcacacgagtgtcctcagccaagc

SEQ ID NO: 1578795 - DNA, 25 bp, Homo sapien
actggctgctggtggggtagctggt

SEQ ID NO: 1578796 - DNA, 25 bp, Homo sapien
tcacacgagtgtcctcagccaagcc

SEQ ID NO: 1578797 - DNA, 25 bp, Homo sapien
cacacgagtgtcctcagccaagcca

SEQ ID NO: 1578798 - DNA, 25 bp, Homo sapien
taccacgtcctcaaacgtcacttgc

SEQ ID NO: 1578799 - DNA, 25 bp, Homo sapien
cccactaccacgtcctcaaacgtca

SEQ ID NO: 1578800 - DNA, 25 bp, Homo sapien
tgaagcccactaccacgtcctcaaa

SEQ ID NO: 1578801 - DNA, 25 bp, Homo sapien
ggctgaagcccactaccacgtcctc

SEQ ID NO: 1578802 - DNA, 25 bp, Homo sapien
tcagggacagatcaacagataggac

SEQ ID NO: 1578803 - DNA, 25 bp, Homo sapien
gatcaacagataggacatgggtgtg

SEQ ID NO: 1578804 - DNA, 25 bp, Homo sapien
cagataggacatgggtgtggcctta

SEQ ID NO: 1578805 - DNA, 25 bp, Homo sapien
gacagatcaacagataggacatggg

SEQ ID NO: 1578806 - DNA, 25 bp, Homo sapien
gacccaagcctggacaatcagaact

SEQ ID NO: 1578807 - DNA, 25 bp, Homo sapien
gacaaccctgggacacagatcctgt

SEQ ID NO: 1578808 - DNA, 25 bp, Homo sapien
cagggagagacccatagagtgagca

SEQ ID NO: 1578809 - DNA, 25 bp, Homo sapien
cacagccctggatgttcctcaggga

SEQ ID NO: 1578810 - DNA, 25 bp, Homo sapien
gatgacattcggcttcggtaaccaa

SEQ ID NO: 1578811 - DNA, 25 bp, Homo sapien
cacgccttggggaagtctagactcc

SEQ ID NO: 1578812 - DNA, 25 bp, Homo sapien
cagggagatgacattcggcttcggt

SEQ ID NO: 1578813 - DNA, 25 bp, Homo sapien
ttggggaagtctagactccaccgcc

SEQ ID NO: 1578814 - DNA, 25 bp, Homo sapien
acgtggtgtcgtcactcacagcaaa

SEQ ID NO: 1578815 - DNA, 25 bp, Homo sapien
ggctcaggcttcaagtcacatgtca

SEQ ID NO: 1578816 - DNA, 25 bp, Homo sapien
gatgccaatgggaaattgcctgtca

SEQ ID NO: 1578817 - DNA, 25 bp, Homo sapien
caatcaccctacaggcacatggcgt

SEQ ID NO: 1578818 - DNA, 25 bp, Homo sapien
ctgaaagaagcaaaaactggaaatg

SEQ ID NO: 1578819 - DNA, 25 bp, Homo sapien
tgaaagaagcaaaaactggaaatgt

SEQ ID NO: 1578820 - DNA, 25 bp, Homo sapien
gaaagaagcaaaaactggaaatgtc

SEQ ID NO: 1578821 - DNA, 25 bp, Homo sapien
agaagcaaaaactggaaatgtccct

SEQ ID NO: 1578822 - DNA, 25 bp, Homo sapien
gaactgacagtttgactttgggtct

SEQ ID NO: 1578823 - DNA, 25 bp, Homo sapien
ttgctttagaactgacagtttgact

SEQ ID NO: 1578824 - DNA, 25 bp, Homo sapien
tgacagtttgactttgggtctagtt

SEQ ID NO: 1578825 - DNA, 25 bp, Homo sapien
tcacccctgcagtaccacagaccat

SEQ ID NO: 1578826 - DNA, 25 bp, Homo sapien
tgggagatcagggttcagacttatg

SEQ ID NO: 1578827 - DNA, 25 bp, Homo sapien
tgctccagaacaggcgtcttcacag

SEQ ID NO: 1578828 - DNA, 25 bp, Homo sapien
cttcacaggcgtgaaggccaccggc

SEQ ID NO: 1578829 - DNA, 25 bp, Homo sapien
tgtctttcaggagtcattggttgat

SEQ ID NO: 1578830 - DNA, 25 bp, Homo sapien
tctggcttctccctttttccacgtg

SEQ ID NO: 1578831 - DNA, 25 bp, Homo sapien
taaaacatttaggtctggcttctcc

SEQ ID NO: 1578832 - DNA, 25 bp, Homo sapien
ctggcttctccctttttccacgtgt

SEQ ID NO: 1578833 - DNA, 25 bp, Homo sapien
ctgtaaaacatttaggtctggcttc

SEQ ID NO: 1578834 - DNA, 25 bp, Homo sapien
cgtccggtggtgttcgataagtgct

SEQ ID NO: 1578835 - DNA, 25 bp, Homo sapien
tccggtggtgttcgataagtgctga

SEQ ID NO: 1578836 - DNA, 25 bp, Homo sapien
gtgcgtccggtggtgttcgataagt

SEQ ID NO: 1578837 - DNA, 25 bp, Homo sapien
tggtgttcgataagtgctgagctgt

SEQ ID NO: 1578838 - DNA, 25 bp, Homo sapien
ggtaagtgccgagctgttccggaag

SEQ ID NO: 1578839 - DNA, 25 bp, Homo sapien
tggtaagtgccgagctgttccggaa

SEQ ID NO: 1578840 - DNA, 25 bp, Homo sapien
gtaagtgccgagctgttccggaagc

SEQ ID NO: 1578841 - DNA, 25 bp, Homo sapien
cggtcaggagtgtgctctgactgaa

SEQ ID NO: 1578842 - DNA, 25 bp, Homo sapien
gtgtgtgtccgctcatgctggctga

SEQ ID NO: 1578843 - DNA, 25 bp, Homo sapien
gtgaatcctccgatgctcggtcagg

SEQ ID NO: 1578844 - DNA, 25 bp, Homo sapien
tgtttggtcaaggatgagctgtggc

SEQ ID NO: 1578845 - DNA, 25 bp, Homo sapien
gaggtgggtgctctgcctaaaggac

SEQ ID NO: 1578846 - DNA, 25 bp, Homo sapien
tgagtgaggtgggtgctctgcctaa

SEQ ID NO: 1578847 - DNA, 25 bp, Homo sapien
ttccacagtccctgcatgcatatgg

SEQ ID NO: 1578848 - DNA, 25 bp, Homo sapien
gtggatcctccggtgctgagtgagg

SEQ ID NO: 1578849 - DNA, 25 bp, Homo sapien
tctggtgcttggtaagggaggagct

SEQ ID NO: 1578850 - DNA, 25 bp, Homo sapien
tctctggtgcttggtaagggaggag

SEQ ID NO: 1578851 - DNA, 25 bp, Homo sapien
taagggaggagctgtgggtaaaggc

SEQ ID NO: 1578852 - DNA, 25 bp, Homo sapien
ggtgcttggtaagggaggagctgtg

SEQ ID NO: 1578853 - DNA, 25 bp, Homo sapien
tctaatgagggcagcaagtcaccat

SEQ ID NO: 1578854 - DNA, 25 bp, Homo sapien
tgagacagtcagtatccacagtgat

SEQ ID NO: 1578855 - DNA, 25 bp, Homo sapien
cactaatgggcgttcaaggctgaag

SEQ ID NO: 1578856 - DNA, 25 bp, Homo sapien
cagtgagactctacggaagcagctt

SEQ ID NO: 1578857 - DNA, 25 bp, Homo sapien
tgagaagcaatattggaagactatc

SEQ ID NO: 1578858 - DNA, 25 bp, Homo sapien
tatctgcaacatggtctccccaaga

SEQ ID NO: 1578859 - DNA, 25 bp, Homo sapien
catttatcccaagaggcactccaca

SEQ ID NO: 1578860 - DNA, 25 bp, Homo sapien
tcataatgagaagcaatattggaag

SEQ ID NO: 1578861 - DNA, 25 bp, Homo sapien
cagatgtgagccctaccagcatggg

SEQ ID NO: 1578862 - DNA, 25 bp, Homo sapien
acagatgtgagccctaccagcatgg

SEQ ID NO: 1578863 - DNA, 25 bp, Homo sapien
ctccaaaattgctgagattacaagc

SEQ ID NO: 1578864 - DNA, 25 bp, Homo sapien
aatctaggctcactgtaacctccgc

SEQ ID NO: 1578865 - DNA, 25 bp, Homo sapien
gtcacataggctggagtacattggc

SEQ ID NO: 1578866 - DNA, 25 bp, Homo sapien
acataggctggagtacattggcaca

SEQ ID NO: 1578867 - DNA, 25 bp, Homo sapien
cataggcacgatcccactaatgatc

SEQ ID NO: 1578868 - DNA, 25 bp, Homo sapien
tattcataggcacgatcccactaat

SEQ ID NO: 1578869 - DNA, 25 bp, Homo sapien
ttcataggcacgatcccactaatga

SEQ ID NO: 1578870 - DNA, 25 bp, Homo sapien
taggcacgatcccactaatgatcag

SEQ ID NO: 1578871 - DNA, 25 bp, Homo sapien
tgtgaaagaccaggatgcaaggtcc

SEQ ID NO: 1578872 - DNA, 25 bp, Homo sapien
gggcccctgcttgaattgtagatga

SEQ ID NO: 1578873 - DNA, 25 bp, Homo sapien
tctgtacaggatggtcctctctgtg

SEQ ID NO: 1578874 - DNA, 25 bp, Homo sapien
ttctctgagttgactctgtacagga

SEQ ID NO: 1578875 - DNA, 25 bp, Homo sapien
catacagtataagaggagactcagg

SEQ ID NO: 1578876 - DNA, 25 bp, Homo sapien
gagaccacgagtttcatcagtttag

SEQ ID NO: 1578877 - DNA, 25 bp, Homo sapien
gggacagtgactaccacacgtcagt

SEQ ID NO: 1578878 - DNA, 25 bp, Homo sapien
tggtgcttggaaaatacttgctgcc

SEQ ID NO: 1578879 - DNA, 25 bp, Homo sapien
tcactcttggcttctcctaaggaca

SEQ ID NO: 1578880 - DNA, 25 bp, Homo sapien
tacaagtaacgcaaatgaacggatg

SEQ ID NO: 1578881 - DNA, 25 bp, Homo sapien
gattccaggagctcatttaatcatc

SEQ ID NO: 1578882 - DNA, 25 bp, Homo sapien
tgtgagccagcgatgtgtggtttca

SEQ ID NO: 1578883 - DNA, 25 bp, Homo sapien
tcaaatcctagcagacaaagtatag

SEQ ID NO: 1578884 - DNA, 25 bp, Homo sapien
cagtgggcattagttgtcaaatcct

SEQ ID NO: 1578885 - DNA, 25 bp, Homo sapien
gcgcccggcgctggaagagtaattt

SEQ ID NO: 1578886 - DNA, 25 bp, Homo sapien
tctcgccgtggtgtactgaatagct

SEQ ID NO: 1578887 - DNA, 25 bp, Homo sapien
tctggtacgagctgaattaaatgtc

SEQ ID NO: 1578888 - DNA, 25 bp, Homo sapien
gccttaacccacaatctgatgatat

SEQ ID NO: 1578889 - DNA, 25 bp, Homo sapien
aatgcttaaacaccctctggtacga

SEQ ID NO: 1578890 - DNA, 25 bp, Homo sapien
ggagtggcgcctgcatccaatagga

SEQ ID NO: 1578891 - DNA, 25 bp, Homo sapien
tgccagttgaggtgtcttctgctga

SEQ ID NO: 1578892 - DNA, 25 bp, Homo sapien
gccatgtctttgaagaactggttcc

SEQ ID NO: 1578893 - DNA, 25 bp, Homo sapien
tgtagtaggatgttccaagcccatc

SEQ ID NO: 1578894 - DNA, 25 bp, Homo sapien
tcctcagccctgaaattggccatgt

SEQ ID NO: 1578895 - DNA, 25 bp, Homo sapien
tccactgtatggctaactgggccag

SEQ ID NO: 1578896 - DNA, 25 bp, Homo sapien
tctttgctcacctggttagagtgca

SEQ ID NO: 1578897 - DNA, 25 bp, Homo sapien
ggtgtccacattcctcctgtcagtg

SEQ ID NO: 1578898 - DNA, 25 bp, Homo sapien
catccagggtgcacggtgtccacat

SEQ ID NO: 1578899 - DNA, 25 bp, Homo sapien
tgagaactggttgcaatgtaagaca

SEQ ID NO: 1578900 - DNA, 25 bp, Homo sapien
tacctatatggagtagctcgcagag

SEQ ID NO: 1578901 - DNA, 25 bp, Homo sapien
gctgtttcctagtttacctcgcgtg

SEQ ID NO: 1578902 - DNA, 25 bp, Homo sapien
gaaatgcttgcagcctaaggcaggg

SEQ ID NO: 1578903 - DNA, 25 bp, Homo sapien
caagctagtggccaggtggagacct

SEQ ID NO: 1578904 - DNA, 25 bp, Homo sapien
tagtgccgccccatgctaggttatt

SEQ ID NO: 1578905 - DNA, 25 bp, Homo sapien
tggagacctccaaaggcgcggtttc

SEQ ID NO: 1578906 - DNA, 25 bp, Homo sapien
taagcgctcccaacgagaagggtcc

SEQ ID NO: 1578907 - DNA, 25 bp, Homo sapien
gcacagttacaatcaagagagttca

SEQ ID NO: 1578908 - DNA, 25 bp, Homo sapien
cacagttacaatcaagagagttcat

SEQ ID NO: 1578909 - DNA, 25 bp, Homo sapien
gtgcacagttacaatcaagagagtt

SEQ ID NO: 1578910 - DNA, 25 bp, Homo sapien
tgcacagttacaatcaagagagttc

SEQ ID NO: 1578911 - DNA, 25 bp, Homo sapien
acagcggtgaggtctttgcgcccca

SEQ ID NO: 1578912 - DNA, 25 bp, Homo sapien
gaacttgacgacctgagaagggctc

SEQ ID NO: 1578913 - DNA, 25 bp, Homo sapien
cccatattctggtggagcactgtca

SEQ ID NO: 1578914 - DNA, 25 bp, Homo sapien
catagccagtgacatgagagcccga

SEQ ID NO: 1578915 - DNA, 25 bp, Homo sapien
gctgccataagtaggtgacggtcgt

SEQ ID NO: 1578916 - DNA, 25 bp, Homo sapien
catgagggtccacaactgccaaaaa

SEQ ID NO: 1578917 - DNA, 25 bp, Homo sapien
tgacggtcgtgaggttgtcccctgt

SEQ ID NO: 1578918 - DNA, 25 bp, Homo sapien
tgagaaagcgctcagtcacagagca

SEQ ID NO: 1578919 - DNA, 25 bp, Homo sapien
gctgcaatgtggtgttgtgatcaca

SEQ ID NO: 1578920 - DNA, 25 bp, Homo sapien
tgcttacttgccacgaggcagagtt

SEQ ID NO: 1578921 - DNA, 25 bp, Homo sapien
gcataagaacatgccaaacctgtgg

SEQ ID NO: 1578922 - DNA, 25 bp, Homo sapien
aaacctgtgggtacgcacagggctc

SEQ ID NO: 1578923 - DNA, 25 bp, Homo sapien
gctcgtggaggggaggcgcttaggg

SEQ ID NO: 1578924 - DNA, 25 bp, Homo sapien
ctcgtggaggggaggcgcttagggc

SEQ ID NO: 1578925 - DNA, 25 bp, Homo sapien
tcgtggaggggaggcgcttagggca

SEQ ID NO: 1578926 - DNA, 25 bp, Homo sapien
cgtggaggggaggcgcttagggcac

SEQ ID NO: 1578927 - DNA, 25 bp, Homo sapien
acagcctcgcggcattgtgggagtc

SEQ ID NO: 1578928 - DNA, 25 bp, Homo sapien
cgggaggccacactcgcgtctgatt

SEQ ID NO: 1578929 - DNA, 25 bp, Homo sapien
gtctgattggccatgcgcactgtca

SEQ ID NO: 1578930 - DNA, 25 bp, Homo sapien
atggtgcccaaaatgacgcaggcgc

SEQ ID NO: 1578931 - DNA, 25 bp, Homo sapien
tagaacccattttagcgcatcagtg

SEQ ID NO: 1578932 - DNA, 25 bp, Homo sapien
agggagtgactaccaagaggcagca

SEQ ID NO: 1578933 - DNA, 25 bp, Homo sapien
gcatcagtgtctctgggtctccacc

SEQ ID NO: 1578934 - DNA, 25 bp, Homo sapien
cataagcgcctctatctggaaaact

SEQ ID NO: 1578935 - DNA, 25 bp, Homo sapien
acaagaaggtacatgctcaggcgac

SEQ ID NO: 1578936 - DNA, 25 bp, Homo sapien
tatctgtgctctcgctagaaaccag

SEQ ID NO: 1578937 - DNA, 25 bp, Homo sapien
tttcaggaacatcgcgggcctcatc

SEQ ID NO: 1578938 - DNA, 25 bp, Homo sapien
tcctgtctgaccaagcacaagaagg

SEQ ID NO: 1578939 - DNA, 25 bp, Homo sapien
accatatagatgtaacgaatgtggg

SEQ ID NO: 1578940 - DNA, 25 bp, Homo sapien
gcatctcagaatccacaccggtgag

SEQ ID NO: 1578941 - DNA, 25 bp, Homo sapien
gctcgtacctcacccagcatgagag

SEQ ID NO: 1578942 - DNA, 25 bp, Homo sapien
agctctgacacagcaccagagaatt

SEQ ID NO: 1578943 - DNA, 25 bp, Homo sapien
gccggccgccaaccgtaagtgccga

SEQ ID NO: 1578944 - DNA, 25 bp, Homo sapien
cgcaagcgcaatcgcccggaacatg

SEQ ID NO: 1578945 - DNA, 25 bp, Homo sapien
cgtaagtgccgacgcatccctgagc

SEQ ID NO: 1578946 - DNA, 25 bp, Homo sapien
acgcgcacatccttgtcccggcagc

SEQ ID NO: 1578947 - DNA, 25 bp, Homo sapien
gcgatcctgcccacagtccaaggat

SEQ ID NO: 1578948 - DNA, 25 bp, Homo sapien
gaatggggatcgtccccagatcccg

SEQ ID NO: 1578949 - DNA, 25 bp, Homo sapien
ccgcgtctgcggctgggaggaatgg

SEQ ID NO: 1578950 - DNA, 25 bp, Homo sapien
tcgcctctcgcggactgcggtgtca

SEQ ID NO: 1578951 - DNA, 25 bp, Homo sapien
cgcaacgcccagcacccccacagcc

SEQ ID NO: 1578952 - DNA, 25 bp, Homo sapien
actggttgtgatcaattaattgtag

SEQ ID NO: 1578953 - DNA, 25 bp, Homo sapien
gctggtcaaacgaagcagtgggagt

SEQ ID NO: 1578954 - DNA, 25 bp, Homo sapien
ggagaagaacaaagaaatctgtaac

SEQ ID NO: 1578955 - DNA, 25 bp, Homo sapien
taactggttgtgatcaattaattgt

SEQ ID NO: 1578956 - DNA, 25 bp, Homo sapien
ccacactaatgtgggcggcgacccg

SEQ ID NO: 1578957 - DNA, 25 bp, Homo sapien
ggagagagtcgtgccctgccacgaa

SEQ ID NO: 1578958 - DNA, 25 bp, Homo sapien
caggaggaggatactcgtcgatgtc

SEQ ID NO: 1578959 - DNA, 25 bp, Homo sapien
tgccacgaaggcgaccactcttggg

SEQ ID NO: 1578960 - DNA, 25 bp, Homo sapien
gtcagcccgccgtcccgaactacaa

SEQ ID NO: 1578961 - DNA, 25 bp, Homo sapien
gccgcacaatggcgcccgtcggccg

SEQ ID NO: 1578962 - DNA, 25 bp, Homo sapien
gccggcggcgaagtgcgtcagcccg

SEQ ID NO: 1578963 - DNA, 25 bp, Homo sapien
cggcgcgccagcttgcctcacccag

SEQ ID NO: 1578964 - DNA, 25 bp, Homo sapien
gaaaacgcccagagtgagtcatagg

SEQ ID NO: 1578965 - DNA, 25 bp, Homo sapien
ggtacccgagctcggcggaaaatgc

SEQ ID NO: 1578966 - DNA, 25 bp, Homo sapien
tccctcagcgggaaatgacaagtcc

SEQ ID NO: 1578967 - DNA, 25 bp, Homo sapien
cacgcttccggaggcgatctgttct

SEQ ID NO: 1578968 - DNA, 25 bp, Homo sapien
ctcaatgtgtctctggtggaagtgg

SEQ ID NO: 1578969 - DNA, 25 bp, Homo sapien
tcaatgtgtctctggtggaagtggg

SEQ ID NO: 1578970 - DNA, 25 bp, Homo sapien
caatgtgtctctggtggaagtgggc

SEQ ID NO: 1578971 - DNA, 25 bp, Homo sapien
tctcaatgtgtctctggtggaagtg

SEQ ID NO: 1578972 - DNA, 25 bp, Homo sapien
caggccgtcggaagcctggaggcca

SEQ ID NO: 1578973 - DNA, 25 bp, Homo sapien
caggaccaggccgtcggaagcctgg

SEQ ID NO: 1578974 - DNA, 25 bp, Homo sapien
ggaccaggccgtcggaagcctggag

SEQ ID NO: 1578975 - DNA, 25 bp, Homo sapien
accaggccgtcggaagcctggaggc

SEQ ID NO: 1578976 - DNA, 25 bp, Homo sapien
tagcggactcaaaagctgaaggaag

SEQ ID NO: 1578977 - DNA, 25 bp, Homo sapien
cagtagcggactcaaaagctgaagg

SEQ ID NO: 1578978 - DNA, 25 bp, Homo sapien
ccaggtgcagtagcggactcaaaag

SEQ ID NO: 1578979 - DNA, 25 bp, Homo sapien
cctcccaggtgcagtagcggactca

SEQ ID NO: 1578980 - DNA, 25 bp, Homo sapien
tatctcagggaaggtggtatctcac

SEQ ID NO: 1578981 - DNA, 25 bp, Homo sapien
ctctcatgcccaaccaatctctacc

SEQ ID NO: 1578982 - DNA, 25 bp, Homo sapien
ccctccccgaggtgctctggaggat

SEQ ID NO: 1578983 - DNA, 25 bp, Homo sapien
ctctaccccctccccgaggtgctct

SEQ ID NO: 1578984 - DNA, 25 bp, Homo sapien
cactctgtctcctagtggagtgcag

SEQ ID NO: 1578985 - DNA, 25 bp, Homo sapien
actctgtctcctagtggagtgcagt

SEQ ID NO: 1578986 - DNA, 25 bp, Homo sapien
ctcactctgtctcctagtggagtgc

SEQ ID NO: 1578987 - DNA, 25 bp, Homo sapien
tcactctgtctcctagtggagtgca

SEQ ID NO: 1578988 - DNA, 25 bp, Homo sapien
aaaatccagattcttgttcagccac

SEQ ID NO: 1578989 - DNA, 25 bp, Homo sapien
acaggccatccgcatccacgacaaa

SEQ ID NO: 1578990 - DNA, 25 bp, Homo sapien
gcatccacgacaaaagaaagacagg

SEQ ID NO: 1578991 - DNA, 25 bp, Homo sapien
ggctgaccaggccagtgaaagcaca

SEQ ID NO: 1578992 - DNA, 25 bp, Homo sapien
ctgtttgaggtccagcagtccccac

SEQ ID NO: 1578993 - DNA, 25 bp, Homo sapien
tctgtttgaggtccagcagtcccca

SEQ ID NO: 1578994 - DNA, 25 bp, Homo sapien
ccagcagtccccactcttccggggt

SEQ ID NO: 1578995 - DNA, 25 bp, Homo sapien
cagcagtccccactcttccggggta

SEQ ID NO: 1578996 - DNA, 25 bp, Homo sapien
cagacacatacttcagaggtgctac

SEQ ID NO: 1578997 - DNA, 25 bp, Homo sapien
caagaacaataagcatccactactg

SEQ ID NO: 1578998 - DNA, 25 bp, Homo sapien
ttttcctactggtgcccctgcagtg

SEQ ID NO: 1578999 - DNA, 25 bp, Homo sapien
gagggatggactaggcaatgattca

SEQ ID NO: 1579000 - DNA, 25 bp, Homo sapien
tactcctaagctgttgggacactgg

SEQ ID NO: 1579001 - DNA, 25 bp, Homo sapien
taagctgttgggacactggcatcgc

SEQ ID NO: 1579002 - DNA, 25 bp, Homo sapien
gggacactggcatcgcattgtctgg

SEQ ID NO: 1579003 - DNA, 25 bp, Homo sapien
tttgatgctactcctaagctgttgg

SEQ ID NO: 1579004 - DNA, 25 bp, Homo sapien
tcctctaactgagataccacatctg

SEQ ID NO: 1579005 - DNA, 25 bp, Homo sapien
taactgagataccacatctggtttg

SEQ ID NO: 1579006 - DNA, 25 bp, Homo sapien
tctgcctcctctaactgagatacca

SEQ ID NO: 1579007 - DNA, 25 bp, Homo sapien
gcctcctctaactgagataccacat

SEQ ID NO: 1579008 - DNA, 25 bp, Homo sapien
ctgcttttccaagatactggtccct

SEQ ID NO: 1579009 - DNA, 25 bp, Homo sapien
tggtccctgactcatcagttggccc

SEQ ID NO: 1579010 - DNA, 25 bp, Homo sapien
gatactggtccctgactcatcagtt

SEQ ID NO: 1579011 - DNA, 25 bp, Homo sapien
gactcatcagttggccccttccctg

SEQ ID NO: 1579012 - DNA, 25 bp, Homo sapien
gaattgtgtgaccactttagtatgc

SEQ ID NO: 1579013 - DNA, 25 bp, Homo sapien
gaagaattgtgtgaccactttagta

SEQ ID NO: 1579014 - DNA, 25 bp, Homo sapien
aggagaagaattgtgtgaccacttt

SEQ ID NO: 1579015 - DNA, 25 bp, Homo sapien
caaaggagaagaattgtgtgaccac

SEQ ID NO: 1579016 - DNA, 25 bp, Homo sapien
gaggtccgactttacgtatgaaata

SEQ ID NO: 1579017 - DNA, 25 bp, Homo sapien
ttttgttatgtgcaggaggtccgac

SEQ ID NO: 1579018 - DNA, 25 bp, Homo sapien
tgaaatatgttagacgcagtcacct

SEQ ID NO: 1579019 - DNA, 25 bp, Homo sapien
acgagaaattcttgatggcttgttc

SEQ ID NO: 1579020 - DNA, 25 bp, Homo sapien
ggagaaactgaccactttagaagac

SEQ ID NO: 1579021 - DNA, 25 bp, Homo sapien
tgtattcgactggatttgcaaaccc

SEQ ID NO: 1579022 - DNA, 25 bp, Homo sapien
cacagagttgtcaaaatggcccaag

SEQ ID NO: 1579023 - DNA, 25 bp, Homo sapien
taaacacctatgacttccacacgga

SEQ ID NO: 1579024 - DNA, 25 bp, Homo sapien
gaatggtatgctgttgatcactcta

SEQ ID NO: 1579025 - DNA, 25 bp, Homo sapien
tcaagataagactgagttaggccag

SEQ ID NO: 1579026 - DNA, 25 bp, Homo sapien
tatagcctatgtgaccctctcaagc

SEQ ID NO: 1579027 - DNA, 25 bp, Homo sapien
taatgtcccgtgaaagatggcaaag

SEQ ID NO: 1579028 - DNA, 25 bp, Homo sapien
gttatccctgagtacaagccctaga

SEQ ID NO: 1579029 - DNA, 25 bp, Homo sapien
gggccccgcagagttctttgtagca

SEQ ID NO: 1579030 - DNA, 25 bp, Homo sapien
tagggtttgccttctctacgacatg

SEQ ID NO: 1579031 - DNA, 25 bp, Homo sapien
tagaacacagggagagtgatcccca

SEQ ID NO: 1579032 - DNA, 25 bp, Homo sapien
tgctcagggcagtactcagatgcaa

SEQ ID NO: 1579033 - DNA, 25 bp, Homo sapien
tatgatcacagttatgggcagcacc

SEQ ID NO: 1579034 - DNA, 25 bp, Homo sapien
gaccaggaattgctatgctgcccgg

SEQ ID NO: 1579035 - DNA, 25 bp, Homo sapien
tgagcacctatactgtgtcaggaac

SEQ ID NO: 1579036 - DNA, 25 bp, Homo sapien
agagagattaacttcttgagcctga

SEQ ID NO: 1579037 - DNA, 25 bp, Homo sapien
caggcacagcatgtggtaagggctt

SEQ ID NO: 1579038 - DNA, 25 bp, Homo sapien
tctcaggatacttctacctctctgc

SEQ ID NO: 1579039 - DNA, 25 bp, Homo sapien
gggtgacaaacaggccttaggcagc

SEQ ID NO: 1579040 - DNA, 25 bp, Homo sapien
tgtaatatttagtggcaacgacaag

SEQ ID NO: 1579041 - DNA, 25 bp, Homo sapien
tatttgtaatatttagtggcaacga

SEQ ID NO: 1579042 - DNA, 25 bp, Homo sapien
tatttagtggcaacgacaagagcaa

SEQ ID NO: 1579043 - DNA, 25 bp, Homo sapien
ttagtggcaacgacaagagcaaacc

SEQ ID NO: 1579044 - DNA, 25 bp, Homo sapien
ccactggggacaagaacgaggatat

SEQ ID NO: 1579045 - DNA, 25 bp, Homo sapien
gaacgaggatatatgggaaaggcag

SEQ ID NO: 1579046 - DNA, 25 bp, Homo sapien
tgaactccaggactgtcctgaaatg

SEQ ID NO: 1579047 - DNA, 25 bp, Homo sapien
ggcacagagtccacaagagcacatt

SEQ ID NO: 1579048 - DNA, 25 bp, Homo sapien
ggaagaggatccaatttagggtcca

SEQ ID NO: 1579049 - DNA, 25 bp, Homo sapien
caggaagaggatccaatttagggtc

SEQ ID NO: 1579050 - DNA, 25 bp, Homo sapien
gcaggaagaggatccaatttagggt

SEQ ID NO: 1579051 - DNA, 25 bp, Homo sapien
aagaggatccaatttagggtccagc

SEQ ID NO: 1579052 - DNA, 25 bp, Homo sapien
tcctggttcagtgtgaggacctcaa

SEQ ID NO: 1579053 - DNA, 25 bp, Homo sapien
cctggatctgggcattccggggacc

SEQ ID NO: 1579054 - DNA, 25 bp, Homo sapien
cctgctgttggacctgctcactggg

SEQ ID NO: 1579055 - DNA, 25 bp, Homo sapien
gcatctgcactcaggcttccatctt

SEQ ID NO: 1579056 - DNA, 25 bp, Homo sapien
aacggaactgccggaacctctggcg

SEQ ID NO: 1579057 - DNA, 25 bp, Homo sapien
tataacggaactgccggaacctctg

SEQ ID NO: 1579058 - DNA, 25 bp, Homo sapien
aacctctggcgcgcggcctcagggt

SEQ ID NO: 1579059 - DNA, 25 bp, Homo sapien
ggaacctctggcgcgcggcctcagg

SEQ ID NO: 1579060 - DNA, 25 bp, Homo sapien
tccttggagcgtgccttaggctgta

SEQ ID NO: 1579061 - DNA, 25 bp, Homo sapien
taggctgtagccactggtgacacag

SEQ ID NO: 1579062 - DNA, 25 bp, Homo sapien
ttctctgggtgctgcgattccaccc

SEQ ID NO: 1579063 - DNA, 25 bp, Homo sapien
acccatgtccggagcttcacaggca

SEQ ID NO: 1579064 - DNA, 25 bp, Homo sapien
gcaacttattcacagggtccaggag

SEQ ID NO: 1579065 - DNA, 25 bp, Homo sapien
gaaacatcttctgggcacccgtgaa

SEQ ID NO: 1579066 - DNA, 25 bp, Homo sapien
gatgacttaggctggcacactggac

SEQ ID NO: 1579067 - DNA, 25 bp, Homo sapien
gccagcggctcagattaatgcaaat

SEQ ID NO: 1579068 - DNA, 25 bp, Homo sapien
tcagggagcactgtcactgggcaga

SEQ ID NO: 1579069 - DNA, 25 bp, Homo sapien
cctcgaggcagcaggtggtgccctc

SEQ ID NO: 1579070 - DNA, 25 bp, Homo sapien
cctcctgctgggcagtgacctcgag

SEQ ID NO: 1579071 - DNA, 25 bp, Homo sapien
tgtcactgggcagatggctgcatcc

SEQ ID NO: 1579072 - DNA, 25 bp, Homo sapien
gggtcaccatgcgttgtctccagtg

SEQ ID NO: 1579073 - DNA, 25 bp, Homo sapien
caggagatgctgtgaccaaaacagg

SEQ ID NO: 1579074 - DNA, 25 bp, Homo sapien
cccagcctgtgggaggtcttaggaa

SEQ ID NO: 1579075 - DNA, 25 bp, Homo sapien
gcttcagcacagacctaagagctca

SEQ ID NO: 1579076 - DNA, 25 bp, Homo sapien
tctgacagagctcacggtgctaggg

SEQ ID NO: 1579077 - DNA, 25 bp, Homo sapien
taatactgtcttcccacttggtgga

SEQ ID NO: 1579078 - DNA, 25 bp, Homo sapien
cacaagagttctactgggtccaaac

SEQ ID NO: 1579079 - DNA, 25 bp, Homo sapien
aaattgacttctacgcttgagccag

SEQ ID NO: 1579080 - DNA, 25 bp, Homo sapien
acatcgcggtactcggtcctctgtg

SEQ ID NO: 1579081 - DNA, 25 bp, Homo sapien
cacatcgcggtactcggtcctctgt

SEQ ID NO: 1579082 - DNA, 25 bp, Homo sapien
atcacatcgcggtactcggtcctct

SEQ ID NO: 1579083 - DNA, 25 bp, Homo sapien
tcacatcgcggtactcggtcctctg

SEQ ID NO: 1579084 - DNA, 25 bp, Homo sapien
ttattttccagtgtagtctcccacc

SEQ ID NO: 1579085 - DNA, 25 bp, Homo sapien
gaatgtcagaatttggagctaactc

SEQ ID NO: 1579086 - DNA, 25 bp, Homo sapien
tcttcctcaggaatgtcagaatttg

SEQ ID NO: 1579087 - DNA, 25 bp, Homo sapien
taatgtagaggacaaggcacaatcc

SEQ ID NO: 1579088 - DNA, 25 bp, Homo sapien
aacactgtgtcttggacttcctgga

SEQ ID NO: 1579089 - DNA, 25 bp, Homo sapien
aaacttggtttgtgtcaagagcgcc

SEQ ID NO: 1579090 - DNA, 25 bp, Homo sapien
tgggactcacggttgtcaaagtgct

SEQ ID NO: 1579091 - DNA, 25 bp, Homo sapien
ttgtgagtcacgtttgcgcaatcgt

SEQ ID NO: 1579092 - DNA, 25 bp, Homo sapien
gatggctgagcgatcattgaaggtc

SEQ ID NO: 1579093 - DNA, 25 bp, Homo sapien
gggcttagcgccagtgtgagtcctc

SEQ ID NO: 1579094 - DNA, 25 bp, Homo sapien
cattcactgcatcggcaaacttggc

SEQ ID NO: 1579095 - DNA, 25 bp, Homo sapien
cagtcttgacacacatagggcctct

SEQ ID NO: 1579096 - DNA, 25 bp, Homo sapien
cagggtcaagctgaaaaggcaaggt

SEQ ID NO: 1579097 - DNA, 25 bp, Homo sapien
ggttttgggaatgtcctcactcaat

SEQ ID NO: 1579098 - DNA, 25 bp, Homo sapien
ggcagtctcctcagttgtcctttgg

SEQ ID NO: 1579099 - DNA, 25 bp, Homo sapien
cctgattcacaagcaggcctgtgca

SEQ ID NO: 1579100 - DNA, 25 bp, Homo sapien
tatcagtgcagattattaattacct

SEQ ID NO: 1579101 - DNA, 25 bp, Homo sapien
cacataaatactgtggtactgtgga

SEQ ID NO: 1579102 - DNA, 25 bp, Homo sapien
tactgtggatgtaatatcagtgcag

SEQ ID NO: 1579103 - DNA, 25 bp, Homo sapien
cagtgcagattattaattacctggc

SEQ ID NO: 1579104 - DNA, 25 bp, Homo sapien
aattgtgtctagtgggtcagctccc

SEQ ID NO: 1579105 - DNA, 25 bp, Homo sapien
cctaatactgttggaaccctggctc

SEQ ID NO: 1579106 - DNA, 25 bp, Homo sapien
gagatgagccattccataccttgga

SEQ ID NO: 1579107 - DNA, 25 bp, Homo sapien
tactggatatatggaacgtggaccc

SEQ ID NO: 1579108 - DNA, 25 bp, Homo sapien
gaacatcagacaggatattcatccg

SEQ ID NO: 1579109 - DNA, 25 bp, Homo sapien
gatcctcttgagaacatcagacagg

SEQ ID NO: 1579110 - DNA, 25 bp, Homo sapien
tgttgatcctcttgagaacatcaga

SEQ ID NO: 1579111 - DNA, 25 bp, Homo sapien
catcagacaggatattcatccgcac

SEQ ID NO: 1579112 - DNA, 25 bp, Homo sapien
cggagaatgtctttggagcacctcc

SEQ ID NO: 1579113 - DNA, 25 bp, Homo sapien
ttagaaaccggagaatgtctttgga

SEQ ID NO: 1579114 - DNA, 25 bp, Homo sapien
tcacaattagaaaccggagaatgtc

SEQ ID NO: 1579115 - DNA, 25 bp, Homo sapien
aaccggagaatgtctttggagcacc

SEQ ID NO: 1579116 - DNA, 25 bp, Homo sapien
tgatgccggctgaagtcagtacaat

SEQ ID NO: 1579117 - DNA, 25 bp, Homo sapien
ccatgatgccggctgaagtcagtac

SEQ ID NO: 1579118 - DNA, 25 bp, Homo sapien
gtccatgatgccggctgaagtcagt

SEQ ID NO: 1579119 - DNA, 25 bp, Homo sapien
tgccggctgaagtcagtacaatgaa

SEQ ID NO: 1579120 - DNA, 25 bp, Homo sapien
ccggggagccactccgtagcctgtg

SEQ ID NO: 1579121 - DNA, 25 bp, Homo sapien
ccactccgtagcctgtgcaatgagg

SEQ ID NO: 1579122 - DNA, 25 bp, Homo sapien
gggagccactccgtagcctgtgcaa

SEQ ID NO: 1579123 - DNA, 25 bp, Homo sapien
gagccactccgtagcctgtgcaatg

SEQ ID NO: 1579124 - DNA, 25 bp, Homo sapien
ctccagcgtgaagccgactgtgggc

SEQ ID NO: 1579125 - DNA, 25 bp, Homo sapien
tcctggtgctcgaagcttagccggg

SEQ ID NO: 1579126 - DNA, 25 bp, Homo sapien
aatagtcggcggttgtgtgtcctgg

SEQ ID NO: 1579127 - DNA, 25 bp, Homo sapien
acgcttcgggagagaggcagaacca

SEQ ID NO: 1579128 - DNA, 25 bp, Homo sapien
ttgccaaagcgtgactcttacccgg

SEQ ID NO: 1579129 - DNA, 25 bp, Homo sapien
tcttacccggcaacgtgtgtcgccg

SEQ ID NO: 1579130 - DNA, 25 bp, Homo sapien
tgtgtcgccgcttgatcgcagcggt

SEQ ID NO: 1579131 - DNA, 25 bp, Homo sapien
ggcaagacaaggaactaaccgggca

SEQ ID NO: 1579132 - DNA, 25 bp, Homo sapien
caggtgtagccaaaatggccctgag

SEQ ID NO: 1579133 - DNA, 25 bp, Homo sapien
cacacgcaagtagcggtatggagga

SEQ ID NO: 1579134 - DNA, 25 bp, Homo sapien
tttccaccaggcccgggagcgagaa

SEQ ID NO: 1579135 - DNA, 25 bp, Homo sapien
cgagaagaggcgcaagacgctgatt

SEQ ID NO: 1579136 - DNA, 25 bp, Homo sapien
gaatgtagcccaaccggtcttagcc

SEQ ID NO: 1579137 - DNA, 25 bp, Homo sapien
catcgggtggattattcacgcctcc

SEQ ID NO: 1579138 - DNA, 25 bp, Homo sapien
tcttagccttagtttagagagtccc

SEQ ID NO: 1579139 - DNA, 25 bp, Homo sapien
taatgatatgctaaacatcgggtgg

SEQ ID NO: 1579140 - DNA, 25 bp, Homo sapien
taaggtgagaattcttgctgcggga

SEQ ID NO: 1579141 - DNA, 25 bp, Homo sapien
tggtgcatacacaataataattctg

SEQ ID NO: 1579142 - DNA, 25 bp, Homo sapien
tgaaagtttttccacgttgactaca

SEQ ID NO: 1579143 - DNA, 25 bp, Homo sapien
tgcgggattttccacaccagtgaca

SEQ ID NO: 1579144 - DNA, 25 bp, Homo sapien
tagggagttgcttcccgcggctctg

SEQ ID NO: 1579145 - DNA, 25 bp, Homo sapien
cattgtggcttagggagttgcttcc

SEQ ID NO: 1579146 - DNA, 25 bp, Homo sapien
tctgctccttgcagcgcctgtcccc

SEQ ID NO: 1579147 - DNA, 25 bp, Homo sapien
ctgtgttcgcgactagcattgtggc

SEQ ID NO: 1579148 - DNA, 25 bp, Homo sapien
ccccgcggcggcgggatgagctttt

SEQ ID NO: 1579149 - DNA, 25 bp, Homo sapien
ggccccgcggcggcgggatgagctt

SEQ ID NO: 1579150 - DNA, 25 bp, Homo sapien
gggccccgcggcggcgggatgagct

SEQ ID NO: 1579151 - DNA, 25 bp, Homo sapien
ccgcggcggcgggatgagctttttc

SEQ ID NO: 1579152 - DNA, 25 bp, Homo sapien
acaggcatagtcattgccggcggga

SEQ ID NO: 1579153 - DNA, 25 bp, Homo sapien
cggtagccgttgctcccacaggcat

SEQ ID NO: 1579154 - DNA, 25 bp, Homo sapien
gttgctcccacaggcatagtcattg

SEQ ID NO: 1579155 - DNA, 25 bp, Homo sapien
tcccacaggcatagtcattgccggc

SEQ ID NO: 1579156 - DNA, 25 bp, Homo sapien
ggagagcctcccgacaagctcagac

SEQ ID NO: 1579157 - DNA, 25 bp, Homo sapien
cttgctcggcctcgccgcatgaggg

SEQ ID NO: 1579158 - DNA, 25 bp, Homo sapien
gcgaggtactataagttccctccca

SEQ ID NO: 1579159 - DNA, 25 bp, Homo sapien
tccctgaggccggagagatcccgat

SEQ ID NO: 1579160 - DNA, 25 bp, Homo sapien
agaaaatgtgtccacgtctggagct

SEQ ID NO: 1579161 - DNA, 25 bp, Homo sapien
aatgtgtccacgtctggagctggga

SEQ ID NO: 1579162 - DNA, 25 bp, Homo sapien
gggtccaataggcgtcacctgcctg

SEQ ID NO: 1579163 - DNA, 25 bp, Homo sapien
ctctggggtccaataggcgtcacct

SEQ ID NO: 1579164 - DNA, 25 bp, Homo sapien
actgtaggactctgaacgggtctct

SEQ ID NO: 1579165 - DNA, 25 bp, Homo sapien
tgaacgggtctctttaacctctcca

SEQ ID NO: 1579166 - DNA, 25 bp, Homo sapien
ctctgaacgggtctctttaacctct

SEQ ID NO: 1579167 - DNA, 25 bp, Homo sapien
taggactctgaacgggtctctttaa

SEQ ID NO: 1579168 - DNA, 25 bp, Homo sapien
ttgcaacctgctgtcaaagtactgg

SEQ ID NO: 1579169 - DNA, 25 bp, Homo sapien
tttgcaacctgctgtcaaagtactg

SEQ ID NO: 1579170 - DNA, 25 bp, Homo sapien
gccgaggagatcaagacaagcctag

SEQ ID NO: 1579171 - DNA, 25 bp, Homo sapien
tgtaaactctgggcagcagaggcag

SEQ ID NO: 1579172 - DNA, 25 bp, Homo sapien
ctgtaaactctgggcagcagaggca

SEQ ID NO: 1579173 - DNA, 25 bp, Homo sapien
gcggactgcttgagccgaggagatc

SEQ ID NO: 1579174 - DNA, 25 bp, Homo sapien
gaatatgtgaccctacatggaaagg

SEQ ID NO: 1579175 - DNA, 25 bp, Homo sapien
gaatgatggccatatcctaatccct

SEQ ID NO: 1579176 - DNA, 25 bp, Homo sapien
agaagtgacaacaacgggaggctcc

SEQ ID NO: 1579177 - DNA, 25 bp, Homo sapien
cactgtttcttgtgcgggttaccac

SEQ ID NO: 1579178 - DNA, 25 bp, Homo sapien
tcaaaggcttgggaaacctcttcca

SEQ ID NO: 1579179 - DNA, 25 bp, Homo sapien
aggcttgggaaacctcttccaccag

SEQ ID NO: 1579180 - DNA, 25 bp, Homo sapien
cttgggaaacctcttccaccagcat

SEQ ID NO: 1579181 - DNA, 25 bp, Homo sapien
gcttgggaaacctcttccaccagca

SEQ ID NO: 1579182 - DNA, 25 bp, Homo sapien
tgaagaggccgctgtgtagagggca

SEQ ID NO: 1579183 - DNA, 25 bp, Homo sapien
tagagggcagaggtcctcagaagac

SEQ ID NO: 1579184 - DNA, 25 bp, Homo sapien
tgtgtagagggcagaggtcctcaga

SEQ ID NO: 1579185 - DNA, 25 bp, Homo sapien
gggcagaggtcctcagaagaccagt

SEQ ID NO: 1579186 - DNA, 25 bp, Homo sapien
gggtggaaccagcatagaacgtgct

SEQ ID NO: 1579187 - DNA, 25 bp, Homo sapien
tggaaccagcatagaacgtgcttcc

SEQ ID NO: 1579188 - DNA, 25 bp, Homo sapien
ggtggaaccagcatagaacgtgctt

SEQ ID NO: 1579189 - DNA, 25 bp, Homo sapien
gaaccagcatagaacgtgcttccat

SEQ ID NO: 1579190 - DNA, 25 bp, Homo sapien
gtcacagcagtggtcctgatttcta

SEQ ID NO: 1579191 - DNA, 25 bp, Homo sapien
cagtcacagcagtggtcctgatttc

SEQ ID NO: 1579192 - DNA, 25 bp, Homo sapien
tcttgccagtcacagcagtggtcct

SEQ ID NO: 1579193 - DNA, 25 bp, Homo sapien
cacagcagtggtcctgatttctaga

SEQ ID NO: 1579194 - DNA, 25 bp, Homo sapien
gagacaatatgctcccaggtctcca

SEQ ID NO: 1579195 - DNA, 25 bp, Homo sapien
gggagacaatatgctcccaggtctc

SEQ ID NO: 1579196 - DNA, 25 bp, Homo sapien
ccagggagacaatatgctcccaggt

SEQ ID NO: 1579197 - DNA, 25 bp, Homo sapien
cagggagacaatatgctcccaggtc

SEQ ID NO: 1579198 - DNA, 25 bp, Homo sapien
ttccagtatcttccagcacatccca

SEQ ID NO: 1579199 - DNA, 25 bp, Homo sapien
ccttcagaacttggtacagctttga

SEQ ID NO: 1579200 - DNA, 25 bp, Homo sapien
ttcagaacttggtacagctttgagt

SEQ ID NO: 1579201 - DNA, 25 bp, Homo sapien
ctgcttccagtatcttccagcacat

SEQ ID NO: 1579202 - DNA, 25 bp, Homo sapien
gatcacatcagatttggaaaggaaa

SEQ ID NO: 1579203 - DNA, 25 bp, Homo sapien
ctgagagatcacatcagatttggaa

SEQ ID NO: 1579204 - DNA, 25 bp, Homo sapien
acatcagatttggaaaggaaaagcc

SEQ ID NO: 1579205 - DNA, 25 bp, Homo sapien
tcacatcagatttggaaaggaaaag

SEQ ID NO: 1579206 - DNA, 25 bp, Homo sapien
ccctgcacaggtcctcttcttgctc

SEQ ID NO: 1579207 - DNA, 25 bp, Homo sapien
cctgctctgccctgcacaggtcctc

SEQ ID NO: 1579208 - DNA, 25 bp, Homo sapien
tgctctgccctgcacaggtcctctt

SEQ ID NO: 1579209 - DNA, 25 bp, Homo sapien
tctgccctgcacaggtcctcttctt

SEQ ID NO: 1579210 - DNA, 25 bp, Homo sapien
tgcaaagagcacccaaggaggcttc

SEQ ID NO: 1579211 - DNA, 25 bp, Homo sapien
ggtgaactcctttgaatgggtgaac

SEQ ID NO: 1579212 - DNA, 25 bp, Homo sapien
gccctgcggagagctctctgtccaa

SEQ ID NO: 1579213 - DNA, 25 bp, Homo sapien
cttgttaaacgttgagctgctcacc

SEQ ID NO: 1579214 - DNA, 25 bp, Homo sapien
tacaaaattagggccaggcgtgatg

SEQ ID NO: 1579215 - DNA, 25 bp, Homo sapien
acaaaattagggccaggcgtgatgg

SEQ ID NO: 1579216 - DNA, 25 bp, Homo sapien
ttagggtagtggaactactctgtct

SEQ ID NO: 1579217 - DNA, 25 bp, Homo sapien
ctccaccagtaacaccaggggctgg

SEQ ID NO: 1579218 - DNA, 25 bp, Homo sapien
tagtggaactactctgtctgatact

SEQ ID NO: 1579219 - DNA, 25 bp, Homo sapien
gatgaatgggtagagcacagagaat

SEQ ID NO: 1579220 - DNA, 25 bp, Homo sapien
aggactacaaataaccgcgggactg

SEQ ID NO: 1579221 - DNA, 25 bp, Homo sapien
gagtcagccgggttgtaacatccct

SEQ ID NO: 1579222 - DNA, 25 bp, Homo sapien
cacatcccttttggtaggactacaa

SEQ ID NO: 1579223 - DNA, 25 bp, Homo sapien
aatcaaatagatgcctcagcagcag

SEQ ID NO: 1579224 - DNA, 25 bp, Homo sapien
ttacataagctaggcagttacccag

SEQ ID NO: 1579225 - DNA, 25 bp, Homo sapien
cctctggatgcttgttggtagacac

SEQ ID NO: 1579226 - DNA, 25 bp, Homo sapien
tcatagggaccttaaccacttggga

SEQ ID NO: 1579227 - DNA, 25 bp, Homo sapien
taagtactgccaaggtaagcccact

SEQ ID NO: 1579228 - DNA, 25 bp, Homo sapien
cagcctgtgtatacaggaccacgca

SEQ ID NO: 1579229 - DNA, 25 bp, Homo sapien
tgacagcataggtatccacccctga

SEQ ID NO: 1579230 - DNA, 25 bp, Homo sapien
tggttccataatggtcacccacagc

SEQ ID NO: 1579231 - DNA, 25 bp, Homo sapien
aattcttataacaagcattcctgac

SEQ ID NO: 1579232 - DNA, 25 bp, Homo sapien
tgtgaagtcccagaccgggaacctg

SEQ ID NO: 1579233 - DNA, 25 bp, Homo sapien
tgaagtcccagaccgggaacctgaa

SEQ ID NO: 1579234 - DNA, 25 bp, Homo sapien
gtcccagaccgggaacctgaagctc

SEQ ID NO: 1579235 - DNA, 25 bp, Homo sapien
ttatgtgaagtcccagaccgggaac

SEQ ID NO: 1579236 - DNA, 25 bp, Homo sapien
catagaaggagggatcacctgctca

SEQ ID NO: 1579237 - DNA, 25 bp, Homo sapien
caatcaaagtggaagggaccatttt

SEQ ID NO: 1579238 - DNA, 25 bp, Homo sapien
ggaccattttcagtactggccatgc

SEQ ID NO: 1579239 - DNA, 25 bp, Homo sapien
caggctttacaagagtttggaactc

SEQ ID NO: 1579240 - DNA, 25 bp, Homo sapien
ggagcacaaccatatcaacaccttg

SEQ ID NO: 1579241 - DNA, 25 bp, Homo sapien
gccaagccaatgtacccttctgtga

SEQ ID NO: 1579242 - DNA, 25 bp, Homo sapien
gaccggataacagcacaatcatggc

SEQ ID NO: 1579243 - DNA, 25 bp, Homo sapien
gactggaaagaatgctgcaaccaac

SEQ ID NO: 1579244 - DNA, 25 bp, Homo sapien
ttctcctcaagggtagctttccagt

SEQ ID NO: 1579245 - DNA, 25 bp, Homo sapien
tcctaataccaaagagggtggctcc

SEQ ID NO: 1579246 - DNA, 25 bp, Homo sapien
ggtgagtaccatgaacctcaaggag

SEQ ID NO: 1579247 - DNA, 25 bp, Homo sapien
tcctgtacacttccacgtggtggga

SEQ ID NO: 1579248 - DNA, 25 bp, Homo sapien
cagaaagctctagcacactgatgac

SEQ ID NO: 1579249 - DNA, 25 bp, Homo sapien
cacagactctcagaacaggtttccc

SEQ ID NO: 1579250 - DNA, 25 bp, Homo sapien
gcacagcgttcctcacatctgaagg

SEQ ID NO: 1579251 - DNA, 25 bp, Homo sapien
gaggtttccataatccttacagtca

SEQ ID NO: 1579252 - DNA, 25 bp, Homo sapien
tacaagttgagattgctgccggaag

SEQ ID NO: 1579253 - DNA, 25 bp, Homo sapien
gaaggttagagctccctgaaaaggc

SEQ ID NO: 1579254 - DNA, 25 bp, Homo sapien
tgatgcatcacaaggtaggagctcc

SEQ ID NO: 1579255 - DNA, 25 bp, Homo sapien
tgtccgccgatgcactacaagttga

SEQ ID NO: 1579256 - DNA, 25 bp, Homo sapien
tacaagtgttggcaactgcacccgg

SEQ ID NO: 1579257 - DNA, 25 bp, Homo sapien
tgttcaatgagtcacaaccgctggc

SEQ ID NO: 1579258 - DNA, 25 bp, Homo sapien
taagttgacaccgttggctaaaggc

SEQ ID NO: 1579259 - DNA, 25 bp, Homo sapien
taaaggctttctcgcaatggtcaca

SEQ ID NO: 1579260 - DNA, 25 bp, Homo sapien
aattttcgtatatttcgtcgagacg

SEQ ID NO: 1579261 - DNA, 25 bp, Homo sapien
attttcgtatatttcgtcgagacgg

SEQ ID NO: 1579262 - DNA, 25 bp, Homo sapien
aatttagccaggcttcatgtcacat

SEQ ID NO: 1579263 - DNA, 25 bp, Homo sapien
atttagccaggcttcatgtcacatg

SEQ ID NO: 1579264 - DNA, 25 bp, Homo sapien
tttagccaggcttcatgtcacatgc

SEQ ID NO: 1579265 - DNA, 25 bp, Homo sapien
tgagtttcatggacagaccttcgat

SEQ ID NO: 1579266 - DNA, 25 bp, Homo sapien
taacagtacgctttgctcgagggtg

SEQ ID NO: 1579267 - DNA, 25 bp, Homo sapien
tgaagagggcgagaaccagctatca

SEQ ID NO: 1579268 - DNA, 25 bp, Homo sapien
ccacagccagataggtaatgccagg

SEQ ID NO: 1579269 - DNA, 25 bp, Homo sapien
tcgacctcctgaccccacgatccga

SEQ ID NO: 1579270 - DNA, 25 bp, Homo sapien
cgacctcctgaccccacgatccgac

SEQ ID NO: 1579271 - DNA, 25 bp, Homo sapien
ggagtgtaatggcactagacctcgg

SEQ ID NO: 1579272 - DNA, 25 bp, Homo sapien
gctggagtgtaatggcactagacct

SEQ ID NO: 1579273 - DNA, 25 bp, Homo sapien
ctggagtgtaatggcactagacctc

SEQ ID NO: 1579274 - DNA, 25 bp, Homo sapien
agtgtaatggcactagacctcggct

SEQ ID NO: 1579275 - DNA, 25 bp, Homo sapien
tatctataacattgaacaatcttac

SEQ ID NO: 1579276 - DNA, 25 bp, Homo sapien
tgtaatttcaaagagcctgttctgg

SEQ ID NO: 1579277 - DNA, 25 bp, Homo sapien
gcctgttctggttctcattgttcta

SEQ ID NO: 1579278 - DNA, 25 bp, Homo sapien
tgcagcaccaggcaacaagcattct

SEQ ID NO: 1579279 - DNA, 25 bp, Homo sapien
gaagttgtcaggtcacagccatgtg

SEQ ID NO: 1579280 - DNA, 25 bp, Homo sapien
aggaataatgacaacagtgccctac

SEQ ID NO: 1579281 - DNA, 25 bp, Homo sapien
aatgacaacagtgccctaccctacg

SEQ ID NO: 1579282 - DNA, 25 bp, Homo sapien
accctacggccactatgaagttgtc

SEQ ID NO: 1579283 - DNA, 25 bp, Homo sapien
gagtgcagtgatataataacagcta

SEQ ID NO: 1579284 - DNA, 25 bp, Homo sapien
ttcaggtatgtgctactatgcccgg

SEQ ID NO: 1579285 - DNA, 25 bp, Homo sapien
tgcagtgatataataacagctaact

SEQ ID NO: 1579286 - DNA, 25 bp, Homo sapien
gtgatataataacagctaactgcag

SEQ ID NO: 1579287 - DNA, 25 bp, Homo sapien
tctaatctcaaactcacggcctcag

SEQ ID NO: 1579288 - DNA, 25 bp, Homo sapien
atcttcaaggactaacccactccct

SEQ ID NO: 1579289 - DNA, 25 bp, Homo sapien
atcaaatcttcaaggactaacccac

SEQ ID NO: 1579290 - DNA, 25 bp, Homo sapien
cacctgggccttggtctgttaggat

SEQ ID NO: 1579291 - DNA, 25 bp, Homo sapien
aacagtcataatggaccagggctca

SEQ ID NO: 1579292 - DNA, 25 bp, Homo sapien
tatcaattttgggaagagacacagc

SEQ ID NO: 1579293 - DNA, 25 bp, Homo sapien
caaataaggtctgaggtactatggg

SEQ ID NO: 1579294 - DNA, 25 bp, Homo sapien
gagacacagctcaacctatatatta

SEQ ID NO: 1579295 - DNA, 25 bp, Homo sapien
cgtgacaagttgtctgtctccaaat

SEQ ID NO: 1579296 - DNA, 25 bp, Homo sapien
gtatgcgtgacaagttgtctgtctc

SEQ ID NO: 1579297 - DNA, 25 bp, Homo sapien
ctgtatgcgtgacaagttgtctgtc

SEQ ID NO: 1579298 - DNA, 25 bp, Homo sapien
tgacaagttgtctgtctccaaattt

SEQ ID NO: 1579299 - DNA, 25 bp, Homo sapien
tggcttgtagatgtctgactttgtc

SEQ ID NO: 1579300 - DNA, 25 bp, Homo sapien
tttattgttacagttgtggaagcca

SEQ ID NO: 1579301 - DNA, 25 bp, Homo sapien
gagggctacaagaaagtatatgttc

SEQ ID NO: 1579302 - DNA, 25 bp, Homo sapien
aatttattgttacagttgtggaagc

SEQ ID NO: 1579303 - DNA, 25 bp, Homo sapien
tgccagtgccagttggtgtccaggt

SEQ ID NO: 1579304 - DNA, 25 bp, Homo sapien
tccaggttcttgaagccatcacagg

SEQ ID NO: 1579305 - DNA, 25 bp, Homo sapien
gctcctgagtcacacccaacattgt

SEQ ID NO: 1579306 - DNA, 25 bp, Homo sapien
ttcagggataagtcagagtaagcag

SEQ ID NO: 1579307 - DNA, 25 bp, Homo sapien
ctgtcttctattgggagtcccaaaa

SEQ ID NO: 1579308 - DNA, 25 bp, Homo sapien
ttctattgggagtcccaaaaagctc

SEQ ID NO: 1579309 - DNA, 25 bp, Homo sapien
tcttctattgggagtcccaaaaagc

SEQ ID NO: 1579310 - DNA, 25 bp, Homo sapien
ggaactggatcaggcagccttccag

SEQ ID NO: 1579311 - DNA, 25 bp, Homo sapien
aaaccagatttccagtctacctgag

SEQ ID NO: 1579312 - DNA, 25 bp, Homo sapien
gagcaggtgttaggcaagttacaca

SEQ ID NO: 1579313 - DNA, 25 bp, Homo sapien
tgctctaggcctcatgagaccagac

SEQ ID NO: 1579314 - DNA, 25 bp, Homo sapien
tctacctgagcagcataataaggaa

SEQ ID NO: 1579315 - DNA, 25 bp, Homo sapien
cagacacatagcagggaacagtata

SEQ ID NO: 1579316 - DNA, 25 bp, Homo sapien
tggccgactcctgagggctcaagct

SEQ ID NO: 1579317 - DNA, 25 bp, Homo sapien
taaattttaccaagagccagacaca

SEQ ID NO: 1579318 - DNA, 25 bp, Homo sapien
tagtctgagggactgaagatcaacc

SEQ ID NO: 1579319 - DNA, 25 bp, Homo sapien
ggcggaccccgagagatgactgatt

SEQ ID NO: 1579320 - DNA, 25 bp, Homo sapien
tgctcttctcgggaacttgcgcggg

SEQ ID NO: 1579321 - DNA, 25 bp, Homo sapien
aatggaagcattatggccgatggcc

SEQ ID NO: 1579322 - DNA, 25 bp, Homo sapien
tggcctctggccaatgggagcactc

SEQ ID NO: 1579323 - DNA, 25 bp, Homo sapien
tccagccaaagggaccacccgactc

SEQ ID NO: 1579324 - DNA, 25 bp, Homo sapien
gaacgccggacaatggcggccgcac

SEQ ID NO: 1579325 - DNA, 25 bp, Homo sapien
cgactcgccgaacgccggacaatgg

SEQ ID NO: 1579326 - DNA, 25 bp, Homo sapien
gaaggacagcgcctgaggtgatccc

SEQ ID NO: 1579327 - DNA, 25 bp, Homo sapien
ggcggccccacagacatcactcccg

SEQ ID NO: 1579328 - DNA, 25 bp, Homo sapien
cacagacatcactcccgctacccct

SEQ ID NO: 1579329 - DNA, 25 bp, Homo sapien
atcactcccgctaccccttcgtcct

SEQ ID NO: 1579330 - DNA, 25 bp, Homo sapien
ggccccacagacatcactcccgcta

SEQ ID NO: 1579331 - DNA, 25 bp, Homo sapien
cagtctgcgcgggagacgcttgccc

SEQ ID NO: 1579332 - DNA, 25 bp, Homo sapien
cgtgtcaagggcattaacagcggtg

SEQ ID NO: 1579333 - DNA, 25 bp, Homo sapien
cgaggtgaaagggtcagtctgcgcg

SEQ ID NO: 1579334 - DNA, 25 bp, Homo sapien
gagcccgccgccgtcgttattgttg

SEQ ID NO: 1579335 - DNA, 25 bp, Homo sapien
ggagcagaacgcaggagatgggcct

SEQ ID NO: 1579336 - DNA, 25 bp, Homo sapien
gattctctcgggaatgaccgacccc

SEQ ID NO: 1579337 - DNA, 25 bp, Homo sapien
ccaggcgcctggttggaatcccggc

SEQ ID NO: 1579338 - DNA, 25 bp, Homo sapien
acagagccgcgtggagcatgcgcat

SEQ ID NO: 1579339 - DNA, 25 bp, Homo sapien
acactcagtgcgtggtgacccatca

SEQ ID NO: 1579340 - DNA, 25 bp, Homo sapien
tgttatcagtcaacacgaggacaga

SEQ ID NO: 1579341 - DNA, 25 bp, Homo sapien
ggtggtcactctcatcacactcagt

SEQ ID NO: 1579342 - DNA, 25 bp, Homo sapien
ggtgtccgctgactccacgcgttaa

SEQ ID NO: 1579343 - DNA, 25 bp, Homo sapien
gaggcctacatggagaacaactgag

SEQ ID NO: 1579344 - DNA, 25 bp, Homo sapien
ctttgtaaccagtaagacaccgtgg

SEQ ID NO: 1579345 - DNA, 25 bp, Homo sapien
gatgccatgttgcaaggatccctag

SEQ ID NO: 1579346 - DNA, 25 bp, Homo sapien
tttatggagaacacaggccgcaacc

SEQ ID NO: 1579347 - DNA, 25 bp, Homo sapien
agcctagacaccacgtccactgagt

SEQ ID NO: 1579348 - DNA, 25 bp, Homo sapien
atcatcacccattctgcaagagtca

SEQ ID NO: 1579349 - DNA, 25 bp, Homo sapien
gacaccacgtccactgagtactggt

SEQ ID NO: 1579350 - DNA, 25 bp, Homo sapien
ccatcatcacccattctgcaagagt

SEQ ID NO: 1579351 - DNA, 25 bp, Homo sapien
tttgatttgtgcttcccgtgcctcc

SEQ ID NO: 1579352 - DNA, 25 bp, Homo sapien
aattttgatttgtgcttcccgtgcc

SEQ ID NO: 1579353 - DNA, 25 bp, Homo sapien
tgatttgtgcttcccgtgcctcctg

SEQ ID NO: 1579354 - DNA, 25 bp, Homo sapien
caattttgatttgtgcttcccgtgc

SEQ ID NO: 1579355 - DNA, 25 bp, Homo sapien
ttcagggcaaggcaggctcacatga

SEQ ID NO: 1579356 - DNA, 25 bp, Homo sapien
tcagaaattcgcctgctttcagggc

SEQ ID NO: 1579357 - DNA, 25 bp, Homo sapien
gccagtttaagagcccacaaggaca

SEQ ID NO: 1579358 - DNA, 25 bp, Homo sapien
ctaacaagacagacgagggtaccag

SEQ ID NO: 1579359 - DNA, 25 bp, Homo sapien
aagatcaacaacgccaggcagagct

SEQ ID NO: 1579360 - DNA, 25 bp, Homo sapien
agatcaacaacgccaggcagagctg

SEQ ID NO: 1579361 - DNA, 25 bp, Homo sapien
caagatcaacaacgccaggcagagc

SEQ ID NO: 1579362 - DNA, 25 bp, Homo sapien
gatcaacaacgccaggcagagctga

SEQ ID NO: 1579363 - DNA, 25 bp, Homo sapien
ctggactatctccatcagtgctttc

SEQ ID NO: 1579364 - DNA, 25 bp, Homo sapien
catcacgtcacggtagaggatcctc

SEQ ID NO: 1579365 - DNA, 25 bp, Homo sapien
atcacgtcacggtagaggatcctct

SEQ ID NO: 1579366 - DNA, 25 bp, Homo sapien
gtagaggatcctctgggtagggtcc

SEQ ID NO: 1579367 - DNA, 25 bp, Homo sapien
aggatcctctgggtagggtccagct

SEQ ID NO: 1579368 - DNA, 25 bp, Homo sapien
gatgacttcaggcttcggaagctca

SEQ ID NO: 1579369 - DNA, 25 bp, Homo sapien
ctctcagccacccatagctcggtcc

SEQ ID NO: 1579370 - DNA, 25 bp, Homo sapien
ccctgggtggttcctctctcagcca

SEQ ID NO: 1579371 - DNA, 25 bp, Homo sapien
gccacccatagctcggtcccttgct

SEQ ID NO: 1579372 - DNA, 25 bp, Homo sapien
gcactagaatgttcacagccagtgc

SEQ ID NO: 1579373 - DNA, 25 bp, Homo sapien
cgcactagaatgttcacagccagtg

SEQ ID NO: 1579374 - DNA, 25 bp, Homo sapien
tgaaagaaaacccaaagatctctga

SEQ ID NO: 1579375 - DNA, 25 bp, Homo sapien
ctgaaagaaaacccaaagatctctg

SEQ ID NO: 1579376 - DNA, 25 bp, Homo sapien
gaaagaaaacccaaagatctctgag

SEQ ID NO: 1579377 - DNA, 25 bp, Homo sapien
aggcaggccctcttccttgcgtgat

SEQ ID NO: 1579378 - DNA, 25 bp, Homo sapien
tgggataaggagcatctgtcgggaa

SEQ ID NO: 1579379 - DNA, 25 bp, Homo sapien
ggagcatctgtcgggaatccttccc

SEQ ID NO: 1579380 - DNA, 25 bp, Homo sapien
gcatctgtcgggaatccttcccttc

SEQ ID NO: 1579381 - DNA, 25 bp, Homo sapien
tccgtaattggaatggcctgactgg

SEQ ID NO: 1579382 - DNA, 25 bp, Homo sapien
cctgagtctgagagttttgtagcct

SEQ ID NO: 1579383 - DNA, 25 bp, Homo sapien
tgctccttgagtgccagactctggc

SEQ ID NO: 1579384 - DNA, 25 bp, Homo sapien
cagtcactgttttcaccgggctgtt

SEQ ID NO: 1579385 - DNA, 25 bp, Homo sapien
tgaatcctcttgtgcacggtgaggt

SEQ ID NO: 1579386 - DNA, 25 bp, Homo sapien
tggttaaacgacttcccacagtcag

SEQ ID NO: 1579387 - DNA, 25 bp, Homo sapien
tttgtagggtttgtcctgcacctgg

SEQ ID NO: 1579388 - DNA, 25 bp, Homo sapien
cacactccttgcacatataaggtct

SEQ ID NO: 1579389 - DNA, 25 bp, Homo sapien
ggatgtcaaacaaagccagggctct

SEQ ID NO: 1579390 - DNA, 25 bp, Homo sapien
caagtggtccgagagaaggatttcc

SEQ ID NO: 1579391 - DNA, 25 bp, Homo sapien
aagggtctgtcgcttcggtgagtcc

SEQ ID NO: 1579392 - DNA, 25 bp, Homo sapien
tgtgtactatggcagaaagacttcc

SEQ ID NO: 1579393 - DNA, 25 bp, Homo sapien
ttttacttgtggttaaaagtcatca

SEQ ID NO: 1579394 - DNA, 25 bp, Homo sapien
tacttgtggttaaaagtcatcagca

SEQ ID NO: 1579395 - DNA, 25 bp, Homo sapien
cttgtggttaaaagtcatcagcaaa

SEQ ID NO: 1579396 - DNA, 25 bp, Homo sapien
ttacttgtggttaaaagtcatcagc

SEQ ID NO: 1579397 - DNA, 25 bp, Homo sapien
cacaaaatatgtcgctaaagagggc

SEQ ID NO: 1579398 - DNA, 25 bp, Homo sapien
ccatgagtacactatgtggacttac

SEQ ID NO: 1579399 - DNA, 25 bp, Homo sapien
cactgagtttgatagatttgggacc

SEQ ID NO: 1579400 - DNA, 25 bp, Homo sapien
ccaacctcgggtgcttgggaagcat

SEQ ID NO: 1579401 - DNA, 25 bp, Homo sapien
ggctgccaagtgagcagtgattaca

SEQ ID NO: 1579402 - DNA, 25 bp, Homo sapien
agtgattacaacactgactccagcc

SEQ ID NO: 1579403 - DNA, 25 bp, Homo sapien
tgagcagtgattacaacactgactc

SEQ ID NO: 1579404 - DNA, 25 bp, Homo sapien
gccaagtgagcagtgattacaacac

SEQ ID NO: 1579405 - DNA, 25 bp, Homo sapien
ccccgaagaggtaagtgcagagaaa

SEQ ID NO: 1579406 - DNA, 25 bp, Homo sapien
cagagaaacgaacttgggccatcca

SEQ ID NO: 1579407 - DNA, 25 bp, Homo sapien
catcagcggtaagtgttggcctgcc

SEQ ID NO: 1579408 - DNA, 25 bp, Homo sapien
gaaggaaccccacaatgcaaggaga

SEQ ID NO: 1579409 - DNA, 25 bp, Homo sapien
aaaagacctatgggagactgctttt

SEQ ID NO: 1579410 - DNA, 25 bp, Homo sapien
agacctatgggagactgcttttcag

SEQ ID NO: 1579411 - DNA, 25 bp, Homo sapien
aaagacctatgggagactgcttttc

SEQ ID NO: 1579412 - DNA, 25 bp, Homo sapien
aagacctatgggagactgcttttca

SEQ ID NO: 1579413 - DNA, 25 bp, Homo sapien
ttccggtacgcacttccgcctggtg

SEQ ID NO: 1579414 - DNA, 25 bp, Homo sapien
cactgccgccggcacttccggtacg

SEQ ID NO: 1579415 - DNA, 25 bp, Homo sapien
ctggaaacggccatgcacgggatac

SEQ ID NO: 1579416 - DNA, 25 bp, Homo sapien
gcacgggatacaaggccttctggga

SEQ ID NO: 1579417 - DNA, 25 bp, Homo sapien
tcagagagcctagccgcccgatagt

SEQ ID NO: 1579418 - DNA, 25 bp, Homo sapien
tcctcagagagcctagccgcccgat

SEQ ID NO: 1579419 - DNA, 25 bp, Homo sapien
gcccgatagtccgcgcgcccgtgag

SEQ ID NO: 1579420 - DNA, 25 bp, Homo sapien
gatagtccgcgcgcccgtgagcgtc

SEQ ID NO: 1579421 - DNA, 25 bp, Homo sapien
tttctctgctctggcagaccttcct

SEQ ID NO: 1579422 - DNA, 25 bp, Homo sapien
gggttcgtagttcgtctgatcagtt

SEQ ID NO: 1579423 - DNA, 25 bp, Homo sapien
agaccttcctcgttcaggtccctgg

SEQ ID NO: 1579424 - DNA, 25 bp, Homo sapien
aggtccctggtcgggcaccacttgt

SEQ ID NO: 1579425 - DNA, 25 bp, Homo sapien
caataaattgtgcaaagggctcctg

SEQ ID NO: 1579426 - DNA, 25 bp, Homo sapien
tcaaagtaagcattttcgcaggagc

SEQ ID NO: 1579427 - DNA, 25 bp, Homo sapien
tcaatgggcgctgctggtgagacaa

SEQ ID NO: 1579428 - DNA, 25 bp, Homo sapien
caagctgtttgtacatctcacgggt

SEQ ID NO: 1579429 - DNA, 25 bp, Homo sapien
gatgtacccgctcaataatgcctgg

SEQ ID NO: 1579430 - DNA, 25 bp, Homo sapien
gggctggtccgtacactcttgatag

SEQ ID NO: 1579431 - DNA, 25 bp, Homo sapien
catagcggagttagccaaaggctgc

SEQ ID NO: 1579432 - DNA, 25 bp, Homo sapien
cagcgtttgggaagaccgtggtcta

SEQ ID NO: 1579433 - DNA, 25 bp, Homo sapien
acaggcccacggttgaataccatgg

SEQ ID NO: 1579434 - DNA, 25 bp, Homo sapien
taccatggatccctccggtctcccg

SEQ ID NO: 1579435 - DNA, 25 bp, Homo sapien
ggctcgtactggaggtaacaggccc

SEQ ID NO: 1579436 - DNA, 25 bp, Homo sapien
gatccctccggtctcccgttccatg

SEQ ID NO: 1579437 - DNA, 25 bp, Homo sapien
attgtgactccggtcggcccttgtt

SEQ ID NO: 1579438 - DNA, 25 bp, Homo sapien
ccggtcggcccttgttctgtctttg

SEQ ID NO: 1579439 - DNA, 25 bp, Homo sapien
tctcagcttcttgtgtcgttttctt

SEQ ID NO: 1579440 - DNA, 25 bp, Homo sapien
ggttggatgtcattgtgactccggt

SEQ ID NO: 1579441 - DNA, 25 bp, Homo sapien
ctacagctagcatggccaagaacat

SEQ ID NO: 1579442 - DNA, 25 bp, Homo sapien
cgcacaggacactacagctagcatg

SEQ ID NO: 1579443 - DNA, 25 bp, Homo sapien
gcacaggacactacagctagcatgg

SEQ ID NO: 1579444 - DNA, 25 bp, Homo sapien
gacactacagctagcatggccaaga

SEQ ID NO: 1579445 - DNA, 25 bp, Homo sapien
gagtccttccaatgggccggtgtaa

SEQ ID NO: 1579446 - DNA, 25 bp, Homo sapien
taaccatgcctgagattggactgca

SEQ ID NO: 1579447 - DNA, 25 bp, Homo sapien
tatcgattcctgaattgggcctctg

SEQ ID NO: 1579448 - DNA, 25 bp, Homo sapien
taaagcctgtcctataccaagcaag

SEQ ID NO: 1579449 - DNA, 25 bp, Homo sapien
tattataaaagagacattgaagtta

SEQ ID NO: 1579450 - DNA, 25 bp, Homo sapien
gagacattgaagttatgtttaaggt

SEQ ID NO: 1579451 - DNA, 25 bp, Homo sapien
cataacaacattattcttgtaatta

SEQ ID NO: 1579452 - DNA, 25 bp, Homo sapien
tataaaagagacattgaagttatgt

SEQ ID NO: 1579453 - DNA, 25 bp, Homo sapien
tgccggttggtggttcacccgatcc

SEQ ID NO: 1579454 - DNA, 25 bp, Homo sapien
ttggtggttcacccgatcctataga

SEQ ID NO: 1579455 - DNA, 25 bp, Homo sapien
cggttggtggttcacccgatcctat

SEQ ID NO: 1579456 - DNA, 25 bp, Homo sapien
ggttggtggttcacccgatcctata

SEQ ID NO: 1579457 - DNA, 25 bp, Homo sapien
tccttgatattagggaacagggacc

SEQ ID NO: 1579458 - DNA, 25 bp, Homo sapien
gacagagtttgtcagttcgccaaca

SEQ ID NO: 1579459 - DNA, 25 bp, Homo sapien
ttctggaccgaacgaaggacgacga

SEQ ID NO: 1579460 - DNA, 25 bp, Homo sapien
tcaacacatgcaggactgtcgcggt

SEQ ID NO: 1579461 - DNA, 25 bp, Homo sapien
actgtgactgccaccccaccatcta

SEQ ID NO: 1579462 - DNA, 25 bp, Homo sapien
accccaccatctacctcactcggca

SEQ ID NO: 1579463 - DNA, 25 bp, Homo sapien
atctacctcactcggcacctcaggc

SEQ ID NO: 1579464 - DNA, 25 bp, Homo sapien
tgtgccactgtgactgccaccccac

SEQ ID NO: 1579465 - DNA, 25 bp, Homo sapien
cacaggatacctctatgaggactat

SEQ ID NO: 1579466 - DNA, 25 bp, Homo sapien
gctatcaggcttcaaggacagcagc

SEQ ID NO: 1579467 - DNA, 25 bp, Homo sapien
aggcctcagctccatgctatcaggc

SEQ ID NO: 1579468 - DNA, 25 bp, Homo sapien
tatgtgccctgttatagtctgaggc

SEQ ID NO: 1579469 - DNA, 25 bp, Homo sapien
cagtaacaaatggatgccagctgga

SEQ ID NO: 1579470 - DNA, 25 bp, Homo sapien
taggacggaaacacacgtgagatcg

SEQ ID NO: 1579471 - DNA, 25 bp, Homo sapien
acgtgagatcgttttccagaatgtg

SEQ ID NO: 1579472 - DNA, 25 bp, Homo sapien
tgccctgatattcagtaacaaatgg

SEQ ID NO: 1579473 - DNA, 25 bp, Homo sapien
ttcttgccaaaggtatcttcccacc

SEQ ID NO: 1579474 - DNA, 25 bp, Homo sapien
tcttcgcacgtacagggtctccttt

SEQ ID NO: 1579475 - DNA, 25 bp, Homo sapien
tgtggctgattaaggtctgggaaac

SEQ ID NO: 1579476 - DNA, 25 bp, Homo sapien
gctgatagctcacaaggcacgtgtt

SEQ ID NO: 1579477 - DNA, 25 bp, Homo sapien
gcatgcatacagcttctcactggtg

SEQ ID NO: 1579478 - DNA, 25 bp, Homo sapien
tgtggacgtgccagtgcttgactag

SEQ ID NO: 1579479 - DNA, 25 bp, Homo sapien
agagatgaattgttgctgaaggtac

SEQ ID NO: 1579480 - DNA, 25 bp, Homo sapien
caagggatgagctctctcggaagca

SEQ ID NO: 1579481 - DNA, 25 bp, Homo sapien
cagtgctgtacaaggtgtgtgctct

SEQ ID NO: 1579482 - DNA, 25 bp, Homo sapien
gtgctgtacaaggtgtgtgctctcg

SEQ ID NO: 1579483 - DNA, 25 bp, Homo sapien
agtgctgtacaaggtgtgtgctctc

SEQ ID NO: 1579484 - DNA, 25 bp, Homo sapien
tctctcccgtgtggcagcgtatgtg

SEQ ID NO: 1579485 - DNA, 25 bp, Homo sapien
ttcctgacacgcatacagcttctct

SEQ ID NO: 1579486 - DNA, 25 bp, Homo sapien
cccgtgtaggttccgtggcatgcaa

SEQ ID NO: 1579487 - DNA, 25 bp, Homo sapien
tgaatgccttgcagcatacccggca

SEQ ID NO: 1579488 - DNA, 25 bp, Homo sapien
cacgtatgtacggcttctcaccgct

SEQ ID NO: 1579489 - DNA, 25 bp, Homo sapien
gtgctgggtcaggtaggacccctgg

SEQ ID NO: 1579490 - DNA, 25 bp, Homo sapien
acgtatgtacggcttctcaccgctg

SEQ ID NO: 1579491 - DNA, 25 bp, Homo sapien
tgtggatcttgaggtgctgggtcag

SEQ ID NO: 1579492 - DNA, 25 bp, Homo sapien
gtgcacccgctggtgtaggaccagg

SEQ ID NO: 1579493 - DNA, 25 bp, Homo sapien
tgcacccgctggtgtaggaccaggg

SEQ ID NO: 1579494 - DNA, 25 bp, Homo sapien
tctcccatgcggacttgctcatgct

SEQ ID NO: 1579495 - DNA, 25 bp, Homo sapien
taatactcggtgaggtgtgacatct

SEQ ID NO: 1579496 - DNA, 25 bp, Homo sapien
catgctgggtgagaaacttgctgtg

SEQ ID NO: 1579497 - DNA, 25 bp, Homo sapien
cgagggatgaggtttgcatgaaggc

SEQ ID NO: 1579498 - DNA, 25 bp, Homo sapien
tgtgccacggctgaaagggtcgttc

SEQ ID NO: 1579499 - DNA, 25 bp, Homo sapien
tatgaatggcttggtacatgcatgc

SEQ ID NO: 1579500 - DNA, 25 bp, Homo sapien
tctgacatatatggcatatgaatgg

SEQ ID NO: 1579501 - DNA, 25 bp, Homo sapien
agtacaagagttgtggcctcctgga

SEQ ID NO: 1579502 - DNA, 25 bp, Homo sapien
ccgcagagactagccaacttgcgcg

SEQ ID NO: 1579503 - DNA, 25 bp, Homo sapien
gtggccgcagagactagccaacttg

SEQ ID NO: 1579504 - DNA, 25 bp, Homo sapien
agagactagccaacttgcgcgcccg

SEQ ID NO: 1579505 - DNA, 25 bp, Homo sapien
acccttccggaggtggccgcagaga

SEQ ID NO: 1579506 - DNA, 25 bp, Homo sapien
cagtgagacacaggatgccggagcc

SEQ ID NO: 1579507 - DNA, 25 bp, Homo sapien
acacaggatgccggagccttggaac

SEQ ID NO: 1579508 - DNA, 25 bp, Homo sapien
agtgagacacaggatgccggagcct

SEQ ID NO: 1579509 - DNA, 25 bp, Homo sapien
acaggatgccggagccttggaactg

SEQ ID NO: 1579510 - DNA, 25 bp, Homo sapien
tctcttgtccagcacctgagtcaga

SEQ ID NO: 1579511 - DNA, 25 bp, Homo sapien
tcgtgtggaccagatgcctcctcat

SEQ ID NO: 1579512 - DNA, 25 bp, Homo sapien
tcctcatagcggaagtgccggaagc

SEQ ID NO: 1579513 - DNA, 25 bp, Homo sapien
cctcagagtgagcaatgtggtcatg

SEQ ID NO: 1579514 - DNA, 25 bp, Homo sapien
tgaggtttggccacgcactagaact

SEQ ID NO: 1579515 - DNA, 25 bp, Homo sapien
tacactcgcgacacttggaggacct

SEQ ID NO: 1579516 - DNA, 25 bp, Homo sapien
gattcacggccacgctggtctgtgg

SEQ ID NO: 1579517 - DNA, 25 bp, Homo sapien
gttcctcgaggcaccagattcacgg

SEQ ID NO: 1579518 - DNA, 25 bp, Homo sapien
agctctgtgcaaaggccttcggaca

SEQ ID NO: 1579519 - DNA, 25 bp, Homo sapien
tcagatgtcggatcagggctgagca

SEQ ID NO: 1579520 - DNA, 25 bp, Homo sapien
gcaagtgaaccatcagggctgagct

SEQ ID NO: 1579521 - DNA, 25 bp, Homo sapien
tcggacaaaccttacactgatatgg

SEQ ID NO: 1579522 - DNA, 25 bp, Homo sapien
tgagaacaagctacagttggcccgc

SEQ ID NO: 1579523 - DNA, 25 bp, Homo sapien
aattatttggtagactgggcagcac

SEQ ID NO: 1579524 - DNA, 25 bp, Homo sapien
tcttgacatagagggaatgggcccg

SEQ ID NO: 1579525 - DNA, 25 bp, Homo sapien
gaggccattttcactgcacgcacag

SEQ ID NO: 1579526 - DNA, 25 bp, Homo sapien
gaggagccctctgcgcccaggaaca

SEQ ID NO: 1579527 - DNA, 25 bp, Homo sapien
tgtggcgcggatgtccggggtgtga

SEQ ID NO: 1579528 - DNA, 25 bp, Homo sapien
gccctctgcgcccaggaacaagaca

SEQ ID NO: 1579529 - DNA, 25 bp, Homo sapien
cggaggagccctctgcgcccaggaa

SEQ ID NO: 1579530 - DNA, 25 bp, Homo sapien
cctgttagaattaagaacagccagt

SEQ ID NO: 1579531 - DNA, 25 bp, Homo sapien
caaagacaacacagtcccactgaca

SEQ ID NO: 1579532 - DNA, 25 bp, Homo sapien
gtttgttaatccaatcaagctttca

SEQ ID NO: 1579533 - DNA, 25 bp, Homo sapien
cctgattagcttacaattaattgca

SEQ ID NO: 1579534 - DNA, 25 bp, Homo sapien
cttacttttattcttgcaggccgga

SEQ ID NO: 1579535 - DNA, 25 bp, Homo sapien
taacttacttttattcttgcaggcc

SEQ ID NO: 1579536 - DNA, 25 bp, Homo sapien
cttttattcttgcaggccggagtgc

SEQ ID NO: 1579537 - DNA, 25 bp, Homo sapien
tacttttattcttgcaggccggagt

SEQ ID NO: 1579538 - DNA, 25 bp, Homo sapien
ccacgtctcctgttatgcagaagca

SEQ ID NO: 1579539 - DNA, 25 bp, Homo sapien
accagttcctgctgacgggtgacac

SEQ ID NO: 1579540 - DNA, 25 bp, Homo sapien
cgaccatgagtttctggaggtgcct

SEQ ID NO: 1579541 - DNA, 25 bp, Homo sapien
tactgtgaccattgaggagctcggt

SEQ ID NO: 1579542 - DNA, 25 bp, Homo sapien
gaacaggagccttacgggggctgtc

SEQ ID NO: 1579543 - DNA, 25 bp, Homo sapien
tccatgctcgtggtctttctcttgc

SEQ ID NO: 1579544 - DNA, 25 bp, Homo sapien
gagtgagcgcgaccatcatgtccat

SEQ ID NO: 1579545 - DNA, 25 bp, Homo sapien
ccagacactcactgcaccggagtga

SEQ ID NO: 1579546 - DNA, 25 bp, Homo sapien
tcatgtccatgctcgtggtctttct

SEQ ID NO: 1579547 - DNA, 25 bp, Homo sapien
ttcagccccggcactctccacttga

SEQ ID NO: 1579548 - DNA, 25 bp, Homo sapien
aactcagcgtctccttctagaacag

SEQ ID NO: 1579549 - DNA, 25 bp, Homo sapien
ggagaactcagcgtctccttctaga

SEQ ID NO: 1579550 - DNA, 25 bp, Homo sapien
gaactcagcgtctccttctagaaca

SEQ ID NO: 1579551 - DNA, 25 bp, Homo sapien
ccatgtgagggcaaccgcagaaagt

SEQ ID NO: 1579552 - DNA, 25 bp, Homo sapien
ctgagtgtgaaagcaccacggtctc

SEQ ID NO: 1579553 - DNA, 25 bp, Homo sapien
tgggtcacaccatgcagaatgaacc

SEQ ID NO: 1579554 - DNA, 25 bp, Homo sapien
tctcagctgaatgacctgggtggaa

SEQ ID NO: 1579555 - DNA, 25 bp, Homo sapien
aatgggaccaaacagagggagtctc

SEQ ID NO: 1579556 - DNA, 25 bp, Homo sapien
agtccttgtctgagtgccccaggtc

SEQ ID NO: 1579557 - DNA, 25 bp, Homo sapien
tctgagttctgtgcacaccctgagc

SEQ ID NO: 1579558 - DNA, 25 bp, Homo sapien
tgcagacctcagatttgaccaggcc

SEQ ID NO: 1579559 - DNA, 25 bp, Homo sapien
ttttaggtcacaggcgcgagatgga

SEQ ID NO: 1579560 - DNA, 25 bp, Homo sapien
tttcgtcatgggctcctacctggcg

SEQ ID NO: 1579561 - DNA, 25 bp, Homo sapien
cctacgcttgcagggagtgcggcaa

SEQ ID NO: 1579562 - DNA, 25 bp, Homo sapien
tcttacttgctgcagcatcggcgcg

SEQ ID NO: 1579563 - DNA, 25 bp, Homo sapien
gatgtgcacgtggccctgtcaggca

SEQ ID NO: 1579564 - DNA, 25 bp, Homo sapien
gagtgctggcccatcccccgagtgt

SEQ ID NO: 1579565 - DNA, 25 bp, Homo sapien
caggtgcgtgggcaactttgagtcc

SEQ ID NO: 1579566 - DNA, 25 bp, Homo sapien
gaggagagtggtgccacagtagggc

SEQ ID NO: 1579567 - DNA, 25 bp, Homo sapien
gggtcaggcggtgtcctccagcctt

SEQ ID NO: 1579568 - DNA, 25 bp, Homo sapien
gacatagctgtgtttgggtcaggcg

SEQ ID NO: 1579569 - DNA, 25 bp, Homo sapien
actacccagggatccggccagggtg

SEQ ID NO: 1579570 - DNA, 25 bp, Homo sapien
ttcaggaatggagacgggtccatcg

SEQ ID NO: 1579571 - DNA, 25 bp, Homo sapien
cacaaggatgataaggtgctcaggg

SEQ ID NO: 1579572 - DNA, 25 bp, Homo sapien
tagagacttcgctgtgggaaggatc

SEQ ID NO: 1579573 - DNA, 25 bp, Homo sapien
catgccttggaccacctggtctgac

SEQ ID NO: 1579574 - DNA, 25 bp, Homo sapien
gcaaatgaggatgggttttgctcgc

SEQ ID NO: 1579575 - DNA, 25 bp, Homo sapien
gagaagggtgggtcatgccaccgca

SEQ ID NO: 1579576 - DNA, 25 bp, Homo sapien
tgggtcatgccaccgcatgcccctt

SEQ ID NO: 1579577 - DNA, 25 bp, Homo sapien
gtcatgccaccgcatgccccttgtt

SEQ ID NO: 1579578 - DNA, 25 bp, Homo sapien
agggtgggtcatgccaccgcatgcc

SEQ ID NO: 1579579 - DNA, 25 bp, Homo sapien
tcttggcttggacggcagagtcaga

SEQ ID NO: 1579580 - DNA, 25 bp, Homo sapien
tgtgtgctccgcattgtgtcctgag

SEQ ID NO: 1579581 - DNA, 25 bp, Homo sapien
ccagtcgtgggttggtggctgagag

SEQ ID NO: 1579582 - DNA, 25 bp, Homo sapien
gagtcagagatctccagtccacacc

SEQ ID NO: 1579583 - DNA, 25 bp, Homo sapien
ggagcagttattgggcacactgctc

SEQ ID NO: 1579584 - DNA, 25 bp, Homo sapien
gtgctggagcagttattgggcacac

SEQ ID NO: 1579585 - DNA, 25 bp, Homo sapien
ctggagcagttattgggcacactgc

SEQ ID NO: 1579586 - DNA, 25 bp, Homo sapien
tgctggagcagttattgggcacact

SEQ ID NO: 1579587 - DNA, 25 bp, Homo sapien
gcccagatgagtgaggcatcagccc

SEQ ID NO: 1579588 - DNA, 25 bp, Homo sapien
gagaaagtaccctgggccatgcagc

SEQ ID NO: 1579589 - DNA, 25 bp, Homo sapien
catggcacctcagtgtgtccctcag

SEQ ID NO: 1579590 - DNA, 25 bp, Homo sapien
ggtcttcccgagtccactggaactg

SEQ ID NO: 1579591 - DNA, 25 bp, Homo sapien
cctactggcccgcttgccccgcgcg

SEQ ID NO: 1579592 - DNA, 25 bp, Homo sapien
cgcgcggggcaagcgggccagtagg

SEQ ID NO: 1579593 - DNA, 25 bp, Homo sapien
caccgcacttggcctaacttaaatt

SEQ ID NO: 1579594 - DNA, 25 bp, Homo sapien
taggactacagccgtcagccaccgc

SEQ ID NO: 1579595 - DNA, 25 bp, Homo sapien
ctacagccgtcagccaccgcacttg

SEQ ID NO: 1579596 - DNA, 25 bp, Homo sapien
tggtcttggaattgctgacctcgtg

SEQ ID NO: 1579597 - DNA, 25 bp, Homo sapien
cgtgactggtcggacaagtgcccgt

SEQ ID NO: 1579598 - DNA, 25 bp, Homo sapien
gactgacgcgggaggtggctctgat

SEQ ID NO: 1579599 - DNA, 25 bp, Homo sapien
gggcgtgggcgctgggactgacgcg

SEQ ID NO: 1579600 - DNA, 25 bp, Homo sapien
ctggtcggacaagtgcccgttgttg

SEQ ID NO: 1579601 - DNA, 25 bp, Homo sapien
gggcctctttcaggccgctcctagt

SEQ ID NO: 1579602 - DNA, 25 bp, Homo sapien
gcgggccgaggacggtgagtgacgc

SEQ ID NO: 1579603 - DNA, 25 bp, Homo sapien
ctagtggacgcagaggcgggccgag

SEQ ID NO: 1579604 - DNA, 25 bp, Homo sapien
gtgagtgacgccgacggacaccctc

SEQ ID NO: 1579605 - DNA, 25 bp, Homo sapien
cgcagccgcggcatagttacgcagg

SEQ ID NO: 1579606 - DNA, 25 bp, Homo sapien
ttgggccgctctgccgaatgcaacc

SEQ ID NO: 1579607 - DNA, 25 bp, Homo sapien
ggagaagctacgttggcccgacttg

SEQ ID NO: 1579608 - DNA, 25 bp, Homo sapien
caggacgcccgagtagcttggctgt

SEQ ID NO: 1579609 - DNA, 25 bp, Homo sapien
tgttcccagacggtctcccaagtac

SEQ ID NO: 1579610 - DNA, 25 bp, Homo sapien
ctcggtgttcccagacggtctccca

SEQ ID NO: 1579611 - DNA, 25 bp, Homo sapien
cggtgttcccagacggtctcccaag

SEQ ID NO: 1579612 - DNA, 25 bp, Homo sapien
agccaacagcactcggtgttcccag

SEQ ID NO: 1579613 - DNA, 25 bp, Homo sapien
tgatggaggaaaggacgaaaagcca

SEQ ID NO: 1579614 - DNA, 25 bp, Homo sapien
aatacatggaatgcagctctaggtg

SEQ ID NO: 1579615 - DNA, 25 bp, Homo sapien
gccaaggaatacatggaatgcagct

SEQ ID NO: 1579616 - DNA, 25 bp, Homo sapien
gacgaaaagccaaggaatacatgga

SEQ ID NO: 1579617 - DNA, 25 bp, Homo sapien
gcttggctcctgttccggggatgat

SEQ ID NO: 1579618 - DNA, 25 bp, Homo sapien
aggaccaagggggagctctaagcca

SEQ ID NO: 1579619 - DNA, 25 bp, Homo sapien
ctagctggagtaattcctgtgggct

SEQ ID NO: 1579620 - DNA, 25 bp, Homo sapien
gctctaagccagagcctttactggg

SEQ ID NO: 1579621 - DNA, 25 bp, Homo sapien
tctgtggccctcatgctactgtgca

SEQ ID NO: 1579622 - DNA, 25 bp, Homo sapien
tagggacatatctgtgtggagcacc

SEQ ID NO: 1579623 - DNA, 25 bp, Homo sapien
gaaagcatcctgatgagggaggccc

SEQ ID NO: 1579624 - DNA, 25 bp, Homo sapien
gaacagaagaatcctaagtggcccc

SEQ ID NO: 1579625 - DNA, 25 bp, Homo sapien
agcagtaataatctcgagtgggcgc

SEQ ID NO: 1579626 - DNA, 25 bp, Homo sapien
tgggctctctggtatgcgaggaaac

SEQ ID NO: 1579627 - DNA, 25 bp, Homo sapien
gacgctgtgtccacgatctctaggg

SEQ ID NO: 1579628 - DNA, 25 bp, Homo sapien
ttgaccttttctaaccgggcgcaca

SEQ ID NO: 1579629 - DNA, 25 bp, Homo sapien
catgatagagcttactgccagcagc

SEQ ID NO: 1579630 - DNA, 25 bp, Homo sapien
gattcatgtccacctgctgttggga

SEQ ID NO: 1579631 - DNA, 25 bp, Homo sapien
gaggccaatcagctcacctgcagtg

SEQ ID NO: 1579632 - DNA, 25 bp, Homo sapien
cagactcagatccacaagtgtttgg

SEQ ID NO: 1579633 - DNA, 25 bp, Homo sapien
tgagccagtgtttgcttgaatgcct

SEQ ID NO: 1579634 - DNA, 25 bp, Homo sapien
tgatacccgtaaagcaattactccc

SEQ ID NO: 1579635 - DNA, 25 bp, Homo sapien
tgtggagctgaaggtttccacagca

SEQ ID NO: 1579636 - DNA, 25 bp, Homo sapien
tgaacagcgctgctctgaacatctg

SEQ ID NO: 1579637 - DNA, 25 bp, Homo sapien
caccattctcctgcaggcgcccacc

SEQ ID NO: 1579638 - DNA, 25 bp, Homo sapien
acaccattctcctgcaggcgcccac

SEQ ID NO: 1579639 - DNA, 25 bp, Homo sapien
ccaccttagcttcctgacagctggg

SEQ ID NO: 1579640 - DNA, 25 bp, Homo sapien
cttagcttcctgacagctggggcta

SEQ ID NO: 1579641 - DNA, 25 bp, Homo sapien
tctgtttctatgataaccgaagccc

SEQ ID NO: 1579642 - DNA, 25 bp, Homo sapien
tgttatcggtctgactcgcaacgcg

SEQ ID NO: 1579643 - DNA, 25 bp, Homo sapien
cagtcacccgctttcacgagaagga

SEQ ID NO: 1579644 - DNA, 25 bp, Homo sapien
tctttggcgacgacttaggtccacg

SEQ ID NO: 1579645 - DNA, 25 bp, Homo sapien
agccagtgtggacagtctgcctgcc

SEQ ID NO: 1579646 - DNA, 25 bp, Homo sapien
gccagtgtggacagtctgcctgccc

SEQ ID NO: 1579647 - DNA, 25 bp, Homo sapien
tagcctacaggctacgcgcggtgtc

SEQ ID NO: 1579648 - DNA, 25 bp, Homo sapien
tatgcagtaatctcgcccgtggaag

SEQ ID NO: 1579649 - DNA, 25 bp, Homo sapien
ggagcagcgcgacccgtctctgggt

SEQ ID NO: 1579650 - DNA, 25 bp, Homo sapien
cgtctctgggtggagcgcggaggta

SEQ ID NO: 1579651 - DNA, 25 bp, Homo sapien
ttctagggccgcttctgcaactgcg

SEQ ID NO: 1579652 - DNA, 25 bp, Homo sapien
cctccggattggtctatagggacac

SEQ ID NO: 1579653 - DNA, 25 bp, Homo sapien
ttcctgtctgtaccagggcggcgcg

SEQ ID NO: 1579654 - DNA, 25 bp, Homo sapien
cagttaaaagtgttggcccgcggcg

SEQ ID NO: 1579655 - DNA, 25 bp, Homo sapien
tctacgccgagtgacagagacgctc

SEQ ID NO: 1579656 - DNA, 25 bp, Homo sapien
acgatggccttttacgcaagcgtca

SEQ ID NO: 1579657 - DNA, 25 bp, Homo sapien
gtgtccctatagaccaatccggagg

SEQ ID NO: 1579658 - DNA, 25 bp, Homo sapien
cgccgcgggccaacacttttaactg

SEQ ID NO: 1579659 - DNA, 25 bp, Homo sapien
tagacggaatgggtgcagcccaagc

SEQ ID NO: 1579660 - DNA, 25 bp, Homo sapien
tgacgcttgcgtaaaaggccatcgt

SEQ ID NO: 1579661 - DNA, 25 bp, Homo sapien
gagcgtctctgtcactcggcgtaga

SEQ ID NO: 1579662 - DNA, 25 bp, Homo sapien
cgcagttgcagaagcggccctagaa

SEQ ID NO: 1579663 - DNA, 25 bp, Homo sapien
cccagttcatcactagatggcggct

SEQ ID NO: 1579664 - DNA, 25 bp, Homo sapien
tagatggcggctagcctcagagttg

SEQ ID NO: 1579665 - DNA, 25 bp, Homo sapien
ctttgctccatgctagctgagctct

SEQ ID NO: 1579666 - DNA, 25 bp, Homo sapien
gaatgagtgcgcctttgctccatgc

SEQ ID NO: 1579667 - DNA, 25 bp, Homo sapien
tagtgcttgaaaacacgttcacggc

SEQ ID NO: 1579668 - DNA, 25 bp, Homo sapien
cctcagagttgggaatgagtgcgcc

SEQ ID NO: 1579669 - DNA, 25 bp, Homo sapien
gcatggagcaaaggcgcactcattc

SEQ ID NO: 1579670 - DNA, 25 bp, Homo sapien
ggcgcactcattcccaactctgagg

SEQ ID NO: 1579671 - DNA, 25 bp, Homo sapien
aaaaacgtcagagctcagctagcat

SEQ ID NO: 1579672 - DNA, 25 bp, Homo sapien
tagccgccatctagtgatgaactgg

SEQ ID NO: 1579673 - DNA, 25 bp, Homo sapien
gccgtgaacgtgttttcaagcacta

SEQ ID NO: 1579674 - DNA, 25 bp, Homo sapien
aactctgaggctagccgccatctag

SEQ ID NO: 1579675 - DNA, 25 bp, Homo sapien
cagcggtggcagagaccccagacat

SEQ ID NO: 1579676 - DNA, 25 bp, Homo sapien
caccgatgatgtgcagatcaatgac

SEQ ID NO: 1579677 - DNA, 25 bp, Homo sapien
agaccccagacatcaagctctttgg

SEQ ID NO: 1579678 - DNA, 25 bp, Homo sapien
caccagcggtggcagagaccccaga

SEQ ID NO: 1579679 - DNA, 25 bp, Homo sapien
gcggtggcagagaccccagacatca

SEQ ID NO: 1579680 - DNA, 25 bp, Homo sapien
cgatgatgtgcagatcaatgacatt

SEQ ID NO: 1579681 - DNA, 25 bp, Homo sapien
aatgtcattgatctgcacatcatcg

SEQ ID NO: 1579682 - DNA, 25 bp, Homo sapien
tgatgtctggggtctctgccaccgc

SEQ ID NO: 1579683 - DNA, 25 bp, Homo sapien
gggtctctgccaccgctggtgctgc

SEQ ID NO: 1579684 - DNA, 25 bp, Homo sapien
cttcccaaagagcttgatgtctggg

SEQ ID NO: 1579685 - DNA, 25 bp, Homo sapien
tcattgatctgcacatcatcggtgc

SEQ ID NO: 1579686 - DNA, 25 bp, Homo sapien
tctggggtctctgccaccgctggtg

SEQ ID NO: 1579687 - DNA, 25 bp, Homo sapien
cagaaggagcatcacatctcacata

SEQ ID NO: 1579688 - DNA, 25 bp, Homo sapien
gtcatgagaggactccttcaccaga

SEQ ID NO: 1579689 - DNA, 25 bp, Homo sapien
actacaacttctgtcatgagaggac

SEQ ID NO: 1579690 - DNA, 25 bp, Homo sapien
tgagaggactccttcaccagaagga

SEQ ID NO: 1579691 - DNA, 25 bp, Homo sapien
caccagaaggagcatcacatctcac

SEQ ID NO: 1579692 - DNA, 25 bp, Homo sapien
catgagaggactccttcaccagaag

SEQ ID NO: 1579693 - DNA, 25 bp, Homo sapien
tgtgagatgtgatgctccttctggt

SEQ ID NO: 1579694 - DNA, 25 bp, Homo sapien
tctggtgaaggagtcctctcatgac

SEQ ID NO: 1579695 - DNA, 25 bp, Homo sapien
tccttctggtgaaggagtcctctca

SEQ ID NO: 1579696 - DNA, 25 bp, Homo sapien
agtcctctcatgacagaagttgtag

SEQ ID NO: 1579697 - DNA, 25 bp, Homo sapien
tatgtgagatgtgatgctccttctg

SEQ ID NO: 1579698 - DNA, 25 bp, Homo sapien
atatgtgagatgtgatgctccttct

SEQ ID NO: 1579699 - DNA, 25 bp, Homo sapien
gcacggccgcaacaacggcaagaag

SEQ ID NO: 1579700 - DNA, 25 bp, Homo sapien
cagtgtcccattgtggagcgcctca

SEQ ID NO: 1579701 - DNA, 25 bp, Homo sapien
gtgcgcatcgtcaagcatgccttcg

SEQ ID NO: 1579702 - DNA, 25 bp, Homo sapien
cagtgcagggcggtatgccgccaaa

SEQ ID NO: 1579703 - DNA, 25 bp, Homo sapien
ggcaagaagctcatgactgtgcgca

SEQ ID NO: 1579704 - DNA, 25 bp, Homo sapien
gcatgccttcgagatcatacacctg

SEQ ID NO: 1579705 - DNA, 25 bp, Homo sapien
agtgaggcgctccacaatgggacac

SEQ ID NO: 1579706 - DNA, 25 bp, Homo sapien
caggtgtatgatctcgaaggcatgc

SEQ ID NO: 1579707 - DNA, 25 bp, Homo sapien
gaggcgctccacaatgggacactga

SEQ ID NO: 1579708 - DNA, 25 bp, Homo sapien
gacgatgcgcacagtcatgagcttc

SEQ ID NO: 1579709 - DNA, 25 bp, Homo sapien
ttcttgccgttgttgcggccgtgca

SEQ ID NO: 1579710 - DNA, 25 bp, Homo sapien
tttggcggcataccgccctgcactg

SEQ ID NO: 1579711 - DNA, 25 bp, Homo sapien
gtgtcccccctgcgccgtgtgaacc

SEQ ID NO: 1579712 - DNA, 25 bp, Homo sapien
tgtgtcccccctgcgccgtgtgaac

SEQ ID NO: 1579713 - DNA, 25 bp, Homo sapien
atgtgtcccccctgcgccgtgtgaa

SEQ ID NO: 1579714 - DNA, 25 bp, Homo sapien
gatgtgtcccccctgcgccgtgtga

SEQ ID NO: 1579715 - DNA, 25 bp, Homo sapien
tgtcccccctgcgccgtgtgaacca

SEQ ID NO: 1579716 - DNA, 25 bp, Homo sapien
gtcccccctgcgccgtgtgaaccag

SEQ ID NO: 1579717 - DNA, 25 bp, Homo sapien
tggttcacacggcgcaggggggaca

SEQ ID NO: 1579718 - DNA, 25 bp, Homo sapien
tcacacggcgcaggggggacacatc

SEQ ID NO: 1579719 - DNA, 25 bp, Homo sapien
ggttcacacggcgcaggggggacac

SEQ ID NO: 1579720 - DNA, 25 bp, Homo sapien
ctggttcacacggcgcaggggggac

SEQ ID NO: 1579721 - DNA, 25 bp, Homo sapien
gttcacacggcgcaggggggacaca

SEQ ID NO: 1579722 - DNA, 25 bp, Homo sapien
ttcacacggcgcaggggggacacat

SEQ ID NO: 1579723 - DNA, 25 bp, Homo sapien
ggaggactccacacgcattgggcgc

SEQ ID NO: 1579724 - DNA, 25 bp, Homo sapien
cgcgccgggactgtgagacgacagg

SEQ ID NO: 1579725 - DNA, 25 bp, Homo sapien
atgtgtcccccctgcgccgtgtgaa

SEQ ID NO: 1579726 - DNA, 25 bp, Homo sapien
tccacacgcattgggcgcgccggga

SEQ ID NO: 1579727 - DNA, 25 bp, Homo sapien
gatgtgtcccccctgcgccgtgtga

SEQ ID NO: 1579728 - DNA, 25 bp, Homo sapien
agacgacaggctgtggatgtgtccc

SEQ ID NO: 1579729 - DNA, 25 bp, Homo sapien
cctgtcgtctcacagtcccggcgcg

SEQ ID NO: 1579730 - DNA, 25 bp, Homo sapien
tcacacggcgcaggggggacacatc

SEQ ID NO: 1579731 - DNA, 25 bp, Homo sapien
tcccggcgcgcccaatgcgtgtgga

SEQ ID NO: 1579732 - DNA, 25 bp, Homo sapien
gggacacatccacagcctgtcgtct

SEQ ID NO: 1579733 - DNA, 25 bp, Homo sapien
ttcacacggcgcaggggggacacat

SEQ ID NO: 1579734 - DNA, 25 bp, Homo sapien
gcgcccaatgcgtgtggagtcctcc

SEQ ID NO: 1579735 - DNA, 25 bp, Homo sapien
ctctgggtcctcttcgggaacacat

SEQ ID NO: 1579736 - DNA, 25 bp, Homo sapien
tggacacagccacgggagtgggtgg

SEQ ID NO: 1579737 - DNA, 25 bp, Homo sapien
gattcccaccctgcataggggctga

SEQ ID NO: 1579738 - DNA, 25 bp, Homo sapien
gaacacatttggcagaggtcttctt

SEQ ID NO: 1579739 - DNA, 25 bp, Homo sapien
cctcttcgggaacacatttggcaga

SEQ ID NO: 1579740 - DNA, 25 bp, Homo sapien
gggaacacatttggcagaggtcttc

SEQ ID NO: 1579741 - DNA, 25 bp, Homo sapien
agcccctatgcagggtgggaatcca

SEQ ID NO: 1579742 - DNA, 25 bp, Homo sapien
aagaagacctctgccaaatgtgttc

SEQ ID NO: 1579743 - DNA, 25 bp, Homo sapien
ctgccacgtgcataagccccaggct

SEQ ID NO: 1579744 - DNA, 25 bp, Homo sapien
aatgtgttcccgaagaggacccaga

SEQ ID NO: 1579745 - DNA, 25 bp, Homo sapien
ctggatcagcccctatgcagggtgg

SEQ ID NO: 1579746 - DNA, 25 bp, Homo sapien
tctgccaaatgtgttcccgaagagg

SEQ ID NO: 1579747 - DNA, 25 bp, Homo sapien
tctggctgctgtgcacaggcgctcg

SEQ ID NO: 1579748 - DNA, 25 bp, Homo sapien
catctggctgctgtgcacaggcgct

SEQ ID NO: 1579749 - DNA, 25 bp, Homo sapien
gccatctggctgctgtgcacaggcg

SEQ ID NO: 1579750 - DNA, 25 bp, Homo sapien
ccatctggctgctgtgcacaggcgc

SEQ ID NO: 1579751 - DNA, 25 bp, Homo sapien
atctggctgctgtgcacaggcgctc

SEQ ID NO: 1579752 - DNA, 25 bp, Homo sapien
gctgctgtgcacaggcgctcgtgag

SEQ ID NO: 1579753 - DNA, 25 bp, Homo sapien
gagcgcctgtgcacagcagccagat

SEQ ID NO: 1579754 - DNA, 25 bp, Homo sapien
cgcctgtgcacagcagccagatggc

SEQ ID NO: 1579755 - DNA, 25 bp, Homo sapien
gcgcctgtgcacagcagccagatgg

SEQ ID NO: 1579756 - DNA, 25 bp, Homo sapien
ctcacgagcgcctgtgcacagcagc

SEQ ID NO: 1579757 - DNA, 25 bp, Homo sapien
cgagcgcctgtgcacagcagccaga

SEQ ID NO: 1579758 - DNA, 25 bp, Homo sapien
agcgcctgtgcacagcagccagatg

SEQ ID NO: 1579759 - DNA, 25 bp, Homo sapien
tccggaacattaagaccattgctga

SEQ ID NO: 1579760 - DNA, 25 bp, Homo sapien
ggaacattaagaccattgctgagtg

SEQ ID NO: 1579761 - DNA, 25 bp, Homo sapien
gccttccggaacattaagaccattg

SEQ ID NO: 1579762 - DNA, 25 bp, Homo sapien
agatgagctcatcaatgctgccaag

SEQ ID NO: 1579763 - DNA, 25 bp, Homo sapien
ttaagaccattgctgagtgcctggc

SEQ ID NO: 1579764 - DNA, 25 bp, Homo sapien
gctgccttccggaacattaagacca

SEQ ID NO: 1579765 - DNA, 25 bp, Homo sapien
cttggcagcattgatgagctcatct

SEQ ID NO: 1579766 - DNA, 25 bp, Homo sapien
tggtcttaatgttccggaaggcagc

SEQ ID NO: 1579767 - DNA, 25 bp, Homo sapien
cactcagcaatggtcttaatgttcc

SEQ ID NO: 1579768 - DNA, 25 bp, Homo sapien
ccaggcactcagcaatggtcttaat

SEQ ID NO: 1579769 - DNA, 25 bp, Homo sapien
cagcaatggtcttaatgttccggaa

SEQ ID NO: 1579770 - DNA, 25 bp, Homo sapien
caatggtcttaatgttccggaaggc

SEQ ID NO: 1579771 - DNA, 25 bp, Homo sapien
ctcctcgaactcctatgccattaag

SEQ ID NO: 1579772 - DNA, 25 bp, Homo sapien
ggctcctcgaactcctatgccatta

SEQ ID NO: 1579773 - DNA, 25 bp, Homo sapien
gctcctcgaactcctatgccattaa

SEQ ID NO: 1579774 - DNA, 25 bp, Homo sapien
taatggcataggagttcgaggagcc

SEQ ID NO: 1579775 - DNA, 25 bp, Homo sapien
cttaatggcataggagttcgaggag

SEQ ID NO: 1579776 - DNA, 25 bp, Homo sapien
ttaatggcataggagttcgaggagc

SEQ ID NO: 1579777 - DNA, 25 bp, Homo sapien
cccaataaacctgtctgccctttgg

SEQ ID NO: 1579778 - DNA, 25 bp, Homo sapien
gcccaataaacctgtctgccctttg

SEQ ID NO: 1579779 - DNA, 25 bp, Homo sapien
ccaataaacctgtctgccctttggg

SEQ ID NO: 1579780 - DNA, 25 bp, Homo sapien
taaacctgtctgccctttggggcag

SEQ ID NO: 1579781 - DNA, 25 bp, Homo sapien
tgcccaataaacctgtctgcccttt

SEQ ID NO: 1579782 - DNA, 25 bp, Homo sapien
ataaacctgtctgccctttggggca

SEQ ID NO: 1579783 - DNA, 25 bp, Homo sapien
aaagggcagacaggtttattgggca

SEQ ID NO: 1579784 - DNA, 25 bp, Homo sapien
tgccccaaagggcagacaggtttat

SEQ ID NO: 1579785 - DNA, 25 bp, Homo sapien
ctgccccaaagggcagacaggttta

SEQ ID NO: 1579786 - DNA, 25 bp, Homo sapien
ccaaagggcagacaggtttattggg

SEQ ID NO: 1579787 - DNA, 25 bp, Homo sapien
caaagggcagacaggtttattgggc

SEQ ID NO: 1579788 - DNA, 25 bp, Homo sapien
ccccaaagggcagacaggtttattg

SEQ ID NO: 1579789 - DNA, 25 bp, Homo sapien
gaagcctcctccctctggccagtgg

SEQ ID NO: 1579790 - DNA, 25 bp, Homo sapien
agcctcctccctctggccagtggcg

SEQ ID NO: 1579791 - DNA, 25 bp, Homo sapien
tggaagcctcctccctctggccagt

SEQ ID NO: 1579792 - DNA, 25 bp, Homo sapien
cctcctccctctggccagtggcgtg

SEQ ID NO: 1579793 - DNA, 25 bp, Homo sapien
tcccctctgcttggggagcggggcg

SEQ ID NO: 1579794 - DNA, 25 bp, Homo sapien
gaatggcggagccagaacggccgag

SEQ ID NO: 1579795 - DNA, 25 bp, Homo sapien
gggcccgggaatggcggagccagaa

SEQ ID NO: 1579796 - DNA, 25 bp, Homo sapien
gcggagccagaacggccgagggcag

SEQ ID NO: 1579797 - DNA, 25 bp, Homo sapien
agtccaggcgcttgggcagcttgaa

SEQ ID NO: 1579798 - DNA, 25 bp, Homo sapien
acgacacgcagatgaggcactccac

SEQ ID NO: 1579799 - DNA, 25 bp, Homo sapien
ccgtcgaaggacgacacgcagatga

SEQ ID NO: 1579800 - DNA, 25 bp, Homo sapien
gcttgaacacgccgtcgaaggacga

SEQ ID NO: 1579801 - DNA, 25 bp, Homo sapien
cggacaggccaccgcgttgccgccg

SEQ ID NO: 1579802 - DNA, 25 bp, Homo sapien
ggacaggccaccgcgttgccgccgc

SEQ ID NO: 1579803 - DNA, 25 bp, Homo sapien
cgtgggcaacgcggggagtccgcgg

SEQ ID NO: 1579804 - DNA, 25 bp, Homo sapien
tgcgtgggcaacgcggggagtccgc

SEQ ID NO: 1579805 - DNA, 25 bp, Homo sapien
gcgtgggcaacgcggggagtccgcg

SEQ ID NO: 1579806 - DNA, 25 bp, Homo sapien
tgggcaacgcggggagtccgcggcg

SEQ ID NO: 1579807 - DNA, 25 bp, Homo sapien
gcggcgccggtcgaagcgcacggag

SEQ ID NO: 1579808 - DNA, 25 bp, Homo sapien
cgcgtcgcggggcaggagaccggac

SEQ ID NO: 1579809 - DNA, 25 bp, Homo sapien
ctggccagcgacaagcggcgcgaca

SEQ ID NO: 1579810 - DNA, 25 bp, Homo sapien
gagccctggcgagagggcggtgcgc

SEQ ID NO: 1579811 - DNA, 25 bp, Homo sapien
ggaagaagatgtagacgcccgagac

SEQ ID NO: 1579812 - DNA, 25 bp, Homo sapien
acggcagcgttgaagacccaggccg

SEQ ID NO: 1579813 - DNA, 25 bp, Homo sapien
tgtagacgcccgagaccacgaggcc

SEQ ID NO: 1579814 - DNA, 25 bp, Homo sapien
cagcgccacggcagcgttgaagacc

SEQ ID NO: 1579815 - DNA, 25 bp, Homo sapien
ggcctcggcggaaaccaagagaagc

SEQ ID NO: 1579816 - DNA, 25 bp, Homo sapien
agaagccaggcgctggagcgagcgc

SEQ ID NO: 1579817 - DNA, 25 bp, Homo sapien
caagagaagccaggcgctggagcga

SEQ ID NO: 1579818 - DNA, 25 bp, Homo sapien
agccaggcgctggagcgagcgccac

SEQ ID NO: 1579819 - DNA, 25 bp, Homo sapien
aggtcagggcccgtggggcgcggcg

SEQ ID NO: 1579820 - DNA, 25 bp, Homo sapien
gtgccatccgatcgcctgtccagcg

SEQ ID NO: 1579821 - DNA, 25 bp, Homo sapien
gatcgcctgtccagcgtcctctcgg

SEQ ID NO: 1579822 - DNA, 25 bp, Homo sapien
catccgatcgcctgtccagcgtcct

SEQ ID NO: 1579823 - DNA, 25 bp, Homo sapien
cgcgccccgtggccacggggcccag

SEQ ID NO: 1579824 - DNA, 25 bp, Homo sapien
tcctcgcgccccgtggccacggggc

SEQ ID NO: 1579825 - DNA, 25 bp, Homo sapien
ccacagcctcctcgcgccccgtggc

SEQ ID NO: 1579826 - DNA, 25 bp, Homo sapien
acagcctcctcgcgccccgtggcca

SEQ ID NO: 1579827 - DNA, 25 bp, Homo sapien
aggcaggactgcagtactggcgcac

SEQ ID NO: 1579828 - DNA, 25 bp, Homo sapien
ctggagaaacaggtaagtgctgcgc

SEQ ID NO: 1579829 - DNA, 25 bp, Homo sapien
gcgccctactaagggccccagataa

SEQ ID NO: 1579830 - DNA, 25 bp, Homo sapien
ccccagataacacggaggtgccagg

SEQ ID NO: 1579831 - DNA, 25 bp, Homo sapien
atccttgtgggacgactgcggtgcc

SEQ ID NO: 1579832 - DNA, 25 bp, Homo sapien
tgcctgctccttgagagggtccagc

SEQ ID NO: 1579833 - DNA, 25 bp, Homo sapien
gtgttcccagaggatccttgtggga

SEQ ID NO: 1579834 - DNA, 25 bp, Homo sapien
ctccttgagagggtccagccccatg

SEQ ID NO: 1579835 - DNA, 25 bp, Homo sapien
tacaagggatgaggatcagggatgc

SEQ ID NO: 1579836 - DNA, 25 bp, Homo sapien
tcagggatgcttccaactgcacccc

SEQ ID NO: 1579837 - DNA, 25 bp, Homo sapien
aggatcagggatgcttccaactgca

SEQ ID NO: 1579838 - DNA, 25 bp, Homo sapien
ggatgaggatcagggatgcttccaa

SEQ ID NO: 1579839 - DNA, 25 bp, Homo sapien
gtcgggggcgtccacagctggactc

SEQ ID NO: 1579840 - DNA, 25 bp, Homo sapien
agtcgggggcgtccacagctggact

SEQ ID NO: 1579841 - DNA, 25 bp, Homo sapien
cagtcgggggcgtccacagctggac

SEQ ID NO: 1579842 - DNA, 25 bp, Homo sapien
tcagtcgggggcgtccacagctgga

SEQ ID NO: 1579843 - DNA, 25 bp, Homo sapien
aagacccgttcaaggatccgtgtgg

SEQ ID NO: 1579844 - DNA, 25 bp, Homo sapien
gccaatccgaaggatgagtgctttg

SEQ ID NO: 1579845 - DNA, 25 bp, Homo sapien
ataggcgggcccctgcaacctatgg

SEQ ID NO: 1579846 - DNA, 25 bp, Homo sapien
ccccaggaatctgtggtgaggatga

SEQ ID NO: 1579847 - DNA, 25 bp, Homo sapien
ctagaagccacgacccagggggaag

SEQ ID NO: 1579848 - DNA, 25 bp, Homo sapien
cctctggctaaccaaggaggtccag

SEQ ID NO: 1579849 - DNA, 25 bp, Homo sapien
tctttaaggctcaagttcctcccca

SEQ ID NO: 1579850 - DNA, 25 bp, Homo sapien
ggcctctgagccatgataagcacag

SEQ ID NO: 1579851 - DNA, 25 bp, Homo sapien
agaagccccaggttcagtctgcaca

SEQ ID NO: 1579852 - DNA, 25 bp, Homo sapien
gtctattgggaaggctcagggttca

SEQ ID NO: 1579853 - DNA, 25 bp, Homo sapien
cagggttcacctcgaggtacaagaa

SEQ ID NO: 1579854 - DNA, 25 bp, Homo sapien
tcgctttggaacatgctgggtgccc

SEQ ID NO: 1579855 - DNA, 25 bp, Homo sapien
cactcccctaggttgggtgggagag

SEQ ID NO: 1579856 - DNA, 25 bp, Homo sapien
tctgagaccctatggtaggcagaat

SEQ ID NO: 1579857 - DNA, 25 bp, Homo sapien
agatatcccggtctgaatccctgga

SEQ ID NO: 1579858 - DNA, 25 bp, Homo sapien
gagggaagcaatgaggaggatctct

SEQ ID NO: 1579859 - DNA, 25 bp, Homo sapien
tccaagctggtagagtgcagaagcc

SEQ ID NO: 1579860 - DNA, 25 bp, Homo sapien
gcaccaaggtggtaatcagcagacc

SEQ ID NO: 1579861 - DNA, 25 bp, Homo sapien
aaagcagtggataggcaggcagaca

SEQ ID NO: 1579862 - DNA, 25 bp, Homo sapien
ccacaaaagcacctaggagcgagct

SEQ ID NO: 1579863 - DNA, 25 bp, Homo sapien
atctccagcgcaacgtggtcgtcat

SEQ ID NO: 1579864 - DNA, 25 bp, Homo sapien
tctcgccagcgccatcggagtgctg

SEQ ID NO: 1579865 - DNA, 25 bp, Homo sapien
cgcagcctcgctctgcgcgccgcag

SEQ ID NO: 1579866 - DNA, 25 bp, Homo sapien
tgttctcaccactcgctccccgagt

SEQ ID NO: 1579867 - DNA, 25 bp, Homo sapien
tggaggggcggccccatggggccat

SEQ ID NO: 1579868 - DNA, 25 bp, Homo sapien
gtggaggggcggccccatggggcca

SEQ ID NO: 1579869 - DNA, 25 bp, Homo sapien
aggactgcggactgccgggcaacgc

SEQ ID NO: 1579870 - DNA, 25 bp, Homo sapien
gggacagccttcccgccgaggactg

SEQ ID NO: 1579871 - DNA, 25 bp, Homo sapien
ggatcgcgaggaagtcaccccggcc

SEQ ID NO: 1579872 - DNA, 25 bp, Homo sapien
ctgcctgaggcgccgggacagcctt

SEQ ID NO: 1579873 - DNA, 25 bp, Homo sapien
gcctgtccgcgagcgataagtctga

SEQ ID NO: 1579874 - DNA, 25 bp, Homo sapien
ggcacggcgcgtggaaggcgcggca

SEQ ID NO: 1579875 - DNA, 25 bp, Homo sapien
ccgggagacccacggcgcctgtccg

SEQ ID NO: 1579876 - DNA, 25 bp, Homo sapien
aaggcgcggcaaaggtccctgccct

SEQ ID NO: 1579877 - DNA, 25 bp, Homo sapien
tgcgtccgaagacagggaaccgctt

SEQ ID NO: 1579878 - DNA, 25 bp, Homo sapien
tccccgcgcgggtgaaatgcgtccg

SEQ ID NO: 1579879 - DNA, 25 bp, Homo sapien
gggcagaacccgtggactggaccca

SEQ ID NO: 1579880 - DNA, 25 bp, Homo sapien
cagaacccgtggactggacccacgg

SEQ ID NO: 1579881 - DNA, 25 bp, Homo sapien
tggagaaatataccgtcacatcctc

SEQ ID NO: 1579882 - DNA, 25 bp, Homo sapien
ggagaaatataccgtcacatcctca

SEQ ID NO: 1579883 - DNA, 25 bp, Homo sapien
gagaaatataccgtcacatcctcaa

SEQ ID NO: 1579884 - DNA, 25 bp, Homo sapien
tgagctaacgagtgcaaagttctcc

SEQ ID NO: 1579885 - DNA, 25 bp, Homo sapien
cacatcccggtataggcccttctgg

SEQ ID NO: 1579886 - DNA, 25 bp, Homo sapien
cttctgggtcacattaaggagcccc

SEQ ID NO: 1579887 - DNA, 25 bp, Homo sapien
ccagtgagctaacgagtgcaaagtt

SEQ ID NO: 1579888 - DNA, 25 bp, Homo sapien
tgggcacccacgactgttcatcatc

SEQ ID NO: 1579889 - DNA, 25 bp, Homo sapien
cccacgactgttcatcatcctccag

SEQ ID NO: 1579890 - DNA, 25 bp, Homo sapien
agctgggcacccacgactgttcatc

SEQ ID NO: 1579891 - DNA, 25 bp, Homo sapien
cagctgggcacccacgactgttcat

SEQ ID NO: 1579892 - DNA, 25 bp, Homo sapien
gagaagggcaatgaggagacgcagg

SEQ ID NO: 1579893 - DNA, 25 bp, Homo sapien
tgagtcgccaacagtagacagctct

SEQ ID NO: 1579894 - DNA, 25 bp, Homo sapien
tgcggggcctgaaaatcatggtaga

SEQ ID NO: 1579895 - DNA, 25 bp, Homo sapien
tttcaagacacgcactgagtcgcca

SEQ ID NO: 1579896 - DNA, 25 bp, Homo sapien
tgatagaggcctgaacgggtcacgt

SEQ ID NO: 1579897 - DNA, 25 bp, Homo sapien
tggtgtttcctcagcttagacgggt

SEQ ID NO: 1579898 - DNA, 25 bp, Homo sapien
tcctctggtgtagaacaagtgcgtc

SEQ ID NO: 1579899 - DNA, 25 bp, Homo sapien
tcttcagtgtggaactgctggtgcc

SEQ ID NO: 1579900 - DNA, 25 bp, Homo sapien
tagcagctaacgaccttcccatgtg

SEQ ID NO: 1579901 - DNA, 25 bp, Homo sapien
tgctgaaggagggtggaactatgtt

SEQ ID NO: 1579902 - DNA, 25 bp, Homo sapien
ttctggagtatggactttcttgtgc

SEQ ID NO: 1579903 - DNA, 25 bp, Homo sapien
gtcctcctgacgcctttctggagta

SEQ ID NO: 1579904 - DNA, 25 bp, Homo sapien
tccagagcagtatgagacagtccat

SEQ ID NO: 1579905 - DNA, 25 bp, Homo sapien
tcagagtgcaatgtggctcccgaaa

SEQ ID NO: 1579906 - DNA, 25 bp, Homo sapien
gcttctttcggatggcactctcacg

SEQ ID NO: 1579907 - DNA, 25 bp, Homo sapien
ccacttgctgtagggaccttatggg

SEQ ID NO: 1579908 - DNA, 25 bp, Homo sapien
tgccacacaagtacaatcctagcta

SEQ ID NO: 1579909 - DNA, 25 bp, Homo sapien
gatagtgccggattctattctcaat

SEQ ID NO: 1579910 - DNA, 25 bp, Homo sapien
tgtggtgccacacaagtacaatcct

SEQ ID NO: 1579911 - DNA, 25 bp, Homo sapien
tagctattcaatacgctgaagcagg

SEQ ID NO: 1579912 - DNA, 25 bp, Homo sapien
tccttctgaccaatgctggaagttc

SEQ ID NO: 1579913 - DNA, 25 bp, Homo sapien
gacttttgagctgaatctggaaaca

SEQ ID NO: 1579914 - DNA, 25 bp, Homo sapien
aatatgacttttgagctgaatctgg

SEQ ID NO: 1579915 - DNA, 25 bp, Homo sapien
tggaaacagctccttctgaccaatg

SEQ ID NO: 1579916 - DNA, 25 bp, Homo sapien
tcttgctggccaacagagtgggcac

SEQ ID NO: 1579917 - DNA, 25 bp, Homo sapien
tgagagaagtgatagcctgacgtcc

SEQ ID NO: 1579918 - DNA, 25 bp, Homo sapien
tttcagttaccgtagggcccagagc

SEQ ID NO: 1579919 - DNA, 25 bp, Homo sapien
gactggtgaactagggcacatgcca

SEQ ID NO: 1579920 - DNA, 25 bp, Homo sapien
tgtaggaaatccttcagccgcagct

SEQ ID NO: 1579921 - DNA, 25 bp, Homo sapien
caatgtggtaaatccttcagccgaa

SEQ ID NO: 1579922 - DNA, 25 bp, Homo sapien
ccggagaacggccttttgagtgcag

SEQ ID NO: 1579923 - DNA, 25 bp, Homo sapien
gaaagtacatactgggcaaaggcct

SEQ ID NO: 1579924 - DNA, 25 bp, Homo sapien
gaagagctctaaagtccacctgtca

SEQ ID NO: 1579925 - DNA, 25 bp, Homo sapien
ggaaataccccatgtgtgtaaggag

SEQ ID NO: 1579926 - DNA, 25 bp, Homo sapien
ttagatggtacaaggacagggacgc

SEQ ID NO: 1579927 - DNA, 25 bp, Homo sapien
taccatttacatgcccaacaggtgg

SEQ ID NO: 1579928 - DNA, 25 bp, Homo sapien
gaggagaaaccctacacatgtggag

SEQ ID NO: 1579929 - DNA, 25 bp, Homo sapien
taactcctgtgacatgtgtgggcca

SEQ ID NO: 1579930 - DNA, 25 bp, Homo sapien
tacaggtcaggatccctaatgcaga

SEQ ID NO: 1579931 - DNA, 25 bp, Homo sapien
tatcctgccaatagtaatgggccct

SEQ ID NO: 1579932 - DNA, 25 bp, Homo sapien
gactatatagatttacgtttcctag

SEQ ID NO: 1579933 - DNA, 25 bp, Homo sapien
tattagcagtcccattagctgtcac

SEQ ID NO: 1579934 - DNA, 25 bp, Homo sapien
gagaaactgtaggtcctattagcag

SEQ ID NO: 1579935 - DNA, 25 bp, Homo sapien
tacacagtctagtgatttctatatg

SEQ ID NO: 1579936 - DNA, 25 bp, Homo sapien
cattctggggactgccggtctccat

SEQ ID NO: 1579937 - DNA, 25 bp, Homo sapien
tttagtggtgatgaaatggaagcat

SEQ ID NO: 1579938 - DNA, 25 bp, Homo sapien
gtaccttgtttagtggtgatgaaat

SEQ ID NO: 1579939 - DNA, 25 bp, Homo sapien
agcattctggggactgccggtctcc

SEQ ID NO: 1579940 - DNA, 25 bp, Homo sapien
atgagatctggaaggctgtcccagg

SEQ ID NO: 1579941 - DNA, 25 bp, Homo sapien
ggaatgagatctggaaggctgtccc

SEQ ID NO: 1579942 - DNA, 25 bp, Homo sapien
ctgtcccagggacagtgaccagcat

SEQ ID NO: 1579943 - DNA, 25 bp, Homo sapien
ctgtggaatgagatctggaaggctg

SEQ ID NO: 1579944 - DNA, 25 bp, Homo sapien
gcaaggggttatatcgagggattcc

SEQ ID NO: 1579945 - DNA, 25 bp, Homo sapien
aggggttatatcgagggattcccat

SEQ ID NO: 1579946 - DNA, 25 bp, Homo sapien
tatcgagggattcccatttctggaa

SEQ ID NO: 1579947 - DNA, 25 bp, Homo sapien
aatccaggcaaggggttatatcgag

SEQ ID NO: 1579948 - DNA, 25 bp, Homo sapien
gccattgcggtcctcattttgctgc

SEQ ID NO: 1579949 - DNA, 25 bp, Homo sapien
tagggaaatagcgtcatagacggcg

SEQ ID NO: 1579950 - DNA, 25 bp, Homo sapien
tgaaagctcggaccagtggcaagtc

SEQ ID NO: 1579951 - DNA, 25 bp, Homo sapien
gcaagtccgagctgtcattgagagg

SEQ ID NO: 1579952 - DNA, 25 bp, Homo sapien
tgtatgtcaagaaggcggaacttcc

SEQ ID NO: 1579953 - DNA, 25 bp, Homo sapien
gggtcaagacctcccaatgcgtagc

SEQ ID NO: 1579954 - DNA, 25 bp, Homo sapien
cactgggccggctttatctaaggca

SEQ ID NO: 1579955 - DNA, 25 bp, Homo sapien
gccaaagtgatggtccgaggacgac

SEQ ID NO: 1579956 - DNA, 25 bp, Homo sapien
tcaatcggagacttaggacaatggt

SEQ ID NO: 1579957 - DNA, 25 bp, Homo sapien
ggccaggccaccaacataatgcagt

SEQ ID NO: 1579958 - DNA, 25 bp, Homo sapien
taatgcagtctggacgtcctgaagc

SEQ ID NO: 1579959 - DNA, 25 bp, Homo sapien
tgaacgctcaggtcagggtcaagtc

SEQ ID NO: 1579960 - DNA, 25 bp, Homo sapien
ttggacctcactaaggagccccaca

SEQ ID NO: 1579961 - DNA, 25 bp, Homo sapien
tagtatcatgtcactgtagaagccc

SEQ ID NO: 1579962 - DNA, 25 bp, Homo sapien
tcttggaagatgtactgaccctgtc

SEQ ID NO: 1579963 - DNA, 25 bp, Homo sapien
cactggagtacaaagctctgtagta

SEQ ID NO: 1579964 - DNA, 25 bp, Homo sapien
tacaggaggcctctagagctggaca

SEQ ID NO: 1579965 - DNA, 25 bp, Homo sapien
caaggttgtcaagatcccagggaag

SEQ ID NO: 1579966 - DNA, 25 bp, Homo sapien
gagatttccggcaccgccatgatgg

SEQ ID NO: 1579967 - DNA, 25 bp, Homo sapien
tgagacttccgattccaggtgggca

SEQ ID NO: 1579968 - DNA, 25 bp, Homo sapien
catgctacactcacaatgctgtaaa

SEQ ID NO: 1579969 - DNA, 25 bp, Homo sapien
ttccagtgtgaatcactttgtgcac

SEQ ID NO: 1579970 - DNA, 25 bp, Homo sapien
gctggctgcactcatagagggtttt

SEQ ID NO: 1579971 - DNA, 25 bp, Homo sapien
gagctgtggccgatgctctcccatg

SEQ ID NO: 1579972 - DNA, 25 bp, Homo sapien
tgtgaattcttttatactaaataag

SEQ ID NO: 1579973 - DNA, 25 bp, Homo sapien
tatactaaataagggaggtgaagac

SEQ ID NO: 1579974 - DNA, 25 bp, Homo sapien
gggattacagatgggcgttaccatg

SEQ ID NO: 1579975 - DNA, 25 bp, Homo sapien
ttacagatgggcgttaccatgccca

SEQ ID NO: 1579976 - DNA, 25 bp, Homo sapien
tccctcagcgggttgcaaagtacaa

SEQ ID NO: 1579977 - DNA, 25 bp, Homo sapien
cacatgcagggcgatcatggtacaa

SEQ ID NO: 1579978 - DNA, 25 bp, Homo sapien
taaaacagagatgggcttccaccac

SEQ ID NO: 1579979 - DNA, 25 bp, Homo sapien
tgtgatagctctgccaaggtccctc

SEQ ID NO: 1579980 - DNA, 25 bp, Homo sapien
tcctgcctgtttttcggcgcggagg

SEQ ID NO: 1579981 - DNA, 25 bp, Homo sapien
tacgcgcgcagacgcttgcgcacag

SEQ ID NO: 1579982 - DNA, 25 bp, Homo sapien
ccttctgggttatgtggttcctgcc

SEQ ID NO: 1579983 - DNA, 25 bp, Homo sapien
attgccccaatacgcgcgcagacgc

SEQ ID NO: 1579984 - DNA, 25 bp, Homo sapien
gacgcgagcagccaagtgacagtcc

SEQ ID NO: 1579985 - DNA, 25 bp, Homo sapien
acgcgagcagccaagtgacagtccc

SEQ ID NO: 1579986 - DNA, 25 bp, Homo sapien
ctgacgcgagcagccaagtgacagt

SEQ ID NO: 1579987 - DNA, 25 bp, Homo sapien
gcgagcagccaagtgacagtcccaa

SEQ ID NO: 1579988 - DNA, 25 bp, Homo sapien
ccccgacccgcgcgccacagcccag

SEQ ID NO: 1579989 - DNA, 25 bp, Homo sapien
gccccgacccgcgcgccacagccca

SEQ ID NO: 1579990 - DNA, 25 bp, Homo sapien
cccgacccgcgcgccacagcccaga

SEQ ID NO: 1579991 - DNA, 25 bp, Homo sapien
aagataccgaggcttgggggcgcgg

SEQ ID NO: 1579992 - DNA, 25 bp, Homo sapien
tcgaagataccgaggcttgggggcg

SEQ ID NO: 1579993 - DNA, 25 bp, Homo sapien
gaagataccgaggcttgggggcgcg

SEQ ID NO: 1579994 - DNA, 25 bp, Homo sapien
cgaagataccgaggcttgggggcgc

SEQ ID NO: 1579995 - DNA, 25 bp, Homo sapien
tccaggcgctcaggctgaacaacat

SEQ ID NO: 1579996 - DNA, 25 bp, Homo sapien
gacaccaacaacgtcaggtccagtg

SEQ ID NO: 1579997 - DNA, 25 bp, Homo sapien
tgttctccacgcaacaaacggtgga

SEQ ID NO: 1579998 - DNA, 25 bp, Homo sapien
cagtgacatgaccaacctgggacat

SEQ ID NO: 1579999 - DNA, 25 bp, Homo sapien
ggccctctgcgctgtgtccaggagc

SEQ ID NO: 1580000 - DNA, 25 bp, Homo sapien
cgctgtgtccaggagcccccactcc

SEQ ID NO: 1580001 - DNA, 25 bp, Homo sapien
cctctgcgctgtgtccaggagcccc

SEQ ID NO: 1580002 - DNA, 25 bp, Homo sapien
tctgcgctgtgtccaggagccccca

SEQ ID NO: 1580003 - DNA, 25 bp, Homo sapien
gtcacaagtgtgaagttttccagca

SEQ ID NO: 1580004 - DNA, 25 bp, Homo sapien
ggtcacaagtgtgaagttttccagc

SEQ ID NO: 1580005 - DNA, 25 bp, Homo sapien
caagtgaggtcacaagtgtgaagtt

SEQ ID NO: 1580006 - DNA, 25 bp, Homo sapien
tgaggtcacaagtgtgaagttttcc

SEQ ID NO: 1580007 - DNA, 25 bp, Homo sapien
aagttgaatgaccacacgaggtcgg

SEQ ID NO: 1580008 - DNA, 25 bp, Homo sapien
aatgaccacacgaggtcgggaggta

SEQ ID NO: 1580009 - DNA, 25 bp, Homo sapien
cctcccgtaggtgttcctggccagg

SEQ ID NO: 1580010 - DNA, 25 bp, Homo sapien
tgagcctcccgtaggtgttcctggc

SEQ ID NO: 1580011 - DNA, 25 bp, Homo sapien
gttgagcctcccgtaggtgttcctg

SEQ ID NO: 1580012 - DNA, 25 bp, Homo sapien
cagagttgagcctcccgtaggtgtt

SEQ ID NO: 1580013 - DNA, 25 bp, Homo sapien
taaacgcagagaaacggtggttgcc

SEQ ID NO: 1580014 - DNA, 25 bp, Homo sapien
aacgcagagaaacggtggttgcctg

SEQ ID NO: 1580015 - DNA, 25 bp, Homo sapien
cgcagagaaacggtggttgcctggg

SEQ ID NO: 1580016 - DNA, 25 bp, Homo sapien
ctaaacgcagagaaacggtggttgc

SEQ ID NO: 1580017 - DNA, 25 bp, Homo sapien
caggcacccggtactctgtgaaggt

SEQ ID NO: 1580018 - DNA, 25 bp, Homo sapien
ggcattcccgaaggctctcccaggg

SEQ ID NO: 1580019 - DNA, 25 bp, Homo sapien
actggcggccttcaggtccgaggca

SEQ ID NO: 1580020 - DNA, 25 bp, Homo sapien
tggtcactgcgcgagcctagcagga

SEQ ID NO: 1580021 - DNA, 25 bp, Homo sapien
cagcaccgcagagcgcgcatacgaa

SEQ ID NO: 1580022 - DNA, 25 bp, Homo sapien
aaggcagcaccgcagagcgcgcata

SEQ ID NO: 1580023 - DNA, 25 bp, Homo sapien
gcaccgcagagcgcgcatacgaagg

SEQ ID NO: 1580024 - DNA, 25 bp, Homo sapien
aggcagcaccgcagagcgcgcatac

SEQ ID NO: 1580025 - DNA, 25 bp, Homo sapien
tggccccggggtgcagtctggtgct

SEQ ID NO: 1580026 - DNA, 25 bp, Homo sapien
gcagtctggtgctgcggcattggtc

SEQ ID NO: 1580027 - DNA, 25 bp, Homo sapien
ggtgctgcggcattggtcttctctg

SEQ ID NO: 1580028 - DNA, 25 bp, Homo sapien
ctggtgctgcggcattggtcttctc

SEQ ID NO: 1580029 - DNA, 25 bp, Homo sapien
ttcaggactgggcttggcttccctc

SEQ ID NO: 1580030 - DNA, 25 bp, Homo sapien
cttcaggactgggcttggcttccct

SEQ ID NO: 1580031 - DNA, 25 bp, Homo sapien
agagcttttccccatcgtggatctg

SEQ ID NO: 1580032 - DNA, 25 bp, Homo sapien
agcactcggaccctttagctgtgga

SEQ ID NO: 1580033 - DNA, 25 bp, Homo sapien
ccaagaaagggttgggctgcgacct

SEQ ID NO: 1580034 - DNA, 25 bp, Homo sapien
gtggaagggattcacagaaggccaa

SEQ ID NO: 1580035 - DNA, 25 bp, Homo sapien
gctatgactaaactggcaaatcctg

SEQ ID NO: 1580036 - DNA, 25 bp, Homo sapien
gttccagctgacatgtcctccctct

SEQ ID NO: 1580037 - DNA, 25 bp, Homo sapien
tccctctgatgtttctgcagtgtta

SEQ ID NO: 1580038 - DNA, 25 bp, Homo sapien
ttccagctgacatgtcctccctctg

SEQ ID NO: 1580039 - DNA, 25 bp, Homo sapien
ccctctgatgtttctgcagtgttac

SEQ ID NO: 1580040 - DNA, 25 bp, Homo sapien
gacgaaaacctgaacgagtgccact

SEQ ID NO: 1580041 - DNA, 25 bp, Homo sapien
aaatgagtgagcgacaggccttggc

SEQ ID NO: 1580042 - DNA, 25 bp, Homo sapien
ctagcggccagtttgtgtgcagaca

SEQ ID NO: 1580043 - DNA, 25 bp, Homo sapien
aaaatgtcctcagcgtccgtctagc

SEQ ID NO: 1580044 - DNA, 25 bp, Homo sapien
tcttcaacatggttgtagggagtcc

SEQ ID NO: 1580045 - DNA, 25 bp, Homo sapien
ccttcattcaggaccattggaaaag

SEQ ID NO: 1580046 - DNA, 25 bp, Homo sapien
gaagcttcaaagcaactcctcaaga

SEQ ID NO: 1580047 - DNA, 25 bp, Homo sapien
gattccttggttgctgtgaagcttc

SEQ ID NO: 1580048 - DNA, 25 bp, Homo sapien
gaaagcagaaactgccgaggttcca

SEQ ID NO: 1580049 - DNA, 25 bp, Homo sapien
taaaccctgcaggtgcgaaagcaga

SEQ ID NO: 1580050 - DNA, 25 bp, Homo sapien
ttgcgtacagccttccgggtcacgt

SEQ ID NO: 1580051 - DNA, 25 bp, Homo sapien
cggtgtgtagtcctgccttcggcat

SEQ ID NO: 1580052 - DNA, 25 bp, Homo sapien
gcgaggtctaggaagcggcctccct

SEQ ID NO: 1580053 - DNA, 25 bp, Homo sapien
ggaagaaaggcgtggaccacccagc

SEQ ID NO: 1580054 - DNA, 25 bp, Homo sapien
tcccaggttttgcacacgcaggact

SEQ ID NO: 1580055 - DNA, 25 bp, Homo sapien
ggccatcatggacgtggaacgccca

SEQ ID NO: 1580056 - DNA, 25 bp, Homo sapien
gccatggtctaaggctgggttatcc

SEQ ID NO: 1580057 - DNA, 25 bp, Homo sapien
tgcgaagttgtctagcatcacgcgg

SEQ ID NO: 1580058 - DNA, 25 bp, Homo sapien
ttgtctagcatcacgcggcggtaca

SEQ ID NO: 1580059 - DNA, 25 bp, Homo sapien
cagcgaggccacaagtgcgaagttg

SEQ ID NO: 1580060 - DNA, 25 bp, Homo sapien
gccacaagtgcgaagttgtctagca

SEQ ID NO: 1580061 - DNA, 25 bp, Homo sapien
ccatttcatggagtatctaggacct

SEQ ID NO: 1580062 - DNA, 25 bp, Homo sapien
ggaatagctcattcatccccagggc

SEQ ID NO: 1580063 - DNA, 25 bp, Homo sapien
caaggtataggcctgctcgtcagcc

SEQ ID NO: 1580064 - DNA, 25 bp, Homo sapien
ggttgagccaaccagactgcatgtc

SEQ ID NO: 1580065 - DNA, 25 bp, Homo sapien
ccagctcaagataacccacctccaa

SEQ ID NO: 1580066 - DNA, 25 bp, Homo sapien
agctcaagataacccacctccaaac

SEQ ID NO: 1580067 - DNA, 25 bp, Homo sapien
aggagtcagggcttcacggaaacag

SEQ ID NO: 1580068 - DNA, 25 bp, Homo sapien
cagctcaagataacccacctccaaa

SEQ ID NO: 1580069 - DNA, 25 bp, Homo sapien
cagttggatgaccacacgaggtcga

SEQ ID NO: 1580070 - DNA, 25 bp, Homo sapien
gatgaccacacgaggtcgagaggtg

SEQ ID NO: 1580071 - DNA, 25 bp, Homo sapien
acagggttgtgtccgttccactggg

SEQ ID NO: 1580072 - DNA, 25 bp, Homo sapien
tcctggacagggttgtgtccgttcc

SEQ ID NO: 1580073 - DNA, 25 bp, Homo sapien
cagggttgcgcctcctgtaggtggt

SEQ ID NO: 1580074 - DNA, 25 bp, Homo sapien
ggtggtcctggacagggttgtgtcc

SEQ ID NO: 1580075 - DNA, 25 bp, Homo sapien
tgcacccattcggtgatgtccccga

SEQ ID NO: 1580076 - DNA, 25 bp, Homo sapien
gcgctcccaaaggttctcccaggga

SEQ ID NO: 1580077 - DNA, 25 bp, Homo sapien
tgtgagtgtcttttctctaagccgg

SEQ ID NO: 1580078 - DNA, 25 bp, Homo sapien
tccccagcaacgcatgctctgtgag

SEQ ID NO: 1580079 - DNA, 25 bp, Homo sapien
aggagtctatgaggctcctgccaaa

SEQ ID NO: 1580080 - DNA, 25 bp, Homo sapien
agctcttcacgaacactttgctgca

SEQ ID NO: 1580081 - DNA, 25 bp, Homo sapien
cgtaggtgcttgaggaggtcggagc

SEQ ID NO: 1580082 - DNA, 25 bp, Homo sapien
ttcgaaggacttctccccagcgtga

SEQ ID NO: 1580083 - DNA, 25 bp, Homo sapien
aggtcggagctcttcacgaacactt

SEQ ID NO: 1580084 - DNA, 25 bp, Homo sapien
tggtgctgcgtcaagtgcgacgtct

SEQ ID NO: 1580085 - DNA, 25 bp, Homo sapien
tgctgcgtcaagtgcgacgtctggc

SEQ ID NO: 1580086 - DNA, 25 bp, Homo sapien
tgcgtcaagtgcgacgtctggctga

SEQ ID NO: 1580087 - DNA, 25 bp, Homo sapien
tcaagtgcgacgtctggctgaaggc

SEQ ID NO: 1580088 - DNA, 25 bp, Homo sapien
atgccggaaggccttgccgcacacg

SEQ ID NO: 1580089 - DNA, 25 bp, Homo sapien
gccggaaggccttgccgcacacggg

SEQ ID NO: 1580090 - DNA, 25 bp, Homo sapien
ctatgccggaaggccttgccgcaca

SEQ ID NO: 1580091 - DNA, 25 bp, Homo sapien
tgccggaaggccttgccgcacacgg

SEQ ID NO: 1580092 - DNA, 25 bp, Homo sapien
ggaaggcgcggccacactgcgtaca

SEQ ID NO: 1580093 - DNA, 25 bp, Homo sapien
aggctggccctggatcgccggacgg

SEQ ID NO: 1580094 - DNA, 25 bp, Homo sapien
aaggcgcggccacactgcgtacaca

SEQ ID NO: 1580095 - DNA, 25 bp, Homo sapien
tggatcgccggacggtcttctcgcc

SEQ ID NO: 1580096 - DNA, 25 bp, Homo sapien
cttctgatgatgccccggcaacaga

SEQ ID NO: 1580097 - DNA, 25 bp, Homo sapien
ttctgatgatgccccggcaacagac

SEQ ID NO: 1580098 - DNA, 25 bp, Homo sapien
ctggctgcgagacggcggctgggcc

SEQ ID NO: 1580099 - DNA, 25 bp, Homo sapien
cagacctccgctggctgcgagacgg

SEQ ID NO: 1580100 - DNA, 25 bp, Homo sapien
tccgctggctgcgagacggcggctg

SEQ ID NO: 1580101 - DNA, 25 bp, Homo sapien
ggctgggcccgaggcgggagtgggc

SEQ ID NO: 1580102 - DNA, 25 bp, Homo sapien
ctgtccccacgtgcaaatgaaatca

SEQ ID NO: 1580103 - DNA, 25 bp, Homo sapien
caagcacgggactttttctctgctg

SEQ ID NO: 1580104 - DNA, 25 bp, Homo sapien
aggacatatgccctttagctgtgga

SEQ ID NO: 1580105 - DNA, 25 bp, Homo sapien
cttgtccctgactagcaagcacggg

SEQ ID NO: 1580106 - DNA, 25 bp, Homo sapien
ggctggcccctaggaagtcttggat

SEQ ID NO: 1580107 - DNA, 25 bp, Homo sapien
ccaaacccggcaaaagtgagcagct

SEQ ID NO: 1580108 - DNA, 25 bp, Homo sapien
tttggtaaaccagtcagtgacaggc

SEQ ID NO: 1580109 - DNA, 25 bp, Homo sapien
gaagttaacatcatcccctcaggta

SEQ ID NO: 1580110 - DNA, 25 bp, Homo sapien
tgggctccccagaaaagtgctcttt

SEQ ID NO: 1580111 - DNA, 25 bp, Homo sapien
caatggttcagggacctactgggat

SEQ ID NO: 1580112 - DNA, 25 bp, Homo sapien
ggctcagggcagaaacttcgctcaa

SEQ ID NO: 1580113 - DNA, 25 bp, Homo sapien
tctggccccaatatcaagtgtgtgg

SEQ ID NO: 1580114 - DNA, 25 bp, Homo sapien
tgatcaccgattggaagcaccgagc

SEQ ID NO: 1580115 - DNA, 25 bp, Homo sapien
ttgatataggtctcccgtctctggg

SEQ ID NO: 1580116 - DNA, 25 bp, Homo sapien
tcaactcggagctttccaacggcct

SEQ ID NO: 1580117 - DNA, 25 bp, Homo sapien
gtggccgagccattacttagtcagt

SEQ ID NO: 1580118 - DNA, 25 bp, Homo sapien
tttgcccaatcagaggtggcgcttg

SEQ ID NO: 1580119 - DNA, 25 bp, Homo sapien
tacagtgggccggtttctattggca

SEQ ID NO: 1580120 - DNA, 25 bp, Homo sapien
tcctctaggaggtacggcagagtcc

SEQ ID NO: 1580121 - DNA, 25 bp, Homo sapien
taaacttgcgcgtctgtacagtggg

SEQ ID NO: 1580122 - DNA, 25 bp, Homo sapien
gcttcccggatgtggcgccgcacaa

SEQ ID NO: 1580123 - DNA, 25 bp, Homo sapien
tcagccgggtgttgccccggcgacg

SEQ ID NO: 1580124 - DNA, 25 bp, Homo sapien
acccggagcggttgcttggaggccg

SEQ ID NO: 1580125 - DNA, 25 bp, Homo sapien
caatctctcgcctgcaccgaaggca

SEQ ID NO: 1580126 - DNA, 25 bp, Homo sapien
tcgaacttcgggatctgtccccaaa

SEQ ID NO: 1580127 - DNA, 25 bp, Homo sapien
gagggaggcgttccaagaggacttg

SEQ ID NO: 1580128 - DNA, 25 bp, Homo sapien
ctgacacccggcctatccgagggat

SEQ ID NO: 1580129 - DNA, 25 bp, Homo sapien
tatccgagggatgctcgaacttcgg

SEQ ID NO: 1580130 - DNA, 25 bp, Homo sapien
caagggggtggtcttggaatcgtca

SEQ ID NO: 1580131 - DNA, 25 bp, Homo sapien
tgctcaagggggtggtcttggaatc

SEQ ID NO: 1580132 - DNA, 25 bp, Homo sapien
tggtcttggaatcgtcaagatgggc

SEQ ID NO: 1580133 - DNA, 25 bp, Homo sapien
gggtggtcttggaatcgtcaagatg

SEQ ID NO: 1580134 - DNA, 25 bp, Homo sapien
gcatgggggacccagaggggatggc

SEQ ID NO: 1580135 - DNA, 25 bp, Homo sapien
gggcaggcatgggggacccagaggg

SEQ ID NO: 1580136 - DNA, 25 bp, Homo sapien
gacgggcaggcatgggggacccaga

SEQ ID NO: 1580137 - DNA, 25 bp, Homo sapien
catgggggacccagaggggatggca

SEQ ID NO: 1580138 - DNA, 25 bp, Homo sapien
tagcagaaccctcggaagcggaggc

SEQ ID NO: 1580139 - DNA, 25 bp, Homo sapien
tagggcagcggcctcctcaggactg

SEQ ID NO: 1580140 - DNA, 25 bp, Homo sapien
tgcccagggtcatgctgcagtcctt

SEQ ID NO: 1580141 - DNA, 25 bp, Homo sapien
tcctggtagcagaaccctcggaagc

SEQ ID NO: 1580142 - DNA, 25 bp, Homo sapien
gggctcccaagtggttcctctgtct

SEQ ID NO: 1580143 - DNA, 25 bp, Homo sapien
ggggctcccaagtggttcctctgtc

SEQ ID NO: 1580144 - DNA, 25 bp, Homo sapien
tcccaagtggttcctctgtcttctg

SEQ ID NO: 1580145 - DNA, 25 bp, Homo sapien
gctcccaagtggttcctctgtcttc

SEQ ID NO: 1580146 - DNA, 25 bp, Homo sapien
ccacttcctgtccatcgacattggg

SEQ ID NO: 1580147 - DNA, 25 bp, Homo sapien
acttcctgtccatcgacattgggct

SEQ ID NO: 1580148 - DNA, 25 bp, Homo sapien
ttcctgtccatcgacattgggctcc

SEQ ID NO: 1580149 - DNA, 25 bp, Homo sapien
tcctgtccatcgacattgggctcct

SEQ ID NO: 1580150 - DNA, 25 bp, Homo sapien
ttggtgtccatggttcccctcaggg

SEQ ID NO: 1580151 - DNA, 25 bp, Homo sapien
gatgtggaggctggttcttggtgtc

SEQ ID NO: 1580152 - DNA, 25 bp, Homo sapien
aggatgtggaggctggttcttggtg

SEQ ID NO: 1580153 - DNA, 25 bp, Homo sapien
ccctcaggggactgtgctgcaagtg

SEQ ID NO: 1580154 - DNA, 25 bp, Homo sapien
aatagatcaccagtctgtccctctg

SEQ ID NO: 1580155 - DNA, 25 bp, Homo sapien
ctgggaagcaaagagccactagtca

SEQ ID NO: 1580156 - DNA, 25 bp, Homo sapien
aaagagccactagtcaaggagcctg

SEQ ID NO: 1580157 - DNA, 25 bp, Homo sapien
tttcaataatagatcaccagtctgt

SEQ ID NO: 1580158 - DNA, 25 bp, Homo sapien
aagtccaggggcaggaaggcggcag

SEQ ID NO: 1580159 - DNA, 25 bp, Homo sapien
gggacaagctgtggcaagtccaggg

SEQ ID NO: 1580160 - DNA, 25 bp, Homo sapien
gagggacaagctgtggcaagtccag

SEQ ID NO: 1580161 - DNA, 25 bp, Homo sapien
ctgagggacaagctgtggcaagtcc

SEQ ID NO: 1580162 - DNA, 25 bp, Homo sapien
ccctctactacaccatcctgctcag

SEQ ID NO: 1580163 - DNA, 25 bp, Homo sapien
gactttatcgaggaatgaactccct

SEQ ID NO: 1580164 - DNA, 25 bp, Homo sapien
gggacctgagtgactttatcgagga

SEQ ID NO: 1580165 - DNA, 25 bp, Homo sapien
tcgaggaatgaactccctgattggg

SEQ ID NO: 1580166 - DNA, 25 bp, Homo sapien
gcccatcactgtaggcgtctttcca

SEQ ID NO: 1580167 - DNA, 25 bp, Homo sapien
gatgtggcccatcactgtaggcgtc

SEQ ID NO: 1580168 - DNA, 25 bp, Homo sapien
gcggatgtggcccatcactgtaggc

SEQ ID NO: 1580169 - DNA, 25 bp, Homo sapien
tgtggcccatcactgtaggcgtctt

SEQ ID NO: 1580170 - DNA, 25 bp, Homo sapien
agggagaccactgtgccgtacttct

SEQ ID NO: 1580171 - DNA, 25 bp, Homo sapien
cactgtgccgtacttctccagcatc

SEQ ID NO: 1580172 - DNA, 25 bp, Homo sapien
cagcatcgcatcccagtacagttcc

SEQ ID NO: 1580173 - DNA, 25 bp, Homo sapien
gttccttctgtgaccggtccagcag

SEQ ID NO: 1580174 - DNA, 25 bp, Homo sapien
gagagctgggtagggctggtagcac

SEQ ID NO: 1580175 - DNA, 25 bp, Homo sapien
cacagttaggcatggggtttgcatg

SEQ ID NO: 1580176 - DNA, 25 bp, Homo sapien
taggtgacagggtgttcctctggaa

SEQ ID NO: 1580177 - DNA, 25 bp, Homo sapien
tgggtagggctggtagcacagaggc

SEQ ID NO: 1580178 - DNA, 25 bp, Homo sapien
tgcagacgcctgtccccgtgagcag

SEQ ID NO: 1580179 - DNA, 25 bp, Homo sapien
acgcctgtccccgtgagcagcatcc

SEQ ID NO: 1580180 - DNA, 25 bp, Homo sapien
gcttctgcagacgcctgtccccgtg

SEQ ID NO: 1580181 - DNA, 25 bp, Homo sapien
ctgtccccgtgagcagcatccccag

SEQ ID NO: 1580182 - DNA, 25 bp, Homo sapien
gccaggtggaccctcactctcattt

SEQ ID NO: 1580183 - DNA, 25 bp, Homo sapien
tgggcagccaggtggaccctcactc

SEQ ID NO: 1580184 - DNA, 25 bp, Homo sapien
ccctcccaggctgccggccctgggc

SEQ ID NO: 1580185 - DNA, 25 bp, Homo sapien
gcaggagtggcagccccagacaagc

SEQ ID NO: 1580186 - DNA, 25 bp, Homo sapien
ggctgagtgggcactggcggtgtcc

SEQ ID NO: 1580187 - DNA, 25 bp, Homo sapien
tgcaggtgtgggctgagtgggcact

SEQ ID NO: 1580188 - DNA, 25 bp, Homo sapien
gtgtgggctgagtgggcactggcgg

SEQ ID NO: 1580189 - DNA, 25 bp, Homo sapien
caggtgtgggctgagtgggcactgg

SEQ ID NO: 1580190 - DNA, 25 bp, Homo sapien
gtggcagccggctccagtctcgtct

SEQ ID NO: 1580191 - DNA, 25 bp, Homo sapien
ttctctgtgctttccccggtggcta

SEQ ID NO: 1580192 - DNA, 25 bp, Homo sapien
ctggcccactcgtgtgtgtccggtg

SEQ ID NO: 1580193 - DNA, 25 bp, Homo sapien
gaacactgacttccagtcgaagccg

SEQ ID NO: 1580194 - DNA, 25 bp, Homo sapien
tgtccggtggtggatgacgaacact

SEQ ID NO: 1580195 - DNA, 25 bp, Homo sapien
tcactgcagaagtgacgccgctggc

SEQ ID NO: 1580196 - DNA, 25 bp, Homo sapien
ctgcagaagtgacgccgctggcctg

SEQ ID NO: 1580197 - DNA, 25 bp, Homo sapien
agtcactgcagaagtgacgccgctg

SEQ ID NO: 1580198 - DNA, 25 bp, Homo sapien
gaagtgacgccgctggcctgtgtgg

SEQ ID NO: 1580199 - DNA, 25 bp, Homo sapien
tccggccggtggcccttgcggtgga

SEQ ID NO: 1580200 - DNA, 25 bp, Homo sapien
gccggtggcccttgcggtggatgac

SEQ ID NO: 1580201 - DNA, 25 bp, Homo sapien
cggccggtggcccttgcggtggatg

SEQ ID NO: 1580202 - DNA, 25 bp, Homo sapien
cctccggccggtggcccttgcggtg

SEQ ID NO: 1580203 - DNA, 25 bp, Homo sapien
agtttttgaacacccacctgaggca

SEQ ID NO: 1580204 - DNA, 25 bp, Homo sapien
cactggtcagccatagaagggaacc

SEQ ID NO: 1580205 - DNA, 25 bp, Homo sapien
ttgggaccccttgttcactctggca

SEQ ID NO: 1580206 - DNA, 25 bp, Homo sapien
cagcctctgcacagacgagtgggaa

SEQ ID NO: 1580207 - DNA, 25 bp, Homo sapien
tgacctagaagtacccatggccttg

SEQ ID NO: 1580208 - DNA, 25 bp, Homo sapien
tgcatgaccagctaactatggaggg

SEQ ID NO: 1580209 - DNA, 25 bp, Homo sapien
gtgactgcccagagatccggtgctt

SEQ ID NO: 1580210 - DNA, 25 bp, Homo sapien
taatacagtgcattggcgagtcccc

SEQ ID NO: 1580211 - DNA, 25 bp, Homo sapien
gccctactggcccgcttgccccgcg

SEQ ID NO: 1580212 - DNA, 25 bp, Homo sapien
cgcggggcaagcgggccagtagggc

SEQ ID NO: 1580213 - DNA, 25 bp, Homo sapien
catgagacagttgaattagggaaca

SEQ ID NO: 1580214 - DNA, 25 bp, Homo sapien
tcaaccacttctatatgtaaacttc

SEQ ID NO: 1580215 - DNA, 25 bp, Homo sapien
tgtaaacttctggagtaagcattgc

SEQ ID NO: 1580216 - DNA, 25 bp, Homo sapien
atttttctaagtgagcataaattgc

SEQ ID NO: 1580217 - DNA, 25 bp, Homo sapien
atggcgagacctcatctctccccgc

SEQ ID NO: 1580218 - DNA, 25 bp, Homo sapien
ggcgagacctcatctctccccgccc

SEQ ID NO: 1580219 - DNA, 25 bp, Homo sapien
acatggcgagacctcatctctcccc

SEQ ID NO: 1580220 - DNA, 25 bp, Homo sapien
cgagacctcatctctccccgccccc

SEQ ID NO: 1580221 - DNA, 25 bp, Homo sapien
aagggcaactatgccatatgacatc

SEQ ID NO: 1580222 - DNA, 25 bp, Homo sapien
acaaaacaagggcaactatgccata

SEQ ID NO: 1580223 - DNA, 25 bp, Homo sapien
caaaacaagggcaactatgccatat

SEQ ID NO: 1580224 - DNA, 25 bp, Homo sapien
aacaagggcaactatgccatatgac

SEQ ID NO: 1580225 - DNA, 25 bp, Homo sapien
aagggttttgttatcactcagatca

SEQ ID NO: 1580226 - DNA, 25 bp, Homo sapien
agggttttgttatcactcagatcag

SEQ ID NO: 1580227 - DNA, 25 bp, Homo sapien
agggatgagatcatacagagtcgaa

SEQ ID NO: 1580228 - DNA, 25 bp, Homo sapien
ggttttgttatcactcagatcagtc

SEQ ID NO: 1580229 - DNA, 25 bp, Homo sapien
ggcgggcaccaatgtctgtgcagtc

SEQ ID NO: 1580230 - DNA, 25 bp, Homo sapien
cggcgggcaccaatgtctgtgcagt

SEQ ID NO: 1580231 - DNA, 25 bp, Homo sapien
gcagcggcgggcaccaatgtctgtg

SEQ ID NO: 1580232 - DNA, 25 bp, Homo sapien
agcggcgggcaccaatgtctgtgca

SEQ ID NO: 1580233 - DNA, 25 bp, Homo sapien
agtaggactgacagacctggtccag

SEQ ID NO: 1580234 - DNA, 25 bp, Homo sapien
gggagtaggactgacagacctggtc

SEQ ID NO: 1580235 - DNA, 25 bp, Homo sapien
tggggagtaggactgacagacctgg

SEQ ID NO: 1580236 - DNA, 25 bp, Homo sapien
gagtaggactgacagacctggtcca

SEQ ID NO: 1580237 - DNA, 25 bp, Homo sapien
ccatgctgggagtgagtcattgaca

SEQ ID NO: 1580238 - DNA, 25 bp, Homo sapien
agtcattgacaagagggccatggag

SEQ ID NO: 1580239 - DNA, 25 bp, Homo sapien
ctctgctgtccatgctgggagtgag

SEQ ID NO: 1580240 - DNA, 25 bp, Homo sapien
tggcgtggtgatcgtagcctgagag

SEQ ID NO: 1580241 - DNA, 25 bp, Homo sapien
gaagacggcattccagccattggtc

SEQ ID NO: 1580242 - DNA, 25 bp, Homo sapien
accaaggtggtaagccagcaaccct

SEQ ID NO: 1580243 - DNA, 25 bp, Homo sapien
tctgcttggctggaacgagctgctc

SEQ ID NO: 1580244 - DNA, 25 bp, Homo sapien
caaaagcttgacgttggtgctcact

SEQ ID NO: 1580245 - DNA, 25 bp, Homo sapien
taggtaaaggttccaaggcatgccc

SEQ ID NO: 1580246 - DNA, 25 bp, Homo sapien
catacagtccgcctggcaatgggca

SEQ ID NO: 1580247 - DNA, 25 bp, Homo sapien
caatgggcaatggactacgggctga

SEQ ID NO: 1580248 - DNA, 25 bp, Homo sapien
ggaagtctacggctccacagaaggc

SEQ ID NO: 1580249 - DNA, 25 bp, Homo sapien
gtgatcctgtatgtgggcgagctcc

SEQ ID NO: 1580250 - DNA, 25 bp, Homo sapien
gcttctgggatgactgtcggcagca

SEQ ID NO: 1580251 - DNA, 25 bp, Homo sapien
cagcatggcgtgacagtgatcctgt

SEQ ID NO: 1580252 - DNA, 25 bp, Homo sapien
tgactgtcggcagcatggcgtgaca

SEQ ID NO: 1580253 - DNA, 25 bp, Homo sapien
actactctaactgtccacccatcca

SEQ ID NO: 1580254 - DNA, 25 bp, Homo sapien
ccagccatccatctactcactcact

SEQ ID NO: 1580255 - DNA, 25 bp, Homo sapien
tctactcactcactactctaactgt

SEQ ID NO: 1580256 - DNA, 25 bp, Homo sapien
atctactcactcactactctaactg

SEQ ID NO: 1580257 - DNA, 25 bp, Homo sapien
ggcatgtgccctcacgaccggctaa

SEQ ID NO: 1580258 - DNA, 25 bp, Homo sapien
ttacaggcatgtgccctcacgaccg

SEQ ID NO: 1580259 - DNA, 25 bp, Homo sapien
tacaggcatgtgccctcacgaccgg

SEQ ID NO: 1580260 - DNA, 25 bp, Homo sapien
caggcatgtgccctcacgaccggct

SEQ ID NO: 1580261 - DNA, 25 bp, Homo sapien
ctcatgtatcttcgcccagcatcaa

SEQ ID NO: 1580262 - DNA, 25 bp, Homo sapien
aataattgttaacatgttgccagtt

SEQ ID NO: 1580263 - DNA, 25 bp, Homo sapien
cttcgcccagcatcaataattgtta

SEQ ID NO: 1580264 - DNA, 25 bp, Homo sapien
tagtttgatgacatctcatgtatct

SEQ ID NO: 1580265 - DNA, 25 bp, Homo sapien
aaacggaactactgatcagggtcca

SEQ ID NO: 1580266 - DNA, 25 bp, Homo sapien
ggtgtaagaaccgagaataggtaca

SEQ ID NO: 1580267 - DNA, 25 bp, Homo sapien
tgtaagaaccgagaataggtacaaa

SEQ ID NO: 1580268 - DNA, 25 bp, Homo sapien
gggcaaaaaacggaactactgatca

SEQ ID NO: 1580269 - DNA, 25 bp, Homo sapien
ccgcatggacagaagcttggacacc

SEQ ID NO: 1580270 - DNA, 25 bp, Homo sapien
tcacttttgagaagggacacccacc

SEQ ID NO: 1580271 - DNA, 25 bp, Homo sapien
gatttgtgacatggccccaagggca

SEQ ID NO: 1580272 - DNA, 25 bp, Homo sapien
tgacaagacctgatacgagtgatgg

SEQ ID NO: 1580273 - DNA, 25 bp, Homo sapien
atctctgcagacctccgggagagcc

SEQ ID NO: 1580274 - DNA, 25 bp, Homo sapien
tcgcaacctcaaaggtgagccttgc

SEQ ID NO: 1580275 - DNA, 25 bp, Homo sapien
gctgacctgcgtgctgggatcacat

SEQ ID NO: 1580276 - DNA, 25 bp, Homo sapien
ctaatgatgggattctttaccaaac

SEQ ID NO: 1580277 - DNA, 25 bp, Homo sapien
tatttcctgcgtaaaccgggcgctc

SEQ ID NO: 1580278 - DNA, 25 bp, Homo sapien
gttagaccacttctgagaactggac

SEQ ID NO: 1580279 - DNA, 25 bp, Homo sapien
caggcgcttggacccggcccaagat

SEQ ID NO: 1580280 - DNA, 25 bp, Homo sapien
caagatttgactccggttctcaccc

SEQ ID NO: 1580281 - DNA, 25 bp, Homo sapien
ctgtcttccgcaggggagaagccgc

SEQ ID NO: 1580282 - DNA, 25 bp, Homo sapien
tgtgctggcgatccttctctctacg

SEQ ID NO: 1580283 - DNA, 25 bp, Homo sapien
cgtgtgctggcgatccttctctcta

SEQ ID NO: 1580284 - DNA, 25 bp, Homo sapien
ttgcgttcgcggcccgccctgtctt

SEQ ID NO: 1580285 - DNA, 25 bp, Homo sapien
tccagacaggctgggttccttgcag

SEQ ID NO: 1580286 - DNA, 25 bp, Homo sapien
agggagcaatctctcatcggagagt

SEQ ID NO: 1580287 - DNA, 25 bp, Homo sapien
tatgagtgcagccactgtcgcaaga

SEQ ID NO: 1580288 - DNA, 25 bp, Homo sapien
gctcccggaaaaactacaccaagca

SEQ ID NO: 1580289 - DNA, 25 bp, Homo sapien
gcaatctctcatcggagagttaaac

SEQ ID NO: 1580290 - DNA, 25 bp, Homo sapien
gactgcatactgtctggatcccgcc

SEQ ID NO: 1580291 - DNA, 25 bp, Homo sapien
aggcagcccccagtactcagctggg

SEQ ID NO: 1580292 - DNA, 25 bp, Homo sapien
ctttcacttgggtgcccctgggcca

SEQ ID NO: 1580293 - DNA, 25 bp, Homo sapien
actgagacccctgtccagcccgact

SEQ ID NO: 1580294 - DNA, 25 bp, Homo sapien
agtggtagcttgcttgcacctcctg

SEQ ID NO: 1580295 - DNA, 25 bp, Homo sapien
cgttgtagtagaaggtgccaaggcc

SEQ ID NO: 1580296 - DNA, 25 bp, Homo sapien
aaactggccagaacacgttgggcac

SEQ ID NO: 1580297 - DNA, 25 bp, Homo sapien
cagggaccgagacctacttcagctc

SEQ ID NO: 1580298 - DNA, 25 bp, Homo sapien
gattctcagcatgacacctgtcctg

SEQ ID NO: 1580299 - DNA, 25 bp, Homo sapien
gctccacgcacttctagggctaagg

SEQ ID NO: 1580300 - DNA, 25 bp, Homo sapien
ctcattcaggttgtgggcggaatct

SEQ ID NO: 1580301 - DNA, 25 bp, Homo sapien
tggactaagctgctatctggaggct

SEQ ID NO: 1580302 - DNA, 25 bp, Homo sapien
gtttcagtggcccatcaaggtccat

SEQ ID NO: 1580303 - DNA, 25 bp, Homo sapien
gggtttcagtggcccatcaaggtcc

SEQ ID NO: 1580304 - DNA, 25 bp, Homo sapien
cttggggtttcagtggcccatcaag

SEQ ID NO: 1580305 - DNA, 25 bp, Homo sapien
tggggtttcagtggcccatcaaggt

SEQ ID NO: 1580306 - DNA, 25 bp, Homo sapien
agaccacacagaagcgggccgctgt

SEQ ID NO: 1580307 - DNA, 25 bp, Homo sapien
cgccagtggggtatgcgaaccttta

SEQ ID NO: 1580308 - DNA, 25 bp, Homo sapien
gcgaacctttatagagtgtgattcc

SEQ ID NO: 1580309 - DNA, 25 bp, Homo sapien
tgccgcaattgaatccgccagtggg

SEQ ID NO: 1580310 - DNA, 25 bp, Homo sapien
cacgcgccaactcctagtccttcca

SEQ ID NO: 1580311 - DNA, 25 bp, Homo sapien
agtacgcacgcgccaactcctagtc

SEQ ID NO: 1580312 - DNA, 25 bp, Homo sapien
acgcacgcgccaactcctagtcctt

SEQ ID NO: 1580313 - DNA, 25 bp, Homo sapien
gtacgcacgcgccaactcctagtcc

SEQ ID NO: 1580314 - DNA, 25 bp, Homo sapien
ccgctcgcagaaagagccgaggccg

SEQ ID NO: 1580315 - DNA, 25 bp, Homo sapien
gctgctacggcacggccaactgctg

SEQ ID NO: 1580316 - DNA, 25 bp, Homo sapien
acagaaataactggcgccgacgccg

SEQ ID NO: 1580317 - DNA, 25 bp, Homo sapien
gcgcacgcgcattgggcgcctcacg

SEQ ID NO: 1580318 - DNA, 25 bp, Homo sapien
gccagcggagccctcgcccgggccc

SEQ ID NO: 1580319 - DNA, 25 bp, Homo sapien
aggctgcggccgaaggggcggtgga

SEQ ID NO: 1580320 - DNA, 25 bp, Homo sapien
gaaggggcggtggagcgcttttcgc

SEQ ID NO: 1580321 - DNA, 25 bp, Homo sapien
tggagcgcttttcgccgccagcgga

SEQ ID NO: 1580322 - DNA, 25 bp, Homo sapien
ggtcgcaggcgctctctgcacacgc

SEQ ID NO: 1580323 - DNA, 25 bp, Homo sapien
gccctaagcaggcactacaggccga

SEQ ID NO: 1580324 - DNA, 25 bp, Homo sapien
ggccgcgggccctaagcaggcacta

SEQ ID NO: 1580325 - DNA, 25 bp, Homo sapien
gctccctctcgggtcgcaggcgctc

SEQ ID NO: 1580326 - DNA, 25 bp, Homo sapien
tgccgtcgcccgccgccccgccgtc

SEQ ID NO: 1580327 - DNA, 25 bp, Homo sapien
cagaaagtatttcccgtgccctgtc

SEQ ID NO: 1580328 - DNA, 25 bp, Homo sapien
accattatcccgcagcgaaccagcc

SEQ ID NO: 1580329 - DNA, 25 bp, Homo sapien
ctttagtcagatgtcccatctcagc

SEQ ID NO: 1580330 - DNA, 25 bp, Homo sapien
tacaagttcccacccaggttatggc

SEQ ID NO: 1580331 - DNA, 25 bp, Homo sapien
tcagatgtcccatctcagcggccag

SEQ ID NO: 1580332 - DNA, 25 bp, Homo sapien
cttcgagaagcagggatgtgggaga

SEQ ID NO: 1580333 - DNA, 25 bp, Homo sapien
aaataattctccacgatgtctttgg

SEQ ID NO: 1580334 - DNA, 25 bp, Homo sapien
tgctgccactatcacgcatgaaata

SEQ ID NO: 1580335 - DNA, 25 bp, Homo sapien
tgttgcttgcacacgggacagtcca

SEQ ID NO: 1580336 - DNA, 25 bp, Homo sapien
catcctgggcgtcggtggcagcctt

SEQ ID NO: 1580337 - DNA, 25 bp, Homo sapien
ctccgagcactccacacagtagctg

SEQ ID NO: 1580338 - DNA, 25 bp, Homo sapien
ttggtgtacttcacccgctggtgcg

SEQ ID NO: 1580339 - DNA, 25 bp, Homo sapien
tcacacagaggctccgagcactcca

SEQ ID NO: 1580340 - DNA, 25 bp, Homo sapien
ggtgcgcctctacacaggtctcaca

SEQ ID NO: 1580341 - DNA, 25 bp, Homo sapien
ctttgcctgggacgtctggaatgta

SEQ ID NO: 1580342 - DNA, 25 bp, Homo sapien
tgcagcccctgcgtatccctcctgg

SEQ ID NO: 1580343 - DNA, 25 bp, Homo sapien
cgtctggaatgtaggacaccctgca

SEQ ID NO: 1580344 - DNA, 25 bp, Homo sapien
accttcccgctatcttccaccaatg

SEQ ID NO: 1580345 - DNA, 25 bp, Homo sapien
ggagtgggaatcataaggctggacc

SEQ ID NO: 1580346 - DNA, 25 bp, Homo sapien
acaggcctgcaagcccaactccttg

SEQ ID NO: 1580347 - DNA, 25 bp, Homo sapien
agaatcctctgccccaacatagctg

SEQ ID NO: 1580348 - DNA, 25 bp, Homo sapien
gtgacactgggccatttattgggaa

SEQ ID NO: 1580349 - DNA, 25 bp, Homo sapien
gggttcatgcttgtgtacgttgcaa

SEQ ID NO: 1580350 - DNA, 25 bp, Homo sapien
gagtatcacagctctcacaaaacag

SEQ ID NO: 1580351 - DNA, 25 bp, Homo sapien
aatagacagtacgttcaccatcccg

SEQ ID NO: 1580352 - DNA, 25 bp, Homo sapien
cagtctcggcaggtgagagtatcac

SEQ ID NO: 1580353 - DNA, 25 bp, Homo sapien
catgtttgtccccaaggcgcttcac

SEQ ID NO: 1580354 - DNA, 25 bp, Homo sapien
aggagcttgcgctggttcctcactg

SEQ ID NO: 1580355 - DNA, 25 bp, Homo sapien
gagctgcgaacctccttggtgctct

SEQ ID NO: 1580356 - DNA, 25 bp, Homo sapien
gctcttctgcaatgttgcatgtttg

SEQ ID NO: 1580357 - DNA, 25 bp, Homo sapien
cacggccccgcttattcagctcctt

SEQ ID NO: 1580358 - DNA, 25 bp, Homo sapien
tgcacacgcttctgtacgtcagaca

SEQ ID NO: 1580359 - DNA, 25 bp, Homo sapien
tgacatccacttgcacacgcttctg

SEQ ID NO: 1580360 - DNA, 25 bp, Homo sapien
ctgtacgtcagacacctggcggatt

SEQ ID NO: 1580361 - DNA, 25 bp, Homo sapien
tggatcttggtcatggtccagtgct

SEQ ID NO: 1580362 - DNA, 25 bp, Homo sapien
caaaagggctgtgttgttgtcactc

SEQ ID NO: 1580363 - DNA, 25 bp, Homo sapien
tcatggtccagtgctgccgctccag

SEQ ID NO: 1580364 - DNA, 25 bp, Homo sapien
caagaggcaaagcgcagaatgtgct

SEQ ID NO: 1580365 - DNA, 25 bp, Homo sapien
tcggcactcttggtccaggcattga

SEQ ID NO: 1580366 - DNA, 25 bp, Homo sapien
ggctccacgggatccacaatcatct

SEQ ID NO: 1580367 - DNA, 25 bp, Homo sapien
acaatcatcttgagggcccggtgca

SEQ ID NO: 1580368 - DNA, 25 bp, Homo sapien
tccaggcattgaggtcccactgaaa

SEQ ID NO: 1580369 - DNA, 25 bp, Homo sapien
gggccatgggtgcagggcctgttga

SEQ ID NO: 1580370 - DNA, 25 bp, Homo sapien
tgcagggcctgttgagttagtgcca

SEQ ID NO: 1580371 - DNA, 25 bp, Homo sapien
tgagttagtgccaggacgctctgcc

SEQ ID NO: 1580372 - DNA, 25 bp, Homo sapien
gcctgttgagttagtgccaggacgc

SEQ ID NO: 1580373 - DNA, 25 bp, Homo sapien
aaagccatagccttcctgcacctcc

SEQ ID NO: 1580374 - DNA, 25 bp, Homo sapien
ctgacccaaagccatagccttcctg

SEQ ID NO: 1580375 - DNA, 25 bp, Homo sapien
acccaaagccatagccttcctgcac

SEQ ID NO: 1580376 - DNA, 25 bp, Homo sapien
ccatagccttcctgcacctccatgg

SEQ ID NO: 1580377 - DNA, 25 bp, Homo sapien
ccacccactaggcagacccactcac

SEQ ID NO: 1580378 - DNA, 25 bp, Homo sapien
caggttggggtagaaacagcactgg

SEQ ID NO: 1580379 - DNA, 25 bp, Homo sapien
cttccccacccactaggcagaccca

SEQ ID NO: 1580380 - DNA, 25 bp, Homo sapien
aaaatggagaaagaagactggcagg

SEQ ID NO: 1580381 - DNA, 25 bp, Homo sapien
cgtttcacacctgacacatggggct

SEQ ID NO: 1580382 - DNA, 25 bp, Homo sapien
tcctgcaggcgcagtccctggctgg

SEQ ID NO: 1580383 - DNA, 25 bp, Homo sapien
caataaggttgtagtcctcagtggt

SEQ ID NO: 1580384 - DNA, 25 bp, Homo sapien
gcggcagcgccacgttcaataacaa

SEQ ID NO: 1580385 - DNA, 25 bp, Homo sapien
aggcgttcaaggctcactcgtggca

SEQ ID NO: 1580386 - DNA, 25 bp, Homo sapien
tggcactgtcatccagggttcccgg

SEQ ID NO: 1580387 - DNA, 25 bp, Homo sapien
agccataagcacaggtttggtctca

SEQ ID NO: 1580388 - DNA, 25 bp, Homo sapien
cagacacggcaaatggtggcactgt

SEQ ID NO: 1580389 - DNA, 25 bp, Homo sapien
ggttgcacataaccagatcgcctgg

SEQ ID NO: 1580390 - DNA, 25 bp, Homo sapien
gctggtgagagcttggccaccacgc

SEQ ID NO: 1580391 - DNA, 25 bp, Homo sapien
gctctgggcagcacctataaagcct

SEQ ID NO: 1580392 - DNA, 25 bp, Homo sapien
tctctgggcaaccccacctaagtaa

SEQ ID NO: 1580393 - DNA, 25 bp, Homo sapien
gcagcacctataaagcctctctggg

SEQ ID NO: 1580394 - DNA, 25 bp, Homo sapien
tgggcagcacctataaagcctctct

SEQ ID NO: 1580395 - DNA, 25 bp, Homo sapien
gagtcggtagccagctgatgcaggg

SEQ ID NO: 1580396 - DNA, 25 bp, Homo sapien
gagaaggtggagtcggtagccagct

SEQ ID NO: 1580397 - DNA, 25 bp, Homo sapien
gggccagcagtacacgctcacattt

SEQ ID NO: 1580398 - DNA, 25 bp, Homo sapien
cagggttcgtgacagaatagggcca

SEQ ID NO: 1580399 - DNA, 25 bp, Homo sapien
atgcacaggttgagggcgagaccca

SEQ ID NO: 1580400 - DNA, 25 bp, Homo sapien
ttcccctttcccatcctaggactca

SEQ ID NO: 1580401 - DNA, 25 bp, Homo sapien
tatacatgcacaggttgagggcgag

SEQ ID NO: 1580402 - DNA, 25 bp, Homo sapien
acatatacatgcacaggttgagggc

SEQ ID NO: 1580403 - DNA, 25 bp, Homo sapien
gggtcagatccagggtgccaccggg

SEQ ID NO: 1580404 - DNA, 25 bp, Homo sapien
gaggcgggcacggatcagggtcaga

SEQ ID NO: 1580405 - DNA, 25 bp, Homo sapien
ggcgggcacggatcagggtcagatc

SEQ ID NO: 1580406 - DNA, 25 bp, Homo sapien
ctggaggcgggcacggatcagggtc

SEQ ID NO: 1580407 - DNA, 25 bp, Homo sapien
agctgtagggaggtgacaacttctc

SEQ ID NO: 1580408 - DNA, 25 bp, Homo sapien
ttaacttgttgaattgcttgaacat

SEQ ID NO: 1580409 - DNA, 25 bp, Homo sapien
ttgcttgaacatgcggcccacatcc

SEQ ID NO: 1580410 - DNA, 25 bp, Homo sapien
gggagctgtagggaggtgacaactt

SEQ ID NO: 1580411 - DNA, 25 bp, Homo sapien
gtggatgaatgggtcctagttcttt

SEQ ID NO: 1580412 - DNA, 25 bp, Homo sapien
agtggatgaatgggtcctagttctt

SEQ ID NO: 1580413 - DNA, 25 bp, Homo sapien
aaggcctcgttcatgcgcgtctcga

SEQ ID NO: 1580414 - DNA, 25 bp, Homo sapien
catgcgcgtctcgaagaagcgctgc

SEQ ID NO: 1580415 - DNA, 25 bp, Homo sapien
cagcagagaacttggtgtcaccgaa

SEQ ID NO: 1580416 - DNA, 25 bp, Homo sapien
ggtgtcaccgaaggcctcgttcatg

SEQ ID NO: 1580417 - DNA, 25 bp, Homo sapien
tgggagtcaggccaccaggggagtg

SEQ ID NO: 1580418 - DNA, 25 bp, Homo sapien
caggacagagaacagagccaggctg

SEQ ID NO: 1580419 - DNA, 25 bp, Homo sapien
gggatggggtgacaggacagagaac

SEQ ID NO: 1580420 - DNA, 25 bp, Homo sapien
ggacagagaacagagccaggctggg

SEQ ID NO: 1580421 - DNA, 25 bp, Homo sapien
agtaaaaaccatatcgtgaggaact

SEQ ID NO: 1580422 - DNA, 25 bp, Homo sapien
aaaccatatcgtgaggaactggggg

SEQ ID NO: 1580423 - DNA, 25 bp, Homo sapien
gtaaaaaccatatcgtgaggaactg

SEQ ID NO: 1580424 - DNA, 25 bp, Homo sapien
aaaaaccatatcgtgaggaactggg

SEQ ID NO: 1580425 - DNA, 25 bp, Homo sapien
tggtgaagtttttattaaatccaca

SEQ ID NO: 1580426 - DNA, 25 bp, Homo sapien
ggaccacagtcccccaaccagccaa

SEQ ID NO: 1580427 - DNA, 25 bp, Homo sapien
accacagtcccccaaccagccaacg

SEQ ID NO: 1580428 - DNA, 25 bp, Homo sapien
caggaccacagtcccccaaccagcc

SEQ ID NO: 1580429 - DNA, 25 bp, Homo sapien
ccaggaccacagtcccccaaccagc

SEQ ID NO: 1580430 - DNA, 25 bp, Homo sapien
gcgatgggaaatgaattggcttgtc

SEQ ID NO: 1580431 - DNA, 25 bp, Homo sapien
cccactcagcgatgggaaatgaatt

SEQ ID NO: 1580432 - DNA, 25 bp, Homo sapien
tgctgggtgcttgttcagcccccac

SEQ ID NO: 1580433 - DNA, 25 bp, Homo sapien
gaaatgaattggcttgtctagcccc

SEQ ID NO: 1580434 - DNA, 25 bp, Homo sapien
tctagtctcactcagggtcttgccg

SEQ ID NO: 1580435 - DNA, 25 bp, Homo sapien
gacagggaaggtactcgacctcgca

SEQ ID NO: 1580436 - DNA, 25 bp, Homo sapien
gatctttgggtttgcgatgggacag

SEQ ID NO: 1580437 - DNA, 25 bp, Homo sapien
gcaccctctgggtaacgcatctagt

SEQ ID NO: 1580438 - DNA, 25 bp, Homo sapien
gatcattcccatcgctagagctgaa

SEQ ID NO: 1580439 - DNA, 25 bp, Homo sapien
tcagcatactgcaggcttcagggca

SEQ ID NO: 1580440 - DNA, 25 bp, Homo sapien
agatggaaccccagccagtctgaga

SEQ ID NO: 1580441 - DNA, 25 bp, Homo sapien
tcaggagtagattcagcagcaaacc

SEQ ID NO: 1580442 - DNA, 25 bp, Homo sapien
cctggaagagcatcggagagtgcac

SEQ ID NO: 1580443 - DNA, 25 bp, Homo sapien
caagtcctttggctgcgtcgagtgc

SEQ ID NO: 1580444 - DNA, 25 bp, Homo sapien
gaaaagccctaccactgcggtgagt

SEQ ID NO: 1580445 - DNA, 25 bp, Homo sapien
tcaagctcacgcgtcatcagaggac

SEQ ID NO: 1580446 - DNA, 25 bp, Homo sapien
ccttgtgtatgcagggttcgcgctg

SEQ ID NO: 1580447 - DNA, 25 bp, Homo sapien
ggcaaggtgttcagccaacgcagca

SEQ ID NO: 1580448 - DNA, 25 bp, Homo sapien
tgtccccagggatgaagtgggtccc

SEQ ID NO: 1580449 - DNA, 25 bp, Homo sapien
gatagaatccctacccctgcatttg

SEQ ID NO: 1580450 - DNA, 25 bp, Homo sapien
tacataggaacacttgggtccctgc

SEQ ID NO: 1580451 - DNA, 25 bp, Homo sapien
tccaacttaagtacacagcagcaag

SEQ ID NO: 1580452 - DNA, 25 bp, Homo sapien
catctttgggtagctacacagaacc

SEQ ID NO: 1580453 - DNA, 25 bp, Homo sapien
taggtcacttagtacaaggaggaac

SEQ ID NO: 1580454 - DNA, 25 bp, Homo sapien
gcttgagtatgagtggatgctgcaa

SEQ ID NO: 1580455 - DNA, 25 bp, Homo sapien
cctagttgttggcttatatgcaaga

SEQ ID NO: 1580456 - DNA, 25 bp, Homo sapien
gatgctgcaaacagatccatagggc

SEQ ID NO: 1580457 - DNA, 25 bp, Homo sapien
ggcaccacaaatctggctgacagct

SEQ ID NO: 1580458 - DNA, 25 bp, Homo sapien
agtcctggtatcctggatggcctcc

SEQ ID NO: 1580459 - DNA, 25 bp, Homo sapien
cctgggcttgcatcctgctggtcag

SEQ ID NO: 1580460 - DNA, 25 bp, Homo sapien
tgctggtcaggcatcaggacaggta

SEQ ID NO: 1580461 - DNA, 25 bp, Homo sapien
ctctcccagtcctggtatcctggat

SEQ ID NO: 1580462 - DNA, 25 bp, Homo sapien
cctcctaggactatgcaggaatcac

SEQ ID NO: 1580463 - DNA, 25 bp, Homo sapien
taggactatgcaggaatcaccactg

SEQ ID NO: 1580464 - DNA, 25 bp, Homo sapien
gacacctcctaggactatgcaggaa

SEQ ID NO: 1580465 - DNA, 25 bp, Homo sapien
ccaagacacctcctaggactatgca

SEQ ID NO: 1580466 - DNA, 25 bp, Homo sapien
caaggtaagaggatcatctgcttga

SEQ ID NO: 1580467 - DNA, 25 bp, Homo sapien
gtcaaggtaagaggatcatctgctt

SEQ ID NO: 1580468 - DNA, 25 bp, Homo sapien
ttcgggaggtcaaggtaagaggatc

SEQ ID NO: 1580469 - DNA, 25 bp, Homo sapien
gaggtcaaggtaagaggatcatctg

SEQ ID NO: 1580470 - DNA, 25 bp, Homo sapien
aaacgcagattccttcctaaagccg

SEQ ID NO: 1580471 - DNA, 25 bp, Homo sapien
cgcagattccttcctaaagccgcag

SEQ ID NO: 1580472 - DNA, 25 bp, Homo sapien
tcataaacgcagattccttcctaaa

SEQ ID NO: 1580473 - DNA, 25 bp, Homo sapien
ccttcataaacgcagattccttcct

SEQ ID NO: 1580474 - DNA, 25 bp, Homo sapien
catcttggctatgacccaagtctct

SEQ ID NO: 1580475 - DNA, 25 bp, Homo sapien
gatgaggcggccctcgaaatcgatg

SEQ ID NO: 1580476 - DNA, 25 bp, Homo sapien
ttcaggttgacttggcaccttgaag

SEQ ID NO: 1580477 - DNA, 25 bp, Homo sapien
gaaatcgatgccacccacgggggaa

SEQ ID NO: 1580478 - DNA, 25 bp, Homo sapien
ctggacttctgggaagtgtatttcg

SEQ ID NO: 1580479 - DNA, 25 bp, Homo sapien
gacttctgggaagtgtatttcggga

SEQ ID NO: 1580480 - DNA, 25 bp, Homo sapien
gaagttgccgcctggacttctggga

SEQ ID NO: 1580481 - DNA, 25 bp, Homo sapien
cctggagcggaagttgccgcctgga

SEQ ID NO: 1580482 - DNA, 25 bp, Homo sapien
tcttaaccgggagggctatcgtgtg

SEQ ID NO: 1580483 - DNA, 25 bp, Homo sapien
aagtcgaagactgcgcgtgctcagg

SEQ ID NO: 1580484 - DNA, 25 bp, Homo sapien
ggagcatcctgggagacgtagtcca

SEQ ID NO: 1580485 - DNA, 25 bp, Homo sapien
gaacgaatccgggcagtccttgcgg

SEQ ID NO: 1580486 - DNA, 25 bp, Homo sapien
tatgacctgatcattgcgaccaccg

SEQ ID NO: 1580487 - DNA, 25 bp, Homo sapien
gaagaagcggccaggagtatgacct

SEQ ID NO: 1580488 - DNA, 25 bp, Homo sapien
catgccgacgcacggattcgaggcg

SEQ ID NO: 1580489 - DNA, 25 bp, Homo sapien
gagaggcttgcgcatgccgacgcac

SEQ ID NO: 1580490 - DNA, 25 bp, Homo sapien
ggaaaacgtggtggggggcatgcgc

SEQ ID NO: 1580491 - DNA, 25 bp, Homo sapien
tctggtaggcggtgctgccgtctgt

SEQ ID NO: 1580492 - DNA, 25 bp, Homo sapien
tcaggaaggcccgtagagaagtgag

SEQ ID NO: 1580493 - DNA, 25 bp, Homo sapien
gggcatgcgcgatctggtaggcggt

SEQ ID NO: 1580494 - DNA, 25 bp, Homo sapien
ccgacggagttctaatgacggccgt

SEQ ID NO: 1580495 - DNA, 25 bp, Homo sapien
gggcaccgacggagttctaatgacg

SEQ ID NO: 1580496 - DNA, 25 bp, Homo sapien
ctaatgacggccgtgattggtgcag

SEQ ID NO: 1580497 - DNA, 25 bp, Homo sapien
catggagacgcggtggggcaccgac

SEQ ID NO: 1580498 - DNA, 25 bp, Homo sapien
tacatctgccggaaagcatcgggcc

SEQ ID NO: 1580499 - DNA, 25 bp, Homo sapien
cacgaagggcctgctgactacatct

SEQ ID NO: 1580500 - DNA, 25 bp, Homo sapien
gatgtcgagtcgtgtccccaggtta

SEQ ID NO: 1580501 - DNA, 25 bp, Homo sapien
tgatcacagaggaacgtcatcgcgc

SEQ ID NO: 1580502 - DNA, 25 bp, Homo sapien
gctacaaagcgatacactggacaga

SEQ ID NO: 1580503 - DNA, 25 bp, Homo sapien
tatttaccgtactgagggaagcagc

SEQ ID NO: 1580504 - DNA, 25 bp, Homo sapien
tcagccctcttataacttggacccg

SEQ ID NO: 1580505 - DNA, 25 bp, Homo sapien
gcaacctatcaacctgtacagggta

SEQ ID NO: 1580506 - DNA, 25 bp, Homo sapien
gccgagcccagggtccatctcggcc

SEQ ID NO: 1580507 - DNA, 25 bp, Homo sapien
tgcagttttccggaggacgccgagc

SEQ ID NO: 1580508 - DNA, 25 bp, Homo sapien
cgccccgcctcacagtgcagttttc

SEQ ID NO: 1580509 - DNA, 25 bp, Homo sapien
gttgcctggcgacggccgggcaggg

SEQ ID NO: 1580510 - DNA, 25 bp, Homo sapien
cttcgggtcgcagtgcgagccgtct

SEQ ID NO: 1580511 - DNA, 25 bp, Homo sapien
tgcgagccgtctgctttagctgggc

SEQ ID NO: 1580512 - DNA, 25 bp, Homo sapien
ggtcgcagtgcgagccgtctgcttt

SEQ ID NO: 1580513 - DNA, 25 bp, Homo sapien
gcagtgcgagccgtctgctttagct

SEQ ID NO: 1580514 - DNA, 25 bp, Homo sapien
tgcagctcctgccccgaagccgggg

SEQ ID NO: 1580515 - DNA, 25 bp, Homo sapien
gggccccagcgcggccgatcaacct

SEQ ID NO: 1580516 - DNA, 25 bp, Homo sapien
tgcggacacagtggcctcatatccc

SEQ ID NO: 1580517 - DNA, 25 bp, Homo sapien
acacagtggcctcatatcccagttc

SEQ ID NO: 1580518 - DNA, 25 bp, Homo sapien
taccgtcccgtgtagcgggtctaca

SEQ ID NO: 1580519 - DNA, 25 bp, Homo sapien
aggagggacccagactcagatcagc

SEQ ID NO: 1580520 - DNA, 25 bp, Homo sapien
agatctgggccaaagaactcctcga

SEQ ID NO: 1580521 - DNA, 25 bp, Homo sapien
tcagatcagcacctgcgcagtatgg

SEQ ID NO: 1580522 - DNA, 25 bp, Homo sapien
gtcttcaacatctgggtgaagtcct

SEQ ID NO: 1580523 - DNA, 25 bp, Homo sapien
agtcttcaacatctgggtgaagtcc

SEQ ID NO: 1580524 - DNA, 25 bp, Homo sapien
agcgggagactgtccgcgccgcttc

SEQ ID NO: 1580525 - DNA, 25 bp, Homo sapien
gggtgcttgtgttcctgctactgag

SEQ ID NO: 1580526 - DNA, 25 bp, Homo sapien
ttgttgccactaaggccccagccat

SEQ ID NO: 1580527 - DNA, 25 bp, Homo sapien
tactgagcccgctgatctcagcact

SEQ ID NO: 1580528 - DNA, 25 bp, Homo sapien
gatgcctcagtaatcgcgagcgttc

SEQ ID NO: 1580529 - DNA, 25 bp, Homo sapien
tcagtaatcgcgagcgttcagcggc

SEQ ID NO: 1580530 - DNA, 25 bp, Homo sapien
gtaatcgcgagcgttcagcggcctc

SEQ ID NO: 1580531 - DNA, 25 bp, Homo sapien
cgcgagcgttcagcggcctcttcag

SEQ ID NO: 1580532 - DNA, 25 bp, Homo sapien
ctgcggccacgcgtcaacttggtgg

SEQ ID NO: 1580533 - DNA, 25 bp, Homo sapien
gcgccttcccgattctactgagctt

SEQ ID NO: 1580534 - DNA, 25 bp, Homo sapien
tgttgtcacgaatggtggccaaggt

SEQ ID NO: 1580535 - DNA, 25 bp, Homo sapien
gagcttcacctgtaggttgatggcc

SEQ ID NO: 1580536 - DNA, 25 bp, Homo sapien
aggggcatgttgcgctggctctggt

SEQ ID NO: 1580537 - DNA, 25 bp, Homo sapien
gaggggcatgttgcgctggctctgg

SEQ ID NO: 1580538 - DNA, 25 bp, Homo sapien
ggctctggtcctccatccgcatgct

SEQ ID NO: 1580539 - DNA, 25 bp, Homo sapien
tgtgggctttctcccgaatgagcac

SEQ ID NO: 1580540 - DNA, 25 bp, Homo sapien
tgggctttctcccgaatgagcacca

SEQ ID NO: 1580541 - DNA, 25 bp, Homo sapien
ggctttctcccgaatgagcaccaca

SEQ ID NO: 1580542 - DNA, 25 bp, Homo sapien
gggctttctcccgaatgagcaccac

SEQ ID NO: 1580543 - DNA, 25 bp, Homo sapien
cctcgccctgctcctgcttgcggtt

SEQ ID NO: 1580544 - DNA, 25 bp, Homo sapien
gcgccctcgccctgctcctgcttgc

SEQ ID NO: 1580545 - DNA, 25 bp, Homo sapien
gccctcgccctgctcctgcttgcgg

SEQ ID NO: 1580546 - DNA, 25 bp, Homo sapien
ctaggcgccctcgccctgctcctgc

SEQ ID NO: 1580547 - DNA, 25 bp, Homo sapien
ctcgaccggccccgaagctctcggg

SEQ ID NO: 1580548 - DNA, 25 bp, Homo sapien
ttaaagccagcgaatcaccctcgac

SEQ ID NO: 1580549 - DNA, 25 bp, Homo sapien
cttaaagccagcgaatcaccctcga

SEQ ID NO: 1580550 - DNA, 25 bp, Homo sapien
caccctcgaccggccccgaagctct

SEQ ID NO: 1580551 - DNA, 25 bp, Homo sapien
gctggccccgatgctgctcaagctg

SEQ ID NO: 1580552 - DNA, 25 bp, Homo sapien
gattcttgcacgctgcgttcttggg

SEQ ID NO: 1580553 - DNA, 25 bp, Homo sapien
acgctgcgttcttgggccgctggcc

SEQ ID NO: 1580554 - DNA, 25 bp, Homo sapien
taacgctggattcttgcacgctgcg

SEQ ID NO: 1580555 - DNA, 25 bp, Homo sapien
agtgtgtagccgccctccgggatca

SEQ ID NO: 1580556 - DNA, 25 bp, Homo sapien
ccagagtgtgtagccgccctccggg

SEQ ID NO: 1580557 - DNA, 25 bp, Homo sapien
accagccagagtgtgtagccgccct

SEQ ID NO: 1580558 - DNA, 25 bp, Homo sapien
tgtagccgccctccgggatcaccct

SEQ ID NO: 1580559 - DNA, 25 bp, Homo sapien
atggtgaacaccagccagagcttat

SEQ ID NO: 1580560 - DNA, 25 bp, Homo sapien
tgaacaccagccagagcttattcat

SEQ ID NO: 1580561 - DNA, 25 bp, Homo sapien
gtgaacaccagccagagcttattca

SEQ ID NO: 1580562 - DNA, 25 bp, Homo sapien
tggtgaacaccagccagagcttatt

SEQ ID NO: 1580563 - DNA, 25 bp, Homo sapien
tgcgttgccaccgagcaatagggtc

SEQ ID NO: 1580564 - DNA, 25 bp, Homo sapien
tcaggaggtctccggcggctttgac

SEQ ID NO: 1580565 - DNA, 25 bp, Homo sapien
gggccgactcatcttccacaggaaa

SEQ ID NO: 1580566 - DNA, 25 bp, Homo sapien
cacaggaaaatgaacgtcctctcgg

SEQ ID NO: 1580567 - DNA, 25 bp, Homo sapien
cttgaggaaacacgggttctccgag

SEQ ID NO: 1580568 - DNA, 25 bp, Homo sapien
tctccgaggggtaccccagcagggc

SEQ ID NO: 1580569 - DNA, 25 bp, Homo sapien
caggctttcttgtgcgagcaccaca

SEQ ID NO: 1580570 - DNA, 25 bp, Homo sapien
aggctttcttgtgcgagcaccacac

SEQ ID NO: 1580571 - DNA, 25 bp, Homo sapien
gcagccccttgtagggaaggtcgta

SEQ ID NO: 1580572 - DNA, 25 bp, Homo sapien
aggtcgtactgggtgcagcgccctc

SEQ ID NO: 1580573 - DNA, 25 bp, Homo sapien
tcctggaagaggctcatggttaccc

SEQ ID NO: 1580574 - DNA, 25 bp, Homo sapien
agggtggccgggagtgctgtccagg

SEQ ID NO: 1580575 - DNA, 25 bp, Homo sapien
tctggacacacggaatgctcagtgc

SEQ ID NO: 1580576 - DNA, 25 bp, Homo sapien
tccatcgtgggatctagggccttgt

SEQ ID NO: 1580577 - DNA, 25 bp, Homo sapien
taaggacctgcatcctgcaaggaag

SEQ ID NO: 1580578 - DNA, 25 bp, Homo sapien
aagcttagtgcaaccaatcccctgg

SEQ ID NO: 1580579 - DNA, 25 bp, Homo sapien
tcttgccttgtcacctgcataatcc

SEQ ID NO: 1580580 - DNA, 25 bp, Homo sapien
ttgccttgtcacctgcataatcctc

SEQ ID NO: 1580581 - DNA, 25 bp, Homo sapien
gccttgtcacctgcataatcctcag

SEQ ID NO: 1580582 - DNA, 25 bp, Homo sapien
agtctcttgccttgtcacctgcata

SEQ ID NO: 1580583 - DNA, 25 bp, Homo sapien
cagcacaccgtttattcctaggtta

SEQ ID NO: 1580584 - DNA, 25 bp, Homo sapien
caagcagcccttatgtgagtgtgac

SEQ ID NO: 1580585 - DNA, 25 bp, Homo sapien
tgtcccagacactaacgttaccact

SEQ ID NO: 1580586 - DNA, 25 bp, Homo sapien
tctgctaagtaacggtgctgtccca

SEQ ID NO: 1580587 - DNA, 25 bp, Homo sapien
cagtgggtgccaactgatgtcagtg

SEQ ID NO: 1580588 - DNA, 25 bp, Homo sapien
cctggcacacactaaccagtgggtg

SEQ ID NO: 1580589 - DNA, 25 bp, Homo sapien
tctgattaatatacccaaagatggt

SEQ ID NO: 1580590 - DNA, 25 bp, Homo sapien
cactgctgtgatcagtttactgaaa

SEQ ID NO: 1580591 - DNA, 25 bp, Homo sapien
cagctgtgtttgacacacgcacaca

SEQ ID NO: 1580592 - DNA, 25 bp, Homo sapien
cacataggcatgctcatgtggatac

SEQ ID NO: 1580593 - DNA, 25 bp, Homo sapien
cacacacagataaggcacactcaca

SEQ ID NO: 1580594 - DNA, 25 bp, Homo sapien
tgtggatactcacatatacaaacac

SEQ ID NO: 1580595 - DNA, 25 bp, Homo sapien
gcctcagggataaagccacagtcca

SEQ ID NO: 1580596 - DNA, 25 bp, Homo sapien
tctctgccacgtcaacctctggcat

SEQ ID NO: 1580597 - DNA, 25 bp, Homo sapien
ctctgccacgtcaacctctggcatg

SEQ ID NO: 1580598 - DNA, 25 bp, Homo sapien
tacatcagaatcaaatctgtagatc

SEQ ID NO: 1580599 - DNA, 25 bp, Homo sapien
tttcttacatcagaatcaaatctgt

SEQ ID NO: 1580600 - DNA, 25 bp, Homo sapien
tggtgaccatcatttcttacatcag

SEQ ID NO: 1580601 - DNA, 25 bp, Homo sapien
ggtgaccatcatttcttacatcaga

SEQ ID NO: 1580602 - DNA, 25 bp, Homo sapien
gttgtggggtggtagcagtaaccag

SEQ ID NO: 1580603 - DNA, 25 bp, Homo sapien
tagacattcgtccagtatgctcggg

SEQ ID NO: 1580604 - DNA, 25 bp, Homo sapien
ttagacattcgtccagtatgctcgg

SEQ ID NO: 1580605 - DNA, 25 bp, Homo sapien
tatgctcggggttgtggggtggtag

SEQ ID NO: 1580606 - DNA, 25 bp, Homo sapien
caccagcattgtccccactaaccac

SEQ ID NO: 1580607 - DNA, 25 bp, Homo sapien
gcattgtccccactaaccacaaggc

SEQ ID NO: 1580608 - DNA, 25 bp, Homo sapien
agcattgtccccactaaccacaagg

SEQ ID NO: 1580609 - DNA, 25 bp, Homo sapien
ccagcattgtccccactaaccacaa

SEQ ID NO: 1580610 - DNA, 25 bp, Homo sapien
tacgtgctagaaacagaagcatctg

SEQ ID NO: 1580611 - DNA, 25 bp, Homo sapien
tgtccaatacgatccttcacagtgt

SEQ ID NO: 1580612 - DNA, 25 bp, Homo sapien
aacatcatggatgtaaatgtttgct

SEQ ID NO: 1580613 - DNA, 25 bp, Homo sapien
atctgggtcacagctatattagagc

SEQ ID NO: 1580614 - DNA, 25 bp, Homo sapien
atgcacaaggtcctcttactgttcc

SEQ ID NO: 1580615 - DNA, 25 bp, Homo sapien
tgtagtgtggaaacaaattattcat

SEQ ID NO: 1580616 - DNA, 25 bp, Homo sapien
attcatgcacaaggtcctcttactg

SEQ ID NO: 1580617 - DNA, 25 bp, Homo sapien
attattcatgcacaaggtcctctta

SEQ ID NO: 1580618 - DNA, 25 bp, Homo sapien
tgaagcagaattgtttttactaatc

SEQ ID NO: 1580619 - DNA, 25 bp, Homo sapien
aggaggctgttattgaagtgaagca

SEQ ID NO: 1580620 - DNA, 25 bp, Homo sapien
ggaggaggctgttattgaagtgaag

SEQ ID NO: 1580621 - DNA, 25 bp, Homo sapien
gaattgtttttactaatctgcttat

SEQ ID NO: 1580622 - DNA, 25 bp, Homo sapien
aaaagtcactgggttctctaagaag

SEQ ID NO: 1580623 - DNA, 25 bp, Homo sapien
caaaaagtcactgggttctctaaga

SEQ ID NO: 1580624 - DNA, 25 bp, Homo sapien
aggatttcacagatttaaggtgcaa

SEQ ID NO: 1580625 - DNA, 25 bp, Homo sapien
cagatttaaggtgcaaaaagtcact

SEQ ID NO: 1580626 - DNA, 25 bp, Homo sapien
agatggcagcacgagcccctacaat

SEQ ID NO: 1580627 - DNA, 25 bp, Homo sapien
atggagatggcagcacgagccccta

SEQ ID NO: 1580628 - DNA, 25 bp, Homo sapien
cagcacgagcccctacaataaaagc

SEQ ID NO: 1580629 - DNA, 25 bp, Homo sapien
gaatggagatggcagcacgagcccc

SEQ ID NO: 1580630 - DNA, 25 bp, Homo sapien
ctatttctttttctgccctcttggg

SEQ ID NO: 1580631 - DNA, 25 bp, Homo sapien
atttctttttctgccctcttgggct

SEQ ID NO: 1580632 - DNA, 25 bp, Homo sapien
tatttctttttctgccctcttgggc

SEQ ID NO: 1580633 - DNA, 25 bp, Homo sapien
ctgaccagtcatgagatgtaaataa

SEQ ID NO: 1580634 - DNA, 25 bp, Homo sapien
cacagtttaagctagcccccactga

SEQ ID NO: 1580635 - DNA, 25 bp, Homo sapien
gctgagtaaaattcaagggttgcct

SEQ ID NO: 1580636 - DNA, 25 bp, Homo sapien
gaaacagcgttctattccgcatgct

SEQ ID NO: 1580637 - DNA, 25 bp, Homo sapien
caaagccatggtgacccatcctcgg

SEQ ID NO: 1580638 - DNA, 25 bp, Homo sapien
aagccatggtgacccatcctcgggt

SEQ ID NO: 1580639 - DNA, 25 bp, Homo sapien
gccatggtgacccatcctcgggtgg

SEQ ID NO: 1580640 - DNA, 25 bp, Homo sapien
catggtgacccatcctcgggtgggt

SEQ ID NO: 1580641 - DNA, 25 bp, Homo sapien
tctaagcttaaatagtgttacaagt

SEQ ID NO: 1580642 - DNA, 25 bp, Homo sapien
agtgttacaagttttaatatgccta

SEQ ID NO: 1580643 - DNA, 25 bp, Homo sapien
atagtgttacaagttttaatatgcc

SEQ ID NO: 1580644 - DNA, 25 bp, Homo sapien
aatatatctaagcttaaatagtgtt

SEQ ID NO: 1580645 - DNA, 25 bp, Homo sapien
catgtaatgtaggatgtcaatgttt

SEQ ID NO: 1580646 - DNA, 25 bp, Homo sapien
cacatgtaatgtaggatgtcaatgt

SEQ ID NO: 1580647 - DNA, 25 bp, Homo sapien
acacatgtaatgtaggatgtcaatg

SEQ ID NO: 1580648 - DNA, 25 bp, Homo sapien
acatgtaatgtaggatgtcaatgtt

SEQ ID NO: 1580649 - DNA, 25 bp, Homo sapien
cttactctaactgtaacttacaaca

SEQ ID NO: 1580650 - DNA, 25 bp, Homo sapien
tttagggagtgtacctaagatcagt

SEQ ID NO: 1580651 - DNA, 25 bp, Homo sapien
gacaatgcttacaaagcactgtgga

SEQ ID NO: 1580652 - DNA, 25 bp, Homo sapien
gagtgtacctaagatcagttatgac

SEQ ID NO: 1580653 - DNA, 25 bp, Homo sapien
tggcttcctatttttacagagagac

SEQ ID NO: 1580654 - DNA, 25 bp, Homo sapien
attgtattatgaggaaacacatccc

SEQ ID NO: 1580655 - DNA, 25 bp, Homo sapien
tctgccacactgaggaattgtatta

SEQ ID NO: 1580656 - DNA, 25 bp, Homo sapien
atattttggcccgttaataaacatg

SEQ ID NO: 1580657 - DNA, 25 bp, Homo sapien
ctttaggaggagcaggagcttcctt

SEQ ID NO: 1580658 - DNA, 25 bp, Homo sapien
taggaggagcaggagcttccttcgc

SEQ ID NO: 1580659 - DNA, 25 bp, Homo sapien
tttaggaggagcaggagcttccttc

SEQ ID NO: 1580660 - DNA, 25 bp, Homo sapien
ggaggagcaggagcttccttcgctt

SEQ ID NO: 1580661 - DNA, 25 bp, Homo sapien
tcttcttttttgcgtgtggctgcgg

SEQ ID NO: 1580662 - DNA, 25 bp, Homo sapien
gcggatcttcttttttgcgtgtggc

SEQ ID NO: 1580663 - DNA, 25 bp, Homo sapien
ttttttgcgtgtggctgcggacacc

SEQ ID NO: 1580664 - DNA, 25 bp, Homo sapien
ctttaaagccttcgctttggcttcg

SEQ ID NO: 1580665 - DNA, 25 bp, Homo sapien
tcttctctttatcaggacaaatcag

SEQ ID NO: 1580666 - DNA, 25 bp, Homo sapien
ttgttacaacatcgaaagcatcata

SEQ ID NO: 1580667 - DNA, 25 bp, Homo sapien
ttttgttacaacatcgaaagcatca

SEQ ID NO: 1580668 - DNA, 25 bp, Homo sapien
aattttgttacaacatcgaaagcat

SEQ ID NO: 1580669 - DNA, 25 bp, Homo sapien
aagtgctctattctaacttggcttg

SEQ ID NO: 1580670 - DNA, 25 bp, Homo sapien
gtgctctattctaacttggcttgga

SEQ ID NO: 1580671 - DNA, 25 bp, Homo sapien
agtgctctattctaacttggcttgg

SEQ ID NO: 1580672 - DNA, 25 bp, Homo sapien
tctatctgggctctcaaccaattgg

SEQ ID NO: 1580673 - DNA, 25 bp, Homo sapien
gttattctatctgggctctcaacca

SEQ ID NO: 1580674 - DNA, 25 bp, Homo sapien
cttccttgttattctatctgggctc

SEQ ID NO: 1580675 - DNA, 25 bp, Homo sapien
gctctcaaccaattggatggtgcct

SEQ ID NO: 1580676 - DNA, 25 bp, Homo sapien
cagcataagttgctatttcctttac

SEQ ID NO: 1580677 - DNA, 25 bp, Homo sapien
tgcaggctacaaccctttatagaaa

SEQ ID NO: 1580678 - DNA, 25 bp, Homo sapien
aatctatttggccattccactcagc

SEQ ID NO: 1580679 - DNA, 25 bp, Homo sapien
gtcagaaggacaaccctgcaggcta

SEQ ID NO: 1580680 - DNA, 25 bp, Homo sapien
tccagggggcctctacaaggataat

SEQ ID NO: 1580681 - DNA, 25 bp, Homo sapien
atccagggggcctctacaaggataa

SEQ ID NO: 1580682 - DNA, 25 bp, Homo sapien
agggccatactccacgtgcagagca

SEQ ID NO: 1580683 - DNA, 25 bp, Homo sapien
cacagggccatactccacgtgcaga

SEQ ID NO: 1580684 - DNA, 25 bp, Homo sapien
gcccacagggccatactccacgtgc

SEQ ID NO: 1580685 - DNA, 25 bp, Homo sapien
tcagcactcaccgggcacgagcgag

SEQ ID NO: 1580686 - DNA, 25 bp, Homo sapien
ccttcggtaggtgcataagctctgc

SEQ ID NO: 1580687 - DNA, 25 bp, Homo sapien
gggagaggccttcatctgctgtaaa

SEQ ID NO: 1580688 - DNA, 25 bp, Homo sapien
tcccacaaaggagaagggctgatca

SEQ ID NO: 1580689 - DNA, 25 bp, Homo sapien
taagctctgcattcgaggtccacag

SEQ ID NO: 1580690 - DNA, 25 bp, Homo sapien
gagctcctcagtctaagccaagtgg

SEQ ID NO: 1580691 - DNA, 25 bp, Homo sapien
tccgaaggctgctctactgattggt

SEQ ID NO: 1580692 - DNA, 25 bp, Homo sapien
gattctgggatagacatgaggacca

SEQ ID NO: 1580693 - DNA, 25 bp, Homo sapien
cccacgcggttcatgctagcaatta

SEQ ID NO: 1580694 - DNA, 25 bp, Homo sapien
aatattatcaatagaccttgtcaca

SEQ ID NO: 1580695 - DNA, 25 bp, Homo sapien
ccttgtcacaactgttattgaagaa

SEQ ID NO: 1580696 - DNA, 25 bp, Homo sapien
tatcaatagaccttgtcacaactgt

SEQ ID NO: 1580697 - DNA, 25 bp, Homo sapien
tagaccttgtcacaactgttattga

SEQ ID NO: 1580698 - DNA, 25 bp, Homo sapien
gccctccaatgggaggaaaagcatg

SEQ ID NO: 1580699 - DNA, 25 bp, Homo sapien
gcaggaaaacgtgaaggaataggcc

SEQ ID NO: 1580700 - DNA, 25 bp, Homo sapien
tgcaggaaaacgtgaaggaataggc

SEQ ID NO: 1580701 - DNA, 25 bp, Homo sapien
cagggatggccctctcatcaggtgg

SEQ ID NO: 1580702 - DNA, 25 bp, Homo sapien
gacagggatggccctctcatcaggt

SEQ ID NO: 1580703 - DNA, 25 bp, Homo sapien
ggacagggatggccctctcatcagg

SEQ ID NO: 1580704 - DNA, 25 bp, Homo sapien
acagggatggccctctcatcaggtg

SEQ ID NO: 1580705 - DNA, 25 bp, Homo sapien
gcacggcataggtctgacctgccag

SEQ ID NO: 1580706 - DNA, 25 bp, Homo sapien
cataggtctgacctgccagggagtg

SEQ ID NO: 1580707 - DNA, 25 bp, Homo sapien
gggcacggcataggtctgacctgcc

SEQ ID NO: 1580708 - DNA, 25 bp, Homo sapien
ggcacggcataggtctgacctgcca

SEQ ID NO: 1580709 - DNA, 25 bp, Homo sapien
tgtttttgggcagcagatatcctag

SEQ ID NO: 1580710 - DNA, 25 bp, Homo sapien
gatatcctagaatggactctgacct

SEQ ID NO: 1580711 - DNA, 25 bp, Homo sapien
tatggccccttcttcctatatctgg

SEQ ID NO: 1580712 - DNA, 25 bp, Homo sapien
cctctttcagcagacggtattttct

SEQ ID NO: 1580713 - DNA, 25 bp, Homo sapien
tatgtaaacctaaattagatctgtt

SEQ ID NO: 1580714 - DNA, 25 bp, Homo sapien
tttatgtaaacctaaattagatctg

SEQ ID NO: 1580715 - DNA, 25 bp, Homo sapien
tcatactttgtctttatgtaaacct

SEQ ID NO: 1580716 - DNA, 25 bp, Homo sapien
acctaaattagatctgtttttgata

SEQ ID NO: 1580717 - DNA, 25 bp, Homo sapien
gaacccaacgcggtgtcagagaagt

SEQ ID NO: 1580718 - DNA, 25 bp, Homo sapien
agcacgcctctttgggaccgcggtt

SEQ ID NO: 1580719 - DNA, 25 bp, Homo sapien
agaatgtaaaccgtgcactcccagg

SEQ ID NO: 1580720 - DNA, 25 bp, Homo sapien
tatactttcgaagtgctcggagccc

SEQ ID NO: 1580721 - DNA, 25 bp, Homo sapien
tacagatatcgtatgagtccagttt

SEQ ID NO: 1580722 - DNA, 25 bp, Homo sapien
ccagacgcaaaactacagatatcgt

SEQ ID NO: 1580723 - DNA, 25 bp, Homo sapien
gcaaaactacagatatcgtatgagt

SEQ ID NO: 1580724 - DNA, 25 bp, Homo sapien
aactacagatatcgtatgagtccag

SEQ ID NO: 1580725 - DNA, 25 bp, Homo sapien
gaaggcagttgctgtaaccaactat

SEQ ID NO: 1580726 - DNA, 25 bp, Homo sapien
ggcagttgctgtaaccaactataaa

SEQ ID NO: 1580727 - DNA, 25 bp, Homo sapien
cagttgctgtaaccaactataaaca

SEQ ID NO: 1580728 - DNA, 25 bp, Homo sapien
ttgctgtaaccaactataaacaaat

SEQ ID NO: 1580729 - DNA, 25 bp, Homo sapien
caggcggaggacacgtgggaggttt

SEQ ID NO: 1580730 - DNA, 25 bp, Homo sapien
tatttctcactaagggaacatccaa

SEQ ID NO: 1580731 - DNA, 25 bp, Homo sapien
agagcaggcggaggacacgtgggag

SEQ ID NO: 1580732 - DNA, 25 bp, Homo sapien
ctgggtcttccacaattgccgtgct

SEQ ID NO: 1580733 - DNA, 25 bp, Homo sapien
agacaagaccacaagcagcttggtg

SEQ ID NO: 1580734 - DNA, 25 bp, Homo sapien
ccacaagcagcttggtgcctctgaa

SEQ ID NO: 1580735 - DNA, 25 bp, Homo sapien
gggtaggaatactggattccactga

SEQ ID NO: 1580736 - DNA, 25 bp, Homo sapien
ggaggggagactagagaggtgggta

SEQ ID NO: 1580737 - DNA, 25 bp, Homo sapien
cacgtgctggatgtcacgcttagcc

SEQ ID NO: 1580738 - DNA, 25 bp, Homo sapien
tgctggatgtcacgcttagccctcc

SEQ ID NO: 1580739 - DNA, 25 bp, Homo sapien
ggatgtcacgcttagccctcctgct

SEQ ID NO: 1580740 - DNA, 25 bp, Homo sapien
tgctctgtgccgggttaggcacctg

SEQ ID NO: 1580741 - DNA, 25 bp, Homo sapien
tacgtacataatctcaattctgtga

SEQ ID NO: 1580742 - DNA, 25 bp, Homo sapien
tctcaattctgtgagggcatccgac

SEQ ID NO: 1580743 - DNA, 25 bp, Homo sapien
taatctcaattctgtgagggcatcc

SEQ ID NO: 1580744 - DNA, 25 bp, Homo sapien
ttacgtacataatctcaattctgtg

SEQ ID NO: 1580745 - DNA, 25 bp, Homo sapien
aatattaccatctttcccttttgtg

SEQ ID NO: 1580746 - DNA, 25 bp, Homo sapien
taccatctttcccttttgtgattgg

SEQ ID NO: 1580747 - DNA, 25 bp, Homo sapien
ccatctttcccttttgtgattggag

SEQ ID NO: 1580748 - DNA, 25 bp, Homo sapien
tctttcccttttgtgattggagaaa

SEQ ID NO: 1580749 - DNA, 25 bp, Homo sapien
ggcctgccctctgtagggtgagaaa

SEQ ID NO: 1580750 - DNA, 25 bp, Homo sapien
atgacccactggagaccttacagct

SEQ ID NO: 1580751 - DNA, 25 bp, Homo sapien
ggagaccttacagctctcctgtcac

SEQ ID NO: 1580752 - DNA, 25 bp, Homo sapien
gaagccataaatgcatccttctcgg

SEQ ID NO: 1580753 - DNA, 25 bp, Homo sapien
aacagaggctgtagctagaactgcc

SEQ ID NO: 1580754 - DNA, 25 bp, Homo sapien
tgctattcttccactgtagagaggg

SEQ ID NO: 1580755 - DNA, 25 bp, Homo sapien
tcaatcatgtcaagggctgaacatc

SEQ ID NO: 1580756 - DNA, 25 bp, Homo sapien
gaaaggtcaaacattcaacagaggc

SEQ ID NO: 1580757 - DNA, 25 bp, Homo sapien
gggacccaatatacgacatgttgac

SEQ ID NO: 1580758 - DNA, 25 bp, Homo sapien
tcaattagtaggattacattcaggg

SEQ ID NO: 1580759 - DNA, 25 bp, Homo sapien
tatgatggttactagggttatctgg

SEQ ID NO: 1580760 - DNA, 25 bp, Homo sapien
ttactagggttatctggcagggaga

SEQ ID NO: 1580761 - DNA, 25 bp, Homo sapien
ctgaaaatacctgaacctactgatc

SEQ ID NO: 1580762 - DNA, 25 bp, Homo sapien
tatggagcacatagaaccaactaga

SEQ ID NO: 1580763 - DNA, 25 bp, Homo sapien
gaaacatgcaagaacaccgtagggt

SEQ ID NO: 1580764 - DNA, 25 bp, Homo sapien
caactagaaatgagcctaattggta

SEQ ID NO: 1580765 - DNA, 25 bp, Homo sapien
tacatatgcataaagtacctgttca

SEQ ID NO: 1580766 - DNA, 25 bp, Homo sapien
aactgatggaactaataagttttgc

SEQ ID NO: 1580767 - DNA, 25 bp, Homo sapien
caggatataatgtcaaacaaagatc

SEQ ID NO: 1580768 - DNA, 25 bp, Homo sapien
caaagatctattatgtgcccataag

SEQ ID NO: 1580769 - DNA, 25 bp, Homo sapien
atgagatcttcttgtaaatcactag

SEQ ID NO: 1580770 - DNA, 25 bp, Homo sapien
ttatgagatcttcttgtaaatcact

SEQ ID NO: 1580771 - DNA, 25 bp, Homo sapien
tgagatcttcttgtaaatcactagc

SEQ ID NO: 1580772 - DNA, 25 bp, Homo sapien
agatcttcttgtaaatcactagctg

SEQ ID NO: 1580773 - DNA, 25 bp, Homo sapien
tccatctgtgaattagggtgtggcc

SEQ ID NO: 1580774 - DNA, 25 bp, Homo sapien
aagctgtccaacacattagggccac

SEQ ID NO: 1580775 - DNA, 25 bp, Homo sapien
aatgccagttggaacagggagtgac

SEQ ID NO: 1580776 - DNA, 25 bp, Homo sapien
taggtgtcggtacaggctagtctga

SEQ ID NO: 1580777 - DNA, 25 bp, Homo sapien
ctgtcaaaggccatggctatgagca

SEQ ID NO: 1580778 - DNA, 25 bp, Homo sapien
gtcaaaggccatggctatgagcagc

SEQ ID NO: 1580779 - DNA, 25 bp, Homo sapien
tgtcaaaggccatggctatgagcag

SEQ ID NO: 1580780 - DNA, 25 bp, Homo sapien
caaaggccatggctatgagcagcac

SEQ ID NO: 1580781 - DNA, 25 bp, Homo sapien
tgaagaagatttgagcgatgcagcc

SEQ ID NO: 1580782 - DNA, 25 bp, Homo sapien
gatgaagaagatttgagcgatgcag

SEQ ID NO: 1580783 - DNA, 25 bp, Homo sapien
aagaagatttgagcgatgcagcctc

SEQ ID NO: 1580784 - DNA, 25 bp, Homo sapien
aagatttgagcgatgcagcctccaa

SEQ ID NO: 1580785 - DNA, 25 bp, Homo sapien
agcaggctcctaagtcaatgaagga

SEQ ID NO: 1580786 - DNA, 25 bp, Homo sapien
cacagaggaaaacactaggaggagg

SEQ ID NO: 1580787 - DNA, 25 bp, Homo sapien
taagtgagggtcagtggtcacagaa

SEQ ID NO: 1580788 - DNA, 25 bp, Homo sapien
aatgcttgccacatagagcacagag

SEQ ID NO: 1580789 - DNA, 25 bp, Homo sapien
gccaactgggctgtggctaaaatta

SEQ ID NO: 1580790 - DNA, 25 bp, Homo sapien
ccagccaactgggctgtggctaaaa

SEQ ID NO: 1580791 - DNA, 25 bp, Homo sapien
gaaaatggggaggaaattgtgatta

SEQ ID NO: 1580792 - DNA, 25 bp, Homo sapien
cagccaactgggctgtggctaaaat

SEQ ID NO: 1580793 - DNA, 25 bp, Homo sapien
tctccttcacactgatttgttcttt

SEQ ID NO: 1580794 - DNA, 25 bp, Homo sapien
tcaaaggtcaattatgatctcaatc

SEQ ID NO: 1580795 - DNA, 25 bp, Homo sapien
gacaattctccttcacactgatttg

SEQ ID NO: 1580796 - DNA, 25 bp, Homo sapien
cttttcttgtaattttactgacaat

SEQ ID NO: 1580797 - DNA, 25 bp, Homo sapien
cccagaaatccctaaaagaggtgtg

SEQ ID NO: 1580798 - DNA, 25 bp, Homo sapien
caagataaagtgcatgcctctgaag

SEQ ID NO: 1580799 - DNA, 25 bp, Homo sapien
tgcagcatgtgaaccctccacagag

SEQ ID NO: 1580800 - DNA, 25 bp, Homo sapien
gagcttgagctagtcaagaagccca

SEQ ID NO: 1580801 - DNA, 25 bp, Homo sapien
tcatgatattctttacagtagtctc

SEQ ID NO: 1580802 - DNA, 25 bp, Homo sapien
gtccatttaagcatgttacatagcg

SEQ ID NO: 1580803 - DNA, 25 bp, Homo sapien
tacagtagtctcctaaatgttccct

SEQ ID NO: 1580804 - DNA, 25 bp, Homo sapien
catagcgttgtttgttcttttcatg

SEQ ID NO: 1580805 - DNA, 25 bp, Homo sapien
tcagttgtttagttacaagatagaa

SEQ ID NO: 1580806 - DNA, 25 bp, Homo sapien
aattaacttctaacatacaaagcct

SEQ ID NO: 1580807 - DNA, 25 bp, Homo sapien
accatctacgctaagacataaaatt

SEQ ID NO: 1580808 - DNA, 25 bp, Homo sapien
tggccttgtaagaaagcaaattaac

SEQ ID NO: 1580809 - DNA, 25 bp, Homo sapien
aagaatgttgactgttcacaataca

SEQ ID NO: 1580810 - DNA, 25 bp, Homo sapien
agaatgttgactgttcacaatacaa

SEQ ID NO: 1580811 - DNA, 25 bp, Homo sapien
gccctgctaggagttcacgctttag

SEQ ID NO: 1580812 - DNA, 25 bp, Homo sapien
gatgggatgtagaatgataaggctc

SEQ ID NO: 1580813 - DNA, 25 bp, Homo sapien
aaagacaaactcacaggaagatggg

SEQ ID NO: 1580814 - DNA, 25 bp, Homo sapien
tgagaactgcaattagagttaaatg

SEQ ID NO: 1580815 - DNA, 25 bp, Homo sapien
ttttaagatgctcgaacttgtcctg

SEQ ID NO: 1580816 - DNA, 25 bp, Homo sapien
tgtctttctttgtatcggtgctcag

SEQ ID NO: 1580817 - DNA, 25 bp, Homo sapien
tctttgtatcggtgctcagctgagt

SEQ ID NO: 1580818 - DNA, 25 bp, Homo sapien
cattttaagatgctcgaacttgtcc

SEQ ID NO: 1580819 - DNA, 25 bp, Homo sapien
tcaaacaaacccaaatcatcacagt

SEQ ID NO: 1580820 - DNA, 25 bp, Homo sapien
agcagtgtggctgaacacctaaaag

SEQ ID NO: 1580821 - DNA, 25 bp, Homo sapien
actcaggagtaaacactcagatatg

SEQ ID NO: 1580822 - DNA, 25 bp, Homo sapien
tcatcacagtagagcacgatcttaa

SEQ ID NO: 1580823 - DNA, 25 bp, Homo sapien
tctgcggccgtgttctcctggtact

SEQ ID NO: 1580824 - DNA, 25 bp, Homo sapien
cggccgtgttctcctggtactccat

SEQ ID NO: 1580825 - DNA, 25 bp, Homo sapien
tgcggccgtgttctcctggtactcc

SEQ ID NO: 1580826 - DNA, 25 bp, Homo sapien
ctgcggccgtgttctcctggtactc

SEQ ID NO: 1580827 - DNA, 25 bp, Homo sapien
tgggactgatgactgcatgatcttc

SEQ ID NO: 1580828 - DNA, 25 bp, Homo sapien
gggactgatgactgcatgatcttct

SEQ ID NO: 1580829 - DNA, 25 bp, Homo sapien
gggcctggaatggccgacgtgagga

SEQ ID NO: 1580830 - DNA, 25 bp, Homo sapien
cctgcagatgtcatcggagggccag

SEQ ID NO: 1580831 - DNA, 25 bp, Homo sapien
gcctgcagatgtcatcggagggcca

SEQ ID NO: 1580832 - DNA, 25 bp, Homo sapien
aagacgttgttgggacctggagtcg

SEQ ID NO: 1580833 - DNA, 25 bp, Homo sapien
gcctcccgcattgcccagctgttcc

SEQ ID NO: 1580834 - DNA, 25 bp, Homo sapien
ctcccgcattgcccagctgttcctc

SEQ ID NO: 1580835 - DNA, 25 bp, Homo sapien
tctgcctcccgcattgcccagctgt

SEQ ID NO: 1580836 - DNA, 25 bp, Homo sapien
tcccacctcccagcaaacaagctct

SEQ ID NO: 1580837 - DNA, 25 bp, Homo sapien
gctctcgccccaccgcgacctccca

SEQ ID NO: 1580838 - DNA, 25 bp, Homo sapien
tgcagaccccgctgttgcctcccag

SEQ ID NO: 1580839 - DNA, 25 bp, Homo sapien
aggcccagctctcgccccaccgcga

SEQ ID NO: 1580840 - DNA, 25 bp, Homo sapien
ctcccaggcccaagtccctgcctac

SEQ ID NO: 1580841 - DNA, 25 bp, Homo sapien
gcagcccgagtgcgatcctgttcct

SEQ ID NO: 1580842 - DNA, 25 bp, Homo sapien
agcccgagtgcgatcctgttcctcc

SEQ ID NO: 1580843 - DNA, 25 bp, Homo sapien
gcccgagtgcgatcctgttcctccc

SEQ ID NO: 1580844 - DNA, 25 bp, Homo sapien
cagcccgagtgcgatcctgttcctc

SEQ ID NO: 1580845 - DNA, 25 bp, Homo sapien
cacactgacctctctcagcgtggga

SEQ ID NO: 1580846 - DNA, 25 bp, Homo sapien
acactgacctctctcagcgtgggag

SEQ ID NO: 1580847 - DNA, 25 bp, Homo sapien
tgtgaggcaagggctcacactgacc

SEQ ID NO: 1580848 - DNA, 25 bp, Homo sapien
ccggtgtgaggcaagggctcacact

SEQ ID NO: 1580849 - DNA, 25 bp, Homo sapien
cacactgacctctctcagcgtggga

SEQ ID NO: 1580850 - DNA, 25 bp, Homo sapien
tgtgaggcaagggctcacactgacc

SEQ ID NO: 1580851 - DNA, 25 bp, Homo sapien
acactgacctctctcagcgtgggag

SEQ ID NO: 1580852 - DNA, 25 bp, Homo sapien
ccggtgtgaggcaagggctcacact

SEQ ID NO: 1580853 - DNA, 25 bp, Homo sapien
cggtgtgagacaaggggctcacgct

SEQ ID NO: 1580854 - DNA, 25 bp, Homo sapien
gcaaggggctcgggctgacctctct

SEQ ID NO: 1580855 - DNA, 25 bp, Homo sapien
ggggctcgggctgacctctctcagc

SEQ ID NO: 1580856 - DNA, 25 bp, Homo sapien
cggtgtgaggcaaggggctcgggct

SEQ ID NO: 1580857 - DNA, 25 bp, Homo sapien
acgctgacctctgtccgcgtgggag

SEQ ID NO: 1580858 - DNA, 25 bp, Homo sapien
ctcacgctgacctctgtccgcgtgg

SEQ ID NO: 1580859 - DNA, 25 bp, Homo sapien
ggcaaggggctcacgctgacctctg

SEQ ID NO: 1580860 - DNA, 25 bp, Homo sapien
gggccggtgtgaggcaaggggctca

SEQ ID NO: 1580861 - DNA, 25 bp, Homo sapien
tgagacaaggggctcgggctgacct

SEQ ID NO: 1580862 - DNA, 25 bp, Homo sapien
gccggtgtgagacaaggggctcggg

SEQ ID NO: 1580863 - DNA, 25 bp, Homo sapien
cacactgacctctctcagcatggga

SEQ ID NO: 1580864 - DNA, 25 bp, Homo sapien
agacaaggggctcgggctgacctct

SEQ ID NO: 1580865 - DNA, 25 bp, Homo sapien
agaggcccctgggaggcaagggcgg

SEQ ID NO: 1580866 - DNA, 25 bp, Homo sapien
gcctggagaggcccctgggaggcaa

SEQ ID NO: 1580867 - DNA, 25 bp, Homo sapien
cgggaggccgccgtgggggcaagag

SEQ ID NO: 1580868 - DNA, 25 bp, Homo sapien
ggaggccgccgtgggggcaagagct

SEQ ID NO: 1580869 - DNA, 25 bp, Homo sapien
tctccaaccagtgctagaactgtac

SEQ ID NO: 1580870 - DNA, 25 bp, Homo sapien
tgctagaactgtacaggccaccagg

SEQ ID NO: 1580871 - DNA, 25 bp, Homo sapien
caaccagtgctagaactgtacaggc

SEQ ID NO: 1580872 - DNA, 25 bp, Homo sapien
cagtgctagaactgtacaggccacc

SEQ ID NO: 1580873 - DNA, 25 bp, Homo sapien
cgggagagcccgacttcaggacaac

SEQ ID NO: 1580874 - DNA, 25 bp, Homo sapien
acaacttgggcctgcggcagtcgcc

SEQ ID NO: 1580875 - DNA, 25 bp, Homo sapien
gggagagcccgacttcaggacaact

SEQ ID NO: 1580876 - DNA, 25 bp, Homo sapien
ggcctgcggcagtcgccgggaggcc

SEQ ID NO: 1580877 - DNA, 25 bp, Homo sapien
catcggagggcaggagctcatcctg

SEQ ID NO: 1580878 - DNA, 25 bp, Homo sapien
ctggagatgccatcggagggcagga

SEQ ID NO: 1580879 - DNA, 25 bp, Homo sapien
tgccatcggagggcaggagctcatc

SEQ ID NO: 1580880 - DNA, 25 bp, Homo sapien
gggcaggagctcatcctggagaggc

SEQ ID NO: 1580881 - DNA, 25 bp, Homo sapien
atgggtaggcactgagtccaaagag

SEQ ID NO: 1580882 - DNA, 25 bp, Homo sapien
caaagaggttgttgagaggcaggaa

SEQ ID NO: 1580883 - DNA, 25 bp, Homo sapien
aagaggttgttgagaggcaggaatc

SEQ ID NO: 1580884 - DNA, 25 bp, Homo sapien
aggttgttgagaggcaggaatcggg

SEQ ID NO: 1580885 - DNA, 25 bp, Homo sapien
actggcaggcgggagctgggtgtgt

SEQ ID NO: 1580886 - DNA, 25 bp, Homo sapien
ggagacccaaccaggaagaagagct

SEQ ID NO: 1580887 - DNA, 25 bp, Homo sapien
cggagagaacgcccggagggtgcaa

SEQ ID NO: 1580888 - DNA, 25 bp, Homo sapien
tagatgctgggcgtgaagaatctgc

SEQ ID NO: 1580889 - DNA, 25 bp, Homo sapien
gctgggcctggagaggctgcaaaga

SEQ ID NO: 1580890 - DNA, 25 bp, Homo sapien
agctgggcctggagaggctgcaaag

SEQ ID NO: 1580891 - DNA, 25 bp, Homo sapien
tgggcctggagaggctgcaaagaag

SEQ ID NO: 1580892 - DNA, 25 bp, Homo sapien
ctgggcctggagaggctgcaaagaa

SEQ ID NO: 1580893 - DNA, 25 bp, Homo sapien
tagggtatgggcctaaataggccat

SEQ ID NO: 1580894 - DNA, 25 bp, Homo sapien
agggtatgggcctaaataggccatt

SEQ ID NO: 1580895 - DNA, 25 bp, Homo sapien
gtagggtatgggcctaaataggcca

SEQ ID NO: 1580896 - DNA, 25 bp, Homo sapien
gggtatgggcctaaataggccattg

SEQ ID NO: 1580897 - DNA, 25 bp, Homo sapien
gaattagtgggcgtgtcaagcttgt

SEQ ID NO: 1580898 - DNA, 25 bp, Homo sapien
tgtagaattagtgggcgtgtcaagc

SEQ ID NO: 1580899 - DNA, 25 bp, Homo sapien
taatgtagaattagtgggcgtgtca

SEQ ID NO: 1580900 - DNA, 25 bp, Homo sapien
tagaattagtgggcgtgtcaagctt

SEQ ID NO: 1580901 - DNA, 25 bp, Homo sapien
cctctagaatccacgtatacgaaaa

SEQ ID NO: 1580902 - DNA, 25 bp, Homo sapien
tctagaatccacgtatacgaaaatt

SEQ ID NO: 1580903 - DNA, 25 bp, Homo sapien
agaatccacgtatacgaaaattcca

SEQ ID NO: 1580904 - DNA, 25 bp, Homo sapien
acccctctagaatccacgtatacga

SEQ ID NO: 1580905 - DNA, 25 bp, Homo sapien
gtagggtatgggcctaaataggcca

SEQ ID NO: 1580906 - DNA, 25 bp, Homo sapien
tagggtatgggcctaaataggccat

SEQ ID NO: 1580907 - DNA, 25 bp, Homo sapien
agggtatgggcctaaataggccatt

SEQ ID NO: 1580908 - DNA, 25 bp, Homo sapien
gggtatgggcctaaataggccattg

SEQ ID NO: 1580909 - DNA, 25 bp, Homo sapien
gaatcagtgggcgtgttaagcttgt

SEQ ID NO: 1580910 - DNA, 25 bp, Homo sapien
tgtagaatcagtgggcgtgttaagc

SEQ ID NO: 1580911 - DNA, 25 bp, Homo sapien
ttttcctgcaactggatgttcccac

SEQ ID NO: 1580912 - DNA, 25 bp, Homo sapien
tagaatcagtgggcgtgttaagctt

SEQ ID NO: 1580913 - DNA, 25 bp, Homo sapien
taggtattagactctcataaggaca

SEQ ID NO: 1580914 - DNA, 25 bp, Homo sapien
gtattagactctcataaggacagcg

SEQ ID NO: 1580915 - DNA, 25 bp, Homo sapien
caataggtattagactctcataagg

SEQ ID NO: 1580916 - DNA, 25 bp, Homo sapien
acagatcaataggtattagactctc

SEQ ID NO: 1580917 - DNA, 25 bp, Homo sapien
cgaagcttccctcactccctcactc

SEQ ID NO: 1580918 - DNA, 25 bp, Homo sapien
gacgaagcttccctcactccctcac

SEQ ID NO: 1580919 - DNA, 25 bp, Homo sapien
tcactccctcactcgacaccgctca

SEQ ID NO: 1580920 - DNA, 25 bp, Homo sapien
ttccctcactccctcactcgacacc

SEQ ID NO: 1580921 - DNA, 25 bp, Homo sapien
cttgagtcactgtgaggtcacctac

SEQ ID NO: 1580922 - DNA, 25 bp, Homo sapien
ccatttcccactggcaaagagctca

SEQ ID NO: 1580923 - DNA, 25 bp, Homo sapien
tcactgtgaggtcacctactggaaa

SEQ ID NO: 1580924 - DNA, 25 bp, Homo sapien
cagcactgccccctgggaaaccaaa

SEQ ID NO: 1580925 - DNA, 25 bp, Homo sapien
tcccattgcacctgatgcatgggaa

SEQ ID NO: 1580926 - DNA, 25 bp, Homo sapien
cccattgcacctgatgcatgggaaa

SEQ ID NO: 1580927 - DNA, 25 bp, Homo sapien
tgcacctgatgcatgggaaacataa

SEQ ID NO: 1580928 - DNA, 25 bp, Homo sapien
cctgatgcatgggaaacataatttg

SEQ ID NO: 1580929 - DNA, 25 bp, Homo sapien
gtgcatttgaaaggaaccatcccac

SEQ ID NO: 1580930 - DNA, 25 bp, Homo sapien
gcttgcaggacatatgcttcaactg

SEQ ID NO: 1580931 - DNA, 25 bp, Homo sapien
catttcacaatcaacagtatgtggc

SEQ ID NO: 1580932 - DNA, 25 bp, Homo sapien
gcttgagtcattgtgagcgcacttc

SEQ ID NO: 1580933 - DNA, 25 bp, Homo sapien
atctcctggtacccttcctagcatc

SEQ ID NO: 1580934 - DNA, 25 bp, Homo sapien
tctcctggtacccttcctagcatca

SEQ ID NO: 1580935 - DNA, 25 bp, Homo sapien
ctcctggtacccttcctagcatcaa

SEQ ID NO: 1580936 - DNA, 25 bp, Homo sapien
cagtgtgagacccggtatcaaaaag

SEQ ID NO: 1580937 - DNA, 25 bp, Homo sapien
tgtgagacccggtatcaaaaagaaa

SEQ ID NO: 1580938 - DNA, 25 bp, Homo sapien
gacagtgtgagacccggtatcaaaa

SEQ ID NO: 1580939 - DNA, 25 bp, Homo sapien
caaaaagaaaaaacatatatatata

SEQ ID NO: 1580940 - DNA, 25 bp, Homo sapien
aatacggaactagcagaggccaggc

SEQ ID NO: 1580941 - DNA, 25 bp, Homo sapien
tatcctggagtatctaggagagccc

SEQ ID NO: 1580942 - DNA, 25 bp, Homo sapien
gctatggagtccaactgagcctcat

SEQ ID NO: 1580943 - DNA, 25 bp, Homo sapien
gaagacttctatgactcccgagatt

SEQ ID NO: 1580944 - DNA, 25 bp, Homo sapien
tgaggctataatgagccatgatagg

SEQ ID NO: 1580945 - DNA, 25 bp, Homo sapien
tgggaaggctgacatggtaggattg

SEQ ID NO: 1580946 - DNA, 25 bp, Homo sapien
taatgagccatgataggaccactga

SEQ ID NO: 1580947 - DNA, 25 bp, Homo sapien
gctataatgagccatgataggacca

SEQ ID NO: 1580948 - DNA, 25 bp, Homo sapien
ggatccttcctttggttctcagtag

SEQ ID NO: 1580949 - DNA, 25 bp, Homo sapien
atggctcgagttgagctaaggagaa

SEQ ID NO: 1580950 - DNA, 25 bp, Homo sapien
atttggatccttcctttggttctca

SEQ ID NO: 1580951 - DNA, 25 bp, Homo sapien
cgagttgagctaaggagaatttgga

SEQ ID NO: 1580952 - DNA, 25 bp, Homo sapien
gggagactgaagtgagagaaccact

SEQ ID NO: 1580953 - DNA, 25 bp, Homo sapien
tgtcactgtactgtagcctaagcaa

SEQ ID NO: 1580954 - DNA, 25 bp, Homo sapien
tcatgtcactgtactgtagcctaag

SEQ ID NO: 1580955 - DNA, 25 bp, Homo sapien
tgggagactgaagtgagagaaccac

SEQ ID NO: 1580956 - DNA, 25 bp, Homo sapien
aacatgttgcccagtcagtttctct

SEQ ID NO: 1580957 - DNA, 25 bp, Homo sapien
aataacatgttgcccagtcagtttc

SEQ ID NO: 1580958 - DNA, 25 bp, Homo sapien
tgaataacatgttgcccagtcagtt

SEQ ID NO: 1580959 - DNA, 25 bp, Homo sapien
taacatgttgcccagtcagtttctc

SEQ ID NO: 1580960 - DNA, 25 bp, Homo sapien
tcccagctaataggaggtctttcat

SEQ ID NO: 1580961 - DNA, 25 bp, Homo sapien
atcccagctaataggaggtctttca

SEQ ID NO: 1580962 - DNA, 25 bp, Homo sapien
cccagctaataggaggtctttcatt

SEQ ID NO: 1580963 - DNA, 25 bp, Homo sapien
taagaatgctcatgccctgtgactc

SEQ ID NO: 1580964 - DNA, 25 bp, Homo sapien
taaacaaaaggtcatatgcacaaac

SEQ ID NO: 1580965 - DNA, 25 bp, Homo sapien
tacagacagtgactcattatactgc

SEQ ID NO: 1580966 - DNA, 25 bp, Homo sapien
tttacatcgagggtaataagaatgc

SEQ ID NO: 1580967 - DNA, 25 bp, Homo sapien
taagtatgtgtgctactgaggcaag

SEQ ID NO: 1580968 - DNA, 25 bp, Homo sapien
tcacagaggccgtgccaatctctct

SEQ ID NO: 1580969 - DNA, 25 bp, Homo sapien
acttaagtatgtgtgctactgaggc

SEQ ID NO: 1580970 - DNA, 25 bp, Homo sapien
aagtatgtgtgctactgaggcaagc

SEQ ID NO: 1580971 - DNA, 25 bp, Homo sapien
ggacagtacttgttctcaagggaat

SEQ ID NO: 1580972 - DNA, 25 bp, Homo sapien
tccttctaaagtaacatcctctcaa

SEQ ID NO: 1580973 - DNA, 25 bp, Homo sapien
tctaaagtaacatcctctcaaggcc

SEQ ID NO: 1580974 - DNA, 25 bp, Homo sapien
tcacttgatatcaggagtcgaggcg

SEQ ID NO: 1580975 - DNA, 25 bp, Homo sapien
ttccattagtagaaagccttcctaa

SEQ ID NO: 1580976 - DNA, 25 bp, Homo sapien
gactggaaaaaagggtatgggatca

SEQ ID NO: 1580977 - DNA, 25 bp, Homo sapien
aaaagggtatgggatcatcaccgga

SEQ ID NO: 1580978 - DNA, 25 bp, Homo sapien
gaaaaaagggtatgggatcatcacc

SEQ ID NO: 1580979 - DNA, 25 bp, Homo sapien
aaagggtatgggatcatcaccggac

SEQ ID NO: 1580980 - DNA, 25 bp, Homo sapien
aaacttatgtcctgcatatcatgga

SEQ ID NO: 1580981 - DNA, 25 bp, Homo sapien
tatcatggacatttgatgaatgctt

SEQ ID NO: 1580982 - DNA, 25 bp, Homo sapien
gataatatgcatggttccatactct

SEQ ID NO: 1580983 - DNA, 25 bp, Homo sapien
cagttgactggtgtagacttcaata

SEQ ID NO: 1580984 - DNA, 25 bp, Homo sapien
gatttatcaagttgtaaatcttcac

SEQ ID NO: 1580985 - DNA, 25 bp, Homo sapien
agttgatttatcaagttgtaaatct

SEQ ID NO: 1580986 - DNA, 25 bp, Homo sapien
ttgatttatcaagttgtaaatcttc

SEQ ID NO: 1580987 - DNA, 25 bp, Homo sapien
ctgacaaagttgatttatcaagttg

SEQ ID NO: 1580988 - DNA, 25 bp, Homo sapien
ttacgtagatcagcgatacgatgat

SEQ ID NO: 1580989 - DNA, 25 bp, Homo sapien
gtagatcagcgatacgatgattcca

SEQ ID NO: 1580990 - DNA, 25 bp, Homo sapien
acgtagatcagcgatacgatgattc

SEQ ID NO: 1580991 - DNA, 25 bp, Homo sapien
gtttacgtagatcagcgatacgatg

SEQ ID NO: 1580992 - DNA, 25 bp, Homo sapien
aaagttgcttctcaataacacgtcc

SEQ ID NO: 1580993 - DNA, 25 bp, Homo sapien
caagcaaaagttgcttctcaataac

SEQ ID NO: 1580994 - DNA, 25 bp, Homo sapien
caaaagttgcttctcaataacacgt

SEQ ID NO: 1580995 - DNA, 25 bp, Homo sapien
agcaaaagttgcttctcaataacac

SEQ ID NO: 1580996 - DNA, 25 bp, Homo sapien
gctgcactgcttggtatttgcagag

SEQ ID NO: 1580997 - DNA, 25 bp, Homo sapien
caggctgcactgcttggtatttgca

SEQ ID NO: 1580998 - DNA, 25 bp, Homo sapien
taggcaggctgcactgcttggtatt

SEQ ID NO: 1580999 - DNA, 25 bp, Homo sapien
ggcaggctgcactgcttggtatttg

SEQ ID NO: 1581000 - DNA, 25 bp, Homo sapien
gcgtctcctccactggattgtgagg

SEQ ID NO: 1581001 - DNA, 25 bp, Homo sapien
cacctggcacgaggcgtgcccagag

SEQ ID NO: 1581002 - DNA, 25 bp, Homo sapien
gacagaggcagatgagttgcgtctc

SEQ ID NO: 1581003 - DNA, 25 bp, Homo sapien
agatgcacctggcacgaggcgtgcc

SEQ ID NO: 1581004 - DNA, 25 bp, Homo sapien
gggttctgggactggtggctgtggc

SEQ ID NO: 1581005 - DNA, 25 bp, Homo sapien
ctccctcattttccgttccccagca

SEQ ID NO: 1581006 - DNA, 25 bp, Homo sapien
gttctgggactggtggctgtggcgg

SEQ ID NO: 1581007 - DNA, 25 bp, Homo sapien
attttccgttccccagcattggcgg

SEQ ID NO: 1581008 - DNA, 25 bp, Homo sapien
aaggggctacaagaggcagttggaa

SEQ ID NO: 1581009 - DNA, 25 bp, Homo sapien
ctgggctgtgactacttccaggaag

SEQ ID NO: 1581010 - DNA, 25 bp, Homo sapien
gaaggggctacaagaggcagttgga

SEQ ID NO: 1581011 - DNA, 25 bp, Homo sapien
tgggctgtgactacttccaggaagg

SEQ ID NO: 1581012 - DNA, 25 bp, Homo sapien
ctggatcatgcttatctcagtgtct

SEQ ID NO: 1581013 - DNA, 25 bp, Homo sapien
gcccatccacactggatcatgctta

SEQ ID NO: 1581014 - DNA, 25 bp, Homo sapien
ccacactggatcatgcttatctcag

SEQ ID NO: 1581015 - DNA, 25 bp, Homo sapien
ccatccacactggatcatgcttatc

SEQ ID NO: 1581016 - DNA, 25 bp, Homo sapien
ttcctcaatggcctgcagccacgtc

SEQ ID NO: 1581017 - DNA, 25 bp, Homo sapien
caatggcctgcagccacgtctccca

SEQ ID NO: 1581018 - DNA, 25 bp, Homo sapien
ctcaatggcctgcagccacgtctcc

SEQ ID NO: 1581019 - DNA, 25 bp, Homo sapien
atggcctgcagccacgtctcccagg

SEQ ID NO: 1581020 - DNA, 25 bp, Homo sapien
aatgtcaactgaaatcgaggccacc

SEQ ID NO: 1581021 - DNA, 25 bp, Homo sapien
ccttgatcggaacggatggagattt

SEQ ID NO: 1581022 - DNA, 25 bp, Homo sapien
gactgcaggccgtgatttcggaaat

SEQ ID NO: 1581023 - DNA, 25 bp, Homo sapien
gagtctctgaaaatcagcgttcgga

SEQ ID NO: 1581024 - DNA, 25 bp, Homo sapien
agaatctgtaatttattggccttac

SEQ ID NO: 1581025 - DNA, 25 bp, Homo sapien
cagctccaatgctgtctcttgtcct

SEQ ID NO: 1581026 - DNA, 25 bp, Homo sapien
gctccaatgctgtctcttgtcctca

SEQ ID NO: 1581027 - DNA, 25 bp, Homo sapien
ccaatgctgtctcttgtcctcagaa

SEQ ID NO: 1581028 - DNA, 25 bp, Homo sapien
gaagacagttatggaacctctccct

SEQ ID NO: 1581029 - DNA, 25 bp, Homo sapien
gcataactcatctcagcgaagcctg

SEQ ID NO: 1581030 - DNA, 25 bp, Homo sapien
tgagacgtttgctccaatggaggac

SEQ ID NO: 1581031 - DNA, 25 bp, Homo sapien
gaccgccttgggaagattacctctg

SEQ ID NO: 1581032 - DNA, 25 bp, Homo sapien
agactcctggtccagtgcagggcag

SEQ ID NO: 1581033 - DNA, 25 bp, Homo sapien
ccctcagtgcctaaccagggctgga

SEQ ID NO: 1581034 - DNA, 25 bp, Homo sapien
agggttcctggagcccgtccagagc

SEQ ID NO: 1581035 - DNA, 25 bp, Homo sapien
tcctggagcccgtccagagccctca

SEQ ID NO: 1581036 - DNA, 25 bp, Homo sapien
cagggtcaacgtcagtgacaggctg

SEQ ID NO: 1581037 - DNA, 25 bp, Homo sapien
ggagtgcgggtatccatagtggttg

SEQ ID NO: 1581038 - DNA, 25 bp, Homo sapien
gcctcgcccagggtcaacgtcagtg

SEQ ID NO: 1581039 - DNA, 25 bp, Homo sapien
gttgtggtcagcctcgcccagggtc

SEQ ID NO: 1581040 - DNA, 25 bp, Homo sapien
ccaaggaaggactcagtggggcaag

SEQ ID NO: 1581041 - DNA, 25 bp, Homo sapien
acccagggcagcactagggttggct

SEQ ID NO: 1581042 - DNA, 25 bp, Homo sapien
agtggggcaagggtacccagggcag

SEQ ID NO: 1581043 - DNA, 25 bp, Homo sapien
gatagagttagggttagaagctcac

SEQ ID NO: 1581044 - DNA, 25 bp, Homo sapien
tagcccacgtagagggcaaaggcca

SEQ ID NO: 1581045 - DNA, 25 bp, Homo sapien
gtgggtcgcagcagccgtgcccact

SEQ ID NO: 1581046 - DNA, 25 bp, Homo sapien
cgtgcccacttccaacagagtcgtg

SEQ ID NO: 1581047 - DNA, 25 bp, Homo sapien
gtttgtaatcagacacgcgggtgta

SEQ ID NO: 1581048 - DNA, 25 bp, Homo sapien
gaacaccatgcagtacatcccaaag

SEQ ID NO: 1581049 - DNA, 25 bp, Homo sapien
agagtgtcccgagtagaaagacaac

SEQ ID NO: 1581050 - DNA, 25 bp, Homo sapien
catcccaaaggaagagtgtcccgag

SEQ ID NO: 1581051 - DNA, 25 bp, Homo sapien
aagaacaccatgcagtacatcccaa

SEQ ID NO: 1581052 - DNA, 25 bp, Homo sapien
acaagaatgcactaacttatacaaa

SEQ ID NO: 1581053 - DNA, 25 bp, Homo sapien
aaacatacaagaatgcactaactta

SEQ ID NO: 1581054 - DNA, 25 bp, Homo sapien
catacaagaatgcactaacttatac

SEQ ID NO: 1581055 - DNA, 25 bp, Homo sapien
caaaggtaaatgtactaaacaacag

SEQ ID NO: 1581056 - DNA, 25 bp, Homo sapien
tctgtcagagactggctcacggcag

SEQ ID NO: 1581057 - DNA, 25 bp, Homo sapien
tgaagtccgagcgagaatagagccg

SEQ ID NO: 1581058 - DNA, 25 bp, Homo sapien
cagccacgtagttgttgaagtccga

SEQ ID NO: 1581059 - DNA, 25 bp, Homo sapien
gcacatagaccgagcagttgacccg

SEQ ID NO: 1581060 - DNA, 25 bp, Homo sapien
atgacggtggccgtgatggtgaccc

SEQ ID NO: 1581061 - DNA, 25 bp, Homo sapien
aaggatgacggtggccgtgatggtg

SEQ ID NO: 1581062 - DNA, 25 bp, Homo sapien
acggtggccgtgatggtgaccccag

SEQ ID NO: 1581063 - DNA, 25 bp, Homo sapien
ggtggccgtgatggtgaccccagcc

SEQ ID NO: 1581064 - DNA, 25 bp, Homo sapien
ggtaccggatggagtcatccccgca

SEQ ID NO: 1581065 - DNA, 25 bp, Homo sapien
gcagtaaaatcctcgcttgtacggg

SEQ ID NO: 1581066 - DNA, 25 bp, Homo sapien
accagcgtcaggatagcgaagggca

SEQ ID NO: 1581067 - DNA, 25 bp, Homo sapien
gagcccgtgggtgatggtatctgga

SEQ ID NO: 1581068 - DNA, 25 bp, Homo sapien
tttttcacagcccaaataacactcc

SEQ ID NO: 1581069 - DNA, 25 bp, Homo sapien
gcatcccctcagacaaacacaaact

SEQ ID NO: 1581070 - DNA, 25 bp, Homo sapien
aaacacaaactcctcaggcgctctg

SEQ ID NO: 1581071 - DNA, 25 bp, Homo sapien
ttgaactaactcagcaaacacccac

SEQ ID NO: 1581072 - DNA, 25 bp, Homo sapien
ccttcatcgaccagccacgtggtga

SEQ ID NO: 1581073 - DNA, 25 bp, Homo sapien
ggagccacttatggaaggtgctgcc

SEQ ID NO: 1581074 - DNA, 25 bp, Homo sapien
aggagccacttatggaaggtgctgc

SEQ ID NO: 1581075 - DNA, 25 bp, Homo sapien
ttgccccttcatcgaccagccacgt

SEQ ID NO: 1581076 - DNA, 25 bp, Homo sapien
cgcgcggcccctccgcacagacttc

SEQ ID NO: 1581077 - DNA, 25 bp, Homo sapien
cgcgcgcggcccctccgcacagact

SEQ ID NO: 1581078 - DNA, 25 bp, Homo sapien
cggcccctccgcacagacttcctgc

SEQ ID NO: 1581079 - DNA, 25 bp, Homo sapien
gcgggggatgctggccccggctccc

SEQ ID NO: 1581080 - DNA, 25 bp, Homo sapien
tctggtcctcacgcgaggtccccgc

SEQ ID NO: 1581081 - DNA, 25 bp, Homo sapien
ccccgagcctgggagggcgcgcgca

SEQ ID NO: 1581082 - DNA, 25 bp, Homo sapien
ggaggtctggtcctcacgcgaggtc

SEQ ID NO: 1581083 - DNA, 25 bp, Homo sapien
gaggtctggtcctcacgcgaggtcc

SEQ ID NO: 1581084 - DNA, 25 bp, Homo sapien
agcacgtcgagcagcacgaagaccc

SEQ ID NO: 1581085 - DNA, 25 bp, Homo sapien
cagcacgtcgagcagcacgaagacc

SEQ ID NO: 1581086 - DNA, 25 bp, Homo sapien
gcacagcacgtcgagcagcacgaag

SEQ ID NO: 1581087 - DNA, 25 bp, Homo sapien
cacgtcgagcagcacgaagacccac

SEQ ID NO: 1581088 - DNA, 25 bp, Homo sapien
ccggcccggccgcggagtcacgtgg

SEQ ID NO: 1581089 - DNA, 25 bp, Homo sapien
acgccggtcccagcgcgtcccgtcg

SEQ ID NO: 1581090 - DNA, 25 bp, Homo sapien
ccggtcccagcgcgtcccgtcgcgt

SEQ ID NO: 1581091 - DNA, 25 bp, Homo sapien
gtcccagcgcgtcccgtcgcgtccc

SEQ ID NO: 1581092 - DNA, 25 bp, Homo sapien
caccctcaggtcgaagtagctcagt

SEQ ID NO: 1581093 - DNA, 25 bp, Homo sapien
tagaaccaccttaacatgcgcagag

SEQ ID NO: 1581094 - DNA, 25 bp, Homo sapien
cacacggtccggcaatcaggtttct

SEQ ID NO: 1581095 - DNA, 25 bp, Homo sapien
tgatccacgtaagagctaagcctag

SEQ ID NO: 1581096 - DNA, 25 bp, Homo sapien
ggtccttcaccaatagtccctgagg

SEQ ID NO: 1581097 - DNA, 25 bp, Homo sapien
tattaacaatgcagacctcagccgg

SEQ ID NO: 1581098 - DNA, 25 bp, Homo sapien
agtgagatgacgaggacacctgccg

SEQ ID NO: 1581099 - DNA, 25 bp, Homo sapien
ggctgcggcgctccaatgaaaactc

SEQ ID NO: 1581100 - DNA, 25 bp, Homo sapien
gaaacagaaacgaacgagagggcca

SEQ ID NO: 1581101 - DNA, 25 bp, Homo sapien
cagtcctgacgtgttctgaagcaga

SEQ ID NO: 1581102 - DNA, 25 bp, Homo sapien
cagcgaggtatatggctctgtgccc

SEQ ID NO: 1581103 - DNA, 25 bp, Homo sapien
taagtccagtctgggccgcatacgc

SEQ ID NO: 1581104 - DNA, 25 bp, Homo sapien
gttcacgtccccaatgccgatgagt

SEQ ID NO: 1581105 - DNA, 25 bp, Homo sapien
cagggcgaagtccacggccagcctt

SEQ ID NO: 1581106 - DNA, 25 bp, Homo sapien
cgatgagtccaaactcggtgaccga

SEQ ID NO: 1581107 - DNA, 25 bp, Homo sapien
gtctcctccggatccccgctgaggt

SEQ ID NO: 1581108 - DNA, 25 bp, Homo sapien
gtctggctccggagcagtgacagct

SEQ ID NO: 1581109 - DNA, 25 bp, Homo sapien
tatgaggctgggtcggccagggctg

SEQ ID NO: 1581110 - DNA, 25 bp, Homo sapien
tgacagctggctggtatgaggctgg

SEQ ID NO: 1581111 - DNA, 25 bp, Homo sapien
ctggcgtctggctccggagcagtga

SEQ ID NO: 1581112 - DNA, 25 bp, Homo sapien
ccctggctccgaggacgggagtcca

SEQ ID NO: 1581113 - DNA, 25 bp, Homo sapien
ctccgaggacgggagtccatcagag

SEQ ID NO: 1581114 - DNA, 25 bp, Homo sapien
gggctcatcgagaccaccggccgtg

SEQ ID NO: 1581115 - DNA, 25 bp, Homo sapien
agaggccactccgggctcatcgaga

SEQ ID NO: 1581116 - DNA, 25 bp, Homo sapien
catcccagtcagggtgtcttgctcc

SEQ ID NO: 1581117 - DNA, 25 bp, Homo sapien
gggtgtcttgctccgggcgcggacg

SEQ ID NO: 1581118 - DNA, 25 bp, Homo sapien
ccagtcagggtgtcttgctccgggc

SEQ ID NO: 1581119 - DNA, 25 bp, Homo sapien
acggccggggccatcggggtcgctg

SEQ ID NO: 1581120 - DNA, 25 bp, Homo sapien
gtagcgctccgacttcttccacagg

SEQ ID NO: 1581121 - DNA, 25 bp, Homo sapien
ttccacaggtagtagtactcgacac

SEQ ID NO: 1581122 - DNA, 25 bp, Homo sapien
ccagccgcgtctgctgggcgaagta

SEQ ID NO: 1581123 - DNA, 25 bp, Homo sapien
ggtagtagtactcgacacactcgcc

SEQ ID NO: 1581124 - DNA, 25 bp, Homo sapien
ccaccactctcagataacgcaagac

SEQ ID NO: 1581125 - DNA, 25 bp, Homo sapien
tctcagataacgcaagaccccccga

SEQ ID NO: 1581126 - DNA, 25 bp, Homo sapien
cacgatcccaggacgtcctgggacc

SEQ ID NO: 1581127 - DNA, 25 bp, Homo sapien
ccactctcagataacgcaagacccc

SEQ ID NO: 1581128 - DNA, 25 bp, Homo sapien
ggcctggatcaggtgaaagttcttt

SEQ ID NO: 1581129 - DNA, 25 bp, Homo sapien
tctttccatgcacacggaagccgtg

SEQ ID NO: 1581130 - DNA, 25 bp, Homo sapien
gttggcctggatcaggtgaaagttc

SEQ ID NO: 1581131 - DNA, 25 bp, Homo sapien
tgctcaaagttcctgcactcctctt

SEQ ID NO: 1581132 - DNA, 25 bp, Homo sapien
tcaccttcacgttgaaccgcagcct

SEQ ID NO: 1581133 - DNA, 25 bp, Homo sapien
tcacgttgaaccgcagccttcgcag

SEQ ID NO: 1581134 - DNA, 25 bp, Homo sapien
cctccacattgaagttgcatttcac

SEQ ID NO: 1581135 - DNA, 25 bp, Homo sapien
ctcctccacattgaagttgcatttc

SEQ ID NO: 1581136 - DNA, 25 bp, Homo sapien
atctcgtgccaacgccgcttcaccg

SEQ ID NO: 1581137 - DNA, 25 bp, Homo sapien
ttcaccgccctgtacaggaactcct

SEQ ID NO: 1581138 - DNA, 25 bp, Homo sapien
gagctgaggcccggccatctcgtgc

SEQ ID NO: 1581139 - DNA, 25 bp, Homo sapien
agcagctggtcttcgttctcgtaga

SEQ ID NO: 1581140 - DNA, 25 bp, Homo sapien
ggcaagagagggtcgattttgaact

SEQ ID NO: 1581141 - DNA, 25 bp, Homo sapien
gggcaagagagggtcgattttgaac

SEQ ID NO: 1581142 - DNA, 25 bp, Homo sapien
aaggggcaagagagggtcgattttg

SEQ ID NO: 1581143 - DNA, 25 bp, Homo sapien
tcaaaggggcaagagagggtcgatt

SEQ ID NO: 1581144 - DNA, 25 bp, Homo sapien
tcacagtgccggttcaagtgcaggt

SEQ ID NO: 1581145 - DNA, 25 bp, Homo sapien
ttctcacagtgccggttcaagtgca

SEQ ID NO: 1581146 - DNA, 25 bp, Homo sapien
agtgcaggttgctgaggtcagcttg

SEQ ID NO: 1581147 - DNA, 25 bp, Homo sapien
tcttctcacagtgccggttcaagtg

SEQ ID NO: 1581148 - DNA, 25 bp, Homo sapien
cctggggtcgagcagcacgtccctc

SEQ ID NO: 1581149 - DNA, 25 bp, Homo sapien
gccacggccgggatgccaggttggg

SEQ ID NO: 1581150 - DNA, 25 bp, Homo sapien
gccaggttggggacacggcagagcc

SEQ ID NO: 1581151 - DNA, 25 bp, Homo sapien
agccacggccgggatgccaggttgg

SEQ ID NO: 1581152 - DNA, 25 bp, Homo sapien
aggttggggacacggcagagccacg

SEQ ID NO: 1581153 - DNA, 25 bp, Homo sapien
gagtcctcctcggtgtcggaggagg

SEQ ID NO: 1581154 - DNA, 25 bp, Homo sapien
cttacatttgttggcaggaagagag

SEQ ID NO: 1581155 - DNA, 25 bp, Homo sapien
tcctcggtgtcggaggaggcagaag

SEQ ID NO: 1581156 - DNA, 25 bp, Homo sapien
aggaagagagtcctcctcggtgtcg

SEQ ID NO: 1581157 - DNA, 25 bp, Homo sapien
agggctactgacgcttcccgccagg

SEQ ID NO: 1581158 - DNA, 25 bp, Homo sapien
ccccagggctactgacgcttcccgc

SEQ ID NO: 1581159 - DNA, 25 bp, Homo sapien
gctactgacgcttcccgccaggcag

SEQ ID NO: 1581160 - DNA, 25 bp, Homo sapien
ccagggctactgacgcttcccgcca

SEQ ID NO: 1581161 - DNA, 25 bp, Homo sapien
tcttcccctgaaagcaaatccttcg

SEQ ID NO: 1581162 - DNA, 25 bp, Homo sapien
tgaaagcaaatccttcgctatttgt

SEQ ID NO: 1581163 - DNA, 25 bp, Homo sapien
tgaggtcgtcagcagatgattgcgt

SEQ ID NO: 1581164 - DNA, 25 bp, Homo sapien
cagatgattgcgtctcttcctcttc

SEQ ID NO: 1581165 - DNA, 25 bp, Homo sapien
ctgtgagccagttccaggaagggcc

SEQ ID NO: 1581166 - DNA, 25 bp, Homo sapien
cttcagctgtgagccagttccagga

SEQ ID NO: 1581167 - DNA, 25 bp, Homo sapien
cagttccaggaagggccctcactta

SEQ ID NO: 1581168 - DNA, 25 bp, Homo sapien
agccagttccaggaagggccctcac

SEQ ID NO: 1581169 - DNA, 25 bp, Homo sapien
tctcccggtctgaaatggggtctga

SEQ ID NO: 1581170 - DNA, 25 bp, Homo sapien
cgtagccatagagcgcaagcagctc

SEQ ID NO: 1581171 - DNA, 25 bp, Homo sapien
aatggggtctgacgcctcgtagcca

SEQ ID NO: 1581172 - DNA, 25 bp, Homo sapien
cagggtcatgtctgggaggttcggg

SEQ ID NO: 1581173 - DNA, 25 bp, Homo sapien
gcatccggccaatttacatgtcagt

SEQ ID NO: 1581174 - DNA, 25 bp, Homo sapien
tccggccaatttacatgtcagtttt

SEQ ID NO: 1581175 - DNA, 25 bp, Homo sapien
ctgcatccggccaatttacatgtca

SEQ ID NO: 1581176 - DNA, 25 bp, Homo sapien
cggccaatttacatgtcagttttaa

SEQ ID NO: 1581177 - DNA, 25 bp, Homo sapien
ggcttgtctgggcacctcgaggcct

SEQ ID NO: 1581178 - DNA, 25 bp, Homo sapien
tctgcgaggttgaactgatggtctc

SEQ ID NO: 1581179 - DNA, 25 bp, Homo sapien
gtgacaggatctctgcgaggttgaa

SEQ ID NO: 1581180 - DNA, 25 bp, Homo sapien
taacactgtagttctgtgacaggat

SEQ ID NO: 1581181 - DNA, 25 bp, Homo sapien
ctcgaggcaggagaccacgcgagga

SEQ ID NO: 1581182 - DNA, 25 bp, Homo sapien
gaggcaggagaccacgcgaggactc

SEQ ID NO: 1581183 - DNA, 25 bp, Homo sapien
tgctgttgtctgcaagcccggctcc

SEQ ID NO: 1581184 - DNA, 25 bp, Homo sapien
aggcaggagaccacgcgaggactct

SEQ ID NO: 1581185 - DNA, 25 bp, Homo sapien
cctaaaggtcttcgtcctcatcatc

SEQ ID NO: 1581186 - DNA, 25 bp, Homo sapien
atcctaaaggtcttcgtcctcatca

SEQ ID NO: 1581187 - DNA, 25 bp, Homo sapien
tcctaaaggtcttcgtcctcatcat

SEQ ID NO: 1581188 - DNA, 25 bp, Homo sapien
ctaaaggtcttcgtcctcatcatct

SEQ ID NO: 1581189 - DNA, 25 bp, Homo sapien
cattgtaggattaggtgcaggtgtc

SEQ ID NO: 1581190 - DNA, 25 bp, Homo sapien
tagcacaatgtagttgtagcacagg

SEQ ID NO: 1581191 - DNA, 25 bp, Homo sapien
tacagaaatcgtgtaggcgcaggtt

SEQ ID NO: 1581192 - DNA, 25 bp, Homo sapien
caggcacagatgtagttgcaggtac

SEQ ID NO: 1581193 - DNA, 25 bp, Homo sapien
ttctgactctgatggtcccgtggcc

SEQ ID NO: 1581194 - DNA, 25 bp, Homo sapien
caggagcgtcggctggtttgaccgt

SEQ ID NO: 1581195 - DNA, 25 bp, Homo sapien
ccgtggctgtcgttctgactctgat

SEQ ID NO: 1581196 - DNA, 25 bp, Homo sapien
gagcgtcggctggtttgaccgtggc

SEQ ID NO: 1581197 - DNA, 25 bp, Homo sapien
ggctgtcgttccgactccgacggtc

SEQ ID NO: 1581198 - DNA, 25 bp, Homo sapien
ccctcagcaggagcgtcggctggtt

SEQ ID NO: 1581199 - DNA, 25 bp, Homo sapien
tgtggctgtcgttccgactccgacg

SEQ ID NO: 1581200 - DNA, 25 bp, Homo sapien
cccctcagcaggagcgtcggctggt

SEQ ID NO: 1581201 - DNA, 25 bp, Homo sapien
agcgtcggctggtttgactgtggct

SEQ ID NO: 1581202 - DNA, 25 bp, Homo sapien
tggctgtcgttccgactccgacggt

SEQ ID NO: 1581203 - DNA, 25 bp, Homo sapien
tgtggctgtcgttccgactccgacg

SEQ ID NO: 1581204 - DNA, 25 bp, Homo sapien
cccctcagcaggagcgtcggctggt

SEQ ID NO: 1581205 - DNA, 25 bp, Homo sapien
gctcagaataatcacatacacaggg

SEQ ID NO: 1581206 - DNA, 25 bp, Homo sapien
tcagaaggcgctcgagatggtcaat

SEQ ID NO: 1581207 - DNA, 25 bp, Homo sapien
gatggtcaatgaaagtgactcggaa

SEQ ID NO: 1581208 - DNA, 25 bp, Homo sapien
taaacagctggacaagtcgcaggtt

SEQ ID NO: 1581209 - DNA, 25 bp, Homo sapien
tagaggccaggcctgggttgatcac

SEQ ID NO: 1581210 - DNA, 25 bp, Homo sapien
ttagaggccaggcctgggttgatca

SEQ ID NO: 1581211 - DNA, 25 bp, Homo sapien
agaggccaggcctgggttgatcaca

SEQ ID NO: 1581212 - DNA, 25 bp, Homo sapien
gaggccaggcctgggttgatcacac

SEQ ID NO: 1581213 - DNA, 25 bp, Homo sapien
ggtggcaagctcatagaggcgaggg

SEQ ID NO: 1581214 - DNA, 25 bp, Homo sapien
ggcaagctcatagaggcgaggggac

SEQ ID NO: 1581215 - DNA, 25 bp, Homo sapien
tggcaagctcatagaggcgagggga

SEQ ID NO: 1581216 - DNA, 25 bp, Homo sapien
gtggcaagctcatagaggcgagggg

SEQ ID NO: 1581217 - DNA, 25 bp, Homo sapien
tatccctcgttgaggcccttgcgca

SEQ ID NO: 1581218 - DNA, 25 bp, Homo sapien
tcgtatccctcgttgaggcccttgc

SEQ ID NO: 1581219 - DNA, 25 bp, Homo sapien
tgtcgtatccctcgttgaggccctt

SEQ ID NO: 1581220 - DNA, 25 bp, Homo sapien
gcctgtcgtatccctcgttgaggcc

SEQ ID NO: 1581221 - DNA, 25 bp, Homo sapien
gccagggagatgatccgggggctgg

SEQ ID NO: 1581222 - DNA, 25 bp, Homo sapien
cagggagatgatccgggggctggcc

SEQ ID NO: 1581223 - DNA, 25 bp, Homo sapien
ccagggagatgatccgggggctggc

SEQ ID NO: 1581224 - DNA, 25 bp, Homo sapien
gggagatgatccgggggctggccac

SEQ ID NO: 1581225 - DNA, 25 bp, Homo sapien
cacttgtccgactgagctttgggcc

SEQ ID NO: 1581226 - DNA, 25 bp, Homo sapien
tctcggtcaggaacgcacttgtccg

SEQ ID NO: 1581227 - DNA, 25 bp, Homo sapien
acctcccagcgaggatctcggtcag

SEQ ID NO: 1581228 - DNA, 25 bp, Homo sapien
caggaacgcacttgtccgactgagc

SEQ ID NO: 1581229 - DNA, 25 bp, Homo sapien
ttgacaactggaggatccgcgagct

SEQ ID NO: 1581230 - DNA, 25 bp, Homo sapien
catgtggcttgggttttggcacggg

SEQ ID NO: 1581231 - DNA, 25 bp, Homo sapien
aaggaggcggttatggtctgacaca

SEQ ID NO: 1581232 - DNA, 25 bp, Homo sapien
gggactgccatttgggctgccctgg

SEQ ID NO: 1581233 - DNA, 25 bp, Homo sapien
catgggcatgctccagaagttatca

SEQ ID NO: 1581234 - DNA, 25 bp, Homo sapien
tgctccagaagttatcacgaatctt

SEQ ID NO: 1581235 - DNA, 25 bp, Homo sapien
ccagaagttatcacgaatcttcggg

SEQ ID NO: 1581236 - DNA, 25 bp, Homo sapien
ttcggggcggccagttccttcaggc

SEQ ID NO: 1581237 - DNA, 25 bp, Homo sapien
aggaatgggccagacaggagtcgtc

SEQ ID NO: 1581238 - DNA, 25 bp, Homo sapien
agggaggaccgaggaatgggccaga

SEQ ID NO: 1581239 - DNA, 25 bp, Homo sapien
ctgtattccagggaggaccgaggaa

SEQ ID NO: 1581240 - DNA, 25 bp, Homo sapien
tattccagggaggaccgaggaatgg

SEQ ID NO: 1581241 - DNA, 25 bp, Homo sapien
caccattccacagctggcaatgcag

SEQ ID NO: 1581242 - DNA, 25 bp, Homo sapien
ggcgctgtgcaaatccccgttcacg

SEQ ID NO: 1581243 - DNA, 25 bp, Homo sapien
gtgcaaatccccgttcacgggtgcc

SEQ ID NO: 1581244 - DNA, 25 bp, Homo sapien
acagctggcaatgcagttgcacggg

SEQ ID NO: 1581245 - DNA, 25 bp, Homo sapien
gtagaatctcttgggccgagacagt

SEQ ID NO: 1581246 - DNA, 25 bp, Homo sapien
agacagttcctccacgcggcgggac

SEQ ID NO: 1581247 - DNA, 25 bp, Homo sapien
tccaggtagaatctcttgggccgag

SEQ ID NO: 1581248 - DNA, 25 bp, Homo sapien
tctcttgggccgagacagttcctcc

SEQ ID NO: 1581249 - DNA, 25 bp, Homo sapien
ccgctcggtccagtacacagagggc

SEQ ID NO: 1581250 - DNA, 25 bp, Homo sapien
tcaaggaaccgctcggtccagtaca

SEQ ID NO: 1581251 - DNA, 25 bp, Homo sapien
tgtcctcaaggaaccgctcggtcca

SEQ ID NO: 1581252 - DNA, 25 bp, Homo sapien
aggaaccgctcggtccagtacacag

SEQ ID NO: 1581253 - DNA, 25 bp, Homo sapien
cataccccttaccacagcgtccctt

SEQ ID NO: 1581254 - DNA, 25 bp, Homo sapien
ggagatccaggcataccccttacca

SEQ ID NO: 1581255 - DNA, 25 bp, Homo sapien
tcttacatggggagatccaggcata

SEQ ID NO: 1581256 - DNA, 25 bp, Homo sapien
gaagtgcaagctcatcttacatggg

SEQ ID NO: 1581257 - DNA, 25 bp, Homo sapien
tgtctttcaggacttgccagtttat

SEQ ID NO: 1581258 - DNA, 25 bp, Homo sapien
gccagtttatcttgggctctgccag

SEQ ID NO: 1581259 - DNA, 25 bp, Homo sapien
cttccttgctttggtcatggtggtg

SEQ ID NO: 1581260 - DNA, 25 bp, Homo sapien
caggacttgccagtttatcttgggc

SEQ ID NO: 1581261 - DNA, 25 bp, Homo sapien
tcaagcgccttttgtctgcactcac

SEQ ID NO: 1581262 - DNA, 25 bp, Homo sapien
tccacgttgaagttggagctgcttt

SEQ ID NO: 1581263 - DNA, 25 bp, Homo sapien
ccagagaagcgtgggtcttgctcaa

SEQ ID NO: 1581264 - DNA, 25 bp, Homo sapien
gactttggcaccacgaaggcctgga

SEQ ID NO: 1581265 - DNA, 25 bp, Homo sapien
cggcacggaaaccacggtgagaagg

SEQ ID NO: 1581266 - DNA, 25 bp, Homo sapien
cctgtccttgcttgatgcagctgct

SEQ ID NO: 1581267 - DNA, 25 bp, Homo sapien
ggtgaagatgccaaatgccaggata

SEQ ID NO: 1581268 - DNA, 25 bp, Homo sapien
tgttcttgggcggcaaacctccctg

SEQ ID NO: 1581269 - DNA, 25 bp, Homo sapien
caccgcacccaggcaggcccgttcc

SEQ ID NO: 1581270 - DNA, 25 bp, Homo sapien
cccaccgcacccaggcaggcccgtt

SEQ ID NO: 1581271 - DNA, 25 bp, Homo sapien
cgcacccaggcaggcccgttccccg

SEQ ID NO: 1581272 - DNA, 25 bp, Homo sapien
ccaccgcacccaggcaggcccgttc

SEQ ID NO: 1581273 - DNA, 25 bp, Homo sapien
aggactctctccaactcagaaagtg

SEQ ID NO: 1581274 - DNA, 25 bp, Homo sapien
cattgtccaggtcctggcgttcggg

SEQ ID NO: 1581275 - DNA, 25 bp, Homo sapien
aagtgcctctttgggatccagggtc

SEQ ID NO: 1581276 - DNA, 25 bp, Homo sapien
ttcggggtctgtgacccgccggctc

SEQ ID NO: 1581277 - DNA, 25 bp, Homo sapien
gggctggttcccgagtgaccttcgc

SEQ ID NO: 1581278 - DNA, 25 bp, Homo sapien
tgctccctttccgacctgcccgcag

SEQ ID NO: 1581279 - DNA, 25 bp, Homo sapien
tggttcccgagtgaccttcgcctgc

SEQ ID NO: 1581280 - DNA, 25 bp, Homo sapien
gctgggctggttcccgagtgacctt

SEQ ID NO: 1581281 - DNA, 25 bp, Homo sapien
tcactctcccggcacccaaatgtgt

SEQ ID NO: 1581282 - DNA, 25 bp, Homo sapien
agcccccgcggcctcactctcccgg

SEQ ID NO: 1581283 - DNA, 25 bp, Homo sapien
ccccgcggcctcactctcccggcac

SEQ ID NO: 1581284 - DNA, 25 bp, Homo sapien
cggcctcactctcccggcacccaaa

SEQ ID NO: 1581285 - DNA, 25 bp, Homo sapien
ccagggacgaggatgtggacaccgt

SEQ ID NO: 1581286 - DNA, 25 bp, Homo sapien
cgactgttgcgttgggtaactccca

SEQ ID NO: 1581287 - DNA, 25 bp, Homo sapien
caccagtttcacaccaggttccagg

SEQ ID NO: 1581288 - DNA, 25 bp, Homo sapien
gacaccgttggggatcactattcct

SEQ ID NO: 1581289 - DNA, 25 bp, Homo sapien
ccgtggtgattgataagcagatgta

SEQ ID NO: 1581290 - DNA, 25 bp, Homo sapien
cagaatcgtggtgattgataagcag

SEQ ID NO: 1581291 - DNA, 25 bp, Homo sapien
gaaccgtggtgattgataagcagat

SEQ ID NO: 1581292 - DNA, 25 bp, Homo sapien
gcagaatcgtggtgattgataagca

SEQ ID NO: 1581293 - DNA, 25 bp, Homo sapien
tgattgataagcagatgtaggaggt

SEQ ID NO: 1581294 - DNA, 25 bp, Homo sapien
ccgtggtgattgataagcagatgta

SEQ ID NO: 1581295 - DNA, 25 bp, Homo sapien
tcgtggtgattgataagcagatgta

SEQ ID NO: 1581296 - DNA, 25 bp, Homo sapien
gcagaatcgtggtgattgataagca

SEQ ID NO: 1581297 - DNA, 25 bp, Homo sapien
gatgtattaggtgttgctgttgctg

SEQ ID NO: 1581298 - DNA, 25 bp, Homo sapien
tggagcagaaccgtggtgattcata

SEQ ID NO: 1581299 - DNA, 25 bp, Homo sapien
ggtgattcataagcagatgtattag

SEQ ID NO: 1581300 - DNA, 25 bp, Homo sapien
cataagcagatgtattaggtgttgc

SEQ ID NO: 1581301 - DNA, 25 bp, Homo sapien
gcttgtggggacccatccatttctc

SEQ ID NO: 1581302 - DNA, 25 bp, Homo sapien
ctgctcgctcccgtatcccccatga

SEQ ID NO: 1581303 - DNA, 25 bp, Homo sapien
ggccgcggtctggcttgtggggacc

SEQ ID NO: 1581304 - DNA, 25 bp, Homo sapien
tcccgtatcccccatgagctggttc

SEQ ID NO: 1581305 - DNA, 25 bp, Homo sapien
gccaagaccccacggtaatgggaga

SEQ ID NO: 1581306 - DNA, 25 bp, Homo sapien
ctagagcagcgcaggccaagacccc

SEQ ID NO: 1581307 - DNA, 25 bp, Homo sapien
gggtagagcgtggcctccaagacat

SEQ ID NO: 1581308 - DNA, 25 bp, Homo sapien
ccccacggtaatgggagacagaggt

SEQ ID NO: 1581309 - DNA, 25 bp, Homo sapien
tagggtcactgtacaactacagatg

SEQ ID NO: 1581310 - DNA, 25 bp, Homo sapien
ccatgtagcctgagagtagggtcac

SEQ ID NO: 1581311 - DNA, 25 bp, Homo sapien
gtgtagcaacatcctcccactcagt

SEQ ID NO: 1581312 - DNA, 25 bp, Homo sapien
atgccatcaacaaaactccgtgtag

SEQ ID NO: 1581313 - DNA, 25 bp, Homo sapien
aggtgcagggacatcggtggctccc

SEQ ID NO: 1581314 - DNA, 25 bp, Homo sapien
gtgcagggacatcggtggctcccca

SEQ ID NO: 1581315 - DNA, 25 bp, Homo sapien
tgggaacgcggaggtgcagggacat

SEQ ID NO: 1581316 - DNA, 25 bp, Homo sapien
tgtcacagatgggaacgcggaggtg

SEQ ID NO: 1581317 - DNA, 25 bp, Homo sapien
gatgcgcttaatcaacaggccctgc

SEQ ID NO: 1581318 - DNA, 25 bp, Homo sapien
gccctgccctgcgtgtgaccctgga

SEQ ID NO: 1581319 - DNA, 25 bp, Homo sapien
gctctgggaccacgtcactgtacag

SEQ ID NO: 1581320 - DNA, 25 bp, Homo sapien
gaccacgtcactgtacagtagggta

SEQ ID NO: 1581321 - DNA, 25 bp, Homo sapien
cacggtaacggcacacgcagtcaca

SEQ ID NO: 1581322 - DNA, 25 bp, Homo sapien
cagatgagcacggtaacggcacacg

SEQ ID NO: 1581323 - DNA, 25 bp, Homo sapien
tacgcccaacagatgagcacggtaa

SEQ ID NO: 1581324 - DNA, 25 bp, Homo sapien
gtcacatacgcccaacagatgagca

SEQ ID NO: 1581325 - DNA, 25 bp, Homo sapien
tcaaagagtgcaggggggctactaa

SEQ ID NO: 1581326 - DNA, 25 bp, Homo sapien
cagtcaacctcagacactaagatat

SEQ ID NO: 1581327 - DNA, 25 bp, Homo sapien
tcttaaagatttacccacagtcaac

SEQ ID NO: 1581328 - DNA, 25 bp, Homo sapien
cacagctggggagtgtcttaaagat

SEQ ID NO: 1581329 - DNA, 25 bp, Homo sapien
cgggagagagcggagccctgcaaca

SEQ ID NO: 1581330 - DNA, 25 bp, Homo sapien
gagagagcggagccctgcaacacca

SEQ ID NO: 1581331 - DNA, 25 bp, Homo sapien
gggagagagcggagccctgcaacac

SEQ ID NO: 1581332 - DNA, 25 bp, Homo sapien
ggagagagcggagccctgcaacacc

SEQ ID NO: 1581333 - DNA, 25 bp, Homo sapien
taatactccagtcagcatcgggtga

SEQ ID NO: 1581334 - DNA, 25 bp, Homo sapien
tatttacacacgtggcgtcaaagcc

SEQ ID NO: 1581335 - DNA, 25 bp, Homo sapien
ccctggacaagaggaacaatgtgtg

SEQ ID NO: 1581336 - DNA, 25 bp, Homo sapien
gtcaatcactgcgtgtcgctcccag

SEQ ID NO: 1581337 - DNA, 25 bp, Homo sapien
tctcgatctggatcacgtgccgggt

SEQ ID NO: 1581338 - DNA, 25 bp, Homo sapien
gatcctgagggccagtttccggacg

SEQ ID NO: 1581339 - DNA, 25 bp, Homo sapien
tgtcgggcgtcaacacattgctgta

SEQ ID NO: 1581340 - DNA, 25 bp, Homo sapien
cactgtggaacagagactccttgcg

SEQ ID NO: 1581341 - DNA, 25 bp, Homo sapien
cggcaggcaagaggcccggacaggg

SEQ ID NO: 1581342 - DNA, 25 bp, Homo sapien
gcggcaggcaagaggcccggacagg

SEQ ID NO: 1581343 - DNA, 25 bp, Homo sapien
tgcccggggtgatggcccgaggccg

SEQ ID NO: 1581344 - DNA, 25 bp, Homo sapien
ctgcccggggtgatggcccgaggcc

SEQ ID NO: 1581345 - DNA, 25 bp, Homo sapien
cggggtgatggcccgaggccggagg

SEQ ID NO: 1581346 - DNA, 25 bp, Homo sapien
ccggggtgatggcccgaggccggag

SEQ ID NO: 1581347 - DNA, 25 bp, Homo sapien
gcagacacgcaggggtctcggcgcg

SEQ ID NO: 1581348 - DNA, 25 bp, Homo sapien
ggccggagcttcgatgcgggcggcg

SEQ ID NO: 1581349 - DNA, 25 bp, Homo sapien
gcggccggagcttcgatgcgggcgg

SEQ ID NO: 1581350 - DNA, 25 bp, Homo sapien
acgcggccggagcttcgatgcgggc

SEQ ID NO: 1581351 - DNA, 25 bp, Homo sapien
gggacgcggccggagcttcgatgcg

SEQ ID NO: 1581352 - DNA, 25 bp, Homo sapien
tcattcacccgcggcgggaaaccgc

SEQ ID NO: 1581353 - DNA, 25 bp, Homo sapien
ccgcccagccccgccgccgccgccg

SEQ ID NO: 1581354 - DNA, 25 bp, Homo sapien
cagcaaacgttgatgagccctcatt

SEQ ID NO: 1581355 - DNA, 25 bp, Homo sapien
tcatttttgtgctggggcaaccgcg

SEQ ID NO: 1581356 - DNA, 25 bp, Homo sapien
ggcagacaccgaggaattctcccct

SEQ ID NO: 1581357 - DNA, 25 bp, Homo sapien
ccccgaagtctgacaaggaggcaga

SEQ ID NO: 1581358 - DNA, 25 bp, Homo sapien
agctgccatgcagaatacccttggg

SEQ ID NO: 1581359 - DNA, 25 bp, Homo sapien
gccccaccacagactagcagggccc

SEQ ID NO: 1581360 - DNA, 25 bp, Homo sapien
tccagctgccatgcagaataccctt

SEQ ID NO: 1581361 - DNA, 25 bp, Homo sapien
cacagactagcagggcccccgaacc

SEQ ID NO: 1581362 - DNA, 25 bp, Homo sapien
ggcccggatcctgggggtctgtcca

SEQ ID NO: 1581363 - DNA, 25 bp, Homo sapien
caaatgggtgaatagcatcgccacg

SEQ ID NO: 1581364 - DNA, 25 bp, Homo sapien
agtgctctttcagcaggcccgagga

SEQ ID NO: 1581365 - DNA, 25 bp, Homo sapien
cgatggccccgaaacagtgctcttt

SEQ ID NO: 1581366 - DNA, 25 bp, Homo sapien
aatccagagctggtcaatcagggct

SEQ ID NO: 1581367 - DNA, 25 bp, Homo sapien
aacataggcctgaaaagtacctggg

SEQ ID NO: 1581368 - DNA, 25 bp, Homo sapien
catcggtaagtaaacaggagcctct

SEQ ID NO: 1581369 - DNA, 25 bp, Homo sapien
caggatgctgcagattcgggctcaa

SEQ ID NO: 1581370 - DNA, 25 bp, Homo sapien
tctcctggtcaacagaaccttctgc

SEQ ID NO: 1581371 - DNA, 25 bp, Homo sapien
gctgattcccggggatcctggccct

SEQ ID NO: 1581372 - DNA, 25 bp, Homo sapien
ctgattcccggggatcctggccctc

SEQ ID NO: 1581373 - DNA, 25 bp, Homo sapien
ggatggatgactgaaggatgtgtac

SEQ ID NO: 1581374 - DNA, 25 bp, Homo sapien
tggctgggttactgatgggtgtaga

SEQ ID NO: 1581375 - DNA, 25 bp, Homo sapien
tgtgtacatgtggagatggatggat

SEQ ID NO: 1581376 - DNA, 25 bp, Homo sapien
atggatggctgggttactgatgggt

SEQ ID NO: 1581377 - DNA, 25 bp, Homo sapien
ggatggttactgatagatttataga

SEQ ID NO: 1581378 - DNA, 25 bp, Homo sapien
gatttatagatggatgatgcatgat

SEQ ID NO: 1581379 - DNA, 25 bp, Homo sapien
ggatggatggttactgatagattta

SEQ ID NO: 1581380 - DNA, 25 bp, Homo sapien
gatggatggatggttactgatagat

SEQ ID NO: 1581381 - DNA, 25 bp, Homo sapien
gaacatcccatctgggtcgacagct

SEQ ID NO: 1581382 - DNA, 25 bp, Homo sapien
catgccagaggctcatgcggaggaa

SEQ ID NO: 1581383 - DNA, 25 bp, Homo sapien
actgcctcgatatccactgtcttgg

SEQ ID NO: 1581384 - DNA, 25 bp, Homo sapien
ttggtatgaacaccctcactccagg

SEQ ID NO: 1581385 - DNA, 25 bp, Homo sapien
ggcggccacgatgggctgcccgttc

SEQ ID NO: 1581386 - DNA, 25 bp, Homo sapien
cggccacgatgggctgcccgttctg

SEQ ID NO: 1581387 - DNA, 25 bp, Homo sapien
tctcggcggccacgatgggctgccc

SEQ ID NO: 1581388 - DNA, 25 bp, Homo sapien
ccgttctgcaggtggtggtcgatca

SEQ ID NO: 1581389 - DNA, 25 bp, Homo sapien
gctgcatttttgaacgagaccctct

SEQ ID NO: 1581390 - DNA, 25 bp, Homo sapien
ggatgcaaaaccaagagaccctgtg

SEQ ID NO: 1581391 - DNA, 25 bp, Homo sapien
gaaacacacccctgaaatcctggag

SEQ ID NO: 1581392 - DNA, 25 bp, Homo sapien
taccgagcgctggaactggatgcaa

SEQ ID NO: 1581393 - DNA, 25 bp, Homo sapien
tggatgccccgagaccctcccacct

SEQ ID NO: 1581394 - DNA, 25 bp, Homo sapien
agcccctggatgccccgagaccctc

SEQ ID NO: 1581395 - DNA, 25 bp, Homo sapien
gatgccccgagaccctcccacctgt

SEQ ID NO: 1581396 - DNA, 25 bp, Homo sapien
ccctggatgccccgagaccctccca

SEQ ID NO: 1581397 - DNA, 25 bp, Homo sapien
tgcatgccggtgaggacatactgcc

SEQ ID NO: 1581398 - DNA, 25 bp, Homo sapien
ggaagtccccgtcagctcgaagcat

SEQ ID NO: 1581399 - DNA, 25 bp, Homo sapien
cactgagcactcatgcaacttcagg

SEQ ID NO: 1581400 - DNA, 25 bp, Homo sapien
gacgctgtctcgcacaaggaagtcc

SEQ ID NO: 1581401 - DNA, 25 bp, Homo sapien
ctaaatactcaagacgacagccggc

SEQ ID NO: 1581402 - DNA, 25 bp, Homo sapien
tggttcagaccctgcagtgctggag

SEQ ID NO: 1581403 - DNA, 25 bp, Homo sapien
catgtacaaagggtaacagcagctc

SEQ ID NO: 1581404 - DNA, 25 bp, Homo sapien
tcacatgtgtagcaacctggactcc

SEQ ID NO: 1581405 - DNA, 25 bp, Homo sapien
cctgaccctcgctccctggtctccc

SEQ ID NO: 1581406 - DNA, 25 bp, Homo sapien
tccctggtctcccgcccctccagct

SEQ ID NO: 1581407 - DNA, 25 bp, Homo sapien
ggtggactaagcctccctcattgga

SEQ ID NO: 1581408 - DNA, 25 bp, Homo sapien
gctcggccgcattcgctagagagaa

SEQ ID NO: 1581409 - DNA, 25 bp, Homo sapien
catcaggccgggatttccgtaggaa

SEQ ID NO: 1581410 - DNA, 25 bp, Homo sapien
ccaggactcttcgtggaggacggac

SEQ ID NO: 1581411 - DNA, 25 bp, Homo sapien
gcgtccagaccctgggtgttgacat

SEQ ID NO: 1581412 - DNA, 25 bp, Homo sapien
cgggcgtccgcctgcacgtagccgt

SEQ ID NO: 1581413 - DNA, 25 bp, Homo sapien
ctcgggggcgtccagaccctgggtg

SEQ ID NO: 1581414 - DNA, 25 bp, Homo sapien
cagatcctttttggggctgtcctcc

SEQ ID NO: 1581415 - DNA, 25 bp, Homo sapien
agtgtaaagaggggcagggggtcag

SEQ ID NO: 1581416 - DNA, 25 bp, Homo sapien
gagtgtaaagaggggcagggggtca

SEQ ID NO: 1581417 - DNA, 25 bp, Homo sapien
ctggggagtgtaaagaggggcaggg

SEQ ID NO: 1581418 - DNA, 25 bp, Homo sapien
gctatcaacatgacgcacggagggt

SEQ ID NO: 1581419 - DNA, 25 bp, Homo sapien
agaaacgcagttccaagagtccggg

SEQ ID NO: 1581420 - DNA, 25 bp, Homo sapien
gaatccacatgaacgtgaggctgca

SEQ ID NO: 1581421 - DNA, 25 bp, Homo sapien
gaacagcatcgcaggtaaccttggg

SEQ ID NO: 1581422 - DNA, 25 bp, Homo sapien
ggtaacgtgattaaggccggcgctc

SEQ ID NO: 1581423 - DNA, 25 bp, Homo sapien
gctgttaggaaacaggcagccgcag

SEQ ID NO: 1581424 - DNA, 25 bp, Homo sapien
cagcatgcactggagagaagggctc

SEQ ID NO: 1581425 - DNA, 25 bp, Homo sapien
tttctctgaccagctcgagggctct

SEQ ID NO: 1581426 - DNA, 25 bp, Homo sapien
ccggtggaccccacgtcccatggca

SEQ ID NO: 1581427 - DNA, 25 bp, Homo sapien
gctgcaggcatctcttagagaagga

SEQ ID NO: 1581428 - DNA, 25 bp, Homo sapien
gcaggcatctcttagagaaggagat

SEQ ID NO: 1581429 - DNA, 25 bp, Homo sapien
atggcaggctgcaggcatctcttag

SEQ ID NO: 1581430 - DNA, 25 bp, Homo sapien
tggtcgagggccgtgagggcgcagg

SEQ ID NO: 1581431 - DNA, 25 bp, Homo sapien
ccgtgagggcgcagggctgtgtcag

SEQ ID NO: 1581432 - DNA, 25 bp, Homo sapien
gtaattgtgctccaaagagtcctcc

SEQ ID NO: 1581433 - DNA, 25 bp, Homo sapien
ggagtccactagcccgcccagcggc

SEQ ID NO: 1581434 - DNA, 25 bp, Homo sapien
gctgtgcaggtactgcttgaagcgc

SEQ ID NO: 1581435 - DNA, 25 bp, Homo sapien
tcacagcactccaggatgtggcagg

SEQ ID NO: 1581436 - DNA, 25 bp, Homo sapien
cagctcgaaagcttggcccacggtg

SEQ ID NO: 1581437 - DNA, 25 bp, Homo sapien
gcagcgccaccttgggcgggctgtg

SEQ ID NO: 1581438 - DNA, 25 bp, Homo sapien
cgacgtaggccacgtaatccgtcat

SEQ ID NO: 1581439 - DNA, 25 bp, Homo sapien
ggtccttggcgacgtaggccacgta

SEQ ID NO: 1581440 - DNA, 25 bp, Homo sapien
ctctctggttgatggggtccttggc

SEQ ID NO: 1581441 - DNA, 25 bp, Homo sapien
cttggcgacgtaggccacgtaatcc

SEQ ID NO: 1581442 - DNA, 25 bp, Homo sapien
atgagagggtctcgcggccggaggg

SEQ ID NO: 1581443 - DNA, 25 bp, Homo sapien
ggaaggatgagagggtctcgcggcc

SEQ ID NO: 1581444 - DNA, 25 bp, Homo sapien
tgtgggcacagggtacgttaggcgg

SEQ ID NO: 1581445 - DNA, 25 bp, Homo sapien
cagggtacgttaggcgggctctggg

SEQ ID NO: 1581446 - DNA, 25 bp, Homo sapien
gtctccgcctgacgcgaaggagatg

SEQ ID NO: 1581447 - DNA, 25 bp, Homo sapien
tccgcctgacgcgaaggagatggac

SEQ ID NO: 1581448 - DNA, 25 bp, Homo sapien
tgtctccgcctgacgcgaaggagat

SEQ ID NO: 1581449 - DNA, 25 bp, Homo sapien
cgtgtctccgcctgacgcgaaggag

SEQ ID NO: 1581450 - DNA, 25 bp, Homo sapien
tgctcatgccggcaaagcgaaggtt

SEQ ID NO: 1581451 - DNA, 25 bp, Homo sapien
ggagatgctcatgccggcaaagcga

SEQ ID NO: 1581452 - DNA, 25 bp, Homo sapien
tggagatgctcatgccggcaaagcg

SEQ ID NO: 1581453 - DNA, 25 bp, Homo sapien
agatgctcatgccggcaaagcgaag

SEQ ID NO: 1581454 - DNA, 25 bp, Homo sapien
ctcatggagccggttgatggcttcc

SEQ ID NO: 1581455 - DNA, 25 bp, Homo sapien
gcacggcctcatggagccggttgat

SEQ ID NO: 1581456 - DNA, 25 bp, Homo sapien
tttcttccaggatccccggacgcca

SEQ ID NO: 1581457 - DNA, 25 bp, Homo sapien
aggatccccggacgccaggcacggc

SEQ ID NO: 1581458 - DNA, 25 bp, Homo sapien
gtgcgtccttgcatccggcagaggc

SEQ ID NO: 1581459 - DNA, 25 bp, Homo sapien
gggtccgtgtcgagatcctgtctgc

SEQ ID NO: 1581460 - DNA, 25 bp, Homo sapien
aggaaggctcggcatcagatgtggg

SEQ ID NO: 1581461 - DNA, 25 bp, Homo sapien
ctggcctcggcccacaaggaaggct

SEQ ID NO: 1581462 - DNA, 25 bp, Homo sapien
acctgcgtgcgcgtgttaaagtcca

SEQ ID NO: 1581463 - DNA, 25 bp, Homo sapien
ctggtcacctgcgtgcgcgtgttaa

SEQ ID NO: 1581464 - DNA, 25 bp, Homo sapien
tccagggagcgcatagagcggagaa

SEQ ID NO: 1581465 - DNA, 25 bp, Homo sapien
ggagaacctcgatgcagcccatgta

SEQ ID NO: 1581466 - DNA, 25 bp, Homo sapien
tgcttgttcatttaaccgtcttgcc

SEQ ID NO: 1581467 - DNA, 25 bp, Homo sapien
tgccctcgtcggtctctttctgttc

SEQ ID NO: 1581468 - DNA, 25 bp, Homo sapien
gaacaggtgtcagatgccatcggaa

SEQ ID NO: 1581469 - DNA, 25 bp, Homo sapien
accagcaccgaagccgaggagcgtg

SEQ ID NO: 1581470 - DNA, 25 bp, Homo sapien
ctgcttcagtgccgtaaagggtggg

SEQ ID NO: 1581471 - DNA, 25 bp, Homo sapien
agcgtccttccaacgttggcccttg

SEQ ID NO: 1581472 - DNA, 25 bp, Homo sapien
ggccacagcgtccttccaacgttgg

SEQ ID NO: 1581473 - DNA, 25 bp, Homo sapien
gaggcgaaggccacagcgtccttcc

SEQ ID NO: 1581474 - DNA, 25 bp, Homo sapien
gcggctgaaaccctgaactgtgtgg

SEQ ID NO: 1581475 - DNA, 25 bp, Homo sapien
ctgtgtggtccatgggtcccgttgt

SEQ ID NO: 1581476 - DNA, 25 bp, Homo sapien
cttattaacacgtagcccactccgg

SEQ ID NO: 1581477 - DNA, 25 bp, Homo sapien
cccactccggttgtgcggctgaaac

SEQ ID NO: 1581478 - DNA, 25 bp, Homo sapien
gaagtgtcattttgccgaccgtgtc

SEQ ID NO: 1581479 - DNA, 25 bp, Homo sapien
gaccgtgtcccagtttgcgtccatc

SEQ ID NO: 1581480 - DNA, 25 bp, Homo sapien
cagcttaagggacccgcgatgcagg

SEQ ID NO: 1581481 - DNA, 25 bp, Homo sapien
tttgccgaccgtgtcccagtttgcg

SEQ ID NO: 1581482 - DNA, 25 bp, Homo sapien
tggaacacgccggccgtcggcgtta

SEQ ID NO: 1581483 - DNA, 25 bp, Homo sapien
tcccaatggatgtggtgtgaaggaa

SEQ ID NO: 1581484 - DNA, 25 bp, Homo sapien
gtgaaggaagcgcacgcgtcctccg

SEQ ID NO: 1581485 - DNA, 25 bp, Homo sapien
ctgactggtcccaatggatgtggtg

SEQ ID NO: 1581486 - DNA, 25 bp, Homo sapien
agcgggtcttggggaggcggaagcg

SEQ ID NO: 1581487 - DNA, 25 bp, Homo sapien
aggcagacgcatgttccgggggacg

SEQ ID NO: 1581488 - DNA, 25 bp, Homo sapien
gcagacgcatgttccgggggacggg

SEQ ID NO: 1581489 - DNA, 25 bp, Homo sapien
gaggcagacgcatgttccgggggac

SEQ ID NO: 1581490 - DNA, 25 bp, Homo sapien
ggaggcagacgcatgttccggggga

SEQ ID NO: 1581491 - DNA, 25 bp, Homo sapien
ccggttgtactgcgcaggccgagcg

SEQ ID NO: 1581492 - DNA, 25 bp, Homo sapien
ggttgtactgcgcaggccgagcgcg

SEQ ID NO: 1581493 - DNA, 25 bp, Homo sapien
cggttgtactgcgcaggccgagcgc

SEQ ID NO: 1581494 - DNA, 25 bp, Homo sapien
gttgtactgcgcaggccgagcgcgc

SEQ ID NO: 1581495 - DNA, 25 bp, Homo sapien
tctgcctgtctcctaacggcccgct

SEQ ID NO: 1581496 - DNA, 25 bp, Homo sapien
cacacgtgggggagtgaggtttcac

SEQ ID NO: 1581497 - DNA, 25 bp, Homo sapien
tgtgcatctgagtctaaagttcctt

SEQ ID NO: 1581498 - DNA, 25 bp, Homo sapien
aggctttggtgggcccgggcttgag

SEQ ID NO: 1581499 - DNA, 25 bp, Homo sapien
gtgcgggagtggctgatcattttcc

SEQ ID NO: 1581500 - DNA, 25 bp, Homo sapien
gggactatgcacggcgctgtcaccc

SEQ ID NO: 1581501 - DNA, 25 bp, Homo sapien
tctctcagaagacgggggactatgc

SEQ ID NO: 1581502 - DNA, 25 bp, Homo sapien
cagacgccgtaatgactgcagctgt

SEQ ID NO: 1581503 - DNA, 25 bp, Homo sapien
ccgtgcgcgggtttgtggatgaagc

SEQ ID NO: 1581504 - DNA, 25 bp, Homo sapien
gtggatgaagctgcccttccggatc

SEQ ID NO: 1581505 - DNA, 25 bp, Homo sapien
gggtttgtggatgaagctgcccttc

SEQ ID NO: 1581506 - DNA, 25 bp, Homo sapien
tgtagccagccgtgcgcgggtttgt

SEQ ID NO: 1581507 - DNA, 25 bp, Homo sapien
gcgccccgacagcggctgagcgcgg

SEQ ID NO: 1581508 - DNA, 25 bp, Homo sapien
gccccgacagcggctgagcgcgggc

SEQ ID NO: 1581509 - DNA, 25 bp, Homo sapien
cgccccgacagcggctgagcgcggg

SEQ ID NO: 1581510 - DNA, 25 bp, Homo sapien
gcattcggggcagcaacgcgcagaa

SEQ ID NO: 1581511 - DNA, 25 bp, Homo sapien
gcgaacttccactgcggcattcggg

SEQ ID NO: 1581512 - DNA, 25 bp, Homo sapien
gggccgcgaacttccactgcggcat

SEQ ID NO: 1581513 - DNA, 25 bp, Homo sapien
caacgcgcagaaggtggtgggcgcc

SEQ ID NO: 1581514 - DNA, 25 bp, Homo sapien
gggcactggaaggagactcaccctg

SEQ ID NO: 1581515 - DNA, 25 bp, Homo sapien
agctggacgccgagttctgggacac

SEQ ID NO: 1581516 - DNA, 25 bp, Homo sapien
cctggcgtgacctggaagaaactgg

SEQ ID NO: 1581517 - DNA, 25 bp, Homo sapien
tcctagaaggacctggacagttcag

SEQ ID NO: 1581518 - DNA, 25 bp, Homo sapien
gcccgtttcgagtggcggatgccca

SEQ ID NO: 1581519 - DNA, 25 bp, Homo sapien
tggtgctggcccgtttcgagtggcg

SEQ ID NO: 1581520 - DNA, 25 bp, Homo sapien
gtggcggatgcccatagagaacgct

SEQ ID NO: 1581521 - DNA, 25 bp, Homo sapien
ccatagagaacgctggagccctggc

SEQ ID NO: 1581522 - DNA, 25 bp, Homo sapien
gtactggcccgggcctggtatctca

SEQ ID NO: 1581523 - DNA, 25 bp, Homo sapien
gggccgccccagcatggtgaaggca

SEQ ID NO: 1581524 - DNA, 25 bp, Homo sapien
tgcgtccgggctgtcgtactggccc

SEQ ID NO: 1581525 - DNA, 25 bp, Homo sapien
caggcaggcgctggcggtaggtgtt

SEQ ID NO: 1581526 - DNA, 25 bp, Homo sapien
gccccagggcctggcgtcacctccg

SEQ ID NO: 1581527 - DNA, 25 bp, Homo sapien
tgaaagccggcggtgtccgatggcg

SEQ ID NO: 1581528 - DNA, 25 bp, Homo sapien
tccgatggcgcacagggggcacctt

SEQ ID NO: 1581529 - DNA, 25 bp, Homo sapien
ttggtgaagatctgtgagccccaca

SEQ ID NO: 1581530 - DNA, 25 bp, Homo sapien
catggtctgtgtttcaagcctccag

SEQ ID NO: 1581531 - DNA, 25 bp, Homo sapien
cagggccaagcacgccttcattttc

SEQ ID NO: 1581532 - DNA, 25 bp, Homo sapien
ccatcctccatacacatggtctgtg

SEQ ID NO: 1581533 - DNA, 25 bp, Homo sapien
ccagggccaagcacgccttcatttt

SEQ ID NO: 1581534 - DNA, 25 bp, Homo sapien
gctgcggccaaagcgtgtgactttg

SEQ ID NO: 1581535 - DNA, 25 bp, Homo sapien
cagctgcggccaaagcgtgtgactt

SEQ ID NO: 1581536 - DNA, 25 bp, Homo sapien
tccaagaagtagatggggcccgggc

SEQ ID NO: 1581537 - DNA, 25 bp, Homo sapien
tgcagctgcggccaaagcgtgtgac

SEQ ID NO: 1581538 - DNA, 25 bp, Homo sapien
tccggacgagcgagtaggcgggact

SEQ ID NO: 1581539 - DNA, 25 bp, Homo sapien
tgcagtcgtggttgatgaagcccac

SEQ ID NO: 1581540 - DNA, 25 bp, Homo sapien
gactggccaccctggtgcagtcgtg

SEQ ID NO: 1581541 - DNA, 25 bp, Homo sapien
cggtggacggcaggacatacaagcc

SEQ ID NO: 1581542 - DNA, 25 bp, Homo sapien
ccagattccccgaagaaggagccct

SEQ ID NO: 1581543 - DNA, 25 bp, Homo sapien
gattccccgaagaaggagccctgga

SEQ ID NO: 1581544 - DNA, 25 bp, Homo sapien
ctgggcccagattccccgaagaagg

SEQ ID NO: 1581545 - DNA, 25 bp, Homo sapien
tgggcccagattccccgaagaagga

SEQ ID NO: 1581546 - DNA, 25 bp, Homo sapien
acccggctggcaaagcacgcagctt

SEQ ID NO: 1581547 - DNA, 25 bp, Homo sapien
gacagacacatactcggggctcacg

SEQ ID NO: 1581548 - DNA, 25 bp, Homo sapien
cacgcagcttccgttggacagacac

SEQ ID NO: 1581549 - DNA, 25 bp, Homo sapien
acccatcctgccggaaggaaaactg

SEQ ID NO: 1581550 - DNA, 25 bp, Homo sapien
gccggtctccggaatctggccctcc

SEQ ID NO: 1581551 - DNA, 25 bp, Homo sapien
ggccgtcccacaggacttcctcagg

SEQ ID NO: 1581552 - DNA, 25 bp, Homo sapien
gtctccggaatctggccctccgtca

SEQ ID NO: 1581553 - DNA, 25 bp, Homo sapien
ggtggccgtcccacaggacttcctc

SEQ ID NO: 1581554 - DNA, 25 bp, Homo sapien
gggctgtggccagccgtggggtgga

SEQ ID NO: 1581555 - DNA, 25 bp, Homo sapien
gtgctaccttctgagccgcagcagc

SEQ ID NO: 1581556 - DNA, 25 bp, Homo sapien
ggtgctaccttctgagccgcagcag

SEQ ID NO: 1581557 - DNA, 25 bp, Homo sapien
tggtgctaccttctgagccgcagca

SEQ ID NO: 1581558 - DNA, 25 bp, Homo sapien
tgctaccttctgagccgcagcagct

SEQ ID NO: 1581559 - DNA, 25 bp, Homo sapien
gccacaggcccaggcaccgtcccca

SEQ ID NO: 1581560 - DNA, 25 bp, Homo sapien
ggcggccacaggcccaggcaccgtc

SEQ ID NO: 1581561 - DNA, 25 bp, Homo sapien
cggccacaggcccaggcaccgtccc

SEQ ID NO: 1581562 - DNA, 25 bp, Homo sapien
ctggcggccacaggcccaggcaccg

SEQ ID NO: 1581563 - DNA, 25 bp, Homo sapien
tcagcagagtgcgtctcccgggagc

SEQ ID NO: 1581564 - DNA, 25 bp, Homo sapien
gggatcgagtgtcggccaggcggct

SEQ ID NO: 1581565 - DNA, 25 bp, Homo sapien
cacagccgcacagacggcctcttgt

SEQ ID NO: 1581566 - DNA, 25 bp, Homo sapien
ctggtcggccggacactggcctgga

SEQ ID NO: 1581567 - DNA, 25 bp, Homo sapien
tgatgacatctagtgactggagaac

SEQ ID NO: 1581568 - DNA, 25 bp, Homo sapien
tggagcgtccacagttccagtgctc

SEQ ID NO: 1581569 - DNA, 25 bp, Homo sapien
tcacctgtgacctgtggacgctgtg

SEQ ID NO: 1581570 - DNA, 25 bp, Homo sapien
tagagcctaggactgatcccttggg

SEQ ID NO: 1581571 - DNA, 25 bp, Homo sapien
gtgggaacgcgaggagaccgaccac

SEQ ID NO: 1581572 - DNA, 25 bp, Homo sapien
cagaatccgcgtcccggaacctgga

SEQ ID NO: 1581573 - DNA, 25 bp, Homo sapien
gacaccaggctccttgggcgaacgg

SEQ ID NO: 1581574 - DNA, 25 bp, Homo sapien
agcgcgctggaagactcgcggcggg

SEQ ID NO: 1581575 - DNA, 25 bp, Homo sapien
gaaggccgtcacagtagaatcactt

SEQ ID NO: 1581576 - DNA, 25 bp, Homo sapien
acttggaaggccgtcacagtagaat

SEQ ID NO: 1581577 - DNA, 25 bp, Homo sapien
ggaaggccgtcacagtagaatcact

SEQ ID NO: 1581578 - DNA, 25 bp, Homo sapien
ttggaaggccgtcacagtagaatca

SEQ ID NO: 1581579 - DNA, 25 bp, Homo sapien
ggtccaagcccttcatccagatgcg

SEQ ID NO: 1581580 - DNA, 25 bp, Homo sapien
catccagatgcggagattgaggcag

SEQ ID NO: 1581581 - DNA, 25 bp, Homo sapien
gggttctggtccaagcccttcatcc

SEQ ID NO: 1581582 - DNA, 25 bp, Homo sapien
cccttcatccagatgcggagattga

SEQ ID NO: 1581583 - DNA, 25 bp, Homo sapien
ccttaatcaagatggccgccttggg

SEQ ID NO: 1581584 - DNA, 25 bp, Homo sapien
cacagtggaatatggcggtgcttcc

SEQ ID NO: 1581585 - DNA, 25 bp, Homo sapien
cactacttcgagaacatgggcctgc

SEQ ID NO: 1581586 - DNA, 25 bp, Homo sapien
tgacggaaatgctacgtgcggccct

SEQ ID NO: 1581587 - DNA, 25 bp, Homo sapien
gccgccgagacgctgtgtcaatagt

SEQ ID NO: 1581588 - DNA, 25 bp, Homo sapien
gacctcatggatggtaaaagcgccc

SEQ ID NO: 1581589 - DNA, 25 bp, Homo sapien
aagccagagcctcgcagcaaagccg

SEQ ID NO: 1581590 - DNA, 25 bp, Homo sapien
ccagcggattataagggccaacaaa

SEQ ID NO: 1581591 - DNA, 25 bp, Homo sapien
caacgtgagcgtggcctacgagtgc

SEQ ID NO: 1581592 - DNA, 25 bp, Homo sapien
tggacgggcgcacctacagcgagct

SEQ ID NO: 1581593 - DNA, 25 bp, Homo sapien
ctgctcaggcgcatctgccgggacg

SEQ ID NO: 1581594 - DNA, 25 bp, Homo sapien
ggccgccttcaacaacaacgtgagc

SEQ ID NO: 1581595 - DNA, 25 bp, Homo sapien
catgacccgcgaggagtttctggag

SEQ ID NO: 1581596 - DNA, 25 bp, Homo sapien
gccaggccgtgctggacaccctgga

SEQ ID NO: 1581597 - DNA, 25 bp, Homo sapien
ttcatcgcgaaggtcaagccggtgg

SEQ ID NO: 1581598 - DNA, 25 bp, Homo sapien
gagccttcccttcgccctggtgagg

SEQ ID NO: 1581599 - DNA, 25 bp, Homo sapien
cagaagacgcttttccccagcaggt

SEQ ID NO: 1581600 - DNA, 25 bp, Homo sapien
tagtgacattggtgagacaacagcc

SEQ ID NO: 1581601 - DNA, 25 bp, Homo sapien
gcggaggttacaccctcagcaaggg

SEQ ID NO: 1581602 - DNA, 25 bp, Homo sapien
tggtgtgtatgcgagcgcccgcctc

SEQ ID NO: 1581603 - DNA, 25 bp, Homo sapien
cggattcaccgtggccgactctttt

SEQ ID NO: 1581604 - DNA, 25 bp, Homo sapien
tccagcacagagtggacggattcac

SEQ ID NO: 1581605 - DNA, 25 bp, Homo sapien
aggcccaggtgtagcggtccgaggg

SEQ ID NO: 1581606 - DNA, 25 bp, Homo sapien
ttcctgacactaccagcctgggagg

SEQ ID NO: 1581607 - DNA, 25 bp, Homo sapien
taataagacgtccttgggcggctac

SEQ ID NO: 1581608 - DNA, 25 bp, Homo sapien
tcttggtggtcaggagcacccgata

SEQ ID NO: 1581609 - DNA, 25 bp, Homo sapien
gagtgaaggtccaagatccctccag

SEQ ID NO: 1581610 - DNA, 25 bp, Homo sapien
caacttctgacaaggaggtgatccc

SEQ ID NO: 1581611 - DNA, 25 bp, Homo sapien
gcggcattccttggggttctggctt

SEQ ID NO: 1581612 - DNA, 25 bp, Homo sapien
tgctgggaggcgtctgggcggcatt

SEQ ID NO: 1581613 - DNA, 25 bp, Homo sapien
ttcttatctttgcacggggggagtg

SEQ ID NO: 1581614 - DNA, 25 bp, Homo sapien
gagtcagctttatacgaaaaaggta

SEQ ID NO: 1581615 - DNA, 25 bp, Homo sapien
gacatagatctagcgagagcagcaa

SEQ ID NO: 1581616 - DNA, 25 bp, Homo sapien
gacacgtagttatgggatgagctcg

SEQ ID NO: 1581617 - DNA, 25 bp, Homo sapien
tacttccttgacgaagcttcggccg

SEQ ID NO: 1581618 - DNA, 25 bp, Homo sapien
tagcatgtttgtacctaggatggac

SEQ ID NO: 1581619 - DNA, 25 bp, Homo sapien
gggtccttcctacccgcgttgctga

SEQ ID NO: 1581620 - DNA, 25 bp, Homo sapien
gagtctgggtttacgcgtcacctcg

SEQ ID NO: 1581621 - DNA, 25 bp, Homo sapien
cacaatgaagcagtcggacgcgtct

SEQ ID NO: 1581622 - DNA, 25 bp, Homo sapien
tggtcgccgcggaacttcaagggtc

SEQ ID NO: 1581623 - DNA, 25 bp, Homo sapien
gagtcggtcccgcaaagagaaacca

SEQ ID NO: 1581624 - DNA, 25 bp, Homo sapien
cggcgagtcggtcccgcaaagagaa

SEQ ID NO: 1581625 - DNA, 25 bp, Homo sapien
aaatttctcagcgagaccactttac

SEQ ID NO: 1581626 - DNA, 25 bp, Homo sapien
gcacttagaaaatttctcagcgaga

SEQ ID NO: 1581627 - DNA, 25 bp, Homo sapien
ttgtacggaagggggctgcctgcgt

SEQ ID NO: 1581628 - DNA, 25 bp, Homo sapien
tacggaagggggctgcctgcgtggg

SEQ ID NO: 1581629 - DNA, 25 bp, Homo sapien
acggaagggggctgcctgcgtggga

SEQ ID NO: 1581630 - DNA, 25 bp, Homo sapien
tgtacggaagggggctgcctgcgtg

SEQ ID NO: 1581631 - DNA, 25 bp, Homo sapien
tggggttggacgcccacaatctaag

SEQ ID NO: 1581632 - DNA, 25 bp, Homo sapien
taaaggcagagatgtgcgtctcgcc

SEQ ID NO: 1581633 - DNA, 25 bp, Homo sapien
aaaggcagagatgtgcgtctcgcca

SEQ ID NO: 1581634 - DNA, 25 bp, Homo sapien
aggcagagatgtgcgtctcgccatg

SEQ ID NO: 1581635 - DNA, 25 bp, Homo sapien
tttaaaggcagagatgtgcgtctcg

SEQ ID NO: 1581636 - DNA, 25 bp, Homo sapien
ggaccggtgcagatggcgcctggga

SEQ ID NO: 1581637 - DNA, 25 bp, Homo sapien
ccgctgagaagctggcggacccagc

SEQ ID NO: 1581638 - DNA, 25 bp, Homo sapien
tggtccctttgggagcgatgctgcc

SEQ ID NO: 1581639 - DNA, 25 bp, Homo sapien
ctttgggagcgatgctgcccgctga

SEQ ID NO: 1581640 - DNA, 25 bp, Homo sapien
cgcccagctggctacgtttttagaa

SEQ ID NO: 1581641 - DNA, 25 bp, Homo sapien
cagctggctacgtttttagaaaaga

SEQ ID NO: 1581642 - DNA, 25 bp, Homo sapien
ccagctggctacgtttttagaaaag

SEQ ID NO: 1581643 - DNA, 25 bp, Homo sapien
gactcagcctcagggacgactctga

SEQ ID NO: 1581644 - DNA, 25 bp, Homo sapien
gccacgggtctgtgttcgactcagc

SEQ ID NO: 1581645 - DNA, 25 bp, Homo sapien
ggctctctatagcaccagggctcac

SEQ ID NO: 1581646 - DNA, 25 bp, Homo sapien
aagccaatgctgtctggttgcgcca

SEQ ID NO: 1581647 - DNA, 25 bp, Homo sapien
ggacctgggctagggcagcgcagtg

SEQ ID NO: 1581648 - DNA, 25 bp, Homo sapien
tagggcagcgcagtgggcgttgggc

SEQ ID NO: 1581649 - DNA, 25 bp, Homo sapien
gacacggggtcaaagttgggcctga

SEQ ID NO: 1581650 - DNA, 25 bp, Homo sapien
ttgggccttgtgaggtctcctgcat

SEQ ID NO: 1581651 - DNA, 25 bp, Homo sapien
cccataggtgcctgggggaatgcac

SEQ ID NO: 1581652 - DNA, 25 bp, Homo sapien
tgcccctcgtcccacagggaagagg

SEQ ID NO: 1581653 - DNA, 25 bp, Homo sapien
tgtgggtgcccctcgtcccacaggg

SEQ ID NO: 1581654 - DNA, 25 bp, Homo sapien
ggtgcccctcgtcccacagggaaga

SEQ ID NO: 1581655 - DNA, 25 bp, Homo sapien
gtgcagcaggccgagctgggtcagc

SEQ ID NO: 1581656 - DNA, 25 bp, Homo sapien
ggccgagctgggtcagcgcgtgggc

SEQ ID NO: 1581657 - DNA, 25 bp, Homo sapien
agcaggccgagctgggtcagcgcgt

SEQ ID NO: 1581658 - DNA, 25 bp, Homo sapien
aggccgagctgggtcagcgcgtggg

SEQ ID NO: 1581659 - DNA, 25 bp, Homo sapien
cgtgatgaatgtactgacgagccga

SEQ ID NO: 1581660 - DNA, 25 bp, Homo sapien
cgaggaggatcgttttctaagtgca

SEQ ID NO: 1581661 - DNA, 25 bp, Homo sapien
tctaagtgcaatacttggcccgccg

SEQ ID NO: 1581662 - DNA, 25 bp, Homo sapien
ggtcccgccgccgtgatgaatgtac

SEQ ID NO: 1581663 - DNA, 25 bp, Homo sapien
cccgcagggcgtgcacccttcctga

SEQ ID NO: 1581664 - DNA, 25 bp, Homo sapien
gagacccgcagggcgtgcacccttc

SEQ ID NO: 1581665 - DNA, 25 bp, Homo sapien
gcagggcgtgcacccttcctgaaga

SEQ ID NO: 1581666 - DNA, 25 bp, Homo sapien
gggcgtgcacccttcctgaagacag

SEQ ID NO: 1581667 - DNA, 25 bp, Homo sapien
gagctttatttacacactgacaagg

SEQ ID NO: 1581668 - DNA, 25 bp, Homo sapien
tttacacactgacaaggctcacggg

SEQ ID NO: 1581669 - DNA, 25 bp, Homo sapien
tttatttacacactgacaaggctca

SEQ ID NO: 1581670 - DNA, 25 bp, Homo sapien
aagagctttatttacacactgacaa

SEQ ID NO: 1581671 - DNA, 25 bp, Homo sapien
tgaagaagtaggtggaacgcttcac

SEQ ID NO: 1581672 - DNA, 25 bp, Homo sapien
gctgaagaagtaggtggaacgcttc

SEQ ID NO: 1581673 - DNA, 25 bp, Homo sapien
agctgaagaagtaggtggaacgctt

SEQ ID NO: 1581674 - DNA, 25 bp, Homo sapien
gaagaagtaggtggaacgcttcacc

SEQ ID NO: 1581675 - DNA, 25 bp, Homo sapien
tgggcaccgcctgcagtgtctcctt

SEQ ID NO: 1581676 - DNA, 25 bp, Homo sapien
gcttgggcaccgcctgcagtgtctc

SEQ ID NO: 1581677 - DNA, 25 bp, Homo sapien
ctggcttgggcaccgcctgcagtgt

SEQ ID NO: 1581678 - DNA, 25 bp, Homo sapien
gctggctggcctccaagatcttctg

SEQ ID NO: 1581679 - DNA, 25 bp, Homo sapien
aggatgggctcgctgtgcaagcgga

SEQ ID NO: 1581680 - DNA, 25 bp, Homo sapien
gctgtgcaagcggacaaactgctcc

SEQ ID NO: 1581681 - DNA, 25 bp, Homo sapien
tgcaagcggacaaactgctcccggc

SEQ ID NO: 1581682 - DNA, 25 bp, Homo sapien
gatgggctcgctgtgcaagcggaca

SEQ ID NO: 1581683 - DNA, 25 bp, Homo sapien
actgaggctcagactacgggggcac

SEQ ID NO: 1581684 - DNA, 25 bp, Homo sapien
cacccctacccaacgccccagtgtg

SEQ ID NO: 1581685 - DNA, 25 bp, Homo sapien
ggggccccacccatgggtggactga

SEQ ID NO: 1581686 - DNA, 25 bp, Homo sapien
gcaggagtcagaggatccccagggg

SEQ ID NO: 1581687 - DNA, 25 bp, Homo sapien
ggagacatcagctgcgtgagtccag

SEQ ID NO: 1581688 - DNA, 25 bp, Homo sapien
tggttcatgacggagacatcagctg

SEQ ID NO: 1581689 - DNA, 25 bp, Homo sapien
gcgtgagtccagtaacagtcgtgca

SEQ ID NO: 1581690 - DNA, 25 bp, Homo sapien
ctgcgtgagtccagtaacagtcgtg

SEQ ID NO: 1581691 - DNA, 25 bp, Homo sapien
catcctgggttaggtatcagtacag

SEQ ID NO: 1581692 - DNA, 25 bp, Homo sapien
acatcgcggtgccaagaaatgccca

SEQ ID NO: 1581693 - DNA, 25 bp, Homo sapien
agctgtgccctgctagccagaagac

SEQ ID NO: 1581694 - DNA, 25 bp, Homo sapien
agattctgctggaacgacctccacg

SEQ ID NO: 1581695 - DNA, 25 bp, Homo sapien
cagggcggtgagcatcatgtgggag

SEQ ID NO: 1581696 - DNA, 25 bp, Homo sapien
catcatgtgggaggagtccagcgag

SEQ ID NO: 1581697 - DNA, 25 bp, Homo sapien
cgttcttctgcttacgtgtgttggg

SEQ ID NO: 1581698 - DNA, 25 bp, Homo sapien
gggcgggaagccgttcttctgctta

SEQ ID NO: 1581699 - DNA, 25 bp, Homo sapien
ctaactggccgctgtctccaccgtg

SEQ ID NO: 1581700 - DNA, 25 bp, Homo sapien
cctaactggccgctgtctccaccgt

SEQ ID NO: 1581701 - DNA, 25 bp, Homo sapien
agggacacccctaactggccgctgt

SEQ ID NO: 1581702 - DNA, 25 bp, Homo sapien
acacccctaactggccgctgtctcc

SEQ ID NO: 1581703 - DNA, 25 bp, Homo sapien
gatgctctgaattccacctcctatt

SEQ ID NO: 1581704 - DNA, 25 bp, Homo sapien
tgggtgtaggtgatgctctgaattc

SEQ ID NO: 1581705 - DNA, 25 bp, Homo sapien
ccgttgtgggtgtaggtgatgctct

SEQ ID NO: 1581706 - DNA, 25 bp, Homo sapien
cggctgatgtctccgttgtgggtgt

SEQ ID NO: 1581707 - DNA, 25 bp, Homo sapien
gggatggtggcacactggggaggga

SEQ ID NO: 1581708 - DNA, 25 bp, Homo sapien
tggggagggatggggtggtacactg

SEQ ID NO: 1581709 - DNA, 25 bp, Homo sapien
gatggtggcacactggggagggatg

SEQ ID NO: 1581710 - DNA, 25 bp, Homo sapien
gggagggatggggtggtacactgac

SEQ ID NO: 1581711 - DNA, 25 bp, Homo sapien
aggcgggcactctcggtcagccagt

SEQ ID NO: 1581712 - DNA, 25 bp, Homo sapien
agtccaggcgatagggctggatgac

SEQ ID NO: 1581713 - DNA, 25 bp, Homo sapien
accttggagtccaggcgatagggct

SEQ ID NO: 1581714 - DNA, 25 bp, Homo sapien
acagagcccatgtgggagatgaggc

SEQ ID NO: 1581715 - DNA, 25 bp, Homo sapien
catctcctgtagactcttgaagacc

SEQ ID NO: 1581716 - DNA, 25 bp, Homo sapien
gtacgagatagtgagaggcctccca

SEQ ID NO: 1581717 - DNA, 25 bp, Homo sapien
cctgtagactcttgaagacctggcg

SEQ ID NO: 1581718 - DNA, 25 bp, Homo sapien
gaagacctggcgtacgagatagtga

SEQ ID NO: 1581719 - DNA, 25 bp, Homo sapien
cccggaggcgcttctcaatctgcag

SEQ ID NO: 1581720 - DNA, 25 bp, Homo sapien
gcgtgaccccgtacaccaccgtcat

SEQ ID NO: 1581721 - DNA, 25 bp, Homo sapien
acaccaccgtcatcaccgtctgctt

SEQ ID NO: 1581722 - DNA, 25 bp, Homo sapien
cttgcgggtgatgaaaccttccagc

SEQ ID NO: 1581723 - DNA, 25 bp, Homo sapien
tgggcgtcctgcctacggaacacct

SEQ ID NO: 1581724 - DNA, 25 bp, Homo sapien
gggtcagccccgctagcagcccagg

SEQ ID NO: 1581725 - DNA, 25 bp, Homo sapien
ccacatcctcaggacaggccaaggt

SEQ ID NO: 1581726 - DNA, 25 bp, Homo sapien
gcgcgggtcagccccgctagcagcc

SEQ ID NO: 1581727 - DNA, 25 bp, Homo sapien
catcctcaggacaggccaaggtgag

SEQ ID NO: 1581728 - DNA, 25 bp, Homo sapien
ccccgggcagcagggcacaccctac

SEQ ID NO: 1581729 - DNA, 25 bp, Homo sapien
gcccccgggcagcagggcacaccct

SEQ ID NO: 1581730 - DNA, 25 bp, Homo sapien
gatgcccccgggcagcagggcacac

SEQ ID NO: 1581731 - DNA, 25 bp, Homo sapien
atgcccccgggcagcagggcacacc

SEQ ID NO: 1581732 - DNA, 25 bp, Homo sapien
gcataatgctgcaggccgttgcaag

SEQ ID NO: 1581733 - DNA, 25 bp, Homo sapien
cataatgctgcaggccgttgcaaga

SEQ ID NO: 1581734 - DNA, 25 bp, Homo sapien
ggcggcaaacgggagatggaagcta

SEQ ID NO: 1581735 - DNA, 25 bp, Homo sapien
caaacgggagatggaagctagagag

SEQ ID NO: 1581736 - DNA, 25 bp, Homo sapien
tagagaggcagagacgtgtgggacc

SEQ ID NO: 1581737 - DNA, 25 bp, Homo sapien
gtcgagccgttcctagggccgtgca

SEQ ID NO: 1581738 - DNA, 25 bp, Homo sapien
ggaccacctccagagaataccacga

SEQ ID NO: 1581739 - DNA, 25 bp, Homo sapien
tccagagaataccacgagcgaaggt

SEQ ID NO: 1581740 - DNA, 25 bp, Homo sapien
ccacgagcgaaggtgaaatctcaca

SEQ ID NO: 1581741 - DNA, 25 bp, Homo sapien
tgaaatctcacaccctcaagtcgag

SEQ ID NO: 1581742 - DNA, 25 bp, Homo sapien
gttcgccacctccatacagcaggcc

SEQ ID NO: 1581743 - DNA, 25 bp, Homo sapien
tgccagggttcctccgcgcccatcc

SEQ ID NO: 1581744 - DNA, 25 bp, Homo sapien
ttcctccgcgcccatccaccacttt

SEQ ID NO: 1581745 - DNA, 25 bp, Homo sapien
ggtgggagacataggcggcagggtc

SEQ ID NO: 1581746 - DNA, 25 bp, Homo sapien
cacgtcgctgcccaggtggttgaag

SEQ ID NO: 1581747 - DNA, 25 bp, Homo sapien
accgcctcgaaggtcagcgtgggct

SEQ ID NO: 1581748 - DNA, 25 bp, Homo sapien
cagaagacgcggtcccgcaggtgct

SEQ ID NO: 1581749 - DNA, 25 bp, Homo sapien
cgcgccaggcgcagttgcccagttg

SEQ ID NO: 1581750 - DNA, 25 bp, Homo sapien
caggctgcatggcatctgcgtagcc

SEQ ID NO: 1581751 - DNA, 25 bp, Homo sapien
ctgctggacgttgcggaaggaatac

SEQ ID NO: 1581752 - DNA, 25 bp, Homo sapien
cgatgcggcttgtccaggctgcatg

SEQ ID NO: 1581753 - DNA, 25 bp, Homo sapien
atctgcgtagcctgcaccagcatct

SEQ ID NO: 1581754 - DNA, 25 bp, Homo sapien
caggaggagagggggtgcgagcctc

SEQ ID NO: 1581755 - DNA, 25 bp, Homo sapien
ggaggagagggggtgcgagcctcac

SEQ ID NO: 1581756 - DNA, 25 bp, Homo sapien
aggaggagagggggtgcgagcctca

SEQ ID NO: 1581757 - DNA, 25 bp, Homo sapien
tgaaagtgcgcgcactcagctcccg

SEQ ID NO: 1581758 - DNA, 25 bp, Homo sapien
tctgcaccacgtgccggctgaaagt

SEQ ID NO: 1581759 - DNA, 25 bp, Homo sapien
gccggctgaaagtgcgcgcactcag

SEQ ID NO: 1581760 - DNA, 25 bp, Homo sapien
gactcaccttgggcgggcagcgcct

SEQ ID NO: 1581761 - DNA, 25 bp, Homo sapien
taaagtgagaaccggccctcgtaca

SEQ ID NO: 1581762 - DNA, 25 bp, Homo sapien
ccattggtcccgcagggtcttcagg

SEQ ID NO: 1581763 - DNA, 25 bp, Homo sapien
acctcgcgctcgtccagcaggcaca

SEQ ID NO: 1581764 - DNA, 25 bp, Homo sapien
gtacacctcgcgctctaggcggttc

SEQ ID NO: 1581765 - DNA, 25 bp, Homo sapien
caggtgcagcttcgggtaggacaca

SEQ ID NO: 1581766 - DNA, 25 bp, Homo sapien
gcttctcaaagaggcactgcagggt

SEQ ID NO: 1581767 - DNA, 25 bp, Homo sapien
gcttcgggtaggacacacgcccatc

SEQ ID NO: 1581768 - DNA, 25 bp, Homo sapien
cgtgggcttctccacggacaccacg

SEQ ID NO: 1581769 - DNA, 25 bp, Homo sapien
cctcagacagcagaacggcggtgaa

SEQ ID NO: 1581770 - DNA, 25 bp, Homo sapien
atcctcctcagacagcagaacggcg

SEQ ID NO: 1581771 - DNA, 25 bp, Homo sapien
tcctcagacagcagaacggcggtga

SEQ ID NO: 1581772 - DNA, 25 bp, Homo sapien
agacagcagaacggcggtgaagagt

SEQ ID NO: 1581773 - DNA, 25 bp, Homo sapien
gcaggtccggagtcaagccggcatc

SEQ ID NO: 1581774 - DNA, 25 bp, Homo sapien
cactggagggcagccgcataggaca

SEQ ID NO: 1581775 - DNA, 25 bp, Homo sapien
gatggtcccggcgtcctggtcctgc

SEQ ID NO: 1581776 - DNA, 25 bp, Homo sapien
ggcagccgcataggacagcaggtcc

SEQ ID NO: 1581777 - DNA, 25 bp, Homo sapien
tgaataacacatataccagctcctt

SEQ ID NO: 1581778 - DNA, 25 bp, Homo sapien
aacacatataccagctccttgaagg

SEQ ID NO: 1581779 - DNA, 25 bp, Homo sapien
ccatgaataacacatataccagctc

SEQ ID NO: 1581780 - DNA, 25 bp, Homo sapien
aataacacatataccagctccttga

SEQ ID NO: 1581781 - DNA, 25 bp, Homo sapien
tccagcgtgagcagcttccgcttct

SEQ ID NO: 1581782 - DNA, 25 bp, Homo sapien
gcccagccaagcatcacggcgttgt

SEQ ID NO: 1581783 - DNA, 25 bp, Homo sapien
ccagccaagcatcacggcgttgtac

SEQ ID NO: 1581784 - DNA, 25 bp, Homo sapien
tacatgtccagcgtgagcagcttcc

SEQ ID NO: 1581785 - DNA, 25 bp, Homo sapien
tgaactccccgctctggaatggcat

SEQ ID NO: 1581786 - DNA, 25 bp, Homo sapien
cagcttcgccttcaaccgctgcata

SEQ ID NO: 1581787 - DNA, 25 bp, Homo sapien
ctgcaggcgcctggtcagcgccttg

SEQ ID NO: 1581788 - DNA, 25 bp, Homo sapien
gctgcatacgcatctgctgggtccg

SEQ ID NO: 1581789 - DNA, 25 bp, Homo sapien
acctccgacacgctctcagcctgca

SEQ ID NO: 1581790 - DNA, 25 bp, Homo sapien
agctgccgcacccgcgcctggagca

SEQ ID NO: 1581791 - DNA, 25 bp, Homo sapien
tgcagctgccgcacccgcgcctgga

SEQ ID NO: 1581792 - DNA, 25 bp, Homo sapien
caccacctccgacacgctctcagcc

SEQ ID NO: 1581793 - DNA, 25 bp, Homo sapien
ccagtccttcctgcggtcttggtct

SEQ ID NO: 1581794 - DNA, 25 bp, Homo sapien
tccacgtggccccagtccttcctgc

SEQ ID NO: 1581795 - DNA, 25 bp, Homo sapien
gtggccccagtccttcctgcggtct

SEQ ID NO: 1581796 - DNA, 25 bp, Homo sapien
tccttcctgcggtcttggtcttgct

SEQ ID NO: 1581797 - DNA, 25 bp, Homo sapien
ggggccgcagacgccaccggcggtc

SEQ ID NO: 1581798 - DNA, 25 bp, Homo sapien
tggggccgcagacgccaccggcggt

SEQ ID NO: 1581799 - DNA, 25 bp, Homo sapien
gggccgcagacgccaccggcggtcc

SEQ ID NO: 1581800 - DNA, 25 bp, Homo sapien
ctggggccgcagacgccaccggcgg

SEQ ID NO: 1581801 - DNA, 25 bp, Homo sapien
tcaaaggtcagactgcacggaggag

SEQ ID NO: 1581802 - DNA, 25 bp, Homo sapien
cctcagtcgaaaagcgggcaagggc

SEQ ID NO: 1581803 - DNA, 25 bp, Homo sapien
gtcaggaggctgcataagaaaccac

SEQ ID NO: 1581804 - DNA, 25 bp, Homo sapien
cacggaggagcctcagtcgaaaagc

SEQ ID NO: 1581805 - DNA, 25 bp, Homo sapien
ctccgcggccccagcaaagtgccga

SEQ ID NO: 1581806 - DNA, 25 bp, Homo sapien
cgcggccccagcaaagtgccgacat

SEQ ID NO: 1581807 - DNA, 25 bp, Homo sapien
tccgcggccccagcaaagtgccgac

SEQ ID NO: 1581808 - DNA, 25 bp, Homo sapien
gctccgcggccccagcaaagtgccg

SEQ ID NO: 1581809 - DNA, 25 bp, Homo sapien
caccccaccggcccgcgcctgcgca

SEQ ID NO: 1581810 - DNA, 25 bp, Homo sapien
accccaccggcccgcgcctgcgcat

SEQ ID NO: 1581811 - DNA, 25 bp, Homo sapien
tacgcacgccgctccaggccacccc

SEQ ID NO: 1581812 - DNA, 25 bp, Homo sapien
ggccaccccaccggcccgcgcctgc

SEQ ID NO: 1581813 - DNA, 25 bp, Homo sapien
cctcgtctgcctgtgtgaaatctcc

SEQ ID NO: 1581814 - DNA, 25 bp, Homo sapien
tgggccaaccacagaggctacaaag

SEQ ID NO: 1581815 - DNA, 25 bp, Homo sapien
tattgtgaccgcgtttaggatgccc

SEQ ID NO: 1581816 - DNA, 25 bp, Homo sapien
tctcggtctctgtggtcgcactgca

SEQ ID NO: 1581817 - DNA, 25 bp, Homo sapien
agggttgcactgttaaagcgaaggc

SEQ ID NO: 1581818 - DNA, 25 bp, Homo sapien
agtttccgtggtctgtgagatgggt

SEQ ID NO: 1581819 - DNA, 25 bp, Homo sapien
acgtcacggagcgggcgtctctgtc

SEQ ID NO: 1581820 - DNA, 25 bp, Homo sapien
gcagagaagcgtccgtgtggtacaa

SEQ ID NO: 1581821 - DNA, 25 bp, Homo sapien
cagcagacgtcggaaatatgcacac

SEQ ID NO: 1581822 - DNA, 25 bp, Homo sapien
tcggaaatatgcacacggtgtctga

SEQ ID NO: 1581823 - DNA, 25 bp, Homo sapien
tatgcacacggtgtctgaaactgtt

SEQ ID NO: 1581824 - DNA, 25 bp, Homo sapien
acacggtgtctgaaactgttctcat

SEQ ID NO: 1581825 - DNA, 25 bp, Homo sapien
gcttattcgcaagcccaaacctggg

SEQ ID NO: 1581826 - DNA, 25 bp, Homo sapien
ttacctcgtgaggagccgagtccgc

SEQ ID NO: 1581827 - DNA, 25 bp, Homo sapien
gagggcgtcgccacttgagttgtca

SEQ ID NO: 1581828 - DNA, 25 bp, Homo sapien
taacatgtgcctcgaagaaacgggt

SEQ ID NO: 1581829 - DNA, 25 bp, Homo sapien
cagaaggtgccctgcgcacggtccg

SEQ ID NO: 1581830 - DNA, 25 bp, Homo sapien
ggtgggatccgagttacctggccaa

SEQ ID NO: 1581831 - DNA, 25 bp, Homo sapien
tggaagtcccaacgcttctctcggc

SEQ ID NO: 1581832 - DNA, 25 bp, Homo sapien
cacgtcgcgggacacagtgaagagt

SEQ ID NO: 1581833 - DNA, 25 bp, Homo sapien
tgggccctggcgctttaacgctggt

SEQ ID NO: 1581834 - DNA, 25 bp, Homo sapien
gcatccagcaaccttgagcagtggg

SEQ ID NO: 1581835 - DNA, 25 bp, Homo sapien
ccaggaacccgcgtggctgaggtgt

SEQ ID NO: 1581836 - DNA, 25 bp, Homo sapien
ccaggatggtgggatcatcagcaac

SEQ ID NO: 1581837 - DNA, 25 bp, Homo sapien
ggagccgctgggccccgtcttccgc

SEQ ID NO: 1581838 - DNA, 25 bp, Homo sapien
gtcttccgccacaaaccatgcatgg

SEQ ID NO: 1581839 - DNA, 25 bp, Homo sapien
gctgaaccccgtgcttcagcgctgg

SEQ ID NO: 1581840 - DNA, 25 bp, Homo sapien
ctactccgggtcgtggaggcggccg

SEQ ID NO: 1581841 - DNA, 25 bp, Homo sapien
ttataaaaatctttccaccgctgaa

SEQ ID NO: 1581842 - DNA, 25 bp, Homo sapien
ataaaaatctttccaccgctgaacg

SEQ ID NO: 1581843 - DNA, 25 bp, Homo sapien
aattataaaaatctttccaccgctg

SEQ ID NO: 1581844 - DNA, 25 bp, Homo sapien
tcaaagcagtaataatttaaaatta

SEQ ID NO: 1581845 - DNA, 25 bp, Homo sapien
gaggctggggacgccccagagggga

SEQ ID NO: 1581846 - DNA, 25 bp, Homo sapien
cacgccttcccaagccagggggccg

SEQ ID NO: 1581847 - DNA, 25 bp, Homo sapien
ccgtgctttcccgacggccgacgtg

SEQ ID NO: 1581848 - DNA, 25 bp, Homo sapien
gaccagccaagcgtggcgccgccgg

SEQ ID NO: 1581849 - DNA, 25 bp, Homo sapien
ctgaccagccaagcgtggcgccgcc

SEQ ID NO: 1581850 - DNA, 25 bp, Homo sapien
tgctttcccgacggccgacgtgggc

SEQ ID NO: 1581851 - DNA, 25 bp, Homo sapien
ccagtgaggccaggggggttcgtgg

SEQ ID NO: 1581852 - DNA, 25 bp, Homo sapien
cagtgaggccaggggggttcgtggc

SEQ ID NO: 1581853 - DNA, 25 bp, Homo sapien
acgaggaggagaagctcaccccagt

SEQ ID NO: 1581854 - DNA, 25 bp, Homo sapien
ctgtcccgtgaggctttttcggcag

SEQ ID NO: 1581855 - DNA, 25 bp, Homo sapien
ccgtgaggctttttcggcagacggg

SEQ ID NO: 1581856 - DNA, 25 bp, Homo sapien
tcccgtgaggctttttcggcagacg

SEQ ID NO: 1581857 - DNA, 25 bp, Homo sapien
tgtcccgtgaggctttttcggcaga

SEQ ID NO: 1581858 - DNA, 25 bp, Homo sapien
ccagcgcgtagtcgtccttgcacac

SEQ ID NO: 1581859 - DNA, 25 bp, Homo sapien
cccagcgcgtagtcgtccttgcaca

SEQ ID NO: 1581860 - DNA, 25 bp, Homo sapien
tacaagtatgagccaggcgtggcgg

SEQ ID NO: 1581861 - DNA, 25 bp, Homo sapien
atacaagtatgagccaggcgtggcg

SEQ ID NO: 1581862 - DNA, 25 bp, Homo sapien
tgctcctcagtgacggggacggtgg

SEQ ID NO: 1581863 - DNA, 25 bp, Homo sapien
ttctctttatctgccggtggggggc

SEQ ID NO: 1581864 - DNA, 25 bp, Homo sapien
gcctgtgttttcaaactgattgagg

SEQ ID NO: 1581865 - DNA, 25 bp, Homo sapien
ggagggcctggattttctctttatc

SEQ ID NO: 1581866 - DNA, 25 bp, Homo sapien
gggctctgaaacgcgaggctgcagg

SEQ ID NO: 1581867 - DNA, 25 bp, Homo sapien
gctctgaaacgcgaggctgcaggac

SEQ ID NO: 1581868 - DNA, 25 bp, Homo sapien
gacaagaggcgagagtgccgggagc

SEQ ID NO: 1581869 - DNA, 25 bp, Homo sapien
agaggcgagagtgccgggagctcct

SEQ ID NO: 1581870 - DNA, 25 bp, Homo sapien
ctcctgagtgccctgacggcggaat

SEQ ID NO: 1581871 - DNA, 25 bp, Homo sapien
ctactgtgagggtcgggtcctgcca

SEQ ID NO: 1581872 - DNA, 25 bp, Homo sapien
ggttttgctacaacgttccgcgtga

SEQ ID NO: 1581873 - DNA, 25 bp, Homo sapien
tgccagtgacaaaatgctccaaggg

SEQ ID NO: 1581874 - DNA, 25 bp, Homo sapien
tccatagggtttgagtgcaggactc

SEQ ID NO: 1581875 - DNA, 25 bp, Homo sapien
ccatagggtttgagtgcaggactcc

SEQ ID NO: 1581876 - DNA, 25 bp, Homo sapien
catagggtttgagtgcaggactccc

SEQ ID NO: 1581877 - DNA, 25 bp, Homo sapien
tggtggcgggcgtgatgatgccgtt

SEQ ID NO: 1581878 - DNA, 25 bp, Homo sapien
cgtgatgatgccgttgacgagctgc

SEQ ID NO: 1581879 - DNA, 25 bp, Homo sapien
tgatgccgttgacgagctgctggat

SEQ ID NO: 1581880 - DNA, 25 bp, Homo sapien
tgccgttgacgagctgctggatgat

SEQ ID NO: 1581881 - DNA, 25 bp, Homo sapien
ctggaaaagagagcgccagtcacgg

SEQ ID NO: 1581882 - DNA, 25 bp, Homo sapien
cagggccagcatcagcttctagatt

SEQ ID NO: 1581883 - DNA, 25 bp, Homo sapien
gaccacagaagaggtccaccactct

SEQ ID NO: 1581884 - DNA, 25 bp, Homo sapien
ctgccaggtccgtggtgagcaccaa

SEQ ID NO: 1581885 - DNA, 25 bp, Homo sapien
acagcagtctccagagcacgtgggc

SEQ ID NO: 1581886 - DNA, 25 bp, Homo sapien
aaggcctggacagcgtttgacgaca

SEQ ID NO: 1581887 - DNA, 25 bp, Homo sapien
cataaaagcatcaaccgccaggagt

SEQ ID NO: 1581888 - DNA, 25 bp, Homo sapien
aacccgtgctggattctaagcgcca

SEQ ID NO: 1581889 - DNA, 25 bp, Homo sapien
cccgccgcgtggtgaggcgggcgcg

SEQ ID NO: 1581890 - DNA, 25 bp, Homo sapien
cggccggtggcccgccgcgtggtga

SEQ ID NO: 1581891 - DNA, 25 bp, Homo sapien
ggacgccttcgtgccggccggtggc

SEQ ID NO: 1581892 - DNA, 25 bp, Homo sapien
ccttccagcgtggggacgccttcgt

SEQ ID NO: 1581893 - DNA, 25 bp, Homo sapien
gaaagcaaactgtccgtagccctgc

SEQ ID NO: 1581894 - DNA, 25 bp, Homo sapien
ccctgcggcagcgtgaacaggtgct

SEQ ID NO: 1581895 - DNA, 25 bp, Homo sapien
aagatgccgaaagcaaactgtccgt

SEQ ID NO: 1581896 - DNA, 25 bp, Homo sapien
tgtccgtagccctgcggcagcgtga

SEQ ID NO: 1581897 - DNA, 25 bp, Homo sapien
gcgtgacctcgggggctcaggcccg

SEQ ID NO: 1581898 - DNA, 25 bp, Homo sapien
ggggcgtgacctcgggggctcaggc

SEQ ID NO: 1581899 - DNA, 25 bp, Homo sapien
gggcgtgacctcgggggctcaggcc

SEQ ID NO: 1581900 - DNA, 25 bp, Homo sapien
cgtgacctcgggggctcaggcccgt

SEQ ID NO: 1581901 - DNA, 25 bp, Homo sapien
cggtggccggctctggtctgtggga

SEQ ID NO: 1581902 - DNA, 25 bp, Homo sapien
ctccaacggtggccggctctggtct

SEQ ID NO: 1581903 - DNA, 25 bp, Homo sapien
ccggctctggtctgtgggagctgtg

SEQ ID NO: 1581904 - DNA, 25 bp, Homo sapien
aacggtggccggctctggtctgtgg

SEQ ID NO: 1581905 - DNA, 25 bp, Homo sapien
agctcctcgataaaaccagactcgc

SEQ ID NO: 1581906 - DNA, 25 bp, Homo sapien
aaaccagactcgcatcttggacaga

SEQ ID NO: 1581907 - DNA, 25 bp, Homo sapien
gataaaaccagactcgcatcttgga

SEQ ID NO: 1581908 - DNA, 25 bp, Homo sapien
gactcgcatcttggacagatataat

SEQ ID NO: 1581909 - DNA, 25 bp, Homo sapien
gcaccactcggaggggtgccccaat

SEQ ID NO: 1581910 - DNA, 25 bp, Homo sapien
ggtgccccaataccccacagtggca

SEQ ID NO: 1581911 - DNA, 25 bp, Homo sapien
aggacgctctggcagccccgcacac

SEQ ID NO: 1581912 - DNA, 25 bp, Homo sapien
cacagtggcatttccaggacgctct

SEQ ID NO: 1581913 - DNA, 25 bp, Homo sapien
tgtgcacgtcggccctgctgctgga

SEQ ID NO: 1581914 - DNA, 25 bp, Homo sapien
tcggggcctgtgcacgtcggccctg

SEQ ID NO: 1581915 - DNA, 25 bp, Homo sapien
cacatacacactcatctgccccagc

SEQ ID NO: 1581916 - DNA, 25 bp, Homo sapien
agcacccactccagcgtcggggcct

SEQ ID NO: 1581917 - DNA, 25 bp, Homo sapien
tctgaaatccgggtgccatcgagga

SEQ ID NO: 1581918 - DNA, 25 bp, Homo sapien
tccgggtgccatcgaggacgccaag

SEQ ID NO: 1581919 - DNA, 25 bp, Homo sapien
tcctgcgtattgtcagggctctggg

SEQ ID NO: 1581920 - DNA, 25 bp, Homo sapien
agggctgcgacccaactcctgcgta

SEQ ID NO: 1581921 - DNA, 25 bp, Homo sapien
gctggtgcccgatcacaacgccagg

SEQ ID NO: 1581922 - DNA, 25 bp, Homo sapien
acaacgccaggctccatgttcacag

SEQ ID NO: 1581923 - DNA, 25 bp, Homo sapien
agggcagccgacatccacaggttcc

SEQ ID NO: 1581924 - DNA, 25 bp, Homo sapien
ccgttccggagaacccagctgtgca

SEQ ID NO: 1581925 - DNA, 25 bp, Homo sapien
gaggcaggggcaggctgtcactgtc

SEQ ID NO: 1581926 - DNA, 25 bp, Homo sapien
acactgcggaggttgcaggcgttcg

SEQ ID NO: 1581927 - DNA, 25 bp, Homo sapien
gggacactgcggaggttgcaggcgt

SEQ ID NO: 1581928 - DNA, 25 bp, Homo sapien
gacactgcggaggttgcaggcgttc

SEQ ID NO: 1581929 - DNA, 25 bp, Homo sapien
actgcggaggttgcaggcgttcggg

SEQ ID NO: 1581930 - DNA, 25 bp, Homo sapien
gctggcgggctgtcaggcaaccagc

SEQ ID NO: 1581931 - DNA, 25 bp, Homo sapien
ggctggcgggctgtcaggcaaccag

SEQ ID NO: 1581932 - DNA, 25 bp, Homo sapien
acagccgggcggctacgtacacagc

SEQ ID NO: 1581933 - DNA, 25 bp, Homo sapien
aagcgtagcaacagccgggcggcta

SEQ ID NO: 1581934 - DNA, 25 bp, Homo sapien
ggcggctacgtacacagcacagtaa

SEQ ID NO: 1581935 - DNA, 25 bp, Homo sapien
ggtcaaagcgtagcaacagccgggc

SEQ ID NO: 1581936 - DNA, 25 bp, Homo sapien
cgcgggacgatctccacggagcagc

SEQ ID NO: 1581937 - DNA, 25 bp, Homo sapien
cgggatgcggcgacgcctcggccat

SEQ ID NO: 1581938 - DNA, 25 bp, Homo sapien
gcagtggcagaagtaccgtccggga

SEQ ID NO: 1581939 - DNA, 25 bp, Homo sapien
ggcaggcgcgggacgatctccacgg

SEQ ID NO: 1581940 - DNA, 25 bp, Homo sapien
gcacccgccgccggccgtttgctgc

SEQ ID NO: 1581941 - DNA, 25 bp, Homo sapien
gccgccacctactccgcgccgcccg

SEQ ID NO: 1581942 - DNA, 25 bp, Homo sapien
tttgctgctccctcgccggccgacg

SEQ ID NO: 1581943 - DNA, 25 bp, Homo sapien
gccgccggccgtttgctgctccctc

SEQ ID NO: 1581944 - DNA, 25 bp, Homo sapien
gacacccacgggttctagggatgag

SEQ ID NO: 1581945 - DNA, 25 bp, Homo sapien
tgtgaaagccctcaactcagtccca

SEQ ID NO: 1581946 - DNA, 25 bp, Homo sapien
gacagtgggccatccgtataaccca

SEQ ID NO: 1581947 - DNA, 25 bp, Homo sapien
gtataacccaggatgaacccctgtg

SEQ ID NO: 1581948 - DNA, 25 bp, Homo sapien
tcatacattgttggaaacgcctctg

SEQ ID NO: 1581949 - DNA, 25 bp, Homo sapien
cagtgtttgctgaatcttggaggga

SEQ ID NO: 1581950 - DNA, 25 bp, Homo sapien
caagggcgcctgacaaatctggagg

SEQ ID NO: 1581951 - DNA, 25 bp, Homo sapien
atgttcactgatgccctagaagcag

SEQ ID NO: 1581952 - DNA, 25 bp, Homo sapien
tgtgattaatcccagatcagcctgg

SEQ ID NO: 1581953 - DNA, 25 bp, Homo sapien
aacatggcttgaggttaggtcctgg

SEQ ID NO: 1581954 - DNA, 25 bp, Homo sapien
agtggatcaggagagaacatggctt

SEQ ID NO: 1581955 - DNA, 25 bp, Homo sapien
gtcttcaaaaagtgcctggcctggg

SEQ ID NO: 1581956 - DNA, 25 bp, Homo sapien
cgggcaaggcgtgccgcatgctggg

SEQ ID NO: 1581957 - DNA, 25 bp, Homo sapien
gctggaccccgattccgggcagaga

SEQ ID NO: 1581958 - DNA, 25 bp, Homo sapien
acggcgtggagtgcggcccgggcaa

SEQ ID NO: 1581959 - DNA, 25 bp, Homo sapien
tgtccgcagattcgtgcgacggcgt

SEQ ID NO: 1581960 - DNA, 25 bp, Homo sapien
cctttgcatgtggaatgggtgtgcc

SEQ ID NO: 1581961 - DNA, 25 bp, Homo sapien
ccctgaacatcaggcttcccgtggg

SEQ ID NO: 1581962 - DNA, 25 bp, Homo sapien
gcctggagcggccatctcatttgca

SEQ ID NO: 1581963 - DNA, 25 bp, Homo sapien
gccacggaacattccaggcctggag

SEQ ID NO: 1581964 - DNA, 25 bp, Homo sapien
ctggtggtcccaggcagggggccgg

SEQ ID NO: 1581965 - DNA, 25 bp, Homo sapien
ggcctggtggtcccaggcagggggc

SEQ ID NO: 1581966 - DNA, 25 bp, Homo sapien
tgggggcctggtggtcccaggcagg

SEQ ID NO: 1581967 - DNA, 25 bp, Homo sapien
tcaggcggcttctcctgggggcctg

SEQ ID NO: 1581968 - DNA, 25 bp, Homo sapien
caaaggcggacacctgcgtgtacac

SEQ ID NO: 1581969 - DNA, 25 bp, Homo sapien
gggtcttggggtcgccgcaccagag

SEQ ID NO: 1581970 - DNA, 25 bp, Homo sapien
gccacaaaggcggacacctgcgtgt

SEQ ID NO: 1581971 - DNA, 25 bp, Homo sapien
gcccgagaaggaaacgaggccgtga

SEQ ID NO: 1581972 - DNA, 25 bp, Homo sapien
gctcctcaaagtcagacacgaagcc

SEQ ID NO: 1581973 - DNA, 25 bp, Homo sapien
agcagaagccccgtctgtggctgtc

SEQ ID NO: 1581974 - DNA, 25 bp, Homo sapien
tccaggagctgttgcagacgtccgg

SEQ ID NO: 1581975 - DNA, 25 bp, Homo sapien
catggtaagtgtcaggtggcccttc

SEQ ID NO: 1581976 - DNA, 25 bp, Homo sapien
aggttcgaggcgtctgttcccaccg

SEQ ID NO: 1581977 - DNA, 25 bp, Homo sapien
cgcaccaggttcgaggcgtctgttc

SEQ ID NO: 1581978 - DNA, 25 bp, Homo sapien
tccaggacgaggttttggagattat

SEQ ID NO: 1581979 - DNA, 25 bp, Homo sapien
ggtgcagaagcagatccgcaccggc

SEQ ID NO: 1581980 - DNA, 25 bp, Homo sapien
agagtctccgtgcagacgcccggct

SEQ ID NO: 1581981 - DNA, 25 bp, Homo sapien
acaccagagtctccgtgcagacgcc

SEQ ID NO: 1581982 - DNA, 25 bp, Homo sapien
accagagtctccgtgcagacgcccg

SEQ ID NO: 1581983 - DNA, 25 bp, Homo sapien
tcacaccagagtctccgtgcagacg

SEQ ID NO: 1581984 - DNA, 25 bp, Homo sapien
tgagagcatcgatgccaaacacctg

SEQ ID NO: 1581985 - DNA, 25 bp, Homo sapien
caggcagatgtcgttggcgtgggtc

SEQ ID NO: 1581986 - DNA, 25 bp, Homo sapien
tgctgggtgggctccgcagtactca

SEQ ID NO: 1581987 - DNA, 25 bp, Homo sapien
gtactcaggacgtgggcgcccagca

SEQ ID NO: 1581988 - DNA, 25 bp, Homo sapien
ccagcgggctcgcagcaggaagcct

SEQ ID NO: 1581989 - DNA, 25 bp, Homo sapien
aagcgcacggatgccatgtagggcc

SEQ ID NO: 1581990 - DNA, 25 bp, Homo sapien
gaagcctccgcagtgatgttggccc

SEQ ID NO: 1581991 - DNA, 25 bp, Homo sapien
atgttggcccccgaagcgcacggat

SEQ ID NO: 1581992 - DNA, 25 bp, Homo sapien
tcgtggcccccgatgatctgggccc

SEQ ID NO: 1581993 - DNA, 25 bp, Homo sapien
ctcgtggcccccgatgatctgggcc

SEQ ID NO: 1581994 - DNA, 25 bp, Homo sapien
cgtggcccccgatgatctgggcccc

SEQ ID NO: 1581995 - DNA, 25 bp, Homo sapien
gacgaggcgggaggaacggatgacg

SEQ ID NO: 1581996 - DNA, 25 bp, Homo sapien
gcctgagtcagggacgaggcgggag

SEQ ID NO: 1581997 - DNA, 25 bp, Homo sapien
cctgagtcagggacgaggcgggagg

SEQ ID NO: 1581998 - DNA, 25 bp, Homo sapien
cgaggcgggaggaacggatgacggg

SEQ ID NO: 1581999 - DNA, 25 bp, Homo sapien
agcatcagggcggtggccacagtca

SEQ ID NO: 1582000 - DNA, 25 bp, Homo sapien
ttcacgggcagcatcagggcggtgg

SEQ ID NO: 1582001 - DNA, 25 bp, Homo sapien
cggggggcttcacgggcagcatcag

SEQ ID NO: 1582002 - DNA, 25 bp, Homo sapien
cagcatcagggcggtggccacagtc

SEQ ID NO: 1582003 - DNA, 25 bp, Homo sapien
ccaccctcagccaacggccggaaag

SEQ ID NO: 1582004 - DNA, 25 bp, Homo sapien
tcccaccctcagccaacggccggaa

SEQ ID NO: 1582005 - DNA, 25 bp, Homo sapien
cggccggaaagggggagcctggctg

SEQ ID NO: 1582006 - DNA, 25 bp, Homo sapien
caccctcagccaacggccggaaagg

SEQ ID NO: 1582007 - DNA, 25 bp, Homo sapien
ccaggcgggcgtttctgagaaatcg

SEQ ID NO: 1582008 - DNA, 25 bp, Homo sapien
gcccaggcgggcgtttctgagaaat

SEQ ID NO: 1582009 - DNA, 25 bp, Homo sapien
tggtggctggtaataatcatgttga

SEQ ID NO: 1582010 - DNA, 25 bp, Homo sapien
tgagaaatcgatggtctcaggtggt

SEQ ID NO: 1582011 - DNA, 25 bp, Homo sapien
tgcaggcgtgtggaactttgttccc

SEQ ID NO: 1582012 - DNA, 25 bp, Homo sapien
gagacctggaaaacgtccccagctc

SEQ ID NO: 1582013 - DNA, 25 bp, Homo sapien
cctccgtcgcggagcactgaggcag

SEQ ID NO: 1582014 - DNA, 25 bp, Homo sapien
tagaaggagaattgcccgaagctgc

SEQ ID NO: 1582015 - DNA, 25 bp, Homo sapien
atagcttccggtcgtccaaggctcc

SEQ ID NO: 1582016 - DNA, 25 bp, Homo sapien
ggccagatctgcaaggagtggtggg

SEQ ID NO: 1582017 - DNA, 25 bp, Homo sapien
gcttccggtcgtccaaggctccaga

SEQ ID NO: 1582018 - DNA, 25 bp, Homo sapien
ctatagcttccggtcgtccaaggct

SEQ ID NO: 1582019 - DNA, 25 bp, Homo sapien
ggctgaggttcaggggcggggccga

SEQ ID NO: 1582020 - DNA, 25 bp, Homo sapien
tgaggttcaggggcggggccgacat

SEQ ID NO: 1582021 - DNA, 25 bp, Homo sapien
gaggcggggctgaggttcaggggcg

SEQ ID NO: 1582022 - DNA, 25 bp, Homo sapien
tgggaggcggggctgaggttcaggg

SEQ ID NO: 1582023 - DNA, 25 bp, Homo sapien
gggtgggacccgcagcctccacgcg

SEQ ID NO: 1582024 - DNA, 25 bp, Homo sapien
acagacgcggctcgcgcccaccggg

SEQ ID NO: 1582025 - DNA, 25 bp, Homo sapien
tgaggggacaccccgccagagaggg

SEQ ID NO: 1582026 - DNA, 25 bp, Homo sapien
ctggcgggtgggacccgcagcctcc

SEQ ID NO: 1582027 - DNA, 25 bp, Homo sapien
ggatttattcaccaatgccgcctgg

SEQ ID NO: 1582028 - DNA, 25 bp, Homo sapien
taaatcccgctgtgtaaacgtctgt

SEQ ID NO: 1582029 - DNA, 25 bp, Homo sapien
gatgagtggtgtttgcccagccagt

SEQ ID NO: 1582030 - DNA, 25 bp, Homo sapien
tggagccggtctgcattccgcaatg

SEQ ID NO: 1582031 - DNA, 25 bp, Homo sapien
tgggcctggcgatgctccgactgca

SEQ ID NO: 1582032 - DNA, 25 bp, Homo sapien
cagcttccggagaacaatctcaggt

SEQ ID NO: 1582033 - DNA, 25 bp, Homo sapien
tgatggggccgttgcacacccaggt

SEQ ID NO: 1582034 - DNA, 25 bp, Homo sapien
tgaggaccgacagacatcatccccg

SEQ ID NO: 1582035 - DNA, 25 bp, Homo sapien
aataaaacacgccagagaagcaggg

SEQ ID NO: 1582036 - DNA, 25 bp, Homo sapien
cacgattccgaagggttagactggt

SEQ ID NO: 1582037 - DNA, 25 bp, Homo sapien
ctaatccgggctggaatcctctggc

SEQ ID NO: 1582038 - DNA, 25 bp, Homo sapien
tcttggtgagtctccgttgaccggg

SEQ ID NO: 1582039 - DNA, 25 bp, Homo sapien
tcagcttccccagctttaggcggtt

SEQ ID NO: 1582040 - DNA, 25 bp, Homo sapien
ttggccgcggactgtgcaaagtcca

SEQ ID NO: 1582041 - DNA, 25 bp, Homo sapien
gtgtgtggcccggacctcagcttcc

SEQ ID NO: 1582042 - DNA, 25 bp, Homo sapien
cagtttccctatctccgcagtcggg

SEQ ID NO: 1582043 - DNA, 25 bp, Homo sapien
aagtctgttaaacgtggtccgtgca

SEQ ID NO: 1582044 - DNA, 25 bp, Homo sapien
ggtctggaccccttagcatgcgtgc

SEQ ID NO: 1582045 - DNA, 25 bp, Homo sapien
gctggagatgtttcgcattctttcc

SEQ ID NO: 1582046 - DNA, 25 bp, Homo sapien
tccgtgcagtctgtggtgtcagaag

SEQ ID NO: 1582047 - DNA, 25 bp, Homo sapien
tctcagcggcatctagcattcctcg

SEQ ID NO: 1582048 - DNA, 25 bp, Homo sapien
ttcaagttgcagtcaagtggacggc

SEQ ID NO: 1582049 - DNA, 25 bp, Homo sapien
caatggtggccccttttcaagttgc

SEQ ID NO: 1582050 - DNA, 25 bp, Homo sapien
tctccgaggcgtttccaacttactg

SEQ ID NO: 1582051 - DNA, 25 bp, Homo sapien
tgaattcacatcttggttcgcgttt

SEQ ID NO: 1582052 - DNA, 25 bp, Homo sapien
ggtcagcaacctcaacccagaggta

SEQ ID NO: 1582053 - DNA, 25 bp, Homo sapien
tgagaccctccttttccaagatggc

SEQ ID NO: 1582054 - DNA, 25 bp, Homo sapien
tctcttgcatgatacgcagaatgaa

SEQ ID NO: 1582055 - DNA, 25 bp, Homo sapien
gaccttagcagaccagagattttat

SEQ ID NO: 1582056 - DNA, 25 bp, Homo sapien
taaatctagttcaccttgctcaccc

SEQ ID NO: 1582057 - DNA, 25 bp, Homo sapien
gctcaccctgcggtgacagggacag

SEQ ID NO: 1582058 - DNA, 25 bp, Homo sapien
tgtggcagcgggagttcccggccct

SEQ ID NO: 1582059 - DNA, 25 bp, Homo sapien
ggcaggacccagtttccagagagca

SEQ ID NO: 1582060 - DNA, 25 bp, Homo sapien
tcagtattgtgaccgcggagccaca

SEQ ID NO: 1582061 - DNA, 25 bp, Homo sapien
ttatacctgttgtgagacccgaggg

SEQ ID NO: 1582062 - DNA, 25 bp, Homo sapien
gaaaacttgctctcaaacttcaggg

SEQ ID NO: 1582063 - DNA, 25 bp, Homo sapien
agagcgaatgaccaagagccggacc

SEQ ID NO: 1582064 - DNA, 25 bp, Homo sapien
ggccagagcgaatgaccaagagccg

SEQ ID NO: 1582065 - DNA, 25 bp, Homo sapien
gggcgtgcgggccagagcgaatgac

SEQ ID NO: 1582066 - DNA, 25 bp, Homo sapien
cgtgcgggccagagcgaatgaccaa

SEQ ID NO: 1582067 - DNA, 25 bp, Homo sapien
cggtttctgccgctttattgagcat

SEQ ID NO: 1582068 - DNA, 25 bp, Homo sapien
tttctgccgctttattgagcatccg

SEQ ID NO: 1582069 - DNA, 25 bp, Homo sapien
tttattgagcatccgcgcggccgcc

SEQ ID NO: 1582070 - DNA, 25 bp, Homo sapien
tgccgctttattgagcatccgcgcg

SEQ ID NO: 1582071 - DNA, 25 bp, Homo sapien
cctgcatcttgcggaagtagccctc

SEQ ID NO: 1582072 - DNA, 25 bp, Homo sapien
gggaagcggcgcgcctgcatcttgc

SEQ ID NO: 1582073 - DNA, 25 bp, Homo sapien
atcttgcggaagtagccctcggcct

SEQ ID NO: 1582074 - DNA, 25 bp, Homo sapien
tgcatcttgcggaagtagccctcgg

SEQ ID NO: 1582075 - DNA, 25 bp, Homo sapien
cgccccatcggccgcgcccagcggg

SEQ ID NO: 1582076 - DNA, 25 bp, Homo sapien
gcgccccatcggccgcgcccagcgg

SEQ ID NO: 1582077 - DNA, 25 bp, Homo sapien
gccccatcggccgcgcccagcgggg

SEQ ID NO: 1582078 - DNA, 25 bp, Homo sapien
ctggcgctggacgacgacgccgtct

SEQ ID NO: 1582079 - DNA, 25 bp, Homo sapien
acggcgaccggtactgcgaggagtc

SEQ ID NO: 1582080 - DNA, 25 bp, Homo sapien
cgtgcgcgtcgatggtcacgatgct

SEQ ID NO: 1582081 - DNA, 25 bp, Homo sapien
tggtccacgtcgctgaccgacgagc

SEQ ID NO: 1582082 - DNA, 25 bp, Homo sapien
ctgcagcagccgcggagggttggcc

SEQ ID NO: 1582083 - DNA, 25 bp, Homo sapien
gcagcagccgcggagggttggccac

SEQ ID NO: 1582084 - DNA, 25 bp, Homo sapien
tgcagcagccgcggagggttggcca

SEQ ID NO: 1582085 - DNA, 25 bp, Homo sapien
tcatgagccacttggcgcgcacccc

SEQ ID NO: 1582086 - DNA, 25 bp, Homo sapien
ccgccccgctcttctcggccatcat

SEQ ID NO: 1582087 - DNA, 25 bp, Homo sapien
gctcttctcggccatcatgagccac

SEQ ID NO: 1582088 - DNA, 25 bp, Homo sapien
cttctcggccatcatgagccacttg

SEQ ID NO: 1582089 - DNA, 25 bp, Homo sapien
ccgcgcgcggtgggaggatgacccg

SEQ ID NO: 1582090 - DNA, 25 bp, Homo sapien
tcctccgggatgtgcaccagcggcg

SEQ ID NO: 1582091 - DNA, 25 bp, Homo sapien
tgcacggtggggtagagcgagggcg

SEQ ID NO: 1582092 - DNA, 25 bp, Homo sapien
tccgccatgggttcggcgggcgcgc

SEQ ID NO: 1582093 - DNA, 25 bp, Homo sapien
tggatggtcatgtggcggcgcgcgg

SEQ ID NO: 1582094 - DNA, 25 bp, Homo sapien
cgtccagcggcacgtggatggtcat

SEQ ID NO: 1582095 - DNA, 25 bp, Homo sapien
cttggagcgcgaggcgtccagcggc

SEQ ID NO: 1582096 - DNA, 25 bp, Homo sapien
tcgctgatgagctgcttggagcgcg

SEQ ID NO: 1582097 - DNA, 25 bp, Homo sapien
tggccctgggcagcgtgtggctgaa

SEQ ID NO: 1582098 - DNA, 25 bp, Homo sapien
ccctgggcagcgtgtggctgaaggt

SEQ ID NO: 1582099 - DNA, 25 bp, Homo sapien
tgggcagcgtgtggctgaaggtcac

SEQ ID NO: 1582100 - DNA, 25 bp, Homo sapien
gtcgtccagcgagggcgcgctggcc

SEQ ID NO: 1582101 - DNA, 25 bp, Homo sapien
gtccacgctggcgcgcttcaggctg

SEQ ID NO: 1582102 - DNA, 25 bp, Homo sapien
cacgtccacgctggcgcgcttcagg

SEQ ID NO: 1582103 - DNA, 25 bp, Homo sapien
cacgctggcgcgcttcaggctgccc

SEQ ID NO: 1582104 - DNA, 25 bp, Homo sapien
acgctggcgcgcttcaggctgccca

SEQ ID NO: 1582105 - DNA, 25 bp, Homo sapien
tgctgataaaccgagtcgtggcccc

SEQ ID NO: 1582106 - DNA, 25 bp, Homo sapien
gctcgtcggtgctcaccgacttatt

SEQ ID NO: 1582107 - DNA, 25 bp, Homo sapien
cagctcgtcggtgctcaccgactta

SEQ ID NO: 1582108 - DNA, 25 bp, Homo sapien
attctgctgataaaccgagtcgtgg

SEQ ID NO: 1582109 - DNA, 25 bp, Homo sapien
cggggccgcgggcttctctgcaggt

SEQ ID NO: 1582110 - DNA, 25 bp, Homo sapien
ccgcgggcttctctgcaggtggggc

SEQ ID NO: 1582111 - DNA, 25 bp, Homo sapien
gcctggaagttgcccaccgcgtggc

SEQ ID NO: 1582112 - DNA, 25 bp, Homo sapien
ctggaagttgcccaccgcgtggcag

SEQ ID NO: 1582113 - DNA, 25 bp, Homo sapien
atgcccgccccgatgaggaagccgg

SEQ ID NO: 1582114 - DNA, 25 bp, Homo sapien
caaaggcgaagaccaggatgggctt

SEQ ID NO: 1582115 - DNA, 25 bp, Homo sapien
cggcatacacgtccacagggtggct

SEQ ID NO: 1582116 - DNA, 25 bp, Homo sapien
ctgcggtactgcgtgatctgcgtga

SEQ ID NO: 1582117 - DNA, 25 bp, Homo sapien
gtggtgtccgagatgaccgagttga

SEQ ID NO: 1582118 - DNA, 25 bp, Homo sapien
tggtgtccgagatgaccgagttgaa

SEQ ID NO: 1582119 - DNA, 25 bp, Homo sapien
ccgagatgaccgagttgaagtacat

SEQ ID NO: 1582120 - DNA, 25 bp, Homo sapien
tgtccgagatgaccgagttgaagta

SEQ ID NO: 1582121 - DNA, 25 bp, Homo sapien
gagggctccccacgggtcagcaaga

SEQ ID NO: 1582122 - DNA, 25 bp, Homo sapien
tcagggagggctccccacgggtcag

SEQ ID NO: 1582123 - DNA, 25 bp, Homo sapien
gtcagggagggctccccacgggtca

SEQ ID NO: 1582124 - DNA, 25 bp, Homo sapien
gctccccacgggtcagcaagagggc

SEQ ID NO: 1582125 - DNA, 25 bp, Homo sapien
tgggaagggcagtgaggggccggac

SEQ ID NO: 1582126 - DNA, 25 bp, Homo sapien
ctgggaagggcagtgaggggccgga

SEQ ID NO: 1582127 - DNA, 25 bp, Homo sapien
ggaagggcagtgaggggccggactc

SEQ ID NO: 1582128 - DNA, 25 bp, Homo sapien
aagggcagtgaggggccggactcac

SEQ ID NO: 1582129 - DNA, 25 bp, Homo sapien
cgacacatagaccgcggcgaaggct

SEQ ID NO: 1582130 - DNA, 25 bp, Homo sapien
gacagcgtggcgtgctgggacggga

SEQ ID NO: 1582131 - DNA, 25 bp, Homo sapien
ggcgtgctgggacgggaaggtcttc

SEQ ID NO: 1582132 - DNA, 25 bp, Homo sapien
acatagaccgcggcgaaggctgaca

SEQ ID NO: 1582133 - DNA, 25 bp, Homo sapien
gttgacctcgcaggacgtgcccagg

SEQ ID NO: 1582134 - DNA, 25 bp, Homo sapien
acgtccgtcaccagggctgtggcac

SEQ ID NO: 1582135 - DNA, 25 bp, Homo sapien
taacccgtggccagctggatcacgt

SEQ ID NO: 1582136 - DNA, 25 bp, Homo sapien
ccggagcagatgtcctgcgtgatgt

SEQ ID NO: 1582137 - DNA, 25 bp, Homo sapien
aggtagctcagggtcggggcgcgtc

SEQ ID NO: 1582138 - DNA, 25 bp, Homo sapien
tggaggtagctcagggtcggggcgc

SEQ ID NO: 1582139 - DNA, 25 bp, Homo sapien
gtagctcagggtcggggcgcgtccc

SEQ ID NO: 1582140 - DNA, 25 bp, Homo sapien
tgcagggcggaaggctcggccaggc

SEQ ID NO: 1582141 - DNA, 25 bp, Homo sapien
gcaccgtacgccgcaggaaggagtt

SEQ ID NO: 1582142 - DNA, 25 bp, Homo sapien
accgtacgccgcaggaaggagttga

SEQ ID NO: 1582143 - DNA, 25 bp, Homo sapien
aaccgcaccgtacgccgcaggaagg

SEQ ID NO: 1582144 - DNA, 25 bp, Homo sapien
acaaaccgcaccgtacgccgcagga

SEQ ID NO: 1582145 - DNA, 25 bp, Homo sapien
acagccgggactgcagacagtacaa

SEQ ID NO: 1582146 - DNA, 25 bp, Homo sapien
gtcatagcactggaagcccaccttg

SEQ ID NO: 1582147 - DNA, 25 bp, Homo sapien
catggagagagtgcggtcatagcac

SEQ ID NO: 1582148 - DNA, 25 bp, Homo sapien
tcgttggtctccacgtagggcatgg

SEQ ID NO: 1582149 - DNA, 25 bp, Homo sapien
cagcagcgggatgagctcctcgttg

SEQ ID NO: 1582150 - DNA, 25 bp, Homo sapien
tgagaataaaggcacgcagcacacg

SEQ ID NO: 1582151 - DNA, 25 bp, Homo sapien
ccagccttaagttactctaccatcc

SEQ ID NO: 1582152 - DNA, 25 bp, Homo sapien
ggattacaaacatgacaaacgtgag

SEQ ID NO: 1582153 - DNA, 25 bp, Homo sapien
aggtgtgtgccaaaatggtagcttt

SEQ ID NO: 1582154 - DNA, 25 bp, Homo sapien
agaagcagggcagaagcgtcatgct

SEQ ID NO: 1582155 - DNA, 25 bp, Homo sapien
aagcgtcatgctgtccttcgggatc

SEQ ID NO: 1582156 - DNA, 25 bp, Homo sapien
tcatgctgtccttcgggatcttgtt

SEQ ID NO: 1582157 - DNA, 25 bp, Homo sapien
cagggcagaagcgtcatgctgtcct

SEQ ID NO: 1582158 - DNA, 25 bp, Homo sapien
gtgccgcgggcgccgcaggccgtgg

SEQ ID NO: 1582159 - DNA, 25 bp, Homo sapien
ggtgccgcgggcgccgcaggccgtg

SEQ ID NO: 1582160 - DNA, 25 bp, Homo sapien
gctgcagagagcggcgtccgcgtgg

SEQ ID NO: 1582161 - DNA, 25 bp, Homo sapien
agcacgcggcttccgggcgccccta

SEQ ID NO: 1582162 - DNA, 25 bp, Homo sapien
ccggcccagcacgcggcttccgggc

SEQ ID NO: 1582163 - DNA, 25 bp, Homo sapien
gaggggagaaagcggcgctggaggg

SEQ ID NO: 1582164 - DNA, 25 bp, Homo sapien
gagccagtccccgcgtggtggtggg

SEQ ID NO: 1582165 - DNA, 25 bp, Homo sapien
aggagactgggtccgcgcccccagc

SEQ ID NO: 1582166 - DNA, 25 bp, Homo sapien
gggagccagtccccgcgtggtggtg

SEQ ID NO: 1582167 - DNA, 25 bp, Homo sapien
gcggaggagactgggtccgcgcccc

SEQ ID NO: 1582168 - DNA, 25 bp, Homo sapien
ccggcgcccagcacaaagcgcgtct

SEQ ID NO: 1582169 - DNA, 25 bp, Homo sapien
gccggcgcccagcacaaagcgcgtc

SEQ ID NO: 1582170 - DNA, 25 bp, Homo sapien
gcgccatcgagacgggggcggaggc

SEQ ID NO: 1582171 - DNA, 25 bp, Homo sapien
tcccttcgggcctgcggcggtgacg

SEQ ID NO: 1582172 - DNA, 25 bp, Homo sapien
ggggtctcgggggtctcaggtctgc

SEQ ID NO: 1582173 - DNA, 25 bp, Homo sapien
gggctctttgtctgggcgcgtcctc

SEQ ID NO: 1582174 - DNA, 25 bp, Homo sapien
agggctgcccgggtcacctcagctg

SEQ ID NO: 1582175 - DNA, 25 bp, Homo sapien
cactctccagcatctggcacaataa

SEQ ID NO: 1582176 - DNA, 25 bp, Homo sapien
gctccgaggacaacccctgtcccca

SEQ ID NO: 1582177 - DNA, 25 bp, Homo sapien
gccagcaggacccactgagaagggc

SEQ ID NO: 1582178 - DNA, 25 bp, Homo sapien
cggtgcagctgaacggcgcgcacct

SEQ ID NO: 1582179 - DNA, 25 bp, Homo sapien
ctgagcgcggcgcactgcctggagg

SEQ ID NO: 1582180 - DNA, 25 bp, Homo sapien
acgcgcggccctacatggcgtcggt

SEQ ID NO: 1582181 - DNA, 25 bp, Homo sapien
tacatggcgtcggtgcagctgaacg

SEQ ID NO: 1582182 - DNA, 25 bp, Homo sapien
tcctgggcgcgcactccctgtcgca

SEQ ID NO: 1582183 - DNA, 25 bp, Homo sapien
tgtcgcagccggagccctccaagcg

SEQ ID NO: 1582184 - DNA, 25 bp, Homo sapien
tgtacgacgtgctccgcgcagtgcc

SEQ ID NO: 1582185 - DNA, 25 bp, Homo sapien
acaccatcgaccacgacctcctgct

SEQ ID NO: 1582186 - DNA, 25 bp, Homo sapien
gtgctcttgccagtgctggaccgcg

SEQ ID NO: 1582187 - DNA, 25 bp, Homo sapien
cctggcagcgcgtggaccgcgacgt

SEQ ID NO: 1582188 - DNA, 25 bp, Homo sapien
cgcgacgtggcaccgggaactctct

SEQ ID NO: 1582189 - DNA, 25 bp, Homo sapien
gggcatagtcaaccacgcgggccgc

SEQ ID NO: 1582190 - DNA, 25 bp, Homo sapien
atcgacagcgtcctggcctagggtg

SEQ ID NO: 1582191 - DNA, 25 bp, Homo sapien
catctggttggtctttattgagcac

SEQ ID NO: 1582192 - DNA, 25 bp, Homo sapien
agctatgcggcctggatcgacagcg

SEQ ID NO: 1582193 - DNA, 25 bp, Homo sapien
caaagtcccgagcaatgaagtcatc

SEQ ID NO: 1582194 - DNA, 25 bp, Homo sapien
ggcgctatcgtagaaaaagactgat

SEQ ID NO: 1582195 - DNA, 25 bp, Homo sapien
agggaggacacctgaggccctgtgc

SEQ ID NO: 1582196 - DNA, 25 bp, Homo sapien
ggcagccaggcgctatcgtagaaaa

SEQ ID NO: 1582197 - DNA, 25 bp, Homo sapien
gacctcaggtcacccttcttggcaa

SEQ ID NO: 1582198 - DNA, 25 bp, Homo sapien
cagaggatggccagggggacggtga

SEQ ID NO: 1582199 - DNA, 25 bp, Homo sapien
tgagacggggctcggtgtcccagca

SEQ ID NO: 1582200 - DNA, 25 bp, Homo sapien
gacggtgagacggggctcggtgtcc

SEQ ID NO: 1582201 - DNA, 25 bp, Homo sapien
gacggggctcggtgtcccagcagag

SEQ ID NO: 1582202 - DNA, 25 bp, Homo sapien
tcccggcaccaaatcgaggtcgtgg

SEQ ID NO: 1582203 - DNA, 25 bp, Homo sapien
gagagcacgcagagacagtatagag

SEQ ID NO: 1582204 - DNA, 25 bp, Homo sapien
gagataccagagacacgcagaaaca

SEQ ID NO: 1582205 - DNA, 25 bp, Homo sapien
ggatttaaagacaggccaagaggac

SEQ ID NO: 1582206 - DNA, 25 bp, Homo sapien
tgtccaggttcagcgctctccgcgg

SEQ ID NO: 1582207 - DNA, 25 bp, Homo sapien
ctctccgcgggtgaggcaaggaaac

SEQ ID NO: 1582208 - DNA, 25 bp, Homo sapien
gcaaggaaaccgaggagacgcccga

SEQ ID NO: 1582209 - DNA, 25 bp, Homo sapien
agagggcgtttattggacctgtcct

SEQ ID NO: 1582210 - DNA, 25 bp, Homo sapien
ctggatgcagatggtccagggatct

SEQ ID NO: 1582211 - DNA, 25 bp, Homo sapien
tcacggacggtcctctggatgcaga

SEQ ID NO: 1582212 - DNA, 25 bp, Homo sapien
ctctgctggtcacgcaggcgtccgg

SEQ ID NO: 1582213 - DNA, 25 bp, Homo sapien
gctctgctggtcacgcaggcgtccg

SEQ ID NO: 1582214 - DNA, 25 bp, Homo sapien
cagggcgggctgaggttaaccgcgc

SEQ ID NO: 1582215 - DNA, 25 bp, Homo sapien
agggcgagcggtggctcttgcagca

SEQ ID NO: 1582216 - DNA, 25 bp, Homo sapien
agagtccagggcgagcggtggctct

SEQ ID NO: 1582217 - DNA, 25 bp, Homo sapien
taaccgcgccgaggagagtccaggg

SEQ ID NO: 1582218 - DNA, 25 bp, Homo sapien
tcaggggtagctgaggggcacccgc

SEQ ID NO: 1582219 - DNA, 25 bp, Homo sapien
ctgaggggcacccgccaccagagcc

SEQ ID NO: 1582220 - DNA, 25 bp, Homo sapien
caggggtagctgaggggcacccgcc

SEQ ID NO: 1582221 - DNA, 25 bp, Homo sapien
aggggcacccgccaccagagcccac

SEQ ID NO: 1582222 - DNA, 25 bp, Homo sapien
gcttcaccgccgtggttctgttggg

SEQ ID NO: 1582223 - DNA, 25 bp, Homo sapien
cttgagcatggtgacacagccgcac

SEQ ID NO: 1582224 - DNA, 25 bp, Homo sapien
ttctgttgggcgacttgagcatggt

SEQ ID NO: 1582225 - DNA, 25 bp, Homo sapien
agttcttgatccagcgctgctccca

SEQ ID NO: 1582226 - DNA, 25 bp, Homo sapien
tcctccgtggggcaagcgccaaggt

SEQ ID NO: 1582227 - DNA, 25 bp, Homo sapien
tgcagcctccgcaggtggtcgatct

SEQ ID NO: 1582228 - DNA, 25 bp, Homo sapien
agcctccgcaggtggtcgatcttgg

SEQ ID NO: 1582229 - DNA, 25 bp, Homo sapien
ctccgcaggtggtcgatcttgggct

SEQ ID NO: 1582230 - DNA, 25 bp, Homo sapien
cagggaaggtgcttgtgacgctccc

SEQ ID NO: 1582231 - DNA, 25 bp, Homo sapien
cgacaagattctggtggcaaaagct

SEQ ID NO: 1582232 - DNA, 25 bp, Homo sapien
gccgggacctctgaacgacaagatt

SEQ ID NO: 1582233 - DNA, 25 bp, Homo sapien
gacgctcccatttgaggctggacag

SEQ ID NO: 1582234 - DNA, 25 bp, Homo sapien
gcccggccaaactgcagacgaaggg

SEQ ID NO: 1582235 - DNA, 25 bp, Homo sapien
tggcgaggccgtcgagctgcagggt

SEQ ID NO: 1582236 - DNA, 25 bp, Homo sapien
gctaaccaggccgtcgctggctggc

SEQ ID NO: 1582237 - DNA, 25 bp, Homo sapien
gctgcaggcggctaaccaggccgtc

SEQ ID NO: 1582238 - DNA, 25 bp, Homo sapien
acccacacagagcatggacctgtgc

SEQ ID NO: 1582239 - DNA, 25 bp, Homo sapien
ggaagtggctgccatcccaaaagca

SEQ ID NO: 1582240 - DNA, 25 bp, Homo sapien
catcccaaaagcacccacacagagc

SEQ ID NO: 1582241 - DNA, 25 bp, Homo sapien
acagagcatggacctgtgctaggaa

SEQ ID NO: 1582242 - DNA, 25 bp, Homo sapien
gaagcatgcccagcgaggtgccgtc

SEQ ID NO: 1582243 - DNA, 25 bp, Homo sapien
gtgccgtcccgcagaaagctgtggc

SEQ ID NO: 1582244 - DNA, 25 bp, Homo sapien
tgaccaccatcaattcccgaagcat

SEQ ID NO: 1582245 - DNA, 25 bp, Homo sapien
ggtatccgaggtggccgtatacacg

SEQ ID NO: 1582246 - DNA, 25 bp, Homo sapien
caagactaagacgaggctctggctg

SEQ ID NO: 1582247 - DNA, 25 bp, Homo sapien
tttgcagagtcgtcccatccctgag

SEQ ID NO: 1582248 - DNA, 25 bp, Homo sapien
gctctggctgaggccaatatcccca

SEQ ID NO: 1582249 - DNA, 25 bp, Homo sapien
ctgcccgaaagaggcatcggtgtgg

SEQ ID NO: 1582250 - DNA, 25 bp, Homo sapien
gcccgggcccctggtgactgtactg

SEQ ID NO: 1582251 - DNA, 25 bp, Homo sapien
ctgcacgtggaggagcagccgcccc

SEQ ID NO: 1582252 - DNA, 25 bp, Homo sapien
gcagccgccccctcctacagctgcg

SEQ ID NO: 1582253 - DNA, 25 bp, Homo sapien
cccctcctacagctgcgggcccggg

SEQ ID NO: 1582254 - DNA, 25 bp, Homo sapien
agcagaggcttcatggagaggaggg

SEQ ID NO: 1582255 - DNA, 25 bp, Homo sapien
tgggggagggctccgaggtggggca

SEQ ID NO: 1582256 - DNA, 25 bp, Homo sapien
ctccgaggtgggggagggctccgag

SEQ ID NO: 1582257 - DNA, 25 bp, Homo sapien
ctccgaggtgggggagggctccgag

SEQ ID NO: 1582258 - DNA, 25 bp, Homo sapien
gtggggcagggctccgaggtggggc

SEQ ID NO: 1582259 - DNA, 25 bp, Homo sapien
tccgaggtggggcagggctccgagg

SEQ ID NO: 1582260 - DNA, 25 bp, Homo sapien
ctccgaggtggggcagggctccgag

SEQ ID NO: 1582261 - DNA, 25 bp, Homo sapien
ggcagggctccgaggtggggcaggg

SEQ ID NO: 1582262 - DNA, 25 bp, Homo sapien
cctgcagtgtgttcatgtccagcac

SEQ ID NO: 1582263 - DNA, 25 bp, Homo sapien
agcacaaattcctccgtcttgaggt

SEQ ID NO: 1582264 - DNA, 25 bp, Homo sapien
gcagtgtgttcatgtccagcacaaa

SEQ ID NO: 1582265 - DNA, 25 bp, Homo sapien
gaggttgatcatgaccttgtcaatg

SEQ ID NO: 1582266 - DNA, 25 bp, Homo sapien
tcttgtcaggcgtgttgagaaagtg

SEQ ID NO: 1582267 - DNA, 25 bp, Homo sapien
acagcttgcagagcgaggccttcat

SEQ ID NO: 1582268 - DNA, 25 bp, Homo sapien
aagagcttggtgtggtagtcgcaca

SEQ ID NO: 1582269 - DNA, 25 bp, Homo sapien
cgacgtcggtgatcttggtgcagat

SEQ ID NO: 1582270 - DNA, 25 bp, Homo sapien
ccacagggcccccacctgccacggg

SEQ ID NO: 1582271 - DNA, 25 bp, Homo sapien
cccacctgccacggggccccacctg

SEQ ID NO: 1582272 - DNA, 25 bp, Homo sapien
ccacctgccacggggcccccacctg

SEQ ID NO: 1582273 - DNA, 25 bp, Homo sapien
gcccccacctgccacagggccccca

SEQ ID NO: 1582274 - DNA, 25 bp, Homo sapien
cagtcgtagccggtcaccatgcagt

SEQ ID NO: 1582275 - DNA, 25 bp, Homo sapien
taccatactgggctgcacgtgcagc

SEQ ID NO: 1582276 - DNA, 25 bp, Homo sapien
ggcgcgtgtactcctcgtgcagctt

SEQ ID NO: 1582277 - DNA, 25 bp, Homo sapien
tgcagcaggatgtcccaccagtcgt

SEQ ID NO: 1582278 - DNA, 25 bp, Homo sapien
tgcatagcctttaagtggacggcgg

SEQ ID NO: 1582279 - DNA, 25 bp, Homo sapien
tgacgtccacgatagctgcatagcc

SEQ ID NO: 1582280 - DNA, 25 bp, Homo sapien
ccgcggagctgtagaagacggccat

SEQ ID NO: 1582281 - DNA, 25 bp, Homo sapien
tgcacgatgtggacgctgccgtcgt

SEQ ID NO: 1582282 - DNA, 25 bp, Homo sapien
tcgttggtggccgataggatccgcc

SEQ ID NO: 1582283 - DNA, 25 bp, Homo sapien
taggatccgccatttgagaattgtg

SEQ ID NO: 1582284 - DNA, 25 bp, Homo sapien
ccttgaggtcggtgttggtgagcga

SEQ ID NO: 1582285 - DNA, 25 bp, Homo sapien
ggccgacacacggtccagatcgttg

SEQ ID NO: 1582286 - DNA, 25 bp, Homo sapien
gtctggctggacgcgcacaaaagca

SEQ ID NO: 1582287 - DNA, 25 bp, Homo sapien
cacggggagtccctccttgcgcagg

SEQ ID NO: 1582288 - DNA, 25 bp, Homo sapien
gaagatgttgttcacggggagtccc

SEQ ID NO: 1582289 - DNA, 25 bp, Homo sapien
tctggctggacgcgcacaaaagcac

SEQ ID NO: 1582290 - DNA, 25 bp, Homo sapien
tgagaacttgactcgggagaacttc

SEQ ID NO: 1582291 - DNA, 25 bp, Homo sapien
accttgtagaactgcacgggcgacg

SEQ ID NO: 1582292 - DNA, 25 bp, Homo sapien
caggatctccgtgtcgatacggcac

SEQ ID NO: 1582293 - DNA, 25 bp, Homo sapien
ttgccgccgaacagcgtgagcgacg

SEQ ID NO: 1582294 - DNA, 25 bp, Homo sapien
tgcccgtcggcatctgctgacagga

SEQ ID NO: 1582295 - DNA, 25 bp, Homo sapien
tcacaccattgtgcagccaggacag

SEQ ID NO: 1582296 - DNA, 25 bp, Homo sapien
cagctattagccaggtggtccgcca

SEQ ID NO: 1582297 - DNA, 25 bp, Homo sapien
tggtccgccatgctccagcacttga

SEQ ID NO: 1582298 - DNA, 25 bp, Homo sapien
tccaggatgtggatcatgcgggtca

SEQ ID NO: 1582299 - DNA, 25 bp, Homo sapien
tgatggcctcgtggtgctctgaggg

SEQ ID NO: 1582300 - DNA, 25 bp, Homo sapien
cccaggggtgctccgtgtccaggat

SEQ ID NO: 1582301 - DNA, 25 bp, Homo sapien
gcaggtgatggcctcgtggtgctct

SEQ ID NO: 1582302 - DNA, 25 bp, Homo sapien
agccgagtcgacagctcagggaaca

SEQ ID NO: 1582303 - DNA, 25 bp, Homo sapien
ccaggtaagccggtgtgtgtcccac

SEQ ID NO: 1582304 - DNA, 25 bp, Homo sapien
acagaactgctgtcagccgagtcga

SEQ ID NO: 1582305 - DNA, 25 bp, Homo sapien
cacagcctgcagacgatgacgatga

SEQ ID NO: 1582306 - DNA, 25 bp, Homo sapien
catcgctgcgcaggtccatggtgaa

SEQ ID NO: 1582307 - DNA, 25 bp, Homo sapien
aaggcgatgagatttcggcaggacc

SEQ ID NO: 1582308 - DNA, 25 bp, Homo sapien
tttcggcaggaccaggcgcaggcca

SEQ ID NO: 1582309 - DNA, 25 bp, Homo sapien
cagacgtaggccaagtccatcatcc

SEQ ID NO: 1582310 - DNA, 25 bp, Homo sapien
aattctcaggcttcaccgtaggggt

SEQ ID NO: 1582311 - DNA, 25 bp, Homo sapien
ggtccagcctccaacgcccttagct

SEQ ID NO: 1582312 - DNA, 25 bp, Homo sapien
tattgcccccaaatacgaggcttca

SEQ ID NO: 1582313 - DNA, 25 bp, Homo sapien
tccagacccctataactccgcagtc

SEQ ID NO: 1582314 - DNA, 25 bp, Homo sapien
gtaacaaccagtcgcctgaggcgtg

SEQ ID NO: 1582315 - DNA, 25 bp, Homo sapien
tggtcggcccgtgcgccaagctcag

SEQ ID NO: 1582316 - DNA, 25 bp, Homo sapien
gggcgtccgcggtgcgatcttccct

SEQ ID NO: 1582317 - DNA, 25 bp, Homo sapien
tgcgatcttccctagcgcctcgggt

SEQ ID NO: 1582318 - DNA, 25 bp, Homo sapien
tctgttgactgccaagagctgcgtg

SEQ ID NO: 1582319 - DNA, 25 bp, Homo sapien
gacacaggagctatcaggcaggagt

SEQ ID NO: 1582320 - DNA, 25 bp, Homo sapien
tcctcacttgagcttcagaccgggc

SEQ ID NO: 1582321 - DNA, 25 bp, Homo sapien
cagaatgacgaggataaaaccggct

SEQ ID NO: 1582322 - DNA, 25 bp, Homo sapien
tgctccaggtaggcggacaggagca

SEQ ID NO: 1582323 - DNA, 25 bp, Homo sapien
ctgctccaggtaggcggacaggagc

SEQ ID NO: 1582324 - DNA, 25 bp, Homo sapien
caggaaatccaggtgccgattactg

SEQ ID NO: 1582325 - DNA, 25 bp, Homo sapien
ggaaatccaggtgccgattactgac

SEQ ID NO: 1582326 - DNA, 25 bp, Homo sapien
ctgccgcttcccctccaggtcagca

SEQ ID NO: 1582327 - DNA, 25 bp, Homo sapien
tgccgcttcccctccaggtcagcac

SEQ ID NO: 1582328 - DNA, 25 bp, Homo sapien
cttcatctgccgcttcccctccagg

SEQ ID NO: 1582329 - DNA, 25 bp, Homo sapien
catctgccgcttcccctccaggtca

SEQ ID NO: 1582330 - DNA, 25 bp, Homo sapien
aaaaaagagccacgtcccatgtgag

SEQ ID NO: 1582331 - DNA, 25 bp, Homo sapien
ttgccatggaaactgtcacctcggc

SEQ ID NO: 1582332 - DNA, 25 bp, Homo sapien
agagggaggcatcgtccggttgcca

SEQ ID NO: 1582333 - DNA, 25 bp, Homo sapien
ccaaggccggatgttctgagcagag

SEQ ID NO: 1582334 - DNA, 25 bp, Homo sapien
atgaggtccatgtactggcagacag

SEQ ID NO: 1582335 - DNA, 25 bp, Homo sapien
ctgttgtctagcattgctgtgtaca

SEQ ID NO: 1582336 - DNA, 25 bp, Homo sapien
tgttgtctagcattgctgtgtacac

SEQ ID NO: 1582337 - DNA, 25 bp, Homo sapien
agaagaaccgaagcagccgctcctc

SEQ ID NO: 1582338 - DNA, 25 bp, Homo sapien
gaagaaccgaagcagccgctcctcc

SEQ ID NO: 1582339 - DNA, 25 bp, Homo sapien
agcactcgcggggtgtataggcggg

SEQ ID NO: 1582340 - DNA, 25 bp, Homo sapien
gcttgaggacggctcgcagacgccg

SEQ ID NO: 1582341 - DNA, 25 bp, Homo sapien
cggctgatgcgctggaagcactcgc

SEQ ID NO: 1582342 - DNA, 25 bp, Homo sapien
acggctcgcagacgccggctgatgc

SEQ ID NO: 1582343 - DNA, 25 bp, Homo sapien
gccctcatcctccaggtagcgaaga

SEQ ID NO: 1582344 - DNA, 25 bp, Homo sapien
tctcctccggtcctccccacggcca

SEQ ID NO: 1582345 - DNA, 25 bp, Homo sapien
cctcatcctccaggtagcgaagaac

SEQ ID NO: 1582346 - DNA, 25 bp, Homo sapien
ctcctccgcgccttgctcctgccct

SEQ ID NO: 1582347 - DNA, 25 bp, Homo sapien
tcctgctcctccccggagcggttca

SEQ ID NO: 1582348 - DNA, 25 bp, Homo sapien
cggagcggttcatgaaatcgttcca

SEQ ID NO: 1582349 - DNA, 25 bp, Homo sapien
agcggttcatgaaatcgttccagac

SEQ ID NO: 1582350 - DNA, 25 bp, Homo sapien
cccggagcggttcatgaaatcgttc

SEQ ID NO: 1582351 - DNA, 25 bp, Homo sapien
ttcattaggagatcagaagtgggcg

SEQ ID NO: 1582352 - DNA, 25 bp, Homo sapien
gtgaaacactcctgcaatcgttgga

SEQ ID NO: 1582353 - DNA, 25 bp, Homo sapien
gaatccaggagctcgaaggttccag

SEQ ID NO: 1582354 - DNA, 25 bp, Homo sapien
atggcctggccgtaggagaactgcc

SEQ ID NO: 1582355 - DNA, 25 bp, Homo sapien
ctcggcaaagatgcctggtgatgca

SEQ ID NO: 1582356 - DNA, 25 bp, Homo sapien
gtggcgttgttgcaggcctcggcaa

SEQ ID NO: 1582357 - DNA, 25 bp, Homo sapien
gttgttgcaggcctcggcaaagatg

SEQ ID NO: 1582358 - DNA, 25 bp, Homo sapien
gcgttgttgcaggcctcggcaaaga

SEQ ID NO: 1582359 - DNA, 25 bp, Homo sapien
gttccgcactgcctggttgatgaag

SEQ ID NO: 1582360 - DNA, 25 bp, Homo sapien
gccttgggcacgaggtctgagttcc

SEQ ID NO: 1582361 - DNA, 25 bp, Homo sapien
ttccgcctggaagccgagagtctct

SEQ ID NO: 1582362 - DNA, 25 bp, Homo sapien
tgaagtgctgtttccgcctggaagc

SEQ ID NO: 1582363 - DNA, 25 bp, Homo sapien
tagggcaggcaggcagctgggaagg

SEQ ID NO: 1582364 - DNA, 25 bp, Homo sapien
ctgggagctggctagggcaggcagg

SEQ ID NO: 1582365 - DNA, 25 bp, Homo sapien
tgggagctggctagggcaggcaggc

SEQ ID NO: 1582366 - DNA, 25 bp, Homo sapien
ggcaggcaggcagctgggaaggggc

SEQ ID NO: 1582367 - DNA, 25 bp, Homo sapien
ctcagggtcaaggccggccaggatc

SEQ ID NO: 1582368 - DNA, 25 bp, Homo sapien
acagccatggcccgcttggtttccc

SEQ ID NO: 1582369 - DNA, 25 bp, Homo sapien
ggatctccgagaagggccctaccac

SEQ ID NO: 1582370 - DNA, 25 bp, Homo sapien
ggtcaaggccggccaggatctccga

SEQ ID NO: 1582371 - DNA, 25 bp, Homo sapien
catcctcacatcacaggaagcagat

SEQ ID NO: 1582372 - DNA, 25 bp, Homo sapien
gaagcagatacaattgtgaagacgg

SEQ ID NO: 1582373 - DNA, 25 bp, Homo sapien
tcatcctcacatcacaggaagcaga

SEQ ID NO: 1582374 - DNA, 25 bp, Homo sapien
atacaattgtgaagacgggctgggt

SEQ ID NO: 1582375 - DNA, 25 bp, Homo sapien
tcgaggttggcatgatggcaccact

SEQ ID NO: 1582376 - DNA, 25 bp, Homo sapien
aggaggtcgaggttggcatgatggc

SEQ ID NO: 1582377 - DNA, 25 bp, Homo sapien
gaggtcgaggttggcatgatggcac

SEQ ID NO: 1582378 - DNA, 25 bp, Homo sapien
ggtcgaggttggcatgatggcacca

SEQ ID NO: 1582379 - DNA, 25 bp, Homo sapien
ttggggggaggtaggcgcgcaccgc

SEQ ID NO: 1582380 - DNA, 25 bp, Homo sapien
aggtaggcgcgcaccgcagccaccc

SEQ ID NO: 1582381 - DNA, 25 bp, Homo sapien
gggaggtaggcgcgcaccgcagcca

SEQ ID NO: 1582382 - DNA, 25 bp, Homo sapien
gcgcaccgcagccacccggcacctg

SEQ ID NO: 1582383 - DNA, 25 bp, Homo sapien
tgggcgtgggagctcatgtaatccc

SEQ ID NO: 1582384 - DNA, 25 bp, Homo sapien
gctgtgactgcaataccgcgcgctc

SEQ ID NO: 1582385 - DNA, 25 bp, Homo sapien
gtgactgcaataccgcgcgctccag

SEQ ID NO: 1582386 - DNA, 25 bp, Homo sapien
actgggcgtgggagctcatgtaatc

SEQ ID NO: 1582387 - DNA, 25 bp, Homo sapien
gaccttcgcacaggcggctcgggtt

SEQ ID NO: 1582388 - DNA, 25 bp, Homo sapien
aggagacgctcagaaaaataaccac

SEQ ID NO: 1582389 - DNA, 25 bp, Homo sapien
tcacagccaagcctcgttcacagga

SEQ ID NO: 1582390 - DNA, 25 bp, Homo sapien
gctgcttccaagacacgatttcccg

SEQ ID NO: 1582391 - DNA, 25 bp, Homo sapien
tccgggccgcactcggggttctcca

SEQ ID NO: 1582392 - DNA, 25 bp, Homo sapien
actcggggttctccagcgcgaccat

SEQ ID NO: 1582393 - DNA, 25 bp, Homo sapien
gcactcggggttctccagcgcgacc

SEQ ID NO: 1582394 - DNA, 25 bp, Homo sapien
gccgcactcggggttctccagcgcg

SEQ ID NO: 1582395 - DNA, 25 bp, Homo sapien
cgccgccgcccggcagggccttcac

SEQ ID NO: 1582396 - DNA, 25 bp, Homo sapien
gcagggccttcaccgggccgggcag

SEQ ID NO: 1582397 - DNA, 25 bp, Homo sapien
cgccgcccggcagggccttcaccgg

SEQ ID NO: 1582398 - DNA, 25 bp, Homo sapien
ggcagggccttcaccgggccgggca

SEQ ID NO: 1582399 - DNA, 25 bp, Homo sapien
ggtgcccggcagatggcacgcgcgg

SEQ ID NO: 1582400 - DNA, 25 bp, Homo sapien
tgaattatcccggtcttaggcactt

SEQ ID NO: 1582401 - DNA, 25 bp, Homo sapien
gcggtgtcgctccttcggatcccaa

SEQ ID NO: 1582402 - DNA, 25 bp, Homo sapien
cggttggaggtatccccgctgtgaa

SEQ ID NO: 1582403 - DNA, 25 bp, Homo sapien
tgttgccgtccgagacatctggccc

SEQ ID NO: 1582404 - DNA, 25 bp, Homo sapien
tccgagacatctggcccactcggga

SEQ ID NO: 1582405 - DNA, 25 bp, Homo sapien
gcctgttttattggcggcctgggcg

SEQ ID NO: 1582406 - DNA, 25 bp, Homo sapien
ctgggctagggggtggctcgggtgg

SEQ ID NO: 1582407 - DNA, 25 bp, Homo sapien
ttgtggcttgggcgttgctgttgag

SEQ ID NO: 1582408 - DNA, 25 bp, Homo sapien
gcgttgctgttgagttgtgtgatgg

SEQ ID NO: 1582409 - DNA, 25 bp, Homo sapien
aagttgtggcttgggcgttgctgtt

SEQ ID NO: 1582410 - DNA, 25 bp, Homo sapien
gagaagttgtggcttgggcgttgct

SEQ ID NO: 1582411 - DNA, 25 bp, Homo sapien
tctgcattgaaatgtttgctgggtg

SEQ ID NO: 1582412 - DNA, 25 bp, Homo sapien
tgccccccattgctgggcaccgtgg

SEQ ID NO: 1582413 - DNA, 25 bp, Homo sapien
cattgaaatgtttgctgggtgcccc

SEQ ID NO: 1582414 - DNA, 25 bp, Homo sapien
tgcattgaaatgtttgctgggtgcc

SEQ ID NO: 1582415 - DNA, 25 bp, Homo sapien
ctggaccgggagaggacactgtctt

SEQ ID NO: 1582416 - DNA, 25 bp, Homo sapien
cgggaccgcgggagaatagatttct

SEQ ID NO: 1582417 - DNA, 25 bp, Homo sapien
tgctttaagctgcaacgtgtggctg

SEQ ID NO: 1582418 - DNA, 25 bp, Homo sapien
caagccaggacgcaccttgatctgg

SEQ ID NO: 1582419 - DNA, 25 bp, Homo sapien
cagtgtgggccgatcctgtttacct

SEQ ID NO: 1582420 - DNA, 25 bp, Homo sapien
tgatggaccgaaggctctggtgtct

SEQ ID NO: 1582421 - DNA, 25 bp, Homo sapien
tgaaacccctgaaccaagatcactg

SEQ ID NO: 1582422 - DNA, 25 bp, Homo sapien
aggagccacagctgacgccaaaaag

SEQ ID NO: 1582423 - DNA, 25 bp, Homo sapien
tcaggtctgacttttgatgccaaaa

SEQ ID NO: 1582424 - DNA, 25 bp, Homo sapien
ccccgtgcacctgcccacctcggag

SEQ ID NO: 1582425 - DNA, 25 bp, Homo sapien
ccgcctcccgtgcaccagggtctgc

SEQ ID NO: 1582426 - DNA, 25 bp, Homo sapien
cttttgatgccaaaatctgagcccc

SEQ ID NO: 1582427 - DNA, 25 bp, Homo sapien
taagggtcacgcatctgtacagttg

SEQ ID NO: 1582428 - DNA, 25 bp, Homo sapien
tccgtgggacccgtaagtggctgtc

SEQ ID NO: 1582429 - DNA, 25 bp, Homo sapien
gagaaaggcggcttctggaaccttc

SEQ ID NO: 1582430 - DNA, 25 bp, Homo sapien
ctgcgtactgagtgggtgccccaca

SEQ ID NO: 1582431 - DNA, 25 bp, Homo sapien
tcagtgcctgcaaactggcggtgct

SEQ ID NO: 1582432 - DNA, 25 bp, Homo sapien
agtgcctgcaaactggcggtgctcc

SEQ ID NO: 1582433 - DNA, 25 bp, Homo sapien
ctccccactggcataggtaatgatg

SEQ ID NO: 1582434 - DNA, 25 bp, Homo sapien
tgcctgcaaactggcggtgctccat

SEQ ID NO: 1582435 - DNA, 25 bp, Homo sapien
cggggccaattttaaagcgcagtct

SEQ ID NO: 1582436 - DNA, 25 bp, Homo sapien
agtcggggccaattttaaagcgcag

SEQ ID NO: 1582437 - DNA, 25 bp, Homo sapien
caattttaaagcgcagtcttttcct

SEQ ID NO: 1582438 - DNA, 25 bp, Homo sapien
gccaattttaaagcgcagtcttttc

SEQ ID NO: 1582439 - DNA, 25 bp, Homo sapien
gtgggagcccaaggtgggaggacag

SEQ ID NO: 1582440 - DNA, 25 bp, Homo sapien
ctttaatatactaagttaaatccag

SEQ ID NO: 1582441 - DNA, 25 bp, Homo sapien
atatactaagttaaatccagggccg

SEQ ID NO: 1582442 - DNA, 25 bp, Homo sapien
ctgtgggagcccaaggtgggaggac

SEQ ID NO: 1582443 - DNA, 25 bp, Homo sapien
gaggtcaggactgtaaaggaatcag

SEQ ID NO: 1582444 - DNA, 25 bp, Homo sapien
gagccacagctcttggccctagagg

SEQ ID NO: 1582445 - DNA, 25 bp, Homo sapien
acctgaggctggaggcgttccaagc

SEQ ID NO: 1582446 - DNA, 25 bp, Homo sapien
ccaggtgaggtcaggactgtaaagg

SEQ ID NO: 1582447 - DNA, 25 bp, Homo sapien
aaactgctgaccgtgggaaagccct

SEQ ID NO: 1582448 - DNA, 25 bp, Homo sapien
tgccggcggctcttccaatgtaaac

SEQ ID NO: 1582449 - DNA, 25 bp, Homo sapien
tggtgtcccctgtgaaacggtagta

SEQ ID NO: 1582450 - DNA, 25 bp, Homo sapien
tagacgccatgctgtcaggtgagcc

SEQ ID NO: 1582451 - DNA, 25 bp, Homo sapien
agatgagcatctaccacttcgcggg

SEQ ID NO: 1582452 - DNA, 25 bp, Homo sapien
cctgagccttgtctgaagtgaccaa

SEQ ID NO: 1582453 - DNA, 25 bp, Homo sapien
caagcgggtctttgcggttacagag

SEQ ID NO: 1582454 - DNA, 25 bp, Homo sapien
gggcctgccattacgtgaccgtgcg

SEQ ID NO: 1582455 - DNA, 25 bp, Homo sapien
gccgtttgggctcaagacacacaca

SEQ ID NO: 1582456 - DNA, 25 bp, Homo sapien
gccgaccggggagccaggaatgagg

SEQ ID NO: 1582457 - DNA, 25 bp, Homo sapien
gggccgtttgggctcaagacacaca

SEQ ID NO: 1582458 - DNA, 25 bp, Homo sapien
agccgggccgtttgggctcaagaca

SEQ ID NO: 1582459 - DNA, 25 bp, Homo sapien
gctgtcaacagacagtttattctat

SEQ ID NO: 1582460 - DNA, 25 bp, Homo sapien
tagaatggaatgagcgctcctccgc

SEQ ID NO: 1582461 - DNA, 25 bp, Homo sapien
tcctccccgagtgactggtttggcc

SEQ ID NO: 1582462 - DNA, 25 bp, Homo sapien
ggaatgagcgctcctccgcattcct

SEQ ID NO: 1582463 - DNA, 25 bp, Homo sapien
tccatcctcaggacggttcactgca

SEQ ID NO: 1582464 - DNA, 25 bp, Homo sapien
gccactgatgttggcgcctgcaccc

SEQ ID NO: 1582465 - DNA, 25 bp, Homo sapien
atccccgagtgggactggaccacgg

SEQ ID NO: 1582466 - DNA, 25 bp, Homo sapien
ggttcactgcagacctaccaagacc

SEQ ID NO: 1582467 - DNA, 25 bp, Homo sapien
tcactagcgggtacaagcctcgggc

SEQ ID NO: 1582468 - DNA, 25 bp, Homo sapien
ctcacaccagggggaggaaagccgc

SEQ ID NO: 1582469 - DNA, 25 bp, Homo sapien
tcacaccagggggaggaaagccgcc

SEQ ID NO: 1582470 - DNA, 25 bp, Homo sapien
cctcacaccagggggaggaaagccg

SEQ ID NO: 1582471 - DNA, 25 bp, Homo sapien
agttgtgtcagaagctgcggagtca

SEQ ID NO: 1582472 - DNA, 25 bp, Homo sapien
agggcgcctccgttggggccatgga

SEQ ID NO: 1582473 - DNA, 25 bp, Homo sapien
gctggacgccgctccaggagggagg

SEQ ID NO: 1582474 - DNA, 25 bp, Homo sapien
tcagctgtgcggctcaggaccccac

SEQ ID NO: 1582475 - DNA, 25 bp, Homo sapien
gcggtctctgccatccaacccaggt

SEQ ID NO: 1582476 - DNA, 25 bp, Homo sapien
ccaacccaggtcaccaccggcagct

SEQ ID NO: 1582477 - DNA, 25 bp, Homo sapien
ccactgaggctgccgcggccaccag

SEQ ID NO: 1582478 - DNA, 25 bp, Homo sapien
ctgtgatgatggcagcggtctctgc

SEQ ID NO: 1582479 - DNA, 25 bp, Homo sapien
tgttcatgtcatcgggcagcgccgt

SEQ ID NO: 1582480 - DNA, 25 bp, Homo sapien
gggcgcccgagttgttgttcatgtc

SEQ ID NO: 1582481 - DNA, 25 bp, Homo sapien
cgcccgagttgttgttcatgtcatc

SEQ ID NO: 1582482 - DNA, 25 bp, Homo sapien
gagttgttgttcatgtcatcgggca

SEQ ID NO: 1582483 - DNA, 25 bp, Homo sapien
gcaggcagctcgtagtggtggaaga

SEQ ID NO: 1582484 - DNA, 25 bp, Homo sapien
aggcagctcgtagtggtggaagaag

SEQ ID NO: 1582485 - DNA, 25 bp, Homo sapien
cagctcgtagtggtggaagaagtag

SEQ ID NO: 1582486 - DNA, 25 bp, Homo sapien
gcagctcgtagtggtggaagaagta

SEQ ID NO: 1582487 - DNA, 25 bp, Homo sapien
ccacagggcatcctccccggctgca

SEQ ID NO: 1582488 - DNA, 25 bp, Homo sapien
tgggccgaccccacagggcatcctc

SEQ ID NO: 1582489 - DNA, 25 bp, Homo sapien
gaccccacagggcatcctccccggc

SEQ ID NO: 1582490 - DNA, 25 bp, Homo sapien
tgcccgcttgggccgaccccacagg

SEQ ID NO: 1582491 - DNA, 25 bp, Homo sapien
agggccaggctgctatactgcccat

SEQ ID NO: 1582492 - DNA, 25 bp, Homo sapien
tatactgcccattgaagcggtagtg

SEQ ID NO: 1582493 - DNA, 25 bp, Homo sapien
caggctgctatactgcccattgaag

SEQ ID NO: 1582494 - DNA, 25 bp, Homo sapien
tgaagcggtagtgataggcatagaa

SEQ ID NO: 1582495 - DNA, 25 bp, Homo sapien
tggggttcccgcgtggcgcagccac

SEQ ID NO: 1582496 - DNA, 25 bp, Homo sapien
ccctggggttcccgcgtggcgcagc

SEQ ID NO: 1582497 - DNA, 25 bp, Homo sapien
gcccctggggttcccgcgtggcgca

SEQ ID NO: 1582498 - DNA, 25 bp, Homo sapien
gggttcccgcgtggcgcagccacca

SEQ ID NO: 1582499 - DNA, 25 bp, Homo sapien
gatggcgtcatactggtccgcgagc

SEQ ID NO: 1582500 - DNA, 25 bp, Homo sapien
ccgcgagccacacgatgaggatgat

SEQ ID NO: 1582501 - DNA, 25 bp, Homo sapien
tgaagaactccgacatgatggcctc

SEQ ID NO: 1582502 - DNA, 25 bp, Homo sapien
agccaatgccgcttgctggtgctgg

SEQ ID NO: 1582503 - DNA, 25 bp, Homo sapien
acgagggccaggatgacggtcagca

SEQ ID NO: 1582504 - DNA, 25 bp, Homo sapien
gccaggatgacggtcagcaggggcg

SEQ ID NO: 1582505 - DNA, 25 bp, Homo sapien
tgcggggaaggcgatggccatgttc

SEQ ID NO: 1582506 - DNA, 25 bp, Homo sapien
gggaaggcgatggccatgttcatct

SEQ ID NO: 1582507 - DNA, 25 bp, Homo sapien
ctgcggggaaggcgatggccatgtt

SEQ ID NO: 1582508 - DNA, 25 bp, Homo sapien
cggggaaggcgatggccatgttcat

SEQ ID NO: 1582509 - DNA, 25 bp, Homo sapien
tgcgggcacagggcggcgggcgccc

SEQ ID NO: 1582510 - DNA, 25 bp, Homo sapien
cgccctgcgccggcgggacactcac

SEQ ID NO: 1582511 - DNA, 25 bp, Homo sapien
ggtgagggcctggaggacgcccgcc

SEQ ID NO: 1582512 - DNA, 25 bp, Homo sapien
cgggcgcccggtgagggcctggagg

SEQ ID NO: 1582513 - DNA, 25 bp, Homo sapien
atctggtggtgtgagtaccgcagca

SEQ ID NO: 1582514 - DNA, 25 bp, Homo sapien
acgaagatctggtggtgtgagtacc

SEQ ID NO: 1582515 - DNA, 25 bp, Homo sapien
atgaagacgaagatctggtggtgtg

SEQ ID NO: 1582516 - DNA, 25 bp, Homo sapien
aagatctggtggtgtgagtaccgca

SEQ ID NO: 1582517 - DNA, 25 bp, Homo sapien
gcgcgcaggaagcgctatgaggggc

SEQ ID NO: 1582518 - DNA, 25 bp, Homo sapien
caggaagcgctatgaggggctgcga

SEQ ID NO: 1582519 - DNA, 25 bp, Homo sapien
gaagcgctatgaggggctgcgaggg

SEQ ID NO: 1582520 - DNA, 25 bp, Homo sapien
cgcaggaagcgctatgaggggctgc

SEQ ID NO: 1582521 - DNA, 25 bp, Homo sapien
cacatgctcacaaagcggtagtgct

SEQ ID NO: 1582522 - DNA, 25 bp, Homo sapien
gcccgacaccacattccgcaggaag

SEQ ID NO: 1582523 - DNA, 25 bp, Homo sapien
aaagcggtagtgctcgcccgacacc

SEQ ID NO: 1582524 - DNA, 25 bp, Homo sapien
ggccaggtaggacgtccgcgccatc

SEQ ID NO: 1582525 - DNA, 25 bp, Homo sapien
ttgttctcctcgttctcggccaggc

SEQ ID NO: 1582526 - DNA, 25 bp, Homo sapien
gtagcccaggaactcatccagcagc

SEQ ID NO: 1582527 - DNA, 25 bp, Homo sapien
gaagcggtccccgaagcactggtcc

SEQ ID NO: 1582528 - DNA, 25 bp, Homo sapien
catgaggatgtcatcgtagcccagg

SEQ ID NO: 1582529 - DNA, 25 bp, Homo sapien
ggtgggtgaatcagggagccgggag

SEQ ID NO: 1582530 - DNA, 25 bp, Homo sapien
ggggcagaccccagtgcttcctgca

SEQ ID NO: 1582531 - DNA, 25 bp, Homo sapien
cattcttaggaaacccatccaggac

SEQ ID NO: 1582532 - DNA, 25 bp, Homo sapien
tgccccagctggctccattgctgag

SEQ ID NO: 1582533 - DNA, 25 bp, Homo sapien
tgaccaccatgacggggatgctcag

SEQ ID NO: 1582534 - DNA, 25 bp, Homo sapien
cgaaggaagccatactctagtgagt

SEQ ID NO: 1582535 - DNA, 25 bp, Homo sapien
tagtgagtactccacgatgtactcg

SEQ ID NO: 1582536 - DNA, 25 bp, Homo sapien
ctggcgggtggcctgcgacaggcga

SEQ ID NO: 1582537 - DNA, 25 bp, Homo sapien
cttgaacaccttgggctcgatgtcc

SEQ ID NO: 1582538 - DNA, 25 bp, Homo sapien
tgctactcggcggcttgaacacctt

SEQ ID NO: 1582539 - DNA, 25 bp, Homo sapien
ctctgtgctactcggcggcttgaac

SEQ ID NO: 1582540 - DNA, 25 bp, Homo sapien
ggcttgaacaccttgggctcgatgt

SEQ ID NO: 1582541 - DNA, 25 bp, Homo sapien
cagctactctcaaaggcccgagtct

SEQ ID NO: 1582542 - DNA, 25 bp, Homo sapien
gacaggccgagggtcttgcttcaga

SEQ ID NO: 1582543 - DNA, 25 bp, Homo sapien
tgggcccagagctcttagctttcag

SEQ ID NO: 1582544 - DNA, 25 bp, Homo sapien
cccaaaccctgactgctgaagcaaa

SEQ ID NO: 1582545 - DNA, 25 bp, Homo sapien
actgtaggaagacgggcgcgcggct

SEQ ID NO: 1582546 - DNA, 25 bp, Homo sapien
aggatgccctcacgcggccacttgt

SEQ ID NO: 1582547 - DNA, 25 bp, Homo sapien
cgcgcggctcgagttgtgccgcact

SEQ ID NO: 1582548 - DNA, 25 bp, Homo sapien
tgtgccgcacttccacacgcaggat

SEQ ID NO: 1582549 - DNA, 25 bp, Homo sapien
cagttgatgggcgagcgggagaaga

SEQ ID NO: 1582550 - DNA, 25 bp, Homo sapien
gcgagcgggagaagacgatgtggat

SEQ ID NO: 1582551 - DNA, 25 bp, Homo sapien
tgggcgagcgggagaagacgatgtg

SEQ ID NO: 1582552 - DNA, 25 bp, Homo sapien
agaagacgatgtggatgtaggccag

SEQ ID NO: 1582553 - DNA, 25 bp, Homo sapien
tcaaaatcacaagccagagagcctg

SEQ ID NO: 1582554 - DNA, 25 bp, Homo sapien
cagactctcagggaagaattgatca

SEQ ID NO: 1582555 - DNA, 25 bp, Homo sapien
tggtgagggtcacgtctacctgctg

SEQ ID NO: 1582556 - DNA, 25 bp, Homo sapien
tgctggcaggtgcaccaatgcccgg

SEQ ID NO: 1582557 - DNA, 25 bp, Homo sapien
agccactcgcatgccctgggtggtc

SEQ ID NO: 1582558 - DNA, 25 bp, Homo sapien
tggtccagtcccctacactccatga

SEQ ID NO: 1582559 - DNA, 25 bp, Homo sapien
aaatgctcccatgggcccctggcca

SEQ ID NO: 1582560 - DNA, 25 bp, Homo sapien
tggccaccctctgcccgcaacctgg

SEQ ID NO: 1582561 - DNA, 25 bp, Homo sapien
gaagagccgcgaataggtgacagcc

SEQ ID NO: 1582562 - DNA, 25 bp, Homo sapien
cttgagcagcacgaagaactcgaag

SEQ ID NO: 1582563 - DNA, 25 bp, Homo sapien
agagccgcgaataggtgacagccat

SEQ ID NO: 1582564 - DNA, 25 bp, Homo sapien
cgaagaactcgaagagacggcggaa

SEQ ID NO: 1582565 - DNA, 25 bp, Homo sapien
cttgaagaacagcgcgtggaagagc

SEQ ID NO: 1582566 - DNA, 25 bp, Homo sapien
agccggtcgcgcacgttgatgaggg

SEQ ID NO: 1582567 - DNA, 25 bp, Homo sapien
gtggaagagccggtcgcgcacgttg

SEQ ID NO: 1582568 - DNA, 25 bp, Homo sapien
ttgaagaacagcgcgtggaagagcc

SEQ ID NO: 1582569 - DNA, 25 bp, Homo sapien
ctgcgggctccacgtgctccgacat

SEQ ID NO: 1582570 - DNA, 25 bp, Homo sapien
gacccgcaagtgtccgagggcgcct

SEQ ID NO: 1582571 - DNA, 25 bp, Homo sapien
gtcgcgccctaacgacccgcaagtg

SEQ ID NO: 1582572 - DNA, 25 bp, Homo sapien
cctaacgacccgcaagtgtccgagg

SEQ ID NO: 1582573 - DNA, 25 bp, Homo sapien
gcctcccagcgtcgcgccctaacga

SEQ ID NO: 1582574 - DNA, 25 bp, Homo sapien
tccgctttctcgtccggctgcggcg

SEQ ID NO: 1582575 - DNA, 25 bp, Homo sapien
tagcgagtcgccacgccgggcaaga

SEQ ID NO: 1582576 - DNA, 25 bp, Homo sapien
gcgctgctgacgctagcgagtcgcc

SEQ ID NO: 1582577 - DNA, 25 bp, Homo sapien
gctgcggcgctgctgacgctagcga

SEQ ID NO: 1582578 - DNA, 25 bp, Homo sapien
gccgctccagggggcgggcctgcat

SEQ ID NO: 1582579 - DNA, 25 bp, Homo sapien
ctcggccgctccagggggcgggcct

SEQ ID NO: 1582580 - DNA, 25 bp, Homo sapien
ggccgctccagggggcgggcctgca

SEQ ID NO: 1582581 - DNA, 25 bp, Homo sapien
tcggccgctccagggggcgggcctg

SEQ ID NO: 1582582 - DNA, 25 bp, Homo sapien
gtctggtgtagaccgggagcgtggg

SEQ ID NO: 1582583 - DNA, 25 bp, Homo sapien
tgtagaccgggagcgtgggtgggac

SEQ ID NO: 1582584 - DNA, 25 bp, Homo sapien
tgtctggtgtagaccggcagcgtgg

SEQ ID NO: 1582585 - DNA, 25 bp, Homo sapien
tgtctggtgtagaccgggagcgtgg

SEQ ID NO: 1582586 - DNA, 25 bp, Homo sapien
gtgtctggtgtagaccggcagcgtg

SEQ ID NO: 1582587 - DNA, 25 bp, Homo sapien
tgtagaccgggagcgtgggtgggac

SEQ ID NO: 1582588 - DNA, 25 bp, Homo sapien
ttgtctggtgtagaccgggagcgtg

SEQ ID NO: 1582589 - DNA, 25 bp, Homo sapien
tgtctggtgtagaccggcagcgtgg

SEQ ID NO: 1582590 - DNA, 25 bp, Homo sapien
gagccgggcgcagacatcccagtga

SEQ ID NO: 1582591 - DNA, 25 bp, Homo sapien
gccgggcgcagacatcccagtgagg

SEQ ID NO: 1582592 - DNA, 25 bp, Homo sapien
agccgggcgcagacatcccagtgag

SEQ ID NO: 1582593 - DNA, 25 bp, Homo sapien
aggagccgggcgcagacatcccagt

SEQ ID NO: 1582594 - DNA, 25 bp, Homo sapien
tgcccgcaaggcacagtggccgatg

SEQ ID NO: 1582595 - DNA, 25 bp, Homo sapien
ggcagatatatgaccccaagtactg

SEQ ID NO: 1582596 - DNA, 25 bp, Homo sapien
atctatgataccaagctgggaaccg

SEQ ID NO: 1582597 - DNA, 25 bp, Homo sapien
agatgggctacacgcagggcgccaa

SEQ ID NO: 1582598 - DNA, 25 bp, Homo sapien
tgctgccagtcaaccaagggtctgt

SEQ ID NO: 1582599 - DNA, 25 bp, Homo sapien
ggtcaaggccatatcccaatacgtg

SEQ ID NO: 1582600 - DNA, 25 bp, Homo sapien
cagtttgtggtttctatgcccgcaa

SEQ ID NO: 1582601 - DNA, 25 bp, Homo sapien
tgaaatacgactgtggaccaaacgc

SEQ ID NO: 1582602 - DNA, 25 bp, Homo sapien
tccctgtcggtgtccagtctctgag

SEQ ID NO: 1582603 - DNA, 25 bp, Homo sapien
tagcgtgtttatgagcagcaaggac

SEQ ID NO: 1582604 - DNA, 25 bp, Homo sapien
agtgtgctgcggacacagatatgga

SEQ ID NO: 1582605 - DNA, 25 bp, Homo sapien
cacatgaggagctctggtggctcag

SEQ ID NO: 1582606 - DNA, 25 bp, Homo sapien
gacctcaagtggtggagtggcctct

SEQ ID NO: 1582607 - DNA, 25 bp, Homo sapien
tcatgccaggcgctctgatctgctc

SEQ ID NO: 1582608 - DNA, 25 bp, Homo sapien
cctgcaggaggtctgaactgggcca

SEQ ID NO: 1582609 - DNA, 25 bp, Homo sapien
taagtctctagtgaggccctgaccc

SEQ ID NO: 1582610 - DNA, 25 bp, Homo sapien
gatgtttcgcctgtactctctgctt

SEQ ID NO: 1582611 - DNA, 25 bp, Homo sapien
gggcatcctctgagcggtacagtca

SEQ ID NO: 1582612 - DNA, 25 bp, Homo sapien
tgactcggtcggtctcttcccggag

SEQ ID NO: 1582613 - DNA, 25 bp, Homo sapien
tccagcagcgaagacatgttccggt

SEQ ID NO: 1582614 - DNA, 25 bp, Homo sapien
ccttttttcggctgtgcagggctca

SEQ ID NO: 1582615 - DNA, 25 bp, Homo sapien
taacacggtctgcagtgaaacgcac

SEQ ID NO: 1582616 - DNA, 25 bp, Homo sapien
tgggttatttcaaagacgccggcgc

SEQ ID NO: 1582617 - DNA, 25 bp, Homo sapien
tagagaggctcacccgatatcagtc

SEQ ID NO: 1582618 - DNA, 25 bp, Homo sapien
tgcggtttctcgggtttgctcttgg

SEQ ID NO: 1582619 - DNA, 25 bp, Homo sapien
cggcgtctcgtattctttcaatcca

SEQ ID NO: 1582620 - DNA, 25 bp, Homo sapien
gcgaggtcaattccccgcttcagat

SEQ ID NO: 1582621 - DNA, 25 bp, Homo sapien
ttgtagtttcgctcctgctgcccag

SEQ ID NO: 1582622 - DNA, 25 bp, Homo sapien
tgaaacccacgtactatcatgagaa

SEQ ID NO: 1582623 - DNA, 25 bp, Homo sapien
caaagggagagcttgtgtccggaaa

SEQ ID NO: 1582624 - DNA, 25 bp, Homo sapien
actccagtttttagaccatcagatc

SEQ ID NO: 1582625 - DNA, 25 bp, Homo sapien
agcccaggaaagacgcacctccagg

SEQ ID NO: 1582626 - DNA, 25 bp, Homo sapien
ttcggactcggacctagaggaggcc

SEQ ID NO: 1582627 - DNA, 25 bp, Homo sapien
ggcatagcttaggtgcgccgtcctg

SEQ ID NO: 1582628 - DNA, 25 bp, Homo sapien
ggtctctcggaagccaccgtgtggt

SEQ ID NO: 1582629 - DNA, 25 bp, Homo sapien
tagaatcccgagttgtgtccaacga

SEQ ID NO: 1582630 - DNA, 25 bp, Homo sapien
aggaaaacgttctcgatgacggacg

SEQ ID NO: 1582631 - DNA, 25 bp, Homo sapien
taatcgggtgttttctgtggcagct

SEQ ID NO: 1582632 - DNA, 25 bp, Homo sapien
ccggctctaaggtttcgcacgtcag

SEQ ID NO: 1582633 - DNA, 25 bp, Homo sapien
catggccaccaagcactggaaacgt

SEQ ID NO: 1582634 - DNA, 25 bp, Homo sapien
taggagtgacatcagtgtttgtccc

SEQ ID NO: 1582635 - DNA, 25 bp, Homo sapien
tcccaaactaaaactgtgcacatga

SEQ ID NO: 1582636 - DNA, 25 bp, Homo sapien
tgacgactctagtgacctcctagga

SEQ ID NO: 1582637 - DNA, 25 bp, Homo sapien
ctgtgcccaggtaatcttaaagttt

SEQ ID NO: 1582638 - DNA, 25 bp, Homo sapien
gcaggcgaggccttctgaaatcaga

SEQ ID NO: 1582639 - DNA, 25 bp, Homo sapien
taaagctactgtgagagaaccacgt

SEQ ID NO: 1582640 - DNA, 25 bp, Homo sapien
tgaaatcagacagtaagcaaacggg

SEQ ID NO: 1582641 - DNA, 25 bp, Homo sapien
ctgtaagaggaactggccgcaaacc

SEQ ID NO: 1582642 - DNA, 25 bp, Homo sapien
gagggcacacctgccaggctgacct

SEQ ID NO: 1582643 - DNA, 25 bp, Homo sapien
ggccacctgctggaaaccttgttag

SEQ ID NO: 1582644 - DNA, 25 bp, Homo sapien
aagccagcgcgaggagggcacacct

SEQ ID NO: 1582645 - DNA, 25 bp, Homo sapien
tgcttggggtgaggcaaggccacct

SEQ ID NO: 1582646 - DNA, 25 bp, Homo sapien
ccttctgaggctgcatctcgcacaa

SEQ ID NO: 1582647 - DNA, 25 bp, Homo sapien
accctggtggcttgagcgcgtgcat

SEQ ID NO: 1582648 - DNA, 25 bp, Homo sapien
cccagcgtggtctgggtgaagaccc

SEQ ID NO: 1582649 - DNA, 25 bp, Homo sapien
gcatctcgcacaaatccacaggtga

SEQ ID NO: 1582650 - DNA, 25 bp, Homo sapien
agggatgggggtcgctgtgtgtccg

SEQ ID NO: 1582651 - DNA, 25 bp, Homo sapien
ggatgggggtcgctgtgtgtccgcc

SEQ ID NO: 1582652 - DNA, 25 bp, Homo sapien
gatgggggtcgctgtgtgtccgcct

SEQ ID NO: 1582653 - DNA, 25 bp, Homo sapien
gggatgggggtcgctgtgtgtccgc

SEQ ID NO: 1582654 - DNA, 25 bp, Homo sapien
gatgtacctgccagccgtctcactg

SEQ ID NO: 1582655 - DNA, 25 bp, Homo sapien
atgtacctgccagccgtctcactgg

SEQ ID NO: 1582656 - DNA, 25 bp, Homo sapien
gctttatcccaaagtagcgcgccac

SEQ ID NO: 1582657 - DNA, 25 bp, Homo sapien
gggcagctggttctctcggagctta

SEQ ID NO: 1582658 - DNA, 25 bp, Homo sapien
ccttggtcatgacgacgtgctcagg

SEQ ID NO: 1582659 - DNA, 25 bp, Homo sapien
tcctccttggtcatgacgacgtgct

SEQ ID NO: 1582660 - DNA, 25 bp, Homo sapien
ttggtcatgacgacgtgctcaggga

SEQ ID NO: 1582661 - DNA, 25 bp, Homo sapien
ctccttggtcatgacgacgtgctca

SEQ ID NO: 1582662 - DNA, 25 bp, Homo sapien
tcgtgctccgtgatgttgatgagca

SEQ ID NO: 1582663 - DNA, 25 bp, Homo sapien
ctcgtgctccgtgatgttgatgagc

SEQ ID NO: 1582664 - DNA, 25 bp, Homo sapien
gctccgtgatgttgatgagcagctc

SEQ ID NO: 1582665 - DNA, 25 bp, Homo sapien
gtgctccgtgatgttgatgagcagc

SEQ ID NO: 1582666 - DNA, 25 bp, Homo sapien
ctgcttggcggagggtgtcatgccc

SEQ ID NO: 1582667 - DNA, 25 bp, Homo sapien
cttggcggagggtgtcatgccctgc

SEQ ID NO: 1582668 - DNA, 25 bp, Homo sapien
ggcggagggtgtcatgccctgctgc

SEQ ID NO: 1582669 - DNA, 25 bp, Homo sapien
cggagggtgtcatgccctgctgcac

SEQ ID NO: 1582670 - DNA, 25 bp, Homo sapien
tgcgctggcagtacaccttgatggt

SEQ ID NO: 1582671 - DNA, 25 bp, Homo sapien
cacgatgagagcccgtgtgatgttc

SEQ ID NO: 1582672 - DNA, 25 bp, Homo sapien
atgagagcccgtgtgatgttctcct

SEQ ID NO: 1582673 - DNA, 25 bp, Homo sapien
cgatgagagcccgtgtgatgttctc

SEQ ID NO: 1582674 - DNA, 25 bp, Homo sapien
cccaggacgctctctttaagaagca

SEQ ID NO: 1582675 - DNA, 25 bp, Homo sapien
aacaagcagacctcacaccccagga

SEQ ID NO: 1582676 - DNA, 25 bp, Homo sapien
ggcgggtgactcagcaccaacctct

SEQ ID NO: 1582677 - DNA, 25 bp, Homo sapien
tttaagaagcatcacctgaggccgg

SEQ ID NO: 1582678 - DNA, 25 bp, Homo sapien
atcacttgaagtcaacagttctaaa

SEQ ID NO: 1582679 - DNA, 25 bp, Homo sapien
cttgaagtcaacagttctaaaccgg

SEQ ID NO: 1582680 - DNA, 25 bp, Homo sapien
tgaagtcaacagttctaaaccggcc

SEQ ID NO: 1582681 - DNA, 25 bp, Homo sapien
tcaacagttctaaaccggcctggcc

SEQ ID NO: 1582682 - DNA, 25 bp, Homo sapien
gctagcgaccggctcctcggcaggt

SEQ ID NO: 1582683 - DNA, 25 bp, Homo sapien
gggtgggtgctagcgaccggctcct

SEQ ID NO: 1582684 - DNA, 25 bp, Homo sapien
tgctctggtggcttcaccggaactc

SEQ ID NO: 1582685 - DNA, 25 bp, Homo sapien
agcgaccggctcctcggcaggtgct

SEQ ID NO: 1582686 - DNA, 25 bp, Homo sapien
tcaccagatagccacggtcgtggca

SEQ ID NO: 1582687 - DNA, 25 bp, Homo sapien
tcactcggcttgtccccagattggg

SEQ ID NO: 1582688 - DNA, 25 bp, Homo sapien
tggtcaagctcgtcctgggtcacca

SEQ ID NO: 1582689 - DNA, 25 bp, Homo sapien
ctccagggtctggtcaagctcgtcc

SEQ ID NO: 1582690 - DNA, 25 bp, Homo sapien
caaagctcgtgacccggaagtcaga

SEQ ID NO: 1582691 - DNA, 25 bp, Homo sapien
tttgcagagctaccctaaaggcagg

SEQ ID NO: 1582692 - DNA, 25 bp, Homo sapien
tgacagggaccgaaacagatgtgac

SEQ ID NO: 1582693 - DNA, 25 bp, Homo sapien
gatgtccagccttgaccaagaccgt

SEQ ID NO: 1582694 - DNA, 25 bp, Homo sapien
gggttcaggacgcaaggacaaatag

SEQ ID NO: 1582695 - DNA, 25 bp, Homo sapien
cctcggatgctgaagactccatggg

SEQ ID NO: 1582696 - DNA, 25 bp, Homo sapien
cagaccccaaggcacgggttccgag

SEQ ID NO: 1582697 - DNA, 25 bp, Homo sapien
aaggcacgggttccgagctccacgt

SEQ ID NO: 1582698 - DNA, 25 bp, Homo sapien
agtacgaggagacgccgtgctcgac

SEQ ID NO: 1582699 - DNA, 25 bp, Homo sapien
agcaccgcacccagacgtctcgaaa

SEQ ID NO: 1582700 - DNA, 25 bp, Homo sapien
gctgccggctcaggtcgggtccagc

SEQ ID NO: 1582701 - DNA, 25 bp, Homo sapien
cgctgctgctccgacgagagtacga

SEQ ID NO: 1582702 - DNA, 25 bp, Homo sapien
ccagagccggtacgtctcctcctcg

SEQ ID NO: 1582703 - DNA, 25 bp, Homo sapien
agagccggtacgtctcctcctcgtc

SEQ ID NO: 1582704 - DNA, 25 bp, Homo sapien
gagccggtacgtctcctcctcgtcg

SEQ ID NO: 1582705 - DNA, 25 bp, Homo sapien
cagagccggtacgtctcctcctcgt

SEQ ID NO: 1582706 - DNA, 25 bp, Homo sapien
cccgagccttacgagagcggcagtt

SEQ ID NO: 1582707 - DNA, 25 bp, Homo sapien
tgaatgcagcaacgtctcggatcgg

SEQ ID NO: 1582708 - DNA, 25 bp, Homo sapien
tagttctcgtgtgtctttggccgca

SEQ ID NO: 1582709 - DNA, 25 bp, Homo sapien
tcgtcggcgaatgcctgaatgcagc

SEQ ID NO: 1582710 - DNA, 25 bp, Homo sapien
aagagatcaaagagttcgccgcggg

SEQ ID NO: 1582711 - DNA, 25 bp, Homo sapien
gccgcgggctacaacgtcaaattcg

SEQ ID NO: 1582712 - DNA, 25 bp, Homo sapien
catcctgggaaagtgcgtgacctct

SEQ ID NO: 1582713 - DNA, 25 bp, Homo sapien
tggatgaagatccaacccaagggca

SEQ ID NO: 1582714 - DNA, 25 bp, Homo sapien
gaggtgagcgggcaataacttaggg

SEQ ID NO: 1582715 - DNA, 25 bp, Homo sapien
aaaaagtcctttacatatgtacatc

SEQ ID NO: 1582716 - DNA, 25 bp, Homo sapien
ataaatacatagaaaccgcaggcgc

SEQ ID NO: 1582717 - DNA, 25 bp, Homo sapien
tgtacatcagaacttgctataaata

SEQ ID NO: 1582718 - DNA, 25 bp, Homo sapien
atttcaagggtttgggcccactgag

SEQ ID NO: 1582719 - DNA, 25 bp, Homo sapien
tgcatatattagcaggggtctgccc

SEQ ID NO: 1582720 - DNA, 25 bp, Homo sapien
tttgggcccactgagcccttgtggg

SEQ ID NO: 1582721 - DNA, 25 bp, Homo sapien
tagctcttgggaccacccggtttca

SEQ ID NO: 1582722 - DNA, 25 bp, Homo sapien
gcccgggtcgggcgctgaaggcact

SEQ ID NO: 1582723 - DNA, 25 bp, Homo sapien
cctctgagcagtggtcaggggacct

SEQ ID NO: 1582724 - DNA, 25 bp, Homo sapien
cccaccgctgctcctaggggagaaa

SEQ ID NO: 1582725 - DNA, 25 bp, Homo sapien
tggggcatgtttcgcctaaaggcgt

SEQ ID NO: 1582726 - DNA, 25 bp, Homo sapien
tggatcacgctctgccgctcgggac

SEQ ID NO: 1582727 - DNA, 25 bp, Homo sapien
ccgcgtgcagcgagcgcagcatgtc

SEQ ID NO: 1582728 - DNA, 25 bp, Homo sapien
tgggctgaactggatcacgctctgc

SEQ ID NO: 1582729 - DNA, 25 bp, Homo sapien
gtgcagcgagcgcagcatgtcctcc

SEQ ID NO: 1582730 - DNA, 25 bp, Homo sapien
tccttgaagttgatgtcgcagccct

SEQ ID NO: 1582731 - DNA, 25 bp, Homo sapien
gcggcgccgggaaagagaagtgcgg

SEQ ID NO: 1582732 - DNA, 25 bp, Homo sapien
tcgggggtgcccagcggcacgacgc

SEQ ID NO: 1582733 - DNA, 25 bp, Homo sapien
tgtcgcagccctggtgcgcgagggc

SEQ ID NO: 1582734 - DNA, 25 bp, Homo sapien
ccgcaaggcagcgccagcgggcgcg

SEQ ID NO: 1582735 - DNA, 25 bp, Homo sapien
ggccgcaaggcagcgccagcgggcg

SEQ ID NO: 1582736 - DNA, 25 bp, Homo sapien
ccggggccgcaaggcagcgccagcg

SEQ ID NO: 1582737 - DNA, 25 bp, Homo sapien
ctccggggccgcaaggcagcgccag

SEQ ID NO: 1582738 - DNA, 25 bp, Homo sapien
ccggcgcacgcagccctcggggatc

SEQ ID NO: 1582739 - DNA, 25 bp, Homo sapien
acccggcgcacgcagccctcgggga

SEQ ID NO: 1582740 - DNA, 25 bp, Homo sapien
gcacgcagccctcggggatcttgat

SEQ ID NO: 1582741 - DNA, 25 bp, Homo sapien
ggcgcacgcagccctcggggatctt

SEQ ID NO: 1582742 - DNA, 25 bp, Homo sapien
ctgcgggcagagcgtcggggtcagg

SEQ ID NO: 1582743 - DNA, 25 bp, Homo sapien
cgggcagagcgtcggggtcagggcc

SEQ ID NO: 1582744 - DNA, 25 bp, Homo sapien
agagcgtcggggtcagggccggcgc

SEQ ID NO: 1582745 - DNA, 25 bp, Homo sapien
cagagcgtcggggtcagggccggcg

SEQ ID NO: 1582746 - DNA, 25 bp, Homo sapien
tgctgctgacgtcggccatgacggc

SEQ ID NO: 1582747 - DNA, 25 bp, Homo sapien
agcatgtagtggtgccgcagccgca

SEQ ID NO: 1582748 - DNA, 25 bp, Homo sapien
agcgcgccgcacagcatgtagtggt

SEQ ID NO: 1582749 - DNA, 25 bp, Homo sapien
gcccctgcaggcagtccttaccctc

SEQ ID NO: 1582750 - DNA, 25 bp, Homo sapien
ctgtggctgcagtgcgtcagcgaca

SEQ ID NO: 1582751 - DNA, 25 bp, Homo sapien
gtcagcgacaaagcgtagccactct

SEQ ID NO: 1582752 - DNA, 25 bp, Homo sapien
tgcagtgcgtcagcgacaaagcgta

SEQ ID NO: 1582753 - DNA, 25 bp, Homo sapien
aaagcgtagccactctcccagggct

SEQ ID NO: 1582754 - DNA, 25 bp, Homo sapien
gggtcagggccggcaacccgagcga

SEQ ID NO: 1582755 - DNA, 25 bp, Homo sapien
ctctgccggccgatgttgggcttgt

SEQ ID NO: 1582756 - DNA, 25 bp, Homo sapien
gatgttgggcttgtacaccgtgaag

SEQ ID NO: 1582757 - DNA, 25 bp, Homo sapien
ccggccgatgttgggcttgtacacc

SEQ ID NO: 1582758 - DNA, 25 bp, Homo sapien
ccggtggaacttgcggcggaggctg

SEQ ID NO: 1582759 - DNA, 25 bp, Homo sapien
gcggaggggggcgttgaggccgcgc

SEQ ID NO: 1582760 - DNA, 25 bp, Homo sapien
gcgttgaggccgcgccccggtccgc

SEQ ID NO: 1582761 - DNA, 25 bp, Homo sapien
tgcggaggggggcgttgaggccgcg

SEQ ID NO: 1582762 - DNA, 25 bp, Homo sapien
ctgcggaggggggcgttgaggccgc

SEQ ID NO: 1582763 - DNA, 25 bp, Homo sapien
gcgacttggcaaaggcgtcctccca

SEQ ID NO: 1582764 - DNA, 25 bp, Homo sapien
ccgtcagcgccagcgacttggcaaa

SEQ ID NO: 1582765 - DNA, 25 bp, Homo sapien
tagaagccgtcataggggcccgtca

SEQ ID NO: 1582766 - DNA, 25 bp, Homo sapien
tcagcgccagcgacttggcaaaggc

SEQ ID NO: 1582767 - DNA, 25 bp, Homo sapien
cgtagatctcctcgataccgggagc

SEQ ID NO: 1582768 - DNA, 25 bp, Homo sapien
tcctcgtagatctcctcgataccgg

SEQ ID NO: 1582769 - DNA, 25 bp, Homo sapien
agatctcctcgataccgggagcaag

SEQ ID NO: 1582770 - DNA, 25 bp, Homo sapien
tggctctcctcgtagatctcctcga

SEQ ID NO: 1582771 - DNA, 25 bp, Homo sapien
gttggctgcggcactgctcatgagt

SEQ ID NO: 1582772 - DNA, 25 bp, Homo sapien
taaccccaagcaggctgtgaggaga

SEQ ID NO: 1582773 - DNA, 25 bp, Homo sapien
catgagtgaagtagccatggcccgg

SEQ ID NO: 1582774 - DNA, 25 bp, Homo sapien
ggcaaccgctcaggtcctaggtaac

SEQ ID NO: 1582775 - DNA, 25 bp, Homo sapien
ccacccacaccacaccccggcacct

SEQ ID NO: 1582776 - DNA, 25 bp, Homo sapien
acccacaccacaccccggcacctgt

SEQ ID NO: 1582777 - DNA, 25 bp, Homo sapien
cacaccacaccccggcacctgtgct

SEQ ID NO: 1582778 - DNA, 25 bp, Homo sapien
accacaccccggcacctgtgctcac

SEQ ID NO: 1582779 - DNA, 25 bp, Homo sapien
tgtccatctcgatgaggtggtcgaa

SEQ ID NO: 1582780 - DNA, 25 bp, Homo sapien
tctgagaagtactggaacagggcgt

SEQ ID NO: 1582781 - DNA, 25 bp, Homo sapien
caggatgcccatgtcgtatttgccc

SEQ ID NO: 1582782 - DNA, 25 bp, Homo sapien
ccccaggatgcggttcaggaacttg

SEQ ID NO: 1582783 - DNA, 25 bp, Homo sapien
tctccctgctttgctcaccacccga

SEQ ID NO: 1582784 - DNA, 25 bp, Homo sapien
tcaggctgcgctgggaatccctctc

SEQ ID NO: 1582785 - DNA, 25 bp, Homo sapien
agggagccaagcctcaggctgcgct

SEQ ID NO: 1582786 - DNA, 25 bp, Homo sapien
ctgctttgctcaccacccgaggcca

SEQ ID NO: 1582787 - DNA, 25 bp, Homo sapien
gcctctgggcctgggtgtggggcac

SEQ ID NO: 1582788 - DNA, 25 bp, Homo sapien
ctctgggcctgggtgtggggcactc

SEQ ID NO: 1582789 - DNA, 25 bp, Homo sapien
ctgggcctgggtgtggggcactcac

SEQ ID NO: 1582790 - DNA, 25 bp, Homo sapien
agcgcctctgggcctgggtgtgggg

SEQ ID NO: 1582791 - DNA, 25 bp, Homo sapien
gtccaggcagccattccgggactcc

SEQ ID NO: 1582792 - DNA, 25 bp, Homo sapien
cattccgggactcccggccaccaat

SEQ ID NO: 1582793 - DNA, 25 bp, Homo sapien
actcccggccaccaatgcccacaga

SEQ ID NO: 1582794 - DNA, 25 bp, Homo sapien
tctccacgtccaggcagccattccg

SEQ ID NO: 1582795 - DNA, 25 bp, Homo sapien
gcacaggcactttgttctcagtctg

SEQ ID NO: 1582796 - DNA, 25 bp, Homo sapien
ccagggtatccctggggcacaggca

SEQ ID NO: 1582797 - DNA, 25 bp, Homo sapien
acacagtgcagggcccgggtgccat

SEQ ID NO: 1582798 - DNA, 25 bp, Homo sapien
tctcagtctggctcaggatggtggt

SEQ ID NO: 1582799 - DNA, 25 bp, Homo sapien
ggagaaggtgactcggggaggaggc

SEQ ID NO: 1582800 - DNA, 25 bp, Homo sapien
acgggactccgtggcgcggcggtct

SEQ ID NO: 1582801 - DNA, 25 bp, Homo sapien
caaagttgtacttgctgaggtcacg

SEQ ID NO: 1582802 - DNA, 25 bp, Homo sapien
tcaaagttgtacttgctgaggtcac

SEQ ID NO: 1582803 - DNA, 25 bp, Homo sapien
tgaggtcacgggactccgtggcgcg

SEQ ID NO: 1582804 - DNA, 25 bp, Homo sapien
cacgatggaggcgaaccggcgctcc

SEQ ID NO: 1582805 - DNA, 25 bp, Homo sapien
tctccaggcgcttggccacgatgga

SEQ ID NO: 1582806 - DNA, 25 bp, Homo sapien
gagacctggttggaccggtgggtgc

SEQ ID NO: 1582807 - DNA, 25 bp, Homo sapien
ggaagacatactctggcgcggagac

SEQ ID NO: 1582808 - DNA, 25 bp, Homo sapien
gcggggccgagaccatgttgggggc

SEQ ID NO: 1582809 - DNA, 25 bp, Homo sapien
ctggttctggacacggcggtcggct

SEQ ID NO: 1582810 - DNA, 25 bp, Homo sapien
aggcctccgagatgatggccacgag

SEQ ID NO: 1582811 - DNA, 25 bp, Homo sapien
gcggtcggcttggagggagacaccc

SEQ ID NO: 1582812 - DNA, 25 bp, Homo sapien
ctccaaggtcatgtgcacgcggcgc

SEQ ID NO: 1582813 - DNA, 25 bp, Homo sapien
ttctcgccgctcatgaagcgctgct

SEQ ID NO: 1582814 - DNA, 25 bp, Homo sapien
tggtcgatggacagaccctgctctg

SEQ ID NO: 1582815 - DNA, 25 bp, Homo sapien
tcgccgctcatgaagcgctgcttct

SEQ ID NO: 1582816 - DNA, 25 bp, Homo sapien
tgcttctccctgaggttcacgtggt

SEQ ID NO: 1582817 - DNA, 25 bp, Homo sapien
tccagggtgttgactggcagttccc

SEQ ID NO: 1582818 - DNA, 25 bp, Homo sapien
cgtccagggtgttgactggcagttc

SEQ ID NO: 1582819 - DNA, 25 bp, Homo sapien
tgttgactggcagttcccggcccag

SEQ ID NO: 1582820 - DNA, 25 bp, Homo sapien
agccgccgcactttgtccagcagat

SEQ ID NO: 1582821 - DNA, 25 bp, Homo sapien
gaccagtggtataacccctgacctc

SEQ ID NO: 1582822 - DNA, 25 bp, Homo sapien
tctgaccagtggtataacccctgac

SEQ ID NO: 1582823 - DNA, 25 bp, Homo sapien
tgaccagtggtataacccctgacct

SEQ ID NO: 1582824 - DNA, 25 bp, Homo sapien
ctgaccagtggtataacccctgacc

SEQ ID NO: 1582825 - DNA, 25 bp, Homo sapien
tgacccagaggtggctgctcagcct

SEQ ID NO: 1582826 - DNA, 25 bp, Homo sapien
aatcctgacccacaggtggctggcc

SEQ ID NO: 1582827 - DNA, 25 bp, Homo sapien
gagcctcaggctggaatcctgaccc

SEQ ID NO: 1582828 - DNA, 25 bp, Homo sapien
tggactggaatcctgacccacaggt

SEQ ID NO: 1582829 - DNA, 25 bp, Homo sapien
gggagcccgactgcatcaacgatga

SEQ ID NO: 1582830 - DNA, 25 bp, Homo sapien
tgacaacgtcgtcatccaccaggga

SEQ ID NO: 1582831 - DNA, 25 bp, Homo sapien
aggccagggtccgactccgtgctgc

SEQ ID NO: 1582832 - DNA, 25 bp, Homo sapien
tgctgctgtcgtcactgatgcggat

SEQ ID NO: 1582833 - DNA, 25 bp, Homo sapien
tgtctcgcacgccagccggggggct

SEQ ID NO: 1582834 - DNA, 25 bp, Homo sapien
gtctcgcacgccagccggggggctt

SEQ ID NO: 1582835 - DNA, 25 bp, Homo sapien
ctgtctcgcacgccagccggggggc

SEQ ID NO: 1582836 - DNA, 25 bp, Homo sapien
actgcacctagccaatattttattt

SEQ ID NO: 1582837 - DNA, 25 bp, Homo sapien
tttgagacaagagttttttctgtca

SEQ ID NO: 1582838 - DNA, 25 bp, Homo sapien
ttacaacaggcgtgacccactgcac

SEQ ID NO: 1582839 - DNA, 25 bp, Homo sapien
gagacaagagttttttctgtcaccc

SEQ ID NO: 1582840 - DNA, 25 bp, Homo sapien
tggtggacggaaagtgcttctgaat

SEQ ID NO: 1582841 - DNA, 25 bp, Homo sapien
tcccgctttctcttggtggacggaa

SEQ ID NO: 1582842 - DNA, 25 bp, Homo sapien
ggaaagtgcttctgaattagcgaca

SEQ ID NO: 1582843 - DNA, 25 bp, Homo sapien
cctctgtcccgctttctcttggtgg

SEQ ID NO: 1582844 - DNA, 25 bp, Homo sapien
agcagttgaggtgcccatcgttctc

SEQ ID NO: 1582845 - DNA, 25 bp, Homo sapien
ccgagacgaagcagttgaggtgccc

SEQ ID NO: 1582846 - DNA, 25 bp, Homo sapien
cgtggactgcagcccgatgaccacg

SEQ ID NO: 1582847 - DNA, 25 bp, Homo sapien
tcagcggccgagacgaagcagttga

SEQ ID NO: 1582848 - DNA, 25 bp, Homo sapien
gatgcacagatacttgaagaagcgc

SEQ ID NO: 1582849 - DNA, 25 bp, Homo sapien
gcgcaccttggctgcgatgcacaga

SEQ ID NO: 1582850 - DNA, 25 bp, Homo sapien
gggacttgcgcgactccaggccgat

SEQ ID NO: 1582851 - DNA, 25 bp, Homo sapien
gctggtgtgccgaccagaactggcc

SEQ ID NO: 1582852 - DNA, 25 bp, Homo sapien
tgtggatgctgaacacggctaccaa

SEQ ID NO: 1582853 - DNA, 25 bp, Homo sapien
tccaaacatggagggaacgaccaag

SEQ ID NO: 1582854 - DNA, 25 bp, Homo sapien
gggaacgaccaagccacatggccca

SEQ ID NO: 1582855 - DNA, 25 bp, Homo sapien
acggctaccaactgccagctgtggg

SEQ ID NO: 1582856 - DNA, 25 bp, Homo sapien
tgaccttcatgtccatggccacgat

SEQ ID NO: 1582857 - DNA, 25 bp, Homo sapien
tgcgatgtacatgccgctgaccttc

SEQ ID NO: 1582858 - DNA, 25 bp, Homo sapien
gatctcctcgatgcggaaggtgacg

SEQ ID NO: 1582859 - DNA, 25 bp, Homo sapien
cggttgtagacgcactcgaaggctg

SEQ ID NO: 1582860 - DNA, 25 bp, Homo sapien
gatggagccactcggagcgcgaggc

SEQ ID NO: 1582861 - DNA, 25 bp, Homo sapien
tgcggatggacacagcccccgtgag

SEQ ID NO: 1582862 - DNA, 25 bp, Homo sapien
cgtgagcacggccagagcccgtggg

SEQ ID NO: 1582863 - DNA, 25 bp, Homo sapien
cgaggcagagccagtcgcagagagg

SEQ ID NO: 1582864 - DNA, 25 bp, Homo sapien
ctcctcaaagttccggaagggtgtg

SEQ ID NO: 1582865 - DNA, 25 bp, Homo sapien
acccaagcggctcatgtagatcatg

SEQ ID NO: 1582866 - DNA, 25 bp, Homo sapien
cttctcgatggcgtgcaggaactcc

SEQ ID NO: 1582867 - DNA, 25 bp, Homo sapien
atacccaagcggctcatgtagatca

SEQ ID NO: 1582868 - DNA, 25 bp, Homo sapien
agccggcattcttggctttgtgaca

SEQ ID NO: 1582869 - DNA, 25 bp, Homo sapien
ccttgcccatcttggtggagccggc

SEQ ID NO: 1582870 - DNA, 25 bp, Homo sapien
ggctttgtgacactcgtcgaacacg

SEQ ID NO: 1582871 - DNA, 25 bp, Homo sapien
ctggcgtagaccacgcgggccaggg

SEQ ID NO: 1582872 - DNA, 25 bp, Homo sapien
aggcacacgtgggttaaggagtatt

SEQ ID NO: 1582873 - DNA, 25 bp, Homo sapien
gaggcacacgtgggttaaggagtat

SEQ ID NO: 1582874 - DNA, 25 bp, Homo sapien
tgaggcacacgtgggttaaggagta

SEQ ID NO: 1582875 - DNA, 25 bp, Homo sapien
ctgaggcacacgtgggttaaggagt

SEQ ID NO: 1582876 - DNA, 25 bp, Homo sapien
gtggggggcaaacgcctgtgcggct

SEQ ID NO: 1582877 - DNA, 25 bp, Homo sapien
ctccacgagggaagcccaggtcgga

SEQ ID NO: 1582878 - DNA, 25 bp, Homo sapien
agaactccacgagggaagcccaggt

SEQ ID NO: 1582879 - DNA, 25 bp, Homo sapien
ctgtgcggctgagaactccacgagg

SEQ ID NO: 1582880 - DNA, 25 bp, Homo sapien
gatccctaaaccatgatatcgcagg

SEQ ID NO: 1582881 - DNA, 25 bp, Homo sapien
tatcgcaggacgttgccatcggagg

SEQ ID NO: 1582882 - DNA, 25 bp, Homo sapien
gaagggtgggatccctaaaccatga

SEQ ID NO: 1582883 - DNA, 25 bp, Homo sapien
taaaccatgatatcgcaggacgttg

SEQ ID NO: 1582884 - DNA, 25 bp, Homo sapien
ggccgtttggttggccagataatct

SEQ ID NO: 1582885 - DNA, 25 bp, Homo sapien
gtttggttggccagataatctcaaa

SEQ ID NO: 1582886 - DNA, 25 bp, Homo sapien
cgtttggttggccagataatctcaa

SEQ ID NO: 1582887 - DNA, 25 bp, Homo sapien
gttggccgtttggttggccagataa

SEQ ID NO: 1582888 - DNA, 25 bp, Homo sapien
tctgccggaggcgagtgcggtgctg

SEQ ID NO: 1582889 - DNA, 25 bp, Homo sapien
ccaatcagggcggagtaggtggcga

SEQ ID NO: 1582890 - DNA, 25 bp, Homo sapien
cacaccagtccaggatctgccggag

SEQ ID NO: 1582891 - DNA, 25 bp, Homo sapien
ccagtccaggatctgccggaggcga

SEQ ID NO: 1582892 - DNA, 25 bp, Homo sapien
cctactttgccgagcacagccccta

SEQ ID NO: 1582893 - DNA, 25 bp, Homo sapien
ctactttgccgagcacagcccctac

SEQ ID NO: 1582894 - DNA, 25 bp, Homo sapien
cccctactttgccgagcacagcccc

SEQ ID NO: 1582895 - DNA, 25 bp, Homo sapien
gccccctactttgccgagcacagcc

SEQ ID NO: 1582896 - DNA, 25 bp, Homo sapien
cttgaggtcgttggagacgctgaac

SEQ ID NO: 1582897 - DNA, 25 bp, Homo sapien
gcgctccgcatcgtacttgaggtcg

SEQ ID NO: 1582898 - DNA, 25 bp, Homo sapien
cttgctgagcgcgtgcaccgcgatg

SEQ ID NO: 1582899 - DNA, 25 bp, Homo sapien
accgcgatgcccgtggcttcgatgt

SEQ ID NO: 1582900 - DNA, 25 bp, Homo sapien
aatgctttcttccggccgcgcaggt

SEQ ID NO: 1582901 - DNA, 25 bp, Homo sapien
tcgccgatgagaaagcccgcgcgct

SEQ ID NO: 1582902 - DNA, 25 bp, Homo sapien
gccccatcgccgatgagaaagcccg

SEQ ID NO: 1582903 - DNA, 25 bp, Homo sapien
ccgcgcaggtggttctccaggatga

SEQ ID NO: 1582904 - DNA, 25 bp, Homo sapien
ggctgggttggggacatgcggtcac

SEQ ID NO: 1582905 - DNA, 25 bp, Homo sapien
acagggccccgctgtccgagggcag

SEQ ID NO: 1582906 - DNA, 25 bp, Homo sapien
gggacgctggacagtgtgctggtct

SEQ ID NO: 1582907 - DNA, 25 bp, Homo sapien
gatggcctctagctgcagggcagac

SEQ ID NO: 1582908 - DNA, 25 bp, Homo sapien
tccaccacgcggtctgggtgctgct

SEQ ID NO: 1582909 - DNA, 25 bp, Homo sapien
gccaggtcccgttgggcgggtcatg

SEQ ID NO: 1582910 - DNA, 25 bp, Homo sapien
tgaccagggccggttatggcacgct

SEQ ID NO: 1582911 - DNA, 25 bp, Homo sapien
ctggaggagcaaggacggagggcaa

SEQ ID NO: 1582912 - DNA, 25 bp, Homo sapien
ggtcatgggcgtggccaggaatgcc

SEQ ID NO: 1582913 - DNA, 25 bp, Homo sapien
gggcaaatgcataaaaatcctccca

SEQ ID NO: 1582914 - DNA, 25 bp, Homo sapien
gcaaatgcataaaaatcctcccagt

SEQ ID NO: 1582915 - DNA, 25 bp, Homo sapien
attgtagaacctgtccccgggctct

SEQ ID NO: 1582916 - DNA, 25 bp, Homo sapien
ttgtataagcctggattgtagaacc

SEQ ID NO: 1582917 - DNA, 25 bp, Homo sapien
gctgtgcgggcggtggtcacctgca

SEQ ID NO: 1582918 - DNA, 25 bp, Homo sapien
cctgcagggtctcggtcccacaaaa

SEQ ID NO: 1582919 - DNA, 25 bp, Homo sapien
gggctgtgcgggcggtggtcacctg

SEQ ID NO: 1582920 - DNA, 25 bp, Homo sapien
tgcagggtctcggtcccacaaaagg

SEQ ID NO: 1582921 - DNA, 25 bp, Homo sapien
cacgtagtcggcgtaggtctctgtg

SEQ ID NO: 1582922 - DNA, 25 bp, Homo sapien
acggcacgtagtcggcgtaggtctc

SEQ ID NO: 1582923 - DNA, 25 bp, Homo sapien
ggacggcacgtagtcggcgtaggtc

SEQ ID NO: 1582924 - DNA, 25 bp, Homo sapien
tagtcggcgtaggtctctgtgtgcc

SEQ ID NO: 1582925 - DNA, 25 bp, Homo sapien
ctggctggctctgcacactctgctc

SEQ ID NO: 1582926 - DNA, 25 bp, Homo sapien
tcctctggctggctctgcacactct

SEQ ID NO: 1582927 - DNA, 25 bp, Homo sapien
ctcctctggctggctctgcacactc

SEQ ID NO: 1582928 - DNA, 25 bp, Homo sapien
ctctggctggctctgcacactctgc

SEQ ID NO: 1582929 - DNA, 25 bp, Homo sapien
actcccagcttctaggccagccaag

SEQ ID NO: 1582930 - DNA, 25 bp, Homo sapien
ccaagcgctccccacaatggagatg

SEQ ID NO: 1582931 - DNA, 25 bp, Homo sapien
ctctccttaggtcccatgagagggc

SEQ ID NO: 1582932 - DNA, 25 bp, Homo sapien
gcaggggagggagctctcggctggg

SEQ ID NO: 1582933 - DNA, 25 bp, Homo sapien
ggcagaaagtcctcgaagcctgcaa

SEQ ID NO: 1582934 - DNA, 25 bp, Homo sapien
gaagcctgcaaacggcctgctgagc

SEQ ID NO: 1582935 - DNA, 25 bp, Homo sapien
ctgcaaacggcctgctgagctggaa

SEQ ID NO: 1582936 - DNA, 25 bp, Homo sapien
gtcctcgaagcctgcaaacggcctg

SEQ ID NO: 1582937 - DNA, 25 bp, Homo sapien
gagcaggatgtcagcccgggccaga

SEQ ID NO: 1582938 - DNA, 25 bp, Homo sapien
agcaggatgtcagcccgggccagac

SEQ ID NO: 1582939 - DNA, 25 bp, Homo sapien
gccagacgggacaggtcacagctgg

SEQ ID NO: 1582940 - DNA, 25 bp, Homo sapien
acgggacaggtcacagctggtgggc

SEQ ID NO: 1582941 - DNA, 25 bp, Homo sapien
tcactggaccgtgtgggtcccgggc

SEQ ID NO: 1582942 - DNA, 25 bp, Homo sapien
cactggaccgtgtgggtcccgggct

SEQ ID NO: 1582943 - DNA, 25 bp, Homo sapien
cagggttatcgtcccagatggtgga

SEQ ID NO: 1582944 - DNA, 25 bp, Homo sapien
gaagtcgggcgtgtccacgatgtcc

SEQ ID NO: 1582945 - DNA, 25 bp, Homo sapien
acgatgtccgacagggagtccacgg

SEQ ID NO: 1582946 - DNA, 25 bp, Homo sapien
gatgttggagaagtcctcaaaatag

SEQ ID NO: 1582947 - DNA, 25 bp, Homo sapien
gcacctgaagggcagcaatgctgca

SEQ ID NO: 1582948 - DNA, 25 bp, Homo sapien
cacctgaagggcagcaatgctgcag

SEQ ID NO: 1582949 - DNA, 25 bp, Homo sapien
cgcaggacggcgtctgacttctgca

SEQ ID NO: 1582950 - DNA, 25 bp, Homo sapien
ctcagggccacgcaggacggcgtct

SEQ ID NO: 1582951 - DNA, 25 bp, Homo sapien
cttgttcagagcctcaaactgcagc

SEQ ID NO: 1582952 - DNA, 25 bp, Homo sapien
tgttcagagcctcaaactgcagcca

SEQ ID NO: 1582953 - DNA, 25 bp, Homo sapien
gcagccacagctgcagctgggacat

SEQ ID NO: 1582954 - DNA, 25 bp, Homo sapien
ttcagagcctcaaactgcagccaca

SEQ ID NO: 1582955 - DNA, 25 bp, Homo sapien
gctccctcatgaccgcggcagcagc

SEQ ID NO: 1582956 - DNA, 25 bp, Homo sapien
agcggctccctcatgaccgcggcag

SEQ ID NO: 1582957 - DNA, 25 bp, Homo sapien
agccccagcattgggtcggccgggg

SEQ ID NO: 1582958 - DNA, 25 bp, Homo sapien
ccagcattgggtcggccggggcgga

SEQ ID NO: 1582959 - DNA, 25 bp, Homo sapien
attgggccacaggcggtcattctcg

SEQ ID NO: 1582960 - DNA, 25 bp, Homo sapien
ggtcattctcggtgtccttggagga

SEQ ID NO: 1582961 - DNA, 25 bp, Homo sapien
ggcggtcattctcggtgtccttgga

SEQ ID NO: 1582962 - DNA, 25 bp, Homo sapien
cacaggcggtcattctcggtgtcct

SEQ ID NO: 1582963 - DNA, 25 bp, Homo sapien
cggacagctgcgttcccaatggtcc

SEQ ID NO: 1582964 - DNA, 25 bp, Homo sapien
gggacccgggatggatgcccggcag

SEQ ID NO: 1582965 - DNA, 25 bp, Homo sapien
cccgggatggatgcccggcaggtgg

SEQ ID NO: 1582966 - DNA, 25 bp, Homo sapien
gacagctgcgttcccaatggtccct

SEQ ID NO: 1582967 - DNA, 25 bp, Homo sapien
attgagcctgatggcttcgcgccaa

SEQ ID NO: 1582968 - DNA, 25 bp, Homo sapien
ggacattgagcctgatggcttcgcg

SEQ ID NO: 1582969 - DNA, 25 bp, Homo sapien
cattgagcctgatggcttcgcgcca

SEQ ID NO: 1582970 - DNA, 25 bp, Homo sapien
cccaccaggacacacggggctgagc

SEQ ID NO: 1582971 - DNA, 25 bp, Homo sapien
ggacttgacggacgcggtcacccca

SEQ ID NO: 1582972 - DNA, 25 bp, Homo sapien
agggtccggctggctttgccccgct

SEQ ID NO: 1582973 - DNA, 25 bp, Homo sapien
catccaaaaagaccctactttccag

SEQ ID NO: 1582974 - DNA, 25 bp, Homo sapien
tgatccctacccaatgacatccaaa

SEQ ID NO: 1582975 - DNA, 25 bp, Homo sapien
tgtggtatccgaaccgtcccaggga

SEQ ID NO: 1582976 - DNA, 25 bp, Homo sapien
gccctggatgtggtccggcccagca

SEQ ID NO: 1582977 - DNA, 25 bp, Homo sapien
cagggaagccgatctctgtggcact

SEQ ID NO: 1582978 - DNA, 25 bp, Homo sapien
ggtcccacacggaggctgtggtatc

SEQ ID NO: 1582979 - DNA, 25 bp, Homo sapien
ctgagcaaagtcgcaggtctttggt

SEQ ID NO: 1582980 - DNA, 25 bp, Homo sapien
gccacgggggcatagctggtgtctg

SEQ ID NO: 1582981 - DNA, 25 bp, Homo sapien
ggtctttggtggcaagctggaggcg

SEQ ID NO: 1582982 - DNA, 25 bp, Homo sapien
gcaaagtcgcaggtctttggtggca

SEQ ID NO: 1582983 - DNA, 25 bp, Homo sapien
gggtatggcggcagcgagaaggtgt

SEQ ID NO: 1582984 - DNA, 25 bp, Homo sapien
agggtatggcggcagcgagaaggtg

SEQ ID NO: 1582985 - DNA, 25 bp, Homo sapien
tggagaaggcagggtatggcggcag

SEQ ID NO: 1582986 - DNA, 25 bp, Homo sapien
aaggcagggtatggcggcagcgaga

SEQ ID NO: 1582987 - DNA, 25 bp, Homo sapien
cacagacgcccccacagtcacgggg

SEQ ID NO: 1582988 - DNA, 25 bp, Homo sapien
cagacgcccccacagtcacggggga

SEQ ID NO: 1582989 - DNA, 25 bp, Homo sapien
agacgcccccacagtcacgggggag

SEQ ID NO: 1582990 - DNA, 25 bp, Homo sapien
tcacagacgcccccacagtcacggg

SEQ ID NO: 1582991 - DNA, 25 bp, Homo sapien
gagaagaccccgtgcaagtggcttg

SEQ ID NO: 1582992 - DNA, 25 bp, Homo sapien
gcaagtggcttgcaggaagccgggc

SEQ ID NO: 1582993 - DNA, 25 bp, Homo sapien
aagtggcttgcaggaagccgggcca

SEQ ID NO: 1582994 - DNA, 25 bp, Homo sapien
cctgcacccgtgagaagaccccgtg

SEQ ID NO: 1582995 - DNA, 25 bp, Homo sapien
tcatgctgcgggtaatccctgtcca

SEQ ID NO: 1582996 - DNA, 25 bp, Homo sapien
gggtaatccctgtccatggcgggcc

SEQ ID NO: 1582997 - DNA, 25 bp, Homo sapien
tgcgggtaatccctgtccatggcgg

SEQ ID NO: 1582998 - DNA, 25 bp, Homo sapien
gggttcatgctgcgggtaatccctg

SEQ ID NO: 1582999 - DNA, 25 bp, Homo sapien
ccgccggggcgtctatctgggcttc

SEQ ID NO: 1583000 - DNA, 25 bp, Homo sapien
gggccgccggggcgtctatctgggc

SEQ ID NO: 1583001 - DNA, 25 bp, Homo sapien
gccgccggggcgtctatctgggctt

SEQ ID NO: 1583002 - DNA, 25 bp, Homo sapien
cgccggggcgtctatctgggcttct

SEQ ID NO: 1583003 - DNA, 25 bp, Homo sapien
gcatccccactgagaacgttcctgg

SEQ ID NO: 1583004 - DNA, 25 bp, Homo sapien
agcatccccactgagaacgttcctg

SEQ ID NO: 1583005 - DNA, 25 bp, Homo sapien
catccccactgagaacgttcctggg

SEQ ID NO: 1583006 - DNA, 25 bp, Homo sapien
cagcatccccactgagaacgttcct

SEQ ID NO: 1583007 - DNA, 25 bp, Homo sapien
gagaggcacgtctctgcccggcgct

SEQ ID NO: 1583008 - DNA, 25 bp, Homo sapien
ctggagtgaagaaatctccgggact

SEQ ID NO: 1583009 - DNA, 25 bp, Homo sapien
gcaggcacttgtgcaatcccgtggg

SEQ ID NO: 1583010 - DNA, 25 bp, Homo sapien
acttccagtaattgccgtccagcca

SEQ ID NO: 1583011 - DNA, 25 bp, Homo sapien
catgaccgtcctcggggtacaccat

SEQ ID NO: 1583012 - DNA, 25 bp, Homo sapien
actcagggcgctcctcagctctgag

SEQ ID NO: 1583013 - DNA, 25 bp, Homo sapien
ccacacagtcctgagctgatgggca

SEQ ID NO: 1583014 - DNA, 25 bp, Homo sapien
ccaggccccacggtggacggagctt

SEQ ID NO: 1583015 - DNA, 25 bp, Homo sapien
ctgaaatcaggtcttcaagggagtc

SEQ ID NO: 1583016 - DNA, 25 bp, Homo sapien
agggggcccgcgctttatcagcacg

SEQ ID NO: 1583017 - DNA, 25 bp, Homo sapien
tcgttgtaaaagagaacgatgaagg

SEQ ID NO: 1583018 - DNA, 25 bp, Homo sapien
tcaagggagtcgttgtaaaagagaa

SEQ ID NO: 1583019 - DNA, 25 bp, Homo sapien
actttcggatgtggacacggaggcc

SEQ ID NO: 1583020 - DNA, 25 bp, Homo sapien
cagacccgagccgtctgcagatggg

SEQ ID NO: 1583021 - DNA, 25 bp, Homo sapien
cacggaggcccctaggtggagcctt

SEQ ID NO: 1583022 - DNA, 25 bp, Homo sapien
agagccataaccgagaccacgggag

SEQ ID NO: 1583023 - DNA, 25 bp, Homo sapien
gttctccgggcaggcacaaggcgct

SEQ ID NO: 1583024 - DNA, 25 bp, Homo sapien
acaaggcgctccctgcgtcccagga

SEQ ID NO: 1583025 - DNA, 25 bp, Homo sapien
ggttctccgggcaggcacaaggcgc

SEQ ID NO: 1583026 - DNA, 25 bp, Homo sapien
gggcaggcacaaggcgctccctgcg

SEQ ID NO: 1583027 - DNA, 25 bp, Homo sapien
gtccagccgccggacagcgttcagt

SEQ ID NO: 1583028 - DNA, 25 bp, Homo sapien
cgtccacccacattccagactccaa

SEQ ID NO: 1583029 - DNA, 25 bp, Homo sapien
gggaagagagcagaccatcgtccac

SEQ ID NO: 1583030 - DNA, 25 bp, Homo sapien
cgccggacagcgttcagtgggaaga

SEQ ID NO: 1583031 - DNA, 25 bp, Homo sapien
gcatggtcagcacggtgccgaatgc

SEQ ID NO: 1583032 - DNA, 25 bp, Homo sapien
caggcatggtcagcacggtgccgaa

SEQ ID NO: 1583033 - DNA, 25 bp, Homo sapien
aggcatggtcagcacggtgccgaat

SEQ ID NO: 1583034 - DNA, 25 bp, Homo sapien
atggtcagcacggtgccgaatgcag

SEQ ID NO: 1583035 - DNA, 25 bp, Homo sapien
actgtccttgagcttaagtccagcc

SEQ ID NO: 1583036 - DNA, 25 bp, Homo sapien
tccttggggagtgccaagcgttgcc

SEQ ID NO: 1583037 - DNA, 25 bp, Homo sapien
tgatcccagacaagtggctcgaccg

SEQ ID NO: 1583038 - DNA, 25 bp, Homo sapien
gcgttgccagcagccgggctatgct

SEQ ID NO: 1583039 - DNA, 25 bp, Homo sapien
gaggaatccaggacgacccctctgc

SEQ ID NO: 1583040 - DNA, 25 bp, Homo sapien
tgtgccccgggaggcaccacaccca

SEQ ID NO: 1583041 - DNA, 25 bp, Homo sapien
gagaagggtcccacgcatgaggaca

SEQ ID NO: 1583042 - DNA, 25 bp, Homo sapien
atgaggacatttgtgacgatgccgg

SEQ ID NO: 1583043 - DNA, 25 bp, Homo sapien
ccatggcgggcagggactttctccg

SEQ ID NO: 1583044 - DNA, 25 bp, Homo sapien
acgggcacgagtcacaaagcaggtc

SEQ ID NO: 1583045 - DNA, 25 bp, Homo sapien
tcaatcacaaggctccgggaagcac

SEQ ID NO: 1583046 - DNA, 25 bp, Homo sapien
tgacatgcaaaggaagacgcctcct

SEQ ID NO: 1583047 - DNA, 25 bp, Homo sapien
ggagcccgcggcgcctgtttctccg

SEQ ID NO: 1583048 - DNA, 25 bp, Homo sapien
gcccgcggcgcctgtttctccgagc

SEQ ID NO: 1583049 - DNA, 25 bp, Homo sapien
cacttccgggtttcgggcgccatct

SEQ ID NO: 1583050 - DNA, 25 bp, Homo sapien
gtttctccgagcctcgcagctgccg

SEQ ID NO: 1583051 - DNA, 25 bp, Homo sapien
tgtctctgtctttgtctccctgtct

SEQ ID NO: 1583052 - DNA, 25 bp, Homo sapien
caccgctcccggcctgtctctctgt

SEQ ID NO: 1583053 - DNA, 25 bp, Homo sapien
tctgtctctgtctttgtctccctgt

SEQ ID NO: 1583054 - DNA, 25 bp, Homo sapien
cgctcccggcctgtctctctgtttc

SEQ ID NO: 1583055 - DNA, 25 bp, Homo sapien
gtcggtgctggccggcgtgttcccg

SEQ ID NO: 1583056 - DNA, 25 bp, Homo sapien
tgagatcctaccaggccaggtcggg

SEQ ID NO: 1583057 - DNA, 25 bp, Homo sapien
cagggtgtcctcaggtcggtgctgg

SEQ ID NO: 1583058 - DNA, 25 bp, Homo sapien
agtgagatcctaccaggccaggtcg

SEQ ID NO: 1583059 - DNA, 25 bp, Homo sapien
agccacgggcagaagtagggcacca

SEQ ID NO: 1583060 - DNA, 25 bp, Homo sapien
caggccacgaagaagccggatgctg

SEQ ID NO: 1583061 - DNA, 25 bp, Homo sapien
gggccatgtattcatccgagatgaa

SEQ ID NO: 1583062 - DNA, 25 bp, Homo sapien
atctaaggacgacaaggcagaggcc

SEQ ID NO: 1583063 - DNA, 25 bp, Homo sapien
ttcctggaccttcacctcggatccg

SEQ ID NO: 1583064 - DNA, 25 bp, Homo sapien
gacttcctggaccttcacctcggat

SEQ ID NO: 1583065 - DNA, 25 bp, Homo sapien
ggacttcctggaccttcacctcgga

SEQ ID NO: 1583066 - DNA, 25 bp, Homo sapien
ctggaccttcacctcggatccgctg

SEQ ID NO: 1583067 - DNA, 25 bp, Homo sapien
aaagaaattccgtgtgtagttcaca

SEQ ID NO: 1583068 - DNA, 25 bp, Homo sapien
gcgtgggacctaccgatgccaatta

SEQ ID NO: 1583069 - DNA, 25 bp, Homo sapien
ttctgtctgtaatggtcaccaagta

SEQ ID NO: 1583070 - DNA, 25 bp, Homo sapien
gaggtggtctttgaacggagaatcc

SEQ ID NO: 1583071 - DNA, 25 bp, Homo sapien
ggccaagctcatcggcaagtacctg

SEQ ID NO: 1583072 - DNA, 25 bp, Homo sapien
tcggtgggtatggacacgttcatcc

SEQ ID NO: 1583073 - DNA, 25 bp, Homo sapien
gaagaagaagttgcgaaggatcccc

SEQ ID NO: 1583074 - DNA, 25 bp, Homo sapien
gcaggagggccgtcaagatcctcaa

SEQ ID NO: 1583075 - DNA, 25 bp, Homo sapien
tcagtcagcaggagggaaacgtagc

SEQ ID NO: 1583076 - DNA, 25 bp, Homo sapien
cctggtagcgaaaccctcctgagaa

SEQ ID NO: 1583077 - DNA, 25 bp, Homo sapien
gaattgcatccggaagaccttactt

SEQ ID NO: 1583078 - DNA, 25 bp, Homo sapien
gttacggactttcactcaggcaagg

SEQ ID NO: 1583079 - DNA, 25 bp, Homo sapien
gcagtgagcaatgagccctgggact

SEQ ID NO: 1583080 - DNA, 25 bp, Homo sapien
ctataaataaccttgccgggccctg

SEQ ID NO: 1583081 - DNA, 25 bp, Homo sapien
gccttctgaggttgccctgagggca

SEQ ID NO: 1583082 - DNA, 25 bp, Homo sapien
acatagcccagagagaacggaaaca

SEQ ID NO: 1583083 - DNA, 25 bp, Homo sapien
aaaaacacgagaaacgccatcgcgg

SEQ ID NO: 1583084 - DNA, 25 bp, Homo sapien
gagtgatcgttgtcctcaggagccc

SEQ ID NO: 1583085 - DNA, 25 bp, Homo sapien
caagcaccggaaagagcagtgcaca

SEQ ID NO: 1583086 - DNA, 25 bp, Homo sapien
cacgccgcagtgaggtaaacggtct

SEQ ID NO: 1583087 - DNA, 25 bp, Homo sapien
atggtaggacgcacaggcccgagcc

SEQ ID NO: 1583088 - DNA, 25 bp, Homo sapien
ttgtccagcaccgacccggatggta

SEQ ID NO: 1583089 - DNA, 25 bp, Homo sapien
accaacgcgggagtcgccacgacgg

SEQ ID NO: 1583090 - DNA, 25 bp, Homo sapien
aagagtctctcgtcgaggccagccg

SEQ ID NO: 1583091 - DNA, 25 bp, Homo sapien
actcgtggaacagcgcgtccgtctt

SEQ ID NO: 1583092 - DNA, 25 bp, Homo sapien
cgtccgtcttctcgtcgatgctgta

SEQ ID NO: 1583093 - DNA, 25 bp, Homo sapien
tgctggcgtagccactgtccatctg

SEQ ID NO: 1583094 - DNA, 25 bp, Homo sapien
tgtcgtcgaagtgcgggtcgtggcg

SEQ ID NO: 1583095 - DNA, 25 bp, Homo sapien
gagtcgcggtcgttgccgctgctgc

SEQ ID NO: 1583096 - DNA, 25 bp, Homo sapien
aggcggccgcatgcagctcaagcga

SEQ ID NO: 1583097 - DNA, 25 bp, Homo sapien
tgctgctgtggtccgaggcggccgc

SEQ ID NO: 1583098 - DNA, 25 bp, Homo sapien
acaggtcgcggtagctggtctgggc

SEQ ID NO: 1583099 - DNA, 25 bp, Homo sapien
acagtgcacagacgtgagggtcacc

SEQ ID NO: 1583100 - DNA, 25 bp, Homo sapien
gagctgtggcgcctgcttattaagc

SEQ ID NO: 1583101 - DNA, 25 bp, Homo sapien
agtcaacatgcttctctccgggagt

SEQ ID NO: 1583102 - DNA, 25 bp, Homo sapien
catcccgcctctggatcagggaggg

SEQ ID NO: 1583103 - DNA, 25 bp, Homo sapien
gaggggccttgccgctggaggcagg

SEQ ID NO: 1583104 - DNA, 25 bp, Homo sapien
cagtgagtccgcctctgggaggggc

SEQ ID NO: 1583105 - DNA, 25 bp, Homo sapien
ggcctggagagcgctccctgggccg

SEQ ID NO: 1583106 - DNA, 25 bp, Homo sapien
aggcaggcgagcgcgtgtccacggg

SEQ ID NO: 1583107 - DNA, 25 bp, Homo sapien
gcaagggcccacaggtccaccccta

SEQ ID NO: 1583108 - DNA, 25 bp, Homo sapien
caagggcccacaggtccacccctag

SEQ ID NO: 1583109 - DNA, 25 bp, Homo sapien
agggcccacaggtccacccctagca

SEQ ID NO: 1583110 - DNA, 25 bp, Homo sapien
gcccacaggtccacccctagcacct

SEQ ID NO: 1583111 - DNA, 25 bp, Homo sapien
cgggcaatgtactggatgaagtcct

SEQ ID NO: 1583112 - DNA, 25 bp, Homo sapien
cgcccgcccgggcaatgtactggat

SEQ ID NO: 1583113 - DNA, 25 bp, Homo sapien
tcctgctccgtgctctcactggctg

SEQ ID NO: 1583114 - DNA, 25 bp, Homo sapien
gtgcgggaaggccacggcgtcgccc

SEQ ID NO: 1583115 - DNA, 25 bp, Homo sapien
gctggcatggcggcgcaggcgggtg

SEQ ID NO: 1583116 - DNA, 25 bp, Homo sapien
tggcatggcggcgcaggcgggtgag

SEQ ID NO: 1583117 - DNA, 25 bp, Homo sapien
ctggcatggcggcgcaggcgggtga

SEQ ID NO: 1583118 - DNA, 25 bp, Homo sapien
ggcatggcggcgcaggcgggtgagg

SEQ ID NO: 1583119 - DNA, 25 bp, Homo sapien
tggtgctcctggtaccggcatccaa

SEQ ID NO: 1583120 - DNA, 25 bp, Homo sapien
cagccttggtgctcctggtaccggc

SEQ ID NO: 1583121 - DNA, 25 bp, Homo sapien
tgcagaacggtacctgccccggatc

SEQ ID NO: 1583122 - DNA, 25 bp, Homo sapien
ctgcagaacggtacctgccccggat

SEQ ID NO: 1583123 - DNA, 25 bp, Homo sapien
atctctgcgaagtcagtggcgcccg

SEQ ID NO: 1583124 - DNA, 25 bp, Homo sapien
tggcgcccgcggctgagttgtaggg

SEQ ID NO: 1583125 - DNA, 25 bp, Homo sapien
atgccgaggggctgatctctgcgaa

SEQ ID NO: 1583126 - DNA, 25 bp, Homo sapien
ccccagagtcgctagatgccgaggg

SEQ ID NO: 1583127 - DNA, 25 bp, Homo sapien
cagagcggccggtgagggccttccc

SEQ ID NO: 1583128 - DNA, 25 bp, Homo sapien
cacagagcggccggtgagggccttc

SEQ ID NO: 1583129 - DNA, 25 bp, Homo sapien
cccacagagcggccggtgagggcct

SEQ ID NO: 1583130 - DNA, 25 bp, Homo sapien
acagagcggccggtgagggccttcc

SEQ ID NO: 1583131 - DNA, 25 bp, Homo sapien
tgcgtgagccgggcattcttcaggt

SEQ ID NO: 1583132 - DNA, 25 bp, Homo sapien
gcaggtgcgtgagccgggcattctt

SEQ ID NO: 1583133 - DNA, 25 bp, Homo sapien
tggcctcgcctgagtcacactcgtg

SEQ ID NO: 1583134 - DNA, 25 bp, Homo sapien
tgagtcacactcgtggatggtgaca

SEQ ID NO: 1583135 - DNA, 25 bp, Homo sapien
aaacagcgccgcctcattgaaggag

SEQ ID NO: 1583136 - DNA, 25 bp, Homo sapien
ggcgacccttgtcctgcgtcttgcg

SEQ ID NO: 1583137 - DNA, 25 bp, Homo sapien
gtcttgcggctctgctcaaacagcg

SEQ ID NO: 1583138 - DNA, 25 bp, Homo sapien
gacaggaagcgttcggtctccgcat

SEQ ID NO: 1583139 - DNA, 25 bp, Homo sapien
gctggcggggcgagggacactcgtc

SEQ ID NO: 1583140 - DNA, 25 bp, Homo sapien
gacactcgtccatccgctcacacac

SEQ ID NO: 1583141 - DNA, 25 bp, Homo sapien
tcactcgctcagcacgcgcctgggc

SEQ ID NO: 1583142 - DNA, 25 bp, Homo sapien
cgggccacgccaggcgcctggtccc

SEQ ID NO: 1583143 - DNA, 25 bp, Homo sapien
agatgagtcggaatcgagctgcgcc

SEQ ID NO: 1583144 - DNA, 25 bp, Homo sapien
gagtcggaatcgagctgcgcccagt

SEQ ID NO: 1583145 - DNA, 25 bp, Homo sapien
gaaacagagatgagtcggaatcgag

SEQ ID NO: 1583146 - DNA, 25 bp, Homo sapien
ctgggcgttaaggaaacagagatga

SEQ ID NO: 1583147 - DNA, 25 bp, Homo sapien
tgggtgccgttgtccaggtaggtgg

SEQ ID NO: 1583148 - DNA, 25 bp, Homo sapien
gtgggtgccgttgtccaggtaggtg

SEQ ID NO: 1583149 - DNA, 25 bp, Homo sapien
tgggtgggtgccgttgtccaggtag

SEQ ID NO: 1583150 - DNA, 25 bp, Homo sapien
tgttgaggcgctggtggacgtccca

SEQ ID NO: 1583151 - DNA, 25 bp, Homo sapien
ggagcaggacgccagacaacaccac

SEQ ID NO: 1583152 - DNA, 25 bp, Homo sapien
ggacgtcccagcagcgcttgcagag

SEQ ID NO: 1583153 - DNA, 25 bp, Homo sapien
gcgtgccccccacgaacagcgacat

SEQ ID NO: 1583154 - DNA, 25 bp, Homo sapien
tcccacgacgtcgtcagggctactg

SEQ ID NO: 1583155 - DNA, 25 bp, Homo sapien
gcattgtcccacgacgtcgtcaggg

SEQ ID NO: 1583156 - DNA, 25 bp, Homo sapien
ggcgtccagtggcattgtcccacga

SEQ ID NO: 1583157 - DNA, 25 bp, Homo sapien
tccagtggcattgtcccacgacgtc

SEQ ID NO: 1583158 - DNA, 25 bp, Homo sapien
gggtgcgcctgtacccatcacaact

SEQ ID NO: 1583159 - DNA, 25 bp, Homo sapien
cccacccggccatggttgggtagag

SEQ ID NO: 1583160 - DNA, 25 bp, Homo sapien
ggcctgtcctgcaaggtagcgccag

SEQ ID NO: 1583161 - DNA, 25 bp, Homo sapien
agctagacctacttctcctgcagga

SEQ ID NO: 1583162 - DNA, 25 bp, Homo sapien
gcacgtgaccgcgttggcggcgcgc

SEQ ID NO: 1583163 - DNA, 25 bp, Homo sapien
aatttatgaatggagagcgcggcgc

SEQ ID NO: 1583164 - DNA, 25 bp, Homo sapien
acgagcggcccatgggcggcgggct

SEQ ID NO: 1583165 - DNA, 25 bp, Homo sapien
cggagcaggcggagaatttatgaat

SEQ ID NO: 1583166 - DNA, 25 bp, Homo sapien
cctctcacgttgcttggtccgtggg

SEQ ID NO: 1583167 - DNA, 25 bp, Homo sapien
gggtgtcctggaattcacgactctg

SEQ ID NO: 1583168 - DNA, 25 bp, Homo sapien
tcctggaattcacgactctgcagcc

SEQ ID NO: 1583169 - DNA, 25 bp, Homo sapien
attcacgactctgcagcccgaggtg

SEQ ID NO: 1583170 - DNA, 25 bp, Homo sapien
tccctcttagaccatcgaacctcat

SEQ ID NO: 1583171 - DNA, 25 bp, Homo sapien
tcgtggggtgacatcagaacgacac

SEQ ID NO: 1583172 - DNA, 25 bp, Homo sapien
ctccctcttagaccatcgaacctca

SEQ ID NO: 1583173 - DNA, 25 bp, Homo sapien
tcctcgtggggtgacatcagaacga

SEQ ID NO: 1583174 - DNA, 25 bp, Homo sapien
gctgtgtgaagaaaaggtacctgta

SEQ ID NO: 1583175 - DNA, 25 bp, Homo sapien
gctggatatgcggtcctgagagcca

SEQ ID NO: 1583176 - DNA, 25 bp, Homo sapien
gacagggcggaattccagaggaacc

SEQ ID NO: 1583177 - DNA, 25 bp, Homo sapien
gagactgagtctattaggcctccca

SEQ ID NO: 1583178 - DNA, 25 bp, Homo sapien
gcagaatgagcctggccctgtagtt

SEQ ID NO: 1583179 - DNA, 25 bp, Homo sapien
gccacctttgttctcactggaagca

SEQ ID NO: 1583180 - DNA, 25 bp, Homo sapien
tattcatttagactggctctgggca

SEQ ID NO: 1583181 - DNA, 25 bp, Homo sapien
tgtgaagcccagcaagttccgacaa

SEQ ID NO: 1583182 - DNA, 25 bp, Homo sapien
ccgtggttcctacaaagaggagcca

SEQ ID NO: 1583183 - DNA, 25 bp, Homo sapien
gcaagctgaccttggtacccaccgt

SEQ ID NO: 1583184 - DNA, 25 bp, Homo sapien
tgcacgcgcttagggccctggatct

SEQ ID NO: 1583185 - DNA, 25 bp, Homo sapien
aagcgggcctcatggtaaatggcca

SEQ ID NO: 1583186 - DNA, 25 bp, Homo sapien
ctgccggccggtgtccagtgccgcc

SEQ ID NO: 1583187 - DNA, 25 bp, Homo sapien
ccacctgcccggaggtgagcctggg

SEQ ID NO: 1583188 - DNA, 25 bp, Homo sapien
acaaggactcttagtcccaggtgag

SEQ ID NO: 1583189 - DNA, 25 bp, Homo sapien
gtgtcctcgccctgccggccggtgt

SEQ ID NO: 1583190 - DNA, 25 bp, Homo sapien
gagccagatccgcatgtgcaagccc

SEQ ID NO: 1583191 - DNA, 25 bp, Homo sapien
acctcctgcgagaagctcacggctg

SEQ ID NO: 1583192 - DNA, 25 bp, Homo sapien
cgccacccggcactaccagggcatg

SEQ ID NO: 1583193 - DNA, 25 bp, Homo sapien
gcaccatcctgcagatcctgaacga

SEQ ID NO: 1583194 - DNA, 25 bp, Homo sapien
catggcaccctttcctgtcgggaag

SEQ ID NO: 1583195 - DNA, 25 bp, Homo sapien
ttcgaggactccgtgtggaagccag

SEQ ID NO: 1583196 - DNA, 25 bp, Homo sapien
catcaagtcagagttcgtggtggct

SEQ ID NO: 1583197 - DNA, 25 bp, Homo sapien
ttctgcagcagaaacggctccgtag

SEQ ID NO: 1583198 - DNA, 25 bp, Homo sapien
taaataacgtctgtgcctccactgg

SEQ ID NO: 1583199 - DNA, 25 bp, Homo sapien
cgttgttctcgtaggtgaaccccag

SEQ ID NO: 1583200 - DNA, 25 bp, Homo sapien
catcacgtgttataactgtagcgct

SEQ ID NO: 1583201 - DNA, 25 bp, Homo sapien
ggctgcccaagaaagcattacccgc

SEQ ID NO: 1583202 - DNA, 25 bp, Homo sapien
tgagaatttcccacgctccttcccc

SEQ ID NO: 1583203 - DNA, 25 bp, Homo sapien
cctgagaatttcccacgctccttcc

SEQ ID NO: 1583204 - DNA, 25 bp, Homo sapien
ctgagaatttcccacgctccttccc

SEQ ID NO: 1583205 - DNA, 25 bp, Homo sapien
agtagcagcgcgacgaagcctccag

SEQ ID NO: 1583206 - DNA, 25 bp, Homo sapien
cagaaggcgggacttcagcccggca

SEQ ID NO: 1583207 - DNA, 25 bp, Homo sapien
gctcatcggcgtgccccagtagcag

SEQ ID NO: 1583208 - DNA, 25 bp, Homo sapien
ctccccgcgcgtctgcaaagttggg

SEQ ID NO: 1583209 - DNA, 25 bp, Homo sapien
ccaaggtgtttgtgcagcctggcct

SEQ ID NO: 1583210 - DNA, 25 bp, Homo sapien
ctccaacttggtgtgtgctcagaga

SEQ ID NO: 1583211 - DNA, 25 bp, Homo sapien
ggagactagccaaggtgtttgtgca

SEQ ID NO: 1583212 - DNA, 25 bp, Homo sapien
tctgaaatgccggtgtgagctccgg

SEQ ID NO: 1583213 - DNA, 25 bp, Homo sapien
cgccgcggacggagcgaggccgcag

SEQ ID NO: 1583214 - DNA, 25 bp, Homo sapien
tctcccacgcgaggcgtctgcgtgg

SEQ ID NO: 1583215 - DNA, 25 bp, Homo sapien
ctggtgtccgcaacgggcagcgcgt

SEQ ID NO: 1583216 - DNA, 25 bp, Homo sapien
ggagcccggccgctcgagccaaacg

SEQ ID NO: 1583217 - DNA, 25 bp, Homo sapien
taataaccaccctgcgtgagtggct

SEQ ID NO: 1583218 - DNA, 25 bp, Homo sapien
gaaagaatgggcctgaattgctccc

SEQ ID NO: 1583219 - DNA, 25 bp, Homo sapien
gaggctcacagaaccagggaacgat

SEQ ID NO: 1583220 - DNA, 25 bp, Homo sapien
agatggcggcggctttaagactccc

SEQ ID NO: 1583221 - DNA, 25 bp, Homo sapien
gtgcccagcgaaatggcgggagcgc

SEQ ID NO: 1583222 - DNA, 25 bp, Homo sapien
tcccggatggagtggcgcagggtgc

SEQ ID NO: 1583223 - DNA, 25 bp, Homo sapien
ggtatccacacaccaacgcttttgc

SEQ ID NO: 1583224 - DNA, 25 bp, Homo sapien
cgggagcgccgagttcccggatgga

SEQ ID NO: 1583225 - DNA, 25 bp, Homo sapien
ccaaagtttggtccaagttggcaca

SEQ ID NO: 1583226 - DNA, 25 bp, Homo sapien
gcgtggcccgttctagtgtggttcc

SEQ ID NO: 1583227 - DNA, 25 bp, Homo sapien
ctcgtaaatcttgggtaggcgtggc

SEQ ID NO: 1583228 - DNA, 25 bp, Homo sapien
taaatagccagttctcctaaatgcc

SEQ ID NO: 1583229 - DNA, 25 bp, Homo sapien
ggctatggaagtcagtacctgccct

SEQ ID NO: 1583230 - DNA, 25 bp, Homo sapien
tatggaagtcagtacctgccctgag

SEQ ID NO: 1583231 - DNA, 25 bp, Homo sapien
tgacagccagccccccccccagtct

SEQ ID NO: 1583232 - DNA, 25 bp, Homo sapien
atggaagtcagtacctgccctgagg

SEQ ID NO: 1583233 - DNA, 25 bp, Homo sapien
aattatttgaattaagaagtcctag

SEQ ID NO: 1583234 - DNA, 25 bp, Homo sapien
tttgaattaagaagtcctaggtggc

SEQ ID NO: 1583235 - DNA, 25 bp, Homo sapien
tgggtgacagttagacacactgccc

SEQ ID NO: 1583236 - DNA, 25 bp, Homo sapien
agtctgggtgacagttagacacact

SEQ ID NO: 1583237 - DNA, 25 bp, Homo sapien
gagccatttctatcgcaggacgcaa

SEQ ID NO: 1583238 - DNA, 25 bp, Homo sapien
tacttttttgaccacgagccatgag

SEQ ID NO: 1583239 - DNA, 25 bp, Homo sapien
tacggtaagtcacactccgagggcg

SEQ ID NO: 1583240 - DNA, 25 bp, Homo sapien
tctgagtgtagtgtggtaggacccc

SEQ ID NO: 1583241 - DNA, 25 bp, Homo sapien
gccctgtggaggacgttgggagtaa

SEQ ID NO: 1583242 - DNA, 25 bp, Homo sapien
cccaggagggacttcacctggaaca

SEQ ID NO: 1583243 - DNA, 25 bp, Homo sapien
catgctggcctgtgacggagcctga

SEQ ID NO: 1583244 - DNA, 25 bp, Homo sapien
tgacctctggggtcactgtcccagg

SEQ ID NO: 1583245 - DNA, 25 bp, Homo sapien
tgcggacctcggttcagcgcacgag

SEQ ID NO: 1583246 - DNA, 25 bp, Homo sapien
gacctcggttcagcgcacgagtagg

SEQ ID NO: 1583247 - DNA, 25 bp, Homo sapien
gaaaagcctgcggacctcggttcag

SEQ ID NO: 1583248 - DNA, 25 bp, Homo sapien
tggaagaaaagcctgcggacctcgg

SEQ ID NO: 1583249 - DNA, 25 bp, Homo sapien
agcccgatttcctcggaagccgcga

SEQ ID NO: 1583250 - DNA, 25 bp, Homo sapien
gccgacgcgttctcagtgtccgtga

SEQ ID NO: 1583251 - DNA, 25 bp, Homo sapien
gggcctccgtcctgatcccttggag

SEQ ID NO: 1583252 - DNA, 25 bp, Homo sapien
tcccgggttccctgtagcaggcttg

SEQ ID NO: 1583253 - DNA, 25 bp, Homo sapien
tctgggcgctgaccaggaaactgag

SEQ ID NO: 1583254 - DNA, 25 bp, Homo sapien
tgaggagctggctcaaggtcatgca

SEQ ID NO: 1583255 - DNA, 25 bp, Homo sapien
ttttgaaccaggtccgggccaggca

SEQ ID NO: 1583256 - DNA, 25 bp, Homo sapien
acaggagaagcccccgttggtcaga

SEQ ID NO: 1583257 - DNA, 25 bp, Homo sapien
ttcgtggttggatcaaaaagacttg

SEQ ID NO: 1583258 - DNA, 25 bp, Homo sapien
aatttattccctgccgttgtagcgg

SEQ ID NO: 1583259 - DNA, 25 bp, Homo sapien
ttcggaatcacagtcccgccgtgtc

SEQ ID NO: 1583260 - DNA, 25 bp, Homo sapien
tgttttgccccagcgcccttcggaa

SEQ ID NO: 1583261 - DNA, 25 bp, Homo sapien
ttttagagtagaagctgcacttggc

SEQ ID NO: 1583262 - DNA, 25 bp, Homo sapien
tattcctgaggacggactggaccgt

SEQ ID NO: 1583263 - DNA, 25 bp, Homo sapien
tctccgaggccgagaagaccttctg

SEQ ID NO: 1583264 - DNA, 25 bp, Homo sapien
cacttggcaataagctcgtgtcgtc

SEQ ID NO: 1583265 - DNA, 25 bp, Homo sapien
aacaacacatttatacggatttcat

SEQ ID NO: 1583266 - DNA, 25 bp, Homo sapien
atatatattgtgtacggccgccggc

SEQ ID NO: 1583267 - DNA, 25 bp, Homo sapien
ttcatatttctacccgcctttcctg

SEQ ID NO: 1583268 - DNA, 25 bp, Homo sapien
cggctcgaggcacgcccggtggtgg

SEQ ID NO: 1583269 - DNA, 25 bp, Homo sapien
tagggcccgtatccttcatagccat

SEQ ID NO: 1583270 - DNA, 25 bp, Homo sapien
gggtgcggcttcgaggaacctctgg

SEQ ID NO: 1583271 - DNA, 25 bp, Homo sapien
ctttggttctgtgcatcgttttggg

SEQ ID NO: 1583272 - DNA, 25 bp, Homo sapien
gggtcagaccttgggatgagcattt

SEQ ID NO: 1583273 - DNA, 25 bp, Homo sapien
tccgaggacatgtccagtagctggt

SEQ ID NO: 1583274 - DNA, 25 bp, Homo sapien
gccggcgcgcgctgttcagctgcat

SEQ ID NO: 1583275 - DNA, 25 bp, Homo sapien
aggagaagcacgtcccgcgggtgcg

SEQ ID NO: 1583276 - DNA, 25 bp, Homo sapien
gttcagctgcatccgctgctccgag

SEQ ID NO: 1583277 - DNA, 25 bp, Homo sapien
ctgggtgaagttgcggaaggtctgt

SEQ ID NO: 1583278 - DNA, 25 bp, Homo sapien
tgtttcttctgctgctgtacctctg

SEQ ID NO: 1583279 - DNA, 25 bp, Homo sapien
ttcttctgctgctgtacctctgccg

SEQ ID NO: 1583280 - DNA, 25 bp, Homo sapien
gaagttgcggaaggtctgtttcttc

SEQ ID NO: 1583281 - DNA, 25 bp, Homo sapien
gaagtccgtccaggagcccaggtgc

SEQ ID NO: 1583282 - DNA, 25 bp, Homo sapien
tgtgtgtccatcaacccaatcaact

SEQ ID NO: 1583283 - DNA, 25 bp, Homo sapien
tgtccatcaacccaatcaactttag

SEQ ID NO: 1583284 - DNA, 25 bp, Homo sapien
tgtgtccatcaacccaatcaacttt

SEQ ID NO: 1583285 - DNA, 25 bp, Homo sapien
tccatcaacccaatcaactttagaa

SEQ ID NO: 1583286 - DNA, 25 bp, Homo sapien
tgtgcagggcgatgggccgagggct

SEQ ID NO: 1583287 - DNA, 25 bp, Homo sapien
tacagcaagtcggagagagacagag

SEQ ID NO: 1583288 - DNA, 25 bp, Homo sapien
tacagagatacagcaagtcggagag

SEQ ID NO: 1583289 - DNA, 25 bp, Homo sapien
cttgggctccgcctgacttttctgg

SEQ ID NO: 1583290 - DNA, 25 bp, Homo sapien
gagggcccggatccatcaatggaca

SEQ ID NO: 1583291 - DNA, 25 bp, Homo sapien
tgaggctgcttggtgtctcctggaa

SEQ ID NO: 1583292 - DNA, 25 bp, Homo sapien
tctcctggacttagcagaggtcggt

SEQ ID NO: 1583293 - DNA, 25 bp, Homo sapien
gcccgtgtcccaggagcttggcaag

SEQ ID NO: 1583294 - DNA, 25 bp, Homo sapien
gccacagcagagtttagagcagaag

SEQ ID NO: 1583295 - DNA, 25 bp, Homo sapien
tctgccacagtgaagctttggagga

SEQ ID NO: 1583296 - DNA, 25 bp, Homo sapien
taaggacctcagagcggaattctgc

SEQ ID NO: 1583297 - DNA, 25 bp, Homo sapien
ccatcacgggttgagaaattggagg

SEQ ID NO: 1583298 - DNA, 25 bp, Homo sapien
ctggacgcctcgagtttaggaaacg

SEQ ID NO: 1583299 - DNA, 25 bp, Homo sapien
agtgtgtgtgtaacgccctctccct

SEQ ID NO: 1583300 - DNA, 25 bp, Homo sapien
gattgaaattctcggcccgtgcacg

SEQ ID NO: 1583301 - DNA, 25 bp, Homo sapien
cggagccgcccggattgaaattctc

SEQ ID NO: 1583302 - DNA, 25 bp, Homo sapien
gatcccgcgtagtccaaggcattgg

SEQ ID NO: 1583303 - DNA, 25 bp, Homo sapien
aagagagcaaggagactgatcccgc

SEQ ID NO: 1583304 - DNA, 25 bp, Homo sapien
caaataactgatgaccaggcggcac

SEQ ID NO: 1583305 - DNA, 25 bp, Homo sapien
tcagaaacgtctgtgacaggcccat

SEQ ID NO: 1583306 - DNA, 25 bp, Homo sapien
tctcatcattggtggttagactcaa

SEQ ID NO: 1583307 - DNA, 25 bp, Homo sapien
ccatcccaagggtgcgtttgtcgca

SEQ ID NO: 1583308 - DNA, 25 bp, Homo sapien
tttaagcgaatgacacaaagtcagg

SEQ ID NO: 1583309 - DNA, 25 bp, Homo sapien
gaaagtcgcgcacacataggacaga

SEQ ID NO: 1583310 - DNA, 25 bp, Homo sapien
acacatgaacccgaaaatgaaaggg

SEQ ID NO: 1583311 - DNA, 25 bp, Homo sapien
tgtgaagggtctggtcaaacacccc

SEQ ID NO: 1583312 - DNA, 25 bp, Homo sapien
caagtgtgctatacatcgaaggaca

SEQ ID NO: 1583313 - DNA, 25 bp, Homo sapien
aggccggccgctctcagagtcagag

SEQ ID NO: 1583314 - DNA, 25 bp, Homo sapien
gaaagcctcccgtgacctgtgagaa

SEQ ID NO: 1583315 - DNA, 25 bp, Homo sapien
caagacggctgaggagaagtacatc

SEQ ID NO: 1583316 - DNA, 25 bp, Homo sapien
gagactctgctctgaaccgaatgga

SEQ ID NO: 1583317 - DNA, 25 bp, Homo sapien
catctgtgcgatctctgcggtggac

SEQ ID NO: 1583318 - DNA, 25 bp, Homo sapien
gcacgtttgcgtttggacctgtctg

SEQ ID NO: 1583319 - DNA, 25 bp, Homo sapien
cggtggaagcgcctccagtgtgcat

SEQ ID NO: 1583320 - DNA, 25 bp, Homo sapien
tgacaaccagctccttgaagagcgg

SEQ ID NO: 1583321 - DNA, 25 bp, Homo sapien
tgtctgtgcgttctcctgcgtggca

SEQ ID NO: 1583322 - DNA, 25 bp, Homo sapien
gaagcgtattcactgtgcgccagta

SEQ ID NO: 1583323 - DNA, 25 bp, Homo sapien
ggtttctcccgacgtgcacatcgat

SEQ ID NO: 1583324 - DNA, 25 bp, Homo sapien
taagaagcgtctgccgtgatcatgg

SEQ ID NO: 1583325 - DNA, 25 bp, Homo sapien
ccttgtgtggtttccgcctgcgaca

SEQ ID NO: 1583326 - DNA, 25 bp, Homo sapien
tttccaggggcctctgtgtcccgca

SEQ ID NO: 1583327 - DNA, 25 bp, Homo sapien
aggggcctctgtgtcccgcactgtg

SEQ ID NO: 1583328 - DNA, 25 bp, Homo sapien
ctttccaggggcctctgtgtcccgc

SEQ ID NO: 1583329 - DNA, 25 bp, Homo sapien
ggcctctgtgtcccgcactgtgtgt

SEQ ID NO: 1583330 - DNA, 25 bp, Homo sapien
gaagcgcagcctttgtatggaggcc

SEQ ID NO: 1583331 - DNA, 25 bp, Homo sapien
tgtgcccgccatggcagaagcgcag

SEQ ID NO: 1583332 - DNA, 25 bp, Homo sapien
gcagaagcgcagcctttgtatggag

SEQ ID NO: 1583333 - DNA, 25 bp, Homo sapien
ctgtgcccgccatggcagaagcgca

SEQ ID NO: 1583334 - DNA, 25 bp, Homo sapien
cagggacctttagatcttcagtcta

SEQ ID NO: 1583335 - DNA, 25 bp, Homo sapien
ctgccgaaacccgggatcgaaccag

SEQ ID NO: 1583336 - DNA, 25 bp, Homo sapien
atcgaaccagggacctttagatctt

SEQ ID NO: 1583337 - DNA, 25 bp, Homo sapien
cgctctcccaactgagctatttcgg

SEQ ID NO: 1583338 - DNA, 25 bp, Homo sapien
ccccttgttaagaatgcctggccca

SEQ ID NO: 1583339 - DNA, 25 bp, Homo sapien
aatgcctggcccacgcgcggtggct

SEQ ID NO: 1583340 - DNA, 25 bp, Homo sapien
tattccaagcaaattcacagttctg

SEQ ID NO: 1583341 - DNA, 25 bp, Homo sapien
ttattccaagcaaattcacagttct

SEQ ID NO: 1583342 - DNA, 25 bp, Homo sapien
aggagacttcgtgcaggcgcgttcc

SEQ ID NO: 1583343 - DNA, 25 bp, Homo sapien
ttctgtgtagattgacgtgggcagc

SEQ ID NO: 1583344 - DNA, 25 bp, Homo sapien
tagtcttcgcctcgggaaggctctc

SEQ ID NO: 1583345 - DNA, 25 bp, Homo sapien
agggtcacagttcagccgtcaccag

SEQ ID NO: 1583346 - DNA, 25 bp, Homo sapien
tgtggatgatcctgggaccgtcctt

SEQ ID NO: 1583347 - DNA, 25 bp, Homo sapien
ctgggaccgtccttgcttggacact

SEQ ID NO: 1583348 - DNA, 25 bp, Homo sapien
gatcctgggaccgtccttgcttgga

SEQ ID NO: 1583349 - DNA, 25 bp, Homo sapien
ggatgatcctgggaccgtccttgct

SEQ ID NO: 1583350 - DNA, 25 bp, Homo sapien
ggcagtagatccttctcggtacccg

SEQ ID NO: 1583351 - DNA, 25 bp, Homo sapien
ttccatctgaggattcggaccctgc

SEQ ID NO: 1583352 - DNA, 25 bp, Homo sapien
gcccgccgggtgagtactatgagct

SEQ ID NO: 1583353 - DNA, 25 bp, Homo sapien
tatggacagatgtgtacacggacca

SEQ ID NO: 1583354 - DNA, 25 bp, Homo sapien
ttcacagaaacaggatcacacgccg

SEQ ID NO: 1583355 - DNA, 25 bp, Homo sapien
tgacaagttccagcctcgtaggtgc

SEQ ID NO: 1583356 - DNA, 25 bp, Homo sapien
gagtggaattcctgacacacgcctg

SEQ ID NO: 1583357 - DNA, 25 bp, Homo sapien
tatcagccacgtgtgagcttgcgcc

SEQ ID NO: 1583358 - DNA, 25 bp, Homo sapien
tgggcctccctgtgacttgacagca

SEQ ID NO: 1583359 - DNA, 25 bp, Homo sapien
tgaaattcacatcgcaccgggaaca

SEQ ID NO: 1583360 - DNA, 25 bp, Homo sapien
tatatctggtgatcccgtgggactc

SEQ ID NO: 1583361 - DNA, 25 bp, Homo sapien
tgttcagcgttctgcacggttcagg

SEQ ID NO: 1583362 - DNA, 25 bp, Homo sapien
gttgtcaataaacctgccctcgggc

SEQ ID NO: 1583363 - DNA, 25 bp, Homo sapien
tcagaaagagggtcatcgggtcctc

SEQ ID NO: 1583364 - DNA, 25 bp, Homo sapien
cgtcttgtccgagaggtccctgtga

SEQ ID NO: 1583365 - DNA, 25 bp, Homo sapien
tcatcagggacgtgcattcattcag

SEQ ID NO: 1583366 - DNA, 25 bp, Homo sapien
cctggactcccggccaggaaggcac

SEQ ID NO: 1583367 - DNA, 25 bp, Homo sapien
cagcagtgaccctcacagagaagct

SEQ ID NO: 1583368 - DNA, 25 bp, Homo sapien
agcgccggcgtttacttcacctcag

SEQ ID NO: 1583369 - DNA, 25 bp, Homo sapien
acccctcacagagaagccgggaaag

SEQ ID NO: 1583370 - DNA, 25 bp, Homo sapien
tcaccaggggcgtgatcatctgtgg

SEQ ID NO: 1583371 - DNA, 25 bp, Homo sapien
ccagcgccatcacctccgtacggat

SEQ ID NO: 1583372 - DNA, 25 bp, Homo sapien
catctgtgggaaggcgtagtagcgg

SEQ ID NO: 1583373 - DNA, 25 bp, Homo sapien
tagtagcggcagtcggccggtggga

SEQ ID NO: 1583374 - DNA, 25 bp, Homo sapien
agcactgctgaaccagcaaagacag

SEQ ID NO: 1583375 - DNA, 25 bp, Homo sapien
gcagagggaacagcgagacaagcac

SEQ ID NO: 1583376 - DNA, 25 bp, Homo sapien
gcaaccacatagagcccttctcaga

SEQ ID NO: 1583377 - DNA, 25 bp, Homo sapien
aacacgcagggcttaggctgaacca

SEQ ID NO: 1583378 - DNA, 25 bp, Homo sapien
ttggccttccgaagtgccgggatca

SEQ ID NO: 1583379 - DNA, 25 bp, Homo sapien
tgagccaccacgcccagcctgattt

SEQ ID NO: 1583380 - DNA, 25 bp, Homo sapien
ttccgaagtgccgggatcacaggtg

SEQ ID NO: 1583381 - DNA, 25 bp, Homo sapien
ccaccacgcccagcctgatttccat

SEQ ID NO: 1583382 - DNA, 25 bp, Homo sapien
acctctgcccctggggcccaagcaa

SEQ ID NO: 1583383 - DNA, 25 bp, Homo sapien
caacctctgcccctggggcccaagc

SEQ ID NO: 1583384 - DNA, 25 bp, Homo sapien
ttttttaggaaagatgaggtcttgc

SEQ ID NO: 1583385 - DNA, 25 bp, Homo sapien
tctgcccctggggcccaagcaatcc

SEQ ID NO: 1583386 - DNA, 25 bp, Homo sapien
ctgggattatagacctgagccactg

SEQ ID NO: 1583387 - DNA, 25 bp, Homo sapien
ggattatagacctgagccactgctc

SEQ ID NO: 1583388 - DNA, 25 bp, Homo sapien
gggattatagacctgagccactgct

SEQ ID NO: 1583389 - DNA, 25 bp, Homo sapien
attatagacctgagccactgctcct

SEQ ID NO: 1583390 - DNA, 25 bp, Homo sapien
catggggaacttcaggtgggcgcac

SEQ ID NO: 1583391 - DNA, 25 bp, Homo sapien
ccaggtagcaaggtggctccagcag

SEQ ID NO: 1583392 - DNA, 25 bp, Homo sapien
gaccctccccaggtagcaaggtggc

SEQ ID NO: 1583393 - DNA, 25 bp, Homo sapien
ttctaaatgaaccagcacagtccag

SEQ ID NO: 1583394 - DNA, 25 bp, Homo sapien
ccccccggcttcagcaggcgaaagg

SEQ ID NO: 1583395 - DNA, 25 bp, Homo sapien
ccccggcttcagcaggcgaaaggcg

SEQ ID NO: 1583396 - DNA, 25 bp, Homo sapien
ccggcttcagcaggcgaaaggcgtg

SEQ ID NO: 1583397 - DNA, 25 bp, Homo sapien
ggcttcagcaggcgaaaggcgtggt

SEQ ID NO: 1583398 - DNA, 25 bp, Homo sapien
caggtctcctccgagagtgggtacg

SEQ ID NO: 1583399 - DNA, 25 bp, Homo sapien
tcctccgagagtgggtacgtgtcgt

SEQ ID NO: 1583400 - DNA, 25 bp, Homo sapien
tccgagagtgggtacgtgtcgtaca

SEQ ID NO: 1583401 - DNA, 25 bp, Homo sapien
gtctcctccgagagtgggtacgtgt

SEQ ID NO: 1583402 - DNA, 25 bp, Homo sapien
atcaaagtgaccgtcaggcagggtg

SEQ ID NO: 1583403 - DNA, 25 bp, Homo sapien
catcaaagtgaccgtcaggcagggt

SEQ ID NO: 1583404 - DNA, 25 bp, Homo sapien
tgcactcgatgatccaatgctcatc

SEQ ID NO: 1583405 - DNA, 25 bp, Homo sapien
aatgctcatcaatgggcgcctcctg

SEQ ID NO: 1583406 - DNA, 25 bp, Homo sapien
tgacgctgcgatggccatgccaaag

SEQ ID NO: 1583407 - DNA, 25 bp, Homo sapien
gagccgctggaagacgccgtcattg

SEQ ID NO: 1583408 - DNA, 25 bp, Homo sapien
gacctggacttgagactatctggga

SEQ ID NO: 1583409 - DNA, 25 bp, Homo sapien
gaaagttggatttgcaagagtggcc

SEQ ID NO: 1583410 - DNA, 25 bp, Homo sapien
ggctgaactaggctatgtgagtcac

SEQ ID NO: 1583411 - DNA, 25 bp, Homo sapien
cggaacacagtagtcctgagcggga

SEQ ID NO: 1583412 - DNA, 25 bp, Homo sapien
ccagcgcgtgcatatagggggtctc

SEQ ID NO: 1583413 - DNA, 25 bp, Homo sapien
ctcccagcgctccatcaccggcttg

SEQ ID NO: 1583414 - DNA, 25 bp, Homo sapien
gcttgcccaggatgcgcaggtgcgt

SEQ ID NO: 1583415 - DNA, 25 bp, Homo sapien
gcggcggccagcgcgtgcatatagg

SEQ ID NO: 1583416 - DNA, 25 bp, Homo sapien
cgccgggcgcgaagatgggggtcgc

SEQ ID NO: 1583417 - DNA, 25 bp, Homo sapien
ggggctgcagttctcgccgggcgcg

SEQ ID NO: 1583418 - DNA, 25 bp, Homo sapien
ggctgcagttctcgccgggcgcgaa

SEQ ID NO: 1583419 - DNA, 25 bp, Homo sapien
gcggggctgcagttctcgccgggcg

SEQ ID NO: 1583420 - DNA, 25 bp, Homo sapien
ggacggcgacccgacctcgatcgcg

SEQ ID NO: 1583421 - DNA, 25 bp, Homo sapien
ggctggacggcgacccgacctcgat

SEQ ID NO: 1583422 - DNA, 25 bp, Homo sapien
gcgacccgacctcgatcgcgcgccg

SEQ ID NO: 1583423 - DNA, 25 bp, Homo sapien
aggctggacggcgacccgacctcga

SEQ ID NO: 1583424 - DNA, 25 bp, Homo sapien
cacatcctgttgagtagccgctggg

SEQ ID NO: 1583425 - DNA, 25 bp, Homo sapien
cttaaagtctggcttgagcgcctct

SEQ ID NO: 1583426 - DNA, 25 bp, Homo sapien
ctggagcgctcagagcacgcgcgat

SEQ ID NO: 1583427 - DNA, 25 bp, Homo sapien
aggaaggcccgagtctccagtgtgc

SEQ ID NO: 1583428 - DNA, 25 bp, Homo sapien
gagaagggcagttacacagaaacgg

SEQ ID NO: 1583429 - DNA, 25 bp, Homo sapien
tggtcaccccaaggtcctgctggga

SEQ ID NO: 1583430 - DNA, 25 bp, Homo sapien
tcccctgctaggatgcgtggtcggc

SEQ ID NO: 1583431 - DNA, 25 bp, Homo sapien
ggagaatgcccgagctccgttgagc

SEQ ID NO: 1583432 - DNA, 25 bp, Homo sapien
ccatccatgctggtttgtggagctg

SEQ ID NO: 1583433 - DNA, 25 bp, Homo sapien
tccatgtcggttacgctgttaagtc

SEQ ID NO: 1583434 - DNA, 25 bp, Homo sapien
cgcccgcccgcatggttttggttca

SEQ ID NO: 1583435 - DNA, 25 bp, Homo sapien
tagacatacatgcttagtgacgtac

SEQ ID NO: 1583436 - DNA, 25 bp, Homo sapien
catgccaggcgactgcattgctgca

SEQ ID NO: 1583437 - DNA, 25 bp, Homo sapien
gccagacagtcgttggagtccagct

SEQ ID NO: 1583438 - DNA, 25 bp, Homo sapien
gcgtggtagttaaccctccatgcca

SEQ ID NO: 1583439 - DNA, 25 bp, Homo sapien
caaggaccgctctgctttgtaagca

SEQ ID NO: 1583440 - DNA, 25 bp, Homo sapien
caggcacgtggcttcagggcgtttc

SEQ ID NO: 1583441 - DNA, 25 bp, Homo sapien
gactgacctgcttggtagtgtctga

SEQ ID NO: 1583442 - DNA, 25 bp, Homo sapien
ctgaaccgaaccgagtaggaagcct

SEQ ID NO: 1583443 - DNA, 25 bp, Homo sapien
gggcgtttcccattgaccagtttga

SEQ ID NO: 1583444 - DNA, 25 bp, Homo sapien
cgagcaaacggtaggcgctccataa

SEQ ID NO: 1583445 - DNA, 25 bp, Homo sapien
atggttcttttcagcgaggccctgt

SEQ ID NO: 1583446 - DNA, 25 bp, Homo sapien
tgtccctgctccagtatctgtaatg

SEQ ID NO: 1583447 - DNA, 25 bp, Homo sapien
gtgtagatgacggagcacgaacccg

SEQ ID NO: 1583448 - DNA, 25 bp, Homo sapien
gtagcccacgtgacttagaataagg

SEQ ID NO: 1583449 - DNA, 25 bp, Homo sapien
tgagtgtggtcttgcgcccagaaaa

SEQ ID NO: 1583450 - DNA, 25 bp, Homo sapien
cgttgttcacttttccgcggcttag

SEQ ID NO: 1583451 - DNA, 25 bp, Homo sapien
ttggaaggtgtagcccctgtctgta

SEQ ID NO: 1583452 - DNA, 25 bp, Homo sapien
taagaagggaggttcagtgtcactc

SEQ ID NO: 1583453 - DNA, 25 bp, Homo sapien
catgtatacaaggacaggactgacc

SEQ ID NO: 1583454 - DNA, 25 bp, Homo sapien
cactccaagagtgagccgtgtgcca

SEQ ID NO: 1583455 - DNA, 25 bp, Homo sapien
tcccctttagcccagcagcagtagg

SEQ ID NO: 1583456 - DNA, 25 bp, Homo sapien
gcctgttaaccttggcatacagtaa

SEQ ID NO: 1583457 - DNA, 25 bp, Homo sapien
tacagtaagcgctaacaagtgatta

SEQ ID NO: 1583458 - DNA, 25 bp, Homo sapien
ggagtgccacgggagagaccttgcc

SEQ ID NO: 1583459 - DNA, 25 bp, Homo sapien
cttaccctagctcggggagtgccac

SEQ ID NO: 1583460 - DNA, 25 bp, Homo sapien
cggccaccctaggaatgccaggtga

SEQ ID NO: 1583461 - DNA, 25 bp, Homo sapien
catcatcacgggtgagcagactggg

SEQ ID NO: 1583462 - DNA, 25 bp, Homo sapien
tctggcgtgcagctcatgcagaagc

SEQ ID NO: 1583463 - DNA, 25 bp, Homo sapien
atagacgtccccgtggagtcccttg

SEQ ID NO: 1583464 - DNA, 25 bp, Homo sapien
atgggggccgggcgctgtgactcac

SEQ ID NO: 1583465 - DNA, 25 bp, Homo sapien
actttggaaggcagaagcaggagaa

SEQ ID NO: 1583466 - DNA, 25 bp, Homo sapien
gggggccgggcgctgtgactcacac

SEQ ID NO: 1583467 - DNA, 25 bp, Homo sapien
tttggaaggcagaagcaggagaatt

SEQ ID NO: 1583468 - DNA, 25 bp, Homo sapien
catgaacgagctaggtgagtgtccc

SEQ ID NO: 1583469 - DNA, 25 bp, Homo sapien
ctttgatgaggagtaccgccgtgcc

SEQ ID NO: 1583470 - DNA, 25 bp, Homo sapien
ccatttgcaaagctcccgggatcct

SEQ ID NO: 1583471 - DNA, 25 bp, Homo sapien
tcaaggtgcacctacgccatagtct

SEQ ID NO: 1583472 - DNA, 25 bp, Homo sapien
gcagcgggcgcctgttagtccagct

SEQ ID NO: 1583473 - DNA, 25 bp, Homo sapien
gcgagctctccgacttgggaggaaa

SEQ ID NO: 1583474 - DNA, 25 bp, Homo sapien
gctcactgcttagcgggtggtccag

SEQ ID NO: 1583475 - DNA, 25 bp, Homo sapien
ttagcgggtggtccagcctcagacc

SEQ ID NO: 1583476 - DNA, 25 bp, Homo sapien
catgctgcgtaatctggtgcactcc

SEQ ID NO: 1583477 - DNA, 25 bp, Homo sapien
gggatcacaactgtctgcagacgct

SEQ ID NO: 1583478 - DNA, 25 bp, Homo sapien
tgcagcatctgacttcgcacagcct

SEQ ID NO: 1583479 - DNA, 25 bp, Homo sapien
ctgaccatcgtgagcaacgcgtgcg

SEQ ID NO: 1583480 - DNA, 25 bp, Homo sapien
ccatccatggcccgagggggaacct

SEQ ID NO: 1583481 - DNA, 25 bp, Homo sapien
ctgagtggggcgacctcctgcctgc

SEQ ID NO: 1583482 - DNA, 25 bp, Homo sapien
caggacacagcgggggtctcacact

SEQ ID NO: 1583483 - DNA, 25 bp, Homo sapien
gggtctcacacttgctgtccccatc

SEQ ID NO: 1583484 - DNA, 25 bp, Homo sapien
tgaccagtgagaagtccctagggcc

SEQ ID NO: 1583485 - DNA, 25 bp, Homo sapien
tgggcactcgctggatggaatcaca

SEQ ID NO: 1583486 - DNA, 25 bp, Homo sapien
ggctagccaagtcccagtttctgga

SEQ ID NO: 1583487 - DNA, 25 bp, Homo sapien
cggcccagggtcgttgtgaagatca

SEQ ID NO: 1583488 - DNA, 25 bp, Homo sapien
aatgagacgacggatgaaccgcagc

SEQ ID NO: 1583489 - DNA, 25 bp, Homo sapien
gcctgtgtcaacacccacgtgggct

SEQ ID NO: 1583490 - DNA, 25 bp, Homo sapien
tgggtcccaccaactcggcatgaat

SEQ ID NO: 1583491 - DNA, 25 bp, Homo sapien
tcaggtcacgcaggacggagccagc

SEQ ID NO: 1583492 - DNA, 25 bp, Homo sapien
ccgctccaggtcctcgccggctcgc

SEQ ID NO: 1583493 - DNA, 25 bp, Homo sapien
gctccaggtcctcgccggctcgctg

SEQ ID NO: 1583494 - DNA, 25 bp, Homo sapien
ccaggtcctcgccggctcgctgcag

SEQ ID NO: 1583495 - DNA, 25 bp, Homo sapien
tcccgctccaggtcctcgccggctc

SEQ ID NO: 1583496 - DNA, 25 bp, Homo sapien
ccacgtaggcccggctttgctggta

SEQ ID NO: 1583497 - DNA, 25 bp, Homo sapien
cacgtaggcccggctttgctggtag

SEQ ID NO: 1583498 - DNA, 25 bp, Homo sapien
cagccacgtaggcccggctttgctg

SEQ ID NO: 1583499 - DNA, 25 bp, Homo sapien
gccacgtaggcccggctttgctggt

SEQ ID NO: 1583500 - DNA, 25 bp, Homo sapien
ctctcccggggcctccgcatcctcc

SEQ ID NO: 1583501 - DNA, 25 bp, Homo sapien
ccatcatcctgaagggaactggggg

SEQ ID NO: 1583502 - DNA, 25 bp, Homo sapien
gggcctccgcatcctccatcatcct

SEQ ID NO: 1583503 - DNA, 25 bp, Homo sapien
cctccatcatcctgaagggaactgg

SEQ ID NO: 1583504 - DNA, 25 bp, Homo sapien
taacatgacggatgcagccaggtgt

SEQ ID NO: 1583505 - DNA, 25 bp, Homo sapien
gccagccggggtcttcttaacatga

SEQ ID NO: 1583506 - DNA, 25 bp, Homo sapien
tccccgagtgagcttgccagccggg

SEQ ID NO: 1583507 - DNA, 25 bp, Homo sapien
gcagtccccgagtgagcttgccagc

SEQ ID NO: 1583508 - DNA, 25 bp, Homo sapien
ttcatttgtttcccgccagccccag

SEQ ID NO: 1583509 - DNA, 25 bp, Homo sapien
cttcatttgtttcccgccagcccca

SEQ ID NO: 1583510 - DNA, 25 bp, Homo sapien
cgcacctggccgattcatcttcatt

SEQ ID NO: 1583511 - DNA, 25 bp, Homo sapien
gctgggcttacaggcctgaaccaca

SEQ ID NO: 1583512 - DNA, 25 bp, Homo sapien
tgggcttacaggcctgaaccacagc

SEQ ID NO: 1583513 - DNA, 25 bp, Homo sapien
ggcttacaggcctgaaccacagcgc

SEQ ID NO: 1583514 - DNA, 25 bp, Homo sapien
gaaccacagcgcccggcctccaccc

SEQ ID NO: 1583515 - DNA, 25 bp, Homo sapien
cccactctacggaggagtagaggga

SEQ ID NO: 1583516 - DNA, 25 bp, Homo sapien
gtgtgcttctctcccgtccccttgc

SEQ ID NO: 1583517 - DNA, 25 bp, Homo sapien
actcggagaggatacggaccgtgcc

SEQ ID NO: 1583518 - DNA, 25 bp, Homo sapien
tgccggggtctcaggtccgcttttc

SEQ ID NO: 1583519 - DNA, 25 bp, Homo sapien
ggatggtgaacactggatcctctgc

SEQ ID NO: 1583520 - DNA, 25 bp, Homo sapien
ccaggatctgctccaccgtgggggg

SEQ ID NO: 1583521 - DNA, 25 bp, Homo sapien
gcacgcgcttctttgccttggagcc

SEQ ID NO: 1583522 - DNA, 25 bp, Homo sapien
agcagcacgcgcttctttgccttgg

SEQ ID NO: 1583523 - DNA, 25 bp, Homo sapien
gcccagcgaactcgtacgcacccgt

SEQ ID NO: 1583524 - DNA, 25 bp, Homo sapien
gtacgcacccgtcgcggtcccgctc

SEQ ID NO: 1583525 - DNA, 25 bp, Homo sapien
gctgaccggggcgtccacctctccg

SEQ ID NO: 1583526 - DNA, 25 bp, Homo sapien
gctcctcccgcccagcgaactcgta

SEQ ID NO: 1583527 - DNA, 25 bp, Homo sapien
ctctgcctcagtttccccgcggtca

SEQ ID NO: 1583528 - DNA, 25 bp, Homo sapien
tgcctcagtttccccgcggtcaccc

SEQ ID NO: 1583529 - DNA, 25 bp, Homo sapien
ctcagtttccccgcggtcaccccag

SEQ ID NO: 1583530 - DNA, 25 bp, Homo sapien
tctgcctcagtttccccgcggtcac

SEQ ID NO: 1583531 - DNA, 25 bp, Homo sapien
aacctggacgcgctacgatgagagc

SEQ ID NO: 1583532 - DNA, 25 bp, Homo sapien
ggatagtgcccttgagactcggatc

SEQ ID NO: 1583533 - DNA, 25 bp, Homo sapien
ggctgacgggagcacaaaattgctg

SEQ ID NO: 1583534 - DNA, 25 bp, Homo sapien
cactggctgggtagaaaagcatccg

SEQ ID NO: 1583535 - DNA, 25 bp, Homo sapien
tgcccgaggcggacagtgtcacgtt

SEQ ID NO: 1583536 - DNA, 25 bp, Homo sapien
ccaggcgtcgggtgctggtgctcgc

SEQ ID NO: 1583537 - DNA, 25 bp, Homo sapien
aactctgaggttggacgcggtgccc

SEQ ID NO: 1583538 - DNA, 25 bp, Homo sapien
ggacagtgtcacgtttctctccctc

SEQ ID NO: 1583539 - DNA, 25 bp, Homo sapien
cagctggagcagaccctcagcgcgg

SEQ ID NO: 1583540 - DNA, 25 bp, Homo sapien
aggctcagcaccatggccgaggctg

SEQ ID NO: 1583541 - DNA, 25 bp, Homo sapien
ccagccttgtgtggttgaagaaccg

SEQ ID NO: 1583542 - DNA, 25 bp, Homo sapien
ggtccatggacatgccgcagaggac

SEQ ID NO: 1583543 - DNA, 25 bp, Homo sapien
taggccgcgctgtcatgtcctcggc

SEQ ID NO: 1583544 - DNA, 25 bp, Homo sapien
ggcctgtaggccgcgctgtcatgtc

SEQ ID NO: 1583545 - DNA, 25 bp, Homo sapien
tgtcctcggccgtcccatagagcag

SEQ ID NO: 1583546 - DNA, 25 bp, Homo sapien
gagcagcagcgtgtagcggtacaac

SEQ ID NO: 1583547 - DNA, 25 bp, Homo sapien
cctactgtgcgcctgtcactggaca

SEQ ID NO: 1583548 - DNA, 25 bp, Homo sapien
tgcgcctgtcactggacaccgacat

SEQ ID NO: 1583549 - DNA, 25 bp, Homo sapien
cagggaattgcacacctactgtgcg

SEQ ID NO: 1583550 - DNA, 25 bp, Homo sapien
catctctcagggaattgcacaccta

SEQ ID NO: 1583551 - DNA, 25 bp, Homo sapien
catgaagacccagttgttgtagcct

SEQ ID NO: 1583552 - DNA, 25 bp, Homo sapien
ccgtgttgaaatagtagcccttgtt

SEQ ID NO: 1583553 - DNA, 25 bp, Homo sapien
ggtccacacgccctgtgggttctca

SEQ ID NO: 1583554 - DNA, 25 bp, Homo sapien
cttgttctctaggcccagggtccac

SEQ ID NO: 1583555 - DNA, 25 bp, Homo sapien
tcaagagggatggctttgtgaagcc

SEQ ID NO: 1583556 - DNA, 25 bp, Homo sapien
ttgtgaagccggcagagccccatga

SEQ ID NO: 1583557 - DNA, 25 bp, Homo sapien
acgcgctggtggccgcgtgtcctct

SEQ ID NO: 1583558 - DNA, 25 bp, Homo sapien
ccatgaagtgtctgaccgcacgcgc

SEQ ID NO: 1583559 - DNA, 25 bp, Homo sapien
tgccgtgtgactcctatgggcctgg

SEQ ID NO: 1583560 - DNA, 25 bp, Homo sapien
taggctgccgtgtgactcctatggg

SEQ ID NO: 1583561 - DNA, 25 bp, Homo sapien
ccaccaactaggctgccgtgtgact

SEQ ID NO: 1583562 - DNA, 25 bp, Homo sapien
aactaggctgccgtgtgactcctat

SEQ ID NO: 1583563 - DNA, 25 bp, Homo sapien
gatggcagcgtttaccgacagggca

SEQ ID NO: 1583564 - DNA, 25 bp, Homo sapien
tggcagcgtttaccgacagggcatg

SEQ ID NO: 1583565 - DNA, 25 bp, Homo sapien
agcgtttaccgacagggcatgaggc

SEQ ID NO: 1583566 - DNA, 25 bp, Homo sapien
gcagcgtttaccgacagggcatgag

SEQ ID NO: 1583567 - DNA, 25 bp, Homo sapien
cgtatggccacgagtgtggagcgcg

SEQ ID NO: 1583568 - DNA, 25 bp, Homo sapien
ccacgagtgtggagcgcgtgcccat

SEQ ID NO: 1583569 - DNA, 25 bp, Homo sapien
tatggccacgagtgtggagcgcgtg

SEQ ID NO: 1583570 - DNA, 25 bp, Homo sapien
tggccacgagtgtggagcgcgtgcc

SEQ ID NO: 1583571 - DNA, 25 bp, Homo sapien
tgtaggacagcgtcagctgcgcctg

SEQ ID NO: 1583572 - DNA, 25 bp, Homo sapien
gatctccaggtctccgcgccggctg

SEQ ID NO: 1583573 - DNA, 25 bp, Homo sapien
tctccgcgccggctgtaggacagcg

SEQ ID NO: 1583574 - DNA, 25 bp, Homo sapien
cgccggctgtaggacagcgtcagct

SEQ ID NO: 1583575 - DNA, 25 bp, Homo sapien
tccagcgagcggatggagttgtgga

SEQ ID NO: 1583576 - DNA, 25 bp, Homo sapien
cctgatgtagatcagcggcaggatg

SEQ ID NO: 1583577 - DNA, 25 bp, Homo sapien
ggccgatacgttttccctgatgtag

SEQ ID NO: 1583578 - DNA, 25 bp, Homo sapien
tggaggccggcgcaggccgatacgt

SEQ ID NO: 1583579 - DNA, 25 bp, Homo sapien
tctggacccggacggcgcacttcct

SEQ ID NO: 1583580 - DNA, 25 bp, Homo sapien
tgggcagccaggtgcgggcggtgtc

SEQ ID NO: 1583581 - DNA, 25 bp, Homo sapien
gcgcacttcctctgcggctgggtgg

SEQ ID NO: 1583582 - DNA, 25 bp, Homo sapien
gtccagcagcccgtatccgtagtga

SEQ ID NO: 1583583 - DNA, 25 bp, Homo sapien
agggcagcagtcactcgccccgtgg

SEQ ID NO: 1583584 - DNA, 25 bp, Homo sapien
gcggaagggcagcagtcactcgccc

SEQ ID NO: 1583585 - DNA, 25 bp, Homo sapien
cgcggaagggcagcagtcactcgcc

SEQ ID NO: 1583586 - DNA, 25 bp, Homo sapien
ggaagggcagcagtcactcgccccg

SEQ ID NO: 1583587 - DNA, 25 bp, Homo sapien
ccaggtgctgcatgtctctccacgt

SEQ ID NO: 1583588 - DNA, 25 bp, Homo sapien
aggtgcgccggcttggacgcgcgga

SEQ ID NO: 1583589 - DNA, 25 bp, Homo sapien
ttggacgcgcggaccaccaggtgct

SEQ ID NO: 1583590 - DNA, 25 bp, Homo sapien
catgtctctccacgtcaggaacggg

SEQ ID NO: 1583591 - DNA, 25 bp, Homo sapien
gctagggcgatcatgccggccgcca

SEQ ID NO: 1583592 - DNA, 25 bp, Homo sapien
ccgaggtgcccgtgtgctggtctgt

SEQ ID NO: 1583593 - DNA, 25 bp, Homo sapien
tggcctccagcgctagggcgatcat

SEQ ID NO: 1583594 - DNA, 25 bp, Homo sapien
cacccgtgatgcaggtccgtggtga

SEQ ID NO: 1583595 - DNA, 25 bp, Homo sapien
gagttcaagaagtaacaaggactat

SEQ ID NO: 1583596 - DNA, 25 bp, Homo sapien
ctccaaggactgagttcaagaagta

SEQ ID NO: 1583597 - DNA, 25 bp, Homo sapien
caaggactatgctcaaaaagaacta

SEQ ID NO: 1583598 - DNA, 25 bp, Homo sapien
gaagtaacaaggactatgctcaaaa

SEQ ID NO: 1583599 - DNA, 25 bp, Homo sapien
tgcagttgtcgtagtgcaggccgcc

SEQ ID NO: 1583600 - DNA, 25 bp, Homo sapien
tgctgcccacggaaagcgtgtggat

SEQ ID NO: 1583601 - DNA, 25 bp, Homo sapien
tggaggcgcaggcttcgctgtacca

SEQ ID NO: 1583602 - DNA, 25 bp, Homo sapien
gcttcgctgtaccagggcacgcggc

SEQ ID NO: 1583603 - DNA, 25 bp, Homo sapien
gggcgtcggcctggcctgccacccc

SEQ ID NO: 1583604 - DNA, 25 bp, Homo sapien
gggagggggcgtcggcctggcctgc

SEQ ID NO: 1583605 - DNA, 25 bp, Homo sapien
cgtcggcctggcctgccacccctgc

SEQ ID NO: 1583606 - DNA, 25 bp, Homo sapien
agggggcgtcggcctggcctgccac

SEQ ID NO: 1583607 - DNA, 25 bp, Homo sapien
taaatgtggatgtgctgcggctgca

SEQ ID NO: 1583608 - DNA, 25 bp, Homo sapien
gatggtaccgtccagcatccgtacg

SEQ ID NO: 1583609 - DNA, 25 bp, Homo sapien
ttggtcacaccacgccggaaggcct

SEQ ID NO: 1583610 - DNA, 25 bp, Homo sapien
gcgactgggcctcgatgacatcggt

SEQ ID NO: 1583611 - DNA, 25 bp, Homo sapien
ctccgattcgggcgttgaaagcgac

SEQ ID NO: 1583612 - DNA, 25 bp, Homo sapien
tcgggcgttgaaagcgacccccaca

SEQ ID NO: 1583613 - DNA, 25 bp, Homo sapien
tccgattcgggcgttgaaagcgacc

SEQ ID NO: 1583614 - DNA, 25 bp, Homo sapien
acagaagccattgttggccatcgcg

SEQ ID NO: 1583615 - DNA, 25 bp, Homo sapien
cagaagccattgttggccatcgcgg

SEQ ID NO: 1583616 - DNA, 25 bp, Homo sapien
agaagccattgttggccatcgcggc

SEQ ID NO: 1583617 - DNA, 25 bp, Homo sapien
gtcgtagtcattgaagtcatagctg

SEQ ID NO: 1583618 - DNA, 25 bp, Homo sapien
tcattgaagtcatagctggccaggg

SEQ ID NO: 1583619 - DNA, 25 bp, Homo sapien
gtcattgaagtcatagctggccagg

SEQ ID NO: 1583620 - DNA, 25 bp, Homo sapien
ggtccgggtcgtagtcattgaagtc

SEQ ID NO: 1583621 - DNA, 25 bp, Homo sapien
ccctagggtggtgccagcctcggca

SEQ ID NO: 1583622 - DNA, 25 bp, Homo sapien
ctcgcccacagccacccgcggtctc

SEQ ID NO: 1583623 - DNA, 25 bp, Homo sapien
gcaggtggggatatgagggggccgg

SEQ ID NO: 1583624 - DNA, 25 bp, Homo sapien
ggaggcgtccctagggtggtgccag

SEQ ID NO: 1583625 - DNA, 25 bp, Homo sapien
caggatgctcaggtctggttgggcc

SEQ ID NO: 1583626 - DNA, 25 bp, Homo sapien
agagaccacgatgccctggcctgac

SEQ ID NO: 1583627 - DNA, 25 bp, Homo sapien
acagagaccacgatgccctggcctg

SEQ ID NO: 1583628 - DNA, 25 bp, Homo sapien
tcaggtctggttgggcctcgctgtt

SEQ ID NO: 1583629 - DNA, 25 bp, Homo sapien
acagagcgtttcacccgccgctgca

SEQ ID NO: 1583630 - DNA, 25 bp, Homo sapien
tgggcaccacgacagagcgtttcac

SEQ ID NO: 1583631 - DNA, 25 bp, Homo sapien
gtccgtgggcaccacgacagagcgt

SEQ ID NO: 1583632 - DNA, 25 bp, Homo sapien
ccgtgggcaccacgacagagcgttt

SEQ ID NO: 1583633 - DNA, 25 bp, Homo sapien
gcaggcgccatgatttccgtatctg

SEQ ID NO: 1583634 - DNA, 25 bp, Homo sapien
cttgctgtatagacttggggcccgg

SEQ ID NO: 1583635 - DNA, 25 bp, Homo sapien
gccctggcaggcgccatgatttccg

SEQ ID NO: 1583636 - DNA, 25 bp, Homo sapien
tcctcttgctgtatagacttggggc

SEQ ID NO: 1583637 - DNA, 25 bp, Homo sapien
cgcaggtgaaagtactgcccgtcag

SEQ ID NO: 1583638 - DNA, 25 bp, Homo sapien
ggtgaaagtactgcccgtcagggaa

SEQ ID NO: 1583639 - DNA, 25 bp, Homo sapien
tgccgcaggtgaaagtactgcccgt

SEQ ID NO: 1583640 - DNA, 25 bp, Homo sapien
caggtgaaagtactgcccgtcaggg

SEQ ID NO: 1583641 - DNA, 25 bp, Homo sapien
cggccgcaccgatgggacccggctc

SEQ ID NO: 1583642 - DNA, 25 bp, Homo sapien
gggaagcggccgcaccgatgggacc

SEQ ID NO: 1583643 - DNA, 25 bp, Homo sapien
gcaccgatgggacccggctcccctg

SEQ ID NO: 1583644 - DNA, 25 bp, Homo sapien
tgtggggaagcggccgcaccgatgg

SEQ ID NO: 1583645 - DNA, 25 bp, Homo sapien
tgggagtcccagaagctgagcttgg

SEQ ID NO: 1583646 - DNA, 25 bp, Homo sapien
ctgggagtcccagaagctgagcttg

SEQ ID NO: 1583647 - DNA, 25 bp, Homo sapien
ggctgggactcttgatatttagaag

SEQ ID NO: 1583648 - DNA, 25 bp, Homo sapien
tgtcggggtctagggttgttcagtc

SEQ ID NO: 1583649 - DNA, 25 bp, Homo sapien
ggtgggctgggactcttgatattta

SEQ ID NO: 1583650 - DNA, 25 bp, Homo sapien
gactcttgatatttagaagaccttg

SEQ ID NO: 1583651 - DNA, 25 bp, Homo sapien
caggttgacgaagccgaatttgcgt

SEQ ID NO: 1583652 - DNA, 25 bp, Homo sapien
aatttgcgtgccaggcgctcgacct

SEQ ID NO: 1583653 - DNA, 25 bp, Homo sapien
gaagccgaatttgcgtgccaggcgc

SEQ ID NO: 1583654 - DNA, 25 bp, Homo sapien
cggccccaggttgacgaagccgaat

SEQ ID NO: 1583655 - DNA, 25 bp, Homo sapien
gggccagggccaagaccaggcgcag

SEQ ID NO: 1583656 - DNA, 25 bp, Homo sapien
catagatgggggctcggaccggggc

SEQ ID NO: 1583657 - DNA, 25 bp, Homo sapien
gctgctgacatagatgggggctcgg

SEQ ID NO: 1583658 - DNA, 25 bp, Homo sapien
ggcgcagccacagcgcaatcggggc

SEQ ID NO: 1583659 - DNA, 25 bp, Homo sapien
agcggggcctgcgcaaatcccctcc

SEQ ID NO: 1583660 - DNA, 25 bp, Homo sapien
cgggagcggggcctgcgcaaatccc

SEQ ID NO: 1583661 - DNA, 25 bp, Homo sapien
ggagcggggcctgcgcaaatcccct

SEQ ID NO: 1583662 - DNA, 25 bp, Homo sapien
ggcgggagcggggcctgcgcaaatc

SEQ ID NO: 1583663 - DNA, 25 bp, Homo sapien
tacgatagtgcatgcctgaaattcc

SEQ ID NO: 1583664 - DNA, 25 bp, Homo sapien
aacagccagtacgatagtgcatgcc

SEQ ID NO: 1583665 - DNA, 25 bp, Homo sapien
gccagtacgatagtgcatgcctgaa

SEQ ID NO: 1583666 - DNA, 25 bp, Homo sapien
gggtgaacagccagtacgatagtgc

SEQ ID NO: 1583667 - DNA, 25 bp, Homo sapien
gggtggaaatccagccagaaatgct

SEQ ID NO: 1583668 - DNA, 25 bp, Homo sapien
tacgttggtacgttacagtgcctgg

SEQ ID NO: 1583669 - DNA, 25 bp, Homo sapien
tgtgacgcgcgcaaagagaaagaaa

SEQ ID NO: 1583670 - DNA, 25 bp, Homo sapien
aaagtcagagtctccttagtgcctc

SEQ ID NO: 1583671 - DNA, 25 bp, Homo sapien
catgcagaggtgtcttaagcgtgtg

SEQ ID NO: 1583672 - DNA, 25 bp, Homo sapien
gacagtggctttgactgcatgcaga

SEQ ID NO: 1583673 - DNA, 25 bp, Homo sapien
tgcctgccggcttgtgacagtggct

SEQ ID NO: 1583674 - DNA, 25 bp, Homo sapien
cacaggtgggacgtatttcagagct

SEQ ID NO: 1583675 - DNA, 25 bp, Homo sapien
cggttcttgtagacgagctggatgc

SEQ ID NO: 1583676 - DNA, 25 bp, Homo sapien
gacaagacgctggacagccatcagg

SEQ ID NO: 1583677 - DNA, 25 bp, Homo sapien
acctcatagcgggtctcctgggcct

SEQ ID NO: 1583678 - DNA, 25 bp, Homo sapien
gcagtcaggcgtatgcggctgtcct

SEQ ID NO: 1583679 - DNA, 25 bp, Homo sapien
ctgccgcaatagtggagtagtcggt

SEQ ID NO: 1583680 - DNA, 25 bp, Homo sapien
aagtcactgccgcaatagtggagta

SEQ ID NO: 1583681 - DNA, 25 bp, Homo sapien
tcactgccgcaatagtggagtagtc

SEQ ID NO: 1583682 - DNA, 25 bp, Homo sapien
caaagtcactgccgcaatagtggag

SEQ ID NO: 1583683 - DNA, 25 bp, Homo sapien
gaggggcacaggcctcagtccccac

SEQ ID NO: 1583684 - DNA, 25 bp, Homo sapien
aggggcacaggcctcagtccccact

SEQ ID NO: 1583685 - DNA, 25 bp, Homo sapien
ggcacaggcctcagtccccactcat

SEQ ID NO: 1583686 - DNA, 25 bp, Homo sapien
gggcacaggcctcagtccccactca

SEQ ID NO: 1583687 - DNA, 25 bp, Homo sapien
aactcgatgccagggttgggctcct

SEQ ID NO: 1583688 - DNA, 25 bp, Homo sapien
ctcaaactcgatgccagggttgggc

SEQ ID NO: 1583689 - DNA, 25 bp, Homo sapien
agccagaactcaaactcgatgccag

SEQ ID NO: 1583690 - DNA, 25 bp, Homo sapien
cagaactcaaactcgatgccagggt

SEQ ID NO: 1583691 - DNA, 25 bp, Homo sapien
tctcgggtgtagaccacatgcgtgc

SEQ ID NO: 1583692 - DNA, 25 bp, Homo sapien
atgcgtgccggccgcctcgtaggtc

SEQ ID NO: 1583693 - DNA, 25 bp, Homo sapien
ccgcctcgtaggtccctggtgggct

SEQ ID NO: 1583694 - DNA, 25 bp, Homo sapien
agtgcccattaagcacgtagcgccc

SEQ ID NO: 1583695 - DNA, 25 bp, Homo sapien
gttccacgcggatgtgtctggcgcc

SEQ ID NO: 1583696 - DNA, 25 bp, Homo sapien
gggtcacgttccagtacccagcgaa

SEQ ID NO: 1583697 - DNA, 25 bp, Homo sapien
gggatcagggtcacgttccagtacc

SEQ ID NO: 1583698 - DNA, 25 bp, Homo sapien
aggtggttgcggctcctgtgttcca

SEQ ID NO: 1583699 - DNA, 25 bp, Homo sapien
gcccactctgacgtgtgtgcaggga

SEQ ID NO: 1583700 - DNA, 25 bp, Homo sapien
cacggctcgttaaagggcccactct

SEQ ID NO: 1583701 - DNA, 25 bp, Homo sapien
tgtcagtagccaatcaggatgagga

SEQ ID NO: 1583702 - DNA, 25 bp, Homo sapien
cactggccaatcagcacggaaattt

SEQ ID NO: 1583703 - DNA, 25 bp, Homo sapien
ggcgtcacgaaacacgcgctgcacg

SEQ ID NO: 1583704 - DNA, 25 bp, Homo sapien
aaaggcacgagtcgttggcgcctcc

SEQ ID NO: 1583705 - DNA, 25 bp, Homo sapien
gaaacacgcgctgcacgaaaaggca

SEQ ID NO: 1583706 - DNA, 25 bp, Homo sapien
cgcgctgcacgaaaaggcacgagtc

SEQ ID NO: 1583707 - DNA, 25 bp, Homo sapien
aaggcagcggccagccacgcagacc

SEQ ID NO: 1583708 - DNA, 25 bp, Homo sapien
aggacgcggccgaagctgtggtaga

SEQ ID NO: 1583709 - DNA, 25 bp, Homo sapien
caggcggtgccgtccaggacgcggc

SEQ ID NO: 1583710 - DNA, 25 bp, Homo sapien
tggtagaaggcgtgcccctcagcca

SEQ ID NO: 1583711 - DNA, 25 bp, Homo sapien
catttttaacaccattactcattct

SEQ ID NO: 1583712 - DNA, 25 bp, Homo sapien
ttcatttttaacaccattactcatt

SEQ ID NO: 1583713 - DNA, 25 bp, Homo sapien
ttttaacaccattactcattcttca

SEQ ID NO: 1583714 - DNA, 25 bp, Homo sapien
acaccattactcattcttcattcca

SEQ ID NO: 1583715 - DNA, 25 bp, Homo sapien
cctgctactgggataagtttgagaa

SEQ ID NO: 1583716 - DNA, 25 bp, Homo sapien
ccgggcacgtagttatataactcgc

SEQ ID NO: 1583717 - DNA, 25 bp, Homo sapien
ctctaagtcaatccttagttgggtg

SEQ ID NO: 1583718 - DNA, 25 bp, Homo sapien
ggcctctggatacagctctaagtca

SEQ ID NO: 1583719 - DNA, 25 bp, Homo sapien
acagggcggccattgtacagggcac

SEQ ID NO: 1583720 - DNA, 25 bp, Homo sapien
cacactgtaggtctcggaagggcac

SEQ ID NO: 1583721 - DNA, 25 bp, Homo sapien
ggcacccactggtaggtcttctggg

SEQ ID NO: 1583722 - DNA, 25 bp, Homo sapien
tacagggcacactgtaggtctcgga

SEQ ID NO: 1583723 - DNA, 25 bp, Homo sapien
gcaactggcagaggcggtactcatg

SEQ ID NO: 1583724 - DNA, 25 bp, Homo sapien
tcatgggagtctccccagcacggtt

SEQ ID NO: 1583725 - DNA, 25 bp, Homo sapien
ggcaactggcagaggcggtactcat

SEQ ID NO: 1583726 - DNA, 25 bp, Homo sapien
gggagtctccccagcacggttcttc

SEQ ID NO: 1583727 - DNA, 25 bp, Homo sapien
cggctgcgcacagagacgccacgcc

SEQ ID NO: 1583728 - DNA, 25 bp, Homo sapien
tgcgcacagagacgccacgcccgca

SEQ ID NO: 1583729 - DNA, 25 bp, Homo sapien
gccggctgcgcacagagacgccacg

SEQ ID NO: 1583730 - DNA, 25 bp, Homo sapien
gctgcgcacagagacgccacgcccg

SEQ ID NO: 1583731 - DNA, 25 bp, Homo sapien
aaccacagttcagcagggcccacag

SEQ ID NO: 1583732 - DNA, 25 bp, Homo sapien
gacccccaaaccacagttcagcagg

SEQ ID NO: 1583733 - DNA, 25 bp, Homo sapien
ccaaaccacagttcagcagggccca

SEQ ID NO: 1583734 - DNA, 25 bp, Homo sapien
cccccaaaccacagttcagcagggc

SEQ ID NO: 1583735 - DNA, 25 bp, Homo sapien
tggggaacagaggggccgagtccat

SEQ ID NO: 1583736 - DNA, 25 bp, Homo sapien
ctggggaacagaggggccgagtcca

SEQ ID NO: 1583737 - DNA, 25 bp, Homo sapien
tgagccctacctctcgtctctgaaa

SEQ ID NO: 1583738 - DNA, 25 bp, Homo sapien
tcctgtggatcaggtaaagaagaca

SEQ ID NO: 1583739 - DNA, 25 bp, Homo sapien
agagccaccgccagagacacagggt

SEQ ID NO: 1583740 - DNA, 25 bp, Homo sapien
ggtaatagagcctcccttacaggaa

SEQ ID NO: 1583741 - DNA, 25 bp, Homo sapien
ggcccaggtccgttcggtgcctcat

SEQ ID NO: 1583742 - DNA, 25 bp, Homo sapien
ggtgggactgagctccggggcagcc

SEQ ID NO: 1583743 - DNA, 25 bp, Homo sapien
aggtccgttcggtgcctcatggcct

SEQ ID NO: 1583744 - DNA, 25 bp, Homo sapien
tgcctcatggcctcatcggcggagg

SEQ ID NO: 1583745 - DNA, 25 bp, Homo sapien
tccacaccctcctcatgaccccagc

SEQ ID NO: 1583746 - DNA, 25 bp, Homo sapien
ttgccatccacaccctcctcatgac

SEQ ID NO: 1583747 - DNA, 25 bp, Homo sapien
catccacaccctcctcatgacccca

SEQ ID NO: 1583748 - DNA, 25 bp, Homo sapien
gccatccacaccctcctcatgaccc

SEQ ID NO: 1583749 - DNA, 25 bp, Homo sapien
cccagggcgagcggaagcggcgggg

SEQ ID NO: 1583750 - DNA, 25 bp, Homo sapien
gcgtcccggctccctgagcggcccc

SEQ ID NO: 1583751 - DNA, 25 bp, Homo sapien
cgacgcccggattgcgtcccaccgg

SEQ ID NO: 1583752 - DNA, 25 bp, Homo sapien
aatgtgcgcgaaccgaggtcacccc

SEQ ID NO: 1583753 - DNA, 25 bp, Homo sapien
cgacctgctcgtggatggggaccct

SEQ ID NO: 1583754 - DNA, 25 bp, Homo sapien
ggatctgcggcaggggactgcccgg

SEQ ID NO: 1583755 - DNA, 25 bp, Homo sapien
cactgcccaggctccaggcctgtga

SEQ ID NO: 1583756 - DNA, 25 bp, Homo sapien
cccactgcccaggctccaggcctgt

SEQ ID NO: 1583757 - DNA, 25 bp, Homo sapien
tgcccaggctccaggcctgtgacat

SEQ ID NO: 1583758 - DNA, 25 bp, Homo sapien
actgcccaggctccaggcctgtgac

SEQ ID NO: 1583759 - DNA, 25 bp, Homo sapien
gctgtccgtgcaaaccccagccagg

SEQ ID NO: 1583760 - DNA, 25 bp, Homo sapien
tgtccgtgcaaaccccagccagggt

SEQ ID NO: 1583761 - DNA, 25 bp, Homo sapien
ctggctgtccgtgcaaaccccagcc

SEQ ID NO: 1583762 - DNA, 25 bp, Homo sapien
ccagggtccacctgctgctccacac

SEQ ID NO: 1583763 - DNA, 25 bp, Homo sapien
tcagccgagggaggccccgccctgt

SEQ ID NO: 1583764 - DNA, 25 bp, Homo sapien
ctgctcagccgagggaggccccgcc

SEQ ID NO: 1583765 - DNA, 25 bp, Homo sapien
tgccctgctcagccgagggaggccc

SEQ ID NO: 1583766 - DNA, 25 bp, Homo sapien
cctcggcgtggggtccctggcgtgg

SEQ ID NO: 1583767 - DNA, 25 bp, Homo sapien
tcgtgattcacctgccttggactct

SEQ ID NO: 1583768 - DNA, 25 bp, Homo sapien
actctcaaagtgctgtgattacagg

SEQ ID NO: 1583769 - DNA, 25 bp, Homo sapien
cgtgagccaccacacccgtttttgt

SEQ ID NO: 1583770 - DNA, 25 bp, Homo sapien
cactctgttgcccaggcgagagtgc

SEQ ID NO: 1583771 - DNA, 25 bp, Homo sapien
agtcagcccaggtcacagggtgtgt

SEQ ID NO: 1583772 - DNA, 25 bp, Homo sapien
tctggctgaggcacgaagtcagccc

SEQ ID NO: 1583773 - DNA, 25 bp, Homo sapien
atctttgatccctcgaccccttggg

SEQ ID NO: 1583774 - DNA, 25 bp, Homo sapien
ctccatgacccaattgcagagaggg

SEQ ID NO: 1583775 - DNA, 25 bp, Homo sapien
tcagctcagcaaatatataatcagt

SEQ ID NO: 1583776 - DNA, 25 bp, Homo sapien
cagctcagcaaatatataatcagta

SEQ ID NO: 1583777 - DNA, 25 bp, Homo sapien
aatcagctcagcaaatatataatca

SEQ ID NO: 1583778 - DNA, 25 bp, Homo sapien
tcaaatcagaaaacggcttcggacg

SEQ ID NO: 1583779 - DNA, 25 bp, Homo sapien
gaaatttgattggaacgcccctcgc

SEQ ID NO: 1583780 - DNA, 25 bp, Homo sapien
ggccgcgcacggttgatgtacaaaa

SEQ ID NO: 1583781 - DNA, 25 bp, Homo sapien
cgctgagcgctggaaaagtcgtgtt

SEQ ID NO: 1583782 - DNA, 25 bp, Homo sapien
ttctctccggtttattgtaacctga

SEQ ID NO: 1583783 - DNA, 25 bp, Homo sapien
tctctccggtttattgtaacctgac

SEQ ID NO: 1583784 - DNA, 25 bp, Homo sapien
tcaatactgtcgttgaagggctgag

SEQ ID NO: 1583785 - DNA, 25 bp, Homo sapien
caatactgtcgttgaagggctgagg

SEQ ID NO: 1583786 - DNA, 25 bp, Homo sapien
ccccggccacgtggtggtccgcgct

SEQ ID NO: 1583787 - DNA, 25 bp, Homo sapien
gcagatggccccggccacgtggtgg

SEQ ID NO: 1583788 - DNA, 25 bp, Homo sapien
atctgtaaacactggccgccgccca

SEQ ID NO: 1583789 - DNA, 25 bp, Homo sapien
ggcggcagttaaagctcatctgtaa

SEQ ID NO: 1583790 - DNA, 25 bp, Homo sapien
gaccagcgcagccatcacctcgccc

SEQ ID NO: 1583791 - DNA, 25 bp, Homo sapien
atcacctcgccctcggcgcacacca

SEQ ID NO: 1583792 - DNA, 25 bp, Homo sapien
ggcaggcgggacactcgggctcgct

SEQ ID NO: 1583793 - DNA, 25 bp, Homo sapien
cggacggcgcagtccatgcagaaga

SEQ ID NO: 1583794 - DNA, 25 bp, Homo sapien
cgccggagtccaggggggcgcaggc

SEQ ID NO: 1583795 - DNA, 25 bp, Homo sapien
cggcgccgcctgggaaggatacggg

SEQ ID NO: 1583796 - DNA, 25 bp, Homo sapien
cgaagggggcttgcggctgttctcg

SEQ ID NO: 1583797 - DNA, 25 bp, Homo sapien
aggacgccgaagggggcttgcggct

SEQ ID NO: 1583798 - DNA, 25 bp, Homo sapien
ggtccggggcgccacggcgagacag

SEQ ID NO: 1583799 - DNA, 25 bp, Homo sapien
gggtccggggcgccacggcgagaca

SEQ ID NO: 1583800 - DNA, 25 bp, Homo sapien
gtccggggcgccacggcgagacagc

SEQ ID NO: 1583801 - DNA, 25 bp, Homo sapien
gggggtcccggccccactgctgcgc

SEQ ID NO: 1583802 - DNA, 25 bp, Homo sapien
gggtcccggccccactgctgcgccg

SEQ ID NO: 1583803 - DNA, 25 bp, Homo sapien
tcccggccccactgctgcgccgggc

SEQ ID NO: 1583804 - DNA, 25 bp, Homo sapien
ctcgggcagcgtgggcgagtggcgg

SEQ ID NO: 1583805 - DNA, 25 bp, Homo sapien
acggtcaggtccagcgccaggaagt

SEQ ID NO: 1583806 - DNA, 25 bp, Homo sapien
agcagccgctgaaggcgggcaaggg

SEQ ID NO: 1583807 - DNA, 25 bp, Homo sapien
aaaaggcgcccagatggtggccgcg

SEQ ID NO: 1583808 - DNA, 25 bp, Homo sapien
tcgaagccgaagtcgcagtcgtcgg

SEQ ID NO: 1583809 - DNA, 25 bp, Homo sapien
gcagcgtgatgtgcgcctcgatctc

SEQ ID NO: 1583810 - DNA, 25 bp, Homo sapien
cgcgtcggtgaaggcgccagtgcgc

SEQ ID NO: 1583811 - DNA, 25 bp, Homo sapien
ggtccaggcagacgtcggtgccgtt

SEQ ID NO: 1583812 - DNA, 25 bp, Homo sapien
gcggctgcccgcgtagaaggcctcg

SEQ ID NO: 1583813 - DNA, 25 bp, Homo sapien
atggagaagtgttcggccgccgaca

SEQ ID NO: 1583814 - DNA, 25 bp, Homo sapien
ggtcacgatgaagaccggctcctcg

SEQ ID NO: 1583815 - DNA, 25 bp, Homo sapien
cgcgcacctggatggtggtctgtcc

SEQ ID NO: 1583816 - DNA, 25 bp, Homo sapien
cgcgtggcgcggatgatggagaagt

SEQ ID NO: 1583817 - DNA, 25 bp, Homo sapien
tgtttgtcttggcccgcagggcctt

SEQ ID NO: 1583818 - DNA, 25 bp, Homo sapien
gcccgcagggccttgatcttgcagc

SEQ ID NO: 1583819 - DNA, 25 bp, Homo sapien
gtgtttgtcttggcccgcagggcct

SEQ ID NO: 1583820 - DNA, 25 bp, Homo sapien
ttggcccgcagggccttgatcttgc

SEQ ID NO: 1583821 - DNA, 25 bp, Homo sapien
gaggggaaggacaaggtgacccaga

SEQ ID NO: 1583822 - DNA, 25 bp, Homo sapien
gaaggacaaggtgacccagagcccc

SEQ ID NO: 1583823 - DNA, 25 bp, Homo sapien
ccagagccccctgcgcagctcagcc

SEQ ID NO: 1583824 - DNA, 25 bp, Homo sapien
ggggaaggacaaggtgacccagagc

SEQ ID NO: 1583825 - DNA, 25 bp, Homo sapien
cgacgtgctcggagctgggcaccgg

SEQ ID NO: 1583826 - DNA, 25 bp, Homo sapien
tgggcaccgggacgcactcggtcat

SEQ ID NO: 1583827 - DNA, 25 bp, Homo sapien
tggcgacccacgatctcggcgacgt

SEQ ID NO: 1583828 - DNA, 25 bp, Homo sapien
cacgatctcggcgacgtgctcggag

SEQ ID NO: 1583829 - DNA, 25 bp, Homo sapien
cttttcttgcggctgccgatcacgc

SEQ ID NO: 1583830 - DNA, 25 bp, Homo sapien
gttgacgcttttcttgcggctgccg

SEQ ID NO: 1583831 - DNA, 25 bp, Homo sapien
tttcttgcggctgccgatcacgctc

SEQ ID NO: 1583832 - DNA, 25 bp, Homo sapien
gacgcttttcttgcggctgccgatc

SEQ ID NO: 1583833 - DNA, 25 bp, Homo sapien
ctggtcggccagcagcgtcgggggc

SEQ ID NO: 1583834 - DNA, 25 bp, Homo sapien
ggtggggcgcgaagcccgcgaacac

SEQ ID NO: 1583835 - DNA, 25 bp, Homo sapien
tcgtccgtgtcgccagcgcccccca

SEQ ID NO: 1583836 - DNA, 25 bp, Homo sapien
ctcgtccgtgtcgccagcgcccccc

SEQ ID NO: 1583837 - DNA, 25 bp, Homo sapien
tgtagacgctggatcagcatagctc

SEQ ID NO: 1583838 - DNA, 25 bp, Homo sapien
tgagagctttgaccagctccgtctc

SEQ ID NO: 1583839 - DNA, 25 bp, Homo sapien
ccagctccgtctctgacttgggtag

SEQ ID NO: 1583840 - DNA, 25 bp, Homo sapien
catcatattaatgtagacgctggat

SEQ ID NO: 1583841 - DNA, 25 bp, Homo sapien
gtcacctcaggtgggaagcgctggt

SEQ ID NO: 1583842 - DNA, 25 bp, Homo sapien
cagagtcacctcaggtgggaagcgc

SEQ ID NO: 1583843 - DNA, 25 bp, Homo sapien
agagtcacctcaggtgggaagcgct

SEQ ID NO: 1583844 - DNA, 25 bp, Homo sapien
acctcaggtgggaagcgctggtgta

SEQ ID NO: 1583845 - DNA, 25 bp, Homo sapien
ctgtctctgaatcggcctgtcctgg

SEQ ID NO: 1583846 - DNA, 25 bp, Homo sapien
ccttagctggtgttgctgagactcg

SEQ ID NO: 1583847 - DNA, 25 bp, Homo sapien
tcttcaaatgaacggccgtgagcgt

SEQ ID NO: 1583848 - DNA, 25 bp, Homo sapien
caaatgggattgcacgccgtgtcgg

SEQ ID NO: 1583849 - DNA, 25 bp, Homo sapien
tgggcaccaaagtctagcggacgca

SEQ ID NO: 1583850 - DNA, 25 bp, Homo sapien
gaatacccctaagcctgactcttgg

SEQ ID NO: 1583851 - DNA, 25 bp, Homo sapien
ggccggcctggtcttctctgaatac

SEQ ID NO: 1583852 - DNA, 25 bp, Homo sapien
agacagaagctcaaacgtgggcacc

SEQ ID NO: 1583853 - DNA, 25 bp, Homo sapien
tggtggctttattcagtcacgtccc

SEQ ID NO: 1583854 - DNA, 25 bp, Homo sapien
cccatggtggctttattcagtcacg

SEQ ID NO: 1583855 - DNA, 25 bp, Homo sapien
ggctttattcagtcacgtccccacg

SEQ ID NO: 1583856 - DNA, 25 bp, Homo sapien
cacccatggtggctttattcagtca

SEQ ID NO: 1583857 - DNA, 25 bp, Homo sapien
ccgtcctgaggatttgtgctttgac

SEQ ID NO: 1583858 - DNA, 25 bp, Homo sapien
ccttgagcccgtcctgaggatttgt

SEQ ID NO: 1583859 - DNA, 25 bp, Homo sapien
gagcccgtcctgaggatttgtgctt

SEQ ID NO: 1583860 - DNA, 25 bp, Homo sapien
gcccttgagcccgtcctgaggattt

SEQ ID NO: 1583861 - DNA, 25 bp, Homo sapien
cacaggggcgactctgcccatcagt

SEQ ID NO: 1583862 - DNA, 25 bp, Homo sapien
tctatgggcctaaggtcaatgcagg

SEQ ID NO: 1583863 - DNA, 25 bp, Homo sapien
cttggagggcagacggtggagcggc

SEQ ID NO: 1583864 - DNA, 25 bp, Homo sapien
ctggggcagcgaccagatcctggct

SEQ ID NO: 1583865 - DNA, 25 bp, Homo sapien
actggccgcagagtccactcggggc

SEQ ID NO: 1583866 - DNA, 25 bp, Homo sapien
caggcgtctgtggcttggaacctgc

SEQ ID NO: 1583867 - DNA, 25 bp, Homo sapien
tcggggcaggcgtctgtggcttgga

SEQ ID NO: 1583868 - DNA, 25 bp, Homo sapien
gggcaggcgtctgtggcttggaacc

SEQ ID NO: 1583869 - DNA, 25 bp, Homo sapien
tcgagcccaaaggtcgtagggagcc

SEQ ID NO: 1583870 - DNA, 25 bp, Homo sapien
aaagctgggtgcctgtgtcgccact

SEQ ID NO: 1583871 - DNA, 25 bp, Homo sapien
tcccgaagccggactctgtagagga

SEQ ID NO: 1583872 - DNA, 25 bp, Homo sapien
gatgacgtgcctcgactgtgttaca

SEQ ID NO: 1583873 - DNA, 25 bp, Homo sapien
gacgcttgggctcttctagggagat

SEQ ID NO: 1583874 - DNA, 25 bp, Homo sapien
ctggctttagcgactccacgggacg

SEQ ID NO: 1583875 - DNA, 25 bp, Homo sapien
ggagggctggctttagcgactccac

SEQ ID NO: 1583876 - DNA, 25 bp, Homo sapien
tcttgggaggcacccgtcatcccaa

SEQ ID NO: 1583877 - DNA, 25 bp, Homo sapien
ctagacgtgctccatctccgggtcc

SEQ ID NO: 1583878 - DNA, 25 bp, Homo sapien
agacgtgctccatctccgggtccgg

SEQ ID NO: 1583879 - DNA, 25 bp, Homo sapien
acgtgctccatctccgggtccgggt

SEQ ID NO: 1583880 - DNA, 25 bp, Homo sapien
tcagcgcaggccttgtccagcggcg

SEQ ID NO: 1583881 - DNA, 25 bp, Homo sapien
tgcgccagcatgtcggccatcagcg

SEQ ID NO: 1583882 - DNA, 25 bp, Homo sapien
gtgcgccagcatgtcggccatcagc

SEQ ID NO: 1583883 - DNA, 25 bp, Homo sapien
gctgcgtggtgttgagccatacgcc

SEQ ID NO: 1583884 - DNA, 25 bp, Homo sapien
gcatggtgctagtgtgcagggcgct

SEQ ID NO: 1583885 - DNA, 25 bp, Homo sapien
tgatgtcctcgtcggtcaccatgaa

SEQ ID NO: 1583886 - DNA, 25 bp, Homo sapien
cgacagcagcgtctcatccgtgcag

SEQ ID NO: 1583887 - DNA, 25 bp, Homo sapien
caggccacggaaatgccccaagaat

SEQ ID NO: 1583888 - DNA, 25 bp, Homo sapien
aacagccgcaagtggagaggtcacc

SEQ ID NO: 1583889 - DNA, 25 bp, Homo sapien
tgctgtgagtagtaacggcgccact

SEQ ID NO: 1583890 - DNA, 25 bp, Homo sapien
aggtgtcacgctgcatacctgtggt

SEQ ID NO: 1583891 - DNA, 25 bp, Homo sapien
ctgtacccagccgaccctgtctcaa

SEQ ID NO: 1583892 - DNA, 25 bp, Homo sapien
gacgtgctgggagagtacagaagca

SEQ ID NO: 1583893 - DNA, 25 bp, Homo sapien
catgcaagagctgcattctttgttc

SEQ ID NO: 1583894 - DNA, 25 bp, Homo sapien
caaaaccatgcaagagctgcattct

SEQ ID NO: 1583895 - DNA, 25 bp, Homo sapien
gccccagtcgctggcagatttgccc

SEQ ID NO: 1583896 - DNA, 25 bp, Homo sapien
cagatttgccctaagcacccaaagc

SEQ ID NO: 1583897 - DNA, 25 bp, Homo sapien
cagtcgctggcagatttgccctaag

SEQ ID NO: 1583898 - DNA, 25 bp, Homo sapien
gctggcagatttgccctaagcaccc

SEQ ID NO: 1583899 - DNA, 25 bp, Homo sapien
cgaaggcgttcaggccgctcagctt

SEQ ID NO: 1583900 - DNA, 25 bp, Homo sapien
agcaatgtcgaaggcgttcaggccg

SEQ ID NO: 1583901 - DNA, 25 bp, Homo sapien
aatgtcgaaggcgttcaggccgctc

SEQ ID NO: 1583902 - DNA, 25 bp, Homo sapien
gctcctcagcaatgtcgaaggcgtt

SEQ ID NO: 1583903 - DNA, 25 bp, Homo sapien
cttgaacccagttgaaaccaggagg

SEQ ID NO: 1583904 - DNA, 25 bp, Homo sapien
ttgaacccagttgaaaccaggaggc

SEQ ID NO: 1583905 - DNA, 25 bp, Homo sapien
taatcttggtcaccggctgcttgaa

SEQ ID NO: 1583906 - DNA, 25 bp, Homo sapien
tctgcgggtcgctcttgaccttgtt

SEQ ID NO: 1583907 - DNA, 25 bp, Homo sapien
ggctggtccaccgccttctgcgggt

SEQ ID NO: 1583908 - DNA, 25 bp, Homo sapien
gcagcgccgtgttcaggtcgggctt

SEQ ID NO: 1583909 - DNA, 25 bp, Homo sapien
ctgctttgccggcgcccctcgtgtc

SEQ ID NO: 1583910 - DNA, 25 bp, Homo sapien
gcgtcctcgccatgcgccttgcgct

SEQ ID NO: 1583911 - DNA, 25 bp, Homo sapien
tccggccggctctggaacgcccgcc

SEQ ID NO: 1583912 - DNA, 25 bp, Homo sapien
gaggaaggatatgcagtccggcctg

SEQ ID NO: 1583913 - DNA, 25 bp, Homo sapien
agcgcacgcgctggcggctcttgtt

SEQ ID NO: 1583914 - DNA, 25 bp, Homo sapien
atggagccgcccaggtagcgcgcca

SEQ ID NO: 1583915 - DNA, 25 bp, Homo sapien
gcatcttgcccgtgcggaagtcgaa

SEQ ID NO: 1583916 - DNA, 25 bp, Homo sapien
aagtcgaaggtgctcaggtccatgg

SEQ ID NO: 1583917 - DNA, 25 bp, Homo sapien
ctcggccgcagacccaaacccagtc

SEQ ID NO: 1583918 - DNA, 25 bp, Homo sapien
cccagcttcaggtcgcgaccccagc

SEQ ID NO: 1583919 - DNA, 25 bp, Homo sapien
cagccccagcttcaggtcgcgaccc

SEQ ID NO: 1583920 - DNA, 25 bp, Homo sapien
tgcggggaggcgggacggtcggcgc

SEQ ID NO: 1583921 - DNA, 25 bp, Homo sapien
caacaaggcagccaggtaaacacag

SEQ ID NO: 1583922 - DNA, 25 bp, Homo sapien
ggccctaacagctgcttgggcataa

SEQ ID NO: 1583923 - DNA, 25 bp, Homo sapien
gagggacagccctaaaagcaatctt

SEQ ID NO: 1583924 - DNA, 25 bp, Homo sapien
tgggcataacccgactggagagctc

SEQ ID NO: 1583925 - DNA, 25 bp, Homo sapien
tcaatggatgaacggacaaacgccc

SEQ ID NO: 1583926 - DNA, 25 bp, Homo sapien
ccttgaggacgccacattcagtgag

SEQ ID NO: 1583927 - DNA, 25 bp, Homo sapien
gatagggacaggacttcgtttctct

SEQ ID NO: 1583928 - DNA, 25 bp, Homo sapien
tatctgcccgaaaaatgagcacgca

SEQ ID NO: 1583929 - DNA, 25 bp, Homo sapien
tatccaggatctatgtactgggccg

SEQ ID NO: 1583930 - DNA, 25 bp, Homo sapien
taaaggtgagtcatcacgccctgct

SEQ ID NO: 1583931 - DNA, 25 bp, Homo sapien
tactgggccgatacatagatcacag

SEQ ID NO: 1583932 - DNA, 25 bp, Homo sapien
caaagggattataggcggcagccac

SEQ ID NO: 1583933 - DNA, 25 bp, Homo sapien
cagctatgctggaggcttaggaggc

SEQ ID NO: 1583934 - DNA, 25 bp, Homo sapien
tgcaaatgcaagatagagggggtta

SEQ ID NO: 1583935 - DNA, 25 bp, Homo sapien
ctgggggagtaacaagtggggagtg

SEQ ID NO: 1583936 - DNA, 25 bp, Homo sapien
caaatgcaagatagagggggttagt

SEQ ID NO: 1583937 - DNA, 25 bp, Homo sapien
tctagcctgtagaggagcttctccc

SEQ ID NO: 1583938 - DNA, 25 bp, Homo sapien
tgatgacagcctcaggatactccgc

SEQ ID NO: 1583939 - DNA, 25 bp, Homo sapien
cagggttccagctcataagggtaca

SEQ ID NO: 1583940 - DNA, 25 bp, Homo sapien
cctgggaggtcaagaatgcgtaagc

SEQ ID NO: 1583941 - DNA, 25 bp, Homo sapien
aaaggccgcagtcgccgtccggcag

SEQ ID NO: 1583942 - DNA, 25 bp, Homo sapien
tggcccagcgcgcacgaacaaaggc

SEQ ID NO: 1583943 - DNA, 25 bp, Homo sapien
cagtccctgaacggccggccgaaag

SEQ ID NO: 1583944 - DNA, 25 bp, Homo sapien
agcgcgcacgaacaaaggccgcagt

SEQ ID NO: 1583945 - DNA, 25 bp, Homo sapien
cgcacgcacgacgcacgcgcggggc

SEQ ID NO: 1583946 - DNA, 25 bp, Homo sapien
acgcacgcacgacgcacgcgcgggg

SEQ ID NO: 1583947 - DNA, 25 bp, Homo sapien
gagcccgttgaggccctgcgcggcc

SEQ ID NO: 1583948 - DNA, 25 bp, Homo sapien
agtaaaagacatccctgtggccggc

SEQ ID NO: 1583949 - DNA, 25 bp, Homo sapien
ctatagtaaaagacatccctgtggc

SEQ ID NO: 1583950 - DNA, 25 bp, Homo sapien
gaccttctgggcacttcttccctct

SEQ ID NO: 1583951 - DNA, 25 bp, Homo sapien
tgtggccggccgacagccccgacct

SEQ ID NO: 1583952 - DNA, 25 bp, Homo sapien
cacttgccgcggctgttccggcccg

SEQ ID NO: 1583953 - DNA, 25 bp, Homo sapien
cttgccgcggctgttccggcccgcg

SEQ ID NO: 1583954 - DNA, 25 bp, Homo sapien
cgccacttgccgcggctgttccggc

SEQ ID NO: 1583955 - DNA, 25 bp, Homo sapien
ccgccgccacttgccgcggctgttc

SEQ ID NO: 1583956 - DNA, 25 bp, Homo sapien
aaccagccgtggtacctgactaggg

SEQ ID NO: 1583957 - DNA, 25 bp, Homo sapien
gccatggaagaatcagtgctcccaa

SEQ ID NO: 1583958 - DNA, 25 bp, Homo sapien
aggagctggttactggcctgagacc

SEQ ID NO: 1583959 - DNA, 25 bp, Homo sapien
tgtggactcaaagccaggcagttac

SEQ ID NO: 1583960 - DNA, 25 bp, Homo sapien
tcgggacttaagtaccaggacagca

SEQ ID NO: 1583961 - DNA, 25 bp, Homo sapien
ggtcacgatggccaaacagagagga

SEQ ID NO: 1583962 - DNA, 25 bp, Homo sapien
aagtgacccgggacatatcatgtgc

SEQ ID NO: 1583963 - DNA, 25 bp, Homo sapien
cgcagtggctgcataccagtgtgaa

SEQ ID NO: 1583964 - DNA, 25 bp, Homo sapien
agcatgatcaacatccgggcacgga

SEQ ID NO: 1583965 - DNA, 25 bp, Homo sapien
ttcctcagacgaagtggccttggct

SEQ ID NO: 1583966 - DNA, 25 bp, Homo sapien
tctcagggtggctcatagaagcact

SEQ ID NO: 1583967 - DNA, 25 bp, Homo sapien
ttaaggcagcaacggatgaacacac

SEQ ID NO: 1583968 - DNA, 25 bp, Homo sapien
aaaatatccaagctgttttcagaaa

SEQ ID NO: 1583969 - DNA, 25 bp, Homo sapien
gtgcattaaaatatccaagctgttt

SEQ ID NO: 1583970 - DNA, 25 bp, Homo sapien
gcattaaaatatccaagctgttttc

SEQ ID NO: 1583971 - DNA, 25 bp, Homo sapien
attaaaatatccaagctgttttcag

SEQ ID NO: 1583972 - DNA, 25 bp, Homo sapien
tcctcttgtccatcctgaggcttgg

SEQ ID NO: 1583973 - DNA, 25 bp, Homo sapien
cgaggcagggtgagtagaagtgtcc

SEQ ID NO: 1583974 - DNA, 25 bp, Homo sapien
tgagtagaagtgtcccttccaggct

SEQ ID NO: 1583975 - DNA, 25 bp, Homo sapien
gcagggtgagtagaagtgtcccttc

SEQ ID NO: 1583976 - DNA, 25 bp, Homo sapien
gagagcagacgaggcagggtgagta

SEQ ID NO: 1583977 - DNA, 25 bp, Homo sapien
tggagaaacacgtggatgcgtccag

SEQ ID NO: 1583978 - DNA, 25 bp, Homo sapien
gggccccactctcgaatgcaggtct

SEQ ID NO: 1583979 - DNA, 25 bp, Homo sapien
gactcactgggattgtccagaggga

SEQ ID NO: 1583980 - DNA, 25 bp, Homo sapien
ccactgagacggaagcaaggtttgc

SEQ ID NO: 1583981 - DNA, 25 bp, Homo sapien
agcagtctgtgaagggtttgtgtaa

SEQ ID NO: 1583982 - DNA, 25 bp, Homo sapien
ttaaacttgccattgatgtaaggta

SEQ ID NO: 1583983 - DNA, 25 bp, Homo sapien
taaacttgccattgatgtaaggtac

SEQ ID NO: 1583984 - DNA, 25 bp, Homo sapien
cttaaacttgccattgatgtaaggt

SEQ ID NO: 1583985 - DNA, 25 bp, Homo sapien
cagtccaggatcagccgccaatcgg

SEQ ID NO: 1583986 - DNA, 25 bp, Homo sapien
gccccatgtgtaggccgtcgggacc

SEQ ID NO: 1583987 - DNA, 25 bp, Homo sapien
aggatcagccgccaatcggtggccc

SEQ ID NO: 1583988 - DNA, 25 bp, Homo sapien
acagcgccccatgtgtaggccgtcg

SEQ ID NO: 1583989 - DNA, 25 bp, Homo sapien
gaatcacttgaactctgtaggtcga

SEQ ID NO: 1583990 - DNA, 25 bp, Homo sapien
cacttgaactctgtaggtcgaggtt

SEQ ID NO: 1583991 - DNA, 25 bp, Homo sapien
tgaactctgtaggtcgaggttgcag

SEQ ID NO: 1583992 - DNA, 25 bp, Homo sapien
atcacttgaactctgtaggtcgagg

SEQ ID NO: 1583993 - DNA, 25 bp, Homo sapien
tcgcacgtgttgtcttgatggcatt

SEQ ID NO: 1583994 - DNA, 25 bp, Homo sapien
ccaacagggcaggaatcttcgcacg

SEQ ID NO: 1583995 - DNA, 25 bp, Homo sapien
aacctggctcggaggcagatgccac

SEQ ID NO: 1583996 - DNA, 25 bp, Homo sapien
ggcaggaatcttcgcacgtgttgtc

SEQ ID NO: 1583997 - DNA, 25 bp, Homo sapien
gctcccggtagcgtgggcccaggaa

SEQ ID NO: 1583998 - DNA, 25 bp, Homo sapien
cagctcccggtagcgtgggcccagg

SEQ ID NO: 1583999 - DNA, 25 bp, Homo sapien
ttcttgaccagctcccggtagcgtg

SEQ ID NO: 1584000 - DNA, 25 bp, Homo sapien
tcttgaccagctcccggtagcgtgg

SEQ ID NO: 1584001 - DNA, 25 bp, Homo sapien
gatgaccctgtccagctgacccggc

SEQ ID NO: 1584002 - DNA, 25 bp, Homo sapien
tgaccctgtccagctgacccggcta

SEQ ID NO: 1584003 - DNA, 25 bp, Homo sapien
cgcggcggagtcgcaccctcaggat

SEQ ID NO: 1584004 - DNA, 25 bp, Homo sapien
ggcggagtcgcaccctcaggatgac

SEQ ID NO: 1584005 - DNA, 25 bp, Homo sapien
tcctcgcgctgggtgaatctcgttt

SEQ ID NO: 1584006 - DNA, 25 bp, Homo sapien
tatgcagaacgcacagttccagagg

SEQ ID NO: 1584007 - DNA, 25 bp, Homo sapien
ttttaaagtcccaatcatccagcca

SEQ ID NO: 1584008 - DNA, 25 bp, Homo sapien
tgaaaaccatcttgaggcactcaga

SEQ ID NO: 1584009 - DNA, 25 bp, Homo sapien
tcgtgtggaactggatgggatccca

SEQ ID NO: 1584010 - DNA, 25 bp, Homo sapien
gtctacgtcacgatggccctctggt

SEQ ID NO: 1584011 - DNA, 25 bp, Homo sapien
ttaagagatcaaactcccagggcgt

SEQ ID NO: 1584012 - DNA, 25 bp, Homo sapien
ggttaccctcatggcaaaagaccag

SEQ ID NO: 1584013 - DNA, 25 bp, Homo sapien
ttggcagagtcacctgggagggtca

SEQ ID NO: 1584014 - DNA, 25 bp, Homo sapien
ggtcagagccaccttgctgacgtcc

SEQ ID NO: 1584015 - DNA, 25 bp, Homo sapien
caggttccaagggagagcagcttag

SEQ ID NO: 1584016 - DNA, 25 bp, Homo sapien
gccaggggtcactggtcccaacaaa

SEQ ID NO: 1584017 - DNA, 25 bp, Homo sapien
gggagaggatgcggcagggaagccc

SEQ ID NO: 1584018 - DNA, 25 bp, Homo sapien
tcagggaacgcccacgcatcacttt

SEQ ID NO: 1584019 - DNA, 25 bp, Homo sapien
cctgtccccgttctgtctgtgtgca

SEQ ID NO: 1584020 - DNA, 25 bp, Homo sapien
ccttcatcagggaacgcccacgcat

SEQ ID NO: 1584021 - DNA, 25 bp, Homo sapien
gaaatgcaatgctcagtctaggaac

SEQ ID NO: 1584022 - DNA, 25 bp, Homo sapien
ccagagaccaaaggcagcatccttg

SEQ ID NO: 1584023 - DNA, 25 bp, Homo sapien
cagcagcagaaatagcgagagacac

SEQ ID NO: 1584024 - DNA, 25 bp, Homo sapien
cgagagacacgggacttttatacaa

SEQ ID NO: 1584025 - DNA, 25 bp, Homo sapien
tgctggtggctttagaagaataagc

SEQ ID NO: 1584026 - DNA, 25 bp, Homo sapien
gtttccacagcatcccccttgagtg

SEQ ID NO: 1584027 - DNA, 25 bp, Homo sapien
aaaaatatttcgcttaggcacaatt

SEQ ID NO: 1584028 - DNA, 25 bp, Homo sapien
tcccccttgagtgatatgtttccat

SEQ ID NO: 1584029 - DNA, 25 bp, Homo sapien
gtcacagagtgacacggtggctgag

SEQ ID NO: 1584030 - DNA, 25 bp, Homo sapien
gctgaaagcgggtggctcgtcccac

SEQ ID NO: 1584031 - DNA, 25 bp, Homo sapien
tggtgttggctcgatgctgacaaca

SEQ ID NO: 1584032 - DNA, 25 bp, Homo sapien
cgaaccttgtcaggttggtgttggc

SEQ ID NO: 1584033 - DNA, 25 bp, Homo sapien
ctcttctcgccgtttcaaacaggct

SEQ ID NO: 1584034 - DNA, 25 bp, Homo sapien
tcttctcgccgtttcaaacaggctg

SEQ ID NO: 1584035 - DNA, 25 bp, Homo sapien
aagagagtgggtatcagggggtgtc

SEQ ID NO: 1584036 - DNA, 25 bp, Homo sapien
gtccgggggcggcaagcacaggagg

SEQ ID NO: 1584037 - DNA, 25 bp, Homo sapien
gtgtctggggaacatcactgggtct

SEQ ID NO: 1584038 - DNA, 25 bp, Homo sapien
tccttccttgagaaggctgggggga

SEQ ID NO: 1584039 - DNA, 25 bp, Homo sapien
gctcccgcgcgttattggccatgcg

SEQ ID NO: 1584040 - DNA, 25 bp, Homo sapien
gaaggcctcgttaatatcccgcacg

SEQ ID NO: 1584041 - DNA, 25 bp, Homo sapien
aggatgagcagcttggtctgcgctt

SEQ ID NO: 1584042 - DNA, 25 bp, Homo sapien
tctgcgctttgtccgacttgaggtg

SEQ ID NO: 1584043 - DNA, 25 bp, Homo sapien
cagctggtgtcaggcactgcagtgc

SEQ ID NO: 1584044 - DNA, 25 bp, Homo sapien
ggtacacagcttacgttgctgggca

SEQ ID NO: 1584045 - DNA, 25 bp, Homo sapien
cagcagtgcaggtacatggcttaca

SEQ ID NO: 1584046 - DNA, 25 bp, Homo sapien
cacggcttacgttggtggacacagc

SEQ ID NO: 1584047 - DNA, 25 bp, Homo sapien
cctgtgtgtgtacgcgactggctgc

SEQ ID NO: 1584048 - DNA, 25 bp, Homo sapien
gcttctctgtgcacgcggcgaatgt

SEQ ID NO: 1584049 - DNA, 25 bp, Homo sapien
gcagtacgggtccacatgctgatgt

SEQ ID NO: 1584050 - DNA, 25 bp, Homo sapien
cagctggtgtcaggcactgcagtgt

SEQ ID NO: 1584051 - DNA, 25 bp, Homo sapien
gaacacgagggagggtggcgctgca

SEQ ID NO: 1584052 - DNA, 25 bp, Homo sapien
tcaggagtggacagtcatggcaatg

SEQ ID NO: 1584053 - DNA, 25 bp, Homo sapien
ggagaacgagggcaggaacacgagg

SEQ ID NO: 1584054 - DNA, 25 bp, Homo sapien
acagtcatggcaatgcggtcagagg

SEQ ID NO: 1584055 - DNA, 25 bp, Homo sapien
gggcttctcgctgttgaggtgcagt

SEQ ID NO: 1584056 - DNA, 25 bp, Homo sapien
ggcttctcgctgttgaggtgcagtt

SEQ ID NO: 1584057 - DNA, 25 bp, Homo sapien
ggggcttctcgctgttgaggtgcag

SEQ ID NO: 1584058 - DNA, 25 bp, Homo sapien
gcttctcgctgttgaggtgcagttg

SEQ ID NO: 1584059 - DNA, 25 bp, Homo sapien
ggagaaggtcgtcctcgtcctcgtc

SEQ ID NO: 1584060 - DNA, 25 bp, Homo sapien
agaaggtcgtcctcgtcctcgtctg

SEQ ID NO: 1584061 - DNA, 25 bp, Homo sapien
gagaaggtcgtcctcgtcctcgtct

SEQ ID NO: 1584062 - DNA, 25 bp, Homo sapien
aaggtcgtcctcgtcctcgtctggg

SEQ ID NO: 1584063 - DNA, 25 bp, Homo sapien
tcccgcttgatctcgctggcggccg

SEQ ID NO: 1584064 - DNA, 25 bp, Homo sapien
tccgagtggtcagccgctgacgtgt

SEQ ID NO: 1584065 - DNA, 25 bp, Homo sapien
cttgatctcgctggcggccgccgtg

SEQ ID NO: 1584066 - DNA, 25 bp, Homo sapien
tcctcctccgagtggtcagccgctg

SEQ ID NO: 1584067 - DNA, 25 bp, Homo sapien
tatggaacacttcggatgggcacag

SEQ ID NO: 1584068 - DNA, 25 bp, Homo sapien
catgtgtagctaccaatgccagaca

SEQ ID NO: 1584069 - DNA, 25 bp, Homo sapien
ggatccctacctcacgccatgtgta

SEQ ID NO: 1584070 - DNA, 25 bp, Homo sapien
gcagcaactcaatggcaggaatcta

SEQ ID NO: 1584071 - DNA, 25 bp, Homo sapien
tgctgcctgcgaggccgtcctcggg

SEQ ID NO: 1584072 - DNA, 25 bp, Homo sapien
cactgtaggagtcgggaggccgaga

SEQ ID NO: 1584073 - DNA, 25 bp, Homo sapien
gggagggccgcgtggttgtgcatga

SEQ ID NO: 1584074 - DNA, 25 bp, Homo sapien
ttgtgcatgaggctggtgctgcctg

SEQ ID NO: 1584075 - DNA, 25 bp, Homo sapien
gggagacgggtgcatcagggggagc

SEQ ID NO: 1584076 - DNA, 25 bp, Homo sapien
tggggagacgggtgcatcaggggga

SEQ ID NO: 1584077 - DNA, 25 bp, Homo sapien
caggcgtggggagacgggtgcatca

SEQ ID NO: 1584078 - DNA, 25 bp, Homo sapien
ctgcaggcgtggggagacgggtgca

SEQ ID NO: 1584079 - DNA, 25 bp, Homo sapien
cacgtggatggcctcgtccaggtgg

SEQ ID NO: 1584080 - DNA, 25 bp, Homo sapien
aggcagcagcgtgtgcatgtcgccg

SEQ ID NO: 1584081 - DNA, 25 bp, Homo sapien
atgtcgccggctgtgcccacggcgt

SEQ ID NO: 1584082 - DNA, 25 bp, Homo sapien
acatggggccggtgaaacctgaggc

SEQ ID NO: 1584083 - DNA, 25 bp, Homo sapien
ccgggggctcctgctcgaggccact

SEQ ID NO: 1584084 - DNA, 25 bp, Homo sapien
gggctcctgctcgaggccactgtga

SEQ ID NO: 1584085 - DNA, 25 bp, Homo sapien
cctgctcgaggccactgtgacgttc

SEQ ID NO: 1584086 - DNA, 25 bp, Homo sapien
gctcctgctcgaggccactgtgacg

SEQ ID NO: 1584087 - DNA, 25 bp, Homo sapien
aagggctggacgagaagttattgct

SEQ ID NO: 1584088 - DNA, 25 bp, Homo sapien
ggtagaagggctggacgagaagtta

SEQ ID NO: 1584089 - DNA, 25 bp, Homo sapien
tagaagggctggacgagaagttatt

SEQ ID NO: 1584090 - DNA, 25 bp, Homo sapien
gaagggctggacgagaagttattgc

SEQ ID NO: 1584091 - DNA, 25 bp, Homo sapien
gaggccagtgctttgccgagggcat

SEQ ID NO: 1584092 - DNA, 25 bp, Homo sapien
cgaggccagtgctttgccgagggca

SEQ ID NO: 1584093 - DNA, 25 bp, Homo sapien
gatgggagcccaccgttcacctctg

SEQ ID NO: 1584094 - DNA, 25 bp, Homo sapien
gaggatgcagatgggagcccaccgt

SEQ ID NO: 1584095 - DNA, 25 bp, Homo sapien
gccccgctgacaggcggcgtgtggc

SEQ ID NO: 1584096 - DNA, 25 bp, Homo sapien
gtcggccccgctgacaggcggcgtg

SEQ ID NO: 1584097 - DNA, 25 bp, Homo sapien
ctggtgcaggccaccaaacgtgctg

SEQ ID NO: 1584098 - DNA, 25 bp, Homo sapien
atacgctcgtgctggtgcaggccac

SEQ ID NO: 1584099 - DNA, 25 bp, Homo sapien
aggccaccaaacgtgctgctgcttc

SEQ ID NO: 1584100 - DNA, 25 bp, Homo sapien
catacgctcgtgctggtgcaggcca

SEQ ID NO: 1584101 - DNA, 25 bp, Homo sapien
gcgggaggggcagcggggatgagcc

SEQ ID NO: 1584102 - DNA, 25 bp, Homo sapien
gggcgggaggggcagcggggatgag

SEQ ID NO: 1584103 - DNA, 25 bp, Homo sapien
ggaggggcagcggggatgagccccc

SEQ ID NO: 1584104 - DNA, 25 bp, Homo sapien
aggggcagcggggatgagcccccac

SEQ ID NO: 1584105 - DNA, 25 bp, Homo sapien
cagcatgggcccgaagcccgcctgg

SEQ ID NO: 1584106 - DNA, 25 bp, Homo sapien
catgggcccgaagcccgcctggccc

SEQ ID NO: 1584107 - DNA, 25 bp, Homo sapien
agcatgggcccgaagcccgcctggc

SEQ ID NO: 1584108 - DNA, 25 bp, Homo sapien
ccagcatgggcccgaagcccgcctg

SEQ ID NO: 1584109 - DNA, 25 bp, Homo sapien
tgctgggggtcttggcggacgggta

SEQ ID NO: 1584110 - DNA, 25 bp, Homo sapien
cttggcggacgggtaggcggtggca

SEQ ID NO: 1584111 - DNA, 25 bp, Homo sapien
aggcggtggcatccctgccgtagtc

SEQ ID NO: 1584112 - DNA, 25 bp, Homo sapien
cctgccgtagtcctcacctgagctg

SEQ ID NO: 1584113 - DNA, 25 bp, Homo sapien
gaccttccggaccttcttgggctgc

SEQ ID NO: 1584114 - DNA, 25 bp, Homo sapien
ccttccggaccttcttgggctgcgt

SEQ ID NO: 1584115 - DNA, 25 bp, Homo sapien
accttccggaccttcttgggctgcg

SEQ ID NO: 1584116 - DNA, 25 bp, Homo sapien
ttccggaccttcttgggctgcgtgt

SEQ ID NO: 1584117 - DNA, 25 bp, Homo sapien
ttcatgcccgaaggggacaggggcc

SEQ ID NO: 1584118 - DNA, 25 bp, Homo sapien
gtagtactgggaggtccccttcatg

SEQ ID NO: 1584119 - DNA, 25 bp, Homo sapien
tgccgtctgccgctctccgccggga

SEQ ID NO: 1584120 - DNA, 25 bp, Homo sapien
cgggagctgccggagtaggaggggt

SEQ ID NO: 1584121 - DNA, 25 bp, Homo sapien
aaagccctcggttggattctgtaca

SEQ ID NO: 1584122 - DNA, 25 bp, Homo sapien
catttcatccgttctaaggccgggc

SEQ ID NO: 1584123 - DNA, 25 bp, Homo sapien
tgtacatgttagtgtgaaacgggct

SEQ ID NO: 1584124 - DNA, 25 bp, Homo sapien
tggctaagcgtctgtgcacccggct

SEQ ID NO: 1584125 - DNA, 25 bp, Homo sapien
acgcctgcgtctctcccgaaggagg

SEQ ID NO: 1584126 - DNA, 25 bp, Homo sapien
gaaggaggcataggcgccccgctca

SEQ ID NO: 1584127 - DNA, 25 bp, Homo sapien
tcccgaaggaggcataggcgccccg

SEQ ID NO: 1584128 - DNA, 25 bp, Homo sapien
agtcaggccgcccacgcctgcgtct

SEQ ID NO: 1584129 - DNA, 25 bp, Homo sapien
ggacttgacactcccgcaggaggcg

SEQ ID NO: 1584130 - DNA, 25 bp, Homo sapien
acccgcaggagggaccgcacacggg

SEQ ID NO: 1584131 - DNA, 25 bp, Homo sapien
caggaggcggagcatgtgaagctcg

SEQ ID NO: 1584132 - DNA, 25 bp, Homo sapien
tgaagctcggggcatttcctgtgtc

SEQ ID NO: 1584133 - DNA, 25 bp, Homo sapien
tcacgattctctcggttaacaggag

SEQ ID NO: 1584134 - DNA, 25 bp, Homo sapien
cgagcccaacctgagtcacgattct

SEQ ID NO: 1584135 - DNA, 25 bp, Homo sapien
gaggagccctgcagaaatcccaggg

SEQ ID NO: 1584136 - DNA, 25 bp, Homo sapien
gaagcctagttgcagagtgccgtgc

SEQ ID NO: 1584137 - DNA, 25 bp, Homo sapien
gcctggcgctgtgcgtgcactgacc

SEQ ID NO: 1584138 - DNA, 25 bp, Homo sapien
aggcccacgtctgcacatctgtgca

SEQ ID NO: 1584139 - DNA, 25 bp, Homo sapien
tgaccatgccaaggcccacgtctgc

SEQ ID NO: 1584140 - DNA, 25 bp, Homo sapien
gctgtgcgtgcactgaccatgccaa

SEQ ID NO: 1584141 - DNA, 25 bp, Homo sapien
gcgactcagtgaagtgggtgccctc

SEQ ID NO: 1584142 - DNA, 25 bp, Homo sapien
ggtcccaggaatgtggatgaagaga

SEQ ID NO: 1584143 - DNA, 25 bp, Homo sapien
tgtgcgactcagtgaagtgggtgcc

SEQ ID NO: 1584144 - DNA, 25 bp, Homo sapien
gctgctgtgcgactcagtgaagtgg

SEQ ID NO: 1584145 - DNA, 25 bp, Homo sapien
ccctccaccccgcattacagctgga

SEQ ID NO: 1584146 - DNA, 25 bp, Homo sapien
tccaccccgcattacagctggagag

SEQ ID NO: 1584147 - DNA, 25 bp, Homo sapien
ccccgcattacagctggagaggcag

SEQ ID NO: 1584148 - DNA, 25 bp, Homo sapien
caccccgcattacagctggagaggc

SEQ ID NO: 1584149 - DNA, 25 bp, Homo sapien
ccggctggggtcaaaggaggagctg

SEQ ID NO: 1584150 - DNA, 25 bp, Homo sapien
cctgagctgggccggtcctcaagac

SEQ ID NO: 1584151 - DNA, 25 bp, Homo sapien
ggagctgctctggtcgccgctgccc

SEQ ID NO: 1584152 - DNA, 25 bp, Homo sapien
agcctgagctgggccggtcctcaag

SEQ ID NO: 1584153 - DNA, 25 bp, Homo sapien
tctggcccagccctgactatgtgga

SEQ ID NO: 1584154 - DNA, 25 bp, Homo sapien
gatgcagactcttctgaccctgtga

SEQ ID NO: 1584155 - DNA, 25 bp, Homo sapien
tggaagctaacccatgagctctggg

SEQ ID NO: 1584156 - DNA, 25 bp, Homo sapien
cagagagagttatgggtcaccctca

SEQ ID NO: 1584157 - DNA, 25 bp, Homo sapien
aggctcacccatcgggcaggaggct

SEQ ID NO: 1584158 - DNA, 25 bp, Homo sapien
caggaacaagcccagtgtggagacc

SEQ ID NO: 1584159 - DNA, 25 bp, Homo sapien
ggagccgaatctcatcacccaggaa

SEQ ID NO: 1584160 - DNA, 25 bp, Homo sapien
ctggcagcccgtgagggtggagccg

SEQ ID NO: 1584161 - DNA, 25 bp, Homo sapien
gcaacgcccaggactccagaatctt

SEQ ID NO: 1584162 - DNA, 25 bp, Homo sapien
ggccacagagcacacccgtggagaa

SEQ ID NO: 1584163 - DNA, 25 bp, Homo sapien
gggcccttatctctcagaacactca

SEQ ID NO: 1584164 - DNA, 25 bp, Homo sapien
gagttcccggcgcagcaagggacgg

SEQ ID NO: 1584165 - DNA, 25 bp, Homo sapien
ccgggaagggcaccttcctgccctg

SEQ ID NO: 1584166 - DNA, 25 bp, Homo sapien
ggccagcctggctgcctcgggagag

SEQ ID NO: 1584167 - DNA, 25 bp, Homo sapien
ccagcctggctgcctcgggagaggc

SEQ ID NO: 1584168 - DNA, 25 bp, Homo sapien
agggcaccttcctgccctgggccag

SEQ ID NO: 1584169 - DNA, 25 bp, Homo sapien
aacaatgaaagatgctgcttcagag

SEQ ID NO: 1584170 - DNA, 25 bp, Homo sapien
gggctgccgtgaggataacaatgaa

SEQ ID NO: 1584171 - DNA, 25 bp, Homo sapien
tccgtagccaaggaatgctccaggc

SEQ ID NO: 1584172 - DNA, 25 bp, Homo sapien
cttcagagaggccatccgtagccaa

SEQ ID NO: 1584173 - DNA, 25 bp, Homo sapien
agcaatccggagttgggagcacaca

SEQ ID NO: 1584174 - DNA, 25 bp, Homo sapien
tcctagaagccgtaacaagacaggc

SEQ ID NO: 1584175 - DNA, 25 bp, Homo sapien
ttaatctgaaaacacggtgccgacc

SEQ ID NO: 1584176 - DNA, 25 bp, Homo sapien
ttcacttcggacgttgagagcgcga

SEQ ID NO: 1584177 - DNA, 25 bp, Homo sapien
cagccaacagcttggctggatctcc

SEQ ID NO: 1584178 - DNA, 25 bp, Homo sapien
gtaacagaataaaagctaatctcag

SEQ ID NO: 1584179 - DNA, 25 bp, Homo sapien
gaattatgctaacgtaacagaataa

SEQ ID NO: 1584180 - DNA, 25 bp, Homo sapien
gaaggttgcaaactataggattcca

SEQ ID NO: 1584181 - DNA, 25 bp, Homo sapien
tctcaaatctaaagtttcctttcaa

SEQ ID NO: 1584182 - DNA, 25 bp, Homo sapien
ctggttctcaaatctaaagtttcct

SEQ ID NO: 1584183 - DNA, 25 bp, Homo sapien
ctgggtttctggttctcaaatctaa

SEQ ID NO: 1584184 - DNA, 25 bp, Homo sapien
ttctggttctcaaatctaaagtttc

SEQ ID NO: 1584185 - DNA, 25 bp, Homo sapien
ccatcgactcgctgaacctgacgat

SEQ ID NO: 1584186 - DNA, 25 bp, Homo sapien
caggtgcccatcttgcgggagcttc

SEQ ID NO: 1584187 - DNA, 25 bp, Homo sapien
tgaacctgacgatggaagagagcag

SEQ ID NO: 1584188 - DNA, 25 bp, Homo sapien
gactcgctgaacctgacgatggaag

SEQ ID NO: 1584189 - DNA, 25 bp, Homo sapien
cagggaccaatctcacagtggtccg

SEQ ID NO: 1584190 - DNA, 25 bp, Homo sapien
gaccaatctcacagtggtccgtgcc

SEQ ID NO: 1584191 - DNA, 25 bp, Homo sapien
gggaccaatctcacagtggtccgtg

SEQ ID NO: 1584192 - DNA, 25 bp, Homo sapien
caatctcacagtggtccgtgccagg

SEQ ID NO: 1584193 - DNA, 25 bp, Homo sapien
tcccgttggtgacaggcagcgggaa

SEQ ID NO: 1584194 - DNA, 25 bp, Homo sapien
cccttcccgttggtgacaggcagcg

SEQ ID NO: 1584195 - DNA, 25 bp, Homo sapien
cttcccgttggtgacaggcagcggg

SEQ ID NO: 1584196 - DNA, 25 bp, Homo sapien
ggcccttcccgttggtgacaggcag

SEQ ID NO: 1584197 - DNA, 25 bp, Homo sapien
tggcagtcacaatggtggcgctgct

SEQ ID NO: 1584198 - DNA, 25 bp, Homo sapien
gctgtctgctcggtggcccatgaat

SEQ ID NO: 1584199 - DNA, 25 bp, Homo sapien
tccgcagtgataaccgtggcagtca

SEQ ID NO: 1584200 - DNA, 25 bp, Homo sapien
gcagcttaacttcagcacccacgtg

SEQ ID NO: 1584201 - DNA, 25 bp, Homo sapien
gctgaagtccaggaggtcactgagc

SEQ ID NO: 1584202 - DNA, 25 bp, Homo sapien
catgctgaagtccaggaggtcactg

SEQ ID NO: 1584203 - DNA, 25 bp, Homo sapien
ctgagctccttgtctgtgcccacag

SEQ ID NO: 1584204 - DNA, 25 bp, Homo sapien
tgaagtccaggaggtcactgagctc

SEQ ID NO: 1584205 - DNA, 25 bp, Homo sapien
ggccagggcgggcacctcaggcctg

SEQ ID NO: 1584206 - DNA, 25 bp, Homo sapien
ctggggccagggcgggcacctcagg

SEQ ID NO: 1584207 - DNA, 25 bp, Homo sapien
ggcgggcacctcaggcctggaaacc

SEQ ID NO: 1584208 - DNA, 25 bp, Homo sapien
gggccagggcgggcacctcaggcct

SEQ ID NO: 1584209 - DNA, 25 bp, Homo sapien
tccagagtctaggtccctgcagagt

SEQ ID NO: 1584210 - DNA, 25 bp, Homo sapien
ggaacaccagggcatcaagttgcca

SEQ ID NO: 1584211 - DNA, 25 bp, Homo sapien
acagagtgctaaaagccacctaaaa

SEQ ID NO: 1584212 - DNA, 25 bp, Homo sapien
gtttaaactgcacgcagggcagcca

SEQ ID NO: 1584213 - DNA, 25 bp, Homo sapien
gagagcgtctcaagaccagggtgct

SEQ ID NO: 1584214 - DNA, 25 bp, Homo sapien
cctccagtctcgactttccccaggg

SEQ ID NO: 1584215 - DNA, 25 bp, Homo sapien
gcctccgaggtcgagggagacccaa

SEQ ID NO: 1584216 - DNA, 25 bp, Homo sapien
ccagggggctccattctaagatggg

SEQ ID NO: 1584217 - DNA, 25 bp, Homo sapien
gctgcttaaagtttcccgaagtgcc

SEQ ID NO: 1584218 - DNA, 25 bp, Homo sapien
ggctgcttaaagtttcccgaagtgc

SEQ ID NO: 1584219 - DNA, 25 bp, Homo sapien
ggacaaaggtgcgtcgcggccgggc

SEQ ID NO: 1584220 - DNA, 25 bp, Homo sapien
ccgcgtcggctccggcccgctacgc

SEQ ID NO: 1584221 - DNA, 25 bp, Homo sapien
ggctccggcccgctacgcccgcagc

SEQ ID NO: 1584222 - DNA, 25 bp, Homo sapien
gcggcggcatgaagcgggggggccc

SEQ ID NO: 1584223 - DNA, 25 bp, Homo sapien
gaacgccctagctcggcctctcgag

SEQ ID NO: 1584224 - DNA, 25 bp, Homo sapien
accccgaatcccgtgaggtccagag

SEQ ID NO: 1584225 - DNA, 25 bp, Homo sapien
cggctcgggcccgaacgccctagct

SEQ ID NO: 1584226 - DNA, 25 bp, Homo sapien
ctctcgagcaccctcgtgaggaccc

SEQ ID NO: 1584227 - DNA, 25 bp, Homo sapien
gaggatggtcccaccccctcttggc

SEQ ID NO: 1584228 - DNA, 25 bp, Homo sapien
gggccgcccgtgcaaacacagggcg

SEQ ID NO: 1584229 - DNA, 25 bp, Homo sapien
agggccagggccaactgccgaggat

SEQ ID NO: 1584230 - DNA, 25 bp, Homo sapien
gtcctgccacattccggggccgccc

SEQ ID NO: 1584231 - DNA, 25 bp, Homo sapien
agcacctgccccgaaaatccaggca

SEQ ID NO: 1584232 - DNA, 25 bp, Homo sapien
atggccaaaatgcaggggagcccca

SEQ ID NO: 1584233 - DNA, 25 bp, Homo sapien
cctgccccgaaaatccaggcagtcc

SEQ ID NO: 1584234 - DNA, 25 bp, Homo sapien
cacctgccccgaaaatccaggcagt

SEQ ID NO: 1584235 - DNA, 25 bp, Homo sapien
aaatcaccgaagcttgaaaagtgct

SEQ ID NO: 1584236 - DNA, 25 bp, Homo sapien
caggctgcggtttacactgaatcca

SEQ ID NO: 1584237 - DNA, 25 bp, Homo sapien
tgctcaataagccatcgatcgctct

SEQ ID NO: 1584238 - DNA, 25 bp, Homo sapien
tcctctgccccaggtcgatgggagc

SEQ ID NO: 1584239 - DNA, 25 bp, Homo sapien
aggatacagcggaccccgatgaagc

SEQ ID NO: 1584240 - DNA, 25 bp, Homo sapien
ggcgcggtcccgcaggcgggaggcg

SEQ ID NO: 1584241 - DNA, 25 bp, Homo sapien
ggcgatgctgccgacgctattgctg

SEQ ID NO: 1584242 - DNA, 25 bp, Homo sapien
tgctgccgacgctattgctgccatt

SEQ ID NO: 1584243 - DNA, 25 bp, Homo sapien
gagggggcccgagaggatggagaga

SEQ ID NO: 1584244 - DNA, 25 bp, Homo sapien
tgggtgggggcaggggcggccagga

SEQ ID NO: 1584245 - DNA, 25 bp, Homo sapien
gcgagggtacggctgggtgggggca

SEQ ID NO: 1584246 - DNA, 25 bp, Homo sapien
cggccaggaccttcctcccggacat

SEQ ID NO: 1584247 - DNA, 25 bp, Homo sapien
ggcaggggcggccaggaccttcctc

SEQ ID NO: 1584248 - DNA, 25 bp, Homo sapien
agaccccatgcacttggccgctgaa

SEQ ID NO: 1584249 - DNA, 25 bp, Homo sapien
ttttgatcgccaccgagcgggttgg

SEQ ID NO: 1584250 - DNA, 25 bp, Homo sapien
gagctggtgtttcccgcggctccag

SEQ ID NO: 1584251 - DNA, 25 bp, Homo sapien
ggctccaggctgatacatctttgag

SEQ ID NO: 1584252 - DNA, 25 bp, Homo sapien
ggtgatgtgcacccgtggtcccacc

SEQ ID NO: 1584253 - DNA, 25 bp, Homo sapien
gatgtgcacccgtggtcccacctac

SEQ ID NO: 1584254 - DNA, 25 bp, Homo sapien
tgatgtgcacccgtggtcccaccta

SEQ ID NO: 1584255 - DNA, 25 bp, Homo sapien
tggtgatgtgcacccgtggtcccac

SEQ ID NO: 1584256 - DNA, 25 bp, Homo sapien
agtttttgcacacccaaagctgctt

SEQ ID NO: 1584257 - DNA, 25 bp, Homo sapien
ttgaatggaacacatcctccagtag

SEQ ID NO: 1584258 - DNA, 25 bp, Homo sapien
taagttttggagtccttgaacatcc

SEQ ID NO: 1584259 - DNA, 25 bp, Homo sapien
tggctttcctctaggcgctttttag

SEQ ID NO: 1584260 - DNA, 25 bp, Homo sapien
ttcaaggagaacaagcggccgtcca

SEQ ID NO: 1584261 - DNA, 25 bp, Homo sapien
cacgctgatcgccatcttcaaggag

SEQ ID NO: 1584262 - DNA, 25 bp, Homo sapien
tgcagcgacgcacgctgatcgccat

SEQ ID NO: 1584263 - DNA, 25 bp, Homo sapien
cttggagctcaacaccgtcagcaac

SEQ ID NO: 1584264 - DNA, 25 bp, Homo sapien
tatgccagcgtgactcctttgggct

SEQ ID NO: 1584265 - DNA, 25 bp, Homo sapien
tggacgattcttccagacttggtgg

SEQ ID NO: 1584266 - DNA, 25 bp, Homo sapien
tagggattcagatgctacgtcactg

SEQ ID NO: 1584267 - DNA, 25 bp, Homo sapien
tcttgtctggaagtggcaccgtccc

SEQ ID NO: 1584268 - DNA, 25 bp, Homo sapien
tcttggaaagactcagatagcctgt

SEQ ID NO: 1584269 - DNA, 25 bp, Homo sapien
aaatgacgacagctggctttctctg

SEQ ID NO: 1584270 - DNA, 25 bp, Homo sapien
tgaaaagaatgtgacctctccttgg

SEQ ID NO: 1584271 - DNA, 25 bp, Homo sapien
gcttgggtgacaatgacctctcctg

SEQ ID NO: 1584272 - DNA, 25 bp, Homo sapien
agaaaatgatgagctaggtgtaggg

SEQ ID NO: 1584273 - DNA, 25 bp, Homo sapien
gaagagcggattgtctatccataga

SEQ ID NO: 1584274 - DNA, 25 bp, Homo sapien
tgtacttcctgggaggacacctgcc

SEQ ID NO: 1584275 - DNA, 25 bp, Homo sapien
gagctgtacttcctgggaggacacc

SEQ ID NO: 1584276 - DNA, 25 bp, Homo sapien
gtgatgaggtttgcatatccctcac

SEQ ID NO: 1584277 - DNA, 25 bp, Homo sapien
tggtcccctccgcagaattgtgccc

SEQ ID NO: 1584278 - DNA, 25 bp, Homo sapien
tgtgccctgagtgatgaggtttgca

SEQ ID NO: 1584279 - DNA, 25 bp, Homo sapien
tagggattcagatgctatgtcactg

SEQ ID NO: 1584280 - DNA, 25 bp, Homo sapien
ccatggtgaaaatctcctcgctggg

SEQ ID NO: 1584281 - DNA, 25 bp, Homo sapien
agaaagcatagctggaacggcgggc

SEQ ID NO: 1584282 - DNA, 25 bp, Homo sapien
gagactcccggtgtacatgaggcaa

SEQ ID NO: 1584283 - DNA, 25 bp, Homo sapien
gcgggcacgagactcccggtgtaca

SEQ ID NO: 1584284 - DNA, 25 bp, Homo sapien
caagttgagccaattagagtcctcg

SEQ ID NO: 1584285 - DNA, 25 bp, Homo sapien
gattggctacgttcttccctaccca

SEQ ID NO: 1584286 - DNA, 25 bp, Homo sapien
ggaaactaaccctggatcagccaat

SEQ ID NO: 1584287 - DNA, 25 bp, Homo sapien
cagccaatcagagttattccctggg

SEQ ID NO: 1584288 - DNA, 25 bp, Homo sapien
cttggcacgtagctccttgagggct

SEQ ID NO: 1584289 - DNA, 25 bp, Homo sapien
gctgggaagatgactcggagggcca

SEQ ID NO: 1584290 - DNA, 25 bp, Homo sapien
gaggacatcacgctgaggtcggcat

SEQ ID NO: 1584291 - DNA, 25 bp, Homo sapien
gacagggaaggtgtttatggacaca

SEQ ID NO: 1584292 - DNA, 25 bp, Homo sapien
tgatggcgtagaaaccaaggctgag

SEQ ID NO: 1584293 - DNA, 25 bp, Homo sapien
cacagggcggtccagtacttgatga

SEQ ID NO: 1584294 - DNA, 25 bp, Homo sapien
ctgaggaggatggtcgccacgcaca

SEQ ID NO: 1584295 - DNA, 25 bp, Homo sapien
tccagtacttgatgataagaatgac

SEQ ID NO: 1584296 - DNA, 25 bp, Homo sapien
aagggcacctggcaatgcccccaaa

SEQ ID NO: 1584297 - DNA, 25 bp, Homo sapien
gcctagcggggcttgcaccaggaca

SEQ ID NO: 1584298 - DNA, 25 bp, Homo sapien
gacaggcagcggtggggtaaatccg

SEQ ID NO: 1584299 - DNA, 25 bp, Homo sapien
tagcggggcttgcaccaggacacca

SEQ ID NO: 1584300 - DNA, 25 bp, Homo sapien
caaaggactggtggtcgctgaagct

SEQ ID NO: 1584301 - DNA, 25 bp, Homo sapien
cgtgtcgcggctgatccacagtgtc

SEQ ID NO: 1584302 - DNA, 25 bp, Homo sapien
caccatgggcgatggcttggacgaa

SEQ ID NO: 1584303 - DNA, 25 bp, Homo sapien
tagttgaagagctcgtccttctgcc

SEQ ID NO: 1584304 - DNA, 25 bp, Homo sapien
agagcccaatgtagagaactggcag

SEQ ID NO: 1584305 - DNA, 25 bp, Homo sapien
gagcccaatgtagagaactggcagg

SEQ ID NO: 1584306 - DNA, 25 bp, Homo sapien
agcccaatgtagagaactggcaggg

SEQ ID NO: 1584307 - DNA, 25 bp, Homo sapien
aaagagcccaatgtagagaactggc

SEQ ID NO: 1584308 - DNA, 25 bp, Homo sapien
cggtgaagccgttgtagcaggcaaa

SEQ ID NO: 1584309 - DNA, 25 bp, Homo sapien
ctggccggtgaagccgttgtagcag

SEQ ID NO: 1584310 - DNA, 25 bp, Homo sapien
tggccggtgaagccgttgtagcagg

SEQ ID NO: 1584311 - DNA, 25 bp, Homo sapien
gccggtgaagccgttgtagcaggca

SEQ ID NO: 1584312 - DNA, 25 bp, Homo sapien
gcacgtaggaccagcggccgtgcac

SEQ ID NO: 1584313 - DNA, 25 bp, Homo sapien
gaacttgcagatccgcacgtaggac

SEQ ID NO: 1584314 - DNA, 25 bp, Homo sapien
aagaagtagcgcaggaacttgcaga

SEQ ID NO: 1584315 - DNA, 25 bp, Homo sapien
gaagtagcgcaggaacttgcagatc

SEQ ID NO: 1584316 - DNA, 25 bp, Homo sapien
gccgagcacgaagtcgctgttctga

SEQ ID NO: 1584317 - DNA, 25 bp, Homo sapien
agaactggccgagcacgaagtcgct

SEQ ID NO: 1584318 - DNA, 25 bp, Homo sapien
gaagtcgctgttctgaactgcctgc

SEQ ID NO: 1584319 - DNA, 25 bp, Homo sapien
aggaagcagaactggccgagcacga

SEQ ID NO: 1584320 - DNA, 25 bp, Homo sapien
ccgccagccccacgcccacgtccgc

SEQ ID NO: 1584321 - DNA, 25 bp, Homo sapien
gccagccccacgcccacgtccgcgg

SEQ ID NO: 1584322 - DNA, 25 bp, Homo sapien
gcccgccagccccacgcccacgtcc

SEQ ID NO: 1584323 - DNA, 25 bp, Homo sapien
tggcccgccagccccacgcccacgt

SEQ ID NO: 1584324 - DNA, 25 bp, Homo sapien
catgttgatgtcgttggcaccgtcc

SEQ ID NO: 1584325 - DNA, 25 bp, Homo sapien
gttgatgtcgttggcaccgtccccg

SEQ ID NO: 1584326 - DNA, 25 bp, Homo sapien
atgtcgttggcaccgtccccgatgg

SEQ ID NO: 1584327 - DNA, 25 bp, Homo sapien
atcatgttgatgtcgttggcaccgt

SEQ ID NO: 1584328 - DNA, 25 bp, Homo sapien
gaacctccggcacagcagggacagg

SEQ ID NO: 1584329 - DNA, 25 bp, Homo sapien
cttgaccagggccacgatcagggcc

SEQ ID NO: 1584330 - DNA, 25 bp, Homo sapien
cacctcggagctacggcgggctctg

SEQ ID NO: 1584331 - DNA, 25 bp, Homo sapien
aggtccacgaaggcgcgctcctgca

SEQ ID NO: 1584332 - DNA, 25 bp, Homo sapien
tcgtccatgttcacgttctgcgcca

SEQ ID NO: 1584333 - DNA, 25 bp, Homo sapien
ctcctgccacgcctcgtccatgttc

SEQ ID NO: 1584334 - DNA, 25 bp, Homo sapien
atgttcacgttctgcgccagggcgc

SEQ ID NO: 1584335 - DNA, 25 bp, Homo sapien
tccatgttcacgttctgcgccaggg

SEQ ID NO: 1584336 - DNA, 25 bp, Homo sapien
ctccctggttagaaggttgttactg

SEQ ID NO: 1584337 - DNA, 25 bp, Homo sapien
cagggactccctggttagaaggttg

SEQ ID NO: 1584338 - DNA, 25 bp, Homo sapien
tgacctgcgacagggactccctggt

SEQ ID NO: 1584339 - DNA, 25 bp, Homo sapien
gccagcttgacctgcgacagggact

SEQ ID NO: 1584340 - DNA, 25 bp, Homo sapien
acagcagctcgcaggcgaagccgat

SEQ ID NO: 1584341 - DNA, 25 bp, Homo sapien
gacagcagctcgcaggcgaagccga

SEQ ID NO: 1584342 - DNA, 25 bp, Homo sapien
tgcgaagcagaccagctcagcgcct

SEQ ID NO: 1584343 - DNA, 25 bp, Homo sapien
cctctgcgacccgccccgcactggc

SEQ ID NO: 1584344 - DNA, 25 bp, Homo sapien
ctgcgaagcagaccagctcagcgcc

SEQ ID NO: 1584345 - DNA, 25 bp, Homo sapien
tctgcgacccgccccgcactggctg

SEQ ID NO: 1584346 - DNA, 25 bp, Homo sapien
tggtttcagggacaccgtcctggag

SEQ ID NO: 1584347 - DNA, 25 bp, Homo sapien
gagtctgtcctcgatggctgtggct

SEQ ID NO: 1584348 - DNA, 25 bp, Homo sapien
acaccgtcctggagtctgtcctcga

SEQ ID NO: 1584349 - DNA, 25 bp, Homo sapien
gcttgtccccggtgagcacccatat

SEQ ID NO: 1584350 - DNA, 25 bp, Homo sapien
ggtcctgctccatctcgttgtacac

SEQ ID NO: 1584351 - DNA, 25 bp, Homo sapien
ctgctgccagtcctcgtaaatgtcc

SEQ ID NO: 1584352 - DNA, 25 bp, Homo sapien
tgccagtcctcgtaaatgtcctcag

SEQ ID NO: 1584353 - DNA, 25 bp, Homo sapien
cctcctctgtggcaaattccattgc

SEQ ID NO: 1584354 - DNA, 25 bp, Homo sapien
ccctcctgtgcaagcgttcgaagat

SEQ ID NO: 1584355 - DNA, 25 bp, Homo sapien
tgtcggcgcccttggtgtacaggca

SEQ ID NO: 1584356 - DNA, 25 bp, Homo sapien
gttcgaagatgaccgtgtcggcgcc

SEQ ID NO: 1584357 - DNA, 25 bp, Homo sapien
tgcgggacaggaacacgtagccgaa

SEQ ID NO: 1584358 - DNA, 25 bp, Homo sapien
gaggccgcctggtacaacagctggt

SEQ ID NO: 1584359 - DNA, 25 bp, Homo sapien
ccagctccatgatcgtgacggtgtc

SEQ ID NO: 1584360 - DNA, 25 bp, Homo sapien
cgtttgcgcgtgctgttgaagtcca

SEQ ID NO: 1584361 - DNA, 25 bp, Homo sapien
ggccattttggggtcacgtggtgga

SEQ ID NO: 1584362 - DNA, 25 bp, Homo sapien
ttggggtcacgtggtggagcccgtc

SEQ ID NO: 1584363 - DNA, 25 bp, Homo sapien
cattttggggtcacgtggtggagcc

SEQ ID NO: 1584364 - DNA, 25 bp, Homo sapien
tggggtcacgtggtggagcccgtct

SEQ ID NO: 1584365 - DNA, 25 bp, Homo sapien
gggcgctcacgggggctctcccgca

SEQ ID NO: 1584366 - DNA, 25 bp, Homo sapien
ggcgctcacgggggctctcccgcac

SEQ ID NO: 1584367 - DNA, 25 bp, Homo sapien
tgggcgctcacgggggctctcccgc

SEQ ID NO: 1584368 - DNA, 25 bp, Homo sapien
gaagagcagcttcccgtcggcgaac

SEQ ID NO: 1584369 - DNA, 25 bp, Homo sapien
tcggcgaacttgttccagaggtagg

SEQ ID NO: 1584370 - DNA, 25 bp, Homo sapien
cagcagggccgcattgtggaagagc

SEQ ID NO: 1584371 - DNA, 25 bp, Homo sapien
ccgttggtccgcacgaggtgcagca

SEQ ID NO: 1584372 - DNA, 25 bp, Homo sapien
gtcgggtcgtggcctctgaatccgg

SEQ ID NO: 1584373 - DNA, 25 bp, Homo sapien
cttaggtcgggtcgtggcctctgaa

SEQ ID NO: 1584374 - DNA, 25 bp, Homo sapien
taggtcgggtcgtggcctctgaatc

SEQ ID NO: 1584375 - DNA, 25 bp, Homo sapien
cgggtcgtggcctctgaatccggcc

SEQ ID NO: 1584376 - DNA, 25 bp, Homo sapien
ggcttgtgaaagtcaaaagaagagc

SEQ ID NO: 1584377 - DNA, 25 bp, Homo sapien
tgggtaaggtggcactctcctgtag

SEQ ID NO: 1584378 - DNA, 25 bp, Homo sapien
catagggattccctgtcttgacaaa

SEQ ID NO: 1584379 - DNA, 25 bp, Homo sapien
tccagtgctttgaaaagcggaggca

SEQ ID NO: 1584380 - DNA, 25 bp, Homo sapien
catctggctacggttccctggttca

SEQ ID NO: 1584381 - DNA, 25 bp, Homo sapien
ggccatctggctacggttccctggt

SEQ ID NO: 1584382 - DNA, 25 bp, Homo sapien
gttccctggttcagattcgggcgga

SEQ ID NO: 1584383 - DNA, 25 bp, Homo sapien
ttccctggttcagattcgggcggag

SEQ ID NO: 1584384 - DNA, 25 bp, Homo sapien
cttgaagatcgaggacccagctggg

SEQ ID NO: 1584385 - DNA, 25 bp, Homo sapien
tgggagctcaggtgtcggggccgca

SEQ ID NO: 1584386 - DNA, 25 bp, Homo sapien
tgagccccttgaagatcgaggaccc

SEQ ID NO: 1584387 - DNA, 25 bp, Homo sapien
cccttgaagatcgaggacccagctg

SEQ ID NO: 1584388 - DNA, 25 bp, Homo sapien
ctgatgcagcacttgttgaaggtca

SEQ ID NO: 1584389 - DNA, 25 bp, Homo sapien
cacgtcctgcggcttgtagtacatc

SEQ ID NO: 1584390 - DNA, 25 bp, Homo sapien
aagatgttctgcgtgagcgtgcccg

SEQ ID NO: 1584391 - DNA, 25 bp, Homo sapien
tagtacatctgcacgtcccagtcga

SEQ ID NO: 1584392 - DNA, 25 bp, Homo sapien
ttctttgactgagaaaccgaagccg

SEQ ID NO: 1584393 - DNA, 25 bp, Homo sapien
aagacgaagaaggactctgcggcca

SEQ ID NO: 1584394 - DNA, 25 bp, Homo sapien
ggcagacaagcaccacggagatgaa

SEQ ID NO: 1584395 - DNA, 25 bp, Homo sapien
tgaacatggacatcgggatggtgac

SEQ ID NO: 1584396 - DNA, 25 bp, Homo sapien
tggttctcttcaaatggatcttgcc

SEQ ID NO: 1584397 - DNA, 25 bp, Homo sapien
gtgcatccgactgttaggcgcctca

SEQ ID NO: 1584398 - DNA, 25 bp, Homo sapien
tgtgttgcgaatcctgcagcctcgg

SEQ ID NO: 1584399 - DNA, 25 bp, Homo sapien
cataaatgaccagtccatagcaggt

SEQ ID NO: 1584400 - DNA, 25 bp, Homo sapien
gaggttgccaatgtccagggagtat

SEQ ID NO: 1584401 - DNA, 25 bp, Homo sapien
gtgagccactgggcctggccagcac

SEQ ID NO: 1584402 - DNA, 25 bp, Homo sapien
catcagggcctgtctgaacttcaag

SEQ ID NO: 1584403 - DNA, 25 bp, Homo sapien
ttatagtggccagttctttgtgggt

SEQ ID NO: 1584404 - DNA, 25 bp, Homo sapien
atcagggcctgtctgaacttcaagt

SEQ ID NO: 1584405 - DNA, 25 bp, Homo sapien
ctttatagtggccagttctttgtgg

SEQ ID NO: 1584406 - DNA, 25 bp, Homo sapien
tccaccgtctccacatagcacaggc

SEQ ID NO: 1584407 - DNA, 25 bp, Homo sapien
gtccaccgtctccacatagcacagg

SEQ ID NO: 1584408 - DNA, 25 bp, Homo sapien
tgcaagaggggatgcaagacaaatt

SEQ ID NO: 1584409 - DNA, 25 bp, Homo sapien
acaaattgggggtgcggcagccctc

SEQ ID NO: 1584410 - DNA, 25 bp, Homo sapien
gagtggggggcagcgttgcaagagg

SEQ ID NO: 1584411 - DNA, 25 bp, Homo sapien
tgctctcggtgagggggcgcgtggt

SEQ ID NO: 1584412 - DNA, 25 bp, Homo sapien
ggacgatgttgtccttgcggagaca

SEQ ID NO: 1584413 - DNA, 25 bp, Homo sapien
tgtccttgcggagacagaccacatc

SEQ ID NO: 1584414 - DNA, 25 bp, Homo sapien
gatgttgtccttgcggagacagacc

SEQ ID NO: 1584415 - DNA, 25 bp, Homo sapien
gttgtccttgcggagacagaccaca

SEQ ID NO: 1584416 - DNA, 25 bp, Homo sapien
gaatgcaggcccggttcctgtcgga

SEQ ID NO: 1584417 - DNA, 25 bp, Homo sapien
gcccgagccctaagctctgcaaggg

SEQ ID NO: 1584418 - DNA, 25 bp, Homo sapien
ccggccaaacgcctaatgaatgcag

SEQ ID NO: 1584419 - DNA, 25 bp, Homo sapien
gggttcgccatcagggcctcggcct

SEQ ID NO: 1584420 - DNA, 25 bp, Homo sapien
tggctctgtcactcttgtgtctccc

SEQ ID NO: 1584421 - DNA, 25 bp, Homo sapien
ttgatggctctgtcactcttgtgtc

SEQ ID NO: 1584422 - DNA, 25 bp, Homo sapien
ctgttgttgatggctctgtcactct

SEQ ID NO: 1584423 - DNA, 25 bp, Homo sapien
ttgttgatggctctgtcactcttgt

SEQ ID NO: 1584424 - DNA, 25 bp, Homo sapien
cagggcagcgtggagatgtcgggaa

SEQ ID NO: 1584425 - DNA, 25 bp, Homo sapien
cagaccataggggtactgagcgaga

SEQ ID NO: 1584426 - DNA, 25 bp, Homo sapien
ccaccaggtcccgggtggcacggat

SEQ ID NO: 1584427 - DNA, 25 bp, Homo sapien
gggtggcacggatgaagaggaggca

SEQ ID NO: 1584428 - DNA, 25 bp, Homo sapien
aacaggttggacacgcggtggaact

SEQ ID NO: 1584429 - DNA, 25 bp, Homo sapien
tagaagttgtacttggccgtgcgga

SEQ ID NO: 1584430 - DNA, 25 bp, Homo sapien
tcgtacaggttcagcggcaggaacg

SEQ ID NO: 1584431 - DNA, 25 bp, Homo sapien
ggaactgctcgtacaggttcagcgg

SEQ ID NO: 1584432 - DNA, 25 bp, Homo sapien
gaactgcccgttgtaggcacggttg

SEQ ID NO: 1584433 - DNA, 25 bp, Homo sapien
acggttgttggcctggaccttccag

SEQ ID NO: 1584434 - DNA, 25 bp, Homo sapien
ttctccttgaactgcccgttgtagg

SEQ ID NO: 1584435 - DNA, 25 bp, Homo sapien
ggcacggttgttggcctggaccttc

SEQ ID NO: 1584436 - DNA, 25 bp, Homo sapien
tgcaccgccccctctgcccaggatc

SEQ ID NO: 1584437 - DNA, 25 bp, Homo sapien
caccgccccctctgcccaggatcag

SEQ ID NO: 1584438 - DNA, 25 bp, Homo sapien
ctgcaccgccccctctgcccaggat

SEQ ID NO: 1584439 - DNA, 25 bp, Homo sapien
ccgccccctctgcccaggatcagca

SEQ ID NO: 1584440 - DNA, 25 bp, Homo sapien
gagatcttctctctggccgaggctg

SEQ ID NO: 1584441 - DNA, 25 bp, Homo sapien
agatcttctctctggccgaggctgc

SEQ ID NO: 1584442 - DNA, 25 bp, Homo sapien
tcctgtcctcatcttggagatcttc

SEQ ID NO: 1584443 - DNA, 25 bp, Homo sapien
ttggagatcttctctctggccgagg

SEQ ID NO: 1584444 - DNA, 25 bp, Homo sapien
tctccattcatacttcctagcccgg

SEQ ID NO: 1584445 - DNA, 25 bp, Homo sapien
ccattcatacttcctagcccggcca

SEQ ID NO: 1584446 - DNA, 25 bp, Homo sapien
ctggtctccattcatacttcctagc

SEQ ID NO: 1584447 - DNA, 25 bp, Homo sapien
attcatacttcctagcccggccagg

SEQ ID NO: 1584448 - DNA, 25 bp, Homo sapien
cctgagtcacgtctgagtcacccgt

SEQ ID NO: 1584449 - DNA, 25 bp, Homo sapien
gccttcctgagtcacgtctgagtca

SEQ ID NO: 1584450 - DNA, 25 bp, Homo sapien
gagccttcctgagtcacgtctgagt

SEQ ID NO: 1584451 - DNA, 25 bp, Homo sapien
agtcacgtctgagtcacccgtgtcc

SEQ ID NO: 1584452 - DNA, 25 bp, Homo sapien
cttggctcagggccagctctggtgc

SEQ ID NO: 1584453 - DNA, 25 bp, Homo sapien
tcagggccagctctggtgctcctgg

SEQ ID NO: 1584454 - DNA, 25 bp, Homo sapien
ggccagctctggtgctcctgggagt

SEQ ID NO: 1584455 - DNA, 25 bp, Homo sapien
ggctcagggccagctctggtgctcc

SEQ ID NO: 1584456 - DNA, 25 bp, Homo sapien
tggccagaatccactcgaagtgtat

SEQ ID NO: 1584457 - DNA, 25 bp, Homo sapien
tcaccgcatgaggaaaagggaggtt

SEQ ID NO: 1584458 - DNA, 25 bp, Homo sapien
tggagagaatgctcaaatggccaga

SEQ ID NO: 1584459 - DNA, 25 bp, Homo sapien
tcagggcgaagaggggtttaggctg

SEQ ID NO: 1584460 - DNA, 25 bp, Homo sapien
acagcagtgggagcacccgccgctc

SEQ ID NO: 1584461 - DNA, 25 bp, Homo sapien
ccgccgccacgaccccagctctcag

SEQ ID NO: 1584462 - DNA, 25 bp, Homo sapien
agcagtgggagcacccgccgctcac

SEQ ID NO: 1584463 - DNA, 25 bp, Homo sapien
cgcgggctcccggggacgcacagca

SEQ ID NO: 1584464 - DNA, 25 bp, Homo sapien
tggtggaaccgttagcccggtgcca

SEQ ID NO: 1584465 - DNA, 25 bp, Homo sapien
cgggcgtccagggcggcggacgtgg

SEQ ID NO: 1584466 - DNA, 25 bp, Homo sapien
ttattctgtccctgcctggaggtga

SEQ ID NO: 1584467 - DNA, 25 bp, Homo sapien
tattctgtccctgcctggaggtgag

SEQ ID NO: 1584468 - DNA, 25 bp, Homo sapien
atttattctgtccctgcctggaggt

SEQ ID NO: 1584469 - DNA, 25 bp, Homo sapien
aacatttattctgtccctgcctgga

SEQ ID NO: 1584470 - DNA, 25 bp, Homo sapien
cagtttctagagacgccagagggct

SEQ ID NO: 1584471 - DNA, 25 bp, Homo sapien
ctctagcgggaagacagtgtccgga

SEQ ID NO: 1584472 - DNA, 25 bp, Homo sapien
cgctcttcccggtgggaaagatgct

SEQ ID NO: 1584473 - DNA, 25 bp, Homo sapien
gctgtgcaagtcatcaggtttaaat

SEQ ID NO: 1584474 - DNA, 25 bp, Homo sapien
ttgcactgttttggaagaggcatgg

SEQ ID NO: 1584475 - DNA, 25 bp, Homo sapien
gacgggttaccggagatttattgca

SEQ ID NO: 1584476 - DNA, 25 bp, Homo sapien
ccggagatttattgcactgttttgg

SEQ ID NO: 1584477 - DNA, 25 bp, Homo sapien
tttattgcactgttttggaagaggc

SEQ ID NO: 1584478 - DNA, 25 bp, Homo sapien
catcgcttggtcttggcgtcttctc

SEQ ID NO: 1584479 - DNA, 25 bp, Homo sapien
atcgcttggtcttggcgtcttctcg

SEQ ID NO: 1584480 - DNA, 25 bp, Homo sapien
cttccagatcaccaggtgcatgcag

SEQ ID NO: 1584481 - DNA, 25 bp, Homo sapien
ttccagatcaccaggtgcatgcagg

SEQ ID NO: 1584482 - DNA, 25 bp, Homo sapien
cccctgcgcagggacggccccaggg

SEQ ID NO: 1584483 - DNA, 25 bp, Homo sapien
agatgcggtgagcacccggcccctg

SEQ ID NO: 1584484 - DNA, 25 bp, Homo sapien
ctgcggggcagatgcggtgagcacc

SEQ ID NO: 1584485 - DNA, 25 bp, Homo sapien
gggcagatgcggtgagcacccggcc

SEQ ID NO: 1584486 - DNA, 25 bp, Homo sapien
ggatgatctgtctgaggtagtcggc

SEQ ID NO: 1584487 - DNA, 25 bp, Homo sapien
tcctggatgatctgtctgaggtagt

SEQ ID NO: 1584488 - DNA, 25 bp, Homo sapien
gtgggggaagagcacagacgtgtcc

SEQ ID NO: 1584489 - DNA, 25 bp, Homo sapien
accgcttgtaggggaggcccaggcg

SEQ ID NO: 1584490 - DNA, 25 bp, Homo sapien
ggggaagagcacagacgtgtccacc

SEQ ID NO: 1584491 - DNA, 25 bp, Homo sapien
gaggttccgcagggaccgcttgtag

SEQ ID NO: 1584492 - DNA, 25 bp, Homo sapien
tgggcagcggcagagatcagcgcac

SEQ ID NO: 1584493 - DNA, 25 bp, Homo sapien
ctgtgggcagcggcagagatcagcg

SEQ ID NO: 1584494 - DNA, 25 bp, Homo sapien
gtgggcagcggcagagatcagcgca

SEQ ID NO: 1584495 - DNA, 25 bp, Homo sapien
tgtgggcagcggcagagatcagcgc

SEQ ID NO: 1584496 - DNA, 25 bp, Homo sapien
tcctgctggagaaccgcgcgggacc

SEQ ID NO: 1584497 - DNA, 25 bp, Homo sapien
ctgctggagaaccgcgcgggacccg

SEQ ID NO: 1584498 - DNA, 25 bp, Homo sapien
cctgctggagaaccgcgcgggaccc

SEQ ID NO: 1584499 - DNA, 25 bp, Homo sapien
gtcctgctggagaaccgcgcgggac

SEQ ID NO: 1584500 - DNA, 25 bp, Homo sapien
agcagaacggcctggacgtcacgca

SEQ ID NO: 1584501 - DNA, 25 bp, Homo sapien
tcacgcagcgtgacacttgtgtcgg

SEQ ID NO: 1584502 - DNA, 25 bp, Homo sapien
atgaggatggtgtcagcgctgaaca

SEQ ID NO: 1584503 - DNA, 25 bp, Homo sapien
cacttgtgtcggcaaggtcagcctc

SEQ ID NO: 1584504 - DNA, 25 bp, Homo sapien
gtgtcgaccaccgtgacgcgcgtca

SEQ ID NO: 1584505 - DNA, 25 bp, Homo sapien
gttgtcaggcttcacgaaggtgtca

SEQ ID NO: 1584506 - DNA, 25 bp, Homo sapien
gaaggtgtcataaaccacgtgcacg

SEQ ID NO: 1584507 - DNA, 25 bp, Homo sapien
taaaccacgtgcacgtccgtgtcga

SEQ ID NO: 1584508 - DNA, 25 bp, Homo sapien
catctcgcagtccagggcgtagatc

SEQ ID NO: 1584509 - DNA, 25 bp, Homo sapien
tcaaggcgctccttccggccatcct

SEQ ID NO: 1584510 - DNA, 25 bp, Homo sapien
cagtccagggcgtagatccccgggt

SEQ ID NO: 1584511 - DNA, 25 bp, Homo sapien
aggtcttcacgaagccctcaaggcg

SEQ ID NO: 1584512 - DNA, 25 bp, Homo sapien
tcacgcccattcactggttgggacc

SEQ ID NO: 1584513 - DNA, 25 bp, Homo sapien
atccatcacgcccattcactggttg

SEQ ID NO: 1584514 - DNA, 25 bp, Homo sapien
tatccatccatcacgcccattcact

SEQ ID NO: 1584515 - DNA, 25 bp, Homo sapien
catcacgcccattcactggttggga

SEQ ID NO: 1584516 - DNA, 25 bp, Homo sapien
ctttgcgacttggcagccgacagag

SEQ ID NO: 1584517 - DNA, 25 bp, Homo sapien
gcggcagccgagcagcacatgtact

SEQ ID NO: 1584518 - DNA, 25 bp, Homo sapien
tgcgacttggcagccgacagagccg

SEQ ID NO: 1584519 - DNA, 25 bp, Homo sapien
ggcagccgagcagcacatgtactgg

SEQ ID NO: 1584520 - DNA, 25 bp, Homo sapien
cggcagtcgtgtggcagccaggacg

SEQ ID NO: 1584521 - DNA, 25 bp, Homo sapien
gaggcctcttggcagcgctgccccg

SEQ ID NO: 1584522 - DNA, 25 bp, Homo sapien
ggctgtgcaaggctggccatgtgcc

SEQ ID NO: 1584523 - DNA, 25 bp, Homo sapien
gccccgggcagcaccctccaggtat

SEQ ID NO: 1584524 - DNA, 25 bp, Homo sapien
tggtaataacactcctcgtcccgga

SEQ ID NO: 1584525 - DNA, 25 bp, Homo sapien
gcagccgtccccagtggtaataaca

SEQ ID NO: 1584526 - DNA, 25 bp, Homo sapien
gccgtccccagtggtaataacactc

SEQ ID NO: 1584527 - DNA, 25 bp, Homo sapien
tccccagtggtaataacactcctcg

SEQ ID NO: 1584528 - DNA, 25 bp, Homo sapien
gtgccacagcggcagcaggtcctgc

SEQ ID NO: 1584529 - DNA, 25 bp, Homo sapien
ggtactcggtgccacagcggcagca

SEQ ID NO: 1584530 - DNA, 25 bp, Homo sapien
tcggtgccacagcggcagcaggtcc

SEQ ID NO: 1584531 - DNA, 25 bp, Homo sapien
ctgaagaggacacgaggtactcggt

SEQ ID NO: 1584532 - DNA, 25 bp, Homo sapien
taggccgtcgcaggccagcgactca

SEQ ID NO: 1584533 - DNA, 25 bp, Homo sapien
ctaggccgtcgcaggccagcgactc

SEQ ID NO: 1584534 - DNA, 25 bp, Homo sapien
aggccgtcgcaggccagcgactcac

SEQ ID NO: 1584535 - DNA, 25 bp, Homo sapien
tcagctgtgaagatgattgcgcccc

SEQ ID NO: 1584536 - DNA, 25 bp, Homo sapien
gtgaagatgattgcgcccccgggcc

SEQ ID NO: 1584537 - DNA, 25 bp, Homo sapien
gctgtgaagatgattgcgcccccgg

SEQ ID NO: 1584538 - DNA, 25 bp, Homo sapien
agctgtgaagatgattgcgcccccg

SEQ ID NO: 1584539 - DNA, 25 bp, Homo sapien
ctgtggacaggcacagtggtcagcc

SEQ ID NO: 1584540 - DNA, 25 bp, Homo sapien
ttcaggtcctccacccgggggctgc

SEQ ID NO: 1584541 - DNA, 25 bp, Homo sapien
gggctgcttggacggctgagcgaga

SEQ ID NO: 1584542 - DNA, 25 bp, Homo sapien
gacacaaccctgcggccactggttt

SEQ ID NO: 1584543 - DNA, 25 bp, Homo sapien
gaagctggtcttggcggccaacctg

SEQ ID NO: 1584544 - DNA, 25 bp, Homo sapien
cattcaggtagatgttcttgctggg

SEQ ID NO: 1584545 - DNA, 25 bp, Homo sapien
ggccaggcccctgagcttcttgagg

SEQ ID NO: 1584546 - DNA, 25 bp, Homo sapien
cttgctggggctgcggtcataggcc

SEQ ID NO: 1584547 - DNA, 25 bp, Homo sapien
cttcttgagggtgttcacggccaca

SEQ ID NO: 1584548 - DNA, 25 bp, Homo sapien
tctatggcctcctggttggaggtac

SEQ ID NO: 1584549 - DNA, 25 bp, Homo sapien
cttgagacactcctcgatgaacagg

SEQ ID NO: 1584550 - DNA, 25 bp, Homo sapien
ggttggaggtacagaacttgagaca

SEQ ID NO: 1584551 - DNA, 25 bp, Homo sapien
tgagatagcgctggcggatgacggt

SEQ ID NO: 1584552 - DNA, 25 bp, Homo sapien
tcagggccgttggaggactggctgc

SEQ ID NO: 1584553 - DNA, 25 bp, Homo sapien
ggactgtgggcgattcgcttaggga

SEQ ID NO: 1584554 - DNA, 25 bp, Homo sapien
ggccgcaagggtcctcttggcacct

SEQ ID NO: 1584555 - DNA, 25 bp, Homo sapien
tccccgacaatgtgcgtgttttcag

SEQ ID NO: 1584556 - DNA, 25 bp, Homo sapien
atcaccacgtggcggagcaccaggc

SEQ ID NO: 1584557 - DNA, 25 bp, Homo sapien
agggcgagtggctgcccatcaccac

SEQ ID NO: 1584558 - DNA, 25 bp, Homo sapien
cgagtggctgcccatcaccacgtgg

SEQ ID NO: 1584559 - DNA, 25 bp, Homo sapien
accacgtggcggagcaccaggcagc

SEQ ID NO: 1584560 - DNA, 25 bp, Homo sapien
gctggggctgcgcaatggcatcagg

SEQ ID NO: 1584561 - DNA, 25 bp, Homo sapien
caagcccaaggcgtcgatgtctgag

SEQ ID NO: 1584562 - DNA, 25 bp, Homo sapien
aggccgctgaggacacgtcaccggt

SEQ ID NO: 1584563 - DNA, 25 bp, Homo sapien
tgaagtcacaaaccagagggaggag

SEQ ID NO: 1584564 - DNA, 25 bp, Homo sapien
caggcaagtccatcgaggcagagga

SEQ ID NO: 1584565 - DNA, 25 bp, Homo sapien
tcagagcaacatccctcgaaatgcc

SEQ ID NO: 1584566 - DNA, 25 bp, Homo sapien
tctcagagcaacatccctcgaaatg

SEQ ID NO: 1584567 - DNA, 25 bp, Homo sapien
gctcggcaccgacccaggaagggga

SEQ ID NO: 1584568 - DNA, 25 bp, Homo sapien
agcaacatccctcgaaatgccatct

SEQ ID NO: 1584569 - DNA, 25 bp, Homo sapien
tcttcaggaacggacagagaacctc

SEQ ID NO: 1584570 - DNA, 25 bp, Homo sapien
gggataggcccaactcaatgatttc

SEQ ID NO: 1584571 - DNA, 25 bp, Homo sapien
cagtggagggtttgctcttcaggaa

SEQ ID NO: 1584572 - DNA, 25 bp, Homo sapien
atgagtctgctcatgctaccgcggg

SEQ ID NO: 1584573 - DNA, 25 bp, Homo sapien
tcggagtaaaggaaatacagcccca

SEQ ID NO: 1584574 - DNA, 25 bp, Homo sapien
caccactgatgtgaagacgcaggag

SEQ ID NO: 1584575 - DNA, 25 bp, Homo sapien
tctccctaaggagggccgtgggatc

SEQ ID NO: 1584576 - DNA, 25 bp, Homo sapien
gggatactttctcgctctacagaca

SEQ ID NO: 1584577 - DNA, 25 bp, Homo sapien
agcaagctcgccgatgccctctgcg

SEQ ID NO: 1584578 - DNA, 25 bp, Homo sapien
acggagggcgacttctctgccagcc

SEQ ID NO: 1584579 - DNA, 25 bp, Homo sapien
gggcggaaatgtggacggagggcga

SEQ ID NO: 1584580 - DNA, 25 bp, Homo sapien
tgggcccgcaggtagcacacctcct

SEQ ID NO: 1584581 - DNA, 25 bp, Homo sapien
aaggcctggcagcacagcgggggca

SEQ ID NO: 1584582 - DNA, 25 bp, Homo sapien
taaggcctggcagcacagcgggggc

SEQ ID NO: 1584583 - DNA, 25 bp, Homo sapien
ctaaggcctggcagcacagcggggg

SEQ ID NO: 1584584 - DNA, 25 bp, Homo sapien
aggcctggcagcacagcgggggcac

SEQ ID NO: 1584585 - DNA, 25 bp, Homo sapien
gagcaggcgaccccgggcaggcttg

SEQ ID NO: 1584586 - DNA, 25 bp, Homo sapien
ggagcaggcgaccccgggcaggctt

SEQ ID NO: 1584587 - DNA, 25 bp, Homo sapien
ctcctggccttgcttggaaaggtgg

SEQ ID NO: 1584588 - DNA, 25 bp, Homo sapien
tcagacccgaaagccccttctcctc

SEQ ID NO: 1584589 - DNA, 25 bp, Homo sapien
tcttctgcccggggaacagagtggt

SEQ ID NO: 1584590 - DNA, 25 bp, Homo sapien
aaggtgggagatcctcctcttctgc

SEQ ID NO: 1584591 - DNA, 25 bp, Homo sapien
gctggtggccacgggccagtgacct

SEQ ID NO: 1584592 - DNA, 25 bp, Homo sapien
tccatggggtcggagtcaaagtcca

SEQ ID NO: 1584593 - DNA, 25 bp, Homo sapien
gtcttgacgctggtggactcgttga

SEQ ID NO: 1584594 - DNA, 25 bp, Homo sapien
agatccgcaggcactcctccatggg

SEQ ID NO: 1584595 - DNA, 25 bp, Homo sapien
gactcgttgaagatccgcaggcact

SEQ ID NO: 1584596 - DNA, 25 bp, Homo sapien
ggcccctgcgcctccgggaagccca

SEQ ID NO: 1584597 - DNA, 25 bp, Homo sapien
gggaggccttgagccgcttgggcgg

SEQ ID NO: 1584598 - DNA, 25 bp, Homo sapien
agtctgagtcggagtctgagtccga

SEQ ID NO: 1584599 - DNA, 25 bp, Homo sapien
ccgcccccgcgctggaggtggagga

SEQ ID NO: 1584600 - DNA, 25 bp, Homo sapien
agggcagagggccacacgctcggca

SEQ ID NO: 1584601 - DNA, 25 bp, Homo sapien
ggggagggcagagggccacacgctc

SEQ ID NO: 1584602 - DNA, 25 bp, Homo sapien
gggcagagggccacacgctcggcac

SEQ ID NO: 1584603 - DNA, 25 bp, Homo sapien
ggagggcagagggccacacgctcgg

SEQ ID NO: 1584604 - DNA, 25 bp, Homo sapien
cctggccctgcggcctcgtcctcac

SEQ ID NO: 1584605 - DNA, 25 bp, Homo sapien
ccctggccctgcggcctcgtcctca

SEQ ID NO: 1584606 - DNA, 25 bp, Homo sapien
ccccaaagaggtcggcgtggctcag

SEQ ID NO: 1584607 - DNA, 25 bp, Homo sapien
gtgagcgggctttccgctccactag

SEQ ID NO: 1584608 - DNA, 25 bp, Homo sapien
tctcgtccccaaagaggtcggcgtg

SEQ ID NO: 1584609 - DNA, 25 bp, Homo sapien
cctgggaggcgccctcgtctagtga

SEQ ID NO: 1584610 - DNA, 25 bp, Homo sapien
cgccggtcgggagtccccgcttgtg

SEQ ID NO: 1584611 - DNA, 25 bp, Homo sapien
ccgacggggccttggtgctcttcct

SEQ ID NO: 1584612 - DNA, 25 bp, Homo sapien
gcttgtggggctcggccgccgcgct

SEQ ID NO: 1584613 - DNA, 25 bp, Homo sapien
gcgctggccggtcaggcctcccttt

SEQ ID NO: 1584614 - DNA, 25 bp, Homo sapien
tctgagtctgagaaccttgcatcgc

SEQ ID NO: 1584615 - DNA, 25 bp, Homo sapien
ggagtggccgaagatggcttcttct

SEQ ID NO: 1584616 - DNA, 25 bp, Homo sapien
tggccttgatctcagggtcggccct

SEQ ID NO: 1584617 - DNA, 25 bp, Homo sapien
ttacctgggaccgtggcggcctcat

SEQ ID NO: 1584618 - DNA, 25 bp, Homo sapien
ccagggacgccagcgagtacttgct

SEQ ID NO: 1584619 - DNA, 25 bp, Homo sapien
gctggtagccggcatcagggcttaa

SEQ ID NO: 1584620 - DNA, 25 bp, Homo sapien
cagggcttaataggccgtggctgcc

SEQ ID NO: 1584621 - DNA, 25 bp, Homo sapien
caccacgtacttgccactgggaacg

SEQ ID NO: 1584622 - DNA, 25 bp, Homo sapien
ccagtgggaaggcatcctcgtccgg

SEQ ID NO: 1584623 - DNA, 25 bp, Homo sapien
gtgggaaggcatcctcgtccgggcc

SEQ ID NO: 1584624 - DNA, 25 bp, Homo sapien
agtgggaaggcatcctcgtccgggc

SEQ ID NO: 1584625 - DNA, 25 bp, Homo sapien
cagtgggaaggcatcctcgtccggg

SEQ ID NO: 1584626 - DNA, 25 bp, Homo sapien
gcgcggggggcttgggcagctcagg

SEQ ID NO: 1584627 - DNA, 25 bp, Homo sapien
ctgcgcggggggcttgggcagctca

SEQ ID NO: 1584628 - DNA, 25 bp, Homo sapien
aactccagcacatccgggcgcggct

SEQ ID NO: 1584629 - DNA, 25 bp, Homo sapien
ctccaactccagcacatccgggcgc

SEQ ID NO: 1584630 - DNA, 25 bp, Homo sapien
cactggcgcccgccaaggctctggg

SEQ ID NO: 1584631 - DNA, 25 bp, Homo sapien
cgcactggcgcccgccaaggctctg

SEQ ID NO: 1584632 - DNA, 25 bp, Homo sapien
actggcgcccgccaaggctctgggg

SEQ ID NO: 1584633 - DNA, 25 bp, Homo sapien
gcactggcgcccgccaaggctctgg

SEQ ID NO: 1584634 - DNA, 25 bp, Homo sapien
gggccatggacaggccgagatcttg

SEQ ID NO: 1584635 - DNA, 25 bp, Homo sapien
agagcagtttcgcaaccatcccatg

SEQ ID NO: 1584636 - DNA, 25 bp, Homo sapien
gcagtttcgcaaccatcccatgcag

SEQ ID NO: 1584637 - DNA, 25 bp, Homo sapien
gtttcgcaaccatcccatgcagctt

SEQ ID NO: 1584638 - DNA, 25 bp, Homo sapien
cgtgccacagacagaccgcacaggg

SEQ ID NO: 1584639 - DNA, 25 bp, Homo sapien
gtacagatgcgtctggtgcagcctt

SEQ ID NO: 1584640 - DNA, 25 bp, Homo sapien
cttcagactcggaatcctcagaacc

SEQ ID NO: 1584641 - DNA, 25 bp, Homo sapien
ccgcacagggcaggtacagatgcgt

SEQ ID NO: 1584642 - DNA, 25 bp, Homo sapien
tgcagggacagcgggaggccgggac

SEQ ID NO: 1584643 - DNA, 25 bp, Homo sapien
ctcctgttcccgggaaccctgcagg

SEQ ID NO: 1584644 - DNA, 25 bp, Homo sapien
tctggaagtaggaggggcccgtcca

SEQ ID NO: 1584645 - DNA, 25 bp, Homo sapien
tgaatgccgactctggaagtaggag

SEQ ID NO: 1584646 - DNA, 25 bp, Homo sapien
tgggcgacagagctatacatgcata

SEQ ID NO: 1584647 - DNA, 25 bp, Homo sapien
aaatgaatgccgactctggaagtag

SEQ ID NO: 1584648 - DNA, 25 bp, Homo sapien
ctgcgcaggcccacttccatggctt

SEQ ID NO: 1584649 - DNA, 25 bp, Homo sapien
agatcctgtctccctagggcctgct

SEQ ID NO: 1584650 - DNA, 25 bp, Homo sapien
tccagatcctgtctccctagggcct

SEQ ID NO: 1584651 - DNA, 25 bp, Homo sapien
cggtggccaactcaggactgcgcag

SEQ ID NO: 1584652 - DNA, 25 bp, Homo sapien
aaagcatggaattcctcggagccca

SEQ ID NO: 1584653 - DNA, 25 bp, Homo sapien
tccaagaaacgctgccatgacgatg

SEQ ID NO: 1584654 - DNA, 25 bp, Homo sapien
tgaaaaccaccatgacgctgtgagg

SEQ ID NO: 1584655 - DNA, 25 bp, Homo sapien
gcagagagccactatcaagggacag

SEQ ID NO: 1584656 - DNA, 25 bp, Homo sapien
gcggggggcgcctctccgccgtcac

SEQ ID NO: 1584657 - DNA, 25 bp, Homo sapien
aataggggcagtcaatggcccggaa

SEQ ID NO: 1584658 - DNA, 25 bp, Homo sapien
gggccccgcggtgccggaagtggca

SEQ ID NO: 1584659 - DNA, 25 bp, Homo sapien
agtggcagtagggccgccggcaggg

SEQ ID NO: 1584660 - DNA, 25 bp, Homo sapien
ggcgccccagaccaataggggcagt

SEQ ID NO: 1584661 - DNA, 25 bp, Homo sapien
gggccccctcactggcgccgcggtc

SEQ ID NO: 1584662 - DNA, 25 bp, Homo sapien
ggccccctcactggcgccgcggtcg

SEQ ID NO: 1584663 - DNA, 25 bp, Homo sapien
tgggccgggacagacggccgcggga

SEQ ID NO: 1584664 - DNA, 25 bp, Homo sapien
gcagcgcgcctgctcagaaacgcct

SEQ ID NO: 1584665 - DNA, 25 bp, Homo sapien
tgtagcggcgccatcttgagcccca

SEQ ID NO: 1584666 - DNA, 25 bp, Homo sapien
aggctggtgacggacccctgggccg

SEQ ID NO: 1584667 - DNA, 25 bp, Homo sapien
ttaattaaatacaaggatgaggcca

SEQ ID NO: 1584668 - DNA, 25 bp, Homo sapien
attaattaaatacaaggatgaggcc

SEQ ID NO: 1584669 - DNA, 25 bp, Homo sapien
tttaattaattaaatacaaggatga

SEQ ID NO: 1584670 - DNA, 25 bp, Homo sapien
taattaattaaatacaaggatgagg

SEQ ID NO: 1584671 - DNA, 25 bp, Homo sapien
ccctgcaaacggctggaaccaggtc

SEQ ID NO: 1584672 - DNA, 25 bp, Homo sapien
gaaccaggtcccagtgatcagcgac

SEQ ID NO: 1584673 - DNA, 25 bp, Homo sapien
cccacggaaagcacacgcctctcgg

SEQ ID NO: 1584674 - DNA, 25 bp, Homo sapien
cagtgatcagcgactcctgggagag

SEQ ID NO: 1584675 - DNA, 25 bp, Homo sapien
cactagcgctgccagaagagggttt

SEQ ID NO: 1584676 - DNA, 25 bp, Homo sapien
gggccaaccaagactcacaaaggaa

SEQ ID NO: 1584677 - DNA, 25 bp, Homo sapien
acgaccgctgacaaggacacaaagg

SEQ ID NO: 1584678 - DNA, 25 bp, Homo sapien
tgaggctagggacagagaacacaga

SEQ ID NO: 1584679 - DNA, 25 bp, Homo sapien
cctaccgtgggcagaacttgtggac

SEQ ID NO: 1584680 - DNA, 25 bp, Homo sapien
ggacacctgagattgagtacccgaa

SEQ ID NO: 1584681 - DNA, 25 bp, Homo sapien
gattgtcacgtgataccgcaacggc

SEQ ID NO: 1584682 - DNA, 25 bp, Homo sapien
cagccgcagtcgtcgttaagggaga

SEQ ID NO: 1584683 - DNA, 25 bp, Homo sapien
tgtcttcagggtttgcccacggctg

SEQ ID NO: 1584684 - DNA, 25 bp, Homo sapien
gcagaagcatcctggcggtcagggt

SEQ ID NO: 1584685 - DNA, 25 bp, Homo sapien
ggtgtcttcagggtttgcccacggc

SEQ ID NO: 1584686 - DNA, 25 bp, Homo sapien
tcttcagggtttgcccacggctgga

SEQ ID NO: 1584687 - DNA, 25 bp, Homo sapien
cttcttgtcgcagccctgccagtca

SEQ ID NO: 1584688 - DNA, 25 bp, Homo sapien
tgggggaggtactgcgggcaccagg

SEQ ID NO: 1584689 - DNA, 25 bp, Homo sapien
gccctgccagtcacaagcaaaaggg

SEQ ID NO: 1584690 - DNA, 25 bp, Homo sapien
gtgaagcgcttggagcacagagggc

SEQ ID NO: 1584691 - DNA, 25 bp, Homo sapien
aggtaccctggaccctggcattccg

SEQ ID NO: 1584692 - DNA, 25 bp, Homo sapien
gcattccgggacgttattcccgtga

SEQ ID NO: 1584693 - DNA, 25 bp, Homo sapien
catgcccctcgtggcactggttgga

SEQ ID NO: 1584694 - DNA, 25 bp, Homo sapien
atggagaccggatgtgcatgcccct

SEQ ID NO: 1584695 - DNA, 25 bp, Homo sapien
agccaggggcctagaaggacccaca

SEQ ID NO: 1584696 - DNA, 25 bp, Homo sapien
ccatgctcagggtgaccgagtgaca

SEQ ID NO: 1584697 - DNA, 25 bp, Homo sapien
gtgaggggtacagagacggcgggag

SEQ ID NO: 1584698 - DNA, 25 bp, Homo sapien
gacatctctgctctaagatcagggg

SEQ ID NO: 1584699 - DNA, 25 bp, Homo sapien
agagcgcgctgctcctagccagccg

SEQ ID NO: 1584700 - DNA, 25 bp, Homo sapien
ccacgctgcgctgggcgaagcgcct

SEQ ID NO: 1584701 - DNA, 25 bp, Homo sapien
ctcgcacacaatccactcgcaggga

SEQ ID NO: 1584702 - DNA, 25 bp, Homo sapien
aagcgcctctgcgaaatgccaggcc

SEQ ID NO: 1584703 - DNA, 25 bp, Homo sapien
ccttgagcaggttctatagaaccta

SEQ ID NO: 1584704 - DNA, 25 bp, Homo sapien
gagctcctgaaggtgatccttgagc

SEQ ID NO: 1584705 - DNA, 25 bp, Homo sapien
tctatagaacctataggcagctgct

SEQ ID NO: 1584706 - DNA, 25 bp, Homo sapien
ctgaaggtgatccttgagcaggttc

SEQ ID NO: 1584707 - DNA, 25 bp, Homo sapien
agggccggccatcaaggcccaccgt

SEQ ID NO: 1584708 - DNA, 25 bp, Homo sapien
caagcacctctaatgcccaaaccag

SEQ ID NO: 1584709 - DNA, 25 bp, Homo sapien
taatgcccaaaccagggccggccat

SEQ ID NO: 1584710 - DNA, 25 bp, Homo sapien
catcaaggcccaccgtcccctgttg

SEQ ID NO: 1584711 - DNA, 25 bp, Homo sapien
agcccccgccactgccgccggggcg

SEQ ID NO: 1584712 - DNA, 25 bp, Homo sapien
cggagcccccgccactgccgccggg

SEQ ID NO: 1584713 - DNA, 25 bp, Homo sapien
gagcccccgccactgccgccggggc

SEQ ID NO: 1584714 - DNA, 25 bp, Homo sapien
cccggagcccccgccactgccgccg

SEQ ID NO: 1584715 - DNA, 25 bp, Homo sapien
tccgcaggtgcgactttaggtgcga

SEQ ID NO: 1584716 - DNA, 25 bp, Homo sapien
tgtgtgcgtccgcaggtgcgacttt

SEQ ID NO: 1584717 - DNA, 25 bp, Homo sapien
ctttaggtgcgaggacttgtagtag

SEQ ID NO: 1584718 - DNA, 25 bp, Homo sapien
tgcgactttaggtgcgaggacttgt

SEQ ID NO: 1584719 - DNA, 25 bp, Homo sapien
agtccgggaagggacagcggtggct

SEQ ID NO: 1584720 - DNA, 25 bp, Homo sapien
gcgcagtccgggaagggacagcggt

SEQ ID NO: 1584721 - DNA, 25 bp, Homo sapien
gcagtccgggaagggacagcggtgg

SEQ ID NO: 1584722 - DNA, 25 bp, Homo sapien
ctttggcgcagtccgggaagggaca

SEQ ID NO: 1584723 - DNA, 25 bp, Homo sapien
gacggggacgaggcggctgaggagg

SEQ ID NO: 1584724 - DNA, 25 bp, Homo sapien
cggcctcgcggcgcgccgcgcgcac

SEQ ID NO: 1584725 - DNA, 25 bp, Homo sapien
tccaggccggcggcggggcccgcgc

SEQ ID NO: 1584726 - DNA, 25 bp, Homo sapien
tcggggccgggccgcccgcggtgca

SEQ ID NO: 1584727 - DNA, 25 bp, Homo sapien
atccaggccggcggcggggcccgcg

SEQ ID NO: 1584728 - DNA, 25 bp, Homo sapien
acggcgcccgaagagatggccatga

SEQ ID NO: 1584729 - DNA, 25 bp, Homo sapien
gtcggcggcgaagtaatccacgcac

SEQ ID NO: 1584730 - DNA, 25 bp, Homo sapien
gatggccatgagcacgtcggcggcg

SEQ ID NO: 1584731 - DNA, 25 bp, Homo sapien
cacggcgcccgaagagatggccatg

SEQ ID NO: 1584732 - DNA, 25 bp, Homo sapien
gagcggcgtccgtccggccggcggc

SEQ ID NO: 1584733 - DNA, 25 bp, Homo sapien
agcggcgtccgtccggccggcggcg

SEQ ID NO: 1584734 - DNA, 25 bp, Homo sapien
ccaaccatgcgtcttccactgatgt

SEQ ID NO: 1584735 - DNA, 25 bp, Homo sapien
tctaggacgatgggccacttgggca

SEQ ID NO: 1584736 - DNA, 25 bp, Homo sapien
cctgctgggcctctgttgtctttga

SEQ ID NO: 1584737 - DNA, 25 bp, Homo sapien
cctggaaccccgcattggcttgtgg

SEQ ID NO: 1584738 - DNA, 25 bp, Homo sapien
acaggagacgatggcaatgggcccc

SEQ ID NO: 1584739 - DNA, 25 bp, Homo sapien
tgtatttactacatgcctctgaatg

SEQ ID NO: 1584740 - DNA, 25 bp, Homo sapien
aatgtcaacaggcatctaagcaatg

SEQ ID NO: 1584741 - DNA, 25 bp, Homo sapien
gcaatgatgggccatttgtcctttc

SEQ ID NO: 1584742 - DNA, 25 bp, Homo sapien
tccaggggggccaccacgcacggtg

SEQ ID NO: 1584743 - DNA, 25 bp, Homo sapien
ccaggggggccaccacgcacggtgg

SEQ ID NO: 1584744 - DNA, 25 bp, Homo sapien
caggggggccaccacgcacggtggg

SEQ ID NO: 1584745 - DNA, 25 bp, Homo sapien
tcaccctgctggccgactgcaagga

SEQ ID NO: 1584746 - DNA, 25 bp, Homo sapien
agctgccaccctccaaccggaggac

SEQ ID NO: 1584747 - DNA, 25 bp, Homo sapien
aggacacagcgaggtcaccctgctg

SEQ ID NO: 1584748 - DNA, 25 bp, Homo sapien
cgactgcaaggaagcccctgcgtgg

SEQ ID NO: 1584749 - DNA, 25 bp, Homo sapien
gggtgtaccaggagcaggtgacaca

SEQ ID NO: 1584750 - DNA, 25 bp, Homo sapien
gcaggtgacacagggtggaccagag

SEQ ID NO: 1584751 - DNA, 25 bp, Homo sapien
acagggtggaccagagactcagccc

SEQ ID NO: 1584752 - DNA, 25 bp, Homo sapien
gctggtgtctgtcccgtcacccagg

SEQ ID NO: 1584753 - DNA, 25 bp, Homo sapien
gcggccccaaatacttcgatttcca

SEQ ID NO: 1584754 - DNA, 25 bp, Homo sapien
tcttcgggaggcatgaaaggcagac

SEQ ID NO: 1584755 - DNA, 25 bp, Homo sapien
ggaatcccacctgtatctgaatgca

SEQ ID NO: 1584756 - DNA, 25 bp, Homo sapien
tagactttctttgcagacccgtaag

SEQ ID NO: 1584757 - DNA, 25 bp, Homo sapien
gaaacgcacgtagatgttcctgcat

SEQ ID NO: 1584758 - DNA, 25 bp, Homo sapien
cacgggcctacgaggaactcgaggc

SEQ ID NO: 1584759 - DNA, 25 bp, Homo sapien
ctcttcgtccacagcctgacgccag

SEQ ID NO: 1584760 - DNA, 25 bp, Homo sapien
gggaaggagtgagagcggccggaaa

SEQ ID NO: 1584761 - DNA, 25 bp, Homo sapien
cgagccggaccggtacctggctggg

SEQ ID NO: 1584762 - DNA, 25 bp, Homo sapien
tccaaaaggaaaggagtgcgtagct

SEQ ID NO: 1584763 - DNA, 25 bp, Homo sapien
ccaaaaggaaaggagtgcgtagctc

SEQ ID NO: 1584764 - DNA, 25 bp, Homo sapien
aaaaggaaaggagtgcgtagctctg

SEQ ID NO: 1584765 - DNA, 25 bp, Homo sapien
aaggaaaggagtgcgtagctctgtt

SEQ ID NO: 1584766 - DNA, 25 bp, Homo sapien
gcgagaagtcgatcacctcgtcctc

SEQ ID NO: 1584767 - DNA, 25 bp, Homo sapien
acctcgtcctccgtgccgtggatga

SEQ ID NO: 1584768 - DNA, 25 bp, Homo sapien
agaagtcgatcacctcgtcctccgt

SEQ ID NO: 1584769 - DNA, 25 bp, Homo sapien
tcctccgtgccgtggatgatgagca

SEQ ID NO: 1584770 - DNA, 25 bp, Homo sapien
ctgcgggagggtcgtggagccggtg

SEQ ID NO: 1584771 - DNA, 25 bp, Homo sapien
agggtcgtggagccggtgagacttc

SEQ ID NO: 1584772 - DNA, 25 bp, Homo sapien
gagccggtgagacttcgcgcccggc

SEQ ID NO: 1584773 - DNA, 25 bp, Homo sapien
gtcgtggagccggtgagacttcgcg

SEQ ID NO: 1584774 - DNA, 25 bp, Homo sapien
ggcgacgcgcatgcccgaggtgagc

SEQ ID NO: 1584775 - DNA, 25 bp, Homo sapien
ggaaggcgacgcgcatgcccgaggt

SEQ ID NO: 1584776 - DNA, 25 bp, Homo sapien
aggcgacgcgcatgcccgaggtgag

SEQ ID NO: 1584777 - DNA, 25 bp, Homo sapien
aaggcgacgcgcatgcccgaggtga

SEQ ID NO: 1584778 - DNA, 25 bp, Homo sapien
tggtcacccctaggtgcacactggg

SEQ ID NO: 1584779 - DNA, 25 bp, Homo sapien
tgagatgccagtgcaacccaggtca

SEQ ID NO: 1584780 - DNA, 25 bp, Homo sapien
tgggagtggacaagtcctcggccac

SEQ ID NO: 1584781 - DNA, 25 bp, Homo sapien
tggccatgaggaattcaggcagctg

SEQ ID NO: 1584782 - DNA, 25 bp, Homo sapien
cctggcagccatggtcagtagtgtg

SEQ ID NO: 1584783 - DNA, 25 bp, Homo sapien
ccatggtcagtagtgtgctgagcca

SEQ ID NO: 1584784 - DNA, 25 bp, Homo sapien
atggtcagtagtgtgctgagccagc

SEQ ID NO: 1584785 - DNA, 25 bp, Homo sapien
cagccatggtcagtagtgtgctgag

SEQ ID NO: 1584786 - DNA, 25 bp, Homo sapien
gcagggactgcctgcatatcaccaa

SEQ ID NO: 1584787 - DNA, 25 bp, Homo sapien
tgcagggactgcctgcatatcacca

SEQ ID NO: 1584788 - DNA, 25 bp, Homo sapien
actccctcccgccgggtggcatcca

SEQ ID NO: 1584789 - DNA, 25 bp, Homo sapien
cagggactgcctgcatatcaccaag

SEQ ID NO: 1584790 - DNA, 25 bp, Homo sapien
gtcggcatagaggttcctctcggaa

SEQ ID NO: 1584791 - DNA, 25 bp, Homo sapien
catagaggttcctctcggaaggcct

SEQ ID NO: 1584792 - DNA, 25 bp, Homo sapien
atagaggttcctctcggaaggcctg

SEQ ID NO: 1584793 - DNA, 25 bp, Homo sapien
ggcatagaggttcctctcggaaggc

SEQ ID NO: 1584794 - DNA, 25 bp, Homo sapien
tggcccaggtccacggcattgccgt

SEQ ID NO: 1584795 - DNA, 25 bp, Homo sapien
ggtccacggcattgccgtgcgagaa

SEQ ID NO: 1584796 - DNA, 25 bp, Homo sapien
cggcattgccgtgcgagaagaggac

SEQ ID NO: 1584797 - DNA, 25 bp, Homo sapien
gccgtgcgagaagaggaccgtgtac

SEQ ID NO: 1584798 - DNA, 25 bp, Homo sapien
aggcaaccaccaggcgctgggttgt

SEQ ID NO: 1584799 - DNA, 25 bp, Homo sapien
agcaggcaaccaccaggcgctgggt

SEQ ID NO: 1584800 - DNA, 25 bp, Homo sapien
caggcaaccaccaggcgctgggttg

SEQ ID NO: 1584801 - DNA, 25 bp, Homo sapien
caaccaccaggcgctgggttgttgg

SEQ ID NO: 1584802 - DNA, 25 bp, Homo sapien
tcgcgctggctgtactggaagtcgg

SEQ ID NO: 1584803 - DNA, 25 bp, Homo sapien
gcgagcttggcagcgatgcggccgg

SEQ ID NO: 1584804 - DNA, 25 bp, Homo sapien
atggtgtccagctcgcgctggctgt

SEQ ID NO: 1584805 - DNA, 25 bp, Homo sapien
cacgcagcgaacatacatgcaggag

SEQ ID NO: 1584806 - DNA, 25 bp, Homo sapien
gccccagggagcctcgcaaccacag

SEQ ID NO: 1584807 - DNA, 25 bp, Homo sapien
agggagcctcgcaaccacaggtctc

SEQ ID NO: 1584808 - DNA, 25 bp, Homo sapien
ggggtgctccgagtcgcgggcaggg

SEQ ID NO: 1584809 - DNA, 25 bp, Homo sapien
gcccagccccatcgcggtccaagcc

SEQ ID NO: 1584810 - DNA, 25 bp, Homo sapien
tccacagcgtcgaggttgatgtcag

SEQ ID NO: 1584811 - DNA, 25 bp, Homo sapien
taaggacctgccaacagacagacgt

SEQ ID NO: 1584812 - DNA, 25 bp, Homo sapien
gatgtgagacccacgttcctgtgag

SEQ ID NO: 1584813 - DNA, 25 bp, Homo sapien
tgcaagcacttttcagccgggaggt

SEQ ID NO: 1584814 - DNA, 25 bp, Homo sapien
gccgcagctccccccacggacggaa

SEQ ID NO: 1584815 - DNA, 25 bp, Homo sapien
gcagctccccccacggacggaagtg

SEQ ID NO: 1584816 - DNA, 25 bp, Homo sapien
cagctccccccacggacggaagtga

SEQ ID NO: 1584817 - DNA, 25 bp, Homo sapien
cgcagctccccccacggacggaagt

SEQ ID NO: 1584818 - DNA, 25 bp, Homo sapien
ccatgcctggcaattgttgggtttt

SEQ ID NO: 1584819 - DNA, 25 bp, Homo sapien
catgcctggcaattgttgggtttta

SEQ ID NO: 1584820 - DNA, 25 bp, Homo sapien
atgcctggcaattgttgggttttat

SEQ ID NO: 1584821 - DNA, 25 bp, Homo sapien
ctggcagttgaggccgccctggcct

SEQ ID NO: 1584822 - DNA, 25 bp, Homo sapien
tctggcagttgaggccgccctggcc

SEQ ID NO: 1584823 - DNA, 25 bp, Homo sapien
ctctggcagttgaggccgccctggc

SEQ ID NO: 1584824 - DNA, 25 bp, Homo sapien
accaggcagtgcatgtcgaggagta

SEQ ID NO: 1584825 - DNA, 25 bp, Homo sapien
ttgttgaacgcgtgagcttcgggca

SEQ ID NO: 1584826 - DNA, 25 bp, Homo sapien
tgcgcggctgcgaaatgatccagag

SEQ ID NO: 1584827 - DNA, 25 bp, Homo sapien
acagtggagtgtttgtggcctagca

SEQ ID NO: 1584828 - DNA, 25 bp, Homo sapien
aaccggcagagagccggtttcccag

SEQ ID NO: 1584829 - DNA, 25 bp, Homo sapien
ccaaacccagcaaaccggcagagag

SEQ ID NO: 1584830 - DNA, 25 bp, Homo sapien
tccacgcccctgagttcagagtcgg

SEQ ID NO: 1584831 - DNA, 25 bp, Homo sapien
ctgcctccaaaacagggatccctgg

SEQ ID NO: 1584832 - DNA, 25 bp, Homo sapien
gccaccgcgcccagcctggagtggc

SEQ ID NO: 1584833 - DNA, 25 bp, Homo sapien
agccaccgcgcccagcctggagtgg

SEQ ID NO: 1584834 - DNA, 25 bp, Homo sapien
gggataataggtgtcagccaccgcg

SEQ ID NO: 1584835 - DNA, 25 bp, Homo sapien
gctgggataataggtgtcagccacc

SEQ ID NO: 1584836 - DNA, 25 bp, Homo sapien
gggacccgtcaaatctgtgccttat

SEQ ID NO: 1584837 - DNA, 25 bp, Homo sapien
ccggcagcggccacaattgtcttgt

SEQ ID NO: 1584838 - DNA, 25 bp, Homo sapien
gggtctcacggccatgcttcagggt

SEQ ID NO: 1584839 - DNA, 25 bp, Homo sapien
tgatgcagacaaaatctcacctggc

SEQ ID NO: 1584840 - DNA, 25 bp, Homo sapien
taactagggctgtatcagggtgcat

SEQ ID NO: 1584841 - DNA, 25 bp, Homo sapien
taataatatgtacactaactagggc

SEQ ID NO: 1584842 - DNA, 25 bp, Homo sapien
tacaataggtgttcctggattatct

SEQ ID NO: 1584843 - DNA, 25 bp, Homo sapien
tcttcagaaacctgataataatatg

SEQ ID NO: 1584844 - DNA, 25 bp, Homo sapien
ccaagtacctgagactactggcgcc

SEQ ID NO: 1584845 - DNA, 25 bp, Homo sapien
tggcgcccgccaccatgcctggcta

SEQ ID NO: 1584846 - DNA, 25 bp, Homo sapien
aagtacctgagactactggcgcccg

SEQ ID NO: 1584847 - DNA, 25 bp, Homo sapien
tcccaagtacctgagactactggcg

SEQ ID NO: 1584848 - DNA, 25 bp, Homo sapien
agtgcatttgtctagctgccggccg

SEQ ID NO: 1584849 - DNA, 25 bp, Homo sapien
tctgaaatcattacacagggctctc

SEQ ID NO: 1584850 - DNA, 25 bp, Homo sapien
gactccctaggaaacgatgccaaga

SEQ ID NO: 1584851 - DNA, 25 bp, Homo sapien
aaggagtcggctctacgcgcagagc

SEQ ID NO: 1584852 - DNA, 25 bp, Homo sapien
tgctgaggtgagtacaggcctgact

SEQ ID NO: 1584853 - DNA, 25 bp, Homo sapien
taacgatatatttgacgatgattaa

SEQ ID NO: 1584854 - DNA, 25 bp, Homo sapien
acccgatccttgaaggcccttgata

SEQ ID NO: 1584855 - DNA, 25 bp, Homo sapien
aaggcccttgatagatgctgaggtg

SEQ ID NO: 1584856 - DNA, 25 bp, Homo sapien
ggagctgagtcgtgcgggactggat

SEQ ID NO: 1584857 - DNA, 25 bp, Homo sapien
ggagttaggccgaaccctgctgtgc

SEQ ID NO: 1584858 - DNA, 25 bp, Homo sapien
gagctggcaaccgaggtgactgcct

SEQ ID NO: 1584859 - DNA, 25 bp, Homo sapien
ggaccaagccctctcgcctagggct

SEQ ID NO: 1584860 - DNA, 25 bp, Homo sapien
ggcagccttgcctccgtttgcataa

SEQ ID NO: 1584861 - DNA, 25 bp, Homo sapien
catggcagccttgcctccgtttgca

SEQ ID NO: 1584862 - DNA, 25 bp, Homo sapien
gatgcagatgtgtccactttgcttt

SEQ ID NO: 1584863 - DNA, 25 bp, Homo sapien
ggaaggccgtctttgtgatggattt

SEQ ID NO: 1584864 - DNA, 25 bp, Homo sapien
tttgctgatggcgacctgtgacggc

SEQ ID NO: 1584865 - DNA, 25 bp, Homo sapien
tgacggctcagctgcgttctcagag

SEQ ID NO: 1584866 - DNA, 25 bp, Homo sapien
ttctcgtggtgatgacagtcgccct

SEQ ID NO: 1584867 - DNA, 25 bp, Homo sapien
tggtgtctgcagtgctccgaggacc

SEQ ID NO: 1584868 - DNA, 25 bp, Homo sapien
tcagcctgaggttggtttgtcctgg

SEQ ID NO: 1584869 - DNA, 25 bp, Homo sapien
cctgaggttggtttgtcctggccgc

SEQ ID NO: 1584870 - DNA, 25 bp, Homo sapien
taccggcctaggtcagcctgaggtt

SEQ ID NO: 1584871 - DNA, 25 bp, Homo sapien
attaccggcctaggtcagcctgagg

SEQ ID NO: 1584872 - DNA, 25 bp, Homo sapien
gcagggaaccgagcccacagtggcc

SEQ ID NO: 1584873 - DNA, 25 bp, Homo sapien
tctgcggccgggtccacatgagtct

SEQ ID NO: 1584874 - DNA, 25 bp, Homo sapien
gtccacatgagtctaggtgcctctg

SEQ ID NO: 1584875 - DNA, 25 bp, Homo sapien
gacagagctgcccagaacggtctgc

SEQ ID NO: 1584876 - DNA, 25 bp, Homo sapien
ccccgttagcgtcataaagtccagc

SEQ ID NO: 1584877 - DNA, 25 bp, Homo sapien
gcagccggagacaaaacgccttaaa

SEQ ID NO: 1584878 - DNA, 25 bp, Homo sapien
tgtctccctcgatccaaaggccgtt

SEQ ID NO: 1584879 - DNA, 25 bp, Homo sapien
caggcgggtgcttctcgacgcactt

SEQ ID NO: 1584880 - DNA, 25 bp, Homo sapien
tttaaaaaaatcatctgggggcatg

SEQ ID NO: 1584881 - DNA, 25 bp, Homo sapien
tatttaaaaaaatcatctgggggca

SEQ ID NO: 1584882 - DNA, 25 bp, Homo sapien
atttaaaaaaatcatctgggggcat

SEQ ID NO: 1584883 - DNA, 25 bp, Homo sapien
ttaaaaaaatcatctgggggcatgg

SEQ ID NO: 1584884 - DNA, 25 bp, Homo sapien
catcaggtggatgagaacggacact

SEQ ID NO: 1584885 - DNA, 25 bp, Homo sapien
ctagtcctgagggattgtctccaca

SEQ ID NO: 1584886 - DNA, 25 bp, Homo sapien
tatgtacaggcgagcagtgctcctg

SEQ ID NO: 1584887 - DNA, 25 bp, Homo sapien
tgcaatgtgcagtgaagagacgcga

SEQ ID NO: 1584888 - DNA, 25 bp, Homo sapien
cacggatgtgccattgttgttcccg

SEQ ID NO: 1584889 - DNA, 25 bp, Homo sapien
tgggcgactcgtgtgtcaccttgcg

SEQ ID NO: 1584890 - DNA, 25 bp, Homo sapien
gatctggccgtcctccacggatgtg

SEQ ID NO: 1584891 - DNA, 25 bp, Homo sapien
ccggccgcgtagcaaaaggtgaagc

SEQ ID NO: 1584892 - DNA, 25 bp, Homo sapien
tgtagttgacgttgggcagcacctc

SEQ ID NO: 1584893 - DNA, 25 bp, Homo sapien
gacggtgttgctatcggtgtgaata

SEQ ID NO: 1584894 - DNA, 25 bp, Homo sapien
tgaagcccgtgtcgttctggcccaa

SEQ ID NO: 1584895 - DNA, 25 bp, Homo sapien
tccttgaacatgacgcggaaggtgc

SEQ ID NO: 1584896 - DNA, 25 bp, Homo sapien
ctcaggcctggggagggccaacggg

SEQ ID NO: 1584897 - DNA, 25 bp, Homo sapien
gaggtgggaagtgggaggctcaggc

SEQ ID NO: 1584898 - DNA, 25 bp, Homo sapien
ctgcggggaggtgggaagtgggagg

SEQ ID NO: 1584899 - DNA, 25 bp, Homo sapien
aggctcaggcctggggagggccaac

SEQ ID NO: 1584900 - DNA, 25 bp, Homo sapien
cgtggatggatccatacagcccaaa

SEQ ID NO: 1584901 - DNA, 25 bp, Homo sapien
gaagatgcgcttgttgactgagaac

SEQ ID NO: 1584902 - DNA, 25 bp, Homo sapien
tgttcacttggtagtcggtgggccc

SEQ ID NO: 1584903 - DNA, 25 bp, Homo sapien
caaatcccaccacgaagatgcgctt

SEQ ID NO: 1584904 - DNA, 25 bp, Homo sapien
acaggcagcagcgtggatacccagg

SEQ ID NO: 1584905 - DNA, 25 bp, Homo sapien
ggcagcagcgtggatacccagggat

SEQ ID NO: 1584906 - DNA, 25 bp, Homo sapien
agcagcgtggatacccagggatagc

SEQ ID NO: 1584907 - DNA, 25 bp, Homo sapien
ctgccgtggcagatgacaggcagca

SEQ ID NO: 1584908 - DNA, 25 bp, Homo sapien
ccccgccgtcttcatcatccctgag

SEQ ID NO: 1584909 - DNA, 25 bp, Homo sapien
cccatctccgtcatccccgagtcct

SEQ ID NO: 1584910 - DNA, 25 bp, Homo sapien
tcatcatccctgagttctccacccc

SEQ ID NO: 1584911 - DNA, 25 bp, Homo sapien
cttcatcatccctgagttctccacc

SEQ ID NO: 1584912 - DNA, 25 bp, Homo sapien
tggtcccgctgtagccccagcgact

SEQ ID NO: 1584913 - DNA, 25 bp, Homo sapien
cccgctgtagccccagcgactctcc

SEQ ID NO: 1584914 - DNA, 25 bp, Homo sapien
gtcccgctgtagccccagcgactct

SEQ ID NO: 1584915 - DNA, 25 bp, Homo sapien
ggtcccgctgtagccccagcgactc

SEQ ID NO: 1584916 - DNA, 25 bp, Homo sapien
tggaagcggttgatgctgcactcct

SEQ ID NO: 1584917 - DNA, 25 bp, Homo sapien
ggggccggtcaatgaactccactcg

SEQ ID NO: 1584918 - DNA, 25 bp, Homo sapien
ggttgacggtgaagtgcaggaagag

SEQ ID NO: 1584919 - DNA, 25 bp, Homo sapien
gcagcggggccggtcaatgaactcc

SEQ ID NO: 1584920 - DNA, 25 bp, Homo sapien
agaccagaggccgacagatacgctc

SEQ ID NO: 1584921 - DNA, 25 bp, Homo sapien
taatcccggtgcagagatgtcacag

SEQ ID NO: 1584922 - DNA, 25 bp, Homo sapien
taatcactcatcaaccaaggtgggc

SEQ ID NO: 1584923 - DNA, 25 bp, Homo sapien
gtctgcgtcggactttcaaggtgca

SEQ ID NO: 1584924 - DNA, 25 bp, Homo sapien
acagagaccctcttgctaaatctgg

SEQ ID NO: 1584925 - DNA, 25 bp, Homo sapien
taaatctggcgaccttcagctaagc

SEQ ID NO: 1584926 - DNA, 25 bp, Homo sapien
tgagctcgtcacagacactggtacc

SEQ ID NO: 1584927 - DNA, 25 bp, Homo sapien
gccagacggcgagtgtgcaccagcc

SEQ ID NO: 1584928 - DNA, 25 bp, Homo sapien
ctgcagcgaactcctcgatggtcat

SEQ ID NO: 1584929 - DNA, 25 bp, Homo sapien
cttgcccagaaccttccgcctgttc

SEQ ID NO: 1584930 - DNA, 25 bp, Homo sapien
gaaccttccgcctgttctctggcgt

SEQ ID NO: 1584931 - DNA, 25 bp, Homo sapien
agaaccttccgcctgttctctggcg

SEQ ID NO: 1584932 - DNA, 25 bp, Homo sapien
gcccagaaccttccgcctgttctct

SEQ ID NO: 1584933 - DNA, 25 bp, Homo sapien
ggatgcccagtgtgtcgcgctccag

SEQ ID NO: 1584934 - DNA, 25 bp, Homo sapien
attgaacagccgcacctcacggatg

SEQ ID NO: 1584935 - DNA, 25 bp, Homo sapien
gaccagcggacaacggcattgaaca

SEQ ID NO: 1584936 - DNA, 25 bp, Homo sapien
tgacactcggcctcggaccagcgga

SEQ ID NO: 1584937 - DNA, 25 bp, Homo sapien
tgcagtgtttttgtcgatgttctcc

SEQ ID NO: 1584938 - DNA, 25 bp, Homo sapien
cggtgatggcgtctgcagtgttttt

SEQ ID NO: 1584939 - DNA, 25 bp, Homo sapien
aggtcaatgtcggtgaagccctccg

SEQ ID NO: 1584940 - DNA, 25 bp, Homo sapien
ggccagctgcggttcatcgaagagt

SEQ ID NO: 1584941 - DNA, 25 bp, Homo sapien
gggccggttcaaatgcagccctgac

SEQ ID NO: 1584942 - DNA, 25 bp, Homo sapien
gaccggtgaagcttcccgaccacaa

SEQ ID NO: 1584943 - DNA, 25 bp, Homo sapien
gactcccctgtgaccgctgactggg

SEQ ID NO: 1584944 - DNA, 25 bp, Homo sapien
atgcccttggccacttgtggtggga

SEQ ID NO: 1584945 - DNA, 25 bp, Homo sapien
gacatttccttagagagagagagaa

SEQ ID NO: 1584946 - DNA, 25 bp, Homo sapien
ctgacatttccttagagagagagag

SEQ ID NO: 1584947 - DNA, 25 bp, Homo sapien
tgacatttccttagagagagagaga

SEQ ID NO: 1584948 - DNA, 25 bp, Homo sapien
agcatgaaggcgttgtcggctcgca

SEQ ID NO: 1584949 - DNA, 25 bp, Homo sapien
gccaatctgcacctcgtccgagtag

SEQ ID NO: 1584950 - DNA, 25 bp, Homo sapien
atagcgtggtcatcaccgtctccgg

SEQ ID NO: 1584951 - DNA, 25 bp, Homo sapien
tcttcaggaactccacgcaatgggc

SEQ ID NO: 1584952 - DNA, 25 bp, Homo sapien
ggcagctcaatctccgtggatgttg

SEQ ID NO: 1584953 - DNA, 25 bp, Homo sapien
ttgagcagtgcgaggaaggcagcgg

SEQ ID NO: 1584954 - DNA, 25 bp, Homo sapien
tcccccgttgaacatggcatcaaag

SEQ ID NO: 1584955 - DNA, 25 bp, Homo sapien
gttgtggccattcccccgttgaaca

SEQ ID NO: 1584956 - DNA, 25 bp, Homo sapien
ccacacatgcattcattgatccact

SEQ ID NO: 1584957 - DNA, 25 bp, Homo sapien
cattcactcaactcatacacatgca

SEQ ID NO: 1584958 - DNA, 25 bp, Homo sapien
cacttgctcatttatgacacatgca

SEQ ID NO: 1584959 - DNA, 25 bp, Homo sapien
cactgattcattcccgtgggcatgc

SEQ ID NO: 1584960 - DNA, 25 bp, Homo sapien
cggggatgcgctgcgagctgagccc

SEQ ID NO: 1584961 - DNA, 25 bp, Homo sapien
agccccttgcccaccaggaagtgca

SEQ ID NO: 1584962 - DNA, 25 bp, Homo sapien
gccccttgcccaccaggaagtgcac

SEQ ID NO: 1584963 - DNA, 25 bp, Homo sapien
tgagccccttgcccaccaggaagtg

SEQ ID NO: 1584964 - DNA, 25 bp, Homo sapien
ttgctggcctgccagttgtacgcgg

SEQ ID NO: 1584965 - DNA, 25 bp, Homo sapien
ggcttgctggcctgccagttgtacg

SEQ ID NO: 1584966 - DNA, 25 bp, Homo sapien
gctggcctgccagttgtacgcggcc

SEQ ID NO: 1584967 - DNA, 25 bp, Homo sapien
ggcctgccagttgtacgcggcctcg

SEQ ID NO: 1584968 - DNA, 25 bp, Homo sapien
gcgggcacgacgcacgcccgccgct

SEQ ID NO: 1584969 - DNA, 25 bp, Homo sapien
ctgcgcgtctgtcccggggcccggc

SEQ ID NO: 1584970 - DNA, 25 bp, Homo sapien
ccccggcgggcacgacgcacgcccg

SEQ ID NO: 1584971 - DNA, 25 bp, Homo sapien
cgcgcccgcggcctgcgcgtctgtc

SEQ ID NO: 1584972 - DNA, 25 bp, Homo sapien
agcttttgatgagctatgactccac

SEQ ID NO: 1584973 - DNA, 25 bp, Homo sapien
tgagcttttgatgagctatgactcc

SEQ ID NO: 1584974 - DNA, 25 bp, Homo sapien
cctggaaggttgagcttttgatgag

SEQ ID NO: 1584975 - DNA, 25 bp, Homo sapien
aggttgagcttttgatgagctatga

SEQ ID NO: 1584976 - DNA, 25 bp, Homo sapien
acattaacacatggccgttcaccgt

SEQ ID NO: 1584977 - DNA, 25 bp, Homo sapien
gaatacaaaattccggcattgacag

SEQ ID NO: 1584978 - DNA, 25 bp, Homo sapien
gagctccgtcagttcacctggtaca

SEQ ID NO: 1584979 - DNA, 25 bp, Homo sapien
taaaaacatcgtaacattaacacat

SEQ ID NO: 1584980 - DNA, 25 bp, Homo sapien
tcacagtaacggttctgaccagtcc

SEQ ID NO: 1584981 - DNA, 25 bp, Homo sapien
tcactcattcacagtaacggttctg

SEQ ID NO: 1584982 - DNA, 25 bp, Homo sapien
tgaccagtcctccaggtcgcacgtg

SEQ ID NO: 1584983 - DNA, 25 bp, Homo sapien
tccaggtcgcacgtggatgcgacag

SEQ ID NO: 1584984 - DNA, 25 bp, Homo sapien
gcaagatggcaaacgctgtgggcct

SEQ ID NO: 1584985 - DNA, 25 bp, Homo sapien
agagcctgtccctgaaatactgcgg

SEQ ID NO: 1584986 - DNA, 25 bp, Homo sapien
tcccgaccgcggatttagaagccag

SEQ ID NO: 1584987 - DNA, 25 bp, Homo sapien
ctttagagacccgatggctatgggc

SEQ ID NO: 1584988 - DNA, 25 bp, Homo sapien
tcagccgcgaaggacgtgaggtctt

SEQ ID NO: 1584989 - DNA, 25 bp, Homo sapien
tgcaggcagcgtgaggtagctcgga

SEQ ID NO: 1584990 - DNA, 25 bp, Homo sapien
gtagctcggaccaggacgggctggc

SEQ ID NO: 1584991 - DNA, 25 bp, Homo sapien
tttgccgccgctgcgccagcttgga

SEQ ID NO: 1584992 - DNA, 25 bp, Homo sapien
agtgggcaaggtgttctccggggcg

SEQ ID NO: 1584993 - DNA, 25 bp, Homo sapien
gagtgggcaaggtgttctccggggc

SEQ ID NO: 1584994 - DNA, 25 bp, Homo sapien
gtgggcaaggtgttctccggggcgc

SEQ ID NO: 1584995 - DNA, 25 bp, Homo sapien
tgggcaaggtgttctccggggcgca

SEQ ID NO: 1584996 - DNA, 25 bp, Homo sapien
tcctgccgcccgtgcggctggtact

SEQ ID NO: 1584997 - DNA, 25 bp, Homo sapien
ctgccgcccgtgcggctggtactca

SEQ ID NO: 1584998 - DNA, 25 bp, Homo sapien
cctgccgcccgtgcggctggtactc

SEQ ID NO: 1584999 - DNA, 25 bp, Homo sapien
tgccgcccgtgcggctggtactcac

SEQ ID NO: 1585000 - DNA, 25 bp, Homo sapien
tgctgcaggacttgggcggcactca

SEQ ID NO: 1585001 - DNA, 25 bp, Homo sapien
gatgaggtctttggcagcgcaggag

SEQ ID NO: 1585002 - DNA, 25 bp, Homo sapien
cttggcgtcacggaccagcagcttg

SEQ ID NO: 1585003 - DNA, 25 bp, Homo sapien
tctgcttggcgtcacggaccagcag

SEQ ID NO: 1585004 - DNA, 25 bp, Homo sapien
cttagacctgcccaagggcctggat

SEQ ID NO: 1585005 - DNA, 25 bp, Homo sapien
ggggagcttagacctgcccaagggc

SEQ ID NO: 1585006 - DNA, 25 bp, Homo sapien
agcttagacctgcccaagggcctgg

SEQ ID NO: 1585007 - DNA, 25 bp, Homo sapien
ggagcttagacctgcccaagggcct

SEQ ID NO: 1585008 - DNA, 25 bp, Homo sapien
tcccctggacttagagggtgcgcag

SEQ ID NO: 1585009 - DNA, 25 bp, Homo sapien
gatggcatcagggagtagggcacac

SEQ ID NO: 1585010 - DNA, 25 bp, Homo sapien
ctgaaaagccttcgggaaactggca

SEQ ID NO: 1585011 - DNA, 25 bp, Homo sapien
gtttcccttgggcaggcaaacctga

SEQ ID NO: 1585012 - DNA, 25 bp, Homo sapien
gatatacaagatgacgcccaggctc

SEQ ID NO: 1585013 - DNA, 25 bp, Homo sapien
cacgaagggcgggtagccgctgagt

SEQ ID NO: 1585014 - DNA, 25 bp, Homo sapien
tagatgctagcctcctcgctgaagg

SEQ ID NO: 1585015 - DNA, 25 bp, Homo sapien
gcgcttgtcgtagatgctagcctcc

SEQ ID NO: 1585016 - DNA, 25 bp, Homo sapien
gcgggcgggggaggggcgcgtcagc

SEQ ID NO: 1585017 - DNA, 25 bp, Homo sapien
tgcgggcgggggaggggcgcgtcag

SEQ ID NO: 1585018 - DNA, 25 bp, Homo sapien
ctgcgggcgggggaggggcgcgtca

SEQ ID NO: 1585019 - DNA, 25 bp, Homo sapien
agtccccgttgagtttgatgccgct

SEQ ID NO: 1585020 - DNA, 25 bp, Homo sapien
cagtccccgttgagtttgatgccgc

SEQ ID NO: 1585021 - DNA, 25 bp, Homo sapien
gctgcccaggtcgaagtcacagatc

SEQ ID NO: 1585022 - DNA, 25 bp, Homo sapien
atgccgctgcccaggtcgaagtcac

SEQ ID NO: 1585023 - DNA, 25 bp, Homo sapien
ggccaccctgccggaactggcctac

SEQ ID NO: 1585024 - DNA, 25 bp, Homo sapien
gcggggccaccctgccggaactggc

SEQ ID NO: 1585025 - DNA, 25 bp, Homo sapien
gggccaccctgccggaactggccta

SEQ ID NO: 1585026 - DNA, 25 bp, Homo sapien
ccgcggggccaccctgccggaactg

SEQ ID NO: 1585027 - DNA, 25 bp, Homo sapien
acagaggatgttttccggctttagg

SEQ ID NO: 1585028 - DNA, 25 bp, Homo sapien
cacagaggatgttttccggctttag

SEQ ID NO: 1585029 - DNA, 25 bp, Homo sapien
cagaggatgttttccggctttaggt

SEQ ID NO: 1585030 - DNA, 25 bp, Homo sapien
tcacagaggatgttttccggcttta

SEQ ID NO: 1585031 - DNA, 25 bp, Homo sapien
aggcggccctaggagactccgggcg

SEQ ID NO: 1585032 - DNA, 25 bp, Homo sapien
aagccacagaaccacgacggggtga

SEQ ID NO: 1585033 - DNA, 25 bp, Homo sapien
tccttggcaggcggccctaggagac

SEQ ID NO: 1585034 - DNA, 25 bp, Homo sapien
caggagtccttggcaggcggcccta

SEQ ID NO: 1585035 - DNA, 25 bp, Homo sapien
gttatgcagaaagtccaaggcgctg

SEQ ID NO: 1585036 - DNA, 25 bp, Homo sapien
aacaccaggtagaagcggtcctcct

SEQ ID NO: 1585037 - DNA, 25 bp, Homo sapien
tccccgcatcttctcaaacaccagg

SEQ ID NO: 1585038 - DNA, 25 bp, Homo sapien
gcatcttctcaaacaccaggtagaa

SEQ ID NO: 1585039 - DNA, 25 bp, Homo sapien
cccgcatcttctcaaacaccaggta

SEQ ID NO: 1585040 - DNA, 25 bp, Homo sapien
gtgtccctggcactggtacagcatc

SEQ ID NO: 1585041 - DNA, 25 bp, Homo sapien
gaaaaccctgctccgaatgtggcct

SEQ ID NO: 1585042 - DNA, 25 bp, Homo sapien
cctgctccgaatgtggcctggctgc

SEQ ID NO: 1585043 - DNA, 25 bp, Homo sapien
tgtccctggcactggtacagcatct

SEQ ID NO: 1585044 - DNA, 25 bp, Homo sapien
tgcactcgggcatgagcgccctccc

SEQ ID NO: 1585045 - DNA, 25 bp, Homo sapien
tgatgcaggtctgcactcgggcatg

SEQ ID NO: 1585046 - DNA, 25 bp, Homo sapien
ggcatgagcgccctcccccagcaca

SEQ ID NO: 1585047 - DNA, 25 bp, Homo sapien
tggtgatcaggttgatgcaggtctg

SEQ ID NO: 1585048 - DNA, 25 bp, Homo sapien
ctgcccgagaagctgtcggtggccc

SEQ ID NO: 1585049 - DNA, 25 bp, Homo sapien
cttcttggcgtccgggatgtcaatg

SEQ ID NO: 1585050 - DNA, 25 bp, Homo sapien
tcaaacctgcccgagaagctgtcgg

SEQ ID NO: 1585051 - DNA, 25 bp, Homo sapien
cgtccgggatgtcaatgggctggct

SEQ ID NO: 1585052 - DNA, 25 bp, Homo sapien
ggggctcaggacatggccctggccg

SEQ ID NO: 1585053 - DNA, 25 bp, Homo sapien
aggaggcacgcccagggggctcagg

SEQ ID NO: 1585054 - DNA, 25 bp, Homo sapien
tcaggacatggccctggccggccgg

SEQ ID NO: 1585055 - DNA, 25 bp, Homo sapien
ggctcaggacatggccctggccggc

SEQ ID NO: 1585056 - DNA, 25 bp, Homo sapien
gccaaagtcagagtctccgtggtcg

SEQ ID NO: 1585057 - DNA, 25 bp, Homo sapien
gcaggccaaagtcagagtctccgtg

SEQ ID NO: 1585058 - DNA, 25 bp, Homo sapien
aaggccagctcgaaggggttctgcc

SEQ ID NO: 1585059 - DNA, 25 bp, Homo sapien
aagtcagagtctccgtggtcgggct

SEQ ID NO: 1585060 - DNA, 25 bp, Homo sapien
tgaagttcggctggtttcttctgca

SEQ ID NO: 1585061 - DNA, 25 bp, Homo sapien
gaagttcggctggtttcttctgcac

SEQ ID NO: 1585062 - DNA, 25 bp, Homo sapien
cttctgtccgggccccgccagcggg

SEQ ID NO: 1585063 - DNA, 25 bp, Homo sapien
ctccgcggaccgcgcggggaacagc

SEQ ID NO: 1585064 - DNA, 25 bp, Homo sapien
cggaccccgctccgcggaccgcgcg

SEQ ID NO: 1585065 - DNA, 25 bp, Homo sapien
gcggaccgcgcggggaacagcgccg

SEQ ID NO: 1585066 - DNA, 25 bp, Homo sapien
ggaccgcgcggggaacagcgccgcc

SEQ ID NO: 1585067 - DNA, 25 bp, Homo sapien
ggctgcacacattgaagtccacacc

SEQ ID NO: 1585068 - DNA, 25 bp, Homo sapien
ctgggaggctgcacacattgaagtc

SEQ ID NO: 1585069 - DNA, 25 bp, Homo sapien
tcctgggaggctgcacacattgaag

SEQ ID NO: 1585070 - DNA, 25 bp, Homo sapien
gaggctgcacacattgaagtccaca

SEQ ID NO: 1585071 - DNA, 25 bp, Homo sapien
ggtgtccgtattatatcagacaacc

SEQ ID NO: 1585072 - DNA, 25 bp, Homo sapien
ttagcttggtgtccgtattatatca

SEQ ID NO: 1585073 - DNA, 25 bp, Homo sapien
caaagttagcttggtgtccgtatta

SEQ ID NO: 1585074 - DNA, 25 bp, Homo sapien
gccattcaaagttagcttggtgtcc

SEQ ID NO: 1585075 - DNA, 25 bp, Homo sapien
cttggtgtgggtacgagtgtgagca

SEQ ID NO: 1585076 - DNA, 25 bp, Homo sapien
aggccccaagcctaggtccttgcag

SEQ ID NO: 1585077 - DNA, 25 bp, Homo sapien
tgtgtgcccgcggaggcaggcgtcc

SEQ ID NO: 1585078 - DNA, 25 bp, Homo sapien
cacgcctgtacacacttgcaagtgt

SEQ ID NO: 1585079 - DNA, 25 bp, Homo sapien
ccatggggccacgaggcaggaatat

SEQ ID NO: 1585080 - DNA, 25 bp, Homo sapien
tctgatgtaagtggccgcaagcgtc

SEQ ID NO: 1585081 - DNA, 25 bp, Homo sapien
cccttgctatgaagggccgtgggca

SEQ ID NO: 1585082 - DNA, 25 bp, Homo sapien
gcaagcgtcccttcttgccggctga

SEQ ID NO: 1585083 - DNA, 25 bp, Homo sapien
tggagcccagaagacacccagatga

SEQ ID NO: 1585084 - DNA, 25 bp, Homo sapien
gccccagtgaccgtgaacaaagcac

SEQ ID NO: 1585085 - DNA, 25 bp, Homo sapien
aaagcactccgctgatctcctggcg

SEQ ID NO: 1585086 - DNA, 25 bp, Homo sapien
tccacgctgctctgacggagtggca

SEQ ID NO: 1585087 - DNA, 25 bp, Homo sapien
acaggagggtcggagagcacggact

SEQ ID NO: 1585088 - DNA, 25 bp, Homo sapien
ggtgacaggagggtcggagagcacg

SEQ ID NO: 1585089 - DNA, 25 bp, Homo sapien
tgacaggagggtcggagagcacgga

SEQ ID NO: 1585090 - DNA, 25 bp, Homo sapien
gagggtcggagagcacggactcggg

SEQ ID NO: 1585091 - DNA, 25 bp, Homo sapien
cctgttttgcccgtttgtgtgactc

SEQ ID NO: 1585092 - DNA, 25 bp, Homo sapien
tgtgactctgggtccggtctcggtc

SEQ ID NO: 1585093 - DNA, 25 bp, Homo sapien
ttaaagggaccgtgcgcattactcc

SEQ ID NO: 1585094 - DNA, 25 bp, Homo sapien
aacgcgtttgcgtcagcgaacctgg

SEQ ID NO: 1585095 - DNA, 25 bp, Homo sapien
aaagaaacagatgacattggctggg

SEQ ID NO: 1585096 - DNA, 25 bp, Homo sapien
cacgtgtgtaaatgttcaagaccca

SEQ ID NO: 1585097 - DNA, 25 bp, Homo sapien
tcacctggatgttgaccaacacgtg

SEQ ID NO: 1585098 - DNA, 25 bp, Homo sapien
tgtgttccgtcttttctcacctgga

SEQ ID NO: 1585099 - DNA, 25 bp, Homo sapien
tgcccgaaaaggcaggtccatcctc

SEQ ID NO: 1585100 - DNA, 25 bp, Homo sapien
ggatcccatccagtgatgcgtaggc

SEQ ID NO: 1585101 - DNA, 25 bp, Homo sapien
ctgctttccaggccagacagacgga

SEQ ID NO: 1585102 - DNA, 25 bp, Homo sapien
acggagccgttctcctgccggcctt

SEQ ID NO: 1585103 - DNA, 25 bp, Homo sapien
ctgtaaggggcagactgtcaatatt

SEQ ID NO: 1585104 - DNA, 25 bp, Homo sapien
gcttggtcaccaaacttttactgta

SEQ ID NO: 1585105 - DNA, 25 bp, Homo sapien
taaggggcagactgtcaatattttt

SEQ ID NO: 1585106 - DNA, 25 bp, Homo sapien
aacttttactgtaaggggcagactg

SEQ ID NO: 1585107 - DNA, 25 bp, Homo sapien
gggagggtggtctccgaggtggatg

SEQ ID NO: 1585108 - DNA, 25 bp, Homo sapien
agggtggtctccgaggtggatggag

SEQ ID NO: 1585109 - DNA, 25 bp, Homo sapien
ggtggtctccgaggtggatggagtg

SEQ ID NO: 1585110 - DNA, 25 bp, Homo sapien
gtggtctccgaggtggatggagtga

SEQ ID NO: 1585111 - DNA, 25 bp, Homo sapien
ctgggaagctgcgtggccgggctgc

SEQ ID NO: 1585112 - DNA, 25 bp, Homo sapien
gggaagctgcgtggccgggctgctg

SEQ ID NO: 1585113 - DNA, 25 bp, Homo sapien
cgggctgctggagacatcccgagcc

SEQ ID NO: 1585114 - DNA, 25 bp, Homo sapien
tggccgggctgctggagacatcccg

SEQ ID NO: 1585115 - DNA, 25 bp, Homo sapien
tcataagcaaagtggacatcgttcc

SEQ ID NO: 1585116 - DNA, 25 bp, Homo sapien
gacagcgtgcttctcttcggtgacc

SEQ ID NO: 1585117 - DNA, 25 bp, Homo sapien
tgaaaggccactgacaattctggtg

SEQ ID NO: 1585118 - DNA, 25 bp, Homo sapien
acatcgttccgaagaggcagagagc

SEQ ID NO: 1585119 - DNA, 25 bp, Homo sapien
tggcacatccgggcggtcatttctt

SEQ ID NO: 1585120 - DNA, 25 bp, Homo sapien
agtggcacatccgggcggtcatttc

SEQ ID NO: 1585121 - DNA, 25 bp, Homo sapien
ggcacatccgggcggtcatttcttt

SEQ ID NO: 1585122 - DNA, 25 bp, Homo sapien
tcagtggcacatccgggcggtcatt

SEQ ID NO: 1585123 - DNA, 25 bp, Homo sapien
tgtcgccggcatttgttccgtggga

SEQ ID NO: 1585124 - DNA, 25 bp, Homo sapien
catttgttccgtgggagaacgcagg

SEQ ID NO: 1585125 - DNA, 25 bp, Homo sapien
gagaacgcaggatccctcccagcta

SEQ ID NO: 1585126 - DNA, 25 bp, Homo sapien
agctacctcaccacttgtcccatca

SEQ ID NO: 1585127 - DNA, 25 bp, Homo sapien
cgccctcagccccaagcccgcgcac

SEQ ID NO: 1585128 - DNA, 25 bp, Homo sapien
cgtaaccgcacgccctcagccccaa

SEQ ID NO: 1585129 - DNA, 25 bp, Homo sapien
taaccgcacgccctcagccccaagc

SEQ ID NO: 1585130 - DNA, 25 bp, Homo sapien
cacgccctcagccccaagcccgcgc

SEQ ID NO: 1585131 - DNA, 25 bp, Homo sapien
gatgtagacgtgcacgaacacgcgg

SEQ ID NO: 1585132 - DNA, 25 bp, Homo sapien
tccttgacgaaatagtagaagtgct

SEQ ID NO: 1585133 - DNA, 25 bp, Homo sapien
tccttggtgtcgatgaggccgaact

SEQ ID NO: 1585134 - DNA, 25 bp, Homo sapien
catctgcgcgatgcggtcaaagtgg

SEQ ID NO: 1585135 - DNA, 25 bp, Homo sapien
ggtgtccctgagagccatgcagtgc

SEQ ID NO: 1585136 - DNA, 25 bp, Homo sapien
acagaaattgctggcagatcgggcg

SEQ ID NO: 1585137 - DNA, 25 bp, Homo sapien
tacgctgtactctggagggacgtgc

SEQ ID NO: 1585138 - DNA, 25 bp, Homo sapien
tgtccagaaccctttgctcctggat

SEQ ID NO: 1585139 - DNA, 25 bp, Homo sapien
gggtgatgatcctggtgggcccagg

SEQ ID NO: 1585140 - DNA, 25 bp, Homo sapien
tgtctcctctgcgaaggactccagg

SEQ ID NO: 1585141 - DNA, 25 bp, Homo sapien
ccgccaacggggtgatgatcctggt

SEQ ID NO: 1585142 - DNA, 25 bp, Homo sapien
ggactccaggcctgatgctgatcct

SEQ ID NO: 1585143 - DNA, 25 bp, Homo sapien
aaggctctgtatccccgagcccctg

SEQ ID NO: 1585144 - DNA, 25 bp, Homo sapien
ttctggaaggctctgtatccccgag

SEQ ID NO: 1585145 - DNA, 25 bp, Homo sapien
tggaaggctctgtatccccgagccc

SEQ ID NO: 1585146 - DNA, 25 bp, Homo sapien
ttttctggaaggctctgtatccccg

SEQ ID NO: 1585147 - DNA, 25 bp, Homo sapien
ccgtcgctgatggtgccgtagatga

SEQ ID NO: 1585148 - DNA, 25 bp, Homo sapien
tcgatccagtccatcagcaggtcca

SEQ ID NO: 1585149 - DNA, 25 bp, Homo sapien
tgggcttccggaacttatgctcatc

SEQ ID NO: 1585150 - DNA, 25 bp, Homo sapien
tcttgtgcagctcgaagcgctgggt

SEQ ID NO: 1585151 - DNA, 25 bp, Homo sapien
gggtgctgaccaacccgagaggcca

SEQ ID NO: 1585152 - DNA, 25 bp, Homo sapien
gctgaccaacccgagaggccacgaa

SEQ ID NO: 1585153 - DNA, 25 bp, Homo sapien
ggtgctgaccaacccgagaggccac

SEQ ID NO: 1585154 - DNA, 25 bp, Homo sapien
gaccaacccgagaggccacgaaaca

SEQ ID NO: 1585155 - DNA, 25 bp, Homo sapien
tgaaatacacaggggaatcatgacc

SEQ ID NO: 1585156 - DNA, 25 bp, Homo sapien
atacacaggggaatcatgacctgct

SEQ ID NO: 1585157 - DNA, 25 bp, Homo sapien
aaatacacaggggaatcatgacctg

SEQ ID NO: 1585158 - DNA, 25 bp, Homo sapien
ctgaaatacacaggggaatcatgac

SEQ ID NO: 1585159 - DNA, 25 bp, Homo sapien
tgcaggccccactttaccaaagagg

SEQ ID NO: 1585160 - DNA, 25 bp, Homo sapien
cgtttccgcttcacatctgggccga

SEQ ID NO: 1585161 - DNA, 25 bp, Homo sapien
tccacgctgggaatcaatcacctca

SEQ ID NO: 1585162 - DNA, 25 bp, Homo sapien
tccgcctggcactgagcgagatgct

SEQ ID NO: 1585163 - DNA, 25 bp, Homo sapien
cttctcggattcctccaggaacagt

SEQ ID NO: 1585164 - DNA, 25 bp, Homo sapien
tcttctcggattcctccaggaacag

SEQ ID NO: 1585165 - DNA, 25 bp, Homo sapien
cttcccacggacgagacacaagtga

SEQ ID NO: 1585166 - DNA, 25 bp, Homo sapien
cccacggacgagacacaagtgaccc

SEQ ID NO: 1585167 - DNA, 25 bp, Homo sapien
tgagcttctggagtcaagcgatctt

SEQ ID NO: 1585168 - DNA, 25 bp, Homo sapien
gatcacccaggcgtgcatcctgtca

SEQ ID NO: 1585169 - DNA, 25 bp, Homo sapien
tccctgatcacccaggcgtgcatcc

SEQ ID NO: 1585170 - DNA, 25 bp, Homo sapien
agcttctggagtcaagcgatcttcc

SEQ ID NO: 1585171 - DNA, 25 bp, Homo sapien
gctcaaacgtgtatctggccatccg

SEQ ID NO: 1585172 - DNA, 25 bp, Homo sapien
cgtgctgcacgtccagaagctgagg

SEQ ID NO: 1585173 - DNA, 25 bp, Homo sapien
cattcctgctaagtgatggtggacc

SEQ ID NO: 1585174 - DNA, 25 bp, Homo sapien
ggaggacctgctctcgtgaaactca

SEQ ID NO: 1585175 - DNA, 25 bp, Homo sapien
catattgggagtttattctggtgtc

SEQ ID NO: 1585176 - DNA, 25 bp, Homo sapien
ccttctctgggtgagtttgtcctgg

SEQ ID NO: 1585177 - DNA, 25 bp, Homo sapien
tgagcagggagcagacttgattttt

SEQ ID NO: 1585178 - DNA, 25 bp, Homo sapien
ttcccaaataactaatgcagtcccc

SEQ ID NO: 1585179 - DNA, 25 bp, Homo sapien
tctcatttgcctcgtggcccagagg

SEQ ID NO: 1585180 - DNA, 25 bp, Homo sapien
cgggctgagtcagggatagaccacc

SEQ ID NO: 1585181 - DNA, 25 bp, Homo sapien
tgaacacggtgaagattctgcccct

SEQ ID NO: 1585182 - DNA, 25 bp, Homo sapien
aattgtctgtgcttggagtggctca

SEQ ID NO: 1585183 - DNA, 25 bp, Homo sapien
gctggagtgcagtgatgtgatctcg

SEQ ID NO: 1585184 - DNA, 25 bp, Homo sapien
tttcccccgctctggttgcccaggc

SEQ ID NO: 1585185 - DNA, 25 bp, Homo sapien
caacctctgcctcctgggttcaagt

SEQ ID NO: 1585186 - DNA, 25 bp, Homo sapien
aggtgcgcgccacctcgtccggcta

SEQ ID NO: 1585187 - DNA, 25 bp, Homo sapien
gtacccaactggccgcctcggccgc

SEQ ID NO: 1585188 - DNA, 25 bp, Homo sapien
agtcctgcagcgctgcatgacccag

SEQ ID NO: 1585189 - DNA, 25 bp, Homo sapien
gctcttccgcggttctcaattctgg

SEQ ID NO: 1585190 - DNA, 25 bp, Homo sapien
aagggcccgtgagctgaggtgcaga

SEQ ID NO: 1585191 - DNA, 25 bp, Homo sapien
tccgcggttctcaattctggatctg

SEQ ID NO: 1585192 - DNA, 25 bp, Homo sapien
actttattggatcatcttgacacaa

SEQ ID NO: 1585193 - DNA, 25 bp, Homo sapien
tacaactttattggatcatcttgac

SEQ ID NO: 1585194 - DNA, 25 bp, Homo sapien
gttttacaactttattggatcatct

SEQ ID NO: 1585195 - DNA, 25 bp, Homo sapien
ctgttttacaactttattggatcat

SEQ ID NO: 1585196 - DNA, 25 bp, Homo sapien
tgacctcggatgtctacacggcgga

SEQ ID NO: 1585197 - DNA, 25 bp, Homo sapien
tgacaatggacaacgcctggcaaga

SEQ ID NO: 1585198 - DNA, 25 bp, Homo sapien
gacctttgggtcaaaagcaggcgac

SEQ ID NO: 1585199 - DNA, 25 bp, Homo sapien
agtacacacgactgaggagaggcga

SEQ ID NO: 1585200 - DNA, 25 bp, Homo sapien
gtggagtcactgcacttcccgtcga

SEQ ID NO: 1585201 - DNA, 25 bp, Homo sapien
tcccgtcgactgagacagagttctc

SEQ ID NO: 1585202 - DNA, 25 bp, Homo sapien
tcagtagcgtggagtcactgcactt

SEQ ID NO: 1585203 - DNA, 25 bp, Homo sapien
actgcacttcccgtcgactgagaca

SEQ ID NO: 1585204 - DNA, 25 bp, Homo sapien
tgtgtaaggaaaaaagatggatatt

SEQ ID NO: 1585205 - DNA, 25 bp, Homo sapien
tgtgtgcaggggctaggcacggtgg

SEQ ID NO: 1585206 - DNA, 25 bp, Homo sapien
ctgtgtaaggaaaaaagatggatat

SEQ ID NO: 1585207 - DNA, 25 bp, Homo sapien
tggatattttaaaagtgtgtgcagg

SEQ ID NO: 1585208 - DNA, 25 bp, Homo sapien
cggcccatccattcgtttcccgtag

SEQ ID NO: 1585209 - DNA, 25 bp, Homo sapien
catccattcgtttcccgtaggggat

SEQ ID NO: 1585210 - DNA, 25 bp, Homo sapien
tgagtagtgaacatgagccagaaga

SEQ ID NO: 1585211 - DNA, 25 bp, Homo sapien
cactggaaccaaaccggacatcaag

SEQ ID NO: 1585212 - DNA, 25 bp, Homo sapien
aaatcctcagtatgctcccagaggg

SEQ ID NO: 1585213 - DNA, 25 bp, Homo sapien
gaaacacgtgcaaactggaaatcct

SEQ ID NO: 1585214 - DNA, 25 bp, Homo sapien
tttcaccaggaggcagacatggtgg

SEQ ID NO: 1585215 - DNA, 25 bp, Homo sapien
gaggcgcaggagtccactcgctcca

SEQ ID NO: 1585216 - DNA, 25 bp, Homo sapien
gctgtacatggaggcgcaggagtcc

SEQ ID NO: 1585217 - DNA, 25 bp, Homo sapien
gatggagcggctgtacatggaggcg

SEQ ID NO: 1585218 - DNA, 25 bp, Homo sapien
tcccggacattgcatggctgcagcc

SEQ ID NO: 1585219 - DNA, 25 bp, Homo sapien
ttaggcttcccggacattgcatggc

SEQ ID NO: 1585220 - DNA, 25 bp, Homo sapien
ggcagtgttaggcttcccggacatt

SEQ ID NO: 1585221 - DNA, 25 bp, Homo sapien
caacagagcgggcagtgttaggctt

SEQ ID NO: 1585222 - DNA, 25 bp, Homo sapien
gtgaaaacagatcttcgccagaaga

SEQ ID NO: 1585223 - DNA, 25 bp, Homo sapien
gaaaacagatcttcgccagaagatt

SEQ ID NO: 1585224 - DNA, 25 bp, Homo sapien
ggtgaaaacagatcttcgccagaag

SEQ ID NO: 1585225 - DNA, 25 bp, Homo sapien
tgaaaacagatcttcgccagaagat

SEQ ID NO: 1585226 - DNA, 25 bp, Homo sapien
gaaggacatccgaatgccatcgact

SEQ ID NO: 1585227 - DNA, 25 bp, Homo sapien
cccagactccagcaacttagcaaag

SEQ ID NO: 1585228 - DNA, 25 bp, Homo sapien
ctccagcaacttagcaaaggcgtca

SEQ ID NO: 1585229 - DNA, 25 bp, Homo sapien
gccatcgactttgattgagctcatg

SEQ ID NO: 1585230 - DNA, 25 bp, Homo sapien
tcattttcatgtgcggaagccgtca

SEQ ID NO: 1585231 - DNA, 25 bp, Homo sapien
gacctctatgggtgacgctgcctgg

SEQ ID NO: 1585232 - DNA, 25 bp, Homo sapien
aatccgtctctaaagtcctgcccag

SEQ ID NO: 1585233 - DNA, 25 bp, Homo sapien
gcctgaagccatgggatgggccctc

SEQ ID NO: 1585234 - DNA, 25 bp, Homo sapien
tctcgtgggtcgcaccctcgtcatt

SEQ ID NO: 1585235 - DNA, 25 bp, Homo sapien
cagggagtggtgatcaagtaggagc

SEQ ID NO: 1585236 - DNA, 25 bp, Homo sapien
tccagcttctcgtgggtcgcaccct

SEQ ID NO: 1585237 - DNA, 25 bp, Homo sapien
tggtgatcaagtaggagctgcagct

SEQ ID NO: 1585238 - DNA, 25 bp, Homo sapien
acatactgggcttcgttggagacgc

SEQ ID NO: 1585239 - DNA, 25 bp, Homo sapien
cacatactgggcttcgttggagacg

SEQ ID NO: 1585240 - DNA, 25 bp, Homo sapien
gggtccccttgagcttctgcgccat

SEQ ID NO: 1585241 - DNA, 25 bp, Homo sapien
gcgccatgacgatgctctggatggt

SEQ ID NO: 1585242 - DNA, 25 bp, Homo sapien
gaaaggcacggggacgccatcgtgg

SEQ ID NO: 1585243 - DNA, 25 bp, Homo sapien
ggacgccatcgtggacggaggagcc

SEQ ID NO: 1585244 - DNA, 25 bp, Homo sapien
cacgctgagctccatgcccttgagg

SEQ ID NO: 1585245 - DNA, 25 bp, Homo sapien
catcctggcattgagtgagtccagc

SEQ ID NO: 1585246 - DNA, 25 bp, Homo sapien
tgcagactgccccggatgtcacagg

SEQ ID NO: 1585247 - DNA, 25 bp, Homo sapien
gcagactgccccggatgtcacaggt

SEQ ID NO: 1585248 - DNA, 25 bp, Homo sapien
ctgcagactgccccggatgtcacag

SEQ ID NO: 1585249 - DNA, 25 bp, Homo sapien
tccgcgcgatcccatgccaaagagt

SEQ ID NO: 1585250 - DNA, 25 bp, Homo sapien
tctcagggcatgtctccaaccttac

SEQ ID NO: 1585251 - DNA, 25 bp, Homo sapien
tgggtataccaacatccgggagctg

SEQ ID NO: 1585252 - DNA, 25 bp, Homo sapien
gtctcttaatgaccacagaggcagc

SEQ ID NO: 1585253 - DNA, 25 bp, Homo sapien
agcgaggagggagtagctggactca

SEQ ID NO: 1585254 - DNA, 25 bp, Homo sapien
cataggaattttcagcgaggaggga

SEQ ID NO: 1585255 - DNA, 25 bp, Homo sapien
aattttcagcgaggagggagtagct

SEQ ID NO: 1585256 - DNA, 25 bp, Homo sapien
cattttaacataggaattttcagcg

SEQ ID NO: 1585257 - DNA, 25 bp, Homo sapien
tatggcccaataccccaggtcgaat

SEQ ID NO: 1585258 - DNA, 25 bp, Homo sapien
tcagcgaagactccagtatggccca

SEQ ID NO: 1585259 - DNA, 25 bp, Homo sapien
ttcaaaggagccgatgagggatccc

SEQ ID NO: 1585260 - DNA, 25 bp, Homo sapien
tggaaatagaaaaggcgcatcagcc

SEQ ID NO: 1585261 - DNA, 25 bp, Homo sapien
attctgcaccggctcccccgctgcc

SEQ ID NO: 1585262 - DNA, 25 bp, Homo sapien
tcctcctctggcgcgccattctgca

SEQ ID NO: 1585263 - DNA, 25 bp, Homo sapien
tcttcttgcctttggtccgctcctc

SEQ ID NO: 1585264 - DNA, 25 bp, Homo sapien
cttgcctttggtccgctcctccttc

SEQ ID NO: 1585265 - DNA, 25 bp, Homo sapien
gcttcttcttcttaggcttgggaga

SEQ ID NO: 1585266 - DNA, 25 bp, Homo sapien
ttcttcttcttaggcttgggagatt

SEQ ID NO: 1585267 - DNA, 25 bp, Homo sapien
gtgcttcttcttcttaggcttggga

SEQ ID NO: 1585268 - DNA, 25 bp, Homo sapien
ctgtgcttcttcttcttaggcttgg

SEQ ID NO: 1585269 - DNA, 25 bp, Homo sapien
tcaaagcggcatactgtgtcaccac

SEQ ID NO: 1585270 - DNA, 25 bp, Homo sapien
ccatgtgcacatccgagagggaaca

SEQ ID NO: 1585271 - DNA, 25 bp, Homo sapien
gctctgacccaagccatagtgtgga

SEQ ID NO: 1585272 - DNA, 25 bp, Homo sapien
acacaaatgcgagagcagggctgcc

SEQ ID NO: 1585273 - DNA, 25 bp, Homo sapien
ttgcccctcggcatcgtcctcctcg

SEQ ID NO: 1585274 - DNA, 25 bp, Homo sapien
cttgtcctggtcttgcccctcggca

SEQ ID NO: 1585275 - DNA, 25 bp, Homo sapien
ctgcgcctccgtcttggcgtcctca

SEQ ID NO: 1585276 - DNA, 25 bp, Homo sapien
cgccctgcgcctccgtcttggcgtc

SEQ ID NO: 1585277 - DNA, 25 bp, Homo sapien
tagtgacagtgttcacactgagctc

SEQ ID NO: 1585278 - DNA, 25 bp, Homo sapien
gggtagtgacagtgttcacactgag

SEQ ID NO: 1585279 - DNA, 25 bp, Homo sapien
gtgacagtgttcacactgagctccc

SEQ ID NO: 1585280 - DNA, 25 bp, Homo sapien
cttcggggtagtgacagtgttcaca

SEQ ID NO: 1585281 - DNA, 25 bp, Homo sapien
acctctgcagacaccgaggctggca

SEQ ID NO: 1585282 - DNA, 25 bp, Homo sapien
ctgcagacaccgaggctggcactgg

SEQ ID NO: 1585283 - DNA, 25 bp, Homo sapien
agacaccgaggctggcactggccag

SEQ ID NO: 1585284 - DNA, 25 bp, Homo sapien
cagacaccgaggctggcactggcca

SEQ ID NO: 1585285 - DNA, 25 bp, Homo sapien
gcggtggggtggtagacagccagaa

SEQ ID NO: 1585286 - DNA, 25 bp, Homo sapien
ggggtggtagacagccagaagtcca

SEQ ID NO: 1585287 - DNA, 25 bp, Homo sapien
gcaggcggtggggtggtagacagcc

SEQ ID NO: 1585288 - DNA, 25 bp, Homo sapien
gtggggtggtagacagccagaagtc

SEQ ID NO: 1585289 - DNA, 25 bp, Homo sapien
tcttcttctccttgtctctctcttt

SEQ ID NO: 1585290 - DNA, 25 bp, Homo sapien
ttctctttcttcttgggtttcttgc

SEQ ID NO: 1585291 - DNA, 25 bp, Homo sapien
ctctttcttcttgggtttcttgctc

SEQ ID NO: 1585292 - DNA, 25 bp, Homo sapien
ctctttctctttgtgttttttctct

SEQ ID NO: 1585293 - DNA, 25 bp, Homo sapien
taggcagtttctcgctgtcggctaa

SEQ ID NO: 1585294 - DNA, 25 bp, Homo sapien
cagtttctcgctgtcggctaagggc

SEQ ID NO: 1585295 - DNA, 25 bp, Homo sapien
gaataggcagtttctcgctgtcggc

SEQ ID NO: 1585296 - DNA, 25 bp, Homo sapien
catgggaacgtccttctcaggggat

SEQ ID NO: 1585297 - DNA, 25 bp, Homo sapien
catcctcgtcgctgggcagagcatt

SEQ ID NO: 1585298 - DNA, 25 bp, Homo sapien
tctttgtcatcctcgtcgctgggca

SEQ ID NO: 1585299 - DNA, 25 bp, Homo sapien
tgtcatcctcgtcgctgggcagagc

SEQ ID NO: 1585300 - DNA, 25 bp, Homo sapien
gggtctttgtcatcctcgtcgctgg

SEQ ID NO: 1585301 - DNA, 25 bp, Homo sapien
gggcgatgtcctcgtcgctctccgt

SEQ ID NO: 1585302 - DNA, 25 bp, Homo sapien
ctgtgacgatgtccacctgctgggc

SEQ ID NO: 1585303 - DNA, 25 bp, Homo sapien
atctcctctgtgacgatgtccacct

SEQ ID NO: 1585304 - DNA, 25 bp, Homo sapien
cgatgtcctcgtcgctctccgtggg

SEQ ID NO: 1585305 - DNA, 25 bp, Homo sapien
gcttctgccggtgccgccgctcctc

SEQ ID NO: 1585306 - DNA, 25 bp, Homo sapien
ttctccagcttctgccggtgccgcc

SEQ ID NO: 1585307 - DNA, 25 bp, Homo sapien
tccagcttctgccggtgccgccgct

SEQ ID NO: 1585308 - DNA, 25 bp, Homo sapien
cagcttctgccggtgccgccgctcc

SEQ ID NO: 1585309 - DNA, 25 bp, Homo sapien
cacgggaatgtgctccacgcccggg

SEQ ID NO: 1585310 - DNA, 25 bp, Homo sapien
tgcaccacgggaatgtgctccacgc

SEQ ID NO: 1585311 - DNA, 25 bp, Homo sapien
aggtcaatctgcaccacgggaatgt

SEQ ID NO: 1585312 - DNA, 25 bp, Homo sapien
ttcaaggggacggagaggtcaatct

SEQ ID NO: 1585313 - DNA, 25 bp, Homo sapien
ggcgatggcgagctcttgatgtaga

SEQ ID NO: 1585314 - DNA, 25 bp, Homo sapien
cttctgtggcgatggcgagctcttg

SEQ ID NO: 1585315 - DNA, 25 bp, Homo sapien
ttctgtggcgatggcgagctcttga

SEQ ID NO: 1585316 - DNA, 25 bp, Homo sapien
tgtggcgatggcgagctcttgatgt

SEQ ID NO: 1585317 - DNA, 25 bp, Homo sapien
tggaagacggccctgggcctctcgt

SEQ ID NO: 1585318 - DNA, 25 bp, Homo sapien
actcgctgtccgagagtggctcatt

SEQ ID NO: 1585319 - DNA, 25 bp, Homo sapien
cggtgcttgggacgccgctgctcct

SEQ ID NO: 1585320 - DNA, 25 bp, Homo sapien
agtggctcattgatccaggcgtcca

SEQ ID NO: 1585321 - DNA, 25 bp, Homo sapien
caaggcagtgtgtgaccgagcacgc

SEQ ID NO: 1585322 - DNA, 25 bp, Homo sapien
cacaaggcagtgtgtgaccgagcac

SEQ ID NO: 1585323 - DNA, 25 bp, Homo sapien
agggccacacaaggcagtgtgtgac

SEQ ID NO: 1585324 - DNA, 25 bp, Homo sapien
gccacacaaggcagtgtgtgaccga

SEQ ID NO: 1585325 - DNA, 25 bp, Homo sapien
tgtcactgccccttaagaggacgca

SEQ ID NO: 1585326 - DNA, 25 bp, Homo sapien
tgagtccgtgtgagggatatacccg

SEQ ID NO: 1585327 - DNA, 25 bp, Homo sapien
gatatacccgcctgaggcctccaat

SEQ ID NO: 1585328 - DNA, 25 bp, Homo sapien
ccagaaccagtgagagacctggtga

SEQ ID NO: 1585329 - DNA, 25 bp, Homo sapien
gcaaagagagcgctgacctcctctg

SEQ ID NO: 1585330 - DNA, 25 bp, Homo sapien
gaagcttctggatgtgcttgaccag

SEQ ID NO: 1585331 - DNA, 25 bp, Homo sapien
cttcggggactggaaccttcttctg

SEQ ID NO: 1585332 - DNA, 25 bp, Homo sapien
tgccacaggcacgtccttggcctga

SEQ ID NO: 1585333 - DNA, 25 bp, Homo sapien
tcagcccctggcacagtgacgtgtg

SEQ ID NO: 1585334 - DNA, 25 bp, Homo sapien
agccacatagccacagagagcccag

SEQ ID NO: 1585335 - DNA, 25 bp, Homo sapien
accttcagggacacggggtggctca

SEQ ID NO: 1585336 - DNA, 25 bp, Homo sapien
acagtgacgtgtgggccccctggta

SEQ ID NO: 1585337 - DNA, 25 bp, Homo sapien
tacacggcctggatgtggcctggca

SEQ ID NO: 1585338 - DNA, 25 bp, Homo sapien
gcgtagagcttgaccacgttctgca

SEQ ID NO: 1585339 - DNA, 25 bp, Homo sapien
ctgggtgacggcctgagcgccctct

SEQ ID NO: 1585340 - DNA, 25 bp, Homo sapien
tccaggtctgcgctctgcacaaact

SEQ ID NO: 1585341 - DNA, 25 bp, Homo sapien
ctgggaacgccacagatgcccgagg

SEQ ID NO: 1585342 - DNA, 25 bp, Homo sapien
gatctacaatctcctgggaacgcca

SEQ ID NO: 1585343 - DNA, 25 bp, Homo sapien
aacgccacagatgcccgagggcaga

SEQ ID NO: 1585344 - DNA, 25 bp, Homo sapien
agtcctagtgcccacgggatctaca

SEQ ID NO: 1585345 - DNA, 25 bp, Homo sapien
ccacgtccagcatttgggcggcgat

SEQ ID NO: 1585346 - DNA, 25 bp, Homo sapien
ggcagcgtacagcacctcacagatc

SEQ ID NO: 1585347 - DNA, 25 bp, Homo sapien
cggatggccttcacgcggatggcca

SEQ ID NO: 1585348 - DNA, 25 bp, Homo sapien
tgtcaagcagcgcagacatctggga

SEQ ID NO: 1585349 - DNA, 25 bp, Homo sapien
tgtactggtagttggactggctgca

SEQ ID NO: 1585350 - DNA, 25 bp, Homo sapien
gctcgtcacggtaggtggtaccctc

SEQ ID NO: 1585351 - DNA, 25 bp, Homo sapien
caatgatcttggtgagcagctcgtc

SEQ ID NO: 1585352 - DNA, 25 bp, Homo sapien
gccttgtctacgtgggtcatcagct

SEQ ID NO: 1585353 - DNA, 25 bp, Homo sapien
ccgcagccggatggactcgtccttg

SEQ ID NO: 1585354 - DNA, 25 bp, Homo sapien
aggtccttgtgggactgcacggact

SEQ ID NO: 1585355 - DNA, 25 bp, Homo sapien
gactcgtccttgtcgtccaggcact

SEQ ID NO: 1585356 - DNA, 25 bp, Homo sapien
tccttgtgggactgcacggacttgg

SEQ ID NO: 1585357 - DNA, 25 bp, Homo sapien
gagtcctcgatcaatatccttaatt

SEQ ID NO: 1585358 - DNA, 25 bp, Homo sapien
tctgatcggagtcctcgatcaatat

SEQ ID NO: 1585359 - DNA, 25 bp, Homo sapien
gatcggagtcctcgatcaatatcct

SEQ ID NO: 1585360 - DNA, 25 bp, Homo sapien
agttctgatcggagtcctcgatcaa

SEQ ID NO: 1585361 - DNA, 25 bp, Homo sapien
tggcgctgtggttgggcatgccgga

SEQ ID NO: 1585362 - DNA, 25 bp, Homo sapien
gtggttgggcatgccggaggacagc

SEQ ID NO: 1585363 - DNA, 25 bp, Homo sapien
gctgtggttgggcatgccggaggac

SEQ ID NO: 1585364 - DNA, 25 bp, Homo sapien
ggatgctggcgctgtggttgggcat

SEQ ID NO: 1585365 - DNA, 25 bp, Homo sapien
ccagcgccgacaccaactcagggcc

SEQ ID NO: 1585366 - DNA, 25 bp, Homo sapien
ctgagtttgggaccacgcagcccaa

SEQ ID NO: 1585367 - DNA, 25 bp, Homo sapien
agaaatgccactgagtttgggacca

SEQ ID NO: 1585368 - DNA, 25 bp, Homo sapien
cagacagcttggtcagcaccacggt

SEQ ID NO: 1585369 - DNA, 25 bp, Homo sapien
ttggagcagcttggcagagaccact

SEQ ID NO: 1585370 - DNA, 25 bp, Homo sapien
gacattggtcgttggcccttgtgcc

SEQ ID NO: 1585371 - DNA, 25 bp, Homo sapien
cccgtgaggctttggctgacttgga

SEQ ID NO: 1585372 - DNA, 25 bp, Homo sapien
gcccaatgccccgtgaggctttggc

SEQ ID NO: 1585373 - DNA, 25 bp, Homo sapien
ggtgttcacacattcatagaggaga

SEQ ID NO: 1585374 - DNA, 25 bp, Homo sapien
ctgcaatcacggtgttcacacattc

SEQ ID NO: 1585375 - DNA, 25 bp, Homo sapien
cacggtgttcacacattcatagagg

SEQ ID NO: 1585376 - DNA, 25 bp, Homo sapien
ttcacacattcatagaggagagaca

SEQ ID NO: 1585377 - DNA, 25 bp, Homo sapien
atgagattggtgaggggctcgatca

SEQ ID NO: 1585378 - DNA, 25 bp, Homo sapien
tgagattggtgaggggctcgatcag

SEQ ID NO: 1585379 - DNA, 25 bp, Homo sapien
cttgcccagccgcggttccaaagga

SEQ ID NO: 1585380 - DNA, 25 bp, Homo sapien
ccagccgcggttccaaaggagtaag

SEQ ID NO: 1585381 - DNA, 25 bp, Homo sapien
gcccagccgcggttccaaaggagta

SEQ ID NO: 1585382 - DNA, 25 bp, Homo sapien
tgcccagccgcggttccaaaggagt

SEQ ID NO: 1585383 - DNA, 25 bp, Homo sapien
gggtgagggaatgccccacacaggg

SEQ ID NO: 1585384 - DNA, 25 bp, Homo sapien
ggtgagggaatgccccacacagggt

SEQ ID NO: 1585385 - DNA, 25 bp, Homo sapien
tgatgatcttgatgaggacccagtt

SEQ ID NO: 1585386 - DNA, 25 bp, Homo sapien
gccagctcgcagatgacattgacgg

SEQ ID NO: 1585387 - DNA, 25 bp, Homo sapien
gacattgacggcagccgactgaacc

SEQ ID NO: 1585388 - DNA, 25 bp, Homo sapien
ttagggttgcgtctggccagctcgc

SEQ ID NO: 1585389 - DNA, 25 bp, Homo sapien
cgcagcgactcggggtacttcagga

SEQ ID NO: 1585390 - DNA, 25 bp, Homo sapien
ggaaaggcagggcgcagcgactcgg

SEQ ID NO: 1585391 - DNA, 25 bp, Homo sapien
cagggcgcagcgactcggggtactt

SEQ ID NO: 1585392 - DNA, 25 bp, Homo sapien
gcgactcggggtacttcaggaacac

SEQ ID NO: 1585393 - DNA, 25 bp, Homo sapien
ttcttcctgatgtagggcttggtgt

SEQ ID NO: 1585394 - DNA, 25 bp, Homo sapien
cttcctgatgtagggcttggtgtgt

SEQ ID NO: 1585395 - DNA, 25 bp, Homo sapien
gcaacacctgtgtcgtactggctgg

SEQ ID NO: 1585396 - DNA, 25 bp, Homo sapien
agtgtcatgatgtcatttgccaggt

SEQ ID NO: 1585397 - DNA, 25 bp, Homo sapien
aagcaggacagacccgtcagtgcaa

SEQ ID NO: 1585398 - DNA, 25 bp, Homo sapien
caaggtctggggtgacgaagcagga

SEQ ID NO: 1585399 - DNA, 25 bp, Homo sapien
gggaccgtggcctctgacgtgcggt

SEQ ID NO: 1585400 - DNA, 25 bp, Homo sapien
acatggacattggagagccgggacc

SEQ ID NO: 1585401 - DNA, 25 bp, Homo sapien
agggtcccgcccttgcacatggaca

SEQ ID NO: 1585402 - DNA, 25 bp, Homo sapien
ctgtccctcggcgtgctgggagccc

SEQ ID NO: 1585403 - DNA, 25 bp, Homo sapien
ggtgccttcgtgaaagctctgggaa

SEQ ID NO: 1585404 - DNA, 25 bp, Homo sapien
tgggaagcagcgaggtagccaattc

SEQ ID NO: 1585405 - DNA, 25 bp, Homo sapien
ggtcagcatgatgacgtcggtgcct

SEQ ID NO: 1585406 - DNA, 25 bp, Homo sapien
tgatgacgtcggtgccttcgtgaaa

SEQ ID NO: 1585407 - DNA, 25 bp, Homo sapien
cagccttgccgtcccagaacctcac

SEQ ID NO: 1585408 - DNA, 25 bp, Homo sapien
gattacaggccactgaatccacctt

SEQ ID NO: 1585409 - DNA, 25 bp, Homo sapien
tgaatccaccttgggtaacagagct

SEQ ID NO: 1585410 - DNA, 25 bp, Homo sapien
agctaggattatagccgcgtgcgcc

SEQ ID NO: 1585411 - DNA, 25 bp, Homo sapien
ttgaaggcggcccagctgatgtcgt

SEQ ID NO: 1585412 - DNA, 25 bp, Homo sapien
ttctatgatgttgaaggcggcccag

SEQ ID NO: 1585413 - DNA, 25 bp, Homo sapien
gcccagctgatgtcgtatcccaaca

SEQ ID NO: 1585414 - DNA, 25 bp, Homo sapien
ctatgatgttgaaggcggcccagct

SEQ ID NO: 1585415 - DNA, 25 bp, Homo sapien
tgcttgatctcatcaatgcactgag

SEQ ID NO: 1585416 - DNA, 25 bp, Homo sapien
atacgtcagcttgcagaccgcgttc

SEQ ID NO: 1585417 - DNA, 25 bp, Homo sapien
ccttcaccgctatgttgtcctgctt

SEQ ID NO: 1585418 - DNA, 25 bp, Homo sapien
cgcgttcgccttcaccgctatgttg

SEQ ID NO: 1585419 - DNA, 25 bp, Homo sapien
cgagtggctacgattacaggtacac

SEQ ID NO: 1585420 - DNA, 25 bp, Homo sapien
ctctcggttcaagtgattcaagtga

SEQ ID NO: 1585421 - DNA, 25 bp, Homo sapien
cggttcaagtgattcaagtgattct

SEQ ID NO: 1585422 - DNA, 25 bp, Homo sapien
cccgagtggctacgattacaggtac

SEQ ID NO: 1585423 - DNA, 25 bp, Homo sapien
gggttacaagcaggtactaccacgc

SEQ ID NO: 1585424 - DNA, 25 bp, Homo sapien
catgccaccatattgggcgaatttt

SEQ ID NO: 1585425 - DNA, 25 bp, Homo sapien
ccacctcagtatttgggagtacagt

SEQ ID NO: 1585426 - DNA, 25 bp, Homo sapien
gtggcctaaccatggctaactgcag

SEQ ID NO: 1585427 - DNA, 25 bp, Homo sapien
tccttgtggttacggatgccgcgga

SEQ ID NO: 1585428 - DNA, 25 bp, Homo sapien
ctcgtcctccttgtggttacggatg

SEQ ID NO: 1585429 - DNA, 25 bp, Homo sapien
tcctccttgtggttacggatgccgc

SEQ ID NO: 1585430 - DNA, 25 bp, Homo sapien
tgtggttacggatgccgcggaccaa

SEQ ID NO: 1585431 - DNA, 25 bp, Homo sapien
cgctcggcaggtgccgcgatcccgc

SEQ ID NO: 1585432 - DNA, 25 bp, Homo sapien
cgcggcggcccacgggcttttgcct

SEQ ID NO: 1585433 - DNA, 25 bp, Homo sapien
ggcagaggcggcgacccgctcggca

SEQ ID NO: 1585434 - DNA, 25 bp, Homo sapien
tgcggcggggcaagctcccaggcca

SEQ ID NO: 1585435 - DNA, 25 bp, Homo sapien
cactgtgtcccccaggctgtagtgc

SEQ ID NO: 1585436 - DNA, 25 bp, Homo sapien
gactacgggtctgtgccaccatgct

SEQ ID NO: 1585437 - DNA, 25 bp, Homo sapien
tgctcagctaatttttgtttttatt

SEQ ID NO: 1585438 - DNA, 25 bp, Homo sapien
ctcactgtgtcccccaggctgtagt

SEQ ID NO: 1585439 - DNA, 25 bp, Homo sapien
gaaggcttccttgcagatccatgtg

SEQ ID NO: 1585440 - DNA, 25 bp, Homo sapien
tgaaagcttgtcgagcgcgtcacag

SEQ ID NO: 1585441 - DNA, 25 bp, Homo sapien
gattcaagcgcagaaggagatctcc

SEQ ID NO: 1585442 - DNA, 25 bp, Homo sapien
gtttgttcccagacgaattgcgcca

SEQ ID NO: 1585443 - DNA, 25 bp, Homo sapien
ctggtgccctgtcgctggacctctg

SEQ ID NO: 1585444 - DNA, 25 bp, Homo sapien
gacctggtgccctgtcgctggacct

SEQ ID NO: 1585445 - DNA, 25 bp, Homo sapien
acctggtgccctgtcgctggacctc

SEQ ID NO: 1585446 - DNA, 25 bp, Homo sapien
cctggtgccctgtcgctggacctct

SEQ ID NO: 1585447 - DNA, 25 bp, Homo sapien
tgactttatttgacgcccccagctt

SEQ ID NO: 1585448 - DNA, 25 bp, Homo sapien
cctctatgtggtcggcagctttggt

SEQ ID NO: 1585449 - DNA, 25 bp, Homo sapien
catgtcagcaaaaaccatcctcggc

SEQ ID NO: 1585450 - DNA, 25 bp, Homo sapien
cctcggccctccacatgactttatt

SEQ ID NO: 1585451 - DNA, 25 bp, Homo sapien
gacctcctaggagcggagtcacaca

SEQ ID NO: 1585452 - DNA, 25 bp, Homo sapien
gattctagccatccgagtcgtcgtg

SEQ ID NO: 1585453 - DNA, 25 bp, Homo sapien
tcagaggtctttggtatatccacat

SEQ ID NO: 1585454 - DNA, 25 bp, Homo sapien
gagaaaatctcatcatccccttgaa

SEQ ID NO: 1585455 - DNA, 25 bp, Homo sapien
cgcgggcacgttgaacaagtgcatt

SEQ ID NO: 1585456 - DNA, 25 bp, Homo sapien
tataaagacacgtgtctgcagggcg

SEQ ID NO: 1585457 - DNA, 25 bp, Homo sapien
tatttctcggctgtccatggctcgc

SEQ ID NO: 1585458 - DNA, 25 bp, Homo sapien
gcttggtgctgactagacgctgaca

SEQ ID NO: 1585459 - DNA, 25 bp, Homo sapien
catggccaagcgattcatggctggg

SEQ ID NO: 1585460 - DNA, 25 bp, Homo sapien
tatttgaacagaacaagcaccctgg

SEQ ID NO: 1585461 - DNA, 25 bp, Homo sapien
gcacctgtgggaaggcgcatatcct

SEQ ID NO: 1585462 - DNA, 25 bp, Homo sapien
caaaacagatccaggcatggccaag

SEQ ID NO: 1585463 - DNA, 25 bp, Homo sapien
cgcctgcaagccactcagctggaac

SEQ ID NO: 1585464 - DNA, 25 bp, Homo sapien
cacgcctgcaagccactcagctgga

SEQ ID NO: 1585465 - DNA, 25 bp, Homo sapien
acgcctgcaagccactcagctggaa

SEQ ID NO: 1585466 - DNA, 25 bp, Homo sapien
tcacgcctgcaagccactcagctgg

SEQ ID NO: 1585467 - DNA, 25 bp, Homo sapien
ctcctcggatatgccgaactgttcc

SEQ ID NO: 1585468 - DNA, 25 bp, Homo sapien
ctggcctcctcggatatgccgaact

SEQ ID NO: 1585469 - DNA, 25 bp, Homo sapien
tggcctcctcggatatgccgaactg

SEQ ID NO: 1585470 - DNA, 25 bp, Homo sapien
gcctcctcggatatgccgaactgtt

SEQ ID NO: 1585471 - DNA, 25 bp, Homo sapien
gaggacgggtggccatgagccaggg

SEQ ID NO: 1585472 - DNA, 25 bp, Homo sapien
gatgaggcttctccgcatgaactcg

SEQ ID NO: 1585473 - DNA, 25 bp, Homo sapien
cttgcccgtcaccttccggatttcg

SEQ ID NO: 1585474 - DNA, 25 bp, Homo sapien
caccttccggatttcgttcctgtag

SEQ ID NO: 1585475 - DNA, 25 bp, Homo sapien
gaggcttctccgcatgaactcgtag

SEQ ID NO: 1585476 - DNA, 25 bp, Homo sapien
gtggcacggggtcaaatgcccgctc

SEQ ID NO: 1585477 - DNA, 25 bp, Homo sapien
acggggtcaaatgcccgctctgcat

SEQ ID NO: 1585478 - DNA, 25 bp, Homo sapien
gggtggcacggggtcaaatgcccgc

SEQ ID NO: 1585479 - DNA, 25 bp, Homo sapien
ggcacggggtcaaatgcccgctctg

SEQ ID NO: 1585480 - DNA, 25 bp, Homo sapien
cgctgctgcactcaaagtgatactt

SEQ ID NO: 1585481 - DNA, 25 bp, Homo sapien
ctggcccgacgcagagcctccatcc

SEQ ID NO: 1585482 - DNA, 25 bp, Homo sapien
tcgctgctgcactcaaagtgatact

SEQ ID NO: 1585483 - DNA, 25 bp, Homo sapien
cacagacgtgatgcaaggaggacaa

SEQ ID NO: 1585484 - DNA, 25 bp, Homo sapien
ggaattttgacagccactctgggca

SEQ ID NO: 1585485 - DNA, 25 bp, Homo sapien
caaaatgaggttgtcgccaggtgcg

SEQ ID NO: 1585486 - DNA, 25 bp, Homo sapien
gatactggccaccactaggaactgg

SEQ ID NO: 1585487 - DNA, 25 bp, Homo sapien
ccggacgactctgcagcgctccagc

SEQ ID NO: 1585488 - DNA, 25 bp, Homo sapien
tgatggagaaggtgccgggctcttc

SEQ ID NO: 1585489 - DNA, 25 bp, Homo sapien
cgggctcttcccggacgactctgca

SEQ ID NO: 1585490 - DNA, 25 bp, Homo sapien
ttcccggacgactctgcagcgctcc

SEQ ID NO: 1585491 - DNA, 25 bp, Homo sapien
tggaggagacacgggcgccgggacg

SEQ ID NO: 1585492 - DNA, 25 bp, Homo sapien
ctggaggagacacgggcgccgggac

SEQ ID NO: 1585493 - DNA, 25 bp, Homo sapien
ctgtccgaaagtagaagaggaaatt

SEQ ID NO: 1585494 - DNA, 25 bp, Homo sapien
caccagcttcaccagccgccgcttc

SEQ ID NO: 1585495 - DNA, 25 bp, Homo sapien
ccagcttcaccagccgccgcttcag

SEQ ID NO: 1585496 - DNA, 25 bp, Homo sapien
tccgaaagtagaagaggaaattcac

SEQ ID NO: 1585497 - DNA, 25 bp, Homo sapien
agcgcgcactcaggggcgcaggcag

SEQ ID NO: 1585498 - DNA, 25 bp, Homo sapien
gggcacagcgcgcactcaggggcgc

SEQ ID NO: 1585499 - DNA, 25 bp, Homo sapien
gcacagcgcgcactcaggggcgcag

SEQ ID NO: 1585500 - DNA, 25 bp, Homo sapien
ctgcgggcacagcgcgcactcaggg

SEQ ID NO: 1585501 - DNA, 25 bp, Homo sapien
ttcttggggcccctcatgcccagct

SEQ ID NO: 1585502 - DNA, 25 bp, Homo sapien
gccatctcggccggctgccgggaca

SEQ ID NO: 1585503 - DNA, 25 bp, Homo sapien
ccatctcggccggctgccgggacag

SEQ ID NO: 1585504 - DNA, 25 bp, Homo sapien
ctcccggccgccgtccccgctcagg

SEQ ID NO: 1585505 - DNA, 25 bp, Homo sapien
cctcccggccgccgtccccgctcag

SEQ ID NO: 1585506 - DNA, 25 bp, Homo sapien
gggccggcgccaaaaatgtctcagg

SEQ ID NO: 1585507 - DNA, 25 bp, Homo sapien
tcagggcgcagacacggaagcaccc

SEQ ID NO: 1585508 - DNA, 25 bp, Homo sapien
aaaaatgtctcagggcgcagacacg

SEQ ID NO: 1585509 - DNA, 25 bp, Homo sapien
cgccaaaaatgtctcagggcgcaga

SEQ ID NO: 1585510 - DNA, 25 bp, Homo sapien
gagacggaccgttgttacataacca

SEQ ID NO: 1585511 - DNA, 25 bp, Homo sapien
ttcgttgagagcgttgtgcgcacgc

SEQ ID NO: 1585512 - DNA, 25 bp, Homo sapien
ccggaccaaggtggaacagaatcaa

SEQ ID NO: 1585513 - DNA, 25 bp, Homo sapien
tggcacccctttctagagcggccag

SEQ ID NO: 1585514 - DNA, 25 bp, Homo sapien
ggtggcgaaacgaggaggagataac

SEQ ID NO: 1585515 - DNA, 25 bp, Homo sapien
aggagataacgcggccttgggctct

SEQ ID NO: 1585516 - DNA, 25 bp, Homo sapien
ttcgccaaacgaagtcgtggaggtg

SEQ ID NO: 1585517 - DNA, 25 bp, Homo sapien
gcccgtctcatttgccccggaagtg

SEQ ID NO: 1585518 - DNA, 25 bp, Homo sapien
gtcgaatcgggatcgcggctgaaat

SEQ ID NO: 1585519 - DNA, 25 bp, Homo sapien
ggccgccttccttgtagccgagaac

SEQ ID NO: 1585520 - DNA, 25 bp, Homo sapien
ggctgaaatggtttcggccgccttc

SEQ ID NO: 1585521 - DNA, 25 bp, Homo sapien
gaacgcttctgtatgctcatctata

SEQ ID NO: 1585522 - DNA, 25 bp, Homo sapien
aggctgtcccctgatctttacctta

SEQ ID NO: 1585523 - DNA, 25 bp, Homo sapien
atctttaccttagtaagtaacagat

SEQ ID NO: 1585524 - DNA, 25 bp, Homo sapien
caggctgtcccctgatctttacctt

SEQ ID NO: 1585525 - DNA, 25 bp, Homo sapien
tgatctttaccttagtaagtaacag

SEQ ID NO: 1585526 - DNA, 25 bp, Homo sapien
cagcttgtcattcagcttcctgttc

SEQ ID NO: 1585527 - DNA, 25 bp, Homo sapien
aaagatttgtttggctcagcttcca

SEQ ID NO: 1585528 - DNA, 25 bp, Homo sapien
tgtttggatcgtcctgtctgtattt

SEQ ID NO: 1585529 - DNA, 25 bp, Homo sapien
cagcttccaactctggtatggaatt

SEQ ID NO: 1585530 - DNA, 25 bp, Homo sapien
gctttacttggtgagtggttgagta

SEQ ID NO: 1585531 - DNA, 25 bp, Homo sapien
ggttttcggatcagagctttacttg

SEQ ID NO: 1585532 - DNA, 25 bp, Homo sapien
gtgccgccccatttcagctgctgag

SEQ ID NO: 1585533 - DNA, 25 bp, Homo sapien
cgatggcttgggttcggatggtttc

SEQ ID NO: 1585534 - DNA, 25 bp, Homo sapien
gagagggtgcagttctccctggtcc

SEQ ID NO: 1585535 - DNA, 25 bp, Homo sapien
gtcacagtggtggtttctcgaagtt

SEQ ID NO: 1585536 - DNA, 25 bp, Homo sapien
caggcagctgtaagctgttgtggca

SEQ ID NO: 1585537 - DNA, 25 bp, Homo sapien
agtctcctttttcacactggaatgt

SEQ ID NO: 1585538 - DNA, 25 bp, Homo sapien
ccagtctgctaaagccctaaggcca

SEQ ID NO: 1585539 - DNA, 25 bp, Homo sapien
ctccgagagcaaccgtgaccgcagg

SEQ ID NO: 1585540 - DNA, 25 bp, Homo sapien
ggccatcaccatggacttccagcat

SEQ ID NO: 1585541 - DNA, 25 bp, Homo sapien
gccctaaggccatcaccatggactt

SEQ ID NO: 1585542 - DNA, 25 bp, Homo sapien
gcagccgttggctcaagtctctgtg

SEQ ID NO: 1585543 - DNA, 25 bp, Homo sapien
cctgggcgcttgagtacggttcctg

SEQ ID NO: 1585544 - DNA, 25 bp, Homo sapien
aacctgtgagtacctcatgtccctt

SEQ ID NO: 1585545 - DNA, 25 bp, Homo sapien
ttcctggggagcattagagaacaga

SEQ ID NO: 1585546 - DNA, 25 bp, Homo sapien
ctcgctttatttcgccagagtcgcg

SEQ ID NO: 1585547 - DNA, 25 bp, Homo sapien
agcactcgctttatttcgccagagt

SEQ ID NO: 1585548 - DNA, 25 bp, Homo sapien
cagaaggggcccctggactccggcg

SEQ ID NO: 1585549 - DNA, 25 bp, Homo sapien
cactcgctttatttcgccagagtcg

SEQ ID NO: 1585550 - DNA, 25 bp, Homo sapien
ggcctctctttcttaggtctctcct

SEQ ID NO: 1585551 - DNA, 25 bp, Homo sapien
tcctcgtcgggacgcctcggggaca

SEQ ID NO: 1585552 - DNA, 25 bp, Homo sapien
ggtctgcgagggtcacacggtcctc

SEQ ID NO: 1585553 - DNA, 25 bp, Homo sapien
tcgccgggctcctcttcgtcgttct

SEQ ID NO: 1585554 - DNA, 25 bp, Homo sapien
ggaggcgcctgggcctcgaacttag

SEQ ID NO: 1585555 - DNA, 25 bp, Homo sapien
tcttgggtctgacctctgcctcggc

SEQ ID NO: 1585556 - DNA, 25 bp, Homo sapien
ccgactcccgggaatcttgggtctg

SEQ ID NO: 1585557 - DNA, 25 bp, Homo sapien
gaggcgcctgggcctcgaacttagg

SEQ ID NO: 1585558 - DNA, 25 bp, Homo sapien
tgagcttggcgggacccagggctcg

SEQ ID NO: 1585559 - DNA, 25 bp, Homo sapien
ctcgggcacacgtgcttggagtgct

SEQ ID NO: 1585560 - DNA, 25 bp, Homo sapien
ccagggctcgggcacacgtgcttgg

SEQ ID NO: 1585561 - DNA, 25 bp, Homo sapien
acacgtgcttggagtgctgcctccc

SEQ ID NO: 1585562 - DNA, 25 bp, Homo sapien
ctgcagcgacagggtcgggacccga

SEQ ID NO: 1585563 - DNA, 25 bp, Homo sapien
tgcagcgacagggtcgggacccgag

SEQ ID NO: 1585564 - DNA, 25 bp, Homo sapien
ttcaattggtcattcttccccccga

SEQ ID NO: 1585565 - DNA, 25 bp, Homo sapien
tcaattggtcattcttccccccgac

SEQ ID NO: 1585566 - DNA, 25 bp, Homo sapien
tctttcaattggtcattcttccccc

SEQ ID NO: 1585567 - DNA, 25 bp, Homo sapien
ctcacgagctgagcggtccccagag

SEQ ID NO: 1585568 - DNA, 25 bp, Homo sapien
gcgctcacgagctgagcggtcccca

SEQ ID NO: 1585569 - DNA, 25 bp, Homo sapien
gggcgctcacgagctgagcggtccc

SEQ ID NO: 1585570 - DNA, 25 bp, Homo sapien
ccccggggggcgctcacgagctgag

SEQ ID NO: 1585571 - DNA, 25 bp, Homo sapien
agcgccaccagcgaggcgagcacca

SEQ ID NO: 1585572 - DNA, 25 bp, Homo sapien
aggcacttgttgagcgacaggtctc

SEQ ID NO: 1585573 - DNA, 25 bp, Homo sapien
agcgaggcgagcaccaggcacttgt

SEQ ID NO: 1585574 - DNA, 25 bp, Homo sapien
ttgttgagcgacaggtctccccagg

SEQ ID NO: 1585575 - DNA, 25 bp, Homo sapien
ttgcgcgcggggacgctccgagggc

SEQ ID NO: 1585576 - DNA, 25 bp, Homo sapien
cgcggtctgcgccttcttgcgcgcg

SEQ ID NO: 1585577 - DNA, 25 bp, Homo sapien
gcggcgcggtctgcgccttcttgcg

SEQ ID NO: 1585578 - DNA, 25 bp, Homo sapien
cttcttgcgcgcggggacgctccga

SEQ ID NO: 1585579 - DNA, 25 bp, Homo sapien
cacctcacccatgcctcctgcaaac

SEQ ID NO: 1585580 - DNA, 25 bp, Homo sapien
cctcacccatgcctcctgcaaaccc

SEQ ID NO: 1585581 - DNA, 25 bp, Homo sapien
tcacccatgcctcctgcaaacccac

SEQ ID NO: 1585582 - DNA, 25 bp, Homo sapien
cagtccgttcccaccccacacctca

SEQ ID NO: 1585583 - DNA, 25 bp, Homo sapien
atcttcttgggcctggtgtccacac

SEQ ID NO: 1585584 - DNA, 25 bp, Homo sapien
tcgctccggctttcagcctctcctt

SEQ ID NO: 1585585 - DNA, 25 bp, Homo sapien
tccccctggcggcaggctctttttc

SEQ ID NO: 1585586 - DNA, 25 bp, Homo sapien
tggcggcaggctctttttccatctt

SEQ ID NO: 1585587 - DNA, 25 bp, Homo sapien
aggcgtcctgggttaaaggctgagg

SEQ ID NO: 1585588 - DNA, 25 bp, Homo sapien
cccaggcgtcctgggttaaaggctg

SEQ ID NO: 1585589 - DNA, 25 bp, Homo sapien
ccaggcgtcctgggttaaaggctga

SEQ ID NO: 1585590 - DNA, 25 bp, Homo sapien
tggtcggcttgtccccaactcccca

SEQ ID NO: 1585591 - DNA, 25 bp, Homo sapien
tggggcacgctgccggagtcggcca

SEQ ID NO: 1585592 - DNA, 25 bp, Homo sapien
cgctgccggagtcggccagcctggg

SEQ ID NO: 1585593 - DNA, 25 bp, Homo sapien
gggcacgctgccggagtcggccagc

SEQ ID NO: 1585594 - DNA, 25 bp, Homo sapien
gcacgctgccggagtcggccagcct

SEQ ID NO: 1585595 - DNA, 25 bp, Homo sapien
tctcggccagcgcagagtggtcctc

SEQ ID NO: 1585596 - DNA, 25 bp, Homo sapien
tcggccagcgcagagtggtcctcca

SEQ ID NO: 1585597 - DNA, 25 bp, Homo sapien
tgggtctcggccagcgcagagtggt

SEQ ID NO: 1585598 - DNA, 25 bp, Homo sapien
gtctcggccagcgcagagtggtcct

SEQ ID NO: 1585599 - DNA, 25 bp, Homo sapien
ggctggagcagcagcaggtcccagg

SEQ ID NO: 1585600 - DNA, 25 bp, Homo sapien
gagcagcagcaggtcccaggccagg

SEQ ID NO: 1585601 - DNA, 25 bp, Homo sapien
ctggagcagcagcaggtcccaggcc

SEQ ID NO: 1585602 - DNA, 25 bp, Homo sapien
tggagcagcagcaggtcccaggcca

SEQ ID NO: 1585603 - DNA, 25 bp, Homo sapien
ccgccagccgctttgctgagccttg

SEQ ID NO: 1585604 - DNA, 25 bp, Homo sapien
tatgtacccgtatgtgactgccaag

SEQ ID NO: 1585605 - DNA, 25 bp, Homo sapien
tattaaacctcactgcaaagtggca

SEQ ID NO: 1585606 - DNA, 25 bp, Homo sapien
cattttacctcacaggcgaaacagt

SEQ ID NO: 1585607 - DNA, 25 bp, Homo sapien
gaaatatttttgctaggtaagtcca

SEQ ID NO: 1585608 - DNA, 25 bp, Homo sapien
gatggtggcgctgggtttatcccct

SEQ ID NO: 1585609 - DNA, 25 bp, Homo sapien
gctgctcgccgttcgcaaaatggcg

SEQ ID NO: 1585610 - DNA, 25 bp, Homo sapien
aaccaggaaaacctccgctgcgtct

SEQ ID NO: 1585611 - DNA, 25 bp, Homo sapien
gaagcagtggctattgaggatccgc

SEQ ID NO: 1585612 - DNA, 25 bp, Homo sapien
ctttatagatgctgcgcccaggcca

SEQ ID NO: 1585613 - DNA, 25 bp, Homo sapien
aggatttcaccatccggccgctggg

SEQ ID NO: 1585614 - DNA, 25 bp, Homo sapien
gcagaggcgccattttgcgaacggc

SEQ ID NO: 1585615 - DNA, 25 bp, Homo sapien
cccagcggccggatggtgaaatcct

SEQ ID NO: 1585616 - DNA, 25 bp, Homo sapien
cgcagcggaggttttcctggtttcg

SEQ ID NO: 1585617 - DNA, 25 bp, Homo sapien
gcggatcctcaatagccactgcttc

SEQ ID NO: 1585618 - DNA, 25 bp, Homo sapien
gccattttgcgaacggcgagcagcg

SEQ ID NO: 1585619 - DNA, 25 bp, Homo sapien
cctgggcgcagcatctataaaggcg

SEQ ID NO: 1585620 - DNA, 25 bp, Homo sapien
tagctgaaagattgtgatccctctg

SEQ ID NO: 1585621 - DNA, 25 bp, Homo sapien
tgaaagattgtgatccctctgacta

SEQ ID NO: 1585622 - DNA, 25 bp, Homo sapien
agttagctgaaagattgtgatccct

SEQ ID NO: 1585623 - DNA, 25 bp, Homo sapien
tccctcgcccacctgggatcttcag

SEQ ID NO: 1585624 - DNA, 25 bp, Homo sapien
gctgaaagattgtgatccctctgac

SEQ ID NO: 1585625 - DNA, 25 bp, Homo sapien
gttagctgaaagattgtgatccctc

SEQ ID NO: 1585626 - DNA, 25 bp, Homo sapien
tcagagggatcacaatctttcagct

SEQ ID NO: 1585627 - DNA, 25 bp, Homo sapien
gtcagagggatcacaatctttcagc

SEQ ID NO: 1585628 - DNA, 25 bp, Homo sapien
tagtcagagggatcacaatctttca

SEQ ID NO: 1585629 - DNA, 25 bp, Homo sapien
gagggatcacaatctttcagctaac

SEQ ID NO: 1585630 - DNA, 25 bp, Homo sapien
cagagggatcacaatctttcagcta

SEQ ID NO: 1585631 - DNA, 25 bp, Homo sapien
ctgaagatcccaggtgggcgaggga

SEQ ID NO: 1585632 - DNA, 25 bp, Homo sapien
ttcctctgttacattcagccgatca

SEQ ID NO: 1585633 - DNA, 25 bp, Homo sapien
gttcctctgttacattcagccgatc

SEQ ID NO: 1585634 - DNA, 25 bp, Homo sapien
cctctgttacattcagccgatcatc

SEQ ID NO: 1585635 - DNA, 25 bp, Homo sapien
tcctctgttacattcagccgatcat

SEQ ID NO: 1585636 - DNA, 25 bp, Homo sapien
gatgatcggctgaatgtaacagagg

SEQ ID NO: 1585637 - DNA, 25 bp, Homo sapien
atgatcggctgaatgtaacagagga

SEQ ID NO: 1585638 - DNA, 25 bp, Homo sapien
gatcggctgaatgtaacagaggaac

SEQ ID NO: 1585639 - DNA, 25 bp, Homo sapien
tgatcggctgaatgtaacagaggaa

SEQ ID NO: 1585640 - DNA, 25 bp, Homo sapien
ttcctctgttacattcagccgatca

SEQ ID NO: 1585641 - DNA, 25 bp, Homo sapien
gttcctctgttacattcagccgatc

SEQ ID NO: 1585642 - DNA, 25 bp, Homo sapien
cctctgttacattcagccgatcatc

SEQ ID NO: 1585643 - DNA, 25 bp, Homo sapien
tcctctgttacattcagccgatcat

SEQ ID NO: 1585644 - DNA, 25 bp, Homo sapien
tagttcctctgttacattcagccga

SEQ ID NO: 1585645 - DNA, 25 bp, Homo sapien
ttagttcctctgttacattcagccg

SEQ ID NO: 1585646 - DNA, 25 bp, Homo sapien
gatgatcggctgaatgtaacagagg

SEQ ID NO: 1585647 - DNA, 25 bp, Homo sapien
gatcggctgaatgtaacagaggaac

SEQ ID NO: 1585648 - DNA, 25 bp, Homo sapien
tgatcggctgaatgtaacagaggaa

SEQ ID NO: 1585649 - DNA, 25 bp, Homo sapien
atgatcggctgaatgtaacagagga

SEQ ID NO: 1585650 - DNA, 25 bp, Homo sapien
cggctgaatgtaacagaggaactaa

SEQ ID NO: 1585651 - DNA, 25 bp, Homo sapien
tcggctgaatgtaacagaggaacta

SEQ ID NO: 1585652 - DNA, 25 bp, Homo sapien
acccaggcgagatgagcgagtctac

SEQ ID NO: 1585653 - DNA, 25 bp, Homo sapien
aatacaccgctaattcggagtgagc

SEQ ID NO: 1585654 - DNA, 25 bp, Homo sapien
ttacaacatgcggacaaacccaggc

SEQ ID NO: 1585655 - DNA, 25 bp, Homo sapien
tgagcgagtctacggttcctaccca

SEQ ID NO: 1585656 - DNA, 25 bp, Homo sapien
caggtgcatcgggtgtaatcacttt

SEQ ID NO: 1585657 - DNA, 25 bp, Homo sapien
gaagactctctctcgaacgtgtagg

SEQ ID NO: 1585658 - DNA, 25 bp, Homo sapien
taagaaacttctcctcaaagtacaa

SEQ ID NO: 1585659 - DNA, 25 bp, Homo sapien
ataagaaacttctcctcaaagtaca

SEQ ID NO: 1585660 - DNA, 25 bp, Homo sapien
tgtactttgaggagaagtttcttat

SEQ ID NO: 1585661 - DNA, 25 bp, Homo sapien
ttgtactttgaggagaagtttctta

SEQ ID NO: 1585662 - DNA, 25 bp, Homo sapien
taaagtgattacacccgatgcacct

SEQ ID NO: 1585663 - DNA, 25 bp, Homo sapien
cctacacgttcgagagagagtcttc

SEQ ID NO: 1585664 - DNA, 25 bp, Homo sapien
gcctgggtttgtccgcatgttgtaa

SEQ ID NO: 1585665 - DNA, 25 bp, Homo sapien
gtagactcgctcatctcgcctgggt

SEQ ID NO: 1585666 - DNA, 25 bp, Homo sapien
tgggtaggaaccgtagactcgctca

SEQ ID NO: 1585667 - DNA, 25 bp, Homo sapien
taaacgctcactccgaattagcggt

SEQ ID NO: 1585668 - DNA, 25 bp, Homo sapien
ggctatcatggagacgctgacctca

SEQ ID NO: 1585669 - DNA, 25 bp, Homo sapien
gtccagaccccgctgagatgagctg

SEQ ID NO: 1585670 - DNA, 25 bp, Homo sapien
gggaacagcctacacaaatgcttgg

SEQ ID NO: 1585671 - DNA, 25 bp, Homo sapien
ttgtccacacctggaagtggcgtgg

SEQ ID NO: 1585672 - DNA, 25 bp, Homo sapien
accgtgcgctctggaacctcggctg

SEQ ID NO: 1585673 - DNA, 25 bp, Homo sapien
cgcaagcgggtcagctgtgctgcca

SEQ ID NO: 1585674 - DNA, 25 bp, Homo sapien
gccagtcctcgaggctgggagcttc

SEQ ID NO: 1585675 - DNA, 25 bp, Homo sapien
gccaggtattcgcaacacagccagt

SEQ ID NO: 1585676 - DNA, 25 bp, Homo sapien
gtcagccgggccaaaggtcagctct

SEQ ID NO: 1585677 - DNA, 25 bp, Homo sapien
tctccgaggcggctgtacttggatg

SEQ ID NO: 1585678 - DNA, 25 bp, Homo sapien
gcgcaccacgcggtaatacagggcg

SEQ ID NO: 1585679 - DNA, 25 bp, Homo sapien
gcatagatggtacggaggccctgca

SEQ ID NO: 1585680 - DNA, 25 bp, Homo sapien
cgaccaggtggggttgtcgggctcg

SEQ ID NO: 1585681 - DNA, 25 bp, Homo sapien
tatacgtgggctgagtcgaccaggt

SEQ ID NO: 1585682 - DNA, 25 bp, Homo sapien
gttgctatacgtgggctgagtcgac

SEQ ID NO: 1585683 - DNA, 25 bp, Homo sapien
caaggttgctatacgtgggctgagt

SEQ ID NO: 1585684 - DNA, 25 bp, Homo sapien
cttcaagactggcgtgccctctggg

SEQ ID NO: 1585685 - DNA, 25 bp, Homo sapien
tccgtggggacaaactcccaatggc

SEQ ID NO: 1585686 - DNA, 25 bp, Homo sapien
aggacaatagtttcacctgcctttg

SEQ ID NO: 1585687 - DNA, 25 bp, Homo sapien
tgtgaaccctaacctggccgagaat

SEQ ID NO: 1585688 - DNA, 25 bp, Homo sapien
tcagagcagtcttcagggatccagg

SEQ ID NO: 1585689 - DNA, 25 bp, Homo sapien
taatatacggatgctctgtgaaccc

SEQ ID NO: 1585690 - DNA, 25 bp, Homo sapien
catctgtacatcgtggtgctggcct

SEQ ID NO: 1585691 - DNA, 25 bp, Homo sapien
ggcaaaagtccctccagtagaccca

SEQ ID NO: 1585692 - DNA, 25 bp, Homo sapien
cctgctgttctgggaagcacgtggc

SEQ ID NO: 1585693 - DNA, 25 bp, Homo sapien
atttggaaggacactcagcacccca

SEQ ID NO: 1585694 - DNA, 25 bp, Homo sapien
tccagtagacccatttggaaggaca

SEQ ID NO: 1585695 - DNA, 25 bp, Homo sapien
gaaactgcaaaaaagacgcatgctg

SEQ ID NO: 1585696 - DNA, 25 bp, Homo sapien
aaatgcataggtggacacgcgagcg

SEQ ID NO: 1585697 - DNA, 25 bp, Homo sapien
tgaaaaacagtcctgcggttgggcg

SEQ ID NO: 1585698 - DNA, 25 bp, Homo sapien
tcccctccgggaaatgcataggtgg

SEQ ID NO: 1585699 - DNA, 25 bp, Homo sapien
tcttcatgttgaacttgcgcgcgcc

SEQ ID NO: 1585700 - DNA, 25 bp, Homo sapien
cttcatgttgaacttgcgcgcgcct

SEQ ID NO: 1585701 - DNA, 25 bp, Homo sapien
catcttcatgttgaacttgcgcgcg

SEQ ID NO: 1585702 - DNA, 25 bp, Homo sapien
tcatgttgaacttgcgcgcgcctcc

SEQ ID NO: 1585703 - DNA, 25 bp, Homo sapien
ctggcccgccgcggcggccggccca

SEQ ID NO: 1585704 - DNA, 25 bp, Homo sapien
gcccgccgcggcggccggcccatcc

SEQ ID NO: 1585705 - DNA, 25 bp, Homo sapien
tggcccgccgcggcggccggcccat

SEQ ID NO: 1585706 - DNA, 25 bp, Homo sapien
ccgccgcggcggccggcccatccac

SEQ ID NO: 1585707 - DNA, 25 bp, Homo sapien
gattaccagcttgttctcgctcagg

SEQ ID NO: 1585708 - DNA, 25 bp, Homo sapien
gcagcgtctctagcgtgttcaccga

SEQ ID NO: 1585709 - DNA, 25 bp, Homo sapien
cggatcttgggtttgcggcacacga

SEQ ID NO: 1585710 - DNA, 25 bp, Homo sapien
gaagttgtttttgtgctgcccgcgg

SEQ ID NO: 1585711 - DNA, 25 bp, Homo sapien
gcaggctcaggacgcacagccagca

SEQ ID NO: 1585712 - DNA, 25 bp, Homo sapien
gcacggtgcactcgcagcgggccgg

SEQ ID NO: 1585713 - DNA, 25 bp, Homo sapien
acggtgcactcgcagcgggccgggc

SEQ ID NO: 1585714 - DNA, 25 bp, Homo sapien
ctgcacggtgcactcgcagcgggcc

SEQ ID NO: 1585715 - DNA, 25 bp, Homo sapien
agctcttcttggctgcagccaagat

SEQ ID NO: 1585716 - DNA, 25 bp, Homo sapien
tcttcttggctgcagccaagattct

SEQ ID NO: 1585717 - DNA, 25 bp, Homo sapien
cttggctgcagccaagattctgggg

SEQ ID NO: 1585718 - DNA, 25 bp, Homo sapien
ttcttggctgcagccaagattctgg

SEQ ID NO: 1585719 - DNA, 25 bp, Homo sapien
gaggctgtgcacgttgaaatccacg

SEQ ID NO: 1585720 - DNA, 25 bp, Homo sapien
caggaggctgtgcacgttgaaatcc

SEQ ID NO: 1585721 - DNA, 25 bp, Homo sapien
ccctgctgaggtcccaggaggctgt

SEQ ID NO: 1585722 - DNA, 25 bp, Homo sapien
ggctgtgcacgttgaaatccacgcc

SEQ ID NO: 1585723 - DNA, 25 bp, Homo sapien
cagtgtacgggacatcagctggtaa

SEQ ID NO: 1585724 - DNA, 25 bp, Homo sapien
gacaccgtgaaatcagtgtacggga

SEQ ID NO: 1585725 - DNA, 25 bp, Homo sapien
gaaatcagtgtacgggacatcagct

SEQ ID NO: 1585726 - DNA, 25 bp, Homo sapien
cgtgaaatcagtgtacgggacatca

SEQ ID NO: 1585727 - DNA, 25 bp, Homo sapien
ccggactgcccgtctgcccctgcag

SEQ ID NO: 1585728 - DNA, 25 bp, Homo sapien
gagctctgctgcccggtctcgggag

SEQ ID NO: 1585729 - DNA, 25 bp, Homo sapien
caggcccggactgcccgtctgcccc

SEQ ID NO: 1585730 - DNA, 25 bp, Homo sapien
gactgcccgtctgcccctgcagggc

SEQ ID NO: 1585731 - DNA, 25 bp, Homo sapien
catgcacgaccagccgcagctgagg

SEQ ID NO: 1585732 - DNA, 25 bp, Homo sapien
ccgcagaggcctttggcaggggggc

SEQ ID NO: 1585733 - DNA, 25 bp, Homo sapien
ggccgcagaggcctttggcaggggg

SEQ ID NO: 1585734 - DNA, 25 bp, Homo sapien
tgcacgaccagccgcagctgaggcc

SEQ ID NO: 1585735 - DNA, 25 bp, Homo sapien
gaaactgcacttctcgacatcgcct

SEQ ID NO: 1585736 - DNA, 25 bp, Homo sapien
agaaactgcacttctcgacatcgcc

SEQ ID NO: 1585737 - DNA, 25 bp, Homo sapien
gtgctgcgtccatgccaggctcagg

SEQ ID NO: 1585738 - DNA, 25 bp, Homo sapien
ctcaggcgccgtccctgccctcagg

SEQ ID NO: 1585739 - DNA, 25 bp, Homo sapien
ctggccggcgtgcagaactctgtct

SEQ ID NO: 1585740 - DNA, 25 bp, Homo sapien
tgctggctctggtcagcacggtcga

SEQ ID NO: 1585741 - DNA, 25 bp, Homo sapien
cctcgggcccgtcattcctgggtga

SEQ ID NO: 1585742 - DNA, 25 bp, Homo sapien
ttctgtcgggcactggaaccctagc

SEQ ID NO: 1585743 - DNA, 25 bp, Homo sapien
tcccttcatatccatgtccttgtct

SEQ ID NO: 1585744 - DNA, 25 bp, Homo sapien
cacccagaaacaggcggtgatgggc

SEQ ID NO: 1585745 - DNA, 25 bp, Homo sapien
caggcaggaaatcgacacccagaaa

SEQ ID NO: 1585746 - DNA, 25 bp, Homo sapien
tgtggcagaaggtctcacgctacac

SEQ ID NO: 1585747 - DNA, 25 bp, Homo sapien
ggccagcacttgaccgcgggcacag

SEQ ID NO: 1585748 - DNA, 25 bp, Homo sapien
tccgaggacaagactcgagggctct

SEQ ID NO: 1585749 - DNA, 25 bp, Homo sapien
gtgatccgagggctgcgctgaccat

SEQ ID NO: 1585750 - DNA, 25 bp, Homo sapien
aagaagggcccatctgtcttatcta

SEQ ID NO: 1585751 - DNA, 25 bp, Homo sapien
tcccggacagcgaggcttgtaggct

SEQ ID NO: 1585752 - DNA, 25 bp, Homo sapien
tccgggcacacctgaactctgtctg

SEQ ID NO: 1585753 - DNA, 25 bp, Homo sapien
cttgtaggcttgtgggttgaacgtc

SEQ ID NO: 1585754 - DNA, 25 bp, Homo sapien
ctgtcaaatggacgcagggaactgg

SEQ ID NO: 1585755 - DNA, 25 bp, Homo sapien
gcagcagccaagtccgcgggaaacc

SEQ ID NO: 1585756 - DNA, 25 bp, Homo sapien
ccaagtccgcgggaaaccgagctgc

SEQ ID NO: 1585757 - DNA, 25 bp, Homo sapien
ttccgttccaggaggcggtactgcg

SEQ ID NO: 1585758 - DNA, 25 bp, Homo sapien
agtccgcgggaaaccgagctgctcg

SEQ ID NO: 1585759 - DNA, 25 bp, Homo sapien
cgaggcccagctgccgggtgtcctc

SEQ ID NO: 1585760 - DNA, 25 bp, Homo sapien
tccatgccgtcctgcgggcagatta

SEQ ID NO: 1585761 - DNA, 25 bp, Homo sapien
gcagattagcaccacggacgtgccc

SEQ ID NO: 1585762 - DNA, 25 bp, Homo sapien
tccgtgagcttgtactggtcgtcag

SEQ ID NO: 1585763 - DNA, 25 bp, Homo sapien
aggcgccacgagcacgcagggacct

SEQ ID NO: 1585764 - DNA, 25 bp, Homo sapien
gaggagcagatagagaggactgagg

SEQ ID NO: 1585765 - DNA, 25 bp, Homo sapien
cggctcccacggctgagacccatgg

SEQ ID NO: 1585766 - DNA, 25 bp, Homo sapien
gacctcagacgggatgcgctctgtg

SEQ ID NO: 1585767 - DNA, 25 bp, Homo sapien
ccatggccagctacaagaataaatc

SEQ ID NO: 1585768 - DNA, 25 bp, Homo sapien
tctctcctaagtcctgacattcccc

SEQ ID NO: 1585769 - DNA, 25 bp, Homo sapien
taaatcttgtctcagtatcaatgga

SEQ ID NO: 1585770 - DNA, 25 bp, Homo sapien
ggatccaaggggcaagaccctctct

SEQ ID NO: 1585771 - DNA, 25 bp, Homo sapien
tgggtcgaagcccttcaggattcca

SEQ ID NO: 1585772 - DNA, 25 bp, Homo sapien
aggttgaggagtgggtcgaagccct

SEQ ID NO: 1585773 - DNA, 25 bp, Homo sapien
atggtgccgtccagcacaaggttga

SEQ ID NO: 1585774 - DNA, 25 bp, Homo sapien
tggtgccgtccagcacaaggttgag

SEQ ID NO: 1585775 - DNA, 25 bp, Homo sapien
acgtgtacgcggtgggaccaccagc

SEQ ID NO: 1585776 - DNA, 25 bp, Homo sapien
gaggcagcttcggtaatgagtccat

SEQ ID NO: 1585777 - DNA, 25 bp, Homo sapien
tgtaatttccacatcgtgagacagt

SEQ ID NO: 1585778 - DNA, 25 bp, Homo sapien
aagagaaggcatgagatccgtcctg

SEQ ID NO: 1585779 - DNA, 25 bp, Homo sapien
ggctgcgcaccgtgagatcccattt

SEQ ID NO: 1585780 - DNA, 25 bp, Homo sapien
gtgatgactgcgctgcctgacctgt

SEQ ID NO: 1585781 - DNA, 25 bp, Homo sapien
tctgacccggtggtgatctctgcca

SEQ ID NO: 1585782 - DNA, 25 bp, Homo sapien
caacttaggttagggctctctgacc

SEQ ID NO: 1585783 - DNA, 25 bp, Homo sapien
cgcccacgccaatctcaggaagcag

SEQ ID NO: 1585784 - DNA, 25 bp, Homo sapien
gcccacgccaatctcaggaagcagg

SEQ ID NO: 1585785 - DNA, 25 bp, Homo sapien
tgagcactgaggtaggtaggtctct

SEQ ID NO: 1585786 - DNA, 25 bp, Homo sapien
agatgcagatgttcaggtccttggc

SEQ ID NO: 1585787 - DNA, 25 bp, Homo sapien
tgcagatgttcaggtccttggcacc

SEQ ID NO: 1585788 - DNA, 25 bp, Homo sapien
tctctaacatggagccaaggtgccc

SEQ ID NO: 1585789 - DNA, 25 bp, Homo sapien
ccaagaggctattgaataagtgacg

SEQ ID NO: 1585790 - DNA, 25 bp, Homo sapien
taggagaaggcagctcacttgccca

SEQ ID NO: 1585791 - DNA, 25 bp, Homo sapien
gagagctgcctcaattacattacat

SEQ ID NO: 1585792 - DNA, 25 bp, Homo sapien
cagttgtctacaatccagggacaaa

SEQ ID NO: 1585793 - DNA, 25 bp, Homo sapien
tacaaatattagccgggcgtggtgg

SEQ ID NO: 1585794 - DNA, 25 bp, Homo sapien
aatacaaatattagccgggcgtggt

SEQ ID NO: 1585795 - DNA, 25 bp, Homo sapien
aaaatacaaatattagccgggcgtg

SEQ ID NO: 1585796 - DNA, 25 bp, Homo sapien
ctggccaacatggcctctctactaa

SEQ ID NO: 1585797 - DNA, 25 bp, Homo sapien
aaagaggtgcttccgcatgcgtcct

SEQ ID NO: 1585798 - DNA, 25 bp, Homo sapien
ggtgcttccgcatgcgtcctcatca

SEQ ID NO: 1585799 - DNA, 25 bp, Homo sapien
gaggtgcttccgcatgcgtcctcat

SEQ ID NO: 1585800 - DNA, 25 bp, Homo sapien
taaaagaggtgcttccgcatgcgtc

SEQ ID NO: 1585801 - DNA, 25 bp, Homo sapien
tggacaagtccaagatgctctcctt

SEQ ID NO: 1585802 - DNA, 25 bp, Homo sapien
gatcgtcttgtcgatgtacttggac

SEQ ID NO: 1585803 - DNA, 25 bp, Homo sapien
ctggaactttacccggatcgtcttg

SEQ ID NO: 1585804 - DNA, 25 bp, Homo sapien
tacttggacaagtccaagatgctct

SEQ ID NO: 1585805 - DNA, 25 bp, Homo sapien
ctgcggggaaagcagagcgcatgag

SEQ ID NO: 1585806 - DNA, 25 bp, Homo sapien
atgagacctggagcgcggcccgagc

SEQ ID NO: 1585807 - DNA, 25 bp, Homo sapien
aaagcagagcgcatgagacctggag

SEQ ID NO: 1585808 - DNA, 25 bp, Homo sapien
cggggaaagcagagcgcatgagacc

SEQ ID NO: 1585809 - DNA, 25 bp, Homo sapien
gccgtgtggctcttcgcaggcaccg

SEQ ID NO: 1585810 - DNA, 25 bp, Homo sapien
cttgtcgcgccgtgtggctcttcgc

SEQ ID NO: 1585811 - DNA, 25 bp, Homo sapien
cgcgccgtgtggctcttcgcaggca

SEQ ID NO: 1585812 - DNA, 25 bp, Homo sapien
tgtcgcgccgtgtggctcttcgcag

SEQ ID NO: 1585813 - DNA, 25 bp, Homo sapien
gggcgttgctgggaaacatctgccg

SEQ ID NO: 1585814 - DNA, 25 bp, Homo sapien
cggcgcatgcgtggcccggggtctc

SEQ ID NO: 1585815 - DNA, 25 bp, Homo sapien
ctgccgttggttgcggcgggcaccg

SEQ ID NO: 1585816 - DNA, 25 bp, Homo sapien
tctcggggcgttgctgggaaacatc

SEQ ID NO: 1585817 - DNA, 25 bp, Homo sapien
acacactcacgttctcattcgcgtg

SEQ ID NO: 1585818 - DNA, 25 bp, Homo sapien
cattcgcgtgattccgttctctctc

SEQ ID NO: 1585819 - DNA, 25 bp, Homo sapien
acacagactcatgcactctcattcg

SEQ ID NO: 1585820 - DNA, 25 bp, Homo sapien
tgattccgttctctctccacacaga

SEQ ID NO: 1585821 - DNA, 25 bp, Homo sapien
ttctctctccacacacactcacgct

SEQ ID NO: 1585822 - DNA, 25 bp, Homo sapien
tctctccacacacactcacgctctc

SEQ ID NO: 1585823 - DNA, 25 bp, Homo sapien
gttctctctccacacacactcacgc

SEQ ID NO: 1585824 - DNA, 25 bp, Homo sapien
ttgattccgttctctctccacacac

SEQ ID NO: 1585825 - DNA, 25 bp, Homo sapien
tccacacacactcgtgttctcattc

SEQ ID NO: 1585826 - DNA, 25 bp, Homo sapien
attcgcttgattccgttctctctct

SEQ ID NO: 1585827 - DNA, 25 bp, Homo sapien
ctctccacacacactcgtgttctca

SEQ ID NO: 1585828 - DNA, 25 bp, Homo sapien
ctctctccacacacactcgtgttct

SEQ ID NO: 1585829 - DNA, 25 bp, Homo sapien
ggatggcgcctcattttgaccctgc

SEQ ID NO: 1585830 - DNA, 25 bp, Homo sapien
cacctgtgccgatggacagggtcct

SEQ ID NO: 1585831 - DNA, 25 bp, Homo sapien
tgcccgtaggttatggagccggccc

SEQ ID NO: 1585832 - DNA, 25 bp, Homo sapien
aaatcacgcacgtccgaggagatgg

SEQ ID NO: 1585833 - DNA, 25 bp, Homo sapien
gtttctgtcaagtcagtcgtcccca

SEQ ID NO: 1585834 - DNA, 25 bp, Homo sapien
gagtaatggcgccttcactgaagcc

SEQ ID NO: 1585835 - DNA, 25 bp, Homo sapien
ggtgagccctgatcccttacaaaaa

SEQ ID NO: 1585836 - DNA, 25 bp, Homo sapien
ttgagtgcggcctccagactcgagt

SEQ ID NO: 1585837 - DNA, 25 bp, Homo sapien
gattctctccgtctgtatgggaagg

SEQ ID NO: 1585838 - DNA, 25 bp, Homo sapien
cactgggcctgatacaacgtggcac

SEQ ID NO: 1585839 - DNA, 25 bp, Homo sapien
gaatgatgccagcacataccctggg

SEQ ID NO: 1585840 - DNA, 25 bp, Homo sapien
aactcaagaaggttccagggctggg

SEQ ID NO: 1585841 - DNA, 25 bp, Homo sapien
ttcttgggcctcgtagcactggtgt

SEQ ID NO: 1585842 - DNA, 25 bp, Homo sapien
cctgccagaggtaggactgaaagac

SEQ ID NO: 1585843 - DNA, 25 bp, Homo sapien
gatgtcaatgatcagccccaggtgc

SEQ ID NO: 1585844 - DNA, 25 bp, Homo sapien
tatttgggtcacgttttggcctgcc

SEQ ID NO: 1585845 - DNA, 25 bp, Homo sapien
tagaaaatgtttgccggcggccaca

SEQ ID NO: 1585846 - DNA, 25 bp, Homo sapien
acagagactggcccttaaagctgaa

SEQ ID NO: 1585847 - DNA, 25 bp, Homo sapien
cagagactggcccttaaagctgaaa

SEQ ID NO: 1585848 - DNA, 25 bp, Homo sapien
aaatgtttgccggcggccacatgtg

SEQ ID NO: 1585849 - DNA, 25 bp, Homo sapien
gcctttttggctctggaggaatttc

SEQ ID NO: 1585850 - DNA, 25 bp, Homo sapien
tctggaggaatttccactccacagc

SEQ ID NO: 1585851 - DNA, 25 bp, Homo sapien
ggctctggaggaatttccactccac

SEQ ID NO: 1585852 - DNA, 25 bp, Homo sapien
ctggaggaatttccactccacagcc

SEQ ID NO: 1585853 - DNA, 25 bp, Homo sapien
tctacgtgaaagcaacaggagcagc

SEQ ID NO: 1585854 - DNA, 25 bp, Homo sapien
cagatagtgaaaatgcggctcccag

SEQ ID NO: 1585855 - DNA, 25 bp, Homo sapien
caggtgtctatacccgggtggcagc

SEQ ID NO: 1585856 - DNA, 25 bp, Homo sapien
ggatgcattttggtaccaccctttg

SEQ ID NO: 1585857 - DNA, 25 bp, Homo sapien
gctgtccgcccagaatatgaggctg

SEQ ID NO: 1585858 - DNA, 25 bp, Homo sapien
gcaggcagtacgtacatgcggaccc

SEQ ID NO: 1585859 - DNA, 25 bp, Homo sapien
aatttatttgcccatccgcaggagg

SEQ ID NO: 1585860 - DNA, 25 bp, Homo sapien
caactccgaagtccagacaagctgt

SEQ ID NO: 1585861 - DNA, 25 bp, Homo sapien
ttgtaggcgcgagacacggtgttcc

SEQ ID NO: 1585862 - DNA, 25 bp, Homo sapien
ttccaggcgtccatgtagcggtcca

SEQ ID NO: 1585863 - DNA, 25 bp, Homo sapien
agcggtccatgcacatggcgatgca

SEQ ID NO: 1585864 - DNA, 25 bp, Homo sapien
gttcccgctgcagccgcgagttgta

SEQ ID NO: 1585865 - DNA, 25 bp, Homo sapien
cacttccggaaacacttgtccgtca

SEQ ID NO: 1585866 - DNA, 25 bp, Homo sapien
ccctatacacttccggaaacacttg

SEQ ID NO: 1585867 - DNA, 25 bp, Homo sapien
tccggaaacacttgtccgtcatcct

SEQ ID NO: 1585868 - DNA, 25 bp, Homo sapien
tgctcggagttgtccagggagcccc

SEQ ID NO: 1585869 - DNA, 25 bp, Homo sapien
tggccacggcgatctgcactttcac

SEQ ID NO: 1585870 - DNA, 25 bp, Homo sapien
cagctcctgcgcgttggccacggcg

SEQ ID NO: 1585871 - DNA, 25 bp, Homo sapien
gttggccacggcgatctgcactttc

SEQ ID NO: 1585872 - DNA, 25 bp, Homo sapien
agctcctgcgcgttggccacggcga

SEQ ID NO: 1585873 - DNA, 25 bp, Homo sapien
gcttgtgcaacagcgtcggaggctc

SEQ ID NO: 1585874 - DNA, 25 bp, Homo sapien
gtctatacagcgtgttgccgccggg

SEQ ID NO: 1585875 - DNA, 25 bp, Homo sapien
gactcgtaactaactgcgccggaag

SEQ ID NO: 1585876 - DNA, 25 bp, Homo sapien
cggtcgcatcacgtgacgaagagtc

SEQ ID NO: 1585877 - DNA, 25 bp, Homo sapien
agggtcccatgcatcgcctgggtcc

SEQ ID NO: 1585878 - DNA, 25 bp, Homo sapien
tgtttacactagctacactagccag

SEQ ID NO: 1585879 - DNA, 25 bp, Homo sapien
catgcatcgcctgggtcctgtttac

SEQ ID NO: 1585880 - DNA, 25 bp, Homo sapien
gggtcctgtttacactagctacact

SEQ ID NO: 1585881 - DNA, 25 bp, Homo sapien
gaggagtccctcagatctttaacaa

SEQ ID NO: 1585882 - DNA, 25 bp, Homo sapien
ctttaacaaagaactgccgcgtgca

SEQ ID NO: 1585883 - DNA, 25 bp, Homo sapien
catgatcggattctgggtcagcccg

SEQ ID NO: 1585884 - DNA, 25 bp, Homo sapien
tctgaaatgaaagtccatgccagcc

SEQ ID NO: 1585885 - DNA, 25 bp, Homo sapien
gatggtttcgcatcgttctaagcgg

SEQ ID NO: 1585886 - DNA, 25 bp, Homo sapien
tgcaaattgtttcccaggccataaa

SEQ ID NO: 1585887 - DNA, 25 bp, Homo sapien
cacgggcttacacagagggatggtt

SEQ ID NO: 1585888 - DNA, 25 bp, Homo sapien
taagcggcacacagctaagcgtatt

SEQ ID NO: 1585889 - DNA, 25 bp, Homo sapien
ggtcaacatggtggcgttccctgca

SEQ ID NO: 1585890 - DNA, 25 bp, Homo sapien
tgaattcctacgcagtttccgcgct

SEQ ID NO: 1585891 - DNA, 25 bp, Homo sapien
tatctacatgggaccgggacttctg

SEQ ID NO: 1585892 - DNA, 25 bp, Homo sapien
gaaatgctttggtaagatgcgcccc

SEQ ID NO: 1585893 - DNA, 25 bp, Homo sapien
tcacatcacgtagcagcctcttgag

SEQ ID NO: 1585894 - DNA, 25 bp, Homo sapien
acgtagcagcctcttgaggtggtcc

SEQ ID NO: 1585895 - DNA, 25 bp, Homo sapien
catcacgtagcagcctcttgaggtg

SEQ ID NO: 1585896 - DNA, 25 bp, Homo sapien
gcctcttgaggtggtcctcgggtcc

SEQ ID NO: 1585897 - DNA, 25 bp, Homo sapien
aacaacagtgtctatttctagagcc

SEQ ID NO: 1585898 - DNA, 25 bp, Homo sapien
aggaaggtcggccatgatcagggcc

SEQ ID NO: 1585899 - DNA, 25 bp, Homo sapien
tgtgagctacacattctgttctggg

SEQ ID NO: 1585900 - DNA, 25 bp, Homo sapien
cagtcacaggaacttgcgacgcacg

SEQ ID NO: 1585901 - DNA, 25 bp, Homo sapien
acgcatcaccgaggacttcttcaca

SEQ ID NO: 1585902 - DNA, 25 bp, Homo sapien
aaaagatcctcctcgccaaactcgg

SEQ ID NO: 1585903 - DNA, 25 bp, Homo sapien
ttctcattctcacgcatcaccgagg

SEQ ID NO: 1585904 - DNA, 25 bp, Homo sapien
tggaaaagatcctcctcgccaaact

SEQ ID NO: 1585905 - DNA, 25 bp, Homo sapien
ttaaccaggacggtgcggaagctct

SEQ ID NO: 1585906 - DNA, 25 bp, Homo sapien
tcgccatccgcgttaaccaggacgg

SEQ ID NO: 1585907 - DNA, 25 bp, Homo sapien
catccgcgttaaccaggacggtgcg

SEQ ID NO: 1585908 - DNA, 25 bp, Homo sapien
acggtgcggaagctctcgcccgtgc

SEQ ID NO: 1585909 - DNA, 25 bp, Homo sapien
tggccggcgcgcaggatgtacttgg

SEQ ID NO: 1585910 - DNA, 25 bp, Homo sapien
caggatgtacttgggcgtgaacttg

SEQ ID NO: 1585911 - DNA, 25 bp, Homo sapien
cttgggcgtgaacttgtaggcgatc

SEQ ID NO: 1585912 - DNA, 25 bp, Homo sapien
cgtgaacttgtaggcgatctcctcc

SEQ ID NO: 1585913 - DNA, 25 bp, Homo sapien
atgctgacgctacccgaggccgagg

SEQ ID NO: 1585914 - DNA, 25 bp, Homo sapien
tgagctgcacaaacttgccctccag

SEQ ID NO: 1585915 - DNA, 25 bp, Homo sapien
caggacgcttgggccgctgcccaag

SEQ ID NO: 1585916 - DNA, 25 bp, Homo sapien
gatctcctcgatgctgacgctaccc

SEQ ID NO: 1585917 - DNA, 25 bp, Homo sapien
tggctcgtgagacggtgacgcgcga

SEQ ID NO: 1585918 - DNA, 25 bp, Homo sapien
cccggtggcggacaagctgccgctg

SEQ ID NO: 1585919 - DNA, 25 bp, Homo sapien
gctgctgctcgaggtggctcgtgag

SEQ ID NO: 1585920 - DNA, 25 bp, Homo sapien
tcgaggtggctcgtgagacggtgac

SEQ ID NO: 1585921 - DNA, 25 bp, Homo sapien
caggagcttccggtaggcgttgatc

SEQ ID NO: 1585922 - DNA, 25 bp, Homo sapien
gctgctgctgcatcacgtcccgcat

SEQ ID NO: 1585923 - DNA, 25 bp, Homo sapien
tccagctcccgaatgcgatcttcag

SEQ ID NO: 1585924 - DNA, 25 bp, Homo sapien
ccgaatgcgatcttcagcggcactg

SEQ ID NO: 1585925 - DNA, 25 bp, Homo sapien
gccttgtcgttctggtcagagctca

SEQ ID NO: 1585926 - DNA, 25 bp, Homo sapien
ctggccgccttgtcgttctggtcag

SEQ ID NO: 1585927 - DNA, 25 bp, Homo sapien
tcagctcctcgcgagccgcactggc

SEQ ID NO: 1585928 - DNA, 25 bp, Homo sapien
tgagggactccaggcgcatgcgggc

SEQ ID NO: 1585929 - DNA, 25 bp, Homo sapien
ctgtggggagacgggcgggtgagtg

SEQ ID NO: 1585930 - DNA, 25 bp, Homo sapien
ttgaagtcgtactcctgctgccggc

SEQ ID NO: 1585931 - DNA, 25 bp, Homo sapien
catcttgaagtcgtactcctgctgc

SEQ ID NO: 1585932 - DNA, 25 bp, Homo sapien
tgctcgtcgtgctggctccgcagct

SEQ ID NO: 1585933 - DNA, 25 bp, Homo sapien
ccagcttgtagagccgcacttgctc

SEQ ID NO: 1585934 - DNA, 25 bp, Homo sapien
tgcaccgccttcgtgggtcttttcc

SEQ ID NO: 1585935 - DNA, 25 bp, Homo sapien
gtgagtctcttcacgggctgtctca

SEQ ID NO: 1585936 - DNA, 25 bp, Homo sapien
cgcagctcctgagcggcctggacat

SEQ ID NO: 1585937 - DNA, 25 bp, Homo sapien
tgtgacagcacaattggttctaaag

SEQ ID NO: 1585938 - DNA, 25 bp, Homo sapien
tccaggtccacacgcatcagcgtct

SEQ ID NO: 1585939 - DNA, 25 bp, Homo sapien
ggtccacacgcatcagcgtctcctt

SEQ ID NO: 1585940 - DNA, 25 bp, Homo sapien
aggctctggcagcggttctccaggt

SEQ ID NO: 1585941 - DNA, 25 bp, Homo sapien
gcggttctccaggtccacacgcatc

SEQ ID NO: 1585942 - DNA, 25 bp, Homo sapien
gtaagctcgccctccctcttcttgg

SEQ ID NO: 1585943 - DNA, 25 bp, Homo sapien
tccaggccgcgcttgtcgctgaggg

SEQ ID NO: 1585944 - DNA, 25 bp, Homo sapien
acctcgctccggtggaacagggact

SEQ ID NO: 1585945 - DNA, 25 bp, Homo sapien
agctcagccacgtcactctccaggc

SEQ ID NO: 1585946 - DNA, 25 bp, Homo sapien
ctcttgttgacctcgtccaactctg

SEQ ID NO: 1585947 - DNA, 25 bp, Homo sapien
tcccaatctctatctgcagccgggc

SEQ ID NO: 1585948 - DNA, 25 bp, Homo sapien
tgacctcgtccaactctgccctcag

SEQ ID NO: 1585949 - DNA, 25 bp, Homo sapien
cccaatctctatctgcagccgggca

SEQ ID NO: 1585950 - DNA, 25 bp, Homo sapien
tcgtacagcgccttgatgccactca

SEQ ID NO: 1585951 - DNA, 25 bp, Homo sapien
catcggccagctccgactcgtacag

SEQ ID NO: 1585952 - DNA, 25 bp, Homo sapien
aggactctccgggcatcggccagct

SEQ ID NO: 1585953 - DNA, 25 bp, Homo sapien
ctctcgagccgtctcatccaggact

SEQ ID NO: 1585954 - DNA, 25 bp, Homo sapien
tcttgagcaggagccggtcgttctc

SEQ ID NO: 1585955 - DNA, 25 bp, Homo sapien
tccagcgcgcggacgcggtcgatgt

SEQ ID NO: 1585956 - DNA, 25 bp, Homo sapien
ctgagatcttgagcaggagccggtc

SEQ ID NO: 1585957 - DNA, 25 bp, Homo sapien
acgcggtcgatgtagtgcgccaggc

SEQ ID NO: 1585958 - DNA, 25 bp, Homo sapien
gcgcgtgggcgacagcggcgtggcg

SEQ ID NO: 1585959 - DNA, 25 bp, Homo sapien
gcgtgggcgacagcggcgtggcggg

SEQ ID NO: 1585960 - DNA, 25 bp, Homo sapien
cgacaggcgcgtgggcgacagcggc

SEQ ID NO: 1585961 - DNA, 25 bp, Homo sapien
aggcgcgtgggcgacagcggcgtgg

SEQ ID NO: 1585962 - DNA, 25 bp, Homo sapien
cctgcgctgctcccgacggcggccc

SEQ ID NO: 1585963 - DNA, 25 bp, Homo sapien
tcaatccgcgccgccggctgcaaga

SEQ ID NO: 1585964 - DNA, 25 bp, Homo sapien
aatccgcgccgccggctgcaagatg

SEQ ID NO: 1585965 - DNA, 25 bp, Homo sapien
caatccgcgccgccggctgcaagat

SEQ ID NO: 1585966 - DNA, 25 bp, Homo sapien
tttttaataattagccacatgtgct

SEQ ID NO: 1585967 - DNA, 25 bp, Homo sapien
agaatggcttgcatccaggagttca

SEQ ID NO: 1585968 - DNA, 25 bp, Homo sapien
taataattagccacatgtgctggca

SEQ ID NO: 1585969 - DNA, 25 bp, Homo sapien
ttaataattagccacatgtgctggc

SEQ ID NO: 1585970 - DNA, 25 bp, Homo sapien
ccatacccagcctttgcccgtgctg

SEQ ID NO: 1585971 - DNA, 25 bp, Homo sapien
aggagcgccgtttcctgcctgactg

SEQ ID NO: 1585972 - DNA, 25 bp, Homo sapien
gtgctgttccatccgccaggagcgc

SEQ ID NO: 1585973 - DNA, 25 bp, Homo sapien
tcagtcttgcgctctgcaaaccggg

SEQ ID NO: 1585974 - DNA, 25 bp, Homo sapien
tgcagacccattactcagacgggaa

SEQ ID NO: 1585975 - DNA, 25 bp, Homo sapien
tgacagctgatgtgtattgggctct

SEQ ID NO: 1585976 - DNA, 25 bp, Homo sapien
aggccgggagaagcgaaatcaccca

SEQ ID NO: 1585977 - DNA, 25 bp, Homo sapien
tatgccatgctctgcaaaccagcga

SEQ ID NO: 1585978 - DNA, 25 bp, Homo sapien
gaactcccagtttgcgaattataga

SEQ ID NO: 1585979 - DNA, 25 bp, Homo sapien
accacactttgggacttgggagctg

SEQ ID NO: 1585980 - DNA, 25 bp, Homo sapien
gctggcgtctgcatacgagagactt

SEQ ID NO: 1585981 - DNA, 25 bp, Homo sapien
tgttattcgaaccactgagagcgag

SEQ ID NO: 1585982 - DNA, 25 bp, Homo sapien
gtgaggccctacatcactctttcca

SEQ ID NO: 1585983 - DNA, 25 bp, Homo sapien
ttagggccggctcacccgtgaggcc

SEQ ID NO: 1585984 - DNA, 25 bp, Homo sapien
gccaggagtggcacattcttagggc

SEQ ID NO: 1585985 - DNA, 25 bp, Homo sapien
tggcacattcttagggccggctcac

SEQ ID NO: 1585986 - DNA, 25 bp, Homo sapien
tacgcaggggcaatactaatctttg

SEQ ID NO: 1585987 - DNA, 25 bp, Homo sapien
gcatccttccaactttttgaatatg

SEQ ID NO: 1585988 - DNA, 25 bp, Homo sapien
tgaaatgcttcatgtcatccttacg

SEQ ID NO: 1585989 - DNA, 25 bp, Homo sapien
ggcaatactaatctttgcatccttc

SEQ ID NO: 1585990 - DNA, 25 bp, Homo sapien
tggtatcgacaactccacacaatat

SEQ ID NO: 1585991 - DNA, 25 bp, Homo sapien
tattaaaacactgcgagaaagtggg

SEQ ID NO: 1585992 - DNA, 25 bp, Homo sapien
aagggagagtgaggctttttattgt

SEQ ID NO: 1585993 - DNA, 25 bp, Homo sapien
ttttattgtgtatgaattcacgtgg

SEQ ID NO: 1585994 - DNA, 25 bp, Homo sapien
tcccaatgcagatggcatagaacct

SEQ ID NO: 1585995 - DNA, 25 bp, Homo sapien
gcatagaacctgctagaaccacagg

SEQ ID NO: 1585996 - DNA, 25 bp, Homo sapien
gcagcggttccgtggacagaggagg

SEQ ID NO: 1585997 - DNA, 25 bp, Homo sapien
ctttacgaaggttagatgggcagcg

SEQ ID NO: 1585998 - DNA, 25 bp, Homo sapien
ggcctggcctcaggccgtggacttt

SEQ ID NO: 1585999 - DNA, 25 bp, Homo sapien
gcctcaggccgtggactttttaata

SEQ ID NO: 1586000 - DNA, 25 bp, Homo sapien
tggcctcaggccgtggactttttaa

SEQ ID NO: 1586001 - DNA, 25 bp, Homo sapien
cctggcctcaggccgtggacttttt

SEQ ID NO: 1586002 - DNA, 25 bp, Homo sapien
aaacatgcgttcaccccagggattc

SEQ ID NO: 1586003 - DNA, 25 bp, Homo sapien
tcccctggcgtagctgagagaggct

SEQ ID NO: 1586004 - DNA, 25 bp, Homo sapien
cccaggctacagaaggagaaacggc

SEQ ID NO: 1586005 - DNA, 25 bp, Homo sapien
agtttacctggaacgctcagcccgt

SEQ ID NO: 1586006 - DNA, 25 bp, Homo sapien
aaatccaaaaacatgatgggccggg

SEQ ID NO: 1586007 - DNA, 25 bp, Homo sapien
catgcttaaaacacactgggcgcgg

SEQ ID NO: 1586008 - DNA, 25 bp, Homo sapien
caaaaagatcgggttcgagcgacag

SEQ ID NO: 1586009 - DNA, 25 bp, Homo sapien
tctcggcacgggttcttagacgcct

SEQ ID NO: 1586010 - DNA, 25 bp, Homo sapien
ggttctccgaggcagggactccgac

SEQ ID NO: 1586011 - DNA, 25 bp, Homo sapien
gggttctccgaggcagggactccga

SEQ ID NO: 1586012 - DNA, 25 bp, Homo sapien
atgttgctcacagtagctcatgagg

SEQ ID NO: 1586013 - DNA, 25 bp, Homo sapien
gctcacagtagctcatgaggtcaga

SEQ ID NO: 1586014 - DNA, 25 bp, Homo sapien
gtcgttccgggcatgttgctcacag

SEQ ID NO: 1586015 - DNA, 25 bp, Homo sapien
ggtcgttccgggcatgttgctcaca

SEQ ID NO: 1586016 - DNA, 25 bp, Homo sapien
cttgatgcgctcaatcccggcttct

SEQ ID NO: 1586017 - DNA, 25 bp, Homo sapien
tgggctatgttgttagtggctgaca

SEQ ID NO: 1586018 - DNA, 25 bp, Homo sapien
aatcccggcttctatgcgtagctgt

SEQ ID NO: 1586019 - DNA, 25 bp, Homo sapien
cagcttccgggcctgggctatgttg

SEQ ID NO: 1586020 - DNA, 25 bp, Homo sapien
tgtctgccatcagctctgggccccg

SEQ ID NO: 1586021 - DNA, 25 bp, Homo sapien
tctgccatcagctctgggccccgtt

SEQ ID NO: 1586022 - DNA, 25 bp, Homo sapien
ctgccatcagctctgggccccgttg

SEQ ID NO: 1586023 - DNA, 25 bp, Homo sapien
gtctgccatcagctctgggccccgt

SEQ ID NO: 1586024 - DNA, 25 bp, Homo sapien
tcctgacggtcgggctctgcctcgg

SEQ ID NO: 1586025 - DNA, 25 bp, Homo sapien
cggtcgggctctgcctcggtgcaca

SEQ ID NO: 1586026 - DNA, 25 bp, Homo sapien
gctccctcctgacggtcgggctctg

SEQ ID NO: 1586027 - DNA, 25 bp, Homo sapien
acggctccctcctgacggtcgggct

SEQ ID NO: 1586028 - DNA, 25 bp, Homo sapien
tccaatcccatcaaagaactgcctt

SEQ ID NO: 1586029 - DNA, 25 bp, Homo sapien
cagctccaatcccatcaaagaactg

SEQ ID NO: 1586030 - DNA, 25 bp, Homo sapien
caccctgtggcctcatgagctcagc

SEQ ID NO: 1586031 - DNA, 25 bp, Homo sapien
tcccatcaaagaactgccttctctg

SEQ ID NO: 1586032 - DNA, 25 bp, Homo sapien
tttaatggcttctagcaccaggtga

SEQ ID NO: 1586033 - DNA, 25 bp, Homo sapien
tgatgcgggcttcaaatgttatttc

SEQ ID NO: 1586034 - DNA, 25 bp, Homo sapien
ccttctttatgatgcgggcttcaaa

SEQ ID NO: 1586035 - DNA, 25 bp, Homo sapien
cttctagcaccaggtgaccttgact

SEQ ID NO: 1586036 - DNA, 25 bp, Homo sapien
tcaccagcagggagagagcatgcag

SEQ ID NO: 1586037 - DNA, 25 bp, Homo sapien
gcatgcagccggtggaggcttctga

SEQ ID NO: 1586038 - DNA, 25 bp, Homo sapien
ggagagagcatgcagccggtggagg

SEQ ID NO: 1586039 - DNA, 25 bp, Homo sapien
gcttctgagagctggccggggcggc

SEQ ID NO: 1586040 - DNA, 25 bp, Homo sapien
accaagccccagcttctgtgactgt

SEQ ID NO: 1586041 - DNA, 25 bp, Homo sapien
tcccccagggagagtgaccatggcc

SEQ ID NO: 1586042 - DNA, 25 bp, Homo sapien
gcttctgtgactgtcccccagggag

SEQ ID NO: 1586043 - DNA, 25 bp, Homo sapien
gcagatgagcaggtggcctacacag

SEQ ID NO: 1586044 - DNA, 25 bp, Homo sapien
tttagttttcccaggaatcacagct

SEQ ID NO: 1586045 - DNA, 25 bp, Homo sapien
ttttagttttcccaggaatcacagc

SEQ ID NO: 1586046 - DNA, 25 bp, Homo sapien
gttttcccaggaatcacagcttgct

SEQ ID NO: 1586047 - DNA, 25 bp, Homo sapien
tagttttcccaggaatcacagcttg

SEQ ID NO: 1586048 - DNA, 25 bp, Homo sapien
tccttatctcggtgaagccttgaat

SEQ ID NO: 1586049 - DNA, 25 bp, Homo sapien
acatccatgcatattctctgtggat

SEQ ID NO: 1586050 - DNA, 25 bp, Homo sapien
tggaaaccccgtccgcattagcagt

SEQ ID NO: 1586051 - DNA, 25 bp, Homo sapien
gaattccagaactgtttcatcgcct

SEQ ID NO: 1586052 - DNA, 25 bp, Homo sapien
tgtgaaaggctatcagctccagctg

SEQ ID NO: 1586053 - DNA, 25 bp, Homo sapien
tgctgggccctatggtaattccgtg

SEQ ID NO: 1586054 - DNA, 25 bp, Homo sapien
tgtttatccactgatgggcgcctgg

SEQ ID NO: 1586055 - DNA, 25 bp, Homo sapien
tgtgaatctgacgactctagggact

SEQ ID NO: 1586056 - DNA, 25 bp, Homo sapien
gcctcggatgacgtgcaggcgtgca

SEQ ID NO: 1586057 - DNA, 25 bp, Homo sapien
ggatgacgtgcaggcgtgcagcccg

SEQ ID NO: 1586058 - DNA, 25 bp, Homo sapien
cagtggggcggcctcggatgacgtg

SEQ ID NO: 1586059 - DNA, 25 bp, Homo sapien
gtgcagcccggacggccccagggga

SEQ ID NO: 1586060 - DNA, 25 bp, Homo sapien
cggcgccagacctgcttgtctgtcg

SEQ ID NO: 1586061 - DNA, 25 bp, Homo sapien
gccagacctgcttgtctgtcgcttg

SEQ ID NO: 1586062 - DNA, 25 bp, Homo sapien
tctgtcgcttgtctgcgagaggcca

SEQ ID NO: 1586063 - DNA, 25 bp, Homo sapien
acctgcttgtctgtcgcttgtctgc

SEQ ID NO: 1586064 - DNA, 25 bp, Homo sapien
cagcacggctggctcccgtccgggt

SEQ ID NO: 1586065 - DNA, 25 bp, Homo sapien
atttcactgccccagcgtaacccag

SEQ ID NO: 1586066 - DNA, 25 bp, Homo sapien
accatgtggctaagtttgttttgaa

SEQ ID NO: 1586067 - DNA, 25 bp, Homo sapien
gccccagcgtaacccagagtccagg

SEQ ID NO: 1586068 - DNA, 25 bp, Homo sapien
gtcagctcgggggtcggtacgcagg

SEQ ID NO: 1586069 - DNA, 25 bp, Homo sapien
tcgggggtcggtacgcaggcggcca

SEQ ID NO: 1586070 - DNA, 25 bp, Homo sapien
gtgaggacaacagccggcgtcagct

SEQ ID NO: 1586071 - DNA, 25 bp, Homo sapien
cagaggctctggccggtgaggacaa

SEQ ID NO: 1586072 - DNA, 25 bp, Homo sapien
cctggcctcccagatgtcatttctt

SEQ ID NO: 1586073 - DNA, 25 bp, Homo sapien
gtcatttcttgcagctctcggagtc

SEQ ID NO: 1586074 - DNA, 25 bp, Homo sapien
ctggcctcccagatgtcatttcttg

SEQ ID NO: 1586075 - DNA, 25 bp, Homo sapien
ccgctgtttgactctggtcccctcc

SEQ ID NO: 1586076 - DNA, 25 bp, Homo sapien
ctccgctgtttgactctggtcccct

SEQ ID NO: 1586077 - DNA, 25 bp, Homo sapien
tccgctgtttgactctggtcccctc

SEQ ID NO: 1586078 - DNA, 25 bp, Homo sapien
tacagacatgcactgccgtactcag

SEQ ID NO: 1586079 - DNA, 25 bp, Homo sapien
tctatcgggcacataacaattttcc

SEQ ID NO: 1586080 - DNA, 25 bp, Homo sapien
caacattatcaagaggttgggcctc

SEQ ID NO: 1586081 - DNA, 25 bp, Homo sapien
tgcatacgcactacaacgtggatga

SEQ ID NO: 1586082 - DNA, 25 bp, Homo sapien
tctatatatttacaagccttcaagc

SEQ ID NO: 1586083 - DNA, 25 bp, Homo sapien
tatatatttacaagccttcaagctg

SEQ ID NO: 1586084 - DNA, 25 bp, Homo sapien
atatatttacaagccttcaagctgc

SEQ ID NO: 1586085 - DNA, 25 bp, Homo sapien
ctatatatttacaagccttcaagct

SEQ ID NO: 1586086 - DNA, 25 bp, Homo sapien
caatccttggagttctgtggtccat

SEQ ID NO: 1586087 - DNA, 25 bp, Homo sapien
acaatccttggagttctgtggtcca

SEQ ID NO: 1586088 - DNA, 25 bp, Homo sapien
aaacaatccttggagttctgtggtc

SEQ ID NO: 1586089 - DNA, 25 bp, Homo sapien
tttaaacaatccttggagttctgtg

SEQ ID NO: 1586090 - DNA, 25 bp, Homo sapien
aacacagcctgaagcacgcaggcca

SEQ ID NO: 1586091 - DNA, 25 bp, Homo sapien
caggccaggacgaggtctctctgag

SEQ ID NO: 1586092 - DNA, 25 bp, Homo sapien
acacagcctgaagcacgcaggccag

SEQ ID NO: 1586093 - DNA, 25 bp, Homo sapien
cacagcctgaagcacgcaggccagg

SEQ ID NO: 1586094 - DNA, 25 bp, Homo sapien
agcagatccagcactcccttcaggg

SEQ ID NO: 1586095 - DNA, 25 bp, Homo sapien
cagcagacaggaatgcgctgtgcag

SEQ ID NO: 1586096 - DNA, 25 bp, Homo sapien
ccctcctgcacgcttttaagcagat

SEQ ID NO: 1586097 - DNA, 25 bp, Homo sapien
gacaggaatgcgctgtgcagaagca

SEQ ID NO: 1586098 - DNA, 25 bp, Homo sapien
ccccaggacagcaatacgttcaggc

SEQ ID NO: 1586099 - DNA, 25 bp, Homo sapien
aacgacacggcacggaggctttcta

SEQ ID NO: 1586100 - DNA, 25 bp, Homo sapien
cacggaggctttctagggagcagtc

SEQ ID NO: 1586101 - DNA, 25 bp, Homo sapien
gttcaggcgacagcgacacagggca

SEQ ID NO: 1586102 - DNA, 25 bp, Homo sapien
actgggcggccactgtctggtctga

SEQ ID NO: 1586103 - DNA, 25 bp, Homo sapien
ggtcatgtggcgactccgcgttcag

SEQ ID NO: 1586104 - DNA, 25 bp, Homo sapien
catcaattctcaatgccaaggcgtt

SEQ ID NO: 1586105 - DNA, 25 bp, Homo sapien
ggtcaccccgtagccattggcagag

SEQ ID NO: 1586106 - DNA, 25 bp, Homo sapien
aaccgtgagaggacacacgtctgcg

SEQ ID NO: 1586107 - DNA, 25 bp, Homo sapien
tgatacttccgggtctgtggtcacc

SEQ ID NO: 1586108 - DNA, 25 bp, Homo sapien
cctcggaaaatgactgttacggact

SEQ ID NO: 1586109 - DNA, 25 bp, Homo sapien
aattcgacggtaagcacaagccagg

SEQ ID NO: 1586110 - DNA, 25 bp, Homo sapien
cccgtgtctccagcgggaacgtgaa

SEQ ID NO: 1586111 - DNA, 25 bp, Homo sapien
gaattcccgaacaaagctcctggtg

SEQ ID NO: 1586112 - DNA, 25 bp, Homo sapien
ggctggacccaaaccaattgattgt

SEQ ID NO: 1586113 - DNA, 25 bp, Homo sapien
gggcactagcaacactcaactcatg

SEQ ID NO: 1586114 - DNA, 25 bp, Homo sapien
cagggcccgtggacatgatgagata

SEQ ID NO: 1586115 - DNA, 25 bp, Homo sapien
gaaggtcctgctgattcggtcctgg

SEQ ID NO: 1586116 - DNA, 25 bp, Homo sapien
gagttcactgaaagggcgattatcc

SEQ ID NO: 1586117 - DNA, 25 bp, Homo sapien
gatgagatatcactcccctgattag

SEQ ID NO: 1586118 - DNA, 25 bp, Homo sapien
ccaaagaggatctagcagctccgat

SEQ ID NO: 1586119 - DNA, 25 bp, Homo sapien
taatctcaatgggacgctgtcatcg

SEQ ID NO: 1586120 - DNA, 25 bp, Homo sapien
ggcccacgggagatcagaaatcgca

SEQ ID NO: 1586121 - DNA, 25 bp, Homo sapien
catcacgggcagtctttccaaaagg

SEQ ID NO: 1586122 - DNA, 25 bp, Homo sapien
atcgggtccatttccacgtccctgg

SEQ ID NO: 1586123 - DNA, 25 bp, Homo sapien
taaagggccagcgacgggtcactct

SEQ ID NO: 1586124 - DNA, 25 bp, Homo sapien
tctctagggagaaaaacgaggagta

SEQ ID NO: 1586125 - DNA, 25 bp, Homo sapien
aaaagccactcatgattctctaggg

SEQ ID NO: 1586126 - DNA, 25 bp, Homo sapien
gagatcccgaaaccaagctccactc

SEQ ID NO: 1586127 - DNA, 25 bp, Homo sapien
tgcaggaggtctcgccgtctgcagc

SEQ ID NO: 1586128 - DNA, 25 bp, Homo sapien
ctgtgcaggaggtctcgccgtctgc

SEQ ID NO: 1586129 - DNA, 25 bp, Homo sapien
gtctgcagcaccgagatcccgaaac

SEQ ID NO: 1586130 - DNA, 25 bp, Homo sapien
ctacggctcttcacagtttatcaaa

SEQ ID NO: 1586131 - DNA, 25 bp, Homo sapien
acggctcttcacagtttatcaaaaa

SEQ ID NO: 1586132 - DNA, 25 bp, Homo sapien
tacggctcttcacagtttatcaaaa

SEQ ID NO: 1586133 - DNA, 25 bp, Homo sapien
cggctcttcacagtttatcaaaaac

SEQ ID NO: 1586134 - DNA, 25 bp, Homo sapien
tctgtcttcctttgtctctctcttt

SEQ ID NO: 1586135 - DNA, 25 bp, Homo sapien
tctctcttactctctttctgtcttc

SEQ ID NO: 1586136 - DNA, 25 bp, Homo sapien
tgtagagatggtgttatgccatatt

SEQ ID NO: 1586137 - DNA, 25 bp, Homo sapien
ctctttccttctttcttctttctct

SEQ ID NO: 1586138 - DNA, 25 bp, Homo sapien
ttccagatgaatgtagggtctcccc

SEQ ID NO: 1586139 - DNA, 25 bp, Homo sapien
gaaattccgcagcagggcagatgag

SEQ ID NO: 1586140 - DNA, 25 bp, Homo sapien
tcttcagatggtgcccttgaggccc

SEQ ID NO: 1586141 - DNA, 25 bp, Homo sapien
gagaaaaacactgcgtaatcccacg

SEQ ID NO: 1586142 - DNA, 25 bp, Homo sapien
tatttcctactaaagcaacgtggct

SEQ ID NO: 1586143 - DNA, 25 bp, Homo sapien
caagtcacggtacccacaaatgtcc

SEQ ID NO: 1586144 - DNA, 25 bp, Homo sapien
tatcaagatatgcatgccagcacca

SEQ ID NO: 1586145 - DNA, 25 bp, Homo sapien
ggataaggtacattcactgagggca

SEQ ID NO: 1586146 - DNA, 25 bp, Homo sapien
ccccatatagccagtattagaggcg

SEQ ID NO: 1586147 - DNA, 25 bp, Homo sapien
ctcagtcccccatatagccagtatt

SEQ ID NO: 1586148 - DNA, 25 bp, Homo sapien
tatagccagtattagaggcgcccgc

SEQ ID NO: 1586149 - DNA, 25 bp, Homo sapien
catatagccagtattagaggcgccc

SEQ ID NO: 1586150 - DNA, 25 bp, Homo sapien
tggaaaaatattgtatctgctccct

SEQ ID NO: 1586151 - DNA, 25 bp, Homo sapien
tccctgttgacaccagacactagaa

SEQ ID NO: 1586152 - DNA, 25 bp, Homo sapien
gcatttgtgactgttatgactcagg

SEQ ID NO: 1586153 - DNA, 25 bp, Homo sapien
cccactcagggtgtggattacaatg

SEQ ID NO: 1586154 - DNA, 25 bp, Homo sapien
tccatctcagggcacatgctacatt

SEQ ID NO: 1586155 - DNA, 25 bp, Homo sapien
caagagagtgggtgtgactgtggtc

SEQ ID NO: 1586156 - DNA, 25 bp, Homo sapien
cacatgctacattgaggaagtaaaa

SEQ ID NO: 1586157 - DNA, 25 bp, Homo sapien
gacgccaacactgtcacagcaagaa

SEQ ID NO: 1586158 - DNA, 25 bp, Homo sapien
ggatccgctgcctctgttcatcaag

SEQ ID NO: 1586159 - DNA, 25 bp, Homo sapien
gatgatacagccaaatccgcagcga

SEQ ID NO: 1586160 - DNA, 25 bp, Homo sapien
aaaaattcagtcaccgacaggagcc

SEQ ID NO: 1586161 - DNA, 25 bp, Homo sapien
caaccgtgtgaagacgcttagctgg

SEQ ID NO: 1586162 - DNA, 25 bp, Homo sapien
ccgcgcagccgaaccctccgccccg

SEQ ID NO: 1586163 - DNA, 25 bp, Homo sapien
gcgcagccgaaccctccgccccggc

SEQ ID NO: 1586164 - DNA, 25 bp, Homo sapien
gccgcgcagccgaaccctccgcccc

SEQ ID NO: 1586165 - DNA, 25 bp, Homo sapien
cgcgcagccgaaccctccgccccgg

SEQ ID NO: 1586166 - DNA, 25 bp, Homo sapien
gaggccttcagtcttgcaacagcaa

SEQ ID NO: 1586167 - DNA, 25 bp, Homo sapien
ctcatggctgcaggtacactcgact

SEQ ID NO: 1586168 - DNA, 25 bp, Homo sapien
tatgtctagagcgaaggctacacag

SEQ ID NO: 1586169 - DNA, 25 bp, Homo sapien
gagtcacagcaagcatggcctggca

SEQ ID NO: 1586170 - DNA, 25 bp, Homo sapien
tgttgaggctcatgttccggcgcgt

SEQ ID NO: 1586171 - DNA, 25 bp, Homo sapien
gactgcttgctggtgacggagaaca

SEQ ID NO: 1586172 - DNA, 25 bp, Homo sapien
ggtgcatttgcccttgacgcggtct

SEQ ID NO: 1586173 - DNA, 25 bp, Homo sapien
ccgaggtctccatgaaagcgcactt

SEQ ID NO: 1586174 - DNA, 25 bp, Homo sapien
gagggctggtgccagctgcaagaac

SEQ ID NO: 1586175 - DNA, 25 bp, Homo sapien
ggtgccagctgcaagaaccccagac

SEQ ID NO: 1586176 - DNA, 25 bp, Homo sapien
gggctggtgccagctgcaagaaccc

SEQ ID NO: 1586177 - DNA, 25 bp, Homo sapien
ggccgggagggctggtgccagctgc

SEQ ID NO: 1586178 - DNA, 25 bp, Homo sapien
cctgcccgctccggtgtccgctggc

SEQ ID NO: 1586179 - DNA, 25 bp, Homo sapien
tctaccagcgcatgaaacggttggc

SEQ ID NO: 1586180 - DNA, 25 bp, Homo sapien
cagtggctcctagcattgggtgaca

SEQ ID NO: 1586181 - DNA, 25 bp, Homo sapien
tggtcatagacaagagaagcccctg

SEQ ID NO: 1586182 - DNA, 25 bp, Homo sapien
tctatatcggatgggcgagacgacc

SEQ ID NO: 1586183 - DNA, 25 bp, Homo sapien
tggtgacagccgaccaaaagtggct

SEQ ID NO: 1586184 - DNA, 25 bp, Homo sapien
tcctctagagggaaggcgaagaagc

SEQ ID NO: 1586185 - DNA, 25 bp, Homo sapien
gaaagctcctttcgtgcctcctgag

SEQ ID NO: 1586186 - DNA, 25 bp, Homo sapien
caacgtggtgtcagaggctcctcta

SEQ ID NO: 1586187 - DNA, 25 bp, Homo sapien
ggcggcagggacaatggcgaggccg

SEQ ID NO: 1586188 - DNA, 25 bp, Homo sapien
cagggccacagtgctcgctcttggg

SEQ ID NO: 1586189 - DNA, 25 bp, Homo sapien
cgcggcctgtgtccggcccggggct

SEQ ID NO: 1586190 - DNA, 25 bp, Homo sapien
ctctgaggctcagggtgtaggatcg

SEQ ID NO: 1586191 - DNA, 25 bp, Homo sapien
ggatcatggcgcttacggtgaccgc

SEQ ID NO: 1586192 - DNA, 25 bp, Homo sapien
tctccaggtcgatgaaggacggctt

SEQ ID NO: 1586193 - DNA, 25 bp, Homo sapien
gtccgatccggcgttgaaggtctcc

SEQ ID NO: 1586194 - DNA, 25 bp, Homo sapien
tccttgcggaaggtcaggatcagct

SEQ ID NO: 1586195 - DNA, 25 bp, Homo sapien
agagagacctcgagaccaaagtgga

SEQ ID NO: 1586196 - DNA, 25 bp, Homo sapien
ctatgcgccaggatgaaatgtctca

SEQ ID NO: 1586197 - DNA, 25 bp, Homo sapien
ggcggacacgcaggcattaggctat

SEQ ID NO: 1586198 - DNA, 25 bp, Homo sapien
actcctatgggagggacagctgctc

SEQ ID NO: 1586199 - DNA, 25 bp, Homo sapien
caactcgggtagggggaaggtgctg

SEQ ID NO: 1586200 - DNA, 25 bp, Homo sapien
tctcggctctgaacggtggaaatcc

SEQ ID NO: 1586201 - DNA, 25 bp, Homo sapien
gatgtcagtcttcacacaccgcgta

SEQ ID NO: 1586202 - DNA, 25 bp, Homo sapien
tgaactcagcgctaaccgatctggg

SEQ ID NO: 1586203 - DNA, 25 bp, Homo sapien
taacgaacgaatgcagactcagcca

SEQ ID NO: 1586204 - DNA, 25 bp, Homo sapien
tttggccggtagagcacagagacag

SEQ ID NO: 1586205 - DNA, 25 bp, Homo sapien
tctgcatgacatgggactgtgccct

SEQ ID NO: 1586206 - DNA, 25 bp, Homo sapien
tggacactaggcacgaggaaaagca

SEQ ID NO: 1586207 - DNA, 25 bp, Homo sapien
tgaacgttgagatgagaccacagcc

SEQ ID NO: 1586208 - DNA, 25 bp, Homo sapien
acttggcatcagtgttgaaaatgca

SEQ ID NO: 1586209 - DNA, 25 bp, Homo sapien
ccttggccataaggtgccaagggct

SEQ ID NO: 1586210 - DNA, 25 bp, Homo sapien
agtgttgaaaatgcatcagagtccc

SEQ ID NO: 1586211 - DNA, 25 bp, Homo sapien
tgccaagggctgctgctagtgccca

SEQ ID NO: 1586212 - DNA, 25 bp, Homo sapien
cagggagccgagcagcatgaagaag

SEQ ID NO: 1586213 - DNA, 25 bp, Homo sapien
tgggccttctcaaaatctgtctcga

SEQ ID NO: 1586214 - DNA, 25 bp, Homo sapien
agagaggatctttttcgagcgatgg

SEQ ID NO: 1586215 - DNA, 25 bp, Homo sapien
gcagagcgttgaagcacgtggccag

SEQ ID NO: 1586216 - DNA, 25 bp, Homo sapien
aagtcccacgatgtgctaccgagcc

SEQ ID NO: 1586217 - DNA, 25 bp, Homo sapien
taccgagcccaaccacacagttgga
